United States Patent Application Publication US 2011/0183924 A1 - sequence listing, part 42

SEQ ID NO: 102246 - DNA, 1946 bp, Homo sapiens
cggctttgcagagcagacagatctggtgtctccagtttacagaagcacttgcagaactcatcagaagccaccccgcttatcagcagatctcaagagagcgttcggtggaggccctgggtctgcacagctcacctccctgggaactgctcgcccgagcgtcggagccggcgctggccccctgcagccggaaggttgcagccgcaggagccccggaggcccaggacacagggtgaatatgcaggttttgatgagacgcagccaacagctgaatctggtggaaaaggaaaagtgattaaacttttaaaggaaaaatttcattttaagaaaataatcatgattggagatggtgccacagatatggaagcctgtcctcctgctgatgctttcattggatttggaggaaatgtgatcaggcaacaagtcaaggataacgccaaatggtatatcactgattttgtagagctgctgggagaactggaagaataacatccattgtcgtacagctccaaacaacttcagatgaatttttacaagttatacagattgatactgtttgcttacagttgcctattacaacttgctatagaaagttggtacaaatgatctgtactttaaactacagttaggaatcctagaagattgctttttttttttttttaactgtagttccagtattatatgatgactattgatttcctggagaggttttttttttttttgagacagaatcttgctctgttgcccaggctggagtgcagtggcgcggtctcggctcactgcaagctctgcctcccaggttcacgccattctcctgcctcagcctcccgagtagctgggactacaggcgcccgccaccacatccggctaattttttgtatttttagtagagacggggtttgaccgtgttagccaggatggtcttgatctcctgaccttgtgatccgcctgcctcagcctcccaaagtgctgggattacaggcttgggccaccgcgcccagccaatgtcctagagagttttgtgatctgaattctttatgtatatttgtagctatatttcatacaaagtgctttaagtgtggagagtcaattaaacacctttactcttagaaatacggattcggcagccttcagtgaatattggtttctctttggtatgtcaataaaagtttatccgtatgtcagaacggatttgtggaattttcagttctgcctcttgcatattggaatacccaatatttcaggtaccgtgttgaagcataaatagcccccaggcaagaaacaggcttaagactctactttgcttagtgctgggtacaatgtcctcaccccatgagcccactcccacttcctgaagccctgggacctggaaagtcctttttttttacttcttgggattgtcatatatgaaatgttacaaaagttttttgtttttgttttcctccaatataacaatagagtcttaaacaaaagtactgattaaaaatggatatttgggctcaggcctgtaatctcagcactgtgggaggacaagttaagaggatcacttgaggacaggaattcgagaccagcctggacaacagagcaagaccctgtctctgcaaaaaataaaaacattagctggatgtggcggcacgcacctgtagtcccagctacttggtgggctgagatgggaggatcccttgaactcagtagttcaaggctgcagtgagctgtgactctgccattgtactccagcctgggtgacagtgagaccccgtctcttaaaaaaaaaaaaaaaaaaaggattttcgaaattcacttaaggtaaaagaattaaaaacaggtttttactaattcacaagggccagcattttcccctaaatgaattaaatattaataactcctaacagcctatataaaccatttcttttttataaatgacttggaaatactcgaaagccaggttt

SEQ ID NO: 102247 - DNA, 955 bp, Homo sapiens
cccggcattccgtgctccttggttccggcgttggagctctttggggcccagctttgcggacccgggagctcgggacgcaggcggggcttgtgctccgcgggggcagggcgtagggtgggcctcctacctcccctgatctcgcggtttgttccgtttcattggagcttcccggaccgtgtgctcgacggtgccctaggtgccgtggggccacacgcgagtctgataagcaccctcccccggaatcatgcggtgctgtgaggcctagcgaagatgaagatagaatgcaaggtagaaagtgctggatacctttagaaagctgcaggactggtgcgatgggagttgagacgtaagaacctgcccgtccgtagggctctggatgctgctgaggcccgaggcccctatggcagatttgaaaattcacccttgtagagtcattcctgcctttgagcggactcccttttaagagtcttaaacaaaagtactgattaaaaatggatatttgggctcaggcctgtaatctcagcactgtgggaggacaagttaagaggatcacttgaggacaggaattcgagaccagcctggacaacagagcaagaccctgtctctgcaaaaaataaaaacattagctggatgtggcggcacgcacctgtagtcccagctacttggtgggctgagatgggaggatcccttgaactcagtagttcaaggctgcagtgagctgtgactctgccattgtactccagcctgggtgacagtgagaccccgtctcttaaaaaaaaaaaaaaaaaaaggattttcgaaattcacttaaggtaaaagaattaaaaacaggtttttactaattcacaagggccagcattttcccctaaatgaattaaatattaataactcctaacagcctatataaaccatttcttttttataaatgacttggaaatactcgaaagccaggttt

SEQ ID NO: 102248 - DNA, 1629 bp, Homo sapiens
catgcgtggggggcacaggctccctggctggcgtcagctaaagtggctgttgggtgtccgcaggcttctgcctggccgccgccgcctataagctaccaggaggagctttacgacttcccgtcctgcgggaagtggcgggcacgatcgcaaggtagcgcagaagcttctcaatggccagcgccagctgcagccccggcggcgcactcgcctcacctgagcctgggaggaaaattcttccagcgatggtctcccactcagagctgaggaagcttttctactcagcagatgctgtgtgttttgatgttgacagcacggtcatcagagaagaaggaatcgatgagctagccaaaatctgtggcgttgaggacgcggtgtcagaaatgacacggcgagccatgggcggggcagtgcctttcaaagctgctctcacagagcgcttagccctcatccagccctccagggagcaggtgcagagactcatagcagagcaacccccacacctgacccccggcataagggagctggtaagtcgcctacaggagcgaaatgttcaggttttcctaatatctggtggctttaggagtattgtagagcatgttgcttcaaagctcaatatcccagcaaccaatgtatttgccaataggctgaaattctactttaacggtgaatatgcaggttttgatgagacgcagccaacagctgaatctggtggaaaaggaaaagtgattaaacttttaaaggaaaaatttcattttaagaaaataatcatgattggagatggtgccacagatatggaagcctgtcctcctgctgatgctttcattggatttggaggaaatgtgatcaggcaacaagtcaaggataacgccaaatggtatatcactgattttgtagagctgctgggagaactggaagaataacatccattgtcgtacagctccaaacaacttcagatgaatttttacaagttatacagattgatactgtttgcttacagttgcctattacaacttgctatagaaagttggtacaaatgatctgtactttaaactacagttaggaatcctagaagattgctttttttttttttttaactgtagttccagtattatatgatgactattgatttcctggagaggttttttttttttttgagacagaatcttgctctgttgcccaggctggagtgcagtggcgcggtctcggctcactgcaagctctgcctcccaggttcacgccattctcctgcctcagcctcccgagtagctgggactacaggcgcccgccaccacatccggctaattttttgtatttttagtagagacggggtttgaccgtgttagccaggatggtcttgatctcctgaccttgtgatccgcctgcctcagcctcccaaagtgctgggattacaggcttgggccaccgcgcccagccaatgtcctagagagttttgtgatctgaattctttatgtatatttgtagctatatttcatacaaagtgctttaagtgtggagagtcaattaaacacctttactcttagaaatacggattcggcagccttcagtgaatattggtttctctttggtatgtcaataaaagtttatccgtatgtcagaacggatttgtgg

SEQ ID NO: 102249 - DNA, 950 bp, Homo sapiens
catgcgtggggggcacaggctccctggctggcgtcagctaaagtggctgttgggtgtccgcaggcttctgcctggccgccgccgcctataagctaccaggaggagctttacgacttcccgtcctgcgggaagtggcgggcacgatcgcaaggtagcgcagaagcttctcaatggccagcgccagctgcagccccggcggcgcactcgcctcacctgagcctgggaggaaaattcttccagcgatggtctcccactcagagctgaggaagcttttctactcagcagatgctgtgtgttttgatgttgacagcacggtcatcagagaagaaggaatcgatctgtcaccaggctggagtgcaatggtgcaatctcggctcactgcaacctccgcctcctgggttcaagcaattctcctgcctccacctcctgagtagctgaaactacaggatgctttcattggatttggaggaaatgtgatcaggcaacaagtcaaggataacgccaaatggtatatcactgattttgtagagctgctgggagaaccggaagaataacatccattgtcatacagctccaaacaacttcagatgaatttttacaagttacacagattgatactgtttgcttacaattgcctattacaacttgctatagaaagttggtacagatgatctgcactgtcaagtaaactacagttaggaatcctcaaagattggtttgtttgtttttaactgtagttccagtattatatgatcactatcgatttcctggagagttttgtaatctgaattctttatgtatattcctagctatatttcatacaaagtgttttaagagtggagagtcaattaaacacctttactcttaggaatatagattcggcagccttcagtgaatattggtttttttccctttggtatgtcaataaaagtttatccatgtgtcagaac

SEQ ID NO: 102250 - DNA, 2941 bp, Homo sapiens
cccggcattccgtgctccttggttccggcgttggagctctttggggcccagctttgcggacccgggagctcgggacgcaggcggggcttgtgctccgcgggggcagggcgtagggtgggcctcctacctcccctgatctcgcggtttgttccgtttcattggagcttcccggaccgtgtgctcgacggtgccctaggtgccgtggggccacacgcgagtctgataagcaccctcccccggaatcatgcggtgctgtgaggcctagcgaagatgaagatagaatgcaaggtagaaagtgctggatacctttagaaagctgcaggactggtgcgatgggagttgagacgtaagaacctgcccgtccgtagggctctggatgctgctgaggcccgaggcccctatggcagatttgaaaattcacccttgtagagtcattcctgcctttgagcggactcccttttaagtttacagaagcacttgcagaactcatcagaagccaccccgcttatcagcagatctcaagagagcgttcggtggaggccctgggtctgcacagctcacctccctgggaactgctcgcccgagcgtcggagccggcgctggccccctgcagccggaaggttgcagccgcaggagccccggaggcccaggacacagggctcttgctcttgcagaatccacaggtctttcttgaggaaatctgtagacagaactttgtgctgcgtttttatctagggaaggaacagaagagtgtcgtctcctagaaatctagcactggagaaacgaggaaaattcttccagcgatggtctcccactcagagctgaggaagcttttctactcagcagatgctgtgtgttttgatgttgacagcacggtcatcagagaagaaggaatcgatgagctagccaaaatctgtggcgttgaggacgcggtgtcagaaatgacacggcgagccatgggcggggcagtgcctttcaaagctgctctcacagagcgcttagccctcatccagccctccagggagcaggtgcagagactcatagcagagcaacccccacacctgacccccggcataagggagctggtaagtcgcctacaggagcgaaatgttcaggttttcctaatatctggtggctttaggagtattgtagagcatgttgcttcaaagctcaatatcccagcaaccaatgtatttgccaataggctgaaattctactttaacggtgaatatgcaggttttgatgagacgcagccaacagctgaatctggtggaaaaggaaaagtgattaaacttttaaaggaaaaatttcattttaagaaaataatcatgattggagatggtgccacagatatggaagcctgtcctcctgctgatgctttcattggatttggaggaaatgtgatcaggcaacaagtcaaggataacgccaaatggtatatcactgattttgtagagctgctgggagaactggaagaataacatccattgtcgtacagctccaaacaacttcagatgaatttttacaagttatacagattgatactgtttgcttacagttgcctattacaacttgctatagaaagttggtacaaatgatctgtactttaaactacagttaggaatcctagaagattgctttttttttttttttaactgtagttccagtattatatgatgactattgatttcctggagaggttttttttttttttgagacagaatcttgctctgttgcccaggctggagtgcagtggcgcggtctcggctcactgcaagctctgcctcccaggttcacgccattctcctgcctcagcctcccgagtagctgggactacaggcgcccgccaccacatccggctaattttttgtatttttagtagagacggggtttgaccgtgttagccaggatggtcttgatctcctgaccttgtgatccgcctgcctcagcctcccaaagtgctgggattacaggcttgggccaccgcgcccagccaatgtcctagagagttttgtgatctgaattctttatgtatatttgtagctatatttcatacaaagtgctttaagtgtggagagtcaattaaacacctttactcttagaaatacggattcggcagccttcagtgaatattggtttctctttggtatgtcaataaaagtttatccgtatgtcagaacggatttgtggaattttcagttctgcctcttgcatattggaatacccaatatttcaggtaccgtgttgaagcataaatagcccccaggcaagaaacaggcttaagactctactttgcttagtgctgggtacaatgtcctcaccccatgagcccactcccacttcctgaagccctgggacctggaaagtcctttttttttacttcttgggattgtcatatatgaaatgttacaaaagttttttgtttttgttttcctccaatataacaatagagtcttaaacaaaagtactgattaaaaatggatatttgggctcaggcctgtaatctcagcactgtgggaggacaagttaagaggatcacttgaggacaggaattcgagaccagcctggacaacagagcaagaccctgtctctgcaaaaaataaaaacattagctggatgtggcggcacgcacctgtagtcccagctacttggtgggctgagatgggaggatcccttgaactcagtagttcaaggctgcagtgagctgtgactctgccattgtactccagcctgggtgacagtgagaccccgtctcttaaaaaaaaaaaaaaaaaaaggattttcgaaattcacttaaggtaaaagaattaaaaacaggtttttactaattcacaagggccagcattttcccctaaatgaattaaatattaataactcctaacagcctatataaaccatttcttttttataaatgacttggaaatactcgaaagccaggttt

SEQ ID NO: 102251 - DNA, 3055 bp, Homo sapiens
cccggcattccgtgctccttggttccggcgttggagctctttggggcccagctttgcggacccgggagctcgggacgcaggcggggcttgtgctccgcgggggcagggcgtagggtgggcctcctacctcccctgatctcgcggtttgttccgtttcattggagcttcccggaccgtgtgctcgacggtgccctaggtgccgtggggccacacgcgagtctgataagcaccctcccccggaatcatgcggtgctgtgaggcctagcgaagatgaagatagaatgcaaggtagaaagtgctggatacctttagaaagctgcaggactggtgcgatgggagttgagacgtaagaacctgcccgtccgtagggctctggatgctgctgaggcccgaggcccctatggcagatttgaaaattcacccttgtagagtcattcctgcctttgagcggactcccttttaagtttacagaagcacttgcagaactcatcagaagccaccccgcttatcagcagatctcaagagagcgttcggtggaggccctgggtctgcacagctcacctccctgggaactgctcgcccgagcgtcggagccggcgctggccccctgcagccggaaggttgcagccgcaggagccccggaggcccaggacacaggacagagtctcgttctgtcgcccaggctggagtgcagtggtgtgatctcggctcacttcaacctccgcctacagggttcaagggattctcctgcctcagcctcctgagtatctgggctcttgctcttgcagaatccacaggtctttcttgaggaaatctgtagacagaactttgtgctgcgtttttatctagggaaggaacagaagagtgtcgtctcctagaaatctagcactggagaaacgaggaaaattcttccagcgatggtctcccactcagagctgaggaagcttttctactcagcagatgctgtgtgttttgatgttgacagcacggtcatcagagaagaaggaatcgatgagctagccaaaatctgtggcgttgaggacgcggtgtcagaaatgacacggcgagccatgggcggggcagtgcctttcaaagctgctctcacagagcgcttagccctcatccagccctccagggagcaggtgcagagactcatagcagagcaacccccacacctgacccccggcataagggagctggtaagtcgcctacaggagcgaaatgttcaggttttcctaatatctggtggctttaggagtattgtagagcatgttgcttcaaagctcaatatcccagcaaccaatgtatttgccaataggctgaaattctactttaacggtgaatatgcaggttttgatgagacgcagccaacagctgaatctggtggaaaaggaaaagtgattaaacttttaaaggaaaaatttcattttaagaaaataatcatgattggagatggtgccacagatatggaagcctgtcctcctgctgatgctttcattggatttggaggaaatgtgatcaggcaacaagtcaaggataacgccaaatggtatatcactgattttgtagagctgctgggagaactggaagaataacatccattgtcgtacagctccaaacaacttcagatgaatttttacaagttatacagattgatactgtttgcttacagttgcctattacaacttgctatagaaagttggtacaaatgatctgtactttaaactacagttaggaatcctagaagattgctttttttttttttttaactgtagttccagtattatatgatgactattgatttcctggagaggttttttttttttttgagacagaatcttgctctgttgcccaggctggagtgcagtggcgcggtctcggctcactgcaagctctgcctcccaggttcacgccattctcctgcctcagcctcccgagtagctgggactacaggcgcccgccaccacatccggctaattttttgtatttttagtagagacggggtttgaccgtgttagccaggatggtcttgatctcctgaccttgtgatccgcctgcctcagcctcccaaagtgctgggattacaggcttgggccaccgcgcccagccaatgtcctagagagttttgtgatctgaattctttatgtatatttgtagctatatttcatacaaagtgctttaagtgtggagagtcaattaaacacctttactcttagaaatacggattcggcagccttcagtgaatattggtttctctttggtatgtcaataaaagtttatccgtatgtcagaacggatttgtggaattttcagttctgcctcttgcatattggaatacccaatatttcaggtaccgtgttgaagcataaatagcccccaggcaagaaacaggcttaagactctactttgcttagtgctgggtacaatgtcctcaccccatgagcccactcccacttcctgaagccctgggacctggaaagtcctttttttttacttcttgggattgtcatatatgaaatgttacaaaagttttttgtttttgttttcctccaatataacaatagagtcttaaacaaaagtactgattaaaaatggatatttgggctcaggcctgtaatctcagcactgtgggaggacaagttaagaggatcacttgaggacaggaattcgagaccagcctggacaacagagcaagaccctgtctctgcaaaaaataaaaacattagctggatgtggcggcacgcacctgtagtcccagctacttggtgggctgagatgggaggatcccttgaactcagtagttcaaggctgcagtgagctgtgactctgccattgtactccagcctgggtgacagtgagaccccgtctcttaaaaaaaaaaaaaaaaaaaggattttcgaaattcacttaaggtaaaagaattaaaaacaggtttttactaattcacaagggccagcattttcccctaaatgaattaaatattaataactcctaacagcctatataaaccatttcttttttataaatgacttggaaatactcgaaagccaggttt

SEQ ID NO: 102252 - DNA, 2892 bp, Homo sapiens
cccggcattccgtgctccttggttccggcgttggagctctttggggcccagctttgcggacccgggagctcgggacgcaggcggggcttgtgctccgcgggggcagggcgtagggtgggcctcctacctcccctgatctcgcggtttgttccgtttcattggagcttcccggaccgtgtgctcgacggtgccctaggtgccgtggggccacacgcgagtctgataagcaccctcccccggaatcatgcggtgctgtgaggcctagcgaagatgaagatagaatgcaaggtagaaagtgctggatacctttagaaagctgcaggactggtgcgatgggagttgagacgtaagaacctgcccgtccgtagggctctggatgctgctgaggcccgaggcccctatggcagatttgaaaattcacccttgtagagtcattcctgcctttgagcggactcccttttaagagatctcaagagagcgttcggtggaggccctgggtctgcacagctcacctccctgggaactgctcgcccgagcgtcggagccggcgctggccccctgcagccggaaggttgcagccgcaggagccccggaggcccaggacacagggctcttgctcttgcagaatccacaggtctttcttgaggaaatctgtagacagaactttgtgctgcgtttttatctagggaaggaacagaagagtgtcgtctcctagaaatctagcactggagaaacgaggaaaattcttccagcgatggtctcccactcagagctgaggaagcttttctactcagcagatgctgtgtgttttgatgttgacagcacggtcatcagagaagaaggaatcgatgagctagccaaaatctgtggcgttgaggacgcggtgtcagaaatgacacggcgagccatgggcggggcagtgcctttcaaagctgctctcacagagcgcttagccctcatccagccctccagggagcaggtgcagagactcatagcagagcaacccccacacctgacccccggcataagggagctggtaagtcgcctacaggagcgaaatgttcaggttttcctaatatctggtggctttaggagtattgtagagcatgttgcttcaaagctcaatatcccagcaaccaatgtatttgccaataggctgaaattctactttaacggtgaatatgcaggttttgatgagacgcagccaacagctgaatctggtggaaaaggaaaagtgattaaacttttaaaggaaaaatttcattttaagaaaataatcatgattggagatggtgccacagatatggaagcctgtcctcctgctgatgctttcattggatttggaggaaatgtgatcaggcaacaagtcaaggataacgccaaatggtatatcactgattttgtagagctgctgggagaactggaagaataacatccattgtcgtacagctccaaacaacttcagatgaatttttacaagttatacagattgatactgtttgcttacagttgcctattacaacttgctatagaaagttggtacaaatgatctgtactttaaactacagttaggaatcctagaagattgctttttttttttttttaactgtagttccagtattatatgatgactattgatttcctggagaggttttttttttttttgagacagaatcttgctctgttgcccaggctggagtgcagtggcgcggtctcggctcactgcaagctctgcctcccaggttcacgccattctcctgcctcagcctcccgagtagctgggactacaggcgcccgccaccacatccggctaattttttgtatttttagtagagacggggtttgaccgtgttagccaggatggtcttgatctcctgaccttgtgatccgcctgcctcagcctcccaaagtgctgggattacaggcttgggccaccgcgcccagccaatgtcctagagagttttgtgatctgaattctttatgtatatttgtagctatatttcatacaaagtgctttaagtgtggagagtcaattaaacacctttactcttagaaatacggattcggcagccttcagtgaatattggtttctctttggtatgtcaataaaagtttatccgtatgtcagaacggatttgtggaattttcagttctgcctcttgcatattggaatacccaatatttcaggtaccgtgttgaagcataaatagcccccaggcaagaaacaggcttaagactctactttgcttagtgctgggtacaatgtcctcaccccatgagcccactcccacttcctgaagccctgggacctggaaagtcctttttttttacttcttgggattgtcatatatgaaatgttacaaaagttttttgtttttgttttcctccaatataacaatagagtcttaaacaaaagtactgattaaaaatggatatttgggctcaggcctgtaatctcagcactgtgggaggacaagttaagaggatcacttgaggacaggaattcgagaccagcctggacaacagagcaagaccctgtctctgcaaaaaataaaaacattagctggatgtggcggcacgcacctgtagtcccagctacttggtgggctgagatgggaggatcccttgaactcagtagttcaaggctgcagtgagctgtgactctgccattgtactccagcctgggtgacagtgagaccccgtctcttaaaaaaaaaaaaaaaaaaaggattttcgaaattcacttaaggtaaaagaattaaaaacaggtttttactaattcacaagggccagcattttcccctaaatgaattaaatattaataactcctaacagcctatataaaccatttcttttttataaatgacttggaaatactcgaaagccaggttt

SEQ ID NO: 102253 - DNA, 2708 bp, Homo sapiens
cccggcattccgtgctccttggttccggcgttggagctctttggggcccagctttgcggacccgggagctcgggacgcaggcggggcttgtgctccgcgggggcagggcgtagggtgggcctcctacctcccctgatctcgcggtttgttccgtttcattggagcttcccggaccgtgtgctcgacggtgccctaggtgccgtggggccacacgcgagtctgataagcaccctcccccggaatcatgcggtgctgtgaggcctagcgaagatgaagatagaatgcaaggtagaaagtgctggatacctttagaaagctgcaggactggtgcgatgggagttgagacgtaagaacctgcccgtccgtagggctctggatgctgctgaggcccgaggcccctatggcagatttgaaaattcacccttgctcttgctcttgcagaatccacaggtctttcttgaggaaatctgtagacagaactttgtgctgcgtttttatctagggaaggaacagaagagtgtcgtctcctagaaatctagcactggagaaacgaggaaaattcttccagcgatggtctcccactcagagctgaggaagcttttctactcagcagatgctgtgtgttttgatgttgacagcacggtcatcagagaagaaggaatcgatgagctagccaaaatctgtggcgttgaggacgcggtgtcagaaatgacacggcgagccatgggcggggcagtgcctttcaaagctgctctcacagagcgcttagccctcatccagccctccagggagcaggtgcagagactcatagcagagcaacccccacacctgacccccggcataagggagctggtaagtcgcctacaggagcgaaatgttcaggttttcctaatatctggtggctttaggagtattgtagagcatgttgcttcaaagctcaatatcccagcaaccaatgtatttgccaataggctgaaattctactttaacggtgaatatgcaggttttgatgagacgcagccaacagctgaatctggtggaaaaggaaaagtgattaaacttttaaaggaaaaatttcattttaagaaaataatcatgattggagatggtgccacagatatggaagcctgtcctcctgctgatgctttcattggatttggaggaaatgtgatcaggcaacaagtcaaggataacgccaaatggtatatcactgattttgtagagctgctgggagaactggaagaataacatccattgtcgtacagctccaaacaacttcagatgaatttttacaagttatacagattgatactgtttgcttacagttgcctattacaacttgctatagaaagttggtacaaatgatctgtactttaaactacagttaggaatcctagaagattgctttttttttttttttaactgtagttccagtattatatgatgactattgatttcctggagaggttttttttttttttgagacagaatcttgctctgttgcccaggctggagtgcagtggcgcggtctcggctcactgcaagctctgcctcccaggttcacgccattctcctgcctcagcctcccgagtagctgggactacaggcgcccgccaccacatccggctaattttttgtatttttagtagagacggggtttgaccgtgttagccaggatggtcttgatctcctgaccttgtgatccgcctgcctcagcctcccaaagtgctgggattacaggcttgggccaccgcgcccagccaatgtcctagagagttttgtgatctgaattctttatgtatatttgtagctatatttcatacaaagtgctttaagtgtggagagtcaattaaacacctttactcttagaaatacggattcggcagccttcagtgaatattggtttctctttggtatgtcaataaaagtttatccgtatgtcagaacggatttgtggaattttcagttctgcctcttgcatattggaatacccaatatttcaggtaccgtgttgaagcataaatagcccccaggcaagaaacaggcttaagactctactttgcttagtgctgggtacaatgtcctcaccccatgagcccactcccacttcctgaagccctgggacctggaaagtcctttttttttacttcttgggattgtcatatatgaaatgttacaaaagttttttgtttttgttttcctccaatataacaatagagtcttaaacaaaagtactgattaaaaatggatatttgggctcaggcctgtaatctcagcactgtgggaggacaagttaagaggatcacttgaggacaggaattcgagaccagcctggacaacagagcaagaccctgtctctgcaaaaaataaaaacattagctggatgtggcggcacgcacctgtagtcccagctacttggtgggctgagatgggaggatcccttgaactcagtagttcaaggctgcagtgagctgtgactctgccattgtactccagcctgggtgacagtgagaccccgtctcttaaaaaaaaaaaaaaaaaaaggattttcgaaattcacttaaggtaaaagaattaaaaacaggtttttactaattcacaagggccagcattttcccctaaatgaattaaatattaataactcctaacagcctatataaaccatttcttttttataaatgacttggaaatactcgaaagccaggttt

SEQ ID NO: 102254 - DNA, 1769 bp, Homo sapiens
cccggcattccgtgctccttggttccggcgttggagctctttggggcccagctttgcggacccgggagctcgggacgcaggcggggcttgtgctccgcgggggcagggcgtagggtgggcctcctacctcccctgatctcgcggtttgttccgtttcattggagcttcccggaccgtgtgctcgacggtgccctaggtgccgtggggccacacgcgagtctgataagcaccctcccccggaatcatgcggtgctgtgaggcctagcgaagatgaagatagaatgcaagtttacagaagcacttgcagaactcatcagaagccaccccgcttatcagcagatctcaagagagcgttcggtggaggccctgggtctgcacagctcacctccctgggaactgctcgcccgagcgtcggagccggcgctggccccctgcagccggaaggttgcagccgcaggagccccggaggcccaggacacagggctcttgctcttgcagaatccacaggtctttcttgaggaaatctgtagacagaactttgtgctgcgtttttatctagggaaggaacagaagagtgtcgtctcctagaaatctagcactggagaaacgaggaaaattcttccagcgatggtctcccactcagagctgaggaagcttttctactcagcagatgctgtgtgttttgatgttgacagcacggtcatcagagaagaaggaatcgatgagctagccaaaatctgtggcgttgaggacgcggtgtcagaaatgacacggcgagccatgggcggggcagtgcctttcaaagctgctctcacagagcgcttagccctcatccagccctccagggagcaggtgcagagactcatagcagagcaacccccacacctgacccccggcataagggagctggtaagtcgcctacaggagcgaaatgttcaggttttcctaatatctggtggctttaggagtattgtagagcatgttgcttcaaagctcaatatcccagcaaccaatgtatttgccaataggctgaaattctactttaacggtgaatatgcaggttttgatgagacgcagccaacagctgaatctggtggaaaaggaaaagtgattaaacttttaaaggaaaaatttcattttaagaaaataatcatgattggagatggtgccacagatatggaagcctgtcctcctgctgatgctttcattggatttggaggaaatgtgatcaggcaacaagtcaaggataacgccaaatggtatatcactgattttgtagagctgctgggagaactggaagaataacatccattgtcgtacagctccaaacaacttcagatgaatttttacaagttatacagattgatactgtttgcttacagttgcctattacaacttgctatagaaagttggtacaaatgatctgtactttaaactacagttaggaatcctagaagattgctttttttttttttttaactgtagttccagtattatatgatgactattgatttcctggagaggttttttttttttttgagacagaatgtactccagcctgggtgacagtgagaccccgtctcttaaaaaaaaaaaaaaaaaaaggattttcgaaattcacttaaggtaaaagaattaaaaacaggtttttactaattcacaagggccagcattttcccctaaatgaattaaatattaataactcctaacagcctatataaaccatttcttttttataaatgacttggaaatactcgaaagccaggttt

SEQ ID NO: 102255 - DNA, 2377 bp, Homo sapiens
cggctttgcagagcagacagatctggtgtctccagtttacagaagcacttgcagaactcatcagaagccaccccgcttatcagcagatctcaagagagcgttcggtggaggccctgggtctgcacagctcacctccctgggaactgctcgcccgagcgtcggagccggcgctggccccctgcagccggaaggttgcagccgcaggagccccggaggcccaggacacagggctcttgctcttgcagaatccacaggtctttcttgaggaaatctgtagacagaactttgtgctgcgtttttatctagggaaggaacagaagagtgtcgtctcctagaaatctagcactggagaaacgaggaaaattcttccagcgatggtctcccactcagagctgaggaagcttttctactcagcagatgctgtgtgttttgatgttgacagcacggtcatcagagaagaaggaatcgatgagctagccaaaatctgtggcgttgaggacgcggtgtcagaaatggagctggtaagtcgcctacaggagcgaaatgttcaggttttcctaatatctggtggctttaggagtattgtagagcatgttgcttcaaagctcaatatcccagcaaccaatgtatttgccaataggctgaaattctactttaacggtgaatatgcaggttttgatgagacgcagccaacagctgaatctggtggaaaaggaaaagtgattaaacttttaaaggaaaaatttcattttaagaaaataatcatgattggagatggtgccacagatatggaagcctgtcctcctgctgatgctttcattggatttggaggaaatgtgatcaggcaacaagtcaaggataacgccaaatggtatatcactgattttgtagagctgctgggagaactggaagaataacatccattgtcgtacagctccaaacaacttcagatgaatttttacaagttatacagattgatactgtttgcttacagttgcctattacaacttgctatagaaagttggtacaaatgatctgtactttaaactacagttaggaatcctagaagattgctttttttttttttttaactgtagttccagtattatatgatgactattgatttcctggagaggttttttttttttttgagacagaatcttgctctgttgcccaggctggagtgcagtggcgcggtctcggctcactgcaagctctgcctcccaggttcacgccattctcctgcctcagcctcccgagtagctgggactacaggcgcccgccaccacatccggctaattttttgtatttttagtagagacggggtttgaccgtgttagccaggatggtcttgatctcctgaccttgtgatccgcctgcctcagcctcccaaagtgctgggattacaggcttgggccaccgcgcccagccaatgtcctagagagttttgtgatctgaattctttatgtatatttgtagctatatttcatacaaagtgctttaagtgtggagagtcaattaaacacctttactcttagaaatacggattcggcagccttcagtgaatattggtttctctttggtatgtcaataaaagtttatccgtatgtcagaacggatttgtggaattttcagttctgcctcttgcatattggaatacccaatatttcaggtaccgtgttgaagcataaatagcccccaggcaagaaacaggcttaagactctactttgcttagtgctgggtacaatgtcctcaccccatgagcccactcccacttcctgaagccctgggacctggaaagtcctttttttttacttcttgggattgtcatatatgaaatgttacaaaagttttttgtttttgttttcctccaatataacaatagagtcttaaacaaaagtactgattaaaaatggatatttgggctcaggcctgtaatctcagcactgtgggaggacaagttaagaggatcacttgaggacaggaattcgagaccagcctggacaacagagcaagaccctgtctctgcaaaaaataaaaacattagctggatgtggcggcacgcacctgtagtcccagctacttggtgggctgagatgggaggatcccttgaactcagtagttcaaggctgcagtgagctgtgactctgccattgtactccagcctgggtgacagtgagaccccgtctcttaaaaaaaaaaaaaaaaaaaggattttcgaaattcacttaaggtaaaagaattaaaaacaggtttttactaattcacaagggccagcattttcccctaaatgaattaaatattaataactcctaacagcctatataaaccatttcttttttataaatgacttggaaatactcgaaagccaggttt

SEQ ID NO: 102256 - DNA, 1905 bp, Homo sapiens
catgcgtggggggcacaggctccctggctggcgtcagctaaagtggctgttgggtgtccgcaggcttctgcctggccgccgccgcctataagctaccaggaggagctttacgacttcccgtcctgcgggaagtggcgggcacgatcgcaaggtagcgcagaagcttctcaatggccagcgccagctgcagccccggcggcgcactcgcctcacctgagcctgggaggaaaattcttccagcgatggtctcccactcagagctgaggaagcttttctactcagcagatgctgtgtgttttgatgttgacagcacggtcatcagagaagaaggaatcgagatgctttcattggatttggaggaaatgtgatcaggcaacaagtcaaggataacgccaaatggtatatcactgattttgtagagctgctgggagaactggaagaataacatccattgtcgtacagctccaaacaacttcagatgaatttttacaagttatacagattgatactgtttgcttacagttgcctattacaacttgctatagaaagttggtacaaatgatctgtactttaaactacagttaggaatcctagaagattgctttttttttttttttaactgtagttccagtattatatgatgactattgatttcctggagaggttttttttttttttgagacagaatcttgctctgttgcccaggctggagtgcagtggcgcggtctcggctcactgcaagctctgcctcccaggttcacgccattctcctgcctcagcctcccgagtagctgggactacaggcgcccgccaccacatccggctaattttttgtatttttagtagagacggggtttgaccgtgttagccaggatggtcttgatctcctgaccttgtgatccgcctgcctcagcctcccaaagtgctgggattacaggcttgggccaccgcgcccagccaatgtcctagagagttttgtgatctgaattctttatgtatatttgtagctatatttcatacaaagtgctttaagtgtggagagtcaattaaacacctttactcttagaaatacggattcggcagccttcagtgaatattggtttctctttggtatgtcaataaaagtttatccgtatgtcagaacggatttgtggaattttcagttctgcctcttgcatattggaatacccaatatttcaggtaccgtgttgaagcataaatagcccccaggcaagaaacaggcttaagactctactttgcttagtgctgggtacaatgtcctcaccccatgagcccactcccacttcctgaagccctgggacctggaaagtcctttttttttacttcttgggattgtcatatatgaaatgttacaaaagttttttgtttttgttttcctccaatataacaatagagtcttaaacaaaagtactgattaaaaatggatatttgggctcaggcctgtaatctcagcactgtgggaggacaagttaagaggatcacttgaggacaggaattcgagaccagcctggacaacagagcaagaccctgtctctgcaaaaaataaaaacattagctggatgtggcggcacgcacctgtagtcccagctacttggtgggctgagatgggaggatcccttgaactcagtagttcaaggctgcagtgagctgtgactctgccattgtactccagcctgggtgacagtgagaccccgtctcttaaaaaaaaaaaaaaaaaaaggattttcgaaattcacttaaggtaaaagaattaaaaacaggtttttactaattcacaagggccagcattttcccctaaatgaattaaatattaataactcctaacagcctatataaaccatttcttttttataaatgacttggaaatactcgaaagccaggttt

SEQ ID NO: 102257 - DNA, 668 bp, Homo sapiens
cccggcattccgtgctccttggttccggcgttggagctctttggggcccagctttgcggacccgggagctcgggacgcaggcggggcttgtgctccgcgggggcagggcgtagggtgggcctcctacctcccctgatctcgcggtttgttccgtttcattggagcttcccggaccgtgtgctcgacggtgccctaggtgccgtggggccacacgcgagtctgataagcaccctcccccggaatcatgcggtgctgtgaggcctagcgaagatgaagatagaatgcaaggtagaaagtgctggatacctttagaaagctgcaggactggtgcgatgggagttgagacgtaagaacctgcccgtccgtagggctctggatgctgctgaggcccgaggcccctatggcagatttgaaaattcacccttgtagagtcattcctgcctttgagcggactcccttttaaggtaaatttccaaagagctccacaattgtttccagtatccagtgtcccgccaaataccagggattcagtaacacgtggtattttactttatttattttctttttgtaaacatagggtctcactatgttgcccagggtggtctcaaactcctgagctcaagtgatactcctgagttcaagtgatcctcccgcctcggccttccaaa

SEQ ID NO: 102258 - DNA, 115 bp, Homo sapiens
gtgaggatgctgctgtccttggaaatggcttccgttcagccctatggagggtggacatggtccagactctgggagagcccggctcagccttgggcccctccctaggccactgctg

SEQ ID NO: 102259 - DNA, 369 bp, Homo sapiens
gttgtttttcacctttctcacgtatctcctttggtagcttaataatcaaccttttgaattctttataaaaagatatttcaaagatttcatcttggtttagatcaattgctggagagctaatgtgatcttttcagggatgttatagaaccctgttatgtcatattgccagaattgtttttctggttccttctcatttaggtagaaatatatggaatgcttcacgaatttgcatgtgagccttgcacaggggccatgctaatcttcactgtatcattccaattttagtatatgtgctgctgaagtgagcaccgtctcaattgttttgaacagaaaatctttataaagtgttccacagaatatactgccttc

SEQ ID NO: 102260 - DNA, 266 bp, Homo sapiens
ttgaagctcacattgttccaatctggccaataggagccccttttgtatggctcctgtatctttatgacatgtcctcatcattcttgaatcacttcctcacttccagatacagtaagttattcttggccaggtgcagtggttcacgcctgtaatcccagcactttggcaggccaaggcaggaggatcatttgggcctagtttgagaccaaatcatggttgcacaaactgtacccactatggacaacagagtgggatcttgtctctgt

SEQ ID NO: 102261 - DNA, 971 bp, Homo sapiens
gacgtcgggaaaggaaacagaattccgctgtttttcccgctccctcgccgcccctccgcccagcgcctcctcccactttacagcggcggggtcactagaccaggcgctcctggaaagtttccctgaaagccaggggcggcaggcacgaccggactggggctcagcatgtgcagtctgagggaagccggacctggagggaatcatgcggacagctcgggatgcagctaggagctagatcccggccctttggagagtggaacctcctggcccgcggtacttgctcgacaagtcggggaagggatgaatggggaagcaggaccccggaggcaggtgcggccactgtggacagaggctgtggggaaggtgcgtgtggacacaggccggggctcagtggcttgcaagtaggcagcttcaggtgcagaatcccgagccatctgctccctgcgcacgatttcccagcgtggctatccagggagggaggaagcagagccaggtgtgcgtggagcgggagaggaatgggagactggaggcgctgtcttcacagccggggcaagcacttccagggagtctccggcctgtatcgcactggggagccctgcaggctttttcgcgtcggtctttgggagaaaggtggctgctttggaactgcggtggccaggcacagccacagtgggatcgctcctttttttacgctcagcttttttacgctactgaatgcgatctgtgaaaggtttaaaacacaggcgtgcatggacacacacacgcacacactcgcccttgtacgcacaactttctttacctcagatctgaaaagccgtttaacccacttgcagtgttgtgccagcaggtctcagaaaagctatttaatgccccccagcgctggtttttaagtcttgccaggatgggaaggtcgagtgcctttgccttgtctttctttagtcctgaaattgttcgtcgtccttcccctggtg

SEQ ID NO: 102262 - DNA, 202 bp, Homo sapiens
aaaaaaaaaaaaaaaaaaaaaaaggagagtgggaacagaggagagctacgcctctttccatcatgaacatcatggtagcttctccaagactatgtaagagaagggaaaagatggccacacaatcctggcgtccaggactaaacaatcaagtttccacctaatacccaaaacccccagggaacagtgatatatgaagaaaaga

SEQ ID NO: 102263 - DNA, 507 bp, Homo sapiens
ggcctgccttcttaggggatgcactcagaatgtttgctgctccagcctttcctcactatctaccttgttactttctgttgatcctgaagtttggaacgtttctagactcacaatagccaaacatcacatcccagtcaaaataactctccaaaacccctccatttcccttcatcagtctcaatatccccttaacccagccagcctcaggggcctcaaacctactatctgtaaacttttacaagctcaagttctcaagcctgtcaattctccccacaacactcctatcctggctgtcaaaaaaaccagatgggtcttacttcttggtccaagatctttgagttaacaaccaggcagtggttccaatccatccagtggtccccaacccacatactctagtctcccatattcccctatctaccacacacttttctgtattggatccaaagaatgccttttttactattcccttggatctggcttcccaaagtctttctactttcacttggt

SEQ ID NO: 102264 - DNA, 116 bp, Homo sapiens
ctggctccctgatactctgaacaagtggagtgtgcaaaactacaattcccagctcttcctctcactgtgtgtccctattctgcttttcctgtggtgtctagacctttcagagtctg

SEQ ID NO: 102265 - DNA, 473 bp, Homo sapiens
cacttagagagtcgaatgggctcctgtcaggtcacctaactgttcatctgggagagtcaggagtgtgtccaaggcctcccaggatgatcttgaggtggactggaggcgcagtcataacaaccacgtaaactggcaacttgggggcagtggcagtagcagggaggtagggagaaatgtgggaagtccatgttagagttgagattttagacctcatggaatatgaagtggaaatgttcagataattgaggctgtaggattcagatacggttttgtagagtagtcgccatacggaagctctgagaatggatgagatttccaagaggtggttgcaggaagaaagtatcagaggcttggacaagtgtggcataggcaataggataggatactctgttagacaagacagaggtgactttctattacaaaactcgtccatttgtctgctcagaaaccttctactccttatttctgcagaa

SEQ ID NO: 102266 - DNA, 756 bp, Homo sapiens
ctaagataagagaccgtgcccagagccactggtcacttagcacaggtagtgggaaatggtagccagcaaatgtttaattgaatatcttatgtctcctagaccacagctgagcaaactaggccaagctcaaggtcctgaggggaatgaggagctgagctcagtcccttttggccccctttctctttccctcctcattttaagtatggaagctcacttatttcctttttgtattggccatttgtgtagggttttgtttgaaaaagggcttgaggctgggcgtggtggcccacgcctgtaatcccagtactttgggaggccaaagaaagattgcttgagcccaggagttcgagaccaacctgggcaacatagtgagaccctgtctctacaaaaaaatttttaaaattagctagacatggtagtgaatgcctgtagtctcagctgctcgagaggctaagttggaagtatcacctgagcccaggagttgaggctgcagtgagctctgattgacccagtgcacttcagcttgagcaacacagcaagaccctgtctcaaaaaaaaaaaagaagttgggcacagtggctcaggcctgtaatcccagcactttgggaagcctaggtgggcggatcacctgagatcaggagtttgagaccagcctgacctctaaaactacaaaattagccaggcgtagcccagcggctcatacctgtaatcccggcactttgggaggccgaggcgggcggatcacctgaggttggg

SEQ ID NO: 102267 - DNA, 824 bp, Homo sapiens
taaaccctatacttattaacaactcactgtttctccctttcccaaaatcctacactttctgtatctataaatgtgactattctagatacctgataataagtggtcatatactatttgtttatatgtgtgatgggcttatttcagttagtgtacggtgctccagaatcctcttgcagcatgtgtcacaatttccttcttttttttagactgaataatattccatgatatgtattgaccacattttttaaaaatccattcatccgtccataggcatttgggttacttctatcttttgactactgtgagtacttttgctttggatatatacttagtagtggaattgctggatatataataattcaatttttaatttttgaggaaccaccgtactgtttttcataactcctgcatcattttacattcccaaaagcagcccacaagagatcctatttctccacatcaaaacgttatttttttctttcttctttttctttttttatcattgccatcttaatgggtgagaggtgatatgtttttgtggttttgatttgcatttcctcagtgactaatgatgttgaacaacttttcatgttcttgttgtccattgtgtatcttatttggagaaatggctattcaagttatttgcagattttataattggatgtctgttttggttgagttgtaaaagttatttatatattctgaatactagtcctttctaagatataagatttgcaaatagtttcttccattctataggttgccttttcactttcttgatagtgtcttttgagcacaatagttttaaatgttgatgaagtcca

SEQ ID NO: 102268 - DNA, 823 bp, Homo sapiens
gaagaggtttcaccatgttgcccaggctggtcttgaactgggctcaggagatccgcccccctcagcctctcacagtgctgggattacaggcgtgaaccaccatgcccggtccatattttttaaagaaacgactccctcctcagaacgagtctcaatgcgtcaggggcattcagaacagcctggactccgcacagcgaaccccagaagcacctgctccccacgcgttaatccttgtttccaggagcagggccttgaggacaccttttcagggaaccctgttcctagagcaggaacagtcctaacctgacaatgggtgctaattttaaagcttttcaaaactcagatggaaaagcacacaggcataaatgctaactgtatgaatcagcactgtggggtggccaactcaaacccctcctggggtggaaaacgaccgtcccgggtgccccggtgcccttgccaacgtccaccctcccctgctccctggacggccgcctccaacagcatggactagtttgcctgtttcagaacattctctaagtggaatcacaccatggcgactccctcatgtctgtgtctttggtgggcattttgtgaggtttgccccgtggtgtgtaacagccgtccattttctttgctgtatagtattcccctgtgtgatctcttctgctattgatggacatgtggcttgtgtccaggttggctgttgtgtagacgccgtgtgagggatcccgcgtgtgtttctggtgtccgtgcgcctgttctgggtgtaaacccaggagtggaagtgccacagtgtgtgcatagtttcaacgttagtagaaaa

SEQ ID NO: 102269 - DNA, 218 bp, Homo sapiens
tgttagcccctttccacagcctgtctgtaatccttcgtccatttattagcactcattatgtgccagacactcttctaaatgctggagatgcagccatgtgtagacagatgaggccctatagagctcccgtagtaacagggaagccaaacaataaacacctaaggtgataaataaagagaagaggccgggcatggtggctcacacctgtaatcccagca

SEQ ID NO: 102270 - DNA, 800 bp, Homo sapiens
cccctactcacctctccaaccacactgaaccactagctttcttgtaccttcggtctcacacactactttctggaatgccctttcctatacttcttgggtaattcctgtgctttctttggtattctgcttaggcatctctttcagggaggcctgccttgacctcttacctctggcagggttaggtacctctcctaggctttctgacagtgtctagtatgtatttcttttatgttttttaaatatccaaactacagtaagaggtaataatgttgggcatttactatatgtcaaaacttaatgagcatttgctatgtgccaggcataggacagtgctaactggaaagtgtttccttatataattttcaactggttctcatctcagaattagagataattttatgtcactgcaagagtaatatttgaagatggctatctaacatctctctttcaggctaagtatcttcattgaatttgttcaaatatggatttcagacctcttgccttcctggtcactcccctccatgtgttttattttgttttctctcttaaaatatgtggttccgttttacatcaaatagaattgtcataaaggaacatagggcttctcagatggatagaagctggatatggattgtcatatttaaggtatatacctcacttacctaggtcgttagctatgaacatttttctgaacattttccagaagtcactagaattacgggaatttacttatagttagcaagtgatggagagactgacacaaaaccaagaatgccagttagtgaatttattaatataac

SEQ ID NO: 102271 - DNA, 295 bp, Homo sapiens
tgtgaatttttttttggcccaagaacagcatgaaaaaaattaggacgatacgaagggtgatatgaactgaggtacttggggaacctctgttctacacaaagcatggtttaacccgagatgttccagggctgaacctgcctctggattctctatgtggtacagtgacagccacaaaagcagctcccatctactgagctcttggccaaacataggcaagctcttaagcattgtaactgcatgacctcatttaatctccagagcactgtgagcatgggtcttttatgatccccattta

SEQ ID NO: 102272 - DNA, 703 bp, Homo sapiens
ggtatcaattcagcattccacttaacattttataaattccataggaacatgcctgttttggtagttactgacttaatttgttagtgccacaaggaaaatattttacagtattttatgccatttaggcaaaatgaataaactgttttccaagattttcttaaaagattatcaatttaaaagtatgatcaagtatgcctcaaaaactagaaacatttcaaaatgtagaacaaacgttgaaaaattgttttgccaggaaagagttcaagttcagttaaggatttgagaggcttttaaacaaggatcagtaggatagttatcatatttacttaatatatgtctgatattcagtgctggttctttttcctgtttgtgcaacaatgaagtgtgtcatgtgtgttttatagcctctatcattaatcacaccagagtctcattttaaaacattttaatgttaaaacatccccacacttatacacaggtaaaattagtttttttttttttaaagttgtaatctgtacttttttttttttgcaatttttgaaacagctacattaatccctaaaaatcccaccatactgaaaatgtatggcgtgtattttctatagtaagtaatatgaggaaaacatgattagctgtgccaaagaaattttatacattgtttacatgatgaggccacagtacttactgaggacttcatatggtt

SEQ ID NO: 102273 - DNA, 464 bp, Homo sapiens
ttgatgaaaaacttaaaagctatcccactaagatgaggaacaaggcatgctctcactactgctttcaacattgtactcgaagtcctagttagtgcagtaagacaagaaaaggaaataaagagcatagtgattgggaagaaagaaataaaactgtctttgttcacagatgacatgattgtctatgtagaatatccaaaaattgacaaaaatgctcctggaaataataagcaattttaccagggtggtaggatataaggttaatacacaaaattcagttacttttcgtgtatatcatcagtgagcaagtggtatttgaaattaaaaaaaatactatttgcattagcacccccaaaagtggaatacttgggtagtaatctaacaaaacatgcacaagatttatatgagaaaaattgtaaaactttaattaaagaaatcaaagaactaaataaatggagagagatttt

SEQ ID NO: 102274 - DNA, 645 bp, Homo sapiens
gtaatttatccattgggtcaaatagcacaggacctaattccaaaattaactccagccatagatgttttctactagtaatagtagcttcttccttagagtgaattttcttcaagaacattcatttaagtatccttttctgctttgagcccatcaaaacttgtgagttgtataaaatatgagccatagcataatattcaggaacaatttcaataaactttttcttccaaaaaaagctatgttaggtaactgttcattttttaagttaaggagatttttctctaagtagccaaaatggaataatgatcacttaactctaaggtgtttctctgagaaactgaatagcagtacctttattccagattaaacttaaaaaaaaaaaacccttttgtgtgatacctattgggcctattagatttatgtaacttccctcacttttagaaatgacagattgaccctatactttaaaattgcttataaaagtcccttaagttgccacaaaaggaggtctgagattgcattatgaatatttagaagttactttttgtttttagtatttatatatgaccttaaatgtgagtctcagccaaagcaaagaaactgcactgatttaaaggatttagaaatcactttttttttttttttttg

SEQ ID NO: 102275 - DNA, 226 bp, Homo sapiens
agatagacaggggtccagggaagagaatgggacagacaatgagaatagatcagaatttagtagatgttagaagtggcatttcagattggtaggctgaggacacagtacacagtgctgtgataattggtcatacctaaggaacaaaacatgagatccctacctcataccatatacagaggcatcaggggaaaccaaaaggagtatgtacatgaccttggggacacag

SEQ ID NO: 102276 - DNA, 363 bp, Homo sapiens
ttcctctcagcatgcagaactgagtccaccagtcaccgtccctgctggggcttacactgacctcccctcagcagctctgctagttgccttgcacagcatctgtgctcagcagatccctgttggctgatcgtttctgatggcgatttttgaatgaagcacaaggttctttaaagaacaaccttgtgctccgcttggaggcagagtcttgctgaggtgcccgtgggtctgcctcagcaattacctgtgtctctgcccaatgcctctgaggtcaggaggccggcatgcgtgaccctttgtctctgggagtccagatttcctaatgcagggctctttctaacacagaaagcaaggttgagtaaatac

SEQ ID NO: 102277 - DNA, 472 bp, Homo sapiens
tcttacatggtggcaagcaagagagcttgtgcaggggaactcccatttataaaaccatcagatctcaagagacttattaccatgagaacagtatgggggaaactgccctcatgattcaattatctccacctggctgcacccttgacacatagggattattgcaattcaaagtgaaatttgggtgggacacaggcaaacaatatcaagtctgataacccaggagtgttctttcatagtttagagtgtacagctatgttgcctggaagctgtgtgtgagtagccagggcctgtggatatgtgtgcttcactgtatgcttgggtggtcttctagctttttattggaggattcccagctatcagctttgacagatcttttctctttggccattctctttctccaggaaagtatctgccactcttctgttagggaggtataaatctagctgctggagttctgggagctggatggcag

SEQ ID NO: 102278 - DNA, 399 bp, Homo sapiens
ctaagtgctctggacttccaagaagttaactggagtggaaggcgagtcatattgtggatgcggaatggaagcttagacaagaaaaaactgtcagcagagcgcctctgctctcaccgtcacacccaaatgagccaggacgtcgctcagagcgcaaactgagatccacacagggacatcttcaaccgaatctttcttctgtctccattccggactaaggaaagaaagaaagaaatacggagcctttatagagtattcagaggctacacacatggatcttgctgaaacggagttatttaaaaacagagaaagtgtgttttcccatgagatagatgttatagtttctctctgaaacatacccaagtctatgggtgtcaataatagccatttcaaatgcctctc

SEQ ID NO: 102279 - DNA, 401 bp, Homo sapiens
cacactgacaactgtgtgaggaagagcctcgtgagatgatggaactccattgatttttcataaaagcttaataagatgatacaggtcaaaagctttgtaaagtttgctataaattgtagtgaggaattgagcaagatgtaattggataagaaaatgtaaatgaaacttgtacaagtgtggcagagttgatggagaatattgagaacaaggcccctcttgaccatctcagtggtatttttctaaacaggtgtctgacccttaagtgcaggggctttgactccagtcagccccttatcactgatgggttaatatattgttacccatcggtttttttaatgtcattaaaattcatcagatacagtttatgggtgcagatcagataggacaatcagtgtgtttgc

SEQ ID NO: 102280 - DNA, 93 bp, Homo sapiens
aaaaaaaaaaaggtaatgacttgatctgtgtcataagcggccatgctgggattaaacccatagcagcccattactcagctacatagatggact

SEQ ID NO: 102281 - DNA, 374 bp, Homo sapiens
gagagaaagaccatgatacaggtggcgatttggccgctgtcctctttggacttgaggtccacaatgatgtggtcgttggtgttggggatgaacttgaagaatgaactttaacgtgcgcggggcccacctcccccatgtggctgacggaaatgtaaccgaagtcctgggtggtgctcaggagtcctcgctgcaccgctgggggcaggaccggcgctgcagcactttccagcaggcggactaggggtgtgaggcagcctggcggtcggatttccgtggcggccctgggagcattgcagctgcacacccagttcttgtggtccacgctgcccttgtggcctgccactctcacccattccacgttctctctccactat

SEQ ID NO: 102282 - DNA, 617 bp, Homo sapiens
atctgtggctgtggccaagtgattgttgctgaacttacctgtgtcgaaaggtcagccttccagtgctaaggctgggcacaggcgctaaggcaaattggattgtgaatggaggccctgaggcatgttctgcactttgcaactggtctggcaggctccactcctccaccttctaagtctgccacaggcatgggaaacacctgggcagcgacaaaggtggttaaggcagcttcgccaagaagaggagccaagatggttaactagacgtagccaggaggaacatctcccaccaagagactgagctgtcaggaagactggtacattctgagcagatctttggagggaaggcattgagagtggatggaaggatgatgcagacactgggctgaagaggaaggaagctgggaaccctgtacaggactaccgagcaccaggacttgtttctggccccctgcaactcctgggaaagggagaactcctccagtgctctcaagtgttttacagaccactaattattaaatgtggaagctctggagcagagaacctttcaactgaaatgatgacaaacgatgctggctgaggagagtcagacctgaaaagttaggaatccctaaaatgac

SEQ ID NO: 102283 - DNA, 1453 bp, Homo sapiens
tctggaatattcaacaatgaaacctcagcacaattttccacagtgctgtaccaagattacatgtttcttccagagagggaaaggtttcttcaaacaaatgtggtacgccacacttctttgccaaacataacagcccacccataaaggacaccatgtgatgaggtataatagttttgatagctcattaaggaaactgctttttgataactggggaaggtttttccactgtgcaacaaaatgataatgctactttgctaactcctctactgacaaagatccccatgaactttctgaacattactggatggttgaaaggaaaagctgcttctttagaaaactgtgattaaaacaaattagagaataagcatctaagactaaccagagtataaacaaatgcaacacagttcaattctaaaactgcaataggacttccactttttaatctgcagtctctaactacctaccctctcttaaaaagaaataagaatattttaatttatttaaatgatagtaatgtcattttgggaagagactccatgaaaatttaccaccttaagaagttcccttacccagaaccctgtggcatgcacattttcctaaaacatcatcaaagcagtttgaatgagatctatacttaaagtttttacataaaatcccagggactgagaggattcagtcaagccacttaagaggtagagctaggttatcctcaggagttctgaatggaactcaaaactagcttctgtcctaagcatcaagttttcaatctattaaatgtatcagtgattgacacaggatgatgtaacatagcaaagtgggctacacagctattcctaatcaattacgctaacaactctggaataaaatggacatctcctaagaaaaagaattgtgagatttctaacaataataacagtgcctattcttacatagcatttaggctatgaaaaataaaactttcacatccattttatctcatttgtccaagtagtcctatgagtattttcaaaagcatatgttatcattcccattttatggcagaaagcctaggccaagaaaagctaaggaattagtcaaatgtcggaacttgaatctattcctctgctcatcagattttctgaccacagcatcatgacaaatttttataaacatcaacatcacacccctgacccctgttcaggacttccgtagatttctggctgggcatggtagctcatgtctataatcccagcactttgggaggttgaggcaggcggatcacttaaggccaggagttcaaaaccagcctggccaacatggtgaaaccctgtctctactaaaaatacaaaaattagctgggcatggtggtctgcgcctgtaatcccagctacttgggaagctgaggaacgagaattgcttgaacctgggaggcagaggttgcagtgagctgtgattgcgtcactgcactccagcc

SEQ ID NO: 102284 - DNA, 202 bp, Homo sapiens
gtgagagtgtgtgctcgctcagctaaagccagggcaggagaggtgtccagcacaggggctgtgggagtgaagccccatctgcaccttaatttctgggcttggccaaaaacaggagcatgctggggtttgtgagagaaagaaacacagtagtccccccttatctgctatttttgctttctgcactttcagatacctgaagtca

SEQ ID NO: 102285 - DNA, 306 bp, Homo sapiens
agacagagaagcatacttatttgaaggagcacagggaaaaaggaagagactaaaaacagcaaaaaatagaggctgtttattgcaatacatagcgcggaggtaaatgaagggaccctcacacacatagcccccttggaggatagagaatgaggtcttctgctaaccaagggagaataaatgaataccattctgatgtgttaaccttattccagccatggtcaaaaggtaatgaggaataaatgcttaaataactgattagaaggatgcccaagatatactaaatgtcagacgcaagtcttttatgtt

SEQ ID NO: 102286 - DNA, 743 bp, Homo sapiens
aaaaagacaagatggcctgaaaagcaccttcaccaaagacttatgtaaatgtaagccaatggtaagtttctagtgactcagcactccctctccaggtacagtgaggtaaagacccttacaaatgaagatttcttttgtagatgtaaatttcttttataaatagccaactaaatgacagaaagctgtattttggacactgattttgttgaatgggtggtctttttatgttcacttttgttagcttaaaaattactgagttcagctgggaaagcccattaagaaaaagggcaaaaaaagcataatatatgtgtggactcagcatggatagctctgataaagaagcaagcctgaagggttacccctaggttaaagacctcttctaaaaaagaagggtttgaaagaacagcccaaataaaatgtacaccttcaaccaaagagtggtataggtccagattattagtaggacttttgtccaataatttatcttggaattggaagaacatgagagtttcatagttggccaggtgccaagtccaggaatggctaagggtggcttactgtgaatcctgctcacagtgccagaaatgtcaacctaaagggaagaaaatgaggcatagttaatacagataatgtatttgggccaaggttgaggactgcagcctaggacacacttccaagtggtcttggggagtgctccagagaacagaagagaggctcatatttttagagaaaaaaaggatgaa

SEQ ID NO: 102287 - DNA, 799 bp, Homo sapiens
acacagaatgggaaaaggaagggggaggcggtgctccagctgattttatgattccagaagccttctatcttaagatgtataggatgtatcttagggtgtataagagaagcgcaagagaaacatttaggctgttttatgtttgagtagagacatgaaagttttaaataaagcagcagcacaatgagtccagcggcacatcagaaagcaaatcaccatgatcaggtcaggttcagggtggttttatgtcatgatatatgtcagtgtgctttacctattagtggaccaaaggcaaaaaatacggttttctacagagaaagacaaagcatttgatttcaatcaacattcgtttgtggtgaaacatgttgagaaaactcatcatagaagtgaaatgttttctttgataaaggctaatctcagaagacatacgtagtggagagcttttaaatgtatttttaaaaatacgaaccaatgagaagattgcctactttcaccgcttctgtttaacacagcattggcagagctgccaccaagaagaacacagcacgttgaaggcacggtggctcctgaagctgcagccctgagacctgattgtaccatggaaggtggggtggctcctgcagctgtagccctgagacctgattccaccacaagtgctgcagctggcagaggccacaggacataggcatagctggtgaaacctgcaactgagggtgtcgggggctcctgggagagcctccgtcccccctaaggagaggggctgcgtagaacctgtgtgctattgtcctttccccctttttcc

SEQ ID NO: 102288 - DNA, 659 bp, Homo sapiens
tcctgggttcaagtgatcctcctgcctcagtctccctagtagctgggactgcaggcgtgtgccaccacacctggttaatttttgcatttttagtagagacagggttttaccatgttggcctgtctggtctcttaattcctgacctcaggtgatccgcccgcctcagcctcctaaagtggtgggattacaggcgtgaaccaccgtgcccagctggaaggattaattaattcaaactggagtaaattagctgttgctgttgccttcaacctcaccagaatggattgcttatggggcttgcttctgtcgctgcttcctctttgacctctacgtcctcctccttttgttgattcagtttttcaaagtcggggttggtttgtctgactggaaaagctcaggacttacacgtaaccctgtcccagttaggagagagatgtggaaagcaaatacctggttttcagtttctttagttttagggcaaggttctgccttataaagtgaagaattctccaaacataggaaagtggattcgataaagctgggtagccccctccagtgccatatatccatgaaagaacattttgtgaatgaaagggaatggttacaggatttgtggatatctttgctgtgatttgagtcttgtttgtattttttcccccttt

SEQ ID NO: 102289 - DNA, 342 bp, Homo sapiens
tactaattcatcaatagattttctgaatcggaatagctcatttgcattgcaattaatagatgctctagaagttttgaagcaggaaggagctgagttggtactcctataaaaggtcttactgcataattgatagtgttcttacttttttttcatttggttttattttccttgattatttttcagttgtgggccacttatcacatacactcacaaactggattcacagtccatgttctgactaatcttaatcagaaactggtaaattaataaagataccgatcatatttcattccccttattgggcatctcgcaaacaaaatcttgtttttacaagggtttgtt

SEQ ID NO: 102290 - DNA, 229 bp, Homo sapiens
ctggtccttgttcttggccactgtctgcaggatcaacctctgattttacatcatgatgtaatcacctcaatccaagagcttcatctggaggaaagacgaccccaaaaaggagctcagactgctgtgtgagggctggcgcagtggtggccagtgcaggtccccgaggtggtgggtcccactcagctgctccttacagtggggactcctgatgtggagttctgcccctgtc

SEQ ID NO: 102291 - DNA, 401 bp, Homo sapiens
gctcactgcattcttgacctcctgggcttatggtatcctcccacatcggcccccctagtagctggatggcaggtgcacaccaccacgcctggccaatttgtgtgtttttttgtagatacggggctccaccatgttgtccatactagtcttgaacttctgacctcagttaatcctcctgccttggcctcccaaagggtttgagattacaggttcaagctaccatgcccgacctgttttccatgtgtccagcataggacttactccattatcagtcagaaaatatataatgcggctaggtgcagtggctcacctctgtaatcccagcactttgggaggctgaggtgggctgatcactagaggtcaggagttcgagaccagtctggccaacttggtgaaacccc

SEQ ID NO: 102292 - DNA, 304 bp, Homo sapiens
cacctcagcctccctaagtgctgggattacaggagtgagccactgtgcccagcttaactttttattttgaatcagttttgaactcacaggacagttgtgagaacggcacgaagaccccgtatgcctcctgctgcagtggcctgcttctcccggcccctcctagccctgtgcacacaggtgagcctctcaccaagaactccaccttgtcaacaccgcatcctgaccaagggtgagccccgacagcccacagccatcctggggcgtcgtggcctgtgtggggcctcgcggggccccggctgcctct

SEQ ID NO: 102293 - DNA, 358 bp, Homo sapiens
tcagagttgtaccaggtagtttggactccccagactccaaacctcaggtgagtgaagggaagccacatggttaggaaagacatgaggaagacatggacacccttctcttggttagagatgaaatgtcatttgcaggtctcctgacagaacagaacacaagggagagcagcgggttcaggtgctgggccagctctcccctgcccagctcagggcaatgactgtcagcctagtgcccaccagctgcctctcgggggaggaactgtccacaggagctgggaccagggccagcctcccctgacattgggtggaactcctcaagagtgaccattgacaaagattctcctcagagttttctaag

SEQ ID NO: 102294 - DNA, 255 bp, Homo sapiens
tgagtgcctccctggctaatgctcccagatggccacttgcccggagcagaggacggtttggttaggcaagggggtggcggtggcattgccatcacgggatgtctcacgctttctcctctagacgtcttaatttccagaaccccttgcttatgtgcagccctcttcctgctgccacggcattttgcacagcgtgcatcaatccagaaataggctgagataggagcttagtttcctattgcacaccatgctgggtga

SEQ ID NO: 102295 - DNA, 284 bp, Homo sapiens
gaaatttctaagcagcaatgcattcaagagatgacttgggtgctgttaaaagcattcagttttaaatgggaaacacagcacaaaagtttggaaaatttgcagactgatggtgcaagagaaaagaaaaaaaacattttctgaggagaaattcaagctggctgcagacatttgcataagtaacgaggagccaaatgttaatccccaacacaatggggaaaatgtctccagggcatgtcagacctttgcgacaacccctctcaacacaggcctggaagtctaggaag

SEQ ID NO: 102296 - DNA, 443 bp, Homo sapiens
ttaagtggggctatgaatatccccatgtgacagatgagaatgtgaggcccaaggcacagaaccaggggtgccccagcatgccagttgtgcacctgtggcttttcccttggccactttgcagcaccggcacgagagaggcccacagggtgagcctccacaccaccagccaccctttgtccctcagaaagggctggcagagcctgcaggtgagggtgggtgtggggaggggtgggcaatcgtctgcccttcatttctgtcatgttgtggctgtcactggggagaaaatgccaaaaagcttcctggaagaagcagcttccaggaggcttcaccatatccttgtcctgccaagtggccacgaatggattagaagattcccactgggtgagaaggctcagaagccaccacagaggatggcggaggtgggagaggcctcgcaccgcggg

SEQ ID NO: 102297 - DNA, 284 bp, Homo sapiens
cgatggccttaatacagctcgtcaagaactgctgaatctactttcttatagagacaatttcatatcgtgacaagaacatgggtttggaaatcagacaggacattctcctgagtttcctcatctgcaaaatgcagaaccatatgtaatatacatggtccaagtaaacttcttaaagtcttaataagagcatcttgagacactgtttacagaggatggcatatttattcctggttttcttggtcctttcccctcccctcccctcctatcttctcttctctctctct

SEQ ID NO: 102298 - DNA, 286 bp, Homo sapiens
ccgccttggcctcccaaagtgctgggactacaggcatgagccactgtgcttggccttcctaggagtctttgtgagggccaggtgggatcaaatgtttaaaagagtaccaggcccacagtaaatgtttgctgcttgtttgtgggagtattccaagacttttaatacttccctggcccattcagcacattcccctcagtaaagactcatgctcactgtttagcactgttcaccatcagaacatttcctcatgattttcctaaggcaagtttttcaggaatatggcaaa

SEQ ID NO: 102299 - DNA, 124 bp, Homo sapiens
gatctaaaatttattgtggtgatgtttgcataacagtgcaaatatactgaaaaccactgaattttacactttaaatcagtggcttctgtggtatgttatcaatatttctcaataaaacttcaaa

SEQ ID NO: 102300 - DNA, 481 bp, Homo sapiens
gacacctttttactgatatacccacagttctctatggtgtgcattttccctagctgcaatgaacaacagattcaacttgtttaattatagatgtgtttccattggtctttggctgtagggcattaataatattatgtactattagtgcgttaataacattaataatgccctatagccaaaagtacttttaccagtgctagagatccaccaggctttctgctaaaggtcactctaacattacggacacaagtcagttgtttgtcttttaatgcttttgccagctgaaatagtttatctcagagttttctatgaggatctgagatttaactctgctctaggtgttgagagcaacaagctcatagtgccagttgtcttgtggttaaatgtcaaaagccttaattaaggcttattattttctcctttggaataggtcggctccaaggctacacaagcagcaagaagaaaaggaaaaactctgttt

SEQ ID NO: 102301 - DNA, 480 bp, Homo sapiens
agagagggctagaggcctggaacagacccagcaaagtgcaaaacattgcgggcagggtgtgagccggcggcgcccagttattccgaagcgcccatgccggagggggcgggtgccgatcgccggcgcctccagtgctggaatctgcgtagtggattcaggacgttgacgttttaggatgaggacctgggttgacgtgaaaatgggggtacctctggcacctctgactcaactgtgatgtgaaagggactttttctacttaagtaacttgaaatggttgacgagctgacaccttaaaaaattgtatagggaatgggttttgtgttcttttttgtttggatgcgtgggtgcctttcgatgcatctgtaggggtaactgttccagtcgctctgttcatacaggtttctgtgtggcattgtgttgggtagcagagattcccaacgaattcacacggaactgtctggggctcaaagctctggtggg

SEQ ID NO: 102302 - DNA, 166 bp, Homo sapiens
gatgattcacgctaaaagaatacttaaaaggtcttcgataatccagcatgctagacacttgctggtagacttcacagagacacaaacatgctgtattttttttacgctatgtatcctgcacctagtagagtttctggcttgttgcagtttagtgaatgtcctggga

SEQ ID NO: 102303 - DNA, 476 bp, Homo sapiens
atttggcatccaaattaatgagaaagattggccctgtaattttctgttcatgtaatgcccttgtcagaacaaaacaaattggtctcataaaacaagttgggaattgttctctcttcttaattctctagagaaattgttttagagagtcatgttatttcttccttaaataattgaaaattttattctttaagccatttgtttaacctcactttttaaaaggggggcagctttttaatgattgattctgttaaactttttcaataaacttttccatttaatctaaaatcttaaaattttggcataaagttgttcagaacccttcttaatcattgtttgctataggatccttggtgatatctcctcttttcttattggtaatttgtatcctcctcttttttttttcttgaactatattgttaggggtttatcagttttttttagtttattcaaagaaccaactcttagttgattatttg

SEQ ID NO: 102304 - DNA, 766 bp, Homo sapiens
tccccactccacatctgcctcatagggcttccttgccttccttcatctggccttattgagggcagcctcttagctcagccatagtcttaggttttgggtctctgtggtgggattaggctgggcagagctttgggagaaaggagcaggagattcagcctttgcttctgtcctctaagagctcccagaccacctggagaggtaagcatcataattagactatatgtggtgacatataaacagaggctaaattgtgtgttagaaactctgagatatagaagttcagaggagaggaaaatagctaagggtaataatcagggaaaatgtcagaaatgagacttgaaggataggaatattaagaaaaaaatgttctttcaatttctgagtttttgttttgtttttttttttcttttttagaaagtttgaggcatgagccaccatgcccggccctgttttccatctttcaaggtactggaatattcaatgccattttcccagccttacagttctagtctgggcataaaaaaccttctctaagcaccctgcatagaaccacattttagaggccaggcgtggtggctcacgcctgtaatcccagcacttgggaggccaaggcgggcggatcacagggtcaggagtttgagaccagcctggccaacatggtgaaaccccatctctactaaaaatacaaaaattagctgggcgtggtggcgggcacctgtaatcccagctactcgggaagctgaggcaggagaatcgcttgaacctg

SEQ ID NO: 102305 - DNA, 447 bp, Homo sapiens
cctttcaagcaaaattaataatttggcaaatttatgtaaagataagacttttaataaaagtatttctactgaccaatccatgtgtccatctacacgagcctagagagagaggtcctacagtggcagccacctgcttgtgcttctgggtggtgggactgagtgactttagagctttctgctttaaaaaacaaaccacggatcagttttacaaaaacaatgtcattatgttttagttagttagcacgaagcactcttagaaacaacctctagctttgaagcaatcagcaaatggcagtgtaagatggcacacacagcaggtggtccgcagcctctctacaactggtgatgacagcaccaggtcctcctgtttggttgacagaagtcaccctcagaatcctcttgggaaaatcagggcactagctgtccatctctggagtctctgaatca

SEQ ID NO: 102306 - DNA, 378 bp, Homo sapiens
ctgaactccataggcagttgtgagcatggaaataatcatttaaaaaagtaagtagttcttggatgcctacaattcacatagttgtgaatagtatagtactgggataagcattttatctcacttaaccctcacacatcttttgaatatgggcactattgtccacattatgtaaatgataaaaattggcctggcacattttgttgttatcagttactcagctaccatgccacagtcagattttgaacttggaagtggccagtggccaggaagcctaggccagcttccctggtgttctcctgctctcagcctcttctgttcttcaggtggagtgtggtagaaaggtgtgccccacagcagggccttgcttacttaggttag

SEQ ID NO: 102307 - DNA, 356 bp, Homo sapiens
aattaagactaggttcttttttcatacaagttcctagtcctggtttctgactgtcctattggggcaattgtgctttccaaccacattgaaggaattgaaatatcctcattatttgtggattttatatttgtaaatttgcctccttgctcaaatctatccataaccccagaaccagtacttgcacaagtgcttttgagccatttgtaggcaaaaatgtgagtcacctcccaacagaagtgaaacaaatggtactctgccttctagtttcagctctcataccgtaaacatgtatcctttttgagtctacttagtcccatctcttcctaatttctgttctttttgttggtgattttact

SEQ ID NO: 102308 - DNA, 213 bp, Homo sapiens
tggtgatgtcatggtgcccaggcatgggaggaaagaggagggagggagaggggagagggcacagccccaggccagtggcctaacaggccagaggggaggctgccagcctggtgggcgaggggatggatagtgtccttatttcttccctaccttccatcctcataccccagagctggcttctgaactaagctactggcttctaagaaggtgagc

SEQ ID NO: 102309 - DNA, 338 bp, Homo sapiens
atagaacccaggcatcgactctgagtccagcactttttccaagactcttccctggatgcagggtgagaagagccagagctgagagcctgcatggcagagtggcggggatgcagctgggaaggcttctggaaccaactgcagtgccaagggagctggatgcctatttggacttggttcagaccagtgtttcctgaagtgcattctgagatgactgtgccagaaccatcagtgtgcttgttaaaacgacactgtgtaaggagggggacctaaaaatctgcatgttaaattccttcccagggtgattcttatgcacttcataagctggaaaatcaaaaata

SEQ ID NO: 102310 - DNA, 685 bp, Homo sapiens
taggacatgcctgtttaacttccttactgaatagatggagggtgagggcatatgcaagactgaggggctccagcatctgccatatgtcacctgtgtgcttaacaaaaaccccaatcctggggccatctcagacctgacctgctgtttcagaatttctagagaaagggcctggaaatctgtatatttaatttgtgcctcagggaagtttctgtactagaggatggcgaagggaacaacaggtgtggagagggaggctggacgtggcttccttgaaagggaaagggccgcatgaggctctgcattcctttccccaggacttatattgaaatcatggccaatgatttatttattttttaaaaatattaattcagtttttaaattttagttttttttctgttttttccttttttctatcttctaagacatcctgttatagcaaatttttacattttttcattgccctgccctgaaaatgtttttatttctcgtttttttttttaacatatttctctaggtttagaatttgtattttgtgcttatttactgtcaggccttcaaacataattgatttgtttttaatctttttctactaaaaattaaaaaaaattgtggtaaaatatacataacggtcaggcatggtggcttacacctgtaatcccaatactttgggaggctcagatggctg

SEQ ID NO: 102311 - DNA, 329 bp, Homo sapiens
aactagagattactagtggcagcaggctgagaaaactcagtagcaaaatgtggtagagacttgttgaatgtattatgctttcaaggacattttcagtgaaaggaataactattttagttattctttttagctgatctaaggttaagtctaactttacagaatttaccttaatctgcttttataaattagtcattcctgttttattttgtcccttatttatgatatatttccgtaaaatgtaagaataagtagaaggcatgatataatttattcaggagaattatttatttttaactgagaaagcttattaaggaattttatttatagtt

SEQ ID NO: 102312 - DNA, 388 bp, Homo sapiens
tgggtgacagagcaagactccatctcaaaaaaaaaatgctgtatcatatatatatatcagcatatttataagtatccaaattaattgccacagacatttcatagagttctctgatttttaaaaaatgtctactccacctataattatgttcaatttttctttctgatattgttcatttgtacctttatcttttttctttaatattgccaaaggtccctattttattagtttttgcagcatattttcattgtcattcatttctatatcttatctaacaatatttcttatttgacagatgtattatttagaagtacatttaaaatttctaaacatctctggcttagagttgcaaaataaaattctaaacatgttttttcagtaatttttg

SEQ ID NO: 102313 - DNA, 392 bp, Homo sapiens
ctcaaacaatgcatccttgttccacagcctcccagctgtgacagccatgataaaaatggagatgtttttatactctatgtgctgtttgtatactgacagcagcatggttattcgccaaataatcagagtatgttggcatttttataaataaagtgcttgggtttgacagtaatctgtgcaaggaagacttggaggatggacaaaaatgtcttctttcccatgcagaggaaaaaagcctccttggctatttttcagcacactaacatctcttctgactaaaaggcagccaggagcatagctatgacatcagcccagccgaagcccagctctctccaaaaggacacagggaagtatttctttcctccatggcttgcaggaatgtgttcctgggg

SEQ ID NO: 102314 - DNA, 203 bp, Homo sapiens
aatcaacttatttttggaggggtttttttttttcccccagattaagaggaaggaatgctatttattgaccagggaattcacttagagatcctgggaaatctgaatctgtggaatgcagttgcgagcattcacaatgtccccattaggtattgcagttgcgtttgcattccattataacagagacggaacagctgccacatcta

SEQ ID NO: 102315 - DNA, 645 bp, Homo sapiens
tacaacaatttctgttccctccaatagcatagtaaaatgcaaatttcgccatggccaaacctaggcattacctttgcgatgaaaaccaaatcaaaacaagactttactaaactaagaggtgaaatagggattttactttctcacttttatcatgagacaacatttttcactttactggggatttttgtgtatttcatgatgtgtccaaatccttactcattttattttactgggatatttgtctttttattttgtgtccctttgttttgcaaatattgttgcaaatgttctttcccagtgtatttaccttttaaaatttggttatggtgttggcattttcatttttttaatttaatcaatacaaagtcctgaagatagtgttagcattttatgtggttaaatatgtctgtattttctttcttggttctgtgcatttaataattagcactctcggctgggcacggtggctcacgcctataatcccagcactttgggagaccgaggcgggtggatcacgaggtcaagagatggagaccatcctggccaacatggtgaaacctcatctctactaaaaatgcaaaaattagctgggcatggtggcacgcacttgtagtcccagctactcgggaggctgaggcaggagaa

SEQ ID NO: 102316 - DNA, 100 bp, Homo sapiens
ccccactggcctcattctcatcattggacatgccaggcaccctcctatctcacagccttcgcactggctgtcccctgtcctgagatgtgcttccctccag

SEQ ID NO: 102317 - DNA, 464 bp, Homo sapiens
aggcaccagttacgtccgctctactattttttctacacaggctacctggctcaacccacctgcaaaggagttccccaagtcaggaggcccctgatatccccgtcacctggtccacgctggctgccaggccaccttcactgggagcggaagtgggagggctagaggggagtgtcaagggtccaccatgtcctcatgtcacctgcttctgccacagatgcaggcagtgtggccaggccagcaggagcacctcgtcggttcacagtgcaccagtctgttctgatgccccttgctgtggccttttccttagaatgttctgttagtatctgctgatttggggggaagaactgcaccagaaggagattcttgtgaagctgtttgggactatgctctataggcaagaacagtgaggccaccactaaaagtcttgatgtttagaatattaaaaataagataataagaaaata

SEQ ID NO: 102318 - DNA, 97 bp, Homo sapiens
tgtgtggagtgcgttcaactcagtctctctgacggtttttagggaacagaacacaaataacaacgtggcctgaggacccaaagtggccctagcaagg

SEQ ID NO: 102319 - DNA, 271 bp, Homo sapiens
tgcctggcatgtagtaaaatcacaacgaaaaccttgtgcttcaacccagaaagaatttgcacagccgcacatgggtctgggggctcagcagggagccctgggcctgtcagtaggtgaagtgaagtttgtcactgaggttaccctctcttcatctttacaagaagttgccagatagctctcccaaaatgtttgttcccatttccacccccacccgcagtgactgagtgttccccttactccacaacttcagcacatttggtgttgtcagcct

SEQ ID NO: 102320 - DNA, 273 bp, Homo sapiens
cctgttcctatatccactacattagaaaaagtcaaacaagtttccttacttgaggacttgttagagccttttaacacgttactctgcattataaatatccaatagaagattatgtacacattattggctgggtgctgtggctcacacctgtaatcccagcactttgggaggccaaggtgggcaaatcacgaggtcaggagatcgagaccatcctggctaacacagtgaaaccccatctctactaaaaacacaaaaaatcagctgggcgtggtg

SEQ ID NO: 102321 - DNA, 750 bp, Homo sapiens
gaatcctgttctgcatagtactctgagtcaggccctgtgctgagcactttctaagtattgtctcatttaatccttacaactcgaggctcagataacacaaatctcactcatagaaggtgacaaaatcaaggcagatggggagtgaagagatagctgagggtggctcctctcatgggcctggatcttgaagttctcacagcgcctggaccatagcatgcagcccagtctttgctagtcagtgctgtttttctcttcatcttacggacgaggatgttgaggcccagagaggggaggtgcattgtcctgggccacacggcttgcagggacagagctgagatttggacccaggcctccccatctctctgccttatcttgtcctgcccctactttgagcaggcctggccctaggggtcagacacccctgggataggagagaactgctctcctcttgtcatcctgccctgtggccctgcaggtcctcccctttcctgggaggtgggggagcctgcatgtcaggggcaaggctcagacgccttcattttcccacctcctcatgctacaaaaatgaaacgatcaagtggtattttggtgggattacagacataattatatctgagttgtcaagcggcaattgttgtttccaaagccaggaggccctctgtggaggtggcagcagtgacatctgtttctaacacaaggctctgcatcgggatgagtaacttctcctgtggaattgcttaaagaacgtct

SEQ ID NO: 102322 - DNA, 507 bp, Homo sapiens
catgggtatatgtgtgccagttatgttgggggttggtggagcccactctaattgacatttgcaatctgggttatatcacctctgaggtaggcaggtacctacatgaggtaggcagggaatgatggctttaacttagttcattcaataaatgaatatcagttatctattcctattgtccaggatggtggtgggcagaatgtctgagaagcccatgttgtgtatggcaggttgtgactttaccagagatggcattttctggttaaacttgggtgataggatgtgtttttaacagaaagggaaaaagaatctgaactagtttccttggtaataatagccatttgggttggggagctgatactggttaggaaaatgtgaggcccctttgacatcatccatttgctgctgagaaatcaaaattaaaacatcactcggtgtcagaatgttccagaaggcagttgagctgctaatgttttgaagtgttcagaggtatgtgttttatgaaaaaaa

SEQ ID NO: 102323 - DNA, 505 bp, Homo sapiens
ttatgacctgcatctcctgaacaatcagtctttatacaaataataatgtagaatacatatgtgagttatacatttaagaataacatgtgactttccagaatgagttctgctatgaagaatgaagctaattatccttctatatttctacacctttgtaaattatgataatattttaatccctagttgttttgttgctgatccttagcctaagtcttagacacaagcttcagcttccagttgatgtatgttatttttaatgttaatctaattgaataaaagttatgagatcagctgtaaaagtaatgctataattatcttcaagccaggtataaagtatttctggcctctactttttctctattattctccattattattctctattatttttctctatttcctccattattgttagataaaccacaattaactatagctacagactgagccagtaagagtagccagggatgcttacaaattggcaatgcttcagaggagaattcca

SEQ ID NO: 102324 - DNA, 1076 bp, Homo sapiens
cctgcacttctctggctggtcatggtgtcaccactggggaggctgggccggcacgtcagtctatgcctggcatgcagggccgtccctgagatatttgctctcaccactcacaaaacatccttctcgctcctggattgaacttttatgcctcacagccctaacccatcatttttcaaagcttcctataataatttgaaaacatcttgtaaaaatgacataagtcacagccgcttgcggcaaataactggccagtgttgaagcgagtcagaccgggtgctcctgcaccaagtgtgtgccagccgtaacccgggcaggcctgtcctctggcccttgctgcaggcaccagctcttaacacggggtgcactggggctccccatcacgcaggacctgcccagaatttccacagtggatggtgttcaggagcggtggttaggatggctggcgggggcctcactgacgctccagctcccatgctccccttagaagacagcttttggccgggtgcggtggctcatgcctgtaatcccagcactttgcgaggctgaggtgtgcgaatcacgaggtcaggagatcaagaccatcctggctaacacggtgaaaccccatctctactaaaaatacaaaacattagccgggcgcggtggcgggcgtctgtagtcccagctactcgggaggctgaggcagaagaatggcgtgaacccgggcagcgtggacgtgcacgaggtgtgcatcaccggatcacaacggaggctcgacaccactggagtccaaatgaatccactgggctctggcccccaggagtagctgaggacatacagacagctcatcacacaacctgaacacagaagcaaagggaaacaaggagaaagatgaaaaaagggagcaaacgacagcaaacaacaaggacgcgcgcataaccccggagatagcaacaacatacgccagcaggcaaccagagacgagacaaaccaaaggcagcagacagcccaacaaacacaacaaaagaacgacacaaacaaacatcaaaagaaagacatgactgacacagaacaaataaaagaaataaggagcaacc

SEQ ID NO: 102325 - DNA, 305 bp, Homo sapiens
gtcatttgtacccttctcttgggtcataacactaagaatattcattatttgttctttaataaatgaatttaaggccatgcatttacatcttggtacttgatatggtttggctgtgtgtcccctcccaaatctcatcttgaattgtagctcccataattcccacatgttgtggaagggacacagtgggagataattgaatcatgaatcatgggggcagtttcccccatactgttcttgtggtagtgaataagtctcatgagagctgatggttttataaggggaaaacccctttcacatggttctca

SEQ ID NO: 102326 - DNA, 491 bp, Homo sapiens
cagcctccttatgttgagtcaaggctttgtgtgaacaaaatccctgcttgcccagcacttaccttgtacttgacactttgctaggtgctttagaagtattacctcaccgaatccacacaagaatcctgaaaggtaggctgttatcccaactgtctagctaaggaaactgaggccagagaggccaaataacccatccaccaggtcccacagctggtaaaaggtcagagctagaatcagaacccacgtttgtttgcttccgagcccaccgtggattccagtataccagttccttcaatctcatctcctaaaactgcaggctgaacccaataagatgaaataaaatgagccgggcagagttggccatcctgcttgtcaatttcaaacaacagttccgcaagtgtaggataagaaaatctgactgagcagcagaaaagtcctgaggattttatcatctgcaaaatctccaaaagccaatggtgaagcagcaactt

SEQ ID NO: 102327 - DNA, 806 bp, Homo sapiens
gcaggctggtacgccgccagaggaagatggcgccgcggagggtcaggtcgtttctgcgcgggctcccggcgctgctactgctgctgctcttcctcgggccctggcccgctgcgagccacggcggcaagtactcgcgggagaagaaccagcccaagccgtccccgaaacgcgagtccggagaggagttccgcatggagaagttgaaccagctgtgggagaaggcccagcgactgcatcttcctcccgtgaggctggccgagctccacgctgatctgaagatacaggagagggacgaactcgcctggaagaaactaaagcttgacggcttggacgaagatggggagaaggaagcgagactcatacgcaacctcaatgtcatcttggccaagtatggtctggacggaaagaaggacgctcggcaggtgaccagcaactccctcagtggcacccaggaagacgggctggatgaccccaggctggaaaagctgtggcacaaggcgaagacctctgggaaattctccggcgaagaactggacaagctctggcgggagttcctgcatcacaaagagaaagttcacgagtacaacgtcctgctggagaccctgagcaggaccgaagaaatccacgagaacgtcattagcccctcggacctgagcgacatcaagggcagcgtcctgcacagcaggcacacggagctgaaggagaagctgcgcagcatcaaccagggcctggaccgcctgcgcagggtcagccaccagggctacagcactgaggctggtgagtgcccgcccgggactgttggttcc

SEQ ID NO: 102328 - DNA, 1016 bp, Homo sapiens
gcaggctggtacgccgccagaggaagatggcgccgcggagggtcaggtcgtttctgcgcgggctcccggcgctgctactgctgctgctcttcctcgggccctggcccgctgcgagccacggcggcaagtactcgcgggagaagaaccagcccaagccgtccccgaaacgcgagtccggagaggagttccgcatggagaagttgaaccagctgtgggagaaggcccagcgactgcatcttcctcccgtgaggctggccgagctccacgctgatctgaagatacaggagagggacgaactcgcctggaagaaactaaagcttgacggcttggacgaagatggggagaaggaagcgagactcatacgcaacctcaatggctcttggccgtggcatttccgtggacagcccgccgtcagggtggctggggctggcacgggtgtcgaggcaggaaggattgtttctggtgactgcagccgctgccgtcgcgacacagggcttggtggtggtagcatttgggtctgagatcggcccagctctgactgaaggggcttggcttccactcagcatcagcgtggcagtcaccaccccagtgaggacctcgatgtccagctgctgtcaggtctgatagtcctctgctaaaacaacacgatttacataaaaaatcttacacatctgccaccggaaataccatgcacagagtccttaaaaaatagagtgcagtatttaaaccaacaatcacaccacaccagtgcgggcctcattcgcgggcgcggaaaacaggcatgcaccggtgccgggccatatgggtccggccccaccatctgtgtcacagagggaacatcggcggatcccaaggagcgatctaatactcaacggctcatagcagtcgaagcacatgcacagaggagcagcagtagcagccaggagcggacgatcctagatgagatgaacgcgacagcagagagagaacacaatggatgacagcaagcaacaagacgacagtgcagcaacgcaccg

SEQ ID NO: 102329 - DNA, 1787 bp, Homo sapiens
  misc_feature (1)..(1): n is a, c, g, or t
naattggtggtcgaggctggtttaatcggccgagggtcaggtcgtttctgcgcgggctcccggcgctgctactgctgctgctcttcctcgggccctggcccgctgcgagccacggcggcaagtactcgcgggagaagaaccagcccaagccgtccccgaaacgcgagtccggagaggagttccgcatggagaagttgaaccagctgtgggagaaggcccagcgactgcatcttcctcccgtgaggctggccgagctccacgctgatctgaagatacaggagagggacgaactcgcctggaagaaactaaagcttgacggcttggacgaagatggggagaaggaagcgagactcatacgcaacctcaatgtcatcttggccaagtatggtctggacggaaagaaggacgctcggcaggtgaccagcaactccctcagtggcacccaggaagacgggctggatgaccccaggctggaaaagctgtggcacaaggcgaagacctctgggaaattctccggcgaagaactggacaagctctggcgggagttcctgcatcacaaagagaaagttcacgagtacaacgtcctgctggagaccctgagcaggaccgaagaaatccacgagaacgtcattagcccctcggacctgagcgacatcaagggcagcgtcctgcacagcaggcacacggagctgaaggagaagctgcgcagcatcaaccagggcctggaccgcctgcgcagggtcagccaccagggctacagcactgaggctgagttcgaggagcccagggtgattgacctgtgggacctggcgcagtccgccaacctcacggacaaggagctggaggcgttccgggaggagctcaagcacttcgaagccaaaatcgagaagcacaaccactaccagaagcagctggagattgcgcacgagaagctgaggcacgcagagagcgtgggcgacggcgagcgtgtgagccgcagccgcgagaagcacgccctgctggaggggcggaccaaggagctgggctacacggtgaagaagcatctgcaggacctgtccggcaggatctccagagctcggcacaacgaactctgaaggcactggggagcccagcccggcagggaagaggccagcgtgaaggacctgggctcttggccgtggcatttccgtggacagcccgccgtcagggtggctggggctggcacgggtgtcgaggcaggaaggattgtttctggtgactgcagccgctgccgtcgcgacacagggcttggtggtggtagcatttgggtctgagatcggcccagctctgactgaaggggcttggcttccactcagcatcagcgtggcagtcaccaccccagtgaggacctcgatgtccagctgctgtcaggtctgatagtcctctgctaaaacaacacgatttacataaaaaatcttacacatctgccaccggaaataccatgcacagagtccttaaaaaatagagtgcagtatttaaaccaacaatcacaccacaccagtgcgggcctcattcgcgggcgcggaaaacaggcatgcaccggtgccgggccatatgggtccggccccaccatctgtgtcacagagggaacatcggcggatcccaaggagcgatctaatactcaacggctcatagcagtcgaagcacatgcacagaggagcagcagtagcagccaggagcggacgatcctagatgagatgaacgcgacagcagagagagaacacaatggatgacagcaagcaacaagacgacagtgcagcaacgcaccg

SEQ ID NO: 102330 - DNA, 923 bp, Homo sapiens
ccaggtaagaaggaagttgtgtttgttttttttattaaaaaagtcgggcaacgagggtcaggtcgtttctgcgcgggctcccggcgctgctactgctgctgctcttcctcgggccctggcccgctgcgagccacggcggcaagtactcgcgggagaagaaccagcccaagccgtccccgaaacgcgagtccggagaggagttccgcatggagaagttgaaccagctgtgggagaaggcccagcgactgcatcttcctcccgtgaggctggccgagctccacgctgatctgaagatacaggagagggacgaactcgcctggaagaaactaaagcttgacggcttggacgaagatggggagaaggaagcgagactcatacgcaacctcaatgtcatcttggccaagtatggtctggacggaaagaaggacgctcggcaggtgaccagcaactccctcagtggcacccaggaagacgggctggatgaccccaggctggaaaagctgtggcacaaggcgaagacctctgggaaattctccggcgaagaactggacaagctctggcgggagttcctgcatcacaaagagaaagttcacgagtacaacgtcctgctggagaccctgagcaggaccgaagaaatccacgagaacgtcattagcccctcggacctgagcgacatcaagggcagcgtcctgcacagcaggcacacggagctgaaggagaagctgcgcagcatcaaccagggcctggaccgcctgcgcagggtcagccaccagggctacagcactgaggctgagttcgaggagcccagggtgattgacctgtgggacctggcgcagtccgccaacctcacggacaaggagctggaggcgttccgggaggagctcaagcacttcgaagccacgtcaacccggaccagctattat

SEQ ID NO: 102331 - DNA, 1338 bp, Homo sapiens
tattcaggtctttcatcaaatttaggaagtcttcagccattatttcttcaagtattctctctctccctcaaccccacttctggaactgggcgggagttcctgcatcacaaagagaaagttcacgagtacaacgtcctgctggagaccctgagcaggaccgaagaaatccacgagaacgtcattagcccctcggacctgagcgacatcaagggcagcgtcctgcacagcaggcacacggagctgaaggagaagctgcgcagcatcaaccagggcctggaccgcctgcgcagggtcagccaccagggctacagcactgaggctgagttcgaggagcccagggtgattgacctgtgggacctggcgcagtccgccaacctcacggacaaggagctggaggcgttccgggaggagctcaagcacttcgaagccaaaatcgagaagcacaaccactaccagaagcagctggagattgcgcacgagaagctgaggcacgcagagagcgtgggcgacggcgagcgtgtgagccgcagccgcgagaagcacgccctgctggaggggcggaccaaggagctgggctacacggtgaagaagcatctgcaggacctgtccggcaggatctccagagctcggcacaacgaactctgaaggcactggggagcccagcccggcagggaagaggccagcgtgaaggacctgggctcttggccgtggcatttccgtggacagcccgccgtcagggtggctggggctggcacgggtgtcgaggcaggaaggattgtttctggtgactgcagccgctgccgtcgcgacacagggcttggtggtggtagcatttgggtctgagatcggcccagctctgactgaaggggcttggcttccactcagcatcagcgtggcagtcaccaccccagtgaggacctcgatgtccagctgctgtcaggtctgatagtcctctgctaaaacaacacgatttacataaaaaatcttacacatctgccaccggaaataccatgcacagagtccttaaaaaatagagtgcagtatttaaaccaacaatcacaccacaccagtgcgggcctcattcgcgggcgcggaaaacaggcatgcaccggtgccgggccatatgggtccggccccaccatctgtgtcacagagggaacatcggcggatcccaaggagcgatctaatactcaacggctcatagcagtcgaagcacatgcacagaggagcagcagtagcagccaggagcggacgatcctagatgagatgaacgcgacagcagagagagaacacaatggatgacagcaagcaacaagacgacagtgcagcaacgcaccg

SEQ ID NO: 102332 - DNA, 1720 bp, Homo sapiens
gcaggctggtacgccgccagaggaagatggcgccgcggagggtcaggtcgtttctgcgcgggctcccggcgctgctactgctgctgctcttcctcgggccctggcccgctgcgagccacggcggcaagtactcgcgggagaagaaccagcccaagccgtccccgaaacgcgagtccggagaggagttccgcatggagaagttgaaccagctgtgggagaaggcccagcgactgcatcttcctcccgtgaggctggccgagctccacgctgatctgaagatacaggagagggacgaactcgcctggaagaaactaaagcttgacggcttggacgaagatggggagaaggaagcgagactcatacgcaacctcaatgtcatcttggccaagtatggtctggacggaaagaaggacgctcggcaggtgaccagcaactccctcagtggcacccaggaagacgggctggatgaccccaggctggaaaagctgtggcacaaggcgaagacctctgggaaattctccggcgaagaactggacaagctctggaaatccacgagaacgtcattagcccctcggacctgagcgacatcaagggcagcgtcctgcacagcaggcacacggagctgaaggagaagctgcgcagcatcaaccagggcctggaccgcctgcgcagggtcagccaccagggctacagcactgaggctgagttcgaggagcccagggtgattgacctgtgggacctggcgcagtccgccaacctcacggacaaggagctggaggcgttccgggaggagctcaagcacttcgaagccaaaatcgagaagcacaaccactaccagaagcagctggagattgcgcacgagaagctgaggcacgcagagagcgtgggcgacggcgagcgtgtgagccgcagccgcgagaagcacgccctgctggaggggcggaccaaggagctgggctacacggtgaagaagcatctgcaggacctgtccggcaggatctccagagctcggcacaacgaactctgaaggcactggggagcccagcccggcagggaagaggccagcgtgaaggacctgggctcttggccgtggcatttccgtggacagcccgccgtcagggtggctggggctggcacgggtgtcgaggcaggaaggattgtttctggtgactgcagccgctgccgtcgcgacacagggcttggtggtggtagcatttgggtctgagatcggcccagctctgactgaaggggcttggcttccactcagcatcagcgtggcagtcaccaccccagtgaggacctcgatgtccagctgctgtcaggtctgatagtcctctgctaaaacaacacgatttacataaaaaatcttacacatctgccaccggaaataccatgcacagagtccttaaaaaatagagtgcagtatttaaaccaacaatcacaccacaccagtgcgggcctcattcgcgggcgcggaaaacaggcatgcaccggtgccgggccatatgggtccggccccaccatctgtgtcacagagggaacatcggcggatcccaaggagcgatctaatactcaacggctcatagcagtcgaagcacatgcacagaggagcagcagtagcagccaggagcggacgatcctagatgagatgaacgcgacagcagagagagaacacaatggatgacagcaagcaacaagacgacagtgcagcaacgcaccg

SEQ ID NO: 102333 - DNA, 1793 bp, Homo sapiens
gcaggctggtacgccgccagaggaagatggcgccgcggagggtcaggtcgtttctgcgcgggctcccggcgctgctactgctgctgctcttcctcgggccctggcccgctgcgagccacggcggcaagtactcgcgggagaagaaccagcccaagccgtccccgaaacgcgagtccggagaggagttccgcatggagaagttgaaccagctgtgggagaaggcccagcgactgcatcttcctcccgtgaggctggccgagctccacgctgatctgaagatacaggagagggacgaactcgcctggaagaaactaaagcttgacggcttggacgaagatggggagaaggaagcgagactcatacgcaacctcaatgtcatcttggccaagtatggtctggacggaaagaaggacgctcggcaggtgaccagcaactccctcagtggcacccaggaagacgggctggatgaccccaggctggaaaagctgtggcacaaggcgaagacctctgggaaattctccggcgaagaactggacaagctctggcgggagttcctgcatcacaaagagaaagttcacgagtacaacgtcctgctggagaccctgagcaggaccgaagaaatccacgagaacgtcattagcccctcggacctgagcgacatcaagggcagcgtcctgcacagcaggcacacggagctgaaggagaagctgcgcagcatcaaccagggcctggaccgcctgcgcagggtcagccaccagggctacagcactgaggctgagttcgaggagcccagggtgattgacctgtgggacctggcgcagtccgccaacctcacggacaaggagctggaggcgttccgggaggagctcaagcacttcgaagccaaaatcgagaagcacaaccactaccagaagcagctggagattgcgcacgagaagctgaggcacgcagagagcgtgggcgacggcgagcgtgtgagccgcagccgcgagaagcacgccctgctggaggggcggaccaaggagctgggctacacggtgaagaagcatctgcaggacctgtccggcaggatctccagagctcggcacaacgaactctgaaggcactggggagcccagcccggcagggaagaggccagcgtgaaggacctgggctcttggccgtggcatttccgtggacagcccgccgtcagggtggctggggctggcacgggtgtcgaggcaggaaggattgtttctggtgactgcagccgctgccgtcgcgacacagggcttggtggtggtagcatttgggtctgagatcggcccagctctgactgaaggggcttggcttccactcagcatcagcgtggcagtcaccaccccagtgaggacctcgatgtccagctgctgtcaggtctgatagtcctctgctaaaacaacacgatttacataaaaaatcttacacatctgccaccggaaataccatgcacagagtccttaaaaaatagagtgcagtatttaaaccaacaatcacaccacaccagtgcgggcctcattcgcgggcgcggaaaacaggcatgcaccggtgccgggccatatgggtccggccccaccatctgtgtcacagagggaacatcggcggatcccaaggagcgatctaatactcaacggctcatagcagtcgaagcacatgcacagaggagcagcagtagcagccaggagcggacgatcctagatgagatgaacgcgacagcagagagagaacacaatggatgacagcaagcaacaagacgacagtgcagcaacgcaccg

SEQ ID NO: 102334 - DNA, 718 bp, Homo sapiens
  misc_feature (666)..(666): n is a, c, g, or t
  misc_feature (689)..(689): n is a, c, g, or t
gcaggctggtacgccgccagaggaagatggcgccgcggagggtcaggtcgtttctgcgcgggctcccggcgctgctactgctgctgctcttcctcgggccctggcccgctgcgagccacggcggcaagtactcgcgggagaagaaccagcccaagccgtccccgaaacgcgagtccggagaggagttccgcatggagaagttgaaccagctgtgggagaaggcccagcgactgcatcttcctcccgtgaggctggccgagctccacgctgatctgaagatacaggagagggacgaactcgcctggaagaaactaaagcttgacggcttggacgaagatggggagaaggaagcgagactcatacgcaacctcaatgtcatcttggccaagtatggtctggacggaaagaaggacgctcggcaggtgaccagcaactccctcagtggcacccaggaagacgggctggatgaccccaggctggaaaagctgtggcacaaggcgaagacctctgggaaattctccggcgaagaactggacaagctctggcgggagttcctgcatcacaaagagaaagttcacgagtacaacgtcctgctggagaccctgagcaggaccgaagcagccacgagctgaggagagctggcacatcaacaggcctgaccgctgncaggcagcacaggctcagactgngctgagtcaggacccagggatgaccgtgt

SEQ ID NO: 102335 - DNA, 1808 bp, Homo sapiens
ccaggtaagaaggaagttgtgtttgttttttttattaaaaaagtcgggcaacgagggtcaggtcgtttctgcgcgggctcccggcgctgctactgctgctgctcttcctcgggccctggcccgctgcgagccacggcggcaagtactcgcgggagaagaaccagcccaagccgtccccgaaacgcgagtccggagaggagttccgcatggagaagttgaaccagctgtgggagaaggcccagcgactgcatcttcctcccgtgaggctggccgagctccacgctgatctgaagatacaggagagggacgaactcgcctggaagaaactaaagcttgacggcttggacgaagatggggagaaggaagcgagactcatacgcaacctcaatgtcatcttggccaagtatggtctggacggaaagaaggacgctcggcaggtgaccagcaactccctcagtggcacccaggaagacgggctggatgaccccaggctggaaaagctgtggcacaaggcgaagacctctgggaaattctccggcgaagaactggacaagctctggcgggagttcctgcatcacaaagagaaagttcacgagtacaacgtcctgctggagaccctgagcaggaccgaagaaatccacgagaacgtcattagcccctcggacctgagcgacatcaagggcagcgtcctgcacagcaggcacacggagctgaaggagaagctgcgcagcatcaaccagggcctggaccgcctgcgcagggtcagccaccagggctacagcactgaggctgagttcgaggagcccagggtgattgacctgtgggacctggcgcagtccgccaacctcacggacaaggagctggaggcgttccgggaggagctcaagcacttcgaagccaaaatcgagaagcacaaccactaccagaagcagctggagattgcgcacgagaagctgaggcacgcagagagcgtgggcgacggcgagcgtgtgagccgcagccgcgagaagcacgccctgctggaggggcggaccaaggagctgggctacacggtgaagaagcatctgcaggacctgtccggcaggatctccagagctcggcacaacgaactctgaaggcactggggagcccagcccggcagggaagaggccagcgtgaaggacctgggctcttggccgtggcatttccgtggacagcccgccgtcagggtggctggggctggcacgggtgtcgaggcaggaaggattgtttctggtgactgcagccgctgccgtcgcgacacagggcttggtggtggtagcatttgggtctgagatcggcccagctctgactgaaggggcttggcttccactcagcatcagcgtggcagtcaccaccccagtgaggacctcgatgtccagctgctgtcaggtctgatagtcctctgctaaaacaacacgatttacataaaaaatcttacacatctgccaccggaaataccatgcacagagtccttaaaaaatagagtgcagtatttaaaccaacaatcacaccacaccagtgcgggcctcattcgcgggcgcggaaaacaggcatgcaccggtgccgggccatatgggtccggccccaccatctgtgtcacagagggaacatcggcggatcccaaggagcgatctaatactcaacggctcatagcagtcgaagcacatgcacagaggagcagcagtagcagccaggagcggacgatcctagatgagatgaacgcgacagcagagagagaacacaatggatgacagcaagcaacaagacgacagtgcagcaacgcaccg

SEQ ID NO: 102336 - DNA, 1226 bp, Homo sapiens
  misc_feature (1148)..(1148): n is a, c, g, or t
  misc_feature (1169)..(1169): n is a, c, g, or t
ccaggtaagaaggaagttgtgtttgttttttttattaaaaaagtcgggcaacgagggtcaggtcgtttctgcgcgggctcccggcgctgctactgctgctgctcttcctcgggccctggcccgctgcgagccacggcggcaagtactcgcgggagaagaaccagcccaagccgtccccgaaacgcgagtccggagaggagttccgcatggagaagttgaaccagctgtgggagaaggcccagcgactgcatcttcctcccgtgaggctggccgagctccacgctgatctgaagatacaggagagggacgaactcgcctggaagaaactaaagcttgacggcttggacgaagatggggagaaggaagcgagactcatacgcaacctcaatgtcatcttggccaagtatggtctggacggaaagaaggacgctcggcaggtgaccagcaactccctcagtggcacccaggaagacgggctggatgaccccaggctggaaaagctgtggcacaaggcgaagacctctgggaaattctccggcgaagaactggacaagctctggcgggagttcctgcatcacaaagagaaagttcacgagtacaacgtcctgctggagaccctgagcaggaccgaagaaatccacgagaacgtcattagcccctcggacctgagcgacatcaagggcagcgtcctgcacagcaggcacacggagctgaaggagaagctgcgcagcatcaaccagggcctggaccgcctgcgcagggtcagccaccagggctacagcactgaggctgagttcgaggagcccagggtgattgacctgtgggacctggcgcagtccgccaacctcacggacaaggagctggaggcgttccgggaggagctcaagcacttcgaagccaaaatcgagaagcacaaccactaccagaagcagctggagattgcgcacgagaagctgaggcacgcagagagcgtgggcgacggcgagcgtgtgagccgcagccgcgagaagcacgccctgctggaggggcggaccaaggagctgggctacacggtgaagaagcatctgcaggacctgtccggcaggatctccagagctcggcacaacgaactctgaaggcactggggggtggccaggaaggcctgccanatatttgtgagaaatctgccnttcgatttcacatggaagatgctaaaggacaaattcaacgagtgcggccacgtgctg

SEQ ID NO: 102337 - DNA, 1735 bp, Homo sapiens
ccaggtaagaaggaagttgtgtttgttttttttattaaaaaagtcgggcaacgagggtcaggtcgtttctgcgcgggctcccggcgctgctactgctgctgctcttcctcgggccctggcccgctgcgagccacggcggcaagtactcgcgggagaagaaccagcccaagccgtccccgaaacgcgagtccggagaggagttccgcatggagaagttgaaccagctgtgggagaaggcccagcgactgcatcttcctcccgtgaggctggccgagctccacgctgatctgaagatacaggagagggacgaactcgcctggaagaaactaaagcttgacggcttggacgaagatggggagaaggaagcgagactcatacgcaacctcaatgtcatcttggccaagtatggtctggacggaaagaaggacgctcggcaggtgaccagcaactccctcagtggcacccaggaagacgggctggatgaccccgggagttcctgcatcacaaagagaaagttcacgagtacaacgtcctgctggagaccctgagcaggaccgaagaaatccacgagaacgtcattagcccctcggacctgagcgacatcaagggcagcgtcctgcacagcaggcacacggagctgaaggagaagctgcgcagcatcaaccagggcctggaccgcctgcgcagggtcagccaccagggctacagcactgaggctgagttcgaggagcccagggtgattgacctgtgggacctggcgcagtccgccaacctcacggacaaggagctggaggcgttccgggaggagctcaagcacttcgaagccaaaatcgagaagcacaaccactaccagaagcagctggagattgcgcacgagaagctgaggcacgcagagagcgtgggcgacggcgagcgtgtgagccgcagccgcgagaagcacgccctgctggaggggcggaccaaggagctgggctacacggtgaagaagcatctgcaggacctgtccggcaggatctccagagctcggcacaacgaactctgaaggcactggggagcccagcccggcagggaagaggccagcgtgaaggacctgggctcttggccgtggcatttccgtggacagcccgccgtcagggtggctggggctggcacgggtgtcgaggcaggaaggattgtttctggtgactgcagccgctgccgtcgcgacacagggcttggtggtggtagcatttgggtctgagatcggcccagctctgactgaaggggcttggcttccactcagcatcagcgtggcagtcaccaccccagtgaggacctcgatgtccagctgctgtcaggtctgatagtcctctgctaaaacaacacgatttacataaaaaatcttacacatctgccaccggaaataccatgcacagagtccttaaaaaatagagtgcagtatttaaaccaacaatcacaccacaccagtgcgggcctcattcgcgggcgcggaaaacaggcatgcaccggtgccgggccatatgggtccggccccaccatctgtgtcacagagggaacatcggcggatcccaaggagcgatctaatactcaacggctcatagcagtcgaagcacatgcacagaggagcagcagtagcagccaggagcggacgatcctagatgagatgaacgcgacagcagagagagaacacaatggatgacagcaagcaacaagacgacagtgcagcaacgcaccg

SEQ ID NO: 102338 - DNA, 1610 bp, Homo sapiens
gcaggctggtacgccgccagaggaagatggcgccgcggagggtcaggtcgtttctgcgcgggctcccggcgctgctactgctgctgctcttcctcgggccctggcccgctgcgagccacggcggcaagtactcgcgggagaagaaccagcccaagccgtccccgaaacgcgagtccggagaggagttccgcatggagaagttgaaccagctgtgggagaaggcccagcgactgcatcttcctcccgtgaggctggccgagctccacgctgatctgaagatacaggagagggacgaactcgcctggaagaaactaaagcttgacggcttggacgaagatggggagaaggaagcgagactcatacgcaacctcaatgtcatcttggccaagtatggtctggacggaaagaaggacgctcggcaggtgaccagcaactccctcagtggcacccaggaagacgggctggatgaccccaggctggaaaagctgtggcacaaggcgaagacctctgggaaattctccggcgaagaactggacaagctctggctggaccgcctgcgcagggtcagccaccagggctacagcactgaggctgagttcgaggagcccagggtgattgacctgtgggacctggcgcagtccgccaacctcacggacaaggagctggaggcgttccgggaggagctcaagcacttcgaagccaaaatcgagaagcacaaccactaccagaagcagctggagattgcgcacgagaagctgaggcacgcagagagcgtgggcgacggcgagcgtgtgagccgcagccgcgagaagcacgccctgctggaggggcggaccaaggagctgggctacacggtgaagaagcatctgcaggacctgtccggcaggatctccagagctcggcacaacgaactctgaaggcactggggagcccagcccggcagggaagaggccagcgtgaaggacctgggctcttggccgtggcatttccgtggacagcccgccgtcagggtggctggggctggcacgggtgtcgaggcaggaaggattgtttctggtgactgcagccgctgccgtcgcgacacagggcttggtggtggtagcatttgggtctgagatcggcccagctctgactgaaggggcttggcttccactcagcatcagcgtggcagtcaccaccccagtgaggacctcgatgtccagctgctgtcaggtctgatagtcctctgctaaaacaacacgatttacataaaaaatcttacacatctgccaccggaaataccatgcacagagtccttaaaaaatagagtgcagtatttaaaccaacaatcacaccacaccagtgcgggcctcattcgcgggcgcggaaaacaggcatgcaccggtgccgggccatatgggtccggccccaccatctgtgtcacagagggaacatcggcggatcccaaggagcgatctaatactcaacggctcatagcagtcgaagcacatgcacagaggagcagcagtagcagccaggagcggacgatcctagatgagatgaacgcgacagcagagagagaacacaatggatgacagcaagcaacaagacgacagtgcagcaacgcaccg

SEQ ID NO: 102339 - DNA, 489 bp, Homo sapiens
cctacacgttcatgctcaccggctcctcgttgtagggagagagtggggactcccagccaaggatgtacacccggcccttgaggacggacacctgcgctttccctcccacttgcccctaggacttggcgatgcagtggcggacaaattcacactcagggctatgccagaaagcggtgtacaccagctcagcaaatttcaagcccaggccttgtttgattttgcacacctcccagtccatggtgaaggccttgatgtctaaatgagtgtggtaaaggatggtgcctgctggggtctcatagatacctcgggacttcattccagtgaagcggttctccacgatgtcagtacagcccacaccgtgtttgtccgcgacttcgttcaggtacatgaagaactccaaggaggtcgggtgggtggagccatcgttgacgttggtcaccttcacggggaccccttttttaactcgatctcgaggatgtcaggggtgtt

SEQ ID NO: 102340 - DNA, 662 bp, Homo sapiens
aaggtggcacaagacgtatcgggcagccgttaattgctctgtgggtgctggagggaggaagcacacatcagcacaggagaataatacccggattcaggtcaagcagagatgtgattaaagaaaggacatgcacagtgctttttcaaacaaggacagtcttacaccgggaagagagttattgaaaagaagaacaccgcacccctcgttcctacaataccctgatatcccagggagcccaggcctgctcccgaggaggctgcagcggctaaggctccccaaacctttaggtttcacatcccctttagatgagttcatacccagggctaaagttgtaagccttcccatacatcccacctcccaacatcgggaacaaaggcctcttctgccaagagggtgacagatcttccctagcagccccgagagtcaccgaggggcactgtcactgttttctgctgtctgtctaggcgatctgacccaggagttatactccctcccaatcatcagcagggcctgcctttctattaacaggctgtgggctctgaatcctacagagaagtgaacaagcagcccctccacagctcggactggagtttgctacaattcttaaccgaactcctctctctccctcttcctgggttcttgttcacctggcggcactacct

SEQ ID NO: 102341 - DNA, 463 bp, Homo sapiens
gagattcggggacccgctggtctgctgtggcgttgggccacagtcagaggaccatcaagtccggggtgtcatggacccggggtcctggcctgctgtctggaccccagtcttgcctccccaacccaggacggaggacctttcttgacaccatctctagctactccacacctgctggggctgcggctggaggcttgggggtcgtgcttccgggcagtgacaccataaccaccagactccagacaagccctggacacctgtgtggacggccgcaggggcacattccagcgggttcacagcagaccggcgccagtcaggacccagtctcgggcagcgaagccagcacttggtttgaatccctccggggcaatgtagaccccagatgaaggagatgggtggccccccagcaactcaggcaaagaagcacccctgaggaaaggagatgcagcccagcgctgcccccaag

SEQ ID NO: 102342 - DNA, 204 bp, Homo sapiens
gctgtgcagctccttatcatggtgagttggctgttggggtgagggtttcggctgtagctgattcggtttatcttatttggtcccgaagcgaccttgaaatccctcagccacccagaggaggggtcattggagttgaagtcgggccccttggcaggagcggctgtctcccaaaatgttccccttcagagttctggtccctttcgg

SEQ ID NO: 102343 - DNA, 702 bp, Homo sapiens
ccaaagtgttgggattacaggcgtgagccaccgtgcccggccctaatattatcttagctgggggttcaggaaggcctcttagcagagccctgaaaggaggtgagggagtgagccagtgaaaaacgtgggaagaacgttccaggagcaggcgctaaggccctgaggcaggagctaggtgtggtggaagagcctgcttagctggagaggtgagggagactggtgggaaaggtcagatagcggcacgtctcgtgcgggattcaaatggggtaccctttgcgcgccaaaaggtggtctgtgcgtgactcccgccccaaaaatatctatcgctttataggcagaccccacaattcctgaaatcctttatctgtattaaaggtccacgtactgactgtcaacattctgccactcctttgccccaattcaaccctggattaccgtatcccttatgcgtatatgtatatgacatcattgggagacagaacaaagggggtgtcaatcaccacaatcgtgatacaacaccaagggactacgaagtatgccaccgcgtgggccatttgcaatataacatggtgtcaacagggcaccgacctttggtagccctcccaaaggggtaaaaggttagaatcacatagcccgatcacgtcgggctttccacagaaagttagactgaagaaatatacaagggccaacagagttgccaaa

SEQ ID NO: 102344 - DNA, 149 bp, Homo sapiens
gctgctgtagactgggaactcacggcatgcaaagtgccttatgcggctttcccttctgcccttagccacctccatgagcagatggctcgccctgactgcggtggagccgagaaaatgcagaggcggggaggccagcagtcagcgaggca

SEQ ID NO: 102345 - DNA, 309 bp, Homo sapiens
  misc_feature (21)..(21): n is a, c, g, or t
ccagatataggctgctggttngtctagatcagtgtactcaaaggatcttttttccttatgcttttctcctcctgtgtgttgacttacaaaaaatctattttcctcccagtctgtcatgttacttttgtgtgtatacaaattgagataaaatttacccttttaaagcatacggtccagtgatttttagtatattcacaaggttgtgcaaccatcaccactatctaattttagaacacttttttcttatcccctgaaggaaacttccagcctgttagcagtctttccttattccccctttctctctccact

SEQ ID NO: 102346 - DNA, 772 bp, Homo sapiens
ggaaaatgagaagtgagatctagttctccctagcttagcaatgcttatctatatcctttcgagttttactgagatttcagaaatggaacagaatcttggctgcactttccctcttcataaaatttcacatttatatgagattctgcatttatttttttctattactgtttctaatgctgcaatttgggtagtcacaatgttccacttaacctaagtcttccttgttaatatttgagtccatttttgcatttttttattgttaattagagaatgatttctgaacattttctatttttagagcaattttacctgcattatcttattacacacacaaaagctttttgaataagtaggacatcataggacattcaaaagaacacagactcagacaagcctgagtatgaatctgaattctgccagtcaagctgtattattttggtcacttcatttaacctcatttgcatctcagcttcctcatccataaaatgaggatcattatgcatgtctcataaagttgccataagaattaggataatgtatgttaagtgttagaccagcacctgaaatttagtagatactaaataagtagctgctattattatttgccatattttataaattaggaaactgaaacacagacatattcctcatgccagtatagggggttaggtcacctagttattacaggcaaactgcagactttgttttgaacaagccttattgagaatgatggtatagagtacaaagtacacaagcaaaagatacagaaaaa

SEQ ID NO: 102347 - DNA, 323 bp, Homo sapiens
aacctctctaggacccatttgatagattaaaattccagctctaggccaggcgcagtggctcacatctgtaatcccagcactttgggaggccgagatgggcagatcaccctgaactcaggagttcgagaccagcctaggcaacatggagaaaccccatctttaccaaaaatacaaaaatattagccaggcgtagtgttgtgctccagctacttgggaggctgacatgggaggattgcttgagcctgggaggtggagggtgcagtgagctgagattgtgcccctgcacttcagcctgggcaatggagcaagaccctccctgtctc

SEQ ID NO: 102348 - DNA, 279 bp, Homo sapiens
tttcagaacagtataggtcaggttgcaaattgtctgtcatgtctgatttttccttgtgctttagaaagaaaaccctaggttgtagttgtccacatggcagcctaggtaatccttgtgtctcagctttccttgcagtaattatggctgtgtgtctaactaacttttaggctactgggatatgcacaaatgatgtgtgtcacttccaaatcattacaaaatatgaagccacttgctgtggacttttctccttatctagaaggctagaagcagctgtaggac

SEQ ID NO: 102349 - DNA, 143 bp, Homo sapiens
tgggtagatagatggataaaataaatatactaatagctaacatttattaagacttaccaaagcactcttctaagtttacatgtttaattagctcatttcattcacatggccactctgtgaaagcagctctactgtgcttccac

SEQ ID NO: 102350 - DNA, 353 bp, Homo sapiens
aatagagcatataaaatggttaagtattggttcctgaaatactgtttcagctaaatattctatttactgtgtatactgggtcacaatataaagtgtttcctgttatgaaatgcaatttaaaaaaagaaagcttgaaagactgctgcaggaggcaccggccatccagtgattgttggaagagtctggattgtgtggagcctgaccttagataaggagcagcagatccacaactcaggaagtctagagatgcttagcacttcttcttttgagtgagaagatggaatcactcttggtttctaaaatatttttcttctctgctgtgtatcgggcaacctcacatgattcagtgggac

SEQ ID NO: 102351 - DNA, 642 bp, Homo sapiens
agcagtggcaatcccctcaggtcttccttcgctgtgtggaagctttgttctttcgctctttgcaggaactcttgctgctgctcgctctttgggtccacgctgcctttaggagctgtaacactcacggcgaaggtccgcagcttcactcctgagccagcgagaccacgagcccaccgggaggaaagaacaactccagacgcgccgccttaagagctgtaacactcaccgtgaaggtccgcagcttcactcctgagccggcgagaccacgaacccaccagaaggaagaaactccaaagacgttcaaacatcagaaggaacaaactccggacacgccacctttaagaactgtaacactcaccgcgagggtccatggcttcattcttgaagtcagtgagatcaagaacacaccaattctggacccagtatctccccataccctaactcctttcccaaagtaggcagaaaaacagccctgttgttccggtggaagccttagctctgtattccttttagactgtatttcaaaacgcattattagagccccaaagtcacctggtgaaagaatgtgagagctggaagtggcctcaaaatccagttgaaccctcttatttcatatgtttggaaactgagcactagaaaagg

SEQ ID NO: 102352 - DNA, 423 bp, Homo sapiens
ggcatcagatttcctgtctttgtggggatgatggacccgagtaaagatgcccattcggggtcaaaggcagagccgcttctgcagcttctcaaagcgttgtttgttttttttctgagacggagtcttgctctgtcgcccaggctggagtgcagtgccgcgatcttggctcactgcagccttcacctcccgggttcaagcgattctcgtgcctcagcctccctgagtagctgggactacaggcgtgcgccacagggtggtttatgttcgtttaaaaaatgtattgcttagtgattcaatatttgttagttatgaaaaaaccctcgtgaggatatcatttaattgttaacagatggttaactttaaccagtggtttacttcctgattttaagatccttttcttgattacatgattttccaccctaa

SEQ ID NO: 102353 - DNA, 1112 bp, Homo sapiens
gatgtgggtggatcacttgaggccaggagtttgaaaccagcctgggcaacaaagtgagaccccttctctgcaaaaaataaaaaaattagctgggtgtggtagcgggcgtctgtagttccagctactcttgggaggctgaggttggaagatggcttgagtgcaggaggcgaaggtttcagtgagtcgagatctcgccactgcactccaccctaagtgacagagtcagatcctgtcccaaaagaaagagagaaaaaaagagatctgtcttgaaagaaaatatgagggtttgtgggcttctgagcaaaagagaaagcaggcatgtgcctcttcaccattgttaataaagtgggctttttttctttccatgaaatgttcaaactaattaccgctttctgtatttctgaaaaatccactctaataggaacttcatattttactctatgctgtaaaaacagaatctagttttacagtggtatataaaagttgcttttgagcaaaagtaaacatttaatctactttcttccaaatattgtcataaatgaggaagctccatttacatgagttttacctatatattttagatccataaattaagagaaaaggaaagtccaaagagactaccgggattacaggcatgagccactatgccaagctcagtcggactgggctaggtgcatgtgagcgatgcagtaggcaggaacaaaaagatattggcgaccgagcccaaccccgtgtctcaaaacgaacacacaaaggtaaatcacaatctgcatggacaagtactggcatttcacattaaaggaagcaaacagggctacctgcacatacaccttaccattaccacagtgaacaaagaagcacaaacaagaaaacacaaacacacggtaggcagcacaacacgacacacagaaacaaacaaccgggcctatacgacaacacagcgagcgatccaagaaacagtgagaaccagcagcacacccgagcaacagtgagaagacaccgcgcccacaaacagacaatagtaacaacagcaaacacaaaagaactaggacgacaactaaggcgcagcacgcacacacgctgccatatactgcgcgcgataacggcacacc

SEQ ID NO: 102354 - DNA, 301 bp, Homo sapiens
taatctcctcacaggaaagactttcctccagcctccatctgcaggaattggtggtgcagatactcaaagggagccgctggaaaggaggttctaccagggagagcctggactcagacacagtgctcactcaacagacacccgctcagtgggtggacaaacgaacaaacgcagagatggccccgaggtccttccacctgtgagaccctagccctgtgggtccatacaaatgctcagctcacgtctctcttattctgcaaaggtgatgctaagaaccccggggtcaacaatttttttccccgta

SEQ ID NO: 102355 - DNA, 411 bp, Homo sapiens
tccacttcagccagggtgaggctgaggaaggcatccctggggagtggcctgagagcaatgaggaatcggcctgagacagggacagggttggtgaggtcagtgtggctggagcaaggtgtggggtggagaatcgcagggagatgctgtcagagaggtgggcagaggctggatcctatggtgaggagtttccattttattctagtgtgatgagcagccactgacggctttaagcagaagagtgaggctatcacctttaccagctggtggggatttgcaaagtgccattccatctgctctcaccacctgcagatgtgggtggggtcaggtggaacatccccatttgcggatgaaacagctgaggccccaagaaaggaagacacttgccagaggtcatccatcctccatgtgaga

SEQ ID NO: 102356 - DNA, 128 bp, Homo sapiens
ggatatttgtaaaatggattattatacagcaatgaaaaggagtgagttatcaccacacttaccagcaaggatgaatcttaaaaattaatattgaccaagaaaagaaagttgcaaaggagccacagttg

SEQ ID NO: 102357 - DNA, 452 bp, Homo sapiens
aagccatcattattcttacataaaatcttttcaagtttattaaccctaaagcttgaatatttagttgaatccaatgttcttagatcgtattctatttctccctgcaaattatagagaaatcaccaataaacatcctggttcataatacgagagctgcaacgatttttgcccttgcctctgtctctgcaacagaaagggagagagaggaaagaatggatttggcattctagctgagctccaggcacccatgcatccatgcagcatatgcacttcaaagggtactgggcagccaccaagagaggccccaaactgcaccctcaccaggtactgtggtttagttggtcttcactccctgcccccactgcacctccacttaatattcacttttattgcaaccacattcttcacaattgatcagcagtttcttttggaaattcaggataaaaaaaaaa

SEQ ID NO: 102358 - DNA, 272 bp, Homo sapiens
aaggaattgaaatgccattgtgggataaaattaaatattgtcaaaggcctgctctgagccagtctatggactaggtagatatattggggagataatgaagtaggctcttgttggaaacagagcagaccaaaccaaacagaaaatgaatttgtcagaccaggcacggtggctcactcctgtaatccccacactttggtaggctgaggcgagtggatcacctgaggtcgggagtttgagaccagcctgatgaacatgaagaaactccctctact

SEQ ID NO: 102359 - DNA, 216 bp, Homo sapiens
aagttcttagcatttccttcaaggaagacataatttctacggaagcaatacgtagtgtttttcctgttccctgcttgtttaacattataaaagtaatccagacttgttttacaccagtagtgaaaagagggctctaccaggcatggtggtttacacctggaatcccagcactttgggaggccaaggtgggagggccacataaacccaggagtttga

SEQ ID NO: 102360 - DNA, 283 bp, Homo sapiens
tgcctcattatactggctatgacctctagtataatgttgaatagaagtggttagagtggacatctttgcctttttcctgattttcggggtaacatgttcaatatttcacaattaagtacaatctatctgtagctctttcatacatgcacttcctctatttctaatctgctgaatttttatcatgaaagggcactgaattttgtcagatgcgttttctgtatttattgaatagactatatggtttttctcctttattatctttttttttttttttttttttttt

SEQ ID NO: 102361 - DNA, 225 bp, Homo sapiens
agagaaaaccaaaaactatgtcccatatcccccatatctgtacccaccaaatacagataatagaaaagattagtgctaactggcatcctaatactatctgaacttaaaatgcaaatttaggctggagtcccaggctctgacctcaccatcccataaaatacaacatcatcttttgtgggataaaaatctctacctttcatccttctgtttttttttttttttttt

SEQ ID NO: 102362 - DNA, 407 bp, Homo sapiens
tgtgggtgtgtccagctctgacatgttcattctggcagactgagcaggaaaggagcaagtcgtgtgcctggcacaagttgaccttcttgcctagtgctctgtaccaaatgaccctctccactgcctggaagagagaaagggttaaacctctccaaagagaaactgtcagccggtggtggtaccaccagctgagatgacaggtggagaatccaaagcagagccatggcaagaaggtcccacccagccagtggttcagtgaccaggcatagaagctccgtgaccagtgcttctgtgcgtcttgtgagaacgcagaggctacatcatcctgaatatgattttcccatggtagggacaaggaaaccaaagccctgagacatcaagcaagtagcccgaggacacagtgctgg

SEQ ID NO: 102363 - DNA, 548 bp, Homo sapiens
tgtgggtgtgtccagctctgacatgttcattctggcagactgagcaggaaaggagcaagtcgtgtgcctggcacaagttgaccttcttgcctagtgctctgtaccaaatgaccctctccactgcctggaagagagaaagggttaaacctctccaaagagaaactgtcagccggtggtggtaccaccagctgagatgacaggtggagaatccaaagcagagccatggcaagaaggtcccacccagccagtggttcagtgaccaggcatagaagctccgtgaccagtgcttctgtgcgtcttgtgagaacgcagaggctacatcatcctgaatatgattttcattcactcaattcacaaggatgtgcagctgttataggcacggaacaaggggttgcattctattgtaagccatcaaaactttcactgggactgggttcaatggcttacacttataatccgagcactttaggaggccaaggcaggaggatcacttgaggccaagagtttgagaccagcctgggcaacatagtgagaccccatttcttaaa

SEQ ID NO: 102364 - DNA, 445 bp, Homo sapiens
gaatatgacccacctccctctccgacatctaagaggagaaggccttctctccactcccctccctgcatatctgaactctgggaagaggcagctaccccaaggctcagtcttcagttctgggccatcaaacatttaaccgatgattcaagtgaagatgtaaaaagtatgtctaataaaagaccacagactgggaggtattgctaaatgcacgaaagaacaaaccctaaaggtttgaatgttatcccaaatgcaaaagataaaatctatacagaaatattgaaatcttggcttgaaacacttgatagctgagaacctcctaaggttgcagagggggtgcaagactcagagaaagggacagagacccagagaaagggatatgggtcaacacgatgacaggcaggaccagggcgatagaaatgcagagaagaggatgtcggagagggag

SEQ ID NO: 102365 - DNA, 234 bp, Homo sapiens
cccaagtggtgcagaaaaagcatttgacaaaattcaacatcctttcatggtaaaaatgctcagtaaactctgaatagaaggaaactaactcaacataacaaaagctgtctgtgaataacccacagcaaacatcatacttaatggtgaaagactgaaagctttttctctaagatcagaaacaagaaaaaaatttccactttcaccgtatagcattggaaatgctagacatagcaa

SEQ ID NO: 102366 - DNA, 1309 bp, Homo sapiens
ctggacccagggtgtgctcctcatttccacacagtggtggagggaagggataggaacagaacatggagggaggctcagcaggctcccaggacacatgcacttgaggcccaaaaggacctctgctcccccagtcacttgatgcgggaaaacatgcaccttcttagggaagatctaggagaaaggaaacagtaagccactgcttcttggaaaatcttctgggggtctgacctgctgggactgttccctttcctcttgccccgtaagattcctagggcgggggggggaggagggggcacagtacctatttggtggagattataccttttgtatggatcgcgcggggaaccatcgctataacatggggtgcggagagagatcctgaacctgagtctgtggcgaccagaacacagagggctggagctgctgcctgctcacacagaactaggtcgggtggactcggctggatgagggagttacagttgaaacggcctgccttaattattccaaagagaccacggagttaagcactccacagagagagcccactcgagcgccgtgtcttaggagcctctcactaaacagggggtgtgctcgatgggaagacagcctctacttatagatagggttacaggggttgctctccaccccgtcacacattgtggaattacccccaccttgaaacgcccgtatacctctttgagacaaggcgggcaagcaatatagcacgctataagctcgcaaggcggaacactcttttggttagataaacggagcagctcttcaagagacgggggttcgagcaagatagaaaagcacaaacacccctttggtgtggcgtcagccctatgtgcgccccggaagtgatgtgaagcagtgagggcaaaatgggttgacgcgaagcaccactattgtgggttgtcgactcatggagcacacgctcggccttggagcaatatctgtatagaacggcgctgaaagggtggcacacgcctggcgttaaacacactgtccgccaatgcagacaaggcacgatgggggagtactgtgcgcaaaaacaggcacaaccctcacgcgccagagggggagctcacgcccaacaggagccccctcccgagtagggcgaacaaaaaagggccccggcaacagaactcacaggtgatatccaggcgcgattggcgtcaccccaaccatgagggggccacgagggaaacaccgaagcacacagcacacaatgggggcggccttgcaccagtaggccacagaggggaggaaaacaacagagaacacatcggggggggaaaaataaggg

SEQ ID NO: 102367 - DNA, 313 bp, Homo sapiens
ataaagtatattgtgatttttttattgcttgagccctagtgcttctgtttctccttgtgtagctattaagactcaagtatatcctatggaatctttgtgtatttggaaagtattaatttgtttttaaaaacttgaggcattaaaatgaccttttgattatcacttaacagtagatggttccttttcttcctttttctcttttctttttctttttttttgagacagggtcttactctgtggcccatgctggagtacagtggcaccagcatggctcaatgtagccttgacctcttgagcttaagggatccttctg

SEQ ID NO: 102368 - DNA, 364 bp, Homo sapiens
gaaatattatgcagccactaaaacggacatcaattcagatttctaaatgacacaatgtagcagagacagggccaggttcatgggtgtgggtcctacacagtcatacagggctccacacttacaagggccctacacttggtttaatgctccatggctgccaccttgaaattctgaatagttttataacaagagtcctccacatttacatttcacattgagcctataaattgttagctagtcctgagcagagatgactctgagtgcccattttctcctgtcttttagtaatagaacctcctccctttgcttcatacatacaccctgactagtgtttccacgctggaattccttcccagtatttctt

SEQ ID NO: 102369 - DNA, 388 bp, Homo sapiens
gagacactctacatattataactttataatgaagaacaggaatatgcagtaaaaatctgggcgtagtcaggagtaaaagcattatatatttaaaattcatggtaagagcgttaacatttataaaaaatatattttgttgtctaaaattcctaggttattaaaaatcaaaaaatctacatttaaaatgaaaatcactataacttataataaaaaagacatttttaaaagatctcccttaccgtcatgttttaaactgcatttgtctttcattatattaaattatgttgtcgccaaccgagcgtgccaagatcatgaattgtggtcttcagaggaaccacagagcaggcagtgctccctgtacagacgtccaagcccgctattagtgggt

SEQ ID NO: 102370 - DNA, 348 bp, Homo sapiens
gtcatgcctctgcccaaagccttgcaatgcctccccactgccaaggcacctaccctctgcaggtgtggctctgtgctctctgaactccggccaaaccacctctaccattcctagtaggtgctccaggctctcctccttctgctgtcacctctacctgaaatgcccttccttttcttcccagctcacctaaccttcaaggttcaaatcaactgtcacttcctcctgaagatgtccaagtccttcaggctggatatcaccactccttcagcactgacccctaggcagggtctggtctggatcccagctttccatgcgtgtcaccctgacctccccagtgcctcacatgga

SEQ ID NO: 102371 - DNA, 148 bp, Homo sapiens
cagctcatattcttgattatcaaaatataaagacatactaatttgacggatttaaaccttctctaactttctttgagatgatatacttccttctttccatagaagttaagtttcaaatatttcaacactgctaaggaataatcagggt

SEQ ID NO: 102372 - DNA, 105 bp, Homo sapiens
gtctgtgacgattcatttactcttctgccaaagatttgctgaggaccaggaatggcaggaactcgaagaggccctgcgggacacacactccctgctggaatcatg

SEQ ID NO: 102373 - DNA, 1532 bp, Homo sapiens
attctgaaagttttctgactccatatttccaagaaacttgtcccactccttaatatttcaaaggactaccatgccaaataaagataaatctttattttatgtagtgaaagcaacaatgtataatcttctcttttctacttacggcttgttaaagagaccggtaactggttctaatgttttgaaatctgcatgcttaccaatgatgtcttcatgagttagctgtaggctaatggaaaaaggaagcttatcatactttttagaactttttataattaaggtcagacctctatattattattaatattacacctcagtatttgcaattaacattgagacatccttgcaacaaaccctttggatattaacaaatattgacacacatataggaatatattaaaaatccttattaaggggaacaccaattagaatcaccataaatgatgtttatacatttcatcaagcaccaagaggccataaattatttggatgagattagccacctaaatgattacatgaaatgaccttagataccaattttgttgaacaagctttccacagtacttatcatttactcatacactattaaaagtttgacattcaggatattagctacaactcttggttatatgtgagagaaactcaactccaactagcaaagaaggaaattaatttattggcttatctaactgcaaagtccacactgtagggctgattccaagcacagctagatccagaggctaacataatgtcatcaggactctgtctctctctttcagtcccttgcaaggctactccataagcataatgattgctcaaagcagcctgaagtccaaattctagcagcttagcagctacggcagaaaaagagcatggcaaggtagcaacttccaaaatggtgacattaggagccctgtggaattgctccccagtgaaacaagcataacttgtgaaaataatttttaaaataactatctaaatactttggaaattgtcctaaggacctaggcaaatgaaggaacatttattcaagaaaatctactaaaacttggtaagaagagtgagaatcggtgacatttgaaccacagcctccctccttcccccttccagttcagtgtgataaaaattcaccttctacctgaagttcattcaagaacacagggattcctctctctccagctcccagttgaggaacatggtatctccttgggaggcacaggccatcagcatttcttattgctactagctagctatgtgttgcagagcctaaattccatggaggtgtggcctagaagccagggtgtttcttaattaagaggaggcttgcaccttaatgagaacagcaagctaaaccataggccagttagtttacaagggagagccagaggacaatgcaggtaaaacgtgccctcctggagtcataacagatatcacagactagcctcaaaaattcaaatggtccttaatttaattggatcagactgtgggggcaatttgtgctccactgaggaaataactccaaaaaaaaaccccat

SEQ ID NO: 102374 - DNA, 533 bp, Homo sapiens
tgatgagctcaggactctgtgcctttgtcctttcccgtgttgaggtgtggaattggtccctttccaagggcatgtgataaactgactcacaccaaggcagtaataagggaggccaatctccccctggggccttcgacttttagtggagtattaaaacttaatttaaactgatgaattgtaatggtgagatttcaagcccttccatgggacaatgggaagatatatttctttttaaataaagggctttcttctgaaatcagaccacgccctttcaatgactgacacaaactgctggagagacgcaaaagatgaagcagttaatcccaccacctctagctcaggatgagagagcaactcacacatccctcttagaagaccaaactctggccggttttctgcatgcctggtgctccttgcagaaacagagccttcctgcctacctctggaatcctggggcctcaggtggtgcccagtccacagtaggaacacaataggagatgagtgagtaggggagaagtgagcagttggatatg

SEQ ID NO: 102375 - DNA, 657 bp, Homo sapiens
gacctgaaagatgttcacaaatgttgtggctgaaaaggccgttttctctgactcccacttctctgggtgcccaaatgcactatctcgtagcacttaccacctggtttatttgcatcacctccgagagactgagtcacctttgactcaagccaggtctttgaaggtagagccaggtccctcttctctgtgtctccagcttctaggccagggattgatttggagcaactgcttcaaaactgttgagtaaatgaatgaatcagaggatacccagtctatctctctcatggtgtagatatggcactgaggcccagagatgagatgtcttggtcaagatcctaagccagttggtggtggcttacctccagcagatcaaggtttgcttcaagaagatcagggtttgtaggcatctccctgaatatcatgatttttatgtcctaggttattttctagtaataataataactggcattagaggttgttaaccattgtgtgccagttacaatacagagctctttataatcttcatcataaacaataggcatgcattttatctccattttacagataaggtgaagtagctttccaaggagtatacaattagaaggtggcaggatccagcctgagtccacatgtatatagctccaaagtttatgctct

SEQ ID NO: 102376 - DNA, 156 bp, Homo sapiens
tacgcaaatagtcccaaagagagcttttgtttcttactgtgagatctccatgatgcttaaaaattcttttacttaaaaaaataagctttaaagttcagcagtaacaaatgcttattcttaaaaaaaaaaaaaagcaatatgaaagtttccaataaa

SEQ ID NO: 102377 - DNA, 359 bp, Homo sapiens
aacaactctactggagccacccacaaaaaaatcagccagggttctcacccttgttgcatctgctcaaaccagcatctccttatctgaaaatattgtcttgatatgtgccgcttctgtttccacaagtacttaaaggatataggtctcattaagttggactaagtgatgctccttgaattaataagcaagacatccactcagtgaaagaaaccatgctaactctttgtacatgaataaaaattaaaataaagaaaccaatacaaacaaacaagaacaaaaaaaaaataggcatccatcactggtccacatcttgctgaagccaactatacccgtattttcatcttctctgaaaacgtttc

SEQ ID NO: 102378 - DNA, 389 bp, Homo sapiens
agggcaggggaataaaagggatgggagtgaggttgctgggggcaactgaattcacactggcccagggtggtgggccagctccctcctctctttgctcctccaatatataggcacctggagccagagggtttgttagttttaagaccccacctacatttcctatcctgggttactgacactggcagggactgacttgtaatggcaggagctggctaatcagttgcaagttcctgacatctggtaatggagaggaacaaagagtgggaggccaaatagggaacagacaagccccatgcggggtaaagtgaaatagggcagaagtggctgggcaggaagaccgagaaacacacacatgacatgttcagacatatccacgttctctctccact

SEQ ID NO: 102379 - DNA, 405 bp, Homo sapiens
agtttctgttctttaatgtttagttttttatgtaaaacattttcttattatccacacagcccctgattttctgatgtcactgattgatggagctttgtagaatacttaattttttctttttgaggcatgtttagagttacaatagtgattatttaaatataaactagtgagtttccattctttttgctaaagtaatagaggtttgttttcatctaattttttttgagacggagtctcactgtgccacccaggctgtagtgcagtggcacgatcttagctcactgcaacctccacctcctgggttcaagcgaatctcctgcctcagccgcccaagtagctgggattacaggcacccgccaacacgccgggctaattactgtatttttagtggtgacagggtttcac

SEQ ID NO: 102380 - DNA, 555 bp, Homo sapiens
cttctttttctggaagttttttttgagacagggtcttgctttgccgcacagactggaatgcggtggcatgatcatagctcattgcagcctcaaactcctgggcttaagcagtcctcccacctcagacttcgaagtagctggtattacaggtgcataacaccaccacccacgcctggctaattgttttgttttttttgtggagatggctctcactttgttgcccaggctggtttttgaactagtttcaaagtgatcctcctgccttggcctctcaaagtactaggataacagtcatgagccaccatgcccaccctagaatcatactcttttaaagcaagttaaatcagcagtaatagttctggaactagaagttaactacttactggacttttgagatgtaagtttaccatacatcaagcttaaaaacttgtagcgttctgggaaagtcaagtcaaactcttgaatgctatcctctgtggaaatagggttgggaaagagcaatgtacaagtccaagctccttaatacacataaaactctgggttgggctcatcctg

SEQ ID NO: 102381 - DNA, 193 bp, Homo sapiens
tgataagtgcagcaaaccaccatggctcatgtttacctatgtaacgaacctgcacatcctgcacatgttccccagaacttaaaattaaattaaattaaaaaaaagaagggaaaaaagtgaacagagcataaatcagctgtaattggaatccctaaaaaagtaaaaaagaaacaagtatttggagaaataatgg

SEQ ID NO: 102382 - DNA, 337 bp, Homo sapiens
acaggactggactgcattctttttctgtgcctagattgtttgacacacactcatttctacatctttgctggaggtcaaagaaccaaagcaggaaatccagaggagaatgtcaaaagtaaagactttagaaacagggctcttaaagaaagttaacggtgcccaaattatgcacctttagaaaaagaaggtgaaaaaaaggctttgtcggccgggcgcggtggctcacgcctgtaatcccagcactttgggaggccgaggcgggcggatcacgaggtcaggagatcgagaccacggtgaaaccccgtctctactaaaaaaaaaaatacaaaaaattagc

SEQ ID NO: 102383 - DNA, 185 bp, Homo sapiens
atcttagactcttatacttcaaacactgatcacgggaacagccggctcagcggctcctgagttcctaatgctcagaatatgggtgagatgataaatgtttgttgtgttaagctgccaacctttggcgggggggtaattcgtcacatggcaacagctggctaatacatatatacctacatgtatat

SEQ ID NO: 102384 - DNA, 266 bp, Homo sapiens
gaggcggacccaacttatgcggggtgaactcagaaagcttccggggctttctatcaacagcaagacctgtgtggaacaccagacctgtcccacaaccaggaacaatcctcttttgtttccagcccatttctgtacgtttcgctgttgttatctgagcattgccgaggttttcgcgtgggctgttccttaggtgctacgctaatgggagattgttactttaagcctgttctactgaacaatcccactctttcttgaaactactaaat

SEQ ID NO: 102385 - DNA, 640 bp, Homo sapiens
tggcacgaggggggtggataaacagtgtaatgtttcctttcttctgcgacaaatccttttatcttgataaaataacgtttcccgaattccattgaggtgcttcttccaactctcaccaaagcccatggacatgttacaggccatgagtcttgagtagggccacagcctcgttgctctggatactgaccaactgcccagcagcaagaagggcagcgtcttgggcttgtcttatctggccggggccttcttggcaggagcggcccccgcatcctcactctcctcaccatggctgccctgctggtccccaggtcatccggctcagggctgcaggcacgttgcttcctggtggggctgtgggaacgaatgcacaccacttggggactgcaaggcttgccctggctgtagtgttcagtaattgatctatattgctttttgacttactgaattgcagagttgggaggaacattagatcagtgatttctcagaccataatgtgcatatgaataatctggagatcttgttatattgcaaaggaggggcctagtttctgtgtttcaaacagttctcaagttatagtgatgcagtttcaggttcacacaacacacttccagtagcaaggctttaaatgattatgaaacgg

SEQ ID NO: 102386 - DNA, 696 bp, Homo sapiens
cctgctgctgctggtgcttctcaccacttttggactcagacaaagcccctgatgcagggcttgggatctggctctctagcagctggtgagggagtgcatatcatcctttacacactggaagtgcaggagaattaacttccatggaggcaaattttgaccactgggatccaggagatgaaggagaaccagcagatcaatgatatttttgtcctttgcttagatggatggagatgcagaagttcagccctacgaggtccatgattaattagctgagcagaggccagctcagtagcgcacctcctgtttgctctccctctttctttgctgcacacccctttctccctcacttttgcttccctgggattgcattcccaataaagtgttcatacataaacctttgcctcaaggctctgtttcctgggaacgcaggctggctgggcccttccccactgccagtcctggacacacactgcaaatgttccctcctagaattctcgtgactgttgtccgggctccactactgcactgcacccccatcaagccaggcattctttctttaccacagagcaattgattagattgaacctttcttcactgtgaccacaattctgtcccaattccctgaggcctacattagcctgttccacataattcctcatgttttattttttcaggtaactgatattagactttaca

SEQ ID NO: 102387 - DNA, 184 bp, Homo sapiens
atctcttagataaagtttgttaatgggccataaatacacaaagggtctggttgccaagtatccctgcaaaagggaggagaggccatatatcacttcctgggggatgggagggagtagcatctcaaggagaagtagcacaaaggcccctcctgagataggaaacaggccctgggtcaggcagctg

SEQ ID NO: 102388 - DNA, 1863 bp, Homo sapiens
  misc_feature (1766)..(1766): n is a, c, g, or t
  misc_feature (1770)..(1770): n is a, c, g, or t
  misc_feature (1813)..(1813): n is a, c, g, or t
  misc_feature (1838)..(1838): n is a, c, g, or t
  misc_feature (1862)..(1862): n is a, c, g, or t
ccctagccctgttttgtgagaagttccatacataatgctcctccacccaatacataccctcctgagagaacaggtaacaccactcgaacaaatggaggatcaaatggaaagttatccttaaaagagaagttaagcaaaatatattctatgccttctttttcttttaagatctgaagatcactgtgcaaaggactatcagggtcaaccttctgcagttaacatgccagtcatataaactgtcatttatgagttccactgtataaatccctgttttataactctgtgatctgtatatgtccctgagctctttcataagtctatctgaagcttgcactgacccagacactgcaccatttaaatggtcttgcctttgagtcttcctaattttctctaatattgccaaattttctttttcaattccttcatcctctgactttttcccactaataggctcttcttccttcatctcatagtgatctaagtcttctatatcttcagccatctcttcttcttcttcctcttcttctgaagtcacttcttctgttgtcccattctgacccgtgggtagtggttgatctagcatctcaacatccaggtgcttaggaaggttatataaactgcagagttcacatatcaaccacttcaattgctgacgaagcaaattgttgttcttagtatcttctagacgttccagaactgatgtcagatttgggtcttcagaatccacaaaccatatcggtgaagaagatggataggattccgtgatgttgcagtggagcgtgagtggcggcggcacgagtgcgggctgccctgctgcggcaccaggaactggcagtgcagctcgtccagcttccaactgacgatgcggaatcgctcgtggttcttgtcgaagatggacgccaggaacttcagctcggccttgagccctgacacggacatcttcccctcatctccggcgggaggggcgcggaaggggagccgggcgcggaaggggagccgggcccggagccgccgtcacggccgcgaccgccccgcgggccggcctgggccgcgctctccgcctcgtcgagcgctgctggaaaatggcgagggggcgcggaagcctcggcgtctgggagcccgcggccggagaagggctgcgggttagggggccggcgcccgcggttcagagtacctgtggagaagaaacaatggattccttagaccatatgctgacagatcctctggaacttggtccgtgtggagatggccatggcacgcgcatcatggaggattgcctcctgggaggcaccagagttagtctgcccgaggaccttctggaggatcctgagatcttctttgatgttgtcagcctctcaacatggcaggaagtgttaagtgattctcaacgtgaacacctccagcagtttctgccccagtttcctgaagacagtgctgagcagcagaatgaactcatcttagccttgttcagtggggagaacttccgctttggaaaccctctgcacattgcccagaagcttttccgagacggacactttaaccccgaggtggtcaagtaccggcagttatgcttcaagtcacagtacaagcgctacctcaactcccagcagcagtatttccatcggctgctgaagcaaattcttgcttcccggagtgatctgctggagatggcccggcggagtggccccgcccttcccttccggcagaaacgcccttcaccatcccgcacaccttgaaggaaccggggaattggccgggaacccaancaanccgcttactttgaaagggtcttaaaaggggaaagttgaaaaanaaaggaattgttgggtgaacaccanccccttggttcatccttggaattna

SEQ ID NO: 102389 - DNA, 6210 bp, Homo sapiens
ccctagccctgttttgtgagaagttccatacataatgctcctccacccaatacataccctcctgagagaacaggtaacaccactcgaacaaatggaggatcaaatggaaagttatccttaaaagagaagttaagcaaaatatattctatgccttctttttcttttaagatctgaagatcactgtgcaaaggactatcagggtcaaccttctgcagttaacatgccagtcatataaactgtcatttatgagttccactgtataaatccctgttttataactctgtgatctgtatatgtccctgagctctttcataagtctatctgaagcttgcactgacccagacactgcaccatttaaatggtcttgcctttgagtcttcctaattttctctaatattgccaaattttctttttcaattccttcatcctctgactttttcccactaataggctcttcttccttcatctcatagtgatctaagtcttctatatcttcagccatctcttcttcttcttcctcttcttctgaagtcacttcttctgttgtcccattctgacccgtgggtagtggttgatctagcatctcaacatccaggtgcttaggaaggttatataaactgcagagttcacatatcaaccacttcaattgctgacgaagcaaattgttgttcttagtatcttctagacgttccagaactgatgtcagatttgggtcttcagaatccacaaaccatatcggtgaagaagatggataggattccgtgatgttgcagtggagcgtgagtggcggcggcacgagtgcgggctgccctgctgcggcaccaggaactggcagtgcagctcgtccagcttccaactgacgatgcggaatcgctcgtggttcttgtcgaagatggacgccaggaacttcagctcggccttgagccctgacacggacatcttcccctcatctccggcgggaggggcgcggaaggggagccgggcgcggaaggggagccgggcccggagccgccgtcacggccgcgaccgccccgcgggccggcctgggccgcgctctccgcctcgtcgagcgctgctggaaaatggcgagggggcgcggaagcctcggcgtctgggagcccgcggccggagaagggctgcgggttagggggccggcgcccgcggttcaggattccagaattggaaataacgggagggaggacctggtccagcttcccttcctcaaataaggaaattgacacctggcgtgagaaggggttttgccatgttcgctaggctggtctcaaactcatggattcaaggggactgcccgcctggacctcccaaagtactgagattagtacctgtggagaagaaacaatggattccttagaccatatgctgacagatcctctggaacttggtccgtgtggagatggccatggcacgcgcatcatggaggattgcctcctgggaggcaccagagttagtctgcccgaggaccttctggaggatcctgagatcttctttgatgttgtcagcctctcaacatggcaggaagtgttaagtgattctcaacgtgaacacctccagcagtttctgccccagtttcctgaagacagtgctgagcagcagaatgaactcatcttagccttgttcagtggggagaacttccgctttggaaaccctctgcacattgcccagaagcttttccgagacggacactttaaccccgaggtggtcaagtaccggcagttatgcttcaagtcacagtacaagcgctacctcaactcccagcagcagtatttccatcggctgctgaagcaaattcttgcttcccggagtgatctgctggagatggcccggcggagtggccccgcccttcccttccggcagaaacgcccttcaccatcccgcacacctgaggagcgggagtggcggacccagcagcgctacttgaaggtcttaagggaagtgaaagaggagtgtggtgacacagccctgtcatctgatgaagaggatctcagctcatggcttccgagctctccagcacgttctcctagtcctgcggtgcccctgcgggtggtgcccacactttcaaccacggatatgaaaaccgcagataaagtagaactgggggacagtgacctgaagataatgttaaagaagcaccacgagaagcggaaacatcagccagatcacccggaccttttgacaggggacctgactctcaatgacatcatgactcgagtaaatgctggcaggaagggctctctggcagccttatatgacttggctgtccttaaaaaaaaggttaaggaaaaagaggaaaagaagaagaagaaaataaaaacgatcaaatcagaggcagaggacctggccgagccgctaagcagtactgaaggggtcgcacctctctcacaggccccctctccgctggcaattcctgctatcaaggaagagccccttgaagacctcaagccttgccttggaatcaatgaaatatcttccagcttcttctctcttctattagagatcttgctgctggagagtcaggctagccttcctatgctagaggagcgagttttggattggcagtcatcgccagccagctccctcaacagctggttctctgcggcccccaactgggctgagttggtactaccagccctgcagtatcttgctggagaaagtcgagctgttccttccagtttctctccatttgttgaattcaaagagaaaacccagcagtggaagttgcttggccaatcccaagataatgaaaaggaattagctgccctcttccagctatggctagagaccaaagatcaggccttctgtaagcaagaaaatgaagacagctcagatgccacaacacctgtccctcgggtaagaactgactatgtggtgcgtcccagcacgggggaggagaaacgggtttttcaggagcaggagcgttacaggtatagccaaccccataaggcgttcacctttcgcatgcacggctttgagtctgtggtggggccagtgaagggcgtgtttgacaaggagacctcgctcaacaaggctcgggagcactccctgctgcgctccgaccggcctgcctacgtcaccattctgtctcttgttcgggacgctgcggctcgactgcctaatggagaaggcacacgggcagagatctgtgaactgcttaaggactcccagtttcttgcaccagatgtcaccagcactcaggtaaatacagtagtgagtggtgcactggatcggctacattacgaaaaagatccctgtgtgaaatacgacattggacgaaagctgtggatctacctgcatcgtgaccggagtgaagaagagtttgagcggattcaccaagcacaagcagctgcagctaaagccagaaaagctcttcagcaaaaacccaagcccccatccaaggtgaagtccagtagcaaggagagctccataaaggtccttagcagtggcccttctgagcagagccagatgagcctcagtgactccagtatgccacccaccccagtcacacctgtaacccccaccacaccagcattgcccgccattcccatctcccctccacctgtatcggcagtgaacaaaagcggcccttccacagtctcagaaccagctaagtctagctcgggtgttcttctggtgtcttcaccaacaatgccacatctgggaacaatgctttccccagcttccagccagactgcacccagttctcaggctgccgcccgggtcgtgagccactctggctctgctggactgtctcaggtgcgagtggtggcccagcctagccttcctgctgttccccagcagtcgggagggccggcacagacattgccacagatgccagcaggaccgcagatccgggttccagccactgccacacagaccaaagtagtgccccagacagtaatggccactgtgcccgtcaaagcgcagactacggcagccactgtgcagcggcctggacccgggcagacagggctcacggtgacaagtctccctgccacagccagccctgtgagtaagccagccacgagttctcctgggacctctgctcccagtgcctccacggctgccgtcattcaaaatgtcacaggacagaacatcatcaagcaggtggcaatcactgggcagcttggtgtgaagccccaaacaggcaacagcattccactcacagccactaacttccgcatccagggtaaggatgtattgcgtctgccgccctcttccatcaccacagatgccaagggccagacggttctgcgaatcactccggacatgatggccacattggccaagtcccaggttaccacagtcaaattgacccaggacctcttcgggacaggaggcaacactacaggcaaaggcatctctgccaccttacacgtcacttccaatccagtacatgcagctgatagccctgccaaggccagttcagccagtgccccttcatccactccaacaggtaccactgtggtcaaagtgactcctgacctcaagccaacagaagcctcaagttcggcttttcgcttgatgccagctcttggcgtgagtgtggctgaccagaagggaaaaagcacagtggcctcttcagaagcaaaaccagctgccacgatccgcatcgtgcagggactgggagtgatgcctcccaaagcaggccagaccatcaccgttgcaacccacgccaagcaaggggcctcggtggccagtgggtctggaactgtccatacttcagcggtgtccttacccagtatgaatgctgctgtgtccaagactgtagctgtggcttctggggctgcaagcacccccatcagcatcagcacaggagcccccaccgtgcggcaggtccctgtcagcaccacggttgtgtccacgtcccaggctgggaagttgcctacacggatcacagttcccctctctgtgatcagccagccaatgaagggcaagagcgtggtcacagcccccatcatcaaaggcaaccttggagccaacctcagtgggttgggccgcaacatcatcctcacaactatgccagcaggcactaagctcattgctggcaataagcctgttagtttcctcactgctcagcagttgcagcagcttcagcagcaaggtcaggccacacaggtgcgcatccagactgtccctgcatcccatctccaacagggaacagcttctggctcctccaaagcagtctccactgttgttgtgactacagctccgtctcctaaacaggcacctgagcaacaatgattatgagagaggatggcttccgtgaaagaccatgcctggtctgtcctggctgagaagggaccagggaggttgcatcattgttttaagcttgcctgttcaaggcagccaggcgaggggtgatggcaacggtggcctggattcgtggcctggattctgctgccacgtgccatagtggagcaccctgagaaaggttcactccagggttccaaggtctgctctctaccaatctaggagaatattctgttgaaattgcaggaattaccagttacgtccaacaagccagagttctgagagtaagacccccagggaaggcttaccagttgcagagtgcacacagcgaataggctggttctccatgaggattgtattttttggcttctggtcttctccatgactagtggtctggataggagttttgtgtccagaaaattttatgtaatttatttttttaaagaacctgttgtacatctttctcaaatacaaacttgggctttagctgccccctccactaaaccgatgacttacttttttgactagaatgagaaaatggcaagaatcttagtaaggtggtagccagcttggtaactgcatagtaatcgagaggctgtaagatgggaattcatcgtaggcagcgaggtagagtgggtcccctgaaatgggattcgcttggcactgcctcttaaagataggggtgttgggatcttgattgtggccgccccccccagctttacctgcccactttgtccttcttggcaagcctgttcacatggacgtccagagccagtggacagagaggaggggacggacagcagaggtgctgcttttgcagcagaaactttgttgcagttcagagtataccttctgctctgctccagagcaagagttgcaaaccaggcccttggggctggccatttgtttttgtaaataaagttttattggaacacaaacaga

SEQ ID NO: 102390 - DNA, 5055 bp, Homo sapiens
  misc_feature (2)..(2): n is a, c, g, or t
  misc_feature (4)..(6): n is a, c, g, or t
  misc_feature (8)..(8): n is a, c, g, or t
gnannngngctgtttagctgtaattagggtgcaaggataaggtgtaagaactggctggaggttgaatgttttcctggaggagtgttagcatcaactagatccctggaatttctgcctttctgtctcaagatgcatgtctttgtccagagtacctgtggagaagaaacaatggattccttagaccatatgctgacagatcctctggaacttggtccgtgtggagatggccatggcacgcgcatcatggaggattgcctcctgggaggcaccagagttagtctgcccgaggaccttctggaggatcctgagatcttctttgatgttgtcagcctctcaacatggcaggaagtgttaagtgattctcaacgtgaacacctccagcagtttctgccccagtttcctgaagacagtgctgagcagcagaatgaactcatcttagccttgttcagtggggagaacttccgctttggaaaccctctgcacattgcccagaagcttttccgagacggacactttaaccccgaggtggtcaagtaccggcagttatgcttcaagtcacagtacaagcgctacctcaactcccagcagcagtatttccatcggctgctgaagcaaattcttgcttcccggagtgatctgctggagatggcccggcggagtggccccgcccttcccttccggcagaaacgcccttcaccatcccgcacacctgaggagcgggagtggcggacccagcagcgctacttgaaggtcttaagggaagtgaaagaggagtgtggtgacacagccctgtcatctgatgaagaggccacgttggatttacaagaacaattttcttttgaagatctcagctcatggcttccgagctctccagcacgttctcctagtcctgcggtgcccctgcgggtggtgcccacactttcaaccacggatatgaaaaccgcagataaagtagaactgggggacagtgacctgaagataatgttaaagaagcaccacgagaagcggaaacatcagccagatcacccggaccttttgacaggggacctgactctcaatgacatcatgactcgagtaaatgctggcaggaagggctctctggcagccttatatgacttggctgtccttaaaaaaaaggttaaggaaaaagaggaaaagaagaagaagaaaataaaaacgatcaaatcagaggcagaggacctggccgagccgctaagcagtactgaaggggtcgcacctctctcacaggccccctctccgctggcaattcctgctatcaaggaagagccccttgaagacctcaagccttgccttggaatcaatgaaatatcttccagcttcttctctcttctattagagatcttgctgctggagagtcaggctagccttcctatgctagaggagcgagttttggattggcagtcatcgccagccagctccctcaacagctggttctctgcggcccccaactgggctgagttggtactaccagccctgcagtatcttgctggagaaagtcgagctgttccttccagtttctctccatttgttgaattcaaagagaaaacccagcagtggaagttgcttggccaatcccaagataatgaaaaggaattagctgccctcttccagctatggctagagaccaaagatcaggccttctgtaagcaagaaaatgaagacagctcagatgccacaacacctgtccctcgggtaagaactgactatgtggtgcgtcccagcacgggggaggagaaacgggtttttcaggagcaggagcgttacaggtatagccaaccccataaggcgttcacctttcgcatgcacggctttgagtctgtggtggggccagtgaagggcgtgtttgacaaggagacctcgctcaacaaggctcgggagcactccctgctgcgctccgaccggcctgcctacgtcaccattctgtctcttgttcgggacgctgcggctcgactgcctaatggagaaggcacacgggcagagatctgtgaactgcttaaggactcccagtttcttgcaccagatgtcaccagcactcaggtaaatacagtagtgagtggtgcactggatcggctacattacgaaaaagatccctgtgtgaaatacgacattggacgaaagctgtggatctacctgcatcgtgaccggagtgaagaagagtttgagcggattcaccaagcacaagcagctgcagctaaagccagaaaagctcttcagcaaaaacccaagcccccatccaaggtgaagtccagtagcaaggagagctccataaaggtccttagcagtggcccttctgagcagagccagatgagcctcagtgactccagtatgccacccaccccagtcacacctgtaacccccaccacaccagcattgcccgccattcccatctcccctccacctgtatcggcagtgaacaaaagcggcccttccacagtctcagaaccagctaagtctagctcgggtgttcttctggtgtcttcaccaacaatgccacatctgggaacaatgctttccccagcttccagccagactgcacccagttctcaggctgccgcccgggtcgtgagccactctggctctgctggactgtctcaggtgcgagtggtggcccagcctagccttcctgctgttccccagcagtcgggagggccggcacagacattgccacagatgccagcaggaccgcagatccgggttccagccactgccacacagaccaaagtagtgccccagacagtaatggccactgtgcccgtcaaagcgcagactacggcagccactgtgcagcggcctggacccgggcagacagggctcacggtgacaagtctccctgccacagccagccctgtgagtaagccagccacgagttctcctgggacctctgctcccagtgcctccacggctgccgtcattcaaaatgtcacaggacagaacatcatcaagcaggtggcaatcactgggcagcttggtgtgaagccccaaacaggcaacagcattccactcacagccactaacttccgcatccagggtaaggatgtattgcgtctgccgccctcttccatcaccacagatgccaagggccagacggttctgcgaatcactccggacatgatggccacattggccaagtcccaggttaccacagtcaaattgacccaggacctcttcgggacaggaggcaacactacaggcaaaggcatctctgccaccttacacgtcacttccaatccagtacatgcagctgatagccctgccaaggccagttcagccagtgccccttcatccactccaacaggtaccactgtggtcaaagtgactcctgacctcaagccaacagaagcctcaagttcggcttttcgcttgatgccagctcttggcgtgagtgtggctgaccagaagggaaaaagcacagtggcctcttcagaagcaaaaccagctgccacgatccgcatcgtgcagggactgggagtgatgcctcccaaagcaggccagaccatcaccgttgcaacccacgccaagcaaggggcctcggtggccagtgggtctggaactgtccatacttcagcggtgtccttacccagtatgaatgctgctgtgtccaagactgtagctgtggcttctggggctgcaagcacccccatcagcatcagcacaggagcccccaccgtgcggcaggtccctgtcagcaccacggttgtgtccacgtcccaggctgggaagttgcctacacggatcacagttcccctctctgtgatcagccagccaatgaagggcaagagcgtggtcacagcccccatcatcaaaggcaaccttggagccaacctcagtgggttgggccgcaacatcatcctcacaactatgccagcaggcactaagctcattgctggcaataagcctgttagtttcctcactgctcagcagttgcagcagcttcagcagcaaggtcaggccacacaggtgcgcatccagactgtccctgcatcccatctccaacagggaacagcttctggctcctccaaagcagtctccactgttgttgtgactacagctccgtctcctaaacaggcacctgagcaacaatgattatgagagaggatggcttccgtgaaagaccatgcctggtctgtcctggctgagaagggaccagggaggttgcatcattgttttaagcttgcctgttcaaggcagccaggcgaggggtgatggcaacggtggcctggattcgtggcctggattctgctgccacgtgccatagtggagcaccctgagaaaggttcactccagggttccaaggtctgctctctaccaatctaggagaatattctgttgaaattgcaggaattaccagttacgtccaacaagccagagttctgagagtaagacccccagggaaggcttaccagttgcagagtgcacacagcgaataggctggttctccatgaggattgtattttttggcttctggtcttctccatgactagtggtctggataggagttttgtgtccagaaaattttatgtaatttatttttttaaagaacctgttgtacatctttctcaaatacaaacttgggctttagctgccccctccactaaaccgatgacttacttttttgactagaatgagaaaatggcaagaatcttagtaaggtggtagccagcttggtaactgcatagtaatcgagaggctgtaagatgggaattcatcgtaggcagcgaggtagagtgggtcccctgaaatgggattcgcttggcactgcctcttaaagataggggtgttgggatcttgattgtggccgccccccccagctttacctgcccactttgtccttcttggcaagcctgttcacatggacgtccagagccagtggacagagaggaggggacggacagcagaggtgctgcttttgcagcagaaactttgttgcagttcagagtataccttctgctctgctccagagcaagagttgcaaaccaggcccttggggctggccatttgtttttgtaaataaagttttattggaacacaaacaga

SEQ ID NO: 102391 - DNA, 4462 bp, Homo sapiens
  misc_feature (103)..(103): n is a, c, g, or t
aaaatctgaaacagtagtacgaagggacagtgcggcaagcggacaaaggaatagccagagccaagccgttctccagagtgtctgtgagttggaaaagagtttnttgttggaacaggaagcaaagatggttaagaactttaagtgtgttttaggaccagctgagtcacagaagtcatatattaccaacgtatggaaaagtggaagtgtcgatcctgtgactttaaagatttttggtacttgtagttcacaggtgtcagaagggaaactcagaaatatcttacttttgacaagtgaccagaaagatgtaaattggagaatcatgatagtgaatatggtttggtttgttttctcagataaagtagaactgggggacagtgacctgaagataatgttaaagaagcaccacgagaagcggaaacatcagccagatcacccggaccttttgacaggggacctgactctcaatgacatcatgactcgagtaaatgctggcaggaagggctctctggcagccttatatgacttggctgtccttaaaaaaaaggttaaggaaaaagaggaaaagaagaagaagaaaataaaaacgatcaaatcagaggcagaggacctggccgagccgctaagcagtactgaaggggtcgcacctctctcacaggccccctctccgctggcaattcctgctatcaaggaagagccccttgaagacctcaagccttgccttggaatcaatgaaatatcttccagcttcttctctcttctattagagatcttgctgctggagagtcaggctagccttcctatgctagaggagcgagttttggattggcagtcatcgccagccagctccctcaacagctggttctctgcggcccccaactgggctgagttggtactaccagccctgcagtatcttgctggagaaagtcgagctgttccttccagtttctctccatttgttgaattcaaagagaaaacccagcagtggaagttgcttggccaatcccaagataatgaaaaggaattagctgccctcttccagctatggctagagaccaaagatcaggccttctgtaagcaagaaaatgaagacagctcagatgccacaacacctgtccctcgggtaagaactgactatgtggtgcgtcccagcacgggggaggagaaacgggtttttcaggagcaggagcgttacaggtatagccaaccccataaggcgttcacctttcgcatgcacggctttgagtctgtggtggggccagtgaagggcgtgtttgacaaggagacctcgctcaacaaggctcgggagcactccctgctgcgctccgaccggcctgcctacgtcaccattctgtctcttgttcgggacgctgcggctcgactgcctaatggagaaggcacacgggcagagatctgtgaactgcttaaggactcccagtttcttgcaccagatgtcaccagcactcaggtaaatacagtagtgagtggtgcactggatcggctacattacgaaaaagatccctgtgtgaaatacgacattggacgaaagctgtggatctacctgcatcgtgaccggagtgaagaagagtttgagcggattcaccaagcacaagcagctgcagctaaagccagaaaagctcttcagcaaaaacccaagcccccatccaaggtgaagtccagtagcaaggagagctccataaaggtccttagcagtggcccttctgagcagagccagatgagcctcagtgactccagtatgccacccaccccagtcacacctgtaacccccaccacaccagcattgcccgccattcccatctcccctccacctgtatcggcagtgaacaaaagcggcccttccacagtctcagaaccagctaagtctagctcgggtgttcttctggtgtcttcaccaacaatgccacatctgggaacaatgctttccccagcttccagccagactgcacccagttctcaggctgccgcccgggtcgtgagccactctggctctgctggactgtctcaggtgcgagtggtggcccagcctagccttcctgctgttccccagcagtcgggagggccggcacagacattgccacagatgccagcaggaccgcagatccgggttccagccactgccacacagaccaaagtagtgccccagacagtaatggccactgtgcccgtcaaagcgcagactacggcagccactgtgcagcggcctggacccgggcagacagggctcacggtgacaagtctccctgccacagccagccctgtgagtaagccagccacgagttctcctgggacctctgctcccagtgcctccacggctgccgtcattcaaaatgtcacaggacagaacatcatcaagcaggtggcaatcactgggcagcttggtgtgaagccccaaacaggcaacagcattccactcacagccactaacttccgcatccagggtaaggatgtattgcgtctgccgccctcttccatcaccacagatgccaagggccagacggttctgcgaatcactccggacatgatggccacattggccaagtcccaggttaccacagtcaaattgacccaggacctcttcgggacaggaggcaacactacaggcaaaggcatctctgccaccttacacgtcacttccaatccagtacatgcagctgatagccctgccaaggccagttcagccagtgccccttcatccactccaacaggtaccactgtggtcaaagtgactcctgacctcaagccaacagaagcctcaagttcggcttttcgcttgatgccagctcttggcgtgagtgtggctgaccagaagggaaaaagcacagtggcctcttcagaagcaaaaccagctgccacgatccgcatcgtgcagggactgggagtgatgcctcccaaagcaggccagaccatcaccgttgcaacccacgccaagcaaggggcctcggtggccagtgggtctggaactgtccatacttcagcggtgtccttacccagtatgaatgctgctgtgtccaagactgtagctgtggcttctggggctgcaagcacccccatcagcatcagcacaggagcccccaccgtgcggcaggtccctgtcagcaccacggttgtgtccacgtcccaggctgggaagttgcctacacggatcacagttcccctctctgtgatcagccagccaatgaagggcaagagcgtggtcacagcccccatcatcaaaggcaaccttggagccaacctcagtgggttgggccgcaacatcatcctcacaactatgccagcaggcactaagctcattgctggcaataagcctgttagtttcctcactgctcagcagttgcagcagcttcagcagcaaggtcaggccacacaggtgcgcatccagactgtccctgcatcccatctccaacagggaacagcttctggctcctccaaagcagtctccactgttgttgtgactacagctccgtctcctaaacaggcacctgagcaacaatgattatgagagaggatggcttccgtgaaagaccatgcctggtctgtcctggctgagaagggaccagggaggttgcatcattgttttaagcttgcctgttcaaggcagccaggcgaggggtgatggcaacggtggcctggattcgtggcctggattctgctgccacgtgccatagtggagcaccctgagaaaggttcactccagggttccaaggtctgctctctaccaatctaggagaatattctgttgaaattgcaggaattaccagttacgtccaacaagccagagttctgagagtaagacccccagggaaggcttaccagttgcagagtgcacacagcgaataggctggttctccatgaggattgtattttttggcttctggtcttctccatgactagtggtctggataggagttttgtgtccagaaaattttatgtaatttatttttttaaagaacctgttgtacatctttctcaaatacaaacttgggctttagctgccccctccactaaaccgatgacttacttttttgactagaatgagaaaatggcaagaatcttagtaaggtggtagccagcttggtaactgcatagtaatcgagaggctgtaagatgggaattcatcgtaggcagcgaggtagagtgggtcccctgaaatgggattcgcttggcactgcctcttaaagataggggtgttgggatcttgattgtggccgccccccccagctttacctgcccactttgtccttcttggcaagcctgttcacatggacgtccagagccagtggacagagaggaggggacggacagcagaggtgctgcttttgcagcagaaactttgttgcagttcagagtataccttctgctctgctccagagcaagagttgcaaaccaggcccttggggctggccatttgtttttgtaaataaagttttattggaacacaaacaga

SEQ ID NO: 102392 - DNA, 1982 bp, Homo sapiens
ccctagccctgttttgtgagaagttccatacataatgctcctccacccaatacataccctcctgagagaacaggtaacaccactcgaacaaatggaggatcaaatggaaagttatccttaaaagagaagttaagcaaaatatattctatgccttctttttcttttaagatctgaagatcactgtgcaaaggactatcagggtcaaccttctgcagttaacatgccagtcatataaactgtcatttatgagttccactgtataaatccctgttttataactctgtgatctgtatatgtccctgagctctttcataagtctatctgaagcttgcactgacccagacactgcaccatttaaatggtcttgcctttgagtcttcctaattttctctaatattgccaaattttctttttcaattccttcatcctctgactttttcccactaataggctcttcttccttcatctcatagtgatctaagtcttctatatcttcagccatctcttcttcttcttcctcttcttctgaagtcacttcttctgttgtcccattctgacccgtgggtagtggttgatctagcatctcaacatccaggtgcttaggaaggttatataaactgcagagttcacatatcaaccacttcaattgctgacgaagcaaattgttgttcttagtatcttctagacgttccagaactgatgtcagatttgggtcttcagaatccacaaaccatatcggtgaagaagatggataggattccgtgatgttgcagtggagcgtgagtggcggcggcacgagtgcgggctgccctgctgcggcaccaggaactggcagtgcagctcgtccagcttccaactgacgatgcggaatcgctcgtggttcttgtcgaagatggacgccaggaacttcagctcggccttgagccctgacacggacatcttcccctcatctccggcgggaggggcgcggaaggggagccgggcgcggaaggggagccgggcccggagccgccgtcacggccgcgaccgccccgcgggccggcctgggccgcgctctccgcctcgtcgagcgctgctggaaaatggcgagggggcgcggaagcctcggcgtctgggagcccgcggccggagaagggctgcgggttagggggccggcgcccgcggttcaggattccagaattggaaataacgggagggaggacctggtccagcttcccttcctcaaataaggaaattgacacctggcgtgagaaggggttttgccatgttcgctaggctggtctcaaactcatggattcaaggggactgcccgcctggacctcccaaagtactgagattagtacctgtggagaagaaacaatggattccttagaccatatgctgacagatcctctggaacttggtccgtgtggagatggccatggcacgcgcatcatggaggattgcctcctgggaggcaccagagttagtctgcccgaggaccttctggaggatcctgagatcttctttgatgttgtcagcctctcaacatggcaggaagtgttaagtgattctcaacgtgaacacctccagcagtttctgccccagtttcctgaagacagtgctgagcagcagaatgaactcatcttagccttgttcagtggggagaacttccgctttggaaaccctctgcacattgcccagaagcttttccgaggtttgtagctcagtattctttctttgaggggggtggtggatgggcacacgttcactttatgtgggtattcctttcttccttttcttctttttatcttcatgtacagatactgaggcagcaaagagcggttttgtgtaacactttgctgtctaggctgtgttttaaaaaacaaaaatgtattgacttatatagaaaatacataatatgaattcagcttgtaaccagcatcagcttgtaaccagcatctacataaaaaaataaaacatttccagcataaaagaggtgc

SEQ ID NO: 102393 - DNA, 2330 bp, Homo sapiens
ccctagccctgttttgtgagaagttccatacataatgctcctccacccaatacataccctcctgagagaacaggtaacaccactcgaacaaatggaggatcaaatggaaagttatccttaaaagagaagttaagcaaaatatattctatgccttctttttcttttaagatctgaagatcactgtgcaaaggactatcagggtcaaccttctgcagttaacatgccagtcatataaactgtcatttatgagttccactgtataaatccctgttttataactctgtgatctgtatatgtccctgagctctttcataagtctatctgaagcttgcactgacccagacactgcaccatttaaatggtcttgcctttgagtcttcctaattttctctaatattgccaaattttctttttcaattccttcatcctctgactttttcccactaataggctcttcttccttcatctcatagtgatctaagtcttctatatcttcagccatctcttcttcttcttcctcttcttctgaagtcacttcttctgttgtcccattctgacccgtgggtagtggttgatctagcatctcaacatccaggtgcttaggaaggttatataaactgcagagttcacatatcaaccacttcaattgctgacgaagcaaattgttgttcttagtatcttctagacgttccagaactgatgtcagatttgggtcttcagaatccacaaaccatatcggtgaagaagatggataggattccgtgatgttgcagtggagcgtgagtggcggcggcacgagtgcgggctgccctgctgcggcaccaggaactggcagtgcagctcgtccagcttccaactgacgatgcggaatcgctcgtggttcttgtcgaagatggacgccaggaacttcagctcggccttgagccctgacacggacatcttcccctcatctccggcgggaggggcgcggaaggggagccgggcgcggaaggggagccgggcccggagccgccgtcacggccgcgaccgccccgcgggccggcctgggccgcgctctccgcctcgtcgagcgctgctggaaaatggcgagggggcgcggaagcctcggcgtctgggagcccgcggccggagaagggctgcgggttagggggccggcgcccgcggttcaggattccagaattggaaataacgggagggaggacctggtccagcttcccttcctcaaataaggaaattgacacctggcgtgagaaggggttttgccatgttcgctaggctggtctcaaactcatggattcaaggggactgcccgcctggacctcccaaagtactgagattagtacctgtggagaagaaacaatggattccttagaccatatgctgacagatcctctggaacttggtccgtgtggagatggccatggcacgcgcatcatggaggattgcctcctgggaggcaccagagttagtctgcccgaggaccttctggaggatcctgagatcttctttgatgttgtcagcctctcaacatggcaggaagtgttaagtgattctcaacgtgaacacctccagcagtttctgccccagtttcctgaagacagtgctgagcagcagaatgaactcatcttagccttgttcagtggggagaacttccgctttggaaaccctctgcacattgcccagaagcttttccgagacggacactttaaccccgaggtggtcaagtaccggcagttatgcttcaagtcacagtacaagcgctacctcaactcccagcagcagtatttccatcggctgctgaagcaaattcttgcttcccggagtgatctgctggagatggcccggcggagtggccccgcccttcccttccggcagaaacgcccttcaccatcccgcacacctgaggagcgggagtggcggacccagcagcgctacttgaaggtcttaagggaagtgaaagaggagtgtggtgacacagccctgtcatctgatgaagaggatctcagctcatggcttccgagctctccagcacgttctcctagtcctgcggtgcccctgcgggtggtgcccacactttcaaccacggatatgaaaaccgcagataaagtagaactgggggacagtgacctgaagataatgttaaagaagcaccacgagaagcggaaacatcagccagatcacccggaccttttgacaggggacctgactctcaatgacatcatgactcgagtaaatgctggcaggaagggctctctggcagccttatatgacaaaactgtccttaaaaaaaaaggttaaggaaaaagagggtttcttagcgatggggtcct

SEQ ID NO: 102394 - DNA, 3411 bp, Homo sapiens
ggctggaagccggaagcgagcaaagtggagccgactcgaactccaccgcggaaaagaaagcctcagaacgttcgctcgctgcgtccccagccggggccgagccctccgcgacgccacccgggccatgggggccgcacgcagcccgccgtccgctgtcccggggcccctgctggggctgctcctgctgctcctgggcgtgctggccccgggtggcgcctccctgcgactcctggaccaccgggcgctggtctgctcccagccggggctaaactgcacggtcaagaatagtacctgcctggatgacagctggattcaccctcgaaacctgaccccctcctccccaaaggacctgcagatccagctgcactttgcccacacccaacaaggagacctgttccccgtggctcacatcgaatggacactgcagacagacgccagcatcctgtacctcgagggtgcagagttatctgtcctgcagctgaacaccaatgaacgtttgtgcgtcaggtttgagtttctgtccaaactgaggcatcaccacaggcggtggcgttttaccttcagccactttgtggttgaccctgaccaggaatatgaggtgaccgttcaccacctgcccaagcccatccctgatggggacccaaaccaccagtccaagaatttccttgtgcctgactgtgagcacgccaggatgaaggtaaccacgccatgcatgagctcaggcagcctgtgggaccccaacatcaccgtggagaccctggaggcccaccagctgcgtgtgagcttcaccctgtggaacgaatctacccattaccagatcctgctgaccagttttccgcacatggagaaccacagttgctttgagcacatgcaccacatacctgcgcccagaccagaagagttccaccagcgatccaacgtcacactcactctacgcaaccttaaagggtgctgtcgccaccaagtgcagatccagcccttcttcagcagctgcctcaatgactgcctcagacactccgcgactgtttcctgcccagaaatgccagacactccagaaccaattccggactacatgcccctgtgggtgtactggttcatcacgggcatctccatcctgctggtgggctccgtcatcctgctcatcgtctgcatgacctggaggctagctgggcctggaagtgaaaaatacagtgatgacaccaaatacaccgatggcctgcctgcggctgacctgatccccccaccgctgaagcccaggaaggtctggatcatctactcagccgaccaccccctctacgtggacgtggtcctgaaattcgcccagttcctgctcaccgcctgcggcacggaagtggccctggacctgctggaagagcaggccatctcggaggcaggagtcatgacctgggtgggccgtcagaagcaggagatggtggagagcaactctaagatcatcgtcctgtgctcccgcggcacgcgcgccaagtggcaggcgctcctgggccggggggcgcctgtgcggctgcgctgcgaccacggaaagcccgtgggggacctgttcactgcagccatgaacatgatcctcccggacttcaagaggccagcctgcttcggcacctacgtagtctgctacttcagcgaggtcagctgtgacggcgacgtccccgacctgttcggcgcggcgccgcggtacccgctcatggacaggttcgaggaggtgtacttccgcatccaggacctggagatgttccagccgggccgcatgcaccgcgtaggggagctgtcgggggacaactacctgcggagcccgggcggcaggcagctccgcgccgccctggacaggttccgggactggcaggtccgctgtcccgactggttcgaatgtgagaacctctactcagcagatgaccaggatgccccgtccctggacgaagaggtgtttgaggagccactgctgcctccgggaaccggcatcgtgaagcgggcgcccctggtgcgcgagcctggctcccaggcctgcctggccatagacccgctggtcggggaggaaggaggagcagcagtggcaaagctggaacctcacctgcagccccggggtcagccagcgccgcagcccctccacaccctggtgctcgccgcagaggagggggccctggtggccgcggtggagcctgggcccctggctgacggtgccgcagtccggctggcactggcgggggagggcgaggcctgcccgctgctgggcagcccgggcgctgggcgaaatagcgtcctcttcctccccgtggaccccgaggactcgccccttggcagcagcacccccatggcgtctcctgacctccttccagaggacgtgagggagcacctcgaaggcttgatgctctcgctcttcgagcagagtctgagctgccaggcccaggggggctgcagtagacccgccatggtcctcacagacccacacacgccctacgaggaggagcagcggcagtcagtgcagtctgaccagggctacatctccaggagctccccgcagccccccgagggactcacggaaatggaggaagaggaggaagaggagcaggacccagggaagccggccctgccactctctcccgaggacctggagagcctgaggagcctccagcggcagctgcttttccgccagctgcagaagaactcgggctgggacacgatggggtcagagtcagaggggcccagtgcatgagggcggctccccagggaccgcccagatcccagctttgagagaggagtgtgtgtgcacgtattcatctgtgtgtacatgtctgcatgtgtatatgttcgtgtgtgaaatgtaggctttaaaatgtaaatgtctggattttaatcccaggcatccctcctaacttttctttgtgcagcggtctggttatcgtctatccccaggggaatccacacagcccgctcccaggagctaatggtagagcgtccttgaggctccattattcgttcattcagcatttattgtgcacctactatgtggcgggcatttgggataccaagataaattgcatgcggcatggccccagccatgaaggaacttaaccgctagtgccgaggacacattaaacgaacaggatgggccgggcacggtggctcacgcctgtaatcccagcacattgggaggccgaggcaggtggatcactctgaggtcaggagtttgagccagcctggccaacatggtgaaaccccatctccactaaaaatagaaaaattagccgggcatggtgacacatgcctgtagtcctagctacttgggaggctgaggcaggagaattgcttgaatctgggaggcagaggttgcagtgagccgagattgtgccattgcactgcagcctggatgacagagcgagactctatctcaaaaaaaaa

SEQ ID NO: 102395 - DNA, 2270 bp, Homo sapiens
actccagtgtatttcttttcctttccagggcctggaagtgaaaaatacagtgatgacaccaaatacaccgatggcctgcctgcggctgacctgatccccccaccgctgaagcccaggaaggtctggatcatctactcagccgaccaccccctctacgtggacgtggtcctgaaattcgcccagttcctgctcaccgcctgcggcacggaagtggccctggacctgctggaagagcaggccatctcggaggcaggagtcatgacctgggtgggccgtcagaagcaggagatggtggagagcaactctaagatcatcgtcctgtgctcccgcggcacgcgcgccaagtggcaggcgctcctgggccggggggcgcctgtgcggctgcgctgcgaccacggaaagcccgtgggggacctgttcactgcagccatgaacatgatcctcccggacttcaagaggccagcctgcttcggcacctacgtagtctgctacttcagcgaggtcagctgtgacggcgacgtccccgacctgttcggcgcggcgccgcggtacccgctcatggacaggttcgaggaggtgtacttccgcatccaggacctggagatgttccagccgggccgcatgcaccgcgtaggggagctgtcgggggacaactacctgcggagcccgggcggcaggcagctccgcgccgccctggacaggttccgggactggcaggtccgctgtcccgactggttcgaatgtgagaacctctactcagcagatgaccaggatgccccgtccctggacgaagaggtgtttgaggagccactgctgcctccgggaaccggcatcgtgaagcgggcgcccctggtgcgcgagcctggctcccaggcctgcctggccatagacccgctggtcggggaggaaggaggagcagcagtggcaaagctggaacctcacctgcagccccggggtcagccagcgccgcagcccctccacaccctggtgctcgccgcagaggagggggccctggtggccgcggtggagcctgggcccctggctgacggtgccgcagtccggctggcactggcgggggagggcgaggcctgcccgctgctgggcagcccgggcgctgggcgaaatagcgtcctcttcctccccgtggaccccgaggactcgccccttggcagcagcacccccatggcgtctcctgacctccttccagaggacgtgagggagcacctcgaaggcttgatgctctcgctcttcgagcagagtctgagctgccaggcccaggggggctgcagtagacccgccatggtcctcacagacccacacacgccctacgaggaggagcagcggcagtcagtgcagtctgaccagggctacatctccaggagctccccgcagccccccgagggactcacggaaatggaggaagaggaggaagaggagcaggacccagggaagccggccctgccactctctcccgaggacctggagagcctgaggagcctccagcggcagctgcttttccgccagctgcagaagaactcgggctgggacacgatggggtcagagtcagaggggcccagtgcatgagggcggctccccagggaccgcccagatcccagctttgagagaggagtgtgtgtgcacgtattcatctgtgtgtacatgtctgcatgtgtatatgttcgtgtgtgaaatgtaggctttaaaatgtaaatgtctggattttaatcccaggcatccctcctaacttttctttgtgcagcggtctggttatcgtctatccccaggggaatccacacagcccgctcccaggagctaatggtagagcgtccttgaggctccattattcgttcattcagcatttattgtgcacctactatgtggcgggcatttgggataccaagataaattgcatgcggcatggccccagccatgaaggaacttaaccgctagtgccgaggacacattaaacgaacaggatgggccgggcacggtggctcacgcctgtaatcccagcacattgggaggccgaggcaggtggatcactctgaggtcaggagtttgagccagcctggccaacatggtgaaaccccatctccactaaaaatagaaaaattagccgggcatggtgacacatgcctgtagtcctagctacttgggaggctgaggcaggagaattgcttgaatctgggaggcagaggttgcagtgagccgagattgtgccattgcactgcagcctggatgacagagcgagactctatctcaaaaaaaaa

SEQ ID NO: 102396 - DNA, 3112 bp, Homo sapiens
gtggaagattgacgagtatgcaatgagcgatattagagtcatgataagaaagtatgcagatagagcatatgtaatcattatgcctcatagggatagtacaaggaaggggtaggctatgtgtttagtcagggggttgagaatgagtgtgaggcgtcttataccatagccgcctagatttataagagtactgcggcaagtactattgacccagcgacatccaaaccccctgagacttccgcagggccatccccggagccatccgatgtcccgggggatgtcgctgtggatgtcgcggtgatgttggcgttcaccacctgcccaagcccatccctgatggggacccaaaccaccagtccaagaatttccttgtgcctgactgtgagcacgccaggatgaaggtaaccacgccatgcatgagctcaggcagcctgtgggaccccaacatcaccgtggagaccctggaggcccaccagctgcgtgtgagcttcaccctgtggaacgaatctacccattaccagatcctgctgaccagttttccgcacatggagaaccacagttgctttgagcacatgcaccacatacctgcgcccagaccagaagagttccaccagcgatccaacgtcacactcactctacgcaaccttaaagggtgctgtcgccaccaagtgcagatccagcccttcttcagcagctgcctcaatgactgcctcagacactccgcgactgtttcctgcccagaaatgccagacactccagaaccaattccggactacatgcccctgtgggtgtactggttcatcacgggcatctccatcctgctggtgggctccgtcatcctgctcatcgtctgcatgacctggaggctagctgggcctggaagtgaaaaatacagtgatgacaccaaatacaccgatggcctgcctgcggctgacctgatccccccaccgctgaagcccaggaaggtctggatcatctactcagccgaccaccccctctacgtggacgtggtcctgaaattcgcccagttcctgctcaccgcctgcggcacggaagtggccctggacctgctggaagagcaggccatctcggaggcaggagtcatgacctgggtgggccgtcagaagcaggagatggtggagagcaactctaagatcatcgtcctgtgctcccgcggcacgcgcgccaagtggcaggcgctcctgggccggggggcgcctgtgcggctgcgctgcgaccacggaaagcccgtgggggacctgttcactgcagccatgaacatgatcctcccggacttcaagaggccagcctgcttcggcacctacgtagtctgctacttcagcgaggtcagctgtgacggcgacgtccccgacctgttcggcgcggcgccgcggtacccgctcatggacaggttcgaggaggtgtacttccgcatccaggacctggagatgttccagccgggccgcatgcaccgcgtaggggagctgtcgggggacaactacctgcggagcccgggcggcaggcagctccgcgccgccctggacaggttccgggactggcaggtccgctgtcccgactggttcgaatgtgagaacctctactcagcagatgaccaggatgccccgtccctggacgaagaggtgtttgaggagccactgctgcctccgggaaccggcatcgtgaagcgggcgcccctggtgcgcgagcctggctcccaggcctgcctggccatagacccgctggtcggggaggaaggaggagcagcagtggcaaagctggaacctcacctgcagccccggggtcagccagcgccgcagcccctccacaccctggtgctcgccgcagaggagggggccctggtggccgcggtggagcctgggcccctggctgacggtgccgcagtccggctggcactggcgggggagggcgaggcctgcccgctgctgggcagcccgggcgctgggcgaaatagcgtcctcttcctccccgtggaccccgaggactcgccccttggcagcagcacccccatggcgtctcctgacctccttccagaggacgtgagggagcacctcgaaggcttgatgctctcgctcttcgagcagagtctgagctgccaggcccaggggggctgcagtagacccgccatggtcctcacagacccacacacgccctacgaggaggagcagcggcagtcagtgcagtctgaccagggctacatctccaggagctccccgcagccccccgagggactcacggaaatggaggaagaggaggaagaggagcaggacccagggaagccggccctgccactctctcccgaggacctggagagcctgaggagcctccagcggcagctgcttttccgccagctgcagaagaactcgggctgggacacgatggggtcagagtcagaggggcccagtgcatgagggcggctccccagggaccgcccagatcccagctttgagagaggagtgtgtgtgcacgtattcatctgtgtgtacatgtctgcatgtgtatatgttcgtgtgtgaaatgtaggctttaaaatgtaaatgtctggattttaatcccaggcatccctcctaacttttctttgtgcagcggtctggttatcgtctatccccaggggaatccacacagcccgctcccaggagctaatggtagagcgtccttgaggctccattattcgttcattcagcatttattgtgcacctactatgtggcgggcatttgggataccaagataaattgcatgcggcatggccccagccatgaaggaacttaaccgctagtgccgaggacacattaaacgaacaggatgggccgggcacggtggctcacgcctgtaatcccagcacattgggaggccgaggcaggtggatcactctgaggtcaggagtttgagccagcctggccaacatggtgaaaccccatctccactaaaaatagaaaaattagccgggcatggtgacacatgcctgtagtcctagctacttgggaggctgaggcaggagaattgcttgaatctgggaggcagaggttgcagtgagccgagattgtgccattgcactgcagcctggatgacagagcgagactctatctcaaaaaaaaa

SEQ ID NO: 102397 - DNA, 438 bp, Homo sapiens
agggagcagggcagtaaagctgaggacgcggccaagggccacaggctggaaggccgcgggcccctgagctgtttgctgtctagctgtctgtacctgctgctggggcatctcagggtctcggctataagtctctgaatgttgcttttccctggctgccaggtacctgcctggatgacagctggattcaccctcgaaacctgaccccctcctccccaaaggacctgcagatccagctgcactttgcccacacccaacaaggagacctgttccccgtggctcacatcgaatggacactgcagacagacggtgagtgggcatgccagcagggccctgggggattctccctgcctccaagtggctctcccagtcaggctcaggattgggctcccagtcctgtgctcagacatgggggttcaaatttagtgctataaggatccg

SEQ ID NO: 102398 - DNA, 710 bp, Homo sapiens
ggctggaagccggaagcgagcaaagtggagccgactcgaactccaccgcggaaaagaaagcctcagaacgttcgctcgctgcgtccccagccggggccgagccctccgcgacgccacccgggccatgggggccgcacgcagcccgccgtccgctgtcccggggcccctgctggggctgctcctgctgctcctgggcgtgctggccccgggtggcgcctccctgcgactcctggaccaccgggcgctggtctgctcccagccggggctaaactgcacggtcaagaatagtaagtcatctttttctgttcttcttcttgttgccttcttaatcaagtgagagcctgctgccaacttctgacagaagtcttgccatgccactccaggttcaggctgtgagctacagccatccgcaggagggttcccggagaattgtggatgcgtgcacctgcgcttcctgtcgagaacattcattatgcaaaagtcaggaaaggagaaacagaactgtcatttggattgtgaaagtattctctggggagctgccctactgtatctataatataatttgatttgccacagcttgtcactgtaaagtgagagacatctgtgctgttgattttgttttgttttaattcaaagaggcacatattcaagtgtctgagccaattagagacccctgacatataacaataaagcagctcttactacaactg

SEQ ID NO: 102399 - DNA, 641 bp, Homo sapiens
atccagcagagaaggaactggagggaccaagattgcttgctcacccacagcaagctcaggaggaatgcacttgcatcaggagggttccccgagagatgaggatcagacaggcaggctggcacccatgccaaggtgggtccagccctggagctcactctgaaggggccacctgcggacaggctcccagtggggaaaagattgttgttcttggtgtcaggagtctggaagaacagatttctgaaggcagaggcttaatgagtttccttttttctgggtcgacagactgtgagcacgccaggatgaaggtaaccacgccatgcatgagctcaggtaacagctggcccgggagagctttatttggatgcatacacatgcacatgtgcgtgcccctcctcactcccagcctgcgtgtgtgaccttggcaggcagcctgtgggaccccaacatcaccgtggagaccctggaggcccaccagctgcgtgtgagcttcaccctgtggaacgaatctacccattaccagatcctgctgaccagttttccgcacatggagaaccacagttgctttgagcacatgcaccacatacctgcggtaactctgctctttttgacccctctagcatagctcaggaccaccctccaag

SEQ ID NO: 102400 - DNA, 236 bp, Homo sapiens
ggcttcagaagctattggaagattcatatcaacttactaataatcaagcactttcatattaagacaatgtatgatgtttagtaaaattgatttttccataaaagaagtttaaaataaattagctatttcaagagaatcatggttgtcagcaaatagaaatgttgtgcttaactcaaatcacagtaatattctgtgttagtcaattgatttctttgagcctttattctttcatctgt

SEQ ID NO: 102401 - DNA, 564 bp, Homo sapiens
agtacatccatctgtaatgcgtctgtcaccccacaacaggaggggttagctgtgcgtggggagagggtgaagaagggcttttgcctggtgctagactgcctgggttcaaatcctgctcctacttagtgctgtgcaatttgggcaaaatacctaaacctctctgtgccttcatttccacctctctaaagcggggtctgtgacaatgcccactcctcattcataaggtggtggtgaggattaaatgagctgatgccctcacaaggtgtttgtccatcagtgatagggtttggctgtggcccctgtgtccccacccaaatctcatcttgaattgtaatcctcataatccccacgtgtcgagggagggatcccgtgggaggtgatcagatcatgggggtggttcccccatgctgtcctcatgataatgagtgagttctcacgagatctgatggttttataaggcagtttcccttcttattgcatgccctatgacgccctgtcgcattacttttacaagggctaccccatttttggccaaggctgtaaactttcctgattgtcctccac

SEQ ID NO: 102402 - DNA, 694 bp, Homo sapiens
agtacatccatctgtaatgcgtctgtcaccccacaacaggaggggttagctgtgcgtggggagagggtgaagaagggcttttgcctggtgctagactgcctgggttcaaatcctgctcctacttagtgctgtgcaatttgggcaaaatacctaaacctctctgtgccttcatttccacctctctaaagcggggtctgtgacaatgcccactcctcattcataaggtggtggtgaggattaaatgagctgatgccctcacaaggtgtttgtccatcagtgatagggtttggctgtggcccctgtgtccccacccaaatctcatcttgaattgtaatcctcataatccccacgtgtcgagggagggatcccgtgggaggtgatcagatcatgggggtggttcccccatgctgtcctcatgataatgagtgagttctcacgagatctgatggttttataaggcagtttccctgctcttacacgctctcttttgcctgccgccatataagacatggcttttccctttccaccatgattgtaagtttcctgaggcctccccagtcatacagaactgtgaatcaatttaacctctttcctttataaattgctcagtctgaggtagttctttatagcagtatgagaatgaactaacacagtaaattggtactgcggagagtagagtattgctataaagata

SEQ ID NO: 102403 - DNA, 161 bp, Homo sapiens
atggagaaactgactcctagagagaagaaggaacctgcgcaggaaactgaggaagatggtagctgagctgggacctgggcctcagccagagccttccccagatgtcttactggtgttctcttctgcctgcagccccctccccattcaaccaaccattgcct

SEQ ID NO: 102404 - DNA, 2622 bp, Homo sapiens
gggagcgcacagcctggacgcgtgcgcaggcgtcaggcgcatagacctgctagcccctcagctagcggccccgcccgcgcttagcatcactaactgggctatataacctgagcgcccgcgcggccacgacacgaggaattcgcccacgcaggaggcacggcgtccggaggccccagggttatgagactatcactgctcaggacctactaacaacaaaggaaatcgaaacatgaccaaatcgtacagcgagagtgggctgatgggcgagcctcagccccaaggtcctccaagctggacagacgagtgtctcagttctcaggacgaggagcacgaggcagacaagaaggaggacgacctcgaagccatgaacgcagaggaggactcactgaggaacgggggagaggaggaggacgaagatgaggacctggaagaggaggaagaagaggaagaggaggatgacgatcaaaagcccaagagacgcggccccaaaaagaagaagatgactaaggctcgcctggagcgttttaaattgagacgcatgaaggctaacgcccgggagcggaaccgcatgcacggactgaacgcggcgctagacaacctgcgcaaggtggtgccttgctattctaagacgcagaagctgtccaaaatcgagactctgcgcttggccaagaactacatctgggctctgtcggagatcctgcgctcaggcaaaagcccagacctggtctccttcgttcagacgctttgcaagggcttatcccaacccaccaccaacctggttgcgggctgcctgcaactcaatcctcggacttttctgcctgagcagaaccaggacatgcccccccacctgccgacggccagcgcttccttccctgtacacccctactcctaccagtcgcctgggctgcccagtccgccttacggtaccatggacagctcccatgtcttccacgttaagcctccgccgcacgcctacagcgcagcgctggagcccttctttgaaagccctctgactgattgcaccagcccttcctttgatggacccctcagcccgccgctcagcatcaatggcaacttctctttcaaacacgaaccgtccgccgagtttgagaaaaattatgcctttaccatgcactatcctgcagcgacactggcaggggcccaaagccacggatcaatcttctcaggcaccgctgcccctcgctgcgagatccccatagacaatattatgtccttcgatagccattcacatcatgagcgagtcatgagtgcccagctcaatgccatatttcatgattagaggcacgccagtttcaccatttccgggaaacgaacccactgtgcttacagtgactgtcgtgtttacaaaaggcagccctttgggtactactgctgcaaagtgcaaatactccaagcttcaagtgatatatgtatttattgtcattactgcctttggaagaaacaggggatcaaagttcctgttcaccttatgtattattttctatagctcttctatttaaaaaataaaaaaatacagtaaagtttaaaaaatacaccacgaatttggtgtggctgtattcagatcgtattaattatctgatcgggataacaaaatcacaagcaataattaggatctatgcaatttttaaactagtaatgggccaattaaaatatatataaatatatatttttcaaccagcattttactacttgttacctttcccatgctgaattattttgttgtgattttgtacagaatttttaatgactttttataatgtggatttcctattttaaaaccatgcagcttcatcaatttttatacatatcagaaaagtagaattatatctaatttatacaaaataatttaactaatttaaaccagcagaaaagtgcttagaaagttattgtgttgccttagcacttctttcctctccaattgtaaaaaaaaaaaaaaaaaaaaaaaaaaaaaaaaaattgcacaatttgagcaattcatttcactttaaagtctttccgtctccctaaaataaaaaccagaatcataattttcaagaggagaaaaaattaagagatacattccctatcacaacatatcaattcaacacattacttgcacaagcttgtatatacatattataaatagatgccaacatacccttctttaaatcacaagctgcttgactatcacatacaatttgcactgttactttttagtcttttactcctttgcattccatgattttacagagaatctgaagctattgatgtttccagaaaatataaatgcatgattttatacatagtcacccccatggtgggttgtcatatattcatgtaataaatctgagcctaaatctaatcaggttgttaatgttgggagttatatctatagtagtcaattagtacagtagcttaaataaattccccccatttaattcataattagaacaatagctattgcatgtaaaatgcagtccagaataagtgctgtttgagatgtgatgctggtaccactggaatcgatctgtactgtaattttgtttgtaatcctgtatattatggtgtaatgcacaatttagaaaacattcatccagttgcaataaaatagtattgaaagtg

SEQ ID NO: 102405 - DNA, 533 bp, Homo sapiens
gcaatggttttcaaactgcttcgtatggacccttaagattctttggggttttaaaatgcttgagttgcattaaatttttaagtatgttttaacttattttaaaactgtaatttaaaaatatgggtacccccaaatatgtacacataattttaataactggagtctaacaccattatctttcattacaaaattattcttgtgccaggtcttgaattacaatttgttctgctatctttgtacagatatttgaatttttttttgttactgtgtcatgtatgagaaagattgtcattgattgtgaaggaactggctttttaaaaagaattccttccatatttacttaagttaaatgtttacttgtgagaacacaaatttattgttatcagtagttgtaactttattactaaaatacttgaaagttgcttggtatatttatatgctttatagttcaggttcaatagaagatttaatttgtaaaaagtgttctgctgcttcccccaactccccaccctaaataaatagaaaacataact

SEQ ID NO: 102406 - DNA, 354 bp, Homo sapiens
cttcaattcactccatttctccccagttcttcttttttctgtcttctataattctagataaaattatgacatgacttaaaatatcctccttttttgtccgtgattgctttcaatggttctaatgaccccattggaagtctggtgattaggccctgaggggccacagtaatggaaaccttgtgttcagccttcataagggtgatccaaaaatgttattacattacttacacctctttctgtaagtattttttcttcattcacttcgaagtatgggatgcttcccatgtgcaggagaattagctcattcataactcaaaggcaagtaatttcatgttttgctatttataagagagg

SEQ ID NO: 102407 - DNA, 284 bp, Homo sapiens
aaaaaataaagtgaatttattggttcatgtaactggaaagtctcatgaaaatgtcagcttcaggagaagcttgacccagcagcttcatgatgtatggaaatacctgggttttttgtttctgctctgctactgtggtatcagctttattccaagtctggcttcctttgttgttgcaaaatgcttgtcagaagaagcctgggtccatctgttaggattaagtttactctgtatgctgtagtagtggctatgacaagatagaagtgtatttctcctccatataaaag

SEQ ID NO: 102408 - DNA, 427 bp, Homo sapiens
ttttatgtcattaaaaaaactccttttaatcatgtgtaggtatctacatacattccagtatatggatatactgtactgtaatttaacactttttaattatttattatacattataatgttttgataataaaagaatcatgtgatgaacttttctatatataaatatatctctctgggccgggcgcggtggctcacgcctgtaatcccagcactttgggaggatcacgaggtctggccaacatggtgaaaccccatctctacaaaaatacaaaaattagccgggcgtggtggcacgctcctgtagccccagctactctcaggaggctgaggcaagagaattgcttgaacccaagaggcagaggttgcagtgggccgagatcgcaccactacactacagcctgctgggcaacagagtgagactacgtct

SEQ ID NO: 102409 - DNA, 828 bp, Homo sapiens
cgagagaatgagagagacaagaggaccaaactcatccttttataaggaaaccattcccatttcttttttcagtagcccgaaactgagccccaggcactgtcttatataaaatattttagtctcttataagcttagcattaaccatcactatgtttggcctcatcaatagatgtctggaatctagaatgagagatgggatttttcagtcctatgcttagagagtaaatcagagatagaatacattgttgtgtactggggaatcatattttcccagaaagacatacaaatggaacaaacagaatagtggaattcaattgaaaccatgtaatacaaaaaatagttgtggttcttctgggtaaaaataatgctaaatttgttatttataaccccaagggttaaagaaagtactaatgaaaaaattttagggcaatggattaaatcttaacataaggaagaactttctggtagtaaagaccgttcaaatattatttagagatatattcaggcactaaaaaccattaagaataacaagagaatgccacgaagtcagaatagtggttatttctaagaggaaaggtacttgggtgcgggtttctgggatgcaggcaaagttctatttctagatgccaattatatagtttctcactttataaattccttaaacttacattatgtgtatgtcttatgcacagtttcatatgtacgacacagctcacaaagtttaaaaaacaaaacagccaggcacagtggcttgcgcctgtaatcccagccctttaggagactgaggcaggtggatcacttgagcccaggagtttaaaaccagcctgt

SEQ ID NO: 102410 - DNA, 381 bp, Homo sapiens
gcaaagaaagacctagaagtgagaaagcaggacattggaaagacagaaaaaaaaccccagatgttgctggatcctaagtgtgctaggggtgtttgcacagaatgaactagaaacactggcagagagtagaagtttgggttcattaaatctgttaaccaaaaatctactaattggctgggtgtagggctcatgcctactatcccaccactgtgagaggccaaggtgggaggaccacttgaggaaaggagggcaagaccagtctggccaacagagtgagactttgtctctacaaacagtgttttagaaatcagccagtaatttgaggctacagtgagctgtgaacacaccactgcactccagcctgggcaacaaagtgagacc

SEQ ID NO: 102411 - DNA, 360 bp, Homo sapiens
acatcacaacgctcatagtgctgcagaagctctcgataagcgttttcctctaattcccaggaagcatctctttttttgttcttgagacgcagtcttgctctgtcgcccaggctggagtgcaatggcacaatcacggctcactgcagcctcgacctttcaagctcaggtaattctccgacctcagcctcccaagtagctgttctgcaggcacataccaccacaactggcttattttttatatagacagtgtttcgccatgttgcccaggctgtactatagcatttattaacacataatgtagtatactgtctagtgatctatttccccttatagacaatgagtgccatgacaacagaaagt

SEQ ID NO: 102412 - DNA, 137 bp, Homo sapiens
cccgcggagttccccctcacccctcagccgccccgccggctgaagcatcggcgctgggaggcggcggcgctgctgagaggcagggacccgagcgcgaagtgtgtgggagtctacgaactcaacccctctctaccctc

SEQ ID NO: 102413 - DNA, 370 bp, Homo sapiens
ccctcacctcggctcccaacacactgagattacaggcttgggcatcactgtgcctggcctcagctttatttgttctaaaggaaattatgaatagtaatggttattacataagtaatctctatgatgtgggaaaccattaagcaccttttacatactctaaataagaattatgctttgggtttttatcatatttctaaaatattttctagcatgaaacatctaacttaacattacacacaaacacatattcctatttatccttccagacataatatagtcactgtcattacaaagccttctttgtgctaacttctttgttctctcttctctgctcccatgttacattttaccataatcattttcttgtatc

SEQ ID NO: 102414 - DNA, 149 bp, Homo sapiens
gttagtctacagcttgtgtctgagatgtgctaattgaatatttgctcagtacctcatcttaactgcctttggctttatgttgcttatccttcatagtatcttgttcattggccttttacatccataggcatcacttctctgatattcgt

SEQ ID NO: 102415 - DNA, 532 bp, Homo sapiens
gatgattgtgacatattgccccaaaaggcaggtgatgtgagtcttctggtcaatccctattcactggtgggattgtgatacatatcttatccaaacttataggggcaatatgactctcatacctctaaacaaccaatagcagatacactagttctcatagccagggtcaggaaaatgagtaatgtcttgggtttcttctttgtatgaaggtcataaagaattaacactctgtcacatactgtgtaaagtcgtcaagaggtacagggaatgtcctaacagaactcagcacacaggggaggttgcgacactcatatgcatagcctgccaacagtaaagactgtcatccttccacataaacacagctcactgttgaggttctgaatctcatacccagatgaagttgaaagttagaaaattaaatctcatgttaattcgatccatagagaggttagtgtctctgagaccaagattcagcacacctgtgagtcagtgacttcatttcattgagactgtcactcaggtacttacaccc

SEQ ID NO: 102416 - DNA, 693 bp, Homo sapiens
cccacgcgtacgcccacgcgtccggcctcagagcctaccaccactcctggaacatggcaggtactcagtaaatggtaggaaggtgtgaggagctgccagccacaacataactatccaaagcccaaatccagacaattttaagggttactgcacccacttctttagctaagtatacaaatgctgaacataatctcatcttctttatgactagttcagtattgccattttagatataaattctcttctgccacaatgatgtccttcaaaattcctaaggtgggtaggagtagtttgctttttcactgcattcccctaggaatgctctttctgattgttgcaattggtgttaacttttatcaacttcagaaatgtactttggccattaatatataatgtatattgacctactctattccaggaaatgtataagatttctacataagttatttgctccaaaagtcatggaatcatagaatttcggagctggaatgggtcttcgagataatctaatcaaaccactttatttacaagtaaaaaaacctgaggttaggggagagactggcccaaggtcacactgctgattagtgacaggagtagcattgggatctggctttcctgacttcctgttcactgctcttaataccatgctgtttagatctcactcctcagcagtatccataatagtgataatat

SEQ ID NO: 102417 - DNA, 246 bp, Homo sapiens
tagagatggggtcttgctgtgttgcccaggccggttcatattgctttaatgctctacaacaaacgttacaaggtttaagagtggacaatcctcacaaggctggcttaaagtccaaaccaaaactccttgtccctgaagaggaaatttctagaagcttcacagactacagaggcaagcaaatgtcctatagaacatacagttttagtaacattaactataaaactgtaacagaagtgctactcaaaa

SEQ ID NO: 102418 - DNA, 157 bp, Homo sapiens
ctgaatcctttgtcatcatttccacagtgttcacagcatcttcaccaggagtagattccatttcaagaaaccccttccttccttccttccttccttccttccttccttccttccttccttcctaccctccctccctccctccctccctctctccctc

SEQ ID NO: 102419 - DNA, 629 bp, Homo sapiens
gcaaccactaatcacttcttattacattgccctatcttctcgaagcacttatcagtatctgaaattatctttcttcacatttgttttcacatttattttctatctgtaacctgcccccaatagaaattagaatataagctacttagagctgtatatgacatgcatttttgtttaacactgtatctccaacaccaagacaatacatactcactgactaactgctcaactctttgcatacttaagttgaatccttccaagatgcaaataaaaatcaacctcttctgtataaccttcccaattccagtgatttctccctcatctgatcatctgtagtatttactttcctaaaggccatatcttctgaagttagtaacaacgatttcaacttcctttggtttagaaggtgtctggtatatattctatatacccttactttcaacctttttaggtatctcttgtgcttagcatggaatataatttttaaaaatctaaagtgatagtctcttctaaccagtgagtttagtgcatttatattcgttattcaattacttattcctatatttggacttgtttctgcaatcttattttttgttttcattcaactcactttttaatgcttctttttccca

SEQ ID NO: 102420 - DNA, 1190 bp, Homo sapiens
gtccggcgggcgcgaggcggcggcggaggcccgagcccggcccagcctcgtcccgcccggagcccgcctggctgctaccccgaccccggctccggtcccgtcctgtcccggcgcgccgcggcctcgccccggcccccgctcggcgcctcccgagggagcggcgctgccggccgagagcgcaggcccggccatgaccgacttcaaattgggtatcgtgcggctcggccgggtggccgggaagaccaaatacacgctgatcgatgagcaggacatcccgctggtggagagctactcctttgaggcccgaatggaagtggatgcagatggaaatggtgctaagatatttgcctatgcctttgacaagaaccgaggaaggggctctgggagactccttcatgagctgctgtgggagcggcaccgggggggcgtggccccgggcttccaggtggtgcacctcaacgctgtgaccgtggacaatcgcctggacaacctgcaactggtgccgtggggctggcggcccaaggctgaagagacctccagcaagcagagggagcaaagcttgtattggcttgcaattcagcagctgcctacagaccctatagaagaacagtttcctgtcctaaatgtgacccggtattataatgccaacggggatgtagtggaagaggaggagaactcttgcacctactatgagtgccactaccctccctgcacagtgattgagaagcagctccgggagttcaacatctgtgggcgctgccaggtggcccggtactgcggctcccagtgccagcagaaggactggcctgcccacaagaagcactgtcgggagaggaagcgtcccttccagcatgagcttgagccagagcgatgacgggcaggggagccacacatactcacagcccccgggctctaccctgggcacagcagagacagactggtggttgaacctggaggtgccaaaaaagccagctgcgggcccaggacagctgccgtgagactcccgatgtcacaggcagtctgtgtggttacagcgcccctcagtgttcatctccagcagagacaacggaggaggctcccaccaggacggttctcattatttatatgttaatatgtttgtaaactcatgtacagttttttttgggggggaggcaatgggaagggtagaaattacaaatagaatcatttgc

SEQ ID NO: 102421 - DNA, 544 bp, Homo sapiens
attgttactgcgtgcaccaaaggaagcctccttcctcttcagtggagggtgatagcacgttccccaccctggaagagagttgctgctttgccatgccttgattctggttgagagtcccaaaggatgacagaatcacttcccttgggcctcactgccaaatataacccacttaatatcctccaagtttgaggccataagtctgtggcgcatccagatgcgacccccgaggcgatagcatcaacgtgggagccaatgcaactcaaaagaaggatggggcttcgcacctcctccttgggtaggaagtaggttagctgcttggaaaatgcaggaactggcactgaagagatctgagtctgaacatatccctcacccgtcagtagcactgggaccttgtgcaatgttagttttcccttccctgcttcaacttagatggctcgggccctgagaaagtgattcacagctgaaaaataaatcaaaggcctcgtgttctaaaaagagtttatggaaggagaggcagctgatgaaagtctagaaagaaggctga

SEQ ID NO: 102422 - DNA, 494 bp, Homo sapiens
tggcgcgatctcagctcactgcaagctccatctccgggttcacgccattctcctgcctcagcctccccagtagctgggactacaggcgcccaccaccacacccggctaattttttttttaagaggcggggtcttgctttgtcacccagggagtgcagtggcgggatcacagctcactgccgccttgaattcctgggctcaatggttcctcctgcctcagcctcctgagtagctggggctataggtgtgcaccactgcacccggctaatctttttattttttggagatggagtctagccatcttgcccaggttggtcttgaactctcaggcctgaattctaccccatgctggctgtatgagcctggactactctattgtcctctctgggcattacctcagggttgggcgaaccagggaggtgacggtgtgaagggaccaggtttcagtcctgggcctttgcagctattcattcacacctattgtgtgacttcagg

SEQ ID NO: 102423 - DNA, 373 bp, Homo sapiens
  misc_feature (7)..(7): n is a, c, g, or t
ctgctcncgtgtgggtggtgggtctgtgcctgtgtgggtgctgcctgtgtggatgatgggtctgtgcctgtgtgaggtgctgcactgtgtagggtgcagtgggtatgtgccatgtgtgggatgcatgcactgtgtgaggtgcagttggagtcctgggattaggttaagagctcagggaacatgcctctgggagaggagctgactgaggctgggataccttaataagaggtcaggccggggacgatgagcaggattttgaagacaggcagaatctctgattagacttacaggatgagacatgagagagggacgtcgcccgaaaagaggccctgagacaggatgattaggggtctccactgcctccctttaaaga

SEQ ID NO: 102424 - DNA, 683 bp, Homo sapiens
ggcatggtggctaatgcctgtaatcccagctacttgggaggctgaagcaggagaatcacttgaataatggaggtggaggttgcagtgagctgagatcacaccattgaactccagcctgggtgacaagagtgaaacttcatctcaaaaagaaagataagctcattagcaattttgatccggagctgagtaaacctgagtcaggggataaacatgtccccagcaagtgggaattaattattatactcaggaggtggctgagtttgtgagctttgaatgatcccagagagaaattcattcttctgaatctccaagggcattccacaatgtgctggaactgtgctaagagaaggaaccgtgaccttggagctctcctgcagattcagcattattgcctgccaattactagcctgaaatgttgaacaagactgataggttgtcaggaaagcacacatctacattagcgtcacttagcgacagactgaaaaaatgaattggcaatcaatcatttaatcctatagaattctatattgctgtagaaataatggccttcctccatagacctcaagtattttataacatatattttcattcatttctcaaggttccaattaggaagattgtgtgaaagtcatgctaaaatattaacagtaagagagacttaatttttttaattcatcatgaat

SEQ ID NO: 102425 - DNA, 639 bp, Homo sapiens
tacaaagtgacttaatatcaatatttttattcaagatctaggaatttatttatgtctacacatggatgtcctttacttaggaactctaaaaaagcattaatattatataattgctaaatgatttttcctactgctattggcccaacatatgcattataaattccaacaacagacaattattgtatcatgttataacttaaaaactcttcacgttttcagtttttatgtttgcatggtcttgtcttctttttctggatatttgttttccatgggggtatatatatgggtgaatcatttctttgccctcttccatttgatcatagaacttaaggacatcattctgaagtcagacatagatggatatgaataacatatattagctgtgtgatactagaaaattatttacccttcttgagcactgaaacttctcattataatggctataattggtatctatttacaaggttgctatgaagattaagtaaggcactttagcatattttggcataaaaatgtgttattaagatgaaacattagttttgtatgttttttcagatgcattatcatatgctgttaagcttattgctttgaatgtactatccttctgagaaaaggtaggaaagacaggaaagggggtta

SEQ ID NO: 102426 - DNA, 421 bp, Homo sapiens
agagactggcgggtctggaaagaagctctgagcccatccgcgtttctctgttggaccctgtcaggtctcttgttccgtgtccaatgtcagtcgggtagggaggcagtggggcagtcttggttctcatcccaccccggagtctctgcgcagccacaattcaggaaaacaatctggaggcgggttcaaaacactaagattgattgaacgcgctgatggtttggttttctcctatagcgctttggtagtggcttttatccagaccgccccccccccacccccccggaatgaaccctggtatagaaatgttacccgtatgtgtgcatatgattgtttttaatatatttcaatttgatgaatcagcctttttcaaggtcagattccagaccgacccttctggcgcccaccccccgctttttttttt

SEQ ID NO: 102427 - DNA, 424 bp, Homo sapiens
gattttggtggagtggtgagtatagaagctagactggagagaaccgataggtgaagtgcaggagacaaagtgaataacactagtttagataacgcaataaattttactgtgaatcatagaaagagagatgtgggataggagaaatagtatttaggagacgtataacagaatgaaaggaggtttgcgtttttattaatttaaaaactttgaatttttcaagaatttttacatttttaaatctttagatgggctatattctattttgctgatttgggagactaatgatgtaggaaatagagggaaatggtttgtaccaaacaagtagtgatgcagaaaagtgagagatgtcatggagctgaagttgctagaactgaatcttaatggaagactcataggcaggaccagcctttcaggctaaggaagt

SEQ ID NO: 102428 - DNA, 774 bp, Homo sapiens
gcacagcagaaattattctttcacagctcaggaggccagaggttttgaagtgaaggtgtgccggcaggcgtgcctccctcagaaggcgccaggcaaggacgtgccaggcctctcccccagctcctggggctgctggcacccatggctggtggacacctcactccagtctctgcctccatcatcatgtgactgtcttctccgtctccatttcccaaatctcttacagtgacactagtcgctgcattgagggcccaccctaaatctggaatgatctcatctcgtgatccttaactaaattacatctgcaaaaaccctgtttccaaataagatcacattcacaggtaagggatggagacttggatgtccctctcagagggacaaaattccaccttctctgcctttgtctgaggttcctgccggcccccctggctcctcggctggactcccaaaacggcccacacctggccagcagaagcccaggcacttgctcctgaggactggactttgagacgtgccagccaccctctcccggcccctctcccatctgctaccagggcctcgttcctaggcttggaagcaacaaaactgccaaagcagtttacccaaagccaccatcgagtggaagccactatcggagaggaacccaggaaagagtgtttgctcccgaggctgcagccgtggtgcccgtcggcgcgcctgcattctgcagcgggaaccgagggaaggccgtaagtcagggcctgctgctgccgggtgctgcccctccacgggctc

SEQ ID NO: 102429 - DNA, 249 bp, Homo sapiens
ttttctgtaaaacgttcagcagtaaagggatttatgggccacatatagttctgtatttttcttctttttatttatttattcggattattgttgttttgtttattaaaatgacatcctttattttttatttttatttgataaataacaaattatgtgcttattatgtacaacattatgttttgatatgtgtgtgcattatggagtgatgaaaccaaagtgaataacatacccttcaccttactagttatc

SEQ ID NO: 102430 - DNA, 932 bp, Homo sapiens
gccatttattagatgatcacttgttttagctttgaaagtgacagcaaaggcagcttacttgtggttacctagaagacacagggttggctgggcgcggtggctcacgcctgtaatcctagcactttggtgggccaaggcgggcagatcacctgagattggaagtgcgagaccagcctgaccaacatggagaaaccctgtctgtactaaaaacacaaaattagccaggtatggtggtgcatgcctgtaatcccagctactcgggaggctgaggcgagagaatcacttgaacccggaagctggaggttgcggtgagccaagatcgcgccattgcattccagcctgggcaacaagagtgaaactttgtctcaaaaaaacaaaaacaacaacaacaacaacaaaaaggcacagggttgttgattcatggttatccagaaatccagattttttctaaactttggaatgtattaatatataaacactttctcctgcagaatgaggacgtgggctttgagtgaaatgatctggctcttttagctctaacaactattgaaagaaaaccgtttatctatcagggcaagtgttacccctaatgcaagatttcaaatgataaatgaagctgaagactgaaggcctatctaaaaatattttattgaacccagaaataggattaggagtagaaatggaaagctggaagggaaaagaagagcattggggcttctttcaccagaaatgcccgaaaagggacaattgcttaaattttcagcttgtttgactagaaacagatgtgttattaaaagtgatttgagcctgggcacagtggctcatgcctgtagtcccagcactttgggaggtcaaggcggggaggattgcttaaggccaggagttcaagaccatcctggcctgatatagcaagactcatctctgtttaatta

SEQ ID NO: 102431 - DNA, 541 bp, Homo sapiens
aggcaaggacctggagaggaagctccagtggggctcccacccaaggggtccaactttaccaatcccacaggtccccagtctggggctcattctatgtctgtaggcctgggaccctgcacccaggagagttgtcctgctaccggccatccctccgcagaggtccccctctggctctatgctgtcttcagcaaagggcctctgctccatttcacacctctcctgagggcctggggtagcttactgcgaagcagcctcagggaatagaggcttcagcagggcatcttggcccccaacacagaatcctggttgtaggatctggaagaacagaggagaaatggaagttggcagttcccaggaggggagaaggtgctggtgagccacgaaagcaaaccccagtggctgaagcatcctggatgactcggccacatttccttaagaatctttgtgtgtgtgtgtgtgtgagacggagtcccattctgtcacccagattgcgccactgcactccagcctgggcaacagagtgagactccgtcacaaaaaa

SEQ ID NO: 102432 - DNA, 323 bp, Homo sapiens
attgggcgagagggtcgagttgcatttagcgcggcgggggaagttttgcatcagcctcctgggctgtgcctggaacaaggagcccagggcaaccaggtacatagtcacagcccttcatctctgaccgtgttcttattgcatttggcaaaaaagtagaagccgcctaatacaggggttttctgttcaagaggccccaaggctgtcctccgtgggctctccctccggcaggtggattggaacgagatggggattctgggacacagctcaatccacatggccttccccacggccagggatcctcatttgaaactgctctttgggct

SEQ ID NO: 102433 - DNA, 392 bp, Homo sapiens
tccttcgtcggggtggaatgcctctgggatcctgtgggccagctctttagactccctcaggccttcatgatacctgtggccaaaagccctaaagcagggcctacatttaagactaacatgaggactaaaggacaaaataacaggaatgaagatgtggtctgggtcaaataaccaagaagtctatggatgtttgattttggacacctaaacaaatgagaggggaagacgacagactccaccaatcctcggaagggtcatagggtcattctatatcacccccagaaccatttctttctggcaactcccccactcacacataccactcacatagctccagtgggtggtactatggccttacctgaccacatccctgctggcctcaacaacctaac

SEQ ID NO: 102434 - DNA, 243 bp, Homo sapiens
cccctgctttgagctaagacctctgtccagcgcccggacccaggtgagccccacagtccctgtcccgaaagagctgagagcctgctggggaaacagtcctagaaacacctcgctagcacccagtgtggacccagaggaaggggctcctaggagaagtggcccagggcccaactcggaaggaagcagccttcagaatcagccgctggagctgcgggactcgcccacggccctcaggactccctg

SEQ ID NO: 102435 - DNA, 260 bp, Homo sapiens
aactcctgacctcaagcaatgctcccaaagtgctgagattacaggatgggccaccacgcctggtctgaagacattcttaaggcttcaatttcatttcaaactcaaacagtgaatagtgtataccgtatctctttgaggtgctaggatgatacatttacagtagataatattaaaataggaacttagaaaataattaacaagctataagaagggcagatgatgaagaggatttctcagcctcagcactgttgacattttgg

SEQ ID NO: 102436 - DNA, 280 bp, Homo sapiens
atccacccaccttggcctccccgagtgctgggattacaggagtgagccaccatgcccagctttttaattttttttttttgaaacctattacagtaactccctgagatgaagatgagacgtttagcttcctcacactccctcctcctcctccttccccatgcacctcccatgctttgttcaatgttactctccttttacttgcttaaggtactctttcttatgccattgactttagacggaattccttggctttactgagtaagatggggaaattagaaat

SEQ ID NO: 102437 - DNA, 172 bp, Homo sapiens
agaaacggctacccgacaaaccatgacaattctagtcaacgatttattttagcccatcattaagaatttaatgttatcatataaataaatgcaggagctcctatcactttataagtaccaccaatatgtacaaattctggtaggaaggtagtttattctttctctttttttt

SEQ ID NO: 102438 - DNA, 345 bp, Homo sapiens
tgagacaggatctcgctctgtcacccagcctggagtatagtggcacaatcatagcgtactgcattctcaaactcctgggctcaggtgatcatcccacctcgacctcctaagtagcaaggactacaggcacatgccaccatgtccagggttttttttttcttttcttgtaacaggctctatgttacccaggctggtcttgaactcctggcctcatgcaatcctcccacctcagcctcccaaagtgctggtattaccagcgtgagccactgtgcccagcccatcctaccttttagtggaatgtttgtcgacacttggtatactgcatttttatgtgttaatacaagc

SEQ ID NO: 102439 - DNA, 371 bp, Homo sapiens
catgtggtgattccaggatgaatgaagttgtagccctttctcttaggaaacttataaactaataggagataaaaggcattctcagggaagtctacaaagtgctatgagggagccactttggccatcctggggcagagcagaccagaggctcagagcatggacacttcctcatccacccagcagaagcctttcacttgattttgaaggtgggcaggattgagaaaggcccagaaggggatgagttcaaagctgtttgtgggcatgtgacccctgcagtcacatatggccctagcttgtgtttcgtttagtgttctgctatcattatcctgataatatcctgataataaaattatccttaataattttatatt

SEQ ID NO: 102440 - DNA, 221 bp, Homo sapiens
gttaaatgtcagctaattctgcctatgtatagtgaatagaattcatgattagaatttaaattatcagttcctgttcctacctgctctgataattggcctcataaagataattgatagcttatgcctaaactcatgcctggtcaagccttctccttctatgtacgaaaccacttttaagggacaaggaattgttaattaaataacatcataagtaagtgaaa

SEQ ID NO: 102441 - DNA, 429 bp, Homo sapiens
ccccctctagcgttcctcacctaattgggaggggagaaactatacaagaagaaacacttcccttttgattctcggtgatcacaggtcaaagatgcaagtcaggtaaaaggctgagacttaattggaaggttgtagaatgcttcaccgcctccacagtttctcatcataccaacggggctccagtataacaagaggatattacagctgaaagaactgaaagacatggatcttctctaagaagaagtactttgggaatttgaagcctctggtacctatagctacagcaaacataaaacaaagcccaactcctagcccgattaacataaacctcacaccataggcatatttaccttagttcctattacgcagtacatgtctaactttcaattaaaagatataagccatgccagaaggcaaagaaaaaaaaaa

SEQ ID NO: 102442 - DNA, 647 bp, Homo sapiens
tttatagggtttataatttttttgttttttaatttatagatttatttgattaaaaaagagtttcatgtaccagagatgggttattgaaaataggcattgtttaaaatatgataaatattttatttgaaaacttggatttttatgatttacaaaaatctggagaaaaaacagggcaaaaataacagaaaatgaacatatatttaaattccccaaatattcaaatatatcattatattatgatgaagacttacatattactattttgtaatatgacaaagatctattcttacatttattatgataaaatgttgctataatatgagttcattatatgaagctctgacatgttcctctcattcttcatctaatatctaataatgactacctgcaaggagaaataatcactcaagttgtttacttttgcagaaggtgcagtctctttcagagaattctaaaaaaaaatcacattctatttaaactagaaactttctattaaaataagtgaaatgtagttaacaaaggatatttatttttatgtattttgttagttactattttccttattttgaaaaacttcagatcactggaatatctacattacaaagtggccagattgtatggtgtctgtaatctcattaccttgtggt

SEQ ID NO: 102443 - DNA, 438 bp, Homo sapiens
ggaccagctttgtccctttcccttctcatgcctagtcaggaaccctggagctggagagcacttagggagcactaaaacctcatctccacttctatataagatgctacctaaatatccaggagagatgttcatttactcttaattaattcattcattcaacaaatgtattcagtattgagtagactgtggcagtcagtacataaactctatagttagcctgcttggggttgaaatccagctctgtctcttactagctgaaggatcatcaagttacttctctctaaaaaagggagaataattcccttacagggttgttgtgaggtgtaaataagaaaaatctgtgcaaagcacttagaacaatacctggcacatgtatcaataaacgttaactgcacttactattgatatttgcagacattggtaggggagggtacaatt

SEQ ID NO: 102444 - DNA, 316 bp, Homo sapiens
agttcccaggctggagtgcagtggggtgatctcagctccctatatacctttataatctgcatgtgtatccctggaatctaaaataaaagctgaaagacaaaaacaaacaaacaaaaaacaaagaaagcgtcttgcccaagggctccgtgtggcaagtggtggtcaggctggatggtgggtgcaggtctgcactgctctatctgccccccaaaagcagaaggacagggccctcagtgatctgaggactgatgagggtgggctcaggaggaagaggccaccgagggtgtcctcgtgctggcaattctgcaagatgtgt

SEQ ID NO: 102445 - DNA, 488 bp, Homo sapiens
aaaatgttgcatagaacgaggaaggagtctccatttgagcagggagagtgcatgaataggatgtatcagcttttttggctgttgttttttttttcctccaaatattcttcagttattcctatgtaccagtagaagggatttctctgaactaaagtctaagtaggaggtatctttctacttgattggttttaaggatatgttgttttatatgtttatctaacatatgttgtcttttctgccagttctgaatcttctatctcctctccttattctagtgctccccccacccccgccaccacctacgctgtttttgttcaaaagccagagaaggaagtgagcatgcaaatcaggaaacagattgtctttttgcctatgcagatttgtctgtgattttgtttatttattaatattcacttagcatgtttagagtaaaatcttccttttctagtctatcagcatagggtttctccaattgttccctttcctca

SEQ ID NO: 102446 - DNA, 233 bp, Homo sapiens
cactgcagaatctagggtcatggagcccacatgtgcttagccaggctctcagaccttttgctctttcctggtcaggatgaggtaggaaagtctccaacatatttgctctgatttgctctcctgcacgtcccaatatgaagtttgtaggctcctgaagcaaagtcagtgttctcagatacaacccagagtgaatgcctctagaatcagcctctgctaagcgatttcccaaatgc

SEQ ID NO: 102447 - DNA, 164 bp, Homo sapiens
tgagatcacaccactgcactccagcctgggcgacaggacgagactccatctcaaaaaaaccaaaaaggactctcaaaaaatttactcctaataattgagtaattccagcatgtggatagctgtgagataccaagacatctctgtgggtaaacgtgagagaggga

SEQ ID NO: 102448 - DNA, 469 bp, Homo sapiens
cttccccaggccacatgtgacccccagaaccacccccggagggccagggctgctgcgcacctgcctgtccatgtccctgaggacagagccagccggccccatcccactgctgagctgagagctgctcccttgccctggccgaggagcacagcagatgggaacagctctcccaggctccacattctgccctgccggggaatgcctgcctggggttggtggccctctgcacgttggccctgggaggaggtcgcaagccctgcacggcttccttcctgctgagaggacgtttcctccacaccgacattccgcaggagcaggccgacgtgattgcacttcacgtgtttgtcattttaaacagaatccgtagatgttcattgtcctgtctctcaaaagacaagaatattcatttaatgtattaagttttatttttattcatctgtaattaaaaaaacacctaattagtcctcta

SEQ ID NO: 102449 - DNA, 243 bp, Homo sapiens
gaactaatgggtgtgtgttacaaaaagtactatgactttcctaaaataaagagtaaaaatattcctacccacaaacgttaagtcacaaaagcaaataaatcaaaagtataaaaatttaggaggtaatgggactgtggtagtggtcatataactgcacattgtagaagacatgaagacttttaaaaatgttcttcaagccagccattgaataaattcatagagaaacttaaaattggggggatg

SEQ ID NO: 102450 - DNA, 322 bp, Homo sapiens
aataaaataatttaaaaaaaacaagagaatgttactttttaatttgaaaacaataagaaaatgtccaagtctgcaaaatagagtctttttgaaagactcttcgtacttattaatttattcaccagacatctttaaacggaaacagtggttaagtgtgagagtttggaagtcccacagatcagaaccccagctgccgtttactcactgcagtccctgggcaagtaattcagtcatctgagtttccttgtccctacccgtgtaatgggggatctctggtacccatctcatggagctgctaaagtgattaaatgagacaaaagta

SEQ ID NO: 102451 - DNA, 399 bp, Homo sapiens
aaacaacagaaatttatttctcatagttctggagtctaggaagttcaagatcagggtgccagtgtggtcaggttctggtgagggtcctcttctgaatgcatactgcctcctcactgtgttctcacatggaggaaggcggaattactttccttaatagcatttaattgttaagtccgtcagattttggtggtttgaaaagatctttgttctttgatttcctccaaatattatttggatttctaggtttagattcaacatagaaatatatccatgattgttgttttttactattgagtatccatggtgtactaggtgtttggaatggcaagctagatttcagtactgttttagtctcttgagatttctttaagatttctagattttaaattagtatcatga

SEQ ID NO: 102452 - DNA, 380 bp, Homo sapiens
atgaataggcatacacaggaatattcattatatgtgtaaataccatcatttgtattcaggcacaccttgttttattgtggctttattgcacttcacagatattgtattttttttagaaattgaaggtttgtgacaaccctgtgttgagcaagtctatcagcactgtttttccaacagcatgtgctcactttgtgtctctgtgtcacattttggtaactcttacaatattttgaacgtttttatgactattatatctgttgtggtaatctgtgatctttgatgttactattgtaattgttttggagcttcatgaaccatgcccatataagatggcaaatttaattgataaatgtcgtgtgtgttctgactgctccaccaac

SEQ ID NO: 102453 - DNA, 444 bp, Homo sapiens
aaagaaaaggtcttgctgtgtcgcccaggatggagtgcagtggcacaatcacattgcactgcaacctcaatatcctgggctcaagcaatcctcccaccgcagcctcccgaattgctgagactacacatgtgtgctaccatgcctggctaattgttttaattttttttatagagacggggtttcgccatgttgcccaggctggtcttgaactcctgggctcaaagcgatccacccaccttggcctccaaaagtatgggattacaggtgtgagccactgtgcccagccttattttttttttttaagataatattgttaacattttgtatttctctgcataaatatatttcaaaaataaaaatagagctcataatatatgctgttttgtaatgcttttttcacttaataggaattttttccgtatcattaagtactctgatttaatg

SEQ ID NO: 102454 - DNA, 663 bp, Homo sapiens
aatgaggaattattccagactgaagacgataaaaatacatgacacataaacaatatatgattctggaatgaatgattttggtaaaaagatcattaggatatgtgacaaaacttgaatgatgtttgaaagttagatggtataatgtatcaaatgtattcatttcctggattttgactgtcagtcatactgtggtaatgtagcagaatgttcttgtttataggacatactatattggcaacttactctcatatggttcaagtggcaagggcttactttttgttgtacttccaacttttctaaaagtctaagatattttcaaagtaaaaaaaaaaaaaaagtagccataattttgtaagtcaaaatagagataacaaggaattgctaccatgatgtaagtgaaaagtcatttctgaaattatggcatcgtacaatcggtctcagtcattataactgcacatcagaattacctggaatgctttcaaagaacactgaggtttggagatccaatccaggccaattaaatctctgggggtgatatgcaggcatcagcattctttaaaaagctttctattaattctgatgtgcagtcaaggctgagaaccaccagcatgtgctaggtcctgaaggttgttcaccctgagagagtttcatttaggcattttc

SEQ ID NO: 102455 - DNA, 115 bp, Homo sapiens
caggccggatgcccgcagtccggggcgttggggagggcgcggctggacctgcggggctacaagaaggcagccggacccccgcaccgcaggcccggacctgacaggaccgcgaccc

SEQ ID NO: 102456 - DNA, 663 bp, Homo sapiens
tttgattgattattaatcaaggtaacagtagaaaactaaggaaaataatcagatcagcagaagcatcttttttccgagacaactgttggaatactattttcccctggatgaataactaaccaggtaaatagaaagaggacagatattttgatcactacttgtatttctttgtaaatttttattttttcacttaataaatcatgaatgctttccatatcttaaatatgattccacaaaatgattgtaaatcctgcattttacttgtgctgcactaacatttatgtgcctacttcttcattaattgcagaaagagggaaataaaggtagggaaggagtgtaggaaccagaatgaatgaaaaagagagtgacgagaagacgagacaggtagatggtagagtgcagaagcagagagaatagtgagacggtaagctctattgatttggggtttgggtctcagtttactagctctcctgatgcagaccacctctatttgttatctgatttcaaattgtacatcgtctacttgaatctctcaatgtacagattaagaccctagcaaattagaaaattatctgaccttgaaaccaaagagattggtatgcaatttcgcagtagttttctgtcttggaccactttggtctttggctcagcagattggagaaa

SEQ ID NO: 102457 - DNA, 605 bp, Homo sapiens
gctaggctggtctcaaaactcctgaggcatgagccactgcacccggccaatttttttgtatttttaatggagatgggggttttgccatgttggccaggctggggttttgccatgttggccaggtctcgaactcctgcactcaagcagtccacctgcctcagccaaccaaagtgctgggattacaagtgtgaggcactgcacccggcctccagtcttttttttcttatgtgtagactttacctagttgtaagcagacatttcagaaccaatgtctttgcctaagggaacataaatgtggatgtattaaacggctaagttttaaaaaacaattatatgcctagatattaattactagaattctttctcatgtgctgaatacaatattgtattgcactgtaaacacagaaaggtactgccaattcagttatcagggttgtcatttattagaaatgcaatagtaaaattgtaaaataaggctgggcatggtggctcatgcctgtaatctttcctgcctggcactttcagaggccaaggcaggaggattgcttgagctcaggagttggagaccagcctgagcaacatagcgagatcttgtctctactaaa

SEQ ID NO: 102458 - DNA, 430 bp, Homo sapiens
tacagatcttgagatggggaaattattctggattatacagatggactgtgttcagtcacaggagctcttaaaagcagagacgctttcccagcttgggtcagagagattcatcatgagaagatctccactagctgttgctggatttcaggatggaggaagactcaagcagagagacctggtggccactagaagcttggaacagccctcagttgatagcaaggaaatgaggactcagtgacacaacctcaaagaactgaattctttcaatgacctgaatattaatgaaatgaaatttctcctagaacctctggaaaagaatgcagccctgctaacactgtaatttcagctcagtgagactgtgttagacttctgacctacagaagtcgtgagacaataaatttttgttgttttaaaccattaagtttatggt

SEQ ID NO: 102459 - DNA, 1466 bp, Homo sapiens
aaaaactagctgggtgtgttggccacacctgtagtcccagcttctcgggaggctaagatgagaggattacttgagcccagaagtggaggctgcagtaagctgtcattgggccactgcgctccagcctgcatgacacagcaagaacttgtctcaaaaacaaacaaacaaaaaccagaaaataacaagtgttggcaaggatgtggtgagactggaacccttgtgcactgctagtgagaatgtaaaacagtgtatctgctgtggaaaacagtaggacaattcctcaacaaattaaacaggctggacatagtggctcacgcctgtagttccagcactttgggagaccgagacaatggactgcttgagcccaggagttcaaggccagcctgcctgtctccacctcccaaagtgctgggattacaggcatgagccactgtgcttggccacctttgaaactttttaagtgtacagttctgtggtattgagtgcatttacattgttgtgccatctttaccacccttatccacagaattattttcattttataaaactgaaactctgaacctattaataactctctatagtcttttctccccagcccctggcagccaccattctactttctgtctccgtgagtttaactactttgtgtacctcatataagtggaatcatacagtatttgaccttttgtgactggcttatttcatttagcgtaatgtcctcaagattcatccatgttgtagcatgtgtcagaattttctctttttttttttttggagatagggtctcgctctgtcatgcgtgctgaagtgtagtggctcaatcatagctcactgcagccttgacctcctgggctcaagtgatcctcccacttcagcctcctgagtagctgggaccacaggcatgtgccaccacgcctggctacttttttttttcttttttgtagagatggggtctccttatgttgcccaggctggccttgaactcctgggctcaagcaatccattccgccttggcctcccgaagtgcaaggattacaggcatgagccactgcatctggcaagtttttcatatattttgaatatcaatccctcatcagatatatgatttgcatgtatttttcctatcctatgggttgctgtttcagtctgttgatactattctttgatacacaaaagttttaaattttcatgaagtccaacttatttttttttcttttattgcccactcttttttttttgacagggtcttgcactgtcacccaggctagagtgcagtggcaaattctagactcactgcagcccctgcctcccaggttcaagcaattctcctgcctcaccctcccaagtagctgggattacagtcatgcaccagcacacctggctaatttttatgtttttaatagagagggggttttcccatgttggccaggctggtctcaaactcctggcctcaagtgatccgccca

SEQ ID NO: 102460 - DNA, 332 bp, Homo sapiens
ttggctggggctggccaaactggcatcggtttttcatctcctgaacttactctttcgtaatttcctttatttcagccagtaaatggctgcatccctaagtcttcttttttaaaacatctcattcccaaaagttacctgcctgaaagtatcagattctgcttttttttttttaactgtggttattaaatgaggcggtaattcagaacttccccactgcttccttatccagaagctaacgccataagcccaggacagggaaaggagaagtcactgagactgtgtttgctagaagcgtttagtaaggcttgtcctgtttttctttgtataccagg

SEQ ID NO: 102461 - DNA, 747 bp, Homo sapiens
tgtggcttctcattgggccccgtgagtgctggcagggctgtgaagcaggtgtgactaatgggtcagctccccgctgggactgtgaccctgaagctaacaaacctaagggcaaggccaggcgcagcagctttctgagtctcttctgaagtggcttgaagtcgatactgtgtgtgtatgtaagatctagcctgaaggaaggcgctttgttcagttgctaacttattttcttggtggtaagctttagatatcacttagcttttatgtttgcttgttttgttacagattaagtagctgtcataagaaaaaggactatttacttactatctggagtcttgttctgtttgatacccctaggcacatgttcaattcagagataagagccctggaagttatagattgcaaacagttttttccctgaaaacaaaactgacatatttatatacaatgataaatacatagatagactaatgatcagtttatggatatttggcaatatgcctctcaataatcatcacattattcataatgtttataaattcataaatataagcgcacattacagcaacttattaacaatgttctataagccagaaaagcaccatgaatacaaaataaattattatagttcctgaacagtacttttacctgctaaatattttgtggccttcaacagctcagccagacagtcaaaaggagagcaacttagcagaagattttggtctagctgaggattcagatcactgaaga

SEQ ID NO: 102462 - DNA, 439 bp, Homo sapiens
ctggactgctgcagctgcaagccaagaaacaccaaagattgctggcaagcgacaagaagctagaaagtggcaaggaaggaccccctatgggtttcagaggggatctcgccctgaggacaccttaattccagacatccagcctcgagatctgcaagaccacacatttcagttgaaattaatttcaatacgtttttgctactatgaagtttgtggtattttgccagggcagccccagatggagaaggggactggaagaaagagagaagccaagctgtggtgaaaggaaaccacagaacacgtttaggaaatgcctttctctgatcctgctgaagacctgtgtcctactttactcaatggatgcatggcactggaatgagttcacctccacatcctcctctctgcacccaaagcactctccagcttcacccttcttcttttg

SEQ ID NO: 102463 - DNA, 482 bp, Homo sapiens
cacatatgtgagaataaaaaataatgtgtttctttccccattccattaatacctattgatgaacttcctatagtaaatgctgagcaaactgatgtgagtatagattgaaactgagaggttgaatcacaggataagaatatcctgagtcaaattagccccttgaatttgttgcctgtaactttttaaattgagcagggatggtactcatttaaatgtctctgtttttaatggtgatactcagctaaaaacaaacattagacaattcacaattcacttgtaatgggcacatggagggagaaagtgcttgagaaatggtatctgaatttatagctcaacttgtatgcagagttgtttgttgtgtagaaaaatgcaacaattaaaaagtcattacattatacatttctaattggagcatctcaagatgttcattaaacagcataaaggatcatctgaggccattgaatacctgtagttgagtggca

SEQ ID NO: 102464 - DNA, 309 bp, Homo sapiens
cctgaaactgaaaaactaccagaagaaacagggggaaacccacatgacattggtctgagcaatgatttttttggatttgaccccaaaagcccagggagcaaaagtgaatacagacaaatgggataacatcaaactaaaaaacttctgtacagcaaaggaaacaatagtgtgaagagataacctatgggttgggaaaaaatatttgcatgctatacatttgataggggttaatatccaaaataatatggaactcaactcaatagcaagaaaacaaacaaacaaacccaattaaaaaacaggcaaaggacc

SEQ ID NO: 102465 - DNA, 311 bp, Homo sapiens
ggtagtcctatttctccttttatatatatatggccatacttaccccttattcttctgtgtgggaaattatttttcttaggctacaaataaaaaaagtcagcaaagcatttgattaaaatttcaggggcatgataagctctcaatatattcataaaacatgtctttttatgtttttcagaagagtttgacagcttttataacataggttctgtaatttctccctcttcactcccttccttttcacctagaaccttttggattggtttgtctaagcacccctgcgatgtgtcaccccgctcagcattggcttt

SEQ ID NO: 102466 - DNA, 397 bp, Homo sapiens
cttagcccagcctaccttaaatgtgctcagaacacttacattagcgtacaattaggcaaaatcaaagcccattttataataaagtgttgaatagctcttgttatttattgaatattgtactgaaagtgagaaacagaatggttgtatgggtacttgaagtacagtttctactgaaagtgaacttcacaccattataaaactgaaaaatcataagttgaatcattataagtcagaggtgtctataattaagataattcctgagtcctccccaaatgttcccagtttgattagggtaggtgtccaaaccagattgccacagagtaaagatttttcttactgagcactgtcagcttaatgcacagtttacccctggacctcccaaggcccagcttccaag

SEQ ID NO: 102467 - DNA, 1063 bp, Homo sapiens
gttactggacctcagatactaaaaggacaaagaaaagggacagatgagaacagctacgaagcgatagtgaaaacatatggtgtccatcttgtaagcataaggctccctggtattgctgccactctccctgtgctcgggaaagctggaagaagccagtaggcaatctggtgtctcgtcagaagagtgccagaaacaggtgttgctgacctaaccctttcctcctaccacagattctcttggtggccaggcgcagtggctcacgcttgtaatcccagcactttggaagatggagacgggcagattacctgaggtcaggagttcaagaccagcctggtcaacatggcaaaaccccgtctctactaaaaatgcaaaaattagccagatgtggtggtgctcacctgtagtccaagctactcaggaggctgacacagaagaattgcttgaacccgggaggcggaagtttcagtgagccgagatcgcgccactgcatgcactccagcctgggcaacagagcaagactccgtctcaaaaataaataaataaataaataaataaataaaatgtttcaggttctctcttgtctccaaaccattgctaatgctatttccatgtctgatgttccaaggaaaatattatttcctctagaaagcccgactgcctctcagatttgttaggtgctttcctactgcaccctgtcagagcacaaaatggtaatcgcagtttgtctgtcccccttattagtctttaagcgaattagactttaaattctaaaagcagctatcagatctgtcttggtcctcattgtattcctaggaccttgctgtagagtgggtgctaataaatatttttgttaagtgaatgaatgtatgtatgaattgctttggctctaactggaatttgtctataccatggatcgtggatgctttgtctatggcttataatatcaattgttccattttgacttatttcattcctagaaaatttgtcctatgctttgttatttataatcacattaatgatttatttcagaatatactgtaatataaaaaatgatgcatgctaa

SEQ ID NO: 102468 - DNA, 133 bp, Homo sapiens
ggcgaagtgcaatggctacaaatagtgttccccatccctccattatcactccaactcctggtggagagtggataattatactggaagacagaaacaacacttttttttttttttttttttgggaaaaaggttt

SEQ ID NO: 102469 - DNA, 332 bp, Homo sapiens
tgttccagttccttttcactattcaaagcccaattctgcttagttcaacttactttcaactgggcatggtggctcacgcctgtaatcctaccactttgagaggccaagataggaggattgccgcagctcaagagttcagcatcagtctgggaagcatgagatgctgtctgtacaaaatttagaagacaaaaaaaaaaaaactgggtgttgtggtgttgtggcccatgcctgtggtcccaactacttgggaggctgaggtgggaggatcacttgagactgggagatggaggctgcagtgagccagttataccactgcactccagcctgtgcca

SEQ ID NO: 102470 - DNA, 632 bp, Homo sapiens
gctcctgacaagtggggattgcgggcgcgcgccaccacgccctggctaattttttgtttagtagaggtggagtttcaccatgttggccgggctggtcttgaacccctgacctcaggtgaccaccccctcccagcctcccaaagtgctgggattacaggcgtgagccaccacacccagcttacgcctggttaactcttaatgaccaaaatcaaagtatggatgaaaaagacgagaatctgggaagtcacattgctgaggtctgagagtcatgactccactgtcaccggggaggcccagcagagggcagcacctggatgatgagacccagttcaggaggcgcagcacagagcggtcaccatccttccccggttcaccgggaagcttgctccccctccttctgtattcctggcaaatgacaacgggcaaagcgaagcgtgggccaaggacggaggaggcggtgccgcgcgtctgccgtggtcacaagccacagaagtttgcttcactcctgccagaaaccggcaggacgcggaattctcttttaaagcacgtgttgaacagagtgtgtaataacatgagattaaaaagttactgccaaacgacaaaatataactattaaaatgaagcttccaatg

SEQ ID NO: 102471 - DNA, 443 bp, Homo sapiens
tccacaattgtagtttcatatatgtgcatcctctgtgctatccttcagatccaatcaagggaagttcagaggaaagccttctgcacctgcttctcccacctctgtgtgattggactcttttatggcacagccattatcatgtatgttggacccagatatgggaaccccaaggagcagaagaaatatctcctgctgtttcacagcctctttaatcccatgctcaatccccttatctgtagtcttaggaactcagaagtgaagaatactttgaagagagtgctgggagtagaaagggctttatgaaaaggattatggcattgtgactgacagtgacctaggaagttacatcattgagcggttcttaacccatctctgcactggtgggacctctgccctcaatggacatgagaattatctgagacatttatttaaaatggagctat

SEQ ID NO: 102472 - DNA, 575 bp, Homo sapiens
tcccccctataatttacacttctagtaagcctctacctgcacgacaacacataatgacccaccaatcacatgcctatcatatagtaaaacccagcccatgacccctaacaggggccctctcagccctcctaatgacctccggcctagccatgtgatttcacttccactccataacgctcctcatactaggcctactaaccaacacactaaccatataccaatgatggcgcgatgtaacacgagaaagcacataccaaggccaccacacaccacctgtccaaaaaggccttcgatacaggataatcctatttattacctcagaagtttttttcttcgcaggatttttctgagccttttaccactccagcctgggcaaccaagtgagactctgtctcaaaaccaaccaaccaaccaaccaaacaacaaacaaaaacaacttgagaatgggtaatttataaaagagtggaacatttatttcttacagttctagaggctgggaggtctaaggtcaaggcactggcagatttggtgtctggggaaggcttgctcattgctttatagatggtgtcttatgg

SEQ ID NO: 102473 - DNA, 853 bp, Homo sapiens
gcttacttggggaaactattgtactatgtgccaggtactgttccagacattctatgtgtctattagcatatttaatcctgacttagctgtaactgtcctcaatctcttatccaaagtcctaagacagatatgtgctttggaatctgaacatatgcagtttactaagaaacactcctaatatgcagaccaggcaaaatgtaggacagcactccataatcaagcatattacatttctgtagcaagcacatgaataattatatcaggtaggataaatgaaaagagcctcatgtctattcaggtcagcttttgccaccaatgagttcatgtcaaattttgctgttcacttctgactggttaagactgctgcccccagaaaatgtcccatatctatgacatctatcatcttgcagacttatttcactgtggtgaacacatttaaaatctactttagcaattctggaatatacattattaactatagttaccttgctatgcaatagatcaacaaaacttattcctcctgtctaaatgaaactttggaccctttgaccaaccactacattcccctcaagcctatccatgattgaaaataccagcttccaaatatcaacttattcagaaataattacagattctaaaaggctggctataaagatgtctaagctgattgaacagcatattggggtacatggtgtacaaatagtcaacatttattcactcaacaaacacatagctgccttctttatgttcatttaaagcctgcttcaaatagagtatttcacagaataaaacactgtagtggttgcctcagatactatattttgcagagcctaagcagtaactaggtataccc

SEQ ID NO: 102474 - DNA, 435 bp, Homo sapiens
tattcacgccatcacccagttctattttacttacacgcttcgtcacaatctcataaccttatttagattttatctgctccttccttctagaatgtaagactcatgaggacaggaattctgtcctgctcaccaccatgtcccctggccaataacagtgaatggtatctagtaggcctcaagaagtatttgttaaacaaaaatgaaaagatgtggccggcacggggagagtacaaatctacataaaacaataaaacgaggaactgaaaaaaggaaagaaaaccacgctgagatgtacaagctgacaggactcaaagctatcatgccagctcggaggtttggtggacatttttcagggtggacaggtgcttcacacctatctaagcgcatagagcccttccaggaagaagaaaatccacagagaggtgtccagatagc

SEQ ID NO: 102475 - DNA, 789 bp, Homo sapiens
tttcttctgctcttccactcttacattttgttaggttaccccaaccacttctgtcccagttcggaatcccttatcctaactgcttttcacaacacattccagctctcaggtttatagccctcaatctccatgttggaaatacaaatttgttgtaagtgaccaagacctaaattaatagtggctgaaacaagatggaagtatatttctctcctatgtgaaaatccagacatacgaatgcagggctagttgattgcaatactccatggggtccttaggagccaggcccctgctgccttgctctcccatgcatggcccactttcttacactcactccatgacccaagatggccaccccatctctagttatggtgtctgcattccagccagtaagaataggaagagaagacaatcctaccggctagaccttagtctcatagccacacctggctagtgggaggtggggaaatgtagtctgtattttgggtcatcatgtgtccagctaaaatttagggctctactagtgtaaaaaaagggaacattgatcttggggaacaaatggcaattgtctgctacatatatttgacgtttaaagtttttttaattgtaaattttcatgggtacatatatatggggtacatgagttattttaaacagtcgtacaatgtgtaataattatatcagggtaaatggggtttccatcatctcaagcattcatcatttcctggtgttacaaacattccaatcgtactccctcagttattctaaaatgtgcaacatattattgctgat

SEQ ID NO: 102476 - DNA, 482 bp, Homo sapiens
attggcagtatgtcgactctagttccaaattttggcttagaaaactgagagggaaaagagccacaaagagtattaggttaatttttcatattaacttacatttaaaaattcttaacaagggaaaattctagttatctttccaagcttttatattaaattcagaaatagggttctgggctgggcgtggtggctcaggcctgtattcccagcactgtgggaggctgaggtgggcggatcatgaggtcaggagattgaggccatcctggccaacatggtgaaaccccatctctactaaaaatacaaaaattagctgggtgtggtggcatgtgcctgtagtcccagctactcagggggctgagactgatccccactctgttgtcaggctggagtgcagtggcgccttctcggctcactgcaacctcagctttccgggttcaaatgagtctcctgccttgtcgacgcggcccggaatttagtagtag

SEQ ID NO: 102477 - DNA, 270 bp, Homo sapiens
gcggccgcctactactactactactactactaaattcgcggccgcgtcgacacaaaacaaagtccctattatcctagcacttatattttattggttagtagaaaataaatgatcaaaaacatattatttgagctggagataagctggagattatttgagctggtggctcatgcctataatcccagcacttcaagagaccaagatgggaggatcccttgagcctaggacttcaagaccagcctgggccacatggtcagaccccatctctac

SEQ ID NO: 102478 - DNA, 553 bp, Homo sapiens
tgatgagctgtcctgcagtgctagagtctgagagaaaccagcccgactcagagcaagttgcaacaacctacagggagcgccttcctggcagggaacggttaatgttgagagtcacgtgccaactcttcagggctaacacattcccagaatatttgacacaagatacttatgttctcttcatctccccaaatactcttctcaggggctctttgtacccacaagatagtgcacagaggtcagactcagcctgggttcatccagaagatctgagctctagatgcacagacagctgacagctgtgcagaaatcccgcctccggggagcttttgttgaggcagactcaggctccagttcctaaaataagtggcgtctgccctcctagcctggcccccaaggagccttcagagatgcaggcagcggctctcagccctgctagggacagacctgccatcctgttcccagagcctactgaatgaaggtaagggaggccaggaagcactggtgacacgtgaaaagccccaaggctcacagcccaggccctttggacaccagc

SEQ ID NO: 102479 - DNA, 804 bp, Homo sapiens
aaaggcttgggcgtgcggcttgctcttcctctccgcttgacgggcggtggttcccccgagacagaaacttgactgaaaaataataccaaatacccgtgctgcggcccgtggccctccatagggccacctgaactagcctcgcctgtccccttgctctttgccgttcgtccttcgcgttttgtgaaaacagttggcgccgcagaaatgagataaacgcccctgagctcgaaacccgcactcgaactgccaccgagccgacccttcctgttttggaactcagggcccggccacccgagaagcaccctcatgggcactttgtttctacaagggcccgtttccatttccttcctaaggtttccttatcccctgcggcaggaggggcccgctgggctcgggttttcagctgcgttggagctgcagaggctgcggagtgaacgcggccaggagcccgcctgggagcgcgcagcgctctaggagccgagagccgctgcttggccctcgctggccgggtaaaccgaggggaagctcctggcctcctttcccttaagccccttattgcttctgtggggaaggccctcctaggtagaggcgaaggaccggggagataacctctcccatgggccacatccgctgccatggtctgtgtcgtgccagaaggtacctctcagccctcagtgccgtgaaaaatctgacactcaagaaggtcgattgacacgcctaacgtcgcacagcaatttagtagcacagcacagaatagaagctacccaggctggctgtctcccaagcctgtgtttctctaccaca

SEQ ID NO: 102480 - DNA, 104 bp, Homo sapiens
tccctctgcaagatgactcatgaggtctgactgagtctcatttatattcctccccagcaggtaatttaaatgtgatttatacagaaaggaaaagaaagagaaca

SEQ ID NO: 102481 - DNA, 393 bp, Homo sapiens
cgcctcctggacagctgttcatggcttctctctcttcagacttccaacatctcccttctctccctgcctcctaagcagatgctcttctttgaggaattatttttcatacataattattttgtcattattccttatgatgatgacagctaatgcttatattatacctactatgtaccagtcactattcttgtatatcagttttctaggtccaattattagccccatttttcaggtgagacatctgaggcacagaaagattaagtaacctgcctgaggttgcagggccgataaacggcagaactaggatttcaggccggcactgcctccgagtcttccctgtgctcttgtttactgcagtctggagaagagttgctctcactgccttctgtctgc

SEQ ID NO: 102482 - DNA, 287 bp, Homo sapiens
ctggatggaattctgaaacagaaaaagacactaggtacaattaaggaaatgtaaataaatgagggactttaattaatgacaatgtatcaacattggtttattaattataacaatgtaccatagtaatgtaagatgttaataactggaattccgcactatcttctcaattttctgtaaatctacaattgttgtaaaaactaaagcctattattaaagaaaaaaagttaaaatttagaagttaaggctgggcccagtggctcatgcctgtaatcccagcactttgggag

SEQ ID NO: 102483 - DNA, 613 bp, Homo sapiens
gaagttgcctgaagtgaaggagggggtagcggctgcagaagctaaagcttccgccaaacaaaagaggacagcacttccggtcacgccatcgttgctgccttcttcgtcaagcccccaggctccgctcttgccagagggacaggagccatggctcagaaaatggactgtggtgcgggcctcctcggcttccaggctgaggcctccgtagaagacagcgccttgcttatgcagaccttgatggaggccatccagatctcagaggctccacctactaaccaggccaccgcagctgctagtccccagagttcacagcccccaactgccaatgagatggctgacattcaggtttcagcagctgccgctaggcctaagtcagcctttaaagtccagaatgccaccacaaaaggcccaaatggtgtctatgatttctctcaggctcataatgccaaggatgtgcccaacacgcagcccaaggcagcctttaagtcccaaaatgctaccccaaagggtccaaatgctgcctatgatttttcccaggcagcaaccactggtgagttagctgctaacaagtctgagatggccttcaaggcccagaatgccactactaaagtgg

SEQ ID NO: 102484 - DNA, 442 bp, Homo sapiens
aaaaaaaaaaaaaaaaagatcttacatgagacaacgtcatattccaatagcttcttctacttcattctagttactctgcctggggtcacaacaataattttgaaggtattttaatgtctttctccttttttaaataaggagaatactaagacctgattggagagacttgccttacggctctggccatctgcagtgttggaagtagatgatctaacttgaatctaatattctttccactatatgatatatacacaaaccagtattgccttttgcgttgttacccttttatgtacgtgtgtgtatgtgtatacacacatacatgttacaaagtaatcaagtcccagttaaaaatatatattcacaaatatttctgtgacttcaaaaaatgtgaagactcttagtttagacaaaaatgcattaaagttaggattgtagactcttc

SEQ ID NO: 102485 - DNA, 409 bp, Homo sapiens
cagccttgcaggcactgaagaaggcagaatgggtttaagagttttccaaaacttccagctgcagagaattgttactatttgacttgtctgacagttcgctggaaaccccactcacagggcttatcttttttcacctgacttggagtttattcactgcaaacagtgttttccctggtgcatttgttgaaaataatcagcagcacttgtttgacataacatggagtgggtaacagctgggtcaaacaagaagctggggaatgagatgtccatcctgacatctggaaagctctgacatatttctagaatgtaatatgtgtaaggttggacacattttccaggaaaaacctgagaggtctctaagctctcacctcacatttagtctctgtccgagcacgaatggaaggtgtgt

SEQ ID NO: 102486 - DNA, 275 bp, Homo sapiens
gcaacctccacctccctggtttaagcaattctgcctcagcctgctgagtagctgggtctataggtgtaggctgccatgcctggccaattttttgtattttagtagagatgaagtttcaccatgttgcccaggctggtcttcaactcttgaacacaggcaatctttccgcctcaacctcccaaagtgctaggattacaggcacgagacaccgcgcctggctgaaaattcgccattttaaagtagaaaatgcagtggcttttagtaattcacaaagt

SEQ ID NO: 102487 - DNA, 419 bp, Homo sapiens
ggacagcttgtggggcttaaagcatgggctccacagcaagcctgcctgcaggtagattccggtgcccctgagtgccagctctgtagcccaggacagggagcccaatctgtcctcactttgtcatctgtaaagtgggaatcacaacagtatctacccatagcttattttgaggcataaacatggcaatgcatgtttagcacatgcctggcacgtagtcagcactcaaaaaacagtcctaagagttggtggtatccgtagagtagagcagccgtacttgtggctgctgttgtcctgatgataaatgaggatagaacaaaggacaaggaagaagaggagttggaagctgactctggcatttgaagcccttcacattctggccccaactggtccttttgcctcagtccttcctacactcccca

SEQ ID NO: 102488 - DNA, 413 bp, Homo sapiens
gcttgcgattttgaggtcttagttgtgaattctttgcctagaccaatatccagcagtttccctgggttttctgccagtatttgtatagtttctggttttatattgaagtatttactccatcttaagttgatttttttatgtggtgagagataggagtccagtttcattcctctgcatgtggcaatccaattttcccaagaccatttattgaaaatgatgtcctataaagatgggaacaatagacagacactggggactgctagaggtgggagagaaagagggggctaaaggctgagaaactacctattgggtactatgttcactaccagagtgacagatttagtcataccccaaacttcagcattatgtaatatacctttgtaacaaacctgcacgtgtaacctctaattcta

SEQ ID NO: 102489 - DNA, 667 bp, Homo sapiens
cgctgcgggacaaattggaccggagattaaaggaccggagtttaactcgaggtgactgcgttcgtatgcaaatggaatatataaaactcttctttccggggtagtctttaaagactttttacctccgggtgggcggcaaagactaaagtttcccctcctcccctttcattttccccctgcccatagaacagatgggcaaactaagctccgggccattggggctattaaagaaagccctaggctcttgaccccaggtgtcttgaaaccttccgtttaagagggatcccttgcccagccttgtttgccttcccctttcctcagtttccctatctgtaaaagggggttggaataaggacaggatcaagttggaagatcgcaaacccctgcccctcccacctcagtttcccgaagctttccggaagcaaaatcccgaattttgcagcggctcccggccgaatccacccgctgcggccaccaggtggcgcgcggccaccggtcactaggcccgccggggtgtccgtcttcggcgaccccatcgggaaaggatttcgctgctgccgccaagggtctaaggcctacctggcccacttgaagacaaagaacgagaacgttggtgctttgcccacttctgctctgccggattatgctgcagcttcctcggtggccg

SEQ ID NO: 102490 - DNA, 180 bp, Homo sapiens
ctcaagcctccctttcactcttacgtctctagctcgcagtgatttttctcttctgagttcccgcagcacctatttccctgaatcacatggttagtacttgataactcactcattcaataattatttaatgcctgctatgggccacaccttgtgctagccacctgagatggtcttcctgaa

SEQ ID NO: 102491 - DNA, 193 bp, Homo sapiens
gctctgtggccctgggcaggctgaggacttctccagctagcctcggtttcctcacctggagaactggggtgatggcgtcgaattgccgtgtggattaaaggaggatgctgaggacctagagttgtgcctgccacagagaaggtctccacgtgggctacctttggcatcgccatgacacagatggagaaactga

SEQ ID NO: 102492 - DNA, 388 bp, Homo sapiens
ttttcccattgaactacacagccattctgcagccattggatcagggtacagttggcacagtgacagctcacttctgaaagcagttggaacaactctttctaaatgtagagcatgaagagaaaaatggagaaaagcaacatgagtaagccattgacatgattgcagagacttggtgatctataaagttatctgtaatcatgaaatgttagcaaaacacaggcatgattcctgtggaatcccctgaggtcctcctgtaagaagactgcaactaaatgtggtatttgaaccaatctagcactcaactgctgctgtcattgatgtctcaaaccagtttaattttgaagactgtgtggctacagatagcaatttaactatttcccaagttacc

SEQ ID NO: 102493 - DNA, 427 bp, Homo sapiens
tgagacaaacctgagtttcaatctcaattgtttgtttgtggcttgcctctcagcatcttaaattctctgaatcttaagttcctccactgtgtaaaagaaataatatccctctgacctcactgtggttaggcaagagacaatgcagtgattttttcagtaatattatgagacattttattactataattaaatgattgtattttccccagattgacaaattcaaattttctattttgaaatcttattgcaaatgttaaaaaaacaaacaacccaccctttggctcctgttatgttgtcttccagctgctagtaatggaattgggacagctaatgttccctgagagccatggggaaccaggcagtgtgcttttcaggaactgtcttactttatcctcacaacaatcccaaaaggaaaaacctagtttta

SEQ ID NO: 102494 - DNA, 120 bp, Homo sapiens
catgaggataagaaaagaaagcaaagccctgagctgcagcattgtccaggcctgcccgtgtgagtcctcctgcctgcggtgtgagtgatcccgcctgcggtgtgagtgctcccgcctgcg

SEQ ID NO: 102495 - DNA, 491 bp, Homo sapiens
ggagaatcagagctttctctggctgcttttggccggctggaggggtggaggaaccttcaggtaatgttatttaccatcaataggaaaaaggattactccaggcttctttccttacaacaatatgctaatcaaccccttgggcccacaagggtctgggaagccaggcagctgcctctgtcgcatctctaggagcatggccactgatttaatgagggggagggcagggctccgctgggctcctgggagtgggatcagacaatgactgggggtgggtggccgtcagggcagcgtggaagaagcgggtctgaccagggcgcctgcgtggagaggaatggcagcagccagggctccccaccacccccagtgctgctgcagggtcaggtgagagcagctgctcatgttctatttattagagagacagagtcccctgaagaagggtggaaatgtaaatattttaaaaaatgaatccgaggcttgagtcaagggcataa

SEQ ID NO: 102496 - DNA, 310 bp, Homo sapiens
cccccaaagtgctgggattccaggtgtgagccactgcacctagctgctttatctttttaaatgtgttgtttcttaggaaattagttattgtgttatagattcttacctaaggagaacacgtatgattatcatcagcattttacagcccagttgggttcttcttgcctgctgcacagaaaaagccagtaccctgagacagcagaatttgcagcagagaaagagtttaataatcgcaaggctgattgaggtggacaagatacctttcaaatccacctcccaaagaatttggagactaggtttttaaagatgg

SEQ ID NO: 102497 - DNA, 185 bp, Homo sapiens
taagggactgttgcaaaaagaagacagacttgatgggtttttcaacttatgaggaatttttccaactcacaaaagtaaactgaagcctctttcttggcaaggcaagctactcagtttgaagaaagacctcataatgcattatctagactataaaagcaaaatactgagagtcttccctagagata

SEQ ID NO: 102498 - DNA, 771 bp, Homo sapiens
atcaattccctacaaacgttgccatttcatccaaatggaaaggcaagcattaggactatgagtcaaacactctaccctaatatctaatgacatataaatttgagagttaacatttactttaattgctgaagcagtcatgctaagtgcatcatctgacatattaccaggtgttaaaaagggtaatttctgaggggaaaaaagtctctaaaaccaagagacagtattccactaaaagcgttgttcatctcttttaaaaaatcttcagttaaatagattgcctcagtagtttgggaaatggtccctgacatggaaacatatttctgtaatctttgaagggaaggggagtgctggttattctctgtgtttcctcccaacacatagccattctctatccatctctcctgaccccatgagctgcatctgtcaggttcctttgccccctggtttccacctgggttttgctaatggaaggcatcagctgcaagagatcaaagggcagagggagagagagcaggcagagggagagccagcgagcagtcctcaccgttcccttttcaccttgggatgcagctggttctggcaggcagcccctcctctcagctcttgctaactgctcctaacactggtttctcccctaagacctacagacaaggggagaaaacagttccctactgttattatgctctggtgtcttcctcacttgttgatccctcaacttacctactccctttgttaaaacctcttcaattgaatcatttcagtggaattcca

SEQ ID NO: 102499 - DNA, 548 bp, Homo sapiens
aaggaaggaaagaaggaaggaaagaagtaagggagagagagagatgctgtagtgtgttagccacattgttataagcagactgcacttacagtcacacacacagaaacacacacacacacccaatgccacacagacacacagacatcaaacacacagatattcaacactcacaacactcccacagaaacacacagtccaggagctcctgaggctgtgtggttctacaagaagccccacctggagagagccaccctggtgaacacagggggcctgtacttaaaaatcacagtggggcaagtttcaagaggactcacccctacaatgtctaggcaggctggaggaatcctgtagatccttttggatccttagggattttgtggtttattcctggagctgtatttgatgtttcttcaggctggctcacatatgccctctcctaagatcatgggactatctatggatcccacagagaagacagttgagagttcaccactgagacacctccacagaattctcctttgccgagacaaagggacttattgctagat

SEQ ID NO: 102500 - DNA, 729 bp, Homo sapiens
tcaaacttgtgagctcttggcctcccaacatgctgggattataggtgtgagccaccatgcttggccggttctctttaactattcactatttctatcttactttaaaagcaaccaaccaccaacaactaaagtctgtgccttatttggatttccttagtttttacctattgtcctttttctgttccaggagtccgtctaggatatcacattacatttagtcttcagactttacttggccatgaccatttctcagacttcccttgttttcgatgaccttgacagttgtaaggaatactggtcagggatgttgtaggaggtcccaccattgggatttgtctgatgtgtctcctgtggtcaggctggggtagtgtgtctctgggaagaaggtctcggaggcagtgtgccattctcatcacagcccggggacatactgtccgtgtaacttaccacagttgatgctgaccttgaccacctggctgaggttgtgttcatcaggtttctttctccgtggtaaagttgcttttttctcccctttccgtactgtcctcggaagaaagtcattgaaggggcagggagttcttcactgcataagggtggggcatctacataaattactttggaacttctgcacaggggatggtttgcatatcctgtttagttattccatcatttatatcagtatgcattcatggatatttatttaatattttgggttgtaacacaacacta

SEQ ID NO: 102501 - DNA, 403 bp, Homo sapiens
tggagtgtgaataagtgtcatgtactgtgcgtacatcatttatatatcaacatttctgcgtcgggggctttgatggcaccatgaatggtcaggtggtgtaatcttcagctgtgtgtttatctgtgtaaatgtatgatgtgtttggcagaaagaaagacagaccaagttggagacagtctttaatcagaaaggggagacagactgctgctctcagttcccagtctccaggccttaatccttcctatttagagacccccaactctgttccagagttctcctcagccctgggcttcctcacatgctgggtggggaatgggaattcaaacagaaactcaagttgggccaggaaacccaagttggatgaaaacagtagggagagaggagtgggatggaagggggaagc

SEQ ID NO: 102502 - DNA, 463 bp, Homo sapiens
caactgtaatcaccccaagcttcctgccaattaaatatttcttagaaaacatacatgttgaaatctggcaggttcatttcaggagtattaaaatttgtgaaatgttcaagactatgatcacacactaaaagaaaggaaaaatcaaaagttggggtaaaaataaacttgtgtatacacatatatacatattttggagacactcatgctctgtcacccaagctggagtgcagtggcatgacctcgacttactgcaacctccacgcctccctggttccaatgattctcctgcctcagcctccagagtagctaggattacaggcgcgcacgacaccacacccggctaatttttgtatttttagcacagatggggtttcaccatgttggccaggctggtcttgaactcctgaccttgtgatctgcccacctcggcctctcaaagtgctgggattacaggcgtgagcta

SEQ ID NO: 102503 - DNA, 619 bp, Homo sapiens
gacacagcccctgtccctgagggtttagataaaaaggaaagatcctgtaggaatgcctagtgcaaagaatggcgctgtgtttggggaaaatcaagctgttcagctgagctggggcacagggtgtggtgagggagggggctccctctttcagtcatgaaatgcaccctttccacaacttgggaaagaatccttcctggaaacttcatatgaaccctctcaaagtacttattgatgtagacatttggaacacgctgtaggtcctgggtgtctgtaaaatagcatcatccagccgatcatctctccccacattgctgaactgaggacatgtgaactggtatctctcggtggttcagaacaggggccagcaacctacggccctagggccaccacctgtgtagtaaagaaagttttttttttggaacacagtcttggccattcatttaaatattatctatgatcactctcatgctacaatgtcagaggcattataaagaccacgtagcccaaaaacctgtctgggtctgtaagaaaaagctgccaacccctggtctaggcgctctgcttacctgaaatacaaaccaataatgagtttctgacacaccaagttcaattccctccc

SEQ ID NO: 102504 - DNA, 481 bp, Homo sapiens
ctggtctcaaactactgaactcaagcaagtagcccaccttggcctcccaaagtgctgggattacaggcatgagtcgtcaggtccagccatacctccttttcttaatgggctctgaaggcaaaaaccagaggagtcccaggggttttgaaaaagacttatctggatatatgttctgaagtgggtgtttttaagaccgcattttatcatgaaagactagttcctctttggatctcaaataatcacctcaaagagccctctgatcactctatcccccaacccctcctttttctctcacagtaccttttaaaattatgttcactctgccctcatcttgttaacatttttacttgtttctcatctaccaccaccctcactagtctgtaaactccatgagaacagggatcttgtcgtttatgagtccagagcctagaactgtgtctggtatgctatagtcaataaatatttgttgaataacaacttt

SEQ ID NO: 102505 - DNA, 157 bp, Homo sapiens
aatttgctcaacaggaaagaatgagctccattgcgcggactggtacattgaagcctgagatggaaagctacttgctcaaagtcccacagcaaatccgatgcaaagctgggtaaaaataagtctccttacatgcgtgtgtgcattccttcattcacga

SEQ ID NO: 102506 - DNA, 630 bp, Homo sapiens
ggcacgatctcggctcactgcaacctctgcctcccactttcaagcaattctctgcgtcagcctcccaagtagctaggattacaggcgcctgccaccacgcccggctaatttttgtatttttagtagagatggggtttcaccatgttggccaggcttgtctcaaactcctgacctcgggtgatccgcccgcctcggcctcccaaagtgctgggattacagatgtgagccactgcgcccagtggcactggtgcttttcatgtctgcagtttcaaccccttacccccaaccccaaggtcatgtgtaatcctggtatgaataaatgtaaatggtgcttgctggccttaggtgtgtgagagtcagaagcatccatttcaccactcaggcctaaggttctctatgtctcactacccaccctgcaccccagacctcacacagcaacactcatgagagccaccaaaattgtaacgaaaatataatgatgacaatgaggacaagtctttcctataactgagaaagttctgtgctaaacatgttacctatggaaattatttcagtgcattctctggatttcactgagaagtagctaccattattattcttatctccatcttatggaacaggaaatggtga

SEQ ID NO: 102507 - DNA, 674 bp, Homo sapiens
taaataaataaataaataaattctctattttgatgtcatttacaactgtagattcgatatcataaaaatttaatatccatagttatttgaaaatatgacttgaataatttttcattcagttctattaaatgatgtctgtcttgatatttttattgtattatgctttattaaaagagcagatatttacaaatttaaatagtgccaatacagtagtatatttgttcatttaattaacagtattttaatgtgtattatattctccatatttagtcttgaaaaccctttaggaaaaactatataaacaggtgttcaatcttggtattttaatgttaccaaaattgacaacatatttttccatatatttaaaatattggttcttgcttctctgataacttagtcttcgaattggcttgacttcatagacttcattgtcatttgggtttgtgatgcttcagaaatatggaaccttgcaaagtgaatgttagtattttggtaattagacacaatgatgcttacttactatgtgccagacacttttctacaggctatttatatatattttttcattaatcttattaacatatctataatatacattaatgtttacaacttaaacagtttattacatgttcttcctttgacaagccaaaattaatacgatttggaagttatat

SEQ ID NO: 102508 - DNA, 174 bp, Homo sapiens
  misc_feature (84)..(84): n is a, c, g, or t
ggaaaacaatttcacttttaattaacttagtgtaatttaggattaactcttttattgtgaaggaattatctgcctcagaacttnggcttattagaacttggcttattaccttcatgggttttgtactcggcacatgtgatttctaaaactacagaatgaatgattccctgtgat

SEQ ID NO: 102509 - DNA, 242 bp, Homo sapiens
cttcacctcactaataattaaagaataattaacacgtaaaaacagctctgatacgccatatcatgtaacaagaataaccttagtttaacaaatttttttttgtttgtttgtttgagacggagtctcgctctgtcgctcaggctggagtgcagtggcatgatctcggcttgctgcaagctccgcctcccaggagaattgcttgaacctgtgaggaagaggttgcagtgagcttagatcgtgcc

SEQ ID NO: 102510 - DNA, 423 bp, Homo sapiens
tacttgaggagatctcttacgggcaatttttatccagccttaccctaaagtgttttctctggaggtgccatccaaggaaaggacagagagccacttccagacccaaacttcagggaaaaagagtcagctcttatccagagtttctgaaagatgagaaaacaaaatctctctttttttgagatagggcctttctctgtcacccagactggagtgcagtggtatgagcacagctcactgtagcctcaacctcctgggctcaagagatggtcctgcctcagcctcccgagtagctggaaccagaggcatgcatcactgtactcagctgatttttttatttttttgtagagacaaggcctcagcatgttgcccaagctggtcttgaacttctgggctcaagcaatcctcctgcttcagcctcccaaa

SEQ ID NO: 102511 - DNA, 812 bp, Homo sapiens
aggaaagtgcacagcagatttgaggaattcagggtgaattttgttggccagtggctacaggggctgattgggagcggggttgggccaggtgaaatggattagtttatccaaatctcccagctgtcctcatggtttagccacaccaccacctttaaccctagaactaagacaaggggagaagtgcgggtgagaagtgagtaaggcgaaggttgcttccaagcaccccctcacccaccgtttgtgcccctcccaaccctatggactggtacttcttccctggctgagggcgggctggtattaatggttcctgtgttccatgcctgggggaggcaaggaagggctggagatgggtctcggggcacatctgcacaggacagaggtctcccacggtagccccggtctaggcttaagccccagagcactcacagttccttccccagctcctgtccactgagtaggttcagcctttgttgctagaagtggaaacttttctccttggttgattttctttcaagacccagtcagaggatgggaacctgactgctgtgaggtctctcactttatcaccacatggagggagtggaattgggttacattcaggttgccagaaccttctttctggctggaaagaaggtttcccaacattctaaacccagattgctcggtaatagttaacaatagccaagctggtagtatacgtctccaagggctttccctgtagtgatccatttagccttcatagtagccctacaaaataggtatttctattttttatttttattttttagacggagtctcgctctgtctcccag

SEQ ID NO: 102512 - DNA, 551 bp, Homo sapiens
gtgtgatctaaggatcccgcgggagccttaacctaaatcatctctctcaagttcaaagttccacaaatctttagagcaggggcacaatgcctgccagtctctttgctaaagtatagcaagagtgacctttactccagttcctaataagttcctctgtctgagaccacctcagcctggatttcaccgttcatgtcattttcagcatctgggtcacacaccttttgaggatcagatgaaagctgtaattctctcaccaggaaaaagattcacaaacacaatttccctcagttttacagggttcagagacccctgaagcccttctatgtatcgattctccataagcccccagggaccctccgagttaagaatgcctgaattcattggcgattacctgatctctgacctctggcccttatattatttttcttaaataaggcctctgccctcatcaacagggttacaggtctaatctcgagttgacagggtctgtttcattttttttgagacggaatctcgctctgtctcacccaggctggagtgcagtggcccga

SEQ ID NO: 102513 - DNA, 205 bp, Homo sapiens
ttctttttatgctggcaagttttgattgggtgccaaacactgtgaattttatcttgttgagtgctggatatttttattatttatatttattttatattattcctattttatattattcctataaaaatccttaaactttgctttgggatagaattaaagtactgtaaacagtttgagtccttcaggtcttgcttttaagctttgt

SEQ ID NO: 102514 - DNA, 677 bp, Homo sapiens
agaggaaccgacttacagagtgggctgctgtgcatcctatggcacagggtccccaacctttttggcaccaggggccggtttcatggacgacaatttttccagcaggtttgtgggggtagggtgatggtgtcaggatgaaactgttctacctgagatcatcaggcattagattctcataaggagcacacaacttagatcccttgcttgtgcagctcacgatagggttccgctcctttgagaatctaatgccaccactgatttgccaggagttggagctcaggcggtaatgctctctcacccactggacgctcgcctcctgctgtgcggcccggttcctaacagaccttggactggttttggtctgtggtccgcggcccagggtttggggacccctgctctggcagacaggagagaaagggatgttctacctaggtgtgtccaccaggagtgggtcaggatgtggagtttattgagggtttaaggaatttggctccaggccagggctggtttcttccagtgtcttggggagtatcataaaaacctttatcggtgtctgggagttttgaagcatgcagaggaaaacatgcacctagctgggtcagagtggtcaaaggcactcctgtcctagaggaagaagtgggggaggttgggggccctacagtagctgatatgatgcc

SEQ ID NO: 102515 - DNA, 388 bp, Homo sapiens
tgccctcaacttaaagccctggcaactgtagcacaggtttgtttgcaaagactttatattagaagatccccaagaaaacatcaaactcaaaggcccatatgagaatggaattcttgattggcataaaccaactaatccaatcaagtacaaaaagctatagtaatgttgggcacaaatctttattaataaaatttacagagagctgaaatgctctgataacaagtcattctggataatatatatcttatgctttttatactctaaaacatattattttagtcttctggattaaaataactctaaacgtattatgtaaatttttttgccactgacagagtttacagaatataattcccaggtcatcatgatggtggccaattaacatact

SEQ ID NO: 102516 - DNA, 824 bp, Homo sapiens
atcactgcctgttctgtgtccttaacatgcatctgttatcaggacatctctgcttacttctgtttctccttactagacttacctgctggaggatgagaacttgctctcctattcatttttatatccccaatttttaatatagtgtcttagacactggggcgtttcctccttgtcatacttataatcctcatcataattagcattttattgagctcttattaatgagatgggtactgttctaagtactttatttgggttttctcatttagtcctccaataaacctatgagtaagatctctaatgaatcttgtgagtttactggtttttaaataaaaaatggcaatgagagcagagagaagctaggtaatctgtataggttgcacatttcccgagtggtagagctgggatcccagcagtctaactgcagcatctatgcttgtaaacctttctctaaattacattgaaaagttaacaactactcacaagttaaataatagttgtctgtgtattcatgttattgtactcctttttatatatttcttccatgttttgtattaaaaaaattttaaatccacagaagagttgaagcaataggaacagtaaatacccatatatccttattgttaacgttttacacatttttttttctctcttccttcccgcctcacccttctctctttctccctcaaccatttttaagtaacttacagacctaatgacacttcgtgcctaaacacttcagcattcatctccagagagcaaggacatttacttacaaaccacagtatcatttcacacttaaaaaatttagtattgatataata

SEQ ID NO: 102517 - DNA, 452 bp, Homo sapiens
tcttaagaccaaaacatcttttcactgtccatgtagctggttggaattaccaaaagacctataaaatcacagaatttagagcctagtgagatccttaaagatgatcccctcatttcaaagattaggaaatcaagggattaaaacaagtagttaatgtttattcagtgcttgcccatgtgccagtgctcagtacattatgcctattatttaatctttgccctgtccttctgagagttggtctatttctatccttattttataaatgaggaaactgaggcttagagaaattaacttgcccataattaagtggtggaactgatatttgaacccaggtctgtctgactccacatcatgtaatggaatgcagtaagtttttaactgacctgctcaatgttacattgcttattattagtgggagagggattaacagcctgatgtcttgactgaaaatt

SEQ ID NO: 102518 - DNA, 539 bp, Homo sapiens
gttatcccagtgaagagtgtggagagggcactccaggtagagggacacatgaggaaaggcattcagatgtaaatgtctgtgacatggttggggatgactaacagttcagtgcagctaaactgcaggctgctaggggctagactgtgaagggactcctttagccatgttcaggagtttggactttattctgtaatctagataatgggagccttcagaggtttttttaagccggattgatcacatgtccggaattggaagggtaaaactgcaagtggggagaccatttgagacactttcataattgtctgagcaggaggggatgagggcctgttctaagccaatgaaaagatactgggggagagtgaagtagaagtagaaatagagaagtaagggaggtgatctgatttgggaaataaatataatgacttgatttttagatcgattatagtgaagctattaagctctcaggctgtggaatcaggaagaatcttgactacgtgacaccccagttatgtgaccttagacattatttaacatct

SEQ ID NO: 102519 - DNA, 143 bp, Homo sapiens
ctcctattctttgatgcatccttttcttatcattccaccagctctaaaactgaactctgcatctccttaaccacacaccagtatttcctcctgacatctatatttttcaaaagtttgctcctttacactcttttcttcttccc

SEQ ID NO: 102520 - DNA, 408 bp, Homo sapiens
cgttgcccggaagtctgatgcgtgaggcgggaaggttaaaacttgttggctttggaggtttactgataggtcgttctgagtaggacaaatgttttcctttccgtgctttaaaagtctcatcttagaccgggcacagtgactcatgcctgtaatctcagcctcctgagtagctgggattacaggtatgagccaccgtgctcggccttcattattatttttaggacaaaagtgaaggtggaaagttcggaccagtgggctgtatgtttcagaactttacacataggaagaggaagtattgtgtatggaagaaagtgagtgttgcattattcagggttctcagagaagcagaaccatatggaagaggaggtctgttaggggaattggttcgtgagattatggaggtccaga

SEQ ID NO: 102521 - DNA, 192 bp, Homo sapiens
tgtgttcactggagggagggagcgtgtgcgttgtgttcactggagggagggaccgtgcgccgtgtgttcactggagtagtgcccatgctcacctgaggcgttcttccgttacctgtcaaacgtccctagaaggtcatagaacggttacacgccgccattttgcctctcagtgcacacgcttgagccaactcg

SEQ ID NO: 102522 - DNA, 365 bp, Homo sapiens
aaaccaggctccctcctgacctcctagccagcctagtccagcttgccccaccttcacgtttccctggctcgcggctgctgggcatgaggctttgtgtctcccttcccgcctcaccaacgttctcacttcattccttcctgcgtcctggccctgcccttctccaaacgctcccaagcgttcaacctctgaggtttgcacctgctgtctctgctggctgaaacggccattccctgcctggcgaactcctgttcagcctccctggcccagctcaaacactcactgtggggaagcctgccctcatccccgaagctagtttcccagcatccacttctccattttgtcccccacctcctgccacggcccta

SEQ ID NO: 102523 - DNA, 194 bp, Homo sapiens
catctccaaaaaaaaaaataggcagtttcagagcttataaccatgataaggaacaggggctccccacggcatatcatttcttatatgaaagaaggccctaatagtaggaagtatcttagtgctgtcagaaaactatctgaattcacaagtgtcattaaatgttcccggccagaagggtttcttcattggaaagt

SEQ ID NO: 102524 - DNA, 307 bp, Homo sapiens
gacaatctggagaccctggaggttagtttttgacaagttaagtttggaaaacctgttagacattcaaacagagatgtcatgtaggcagttgaatgcacaagtttggatttcaggagattgttcagggctaaatgtatatttgtggttgtcctcagcatatatatggtattaaaatatcctgaagctggatgaggccacccaggggtacagtaaagacagagaactaagagattcagaactgagctctgagaaatccggtatttaggtattggacgatgagaattcagcgaaataaaaatattaggga

SEQ ID NO: 102525 - DNA, 708 bp, Homo sapiens
ggttgaactttgcagccccttccgtctccgggcagcttctctcagtggcagctgtgttccccatggtttgtcctggatgtctcccttgtgccatccttgcaagcccgcgccagcgcctccacccacgctccggccttgctcccactcccaccgctctgccacctcccacctcagcctcccaccttggtgtggagggaccagcgtcgaagacaaaggaatctctgacgagaaccggccagtccgggagggacggcggggaagggggtgctgctctggcggagccctcacttcactcgcttcccctcgagcgcccctctaggctggggcccggccgctctgggcctgctcctcctcccgctcctgttgcggggcaccaggtcagaccctacagggggctccgcagggggagggggagaggggctcccttcaaactcggcccggccgcgggggtcccgggtgccctctgctgggctccttccacgtccttgtccctcctgaactcccgttcaagccctgccccggccccgaagtaggaaacggattcgtttttgccccgcccggggttccggcggcccgcccgcttcagcttcagcaacgtcaaggccacgttccctccgctccagctcgaaagacggtggcgctgactctgctctgcgcgccgcagcttcctcccgctgctccgcccagcggtttctgatcccctttcgg

SEQ ID NO: 102526 - DNA, 347 bp, Homo sapiens
gaataacctccccacaacgtaacaacaggtactttttttttgggtggggggaggagggacaaagtctcactttgtctcccaggctggaatgcaatggtgcagtctcggctcactgcaacctcaacctctgagattcaagtggttctctcacctcagcctccctacaggtgcataccatcatacccagctaatttttgtatttttttgtagagacaggatctcaccatgttgcccatgctggcagagccttatctccctttgtttaggctggaaatgtcaaatattcactttcccagcttccttggtaactaggacatgggaatatgtcccatttctccaaaagtctt

SEQ ID NO: 102527 - DNA, 277 bp, Homo sapiens
ctctagtgatcccccttgcgccagggtctcatctccattgcccaggttggtctcaaattcctgaactcaagccaacctgctgcctcagcctccgaaagtgctaggaccacaggcatacaccaccacacccaactaatttttttaaaatttttttgtaaaaaccaggtctcattatgttgctcagacttagaatgagtgaatgagtgcttctattttttcctgatacatggcttaagtgtatagctcaatgaattatttgtcccctattcagtcagta

SEQ ID NO: 102528 - DNA, 476 bp, Homo sapiens
aattaattttttttttttttagagacaagttctacattgcccaggcaggtcttgaactcttgggctcaagtgatcttcctaccttagtaggaaagtgctagtattacagatgtgagccattacactggcaattcttgagaggtggttgtaagaaatacaaccaagactggggagaaatgtcaatttaatcaagctggcaatagaatttagggttacaaacagggctgaatcccaagacatattttcctgtatgcctcctaaggtggtgagaagtaattccaaatggatttctcaagatgttctgaacagcagcagcatcagaggaaaaacaggtttcaaggtgactgctttgaaggatatattcctttgaatttattatttatgaacaattaaaaaccaacttctggtcagttgtggtagctcacacctgtaatcccagcactatgggagataaaagtgggaagatcacttgaggc

SEQ ID NO: 102529 - DNA, 423 bp, Homo sapiens
aattaattttttttttttttagagacaagttctacattgcccaggcaggtcttgaactcttgggctcaagtgatcttcctaccttagtaggaaagtgctagtattacagatgtgagccattacactggcaattcttgagaggtggttgtaagaaatacaaccaagactggggagaaatgtcaatttaatcaagctggcaatagaatttagggttacaaacagggctgaatcccaagacatattttcctgtatgcctcctaaggtggtgagaagtaattccaaatggatttctcaagatgttctgaacagcagcagcatcagaggaaaaacaggtttcaaggtgactgctttgaaggatatattcctttgccagcttgattaaattgacatttctccccagtgtcttggggacagagctcgatt

SEQ ID NO: 102530 - DNA, 596 bp, Homo sapiens
gtttccactcaatgcagttgtctcagctacccacaatatattaccgctaggatttctttagctttaggaattgtcgataggcaattcttctgatctgcccataagaacatttttaaggggtcaaaggtgagcccatctcatggcaatacgataaccatgtaaattaggttcactgctagttttcagaaaagccattagtactttctacacaagtggatattaaaaatatctacaagaatattttattataaaataataaaaagtactaatgggacttctatatctatagattattggtaatctttgagcaatatcattgacaaattaattttcagtagcaaaactgaataaaactaagctcttttagctattctccaaaactcttatgacaaaaggattccaccatattgtacgctttagcatttgtaactcgtcaagaattgtttttatttctcaagtgtactacttgtatatagacacatatatgaccttattttatcacacatccaccttaaaaatacatagcaagtaaaagtagctcttaaagaaagtagctcttaaaagtagctctttagaaagcaacattgggtgcagga

SEQ ID NO: 102531 - DNA, 467 bp, Homo sapiens
tgcagtagggagatacagggaactgggcctgacttaggcttgagaaagttaaagtgagctatggtggtaggatagaagagcctattttaggattagccagccctacaaaagatccaggagccacatctatatatatttctgtggcctatgaaaaacagagtgcttgctgggcacagtggtgcatgccagtagtcccagctcctcagggggctgcagtaggaggatcgcttgaacccaggagttctgggctctagtgcactatgcccattgggtattcatactaagttcggcatcaatatggtgatctcctgggagcaggggatctctagattgcctaaggagaggtaaatggcccgggtgagaaatggagcaggtcaaaactctgtgctgactaatagtgagatagcacctgagaatacccactgcactccaacctggccaacacagaaagacactgtgtctttata

SEQ ID NO: 102532 - DNA, 184 bp, Homo sapiens
atgattgatgatgacggtcatcatcaatcatcatcatcatcatcatcatcatcattatcaccatacttagttttggcataactcctggtccatttggtcctccaagtttatttagccttcaactacgccttgctctaagattgctctaccagtctctcttctgagttttgagctgattagcaat

SEQ ID NO: 102533 - DNA, 483 bp, Homo sapiens
aagtcaaagtaatatcaaatcctaaattcagttgatctgggccgagcatggtggctcatgcctgtaatcccaccactttgggtggccgaggggggcagattacttgggctcaggagtcggagaccagcctgggcaacatggcgagatcctgtctctgcaaaatatacaaaaattagctgggtgtggtgtcagatgcctgtagtcccagctacttgtgaggctgaggtgggaggatcgtttgagcctgcaaggtggaggttgcagtgagctcagatggtgccactgcactccagcctgggtgacagagtcagaccctatctcaaaaaaataaaaaataaataaaaaatcagttgaactatatggaaacttctgtacctgtgtcaacggtgcatcttatctaatactatatgatactgtaatctaatattatctctgataattcaaaaatgctaataaactctgctcaaatgtgaaaaattttca

SEQ ID NO: 102534 - DNA, 271 bp, Homo sapiens
ctgagatgtgctgaagaggcagggaattgcttcctgccccacgacacagagaaacgtgtgtctgctcaatgcctcattcaaggagacgagtggctttctgtgaggagagaaattatcccccttcccatctttcctgatcatcataacccccactttacaaaatgagaatacagagacacagagaaggtaagtaacttgcccaaggtcacacagttagtaagtggcagagccaggatttaaaccaagactccagcatcgagcccctaaccac

SEQ ID NO: 102535 - DNA, 313 bp, Homo sapiens
gttagaattacaagcatcaatatgcataaaatgcttagagatggacctgatatatagcaaacactcagtaaatgttaactattattatcacagcacagcaatttatttaagattactgagtgttcaaatgaaaaaaaagacatattaacttatatagtgccatttctgacataagaaatacacaaatagaggtagtttctgaaacaaagaccaaaaaaatctattgtatggtgtcttgtatcaatgtggctaaaattttcgagctaagttttataaagacagatcatatttcaagtaggtgatttttgtattg

SEQ ID NO: 102536 - DNA, 826 bp, Homo sapiens
cccgattacaagttcaacaggctttgctacttgcattgcttggcaagtgcatttggcacgtttcccaggtataattgataatcactatcctcatgtaaaattatttcagttccttaaactcacgtcttggattttacgtaacattactagaaacaccccattacctgaagctgtcactgttttcactgatgcttcctctaatggccgagcagcatatacaggacccagagaacgtgttcttaacacaggggctatttcagcacaacgagctgaactgcctgctgttatggctgtccttgaagattttcctgagccagttaacattttctctgactcagcgtatgtcgtacatgttgctcgcaacattgaaactgccttaatcaaatttctgcctgatgataacctattccttctttttcaaaagtttcagtctgtgctcagagcaaggtcttctcctttctacagtactcacattcgggcccacacacccctccccggacccctctcggcagcaaatgccagagctgatacattagttactcccgtttttacagatgcagaaaattttcatgctttaactcacgtcaatgctgcgggactccgaaacaagttcccccttacatggaagcaagctaaaactactgtgcgtcactgtcctacttgtcaagtgttaattttaccaccactgtcttcaggagttaaccctagaggactttcacagaatgctctttggcaaatggatgtgactcattatcctccttttggcaagctttcttttatacatgtaactattgataccttttctcattttatttgggccacttgt

SEQ ID NO: 102537 - DNA, 364 bp, Homo sapiens
gagccacctttatgttagtgcatgccatgagaatacctacagtgcatgccatgggaatctaatggtgattcgttccacttctaagagttgactaaaggccaggtttatcagatgtgcagtttatatttggactacagatattagtgactgggaaaagagctttcatgttaacttctttgtaatgtagcatcatcctgcaacttcagattttacaggttagattatgatttcagttttcatagaatagttgttggcctttaggttggctagagtcggaaagaactaaaatgaatcattttgtccttgtgtgcttagtatagttgatagtgttcttcctaattcttgtttttatagtatcataagc

SEQ ID NO: 102538 - DNA, 327 bp, Homo sapiens
aaacagagtctctcagttcattgcctgggaagtcctaaccgttcttcgatagaattgtttgtcgtggccaggcatggtggctcaacgcctgtaatccatgcactttgggaggccgaggtgggcggatcacgacgtcaggagttcaagaccagcctggtcaatatagtgagagacaccatctctactaaaaacacaaaaattagccaggcatggtggggtgcacctgtaatcccagctacttgggaggctgaggcaggagaattgcttgaacccaggaggcggaggttgcagtgagtagagatcgtgccactgcactccagcctgggt

SEQ ID NO: 102539 - DNA, 348 bp, Homo sapiens
tttagttgctggcgggtccttctccctggaggaaggaagctgttattcttgacgataccagcctgggcttgggccagggcgccccaaagaaagaggtgatctgcagaactccagcataacagggaggagggcctgctgggctgtggcatgggcaccataacagggaggagggcctgctggggccatggcatgggcaccattgtgggcttggattctggccagggcagggaggaccgtccactggggagagacaccagcccctgcctccactctgtctggggacacaacccatccatggcctgacctgcttacctactatgtgccagctaccctgggaagcctctggtc

SEQ ID NO: 102540 - DNA, 549 bp, Homo sapiens
ccaggtccaatccatacttcttcctccacgattggagcagagggtgatttttttttatgagcaacggatgaagtcatttagagaccatttgcagtaggagccctgtgtactagagaccaatcaatgtgccctcgtggctccatttctgcctctctccctctttgttcttgccaagtacccacagctcattttccatagattaaaagagcccaagttgggcctatacctagaagtacaattgctgggtcatttggtaactccatgtagaattgtttgggaagttgttaaactgtttctcacagtggctacacaattttaactcctaccagcagtgtatgaaagttctagtttctctgcatcctcaccaacacttgttattttccgtattttttttttttgagacaaagtcttgctctgtcgcccaggctggagtgcagtggcacaatctcagctcactgcaacctctgcctcccagattcaagttactctcctgcctcagcctccagagtagctggtattatagtcacctgccaacatgcctggctaatt

SEQ ID NO: 102541 - DNA, 772 bp, Homo sapiens
ggtcttgcccactcccaccccaccagccaaggccaaggccatctcctctggcccaactaagtctcctaacctggaaccccacctccttcccccagtccaggaggagccctcctcccaatcccaggacttcccaggtgggctctctgtgtgggggcttagcaagctgagggctttccctgctcagatcagatcatcagggagcctgaccaacccaccccagccttgagtgccacccaaaggtctggcctgtgggatctgagatgccaggcagcccctcgccctgccagagcagcaccgtggaagaactcgtgagtcttttaagctaggcattgacctagctgcagcttccggaaggagacagcagagccccgcattagctcagtgacttgaggccaggaagccaggggtggggctaaccaaagcttgccaggccggggtgggagctacaggtgaaggaaagtgattctttccccgttaactttgtttcacgccagatacctggcagtgggcaaagcagagcctgggctgcagagcctgtgctccggagcctgggctccaaagccctgggttccgggctctgacttaactgccaaaaatacaaaaattagcccagcatggtggtgcattcctgtaatcgcagctactcaggaggctgaggcaggagaatcacttgaaccagggaggtggaggttgcaatgagccgacatcgcgccacagcactccagcctggcgacagaggaagactctgtctcaaaaaaaaaaaaaaaaaaaa

SEQ ID NO: 102542 - DNA, 141 bp, Homo sapiens
tgctgagattacaggcatgagccactgcatgcagccttatccaactttttattgtgaaattctttcaaacatacagcaaagttgaagattactttttctatttttgtttgtcacaagatcttaagataaggatgtgtttaa

SEQ ID NO: 102543 - DNA, 677 bp, Homo sapiens
taaggcttttaaaaaatatatatgaataagactataaggaaaaaaaaacagaatgctaaccctgggtgtgttagggtggtagatttaagggtatatttttctgagcttttctttttgctcagctttttgtggataatgtggttataatgctctcataataaaatatgattatttagaatggcaatataatttttttcattgctactatttggaagcaactgtatgaaacattttgtgtgagagcattgtgttgtttgaagcctattgaaaatatatttacccaaaaatacaggttttcattttacccaatctctacccttccccaatccctactagatttaaattctttgagaatttttccaaataaaaggaagattttgtccacttttaagatcctgaagttcttgagtataatctccctcctccctttttttaaaggactgaagagagaacaaaacaattcccctctgatcgtttctgtaagcacttttgaaacttacaataaggtactaattcagccagataattgaatgctctccaccccatactatatactatatatattctgcattgttgtatctagagcgctgaccactccgtttctcttgtgtatgctgagccttctccacctaggttccctgctccctgaacacaagggcagcccctctttttacagt

SEQ ID NO: 102544 - DNA, 275 bp, Homo sapiens
gactattattgactatgtaactaataaatgttattatggtacttttagattaaaagtctattccaaattgcattttgatttttcagatgttctaaattctagtgtgtaaatattataaaagtattgacattttgaagtgggtggagttccgtcgcctctctttggattagcttctaaaacttaatgaaatagaaagtaagtgtcttttcccactgaaaaaaaggttacattttattccttattgtacggagacccaaataaaatagacaaatcag

SEQ ID NO: 102545 - DNA, 355 bp, Homo sapiens
caacagccaaatgaacaacttcacctgagcccttacctccaaggaagtgccacaggggaacccaaaggcccttaatcattaaaaaaaactttagagatgctggctgagccatcagtgagaacatggatgcatacacagaacctacatcttgtcatctctgctcttcgaggaatggagctggagaggcagagaagcaatgaagccgaattctgagtagtatactctgatgaagaggatattttacaagcatagaaaaaggagggctccagtcttcaaagaaccagagcatgggtaccaaagcctcccagagctagttctggtcccagctcagccacttgtctgtttgggtgactat

SEQ ID NO: 102546 - DNA, 355 bp, Homo sapiens
gcttcccaggttcaagtgattctcctgcctcagcctcccaagtaactgggattacaggcacgtgccaccatgcccggccaacttttgtatttttagtggagacaggattttgccatgttggccaggctggtctcgaactcctgacctcaagtgatctgcctgccttggccttccaaagtgctgggattacaggtgtgagccactgctcctggcccttaactattttttttttttaaccttccacagtccttttattttggaataggctgtaaacaatcaaaccacgagaacatgattgtacaacagtaaaatgttctcctgtattaaactgaagatatctgtttaataaaaaaaa

SEQ ID NO: 102547 - DNA, 312 bp, Homo sapiens
acaatcttagcaagtgctatcctcattatacatgtgagaaaacctatccttaaatgttaatttgtccaaggttaagttaaacaagcttgaacggatttgtgacaatactcaaggttctaaacactacagaacctctgcccccacagggccatagattccactccttgaataaaacaaacattaaaaactctagataatcctacactaaaatagcacaaatcctgtccatctattaggaaccaattactcaagaaaaagctaaagggccacacacttcatgcaagcatcatatgtaaagggaattaaaagaat

SEQ ID NO: 102548 - DNA, 383 bp, Homo sapiens
gtggggtggggggagaggggacggatagcattaggagatatacctaatgtaaatgatgagttaatgggtgcagcacaccaacatggcacatgtatacatatgtaacaaacctgcacgttgtatacatgtaccctagaacttaaagtataataaaaagaaatattaaaaaaaataaaataaaataagagatctcaaagacaaagcttaaagtagattcgataaaatctcaaacattcacatttaacctcaggataactcatgtgtgagtagtaaacggaaggaaaacattttcacatgatataaaattttgctgttcctgtaaatgatagatagaagtaaactcatgtatgttgacagaaattgaacttgacacacacaaaaat

SEQ ID NO: 102549 - DNA, 281 bp, Homo sapiens
tccaatccagaaaactcaaaaccataagtaatgttaaacaaatcccctttttaataaattcctcaacttccaatttctaaataccaaatgtacttataaaataggctaattatttcctaacaggtcctaagatatcagttcgtcctatttaacttatcttagagttgaaagatgagagacaacatatgccaaagtgacaattttataatgaagtttttcttttctttttaagacggagtttcgctcttgttgcccaggctggagtgcaatggtgctatctc

SEQ ID NO: 102550 - DNA, 400 bp, Homo sapiens
aactactaaaaaatgctgagggaattatgccaaccaaaatttcaaatatagtgtaagacaactaatatagcactctattgatatggaaatcaattcatcagtaaaacagaatagaaagttcataaatacactaattactataaaaaataacacaggcacagtgactcacacttgtaatcccagtaatttaggaggctgaggcaagaggatggcttgaggccgggagtttgaaatcagcccagataacatagtgagacccctgtctttacaaaaaattcaaaaaattagctatgggtagtggtgcctgcctgcagttctagctgctcgagaggctaaggcgggaggatcgcttgagcccaggagtttgaggttgcagtaaactataatctcacaactgcac

SEQ ID NO: 102551 - DNA, 146 bp, Homo sapiens
gaagaggaaaatgaaactcagagctgcaggacttgcccaaggcctccaggcagctaatggccggggccagaatgggaaccaaggaccccggaaccccagagctcctgccctctctgtgcccacagatggaatctactcctctgcag

SEQ ID NO: 102552 - DNA, 387 bp, Homo sapiens
agctatactgctaatacactgacttaccttggacaggtttcttaccgtgtctttaaagcagggataataatacacaccttattgggttagtgtgcagatataaggagatgatccatgtaaagtcccaagtataatgccaggaagttagtaggtgattattaaaagttagtcattatttttgtgtctctcttattggtgctgatatcagaagtattataaaaggatattactatagttgatgttactgaaatcttctacaatgagggtgccaacatgtgttcctgagtccacttatcgtcatcaccattgctgccaaagcaattgttatggctttgttagcctccccatttaatttagcaaatactgaactccttaaaccaagcttta

SEQ ID NO: 102553 - DNA, 327 bp, Homo sapiens
agctcacaggagtcagatctgcaagcagggttaggtgggcctgtttttcatcccttccatcacccatgcctgaccccagagagtcttccatggaaagagagaaacagaggacatgcaagagccagggaaatgggaagcagatatggcaaaatattaaaaatgggtgaatctaggtgaagggcacatgggtgcttattgttctattcattcgatctgagatttgaaaactcttaaaataaaaagttaggaataaataataaactaccctgcaagtaaaacctgctcttatcacccacctctctgggttttcaattccctccctgtaac

SEQ ID NO: 102554 - DNA, 419 bp, Homo sapiens
acgtggacttagcagtgcacacagagctaatgggcactttctggggatgatctgccatgatgttatgtttcaaaagcacacattagagtaggtggttcttctgaaggtgaaatgcccttctctgataccagactcgtacttattctatatcgtgacatcagaacattttgaaagccactatttgtaaaataagctgcccctgtaataaaaagactgcttcatatgattgttttggtgtaagttagtactgatttattctccagaaacctgttggacctgagtattcacctgtaaggtgaaaccaaattgcaggtttggttcttgagggatccaggcagaggcacgccttacaggtgaactgggtgggtacgctgaccctgccaacgtcactgtgagggatttagctgcctccttagaga

SEQ ID NO: 102555 - DNA, 306 bp, Homo sapiens
cagaatctcagttcatggctaaggccaggttgtgatctaagactactaacatgtcctgatcggaagttatcggccccctgctttgttgcctgttctggctgtgagcttgcagggcagggccatgtttattacttgtgtacaccccaagggcatcgttctgtatgaacttgtagtcacttatacttgaaaaaatgttggcttgaaaaaagagccacgctttgtttttagaacactttttctcttaaaaaagataaaactatttttcattttttaatttaatttttttcttttgagataggatgttgc

SEQ ID NO: 102556 - DNA, 126 bp, Homo sapiens
gtaacactcggggggggtttcggtcccgccgccgccgccgccgccgccaccgccgccgccgccgccgccccgacccgcgcgccctcccgagggaggacgcggggccggggggcggagacgggggag

SEQ ID NO: 102557 - DNA, 349 bp, Homo sapiens
tgagacggagtcctgttctgtcacccaggctggagtgcagtggtgcgatctcagctcactgcaagctctgcctcctgggttcactaatttttttgtatttttagtagagacggggtttcactgtgttagccaggatggtctcgatttcctgacctcatgatccacccacatcggcctcccaaagggtgaattctttatttcaattcctaaataactttgtcctattttatagtcagaacaacgagaacaaatgtatggtgtgagcaaagagatgaggtgagggagtacattaaatagatgactattaaatacatagttcaatgataaagatagcagtatagtttcaaac

SEQ ID NO: 102558 - DNA, 521 bp, Homo sapiens
ctcttccctcagtcccaatatcactgggtcaaaataacaggaaacggaggtctcacctaagtctcctcctccaatagataggaaaaaggacagaggatatgctatagccatcagtgtgttagatatgagttctaaatttctctttaaagaatcagtatgtcagtatgttcaattctttgccttctacttgtaaacttaacttcctcataaagcaacctttttcgattacctgctccatcctgactcattccgatttcctgctctgccataaccatttttcccgccaaaccactcaccctgtcactctctttaaattagccagttggagttagtttggcctgtgtggtctaaccctagccaataggggaatgacacagcagcaggggccatgtgcatcagggataagaaccctttcccctcccttgtccaggtgtgcactcaaccattgctccatctgtaagggcgcacccttctgtagaagtacattgacttgctgagaattaaaaagaaaattttatatt

SEQ ID NO: 102559 - DNA, 387 bp, Homo sapiens
gacctgaggcagagtcatctctaccttacactttgacaatctcctttgctgtacaacttatcatttgctgaacaaacaaactgcatgtctaagcttcctctcccttcatgccagactactagaaaggcacatctacactcagcaccatgtatacatccatgcatttcctttccccacaacctctatccttcttctgaaatactcttgggtcctcccagtcaccaaatcccatggtttttcttggcctgcatccttcttgactcttctgtgacactgcagactcaactcaatcaaaactgaacttaatgctcttctcctccattcccaccactgctgactgtgctcacaatcctcccagttaagccaaagcctcctggtcttcactga

SEQ ID NO: 102560 - DNA, 185 bp, Homo sapiens
tgtcctcgctccggggcgtggagacagcggtggggagatctctgctgtgtgttcctagtatacactggctgggctgtgtgctacgtgtacggcctgtcctcgtggggtttacagtcacagccacaggcatggtcatctagcaaagctctggcagtgcagcctccccattttcaggcaggtcaaaa

SEQ ID NO: 102561 - DNA, 917 bp, Homo sapiens
gcgctgtccagcatttcagcaagcggcggcagcacccgcggggaggcagagggtgcggggccgtgggggccgcggagctgccctgcccaactcagcccagactaggcggcagcccggaccggcgggacccgagggcctggccccagcgcccggtagatcgcggcggtcagcggtgagggccagcggcccaggccagcggctccagggccagccacgatgtcctccaccgtgaacaacggggcggccagcatgcagtccacacccgacgccgcgaacggcttcccgcagcccagctcctcctcggggacctggccgcgggcggaagaggagctgcgcgccgcggagccgggcctggtgaagcgcgcgcaccgcgagatcctggaccacgagcgcaagcggcgggtggagctcaagtgcatggagctgcaggagatgatggaggagcaggggtattcggaggaggagattcggcagaaagtggggacattccggcagatgctgatggagaaggagggagtgctcaccagggaggaccggcctgggggccacattgtggcggagaccccgcggctgaccgagggcgctgagccgggcctggagtacgcgccctttgacgatgacgacggcccagtggactgtgactgcccggcctcctgctaccgcggccaccgcgggtacaggaccaagcattggtctagcagctcggcatcgccccctcccaagaaaaagaagaaaaagaaaggcggccaccggagaagccgcaaaaagaggagactggagtccgaatgcagctgtgggagctcctcacccctccgcaagaagaagaagagtgtgaagaagcatcgccgagacaggtctgattctgggtcccggaggaagagacggcacagatctcgaagctaccaagtgcaaaaaaa

SEQ ID NO: 102562 - DNA, 534 bp, Homo sapiens
gtctcttaaacaaaaatggagttaattatattcattcatttgctgttccgctatcccaccgggtagcagcccgcagacttgcggggctaggtcaggccccctgcgccgagaaaaggggtgaagaaaagtcgtcccgagactggtggtgagcgtccctgtcgccggcagtgtggcggagaccccgcggctgaccgagggcgctgagccgggcctggagtacgcgccctttgacgatgacgacggcccagtggactgtgactgcccggcctcctgctaccgcggccaccgcgggtacaggaccaagcattggtctagcagctcggcatcgccccctcccaagaaaaagaagaaaaagaaaggcggccaccggagaagccgcaaaaagaggagactggagtccgaatgcagctgtgggagctcctcacccctccgcaagaagaagaagagtgtgaagaagcatcgccgagacaggtctgattctgggtcccggaggaagagacggcacagatctcgaagctaccaagtgcaaaaaaa

SEQ ID NO: 102563 - DNA, 2216 bp, Homo sapiens
ccacacacacaggacccgcatcctgggtgatgaagtcagacacgcagcagctgggtgagtgctaacgctcagataagcatctgtgccattgtggggactccctgggctgctctgcacccggacacttgctctgtccccgccatgtacaacgggtcgtgctgccgcatcgagggggacaccatctcccaggtgatgccgccgctgctcattgtggcctttgtgctgggcgcactaggcaatggggtcgccctgtgtggtttctgcttccacatgaagacctggaagcccagcactgtttaccttttcaatttggccgtggctgatttcctccttatgatctgcctgccttttcggacagactattacctcagacgtagacactgggcttttggggacattccctgccgagtggggctcttcacgttggccatgaacagggccgggagcatcgtgttccttacggtggtggctgcggacaggtatttcaaagtggtccacccccaccacgcggtgaacactatctccacccgggtggcggctggcatcgtctgcaccctgtgggccctggtcatcctgggaacagtgtatcttttgctggagaaccatctctgcgtgcaagagacggccgtctcctgtgagagcttcatcatggagtcggccaatggctggcatgacatcatgttccagctggagttctttatgcccctcggcatcatcttattttgctccttcaagattgtttggagcctgaggcggaggcagcagctggccagacaggctcggatgaagaaggcgacccggttcatcatggtggtggcaattgtgttcatcacatgctacctgcccagcgtgtctgctagactctatttcctctggacggtgccctcgagtgcctgcgatccctctgtccatggggccctgcacataaccctcagcttcacctacatgaacagcatgctggatcccctggtgtattatttttcaagcccctcctttcccaaattctacaacaagctcaaaatctgcagtctgaaacccaagcagccaggacactcaaaaacacaaaggccggaagagatgccaatttcgaacctcggtcgcaggagttgcatcagtgtggcaaatagtttccaaagccagtctgatgggcaatgggatccccacattgttgagtggcactgaacaagcagaccaacaacactgaggaagatagagtggtgacttagaattaactcgtgctaaggggtcgggggctttgaaaatgccacccccctttcttattgcaagacggcttctcgcacatgaactgcatccttctcattctgtcggaaatgaaattcacacaactataccttttggggaggttccagttgattgaagtgagttggctgcattttcttatctgatcacaatggcaggggacagaatgtgcatggagtggagcatgtgtgtgttgggaggggggctaggaactgcacagcccttgtgtaattttcgttgtttgtttttgttttgagacagagtctcactctgtgtcccaggctggagtgcagtggcacagtctcggctcactgcaacctctgcctcccgggttcaagcaattctcctgcctcagcctcccgagtagctgggattagaggcgccagccaacacacccggctaatttttgtatttttagtggagacagggttttgccatgttggccaggctggtctcgagctcctgacctcaggtgatccgcctgccttggcctcccaaagtggtgggatcacaggcgtgagccaccgtgcccggcctcccctgtgtcattttaaatggctaagtaaatgggtatatgtgtttgaatggggcatgtcactctcttagggctatggggcagttagcagcatttcctatcctctgaccttaaatcattccttatctcagaaaacagaaaccgggctcagtcaatcaatgctttatttcaggccgaatgaggctctttagattgggatctattgatctatcaattttcatctttacatttctttgtacatctgtacattttgtccaaatgtacatctgtacgtctgtcatcattgtgacttcctggtagcccaagaagaacaacaacaaaacaatctgctctgaccttcttcaaatctttgtatttcaaagaaggtgctgagggatctgtttccttgccctggcttctccagtgggatgtgctgagtcca

SEQ ID NO: 102564 - DNA, 384 bp, Homo sapiens
cagcaggtttctgagatttgctgaacagatgaatagatatttgggtagcatcactgcagggtgatataataagactatgggtaggaactcaaggggaagggactcttctcccgctcccaaccaaccagagtttgttaatctctgactatcaaagagaatatggcaagccctaaaacttaacatggtgcttccatccccagcaaacaataactgaaatgtaaaacaaaatttctgagcttcctatgattttgccattgctggggaagaagaaaacaccatctgcagcacatgtttctattcagacttgaacctcacttcatctcaccagacaattctgaaagcacttcagcattctttccagtaccatctttgctagtctgtccc

SEQ ID NO: 102565 - DNA, 297 bp, Homo sapiens
cttcatccagtttcctctggtggttacatctttcttagctgtagtatacagtatcaaaactaggaaattgacattggtacagtgtgtgtatggttctgtgttattttatcccatgtgtaggtttggataacccagccgcaattaagatacagatatatggcaccaccacaaagattccctttgtgccatccctttatagtcatactgctcctctctacgccaccttctctaacccctaaacagtcagaattctaagatactcccagaaaagaatgactgtgcagatgtctttgtcat

SEQ ID NO: 102566 - DNA, 324 bp, Homo sapiens
cagagcaagactcggtctcgggggaaaaaaaagaaaagaaagaaacaaagagcatccactttccacctttcacacacaacacagccaattaaatcaaaagattccactatcatagcataataccccttgagttttcaggcagataagacactcagacacaccttgcttgttatagaacaggcccaaatgagacacaataaaacgatgattccatgttaggaattccctaccaaccatatcctcctctttttggtgactagattgtaaaataagtcaattaagagttcataacggaagtgctgaagcaaccgcaaatccagacac

SEQ ID NO: 102567 - DNA, 521 bp, Homo sapiens
gtgggttgaacaggtgttggtttaagtcagcatctcacttttacagaggaaaagctgaggttcagaaaatttatttttccaaggctgtggcaggaccaagattcgaactgtaactcccagctctgtgacttaatcctcaaacttgtggactttgatcctaataattcttgtcagaaatagttaaatactgctatcagttgccataaataaaaattggatatagaaatacatatataaagccgggcgtggtggctcacgcctgtaatcccagcactttgggaggccgaggcgggcagatcacaaggtcagaagatcgagaccatcctggctaacacagtgaaaccccgtctctactaaaaatatttaaaaaattagccgggcgtggtggcaggtgcctgtagtcccagctactcgggaggctgaggcaggagaatggcgtgaacccgggaggcggagcttgcagtgagcggagatcgagccactgcactccagcttgggcgacagagtgagacttgtctcag

SEQ ID NO: 102568 - DNA, 2337 bp, Homo sapiens
ggggccagcccgctgacagattctcggtggcggcggcagcggcggcggccctggactgcggggaatgggaatcctaggtccctgactgagcacctcccccgcctccctgcccccgacatggctcaggagaagatggagctagacctggagctgcctccgggtacgggcgggagcccggcggagggcggtggcagcggcggcggcgggggcctcaggaggtctaacagcgcccccctgatccacggcctcagtgacacttcgccggtgttccaggccgaggcgccgagcgccaggcggaacagcacaacgttcccgagccgccacggcctgctgctgccggcctcccctgtccgcatgcacagcagccgcttgcaccagatcaaacaagaagagggcatggacttgatcaaccgagagacggtccacgaacgggaggtgcagaccgcaatgcagataagccactcctgggaggaaagtttcagcctgagtgacaacgacgtggagaaatccgcctcccccaagcgcatcgatttcattcctgtgtcaccagcaccgtcacccactcggggaattgggaagcagtgtttttcgccatccttgcaaagttttgtaagtagcaacggattgcctccaagccctattcccagcccaacgacccgatttaccacccggagaagccagagccccatcaattgcattagaccaagtgttcttggaccattgaaaagaaaatgtgaaatggaaactgaatatcagccaaagagatttttccagggcatcaccaacatgctttcttctgacgttgcacagctgtcagatcctggtgtgtgtgtatcttcggatacccttgatggaaacagcagcagtgccggatcttcttgtaactcaccagcgaaagtcagcactaccaccgactctcctgtgtcacctgcccaagcggcttctccatttattccactagatgaactttcgtctaagtgattcactcatcctgagactttctttttgcagtggagagagagaataatctagttggggcaaacactgaactttgtcaattaatttgaggctatttcctatttgaccccttttcttttttgaaattccctgaaatgatgttattctagagaacttctatgtcaggttcctttggatacccttgaattcagtgtagtaatattttcagacgtttccccaataagtgtgttgaagcatacatctttacgctgctaatatgtctaaatacatatgttatcccttgatttttttaaataactgagagctctatttatttatgggattattaagttctgatgaaaatataaatgttgacttaatcagcatagtaaactgatgtttaaaattccatacttcatgcccacactaatttttaatgttattttcagtggttgccgatttccatttgatgaagaactatacagcttaaaaaaatacgttagttatatctatctagtggttgtctgttttacccaggaattcttggatatttagttttctgggtactgaagtggatgggagggggaatgattaaagaacaaattataaaagtttgaacaaatcttttcaaattaagtatataaaagtaaacttttaagaaaaacatttttaatgagattttaatagtaattctagtcagtcatacaactataactactatagagaaaataaaatttttcctttttttttttaaccggaaagtgcatttgcttgggtgtaatcctaaagtgaaatgggacagtgccttgcagtctttgcccactgtacataggctaaggctaagctctttgtactactgcaaacttaaaagtttttcaaatgtgggaaacgtgtgggaaggcttgttgaactttggcgcactcaggtaaacaatactctctcaattgttgatatactttaaaatattcagttgtgcctcagttccagaaattattgccaaacaggagccacagcaatttttggctacttttctgctctgcccatctgtcaccttactggttttcccttgttcaggaaggaagcagctgtttccttgccaacaggtcccttcctctccatctcccaccaaactagggcaccattgattagacaaaggtacagtgtaacttgggtttctgacagcaacaacaggactgtgaattgtttaacctctgtggttaaagctacagcttgagttgactgccttggggatgtcagttaattaaggggtgatgatttgcaagagaaaattagtggagagtcacataggtaaatcattatttaacttaggttttcctaaagttagaatagtcgaatgttcttttctttacctttacaatt

SEQ ID NO: 102569 - DNA, 1260 bp, Homo sapiens
ggggccagcccgctgacagattctcggtggcggcggcagcggcggcggccctggactgcggggaatgggaatcctaggtccctgactgagcacctcccccgcctccctgcccccgacatggctcaggagaagatggagctagacctggagctgcctccgggtacgggcgggagcccggcggagggcggtggcagcggcggcggcgggggcctcaggaggtctaacagcgcccccctgatccacggcctcagtgacacttcgccggtgttccaggccgaggcgccgagcgccaggcggaacagcacaacgttcccgagccgccacggcctgctgctgccggcctcccctgtccgcatgcacagcagccgcttgcaccagatcaaacaagaagagggcatggacttgatcaaccgagagacggtccacgaacgggaggtgcagaccgcaatgcagataagccactcctgggaggaaagtttcagcctgagtgacaacgacgtggagaaatccgcctcccccaagcgcatcgatttcattcctgtgtcaccagcaccgtcacccactcggggaattgggaagcagtgtttttcgccatccttgcaaagttttgtaagtagcaacggattgcctccaagccctattcccagcccaacgacccgatttaccacccggagaagccagagccccatcaattgcattagaccaagtgttcttggaccattgaaaagaaaatgtgaaatggaaactgaatatcagccaaagagatttttccagggcatcaccaacatgctttcttctgacgttgcacagctgtcagatcctggtgtgtgtgtatcttcggatacccttgatggaaacagcagcagtgccggatcttcttgtaactcaccagcgaaagtcagcactaccaccgactctcctgtgtcacctgcccaagcggcttctccatttattccactagatgaactttcgtctaagtgattcactcatcctgagactttctttttgcagtggagagagagaataatctagttggggcaaacactgaactttgtcaattaatttgaggctatttcctatttgaccccttttcttttttgaaattccctgaaatgatgttattctagagaacttctatgtcaggttcctttggatacccttgaattcagtgtagtaatattttcagacgtttccccaataagtgtgttgaagcatacatctttacgctgctaatatgtctaaatacatatgttatccctt

SEQ ID NO: 102570 - DNA, 204 bp, Homo sapiens
gcgttgaagcacgtattgaccacgcctgtttccacggttcgtccgcattgaagcacgtattgaccacgcctgtttccacggttcgtccgcactgaagcacgtattgaccacgcctgtttccacggttcgtccgcattgaagcacgtattgaccacgcctgtttccacggttcgtccgcgttgaagcacgtattgaccacgcctg

SEQ ID NO: 102571 - DNA, 484 bp, Homo sapiens
gggatgcagatgccaagagttgcagagctcagagattttaggaaaggaggagacagcagcctggaaactgcaaggtggacattggctccatcttcagttgctttgatccaagagggatgggaataaaagcacaaccccctttcctctccctgacatacctcctggaaaaagctgcaggaatattggagtctcagaggcataagattttccattaaatcaagaaaaaaaaagaaagtttagaggtggaggattggagagattttgcttgtgatttggcatgaatttgagaaggcccagtggaaacttttggaatcactaagtctaggactcaaatcctacctttccagttattggccatgtagcttttggcacacttattgacctctgggatgacccaggttccttgcctatgctgttgtgaaagttaaagaaaataaggcatgcagagtgcccagtataaagtggccgtcagccagggccacac

SEQ ID NO: 102572 - DNA, 796 bp, Homo sapiens
gtttagatggtaacacggcattttgaatattggcttcctttcttgcaggcttgatttgcctgttgactgaattactagtgactagtttactaactaggtcattcaaggaagtcaagttaacttaaaagaaacatgtcacctaaatgcacttgatggtgttgaatgtccaccttcttaaattgttaagatgaacttagttctaaggaagataacaggccaaccctgaagtactcccagtttgctgcagaatctcacatattttggatgttatagaagagtcctatttgccctagttaatttaactttttttttgcctgttttgtggactggctggctcttttagaactctgtccaaaaagtgcatggactataacttgtaaagcttcccacaactgacaatatatatatgtgcatgtatttaaaccaaatctggaaaacttacaatacagctgcataatggtagtatttattaaagaatcacaattgtaaacatgagaataacttatggattctagtttagttctttagtaattgcaaattatatttttgctgttgttatattagaataatttttgaatgtcatcttgaaatagaaatatgtattttaagcactcatgcaaaggtaaatgaacactgtttaaatgtgtgctttgcttattttttctgtaacaatcgtaaacattaaactgaacaaattacctacagtagttttgattaatgacctaagagcaagctggtttggccagacagtgtacccaaacttttatataccatcgaatgttattacacttgtgaa

SEQ ID NO: 102573 - DNA, 1230 bp, Homo sapiens
ggcacgagctgatgctgaagtgaaaatcttactcttattcaacaggaagtggatgctttggaagaattaagcaggcagctttttctggaaacagctgatctatatgctaccaaggagagaatagaatactccaaaaccttcaaggggaaatattttaattttcttggttactttttctctatttactgtgtttggaaaattttcatggctaccatcaatattgtttttgatcgagttgggaaaacggatcctgtcacaagaggcattgagatcactgtgaattatctgggaatccaatttgatgtgaagttttggtcccaacacatttccttcattcttgttggaataatcatcgtcacatccatcagaggattgctgatcactcttaccaagttcttttatgccatctctagcagtaagtcctccaatgtcattgtcctgctattagcacagataatgggcatgtactttgtctcctctgtgctgctgatccgaatgagtatgcctttagaataccgcaccataatcactgaagtccttggagaactgcagttcaacttctatcaccgttggtttgatgtgatcttcctggtcagcgctctctctagcatactcttcctctatttggctcacaaacaggcaccagagaagcaaatggcaccttgaacttaagcctactacagactgttagaggccagtggtttcaaaatttagatataagaggggggaaaaatggaaccagggcctgacattttataaacaaacaaaatgctatggtagcatttttcaccttcatagcatactccttccccctcaggtgatactatgaccatgagtagcatcagccagaacatgagagggagaactaactcaagacaatactcagcagagagcatcccgtgtggatatgaggctggtgtagaggcggagaggagccaagaaactaaaggtgaaaaatacactggaactctggggcaagagatgtctatggtagctgagccaaacacgtaggatttccgttttaaggttcacatggaaaaggttatagctttgccttgagattgactcattaaaatcagagactgtaacacttttgccttacgttcattttatcaagcatagcttggtatttattatgcttgtgtgatctaacatgagttagcatcccacacctcctcttctgatcctgccccattaaaataaccaagaaagaggttatctgttcttttc

SEQ ID NO: 102574 - DNA, 461 bp, Homo sapiens
tcctgccaccctatgatcatgccactactgttaataacttttcaaaagtgttatttaggtcactgtgatattgagctgacagataataaagcaaattggaaaattaaatatcatcgatctctaaaattttgaaaaatgtgtcctgtaggtagagtcaaaatatagaatatttaaactaacatacaagagtaattgtataatcgattttctaaaaaatcccaaaacacagagcttccttacttctgccttatcagtagatctaatattaaaagcagtctttttaagaacttctatactcagatttctgcaaagatgcatactagagtataatatatattttagatgggtgtggtagctcacacctgtgatcccagcactttgggaggccaaggttggcagttcgcttgagcccagaagttcaagactaacctgggcaacacggcaaaacctgatgtctacaa

SEQ ID NO: 102575 - DNA, 244 bp, Homo sapiens
agctgtatacctacatgaatattctacatcttccaacacagcgggctctccaggggaccgtccacctggaaggaacaaacgcacacgtcttgatttcctctgtatgggaagtttggggcatacccagagggaacggcaactctttccccaggctaaacttattcatccacagtaatgaaatctttctgagttcccaggatattgactacaagggagacccaccagagcaggaaagagaataaag

SEQ ID NO: 102576 - DNA, 425 bp, Homo sapiens
tgagacagagtctcgctctgtcacccaggctggagtgccggggcatgatcttggctcacagcaacctccgcctcccgggttcaagcgattctccagcctcagcctcccgagtagctggggccacaggtgcccgccaccacgccgggctaatttttgtatttttagtagaaacagggtttctccacgctggtcaggctggtctcgaactcctgacctcgtgatccacccaccttggccccccaaagtgctgggattacaggcgtgagccaccgcaccaggccccacctatgtaattataaccagataccgtcacatgatttcaatcttgagatcagtttgtatgtacagttacatgtgtaccaaataatattaccctagctgatgctggcaagattaatgaaaaaagatgagaggtggattttcat

SEQ ID NO: 102577 - DNA, 324 bp, Homo sapiens
cccggtgtgtgctcactcaacaaatattggttgagcacttcctatattccatgccggccggtgttgcgctgctgagaggctcacacagtggagagatactctatcagccataaaatgctggacaaaccgcagcaatcgtccacatcctgtgtacttttgcacctacatcctgaacagtctaaactttgataccaggtgtgatgtcagttgtcttacagaggcggcagctaaggtccagccattgcaggtgtgctgggagggcccctggtcaacagcacccacggggcaccatatgcagggcctgccagaggagaaatgtagggg

SEQ ID NO: 102578 - DNA, 383 bp, Homo sapiens
agacagggtttcaccatgttgcctaggttggtcttaaactcctgggctcaagcaatctgactgcttcagcctcccaaagtgctgggattacaggtgtgagccactgtgcccagcttatacagtttctaaagactctggggtctcttaaggaaggtcgagcaactcagtaggtcctaaggacacatccttgtaaacatcaaaacactatcatttatagtgacgtccctggggccggggcctgtcggggactcgggggctaggggaaggataacattagaaatacccaatgtagatgacgggttgatgggtgcagcaaaccaccatggcacatgtatacctatgtaacaaacctgcacgttctacacacatatctgagaacttaa

SEQ ID NO: 102579 - DNA, 199 bp, Homo sapiens
gcagaagaagtgggaggaaaagagtttatactgcatgaataaaatttaataagtagtataccacccagtcacattttaaaatattaactatgttagcctcattaaatgctatggccgcatgagcctggtttgagctggtaagaatgtattaaggcatattgtgtttctaggaatgatgggcatagaggggcatgcaagg

SEQ ID NO: 102580 - DNA, 116 bp, Homo sapiens
ggtacagaacgagcaccgactgtctgctgccctggcccctgggggtcatgtatcagagggagaggaagagaagccaatggtgcatgggtaccggtgcggacggacagcaggatccc

SEQ ID NO: 102581 - DNA, 659 bp, Homo sapiens
caactccaagctccccccgccccagagaaacacacagagctgttccacgatggcgtcctcataatgtgatcccagctttcctgaagagaacgttgccctcatgatttttggcctacttgaatttataaatttttagggatgtaaatagaacactcaaatgtcttaaaatatttaatttattaatttagttatacatacatactgtaaatcacatattatataaaataatatattaatttagaaaataccccatttttgccaccctccctttcacgaaatcattttactctgactcctcaccgtcttcaccaacatgggaaccctgtttgagtcatcagacagtttcaagacacacccagtcacttccatccgagctctgcacggtcgctcagtgacgatcccttcatgaggctctcattagaaattttctcccaagccataagaccatatttgcagaacattaggacgatttctcttgtcgttttttaatctgtcctgtgactgtacaatataaccacttaaggtcatactttttcaaacaacctttaaacgtcttttcttttaaagcacccaaaatgtcattgtgaggccaaacgcctagtaacagttactgaatctgggttaaatgtcggtatctttttttcttaaaccatttcaat

SEQ ID NO: 102582 - DNA, 350 bp, Homo sapiens
gactctcagctgattacctcatgggtgcaagatggctgctacagcagccatcagatccatattctaggtagagagaatggcaaaaatgtgaaaagccccaccagctgggtccgttttccttttttcaggaaaactatttagtactttgtgatagaaatacaatgcaagccacagatataatttaaaactttccggctgggcacggtggctcatgcttgtaattccagcactttgggaggctgaggcaggtggatcacttgaggtcaggagttcaagaccagcctggccaatatggtgaaaccttatctctactaaaattacaaaaattagctgggtgtgatggcgggtac

SEQ ID NO: 102583 - DNA, 758 bp, Homo sapiens
gaaatttgggaatcctatacttggaattctggaatggctagcctgggccaggaaaaatcactttgtaatctaagaaggaattgagttaagaagatttgttcatcacaccacatttccatgttgttgaggaaaatagattggcagtggtgacaaggtcaaggatgtgttgttcgaagttgtagaagataagcagcaatttaaaggcgttacaatacatttttaagagtggaaattgcattgaagagtggaagaaaagtcgacataagagaattagggcatgttgtttgcccaggctggtcttgaactcctgagctcaaccaatccacctgcctcggcctcccaaagtgctgggattacaggcgtgagccaccgtggctggcccttaatatgttttaaaaggatgtttaatactcttcattactgtgttatgcaatagttgcatgatgatttttctgatctctacattctattttttttctttttaaaatggagcacagaagtacttagtttctgatgtttttccatcttggcccagtaatttcctttttttttgttattttatgaagcacaaaactaaatatttttgaaccaagagactactgtgtggtattaattttgattttgtactaaattcatgttatttacacaaatcaaatagtgtcaaccttaaaatttttttaagcaatatttttcttatgtttgagagttaacatgtatggttgattagaatcttcaccttctaaagggattaaggaaaa

SEQ ID NO: 102584 - DNA, 416 bp, Homo sapiens
atgagggtggtagctgcttgcctagggaaattttgagtatttggagccactgacactgtttctagacaaaagactcaagggttcctttgctggtcaacagtaaaagagcagaaaatcatctaacaggcacactggctcactcttgtaatcccagcactttgggaggccgaggcagacagatcacctgaggtcaggagaccaacctggccaacatggtaaaactctgtctctactaaaaaaatacaaaaacttagccaggcgtggtggcacatgcctataatcccagctactcaggatgggctggggcagaagaatcgcttgaacctgggaggtggaggttgcagtgagctgagattgtgccactgcactcctgcctgggcgacagagtgagaatctgtctcaattaaaaaaaaaaa

SEQ ID NO: 102585 - DNA, 435 bp, Homo sapiens
gtctttccctaaccactggagacttcatagataaacttgcggggtcacggtgagggaggcactgtgtggaagggtaaatgggcttcctgggggtttagtacaagttgaccaaccttcttgttggtaacatgactgaggcattacctgcactgattaagtcaaccatcaagcagcatttattaagtagaacattgataagggcttgagggtgagagaagttgtccttaactgaaggagggggttctataaatggaagtgtcagagcagggtgacagatgccaaggaagagtgcccaggtgtgcacaggtgtgcccaggtatgaggggagaagaaggggtcagggccagcagggaaagagcttggggactcctgagtccagctcccagtgatgtgtagagttgagctccatcctgctgatcccagcaggagatagtg

SEQ ID NO: 102586 - DNA, 373 bp, Homo sapiens
tccagatttcgctgcctccttggcaccctcttccacgatgctgggccctccagggccgggcctccctcggacacgtgccctcgttagccttggaatatgcacactctgttttgacggagactctcttgcgagcctggtctagatttctcccctcaccagccaggcacaggcaccaatgggaggtgcctgggctccacaggcccgtcggggccagagggtcgccggtagcgtcaaccaagtgcacgacagcccacgggtggctaggcgcgtgggaagagccggagcccgacccccgcccacccggtttcctggcagcgcactgccgcgtaggggcggagccgcgcgcctacacagggtgtggcctccagcccgc

SEQ ID NO: 102587 - DNA, 462 bp, Homo sapiens
ggctcgggttgtctgccaaggggcaggaaaggcctggagggcagcttcctccacaatctacccgggagcttctgcaatggttaagaagctaaacacctgcaataactcaacagtaaggatatccacaggacaggaagtggttctgttttggtttttatgttaatttcagcctgtcggtgctgaggggcatatgaatgaaccaaccatgaagcaagtcctctgtgaatctgcttcacaatttgtagggaaaaactgggcaaaagctcgatgggtctgagacaagccctttctctgtttccactctctgagtaaggactacctaccgctggatgggcaggagagaacaggtggggagacagagaagaaagaaagaaggcatctgtatcactattcccactcaatctggactctgaaataaactaaagttgataaataatctgccaaaagttcccgttattctca

SEQ ID NO: 102588 - DNA, 349 bp, Homo sapiens
acaacgttccccaaatgggaggaggagccccttggatgacggaggagcagctcagactgctcccatctctgctcccagctccctggtgacaggccctgccctgactccacctggggtgggacccaggtgtatggaaaaggtgctcaggtggcctatcccaaatctggctaaatcaagttgccagttgaagccaagcctccccccagtcaggctgcacaaaaatgggaagacagggagcctccgggaagactcctgagcagtgtcctagctctgaagtcacgggctgcatgaggctgtggatacaacacagaggacagtgagtgatgcacacttggagacacagggagat

SEQ ID NO: 102589 - DNA, 364 bp, Homo sapiens
caggtgcccacaaccatgcccagctaatttttgtattttttgtagagacagggtttcgccatgttggccaggctggtcttgaactcctgacctcaggtgactgaccgacctccgcctcccaaagtgctgggattacaggcgtgagccaccgcacctggcccatgacactattttttaatcctcctaaagaatagccaaaataagctcccctatttccctttagagaaaaacatggaggaaatctaatctagtgggtttgtttgcaaagtcagtatcacatgcagcatgacatcctggggtttaattacttaaaccgtcaaattggatatgtaatcctaatttccaaatagcattcaatgccttt

SEQ ID NO: 102590 - DNA, 236 bp, Homo sapiens
gtactctagaggacccccgctctcacccaccacgcaggcttgagggcagcactaaaccttaaatttctttcttttttttaagataggatctctctctctctgccacccaggccagagcgcagttgatgcaggtcaggggagccccccagtggagcatagtgtgtccagaactggtgggttgttggtctcactgacttcaagaatgaagccacggaccctcggggtgagcgtcacag

SEQ ID NO: 102591 - DNA, 630 bp, Homo sapiens
aacagaataaaatgtctgctgaggctgcacaaaagcctcccactcctaaagctgaggacaataaaagcaaaggctgataaatgcactgcttatttcttcttatttccctttaatgaaaactctgaacagaaacacttggcttactttcaaaatcattaaaggaacccaggcataatgggaaaagctacactttcaaatagaagaggttttcaatgtgttgttctcataagactgctgtttgcacagctaaaagctaacagcagtgtctttactgctcttgtggtttcttctcttcggtgtacttctgtttttcttattctgagtctttataggaaaggaagaggcgcagctcatgcggttaagcacacaggcgctaccaaatggtgcaataggttgccatagcaccagcataatcagccctatctcggggttaaaaccacaacttctctagttgacgttgaagctgcctgactatacatttaactgctacaaaatgctgaatttcagattgatttgtgtttgcttcaataaaaatgtatttcaaaagtaaggttagttttattatgtgatttatttcagaagcacttcattttgaaaagcactcacaaatgatattttaatgacaaaaat

SEQ ID NO: 102592 - DNA, 223 bp, Homo sapiens
ccaccttctgtcctgggggtttgcccgttcagggtttttcctcctcgtgccagccacccaggcatcccccatgagcaccttgaagccctgcaaccatgtgggcctccatgcttggccatgtggccactggcctgtcagggtcactgctaggtgtgctggcctctccctgccactgcctcttgaacggcacccccacaggtgcttcctctacccacaagtgccc

SEQ ID NO: 102593 - DNA, 686 bp, Homo sapiens
aactgtcacgagaatgtaaatttgagaacaggagatactagggcacattaagaggaaaatagaaatggcaagattagctctgttagcaaggacaaatgaagaaacctagacagtctactgagcaagtgactacattgaggcagaaatttaaataataataagtactgcatttattcactccaagaaaagtaaaaactaaggcccagaatgtggcaaggcaagagttaaaaagaaaagaacaagttttcctctgcctagtagctcactttgaagacagttagaagataacgctgtccaaatagccaaggccaaaggaataagctccagacaccaccctccccccgacccctggttccagagcaaggttgaaagaaaaaaaaaagagaaatacaagttcttttaatgttactcttttcccgggcttcttaagcatgattagcatgattatgttttacaaatgtctgtatttagccagttcttgtttttcttttaatgcagctacaaggccactggctaagtcacaagttatgttacgctatagattatgtaacctgttactgtatgattaattgcttttattttgcttctgtaaagccacttataaaaacccgctcagtctttgttcaaggctcagcttttagatgtgaatcctccgagccggtgcgtgcctaaaataaacaaatcct

SEQ ID NO: 102594 - DNA, 558 bp, Homo sapiens
ccagatccacccatatccctgcatgaacctatatctagaaaacccccatagtctcagcccaaaagcttcttaagctaataaacttcagcaaagtctcaggatacaaaaaatcaatgtgcacaaattactagtattcctatacaccaacaacagtcaagctgagagccaaatcaggaatgaactctcattcacaattgccataaaaggagtaattgctgttctttaatgatacagtgatgttattagatgaaagagttttgaggccccatctatcttagaagactcattctcttgactctcttgaaagctgtttcagcctctttggaaggaatgagcatctatctttccatagcattgggacagactacgaagtactcagttgtctgctgatttcctctctagtctttgcttttcttggctgctgctttcttctgatcccttgtaacactagagtccttgtaactccattctgctcagtgaactgcaggtgccattcaaaactcaagaaagtgttccctccagattgtgatagtaagtttgcaggatagacttgcttaa

SEQ ID NO: 102595 - DNA, 583 bp, Homo sapiens
atatttttagtagagacggggtttcacagggttgaccaggctggcctcaaactcctgccctcaggtgatctgcctgcctcagcctcccaaaatgctgggattacaggcatgagccaccatgcctggcctgcagactttcacgtgaatgaaatacgcttctgtgttaagacactgttattctgagtctctgttactcagatgatcctatttataactgatatagtgagacccagaagagaaagcctggcctctgaggttgagggccctgtgctccaccagccagcagtagtcccacggacacctcccttggtggttctgtgggttcagagtagctctgggctcctggaagtctcagtgtccactcctgactttaacacagcctttctcctcacactgttcccgcacccctcgaaacccagcccttcctgactcttcagaagcctcggtcacatgcctctcttgcccctgatttctagaaccctccacatttcctctctccaagtctcctttccacccacagcctctgcacctccagatgtttcctggctgttgcaggaatcagcagagaagagacattgggact

SEQ ID NO: 102596 - DNA, 353 bp, Homo sapiens
tcttgccagttctttctctttttttcttttaaacttaatgtgtccaaaatcaaattagtttattctccagatctacttatctcatttatgtttattacttttttttttgtcttagtgaatgactgccatccaagccagaacctggggtcatctttgatttttcttgccccctacatgcagcccccaaatttcagcctccacctgcttctcacccctattgccactgcctcagtgtggacaatcgctaacctgcagctgggctctcgtgcattctctagatcctcggaactcttggccctttttccacatcctgaacctgccactggtgatccttcgaaaatgtgaatcttgca

SEQ ID NO: 102597 - DNA, 411 bp, Homo sapiens
cgggcactggcctggttctgcaacgaaccagcttggtgaccttgacaaagtcactgttctctgatctcactttcctacactgaaaaatgaaggagctggaggagatgatctccatgttcccattcggcaatgtcattctatcattctactaaatgggaatgacaaccagatctaatcagctagaactcattcaaccaatatttttaggtatcttcaatgtgcaagcctctaatttaccaaaaaaaaaaaccctacatttttttcctgaatggctacaggcagtggaagaagtggaggggcccaccacctatccatcatagtggacaaatccccccagcacagcataaggggctgcctaaaccccgccatcagcatccactccccagagcctccccgtcagcaagcccccct

SEQ ID NO: 102598 - DNA, 395 bp, Homo sapiens
gttccagggggagtgggggaggcaccgtctgctgctcacccacatggctgagggtttatagaaggatgtgcaggtggaaacatgcacacagctgcagatctgctaagtggggcattaggtccctcttcctcctaaagtcatcccttccctaaccaggcagaggatcatttcagcccctgggattctctaaataacacagctgaagccacaattggtcactgagagcttcctttatagcaacacaaagccacataattgaggttcctaagccccgtgacctctggacaagtgaggcttatataatcagtaccattacctgttgttgttgtaaaaatggtgccttgggctaaactgttctcttggcctttgctcacacagctatttctctgccatcc

SEQ ID NO: 102599 - DNA, 522 bp, Homo sapiens
attattccacacagttcatatggctgcctgtagccactcagtcagggtgtggtctccttgcgctgccactaaccacctgctcacttgcagccgctgacagagagaggggtgagtcatggtggaggccagcttgtccatctcagaggtggaatgggagataccatctgctcccttgttccacagacgaagcatccaggcaggcaggggttcccctggacactggcaacactgcttgcctaattcctgcaactcagttggggtacaggcaatatacgaaatgtgttgcattatggtggggagtccctgagtccacccttggagccccagtggctgttcatgatctaccttctgtcagaccaccgggtgagcccgcaacaggggttcttcctccttggtatgaaactgagtggggatctccagacaagatgatggacccaggcctgcattcatggtagcctctaattccttttccaagctctgaagccacacctccaggcatcctgcctgcacctggaggtcccc

SEQ ID NO: 102600 - DNA, 423 bp, Homo sapiens
tggcagaggggcactgttctccagttgtgggactgagggtccccttctcagccctgatgaagactggatccctgcccagatgtgaacgctggagggggcaggccggggtccagctgtggccacagggaggggttgagtcagccgcttcccagcagtacaacctaggctgggcccagctgttcctggaaaccagtagagggggtgggctccccaatccagctgggggctgctggcccagacctgcacaccagggctctgtgtccctacaaatggcggccttcagaccatcccccaaaacgttgggggctctctttacctaaaacaggggtttggatccttcttccaaaatgtggagggtttttcagcccctcttgctgaattaaaggtgcctggatctcgcacagcggggctccctgtgtttca

SEQ ID NO: 102601 - DNA, 1197 bp, Homo sapiens
gaatctggagaggcaaagtaatgaaggaccttatgaattgggtgaccatagaatatactatccaaacctatacacttttgaaaatgaaagagatacccgggtgcagtggctcatgcctgtaatcccagcactttgggaggccaagcaagacaggccgatcatctgaggtcaggagtttgagaccagcctgaccaacatggtgaaaccccatcactactaacattacaaaattagccaggcatggtagctcacacctgtattcccagctactcaggaggctgaggtagtagaatcgcttgaacccgggaagtggaagttgcagtgagccaagattgtgccattgcactctagcctgggtggcagagcgaaactctgtctcaaaaaaaaaaaaaaaaaaaaaaaaccggtgtgaaaggaagatatttctttcacactcatgggtccccattagaggaaagccaatgggggaattgggccaccaatgtggggacatgtgtcccttgaggcacgcccaggaaacttttgaattacccctacactttattaaccccccgtgtgttacactcttttttcctcttaactccccccgtgcgtgagacgagatcttctgtggggagaagacttgtgggacaagagatctcttccgagaagagaagggggtgggggccacggcgggtggtgcccactattggcgttaagacaccctcttccatgtttaccccacaagttttttccccttttggcgcaggcgagaaaacctggaaccttccgcctgccgccccccatcttggggcacacacggcgggggggtttctgctcgcccaacaacggcgcggcgacaacgatcacgcagatgatagtcaatgataacaagctcgtcggagagagcgacaccatctcaatagttgacggcggcgggggcggggcaggacacaaacagacgcgtgtctcatccgaacaagatgggggccgcccaatatggtgcgtacctcaaagacaggccgggtgtctccccggtcagaaccccaccaggcgtttcgctgtgtgtggtcaaccaaacaggggcgggtgctaaagtatatgtaccgggcggaggagctactcccccccaatgaataagggtgagagaccggcgccagaagtactaggttgtgcccgaagataagcaagccgccgggcggtgtaagcgcccggaag

SEQ ID NO: 102602 - DNA, 721 bp, Homo sapiens
ggttatttgtactatagatttctgtcttgctttccagggtgatatcaacatactcttactgtaaactacaagttggcaaaataacttcatcagattaagattggactgttttgggtaggttgcctcatagatgatggtgttttcccacgaggaaacacataatgtctgatgtttctctctctctccttctctcttttatattgaccactgttaatgagcaatgcccagattcattacttcattaaaactgcaaaaatggtcaggctctaattctattacctggtccccattcattagctggaattcctctctaaagagaaatatcccccctcctgttatgtggtttcccaggggtatggtctgtataggaaaggcaggctttcactggcttttataaagttggtttctgagtgtccaccaacattgatcaattacattgtgggtgttgttaccagctcatggctttagatagatttcatgaacttcaattcagtagtttctaatcttgatgtcaaattatcccatgtttgaccaatgtgagcctcttcaaactggcttcttggtcctctgacaatgactctagcagttattaattgctcccttgcctaagaaacattccaggttcatcttgtacattttccatcaccaacttcaaatcaggaatcccagttacttctaattctttttggtggaccaaatctaggtgctaaaagtgtgtgtt

SEQ ID NO: 102603 - DNA, 401 bp, Homo sapiens
ggtcattggaggattaacagcattcctgtctgcaaagtgcacagcacctagtgcctggctttggtaagtgagtcgtgtgtttgtgagtatattattgtgcagggtggagcgcagggccagggtggtgagccctccatgaatgttggtgaatattgataccactgttatggtccacatgtgagagactgtgtcctttggggttctggatgtgacagttctgttccccttcctgccctccattgactgcaggccaatgagaacagcctgctgagtgcgcagctcaagggcttccccctgttcctgcactcaaacctgggcctgaaggactgcagcatcaaccccaagtccccgcaagtcgacccgcaagtcaaaagaaattagagctgatcctctagagtcga

SEQ ID NO: 102604 - DNA, 298 bp, Homo sapiens
aactgcgagctgctaactcaggggcgagctgcccacgccgcttcaaataccgcacagagattgcgccgggcaagggtgacatgcccacgctcactgacaagggccgtggccgcttcgccctcatcatctatgagaacatcctcaagtatgtcaacctggacgcctggaaccgggagctgctggacaagtactgtgtggcctacggcgtgggcatcattggcttcttcaagcctatagagaacagccctgctgattgcactgctccccggtcttacacctcttccctgctatcacactt

SEQ ID NO: 102605 - DNA, 8027 bp, Homo sapiens
  misc_feature (4359)..(4359): n is a, c, g, or t
gcggccgcgattcggggaggtaggcgctgggccgaggaggtgcagccgtgttaaggagaggacattcgagagggcgtggcgaagtgaagaggaacctcacgccactgcctggagctccgccttagccccgtgggccccacggagtgagcggcatgcagcacccccgggcctgtccagtgtcctctggcctgctgccctgcacccccagaaggccctgacgccctggggcacttctgctctgcacaggaccacgcgggggtttgccatggtgacataaaggggcgcggaggaaggaaggagcgtgaccagcctgtggactgcgcccctggctgggaggaaggactgggggcccagatcctccactcccagtgccccacaagggcgtcgcttcctaagtctctgtgaatttgttggtcagtggacgattctcgtgtctcctcctgtgtggggccttggggtagccagggcaggccgggcctccggtggccaaggtctcggaggccaggatgcctgccctggcatgcctccggaggctgtgtcggcacgtgtccccgcaggctgtccttttcctgctgttcatcttctgcctgttcagcgttttcatctcggcctactacctatatggctggaagcgaggcctggagccctcggcggatgcccccgagcctgactgcggggacccgccgcctgtggcccccagtcgcctgctgccactcaagcctgtgcaggcagccaccccttcccgcacagacccgttggtgctggtctttgtggagagcctctactcgcaactgggccaggaggtggtggccatcctggagtccagccgcttcaaataccgcacagagattgcgccgggcaagggtgacatgcccacgctcactgacaagggccgtggccgcttcgccctcatcatctatgagaacatcctcaagtatgtcaacctggacgcctggaaccgggagctgctggacaagtactgtgtggcctacggcgtgggcatcattggcttcttcaaggccaatgagaacagcctgctgagtgcgcagctcaagggcttccccctgttcctgcactcaaacctgggcctgaaggactgcagcatcaaccccaagtccccgctgctctacgtgacgcgacctagcgaggtggagaaaggtgtgctccccggcgaggactggacggttttccagtcaaatcactccacctatgagccagtgctgctggccaagacgcgctcgtctgagtccatcccacacctgggcgcagacgccggcctgcatgctgcactgcacgccactgtggtccaggacctgggcctgcacgacggcatccagcgcgtgctgtttggcaacaacctgaacttctggctgcacaagcttgtcttcgtggatgccgtggccttcctcacggggaagcgcctctccctgccattggaccgctacatcctggtggacattgatgacatcttcgtgggcaaggagggcacacgcatgaaggtggaggacgtgaaggccctgtttgacacacagaacgaactacgcgcacacatcccaaacttcaccttcaacctgggctactcagggaaattcttccacacaggtaccaatgctgaggacgctggggatgatctgctgctgtcgtatgtgaaggagttctggtggttcccccacatgtggagccacatgcagccccaccttttccacaaccagtccgtgttggccgagcagatggccttgaacaagaagttcgctgtcgagcatggcattcccacagacatggggtatgcagtggcgccccaccactcgggcgtgtaccccgtgcacgtgcagctgtacgaggcttggaagcaggtgtggagcatccgcgtgaccagcacggaggagtacccccacctgaagccagcccgctaccgccgtggcttcatccacaatggcatcatggttctcccacggcagacctgcggcctcttcacacacaccatcttctacaacgagtaccctggcggctccagtgagctggacaagatcatcaacgggggcgagctcttcctcaccgtgctcctcaatcctatcagcatcttcatgacgcacctgtccaactatgggaatgaccgcctgggcctgtacaccttcaagcacctggtgcgcttcctgcactcctggaccaacctccggctgcagacactgccccctgtgcagttggcgcagaagtacttccagatcttctccgaggagaaggacccgctctggcaggacccctgcgaggacaaacgtcacaaagacatctggtccaaggagaagacgtgtgaccgcttcccaaagctcctcatcatcggcccccagaaaacaggcaccactgccctctacctgttcctgggcatgcaccctgacctaagcagcaactaccccagctctgagacctttgaggagatccagttttttaatggccacaactatcacaaaggcatcgactggtacatggagttcttccccatcccttccaacaccacctccgacttctactttgagaaaagcgccaactactttgattcagaagtggcgccccggcgggcagcagccctcttgcccaaagccaaggtcctgaccatcctcatcaaccccgcggaccgggcctattcctggtaccagcaccagcgagcccatgacgacccagtggccctaaagtacaccttccatgaggtgattaccgccggctctgacgcatcctcgaagctgcgtgccctccagaaccgctgcctggtccctggctggtacgccacccacatcgagcgctggctcagtgcctatcacgccaaccagattctggtcttggatggcaaactgcttcgcacagaacctgccaaagtgatggacatggtgcagaagttccttggggtgaccaacaccattgactaccacaaaaccttggcgtttgatccaaagaaaggattttggtgccaactgcttgaaggaggaaaaaccaagtgtctgggcaaaagcaagggccggaaatatcccgagatggacttggattcccgagccttcctgaaggactattaccgggaccacaacatcgagctctccaagctgctgtataagatgggccagacacttcccacttggctacgagaggacctccagaacaccaggtagccgtggccaccacagccagactgaacgtttgtgaaagctgggacatcccaccacacgctgagccagacctgcagagtgggaagctggaccagggcagctgcgcacttatgagcaatactctgtggaggtctggtggggctgggggagcacccaggcggatctgcaagcacctcggagcacccaccgctgggtctgcggcctaagggacctccctcgccagcagaggtccattccgttcccagctgctcctggggaggccgcttcctggtaggagggagtccacgagactcttttctgtccctcactgtgttccgccgactgtcccctctcgtcacccatcactccctgcttccgcagggcgcccctcagtattcgctgccatatgtccctgtcctccaggctgtaggggaggagagcctggccgggggagacagactggacatttccctgtttcgagccaggctcttccaaggggccagctgggtccccggagtcagtcctaggctggatgggagggtggccccctcaagaggactcccagcctccacatctggttcctaccttcacatctcaccctcccgttctggggaagaatttctggttcctacagtatccactccatcctcaaggcttcccgcagggccttggggcactgccttgccatcgggcccagttctccgggccccacctgcacccctttcttccccctgggatatgatgtgtggtgtttcctgtggtaaaagactgaggcaggccaggggtctgccagtaacatgttcccatgtacagacacggtccccacaccctcccagcctcaggcccaggcagacatgggcgagctggtgagactgccagccacggctttgcttagccacctgtggccgagggctctcagagacccccttaacctcccaaatactaagaagctaaaatattttaatattttgtttttttttttcttggtgccagagtttataccctgggtgctggggtcgcactgtgttatatatatatatatatatatatataatgtgtatatatatatattctattttttttggttgggttcgtttttaattcagtcctacaaaatggtggtaagccccagtctcaggggtcaccctgtcttagagctagagatgaggtggcagggagggaggctgtgtcctcagtggcctggggctgagcagaccttaggaagggnccctccccagtgccgtggctgctctggggctaccccaggtgaacagaggtggtgagatgcgcagggaagaccagctctctccaggacatcgggctgcgtgaagtccagtgaccctgaggggattttggccaaaggaaacagccagggctgggctaggagagctggggtcaaaagctgccccacccactctccctcacatggtgctaggctgggagctgccctgagagctgggatgcccaccaaggcccacagaactgtctccaggcccttgtagacagtgggatctctgggctgatttctggttggggtctgctcctaccccaccccatttaacaatgtgaagtgactgaggctggggtgcctctccctggccccctccaactgccaaattctgcttccctctgaaccccaggaaatactttctggagaggcttgtcttgttcagaagactctagcatcttggggctggaaggtcctttgacgggtatgaaacaggtccagaaaggggaggtggcctgcttggccgacgtcatggagccagctgggagcagggctgagcgttgaacccgaggctcccggttccaagtcccatcgtgctcctcttccaatgccacactgcctctgagcccatccttgggaccctactctgtgccaggttcctgtcccttcctccgtcacagcatggtcattccaggatatggggacaaaccactccttcccagccagggtgcctttgagccttctcattccgaggtctgcgtttgcatccctgtcgtgttctccctcgaggggtccttccccagcctgtgggggcctgggtctgttctgagctgattcccttttctccagttctctgctgggatgaagaaagttggacactcagtgggaccagctgcaggtggtttcactgtgtacacagcagtgtccccatcatgcctctcaatggggcctgcaagcctgggaacttgggcatcgttgggccagcaggatgagcagcaaagggtctgaggacagggtggcatgtctgcttgtgtgctcatgaagacatgcccacgccatggagccaggggcttacagagaggggcagtgacttccagagtcccatccgtcagtgaggggactgggctgcgggatgggtgaggatcttacagctcccaggttcggaaatctaccctctaggcctggaggcctctctcgcagagcatggaaggcaggagaggtgggctggcctagggcaggagctccacttctctctgcctctggctatgggaaggagcaggcggttggaaatcctgtgacagcagagatcttctggatttttgcctggacccttctgcaagcctggagactggacctgccacatgttccaagtctgtctgcctaggtcactgctgccacttctcctcccactaacagacctttcttgaagacccactaggtccagacactgccgggacttgcaggtatggggggtagaaggagaggcagataagctgcctggggggctgttagctaatgggtacaaggacaccccctcccgagaagagaagccacagatgagtgggccagcgaggccagtcttcaatgtccactaattcactctaagcatttggccaaaaaaaggagagagaaataactgaaattgttcaggtggctccatcgtctattctgtggtcccctccatgagcctttgccccagggtgggtgcaggtgcgagtgtcacctgcagctgcctcagtcattcagagttccagagccttctgtggtggagcatcctgctgcttggaggatgagtctgaagtttaaaaatgggccttttctgagcccccctgatgagcagtcagtgcttctgggcccagctaaggaagccatctgttcccagcagaggagagctgctgcgctgacctgcagaggttggtggtcccagcacagagctgtgcccatgggcttgttagtgggaaaagcaaatacaacaatgttttaccaaacatttaattatgaatgcccactccccagcatctagatctaaaattattaacattttgccacattctttttctctctctgtgtatgtatatgttttctctgtcctaatttaaaagtacattgcaaacatcatgaaacttgatccctgaaagcttcagcctgcatctcctaagagttagggcattgtcctacacattggcccagtatcacagccaagacgagaagtcatttcccagcgatgtctgctatctaatctgtattcaaatccccccaattgtctcccaggtaacttatgtgtctggttttggaatcagcatccagtcacggtgcacacattgcattttctaactatgtttttaaaacctctttgaatgctgaaaggtcttccctcagctcactttgagtttttaaatgacattgtttttgaggccctaggcctgctgtctttttgaagccccacattctgaatttgtcagattgtttgctcatggtgtcgcataaccacttcttctatcccctgtactttcaaggataatttaggctacatgagattttgccttttgtgctgacttgacagcttcacttctgcctaagatgcgcctccactgtcacctgtaccaagtgccaaaacagcagaggggccagttagagcaagagctctgggggggcccggaaagtctccctggagaaggccgtaatatctgggccttggaaggaaggacacagggctctggaaggaggaggctgcatgcctgaaggctgggccttcgaccctggggatgggccacagggcaccaaacacatcatatgtctctctctttctattttggggtcccagggttttcatttcctggagacccgtggtctgtgtgcactggagcagagccaggctctcagttgcagcagggaaaagcctacatggggaactgcctcccgcaagctgtggtgtgagaagagccctggctggcagcaggagctgtgaagtttcatcccagccgggtgcatttagtagctgcctgaccatcttcctcccaggccctcagtttcttcatctgtagaatgagcagataggggccacagcagggattttcacacatcaaaggaggcagcctctgctctagttgatgtgaggatgagggggcggcctagaccccctgctgcccaggccgttgaggcaacactgggttcctggcttgacagctgtgggctggctgcccttgccagctcagacggctggcgagttttcagcttccctaagggactggcatagggttttgtggggtcaatgccaggaacctgggggaaactggatgcgttttatcctaagaagttcatccctcctgctcttactgtttccggccctggaggagaatgagggaggagagggttttctatgactgtgttagcttttattattagcaagagggctccttttgtaatttgtgcatgaaattcatgtcatttcctgggagaggagagggccgactggagagggtggggggcacactggggaagcaggcagaggtttccttcccttgtaggggggtggggagagtggggagagggggtgctatccagttcgcctgatgagggctctcgaaccagccgttttgggttgtgttaaaggtgagaccttcctccattaatgtacaatctcgaactaactgctaataaagtggggt

SEQ ID NO: 102606 - DNA, 7909 bp, Homo sapiens
  misc_feature (4359)..(4359): n is a, c, g, or t
gcggccgcgattcggggaggtaggcgctgggccgaggaggtgcagccgtgttaaggagaggacattcgagagggcgtggcgaagtgaagaggaacctcacgccactgcctggagctccgccttagccccgtgggccccacggagtgagcggcatgcagcacccccgggcctgtccagtgtcctctggcctgctgccctgcacccccagaaggccctgacgccctggggcacttctgctctgcacaggaccacgcgggggtttgccatggtgacataaaggggcgcggaggaaggaaggagcgtgaccagcctgtggactgcgcccctggctgggaggaaggactgggggcccagatcctccactcccagtgccccacaagggcgtcgcttcctaagtctctgtgaatttgttggtcagtggacgattctcgtgtctcctcctgtgtggggccttggggtagccagggcaggccgggcctccggtggccaaggtctcggaggccaggatgcctgccctggcatgcctccggaggctgtgtcggcacgtgtccccgcaggctgtccttttcctgctgttcatcttctgcctgttcagcgttttcatctcggcctactacctatatggctggaagcgaggcctggagccctcggcggatgcccccgagcctgactgcggggacccgccgcctgtggcccccagtcgcctgctgccactcaagcctgtgcaggcagccaccccttcccgcacagacccgttggtgctggtctttgtggagagcctctactcgcaactgggccaggaggtggtggccatcctggagtccagccgcttcaaataccgcacagagattgcgccgggcaagggtgacatgcccacgctcactgacaagggccgtggccgcttcgccctcatcatctatgagaacatcctcaagtatgtcaacctggacgcctggaaccgggagctgctggacaagtactgtgtggcctacggcgtgggcatcattggcttcttcaaggccaatgagaacagcctgctgagtgcgcagctcaagggcttccccctgttcctgcactcaaacctgggcctgaaggactgcagcatcaaccccaagtccccgctgctctacgtgacgcgacctagcgaggtggagaaaggtgtgctccccggcgaggactggacggttttccagtcaaatcactccacctatgagccagtgctgctggccaagacgcgctcgtctgagtccatcccacacctgggcgcagacgccggcctgcatgctgcactgcacgccactgtggtccaggacctgggcctgcacgacggcatccagcgcgtgctgtttggcaacaacctgaacttctggctgcacaagcttgtcttcgtggatgccgtggccttcctcacggggaagcgcctctccctgccattggaccgctacatcctggtggacattgatgacatcttcgtgggcaaggagggcacacgcatgaaggtggaggacgtgaaggccctgtttgacacacagaacgaactacgcgcacacatcccaaacttcaccttcaacctgggctactcagggaaattcttccacacaggtaccaatgctgaggacgctggggatgatctgctgctgtcgtatgtgaaggagttctggtggttcccccacatgtggagccacatgcagccccaccttttccacaaccagtccgtgttggccgagcagatggccttgaacaagaagttcgctgtcgagcatggcattcccacagacatggggtatgcagtggcgccccaccactcgggcgtgtaccccgtgcacgtgcagctgtacgaggcttggaagcaggtgtggagcatccgcgtgaccagcacggaggagtacccccacctgaagccagcccgctaccgccgtggcttcatccacaatggcatcatggttctcccacggcagacctgcggcctcttcacacacaccatcttctacaacgagtaccctggcggctccagtgagctggacaagatcatcaacgggggcgagctcttcctcaccgtgctcctcaatcctatcagcatcttcatgacgcacctgtccaactatgggaatgaccgcctgggcctgtacaccttcaagcacctggtgcgcttcctgcactcctggaccaacctccggctgcagacactgccccctgtgcagttggcgcagaagtacttccagatcttctccgaggagaaggacccgctctggcaggacccctgcgaggacaaacgtcacaaagacatctggtccaaggagaagacgtgtgaccgcttcccaaagctcctcatcatcggcccccagaaaacaggcaccactgccctctacctgttcctgggcatgcaccctgacctaagcagcaactaccccagctctgagacctttgaggagatccagttttttaatggccacaactatcacaaaggcatcgactggtacatggagttcttccccatcccttccaacaccacctccgacttctactttgagaaaagcgccaactactttgattcagaagtggcgccccggcgggcagcagccctcttgcccaaagccaaggtcctgaccatcctcatcaaccccgcggaccgggcctattcctggtaccagcaccagcgagcccatgacgacccagtggccctaaagtacaccttccatgaggtgattaccgccggctctgacgcatcctcgaagctgcgtgccctccagaaccgctgcctggtccctggctggtacgccacccacatcgagcgctggctcagtgcctatcacgccaaccagattctggtcttggatggcaaactgcttcgcacagaacctgccaaagtgatggacatggtgcagaagttccttggggtgaccaacaccattgactaccacaaaaccttggcgtttgatccaaagaaaggattttggtgccaactgcttgaaggaggaaaaaccaagtgtctgggcaaaagcaagggccggaaatatcccgagatggacttggattcccgagccttcctgaaggactattaccgggaccacaacatcgagctctccaagctgctgtataagatgggccagacacttcccacttggctacgagaggacctccagaacaccaggtagccgtggccaccacagccagactgaacgtttgtgaaagctgggacatcccaccacacgctgagccagacctgcagagtgggaagctggaccagggcagctgcgcacttatgagcaatactctgtggaggtctggtggggctgggggagcacccaggcggatctgcaagcacctcggagcacccaccgctgggtctgcggcctaagggacctccctcgccagcagaggtccattccgttcccagctgctcctggggaggccgcttcctggtaggagggagtccacgagactcttttctgtccctcactgtgttccgccgactgtcccctctcgtcacccatcactccctgcttccgcagggcgcccctcagtattcgctgccatatgtccctgtcctccaggctgtaggggaggagagcctggccgggggagacagactggacatttccctgtttcgagccaggctcttccaaggggccagctgggtccccggagtcagtcctaggctggatgggagggtggccccctcaagaggactcccagcctccacatctggttcctaccttcacatctcaccctcccgttctggggaagaatttctggttcctacagtatccactccatcctcaaggcttcccgcagggccttggggcactgccttgccatcgggcccagttctccgggccccacctgcacccctttcttccccctgggatatgatgtgtggtgtttcctgtggtaaaagactgaggcaggccaggggtctgccagtaacatgttcccatgtacagacacggtccccacaccctcccagcctcaggcccaggcagacatgggcgagctggtgagactgccagccacggctttgcttagccacctgtggccgagggctctcagagacccccttaacctcccaaatactaagaagctaaaatattttaatattttgtttttttttttcttggtgccagagtttataccctgggtgctggggtcgcactgtgttatatatatatatatatatatatataatgtgtatatatatatattctattttttttggttgggttcgtttttaattcagtcctacaaaatggtggtaagccccagtctcaggggtcaccctgtcttagagctagagatgaggtggcagggagggaggctgtgtcctcagtggcctggggctgagcagaccttaggaagggnccctccccagtgccgtggctgctctggggctaccccaggtgaacagaggtggtgagatgcgcagggaagaccagctctctccaggacatcgggctgcgtgaagtccagtgaccctgaggggattttggccaaaggaaacagccagggctgggctaggagagctggggtcaaaagctgccccacccactctccctcacatggtgctaggctgggagctgccctgagagctgggatgcccaccaaggcccacagaactgtctccaggcccttgtagacagtgggatctctgggctgatttctggttggggtctgctcctaccccaccccatttaacaatgtgaagtgactgaggctggggtgcctctccctggccccctccaactgccaaattctgcttccctctgaaccccaggaaatactttctggagaggcttgtcttgttcagaagactctagcatcttggggctggaaggtcctttgacgggtatgaaacaggtccagaaaggggaggtggcctgcttggccgacgtcatggagccagctgggagcagggctgagcgttgaacccgaggctcccggttccaagtcccatcgtgctcctcttccaatgccacactgcctctgagcccatccttgggaccctactctgtgccaggttcctgtcccttcctccgtcacagcatggtcattccaggatatggggacaaaccactccttcccagccagggtgcctttgagccttctcattccgaggtctgcgtttgcatccctgtcgtgttctccctcgaggggtccttccccagcctgtgggggcctgggtctgttctgagctgattcccttttctccagttctctgctgggatgaagaaagttggacactcagtgggaccagctgcaggtggtttcactgtgtacacagcagtgtccccatcatgcctctcaatggggcctgcaagcctgggaacttgggcatcgttgggccagcaggatgagcagcaaagggtctgaggacagggtggcatgtctgcttgtgtgctcatgaagacatgcccacgccatggagccaggggcttacagagaggggcagtgacttccagagtcccatccgtcagtgaggggactgggctgcgggatgggtgaggatcttacagctcccaggttcggaaatctaccctctaggcctggaggcctctctcgcagagcatggaaggcaggagaggtgggctggcctagggcaggagctccacttctctctgcctctggctatgggaaggagcaggcggttggaaatcctgtgacagcagagatcttctggatttttgcctggacccttctgcaagcctggagactggacctgccacatgttccaagtctgtctgcctaggtcactgctgccacttctcctcccactaacagacctttcttgaagacccactaggtccagacactgccgggacttgcaggtatggggggtagaaggagaggcagataagctgcctggggggctgttagctaatgggtacaaggacaccccctcccgagaagagaagccacagatgagtgggccagcgaggccagtcttcaatgtccactaattcactctaagcatttggccaaaaaaaggagagagaaataactgaaattgttcaggtggctccatcgtctattctgtggtcccctccatgagcctttgccccagggtgggtgcaggtgcgagtgtcacctgcagctgcctcagtcattcagagttccagagccttctgtggtggagcatcctgctgcttggaggatgagtctgaagtttaaaaatgggccttttctgagcccccctgatgagcagtcagtgcttctgggcccagctaaggaagccatctgttcccagcagaggagagctgctgcgctgacctgcagaggttggtggtcccagcacagagctgtgcccatgggcttgttagtatatgttttctctgtcctaatttaaaagtacattgcaaacatcatgaaacttgatccctgaaagcttcagcctgcatctcctaagagttagggcattgtcctacacattggcccagtatcacagccaagacgagaagtcatttcccagcgatgtctgctatctaatctgtattcaaatccccccaattgtctcccaggtaacttatgtgtctggttttggaatcagcatccagtcacggtgcacacattgcattttctaactatgtttttaaaacctctttgaatgctgaaaggtcttccctcagctcactttgagtttttaaatgacattgtttttgaggccctaggcctgctgtctttttgaagccccacattctgaatttgtcagattgtttgctcatggtgtcgcataaccacttcttctatcccctgtactttcaaggataatttaggctacatgagattttgccttttgtgctgacttgacagcttcacttctgcctaagatgcgcctccactgtcacctgtaccaagtgccaaaacagcagaggggccagttagagcaagagctctgggggggcccggaaagtctccctggagaaggccgtaatatctgggccttggaaggaaggacacagggctctggaaggaggaggctgcatgcctgaaggctgggccttcgaccctggggatgggccacagggcaccaaacacatcatatgtctctctctttctattttggggtcccagggttttcatttcctggagacccgtggtctgtgtgcactggagcagagccaggctctcagttgcagcagggaaaagcctacatggggaactgcctcccgcaagctgtggtgtgagaagagccctggctggcagcaggagctgtgaagtttcatcccagccgggtgcatttagtagctgcctgaccatcttcctcccaggccctcagtttcttcatctgtagaatgagcagataggggccacagcagggattttcacacatcaaaggaggcagcctctgctctagttgatgtgaggatgagggggcggcctagaccccctgctgcccaggccgttgaggcaacactgggttcctggcttgacagctgtgggctggctgcccttgccagctcagacggctggcgagttttcagcttccctaagggactggcatagggttttgtggggtcaatgccaggaacctgggggaaactggatgcgttttatcctaagaagttcatccctcctgctcttactgtttccggccctggaggagaatgagggaggagagggttttctatgactgtgttagcttttattattagcaagagggctccttttgtaatttgtgcatgaaattcatgtcatttcctgggagaggagagggccgactggagagggtggggggcacactggggaagcaggcagaggtttccttcccttgtaggggggtggggagagtggggagagggggtgctatccagttcgcctgatgagggctctcgaaccagccgttttgggttgtgttaaaggtgagaccttcctccattaatgtacaatctcgaactaactgctaataaagtggggt

SEQ ID NO: 102607 - DNA, 8145 bp, Homo sapiens
  misc_feature (4477)..(4477): n is a, c, g, or t
gcggccgcgattcggggaggtaggcgctgggccgaggaggtgcagccgtgttaaggagaggacattcgagagggcgtggcgaagtgaagaggaacctcacgccactgcctggagctccgagtctcgctctgtcgcccaggctgcagtgcagtgacgtgatctcggctcactgcaccctccgcctcccaggttcaagtgattcccctgcctcagcctcctgggtagctgggactacagccttagccccgtgggccccacggagtgagcggcatgcagcacccccgggcctgtccagtgtcctctggcctgctgccctgcacccccagaaggccctgacgccctggggcacttctgctctgcacaggaccacgcgggggtttgccatggtgacataaaggggcgcggaggaaggaaggagcgtgaccagcctgtggactgcgcccctggctgggaggaaggactgggggcccagatcctccactcccagtgccccacaagggcgtcgcttcctaagtctctgtgaatttgttggtcagtggacgattctcgtgtctcctcctgtgtggggccttggggtagccagggcaggccgggcctccggtggccaaggtctcggaggccaggatgcctgccctggcatgcctccggaggctgtgtcggcacgtgtccccgcaggctgtccttttcctgctgttcatcttctgcctgttcagcgttttcatctcggcctactacctatatggctggaagcgaggcctggagccctcggcggatgcccccgagcctgactgcggggacccgccgcctgtggcccccagtcgcctgctgccactcaagcctgtgcaggcagccaccccttcccgcacagacccgttggtgctggtctttgtggagagcctctactcgcaactgggccaggaggtggtggccatcctggagtccagccgcttcaaataccgcacagagattgcgccgggcaagggtgacatgcccacgctcactgacaagggccgtggccgcttcgccctcatcatctatgagaacatcctcaagtatgtcaacctggacgcctggaaccgggagctgctggacaagtactgtgtggcctacggcgtgggcatcattggcttcttcaaggccaatgagaacagcctgctgagtgcgcagctcaagggcttccccctgttcctgcactcaaacctgggcctgaaggactgcagcatcaaccccaagtccccgctgctctacgtgacgcgacctagcgaggtggagaaaggtgtgctccccggcgaggactggacggttttccagtcaaatcactccacctatgagccagtgctgctggccaagacgcgctcgtctgagtccatcccacacctgggcgcagacgccggcctgcatgctgcactgcacgccactgtggtccaggacctgggcctgcacgacggcatccagcgcgtgctgtttggcaacaacctgaacttctggctgcacaagcttgtcttcgtggatgccgtggccttcctcacggggaagcgcctctccctgccattggaccgctacatcctggtggacattgatgacatcttcgtgggcaaggagggcacacgcatgaaggtggaggacgtgaaggccctgtttgacacacagaacgaactacgcgcacacatcccaaacttcaccttcaacctgggctactcagggaaattcttccacacaggtaccaatgctgaggacgctggggatgatctgctgctgtcgtatgtgaaggagttctggtggttcccccacatgtggagccacatgcagccccaccttttccacaaccagtccgtgttggccgagcagatggccttgaacaagaagttcgctgtcgagcatggcattcccacagacatggggtatgcagtggcgccccaccactcgggcgtgtaccccgtgcacgtgcagctgtacgaggcttggaagcaggtgtggagcatccgcgtgaccagcacggaggagtacccccacctgaagccagcccgctaccgccgtggcttcatccacaatggcatcatggttctcccacggcagacctgcggcctcttcacacacaccatcttctacaacgagtaccctggcggctccagtgagctggacaagatcatcaacgggggcgagctcttcctcaccgtgctcctcaatcctatcagcatcttcatgacgcacctgtccaactatgggaatgaccgcctgggcctgtacaccttcaagcacctggtgcgcttcctgcactcctggaccaacctccggctgcagacactgccccctgtgcagttggcgcagaagtacttccagatcttctccgaggagaaggacccgctctggcaggacccctgcgaggacaaacgtcacaaagacatctggtccaaggagaagacgtgtgaccgcttcccaaagctcctcatcatcggcccccagaaaacaggcaccactgccctctacctgttcctgggcatgcaccctgacctaagcagcaactaccccagctctgagacctttgaggagatccagttttttaatggccacaactatcacaaaggcatcgactggtacatggagttcttccccatcccttccaacaccacctccgacttctactttgagaaaagcgccaactactttgattcagaagtggcgccccggcgggcagcagccctcttgcccaaagccaaggtcctgaccatcctcatcaaccccgcggaccgggcctattcctggtaccagcaccagcgagcccatgacgacccagtggccctaaagtacaccttccatgaggtgattaccgccggctctgacgcatcctcgaagctgcgtgccctccagaaccgctgcctggtccctggctggtacgccacccacatcgagcgctggctcagtgcctatcacgccaaccagattctggtcttggatggcaaactgcttcgcacagaacctgccaaagtgatggacatggtgcagaagttccttggggtgaccaacaccattgactaccacaaaaccttggcgtttgatccaaagaaaggattttggtgccaactgcttgaaggaggaaaaaccaagtgtctgggcaaaagcaagggccggaaatatcccgagatggacttggattcccgagccttcctgaaggactattaccgggaccacaacatcgagctctccaagctgctgtataagatgggccagacacttcccacttggctacgagaggacctccagaacaccaggtagccgtggccaccacagccagactgaacgtttgtgaaagctgggacatcccaccacacgctgagccagacctgcagagtgggaagctggaccagggcagctgcgcacttatgagcaatactctgtggaggtctggtggggctgggggagcacccaggcggatctgcaagcacctcggagcacccaccgctgggtctgcggcctaagggacctccctcgccagcagaggtccattccgttcccagctgctcctggggaggccgcttcctggtaggagggagtccacgagactcttttctgtccctcactgtgttccgccgactgtcccctctcgtcacccatcactccctgcttccgcagggcgcccctcagtattcgctgccatatgtccctgtcctccaggctgtaggggaggagagcctggccgggggagacagactggacatttccctgtttcgagccaggctcttccaaggggccagctgggtccccggagtcagtcctaggctggatgggagggtggccccctcaagaggactcccagcctccacatctggttcctaccttcacatctcaccctcccgttctggggaagaatttctggttcctacagtatccactccatcctcaaggcttcccgcagggccttggggcactgccttgccatcgggcccagttctccgggccccacctgcacccctttcttccccctgggatatgatgtgtggtgtttcctgtggtaaaagactgaggcaggccaggggtctgccagtaacatgttcccatgtacagacacggtccccacaccctcccagcctcaggcccaggcagacatgggcgagctggtgagactgccagccacggctttgcttagccacctgtggccgagggctctcagagacccccttaacctcccaaatactaagaagctaaaatattttaatattttgtttttttttttcttggtgccagagtttataccctgggtgctggggtcgcactgtgttatatatatatatatatatatatataatgtgtatatatatatattctattttttttggttgggttcgtttttaattcagtcctacaaaatggtggtaagccccagtctcaggggtcaccctgtcttagagctagagatgaggtggcagggagggaggctgtgtcctcagtggcctggggctgagcagaccttaggaagggnccctccccagtgccgtggctgctctggggctaccccaggtgaacagaggtggtgagatgcgcagggaagaccagctctctccaggacatcgggctgcgtgaagtccagtgaccctgaggggattttggccaaaggaaacagccagggctgggctaggagagctggggtcaaaagctgccccacccactctccctcacatggtgctaggctgggagctgccctgagagctgggatgcccaccaaggcccacagaactgtctccaggcccttgtagacagtgggatctctgggctgatttctggttggggtctgctcctaccccaccccatttaacaatgtgaagtgactgaggctggggtgcctctccctggccccctccaactgccaaattctgcttccctctgaaccccaggaaatactttctggagaggcttgtcttgttcagaagactctagcatcttggggctggaaggtcctttgacgggtatgaaacaggtccagaaaggggaggtggcctgcttggccgacgtcatggagccagctgggagcagggctgagcgttgaacccgaggctcccggttccaagtcccatcgtgctcctcttccaatgccacactgcctctgagcccatccttgggaccctactctgtgccaggttcctgtcccttcctccgtcacagcatggtcattccaggatatggggacaaaccactccttcccagccagggtgcctttgagccttctcattccgaggtctgcgtttgcatccctgtcgtgttctccctcgaggggtccttccccagcctgtgggggcctgggtctgttctgagctgattcccttttctccagttctctgctgggatgaagaaagttggacactcagtgggaccagctgcaggtggtttcactgtgtacacagcagtgtccccatcatgcctctcaatggggcctgcaagcctgggaacttgggcatcgttgggccagcaggatgagcagcaaagggtctgaggacagggtggcatgtctgcttgtgtgctcatgaagacatgcccacgccatggagccaggggcttacagagaggggcagtgacttccagagtcccatccgtcagtgaggggactgggctgcgggatgggtgaggatcttacagctcccaggttcggaaatctaccctctaggcctggaggcctctctcgcagagcatggaaggcaggagaggtgggctggcctagggcaggagctccacttctctctgcctctggctatgggaaggagcaggcggttggaaatcctgtgacagcagagatcttctggatttttgcctggacccttctgcaagcctggagactggacctgccacatgttccaagtctgtctgcctaggtcactgctgccacttctcctcccactaacagacctttcttgaagacccactaggtccagacactgccgggacttgcaggtatggggggtagaaggagaggcagataagctgcctggggggctgttagctaatgggtacaaggacaccccctcccgagaagagaagccacagatgagtgggccagcgaggccagtcttcaatgtccactaattcactctaagcatttggccaaaaaaaggagagagaaataactgaaattgttcaggtggctccatcgtctattctgtggtcccctccatgagcctttgccccagggtgggtgcaggtgcgagtgtcacctgcagctgcctcagtcattcagagttccagagccttctgtggtggagcatcctgctgcttggaggatgagtctgaagtttaaaaatgggccttttctgagcccccctgatgagcagtcagtgcttctgggcccagctaaggaagccatctgttcccagcagaggagagctgctgcgctgacctgcagaggttggtggtcccagcacagagctgtgcccatgggcttgttagtgggaaaagcaaatacaacaatgttttaccaaacatttaattatgaatgcccactccccagcatctagatctaaaattattaacattttgccacattctttttctctctctgtgtatgtatatgttttctctgtcctaatttaaaagtacattgcaaacatcatgaaacttgatccctgaaagcttcagcctgcatctcctaagagttagggcattgtcctacacattggcccagtatcacagccaagacgagaagtcatttcccagcgatgtctgctatctaatctgtattcaaatccccccaattgtctcccaggtaacttatgtgtctggttttggaatcagcatccagtcacggtgcacacattgcattttctaactatgtttttaaaacctctttgaatgctgaaaggtcttccctcagctcactttgagtttttaaatgacattgtttttgaggccctaggcctgctgtctttttgaagccccacattctgaatttgtcagattgtttgctcatggtgtcgcataaccacttcttctatcccctgtactttcaaggataatttaggctacatgagattttgccttttgtgctgacttgacagcttcacttctgcctaagatgcgcctccactgtcacctgtaccaagtgccaaaacagcagaggggccagttagagcaagagctctgggggggcccggaaagtctccctggagaaggccgtaatatctgggccttggaaggaaggacacagggctctggaaggaggaggctgcatgcctgaaggctgggccttcgaccctggggatgggccacagggcaccaaacacatcatatgtctctctctttctattttggggtcccagggttttcatttcctggagacccgtggtctgtgtgcactggagcagagccaggctctcagttgcagcagggaaaagcctacatggggaactgcctcccgcaagctgtggtgtgagaagagccctggctggcagcaggagctgtgaagtttcatcccagccgggtgcatttagtagctgcctgaccatcttcctcccaggccctcagtttcttcatctgtagaatgagcagataggggccacagcagggattttcacacatcaaaggaggcagcctctgctctagttgatgtgaggatgagggggcggcctagaccccctgctgcccaggccgttgaggcaacactgggttcctggcttgacagctgtgggctggctgcccttgccagctcagacggctggcgagttttcagcttccctaagggactggcatagggttttgtggggtcaatgccaggaacctgggggaaactggatgcgttttatcctaagaagttcatccctcctgctcttactgtttccggccctggaggagaatgagggaggagagggttttctatgactgtgttagcttttattattagcaagagggctccttttgtaatttgtgcatgaaattcatgtcatttcctgggagaggagagggccgactggagagggtggggggcacactggggaagcaggcagaggtttccttcccttgtaggggggtggggagagtggggagagggggtgctatccagttcgcctgatgagggctctcgaaccagccgttttgggttgtgttaaaggtgagaccttcctccattaatgtacaatctcgaactaactgctaataaagtggggt

SEQ ID NO: 102608 - DNA, 7985 bp, Homo sapiens
  misc_feature (4317)..(4317): n is a, c, g, or t
cacggcccgggggacccaggcgtcccgctcctcgccgggagcgccccttcccccgagtggcgccccagccgtggcagccttagccccgtgggccccacggagtgagcggcatgcagcacccccgggcctgtccagtgtcctctggcctgctgccctgcacccccagaaggccctgacgccctggggcacttctgctctgcacaggaccacgcgggggtttgccatggtgacataaaggggcgcggaggaaggaaggagcgtgaccagcctgtggactgcgcccctggctgggaggaaggactgggggcccagatcctccactcccagtgccccacaagggcgtcgcttcctaagtctctgtgaatttgttggtcagtggacgattctcgtgtctcctcctgtgtggggccttggggtagccagggcaggccgggcctccggtggccaaggtctcggaggccaggatgcctgccctggcatgcctccggaggctgtgtcggcacgtgtccccgcaggctgtccttttcctgctgttcatcttctgcctgttcagcgttttcatctcggcctactacctatatggctggaagcgaggcctggagccctcggcggatgcccccgagcctgactgcggggacccgccgcctgtggcccccagtcgcctgctgccactcaagcctgtgcaggcagccaccccttcccgcacagacccgttggtgctggtctttgtggagagcctctactcgcaactgggccaggaggtggtggccatcctggagtccagccgcttcaaataccgcacagagattgcgccgggcaagggtgacatgcccacgctcactgacaagggccgtggccgcttcgccctcatcatctatgagaacatcctcaagtatgtcaacctggacgcctggaaccgggagctgctggacaagtactgtgtggcctacggcgtgggcatcattggcttcttcaaggccaatgagaacagcctgctgagtgcgcagctcaagggcttccccctgttcctgcactcaaacctgggcctgaaggactgcagcatcaaccccaagtccccgctgctctacgtgacgcgacctagcgaggtggagaaaggtgtgctccccggcgaggactggacggttttccagtcaaatcactccacctatgagccagtgctgctggccaagacgcgctcgtctgagtccatcccacacctgggcgcagacgccggcctgcatgctgcactgcacgccactgtggtccaggacctgggcctgcacgacggcatccagcgcgtgctgtttggcaacaacctgaacttctggctgcacaagcttgtcttcgtggatgccgtggccttcctcacggggaagcgcctctccctgccattggaccgctacatcctggtggacattgatgacatcttcgtgggcaaggagggcacacgcatgaaggtggaggacgtgaaggccctgtttgacacacagaacgaactacgcgcacacatcccaaacttcaccttcaacctgggctactcagggaaattcttccacacaggtaccaatgctgaggacgctggggatgatctgctgctgtcgtatgtgaaggagttctggtggttcccccacatgtggagccacatgcagccccaccttttccacaaccagtccgtgttggccgagcagatggccttgaacaagaagttcgctgtcgagcatggcattcccacagacatggggtatgcagtggcgccccaccactcgggcgtgtaccccgtgcacgtgcagctgtacgaggcttggaagcaggtgtggagcatccgcgtgaccagcacggaggagtacccccacctgaagccagcccgctaccgccgtggcttcatccacaatggcatcatggttctcccacggcagacctgcggcctcttcacacacaccatcttctacaacgagtaccctggcggctccagtgagctggacaagatcatcaacgggggcgagctcttcctcaccgtgctcctcaatcctatcagcatcttcatgacgcacctgtccaactatgggaatgaccgcctgggcctgtacaccttcaagcacctggtgcgcttcctgcactcctggaccaacctccggctgcagacactgccccctgtgcagttggcgcagaagtacttccagatcttctccgaggagaaggacccgctctggcaggacccctgcgaggacaaacgtcacaaagacatctggtccaaggagaagacgtgtgaccgcttcccaaagctcctcatcatcggcccccagaaaacaggcaccactgccctctacctgttcctgggcatgcaccctgacctaagcagcaactaccccagctctgagacctttgaggagatccagttttttaatggccacaactatcacaaaggcatcgactggtacatggagttcttccccatcccttccaacaccacctccgacttctactttgagaaaagcgccaactactttgattcagaagtggcgccccggcgggcagcagccctcttgcccaaagccaaggtcctgaccatcctcatcaaccccgcggaccgggcctattcctggtaccagcaccagcgagcccatgacgacccagtggccctaaagtacaccttccatgaggtgattaccgccggctctgacgcatcctcgaagctgcgtgccctccagaaccgctgcctggtccctggctggtacgccacccacatcgagcgctggctcagtgcctatcacgccaaccagattctggtcttggatggcaaactgcttcgcacagaacctgccaaagtgatggacatggtgcagaagttccttggggtgaccaacaccattgactaccacaaaaccttggcgtttgatccaaagaaaggattttggtgccaactgcttgaaggaggaaaaaccaagtgtctgggcaaaagcaagggccggaaatatcccgagatggacttggattcccgagccttcctgaaggactattaccgggaccacaacatcgagctctccaagctgctgtataagatgggccagacacttcccacttggctacgagaggacctccagaacaccaggtagccgtggccaccacagccagactgaacgtttgtgaaagctgggacatcccaccacacgctgagccagacctgcagagtgggaagctggaccagggcagctgcgcacttatgagcaatactctgtggaggtctggtggggctgggggagcacccaggcggatctgcaagcacctcggagcacccaccgctgggtctgcggcctaagggacctccctcgccagcagaggtccattccgttcccagctgctcctggggaggccgcttcctggtaggagggagtccacgagactcttttctgtccctcactgtgttccgccgactgtcccctctcgtcacccatcactccctgcttccgcagggcgcccctcagtattcgctgccatatgtccctgtcctccaggctgtaggggaggagagcctggccgggggagacagactggacatttccctgtttcgagccaggctcttccaaggggccagctgggtccccggagtcagtcctaggctggatgggagggtggccccctcaagaggactcccagcctccacatctggttcctaccttcacatctcaccctcccgttctggggaagaatttctggttcctacagtatccactccatcctcaaggcttcccgcagggccttggggcactgccttgccatcgggcccagttctccgggccccacctgcacccctttcttccccctgggatatgatgtgtggtgtttcctgtggtaaaagactgaggcaggccaggggtctgccagtaacatgttcccatgtacagacacggtccccacaccctcccagcctcaggcccaggcagacatgggcgagctggtgagactgccagccacggctttgcttagccacctgtggccgagggctctcagagacccccttaacctcccaaatactaagaagctaaaatattttaatattttgtttttttttttcttggtgccagagtttataccctgggtgctggggtcgcactgtgttatatatatatatatatatatatataatgtgtatatatatatattctattttttttggttgggttcgtttttaattcagtcctacaaaatggtggtaagccccagtctcaggggtcaccctgtcttagagctagagatgaggtggcagggagggaggctgtgtcctcagtggcctggggctgagcagaccttaggaagggnccctccccagtgccgtggctgctctggggctaccccaggtgaacagaggtggtgagatgcgcagggaagaccagctctctccaggacatcgggctgcgtgaagtccagtgaccctgaggggattttggccaaaggaaacagccagggctgggctaggagagctggggtcaaaagctgccccacccactctccctcacatggtgctaggctgggagctgccctgagagctgggatgcccaccaaggcccacagaactgtctccaggcccttgtagacagtgggatctctgggctgatttctggttggggtctgctcctaccccaccccatttaacaatgtgaagtgactgaggctggggtgcctctccctggccccctccaactgccaaattctgcttccctctgaaccccaggaaatactttctggagaggcttgtcttgttcagaagactctagcatcttggggctggaaggtcctttgacgggtatgaaacaggtccagaaaggggaggtggcctgcttggccgacgtcatggagccagctgggagcagggctgagcgttgaacccgaggctcccggttccaagtcccatcgtgctcctcttccaatgccacactgcctctgagcccatccttgggaccctactctgtgccaggttcctgtcccttcctccgtcacagcatggtcattccaggatatggggacaaaccactccttcccagccagggtgcctttgagccttctcattccgaggtctgcgtttgcatccctgtcgtgttctccctcgaggggtccttccccagcctgtgggggcctgggtctgttctgagctgattcccttttctccagttctctgctgggatgaagaaagttggacactcagtgggaccagctgcaggtggtttcactgtgtacacagcagtgtccccatcatgcctctcaatggggcctgcaagcctgggaacttgggcatcgttgggccagcaggatgagcagcaaagggtctgaggacagggtggcatgtctgcttgtgtgctcatgaagacatgcccacgccatggagccaggggcttacagagaggggcagtgacttccagagtcccatccgtcagtgaggggactgggctgcgggatgggtgaggatcttacagctcccaggttcggaaatctaccctctaggcctggaggcctctctcgcagagcatggaaggcaggagaggtgggctggcctagggcaggagctccacttctctctgcctctggctatgggaaggagcaggcggttggaaatcctgtgacagcagagatcttctggatttttgcctggacccttctgcaagcctggagactggacctgccacatgttccaagtctgtctgcctaggtcactgctgccacttctcctcccactaacagacctttcttgaagacccactaggtccagacactgccgggacttgcaggtatggggggtagaaggagaggcagataagctgcctggggggctgttagctaatgggtacaaggacaccccctcccgagaagagaagccacagatgagtgggccagcgaggccagtcttcaatgtccactaattcactctaagcatttggccaaaaaaaggagagagaaataactgaaattgttcaggtggctccatcgtctattctgtggtcccctccatgagcctttgccccagggtgggtgcaggtgcgagtgtcacctgcagctgcctcagtcattcagagttccagagccttctgtggtggagcatcctgctgcttggaggatgagtctgaagtttaaaaatgggccttttctgagcccccctgatgagcagtcagtgcttctgggcccagctaaggaagccatctgttcccagcagaggagagctgctgcgctgacctgcagaggttggtggtcccagcacagagctgtgcccatgggcttgttagtgggaaaagcaaatacaacaatgttttaccaaacatttaattatgaatgcccactccccagcatctagatctaaaattattaacattttgccacattctttttctctctctgtgtatgtatatgttttctctgtcctaatttaaaagtacattgcaaacatcatgaaacttgatccctgaaagcttcagcctgcatctcctaagagttagggcattgtcctacacattggcccagtatcacagccaagacgagaagtcatttcccagcgatgtctgctatctaatctgtattcaaatccccccaattgtctcccaggtaacttatgtgtctggttttggaatcagcatccagtcacggtgcacacattgcattttctaactatgtttttaaaacctctttgaatgctgaaaggtcttccctcagctcactttgagtttttaaatgacattgtttttgaggccctaggcctgctgtctttttgaagccccacattctgaatttgtcagattgtttgctcatggtgtcgcataaccacttcttctatcccctgtactttcaaggataatttaggctacatgagattttgccttttgtgctgacttgacagcttcacttctgcctaagatgcgcctccactgtcacctgtaccaagtgccaaaacagcagaggggccagttagagcaagagctctgggggggcccggaaagtctccctggagaaggccgtaatatctgggccttggaaggaaggacacagggctctggaaggaggaggctgcatgcctgaaggctgggccttcgaccctggggatgggccacagggcaccaaacacatcatatgtctctctctttctattttggggtcccagggttttcatttcctggagacccgtggtctgtgtgcactggagcagagccaggctctcagttgcagcagggaaaagcctacatggggaactgcctcccgcaagctgtggtgtgagaagagccctggctggcagcaggagctgtgaagtttcatcccagccgggtgcatttagtagctgcctgaccatcttcctcccaggccctcagtttcttcatctgtagaatgagcagataggggccacagcagggattttcacacatcaaaggaggcagcctctgctctagttgatgtgaggatgagggggcggcctagaccccctgctgcccaggccgttgaggcaacactgggttcctggcttgacagctgtgggctggctgcccttgccagctcagacggctggcgagttttcagcttccctaagggactggcatagggttttgtggggtcaatgccaggaacctgggggaaactggatgcgttttatcctaagaagttcatccctcctgctcttactgtttccggccctggaggagaatgagggaggagagggttttctatgactgtgttagcttttattattagcaagagggctccttttgtaatttgtgcatgaaattcatgtcatttcctgggagaggagagggccgactggagagggtggggggcacactggggaagcaggcagaggtttccttcccttgtaggggggtggggagagtggggagagggggtgctatccagttcgcctgatgagggctctcgaaccagccgttttgggttgtgttaaaggtgagaccttcctccattaatgtacaatctcgaactaactgctaataaagtggggt

SEQ ID NO: 102609 - DNA, 8002 bp, Homo sapiens
  misc_feature (4359)..(4359): n is a, c, g, or t
gcggccgcgattcggggaggtaggcgctgggccgaggaggtgcagccgtgttaaggagaggacattcgagagggcgtggcgaagtgaagaggaacctcacgccactgcctggagctccgccttagccccgtgggccccacggagtgagcggcatgcagcacccccgggcctgtccagtgtcctctggcctgctgccctgcacccccagaaggccctgacgccctggggcacttctgctctgcacaggaccacgcgggggtttgccatggtgacataaaggggcgcggaggaaggaaggagcgtgaccagcctgtggactgcgcccctggctgggaggaaggactgggggcccagatcctccactcccagtgccccacaagggcgtcgcttcctaagtctctgtgaatttgttggtcagtggacgattctcgtgtctcctcctgtgtggggccttggggtagccagggcaggccgggcctccggtggccaaggtctcggaggccaggatgcctgccctggcatgcctccggaggctgtgtcggcacgtgtccccgcaggctgtccttttcctgctgttcatcttctgcctgttcagcgttttcatctcggcctactacctatatggctggaagcgaggcctggagccctcggcggatgcccccgagcctgactgcggggacccgccgcctgtggcccccagtcgcctgctgccactcaagcctgtgcaggcagccaccccttcccgcacagacccgttggtgctggtctttgtggagagcctctactcgcaactgggccaggaggtggtggccatcctggagtccagccgcttcaaataccgcacagagattgcgccgggcaagggtgacatgcccacgctcactgacaagggccgtggccgcttcgccctcatcatctatgagaacatcctcaagtatgtcaacctggacgcctggaaccgggagctgctggacaagtactgtgtggcctacggcgtgggcatcattggcttcttcaaggccaatgagaacagcctgctgagtgcgcagctcaagggcttccccctgttcctgcactcaaacctgggcctgaaggactgcagcatcaaccccaagtccccgctgctctacgtgacgcgacctagcgaggtggagaaaggtgtgctccccggcgaggactggacggttttccagtcaaatcactccacctatgagccagtgctgctggccaagacgcgctcgtctgagtccatcccacacctgggcgcagacgccggcctgcatgctgcactgcacgccactgtggtccaggacctgggcctgcacgacggcatccagcgcgtgctgtttggcaacaacctgaacttctggctgcacaagcttgtcttcgtggatgccgtggccttcctcacggggaagcgcctctccctgccattggaccgctacatcctggtggacattgatgacatcttcgtgggcaaggagggcacacgcatgaaggtggaggacgtgaaggccctgtttgacacacagaacgaactacgcgcacacatcccaaacttcaccttcaacctgggctactcagggaaattcttccacacaggtaccaatgctgaggacgctggggatgatctgctgctgtcgtatgtgaaggagttctggtggttcccccacatgtggagccacatgcagccccaccttttccacaaccagtccgtgttggccgagcagatggccttgaacaagaagttcgctgtcgagcatggcattcccacagacatggggtatgcagtggcgccccaccactcgggcgtgtaccccgtgcacgtgcagctgtacgaggcttggaagcaggtgtggagcatccgcgtgaccagcacggaggagtacccccacctgaagccagcccgctaccgccgtggcttcatccacaatggcatcatggttctcccacggcagacctgcggcctcttcacacacaccatcttctacaacgagtaccctggcggctccagtgagctggacaagatcatcaacgggggcgagctcttcctcaccgtgctcctcaatcctatcagcatcttcatgacgcacctgtccaactatgggaatgaccgcctgggcctgtacaccttcaagcacctggtgcgcttcctgcactcctggaccaacctccggctgcagacactgccccctgtgcagttggcgcagaagtacttccagatcttctccgaggagaaggacccgctctggcaggacccctgcgaggacaaacgtcacaaagacatctggtccaaggagaagacgtgtgaccgcttcccaaagctcctcatcatcggcccccagaaaacaggcaccactgccctctacctgttcctgggcatgcaccctgacctaagcagcaactaccccagctctgagacctttgaggagatccagttttttaatggccacaactatcacaaaggcatcgactggtacatggagttcttccccatcccttccaacaccacctccgacttctactttgagaaaagcgccaactactttgattcagaagtggcgccccggcgggcagcagccctcttgcccaaagccaaggtcctgaccatcctcatcaaccccgcggaccgggcctattcctggtaccagcaccagcgagcccatgacgacccagtggccctaaagtacaccttccatgaggtgattaccgccggctctgacgcatcctcgaagctgcgtgccctccagaaccgctgcctggtccctggctggtacgccacccacatcgagcgctggctcagtgcctatcacgccaaccagattctggtcttggatggcaaactgcttcgcacagaacctgccaaagtgatggacatggtgcagaagttccttggggtgaccaacaccattgactaccacaaaaccttggcgtttgatccaaagaaaggattttggtgccaactgcttgaaggaggaaaaaccaagtgtctgggcaaaagcaagggccggaaatatcccgagatggacttggattcccgagccttcctgaaggactattaccgggaccacaacatcgagctctccaagctgctgtataagatgggccagacacttcccacttggctacgagaggacctccagaacaccaggtagccgtggccaccacagccagactgaacgtttgtgaaagctgggacatcccaccacacgctgagccagacctgcagagtgggaagctggaccagggcagctgcgcacttatgagcaatactctgtggaggtctggtggggctgggggagcacccaggcggatctgcaagcacctcggagcacccaccgctgggtctgcggcctaagggacctccctcgccagcagaggtccattccgttcccagctgctcctggggaggccgcttcctggtaggagggagtccacgagactcttttctgtccctcactgtgttccgccgactgtcccctctcgtcacccatcactccctgcttccgcagggcgcccctcagtattcgctgccatatgtccctgtcctccaggctgtaggggaggagagcctggccgggggagacagactggacatttccctgtttcgagccaggctcttccaaggggccagctgggtccccggagtcagtcctaggctggatgggagggtggccccctcaagaggactcccagcctccacatctggttcctaccttcacatctcaccctcccgttctggggaagaatttctggttcctacagtatccactccatcctcaaggcttcccgcagggccttggggcactgccttgccatcgggcccagttctccgggccccacctgcacccctttcttccccctgggatatgatgtgtggtgtttcctgtggtaaaagactgaggcaggccaggggtctgccagtaacatgttcccatgtacagacacggtccccacaccctcccagcctcaggcccaggcagacatgggcgagctggtgagactgccagccacggctttgcttagccacctgtggccgagggctctcagagacccccttaacctcccaaatactaagaagctaaaatattttaatattttgtttttttttttcttggtgccagagtttataccctgggtgctggggtcgcactgtgttatatatatatatatatatatatataatgtgtatatatatatattctattttttttggttgggttcgtttttaattcagtcctacaaaatggtggtaagccccagtctcaggggtcaccctgtcttagagctagagatgaggtggcagggagggaggctgtgtcctcagtggcctggggctgagcagaccttaggaagggnccctccccagtgccgtggctgctctggggctaccccaggtgaacagaggtggtgagatgcgcagggaagaccagctctctccaggacatcgggctgcgtgaagtccagtgaccctgaggggattttggccaaaggaaacagccagggctgggctaggagagctggggtcaaaagctgccccacccactctccctcacatggtgctaggctgggagctgccctgagagctgggatgcccaccaaggcccacagaactgtctccaggcccttgtagacagtgggatctctgggctgatttctggttggggtctgctcctaccccaccccatttaacaatgtgaagtgactgaggctggggtgcctctccctggccccctccaactgccaaattctgcttccctctgaaccccaggaaatactttctggagaggcttgtcttgttcagaagactctagcatcttggggctggaaggtcctttgacgggtatgaaacaggtccagaaaggggaggtggcctgcttggccgacgtcatggagccagctgggagcagggctgagcgttgaacccgaggctcccggttccaagtcccatcgtgctcctcttccaatgccacactgcctctgagcccatccttgggaccctactctgtgccaggttcctgtcccttcctccgtcacagcatggtcattccaggatatggggacaaaccactccttcccagccagggtgcctttgagccttctcattccgaggtctgcgtttgcatccctgtcgtgttctccctcgaggggtccttccccagcctgtgggggcctgggtctgttctgagctgattcccttttctccagttctctgctgggatgaagaaagttggacactcagtgggaccagctgcaggtggtttcactgtgtacacagcagtgtccccatcatgcctctcaatggggcctgcaagcctgggaacttgggcatcgttgggccagcaggatgagcagcaaagggtctgaggacagggtggcatgtctgcttgtgtgctcatgaagacatgcccacgccatggagccaggggcttacagagaggggcagtgacttccagagtcccatccgtcagtgaggggactgggctgcgggatgggtgaggatcttacagctcccaggttcggaaatctaccctctaggcctggaggcctctctcgcagagcatggaaggcaggagaggtgggctggcctagggcaggagctccacttctctctgcctctggctatgggaaggagcaggcggttggaaatcctgtgacagcagagatcttctggatttttgcctggacccttctgcaagcctggagactggacctgccacatgttccaagtctgtctgcctaggtcactgctgccacttctcctcccactaacagacctttcttgaagacccactaggtccagacactgccgggacttgcaggtatggggggtagaaggagaggcagataagctgcctggggggctgttagctaatgggtacaaggacaccccctcccgagaagagaagccacagatgagtgggccagcgaggccagtcttcaatgtccactaattcactctaagcatttggccaaaaaaaggagagagaaataactgaaattgttcaggtggctccatcgtctattctgtggtcccctccatgagcctttgccccagggtgggtgcaggtgcgagtgtcacctgcagctgcctcagtcattcagagttccagagccttctgtggtggagcatcctgctgcttggaggatgagtctgaagtttaaaaatgggccttttctgagcccccctgatgagcagtcagtgcttctgggcccagctaaggaagccatctgttcccagcagaggagagctgctgcgctgacctgcagaggttggtggtcccagcacagagctgtgcccatgggcttgttagtgggaaaagcaaatacaacaatgttttaccaaacatttaattatgaatgcccactccccagcatctagatctaaaattattaacattttgccacattctttttctctctctgtgtatgtatatgttttctctgtcctaatttaaaagtacattgcaaacatcatgaaacttgatccctgaaagcttcagcctgcatctcctaagagttagggcattgtcctacacattggcccagtatcacagccaagacgagaagtcatttcccagcgatgtctgctatctaatctgtattcaaatccccccaattgtctcccaggtaacttatgtgtctggttttggaatcagcatccagtcacggtgcacacattgcattttctaactatgtttttaaaacctctttgaatgctgaaaggtcttccctcagctcactttgagtttttaaatgacattgtttttgaggccctaggcctgctgtctttttgaagccccacattctgaatttgtcagattgtttgctcatggtgtcgcataaccacttcttctatcccctgtactttcaaggataatttaggctacatgagattttgccttttgtgctgacttgacagcttcacttctgcctaagatgcgcctccactgtcacctgtaccaagtgccaaaacagcagaggggccagttagagcaagagctctgggggggcccggaaagtctccctggagaaggccgtaatatctgggccttggaaggaaggacacagggctctggaaggaggaggctgcatgcctgaaggctgggccttcgaccctggggatgggccacagggcaccaaacacatcatatgtctctctctttctattttggggtcccagggttttcatttcctggagacccgtggtctgtgtgcactggagcagagccaggctctcagttgcagcagggaaaagcctacatggggaactgcctcccgcaagctgtggtgtgagaagagccctggctggcagcaggagctgtgaagtttcatcccagccgggtgcatttagtagctgcctgaccatcttcctcccaggccctcagtttcttcatctgtagaatgagcagataggggccacagcagggattttcacacatcaaaggaggcagcctctgctctagttgatgtgaggatgagggggcggcctagaccccctgctgcccaggccgttgaggcaacactgggttcctggcttgacagctgtgggctggctgcccttgccagctcagacggctggcgagttttcagcttccctaagggactggcatagggttttgtggggtcaatgccaggaacctgggggaaactggatgcgttttatcctaagaagttcatccctcctgctcttactgtttccggccctggaggagaatgagggaggagagggttttctatgactgtgttagcttttattattagcaagagggctccttttgtaatttgtgcatgaaattcatgtcatttcctgggagaggagagggccgactggagagggtggggggcacactggggaagcaggcagagggagagtggggagagggggtgctatccagttcgcctgatgagggctctcgaaccagccgttttgggttgtgttaaaggtgagaccttcctccattaatgtacaatctcgaactaactgctaataaagtggggt

SEQ ID NO: 102610 - DNA, 7627 bp, Homo sapiens
  misc_feature (4359)..(4359): n is a, c, g, or t
gcggccgcgattcggggaggtaggcgctgggccgaggaggtgcagccgtgttaaggagaggacattcgagagggcgtggcgaagtgaagaggaacctcacgccactgcctggagctccgccttagccccgtgggccccacggagtgagcggcatgcagcacccccgggcctgtccagtgtcctctggcctgctgccctgcacccccagaaggccctgacgccctggggcacttctgctctgcacaggaccacgcgggggtttgccatggtgacataaaggggcgcggaggaaggaaggagcgtgaccagcctgtggactgcgcccctggctgggaggaaggactgggggcccagatcctccactcccagtgccccacaagggcgtcgcttcctaagtctctgtgaatttgttggtcagtggacgattctcgtgtctcctcctgtgtggggccttggggtagccagggcaggccgggcctccggtggccaaggtctcggaggccaggatgcctgccctggcatgcctccggaggctgtgtcggcacgtgtccccgcaggctgtccttttcctgctgttcatcttctgcctgttcagcgttttcatctcggcctactacctatatggctggaagcgaggcctggagccctcggcggatgcccccgagcctgactgcggggacccgccgcctgtggcccccagtcgcctgctgccactcaagcctgtgcaggcagccaccccttcccgcacagacccgttggtgctggtctttgtggagagcctctactcgcaactgggccaggaggtggtggccatcctggagtccagccgcttcaaataccgcacagagattgcgccgggcaagggtgacatgcccacgctcactgacaagggccgtggccgcttcgccctcatcatctatgagaacatcctcaagtatgtcaacctggacgcctggaaccgggagctgctggacaagtactgtgtggcctacggcgtgggcatcattggcttcttcaaggccaatgagaacagcctgctgagtgcgcagctcaagggcttccccctgttcctgcactcaaacctgggcctgaaggactgcagcatcaaccccaagtccccgctgctctacgtgacgcgacctagcgaggtggagaaaggtgtgctccccggcgaggactggacggttttccagtcaaatcactccacctatgagccagtgctgctggccaagacgcgctcgtctgagtccatcccacacctgggcgcagacgccggcctgcatgctgcactgcacgccactgtggtccaggacctgggcctgcacgacggcatccagcgcgtgctgtttggcaacaacctgaacttctggctgcacaagcttgtcttcgtggatgccgtggccttcctcacggggaagcgcctctccctgccattggaccgctacatcctggtggacattgatgacatcttcgtgggcaaggagggcacacgcatgaaggtggaggacgtgaaggccctgtttgacacacagaacgaactacgcgcacacatcccaaacttcaccttcaacctgggctactcagggaaattcttccacacaggtaccaatgctgaggacgctggggatgatctgctgctgtcgtatgtgaaggagttctggtggttcccccacatgtggagccacatgcagccccaccttttccacaaccagtccgtgttggccgagcagatggccttgaacaagaagttcgctgtcgagcatggcattcccacagacatggggtatgcagtggcgccccaccactcgggcgtgtaccccgtgcacgtgcagctgtacgaggcttggaagcaggtgtggagcatccgcgtgaccagcacggaggagtacccccacctgaagccagcccgctaccgccgtggcttcatccacaatggcatcatggttctcccacggcagacctgcggcctcttcacacacaccatcttctacaacgagtaccctggcggctccagtgagctggacaagatcatcaacgggggcgagctcttcctcaccgtgctcctcaatcctatcagcatcttcatgacgcacctgtccaactatgggaatgaccgcctgggcctgtacaccttcaagcacctggtgcgcttcctgcactcctggaccaacctccggctgcagacactgccccctgtgcagttggcgcagaagtacttccagatcttctccgaggagaaggacccgctctggcaggacccctgcgaggacaaacgtcacaaagacatctggtccaaggagaagacgtgtgaccgcttcccaaagctcctcatcatcggcccccagaaaacaggcaccactgccctctacctgttcctgggcatgcaccctgacctaagcagcaactaccccagctctgagacctttgaggagatccagttttttaatggccacaactatcacaaaggcatcgactggtacatggagttcttccccatcccttccaacaccacctccgacttctactttgagaaaagcgccaactactttgattcagaagtggcgccccggcgggcagcagccctcttgcccaaagccaaggtcctgaccatcctcatcaaccccgcggaccgggcctattcctggtaccagcaccagcgagcccatgacgacccagtggccctaaagtacaccttccatgaggtgattaccgccggctctgacgcatcctcgaagctgcgtgccctccagaaccgctgcctggtccctggctggtacgccacccacatcgagcgctggctcagtgcctatcacgccaaccagattctggtcttggatggcaaactgcttcgcacagaacctgccaaagtgatggacatggtgcagaagttccttggggtgaccaacaccattgactaccacaaaaccttggcgtttgatccaaagaaaggattttggtgccaactgcttgaaggaggaaaaaccaagtgtctgggcaaaagcaagggccggaaatatcccgagatggacttggattcccgagccttcctgaaggactattaccgggaccacaacatcgagctctccaagctgctgtataagatgggccagacacttcccacttggctacgagaggacctccagaacaccaggtagccgtggccaccacagccagactgaacgtttgtgaaagctgggacatcccaccacacgctgagccagacctgcagagtgggaagctggaccagggcagctgcgcacttatgagcaatactctgtggaggtctggtggggctgggggagcacccaggcggatctgcaagcacctcggagcacccaccgctgggtctgcggcctaagggacctccctcgccagcagaggtccattccgttcccagctgctcctggggaggccgcttcctggtaggagggagtccacgagactcttttctgtccctcactgtgttccgccgactgtcccctctcgtcacccatcactccctgcttccgcagggcgcccctcagtattcgctgccatatgtccctgtcctccaggctgtaggggaggagagcctggccgggggagacagactggacatttccctgtttcgagccaggctcttccaaggggccagctgggtccccggagtcagtcctaggctggatgggagggtggccccctcaagaggactcccagcctccacatctggttcctaccttcacatctcaccctcccgttctggggaagaatttctggttcctacagtatccactccatcctcaaggcttcccgcagggccttggggcactgccttgccatcgggcccagttctccgggccccacctgcacccctttcttccccctgggatatgatgtgtggtgtttcctgtggtaaaagactgaggcaggccaggggtctgccagtaacatgttcccatgtacagacacggtccccacaccctcccagcctcaggcccaggcagacatgggcgagctggtgagactgccagccacggctttgcttagccacctgtggccgagggctctcagagacccccttaacctcccaaatactaagaagctaaaatattttaatattttgtttttttttttcttggtgccagagtttataccctgggtgctggggtcgcactgtgttatatatatatatatatatatatataatgtgtatatatatatattctattttttttggttgggttcgtttttaattcagtcctacaaaatggtggtaagccccagtctcaggggtcaccctgtcttagagctagagatgaggtggcagggagggaggctgtgtcctcagtggcctggggctgagcagaccttaggaagggnccctccccagtgccgtggctgctctggggctaccccaggtgaacagaggtggtgagatgcgcagggaagaccagctctctccaggacatcgggctgcgtgaagtccagtgaccctgaggggattttggccaaaggaaacagccagggctgggctaggagagctggggtcaaaagctgccccacccactctccctcacatggtgctaggctgggagctgccctgagagctgggatgcccaccaaggcccacagaactgtctccaggcccttgtagacagtgggatctctgggctgatttctggttggggtctgctcctaccccaccccatttaacaatgtgaagtgactgaggctggggtgcctctccctggccccctccaactgccaaattctgcttccctctgaaccccaggaaatactttctggagaggcttgtcttgttcagaagactctagcatcttggggctggaaggtcctttgacgggtatgaaacaggtccagaaaggggaggtggcctgcttggccgacgtcatggagccagctgggagcagggctgagcgttgaacccgaggctcccggttccaagtcccatcgtgctcctcttccaatgccacactgcctctgagcccatccttgggaccctactctgtgccaggttcctgtcccttcctccgtcacagcatggtcattccaggatatggggacaaaccactccttcccagccagggtgcctttgagccttctcattccgaggtctgcgtttgcatccctgtcgtgttctccctcgaggggtccttccccagcctgtgggggcctgggtctgttctgagctgattcccttttctccagttctctgctgggatgaagaaagttggacactcagtgggaccagctgcaggtggtttcactgtgtacacagcagtgtccccatcatgcctctcaatggggcctgcaagcctgggaacttgggcatcgttgggccagcaggatgagcagcaaagggtctgaggacagggtggcatgtctgcttgtgtgctcatgaagacatgcccacgccatggagccaggggcttacagagaggggcagtgacttccagagtcccatccgtcagtgaggggactgggctgcgggatgggtgaggatcttacagctcccaggttcggaaatctaccctctaggcctggaggcctctctcgcagagcatggaaggcaggagaggtgggctggcctagggcaggagctccacttctctctgcctctggctatgggaaggagcaggcggttggaaatcctgtgacagcagagatcttctggatttttgcctggacccttctgcaagcctggagactggacctgccacatgttccaagtctgtctgcctaggtcactgctgccacttctcctcccactaacagacctttcttgaagacccactaggtccagacactgccgggacttgcaggtatggggggtagaaggagaggcagataagctgcctggggggctgttagctaatgggtacaaggacaccccctcccgagaagagaagccacagatgagtgggccagcgaggccagtcttcaatgtccactaattcactctaagcatttggccaaaaaaaggagagagaaataactgaaattgttcaggtggctccatcgtctattctgtggtcccctccatgagcctttgccccagggtgggtgcaggtgcgagtgtcacctgcagctgcctcagtcattcagagttccagagccttctgtggtggagcatcctgctgcttggaggatgagtctgaagtttaaaaatgggccttttctgagcccccctgatgagcagtcagtgcttctgggcccagctaaggaagccatctgttcccagcagaggagagctgctgcgctgacctgcagaggttggtggtcccagcacagagctgtgcccatgggcttgttagtgggaaaagcaaatacaacaatgttttaccaaacatttaattatgaatgcccactccccagcatctagatctaaaattattaacattttgccacattctttttctctctctgtgtatgtatatgttttctctgtcctaatttaaaagtacattgcaaacatcatgaaacttgatccctgaaagcttcagcctgcatctcctaagagttagggcattgtcctacacattggcccagtatcacagccaagacgagaagtcatttcccagcgatgtctgctatctaatctgtattcaaatccccccaattgtctcccaggtaacttatgtgtctggttttggaatcagcatccagtcacggtgcacacattgcattttctaactatgtttttaaaacctctttgaatgctgaaaggtcttccctcagctcactttgagtttttaaatgacattgtttttgaggccctaggcctgctgtctttttgaagccccacattctgaatttgtcagattgtttgctcatggtgtcgcataaccacttcttctatcccctgtactttcaaggataatttaggctacatgagattttgccttttgtgctgacttgacagcttcacttctgcctaagatgcgcctccactgtcacctgtaccaagtgccaaaacagcagaggggccagttagagcaagagctctgggggggcccggaaagtctccctggagaaggccgtaatatctgggccttggaaggaaggacacagggctctggaaggaggaggctgcatgcctgaaggctgggccttcgaccctggggatgggccacagggcaccaaacacatcatatgtctctctctttctattttggggtcccagggttttcatttcctggagacccgtggtctgtgtgcactggagcagagccaggctctcagttgcagcagggaaaagcctacatggggaactgcctcccgcaagctgtggtgtgagaagagccctggctggcagcaggagctgtgaagtttcatcccagccgggtgcatttagtagctgcctgaccatcttctccttttgtaatttgtgcatgaaattcatgtcatttcctgggagaggagagggccgactggagagggtggggggcacactggggaagcaggcagaggtttccttcccttgtaggggggtggggagagtggggagagggggtgctatccagttcgcctgatgagggctctcgaaccagccgttttgggttgtgttaaaggtgagaccttcctccattaatgtacaatctcgaactaactgctaataaagtggggt

SEQ ID NO: 102611 - DNA, 7463 bp, Homo sapiens
  misc_feature (4359)..(4359): n is a, c, g, or t
gcggccgcgattcggggaggtaggcgctgggccgaggaggtgcagccgtgttaaggagaggacattcgagagggcgtggcgaagtgaagaggaacctcacgccactgcctggagctccgccttagccccgtgggccccacggagtgagcggcatgcagcacccccgggcctgtccagtgtcctctggcctgctgccctgcacccccagaaggccctgacgccctggggcacttctgctctgcacaggaccacgcgggggtttgccatggtgacataaaggggcgcggaggaaggaaggagcgtgaccagcctgtggactgcgcccctggctgggaggaaggactgggggcccagatcctccactcccagtgccccacaagggcgtcgcttcctaagtctctgtgaatttgttggtcagtggacgattctcgtgtctcctcctgtgtggggccttggggtagccagggcaggccgggcctccggtggccaaggtctcggaggccaggatgcctgccctggcatgcctccggaggctgtgtcggcacgtgtccccgcaggctgtccttttcctgctgttcatcttctgcctgttcagcgttttcatctcggcctactacctatatggctggaagcgaggcctggagccctcggcggatgcccccgagcctgactgcggggacccgccgcctgtggcccccagtcgcctgctgccactcaagcctgtgcaggcagccaccccttcccgcacagacccgttggtgctggtctttgtggagagcctctactcgcaactgggccaggaggtggtggccatcctggagtccagccgcttcaaataccgcacagagattgcgccgggcaagggtgacatgcccacgctcactgacaagggccgtggccgcttcgccctcatcatctatgagaacatcctcaagtatgtcaacctggacgcctggaaccgggagctgctggacaagtactgtgtggcctacggcgtgggcatcattggcttcttcaaggccaatgagaacagcctgctgagtgcgcagctcaagggcttccccctgttcctgcactcaaacctgggcctgaaggactgcagcatcaaccccaagtccccgctgctctacgtgacgcgacctagcgaggtggagaaaggtgtgctccccggcgaggactggacggttttccagtcaaatcactccacctatgagccagtgctgctggccaagacgcgctcgtctgagtccatcccacacctgggcgcagacgccggcctgcatgctgcactgcacgccactgtggtccaggacctgggcctgcacgacggcatccagcgcgtgctgtttggcaacaacctgaacttctggctgcacaagcttgtcttcgtggatgccgtggccttcctcacggggaagcgcctctccctgccattggaccgctacatcctggtggacattgatgacatcttcgtgggcaaggagggcacacgcatgaaggtggaggacgtgaaggccctgtttgacacacagaacgaactacgcgcacacatcccaaacttcaccttcaacctgggctactcagggaaattcttccacacaggtaccaatgctgaggacgctggggatgatctgctgctgtcgtatgtgaaggagttctggtggttcccccacatgtggagccacatgcagccccaccttttccacaaccagtccgtgttggccgagcagatggccttgaacaagaagttcgctgtcgagcatggcattcccacagacatggggtatgcagtggcgccccaccactcgggcgtgtaccccgtgcacgtgcagctgtacgaggcttggaagcaggtgtggagcatccgcgtgaccagcacggaggagtacccccacctgaagccagcccgctaccgccgtggcttcatccacaatggcatcatggttctcccacggcagacctgcggcctcttcacacacaccatcttctacaacgagtaccctggcggctccagtgagctggacaagatcatcaacgggggcgagctcttcctcaccgtgctcctcaatcctatcagcatcttcatgacgcacctgtccaactatgggaatgaccgcctgggcctgtacaccttcaagcacctggtgcgcttcctgcactcctggaccaacctccggctgcagacactgccccctgtgcagttggcgcagaagtacttccagatcttctccgaggagaaggacccgctctggcaggacccctgcgaggacaaacgtcacaaagacatctggtccaaggagaagacgtgtgaccgcttcccaaagctcctcatcatcggcccccagaaaacaggcaccactgccctctacctgttcctgggcatgcaccctgacctaagcagcaactaccccagctctgagacctttgaggagatccagttttttaatggccacaactatcacaaaggcatcgactggtacatggagttcttccccatcccttccaacaccacctccgacttctactttgagaaaagcgccaactactttgattcagaagtggcgccccggcgggcagcagccctcttgcccaaagccaaggtcctgaccatcctcatcaaccccgcggaccgggcctattcctggtaccagcaccagcgagcccatgacgacccagtggccctaaagtacaccttccatgaggtgattaccgccggctctgacgcatcctcgaagctgcgtgccctccagaaccgctgcctggtccctggctggtacgccacccacatcgagcgctggctcagtgcctatcacgccaaccagattctggtcttggatggcaaactgcttcgcacagaacctgccaaagtgatggacatggtgcagaagttccttggggtgaccaacaccattgactaccacaaaaccttggcgtttgatccaaagaaaggattttggtgccaactgcttgaaggaggaaaaaccaagtgtctgggcaaaagcaagggccggaaatatcccgagatggacttggattcccgagccttcctgaaggactattaccgggaccacaacatcgagctctccaagctgctgtataagatgggccagacacttcccacttggctacgagaggacctccagaacaccaggtagccgtggccaccacagccagactgaacgtttgtgaaagctgggacatcccaccacacgctgagccagacctgcagagtgggaagctggaccagggcagctgcgcacttatgagcaatactctgtggaggtctggtggggctgggggagcacccaggcggatctgcaagcacctcggagcacccaccgctgggtctgcggcctaagggacctccctcgccagcagaggtccattccgttcccagctgctcctggggaggccgcttcctggtaggagggagtccacgagactcttttctgtccctcactgtgttccgccgactgtcccctctcgtcacccatcactccctgcttccgcagggcgcccctcagtattcgctgccatatgtccctgtcctccaggctgtaggggaggagagcctggccgggggagacagactggacatttccctgtttcgagccaggctcttccaaggggccagctgggtccccggagtcagtcctaggctggatgggagggtggccccctcaagaggactcccagcctccacatctggttcctaccttcacatctcaccctcccgttctggggaagaatttctggttcctacagtatccactccatcctcaaggcttcccgcagggccttggggcactgccttgccatcgggcccagttctccgggccccacctgcacccctttcttccccctgggatatgatgtgtggtgtttcctgtggtaaaagactgaggcaggccaggggtctgccagtaacatgttcccatgtacagacacggtccccacaccctcccagcctcaggcccaggcagacatgggcgagctggtgagactgccagccacggctttgcttagccacctgtggccgagggctctcagagacccccttaacctcccaaatactaagaagctaaaatattttaatattttgtttttttttttcttggtgccagagtttataccctgggtgctggggtcgcactgtgttatatatatatatatatatatatataatgtgtatatatatatattctattttttttggttgggttcgtttttaattcagtcctacaaaatggtggtaagccccagtctcaggggtcaccctgtcttagagctagagatgaggtggcagggagggaggctgtgtcctcagtggcctggggctgagcagaccttaggaagggnccctccccagtgccgtggctgctctggggctaccccaggtgaacagaggtggtgagatgcgcagggaagaccagctctctccaggacatcgggctgcgtgaagtccagtgaccctgaggggattttggccaaaggaaacagccagggctgggctaggagagctggggtcaaaagctgccccacccactctccctcacatggtgctaggctgggagctgccctgagagctgggatgcccaccaaggcccacagaactgtctccaggcccttgtagacagtgggatctctgggctgatttctggttggggtctgctcctaccccaccccatttaacaatgtgaagtgactgaggctggggtgcctctccctggccccctccaactgccaaattctgcttccctctgaaccccaggaaatactttctggagaggcttgtcttgttcagaagactctagcatcttggggctggaaggtcctttgacgggtatgaaacaggtccagaaaggggaggtggcctgcttggccgacgtcatggagccagctgggagcagggctgagcgttgaacccgaggctcccggttccaagtcccatcgtgctcctcttccaatgccacactgcctctgagcccatccttgggaccctactctgtgccaggttcctgtcccttcctccgtcacagcatggtcattccaggatatggggacaaaccactccttcccagccagggtgcctttgagccttctcattccgaggtctgcgtttgcatccctgtcgtgttctccctcgaggggtccttccccagcctgtgggggcctgggtctgttctgagctgattcccttttctccagttctctgctgggatgaagaaagttggacactcagtgggaccagctgcaggtggtttcactgtgtacacagcagtgtccccatcatgcctctcaatggggcctgcaagcctgggaacttgggcatcgttgggccagcaggatgagcagcaaagggtctgaggacagggtggcatgtctgcttgtgtgctcatgaagacatgcccacgccatggagccaggggcttacagagaggggcagtgacttccagagtcccatccgtcagtgaggggactgggctgcgggatgggtgaggatcttacagctcccaggttcggaaatctaccctctaggcctggaggcctctctcgcagagcatggaaggcaggagaggtgggctggcctagggcaggagctccacttctctctgcctctggctatgggaaggagcaggcggttggaaatcctgtgacagcagagatcttctggatttttgcctggacccttctgcaagcctggagactggacctgccacatgttccaagtctgtctgcctaggtcactgctgccacttctcctcccactaacagacctttcttgaagacccactaggtccagacactgccgggacttgcaggtatggggggtagaaggagaggcagataagctgcctggggggctgttagctaatgggtacaaggacaccccctcccgagaagagaagccacagatgagtgggccagcgaggccagtcttcaatgtccactaattcactctaagcatttggccaaaaaaaggagagagaaataactgaaattgttcaggtggctccatcgtctattctgtggtcccctccatgagcctttgccccagggtgggtgcaggtgcgagtgtcacctgcagctgcctcagtcattcagagttccagagccttctgtggtggagcatcctgctgcttggaggatgagtctgaagtttaaaaatgggccttttctgagcccccctgatgagcagtcagtgcttctgggcccagctaaggaagccatctgttcccagcagaggagagctgctgcgctgacctgcagaggttggtggtcccagcacagagctgtgcccatgggcttgttagtgggaaaagcaaatacaacaatgttttaccaaacatttaattatgaatgcccactccccagcatctagatctaaaattattaacattttgccacattctttttctctctctgtgtatgtatatgttttctctgtcctaatttaaaagtacattgcaaacatcatgaaacttgatccctgaaagcttcagcctgcatctcctaagagttagggcattgtcctacacattggcccagtatcacagccaagacgagaagtcatttcccagcgatgtctgctatctaatctgtattcaaatccccccaattgtctcccaggtaacttatgtgtctggttttggaatcagcatccagtcacggtgcacacattgcattttctaactatgtttttaaaacctctttgaatgctgaaaggtcttccctcagctcactttgagtttttaaatgacattgtttttgaggccctaggcctgctgtctttttgaagccccacattctgaatttgtcagattgtttgctcatggtgtcgcataaccacttcttctatcccctgtactttcaaggataatttaggctacatgagattttgccttttgtgctgacttgacagcttcacttctgcctaagatgcgcctccactgtcacctgtaccaagtgccaaaacagcagaggggccagttagagcaagagctctgggggggcccggaaagtctccctggagaaggccgtaatatctgggccttggaaggaaggacacagggctctggaaggaggaggctgcatgcctgaaggctgggccttcgaccctggggatgggccacagggcaccaaacacatcatatgtctctctctttggttttctatgactgtgttagcttttattattagcaagagggctccttttgtaatttgtgcatgaaattcatgtcatttcctgggagaggagagggccgactggagagggtggggggcacactggggaagcaggcagaggtttccttcccttgtaggggggtggggagagtggggagagggggtgctatccagttcgcctgatgagggctctcgaaccagccgttttgggttgtgttaaaggtgagaccttcctccattaatgtacaatctcgaactaactgctaataaagtggggt

SEQ ID NO: 102612 - DNA, 6641 bp, Homo sapiens
  misc_feature (4359)..(4359): n is a, c, g, or t
gcggccgcgattcggggaggtaggcgctgggccgaggaggtgcagccgtgttaaggagaggacattcgagagggcgtggcgaagtgaagaggaacctcacgccactgcctggagctccgccttagccccgtgggccccacggagtgagcggcatgcagcacccccgggcctgtccagtgtcctctggcctgctgccctgcacccccagaaggccctgacgccctggggcacttctgctctgcacaggaccacgcgggggtttgccatggtgacataaaggggcgcggaggaaggaaggagcgtgaccagcctgtggactgcgcccctggctgggaggaaggactgggggcccagatcctccactcccagtgccccacaagggcgtcgcttcctaagtctctgtgaatttgttggtcagtggacgattctcgtgtctcctcctgtgtggggccttggggtagccagggcaggccgggcctccggtggccaaggtctcggaggccaggatgcctgccctggcatgcctccggaggctgtgtcggcacgtgtccccgcaggctgtccttttcctgctgttcatcttctgcctgttcagcgttttcatctcggcctactacctatatggctggaagcgaggcctggagccctcggcggatgcccccgagcctgactgcggggacccgccgcctgtggcccccagtcgcctgctgccactcaagcctgtgcaggcagccaccccttcccgcacagacccgttggtgctggtctttgtggagagcctctactcgcaactgggccaggaggtggtggccatcctggagtccagccgcttcaaataccgcacagagattgcgccgggcaagggtgacatgcccacgctcactgacaagggccgtggccgcttcgccctcatcatctatgagaacatcctcaagtatgtcaacctggacgcctggaaccgggagctgctggacaagtactgtgtggcctacggcgtgggcatcattggcttcttcaaggccaatgagaacagcctgctgagtgcgcagctcaagggcttccccctgttcctgcactcaaacctgggcctgaaggactgcagcatcaaccccaagtccccgctgctctacgtgacgcgacctagcgaggtggagaaaggtgtgctccccggcgaggactggacggttttccagtcaaatcactccacctatgagccagtgctgctggccaagacgcgctcgtctgagtccatcccacacctgggcgcagacgccggcctgcatgctgcactgcacgccactgtggtccaggacctgggcctgcacgacggcatccagcgcgtgctgtttggcaacaacctgaacttctggctgcacaagcttgtcttcgtggatgccgtggccttcctcacggggaagcgcctctccctgccattggaccgctacatcctggtggacattgatgacatcttcgtgggcaaggagggcacacgcatgaaggtggaggacgtgaaggccctgtttgacacacagaacgaactacgcgcacacatcccaaacttcaccttcaacctgggctactcagggaaattcttccacacaggtaccaatgctgaggacgctggggatgatctgctgctgtcgtatgtgaaggagttctggtggttcccccacatgtggagccacatgcagccccaccttttccacaaccagtccgtgttggccgagcagatggccttgaacaagaagttcgctgtcgagcatggcattcccacagacatggggtatgcagtggcgccccaccactcgggcgtgtaccccgtgcacgtgcagctgtacgaggcttggaagcaggtgtggagcatccgcgtgaccagcacggaggagtacccccacctgaagccagcccgctaccgccgtggcttcatccacaatggcatcatggttctcccacggcagacctgcggcctcttcacacacaccatcttctacaacgagtaccctggcggctccagtgagctggacaagatcatcaacgggggcgagctcttcctcaccgtgctcctcaatcctatcagcatcttcatgacgcacctgtccaactatgggaatgaccgcctgggcctgtacaccttcaagcacctggtgcgcttcctgcactcctggaccaacctccggctgcagacactgccccctgtgcagttggcgcagaagtacttccagatcttctccgaggagaaggacccgctctggcaggacccctgcgaggacaaacgtcacaaagacatctggtccaaggagaagacgtgtgaccgcttcccaaagctcctcatcatcggcccccagaaaacaggcaccactgccctctacctgttcctgggcatgcaccctgacctaagcagcaactaccccagctctgagacctttgaggagatccagttttttaatggccacaactatcacaaaggcatcgactggtacatggagttcttccccatcccttccaacaccacctccgacttctactttgagaaaagcgccaactactttgattcagaagtggcgccccggcgggcagcagccctcttgcccaaagccaaggtcctgaccatcctcatcaaccccgcggaccgggcctattcctggtaccagcaccagcgagcccatgacgacccagtggccctaaagtacaccttccatgaggtgattaccgccggctctgacgcatcctcgaagctgcgtgccctccagaaccgctgcctggtccctggctggtacgccacccacatcgagcgctggctcagtgcctatcacgccaaccagattctggtcttggatggcaaactgcttcgcacagaacctgccaaagtgatggacatggtgcagaagttccttggggtgaccaacaccattgactaccacaaaaccttggcgtttgatccaaagaaaggattttggtgccaactgcttgaaggaggaaaaaccaagtgtctgggcaaaagcaagggccggaaatatcccgagatggacttggattcccgagccttcctgaaggactattaccgggaccacaacatcgagctctccaagctgctgtataagatgggccagacacttcccacttggctacgagaggacctccagaacaccaggtagccgtggccaccacagccagactgaacgtttgtgaaagctgggacatcccaccacacgctgagccagacctgcagagtgggaagctggaccagggcagctgcgcacttatgagcaatactctgtggaggtctggtggggctgggggagcacccaggcggatctgcaagcacctcggagcacccaccgctgggtctgcggcctaagggacctccctcgccagcagaggtccattccgttcccagctgctcctggggaggccgcttcctggtaggagggagtccacgagactcttttctgtccctcactgtgttccgccgactgtcccctctcgtcacccatcactccctgcttccgcagggcgcccctcagtattcgctgccatatgtccctgtcctccaggctgtaggggaggagagcctggccgggggagacagactggacatttccctgtttcgagccaggctcttccaaggggccagctgggtccccggagtcagtcctaggctggatgggagggtggccccctcaagaggactcccagcctccacatctggttcctaccttcacatctcaccctcccgttctggggaagaatttctggttcctacagtatccactccatcctcaaggcttcccgcagggccttggggcactgccttgccatcgggcccagttctccgggccccacctgcacccctttcttccccctgggatatgatgtgtggtgtttcctgtggtaaaagactgaggcaggccaggggtctgccagtaacatgttcccatgtacagacacggtccccacaccctcccagcctcaggcccaggcagacatgggcgagctggtgagactgccagccacggctttgcttagccacctgtggccgagggctctcagagacccccttaacctcccaaatactaagaagctaaaatattttaatattttgtttttttttttcttggtgccagagtttataccctgggtgctggggtcgcactgtgttatatatatatatatatatatatataatgtgtatatatatatattctattttttttggttgggttcgtttttaattcagtcctacaaaatggtggtaagccccagtctcaggggtcaccctgtcttagagctagagatgaggtggcagggagggaggctgtgtcctcagtggcctggggctgagcagaccttaggaagggnccctccccagtgccgtggctgctctggggctaccccaggtgaacagaggtggtgagatgcgcagggaagaccagctctctccaggacatcgggctgcgtgaagtccagtgaccctgaggggattttggccaaaggaaacagccagggctgggctaggagagctggggtcaaaagctgccccacccactctccctcacatggtgctaggctgggagctgccctgagagctgggatgcccaccaaggcccacagaactgtctccaggcccttgtagacagtgggatctctgggctgatttctggttggggtctgctcctaccccaccccatttaacaatgtgaagtgactgaggctggggtgcctctccctggccccctccaactgccaaattctgcttccctctgaaccccaggaaatactttctggagaggcttgtcttgttcagaagactctagcatcttggggctggaaggtcctttgacgggtatgaaacaggtccagaaaggggaggtggcctgcttggccgacgtcatggagccagctgggagcagggctgagcgttgaacccgaggctcccggttccaagtcccatcgtgctcctcttccaatgccacactgcctctgagcccatccttgggaccctactctgtgccaggttcctgtcccttcctccgtcacagcatggtcattccaggatatggggacaaaccactccttcccagccagggtgcctttgagccttctcattccgaggtctgcgtttgcatccctgtcgtgttctccctcgaggggtccttccccagcctgtgggggcctgggtctgttctgagctgattcccttttctccagttctctgctgggatgaagaaagttggacactcagtgggaccagctgcaggtggtttcactgtgtacacagcagtgtccccatcatgcctctcaatggggcctgcaagcctgggaacttgggcatcgttgggccagcaggatgagcagcaaagggtctgaggacagggtggcatgtctgcttgtgtgctcatgaagacatgcccacgccatggagccaggggcttacagagaggggcagtgacttccagagtcccatccgtcagtgaggggactgggctgcgggatgggtgaggatcttacagctcccaggttcggaaatctaccctctaggcctggaggcctctctcgcagagcatggaaggcaggagaggtgggctggcctagggcaggagctccacttctctctgcctctggctatgggaaggagcaggcggttggaaatcctgtgacagcagagatcttctggatttttgcctggacccttctgcaagcctggagactggacctgccacatgttccaagtctgtctgcctaggtcactgctgccacttctcctcccactaacagacctttcttgaagacccactaggtccagacactgccgggacttgcaggtatggggggtagaaggagaggcagataagctgcctggggggctgttagctaatgggtacaaggacaccccctcccgagaagagaagccacagatgagtgggccagcgaggccagtcttcaatgtccactaattcactctaagcatttggccaaaaaaaggagagagaaataactgaaattgttcaggtggctccatcgtctattctgtggtcccctccatgagcctttgccccagggtgggtgcaggtgcgagtgtcacctgcagctgcctcagtcattcagagttccagagccttctgtggtggagcatcctgctgcttggaggatgagtctgaagtttaaaaatgggccttttctgagcccccctgatgagcagtcagtgcttctgggcccagctaaggaagccatctgttcccagcagaggagagctgctgcgctgacctgcagaggttggtggtcccagcacagagctgtgcccatgggcttgttagtgggaaaagcaaatacaacaatgttttaccaaacatttaattatgaatgcccactccccagcatctagatctaaaattattaacattttgccacattctttttctctctctgtgtatgtatatgttttctctgtcctaatttaaaagtacattgcaaacatcatgaaacttgatccctgaaagcttcagcctgcatctcctaagagttagggcattgtcctacacattggcccagtatcacagccaagacgagaagtcatttcccagcgatgtctgctatctaatctgtattcaaatccccacagagagagcgtcggtaccgagcca

SEQ ID NO: 102613 - DNA, 6583 bp, Homo sapiens
  misc_feature (4359)..(4359): n is a, c, g, or t
gcggccgcgattcggggaggtaggcgctgggccgaggaggtgcagccgtgttaaggagaggacattcgagagggcgtggcgaagtgaagaggaacctcacgccactgcctggagctccgccttagccccgtgggccccacggagtgagcggcatgcagcacccccgggcctgtccagtgtcctctggcctgctgccctgcacccccagaaggccctgacgccctggggcacttctgctctgcacaggaccacgcgggggtttgccatggtgacataaaggggcgcggaggaaggaaggagcgtgaccagcctgtggactgcgcccctggctgggaggaaggactgggggcccagatcctccactcccagtgccccacaagggcgtcgcttcctaagtctctgtgaatttgttggtcagtggacgattctcgtgtctcctcctgtgtggggccttggggtagccagggcaggccgggcctccggtggccaaggtctcggaggccaggatgcctgccctggcatgcctccggaggctgtgtcggcacgtgtccccgcaggctgtccttttcctgctgttcatcttctgcctgttcagcgttttcatctcggcctactacctatatggctggaagcgaggcctggagccctcggcggatgcccccgagcctgactgcggggacccgccgcctgtggcccccagtcgcctgctgccactcaagcctgtgcaggcagccaccccttcccgcacagacccgttggtgctggtctttgtggagagcctctactcgcaactgggccaggaggtggtggccatcctggagtccagccgcttcaaataccgcacagagattgcgccgggcaagggtgacatgcccacgctcactgacaagggccgtggccgcttcgccctcatcatctatgagaacatcctcaagtatgtcaacctggacgcctggaaccgggagctgctggacaagtactgtgtggcctacggcgtgggcatcattggcttcttcaaggccaatgagaacagcctgctgagtgcgcagctcaagggcttccccctgttcctgcactcaaacctgggcctgaaggactgcagcatcaaccccaagtccccgctgctctacgtgacgcgacctagcgaggtggagaaaggtgtgctccccggcgaggactggacggttttccagtcaaatcactccacctatgagccagtgctgctggccaagacgcgctcgtctgagtccatcccacacctgggcgcagacgccggcctgcatgctgcactgcacgccactgtggtccaggacctgggcctgcacgacggcatccagcgcgtgctgtttggcaacaacctgaacttctggctgcacaagcttgtcttcgtggatgccgtggccttcctcacggggaagcgcctctccctgccattggaccgctacatcctggtggacattgatgacatcttcgtgggcaaggagggcacacgcatgaaggtggaggacgtgaaggccctgtttgacacacagaacgaactacgcgcacacatcccaaacttcaccttcaacctgggctactcagggaaattcttccacacaggtaccaatgctgaggacgctggggatgatctgctgctgtcgtatgtgaaggagttctggtggttcccccacatgtggagccacatgcagccccaccttttccacaaccagtccgtgttggccgagcagatggccttgaacaagaagttcgctgtcgagcatggcattcccacagacatggggtatgcagtggcgccccaccactcgggcgtgtaccccgtgcacgtgcagctgtacgaggcttggaagcaggtgtggagcatccgcgtgaccagcacggaggagtacccccacctgaagccagcccgctaccgccgtggcttcatccacaatggcatcatggttctcccacggcagacctgcggcctcttcacacacaccatcttctacaacgagtaccctggcggctccagtgagctggacaagatcatcaacgggggcgagctcttcctcaccgtgctcctcaatcctatcagcatcttcatgacgcacctgtccaactatgggaatgaccgcctgggcctgtacaccttcaagcacctggtgcgcttcctgcactcctggaccaacctccggctgcagacactgccccctgtgcagttggcgcagaagtacttccagatcttctccgaggagaaggacccgctctggcaggacccctgcgaggacaaacgtcacaaagacatctggtccaaggagaagacgtgtgaccgcttcccaaagctcctcatcatcggcccccagaaaacaggcaccactgccctctacctgttcctgggcatgcaccctgacctaagcagcaactaccccagctctgagacctttgaggagatccagttttttaatggccacaactatcacaaaggcatcgactggtacatggagttcttccccatcccttccaacaccacctccgacttctactttgagaaaagcgccaactactttgattcagaagtggcgccccggcgggcagcagccctcttgcccaaagccaaggtcctgaccatcctcatcaaccccgcggaccgggcctattcctggtaccagcaccagcgagcccatgacgacccagtggccctaaagtacaccttccatgaggtgattaccgccggctctgacgcatcctcgaagctgcgtgccctccagaaccgctgcctggtccctggctggtacgccacccacatcgagcgctggctcagtgcctatcacgccaaccagattctggtcttggatggcaaactgcttcgcacagaacctgccaaagtgatggacatggtgcagaagttccttggggtgaccaacaccattgactaccacaaaaccttggcgtttgatccaaagaaaggattttggtgccaactgcttgaaggaggaaaaaccaagtgtctgggcaaaagcaagggccggaaatatcccgagatggacttggattcccgagccttcctgaaggactattaccgggaccacaacatcgagctctccaagctgctgtataagatgggccagacacttcccacttggctacgagaggacctccagaacaccaggtagccgtggccaccacagccagactgaacgtttgtgaaagctgggacatcccaccacacgctgagccagacctgcagagtgggaagctggaccagggcagctgcgcacttatgagcaatactctgtggaggtctggtggggctgggggagcacccaggcggatctgcaagcacctcggagcacccaccgctgggtctgcggcctaagggacctccctcgccagcagaggtccattccgttcccagctgctcctggggaggccgcttcctggtaggagggagtccacgagactcttttctgtccctcactgtgttccgccgactgtcccctctcgtcacccatcactccctgcttccgcagggcgcccctcagtattcgctgccatatgtccctgtcctccaggctgtaggggaggagagcctggccgggggagacagactggacatttccctgtttcgagccaggctcttccaaggggccagctgggtccccggagtcagtcctaggctggatgggagggtggccccctcaagaggactcccagcctccacatctggttcctaccttcacatctcaccctcccgttctggggaagaatttctggttcctacagtatccactccatcctcaaggcttcccgcagggccttggggcactgccttgccatcgggcccagttctccgggccccacctgcacccctttcttccccctgggatatgatgtgtggtgtttcctgtggtaaaagactgaggcaggccaggggtctgccagtaacatgttcccatgtacagacacggtccccacaccctcccagcctcaggcccaggcagacatgggcgagctggtgagactgccagccacggctttgcttagccacctgtggccgagggctctcagagacccccttaacctcccaaatactaagaagctaaaatattttaatattttgtttttttttttcttggtgccagagtttataccctgggtgctggggtcgcactgtgttatatatatatatatatatatatataatgtgtatatatatatattctattttttttggttgggttcgtttttaattcagtcctacaaaatggtggtaagccccagtctcaggggtcaccctgtcttagagctagagatgaggtggcagggagggaggctgtgtcctcagtggcctggggctgagcagaccttaggaagggnccctccccagtgccgtggctgctctggggctaccccaggtgaacagaggtggtgagatgcgcagggaagaccagctctctccaggacatcgggctgcgtgaagtccagtgaccctgaggggattttggccaaaggaaacagccagggctgggctaggagagctggggtcaaaagctgccccacccactctccctcacatggtgctaggctgggagctgccctgagagctgggatgcccaccaaggcccacagaactgtctccaggcccttgtagacagtgggatctctgggctgatttctggttggggtctgctcctaccccaccccatttaacaatgtgaagtgactgaggctggggtgcctctccctggccccctccaactgccaaattctgcttccctctgaaccccaggaaatactttctggagaggcttgtcttgttcagaagactctagcatcttggggctggaaggtcctttgacgggtatgaaacaggtccagaaaggggaggtggcctgcttggccgacgtcatggagccagctgggagcagggctgagcgttgaacccgaggctcccggttccaagtcccatcgtgctcctcttccaatgccacactgcctctgagcccatccttgggaccctactctgtgccaggttcctgtcccttcctccgtcacagcatggtcattccaggatatggggacaaaccactccttcccagccagggtgcctttgagccttctcattccgaggtctgcgtttgcatccctgtcgtgttctccctcgaggggtccttccccagcctgtgggggcctgggtctgttctgagctgattcccttttctccagttctctgctgggatgaagaaagttggacactcagtgggaccagctgcaggtggtttcactgtgtacacagcagtgtccccatcatgcctctcaatggggcctgcaagcctgggaacttgggcatcgttgggccagcaggatgagcagcaaagggtctgaggacagggtggcatgtctgcttgtgtgctcatgaagacatgcccacgccatggagccaggggcttacagagaggggcagtgacttccagagtcccatccgtcagtgaggggactgggctgcgggatgggtgaggatcttacagctcccaggttcggaaatctaccctctaggcctggaggcctctctcgcagagcatggaaggcaggagaggtgggctggcctagggcaggagctccacttctctctgcctctggctatgggaaggagcaggcggttggaaatcctgtgacagcagagatcttctggatttttgcctggacccttctgcaagcctggagactggacctgccacatgttccaagtctgtctgcctaggtcactgctgccacttctcctcccactaacagacctttcttgaagacccactaggtccagacactgccgggacttgcaggtatggggggtagaaggagaggcagataagctgcctggggggctgttagctaatgggtacaaggacaccccctcccgagaagagaagccacagatgagtgggccagcgaggccagtcttcaatgtccactaattcactctaagcatttggccaaaaaaaggagagagaaataactgaaattgttcaggtggctccatcgtctattctgtggtcccctccatgagcctttgccccagggtgggtgcaggtgcgagtgtcacctgcagctgcctcagtcattcagagttccagagccttctgtggtggagcatcctgctgcttggaggatgagtctgaagtttaaaaatgggccttttctgagcccccctgatgagcagtcagtgcttctgggcccagctaaggaagccatctgttcccagcagaggagagctgctgcgctgacctgcagaggttggtggtcccagcacagagctgtgcccatgggcttgttagtgggaaaagcaaatacaacaatgttttaccaaacatttaattatgaatgcccactccccagcatctagatctaaaattattaacattttgccacattctttttctctctctgtgtatgtatatgttttctctgtcctaatttaaaagtacattgcaaacatcatgaaacttgatccctgaaagcttcagcctgcatctcctaagagttagggcattgtcctacacattggcccagtatcacagccactcaatactaagccctgctaatc

SEQ ID NO: 102614 - DNA, 6385 bp, Homo sapiens
  misc_feature (4359)..(4359): n is a, c, g, or t
gcggccgcgattcggggaggtaggcgctgggccgaggaggtgcagccgtgttaaggagaggacattcgagagggcgtggcgaagtgaagaggaacctcacgccactgcctggagctccgccttagccccgtgggccccacggagtgagcggcatgcagcacccccgggcctgtccagtgtcctctggcctgctgccctgcacccccagaaggccctgacgccctggggcacttctgctctgcacaggaccacgcgggggtttgccatggtgacataaaggggcgcggaggaaggaaggagcgtgaccagcctgtggactgcgcccctggctgggaggaaggactgggggcccagatcctccactcccagtgccccacaagggcgtcgcttcctaagtctctgtgaatttgttggtcagtggacgattctcgtgtctcctcctgtgtggggccttggggtagccagggcaggccgggcctccggtggccaaggtctcggaggccaggatgcctgccctggcatgcctccggaggctgtgtcggcacgtgtccccgcaggctgtccttttcctgctgttcatcttctgcctgttcagcgttttcatctcggcctactacctatatggctggaagcgaggcctggagccctcggcggatgcccccgagcctgactgcggggacccgccgcctgtggcccccagtcgcctgctgccactcaagcctgtgcaggcagccaccccttcccgcacagacccgttggtgctggtctttgtggagagcctctactcgcaactgggccaggaggtggtggccatcctggagtccagccgcttcaaataccgcacagagattgcgccgggcaagggtgacatgcccacgctcactgacaagggccgtggccgcttcgccctcatcatctatgagaacatcctcaagtatgtcaacctggacgcctggaaccgggagctgctggacaagtactgtgtggcctacggcgtgggcatcattggcttcttcaaggccaatgagaacagcctgctgagtgcgcagctcaagggcttccccctgttcctgcactcaaacctgggcctgaaggactgcagcatcaaccccaagtccccgctgctctacgtgacgcgacctagcgaggtggagaaaggtgtgctccccggcgaggactggacggttttccagtcaaatcactccacctatgagccagtgctgctggccaagacgcgctcgtctgagtccatcccacacctgggcgcagacgccggcctgcatgctgcactgcacgccactgtggtccaggacctgggcctgcacgacggcatccagcgcgtgctgtttggcaacaacctgaacttctggctgcacaagcttgtcttcgtggatgccgtggccttcctcacggggaagcgcctctccctgccattggaccgctacatcctggtggacattgatgacatcttcgtgggcaaggagggcacacgcatgaaggtggaggacgtgaaggccctgtttgacacacagaacgaactacgcgcacacatcccaaacttcaccttcaacctgggctactcagggaaattcttccacacaggtaccaatgctgaggacgctggggatgatctgctgctgtcgtatgtgaaggagttctggtggttcccccacatgtggagccacatgcagccccaccttttccacaaccagtccgtgttggccgagcagatggccttgaacaagaagttcgctgtcgagcatggcattcccacagacatggggtatgcagtggcgccccaccactcgggcgtgtaccccgtgcacgtgcagctgtacgaggcttggaagcaggtgtggagcatccgcgtgaccagcacggaggagtacccccacctgaagccagcccgctaccgccgtggcttcatccacaatggcatcatggttctcccacggcagacctgcggcctcttcacacacaccatcttctacaacgagtaccctggcggctccagtgagctggacaagatcatcaacgggggcgagctcttcctcaccgtgctcctcaatcctatcagcatcttcatgacgcacctgtccaactatgggaatgaccgcctgggcctgtacaccttcaagcacctggtgcgcttcctgcactcctggaccaacctccggctgcagacactgccccctgtgcagttggcgcagaagtacttccagatcttctccgaggagaaggacccgctctggcaggacccctgcgaggacaaacgtcacaaagacatctggtccaaggagaagacgtgtgaccgcttcccaaagctcctcatcatcggcccccagaaaacaggcaccactgccctctacctgttcctgggcatgcaccctgacctaagcagcaactaccccagctctgagacctttgaggagatccagttttttaatggccacaactatcacaaaggcatcgactggtacatggagttcttccccatcccttccaacaccacctccgacttctactttgagaaaagcgccaactactttgattcagaagtggcgccccggcgggcagcagccctcttgcccaaagccaaggtcctgaccatcctcatcaaccccgcggaccgggcctattcctggtaccagcaccagcgagcccatgacgacccagtggccctaaagtacaccttccatgaggtgattaccgccggctctgacgcatcctcgaagctgcgtgccctccagaaccgctgcctggtccctggctggtacgccacccacatcgagcgctggctcagtgcctatcacgccaaccagattctggtcttggatggcaaactgcttcgcacagaacctgccaaagtgatggacatggtgcagaagttccttggggtgaccaacaccattgactaccacaaaaccttggcgtttgatccaaagaaaggattttggtgccaactgcttgaaggaggaaaaaccaagtgtctgggcaaaagcaagggccggaaatatcccgagatggacttggattcccgagccttcctgaaggactattaccgggaccacaacatcgagctctccaagctgctgtataagatgggccagacacttcccacttggctacgagaggacctccagaacaccaggtagccgtggccaccacagccagactgaacgtttgtgaaagctgggacatcccaccacacgctgagccagacctgcagagtgggaagctggaccagggcagctgcgcacttatgagcaatactctgtggaggtctggtggggctgggggagcacccaggcggatctgcaagcacctcggagcacccaccgctgggtctgcggcctaagggacctccctcgccagcagaggtccattccgttcccagctgctcctggggaggccgcttcctggtaggagggagtccacgagactcttttctgtccctcactgtgttccgccgactgtcccctctcgtcacccatcactccctgcttccgcagggcgcccctcagtattcgctgccatatgtccctgtcctccaggctgtaggggaggagagcctggccgggggagacagactggacatttccctgtttcgagccaggctcttccaaggggccagctgggtccccggagtcagtcctaggctggatgggagggtggccccctcaagaggactcccagcctccacatctggttcctaccttcacatctcaccctcccgttctggggaagaatttctggttcctacagtatccactccatcctcaaggcttcccgcagggccttggggcactgccttgccatcgggcccagttctccgggccccacctgcacccctttcttccccctgggatatgatgtgtggtgtttcctgtggtaaaagactgaggcaggccaggggtctgccagtaacatgttcccatgtacagacacggtccccacaccctcccagcctcaggcccaggcagacatgggcgagctggtgagactgccagccacggctttgcttagccacctgtggccgagggctctcagagacccccttaacctcccaaatactaagaagctaaaatattttaatattttgtttttttttttcttggtgccagagtttataccctgggtgctggggtcgcactgtgttatatatatatatatatatatatataatgtgtatatatatatattctattttttttggttgggttcgtttttaattcagtcctacaaaatggtggtaagccccagtctcaggggtcaccctgtcttagagctagagatgaggtggcagggagggaggctgtgtcctcagtggcctggggctgagcagaccttaggaagggnccctccccagtgccgtggctgctctggggctaccccaggtgaacagaggtggtgagatgcgcagggaagaccagctctctccaggacatcgggctgcgtgaagtccagtgaccctgaggggattttggccaaaggaaacagccagggctgggctaggagagctggggtcaaaagctgccccacccactctccctcacatggtgctaggctgggagctgccctgagagctgggatgcccaccaaggcccacagaactgtctccaggcccttgtagacagtgggatctctgggctgatttctggttggggtctgctcctaccccaccccatttaacaatgtgaagtgactgaggctggggtgcctctccctggccccctccaactgccaaattctgcttccctctgaaccccaggaaatactttctggagaggcttgtcttgttcagaagactctagcatcttggggctggaaggtcctttgacgggtatgaaacaggtccagaaaggggaggtggcctgcttggccgacgtcatggagccagctgggagcagggctgagcgttgaacccgaggctcccggttccaagtcccatcgtgctcctcttccaatgccacactgcctctgagcccatccttgggaccctactctgtgccaggttcctgtcccttcctccgtcacagcatggtcattccaggatatggggacaaaccactccttcccagccagggtgcctttgagccttctcattccgaggtctgcgtttgcatccctgtcgtgttctccctcgaggggtccttccccagcctgtgggggcctgggtctgttctgagctgattcccttttctccagttctctgctgggatgaagaaagttggacactcagtgggaccagctgcaggtggtttcactgtgtacacagcagtgtccccatcatgcctctcaatggggcctgcaagcctgggaacttgggcatcgttgggccagcaggatgagcagcaaagggtctgaggacagggtggcatgtctgcttgtgtgctcatgaagacatgcccacgccatggagccaggggcttacagagaggggcagtgacttccagagtcccatccgtcagtgaggggactgggctgcgggatgggtgaggatcttacagctcccaggttcggaaatctaccctctaggcctggaggcctctctcgcagagcatggaaggcaggagaggtgggctggcctagggcaggagctccacttctctctgcctctggctatgggaaggagcaggcggttggaaatcctgtgacagcagagatcttctggatttttgcctggacccttctgcaagcctggagactggacctgccacatgttccaagtctgtctgcctaggtcactgctgccacttctcctcccactaacagacctttcttgaagacccactaggtccagacactgccgggacttgcaggtatggggggtagaaggagaggcagataagctgcctggggggctgttagctaatgggtacaaggacaccccctcccgagaagagaagccacagatgagtgggccagcgaggccagtcttcaatgtccactaattcactctaagcatttggccaaaaaaaggagagagaaataactgaaattgttcaggtggctccatcgtctattctgtggtcccctccatgagcctttgccccagggtgggtgcaggtgcgagtgtcacctgcagctgcctcagtcattcagagttccagagccttctgtggtggagcatcctgctgcttggaggatgagtctgaagtttaaaaatgggccttttctgagcccccctgatgagcagtcagtgcttctgggcccagctaaggaagccatctgttcccagcagaggagagctgctgcgctgacctgcagaggttggtggtcccagcacagagctgtgcccatgggcttgttattgggttgtgttaaaggtgagaccttcctccattaatgtacaatctcgaactaactgctaataaagtggggt

SEQ ID NO: 102615 - DNA, 7974 bp, Homo sapiens
  misc_feature (4306)..(4306): n is a, c, g, or t
gcggccgcgattcggggaggtaggcgctgggccgaggaggtgcagccgtgttaaggagaggacattcgagagggcgtggcgaagtgaagaggaacctcacgccactgcctggagctccgagtctcgctctgtcgcccaggctgcagtgcagtgacgtgatctcggctcactgcaccctccgcctcccaggttcaagtgattcccctgcctcagcctcctgggtagctgggactacagccttagccccgtgggccccacggagtgagcggcatgcagcacccccgggcctgtccagtgtcctctggcctgctgccctgcacccccagaaggccctgacgccctggggcacttctgctctgcacaggaccacgcgggggtttgccatggtgacataaaggggcgcggaggaaggaaggagcgtgaccagcctgtggactgcgcccctggctgggaggaaggactgggggcccagatcctccactcccagtgccccacaagggcgtcgcttcctaagtctctgtgaatttgttggtcagtggacgattctcgtgtctcctcctgtgtggggccttggggtagccagggcaggccgggcctccggtggccaaggtctcggaggccaggatgcctgccctggcatgcctccggaggctgtgtcggcacgtgtccccgcaggctgtccttttcctgctgttcatcttctgcctgttcagcgttttcatctcggcctactacctatatggctggaagcgaggcctggagccctcggcggatgcccccgagcctgactgcggggacccgccgcctgtggcccccagtcgcctgctgccactcaagcctgtgcaggcagccaccccttcccgcacagacccgttggtgctggtctttgtggagagcctctactcgcaactgggccaggaggtggtggccatcctggagtccagccgcttcaaataccgcacagagattgcgccgggcaagggtgacatgcccacgctcactgacaagggccgtggccgcttcgccctcatcatctatgagaacatcctcaagtatgtcaacctggacgcctggaaccgggagctgctggacaagtactgtgtggcctacggcgtgggcatcattggcttcttcaaggccaatgagaacagcctgctgagtgcgcagctcaagggcttccccctgttcctgcactcaaacctgggcctgaaggactgcagcatcaaccccaagtccccgctgctctacgtgacgcgacctagcgaggtggagaaaggtgtgctccccggcgaggactggacggttttccagtcaaatcactccacctatgagccagtgctgctggccaagacgcgctcgtctgagtccatcccacacctgggcgcagacgccggcctgcatgctgcactgcacgccactgtggtccaggacctgggcctgcacgacggcatccagcgcgtgctgtttggcaacaacctgaacttctggctgcacaagcttgtcttcgtggatgccgtggccttcctcacggggaagcgcctctccctgccattggaccgctacatcctggtggacattgatgacatcttcgtgggcaaggagggcacacgcatgaaggtggaggacgtgaaggccctgtttgacacacagaacgaactacgcgcacacatcccaaacttcaccttcaacctgggctactcagggaaattcttccacacaggtaccaatgctgaggacgctggggatgatctgctgctgtcgtatgtgaaggagttctggtggttcccccacatgtggagccacatgcagccccaccttttccacaaccagtccgtgttggccgagcagatggccttgaacaagaagttcgctgtcgagcatggcattcccacagacatggggtatgcagtggcgccccaccactcgggcgtgtaccccgtgcacgtgcagctgtacgaggcttggaagcaggtgtggagcatccgcgtgaccagcacggaggagtacccccacctgaagccagcccgctaccgccgtggcttcatccacaatggcatcatggttctcccacggcagacctgcggcctcttcacacacaccatcttctacaacgagtaccctggcggctccagtgagctggacaagatcatcaacgggggcgagctcttcctcaccgtgctcctcaatcctatcagcatcttcatgacgcacctgtccaactatgggaatgaccgcctgggcctgtacaccttcaagcacctggtgcgcttcctgcactcctggaccaacctccggctgcagacactgccccctgtgcagttggcgcagaagtacttccagatcttctccgaggagaaggacccgctctggcaggacccctgcgaggacaaacgtcacaaagacatctggtccaaggagaagacgtgtgaccgcttcccaaagctcctcatcatcggcccccagaaaacaggcaccactgccctctacctgttcctgggcatgcaccctgacctaagcagcaactaccccagctctgagacctttgaggagatccagttttttaatggccacaactatcacaaaggcatcgactggtacatggagttcttccccatcccttccaacaccacctccgacttctactttgagaaaagcgccaactactttgattcagaagtggcgccccggcgggcagcagccctcttgcccaaagccaaggtcctgaccatcctcatcaaccccgcggaccgggcctattcctggtaccagattctggtcttggatggcaaactgcttcgcacagaacctgccaaagtgatggacatggtgcagaagttccttggggtgaccaacaccattgactaccacaaaaccttggcgtttgatccaaagaaaggattttggtgccaactgcttgaaggaggaaaaaccaagtgtctgggcaaaagcaagggccggaaatatcccgagatggacttggattcccgagccttcctgaaggactattaccgggaccacaacatcgagctctccaagctgctgtataagatgggccagacacttcccacttggctacgagaggacctccagaacaccaggtagccgtggccaccacagccagactgaacgtttgtgaaagctgggacatcccaccacacgctgagccagacctgcagagtgggaagctggaccagggcagctgcgcacttatgagcaatactctgtggaggtctggtggggctgggggagcacccaggcggatctgcaagcacctcggagcacccaccgctgggtctgcggcctaagggacctccctcgccagcagaggtccattccgttcccagctgctcctggggaggccgcttcctggtaggagggagtccacgagactcttttctgtccctcactgtgttccgccgactgtcccctctcgtcacccatcactccctgcttccgcagggcgcccctcagtattcgctgccatatgtccctgtcctccaggctgtaggggaggagagcctggccgggggagacagactggacatttccctgtttcgagccaggctcttccaaggggccagctgggtccccggagtcagtcctaggctggatgggagggtggccccctcaagaggactcccagcctccacatctggttcctaccttcacatctcaccctcccgttctggggaagaatttctggttcctacagtatccactccatcctcaaggcttcccgcagggccttggggcactgccttgccatcgggcccagttctccgggccccacctgcacccctttcttccccctgggatatgatgtgtggtgtttcctgtggtaaaagactgaggcaggccaggggtctgccagtaacatgttcccatgtacagacacggtccccacaccctcccagcctcaggcccaggcagacatgggcgagctggtgagactgccagccacggctttgcttagccacctgtggccgagggctctcagagacccccttaacctcccaaatactaagaagctaaaatattttaatattttgtttttttttttcttggtgccagagtttataccctgggtgctggggtcgcactgtgttatatatatatatatatatatatataatgtgtatatatatatattctattttttttggttgggttcgtttttaattcagtcctacaaaatggtggtaagccccagtctcaggggtcaccctgtcttagagctagagatgaggtggcagggagggaggctgtgtcctcagtggcctggggctgagcagaccttaggaagggnccctccccagtgccgtggctgctctggggctaccccaggtgaacagaggtggtgagatgcgcagggaagaccagctctctccaggacatcgggctgcgtgaagtccagtgaccctgaggggattttggccaaaggaaacagccagggctgggctaggagagctggggtcaaaagctgccccacccactctccctcacatggtgctaggctgggagctgccctgagagctgggatgcccaccaaggcccacagaactgtctccaggcccttgtagacagtgggatctctgggctgatttctggttggggtctgctcctaccccaccccatttaacaatgtgaagtgactgaggctggggtgcctctccctggccccctccaactgccaaattctgcttccctctgaaccccaggaaatactttctggagaggcttgtcttgttcagaagactctagcatcttggggctggaaggtcctttgacgggtatgaaacaggtccagaaaggggaggtggcctgcttggccgacgtcatggagccagctgggagcagggctgagcgttgaacccgaggctcccggttccaagtcccatcgtgctcctcttccaatgccacactgcctctgagcccatccttgggaccctactctgtgccaggttcctgtcccttcctccgtcacagcatggtcattccaggatatggggacaaaccactccttcccagccagggtgcctttgagccttctcattccgaggtctgcgtttgcatccctgtcgtgttctccctcgaggggtccttccccagcctgtgggggcctgggtctgttctgagctgattcccttttctccagttctctgctgggatgaagaaagttggacactcagtgggaccagctgcaggtggtttcactgtgtacacagcagtgtccccatcatgcctctcaatggggcctgcaagcctgggaacttgggcatcgttgggccagcaggatgagcagcaaagggtctgaggacagggtggcatgtctgcttgtgtgctcatgaagacatgcccacgccatggagccaggggcttacagagaggggcagtgacttccagagtcccatccgtcagtgaggggactgggctgcgggatgggtgaggatcttacagctcccaggttcggaaatctaccctctaggcctggaggcctctctcgcagagcatggaaggcaggagaggtgggctggcctagggcaggagctccacttctctctgcctctggctatgggaaggagcaggcggttggaaatcctgtgacagcagagatcttctggatttttgcctggacccttctgcaagcctggagactggacctgccacatgttccaagtctgtctgcctaggtcactgctgccacttctcctcccactaacagacctttcttgaagacccactaggtccagacactgccgggacttgcaggtatggggggtagaaggagaggcagataagctgcctggggggctgttagctaatgggtacaaggacaccccctcccgagaagagaagccacagatgagtgggccagcgaggccagtcttcaatgtccactaattcactctaagcatttggccaaaaaaaggagagagaaataactgaaattgttcaggtggctccatcgtctattctgtggtcccctccatgagcctttgccccagggtgggtgcaggtgcgagtgtcacctgcagctgcctcagtcattcagagttccagagccttctgtggtggagcatcctgctgcttggaggatgagtctgaagtttaaaaatgggccttttctgagcccccctgatgagcagtcagtgcttctgggcccagctaaggaagccatctgttcccagcagaggagagctgctgcgctgacctgcagaggttggtggtcccagcacagagctgtgcccatgggcttgttagtgggaaaagcaaatacaacaatgttttaccaaacatttaattatgaatgcccactccccagcatctagatctaaaattattaacattttgccacattctttttctctctctgtgtatgtatatgttttctctgtcctaatttaaaagtacattgcaaacatcatgaaacttgatccctgaaagcttcagcctgcatctcctaagagttagggcattgtcctacacattggcccagtatcacagccaagacgagaagtcatttcccagcgatgtctgctatctaatctgtattcaaatccccccaattgtctcccaggtaacttatgtgtctggttttggaatcagcatccagtcacggtgcacacattgcattttctaactatgtttttaaaacctctttgaatgctgaaaggtcttccctcagctcactttgagtttttaaatgacattgtttttgaggccctaggcctgctgtctttttgaagccccacattctgaatttgtcagattgtttgctcatggtgtcgcataaccacttcttctatcccctgtactttcaaggataatttaggctacatgagattttgccttttgtgctgacttgacagcttcacttctgcctaagatgcgcctccactgtcacctgtaccaagtgccaaaacagcagaggggccagttagagcaagagctctgggggggcccggaaagtctccctggagaaggccgtaatatctgggccttggaaggaaggacacagggctctggaaggaggaggctgcatgcctgaaggctgggccttcgaccctggggatgggccacagggcaccaaacacatcatatgtctctctctttctattttggggtcccagggttttcatttcctggagacccgtggtctgtgtgcactggagcagagccaggctctcagttgcagcagggaaaagcctacatggggaactgcctcccgcaagctgtggtgtgagaagagccctggctggcagcaggagctgtgaagtttcatcccagccgggtgcatttagtagctgcctgaccatcttcctcccaggccctcagtttcttcatctgtagaatgagcagataggggccacagcagggattttcacacatcaaaggaggcagcctctgctctagttgatgtgaggatgagggggcggcctagaccccctgctgcccaggccgttgaggcaacactgggttcctggcttgacagctgtgggctggctgcccttgccagctcagacggctggcgagttttcagcttccctaagggactggcatagggttttgtggggtcaatgccaggaacctgggggaaactggatgcgttttatcctaagaagttcatccctcctgctcttactgtttccggccctggaggagaatgagggaggagagggttttctatgactgtgttagcttttattattagcaagagggctccttttgtaatttgtgcatgaaattcatgtcatttcctgggagaggagagggccgactggagagggtggggggcacactggggaagcaggcagaggtttccttcccttgtaggggggtggggagagtggggagagggggtgctatccagttcgcctgatgagggctctcgaaccagccgttttgggttgtgttaaaggtgagaccttcctccattaatgtacaatctcgaactaactgctaataaagtggggt

SEQ ID NO: 102616 - DNA, 6899 bp, Homo sapiens
  misc_feature (3231)..(3231): n is a, c, g, or t
tcaacagcttttcctgtgtgaatgtcaaaggtgtgctccccggcgaggactggacggttttccagtcaaatcactccacctatgagccagtgctgctggccaagacgcgctcgtctgagtccatcccacacctgggcgcagacgccggcctgcatgctgcactgcacgccactgtggtccaggacctgggcctgcacgacggcatccagcgcgtgctgtttggcaacaacctgaacttctggctgcacaagcttgtcttcgtggatgccgtggccttcctcacggggaagcgcctctccctgccattggaccgctacatcctggtggacattgatgacatcttcgtgggcaaggagggcacacgcatgaaggtggaggacgtgaaggccctgtttgacacacagaacgaactacgcgcacacatcccaaacttcaccttcaacctgggctactcagggaaattcttccacacaggtaccaatgctgaggacgctggggatgatctgctgctgtcgtatgtgaaggagttctggtggttcccccacatgtggagccacatgcagccccaccttttccacaaccagtccgtgttggccgagcagatggccttgaacaagaagttcgctgtcgagcatggcattcccacagacatggggtatgcagtggcgccccaccactcgggcgtgtaccccgtgcacgtgcagctgtacgaggcttggaagcaggtgtggagcatccgcgtgaccagcacggaggagtacccccacctgaagccagcccgctaccgccgtggcttcatccacaatggcatcatggttctcccacggcagacctgcggcctcttcacacacaccatcttctacaacgagtaccctggcggctccagtgagctggacaagatcatcaacgggggcgagctcttcctcaccgtgctcctcaatcctatcagcatcttcatgacgcacctgtccaactatgggaatgaccgcctgggcctgtacaccttcaagcacctggtgcgcttcctgcactcctggaccaacctccggctgcagacactgccccctgtgcagttggcgcagaagtacttccagatcttctccgaggagaaggacccgctctggcaggacccctgcgaggacaaacgtcacaaagacatctggtccaaggagaagacgtgtgaccgcttcccaaagctcctcatcatcggcccccagaaaacaggcaccactgccctctacctgttcctgggcatgcaccctgacctaagcagcaactaccccagctctgagacctttgaggagatccagttttttaatggccacaactatcacaaaggcatcgactggtacatggagttcttccccatcccttccaacaccacctccgacttctactttgagaaaagcgccaactactttgattcagaagtggcgccccggcgggcagcagccctcttgcccaaagccaaggtcctgaccatcctcatcaaccccgcggaccgggcctattcctggtaccagcaccagcgagcccatgacgacccagtggccctaaagtacaccttccatgaggtgattaccgccggctctgacgcatcctcgaagctgcgtgccctccagaaccgctgcctggtccctggctggtacgccacccacatcgagcgctggctcagtgcctatcacgccaaccagattctggtcttggatggcaaactgcttcgcacagaacctgccaaagtgatggacatggtgcagaagttccttggggtgaccaacaccattgactaccacaaaaccttggcgtttgatccaaagaaaggattttggtgccaactgcttgaaggaggaaaaaccaagtgtctgggcaaaagcaagggccggaaatatcccgagatggacttggattcccgagccttcctgaaggactattaccgggaccacaacatcgagctctccaagctgctgtataagatgggccagacacttcccacttggctacgagaggacctccagaacaccaggtagccgtggccaccacagccagactgaacgtttgtgaaagctgggacatcccaccacacgctgagccagacctgcagagtgggaagctggaccagggcagctgcgcacttatgagcaatactctgtggaggtctggtggggctgggggagcacccaggcggatctgcaagcacctcggagcacccaccgctgggtctgcggcctaagggacctccctcgccagcagaggtccattccgttcccagctgctcctggggaggccgcttcctggtaggagggagtccacgagactcttttctgtccctcactgtgttccgccgactgtcccctctcgtcacccatcactccctgcttccgcagggcgcccctcagtattcgctgccatatgtccctgtcctccaggctgtaggggaggagagcctggccgggggagacagactggacatttccctgtttcgagccaggctcttccaaggggccagctgggtccccggagtcagtcctaggctggatgggagggtggccccctcaagaggactcccagcctccacatctggttcctaccttcacatctcaccctcccgttctggggaagaatttctggttcctacagtatccactccatcctcaaggcttcccgcagggccttggggcactgccttgccatcgggcccagttctccgggccccacctgcacccctttcttccccctgggatatgatgtgtggtgtttcctgtggtaaaagactgaggcaggccaggggtctgccagtaacatgttcccatgtacagacacggtccccacaccctcccagcctcaggcccaggcagacatgggcgagctggtgagactgccagccacggctttgcttagccacctgtggccgagggctctcagagacccccttaacctcccaaatactaagaagctaaaatattttaatattttgtttttttttttcttggtgccagagtttataccctgggtgctggggtcgcactgtgttatatatatatatatatatatatataatgtgtatatatatatattctattttttttggttgggttcgtttttaattcagtcctacaaaatggtggtaagccccagtctcaggggtcaccctgtcttagagctagagatgaggtggcagggagggaggctgtgtcctcagtggcctggggctgagcagaccttaggaagggnccctccccagtgccgtggctgctctggggctaccccaggtgaacagaggtggtgagatgcgcagggaagaccagctctctccaggacatcgggctgcgtgaagtccagtgaccctgaggggattttggccaaaggaaacagccagggctgggctaggagagctggggtcaaaagctgccccacccactctccctcacatggtgctaggctgggagctgccctgagagctgggatgcccaccaaggcccacagaactgtctccaggcccttgtagacagtgggatctctgggctgatttctggttggggtctgctcctaccccaccccatttaacaatgtgaagtgactgaggctggggtgcctctccctggccccctccaactgccaaattctgcttccctctgaaccccaggaaatactttctggagaggcttgtcttgttcagaagactctagcatcttggggctggaaggtcctttgacgggtatgaaacaggtccagaaaggggaggtggcctgcttggccgacgtcatggagccagctgggagcagggctgagcgttgaacccgaggctcccggttccaagtcccatcgtgctcctcttccaatgccacactgcctctgagcccatccttgggaccctactctgtgccaggttcctgtcccttcctccgtcacagcatggtcattccaggatatggggacaaaccactccttcccagccagggtgcctttgagccttctcattccgaggtctgcgtttgcatccctgtcgtgttctccctcgaggggtccttccccagcctgtgggggcctgggtctgttctgagctgattcccttttctccagttctctgctgggatgaagaaagttggacactcagtgggaccagctgcaggtggtttcactgtgtacacagcagtgtccccatcatgcctctcaatggggcctgcaagcctgggaacttgggcatcgttgggccagcaggatgagcagcaaagggtctgaggacagggtggcatgtctgcttgtgtgctcatgaagacatgcccacgccatggagccaggggcttacagagaggggcagtgacttccagagtcccatccgtcagtgaggggactgggctgcgggatgggtgaggatcttacagctcccaggttcggaaatctaccctctaggcctggaggcctctctcgcagagcatggaaggcaggagaggtgggctggcctagggcaggagctccacttctctctgcctctggctatgggaaggagcaggcggttggaaatcctgtgacagcagagatcttctggatttttgcctggacccttctgcaagcctggagactggacctgccacatgttccaagtctgtctgcctaggtcactgctgccacttctcctcccactaacagacctttcttgaagacccactaggtccagacactgccgggacttgcaggtatggggggtagaaggagaggcagataagctgcctggggggctgttagctaatgggtacaaggacaccccctcccgagaagagaagccacagatgagtgggccagcgaggccagtcttcaatgtccactaattcactctaagcatttggccaaaaaaaggagagagaaataactgaaattgttcaggtggctccatcgtctattctgtggtcccctccatgagcctttgccccagggtgggtgcaggtgcgagtgtcacctgcagctgcctcagtcattcagagttccagagccttctgtggtggagcatcctgctgcttggaggatgagtctgaagtttaaaaatgggccttttctgagcccccctgatgagcagtcagtgcttctgggcccagctaaggaagccatctgttcccagcagaggagagctgctgcgctgacctgcagaggttggtggtcccagcacagagctgtgcccatgggcttgttagtgggaaaagcaaatacaacaatgttttaccaaacatttaattatgaatgcccactccccagcatctagatctaaaattattaacattttgccacattctttttctctctctgtgtatgtatatgttttctctgtcctaatttaaaagtacattgcaaacatcatgaaacttgatccctgaaagcttcagcctgcatctcctaagagttagggcattgtcctacacattggcccagtatcacagccaagacgagaagtcatttcccagcgatgtctgctatctaatctgtattcaaatccccccaattgtctcccaggtaacttatgtgtctggttttggaatcagcatccagtcacggtgcacacattgcattttctaactatgtttttaaaacctctttgaatgctgaaaggtcttccctcagctcactttgagtttttaaatgacattgtttttgaggccctaggcctgctgtctttttgaagccccacattctgaatttgtcagattgtttgctcatggtgtcgcataaccacttcttctatcccctgtactttcaaggataatttaggctacatgagattttgccttttgtgctgacttgacagcttcacttctgcctaagatgcgcctccactgtcacctgtaccaagtgccaaaacagcagaggggccagttagagcaagagctctgggggggcccggaaagtctccctggagaaggccgtaatatctgggccttggaaggaaggacacagggctctggaaggaggaggctgcatgcctgaaggctgggccttcgaccctggggatgggccacagggcaccaaacacatcatatgtctctctctttctattttggggtcccagggttttcatttcctggagacccgtggtctgtgtgcactggagcagagccaggctctcagttgcagcagggaaaagcctacatggggaactgcctcccgcaagctgtggtgtgagaagagccctggctggcagcaggagctgtgaagtttcatcccagccgggtgcatttagtagctgcctgaccatcttcctcccaggccctcagtttcttcatctgtagaatgagcagataggggccacagcagggattttcacacatcaaaggaggcagcctctgctctagttgatgtgaggatgagggggcggcctagaccccctgctgcccaggccgttgaggcaacactgggttcctggcttgacagctgtgggctggctgcccttgccagctcagacggctggcgagttttcagcttccctaagggactggcatagggttttgtggggtcaatgccaggaacctgggggaaactggatgcgttttatcctaagaagttcatccctcctgctcttactgtttccggccctggaggagaatgagggaggagagggttttctatgactgtgttagcttttattattagcaagagggctccttttgtaatttgtgcatgaaattcatgtcatttcctgggagaggagagggccgactggagagggtggggggcacactggggaagcaggcagaggtttccttcccttgtaggggggtggggagagtggggagagggggtgctatccagttcgcctgatgagggctctcgaaccagccgttttgggttgtgttaaaggtgagaccttcctccattaatgtacaatctcgaactaactgctaataaagtggggt

SEQ ID NO: 102617 - DNA, 6802 bp, Homo sapiens
  misc_feature (3134)..(3134): n is a, c, g, or t
gcggccgcgattcggggaggtaggcgctgggccgaggaggtgcagccgtgttaaggagaggacattcgagagggcgtggcgaagtgaagaggaacctcacgccactgcctggagctccgagtctcgctctgtcgcccaggctgcagtgcagtgacgtgatctcggctcactgcaccctccgcctcccaggttcaagtgattcccctgcctcagcctcctgggtagctgggactacagccttagccccgtgggccccacggagtgagcggcatgcagcacccccgggcctgtccagtgtcctctggcctgctgccctgcacccccagaaggccctgacgccctggggcacttctgctctgcacaggaccacgcgggggtttgccatggtgacataaaggggcgcggaggaaggaaggagcgtgaccagcctgtggactgcgcccctggctgggaggaaggactgggggcccagatcctccactcccagtgccccacaagggcgtcgcttcctaagtctctgtgaatttgttggtcagtggacgattctcgtgtctcctcctgtgtggggccttggggtagccagggcaggccgggcctccggtggccaaggtctcggaggccaggatgcctgccctggcatgcctccggaggctgtgtcggcacgtgtccccgcaggctgtccttttcctgctgttcatcttctgcctgttcagcgttttcatctcggcctactacctatatggctggaagcgaggcctggagccctcggcggatgcccccgagcctgactgcggggacccgccgcctgtggcccccagtcgcctgctgccactcaagcctgtgcaggcagccaccccttcccgcacagacccgttggtgctggtctttgtggagagcctctactcgcaactgggccaggaggtggtggccatcctggagtccagccgcttcaaataccgcacagagattgcgccgggcaagggtgacatgcccacgctcactgacaagggccgtggccgcttcgccctcatcatctatgagaacatcctcaagtatgtcaacctggacgcctggaaccgggagctgctggacaagtactgtgtggcctacggcgtgggcatcattggcttcttcaaggccaatgagaacagcctgctgagtgcgcagctcaagggcttccccctgttcctgcactcaaacctgggcctgaaggactgcagcatcaaccccaagtccccgctgctctacgtgacgcgacctagcgaggtggagaaaggtgtgctccccggcgaggactggacggttttccagtcaaatcactccacctatgagccagtgctgctggccaagacgcgctcgtctgagtccatcccacacctgggcgcagacgccggcctgcatgctgcactgcacgccactgtggtccaggacctgggcctgcacgacggcatccagcgcgtgctgtttggcaacaacctgaacttctggctgcacaagcttgtcttcgtggatgccgtggccttcctcacggggaagcgcctctccctgccattggaccgctacatcctggtggacattgatgacatcttcgtgggcaaggagggcacacgcatgaaggtggaggacgtgaaggccctgtttgacacacagaacgaactacgcgcacacatcccaaacttcaccttcaacctgggctactcagggaaattcttccacacaggtaccaatgctgaggacgctggggatgatctgctgctgtcgtatgtgaaggagttctggtggttcccccacatgtggagccacatgcagccccaccttttccacaaccagtccgtgttggccgagcagatggccttgaacaagaagttcgctgtcgagcatggcattcccacagacatggggtatgcagtggcgccccaccactcgggcgtgtaccccgtgcacgtgcagctgtacgaggcttggaagcaggtgtggagcatccgcgtgaccagcacggaggagtacccccacctgaagccagcccgctaccgccgtggcttcatccacaatggcatcatggttctcccacggcagacctgcggcctcttcacacacaccatcttctacaacgagtaccctggcggctccagtgagctggacaagatcatcaacgggggcgagctcttcctcaccgtgctcctcaatcctatcagcatcttcatgacgcacctgtccaactatgggaatgaccgcctgggcctgtacaccttcaagcacctggtgcgcttcctgcactcctggaccaacctccggctgcagacactgccccctgtgcagttggcgcagaagtacttccagatcttctccgaggagaaggacccgctctggcaggacccctgcgaggacaaacgtcacaaagacatctggtccaaggagaagacgtgtgaccgcttcccaaagctcctcatcatcggcccccagaaaacaggcaccactgccctctacctgttcctgggcatgcaccctgacctaagcagcaactaccccagctctgagacctttgaggagatccagttttttaatggccacaactatcacaaaggcatcgactggtacatggagttcttccccatcccttccaacaccacctccgacttctactttgagaaaagcgccaactactttgattcagaagtggcgccccggcgggcagcagccctcttgcccaaagccaaggtcctgaccatcctcatcaaccccgcggaccgggcctattcctggtaccagctggtgagactgccagccacggctttgcttagccacctgtggccgagggctctcagagacccccttaacctcccaaatactaagaagctaaaatattttaatattttgtttttttttttcttggtgccagagtttataccctgggtgctggggtcgcactgtgttatatatatatatatatatatatataatgtgtatatatatatattctattttttttggttgggttcgtttttaattcagtcctacaaaatggtggtaagccccagtctcaggggtcaccctgtcttagagctagagatgaggtggcagggagggaggctgtgtcctcagtggcctggggctgagcagaccttaggaagggnccctccccagtgccgtggctgctctggggctaccccaggtgaacagaggtggtgagatgcgcagggaagaccagctctctccaggacatcgggctgcgtgaagtccagtgaccctgaggggattttggccaaaggaaacagccagggctgggctaggagagctggggtcaaaagctgccccacccactctccctcacatggtgctaggctgggagctgccctgagagctgggatgcccaccaaggcccacagaactgtctccaggcccttgtagacagtgggatctctgggctgatttctggttggggtctgctcctaccccaccccatttaacaatgtgaagtgactgaggctggggtgcctctccctggccccctccaactgccaaattctgcttccctctgaaccccaggaaatactttctggagaggcttgtcttgttcagaagactctagcatcttggggctggaaggtcctttgacgggtatgaaacaggtccagaaaggggaggtggcctgcttggccgacgtcatggagccagctgggagcagggctgagcgttgaacccgaggctcccggttccaagtcccatcgtgctcctcttccaatgccacactgcctctgagcccatccttgggaccctactctgtgccaggttcctgtcccttcctccgtcacagcatggtcattccaggatatggggacaaaccactccttcccagccagggtgcctttgagccttctcattccgaggtctgcgtttgcatccctgtcgtgttctccctcgaggggtccttccccagcctgtgggggcctgggtctgttctgagctgattcccttttctccagttctctgctgggatgaagaaagttggacactcagtgggaccagctgcaggtggtttcactgtgtacacagcagtgtccccatcatgcctctcaatggggcctgcaagcctgggaacttgggcatcgttgggccagcaggatgagcagcaaagggtctgaggacagggtggcatgtctgcttgtgtgctcatgaagacatgcccacgccatggagccaggggcttacagagaggggcagtgacttccagagtcccatccgtcagtgaggggactgggctgcgggatgggtgaggatcttacagctcccaggttcggaaatctaccctctaggcctggaggcctctctcgcagagcatggaaggcaggagaggtgggctggcctagggcaggagctccacttctctctgcctctggctatgggaaggagcaggcggttggaaatcctgtgacagcagagatcttctggatttttgcctggacccttctgcaagcctggagactggacctgccacatgttccaagtctgtctgcctaggtcactgctgccacttctcctcccactaacagacctttcttgaagacccactaggtccagacactgccgggacttgcaggtatggggggtagaaggagaggcagataagctgcctggggggctgttagctaatgggtacaaggacaccccctcccgagaagagaagccacagatgagtgggccagcgaggccagtcttcaatgtccactaattcactctaagcatttggccaaaaaaaggagagagaaataactgaaattgttcaggtggctccatcgtctattctgtggtcccctccatgagcctttgccccagggtgggtgcaggtgcgagtgtcacctgcagctgcctcagtcattcagagttccagagccttctgtggtggagcatcctgctgcttggaggatgagtctgaagtttaaaaatgggccttttctgagcccccctgatgagcagtcagtgcttctgggcccagctaaggaagccatctgttcccagcagaggagagctgctgcgctgacctgcagaggttggtggtcccagcacagagctgtgcccatgggcttgttagtgggaaaagcaaatacaacaatgttttaccaaacatttaattatgaatgcccactccccagcatctagatctaaaattattaacattttgccacattctttttctctctctgtgtatgtatatgttttctctgtcctaatttaaaagtacattgcaaacatcatgaaacttgatccctgaaagcttcagcctgcatctcctaagagttagggcattgtcctacacattggcccagtatcacagccaagacgagaagtcatttcccagcgatgtctgctatctaatctgtattcaaatccccccaattgtctcccaggtaacttatgtgtctggttttggaatcagcatccagtcacggtgcacacattgcattttctaactatgtttttaaaacctctttgaatgctgaaaggtcttccctcagctcactttgagtttttaaatgacattgtttttgaggccctaggcctgctgtctttttgaagccccacattctgaatttgtcagattgtttgctcatggtgtcgcataaccacttcttctatcccctgtactttcaaggataatttaggctacatgagattttgccttttgtgctgacttgacagcttcacttctgcctaagatgcgcctccactgtcacctgtaccaagtgccaaaacagcagaggggccagttagagcaagagctctgggggggcccggaaagtctccctggagaaggccgtaatatctgggccttggaaggaaggacacagggctctggaaggaggaggctgcatgcctgaaggctgggccttcgaccctggggatgggccacagggcaccaaacacatcatatgtctctctctttctattttggggtcccagggttttcatttcctggagacccgtggtctgtgtgcactggagcagagccaggctctcagttgcagcagggaaaagcctacatggggaactgcctcccgcaagctgtggtgtgagaagagccctggctggcagcaggagctgtgaagtttcatcccagccgggtgcatttagtagctgcctgaccatcttcctcccaggccctcagtttcttcatctgtagaatgagcagataggggccacagcagggattttcacacatcaaaggaggcagcctctgctctagttgatgtgaggatgagggggcggcctagaccccctgctgcccaggccgttgaggcaacactgggttcctggcttgacagctgtgggctggctgcccttgccagctcagacggctggcgagttttcagcttccctaagggactggcatagggttttgtggggtcaatgccaggaacctgggggaaactggatgcgttttatcctaagaagttcatccctcctgctcttactgtttccggccctggaggagaatgagggaggagagggttttctatgactgtgttagcttttattattagcaagagggctccttttgtaatttgtgcatgaaattcatgtcatttcctgggagaggagagggccgactggagagggtggggggcacactggggaagcaggcagaggtttccttcccttgtaggggggtggggagagtggggagagggggtgctatccagttcgcctgatgagggctctcgaaccagccgttttgggttgtgttaaaggtgagaccttcctccattaatgtacaatctcgaactaactgctaataaagtggggt

SEQ ID NO: 102618 - DNA, 1933 bp, Homo sapiens
ctgcatgcatactagcttggcgtgacggtcgtagcatcccgtcgtgttgctgggatgagtctgaagtttaaaaatgggccttttctgagcccccctgatgagcagtcagtgcttctgggcccagctaaggaagccatctgttcccagcagaggagagctgctgcgctgacctgcagaggttggtggtcccagcacagagctgtgcccatgggcttgttagtgggaaaagcaaatacaacaatgttttaccaaacatttaattatgaatgcccactccccagcatctagatctaaaattattaacattttgccacattctttttctctctctgtgtatgtatatgttttctctgtcctaatttaaaagtacattgcaaacatcatgaaacttgatccctgaaagcttcagcctgcatctcctaagagttagggcattgtcctacacattggcccagtatcacagccaagacgagaagtcatttcccagcgatgtctgctatctaatctgtattcaaatccccccaattgtctcccaggtaacttatgtgtctggttttggaatcagcatccagtcacggtgcacacattgcattttctaactatgtttttaaaacctctttgaatgctgaaaggtcttccctcagctcactttgagtttttaaatgacattgtttttgaggccctaggcctgctgtctttttgaagccccacattctgaatttgtcagattgtttgctcatggtgtcgcataaccacttcttctatcccctgtactttcaaggataatttaggctacatgagattttgccttttgtgctgacttgacagcttcacttctgcctaagatgcgcctccactgtcacctgtaccaagtgccaaaacagcagaggggccagttagagcaagagctctgggggggcccggaaagtctccctggagaaggccgtaatatctgggccttggaaggaaggacacagggctctggaaggaggaggctgcatgcctgaaggctgggccttcgaccctggggatgggccacagggcaccaaacacatcatatgtctctctctttctattttggggtcccagggttttcatttcctggagacccgtggtctgtgtgcactggagcagagccaggctctcagttgcagcagggaaaagcctacatggggaactgcctcccgcaagctgtggtgtgagaagagccctggctggcagcaggagctgtgaagtttcatcccagccgggtgcatttagtagctgcctgaccatcttcctcccaggccctcagtttcttcatctgtagaatgagcagataggggccacagcagggattttcacacatcaaaggaggcagcctctgctctagttgatgtgaggatgagggggcggcctagaccccctgctgcccaggccgttgaggcaacactgggttcctggcttgacagctgtgggctggctgcccttgccagctcagacggctggcgagttttcagcttccctaagggactggcatagggttttgtggggtcaatgccaggaacctgggggaaactggatgcgttttatcctaagaagttcatccctcctgctcttactgtttccggccctggaggagaatgagggaggagagggttttctatgactgtgttagcttttattattagcaagagggctccttttgtaatttgtgcatgaaattcatgtcatttcctgggagaggagagggccgactggagagggtggggggcacactggggaagcaggcagaggtttccttcccttgtaggggggtggggagagtggggagagggggtgctatccagttcgcctgatgagggctctcgaaccagccgttttgggttgtgttaaaggtgagaccttcctccattaatgtacaatctcgaactaactgctaataaagtggggt

SEQ ID NO: 102619 - DNA, 2610 bp, Homo sapiens
gcggccgcgattcggggaggtaggcgctgggccgaggaggtgcagccgtgttaaggagaggacattcgagagggcgtggcgaagtgaagaggaacctcacgccactgcctggagctccgagtctcgctctgtcgcccaggctgcagtgcagtgacgtgatctcggctcactgcaccctccgcctcccaggttcaagtgattcccctgcctcagcctcctgggtagctgggactacagccttagccccgtgggccccacggagtgagcggcatgcagcacccccgggcctgtccagtgtcctctggcctgctgccctgcacccccagaaggccctgacgccctggggcacttctgctctgcacaggaccacgcgggggtttgccatggtgacataaaggggcgcggaggaaggaaggagcgtgaccagcctgtggactgcgcccctggctgggaggaaggactgggggcccagatcctccactcccagtgccccacaagggcgtcgcttcctaagtctctgtgaatttgttggtcagtggacgattctcgtgtctcctcctgtgtggggccttggggtagccagggcaggccgggcctccggtggccaaggtctcggaggccaggatgcctgccctggcatgcctccggaggctgtgtcggcacgtgtccccgcaggctgtccttttcctgctgttcatcttctgcctgttcagcgttttcatctcggcctactacctatatggctggaagcgaggcctggagccctcggcggatgcccccgagcctgactgcggggacccgccgcctgtggcccccagtcgcctgctgccactcaagcctgtgcaggcagccaccccttcccgcacagacccgttggtgctggtctttgtggagagcctctactcgcaactgggccaggaggtggtggccatcctggagtccagccgcttcaaataccgcacagagattgcgccgggcaagggtgacatgcccacgctcactgacaagggccgtggccgcttcgccctcatcatctatgagaacatcctcaagtatgtcaacctggacgcctggaaccgggagctgctggacaagtactgtgtggcctacggcgtgggcatcattggcttcttcaaggccaatgagaacagcctgctgagtgcgcagctcaagggcttccccctgttcctgcactcaaacctgggcctgaaggactgcagcatcaaccccaagtccccgctgctctacgtgacgcgacctagcgaggtggagaaaggtgtgctccccggcgaggactggacggttttccagtcaaatcactccacctatgagccagtgctgctggccaagacgcgctcgtctgagtccatcccacacctgggcgcagacgccggcctgcatgctgcactgcacgccactgtggtccaggacctgggcctgcacgacggcatccagcgcgtgctgtttggcaacaacctgaacttctggctgcacaagcttgtcttcgtggatgccgtggccttcctcacggggaagcgcctctccctgccattggaccgctacatcctggtggacattgatgacatcttcgtgggcaaggagggcacacgcatgaaggtggaggacgtgaaggccctgtttgacacacagaacgaactacgcgcacacatcccaaacttcaccttcaacctgggctactcagggaaattcttccacacaggtaccaatgctgaggacgctggggatgatctgctgctgtcgtatgtgaaggagttctggtggttcccccacatgtggagccacatgcagccccaccttttccacaaccagtccgtgttggccgagcagatggccttgaacaagaagttcgctgtcgagcatggcattcccacagacatggggtatgcagtggcgccccaccactcgggcgtgtaccccgtgcacgtgcagctgtacgaggcttggaagcaggtgtggagcatccgcgtgaccagcacggaggagtacccccacctgaagccagcccgctaccgccgtggcttcatccacaatggcatcatggttctcccacggcagacctgcggcctcttcacacacaccatcttctacaacgagtaccctggcggctccagtgagctggacaagatcatcaacgggggcgagctcttcctcaccgtgctcctcaatcctgtgagtgctccacagcccatggctgctggtgagaaggggctgctgcacagcctgtctgcagctgacacaggcttcctggagccaggaaagggtggagaggcatgagtgagtgcctggcagttgggagacccactctccagcactggccctgcctcggctgtgtgaccttggctaaagaatccgagcatgctttttttttcctttcctaatcatgtactttaatacaaaagtgttggcatttttatgcatgttcccttcagtctttgctcatgtgtgtatacacacatacacagatacacacacatatatgaacaacatttgagttttctaggtctcgctttccttatttgtaaaatgcaaacaattacctctgctttaataatattaaataaacttcaagtggtggttgttattcagctc

SEQ ID NO: 102620 - DNA, 3326 bp, Homo sapiens
gcggccgcgattcggggaggtaggcgctgggccgaggaggtgcagccgtgttaaggagaggacattcgagagggcgtggcgaagtgaagaggaacctcacgccactgcctggagctccgagtctcgctctgtcgcccaggctgcagtgcagtgacgtgatctcggctcactgcaccctccgcctcccaggttcaagtgattcccctgcctcagcctcctgggtagctgggactacagccttagccccgtgggccccacggagtgagcggcatgcagcacccccgggcctgtccagtgtcctctggcctgctgccctgcacccccagaaggccctgacgccctggggcacttctgctctgcacaggaccacgcgggggtttgccatggtgacataaaggggcgcggaggaaggaaggagcgtgaccagcctgtggactgcgcccctggctgggaggaaggactgggggcccagatcctccactcccagtgccccacaagggcgtcgcttcctaagtctctgtgaatttgttggtcagtggacgattctcgtgtctcctcctgtgtggggccttggggtagccagggcaggccgggcctccggtggccaaggtctcggaggccaggatgcctgccctggcatgcctccggaggctgtgtcggcacgtgtccccgcaggctgtccttttcctgctgttcatcttctgcctgttcagcgttttcatctcggcctactacctatatggctggaagcgaggcctggagccctcggcggatgcccccgagcctgactgcggggacccgccgcctgtggcccccagtcgcctgctgccactcaagcctgtgcaggcagccaccccttcccgcacagacccgttggtgctggtctttgtggagagcctctactcgcaactgggccaggaggtggtggccatcctggagtccagccgcttcaaataccgcacagagattgcgccgggcaagggtgacatgcccacgctcactgacaagggccgtggccgcttcgccctcatcatctatgagaacatcctcaagtatgtcaacctggacgcctggaaccgggagctgctggacaagtactgtgtggcctacggcgtgggcatcattggcttcttcaaggccaatgagaacagcctgctgagtgcgcagctcaagggcttccccctgttcctgcactcaaacctgggcctgaaggactgcagcatcaaccccaagtccccgctgctctacgtgacgcgacctagcgaggtggagaaaggtgtgctccccggcgaggactggacggttttccagtcaaatcactccacctatgagccagtgctgctggccaagacgcgctcgtctgagtccatcccacacctgggcgcagacgccggcctgcatgctgcactgcacgccactgtggtccaggacctgggcctgcacgacggcatccagcgcgtgctgtttggcaacaacctgaacttctggctgcacaagcttgtcttcgtggatgccgtggccttcctcacggggaagcgcctctccctgccattggaccgctacatcctggtggacattgatgacatcttcgtgggcaaggagggcacacgcatgaaggtggaggacgtgaaggccctgtttgacacacagaacgaactacgcgcacacatcccaaacttcaccttcaacctgggctactcagggaaattcttccacacaggtaccaatgctgaggacgctggggatgatctgctgctgtcgtatgtgaaggagttctggtggttcccccacatgtggagccacatgcagccccaccttttccacaaccagtccgtgttggccgagcagatggccttgaacaagaagttcgctgtcgagcatggcattcccacagacatggggtatgcagtggcgccccaccactcgggcgtgtaccccgtgcacgtgcagctgtacgaggcttggaagcaggtgtggagcatccgcgtgaccagcacggaggagtacccccacctgaagccagcccgctaccgccgtggcttcatccacaatggcatcatggttctcccacggcagacctgcggcctcttcacacacaccatcttctacaacgagtaccctggcggctccagtgagctggacaagatcatcaacgggggcgagctcttcctcaccgtgctcctcaatcctatcagcatcttcatgacgcacctgtccaactatgggaatgaccgcctgggcctgtacaccttcaagcacctggtgcgcttcctgcactcctggaccaacctccggctgcagacactgccccctgtgcagttggcgcagaagtacttccagatcttctccgaggagaaggacccgctctggcaggacccctgcgaggacaaacgtcacaaagacatctggtccaaggagaagacgtgtgaccgcttcccaaagctcctcatcatcggcccccagaaaacaggcaccactgccctctacctgttcctgggcatgcaccctgacctaagcagcaactaccccagctctgagacctttgaggagatccagttttttaatggccacaactatcacaaaggcatcgactggtacatggagttcttccccatcccttccaacaccacctccgacttctactttgagaaaagcgccaactactttgattcagaagtggcgccccggcgggcagcagccctcttgcccaaagccaaggtcctgaccatcctcatcaaccccgcggaccgggcctattcctggtaccagcaccagcgagcccatgacgacccagtggccctaaagtacaccttccatgaggtgattaccgccggctctgacgcatcctcgaagctgcgtgccctccagaaccgctgcctggtccctggctggtacgccacccacatcgagcgctggctcagtgcctatcacgccaaccagattctggtcttggatggcaaactgcttcgcacagaacctgccaaagtgatggacatggtgcagaagttccttggggtgaccaacaccattgactaccacaaaaccttggcgtttgatccaaagaaaggattttggtgccaactgcttgaaggaggaaaaaccaagtgtctgggcaaaagcaagggccggaaatatcccgagatggacttggatgtaagtggtggacacactacctgtagcacctgcataagggtaaggggtccctgtatggagttgagggggattctctttcctttaccatgcactcagcatgttcatggccttagcatttcttggacagtatttgtaagaggaggaaaatgggggctgggacatggtgggtcaga

SEQ ID NO: 102621 - DNA, 2765 bp, Homo sapiens
gcggccgcgattcggggaggtaggcgctgggccgaggaggtgcagccgtgttaaggagaggacattcgagagggcgtggcgaagtgaagaggaacctcacgccactgcctggagctccgagtctcgctctgtcgcccaggctgcagtgcagtgacgtgatctcggctcactgcaccctccgcctcccaggttcaagtgattcccctgcctcagcctcctgggtagctgggactacagccttagccccgtgggccccacggagtgagcggcatgcagcacccccgggcctgtccagtgtcctctggcctgctgccctgcacccccagaaggccctgacgccctggggcacttctgctctgcacaggaccacgcgggggtttgccatggtgacataaaggggcgcggaggaaggaaggagcgtgaccagcctgtggactgcgcccctggctgggaggaaggactgggggcccagatcctccactcccagtgccccacaagggcgtcgcttcctaagtctctgtgaatttgttggtcagtggacgattctcgtgtctcctcctgtgtggggccttggggtagccagggcaggccgggcctccggtggccaaggtctcggaggccaggatgcctgccctggcatgcctccggaggctgtgtcggcacgtgtccccgcaggctgtccttttcctgctgttcatcttctgcctgttcagcgttttcatctcggcctactacctatatggctggaagcgaggcctggagccctcggcggatgcccccgagcctgactgcggggacccgccgcctgtggcccccagtcgcctgctgccactcaagcctgtgcaggcagccaccccttcccgcacagacccgttggtgctggtctttgtggagagcctctactcgcaactgggccaggaggtggtggccatcctggagtccagccgcttcaaataccgcacagagattgcgccgggcaagggtgacatgcccacgctcactgacaagggccgtggccgcttcgccctcatcatctatgagaacatcctcaagtatgtcaacctggacgcctggaaccgggagctgctggacaagtactgtgtggcctacggcgtgggcatcattggcttcttcaaggccaatgagaacagcctgctgagtgcgcagctcaagggcttccccctgttcctgcactcaaacctgggcctgaaggactgcagcatcaaccccaagtccccgctgctctacgtgacgcgacctagcgaggtggagaaaggtgtgctccccggcgaggactggacggttttccagtcaaatcactccacctatgagccagtgctgctggccaagacgcgctcgtctgagtccatcccacacctgggcgcagacgccggcctgcatgctgcactgcacgccactgtggtccaggacctgggcctgcacgacggcatccagcgcgtgctgtttggcaacaacctgaacttctggctgcacaagcttgtcttcgtggatgccgtggccttcctcacggggaagcgcctctccctgccattggaccgctacatcctggtggacattgatgacatcttcgtgggcaaggagggcacacgcatgaaggtggaggacgtgaaggccctgtttgacacacagaacgaactacgcgcacacatcccaaacttcaccttcaacctgggctactcagggaaattcttccacacaggtaccaatgctgaggacgctggggatgatctgctgctgtcgtatgtgaaggagttctggtggttcccccacatgtggagccacatgcagccccaccttttccacaaccagtccgtgttggccgagcagatggccttgaacaagaagttcgctgtcgagcatggcattcccacagacatggggtatgcagtggcgccccaccactcgggcgtgtaccccgtgcacgtgcagctgtacgaggcttggaagcaggtgtggagcatccgcgtgaccagcacggaggagtacccccacctgaagccagcccgctaccgccgtggcttcatccacaatggcatcatggttctcccacggcagacctgcggcctcttcacacacaccatcttctacaacgagtaccctggcggctccagtgagctggacaagatcatcaacgggggcgagctcttcctcaccgtgctcctcaatcctatcagcatcttcatgacgcacctgtccaactatgggaatgaccgcctgggcctgtacaccttcaagcacctggtgcgcttcctgcactcctggaccaacctccggctgcagacactgccccctgtgcagttggcgcagaagtacttccagatcttctccgaggagaaggacccgctctggcaggacccctgcgaggacaaacgtcacaaagacatctggtccaaggagaagacgtgtgaccgcttcccaaagctcctcatcatcggcccccagaaaacaggcaccactgccctctacctgttcctgggcatgcaccctgacctaagcagcaactaccccagctctgagacctttgaggagatccagttttttaatggccacaactatcacaaaggcatcgactggtacatggagttcttccccatcccttccaacaccacctccgacttctactttgagaaaagcgccaactactttgattcagaagtggcgccccggcgggcagcagccctcttgcccaaagccaaggtcctgaccatccgaagcagtgccgaagatcctgctagatcacgata

SEQ ID NO: 102622 - DNA, 1208 bp, Homo sapiens
gcggccgcgattcggggaggtaggcgctgggccgaggaggtgcagccgtgttaaggagaggacattcgagagggcgtggcgaagtgaagaggaacctcacgccactgcctggagctccgagtctcgctctgtcgcccaggctgcagtgcagtgacgtgatctcggctcactgcaccctccgcctcccaggttcaagtgattcccctgcctcagcctcctgggtagctgggactacagccttagccccgtgggccccacggagtgagcggcatgcagcacccccgggcctgtccagtgtcctctggcctgctgccctgcacccccagaaggccctgacgccctggggcacttctgctctgcacaggaccacgcgggggtttgccatggtgacataaaggggcgcggaggaaggaaggagcgtgaccagcctgtggactgcgcccctggctgggaggaaggactgggggcccagatcctccactcccagtgccccacaagggcgtcgcttcctaagtctctgtgaatttgttggtcagtggacgattctcgtgtctcctcctgtgtggggccttggggtagccagggcaggccgggcctccggtggccaaggtctcggaggccaggatgcctgccctggcatgcctccggaggctgtgtcggcacgtgtccccgcaggctgtccttttcctgctgttcatcttctgcctgttcagcgttttcatctcggcctactacctatatggctggaagcgaggcctggagccctcggcggatgcccccgagcctgactgcggggacccgccgcctgtggcccccagtcgcctgctgccactcaagcctgtgcaggcagccaccccttcccgcacagacccgttggtgctggtctttgtggagagcctctactcgcaactgggccaggaggtggtggccatcctggagtccagccgcttcaaataccgcacagagattgcgccgggcaagggtgacatgcccacgctcactgacaagggccgtggccgcttcgccctcatcatctatgagaacatcctcaagtatgtcaacctggacgcctggaaccgggagctgctggacaagtactgtgtggcctacggcgtgggcatcattggcttcttcaaggtacacaagaagcagggtccccgagcagttcagagccccctctgcagctcagtgcctgaattctcatttgt

SEQ ID NO: 102623 - DNA, 676 bp, Homo sapiens
ccagctcccatccaaagactttcccacctccacaggtttgatccaaagaaaggattttggtgccaactgcttgaaggaggaaaaaccaagtgtctgggcaaaagcaagggccggaaatatcccgagatggacttggatgtaagtggtggacacactacctgtagcacctgcataagggtaaggggtccctgtatggagttgagggggattctctttcctttaccatgcactcagcatgttcatggccttagcatttcttggacagtatttgtaagaggaggaaaatgggggctgggacatggtgggtcagacctgatttcgtcaaacaagtgttggttaccttctactaagggctgagtgctgtggggttttgaggatgagccagacatgttctctgccttcaaggaactcctggtcttggaggggtatgagtcccaacaccactaagtagaatacaggcagagagtgctgcgcgcagtcagagagggcacacaagtgctatgggaattcagaacaaggggatgtcacttgaacctgagaggggtaaaaaaggctccttaaaggagggatgggggtctctggagttgcgcctagaaggatgagatccattttgtaggatttggacatatggaatgggagggtaggtaagaacagcatgtgtaaaaccataggggga

SEQ ID NO: 102624 - DNA, 500 bp, Homo sapiens
tagagggtgcagggtcccatatttataagcaggcccattcctgctgccgtggctgttgcccttgtttgccaccgaagtcaaagcaggtcccgatcccctttctccctttccagattctggtcttggatggcaaactgcttcgcacagaacctgccaaagtgatggacatggtgcagaagttccttggggtgaccaacaccattgactaccacaaaaccttggcgtgagtgttgccttttcctttctgcaggttatttccctgataaggcacctgggccaacaaagccaaagtcttgaataattatgagagagagaagttagttagagtcagaaagtatggaaagttattaatatgacttaagtcatattaataaaggtatcaccttaaaaaaaagggagatgatgaatctgttctactctggtcagaccatcctggggtcttctctttggtctgggctgaacattttcagagtgttttatgtaagtaaattagatcagta

SEQ ID NO: 102625 - DNA, 437 bp, Homo sapiens
cgctggcggcatcacgaaattatcttcatagctgttacctgaaccggaatcacgtcctatgtctgtaaacatttagtggacctcttgttagcgaggcaacctccagattatctaacactgcaatccatgttatttttcactacctaatgatactgcaaattctgttagatcttaaaaatccttttggctgggtacagtggctcattcctgtaatccaacctactcgagaaactgaggcagaagcattacctgaatccaggaggtcaagacttgcagtgagctgtgtttgtgccactacactgcagcctaggtgacagagcatgaccctgtctcaaaaaacaaaaatgaaaaaatccttttatttaccttccttcctcacccccacctcaatagcaatgtgaagcccatactatttgctgaatcaaatgaaataaata

SEQ ID NO: 102626 - DNA, 409 bp, Homo sapiens
agtctcgagctgtggcaggttttcgagggacagttcgttatgcatcaatcaacgcacatcggaacagacaaccagatactgcctcctgatgtgattcaagaggaagcatacaacccacctctgaagtatccttgcaaagtaaaactggaatcttatataatcatcaatttatagaaaatacaggggacagaaatacatattaaagacaaccacagggaaacaaccagcaaaatccagaatatggtaatgtgtgcatgtcaaattcctccatttttatcaacaacaataaacacaatgaaaagaaaattgcaagaaaataaaagacagagggtgaaccaattgattaaaagaggcttaagagataagcaatgtgtgaaccctatttggaactcaattcaaataaaccaaa

SEQ ID NO: 102627 - DNA, 331 bp, Homo sapiens
aactgtaggtggcttgactgtaggtgggcgcctctggaggggtgctggccaaggtcaagggtaaactaagagagggtgaaatttttctcctgagcttaagaggtgatgtccagagcggtgggaggaggagggcacttcctgagaacagggccagggaatgctttattcctagcaaaggaactcaagccccgctgcagccatcccaacccctaagggctggaagagggatgctgaacttagactcctcctcctcttaggagaaggcagtagtcagacacccagatcctcgacagtgactaggaacacacacacacacacacacacacacaca

SEQ ID NO: 102628 - DNA, 359 bp, Homo sapiens
atagagggaagaaatgaaggccaaaggaaatatgtgaaagaataaaaaatagaacaacagaacagaagaagagagaccaaaaacaggtccatgaatacttatgacaaaagtggcactgtaatgtggagtggttgatattttcagtaatttgtgcttgaacaattgagtgtttctgtagaagaaaaaattggaccattatcataaaatcagttatatttggattatagttttaaatgtaaaggcaaaacaataaagcctttagaggataatgttaaaatatcttcttaatggttggatagagggattttttttaacaaggcataaagtgactatattataattaagaactcatgttaagc

SEQ ID NO: 102629 - DNA, 401 bp, Homo sapiens
gtcagagcaaataatgccatgccttgggtagaataaaggtattgctgttcatctcaatgcctacagccagtgtttcttagccatgtgatttccgacgagttattttacctctctgaccctcagtttccatctctctccacagggacttcatgggaattacattaaatgatacttgtaaggagttgggctgtgggagaaacacaacagctagtggctgtaattttgttgttgtgtgtgtcagtaagatgatggatgcagagcatgtcacacagttcctgatacacacaggcctctgtaacattggctgtggcttggactgatacgtagccataggagtgcagttggagaagagaggcatgtattagtccattctcacacgactataaagaactacttgagac

SEQ ID NO: 102630 - DNA, 467 bp, Homo sapiens
ctttccagtatctctgaacactgaaaagcctcagaactcagttttcaaacatctgctcctctctgcacgtgctctagagcgtgctgtccaggctagttgcaacagctcttgataccacggaatactggagacacgtcagctcgtatctccagcctggccctctcctctgaaatccagactcctaatcctgctgcctatccatcatctccactgggaggtctattaacatcttaaacttcacctatccaaaatgaatgcttcatttttctatcaagaatgcttctttcagtgttctacaactcaacaaatggcagtccactacacccagtagctcaggccaaaaaccttgattgaaccttgaattctttctctcacaacccacgtataacatcagcaaatcactttgttctaccttcaaaatattttccaaatccaagtagtgtttcctctccatccagatcaccatt

SEQ ID NO: 102631 - DNA, 291 bp, Homo sapiens
tcatacttaatggtaaaagacgggatgttttttcctccaggctcacccaaacagggtgatgaagtctgcctttactactacttttcaacattgtcctagaggtttcagccagtgcaaaaagagaaaataatgaaataaaaggcatctggattagaaagtaggaagtacaactctctttattcacagaccacatcatcatctgtgtagaaaatggaataaaatctacaaagtagctactagaactaataaattaggctagaaagattgtaatattcactatcaatgtacaaa

SEQ ID NO: 102632 - DNA, 594 bp, Homo sapiens
atgagttttagaagatgcttttattttgaaccacaatttttggaacactgagaagcttccaggccattttaccactattcacctcatttcgggggctcacttgttaacagatttaaataatgcgggatatgggaagtttcggtaaaaaaaggtatttcctcccctgggtctactcctgcctgatgtcttttttctgcaggaggaaagtgtctttcctcctctcttttgaaaaatttaactcaaatgtcccaagccctttggccaatgggtgcaaatttagaatttagccacattctgctgtgttaatagtactccccacagaattgtagagtctcccttcccttacagagttcttccactcatgtaaccccaacacacatgttcacacgtgtgcacacgcatgcacacacacacactactgagcattcacaggagattttagcatacctcatcactgagctgcagttcccaagagatagcctccctacagttaatttgtgatgctgggtgtggtggctcacacctgtaatcccagcactttgggagacagaggcaagtggatggcttgagcccaggagttcgagaccagcctgg

SEQ ID NO: 102633 - DNA, 405 bp, Homo sapiens
gcagcaagtgttgaagcccagaacagactataaccacactaagtctgcttttagctttttcagagaagcttacctttaaagcaactatttagggaacaagcaaactgatccttcggaccaggaggacagtgaaaaaatgtctagttcctttaaattagtaccatccatgtccaaagctcagctaaattgcaccccaggacactgaaaaacttgctgatatggccatggaactgctgtgagtattccctgaggaaccacgaggtatggcagtggcatgagagagccggcgatggaaagagcttttttagttcccttttaaggaaaaaatggtaaattgcagaagttccagatgggagggtgttaatcccttataaaattgttaggcagtttggcacactggtagaa

SEQ ID NO: 102634 - DNA, 248 bp, Homo sapiens
tcaggaatcttccttcccaggggcctttctcagaggttctgccctgagaggccaggccccaccctttcccccactgcatcaccagggcagtggatctgcttgtggctcccaagttcctcctttactcaggaagtcccagcgagaggcaggggagggcgagggttccctgggcctcccctcctcagacctgccttctactcacacggctcactcagggctgaaagggcccacgccacagcctgcagcct

SEQ ID NO: 102635 - DNA, 276 bp, Homo sapiens
tgtccctccctatcagatggctcaacatgctgaagtgtgtcggaagtgattgaagcgcacttccccactctcctgaaacacaggcaaaccagctgtgttggatgctgcagtgggcaagttcctaagcttgcacatgcattcagacaaacaggaaatgagatgtccagagctggcaggtaagaaagctcctctggcagtccttaactccttgctagtaagacttttcacttcctagtagaagcaagaggatgtgctgcccccatttaaactatggaa

SEQ ID NO: 102636 - DNA, 260 bp, Homo sapiens
aatagggaggtagaacaaaaatcaacatatagatgaagtcattctccaggtggaaagaacttttaagaatcattacaattaaatgtctctctgaaatgatgcttttgagtacaactagaaaacatgttacatattttctgattttcagtctcaggaagactaaagaagatgtttcaactatagaggtgggcacaaagtaggaataatcttgtgtcagaagagttcatgtggatattaaatgtattttgaattaaaaatct

SEQ ID NO: 102637 - DNA, 741 bp, Homo sapiens
gccgctggctgggggccaggctcctggagccctgctctctgatctttcttatcatcaaagactcctgtgggtcagtgacagtctaggtctgggctctttgaggatcaaaagagagggaggcctgagccactgggccctcagaggagcaggctggtaggtgagctctttccccaacaacgctgactgaaggctctgtggacaggaggaaggccctagaaggaggtgatgtttgagccaacagctaaaataggggaaagctagccatgcagttctgggtggagggtgtgaagagaagcaggcagccctgagtccagcaccagggctctcggagcaggagggagagggtgtggctgggcggagcaggccaggggagaatggtagggctcaagctggctctggggcagggatcttccaagcctgtggaggccatcataagcagggggcggaggtgggggggtccctgttccaagggcagagagcagcctttgaagggctttagctgccgtggccagacctgccttgacagcgcagactgcttcgtggggagcagttgggtgcggtcagtggcagttgaatgactggctgcaggcacgggtgaataacccagttgcagaaggaaggcaggctcttctgggaaaggcctctcagagcaagaacaattggggtgaatgagctaaggtcggaagtgcctagcacagggcctgtttgccgggaggtgcccagagaggggagttgtgctgt

SEQ ID NO: 102638 - DNA, 699 bp, Homo sapiens
gagtccccacaaagcaggctggtcagtggtcacgctagtgtgagtctttcaaacatcccgtgtaagtagatactgtcattgcacagaggaggaaatggaacctggcccaaggtctcaagaaacaacccagccgggattcagactcggcagcctgcgcacttaacagccgtgagcaaccaggaactccccagccctttctcttgtgccttcaagagtgcaagaaactgaccactgcccctagagagctctctgaagagcattcccatggctacagattgggtttggagccgcttgggctcaccatgggccagcattgttttggatggcctgagggcaaggactgtccctgctcttcatgcatcctgaagattagctcagtacctggcacagagtcgatgttccagagaggtttggtgaatacagaaggtccctgttgcatggaatcctgcaaagcaatgttggtgttaccggaaccataggaaacagctgatatccaaccatttttgaacctacacaggtgtcagtttcatgtggttcagcctaatgagagcaccaccttaatcctgttgggttctccatctcagccccaggggaatgagcaacacaggggagctagctggtggtgccagactggggttcagatccctgccacatttacatgggctttgtgacacacgacgggtcatctaatgtctctga

SEQ ID NO: 102639 - DNA, 258 bp, Homo sapiens
gtacttcactgtttctgagaccatgtatttattttaaagcacatggagggatgggaagaagctaaacttttttgcataaacttgttttttataaagtatactttggaacatgttaatattttacatgactataaaaagttttacacgaataatttctaaaaaattaaaagtaaagggaaatgaggctaatgttactgagttggttgcatgacataccatcataattactcatctactttaatcccataataaacacac

SEQ ID NO: 102640 - DNA, 314 bp, Homo sapiens
cagcagcactgtggggtgggggtcctcatccccttttcaaagacggggaaacggcggcttgtgaaggaaggaggtgtgcagtccacacactagtgagaagtgtgctgagcccacaccgaaagcgtttctctttccatggcaccagctgcctcggagagcggagacctggggcgaggcccagggggctgcagcaggaccttcaggcgctctgggtttcgtgtcacagaggggagaaggcggtgatgctgtgggggtcctgcgggagctgtgcctggaggtgggacagagcctagtacatgtggggtgggacaggg

SEQ ID NO: 102641 - DNA, 368 bp, Homo sapiens
ggtatatgaaaatgctactgatttttatacattgattttgtatcctgaaactataccgacattgtttatcaattctaggagccatttggtggagtctaggtatagaatcttgtcttcaggggatgaggcgcagtggctcatgcctgtaatcccaggactttggaaggccaaggcgggtatatcacttgaggccaggagtttgagaccagcctggccaacacagtgaagccccatctctactaaaaatactgaaaaacaaattagctgagcatgtagtctgtagtcccagctacttgagatggaggttgcagagagccgagatcgtgccactgcactccagcctgggtaacagagtgagattctgtctc

SEQ ID NO: 102642 - DNA, 741 bp, Homo sapiens
tgtttaattagcactttacattttataaagcacgtacacttttgatcagcacaaacagtattctgaagcaagctagaaaaatgctgttaatcctcttttacagatatgaaaacagacttaggttaagtgacatgccaaatttcacttagtagtagaacttgcataataatttaggccttttgatttggttactctttcaccatgccataattatctcttgggaaaagggaatatgaagataactctcaacactaccttttaatattttagtgtattttggctgggcacagtgcctcctgcctgtaatcccagcactttgggatgccaagccagacggattatgaggtcaggagttcgagaccagcctggccaacatggtaaaaccccgtctctactaaaaatacaaaaattagccgggcctggtggtgagtgcctgtaatcccagctacttgggaggcttaggcaggaaaaatgcttgaaaccgaaagtcagaggttgcagtgagccaaggttgcgccaccacaccccagcctgggcaaaagagcgaaactccatctcaaaaaaaaaaaaaaaaaattaatatatttttgtgtctttatctgggcagttgggtccatttttctgtaaacttatgaggaaccagtctccttaccacagaaaagcttctatatagaaaacattttgttggccaggtgcagtggctcacacccgtaatcccagcaatttgggaggccaaggtgg

SEQ ID NO: 102643 - DNA, 997 bp, Homo sapiens
tctgcttgttgataagtacttcagacattcccccagtggctgaagtggcatatgaattatgaagttggatcatttggaatgaatgtaagagaattgccaagggctcctcctactccagagaggaaacctcatccagggccatgaagccacttcctcaccatctgtgtgctgcttaagctaatgctgcgggaaccatggttccttgggaggaatcaagctgactcttggcatgagattcctgccttcctagggttgagagcggcactgccatggcttctctggacgacccaggggaagtgagggagggcttcctctgccctctgtgcctgaaggatctgcagtctttctatcagcttcactcacattacgaggaagaacactcaggggaagaccgtgatgtcaaagggcaaattaaaagtcttgtccagaaggctaaaaaagcaaaggacaggttgttgaaacgagaaggggatgatcgagcagagtcagggaaccaagggatatgagtctttcagctatggaggggttgatccttacatgtgggaacccccaggagcttggtgctgtgagaaggcatctttccgacttcaaaaaacaccgagctgctagaatgaccaactatagtgggaagtcactacaactaactaatcaggtagagaagctcactgcatcgaccgacacaaatactgagtctgagagattcgagcacagaaacgtcgggtgctggtcaacgaccacgatgtcattcgccaatggggataagtcagatccggaccgcgcacactgcgccctgcaggccaaaagtgcacgaagtatgggctacaagacatacaggagcagccacatgctctgagtctgtaccaaccagcccagagcccaatcggcaagcgccagcaacagacaatccgccgaaagaacagacatgacagacacacaaaccatgaccaagccaaaggaggacacagacgctcacggtcaccgcagacacacagagcga

SEQ ID NO: 102644 - DNA, 322 bp, Homo sapiens
cttttagaacagtgccttgcttagtatgttactttgctgaggctgccataacaaaatgccacagaacaggtggcttaaacaacagaagcgtattttctcacagttttagagcatggaaatccaagatcaaggtgtctggctattcttacatggacctttctgtgagcacacacactcctggtttgctgtcttcttcatgtgaggacaatagtcttacagaattaggccccactcttatgtcctcatttaatcttttttttttctttcttttttttttttttttttttgagacagagtctcgctctgtcgcccaggctggagt

SEQ ID NO: 102645 - DNA, 379 bp, Homo sapiens
tagcattatgtctgagaaaacaatatccatgtcttaatttaaaaatattttattgctaaaaaatgcagacacagaaacacaaagtgagcacgcgcatttggacaaatgataccaatagacttgtgtgacatagggttgccacaagccttccagtttgtaaaaaacacgattatctgcaaagttcaataaagccaaacgcaataaaatgaggtgtgcctctacataaatctttgcacaagtgtgtgagtatatctgtaagtaaattctctaagactggaattattatgtcaaagggtatatgcattttaaatattcacagatttctctccaccagaattcatgcagaaaacttaaaaattaaggtagttaaataattgat

SEQ ID NO: 102646 - DNA, 120 bp, Homo sapiens
catagctcctttgacaaatgatttttatgttggaaaatgcaagaaaaataagtagctcagattgactttggaaatgtaatattattcttaattcacaggcttgttggcaacttgagaatt

SEQ ID NO: 102647 - DNA, 534 bp, Homo sapiens
gtattataggatgtttagcagcatacctggcctctacccactaaatgtcagtaacattcctccccacacagttgtgaccatcaaaaatgtccccagacattgccatatatcttctgggaggcgaaatcgccactgttgaaagccactggcatatgccatgtagccagcactcagctcaagatacaggttatttccacatggaggggttggcgtttgagctgacacccaacagctaagaagctgcctccaattcagagaactggggaaggaatgttccaaggggagagagcataggcaaaggccctgaggtgggaatgagcgtggcacatttgaggaagtgtggctggtccgtggtgacaagggaaaggcatctgaggaggttgaagagacaggctgggccctattgagcaggggctttgtgggatacggttaggagtctgacatttcaaagaacgtttgtgagtatgtaatatgtacctggcactatgccagacactggagagttgaagatgaataaattaaatccttggccct

SEQ ID NO: 102648 - DNA, 454 bp, Homo sapiens
aaaggaggactgcagggtagagaagcaagcacagtgggcgcctctttaggaagtgacacttacagcctgcatgtgcagtatggctgtgaaggggcagatatcatagcacacctaactcaacaggatcttacttgaactgctgtgagttggtcaagtcagggcacttctgctcttcaggctcctctaggtcacacctttgaccaccctacatctgtttcctctttcaggctccagtagtagtcttaaaagtgaagtttatctaaggataagcacatgcctatcttgctcactgctgtgtccccactttttagcacagcgcctgctgcttacaggtactcaaatatctgctggacttaattacttataattaagctcttatttcagtcatggacaaatccttgggtttgactcctaaactcttttaagggtacccaatggaggaacgtggtttgtt

SEQ ID NO: 102649 - DNA, 4115 bp, Homo sapiens
atgggcgagaggaaatgctggctctctacgtcaaggagaacaaggtgggtcccggaagagctgcaggacaaggagttcgccgcggtgctgcaggacgagccactgcagcccctggctctggagccgctgactgaggaggaacaggccgcggccgtggtgacagctgcttttaccaaagaagcatcgaagaaggcgatggggcctttggacgaagcccccgggaaatccagcgcagccagagctgggatgacagcacgatgtggctttgaggagggaggggctggcccaaggaaggagcacgcccgctcagacagcgagaactggcgctccctacgggaggaacaggaggaggaggaggagggcagctggaggctcggagcagggccccggcgagacggcgaccgctggcgctccgccagccctgatggtggtccccgctctgctggctggcgggaacatggggaacggcggcgcaagtttgaatttgatttgcgaggggatcgaggagggtgtggtgaagaggaggggcggggagggggaggcagctctcacctgcggcggtgccgagcgcctgaaggctttgaggaggacaaggatgggctcccagagtggtgcctggacgatgaggatgaagaaatgggcacctttgatgcctctggggccttcttgcctctcaagctgttctctgctccccaccccggccccatgcagaagggccccaaggagcccattcctgaggagcaggagctggacttccaagggttggaggaggaggaggaaccttccgaagggctagaggaggaagggcctgaggcagatgatattcgggggatccagctgagtcccggggtgggctcctctgctggcccacccggagatctggaggatgatgaaggcttgaagcacctgcagcagggcatccaggaggcggagaagctggtggcctccctgcaggacagctccttggaggaggagcagttcacggctgccatgcagacccagggcctgcgccactctgcagccgccactgccctcccgctcagccatggggctgcccggaagtggttctacaaggacccacagggcgagatccaaggccccttcacgacacaggagatggcagagtggttccaggccggctacttttccatgtcactgctggtgaagcggggctgcgatgagggcttccagccgctgggcgaggtgatcaagatgtggggccgcgtgccctttgccccagggccctcacctcccccactgctgggaaacatggaccaggagcggctgaagaagcaacaggagctggccgcggcggccttgtaccagcagctgcagcaccagcagtttctccagctggtcagcagccgccagctcccgcagtgcgcgctccgagaaaaggcagctctgggggacctgacaccgccaccaccgccgccgccacagcagcagcagcagcagctcacggcattcctgcagcagctccaggcgctcaaaccccccagttccaggagcgcagagaagtggagctcagggcgaagcgggaggaagaggaacgcaagcgtcgagaggagaagcgccgccagcagcagcaggaggagcagaagcggcggcaggaggaggaagagctgtttcggcgcaagcacgtgggggctgtccatgaagacgctcctggagttgcagctggagggcgagcggcagctgcacaaacagcccccacctcgggagccagctcgggcccaggcccccaaccaccgagtgcagcttgggggcctgggcactgcccccctgaaccagtgggtgtctgaggctgggccactgtggggcgggccagacaagagtgggggcggcagcagcggcctggggctctgggaggacacccccaagagcggcgggagcctggtccgtggcctcggcctgaagaacagccggagcagcccatctctcagtgactcatacagccacctatcgggtcggcccattcgcaaaaagacggaggaagaagagaagctgctgaagctgctgcagggcattcccaggccccaggacggcttcacccagtggtgcgagcagatgctgcacacgctgagcgccacgggcagcctggacgtgcccatggctgtagcgatcctcaaggaggtggaatccccctatgatgtccacgattatatccgttcctgcctgggggacacgctggaagccaaagaatttgccaaacaattcctggagcggagggccaagcagaaagccagccagcagcggcagcagcagcaggaggcatggctgagcagcgcctcgctgcagacggccttccaggccaaccacagcaccaaactcggccccggggagggcagcaaggccaagaggcgggcactgatgctgcactcagaccccagcatcctggggtactccctgcacggatcttctggtgagatcgagagcgtggatgactactgaccagcccggacccccagcccctgggctgtaggccagggcagccacagcggcgtggaccgagggtcccagcctgcaggctccccgcagagagcacaggaagaggcaggggcggggtccccagcacttgttacaaacacacgatgcaccttaactcacccaccacgaggcactttacagactgggggagggggtttttctttttattttttttttaattttaaacgactgaagaaaacattaggagaggcaaaaatattgttaaaaactagactctaaacaccccttcctgctgtgaggatagtgggtgtgacaatggaaggtccacagaggtttttgttttttggtttttttttttttttttaagaaaaaaagatgaaaaatgaaaaaaaaaatggttaggaggctgaaagaaaaaacacactgttattttggggcagtggggacacaggccccgtggacctgtcctgcctggcccccaaggccatacttaccccccagaaggcgggccatggggtaactggaagctgggggccagcagtttgcacaggaggcctgtctgagccccacccgccagacctgttgtgagcagctcctgtcactgaggctggctgaggtgtccggggtggggccaaagtagccccttggcttcgctgctttgggggacagttgcacaaattggacgagcggccccagctctctggctgccatcttgtgctggccgagtagacgggaggggccaagccgtgccaacctctctggctggcagggtggggcagcaggactctggctctggtgaggggcgtctcccactgctgccattttgggggacaccctgggtttgaacctgaaagccccagctctctgccttgccacgtgaatgtattctttgggccacaagcccccgcctcacccctgcctgagctgcctcacccctgtgagcggcgggggtggatgattgctccagaggctgcagagagaaggctgagctgtttctccagtgaagggggcaggaggaggggcctcaaaggcaaggagtgggtggctttgggcttagggttggagtagaggggctgccgcccggggccccaacctgtagccagctcgtaagatgtggaccacccagctctgcacctgacccttccgctgaccaaatgggagaggagcaggtggccttccgggtctgatatgatgcgctttttaccgttgggtaaggttggggtgaagagaagtgtgcggctcctgggtcagaggaggctgccccttctattgctcacccacttcttattcccggtcccctacttgggttcgtctccgcccattttgggttttgtaacagttttgtcttttgggtttctcatccagctcctcccattgacctcattgctcagagtgcagtattagggcaaggcttcgccactgcctccctccatgaatgtatttctccctcctgccctggggacatggggagtggcccgtttctttccccatctagtcccagaaagatggtgtttggttttctgttgttggattttttttttttttttttttttttgcaccaaagtggcaactaggtcagtgttgggggatcaagctggcctcggggtggggggcccccacctgcctctccctggttcccacagtgttagcgtccctgaaaagac

SEQ ID NO: 102650 - DNA, 3629 bp, Homo sapiens
atgggcgagaggaaatgctggctctctacgtcaaggagaacaaggtgggtcccggaagagctgcaggacaaggagttcgccgcggtgctgcaggacgagccactgcagcccctggctctggagccgctgactgaggaggaacaggccgcggccgtggtgacagctgcttttaccaaagaagcatcgaagaaggcgatggggcctttggacgaagcccccgggaaatccagcgcagccagagctgggatgacagcacgatgtggctttgaggagggaggggctggcccaaggaaggagcacgcccgctcagacagcgagaactggcgctccctacgggaggaacaggaggaggaggaggagggcagctggaggctcggagcagggccccggcgagacggcgaccgctggcgctccgccagccctgatggtggtccccgctctgctggctggcgggaacatggggaacggcggcgcaagtttgaatttgatttgcgaggggatcgaggagggtgtggtgaagaggaggggcggggagggggaggcagctctcacctgcggcggtgccgagcgcctgaaggctttgaggaggacaaggatgggctcccagagtggtgcctggacgatgaggatgaagaaatgggcacctttgatgcctctggggccttcttgcctctcaagctgttctctgctccccaccccggccccatgcagaagggccccaaggagcccattcctgaggagcaggagctggacttccaagggttggaggaggaggaggaaccttccgaagggctagaggaggaagggcctgaggcagatgatattcgggggatccagctgagtcccggggtgggctcctctgctggcccacccggagatctggaggatgatgaaggcttgaagcacctgcagcagggcatccaggaggcggagaagctggtggcctccctgcaggacagctccttggaggaggagcagttcacggctgccatgcagacccagggcctgcgccactctgcagccgccactgccctcccgctcagccatggggctgcccggaagtggttctacaaggacccacagggcgagatccaaggccccttcacgacacaggagatggcagagtggttccaggccggctacttttccatgtcactgctggtgaagcggggctgcgatgagggcttccagccgctgggcgaggtgatcaagatgtggggccgcgtgccctttgccccagggccctcacctcccccactgctgggaaacatggaccaggagcggctgaagaagcaacaggagctggccgcggcggccttgtaccagcagctgcagcaccagcagtttctccagctggtcagcagccgccagctcccgcagtgcgcgctccgagaaaaggcagctctgggggacctgacaccgccaccaccgccgccgccacagcagcagcagcagcagctcacggcattcctgcagcagctccaggcgctcaaaccccccagttccaggagcgcagagaagtggagctcagggcgaagcgggaggaagaggaacgcaagcgtcgagaggagaagcgccgccagcagcagcaggaggagcagaagcggcggcaggaggaggaagagctgtttcggcgcaagcacgtgggggctgtccatgaagacgctcctggagttgcagctggagggcgagcggcagctgcacaaacagcccccacctcgggagccagctcgggcccaggcccccaaccaccgagtgcagcttgggggcctgggcactgcccccctgaaccagtgggtgtctgaggctgggccactgtggggcgggccagacaagagtgggggcggcagcagcggcctggggctctgggaggacacccccaagagcggcgggagcctggtccgtggcctcggcctgaagaacagccggagcagcccatctctcagtgactcatacagccacctatcgggtcggcccattcgcaaaaagacggaggaagaagagaagctgctgaagctgctgcagggcattcccaggccccaggacggcttcacccagtggtgcgagcagatgctgcacacgctgagcgccacgggcagcctggacgtgcccatggctgtagcgatcctcaaggaggtggaatccccctatgatgtccacgattatatccgttcctgcctgggggacacgctggaagccaaagaatttgccaaacaattcctggagcggagggccaagcagaaagccagccagcagcggcagcagcagcaggaggcatggctgagcagcgcctcgctgcagacggccttccaggccaaccacagcaccaaactcggccccggggagggcagcaaggccaagaggcgggcactgatgctgcactcagaccccagcatcctggggtactccctgcacggatcttctggtgagatcgagagcgtggatgactactgaccagcccggacccccagcccctgggctgtaggccagggcagccacagcggcgtggaccgagggtcccagcctgcaggctccccgcagagagcacaggaagaggcaggggcggggtccccagcacttgttacaaacacacgatgcaccttaactcacccaccacgaggcactttacagactgggggagggggtttttctttttattttttttttaattttaaacgactgaagaaaacattaggagaggcaaaaatattgttaaaaactagactctaaacaccccttcctgctgtgaggatagtgggtgtgacaatggaaggtccacagaggtttttgttttttggtttttttttttttttttaagaaaaaaagatgaaaaatgaaaaaaaaaatggttaggaggctgaaagaaaaaacacactgttattttggggcagtggggacacaggccccgtggacctgtcctgcctggcccccaaggccatacttaccccccagaaggcgggccatggggtaactggaagctgggggccagcagtttgcacaggaggcctgtctgagccccacccgccagacctgttgtgagcagctcctgtcactgaggctggctgaggtgtccggggtggggccaaagtagccccttggcttcgctgctttgggggacagttgcacaaattggacgagcggccccagctctctggctgccatcttgtgctggccgagtagacgggaggggccaagccgtgccaacctctctggctggcagggtggggcagcaggactctggctctggtgaggggcgtctcccactgctgccattttgggggacaccctgggtttgaacctgaaagccccagctctctgccttgccacgtgaatgtattctttgggccacaagcccccgcctcacccctgcctgagctgcctcacccctgtgagcggcgggggtggatgattgctccagaggctgcagagagaaggctgagctgtttctccagtgaagggggcaggaggaggggcctcaaaggcaaggagtgggtggctttgggcttagggttggagtagaggggctgccgcccggggccccaacctgtagccagctcgtaagatgtggaccaccctagcacaagaacacacgagcacaagaaccagcacaagaagaatcctctagatca

SEQ ID NO: 102651 - DNA, 1731 bp, Homo sapiens
atgggcgagaggaaatgctggctctctacgtcaaggagaacaaggtgggtcccggaagagctgcaggacaaggagttcgccgcggtgctgcaggacgagccactgcagcccctggctctggagccgctgactgaggaggaacaggccgcggccgtggtgacagctgcttttaccaaagaagcatcgaagaaggcgatggggcctttggacgaagcccccgggaaatccagcgcagccagagctgggatgacagcacgatgtggctttgaggagggaggggctggcccaaggaaggagcacgcccgctcagacagcgagaactggcgctccctacgggaggaacaggaggaggaggaggagggcagctggaggctcggagcagggccccggcgagacggcgaccgctggcgctccgccagccctgatggtggtccccgctctgctggctggcgggaacatggggaacggcggcgcaagtttgaatttgatttgcgaggggatcgaggagggtgtggtgaagaggaggggcggggagggggaggcagctctcacctgcggcggtgccgagcgcctgaaggctttgaggaggacaaggatgggctcccagagtggtgcctggacgatgaggatgaagaaatgggcacctttgatgcctctggggccttcttgcctctcaagctgttctctgctccccaccccggccccatgcagaagggccccaaggagcccattcctgaggagcaggagctggacttccaagggttggaggaggaggaggaaccttccgaagggctagaggaggaagggcctgaggcagatgatattcgggggatccagctgagtcccggggtgggctcctctgctggcccacccggagatctggaggatgatgaaggcttgaagcacctgcagcagggcatccaggaggcggagaagctggtggcctccctgcaggacagctccttggaggaggagcagttcacggctgccatgcagacccagggcctgcgccactctgcagccgccactgccctcccgctcagccatggggctgcccggaagtggttctacaaggacccacagggcgagatccaaggccccttcacgacacaggagatggcagagtggttccaggccggctacttttccatgtcactgctggtgaagcggggctgcgatgagggcttccagccgctgggcgaggtgatcaagatgtggggccgcgtgccctttgccccagggccctcacctcccccactgctgggaaacatggaccaggagcggctgaagaagcaacaggagctggccgcggcggccttgtaccagcagctgcagcaccagcagtttctccagctggtcagcagccgccagctcccgcagtgcgcgctccgagaaaaggcagctctgggggacctgacaccgccaccaccgccgccgccacagcagcagcagcagcagctcacggcattcctgcagcagctccaggcgctcaaaccccccagaggcggggaccagaacctgctcccgacgatgagccggtccttgtcggtgccagattcgggccgcctctgggacgtacatacctcagcctcatcacagtcaggtggtgaggccagtctttgggacataccaattaactcttcgactcagggtccaattctagaacaactccagctgcaacataaattccggagcgcagagaagtggagctgcgtctgctgaggagggggt

SEQ ID NO: 102652 - DNA, 412 bp, Homo sapiens
atgataatgacaaagcaactacttttggaaacaaactcatgtaacaaagatggacattttgaaacatatggcggtttaaacacctctgtgatttttttcattgaaataacatgcatcactataaaaaactcttacatcttcacacttaaaaacctggaatcagaaactttaaatatgtttaaaacttatacaagtagttgcagagaatttggaactgattgttaaaagcatataaacacaacaccttctgatttgttcatatgaatatctagaagctggtgtggtggcatatgcctggagtctcagctattgagaggctgaagtgggaggactgcctgaggccaggaacttgcacctgtgactagccactacactttggcttgggcaacatagcaagaccctgtctctaaaa

SEQ ID NO: 102653 - DNA, 837 bp, Homo sapiens
gtgccaggctgaccctccagggacagctctgccacctgcaggagcactggccacagtgcatcggagcgtgcaggtggcttctgtgccatggtgtgggtggcagccccagcacggccggccccggtcggcagctcctgtttcaagggcaggttggaggctggctggccgcttgccccaccctgggcagcctgcacccagagtcgaggggtaggcagtctccatccgaagaatgcgcccctccttatcccgaaacctcagaggcctccttcctcagatgccagctgttttctcagtgcccttggccgtgccctcacccctctctcaccggaagccccaccccagcctgtcgtccccggtctcctgaaagccagcaagcctcgtcggtgccgcccacacccctgacctcacgcagccccacgtcaggctcgatcttttgtccagttgtccctgcgtcgctgccgtctccacgaggctctgaccactgacaccgtgtgtggcggggcgcaggggcagctggagggtgtgctgggggctccgtgccctggcatggctcctccacattttgccaacccagaggcacaggcgtgaggtgtgtggtggttctcagggtcagtgggtcttggccttggctttcaaggtgttgatgggccctgggactgatgtgcccgtgtgtctgagcccacgtcccctgggcgaagctcccattttcactgacctgtccagagcgttctgggtgagcctgccctgcgtgtccatggtgcggcgcgctctaatgagctgcagccgtggccactctgcaccctctgagacagtcacccatggggacggcgaacaccc

SEQ ID NO: 102654 - DNA, 242 bp, Homo sapiens
gttcatgggcagctctacatgtcttcctagagaactgtgattctcataagatgtcctagctagcagcaccttcagtttgcttgtcttactgcctcccgcgtctagaaagaaaactgaatgtctgaatgtagtaccctgctcagacaagcttcctaataaatgtttatttaatgaaaccctccaaggctctgatttatatagtgccttggcagtcaaaagcagtagtagtccaagacccatgt

SEQ ID NO: 102655 - DNA, 365 bp, Homo sapiens
agagccctggcagggcaggcgctcagggagagggtgggagccacagctctgggaggcagggccaaggtggccaagcagcactgagctctcgcccaggttggatcccccctgcaccctccccaagcttcacggcctgggtacaggaaggggtgacaagccatgcagcaggcatcatgggtcagtggacaggggacaggcagttccctccagcacggagggcacgacaaccactgcagggcaggcagagcccaccagcgcccaccaggctctagggcaaccaaactagatctgaagggaaactccacggcccttcttagaccaacccccttcgatatttcacgctgtttggtggctctgaagatgca

SEQ ID NO: 102656 - DNA, 206 bp, Homo sapiens
gggcctggagtataagctgcttctaccttgaaaactctgggaccacccaagtctctgctgccaatcctcaactcccagaagggatctgaccatcccaagcaagacgctagattttactctcttggccagaacttgccaggtcacacagtggccacagagagattcaggaaagctctgcttctctgcaaagcagcacagtgacaaat

SEQ ID NO: 102657 - DNA, 653 bp, Homo sapiens
ggaactccatacctcaggtgatccacccgcctcagcctcccaaagtgctgggattataggcttgagtcactgcgcccggccatgaaaatttcttagaacagccatttagccagtttggattagtttcatcattactttttacactgctactgaatttgccatatctaggccaaagaatgagaaccttcctctgtattcaggaatcaaaggaccagtatatgcaaagagactacgtaaaaagtggtctgaaaaattattttgtggcaaagtaatagagatatgagatcactggatactgtttcaaagacagtattacaaaaacagctttatgtgaggtgcatgttctaaagaactattaaaactattccatacatcaggtaatcaaaagttgaattttgagggatgtgatgatctttaaaaaattgaaattctcaagatacatgatctttacatgtacatgatctttacatgtagtaggttatgttttcctatttattctgttaacctcatgaaaatccagttcaattgtaaatactaaagttattgactacttttggcagctgttttgatgggaggtataacctttgagattaaaagttgacaatgaagaagggtgcaatttaagctccaatatgtagtgaacacaaatagaa

SEQ ID NO: 102658 - DNA, 410 bp, Homo sapiens
caaggaagatttccggtgtatttaatatggatggtagtgcatttctcaaatatagtactgtgtacataagatctgctgtttgttggaaaagctaaataaccgaaaatgtaaatgacaaagcctgggaatatggcagggtcaaacagagcaaggatgaagaagatttaagtatgcagcgtgtcctaagcaaaacacaaagcatgaaaactgagcacagccacctgcaaggcaccttcagcaagcccgacggttaacagggtcagtttctccacaagtggacagagggggttatgcagcagccaactcttcctgatggcaatttgtgacccaatttcatccagtgtttcatgaccaacccccctgaatgtttatgaagcaggaaagaagctcagaatccaggcgaggcctcc

SEQ ID NO: 102659 - DNA, 350 bp, Homo sapiens
gagagggtcttgctctgtcatccaggctgaagtaaagtggcacaactcagctcattgcagcctgaacctcccaatctcaagcaatcctcccacctcagcctactgagtagctgggtctacagacgtttgccaccatgcctgactaatttgtttttattttttgtagagaaggtgtttcgccatgttgcccaggctggtctcaaattcctgggccaagcaattcacctgcctcagcctcccaaagtgttgggattaaggcatgagccaccactaagagcctctgttctttaagtgagagctacacagagtaatttccttctaaagagtacaggatggaaaaaaataagttt

SEQ ID NO: 102660 - DNA, 494 bp, Homo sapiens
ggaaaacaaaaatgcctgtcctcacctagatccgtgggcacaggctgggggtggagccctcaccagggacccgccccttcccagcacttccctactccccttctatgtcactgtgggcaaacaaattctgaagtgtagtaagggtcatatttggtagcagatagtgttttgtgttgccatgtaagcttctcagttggtggatcataggcaggaaggtatgtgctgtgctgtttgagttaaacattctggaggtgggagatgagcagacatgtttcagagagcagagtttctgtggctcagctgagctaatagcatcaacatcaaaagattaaagcaagtgcaaacttaaattgctgggactagggtccatgcagggtttttatttgcacagagctgtgcatataccagagtccctatctttgctgtttatgaatactttgtacttttttaaaggataagtcagtccatgacaaagttaccttattagtaaaaac

SEQ ID NO: 102661 - DNA, 124 bp, Homo sapiens
tcctgggattacaggcatgagccaccatgcccggccaggttaaggtttttaagacaacccttaacaagtctgtttaattcttcctaggcccagggaatgtaatttgggtttgcacagtctagta

SEQ ID NO: 102662 - DNA, 311 bp, Homo sapiens
taggtgtgagtcatttcacctggcctgatttcacattttaaaacctgccacagaatggatgtccaaactgtcgtagaaaaaccagagtttctgtagctgcactgtctggtagggtagccagtggttatgtgtgactgtcaagcccctgaaacctggcgagtccaaactgaggcgtgctattggtgtaaatacacgatgggtttcaaaaacttagtaccaaagagtggaaaatgcctcactaataatttttatattgattacatgttgaaatgatattttggatatattgacataaataaaatattaaaatt

SEQ ID NO: 102663 - DNA, 346 bp, Homo sapiens
taaaactatataactaagttttatacatgtggctttgaaagtaaaataaatttgggcctggcgcaccggctcaagccagtaatcccagcactttgggaggctgaggcgggtggatcgcctaagctcaggagtttgacaccagcctgggcaacacggtgaaactctatctctactaaaaatacaaaaaatcatccgggcgttgcggtgtgtgcctgtagtcccagctactcaggaggctgaggcaggagaatcacttgaacccgggaggcagatgttgcagtgagccaagatcgcaccacttcactcactgcagcctgggcgacagtgagactccagctaaaaaaaa

SEQ ID NO: 102664 - DNA, 475 bp, Homo sapiens
aaggaatataaaggtaatcctttaatcttataaaggtatataaaggtttttgttttgttttgtttttttatactggttattaaatctagattcaccagtgttcttttaaacctgcgtgcttcatttgctgacatttcctctctgaggtcaggaacacaatatagtcatctcagatccgtacttgcccctctcaaatttgatctgtgcttcttcagtgacttgcaagataccaggcattaactcatgcctgatatctacaatgaaccttccaggggcctgggattatagagaagagcaagggacgtccactgctgccccccggtgcgcatgtctaagggaagaacagacctgtaacttcagtacaaggtgtgtgtgactcacgaagcattaacaggcatgtcaaaactggagcagttaattccgacctgaggggcttcaaagggaaggttttatggggaggaagtagcctttgaac

SEQ ID NO: 102665 - DNA, 271 bp, Homo sapiens
tgagatggagtttctctcttgttgcccaggctggagtgcaatggtgcaatctgggctcactgtgacctccaccttctgggttcaagagattctgcaaattgctgggattacaggtgtgagccactataccctgccagaaaattattttctaataccaccgggaaaccaaacaaattccagagaagaaatctttctcctattttcctaccaccagtataaccaatatgaatatctacttttactcaacttaaatttggtttccatgcaattt

SEQ ID NO: 102666 - DNA, 1144 bp, Homo sapiens
ccgccgtagaggggttggcagtggcggtcagcatgggcgatgggggcgccgagcgcgaccggggccccgcgcgccgggcggagtctggtggcggcggtgggcgctgcggagaccgcagcggagcgggggacttgcgagctgatggcggtggccacagcccaacggaggtggccgggacctcagcctccagtcccgcaggctccagggagagtggagccgacagcgacgggcagcccgggcccggcgaggcagaccactgccgccgcatactggtgcgagatgccaaagggacaattcgggaaattgtcctgcctaagggcctggacctggaccggcccaagcggacacgtacatccttcactgccgagcagctgtaccgcctggagatggagttccagcgctgccagtatgtggtgggccgcgagcgcactgagctggcccgccagctgaacctctccgagacccaggtgaaggtctggttccagaaccgccgcaccaagcagaagaaagaccagagcagagacctggagaagcgggcgtcctcctcagcctccgaggcctttgccacctccaacattctgcggctgctggagcagggccggctgctctctgtgcccagggcccctagcctcctggcgctgacccctagcctgccaggcctacctgccagccacaggggcacctccttaggtgaccccaggaactcctccccacgcctcaacccgctgtcctcggcctcagcgtcccccccactgccgccccctctgccagctgtctgcttttcctcggccccgctcctggatctgcctgccggctacgaactgggttcctcggccttcgagccatacagctggctagaacggaaagtgggcagcgccagcagctgcaagaaagctaacacttaagactcccaccctgtgacactgagtcccgagcacagcaccttcccagtctcctgtgccccagcggacagcactgagcaggccccggagaggaggggctgcagccacacactcttccccacctgccccccagctcagagactcgtgaccaaatggccttggtcccgcagcttgtgtgcgtgagtgcagtgtgagtgtgtgtgtctctcactgaaataaaaggaaaacaatgacaagaaggg

SEQ ID NO: 102667 - DNA, 1207 bp, Homo sapiens
ccgccgtagaggggttggcagtggcggtcagcatgggcgatgggggcgccgagcgcgaccggggccccgcgcgccgggcggagtctggtggcggcggtgggcgctgcggagaccgcagcggagcgggggacttgcgagctgatggcggtggccacagcccaacggaggtggccgggacctcagcctccagtcccgcaggctccagggagagtggagccgacagcgacgggcagcccgggcccggcgaggcagaccactgccgccgcatactggtgcgagatgccaaagggacaattcgggaaattgtcctgcctaagggcctggacctggaccggcccaagcggacacgtacatccttcactgccgagcagctgtaccgcctggagatggagttccagcgctgccagtatgtggtgggccgcgagcgcactgagctggcccgccagctgaacctctccgagacccagaaccagccccagtcctgaaactacctagagatccaccctgaatcacctcattagcatacaacagtgaaggtctggttccagaaccgccgcaccaagcagaagaaagaccagagcagagacctggagaagcgggcgtcctcctcagcctccgaggcctttgccacctccaacattctgcggctgctggagcagggccggctgctctctgtgcccagggcccctagcctcctggcgctgacccctagcctgccaggcctacctgccagccacaggggcacctccttaggtgaccccaggaactcctccccacgcctcaacccgctgtcctcggcctcagcgtcccccccactgccgccccctctgccagctgtctgcttttcctcggccccgctcctggatctgcctgccggctacgaactgggttcctcggccttcgagccatacagctggctagaacggaaagtgggcagcgccagcagctgcaagaaagctaacacttaagactcccaccctgtgacactgagtcccgagcacagcaccttcccagtctcctgtgccccagcggacagcactgagcaggccccggagaggaggggctgcagccacacactcttccccacctgccccccagctcagagactcgtgaccaaatggccttggtcccgcagcttgtgtgcgtgagtgcagtgtgagtgtgtgtgtctctcactgaaataaaaggaaaacaatgacaagaaggg

SEQ ID NO: 102668 - DNA, 1505 bp, Homo sapiens
gcggaaggaccgctagagccttggagttcgaagccagcctgatctttacaaaagtaaaataactaaccgtgcctggcgtctcatagcctgtagtcctagctactcgggaggctgagaccagaaggatcacttgagcccaggagttcgaggctgcaatgagctatgattgcaccactgcagtccagcttgtgtgacagagcaagagtgtttcaaatgaacctagtgtcagatatttactttctgtattacagaggactgaaagctagctaaataatacttttcagtgtacctgggttccagagataaaattggtaaactaacctttgctccttacttgggcttttagtttatacttcataagaccatggaagcaaaatttaggtatctgacccttctgcacaatttaggaccccgtgtgtgtttggcctacctattcgagttcaattgaatctttctgagcatctatggtgtgccaggcactctcctaaatgggaatacaatattaatccagatacataaagtctctatccaaaaggagcttcaagttggcttgggcaaagaatacatgtcataatggactgtttatataaatgatgggaaagggttggggttagggtgtgagattactttagaacgtgttatttaaaaacagtatgaatgaaggacattgtaagtcaggttttttattatatcatggtcatatactcctgttcctgtcagtttttcctgcttcctttctttcaccaagatcactcctttccttctcagatcaccaagtcctcctagctatagagagggccttctattcctctccacctaaacttatataagctactgttttcctcatacagacatgttaatgaaaatgaatttctacaggatctccagtccattgaaatacattaatttttgagtctcttcacacatttttatttcctagatttaagtcttgattgcaatcacatacaactagtatttcttggaataaaacagcaatcacaaaaatcataaatatcacattgtttaaaaaaatttattatttgatgttgaggactccatcctgatttcaatgaattaattcatttgttcccttttaaaatgtcatctgtgttatttatgtgtataaattttcaataattgtttctcaatatagagtaaatgatacagctccatagaaggcctgtaagatttttgaaattaaaataagtttttaaataaaatatgctgttatgatcattgaagttgataataaaattattccattgattctgtttctcccaagaaccaccatttaatcatgaaagctagctaagtaatatttttcagagttcgtgagttccagaagtaaaattctttaagctaaacagcttgtaaagtaacttttgctttataattattataattttgggtgttatttatgcaaactcaaatcaatgtactcataatcaaaacattgacatgcaaacttatgtattaagcaaaataaaatatacaagtgtgatata

SEQ ID NO: 102669 - DNA, 398 bp, Homo sapiens
cttttcttccctctctctgccgaggcagaagcacctcatctctctgaatggaattttgtccttactaatcttttccgtggattgtaccactccaatttttgtgtgtacaacctgcaacattgccctgtactattaaatgttaacgtgttgttgttctctgcttccttagtagtagtcatccctgtttagtaagctcatttattttacagatttttactgacttcataggatagtgccagggactttaccaagtgctggggaaacatgagtaagacagcacttagccttgatgaacttacagttggtgggaggtggtaggaatgacagtatttccagtgcggttttggtaatgatggaaaaggaggtgttgtagagacaatggtgaggagagagccttc

SEQ ID NO: 102670 - DNA, 446 bp, Homo sapiens
gcactttgggaggctaaggcaggcatatcacctgaggtcgggagtttgagacgagcctggcccacgtctactaaaaatacaaaaattagccaggtctggtggcatacgcctgtagtcccagctacttggagtctgaggcaacagaattgcttgaacctgggaggtggaggtttcagtgagccgagatcccaccattgctctccagcctgggcaacaaaagcgaaactacatctcaaaaaaaaaaaaaaaaaaagaaagaaagaaaatttaatggattatggagctctacttcacattagtacacctcggtctctctgtttttctgtctcaattcaagatagagttctttgtagcggtatggtttagaggtggtatgtattttacaagtatgtcagttggctctgtatatcctgatgataccgaagccaggaccagacccctacgtc

SEQ ID NO: 102671 - DNA, 181 bp, Homo sapiens
aggcttctgtttcttctgaatgcaacagaggagaaatgttttaaggtatgcagaataggagtctgagaaatgagggaaaagcaaacctgagggacaagtaagtggcttagagaacgaagtgaaacattttattttgggcctcacatctgaaaactgaagcttgatattccaactaggctta

SEQ ID NO: 102672 - DNA, 186 bp, Homo sapiens
cccaagtcgtttctgaaaggcaagacgttagactaaaaccaacttctatacttaagattatccttgaaatagttacgaatatgttcaggaaacaaagccttgctcattatgtgctagaacaatgggtaaactttgctttcttgtagagaagaaaatgttttcttcaataagatatcggaaactatt

SEQ ID NO: 102673 - DNA, 235 bp, Homo sapiens
ggactgtgctgaggattgaatgagaatacattcaggccacggaacacagtgtgtatatattacacatgctccaaaaaggctagctgctactatgaagttggataaattgactcaggaaagggcagaatgaacttgatattgtgactgtacatttcagagaggccccaaagagcaaatattcagatcacagcattcactcccggaataagcatattcgaaaaccctttctttgtca

SEQ ID NO: 102674 - DNA, 602 bp, Homo sapiens
atttaacttagggtcccttcctcccttgtctgccctgaatactgtggggaaaattactcctgccttcctacgagcgcttgaacttgtgcatgcatgtaccattgcactgttgtaattgtagtgtaattgctttgcttgtctgtctgacctccctttagaatgtgagtgtcctgaggatgaggattctgtcccatgtctttgcagcctgaataattttaacaaaggcctgacacattgtagttatctaacagcagttcattaaatgaataaagtattattgaaatattaatcttgtatagggaccacaagatgcaaactcaaatgccctcaagggccacgtacatacacagacctaagtagttaccatttctggcacccttcattcctatgtacacatccctttccacttgaaggacttttaaaaagcacctgtggcagtacagttcagattttgtgtgtctgaaaaagtctttgtttcgtcttcatttttgaaagatatttttgcctagtattgaactctaggttgacaatatttttcttttgctattttactttcgagaaagctgttgtgatccttgcatttgttcctctgtatgtaatat

SEQ ID NO: 102675 - DNA, 574 bp, Homo sapiens
ggaatgagatggtgtttgtccagcccaggaagcggtgcccaggcccctgccttccagcgagctctttgcagcaccagctccagcgccatcgcctcggttctggcctgtgtgccccgtggcttacgccacttccagctgtaggcgaacagtggtcgaactttgggattggaaatttccagatggaaggagcagtccacgccttcattccctgcttcagtcccctctctggctgtccaccttggctttagctccttcctgaattgggacctctggaggtggcctgttcttccagagagccatttaaagctgcactgcctggttgagtagcccctggctacaggcaacacataaaacaagaattgcccaaacccacgagagcataggcgcaataatgccattgtagatttcaaaggcttaagacggaaacagtgtgaaacattcattcatttttcatactggttgtacgttgaaaatgataacatttttgatgggttaaatcaaatgtgttattaaaattaatttcagccaggtgcagtggcttatgtctgtaatcccagcactttgggaggccaag

SEQ ID NO: 102676 - DNA, 141 bp, Homo sapiens
actccccttgcagatatggcaagaacatataagtctgcacaggccagtagggctaaagaagaagtttcaggatgtttctgggaagaatttcttctctaatgaagagagaagcacttaggatgcctcattgtcacatagctg

SEQ ID NO: 102677 - DNA, 424 bp, Homo sapiens
gcgctcgcctgcatgcgttttggcaaatatctaaacccgcaaaaccatcactagctctggtttcccaagatccttgaagcccctccgttcagcattccacgcccctctctgccctgctttcaaaccaccgccaatctgctttctgttatatatacagattagtttggattttctaacagttgtatataaatgcagtgacacatttgagtgtactcttttgtgatctggtttattttactcagcataattattttgagattatccattttgttgcatatgtaagtagctcattccttctattgctgagtggtgttccatctcatggatgcaccaccattgtttatcacgcatctgtccatggacatgtaaactgttttctatttgcggctgttaaaaataaacttctgtgaacattcgtgtacaa

SEQ ID NO: 102678 - DNA, 446 bp, Homo sapiens
tcttgtatggcttctgcactccatgggctctggcatccactggactgtcccgcatgctaatttttgaagtcttacactgttgctatccagcaagcagccaacaattatgctatttttctgtatttaacttgcataaacaactatactagaattgtgacactgagtcttgtaattctttctttgtaaaaataaggatttattaatacttctcaaagtgaatgaagaagtataaaaatatactgtcctaggctgggcgtggtggctcataactgtaattccagcattttgggaggccaaggtgggtgaggtcaagagtttgagaccagactggccaacgtggtgaaaccccgtttctactaaaatagaaaaatcagccgggcgtggtggcggacacctttaatcctagctactcgggaggctgaggaacaagaatcgcttgaaccctg

SEQ ID NO: 102679 - DNA, 352 bp, Homo sapiens
agagaaaaaggaacttgaaggaaacagagacaatatcaccagtatgctcagagatataaaagacaggctgggtgtggtggctcacacttggaatcccgacactttggaaggccgagaaaggaggatttcttgagcccaggagcttaagaccagcatggacaacacagtaacacccctgtctttacaaaaaatacaaaaattagcctggcatggtagcttgtgcctgtagtcctaactacttgggaggctgaggtgggaagattgcctgagcccaaggggttaaagttgcagtgagccgagatcatgccactgcactccagcctgggacagagtaagaccctgtcacacacac

SEQ ID NO: 102680 - DNA, 310 bp, Homo sapiens
tggagtgttgcccaagagacagttacagaatgagaagaaatgacatttcagcatcaagccttgaaatactcagaccttttagaaagttgcatgaatcaagaaagataaggtatatgaatatcttttataaaccgtaaagcattataaaaatattagttactttaaaagatgaaagggcatggaaattaatatttctctgacattaaaagctatagatcaaactcaacaaggccatcagttgtacagaactcaggaggagtttaatccatatcaaagctccaaaagtccaggagaacagattgaatttgct

SEQ ID NO: 102681 - DNA, 517 bp, Homo sapiens
tcacgagaccattgttttgaaaagccgttctgagagaccgtttgctggtgttagacctaggaatatactattgatttaaaacttatcggttgataggggtttcacatgaaactgtcaaacttttatgaccaggatgattccaagagctttgctgttttgacacattttaccttaggtttgctctggctcgtttttgaatcccttgccacatcttctcacattggtccagaaatgtctggatcttaattgatagttttgattgcaacacaaacggattctgttgaggtgttggtcatttctgcacaacaagataaatcattattttgcttttctaaaaacccaactcttacttgcaatagtaagttaacatggctttttcctttcatgggttcttggccattggttaacattaccttaattagattggtctttttgttttgctactggcagggtcagttaggtaagattgttttgatttactgcaccatcagtccaattacaaagctcatgttatagg

SEQ ID NO: 102682 - DNA, 817 bp, Homo sapiens
cattggcaaaacaggagtgccaaggtatctagctggagttcagcgcaaggcagtcagaactggccaaagatgtcttcagaagggaagtcttttgtaattcccatgctttctttgtttacatgcctactttagagcttaagaagaaattacaataaatgggcctttgtgaattttctgtaagttaactcttgttaggagtaagccaagccaaaaccttttgaattaaacaatttttggtattctttctcttgagggtaaaaactcatgactcagctagctttatttaatctccatagttaaggaggctatacatattgaaaggtatgtttttaatatgaaataattattttatggcagctttcactttgcagtgtgactttttctgatttgctcctggtagtagcccatgagttaggcaggtgtatcatttccttttaaatgtaagggaattaatatgcaaagagtttaatggatttgccaaaggctacacagcttgaacttaagaccccggagattaaattctgcacaaaatcaactatgccttagctgtctcttacctatttatacatgttactggaattgttagtacacaccatgtgataatctagaacttcctccccattttctctgtaacccaagttaaagagaaatggagtagtactctttcaaaggtgtatgtttttgatggtaggggaaagctgtaacgagggtgagctggggaaggattaaatgatactacattttttttgctgatcaataaggtgggttgaaaaaatgatactacattttgaagaaatgttttttagttttttgtaaa

SEQ ID NO: 102683 - DNA, 673 bp, Homo sapiens
gagaaaaccctaagtgacttacctcttggatctcatatgctgttccttcccttactcatactgctccagggtactgggcttggctgcccctcgaacacttgctgtatgcttgtcctcagggcccttgcataggatgttatcccttgctttgaaagctctgtctacagatccatgtggcttgcactgtctccttcaggtctttgctcagacttcaccttcttggaatgggctttcatcctttatccctgagaggtctcagaaaataaaaaataaaatggcaaccccttcccttccactgttggcctccctatctccctttcctgctttatttttatctatagcacatacctgctgacatagctgtgtattttgctttttatttgtttattatctcttcacactagaatataaatttcctaagcacaggaatttgaggctcttttatttactgttaaatcctcaggatccaggatgaccagctcatggtagtcactcaataaatctttgttgaataaatgaatgaacatgttgtctttcacctccagagagagtaaaaagaaaattcaattgcaggtagacttctcagtggtactgggatgggttaacctgggtaccattccatcttcattagcattttgaaagatgaattttctttcttgatataggctggaga

SEQ ID NO: 102684 - DNA, 423 bp, Homo sapiens
tttttttttttctgagacagggtctcactctgttgcccaggctggggtgcagtggtgtgatcacagctcactgcagactcaacctccctggctcaagtgatcctcccacctcagcctctcgagtaggtgggactgcaagcctgcgccatcacatcctgctaattttgtattttttgtagagatggggtttcaccacattgcccaggctggtctcaaactaccagactcaagctgtcctcccacctcagcctcccaaaatgctgggattacagctgtaagccaccatgcccagctgcccttgttattaatttcatccttctatgtcttaaaatattcaaaagcaaggtaagtgagtggcaagtaaaagtagtacttttattttaaagactgcaatgtaatgtaacagatggcattttcctgact

SEQ ID NO: 102685 - DNA, 604 bp, Homo sapiens
atttgtggttattgaggtttcaataatagtaatggaagcagacctcattagtccctttaacaactggcgtaaaagagttttggaacaagcagaagtgacccttggtaagcagactgctcagctggtaggggcaaaagtgttgggggaggattagaaaaaggcctccacattgtgggctttccgggtgccctggatgtgggtcagcaaatgttttagaggaagtagttaacctggagggagattcaaaggaggctggataagagaatgtctatttttctccttccctatcaccttacatgtacctattctccccaaagagaaggaagaccttaggctttcaatgtggtgttctttcttaagtttaagtaactggctgccaatgaaaaccttcccttcgagccgcaggcatgtggacagaatccaccaccctccttagacactcctcagactactacaggctatccccagctggtggctctcaaattcatgagggtccagaagttgttcctctggattcaggttgttaaagggactaatgaggtctgcttccattactattattgaaacctcaataaccacaaataaaagaacaaaaagtttgaga

SEQ ID NO: 102686 - DNA, 784 bp, Homo sapiens
gtatttttattagagactaggtttcactatgttgcccagaatggtcttgaactcctgacctcgtgatccactcgccttggcctcccaaagtgctgggattacagacatgagccactgtgcctggctgccaaacttttgatgtgggtccaagctgtgcttttttgtgacctatatgttttgtctggtgggagttctacacttaagttttcttggtttgcactttaatcataacaataagaacaactggcgtaaaagagttttggaacaagcagaagtgacccttggtaagcagactgctcagctggtaggggcaaaagtgttgggggaggattagaaaaaggcctccacattgtgggctttccgggtgccctggatgtgggtcagcaaatgttttagaggaagtagttaacctggagggagattcaaaggaggctggataagagaatgtctatttttctccttccctatcaccttacatgtacctattctccccaaagagaaggaagaccttaggctttcaatgtggtgttctttcttaagtttaagtaactggctgccaatgaaaaccttcccttcgagccgcaggcatgtggacagaatccaccaccctccttagacactcctcagactactacaggctatccccagctggtggctctcaaattcatgagggtccagaagttgttcctctggattcaggttgttaaagggactaatgaggtctgcttccattactattattgaaacctcaataaccacaaataaaagaacaaaaagtttgaga

SEQ ID NO: 102687 - DNA, 429 bp, Homo sapiens
tcaatgcagcagctcagcagcatacccaagacccagggtcgttccgtctgtctgctccaccagcctcggtatcttggcttccatcttcacttttccccgcatggttacagagtggctgctaaagctccaggcattaccgtcctacatagcatgtccaaaaacaggaaggatgcttgctcctcatgtaacaccttctattagcaacaaaagcctttcccaaagctccgagcagacttcccctcaaatctcattggcaggaaccaggtcacatgcccacagcccaccctaacacccatggcaaaggggaatggaattgggtaattgatagggcctctcttcactgagcacattgatcctgacacctgagaaacggagggctctgctggcaagacaaagaggcgggggtaggaggcaggcagtgtctgcaca

SEQ ID NO: 102688 - DNA, 188 bp, Homo sapiens
ggcactgacaggacttgacacattctaatctcctgagggccgctaacaacatagatgacagtctggacaacacaaagggtcaacaggtgctccgagtgtccggcagggctaattgttccctgactgtggtggaataagcttggaggagatgccttcacttactctactgagaggcagagaaaggttag

SEQ ID NO: 102689 - DNA, 741 bp, Homo sapiens
acttgctggtattcccccggtatcagcagaggtgtgtacgggcactgctttaaaactgggaaggaggaagacgaggccaggagccggagggtcaccaaggtagatttccagcagcgctagtccagctgaacactttccagccttgtttttcagcagctttgaggaaaagtatagtgatccgtatgtgaaactttcatgtacgtagcggatgagaatagagaacttgcttggtccagacaaaaacaattaaaaagacactgaacccaaaatggaatgaagaattttatttcagggtaaacccatctaatcacagactcctatttgaagtatttgacgaaaatagactgacacgagacgacttcctgggccaggtggacgtgccccttagtcaccttccgacagaagaatccaaccatgggaaggggaccttttaacttttagggctcttctctctctcgagaccaagagtgtcataagtctcgagttaagggatttttgcgattgaaaatggcctatatgccaaaaaatggaggtcaagatgaagaaaacagtgaccagagggatgacatggagcatggatgggaagttgttgactcaaatgactcggcttctcagcaccaagaggaacttcctcctcctcctctgcctcccgggtgggaagaaaaagtggacaatttaggccgaacttactatgtcaaccacaacaaccggaccactcagtggcacagaccaagcctgatg

SEQ ID NO: 102690 - DNA, 436 bp, Homo sapiens
ggagtcaaaagttgcagtgagccaagattgcgctactgagctccatccagcctgggtttccagtgaaaccctgtctccaaaataaataaattaattaattaaatgcactttacaatctagataacttttacattgtaaacctcaaaactaaacaacaacaacaaaaaattatagaactttggaactgcaccagtaaagagcataaaaagatgacctcgggattctagcaccttacacttaacttcatggcagtcggcatctttctctttgacaatattttgttacactttcagcgtgtaacacttttagctgtggaaagtgatattgataatcatccagtttctttctgtgggacttagtcattcgcatactagaggccccataattatgttaattcccatgcatactcctccctgggtgttctttgggacctatg

SEQ ID NO: 102691 - DNA, 233 bp, Homo sapiens
ctacctcggcctcccaaatttctggtatcacaggcatgagccaccacacccagccctgattgtggagttatgataccattctctgcataaaattttcataacactaacagagcaatctagtagcaaaatgaggtacttcttgtctactttgtgatatacatcattccaaaaattatcataaagcttccctttctgtttcaaaatgcatactacaaagttgaacgatttaattt

SEQ ID NO: 102692 - DNA, 350 bp, Homo sapiens
aattgggctctttaattcattccagacagcagtttttcaaggtgttttggtagagattaagtgcattatttgtttgacctgaggttcttgtttctctttgggaaactttaattttgttttttctcttataaatgggtacagactgttttcttcctttgtgactaattcacgttcttttctcttccactcttgaacaatcagagtgactcagttcagatgatcaagagagtttgaaatcattcttgagaagaacagcatcaagacattgttcctgttaatgtttaacccacctaattaccatagtaacttctgtaatttcacataaaatatagtaaacatggctatgcttg

SEQ ID NO: 102693 - DNA, 227 bp, Homo sapiens
attgggcagtgtggtctttggaggtgatcaagtcatgagggctctgcccttatgaatgggatggataactttataaaagggctgaaggttgaaggggccactatcttaccctttctccatgggaggacacagcagcaaggtgccacgatggaagcagagagcagccctcaccagacacaaatggtactgacttcaccgtggaattcccagacaccagaactatataa

SEQ ID NO: 102694 - DNA, 737 bp, Homo sapiens
attttcccaaatcaactataatgtagatagggtgtagacttcagaatacagttaatgcagcagaactgtttctttacagcacttgtatgtgacgtgtcaaggaaacaatagaaaaatacagcatattttattaaaaaaaaaaaaaaaaaaaaaaaaaaaaaaaaaaacaaaaaaaaaaaaaaaaaagaaaaaaaaaaaaaaaaaaaaagaaagaaaaaaaaagaaaagaacgaagagcaagaacacaaaaacagataaagacgagatgaggcacagaagcaagctgactgagagaggacgaacaaccatcagaacggagcaacacgaacaagttgagacgcaaagcgacgacgaagagaagaaagaccgagtaccaaaccagaaaggcataaggggaacagaaaacagcagagagaagagaagaagagagagagaaaacgaaagagaaaaaaaaaagagaagaagcaaaaaaaagaggagagaaaggcagcacacccacagagcgaggatcagccaaacaccaacaaagcgagagagaagtaagaccagaagacaaagagagagacaacaaaaggagggacgcagcaaagagacaaacaaggcctacgaggcgccacaacgaaagagaaagaacgaagagcagaaacaagaagaacagggaaaggaagggaggaaaagaacgaagaagaaaacccaacaaacaagcacaggaaagcagaaaaaagaaaggggcaagc

SEQ ID NO: 102695 - DNA, 331 bp, Homo sapiens
cggctgaccaccctggaacacctgaggtgaggacaaggtaggctcgggtctggctcttcccttacagcagtctactcatcccaaggattcaggggccatctttccatgggactataaagctgcccaggttccctcgggccatgtcctctcttaaccactttagctgaagaaggtggtaaggcctctgctttgaaaggaaattgaagctgggttgagggtggagattggctatagtttgaccctcagatctcactgagtttaagctctatatcggggatgtccaatcttttggcttcctgggccacattggaagaagaaaaattgtcttggg

SEQ ID NO: 102696 - DNA, 128 bp, Homo sapiens
aattcaagcttctaacgatgtacggggacatgaagagggttggcgtgacctgtggatgctgaggaagtgtcggtgacaggaagcggggtggcgtgaccggtggatgctgaggaagggctggtgacatg

SEQ ID NO: 102697 - DNA, 1784 bp, Homo sapiens
gggcgcccgtgtggagcagaggctggccgccgtgtccaaggcttggcaaaatctctgcgtcactgagcagcattttaacctcttgaatgagatgcctccgaccttttggatcctctttctgcacctctcaggggacaggtcccgtctgtacggcgctgcctacgagaaacccaagttcattactgcagccaaaggaaaggtgcaggcggtgggaggctcctgcaaggtgatgcgtctggccataagtcccactgccttctcccacctgctggcctgtgcccagcagttccggaagcagacccaggcccaggtgtacagtgaggacatggccctgaacataggctcggaaccagaaggcctgcaggtggaagagaaggagcgccctgtgcagaggctcagtagcgtcctggggcccctggaggagcttctgcagccgctattccccctgctcagcctctccaaggccagagtgcagacacctgcggttgttgccgattcagggaagtcgaagggcaaagacaaggagaggaaaacgtccacaggacaacacagcacagtccagcctgaggttgccgataagatagtcctggtcacagacagacatctcctggagctgccactggaaggtctctctgtgttcgatgaagggacaatttcctctgtgtcacgagaattttctcttcaaatgctgtggaatcgcctccataaagaagagacagaaggtggcgtgaaaaaggagggaagaagcagagaccccaaaaagagaagcctagcgaagaagggcaggaagggcagcatcccccggaccatcccccctgactgcatcatagtcgactcagacaacttcaagttcgtcgtggacccatacgaggaggcccagggcccagaaatgctaactcctgtctccatcacccaagacattttggaaagattccaagacacattcacgtcgcgatgggcgggacatctgggaagcaagcactttcccagccaggcccagtgggagcaggccctgggcagctgcagcggtttcttcttctatggaatggagagcttcctgtcccatatattagtggagagattggtcgccatgaacttgcaagagtgccaggtggcagtcctgctggacctggcacggtcctaccagagcttgaagaggcacatggagagcgtggagcacaggagatctgttggccgttgggaagccaattggagaaacggtgcgtctccttcagaagatgagtggcgacgaggcggtgaaccaaggcgaggcttctcagaccttgaaggacaagctgctgctgctccaaagctccgagctccttcccaccacgctcaacttggtcctgtatgggctgccgcaccaagccatcgggtagtgcaggcctggacctgcctcccatcagctgctggggccccagcacttgcctctgcccttggctctgcccctctgccaacccatccccacctcccggctcccatccccagctcccagctcgctctccccttcctgggcctctccccagcccttggtgcagcctcagccagggaccctcccccagcgacttcccgcaaggcagccgcctggacctcgagctctgcctgcctgtgtgcgccatggggtctgcgtcggggctggagctgcgtctcttcccggggccaggacaagggcggcctccccttggcggcgctggtgctgagttgcttagaccagaagactattcagaccgtgagcctgtttttgatttgagtgttccactaaacaaacaacaaaagccaaaaaa

SEQ ID NO: 102698 - DNA, 873 bp, Homo sapiens
gtgaggccctccaggctccaagccacccagccgggaccctctgctccccacccctgggagccaggaccctggcgaggtggggggaggggcggggcgctaggccaggctgctgaagggcttgggccatcccaacacccgggcactgcccaactcccaggccaagctccatgtggggggagaacttgctccttgggctccttggccatgtctgatccctgaagcacaaacaggaggggcctggtccactctgctccgcagagctcagggtcacctgggcccggctgtccccacaggcaggaccctccgtggtgcgggcagaggagatgggtgggggctggggtctcagggtgaccctccagaggatgggccaggtgctatggggccctcgttgccgagccaggtgcccttgtccaccatgctgtttgcagaaggggcaggagctcggcctttctgcaggggcctggccctcgcggggtctgggccatgcgccctgtttgctacgggggcctcttttttggattgcggtaggaaccagaaggcctgcaggtggaagagaaggagcgccctgtgcagaggctcagtagcgtcctggggcccctggaggagcttctgcagccgctattccccctgctcagcctctccaaggccaggtactggggatgacgttgaggctggcaccccaccacgctcacgcatggacacgtgtgtccagtgctgtggccaaccacgtgtgcttgctgtgccttctcggccgcctttgttcaggactcggcgccgcctgcctgctcccaggaagcaattcttctggttctgcctccattcctgcctggaggagtactgcccactgcccactgcccacggtccctccagccc

SEQ ID NO: 102699 - DNA, 337 bp, Homo sapiens
gagcaggacttgcagtgggaaggagtaggacaggatattgttggattttattaggcatctcttagcactgttttatttttttaagtatgtatatatattcctttgataaaaaataaaaattaggccatgtgtggtcgctcacacctgtaatcccagcactttgggaggccaaagcgagcggatcacctgaggtcaggagttcgagaccagcctggccaacatggtgaaaccctgtctctattaaaaatacaaaacttagccaggcatggtgacacacatctgtaatcccagctactccaaagactgaggcaggagaattgcttgaacccaggaggcc

SEQ ID NO: 102700 - DNA, 362 bp, Homo sapiens
ctagaggatctccgggagccttaacctgagggactgtagtatcagccctggatatacccagatggtcacatgggtgagaaataaacatctcttccagcataagtcattgctattttgggcctttcttacagcatctgaactaactaaggagccatcccacccttactttccctccttctcttccccgtctccgtacccgatgagcattgccactgctcagagccacaaaaggaaaccacatctaaaataggtatctcaaaatacgaacaggagactatctcatcagagtcaccgagtgatgcctgagcccagctttggacaaatgtcaagggtagaagtgaccaggcttggggactgtttgt

SEQ ID NO: 102701 - DNA, 801 bp, Homo sapiens
tggctcccacacatccctcctggctctctggcttcatctgggagagatagaacccagatagcaggagggctgagtagactgtctgcccttacaacctctcagcacctctgggcctgcccagggccctgggaaagggcagggtgagcccaggcatttgcagaacccctgcataccaggcactgccacaggaagtggctgcctgtacaggcgtcaggctcacccaggccttgagcctccctccttgagagaaggctctctcccacccaccatctgagagtagagtttgttttccttgggctagacttggacctgcacccactactttgttgtcagatgcctttcccctgcagctggagctcagccccttcccacagaactgggaggcagtctgggtaggagttcacaacctcgccttccagtctgtagcagggttactggcaacctagagaccaattttcagggcttctgagaggtagaaccagaaggaagggcactgcaacctagaagctggctgacaggagccagaggggaggccatggactggctgcagggcccaggctgccctttcacagagcttcctgggagaggagggcctgctctgctctggccagcgtcaccctctgaaatccctgccccacccctggtgggtcaaataggtaagaatccaggatgagattcctaggaagacccctccccaactctcagaggtccctgaggatggagagtccatggaagccagtggaaaagcaatctaaggccattatctcagtatgggctgctctgctccctggcttctgggac

SEQ ID NO: 102702 - DNA, 344 bp, Homo sapiens
cactgcaacctccacctcccaggttcaagcgatactcctgcctcggctttgcaagtagccaggactacaggcatgtgccaccacgcccagctaatttttgtctttttagtacagatggggttttgttatgttggccaggctggtctcgggctcctgacctcaggtgatccacctgccttggccgcctcccaaagtgctgggattacaggcaggagccaccacacccagcctcaattatttttttaatgcctcctgtgtgccagtcactgtcctgatgtcattttggacattcaaagctgtgttagattggacccctccctgtcttcagattttatagtccaatt

SEQ ID NO: 102703 - DNA, 702 bp, Homo sapiens
agccccggagacaccccagcaccaagctcagcatggtggggcctgggtctggggcagagacgccccccagcaagaaagcaggctcacagaagccaaccccagagggccgagagtccagccggaaggttcctccgcagaagcccaggcgaagccctaacacccagctctctgtctccttcgatgagtcctgccccccaggcccctctcctcgaggggggaacctgcctcttcagcgcctcactagggggtcccgagtagctggggaccctgatgtgggtgcccaggaagagcctgtgtacattgagatggtgggggacgtctttaggggaggaggacgaagtggaggaggcctggctgggccccctcttgggggtgggggcccgacccctccagcgggcgccgactcggactctgaagagagtgaggccatctatgaagagatgaagtacccgctgccggaagaggctggggaaggccgggccaatggccctccaccattgacggcaacatccccgccacaacagcctcacgcccttccgccccatgcccaccgccgcccagcttcagccctcccgagccggagggacgggacgcccaccaagaccactccttgtgaaatccccccgcccttccccaacctccttcagcaccggcctccactcctggccttcccccaagccaagtctgcttcccgaacccctg

SEQ ID NO: 102704 - DNA, 440 bp, Homo sapiens
gctcaagcaatcctctcacctcggcctctcaaagtgctgggattataggtgtgagccactgcaccaggcttattattgttatttttaaatgaatcaataaaaatattttttaaaatttctcagatttaatttctattgtaataaatatcaatagttataacccatgtaaataaaagctctttaggattctcaacaattttttagggtaatggggtcctgatgcctaaaattttgagaaccactaatctaattcagaatccaaagggggattttgagaactagtaatgctggcctaagacagtaaatctgctcattggataagtgactctataacattaaaataataataaggatggtgaaggccaggagcggtggctcacacctctaatctcagcactttgggaggctgaggcagtggatcacttgaggtcaggagttcg

SEQ ID NO: 102705 - DNA, 369 bp, Homo sapiens
cacaccaattttaatgctatctcaactatcatcaaggtttttccttaatcatataaacatcaaattgtggcttcttcaggatctatccccgaagttcttctggggtaaaatcaaagcatctattctttttataatttaaacttttattttagattcagtggtacacatgcagatttgttacatgggtttattgcacgatgctgaggtttgggatacgattggtcccgtcactcaggtagtgagcatagtatccatagttagtttttccaccctcccttcctcctgcctctagtagtccccgttgtctatagttgccatctttttgtccatgagtacccagtgtttagctcccacttgtaaatgagaatg

SEQ ID NO: 102706 - DNA, 840 bp, Homo sapiens
agagctgagcccccacgcagggagttccaatctttcaactgatgacatgggagatgatgtgggattcagagtggaatacaatagttttgctcaaacctaatgatataaaggaaatagattcttgaaagcccctagtactgacctaatttgtttttattataccatttgttaaatatataaacatgatataggtagaaactccttgtttttatagcagatgtatacttctaaagtcaaaagaaaattacaaattaaataggaatatttacaaaaaggaataatcacaagaagaatacaactcacattaatttaacctaataacacggcattgccccagtgaaactgctgctggaaacatgactataaagtgactccaatgacacaagtgctgtgagtttggtgacccaatcctacagataaatgccttgtgacactcaatgctattttttctctatttgctctactaagaagttttcatttataagaaatggtctgatctcatttagcttttacttaaacatcgaagcttacatctgtttttgtctcattcacttacaatcattagaatgaagctaacacaaaatcagaaacacaaatgcaaatgcagccaatgaaagcatgcagtagcacatcttggtaactggccaccccagtgatccagaatatgcccatataaatgatttacattgtcaacaaaatacaaactgaatgaaccaattctggtagagaattggctggattgtgataggaaaaggcagagttctaagtccttagttatgtaaagacttaattagtaggcttataatttgaaaacaacacatgggtttgtctctctgtatt

SEQ ID NO: 102707 - DNA, 676 bp, Homo sapiens
tttccttgtgttttgctctgcattgcatgcaaactattgttctttgagtagttactttaataaactccacccagtctcccaccttattttaaggtcgcagagttggagatgaacatccaagcagatatttggaaaaaaaattatacttgtatggaagattgcaacttgaaaaatatgtggggctggacttagtggctcacgaggcctgtaatccctgtgctttaggaggccaaagctggaggatcgcttgagcccaggagttttagaccagcctgggcaacatagcaaggcccccgtctctccaaaaatactttaaaaatattagctgggcgcagtggcatgcacctgtagtcccagctactcaagaggttgaggcaggctgggcgcggtggctcacgcctgtaatcccagcactttgggaggccgaggcgggcggatcacgaggtcaggagatcgagaccatcctggctaacacggtgaaaccccgtctctactaaaaatacaaaaaattagccgggcgtggtagcgggcgcctgtagtcccagctactcgggaggctgaggcaggagaatggcgtgaacccgggaggcggagcttgcagtgagccgagatcgcgccactgcactccagcctgggcgacagagcaagactccgtctcaaaaaaaaaaaaaaaaaa

SEQ ID NO: 102708 - DNA, 92 bp, Homo sapiens
gttgtgctgctttgggtgatgacaaggcctagaatgtgaacctggttaatgtgaagtggcagatattttggatgggcattttcatcatggaa

SEQ ID NO: 102709 - DNA, 537 bp, Homo sapiens
cacctaaactccctccctctccactgtcacacagttcacttcggtagttatttgttggtgaaatgcacacaggatgcatactgtgtcctctggcatccatatagcaatgggctcctccagaacaatccataacatggtggcttcacactgcctgcctgttggcttgttgtcaccaccccagtgctcaagaaaggaatactaaatgccatagcaaattcaaaactctgctgaaccctgacaactaggaaggtttgtattaggattaataaaacaatgatcaaaaatcttgatactagtacaactctgactcatttactgtttgatgccttgaatatttaataggtatcttgatgttgctcaaaacaaagcccttgattttcccatcagcctccttttctctccacaaacctattgagtcctacaaaactcctgcccctgccccctccttgccttcccagctccgtgtacagcattaccatttttcaaggggttctagtagctgctgtagagccatccttgactttctgctctcactcc

SEQ ID NO: 102710 - DNA, 178 bp, Homo sapiens
ccataaaactaagatctaatttcatgaagtcaaagttcttattagaaataatattacttgatcttttaaaaataataaaagaatgtacactgttaacgttgtagtcctgttactgaaatttgaatacaggtgtgaggttgcagtaacctaataagaccaaaatcatttgatttttgtt

SEQ ID NO: 102711 - DNA, 355 bp, Homo sapiens
aaaaaacatttatcgttgacttcaaacagcaatgaagagcatgttaacagaagttacttattttatgaaaaataaccatataaccccaaacaaacaaacaaaaatatttagtgagaagagtgtcactgtttaagatttttacaaatctctttgcatgcctggtttaatagaagacagctaatgttcctatctgcgtcttattcaatttgttgtctctagaaaactccactgtacactcacagaagaatacagacaagagtggaaaaggcaaatcatatcgtagcatcattataaaaagttttgacctggtgtacacccaagtgggtcttgaggacctctaggagtccacagaaca

SEQ ID NO: 102712 - DNA, 1158 bp, Homo sapiens
cgcgggaaagagtgccgcctcagctgagggcaagcgaggagatggctgtgaggcaggcggcgacggcgggcactcccgggcccaggagagaggaagaggcggcgcttctattcgagagggcccattaccggcacgacccgcgctggctgctgcccgtgaccccccgcctgtgcctggcctgcgcgctggagctgctgccggaccccggcgtgtcgttagtgcgcaagaagcacatgttgtcctgcttccaagatgcccttgtgaggcatacctccctggtcacgcaactggtgtctcaggatcagagagtctgcatccacttcataagtgtgctttttggactattatgcagcatggaagatgggagtgtgacagacctctgtattgaagtccttattcagatcacaacgcagctgaagctggagcagactatccgttgcctgctggatgagtgccacaaagagctgtgtaacatgccctccatgcgaggcagcctggccaccctgacccttcttggcaagttggtggatgccatccctgctctggcagacgagcttgtaatggagcatggcaacctgatggagcatctgttgagaggcttagtataccccagtgagggcatacaagcttctgtctgttacctttatgggaagctatactcctcaccagtggcagctgagatgctttcaggacacttccgtgagaagctttttcccctcttcctttccatcctggatggtgcccagacaaaggagctgcagattaactgcttgggtttgctgaggcagctgttgaagtatgatctctttgtgtccatgatcatgaaccaggatggactgggagaaagtgctaagaatatcgaagggtcatcaggaaatacctcactgcctttggtgctcaaaaagcttctcctctctagagatgaaaccctgcaggtggccagtgctcactgtataactgcggtgcttgtccactccccagcaaagcatgcgtcagccttcatccacgctgacatcccagagttcctctttgagcatctttcttcttccagtgaagtgctcgtctggtccagctgtaactgcttgacactcctggtagaagagccactctttttttccaagtgccacacggtgtatggttggtagtaagggtcctgta

SEQ ID NO: 102713 - DNA, 719 bp, Homo sapiens
aatggagcatattcactttctgtagctgtgtaacatgccctccatgcgaggcagcctggccaccctgacccttcttggcaagttggtggatgccatccctgctctggcagacgagcttgtaatggagcatggcaacctgatggagcatctgttgagaggcttagtataccccagtgagggcatacaagcttctgtctgttacctttatgggaagctatactcctcaccagtggcagctgagatgctttcaggacacttccgtgagaagctttttcccctcttcctttccatcctggatggtgcccagacaaaggagctgcagattaactgcttgggtttgctgaggcagctgttgaagtatgatctctttgtgtccatgatcatgaaccaggatggactgggagaaagtgctaagaatatcgaagggtcatcaggaaatacctcactgcctttggtgctcaaaaagcttctcctctctagagatgaaaccctgcaggtggccagtgctcactgtataactgcggtgcttgtccactccccagcaaagcatgcgtcagccttcatccacgctgacatcccagagttcctctttgagcatctttcttcttccagtgaagtgctcgtctggtccagctgtaactgcttgacactcctggtagaagagccactctttttttccaagtgccacacggtgtatggttggtagtaagggtcctgta

SEQ ID NO: 102714 - DNA, 767 bp, Homo sapiens
gtacagccattttggaagacagtttggccgtttctcacaaaactaaatatactcttaccataccatgcagcaattatactccttggtgtttacccaagacttgaaaacttgtgtctacacaaaaatctgcacgagtgtttaaagcagctttatttttatttataattgccaaagcttggaggcaagtaagatgtcctttggtaagtgaatgggtaaactatggttcatccagataatgagatactattcaatgttaaaaataaataagctatcaagccatggggagagatggaggaaactgacatgcatactattaagtgaaagaagcccatctgaaaacgctacgtactatatggttccaactgtatgacgtcctggaaaaggcaaaactttggaaacagtaaaaagatcaatggttagcaggatttgggcaggggaagggatgaataggcagatcacagatgatttttaggagagtaaaaaatgcacggtattagaatgatggatacatattatccatttgtccaaacccacagaaagtgcaacatcaagagggagccctcatggaaactgtggctctgggtgacaatgatgtgtcatgtaggctcatccgtggtaacaaatgcaccactctgtggggatgttgacagtgcaggggactgtgcatatgtgaggacagagggtacatgtaaatctctatatcttcagcagaattttgctgtgaccctaagactgcttgaagaaaaataaagtcttcgttaaaacaa

SEQ ID NO: 102715 - DNA, 449 bp, Homo sapiens
cgccgacgccgctgctgtggccgctgctgctgctgctgctcctggaaaccggagcccaggatgtgcgagttcaagtgctacccgaggtgcgaggccagctcgggggcaccgtggagctgccgtgccacctgctgccacctgttcctggactgtacatctccctggtgacctggcagcgcccagatgcacctgcgaaccaccagaatgtggccgccttccaccctaagatgggtcccagcttccccagcccgaagcctggcagcgagcggctgtccttcgtctctgccaagcagagcactgggcaagacacagaggcagagctccaggacgccacgctgcgcctccacgggctcacggtggaggacgagggcaactacacttgcgagtttgccaccttccccaaggggtccgtccgagggatgacctggctcagagtcataggtgagcag

SEQ ID NO: 102716 - DNA, 299 bp, Homo sapiens
atgaatcctgacccctacctcacaccatacaggaaaagtaattcaaaacagatcataaacttaaaatctaaaactataaagctgtcagaagaaaatatataaaaacatctctcagactaagaaggtagacatagatttcttaggacacagaaagcaataacagaaaataaaaatccagtaaatcagacttcatcaaatccaaaacatctgctcaccaaaatgaatacacaagccgtcgtctgggagaaaagattcacagaatgtatatctgacaggaatttgtaccgtgatgaggaagt

SEQ ID NO: 102717 - DNA, 422 bp, Homo sapiens
gctgagctttgtaaacccagaggctgaaacttagtgtttcaaatgcatatcttagcaatgcttttttgttttgtttttttaaaacaacaacaacaacaacaaaagctctgatctcctcattgttttctattttgctagggatacaaatataagtacctctagcccctatggcatgcaaaaaaatgagtgtaacaacaaatatcagataatagaaaatggtgggtactgaggaacaggtgatcgtatggttaacatctgtgctataagggctacttctagaatactataatgaacattctagtcaaatgttctgacaaattgtgtgttccagtggctaccacttctgaagatttaggaagttgagtatcggaatttttatgtaaaatttcatgattttgaatgttggctcaaagatagaaagg

SEQ ID NO: 102718 - DNA, 139 bp, Homo sapiens
tagtcatggaaatgtaaataatgggtcaggaatgggaaaaaaggacagttggaataatagaagaaataaagctaaagtcgaattatgaaattttaccattataagttgcagaatattaaaaaatcgaaggcaagaaata

SEQ ID NO: 102719 - DNA, 874 bp, Homo sapiens
agaaaagacaaggtccccataagagtggcgagaggaacagagccaggacatcggaaagcaagcccctgtgttcccaaaccgcagaagagggagctctgatgttagacaagccaccctcctacaagcgaagggaaagtaactttgagcaaaaatgagcaacagaaaatgagatcaaggtcagatctcatacaaagttgcaagatgaaagaatgagcagcagaataacctccctgtgatgtggaaagtgtgccaggaaaacagacccaaactgtaacctctttcagaatgaggcaaggcagtgaggaaactatgtgaaaacacgaaagcagccgatcagagttgtaagcccgggcagtctgggttggaatgggtgccccgagccacgggaccatgatgcctctctagaaagacaggaccaggcattccaccagggttctagtcccaacagcaccactaacttgcttgtggccctaaaggattcattgtccctctctgggtctcaactatttagagctctactgtccagtatgggatcaaccagccatatttggcaatttaaattaaaattagctgggtacggtagcgtacccctgtaatctcagcactttaggaggctgaagcgggaggattgcttgagcccaggagttcgagaccagcctaggcaacatagcaggaccttgtctctgcaaaaaaaatgaaaaaattagctaggcgtggtggcacatgcctgtaatcccagatagctgggattacaggcacgtgccaccatgcccagctaatttttgtatttttagtagagacagggtttctgcatgttggccaggctggtctcaaactcctgaccttgtgatctgccgacctcagcctcccaaag

SEQ ID NO: 102720 - DNA, 884 bp, Homo sapiens
gcctaaaagactgaaagacattttatattagttagaatacttgaggataataacataaaaactttcctttccaacttgtttataaaaggaaatcttcactgttttgaacatcagttattttaaacttttaagttgttagcacagcaaaagcaacaaaattctaagtgcagtaatcactttactgcgtggtcatatgaaatcaaggcaatgttatgagtattactggaaagctggacagagtaacgggaaaagtgactaaaactatgcaaaactatgcaaaactaagcagattgtgtctctagagtatttcccatctcaagtttagttatttactaatttggcaacatctgacctatctttaattgtgagaaaataaacaaacacataagccaactctcagaatatggttatacataggtgtagcctatgactttgaatgtatttgtttgaatagcgtaaaacaaaataaaaataaaatcttgttacagtgcaagaaacggcagtcatcaaactaagatgaggcaagtgtcatgaagtatgaaaatatggtacctgaattctatttattagaaagtcttcactgagctgagcatgttttttttaacaaattcaattactgatttgaatatttattatacttaattattgcagccatgaaaagaggtgctggctgaggctgcatttaataaaaacatttaatcagcttgaggttagtaaaccatttaatttgttttttcatgaagatttaacttctagaataatttcatttatgtatttttaggtatagccctagattctggtctacatagtatacaaatcattttagaatgacactaggttatttcaactgcttttctacagaagtgttaaataagggagtaaag

SEQ ID NO: 102721 - DNA, 350 bp, Homo sapiens
tcatttttgtatttttagtagagacagggtttcgccacttcagccaggctggtctcgagctcctggcctcaagtgatccgcctgcctcgacctcccaaagtactgggattacagatgtgagccactgtgcccagcccagcctctgtgccttttcactttcctgatggtgtccttatagttttcatatgttcctatcttgatttgtatttttcttaggaatggctcttgaattatgtcagatgcctttttgatgtaatagcctaatggtgttattttcctaaattggttgttgtaatgaatgatattgatatataatgtggatccatccttgccttcctgggataattctg

SEQ ID NO: 102722 - DNA, 316 bp, Homo sapiens
ttcgtgttaggctgaattgtgactccctccaccccctgcacattcctatgttgaatgatgccttaacccgaaccccaggatgtgagtgtttggagaaagggcctttacagtggtgactggtgaaagtgggtcccttagggtgagccctcatccaacatgacttgtgtccctgtagaagggggcgatcaggacacagacacacagagggaagaccatgtgaggacacagggagaagatggccatctgtgcaccgcagagagaagcctcgggagaaaccagccctgccaatgccttgatcttggacttccagctgcta

SEQ ID NO: 102723 - DNA, 199 bp, Homo sapiens
tatggtgagtattcagtaaatattagctattatcctgacacattaaactttaaaataattagtgataccataatgccccatacagatttgcttcttgatgctatattgtgtcatcatctctttgtgtcagtcctttcccttatccttctggattgtggatttcttaaaaggtgggggctggaccttaaccatttttctt

SEQ ID NO: 102724 - DNA, 393 bp, Homo sapiens
atacataataacagagtcatcacattagaaatatgaaactaatgctcattaaaagttacaatttaagctgagcatggtggagcatgcctgtaatcacagctaatcaggaggctgaggcaggaggatcatttcagttcaggaatttgaggttgcagtgagctgtgatcacatcactgcactccagcttagacagcagaatgagactgtgtcactaggaaaaaaaagaaagtttaaaatacaaagttttagtttttttaaaaaaatttgcttagcttgttttacaagctacgtaatgacctcatctgggggttaaatcattctatgtgattgtagcatttgatacttgcttaaaattctaaaactatggagtattactctttcctcattttgaaa

SEQ ID NO: 102725 - DNA, 377 bp, Homo sapiens
ggtggcattgctgggatgctgatgtgacttccctgcacttaagagcatgcattgctttggccccactttcagagggtggtggaagactggtttaaaatattgcttcctactaaacatgcagatacgggcttggaaaaaaatagttgcacaagctaatcactcacaaatctggatatatttcaggatgttttgacagttttccccacataacatctgtacttaagaagcctcacgctattggtaaagtattaacttgatttatctgctcacatccagggcactgcatggttctgccctgctatccccagatcccctgccaggcgctcccctacaggcctctccatcctccatgagtatgagcttacacggccattcat

SEQ ID NO: 102726 - DNA, 191 bp, Homo sapiens
gtttcaagtcctcgtctgtctacaggagggagtcaatcatgacattcacaagactgctgtgggcacaaatgaaatcaggggcatgagacatgttgtaaactggagagatttagggcgtttccacacacatttcccagctgattctcacagagaggcagggaagaagacgtcaccaccgtcagcgttgttta

SEQ ID NO: 102727 - DNA, 160 bp, Homo sapiens
acagatagcagggctgggagaaagggatggggagagtccctcctgccactgacccaggatggataaaagtacccctttcatagaaggaagaaaatgggaacaaaggtgctgctgatcatctgaggttgcctgcatggcagtgaagaacatggacctttgg

SEQ ID NO: 102728 - DNA, 368 bp, Homo sapiens
gggcccctctttcctgccaggcagggtgtgccgtgagtgatctgggcgaaagcgggccacacagaggaccccggcagcctgagaccatggcatcgccaccagacaccccgtggctcacctgggacagcgtctggagcccagcctggcctgtgccggctttaaaggaagggcagattcaggagagcaggaaggaaacgggaggggctggatgagctggttgctgggtcgagcccacgttgccccctccactgctgcctctgagaaggattaacgcggccttgagaacatctccagctcacgctggcctcagtcccagggaagccgagatgtctgaagaaagggagctggtggctgggttctctgggctc

SEQ ID NO: 102729 - DNA, 614 bp, Homo sapiens
tgagacggagtttcccaggctggagtgcagtggcgcgatctcggctcactgcaagctccgcctcccgggttcacgccattttcctgcctcagcctcccgagtagctgggactacaggcgcccgccacccctcccggctaattttttgtatttttttagtagagacggggtttcaccatgttagtcaggatggtctcgatctcctgaccttgtgatccgcccgcctcagcctcccaaagtgctgggattacaggcgtgagccaccgcgcccggcccctgatggtctaatgtttttagcacagttgaacactttaaataagagccacaaccataaggaggacctctccccagtatggcatttagaatcagcttccttatcagatactttctccttgtaacattgttattcttcagcatattggataaattggcaaatggctcttatacacatgaaaagatactcaactttatgaataggaataaatattcaaattaaaactcactgatgccagttgtgatctagtgggttagcagaaacccaaatgtttgatactagtactggtgagaatatggggaaacagtctctctcatacattgcttacaggaacgtgaatt

SEQ ID NO: 102730 - DNA, 210 bp, Homo sapiens
aggttggtctcgaacacctgacctcaggtgatccactggcctcccaaagtgctgaggttacaggtgtgagctcctgcgcccagccgttcacaagtattgagacggctttgagatgaagaaaaaatgtcttaatatctatagctaaagttcagtgcctgtgctgtagattgtgattcgcatcatgtcagatttgtagtcataacagactgc

SEQ ID NO: 102731 - DNA, 340 bp, Homo sapiens
gagacttcaccatgttggccaggctgctcttgaactcctgacctcaaatgattctctcaccttggcctttcaaagtgctgagattacaggcatgagccactgcaccctgccttcaaggcactttttactgcttataattctgtcatttttctgtttgcttattttttgtcacccactagaatataagctcactgagaccagtgagcttgtctggtttgttcactgctacattcccacgcctacatgagtttctgactcatggtcaatatgtaattatttgttgaatgaatgaatgacttcatttttatgtgtataaatttggtgactactgaatttataa

SEQ ID NO: 102732 - DNA, 835 bp, Homo sapiens
ttcctggggaggtgggcaaaggagactgtccctaccaagagggtgacgtaagccaagaaagaggggctgtctgctctggccattgcttatgagttgtgtggagggccagtgaagggtggagaggcaagatggtgtagagctgataagagcacagcctcatgaccctgaacttccttccaggtccctcatcaatgtaatgtggatacattagtaccagctttgaggggtgactaggattggattggatgatgattgtaaagttcctggtgcaggcctggcacataggaagtgttgattagaggcgtgagccaccgtgccttctggcccattttacctgatttaagagtaaaaataatctcttctcatttaaaatgcttccatcttttcagtaaagttccatattgggaggcagggatgtaaaaatataccaataactgaagccattatagttgtgaggggtccctaagtctaactctaaactggtggcagtacttggaaaaacaggtgcttttacttcctctgttgtttctgagaaacattacgtattttttaatttatattaggctattttctctgttaatttctggccagcctttaaattgatctgtgtatttcagcgcataattttaggtatattctttcaggggaaagttccctaagtggttgttgctgtcatttgtcttgctatgtcatctagcctgaagtgcagtggtgcaatcctagttaactgtcaccttgaattcctgggctcaagcagtcttcccacctcagcctcctgaataactgggactacaggcatgcaccaccacacctagctgattttttatttttctta

SEQ ID NO: 102733 - DNA, 463 bp, Homo sapiens
ttcctggggaggtgggcaaaggagactgtccctaccaagagggtgacgtaagccaagaaagaggggctgtctgctctggccattgcttatgagttgtgtggagggccagtgaagggtggagaggcaagatggtgtagagctgataagagcacagcctcatgaccctgaacttccttccaggtccctcatcaatgtaatgtggatacattagtaccagctttgaggggtgactaggattggattggatgatgattgtaaagttcctggtgcaggcctggcacataggaagtgttgattaggccaggcgcagtggctcacgcctgtaatcccagcactttgggaggccaaggcaggtggatcacctgaggtcaggagtttgagaccagcctggccaacatggtgaaaccctgtctctactaaaaataccaaaaacaaacaaacaaacaaaaacaaaaaacaaaaa

SEQ ID NO: 102734 - DNA, 422 bp, Homo sapiens
tgttttgttttgttttaagagataaggtctcactacgttgtccaggctggtctcgataccctggcttcagtgatcttcctgccttggtctcccagtgttgagattacaggcgtgacacacttgcccagcccccagagtagtttaaatgtgaatttttcttaggagtaagactcagcatcttttcagatttttaataatcatctgtgtgtctcttcctgtgaacaatcttgttcttatctccttgcccatttttctgtggggcagttggcctttttcttaacttttagaagttttttttaatattaggaatatgaaccctgtatctgctctatggaattgcaaatattgtttccctctgtcacttttttttttttcttgagacagtttcattctgccaccgaggctggagtgcagtggtgtga

SEQ ID NO: 102735 - DNA, 372 bp, Homo sapiens
ctgaaaatatagagtgattgcagcaagtatgtaaagggtgaagatgtgggagagaaattttgaagatagaatttacagaatttgtcaactaaagacatatggggttaaaagaaagaggaaaggtgaagattccttaaagaactaaaagtagatctaccatttaatccagcaatcccacttctgggtatctacccaaaggaaaagaagtcatatacaaaaaagatctttgcacatgcatgtttatagcagcacaattcacaatttcaaaaatgtggaaccagcccaaatgcccatcaatcaacaagtggataaagaaattgtggtgtgtgtgtgtatatatatatatatgtacaccatggaatactactcagc

SEQ ID NO: 102736 - DNA, 230 bp, Homo sapiens
acagtcacaaacgcatcctccagcagcctccagctacaggttccaggaggagccacagatcagagccactgagccttttccctcaaggtaactaacacgtagggggccacattctctgaggcccaggtggaagcggccctgagggaaggtgcatctccagtgcctgggcctctctcccaccacagtgaccctctgcacagacggtgccctccaactgcccttcacgaacc

SEQ ID NO: 102737 - DNA, 728 bp, Homo sapiens
gaaaagaaaaaatccatagggaagagttggcagttggggcttatagttgggcctcctccagattctctaatattttatctgagtccacatgcaaccattaaaattaagttcgttatttggctggtttctccttaatcctgtcagtggattcctggttctgccactttgccaggaatgagaatagccatggtctcttcccttctaaagggtttgactttttctctgatttagcttatttattatttagatttctttacatgcttagctctctgattttttttttccttaaactatgatttttgtagcttatccagcttgttgcagtttatagagtgaggcttggtatcttgcaactttgagcattctagtcagaagtggaaatcctgagccttttgttagaattacaaaatttgagagctggaagagaccatagaaatcaagtagtttaagccaggtggggtggtgtgcgcctgtactcctaactactacctggctctgcctgggtgacagggcaagaccttgtctcttaaaaaagaagaaatcctgtagcttagccactttgttttcctgatgaggaactgagacataaaaatgtgaaattctttgactacacagctgatgtagccacagatcctggagtagaccccagatctttaaacttatggtttatttcctttaatataagctgtccctcttggtttcatgttgctaaaacaacacctgagact

SEQ ID NO: 102738 - DNA, 373 bp, Homo sapiens
aatctagatctttttcacatatatcataacaagttagttcaagtttattttgaaaaagtgtaaaattcatgcataggttttcgtaacattcattttccaacagctttttgaagatcccttatatatgttttggctcaattaaaaaaataaatatttcaagttgtgtgtctcaaattatgaaataaatgcatagaacacagaataatttgttcaacgaagtcagtatgatcatagcaacaatggaaaaataattttgaaatagaaaggagaaaacagaaaagtgaacaactgcaaatatgttggaatgtagttcagttttaatttaaaaggtggattacaggcatgagccaccacacctggctatatgtgggta

SEQ ID NO: 102739 - DNA, 346 bp, Homo sapiens
gaggatccagaaatccacatggattgtgacttcttgatggggactggtagcctccccaggtggaggacatggtggagatggggcatccccgcaggtggagaggagctggcccagatgggagctcatttgagagaggagccctcaccccagccaggggtgcagcccttcctggatagtgggtggggttggcatttgagggcagcctcttcagccctgcgagggcaggtaccactccccatgtatattcagtcattcactcattcatctccctcccttttcacttgttggacccttggatttatttgttcatccaacaagcatttattaggcacttagtgtgtgcctg

SEQ ID NO: 102740 - DNA, 332 bp, Homo sapiens
catgttacccaggctggtctcgaactcctgggctcaagcaatccgcccaccttggccacccaaagtgatgagtgctaagattacaggcatgagcctctgtgcccagcttggatatttcaaagacattagccatggccttcatgtttatctggacttgagggcttcatatctttgaccatagatgatgcttaagttggtctttcacgtggtttcagatccacagacattttgattaggtcaaataacaatcgtcttcataatgccaccatgtatgtatgtagtcctttggagactattttgacatcatttataactgacaacactgtgacttt

SEQ ID NO: 102741 - DNA, 401 bp, Homo sapiens
tttttgtaatatagtaccgattaagcttacaaataagttatttcaagtataataaaaagacttatggtaaatacctaaataacagtaatagttctcgtattgaaaaaaatggaagcaccaatcaaacaacatttaaaataagagaaattattactctttaaaaaggcatttaaaaacaagaaaatctcagttctcagagaatttgattagtcagaaaggagaaaggggtaaatgtgagttgattattttggtgattatttttgctatcctagctatctggagcattttcataatagaatcatagctggagaaaataaaaaatttatataatgtgattgaaaatatatattcatagtactatattaataatagggtaatgcaaagaaaattatatccacttt

SEQ ID NO: 102742 - DNA, 395 bp, Homo sapiens
gccagagactcgagtccttccccaccccactgctcccccgcaggggtggctcctcgggccccgctttgttcatcgtatccgggatcctttctgcaccctgcctgcctctcctttctgctgttcctcaccttcactaacaattcacccctccacacctgcagataggctccccaggctgccaggcttggctacagtcatcctctcggctcacccttagctcactcacaacttccacctctcggattcaaaggattctcctacctcagccacccgagtagctgcaaatacaagtgaccaccaccatgcccagctaagttttgtgtttttagtagaaacagagtttcaccatgttggccaggctggtctcgaactcctgacctcaagttatccaccag

SEQ ID NO: 102743 - DNA, 804 bp, Homo sapiens
ggtgagacgtgggcacaggggttgctgggcttgggagttggtggctgcgtgtgtgggctgaacagagctccccaggcacggccttgtggaccttgagggatgcctgccttcaccactagtgtgacttgaaggggaggagaatgtcctgaatcagtgatgggcattttgatatggaagagaactcccttgaatcctggtggtgaacttagaccagtcactgaggcctctccagctcctcagggtctccgtgttctaggtatccatgtgtccttccatccatttatccatccatttatgcatccatgcatccatccagccatgcatcctccttttatccatccatccatcaacccatcctcccattcatttacccatccatccgttcgtccatccatccatccatcaacccatcctcccattcatttacccatccatccattcatccatgcatccatccatccatgcgtgcatccatccatccatttatccatccatccatccatccatccgtcgtcccattcctttatccatccgttaatgcacctgtccatccatccatccattctccattcatctttccatccatgcatcatccatgcatccatccttttagttcatccagccactcatcaattgatacatccatctgtccaccatccactcatctatccatccattcacccatcctttcatcaatttacccatctaccatccatccatttatccgttcacccattcatctatccatctgtccatccatccacctatctgttcatccatccatccattcatctatccatccat

SEQ ID NO: 102744 - DNA, 313 bp, Homo sapiens
ccatctcggcctctcaaagtgctggtattacaggcatgagcgcctggccacagcatatgatttggctggacttgatttggtttcatccaggaatcctcaatgtcagtgtctttccagcttttctctttatatctcttccctggtcagatttccagtagagttctctactgtccagcctagagggtaatgacctggcactgttctgggcaccaagtggtatatgagggctaaggtctcaaaacccttcacttactcgtgctttcaggatagtacactctggctctgaatttgcttgtgtcctagagtccagaga

SEQ ID NO: 102745 - DNA, 118 bp, Homo sapiens
cactttgacgatgaattgtcttgtggcttccactgtcactgaaaagtcagctatcagtctgcagtctgctttttctctcaggactgtactaggatcttgaatttgccaatgtatccag

SEQ ID NO: 102746 - DNA, 500 bp, Homo sapiens [sequence omitted]

SEQ ID NO: 102747 - DNA, 466 bp, Homo sapiens
accttgaagccttttccacacgtatcagcacctaaggatgtactttattcatttaagtggctgcatcatcacgataataatcagcacttattgaacatttgctgtgtgccagcactgttctaactgctgtggacacattgtcgtcattgttaatcttcaccacagccctctaagggaggtgctaccattgccccattttacggaacagagggaacagagggaacagagggagcggagggaacggaagtgcagggacacccaggaagagatttaagttctgtgtgtctgattccagagcccaggctctcaccaacacaaaattctactcctctacacagttagtttgtgggagagctgggatttattgtaatttatagtttacatagcttctatgttttgctgttttctggtccagttccctaaggtgtgtgtgccctacgtttcacatttcggtctcccaggggct

SEQ ID NO: 102748 - DNA, 601 bp, Homo sapiens
agtgaataaagaaactataattcaaaactaaaaaataattgaaattgatttaaaaaagggagaaggagagtctccaaaagcaactgagaaggaatagaaagatctttaggaagagatcaaggggagaagtacgccaaatctggacttactgagaaggatcagtaagtttatagggagtagagcattctttagttgcaactaatatttagctttaaattcatggtgatgatgttgttgtgaaaaaaaaatcattcatatttggaaaatccaattcaatgagctttatagagcatatccttagcttgtaccaaggtctgagacatacagacactaataggcacaatctcagtctaataattttctagtttagccaggaagatatgttagcattgaaacaactaagttagagtgagaatgagatagtccctaggataagtgtgcaatcagacaagggaggggaaaatccccactggaaactaagaggaaatgcttttggatgcaaataaagagcatcttgaagaatgaccacaatttcagtggtcagttgaaatggaaagcacaaaactcttccaattcctgaggtgcctggatgtatgtagat

SEQ ID NO: 102749 - DNA, 432 bp, Homo sapiens
gcggccgcctactactactaaattcgcggccgcgtcggatgctagggcaaatgctctacctctccgatagtaatatagtcaagttttttgtagagtaaatgaggcaaaattaatttattctttcataaatatgttcttgagtacttttactctgtgcttgggcccattcacatagaagacataaaaacgtttggcagaaggaaatacatgagctaatgtatttttgaattatattgaccatagaattttcttcataagtagttggtatttctcttacaaatgttctactctagaaaagaataaatttctattaagaaaatgaaagaacaaataaaaaagaattagaccagtttggatgatttactagcatgttactttttaaaatacatagttgggtgtccctaaccccgctacccatgatcctccagtctt

SEQ ID NO: 102750 - DNA, 916 bp, Homo sapiens
ccacaggtcacagggctcattctcccactggaaggctcgcaaagaaagaacgcgttcccacacacccagaaaacgggacacccactcatttccaagcccgttcccagtaggagcagcttaaaaaatgtttcattttaaatgacttcatttggtggcaaacacaaaagcatggtaatttattcgtgctttaaggaaaagaatgtctctttttaaaaaatatcgttatttaagttcaggaactttctatttggaatcttgagatacgtttaaaaaatacccccttcctttcgaccttccttaaagaccttgtcaaaagctctgcatgatttgtaatctgctagtctccatgttaatatttgcagctgtgaagcttagaaaactctctcaggttcgcgttagtgaaatcttttgcaggagaagaaagtttctcagagcactgtggctttaggttaaaaggataaaataaacaaagtgaaaattaagtgtttccttttgggaacttgataccttggtataggcaccatctttgtgtacaggttatagcaacggtattaatcactaacacatgtctaaaagtctctttcccaaagtgttcacaatcggacgcagaggtggcagggcgggtgtggaatccttaccctttcccctaaaagcctcccacagaagcagatggtgcttgcctggcccttcctgccctttccctccaacccacaggcagcctcgctctgctcctcagaccccagggttcactcacctctggcagacacaggagccacagccttcgctctcctcgctctgcagttctctttcttcaaacaaaaattcaccttcactctccacagttgattttcgttacatttaggaggtcaagtaacttgccaagtgtctgcatggttcattcatccagagtagggtg

SEQ ID NO: 102751 - DNA, 788 bp, Homo sapiens
  misc_feature (650)..(650): n is a, c, g, or t
tttttagtagagacggggtttcaccgtgttagccaggatggtctcgatctcctgacctcgtgatccgcccgcctcggcctcccaaagtgctgggattacaggcgtgagccaccgcgcccggcctcccccatttctttctcttcataattctcatcactatctgtccatttctctgggccggtggtgctgtccacgtggctgttgaagtctcccacaggttgcaggagctgaggtgggcagcctgcggtgaatgctgtgccgtacctgcagggcatgaaggaaaccgcctgagatgcaggcagatggataaccccgcagaggaggagaaggcaggggttttgcaaagtgaagaagaaagagaatgttgcaatcagatggcttgaatctaaagaaatctacgatcagttggggatgttctggtgttcctggacagccactgtgaggtgaacagagtatggctggagcccctgctgcatgccattgccaaggaccccaaaatggtggtgtgccccctgatagatgtcattgatgatagaactctggagtataagccctctcctcttgtaaggggaacttttgattggaacctacaatttaaatgggataatgttttctcttatgagatggatggaccagaaggatctactaanacaatccggtcacctgcaatgtctggaggaatttttgctatacgtcggcattattttaatgaaattggacagtatgacaggatatggatcttggggaacgagaaacattggaactttcactaaggatctggatgtgtg

SEQ ID NO: 102752 - DNA, 303 bp, Homo sapiens
aggctttttacccagcctgtgagctctcccaaggctcttacctgcgcccatggctttgagctctttaggtactcattgtagatttaactctctcgctctgacctttgcaatctggtggcctgcctattacagcctcttgctgaaaaatgcctgctcactaatatctcagccacccaaactgcccattcatataacataattcaccacttcctcttgacccttctctaactacctgctctttgtccacacttccctctctctatccttgagaaacttttctgcccttcacccagactttttcat

SEQ ID NO: 102753 - DNA, 344 bp, Homo sapiens
taatctgatgggtgaacattatttatttttgtcttaatttgcattttcctgattaatagtatgactgcacttctttaaatatactttttagttcttcacacttaactcttctcagactggcagttcctatcctttgctcataattttattaaactttttgaaaattgatttagaggaactctatgtgctcttatatcaataatttttccattaaatgtgttttaaatatttctccaattctgtttcttggctcttaactttatttgcattatatttagccgcacataaatgtggaaacatttatgttttcattgttgttattagttttgatgttagttttcttt

SEQ ID NO: 102754 - DNA, 520 bp, Homo sapiens
gtttttcaaatgccaatgcagctcagttatggttttcagtctgtatggatcactagaccttggcatttattgaatattaatgcctcagatattacacatttggcactttggaaaacataggtggcattgaggtacaactgctgatacatttttatagacttcatacgtgattaagtaatgaagagtatttttaaaagcagccaaagaaacaatttttttttgcttggttttcaacacacctaactttttacttcagagtattagacttacaggtcgtctgggaggtttccattttggaagaaaaatttgttcactgtttcctgtattcaaaacatagtgctgagcactgtggaggatacagaggatgttagaggactttaggtgctgagtacttatacagagtaatgttaaaagaaacagctcaaacgttctgagaatttagaaaatgaaattctctactgagagtgtcattaaatagtcttggtacttttgtgtgtgtatatgtctgtgtttataaaat

SEQ ID NO: 102755 - DNA, 291 bp, Homo sapiens
  misc_feature (277)..(277): n is a, c, g, or t
gtttttcaaatgccaatgcagctcagttatggttttcagtctgtatggatcactagaccttggcatttattgaatattaatgcctcagatattacacatttggcactttggaaaacataggtggcattgaggtacaactgctgatacatttttatagacttcatacgtgattaagtaatgaagagtatttttaaaatgtatcagcagttgtacctcaatcctcctgcctctgcctcccaacgtgctgggattacaggtgtgagccactgcacctggncctttttatgttca

SEQ ID NO: 102756 - DNA, 868 bp, Homo sapiens
cctctcttgttgagacagacagacactataaataaggagaatacatagtatatagtttttagaatacatagcatttttggtagtgaaaattaccatggaggaaaggagtaccagggtaaggtggggttatgaagaagatcttactgctaatatgacatcaaattaaggcttgaagagagcaatcaagtcttatagcaactggggggaaaaggttctgaggtaggaatatgtctgataggtttcaggaatgtaaagcagctagtgaagctagaaaagaaggaagaggaagagaagtagcagttgagatcaaagagctaaagggaggccttgtaaactattgtaatgactgctttttattctgagtaacacaccactggagggttttagatgaagtgatctgatttttttcaaactaacaatttaattttaatattaccatatagttaatatacagtaaattcactcctgttagcacacagtcctgagcatgcacagttgtgtaaccaccaatacaaagtataaaacagtatcattatttcagaaaatcttcccatccccatttgtagccaactttattccattctctgcccaaccacggtcttctgtcttttttgattgttgcagaatgtcatataaatggaattgtatcgtacgtagcatttccatctggcttctttcactagcagagtacgttggatgttcatccatgttgtgtgtatcagtagtttgtctctattgctgaggagtattccattgtatgaatgtaccactgtgtgtttatgcatttcttgttcagttgagggacatttgaattgtttcaaaacttggtgattattaataaagccactataaatgtccacatatagat

SEQ ID NO: 102757 - DNA, 349 bp, Homo sapiens
ggctgcttgtgtcttttggctaaatatgcagcatattttaggggctataacaagatacgtttgaaaggccaataatttgttattaccatatggtagaaagaataaagaagttttctcaagattcccattcccaaattgtgtaatcaaacactcacccagatacttatgtgaagggactttggagacagaattaagtttaataattctgaccttaaattagataaggaacctgaatgtttctaggggagggggcaatatttaatgtaatcacacaaacccttaaaagcaaagcaggaaaacagaaaagttagagagaagctgttgaagatggaggcagaagaaagatgag

SEQ ID NO: 102758 - DNA, 667 bp, Homo sapiens
ctgttccaattgtttggcattttcctctaggttcacatgtagtttttatgttagatacttgttctcggtcttcactaactattctctctctttgctgtcatgtttttgtcctatgtctctgcactctgggaacacttatcacatttacccttgacattactcatttagtttaccataatgttaattcttctcttttctggcatattttaattctgtcattacattattagttattggtgttctttaaaaaaaattaatcccacctccaatgtttatcttcatagtactacttttctgggtagtttttgctcttgtttcataaaaattttatcttcttgtaaattatgaagactggctgttttattaaatttttcttctgttctctgcagtaattcactttctgggttctattcttctaacaaatcttcaagagggtattccactcttaatttctttttaatgtttagagacagagtctttctatgttgcccaggctattttcaaactcctgggctcgaacaattctcccacttcagcctcctgagtagctaggacttacaggtacacaccactgtgcctgtctaatttcgttttgatgtttttttcttaatgactcatttactctctaaatttccccagctccatgtactatccattttttgatgag

SEQ ID NO: 102759 - DNA, 177 bp, Homo sapiens
gttggctggcgggcaggctgggtatgggttgggtgctgcgtgggagaggcctcttacgcccaagggcctgggacaggtacctcccgcagttcctgccatctgcctcgcccttccccttctggggcagaggccagcacttactgagcacctacgatcttccaggcacagggtcttcta

SEQ ID NO: 102760 - DNA, 438 bp, Homo sapiens
agtggataacggcactacatttttaaaagacagggtttttaaagaaaaccatttaacatccattccaatataacatgtttaccatatctaaaaatttgaatgtcatattgcatttttcataattcattagaaatgtcaggtatgtgcctgaaaatttgtgcaaataagcattagataacagatttctctactcatgtgttattagccatttctatatatataataatataaacactgatgttttaatgtctcttaatttttgtacttgatttttttaggtaacatgtaattataaatgtactttgatactactaaagtaaccagatgttgtttgaaaataaattgttttctttagtgcattgacaatattttacaatactttttgtgattatttatttgtgctcccgtgtaattataataaaagcaatagtttaaatt

SEQ ID NO: 102761 - DNA, 686 bp, Homo sapiens
tcacaaatttcaaactttattcattttttttcttctcttgaatttaactctgtctctttgtaacctcatttattggtcctagttttgtcctctgcaggtacatagcagagtgtgcatgcctttccataggatatataaagaaagaatgtgttatcttaataataaggaatacttattaagtacgaaccatgtgctcggctctattctctgcttacaaacatggcctcatccaatcactgtaatcctattggataattcctattaatgtcctgattaatttaatattagaggcagccgagtcaggctctgaactctggaggttccatgccagagcccatactgtaccacttctcctaccttacctcttctttttctttttaaccctctgagatctagacatcccccgctgtcagtaagttatccaacaacagagtcttcatcactttctcttgttcatccatggtcattgttatttgtctggcttgaggtcctcctattccaggtggtcacactggtgatgcactcagtcaggttgtagatgagcaggtaggccaagcatgtcactcctactatgcataacattgagtcattagtcagccttctttgggcttttcattcactgtctcccttggtgagtgagcctttgtcaaatgtttgcagattcaaaaacatagttttcttcttcc

SEQ ID NO: 102762 - DNA, 762 bp, Homo sapiens
cccggagtctatcccgccctcctgtggggcagggcgtgctgggccctctgcaggtcggcgggtgacagcttgcgccctttcgcgcagggactcggccaccatgaggaggggtcaggggctcaggattcggagaccaggcagcctcattagccttaagcgcctgccctgagacagcctgagaggagcaagagcttctccaaggatctcctcgtgaattcagacctcggaaataatgaaaacatttatatttccagtttttatctagaattctcaaaagtatcgaagctattgcaattcataatctgcctcgacataatttcgaaatcaaaggaacaaaaacaacttacctgaaaaagtaggtctcggcccgctggtaatgtccaggtgtgagtctgaggggagggtactcggtggccaggggtctcaccatgaacaagcccatggccaaggccacgaagaggactggcagcagcaggtcggcgagggtgctcttcccggcgcgcagcgtgcggcggagcctccgggccaggatcgcggccacttgtgcgcggagcagctggacgccctgcacagttgcgggccgtgctagggagccacctgcaggacgggcgggaggaagggcggctgggtcagctctgcggaggtgacagcgctttgcctcgtttgccctctcggtgaccctgcggcatctcgcagccatgggaatgcgacgcaggcccaccccatgaggactcccttgagtgtcccctttatgcacctaaa

SEQ ID NO: 102763 - DNA, 328 bp, Homo sapiens
ccagccagaggctgaagctgtccttggctctaggtttagaaatctttcaaaaacattgacaatcttgttttagcaggtgggagaggacagtagggagcagacaaagctaagaagagaggagtctgagaagtgtccagctagtgggagagaagggaatgataactgattaaaaatacccacctcatggggttggtttgattattagaaatatgcatgacatggaggaatataattttaattgtaaatagttacaaatgcactgaataaattgccattattcaaaagacagcagagccctggtgagatgttaaatacaaaacatgacaaa

SEQ ID NO: 102764 - DNA, 731 bp, Homo sapiens
agtggcaacctgctcgggtcccattccacactatgggagctttgttccttcactctttgcaataaatcttgctgctgctcactctttgggtccacactgcctttatgagctgtaacactcactgcgaaggtctgcagcttcaccacgaacccaccgggaggaacgaacaactccagatgcgccgccttaggagctgtaacactcgccgcgaaggtccgtggcttcactcctgagccagcgagaccacgaagcccaccagaaggaagaaattccgaacacatccgaacatcagaaggaacaaactctggacacgccacctttaggaactgtaacactcaccgcgaggatccgcggcttcattcttgaagtcagtgagaccaagaacccactaattccggacacacagggacagcaatccactgcttgccttgatgtacgattgaagcctatcaccccttctgcagcagtggctccagtaagtctttcaaactttgtggttttgatggagacaaatgagacatcaattcccccaatttcctttgagggaaaagaagtttcctttgtaagttttccttcaaaagccagccacagggtctggtttaaggaatctgcctaataggagttctgttttactggccacttgttacataatctagcaatcagaagctaaaagaaaagactgtgtgtatgggtcttaagaagataacacatgctgggtgtgatggctcatg

SEQ ID NO: 102765 - DNA, 472 bp, Homo sapiens
tcccctctcccacctcttcacactggaatgccataggcctccatccttgctcctcctctttttctctgttgaagctgaaaaaactcaaactgctctcacaccacacagcaacaatcaatacagaagacttctgtgaccagaagtgtggagatttcttcccaccaacaagcaagcaatcaactctgcagcagactgcagctgggtgtcctcccaactaaattcaaacactatctacctggagatagcatcagatcccacagattgagggctcagtcccacaaccctcacctcttcagacaccagtcataagtccaggccgctgaaacttctgccaaccaactacaaattggggacaccacagcctcttcctctttggggttggttaatttgctacagcagctcacagaattcagggaaacatttacttatgtttaccggtttgttacaagagatattacaaagaatatagata

SEQ ID NO: 102766 - DNA, 131 bp, Homo sapiens
tgctggtgatctagaggatcccgagaagatatcagaaggaaaaagcaaaacaaaaggaaatcaagatgagactagccaaaaaagtacagtacttgagttacatctggaccagagtaagtctttttgatgat

SEQ ID NO: 102767 - DNA, 886 bp, Homo sapiens
ccatgtctgtcctgtctgaacttcggtgactcttcacaaaatagtacggtaagaaaattatttccatccatttcaggcttttgcagactttctgcattaacagagttaggggtaacaggcttagcatcctttgcatatgagagcctttctagccgccatggctggcaggttgtgaagggtgcctactgcaccctggcctgtcctggggagcctagacacgagctctgtgacagccatgctcctggggctgctccctactcctgtttttagaaacaagcatataattacttcattgataacagtcacagtggagcctagcaaccgatgaaaggaaatagagaaagaaaaagagaaagcaggaaaagaagggtgggatgattttttcctgtagggtggagttcatttccatggcttgattttcacacaggagatggtgttgtataattctgttggaactttcttttcagcacaattaagaattataatcaagtaaaatgttttccatttaatccaacatatgttaatttctttttgaattttaataaagttccttatttttctcaaaattgactgctgaatatctgacagcataaatcaattgtattctaaaaaagggaagagagaactagaatattgtactagatagaaaagatgcattataaactttctaaggttaggtattttagtaaactagtgttaaaatgatttttacctttcgtgttcttcttaagaaacatattttcagtatagctcaacacttacagtcataagtgtatgtatagttcttaacttgcagaactgtttcctataacctaacactcatcacacttaaactttttatttttttaattttttttcttttttgagatggagtcttgctctgttg

SEQ ID NO: 102768 - DNA, 695 bp, Homo sapiens
gcattgacttactagttgtgtacctttgcattgtgtcatcatgtagaaacctcacagcagccctatgagcttgagcattgctaccccttatctacttcgcaggtgataaaactgacaataaatatcaattttatattttgcacaggaaaaaaattggagtggttcttaaaagccacgctgggcttaaatgccatgctagatccctctctgtgatgacctggcttcaggtttcttcctctgttcagtccttagcacaggcagctgtttcatgctgcccttaaagaactgagggcttgtggtttcaaagtggtctaggctctaagggccatcctcaactatatcatggcacatgcgcaacattgcccagctgctccagagcaaagggacaactccttctaagggcagggggtgcccacttccaggagaggtgccttcccaaatgggaagccacttgtggccacacatcattgagctccaagggtagcctgttgagggtccttaactgacgaccgttgtgcactggaggtggccaaagaaaggcatttgcagaatgtggacgtgtaagtgggatggcttggaaatgatcttaggtaaaggtaaatgcatgctttggatatttggatgtttagtaacctcttgaaggatgattccgctagctggccctaatatgtcactttagttcttgcttatattta

SEQ ID NO: 102769 - DNA, 370 bp, Homo sapiens
tcgttggcccaggagcagttattgcaacccctctgggtgccaggcagtcagttggcactacagatgcaaagatggtgagatacagcctctgtccttagggagaccagggcaaggggtctgagagcccacaggccagggcattccccatcatttttacagagagagctgtggaatagttaagagcacaacacgctggtggctgaggctgggggctggtgtgctggcttctccacctagccatcatgtgacttggggccaagttctgtgattttctgtgcctcagtttcctctgaaatgaagtcatcgtgttacctccctcacagggttgggatcaggcttcattgagttgctgtaagtacagcactcgaag

SEQ ID NO: 102770 - DNA, 385 bp, Homo sapiens
aaatgtctttaggaaaccacaagagaagtataacagaaaatgaaagtgtagacaaagtagacaacaagacaaagatgggatgaaaggaactttagtgctaataaacatgaatgacgagagtttctctttatctagcacctatcatgctgcatatacattttctataatattcacagttttctgaggctggtaggaacacatctgtctcataggtgaagaaattgaggttgagtggagttaaagaactggtccaggctgggcacagtggctcacgcctgtaatcccagcactttggaaggctgaggcgggcagatcacttgaggtcaggagttcaagaccagcctggccaatgtggcaaaaccctgtctctactaaaagtacaaaa

SEQ ID NO: 102771 - DNA, 317 bp, Homo sapiens
taagacggagtcttgttctgtcccctaggctggagtgcagtggcgagatctcagctcactgtaaactccgcctccagggttcacgccattctcctgcctcagcctcctgagtagcggggactacaggtgcccaccaccacgcccggctaattttttgtatttttagtagagatacattattttttgtaccctatgggggattgaggggttgttgctacatagccccctcaatttgtgctgtagcaatatgcagttaagatccttattctaatgttaaatgtctcttctgtggcttatcctaactttaaaaaaaaaaa

SEQ ID NO: 102772 - DNA, 429 bp, Homo sapiens
gctgtggtgggctctgcccagttcgagcttccccagccgctttgtttacctactcaagcttcagcagtggcagacgcctctccccctactaggctgctgcctcaccggttgatctcagactgctgcgctagcagtgagcaaggcttcttaggtgtgggacctgctaagccaggtgccatttgctaaggccattggaaaagcgcagtatttgggcgggagtgtcctgattttccaggtacaatctgccatggattcccttggctgggaaagggaattccccgaccccttgcgcttcccaggtgaggcaatgccccaccctgcttcggctcgccctctttgggctgcactcactgtccaaccagtcccaatgagatgaaccaggtacctcagttcgaaatgcagaaatcactgtcttctgcatcaatccca

SEQ ID NO: 102773 - DNA, 398 bp, Homo sapiens
gccacaaccctgcacagagatgtctgcattccacaggcagatgtcaacgcccaggagtacgtgcagacataaatatgcactatacgcgtgtgcagagatctatatatacaccacagattcacagctcatcccaaatcatccttagtgggcttatcctaaatatagataataaattcatgttaataatagctgagacctttaaaatgctctgaaggaaaacacacacacacggatgaacacacacacacacgtatgtacatgcacacacacacacacacagagccacccttatgcattcctgcacgctgatccactgtggttttctggtttccttatccctggggggaaaattttgtcaaaaagatacacccaagaaatgtaagctaaacactgacaga

SEQ ID NO: 102774 - DNA, 815 bp, Homo sapiens
aaggatggaaatgtatttgaaataatgaaagagtagcatttatcatagaacaataattgattgcactatttcataaatttgctatttgttctcctctaccatgaacaggagtttctggctgtacacacataacatgtatctctttgaagctgataccatcatgcatatattttttgctggtttatcacttgagtttttctgtatcaccgtacatattttccacctcttcattatggcaagggtccatatctcctccaattttatccttggtattcaggatattgttctagtcaaaaatctctacttcatgactattgtgaactataaaaaaaactactgtgaatttttgtgtgaaaaatcagaaaactaagttttaaggtctaatttcacttggatttgaatctgtgtgaatcacagattccataaatatcgcgtggaaagtatagctgactctggccttcctcaccttccaggctgatggaagagcaaagtgagtcatagattagaacgcagtttggaagtcaaaactttttataacccatgtacgggctgatactttcatgagtctggttgagtttcctagaacctcttggggtaggcacgtctcaatttctgtctttatagtgattgtctactacagaatccccaaagggagagaccctctgggcaactcatggtcctgaagtagactacacagtgttgcacagttgcaatagaggcataatagatgaatatttattggaattccctccctcctccttactgtgtatttcaatcctatttgcccttcaaaaccattccaagagcaccctttt

SEQ ID NO: 102775 - DNA, 357 bp, Homo sapiens
tctattgtcagaaggcctggattcaggttcaaggcctggttcttagtaattttgtgaccaagcaatcgctgaggtggctgggcgtggtggctcgcacctgtaatcccagcactttgggaggccaaggcgggcagatcacgaggtcaggagatagagaccatcctggctaacacagtgaaacctcgtctccactgaaaaatagaaaaaattagccaggcctggtggccggcgcctgtagtcccagctacttgggaggctgaggcagtagaatggcgtgaacccgggaggtggagcttgcagtgagccaaggtcgcgccactgcactgcagcctgggtgacagagcaagactgggtctc

SEQ ID NO: 102776 - DNA, 367 bp, Homo sapiens
catagtatcattttagtaggtgttacctccttttaactcctgaggaaatggtctcagaaagatgtagcaattagctttaggtcatagctagtaagtagaagggcagaccctcaacctgaggcttcctgaagcctgagcctaggctccaaccggcagctgcattcctgcacacctggcccagcaggagaagggcagctctgcatgcctccctccacagcagcctggagctggctttgtggccctgtgagaacacaaagctctgcccagcgcctcgctgtgcctgctctgggccctgtagtgtctgtctccccagtccctgcccctctcacctcccagctcaccagaggccccctttacttagcctccc

SEQ ID NO: 102777 - DNA, 141 bp, Homo sapiens
acagagattttgttcatgtgtttaatttttttgtatcaatatgaggatcgaaggattttagaactccttatagaaaatattcttcaaagaatatccagggctgaaagcataaaaagttatcacatagtgttaagtggctgg

SEQ ID NO: 102778 - DNA, 2345 bp, Homo sapiens
ggaagtggatcgtgcggagcaagcatcacaccatggcgtatgagtgttcctctgtgtagactcaacctgcgcctcgccgtcccccattcgcacacccgatgcccgggggtcgctacggacttaaaatctccgcaccgcaccctccacctcagatatctcttgtaaatgtgtaaacacggatttgccaccaaaggggaagaacaatatgggagaagcgttctacacggtgaagttggagagacttgaaagctgtgacactgcaggcttgtccttccaggaagttcagaaaaatacatacgactttgagtgtcagtggaaagatgatgaaggaaattataaaacagtacttatgttgcaaaaagaaaatctccctggtagaagagctcaacgtgatagaagggctgcaggaaacaggcatattgaaaatcagcttggagtaagctttcagtcacatctccctgaactgcagcaatttcaacgtgaagggaaaatttatgaatacaatcaagttgagaagtctcctaataatcgaggaaaacattataaatgtgatgaatgtggcaaggtcttcagtcaaaactcacggctaacaagtcataagagaattcatactggagagaagccttaccagtgtaataagtgtggcaaagcctttactgttcgttcaaacctaacaatccatcaggtcatccatactggagaaaaaccttacaaatgtaatgaatgtggaaaggtcttcagtcaaccttcaaaccttgcaggtcatcagagaattcatactggagagaaaccttacaagtgtaatgagtgtggcaaagcctttagagcacattcaaaactaactacacatcaggtcatccatactggagaaaaaccttacaaatgtaaggaatgtggcaagtgcttcactcaaaattcacaccttgcaagtcatcgaagaattcatactggggagaagccttacaagtgtaatgagtgtggcaaagcctttagtgttcgctcaagcctgactacccatcagacaatccacactggagaaaaaccttacaaatgtaatgaatgtggcaaggtcttcaggcacaattcataccttgcaaagcatcggcgaattcatactggtgagaaaccttacaagtgtaatgagtgtgggaaagccttcagtatgcattcaaacttaactaagcatcagatcatccataccggagaaaagcctttcaaatgtaatgaatgcgtcaaggttttcactcagtattcacacttagcaaatcatcgaagaattcatactggagagaaaccttacaggtgtgatgagtgtggcaaagcctttagtgtgcgatcaagcctaactacccatcaggcaattcatactggagaaaagccttacaaatgtaatgactgcggtaaggtcttcacacaaaattcacaccttgcaagtcatcggggaattcattctggagagaaaccttacaagtgtgatgaatgtggtaaagccttcagtcaaacatcacaacttgcaaggcattggagagttcatactggagaaaaaccttacaagtgtaatgagtgtggcaaagcctttagtgttcattcaagcctaactatacatcagacaatacatactggacaaaaaccatacaaatgtaatgattgcggcaaggtcttcagacacaattcgtaccttgcaattcatcagagaattcacactggtgagaaaccttataagtgtaatgagtgcggcaaagcatttagtgtacattcaaacctagctacccatcaggtcatccatactggagaaaaaccttacaaatgtaacgaatgtggcaaggtcttcactcaaaactcacatcttgcaaatcatagaagaattcacactggagaaaaaccttataggtgtaatgagtgtgggaaagccttcagtgttcgttcaaccctaactacccatatggcaatccatactggagacaaaccttacaaatgtaaccaatgtggcaaggtctttactcaaaattcaaaccttgcaaaacatcgaagaattcatagtggatagaaaccttacaaaggacgccgggcgtggtggctcacgcctgtaatcccagcactttgggaggccgaggcagggggatcacctgaggtctcgagttcgagaccaggctggccaacacggtgaaacgctgtctctactaaaaatacaaaaattagctgggtgtggtggtgcacgcctgtaatcccagctactcgggaggctgaggcaggagaatcacttgaacctgggaggcggaggttgcagtgagcgagatcatgccattgcactccagcctgggcaacaagagtgaaactccatctcc

SEQ ID NO: 102779 - DNA, 622 bp, Homo sapiens
cataaccctctgatattatatacttcagcataatcagaagtccaaatgtgttaaaactcattacatgatacatatcaaaggttgtaggatgtttggaaatggccaattactttcagcttataaaatgttttgttgaagtatttaagatttattgaaaaggctactatttataacttccaaccagaactttgcaatgtgctgattttatacatgattatacgcctaacatggtgttgttcgggaaagaatcaaaggatggaagggctcactcacttcattaggtgaggattatttctctccaagctcctgaagaaaaaagactctgccttttaaaattaaatatagtctgaattagagagcacttggaaagggcagaggatgatgaactatgatgtcactcatcatccttattgcactgcaggtgcccttcttctgacagaagagcaccgtgcccggccggccgagcataagaagtttaatcaaagtaaccagaatcccatgtttgttactaggatttacattaactgctggaatcacattttgctactatttaagaatgcatcatagatttaatgttttaactaataaaatttgatgtattttataagtatgaatgaatcat

SEQ ID NO: 102780 - DNA, 727 bp, Homo sapiens
cataaccctctgatattatatacttcagcataatcagaagtccaaatgtgttaaaactcattacatgatacatatcaaaggttgtaggatgtttggaaatggccaattactttcagcttataaaatgttttgttgaagtatttaagatttattgaaaaggctactatttataacttccaaccagaactttgcaatgtgctgattttatacatgattatacgcctaacatggtgttgttcgggaaagaatcaaaggatggaagggctcactcacttcattaggtgaggattatttctctccaagctcctgaagaaaaaagactctgccttttaaaattaaatatagtctgaattagagagcacttggaaagggcagaggatgatgaactatgatgtcactcatcatccttattgcactgcaggtgcccttcttctgacagaagagcacgtgggtatgggaagaaattctctactggccgggcacagtggctcacgcctgtaatgccagcacaccttggcctgccaaagtgctgggattacgggctggagccaccgtgcccggccggccgagcataagaagtttaatcaaagtaaccagaatcccatgtttgttactaggatttacattaactgctggaatcacattttgctactatttaagaatgcatcatagatttaatgttttaactaataaaatttgatgtattttataagtatgaatgaatcat

SEQ ID NO: 102781 - DNA, 2260 bp, Homo sapiens
ggaagtggatcgtgcggagcaagcatcacaccatggcgtatgagtgttcctctgtgtagactcaacctgcgcctcgccgtcccccattcgcacacccgatgcccgggggtcgctacggacttaaaatctccgcaccgcaccctccacctcagatatctcttgtaaatgtgtaaacacggatttgccaccaaaggggaagaacaatatgggagaagcgttctacacggtgaagttggagagacttgaaagctgtgacactgcaggcttgtccttccaggaagttcagaaaaatacatacgactttgagtgtcagtggaaagatgatgaaggaaattataaaacagtacttatgttgcaaaaagaaaatctccctggtagaagagctcaacgtgatagaagggctgcaggaaacaggcatattgaaaatcagcttggagtaagctttcagtcacatctccctgaactgcagcaatttcaacgtgaagggaaaatttatgaatacaatcaagttgagaagtctcctaataatcgaggaaaacattataaatgtgatgaatgtggcaaggtcttcagtcaaaactcacggctaacaagtcataagagaattcatactggagagaagccttaccagtgtaataagtgtggcaaagcctttactgttcgttcaaacctaacaatccatcaggtcatccatactggagaaaaaccttacaaatgtaatgaatgtggaaaggtcttcagtcaaccttcaaaccttgcaggtcatcagagaattcatactggagagaaaccttacaagtgtaatgagtgtggcaaagcctttagagcacattcaaaactaactacacatcaggtcatccatactggagaaaaaccttacaaatgtaaggaatgtggcaagtgcttcactcaaaattcacaccttgcaagtcatcgaagaattcatactggggagaagccttacaagtgtaatgagtgtggcaaagcctttagtgttcgctcaagcctgactacccatcagacaatccacactggagaaaaaccttacaaatgtaatgaatgtggcaaggtcttcaggcacaattcataccttgcaaagcatcggcgaattcatactggtgagaaaccttacaagtgtaatgagtgtgggaaagccttcagtatgcattcaaacttaactaagcatcagatcatccataccggagaaaagcctttcaaatgtaatgaatgcgtcaaggttttcactcagtattcacacttagcaaatcatcgaagaattcatactggagagaaaccttacaggtgtgatgagtgtggcaaagcctttagtgtgcgatcaagcctaactacccatcaggcaattcatactggagaaaagccttacaaatgtaatgactgcggtaaggtcttcacacaaaattcacaccttgcaagtcatcggggaattcattctggagagaaaccttacaagtgtgatgaatgtggtaaagccttcagtcaaacatcacaacttgcaaggcattggagagttcatactggagaaaaaccttacaagtgtaatgagtgtggcaaagcctttagtgttcattcaagcctaactatacatcagacaatacatactggacaaaaaccatacaaatgtaatgattgcggcaaggtcttcagacacaattcgtaccttgcaattcatcagagaattcacactggtgagaaaccttataagtgtaatgagtgcggcaaagcatttagtgtacattcaaacctagctacccatcaggtcatccatactggagaaaaaccttacaaatgtaacgaatgtggcaaggtcttcactcaaaactcacatcttgcaaatcatagaagaattcacactggagaaaaaccttataggtgtaatgagtgtgggaaagccttcagtgttcgttcaaccctaactacccatatggcaatccatactggagacaaaccttacaaatgtaaccaatgtggcaaggtctttactcaaaattcaaaccttgcaaaacatcgaagaattcatagtggatagaaaccttacaaagtgctgggattacgggctggagccaccgtgcccggccggccgagcataagaagtttaatcaaagtaaccagaatcccatgtttgttactaggatttacattaactgctggaatcacattttgctactatttaagaatgcatcatagatttaatgttttaactaataaaatttgatgtattttataagtatgaatgaatcat

SEQ ID NO: 102782 - DNA, 393 bp, Homo sapiens
ccaaggtctagcctgcagagttccatgtcacatcttcagagaataaataccacaagacagacacagacataatacatgcctgataaaaaacaaaggaagttcaactcccacaaatagccctgttgacttgtaccagaaaagcatctacttccttctcctttcaccataaatgcaaataggtgtttgtcactaagagtaggacacaataaaagaaagtaacaccagagggtgcggtggctcatgcctgtaatcccaacactttgggaggccaaggcaggcggatctcctgaggtcaagagtttgagaccagcctggccaacatggtgaaaccctgtctctactaaaaatacaaaaattagccagtgtggtggcgggctcctgtaatcccaacta

SEQ ID NO: 102783 - DNA, 587 bp, Homo sapiens
ctaagcaattctgtcctctgattcccacccctacccaccaaaaaatggtagacatgaaaggcaggtgaggaaacagaaaaggtctctttgcagatatatattttttaaatggcactatgtagtaattaagagctaaggagacagaaagacagtagatgagaatagaagagtacctgtacctacaaggggaaaaatgaatgcaattctttatttgataagagtgaactgaaagagaatattattttccctacaataaagcaagctgtcctctcacaggataaagtggaattctgacatggattatggacttcttctaactcccattgacattgcttcttaccagacatggggaaaagctacctttcctgaaaggggaggagggcactgtcctttcagacaaagcttgtacaaattcctgaaccgcaaatttgctgaagtgaccgtatatattatattcataatttaaatgattatttatggtcagatacatattgttaaacttgaaaatgttttattacattacatcaaataaagtttatttgtagctgaaataaagcaacgtaagtaacaatttttaaaaaaaaaaa

SEQ ID NO: 102784 - DNA, 726 bp, Homo sapiens
caaaacttctcagacaccgagttgtagaaggaagggctttattcagctgggagcatcggcaagctactgccttaaaatccgagctccccaaatgcacaatttctgtcccttttaagggctcacagcactaaagatttcacatgaaagggtcgtgattgatttgagcaagcagggggacaagagaatgattcaacgaagaatgaaataaaaattgaaacagaatcgcagagctcatatatggaaacagaagaactttcatcaaaccaagaagatgccgtgattgtggagcaaccagaagtgattccattaacagaggaccaagaagaaaaagaaggtgaaaaagctccaggcgaggacacacctaggatgcctgggaaaagtgaaggctccagtgacctagaaaatactccaggtcctgatgttgaaatgaatagtcaggttgacaaggtaaatgacccaacagagagtcaacaagaagatcaactaataggggcacaagatgaagcgaaggaacaaagaaatggaactaaatgacaatcctcagcatcgcaaggcctctcctggctctgggggagctcgggaagatagcagcacacgctgtggaggagggtgggggtggggggaaggcaagtcccatggaaggacggggaatcctttactctaatttctccagctgcattttgttccgtttatctgcagaaaaagaaagaaaaaaaagaaaaaaaa

SEQ ID NO: 102785 - DNA, 340 bp, Homo sapiens
aggtggtctgtactctggtgttttcttctgacctcaaatcccaacaggttcagagacagagcaccaaagggaaaggaaaggactgggggtcttgatagcaatgtccctgactgattacctgaatcagcaaaaaagctggacagattctattatgaggagttactcattgggggtggcacctgtcaggctggaaggaatggggctctgaattgtccccagcgccacgtgcaccaggtgcgcccatgctgccgcgctgccaccgaccctggagcaattccacctcccagcctactccagccttccgcagcagccctgggtcttccttgtgagtccaaggcta

SEQ ID NO: 102786 - DNA, 255 bp, Homo sapiens
gtcactaactcctgcttcggatgggcaaagcccaggctgtgtacctgtgctctgactgcaagggagcctgagaaggcgagtgtctggctgtttagcttcggaagtgggaggcaaactcttaaaagtagggattctccaacataggaagagggttcaagtactaggaagtcaaaaatatgatttgtattccagggacctatgtgattgtgagggttgagaaagaagatattgagattctctgagataccaatcaag

SEQ ID NO: 102787 - DNA, 690 bp, Homo sapiens
cttcccagtctagggtatatttttatcagcaacatgaaaacagactaatacagtaaattggaaccagcagagtggggcgttgctgaaaagatactcgaaaatgtggcaactcaacactctttatcaagagcaatctgtgaattttgaagaaagaacagacatcagaaaaaggaaatctccatctaaagataaattcacctaaaattgcctagaacatgatgaaaactcatgctttgctccctggctataagcatttctcttggggtggttgcacattttactttctggcttcccaccgctaggatgcatgccacactgaacttaaattccgtgactaactgccatgcacagatgtcctggagacgaatacacaccagaaaatatgccaagtatcaaattcacacaaaacattatagaactagcaaatatttgctgcttttggctgtgttggaaattatcttctgtgagataaatcttttggctaaaatatgatttttaaagattctcaaatgttcgagtcttcatttctgcattaattaaattaagatggagccagcgtctctgagaaagctcacaagctcttaactcacgaggttgctccgaagtatctcactctgtttttactcatcctcctgcgtggcaaggaagagaaagagccaataaataaatgaaataaacgaacagtccttc

SEQ ID NO: 102788 - DNA, 365 bp, Homo sapiens
ggtccgtcatgggcatgatcaaaatggcactacagttgctgagagccagggtggctgcagtaacggcagcgacccctgctcccatgcctctccctatgtcctgagggttttccacacttcaaggcttgacactgcagccctaagcctccagagacctggagcttctgcccacttctgctcaaattactgtgtgatctggaggaaatcacttaagatccagggcctctagttcatctgtctgatgaagttgttgaaataattggtccctatgggtctaaaattaaatagtctaggccaaggctttagtgagttttctgcaatttttcagaccccagggagaagccaaagaaagcaagtccaggggc

SEQ ID NO: 102789 - DNA, 389 bp, Homo sapiens
ctcctgcctcagcctcctgagtaactgggactacgggcacatgacaccatgcccggctaatattgtatttttttattttttatatttttaacgatggagactctctatgttgcccatgctggtcttgaactcctggcctcaagcaatcctcccacctcagccacctaatggcttatggattacaggtatgggccactgtgcccatccctgatatcttcttttaaaatgctacctctgggaggaggtaagaaattaactgaatagctttactaaatgtcttttgtcaaatatagtagagccgaaaaatataccagaacctaagtcaaaaagttcattgtaaaggaggaaatatttttccccaaaattaaagccataactggcaattctta

SEQ ID NO: 102790 - DNA, 260 bp, Homo sapiens
gtgaggagtgcctctgcccggccgccacgtctgggaggtggtgggcacctctgccgggccgccccgtctgggaggtggggggggcgcctctgcccggccgcccctcctgggaggtggggggcgcctctgcccgaccacccggtctgggaggtgaggggcacctctgcctggaggagcgcctctgcccggccgccccgtctgggaggtgaggagcgcctctgcccggccaccccgtctgggatgtggggggcgcctctgcc

SEQ ID NO: 102791 - DNA, 377 bp, Homo sapiens
gtacatgattaaccctggtttgacaattgatgttgatagctaaaagtacttattcaggatatgaggaaacatgaataaggattgaaattaaatatggatgaatgaatgaatgaacgtttttagtacaacgtgtaccttaatttttagaatagtaaacatgaaaagccataaacttgaatgcatgcactttttgtttttcttttattttaggctcgagggtacatgtgcagatttgttacatgggtaaatcatgtgtgacgggtttggtgtacagattatttcatcacgcaggtaatgagcgtagtactcaataggtagtttttccatcctcatcctcctccctggtcctaccctcaggcaggtgttggtgtgttatt

SEQ ID NO: 102792 - DNA, 158 bp, Homo sapiens
tagagtgcagagagcccaatcttgttatcaggtcagcagcggccatgggggtttttctccatcctccctatcttcacccccattttttgtttgtttgtttgtttttgagatggagtttcactcttgtcgcccaggttggagtgcaatggcgtgatctc

SEQ ID NO: 102793 - DNA, 410 bp, Homo sapiens
tagacattctgaagtaatttatcttttgaggaataccgtgactcagggaagagacatgggggtgcatatgctctaccttgttttgtcttcgaagcatctttctagaaagctgcatatcatcacagagtcaggggccttgtgaaattatgcaggcaagcagaaatgaggaaaaaacagcttctaacatttgttactttgtctcacacttcctatttcattgagaaaatagaaaaaggtcagcccatccacctgccccctccaccacctacctgctattgtgctcatatacttggccttccacctgccaccacgggacaggtgtctgggttcctatcgaggccacctgtgcgctagctcacagtcatcagcagtcattcagccttgacacatccaaaactgtgggttgagtt

SEQ ID NO: 102794 - DNA, 357 bp, Homo sapiens
agaaaagttgctaatattcaacagtcaggtgcctatatttagaccactcaatcagtccagtcgatttgttcattcaaacaaaagatctttgattatctgaaaaaatccatttctcctcactgccccccagaacagcacggtgctgtttgtttctagcttcagagcctagttgagtagaggacaaaaaaggcatggagacattgaaatagcaactggaactttgagaaattgtttctcactggtgtcactcgattctcagtttattttaagcctgaagaacttctgtagtgtgtttttggtgataaaaatagactatctttaactatctgccttagcttacagcatacctgttcttaa

SEQ ID NO: 102795 - DNA, 153 bp, Homo sapiens
tggaggcaagttggtcccacatggaaaggaggaagcaggtgtgtgggtaaggtggggaccgggtctgaagccaggctggccctagcccttccctgggcagacactttcctgtcttatctctctgtaaaatgaggagccattcattccttcttc

SEQ ID NO: 102796 - DNA, 573 bp, Homo sapiens
tgttgagaaccagggaaacacgctctgacagactgttaggggaaagctgagatgcaacagccaggaagaccaaggaggagcaccaagtctgaggggtcagatacaggcttgagcaaggagtgatgcatttgaaaatttgcagttggaaggagcttgaagagaaagaatgaggaacaggaacagcagtgacatccattaacatccattaaagtctgttggcttctttgattgcagcactcagtttcgggtaatgaggagggtctggggatattttgcccttatcttatagtgggagaggaagggatgagggaatggggctgggttataggacccaaaactgtacaaacagatggttggatctggtcatggtgggatagagctgaggcttgcagccacaggagaaacagcacagtcagaaagacccattccatctagctagtgatacttaatactcatttcccttgtgtattaaaggtgttaacgtcaggatactagctctacttcttggggctgttaaaagccattgaagtaaagtgtgtaaaatcttggcaccatgcaggcataatacatgtc

SEQ ID NO: 102797 - DNA, 191 bp, Homo sapiens
gtgcagcaccgttttgaatttgaataccagaccaaagtggatggtgacataatccttcatctttatgacaaaggaggaattgagcaaacaatttgtatattggatagtgtgtttgcatttgttttactggattctgccaataagaaagtgtccctggacagagatacataaagagtcagacctttgtttaa

SEQ ID NO: 102798 - DNA, 167 bp, Homo sapiens
ggagatgtttgaaaaacaaacatctgttttgctcctagtgggcctagtaacactatgtcaagcttgattgagaagtaagttatttttaccaaaaaaaagtcctataaaataaaaaatttacataggtaattttctacataattgaagcttttagagcctttttcctg

SEQ ID NO: 102799 - DNA, 213 bp, Homo sapiens
tggtagagatgaggtctcgctctgttttccaggttggtattgaactccttcccacaaacgatcctcctacctcagcctcccaaagtgctaagattacaggcgtgagccaccgtgcctggccctagaatcttctcagaatagattgggccaatacttgccttggattttatttaaacttatgaagtacataaagaagatcgatagggacatatt

SEQ ID NO: 102800 - DNA, 323 bp, Homo sapiens
gtaacggagtgatggggtgggggctctgcctaacttcagggctggatgaggggagtctcagttccccaggggtccttgggaaagataagggacttgacattttagggtttttaggtgattattctgctgatgggggtttgtgtgaagtgacctgggagctaactgaagttactctaacctcccaatacctttacccaacccccaagctggctgtatctgggaatatcagtttccaaaattggaggcttaggactccgtttcggggctccccagaagggtagggcctgttctgcctccttctcacaatcaccaggggcaggggc

SEQ ID NO: 102801 - DNA, 412 bp, Homo sapiens
agttatggagattacagtctcagtgtaggcatctgcaggagcacatgtcgggagtaatgtctgtcagagggagacattgctccacctgttccttcgaggcaacggagaggcaaagccaccgccagcacacacagtgactggagcaaaaaaggatttcaaaaaaaagaactaaccacaaaccaatgactcatcagccaaaacaataggctagcgacacactagtgtccacaggagtccactactaacaacagtatacactatcaaacgggtacagagaacaaactaagacttaaggacacccaagacatctgtgtgctgtgtatgcagtggagagatacaaagacataccaggtactaagacacaaaagcccagcctaaattctcccctcacaacatcctaatgctcagcatc

SEQ ID NO: 102802 - DNA, 939 bp, Homo sapiens
ctagaagatggattttaccatctagacctctctggctaatagctagtcttcaaccatctgacataggaatttacttcttttccttgaatggagaacactttaaaaataataacaaacattattataaactaatatatgtgagagtacttagttgaaacaaaaaggagttttagtagacagtattatactacatttgaaaatcaaggagcagtttatgcaacgtaaaatgtttacaaactgcagcgcaatctactgtttgtgactgtcaaagtgtcatgaggaaagtgtctatacaatcacagagttatatttcctcacaaagttctttacgaagagtgaaatatgtttttatacctctcagtttcagttagaggcatattttgtgtaatatttatggcttaaaatggactaaaggtcctgttcttgccttttctgaacttgccgcttttgcattctttgagttcagtttaaagacacttactttaactccattttaaaccctcgggctagaaatcgtaccactgttaattagccacgttatttggtctaacagtttttgtttatcattctgaaactgagcttatctaatacattgataaattatttcaaaggtatttttatagttcaaatcgcttcacttttaccctgacacgtataaatgaataggaatgaccttcagatagcgtttagcaactgtaaccaatctgacaataatgtgttcatcaggtacctgtggattaaatcacatactggcatatttaagatgaatgtcagtctgaaaaataaatatactatattaattcaaatacgactctttgtgtaggtattttgtcatatgtttaagaaaaagctaaagagaatggaaatcctatgacaataactcaagtctttcttcaaagtgcatgcagtcttttgcagtacctcattcagccaagtatt

SEQ ID NO: 102803 - DNA, 236 bp, Homo sapiens
ctggtggagcagatacacaaaggagaaagaggaaagaatcaagacttaggctacagaaaaccaccaaactgcaatgatagaaaaagaggaagaaaggaacgaaaggaggaagaaaggaacaaaggataaatagctaatatgtgcagggcttaatacctaggtgatgggctgacaggtgcagcaaaccacccatggcatatgtttatctgtgtaacaaacctgcatgtcttgcacgt

SEQ ID NO: 102804 - DNA, 287 bp, Homo sapiens
ggctctgatcctgtcacagtgctggcagtgggtgaggcacactgctggcatctgcaaaaccttccccatttccccaagttcacaaagcaaagagatgcaaaggaggaagccccacctgtgcgatcagattcccatcctggttccctgggacatggggcctgggagaccagtgacttaggttcgatttctacccttgtccctggcaggtcatctaactgctctgagccttgagttcctcgctctgcaaagtaggaggagtggctgtgagagcccaccagattctctcc

SEQ ID NO: 102805 - DNA, 2928 bp, Homo sapiens
  misc_feature (1001)..(1001): n is a, c, g, or t
aggtagatccatttattttttaaatacaagtataattttggaaggggtatttgacaaattcagcattaactgccaactctatagacatgttttaacaaaaagcaaaacaaaacaaaacaaaaaaacaaaacaaggcatttactcttggccctttcagtacaggcgaagtgttctattgcatcacaagtgctagtgatgcagtaacagatccaagggcataatattaaatatgtttttttccaactgcgatttagttgaaaaataacataatacaaacatatattaatggctatcaagaccagcagtgatctgcagaatacctagaggcctacctaattagaaggttgaaacttagtaaaaccgtattaaagtcagtgtttttattcttagattaacaatgacagagtgagatatctttgattacaattttataaggtgtggtggggaattgagaggagacagatattggggaagactggcagtgtgtgctgagttagagttgggaatgtggctcaaattagtcaatattgattaggatattgttttagaaaattttaaatgtgtcctaaattgtggcatattgaaaacgatattaaggaacaatgactcattagccctaaatacaatttaatgagtgccatcaatgggcttaagaaataagcagggatgggggatagagaggcaaaatgaggtgaaagagaaaatggaaagtggaaaatatgtttgaacattggagaatgtgaaaaggccaccaaactgctttagttatcactcagaagtgctcttcccattggctacctgcttctgatcacccaaacaccaattttagagcagaggagcagtaatcccctttatctgcaatttcactttctgtagtttgttacctgaggcaaccttggtccaaaaatattatgtggaaaattccagaaataaacaattcatgttttaaatcataagccggccgggcatggtggcgcatgcctataatcccagcactttgngggattacaggcgcccgccagcacgcctggctaatttttgtatttttagtacagacgggggtttcatcatgttggcggccggactgttctctaactcctgacctcaagtaatcggcccgcctcggcctcccaaagtgctggaactacaggcgtgagccaccgcgcccggccccatttcctttattttattttactatgttcagacggagtttcgctcttgctgtccaagctggaatgcagtggcgcgatctcggctcaccgcaacctctacctcccaggttcaagcgattctcctgcatcaacctccggagtagctgggattacaggcgcacgccaccacgcccgactacatttcctttattttatttttatactttactagcctgtttgttgatcacaagactggcggtgcacaaggttgggtctcggtgttcaccgggcggtgggcgtgggcgaggtgggagggtctccagcgcctggtgctaatctccaagaaagtgcaggaaacagcaccaaacgtgattgcaaagttttggtttggcgcggcgggtaggcgttccagcgcagaaatgcgcaggaaagtttctgctgtgcttgtaggaaggtcggccacaagcacttcttttgttttttgaaaccgagtttcgctctgtcgcccaggcaggagtgcagtggcgtgatatccgctcactgcaagctccgcctcccgggttcacgccattctgcggcctcagcttcccgagtagctgggactataggcgcccgccaccacgtctggttaatttttcgtatttttagtagagacggggtttcaccgtgttagccaggatggtctcgatcttctgacctcgtgatccgcccgcctcggcctcccaaagtgctgggattacaggcgtgagccgccgcgctcggccggccccaaacacttcttattggctaatctggagcaaacctgcatatccattggctgaaagctccgtctattttagggtgactgagagcgtctcttccttctgtgttgcctggaaacggactgttcgcctagtaacatctgatcacgtttcccattggtcaccgtttccggaagcccgctctcccgtttccggaatccccgcaggcgctgggtctgcagatggcgtctaggtacacagtggcgagtgtgattccgcagtcttgggctgtttggccaagcgcccgccggacatggtacgccgaagggtcatcggcgtggagtcctcgctttcagcgtccgcggctgggaaatcggccatcgctacggcgggaactgggactcgggctgcgtcccggcccttccacatcggtccaccgcactcgtgggcgcccgcattggtgctgacataatttcctgacctctgacccgtattgtctcgcgattaaagagctgcgcctggatccctcagcagtgaggagacctgaagaccagaggaaacacagcaagggctcaccagagaagacagggcaaggtgagggggatctcctagcagaggaaacaacatgcgccaatcaagcaaagatatttttgtgcattcaaggaacacagagaggaaagacagtggcagatggagacgtataaagcagggatcctgttatgaaaagccctaaaaaatagggtatagagtttgggccatatttcagaggtaataagaaagcattctgcatttttaaagtaaggtttaaaaatgtttctaattagagatacagcaaagttggtgtgagaggataaagactgatatacataatctgaggagttcatgaaaattccatgtaaagcctgtagtatgaattggtcctaggagacagacagcttcaggggcatagagaactttaagcacttttccaagaagagtgaagggctggagaataaattgtgaactaaaatatattttgtgtttgagaacatgaagta

SEQ ID NO: 102806 - DNA, 2966 bp, Homo sapiens
  misc_feature (1001)..(1001): n is a, c, g, or t
aggtagatccatttattttttaaatacaagtataattttggaaggggtatttgacaaattcagcattaactgccaactctatagacatgttttaacaaaaagcaaaacaaaacaaaacaaaaaaacaaaacaaggcatttactcttggccctttcagtacaggcgaagtgttctattgcatcacaagtgctagtgatgcagtaacagatccaagggcataatattaaatatgtttttttccaactgcgatttagttgaaaaataacataatacaaacatatattaatggctatcaagaccagcagtgatctgcagaatacctagaggcctacctaattagaaggttgaaacttagtaaaaccgtattaaagtcagtgtttttattcttagattaacaatgacagagtgagatatctttgattacaattttataaggtgtggtggggaattgagaggagacagatattggggaagactggcagtgtgtgctgagttagagttgggaatgtggctcaaattagtcaatattgattaggatattgttttagaaaattttaaatgtgtcctaaattgtggcatattgaaaacgatattaaggaacaatgactcattagccctaaatacaatttaatgagtgccatcaatgggcttaagaaataagcagggatgggggatagagaggcaaaatgaggtgaaagagaaaatggaaagtggaaaatatgtttgaacattggagaatgtgaaaaggccaccaaactgctttagttatcactcagaagtgctcttcccattggctacctgcttctgatcacccaaacaccaattttagagcagaggagcagtaatcccctttatctgcaatttcactttctgtagtttgttacctgaggcaaccttggtccaaaaatattatgtggaaaattccagaaataaacaattcatgttttaaatcataagccggccgggcatggtggcgcatgcctataatcccagcactttgngggattacaggcgcccgccagcacgcctggctaatttttgtatttttagtacagacgggggtttcatcatgttggcggccggactgttctctaactcctgacctcaagtaatcggcccgcctcggcctcccaaagtgctggaactacaggcgtgagccaccgcgcccggccccatttcctttattttattttactatgttcagacggagtttcgctcttgctgtccaagctggaatgcagtggcgcgatctcggctcaccgcaacctctacctcccaggttcaagcgattctcctgcatcaacctccggagtagctgggattacaggcgcacgccaccacgcccgactacatttcctttattttatttttatactttactagcctgtttgttgatcacaagactggcggtgcacaaggttgggtctcggtgttcaccgggcggtgggcgtgggcgaggtgggagggtctccagcgcctggtgctaatctccaagaaagtgcaggaaacagcaccaaacgtgattgcaaagttttggtttggcgcggcgggtaggcgttccagcgcagaaatgcgcaggaaagtttctgctgtgcttgtaggaaggtcggccacaagcacttcttttgttttttgaaaccgagtttcgctctgtcgcccaggcaggagtgcagtggcgtgatatccgctcactgcaagctccgcctcccgggttcacgccattctgcggcctcagcttcccgagtagctgggactataggcgcccgccaccacgtctggttaatttttcgtatttttagtagagacggggtttcaccgtgttagccaggatggtctcgatcttctgacctcgtgatccgcccgcctcggcctcccaaagtgctgggattacaggcgtgagccgccgcgctcggccggccccaaacacttcttattggctaatctggagcaaacctgcatatccattggctgaaagctccgtctattttagggtgactgagagcgtctcttccttctgtgttgcctggaaacggactgttcgcctagtaacatctgatcacgtttcccattggtcaccgtttccggaagcccgctctcccgtttccggaatccccgcaggcgctgggtctgcagatggcgtctaggtacacagtggcgagtgtgattccgcagtcttgggctgtttggccaagcgcccgccggacatggtacgccgaagggtcatcggcgtggagtcctcgctttcagcgtccgcggctgggaaatcggccatcgctacggcgggaactgggactcgggctgcgtcccggcccttccacatcggtccaccgcactcgtgggcgcccgcattggtgctgacataatttcctgacctctgacccgtattgtctcgcgattaaaggtccagatttggaacaaatctctctagagattgaacagagctgcgcctggatccctcagcagtgaggagacctgaagaccagaggaaacacagcaagggctcaccagagaagacagggcaaggtgagggggatctcctagcagaggaaacaacatgcgccaatcaagcaaagatatttttgtgcattcaaggaacacagagaggaaagacagtggcagatggagacgtataaagcagggatcctgttatgaaaagccctaaaaaatagggtatagagtttgggccatatttcagaggtaataagaaagcattctgcatttttaaagtaaggtttaaaaatgtttctaattagagatacagcaaagttggtgtgagaggataaagactgatatacataatctgaggagttcatgaaaattccatgtaaagcctgtagtatgaattggtcctaggagacagacagcttcaggggcatagagaactttaagcacttttccaagaagagtgaagggctggagaataaattgtgaactaaaatatattttgtgtttgagaacatgaagta

SEQ ID NO: 102807 - DNA, 2764 bp, Homo sapiens
  misc_feature (1001)..(1001): n is a, c, g, or t
aggtagatccatttattttttaaatacaagtataattttggaaggggtatttgacaaattcagcattaactgccaactctatagacatgttttaacaaaaagcaaaacaaaacaaaacaaaaaaacaaaacaaggcatttactcttggccctttcagtacaggcgaagtgttctattgcatcacaagtgctagtgatgcagtaacagatccaagggcataatattaaatatgtttttttccaactgcgatttagttgaaaaataacataatacaaacatatattaatggctatcaagaccagcagtgatctgcagaatacctagaggcctacctaattagaaggttgaaacttagtaaaaccgtattaaagtcagtgtttttattcttagattaacaatgacagagtgagatatctttgattacaattttataaggtgtggtggggaattgagaggagacagatattggggaagactggcagtgtgtgctgagttagagttgggaatgtggctcaaattagtcaatattgattaggatattgttttagaaaattttaaatgtgtcctaaattgtggcatattgaaaacgatattaaggaacaatgactcattagccctaaatacaatttaatgagtgccatcaatgggcttaagaaataagcagggatgggggatagagaggcaaaatgaggtgaaagagaaaatggaaagtggaaaatatgtttgaacattggagaatgtgaaaaggccaccaaactgctttagttatcactcagaagtgctcttcccattggctacctgcttctgatcacccaaacaccaattttagagcagaggagcagtaatcccctttatctgcaatttcactttctgtagtttgttacctgaggcaaccttggtccaaaaatattatgtggaaaattccagaaataaacaattcatgttttaaatcataagccggccgggcatggtggcgcatgcctataatcccagcactttgngggattacaggcgcccgccagcacgcctggctaatttttgtatttttagtacagacgggggtttcatcatgttggcggccggactgttctctaactcctgacctcaagtaatcggcccgcctcggcctcccaaagtgctggaactacaggcgtgagccaccgcgcccggccccatttcctttattttattttactatgttcagacggagtttcgctcttgctgtccaagctggaatgcagtggcgcgatctcggctcaccgcaacctctacctcccaggttcaagcgattctcctgcatcaacctccggagtagctgggattacaggcgcacgccaccacgcccgactacatttcctttattttatttttatactttactagcctgtttgttgatcacaagactggcggtgcacaaggttgggtctcggtgttcaccgggcggtgggcgtgggcgaggtgggagggtctccagcgcctggtgctaatctccaagaaagtgcaggaaacagcaccaaacgtgattgcaaagttttggtttggcgcggcgggtaggcgttccagcgcagaaatgcgcaggaaagtttctgctgtgcttgtaggaaggtcggccacaagcacttcttttgttttttgaaaccgagtttcgctctgtcgcccaggcaggagtgcagtggcgtgatatccgctcactgcaagctccgcctcccgggttcacgccattctgcggcctcagcttcccgagtagctgggactataggcgcccgccaccacgtctggttaatttttcgtatttttagtagagacggggtttcaccgtgttagccaggatggtctcgatcttctgacctcgtgatccgcccgcctcggcctcccaaagtgctgggattacaggcgtgagccgccgcgctcggccggccccaaacacttcttattggctaatctggagcaaacctgcatatccattggctgaaagctccgtctattttagggtgactgagagcgtctcttccttctgtgttgcctggaaacggactgttcgcctagtaacatctgatcacgtttcccattggtcaccgtttccggaagcccgctctcccgtttccggaatccccgcaggcgctgggtctgcagatggcgtctaggtacacagtggcgagtgtgattccgcagtcttgggctgtttggccaagcgcccgccggacatggtacgccgaagggtcatcggcgtggagtcctcgctttcagcgtccgcggctgggaaatcggccatcgctacggcgggaactgggactcgggctgcgtcccggcccttccacatcggtccaccgcactcgtgggcgcccgcattggtgctgacataatttcctgacctctgacccgtattgtctcgcgattaaaggtccagatttggaacaaatctctctagagattgaacagagctgcgcctggatccctcagcagtgaggagacctgaagaccagaggaaacacagcaagtaggccctttaaaccactcacctgtgttgtcttccaatttattctgttttattttgtttccatcattttaaggggttaaaatcatcttgttcagacctcagcatataaaatgacccatctgtagacctcaggctccaaccataccccaagagttgtctggttttgtttaaattactgccaggtttcaactgcagatatccctggaaggaatattccagattccctgagtagtttccaggttaaagtcttataggcttcttctgttt

SEQ ID NO: 102808 - DNA, 632 bp, Homo sapiens
tcaaggactaatgtataggaatagattgaaataaaaaattctccgaaacagcactggatgaacgcttcaaggggctcacacaacctgttccaggacttggtgaccattgtttgtgtccatgttcaattgagttcaaatttaatatttaacttttcctccacaggggctcaccagagaagacagggcaaggtgagggggatctcctagcagaggaaacaacatgcgccaatcaagcaaagatatttttgtgcattcaaggaacacagagaggaaagacagtggcagatggagacgtataaagcagggatcctgttatgaaaagccctaaaaaatagggtatagagtttgggccatatttcagaggtaataagaaagcattctgcatttttaaagtaaggtttaaaaatgtttctaattagagatacagcaaagttggtgtgagaggataaagactgatatacataatctgaggagttcatgaaaattccatgtaaagcctgtagtatgaattggtcctaggagacagacagcttcaggggcatagagaactttaagcacttttccaagaagagtgaagggctggagaataaattgtgaactaaaatatattttgtgtttgagaacatgaagta

SEQ ID NO: 102809 - DNA, 376 bp, Homo sapiens
atttttctcacaatataacagacagcatgaagctaggaggcagatacacttgggatgacagaaccaggaatccaaaagatagtgtaaagtaagggtaaaatgctgactaaaagaagaaatttatgaatagcaggaacagatatggtcttggactttagtcaacaatgaaacaaaaccaaccaaaggacactgctcagatttagcttcttgtcactgttaccctgggcacaaaacataatcttgtgaggccccacttcctcacttgtaaaactgggataacaacagcccctacaacatggagttgttatgagaattaaatcagtaaatgtaggcaaagcacttacttaagatagtgatgatgttgatgatgatgatg

SEQ ID NO: 102810 - DNA, 668 bp, Homo sapiens
tgtgatcacccaggaggagggtgtagagcggatggacgggaggaagcggctgcagctggagggaagagaggggccgtccagcctcacccgctgcagtcagctctcctatgggcaaggaaacagctaggtggccctgacccctgcggtcctgagagccggtggccttcagcccctcttggacaggtcatggtctggaagcgcccagcgcaggatggattccagaccagcatccctgcaaccttttcagccccactggctgctgctttaaactggcatggagacatttgatcagcttcccagccagttttctctccagctcagccaggagtgggtgcctgtggcctgtgtcaccaagagctggtgtctcctgcatgaggggcatgcacccctggaatgagggtctgtgcctcgagctcaaagtgtcccggctctgtcatctgcctgaagttgcctggcttttccagtggggcctccttgagtgctgcagcatctgggagcatcctagcctgtcccgtgggtgtggctgggtgagggctaggaggtgagccaggaaggaagcactccactccagagtgaggtgccgcctgagccatcctgtgccccctcagtgtcttcaggtctctgcaggtgtcaggatctcaaaatacttggttcagatcaaacacatt

SEQ ID NO: 102811 - DNA, 281 bp, Homo sapiens
agcagactccacatagacagtggccctggccaggaatttttttgtcaccaacgttgaatgaaactatgttattgaggcactgctgtatgtagagccaggtatgcccgtttctggaacggagtgctgcagattgccaggtcagagggtgtgggtttgggcgtggctctgccacttagtggctgtctcacatttggcaaattctctaaaccctctaaggctcagtttcctcacctgtaaaatagagataacaatgggacctacttaacgaaattcctgtaaga

SEQ ID NO: 102812 - DNA, 469 bp, Homo sapiens
tctttagtagagacggagtttcaccgtgttagccaggatggtctcggtctcctgaccttgtgatccgcccgcctcggcctccgaaagtgctgggattacagacgtgagccaccgcgcacggccagaatttctaaactaggcgaatcataggtttattcagtggaacttagctgctggaacatgaagatctgcgcagagttgctggatccgtttggctttggtcttatcttggatcatcgggtctgagtaagctggtgttaaaacaatttgagcttagtgtggtatggcagggtttgtagactcgtcctgtgctgtaagtcacagggcttttgcaacttctgtgtttgttcatttctcaatttgccctctttcctcaccaacagaactgcccaagaaatcaacttacagtatagctactggaacttagctccgaaaaggtcctctgcaaatctagaacacttgttttttt

SEQ ID NO: 102813 - DNA, 354 bp, Homo sapiens
tggagacagagtctcgctctgtcactcaggcatagagtgcagtggcatgatctcagctcactgcaacctccacctctcagattcaagcgatttccatgcctcagcctcccaagtagctcggactacaggcatgtaccaccactcccggctaatttttgtagttttagtagagatggggttttgccatgttagccaggctggtcttgaactcctggcctcaagtgatctgccctcctcggcctcccaaagtgctgggattacaggtgccaaaccacatgctcagccatgtgaagtccttttgacttaatggtgcttctttgctaatttttgttttacttttaaggcagaaccttt

SEQ ID NO: 102814 - DNA, 785 bp, Homo sapiens
agagaatactagtctgatgactagtgttgcttgttcctctcttgctcatctctagaacaaacagaaacacacgtcctctctgccaagtattctgtgacgtcacaaggcagctcctacagtgcagcagctttttcttacacttttcttttctggctgcaggagaattaatctcttccttcatacttttacccattttttttaatcagttggaggatacatgatattatttagaacatctagaaggtatacttttttaaaaaatagactttaatttttagggcaattttatgttcacagcaaaattgagcagaaagtacagagagttccatatacccctgtccccacaaccagcctctcccactgtcaccatccccactagagtggtacatttgttaccatcgatgaacctgcattgacacatcatcacccaaagtccatagttgacagggttcactcttggtgttgtacgttctgtgggttttgacaaatgtataatgacatgtatccaccattatagggccatacggagtagtttcactgccctgaaaatcctgcatgctctgcctgctcatgcctgcttaccccctaacccctggcaaccactgatcctttttctatctccgtagttttatcttttccagaatgttataccgttggataaattcttttaaaaagggatctagcaggataaaggaattttgaaactgtaagggatcttagagatttttcattctgtggccttttttcatgcttaccaaaggtacatatttttcgacagtttgaat

SEQ ID NO: 102815 - DNA, 291 bp, Homo sapiens
tagctattttttaaattttttttgtagagatggagtctcactatgttgcttaggctggttttaactcctggtctcaacaagcaatcctcccacctcaacctcccaaagtgctgggattacagatgtgagccatgtaattccagcactttggaattccaaagcactttggagttccagagtgctggaattacccagcccattttactaataaatttaaagggtgaggggatgataactcaatagatactgaaaaatctctaatcctaatacaatttcctagaaagatagaaa

SEQ ID NO: 102816 - DNA, 310 bp, Homo sapiens
aatgtgctttccccagggaagaaaatgagtagccgcaatgagtatacctggaattacatgtaaccctgaaatgtccatgggactatgtggtttgtgactgtttgtacaatgcctatcaaatcaagaaaaaggctgagactcatcgtttgtgtttttcatttgaaatcctaatggttaaacttgaacctggtggtcaaactaacaccccaaaatatcaaccccacataaatcagagacctgcaagggcacagtagattctgtatcttccggccttcaaatcggggcagcttgtctgatcatgagtgctcta

SEQ ID NO: 102817 - DNA, 229 bp, Homo sapiens
cccactccagccccaaccccaccctataacaaactccacttcagttttatgagaccagaggtaattccctgctgctgttcagcgttgctgtggctaacagttccaaccttctgaagtgccggctggttggggctgtctctctggcaactgattagcccataaaccctgccttgctggtcctgcagcgttctccagtgcaagtgactgaaagcatgcctttcccagcagg

SEQ ID NO: 102818 - DNA, 647 bp, Homo sapiens
attctttgagcagtaccatgggcactaaggacctaaccacagagtagcggatgtgtcaacagaactgcactcggcaggatgaagacagggactccggcatgtggtcgtttagcatgtgcagtttccactcttcaagagggatccctatggcccacgacaggcaacgtgagccacaatgcaaggccagtgtgggagagatgagcccaggtgacagtgactgtccgggaggatgctcttggggttttggtgggatggttctttattgtgtggtctgtcttgtgcattgcattcttggccttcactactaacagcccacagcatccccccgtcactgtgacaaccagcagcgccccacacatttccccggggatggaaggctagttttcaccactgcccgggggatccaactgccaggatctgctgcaagtctgccgcttgaggcagctgggagttctctctcctggccacttgagcattcattctggtgaggtggtggtggtggaggaaaacggggagaagcagagggagagcacaggtcctggatgcagacccacagccaactggagggagcatgtgctgtttttagctgcccagcgtccattcccatctcttttggtaacaggttacccacactgcagttggagaat

SEQ ID NO: 102819 - DNA, 312 bp, Homo sapiens
tcctctaatgtttgttagttactatatgcaagctgatgtttatcctaaaacatattaaccattatcctctcaaactttaaagaacattatatttacctttgcaggattacacataacaaaaatactatgatacaaaataatccttgttctattcaaagatttaactttttaatatttcagcccaaatattcattatcttttaaaataaaacaatggaacatatttttaaacaaaatttaaatggtttctatagtaacagacacaattcagtatcttattttttgtttacatatcctataggtgtaactaaca

SEQ ID NO: 102820 - DNA, 818 bp, Homo sapiens
  misc_feature (748)..(748): n is a, c, g, or t
  misc_feature (776)..(776): n is a, c, g, or t
  misc_feature (784)..(784): n is a, c, g, or t
  misc_feature (790)..(790): n is a, c, g, or t
  misc_feature (795)..(795): n is a, c, g, or t
  misc_feature (797)..(797): n is a, c, g, or t
tccggtaggttgcccgggagacgcgggtacacagagaagcggctcccgtcggaggccgagtcgtcgccacgatcgcccccttggtggactcgcaggccgagcggcttccccgcagagctcgaggagggcagacggcggcgggggcgccatgagtcagaggcaggtgctgcaagtgttcgagcaataccagaaggccaggacccagttcgtgcagatggtggcggagctggcgactagaccccaaaacatcgagacgctgcagaacgcgggtgtaatgtctttgctgagaactcttcttctggacgtggtcccaacaattcaacagactgctgctttggctcttgggagactggccaattataatgatgacctagcagaagctgttgtgaagtgcgacattcttccacagcttgtttattcattggcagaacagaatcgcttctacaagaaagcagctgcctttgtgttacgagcagttggtaaacattctccccagctagctcaggcaatagtcgattgtggagcactggatacgctggtcatatgcttggaagattttgaccctggagtcaaggaggctgcagcctgggcacttagcatatatcgcaagacataatgcagaactgtcacaacgctgttggtggatgcagggagctgttcctctttttagatactctgtatccaggagccagaaattggctttgacaagggatggctggcttcggccctcaatggatattggcaaagnattctccagagttagcacagaacagaantggatgcnggagcngtgtncntttagcacaatgatctgaaac

SEQ ID NO: 102821 - DNA, 329 bp, Homo sapiens
ggtggatcacatgaggtcacaagttcaagaccagcctggccaacatggtgaatctccgtctctactaaaaatacaaaaattagctgggcatggtggcacatgcctgtaatcccagccacacaggaggctgaggcacgagaatcacttgaacctgggaggcagaagtcagagtgagctgagattgtgccactgcactctagcctgggtaacacagtgagactctgtctaaataaataaataaataaaatgaaacaaaaagctggatctttgaaaaggtaaacaaaattgatagaccatggttgagattaaacaagaaaagaagagagaag

SEQ ID NO: 102822 - DNA, 682 bp, Homo sapiens
attttgaggccaagaagaattactcgctcttgctttcagcaaggcaggaccccctccttccttctccacctgcctccaactccctcctcctttctctctccctacttaatatggcttcttatgttgatttctaaagcacagatttggcacaagacattatcaccagaaagacttaaaacagaagtgtgcataaccatgagtgggttttaaattaagaagcagttcaaaggtcagggattaggaatcatgttgcatgacgcaagggacaggcagaagttcttcagcgatgttcagtatctgcgggacatgcagcataaggtggactctgagtatcaggcttgtctgagacgacaggaatatagaagagacccaaatgagaagaaacgcgatcagttttgggggcaagagacaagttttgagagatcccggttttctagcaggtcatcttccaaacagagttctagtgaggaggatgctctaactgaaccaaggtcatctatcaagatatctgcatttaagtgtgactccaaacttccagcaattgaccaaacatcagtcaagcagaaacataaaagtaccatgactgtaaggaaagcagagaaagtggaccccagcgaaccctctccagcagaccaagcaccaatggttttattaagaaagaggaagccaaacctgaggagat

SEQ ID NO: 102823 - DNA, 279 bp, Homo sapiens
gaagggtgcccagtgcagcgaaagggaggagaaagcaaaaatgtcatgtcgccatggtgagtgtggggaccaggtgtgttcaggcactctgggtacggggaggcgtgcagcccggggcaatgagtcccagaaaggctgcctggaggggctgacacatgatctgggtcctgcatggtagaccggggctggaggggctggtggttgtgccagacagaaaggacagcaagagcgaagacatagagggacccaatagaggatgagttcaaggaagacgaaggg

SEQ ID NO: 102824 - DNA, 403 bp, Homo sapiens
ctactttttctccacctccacccaaatgcatccttgtacctcctccactgggatactcataaggtgcaatgtgatttatgctgctgtggaagtggaggttcttgtttctcaaagtcactatggctggagtgtgccacaaacagaggtggctgtggttgcctcctaattcctccagttttaagtcattgtggtgatcatcattttgaaaacccatcctctcttctctccctgccaccttcctttcccttatcactgcctcccagtcaaagtttctctggctcttcctcctagatctactccttaaatcatggggttcctccaaattcttcccttgacactcttttcaagtcactttctacatctgccagggtgaattaatctgctacctggccttctgccccac

SEQ ID NO: 102825 - DNA, 171 bp, Homo sapiens
cctcagtgtgaatgctcacctcgggctgagccaacccctccagacacgttctgcagctcgaggaaggaactgccctttgcagctgggatctgcccgagtttcagcagcagccttgaattgtaatcccgagcggctggcgaataacacagcacacagcactcgagagcccag

SEQ ID NO: 102826 - DNA, 794 bp, Homo sapiens
caaaatgttttttcttttttaaataagtaacatccatatagttcaacatttaaaaattgtgtaagctgcctggtgaaaaatctttcttcccttcctggacccagccacctgttcctttcactcatagactactggcataaatagtttgtatttacttccaaggaatttttgtgcatacacaagtataagatatatttgttttactagctaacagacttctatacttttttttccacttaagcataaatcagggaaacaatttgagtttccattgtatatgtaaatacatcgtagtttatttaaccaaattgttcttttacattttttctcatcattatttctaggtattttaatatttctgttgctgttgtaaatgagatatttttttctatcatatattctaaactagttgtttgtatgtatgaaagccattgatttctgtatgataattttataccctgtcaatttgctgacatacgttggttttcttctgggttttcatgtgtgcaatattagctgcaaatggaattaattttacctttttttctaatttttatatgtttacttttttctaattatatggcctaatatatatagaacagtgttacataatgaaaatgataatagatattcttagttttttcttgaacttgagaatatttcaattcgcttttaagcatgatacttacttttatcatggtaaagaattatacaacccttccacttaagcaaatttatcaagaatggccacagaccttttttagcaaaaatgaaaaagacaaaaacagaaataa

SEQ ID NO: 102827 - DNA, 861 bp, Homo sapiens
gagagaaggcaatatccaatatttatttctggagtactgtagtggaggagagcttttgacagaatagagccagacataggcatgcctgaaccagatgctcagagattcttccatcaactcatggcaggggtggtttatctgcatggtatggaataactcacagggatattaaaccagaaaatcttctgttggatgaaagggataacctcaaaatctcagactttggcttggcaacagtatttcggtataataatcgtgagcgtttgttgaacaagatgtgtggtactttaccatatgttgctccagaacttctgaagagaagagaatttcatgcagaaccagttgatgtttggtcctgtggaatagtacttactgcaatgctcgctggagaattgccatgggaccaacccagtgacagctgtcaggagtattctgactggaaagaaaaaaaaacatacctcaacccttggaaaaaaatcgattctgctcctctagctctgctgcataaaatcttagttgagaatccatcaggcaagaattaccattccagacatcaaaaaagatagatggtacaacaaacccctcaagaaaggggcaaaaaggccccgagtcacttcaggtggtgtgtcagagtctcccagtggattttctaagcacattcaatccaatttggacttctctccagtaaacagtgcttctagtgaagaaaatgtgaagtactccagttctcagccagaaccccgcacaggtctttccttatgggataccagcccctcatacattgataaattggtacaagggatcagcttttcccagcccacatgtcctgatcatatgcttttgaatagtcagttacttggc

SEQ ID NO: 102828 - DNA, 390 bp, Homo sapiens
gggatggagggaggacaagacaggacaggaagggaagcagaggcatgggaaggatgggatatggatctagatggtagaatgctattttccacatagcagtcttaattttaatttcatctctcactcaacatctatcaacaaccacacagactttttcttactactctcaaactattttctaaattaagctcaaagactttgagttattccaaataattagtgaataaagtaattaagtaactcgtggttaactggtttttcattatttaatagacatctgttaaaatgtgattatagtctgcttaattgtgacactaaagaagaaaagatgtatcaaaactgaaaagggaaaatgaatagttctatttctaattgttagcaatctgaact

SEQ ID NO: 102829 - DNA, 126 bp, Homo sapiens
caaagctattcatcagctccagggctacctgcgatctgtgtttgctctgacgaatggaatttatcctcacaaattggtgttctaaatgtcttaagaacctaattaaatagctgactacaaaaaaaa

SEQ ID NO: 102830 - DNA, 680 bp, Homo sapiens
agcagggaagagcagatgaggtggaggcagaggctggagggacgtagctgcaagcgcaggagcaccaagggccggtggaaccgcagaaaccgcagcgagggagccagccctgctgacactttgattccggacttccatcgcagaactgagagagagaatcaacccctgtcgtcctgagcccccagcgtgtggtgctgtggtgcagccgcaggaaacacgtgctttccagaatgacagctggtgtccgcaagaacagcaggaactcatcagcatttggaagtgagactgggtggatgtgcagtcccggaaaaagaggcggagatttatgtctggtggcggggagcccgtgtgttcagcagcttctggaaggaattgatagatggaagctgctagaggcgttgctgacagcctctccttgaggccagactccagagctggaacctggtagaagccttagtctcctcatttaccgcagcggtgacgggtggggcagtgtgagatctgagccgagggcccgcatcaaagtcccctttcggcttctccatctgtgacatgggttgcacctgctctgactgctgcttacgagagatggtgagcagtgttctgtgctgcgtggccgtgactgccgaggttctgtgaagacgggaaccacgggctgaaagcaatagagaccccagacc

SEQ ID NO: 102831 - DNA, 655 bp, Homo sapiens
tggaagataaagttggaaaagctgaaggattgattttcttccatcaactctcaagatcccattcgccattcaatctctgtgctgcagtaagagcaatcttaaacagtataaatcacacacacacacacacacacacacacacacacacacacacacaagtccctcaggaaaaattccaagctcttgagaagatcacatgagccccttcatgacctggcgcttgcttatttcttccaggacttctctcacttctatccagctattcccgtcagcaaatgaacctccaaagcagcacatggagcactgcatagactatttcctcagtgcgtaactcctccctgtctcctctttacctgagtaacttgtactcatccttcaatactccaactgaattttacttaccctgaaaagatttccatggctatccaccacccccctgcctgtgagactgagttaggtgccctttttcatgtctttcccccatcacggcacttaccatactgcgttgtaattgcctgtgtactcgtctgtataactactagactgtaagctccttgagggcagggactgtgtctatcttgttcacagttgtatccccagcacccagcacagtgcctggcatattgtaggtgcttaataaatatttgttgaatga

SEQ ID NO: 102832 - DNA, 410 bp, Homo sapiens
actattattatcactcctggcaaaatcaaaagtaattctttatgttatttagtagttagtctacattaaatttttgataaaaagtgtctgttttatagttcatttgttcaaatggggatccagacaaggctcacatttgctttccattgtagctcttaagtctcactttatgtaaaagcttcatcttactccctgtttttttcttttgaatgttatagacttttgaagaaacaaggttatttgtagtatagaatgtcatattttgaatttatctgttgctgcttcttgtcatttaactctttatctaagccctgtatgtccactaaattagaagttccatataaagtctagttagattcaggcattgcctttttttggttttgtttttacagcaagaatccctcatagat

SEQ ID NO: 102833 - DNA, 603 bp, Homo sapiens
caacatgtttctggtttcttaagactttagtatattgttcttaacatttatttgggatgtatttgcatttttggaagctgaccagtttctacacatatctaaatgcctccttacatttgacagtacatttaacatgctaaagtacttttcttagatatgatcaattttatccttgaaataagcctattgggagccatggacaccagctcattgtggtgaggacgctgaactcaatggtgcagatacagtggtgaaggagacacacaccctgtggtatggtggagtagactcctaacagaccaaccctgccacaaatatagcaactataaactggacaaactaccaaaagtaactacttaagagacctgggaagtgagcaaatgcaggcagaggggagttgaatcttggaggagagtgtgagtttcctgtttttcagccttgtccaaaagatgggccctggtcacaaagtgtctgggggtggctaaaactcccatagaaagactgccatgtttctggtctagggaaccaggggctggagcctggggcaatcatggccacgagagtgagggagaaatcccagagaggacagagccagagaagggg

SEQ ID NO: 102834 - DNA, 91 bp, Homo sapiens
gatgagatgtagttgtctgcccagtgacactgtgcaaactgttgagtcctctgcatagaagaaagagctgaagacatctgtgccggacatg

SEQ ID NO: 102835 - DNA, 671 bp, Homo sapiens
atactgcagatcttacactataatactgtgtatgcctctgctgagtaattcactgaattagcatttctcctcttgcagcaagttaagataagctttttgtgagtctgtgtcttttaaaatcttgccctaggttatgctttgtctacttgattttgtatctgtttcactaagatacagtttttcaaaatactaccttgttctagcaagagctcagtgaggttggcattctctttcactgcttgggtaagtgtataactctttctgggaacatatattaagaaatttatatatttacatcctctgatttcatatgtaggaatctaactcaaggaaatttttgtatgttgatgtgtatatataaatgtcttttggtggtagaaattatgagggttttcagcttctcattcttttctatttcttccacacttctttaatgatcatctcttactttcttacttttctttctacttacctcccctctttttctctgttcctcccagtacttcattgcttgatttctctgagtattaaaatggtaggccaggcgtggtggttcatgcctgtaatcccagcactctgagagccaaagccagaggatcacttgaggccaggagtttgacacagcctggtcaacattgtgagatcctgtctctacaaggaagaaaatattg

SEQ ID NO: 102836 - DNA, 321 bp, Homo sapiens
agtctctatttactgagaaggaaaccaaggctccaaggaaagccacttcttcaaggtcagagtttagtgggaacatctagtgttttgtttccattcacagtagagtttcagttgtcaagttacgtctaatccaactttcaggctcctatggcatggcaagtcctgtgtctggggattcctgctcatttggggtgggtggaggatggcacagacaggcatgtggagaagaaagcatctttaaaaaaaaacacagctaggccaggcgcggtggctcacacctgtaatcccagcactttgggaggccgaggtgggcggatcacc

SEQ ID NO: 102837 - DNA, 431 bp, Homo sapiens
atggcagtaattatgtgagatgtgagaaattgttgaatattagagtttcaaagtgttgagaatattgcgaatattgagaatattgagaattatgtgagaaattgttgtaattatgtgagatgtgagaaattgttgaatattagagtctcaaagtgttgagaatatttttcagggaaaatctgaagattaaaaagttctttgaactggatgatgttaaggttttttcccagccttaagaaaaaaagcactctgatgctacatttatgtagactctcactcatttctctacaattaattgatgttagtcatattaaattttaaggcattttatggctagaaaagctgtctttgtcagaaaagcaacaccaaagttatgagtgcagttttgcagtgagtatttttattctatataattcattcataaagagaag

SEQ ID NO: 102838 - DNA, 824 bp, Homo sapiens
tcattcactttcccttgtgaagaacatgagccttgtgtcattgtagggatgcttatgcctgcagtcataaagtcagtgtgggtttaggcgtgtttgttatacctgatgatgcctccttccccagccccaagcaatatcaaattagccctggacctaggatcctctgtggtgaaactatcaagtatttactaagcacctactatgtactagcactgtcctaagatgatctaaatgatttataggatagatcagtccctatccccaaggagagaattggtactattacatgtaaaattatgtgctacgtatgcagtcacaagaatatttctaaaaaatatatgcaaatatgcaaagcgttacattcagatggagtgctgcccttcaaagctgcccttcaaagcaacctggccgtggtcccaaaggttcccggtcatggtcctttacgaatggtgcaattttattttcaacttttgagttgcgtaattgtagaaaaaccagaaaatatcaaatatttcttttaaagaagaaaaatcaggccaggcacagtggctcatgcctgtaatcccaacacactaggctgagtcaggaggctcacttgagtccaggagtttgagaccagcctgggcaacacagtgagactctgtctttacaaaaaataaaaaaaattagctgggcatggtggcaggtgcctgtagtcccagctacttgggaggctgaggtaggaggatctcttgggcctgtgaggccaaggctgcagtgagccatgatcacaccactgcactccagtctgggagacagagcaaggctctgtctcaaaggaaaaa

SEQ ID NO: 102839 - DNA, 319 bp, Homo sapiens
gcaagtttgagtttaaatactctaaaaatgctaacattataaaaatcctctgggcaagagatgcacaagtctttcagttaacatttgcaatccttcacaattataatgagaatttattaatcctggtgtctaatctaaatcctactaacattccagcatgtatttttaaagattataaattccaccctcccttgaaatgagacaagccgaagaaagctttgatcaaaagatttaaagtacgactctcagctttaggtaacagtaacctgaattatttttttaaatggatactaaggccgggcacaatggctccatgcct

SEQ ID NO: 102840 - DNA, 249 bp, Homo sapiens
cctcccaaagtgctgggattacaggcgtgaaccactgtgcccggccctggttattcttttaactgctaaatttactaactttaggtaccgggttaaaaatgtttgcacttttcatgtggagaaaaactgagttgggtagtatctttaaggacttttctctctgttgctcttttttttttggctttgttttcacttcatcaaatcaacaaacatgttgaggatttaatatagataaaaatcttatttctt

SEQ ID NO: 102841 - DNA, 235 bp, Homo sapiens
tataatactgccactgagcaagtgcagtgatattttaggctaaagcacatttgtgacatttgtgtgtgtgtgtgtgtgtatgtgggtgggtgggtaatatactcatgtttacctgcatcactccattttaaagtaaggtttgtaattagttgtttccagagctttgaaaaggagaaatattgcaatatagaccaacaaaccttattgaagaaatacatctgtgctctatacagtc

SEQ ID NO: 102842 - DNA, 296 bp, Homo sapiens
catttatttgtgttgggaacaacaattaggttattatcttattgttgaactttaagagttctttttatattttgggtacaagtcctttaccaggtatgtgtttgcaaatattttttgccagtctgtggcttgtcatttcatttccttagcagtatctttcacatagcacgaattttattttatttattttgttttattttattttatatattttttgagacagagtttcactcttgttgcccaggctggagtgcagtggcacgacctcagctctctgcaacctctgtctcctggat

SEQ ID NO: 102843 - DNA, 477 bp, Homo sapiens
gtgatcctcccaactccagcttcccaaggtgttgggattacaggcctgagccaccatacctggcctggatacagtttcaagagaaattctcacctaggtccacatgggaacacgatgaggacatcagtcgtcatgttaattgtgatagttgttggcaacaacctgagttcattattaggggaaataaactgtgatggatacacaccattgaatactgtgcagcagttcatagcaacaaaccagataaacaaatagcaatgtaacaatccattgtaacaaatagcaatacaaatagctctaaaaaatttcttgttgagtgaaaaagatcagaaacaaatgagatatatgaaagttctgtgtatgtaaatacagaacagatagacatgcaaaccccatcacatattttataagggtacctacatatttagtaatatatattgtttcagctatctaccgatgcataataaaccaccccaa

SEQ ID NO: 102844 - DNA, 578 bp, Homo sapiens
gctgactcagccaaattgtattcctccttcaagacccaactgactctttctctaggaagtcttctctaactttcccctcccactacaaggcagaactaatgttcccatagcacttagtacagatctctattacagcacttattgtactgactcagaactatttatgtgttggtctctaattaaaatgtggctggtccgagtgcagtagtgtttacaagtaattgatataagaagttacaaatttctttgttgcctcttcattcccactgcttcacttggctagccttaaaaaaaaagaaaaaaagaaaaaaaaaaagtcaattttttttttttttccctgagatggaatctcaccctgttgcccaggctggagtgcaatggcgtgacctcagctcactgcaacctatgcctcccaggttgaaacgattctcctgcctcagcctgctgagcagctgggattacaggcgcccaccactacactcagctaattttgtgtgtgtgtgtgtgtgtgtgtgtgtgtgtgtgtgtgtgtgatggagtcacgctctatcgcccaggctagagtgcagtggcgtgat

SEQ ID NO: 102845 - DNA, 401 bp, Homo sapiens
tgaaagaagccagatgcaaaagaccaaatattatctgattccatttctacgcagaataagcaaatccacagaaacagaaaaagatagtggttgccagggaggggaataagtagtctgcagatgaatgttgggtttcttttggggatgttgaacatattctggaattaagacagtggtaatagttgaacaactctgtaaataaactaactactgaactgtatactttaaaagagtgaagtttttggtatgtgaattatatctctataagtacagtagttccccatcaaccacagttttgctttctgtggattcagttaccaccatcaaaaaataggtgagtacagaacaagaatatattttgagagagagatcacattcacataacttttattacagtatgt

SEQ ID NO: 102846 - DNA, 379 bp, Homo sapiens
catgtcctaatatagtcaaagtttggggctctgcactgtgcaactctgttttacacatgagggaatggagactcagaatccttagccacacagcttgcaggaggcaggatggtgcctcagcctcaggccttcagagtcttcctctggtgggcttctccccaagcaagacagagtcctggagacttcataaaagtgttatgctggcaggagattgctggtgtgcccgtggggtggaggtagactggactccagggaacaggaacggctttcagaattatccctggtagagctgaccttttcacacattggtggcaagactcatttcaatctgcaaagtgggaagatttcagagaatgagaaaggcgagatgaagttctgt

SEQ ID NO: 102847 - DNA, 403 bp, Homo sapiens
ttcattttccttcacctctctgcagcattcagaactgctgaccaccttcaccttcctggttcctgggacagcactttcttttcctcctctcatagttctctgcatcctccacttgttcctgtgactgttcccccaggactccccagggctcctttgttctctctgtcatgtcctctgtggcaatcttattacatggcttccacaatcacctccattgagaagacaccttcaaacggaaatcccaatggaacttccaactcaaatgcgtcctaatgaactcctgatcttccctgcaaaccaggccccctccagttcccaccagtttcagaaaaggtactaccatcctcctattcatactgcctcaaatccttccagttgtcttcccccttctgttttgccttcc

SEQ ID NO: 102848 - DNA, 354 bp, Homo sapiens
tgagatggggtcttgctatgttgcccaggctggtcttgaactcctgggctcaagcagtcctcccacctcggcctcccaacgttctgggattacaggcgtgagccaccacccccggccaaccagtacaatcctaaagacgaagcacaatcaaagcaatagctaccaagaggtggaagtgctccagctaaaacacaagccaactggtcaagagcaaaggtcatggctgttttgggggatgttattaaacaaaaataatgctattaaattctagctaaaaactgttatttgataatgactctgaacatgggtattgctcccatttagttaaaaggggacacaaataactcataggga

SEQ ID NO: 102849 - DNA, 376 bp, Homo sapiens
gtgttcttattttttactaccttttttttgccttcccatgcctttttacatgttattggctctgactagaaagcctctctctcctacctctgacctcccaaattcttcctgtactctgaagctgagcctatatgcttcttcttccatgcagtttcccttgatattacagtcagaagttttcctatgagctgcttttctattttatttatttcctcccccttgctttcatattttatatctctcttaagatgcctaggatatgctacttcataataagatcatttgcatatggatctatttccctcactagtttgcaagccccctgtaggcaggtatctgctgtgttgtcaccaatgccttgcaacccaaaaagtac

SEQ ID NO: 102850 - DNA, 294 bp, Homo sapiens
tcctcctcagcattcccagtaactaagacaacagctaccacacctagctaatgtttttttaaaaaaaatcttgtagagatgggaatgatgttgacccactatgttgtcccagcaagagcattttatttaaagaatttttagaattgaaaaatcgctttttaaaatgtctcatctcaaaaacataacactgctagaggcctatatgtgggtattcatcttttataaaagggttcgataaatcaggttttcagaatggaaaaaggggcatttcctctgttgcaaagatgaccctct

SEQ ID NO: 102851 - DNA, 932 bp, Homo sapiens
accctccctgagacactcctcttcactcctgcctggcttcctttcacctccctgcccactctgccttggcccccttcataagcaattcttcccctgccaccccttacctagtggtactccaggttgctgtattgtcctctcccaggttacagcatcctttcccataattcccagactgccaccccagcctggacctctttcctgagctccagacccaacattccaggggctgctgaactcctcgcttagagtcccatggacatcccaaatcaacaggcaaaactaaattcatcttctccctgtccccacacctgcaccccataattgatgctcccctagattcaaaactctgtaaatggccggagtgcaaatccccatttgctagttgtggaaccttgttcctcattctcttcatctgcaaaatggggataatgctggttcctacctcacagggggaccggaaaactaagtgggttcatacatgtaatacccatagaacagttggcataccgtaagtgcccaaatgatgctagctgttattatcccccaccccagacactactttagttcagttccttatgtttttttcacccagataagaacaacaactgcctcactggcctccccagtgctcactctgtccctccccaacccattctctgcaacaacatgaccgttctaaaatacagccctgctcatctccctccctcatgaaccacaggatgaagtccaagaatctcttcacagacctctccagtctggctcctgcctctctttcagtggcctctcactctactcccccagcctcccacacaacaccccagccacattaaacagagccctcctcccagcatcgcacactctctcctttctccctctgccagcaacacccttcccaccctttcatcacctcacttgtatgtgtccttcct

SEQ ID NO: 102852 - DNA, 278 bp, Homo sapiens
ggcagaggcagggccataccatcatcttgggtgcacctattatgggaggctggagtgcaatggtgccatcttggctcactgcaacctccgccccccaggttcaagcgattctgcctcagcctcctgagtaactgggatcataggcgcacgctaccacgcccggctaatttttctatttttagtagacatggggtttcgccacccccggcagcatgggtagacatggccctcccgcctgatctcttaaaaaaactttaaataattcgtggggggggtta

SEQ ID NO: 102853 - DNA, 803 bp, Homo sapiens
agccttagatttttaagactttgatcaaagaggttcaacttacttagtggaagtttccatttgaaaaattcacatcttttgaacatttcactcatgagccggaaagaagaaaatctgcatggatggtatcccagggactttaccttatcaacatctgttactttaatcataatatttcctagtggtatgtggggcatatctcactcctcctcctctggtattcatatgggaggattttcctaaatactcctggcccctgggccctcccctcatccacttcttcccatgggaagagagtgtctcatataattggttggttttgggtatttggctcagcccgtagagcaggggcactctggtctgtcttccatgctctgaggttttcgggctgggccctatgtggggagcctgtaattgcccagtgctccctggggcggaggaggtaaaattggggatgatattggaaagctctattctccaacagctttatcatcagtaaggtggatcacttcctcttcccctgccagcttgtctgcccccagctggcgtagcacttgtgtggggaaagaggtgttttttattgccctcccatcccaacattttacttatacttttgattctaaattttaattttcccttaatcaaattgatggagccataaataagatagatcatctgttatcagtttctttatcattgacttccatataagaatagaaaactggccatcaactgatcttttacccttactcctcacagtttgctatcgacgttgctgtggagctgggttggcattcttaaga

SEQ ID NO: 102854 - DNA, 993 bp, Homo sapiens
attctgccttacagcaatggttcagcatgtataaacctatcacctacaacacaaacctgctcacagaagagaccgactcctttgtgaataagctagatcccagcaaagtgtttaagagcaagaacaagatcgtaatcccaaaaaagaaagggcctgtgcagcctgcaggtggccagaaagggccctcaggaccctccggtccctccacttcctccacttctaaatcctcctctggctctggaaaccccacccggaagtgagcacccctccctccaactccctaccagctccagagtggtggtttccatgcacagatggccctaggggtgacctccagttttgcgtgtggaccgtaggcctctttctagttgaatgaccaaaattgtaaggcttttagtcccaccgacattagccaggctcgtagtgaggcctccagagcaggttgtgctgtcccctgcctctggaagcaatggggaatttggaatcttgtgtaagtgcccaaataagtctgagtgctttcctcttcttcaacactcaaccctcaatcccttagcactgattgattagagaggtcccccaaagaaaccactggtttgacccatgaagcattagaactgcattgttcattcaggagccactagtcacatatgactatttaaatttaaagtaaattgtatgaaaaattcatttcttcaattgcattagccacattttgagtattcatgtggctggtagattctgtattagcacaaagatatggaacatttccatcaccacagaaagttctgttggacagcactgcattagaatattttcatactgctcttcctcaattaatttttgttgttaatgttgatgtcttcattggatgggtcataatgttccatgaaacctctcaagtacacaattgtatgttctttgtatcccttaccacaaatatctcgctctgctcatttcttttgcagcttcctataaagtttgtcttcctcatca

SEQ ID NO: 102855 - DNA, 462 bp, Homo sapiens
tttgtatttttttttctggtgacggggtttcaccatgttggtcaggctggttttgaactcctgacctcgtgatcagcctgccttggcctcccaaagtgctgggattacaggcgtgagtcactgcgcctggccccccacctttttttttttttaacttgataccactgataggatctaactggactttagatataacttttgaaattcagttacaaactgttgtctccaaagctaccaaaactttgaactgtgatttgattcttccttgaattcctcccagttatctctctagtaaacttcctttcctaaactgtctatccaaacaaatttttctggcaaaagtggccctatcttaggcctctctaagagaccaggcttgcttagctagtgtgttttcccagcagatgttgctaccaagatcaattatttcttcctgatccttcagtatttttctttcttttt

SEQ ID NO: 102856 - DNA, 748 bp, Homo sapiens
atgatttatctataagctatgtaacaaattaccccaacacctagcagcttcaaaccaaagcgaacaaacaaaacaagtcctgttacctcctatcttacagtttctgtgatcaggaatccaggaggggcttagctgggagtctctgactcagggtctctcacaagctgtatcaacaatcaaggtattgactgggcctcagtcatctcaaggctaggcgtagggtcgaggacctctcccaggcttactcacatgactgctggcaggccgattggcctcactgaccctggctgtacacatcagttctttgccacatgggcctctgtataaagaatggttgcaacatggcagcttactccccccagagagaaggctcccacagagaaaaagagaaagacagaagtcagattctttctgtaacctcagaagcgacatcccattatttttgccattttatattcattagaagtgagtccctaggcccaactcacactgaagggaagggggtgacacaaggacatgaacacctggaggcagggattatcggggccactttaaagcctgcccatgtcctctaatattcaagtacacttgtgtgggagcttccctagagtatatagctgggagtagaattgcggagttataagatttatgtgtattcaattttattgggtcatttctaaactttccaaagtgttaaaccagtttgcactccctccagcagtggatgagcattcttgttgctctacat

SEQ ID NO: 102857 - DNA, 84 bp, Homo sapiens
gtccactttggagaaattccatcacccaaggccttctaagtcagtgatgacaggctaatttcaatgaatcatttcccaacaatg

SEQ ID NO: 102858 - DNA, 135 bp, Homo sapiens
gatttttttgttagttattgtaaatcggattattttcttgataattacttgttcatgtattaactaacatttactgtatctgaatattcagaaattgaatagtaggacagcttgattaattttatttcttcaata

SEQ ID NO: 102859 - DNA, 602 bp, Homo sapiens
  misc_feature (64)..(64): n is a, c, g, or t
aacaggactcctctttcttaacacagatctgcataaggtattaccaaccaaatcctcttgatgngcaacacatttttcagctgccagtcagaccaactgctgtaaagaacttatatcaaagtgagaagccacagaaatggagagtggaaatatatagtgtcaaaagaagattaagacagtttggcaactgagtgacagctcacccatagaccatctgaatttcacaaacctgatttttcggaattaacactaaacggtagcctggaagaaaggatattctttactaacatggttacctgcagccaggtgcatttcaagtgaagtgtgctgatgaagtcctctataaggttcctgggaggcgggaggcggccagcctggttcatcagcatccagtcctctagtgctgccacctaatggacgcttaataatctctggatacttggaaattctgagatgcatttgtggccagtctccagcatgcacacaggacttggattatgcatttgtgtgtgacgtcttactctccctcccagctgctccttttgtctattattctaagacctgtctgaggtatgcatacacttctgcaagctggttctcaa

SEQ ID NO: 102860 - DNA, 731 bp, Homo sapiens
gccaccgcgcccggccgcaaaggccctatttctaaataaagtcccattcacaagtttcaggggccaggatgtgaacagatcttccaggagacaccaagcagcctcagtgtccattgatggatccgggccctcccttcaagccttttcccatcccccctccacctcctgcaccgagaccccagcatgaagcttcctcgggcctcaccgacctctgctaagtccaggagacgctgtgagcacccgagggtagggcctgaggctccctgcccccacctgggctggcacctgggagaggagggttcccctcagcagttagctgtgggctggctgtgcgccccttgccaagctcctgggacacgggctgagcagagcccagggtgccccagccccttcccgagtccctgctgggcccgtgtcgcccactgatggggagatgcccaagttctgtgaccccgggggcaggatggtgaggcggcccctggggacccagagtcctgccctgccagggcctcctgcaccctcaaccccaaacccagaaaagtcaggcggagcccaaggccagagcaggccagtcacagctgggaggcggggggcccaggggccaggaaggccgggatggagccctcggcccatcgccctgcacagccgcccctgcgctgcctctgtctccccatgtctctctgtctctctccgacttgctgtatctctgtatccctctgtctctctgtgtc

SEQ ID NO: 102861 - DNA, 332 bp, Homo sapiens
ggctgaggtgcctaaggaagtttagaagcagcacatctttgcattctcttagaaatcctgggtcacagccaggcacggtggctcacacctataatcccaacactttgggaggccaaggtgggtggatcacttgaggtcaggagttcgagaccagcctggccaattggggaaaccccatctctactaaaaatacaaaaatgtggcaggcgtctgtaatcctagctacgcaggaggctgaggcaggagaatcgcttgaacccaggaggcagaggtcacagtgagctgagatatgccactgcactccagcctgggcaacagagtgagactgtttg

SEQ ID NO: 102862 - DNA, 533 bp, Homo sapiens
tgtttgattttagcagccagagaaatctgtccagtgaagtaaacttgtttaaaactattaacctttcagcgagaacagttgctctgagttgaggatattgacagcatgttgatctggggagagattgaaagtgcccccaacccgttatcaaacactgaatggctctggaagttaacttttgcagcagacttgataatgtttcttagtttgtgccatctaaaattgcaaaacaaaagtgtttatatgtagaatttatattgcagtaaagtcatttcagtgacaacatggtatgaatcataagtaataaaaagccagctgctttacacattttgtgttctgtcagaagttaaaacacaaagggagaccttcattgctaaataggattgtagcagatgcatttccaagttcaaattatagttgcagaaagttttagacctcattgcaagtatgaaggaaatttctatatttcaaaatttaactacagttgaattgaaagtgattaatctgcaatgtgatgacacgctaaaagataa

SEQ ID NO: 102863 - DNA, 170 bp, Homo sapiens
aagaaagcgccttgcggggagcagggaggaggggccaaggttgaaaacccatgtattgggtactgtgtgctcacttcctgagtgacaggtttagtcatactccagacctcagcataacacaatatagctatgtgttgttgttgtttgttgttgttgttgctgtttttgag

SEQ ID NO: 102864 - DNA, 640 bp, Homo sapiens
gtgcctccaagatcccttctctctgccttcatcgatgccaggaaagcagtcaccttttgcctttctttgcttctcagcaagtggcatgtctccatgtcactttaagcatcaagcacacggagcccaataagatgctgaaaagtgtctgcctacaaggttacaaggcggtggagacattctgagccggtaactgcagggctcagtaaaaccgctacaggaaatctcaagttcaaaatgctgaagtgaaaaatgggtgatcacaacgaagggaaacacaaaccccttcttttaaaaacattatggtgataaggcacaacataaaatttaccatattagccacttgtaagtatacagtgcagtagtgttaaaaatatacatgttgagtaacgagtttctagaacttgcttctcttggagaactgaaactatagccactatacaacaactccccatttctctatcccctggcttatggaaacaaccgctctattttctgtttctatgagtttgactaatttcgaacctaatgtaagagaaattgtacagcatttgtctttgtgtgatgggctgatttcaattagtgtaatgttttcaaggttcatctatattgcagcatgtgacagggcttctttcttttttaa

SEQ ID NO: 102865 - DNA, 386 bp, Homo sapiens
aaaaaaaaaaaaaaaaaaacaaaaaaatgtggtagaaggggagagagcctcaaaatgaccagagtagatggactcgtgtagtaaaactttacccaaagttggtttcctaatgatataatgtgaaacagtctatgtgctatacaaataattatatctcttttgttaagccttacgtcattttgacaaaggctttacttgattgagtattgacggcttttccaaaataaaatccagctcttaattgagatttgtggctgggcatggtagctcatgcttgtaatcccagcactttgggacacttagcagggaggattgctggaggccaggagttcaaaaccagaatgggcaacatagtgagattccatgtctccccccgccaaaaaaaa

SEQ ID NO: 102866 - DNA, 443 bp, Homo sapiens
gagcgtatttctgtttcttatgccttgctaagaatacttatttggcttccaataaaattactctagaaaaccctaagagatttgtttaaattgcttttataacatatgcttatagtatatgttataaaattgacagggcagtgactaaaaaagattagaagttcacaaactgtgggatttaattttcttttgggtaagcttagcaaaaacagtaggaaataccccagtggcatagagagcagaattctacatagggtacactccctgccccagccttgttcaaatttactgtttttggaggccttatttacgtctggccccaccctggagtcttgcctcacagaactgattagaagagatgagagtactgggtggtgaatcctgcagcctttctagagccagtgctcacaatattctgaaacctaaaagcagataaatggaaa

SEQ ID NO: 102867 - DNA, 1948 bp, Homo sapiens
tggggcgcagcttgatggcgtcgggctggagagccgcagtcccggctgcagcacctgggagaaggcagaccgtgtgagggggcctgtggccccagcgtgctgtggcctcggggagtgggaagtggaggcaggagccttccttacacttcgccatgagtttcctcatcgactccagcatcatgattacctcccagatactattttttggatttgggtggcttttcttcatgcgccaattgtttaaagactatgagatacgtcagtatgttgtacaggtgatcttctccgtgacgtttgcattttcttgcaccatgtttgagctcatcatctttgaaatcttaggagtattgaatagcagctcccgttattttcactggaaaatgaacctgtgtgtaattctgctgatcctggttttcatggtgcctttttacattggctattttattgtgagcaatatccgactactgcataaacaacgactgcttttttcctgtctcttatggctgacctttatgtatttcttctggaaactaggagatccctttcccattctcagcccaaaacatgggatcttatccatagaacagctcatcagccgggttggtgtgattggagtgactctcatggctcttctttctggatttggtgctgtcaactgcccatacacttacatgtcttacttcctcaggaatgtgactgacacggatattctagccctggaacggcgactgctgcaaaccatggatatgatcataagcaaaaagaaaaggatggcaatggcacggagaacaatgttccagaagggggaagtgcataacaaaccatcaggtttctggggaatgataaaaagtgttaccacttcagcatcaggaagtgaaaatcttactcttattcaacaggaagtggatgctttggaagaattaagcaggcagctttttctggaaacagctgatctatatgctaccaaggagagaatagaatactccaaaaccttcaaggggaaatattttaattttcttggttactttttctctatttactgtgtttggaaaattttcatggctaccatcaatattgtttttgatcgagttgggaaaacggatcctgtcacaagaggcattgagatcactgtgaattatctgggaatccaatttgatgtgaagttttggtcccaacacatttccttcattcttgttggaataatcatcgtcacatccatcagaggattgctgatcactcttaccaagttcttttatgccatctctagcagtaagtcctccaatgtcattgtcctgctattagcacagataatgggcatgtactttgtctcctctgtgctgctgatccgaatgagtatgcctttagaataccgcaccataatcactgaagtccttggagaactgcagttcaacttctatcaccgttggtttgatgtgatcttcctggtcagcgctctctctagcatactcttcctctatttggctcacaaacaggcaccagagaagcaaatggcaccttgaacttaagcctactacagactgttagaggccagtggtttcaaaatttagatataagaggggggaaaaatggaaccagggcctgacattttataaacaaacaaaatgctatggtagcatttttcaccttcatagcatactccttccccgtcaggtgatactatgaccatgagtagcatcagccagaacatgagagggagaactaactcaagacaatactcagcagagagcatcccgtgtggatatgaggctggtgtagaggcggagaggagccaagaaactaaaggtgaaaaatacactggaactctggggcaagacatgtctatggtagctgagccaaacacgtaggatttccgttttaaggttcacatggaaaaggttatagctttgccttgagattgactcattaaaatcagagactgtaacacttt

SEQ ID NO: 102868 - DNA, 2716 bp, Homo sapiens
tggggcgcagcttgatggcgtcgggctggagagccgcagtcccggctgcagcacctgggagaaggcagaccgtgtgagggggcctgtggccccagcgtgctgtggcctcggggagtgggaagtggaggcaggagccttccttacacttcgccatgagtttcctcatcgactccagcatcatgattacctcccagatactattttttggatttgggtggcttttcttcatgcgccaattgtttaaagactatgagatacgtcagtatgttgtacaggtgatcttctccgtgacgtttgcattttcttgcaccatgtttgagctcatcatctttgaaatcttaggagtattgaatagcagctcccgttattttcactggaaaatgaacctgtgtgtaattctgctgatcctggttttcatggtgcctttttacattggctattttattgtgagcaatatccgactactgcataaacaacgactgcttttttcctgtctcttatggctgacctttatgtatttcttctggaaactaggagatccctttcccattctcagcccaaaacatgggatcttatccatagaacagctcatcagccgggttggtgtgattggagtgactctcatggctcttctttctggatttggtgctgtcaactgcccatacacttacatgtcttacttcctcaggaatgtgactgacacggatattctagccctggaacggcgactgctgcaaaccatggatatgatcataagcaaaaagaaaaggatggcaatggcacggagaacaatgttccagaagggggaagtgcataacaaaccatcaggtttctggggaatgataaaaagtgttaccacttcagcatcaggaagtgaaaataacaccatggcataagacaatcccatgaagataagatataaaagaagataatgtttgaaaagaaataaggtaatgtctgtaaatcctagcctatattagaacacagtaaagtattagttcccttttctaacattatattcagataatgtaggagaaagctatgctttattatagttattattctgtaactatttacaatcttgaacattacatttgacttaatctaactagataaatcaaaaaacaaatgaaactatctgtttgagctgcttgacttaagagaaactgagtggtaattgtttggtggcgatgctcttgatggagaagcttttacacacctgcgtcagaggttgggaaagttgctctgaagtagtgttgctggctatgaaacaggaaattgagaatataggcaactccgggaatccactgtaggaaaaactaaaagtatatgctttctcattgccatttcttgaaattcctatgtgattaaaaccttgatgcccattctgtgccagatcttactcttattcaacaggaagtggatgctttggaagaattaagcaggcagctttttctggaaacagctgatctatatgctaccaaggagagaatagaatactccaaaaccttcaaggggaaatattttaattttcttggttactttttctctatttactgtgtttggaaaattttcatggctaccatcaatattgtttttgatcgagttgggaaaacggatcctgtcacaagaggcattgagatcactgtgaattatctgggaatccaatttgatgtgaagttttggtcccaacacatttccttcattcttgttggaataatcatcgtcacatccatcagaggattgctgatcactcttaccaagttcttttatgccatctctagcagtaagtcctccaatgtcattgtcctgctattagcacagataatgggcatgtactttgtctcctctgtgctgctgatccgaatgagtatgcctttagaataccgcaccataatcactgaagtccttggagaactgcagttcaacttctatcaccgttggtttgatgtgatcttcctggtcagcgctctctctagcatactcttcctctatttggctcacaaacaggcaccagagaagcaaatggcaccttgaacttaagcctactacagactgttagaggccagtggtttcaaaatttagatataagaggggggaaaaatggaaccagggcctgacattttataaacaaacaaaatgctatggtagcatttttcaccttcatagcatactccttccccgtcaggtgatactatgaccatgagtagcatcagccagaacatgagagggagaactaactcaagacaatactcagcagagagcatcccgtgtggatatgaggctggtgtagaggcggagaggagccaagaaactaaaggtgaaaaatacactggaactctggggcaagacatgtctatggtagctgagccaaacacgtaggatttccgttttaaggttcacatggaaaaggttatagctttgccttgagattgactcattaaaatcagagactgtaacacttttgccttacgttcattttatcaagcatagcttggtatttattatgcttgtgtgatctaacatgagttagcatcccacacctcctcttctgatcctgccccattaaaataaccaagaggttatctgttcttttccgggaaaggggtggtatgcacctgaaatagattttaccaaaagagagatttcagttatgtcattttttcttgatttcctgtgaacttagtattataccctactttcaattcggtagtga

SEQ ID NO: 102869 - DNA, 833 bp, Homo sapiens
attaggaagacagtatgcgacgcgcgagttccaaagatgtgcattttcggctaccatcaatattgtttttgatcgagttgggaaaacggatcctgtcacaagaggcattgagatcactgtgaattatctgggaatccaatttgatgtgaagttttggtcccaacacatttccttcattcttgttggaataatcatcgtcacatccatcagaggattgctgatcactcttaccaagttcttttatgccatctctagcagtaagtcctccaatgtcattgtcctgctattagcacagataatgggcatgtactttgtctcctctgtgctgctgatccgaatgagtatgcctttagaataccgcaccataatcactgaagtccttggagaactgcagttcaacttctatcaccgttggtttgatgtgatcttcctggtcagcgctctctctagcatactctttatcataaatggagaacaaacagggcacaataaaaacagatgggaatcagtgaaagaaagcactttactaacatttacgatgacatcggtttttaaattaggatgaaagaagggctattaatagaaacataagctgtcaatttgttaacattcaatatgcgtatgcgtattatattcaccttctaattgtctgacttacttgttcgagattgcgttttacaaatagtaggtaccagacgagcttatttatgagcttatatttgatttattcattctcatttatcaacatacgtcgatttgtcagtcgtataatgagtgaatggaatcaaaatattatgatatagaataattgcaatacggtggaggggttaggt

SEQ ID NO: 102870 - DNA, 855 bp, Homo sapiens
tggggcgcagcttgatggcgtcgggctggagagccgcagtcccggctgcagcacctgggagaaggcagaccgtgtgagggggcctgtggccccagcgtgctgtggcctcggggagtgggaagtggaggcaggagccttccttacacttcgccatgagtttcctcatcgactccagcatcatgattacctcccagcagataaccttgccctcgtacttactcaacaaaagtgaagccaaaagatactattttttggatttgggtggcttttcttcatgcgccaattgtttaaagactatgagatacgtcagtatgttgtacaggtgatcttctccgtgacgtttgcattttcttgcaccatgtttgagctcatcatctttgaaatcttaggagtattgaatagcagctcccgttattttcactggaaaatgaacctgtgtgtaattctgctgatcctggttttcatggtgcctttttacattggctattttattgtgagcaatatccgactactgcataaacaacgactgcttttttcctgtctcttatggctgacctttatgtatttcttctggaaactaggagatccctttcccattctcagcccaaaacatgggatcttatccatagaacagctcatcagccgggttggtgtgattggagtgactctcatggctcttctttctggatttggtgctgtcaactgcccatacacttacatgtcttacttcctcaggaattgttgactggaccaccggatatttcaagccctgtgaacggggaactgctggaaaccatggcatattgatccattaagcaaaaacgcacaacgggcttggcaatgggcccggagaaa

SEQ ID NO: 102871 - DNA, 3694 bp, Homo sapiens
  misc_feature (1695)..(1695): n is a, c, g, or t
  misc_feature (2014)..(2014): n is a, c, g, or t
tggggcgcagcttgatggcgtcgggctggagagccgcagtcccggctgcagcacctgggagaaggcagaccgtgtgagggggcctgtggccccagcgtgctgtggcctcggggagtgggaagtggaggcaggagccttccttacacttcgccatgagtttcctcatcgactccagcatcatgattacctcccagatactattttttggatttgggtggcttttcttcatgcgccaattgtttaaagactatgagatacgtcagtatgttgtacaggtgatcttctccgtgacgtttgcattttcttgcaccatgtttgagctcatcatctttgaaatcttaggagtattgaatagcagctcccgttattttcactggaaaatgaacctgtgtgtaattctgctgatcctggttttcatggtgcctttttacattggctattttattgtgagcaatatccgactactgcataaacaacgactgcttttttcctgtctcttatggctgacctttatgtatttcttctggaaactaggagatccctttcccattctcagcccaaaacatgggatcttatccatagaacagctcatcagccgggttggtgtgattggagtgactctcatggctcttctttctggatttggtgctgtcaactgcccatacacttacatgtcttacttcctcaggaatgtgactgacacggatattctagccctggaacggcgactgctgcaaaccatggatatgatcataagcaaaaagaaaaggatggcaatggcacggagaacaatgttccagaagggggaagtgcataacaaaccatcaggtttctggggaatgataaaaagtgttaccacttcagcatcaggaagtgaaagtatcctttgtccctctgcttgattctttttctcaactctggaccaagagcaaaagaaaaaaagtagtgttgggatagtcccttctaaggtacctgactacatcagaggtccaaactcctaagagctaggcttcggaaataccatgtgtacagtcatctttccagcacctgcacaatatcataaaatcattgtctttgagctgaagtggtcctaaaaagtcagcctttccattttacagatgagaaaatagacccagagaggttaagtcacacggtggtttgtggcaaagctagaaacataactgtggtctcctcttcatagttctttccactacactattacatttctcaactctgaaaaaccaccataaagcataatggctacctaaaataaatggcccatttctaaagtaattagtattcctaaacaaattttaagtagctctgcttctccagtgacattttggtttaaagaatcaaggggaggctgggtgcagtggctcatccctgtaatcccagcactttgcaaggccgaggtgggcagatcacttgaacccaggagttcaagacaagcctcggcaacatgacaaaacctcatctctacaaaaaatacaaaaattagccaggcccagtggcatgtgcctgtaatcccaactactcaggaggctgaggtgggaggattgtttgaacttgggaggctgaggtaggagtgagcccagatcacgccactgcactcctgcctaggcaacagagctagaccctgtctcaaaataaaaaagaaaggataaaggagatttgattaatagattaataaantgttctttcctgattggttatgatgttgaactacttcccaaattatgtaaccaaatttctgtgtggctctggtgctattaggtcaaaactttggggaactaagcatgagatagcatactcctgtttccttctctgtcccagggaaatacaaattcccttttgcctcaattagagaaggatgtctattcttgctacaaattatgatttatgtcctggtgtcaaatgaagataagaataagatcaaagaaaggcaagatgattgtggaagagaaagaaaaaggattaatttagatttatttaaccaagaaacatttatttngtatctcctatttccaggctgagtgctaagaaataaaatgatgagtagagtatagcctttctcctcaaggagcttaccctctaatcatgggagagacagacatgtaactagttaaaccatattgtttggtggcttgaaccatgccagtagtagccactattaaggaaggaactgaagggcacttactgatttgggtaatagtgggaaaaatcagagaggagggaggatttagattgaagtatgtgcttctattttagaaggggctatatttactatgtttattacttaaaagttcataaaagccaataatatgggtttgagctgtgttagtgatgagttaacaaacatatcaggactatttaacctccctgagcccctgttctctaaatgggagaataataactctacctgattgagttcttggaaaataacatagtgtaacggaaagagcaggctttggaggaaaagaggatttgactttgcatctctatcaattaattgtgtgactttgagcaagttatttaactctctgagcttcactttccttatgtgcaaaatggataacaccatggcataagacaatcccatgaagataagatataaaagaagataatgtttgaaaagaaataaggaagtggatgctttggaagaattaagcaggcagctttttctggaaacagctgatctatatgctaccaaggagagaatagaatactccaaaaccttcaaggggaaatattttaattttcttggttactttttctctatttactgtgtttggaaaattttcatggctaccatcaatattgtttttgatcgagttgggaaaacggatcctgtcacaagaggcattgagatcactgtgaattatctgggaatccaatttgatgtgaagttttggtcccaacacatttccttcattcttgttggaataatcatcgtcacatccatcagaggattgctgatcactcttaccaagttcttttatgccatctctagcagtaagtcctccaatgtcattgtcctgctattagcacagataatgggcatgtactttgtctcctctgtgctgctgatccgaatgagtatgcctttagaataccgcaccataatcactgaagtccttggagaactgcagttcaacttctatcaccgttggtttgatgtgatcttcctggtcagcgctctctctagcatactcttcctctatttggctcacaaacaggcaccagagaagcaaatggcaccttgaacttaagcctactacagactgttagaggccagtggtttcaaaatttagatataagaggggggaaaaatggaaccagggcctgacattttataaacaaacaaaatgctatggtagcatttttcaccttcatagcatactccttccccgtcaggtgatactatgaccatgagtagcatcagccagaacatgagagggagaactaactcaagacaatactcagcagagagcatcccgtgtggatatgaggctggtgtagaggcggagaggagccaagaaactaaaggtgaaaaatacactggaactctggggcaagacatgtctatggtagctgagccaaacacgtaggatttccgttttaaggttcacatggaaaaggttatagctttgccttgagattgactcattaaaatcagagactgtaacacttt

SEQ ID NO: 102872 - DNA, 3714 bp, Homo sapiens
  misc_feature (1715)..(1715): n is a, c, g, or t
  misc_feature (2034)..(2034): n is a, c, g, or t
tggggcgcagcttgatggcgtcgggctggagagccgcagtcccggctgcagcacctgggagaaggcagaccgtgtgagggggcctgtggccccagcgtgctgtggcctcggggagtgggaagtggaggcaggagccttccttacacttcgccatgagtttcctcatcgactccagcatcatgattacctcccagatactattttttggatttgggtggcttttcttcatgcgccaattgtttaaagactatgagatacgtcagtatgttgtacaggtgatcttctccgtgacgtttgcattttcttgcaccatgtttgagctcatcatctttgaaatcttaggagtattgaatagcagctcccgttattttcactggaaaatgaacctgtgtgtaattctgctgatcctggttttcatggtgcctttttacattggctattttattgtgagcaatatccgactacttttgtctcctctgtctcagtgcataaacaacgactgcttttttcctgtctcttatggctgacctttatgtatttcttctggaaactaggagatccctttcccattctcagcccaaaacatgggatcttatccatagaacagctcatcagccgggttggtgtgattggagtgactctcatggctcttctttctggatttggtgctgtcaactgcccatacacttacatgtcttacttcctcaggaatgtgactgacacggatattctagccctggaacggcgactgctgcaaaccatggatatgatcataagcaaaaagaaaaggatggcaatggcacggagaacaatgttccagaagggggaagtgcataacaaaccatcaggtttctggggaatgataaaaagtgttaccacttcagcatcaggaagtgaaagtatcctttgtccctctgcttgattctttttctcaactctggaccaagagcaaaagaaaaaaagtagtgttgggatagtcccttctaaggtacctgactacatcagaggtccaaactcctaagagctaggcttcggaaataccatgtgtacagtcatctttccagcacctgcacaatatcataaaatcattgtctttgagctgaagtggtcctaaaaagtcagcctttccattttacagatgagaaaatagacccagagaggttaagtcacacggtggtttgtggcaaagctagaaacataactgtggtctcctcttcatagttctttccactacactattacatttctcaactctgaaaaaccaccataaagcataatggctacctaaaataaatggcccatttctaaagtaattagtattcctaaacaaattttaagtagctctgcttctccagtgacattttggtttaaagaatcaaggggaggctgggtgcagtggctcatccctgtaatcccagcactttgcaaggccgaggtgggcagatcacttgaacccaggagttcaagacaagcctcggcaacatgacaaaacctcatctctacaaaaaatacaaaaattagccaggcccagtggcatgtgcctgtaatcccaactactcaggaggctgaggtgggaggattgtttgaacttgggaggctgaggtaggagtgagcccagatcacgccactgcactcctgcctaggcaacagagctagaccctgtctcaaaataaaaaagaaaggataaaggagatttgattaatagattaataaantgttctttcctgattggttatgatgttgaactacttcccaaattatgtaaccaaatttctgtgtggctctggtgctattaggtcaaaactttggggaactaagcatgagatagcatactcctgtttccttctctgtcccagggaaatacaaattcccttttgcctcaattagagaaggatgtctattcttgctacaaattatgatttatgtcctggtgtcaaatgaagataagaataagatcaaagaaaggcaagatgattgtggaagagaaagaaaaaggattaatttagatttatttaaccaagaaacatttatttngtatctcctatttccaggctgagtgctaagaaataaaatgatgagtagagtatagcctttctcctcaaggagcttaccctctaatcatgggagagacagacatgtaactagttaaaccatattgtttggtggcttgaaccatgccagtagtagccactattaaggaaggaactgaagggcacttactgatttgggtaatagtgggaaaaatcagagaggagggaggatttagattgaagtatgtgcttctattttagaaggggctatatttactatgtttattacttaaaagttcataaaagccaataatatgggtttgagctgtgttagtgatgagttaacaaacatatcaggactatttaacctccctgagcccctgttctctaaatgggagaataataactctacctgattgagttcttggaaaataacatagtgtaacggaaagagcaggctttggaggaaaagaggatttgactttgcatctctatcaattaattgtgtgactttgagcaagttatttaactctctgagcttcactttccttatgtgcaaaatggataacaccatggcataagacaatcccatgaagataagatataaaagaagataatgtttgaaaagaaataaggaagtggatgctttggaagaattaagcaggcagctttttctggaaacagctgatctatatgctaccaaggagagaatagaatactccaaaaccttcaaggggaaatattttaattttcttggttactttttctctatttactgtgtttggaaaattttcatggctaccatcaatattgtttttgatcgagttgggaaaacggatcctgtcacaagaggcattgagatcactgtgaattatctgggaatccaatttgatgtgaagttttggtcccaacacatttccttcattcttgttggaataatcatcgtcacatccatcagaggattgctgatcactcttaccaagttcttttatgccatctctagcagtaagtcctccaatgtcattgtcctgctattagcacagataatgggcatgtactttgtctcctctgtgctgctgatccgaatgagtatgcctttagaataccgcaccataatcactgaagtccttggagaactgcagttcaacttctatcaccgttggtttgatgtgatcttcctggtcagcgctctctctagcatactcttcctctatttggctcacaaacaggcaccagagaagcaaatggcaccttgaacttaagcctactacagactgttagaggccagtggtttcaaaatttagatataagaggggggaaaaatggaaccagggcctgacattttataaacaaacaaaatgctatggtagcatttttcaccttcatagcatactccttccccgtcaggtgatactatgaccatgagtagcatcagccagaacatgagagggagaactaactcaagacaatactcagcagagagcatcccgtgtggatatgaggctggtgtagaggcggagaggagccaagaaactaaaggtgaaaaatacactggaactctggggcaagacatgtctatggtagctgagccaaacacgtaggatttccgttttaaggttcacatggaaaaggttatagctttgccttgagattgactcattaaaatcagagactgtaacacttt

SEQ ID NO: 102873 - DNA, 3666 bp, Homo sapiens
  misc_feature (1667)..(1667): n is a, c, g, or t
  misc_feature (1986)..(1986): n is a, c, g, or t
tggggcgcagcttgatggcgtcgggctggagagccgcagtcccggctgcagcacctgggagaaggcagaccgtgtgagggggcctgtggccccagcgtgctgtggcctcggggagtgggaagtggaggcaggagccttccttacacttcgccatgagtttcctcatcgactccagcatcatgattacctcccagatactattttttggatttgggtggcttttcttcatgcgccaattgtttaaagactatgagatacgtcagtatgttgtacaggtgatcttctccgtgacgtttgcattttcttgcaccatgtttgagctcatcatctttgaaatcttaggagtattgaatagcagctcccgttattttcactggaaaatgaacctgtgtgtaattctgctgatcctggttttcatggtgcctttttacattggctattttattgtgagcaatatccgactacttttgtctcctctgtctcagtgcataaacaacgactgcttttttcctgtctcttatggctgacctttatgtatttcttctggaaactaggagatccctttcccattctcagcccaaaacatgtgactctcatggctcttctttctggatttggtgctgtcaactgcccatacacttacatgtcttacttcctcaggaatgtgactgacacggatattctagccctggaacggcgactgctgcaaaccatggatatgatcataagcaaaaagaaaaggatggcaatggcacggagaacaatgttccagaagggggaagtgcataacaaaccatcaggtttctggggaatgataaaaagtgttaccacttcagcatcaggaagtgaaagtatcctttgtccctctgcttgattctttttctcaactctggaccaagagcaaaagaaaaaaagtagtgttgggatagtcccttctaaggtacctgactacatcagaggtccaaactcctaagagctaggcttcggaaataccatgtgtacagtcatctttccagcacctgcacaatatcataaaatcattgtctttgagctgaagtggtcctaaaaagtcagcctttccattttacagatgagaaaatagacccagagaggttaagtcacacggtggtttgtggcaaagctagaaacataactgtggtctcctcttcatagttctttccactacactattacatttctcaactctgaaaaaccaccataaagcataatggctacctaaaataaatggcccatttctaaagtaattagtattcctaaacaaattttaagtagctctgcttctccagtgacattttggtttaaagaatcaaggggaggctgggtgcagtggctcatccctgtaatcccagcactttgcaaggccgaggtgggcagatcacttgaacccaggagttcaagacaagcctcggcaacatgacaaaacctcatctctacaaaaaatacaaaaattagccaggcccagtggcatgtgcctgtaatcccaactactcaggaggctgaggtgggaggattgtttgaacttgggaggctgaggtaggagtgagcccagatcacgccactgcactcctgcctaggcaacagagctagaccctgtctcaaaataaaaaagaaaggataaaggagatttgattaatagattaataaantgttctttcctgattggttatgatgttgaactacttcccaaattatgtaaccaaatttctgtgtggctctggtgctattaggtcaaaactttggggaactaagcatgagatagcatactcctgtttccttctctgtcccagggaaatacaaattcccttttgcctcaattagagaaggatgtctattcttgctacaaattatgatttatgtcctggtgtcaaatgaagataagaataagatcaaagaaaggcaagatgattgtggaagagaaagaaaaaggattaatttagatttatttaaccaagaaacatttatttngtatctcctatttccaggctgagtgctaagaaataaaatgatgagtagagtatagcctttctcctcaaggagcttaccctctaatcatgggagagacagacatgtaactagttaaaccatattgtttggtggcttgaaccatgccagtagtagccactattaaggaaggaactgaagggcacttactgatttgggtaatagtgggaaaaatcagagaggagggaggatttagattgaagtatgtgcttctattttagaaggggctatatttactatgtttattacttaaaagttcataaaagccaataatatgggtttgagctgtgttagtgatgagttaacaaacatatcaggactatttaacctccctgagcccctgttctctaaatgggagaataataactctacctgattgagttcttggaaaataacatagtgtaacggaaagagcaggctttggaggaaaagaggatttgactttgcatctctatcaattaattgtgtgactttgagcaagttatttaactctctgagcttcactttccttatgtgcaaaatggataacaccatggcataagacaatcccatgaagataagatataaaagaagataatgtttgaaaagaaataaggaagtggatgctttggaagaattaagcaggcagctttttctggaaacagctgatctatatgctaccaaggagagaatagaatactccaaaaccttcaaggggaaatattttaattttcttggttactttttctctatttactgtgtttggaaaattttcatggctaccatcaatattgtttttgatcgagttgggaaaacggatcctgtcacaagaggcattgagatcactgtgaattatctgggaatccaatttgatgtgaagttttggtcccaacacatttccttcattcttgttggaataatcatcgtcacatccatcagaggattgctgatcactcttaccaagttcttttatgccatctctagcagtaagtcctccaatgtcattgtcctgctattagcacagataatgggcatgtactttgtctcctctgtgctgctgatccgaatgagtatgcctttagaataccgcaccataatcactgaagtccttggagaactgcagttcaacttctatcaccgttggtttgatgtgatcttcctggtcagcgctctctctagcatactcttcctctatttggctcacaaacaggcaccagagaagcaaatggcaccttgaacttaagcctactacagactgttagaggccagtggtttcaaaatttagatataagaggggggaaaaatggaaccagggcctgacattttataaacaaacaaaatgctatggtagcatttttcaccttcatagcatactccttccccgtcaggtgatactatgaccatgagtagcatcagccagaacatgagagggagaactaactcaagacaatactcagcagagagcatcccgtgtggatatgaggctggtgtagaggcggagaggagccaagaaactaaaggtgaaaaatacactggaactctggggcaagacatgtctatggtagctgagccaaacacgtaggatttccgttttaaggttcacatggaaaaggttatagctttgccttgagattgactcattaaaatcagagactgtaacacttt

SEQ ID NO: 102874 - DNA, 3634 bp, Homo sapiens
  misc_feature (1635)..(1635): n is a, c, g, or t
  misc_feature (1954)..(1954): n is a, c, g, or t
tggggcgcagcttgatggcgtcgggctggagagccgcagtcccggctgcagcacctgggagaaggcagaccgtgtgagggggcctgtggccccagcgtgctgtggcctcggggagtgggaagtggaggcaggagccttccttacacttcgccatgagtttcctcatcgactccagcatcatgattacctcccagatacgtcagtatgttgtacaggtgatcttctccgtgacgtttgcattttcttgcaccatgtttgagctcatcatctttgaaatcttaggagtattgaatagcagctcccgttattttcactggaaaatgaacctgtgtgtaattctgctgatcctggttttcatggtgcctttttacattggctattttattgtgagcaatatccgactactgcataaacaacgactgcttttttcctgtctcttatggctgacctttatgtatttcttctggaaactaggagatccctttcccattctcagcccaaaacatgggatcttatccatagaacagctcatcagccgggttggtgtgattggagtgactctcatggctcttctttctggatttggtgctgtcaactgcccatacacttacatgtcttacttcctcaggaatgtgactgacacggatattctagccctggaacggcgactgctgcaaaccatggatatgatcataagcaaaaagaaaaggatggcaatggcacggagaacaatgttccagaagggggaagtgcataacaaaccatcaggtttctggggaatgataaaaagtgttaccacttcagcatcaggaagtgaaagtatcctttgtccctctgcttgattctttttctcaactctggaccaagagcaaaagaaaaaaagtagtgttgggatagtcccttctaaggtacctgactacatcagaggtccaaactcctaagagctaggcttcggaaataccatgtgtacagtcatctttccagcacctgcacaatatcataaaatcattgtctttgagctgaagtggtcctaaaaagtcagcctttccattttacagatgagaaaatagacccagagaggttaagtcacacggtggtttgtggcaaagctagaaacataactgtggtctcctcttcatagttctttccactacactattacatttctcaactctgaaaaaccaccataaagcataatggctacctaaaataaatggcccatttctaaagtaattagtattcctaaacaaattttaagtagctctgcttctccagtgacattttggtttaaagaatcaaggggaggctgggtgcagtggctcatccctgtaatcccagcactttgcaaggccgaggtgggcagatcacttgaacccaggagttcaagacaagcctcggcaacatgacaaaacctcatctctacaaaaaatacaaaaattagccaggcccagtggcatgtgcctgtaatcccaactactcaggaggctgaggtgggaggattgtttgaacttgggaggctgaggtaggagtgagcccagatcacgccactgcactcctgcctaggcaacagagctagaccctgtctcaaaataaaaaagaaaggataaaggagatttgattaatagattaataaantgttctttcctgattggttatgatgttgaactacttcccaaattatgtaaccaaatttctgtgtggctctggtgctattaggtcaaaactttggggaactaagcatgagatagcatactcctgtttccttctctgtcccagggaaatacaaattcccttttgcctcaattagagaaggatgtctattcttgctacaaattatgatttatgtcctggtgtcaaatgaagataagaataagatcaaagaaaggcaagatgattgtggaagagaaagaaaaaggattaatttagatttatttaaccaagaaacatttatttngtatctcctatttccaggctgagtgctaagaaataaaatgatgagtagagtatagcctttctcctcaaggagcttaccctctaatcatgggagagacagacatgtaactagttaaaccatattgtttggtggcttgaaccatgccagtagtagccactattaaggaaggaactgaagggcacttactgatttgggtaatagtgggaaaaatcagagaggagggaggatttagattgaagtatgtgcttctattttagaaggggctatatttactatgtttattacttaaaagttcataaaagccaataatatgggtttgagctgtgttagtgatgagttaacaaacatatcaggactatttaacctccctgagcccctgttctctaaatgggagaataataactctacctgattgagttcttggaaaataacatagtgtaacggaaagagcaggctttggaggaaaagaggatttgactttgcatctctatcaattaattgtgtgactttgagcaagttatttaactctctgagcttcactttccttatgtgcaaaatggataacaccatggcataagacaatcccatgaagataagatataaaagaagataatgtttgaaaagaaataaggaagtggatgctttggaagaattaagcaggcagctttttctggaaacagctgatctatatgctaccaaggagagaatagaatactccaaaaccttcaaggggaaatattttaattttcttggttactttttctctatttactgtgtttggaaaattttcatggctaccatcaatattgtttttgatcgagttgggaaaacggatcctgtcacaagaggcattgagatcactgtgaattatctgggaatccaatttgatgtgaagttttggtcccaacacatttccttcattcttgttggaataatcatcgtcacatccatcagaggattgctgatcactcttaccaagttcttttatgccatctctagcagtaagtcctccaatgtcattgtcctgctattagcacagataatgggcatgtactttgtctcctctgtgctgctgatccgaatgagtatgcctttagaataccgcaccataatcactgaagtccttggagaactgcagttcaacttctatcaccgttggtttgatgtgatcttcctggtcagcgctctctctagcatactcttcctctatttggctcacaaacaggcaccagagaagcaaatggcaccttgaacttaagcctactacagactgttagaggccagtggtttcaaaatttagatataagaggggggaaaaatggaaccagggcctgacattttataaacaaacaaaatgctatggtagcatttttcaccttcatagcatactccttccccgtcaggtgatactatgaccatgagtagcatcagccagaacatgagagggagaactaactcaagacaatactcagcagagagcatcccgtgtggatatgaggctggtgtagaggcggagaggagccaagaaactaaaggtgaaaaatacactggaactctggggcaagacatgtctatggtagctgagccaaacacgtaggatttccgttttaaggttcacatggaaaaggttatagctttgccttgagattgactcattaaaatcagagactgtaacacttt

SEQ ID NO: 102875 - DNA, 3625 bp, Homo sapiens
  misc_feature (1626)..(1626): n is a, c, g, or t
  misc_feature (1945)..(1945): n is a, c, g, or t
tggggcgcagcttgatggcgtcgggctggagagccgcagtcccggctgcagcacctgggagaaggcagaccgtgtgagggggcctgtggccccagcgtgctgtggcctcggggagtgggaagtggaggcaggagccttccttacacttcgccatgagtttcctcatcgactccagcatcatgattacctcccagatactattttttggatttgggtggcttttcttcatgcgccaattgtttaaagactatgagatacgtcagtatgttgtacaggtgatcttctccgtgacgtttgcattttcttgcaccatgtttgagctcatcatctttgaaatcttaggagtattgaatagcagctcccgttattttcactggaaaatgaacctgtgtgtaattctgctgatcctggttttcatggtgcctttttacattggctattttattgtgagcaatatccgactacgagatccctttcccattctcagcccaaaacatgggatcttatccatagaacagctcatcagccgggttggtgtgattggagtgactctcatggctcttctttctggatttggtgctgtcaactgcccatacacttacatgtcttacttcctcaggaatgtgactgacacggatattctagccctggaacggcgactgctgcaaaccatggatatgatcataagcaaaaagaaaaggatggcaatggcacggagaacaatgttccagaagggggaagtgcataacaaaccatcaggtttctggggaatgataaaaagtgttaccacttcagcatcaggaagtgaaagtatcctttgtccctctgcttgattctttttctcaactctggaccaagagcaaaagaaaaaaagtagtgttgggatagtcccttctaaggtacctgactacatcagaggtccaaactcctaagagctaggcttcggaaataccatgtgtacagtcatctttccagcacctgcacaatatcataaaatcattgtctttgagctgaagtggtcctaaaaagtcagcctttccattttacagatgagaaaatagacccagagaggttaagtcacacggtggtttgtggcaaagctagaaacataactgtggtctcctcttcatagttctttccactacactattacatttctcaactctgaaaaaccaccataaagcataatggctacctaaaataaatggcccatttctaaagtaattagtattcctaaacaaattttaagtagctctgcttctccagtgacattttggtttaaagaatcaaggggaggctgggtgcagtggctcatccctgtaatcccagcactttgcaaggccgaggtgggcagatcacttgaacccaggagttcaagacaagcctcggcaacatgacaaaacctcatctctacaaaaaatacaaaaattagccaggcccagtggcatgtgcctgtaatcccaactactcaggaggctgaggtgggaggattgtttgaacttgggaggctgaggtaggagtgagcccagatcacgccactgcactcctgcctaggcaacagagctagaccctgtctcaaaataaaaaagaaaggataaaggagatttgattaatagattaataaantgttctttcctgattggttatgatgttgaactacttcccaaattatgtaaccaaatttctgtgtggctctggtgctattaggtcaaaactttggggaactaagcatgagatagcatactcctgtttccttctctgtcccagggaaatacaaattcccttttgcctcaattagagaaggatgtctattcttgctacaaattatgatttatgtcctggtgtcaaatgaagataagaataagatcaaagaaaggcaagatgattgtggaagagaaagaaaaaggattaatttagatttatttaaccaagaaacatttatttngtatctcctatttccaggctgagtgctaagaaataaaatgatgagtagagtatagcctttctcctcaaggagcttaccctctaatcatgggagagacagacatgtaactagttaaaccatattgtttggtggcttgaaccatgccagtagtagccactattaaggaaggaactgaagggcacttactgatttgggtaatagtgggaaaaatcagagaggagggaggatttagattgaagtatgtgcttctattttagaaggggctatatttactatgtttattacttaaaagttcataaaagccaataatatgggtttgagctgtgttagtgatgagttaacaaacatatcaggactatttaacctccctgagcccctgttctctaaatgggagaataataactctacctgattgagttcttggaaaataacatagtgtaacggaaagagcaggctttggaggaaaagaggatttgactttgcatctctatcaattaattgtgtgactttgagcaagttatttaactctctgagcttcactttccttatgtgcaaaatggataacaccatggcataagacaatcccatgaagataagatataaaagaagataatgtttgaaaagaaataaggaagtggatgctttggaagaattaagcaggcagctttttctggaaacagctgatctatatgctaccaaggagagaatagaatactccaaaaccttcaaggggaaatattttaattttcttggttactttttctctatttactgtgtttggaaaattttcatggctaccatcaatattgtttttgatcgagttgggaaaacggatcctgtcacaagaggcattgagatcactgtgaattatctgggaatccaatttgatgtgaagttttggtcccaacacatttccttcattcttgttggaataatcatcgtcacatccatcagaggattgctgatcactcttaccaagttcttttatgccatctctagcagtaagtcctccaatgtcattgtcctgctattagcacagataatgggcatgtactttgtctcctctgtgctgctgatccgaatgagtatgcctttagaataccgcaccataatcactgaagtccttggagaactgcagttcaacttctatcaccgttggtttgatgtgatcttcctggtcagcgctctctctagcatactcttcctctatttggctcacaaacaggcaccagagaagcaaatggcaccttgaacttaagcctactacagactgttagaggccagtggtttcaaaatttagatataagaggggggaaaaatggaaccagggcctgacattttataaacaaacaaaatgctatggtagcatttttcaccttcatagcatactccttccccgtcaggtgatactatgaccatgagtagcatcagccagaacatgagagggagaactaactcaagacaatactcagcagagagcatcccgtgtggatatgaggctggtgtagaggcggagaggagccaagaaactaaaggtgaaaaatacactggaactctggggcaagacatgtctatggtagctgagccaaacacgtaggatttccgttttaaggttcacatggaaaaggttatagctttgccttgagattgactcattaaaatcagagactgtaacacttt

SEQ ID NO: 102876 - DNA, 2025 bp, Homo sapiens
tggggcgcagcttgatggcgtcgggctggagagccgcagtcccggctgcagcacctgggagaaggcagaccgtgtgagggggcctgtggccccagcgtgctgtggcctcggggagtgggaagtggaggcaggagccttccttacacttcgccatgagtttcctcatcgactccagcatcatgattacctcccagatactattttttggatttgggtggcttttcttcatgcgccaattgtttaaagactatgagatacgtcagtatgttgtacaggtgatcttctccgtgacgtttgcattttcttgcaccatgtttgagctcatcatctttgaaatcttaggagtattgaatagcagctcccgttattttcactggaaaatgaacctgtgtgtaattctgctgatcctggttttcatggtgcctttttacattggctattttattgtgagcaatatccgactactgcataaacaacgactgcttttttcctgtctcttatggctgacctttatgtatttcttctggaaactaggagatccctttcccattctcagcccaaaacatgggatcttatccatagaacagctcatcagccgggttggtgtgattggagtgactctcatggctcttctttctggatttggtgctgtcaactgcccatacacttacatgtcttacttcctcaggaatgtgactgacacggatattctagccctggaacggcgactgctgcaaaccatggatatgatcataagcaaaaagaaaaggatggcaatggcacggagaacaatgttccagaagggggaagtgcataacaaaccatcaggtttctggggaatgataaaaagtgttaccacttcagcatcaggaagtgaaacttcactttccttatgtgcaaaatggataacaccatggcataagacaatcccatgaagataagatataaaagaagataatgtttgaaaagaaataaggaagtggatgctttggaagaattaagcaggcagctttttctggaaacagctgatctatatgctaccaaggagagaatagaatactccaaaaccttcaaggggaaatattttaattttcttggttactttttctctatttactgtgtttggaaaattttcatggctaccatcaatattgtttttgatcgagttgggaaaacggatcctgtcacaagaggcattgagatcactgtgaattatctgggaatccaatttgatgtgaagttttggtcccaacacatttccttcattcttgttggaataatcatcgtcacatccatcagaggattgctgatcactcttaccaagttcttttatgccatctctagcagtaagtcctccaatgtcattgtcctgctattagcacagataatgggcatgtactttgtctcctctgtgctgctgatccgaatgagtatgcctttagaataccgcaccataatcactgaagtccttggagaactgcagttcaacttctatcaccgttggtttgatgtgatcttcctggtcagcgctctctctagcatactcttcctctatttggctcacaaacaggcaccagagaagcaaatggcaccttgaacttaagcctactacagactgttagaggccagtggtttcaaaatttagatataagaggggggaaaaatggaaccagggcctgacattttataaacaaacaaaatgctatggtagcatttttcaccttcatagcatactccttccccgtcaggtgatactatgaccatgagtagcatcagccagaacatgagagggagaactaactcaagacaatactcagcagagagcatcccgtgtggatatgaggctggtgtagaggcggagaggagccaagaaactaaaggtgaaaaatacactggaactctggggcaagacatgtctatggtagctgagccaaacacgtaggatttccgttttaaggttcacatggaaaaggttatagctttgccttgagattgactcattaaaatcagagactgtaacacttt

SEQ ID NO: 102877 - DNA, 2491 bp, Homo sapiens
tggggcgcagcttgatggcgtcgggctggagagccgcagtcccggctgcagcacctgggagaaggcagaccgtgtgagggggcctgtggccccagcgtgctgtggcctcggggagtgggaagtggaggcaggagccttccttacacttcgccatgagtttcctcatcgactccagcatcatgattacctcccagatactattttttggatttgggtggcttttcttcatgcgccaattgtttaaagactatgagatacgtcagtatgttgtacaggtgatcttctccgtgacgtttgcattttcttgcaccatgtttgagctcatcatctttgaaatcttaggagtattgaatagcagctcccgttattttcactggaaaatgaacctgtgtgtaattctgctgatcctggttttcatggtgcctttttacattggctattttattgtgagcaatatccgactactgcataaacaacgactgcttttttcctgtctcttatggctgacctttatgtatttcttctggaaactaggagatccctttcccattctcagcccaaaacatgggatcttatccatagaacagctcatcagccgggttggtgtgattggagtgactctcatggctcttctttctggatttggtgctgtcaactgcccatacacttacatgtcttacttcctcaggaatgtgactgacacggatattctagccctggaacggcgactgctgcaaaccatggatatgatcataagcaaaaagaaaaggatggcaatggcacggagaacaatgttccagaagggggaagtgcataacaaaccatcaggtttctggggaatgataaaaagtgttaccacttcagcatcaggaagtgaaacttcactttccttatgtgcaaaatggataacaccatggcataagacaatcccatgaagataagatataaaagaagataatgtttgaaaagaaataaggtaatgtctgtaaatcctagcctatattagaacacagtaaagtattagttcccttttctaacattatattcagataatgtaggagaaagctatgctttattatagttattattctgtaactatttacaatcttgaacattacatttgacttaatctaactagataaatcaaaaaacaaatgaaactatctgtttgagctgcttgacttaagagaaactgagtggtaattgtttggtggcgatgctcttgatggagaagcttttacacacctgcgtcagaggttgggaaagttgctctgaagtagtgttgctggctatgaaacaggaaattgagaatataggcaactccgggaatccactgtaggaaaaactaaaagtatatgctttctcattgccatttcttgaaattcctatgtgattaaaaccttgatgcccattctgtgccagatcttactcttattcaacaggaagtggatgctttggaagaattaagcaggcagctttttctggaaacagctgatctatatgctaccaaggagagaatagaatactccaaaaccttcaaggggaaatattttaattttcttggttactttttctctatttactgtgtttggaaaattttcatggctaccatcaatattgtttttgatcgagttgggaaaacggatcctgtcacaagaggcattgagatcactgtgaattatctgggaatccaatttgatgtgaagttttggtcccaacacatttccttcattcttgttggaataatcatcgtcacatccatcagaggattgctgatcactcttaccaagttcttttatgccatctctagcagtaagtcctccaatgtcattgtcctgctattagcacagataatgggcatgtactttgtctcctctgtgctgctgatccgaatgagtatgcctttagaataccgcaccataatcactgaagtccttggagaactgcagttcaacttctatcaccgttggtttgatgtgatcttcctggtcagcgctctctctagcatactcttcctctatttggctcacaaacaggcaccagagaagcaaatggcaccttgaacttaagcctactacagactgttagaggccagtggtttcaaaatttagatataagaggggggaaaaatggaaccagggcctgacattttataaacaaacaaaatgctatggtagcatttttcaccttcatagcatactccttccccgtcaggtgatactatgaccatgagtagcatcagccagaacatgagagggagaactaactcaagacaatactcagcagagagcatcccgtgtggatatgaggctggtgtagaggcggagaggagccaagaaactaaaggtgaaaaatacactggaactctggggcaagacatgtctatggtagctgagccaaacacgtaggatttccgttttaaggttcacatggaaaaggttatagctttgccttgagattgactcattaaaatcagagactgtaacacttt

SEQ ID NO: 102878 - DNA, 2092 bp, Homo sapiens
tggggcgcagcttgatggcgtcgggctggagagccgcagtcccggctgcagcacctgggagaaggcagaccgtgtgagggggcctgtggccccagcgtgctgtggcctcggggagtgggaagtggaggcaggagccttccttacacttcgccatgagtttcctcatcgactccagcatcatgattacctcccagatactattttttggatttgggtggcttttcttcatgcgccaattgtttaaagactatgagatacgtcagtatgttgtacaggtgatcttctccgtgacgtttgcattttcttgcaccatgtttgagctcatcatctttgaaatcttaggagtattgaatagcagctcccgttattttcactggaaaatgaacctgtgtgtaattctgctgatcctggttttcatggtgcctttttacattggctattttattgtgagcaatatccgactactgcataaacaacgactgcttttttcctgtctcttatggctgacctttatgtatttcttctggaaactaggagatccctttcccattctcagcccaaaacatgggatcttatccatagaacagctcatcagccgggttggtgtgattggagtgactctcatggctcttctttctggatttggtgctgtcaactgcccatacacttacatgtcttacttcctcaggaatgtgactgacacggatattctagccctggaacggcgactgctgcaaaccatggatatgatcataagcaaaaagaaaaggatggcaatggcacggagaacaatgttccagaagggggaagtgcataacaaaccatcaggtttctggggaatgataaaaagtgttaccacttcagcatcaggaagtgaaaatcttactcttattcaacaggaagtggatgctttggaagaattaagcaggcagctttttctggaaacagctgatctatatgctaccaaggagagaatagaatactccaaaaccttcaaggggaaatattttaattttcttggttactttttctctatttactgtgtttggaaaattttcatggctaccatcaatattgtttttgatcgagttgggaaaacggatcctgtcacaagaggcattgagatcactgtgaattatctgggaatccaatttgatgtgaagttttggtcccaacacatttccttcattcttgttggaataatcatcgtcacatccatcagaggattgctgatcactcttaccaagttcttttatgccatctctagcagtaagtcctccaatgtcattgtcctgctattagcacagataatgggtaagtttaattagttacctttatgttgacagctgtaaaatatcagaaatgtgcttgatacttttaagaattttaataatttcctttgtcctgttcctcactacattcagagtcacttctggattaattcatttgacttacagggcatgtactttgtctcctctgtgctgctgatccgaatgagtatgcctttagaataccgcaccataatcactgaagtccttggagaactgcagttcaacttctatcaccgttggtttgatgtgatcttcctggtcagcgctctctctagcatactcttcctctatttggctcacaaacaggcaccagagaagcaaatggcaccttgaacttaagcctactacagactgttagaggccagtggtttcaaaatttagatataagaggggggaaaaatggaaccagggcctgacattttataaacaaacaaaatgctatggtagcatttttcaccttcatagcatactccttccccgtcaggtgatactatgaccatgagtagcatcagccagaacatgagagggagaactaactcaagacaatactcagcagagagcatcccgtgtggatatgaggctggtgtagaggcggagaggagccaagaaactaaaggtgaaaaatacactggaactctggggcaagacatgtctatggtagctgagccaaacacgtaggatttccgttttaaggttcacatggaaaaggttatagctttgccttgagattgactcattaaaatcagagactgtaacacttt

SEQ ID NO: 102879 - DNA, 1879 bp, Homo sapiens
tggggcgcagcttgatggcgtcgggctggagagccgcagtcccggctgcagcacctgggagaaggcagaccgtgtgagggggcctgtggccccagcgtgctgtggcctcggggagtgggaagtggaggcaggagccttccttacacttcgccatgagtttcctcatcgactccagcatcatgattacctcccagatactattttttggatttgggtggcttttcttcatgcgccaattgtttaaagactatgagatacgtcagtatgttgtacaggtgatcttctccgtgacgtttgcattttcttgcaccatgtttgagctcatcatctttgaaatcttaggagtattgaatagcagctcccgttattttcactggaaaatgaacctgtgtgtaattctgctgatcctggttttcatggtgcctttttacattggctattttattgtgagcaatatccgactacgagatccctttcccattctcagcccaaaacatgggatcttatccatagaacagctcatcagccgggttggtgtgattggagtgactctcatggctcttctttctggatttggtgctgtcaactgcccatacacttacatgtcttacttcctcaggaatgtgactgacacggatattctagccctggaacggcgactgctgcaaaccatggatatgatcataagcaaaaagaaaaggatggcaatggcacggagaacaatgttccagaagggggaagtgcataacaaaccatcaggtttctggggaatgataaaaagtgttaccacttcagcatcaggaagtgaaaatcttactcttattcaacaggaagtggatgctttggaagaattaagcaggcagctttttctggaaacagctgatctatatgctaccaaggagagaatagaatactccaaaaccttcaaggggaaatattttaattttcttggttactttttctctatttactgtgtttggaaaattttcatggctaccatcaatattgtttttgatcgagttgggaaaacggatcctgtcacaagaggcattgagatcactgtgaattatctgggaatccaatttgatgtgaagttttggtcccaacacatttccttcattcttgttggaataatcatcgtcacatccatcagaggattgctgatcactcttaccaagttcttttatgccatctctagcagtaagtcctccaatgtcattgtcctgctattagcacagataatgggcatgtactttgtctcctctgtgctgctgatccgaatgagtatgcctttagaataccgcaccataatcactgaagtccttggagaactgcagttcaacttctatcaccgttggtttgatgtgatcttcctggtcagcgctctctctagcatactcttcctctatttggctcacaaacaggcaccagagaagcaaatggcaccttgaacttaagcctactacagactgttagaggccagtggtttcaaaatttagatataagaggggggaaaaatggaaccagggcctgacattttataaacaaacaaaatgctatggtagcatttttcaccttcatagcatactccttccccgtcaggtgatactatgaccatgagtagcatcagccagaacatgagagggagaactaactcaagacaatactcagcagagagcatcccgtgtggatatgaggctggtgtagaggcggagaggagccaagaaactaaaggtgaaaaatacactggaactctggggcaagacatgtctatggtagctgagccaaacacgtaggatttccgttttaaggttcacatggaaaaggttatagctttgccttgagattgactcattaaaatcagagactgtaacacttt

SEQ ID NO: 102880 - DNA, 1514 bp, Homo sapiens
cggacgcgtgggtcgacccacgcgtcgcaaaacatgggatcttatccatagaacagctcatcagccgggttggtgtgattggagtgactctcatggctcttctttctggatttggtgctgtcaactgcccatacacttacatgtcttacttcctcaggaatgtgactgacacggatattctagccctggaacggcgactgctgcaaaccatggatatgatcataagcaaaaagaaaaggatggcaatggcacggagaacaatgttccagaagggggaagtgcataacaaaccatcaggtttctggggaatgataaaaagtgttaccacttcagcatcaggaagtgaaacttcactttccttatgtgcaaaatggataacaccatggcataagacaatcccatgaagataagatataaaagaagataatgtttgaaaagaaataagatcttactcttattcaacaggaagtggatgctttggaagaattaagcaggcagctttttctggaaacagctgatctatatgctaccaaggagagaatagaatactccaaaaccttcaaggggaaatattttaattttcttggttactttttctctatttactgtgtttggaaaattttcatggctaccatcaatattgtttttgatcgagttgggaaaacggatcctgtcacaagaggcattgagatcactgtgaattatctgggaatccaatttgatgtgaagttttggtcccaacacatttccttcattcttgttggaataatcatcgtcacatccatcagaggattgctgatcactcttaccaagttcttttatgccatctctagcagtaagtcctccaatgtcattgtcctgctattagcacagataatgggcatgtactttgtctcctctgtgctgctgatccgaatgagtatgcctttagaataccgcaccataatcactgaagtccttggagaactgcagttcaacttctatcaccgttggtttgatgtgatcttcctggtcagcgctctctctagcatactcttcctctatttggctcacaaacaggcaccagagaagcaaatggcaccttgaacttaagcctactacagactgttagaggccagtggtttcaaaatttagatataagaggggggaaaaatggaaccagggcctgacattttataaacaaacaaaatgctatggtagcatttttcaccttcatagcatactccttccccgtcaggtgatactatgaccatgagtagcatcagccagaacatgagagggagaactaactcaagacaatactcagcagagagcatcccgtgtggatatgaggctggtgtagaggcggagaggagccaagaaactaaaggtgaaaaatacactggaactctggggcaagacatgtctatggtagctgagccaaacacgtaggatttccgttttaaggttcacatggaaaaggttatagctttgccttgagattgactcattaaaatcagagactgtaacacttt

SEQ ID NO: 102881 - DNA, 1263 bp, Homo sapiens
  misc_feature (2)..(2): n is a, c, g, or t
gnccactctagagtatccccacgttgacacttcagcatcaggaagtgaaaatcttactcttattcaacaggaagtggatgctttggaagaattaagcaggcagctttttctggaaacagctgatctatatgctaccaaggagagaatagaatactccaaaaccttcaaggggaaatattttaattttcttggttactttttctctatttactgtgtttggaaaattttcatggctaccatcaatattgtttttgatcgagttgggaaaacggatcctgtcacaagaggcattgagatcactgtgaattatctgggaatccaatttgatgtgaagttttggtcccaacacatttccttcattcttgttggaataatcatcgtcacatccatcagaggattgctgatcactcttaccaagttcttttatgccatctctagcagtaagtcctccaatgtcattgtcctgctattagcacagataatgggtaagtttaattagttacctttatgttgacagctgtaaaatatcagaaatgtgcttgatacttttaagaattttaataatttcctttgtcctgttcctcactacattcagagtcacttctggattaattcatttgacttacagggcatgtactttgtctcctctgtgctgctgatccgaatgagtatgcctttagaataccgcaccataatcactgaagtccttggagaactgcagttcaacttctatcaccgttggtttgatgtgatcttcctggtcagcgctctctctagcatactcttcctctatttggctcacaaacaggcaccagagaagcaaatggcaccttgaacttaagcctactacagactgttagaggccagtggtttcaaaatttagatataagaggggggaaaaatggaaccagggcctgacattttataaacaaacaaaatgctatggtagcatttttcaccttcatagcatactccttccccgtcaggtgatactatgaccatgagtagcatcagccagaacatgagagggagaactaactcaagacaatactcagcagagagcatcccgtgtggatatgaggctggtgtagaggcggagaggagccaagaaactaaaggtgaaaaatacactggaactctggggcaagacatgtctatggtagctgagccaaacacgtaggatttccgttttaaggttcacatggaaaaggttatagctttgccttgagattgactcattaaaatcagagactgtaacacttt

SEQ ID NO: 102882 - DNA, 2231 bp, Homo sapiens
  misc_feature (1967)..(1967): n is a, c, g, or t
tggggcgcagcttgatggcgtcgggctggagagccgcagtcccggctgcagcacctgggagaaggcagaccgtgtgagggggcctgtggccccagcgtgctgtggcctcggggagtgggaagtggaggcaggagccttccttacacttcgccatgagtttcctcatcgactccagcatcatgattacctcccagatactattttttggatttgggtggcttttcttcatgcgccaattgtttaaagactatgagatacgtcagtatgttgtacaggtgatcttctccgtgacgtttgcattttcttgcaccatgtttgagctcatcatctttgaaatcttaggagtattgaatagcagctcccgttattttcactggaaaatgaacctgtgtgtaattctgctgatcctggttttcatggtgcctttttacattggctattttattgtgagcaatatccgactactgcataaacaacgactgcttttttcctgtctcttatggctgacctttatgtatttcttctggaaactaggagatccctttcccattctcagcccaaaacatgggatcttatccatagaacagctcatcagccgggttggtgtgattggagtgactctcatggctcttctttctggatttggtgctgtcaactgcccatacacttacatgtcttacttcctcaggaatgtgactgacacggatattctagccctggaacggcgactgctgcaaaccatggatatgatcataagcaaaaagaaaaggatggcaatggcacggagaacaatgttccagaagggggaagtgcataacaaaccatcaggtttctggggaatgataaaaagtgttaccacttcagcatcaggaagtgaaaatcttactcttattcaacaggaagtggatgctttggaagaattaagcaggcagctttttctggaaacagctgatctatatgctaccaaggagagaatagaatactccaaaaccttcaaggggaaatattttaattttcttggttactttttctctatttactgtgtttggaaaattttcatggctaccatcaatattgtttttgatcgagttgggaaaacggatcctgtcacaagaggcattgagatcactgtgaattatctgggaatccaatttgatgtgaagttttggtcccaacacatttccttcattcttgttggaataatcatcgtcacatccatcagaggattgctgatcactcttaccaagttcttttatgccatctctagcagtaagtcctccaatgtcattgtcctgctattagcacagataatgggcatgtactttgtctcctctgtgctgctgatccgaatgagtatgcctttagaataccgcaccataatcactgaagtccttggagaactgcagttcaacttctatcaccgttggtttgatgtgatcttcctggtcagcgctctctctagcatactcttcctctatttggctcacaaacaggcaccagagaagcaaatggcaccttgaacttaagcctactacagactgttagaggccagtggtttcaaaatttagatataagaggggggaaaaatggaaccagggcctgacattttataaacaaacaaaatgctatggtagcatttttcaccttcatagcatactccttccccgtcaggtgatactatgaccatgagtagcatcagccagaacatgagagggagaactaactcaagacaatactcagcagagagcatcccgtgtggatatgaggctggtgtagaggcggagaggagccaagaaactaaaggtgaaaaatacactggaactctggggcaagacatgtctatggtagctgagccaaacacgtaggatttccgttttaaggttcacatggaaaaggttatagctttgccttgagattgactcattaaaatcagagactgtaacactttaaaaaaataaaaaaaaaanaaaaaaaaaagaaaaaaaaaaagaaaaaaaaaaacaaaaaggagacactagaacaagaaatacaagaaagagaaaaaaataaaaaaaaaaacctcgggggggggcccggtccccaatggcccctatggggggtcgtatcaaaatccatgggccggcttttacaaaggtcgaaccgggaaaaccctggtgtgcccaacttaagtcgcttggaatccccttttcgcaagttggcttattaccaggaaattgtggccggtttttggt

SEQ ID NO: 102883 - DNA, 2227 bp, Homo sapiens
  misc_feature (1967)..(1967): n is a, c, g, or t
tggggcgcagcttgatggcgtcgggctggagagccgcagtcccggctgcagcacctgggagaaggcagaccgtgtgagggggcctgtggccccagcgtgctgtggcctcggggagtgggaagtggaggcaggagccttccttacacttcgccatgagtttcctcatcgactccagcatcatgattacctcccagatactattttttggatttgggtggcttttcttcatgcgccaattgtttaaagactatgagatacgtcagtatgttgtacaggtgatcttctccgtgacgtttgcattttcttgcaccatgtttgagctcatcatctttgaaatcttaggagtattgaatagcagctcccgttattttcactggaaaatgaacctgtgtgtaattctgctgatcctggttttcatggtgcctttttacattggctattttattgtgagcaatatccgactactgcataaacaacgactgcttttttcctgtctcttatggctgacctttatgtatttcttctggaaactaggagatccctttcccattctcagcccaaaacatgggatcttatccatagaacagctcatcagccgggttggtgtgattggagtgactctcatggctcttctttctggatttggtgctgtcaactgcccatacacttacatgtcttacttcctcaggaatgtgactgacacggatattctagccctggaacggcgactgctgcaaaccatggatatgatcataagcaaaaagaaaaggatggcaatggcacggagaacaatgttccagaagggggaagtgcataacaaaccatcaggtttctggggaatgataaaaagtgttaccacttcagcatcaggaagtgaaaatcttactcttattcaacaggaagtggatgctttggaagaattaagcaggcagctttttctggaaacagctgatctatatgctaccaaggagagaatagaatactccaaaaccttcaaggggaaatattttaattttcttggttactttttctctatttactgtgtttggaaaattttcatggctaccatcaatattgtttttgatcgagttgggaaaacggatcctgtcacaagaggcattgagatcactgtgaattatctgggaatccaatttgatgtgaagttttggtcccaacacatttccttcattcttgttggaataatcatcgtcacatccatcagaggattgctgatcactcttaccaagttcttttatgccatctctagcagtaagtcctccaatgtcattgtcctgctattagcacagataatgggcatgtactttgtctcctctgtgctgctgatccgaatgagtatgcctttagaataccgcaccataatcactgaagtccttggagaactgcagttcaacttctatcaccgttggtttgatgtgatcttcctggtcagcgctctctctagcatactcttcctctatttggctcacaaacaggcaccagagaagcaaatggcaccttgaacttaagcctactacagactgttagaggccagtggtttcaaaatttagatataagaggggggaaaaatggaaccagggcctgacattttataaacaaacaaaatgctatggtagcatttttcaccttcatagcatactccttccccgtcaggtgatactatgaccatgagtagcatcagccagaacatgagagggagaactaactcaagacaatactcagcagagagcatcccgtgtggatatgaggctggtgtagaggcggagaggagccaagaaactaaaggtgaaaaatacactggaactctggggcaagacatgtctatggtagctgagccaaacacgtaggatttccgttttaaggttcacatggaaaaggttatagctttgccttgagattgactcattaaaatcagagactgtaacactttaaaaaaataaaaaaaaaanaaaaaaaattataaaagataatgcttattataaaacaattagtaaaaccctcaaccttatttgataagctaaacaaaaaaggttaaccttgggggggggcccgggccccaatttccccattagggagggggtttaaaatatcactgggccggcgtttaacacagcggggattggaaaaccccggggtttcccaacttttattccccgggaattcccttttttccaggttggggtaacaggcattttgccctttttttttt

SEQ ID NO: 102884 - DNA, 1824 bp, Homo sapiens
tggggcgcagcttgatggcgtcgggctggagagccgcagtcccggctgcagcacctgggagaaggcagaccgtgtgagggggcctgtggccccagcgtgctgtggcctcggggagtgggaagtggaggcaggagccttccttacacttcgccatgagtttcctcatcgactccagcatcatgattacctcccagatactattttttggatttgggtggcttttcttcatgcgccaattgtttaaagactatgagatacgtcagtatgttgtacaggtgatcttctccgtgacgtttgcattttcttgcaccatgtttgagctcatcatctttgaaatcttaggagtattgaatagcagctcccgttattttcactggaaaatgaacctgtgtgtaattctgctgatcctggttttcatggtgcctttttacattggctattttattgtgagcaatatccgactactgcataaacaacgactgcttttttcctgtctcttatggctgacctttatgtatttcttctggaaactaggagatccctttcccattctcagcccaaaacatgggatcttatccatagaacagctcatcagccgggttggtgtgattggagtgactctcatggctcttctttctggatttggtgctgtcaactgcccatacacttacatgtcttacttcctcaggaatgtgactgacacggatattctagccctggaacggcgactgctgcaaaccatggatatgatcataagcaaaaagaaaaggatggcaatggcacggagaacaatgttccagaagggggaagtgcataacaaaccatcaggtttctggggaatgataaaaagtgttaccacttcagcatcaggaagtgaaaatcttactcttattcaacaggaagtggatgctttggaagaattaagcaggcagctttttctggaaacagctgatctatatgctaccaaggagagaatagaatactccaaaaccttcaaggggaaatattttaattttcttggttactttttctctatttactgtgtttggaaaattttcatggctaccatcaatattgtttttgatcgagttgggaaaacggatcctgtcacaagaggcattgagatcactgtgaattatctgggaatccaatttgatgtgaagttttggtcccaacacatttccttcattcttgttggaataatcatcgtcacatccatcagaggattgctgatcactcttaccaagttcttttatgccatctctagcagtaagtcctccaatgtcattgtcctgctattagcacagataatgggcatgtactttgtctcctctgtgctgctgatccgaatgagtatgcctttagaataccgcaccataatcactgaagtccttggagaactgcagttcaacttctatcaccgttggtttgatgtgatcttcctggtcagcgctctctctagcatactcttcctctatttggctcacaaacaggcaccagagaagcaaatggcaccttgaacttaagcctactacagactgttagaggtgatactatgaccatgagtagcatcagccagaacatgagagggagaactaactcaagacaatactcagcagagagcatcccgtgtggatatgaggctggtgtagaggcggagaggagccaagaaactaaaggtgaaaaatacactggaactctggggcaagacatgtctatggtagctgagccaaacacgtaggatttccgttttaaggttcacatggaaaaggttatagctttgccttgagattgactcattaaaatcagagactgtaacacttt

SEQ ID NO: 102885 - DNA, 1758 bp, Homo sapiens
tggggcgcagcttgatggcgtcgggctggagagccgcagtcccggctgcagcacctgggagaaggcagaccgtgtgagggggcctgtggccccagcgtgctgtggcctcggggagtgggaagtggaggcaggagccttccttacacttcgccatgagtttcctcatcgactccagcatcatgattacctcccagatactattttttggatttgggtggcttttcttcatgcgccaattgtttaaagactatgagatacgtcagtatgttgtacaggtgatcttctccgtgacgtttgcattttcttgcaccatgtttgagctcatcatctttgaaatcttaggagtattgaatagcagctcccgttattttcactggaaaatgaacctgtgtgtaattctgctgatcctggttttcatggtgcctttttacattggctattttattgtgagcaatatccgactactgcataaacaacgactgcttttttcctgtctcttatggctgacctttatgtatttcttctggaaactaggagatccctttcccattctcagcccaaaacatgggatcttatccatagaacagctcatcagccgggttggtgtgattggagtgactctcatggctcttctttctggatttggtgctgtcaactgcccatacacttacatgtcttacttcctcaggaatgtgactgacacggatattctagccctggaacggcgactgctgcaaaccatggatatgatcataagcaaaaagaaaaggatggcaatggcacggagaacaatgttccagaagggggaagtgcataacaaaccatcaggtttctggggaatgataaaaagtgttaccacttcagcatcaggaagtgaaaatcttactcttattcaacaggaagtggatgctttggaagaattaagcaggcagctttttctggaaacagctgatctatatgctaccaaggagagaatagaatactccaaaaccttcaaggggaaatattttaattttcttggttactttttctctatttactgtgtttggaaaattttcatggctaccatcaatattgtttttgatcgagttgggaaaacggatcctgtcacaagaggcattgagatcactgtgaattatctgggaatccaatttgatgtgaagttttggtcccaacacatttccttcattcttgttggaataatcatcgtcacatccatcagaggattgctgatcactcttaccaagttcttttatgccatctctagcagtaagtcctccaatgtcattgtcctgctattagcacagataatgggacttgattggccaacacaaggtacagcaataaaggtgtcctgccttgccagtggcagccaggaaagaaccaaactctaccaacccccaaaattataatcagcagagaagatgtgggggctgaagagatcctggaagaaaagccccaaatgtctcattcacctgcatatgttcttctttgtccacaaagacaccattgatcctaagaactctgtctccatcttgaaggccagccttctctgctgggctacacttctcaaccacccggaccaggtggccctcggtgtccttctcaattcgcaggaagaagccatagttttgcccttcttgcttggacagtttacattctcgggggttgaaggtggaggtcattttctgtgatgacaacaccataaatttcactaacaacccatgacaccaccgaaaccataacaattagaacctt

SEQ ID NO: 102886 - DNA, 1584 bp, Homo sapiens
tggggcgcagcttgatggcgtcgggctggagagccgcagtcccggctgcagcacctgggagaaggcagaccgtgtgagggggcctgtggccccagcgtgctgtggcctcggggagtgggaagtggaggcaggagccttccttacacttcgccatgagtttcctcatcgactccagcatcatgattacctcccagatactattttttggatttgggtggcttttcttcatgcgccaattgtttaaagactatgagatacgtcagtatgttgtacaggtgatcttctccgtgacgtttgcattttcttgcaccatgtttgagctcatcatctttgaaatcttaggagtattgaatagcagctcccgttattttcactggaaaatgaacctgtgtgtaattctgctgatcctggttttcatggtgcctttttacattggctattttattgtgagcaatatccgactactgcataaacaacgactgcttttttcctgtctcttatggctgacctttatgtatttcttctggaaactaggagatccctttcccattctcagcccaaaacatgggatcttatccatagaacagctcatcagccgggttggtgtgattggagtgactctcatggctcttctttctggatttggtgctgtcaactgcccatacacttacatgtcttacttcctcaggaatgtgactgacacggatattctagccctggaacggcgactgctgcaaaccatggatatgatcataagcaaaaagaaaaggatggcaatggcacggagaacaatgttccagaagggggaagtgcataacaaaccatcaggtttctggggaatgataaaaagtgttaccacttcagcatcaggaagtgaaaatcttactcttattcaacaggaagtggatgctttggaagaattaagcaggcagctttttctggaaacagctgatctatatgctaccaaggagagaatagaatactccaaaaccttcaaggggaaatattttaattttcttggttactttttctctatttactgtgtttggaaaattttcatggctaccatcaatattgtttttgatcgagttgggaaaacggatcctgtcacaagaggcattgagatcactgtgaattatctgggaatccaatttgatgtgaagttttggtcccaacacatttccttcattcttgttggaataatcatcgtcacatccatcagaggattgctgatcactcttaccaagttcttttatgccatctctagcagtaagtcctccaatgtcattgtcctgctattagcacagataatgaatggcgcattgtaaccttttggtcttccctcctgtggcctggccttggaattcccggaaattggaaggttaattgccccttttttaagaaaattaaccccggcaaacccaatttaaaattccaaccttgggacaaggttccccttttggcggcgcgaaaaccttgtgccaaaggttttcccaaaacctttttccttaaattcccaaaccccggtcctcgggcggtcttctccgcgactctgggtctggacattctcctttttcccctttg

SEQ ID NO: 102887 - DNA, 1112 bp, Homo sapiens
tggggcgcagcttgatggcgtcgggctggagagccgcagtcccggctgcagcacctgggagaaggcagaccgtgtgagggggcctgtggccccagcgtgctgtggcctcggggagtgggaagtggaggcaggagccttccttacacttcgccatgagtttcctcatcgactccagcatcatgattacctcccagatactattttttggatttgggtggcttttcttcatgcgccaattgtttaaagactatgagatacgtcagtatgttgtacaggtgatcttctccgtgacgtttgcattttcttgcaccatgtttgagctcatcatctttgaaatcttaggagtattgaatagcagctcccgttattttcactggaaaatgaacctgtgtgtaattctgctgatcctggttttcatggtgcctttttacattggctattttattgtgagcaatatccgactactgcataaacaacgactgcttttttcctgtctcttatggctgacctttatgtatttcttctggaaactaggagatccctttcccattctcagcccaaaacatgggatcttatccatagaacagctcatcagccgggttggtgtgattggagtgactctcatggctcttctttctggatttggtgctgtcaactgcccatacacttacatgtcttacttcctcaggaatgtgactgacacggatattctagccctggaacggcgactgctgcaaaccatggatatgatcataagcaaaaagaaaaggatggcaatggcacggagaacaatgttccagaagggggaagtgcataacaaaccatcaggtttctggggaatgataaaaagtgttaccacttcagcatcaggaagtgaaaatcttactcttattcaacaggaagtggatgctttggaagaattaagcaggcagctttttctggaaacagctgatctatatgctaccaaggagagaatagaatactccaaaaccttcaaggggaaatattttaattttcttggttactttttctctatttactgtgtttggaaaattttcatggctaccatcatattgttttgatcgagtagtcacctgggccagctcactcat

SEQ ID NO: 102888 - DNA, 2878 bp, Homo sapiens
  misc_feature (1695)..(1695): n is a, c, g, or t
  misc_feature (2014)..(2014): n is a, c, g, or t
tggggcgcagcttgatggcgtcgggctggagagccgcagtcccggctgcagcacctgggagaaggcagaccgtgtgagggggcctgtggccccagcgtgctgtggcctcggggagtgggaagtggaggcaggagccttccttacacttcgccatgagtttcctcatcgactccagcatcatgattacctcccagatactattttttggatttgggtggcttttcttcatgcgccaattgtttaaagactatgagatacgtcagtatgttgtacaggtgatcttctccgtgacgtttgcattttcttgcaccatgtttgagctcatcatctttgaaatcttaggagtattgaatagcagctcccgttattttcactggaaaatgaacctgtgtgtaattctgctgatcctggttttcatggtgcctttttacattggctattttattgtgagcaatatccgactactgcataaacaacgactgcttttttcctgtctcttatggctgacctttatgtatttcttctggaaactaggagatccctttcccattctcagcccaaaacatgggatcttatccatagaacagctcatcagccgggttggtgtgattggagtgactctcatggctcttctttctggatttggtgctgtcaactgcccatacacttacatgtcttacttcctcaggaatgtgactgacacggatattctagccctggaacggcgactgctgcaaaccatggatatgatcataagcaaaaagaaaaggatggcaatggcacggagaacaatgttccagaagggggaagtgcataacaaaccatcaggtttctggggaatgataaaaagtgttaccacttcagcatcaggaagtgaaagtatcctttgtccctctgcttgattctttttctcaactctggaccaagagcaaaagaaaaaaagtagtgttgggatagtcccttctaaggtacctgactacatcagaggtccaaactcctaagagctaggcttcggaaataccatgtgtacagtcatctttccagcacctgcacaatatcataaaatcattgtctttgagctgaagtggtcctaaaaagtcagcctttccattttacagatgagaaaatagacccagagaggttaagtcacacggtggtttgtggcaaagctagaaacataactgtggtctcctcttcatagttctttccactacactattacatttctcaactctgaaaaaccaccataaagcataatggctacctaaaataaatggcccatttctaaagtaattagtattcctaaacaaattttaagtagctctgcttctccagtgacattttggtttaaagaatcaaggggaggctgggtgcagtggctcatccctgtaatcccagcactttgcaaggccgaggtgggcagatcacttgaacccaggagttcaagacaagcctcggcaacatgacaaaacctcatctctacaaaaaatacaaaaattagccaggcccagtggcatgtgcctgtaatcccaactactcaggaggctgaggtgggaggattgtttgaacttgggaggctgaggtaggagtgagcccagatcacgccactgcactcctgcctaggcaacagagctagaccctgtctcaaaataaaaaagaaaggataaaggagatttgattaatagattaataaantgttctttcctgattggttatgatgttgaactacttcccaaattatgtaaccaaatttctgtgtggctctggtgctattaggtcaaaactttggggaactaagcatgagatagcatactcctgtttccttctctgtcccagggaaatacaaattcccttttgcctcaattagagaaggatgtctattcttgctacaaattatgatttatgtcctggtgtcaaatgaagataagaataagatcaaagaaaggcaagatgattgtggaagagaaagaaaaaggattaatttagatttatttaaccaagaaacatttatttngtatctcctatttccaggctgagtgctaagaaataaaatgatgagtagagtatagcctttctcctcaaggagcttaccctctaatcatgggagagacagacatgtaactagttaaaccatattgtttggtggcttgaaccatgccagtagtagccactattaaggaaggaactgaagggcacttactgatttgggtaatagtgggaaaaatcagagaggagggaggatttagattgaagtatgtgcttctattttagaaggggctatatttactatgtttattacttaaaagttcataaaagccaataatatgggtttgagctgtgttagtgatgagttaacaaacatatcaggactatttaacctccctgagcccctgttctctaaatgggagaataataactctacctgattgagttcttggaaaataacatagtgtaacggaaagagcaggctttggaggaaaagaggatttgactttgcatctctatcaattaattgtgtgactttgagcaagttatttaactctctgagcttcactttccttatgtgcaaaatggataacaccatggcataagacaatcccatgaagataagatataaaagaagataatgtttgaaaagaaataagatcttactcttattcaacaggaagtggatgctttggaagaattaagcaggcagctttttctggaaacagctgatctatatgctaccaaggagagaatagaatactccaaaaccttcaaggggaaatattttaattttcttggttactttttctctatttactgtgtttggaaaattttcatggctaccatcatattgttttgatcgagtagtcacctgggccagctcactcat

SEQ ID NO: 102889 - DNA, 924 bp, Homo sapiens
atcagtccaaggatgaataggcagttgctgggcagatgtcgttgcagagagattctttgggctaccatcaatattgtttttgatcgagttgggaaaacggatcctgtcacaagaggcattgagatcactgtgaattatctgggaatccaatttgatgtgaagttttggtcccaacacatttccttcattcttgttggaataatcatcgtcacatccatcagaggattgctgatcactcttaccaagttcttttatgccatctctagcagtaagtcctccaatgtcattgtcctgctattagcacagataatgagtcacttctggattaattcatttgacttacagggcatgtactttgtctcctctgtgctgctgatccgaatgagtatgcctttagaataccgcaccataatcactgaagtccttggagaactgcagttcaacttctatcaccgttggtttgatgtgatcttcctggtcagcgctctctctagcatactcttcctctatttggctcacaaacaggcaccagagaagcaaatggcaccttgaacttaagcctactacagactgttagaggccagtggtttcaaaatttagatataagaggggggattcaccttcatagcatactccttccccgtcaggtgatactatgaccatgagtagcatcagccagaacatgagagggagaactaactcaagacaatactcagcagagagcatcccgtgtggatatgaggctggtgtagaggcggagaggagccaagaaactaaaggtgaaaaatacactggaactctggggcaagacatgtctatggtagctgagccaaacacgtaggatttccgttttaaggttcacatggaaaaggttatagctttgccttgagattgactcattaaaatcagagactgtaacacttt

SEQ ID NO: 102890 - DNA, 1968 bp, Homo sapiens
tggggcgcagcttgatggcgtcgggctggagagccgcagtcccggctgcagcacctgggagaaggcagaccgtgtgagggggcctgtggccccagcgtgctgtggcctcggggagtgggaagtggaggcaggagccttccttacacttcgccatgagtttcctcatcgactccagcatcatgattacctcccagatactattttttggatttgggtggcttttcttcatgcgccaattgtttaaagactatgagatacgtcagtatgttgtacaggtgatcttctccgtgacgtttgcattttcttgcaccatgtttgagctcatcatctttgaaatcttaggagtattgaatagcagctcccgttattttcactggaaaatgaacctgtgtgtaattctgctgatcctggttttcatggtgcctttttacattggctattttattgtgagcaatatccgactacttttgtctcctctgtctcagtgcataaacaacgactgcttttttcctgtctcttatggctgacctttatgtatttcttctggaaactaggagatccctttcccattctcagcccaaaacatgggatcttatccatagaacagctcatcagccgggttggtgtgattggagtgactctcatggctcttctttctggatttggtgctgtcaactgcccatacacttacatgtcttacttcctcaggaatgtgactgacacggatattctagccctggaacggcgactgctgcaaaccatggatatgatcataagcaaaaagaaaaggatggcaatggcacggagaacaatgttccagaagggggaagtgcataacaaaccatcaggtttctggggaatgataaaaagtgttaccacttcagcatcaggaagtgaaaatcttactcttattcaacaggaagtggatgctttggaagaattaagcaggcagctttttctggaaacagctgatctatatgctaccaaggagagaatagaatactccaaaaccttcaaggggaaatattttaattttcttggttactttttctctatttactgtgtttggaaaattttcatggctaccatcaatattgtttttgatcgagttgggaaaacggatcctgtcacaagaggcattgagatcactgtgaattatctgggaatccaatttgatgtgaagttttggtcccaacacatttccttcattcttgttggaataatcatcgtcacatccatcagaggattgctgatcactcttaccaagttcttttatgccatctctagcagtaagtcctccaatgtcattgtcctgctattagcacagataatgggcatgtactttgtctcctctgtgctgctgatccgaatgagtatgcctttagaataccgcaccataatcactgaagtccttggagaactgcagttcaacttctatcaccgttggtttgatgtgatcttcctggtcagcgctctctctagcatactcttcctctatttggctcacaaacaggcaccagagaagcaaatggcaccttgaacttaagcctactacagactgttagaggccagtggtttcaaaatttagatataagaggggggaaaaatggaaccagggcctgacattttataaacaaacaaaatgctatggtagcatttttcaccttcatagcatactccttccccgtcaggtgatactatgaccatgagtagcatcagccagaacatgagagggagaactaactcaagacaatactcagcagagagcatcccgtgtggatatgaggctggtgtagaggcggagaggagccaagaaactaaaggtgaaaaatacactggaactctggggcaagacatgtctatggtagctgagccaaacacgtaggatttccgttttaaggttcacatggaaaaggttatagctttgccttgagattgactcattaaaatcagagactgtaacacttt

SEQ ID NO: 102891 - DNA, 738 bp, Homo sapiens
  misc_feature (686)..(686): n is a, c, g, or t
  misc_feature (708)..(708): n is a, c, g, or t
  misc_feature (711)..(711): n is a, c, g, or t
tggggcgcagcttgatggcgtcgggctggagagccgcagtcccggctgcagcacctgggagaaggcagaccgtgtgagggggcctgtggccccagcgtgctgtggcctcggggagtgggaagtggaggcaggagccttccttacacttcgccatgagtttcctcatcgactccagcatcatgattacctcccagatactattttttggatttgggtggcttttcttcatgcgccaattgtttaaagactatgagatacgtcagtatgttgtacaggtgatcttctccgtgacgtttgcattttcttgcaccatgtttgagctcatcatctttgaaatcttaggagtattgaatagcagctcccgttattttcactggaaaatgaacctgtgtgtaattctgctgatcctggttttcatggtgcctttttacattggctattttattgtgagcaatatccgactacttttgtctcctctgtctcagtgcataaacaacgactgcttttttcctgtctcttatggctgacctttatgtatttcttctggaaactaggagatccctttcccattctcagcccaaaacatgggatcttatccatagaacagctcatcagccgggttggtgtgattggagtgactctcatggctcttctttctggatttggtgccttgtccaaacctgggncccccccccaaattaaaccccnaancccttttttttaaaacccccaaatttt

SEQ ID NO: 102892 - DNA, 127 bp, Homo sapiens
gacccagtttctctggctgctggaccaaggccccagctctcggctgtctctcggctggaggccgacttttgttccttgctgcataagccttccatagtggcagcttcctgcaccaaagccagcaagg

SEQ ID NO: 102893 - DNA, 306 bp, Homo sapiens
gtctcttaagggaggctccagaagctactgagacactctcactttcatctctggccagagcttggtcacatgcctgcatccgactataggggaggctggaaatggaatctttattctgggaggcctgagttcacctaaaaattggagcattgattagtttattaggacaaaggggaaatggatattgtgggatacagctgtgtcagctgcgcctgccttttctcctagtgcctggcctaatgtatatttaattagccatttgtttaccatctgtctctcccgatcagaatgtgggctgtgtaaaac

SEQ ID NO: 102894 - DNA, 520 bp, Homo sapiens
tgcatgcttactctggctgagactttgagaagtatcattttcattatcagaaatttttaagtaaataaacttaaaacatcaactactattctagatataattattaagaatcgatagagccagagaatgcaacagaatgatgatcgtagatattggctgagtgactaaaatcttctttcttcctacactagagatcaagttgaactcaggtcatcagtttcaagcctttactctcagctttggaccaaatccacctgctagtgtgactctaattcattagtaatgcagttgtcattaatatactaagagaacagtgcttctggtgttacgtgttgctgttgtggttagctctagaaagtagacagtctccaccagaattagtgatttgttggctcctccattacagttgtctgttgtaaagtagtgactcctgattgcaagaagattggacggtgaccactggggcgatacaccctgaggatgtgtttgggaactcaaggggagctaaactcccaaggct

SEQ ID NO: 102895 - DNA, 506 bp, Homo sapiens
tacccaggttatggtgagttttctgttttcggattacagaagccatatatattctttactccttttctcattcccgaaattgctggttaaatttgttcttgcttactaaataataagttaacggtaaggtagtcagcaaatgaaaagaaaactctaaatagtttatttgctgactataattgagtataaagtttgatgagaataaacaagatcctaatatcatccatgtctctctgtcatataggaacttccattagaagaaatggtcaggctgggcaaggtagatcatgcttgtaatcctagcactttgggaggctgatgcagaaggatggcttgagcccaggagttcaagaccagcctaagcaacacagacctcatctctattaaactttttttttaaaagaaagaaaaaaaggctgggtgcggtggctcacacctataatcccagcactttgggaggccaaggcgggtggatcacctgaggtcaggagtttgagaccagcctg

SEQ ID NO: 102896 - DNA, 396 bp, Homo sapiens
caattccataatttcctatatttgtcttctcccccaaaagttgggccttttatcctaaaccagttactatgttgggacagagctttcaccatgtaatattccagtctgtggtaggttacttcatcttggacccttgttcttacctacaaattagtaagtgggtgaaaattttacataaggttatacattaggccaacttgttcccagttggctaaatccaggatgttcaaaacatacatggagctgaaccacttctaaacaaacagctacatcgtcttggggatggtgaagatgctgaaatggttggtcatgagtggaagaccatcataagcatcggctctaagtgaagcagatcaatctaatcttaacccattactgcttaaaggggtttaattg

SEQ ID NO: 102897 - DNA, 362 bp, Homo sapiens
ccaggagctcgataccagcctgggcaacatggcaagaccttgactctacaaaaaataaaagattagccgggcatggtggttgtgcctgtagtcccggctctggaggctgaggggggaggatcgcctgagcccgggaggttgaggctgtagtgagctgtgactgcaccactgcagtccggcctgcggaacagagccagaccctgtctccaataataataataacaataatcatctaagttcacgtaattgatgtaaatctttggcaaatgagactaataatttgggttttaaaaagctatgtcttttcttcagtttctttttattattatactttaagttttagggtacatgtgcacaacgtg

SEQ ID NO: 102898 - DNA, 716 bp, Homo sapiens
ctatttccctaattttatcatttcacatttccggagtctagctggacgaggtattgaggaaacttttctgatctgctgaaacctcaggatggacattcatgttaatggcaaagtgcatttgaggaagaaagtgaggaaaggagggggcaacatagccagccccatctatacaaaaatacaaaaattagccaggtgtggcggtgtgcacctgtggtcccagctactcaggacgctgaggcaagaggatcacttgagcccagggaggtcaaggctgcagtgacccgagattgcaccactcaaatgatcctcctgcctcagtctcccaagtagctgggactacaggcacactccatcatgcccagataatttttttttggagaccgagttgctcttgtaacccaggctggagtgcagtgacactatctctacctcccaggttcaagcaattctcatgcctcagcctcccgagtagctaggattacaggcgcctgccaccacacccggctaattttttatatttttagtatttaggtttttgccatgttggccaggctggtcttgaactcctgacctcaggtgatctgcccgcctcggcctcccaaagtgctgggattacgggtatgagccactgcacccagcccatacccagctaatttttaaaattatttttgatagagatggaatctcactatgttgcccacactgatttcaaactc

SEQ ID NO: 102899 - DNA, 692 bp, Homo sapiens
gtgttacaggggaggggaggctgtgtgctgcagggtccagagcagtggtcctgcggggatggagtctcatctctctcctgctctcctctgtggctatccactgtgtccctcttgtcagcgcatctgtcccaagtcactttgcaggtttttgtcactggctgatgaagagcaggtggtcatggggaaggaagggaggctgagaagtatggggtgtgcagagagcaggagccctttctggacactgtgcccaccctgtggccttcccactggaagagaaacacctcattggggagatcagaacaaatatctaaccatcatctcgcacttcaccttcagcccacagtggctctgggcgggcaggggatgcgggctcccggccacctcctcgcctgtgtggggagctgctatggtgtttaagcaggcttccctccctgaccctctccctgtgatcagatgtcacaggtctccaaattccaccatgagaggttcattcttttagttgcctcctcccatttgatacattgctttttataattaaataaaaataaatgttgttcatgtataatttcatgattttaaccatggaactatattctatgtgtggcaaccaccaccacaatcagggtacagaacagttccaccgcccccaaaactacatcatgctgctctttgaagtcacacctactacccac

SEQ ID NO: 102900 - DNA, 387 bp, Homo sapiens
tggcaggagcccctgagcctgacttataccccttttactctcacctcttggttcctggatttgtgcattctctacagcagagatgacaccatatacttggctgcccaacctatgaacagaactccaacctctcagggtgttatctcttggcttgcaccctggctgaggcttcatcaggacatttcatcattctgtcaaactggttgctactagagggtgcaggtgatgtgatccatgaattatatgtattgagcccactgtctcacttcctttgctaaaaaatggttaggagatagttttcacaggaaaccttggctatatatcagttgcactataagtccatgaatgatggtgcttgcagaggcactgaaggcagggaagacatat

SEQ ID NO: 102901 - DNA, 356 bp, Homo sapiens
gattccaaagcctttattatttctgctataccacactattattcatctattataaatctctcattacacagaagagaaaattgcacccccttaaatgcttttgaactagcagacttggaaaacagtaacttttatgacagtttcactggttaaatatttgctctggtccaatatttcataagttaattttgagcaaaatccatactctacgatatggagttccctattaggtgggaaaggatgctttcaaccaggacctcatcaagggagctttcctggaacccagaaggagatcctatcacccatcagattgccagaggatgaaatttcttagaagcccctctcacatcatgctc

SEQ ID NO: 102902 - DNA, 461 bp, Homo sapiens
agaaggggtcccacagtaggccgtctgcaggctgaggagcaaggaagctaatccaagtcccaaaacggaagaacttggagtccgatgttcaagggcaggaagcatccagcacaggagaaagatggaggccacaagactagtctagtctttccacattctcctgcctgcttttattccggccacgctggcagctgattagatggtgcccacccagattgagggtgggtctgcctttcccagcccactgacacaaatgttaatctcctttggcaacaccctcacagacacacccagaaacaatactttgcatccttcaatccaatcaagttgacactccgtattaaccatcgcaagttgagtgcaaaatctcaagaacagctaacagggacagacccaaaattcactggcaccctagaaaatgtctggatttgctagaatcacctaattctgtatccctgggc

SEQ ID NO: 102903 - DNA, 246 bp, Homo sapiens
aaatggaggatccctttctctgatcgctcagggcacagccttcctcaagagggaccctcagaagtctctcagctccttgtccctgtcacctcctggcctcttacctttcatcacatctccagtttcagaagggctgtcgcctctactctcagattccagctccacctcctctgggtcacattccctcttttcttttttcttttctttttttttggacagagtcttgctctgtcgcccaggctggag

SEQ ID NO: 102904 - DNA, 156 bp, Homo sapiens
gagatcgcgccattgcactccaacctgggcgacagtgagactccatctcaaaaacaacaacaaacaaacaaaaataatactgcgatttcctagcaatgcccagtgacttaccctaaattcagtgaaagttgaaaaaaaaaaagaagtggcatttga

SEQ ID NO: 102905 - DNA, 377 bp, Homo sapiens
ccccccaaagtcttactttttaaattatgtttgccttgggggcattttataaattggcttgcatttctgagtacaaacctatggggaaacctgataaaatgcaaattgttgatttgtgtgaaggtaatcctgttaatcccacagtatctcttattttattagctcttcccatgagagagcaaggaacccatgctaaggcacaagagttaagcatttggatggcaattaaaatcaacagggctgggcgtggtggctcatgcctgtaatcccagcactttggaaggccgaggtgggtggatcacctgaggtcaggatttcaagaccagcctggccaacatggtgaaaccctgtctctactaaaaatacaaaaattagcc

SEQ ID NO: 102906 - DNA, 400 bp, Homo sapiens
actcctgagtaatgatcagaatggaaggggtgggaggttatatagccctattttgagaattcaggattccaccctgaccaattttaggcatgatgtttctttttaccccctagtaacaacccaaggccagcctggttggtatctatcttctatgtggcagctaggccaaaagatggcttaaggaattcagacttaattcttgttcagttacctagattctcttgttgaattgatattattctaggtcatcaggatagtgactatttggttgagtatactgcttgctgagtctctgtatggtagacagtggggaccataatgggtttctgtaggttttatgcaaattcccttgaccctcttgcgcctgacatttccagatgaaaggtctgggtgttgtgag

SEQ ID NO: 102907 - DNA, 555 bp, Homo sapiens
ctaatttttgtatttttagtagacacggagtttcgccatggctggtctcgaattcctgacctcaagtgatctgcccacctcggcctctgaaagtgctgggattacagatgtgaaccaccactctcggcctattacttaattctgaaaacaatcatgcaaggtaggaattcgagaccagccatggcgaaactccgtgtctactaaaaatacaaaaattagccaggtgtggtggtgcatgcctgtaatcccagctactcggggctgaggcacaagaatcacttgaacgtgggaggtggaggttgcagtgagccaagatcacaccattgcactccagcctgggcgacaaagcgagacccccccatcctcaagaaaaaagaaaaaacaagaagaaacaaaaaaaacaaacacaaacaaaaaaaacaaagaaggggggggggccgcgccctatagaaaaaatatatcctccgctggaggggccccccaggtgtatgtcgcgcgcggtcacccgcgagcttttttcgtggtgccaacaagggggggcccccccataaggag

SEQ ID NO: 102908 - DNA, 269 bp, Homo sapiens
ttatagtaaaaagtcagttctcgaagaatatacatgtttaatgcaattcctatcataatcccagcaaaatttttaatgaatataaacaaggttattttaaaatttatattgaaaggtgaaggaactagaatcgttcaaagaatcttgtagactgagtgtggtagctcacatttgtaatcccagtgcattgggaggtcacagtgggagggtggcttaaggccgggagttcaagaccagcctgggcaacatggagagattccttctctacc

SEQ ID NO: 102909 - DNA, 529 bp, Homo sapiens
gtaaaagaagaagagattttacttgaaactttgctttttctaatacaaacagagaaaacagctgaggtgtgaatgtgttgttaatttgggatttcagaatatatttatcatgtatatacattttaatagtttacaagtatttagctttttgactcatttgaatacgttgctaaaattgtatgtatctaaaaccgtggcatcccatcacatgatctttaaaaacaattcagcctttggtattacttggttcaaagaagtaatgataacatttcagatattgaggtatttttgttaaaatggactgaaattgattcaaaattgactttataggtcatttagttttgtttatgaaaatcatcttgggagatgttgatacgtacacaatatttactgttggactgaggaaagaaagtgagccacagaggagtttttgccaattaatttgaataagcagctgccctggatttgagtagctgattgttaaaggaaaaagttggattaaaatcagtgtttcttaaactagtggtta

SEQ ID NO: 102910 - DNA, 399 bp, Homo sapiens
tggcacatacctgtaattccagctactttggagactgaggcagaacaattgcttgaacctgggaggcggagcttgcagtgggctgagatggtgccactgtgctctagcctgggcaacagagtgagtgagactctgtttcaaaaaaatatatagtaataatccacctagtaacagtgaagttttgtgtgaaggaaaggtgatattttggaattttgatttacatggtttgatttgtagtgttataaaattaaatttgggatagagcagttttggaatatatctgaaggagttacaaaagtaccagtgggagagaattaaacattggttttatgttaatagtttttccccatactgtgggaacccaccaagagaattgcttggagccaggagtttgagacc

SEQ ID NO: 102911 - DNA, 409 bp, Homo sapiens
tctaattttcacatgtcaggaagtggtattctttttatttttttcccaaccatttaaaaatggaaaaaccactctgaggtcataggccatgtaaaaacaaacagcaggccagatatgacccatgggctgtggcttgctgaccctgttttagatgatacattcacagcaatgcagcctgtgattgtactgcacagctacaaacaacccaaaagctactgactcacattcaacctgctgtcagcttaaagccctttggacctgtgctggggtgtgtttccccatcttctgaagggaagagagggccaggggtttcactcactctcaagtttcccggtggagaggccttcctggaggtggggttctggctcccctactaccgcctttactccttcctgaaggtgagagattg

SEQ ID NO: 102912 - DNA, 187 bp, Homo sapiens
ggttcccacagaacctggcactgcctggggcatagtgaatgcttagtgagtgtcagccaccaccatcgctgttgacctcatcaccaggggtagtggtgggttggataccattgtgttggaatttctcgaatttccacagaacagaccgcctagaatcgaatccctgggaagtctgaggaccacacac

SEQ ID NO: 102913 - DNA, 310 bp, Homo sapiens
tgagaaatttctctggcttacggtgcctccctcttcctggccttgacttgatttttagatcttttattggacatttatagcataatcactaacacttctgagatatttagaagtctattactaaattatgtttcacaattttatttagttgctttattagcttgtgataatgaagtttaagtgtttgaaggaggaacagtatatttactgggtctgaagcaggagtggcttaaattgtgtattagacaatttgattattatctattgacatctaccatttgccagaagcttctggggatacaatggtgaa

SEQ ID NO: 102914 - DNA, 325 bp, Homo sapiens
gcttatgagagacccagcgcccagggctttttctgggggctggccacatacgcaccctctgtgtagcgtatgccaaaattccgactcccagaaggaaaacagatgttcctcataaagaaaacacattgtgcaaacagtgtagggacggtaagccaccttaccagtttgggaatgggagggataaacttgaaatccaaattcccaggctgggcgcggtggcttacgcctgtaatcccagcactttgggaggccgaggcaggcagatcacttgaggtcaggggttcgagacaggcctggctagcatggtgaaaacccatctctacta

SEQ ID NO: 102915 - DNA, 334 bp, Homo sapiens
ttgtatcatgcggatgaggcctccaggcagcaggcttgagagagaacagactgtaaatgcttcgtatcagacttaaggtctgtgttgatgttaatgttacaggctacgataaggcatgtcagacggaccgccacttcccgtcatggcctgaaccagtctttcaggggaaattttagagtgccctggccaaggagggagtccatccccatggttcagggggcctttgaattttatttttgatttacaggtctttacttcaggtggcacaattttcctaggagacagttgatttttgattccttataaaacgtgctggttttgtttttagctgaca

SEQ ID NO: 102916 - DNA, 770 bp, Homo sapiens
atgctttccatttttttctttacttatctctcaaaacaatattactttgtcttttcaatcttctacttttaactaataaaataagtggattttgtattttaagatccagaaatacttaacacgtgaatattttgctaaaaaagcatatataactattttaaatatccatttatcttttgtatatctaagactcatcctgatttttactatcacacatgaataaagcctttgtatctttctttctctaatgttgtatcatactcttctaaaacttgagtggctgtcttaaaagatataaggggaaagataatattgtctgtctctatattgcttagtatttccatagtcaatgatggtttaataggtaaaccaaaccctataaacctgacctcctttatggttaatactattaagcaagaatgcagtacagaattggatacagtacggatttgtccaaataaattcaataaaaaccttaaagctgacttcgtttgttatgtaggctgtatgcatatattgaaaacagaagtgaaactttcgattgcttttaaataaataccaactaatgaatttactgctaagctcaaaaccgtctacgcttaaggtgagaatctttgccaacagaaaggcgttgctctaaatcgcgaatggtattacgaagaattgcaatctccttgtttttttcttcttgaaaatgctgaagtttctaaacgaaacaaaaaatttgttattagaattcagaaataataaaatttagtacaaggaacaac

SEQ ID NO: 102917 - DNA, 345 bp, Homo sapiens
tcataatggcaataatgtgtagatagtcatgcaatctacaaatagtgatagctttacttcttcctttccaatctgtgggccctttttttcttgccttattgcactagctaagacctccagtacaatgttgaatagaagtggtaagagtcaacacccttgccttatcccactcttatgggaaaagagtttaacattttaccactaaatatgttacctgtagatttttcatagctgacctcataacaggttgaagaaatccccatctagtcctggtttactgagagtgttgagttttgccaagtgcattttctctacatatttagatgattacatatgttccccata

SEQ ID NO: 102918 - DNA, 85 bp, Homo sapiens
gtaattacttccccttcaatgttctcatctgtgaaatggacaacagcacctaccaagagctgggctgttgggaggaacagaggag

SEQ ID NO: 102919 - DNA, 318 bp, Homo sapiens
gtaatttcttctttgactcattgattattgaggggtttgtggtctaatttccacatattcatgaattttcgaaatttccttctagtatagattttctactttaattctatttaggtcaaataacatactttgtgtgattttaatccttttacttttatcgaggcatgttttagggcatagcacatagtctgtcctatcctggggaaatgttccatgtgtgcatgagaagaattctcctcttgttgaatggagtgttccatagatatctgttaaatctagttggtttatagcatttttcaagctgtttcctgattgaac

SEQ ID NO: 102920 - DNA, 409 bp, Homo sapiens
ttcttggagccctcattatatctaaagtgaagaaaatacctcagttactgcagggtctctttggtaaattcagggatttcccacttgccttcacttggattgcttttatgacttaggtgactcaggtagggatgagtcaagggagaaattggcgatttgtctggtcctcagtgttcatttcctccccatgacttttggtgtctgtgtatggtccctactggcaggtagtagggactgctcttcctacactgcatccacagagatgtccccattcccaaatccacagggttacctgctgtcccatgtctctgtccctttgtgggcattgctttctctgccagctctttcttctctgttgagctctgtaccttttttggggacaaggaaaatgttggctgttgcaaaaagc

SEQ ID NO: 102921 - DNA, 188 bp, Homo sapiens
aaaccagataaaacatctttgacgtgggagctgcagtactgagcccacagcccacactccctgctcatcaccccagctcatcacaccatcacagtcctcactctgcagacagggacactgaggcccaggggtgagtagctcccaggctcacctggctggaacctggaggaggaatgtttcagcaccag

SEQ ID NO: 102922 - DNA, 525 bp, Homo sapiens
taagatgtttgttcttgaaaggttcttttgttgtgagatcagcaacactagcacttcactattatagttttttaaaaagtgtattattcttatctgtagttatgtctgagaagtcctttacaagctgtttataaggagagtagcttctttgtgtgtgtgatgtttgtgcgtgtgatgaatttagcaaattaagttattttcctaaaaaaaaaagaaaaaaagaattcagaactactttcctctgtgacaccaaaaagaaaagtctataacctgaaaatgtttcatgttctctgctgtgaaactcttaaaacaaggagtgtattttagagacaagggaaaaaaaccacatctgctatccaaagattttagtctttttcagggtttttttgtgtctctgttgctttatataatgcaatattttgtagtgaaaatagatataatctggtttctatctgacgagtttttcatatctcatgaatggtgcgctgttttgcatataaataaaggtatcaaataaagtcctct

SEQ ID NO: 102923 - DNA, 387 bp, Homo sapiens
tggaaaccgagtcttgctcagtctcccaggctggagtgcagtggcgcaatctcagctcactgcaagctccgcctcctgggttcacgccattctcctgcctcagcctcccgagtagctgggactacaggtgcctgccaccacgcccggctaattttttgtatttttagtagagacggggtttcaccgtgttagccaggatggtctagatctcctgacctcgtgatccgcccgcctcggcctcccaaagtgctgagattataggcgtgagccaccgcaccccgcctgtatttggatttttctatcctaacttttctttaataatttgatccactgttcaacagcaatcagcaaacatctatttactcagtaacattcatcaagcctttc

SEQ ID NO: 102924 - DNA, 397 bp, Homo sapiens
aagatggtggtgtgtgtctgtagtcccagattctcaggaggctaaggtgggtggttcttctgagcccgggaggttgaggctacagtgagccatgatcgcaccactgcacttcagcctaggcaacaaagctagaccttgtctcaaaataaaatattatgtaagtgatattatgtccttctcagtgccttacatcagaaggataataatgttctgttatgactgatgttaatgttgattccttggttaaagtactgtctgccagctttcctcactgtaaaagctctccttttataatttgtggggagatactttgagattttgcatacatactgtttctcatcaaatttttacccaatagttttagcatgttttgatgttcataagtattttaatacaa

SEQ ID NO: 102925 - DNA, 213 bp, Homo sapiens
ctgctgccttccccaggctcccaggctgcaccacacggggcctgcatgttccttctgactggcacaaggtactctccatgccactgctccttgctcatctcctgtgcctctggcgagtcccccaccgggccaccacttccctcaggaaggcctctccgactgcccagaccagcaaggggcttctcagagttctccagtctctggcctcccact

SEQ ID NO: 102926 - DNA, 440 bp, Homo sapiens
agatttaacactgttattcctgcaaaatttccacactgcctttcttccctacttaaacactctctgatctttgactccaaacttatgaaatcccatttcatgtataaagacttcctgaagcaatcagaatacatagagccaatttcaactctacctccatcattaaggcaaatcacttagtctgtaacatctacttggcacctatcttggagagactgcacatccataaaatcatatggagagcaaccctaaactgagaataaattaagacaggatgaattaagtaccaaaatcctgagagcctggtgggaaatacagttaggcataatcagttgctaaggaagcatttatgagtgagggtggtaatcagaatgaaaaggcaaggagaaagaggaggaggaggaggaggaggaggaggaacaggtattgcagcaaattta

SEQ ID NO: 102927 - DNA, 3830 bp, Homo sapiens
aaaaggcaggcattctctttccttttccttctctcctgagcgctcctgcagttcctggggcgtagtaggggatccacaagcgtttgtgaccagtgaagttctttacaagggtgagatctgcacgggaggacccgagcgagggtctcggcttgccaggaagccggggttccccgggaagcgtggagttcacccgcgcactcgaagtgcctttgcaaaattatatctgggtgttggcacccagccactattctgccaatgaagtacatcctggtcacgggtggggtcatctcaggcattggtaaagggatcattgccagcagcattggaacgattctaaaatcatgtggactccgagttactgccataaaaatcgacccctatattaacatcgatgctggcactttttcaccttatgaacacggtgaagtcttcgtcttaaatgatggtggagaagttgatttagaccttggaaattatgaaagatttttggatattaatctttataaagacaacaatatcaccacggggaagatatatcagcatgtgatcaataaagagaggcgtggtgattacctggggaaaacagtgcaagttgtccctcacattactgatgctgtccaggagtgggttatgaatcaagccaaggtgccggtggatggtaataaggaagagccccaaatatgcgttattgagctgggaggcaccattggagacatcgaaggaatgccgtttgtggaggcgtttagacaattccagtttaaggcgaaaagagagaatttctgtaatatccacgttagccttgtcccacagctcagtgctaccggagaacaaaaaaccaaacccacccaaaacagcgtccgcgcactgaggggtttaggcctgtctccagatctgattgtctgccgaagttcaacgcccattgagatggccgtgaaggagaagatttctatgttttgtcacgtgaaccctgaacaggtcatatgtatccatgatgtttcttccacataccgagttcctgtgcttttagaggaacaaagcattgtgaaatattttaaggagagattgcacctgcccatcggtgattctgcaagtaatttgctttttaagtggagaaatatggctgacaggtatgaaaggttacagaaaatatgctccatagccctggttggcaaatacaccaagctcagagactgctacgcctctgtgttcaaagccctggaacactcagccctggccatcaaccacaagttgaatctgatgtacatagactccattgatctggagaagatcactgaaaccgaggaccctgtgaaatttcatgaagcttggcagaagctatgcaaagctgatggtattcttgtgcctggaggctttggaatcagaggaacattgggaaaactccaggcgatttcttgggcaaggacaaagaagattccttttctgggagtttgtcttgggatgcaactagcagtgatagagtttgcaagaaactgccttaacttgaaagatgctgattccacagagtttaggccaaatgccccagttcctctggtgattgatatgcccgagcacaaccctggcaatttgggaggaacaatgagactgggaataagaagaactgttttcaaaactgaaaattcaatattaaggaaactttatggtgatgttccttttatagaagaaagacacagacatcggttcgaggtaaaccctaacctgatcaaacaatttgagcagaatgacttaagttttgtaggtcaggatgttgatggagacaggatggaaatcattgaactggcaaatcatccttattttgttggtgtccagttccatcctgagttttcttctaggccgatgaagccttcccctccgtatctggggctgttacttgcagcaactgggaacctgaatgcctacttgcaacagggttgcaaactgtcttccagtgatagatacagtgatgccagtgatgacagcttttcagagccaaggatagctgagttggaaataagctgaaatgaatacatgactgggaataatggggactgcctgtgaggcctctgaaataattgaaggcaagatgaaggaactatctgaagaaatcactacactcttagagaatccctctgttctccagcaaacatgggatgtaaagcctcacagggaatctgataatacatacttctgtcaaccagaaccagaggggtagttttcttttccctccagaggcagcctttggtacttaaaatatctgtagctgattaaatttttcccaacaacctcactggggagaaagtgtgttcatgttttgtccagcggatcaggatgttaggatgacgagcaagagtccaggtcactgtgcctttgctgtgttgtatggaaaggatggcagggaacatgctgtaagtaattttgagtaagaaaatgagtcactgtgttacctggaactcagccacagatttgtgtgtggtccaagatcattgcagtttctcaccctgtttatttcctggtaaaagtaaaattgaataggtccaagacttgggggtggcaagtaaggctttgcctcaggcacaaaatttaagggggctccaaaaaactcaggaatcaagatcagcaatacagtctgagtatcccttatgtgaaatgcttggggctagaagtgttttgaatttcagattttggaatatttgcatatacatgcgatatcttggggatgagactcaagactaaacatgaaattcatttatgcttcatatacaccttatatacatagcctaaaggtaatttgatacaatattttaaataattttgtgcatgaaacaaagtttcgactgcattttgactgtgatttctggcatgagatcagttatggaattttccacttctagcgtcatgttggcattcagaaattttgaaattttggagcattttggattttcagattagggatgctcaacctgtatatatattttttaatcgacgtgaaattcacgtaacatagaattaaccattttgaagtgaacaatttggttgcattcactgatgttgagcaaccaccacctttaactatttccaaaacattttcatcactccaaaataaatgcctgtacacactagcagtcactccctatcttcccctccacctgtccgctggcaaccactgatctcctttttatttctgtggctttttctattctggatatttcatataagtggaattacacaatatatgtggtcttttgtgtctggcttcttctgagacagtaggaagggggcttggctttggctcacccccactagagcattttttcatgcattcccactgatcacaaaacccatactactacctcattgacaccatacctgctaacctcgaggctttagtcatacaaagaaaatggcctttctgtattgttcttctgtgctctcataatgcttaaccatgtcttttacttaaacaattccaggaactggccttaggagatccaaatagggaaccaagattgcagagtgtcccatcttgggagggaatgctgaataattaattgatttacagccttgttgccgctggccagaccaccaggtggcccattactcgagatgatcatcacaaccagatgatgctaacctatatcctctacccttcgcgtgctttgtctgggaagtcttttggccccatgtcagtttctattgcattgagagcccaagagcccctggtcagtcaggcttccatttagcatggcgtttgcaaggtttacccatgttgtagcatgtgtcagaatttcattcctttctatggctgaataaaattccattgtatgaatatacca

SEQ ID NO: 102928 - DNA, 2284 bp, Homo sapiens
aaaaggcaggcattctctttccttttccttctctcctgagcgctcctgcagttcctggggcgtagtaggggatccacaagcgtttgtgaccagtgaagttctttacaagggtgagatctgcacgggaggacccgagcgagggtctcggcttgccaggaagccggggttccccgggaagcgtggagttcacccgcgcactcgaagtgcctttgcaaaattatatctgggtgttggcacccagccactattctgccaatgaagtacatcctggtcacgggtggggtcatctcaggcattggtaaagggatcattgccagcagcattggaacgattctaaaatcatgtggactccgagttactgccataaaaatcgacccctatattaacatcgatgctggcactttttcaccttatgaacacggtgaagtcttcgtcttaaatgatggtggagaagttgatttagaccttggaaattatgaaagatttttggatattaatctttataaagacaacaatatcaccacggggaagatatatcagcatgtgatcaataaagagaggcgtggtgattacctggggaaaacagtgcaagttgtccctcacattactgatgctgtccaggagtgggttatgaatcaagccaaggtgccggtggatggtaataaggaagagccccaaatatgcgttattgagctgggaggcaccattggagacatcgaaggaatgccgtttgtggaggcgtttagacaattccagtttaaggcgaaaagagagaatttctgtaatatccacgttagccttgtcccacagctcagtgctaccggagaacaaaaaaccaaacccacccaaaacagcgtccgcgcactgaggggtttaggcctgtctccagatctgattgtctgccgaagttcaacgcccattgagatggccgtgaaggagaagatttctatgttttgtcacgtgaaccctgaacaggtcatatgtatccatgatgtttcttccacataccgagttcctgtgcttttagaggaacaaagcattgtgaaatattttaaggagagattgcacctgcccatcggtgattctgcaagtaatttgctttttaagtggagaaatatggctgacaggtatgaaaggttacagaaaatatgctccatagccctggttggcaaatacaccaagctcagagactgctacgcctctgtgttcaaagccctggaacactcagccctggccatcaaccacaagttgaatctgatgtacatagactccattgatctggagaagatcactgaaaccgaggaccctgtgaaatttcatgaagcttggcagaagctatgcaaagctgatggtattcttgtgcctggaggctttggaatcagaggaacattgggaaaactccaggcgatttcttgggcaaggacaaagaagattccttttctgggagtttgtcttgggatgcaactagcagtgatagagtttgcaagaaactgccttaacttgaaagatgctgattccacagagtttaggccaaatgccccagttcctctggtgattgatatgcccgagcacaaccctggcaatttgggaggaacaatgagactgggaataagaagaactgttttcaaaactgaaaattcaatattaaggaaactttatggtgatgttccttttatagaagaaagacacagacatcggttcgaggtaaaccctaacctgatcaaacaatttgagcagaatgacttaagttttgtaggtcaggatgttgatggagacaggatggaaatcattgaactggcaaatcatccttattttgttggtgtccagttccatcctgagttttcttctaggccgatgaagccttcccctccgtatctggggctgttacttgcagcaactgggaacctgaatgcctacttgcaacagggttgcaaactgtcttccagtgatagatacagtgatgccagtgatgacagcttttcagagccaaggatagctgagttggaaataagctgaaatgaatacatgactgggaataatggggactgcctgtgaggcctctgaaataattgaaggcaagatgaaggaactatctgaagaaatcactacactcttagagaatccctctgttctccagcaaacatgggatgtaaagcctcacagggaatctgataatacatacttctgtcaaccagaaccagaggggtagttttcttttccctccagaggcagcctttggtacttaaaatatctgtagctgattaaatttttcccaacaacctca

SEQ ID NO: 102929 - DNA, 1371 bp, Homo sapiens
ggaacttagcaaggcctgtttattcagattcttccctgggatcctgtgtcttcagagataaggatactcgtttcctctgggtatgggggttgggggtacctctcacctgagggccttttgacctgcttggagaaggtcagaaaatccttccggggtgttatgacctgcttcagtgggggaaggtcagaggaaggtcagagagaacttcttgcacatgctgtctcaaattccttccgcttcatgcaatgtatatgtgggggctgttatggttagagtcataatagtctaggtcaggggttgacagactttttctgtaaggttagagagtaaatatgttaggcttatgagccatacgcaatatgccaagatgccatattttggggtagtgtgtcctgaactccctcattgccaaaggaaacagttgtcatcagaagaatgaagaatgaaaaaaacaaactgaagatccaggtaatatcgtatgctatgttattacattgaagaacaaattgacatcagtaggagtaggactaagtgatgctcaacctcagatggactgaggtttagtccctagtatgacaagagtagattcacagaaaataaatgggtccatcaactcaggctttcattttaaatcagtttgttaatataacacctctagtagaaagcaagcaatagttaaggtggcaggaaggcaatctactttcaaggcttttattaaagtttagaaatgatcagtggtcttcagaagattataaatttcagtctaaactgaaatgcgtttttaattttctgaataagtaacttccagtttacgatgaaaataagtgatcagtttctctgaccaaagaaagaggccattgcatgtgattggactgacctcttcctgtggtgactagaaagtgctaaaagaatattctttagtattttctctcatactaaggggttaatatggaatgtgtttgaaattgcaaattgaataattgtccaggttttttttttataccttgctaaattagttcctcttttaatctagtgatagatacagtgatgccagtgatgacagcttttcagagccaaggatagctgagttggaaataagctgaaatgaatacatgactgggaataatggggactgcctgtgaggcctctgaaataattgaaggcaagatgaaggaactatctgaagaaatcactacactcttagagaatccctctgttctccagcaaacatgggatgtaaagcctcacagggaatctgataatacatacttctgtcaaccagaaccagaggggtagttttcttttccctccagaggcagcctttggtacttaaaatatctgtagctgattaaatttttcccaacaacctca

SEQ ID NO: 102930 - DNA, 3938 bp, Homo sapiens
agcggagggtgacgggagctgcctgtgctggaggaatcactttttaggcgcttgttttggaccattgcacaaacccgggtgcaaaccccaagctcaccagcgtgagtgagctgggccagcagcagggaggagaggggaaggtgggcgaggagggcgccgcgcaccccgaggcccgtgtgggcggtgggaagatcccgggggcggctttggacagccccggcagcgaccccttccccagcccgacaggtgagcgccaggccagccgcggggtggagcccgccgtgcccaccggccaccctccccggtgctaccaccaccgcgcagattatatctgggtgttggcacccagccactattctgccaatgaagtacatcctggtcacgggtggggtcatctcaggcattggtaaagggatcattgccagcagcattggaacgattctaaaatcatgtggactccgagttactgccataaaaatcgacccctatattaacatcgatgctggcactttttcaccttatgaacacggtgaagtcttcgtcttaaatgatggtggagaagttgatttagaccttggaaattatgaaagatttttggatattaatctttataaagacaacaatatcaccacggggaagatatatcagcatgtgatcaataaagagaggcgtggtgattacctggggaaaacagtgcaagttgtccctcacattactgatgctgtccaggagtgggttatgaatcaagccaaggtgccggtggatggtaataaggaagagccccaaatatgcgttattgagctgggaggcaccattggagacatcgaaggaatgccgtttgtggaggcgtttagacaattccagtttaaggcgaaaagagagaatttctgtaatatccacgttagccttgtcccacagctcagtgctaccggagaacaaaaaaccaaacccacccaaaacagcgtccgcgcactgaggggtttaggcctgtctccagatctgattgtctgccgaagttcaacgcccattgagatggccgtgaaggagaagatttctatgttttgtcacgtgaaccctgaacaggtcatatgtatccatgatgtttcttccacataccgagttcctgtgcttttagaggaacaaagcattgtgaaatattttaaggagagattgcacctgcccatcggtgattctgcaagtaatttgctttttaagtggagaaatatggctgacaggtatgaaaggttacagaaaatatgctccatagccctggttggcaaatacaccaagctcagagactgctacgcctctgtgttcaaagccctggaacactcagccctggccatcaaccacaagttgaatctgatgtacatagactccattgatctggagaagatcactgaaaccgaggaccctgtgaaatttcatgaagcttggcagaagctatgcaaagctgatggtattcttgtgcctggaggctttggaatcagaggaacattgggaaaactccaggcgatttcttgggcaaggacaaagaagattccttttctgggagtttgtcttgggatgcaactagcagtgatagagtttgcaagaaactgccttaacttgaaagatgctgattccacagagtttaggccaaatgccccagttcctctggtgattgatatgcccgagcacaaccctggcaatttgggaggaacaatgagactgggaataagaagaactgttttcaaaactgaaaattcaatattaaggaaactttatggtgatgttccttttatagaagaaagacacagacatcggttcgaggtaaaccctaacctgatcaaacaatttgagcagaatgacttaagttttgtaggtcaggatgttgatggagacaggatggaaatcattgaactggcaaatcatccttattttgttggtgtccagttccatcctgagttttcttctaggccgatgaagccttcccctccgtatctggggctgttacttgcagcaactgggaacctgaatgcctacttgcaacagggttgcaaactgtcttccagtgatagatacagtgatgccagtgatgacagcttttcagagccaaggatagctgagttggaaataagctgaaatgaatacatgactgggaataatggggactgcctgtgaggcctctgaaataattgaaggcaagatgaaggaactatctgaagaaatcactacactcttagagaatccctctgttctccagcaaacatgggatgtaaagcctcacagggaatctgataatacatacttctgtcaaccagaaccagaggggtagttttcttttccctccagaggcagcctttggtacttaaaatatctgtagctgattaaatttttcccaacaacctcactggggagaaagtgtgttcatgttttgtccagcggatcaggatgttaggatgacgagcaagagtccaggtcactgtgcctttgctgtgttgtatggaaaggatggcagggaacatgctgtaagtaattttgagtaagaaaatgagtcactgtgttacctggaactcagccacagatttgtgtgtggtccaagatcattgcagtttctcaccctgtttatttcctggtaaaagtaaaattgaataggtccaagacttgggggtggcaagtaaggctttgcctcaggcacaaaatttaagggggctccaaaaaactcaggaatcaagatcagcaatacagtctgagtatcccttatgtgaaatgcttggggctagaagtgttttgaatttcagattttggaatatttgcatatacatgcgatatcttggggatgagactcaagactaaacatgaaattcatttatgcttcatatacaccttatatacatagcctaaaggtaatttgatacaatattttaaataattttgtgcatgaaacaaagtttcgactgcattttgactgtgatttctggcatgagatcagttatggaattttccacttctagcgtcatgttggcattcagaaattttgaaattttggagcattttggattttcagattagggatgctcaacctgtatatatattttttaatcgacgtgaaattcacgtaacatagaattaaccattttgaagtgaacaatttggttgcattcactgatgttgagcaaccaccacctttaactatttccaaaacattttcatcactccaaaataaatgcctgtacacactagcagtcactccctatcttcccctccacctgtccgctggcaaccactgatctcctttttatttctgtggctttttctattctggatatttcatataagtggaattacacaatatatgtggtcttttgtgtctggcttcttctgagacagtaggaagggggcttggctttggctcacccccactagagcattttttcatgcattcccactgatcacaaaacccatactactacctcattgacaccatacctgctaacctcgaggctttagtcatacaaagaaaatggcctttctgtattgttcttctgtgctctcataatgcttaaccatgtcttttacttaaacaattccaggaactggccttaggagatccaaatagggaaccaagattgcagagtgtcccatcttgggagggaatgctgaataattaattgatttacagccttgttgccgctggccagaccaccaggtggcccattactcgagatgatcatcacaaccagatgatgctaacctatatcctctacccttcgcgtgctttgtctgggaagtcttttggccccatgtcagtttctattgcattgagagcccaagagcccctggtcagtcaggcttccatttagcatggcgtttgcaaggtttacccatgttgtagcatgtgtcagaatttcattcctttctatggctgaataaaattccattgtatgaatatacca

SEQ ID NO: 102931 - DNA, 3539 bp, Homo sapiens
aaaaggcaggcattctctttccttttccttctctcctgagcgctcctgcagttcctggggcgtagtaggggatccacaagcgtttgtgaccagtgaagttctttacaagggtgagatctgcacgggaggacccgagcgagggtctcggcttgccaggaagccggggttccccgggaagcgtggagttcacccgcgcactcgaagtgcctttgcaaaattatatctgggtgttggcacccagccactattctgccaatgaagtacatcctggtcacgggtggggtcatctcaggcattggtaaagggatcattgccagcagcattggaacgattctaaaatcatgtggactccgagttactgccataaaaatcgacccctatattaacatcgatgctggcactttttcaccttatgaacacggtgaagtcttcgtcttaaatgatggtggagaagttgatttagaccttggaaattatgaaagatttttggatattaatctttataaagacaacaatatcaccacggggaagatatatcagcatgtgatcaataaagagaggcgtggtgattacctggggaaaacagtgcaagttgtccctcacattactgatgctgtccaggagtgggttatgaatcaagccaaggtgccggtggatggtaataaggaagagccccaaatatgcgttattgagctgggaggcaccattggagacatcgaaggaatgccgtttgtggaggcgtttagacaattccagtttaaggcgaaaagagagaatttctgtaatatccacgttagccttgtcccacagctcagtgctaccggagaacaaaaaaccaaacccacccaaaacagcgtccgcgcactgaggggtttaggcctgtctccagatctgattgtctgccgaagttcaacgcccattgagatggccgtgaaggagaagatttctatgttttgtcacgtgaaccctgaacaggtcatatgtatccatgatgtttcttccacataccgagttcctgtgcttttagaggaacaaagcattgtgaaatattttaaggagagattgcacctgcccatcggtgattctgcaagtaatttgctttttaagtggagaaatatggctgacaggtatgaaaggttacagaaaatatgctccatagccctggttggcaaatacaccaagctcagagactgctacgcctctgtgttcaaagccctggaacactcagccctggccatcaaccacaagttgaatctgatggtgattgatatgcccgagcacaaccctggcaatttgggaggaacaatgagactgggaataagaagaactgttttcaaaactgaaaattcaatattaaggaaactttatggtgatgttccttttatagaagaaagacacagacatcggttcgaggtaaaccctaacctgatcaaacaatttgagcagaatgacttaagttttgtaggtcaggatgttgatggagacaggatggaaatcattgaactggcaaatcatccttattttgttggtgtccagttccatcctgagttttcttctaggccgatgaagccttcccctccgtatctggggctgttacttgcagcaactgggaacctgaatgcctacttgcaacagggttgcaaactgtcttccagtgatagatacagtgatgccagtgatgacagcttttcagagccaaggatagctgagttggaaataagctgaaatgaatacatgactgggaataatggggactgcctgtgaggcctctgaaataattgaaggcaagatgaaggaactatctgaagaaatcactacactcttagagaatccctctgttctccagcaaacatgggatgtaaagcctcacagggaatctgataatacatacttctgtcaaccagaaccagaggggtagttttcttttccctccagaggcagcctttggtacttaaaatatctgtagctgattaaatttttcccaacaacctcactggggagaaagtgtgttcatgttttgtccagcggatcaggatgttaggatgacgagcaagagtccaggtcactgtgcctttgctgtgttgtatggaaaggatggcagggaacatgctgtaagtaattttgagtaagaaaatgagtcactgtgttacctggaactcagccacagatttgtgtgtggtccaagatcattgcagtttctcaccctgtttatttcctggtaaaagtaaaattgaataggtccaagacttgggggtggcaagtaaggctttgcctcaggcacaaaatttaagggggctccaaaaaactcaggaatcaagatcagcaatacagtctgagtatcccttatgtgaaatgcttggggctagaagtgttttgaatttcagattttggaatatttgcatatacatgcgatatcttggggatgagactcaagactaaacatgaaattcatttatgcttcatatacaccttatatacatagcctaaaggtaatttgatacaatattttaaataattttgtgcatgaaacaaagtttcgactgcattttgactgtgatttctggcatgagatcagttatggaattttccacttctagcgtcatgttggcattcagaaattttgaaattttggagcattttggattttcagattagggatgctcaacctgtatatatattttttaatcgacgtgaaattcacgtaacatagaattaaccattttgaagtgaacaatttggttgcattcactgatgttgagcaaccaccacctttaactatttccaaaacattttcatcactccaaaataaatgcctgtacacactagcagtcactccctatcttcccctccacctgtccgctggcaaccactgatctcctttttatttctgtggctttttctattctggatatttcatataagtggaattacacaatatatgtggtcttttgtgtctggcttcttctgagacagtaggaagggggcttggctttggctcacccccactagagcattttttcatgcattcccactgatcacaaaacccatactactacctcattgacaccatacctgctaacctcgaggctttagtcatacaaagaaaatggcctttctgtattgttcttctgtgctctcataatgcttaaccatgtcttttacttaaacaattccaggaactggccttaggagatccaaatagggaaccaagattgcagagtgtcccatcttgggagggaatgctgaataattaattgatttacagccttgttgccgctggccagaccaccaggtggcccattactcgagatgatcatcacaaccagatgatgctaacctatatcctctacccttcgcgtgctttgtctgggaagtcttttggccccatgtcagtttctattgcattgagagcccaagagcccctggtcagtcaggcttccatttagcatggcgtttgcaaggtttacccatgttgtagcatgtgtcagaatttcattcctttctatggctgaataaaattccattgtatgaatatacca

SEQ ID NO: 102932 - DNA, 2917 bp, Homo sapiens
ggaacttagcaaggcctgtttattcagattcttccctgggatcctgtgtcttcagagataaggatactcgtttcctctgggtatgggggttgggggtacctctcacctgagggccttttgacctgcttggagaaggtcagaaaatccttccggggtgttatgacctgcttcagtgggggaaggtcagaggaaggtcagagagaacttcttgcacatgctgtctcaaattccttccgcttcatgcaatgtatatgtgggggctgttatggttagagtcataatagtctaggtcaggggttgacagactttttctgtaaggttagagagtaaatatgttaggcttatgagccatacgcaatatgccaagatgccatattttggggtagtgtgtcctgaactccctcattgccaaaggaaacagttgtcatcagaagaatgaagaatgaaaaaaacaaactgaagatccaggtaatatcgtatgctatgttattacattgaagaacaaattgacatcagtaggagtaggactaagtgatgctcaacctcagatggactgaggtttagtccctagtatgacaagagtagattcacagaaaataaatgggtccatcaactcaggctttcattttaaatcagtttgttaatataacacctctagtagaaagcaagcaatagttaaggtggcaggaaggcaatctactttcaaggcttttattaaagtttagaaatgatcagtggtcttcagaagattataaatttcagtctaaactgaaatgcgtttttaattttctgaataagtaacttccagtttacgatgaaaataagtgatcagtttctctgaccaaagaaagaggccattgcatgtgattggactgacctcttcctgtggtgactagaaagtgctaaaagaatattctttagtattttctctcatactaaggggttaatatggaatgtgtttgaaattgcaaattgaataattgtccaggttttttttttataccttgctaaattagttcctcttttaatctagtgatagatacagtgatgccagtgatgacagcttttcagagccaaggatagctgagttggaaataagctgaaatgaatacatgactgggaataatggggactgcctgtgaggcctctgaaataattgaaggcaagatgaaggaactatctgaagaaatcactacactcttagagaatccctctgttctccagcaaacatgggatgtaaagcctcacagggaatctgataatacatacttctgtcaaccagaaccagaggggtagttttcttttccctccagaggcagcctttggtacttaaaatatctgtagctgattaaatttttcccaacaacctcactggggagaaagtgtgttcatgttttgtccagcggatcaggatgttaggatgacgagcaagagtccaggtcactgtgcctttgctgtgttgtatggaaaggatggcagggaacatgctgtaagtaattttgagtaagaaaatgagtcactgtgttacctggaactcagccacagatttgtgtgtggtccaagatcattgcagtttctcaccctgtttatttcctggtaaaagtaaaattgaataggtccaagacttgggggtggcaagtaaggctttgcctcaggcacaaaatttaagggggctccaaaaaactcaggaatcaagatcagcaatacagtctgagtatcccttatgtgaaatgcttggggctagaagtgttttgaatttcagattttggaatatttgcatatacatgcgatatcttggggatgagactcaagactaaacatgaaattcatttatgcttcatatacaccttatatacatagcctaaaggtaatttgatacaatattttaaataattttgtgcatgaaacaaagtttcgactgcattttgactgtgatttctggcatgagatcagttatggaattttccacttctagcgtcatgttggcattcagaaattttgaaattttggagcattttggattttcagattagggatgctcaacctgtatatatattttttaatcgacgtgaaattcacgtaacatagaattaaccattttgaagtgaacaatttggttgcattcactgatgttgagcaaccaccacctttaactatttccaaaacattttcatcactccaaaataaatgcctgtacacactagcagtcactccctatcttcccctccacctgtccgctggcaaccactgatctcctttttatttctgtggctttttctattctggatatttcatataagtggaattacacaatatatgtggtcttttgtgtctggcttcttctgagacagtaggaagggggcttggctttggctcacccccactagagcattttttcatgcattcccactgatcacaaaacccatactactacctcattgacaccatacctgctaacctcgaggctttagtcatacaaagaaaatggcctttctgtattgttcttctgtgctctcataatgcttaaccatgtcttttacttaaacaattccaggaactggccttaggagatccaaatagggaaccaagattgcagagtgtcccatcttgggagggaatgctgaataattaattgatttacagccttgttgccgctggccagaccaccaggtggcccattactcgagatgatcatcacaaccagatgatgctaacctatatcctctacccttcgcgtgctttgtctgggaagtcttttggccccatgtcagtttctattgcattgagagcccaagagcccctggtcagtcaggcttccatttagcatggcgtttgcaaggtttacccatgttgtagcatgtgtcagaatttcattcctttctatggctgaataaaattccattgtatgaatatacca

SEQ ID NO: 102933 - DNA, 2863 bp, Homo sapiens
ggaacttagcaaggcctgtttattcagattcttccctgggatcctgtgtcttcagagataaggatactcgtttcctctgggtatgggggttgggggtacctctcacctgagggccttttgacctgcttggagaaggtcagaaaatccttccggggtgttatgacctgcttcagtgggggaaggtcagaggaaggtcagagagaacttcttgcacatgctgtctcaaattccttccgcttcatgcaatgtatatgtgggggctgttatggttagagtcataatagtctaggtcaggggttgacagactttttctgtaaggttagagagtaaatatgttaggcttatgagccatacgcaatatgccaagatgccatattttggggtagtgtgtcctgaactccctcattgccaaaggaaacagttgtcatcagaagaatgaagaatgaaaaaaacaaactgaagatccaggtaatatcgtatgctatgttattacattgaagaacaaattgacatcagtaggagtaggactaagtgatgctcaacctcagatggactgaggtttagtccctagtatgacaagagtagattcacagaaaataaatgggtccatcaactcaggctttcattttaaatcagtttgttaatataacacctctagtagaaagcaagcaatagttaaggtggcaggaaggcaatctactttcaaggcttttattaaagtttagaaatgatcagtggtcttcagaagattataaatttcagtctaaactgaaatgcgtttttaattttctgaataagtaacttccagtttacgatgaaaataagtgatcagtttctctgaccaaagaaagaggccattgcatgtgattggactgacctcttcctgtggtgactagaaagtgcttttgaaattgcaaattgaataattgtccaggttttttttttataccttgctaaattagttcctcttttaatctagtgatagatacagtgatgccagtgatgacagcttttcagagccaaggatagctgagttggaaataagctgaaatgaatacatgactgggaataatggggactgcctgtgaggcctctgaaataattgaaggcaagatgaaggaactatctgaagaaatcactacactcttagagaatccctctgttctccagcaaacatgggatgtaaagcctcacagggaatctgataatacatacttctgtcaaccagaaccagaggggtagttttcttttccctccagaggcagcctttggtacttaaaatatctgtagctgattaaatttttcccaacaacctcactggggagaaagtgtgttcatgttttgtccagcggatcaggatgttaggatgacgagcaagagtccaggtcactgtgcctttgctgtgttgtatggaaaggatggcagggaacatgctgtaagtaattttgagtaagaaaatgagtcactgtgttacctggaactcagccacagatttgtgtgtggtccaagatcattgcagtttctcaccctgtttatttcctggtaaaagtaaaattgaataggtccaagacttgggggtggcaagtaaggctttgcctcaggcacaaaatttaagggggctccaaaaaactcaggaatcaagatcagcaatacagtctgagtatcccttatgtgaaatgcttggggctagaagtgttttgaatttcagattttggaatatttgcatatacatgcgatatcttggggatgagactcaagactaaacatgaaattcatttatgcttcatatacaccttatatacatagcctaaaggtaatttgatacaatattttaaataattttgtgcatgaaacaaagtttcgactgcattttgactgtgatttctggcatgagatcagttatggaattttccacttctagcgtcatgttggcattcagaaattttgaaattttggagcattttggattttcagattagggatgctcaacctgtatatatattttttaatcgacgtgaaattcacgtaacatagaattaaccattttgaagtgaacaatttggttgcattcactgatgttgagcaaccaccacctttaactatttccaaaacattttcatcactccaaaataaatgcctgtacacactagcagtcactccctatcttcccctccacctgtccgctggcaaccactgatctcctttttatttctgtggctttttctattctggatatttcatataagtggaattacacaatatatgtggtcttttgtgtctggcttcttctgagacagtaggaagggggcttggctttggctcacccccactagagcattttttcatgcattcccactgatcacaaaacccatactactacctcattgacaccatacctgctaacctcgaggctttagtcatacaaagaaaatggcctttctgtattgttcttctgtgctctcataatgcttaaccatgtcttttacttaaacaattccaggaactggccttaggagatccaaatagggaaccaagattgcagagtgtcccatcttgggagggaatgctgaataattaattgatttacagccttgttgccgctggccagaccaccaggtggcccattactcgagatgatcatcacaaccagatgatgctaacctatatcctctacccttcgcgtgctttgtctgggaagtcttttggccccatgtcagtttctattgcattgagagcccaagagcccctggtcagtcaggcttccatttagcatggcgtttgcaaggtttacccatgttgtagcatgtgtcagaatttcattcctttctatggctgaataaaattccattgtatgaatatacca

SEQ ID NO: 102934 - DNA, 3891 bp, Homo sapiens
aaaaggcaggcattctctttccttttccttctctcctgagcgctcctgcagttcctggggcgtagtaggggatccacaagcgtttgtgaccagtgaagttctttacaagggtgagatctgcacgggaggacccgagcgagggtctcggcttgccaggaagccggggttccccgggaagcgtggagttcacccgcgcactcgaagtgcctttgcaaaattatatctgggtgttggcacccagccactattctgccaatgaagtacatcctggtcacgggtggggtcatctcaggcattggtaaagggatcattgccagcagcattggaacgattctaaaatcatgtggactccgagttactgccataaaaatcgacccctatattaacatcgatgctggcactttttcaccttatgaacacggtgaagtcttcgtcttaaatgatggtggagaagttgatttagaccttggaaattatgaaagatttttggatattaatctttataaagacaacaatatcaccacggggaagatatatcagcatgtgatcaataaagagaggcgtggtgattacctggggaaaacagtgcaagttgtccctcacattactgatgctgtccaggagtgggttatgaatcaagccaaggtgccggtggatggtaataaggaagagccccaaatatgcgttattgagctgggaggcaccattggagacatcgaaggaatgccgtttgtggaggcgtttagacaattccagtttaaggcgaaaagagagaatttctgtaatatccacgttagccttgtcccacagctcagtgctaccggagaacaaaaaaccaaacccacccaaaacagcgtccgcgcactgaggggtttaggcctgtctccagatctgattgtctgccgaagttcaacgcccattgagatggccgtgaaggagaagatttctatgttttgtcacgtgaaccctgaacaggtcatatgtatccatgatgtttcttccacataccgagttcctgtgcttttagaggaacaaagcattgtgaaatattttaaggagagattgcacctgcccatcggtgattctgcaagtaatttgctttttaagtggagaaatatggctgacaggtatgaaaggttacagaaaatatgctccatagccctggttggcaaatacaccaagctcagagactgctacgcctctgtgttcaaagccctggaacactcagccctggccatcaaccacaagttgaatctgatgtacatagactccattgatctggagaagatcactgaaaccgaggaccctgtgaaatttcatgaagcttggcagaagctatgcaaagctgatggtattcttgtgcctggaggctttggaatcagaggaacattgggaaaactccaggcgatttcttgggcaaggacaaagaagattccttttctgggagtttgtcttgggatgcaactagcagtgatagagtttgcaagaaactgccttaacttgaaagatgctgattccacagagtttaggccaaatgccccagttcctctggtgattgatatgcccgagcacaaccctggcaatttgggaggaacaatgagactgggaataagaagaactgttttcaaaactgaaaattcaatattaaggaaactttatggtgatgttccttttatagaagaaagacacagacatcggttcgaggtaaaccctaacctgatcaaacaatttgagcagaatgacttaagttttgtaggtcaggatgttgatggagacaggatggaaatcattgaactggcaaatcatccttattttgttggtgtccagttccatcctgagttttcttctaggccgatgaagccttcccctccgtatctggggctgttacttgcagcaactgggaacctgaatgcctacttgcaacagggttgcaaactgtcttccagtgatagatacagtgatgccagtgatgacagcttttcagagccaaggatagctgagttggaaataagctgaaatgaatacatgactgggaataatggggactgcctgtgaggcctctgaaataattgaaggcaagatgaaggaactatctgaagaaatcactacactcttagagaatccctctgttctccagcaaacatgggatgtaaagcctcacagggaatctgataatacatacttctgtcaaccagaaccagaggggtagttttcttttccctccagaggcagcctttggtacttaaaatatctgtagctgattaaatttttcccaacaacctcactggggagaaagtgtgttcatgttttgtccagcggatcaggatgttaggatgacgagcaagagtccaggtcactgtgcctttgctgtgttgtatggaaaggatggcagggaacatgctgtaagtaattttgagtaagaaaatgagtcactgtgttacctggaactcagccacagatttgtgtgtggtccaagatcattgcagtttctcaccctgtttatttcctggtaaaagtaaaattgaataggtccaagacttgggggtggcaagtaaggctttgcctcaggcacaaaatttaagggggctccaaaaaactcaggaatcaagatcagcaatacagtctgagtatcccttatgtgaaatgcttggggctagaagtgttttgaatttcagattttggaatatttgcatatacatgcgatatcttggggatgagactcaagactaaacatgaaattcatttatgcttcatatacaccttatatacatagcctaaaggtaatttgatacaatattttaaataattttgtgcatgaaacaaagtttcgactgcattttgactgtgatttctggcatgagatcagttatggaattttccacttctagcgtcatgttggcattcagaaattttgaaattttggagcattttggattttcagattagggatgctcaacctgtatatatattttttaatcgacgtgaaattcacgtaacatagaattaaccattttgaagtgaacaatttggttgcattcactgatgttgagcaaccaccacctttaactatttccaaaacattttcatcactccaaaataaatgcctgtacacactagcagtcactccctatcttcccctccacctgtccgctggcaaccactgatctcctttttatttctgtggctttttctattctggatatttcatataagtggaattacacaatatatgtggtcttttgtgtctggcttcttctgagacagtaggaagggggcttggctttggctcacccccactagagcattttttcatgcattcccactgatcacaaaacccatactactacctcattgacaccatacctgctaacctcgaggctttagtcatacaaagaaaatggcctttctgtattgttcttctgtgctctcataatgcttaaccatgtcttttacttaaacaattccaggaactggccttaggagatccaaatagggaaccaagattgcagagtgtcccatcttgggagggaatgctgaataattaattgatttacagccttgttgccgctggccagaccaccaggtggcccattactcgagatgatcatcacaaccagatgatgctaacctatatcctctacccttcgcgtgctttgtctgggaagtcttttggccccatgtcagtttctattgcattgagagcccaagagcccctggtcagtcaggcttccatttagcatggcgtttgcaaggtttacccatgttgtagcatgtgtcagaatttcattcctttctatggctgaataaaattccattgtatgaatataccacaatttgtttcaccttttggttattgtgactaatactatgaacaatcacatgcaaatgttt

SEQ ID NO: 102935 - DNA, 3433 bp, Homo sapiens
aaaaggcaggcattctctttccttttccttctctcctgagcgctcctgcagttcctggggcgtagtaggggatccacaagcgtttgtgaccagtgaagttctttacaagggtgagatctgcacgggaggacccgagcgagggtctcggcttgccaggaagccggggttccccgggaagcgtggagttcacccgcgcactcgaagtgcctttgcaaaattatatctgggtgttggcacccagccactattctgccaatgaagtacatcctggtcacgggtggggtcatctcaggcattggtaaagggatcattgccagcagcattggaacgattctaaaatcatgtggactccgagttactgccataaaaatcgacccctatattaacatcgatgctggcactttttcaccttatgaacacggtgaagtcttcgtcttaaatgatggtggagaagttgatttagaccttggaaattatgaaagatttttggatattaatctttataaagacaacaatatcaccacggggaagatatatcagcatgtgatcaataaagagaggcgtggtgattacctggggaaaacagtgcaagttgtccctcacattactgatgctgtccaggagtgggttatgaatcaagccaaggtgccggtggatggtaataaggaagagccccaaatatgcgttattgagctgggaggcaccattggagacatcgaaggaatgccgtttgtggaggcgtttagacaattccagtttaaggcgaaaagagagaatttctgtaatatccacgttagccttgtcccacagctcagtgctaccggagaacaaaaaaccaaacccacccaaaacagcgtccgcgcactgaggggtttaggcctgtctccagatctgattgtctgccgaagttcaacgcccattgagatggccgtgaaggagaagatttctatgttttgtcacgtgaaccctgaacaggtcatatgtatccatgatgtttcttccacataccgagttcctgtgcttttagaggaacaaagcattgtgaaatattttaaggagagattgcacctgcccatcggtgattctgcaagtaatttgctttttaagtggagaaatatggctgacaggtatgaaaggttacagaaaatatgctccatagccctggttggcaaatacaccaagctcagagactgctacgcctctgtgttcaaagccctggaacactcagccctggccatcaaccacaagttgaatctgatgtacatagactccattgatctggagaagatcactgaaaccgaggaccctgtgaaatttcatgaagcttggcagaagctatgcaaagctgatggtattcttgtgcctggaggctttggaatcagaggaacattgggaaaactccaggcgatttcttgggcaaggacaaagaagattccttttctgggagtttgtcttgggatgcaactagcagtgatagagtttgcaagaaactgccttaacttgaaagatgctgattccacagagtttaggccaaatgccccagttcctctggtgattgatatgcccgagcacaaccctggcaatttgggaggaacaatgagactgggaataagaagaactgttttcaaaactgaaaattcaatattaaggaaactttatggtgatgttccttttatagaagaaagacacagacatcggttcgaggtaaaccctaacctgatcaaacaatttgagcagaatgacttaagttttgtaggtcaggatgttgatggagacaggatggaaatcattgaactggcaaatcatccttattttgttggtgtccagttccatcctgagttttcttctaggccgatgaagccttcccctccgtatctggggctgttacttgcagcaactgggaacctgaatgcctacttgcaacagggttgcaaactgtcttccagtgatagatacagtgatgccagtgatgacagcttttcagagccaaggatagctgagttggaaataagctgaaatgaatacatgactgggaataatggggactgcctgtgaggcctctgaaataattgaaggcaagatgaaggaactatctgaagaaatcactacactcttagagaatccctctgttctccagcaaacatgggatgtaaagcctcacagggaatctgataatacatacttctgtcaaccagaaccagaggggtagttttcttttccctccagaggcagcctttggtacttaaaatatctgtagctgattaaatttttcccaacaacctcactggggagaaagtgtgttcatgttttgtccagcggatcaggatgttaggatgacgagcaagagtccaggtcactgtgcctttgctgtgttgtatggaaaggatggcagggaacatgctgtaagtaattttgagtaagaaaatgagtcactgtgttacctggaactcagccacagatttgtgtgtggtccaagatcattgcagtttctcaccctgtttatttcctggtaaaagtaaaattgaataggtccaagacttgggggtggcaagtaaggctttgcctcaggcacaaaatttaagggggctccaaaaaactcaggaatcaagatcagcaatacagtctgagtatcccttatgtgaaatgcttggggctagaagtgttttgaatttcagattttggaatatttgcatatacatgcgatatcttggggatgagactcaagactaaacatgaaattcatttatgcttcatatacaccttatatacatagcctaaaggtaatttgatacaatattttaaataattttgtgcatgaaacaaagtttcgactgcattttgactgtgatttctggcatgagatcagttatggaattttccacttctagcgtcatgttggcattcagaaattttgaaattttggagcattttggattttcagattagggatgctcaacctgtatatatattttttaatcgacgtgaaattcacgtaacatagaattaaccattttgaagtgaacaatttggttgcattcactgatgttgagcaaccaccacctttaactatttccaaaacattttcatcactccaaaataaatgcctgtacacactagcagtcactccctatcttcccctccacctgtccgctggcaaccactgatctcctttttatttctgtggctttttctattctggatatttcatataagtggaattacacaatatatgtggtcttttgtgtctggcttcttctgagacagtaggaagggggcttggctttggctcacccccactagagcattttttcatgcattcccactgatcacaaaacccatactactacctcattgacaccataccagattctctcggacgcattctaagcagtgtgtagagggaaatttatagtcactaaatgcccactgagag

SEQ ID NO: 102936 - DNA, 2265 bp, Homo sapiens
aaaaggcaggcattctctttccttttccttctctcctgagcgctcctgcagttcctggggcgtagtaggggatccacaagcgtttgtgaccagtgaagttctttacaagggtgagatctgcacgggaggacccgagcgagggtctcggcttgccaggaagccggggttccccgggaagcgtggagttcacccgcgcactcgaagtgcctttgcaaaattatatctgggtgttggcacccagccactattctgccaatgaagtacatcctggtcacgggtggggtcatctcaggcattggtaaagggatcattgccagcagcattggaacgattctaaaatcatgtggactccgagttactgccataaaaatcgacccctatattaacatcgatgctggcactttttcaccttatgaacacggtgaagtcttcgtcttaaatgatggtggagaagttgatttagaccttggaaattatgaaagatttttggatattaatctttataaagacaacaatatcaccacggggaagatatatcagcatgtgatcaataaagagaggcgtggtgattacctggggaaaacagtgcaagttgtccctcacattactgatgctgtccaggagtgggttatgaatcaagccaaggtgccggtggatggtaataaggaagagccccaaatatgcgttattgagctgggaggcaccattggagacatcgaaggaatgccgtttgtggaggcgtttagacaattccagtttaaggcgaaaagagagaatttctgtaatatccacgttagccttgtcccacagctcagtgctaccggagaacaaaaaaccaaacccacccaaaacagcgtccgcgcactgaggggtttaggcctgtctccagatctgattgtctgccgaagttcaacgcccattgagatggccgtgaaggagaagatttctatgttttgtcacgtgaaccctgaacaggtcatatgtatccatgatgtttcttccacataccgagttcctgtgcttttagaggaacaaagcattgtgaaatattttaaggagagattgcacctgcccatcggtgattctgcaagtaatttgctttttaagtggagaaatatggctgacaggtatgaaaggttacagaaaatatgctccatagccctggttggcaaatacaccaagctcagagactgctacgcctctgtgttcaaagccctggaacactcagccctggccatcaaccacaagttgaatctgatgtacatagactccattgatctggagaagatcactgaaaccgaggaccctgtgaaatttcatgaagcttggcagaagctatgcaaagctgatggtattcttgtgcctggaggctttggaatcagaggaacattgggaaaactccaggcgatttcttgggcaaggacaaagaagattccttttctgggagtttgtcttgggatgcaactagcagtgatagagtttgcaagaaactgccttaacttgaaagatgctgattccacagagtttaggccaaatgccccagttcctctggtgattgatatgcccgagcacaaccctggcaatttgggaggaacaatgagactgggaataagaagaactgttttcaaaactgaaaattcaatattaaggaaactttatggtgatgttccttttatagaagaaagacacagacatcggttcgaggtaaaccctaacctgatcaaacaatttgagcagaatgacttaagttttgtaggtcaggatgttgatggagacaggatggaaatcattgaactggcaaatcatccttattttgttggtgtccagttccatcctgagttttcttctaggccgatgaagccttcccctccgtatctggggctgttacttgcagcaactgggaacctgaatgcctacttgcaacagggttgcaaactgtcttccaggtctctgagcccaagcctgcacgtatacatccagatggcctgaagtaactgaagaaatcacaaaagaagtgaaaatggccgattcctgccttaactgatgacattaccttgtgaaattccttctcctggctcagaagctcccccactgagcaccttgtgacccctgcccctgcccgccagagagcaaccccctttgactgtaattttccactacctacccaaatcctataaaacggccccacccctatctcccttcgctgactcctttcggactcagcccgtctgcacccaggtgattaaaaagctttattgttcacac

SEQ ID NO: 102937 - DNA, 2216 bp, Homo sapiens
aaaaggcaggcattctctttccttttccttctctcctgagcgctcctgcagttcctggggcgtagtaggggatccacaagcgtttgtgaccagtgaagttctttacaagggtgagatctgcacgggaggacccgagcgagggtctcggcttgccaggaagccggggttccccgggaagcgtggagttcacccgcgcactcgaagtgcctttgcaaaattatatctgggtgttggcacccagccactattctgccaatgaagtacatcctggtcacgggtggggtcatctcaggcattggtaaagggatcattgccagcagcattggaacgattctaaaatcatgtggactccgagttactgccataaaaatcgacccctatattaacatcgatgctggcactttttcaccttatgaacacggtgaagtcttcgtcttaaatgatggtggagaagttgatttagaccttggaaattatgaaagatttttggatattaatctttataaagacaacaatatcaccacggggaagatatatcagcatgtgatcaataaagagaggcgtggtgattacctggggaaaacagtgcaagttgtccctcacattactgatgctgtccaggagtgggttatgaatcaagccaaggtgccggtggatggtaataaggaagagccccaaatatgcgttattgagctgggaggcaccattggagacatcgaaggaatgccgtttgtggaggcgtttagacaattccagtttaaggcgaaaagagagaatttctgtaatatccacgttagccttgtcccacagctcagtgctaccggagaacaaaaaaccaaacccacccaaaacagcgtccgcgcactgaggggtttaggcctgtctccagatctgattgtctgccgaagttcaacgcccattgagatggccgtgaaggagaagatttctatgttttgtcacgtgaaccctgaacaggtcatatgtatccatgatgtttcttccacataccgagttcctgtgcttttagaggaacaaagcattgtgaaatattttaaggagagattgcacctgcccatcggtgattctgcaagtaatttgctttttaagtggagaaatatggctgacaggtatgaaaggttacagaaaatatgctccatagccctggttggcaaatacaccaagctcagagactgctacgcctctgtgttcaaagccctggaacactcagccctggccatcaaccacaagttgaatctgatgtacatagactccattgatctggagaagatcactgaaaccgaggaccctgtgaaatttcatgaagcttggcagaagctatgcaaagctgatggtattcttgtgcctggaggctttggaatcagaggaacattgggaaaactccaggcgatttcttgggcaaggacaaagaagattccttttctgggagtttgtcttgggatgcaactagcagtgatagagtttgcaagaaactgccttaacttgaaagatgctgattccacagagtttaggccaaatgccccagttcctctggtgattgatatgcccgagcacaaccctggcaatttgggaggaacaatgagactgggaataagaagaactgttttcaaaactgaaaattcaatattaataagcttgtcccttgggctggcctcagtagaacacactgaatgcccctccgcatttgatctgcgtgactccctgttcattgggctgttttgtgagttaccgatgctcctggagatgaacttggactgggacttggactgattcacactcagttcttttgaatccacagttctctccattacatttgaaccggttccctgtttaatgtctgtttgcctggtcttagtgactcacaaatgaacttccgagtaggagggcagttatgcacctcagaagcgtatttctctgttccctggcagccccagtgtggggagatggctcgccatttgatatttgctgatctttccactccccataaggttaattctaatttctgtggaactttttcataaattagcatattatataagaataacttattgtttaaaacaaactaaagcctttaattcaatttaataaatgtatcttgagtgcccactctgtgccatgtgcagatataatagtgaccaggacagataccagccctgccctcctagggcctcaaaacaaggggaagaaatgtgacaaaa

SEQ ID NO: 102938 - DNA, 1406 bp, Homo sapiens
aaaaggcaggcattctctttccttttccttctctcctgagcgctcctgcagttcctggggcgtagtaggggatccacaagcgtttgtgaccagtgaagttctttacaagggtgagatctgcacgggaggacccgagcgagggtctcggcttgccaggaagccggggttccccgggaagcgtggagttcacccgcgcactcgaagtgcctttgcaaaattatatctgggtgttggcacccagccactattctgccaatgaagtacatcctggtcacgggtggggtcatctcaggcattggtaaagggatcattgccagcagcattggaacgattctaaaatcatgtggactccgagttactgccataaaaatcgacccctatattaacatcgatgctggcactttttcaccttatgaacacggtgaagtcttcgtcttaaatgatggtggagaagttgatttagaccttggaaattatgaaagatttttggatattaatctttataaagacaacaatatcaccacggggaagatatatcagcatgtgatcaataaagagaggcgtggtgattacctggggaaaacagtgcaagttgtccctcacattactgatgctgtccaggagtgggttatgaatcaagccaaggtgccggtggatggtaataaggaagagccccaaatatgcgttattgagctgggaggcaccattggagacatcgaaggaatgccgtttgtggaggcgtttagacaattccagtttaaggcgaaaagagagaatttctgtaatatccacgttagccttgtcccacagctcagtgctaccggagaacaaaaaaccaaacccacccaaaacagcgtccgcgcactgaggggtttaggcctgtctccagatctgattgtctgccgaagttcaacgcccattgagatggccgtgaaggagaagatttctatgttttgtcacgtgaaccctgaacaggtcatatgtatccatgatgtaacttccacataccgaagtacctgagcataaagaaggaacacaagccatagcgacaaaaccaacggagagatagaccccgacccatcggagatcctgcacagaaagcgccacacaagaggagaaaataggctgacacggtaagaaagggtacagaaaaaaaagacaaaagccgaggcaaggaaaagacacgcagccaaaaacaacgaggaaagacacacgggaagacaaaggccggcgaagacctcaagcccaggcacgaccaagacaagaaatgaaaacggaagggaagaagaaatccacggagccgagagaagacaggagacgagcgaactgagaacaatatgcgaaagaggaagagcacaaaaacagacggagaaataagtaaaggagggaagaaagagagcgcggga

SEQ ID NO: 102939 - DNA, 891 bp, Homo sapiens
gtaagatggaatcttcgaggattgttcatttctctcatggacaagctgtcatcttggtatagaggcgggtattataggacttgcctcacaggatcttgcccctttgagatactcccatttgactggcacagttagcaggacacgcatgacagcccatgacagagttagtgtttggggaaaatggaatgcaccttgggccaggaaaaaaaaaatataagtacacctataaatgtatatgtgggggctgttgtggttagagtcatcatagtctaggccaggggttgacagactttctgtaaggtcagagagtaaatatcttaggcttatgagccatgcagttcctgcggcaactactcaattctgctgttgtagcaggaaagcaaccatagacaatatgtaagtgaacaagcatggctgtgttccaataaaattttatttacaaaaacagtttgctgatccctggtctaggccactcatagaagagcagatttccttggatttgtataaaataaaattaaaataaaataaaacataaaataaaataaaataaaatagtatttgatttctttgtagggagatgcaagagacaggcttagtgtccaagggcagcttatttttccattgctctattatgcactattagagagaataccagcctggatagcttcagtaaatttatgctcagtggcagatagtgcctggattgccctaggcattatggcaggccttgacttgtataagctgttctttagcagagacagcagcttttggaagacttgtaaagtgttcattgctttcctgtgaggtctcttcatgtttatcagggaagatgcaaagctgtgtctatttagttttgcctcaaacatggagaccctttggagcaagccaaaa

SEQ ID NO: 102940 - DNA, 1925 bp, Homo sapiens
aaaaggcaggcattctctttccttttccttctctcctgagcgctcctgcagttcctggggcgtagtaggggatccacaagcgtttgtgaccagtgaagttctttacaagggtgagatctgcacgggaggacccgagcgagggtctcggcttgccaggaagccggggttccccgggaagcgtggagttcacccgcgcactcgaagtgcctttgcaaaattatatctgggtgttggcacccagccactattctgccaatgaagtacatcctggtcacgggtggggtcatctcaggcattggtaaagggatcattgccagcagcattggaacgattctaaaatcatgtggactccgagttactgccataaaaatcgacccctatattaacatcgatgctggcactttttcaccttatgaacacggtgaagtcttcgtcttaaatgatggtggagaagttgatttagaccttggaaattatgaaagatttttggatattaatctttataaagacaacaatatcaccacggggaagatatatcagcatgtgatcaataaagagaggcgtggtgattacctggggaaaacagtgcaagttgtccctcacattactgatgctgtccaggagtgggttatgaatcaagccaaggtgccggtggatggtaataaggaagagccccaaatatgcgttattgagctgggaggcaccattggagacatcgaaggaatgccgtttgtggaggcgtttagacaattccagtttaaggcgaaaagagagaatttctgtaatatccacgttagccttgtcccacagctcagtgctaccggagaacaaaaaaccaaacccacccaaaacagcgtccgcgcactgaggggtttaggcctgtctccagatctgattgtctgccgaagttcaacgcccattgagatggccgtgaaggagaagatttctatgttttgtcacgtgaaccctgaacaggtcatatgtatccatgatgtttcttccacataccgagttcctgtgcttttagaggaacaaagcattgtgaaatattttaaggagagattgcacctgcccatcggtgattctgcaagtaatttgctttttaagtggagaaatatggctgacaggtatgaaaggttacagaaaatatgctccatagccctggttggcaaatacaccaagctcagagactgctacgcctctgtgttcaaagccctggaacactcagccctggccatcaaccacaagttgaatctgatggtgattgatatgcccgagcacaaccctggcaatttgggaggaacaatgagactgggaataagaagaactgttttcaaaactgaaaattcaatattaataagcttgtcccttgggctggcctcagtagaacacactgaatgcccctccgcatttgatctgcgtgactccctgttcattgggctgttttgtgagttaccgatgctcctggagatgaacttggactgggacttggactgattcacactcagttcttttgaatccacagttctctccattacatttgaaccggttccctgtttaatgtctgtttgcctggtcttagtgactcacaaatgaacttccgagtaggagggcagttatgcacctcagaagcgtatttctctgttccctggcagccccagtgtggggagatggctcgccatttgatatttgctgatctttccactccccataaggttaattctaatttctgtggaactttttcataaattagcatattatataagaataacttattgtttaaaacaaactaaagcctttaattcaatttaataaatgtatcttgagtgcccactctgtgccatgtgcagatataatagtgaccaggacagataccagccctgccctcctagggcctcaaaacaaggggaagaaatgtgacaaaa

SEQ ID NO: 102941 - DNA, 421 bp, Homo sapiens
atatgctgtttttcttcctttgaatatgggatttctggatcatatggtagtcctatttttagttttttgaggaacctccacactgttttctatagtggctgtaataacttatatccataccaactgtatgcaagaaaagaacttggtatcttgactcaggcatttcttattgtaatcctagtttcctatgcctgatttatttgaaagcttcagctttcacttatgtacataaagttatgatttataacaactggatgtttatgttgaattcctttgtaaatatcatgaataccactgaatgattatatttttattaaaacttcaagataaaataaaattttaaaaattactgtttattatttcattatttcaaagctcttatttaaaaactgcagaatctataagtgctatcataaatgtc

SEQ ID NO: 102942 - DNA, 354 bp, Homo sapiens
gttgttaaagacaatagagtcttcatgatctaagtgttagcacaacttcttgtttaaaatattttggacgtctatatgttgttaaatgctctgatacgtattctaaaaaggactggttctatgtgattattataatacttaagataaatggaaatccctagattgtcagttttaaaattagtttcaagtagtggaacaatgaaaaggtaaaattttaatatgctgtatatttttagtaatattcataattgtatattatacaatataaaatatttttaaatataacatttgcatgcattagtcttaatagaaatctgacaaacctttcaaagaagatgatataggaagctttct

SEQ ID NO: 102943 - DNA, 235 bp, Homo sapiens
acctttcttacccccaatagcatatggcaccttttacctggtagtactcagctaatatttggtaaatgaattgaacacagtaaagcatgtaatttccctatgttattacactatttccaaattgggaaaacagaacaggtggcagatttatcccctatagtattttttccttcaacttttattttaagttcagggatacatgtgcatgtttgtgacatgggtaaacatgtgccat

SEQ ID NO: 102944 - DNA, 449 bp, Homo sapiens
ctgtcctctctccctgttccctcctccccagtccctgctgttcctccctggcagctgagaaggtcagagttttctcagtggtggggccagttgacttttgccaaggaaaactcgcagcccctgagcccccttctttgttccaccctgagccttctccctctccacttcctcacagctctggactcagaaaagtggcagactgagcatggcctcagctcttcttctcattttataaaattgggagggttagactcccccacccaggggaaaacagctgacctggatcccaagagtaagataggaagcgtagtcctggcttccagcctctggcagagcagcagcccctgcctgcctgactttgacgcccactaggggcgagtttccagggggtgtcccacacagcagccagagcccctcagtgtcatgagattccctttgcctgatttatc

SEQ ID NO: 102945 - DNA, 126 bp, Homo sapiens
ctgtgttagagaagccctgtctttgaggttcagctcatagacctggcatcaggaagagaagaccagctctaactctgcctcttccaggctttgaaccctgtgtgcagttggcagatgaactacaag

SEQ ID NO: 102946 - DNA, 525 bp, Homo sapiens
tatggagggggacatccagtggagccttctagtccaccatcttgctctgtacccccaaatctaaaataaatacattttgacatgaagtgttaagccacagacatgtggaaaatgtatttatgttaaacatccattgcttaatgtcagataaattagatattcattctgacaatactatgttgatatcttgatttattctatttaccatgctgtttttacagaaaaaaaatcctaagtgccattttagaaacctagaaatatgcagggagatggcagaaaaatatttctagattcttctaagttatttctgtatctgaggagaaaaacacatggtttactctttaaagattttgacttggaaaacatatgcacattctcttttttcctataccactcttaattcttataacaagagggaagatctctagtaaaaggggattacataaaactagtggactgcctataaagatgagtcccagtttccaaacatttgactcttcactgccttcaccatccacagcttat

SEQ ID NO: 102947 - DNA, 720 bp, Homo sapiens
ctgatctaaataattctacttgtatgactattctcatacagttgtataaaattatatgtggaaaaatatcactggagttctgtttgtgctagcaaaatactagaaacaacctaaataaatgtccatcagtagattactgaataaatgcatcagagcatgttgatagaatgacattctttacatccattgaaaagtctgctaagagttgagatttttgaaaagggggagtaaagacctgcaaaaatattttcttccataaaagcaataagaatgctggtaataattctcaaaatcaacatttttagaactctaaaaattaaactcttgcaacaatcaaaggagtgtttgtgttaaaaaaaaaaagtatgaataccagtgtatataacaagctttgtatttgggggttcagtttaggtgaaggtatatttatcatatcatcttgattcattgacccatttatcattataaaatgcccttatttacatctaggaacaattttgtcaaaaattctgtttggtctgatgttagcacagccactttggccatgatattcaaaatacagctttttcatcctgtttgtgtctttgtttgtctcatagaaagcacgtggttggatcacagtttttaaaaatccattctgtttgtctctgccttttggttacagcagctaatcaatttaaactcaatataattactgataaaataggattcacatctatc

SEQ ID NO: 102948 - DNA, 647 bp, Homo sapiens
gacttgccttaattgtggattcttcttgattgtcaagtgtatgaaatgtgattgtatttaccaagtatttgctatgtgccagacatcgtggtgtataacaatgaaaaaatcatggtctctgccatggggctttagtataggagacatacattaatcggaaaatcacatcgatatatcattaaacggtgataagtactatgaaggaaatattcctatgaaggaactgtcatagtattatgagacatgcattaatcagaaaatcacatcagtatataattaaactgtaataagtgccatgaaggaaaagtatgaggtgttatgaaaatatataatggagactttgggagactgaggcaggcgaattgcatgaggccaggagttcgagaccagcctgggcaacatgttgaaaccccatctctactaaaattataaaaattagccaggtagccgggcatggtggttcacgcctgtaatcccagcactttgggaggccaaggtgggcggatcacgaggtcaggagatcgagaccatcctggctaataccgggaaaccccgtctatactaaaaatacaaaaaattagctgggtgtggtggcgggcatctgtagtcccagctacttgggaggctgaggcaggaaaatggcatga

SEQ ID NO: 102949 - DNA, 482 bp, Homo sapiens
aatcttattccttcctcccctctcgcagtgggaatgacataggagggagtccctgggtgtttcttcctaacctattaccatgcatctcatgtctgcagtctctccctggctttgtctttgaggagtgcataggaaatggcaggactgacattgagggttgggcatcgaatgcatgaggtcactagttcgggtcattgattgtcatcatccatgtatatatgaagagaacagtttttggatgttttccaaatgccgggaaggtgtgcaaattgcactaatttctcctctcattctacatttctctaataagttaataacattatttaggccctgttcaggccgtctgtcaccatgcagttgaagtatttgtgcgagttgcattctcagtaagtgcctgtttgctgtcttctatatttgtgtgggacaaagaaattatatttcttttttatagctatatcgagcttatgtggccttcccagact

SEQ ID NO: 102950 - DNA, 814 bp, Homo sapiens
gctttgtgttcatgtgattcaatgtttagctgccacttataggtgagaacatgtagtatttggttttctctttctgtttagctcatttaggatagtggcctccagctctatccacgttctgacaaagaaaaccttgttgggagtttgattagacggctgagaaagacagcaaatctacagggtttgtcaaagataagatcgttgtcatggcatgaaaaggatgacctttccagtctgcaatacctgcttgaccactaagaccaaacagctcaaattaaaggtaacaaattccgcagaggcaattgttcaacacaggaaaaagaaaccactttaaggattttaaactggaagagattttacataagctgttttaaacaaaaccattggatgacctggagtaacagtgtcggaaactcagctgagctggatagagaactgagctgcccgttgttggagaagttgattaaagcagcagccgaagatcgaagtaacagtcaagactgtaatcacttactgcaatagtataagcaagaggccaaaaccaaagaaactgccaactcacccaggtcttctaaattccccagaaaggtgcactagtggagggtcagtgaatcaggacagacatgggggtcagctcacgattgaggaagccccaaacaaaaatctccagtagtattatgaaccctggagcaggaggttggagtgagacaaggagagctagggttgaagagtatggagtcgaggagggaacggttcttaaggtctcctcccactctactcttaagaaagcttcagtagaagcacctgaagaaaa

SEQ ID NO: 102951 - DNA, 845 bp, Homo sapiens
tgtgcattcaatgtttagctgccacttataggtgagaacatgtagtatttggttttctctttcgtttagctcatttaggatagtggcctccagctctatccacgttctgacaaaggatatgatctgagaggttggcatttcttccttggtccttgagataaaaggattctcaaccagaaaactaaaggataagcaagaaaagagatctttgggcatctgtgacaagattctttacccatctttggaaacttataaagaaaatattagaacaaagaagaatgaggaaggcacaaaacagttccagaacttctaagcaaccaaaagtaactgaaaagtcaactgaaaatagtagtagctattttttctcatattgtaagaatccagttagctcagaccaaaggaaactccttttaaatttagagcccacagttgaaacctgtgaggtcaaccaactgaaagtaaatacatgattaaataagaatttccacagttggaattgtgtgcaaagatgaatttgacatagtacctttcaaaagggcctttaagacagaaaagcaacacaaactctccttacagggttgatgacagttagacagaaactgtatgaaactcagcacaatgagaaaagttcattaaaggaaaatcgagaaaatgattagtgttgactgtgagccttgaataatgggcagaattatatccagtggaaatagtagaaagagatagaagaggttttttaaaaaataaaggcacacagcttgaaacgccttgtacgcagaccagcctcttcctcagcaccccagggagcctcctgatacccctagccatgcttttggatctaatatccc

SEQ ID NO: 102952 - DNA, 834 bp, Homo sapiens
ggactaatccaatatggctgagatccttatcaaaaggagaaattcagtcacagggacagacaggtacagagagaagatgatgtcaagagacaacgggagaatgccacatgaaggtggaggattggagtaatgcatctacaagccaagaaaaccttgttgggagtttgattagacggctgagaaagacagcaaatctacagggtttgtcaaagataagatcgttgtcatggcatgaaaaggatgacctttccagtctgcaatacctgcttgaccactaagaccaaacagctcaaattaaaggtaacaaattccgcagaggcaattgttcaacacaggaaaaagaaaccactttaaggattttaaactggaagagattttacataagctgttttaaacaaaaccattggatgacctggagtaacagtgtcggaaactcagctgagctggatagagaactgagctgcccgttgttggagaagttgattaaagcagcagccgaagatcgaagtaacagtcaagactgtaatcacttactgcaatagtataagcaagaggccaaaaccaaagaaactgccaactcacccaggtcttctaaattccccagaaaggtgcactagtggagggtcagtgaatcaggacagacatgggggtcagctcacgattgaggaagccccaaacaaaaatctccagtagtattatgaaccctggagcaggaggttggagtgagacaaggagagctagggttgaagagtatggagtcgaggagggaacggttcttaaggtctcctcccactctactcttaagaaagcttcagtagaagcacctgaagaaaa

SEQ ID NO: 102953 - DNA, 499 bp, Homo sapiens
gctttgtgttcatgtgattcaatgtttagctgccacttataggtgagaacatgtagtatttggttttctctttctgtttagctcatttaggatagtggcctccagctctatccacgttctgacaaagaaaaccttgttgggagtttgattagacggctgagaaagacagcaaatctacagggtttgtcaaagataagatcgttgtcatggcatgaaaaggatgacctttccagtctgcaatacctgcttgaccactaagaccaaacagctcaaattaaagctttccttggccatggtgactgagtcaaggacagactcataatctaaggcaaagcaataagtcatcaggagactcaatacctgcgtgtctctcaaccattggaaaaagtgaatattctttgtatctggatgtgaatgagaaaatacacaaccccaggagctgctagaacccatcttgagtttgaagagtttgccttataataaaaccaatatcaaaaaa

SEQ ID NO: 102954 - DNA, 528 bp, Homo sapiens
ttagtagagatggggtttcaccatgttggccagactggtctcgaactcctgacctcaagtgatccgcccgcctcggcctcccaaagtgctgggattacagacgagggccaccaagcctgacctcacttattgttttttaaaaccaaaaacatctcaaagcaaacaagggaaagctccgcaaacagcctggcagcaggaaacccacgagagtttccccgtaataggcgcctccaggggggggaaaacaaattataagggtgatttatttttatcttattacaaacaggtattttccaaattttctatgaagcacaaggagatctttccttccagaatactagcaaacacaaaaaattttattttgtgagtgcttaaaaagagaaaaacctgaacaaacttgctctccacccacgcaggtgattctccacccacgcaggtgattcttcacccacgcaggtgattctgacttttgggcagtcgtcagaagatcagatagaaaacctgagtatcttggcgttagaatgagtt

SEQ ID NO: 102955 - DNA, 416 bp, Homo sapiens
tctttggttgctcactttctagaatctgataaacagcatcattgttgacacttctcaatggagaggttcccaaaattctatcaagcagagtcttgttttcaacatttcttctagtgggctgagctccctcctttttaagagatggagatcaaaatcagttaccttattatgacagagttctaactaggcttaaatggctgcagacatagttcaaataaaattacctcacctgccacccgttctaatttaacaggcagaaaaaaagttttattgaaacagaagcaatcatttttatttttatctggtggtttacagatatatgtgtgtgtgtgcatatatataatttaaatgtcagggcatgtttgtgcagatgtaatttaaattttatgtttatatatatgtaatttaaatgctgg

SEQ ID NO: 102956 - DNA, 372 bp, Homo sapiens
aatgagtatccctcagggctgctccttcctgtggggtgggccctgggcttgggaaggaccaagttctccataggccatgacctcctcaaaacctctctgccctctcttgccatagtccacctccttccgccgcaacttcagttcccctctcctggtgcatgagccgccaccagtctgtgccacaagcaaagagtccccacccactggtgagtgccccccctgggcgcagtccctgctcccattgtggtgggatgagaaatcaacatccctgaccagcctggccaacacagtgaaaccccgtctctcaattgcttgaacccaggaggcggaggttgcagtgagccaagatcacgccactgcactccagcctgg

SEQ ID NO: 102957 - DNA, 300 bp, Homo sapiens
caaattcccatacttgtgtgtaagccagagatcttcacacatgttaaagaagcttgaaaacaatgaagaaaaacccaggggagaccgttagagagagggaaagacagagatgagagtggtagggaaaaacagtgagggatcagagcagcaccctgagagcgcacctggacatcagccattacacgtgagggggaggaacttttctgagtttccctaaaaggcttaaagtaaggggttgttgggtggaccacacatgacatattaagtaagatacaaaagtaatgcacacaattaactgaa

SEQ ID NO: 102958 - DNA, 277 bp, Homo sapiens
atgttaactgtcaatttttgttttgttttgtttttaatctattccttctctctttctattcagattgctattttatgtgtcacttgagagaaaacagttaaataaaaactaatttaatacaaaatttagctgggcttggtggcacatgcctgtaatcccagctactcgggaggctgaggcaggagagttgcttgaacctgggaggcgtagattgcagtgagccaagatcatcccactgcactccagcctgggcgacagagtgagacacagtctcaaa

SEQ ID NO: 102959 - DNA, 791 bp, Homo sapiens
tcaccttttcctacccgcttttaacactgagaaaagtctgcagagtgacagtggcccatttttaccagcaaagacattgaacctggcgtgtacagctttggtggttggtacctgtcaccatctgctcttctgtcttgatgaccatatgtcttggactgcaccctgagatgtgggctgctcgtgctgccccagtactgaacacagctacttgagcatagtaggtgttttgaaaatatttaacctgaattgagaaaagatagtcagcagtggcccaaagataacaacatacatcaaaagtcatgtacaagattcagccagtcaccaagatgctcccaatattcaggggcttggtacctcactaatcaaaactgaaatgtcacccgattggtttttctctgaatgttttagagcagaatagactcagccatgggaagagacatttgagtggactctattcaggttgattggagtctcctccaggttaatcattccacttaagtcaatgagtgaaattttatacacctgagactctagcctatggcaattcctggaaatcaagtggtttttttgatggggagccgggggatggtcagtgggatgcaacttgctgatgatgagagatgaggtgtaagatattatcaggcaaacaccaacgaaacaggctttactataactcagatcaccgcgctttttgagtgtgtcagtgagtaatccataatcacatttatagatacttctttcacatttataataatgtccccaacataaacatgtaaacatgatcaacatat

SEQ ID NO: 102960 - DNA, 347 bp, Homo sapiens
gcaacaacatttttctcagtcctgttgattgggtgtgtgtgcttatgtgtggggcgttcatgagcaaaaacacgagtcatatgtggaggtgaatatacacctccgtgtacttcgggaagtatatattcttgcttgcattgttgatattttaataagctcttttgattttgtccaaatcaatttcccatgtaattataatatgaagtgagttttgtaaactctgctaccctaggccctcaaagtattaataattgactgaatatatcaaaatcagtcatgttgttgaagagattcattattttagttttctgacttctttaataatcatatcactgtattattacttg

SEQ ID NO: 102961 - DNA, 222 bp, Homo sapiens
aataaaggagagaaagaaggcattaataataacacaagctcccctcccctgctggcaggctgtaccccatgctttagagttttctgaggagaaacagaaagtaacaccaccactatttccttttgagaatcaaatggtgaaaggagtatttccatacaggtcaaaaagaaaaaaaaagaaatgagaagttttcttttattgtttttcatttctgtcactgtt

SEQ ID NO: 102962 - DNA, 750 bp, Homo sapiens
gtgacttgtttttatggaacactgaacattaagaaataatttgggtggttgacatatcctgaatggattagagaatatgcaaagctttttttctttgggtaatcatcaaatgacatttaggaatatatgaagagaatttggctatggcgtctgcctccttctatacagttatttgtgagatttacaaccatcacaatagtttgtattctttttggaaactgtcagagaagagatgtcttgacttctgttttgtcaatctgtttatatatattttaaacagaattcaagaaagactttagctttaggtaaaataaatcctaaccgatttcagttttttagttgattcagaatttctttgtaagttagtttttggttttctttttttttttcataatctggaaagttgtggatgaataataagaaaataataataataatagtctaatgcagcttcagcttaagttaaaaccaattgacagtcattcttccctttctcaagttttgtgggtatttaccatgtcactacagaattgtaacaaataaaatgtatcttgtacaacttactctgaacaagtaatactaaataggttagtttcattcttactagtagtttccttgtataaatttcagaattcatagaaaaatatctgtaatactaagctaagtagcctttagttgccagagaataccaaacatacttatttaaaataacttcctattttaatgcacttttacttagaaaaaaatttt

SEQ ID NO: 102963 - DNA, 853 bp, Homo sapiens
gtcaaattatttttacaggggaaaaatgtgataaacagacttggaggaaggaaggaaaaaataatgacagaacaaaaggaaaccagaaatccaaaatgagtcaagccaacagggtattgtgtctaaaagaaaattatctaaaatctgaactaccagaaatgggaagagaaaaatctgaattttcattatttgcctctttttcaccattaactgtgctgattctgtctaggattaccatccagcagaagaaactgtaaacaaatccaatctttccaatatgctaaataatgaacttcataacgtgcccacgatgatgggtcttgtcttcctggaaattgcaatctacttaatttttccaactaaggaacatcggctgtggttttgaaaggttactgagaaaagggttttaaaaggtgatacaaagcaagcaaaatcttggttctattcttcacagaaaatgaatcacatttaaaatgttttaaacttttaagtgatggaagccattttaaggctttgtccatccttcactttcatgaaagggccacggattccaccacgatggaccatgtctgttcttgggcagtgggtgggggttcatggttgtggtccacagcatctctacctggagaataagagcaaagctgtttccctgataatcacaccccacattcatccactggcaaatcgtgtcactgtcaaaatgctcctaattcgagttacttcccatctcttccatcatgagccctggtccaagtccaccctcgtctctcaactgaaatcttatgatagcttctgtaatttcccatttcctctcctgcccccttacgtcccactctctacacagcagctagag

SEQ ID NO: 102964 - DNA, 360 bp, Homo sapiens
  misc_feature (18)..(18): n is a, c, g, or t
  misc_feature (40)..(40): n is a, c, g, or t
ccatctgcagccgcacantggagggatcagatcatttagnacttgactgcttaaatattactcttgctaagatcttgagcttgtctcatgttgacagactagtgaagttggttacgttgtctgtctcctcactggagggagagattcagagttgccctgtccaacccagtgctatctctggaaagggttggattgaaatctagtctgccttcattctgaggtataatcatgagggttaggtgaaagggtcccgagtgagaagatggcatgggtcctagggtggggagcccgatgccaagtcagacttcactcggtatgtttattcaaagccccactttcactcgtagcatatcataggtg

SEQ ID NO: 102965 - DNA, 475 bp, Homo sapiens
ttctacatcttgaacacaaaaatattgtcattccatagtaacatacacatctaaagtaatctaacttatctaccagtctaacattgtaataattttttaaatgttgacttaacatgccttgctggcaaagaatttatacttgctctccacacgttggcagtcatgattgcacagctgcatgatttttgagtcttgaagcagtccaattatcaagtattccctaacttatataaagccctttaccatatcttagaatctcttctttgtttgagtctataatttcccttgatcatgtactctgtttctagtttgaaaatcatccttggccgcgcatggtggctcacacctgtaatcctagcattttggaaggccgaggcggatgaatcacgaggtcaggatatcgagaccatcctggctaacacagtgaaaccctgtctccactaacaaaaaattagctgggcatggtggcgggcgc

SEQ ID NO: 102966 - DNA, 155 bp, Homo sapiens
aggcttaatccctccatcttctagactctgatgagttgccagctgtaattcagagggaccatcaccaacatcttacagacagagtccttgttctcactgcctgacaaaaagagcaggcaaaatccataagaagcatgtggaacctcaaattgcaa

SEQ ID NO: 102967 - DNA, 427 bp, Homo sapiens
atttggaaaatccaaagttaaaggataaaattactactaattgtaatctcagcacacagaaagaatcatgtgtgtgtgtgtattatatgcatgtgcgtgtgtatagagggcattctatttgtattgtatttctttattatttagggttgttgatactgtaaaataaatgattttttttgagaatgaagatgggtgaaccttgtttttctcatatttaactaaatctaaatgacaggatatttggtaaaaggagatataaagctacaagggcccttgcggcacctgccatgaggtctgtctaggtgaagagctggggaaccaaagatgagcagctgaattttctgttcttgatgttctgcgggagtaatgatgcaccagatgataatgatagaagatattttgataatttacttctttgatattggct

SEQ ID NO: 102968 - DNA, 278 bp, Homo sapiens
ttagcctcctgagtagctgggattacaggcgcccaccaccataccaggctaatttttctattttcagtagagacggggtttcaccattttaggtaggctggtctcgaactcctgacctcaagtgatctgcctgccttggcctcccaaagtgctgggattacaggtgtgagctaccacgcccagccgtgtgtgtgtttttttggtgaggaataaaagatttaatattcatctagaagactcaggacagtacttggcaagatgatgacaatgatgatggc

SEQ ID NO: 102969 - DNA, 329 bp, Homo sapiens
tcgggggaattgtagatagacatgcagttgtatgaaacaacgcagagatcctgtgaaccttttacctagttccctgtggtaacgtcttgtgaaactataacacagtatcacagccaggaccctgaaattgatacaatccagtgatctgattcagatgtgctctagtttgacttgtactcttgtgcatgtatgtgtgtgtatttagttctatccaccaccacaaagacatacaataatttcattataacaaggacaataatggtattttaatacctgcaaaaatatgcattacctgtttctttgaatattaatgtcagggtaggttcaaa

SEQ ID NO: 102970 - DNA, 200 bp, Homo sapiens
atgactttttacatataagacaaaaagcctgatccaggaaataaaaggtaggtaaactggacttaattaaatgtaaatgcttattctctatcaaaaatactgttaagagaatgagaagaaaagccactaaaggaacatatttgcaaaacacattgataaatgactgatacctgaaatatgcaaaaaacacttaggtctca

SEQ ID NO: 102971 - DNA, 179 bp, Homo sapiens
tttggtgaagtgggaattggagagagggttgcttccttctgccctaatgaattaacaagaacaatgtaaagcaaaacaaaacaaacacaagccaccagttaggtttttctctgaactcccaggtcttgggaggggtatctcattgtggtttccaagtcctggcaatgtccagaattgga

SEQ ID NO: 102972 - DNA, 235 bp, Homo sapiens
ggactgggttaccaggggctggggtgggaacaacggggagtggcttcttcatgggtgtagggtttctgttgagggcgacgacagtaccctgcaagtggaccggtgaccgatgcacagcgttgaatgtactgaatgccactgaactgtgaactttaaaactgttaaagtggcaagttttatgttatattaaaaaaatcatatatagaaaggatgttgtattaaacgagaaaaactc

SEQ ID NO: 102973 - DNA, 512 bp, Homo sapiens
acaaagccaggagacggggtgctacagacaaaccccatccatatggtacagccacaacactgacagtgtgcccgaggctccctgaggggtcagctttcagtgactatttgacagacttaatcccagcccaatcaatccagcaaagagaaagcggatggcaatgagaagcaacaaaaagatctgctgggctcaccacacaagcatccttggaaacaggaacactcataagcccaatttttgagggggagaaatgagcactgtgatgaacatactatgcattatcactaatttttccaagtttctactcagagaatgggacaatggtgtcacactgggggaaaaaacccaaatgacatctgtcaggacaaactggtaaagccacttacaatcgtttcaaacatgccagtctctaaaaaatttcccagcacagaggagaaactctaattgtttgtttaaagaatgtgtctgaggaagcgagaggctcaggaccagaggggagctgagaagaaacc

SEQ ID NO: 102974 - DNA, 230 bp, Homo sapiens
catacacgagaagaaagcaagccatggaagcagaagaggaaaagactgctgctgagtgctgactgtgtctcaggtgtctatccacacttgacacatgccatcacaccgaattctcagcaggtgtgcatccacgcttgacacatgccattgtgcatccacgcttgacgcgtgccatcacaccaaattctcaggtgtgcatccacgcttgacgcgtgccatcacaccgaatt

SEQ ID NO: 102975 - DNA, 526 bp, Homo sapiens
cccgccagggtgtggagccgcactggggcaagatcaggtgggacagcccaaagactccgggccaagttcctgggggactcggcggagatggaagatgattctcgaagctctccatttccttaattttgagttatcttcagtccttcttcaatgctgtgactgagtgcttgctgattattgtgcttgctgatcctgactaatactctctcttgatgagcttcatattcatcacgacttggataaattttgctgatgagtgcatcaaactttgggtctggccttggtgatcttttggaaactagttttttccaacagttggttggatctaggatgtaaactgcaagtgtggcaggccgactgcactgttttgttactagagggagtgagaacacacctgtggacttgagcaccttccattcaccagttgctccatgggcatactctaattcaggtctccccacaaccctctgagttaatatttctctccccattttaaagatgagaaaataaagcctagacagtttaa

SEQ ID NO: 102976 - DNA, 483 bp, Homo sapiens
ccactctgtccccacggataccaaaatctgcgcgtatccgcgcatgttcaagtccctaatatattctggtgcatatactatggtgtcaaatttgtatgtaacctatgtacatccttccaaatattctaaatctctaggttatttataataccttaatacaatgtaagtgctatttaaatggttgttatactgtgttttttatttgtataatttttattgttgtattattgctttttattatttgtttttttctgaacatttttgatctgcagttggttggatctaggatgtaaactgcaagtgtggcaggccgactgcactgttttgttactagagggagtgagaacacacctgtggacttgagcaccttccattcaccagttgctccatgggcatactctaattcaggtctccccacaaccctctgagttaatatttctctccccattttaaagatgagaaaataaagcctagacagtttaa

SEQ ID NO: 102977 - DNA, 383 bp, Homo sapiens
ctcaggatctctgcagttgacatgaacacacctgcacatgcccacacctgcgcccagggcctcacatgcaggaggacttcgtaaactctggtacacaggaagaaaattattgcagggtcgttggacccagaaaagcatcacgggcggaggatgttgaagcttctgaccaggacagagttcttcagttgatagctgtccagaagtttcggcaagacgtttgaaggaaccacaacccagtctaaccaaaggggtggttggtggaaggtgaaggagtcacacacaagtggaaactccagcagagatccaagaaagcaggagtgatgcattttcccccattacgtttttttttttttggtttttgtattaaatatccaccctccctc

SEQ ID NO: 102978 - DNA, 250 bp, Homo sapiens
ctttactagtgcctgcctgcatgagcagcggggaggggattgctgcatccaaagaggacctctctctccttgtggggtgtctgtctgtctctctttctcctctcctccctccttgcggggtctctctctccttgtgggtctttgtgggggatctctctttttgtgggagtctctctctctctctctctttcagtgactcaatcagcgctgagacaaactgggattagctgaatggttgagaacttacctg

SEQ ID NO: 102979 - DNA, 103 bp, Homo sapiens
gtgacaaattctaccgccagtaatcacttgtgaaaaatcaacagtgaagcccagtggctcccggtcccccggagaaatctgagtggatttccagaagaacaag

SEQ ID NO: 102980 - DNA, 891 bp, Homo sapiens
ggagcctgggtttatcgacgagatctggagtatctattcttttccactgcttgcagtctccaatgtaggcagtgtaaaggtatagtaaaatgattttaggagtcagaaccaaattgccaatatgctccatggctcctaaaggaaaataaaatggaagtttttattttgcggcttcacttcttaccgtgtagtaaccttactacaattacagattttcaggagttgtttgctagtctctttcagtcaggtactaaaaaaaaaacaaaaaacaggctgggcgcggtggctcacacctgtaatctcagcactttgggaggctgaggtgggcggatcacgaggtcaggagatcgagaccatcctggcgaacacggtgaaaccccgtctctactaaaaaaaatacaaaaaattagccgggcgtggtggcgggcgcctgtagtcccagctactcgggaggctgaggcaggagaatggcgtgaacccaggaggcggagcttgcagtgagccgagattgtgccaccgcactccagcctgggtgacagagcgagattccgtctcaaaaaataacagcaacaaaacaaaaccctcgaggggccactctcctgtctttactccttttcccttctctattctttcaccagaagccctcatttgaccagtgaactcctaggccctcttgacccgcacattagctgggcgatttccttgttctgctaattcctaattctgcttaaaatgtatttggatttctgtttttgaacacttatgatgccaggcactgtaatgcttgaaacccgatctttccctagagaatgtaacatacgtttttattcatttaatcacttcattatgccggggttaattatgtttattttataattggtaataaaggcc

SEQ ID NO: 102981 - DNA, 122 bp, Homo sapiens
catgtgcacacgcggctgagggaagaatcagcgagctggaaggtgttagaaacttcacaaactgaaaagcaagaagaaatgagaataaatttgaaaacagaagaaaatggccaagacctgtg

SEQ ID NO: 102982 - DNA, 201 bp, Homo sapiens
ggctctttccggcatctcctttcgtaataatgtgaattaatatgatttgttaaatgttaacttttatatcgcgttgtgcactgctctaagatcctctgctcaaaacttacctaaattcaaactcttaaactgtatttcccttttttttttcccccttaaatagctgtttatttggcagtgtgccggaaagaggagagtggg

SEQ ID NO: 102983 - DNA, 115 bp, Homo sapiens
atcgcccctacacatgtcagcacacagatcattaactagggttcaatatttgcttatgggtttttcctttcaaggtaaaatttacccaagtgaaatgcagactttttgttttttt

SEQ ID NO: 102984 - DNA, 548 bp, Homo sapiens
tgcagacctgggttaacattagcagataggttttgagaacctgctcatgggctaggccctacttcacacattctaggtgctaaggtttcaatctcagctttgccattgactacttttgtgagtttggacaaggtatttaatttctgtgccgcgttttcttcagttgtaccaacagtaccttactaataccgatagtaccttactaatgagtacttgaggattaaatgaggcaaacatataaattccttaaaagagagcattccaggctgggcatggtggcttatgcctgtaatcccagcactttgggaggctgaggtgggaggatcccttgagcccaggagttcgagaccagcctgagaaacatagggagaccccaatctctacaaaatatttaaaaattatctgggtgtagtggtgcacatctgtggtcctagttacctgggagactgagatgggaagattgcttgggcctgggaggtcaaggctgcagtgagccatggttgtgccactgcactttagcctggatgacagagggaaacccggtctcc

SEQ ID NO: 102985 - DNA, 251 bp, Homo sapiens
tgaaggcaactggaacagagggcggatggaggctcaagttaggagcaactcagagaaagctggagtgtggccgggcacaatggctcatgcctgtaatcccagcactttgggaggccgaggcaggtggatcacgaggtcaggagatcaagaccatcctggctaacacagtgaaacctcgtttctactaaaaatacaaaaaattaaccgggcgtggtggtgggtgcctgtagtccctgctactcgggaggctg

SEQ ID NO: 102986 - DNA, 265 bp, Homo sapiens
aatgaacaagaatacttgattttaatattgtcagatttatcttttatagttaatatttgctgttttatctaagaaactcttttttgtccagatgagaagaatgttccctttgattttttactaaaagatgtaaggtttgggacatttaagtccttgagttgttttttttaatatgaggtagggacctgattttatcttgtgccatatagaaaatcttttttatcttgttccatttgttgaataatctctcctttcctctagtaat

SEQ ID NO: 102987 - DNA, 664 bp, Homo sapiens
ggagaaatcaaataattaagaaaaataaaatgggttcgctagggtagggctgtccaacagaactttcagccaggatggaaatgttctatagtctgtgctgttcaagatggtggctggccacatgtggctatcaagcacttgagatgttgctggtgtaactgaagaactaatttttaattttatttaattttaattaattttaatttaagaagccacatgtgctggtagttagcttactaaacaacactgctacaggggaaggaaggaagcagagtttaggaaaagggatagaagctaggtttctttgtatataatttttgtagatttaacattggaaattacgatttttagaaatgagatttttgaaaagcaattcccataaatcaaaataaaattagataaatcaatctacatacatggttggtggtaaaaccacacaaattaaccagttcgaatgactttaaaacacaataacttgactttatattcctagtgagacataatgaccaaaaaaaatttttaaagccattccaataatcatattttgctactcagatattttattctcagacttatacacatgtactgtgaaataaaacaaatgagtaattattattggtgcagctgggcactagaattttcaacatggaagaagtaaatataa

SEQ ID NO: 102988 - DNA, 124 bp, Homo sapiens
ggaagaaagttctgtggggtgccaattcttactaaccccgagcccacagcccttactggcaagcccagtggtttttaatcattgttagctgttgttgctgcagcagcttctgattaagttgcat

SEQ ID NO: 102989 - DNA, 318 bp, Homo sapiens
gcagggcctaggggatgccgaattccagggtccagaaagagcttgggataaaaagaaacttcaaggggacggctttgacctgggctgagtctgtctgtgccatccaactggagtctcaagtcctgaggcaggacgtccagatgccccagtgcagggtcctcctgatcaacacctgctcccctgtactcattagcaacctcacccaccctactctcaaagcacacttggctctcgtatccaggagctctgcatctgtagattcagcaacagcagatggaaaatattcagaaaataaattggacggttatgtttctattg

SEQ ID NO: 102990 - DNA, 1317 bp, Homo sapiens
aaccttgctctgttgccaagctggagtgcagtggcatgatcatggctttcttcagcctcaacctcctgggctcaggcaatcctcttgcctcagtttcccgagtagctgggaccacaggctcacaccaccacaacaggctaatttttaagttatctgtaggggcgagatctccctatattgcccaggctggtcttgaagtcctaggcttaagtgttcctcctgcctcccaaagtgttgagattacaggtgtgagccacctcacctggccaatttgcaagaatataatacattgttattgactatggtcaccatgtcgtacagtagatctcttgaacttattcctcctcactgaaagtttgtatcctttgagcaacgtctccccaacccacttcttgttttttattaacttattaaagtataatttacaataagtttcactcattttaagtatgaattcaatgagttttgataaacacgtgtagtcatataaacaccaccactatcaaaatatggatcatttccatcacccagaaagttcccttatgttcttttgtattcggtccccttcccaacctccagcttttggcagccattgcttttcttttctttgtctttttttttttttttgacagacagggtcttactgtcacccaggctggagtgtagtggtgtgatcacggctcactgcagccttatctccctgggttcaggtgatcctcccacctcagcctcctgagtagctgggactacagctgtgtgcgaccacacccagctggttttttgtttttttttttttgtttttgtttttgcttttttttttttttttgtatttttagtagagataaggttttggcatgttgcccaggctagtcttgaacttctgggctcaagagatctgcctgttttggcctcccaacatgctgggattgcaggtgtgagccaccacgtctggcctttgatctgctttcaacacttttagctcttctagaatttcagaaaaatggtatcggatgtacagcatggacccttctgtggtgggcttctttactgtaatgcttttgagattcatctgtgctgttgagtgtctctgcagtccattccttctgttgagtgtatcagtagtccattccttttcatggctgagtagtatttcattgtataattataccactatttgttcatttactagataataaacagttggcttgtttaagtatgaattcaatgagttttgataaatatgtgtagttatataaacatgactacatatataaacatataaacatatacatatataagcacatataaatttgtgtc

SEQ ID NO: 102991 - DNA, 382 bp, Homo sapiens
cctaagataagcaaaatgggataagtttaacaagtgttagagtccaggtcatcgatatatgaggtttgttatactttctttcatgtatttttacacattaaaataaagaaccagttctgactgtgtcatacatagtacagtgtcttcagaatgggccttagcagacaccggtatttactgaagcagaccaagatgcggtactcttctgaattcagcaccgtgtgggctggtgtctccagccagccaggagaaaatcagcattgatccaactacttaaaagcaccacttttagaatagaaatttaatatgtttacttacgtttggattgtctctggttctccttagaaaaccatgagttaaaatgtctgaagattttcattgg

SEQ ID NO: 102992 - DNA, 308 bp, Homo sapiens
atgatattatacctactacaaaatagtttccattttatataatatatagtatcgtatgattatataatttttatattttatatatcaaactttcatgtaacattttagttatttctacttttacataatcacatttaatgtttatagtataaagttataactataataacgggtcatagggttcagacagcctgcagttggaggtggtcaatatttttattgtttgtcaagaatcccaattctggctgatttagcaccaaggaagctttctccagctttgggcttttgcaccaactgtgttctctggg

SEQ ID NO: 102993 - DNA, 398 bp, Homo sapiens
agtatccatttattcagaatgtaaatgtttgttctgaataattaaatgttctagtttgctaaaagttaccaaattctttaaataaattaccagtattcaaataattttaatatactaaagtatagttacatagaaattaaattccagaggttgaaagatacttcaggaactttaaacatttcacagtcaagtctaacaaatactaattgttattctagcctggagagattagtttagagtttatctaattgagtatctccaaaattgatacttaaagtaaaccatagtataatttttgcttgcttgaaattcgtgtatgtgtttcaagaaattaaatgtagaaagaagtaatttttttttctatatttgggataaataggaattgattttagtatttc

SEQ ID NO: 102994 - DNA, 270 bp, Homo sapiens
tgagtaaagtgaggccccaactttgggatggtcattactgaaaaagaaaaacctcacatgatgacaaagtctttttaacactacatgaatgtgactaaatcagctactgaaccaaagttcacaggagcaaaatcaaaaagaacaaggagaatcaagcaagttaatctggtaaaaagtcacagacggctagggacagtggctcatgactgtaatcctagcactttgggaggccaaggcaggaggattgcttgggcccaggagttcaagacc

SEQ ID NO: 102995 - DNA, 295 bp, Homo sapiens
cttatatgatagaaaaggccgcttctccatttttcataaatttgagtattgaaaggggttaaattcaggttggataacattgcacagtagaaagaaaagtacacttattctacatataacctgattaatttagtataggagagttacattccaccaaaagaaagtgttcctgttcatagtcttgggctttaattacaaatgttgacttcgtgacattttgagatttgagaagtctaagagcagaaagaattatagtttatattgatcatacataagcatgttcaaagactgccag

SEQ ID NO: 102996 - DNA, 601 bp, Homo sapiens
aagttggagcatcaaggtgagagctgaggcacaggagagggaagtgtctgcctcaagactctgtcctcttccagacacgtgtcctgtccccgcttccccagctaggcaacctctcaaagcagggtgttcactctcaacagggcagaagaatttgcccatcttctgatagggcagaagatgacgggaggacagccacacatgttccaaactgctctcagcttccaggtcaggctcagccattgtgcagcccacactggcgtgtctgtctgtctggcatgcatgtctgccccaccccatgtctgtccctaggacatgtgcatccacagctcccacaccagagttcccaggaagacaacgatcaggccagaatgctggacttttgcttaggtcaatgttatatgtttcttagatgctgacacactagtcaaggctctggctgacacggctgacagccaggacgtgggttttcactgggagtcatgggtgtctgtgaggctggatgaccttccacttcctactccaggtcacttatttctaacatttgtcatcatgacccaaatctaactttaaaagcattcttccacttaatgaagctccagtc

SEQ ID NO: 102997 - DNA, 193 bp, Homo sapiens
caattttcctaatggtatataaacaaagacaagcagttctctctcttaattcactttttgtgaataatatgaatacccacaagaacacacacaaaaattcagttgttacacaactagaactcttaaaagaaacaagtcacaggccaggcacggtggctcatgtctgtaatcccaacactttaggaggctgagg

SEQ ID NO: 102998 - DNA, 219 bp, Homo sapiens
ggcataggactaaggagggagagagactggtgtttactgaacccattatccgggcagtcttgtggcctggtacccaagctgaggccagataggtagggctggcttgaactgggccccaaggcagtgcttccttggagactctaaagcaccaagaaactggcatcctggccctgggagaggcctactaggtggccttctctatccacattcactggtcct

SEQ ID NO: 102999 - DNA, 399 bp, Homo sapiens
ggagaagatgtgggagcgaatttattgcaggaatccacaatgactttgaagttgttggagcaatgcattgtattcagaaaacctgtgtcacattaaaaaatttcatctaggctaggtgcagtggcacaatcatggctcacttctgccccaatgtcctgggctcaaatgatgctcccacctcagcctcctgagtggctggtgctacaggcacacaccaccatgcctcactaatgttttgattttttgtagagatggggggtcttactatgttgcccacactggtctcaagctcttggtctcaactgatcttgccactttagcctcctgcatagctgggattacaagccactgtgccctgtattttaaataaatcttcattttcttagatgccaaacacca

SEQ ID NO: 103000 - DNA, 160 bp, Homo sapiens
gcacacacacatctatgccctgagctgggacgagctgcacagagcgggctgggggctgctccctggaaaagaggcagcaggtccctgggacgcctggagccgcttctcccggtgccagccttgccctctgcgtactggacagcaacaagcccaggcacag

SEQ ID NO: 103001 - DNA, 99 bp, Homo sapiens
ctcctgcttgttgctggcaggaggccaggcagcaaagcgtctgaggggagttttccttgcctagaggagtcagctgctgtgttaactccctcactgctg

SEQ ID NO: 103002 - DNA, 586 bp, Homo sapiens
gtggccaggtgcagtgacacacacctgtaatcccggctctttaggaggccaaggcaggaggattgcttgagcccagcagtttgagagcagtgtgggcaacatagtgaaaccccatcactacaaaaaatttaaaaattagcaaggcatggtggcacatgcctgtggtcccagctacttgggaggctgaggtgagaggatcacttgagcctaggaggtcgaggctgcagtgagctgtgatcacaccactgcacactagccttggggacagtaagaccctgtcacacacacaaaaaagataatctggcaaaattaatatgagcagcatttttcactcgaagggaaacctaaataagcaataagcaagttatgttttaatcataagacttacttggaaaattaagtataagaccatagtaagctacagatgcttctcagatacttcccgataaactcatcataaataaaaaataccattaagtaaaaaatgatgctttttttgttgttgtttttttgagatggagtttcgctcttgttgcccaggctggagtgcagtgcaactgcaatctctgcctcctgggttcaagcg

SEQ ID NO: 103003 - DNA, 139 bp, Homo sapiens
cttgagcacctactatgtgcaaggccctgtaccagctgatggggatacaggaatgaacaaggaggaggaggtccttcccctcattgagcacagaatcttgagggaaatgcagatattaaattaaatgttgtaaacgtgt

SEQ ID NO: 103004 - DNA, 626 bp, Homo sapiens
ttctctcctctcccagccttgcctgatggtcttcaggagagccaggagaggccagttgtcacgtgcctgaaacatgaggacttcgagttggctttccttctcttgaccaagggcgcagacccccgtgctatttctctcacggaaggtgatactcctttgcatgcagcactccacatctttctagagattaaagctgacattggttttagcttcctcagccatctgttggatctgttttggtccaaccccactgaattcgactacctcaaccccaatgtccaggacagcaatgggaacacgctgatgcacatcctcttccagaagggcatgctaaagcgcgtgaagaagctgttagacctgctggtgaagtttgacatcaacttcaatctgaagaacaaagagggcaaagatgcacggcaccggattaagaagaacgactctctgctcttggcctggaacaaagctctgatggagaacaggaggaggagccggcaggactctgctgcccacctggggaagctctcaaagtccactgcccctggtcacacatctcagctcaagtcccagggttcattcaagtcagtgccatgtggtgccactgccagaacactgcctgaaggaagtgc

SEQ ID NO: 103005 - DNA, 231 bp, Homo sapiens
taatgtattgctgagtatttgacatgtagaaatgtaatatgtctataacatatttcccagtaacatcaaaaaggaggtggttggaagaaaaatgtatcgtgataagataatcactctagatggtaaagtgataattactaaaatgtattgttggctttgtaactttaatagatgtaatgtgtaaagtgataatactttcaaatggaggaaataaaagagatttgtataaga

SEQ ID NO: 103006 - DNA, 491 bp, Homo sapiens
gaaaatgcatgaaacttccctaggtctacctggttactattcacaggatcactttgggtaggtgagtttgtgccagaggttagggaatggggtctttcaagactcactgtcctgagccctgctcacccaagagacctcttccccagttccagtttggccccaaatggttgcctctccatagacaaaatgtttcccacctctctatccctttaactgtttgacagtaatgcagattcgtttatcagattaactggaagtcaatccaggttggcacccctggagaaggcctggccacctgagctgccttcaactaaaggactgatctgtaatagacactttagcctcatgtggccgtggagaaccaaaatgatctatggaaatgtagggaaactcattttagctcacaacaaaggagtcactttttacctgttagagatgtccaatattagaatgggctacctcataaggtaatgagccttgtcacccaaatg

SEQ ID NO: 103007 - DNA, 102 bp, Homo sapiens
atggtaaagcaggggaatgaactgaaagccttacagaaatgtaaggtcttccgcgtcattagatgctgtgagacaatggaaaccaactcaaatgcctggcgc

SEQ ID NO: 103008 - DNA, 403 bp, Homo sapiens
ctttttctttattttatatatattatatatataatatatataatatatatgtaattatatatatattacatatatatataattcacagtagccaaaaagtgaaaacaacccaaatgttcatcacctgatgaatgaataagtttcaggatatccaccaatggaatattattcagcaataaaaaggtttgatgtaatgatagatgctaaaaacatggatgaaccttggaaatatttaaagtaaaataagacaggtgtgaaagacatacattgtatgattccattcatatgcaagtccagagcatgtaaagctatatagaaagtcagttcgtggttatgtaggcctaggatgtagatcggtggggggcagggagtgatagctaaaggacaaggggttttttttctt

SEQ ID NO: 103009 - DNA, 589 bp, Homo sapiens
tttatatggctggattgtctttttaggtagtctttacaccaaaggggttgagactgcagaatccctctggtatttgatgttccctactgcatgcagtggtgaaaaggtacctggaagatgccttctatcaccttgacatctcacaaaggagtaagggagcacttatatgcagatccgataaatggaaatgaataaaggctctagaggtgtccctccctccctctcatgacttcctcgcttttgtgacaagtagcccatatgatggtggccagtgcaggagctgagatcttgagcaacattttctcaactctacattttttttttaaggccctatgatgcaggtaccatcccatgtgtttttatgccccttatttcattcagaagatctgtttgcctgcagtggaccatatacttttggatggaggttgggagaaaagcatccgtcaggaaccagaatcatgtgatagtaggctatatatattttttgtttcaagtttttttttaacctcctagaaacacttctctgagttagtaacagagaactgtgaaaatgtccaatcaactttaagacaactgattttttatagcc

SEQ ID NO: 103010 - DNA, 418 bp, Homo sapiens
aaagtgctggaattatgggcatgagccaccgtgcctgggccgggttctctattctgtcccattggtgtacttgcctcatatgataccagaaacacagcatcttcattctagcagcagggaagtctcagggtaattgggatgtttccttgatgccttcatggaaaaaaatgagtatctgcgagtccatgtgtaggtctatttctggattctcttactccaccgatctatacgtctatgtttactccaaaagtatactatcttgattactgtggccttataataagccttagatatccagtagcataagttctccaactttgttcttctttctgaatgttgttttggatattttaagtcctttgcatttccatacagcttttaaaatcagcttatcaatttcctgagattttgtttgggg

SEQ ID NO: 103011 - DNA, 771 bp, Homo sapiens
ctgagcacccaatatccagccacttcatccttcttactgccctcagatcgcacctcccactttcagccttctgccccattgtccatgtttcctcaacctggaatgttccctatccccgtggcctctgtgaaaatgtacccgctacttgaggtctaacctcacatgtacctaggcagaattaatccatccctctaaaatattctcaccctcttcctcagtctgtatcaaactcccactccttcacacaaatatcacacacacgtgcctgcaatccccaaatttcaaaatcttccaaattctgaaagctgaaagtgttaatatttttcataattcatttggcagaaaaccccaaactgaagttactttgtaattttgatttatgtcaccaatatgagaattcatgcatttaactgcaaaaaccaaaaacctgaagtgtttgaccacaggcccagaccccactggaagtattagacaacatttgatgtatatagtactgccctaagacccacgtggacacgaggaaccagaagtactcctggaaatttactctattccccctcccttgagttcacagaaccagatgagatgcagttccagtggggaattccagtgcaccccagaccagggcacagatccagactcacatgaactctgcttcctgtttctctcctttgaagcactgtggagtcaccagatggtgactatgttggtgtatgtcataggagtttactccattagataagaagcttgtccacaggtctttccaagata

SEQ ID NO: 103012 - DNA, 331 bp, Homo sapiens
gcggccgcctactactactaaattcgcggccgcgtcgacataatagtttacatttaacttcacttacacagttattttgatagaatgcgtcggtgtttgtgtagtatacttttgagggtgagacagcagaattgccttccattcaaaactgacatgctttataaaaaaatctatgcagtgttttcttttttgagacggagtcttgctctgttgcccaggctggagtgcagtggcgtaatctcggctcaccacaacctccaccttcagggttccagcgattctcctgcctcagcctccagagtagctgagattacaggtgcaggccaccacg

SEQ ID NO: 103013 - DNA, 330 bp, Homo sapiens
attacagtgacatgatctcagctcactgcagcctctgccttcctggctcaagcgatcctcctatctcagcctccaaagtacttgggacaacaggcgcacatgccaccacacccagctaattttggtattttttgtagagatgtggtttcactatattgcccaggctgtctcaaactcctgggctcaagcaatctccccacctcggcctcccaatgtgctagaattacaggcacgagtcaccacacccggccactacaggacactttctctataaaattctccttcttttccttccatttctgataatctaaatcactcttatctctctca

SEQ ID NO: 103014 - DNA, 279 bp, Homo sapiens
ggtgcgatctcggctcactgcaacctccacttcctgggttcaagcaattctcctgcctcagcctcctgagtagctgggattaaaggcatgtaccactatgccctccagcccttttatttttaatattctcttccttgagttcaagcaaagttacttaaaatgcttttttgataatgtcctccctttcctcttttctttctggaatgcctattatttcgatgttgacttttgaattttctcctgtaatttccttatttgaagaatcctatagtgtattgt

SEQ ID NO: 103015 - DNA, 831 bp, Homo sapiens
ccatttaacctcaaaatcaattaaagaaggaattaatacagagtatcaaagctgttatgcatgctaattagaggaatgttgagtcatttttccacttcattcttaaggatgtgagatctgtcagtacatccaattagaaatactcatggttgatgctggccttacattaattgctaaagatatttattcatttcattctttgtatttcttagttttgtaatatacaatgagaatcaagtacataaaacttaaaaaataaaactatgaaattataagaaacatcacctgtaagaacctgtcttgaaattttggcagcaaactgctttaaactattaagcattttgaaaaagaaatttaaatataatagataaaaataatacactattgcaggaaatattcctaattttaattgtgaaaaataatattcgagttgaagtacaagtttctacatttttgaatgcaggtaaatgtagagaacagaattttttttgccagcgaaatacaggacagtaatagatcacaggattttctcaacactttgtcagcctgctcaaattggtcataagatggcagaaatcagtaagtaatagaataagtcagcacttatctgcccagcaaaactgcacaagttgataacaaaaaaggcttgttctgctctttttaggcttcgataatccatgcagaaccaggacaatcatatttgcagattttgaatctgatttaccactgccttccagacatagctgcccaaatgggattcatggccgcaagaccatctataaatgcatacttacattccagttatcccctgtgacacatactccatgaaac

SEQ ID NO: 103016 - DNA, 527 bp, Homo sapiens
tggggacgggggtctgtgtattatgccagggcttgtctatcatggtccggagaggtgggggcagcatctgggcccccttgctcagtcaggctccttgcctttcccatggtccttgccccctcagcaggagtgaactcatgatgatccaacccggatctgggccctgacctcccagcgctcctcttaaacctcggggctgcaaggatttgctagattctagaccagggtttccccagtatcagcactgttgacatttggggctgtttattcactattgtgtgagaccatccagtgctctgtaggatgttgagcaatatccctggcctccacctgctagatgccaggagcacctcctcctccccagtcttgataataaaaaaaagtctccagatttcagtgtgcccaggaggggaagaccatccctagtgaggagcactgtgtcaagggaaagccccgatccacatagctgccacggagactcctgctggcaggacttttaacaaagggttcccaggacggtcctggtt

SEQ ID NO: 103017 - DNA, 397 bp, Homo sapiens
acaaagaacagataaaggtgtcaagtgagaaaggtgaaatgaggttatcactcacttcacctctcacctgatttgtgttgctagctgaaactgctggccagtaacgtatgtataagaaactgttataggccgggcacggtggctcatgcctgtaatcacagcactttgggaggccaaggcaggtggatcaccagactgaccaacatagtgaaaccccctctctacaaaaaatacaaaaattagccaggcatggtggcttgcacctgtattcccagctacttgggaggctgaggcaggagaattgcttgaatgcaagaggcggaagttgcagtgagccgagatcgcgccactgcactccagcctgggcaacaagagctaaattccatctaaaaaaaaa

SEQ ID NO: 103018 - DNA, 335 bp, Homo sapiens
agtataatgacatgatcttggctcacccacagcctctgcctcctgggttcaaggagttctcctgtctcagcctcctgtgtagctgggagtacaggtgtgcatcatcgtgcctgctaatttttgtatttttagtcgagacgggttttgccatgttggccaggttggtgtggaactcctgacctcagaagatctgcctgcctcggcctcccaaagtgctgggatcacaggtgtgagccactgcgcctggccttgtgagtgctcttattttgttttcaggggtgtataattgactttcactttgatggagtttagaacacagcctgctatagaagatt

SEQ ID NO: 103019 - DNA, 374 bp, Homo sapiens
tctcagtggttgcatatgaacctgccagatgtcaacaatgtgtctgctgtgtacaatatcccccaaagactaaagatacttcttgctgatatagtatttggaaataactggcaaacatcgtggacctgcagcatcactaagtgtctgtgtaaacacctctgaaacaacagatgttctgaattcttgttcccttggaataacaaaatgacttgcagggagctgatgttcccctcacttttccaaaacaatttcaggaagaatccgtgagctctcaaactcagatcagcttcaggttctggaatccacctgtggctactggcagtttttttttgcaggtgtttgcccgtgggaagctgtcaagaattggtctaaat

SEQ ID NO: 103020 - DNA, 292 bp, Homo sapiens
atgatctaaaaacttgaaggggctatctgccagaaggttttgggatgatatctgttcagttctgaaggcaagtctgtgcatatctcatccctcactgacttttgcagccacttctatactaataacgttgccttctaccctgaacgctgaactgtcctattttggaggctcttacgggttagttccccagaaaccatctgttccaaatgtgcttgatttcagcttaggactttccagaaaagccttccttgacttagaagaaagataacattcattgatcttgctatgctcc

SEQ ID NO: 103021 - DNA, 406 bp, Homo sapiens
caactatggaattccacagatacatagagagagattgcggaggacagtcagtgaaatctgtggtgttaatgtgattcaagttttctttaaaaatgatttcctttaatgtgactgaagtggatggagttttcccatcgacagatagttttcttcctttccagcagccatttgtggtgagttcatttataggtttctgactgttcattctcatgtctcaatcctgtaataagtctgtcagcctgcagtgactaaatgacaccaactgcaagaaaatggaaatagtagggagggtgttttgacagtttaattaccctcaagtcatagcccaagcacaaacagggctgcttcggttgtgaggacatctggcttcagaactggtggaataagcgtcattcttttccaacgt

SEQ ID NO: 103022 - DNA, 133 bp, Homo sapiens
aaaatttgtccgttgccataaaagtttctaaactcttattctcaatgtctgtactacaggcagtgcatttgactgcagactaataaactagtcctggactggtacacttcaagagcagtgacctaagaagaaa

SEQ ID NO: 103023 - DNA, 1367 bp, Homo sapiens
taagtgttacttttcaagggcagaaactgggcagaatgccagagagacacaactagaactttttgagccaacagagacctttgtgtaagttgttagttggatccatcagcctcgctatcctaagcattcttctcttattttactttctaagcacagctgtgttaggactaacccattcacagcctggtcaccaatgttctatcagcatcacagaatactgtctcatggtgtctagcttgatgaacttggttaggatactctctctgttactcagctttgtcatctgtaacatggggactaatacaaggactaaaaccttctattagccattatccttcttgccatctaccccatgttaaagccaggctgatttgttcttggatcttaagtgtgacaaagcctgcgggaaggaaccacattctgaaggtttgtgggctgtgtgagatccagagaacccaagggggtttttttgctcttgacaaacgaatgttaggtatgacctatgatgatacaacttctgcaaaattgaggaccagcctatttcttcattagaaatgcaggaaacctggccgggcgcagtggctgacgcctgtaatctcagcactttgggaggcagaggtgggcggatcacaaggtcaggagattgagaccatcctggctaactcggtgaaaccccgtctctactaaaaatacaaaaaattagctgggcgtggtggtgggcgcctgtagtcccagctactatggaggctgaggcaggagaatggcatgaacctgggaggcggagcttgcagtgagccgagattgcgccactgcactccagcctgggcaaaagagcaagactccgtctcaaaaaaaaaaaaaaaaaaaaaaagaaatgcaggaaacctatttaaaagtaacagaaacagctgggtgcattggctcatgcttgtaatcccagcattttgggagaccgaagcgagtggattgcttgagcccaggagttcaagacaagcctgagcaacatagcaagaccccatctctacaaaaatgaaaaaattagccaggcctggtggcatgtgcctgttgtcctagctactcaggaaattgaggcaggaggattgcttgagcccaggagttttaggctgcggtgagctatgatcgtgccactgcacaaaaccaagaatttagaaaaaggaatccacataattggaaattgagtattaagtttttgcttcctaggaaggtagtctaaatccttatacaaaaacttagctatgcagtgccaaggttggattgcttgtgaatgggtttgcatgctctgtaacctatcagttattctgaatcaagacttgaatatttaaacatacttggaaaagaaaaagatc

SEQ ID NO: 103024 - DNA, 643 bp, Homo sapiens
gattctaaaatttacatagaggccagccgtggtggctcacacataatcgcagcactttcggaggccactgcaggaagatcacttgagcccagaagttaaagaccagcctgggcgacagacacttcgtggcttatttttttttaattattaaaaatgaaatttagaccaggtgtagtggctcacccctgtaatctcagcactttggaatgctgaggtgggcagatcacctgaggtcaggagttcgagaccagcctggccaacatggcaaaaccccatctctactaaaaatacaaaacattagctgggcatggtggtgggtgcatgtaatcccagctactcgggaggctgaggcaggagaattgcttgaacctgggaggtggaggttgcagtgagcagtgatcacgctattgcactccagcctgggcaacaagagtgaaactccgctaactttcaattgatttttgacaaatgtgactatttcaatgggacaaggatagtcttttcaacaaatggtgctgtaactactggatatccttatggaataaaaagatcactgaccctgtttcataccacatgaaaaatttaaatcaaaaaagatcatatacccctatgaaatttcggaaataataaaacttttagaaga

SEQ ID NO: 103025 - DNA, 784 bp, Homo sapiens
gtgatggattcacagtcctcaagctctctgctgattttctacaatgaatatgtaccacttttgcaatcacaaaaacatgtaaagagtaatgttacttctacctccttcaagtgttttatccctggctgtagttgtatgttccctgcagagcctgtgggcctctgggtttgtgacactaatgcaggagtccccatccctgaatgtatatctgtatatctggtgagacccggggccctgaagggaaatggagatggtgggcaaggtgactgaggaagtctgatgatgaaggcgcagctgacccaggaccgtggaggcaggagaaagcaagctccgtcccacagagcggaggggaagaatagataagccccatcagtctgagtttgctgagcgtcattccccaccagccttcctctcctgcctccctcctaggctcctctggagcaactgctcaccctttcctgggcaccccttggtcttttttctccattcacttgtgaccccttaatgccaccccctgcagacacaatgaattttagggggacacaccaacaaggtccccccgcccatgttagtcatcactagcaccacagtgctctctccaagttccgtgcagccctggagaactggggccacattgtggaaaggggaacaagagcaaggtgagaagactgagtctggagaagtcaggaaggaagaaagaagggtgaaaatagcagagactgtgctagagcctcatctgcagagctcgagggctcagggcatcttcactggaggcccggggaac

SEQ ID NO: 103026 - DNA, 589 bp, Homo sapiens
catatattattattatgaccattacaaatgcgagttatcttccttagatttatgcctgtacctccttgggacactgatcatgtttttttttctgtttctataaagaggaacaatattctccttcacaaaccgtacctttcagcagtttctctttaactctcaaaacttgatgatttctaacaaaatgatcacaatagctccaaggcacagaagatgctgacaagaccaccttcttccctggaaatgtcggaatcaacatttcacacagactggccaaagtagcacacagcctgggccaaaaagaccactgtgcaggcagatgtccaggcttggagcagccacgggcacagaaacccctcttctagctctgtgggtagaaatttgtttatggttatcaccttccacagagtttcccagatttgctttcttttaattaacccaaatcaatctccaattagccatatgaagtaaggaacaaagagctgtgcattgtatcaccgttaaatttctcttgttcctttgtttgtttactctctgtctaccccgccccccccccattaaaatgtaaactccattaaacaagaactct

SEQ ID NO: 103027 - DNA, 238 bp, Homo sapiens
tgctgggaatacaggcatgagctaccgtgcccgacacctccttgtgattctaacaccatgattcatctttgttgctttaaagtgctaatttttttctcttcagagattttgcacaattgtgtgaaatttggaaaaaatattttccacttttgcagaaagttccttccctaggagtacgatgaacacacgtgcttgcttacacagtagttagagtgtaggcggctgtgtacctgatagg

SEQ ID NO: 103028 - DNA, 331 bp, Homo sapiens
ccccgtacggtgtggctctcagcagcctcaccacaggcaccgcagctttcccgctgtgcacccagctgggtgtgtgaatccccctggactgcgcccaggccaccttcatctcccatgacaagatggtcatctccctcaagggcagtcagatctacatgctgaccctcatcaccgatggcatgcgtagcgtccgagtgttccacttttgacaaggcggccaccagcgtcctcaccaccagcatggtcaccatggagcctgggtacctgttcctgagttcttgcctgggcaactctctcctcctcaagtacaccgagaagcttcaggagcccc

SEQ ID NO: 103029 - DNA, 937 bp, Homo sapiens
tgaacttttggtactcctagctctaatgctatatttgagaaaaactactgcagaggacttttaagtctgcattagtgtagtgatcatcctctccaaacgttattcctgctttccctcatttctctatcatttaaccaacccaggcaaggttagacacttaatccatttaaatctaaacctctgctatcaccaaaagactatatttttggtaaagtttgtgtgtgtatatatgctgactgtaaacttaaaaatatacatcagtgtttttattgaagaaataaagagctataaaatgagacactcatacagcttttgacttccagatttttatagaaaagtaggtaggacctacaagtgttcagaaaatatgattagatttgctgtttggcatgcatacatttaacagatgtttaatgtgtatagtttcatttggtacagctgtcttggtatttcctgaatacttttaaactccttagtatcttttatttaaagaaatctggaactacatcagcaaaactgtctttatttttcatccgggcataatgatatctatataggaaatgaagtggcaaatcacatggataagccatacccatggaatgtctatatgataatagtctgcatttgaccacagattatttttattacttgatccttccattcccttgcacaacgccatttatttatgttaaaacagaagaagacaaagagtttcagtgcatttgcatgaattaattggatcctcagagaggacactgcagcaaagagcagatctcttaggatagcatgactaattcatatggtattttagtggcatcccagttgcagtgtgcacttggataacttttttaaacaacaaaattattctccctttgcccttattaatattactccctaacttcagtacagtagaaatgatgcttggtaaagattggta

SEQ ID NO: 103030 - DNA, 779 bp, Homo sapiens
ccaggcaaaaggtgtccaaactatacagatccacatagtctaacagatgtctctatattcctcctcctcaaactctcagaggatccagaactgcagccggtcgtcgctgggctgttcctgtccatgtgcctggtcacagtgctggggaacctgctcatcatcctggccgtcagccctgactcccacctccacacccccatgtacttcatcctttccaacctgcccttgcctgacatcggtttcacctccaccacggtccccaagatgattgtggacatccagtctcacagcagagtcatctcctatgcaggctgcctgactcagatgtctctctttgccatttttggaggcatggaagagagacatgctcctgagtgtgatggcctatggccggtttgtagccatctgtcaccctctatatcgttcagcaatcttgaacccatgtttctgtggcttcctagatttgttgtcttcgttttgttttgttttgtttttctcagtcttttagactcccagctgcacaacttgattgccttacaaatgaccggcttcaaggatgtggaattcctaatttcttctgggaaccttctcaactcccccatcttgcatgttgtgacaccttcaccaggaacatcaacctgtatttccctgctgccgtatttggttttcttcccatcttggggaccttttctcttactgtaaaattgtttcctccattctgagggtttcatcatcaggtgggaagtataaaccttctccacctgtgggtctcacctgcc

SEQ ID NO: 103031 - DNA, 563 bp, Homo sapiens
  misc_feature (19)..(19): n is a, c, g, or t
cccttataatgagagcccngtccaaaccctgcctgatgggttaaaccagtattagggttatttattctgttcagtacttactgagtacctgctaagtatttagggagagaaaagaaaagtgtatagacgatgttatctcttctaataaagcatcatttttgcgggggaggggttgctttttattttgtacatgaatacatgaagtggcacaacattcaaaagagattaaaaggataggcagtaaaaagtaagtcttctttccctgtccctagcccacctagttctgctaccttgaggcaactacagttatagtttcaaagtataatttttaatatttttaaaatactttaatactttaaaaatcagaacatttatctaggaatagaataatatagcagtcatagggacacactttgacacatcacataagaaattaggtaaagagccaggtatatcgtggcatgtgccagtaagtcccaactacttgggaaggtgaggcaggaggatcacttgagtccaaaagttcaagtccagcctaggcaacatggtgagaacccatctca

SEQ ID NO: 103032 - DNA, 179 bp, Homo sapiens
tactttaaaaatcagaacatttatctaggaatagaataatatagcagtcatagggacacactttgacacatcacataagaaattaggtaaagagccaggtatatcgtggcatgtgccagtaagtcccaactacttgggaaggtgaggcaggaggatcacttgagtccaaaagttcaagt

SEQ ID NO: 103033 - DNA, 456 bp, Homo sapiens
cactctcacactctctctcacacacacatgcacacacccatgctgctggaaatttggggaatcacactgagttgagaatcagaaagtaactgagattcttatctttggaaggaaaggtaagtaagtagctgaggagttcctattcttctgtcagctcatcagccagagatgagatctggtgccactccaaaccctgcctgatgggttaaaccagtattagggttatttattctgttcagtacttactgagtacctgctaagtatttagggagagaaaagaaaagtgtatagacgatgttatctcttctaataaagcatcatttttgcgggggaggggttgctttttattttgtacatgaatacatgaagtggcacaacattcaaaagagattaaaaggataggcagtaaaaagtaagtcttctttccctgtccctagcccacctagttctgctacc

SEQ ID NO: 103034 - DNA, 176 bp, Homo sapiens
tgtccagaactcaaaccagtaacaactgcattacagactttggattcagccacaatgctccatttttcagttcctttgggctgcatttcaacaacgtaccccaggactctgctaccgccatcatgttcaggtttctcccacataagtgatgcactggtctgggacacatcagtgag

SEQ ID NO: 103035 - DNA, 844 bp, Homo sapiens
gaagctacttgaatccttagacagtttttctactctgaatttttagtttacattagattcttctaaaggccttacagtcatagtacttacttcataagactgctatcaatttattcctctaagggacttgttatctgcattcacatttgttataaaaagtaaatgagatttttcaaacttaagagatttattttttattatttacatagttaaaatattttttcagtggagttgaagcattgaagatagttttcttattcacttggtttgaccgtaatgctcataattaacgaagtaaaagggctactttttattcatgggccaggaaagtaacttgctggtggagatgtgggaatcagttaacaacttggttcattaaaactatttttttctgtggttaattcagtggttagttgaccatttaattaagtaggattgaccagttaaaaataaacaatatgtttaattatagaattaaaagataaagaaattgctttcactttgacttcttataagttagttaaaataatttcctgttcaatcataaatccatttgtataggaaggcttttcatcaaaaactaaattgaccgttaaatatttttagacaatcaaaacagtacgttaactgtaaggacttagaaaacacatccataaaagcaagaaaattcttttgctttccactagttccactggagataaccattgttaaaactcgagaatgtgtcctttcagtgtgtgtatgtgtacatacagtattgttttgttttattttgtttgacggagttttgctcttgttgcccaggctggagtgcagtggcacaatctcggctcactgcaacctc

SEQ ID NO: 103036 - DNA, 506 bp, Homo sapiens
gccatgtcagccggatccctccagtcttccgttttctctgtgcagcagggaggttctccgcagaccaaaggtatggagaaaatggacaggtggatccacccacagctgagtttttcagccaagagttcaggacaggagggcaaggaacaagggagtgtgttggccggaggctggctgcaggcatgggtcctggggtcaggttgggtagggaaggaggtgcagataggagggctggtgggcagggactcagagaaagacattggagaggagccaggagcggctgtgtggtcggaggagagaggagagctggtgaggagtgagccaggctgggggtcacagggccaggacgtagccgtgggaggggctgccgggccactgttgagtgttgactgaagtagggcctgggacgaagaggaaccagagggggctgttgagggccacttgggtgggtgacagagggagctgggagaagggcgcaagttgatggtgagagaagagtgtgcaca

SEQ ID NO: 103037 - DNA, 459 bp, Homo sapiens
tggaagagttttgttttgtttgtttttgtttttgtttttggagagtactatcctgcaaatgtgtgcacatacacatatgtacacacatgcataattcacataatttttgtgtatcaaatacacatcaccatggtacgtggcacccgtgttatatgctactgttttatgagtgtgggagtatggtggaataacagtgggtgagaatttgcatgggtgcctacccacatgattttgcctggactctctaacccttctgcaggtgttgagatgactatatttgttgaagatttagtttgagcctatagaactcaatggatggagttaattggcctgatttccaactcatgacgttaatagtagtaatagctgccatcaactgaaggattatagctgtggccatatatatgtgtgggtttcatatgctatatctatatattactatacatagttatagttatt

SEQ ID NO: 103038 - DNA, 400 bp, Homo sapiens
gtgtgtggggtcaaggagaccctggggctgttcattggacagcactaattcaatgcctaaaaataacctcggacctggtagggcacttcagaaatttccaggctctttcagaccccccacaaactcatttcagtctccaacatcttgtgaggaagttaattccatccttattttaccaccaggagcaccaagttctagagtaaatctgtgaagggctcacagttagttggtggtagagctgaaactggaactctggtctctctggccataggttcagggccacctcctgtggacctactgtgtgcttagccccgtgcagggcctgggcatggaaacggagtgaaggaggcactggctttgctgccaacatggcctgtctgcagggaagaaggccacctga

SEQ ID NO: 103039 - DNA, 463 bp, Homo sapiens
ctccgcctcccagattcaaacaattctcctgcctcagcctcccgagtagctaggattacagccacgcgccaccatgcccggctaattttgtatttttagtagagacagggtttcaccgtgttagccaggatggtctcgatctcctgacctcaggtgatgtccaccttggcatcccaaagtgctaggattacaggcatgagccgctgcgcccgtcccagatcccatctttatttaaaattttgacattttgttcattatggattttttgacattaattttgaatacaatattttaacaattatattacaacaatatttatcatcgttatcattgtggatcaaatagtgacctacccccccaccccccgccgaatccatgtctacccacaacttcagtatgtgaccttatatggaaacagagaattttgcacatgtaattagttaaaatgatatcacaccagatt

SEQ ID NO: 103040 - DNA, 323 bp, Homo sapiens
cagaaaatgagtatgcaggggtgtctcaattttgttttggttccagtttcctcattcctagtgacattgaatatgttttcctctttcatgaattacctgtccctatgtcctttgcccattatttttaaactgggtacttgtttctctcattaattggtagaatcttttttgtagtcttaataggaatcctctgctctatgttctaaatattttctcccatgctgtaagttgtcttttttttttttttttgagatagggtctctctctgtcatgtgatcctggctcactgcaacctctgcctcctgggctcaagctatcctccc

SEQ ID NO: 103041 - DNA, 678 bp, Homo sapiens
taacagtaagttctacagaaattatatgctgaattgaaattgtatttttatccaaaatataagaatctattcaagaaaaggttcacagtggaacaggaaattgatttaaaagatgttttgaaggctcttggaataactgaaattttcatcaaagatgcaaatttgacaggcctctctgataataaggagatttttctttccaaagcaattcacaagtccttcctagaggttaatgaagaaggctcagaagctgctgctgtctcaggaatgattgcaattagtaggatggctgtgctgtatcctcaagttattgtcgaccatccatttttctttcttatcagaaacaggagaactggtacaattctattcatgggacgagtcatgcatcctgaaacaatgaacacaagtggacatgatttcgaagaactttaagttactttatttgaataacaaggaaaacagtaactaagcacattatgtttgcaactggtatatatttaggatttgtgttttacagtatatcttaagataatatttaaaatagttccagataaaaacaatatatgtaaattataagtaacttgtcaaggaatgttatcagtattaagctaatggtcctgttatgtcattgtgtttgtgtgctgttgtttaaaataaaagtacctattgaacatgtga

SEQ ID NO: 103042 - DNA, 1670 bp, Homo sapiens
tccctgtagaagccagaggcgcagtctggactgtagtttcccgggagagacgaaagcaggaacgagagcggagcggagcacagtccgccgagcacaagctccagcatcccgtcaggggttgcaggtgtgtgggaggcttgaaactgttacaatatggctttccttggactcttctctttgctggttctgcaaagtatggctacaggggccactttccctgaggaagccattgctgacttgtcagtgaatatgtataatcgtcttagagccactggtgaagatgaaaatattctcttctctccattgagtattgctcttgcaatgggaatgatggaacttggggcccaaggatctacccagaaagaaatccgccactcaatgggatatgacagcctaaaaaatggtgaagaattttctttcttgaaggagttttcaaacatggtaactgctaaagagagccaatatgtgatgaaaattgccaattccttgtttgtgcaaaatggatttcatgtcaatgaggagtttttgcaaatgatgaaaaaatattttaatgcagcagtaaatcatgtggacttcagtcaaaatgtagccgtggccaactacatcaataagtgggtggagaataacacaaacaatctggtgaaagatttggtatccccaagggattttgatgctgccacttatctggccctcattaatgctgtctatttcaaggggaactggaagtcgcagtttaggcctgaaaatactagaaccttttctttcactaaagatgatgaaagtgaagtccaaattccaatgatgtatcagcaaggagaattttattatggggaatttagtgatggctccaatgaagctggtggtatctaccaagtcctagaaataccatatgaaggagatgaaataagcatgatgctggtgctgtccagacaggaagttcctcttgctactctggagccattagtcaaagcacagctggttgaagaatgggcaaactctgtgaagaagcaaaaagtagaagtatacctgcccaggttcacagtggaacaggaaattgatttaaaagatgttttgaaggctcttggaataactgaaattttcatcaaagatgcaaatttgacaggcctctctgataataaggagatttttctttccaaagcaattcacaagtccttcctagaggttaatgaagaaggctcagaagctgctgctgtctcaggaatgattgcaattagtaggatggctgtgctgtatcctcaagttattgtcgaccatccatttttctttcttatcagaaacaggagaactggtacaattctattcatgggacgagtcatgcatcctgaaacaatgaacacaagtggacatgatttcgaagaactttaagttactttatttgaataacaaggaaaacagtaactaagcacattatgtttgcaactggtatatatttaggatttgtgttttacagtatatcttaagataatatttaaaatagttccagataaaaacaatatatgtaaattataagtaacttgtcaaggaatgttatcagtattaagctaatggtcctgttatgtcattgtgtttgtgtgctgttgtttaaaataaaagtacctattgaacatgtgaaaaaaaaaaaacaccaaaacacataaataaggggggcg

SEQ ID NO: 103043 - DNA, 878 bp, Homo sapiens
tccctgtagaagccagaggcgcagtctggactgtagtttcccgggagagacgaaagcaggaacgagagcggagcggagcacagtccgccgagcacaagctccagcatcccgtcaggggttgcaggtgtgtgggaggcttgaaactgttacaatatggctttccttggactcttctctttgctggttctgcaaagtatggctacaggggccactttccctgaggaagccattgctgacttgtcagtgaatatgtataatcgtcttagagccactggtgaagatgaaaatattctcttctctccattgagtattgctcttgcaatgggaatgatggaacttggggcccaaggatctacccagaaagaaatcacacccggccctcaccggcatatcacagcctattcccgcccaacaatcccctttctctccgcgaacccacaccttgccttgtgatcctcaccatcccctcctgcccaaccttgccccccttctccccccgcccttcgccccatgtgttggtttccctcaagccactgttgaggtgtaggctatgccccgccgcccaccacctaaccacatccccacccccccatgtccccccgcccgacgcgacactcctccccacttcaccaatgaacccgcacccacgccccctgcttccctttctttccctctctcgttcttcttctctcccctccccccgccgtcccaacgccccacacaacaaaggattctccacacctaacttacccgccgttggtgtgagttttatgtagtaggcaacgcgcggtcagcccgccccgggccacccaatacccttccagctcccgtacggccgactcccataacccgccccctcccaatctcccccccccccc

SEQ ID NO: 103044 - DNA, 368 bp, Homo sapiens
ttgtcgaccatccatttttctttcttatcagaaacaggagaactggtaagtttattatgaaaacaaaattttatttaataggtcacaaagaacctcttttttaaatggagatttttttcctcagtactcatcatataatttcttttcacaattttatttatttattctctttccagagattgaccaactgaattatcagatagtttataatgttgaaatgattttttttaatgaaaataaggctggtgaggtggctcagactttaatctcagcacttcaggagttccaggcagggaggatcacttgaggccaggaattcaagaccagcctgggtaacatagtgagaccccatttctacataaataaaa

SEQ ID NO: 103045 - DNA, 369 bp, Homo sapiens
cagtatatcttaagataatatttaaaatagttccagataaaaacaatatatgtaaattataagtaacttgtcaaggaatgttatcagtattaagctaatggtcctgttatgtcattgtgtttgtgtgctgttgtttaaaataaaagtacctattgaacatgtgactagatctatttttttattttagaagttgtagtataaagatatctctaggtgaactttggaaacaatgtttctctacctcttaaatctcttatgcaggatcaaaacatcatagtaaaatagcattataaacttatgcataacaagcaataacaagtgaggtgaagacaggtactccacaaaaattctcactgtaatttcttggaa

SEQ ID NO: 103046 - DNA, 1632 bp, Homo sapiens
tccctgtagaagccagaggcgcagtctggactgtagtttcccgggagagacgaaagcaggaacgagagcggagcggagcacagtccgccgagcacaagctccagcatcccgtcaggggttgcaggtgtgtgggaggcttgaaactgttacaatatggctttccttggactcttctctttgctggttctgcaaagtatggctacaggggccactttccctgaggaagccattgctgacttgtcagtgaatatgtataatcgtcttagagccactggtgaagatgaaaatattctcttctctccattgagtattgctcttgcaatgggaatgatggaacttggggcccaaggatctacccagaaagaaatccgccactcaatgggatatgacagcctaaaaaatggtgaagaattttctttcttgaaggagttttcaaacatggtaactgctaaagagagccaatatgtgatgaaaattgccaattccttgtttgtgcaaaatggatttcatgtcaatgaggagtttttgcaaatgatgaaaaaatattttaatgcagcagtaaatcatgtggacttcagtcaaaatgtagccgtggccaactacatcaataagtgggtggagaataacacaaacaatctggtgaaagatttggtatccccaagggattttgatgctgccacttatctggccctcattaatgctgtctatttcaaggggaactggaagtcgcagtttaggcctgaaaatactagaaccttttctttcactaaagatgatgaaagtgaagtccaaattccaatgatgtatcagcaaggagaattttattatggggaatttagtgatggctccaatgaagctggtggtatctaccaagtcctagaaataccatatgaaggagatgaaataagcatgatgctggtgctgtccagacaggaagttcctcttgctactctggagccattagtcaaagcacagctggttgaagaatgggcaaactctgtgaagaagcaaaaagtagaagtatacctgcccaggttcacagtggaacaggaaattgatttaaaagatgttttgaaggctcttggaataactgaaattttcatcaaagatgcaaatttgacaggcctctctgataataaggagatttttctttccaaagcaattcacaagtccttcctagaggttaatgaagaaggctcagaagctgctgctgtctcaggaatgattgcaattagtaggatggctgtgctgtatcctcaagttattgtcgaccatccatttttctttcttatcagaaacaggagaactggtacaattctattcatgggacgagtcatgcatcctgaaacaatgaacacaagtggacatgatttcgaagaactttaagttactttatttgaataacaaggaaaacagtaactaagcacattatgtttgcaactggtatatatttaggatttgtgttttacagtatatcttaagataatatttaaaatagttccagataaaaacaatatatgtaaattataagtaacttgtcaaggaatgttatcagtattaagctaatggtcctgttatgtcattgtgtttgtgtgctgttgtttaaaataaaagtacctattgaacatgtga

SEQ ID NO: 103047 - DNA, 614 bp, Homo sapiens
ggcttcagagctggcattttcaaccatgacactaagtggccattatcataagcacaccaatataaattaaatttctccatccatccttttcctggcgtgagagtggaagacagagaaactgggggttggctttccctgggggaggcagcctgggtgtggccctgcattgcttaggaagcagcacagaagctgagccccagagattgtggcgggggacctgagaggttatttgttccagctcttgcctttatgggggtaactgaggcccagcatagagaaggaatttgcccaaggtcacatagggagaaaagtggcaatggaggcaggactaggtcccaggccttcagaaagtgctactgctgctgctgctgagaactgatacttgtacagtagttattcggtgccaggactattccacattaacatacttaatcctctatgtgtgaggcagataacattagcatttttgttttaaagaaaatgaggaaactgaggcacagagaagttatgaaacttgcctaaggtcacacagagccagaatttgagcccaggttcaaccaggacactatacgtctgaggcccagggcaagcttcctgtgtgggcggtgacagaa

SEQ ID NO: 103048 - DNA, 110 bp, Homo sapiens
gattaaaggagctaacacttggaagatactcagaatggtcctgatacatagaaagccctccatagatgttatccctgaacattgttgtcactgggagactgttttgcaag

SEQ ID NO: 103049 - DNA, 766 bp, Homo sapiens
aacatcgaatacagacgaggcatgtaagaaaacgatgttttaagaaatatgttttatgctatatcatttcttttactgaaaacaattggacaaacaaacaagaaaagccaaggaaaatgcgaccgggacgtggaatcggcccgtctgtgagtggaaggatcacactcccagctgagatagaaataaagccacgcgtgcctctgtttctatgcgtggtaaaataaacaagcaacacttcgaggaactattgattctgttattaaaacacagcctgtttggtttgccagatcgtagccattattaatgcattattaattctatgtaagtgcctgcttgtcagatccattaaccgggggagtaattgccgagggagagagctcagaaggtgtgtcacgctgctcgctcggtctaggtggaacgaagcggagggaagccacgcggagcaatggaggcagccctgtaaggcagtgtccgtttctgtctgtggccaaaatggccagggatgtttttggccaagctgatgagacagagattggaagaggaaagtttcatactgatacttcggctggctggctgcagagtaacctgcattttgggccatttttggttaaatgtatgaaagcaaacatccacataaaggctgaaatggtttgtcaatgacccagaggctgttcccgggatcttttgagccctgggaacctggaggtacctgcagagctgagcagattgcttccgcatcaaggaaacaagcgggacttgtgagaag

SEQ ID NO: 103050 - DNA, 1201 bp, Homo sapiens
cccgggcagttgtcttctctgcacgattaggaaggagtttgcttttcagaggtgaaagccacacttcctggctgcctttctgctcccaccctgtctgggagccggggcagtgctggaggctggcccaggctcccccagagccacagcactgtgctgtcccgtgcctaggaaagcagatgctggcaggagaaacacataacctgggctcctggggacagccagctgtggctgcctgccacaaaggacacagagggccgtctgcaggggagcagctgtgagggtcagagggacctaccaagagatagtgtcccctccccctctcctccccaggcctggaaggtggcaggagaagaacctgatcagacccttccccagccacaaggtacctgcactggagatctgaactttaaatctgaaattatgataagggcttggctccctaggagactggacaaagtccagctggggatagggatgggagaaaaatgtaactgtttcattttagacccaatcaaatggagactgatcagcaaatgaatcacaccccaaaacaagtcaatttctatttctcagctttttagaatccttttttctagattaatatacaaaatacggtaaggtcttcccctcatccctatgcccagagactgccttcagtccctactgtgcaggtggccactgggccagtgtgttttacacacacacaatgtatttttccttttcctcctaacaaagataacttcatggattgcattcctctgtaccctgataaggatatatatttactttatataattacattgattatttaataggatatcttgacttacgattcccatgagtgcaggaagagattccccattccttgtattaatggttgcagggtagtctatgatactacaaataatgctaagattagcgagaccctgacagatagacacaagtttacatcctaacagtaaagactgaaaacaacctctgatgcaatgaaacacaaggtgtgggtcatccggtgccctgaggtatctgtgtgcaacttcctagatgtggggtgtccagatcagtgtgtacatcttcactttgagaggctgctaaattgccttccatgagggtgtagcaatgtacactcctgccaaaatcgacgtgagaccccaccttcctgtaccatcaccaccactgaattaccaaacttttgataagt

SEQ ID NO: 103051 - DNA, 440 bp, Homo sapiens
gcacaaggcctaccacatgacagccactcaacggatatttactgcataaactcatgattatgaatattttagtacctgacctatgagttattgatacgtaatgggagtaccatgggttgcagaataacacagaccttgtttcccatcccagctccacagctcacatgctatgtgaactcagaaaatgtatggaaactttttaaggctgtttgcaaagctgtaagagcacgaccaaccacttacttcacagggttgccgtgaagactaaaatacacacagcatatgaagtgccaagagtgctgtattattttatatttttcaaaatgcagtgctacaaacttctttatcactatgtcaattaatgctactgctgccttaacccacaggccatcagatacatttttaaagttctttatgtgagcattattcaaggaaaagcc

SEQ ID NO: 103052 - DNA, 452 bp, Homo sapiens
gtgtgtgtgtgagagagagagagtgtgtctgtgtgtgtgtgtatgtgtgtctccctcatgcacctatgtttcccaacaccacaaggggtggtcatagtctgcagcctctagacctgaacctcctcacaacccaaaagctcaagacccaggccttcaatcagtaggatgtgaactttgaccttgaggccatgcggacatgggcccgaggtcccttgcctaacagccaccaagcctggcatgagcacacactcctcctcacagggcatctgatgttgtgaccagacactctctctggctgccctctcaggtgaggcacatgtggtggaaaaccaactacaaccagcactggagggcaccatcgcaaagtccagcacctcagtttgaaactcagtgtcaaggccagaggcagtcttcccaacctagccaaacaatctcaagacacgggcttcctc

SEQ ID NO: 103053 - DNA, 658 bp, Homo sapiens
taaattgccatttaattccatccatcaacccatttttctgctgtatacatagaaaaggacaacagccactccctcaaccaaatatccctacattcagttaaaagctactctgtaccccaggacatgggagcagctcctatccttcccaggtgaaaaagtgggctttttttcccccttaaggctaaataggatttcttttctgttagctatgggtaggtgacttcttaatgatctttaaggaaagaagtcaatacaaggaaaatatccttttttaatcccattttccttctcaccccacactgagcgttactatagcaacatctttcctgctactaggacagttaagtccccctgtgaagttaaccgaaagctgctttttcactcagagaatgggctgctgttcattgaccagcttttcctgcgtgtctaaattcttcggttctctctgacatgctcaatctagggtttcccgcggctaaaccctaaaattcacttcgaaactcctaacagcagaattccccaaaccttttcagaactgaactcattagaaatgaatttacattttgatttagttataaataacttttcttctgtgtattggtttaagtttagaaaaggccccctgtaaagaagacaagttggagaataatctcccata

SEQ ID NO: 103054 - DNA, 216 bp, Homo sapiens
aacggatgtggcatggggcgggggaccaggccggaggcgggctgccgggaggggggattccctcgtgccccaagggcgaatctcaggtcggaggaaggggctgaggggattccctctcccaccgggtccgactcttcgctccccaagccgcggagggccagcctcttcttcggcgccctccaggcctgttggaggtgagggaggtggggtgaggtg

SEQ ID NO: 103055 - DNA, 488 bp, Homo sapiens
caggtacctgatgcctaaaagaaaaagaacagagtacctctgaggctttatgttgtctactgacttatggattttgaatggatgaaaaaggccttgctttgccatgctgttttgatttatgggagtttatcctcataaatggtatgaagatatttttccagatcattactcagttttatcaacaccatttattgaaagtccaacctaatctcctggatttcaaatactcaacatgtacagatttttctttgtttttattccttaaacaatatggtataacaactatttatataacatttatattgtattagatattataagtaatctaaaaatatttaaaatatatgggaggatgtgcatagtttatatgcaaatactatgacattttgtatcagggacttgagtctgtggattttagtgttcatgggagtgagatgtgggcaggagtttggggggtggttcctggaaccaatccctgacagatactg

SEQ ID NO: 103056 - DNA, 805 bp, Homo sapiens
tttcagaaaaaaagagcaaaactgcagtcatattttcattagaaaatgacattgagattgctatcacccaaaacttaaagggtgtaatcaattctatatcccgaagtaaaattttgtggtcttacattaatatgatggtaatgaagaacagcactctagaatctgacagattcggggtcagttattagctctcccaattttattactgggcaaagttatcagtgtcttcgtttgtaaaataaggacagttatatgtaccttcttgagtgataaggggtcattgagataatgcatgtcaaacacttagaactgggcctgaagtaagtgccaaataaatggtaactatgtatataattattatctgagcacttggctatagaaattggtggagcttaagaaaagcagaaaaagggatttaaagataaattaatgaaatggaaatagaactacagtgatataactatattgtaagtaaatgcaaatacaatttttaaagtgggaaataaaagaaaaatctacataacattaggtttgagaaagtgtattgttacaggaatgaaaagaaattaaaaaatttaaaaccgtttaaaaaattaacttgaatgtgatgggttgatttctaagaaaacaaaaataatttcacacaagaagcagaaaactttaataggtcaataacttgaaaaatggaaaaagcttactttgcaccacctctaaaaaaagctttaaagtggtcttgaacactaaaaaaagatggaaggaaagctcagctcattctgtagtagcaggaaaaaccagatggcaaaac

SEQ ID NO: 103057 - DNA, 320 bp, Homo sapiens
aagtcgacttaaaaaattaaaaaatgttaaggctgagagaattttgagaccttaatacaaggtagtatattgtatcaggcttgttctgtgcctaggcttaattaccagatttctgtgcttctggacttataatgtatagttgtcgttttaatgctaacattctgattggatacgtccagcacttcacttgggtaaatcacaatctttctttcctccctcacaaaggacactttgaaatgatcctaaaataccttcttattcagatagatagaacagctagtggtagaggccctaacaaaaaaaaaaaaaagaaagaaaag

SEQ ID NO: 103058 - DNA, 383 bp, Homo sapiens
attgttttagtgttcatctatgaaagatctttaaaaaaccttgtctcttctggggaattacttcaaatctttgaaacctagcttcatatgcataagagtatttcttagttgtcttagttttcctttaaaataagcaacaattttgaatggtcctaatcaactctgtgtggggtttgagtattaaatagttctctggaaatgatatttttcccaggcattttgcctgttctgttgtattaaagactatgatttgaaccacatttagaaaagtatagaccatcgatttctaggttggtgactgatggacatttcactctttcttagcaagtgatgcgagggtcctttcaaccctgtccaagagctttgcttgaatgagcacaata

SEQ ID NO: 103059 - DNA, 435 bp, Homo sapiens
ttccctattgcaatcagatcaggaagttataaaatctattattttctaagaatagtgtttgaagttgtcaggagggtccagatgtgacttccaattatttattgtctaacttgcctaattcttcttcaccaacaaccattcaccatattaagacatttttagcattcaaagggacacattagcttgctgctcagcaagatgatgagaaaaaaagctagcatttttatgcaaacttgttcatgtgtaatatttgacaagcatcattgagtgcctctacgtgctcatgcatctatgtgacagtatgcaaagggttgtggatacaaagatgcagaataaataatcttttattcttgtttgtcttctagtgtcatagtaaagtaaaatatggcattgggccagagacaggacattggatgggcacttcagagcacactg

SEQ ID NO: 103060 - DNA, 141 bp, Homo sapiens
gtcatcttgaggcaaggcacactcagtctaaacaacagcagaacagcctggtccttcaagcctcacatcatcctgacccaccttctgcagagcctacctggaggaatggagggaaaggcagcctggaggtctcagatgcag

SEQ ID NO: 103061 - DNA, 296 bp, Homo sapiens
ctaaaaatacaaaaattagccaggcatggtgacgcatgcctgtaatcccagctactcagaaggctgaggcagaagaatcacttgaacctgggaggcggaggttgcagtaaactgagattgtgccactgtactccagcctgggtgacacagcatctaaaaaagaaaccaatccaaaaactacaaaatattcttgcaattataggtgacatatttaaatggtaagacaaccaatgttcatgaatggaaagacagagcaagaccctgtctcaagaaaaaaaaaaaaaaaaaaaaaaaaa

SEQ ID NO: 103062 - DNA, 372 bp, Homo sapiens
ttgagataagatactttgttcatataaataggtagatggaaggaggagtattatatcagtaccactcaagtctttcaatttcttctgaattaaatacctaagaatcatacaaagatttattatacaaaattatttttaatgatgtgtttggaaacaacttaattagatctttctttaataatctagccattacagtcagtttctctcttatcaccaatccatgtatttctaataatttgtgtttggcctctggaaagttttcactcttgagcaaaatactgtagtaaaatcccagaatgagaaatattattttcttggtaaagtgagagaagtaaagttgtaaaaagagaggagatggccgggcacggtggc

SEQ ID NO: 103063 - DNA, 1377 bp, Homo sapiens
cggccgcggctcgggacactccctggaggcccagcggccccaagacccgcggcgcgcgcttccggccccggcgcgccaggccgaagttcccgtggcgccgcgtgggccggtgcatggcgctgggcccgggcggctgccgggacgtcgccgcttcccagggcggcgccggcgcgagaccgcggggacgcgaagcagcgaggtctcggctttccgcctgctttaagccacgcggaaactgctgcacccttgactgcactcgttcagctgttcaggcgtcgcgattcgtaaatataagaaatttcccgctctcttccacggcttcccagaacgctgtgtcgctaacaaccagtgaagacccaagggctagggtgcagttctggtagccgggcaggaaaccagggccagatttgctcaccctaaaaacgaagtgtgagggcttccagtggctggctctgcttggagcccagagacattttcatccaatctgtattttagcgcctcgtatcagccaggctaaaggctgaaagagatttgctactgaacctctcttaagtctccctgcatcgcctcgtacataatacaagtgaggtgtactggggactgcggtaactttcttgcctctgtcaccccgtctttgctgacacccagttccatcagttctttgctttcagatggtaatgttgattcctaattccctgtgaacctgcagagataatcgccttaggtcttacttctgtagttctaggtaaatccattcgatggcttgtttaccttgatttgtgaatgagtagaagtcactacccatatatatttttttgattggagatagtgttttactgatttaaattggtagccccataatcctcaagtctgctctctggattgtgaaatactcaggttctcacgtgactgtgggtgatttcctggtgactaaatacagccttacctttcccaggccactcccccaggctctaggtgtcacgtcttaggtcatgatttcacttgtatttctccctgtataatggacacaattactagcattgcgcattggatgccacagaatctctgctgtcaacagctgatcattatagagaaataaaaagtgaaaggaagggccggcgcggtggctcacgcctgtaatcccagcactttgggaggccgaggcgggcggatcacctgaggtcaggagttccagactaacctggccaacatggtgaaaccctgtctctactaaaaatacaaaaattagccgggcgtggtggcgggcacctgtaattccagctactcgggaggctgaggcaggagaatcgctttaacccaggaggcagaggttgcaatgagcggagattgcgcccattgcaccacagcctggacaag

SEQ ID NO: 103064 - DNA, 582 bp, Homo sapiens
agtttgacctgtcaaccgtttatagacaaatatatcaatttaaaacttacacagcagaagaaaccatgagcaagtctgctctctggattgtgaaatactcaggttctcacgtgactgtgggtgatttcctggtgactaaatacagccttacctttcccaggccactcccccaggctctaggtgtcacgtcttaggtcatgatttcacttgtatttctccctgtataatggacacaattactagcattgcgcattggatgccacagaatctctgctgtcaacagctgatcattatagagaaataaaaagtgaaaggaagggccggcgcggtggctcacgcctgtaatcccagcactttgggaggccgaggcgggcggatcacctgaggtcaggagttccagactaacctggccaacatggtgaaaccctgtctctactaaaaatacaaaaattagccgggcgtggtggcgggcacctgtaattccagctactcgggaggctgaggcaggagaatcgctttaacccaggaggcagaggttgcaatgagcggagattgcgcccattgcaccacagcctggacaag

SEQ ID NO: 103065 - DNA, 1176 bp, Homo sapiens
cggccgcggctcgggacactccctggaggcccagcggccccaagacccgcggcgcgcgcttccggccccggcgcgccaggccgaagttcccgtggcgccgcgtgggccggtgcatggcgctgggcccgggcggctgccgggacgtcgccgcttcccagggcggcgccggcgcgagaccgcggggacgcgaagcagcgaggtctcggctttccgcctgctttaagccacgcggaaactgctgcacccttgactgcactcgttcagctgttcaggcgtcgcgattcgtaaatataagaaatttcccgctctcttccacggcttcccagaacgctgtgtcgctaacaaccagtgaagacccaagggctagggtgcagttctggtagccgggcaggaaaccagggccagatttgctcaccctaaaaacgaagtgtgagggcttccagtggctggctctgcttggagcccagagacattttcatccaatctgtattttagcgcctcgtatcagccaggctaaaggctgaaagagatttgctactgaacctctcttaagtctccctgcatcgcctcgtacataatacaagtgaggtgtactggggactgcggtaactttcttgcctctgtcaccccgtctttgctgacacccagttccatcagttctttgctttcagatggtaatgttgattcctaattccctgtgaacctgcagagataatcgccttaggtcttacttctgtagttctagggacagagcagaatgggctgatcatagatccgcgtgccgcaaacatgttgtgcgcgactccccggggtccagactactttataggtgccgacattctcagcatgtttattagcatagtcgaggatgtgactgtaacgtgtatgaacacaacgtgacaacgcttagacatacctgggaatgcttggattaacgacgcaaatatagagggggaaattcggggggaatgtgtgcggacgtaaagtggagtagtagtgtgggtgatgacttgggcattattgagaggacaaatacgatatggtcgaaagcagcattatggggatgaacgcagtgagaaagatgtgatcacgagacaacatgacggacagccaaaaaataagagaggtggcatgaagagagacgcaatctagtcgtgtcgtattacagtagttggg

SEQ ID NO: 103066 - DNA, 454 bp, Homo sapiens
aaggttgagtgcacacgtgtacgtgtgtgtgtgtgtgtgtgtacagtccatgaaaatatactttcccacatggttattaatctttaagagggtgccaagtgacatctcacaaaatgtattctcctctgcactatgcagtattcaagaaaatgacatgagctttgtacaatcttatgattttattgttagaggtcatgttaaactaagaaaatagtaatttcagctcaaatgtgagttaaatcatcaagttaaagtaaagctttttattaagtgaagctctctctgcagaatatctcacttaatatacataacatttaaatagactactaaaaaagtgacagctgaggaatgctttcacttctttccatggtttctactgaatgtcatttcagaaatgcctatacaacacatgacaatgtggaatgtctcctcccatgaaagagcatttgagttg

SEQ ID NO: 103067 - DNA, 259 bp, Homo sapiens
gagaccagcctggccaacatggtgaaattccatctctactaaaaacacaaaaattagctgagtgtggtggcacgcctctgtaatcctagctgttcaggagactgagcacaagaatcgcttgaacctgggagatggaggttgcagtgacccgagaacactcctctgccttccagcctgggtggcagggcaagactgtctccaaaaaaaaaaatagttggctgtaaatatgtcaattaatgtccaggttctctattctgtt

SEQ ID NO: 103068 - DNA, 281 bp, Homo sapiens
catgggctggggacctcctatctgccagcaataggcttacagagggtctatgaatggggcagcttaaagtacacatatagacaactgccttcctctctaaagacaagacaggaagccttccaaatgcttccctggtcttctaggcagagtgctggcccagcagcaagaacccgtatcttcaaagcaccagttacagatggggagtgtagtggacatgctgacattttttgcctgccagaatccattacccttctttctggtaaaagttcctctattttcct

SEQ ID NO: 103069 - DNA, 313 bp, Homo sapiens
cataaaaatataaacaaaaagagtaagagtagctgtaattctatcagatgaaatagattttaagccaaaaatggccacgagacaaagaaagtcaacatatggtgacaaaagggtcaatttttcaaaaagatataacaattggaaatacatatttcagagcacttaaaaatataaaacagatagtaacaaaactgaaacgagaaatagagaaaatataataacagtaggaaattttaatacctcaatacaaataatgcatagatcatccattcagtcagttaataaagaaacagcagtttgaacaacatgttag

SEQ ID NO: 103070 - DNA, 189 bp, Homo sapiens
tgccagttcccttgttcctctcatctgtggcagatggagtaacatagatcttatccctattttatatctgaggaaagtgaggcccagaggaggtaactgcaaaggaccatgatgagcatccaggaatctccattcccaggtcatttcccatcaccaaagcaggaaggatgaggtctaaagctgctctgc

SEQ ID NO: 103071 - DNA, 491 bp, Homo sapiens
gctagggaggcctcacaatcatggaggaaggcgaatgaggagcaaagtcacatcttacatggtggcaggcaagagtgtgtgcagggaaactcccctttataaaacgatcagatttcatgggacttattcactatcatgagaacagcatgggaaagacccacccccatcatacagttacctcccactgggtcccttccatgacatgtgggaaatatgggagctacaattcaagatgagatttgggtagggacatagtcaaaccatatcaagaccaaagcaacaaacataatcaagggtcttagggagagactaaagaagataatacattagtgaaacaaggatataatagaaaaagagggaacgatcagagaacaagaaaggacgtcttgaaaaataaaaatgttagccaaaattgaaaacaaattaaaaattaagagataaagtatttttttaaagaagtataggataccacttgaaaaaaatagaactta

SEQ ID NO: 103072 - DNA, 385 bp, Homo sapiens
gattttgtcccacttaatatatggcttcataatctgaatgatcttgggaaaactgggataactcatcttgcacactacacactaacagggaattattaaaggtagtaacctaaattggatccataaatacatcggtatcacgcagcaaatttttttctgctaggtaggagaacttacatacttgtattgttattggactctaatgacaacaaggtgagaaacgaagtcaacataatttaggaggctcctctccctcactccggaaatacacatggatttcacaattctcgctatgttctatggaaatccaagacaaacattgttgtgtattcacacacacatgagatattcccacttcagagataacataaacatagaggcaaag

SEQ ID NO: 103073 - DNA, 153 bp, Homo sapiens
gatccactgaaagcgaagtgtttttgccaccaagtgcacaggtgagcagtggagaagagaagctggtccaggtctgggtgcaattatctgaagggcgtgacaaactggcagatggcctggccgcatctgtgtgtgtgtgtgcgtgtgtgtgtg

SEQ ID NO: 103074 - DNA, 241 bp, Homo sapiens
aaaaggacaaaattttccttgttagaaacaatgttataaaagtgaaactctggaaactgaatacttaattctatattcaaaataatactgaaatcccaagaaataccaaacactgacacagttgtcatcacaatgagtactaccacaacaactgctacagcaaatacattatttccttgaacaaattgggtatattttctcaaacacaagaccacagtagtcatagccaccaagttaaagg

SEQ ID NO: 103075 - DNA, 119 bp, Homo sapiens
gttctgcccacggggaagattgtgacatatcgatgggtaaaacaccaaaatgattttactcttttgtctttgttctgtccttagaaggcattgggacatattgctgaaccagcaccaag

SEQ ID NO: 103076 - DNA, 530 bp, Homo sapiens
gccaaaagcgaagaaggaagctcctgccccttctaaagccgaagacaaagcgaaggctttaaaggccaaaaaggcaatgttgaaaggtgtccacagccacaaaaaaaagaagatccgcacgtcacccaccttccggcggcccaagacactgcgactccggaggcagcccaaatatcctcggaagagcgctcccaggagaaacaagcttgaccactatgctatcatcaagtttccgctgaccactgagtctgccatgaagaagatagaagacaacaacacacttgtgttcattgtggatgttaaagccaacaagcaccagattaaacaggctgtgaagaagctgtatgacattgatgtggccaaggtcaacaccctgattcggcctgatggagagaagaaggcatatgttctgactggctcctgattacgatgctttggatgttgccaacaaaattgggatcatctaaactgagtccagctgcctatttgaatatatatatatatcttttcaccataaaaaaagaagaaag

SEQ ID NO: 103077 - DNA, 222 bp, Homo sapiens
  misc_feature (19)..(19): n is a, c, g, or t
ctcaactgtcgggaggttnatgactctcccctgggctcacccgaagtagttcgcggcacgtagccctcctggcctaatatcatgtccccttaccagaggcagatcacaacttctaactggtcaattcaggaatgtaaaagcccaacccccttgaccccaggcagaacagttatgaagaaccatctcactccagagctccttgtagaatccaggcctctattg

SEQ ID NO: 103078 - DNA, 439 bp, Homo sapiens
ttctgaagtcaaggagagaagtccagtctagcaactatgaggctagggcagggatatgatgttgaatactattacgtgggaatgaaggattgggaccattacttcagtctaccacgtgtgctatagagggacagttgaatgtaggggcttgaggatacttttctgaagatctttcatgtatcaagagtattctgagatgatattctgtatggtatcagactacacgtttcaaagcagagtagtttttggtcattctgaaaaactgtagaggaaagttaactttgcagtatcccttacttgatatttagggtttcctttttttaatctggtcactcttctgttagctttgaaacataggcctctccaaattcattccagccgggtcatgtgacttccgtgttaaacgaagacatgtaaaactcatttctttgggaaatgg

SEQ ID NO: 103079 - DNA, 212 bp, Homo sapiens
tgctcaaacacacagtagtgccttctagagaaagcatagtatagtcctccctcatttccaaggacaagaattcatttctttaagctttcttcacgaaagaatgcaataaaagaggaggaaactgggacttgattgaagaaatatctctactgggagcatgaactaataatgagtgactctaagaaatctctcacaggcatttttatttttgg

SEQ ID NO: 103080 - DNA, 430 bp, Homo sapiens
gcacgagaaagaccacagttgtacttatgggggactggggttgaggcatggctgatgccacagcagttcattcctaaaatcaagtgagagaagcaagaggaaagcatgacctcagaacctaaaaccaaggtctcactgacagtagttcaagtgttcttcaaagataaagatgagattttatgtattcttgtctttcagagcaagcaaactgccttttttaaattgtctaaatgaacacattggtgtgttgatcagatgagagctaggttagaaatccaagaccctgggggccgggcgcggtggcttacatctgtaatcccagcactttgggaggctgaggcaggcagatcacgaggtcaggagatcgagaccatcctggctaacacagtgaaaacccgtctctactaaaattacaaaaaaaaaaaaaaaa

SEQ ID NO: 103081 - DNA, 212 bp, Homo sapiens
gggtggcagaggctaaagaaagcctacatgtaagtggaattgcacggttcaaacccatgttgttcaagggtcaactgtacgctgagtataaagccttattacctagtaaacagaggcttctgaaggctagtcatgaaatagttggcattcattccctctcaccactccctatacgtgccttcttgtacgtcaagggcaggaatgctttattt

SEQ ID NO: 103082 - DNA, 608 bp, Homo sapiens
accataattatcttgatatattataacaacaaaaattttgtttcaagagagcaatttactgctgttttcagtagtatcagtaaaactgtattataaacatgaacattttaaacatatatccccctgtttagtggaggatacccaaaagtggtaacacaggaagaaggaatggaatatatctacacaggttataacaacaatactcgtttgttcagtttctataaatacaaaggtgaagaccagatggttgtacacagcatcatctagaacctgcaggtctatagttggagaaagcccatattgcaggtcaccagacaccctaccagtacaagattgggcccttggctgtctggcagtactaacaatcaaactcaactataatgatcagaaggttttaatctaatggaggtgagatcacagtttagtgcagtttttttttcagtgccttcatttaaatatataaatgggttgcccaaatagtcaccctggctaaatgctgctaaataaattagtgctccttcttatccttctatgaaaagaaaactgaaatcaaatgttaagatctttaatatgatcaggtttctgtgacatagcttcaccttaaatat

SEQ ID NO: 103083 - DNA, 343 bp, Homo sapiens
tgttgcatattttttggtggagatggggtttcaccacattgtccaggctcagatttttttgttttgttttggtgtttccatgtccactgtcatctcagctgcaaaacaccaaagtcagaaggaatgttaatctcccaagtttttttgttgtttttgttttgttttttgagacagtcttcactctgtcacccaggctggagtgcagtggcacgatttcaactcattgcaacctctgcctccagagtagctgggattacaggcgcatgccaccatgcccagctaatttttgtatttttagcagagatggggtttcaccatgttggccaggctggtctggagctcc

SEQ ID NO: 103084 - DNA, 713 bp, Homo sapiens
acctcagaagggctgtgtccaccatggctcctgtcctcctgctgctcctctctcacttcccagaatgtttctgaagtctcaggaatgctgaaaacaaaaacaaaaacctcctgatacactgcggtgttgcccggttatctagatgagcaaaactcagagcctgtggagttgacttttttattattattattttttggaagaagagaaatgagcctttcctagttttcttttcggccagaggccggagaccattcaagcaggtagacagtcgctacagcatggactactgtctttgagggatcagagcagaaacctccttgtccctctccagtcacctccctccaaccccgatcatctgtgcttggggctgcctgaggctccccgtgacccagggatgaggcactaaggtgtgaaatgagtgaggacacaggtcccaggggagttccagcgaagatgtggccagagtcactcacaggcgaagacacaacctgaagtctgcagtctgccacacagaagacagtcctcaccagggcccaaccaggctggcaccctgatatccgacttccagcctccagaactgggagaaatacaattctgtctgccctggggatgagctccccaggctatggctctttgctctaacagcctgaactagcatagaagtgctatcccatcatctgggttgtattctattcagaaaggcgtcactaacc

SEQ ID NO: 103085 - DNA, 474 bp, Homo sapiens
tgctctcaaactcctgggctcaggcaatcctctcaccttgacctcccaaagtgctgagattctaggctttagccaccatgcctgatcgtatgtttacatgttgaaattctaaccctcaatctcatggtatcaggaggtgggaggtaatgaggtcctgagggtggagcccgcatgaatgggattgctggcttattaaaaggaaccccagagagctctcttctccctctctctgccaggcgaagacacaacctgaagtctgcagtctgccacacagaagacagtcctcaccagggcccaaccaggctggcaccctgatatccgacttccagcctccagaactgggagaaatacaattctgtctgccctggggatgagctccccaggctatggctctttgctctaacagcctgaactagcatagaagtgctatcccatcatctgggttgtattctattcagaaaggcgtcactaacc

SEQ ID NO: 103086 - DNA, 715 bp, Homo sapiens
atatacaaacttcacaggaaagcactttctggctcaaaaaatactctcttctcaattctccatagaatgtttctgaagtctcaggaatgctgaaaacaaaaacaaaaacctcctgatacactgcggtgttgcccggttatctagatgagcaaaactcagagcctgtggagttgacttttttattattattattttttggaagaagagaaatgagcctttcctagttttcttttcggccagaggccggagaccattcaagcaggtagacagtcgctacagcatggactactgtctttgagggatcagagcagaaacctccttgtccctctccagtcacctccctccaaccccgatcatctgtgcttggggctgcctgaggctccccgtgacccagggatgaggcactaaggtgtgaaatgagtgaggacacaggtcccaggggagttccagcgaagatgtggccagagtcactcacaggcgaagacacaacctgaagtctgcagtctgccacacagaagacagtcctcaccagggcccaaccaggctggcaccctgatatccgacttccagcctccagaactgggagaaatacaattctgtctgccctggggatgagctccccaggctatggctctttgctctaacagcctgaactagcatagaagtgctatcccatcatctgggttgtattctattcagaaaggcgtcactaacc

SEQ ID NO: 103087 - DNA, 582 bp, Homo sapiens
tgagacagggtcttgctctgttgcccaggctagagtgcagtggtgacatcatagctcacctgggctcaagcaatcctgccatctctgccacctgagtagttgggactacaggtgcaccccacacccggctaatttttaaaaattattttagagatagggtcttgctatgttgcccaggctggtggcaaacttctggcctcaagtgatcccccgacctcagcctcccaaagcattgggattacaggttgaattactatgccctgcctggtttccttgctattccattaacatgccagatgactttcacatcagggggtttgcatttggctggtatatagagaatgaattagaaagatgtaagtccaaagtcagagaaaccatttggggccggggaagagcaataatcaaggttaaagatgattagcaactgaattacggctatggccaggggaatcaagaaaagtagacagattgagagagatttagaaggaaaaaaattactagaacttggtgactgcttggatatggtaaccaaaggagaatggagacgcaagataattcccaggtttctgccttgggtag

SEQ ID NO: 103088 - DNA, 286 bp, Homo sapiens
taaagtttcttgaatatttttcaaatgtatgaatatttccccagaaaaaacacacactcttcatatatatttcacaacacagtaaagtgctaaaatcctgaaacaaactaaactttcttctgaatatgtatgatcttgttatagcagaaatgcacagtgatatatatcttacttacatttagtttcaggactatatttgctttctttttcgaggtcatttaatcctttataaataatatagttcattataagagtatgttagaggcttagaggcagatttaaatga

SEQ ID NO: 103089 - DNA, 160 bp, Homo sapiens
tccatggattcccactggtcattctattacattcttctattgtccctctcctactcttccccattaacatacagtgaaagttaagatttaaaaaaatgaggcctggcgcagtggctcatgcctgtaatcccagcactttgggaggccgaagtggccggat

SEQ ID NO: 103090 - DNA, 247 bp, Homo sapiens
gcccgctctcccctgtctctgtcccactttctgcctctgttcctccccggctctgccctctccccgcactgtcccccctcgccctcctccgcggccatgccccagacggcgggaaggcggccgggcgtccggccgggctgggcctgggcttggcggctgggccggcgtggggagcggcagctgtttgccattagcccgggatcccacaggccccgccccctctctgcacggggcggggtccttctcg

SEQ ID NO: 103091 - DNA, 428 bp, Homo sapiens
ttttggtgtttctgcagttgtggcgcgcgcctgaggttccagctactcgggaggctgaggcgggaggattgcttgagcctggggagttgagaccagcctgggcaacatagcgaaaccccgcctcagaaaaagagagggagagaggaaagcagtggagttattggtcaaagagtatgtcagttttctttccagaaaggttttgtgtctgcattccagcaggaactccctgtgcctgcccctaccactatcttgtttaatttttgccaattcagtgactttgtaaacatatgttttaatttgcttttctttgcttactggtaaagcttaactttttagtttatttactgtccatttgtacgtcttcttttgggaattctctgtgggtatcatttactatggacattttcttagatgtggtctcagttttc

SEQ ID NO: 103092 - DNA, 799 bp, Homo sapiens
tgttccatgcatatacattaactttaatcttcacaatggtcctgtgaggtagatattattatccctattttatggataagaaaactgaggctcaggaaggcagagtaacttgcctaaagtcacacagcataagtagcaaagctgagttttgagcctgcgttgcctgactccaaagtctggatccttcccatgagaatgtctgcctctcacattcaactccaatacacacatctaagactagtgcataagctgatagctgttaacattttcccccacagaaaatgcagctgaaccaagcctgcctatcttgtctatgagcagctgattctttgaatctaaagaattgatacaggacttgatacatgtggaataacagaaagaacctggaccgtggagtgagacaggcttagacttgagttctggctacacacttggctgtgccaactcaaggcggctaccttgacattataaggctgattttcttcaactgtaaaatgtcgatgtaggattacatgataacacatgcaaagcctctggtagaacactcagggcagcactgctcatgcttcttagttgccttcccctgatctggagtgtcaattaatcttggtttgagttcctcttgcccaccagtgcactttggtcccccattcagtcatgtagcaaggggctattcctccagctgttcttgagtaagcatggcacctcacattcatatagaatggttactaatagtcatccaagttattgagaaaaatattgaccacaatgtaccactctcccactccactttttccta

SEQ ID NO: 103093 - DNA, 928 bp, Homo sapiens
agcggcttttgaagacgcccccgagggcgctgccagcaggaggcagagctgctgcgagaagaagacccaggagatctggggcagcgagctgtgcgtctgacagcgcaggtccagcagcgtgggccccaggaaggcgatgcacaggccgaagctgaagaagacgctccagtagggtctggctctgtaacccaggcttgaatgcagtggcatgatgggtgcaatcttgttacctgttactggtctcttcaggttttctttttggctcaatcttgagatggaggctcgttttgttgcccaggctggagtgcagtggctattcacaggcacaatcatcatacactgtagcctagaactcctggcctcaagcgattttcctgtctcagcctacaaagttgctggaactctagaaaatgcagctgaaccaagcctgcctatcttgtctatgagcagctgattctttgaatctaaagaattgatacaggacttgatacatgtggaataacagaaagaacctggaccgtggagtgagacaggcttagacttgagttctggctacacacttggctgtgccaactcaaggcggctaccttgacattataaggctgattttcttcaactgtaaaatgtcgatgtaggattacatgataacacatgcaaagcctctggtagaacactcagggcagcactgctcatgcttcttagttgccttcccctgatctggagtgtcaattaatcttggtttgagttcctcttgcccaccagtgcactttggtcccccattcagtcatgtagcaaggggctattcctccagctgttcttgagtaagcatggcacctcacattcatatagaatggttactaatagtcatccaagttattgagaaaaatattgaccacaatgtaccactctcccactccactttttccta

SEQ ID NO: 103094 - DNA, 740 bp, Homo sapiens
agcggcttttgaagacgcccccgagggcgctgccagcaggaggcagagctgctgcgagaagaagacccaggagatctggggcagcgagctgtgcgtctgacagcgcaggtccagcagcgtgggccccaggaaggcgatgcacaggccgaagctgaagaagacgctccagtagggtctggctctgtaacccaggcttgaatgcagtggcatgatgggtgcaatcttgttacctgttactggtctcttcaggttttctttttggctcaatcttgagatggaggctcgttttgttgcccaggctggagtgcagtggctattcacaggcacaatcatcatacactgtagcctagaactcctggcctcaagcgattttcctgtctcagcctacaaagttgctggaactctagatggagtctctctctgttgcccaggctagagtgcagtggaacgatcttggctcactgcaacctctgcctcccgggttcaagcaattctcctgcctcagcctcctgaatagctgggattacatacgtgcaccatcacgtccagctaatttttgtatttttagtacagatggggtttcaccatgttggccaggctggtctgaactccagacctcaagtgatccacatgccttggcctcccaaagtgctggaattacaggtgtgaaccaccatgcccaacctagccagcctgattttttaatatttgttgggatttattttgtggcctaacatatg

SEQ ID NO: 103095 - DNA, 199 bp, Homo sapiens
aagcaggccctggccagagcagggacctcagagcctttcccggcagagggaacgcaatcaaagctggcgctgcttccgggaggagagaattcccaaaaggctctgtcagcccctctgatagggatctgcagggtgtgtgagagatttgtttttcagccaggatgtggggagttaaaaatagacaccctaatcccttgag

SEQ ID NO: 103096 - DNA, 178 bp, Homo sapiens
tgagattctttttctctgagccatgactgccttttagattagtgcaaatgatttctaaaagcttcctgccaatttgtgtccaaagagagtcataggcaagtaaagacctgttaagaaggtgtttaatggccaggcatggcagctcacacctgtaatcccggcactttgggaggccaag

SEQ ID NO: 103097 - DNA, 1578 bp, Homo sapiens
aaattctctcagaagctagtggtgaaacagaagaaaagcatcacatgcgtcccacttgctgttgcctttttgtctaaggcagtggttatcgtgaattcctcagggtagcaagtcatttggttcactaggacataaaaaatagaatttatccaaagttaatgggctgtttggtggtctctatgtgtgaaatgagattgtccaggagaagaggatagtcagggaatgagtcaatttaattttaaaataacttgataattctgtgaattctccaaatatcctcaaaaccaaagaaaaagcaaatatgaaaggtgtaatttatagtagtcaattggtatcaatagagtcttctgtttttgtgccatgaataatttatcattgtcacatgtattcaatagaccattctgcataacaatagaaatgtcagtgaatttttaaagccataatcttgttcactcttagaagtaaaaaaaagagaaaatgcattcttattgtattaaacatctgataacacattctgaatgtggagactgagatgtctgaaggctgccttttgaaccagtagttttaccccatgaaacatcactgtgttctttctgcacaaccagttcaaaagatctcttttcttcgcaggttaccagccagtcttgtctggtcaacagggattccaaggcctaataggagtgcagcagccacctcagagtcagaacgtgataaataaccaacaaggaactccggtgcaaagcgtgatggtttcctacccaacaatgtcttcttatcaggtgccaatgacccagggttctcaaggactgccccagcagtcataccaacagccaatcatgctacctaaccaggcaggtcaagggtcactcccagccactggaatgcctgtttactgtaatgtcacaccgcccacccctcagaacaaccttaggctgattggcccacactgcccctccagcactgtcccagtgatgtcagctagctgcagaacaaactgtgcaagtatgagcaatgctggttggcaggtcaaattctgagagctctggctgtggtacatttcttcagatatttctcatggcctttgatggaagaggaacaaggtgggaaaactggctgaggacttaagtattcactcaacactcaaatgattgctgctggtattctgtaaaaaataaacaaagactaatatacacgttagctggttaatggtgcatatttctgtcatgtctgctaggtatgcctttatagcttagctagtgacatgaattcatcaaggtaagattttctcctaccactgaataccactgtgtagattataatatccctaatttggattagttttgtactttgtgttgagtttgtgatgctaaaagtatttaaaaattatatactaaatcacattgtaccaaagctgtaatggaaaagcaaagaagaattgatgaattgaaggaataatttatatacattatagagttttcttttttaatggatatatactgtattgtagtgtttaatcaaaataaaactatttgaccttatggaggaaggtcatgtttttaccaccagtttggttcacta

SEQ ID NO: 103098 - DNA, 988 bp, Homo sapiens
gtctaaggtaacctgactctcttaataaccaccgctacaggttaccagccagtcttgtctggtcaacagggattccaaggcctaataggagtgcagcagccacctcagagtcagaacgtgataaataaccaacaaggaactccggtgcaaagcgtgatggtttcctacccaacaatgtcttcttatcaggtgccaatgacccagggttctcaaggactgccccagcagtcataccaacagccaatcatgctacctaaccaggcaggtcaagggtcactcccagccactggaatgcctgtttactgtaatgtcacaccgcccacccctcagaacaaccttaggctgattggcccacactgcccctccagcactgtcccagtgatgtcagctagctgcagaacaaactgtgcaagtatgagcaatgctggttggcaggtcaaattctgagagctctggctgtggtacatttcttcagatatttctcatggcctttgatggaagaggaacaaggtgggaaaactggctgaggacttaagtattcactcaacactcaaatgattgctgctggtattctgtaaaaaataaacaaagactaatatacacgttagctggttaatggtgcatatttctgtcatgtctgctaggtatgcctttatagcttagctagtgacatgaattcatcaaggtaagattttctcctaccactgaataccactgtgtagattataatatccctaatttggattagttttgtactttgtgttgagtttgtgatgctaaaagtatttaaaaattatatactaaatcacattgtaccaaagctgtaatggaaaagcaaagaagaattgatgaattgaaggaataatttatatacattatagagttttcttttttaatggatatatactgtattgtagtgtttaatcaaaataaaactatttgaccttatggaggaaggtcatgtttttaccaccagtttggttcacta

SEQ ID NO: 103099 - DNA, 2558 bp, Homo sapiens
  misc_feature (1036)..(1036): n is a, c, g, or t
ggattctacaggcatagacttacacgagtttctgattaacacattaaagaataattccagggacaggatgatacttttgaaaatggagcaggaaattattgatttcattgctgacaacaataatcattataaaaagttccctcagatgtcatcgtatcagaggatgcttgtccatcgagtggcagcttattttggattggatcacaatgtggatcaaacaggaaaatctgttatcatcaacaagaccagcagcaccagaataccagagcaaaggttttgtgaacatttaaaagatgaaaaaggtgaagaatcccagaagcggtttatcttgaagcgagataactctagtattgataaagaagacaatcagtcagtttgctcccaggaaagcctttttgtggaaaacagtaggctcttggaagacagtaacatatgcaatgagacctataagaaaagacagctctttcggggcaacagagatggctcagggagaacatctgggagtcgacagagcagctcagaaaatgaactcaagtggtctgaccaccaaagggcctggagcagcacagactccgacagttccaaccgcaatctaaagcccgccatgaccaagacggcgagttttgggggcatcacggtgctgaccaggggtgacagcacttccagtactaggagtaccgggaagctgtccaaagcaggttccgagtcttccagcagtgcaggctcctcaggatcgctgtcccgcacccatccacctctccagagcacacccctagtctcaggtgtggcagctggctctccaggctgtgtgccttatccagagaatggaatagggggccaggttgctcccagcagcaccagctacatcctccttccacttgaagctgcaacaggcatcccgcctggaagcatccttcttaatccacacacaggccagccctttgtgaatcccgatggaactcctgcaatatacaacccacccaccagtcagcagcccctgcgaagcgccatggtggggcagtcccaacagcagccnccacagcagcagccctccccgcagccccaacagcaggtccagccaccgcagccacagatggcaggccctctggtcactcagtctgtccaggggctgcaggcttcctcccagtcagtgcaatatccggcagtctcttttcctccccagcacctcctacctgtgtctccaacgcagcactttcccatgagagatgatgtggcaacacagtttggccagatgaccctgagccggcagtcctcgggggagactcctgaacccccatcaggtcctgtctacccatcctcccttatgccacagccggcccagcagcccagctatgtaatcgcctctacaggccagcagcttcctacaggaggattctcaggctctggccctcccatctcccagcaggtcctccagccccctccctcaccacagggatttgtgcaacagcctccgcctgcacagatgcctgtatattattacccatctggtcagtaccctacctcaaccacgcaacagtaccggcccatggccccggttcagtacaacgctcagaggagtcaacagatgccacaggcagcacagcaagcaggttaccagccagtcttgtctggtcaacagggattccaaggcctaataggagtgcagcagccacctcagagtcagaacgtgataaataaccaacaaggaactccggtgcaaagcgtgatggtttcctacccaacaatgtcttcttatcaggtgccaatgacccagggttctcaaggactgccccagcagtcataccaacagccaatcatgctacctaaccaggcaggtcaagggtcactcccagccactggaatgcctgtttactgtaatgtcacaccgcccacccctcagaacaaccttaggctgattggcccacactgcccctccagcactgtcccagtgatgtcagctagctgcagaacaaactgtgcaagtatgagcaatgctggttggcaggtcaaattctgagagctctggctgtggtacatttcttcagatatttctcatggcctttgatggaagaggaacaaggtgggaaaactggctgaggacttaagtattcactcaacactcaaatgattgctgctggtattctgtaaaaaataaacaaagactaatatacacgttagctggttaatggtgcatatttctgtcatgtctgctaggtatgcctttatagcttagctagtgacatgaattcatcaaggtaagattttctcctaccactgaataccactgtgtagattataatatccctaatttggattagttttgtactttgtgttgagtttgtgatgctaaaagtatttaaaaattatatactaaatcacattgtaccaaagctgtaatggaaaagcaaagaagaattgatgaattgaaggaataatttatatacattatagagttttcttttttaatggatatatactgtattgtagtgtttaatcaaaataaaactatttgaccttatggaggaaggtcatgtttttaccaccagtttggttcacta

SEQ ID NO: 103100 - DNA, 1106 bp, Homo sapiens
aattattataaaatctgatttaagtgttgaccatagcctccagttccagccagctgaaaagataagcacatttgtatttgtgtggacaagtctgcagacttcttattgttgtctcaagccagacaatacaacccttttaaataacagttcctcataaggttaccagccagtcttgtctggtcaacagggattccaaggcctaataggagtgcagcagccacctcagagtcagaacgtgataaataaccaacaaggaactccggtgcaaagcgtgatggtttcctacccaacaatgtcttcttatcaggtgccaatgacccagggttctcaaggactgccccagcagtcataccaacagccaatcatgctacctaaccaggcaggtcaagggtcactcccagccactggaatgcctgtttactgtaatgtcacaccgcccacccctcagaacaaccttaggctgattggcccacactgcccctccagcactgtcccagtgatgtcagctagctgcagaacaaactgtgcaagtatgagcaatgctggttggcaggtcaaattctgagagctctggctgtggtacatttcttcagatatttctcatggcctttgatggaagaggaacaaggtgggaaaactggctgaggacttaagtattcactcaacactcaaatgattgctgctggtattctgtaaaaaataaacaaagactaatatacacgttagctggttaatggtgcatatttctgtcatgtctgctaggtatgcctttatagcttagctagtgacatgaattcatcaaggtaagattttctcctaccactgaataccactgtgtagattataatatccctaatttggattagttttgtactttgtgttgagtttgtgatgctaaaagtatttaaaaattatatactaaatcacattgtaccaaagctgtaatggaaaagcaaagaagaattgatgaattgaaggaataatttatatacattatagagttttcttttttaatggatatatactgtattgtagtgtttaatcaaaataaaactatttgaccttatggaggaaggtcatgtttttaccaccagtttggttcacta

SEQ ID NO: 103101 - DNA, 1171 bp, Homo sapiens
tgtatgtggctaggtacagttaactagaaaagggcctcaatacttttatcaaatctttgatgtgatccatatttctttataaatattaaatgtcagtgtccttgatcaataatttttcttagtagtgccctgttcttcccatttcaaagatgagtgagaaaactaagcagcagttcctaaactgaggactgaaggtttctgggagtttctgctgttaaagatagttaccagccagtcttgtctggtcaacagggattccaaggcctaataggagtgcagcagccacctcagagtcagaacgtgataaataaccaacaaggaactccggtgcaaagcgtgatggtttcctacccaacaatgtcttcttatcaggtgccaatgacccagggttctcaaggactgccccagcagtcataccaacagccaatcatgctacctaaccaggcaggtcaagggtcactcccagccactggaatgcctgtttactgtaatgtcacaccgcccacccctcagaacaaccttaggctgattggcccacactgcccctccagcactgtcccagtgatgtcagctagctgcagaacaaactgtgcaagtatgagcaatgctggttggcaggtcaaattctgagagctctggctgtggtacatttcttcagatatttctcatggcctttgatggaagaggaacaaggtgggaaaactggctgaggacttaagtattcactcaacactcaaatgattgctgctggtattctgtaaaaaataaacaaagactaatatacacgttagctggttaatggtgcatatttctgtcatgtctgctaggtatgcctttatagcttagctagtgacatgaattcatcaaggtaagattttctcctaccactgaataccactgtgtagattataatatccctaatttggattagttttgtactttgtgttgagtttgtgatgctaaaagtatttaaaaattatatactaaatcacattgtaccaaagctgtaatggaaaagcaaagaagaattgatgaattgaaggaataatttatatacattatagagttttcttttttaatggatatatactgtattgtagtgtttaatcaaaataaaactatttgaccttatggaggaaggtcatgtttttaccaccagtttggttcacta

SEQ ID NO: 103102 - DNA, 1209 bp, Homo sapiens
ggattctacaggcatagacttacacgagtttctgattaacacattaaagaataattccagggacaggatgatacttttgaaaatggagcaggaaattattgatttcattgctgacaacaataatcattataaaaagttccctcagatgtcatcgtatcagaggatgcttgtccatcgagtggcagcttattttggattggatcacaatgtggatcaaacaggaaaatctgttatcatcaacaagaccagcagcaccagaatgttaccagccagtcttgtctggtcaacagggattccaaggcctaataggagtgcagcagccacctcagagtcagaacgtgataaataaccaacaaggaactccggtgcaaagcgtgatggtttcctacccaacaatgtcttcttatcaggtgccaatgacccagggttctcaaggactgccccagcagtcataccaacagccaatcatgctacctaaccaggcaggtcaagggtcactcccagccactggaatgcctgtttactgtaatgtcacaccgcccacccctcagaacaaccttaggctgattggcccacactgcccctccagcactgtcccagtgatgtcagctagctgcagaacaaactgtgcaagtatgagcaatgctggttggcaggtcaaattctgagagctctggctgtggtacatttcttcagatatttctcatggcctttgatggaagaggaacaaggtgggaaaactggctgaggacttaagtattcactcaacactcaaatgattgctgctggtattctgtaaaaaataaacaaagactaatatacacgttagctggttaatggtgcatatttctgtcatgtctgctaggtatgcctttatagcttagctagtgacatgaattcatcaaggtaagattttctcctaccactgaataccactgtgtagattataatatccctaatttggattagttttgtactttgtgttgagtttgtgatgctaaaagtatttaaaaattatatactaaatcacattgtaccaaagctgtaatggaaaagcaaagaagaattgatgaattgaaggaataatttatatacattatagagttttcttttttaatggatatatactgtattgtagtgtttaatcaaaataaaactatttgaccttatggaggaaggtcatgtttttaccaccagtttggttcacta

SEQ ID NO: 103103 - DNA, 2777 bp, Homo sapiens
  misc_feature (1036)..(1036): n is a, c, g, or t
ggattctacaggcatagacttacacgagtttctgattaacacattaaagaataattccagggacaggatgatacttttgaaaatggagcaggaaattattgatttcattgctgacaacaataatcattataaaaagttccctcagatgtcatcgtatcagaggatgcttgtccatcgagtggcagcttattttggattggatcacaatgtggatcaaacaggaaaatctgttatcatcaacaagaccagcagcaccagaataccagagcaaaggttttgtgaacatttaaaagatgaaaaaggtgaagaatcccagaagcggtttatcttgaagcgagataactctagtattgataaagaagacaatcagtcagtttgctcccaggaaagcctttttgtggaaaacagtaggctcttggaagacagtaacatatgcaatgagacctataagaaaagacagctctttcggggcaacagagatggctcagggagaacatctgggagtcgacagagcagctcagaaaatgaactcaagtggtctgaccaccaaagggcctggagcagcacagactccgacagttccaaccgcaatctaaagcccgccatgaccaagacggcgagttttgggggcatcacggtgctgaccaggggtgacagcacttccagtactaggagtaccgggaagctgtccaaagcaggttccgagtcttccagcagtgcaggctcctcaggatcgctgtcccgcacccatccacctctccagagcacacccctagtctcaggtgtggcagctggctctccaggctgtgtgccttatccagagaatggaatagggggccaggttgctcccagcagcaccagctacatcctccttccacttgaagctgcaacaggcatcccgcctggaagcatccttcttaatccacacacaggccagccctttgtgaatcccgatggaactcctgcaatatacaacccacccaccagtcagcagcccctgcgaagcgccatggtggggcagtcccaacagcagccnccacagcagcagccctccccgcagccccaacagcaggtccagccaccgcagccacagatggcaggccctctggtcactcagtctgtccaggggctgcaggcttcctcccagtcagtgcaatatccggcagtctcttttcctccccagcacctcctacctgtgtctccaacgcagcactttcccatgagagatgatgtggcaacacagtttggccagatgaccctgagccggcagtcctcgggggagactcctgaacccccatcaggtcctgtctacccatcctcccttatgccacagccggcccagcagcccagctatgtaatcgcctctacaggccagcagcttcctacaggaggattctcaggctctggccctcccatctcccagcaggtcctccagccccctccctcaccacagggatttgtgcaacagcctccgcctgcacagatgcctgtatattattacccatctggtcagtaccctacctcaaccacgcaacagtaccggcccatggccccggttcagtacaacgctcagaggagtcaacagatgccacaggcagcacagcaagcagttgcagtgacaggtggatttctacagactgaatctgtggccatagtacttatttcaagataattggccaaggctaggttacatcctgtagccatgcaacagtgacagtaatttgatcacaataatgctgaccccatgacttttgacttcataattatcttgctgtagtcagctggccaacagcacttcatcaatgaaaatatccaccaggaggaatattatcatggggacagttattagagccacctccattttgactttgccccaagcttggtctggggaaaaagcttcttaaagttgcctcagcagtagtttgctgcctcccagcctggttttaagtatatccataattaacacgacgggtagaggtgcaagaatgccacattttcttctaagccatgcaacctcattaagaaagtaaaacgtttgtgagtctttcatgcggtctttctccctctgggttgttgaagctctctggatgtcagcacagcactatgggccaggaaagttcagagaattacttcaataatatgacagcctcttccatttaaaatggaattcaatgctggcttcccttggaggcattcattgaaattccgtgcatgatccattcctctagtcatttaacaatgtgtctcatgtttgccctgatttaaagaaagaaagaaagaaagaaagaaaaccagctttgtatttgtgataacatggatcaggatagtataattgcagtgagagcctgcagtaataggatggttcatctgatgtgtactgccattagaaaatgacccatgcatgaatgttctcaggggacagtaaagaggcttttaagaattacattctgtgtagtatgaaagctaatgagcaaaagaggaagtacgaagaaaaactactgcttcaggaagcatggttccacttaggtagggcctgtcacagctcccctcaaattcatttggatagacaggccattactaggatgactactatattacccccatgcccatgcacactccctgcaggtcatcctgtaccaagttcctaaggaattaaaaccagcgagtaataaatggtgaggaaaagaaagaggatggatacagcaactgccaataaataagttaaaaaaagacatttacgtcaaagatgaaagaagtcgtaatgaacttcaacagca

SEQ ID NO: 103104 - DNA, 733 bp, Homo sapiens
ggattctacaggcatagacttacacgagtttctgattaacacattaaagaataattccagggacaggatgatacttttgaaaatggagcaggaaattattgatttcattgctgacaacaataatcattataaaaagttccctcagatgtcatcgtatcagaggatgcttgtccatcgagtggcagcttattttggattggatcacaatgtggatcaaacaggaaaatctgttatcatcaacaagaccagcagcaccagaataccagagcaaaggttttgtgaacatttaaaagatgaaaaaggtgaagaatcccagaagcggtttatcttgaagcgagataactctagtattgataaagaagacaatcagtcagtttgctcccaggaaagcctttttgtggaaaacaggtaaaataaaatttacttttccatgtctttagaggaacaacgtctgtcatgtgtgtcttgtgtattcataaatatatatcccatatatgtgtgtgcttgaatatatgtattagcagatacatatatctatgcgtacacacatatatgttatttaacacatctacaaatgatctaatttggaaaaaaaattttctttcagttaattccaaacagaattgtaaaactttttcttatttaaagtctcaatttctggtccttgcaaaggtatacttcctattaccttcaccaggcattaagaataataaatatggagacatcacaggaa

SEQ ID NO: 103105 - DNA, 2121 bp, Homo sapiens
  misc_feature (599)..(599): n is a, c, g, or t
ggattctacaggcatagacttacacgagtttctgattaacacattaaagaataattccagggacaggatgatacttttgaaaatggagcaggaaattattgatttcattgctgacaacaataatcattataaaaagttccctcagatgtcatcgtatcagaggatgcttgtccatcgagtggcagcttattttggattggatcacaatgtggatcaaacaggaaaatctgttatcatcaacaagaccagcagcaccagaatgttccgagtcttccagcagtgcaggctcctcaggatcgctgtcccgcacccatccacctctccagagcacacccctagtctcaggtgtggcagctggctctccaggctgtgtgccttatccagagaatggaatagggggccaggttgctcccagcagcaccagctacatcctccttccacttgaagctgcaacaggcatcccgcctggaagcatccttcttaatccacacacaggccagccctttgtgaatcccgatggaactcctgcaatatacaacccacccaccagtcagcagcccctgcgaagcgccatggtggggcagtcccaacagcagccnccacagcagcagccctccccgcagccccaacagcaggtccagccaccgcagccacagatggcaggccctctggtcactcagtctgtccaggggctgcaggcttcctcccagtcagtgcaatatccggcagtctcttttcctccccagcacctcctacctgtgtctccaacgcagcactttcccatgagagatgatgtggcaacacagtttggccagatgaccctgagccggcagtcctcgggggagactcctgaacccccatcaggtcctgtctacccatcctcccttatgccacagccggcccagcagcccagctatgtaatcgcctctacaggccagcagcttcctacaggaggattctcaggctctggccctcccatctcccagcaggtcctccagccccctccctcaccacagggatttgtgcaacagcctccgcctgcacagatgcctgtatattattacccatctggtcagtaccctacctcaaccacgcaacagtaccggcccatggccccggttcagtacaacgctcagaggagtcaacagatgccacaggcagcacagcaagcaggttaccagccagtcttgtctggtcaacagggattccaaggcctaataggagtgcagcagccacctcagagtcagaacgtgataaataaccaacaaggaactccggtgcaaagcgtgatggtttcctacccaacaatgtcttcttatcaggtgccaatgacccagggttctcaaggactgccccagcagtcataccaacagccaatcatgctacctaaccaggcaggtcaagggtcactcccagccactggaatgcctgtttactgtaatgtcacaccgcccacccctcagaacaaccttaggctgattggcccacactgcccctccagcactgtcccagtgatgtcagctagctgcagaacaaactgtgcaagtatgagcaatgctggttggcaggtcaaattctgagagctctggctgtggtacatttcttcagatatttctcatggcctttgatggaagaggaacaaggtgggaaaactggctgaggacttaagtattcactcaacactcaaatgattgctgctggtattctgtaaaaaataaacaaagactaatatacacgttagctggttaatggtgcatatttctgtcatgtctgctaggtatgcctttatagcttagctagtgacatgaattcatcaaggtaagattttctcctaccactgaataccactgtgtagattataatatccctaatttggattagttttgtactttgtgttgagtttgtgatgctaaaagtatttaaaaattatatactaaatcacattgtaccaaagctgtaatggaaaagcaaagaagaattgatgaattgaaggaataatttatatacattatagagttttcttttttaatggatatatactgtattgtagtgtttaatcaaaataaaactatttgaccttatggaggaaggtcatgtttttaccaccagtttggttcacta

SEQ ID NO: 103106 - DNA, 2216 bp, Homo sapiens
  misc_feature (1036)..(1036): n is a, c, g, or t
ggattctacaggcatagacttacacgagtttctgattaacacattaaagaataattccagggacaggatgatacttttgaaaatggagcaggaaattattgatttcattgctgacaacaataatcattataaaaagttccctcagatgtcatcgtatcagaggatgcttgtccatcgagtggcagcttattttggattggatcacaatgtggatcaaacaggaaaatctgttatcatcaacaagaccagcagcaccagaataccagagcaaaggttttgtgaacatttaaaagatgaaaaaggtgaagaatcccagaagcggtttatcttgaagcgagataactctagtattgataaagaagacaatcagtcagtttgctcccaggaaagcctttttgtggaaaacagtaggctcttggaagacagtaacatatgcaatgagacctataagaaaagacagctctttcggggcaacagagatggctcagggagaacatctgggagtcgacagagcagctcagaaaatgaactcaagtggtctgaccaccaaagggcctggagcagcacagactccgacagttccaaccgcaatctaaagcccgccatgaccaagacggcgagttttgggggcatcacggtgctgaccaggggtgacagcacttccagtactaggagtaccgggaagctgtccaaagcaggttccgagtcttccagcagtgcaggctcctcaggatcgctgtcccgcacccatccacctctccagagcacacccctagtctcaggtgtggcagctggctctccaggctgtgtgccttatccagagaatggaatagggggccaggttgctcccagcagcaccagctacatcctccttccacttgaagctgcaacaggcatcccgcctggaagcatccttcttaatccacacacaggccagccctttgtgaatcccgatggaactcctgcaatatacaacccacccaccagtcagcagcccctgcgaagcgccatggtggggcagtcccaacagcagccnccacagcagcagccctccccgcagccccaacagcaggtccagccaccgcagccacagatggcaggccctctggtcactcagtctgtccaggggctgcaggcttcctcccagtcagtgcaatatccggcagtctcttttcctccccagcacctcctacctgtgtctccaacgcagcactttcccatgagagatgatgtggcaacacagtttggccagatgaccctgagccggcagtcctcgggggagactcctgaacccccatcaggtcctgtctacccatcctcccttatgccacagccggcccagcagcccagctatgtaatcgcctctacaggccagcagcttcctacaggaggattctcaggctctggccctcccatctcccagcaggtcctccagccccctccctcaccacagggatttgtgcaacagcctccgcctgcacagatgcctgtatattattacccatctggtcagtaccctacctcaaccacgcaacagtaccggcccatggccccggttcagtacaacgctcagaggagtcaacagatgccacaggcagcacagcaagcaggttaccagccagtcttgtctggtcaacagggattccaaggcctaataggagtgcagcagccacctcagagtcagaacgtgataaataaccaacaaggaactccggtgcaaagcgtgatggtttcctacccaacaatgtcttcttatcaggtgccaatgacccagggttctcaaggactgccccagcagtcataccaacagccaatcatgctacctaaccaggcaggtcaagggtcactcccagccactggaatgcctgtttactgtaatgtcacaccgcccacccctcagaacaaccttaggctgattggcccacactgcccctccagcactgtcccagtgatgtcagctagctgcagaacaaactgtgcaagtatgagcaatgctggttggcaggtcaaattctgagagctctggctgtggtacatttcttcagatatttctcatggcctttgatggaagaggaacaaggtgggaaaactggctgaggacttaagtattcactcaacactcaaatgattgctgctggtattctgtaaaaaataaacaaagactaatatacacgttagctgcgtcctgtgccgactgctacccacgggtcctctac

SEQ ID NO: 103107 - DNA, 2573 bp, Homo sapiens
  misc_feature (1036)..(1036): n is a, c, g, or t
ggattctacaggcatagacttacacgagtttctgattaacacattaaagaataattccagggacaggatgatacttttgaaaatggagcaggaaattattgatttcattgctgacaacaataatcattataaaaagttccctcagatgtcatcgtatcagaggatgcttgtccatcgagtggcagcttattttggattggatcacaatgtggatcaaacaggaaaatctgttatcatcaacaagaccagcagcaccagaataccagagcaaaggttttgtgaacatttaaaagatgaaaaaggtgaagaatcccagaagcggtttatcttgaagcgagataactctagtattgataaagaagacaatcagtcagtttgctcccaggaaagcctttttgtggaaaacagtaggctcttggaagacagtaacatatgcaatgagacctataagaaaagacagctctttcggggcaacagagatggctcagggagaacatctgggagtcgacagagcagctcagaaaatgaactcaagtggtctgaccaccaaagggcctggagcagcacagactccgacagttccaaccgcaatctaaagcccgccatgaccaagacggcgagttttgggggcatcacggtgctgaccaggggtgacagcacttccagtactaggagtaccgggaagctgtccaaagcaggttccgagtcttccagcagtgcaggctcctcaggatcgctgtcccgcacccatccacctctccagagcacacccctagtctcaggtgtggcagctggctctccaggctgtgtgccttatccagagaatggaatagggggccaggttgctcccagcagcaccagctacatcctccttccacttgaagctgcaacaggcatcccgcctggaagcatccttcttaatccacacacaggccagccctttgtgaatcccgatggaactcctgcaatatacaacccacccaccagtcagcagcccctgcgaagcgccatggtggggcagtcccaacagcagccnccacagcagcagccctccccgcagccccaacagcaggtccagccaccgcagccacagatggcaggccctctggtcactcagtctgtccaggggctgcaggcttcctcccagtcagtgcaatatccggcagtctcttttcctccccagcacctcctacctgtgtctccaacgcagcactttcccatggtcctccagccccctccctcaccacagggatttgtgcaacagcctccgcctgcacagatgcctgtatattattacccatctggtcagtaccctacctcaaccacgcaacagtaccggcccatggccccggttcagtacaacgctcagaggagtcaacagatgccacaggcagcacagcaagcagttgcagtgacaggtggatttctacagactgaatctgtggccatagtacttatttcaagataattggccaaggctaggttacatcctgtagccatgcaacagtgacagtaatttgatcacaataatgctgaccccatgacttttgacttcataattatcttgctgtagtcagctggccaacagcacttcatcaatgaaaatatccaccaggaggaatattatcatggggacagttattagagccacctccattttgactttgccccaagcttggtctggggaaaaagcttcttaaagttgcctcagcagtagtttgctgcctcccagcctggttttaagtatatccataattaacacgacgggtagaggtgcaagaatgccacattttcttctaagccatgcaacctcattaagaaagtaaaacgtttgtgagtctttcatgcggtctttctccctctgggttgttgaagctctctggatgtcagcacagcactatgggccaggaaagttcagagaattacttcaataatatgacagcctcttccatttaaaatggaattcaatgctggcttcccttggaggcattcattgaaattccgtgcatgatccattcctctagtcatttaacaatgtgtctcatgtttgccctgatttaaagaaagaaagaaagaaagaaagaaaaccagctttgtatttgtgataacatggatcaggatagtataattgcagtgagagcctgcagtaataggatggttcatctgatgtgtactgccattagaaaatgacccatgcatgaatgttctcaggggacagtaaagaggcttttaagaattacattctgtgtagtatgaaagctaatgagcaaaagaggaagtacgaagaaaaactactgcttcaggaagcatggttccacttaggtagggcctgtcacagctcccctcaaattcatttggatagacaggccattactaggatgactactatattacccccatgcccatgcacactccctgcaggtcatcctgtaccaagttcctaaggaattaaaaccagcgagtaataaatggtgaggaaaagaaagaggatggatacagcaactgccaataaataagttaaaaaaagacatttacgtcaaagatgaaagaagtcgtaatgaacttcaacagca

SEQ ID NO: 103108 - DNA, 434 bp, Homo sapiens
ttcttattgcaacattaaactctggaaaaggacgctgactgcctttgaaatcatcccctggcttgtttcatgagtgtgtcacgttctcccggcaggtcattgtgcagcgctgcctgtgtggcaaggacatgtctcacgtgaaggccgcttgcattatgtgtgcttacctgaagctgctgcccatgttcctcatggtgatgccggggatgatcagccgcatcctgtacacaggtaagccctgaatccgtatgttctctctttttttatgcttgtattctgataagtgtttttaaaatgtcataaaaccttgagaaaatccattctggaaggaagtaaaagcagacttccaggtggagggagcagcctgcacagtggtcaaaggcaggaaaatttggcatattggacgctctgttcctttatcctcttcataccat

SEQ ID NO: 103109 - DNA, 2043 bp, Homo sapiens
cgcctgcaggtcggccatggccagtacggttagccccagcaccatagctgagaccccagagccacctccattgtctgaccacatccgaaatgctgctgacatctcagtcattgtcatctattttctggtggtgatggctgttgggctgtgggcgatgctgaagaccaaccgaggtactataggaggcttcttcctcgctggtcgtgatatggcctggtggccgatgggcgcctctctctttgccagtaacatcggcagcaaccactatgtggggctggctgggacaggagcagcttcaggagtcgccaccgtaacatttgaatggacttcctcagtaatgttgctgattcttgggtggatctttgtccctatctacatcaagtcgggggtgatgaccatgccggaatatctcaagaagcggtttggtggggagcgactccaggtctacctctccatcctctccctcttcatctgtgtggttttgttaatttctgcagacatatttgctggagccatattcatcaagctggccttgggattggacctttacctggcaatcttcatcctcttggctatgactgctgtttacaccaccactgggggcttggcctcggtgatttacacagacaccctccagaccatcatcatgctgattggctcttttattctcatggggtttgcatttaacgaagttggaggttatgagagctttaccgagaagtacgtgaatgccaccccatccgtagtcgagggggacaacttgacaatcagtgccagttgctacacacctcgggcggactccttccatatcttccgagatgctgtgactggggacattccatggccaggaattatatttggaatgcccattacagctttgtggtactggtgcacaaatcaggtcattgtgcagcgctgcctgtgtggcaaggacatgtctcacgtgaaggccgcttgcattatgtgtgcttacctgaagctgctgcccatgttcctcatggtgatgccggggatgatcagccgcatcctgtacacagatatggtagcatgtgtggtaccttctgaatgcgtgaaacactgtggcgttgatgttggctgcaccaactacgcataccccacgatggtgctggaactgatgccccaaggactgcgaggcctgatgctttcggtcatgctggcctctctcatgagctccctgacctccatcttcaacagcgccagcaccctcttcaccattgacctctacaccaagatgcggaagcaagcgtcggagaaagagctcctgatagctggacggatatttgttcttctattaactgttgtgagcattgtgtgggtcccactggtacaagtttctcaaaatggacaactaatccattacacagaatcaatttctagctaccttgggcctccaattgcagctgtctttgtgcttgccatcttctgtaaaagagtcaatgaacagggagcattctggggtctaatggttggacttgcaatgggcctcattcgtatgataacagagtttgcttatggaacagggagttgcttggctcccagtaactgtcccaagattatctgtggagtgcactatctgtacttttccatcgttctcttttttgggtccatgctggtcaccctgggaatttccctcttaacaaaacccattcctgatgtacatctgtaccgcctgtgctgggttcttcggaacagtacagaggagcgaatcgatatagatgcagaagagaaaagtcaggaagaaacagatgatggtgttgaagaagattatcctgagaaatcacgtggatgcctcaagaaagcttatgacttgttctgcggtttgcagaagggacccaagctaaccaaggaggaggaggaagccttgagcaagaagctcacagacacgtctgagaggccctcgtggaggacaatagtgaacatcaacgccatcctcctcctggctgtggtggtctttattcacggctactatgcctgaactctatctgagccattagaataatgaataattcttaaaaaaaaaaa

SEQ ID NO: 103110 - DNA, 384 bp, Homo sapiens
agattatatggacctagtaatttttgttctgttcattgctttggttttcttcttcaaagttaaaaaaatagatactatatctatcttctgtatctctcactttctcttgactctcttaaatctctttcatatcttttttattaaaaagattctttatatcttattatacttgtattaagtgattggtatggtttggatatttcacccctccaaatctcatgttgaaatctgatccaaatctcaagttggaggtggggcctaatgggaggtgtctgggtcatggagacagatccctcatgaatggattaatgtgctccctagggtgcagtacgggggcactgagtgagatctggctctattacgagttggttgttaaaaagaacc

SEQ ID NO: 103111 - DNA, 627 bp, Homo sapiens
gtgctttcattttcaatacatctctgcttctgttgcttcattctgtccttgttttcttagtgcattttgtccgattctttgttcaaaaccccaagaaactggacactctccactgggaaaaaaactagtagaagagaaaatggaatgataataattacagtagtagaagaagagcaagaacaaatcaacttattcaaaaaaaaaaagaaaaaagaaaaaatcagagaattagcagggtaaatagaaaccacaatgtaagatgagataaaaaaggagacttagtatataataattacaatagataaaaataaactaaactttctactcaaaatacagagtatcagttttgattgaggaaaaaatatctactatttaaacgagccacatctaaaacatgaagacactggaagttaaaagtaaaagaatcaaagataataggcaaatattaaagaaagctcacacagctatgaaaataccagataaaataaattattcgggataagaatggttactacatattgatgtaacaattttaaatttgtatgatcttaaatggtttcaaaatatataaagcaaaaattgcttaaactacagggggaaattgacatattctttgccagggtagaa

SEQ ID NO: 103112 - DNA, 364 bp, Homo sapiens
aaaattagccaggcatggtggcgtgtgcccatagtcccagttacctgagaggctgagccaagaggatggcttgagcccaggagtttcaggctgcaaatagcaccactgtactcttgcctgggtggcagaacaagaccctgtctcaaaaacaaacaaacaagcaaacaaaaaagaagacgaaaagaaagggaaggaaaagttattctgaaacccctacttcgatgtaaaaatcctatttaataacttgtccccagaagtctattttattcatacatggttcatgtgtttgctacaaataaagtagatattatcaaaacctgggttggtcctaaattagaaagatctgccaagtcacatatctttc

SEQ ID NO: 103113 - DNA, 81 bp, Homo sapiens
gagccctgctcggctccggcgcgtctattatgctgccggggccggcgagccaaagaggagccggccgcgcgggccgggagg

SEQ ID NO: 103114 - DNA, 824 bp, Homo sapiens
gcgtctacaagccaaggaatgtcaggacttgcagaaaccccagaagcaaatggaaaggcatgtaacagattcttcctagcatcttcagagagagcgtgatgctgcctacaccttgttttgaacttctagcctccaaaactgtgagagaataaatttctgttgttttatcaagacacctagtttctgttattttgtgacagcagacctagaaactgaatataccccttaaaccactgcggttttcctttttgttccaagattctttcatgtatgacctgtgagagccaaatccagtctttatttggcctctctggagcacatgcgactcatttattccttgttgttgctcctccccaacatccttcttggcctccttcattgcttcctaatctcacagccatctaccgcacagtggagtccctgggttcatcaccacatcctcccactctattcatgctccactgcaatctcatccaaataccagctctcctcctaccccccatgctgatgattccccaagccctctagcccaagcatctctcctgagatctacttttgagttccccactgcttcctgaacatttccacttagaacttctacaagcacctcaaaaactacatggctaaaatggaagtcatggtctagaagcctccttcccaaataaacttgcttttcctcctgtaaccggaatgtctatgagaggcttcacattcacacaggggcataagccagacacctggcatcttcttgggcttctcccctgcacccttcgccatagtcactgaggccaaaggactctgcctataagggttcagggaatgca

SEQ ID NO: 103115 - DNA, 419 bp, Homo sapiens
ttctctaaagctaatccttctctaaaaccagcatttctcctgcaccctttaggtattactgtcattcttatttaatatcaagaaaacagaggtctagagaggttacacaattctgctagtgactggcagagccaggtttgtccaacttcaccatctagctgcttttccagtttggacactctgaataatattaaaaggcagatagacaaaccaggggaaagtatttcaacattaatgaaattaaaaaagtcaaacactgtaatggaaagatgaacacagaaaaggcacaagcaattcagaaaagaaaatacgttgataactacaagcaaataaacatgttcactcttacttagtaattaaatgcaaattaatataagaaatcatttctcacctatcaaatcagcaaggattttatttac

SEQ ID NO: 103116 - DNA, 372 bp, Homo sapiens
atgttttcttgcactaggaccatctcatgtcccacaccctggccagtgacaaatcagcagattcgctgcatgggcttctgagaaagttcttgaacaggggtcattcttaaacctgaattcttccctgtatgttttgctctttgctttaccccctacttctcaccttgcaaggagattcggtacctagtattggaagatccaccttatgaccatgcggatgaaagccacagtctaaggaagtgactgcagaaagcccacagctaccctggcctaccctgtggtttctttgagtgtctgcaccagccctggacttgttacttccagacgtcctatcacatgagaaaaaataaaactgattatgggtttaagctg

SEQ ID NO: 103117 - DNA, 416 bp, Homo sapiens
ttcagatgggtggtgtcaggcccagaggtgcagagctatttacccttgttcctgagaatccaagggaggggcctttagtgtccatatagttctgtcctccagcaggtgatactgagtagccatttagctacagagaagtctgaataaggaacaatatggctactttcaccagcccagaagtaattgtaaaggcccattctggcctttatacctaatgattagcaaccatagggaacacacagctatcttcatgccagcagcttctctcagtgtgtgtgcacaagtatgtacctggcaggatgtgaaaatggggctttccaccagtttctcccttgggttgcaagaagcctctttctatcattcacatgggttttcccctgggggccacttatattggatgctggtaactgggaaat

SEQ ID NO: 103118 - DNA, 209 bp, Homo sapiens
atggattatagatactgaacttgaaaaatgcatccatgagtccatgagtttgcgtatccacagtgatacttaaaaaaaagtgggagtaagggggaggccgaggcgggtggatcacgaggtcaggagatcgagaccatcctggctaacacggtgaaaccccgtctctactaaaaaaatacaaaaaaattagccgggcgtgatggcgggcg

SEQ ID NO: 103119 - DNA, 234 bp, Homo sapiens
cttatttctccaacattatttaattcagactaactttatttcttgaaggtatataccagacatacctcggagatattgtgggttcagatccaggccactgcaataaagcaaatatcacaataaagcaagtcacacatactttttggctttccagtgcatataaaacttatgtttacactatattgtagtgtgtaatagcattgtctctaagaaaacaatgtacatgccttaagt

SEQ ID NO: 103120 - DNA, 734 bp, Homo sapiens
cagaagcgctaggaggtagaacagcgtccagcggggagaggagctagagtcggcatcgggaagcccaccctggagcctgcttagcttgacgagccctcaaccggggcgccctgctctgcgaagagtaaccctgcatcctcagaacaaccgtgattgtcttcattcctacatatgaggaacggaggcgcggagccccacggcagccggggatccaaagacagcctccctccagttccatctgccggctcttggaaggcctggatccctgtccttcagggcccagcccaaatgccgcctcgtccatctgcattttacggccaggtgccccgctgcgggcacggcttcttgtaaaatgctcagctcagcagtgggcgaggcagggtccctgccccatgggatggagggcggagatcaggacccacaagagcccaaagaagaccattttggtcggtgaagaccaaagaaattcaagcaggaggatgtgacaggagcttttgggaaagcctctgaggaggtgacagccatgcaaccgtgttcggggaagtgtgccgcaggcagaggggaaatgagtgcaaaagccctgaagctggagttcggtgtctggataacaggaaaggcctgcatagctgatgtgtgccagaggggagaaagatctgtgacacaggggggccgccatgtttaatttggagttttgtgtggaagggggtcattcattgagtctgaattgggagttc

SEQ ID NO: 103121 - DNA, 461 bp, Homo sapiens
atggcaaccttagtttccaccttaagtccaaacgtcttaaaatgttgttcaaaaccaccttaaacctgatcagagcctcctctctctctccctactgcccttcatgttctgaactcctaagctcttcagactgtctgtccttttctgaagactgtacattttcaggcctctgggctagggctcaatcacttaccttatcctgacagggccactgaaccttgccgcctacgctgattcccagaggcatacctaacttgcctgtctttgctctcccatggaatgtcatctctatttatatgtagcaattatttgattctgcattaggttagttcttcagatgtttgtttccttcgccaatagaaaattcttcaaggacagtattctgtctaactcatcttgtattcccacaatgcccattttaggtactcaataaagagttcataaatgtttaaaaacagtat

SEQ ID NO: 103122 - DNA, 387 bp, Homo sapiens
caaccagttcaaaccagcgaggaaagaagaaattaaattcaccttttggccaggcagttgctcatgcttgtgatcccagcattttgggaagccaaagcaagaggatcacttgaggccaggaattcaagaccagcctggacaacctagtgaaaccccatctctacaaaaaaattttttaaaaagccatgcgtggtggcatatgcctgtagtcccagctgcttgtgagacagaggcagaaggattgcttgaccccagaagttcaagtccagcctgggaaacatagtgagacctcctctcaaaaataaataaataaacaacaataataataaaaataaatccacctttcatatgtgtaatgaaaaatatcaaagattttttgttttgttt

SEQ ID NO: 103123 - DNA, 409 bp, Homo sapiens
ggttaggtgcattttatcattttaagggccatgatgagataaaacatggtaagctgttgtgctggctctttttatgttgatcattggcagttaccaagctgactatctgacatgagctgaaaacctatgttgaaaaaatgtccagttccattttatgtagcttcaactcatctttaaaaaatgaagtgatttagaacacatgtcacgcactcctgggccagccagcttccctttctcttctcgtatgtaatatctttttttcccctttctagcaagtactttcaaaagaactctgtacattttaacataaaaaataaattatgttgggccattttggaaaaaaaatacttatttggctaaatttaacatttcaaacaaataaaaaattcaagcagaaaataattgagga

SEQ ID NO: 103124 - DNA, 561 bp, Homo sapiens
gtctgcggcccttcttgtgcacctctgcttaaaagagctcacagtgttggctttcatagcagagcagtctaggaaattttgtactctggttccagggctcagagtagcaagagtgctgggacctgtctgagaagcagtgctgggctgtggatgcttgcctgtggcaccagatgccttacagtggccaggaatgctgcgggacagtctactttgattgctttctttcctccatggctgagatctgagtgtagtgttaactgggcttaaaaatcaagtccgttgtatctgcatggtcacgtagttcggcatctcatggcttttgcacctaggaggtgtggaaccataatacctgaaacacaatttcataacctggctccttgggcttagcctatatggtggaggttaggtctgtatatcatcaagactgtgtctttgcatggttgtcattctgttggaattgaactttcttatttctgtaggcctaggttctgtctattcttctcagacagctcatatgctgcttcttcccttcagccttctctgatacttgtccactccccg

SEQ ID NO: 103125 - DNA, 776 bp, Homo sapiens
acaactgcctcacaatgtcagccactgctccacgttcccaggagagggcccattaagaaagtcaccaattcatttcagcttggcttataattaatgcagcaacctctggcatcaataacctatggattggcatatgagtagggcataatttacaatctctatataaaatgtcattttaaagacttgtggtcttgtctcaggtaatttcaaacaaaatttttaaaaaatttttactcaataggtgtcctcattgccactgccatctcctcatattttccccacgccaatgctggcccctaatctctacaaaaaagcaagagcaaggaatggagggagggaggaagacgaatgatgagcaggagaggatcttagagatctaggacaactggtaccccattttacagatgagaaaactgagacctcctgatattgtgggacaagcacatggatttggtcaaaatctattaaaatcctgccgcctccatttaccgtgtgatctaacctctccaggctactgtttccagaactgtaaaaggcaaataacatccctcacgggcttgttttgaggattaaatggataaggagtgtgaaggcgccgaccacacatacgtgttcaaaggccagggagtcaaaagtcagaccccaaaactagtttccttccttgttgcctccccaggattcttggaagagaatatttactgcagctgaaacctcccattcatacaaaaaggacgctggagacagagggaagccactgaagaaggcagtaagtggct

SEQ ID NO: 103126 - DNA, 428 bp, Homo sapiens
tcaatggagatggaattttgctctgtcgcccaggctggagtgcagtggtgtgatctcagctcactgcaacctccacctcccgggttcaagcaattctcctacctcagcctcctgagtagccaggactacaggtgcatgccaccacgcccagctaattttttgtattttagtagagatggggtttcaccatgttgcccaggctggtctcgaactcctgagctcaggcaatctgcctgccttggcctcccaaagtgctaggattacaggcatgagccactatgcctggcctccattatcctcattttaaaggtagggaaataaagtcttagggacattatatgcccaagattataaagctactaagtagcaaaccagtctttgaacttaaggatactagatactagcaaacacatttttgaactctacac

SEQ ID NO: 103127 - DNA, 649 bp, Homo sapiens
tagaaatgtatgactactctcaaagcatgaggttaaaatgggagcagattagactgagcaccttgaggatagggatcagtcttactcatctctgtatcctgaaaagtgcttggcgctactgcacgctccataataacagaaaaaccaattatttaatgagctaggagttacatatcatctttccttaagtacctaatcagtctttatcatcagtgagtgcagaactcaaatatggtattgttcatcttccatcaccattttctcccaagtttcctggtttaattgcattttcctcactttccatctaatggatcctgatgtcattctttatctttatttcatattgtcctattgtgtgtattgtattgtatttttagctacattaaatccaatatggaaggaagcagagaacgatcataattgaactaacaagcaagtggaggtggagagaaagtggccccaatttggaaggtgaaggaaaactggggatggagcctaactgatcattaaaatgctcgaagcagctctttccaacccagatctgagcttctcttctttgccctctggagggtccacagagaaaggaaatacaagttttattaagaaaaagaggaaagcatctattttaggtgataatacaagcacagag

SEQ ID NO: 103128 - DNA, 832 bp, Homo sapiens
ggctgaggtccatttgtatgcacacaaagaaaagagttgcttgcctttcgaggaaataaaatggcctgaaagacgtcattactctacggaggcatgtggaaacaaaagttagagctaaaatccgtaagaggaaggtgacaacgaaaatcaaccgtcatgacaaaatcaatggaaagaggaagaccgccagaaaacagaaaatgtttcaacgtgcgcaagagttgcggcggcgggcagaggactaccacaaatgcaaaatccccccttctgcaagaaagcctctttgcaactgggtcagaatggtggcagcggagcatcgtcattcttcaggattgccctactggctctacctcacagctgaaactttaaaaaacaggatgggccgccagccacctcctccaactcaacaacattctataactgataactccctgagcctcaagacacctcctgagtgtctgctcactccccttccaccctcagtggatgataatatcaaggagtgtcctcttgctcctcttccaccctctcctcttccaccctcagtggatgataatctgaaggaatgtctctttgtcccgcttccaccctctcctcttccaccctcagtggatgataatctgaaggaatgtctctttgtcccgcttccaccctctcctcttccaccctcagtggatgataatctcaagactcctcccttagctactcaggaggccgaggtggaaaaaccacccaaacccaagaggtggagggtggatgaggtggaacaatcaccgcaaacccaagaggcagagggaggccgaggcacaacaattacccaaacccaagaggc

SEQ ID NO: 103129 - DNA, 768 bp, Homo sapiens
ggctgaggtccatttgtatgcacacaaagaaaagagttgcttgcctttcgaggaaataaaatggcctgaaagacgtcattactctacggaggcatgtggaaacaaaagttagagctaaaatccgtaagaggaaggtgacaacgaaaatcaaccgtcatgacaaaatcaatggaaagaggaagaccgccagaaaacagaaaatgtttcaacgtgcgcaagagttgcggcggcgggcagaggactaccacaaatgcaaaatccccccttctgcaagaaagcctctttgcaactgggtcagaatggtggcagcggagcatcgtcattcttcaggattgccctactggctctacctcacagctgaaactttaaaaaacaggatgggccgccagccacctcctccaactcaacaacattctataactgataactccctgagcctcaagacacctcctgagtgtctgctcactccccttccaccctcagtggatgataatatcaaggagtgtcctcttgctcctcttccaccctctcctcttccaccctcagtggatgataatctgaaggaatgtctctttgtcccgttccaccctctcctcttccaccctcagtggatgataatctcaagactcctcccttagctactcaggaggccgaggtggaaaaaccacccaaacccaagaggtggagggtggatgaggtggaacaatcaccgcaaacccaagaggcagagggaggccgaggcacaacaattacccaaacccaagaggc

SEQ ID NO: 103130 - DNA, 475 bp, Homo sapiens
gaatggcgtgaacccaggaggcggagcttgcagtgagccgagatcgcaccactgtactccagcctgggtgacagagcaagactccgtctcaacaaaagaaaaaaaaaaaagtagtttgcatggcatttagaaaatggaaagcaaaagcaccaattaagcaaggaagtcttgcctcaaacctgcatgtgtttcttctataaacaccagcactattcttataagtgtacagagcactcaccgacactgaaaaccatggaaccctgagtcatgtattatgcttccccatgtagacttcgcagctgtcttttaactctaccttttatcttcaaagttcaaggaaacatttattatgatttcaaattcctgaactcacatctagtcctaaagtcaaaacaatataacttggtatctaaatcaactgaaatgaaatgaaatgcacttggcaaaatcacccttttatgtagtggtggaatgc

SEQ ID NO: 103131 - DNA, 314 bp, Homo sapiens
acacccaccattcacagatgagaggccacacaacgtgcttgagtgcatcaaaggcaagttgacaaggtcgcctgccgctgagccccactgttctcatgagcaggacattattttcagtcttgctgggcagctctttaatatttcttttgtgatgatcagtgtccaagatgagctgtcaggcacttaagaagtgaagagttcctgaagatttcattgtgcatggtttccaatacaggttcaacatccctaatccaaaaatccagattccagaatgctccacaatccaaacatttttgagcaccaacatgatgctc

SEQ ID NO: 103132 - DNA, 312 bp, Homo sapiens
tggttaccaggggctgaggaagaagagaaaggagttactgtttaatagggacagagtttcagtttagaacaatgaaaaatttcaggaaatgaccagtgataatggttgcacttaataccacatgattgtatacttaaatggtaagtcttaacatttatattttaccacaaaaataaagaataaaataatttttcagacaaacaagagaactgagtgcctgcagagctgtaacatattagatgttaaaggtaatgtcttcaagcagagggaaaatgataccacctggaaatttggatctaaataaaataatga

SEQ ID NO: 103133 - DNA, 646 bp, Homo sapiens
tatctgcacttcatagtatttttgtaatgagcaaatattcctttcattaaaaaacaataaaaaagatttatttcaaaaagaaaaaaattactttggctgatgcaatataaaaacaaaccagatgaaagttagcatggataactataaagtcctgtgtcaaggtaggaaaaaaaagtacttacgtaagcataagatgcaggcaagaagggtctgaaaacagtttatttgaaaaatatttggaagtcttggacaaaaagtgaatacacaccaaaggataaactaatgcaatcacaggcagtattaatagaatatcaaattccggaagaaggaaaatgatgaaccccagtgaattgtcagattcccatgtggtgcactatgtccagttctgagcctccatggcctagagaaaggtcagaggagggtcttctggatagtcacaggtttgaagtcactgttcattaagacttctctggcctaggacaattaacctagatcacaggttctcagaagcctttttaaaaaaaattatttaagactttaattaacaggtccttacagtttgttgacttttttgaaaaaaccaagtcgtaaacttttattacaaattaaaaatgaagttcttaaaaatctcaacttgaccagatat

SEQ ID NO: 103134 - DNA, 461 bp, Homo sapiens
caaccataatcaatcaattcccatgccatatctttgaaagtattagcttgttttatgtagaataatgtagtttttagtgcagcataaataatataactcatactaatggcatattagagggatacataaaatttttacccatatattttgcagtctcaaaaatgtgaataagatctaatgttgatgaagaaacaagaaatcaatttgtaaaataaatgctaaaggattttaggcagggattataattaacatttttgtacttgcaaccccacctaatgaagtacattgcatgtgggaggaaaaaaatatgtaatttttgaatgaacatgcttctttgaaaacagaaattaagcctacaatgtagactttgttaaaggtcatagaaaatccagctgtctggctgggcgtggtggctcatgtctataatcccagcactttgggaggccaaggtgggtggatca

SEQ ID NO: 103135 - DNA, 572 bp, Homo sapiens
gcactttctgaggcttctcaccgtagcccttcccaaggtggcaaaacctacaaacaacccaagagcctgaaaaatggaataatgagagttgactttcacttacatgcttgctgtgggccaggcactgtgctaagggctatactggaacgatttatttaatcttcacatccccagaaggtaggaatttccatcattttacttcgcagaagactcttctgttttgcagttttacagatgggattcccattttatagcttgcctgcttgaggtcacacagcaagtaaatgatgctggtaaatcaaccaggctttgaaccctaacactccaactaacggagtgcttgctcttagcaaccacagttatgtgctgtataatgacgttttcatcagtgacagatgacatatacagcagtggtcccataagattataaacctatattatggactggacatggcggctcacacctgtaatcccagcactttgagaggccgaggcaggcagatcactagagcccaggagtttgacaccagcctggggaacatagtgagatcccatctctacaaaaaaaaaaa

SEQ ID NO: 103136 - DNA, 378 bp, Homo sapiens
gttgaaccacacttgaatctctagaataaattttgcctggtcataataaattatctttttactgtattgttcaactcaatttgctagtattttattgaagatttttgtatataccttcagcaagaatattggccttttttgtatttttctttgtctaattttggtatcagggtattactggcctcatagaatgagtttggaagtaatctcttctttcctactttttgtaatagtttgagtaggattggtattagttcttaaacttttgctaaaattcagcaatgaagccattggttcccaggcttttatttgctggaagactttttattatggttttaatctcattacttgttaatagtctattcaggtttttgattt

SEQ ID NO: 103137 - DNA, 811 bp, Homo sapiens
aaggtccttgcatggattacctcactgaagcctcaagatcacccttcaagatgtgtactgtcattcttcccattttaaggatgcagataggaggattgagtaatttcctaagccacgtaattagcaagtgacaccactgggatttgggccttggttgtttgatttcttttctttcttttttttgagatggagttttgcccttgtcacccaggctggagtgcagtggtgtgatcttggctcactgcaacctccacttcctgggttcaagcaattctcctgcctcagcttcccgagtagctgggattacaggtgcccaccaccatacctggctaatttttgtatttgtagtagagacggggtttcgccatgttggccaggctggacttgaactcctgacctcaggtgaccagcctggtgggactacaggcatgagccactgctcccggcctggttgtttgatctcacactcgcaaccacgataccaaaccagaactcttaggagagcagaaaaagacccgactcttttcctcttccatgcttggcttccatcccttcgggagcctccacctttccctcttctgcactatcctggctgccttttctctggcaaggctcagcttgtctcacttccttttctctccaccagcacaactgttctttctttggtcctagtcctccagcctttaaactccagcttccctgaagtgcagtgagtatacacatattgataaacataacaactactctggtctccacaggaccttaaattggcagaatttcaggtgctgaggtgagccaatgggagagattt

SEQ ID NO: 103138 - DNA, 463 bp, Homo sapiens
ttaccagcccaccttctgaagcctgggaggtgtgaacccagggcccgccaaccgctgcctttctcgggagtacttagagcctcgaacccgcgtccctgggggctgggccccaggcgcacggggctggaggcaggccttcgtgccttcgtgccttcgtgccttcccgcggtggccaggcctctgctgcagccgctggttgcaggcagagttttggggacctggcccttctcccactgggctcccccatcctgggccaaggccagaactttagtgctaggggaagatgaaatgtgcagttttgaaatgttgggtttccagagagagtcatgctggaggagaaggaagtaggccagaagtccagggctgcactgtggtgtgagggtggctttgtctaagatgcctgctcagcatgatcaccatagggtgtgggcaggtccctggagccgggggggggggggggggg

SEQ ID NO: 103139 - DNA, 228 bp, Homo sapiens
ttggaaaaaacaagatctcatagctgggtcataaaagaattgagatttcaccaatttagagtgtggactatgtcttttcccaaattctattactgtgtgcttcattctacctatttacagtcaggtgaggtcattataaagcttttaccccgaagcctggcatgttaggtctttaaaaagtaaaatgttttctttaagcataaagggattcatgcacatgccccatcc

SEQ ID NO: 103140 - DNA, 674 bp, Homo sapiens
gagatccctgcctgcacgtggggcggtcctggtagaccagaatgtgggtgtgggtcccccttccctgtggttctggggaccttgaggacatggtcaatcccgggcaagggacctgccacccctgtatggggtcaggaactgctggttggtctctgctgggcaggcaacctggggtccagctcaaatcgttggaatgtggaagtccttcctctcgccccgtcctgaggagcagctgcaggagcttcatgagtgttttcactggaacttgtggaggagtttcctttgatccctcatggagagacggaagcatgagggagccctcaacatttattctgaagatgaagagagtcctgcagctttttggagtttgtgaagtcagcccggccctgtacagatgtggaaaccgaggcccaggaagtttgtgagccagcccggccctgtacaggtgtggaaaccgaggcccaggaagtttgtgagccagcccggccctgtacagatgtggaaaccgaggcccaggaagtttgtgagccagcctggccctgtacagatgtggaaaccgaggcgtaggaaggaagcccttctctgacctcagagctgaaatggccagtgctgggtgggcattgaggggtcacacagaaaagaatgtttcaggccatgttcaggggatacttcct

SEQ ID NO: 103141 - DNA, 763 bp, Homo sapiens
ctgaaaatcatttacagataaccacaatttgctgtggtatataaactaattcttggtctatactaagatgtatttgagaaaatacatttgatttgattttgtggcccattcctaaaggtcattgtatccatttttaaaacaaactaaaatgagaacattaggttcaattttcttattattccaaatgataaaatttaagatttttctaataaaagagtacagataatgggacagttgagagagatggctttaaatacattcttaagtaatcattttcctatttactgaccactgtaatgaaaatatatcaatttatttatggaactcctgattggggataatattttaaaggtatctgttgcacacttggattttcaaaactcggtgaaagttacaagtttgcatggtaagaataaaataagaatattgaaactggtacattagctaattctattactacttagcgtgtttctaatgagaagttactgaaatctattactgtccttaataaaaattgagtagaaaaaagtggaactagagatacattttacagatgtatttccttaataatataattaagcaaaagtgctaattgtgattttgacagttgggccttttaagtagcatttgcagcacaatttgcatttgcaaagttccgaatttcttgactctttcttcactaagcaaatactgttttactctaataattaagagttagtagtacccaaatatgttgaatttttacttaggatatctgtgtgat

SEQ ID NO: 103142 - DNA, 239 bp, Homo sapiens
tgagacagagtcttgctttgtcgcccaggctgaggtgcagtggcgcgatctcagctcactgcaacctccatctccggggcttcagcgattttctcaccccagcctcctgagtaaagcgtgcgctttagcaggaaggagaattaccccagaagagcacactgggccctccttacacttggcttcagatccatggattcaaccaagcagactgaaaatattgttttaaagccaaagcaata

SEQ ID NO: 103143 - DNA, 183 bp, Homo sapiens
gcaatgtggagaggtggaaaagtcacaagctttgagtcagaaacacgtgggctgcagtccagactctgctacttacgctatcagcctggacaagtttcttgaccactctgagctgatctagagaactggggataatagcactgagttgtcatgagaagtaaacaaaattataggaactacttg

SEQ ID NO: 103144 - DNA, 341 bp, Homo sapiens
gctgggattacaggtatgcaccactacgcctgactaatttttttgtatttttcatagagacagggtttcatcatgttggtcatgctggtctcgaacttctgacctcgtgatctgcctgcctcggcctcccaaagtgctgggattacaggcttgtttgcttttaaacagtttgtgggcagggatggtattttcttatgattctattcctcacagatcctggcccagagccattagcagagaaaattctcagtagatgtttgctgacctaaacttcattccaccacctttgccttccttttgccttttcacctcctcttagaaggtaccttatatgataatgt

SEQ ID NO: 103145 - DNA, 425 bp, Homo sapiens
ccctgaattgccctactcaccggatgggtgggggagtggggagggactgcagcccctggcttagtgcagccctgtttatgtaggggaatgtctggtatgtttggtatttgggtgtttacttcccagggtgctcatgggtccctggtgttgaaatgtggctcctccatgcagggggggccctggtgggcctggctggctgtgtgaggcctgaggctagatttggaggctgcggggctgttactccaggcctgctcactgacaactcagcacgccctgaactccccagcctgctcctccctctccgcagtactcctttctgtgccgcattctgcccggaggcaggccagtgtgccgctgctgcaatagcaccacctccgccttgcctgcgaaggaaggcagggaagctggcatcacggaactcttcc

SEQ ID NO: 103146 - DNA, 453 bp, Homo sapiens
aaaaaaaagaagttaattataaactatgtagaggtactaaaaattgaaagccagaaaatgatcagtgaagatgggggttagtcaggaaaggtttcttaggaagattcaaactatattaatgaagtgaccagagggaacgcagttattgagacataaaattgagcagaacgtaaaactcaaacaagaacattgaccagcttatcaaattcattccctgattcactataaaatttcagaacactggggattaaaaaaaaaattctaaaagtttctagagagaaaaatctgctggcatatgaagaatctggaattaaaatgttgtcagatttctaaacaattctgagagttagaactatgtggaattgtctttaaaatcctgaaggaggccgggtgtggtggctcacacctataatctcagcacgttgggaggccgaggcaggtggatcatgaagt

SEQ ID NO: 103147 - DNA, 547 bp, Homo sapiens
ctcttgtttgtgtgtgtggcccttctccccagtcagatgagagacctttccagagtagtaatcacagttcatttttacaagccctgcggctccccagccccaaacgggtgcttagaagaaatgcaagtccttgattaagggcctcagaaggatgtgggatgtcctgagtccttaaaatgtcatgttttcccccaaagaactcaaggtgtggattgctaaagacttgctgcgcttgggcatagataggtatctgtttttcttcttcttgagggagatataataattaagcccttctccttcacctcacccttaaatttggaattttcttttctttttctttctctaataataaggtagagcccttttttatgccacaactgagagattctaaagcatattcagaataatttgcttcatagatgtgagcacagaaatttacagattttgggagatgtatactgaatgtcttatgactttctcacttaataaattaatcctccctcacccattttttaaaggtaaaaatatttcactaaaacaagctggt

SEQ ID NO: 103148 - DNA, 276 bp, Homo sapiens
gtccgtaggctcaaacactgaacagacagagaaaagctcacaggcttcccttcccaacaggtgtggcaaagggagggaaagcactgaaagacttgaagattgtcaactattgggtctgaagccagggcacccagtagttccttccagccgtgtcagtccgtcctgcacgggtgtctgttcagttcgagccaatgaagttaaaagtgaaggaaggaaagcagaaaggaagaaggaaaaagacaacaaataggggacgcgagggaagggaaaacattg

SEQ ID NO: 103149 - DNA, 894 bp, Homo sapiens
gggatggaagggaagagaaaaagaagaaccaatgtcacttgcactatgccactgagaggggatggaggaacattcgaatgccatcttagagccacataaaggctttaaaaagaaaaaagcagattcactactaagagaactccaaaagtaccaagcccaagggagaaacctctctatgtccactatggattgacatgaagagtggattttcaaagaatgatacctgccatgggccaggcacagtgctgaatcctcttacatacatcacctaattctagcctctaaacaaccataatgattccaaccccactgacaagaaaactgagttagcagggtagcttgatttcttcagagttgggatttcagcccagagttttcaactgccaagaatgaggctcaaaagcagagactttgaatcaagagaggcaattgtagagtgagatgtaaatgccacaaatgcatacttttaaaaatgttttgttcgctgctgtattcccccatacctagaaagtaaaatatttatttaataaaggaatgaataaatttgcaccactctgtgaatggagcctggatagaaatgaggaaacaacccttaaagaccttatgtgtgtaagcacttttgaaattcttgatgcaacttcattgcgtggttgctgcagggaatccaagtcaagactgtatttcctcacattcgaaatgaaggcaatgatgttgaataggtgaagtcagctgcagggtcacccaagctggtcagtgacaatgtcagagccaggatgggatcttcccaatatggcagaaggaacaagagactcagtaggttcaaactgtgggactaacactacccagaataaaaacctggatcatggacagtgtttttttggacagaaattttga

SEQ ID NO: 103150 - DNA, 260 bp, Homo sapiens
acacccttgactttgccaggctctagggaccaactacttcttcggcaatgcgggcagggcatgccacacccatttctgaaactaagcgggagattttccaggtttttctgctttttgttaactcggccattgcacaggatagggaaaggatgtaatagaaggtgtgtgtgtgtgtgtgtgtgtgtgtgtgtgtgtgtgtgtgtaatatactgaatggcaggcagtgctgtagtgaagagcaaaactcaaatcgttaatat

SEQ ID NO: 103151 - DNA, 239 bp, Homo sapiens
ttttgccgtgtttcccaggctggtctcgaactcctgagctcaagcaatctgcccacttcgacctcccaaaatgctgggatcacaggtgtgtgccactatgcccggcctccagaagactttttaacagctcacagggcacagtttagaaagcactgcctgcaaatcgggtggggtgctgaaatcaaggacaagataaatataataggaaagacgtaacagataaaaaaattttccacatt

SEQ ID NO: 103152 - DNA, 249 bp, Homo sapiens
tgagtgtatagactggagtatactgtggcattggagtgataggaggacggggttgagtaagcgctgacatcgcgcttattgcactccagcctgggggacagagcgagactatctcaaaaaagacagaaaaaacctgaagaaattcctaatggcagcaaggctccaatttccccagctctgccaactgtggtgactccctctctggcccaggatgtgcaggagcactgggactgtgtctcagggcccccg

SEQ ID NO: 103153 - DNA, 471 bp, Homo sapiens
ggttgatgcaatgttattttaatgagtttattggttcgatgcacaaaacaccacatggtgcttgaaggttttaggttataaattttctcgtgaggcacttacttgaaggaactctgttacataatcaattggtctttaaatctatccgcacaaaatacaacctttcagttttttacatatatggttgttattatgtgattatgaaaaccaaataaaaatttccatagaagatgttatattccttaatgaactattttgtatatatattgaagttttcacaataaacatttatttcacagtatttgttgagtgaatctacaaagtgaatttggagtcttctagtaaagactgagaataaaggatcttcctctttattttgtctttgtacttcctgtcctgaagggacccttagcagacatgcctgcatttggcaataggcctactctatcattgttacagtgttaactgtac

SEQ ID NO: 103154 - DNA, 914 bp, Homo sapiens
ttgaaatctgtccgcacaagttcgcctccttgggaatcatctcgcagtcctgagtcgtttggttattggcgttcaataacctttgggttattgggtagaagatgaatgcgtttatataaagccactttcaaaactgagatgggaacgtgtttcatagggacagatttctcctcccatctgctggtttcctaattatctggctgttgtagaacgtagcattcctgacagctttgaagccttgctacttcgtggtggtttgaagaagttactatatgatgatctcaggcgttgtagcagaggcacttcttttttgaccatctggaatgcccttagttgacgctggccacttgagtgtaaaatatgcgtatcgctcctaaggaaaagtagaatttcaacttcattgcttaaaaaaatcatgaaattaaactatagacacttctaagtcgatggtttgacagaagggcggagactgatagttttgtgtctttatgtgtaaaattatgtagcatctgatcaatatcttttgtgaaactaatctgttctctttgctatggaaagatttatctgcattaaaaactcatgatttaactttaatacaattttattaacagacatggcataacgcttagataaattggaaaattcttccttcgaaaaaatcaaattgccgggcgcggtggctcacgcctgtaatgccagcactctgggagaccgaggcgggcagattatcagaggtcaggagttcgagaccagcttgaccaacatggagaaaccccgtctgtactaaaaatacaaaattagccgggcgtggtggcgcatatgcctgtaatcccagctactcgggaggctgaggcgggagaatcgcttgaatctgggaggcggaggttgcggtgagccaagatctcgccgaaccg

SEQ ID NO: 103155 - DNA, 502 bp, Homo sapiens
attttttcagtgccctctagaggaaagtagcacatattggttcctagcactgccgaatttatgcagagttctctttttgggggcatcttaagagttcaagatcacatgcaaagtcaaggttgtgttggaagtaggagccgtgacttctgactcttaggattgatgtaactttccacgttttgatttttccaactggcatgttagtgttttctgggagaagatttaggatgtgtgggaatggagatagtaccattagattcttcgggactgtttggatttcctaccttgctaaacacacaaacagcttcctgacttattttttttttttttttaaaaaggattcatagtgggagaaaagggcatgggagattttcaattcataaatacagttctggctgacatatattagaagaggctaaagggttttgttcttttttttccccctttggataaaagtatgaagcagtgaaccaggcactgtgtaagtacttctttctttcct

SEQ ID NO: 103156 - DNA, 705 bp, Homo sapiens
ctgcagtgaaaaagtctgttttgcgtcgaaggaagctgaagaaagtgttcacaagctcccgcacgccgccctcgtgctgctgagccatggccagcaacatgccatcgaaccgctcctcctcctgctctccgcccatcgcgccggctcggatccacgtcctgaggtctgcgctctagtcctgtgctctctccactacttcgggtcacgccgggcccaacaactctagtctaaatcagtccttatttctaaaaggtacataagaattcggagttaaagatctaactatctgaagacaaagtatctcccactgccataaactgaatgtgtctcctcaaaattcatgggttgaaacctaacccctaaatgtaatggtttcaggagatggggctcttgggaggtgattagatcatgaaggcggagtcctcgtaaatgcgattagtgcccctaaaaaagaggtcccagagagcttacttatcctttctgctatatgaagatacagcagaaggatggctgtctccaaaccaggaggcaggtcctcccctcaaatttgctgatgccttgatcttggacttctcagtctccagaaccatgagaaataagtttctgttctttagaagctacctaatttataggactctgttactgtacagcaggccacaatggactaagacaccctacactgtgttaggctttatagaaaaaaaa

SEQ ID NO: 103157 - DNA, 577 bp, Homo sapiens
gaaggaccctcaagacacagtcctgggctcccaggcaggaccaacccccaaacctgtccccccaggagcctgcagagccactgccctgacaggggacacctcacttcctctccttgcagctgctcttggctgggagagcagagaacaggggacaggagagaagccccgagagtactgaagctgaggctggggcggtcttcacttccctctttcctcggcccttttcctgttctcttgtcttgtctctctttctctactttccttctccctagcccagtctctcaccgctcttcagcctctgggcctttccttcttcctctcttgccctcattcttccttctctgtccctcttgtcttctcttttacctcttctcttcttccctccttcctacagctatgccctcttccctcctttctcttgtccccaaccagggcattagaaatgcattccagttacactgatctgatcactgcatattgtatgcatgcatcaaaatatcacatgtaccccagaaatatgtaaattactgcatatcaataaaaagaaatgtagcttctttgcctcacatacagaaaa

SEQ ID NO: 103158 - DNA, 403 bp, Homo sapiens
gacgcttggtgagagaactgagttcctctgaaggggatggaggaagcaattgacatgaatttattatgactgcttgggggcaccacaattgcttttctatttcctgaaagtaaaagcaaagtcaaaaatgatcctaataatgatagtagtttcagtagaaggaagagtattaataatgatatcagaggacattgacttagtgcatgcgcttagtgcatgccagatacaactctgaggcctttccagatgtcatccaacttaatccttatgattctacagggtggtgctgtggagtgcttggtacacactcagggcatactgtctgggtttgatccctggctctgccatttacaggcagtgacctgggatacgtcatctggctttctggtgcccccgtattctc

SEQ ID NO: 103159 - DNA, 731 bp, Homo sapiens
ccatcttctcttcctcttccccaccgtcctctccccacgccctcttctcctctcactgtcttctccccgcgccttccccacaaccgttttctcccccgttttcttcccctcacaccgttttcttcccatgtcctcccaccgtctcgcagcagcgtctgtcagtcgcaatcttcttcccactttcttctctccccctcccatcgtcttttttccccagcctcttattctccgccatcttcttcccctccccaccttctcgcagcagcgacttcctgccgcgtttttctctccccgcaccctcttctcccctcttccactccccaccgtcttcgcccccgatcgtcttcttgcccacccccttctcgcgctctccaactgcctttcacctagaagcgctccacgcgtgcgcccgcctgtgtccctgcgcctggtgtgtctgtgcgcccagccagccccatgagctgggcccctgagctccgccccaacagccaacaggagacccaggagagtcgctgccagggccatcacggctgccgccgcccccgcccccgccgctacctcagaactgaacagtgttggctgcgggcgaaagacagtggggcccggaagactgcggggagagggggaggaggggacggagagggtgggaaagaccttggaaagtgggatggggagaaaggtggggaagaagacagtggggagaaagtgcagggagaagacagtgtggtaga

SEQ ID NO: 103160 - DNA, 371 bp, Homo sapiens
ctcccatcagggtcctctctggacttctggcctccatttctctaatccacctccatgaatcagctaggtagacatttattaatttgtctatctgactgtattactcccgtgagtgtaaccccttcatgcccctggggataaagtccaaactcctcagatccacagggcactgggcaatgtggccaacacagatccctctagccagttctcttcccacagccacccctcttcttacactctggatgccagtgacactcaacttctttcagtcacttacatgcagccttttctcaccgctgggcctttgcacatgctgttccttgcatgtagaatactcttccttgtctttgcgcaactccttccccctaatc

SEQ ID NO: 103161 - DNA, 1038 bp, Homo sapiens
ctagataggtgtcctgtagaaatgttaaacacgggtgagatgtgggaagtggctgttttctactggagatggagaggagccacctccccacgctgagcatctgtgggcatcatgaacatttggaacttaagccacaatcatttgaatttttttggatgccccagttgttttccttctgtcaccaacaactttgggacttccctactgcagaattgtcgcatattaagtaggagacctcagttgttatggagtttttctcctccctagatacctagatctgtgaaagaaatccacatagcaaacgcttgtctagagctacatctctggacattttttttcctttttctgtagcaatagtgaaaaatttcttattcttacagtccaaatatatgtaagtgtacttaattcttaagaagtttattttgacactgacattttagtggtattgatgatacagttctacctttaattttatttgtttttttttttaatcattagagatggggtctcactgtgttgccgtggctggtcttgaactcttgggctcaaacagtcctcttgcctcaacccccaaggtgctgcacccttaattttaacttgtttcatttaagttacatatttgaaatgtcagactgtactttatgaactgccttaaattacttttcaaacaagatgggttataaataaggtgatgctttggcctattatttttaatatctacatttttacttttttgtgagataaaaactaatggggctggacacagtggctcacacctataatcctagcactttgggagacccagagaggcggattgcttgagcctaggaattcaagaccagcctgggcaacatggtaaaaccttgtatctacaaaaaaaatacaaaaattagctgggcttgtggtacccacctgtagtcccagctacagggacagctgagatgggaggattgattgagtccaggatgttgaggctgcagtgggcaccactgcacttcagcctggatgacagagagagaacctgtctcagaaaaaaaa

SEQ ID NO: 103162 - DNA, 350 bp, Homo sapiens
gctggctctaggtctcctctccagtctcttgaacccggtgccatccctaatgaaatttaaaggggtctggcacgacaggcccctcacccagcattcagctgcttttcaaacagcatcatgaagatcacatgaacaccagcttgaaaccattcagatctggtttaagtccctcgtccaccacacttagcctgcgtgaccacaagcaactccctgagcagctggccttaggtgtcttcacctgaaacctgcagggcaggctgataggaaaccttctcagctggctacaagcacagcaaggaagaagaaacaacggcccagagatgataccaagtcaactggagctgcctttc

SEQ ID NO: 103163 - DNA, 398 bp, Homo sapiens
tcccaaaaagggaaacagtgggttgtgtttataagtgcaggtggcaggggcggggaggagacacaggtctctgtctttgtttacccacttccgcaaggggaagccaccgccagttacaccacctgagcagagggagcttctgccagggcccgcctaggagggaccagcaaaacaatggtagtgagctgatgtcaattgggcacaagtcccagggtggctgaggcttccctgtcaatcccacccctcttagctgtcaggtcactccagttactgcaaagtccaacccagcttctcccagatctcctgggcccacagggatgtgccacaccccaagtcctgtggtagttactatctacaagacaacccttgcagcagctctgccggaaggaagcagaaac

SEQ ID NO: 103164 - DNA, 258 bp, Homo sapiens
taaatggcaaagtctttcctgtcacctctgtcagtaagaaggaaaacatcatgacagcttagtgtcatgacaggagtgggccaccttctgcccctgctccccaaggctgaggtggtccggaaggggctcagtgccccagacaagtgcatgatccagatctgaagacacctaggagatggaatgacaaaccaaacctaaagtgaccttcataggacaggacactgagccaaaaccaacaagctgaaggcgaaggaggca

SEQ ID NO: 103165 - DNA, 142 bp, Homo sapiens
taatttctgtggttctatgtcttggcctggctatagactcttggaggagagaaactctgtcttgttcttctcttaaatcctgggagagatcctccatgaggtgtggtattgagtgggtgctcagagaagccatattggatgc

SEQ ID NO: 103166 - DNA, 695 bp, Homo sapiens
agcctaggcctattaatcagtctaagttccagcctggactgagcgagtctcgagaaagccagctcctctccttttgtgctgaagggcaggggaggggaaccaagattgaggatcaaggctgcgctgcttcagtgccttcgtggacaaccaaattccagttgccagctttcttcgtaggcatctgttcctcacaaaatggcttcagcggaacataactttccaaaagaagagcactccagcccctgcctctacgttcacctatctttctgagtcagcttttcagcaacaaatgccaccaagctagttagctgacagtaccaactacagaaggaaatcatgttggaaatgtcactgaggccgggctgcctccccgcctgcacccacagcctctttcatctcaccacccattccttccagagcggcagaaggagactgggtggcaagtgtatttaggattctgaggaaaatgtctgttaagtcgaccttggtaacttaactgaaacagtatatgtgtaaatccattgaaaatccctggccttttacaacttctgtcccaatggaaatcagatcacaggactgtttacaagagaccacgattcatttggataaagacccatgacagcacggcccaggattatttgaaattttagtaacctaagctttaaaaatattctaaaagcaaaataatgaggggc

SEQ ID NO: 103167 - DNA, 739 bp, Homo sapiens
aaaaataaaataaattagctgggcatagtggcaagcgtctgttgtcccagctgctcaggaagctgagatgggaggattgcaagcctgggaggtcaaggctgcaataagctgtgattgcaccgctgcacaccagcctgagtgacagagtgaggccctggttcaaaaaaaaaaaaaaagagcaggaagtagaattgggaaagaaagaagcttcaggcagggatttgtaaatgaacaaaaccgcaggaatatttgcatactgttttaaaaaacagtggttacaatgagtgagtctcatctaccctcaggaaaagaaagagggtataccagcagtctaaagcccagcccatttggagattttttgggaagatttcttgtgataagaaattgtcggccgggcacgacaactcacacctgtaatcccagcactttggcaggcggatcactaggtcaagagattgagaccatcctggccaacttggtgaaaccccgtcactactaaaaatacaaaaattagccaggcatggtggcgggtgcctgtaatcccagctactcaggagactgaggcaggacaattgctggaacccgggaggcggaggttgcagtgagctgagatcgtgccactgcactccagcctggcaacagagggagactccgtcacaaaaagaaaaaaaaaaagaaaagaaaagaaactgtcttccaggtgctgtcctaggtgttagtggaagatacccaaaaaacc

SEQ ID NO: 103168 - DNA, 783 bp, Homo sapiens
taaggctagcatttttagtttgtttagagaatttggattgggtgcagcaagacatttttgaagtcattcttttaaatagatgttccatgaaggagggaaaatctgaaagaaggaatttcaaagcaacccaagcagtgttttgaaaattctcaagactgaagaataatgactgactagtaggcaggaagcctgcagttgtattgtggtattgttcctccatctcatgcatttgagaactttagtacaaaagaagagaaagcatggggaggggaagaaagggttttaacaaaaaagggggcacttttggagtaaatattctttgcccttctgtttaaatgaaatctaaagccatattattttactttgaaagaaaatgtgtatcataatagaaatgtcctaaactgacatttttataaatgaaagttaattgctgttggtggaaagagcagcatgatcatatgttcagtttcaaaacagaactttgattaaaaagaaatctacatgtgaaaacctttttttcctttttggtacctgatcaatatattttgttagcttgttactttgaaaagaagacttacctagggcagagttcagaataatttgtaagcatgtgctataagctttggacaaatcaatctctcttggccagtttttaaaattttaaaacaaagggtgctctgtatggttttccaaggttccttattttatacaattctataaacttaaggcattatgtagatatgtacaatgctcttttacttaaattttgttgattgaacataa

SEQ ID NO: 103169 - DNA, 139 bp, Homo sapiens
  misc_feature (16)..(16): n is a, c, g, or t
cgcactctagctcggnacccagtagatccaaagccaaagtctcacctcacacagtgggattggtcagtgtatcctgtggataaaagaaaggctgggaattatcctcctgtgtgaaaactgaggcacataggaagggtca

SEQ ID NO: 103170 - DNA, 463 bp, Homo sapiens
tatgtatgatgtgagctagcattccaattatatttcttttcctatatggacaatctgttatttcagtatgttttttgaaccgttcatcctttttgcactgattggcaatgctgcctctgtcatacatgaagttccagtgtatgtacgtgcctgttattggggaacattctttctcactggtttctttgtcaattattataaaaatgatatgttgtcttcattacagttgtcttgtttaaaagtccagaaatccagtaggacaagtccagcatcctgtccttttttagaaatgttttgactgttcatgacccttaccttcctcatataaagtttagtattatattgacaagttccaagaaggatcttatttagattctgattgaaattgaattgactctgtaaattaatttggggattcttctctatgattgagtcttgctatatagaacatgctatatcttat

SEQ ID NO: 103171 - DNA, 440 bp, Homo sapiens
atacatgtatatggaaaggaatatctatattagacatcacagttaacatttaaaacatggttgtgaaaaaaaataaaaccaacagtagctatggcttggacttacctcttttgcagttatcttcctattattagataatctacttggtaaaattgcatggtacaagaggattattaataaataatcattaaaaatggctagttcattcagactattctccatattcctgctgttgttattgcaataactttccaaattttctaaatccatgaataccctttcaatgaatataatttttctacattatcttcctacctctctctctctctgcttttatcttaattgataatgaaacccagtaaggtaagtgattatttagaccaataacattgaacaaatcaatcattcctaaatgtaggacccaaacttatatcacagaa

SEQ ID NO: 103172 - DNA, 152 bp, Homo sapiens
tctgaatgaggaaacttaggttccgggaaactaagtgacccacccaaggtcattcagagagtcactggccaagctaggcttagaactcgggcagtctgattccaagttggtattgctaaccacaatgctgtcctctctatggcacgaaaaac

SEQ ID NO: 103173 - DNA, 450 bp, Homo sapiens
cattcatatgaattggaatttaatataatagagataatatttcagatcagtagagaaagatggatttttttcaggaaatggtataagaacaattggctgtccacttcaggaaaaaatatcaagtgaggctcctagtcaggactgtcttgattgcaaattacacattcagctcaaactagctgaagccaaaaagagagcggacatattgggaggatgttaaggtatcacagaaaggagggaataggtgaacagtattccctcaggaatgcaagaagcagcaaacctcttcagtcctcatagactagttactctttcatttatatcatatgttctccacttcatttttaactacggtaggctaactctgtgtggcagagaatgtagcctttagcagcttccaggttttgtcaccttttgaagaaaagtgttctctggcatgttgaaaatact

SEQ ID NO: 103174 - DNA, 485 bp, Homo sapiens
gcttgtttcacttaagaaaatgacctctaagtccatccatgtgaccatgaatgacatgatttcatttttttaatggctgaatagtattccatgtgtatctatatcatattttatttatccactcatcaattgatgaacaattaggttgattccatatatctgatattgtgaatagtggtgcaataaatatacaagcacaggttttttgatatattgattttgtttcctttggatagacactcagtagctggattgctggactgaatggtagttttatttttagttctttgaaaaataagtctccagatgctgtaaatagtgattcctttgaggcatctggcaaagtaaatttaaaactttctggaaaatttcactctcctacataccattaagtacattcataagtcatgggaggaagtaaaaataacaactagtttggaaaaagagaagattccagtcgaccggccgcgaatttagtagtagta

SEQ ID NO: 103175 - DNA, 330 bp, Homo sapiens
gtaaaatgaggataccaatacctttctcacaacattgttgcaagtattaaatgatcaaataaggtacccagtaaaatagaaggaattcatgacatataaattcttctttaatagagactccgattgtttttcttctttcatttacttttgtttcaattgaattttctattatcctgttccaatcaacagcggttttgattagaatattttctgatgtttcggaaatatgtcagtgaaggactaggggtgtgcttctcctgcatttttgtacataaactaaacatccctttcagccacaccctcatggatggtttaccatttcagtagtac

SEQ ID NO: 103176 - DNA, 426 bp, Homo sapiens
gatggtgcatgcctgtagtcccagctaactaggaggctgaggcagaaggatcagttgggccaggaggtcgaggctgtagtgagctgtgatcatatcactgcactccagcctgggaaacagagcgacacctcatctcaaaaatagtaataataatcagtgataacaccatgatttttaaagataatggaatttgagtgatttctcactagactttttattgttaaaatttaaatcagtgaatgtaagtgcagactataaggtaagatgtattatttttgtttgatatgtagacattttagttcaggaatggccattttactgaatttgattatcttgaaaattgaaatttattctttaaaattgttagttgttgttaaaccaaagaataaatcaataaaagaaaacattaccttaaaaaacaatgta

SEQ ID NO: 103177 - DNA, 413 bp, Homo sapiens
tgagacagagtcttgctttgtcacccacgctggaatgcagtggcatgatctcagctcactgcaacctccctgcctcccaggttgaagagattctcgtgcctcagccactggagtagctgagattatagacgctcaagaccaggaatggctaatttttgtatttttaggagagatgggatttcaccaagttgcccaagctggtctcaaactcctggcctcaagtgatccacctacctcggtctcccaaagagctgaaagtataagcatgagccaccaagcccggccatcttctgcatttttcagtcttactctattcttcatgatgttttgggctgagctaaatttgaacccaggcttatacagccccaactctatttctttcttctttattacacagccttgcagaagacaac

SEQ ID NO: 103178 - DNA, 380 bp, Homo sapiens
tctctatctttccctctagactttaaacttctggagagcaaggctctcatttcatctttgttatcccagtatctgacatgcagtagatatttttcaaaatgttagctaaaacaataattaaggggtgtgaaaacacattaggaagcaaaaagtggccaggcacggtggctcacgcttgtaatcccagcactttgggaggccgaggcaggcggatgacctgaggtcaggagttcaagactagcctggccaatatggggaaaccccgtctctactaaaaatacacacgcacacaaaaaaattagctgggcatggtggcttgcgcctgtagtcccagctactagggaggctgaggcaggagaagcacttgaacctgagaggcg

SEQ ID NO: 103179 - DNA, 418 bp, Homo sapiens
aaatggatagtttttcagtggataggaacttcatcttaatgataaattatgccacagcctccttccagagtttcattttctcctgggatgatgataatacaggcttttgattcttaacctttttttatttggttgacttacgtgaacttttctgcaataaagaactggaaattttgaaaagagaaccaaaagaacaaagccaatactaaagcagtcaaatgtaactgccaactcctccccagccccacagtttgaaaacaacccgtttcactcaatgctctacctccagcacctagaacagtgcctggcaaaattatgcatttatgcctttgtaaaatttgttgaatgaatgttattcctttgaaaaagaggaggacgacagtagcactgctaaatacgggtttgagttttgggaaca

SEQ ID NO: 103180 - DNA, 1076 bp, Homo sapiens
aaagacaggtgactagaaatattaaaacaaaaacaaaaaaaaagagagagagagaaaaaggaaagagaaaatacatatttcttccccttactaagctagcgaaaataaaatttaaggcaactgaaatatgcacccaatcaatgtgagacgagaccccagcatccctatctatggactccgacagtccatcttattaaataccaggcttcaggactgctatgtggactcaccggctctcaccaacatctggatggccagaacatgtgcaaagcagaacattaatgccccagcaccagctaccacttcctcttgggaagttgtaaggaacccattaattgccagttccttctccctggttaagcttgtactcaggcggcaactgaagaataagtgctgcccaccaccatgcaagtttggagaaggaaaactctcgaagagattaaagcacaaggacgattcagtgatgaaagccacccagcaggccaggaaaagaaacttcatcagttccaagagcaagcagccagcagggcataggaggcctgcaggaggcatcagagagagtaaagaaagttcaaaggagaaaaaactaacagtccgccaagatcttgaggacagatatgctgaacatgtggctgccacccaagcgctaccccaggacagtgggacagcagcctggaagggccgagtgttgcttcctgaaacccaaaagagacagcagttgtcggaggacacgctaaccatccatggtctccccacagagggttaccaggctctgtaccacgctgtggtggagccaatgctgtggaatccttcagggacccccaagaggtacagcctggagctgggcaaggccattaaacaaaagctctgggaggctctttgcagtcagggtgccatctctgaaggtgctcagagggaccggttccctggcaggaagcagccaggtgtccacgaggagcctgtactcaagaaatggcccaagttaaagagcaaaaaataggaacaagaactcatgggattagagtattctctgctagagatctgaaaaataaacacaactttgcaccttcaaaaaa

SEQ ID NO: 103181 - DNA, 1001 bp, Homo sapiens
  misc_feature (1)..(1): n is a, c, g, or t
  misc_feature (13)..(13): n is a, c, g, or t
  misc_feature (28)..(28): n is a, c, g, or t
  misc_feature (32)..(32): n is a, c, g, or t
  misc_feature (34)..(34): n is a, c, g, or t
ngtctcggagagncgcgtatactcatcngtancnggggagtcgtcccggtgcaagcacccaatcaatgtgagacgagaccccagcatccctatctatggactccgacagtccatcttattaaataccaggcttcaggactgctatgtggactcaccggctctcaccaacatctggatggccagaacatgtgcaaagcagaacattaatgccccagcaccagctaccacttcctcttgggaagttgtaaggaacccattaattgccagttccttctccctggttaagcttgtactcaggcggcaactgaagaataagtgctgcccaccaccatgcaagtttggagaaggaaaactctcgaagagattaaagcacaaggacgattcagtgatgaaagccacccagcaggccaggaaaagaaacttcatcagttccaagagcaagcagccagcagggcataggaggcctgcaggaggcatcagagagagtaaagaaagttcaaaggagaaaaaactaacagtccgccaagatcttgaggacagatatgctgaacatgtggctgccacccaagcgctaccccaggacagtgggacagcagcctggaagggccgagtgttgcttcctgaaacccaaaagagacagcagttgtcggaggacacgctaaccatccatggtctccccacagagggttaccaggctctgtaccacgctgtggtggagccaatgctgtggaatccttcagggacccccaagaggtacagcctggagctgggcaaggccattaaacaaaagctctgggaggctctttgcagtcagggtgccatctctgaaggtgctcagagggaccggttccctggcaggaagcagccaggtgtccacgaggagcctgtactcaagaaatggcccaagttaaagagcaaaaaataggaacaagaactcatgggattagagtattctctgctagagatctgaaaaataaacacaactttgcaccttcaaaaaa

SEQ ID NO: 103182 - DNA, 405 bp, Homo sapiens
gggtttttgagagaacagcagggaagggcagcaggattatttcatccacattcagggtgttatatctagaaatatcataattgcaagtaaagatggtgaagcttgtcgctttcctcacagtgctgtgcttcatcttgatagtgcatatcacatttctcatggaacatttccttccttaagcagtcggtacctttaaaagagcatgtcttaactgaatgtcattatcaccaaaagtctattcaaatgataacatagagctatggttacagatgtaaactgagatctgtgaaatatttttggatgaaaatagcagcctcttgaccagattatttttcatataatgttatatttatggaaagtttcttagaatgatcctcatcaaaatgcttgtagtagttatcttta

SEQ ID NO: 103183 - DNA, 210 bp, Homo sapiens
caaatattatataaatgaataaatggtagcagtcacctgtgggaagatgccgagagagagacagatgcatacagctgctggtgggaacagatcagtaaaccatatagagtgaagctggcagaacacaccagcgaaaacagacatggaagacctctgacccagaaattccacttctataaaagtgggaatatatgagatgggaggaaggat

SEQ ID NO: 103184 - DNA, 541 bp, Homo sapiens
gtcctgacaatgctagtatattctactgcttaataacggatgccacttactaatgaattgtccttgagcaaacttcatctctatattatcaatattgatgacatttaaatgcttgctccgtgttaggcactgatcgaatcagtttacacatgttaagacatttattcctcaaaacggtctatgaggcaggcattgtcatcatccccattttacagatagataaactgggcacagagaggtcaagtgaaagtccaaggtcacagtgttggcattttaagcagcccatttaactatagtgcttccagtcttaattactacattttagattctaaaataaagatgacagtatcaatttcttacatttgctagcagtttttcgaaagtagttgccatagagcctgacacacaggaaacatttactaaatggcagtcactggaaacaataataatgaaaatgataagcccccagttaagtagaactataattctaacctggtcatatttacctctgaagtccacatgtgtatcctttccccctaca

SEQ ID NO: 103185 - DNA, 368 bp, Homo sapiens
aactgattagttatttaggcacaccctgtgaagaattatctttataaggggagtcattcaattagactaggcagtgcaaaattcattcctgactttttaactgaactaaccaatgacaacaccttggccctggaaggcattaaggtctgcctcaattcactgacaagagttattatggatgataaaattgccctggacttttttcttgtgagccaaggcagagtctgtacaattaactaatatatcttattgttcctagattaatatcttaggccaaaaggaaagatcaatacagaaagctacttggctttctgaggtagaccctgatggcttatgggatttcattatcttatttgggtgtgggattc

SEQ ID NO: 103186 - DNA, 433 bp, Homo sapiens
ctggcatgtaccagatgtcttcttagaacacataagcatgcattttcttctctgcattccctacagttaccctttctgggccacagtactttcagatatttgttgataatgtgttctttgcgatcctcatggcccaagattatacagttattcatacctgaagaaagagttgttaaatagggatctgtggccatatctctacacaaagtgaacatcgggtctggggaattaaaaaatgaacaggaaagcacacttgtggcattgtactagaccctttacacatattatcttatgatcagaatgtattattattctgctatacatttttctaaggcaaatctattctattatttccatccagagatgttttcccagtaaaggagatttgactgactatatagtgttaagtcacaataatttttataatggaaat

SEQ ID NO: 103187 - DNA, 343 bp, Homo sapiens
  misc_feature (1)..(1): n is a, c, g, or t
nggacctaatcacaggtcgtggcagtaagggcagggcggggttgtgcgggctcacacctgtggtcccagctacttgggaggctgaggcaggaggctctcttgagcctaggaggtcaaggctgcagtgaactgtaattgcaccgctgcaatccagcctgggtggtgacagcgaggacctgtgtcaaaaaagtatgcgtgcatgtctagttgagtctgtgtgtgattgtacattgagtgtgactgtgggtctgtgtgtgtgtgtgtgcatgtgtgagaacgtgtatgagaagaggcatggtgcagggtttaaggtttatatactgaaagaaagttctcatttcag

SEQ ID NO: 103188 - DNA, 292 bp, Homo sapiens
ggcaatgagtgggagaaattaatactattaccatcagcagccataaatgctgtgagtagtaagtgaaggtggtgggtaggtaagggagaaggtttgtcttggtaacctgagcaaatgaacaaatgcaatgaagacactcagctaaatatattcctttgttcattcattcattcattcagtaagcatttcctgaggccaattctaggccagatcccatgctgggccctgcaatccagatatgaacaatgagagctcccattaggttggtaaaggggaattaaggatggctggg

SEQ ID NO: 103189 - DNA, 607 bp, Homo sapiens
gtcaggttccaaacatgacagcacacagccatgaagccctgccccattcagccagccctgtgcaaagctttccagatacatgaccttccctactgcctcctgaaccccacgggacatgtggcattagccacacttacagagcctcagaaaggctaagcagctcgcccagtgacacacagtggaggtgacagggccccatccccagctttaggtcacggcttccctcctcactcatacgaacagcggacaccacatagaacagaggcgccaggccctgcccgaagtgctttaatgcatgatgtgcttcagctctgtgtccccacccaaatctcatctggaattgtaatccccaggtgttgagggagaggcctggtgggagtggagggagaggcctggtgggaggtgattgactcatgggggcggtttcccccatgctgttctcgtgatagtgagtgagctctcacaagatctggtggttttataaggggctctttcccctttgctttctcttctctctctcctgccaccatgtgaagatggtccttgcttcccctttgccttctgccataactgtaagtttcctgaggcctccccagccatgtggaaa

SEQ ID NO: 103190 - DNA, 132 bp, Homo sapiens
ctaaggacactggagataagaaaattaatttgtacaatctcaataaacaagtaagagaggtgagaagaattccaactcacatgggctaacaaccagtctctctactgctccttcctatcagcagctaatcag

SEQ ID NO: 103191 - DNA, 122 bp, Homo sapiens
tgatgttttcagggtctaaccatgccttagaaatggggaccatattgactaccagacgtatctcagagtcctcagtctactagtgatctttctttttcctctctctcctccattggagtttc

SEQ ID NO: 103192 - DNA, 121 bp, Homo sapiens
ttctataatatccaggtcagagtagtcatgaatttcttcccatcatccattgatacgtattcttatagagtaccaaacatcagccaagacccaagtaatacagtaaggtagctattatgga

SEQ ID NO: 103193 - DNA, 768 bp, Homo sapiens
ggctttgaacacaatctggccttcagatgcagttgagacattacagtaatcatcaaaataatcccatctccaccatgcttattttgcaaaagcagtatagggccttcctctcatccctccatagtggttggaaacagcaatcaaattatagcagcgaggccctgcgcttggattaatcagaaattccaatacagccaagtcattgataggaaaatcaactaagttatctaacttgtttctcaaggatctactgtaagaaaaatcacttgagatgcaacagctactggaggcagggatcatacatccaatttcttagtggtggcttcttgacggatttggataccaggaatctttatcacttagttttcttttgttgaaaagggtctgaggcagtcttttaatttcgcaaaagttttttttttttcaaggaagtttatattctatgtttccatatttttcaaaatcttctgtggcattttaactcaggatcccaatccaaggccagaatagatctttcatctagcccaagctgcccatcatcgaatcaaacatgtctggtatcatttctgatgtagctgatatcaggactgcttaactgttaaactggagctgatatcaggactgcgtgttaaactggaatctaaactaccattttttgtgccctgtgagatgctgacctttgcaaatttcatcaacacatcatcccttttcaaagtcattgtctcctccagctaaatctttagaatgactgttttttccctgagggag

SEQ ID NO: 103194 - DNA, 430 bp, Homo sapiens
ttgagacagggtctcactctgtcacccaggctggagtgcagtggtgcaatctcagctcactgtaacctctgcctcctgggctcaagccatcctcccacctcaggctcccaagtagctgggactacaggcacacaccaccacgtctagctaatttttgtatttttatagagatgaggtttcaccatgttgcccaggatacttttgaacccctgggctcaagtgatgagcccacctcagccttccaaagtgctgggattaaaggcatgggccaccatgcccagccagatttttttctaatataaaaataaagatgggatctcattacgttgtccaggctagtctcgaactcccggcctcaagcaatccttccccctcagcctcccaaagtgctaggattacagatgtgagtcatctcacctggcctaaaata

SEQ ID NO: 103195 - DNA, 192 bp, Homo sapiens
ctgcaattcttgagagatctctatttcaatggggttgctaacctggtagaaatatctaagaagctgctggtgggtggtcatctttgccacagccatcctatgggtacagtgtctctaagaagaagctacacataggaaagcagtatgtgagtgggaatactcattacagtttgaacacctacctggatctag

SEQ ID NO: 103196 - DNA, 175 bp, Homo sapiens
tggaccgaaagctcaggaaggagctgtggggacggtgcactgtactccgctgagccaggggaggtgctcagaggcggcctcgagtcttctcgactgttgggaggggaagatccacgtagctctccgcaggcccacaggtagaaacgctacctctgacacctttcgcgttttcatg

SEQ ID NO: 103197 - DNA, 401 bp, Homo sapiens
aaagtgaaatacaggctgaacatcccaaatctgaaatctgaaatgctctaaaattcaaaattttttgagcactgacatgctgcttaaaggaaatgctcaccggagcatttcagagtgtagatactcagaaatattccaaatatgctaaaattggaaaagctttgaaatctgaaacacttctggtgtttcggataagggatgctcaacctgtagtgagtgagtggttggaagttagaacatattcttctgtagaaacaaacctgtttgacccacaatttggccaatatacggagatttgagatgaaaaacttacaaaatgatagaatgactggctgtcattttaccagtaaggaaacaaacccagagaagtgaagtcaggatttaggtttgtggacctttta

SEQ ID NO: 103198 - DNA, 292 bp, Homo sapiens
gagggtcttaggaacacataatggatacaatccagcatgtcacaaagcattatcattctttcttctagattatggcaaagttcctgacttttgttcttccccttgccataagccagtgttggatctggtcttgccttagctgctacagctaacttttaaaaccatcatcatggtcaggcatggtggctcacgcctgcaatcccggcacttcgggaggccgaggcaggtggattacctgaggtcaggaattcaagaccagcctggccaacgtggtgaaaccccgtctctacta

SEQ ID NO: 103199 - DNA, 821 bp, Homo sapiens
agcatgctgggattgatttgtgatgtctgccacgaatataagattggccatttggggcatgaatgctattcatggattggatctcctaagagcccgaatttctgagaaaccactgaagacctgaccccagcgcttaattatttctcctttccaagcatctctcatggaaggcatcttggatgaaaagacctttggcagcgtgggttttgcagggaccgtctggtaccaggaactggccaaatgtgaaggtgtaaaacacaaagttcacaccctgaagaaccttctagtccagtcggggagatggacccagaatgtcagattaagattggcctgcatcagcccaaatggttccatgttcttctttttaatggctgcatagtactcctttgcatggatgcaccacagttcatttaaccagagtcctgttggcaggcatttcagatgtttgcaatttttctgtgagaccaacaccactgtgatcagcatcctgttgctgtgtgaaaagtccaggctagcctgctggaggatgagtgatgggtgaagcagagatgaattttcagagctggcttcatctgagaccagccagccctagctgtggaaggcagacacttagcaaacccagccaagatcagccaagcccatcccagggcagaagaaccaccaagctgatcccagtccacatctacttctggaagcacgtgctaaataaatggttgctgttttaagccactgagctatgggaggctttgtttcccagcaataactaattgataaatcatcaacagtaaaatggataaatgaattgtggtacaggcacacgt

SEQ ID NO: 103200 - DNA, 396 bp, Homo sapiens
caccagaccagggccaggctccctctgggccgcctccaggtggggactgatggctgcagcccccaccacgcagccctcctccagctcactcacccccagctgctccccagctcactgcgcccctgcctcttgcctgcactcatgccacccctgcctgccacacctgttcctacctgcccccaactgcccacaggagctgacgtggccatttctgtctgccccatcatagcccccagcctcctcggtgggaggtctcatcagtgcccctcactccatcctgagaactccctatgggagggcctgggccagtgcctggaagagatcaggggccctacacactgttgaatgaatgaatgaatgagtgcgctccaattataaactcttagtctttgccca

SEQ ID NO: 103201 - DNA, 608 bp, Homo sapiens
gggagcaatcagtctccccaatttttactcttatatagttatagtaatcaagactgtgtggtatcagtggagggatagacatattgatggaacagaatagacaacccagaaatagacctacgcaaatatgcacgactaatttttgacaaaagcacaaaagcattgcagtggaggaatgatagacttttcaacaaatgatacgagagctgttggacatccatagaaataaacttcaacctaaattttctaccttatgcaaaagtttactaaaatagattatagattaacacgtaaaatgtgaaaatgttagaaaaataaaactggagaaaatcttcagctgtaggattagtcaaagagttcttagacttgacatgagaatactgtcaatacaaggaaaaattgataaattggactacttcaagattgtgatataaagttcttgttaagatgatgaaatgacaagctagaaactcagagaaaatgtttgcaaagcatatacccaaagaggtctcaaatccacaatacataaatgtgtcaaaacgctacaattaaaataatcataaaatggcaagaaaacagaatatatagatggccaataagcagatgaa

SEQ ID NO: 103202 - DNA, 332 bp, Homo sapiens
gctccctttatcagcatcagtccttagctgatcttaaattccatctgctgggccactgccattcacttttttcctatgtacttttattaactgattgtataagctcgtttttgcttttggaaatggatcattattattaatcccataataaatttctttatcacaaaattatagttaagggattatacaatgttaaaaaatacatatggtattaaatagctcaaataggttgcagaccatttgaaaagatcagccaattcattgtgtaaataaaagtttacaattcagtcacttccctttggcaatatctgtcagaattacaaggtccatgt

SEQ ID NO: 103203 - DNA, 708 bp, Homo sapiens
ggcaaaatgatagatgtagatttaagataatatgtataaatactttaataagtgtctatataaggattacttaattactcaacttcaagtttatgctgttaactttagaacttttaagtgagcaatgaaatttatattacatctattcaaaggatatggtaattagatttattacttatcactataagggtccttgctttaagttacttttgtagtgttaaaattgtaggcttgataattgcagaattctgatgagaaaaagggcatatatgtctctgttgcaatattatcaataccttcatttttaaaattaaattgagacattccatccaccaattagtctgaggaaaaaatcaaaagtggttattttatcattaaagatagaacaaaaactagccagcttgtgatttacatataaaaacttgcaaaatgtatgtattttatctaaatttaaataaatgctatctaatactggtagtgttataatgctattaactacttttagaatttgcagatatttgatgttttcttagcatgtagcaacttattttcataatctttaaactgtcttttaggactttgtacattttagtgatgcctatgtttactaaaattagcaatgaaatctaaaaccaaagttattcttctttgcctaataaaaaatagttcttaaataagaaaatattaagtggttaatttaaaagcaag

SEQ ID NO: 103204 - DNA, 417 bp, Homo sapiens
aaggaaaggccttaccttggaattagagaaaggaatttcttgaagagtttaagatgggcaaggtctgtatgtctagaattttctgcatgttgtttttacttgcagaactagatcgtaaagttgcaaatagtcatttgtcatacacaggaaaattgacctgtagctgtgctgctcttggtaatgtgttaccgagggaagggtgggaaaagtaaggctaagttctccaaccttgacccaggccttgggcattcctgtggcagcagcatgaaatgctgacagcttcctgcctccttgcaacaacagagtttgtttaaccccttagtgtctatcaagaatctttatttgtagattcacagatttttacagaacaaaactcaactttgttatagtttttaaaaggtaagttctttttgacat

SEQ ID NO: 103205 - DNA, 326 bp, Homo sapiens
gggctccgagcctgcagtccctggggacccacgggggctgccaacagaattcagggagcctatgaccttggatgggaaagcattacacctcaatttcactcacttctcactgaaattgagcagttctttcaatgagatgtaggcaagaaaccaaagtagcagtggtaggacctgcaactttgttactagtatttgcttatcacatgacagtagctgcaaatatttcaaaatatcatttacacatattgctgctttgaaattgtggtagctactgagatcaccagatcttgttatttgatgtgttaataaagaagcacatatatagc

SEQ ID NO: 103206 - DNA, 84 bp, Homo sapiens
gattcagaactggagacagcgtcctggaggctctcatagtggagcatcctgaaactgctgaaggtctgcctgtgaacctgagct

SEQ ID NO: 103207 - DNA, 414 bp, Homo sapiens
gattaaatgagaaaaccagtctagtgcttagaacacctgtcactcagtaagtatccaataaatattgttatagtacagattaggcaactagctgtgaatggttaaccaggttgcctagggtaatcagtggcaggccacttccaacctagatcttacccattaactataggttgcttggaggtctaaactgcctcttctatatcacattcttgttcagtaaatacagggacaataccttgggttaagtttgaattatgagggataatttatacctcctcatctctcaagcctcagcaagaatcgactgatgtgccctcccatgttgagtcagtgcctaccttatacaggatggattttctgtttatgactgtcttactcaggccctgcttcattagattctctgttcttagcaca

SEQ ID NO: 103208 - DNA, 326 bp, Homo sapiens
aagaggcgaggtctcactgtcacctaggctagagtacagtggcacaattgtagctcactgcaacctcaaatgcctgggctcaaatgatcctcccacctcagggaccataggcacacgccaccacgcccagctaatgtttaagtttttttgtaaagatggagtctcactatgttgcccaggctggtctggaactcctgagctcaagcagccctcttgcctcagcctcccaaagtgctaggtttacaggtgtgagccactgcacctggcccgacttctcttttaatttatccttccatattttaaaaattatttacctcaggctgtct

SEQ ID NO: 103209 - DNA, 473 bp, Homo sapiens
gtaggggaagttgttccaaccccttctttctctcagagccctcagtgcccgttttctcgtggcttattttgattccgcacctctcatctcagcccttgagacatccagtgtgcagccacgaacttttttctctttgtcaccagatgaagtgttttttaaagatcaattagagtttgttgacaggtggagagagtttaaagagccttctatgtagtaagaccgccaagagcaaaggacttagactgtaagggactaactagaggttaagttttggtggggaaagggtggttggtgtggagggaagtgagtggtggaaggtaaatctggcagagggtgctttggggaccaggaggcacatgttggaattatttggcaagtttaaaaatctctgggacataagatagcttgataattgggcagaaggatcaagaaaggtatcgtctcccataataaaattgggtactagtgtggat

SEQ ID NO: 103210 - DNA, 460 bp, Homo sapiens
aaagcacactacatgtttgctaatgaggatctaggaagtattcactgagatcgttaagcttcttcaaatatttatgttcatgtttcctaaaatgcatatgaagtcttagaggaactcttcatcttaaacttcagcatctttgcaggcacctgtaagttgcatgcagtaggtgctcattaagtattcataagtttgatggcatcttctacttcaaagagatactagtgtaatcttggctctttgtttcactaaatgtcaagccgtcctgccattaaatattgactgcacaccctgttaagagctgctttcgttgaaagtaaagtatataaacctcatggagaagacaaattgtgttctttcacttaattttttccaacatatgaaaattttaaaacatccacaaaagtggaaagggttttggcagtgaacatacacctgcatctgcctgccaccaggatgc

SEQ ID NO: 103211 - DNA, 714 bp, Homo sapiens
ggccatgccacattatttggggttcagaaatattagccctgtgatgaaaacagcctggtagaaatcagatcaaccaagcttcctgttctattctgatttagctgctctccttgtagacacagtgtacactcggctgccattgcacaaaaccgtccatttggaattacagcgtagcaatgccctccaactggtttgggactaagtctccccgagcttagggtcccctgcaagtgagtcttccaggtgacccatatgctcttctcaaatgtgttatcccacccatcctgtcttcacccaactgcctaagtctcttcctcctgagtaatagccaacaatccacaatggattttgttctcctttatttctgacagctctctgggtcagaaagatttgttgggagaatggtgcttgaataagttgtaatatgtcttccattagtggcaatgccaaagatgccccagtctttgacccctggctgctggttgaccagtcagctttttagagagcagtggagtacctgccactgggcactgttttcacgtggcatgcccatggtcaggggctttcgcacatcaggtgagtataaacaggaatgaagaaaaggaagaccaagagaaaaatgtgctttgccctatgttattcaactcctgtgagcttagacttgatagatttattctatttgcttagaaatttgcttatattcagagctttggt

SEQ ID NO: 103212 - DNA, 382 bp, Homo sapiens
gacttctacaaagtagccttctcctcctaccagaacctcaggttgcccagacgctggagggcacagggacatctgagggtcccaccacgacaggctagaagtggctcttttatgaaaacctttgtcagaacaagcgaggggacatgggtgacagcctcacaggccacccaacagccacccctccttccttgctgacaaagcccaattttgtcctgtggtctaggcattgccctgtgtgcctcaggcataggctctgattggctaagccaatgattctcctagacaatgattggcttagcctggggcatgtgacccaatcctagccaatgagatgtgaggggtggctattgaggaatgctgggaaaggcttcttggctgataa

SEQ ID NO: 103213 - DNA, 307 bp, Homo sapiens
gaaaaacaccggggaaattgcatcccattttccccaagcccattagcaaccagcggtctcattctcgatgattccgctgagccaccccggctctaggggagggggttttattctgcctctgccgccacccccacccaccctcagaagggcaccagcttttccaatctgtgaaccccaaagaactgcagggcagggacccctggggacccctcaacccccctcacccccgcagccttcagtacctcccgccggcattcctctaccccctctccatgtccacccagcctggccccaagggcggatttct

SEQ ID NO: 103214 - DNA, 438 bp, Homo sapiens
tctggataatggtgatagttgcacagccttgtgaatatactaaaaacccctgaattcactttaaaatggtgaataaggtatattaattctatctgaatttctttttaatacaaaccagccaatacagtgactcacacctgtaatcccagtgcactttgggaggccaagagaggaggatcgcttgaggaagttaaatatcaattaaagattgtgagaaaccattaaaatattacttatggagggttttttgttttgttttgttttgttttagagacagggtcttgctttgtcacccaggctggagtgcagtggcgtgatcacagctcactgcagcctcgaactcctaggctcaagctttcctcctccctcatcctcccaagtagctggactacaggcacacaccaccacaaccggatagttttaaaattttttgtagag

SEQ ID NO: 103215 - DNA, 312 bp, Homo sapiens
acgccattgcactgcagcctgggcgacaagaaccaagactgtgtctcaaaaagaaaaaagagttactcaaattatttcctatgttggaagacaaacttagtggctgggtgtgcattggcgggacccagggctgagaagtagcatattaagtgaggttttaaattcatgcagcaacctgttgtagagcagtactatccaatgtactctagtttgttacaagagaagcctgtgttagaatgcaaatggacaacttttctttttttttttttttgaggcgatcttggttatggagggatgacagctgactcaaaa

SEQ ID NO: 103216 - DNA, 348 bp, Homo sapiens
acacatgtagtacctacctcaattccgatcagccatattttaattgctcagtagccctccatggctctgcctacaacactgactagcacaagtctagttgcacgtaaataagacttcctgggtttgaatcccagatctcccatctactagctatgtaccttggactatttttcttaacttctctgtgccttcagttggtaatctgtaaaatcagagtcataaaaatagagtctacatcaaaaggctttgggagaattaaatgagataacatgtataaaatactcagaactgacacaaagtaagtcctcattagagggtaatcaatattatacaggcttaacttatgta

SEQ ID NO: 103217 - DNA, 318 bp, Homo sapiens
atcaattgagcctgggaggcagaggttgcagttagctgagattgtgccactgtactccagcctgggcgactctgtttccaaaaaaaaaaaaagcacggggagaaatcagaagcaggggctgctgatggggtggccaacaggccatgggatcagctgtggctgctagtcatgtgggcgtggcccagagccacgggaccattgaaatactgcctgagggtgggagcaggtggtgcctgtgggtggcgccctcgtctggtggcggtgtgcacagcatggccaccagggggcagcagaggctgccgaggaacacaggcgtga

SEQ ID NO: 103218 - DNA, 372 bp, Homo sapiens
agcgtccgaggtcggtgcttcgggcgaccttgggttgctgctggaaccctgacgtgcagcaggcccaggccacggttcgcggagagcgtcgggcgctggtcctcaagatctcccggctctgcccttgcagagctcagtgggggagacgtgcgtgcgcttccctcgggcagggccgctgccctcctccgcccttcaccccagacaccctggggcagtggggcctccccccatccggttgcttctgcttttcctaacccagttaggaaactccgagaccacaggagcctcagtccggccactgtggcctccccgtgaccatgacccagaggttggacagccccgcagggctggacgtttgactttggctcagtt

SEQ ID NO: 103219 - DNA, 438 bp, Homo sapiens
agtgtgtgttaactatgacttagctgattttgccatgatcctgaatgtgctattatatgaattgttattacattgaaacattataaacatacaattaggaaaagtaaaatttaaggtttttaactggtaaattcactgaaaaactataaaatctgctgtctagtttttgactttttatagtattatttcaataactatcacattctgtattagctttgatattatttctccactcatggagtaaagtatagaaatcagagaagtgacacagtgctttaaaattactctaactagccgggcactgtggcacacacatgtagtccttactactcaggaggctgaggcaggaggataacttgagcccagtaagtcggggctgcagtgagccgatcacacctctgcattccagccttggtgacaaagcaagacttcatctca

SEQ ID NO: 103220 - DNA, 729 bp, Homo sapiens
attattgataagctcctgtaggtgtatgtggcatttaccttaaaacatgcagaccaaaggaaaggcaatcttttttccccccacgaagcagttaacttggcagaggccacccattgtgtggaagagaaagagaggcattagtctcttcaggacaaccagtttggatcctgctaaaccagaataaaaagtctagaacatggatgtcctcttgatttagcagatctagctgttcacacagggtcctctattgttaggctgcatcacgggccgcaaagacccaggtgtctatccacttgctagaaaccatcatgagagttagataccagttttctgctggaaatacagaacatttcctgaaaccgtgtggttgaggtgaaacaggcattttgcagtcttatattttgagtaaggccaaacctgcctagtgttataaaactagacaaaaaacccaggtacccggtcttgcaggatagaaatgtgtgactaaaatgaagcatcgatctgagaagactacaaattagcgggaacctttggacaggagcatgctatacattacttagattaatgttgatatttaaggagccaggatattgatttgtttttgaggggtgcccatctacttcatataagaggctataaactgcacttctttcagtttctgcttaatccttgctcaaacaagaaataatttcttattccaaagtagacattggtacatctttttctagg

SEQ ID NO: 103221 - DNA, 120 bp, Homo sapiens
cacaccctgtggccagagctgtcttagagaagggatgggccactcagggacaggctggacaaggagctgactgctctgtgctcacttttgtatagattgtttgttggaccttgtgtaaaa

SEQ ID NO: 103222 - DNA, 363 bp, Homo sapiens
caggtccgtgtggacatgctgagggcacggtgtcgattaaagtctcagcaatgtccaatgtcttatctcactcatgaggtcttcatcttgccctcagtttggtatgttaaaaaagaaaaacttaaagacactatagaaatgagatcactcatacgtgaccactgctgctgatagttctggaggtaatttgacgatcaccagtcaagctgaagatgcacacacctggcaattctatccttagaaacacattctagagaaactcttgcccatgtgccaagaagacgaagataagcatattcacagcagctcgagcagtcgagccaacagaggcgccaggccgtccctgccaggctgtccagcagc

SEQ ID NO: 103223 - DNA, 294 bp, Homo sapiens
gttgggcttttttttctagttttcctgtcctttatagcctcctgactcaaattaggactgcagtggtgagaatagaagtggagagaaaggaatgaagctgaaagacatttcaaaagaaggattaatgggctttagagactgagtagatgtgtgggacaaaggacaggaagcaaagaggcattttctaaacatggacaccagatttactctttggaaaacacttctttcatcttgttatttcccagttcaagaatctgcagtgagataaatctaaaatgagatttatttgaataa

SEQ ID NO: 103224 - DNA, 297 bp, Homo sapiens
aagaaaacccacccagactggtggctcatatctgtaatcccagcactttgggaggctgaggtggaaagatcactcagagtcagaagttcaagacctgggtaacatcgagaccctatctctacaaaaaaatttaaaaattagctgagcgtggtggcacatgcctggagtcccagctacttgggaggctgaagtggaaggatcacttaagcccgcgagttccaggctgtaacgagctatgactgcaccactgcactccagactgggtgacagagtgagactccatttccaaaaaataaa

SEQ ID NO: 103225 - DNA, 342 bp, Homo sapiens
gatctaattgtacccctccccctaagtcataataatagaaaatgtttgcagacattaacaaatgtgccctgggaagatacagtcacctttggttaaaaaccactattatgggtataaagttgtaatgtaatttttttaaaaaagaaactaaaaccgtatttattcaacaagtaggtatgttcccatctgttctgcagcacttcatacctaagaatggaatataaagaaaatccagaaccttcagtttggattttctgattaaaaagtctgaggccatctgccatagttataataatctgacagattgtcacaaatgatcagcctaatgttaggaatcaatgg

SEQ ID NO: 103226 - DNA, 504 bp, Homo sapiens
gggactgggggctgggatctgcaggctctactgtgtcctcaccgcagctgtgtccttggcagtgcaactggtgtggagaaggggcacagtgaatgtcctcttagtgaagatcatagtaaactggcacattttaaaaaatatcaatactcagtgccgacaagggtatggcaaaacactgccacaagagaagtataaattggtaccatattttttaaaagatttggcaatatgtaatacaaacctttaaaaacattcaaccctaaggaaaaatgatctctttgtaggtaatatcaaagcacacctggaaaccccaataaaataagtgctaagatatccttagaatacaaatgaaaaagtatttagtaagagcaagatataaaattgacaacaaccaattataacccaccacatgcagtgcaaacaatgtttagttcaaaacagaatgaaagaggccgggcgtggtggcgcacgcctgtagtcccagctacttggaagctgaggtgg

SEQ ID NO: 103227 - DNA, 666 bp, Homo sapiens
attataacctaatatacaaaataggaaaccatgatttcctgtgatacagattattacctaatgaattgatagtttgatgacaaagtatttacataatttcaaagaactctgcaaaaaggacttattaattacaaaaggaaaatgagtacatttacagtggagaagcttgacagtctccaccttgatcaagtgacccaagtaaacatcattagtaatgggacacacagaaaccatgggccacttcatagggtacagtaagaagttgctactgagatagtcctgccaaagatgtacagctgcatctaatcacgaggaaacattagacaaatccaaattgagggacgtattttaaaataacagtcttgtaatcttcaaaagtgttaaggttatgaatgtcaagggaggcctgataaactgtttcagattgaggaagaagagacatgacaactaaaggcagcttgtgatcctgaactagatcattttgctatcaaaaacatgatgggtacatttgccaaaacttgagtggttgtaatgtactgatgcgaatttactgattttgatgtttatattttagttatgtaggagaatgttcttatttgtaagaaaatacactacaaagaaagatgggacatcaagacaacaaattactctcaaatggctcagtta

SEQ ID NO: 103228 - DNA, 745 bp, Homo sapiens
tacttgagaggctgaggatcacttgagcctaggagtttgaggctgcagtgagctatgattgtaccactgtacttcagcctggggacagagcgagatccagtgaaaagaaatcccactcaaattggattcagacaaaaaaggaacagtcccaggaagttcagcttcaggcatggtttgatcaagtggcttaaacaaacagtgtcagcagtctgatgtttctctatctctgattccctgtcttcctcatcagccctcttccttctgcattggctccattctcagtgagacttctgcgagttgtcagcgtgaccatcagcagcttcaggcttgcatcttgtcatagtaatacatctttccccagtaattccaaaaccaaattccaggtatccagccccagatgggtaatatgccccttcgtgaactagtaccgtggttggggagagggcacgtgctaattggccaggcaggagccacttgctcccggaaacctcgagggctgagaatgaggtgaggtggttccacagtagaaaaatcagggtgcttctttcagaagccggggtacgtatggcctgctgggcaggcccacacagcatacagatgctacgagagcctgctgtgctttgtaggtcacagacccccacggtgtgcttggaaatgccagatcatgctgtgaggcttttcctctgccccagcctctggcacgagactcccacgtgtgaaaagcagactcacagtccctgcgtgt

SEQ ID NO: 103229 - DNA, 205 bp, Homo sapiens
ctgcattagccttctcctttcttacgttaatggcaacaaactccctggaggttattctgtattagctcactaaagttccaggtcctagtcttttgttactactaacaagtggcatttcataatcattatctcctccatattttttattatgaaccccatcaataaaacatctttgaaaacacaatttttttttatttttattttt

SEQ ID NO: 103230 - DNA, 241 bp, Homo sapiens
tttattttaattctggggtacatgttcaggatatacaagtttgttacacaagaaaacgtgtgtcatggtggtttgttgcacagatcaaccccttgcctcggtattaggcccagcatccgttagctattcttctcgatgctctccctccgccgacccccaacaggccccagtatgtgttgttcccccgctccatgtgtccgtgtcctcttctgggtctttgatagtcttcactgatgctttc

SEQ ID NO: 103231 - DNA, 283 bp, Homo sapiens
actcagaggctatgaagagggaggcatgcaacttaatgaaattctttatgatgaacagttaacaggttatcctagtactcaaaaggaataccaattgccacaggatggtaatagagctgagagtctctacaattcaatagatgcccttaacaggacaaaggtaaagaatacacgtaccttttgagaatatgcacattaggattctcaggttcttgactctgattatttttgtttgtttgttttttgagacggattgggctggagtgcagtggagcgatgttgg

SEQ ID NO: 103232 - DNA, 257 bp, Homo sapiens
agagagagaatgaggaaagtcttggctttctaataaaatccgagcaggatttttttccccacatctgttttggcgaacaggagcgtcagcttctgaattgttttagatagtctcacaggtataaaggaagtagcattttagtttacaaagggggtgggagtagattattgtgatgtcccccgccttctcttgttactattattataaacaaataaacagcttgtctgagtgcagtggtgtttacaactggttggtca

SEQ ID NO: 103233 - DNA, 455 bp, Homo sapiens
cgagaacttacaacacagccttggactgcacagttccactcagactccatttatgtggcataaaagatatgtttctgggggtttgggacttcaaggaccgtttctggaggagtggaattgtatgggccttggagaacggctggagaggaaatgagataggagggtgggcacatcccttaaggaaggagcttggcaaggggggcatgggaccaggttcaggtcatattggaattgggatcctcttcagtgctttgagtataatagacacttgaaaactattgctccataagtgagtgaataaatgagagagttgtgaatttgccactcaaagttgtattctgccatcatcagaggtatgtaggcagagtcagcacctggggagcaggtgatgcacctggccttgctgagcattggcacctgctttgctctaggcactaggtaaccagtggctactt

SEQ ID NO: 103234 - DNA, 709 bp, Homo sapiens
tccttctcatagggtgttgacgttttctctaaatccttcttactcaaaggcaaatttgaaattgttttacttataacggggatacaggttaaatgataaatgccacatagtgggcatatgtttcaggccaggtgctatgctcagagttcacacctgcctgatactgtgaggattgggctacagattctaaaccacactctccatagaggacatggcaggtgagcggctggcttctgtgggtctgggcctggtgggttagtgtgggctgcatggccccaaggctgggagctgtgttgggatctggtggcagggggtttatctgacaacctcactattccatgtctcctctctgtgtggaggaatgggatgcagcgaggagaccaggctggagttctgtagagtgtaaaatcctggatgtcctctcagcctgtctccttgagaggacctgctgcctgcccttctggagcacgtcattctcttcttggatgaccaaataaatcattcaagagtgaaatgaaaactccttatctccttataggatctgagctcagtgatgagaagtggaaggacaataattgaccaatcacacatttaaatgaataaattaggccgttggtgttcagcagcaatttcatgccataattgacaataaatagcaattttgaaaatcatcctgcaatgtacactcagccacagcaacccaaaaccc

SEQ ID NO: 103235 - DNA, 188 bp, Homo sapiens
  misc_feature (2)..(2): n is a, c, g, or t
  misc_feature (5)..(5): n is a, c, g, or t
  misc_feature (14)..(14): n is a, c, g, or t
  misc_feature (19)..(19): n is a, c, g, or t
  misc_feature (25)..(25): n is a, c, g, or t
  misc_feature (27)..(27): n is a, c, g, or t
  misc_feature (37)..(37): n is a, c, g, or t
anctnagattacanaggangacgantnttggcgctancaagacatggagtgtgtgccttgtggagaccctcctcctccttacgtgtttggcctgtatagtcttagctactcaggaggctaaagcaagaggattccttgagtccaggagttcaaggccagcatggacaacatagcaagaacttgtttct

SEQ ID NO: 103236 - DNA, 369 bp, Homo sapiens
ttcagtcaaaacccaaattactattaggtctgcagaagctgctgaaaaaataatatgaaaacagattagaaaagcagcttcgctctcacagatgtacactgtaattataactgttcagagctattggaaaatcataagcagaattgactttctgtccttgctagcttcaaagaggtgcagaatgacaggaaagttctctcattcgtggctaggctgacaccaaacgaattacaagttctgatctgactaatcagaaaatgtcacagaagctactggtctctgctatacaggtcgacacctgtcctgagtcactaggaacgtaagcagtttagggatagacatacttgttctggtttctaaatcatggta

SEQ ID NO: 103237 - DNA, 357 bp, Homo sapiens
tgggcacaattaaagaagctgacacagttagctaaaaaaggccttgagaacacaaaggtgacacaaactccagagagtatgctgcttgcagctttgatgattgtatcaatggtgtctgcaggtgtacccaacagctccaaagagacagcgaccatcgagaacgggccatgatgacgatggcggttttgtccaaaagaaaagggggaaatgggaaaagagagatcagactgttaccgtgtctatgcagaaataagtagacataagagactccgttttgttctgtaccaagaaaattcttctgccttgagatgctgttaatctgtaaccctagccccaaccctgtgctcacagagacat

SEQ ID NO: 103238 - DNA, 474 bp, Homo sapiens
tatcaaaaatcactgtattccacttccatattgtgtcttaccagaaggtcttcaggggcaataacatgcatggaactgtcatctatcttcttcttttttttttttttttttttgagacatagtttcgctcctgtcacccaggctggagtgcaatggcacgatcttggctcactgcaacctccacctcccagattcaggcgattttcctgcctctcagcctcccgaatagctgggtttacagacaccagccaccacgcctggttaatttttttgtatttttagtagagacaaggtttcaccatgttggccaagctggtcttgaactcctgacctcaggttatcaacccaccttggcctcccaaagtgctgggattataggtgtgagccaccgcacctggccagaactgtcatcttctatgacaaaaatgtctgcttctggaagaacctgtctgaggttgttttacagttaactta

SEQ ID NO: 103239 - DNA, 376 bp, Homo sapiens
tttgagacagagtcttattctgtcgcccaggctggagtgcaatggtgcgatcttggctcactgcaacctctacctcctgagttcaagcaattctcctgccttagcctcccaagtagctaggattacaggctctcaccaccacgcctggctaactttttgtatttttagtacagatggtatttcgccacgttggccaagccggtctcaaactcctgacctcaggtgatccacccgccttggcctcccaaagcgctgggattacaggcgtgacccactgcacccggccaaaacaggcctttatttaaagacacattttgaatttaaaaaaaggtaaatatgcaacttttaggggaaaaaacattgtatctctcataca

SEQ ID NO: 103240 - DNA, 264 bp, Homo sapiens
gtcacctgcctctgcctaagggatggatggcaaacagccctctgcttctgtgctccatctgggctttgcagatagggggactgcggttaagtccattaagccagggtatgaatgagggggagggggatgagcagcagggacagcagggagtgggcagtgctgggctgggcatgggcacccctgagccatgttgccttctgcttcattccttccctgctcaggagcttgctctgacttcctccagacagtcctgcttctccatcc

SEQ ID NO: 103241 - DNA, 655 bp, Homo sapiens
agcggaagagccggaggaggtggcggcggtgggagaggcgagggttctggccgattttagcatcgaaactaggagaaataagaatggctgtagaggaacttcagtctataataaagagatgtcaaatcctagaagagcaagactttaaagaagaggattttggcctatttcagttagctgggcaaagatgcatagaagaagggcacacagaccagctattagaaattattcaaaatgaaaagaatcaggtcatcatcaagaatatgggctggaatctcgttggtcctgttgttcgatgccttttgtgtaaagataaagaggatagtaaaagaaaagtttattttttgatctttgatttattggtaaagttatgcaatccaaaggaattattgttgggtttgcttgaactgattgaagagccctctggaaaacagatatcccaaagtattcttcttttgcttcagccattacaaacagtgattcagaaacttcataacaaggcatattcaattggattagcattgtctaccctttggaatcagctatctcttcttcctgttccatactcaaaagaacaaatacaaatggatgactatggcctttgtcagtgttgcaaggccttaatagagttcactaagccttttgtggaagaagt

SEQ ID NO: 103242 - DNA, 889 bp, Homo sapiens
cagaagtgactctccaggggagctaaaatccatgtatttgggcacacacttgaacaatattgctagagaaatttaagcaagaacacaaaggttaatgacatctcttgtggggaccactgtgagaataaaacaaggcactacgttgtctgggatgatggaaggagctaaagtcttcagtgaatgaaggagcaggaccaggagctcaaaatacttctttgaagacaaagaagaaatgatattaccaaatggttggctcaaaagaacagggattttgcaacagagagagtatgtcatggtcttgaacaagcaatgttttgccaggacgattaaatatcattgatgcttctggtctacaattagtcagagaagagattaaaaaaatgatgagtattcaagaaggaaagtgtttgctttaacatatgaagaaaaggagcttcagagtggtgattaaccccagaattgtgtggaacggatatggaaacaagaccacaggagcatcgagaactgagcagaactgaaggtgacatgaaaatcagctgcaagattcacctcagggtgataatgggctgcaggtggctgcaggaatcccgggacattctaggcactgccatattttcttaggggccagtaaggatggctatcatcagatgtacctgatgatacaaacatgggctgtcttgccttctagtattcattcttgatgattgcatccagagctcactttggaggtgcagatcaactcttcttcaggctcatccatgcgacttgagtgggctctcatccccattcccaggggcttatgacaatcaaggtttccactcctccatggtctcaatggtttttctccccatgggaagcacataatcccattagaggccacgggaagctt

SEQ ID NO: 103243 - DNA, 837 bp, Homo sapiens
gaaagaatcatctgaaaggaatgtggagatcagagaaaaatgatgggaaagttaccacagcctgcaaatgagaaatgatgagagcctgcctgggacaaagaatctacaatagatcttctccagcagctctggaggtcagacccagctgtggagagaatcatttctaaaaaactagaaggcacgttgggagactactactttctgtggatgaatgggaaattcaagacagaaaatggatgggcgatatggaaatacaactgttttgccaggacgattaaatatcattgatgcttctggtctacaattagtcagagaagagattaaaaaaatgatgagtattcaagaaggaaagtgtttgctttaacatatgaagaaaaggagcttcagagtggtgattaaccccagaattgtgtggaacggatatggaaacaagaccacaggagcatcgagaactgagcagaactgaaggtgacatgaaaatcagctgcaagattcacctcagggtgataatgggctgcaggtggctgcaggaatcccgggacattctaggcactgccatattttcttaggggccagtaaggatggctatcatcagatgtacctgatgatacaaacatgggctgtcttgccttctagtattcattcttgatgattgcatccagagctcactttggaggtgcagatcaactcttcttcaggctcatccatgcgacttgagtgggctctcatccccattcccaggggcttatgacaatcaaggtttccactcctccatggtctcaatggtttttctccccatgggaagcacataatcccattagaggccacgggaagctt

SEQ ID NO: 103244 - DNA, 2319 bp, Homo sapiens
  misc_feature (1226)..(1226): n is a, c, g, or t
  misc_feature (1242)..(1242): n is a, c, g, or t
ccatttggaagcttagaatggcagcattccatactgaggtgacatgatggtttctatataggaaggcagcaaataaacttaaaggaggtgatgatctgtgtgtgttctgtcagtctcagatacttgaatgcatctgcaaatagtctggagtctttaccatccgcctgcactggagaggagagtttgagtatgctgcagctgctttatctgaccaacaatctcctgacggatcagtgcatacctgtcctggtagggcacctgcacctgcgaatcttgcaccttgcaaacaatcagttacagacctttcctgcaagcaaactaaataaattggagcaattggaggaactgaacctaagtggcaacaagcttaaaaccattcccacaaccatagcaaactgtaaaaggctgcacacccttgttgcacactccaacaacatcagcattttcccagaaatactgcagttgcctcagatccagtttgtagacctaagttgcaacgacttgacagaaatcctgattccagaggctttgcctgctacattacaagaccttgacctgactggaaatacaaatctggttctggaacacaagacactggacatatttagccatatcacaaccctgaaaattgatcagaaacctttgccaaccacagattctacagttacgtcaaccttctggagccatggactggctgagatggcagggcagagaaataagctgtgtgtctcagcacttgctatggatagctttgcagagggggtgggagctgtgtatggcatgtttgatggagaccgaaatgaggagctcccgcgcctgctgcagtgtacgatggcagatgtgcttttagaagaggtacagcagtcaactaatgacacagttttcatggctaacaccttcttggtatctcacaggaaattaggaatggctggccagaagttgggctcctccgctctcctgtgctacatccgccctgacactgccgatccagcaagtagctttagcttgactgtagccaatgttggcacgtgccaagcagtcctgtgccgaggtgggaagccagtgcccctctctaaagtcttcagcctggagcaggacccagaggaggctcaaagggtgaaggaccaaaaagccatcatcacagagaattgggttcttaaccaaaagcacctgcaggattttcctggggaagataagtgagaacaaacacatgaaaccacattccntgacactgcaaagctntgagttaaggttccggaagatctcaaagagttccagaccacagatattccggtgcatcactgtaacttccgggctgttctcggctgcctttgtagcgcttctgttctcggtagctacgcagggccagcaccacgctggcgccgtacatgatcacgagaagacaagcaaaggtggctgctgctccgtcggtgcctgccagctggcagtccatccaggtgagacccttgcgggcatagagcctctctcttgttttgcaagtgtcggtgctattgatctgcagagccacgtggaggtaaacaccaatgcctgtgcagtagcccactgccgctaggaggctgaaggcggcctccgtgaggagccacttccctgacaacattgttcgactcttggctccttggagtaaaacacccatggtgaggacccccagacccagagaaacagccacgccaccgtatatcaggggcgagcggaggatcgtgtactgctggtccagctgccgaacctgctctagctcagtgccctcgaacgatgttttcagatcagttcctacaagaggagccacattttgttaagtggccttcgacttcattgtatggatggatttgtctattcaaccaggaccttactgatagatatttggactgaaaggaacccacaaatggcacgaggcagaggaagccaacaggccaacagactgaagatcttcttgtccgaggtcagcttttatttgttactgacagaggccccaaatccttcttaggtgtccttctgggagagggtctcctgccattcccgtggtgttcagggatgagcatgaagagaaatacaaatgaaccgagagcaggaccaccaggttcaagtccccgctttttactgccttgtcatcttggccaagccattcagtccttctaagcctcagacaatatgacaaatgaagctaagtctgccaatcttcacccacagggatgtggggaggctcaaatgaaagcaaccgtgtgatactgtgggaagttaacaacaacaacaaaaaagcaagtatgtgaaaatactctaaaaataaaataatgtacaaatgga

SEQ ID NO: 103245 - DNA, 993 bp, Homo sapiens
  misc_feature (917)..(917): n is a, c, g, or t
  misc_feature (924)..(924): n is a, c, g, or t
  misc_feature (974)..(974): n is a, c, g, or t
  misc_feature (976)..(976): n is a, c, g, or t
  misc_feature (993)..(993): n is a, c, g, or t
ccatttggaagcttagaatggcagcattccatactgaggtgacatgatggtttctatataggaaggcagcaaataaacttaaaggaggtgatgatctgtgtgtgttctgtcagtctcagatacttgaatgcatctgcaaatagtctggagtctttaccatccgcctgcactggagaggagagtttgagtatgctgcagctgctttatctgaccaacaatctcctgacggatcagtgcatacctgtcctggtagggcacctgcacctgcgaatcttgcaccttgcaaacaatcagttacagacctttcctgcaagcaaactaaataaattggagcaattggaggaactgaacctaagtggcaacaagcttaaaaccattcccacaaccatagcaaactgtaaaaggctgcacacccttgttgcacactccaacaacatcagcattttcccagaaatactgcagttgcctcagatccagtttgtagacctaagttgcaacgacttgacagaaatcctgattccagaggctttgcctgctacattacaagaccttgacctgactggaaatacaaatctggttctggaacacaagacactggacatatttagccatatcacaaccctgaaaattgatcagaaacctttgccaaccacagattctacagttacgtcaaccttctggagccatggactggctgagatggcagggcagagaaataagctgtgtgtctcagcacttgctatggatagctttgcagagggggtgggagctgtgtatggcatgtttgatggagaccgaaatgaggagctcccgcgcctgctgcagtgtacgatggcagatgtgcttttagaagaggtacagcagtcaactaatgacacagttttcatggctaacaccttcttggtatctcacagggnaattttnggaatggctggggccaaaaaatttggggcgccccccggtccccccggggncnaaaatcccggccccggn

SEQ ID NO: 103246 - DNA, 413 bp, Homo sapiens
ccatttggaagcttagaatggcagcattccatactgaggtgacatgatggtttctatataggaaggcagcaaataaacttaaaggaggtgatgatctgtgtgtgttctgtcagtctcagatacttgaatgcatctgcaaatagtctggagtctttaccatccgcctgcactggagaggagagtttgagtatgctgcagctgctttatctgaccaacaatctcctgacggatcagtgcatacctgtcctggtagggcacctgcacctgcgaatcttgcaccttgcaaacaatcagttacagacctttcctgcaaggttgttgtcttctatgatcattctctatatgagcatggagtgcggggacttcggctctttcaaaagcctgtgggggtcatctgttttctctgttgaatc

SEQ ID NO: 103247 - DNA, 335 bp, Homo sapiens
atgacagctactgagtggcatgcctgaatgcaacgtttgggatggttgtggcaacaagcttaaaaccattcccacaaccatagcaaactgtaaaaggctgcacacccttgttgcacactccaacaacatcagcattttcccagaaatactgcagttgcctcagatccagtttgtagacctaagttgcaacgacttgacagaaatcctgattccagaggctttgcctgctacattacaagaccttgacctgactggaaatacaaatctggttctggaacacaagacactggacatatttagagccacggtcaacccacaagccacggtcaacccac

SEQ ID NO: 103248 - DNA, 6272 bp, Homo sapiens
ccatttggaagcttagaatggcagcattccatactgaggtgacatgatggtttctatataggaaggcagcaaataaacttaaaggaggtgatgatctgtgtgtgttctgtcagtctcagatacttgaatgcatctgcaaatagtctggagtctttaccatccgcctgcactggagaggagagtttgagtatgctgcagctgctttatctgaccaacaatctcctgacggatcagtgcatacctgtcctggtagggcacctgcacctgcgaatcttgcaccttgcaaacaatcagttacagacctttcctgcaagcaaactaaataaattggagcaattggaggaactgaacctaagtggcaacaagcttaaaaccattcccacaaccatagcaaactgtaaaaggctgcacacccttgttgcacactccaacaacatcagcattttcccagaaatactgcagttgcctcagatccagtttgtagacctaagttgcaacgacttgacagaaatcctgattccagaggctttgcctgctacattacaagaccttgacctgactggaaatacaaatctggttctggaacacaagacactggacatatttagccatatcacaaccctgaaaattgatcagaaacctttgccaaccacagattctacagttacgtcaaccttctggagccatggactggctgagatggcagggcagagaaataagctgtgtgtctcagcacttgctatggatagctttgcagagggggtgggagctgtgtatggcatgtttgatggagaccgaaatgaggagctcccgcgcctgctgcagtgtacgatggcagatgtgcttttagaagaggtacagcagtcaactaatgacacagttttcatggctaacaccttcttggtatctcacaggaaattaggaatggctggccagaagttgggctcctccgctctcctgtgctacatccgccctgacactgccgatccagcaagtagctttagcttgactgtagccaatgttggcacgtgccaagcagtcctgtgccgaggtgggaagccagtgcccctctctaaagtcttcagcctggagcaggacccagaggaggctcaaagggtgaaggaccaaaaagccatcatcacagaggacaacaaagtgaatggggtaacctgctgtacccggatgctgggctgtacatacctctacccttggatcctccccaagccccacatatcttccactccgctgaccattcaagatgagttgctgattctgggaaacaaagcattgtgggaacacttgtcctacacagaagctgtcaatgctgtacgtcacgtacaagacccattagcagctgctaagaagctgtgcacattagcgcagagctatggctgtcaggacaatgtaggggcgatggtagtttatttgaatattggtgaggaaggctgcacttgtgaaatgaatgggctcaccctcccaggtcctgtgggatttgcttcaaccaccactatcaaggatgcccctaagccagccactccatcctctagcagtgggattgcctctgagttcagcagtgagatgtccacctcagaggtgagcagtgaagtggggtccactgcttctgatgagcataatgctgggggcctggacactgccttgcttccgaggccagagcggcgctgcagcctccacccaacacccacctctgggctgtttcagcgccagccttcttctgctaccttctccagtaaccagtctgacaacggcctggacagtgatgatgaccagcccgttgagggggtcataaccaatggcagcaaggtagaggtggaagtagacatccactgctgcagggggagggatctggagaactcaccccctctcatagagagttctcctaccctgtgttctgaggaacatgctagagggtcgtgttttgggatccgaagacagaacagtgtgaatagtggcatgctcctgccaatgagcaaggacaggatggagttacagaagtctccctccacctcctgcctctatgggaagaaactctccaatggctctattgtgcccctagaggacagcctgaacctcattgaagtggccacagaagtgcccaagaggaaaactggctattttgctgcccccactcagatggaaccagaggaccagtttgttgtgcctcatgacctggaagaagaagtgaaggaacaaatgaaacagcaccaggacagccggctcgagcctgagccccatgaagaggatcggaccgagcccccggaggagttcgacacagcactatgactgccccactgggcacagtgtgggaggaggctgtgcagggttggggtagggacttgctagaggcattctgcctctacatttctttttgtttgttcgttttttttttgtttgtttgttttgagacggagtcttgctcagtcgctcaggctggagtgcaatggtggggtctcgggtcactgcagcctctgtccctgggttcaagccattctcctgtctcagcctcccgagtagctgggattacaggcacctgccattatgcccggctaagttttattttttttttttagagacggggtttcaccatgttggccaggctggtgttgaactcttgacctcaggtgatccaccctcctctgcctcccaaagtgctgtgattacaggcctcagccaccatgcccagccctgcgtctacatttctaaaccatagctgtgtggggttgaactcggagccaaaaagtgtgagagccatcaggggctggctctggataaactggtagccactatcagtgttaagtttcacatttaacctgcattggaattcccaggggtactgggaagaaagcagctgttctgtatcagtcctaccacctgccattaaccctttctctcctaggatcattttgagaatttgcctgcctgggcaggaaagggactatttctgtggaggaaaaaagtgaagattgattctctttactagttgctgctgatggatctctgtgacagagaaatcaccttatctcagactaatggggtgtgatgtgactagtcacatggcttttcattcttctctacgagaatacagcctatcaaaatgatgtctgttggaaatgtagaaccaatcaaacagataatttatgtatgtaatgtaatgagagcacttttcattgactgtgaactttttatttttgaatctgcactcgagccaatcttcttagaggcagcccggcaccttcatccataggcagagagagaactgggtgttggagacttattcgagggtataggaagggccctgtgaagttgatttaacttttggatgtcagactgtgaaagctcctgagaaacttggggtaataggatcttcttttggggatgaaaatggggaaggcgtgaggacctagactacttctccctagatcagaaaaagagaattaccccttgacaaatatgatacctgctaggtatttcccagggaaatttagggattggcctctttccctagcatgtggaggaattggcagacagcttcctaagggcggggagcgggggcccaaggccgacactgcttgcatccacgtgaccttaagttatggcagatgactctgaaacggactgaggccaatgagaacagatggatggagcactcaggttagacttgttccttctcctatgctggaggagagggatggttctctagaatgttggaggtgagttgagagctcgcctcttgaatgttgaacagtgtactcttctgaaaactgcatattcactttatgtggtttcagaatactgggctcaatactaacataagaaagacacttcattgagaaattcttaagcttacagaaaacctatactctttgcacattccacataaccctagcaaaatgcagtttcttcatacttctgtcactttttccattggaagatttgcttaggaaaattaattcctatttattcccacaaaatgttggcattgcttgattttacccaatggggaatgtgctttgaatttttggaacacttttacaattaaaaataaagtagggccatttttaatttgtttcatcagaaactatgttaaagagagggttaaatataaatatattttcgtgtgtatttttgggaagatttttgttcaaagcaatagtcaaaatcagatgacctgtccataataattatgtgtcttcatcttctcagaggccccatgctcatatgcacgtgtcattgggatacactcttgggggatttggtacactctaatggatgtctaatgttcaacccctcgagaatctgaacttgagtccccagattgtcaaactactggtcagctattgagaattttagaactcaggtctttgatttgaagtagggaacatagtggctcacacagagtttaggtgctgttagaaagatgggaacaagagtgttttgccaccttatttttatatgggaaattttttttaatgaagaaaaaatgaaaatgaaataacaggatgatagtgatgagtgatgtaaaacatcttacttagatggcagaaccttcgggttgtagaatagtgatgtctaaaaattaaagttattttgggaatacaccactttaatagtatagtcttataaaaattattcattatggtgaacccttcttgtctgctattcgtttcccaacctacttattggaaccacctcaaaacccagttctgaaatgaccttaccaaaagtaaatgtatttattttttagtcagcagaactctgtaattccaaatgttgttctgtgtggtagaattttttttcaggaaccattaggttgtattgaaaatctttgttataggcgataccaaaactgattattcttttttgcagtctgctttaattcatgtccttctgcagttgctctgtattaaaacagggtaaaaaggccatagcccattatgaaaaatataatacaaaactctttgacctatgaggtaacttacagacattgtgttttctaaacaggctgtcagtgaaagcccgtatctgtctccaggtgaatgtaatttacttccgagtactttacccagaggatgtattccccaggtgggcagagtacagttgatctctagcacagacagagattctggcctctgcatattctcaggtctctgtgtgtacctcccattgagtagagaagcttaagataatttctgagagaagaacactgctgattgtgggagcagtttaggagtccatggaagaaagaaaaatacatgtgtcttggcagccatggtgtatttttgtccaaatggattggaaggatatttgaatatttgaatgttggtatgacataaagctgcagtgcactatagagtcaagtcattgaattaccactcctgatacagggctttattgtactactgtgaagtgtatgtgtgcaatacattggtgagttcatttactggtgtacggaagagccagcaggagcagcgtggtcattgctgggtgctattacagttgcttgtagtgagtgctgttttccaggagatggagccagttgggtgtggcagatctactgaatatcaaatgatgctcttcttcccatgtagaccttcagcaaaagccggtacttggaagccacaggctcaccttctctatctatccaataattattaatgaagagacctccataagggagcagctggctgttatcgataaatgtaccaattattaaataattagtctccaagccattcagtgatgtcttcagcatcactataggactgtctagtgtcactttttacttccttctgggtggaggctttccgactcccaatcatgaaggcaagttaatctttccagttagtgacttttgccccatagttggggtaagcacttcctagattgagaaaaagcagctacagtcaatcctgctctgtttgcctcatttggtgatcagtcagtcacacataagttccttgtattctaaatttcatgcacttctcccagatgctatagggttttctctcactgttgccaatggatgtcatccagacagtgggctcatatcttacggttttgtgcaatcattgtcgtattgtagtcttaagactcattatagtgtatttttgatatttttgaaatgtgttaaattttttaattcagtaatatgagccagagcatgttgcagcaaatctattgtttgtaaaaataacaataacaataataaataaaataaagtggaatcttaaaaaaaaaaataactaactatttat

SEQ ID NO: 103249 - DNA, 6267 bp, Homo sapiens
ccatttggaagcttagaatggcagcattccatactgaggtgacatgatggtttctatataggaaggcagcaaataaacttaaaggaggtgatgatctgtgtgtgttctgtcagtctcagatacttgaatgcatctgcaaatagtctggagtctttaccatccgcctgcactggagaggagagtttgagtatgctgcagctgctttatctgaccaacaatctcctgacggatcagtgcatacctgtcctggtagggcacctgcacctgcgaatcttgcaccttgcaaacaatcagttacagacctttcctgcaagcaaactaaataaattggagcaattggaggaactgaacctaagtggcaacaagcttaaaaccattcccacaaccatagcaaactgtaaaaggctgcacacccttgttgcacactccaacaacatcagcattttcccagaaatactgcagttgcctcagatccagtttgtagacctaagttgcaacgacttgacagaaatcctgattccagaggctttgcctgctacattacaagaccttgacctgactggaaatacaaatctggttctggaacacaagacactggacatatttagccatatcacaaccctgaaaattgatcagaaacctttgccaaccacagattctacagttacgtcaaccttctggagccatggactggctgagatggcagggcagagaaataagctgtgtgtctcagcacttgctatggatagctttgcagagggggtgggagctgtgtatggcatgtttgatggagaccgaaatgaggagctcccgcgcctgctgcagtgtacgatggcagatgtgcttttagaagaggtacagcagtcaactaatgacacagttttcatggctaacaccttcttggtatctcacaggaaattaggaatggctggccagaagttgggctcctccgctctcctgtgctacatccgccctgacactgccgatccagcaagtagctttagcttgactgtagccaatgttggcacgtgccaagcagtcctgtgccgaggtgggaagccagtgcccctctctaaagtcttcagcctggagcaggacccagaggaggctcaaagggtgaaggaccaaaaagccatcatcacagaggacaacaaagtgaatggggtaacctgctgtacccggatgctgggctgtacatacctctacccttggatcctccccaagccccacatatcttccactccgctgaccattcaagatgagttgctgattctgggaaacaaagcattgtgggaacacttgtcctacacagaagctgtcaatgctgtacgtcacgtacaagacccattagcagctgctaagaagctgtgcacattagcgcagagctatggctgtcaggacaatgtaggggcgatggtagtttatttgaatattggtgaggaaggctgcacttgtgaaatgaatgggctcaccctcccaggtcctgtgggatttgcttcaaccaccactatcaaggatgcccctaagccagccactccatcctctagcagtgggattgcctctgagttcagcagtgagatgtccacctcagaggtgagcagtgaagtggggtccactgcttctgatgagcataatgctgggggcctggacactgccttgcttccgaggccagagcggcgctgcagcctccacccaacacccacctctgggctgtttcagcgccagccttcttctgctaccttctccagtaaccagtctgacaacggcctggacagtgatgatgaccagcccgttgagggggtcataaccaatggcagcaaggtagaggtggaagtagacatccactgctgcagggggagggatctggagaactcaccccctctcatagagagttctcctaccctgtgttctgaggaacatgctagagggtcgtgttttgggatccgaagacagaacagtgtgaatagtggcatgctcctgccaatgagcaaggacaggatggagttacagaagtctccctccacctcctgcctctatgggaagaaactctccaatggctctattgtgcccctagaggacagcctgaacctcattgaagtggccacagaagtgcccaagaggaaaactggctattttgctgcccccactcagatggaaccagaggaccagtttgttgtgcctcatgacctggaagaagaagtgaaggaacaaatgaaacagcaccaggacagccggctcgagcctgagccccatgaagaggatcggaccgagcccccggaggagttcgacacagcactatgactgccccactgggcacagtgtgggaggaggctgtgcagggttggggtagggacttgctagaggcattctgcctctacatttctttttgtttgttcgttttttttttgtttgtttgttttgagacggagtcttgctcagtcgctcaggctggagtgcaatggtggggtctcgggtcactgcagcctctgtccctgggttcaagccattctcctgtctcagcctcccgagtagctgggattacaggcacctgccattatgcccggctaagttttattttttttttttagagacggggtttcaccatgttggccaggctggtgttgaactcttgacctcaggtgatccaccctcctctgcctcccaaagtgctgtgattacaggcctcagccaccatgcccagccctgcgtctacatttctaaaccatagctgtgtggggttgaactcggagccaaaaagtgtgagagccatcaggggctggctctggataaactggtagccactatcagtgttaagtttcacatttaacctgcattggaattcccaggggtactgggaagaaagcagctgttctgtatcagtcctaccacctgccattaaccctttctctcctaggatcattttgagaatttgcctgcctgggcaggaaagggactatttctgtggaggaaaaaagtgaagattgattctctttactagttgctgctgatggatctctgtgacagagaaatcaccttatctcagactaatggggtgtgatgtgactagtcacatggcttttcattcttctctacgagaatacagcctatcaaaatgatgtctgttggaaatgtagaaccaatcaaacagataatttatgtatgtaatgtaatgagagcacttttcattgactgtgaactttttatttttgaatctgcactcgagccaatcttcttagaggcagcccggcaccttcatccataggcagagagagaactgggtgttggagacttattcgagggtataggaagggccctgtgaagttgatttaacttttggatgtcagactgtgaaagctcctgagaaacttggggtaataggatcttcttttggggatgaaaatggggaaggcgtgaggacctagactacttctccctagatcagaaaaagagaattaccccttgacaaatatgatacctgctaggtatttcccagggaaatttagggattggcctctttccctagcatgtggaggaattggcagacagcttcctaagggcggggagcgggggcccaaggccgacactgcttgcatccacgtgaccttaagttatggcagatgactctgaaacggactgaggccaatgagaacagatggatggagcactcaggttagacttgttccttctcctatgctggaggagagggatggttctctagaatgttggaggtgagttgagagctcgcctcttgaatgttgaacagtgtactcttctgaaaactgcatattcactttatgtggtttcagaatactgggctcaatactaacataagaaagacacttcattgagaaattcttaagcttacagaaaacctatactctttgcacattccacataaccctagcaaaatgcagtttcttcatacttctgtcactttttccattggaagatttgcttaggaaaattaattcctatttattcccacaaaatgttggcattgcttgattttacccaatggggaatgtgctttgaatttttggaacacttttacaattaaaaataaagtagggccatttttaatttgtttcatcagaaactatgttaaagagagggttaaatataaatatattttcgtgtgtatttttgggaagatttttgttcaaagcaatagtcaaaatcagatgacctgtccataataattatgtgtcttcatcttctcagaggccccatgctcatatgcacgtgtcattgggatacactcttgggggatttggtacactctaatggatgtctaatgttcaacccctcgagaatctgaacttgagtccccagattgtcaaactactggtcagctattgagaattttagaactcaggtctttgatttgaagtagggaacatagtggctcacacagagtttaggtgctgttagaaagatgggaacaagagtgttttgccaccttatttttatatgggaaattttttttaatgaagaaaaaatgaaaatgaaataacaggatgatagtgatgagtgatgtaaaacatcttacttagatggcagaaccttcgggttgtagaatagtgatgtctaaaaattaaagttattttgggaatacaccactttaatagtatagtcttataaaaattattcattatggtgaacccttcttgtctgctattcgtttcccaacctacttattggaaccacctcaaaacccagttctgaaatgaccttaccaaaagtaaatgtatttattttttagtcagcagaactctgtaattccaaatgttgttctgtgtggtagaattttttttcaggaaccattaggttgtattgaaaatctttgttataggcgataccaaaactgattattcttttttgcagtctgctttaattcatgtccttctgcagttgctctgtattaaaacagggtaaaaaggccatagcccattatgaaaaatataatacaaaactctttgacctatgaggtaacttacagacattgtgttttctaaacaggctgtcagtgaaagcccgtatctgtctccaggtgaatgtaatttacttccgagtactttacccagaggatgtattccccaggtgggcagagtacagttgatctctagcacagacagagattctggcctctgcatattctcaggtctctgtgtgtacctcccattgagtagagaagcttaagataatttctgagagaagaacactgctgattgtgggagcagtttaggagtccatggaagaaagaaaaatacatgtgtcttggcagccatggtgtatttttgtccaaatggattggaaggatatttgaatatttgaatgttggtatgacataaagctgcagtgcactatagagtcaagtcattgaattaccactcctgatacagggctttattgtactactgtgaagtgtatgtgtgcaatacattggtgagttcatttactggtgtacggaagagccagcaggagcagcgtggtcattgctgggtgctattacagttgcttgtagtgagtgctgttttccaggagatggagccagttgggtgtggcagatctactgaatatcaaatgatgctcttcttcccatgtagaccttcagcaaaagccggtacttggaagccacaggctcaccttctctatctatccaataattattaatgaagagacctccataagggagcagctggctgttatcgataaatgtaccaattattaaataattagtctccaagccattcagtgatgtcttcagcatcactataggactgtctagtgtcactttttacttccttctgggtggaggctttccgactcccaatcatgaaggcaagttaatctttccagttagtgacttttgccccatagttggggtaagcacttcctagattgagaaaaagcagctacagtcaatcctgctctgtttgcctcatttggtgatcagtcagtcacacataagttccttgtattctaaatttcatgcacttctcccagatgctatagggttttctctcactgttgccaatggatgtcatccagacagtgggctcatatcttacggttttgtgcaatcattgtcgtattgtagtcttaagactcattatagtgtatttttgatatttttgaaatgtgttaaattttttaattcagtaatatgagccagagcatgttgcagcaaatctattgtttgtaaaaataacaataacaataataaataaaataaagtggaatctttttcatggctttgttttaaaa

SEQ ID NO: 103250 - DNA, 311 bp, Homo sapiens
agcccactgccgctaggaggctgaaggcggcctccgtgaggagccacttccctgacaacattgttcgactcttggctccttggagtaaaacacccatggtgaggacccccagacccagagaaacagccacgccaccgtatatcaggggcgagcggaggatcgtgtactgctggtccagctgccgaacctgctctagctcagtgccctcgaacggtgagtagtagttgttcccaaagccaccgccgctggaaaagctggcactgaatccggcaaggacaaagtaggaggccacgatgcatatgagaaccatc

SEQ ID NO: 103251 - DNA, 465 bp, Homo sapiens
ctggactcaatctgctgacctcaagcgatccgcccacctcagcctcccaaagtgctgggattacaggcatgagccaccatgcccgtcctcaattctttaactttgcctcagtccaaagagagcatttataaagtcaagtgtgtgaaaaccatagttgtctaatgcggagttttaaaagacctgtctttttgagagaaacaatgtgcgttcacatttaggttccggaagatctcaaagagttccagaccacagatattccggtgcatcactgtaacttccgggctgttctcggctgcctttgtagcgcttctgttctcggtagctacgcagggccagcaccacgctggcgccgtacatgatcacgagaagacaagcaaaggtggctgctgctccgtcggtgcctgccagctggcagtccatccaggtgagacccttgcgggcatagagcctctctcttgttttgca

SEQ ID NO: 103252 - DNA, 156 bp, Homo sapiens
tctgttggctatgccctcctggattctcccaccccgctctgccttcatttcggtagctctgactcctccttcagcctgagttcattcagtgtgatccatgccttgtcacctctggccacccccaggtcagtccttgctctccctgactcctcatta

SEQ ID NO: 103253 - DNA, 244 bp, Homo sapiens
attgatgaatacaatcagtgagggtggcccaagggaagcttgagcttttagagccgagttttcaaaatttcttccacagagtataataaggactgttgtatgggaaggattccgacaagactgtgcaggtggccctctctatctgaccagcttcagctggagcagctctgttttttttttaacttttattttaggttcatgggtacatttacaggttagttaataggtaaactcgtgtcacagg

SEQ ID NO: 103254 - DNA, 348 bp, Homo sapiens
aagaaaaagaaaagaaataaaatgaaaagaaaaataaaagaaaatgaaaagaaaatagaaaggaagaagaaaaagaaaaagagaaagaaaagaaagagaaagaaagtgaaagaagaaacaagaagaggaagaagaagaaggaaggaaggaaggaaagggcatacagattggaaaggaaaaagtaaaactattcactttttgcatttcatataattattgatatagagaactctaataaaactacaaaactaccagatattgtatacttgaactttgctaagggtatagttcttaaatattttcaccccaccccccacacacagaaggtaactatgtgaagtgatagat

SEQ ID NO: 103255 - DNA, 381 bp, Homo sapiens
atgagaacacatgggcacagggaggggaacatcacacactggggcctgtcagtgggtggagggaaaggggagggagagcattaggacaaatccccaatgcatgcaaggcttaaaacctagatgatgggttgataggtgcagcaaactaccatggcacatgtatacctatgtgacaaacctgcatgttcagcacatttcagcacatgtattccagaatttaaagtaaagaaaaaaaaaattagcaatatgcctgttggtgactgtgttagggtgagttctccagaaacagaccctgaggcaagggcaattttcttatcccatgttatgggttgaattgtgacccccaaatgatactgtgaagtcttaactccgggtatctgt

SEQ ID NO: 103256 - DNA, 642 bp, Homo sapiens
cttcttgcctcccattcattcagcaggacagagtgacccagaagagcagagaggccagtggttcctagcccctcgcacacagcatgtgctcattgaaaactgtgagtgaatggagagtggatggagccatggacacttggacagatggatggatggttgcacagatggatggttggttgtcagcataaagaaatgcctgttaacggggcctctgatgcttttggttatcctccagtaggaaggattatggatgatccgttttacttgccttgaactctgggtggcttagcacacattcttggaaacaaagacccatggataccctcatgagatgacccagaaagtcaggactttccagagggagaaggctgaagaaacactgagccataaagctcagaagatcccaggctgcaaagccatcgactatctgaaggaggccggccccctttactgcaggcactgctggctctgagtgtgtctgtgcctgctggctgattccctgtgtgtcagacccgggacacatcacctcggggtgagaatgtgtaacatcttcgtgtgtgggtgtagcaactgcagtgggaacatgtctgaatgactttgcacagttctggatggcaaataaatgtttaaataggtgcatcc

SEQ ID NO: 103257 - DNA, 968 bp, Homo sapiens
agccagtgcgcaggcgcgcgctgcgacgccaacctcggcttctcgccgctaacggcatcgagtctggacgccccgtgacccgcctgggccggagcgagggcggacggcgccttcttggccctttctgcctctagcagcggcgccggggtagccggagccagcgactgggaaacggctgcattccactgcgtctccttggcctggctgggcggtcggaggctggtctgccaagattactgtttggagaccgctgcagcccacgtccacctgatagactatttactacacatagtagattcagagccgctaaatgtccaagaccatggcgatgaaccttctggaggattggtgcaggggaatggaagtggacatccacaggtccttgttggtcacaggcatcccagaggactgtgggcaggcagaaattgaggagaccttgaatggggtcctctccccactgggcccgtaccgcgtgctcaacaagattttcgtgagggaagagaatgttaaagctgccctcattgaggttggtgaaggtgtgaatctgagcaccatcccccgtgaattcccaggaaggggtggtgtctggagagtggtctgtagagaccctacccaggatgccgagtttttaaaaaatctgaatgaattcctggatgccgaggggcgcacctgggaggatgtggtccgcctgctccagctcaaacacccaacctgtcccagaaccagcatcagcccccagagaactgggcagaagctctgggggtgcttctgggagcagtggtgcagatcatcttctgcatggatgccgagatccgcagccgggaggaagccagggcccaggaggccgctgaattcgaggagatggcagcctgggctttagcagcagggaggaaggtgaagaaagaaccggggcttgcagcagaggtgggttctgccttaaaggcagagacccccaacaactggaatgc

SEQ ID NO: 103258 - DNA, 332 bp, Homo sapiens
tgcacaagaagtccaaaaacgggctccaggggttttgcaaaatgactctttatcatcatgctataaagtgaaaccttacatgaatgatgtggcatcgtgtaatcatttaattttatcagaaaaattacacatacccccaacagtaaaaaataacacttggttccctccttgttgattctaagaattcatgcaatgttgttattacattctaaatacagttactgacgggataaaattccacctatttttaggattgtggttttcttcttcaaagtgaaggactcatctagactctacccccgccaccccacattctcaatattgctatgtta

SEQ ID NO: 103259 - DNA, 304 bp, Homo sapiens
aaacaatagctgctgagacggccacagctgccgaaagagcgcgcagccggctgtagtgacgtgtggtcttaggacaccacctgagtaaagacggtgcggtgctgcggagatctccgagctcacagtccatagctctgaggggctgggtgctgagtgataaagtgaaggagaagctgcgtgtttgctcgtggccagcaaggcaatctgtgttttgcagaagcggaggacgtgacgcctccctgccggtggactagtcggcttgtcggctctgcatgttcagtgttggctctggtgtgtgtttcgg

SEQ ID NO: 103260 - DNA, 553 bp, Homo sapiens
tgctaattgttagatcagtctctctcttgatttctctctctctcgatctctctctctgtctttcctttatttgtagagacagtctccctatgttgcccagtctggtcttgaacttcggagctcaaatgatcctcccacctcggccttcgaaaatgctggaattataggcatgagccagcatgcccagcctgatatttcttaattttacatattaagatatagagcagagtataagttggtttttagagaatccagattaaaagtcatatccagtataagaaatctttatttcttattattttgttctgtgaattctgcaattctggtgctctctgaggggaaaatagttataatagaaacaaatgtaaagaatgtttagaaaacatttacagtcactgggcgcggtggctcacacctgtaatcctagcactttgggattacagacatgagccactgtgcctggccaacagcctgtacttttttttggtttttttgtttttggagaccgagttttgctcttgttgccccggctggagtgcaaaactccatctca

SEQ ID NO: 103261 - DNA, 597 bp, Homo sapiens
ccatcttcgcggcatgccctgcctactgttgacataaaaactgaggatctgtctgacagcctgccacccgtttgtgacacagtagccactgacttatgttccacaggcattgatatctgcagtttcagtgaagatataaaacctggagactctctgttactgagtgttgaggaagtactccgcagcttagaaactgtttcaaatacagaggtctgttgccctaatttgcagccgaacttggaagccactgtatccaatggaccttttctgcagctttcttcccagtctcttagccataatgtttttatgtccaccagtcctgcacttcatgggttatcatgtacagcagcaactccgaagatagcaaaattgaatagaaaacgatccagatcagagagtgacagtgagaaagttcagccacttccaatttctaccattatccgaggcccaacactgggggcatctgctcctgtgacagtgaaacgggagagcaaaatttctcttcaacctatagcaccgctctcttactgcagtcataacacgcgtattcaggataactagtggttacatcataggaacagctatgccagatacgtc

SEQ ID NO: 103262 - DNA, 3376 bp, Homo sapiens
ccatcttcgcggcatgccctgcctactgttgacataaaaactgaggatctgtctgacagcctgccacccgtttgtgacacagtagccactgacttatgttccacaggcattgatatctgcagtttcagtgaagatataaaacctggagactctctgttactgagtgttgaggaagtactccgcagcttagaaactgtttcaaatacagaggtctgttgccctaatttgcagccgaacttggaagccactgtatccaatggaccttttctgcagctttcttcccagtctcttagccataatgtttttatgtccaccagtcctgcacttcatgggttatcatgtacagcagcaactccgaagatagcaaaattgaatagaaaacgatccagatcagagagtgacagtgagaaagttcagccacttccaatttctaccattatccgaggcccaacactgggggcatctgctcctgtgacagtgaaacgggagagcaaaatttctcttcaacctatagcaactgttcccaatggaggcacaacacctaaaatcagcaaaactgtacttttatctactaaaagcatgaaaaagagtcatgaacatggatccaagaaatctcactctaaaaccaagccaggtattcttaaaaaagacaaagcagtaaaggaaaagattcctagtcatcattttatgccaggaagtcctaccaagactgtgtacaaaaaaccccaggaaaagaaagggtgtaaatgtgggcgtgctactcaaaatccaagtgttcttacatgccgaggccaacgctgcccttgctactctaaccgcaaagcctgcttagattgtatatgtcgtggctgccaaaactcctatatggccaatggggagaagaagctggaggcatttgccgtgccagaaaaggccttggagcagaccaggctcactttgggcattaacgtgactagcattgctgtgcgtaacgctagtaccagcaccagtgtaataaatgtcacagggtccccagtaacgacgtttttagctgccagtacacatgatgataaaagtttggatgaagctatagacatgagattcgactgttaaatcagtgggtcttttaaacctactcctggtagggaaatagctacagttttacggcagctatggttctgttggtttaacttgccggagctcctgcatatagatcacttgtatcaagtgttttcattgctaagttatatgtgttagtgtcggggaaatagtttgcagataatggaggagtaaccctacaactatatgtccttagttcttacagaacctcatagtttgagaacaaagctgatgcaactgatttatacaaaatgaactttggcaagaaaaataacattaacctcattgtttatggccatgctttgtgcataatcaaagtttatgattaaatgtaaggaagtggtatctagtcagtccataaagattgtgctaatttttttgtggaaaagtagccattagttcaggaaactcagtgctgccttcagatgtcattgatgtttctcctgttggaaagctgatgtgtccagctcaacctttgtgctgacatcataccatttctgatcatgaaatattggctactggtgtatgtagcagttcttaaatcagcagtattatgaaaaaaaattccccctcattagaatgtttaagaaatctttttaaaaagtaaaattctgtcagactacaaatgtttagctgttactcatttctagggaagaaattctaaatccctccttcactttgagcagtgttctaattggataaatgaaggagagtagttttattctgaaggtaattaaatttagactatgtagtatgtgacagaatttttttaaaattataaaaagattttatttagtaattgggatttacttaaaataattttggaataatgctcccagacttgcccagatttgtgtattgtacttattgccactggccgccactttgacttattttctctaatagtttatttgccacagtctttattttgaatatgctcctagtttttttttagggtgctgttcattatgaaggcttctttatagaggcctaataagaatgcctttttataaagcctgtgcatttaggtaggttgaagctaggaggattttctttagaatgctcttttgcatgtaaagcacaaagtatgtttcagtttaaatgcacttcttccggttaatttttatggggaagacaagtgagtcacaaacattctgttgaagggaaatctagtcagttgcttgaaagagcacagcccaaataaaacaaggactgactaggtgtaatgaaataacctgtgatttaaaagaagagctgcagctttgacagtgcttatttaaagaaaaatactgctggaaaatttccaatttctactacgttcaccatctctagtaagatctgacatatgctgaagttatgttttgatttggcacacagcatgttcaatgatggttactcgcctagtacaagacatggagaagaaacctttggacacagagcagatgacacctccttctgttttgtagtgtatcctggtgtcattttctgtgaatgtggtcaggtagagttgtttttgttgttgttgttgggcttttttttctttttttttttttggtctcttttggtggggtgggggtgggctaaagccataggaagaaaaatgtgatgtatgtgtccagtatgtactattttgtttttgttttgcaagaagagttgaactatttttgataacaagagtaaatggtggaaaatgcttcttagttgtcttgtctttatttgctttccaagatttggaattttatttaattcctttaagtgttagcagtgtcttatgaaacatgtatttacctaacgtttgtaacagttttgtgttgaacccagatgccctgctatataaagttgtaaatctgttctttattcactaatgatcactgcaaaaatgattagaaatgagattgtacacatggatgaggatatattttgcaaatcgaccaaactttcctaatattatgatcttaaaattcatagagtactttattgcttcccaagtttgataatcttgtgggtttttttttttttttgatgcatgggaggttggcaatatagacaaagtggaaatcattagtatgtgagggccttgattgttatgtaatattgccaatgatgaattcaggttgtttttagcacaagtttctcttttttatgctggtattctcactgccacatttttggaaacctgtattacaccttaaatctatcaataaatgatagttttctaattctatgttgtagaatactgaagagtttgggatagcatgctctgaatggtctgtattat

SEQ ID NO: 103263 - DNA, 4297 bp, Homo sapiens
ttctgcgctctgtggtcgctccggacgaactcgaacgctggtttctctctcatatttttggtctggaagtctcagggacggaggggcgccaaggccccatgtgtgggaggattgtttcagctccacaaacttgcacggattttggttacttgtttggccaatggttcggctctgatttcttccgaattgttgcaaattcgccatcgttccctggctgcttactaagttggatccggaatttcttttcaaccgggagccattggtgtcgaagtgtctgcaatgaaccccgtgaatgctactgctctctacatttccgcgagccgcctagtgctcaactacgaccccggagaccccaaggcgtttactgagattaacaggctcttgccttacttccgacagtccctttcgtgctgtgtttgcggacatttgctacaagatcctattgcacccaccaactccacctgccaacattatgtctgcaaaacttgtaaaggcaagaaaatgatgatgaaaccttcctgtagctggtgcaaagactatgagcagtttgaggaaaacaagcagttaagcatcctagtgaactgctacaaaaaactatgcgagtatataacacagactacactggcacgggatataatagaagcagttgactgttcttctgatattttggctttgcttaatgatggatcattgttttgtgaggagacagaaaaaccctcagattcatcctttactttgtgtttgacacattcccctttaccttcaacctcagaacccacaactgatcctcaagctagtttatctccaatgtctgaaagcaccctcagcattgctattggcagttctgttatcaatggtttgcctacttataatgggctttcaatagatagatttggtataaatattccttcacctgaacattcaaatacgattgacgtatgtaatactgttgacataaaaactgaggatctgtctgacagcctgccacccgtttgtgacacagtagccactgacttatgttccacaggcattgatatctgcagtttcagtgaagatataaaacctggagactctctgttactgagtgttgaggaagtactccgcagcttagaaactgtttcaaatacagaggtctgttgccctaatttgcagccgaacttggaagccactgtatccaatggaccttttctgcagctttcttcccagtctcttagccataatgtttttatgtccaccagtcctgcacttcatgggttatcatgtacagcagcaactccgaagatagcaaaattgaatagaaaacgatccagatcagagagtgacagtgagaaagttcagccacttccaatttctaccattatccgaggcccaacactgggggcatctgctcctgtgacagtgaaacgggagagcaaaatttctcttcaacctatagcaactgttcccaatggaggcacaacacctaaaatcagcaaaactgtacttttatctactaaaagcatgaaaaagagtcatgaacatggatccaagaaatctcactctaaaaccaagccaggtattcttaaaaaagacaaagcagtaaaggaaaagattcctagtcatcattttatgccaggaagtcctaccaagactgtgtacaaaaaaccccaggaaaagaaagggtgtaaatgtgggcgtgctactcaaaatccaagtgttcttacatgccgaggccaacgctgcccttgctactctaaccgcaaagcctgcttagattgtatatgtcgtggctgccaaaactcctatatggccaatggggagaagaagctggaggcatttgccgtgccagaaaaggccttggagcagaccaggctcactttgggcattaacgtgactagcattgctgtgcgtaacgctagtaccagcaccagtgtaataaatgtcacagggtccccagtaacgacgtttttagctgccagtacacatgatgataaaagtttggatgaagctatagacatgagattcgactgttaaatcagtgggtcttttaaacctactcctggtagggaaatagctacagttttacggcagctatggttctgttggtttaacttgccggagctcctgcatatagatcacttgtatcaagtgttttcattgctaagttatatgtgttagtgtcggggaaatagtttgcagataatggaggagtaaccctacaactatatgtccttagttcttacagaacctcatagtttgagaacaaagctgatgcaactgatttatacaaaatgaactttggcaagaaaaataacattaacctcattgtttatggccatgctttgtgcataatcaaagtttatgattaaatgtaaggaagtggtatctagtcagtccataaagattgtgctaatttttttgtggaaaagtagccattagttcaggaaactcagtgctgccttcagatgtcattgatgtttctcctgttggaaagctgatgtgtccagctcaacctttgtgctgacatcataccatttctgatcatgaaatattggctactggtgtatgtagcagttcttaaatcagcagtattatgaaaaaaaattccccctcattagaatgtttaagaaatctttttaaaaagtaaaattctgtcagactacaaatgtttagctgttactcatttctagggaagaaattctaaatccctccttcactttgagcagtgttctaattggataaatgaaggagagtagttttattctgaaggtaattaaatttagactatgtagtatgtgacagaatttttttaaaattataaaaagattttatttagtaattgggatttacttaaaataattttggaataatgctcccagacttgcccagatttgtgtattgtacttattgccactggccgccactttgacttattttctctaatagtttatttgccacagtctttattttgaatatgctcctagtttttttttagggtgctgttcattatgaaggcttctttatagaggcctaataagaatgcctttttataaagcctgtgcatttaggtaggttgaagctaggaggattttctttagaatgctcttttgcatgtaaagcacaaagtatgtttcagtttaaatgcacttcttccggttaatttttatggggaagacaagtgagtcacaaacattctgttgaagggaaatctagtcagttgcttgaaagagcacagcccaaataaaacaaggactgactaggtgtaatgaaataacctgtgatttaaaagaagagctgcagctttgacagtgcttatttaaagaaaaatactgctggaaaatttccaatttctactacgttcaccatctctagtaagatctgacatatgctgaagttatgttttgatttggcacacagcatgttcaatgatggttactcgcctagtacaagacatggagaagaaacctttggacacagagcagatgacacctccttctgttttgtagtgtatcctggtgtcattttctgtgaatgtggtcaggtagagttgtttttgttgttgttgttgggcttttttttctttttttttttttggtctcttttggtggggtgggggtgggctaaagccataggaagaaaaatgtgatgtatgtgtccagtatgtactattttgtttttgttttgcaagaagagttgaactatttttgataacaagagtaaatggtggaaaatgcttcttagttgtcttgtctttatttgctttccaagatttggaattttatttaattcctttaagtgttagcagtgtcttatgaaacatgtatttacctaacgtttgtaacagttttgtgttgaacccagatgccctgctatataaagttgtaaatctgttctttattcactaatgatcactgcaaaaatgattagaaatgagattgtacacatggatgaggatatattttgcaaatcgaccaaactttcctaatattatgatcttaaaattcatagagtactttattgcttcccaagtttgataatcttgtgggtttttttttttttttgatgcatgggaggttggcaatatagacaaagtggaaatcattagtatgtgagggccttgattgttatgtaatattgccaatgatgaattcaggttgtttttagcacaagtttctcttttttatgctggtattctcactgccacatttttggaaacctgtattacaccttaaatctatcaataaatgatagttttctaattctatgttgtagaatactgaagagtttgggatagcatgctctgaatggtctgtattat

SEQ ID NO: 103264 - DNA, 3825 bp, Homo sapiens
  misc_feature (64)..(64): n is a, c, g, or t
  misc_feature (148)..(148): n is a, c, g, or t
tatcaagtgttctcaatgctaagttatatgtgttagtgtcggggaaatagtttgcagataatgnaggagtacccctacaactatatgtccttagttcttacagaacctcatagtttgagaacaaagctgatgcaactgatttatacanaatgaactttggcaagaaaaataacattaacctcattgtttatggccatgctttgcttaatgatggatcattgttttgtgaggagacagaaaaaccctcagattcatcctttactttgtgtttgacacattcccctttaccttcaacctcagaacccacaactgatcctcaagctagtttatctccaatgtctgaaagcaccctcagcattgctattggcagttctgttatcaatggtttgcctacttataatgggctttcaatagatagatttggtataaatattccttcacctgaacattcaaatacgattgacgtatgtaatactgttgacataaaaactgaggatctgtctgacagcctgccacccgtttgtgacacagtagccactgacttatgttccacaggcattgatatctgcagtttcagtgaagatataaaacctggagactctctgttactgagtgttgaggaagtactccgcagcttagaaactgtttcaaatacagaggtctgttgccctaatttgcagccgaacttggaagccactgtatccaatggaccttttctgcagctttcttcccagtctcttagccataatgtttttatgtccaccagtcctgcacttcatgggttatcatgtacagcagcaactccgaagatagcaaaattgaatagaaaacgatccagatcagagagtgacagtgagaaagttcagccacttccaatttctaccattatccgaggcccaacactgggggcatctgctcctgtgacagtgaaacgggagagcaaaatttctcttcaacctatagcaactgttcccaatggaggcacaacacctaaaatcagcaaaactgtacttttatctactaaaagcatgaaaaagagtcatgaacatggatccaagaaatctcactctaaaaccaagccaggtattcttaaaaaagacaaagcagtaaaggaaaagattcctagtcatcattttatgccaggaagtcctaccaagactgtgtacaaaaaaccccaggaaaagaaagggtgtaaatgtgggcgtgctactcaaaatccaagtgttcttacatgccgaggccaacgctgcccttgctactctaaccgcaaagcctgcttagattgtatatgtcgtggctgccaaaactcctatatggccaatggggagaagaagctggaggcatttgccgtgccagaaaaggccttggagcagaccaggctcactttgggcattaacgtgactagcattgctgtgcgtaacgctagtaccagcaccagtgtaataaatgtcacagggtccccagtaacgacgtttttagctgccagtacacatgatgataaaagtttggatgaagctatagacatgagattcgactgttaaatcagtgggtcttttaaacctactcctggtagggaaatagctacagttttacggcagctatggttctgttggtttaacttgccggagctcctgcatatagatcacttgtatcaagtgttttcattgctaagttatatgtgttagtgtcggggaaatagtttgcagataatggaggagtaaccctacaactatatgtccttagttcttacagaacctcatagtttgagaacaaagctgatgcaactgatttatacaaaatgaactttggcaagaaaaataacattaacctcattgtttatggccatgctttgtgcataatcaaagtttatgattaaatgtaaggaagtggtatctagtcagtccataaagattgtgctaatttttttgtggaaaagtagccattagttcaggaaactcagtgctgccttcagatgtcattgatgtttctcctgttggaaagctgatgtgtccagctcaacctttgtgctgacatcataccatttctgatcatgaaatattggctactggtgtatgtagcagttcttaaatcagcagtattatgaaaaaaaattccccctcattagaatgtttaagaaatctttttaaaaagtaaaattctgtcagactacaaatgtttagctgttactcatttctagggaagaaattctaaatccctccttcactttgagcagtgttctaattggataaatgaaggagagtagttttattctgaaggtaattaaatttagactatgtagtatgtgacagaatttttttaaaattataaaaagattttatttagtaattgggatttacttaaaataattttggaataatgctcccagacttgcccagatttgtgtattgtacttattgccactggccgccactttgacttattttctctaatagtttatttgccacagtctttattttgaatatgctcctagtttttttttagggtgctgttcattatgaaggcttctttatagaggcctaataagaatgcctttttataaagcctgtgcatttaggtaggttgaagctaggaggattttctttagaatgctcttttgcatgtaaagcacaaagtatgtttcagtttaaatgcacttcttccggttaatttttatggggaagacaagtgagtcacaaacattctgttgaagggaaatctagtcagttgcttgaaagagcacagcccaaataaaacaaggactgactaggtgtaatgaaataacctgtgatttaaaagaagagctgcagctttgacagtgcttatttaaagaaaaatactgctggaaaatttccaatttctactacgttcaccatctctagtaagatctgacatatgctgaagttatgttttgatttggcacacagcatgttcaatgatggttactcgcctagtacaagacatggagaagaaacctttggacacagagcagatgacacctccttctgttttgtagtgtatcctggtgtcattttctgtgaatgtggtcaggtagagttgtttttgttgttgttgttgggcttttttttctttttttttttttggtctcttttggtggggtgggggtgggctaaagccataggaagaaaaatgtgatgtatgtgtccagtatgtactattttgtttttgttttgcaagaagagttgaactatttttgataacaagagtaaatggtggaaaatgcttcttagttgtcttgtctttatttgctttccaagatttggaattttatttaattcctttaagtgttagcagtgtcttatgaaacatgtatttacctaacgtttgtaacagttttgtgttgaacccagatgccctgctatataaagttgtaaatctgttctttattcactaatgatcactgcaaaaatgattagaaatgagattgtacacatggatgaggatatattttgcaaatcgaccaaactttcctaatattatgatcttaaaattcatagagtactttattgcttcccaagtttgataatcttgtgggtttttttttttttttgatgcatgggaggttggcaatatagacaaagtggaaatcattagtatgtgagggccttgattgttatgtaatattgccaatgatgaattcaggttgtttttagcacaagtttctcttttttatgctggtattctcactgccacatttttggaaacctgtattacaccttaaatctatcaataaatgatagttttctaattctatgttgtagaatactgaagagtttgggatagcatgctctgaatggtctgtattat

SEQ ID NO: 103265 - DNA, 2320 bp, Homo sapiens
ttctgcgctctgtggtcgctccggacgaactcgaacgctggtttctctctcatatttttggtctggaagtctcagggacggaggggcgccaaggccccatgtgtgggaggattgtttcagctccacaaacttgcacggattttggttacttgtttggccaatggttcggctctgatttcttccgaattgttgcaaattcgccatcgttccctggctgcttactaagttggatccggaatttcttttcaaccgggagccattggtgtcgaagtgtctgcaatgaaccccgtgaatgctactgctctctacatttccgcgagccgcctagtgctcaactacgaccccggagaccccaaggcgtttactgagattaacaggctcttgccttacttccgacagtccctttcgtgctgtgtttgcggacatttgctacaagatcctattgcacccaccaactccacctgccaacattatgtctgcaaaacttgtaaaggcaagaaaatgatgatgaaaccttcctgtagctggtgcaaagactatgagcagtttgaggaaaacaagcagttaagcatcctagtgaactgctacaaaaaactatgcgagtatataacacagactacactggcacgggatataatagaagcagttgactgttcttctgatattttggctttgcttaatgatggatcattgttttgtgaggagacagaaaaaccctcagattcatcctttactttgtgtttgacacattcccctttaccttcaacctcagaacccacaactgatcctcaagctagtttatctccaatgtctgaaagcaccctcagcattgctattggcagttctgttatcaatggtttgcctacttataatgggctttcaatagatagatttggtataaatattccttcacctgaacattcaaatacgattgacgtatgtaatactgttgacataaaaactgaggatctgtctgacagcctgccacccgtttgtgacacagtagccactgacttatgttccacaggcattgatatctgcagtttcagtgaagatataaaacctggagactctctgttactgagtgttgaggaagtactccgcagcttagaaactgtttcaaatacagaggtctgttgccctaatttgcagccgaacttggaagccactgtatccaatggaccttttctgcagctttcttcccagtctcttagccataatgtttttatgtccaccagtcctgcacttcatgggttatcatgtacagcagcaactccgaagatagcaaaattgaatagaaaacgatccagatcagagagtgacagtgagaaagttcagccacttccaatttctaccattatccgaggcccaacactgggggcatctgctcctgtgacagtgaaacgggagagcaaaatttctcttcaacctatagcaactgttcccaatggaggcacaacacctaaaatcagcaaaactgtacttttatctactaaaagcatgaaaaagagtcatgaacatggatccaagaaatctcactctaaaaccaagccaggtattcttaaaaaagacaaagcagtaaaggaaaagattcctagtcatcattttatgccaggaagtcctaccaagactgtgtacaaaaaaccccaggaaaagaaagggtgtaaatgtgggcgtgctactcaaaatccaagtgttcttacatgccgaggccaacgctgcccttgctactctaaccgcaaagcctgcttagattgtatatgtcgtggctgccaaaactcctatatggccaatggggagaagaagctggaggcatttgccgtgccagaaaaggccttggagcagaccaggctcactttgggcattaacgtgactagcattgctgtgcgtaacgctagtaccagcaccagtgtaataaatgtcacagggtccccagtaacgacgtttttagctgccagtacacatgatgataaaagtttggatgaagctatagacatgagattcgactgttaaatcagtgggtcttttaaacctactcctggtagggaaatagctacagttttacggcagctatggttctgttggtttaacttgccggagctcctgcatatagatcacttgtatcaagtgttttcattgctaagttatatgtgttagtgtcggggaaatagtttgcagataatggaggagtaaccctacaactatatgtccttagttcttacagaacctcatagtttgagaacaaagctgatgcaactgatttatactctgaactttggtcaggcaatgccagcgaagatgtacatgagcgagctcgatg

SEQ ID NO: 103266 - DNA, 432 bp, Homo sapiens
gagatgtgcagagtcagtgagataacctacacaaaacgcttagcagagtgtctggcacacacggccgtgctctaaaaatgtgagttacttctatttttaccggcaaactttatttttgctgttttccagccttctgtttctttgcacattttctttttttgtggcgaccttgattcctttaggatcccagtgctcttggatcactcccttcttgcttctagcaaagcccactctcgggaaggggtcttacgttgtagccgcatcggatttcaagggcagaaccttcaaggtcgttggggccagtgcccgtgtggtatttgtttttgctgagcggctctttgctgtgctgcatctcctcgcctcctttgacggggtacacacgctctacctgctgagacagtctcctccatctttgtcattttctccactttt

SEQ ID NO: 103267 - DNA, 243 bp, Homo sapiens
ggtagacatttgggttgtttccaatttagacctatgatgaataaagctactatataaatactcatgtgcgagtcattttgtcaacagatgctgatatggtttggctgtttccccacccaaatctcatcttgaattgtagttcccacaatccccatgtgtcatgggagggacctgctgggaggtaactgaatcatgggagcagttacccccatgctgttctcatgatagtgagtgagttctcac

SEQ ID NO: 103268 - DNA, 1271 bp, Homo sapiens
accatagggaagaaattgtttgcgggccagactggtgtgccaggaatgtaatggaatatggcataaggagaacggggtaggtgctctcataagtgggttttctttagtgtttcccttctgtccttccaaagggcttacttcctcctgtcctcggtgttacttggcgctcgccctgcctggacaatcataaacccttttgctcagcgattgcttcccagcagcagcagcagcgccccctgagaaatgttcactcttcaatgttccaccgaccctatggtggggggatcgctgctttccacttatttcaaaatcatggtgtgaatggaaaggctttgtttgccattatcttctgtttgtacaatgagccacaagtgagcaccgccttggcgcgcacccaccttgcccgggcctctgtcccctccagccgcgctccaccggcgccctcgccccgctcgcggctgctgggtggcttgctgcttcgttctggtagacttgcgattttgccttgtcctccctctgggttcgccggatcctgtgttttccctgtcccagaatgacccattcgggcttcggtgtttggcttcagaacgaccactgcccagccccggggactccaggtcccagcacctcccgtcccacccctcccgccagtctccgcagtaaaggaagacaatgactaggggcctccgtgtgttggctttaatgtacatagcttataacaaggccacactactcaaacattcttagttttttttaaaaaaaaggaaatacagagatagatgtaaatgaagcattggactgagttgtggttgcttttggggtgagtttgaatgaggggatggctggaggctgttgaggccacgtcttcattttagccttaaggaagaatttctttggtttgtgacaaaggatcaaggaaacctttcagctgggtgagtggtcggcactctaaccctttctaaagcttggtgtgacccaatcaggcggcccaaactaggattaaccaaaccaaacaaggcctgtgaattaagacaatctgctttggggaagccacttgccccaaatacttaatccctgaaagagccgcttgtgtgcccgaagcattgtcctcacacaacattcctttctttacacttcttacttctgatttgattgaattgtttgttcctataaggcaaagtggaaatgtagtcaccggttttactagaaaatagttctatatagtttgcttttgttttggaaaatattctaagaaaagacttaaaaaaaaa

SEQ ID NO: 103269 - DNA, 311 bp, Homo sapiens
caccctgagtttttgattcagcaggtctggggtggggcccaagaatctgcttttctaccagttcccctgtgctgctgctggcccaggggccacatgtgagaagcaccaatctgttatattgtttgtatcactcacctcacgcccagacagtcctgcgtccgctggctttcccctcctctctcccagcctgtgtttcccgccttagcggcccactttctaggatatcaccacctgtattctccatgctcggccactcctggtgcccgcgcttaggagacgtctcttccaggcacacagggatagtaaacagc

SEQ ID NO: 103270 - DNA, 464 bp, Homo sapiens
tgtggccagttgcagtcaaccctgagcctgggcaaaatgcatgcaggctggtcctcctgggtgatatcctgctaggcgggtgggcagtgtacacggcagaagagggttgcggcatgaggcagcaaacgtttttttctaaaatcttgtcaagcgtggggtccgtggaatccacatgtgagcatcagcctggtgggtggggagagtgaagcctgcgatccagtctggatcatgtgctacacagtgcagagccggcatgctcacccctcctgagggatcgctcgagcctatttctaggcccaaagcgactttgcaagagactccctttattctgggcttagtggaattccagcttccaacagccatttccctccacccccttcagttctgagaacatgttttgtaacaggaaggcaggaagaaaagagaaggcgagtttgttcagctgggtcagccgcatcccacca

SEQ ID NO: 103271 - DNA, 554 bp, Homo sapiens
aattgctaataacatttgttgaatatttactaagcgccaggcactgggctaagggctccttgtgaatttttcacttgatcctcaccacagccctcgtcacctccatttgacagatgagaaaactgagactcactaaggcagagctcacacagctagtgacaggcaaagccaggcttgggacctggctccagtctgctgagcagtctgcctccagaacctatactcttaaatcccgaaaacagagctatagatgcttttcctgcctccttaactttcctttcccttagaaggttcggtttaccttctctcatacattagtgccctctcagaggaaatgcaaaacaaatgccaaaaactttaatcagctaaacacttctatgccaaaacaaggaaatgtgaacttacttatttcaagacttgaaattcaatgataaattcaggatgcatcatttcttacaaaatatttcagccacaggatcctaaattttgcagcatggtaaagcatgttggtacacaattgttcctaacatgaggcagggccaggagcccctgaa

SEQ ID NO: 103272 - DNA, 379 bp, Homo sapiens
agtactttcacctttatgaatgcccttcaaaagtgtaaattaataagactctatttgtgctttaaaaaggctaggttggtttgcctcctacatgttccatagagatcaattcagcctggtggccgcaacttgacttggactctgccactctcagtgtgaatgctgggccaacctctgctctttaaattaaacaagggagtgttttcctgtgtgttacccggttatcaaaaataagattcccctaaacagaactgattataactggtaacagaagcaaaaccattgtcccatctggcaatattcatataatttcaggaattctgctttattattaaatgcaggggcagtgtttacaaagatgcagtctcatatagtgaga

SEQ ID NO: 103273 - DNA, 660 bp, Homo sapiens
gggggacagctaagcgccttggagagcaaccacccttatttgcctaataccgagcttcgcacccagggggcactcgacacctactgtagtttggacgccaaggaacgatagggttaggagggggctactgttcaaccacaaagcttgtggaaaagtttgttagcccagacaatctcagggcaacacctggcaggtgctttccacccctgaccacagtggccaatgggacagagcctgaaataaatatttctagtttctgaggtgagctgaaggccaaagagcagctgtccctgcagctcagaccatccagtgaaggagtaaggtgctactttttaaagccttctgctacctacaacctccttagcctttaaaacgtgtgcttgtctctgcacgtttaggagacaatattaagaattagaaatgaaagggccgagcgcggtggctcacgcctgcaatcccagcactttgggaggccagggcgggcggatcacgaggtcaggagatcgagaccatcctggctaacactgtgaaaccccatctctactaaaaatacaaaaaattagccaggcgtgctggtgggcgcctgtagtccaagctactcaggaggctgaggcaggagaatggcgtgaacccgggaggcggagcttgcagtgagagatc

SEQ ID NO: 103274 - DNA, 745 bp, Homo sapiens
gcggagggaacttggggtccactgaagagcttcgaggggccatctacctggtggaggaggtgtgcccccgcatctccgacaccatagtgggccagctcctgcagcagctccacagatattctctaagtggtggagaaacttcatcccactgaaattcctttggcatttggggttttgtttttcctttttttcttcttcatcttcctcctttttaaaagtcagcaagagccttcgctgactccactgaagaggtgcgccaccgggggccaccccagtgccgggcatctgtccagggacacacacagtcctcgctgtgctgcagccagatgaagtctcccagatgggtggggagggtcagctccttccagcgatcattttattttattacttttgtttttaattttaaccatagtgcacatattcaaggaaagtgtctttaaaaactaaaacaaaccctgaaatgtatatttgggatcatgataaggcaactaaagacatgaaacctcaagtatcctgctttaagttgataactccctctgggagctggggaattgctctggaggatgggtgtacagatttgtatatagtgtcatttttgcggagaccctttcagtgtgcataaggaatcactgtgtaaaaactggccaagtgcttctgtagataatgtcagtggagtaaatattcaacaggccaaaaaatatatataaagaaaagtctctaacagttttggggtttttgtgtttct

SEQ ID NO: 103275 - DNA, 585 bp, Homo sapiens
gaaatattttcttcacttggctttcctgacagttttctttcctggttttcctcctcacagaggccaatgtaccttgaagccaacaaagaagcttacatttcagggcttctcacttgcaggacccttctgatgccacatgtctcctctggcaccccagcagcagcacacaacacaacactgttctgttgctgggaggtcacctgggtcagggttcctaggtcttggagtggggtcaggcgactaccagcactatctccactttacttggagtccagcaaaagccctcccatgatgcatttcgtggacattagatctcatgtcccaatccaaggagaagatctgaaggaaacgctctgctctgctccttgcccggggtcaccttgatccaagcttcctggctaccttatgtcacccccagctccagctcaggatttgggagggtggtgggaactgatggttctgtggtcctggccaaacagtccagctgtcgcctgggcctttggatgccacagggtgccatgttagtaagaacaaaggctgcacttctctgaggccttgttcactggcaagaagtaccgccagagc

SEQ ID NO: 103276 - DNA, 806 bp, Homo sapiens
tcccttcgttatgacattttgagtcatcttttttttttaccattctagtcttttaagagaacagcttaaatctacataaaaacagagaagattcctaaaaattacatttaaatggcaaaaaaaaaatactttcaattcttctaagaatttcacagtattaatgaatagagccatatcaacagaaaaaaaaaagtcgaactggtactcttattcaaaaaaatttaaatattaaattatttttattggatgattcaaagtatctccgtctcacctgcagtgtattttctttctttataaaggacaatctttactaaatattatgtcctagagatttgttccattaccatagacactattggcaaaagagatagtgatgtataaatttttaataagggaggcaaggaaaaagtattatatgatagggttttcttcccctgttaatgttagaaaactaaattctttgaactcttttttccaactctggtatgatttaagtcttcatgtaaaaagagagaagttgacagtgctaaatggcaagaaaaaaacagtacttggttaaaatggtttctatcactgtgaatctcatttagattatcattaacttactttaatcaaatcaattattttctcatacaaattccttactatttctgagaatttgacaaacaccttttttggtaagtagaaataatgatacatttataagaatgccagaaaaaaagctcagtcatccacaatttactaaaaccactgttagtaagtttatattttgaatttatcagtaattttagtcttgcaagaaactt

SEQ ID NO: 103277 - DNA, 471 bp, Homo sapiens
ttgtagcttccacttctgagtgtatagctggtatagatattttacatgcctgaactgtgagggatcataagctccaggcagattatgctcactgcgaatagcccatgtagaaaggcattagtaggtttggggccccacaatccttatgacctgtttgagtacaagtctgtgcacagatgactttcctgactagaccatctggcaagaggaacaacctcttcaggtgactcttgggtttggattcaatgcctccctgacgtagctactaggtatgcctcttttgaaaagattcccatttgggaatgagtcaactcaaatgcaatgactaataaggtgggaaaggcccaacaagcctctgtcaccacatggaactggtaatattcaagaatgcagccagtctggcccctagggcatctcagctttacatgaaaaagtagcagcttctccctttgagaaagtctgatcttacat

SEQ ID NO: 103278 - DNA, 352 bp, Homo sapiens
accatgttggccaggccagtctcaaactcctgacctcaggtgatctgccctcctcagcctcccaaagtgctgaaattacaggtgtgagccaccatgcccggccccactgatatgacttttatatgactccatttatatgactttctggaaagggcacagagatcagaccagtgtttgccaggggctgagggtagaagatgaaactgagtgcaaagaggaactaggagctgggcttggtgcatgcctgtagtcctagctacttgggaggctgaggctggaagattgcttgagcccagagttcaagtccagcctgggcaatacagtgaaactccacctctctctccctctcaaa

SEQ ID NO: 103279 - DNA, 396 bp, Homo sapiens
attgccttctaagtcagatataaacaacgaacttgcttgaaatgttctctatcagaccaaggacccatatttaattccaacttacactctgctacaccctttcgctaaattctttagttgatgttaactgcatttggaaccctgtattcagcgttgaattgcacattctgaagcaattgtgttcttactcagcacgctcatttctgtatcccaagtatctccctgcctccagaacatgtttactctttaaccacttcctgataatacagtaggctaccattactctaaatagttgcagttattgaatataggcacatttttaaattataagaatcctatcccaatccaaggtacaatttgctgatcgcatactgattcattttcctcccactctgg

SEQ ID NO: 103280 - DNA, 362 bp, Homo sapiens
tcttagcatggagatgagtgttactgggcagctggcctgggagcatcactgtgccaggcctgggctgagcccggtacataccttccccaacagctccgtaaagtgggggcggttgggggttcccatttgacagatggaggtgtctgagctgcggggccaggagggaaaggtgggcccttctcccttctccctgctgctttctgtcctctgtcccctgagcctgggagctgggtccacctgtttatccacccactccccacagctgaaggaggttgtgctgaagagcagcaaggtcgtgcgggctgacgtctgcgtggtgggcattggtgagttggtgtgtgggcaggcaggcacaaagcagc

SEQ ID NO: 103281 - DNA, 2030 bp, Homo sapiens
agctggtctggtgtgtgcagagacactgcggcaggagggcttctccgaccggatcgtcctgtgcacgctagaccggcaccttccctacgaccgtcccaagctcagcaagtccctggacacacagcctgagcagctggccctgaggcccaaggagtttttccgagcctatggcatcgaggtgctcaccgaggctcaggtggtcacagtggacgtgagaactaagaaggtcgtgttcaaggatggcttcaagctggagtacagcaagctgctgctggcaccagggagcagccccaagactctgagctgcaaaggcaaagaagtggagaacgtgttcactatccggacgccagaggatgccaatcgcgtggtgaggctggcccgaggccgcaacgtggtcgtcgtgggagccggcttcctggggatggaggtggccgcttacctgacggagaaggcccactctgtgtctgtggtggagctggaggagacgcccttcaggaggttcctgggggagcgcgtgggtcgtgccctcatgaagatgtttgagaacaaccgggtgaagttctacatgcagacggaggtgtctgagctgcggggccaggagggaaagctgaaggaggttgtgctgaagagcagcaaggtcgtgcgggctgacgtctgcgtggtgggcattggtgcagtgcccgccacaggcttcctgaggcaaagcggcatcggtttggattcccgaggcttcatccctgtcaacaagatgatgcagaccaatgtcccaggcgtgtttgcagctggcgatgctgtcaccttcccccttgcctggaggaacaaccgcaaagtgaacattccacattggcagatggctcatgctcaggggcgcgtggcagcccagaacatgttggcgcaggaggcggagatgagcactgtgccctacctctggaccgccatgtttggcaagagcctgcgctacgcgggctacggagaaggcttcgacgacgtcatcatccagggggatctggaggagctgaagtttgtggctttttacactaaaggcgacgaggtgatcgccgtggccagcatgaactacgatcccattgtgtccaaggtcgctgaggtgctggcctcaggccgtgccatccggaagcgggaggtggagactggcgacatgtcctggcttacggggaaaggatcctgagctcacatgcagtagacttgggcaggcaaagggggcaccaagggcacaggccaagccttgggggcaggtgccaatctccagtcccaggatcccccagggcagaacctgagccctcccagtgcttgccttcagccacctggctcccctcctgggaggcctctgctggatccagaagatgctcaaccctcaaggcctctgctgccactgacagctggcactggaggcaggacaagccctgcctcttctccctctattgggactggtcccctgaagaaccctgcaacatgttagacattaccgtaaaattaaaacgcacaaatttgcagaaaaaaaaaaaaaaaaaaaaaaaaaaaaaaaaaaaaaaaaaaaaaaaaaaaaaaagggggggcccctaaaattttccccgggggggccaaattcggacccgaagtttttttagtcataggggggcccccatattaggaggaggctgcttattatataaatacagccagtagtagcaccggggccggctggttaataacaactgttgtacgagggggaaacaacttggtaatacttgggagccacttttggggagaagagaaccccctataacttcgggggggggtggcaacaattaggggggggacaatatctacctctaagggaagaatattgaagcagcctccagaaggagaacaattataaaaattcttcaacgggtgtgtatttcagcggtgttcaaacaaaagggcgcatataatgatcgtgggcgggacttggaaaaaagtttgggcctcagcgggatttttaagtattgagaaagattttttatatcgagggattctattttaaaaatgag

SEQ ID NO: 103282 - DNA, 436 bp, Homo sapiens
agctgttcagggtgcccagagtggagagcctgttttcttctgtcttgaccactcctcccctcactcctgcaggactggcgacatgtcctggcttacggggaaaggatcctgagctcacatgcagtagacttgggcaggcaaagggggcaccaagggcacaggccaagccttgggggcaggtgccaatctccagtcccaggatcccccagggcagaacctgagccctcccagtgcttgccttcagccacctggctcccctcctgggaggcctctgctggatccagaagatgctcaaccctcaaggcctctgctgccactgacagctggcactggaggcaggacaagccctgcctcttctccctctattgggactggtcccctgaagaaccctgcaacatgttagacattaccgtaaaattaaaacgcacaaatttgc

SEQ ID NO: 103283 - DNA, 318 bp, Homo sapiens
acatgatgctggaattgagaataaaggacatagactgccttacagtcggtagggcaagcctttctgtgtaagagatatttaaccaaccattaagaatgagaaggagttggcctttcacagagccctggacagattatttttaggagatgaaaaatcccatagaaaactatatgaaatgggaaatgttatgacacaatcgaggagctgaatagaagcaagtcataataagagggagtaaggaggacaatgtctttgaaagaggtctttaggtaaccaaagaccatattatattatatggtaacatgtttggattttatt

SEQ ID NO: 103284 - DNA, 752 bp, Homo sapiens
ggttaagcgtctgcagggtgagaagctggagactgtcctcgtgtcgctgggctgagagccgtgtgcggctgtgagtttttgatgaggaaaagcagtgtgggtcctggatttggacagcacaggcccctctgggagccgtgtgccttcacctcggagtgtgtgggcaaggtacagagctggagcccttgaccctgaccggccagccaggaaggccgtaggaggccagctccctggcgtgaggtgcgcagggcctctggcattgccctaggtgagggctccaggactcggacactggctctcagtggggcaggtgtggcccggcagggggcgctttgtgggtgcacagtggccccagggtggtgcagatggtgggcagacctaccccagggctgtttctgagacagaggtccctggaggagaaccaggtgctgggcctcaggtgtctgtcctgaactggagcagccttggaacaaggaaccacaggaagtccctgtggcatggggtgcagcccctcaggtctggcagggctagcccagggagtgcagggccccaggagccctgccacaggttcctcagctcgggagctcacggcctcctcactgcagggtcctttcaggagggccagggtggccttcacacatctgcttcttcctcagagacacaggtgtgggcacgtactggccagtatagataagcattgagcagcattgatgggtatcgatgatcctccaggagcagcggctggtgccatg

SEQ ID NO: 103285 - DNA, 297 bp, Homo sapiens
ccacctcagcctcccaagcagctgggactataggcgtgcaccaccacgcctggctaaaattatttatttatttgtttgtttgtttgtattttttgtggagaccaagtttctccctgtcgaactcctggactcaagtgatctgcccacactggccttggaaagtgttgggattacaggcacgagctaccgcacctggccttaccattttatttaaaagctcactttggagagaagccagttaggaggcaatggtggacaacaggtcagaagatgatgtaccttgagcgttccagggtc

SEQ ID NO: 103286 - DNA, 424 bp, Homo sapiens
taaaggtgaaagtctttcagaatatagatttaagaagaaaattaaaacatgataaaaataaagcagtaatgaagaaagggatgtaaacaaactatgggtatgaagacgcattactgaaaggtcatttaaaaccacgtgaaaccatatgttaaagaagaaactgatgaagatggcaacagatgaaactaaatgttattaaaatatgaaaaggtattgtttgaatgatccaaaaatagtattaaatattaaaaattaaaatagacatttctttattattatataatattttttcattaactgtatttgcaacaaaatgagtatataccaacatgtaaattttggaatattaatttttgaaaatttattataattaatcattttaatactatatcaaatgaaaataaaattttaactattcaacaat

SEQ ID NO: 103287 - DNA, 403 bp, Homo sapiens
ataaagatgtaagaaggataaggagagaccagatgcagtcgagggcttttgtggcatgaggaaaggatatttaacttggcaccaagaaatggggtggcattctaatgctgctcctgacctcctgtgtgaccttgagctccagtttccctctttgtaaaatggtggccctgatgactacctacaaggttggaggtgggaataagggacctaatgcatgtccagtcatctgtcatcaacactcaataagccttttcctttcgtggccatccatcttcaggtttgacggaagtgaggatctgccctcagggttgaaaggtcaagatggtttgctcaaatattttatttctctcataaatctcttgcaggtttggttcatcccagactattctttttcagggcagta

SEQ ID NO: 103288 - DNA, 364 bp, Homo sapiens
ggtctcctgtaagtatatcccagccaccaactcctaaagaactgcccttttctccatattaaacacacacacacttacacacacacacatacaaacccctgctttgtaaagtttccatcagtggaaactttgatttctttttttaatctcttatgctctcctgaagttcatggttgagcaccatctccaagataccacagaactcttgattgatgatcaaaacagtagtgtcatcttttccttttagaaaacggaacattttctcacctcatgattgatgaattctaaaccaatggggaaaaacaaaaaggctttaaaataatgaatctgtttctcaactactgttatattcaattaatttaac

SEQ ID NO: 103289 - DNA, 549 bp, Homo sapiens
ccccgtcgggctatatctttatcacgcagcgtgaaaacggactaatacactgggcatggtggtgcacgcctgtcattccagcgacagcgaggcggcaggctcggctgtcgctgggattacaggcatgtgccaccacgcccggctaatttttgtatttttagtagagatggggtttcaccatgttggccaggctggtctccaactcctgacctggtgatccgcccacctcggcttcccaaagtgctgggattataggcatgagccatcgcgcccggccatttttctagttcttatccttttggagcattttataacgttttatctacttgatctccatatgaattaaaacgcttattctttggcttccaaaacaatgctttttttcccctcagatcctcttcttacctcctgaatcactcttctgctcacgattcctcttccattgcccactctttgcccagatttctaccccaacccactttctctatattctttcgtctttgtaaccttacccactcccatggcctcatccctcattatgtactaatg

SEQ ID NO: 103290 - DNA, 904 bp, Homo sapiens
aatctgccaagctggatttgcacttttaaagatcagtatcaataatgccctgcttgtttcggttgcactctccctttaaaagacagccccctctaattgatgcgtctgggctagtctagactggtagtgattgaaccaaccaccaattatgttattcatttcactgaacttcactgatgggctcggtgaggaagaaggggtgttgagaaacctgcccttgactgaagcagttgcctgctgaaatataaaatcttgtgtcgttatgcacttttaaatgcctgggtgatcagttgtatgatagcaacctcggaacatgagcaatccacttgaaaacatgtaaaaacctgagagtgccttgaaatacaaattaaaacacttgtattaaattactaccctgttatcactgaaaatcacggaagaattttacctggcatgtttttattgatccatgtatacattttcatagagtaaactgcagatatattttaacttcaaaaagcaccaactgttttacaaatgttggatatgaataatgtggtaatatagattcgtaagttaaatagatgccttgctataatttccaaatacctatgcatacacatcagctaaggtaggggaagtcattaaaccattgaatataaactaacgatgactcgacaatcaaataactattttttttgaagcacattcggactatcaaagactggaaagtaatattctaatattactacacaagaggtttcaacaaaagacgtggtgcaatcgttgcatagttcatattctcagttcaattttctgatacaaaatggtttcttgattgcaatttggcattaatgactaaaattgcaataaacacttaaaataaaaaacaataacaggcaaagaacagtttccctaaccttca

SEQ ID NO: 103291 - DNA, 509 bp, Homo sapiens
tcaaggttgatgtttattagttttcccatctaaagactaggtctgatgccaacaaatcagacttttttttcctgcatctatgatcaagcacttgaacatttccccacgaatgtggatgcgccctgggttagaattgttttctgctgtgagccaaggctgagttccagctctcatttacctgcaaggaggagagggatgcaaaggatcgtcagtggtggagaagatgccacttttttggctgttttccacagcattcagattcatatctgagttcaacatgctttgtatgttttccccacatgctgggacaggcctgtttttaaagacaaggttgaagagtggagagaagaggcttgtttatgcacatggtcatcagtacagcacaatctgtctccaaaatgggaaaggtcccctcactagggatgagcttcagttttggtctgtctctggattctcacctacctgattttccactcttatcccccaatcttgggcctgtcctttaactg

SEQ ID NO: 103292 - DNA, 464 bp, Homo sapiens
cacctcctaccaggcccctccttcaacactgggaattacaattcaacatgagatttggatggggaaacagagccaaaccatattagggtctttaagaggtaataagttaaaatggagttattagggtggcccataattctacagaactgatgtccttgtaagaaggggaagagacaccagaagtgccagcacagaggaaaggtcctgtaaggacacaggctaaagacagccatctacaagccagggagagaggccccagaagaaaccaaagccacaaataccttctcttggactttcagcctccaaagctgtgagaaaatacatttctgttgtttaagccacccagtcggcgctactcggtcatggcaggcatggcaaactaatacaccaaacgctggtgcatggaacatatcacggtcagctacagcgtctcagcagaagaggacgggcaagggacacgagtg

SEQ ID NO: 103293 - DNA, 730 bp, Homo sapiens
tgcgtagtgcttggcgcggtgaccagacctggccgccttcctgactgcacagagcaagaggccacactctggatcccaggccgggtccctgtggttctgggagggaggtcccggatgcctcccagatctcgggcttctgtaaccctgaggctgggttttaaaatcacggctcttccaagttacacgaagagtccatggtcaagggtcaagggtggtcttcgaccctcgggatcgtcttcttgagaaatggctgagagctaagcctagagctgcccagggaaggaagccaaagagctggagccgagcgcgaagggctgggaggcgcggggaggccccttacccccgccccccccccccacactgtcctggccgctaataacgctgataatagtaacagtatcggccaactgtttcccccctgctcctggtctgccaggcaccggatcctcctttagcactcccagcactcactgaagaagacactatggaattctccgttttccagactagaaataagtaactcggagaaattaagaaactcgcccgacgaccctcaggcagtagcacctggccaggtttgggtgctgttgtaggagcaagggatacaatgatgatcaaggcagatgcagccgttaccttcaggttgtggagtccggatacagactggaggcaggcagctgtaagatgtgtgagaaatgctgcgctggatcagcccatggtataggagagc

SEQ ID NO: 103294 - DNA, 818 bp, Homo sapiens
ctgatgtcagcgtccatgtgcaggttttcacgtggatgtggtttcccaccatgttagcttgtccagcctctgcagatgccagctctttcattttcgccctctttggggagggtgtgggtggggaggcgggctctggtcctcgctgacggagacggagcctctggcctgaggaggaaggatgggaaagagcttgcttagccagcgcctcatcctccaaaaccctctgagactgcaggagtcacctctccactttcaagaacagtgccttgcccagggtcattgagcttgggagtgagtggctcagaagtggaattcaagactgtccgccgcagctctctgaagcattcaggggtctctgggctggccctgggcacgggtcatcagtgccacttctacccgaggaacaagagttccggggtccgggccactctcctgtggttttgaccttgctcttgaaccccccattgcctcccccagggtgagcctggagtacctggaaagaagggcgacgatgggacaccaagccagcctggaccaccagggcccaagggcgagccagggagcatggggcctcggggagagaacggtgtggacggtgccccaggaccgaaggtgacatgagagctctctgctctggcgcctgcgggccccgctcagacctccacccagtcgggagtgggagatgtggtttcagctctcatttgcccttttaagtcccaggagggcctgacccaggggtctccctcagcactctcagaagctggtgtgggggcagcggtggtgaatctgggtgagtggcaaggcctccactggtgccc

SEQ ID NO: 103295 - DNA, 265 bp, Homo sapiens
aagatcgtgccattgcactccagcctgggcaacaagaagcgaaactccatcttaaaacaaacaaaacaaaacaaaaacaaaaaagcataatctctttcagaatttttaccttcttggtgtggttctgttaggaaaggcttccatgggaaccttcaataagtgacctaaaaaaaaatctcagagcagaaggtcgacgcgccggagtgcaatggctgctgtaggattaaaaaaaatagtggttcctcaaaaagttgaacatggaggc

SEQ ID NO: 103296 - DNA, 934 bp, Homo sapiens
tttgcaatagatcttgctgctactcacgctttgggtccacactgcctttatgagctgtaacactcaccgcgaaggtctacagcttcactcctgaagccagtgagaccacgaacccaccaggagaaacgaaaacacgccgccttaagagctgtgacactcaccgcgaaggtctgcagcttcactcctgagccagcgagatcacgaacccacgagaaggaagaaactccaaacacatccgaacatcagaaggaacaaactctggacatgccgcctttaagaactgtaacactcgctgcgagggtccgcggcttcattgttgaagtcagaccaagaacccaccaattccagacacaccaagtattcgaggggactgaggcaggagaatggcatgaacccgggaggcagagcttgcagtgagccgagatcgcctcactgcactccagcctgggcgagagagtgagactctgtctcaaaaaaaaaaagaaaaacaaaagcattctttaacacagataaagtgactgtgaaagcaagcacataaaaacaagaaatacaaataaaagaaaaaaatacagtgggaaagaaacaaattcccctcaggtgtgcgggagaatggaccatgcccattcaagatctcagtaaccatgtgtagtcaatctagaggtaaagatgcctgagagagtgggtataggagatgaagacatagcagtagccttagaagtccgatgttaccaccaatatcatcttccattgtgacagtaatattttcactgtaactagaattcacaccagtcaagaagctaatcaaaacaaagatgccaaaagctccatttttcagtctgggcttttattcaatttaattcttttaaatattccttgcttttgactatttttattcaacccattgttaatttacccaatttcacacatttaacaa

SEQ ID NO: 103297 - DNA, 537 bp, Homo sapiens
ttaagcaattagtgtctgttccaagtttgacactgaattggtctacaactccaggcacgctatcccacatctgagtcagttttctccatctgtaatatagggctgataaaatgtgccacctgctcactttataaaaaggggagtgagaaccatgtaagcaacagttactctggttatgtgacattgatataagttaaatgagaatactttttaatgcagtgctcttactttgttttgatattatgaatttcaatcatttgatgaacagttagcataaagataaggagaatgactctccctatgccatcatttaagaattaaaatttcttccgtattaagattggtgttaagatctttagaagcagtgatgacaagaaaatagagtatattttattggttggtttatttactggtagattttacttctgatttatccaaagttttgctcttaattctgaaaattccccctacccttcctactctttaaaatttctcacatacattgccccatttgcctgtcgaatccagccttgtgag

SEQ ID NO: 103298 - DNA, 380 bp, Homo sapiens
ctgctggccgcaggttggacaaacttgctctgggacataagtttaaaagttataggccaagtgccttggctcacgcctgtaatgtctttgcatttcatcagtttttccactgttatctttctgttacagtacacggtcagaataccacattgcatttagttgtcatgtttccttagatgtgaaacaaatttaccaattgtagtagggtatttacgtatagatcggttcgtttgtagccttatagtatctagttaaaacactgttataaagttattgttatgtatccttttgggtgtggtttctttccttagaaaaatacatttaaaattcattcatgttgttaaatgaatcaataggttgtttctcttttaaaaattgag

SEQ ID NO: 103299 - DNA, 583 bp, Homo sapiens
tcaacgctgcctggcatggagaggttggcgcaggctgaggctgctgggctctgaggactcagggtgtgcagcctggaacctgcacctcctaatgaaatatggcctaagcagacaccaggatccagagcccagccactcctctccccaatgctgaggccctcccgagagcccaaggcacggcatggagctcgtgcgtgactgcgagcaaatgccctggcctcaggccaccaggtcaggtgcagcaggtctgtgagggaccccgtgtgcctctcctgtgggggcagcatcagcttccctcctagagaaccacatggagcagatatgggcggtgcagcagagcactgcagcagagggccaggagggtccaagcagtgctgtgatcatccgactctctaaccatgaactcacctagagatgcattccaaccacacctctctaaaatacatgtaggtgttagtggaaaacacctgctatctatttctgacttaataaagtctatttcatacacatagacacatttggtttacaggcagatgagacagtgatcgggcacgtcagcagacagtctccactcaggccctac

SEQ ID NO: 103300 - DNA, 267 bp, Homo sapiens
cattcttggattaaaaaaatactttacagttgacccttgagtagtgttggggtgctgacactgcatagttaaaaatccacatataacggcgtgagccaccatgcctggccggaatttcttgaaataaggcaacaatgaaatttgctgcatcagtcgactcttccttccaggaaagatttctctgtagcatgcagtgttgtttgatagctttttacccacagtagaacttctttaaaaaatggaatcaattctcttaaactttgctgc

SEQ ID NO: 103301 - DNA, 444 bp, Homo sapiens
  misc_feature (22)..(22): n is a, c, g, or t
aggtcgatctcgaggatctttngcggcgctttccattaaactaattactacacagaagtgtggctgagaatctcagaccctcaaacctttcctacagttttccccagtcaataccaaaccctacacaagtgattctccacgggtacctctggcatcgttgggcaatggaagtctccaagaggtaacccagatcttgctctccagaggcggttctagcacatacgacactgatagcataaggagtctaataacttgtggtgtcctagctatgtgtgcttcatcatccagggagtccagtaaaagagaatttctatcatgtttaacaggaagacatatcaagaaagcaaaaatgggcttaggatgactgtgcattctcctacattaactgaatatttctgctatctgataaatttattatatgccagttacaggtttaattctgag

SEQ ID NO: 103302 - DNA, 356 bp, Homo sapiens
tccattgagataattgtggtttttgtctttacttctgtttatgtgatgaatcacatttattgttgaaccagccttgcatcccagggatacagcctacttgattgtggtggataagctttttgatgagcctagtatatttgaccatttattcaaaatagatttattttgatattctcaccacttattctaccaatgtgttatatcaccttagggaatagacaatgcttcctgtggccagatgcagtggctcatgcctgtaatccaagcactttgggaggcctaggcaggtggatcatttgaggtcaggagttcaaaaccagcctggccaatagggcgaaaccccgtttctagtaaaa

SEQ ID NO: 103303 - DNA, 442 bp, Homo sapiens
gaaaagcaacagttttagcagatggagaaatgttgcaatcatcttgagatgagtggagtttgagacacctggacttctaaggggagctggactgttcaggtgtgaatcccagttagagagagatacagggtggaatggggctaagaggaaagatccagaagagaaggggatcctgacccctctccaggtctgctcccccatgggtaaaatgaggggtttggagtttccatttaattcagcacatagttcttggttcctggtatgcacttggccctgctggtgacacaaacaaatcagagtccttgtctacaagcagctcacatttgggctgcaagaaaggccaggagaaaggatagcaacaagaggcacaagcaagatccacagaattcaggggaaaaaaaaaattcttcctgagaccaggagagcttcctggagtggagtg

SEQ ID NO: 103304 - DNA, 297 bp, Homo sapiens
tctctgaattgccagataaagaatttagaaggttgataattaagttactcaaggagataccagagaaaggggaaaaccaatttaaacaaatttaaaaaacaatacaggatatggatgaaaaatgctacagagaaatagatattgtaaagaaaaaacaatcacaacttctggaagtgaaagacacgcttagagaaatacaaaatgcaccagaaagtttcaacaatgatgttgaatgagtaggaaaaagaatgtcagagcttgaagacaaggctttcgaagtaacctaatccaaaaaag

SEQ ID NO: 103305 - DNA, 419 bp, Homo sapiens
gggtaccagaactgcagctgctgctaaggtgacagggctgatgccagaaggccaggcagagccctgcgggctcctgggtggaaccacccctgggcaggtctatttcattattgagatactttaaaatcattttgtaggcaaaattcacagaatctcctcttctcatgtccctttgttgattttctgttatcttttatcagttggctcttgtctgcaccaagttctagccaaagcccaaaacatctagtatcaagggccttttgtgctgccgtgtaatccacattaggccaccccttggcaaaagccagaaatatttttagaacaagtttggagtctgtatgtgggctgaagaattggcacattaaggagatagaaagtctcgggtgacaccaggcatagtaataagactgtaagccccc

SEQ ID NO: 103306 - DNA, 742 bp, Homo sapiens
tgtactcagccatgatagttcttaatcatcaatacatttagctcttgtttgaagacactactctctccccattttcaccatagatttataaatttttgtgctaggagaaaccccagaaacacttaaggctacttgctttatcttgaagatgagacaggggttaaaaccttaatccttaccttaatcctgactttaatccttccagagagagagttcacatcccagtcactattatgccatatacagaatagccctagaacctagatacctaatttaagaattaatgtctgattttttctgagacagatacctatccttctcccgattacatctggtgacgtaaaggtgactagtttaaaatcttactgaaaagaggaaaaaatatatatcattaaatccttcagaaataattatataaatacagaaacaaatttagagccccccttttgaatattgaattgagtatgtgagtaaagagcactctactcaaaatttacaaaacatgtataaaacccaaaactgatgctcccaaatattgtagaatcatcagtagaacatgtaatcagttatttatatatttcaaaataataataactgttatctataaaatatgaaatttatgtcaagattaaaaaaatacaaactatgatcttttttcataatacaactaatgacatgccatctatgcctctataattcaataagtttatgtgtccacctgagacattcttgttcacattga

SEQ ID NO: 103307 - DNA, 856 bp, Homo sapiens
caataattggatgtaacaaaaagcagagtattttgagacgtatattaatgcaaaatattgttaatgtatcagtggattgttcctccaaagtaccagtgccttaacacaacatatctaaaagaacatctctgggaacagtagtacttaatggcaacttgagaattggtttgtgggcacacagccttgtgaagttttgaatactaaatcccttttttaaaaaagtgcttattatcaggctatcaatcaaaagatttgagtctttcagtaaagaaaatttgcttaattttatctagtgccatgataaactttactaaggaagtctcattcagaatatctaatattttggatgtgagcccacactggaaatgccataaccaaaaaagagtgaccctaaagatagaatattcagatctaatggcagatgcttagctatgctgggaaaggaagtgaattgtatattgctctgctgctcacatattcctctgcaataaattgctggcccagtttagtttttatatactcactactatactaatgaggatggctcaattttttatttgaacgtactataatgaatttaaactttcattggtatttatgttttaacaggttttcactatttcaaatatacttcaataaatatccttgtctgtgatcattggtttatgtgaattggaatttcagtagctgtatatacatggaagtacaattgctcatacatcatacactctttcagttatgttagataatactaaatcaaccatgggttctgtataccctactagatatttccaaattgttctcttagactcctgagaactggtaaattgagtgctatagcttcagtttaggtatg

SEQ ID NO: 103308 - DNA, 353 bp, Homo sapiens
ataaaacttggggccagcacttctttgtttctgtataaagatgaaaaaactaggctgcaacatacacatttgtaatacgttttccatcactgcacctggaatggtcttatactaatttgtctccatatttctcctcctctcttggtctctaacctcactgaaggtagagggtggatcttaaatatctttttactttattcccagtaaagggccagaacacttatgttgcatgaatgaagaaatgaaaggaatactaagaaaatggtctaaggagctacaatctcatctggaaaagtcaccacttcagtggtaaaagaataagatactttcgggtatctacccattatagttca

SEQ ID NO: 103309 - DNA, 369 bp, Homo sapiens
ggcctctatggctctgtcgttcccctattggctagggttagactgcacaggctaaactaattccagttggctaatttaaagagagtgatgggatgagtggtttggcgggaaaaatggttatggcagagcaggaaatcggaatgagtcagggtggagagggtaatcagaaaaggttgctttacgaggaagttaaatttaaaagtagaaggcaaagaattgaacatactgacatactgattcttcgaagagaaatttagaactcatatctaacaatcccctcctcttgcattttccttacacctctttctcttcaaacttctttaacatgccttggcttagttctgctcaattttccgaaagaagaagctt

SEQ ID NO: 103310 - DNA, 137 bp, Homo sapiens
gactctaaggatcccaacgctctggaataggggaggtacacaacccacttacaccacggctgttcatctcaagggcaagcaaaaccaaatcaaaggagggcagccagagtattatccttcagaaataatcaagtata

SEQ ID NO: 103311 - DNA, 765 bp, Homo sapiens
tgaaaggttgcctcatcgctggaaatatgtgtaatgttggagcaatgctagattataaaatttatcgttaattaataatgaaacacacaaagattgagcagttgttgtcatcagaaacatctaccaggaacttacagggggtcatgagatagctctacagcaaacaagaaagagaagaaatgcttcttgccctggcagaattataagtgggcacacttgctatgttatacaatattaggcatgcagtagaaaaaaacaaggaaccatacaaatcaccaggtgtctggtcacaaactctggcagagcttcacaccaagcaggcaagctacaagatttggaacaacacagcttatagatgaaagttaaaggcatttaatttacttgaaaacagaggaagaaaggaccaacacataaaagaacattcattttgagggatgagcaattcaattgagttcaagggtagagcaatggtgacttctcagccacctgctatcaatttgacatgtattaagcacacgactgggttaataaaagtgggagtttgggttaaaatgccctttgagaggccctgaaaaaatgtttgtctaagaaagttgaaactatggaagaaaaggtggtcaacttcagagacatagatgtaactcctgcaacgtgcttcaacatggtttagccaagcggaaactttttcttcctagtgtatgctctttaacgtatttaagatgtccttaacatctttcagaaatctacttttctaccaatattata

SEQ ID NO: 103312 - DNA, 1813 bp, Homo sapiens
aagaaaatgaatctgccacgccattgcttagaccctttaatgactcttgagtgttcttgggatgaggtccaaatttactaataaggcctgcgaagccctgtgtaattttgctcctagttatggctggcatctgcaccacaactacagccactgccacctccccctgccacacacacattttaaaagtaacaatagtagtgttttctgtgttttgcatatgcagtcttttctcatctcccagccttcttgagcttttcctctgcctgagatacgctcccactcacatagacattgggggcactaaataaaaatagctgtttaattgaattggaatcgttccacttggaacccaagtttggaaattttgctacttcttgttaagctaggccttttattcttgaagttgctatttctcatacaaactcattttatgcattagacacacagtcactattgttatggagaacatagttgtatcagaagaggtatagctttgggtgtggatgtgcgtgtgtcaggggaaagatattctgattatatgatgattttcataaaatatagtatgctgagtttccgaaaatcctaaatgacttagaaatggtgctatatgtggtttgtttgacccctgcaaatctcatgttgaaatttgatccccattgctggaggtgttttgagcatggagcggatccctcatgaatgtcttggcgttgtccttgcagtaatgagttcttgctctatttttcctcccctggaagctgattgtttaaaagagcctggtatcctccctccctttcttctttgcttcctctctcttgctgtgtgatctctgcacacaccagctcccctttgctttctgccatgagtggtctgaggctctcaccagaagccaagcagaggctggcaccatgcttctggtacagcctgcagaactgtaagccaaataaacttcttctttgttttttttttttgtttgttttgtttttttttcagtaaattacccagcctcaggtattccttaacaacacaaatgggctaagacacagggtcatagggatagcaggcacctgagccaagccagaacttagatctcaactgttaatgcaggatgatttgtattgaaccatgaattttacactgcctctcaatgttggtgtcagcatttaaggttatttaaaaaatacaacctgaaggttacataaagtttcatttaaaaaataagaccttataagtctacttttatttccagtggacagcaactacttaatcgtcttaaaactttcttcttacaatattactttacaatattacctgttggatttattatctgtgtacaaatcagttagttgaagggccaaagaataaaggcattttgtgaattatgaatagctattttgaaatggtcatggagactagctactctagaaaattgggagaatatactgtattaagttactatctggtataacttcaattaattgtgaaaattgtagcagagatctagatatagtttatgaacttctaaagagacattaaagggaattcaagtacttgtgtaaagatgaaccaaggtagagatgattgtgaattggtgatctgctgtatgttacagttatgtaatttgacttgtttcaaaattattaaagttttaagtgtatgcattctactggtcaataagtaaatatattcaggctctgaatgtagacagataaatatataaatatagaaagtacatttgttagaatacaaacaagaataaaaattgagtacagaatgaaaaccttattaaattttatcactccataaattatttgtc

SEQ ID NO: 103313 - DNA, 159 bp, Homo sapiens
tggaggtgtggggccagggtgggattagcaaatggctgagttcatccaccagaacaacacagagcttaggaaatctcattacagtgttcagtgttggcagaaatcttgagctattgcagttcctttgcactgtacaaatggagtggtaaatgtagtggt

SEQ ID NO: 103314 - DNA, 569 bp, Homo sapiens
agagatgaagggcaggacatctgttccaaatggagtgcacagaagtggtctctccggccaggcctgacatgagagaggacccatctcccttgctgtggcagggcaggcatgtatggttgtgtggtctgtgcatagtagcctagccagggaggcaagttccagtgcatcttgtttttttgagccatgtaccctgatgagagactgaaactgcccagaggaatgggtgtctcgtgattagctgaaagtctacatcaccacacagtccccgcacagtgcagccatttctcactggaggtatcatttttttctttttttttttttttttgagactgagcctcactctgtcacccaggctggagtgcagtggtgcaatctcagctcactgcaacttccgcctcccgagttcaagtgattctcctgcctcagtctcccaaatagctggaattacaggtatgcaccaccacacctggctaatttttgtatttttagtagagatggagtttcaccatgttagccaggctggtctcaaactcctgacctcaggtgatctgcccacctcagcctcccaa

SEQ ID NO: 103315 - DNA, 1411 bp, Homo sapiens
gccggaagcctgcacagaattcaagaattgaggtttgggaacttctgcctagatgtcagaggaagtatggaaacagctggctgtctaggcaaaagtttgctgcaagggtggaaccctcatggagaacgttagggcagtgaggaagggaaatatggggctgtagcccccataacagagtacccactgggtcactgcctagtggagctgtaagaagagggccaccatcctccagatcccagaatgtagtcccactgacagcttgcactgtggcctggaaaagctgcagacactcaatgccagcccacgaaagcagccaggaggggggctgtaccttacaaagccacaggagcagagctgcccaagaccatgggaacccacctctttcataagcgtgacctggatgtgagacatggagtcaaaggagatcatttgggagctttaagatttaatgattgcctcactggattttggacttacatggggcctatagcccctttgttttggccaatttctcccatttgaaatggaatcatttacctaatgcctgtacgcccattgtatcttggaagtaactaacttggttttgattttacaggctcataggtggaagggacttgccttgtctcagatgagactttggacttggacttttgagttaagactttgggggacagttggaagggcattattgtgttttgaaatgggaggacatgagattggggaggggccaggggcagaatgataatggtttggctgtttctccacccaaatctcatcttgaattgtaatccccataatccccatatatcgagggagggacatgttgggaggtgactggatcttaggggtggtttcccccagttgttctcatagtaatgagttctcacaagatctgatggttttataaggcagttttccctgctcttgctcgctctgtcttgcctgccgccctgtaagacgtgcctcttccccttctgccataatggtaagttccttgaggcctccccagccatgcagagccatgagtcaattaaacctcttttctttataaattacccagtctcgggtagtatctttacagcagtgagagaacagactaagacaatcagcttctatgttgttggcagttttaccatgagcatggattcctatattccttctgaaattttctttaaaagtgtaagcttatatagaaagtatattcgacactcacaacccttcccagccataaaagacagtggggtgtgagtgtgtgggatgggatgcagcaatggcagcccagtaacaacagcagtgcgtgccgggaacagctcagcagcagggcaggtcagggctaacccagttaactcaatgcaggctccctacaccaagtgatttggtttgcaaataaatattatttgtttctgtttta

SEQ ID NO: 103316 - DNA, 404 bp, Homo sapiens
tggcctctgtgagccccgggagtccgcagggagccaggctggtgattctacaccttcccgaggaggagtcccacctcccggttgagcagactgctcctgatcatcctctccagagagtgggtgtggggataacttcagccagtggctatgcttcagtcatttctgccaggtgtgacatgactgcctggcctggcgttttttcacatagcagcttgccttgcctccctccagcagctttggtccctattttagcggatgcctcttctgagagggaagtgcattggacctggaggtggaagatctacgcttagcacgggcctggctcctctctcattgactggccttacgccgaccacaaataattccccttacccagagtctttgagggtgaaatgaggcgatgg

SEQ ID NO: 103317 - DNA, 382 bp, Homo sapiens
gaaacactcttccgttcaccacggagtgaaaatcacgttctaaagacttagtaaagaatgccaatttaatttatttgaccctagggcgaaggacaggcaggaacaaaaaatcttgatttacaatgtagatttaatcatatgctgctgttgatcatcctttcgtagtcattgaaggtatattttccttcctcctttctcatctctgtctcttccatctccagcaccttagctttcagttaaacatttttatgattaactcagaaagtaatcttagccgtaaaccttcaagttcagatacaggctaagaaagagagaaatattctaaaatgaatccacctagcaccaggatgactatcaggactgtaattctggttcggttgtg

SEQ ID NO: 103318 - DNA, 130 bp, Homo sapiens
aactccacctcgcaacattctatggctctcacatgagagctgagggtctaagaacaaagaacattctctttccaaatgagcaagaacaggaaatcccacacggtgcccttgtcaactaagctgctgagag

SEQ ID NO: 103319 - DNA, 298 bp, Homo sapiens
cctctcagattcaagtgattctcctgcctcagcctcccaagtagctgggattacaggcgcccaccaccatgcccggctatttttttgtatttttagtagagacagggtttctccacgttggccaggctggttttgaactcctgacctcaactgatctgcctgcctcggcctcccaaaatggtaggattacaggtgtgagccactgtgcccagccaggcaaaggtttttaaagtcttgcaagatctacatgattcctaccctatctcctttccagcccttccccatactgatacaagtt

SEQ ID NO: 103320 - DNA, 469 bp, Homo sapiens
ctaaaaaacattggcagtcactaatgcttaggaagacacctaccctgcatctcactccatctttggctaccctcgccctgctcatttgactctcctcctgacccctcctcttgcttgcttatacccagccccatgaatagtagtgaaagactactcacagatactatgtgctttcttatacaccatgagaactgaaccttccctctacgcagttgcaccatcaatccccattacaacctctaatggctgctgcctttgctggatctctaggattttgggtgcaggacccctctttcactacaccctctcaccttttcactttacatttccagttatgcctgacacaagctctcttatttttctgtggttcttccacgtacacctgccaactggatgggcacatgtactctagtcttccttacccccaaaatccagtttgcaaatgggaacgaacaactgcctgtccccc

SEQ ID NO: 103321 - DNA, 483 bp, Homo sapiens
ccagtcttttactgtttaactgtgatgttaaagagtgatggtgttagctgtgagcttttactagatgtcctttatcagactaaagaggttcccttttattcttagtttattgaattttgtatcatgcaagagtgttgtattttgtcaaaatgctttttctactctgtcaaaataactgcttttttgtctgttaatatggtgtattgcactgatgttgaaccaccctggtgttcttagggtgagtcccacttggtcatggtatataatcctttttctatgttgttgggtttagcttgccggtattttctcgagttttgcatttatattcataagggatattgctccattgttttctcaagatgttcgtttggttttcgtgtctggctaatcctggccttatggactgagttaggaaagtcattttgaatgactattttgtaatcattcttcgaattactcctaaatatatcttcagattctaat

SEQ ID NO: 103322 - DNA, 292 bp, Homo sapiens
tcctgtatggtttctggtcttcttatcatactaaggaaggtcttccacactccaagataaaaagaacaaaaaaactgttttcttttagtatttttataatgttatatattaaatctctaatccactttaaatttgttttttagtatgatgtaaaacagagataacagcagacaaaaattacggtgactatccagctcatgacaggtctcccagtggctatctatggctgtgctactcgcctcctttcctggggaggctttcttttcacgttcatccttccccaaatccacac

SEQ ID NO: 103323 - DNA, 471 bp, Homo sapiens
tctatgaaatgcagatgatgataggaattctcataggttatttctttcattcaacaaatagttacagagccgttactcctccgggcgtttgagaacagagcacaagcttgacaaggtccctgcctccgtggagtgtgcaccacaaggtggagagccgagaataagcgagtaaacagctgtgtaaatacaaatagccctgatgtgggcggaaggaggacataacgttacccggaatggagattttcacggagcagggagcagttagggaaatgaagactgggaaggactgggttggtggcgtgtgaaagggcagtttttacgctctccaagggctgatgagcacacggggctgggggtaagagaggctctagcaatggcccccgcttcccaaccacagaacattggttttggaaaaccacctgcattaatgttggctttttcctatctggactttgcctattgtctgagttt

SEQ ID NO: 103324 - DNA, 683 bp, Homo sapiens
agagtaggagtgatagcttcttcaacactttggagcaggaaggaatggaagcaagatacagttggaagagggtgtagtgggtgacttgatgaatcgagttcatggtattatttttgacttggattctccttcattggcatgcttctgagttggcgtcattgcctctgccctgatccttcccttgagtggggctgttcaccagtgcagcggccagtgagctctttgggcggggtgtgtggcatacacagtgcgatgtctggaatcttacacgtgcttacttgaggcattcttactccaccggtcgagtgttctcaaagaaagatgatggagctgctaaaccttgcccattttgatctgttatgtgagacttgcctttcgccttctgtcatgattgtgaagtgtccccagccatgtggaactgtgagtccattaatcttttttccatttaaattaccctctctcaggtatgtttttgtcagcagttttaaaacagactaattttagaagcttggccctagttctttgtaggcctttcaatattaaaaatgtccaatattgaatattaaaagtattcagtatttctattaaactcttgagtcattggggttccaatcagggttgtcaatatgtactgcccctcttccttttggtaatggagtttcccttgtttcttttctttccct

SEQ ID NO: 103325 - DNA, 799 bp, Homo sapiens
cctggcatacaacttttaaaatttttagaatttgaaagtgatagtcttttcatatcctaatgagttcaactatgactggcatccataggtagtagcttcaggatggggttggtcagcagagaccaaagtaggatgacagggtcgcaaccctacttccaacctctcgggaagggagaggggctgaaggttagtttgatcatcagtgccaatgatttaatcaatcacgcctatgtaatgaggcttccataaaaacccaaatggactggctttggagagtttcaggatagctaatacctatcctgaagggtgttgttcctggagagggtatggaagctctaagccctttccctcataccttgccctatgcatcgcttcatctataacctttgtaacagcctttacaattaaccagtaagtgtcttgcccagagttctctgagctgcttagctaattaacaaaacccatggagtgagttgtgagccctagatccctacaagggtatagaacctgccaaaggaattcactttgtagactggtgaaaccacctttgcaaaaattataactgaggaaattatgacagtgaaagagatcagacctaattgactccatcttgtatctaacctttgggctgttcttgttcattgctgggtgtaggtcgaaataaccttgggaaggaattcagtttacggtttgactctgaaacaaaactggtaacagccctttctcggaaagacccccttcttgcttggggaccagtctgcctttgaaggactaacaaattagctacaagattagaaat

SEQ ID NO: 103326 - DNA, 270 bp, Homo sapiens
accttgccctatgcatcgcttcatctataacctttgtaacagcctttacaattaaccagtaagtgtcttgcccagagttctctgagctgcttagctaattaacaaaacccatggagtgagttgtgagaaaatcgatttatagcccatcagtcataatcacaaaacaacctgggaaacttttccctagatccctacaagggtatagaacctgccaaaggaattcactttgtagactggtgaaaccacctttgcaaaaattataactgagga

SEQ ID NO: 103327 - DNA, 1049 bp, Homo sapiens
cgcgctgcgccccctctgcgccggcctctgcggctgcgcgctggcggggctgaggccgaggggtgggggtcgcgccgggggccggcggagctcctgtggtggtagcagcggtagcgggagacggagcgagtccagcggccgcgggcagacccggagggaacggaggaagcggtcatgtctcgctacacgaggccccccaacacctccctgttcatcaggaacgtcgcggacgccaccaggcctgaggacttgcgccgtgagtttggtcgatatggccctatagtagacgtttacattccacttgacttctacactcgccgcccaagaggatttgcttatgttcaatttgaagatgttcgagatgctgaagatgctctttataacctcaatagaaagtgggtatgtggccgtcagattgaaatacagtttgcacaaggtgatcgcaaaacaccaggccaaatgaaatcaaaagaacgtcatccttgttctccaagtgatcacaggagatcaagaagccccagccaaagaagaactcgaagtagaagttcttcatggggaagaaataggaggcggtcagacagccttaaagagtctcgacacaggcgattttcttatagccagtctaaatctcgttccaaatcattaccaaggcggtctacctcagcaaggcagtcaagaactccaagaaggaattttggctctagaggacggtcaaggtccaagtccttacaaaagaggtccaagtcaataggaaaatcacagtcaagttcacctcaaaagcagactagctcaggaacaaaatcaagatcacatggaagacattctgactcaatagcaagatccccgtgtaaatctcccaaagggtataccaattctgaaactaaagtacaaacagcaaagcattctcattttcggtcacattccagatctcgaagttatcgtcataaaaacagttggtgaacagcaacagaaagagcaccacgccgtctttaatataagttattaaactctcattatgttaaataaaaattctttaaggcatacagaaa

SEQ ID NO: 103328 - DNA, 1294 bp, Homo sapiens
cgcgctgcgccccctctgcgccggcctctgcggctgcgcgctggcggggctgaggccgaggggtgggggtcgcgccgggggccggcggagctcctgtggtggtagcagcggtagcgggagacggagcgagtccagcggccgcgggcagacccggagggaacggaggaagcggtcatgtctcgctacacgaggccccccaacacctccctgttcatcaggaacgtcgcggacgccaccagaagatctaaagcagtccacagtagctggcaagcaccccccagtttgaaccaacctgttagctagaatccaagcataaacccagcaggcgagacaaaaggcacctaaagttcaagcatcaaggagtaaagagggagggtggacacagatataaagacctggaagaggggaagtctttatcaagcaaaagacaaagccaacaccaggttgagacttcggctttcctacatttactcagagttccagagtcaaagccaagtctgattttgttggttctgcgtctcttataaagtccatcttgcaagccttaaagagtaaaggtcaaggttcaagatcaagtgacattgagtcaatttgaagatgttcgagatgctgaagatgctctttataacctcaatagaaagtgggtatgtggccgtcagattgaaatacagtttgcacaaggtgatcgcaaaacaccaggccaaatgaaatcaaaagaacgtcatccttgttctccaagtgatcacaggagatcaagaagccccagccaaagaagaactcgaagtagaagttcttcatggggaagaaataggaggcggtcagacagccttaaagagtctcgacacaggcgattttcttatagccagtctaaatctcgttccaaatcattaccaaggcggtctacctcagcaaggcagtcaagaactccaagaaggaattttggctctagaggacggtcaaggtccaagtccttacaaaagaggtccaagtcaataggaaaatcacagtcaagttcacctcaaaagcagactagctcaggaacaaaatcaagatcacatggaagacattctgactcaatagcaagatccccgtgtaaatctcccaaagggtataccaattctgaaactaaagtacaaacagcaaagcattctcattttcggtcacattccagatctcgaagttatcgtcataaaaacagttggtgaacagcaacagaaagagcaccacgccgtctttaatataagttattaaactctcattatgttaaataaaaattctttaaggcatacagaaa

SEQ ID NO: 103329 - DNA, 940 bp, Homo sapiens
aaaaaacaattttagataatgctggtctagatgatgttctttcttttgaaggtttcaagtggatttctgtaggcaaaatattttaatccagctattcatatttctttgccttatttctaaaacacttcaggcctgaggacttgcgccgtgagtttggtcgatatggccctatagtagacgtttacattccacttgacttctacactcgccgcccaagaggatttgcttatgttcaatttgaagatgttcgagatgctgaagatgctctttataacctcaatagaaagtgggtatgtggccgtcagattgaaatacagtttgcacaaggtgatcgcaaaacaccaggccaaatgaaatcaaaagaacgtcatccttgttctccaagtgatcacaggagatcaagaagccccagccaaagaagaactcgaagtagaagttcttcatggggaagaaataggaggcggtcagacagccttaaagagtctcgacacaggcgattttcttatagccagtctaaatctcgttccaaatcattaccaaggcggtctacctcagcaaggcagtcaagaactccaagaaggaattttggctctagaggacggtcaaggtccaagtccttacaaaagaggtccaagtcaataggaaaatcacagtcaagttcacctcaaaagcagactagctcaggaacaaaatcaagatcacatggaagacattctgactcaatagcaagatccccgtgtaaatctcccaaagggtataccaattctgaaactaaagtacaaacagcaaagcattctcattttcggtcacattccagatctcgaagttatcgtcataaaaacagttggtgaacagcaacagaaagagcaccacgccgtctttaatataagttattaaactctcattatgttaaataaaaattctttaaggcatacagaaa

SEQ ID NO: 103330 - DNA, 411 bp, Homo sapiens
ttcagatttttgtacctcttaagagctgtataactcagaccaaatatgcagtgtatttttcagaactgatccctatatgtctagcaaagtaaaaatttttggccatatattctagtataacaaatattacaaacttgttacttatgtttgaaccaaaagcatgcataataaaatgagaaatttttttagcttatctagtaaaaatataactaatgttatgtaaagtatgtaagttcctgaaagtgttatttcctgatctcttattttgtgtgaaatatatgctctaacattatggatgtttgcaggtctcgacacaggcgattttcttatagccagtctaaatctcgttccaaatcattaccaaggcggtctacctcagcaaggcagtcaagaactccaagaaggaatttt

SEQ ID NO: 103331 - DNA, 183 bp, Homo sapiens
taagccatcccagagatgaaagttacatctactttttgcagtcttttcatttccagaaccctccacagttagaattgtgtatgctgacagtatgcagaatctactgaccttaacatatctctgaaagacgggtcagggtaagagagtgcagaaacaaaaggcaggacttatctttttattgag

SEQ ID NO: 103332 - DNA, 1091 bp, Homo sapiens
gtctggactagaagaagtccaggtacctttctgacagactctggggtgaacacaaatggccacaggaccaagccagtgacctgaatgagtcagtcattactcagctccagccaattgcttgggaatgtgggtccagcaaggccagatccttcttctgatttttcaagaaaagacagacttgtggatttttaaaaatatggactgtcctgagttttaaatatcatgcaggccaaataaagccatctgtgcctgcagggtcttgattgtgacctgccagtttgacccctctgttccaggattctcagggttatgtgcacttttgtccttcacaagtaagataaatgaaataggtagggattttcctcctattcaacagatgggcaagtcaggacaccgggaggttaagggacttctagatagacgcactcttataatataaggtaatgttataacagacaagggctagaatcagggtacgtgggtgaataggtagttatgtccctcggctgctccactgacatttcattttttagctcttctcttaaaataatatttgctgaagggagcactgggaaggccccatacttcctatatgactggagcacggaattctgcctcccaggggctctggggtgaggggtatcctccctgcaccgctccgggggttagggtgcccctgagttgtgccttactgagtctgcacatcctgcacagagctcctgcctggagccattctaaaactcagccgctcctattccccaaggatctgtgtctttaggcctccagccatgcctgaaatttcaccattataagcctgcttttgggtgaaggcttcacaggcacccaggaatcactttcacagtgaacacaggaaaaggaaaaaaaaccacaggaatgcaacctgacatctctctcaggctctaagtattggactgccaggacttgggtactgaagaaattagttttgccacgaaggcaacctcaaaaagccagtcatcttcaagccacatttacagcactccgcagtgcgacttgaggcctgtctgcctagcttcctgcttcttggccttcctgccactctttatgctgac

SEQ ID NO: 103333 - DNA, 353 bp, Homo sapiens
agaaggacctgagttgtggccaacaacaggctgcagaaaggcaatgccatcctgaagatttctcaactaagagtctgcacccatgacagcccaccgagaccctcgctccaagtttgtggagaaagggaacccgcttggcagcatgtggaaagaccccacgatgagcagcagacacagcaacgctgcctcctacatctcgacagcatctgtgtaagactcgctagcatctggtgcacacactgtatgagacagcaacagccagaacagacagctttacgttgatgaacacacagacggtggcgcatgttcagagatgccgaggggacgccgcagttcccaaaatcacctctgcc

SEQ ID NO: 103334 - DNA, 353 bp, Homo sapiens
gcctgccaaagtgctgggattacaggtgtttgccaccgtgtctggcccatgtctatgttttcaaaaggttaagtcaacagggaaggagctaggagggtgaggttgggccccctgttgctttctgcttagcagctctgtcctctaaaaatgaactctggtccacagttttgatatgaaccattcctggctataagcaaaatggtactagaaatagctttcacaccgaggcacaaaactgactcaggctagctagataagcctcttgttaatgtcacttgttaaagttggtgacactagccacaatgagtgtattgcaggaaatgttcattaagttcctgaccagcttctataat

SEQ ID NO: 103335 - DNA, 233 bp, Homo sapiens
tgagacagggtctcgctctgtcacgctggctggagcgcagtggcgagatctcagctcagtgcaacctctgcctcccaggttcaagtgatctgcctgcctcagcctcccaaagtgctgggattacaggcatgagtcataatcaatgtgatgaggttatttgaaaatggctcagcattaagtaaaatttaaaaatactacactagccgggcatggtagctcatgcctataatcct

SEQ ID NO: 103336 - DNA, 367 bp, Homo sapiens
aatcctcacaacaacctctatgaaattattattatggttaaggaaacaagcacagaaagagtaaaaattaattatttaagaccaattatttaattaagactagccaattcaataagtactaactgggtgtcatatgtacacatacacatatgtataaatatgtacacatgtacatatacagtcaaatatgtgatatgtatcactatacacagaaatatatacacacacagtgacatatataaatcactgtgctgggtactataaggcatagttctcacccttaaaacatgtctagtcctgtgcgggaatacctgcatctagatacctaagggcatgacatgatcaacttcataaaagatagtacagc

SEQ ID NO: 103337 - DNA, 337 bp, Homo sapiens
accctttctttttaaaccccctgagtaaatagcatttaagatgggcaaacttgatattatatagtgccatatgccccaagcagttaaatttgaattgttttttattattaaggaaatttagagctagaatgacctagttatttcagaaatagaatgatttagatttttgaggattttgatagcatctaagtatatacctataatattggcttaattttaatgaaagttgttaaataaacattttccttgaatgtggacactacttatgtttctagtgaattttattcacttaaacatttttttccaaaaattttaagtgttaatagatgcagaattc

SEQ ID NO: 103338 - DNA, 457 bp, Homo sapiens
gcacttcaccagcctgccagaggggtctatggcacagaaatgaggaagacccccagtcctaagtcagtgctttgtccaagttcccctttgatagcttgggaagtcctcactcagagggcagctggggccagcccatgttcaaacaggctctgacctccatgggcttggctctgtttggtggaaagagcttccagcaatcccaagttgtcacaggggaaggcaggtgttccataaaccgctacagagacagcaaagcactggctgagaggaatggtcctattcaggctccaggtaaagctgtggccggcctgagaggctttaatgcctctgggcaaactgatgattctggaaggtgcagggggcacatgctgaggcctccctgggatggagtgggctcttctactcaaggagaagacacctatcatcctcgatatgccctctctgggcactcagcagc

SEQ ID NO: 103339 - DNA, 762 bp, Homo sapiens
caaaactctctctcctcctcctttgtgaggcattaagagtttgttgctctgtagaaacataggccagaaggagatgaatgcaattgttctctggcaggaggagacaggggatctgaacattaattttattatttctctaatccaactcttccctttttcttaggaggttaatagacatctataagagaatattcatggacaagatttcctgctggatgcaattcaccttgacacttcttgctctcagcctgcactgactactgttttaacttctgttctagattgtatatactttgctcccattatcccaaattctgtggatgggggagcccttcactaggaaagagaacttgtacagtacaaagtgccttcaagaacactgacttttgtttttttaaacatccaactcttttaaaagataaagaaatatacaatctttctagtttcaccttatttccaaatagcacatttttcattccaaatttctggtcagtggctagtaaaaaattctaagagatcctctcccatcctctttaaatgtacaaggatgcatttatttttctcaacatcactttgttgagaatacattttacattgtttcttcattcttcttcttactgaggtagacattcacagctatatctgggacttcactatcatctctactcacctcgaagatgactgtgatacacttctctcaccaccaacagcatttgaatccttagtctctcactagctatgtgactcttaagtaacctcttt

SEQ ID NO: 103340 - DNA, 534 bp, Homo sapiens
aatggtgggcaggaatcattcatctttatatgctttgctaccaaatggtttctcatgcctaaaattacccccatcatgtccaacttgcttaccttccccaataagttcaccctaattatttgaaatggcataaatgatgctctcctctctaatcagaactggttggtaaatatctctatccaatccctcaacagttggtgtttcaggcagatagcaacaaaattaacatattgataaaccaaccagtgaaatccacctaattttgttgcttggaaggctgtgaagcattttaggaaacaagtgagagagcccaaaagctcatgatttaaatttttagtcattattacataagctataatgggatcaggtagacatcctagttttctctcctatatctgcagatgagaatttttcaaatgcaaaggtggccagatgtggtggctcatgcctataatcccagagttttgggaggctgaggagagcggattacctgaggtcgggagttcaagtccagcctgaccaacatagagaaac

SEQ ID NO: 103341 - DNA, 909 bp, Homo sapiens
ccattattattaaatatataattcttaaatattaagttaaataatattacatattattagatattactcagttatcataaatgccttttctgtgccaactagcgtgctagggatgaggaataaatgagaagatataatatgatgtgagaaaggttataataaaggtatgtacaaacagaatgcttgcaactgaaactgcagaaacttcatttacttggggctcaacaggtatgtgcacatgagattttgtaacaggtctgtccatttataaagagtcatcatgatagtgacttttgagtgataagcaatgacagcagacaattctagaatggaagctctatgtgggcaggaactttttaactatttgttcactgctgagctctcaacactgagaaccatgcttggcacatagaagtcactcagtaactccctgtcgaatgaaagaagccgcccgtccaggagtcagcaatctagcctgcccatctgtttacttataccctgtaagcaaagatagtttttacatttctaaatggttggggaaaaaatcaagggaggaataatatttcatgacatagtaaaattacataaaattcaaattcccttatctataaattttattggcacacatccacatcttttcatttgcattttgcctgcggctattttcttgttacaacatcagggttgagtagttgtaaaaggaacctcgtggcccacaaatccgaaaatagccagatagtaatggctggccatttacagaaagtttgctgatcactggactatgctgttgtcagagtggctatcatgagattatgttcaattcagttgttctctgccctcaccaattccgtcaccatggaatcccctactgctcctcatcccactggacccagaaacttctataccatc

SEQ ID NO: 103342 - DNA, 380 bp, Homo sapiens
gaggtgacaggctctttcaaacaaccagcccttgaatggcctaatagagagagctcactcattaccgtggggagcgtaccaagcccaaggggtccacccccgtgacccaaacacctcccaccaggccctacctccaacaccgggggtcacatttcaacatgtgatttggaagggactcatgtgcaaactctatcacccaggtaagggaaaaataatttggttcatgcagcaaagggcttgcttgaaaccacagatgtggaacaggaagtttctaaagctgtaagtatttaattctttactatgtggtggtactatcattatccccattttacagatgggaaaactcaggcaaagaacgttcaaatacattgcccaggatt

SEQ ID NO: 103343 - DNA, 221 bp, Homo sapiens
ccttacctcagtgcattaaaagtttagtatatgtttatcctatgagtcaagtttgtacctttttaaaattatactttgatactttttcataccacactccaccatctagctcctacaaaggatatggtacaataatgtgtcaacacgtgtagagaactgggctgaaatttttacatacaaatgcacttacatttggtaatctgtagataatgatttgccac

SEQ ID NO: 103344 - DNA, 1144 bp, Homo sapiens
gcctcccaaagtgccgggattacaagtgtgagccaccacgcctggccccatttctttgaacagatattagatattgctaaggaaaataggcatatttttgagaaataaatattttctcttaggccagctcttttagaattgctagactagtaatctgtcttctgtgcttttactagctattttatagagatgcttagaaaataccagtatttaaatacattttaggacaaattttggttttatgggtttatggtaaaaaattaagtatctttaacacttagtaaatgaagtagacatctgtttatgtttaactggtttgtcatttttgtaatgcaagccttcaaaaactttttgaggcctaagggaaattaatgtgttctttttcaatgaaatttgataatctagagcagtgatcagcaaactttttctggcagatactaaatattttaggccttttgggctttactgtctctggtgcaattactcaactctattgtagtgccaaagcatcgacagataatacgtaaaccagtatggataaggatggctgtgttccagtagacctttatttatacaaataagcagttggctgaatttagtctgcaggctatagtttgttgactcctggtgtagagcagtgatgtccaatagaactttctgcagtgatctgaaaatgtttagcatctgtgctgtccaatatgctagccacaagccacacgccacacataggtatcgattactggaatgtagttagtgtgattagaaactaattagtagctatcacattggactgtgtaggtttagagtctttggatgagtggcttagcaacaaataattctctgatccatcaagtgacctttcaataaaaatgtttaaatcagggtgtggataaataggaaaactgttatgtcttttttcaagttacaggagaaatattaaggctgaaatagcttgataaagcaaaccaatacttgaagaactatcaatttatgaatggaatcaaggatatttaactactttttcaaaaaagtattttatggccggatgaggtgggaggattgcttgagcccaggagtttgaggctatagtgagctatgatgatgccattgcacttcagcatgggcagcagaacgagactctctt

SEQ ID NO: 103345 - DNA, 333 bp, Homo sapiens
gtgacaggagatgaatccagaaaggacagaagtcaaaccagaaccaactttgccatctttctcactttgaaccctggggctgggtgtacagaacctgctgattaagatgaatcaaatagatgctaactctctctcagaattgtatcatgttgtgaccagcctgggcaacattgtgagaccccgtgtctacaaaaaattaaaaaataattagtcagacttggggatgcacacctatagtccctgctactcaggaggctgaggtaggaggatcgcttgagtccaggagttcaaggttgccgtgaactatgatgtgacagagcaacaccctgtctc

SEQ ID NO: 103346 - DNA, 370 bp, Homo sapiens
ctcaggagagttctgaaattcatccctgaaaccaggctctctgaggagccttccttatctgctgttcctgacacacatacaggccattttgttggctgtgattggctcctttctgtctgagctctgcaaaatggtcttgagcagtgattgctaattttccttgttttcctgcttccaagttccttctttggcacagaaatgaaagaacagagtagctgagtggtgcatgaaaaagaccaaagagaggaaatgagaagccagcagaaaagcagacaaaataaatctctccactgatagctgtagtgagaaaagtgtggttgttctatagtaattcaaagaacttggaaacttacgagaagttctcaagaaa

SEQ ID NO: 103347 - DNA, 239 bp, Homo sapiens
acctcccgggttcaagtgattctcgtgcctcagccttctgagtcgctgggactacaggtgcccgccaccacgcctggctaaatttttgtatttttagtagagacagggtttctccgtgttagccaggatggtctcaatctcctgaatatgtgatatgcctctctggggacctgtggaatgacattttgcatgtcagaccagcacagtgcttttattctagacttttctaaaccttcccc

SEQ ID NO: 103348 - DNA, 696 bp, Homo sapiens
acagttggtggtatttgaggagaaggtgaagattttggttggaagagggaccagcagacaaacttgttctcttgtgtataaaaagccataacacgccccacatccctcaagctaggaagaaacctgggctggatggtgacccactggagaagctgtgacatcctagcatggggaagagtaccaggatgcccactcctcttccccaggaaccaccaaggagcctggagcctggctttatctcagccctgagtccccctctcccggtgcgcacacccctaactttttttttttagatggaatcttgctctgtcgcccaggctggagtgcaacggcagctcactgtaacctccacctcccaggttcaagcgattctcctgcctcagcctcccgagtagctgggattacaggcgcgtgactccatgcctggctaatttttgtatttttagtagaggtagggtttcaccatgttgaccagggtggtctggaactcctgatctcaggtgatctgcctgcctccacctcccaaagtgctggaattacaggtgtgagctaccgcgcccggccaatctggggctcctagctttggtgcaccaactactcaaatccccaacttctctccaagaggaatttcaagaaacactgaccaatctggttacagaagctgaaggggccccaaccaggctgcaataaacctgc

SEQ ID NO: 103349 - DNA, 518 bp, Homo sapiens
ctggtttatgatctatcatctaattcgtgccccagtctcattatctggcaatgtcagggcattccttcaggatgagaaaaatgccatgtgacaaaaagatgcctagctcccctttaccatcacgtgaggtcctgcacacatggtggagtgggagagtggaaggggcacacccagtggtgccatttgtattctgcctcatctgcctactaacgatgtggtcttaacaagtggttgaatctctatgagccttagtttcattagctttttttttttttttttttttttgaaactgagtctcactctgttgcacaggctggggtgcagtggcacgatcccagctcactgcagcctccacctcctgggttcaagggattcttgtgcctcagcctcctgagtagctaggattacaggcatgtgccactacgtcctactaatttttacatttttagtagacacgaggttttgctgtgttaaccaggctagtcttgaactcctggcctcgttatccgcccacctca

SEQ ID NO: 103350 - DNA, 343 bp, Homo sapiens
tatcaaaatgctattatttcaagttgtatataaatatacaaatatttttaagacaatgaaaaagtttttttttgtcaaactgtttttgaaatcaggcatgcattttacacttgcaatcaattcagactagccacatttcaaatattttataaacaccatatttaacggctaccacattgaacagcacaagtctaggtactgtagggactccaatcctgggatttagtaactccagtaccccacaaggataaggactgagggagggaaatggagcagtactttaaaatatcatatagttcagaaccagtccttagtgatagactcaaatatttgacaaaatatc

SEQ ID NO: 103351 - DNA, 978 bp, Homo sapiens
aggtggtattccaactcgggactgcctcaacgcccggcgctgtctcctctgctactctgtttcggtgttttagcagaggcagatagtgagggcggcacagtgccacggatgccgctggactaagcgctaagcgggcttgggatgatgcgcacgcggggggtctgagccagccaaggggccgggcgccgtgggggcgctgcggctgctgcgggacgcaccaggcctagtcgcccgcaggctccgcccgaggagcagcccagccaccccagggcccggaggaccaaccgcttcgacccgcgcccgggcggcggcagtgttggccggcgaggcgaggagggccgggccgccacggtggggcgaaaagccctgaaagttcctctcagttccttccggtgcgcctcccgctcgcccttgcggaggccctgagggcggattcaaggccccgcgagaagccatctgaggcggcgacgactgttctcagccccacgggaacgccgcggacgcagcgtccctctcccggacaagaaaacagccattctagagtttgactgatattacaaaggatccagactttaatgaaatctatgatgaagacgtgaatgaagatccaacatatgatcccaacagccctgaagaaacagctgtatttatgaaatatgctgaaaatattatgctaaagttaacattcagtaccacacaaattcaacagtatgaaaatgtctttatatttgaaacaggctattggcttactaatgctataaaatataatcaggattatcttgatatctgtacctaccagagactacagcaaagattatatcttcaaaaaaagattattcaaaaacactttgagaagaaaaaagatatcagaagagggataggatacctaaagttaatatgttttctgattccatttctactgagtttaaagaagaaaatgaaagttccatatttaagtagtctgcttcagcctttttc

SEQ ID NO: 103352 - DNA, 887 bp, Homo sapiens
aggtggtattccaactcgggactgcctcaacgcccggcgctgtctcctctgctactctgtttcggtgttttagcagaggcagatagtgagggcggcacagtgccacggatgccgctggactaagcgctaagcgggcttgggatgatgcgcacgcggggggtctgagccagccaaggggccgggcgccgtgggggcgctgcggctgctgcgggacgcaccaggcctagtcgcccgcaggctccgcccgaggagcagcccagccaccccagggcccggaggaccaaccgcttcgacccgcgcccgggcggcggcagtgttggccggcgaggcgaggagggccgggccgccacggtggggcgaaaagccctgaaagttcctctcagttccttccggtgcgcctcccgctcgcccttgcggaggccctgagggcggattcaaggccccgcgagaagccatctgaggcggcgacgactgttctcagccccacgggaacgccgcggacgcagcgtccctctcccggacaagaaaacagccattctagagtttgactgatattacaaaggatccagactttaatgaaatctatgatgaagacgtgaatgaagatccaacatatgatcccaacagccctgaagaaacagctgtatttatgaaatatgctgaaaatattatgctaaagttaacattcagtaccacacaaattcaacaagactacagcaaagattatatcttcaaaaaaagattattcaaaaacactttgagaagaaaaaagatatcagaagagggataggatacctaaagttaatatgttttctgattccatttctactgagtttaaagaagaaaatgaaagttccatatttaagtagtctgcttcagcctttttc

SEQ ID NO: 103353 - DNA, 304 bp, Homo sapiens
cagttaagtcagaaggcatttgaaaagatgtataactttggatggctcttttctgattataggctgaagggggttcttttctctttggtttgccttttgcttttaatagcttgaccatttctggcttccactgcattgtaagagctaaactacaggtttgtcagtcagtgtttctctctctgtctctttctctctctccctgctcctaccccctcttctctccattctcctctctccatctctctcatttcctagttacaaatcatgttgtcttactgtcttaagagcatcactgatttcatcc

SEQ ID NO: 103354 - DNA, 512 bp, Homo sapiens
cacacttgaactttctgggatgctgtcaatgggtggtggttacacaggaaaaaacagcttcacacccaggatttgtgcagtttaccgtctgtaactgcagtgcctctagaagcctgaactggctcacctttaaattttttttttttttttaagaagtctcgctgtgatgcccaggcttgagtgcagtggtgtgatctcagctcactgcagcctctgcctcccaggttcaagggattctcctgcctcagcctcccaagtagctgggacgacaggcgtgtgcagcacagccggctaattttcgtatttttagtagaggtttcaccatgttggccaggctggtctcaaacacctgacctcaatgatatgccctcctcagcctccctaagtgctgggattacaggcctgagccactgcacctgacctcacctttcaatttcagataaggaactagaaggtgacacgtgaaatctgtaccggacttctaggatgctgttcattacaccacccacctc

SEQ ID NO: 103355 - DNA, 422 bp, Homo sapiens
gttccacaggctgtgcaggaggcatggctagggagacctcaggaactttcattcatggcagaaggggaaggggaagcaagcacatattcacatggtcagcaggagagagagagaagggggaagagctacacacttttaaacaaccagatctcatgagaattcactcgctgtcatgagaacagcaagggggaaatctgcttctgtgatccaatcacctcccatgaggccccacctccaacattcaggatcacaattcaacatgatatttgggtggggacacagagccaaactatatcagggatgttaatggtgtgaagtcactgagaactgggatgagatgagattcaaggcacttttggagggtgtagctagccataaagtagtgtgacagatatttctctgagattaaagggaaaaaaaaa

SEQ ID NO: 103356 - DNA, 348 bp, Homo sapiens
ctgagtgaaggttgtggtctattggggtttgttctgtgagcattaaatacgcatggaaaaaactgtagtgtccatttgaaccaggctctctggagcttagggctggaatgatatacagcctaaaaggtgagtagtaagggatggggaggatcttaaaagctgctaaagcaattgagttttaaggagcaatctgtaggttaacacacgctggggttattatgatcatattgaaaatttcaggttagagccaggtgtggtggcatgagcctgtggtcccagctactcagaaggctaaggcaggaagatcacttgatcccagaagttcaaggctggcctcagccccatagc

SEQ ID NO: 103357 - DNA, 1187 bp, Homo sapiens
ttccctggattttgccgttcctcacatgctttcgtttcattgttgaggtcagtctcctaggactatgaagctcctgtgttctttgtcagatgatttttggcagacaggtgagcctcctctgctgcccgggaagggaggagaaggcagtctcggaggaaccagctgaccatctcaggtgccgcttggggcagcgtccattctttgtgtcctattttgtatttttaaacccggacaatcttcggccgaaaaccccgagaacacacaggggagatgtagttcatcatctctctcttcccgtttgatctagtgtgttcatttaacaagagctgggttaatccttgttcattgccaactgtatgcgtgcacccacttttggagggattcaggaaatactcggtgcttcctgatgtgcatggaacacagtctcgacgtcttagcttggtgcttaattaaggtccttcaaaatctgtaccagggtcttttccaccttatctctcaattcttctagtttttgctgccttgaaactgaatgctcacccttctttgagaaacctgtccttttgcagatttccctctctgcactgcccttcccttctctgtacacaacagaccctctttgaaagcccagcttcatcattatcttttccacgaagctgtccctgcccctttgtggaaacagtcatacttctttggatttccacagcacttaccttttctttggttaagccccttccaacaataataaattagcagaaacttgtggagcacatacatctgttgcatgttgtgctagacattcactcattcatttattcaccaaacaagcaccgaccgtttgccagatactgtgcaaaattcgggggatagtgtggagaatatgacaaagttcctgctgtcaccaaacttttgctctagtggggcaaataagcagtgagcaaacagataagtttatgacatgctctcaggtgtgatcaccaaagccagggaggagcgatggcgggagtggggtggaccatatctatggtacagtcagttgccactttcagtagttcagaaattatttaccaagtttctgctcagcaccggggattgcgttaggtactttgttctgagttttatggtatttaggttcatgccttatcttctccattggacacaagcatattttactaataattaaaaaaaaa

SEQ ID NO: 103358 - DNA, 367 bp, Homo sapiens
  misc_feature (172)..(172): n is a, c, g, or t
  misc_feature (209)..(209): n is a, c, g, or t
  misc_feature (271)..(271): n is a, c, g, or t
  misc_feature (284)..(284): n is a, c, g, or t
  misc_feature (307)..(307): n is a, c, g, or t
tatttgattcatgtcatatagctagagaggtagttgtaaaggttgaatatcccttatctgaaatgcttgagaccagaagcgtttgggattttagaacttttcggattttggaatgtttatatttaccgatttagcacccctaacagaaattcaaaatccttaattgtaagangttaaataaaacggtcacaatgtttattaataattancattggctgggcgtggtggctcacgcttgtaatcccagcactttgggaggctgagatgagcngatcacgcggtcnggagatcgagaccacggtgaaancctgtctctactaaaaatacaaaaattagccgggcgtggtgggtgtttggggaacaggtg

SEQ ID NO: 103359 - DNA, 369 bp, Homo sapiens
ctaggggaggtgaatcatagggtgtgatgttgagatagtttgctcctttccactgagtgcttctctactaaggttgtcttctggctagtaaaggaggcattccaaaatggttcatgcttcaaaatgacatgttttctttccccagtaaaacagttcttttttttttttttttgaatggtcactttttttttgaacttttctgcttttcttattttttcagaagcagctattctcaaactttttggtgtcaagacccttttacctaaaaattatgaaggatcccaaaaacactttgtctaggtgaattatatctattgcacaagaagaataagttaggattttatggaaagtaactgtctctactgtttt

SEQ ID NO: 103360 - DNA, 505 bp, Homo sapiens
cacacacacacacacacacagccaaagtcctaaaaacaaaaacctctattaagggcctctgaatagttatctctgttccttcagttcctctgaagaattattttatactaggattctcaggttatctcctctcaatctctattgggatcactccactctgacttgtacactcattttcccactgatgtagctgttctcaagttagaagttaagttctcagtcttcattttatcagtcatctcagcagcattcattatggttcaggcactccctcctattttcttcgttagcttctatgacaccagtctcctcatttttctcctactctattagctgttccttcttagtgtctttttctgactccttcattttgaccagatttctaaatactgaagtatgtcaggactctcagctgtcttccatctgtagtaaataaactcactgggtgatcttacctagtttcatgaattttaagtaccatctcttcattgatgagtcccaaatt

SEQ ID NO: 103361 - DNA, 6881 bp, Homo sapiens
  misc_feature (1185)..(1185): n is a, c, g, or t
  misc_feature (1192)..(1192): n is a, c, g, or t
  misc_feature (1199)..(1199): n is a, c, g, or t
  misc_feature (1210)..(1210): n is a, c, g, or t
  misc_feature (1268)..(1268): n is a, c, g, or t
  misc_feature (2216)..(2216): n is a, c, g, or t
  misc_feature (2366)..(2366): n is a, c, g, or t
  misc_feature (3053)..(3053): n is a, c, g, or t
  misc_feature (5343)..(5343): n is a, c, g, or t
  misc_feature (5422)..(5422): n is a, c, g, or t
  misc_feature (6320)..(6320): n is a, c, g, or t
  misc_feature (6419)..(6419): n is a, c, g, or t
  misc_feature (6487)..(6487): n is a, c, g, or t
gctttattacagttatttatgctcaagagtaagaaatgatgttattgagtttccacgggaggatttgatattgcccagctcagtccacagtttcttgcactgacacacctcatgtttgggagtcctctgaagccaacagtgtttatccattgtaacaggatgatatgcagaatgtcagttcctcgctactacactaaccaccctttagggaccctttggttcatgttcttggtgttggcaacaggttgcattgagcatctactctttgttttgatgacttctatggcacacatatgtatatgcacacacacaacataattatcattttaatcacttgtaagtgtacaactcagtgacattaaatacattcacaatactttgtatccatcaccactatgtataccccaatgtttttcatccttcctaagatgaactctgtacccattaaacaatagctctgttttcccgtagcccttggtaacctctgttccatcctccatctctatgaatttgcctagcctagaaacctcatataagtgaaatctcatgtatttgtccttgtgtgtctggcttatttcactaagcataatgtttctaaggtacatgcatgctgtggcatgtatcaaaagtttattcctttttatggctgaatagtattcccttctgtgaccttttggtactcagcacatgacacagggtctggtgtgtggcaagtttcctcttggagccaaaagcagcatattataggacaaggacggaaagccatggcagcacacactgatgatcggatctgctgggagcgcaaacctctttgattcctgctgaaaggccctgatttctcacttacgaagcactttctagttgtttaagtgaattttcatatccactgtcacctaatgttagtcttcaataatcccataaaaagcaggcgttatccttattttacaggtaagggtcacataaagaaaatgactcccttgcctggtgtggtggctcacacctgtaatcccagcactttgggaggccaaggcgaacagatcacctgaggttgggagttcaagaccagcctgaccaacatggagaaaccctgtctctactaaaaatacaaaattagctgggcatggtgccgcatgcctgtaatcccagctactcaggaggctgaggcaggagaattgcttgaacccnggaggcnggggttncggtgagccangattgcaccattgcactccagcctgggtaacaagagcgaaactctgtcaaaaaaaaangaaagacttcctcaaactaattacattgttgttcttatcaacattaaccagaattgagtacagactgcactatgtgctgttactgtgtcgggctccatgcaaagcacttaacaagatttgttactttatccttataacaactctgtgtggtgtaggtgtaataattatcccattgtccagatgaggaaactgaggtaccaagaggttaaataacttgccatagctcgcagaggtggtaagtggggaatctaggattcacttctaagcttgaacgtggtatggttgtggtatggaaccaaggcaagactccagtctgcttacatctgactcagagatcctacaagaacatgccgactgtccctgtttaaccaaatgtcagtccaggcagcattgtctgtgtccctgattgtgcctttctctagtctgggaacactgccaggcagtgtatgtcactagatgtaaataaggccattatttgattttatgaaactctttttggaggttgagacttgtatattctgtgtgacactcccatttggatatcccaaaggcaccttaaattcaatatgtcaaaaaactgaagttatcatttctgcagtctctcctttttgccctgaaaaagaacatgcacttgtttttcatatttccttatctcttggaaagacatcttgaccactcaagaatgtaagctggaaacctcagggtcacctttcttctctgtcactacccctggcttaggtcacccttacagatgtgcctcttaaatatttttcaatcgtgtctctccctattccttcctaccagtgcagccccagactgttgtgtttcatagacagctgccgcagtgccctccagactgccaccatgcctttggctgtgccctcccaccatcctccacactgctgcctggctcatctgtataaggatgattctgtaggcattgtcctncttaaaaccatgtggtgattccaggcttgagtctgaactcagagcaaggcacatggcattctgcctggcacctgaggccacagcagcatattataggtccgctgtgccttgtgccctgagtatgtcctgttgaggccacttctattcctnctcttccttctacctgggaagcactcccttcccattgcggctgaagcctgtctcttcaaacctcagcccaacttctgcttatcttccagagcctatttgagctttcatcccttctagaagctttccctgatgttggcagagtagttttctcttcttttgtgttaccattacactctagagagacctttgtttctgcatgcatcacagtgtatttgtctttttgaaggcagggactctgacactcatcttgacagcaaaggggtgaattactcaactgtcaattcttttgtaaaatggacaatgtcaaccctgttagaagtaaatgcaataatgggtgtcacgtccttagcaccgtgcctggcccatagtatatacccagtggacacctgtacctcctctccacatccctgttgcatggtgactgggcccagaaggcagctagaattggcaactcaagcccttttggtcaggatcctttgctgggtggaagctcctcgcctactaatgcgggtgccctgtggctgaatctggtgaatccatcaggtccaggttgaaaactactgagcagagccctgctgcctctgggtattctgttcaccacccagcccttttgcatttaatgaatgtaaaaaataatggggcagctgctgttccttactctctcttcctgctgcactaagtctctgnctccctggagaggcatttaaccgcacgaaggtttatggtggaaatgacaaattgcttcttcacaacgagctcaccctgctttctaaccagttggaatcacccttgttcatgtaatattagcaatttacctgtctccttaaccactaaccatcctgagaggatttggcattctttgcagctgttaatcctctcatcacctgagggcttattaaataggtggagtgtacatctagcctttctcctacagtgaacagtcattcatgatcttttcctttttactcagcctctctcctcagctgcctgagcccaggataaggcagggtcctcccctctagaggccacagcggagagagctgggctctggaccggggagtccccggtttgactccttgcttggtcaggacttcctcaacataatcgcctggccctggtgccagggtggttgtggggctgagggaggtgcctgtgcagcccatttccctgtggaggtcagttgcccctttcctttcccttcatcaggctcaggccatccttggggcagccctgctatctgagggggtctctcccgagccgctaagacatagtcctcattcatattgggtgttgttgacaatcatcccatcctctgctgcttcattttgtgacttgtggacccaagtgggtctttgtttatcctgatccaggagagctgggaagggagacagtttgaattgctccgggcatatgttacttgttaatattttaaaatttgacttgttgcagtttttcagaggtattaatctaaaagccatttcatggaaaaaagcaacaaggaactggttttatttcttttaggtgacactaataaccaaacatgagacacatcagaatttaagtggctagtcaaaaaaaaaaaaaaaaataccagtgaaaatagcaagtctacattgatgttagttgttatataacaggcgctgttctaagcgttttgcctgtagcaactcactgaatcctcataattactttatgaagaggagattcagtaacctggtcacataggcaatgaatggccaggattcgggctctaaaactgggtctcctgaccacgacgatccctctctagggctgatggagatcatcactaaatcacctcctttgggattctctgctcgttggaaatggagtgttacctgcagagtactgctgtgacctctcctttaggcctctctgtgcagagactgcagtagtctgtgttagtgctgtcctgttgaagctggtccacacttttctggacttctggttgagccagtctgctcagatacgaacttccaaacgaacctgtttctctttggtcctcagccaggctttgtgacatcagctgctacagctgtggaaacagttgataaacagggtcaggctgctcagagggagaatgtggcagtagggtccctggcaagggttgcctgctcacttggaagggcaaaggcctagaaatccacgcgcaattgatgcacaagctgtcattgtgctgaggcttgtgggcaggggggtgtgtttctctttccttctccccttttcttcctctctttcccttgctctctttctttcttcctccttcccttcctctttccttcctccctttctttctcctttgaaaaactaagatgaggtcctggtaaagatagtacatagaagagaggcttcaagcctcaaaaagttatttcgataatatagtaagtcactgctccttattaaataagaggcctaaggggctgaggtggtgagggattgaagtgaagtctggcttggttcaggcctgaatacccaaaccaggccagctttgggttgggttggctctgcctggcatgaggagacatccaaggattccgtctccctcagagagccatgctgggaaatcttctaagcattggactttgaggttaaaataaagagtcttgcacccttggcggggatttctgaaagattgatgggattctaactgcctaacagttccatttccagatgagcgccctccgtgcatgggctttgtagcagctctctgcctttccttgccaaatgaccctatttgatctggagccctggcttgacttttctcttcagcatctgctgttttctgaccaatcccacaccttcccctggttttctcttttacagaaatcctttcttccaacttgattagatttctttgttggcttgcacatctggtcttcatttagtagggatgacacttaattgaagtaagagtttggctgcctttaaatttaacaactgcaccctgctgggggtgctnatgaggagtcagtagctgaattgtttattgaaagagatcatattgatttgtgattttcacttaagaaatgcattcccanacacccctgcatttagttgcttagctgggcactcagacagctgctttaagaatccagtacccttgtctctggagaggcgtttctcctcagtgtgcatgcagtactactgtatgcacgtggcatgtgtccatctgtcctcacagaggagactgtgcattggtagagctggagggctcctgttgtccacccagcatgccactttgaaccagctcctaaagcatgaggtccatcatgtctctattcaaaaactttcagtggctcctcattgcctgtgaatgaaatatggaatctcagcgggcggtcaggggcctcccagtctggcttcactgtgcctgtccaactcatttcctatgattgccatgcagaaacccagttctctggccacaccgaatttcttacaatcttcccattcacttggccattctgcctttatgtttttcactttctctggaatttcctccctccctttcctgcctgtatggtctcagttcttcaaagcccatttcaaatgaaaacctttgctacgaaatcttccctgattcctctcacctatagtgcacccctttgaactcagacaccctctctgtatttctcttcaggtattttagctcactttatgttataattgtttttatgattgttgtttattcttattcaacagagtcactacctgagagcagtgaccttgtgttggtcacatgtgtcccctgaaggatacagctcagtgcttggggtagtaataattgatattcttgagtgctcactacatgccagttctattctaagcactatacatgtattcatcttggttgatcctcacaaaagcccttggagggaggtactgttattagccccattttacagataaggtaactgagatctaggctgagtaacttgnctaaggctacccaggtagcaagcagcagagctgggggtccacctgggccttctgaatccaggctctcaactagtaagccacatggcttctttcattagntacttgctcaatacatatctatcaagaaaagttgtactgaagttaagagatataggggagcaggaatnggttagtttaaaaacaaggagagggaagaagagaaggaaattagaatgggccagtaggaaaagaaaagaaaggagaagtgctaagaaaccaaggaacaggccaggcgcggtggctcacgcctgtaatcccagcaccttgggaggctgaggcatgtaaatcacttgaggtcagaagttcgagacagcctgaccaacatggagaaaccctgtctcgactaaaaatacaaaaactaaaaatacaaaaattagccggatatggtggtgtgcacctgtagtcccacactcaagaggctgaggcaggagaatcgcttgaaccagggaggcggaggttgcagtgagctgagattgtgccattgcactctaacctgggcaacaaagagtgaaactccatctc

SEQ ID NO: 103362 - DNA, 1002 bp, Homo sapiens
tctatttatttttcacatagagtgaaatggatgagaatcaaatccagatggctggagatgatgtggatttacctgaagatctccggaaaatggtagatgaagatcaagaagaggaagaagataaagattctattcttgggcagatacagaatctccagaacatggacttggataccataaaagaaaaagcccaggccaccttcactgaaatcaagcagacagcggagcagaagtgttccgtgatgtgaggggtgggaggggtggagggagggaaccagccatccttggaaaagaccactctcttgtgggacgtttcaagcagtacatgttttaatgtagtgaacacagttaggaaaaccacgatgatccattgacagacaataatttggttgttctaaatattcctggcagagcatttagctaacaccttgcagcgggaaccttactttccttttagttataaatgagataaactggaaaatttcagttgtaaatgatgatgcagaacacatatctgcttaaagaccttgagatgagccaggaagaaacaaaagcaaggggcatttcctctccaactttcttccttggaggccaagttctcaccctgtccaactattcgcaggacaccaggtcccttcagagagaaatgtggagagtcaaggtgtctactgggagccgggtttcccacagggagctgagtctacagactccagggcaatcaaaggtcaccacccccacccctcacctctaggatccttgaatttgtcaatgatactcatcaagtatgcttggatcctttggtccttggatgcttctcagccaagtggcggtagcacagatgtggtgaacaatgacgaattgaggcagggaatagacctcactagccctttgcaatggagatcatcgttctagtggccatgtgaagaatggaaccaagggaggcacaattagaggcagagggaaaccaggcagacggctgctctttttgagttgagcttaact

SEQ ID NO: 103363 - DNA, 298 bp, Homo sapiens
ctaattatcaaatactgacttatagaatacctattcttgaaataatggagacaacacacaaaaaagcaggaaacagaaacacacgcacccagacacccatccaagaacaacacgagaattcatttcaacccagagcaacctgacacagctgtgcccttggagaaaagacccagagtcgttaccggaaggaggagggcagggaagaggaacaggctgtgatttcacatttaaaagttgcaatgctgagcccacatgttcctaaagatggggatgtagtcggtggaggctgcccctcccc

SEQ ID NO: 103364 - DNA, 446 bp, Homo sapiens
gagccaaataaacccctttcctatataaattacccaacctcaggtatttcttgacagcaacaaaaaatggattaagaccactactttttatgattcacattttatttattgtccatgtattcccattagaatgaaagcttcgtgagggcagttattttgttactgtcttctccactacaaaatttttagccctaagatgagtttttgacatactgtgaaccttcaacaaatatttgttgaatggatgaacaaatgactaagttataactaactgccagactatatgcatttatctataacaggcagaagcagacaagctttttgggcagggttcacattcatacacatgttttaggaggtttgctatgctatcggtgtccacgttggattagaagaatgagaaagtagaggcttgaagattagttaggctgaacaacaaaaggcaa

SEQ ID NO: 103365 - DNA, 431 bp, Homo sapiens
aacctctgcctcctgggttcaagcgattctccttgcctcagcctcccgagtagctgggtctaccagtgcccaccaccatgcctggttaattttttgtatttttagtagagacgggtttcaccgtgttagccaggatggtctcgatctcctgacctcgtgatcctcccacctcggcctcccaaagtgctgggattacaggtgtgagctactgtgtctgacctactccttttttttgaagtgaatttctgtgaagctccttccagcatatcatttacgggtagttcagagttacatactcagtctcaaagttgaagtgaccaacaaggagaagtcagtccagcaggtaagaatcacagttgactttacctggatcaccagccacttccccagctggatgttgggaaaacacattcatttagatgcgtgaaaac

SEQ ID NO: 103366 - DNA, 161 bp, Homo sapiens
aattctttgtaatacctgtgtttctattcccctacctcccagtgttggtctgtaccagttaatgccaagatgcccactctccaggtctactatggtctcttcaagtccactgattctagggactcaagccttctccaggggtgaagctctgaggttctatg

SEQ ID NO: 103367 - DNA, 243 bp, Homo sapiens
gcaaaccacaatgtactattataaatctcaggcgttattactactgctgctgttggccttcaaaataagcattgctgtcaattagcatttaaaccttgcatattcaacagaactcacattcagttgtgcctttcgttatttattctccagtaggtattattaaggccaataaacgaaacttcttactaccaaaatgttcaaaataatcatatctgtagattaaatccttccccagagttcatg

SEQ ID NO: 103368 - DNA, 110 bp, Homo sapiens
aggatcatgatctctttcttcggtggaatgaggtatacaaaggcctgaacttcccataagccacaccaaaactcccataactccaactcttccatagagctccacctaag

SEQ ID NO: 103369 - DNA, 629 bp, Homo sapiens
tggcaacgacctcaacgtggatagatctcaaagacacgccccttgggaggcccaggcaggaggactgttttgggccaggagctcaagaccagccggggcaacatcatgaacatcgtgagatcccgtctcaaaagataaaaaaagaaaaagaaaaaaaaaaaaaaaaaaaaaaaaaaaagaaaaaaaaaaaaaaaaaaaaaaaaaaaaaaagaggggcggcggcggcgcagcagaagcaagatctccccccggagcggcgcggccacggtctgaaggaccacgcacacgtgatttaggtggcagagggggcggcgcgccccccataagagggagggtcggtatataagcgcggggccgggcgggcgcgcgtttattcataaaacacggttgaggttagtgggaggagaaaccaagggtagctcattgggggaactttcacttggaagcaaaaaaacacctcaatacttgaggggggggggggcgagaaacatagtgtgggtgcacaaacatccatctcctaagagagtatttatacagccctgtggggggaagtataatctaacatgaagcggaggctgaatcataggggttcaaccaaaagaggttatttgtgcggagaaaaaatttgt

SEQ ID NO: 103370 - DNA, 305 bp, Homo sapiens
cacacattgaaggcatttaataaccatttaataaatgattagtcaatatttattggttttgttcataagcactattctaaactctgaggatatagcagtgaaaagacattgtttctatccggaggtgcttcctctctagtggtgaaaagcacacaatacaaggaaatacaagttaaaaaatattagtgatataaagttctacagttgaatgtcccctcgaaaactcatgctgaggcccagtgcagtggcttacacctgtaatcccagcactttgagaggccaaggtgggtggatcacttgagctc

SEQ ID NO: 103371 - DNA, 393 bp, Homo sapiens
tccttctttagagccccttagttcctggaagccttgaatgagtagtgaaactgggtgaaaatgtaaactatgatgcctctatgagacaacacagattgaaaaacaatcaataggctggtctgagtacagtggtgtttacagctaaatgatcacaaccacttacatatttctttgttccttctttactcccactgcttcacttgactagccttaaaaaagaaaaaagaggccaggcgtgatggctcacacctgttataatcccagcactttgggaggctgacatgggcggatcacctgaggtaggagtttgagaccagcctggccaacatggtgaaaccccatctctactaaaaatacaaaaatgagccagacacggtggcacatgcctgtaat

SEQ ID NO: 103372 - DNA, 458 bp, Homo sapiens
tggcctacgtctggatgctgggttcacacaagaaccacctctcccgcagtcccaaggacttgtcatttcatgttcttattttagacctgtcttgtaaataaagctgcttcccaatccttattttttatagcaattatcatattatgaaatatgttattgtggttcatagaatcttaaaatataattgattataaaatatatcttcatttcagagatgttaaaatccattttgaacatctcagttgatgcagaaaaagcgtttgacaaaattcatgttaaaatcacttaacaaaataggaatataaggaaatgttctcaacatgatagaggccatatatgaaaacccataactaacatcatattcatacatgaaagacttaaactttcccctaagatcaaaaacaagacaagaatgccaacttttaccacttctattcaacatagtactaaagttctag

SEQ ID NO: 103373 - DNA, 911 bp, Homo sapiens
aaatgccagcacagggaggatctcagagagtgtgtgctgaggagtgggttctggaggaagccatctgaggagtcacctgtaggtccttggggccagcacctgactacagctgatgctctgaaattaatctctaacgagcagtgcttttcaagctttactgtgcctatggggtccctggggagcttgttgaaatgcacattctctttcagaaaatctagagtggggcctgattctgattttctacttagtgccccaacaatgcccaggcagggatcaccctctgaagagtaatagcattctaaacaggcttctttgccatgggccagtgaagggggtactatgaaggggagagaaagagtagaccagtgtatctgaagagtttctggatccttgtaggtagcccacaggaaaaatagacaaggaaaaagcagttctatgcaggactaaaatacggttcactgaagtattccaccctgggagtaatgtcctctcaagtgtgttttttttttttgaaaaagtaaagagataataacaaaaacaagagttgagtaggaaggacgtattgaaaaatggaggaatctgataacaagtagtatgaagtcagatttgtaagagtctgagaagaaataagtagagaaaacagaaaatggtgtgaggtttacagtgttaaccacaaagtgaaagcaggcaagaacgtggtgggtacctggctgggtaaaggtcactggcaaagctttggtgtccatagtgactcaaaacaaacaaacaaacaaacaaaaaacaaacaaaaaaacaggtacgataatctaccttaggctaaaaaaaaaaggccaaatttcagcctgaaagggcccacagtatgcccaataaagagaaaatgctgacatctattaatacatctactatggtga

SEQ ID NO: 103374 - DNA, 240 bp, Homo sapiens
attcgcgggcgcgtcgacaactcttgtttttgttattatctctttactttttcaaaaacaagagttgagtaggaaggacgtattgaaaaatggaggaatctgataacaagtagtatgaagtcagatttgtaagagtctgagaagaaataagtagagaaaacagaaaatggtgtgaggtttacagtgttaaccacaaagtgaaagcaggcagtcgacgcggccgcgaatttagtagtagta

SEQ ID NO: 103375 - DNA, 473 bp, Homo sapiens
gcgacaagagcaaaactccgtctcaaaatacatacatacatacatacatacctgcatgaatgtcaagtaattgagactgattcagacatccctgttttaaactagaattgtaaactctcagttgacagcttcttagtaaacacatgcacaacaagtatatttagtgtctaaacgttttcctgagatattacagttatcataaatttaaggcttggccgagtgtggtggctcatgtttgtaatcccagcactttgggaggccaaggagggtggatcacctgaagtcaggagttcaagaccagcctggccaacgtggtgaaaccccatctctgctaaaaatataaaattagccaggtgtggtggcatgtgcctgtagtcccagttactcgggaggctgagacagaagaattgcttgaacccagggagcggaggttgcagtgccaagatcgtgccactgcactccagcctgggcaa

SEQ ID NO: 103376 - DNA, 342 bp, Homo sapiens
gcaaaaccctgtctctactaaaaatacaaaaattagccgggtgtggtggcatgtgcctgtagtacctgctacttgggaggctgaggtaggagaatcactggaaaccaggaggtggaggttgcacttagccgagatcatgccactgtactccagcctgggcaacagagtgagactctgtctcaaaaaaaaaagtttacacaatttattttccgaccacaacaaaattaagttagaaatcagtaacaaggatatccggaaaacctccaaatgtttgaaaatagaacagaatgcttctaagtaatgcataggtcaaagaaaaagtgacagtggaaataagaaaat

SEQ ID NO: 103377 - DNA, 315 bp, Homo sapiens
ctcatccctcctaccacccacacagtttaaatgggtctggtttggcaagaaaattcttcgcactgccatgttttaggtgacaaaagtatacatttttaaggctaaagtttcccctcaagttacataagaggccagaaatgaaacataagaaccagcgttctttatcatttttcacatcatggtcccctttgagtctcttaaatgctatgcatcctctcctccaaaaaagtacacatatgcacagacacacaaaatattacatacaacttcagaggattcacagacctcccctttactctacttgggttgagggaa

SEQ ID NO: 103378 - DNA, 763 bp, Homo sapiens
cactctgtgccctcagggtctctgcttggagagtccatggcatctgagaggatgggccaggtgaggtgggggtggctcctgagagcagggaggacaagggcggagctggaggcgtcaggcccagaagacccccccagtgacttggggcagctgtgggcaaggcttggacccaagaggcctgaccaccccgcctggcagcacaccagagcacaggccagacctgaaggggcagcgccagggggcccatggtccacgggtcactctgctggccctgcggccacactgctcaggtcccagggcctgatgatggctgagccagacatcataacaccaagcaatggagaagttagaatattgctagggatactgacttgtatttttgaatcttaaaatatatgttttaatctgacatctataagcagtgcatgttacatgccagtcagagcatgagcatccccaagaggtgtgcactctgtgtatctatggataatgaaagcacggctttcacacagcaagttatcctcacttcctgtgatcaactctgatatcttctactttattcgaaagagtatcgattgtgtcccactcgactgattttacaccctctatgtacatggtccccagtttatgggcagggcggttattttgtgttttattttgtctttgagacggagtcttgctctgtcgcccagtctggagtgccagtggcgcgatctcggctcactgcaacctccgcctcccgggttccagcgattctcccgag

SEQ ID NO: 103379 - DNA, 286 bp, Homo sapiens
ctagatagcaccatctgaggaatgggccttcaccagtcactgaacctgctggcaccttgatcttgaacttcccagcctccaaaactgtgagaaataaatttctgttgtttataaattatccactctcaggtattttgttatagcagcacaaatggactaagacaacattaaagaaaaacagaataaatatagaaatataccatgttcatggattggaaggccatatattatagatatatcaatcctcccctagattatctacagattcaatgcagttcaattaaaa

SEQ ID NO: 103380 - DNA, 546 bp, Homo sapiens
gagtactttctggaggcggttgtctctgagctggccctgaaggatggagatggtagtggtagtgctgcaatgcaccatcagagggataagggcagtcatagtggatctggcacgtgggtgtttaggtaacaatcactttttggaattgactgactggacgacagagcttgtgaagagtagtttgagaaaacggaattcttgaaaattatactataaataatggaggaaccatgagagccatatgtaagaatattctgcccaggtgtggtggttcacacctgtcatcccagtgcttttggagtctgaagcaggaggatcacttacagccaggattctagaccagactaggcaagcctcctctctacaaaaaaattttaaaaataataaaattcagctgggcattgtggcacgtgcctgtagtcccagcgactcagggggtgaggcaggaggataccctgagcccggaggtggaggatacagtgagttatgatcctgccattgcactccagcctgggcaataaagcgagattctgtctcaaaaaaaaa

SEQ ID NO: 103381 - DNA, 364 bp, Homo sapiens
caggccagagtgagtgcagattacatcactacactgcagcctgggtgacagagtgagaaggtgtctcatgttctaaaaactaaaaaaacaaacaaacaaaaaaaaacccccacaaagttagagattgctttctcttacattaccactctcaactcaaagcttttagcaatttttatgtgaggcaagactaaataaactgataagtgtacaattattcttgtgggtaatttttctttctgcattttggtgttgtaaactgtgtacattagatggcaatactatagtgtgagagagagaattagcgatctagtacttgttttcatgagctgtatcaccagagggcaccaaaggaccagttatgagc

SEQ ID NO: 103382 - DNA, 624 bp, Homo sapiens
ctttccagggtttcccggggtttctgaattgttccggcctcctgtctatgggtgccccgctgatttgccccccttttgtcacactaatccttggtgcggggtagccatctgtgtggccaggggccctgttctctatccccttttcttccccccccgctagcataagaggcccccgcgggttttcttttttttttttttttttttgagatgggagtctcgctctgtcacccaggctcgggtgcagtggcgtgatccagcctgggcaacaagagcgaaactctgtttaaaaaaaaaaagtgtagccaaaacataaacaaaaaaatctgtccaagagtcagaagtgatttgttttatactattcatatgggaaaaacacgtttattctgatagccaggaatatggacatggtgactcaccagaccaaactgtaattcaatttattaagatttagccaggcactgtggcccatacttgtaatcccaacgtgttaggaggccgaggcaggaggacctcttgaggccaggagtttgaggctgcatgatcctccattctcagtttcctgagtagctagggctacaaatgcatgccatcatgcctggctaatgtttttatttttaattattt

SEQ ID NO: 103383 - DNA, 663 bp, Homo sapiens
ggcagtgctccggaggccgtccctggcagggcagggcagagctgggtagggcagccaggctgcagaagctcacaggaggggcttgatgccatcccccaggcagctggtacctctgcgtgtccttggaggagcctccaggtctctgggtttgtggtggggctgacccggtgcccccacctcagagtcctgaggacttgatctcatgggccggctctgctcacatcacagggcagtcagcctgagaaggtagcttcttactcaggcttgtcagtggtgatgaggctgtcactgtgggtggtggctgggccagggccagctggggagagagagagggagggagagagggaaggagaaggcggcacgaagccaggagctggggctggatagtctgtggccataactgccccggggaccgcagggccaagcaagggggctgggctctggaagccaggaggaaggccaggataggggctggtactcagtccacatctcaaagccggtgggagggttctccacacgctctcgggcacggtcaacctctgtctctcgtattagagtctcgactgtattttctctcttaaatattaatcactgccttaacgtgcttgggggagcagctaaatcataattctaggaccagctttgggtcgagggcttgaggtg

SEQ ID NO: 103384 - DNA, 181 bp, Homo sapiens
cggagctggcactcagaagccgttagcgccaccgggctccttgcagctcagggagccctgcctggctaggctgtcctggctgtgtgctctgcactcaggtgattggagagtctcattctcactcaggtgtgagatttcgtagcacaagtctcaggggagcaggttgcagcctgtttcttaa

SEQ ID NO: 103385 - DNA, 650 bp, Homo sapiens
atcacacatcaatccttcatactgatttttagtggtgatttcagagaatgttctatcataacagactcttttattgcaagtgagccctgacatacttgggttgaaataaactaacattctctttttgactcatttgttggtatgatgcaactgacattcaacttgactagaaaaacatgtaggaaatacaggaaaaatgagagttttacagctgatcaagtagtttatagcagaactttacttaacggaaaattatggccctactgatggcccccaaattgctctctcagtagagccctaaaaattgccaatcttttcttttattgccagctgactccttatttcactcttcagcccagcatctcttcaaatctctttctactcttcattagcagccaactccacaccagactgcactccttaattttagccattctgataggtttgtaatagtaactgtaattatttgctaggactgttataacacagtattatagactaggtgatttaaacaatggaaatttgttttttcacagttacagaggctgaaagttcaagattaaggtgttgggaggttgtttcttctgaggccccattcctcggctaacagatggctgctttccctctggctcttcacaaagttgcccccc

SEQ ID NO: 103386 - DNA, 175 bp, Homo sapiens
aaaaaactaaataaataaaaaattaaaacccatcctgaagacatttcatgtcaccacttttcacagtcaccacttttcacagcctttccttggtagtcctcctggccacactgcgccctgtcaccttcctgccttcagccctctgctgtctgaccctcacccacaccagcttctc

SEQ ID NO: 103387 - DNA, 384 bp, Homo sapiens
cttaaatcttcataagataattattcaaataaatgttttttggataaattgaccttttgccacatattgagatgaaatagagtcaattagaatgtctgcctatggtcacatcagctgaataaaggacagactattaaagaaaaagatttataggctgggcgcagtggctcatgcctgtaatcccagcactttgggaggctgaggtgggcggatcacttgagatcgggagtttgagaccagcctggccaacatggtgaaaccctgtctctacaaaaatacaaaaaattagctgggcttcatggcaggcgcctgttatcccagctactagggaggctgagccaggagaattgcttgaacccgggaggcggaggttgcggtgagctg

SEQ ID NO: 103388 - DNA, 363 bp, Homo sapiens
agtactttttttttttaaacaatgacaccttaatggtcaggaggttattaatgaagacttggttaagacaaacagacaaaaagactatgaaatagaaatagaattgttcctctcaagttccactgctgaaaattaccatccaaccctgtgattctattgatttgcctgcactatatcaaattttaatcaccataaaccatagactaatacagttctgccatcaacaagtgctcttagaagaagactttgattactttggacacctctgaaaatcttttaagactgtctagcttggaaactggagattcaaggaagcatctgaatgtccctcctttggttttgtaaaaaaggaggtatcatatt

SEQ ID NO: 103389 - DNA, 1281 bp, Homo sapiens
gaggattcataactgctaacccatgtctgctcccagagctaggtgacccagcagccaagcccttgagtgggaactgcaaaagctggggctgcctatgtgtggtccaaaccctcccctctccaggagaaagctgggagtagggattccttcctcacagtaagtgtttgtccaacatgatgctgcccaactgtacctcaaactctggaacctgattaaggaccagatcgctgatgtgcacttggtggagagactgcaggccctgtatatgatccggatgaaggactccttgatttgccttgactgtgccatggagagtagcagaaacagcagcatgctcaccctccgactttctttttttgatgtggactcaaagcccctgaagacactggaggacgccctgcactgcttcttccagcccagggagttatcaagcaaaagcaaatgcttctgtgagaactgtgggaagaagacccgtgggaaacaggtcttgaagctgacccatttgccccagaccctgacaatccacctcatgcgattctccatcaggaattcacagacgagaaagatctgccactccctgtacttcccccagagcttggatttcagccagatccttccaatgaagcgagagtcttgtgatgctgaggagcagtctggagggcagtatgagctttttgctgtgattgcgcacgtgggaatggcagactccggtcattactgtgtctacatccggaatgctgtggatggaaaatggttctgcttcaatgactccaatatttgcttggtgtcctgggaagacatccagtgtacctacggaaatcctaactaccactggcttccaagcagagcccactgaatcaaagttgggtttcaggaagatcacggagttcagtgagcactcaacacctctatcagacagactgcgtgggcagtgccttcctggagaggggaacacagcaggatgactatccttgacctcccagtatgacagcttaaaggctgtcatctctgtggcctgcctcccctttcccttcaccttgccagctgcctctcagtgactgtctcctccagtgactacactgagggaccagggactgcttgcctcccgaggctgctcagaccttccgacaccgcaaaatgattgtcaaaaatgggtctgcaaagagtaacttcccttccactgatcaaacctgaatgtgcaagctactgtcaattaactggaaaagtggccgtgtgggctggtgctttggtgatttaatgaataaagtctacaacccccaa

SEQ ID NO: 103390 - DNA, 1266 bp, Homo sapiens
gatcacggtgcccaggggagctgacgagcagaggagaagcgtccctttccagatgcttctgctgctggagaagatgcaggacagccggcagaaagcagtgtggcccctggagctggcctactgcctgcagaagtacaacgtgcccctgtttgtccaacatgatgctgcccaactgtacctcaaactctggaacctgattaaggaccagatcgctgatgtgcacttggtggagagactgcaggccctgtatatgatccggatgaaggactccttgatttgccttgactgtgccatggagagtagcagaaacagcagcatgctcaccctccgactttctttttttgatgtggactcaaagcccctgaagacactggaggacgccctgcactgcttcttccagcccagggagttatcaagcaaaagcaaatgcttctgtgagaactgtgggaagaagacccgtgggaaacaggtcttgaagctgacccatttgccccagaccctgacaatccacctcatgcgattctccatcaggaattcacagacgagaaagatctgccactccctgtacttcccccagagcttggatttcagccagatccttccaatgaagcgagagtcttgtgatgctgaggagcagtctggagggcagtatgagctttttgctgtgattgcgcacgtgggaatggcagactccggtcattactgtgtctacatccggaatgctgtggatggaaaatggttctgcttcaatgactccaatatttgcttggtgtcctgggaagacatccagtgtacctacggaaatcctaactaccactggcttccaagcagagcccactgaatcaaagttgggtttcaggaagatcacggagttcagtgagcactcaacacctctatcagacagactgcgtgggcagtgccttcctggagaggggaacacagcaggatgactatccttgacctcccagtatgacagcttaaaggctgtcatctctgtggcctgcctcccctttcccttcaccttgccagctgcctctcagtgactgtctcctccagtgactacactgagggaccagggactgcttgcctcccgaggctgctcagaccttccgacaccgcaaaatgattgtcaaaaatgggtctgcaaagagtaacttcccttccactgatcaaacctgaatgtgcaagctactgtcaattaactggaaaagtggccgtgtgggctggtgctttggtgatttaatgaataaagtctacaacccccaa

SEQ ID NO: 103391 - DNA, 556 bp, Homo sapiens
gtgattctagaggatcccggggacttttggatgatgatgcatggcatgttggtgagcgagaggcaacagtgtccctagagggcagggaagtcaatttgcagatggccagcaaacttttaaagcagtactcaaccttattagtactcaaaggcatgcaaatgcagagatactacttttgagagtttgacaaagattaaaagtttgacagtttctagtgttttagggacgtgaggacacatatactctcaaataatattttgatgtaacagttgggggccgggctcagtggctcatgcctgtaatcccagcagtttgggaggccaaggcgggtggatcacctgaggttatgagtttgacaccagcctggccaacatgtcaaaccacatctttaccaaaaacacaaaaattagccaggcatggtggcaggtgcttgtagtcccagctacttgggtacttgggaggcttagcagtattacttgaacctgggaggcagaggtttcagtgagctgagattttgccacttcactttatccggggagacagagcaagactctgt

SEQ ID NO: 103392 - DNA, 423 bp, Homo sapiens
  misc_feature (320)..(320): n is a, c, g, or t
  misc_feature (326)..(326): n is a, c, g, or t
  misc_feature (367)..(367): n is a, c, g, or t
  misc_feature (393)..(393): n is a, c, g, or t
  misc_feature (410)..(410): n is a, c, g, or t
gtgattctagaggatcccggggacttttggatgatgatgcatggcatgttggtgagcgagaggcaacagtgtccctagagggcagggaagtcaatttgcagatggccagcaaacttttaaagcagtactcaaccttattagtactcaaaggcatgcaaatgcagagatactacttttgagagtttgacaaagattaaaagtttgacagtttctagtgttttagggacgtgaggacacatatactctcaaataatattttgatgtaacagttgggggccgggctcagtggctcatgcctgtaatcccggccaaacttgctnattttnatttgtgtctttttgctttactaaatagtaaccatgagtgntctgagcttttctgagttctgtgagncctggcaaataattganagtgaaagtgatc

SEQ ID NO: 103393 - DNA, 342 bp, Homo sapiens
aatataaatttgcaaataagtacacagacttaatggggtatctcaggaactcagggctgtaaaaggtaaaaagccctttggtcttacataattatgaacgtatctttggtatatatgtggaagataaactggaaaagcctaattatttaataaaggtgggggagggaagattaattattgttgagtgttaactaactgccaggtgcttttatcttgtttgtctaatttaaattttatatggacttaataaagtagatattaccatgcacattttacaggttgccaaactgtggctgtgggaggttctaagcaactgttccaggtcacttgtacagtaagctg

SEQ ID NO: 103394 - DNA, 578 bp, Homo sapiens
ggggagacctggaaggaagcgactgcactgatccagaaatgcctcccaggctatccaggaggggccaagagattaaaagcaggttcagaaggctcagatgccactcaccagacagcagggtcgactgctagtgaccttgagcccagtccggacagacagacaggcagacagacgcacggacaagcagatgctccttggccagctatccactcttctgtgcctgcttagcggggccctgcctacaggctcagggaggcctgaaccccagtctcctcgacctcagtcctgggctgcagccaatcagacctgggctctgggcccaggggccctgcccccactggtgccagcttctgcccttgggagctggaaggccttcttgggcctgcagaaagccaggcagctggggatgggcaggctgcagcgtgggcaagacgaggtggctgctgtgactctgccgctgaaccctcaggaagtgatccaggggatgtgtaaggctgtgcccttcgttcagacacgggagtctcgctatgttgcccaagctagtcttgagcttctggcctcaagcaatcctcccacct

SEQ ID NO: 103395 - DNA, 329 bp, Homo sapiens
gaaagggagccaacagagacatgatgatttatctaactttgtgaggaaaccaagacaggaatttgttagaattcaaagtattatgatttcaaccatgagactacatgaaattaagcaacatttaatgtttaatccctagcgaatgacatacttttgctctgggatgtgatttgtttgccgtaattcgttttagtgatattttgctgagataaagctgcaggaatgtttgcttttcttatggcaactggcaaatagttaaaatggactgtgagaacatttgttcttcaggattctgtttaatactgagtgtaggcaaataaaacaacaca

SEQ ID NO: 103396 - DNA, 386 bp, Homo sapiens
tcctgccataacctcctgagtagctggcattacaggcgcatgccacccggcctagctaattttgtatttttgtagagacagggtttcaccatgttggccaggcgggttcgaacttctgacctcaggtgatccacccactttggcctcccaaagtgctgggatgaggctcacaggcatgagtcaccacacccggcccgaatttatgatgtggtggaattcagtgaataaatttaatgaataaactgcattgaaccgtatgaaaacatgtgtgtgctttatttatggtgtgatttaggaaatttatctttgacatttgcctaagtctgcgtgccatcagtttaatttaaagctagacttatggtatggctttgattgttttgattgtt

SEQ ID NO: 103397 - DNA, 162 bp, Homo sapiens
caaaaaaaaagaaagaaattgtgaattctgatcctcaggataattactaaatccagtgaccttttgttagtactacatgcaaaactagcgtagtttgaagataagatgtatcccagacaattattttagttcaatataaagtcattgagggagcacctttaa

SEQ ID NO: 103398 - DNA, 323 bp, Homo sapiens
gtcaggatggcctcccacatgggcacaagggcaaggctggggacagttgggtctcctcatcttatttcccaggtctaggctgatttctattaataattaaattaatcgtcgttgtcctggacctcacttcttaatgtgattccagggaactggccacattccaaaattcataatctaaggtagtgaaagaacgtgaacatcaagacagtttggctgggctcagaggctcacatctgtaatcccagtactttgggaggccgagggtagatcccttgagcccaggagttcgagaccagcctgggcaacatggcgaaatcccatct

SEQ ID NO: 103399 - DNA, 839 bp, Homo sapiens
aatttcccttttgatttcgtctttgacctacaggttttttagaactgtgttatttagtttccaatctcttgaggatttttaaaacaatatgttattgatttctaatttatttccatctcagtcaaagaacatacttgcctttttttatacatttattgaaactttttttatggcccagaatatggtctgtgttggtaaatgttccatgtgtacttgaaaataatttgtattctgatctcattgagttgaatgttctaggtatatcaagttgatagtgatgcccaagtctcctgtatctttactgattttctgcctgttctgttattgagaaaggggtattgaaacttccaactataattatgatttgtctgttctctttgcagttctcttagtttttgccttcatatatatatacatatatatgtatatatatatatatttttttttttttgagatggagtcttgctctgttgcccaggctggagtgcagtggtgtgatcttggctcactgcaagctccgcctcccaggttcacgccattctcctgcctcagcctcccgaatagctgggactacaggcgcccaccaccacgcccagctaattttttgtatttttagtagagacagggtttcaccatgttagcaaggatggtctcgatctgacctcgtgatccgcccagcttagcctcccaaagtgctgggattacaggcatgagccactgcacccagcccatatattttaaagctctgttattgggtacataaacatttaggattgttatatccttttgataatggactcttctattatgaaaagataatatactgtgggtttataaca

SEQ ID NO: 103400 - DNA, 359 bp, Homo sapiens
ttctgatagatgtagatgtgcttgataacagggctcatctcccttgctcagacacattaaatttgcacagaaggcagatctacctgtagcaacccagaatacttgcatttgaggcttttgcaagaagataatctgtgataatcttgtactgtctgctggtcagtgcttaccagaaattaaatgatattggtatagtggtttaaatcttttttttttcttattttttttttgcgacagagtcttgctctgttgccaggctggagtacagtggtgcaacctcggctcactgcaacctccacctcctaggttcaagggattcttgtgccttagccgtaattacaggcacatgccaccacacc

SEQ ID NO: 103401 - DNA, 386 bp, Homo sapiens
  misc_feature (131)..(131): n is a, c, g, or t
acagcatgagtccaggagcaatgaggaggtctttacccagcacatcctctacgagctccacaaagcgcctcaagtctgtggaggatgaaatggacagtcctggtgaggagccattttatacaggccaaggngctccccaggaagtggcagtcagtcaagtggatggcatgaagtggagccaggaatgccatctccaaccacactgaagaagtcggagaagtctggtttcagcagcccctccccttcacagacctcctccctgggaacggcgttcacacagcatcaccgacctgtcattacaggacccagagcaagtccacatgcaacaccatcgactcttcatttcccgacatcacccattatccagcagcctgggccttacttct

SEQ ID NO: 103402 - DNA, 289 bp, Homo sapiens
gaacagtgttcagaggggactgagagctcaaggagggaaaagtggctagtattccttcaaggcgtcaggtgctagggcagtcgagcaggttcttagccagctatgttagcttgggggtgcccttgtacttggcacttaagagtcccattagctgacctcccccacacaccttgactgccccctcctatagaggcggcagatggcgagagggggaaggggtgctcctgtgtacccctgctgttgagaaccaaggctgccttacaggggacctcagcctggggacagccat

SEQ ID NO: 103403 - DNA, 764 bp, Homo sapiens
gggagggttctgcttggattatgatgaggtttactggaatgtacatctgccaaactcatgaaattatacacttaaaattgatgtagattattgtactgtattgtaggttatatttcaatgaagtcatttttacaaaatggaaatatactgttatacatatgcaaatatggaacaaatggtttggacgatcacttctgtacaagaactttacattttcctttatatagttccagattttaaaaatgtgctacaaagtatatcaatgtatttcttgaaagaacttaaatataaaaaaaatccagttttatgacaaagactggggaagttgacaaagattctctgattggccaaactttagtcagtctcctgaaacttcccctagccccatctgggcacttccttgtaaaatccagttttagaaaagagccctgctcagttggtttagcaagtggtcccatcctcaatatctgatcacccttgatatctgatcgggttcctcatcctataccattcccctaaccaccctgggtgatgtctgatcaccctggcctgtcttcagcaaaaatcacattacattgggttagccagaattccccttacccctgataattcctcctggtaattttccatccactgacccccaccctgctgcttggctataaattcccacttgcccatgccatatttggaatcgagcacacatctctctgtctcactgcaagactctgttgccatggttcctataccttcacaatgctcctgaa

SEQ ID NO: 103404 - DNA, 377 bp, Homo sapiens
tgtgaaagagcatgctttatttggaagcagagtgctgcacagtgaccgacagatgaaggccacccattgggcactcacacatcgtactccaaaatacacacaggatgctttgctaataaaaatcaatgggaacagggattcctctgggcaactcccccaacctcatccctttcaggggttgggaaatctcccaaccatcttcctgatggcagcggtggttcactagagataaagcccctcagggatgccttcgtgtttcttataaagaacactttctatagattttttgaagtcttcatttgttgctttcattctatgttctcttaaggccatcagaccagcttctgtacagattgccttgatgtcagcaccagaga

SEQ ID NO: 103405 - DNA, 755 bp, Homo sapiens
tttccatctcaaaagcagctcctgactttctactggtaaagactaaatgcttaatcacggatcatcaaatagttaagtgatccaagctgcttatcgtgagctgggtgttatctgattcaaaggactgtgaaatcagtcatgcgtactagttttctatcctaatacagaagtggcatatatgaaaatgggccctagcagatccagaagcttcaagaaagcttcataagcatgcagcatctattcacattgtacctactcttcctgcttctacttcaattcacaccagtggcctcttgggtagttctccaacagcttatgggagaaaatctctggcttgatttacaggaagatctgcatcataaatgtgtaccaacaggaaatagccattgtactatagcctcattcagaggtagcctgatagatagtgttgaaataaagtcctcccagaacttcaggaaacacataagtttattcacttcattaggaaaagagatagtctgagacaccgatctacctcgattcatgggcaatggtaaaaacaaattggtctgccaatttggaaggaacaaaattgggagattggtgacaaggagatcttggggaaagggatgtggttgaatttcttagaacagggacagaataggaagatataaccagagattgacaagatgacccatgttgtggagggagttagctttttcttagtctcactggtgcttgttcaatggtccccaaataccttaccatgtgtccca

SEQ ID NO: 103406 - DNA, 362 bp, Homo sapiens
tgcaatacaaatttatatttcttacactccataatttttaacaaccataatgaatcaggtacaatatttaaagcttttatgatttttttttaactaagaaattttaaaacacacatgcccacccaccccaagtgttccatacaaagacatctccacgtggctttctttctcaggaagttagtcaaaaccgtacagctgcatggggcaagtggataagagaggaaaacagaagttgcagatgctgaaattgtagcatacggcattaacttttggttttttatcttgttttttgttttgctaccaagttactcattatattgagcatttttcagtacccttaaagtaaaacaattcaacccctt

SEQ ID NO: 103407 - DNA, 470 bp, Homo sapiens
gttttagggaagtactgtcgactcaacttcaagcatttgtgtcacttgaggtggttgctttttatggtccagatttatatttccctcactagagtactggacccttttgtcagacggtaaacatggtgtttttgaagccttcatttaaattggaaataggagcatggaggaatattggggcgttttgaaataaacgtggatggccgagcatggtggctcacgcctgtactaccagcgctttgggaggctgaggctagtggatcacctgaggtcaggagtttgagacaagcctgaccaacatggtaaaaccctgtctttactgaaaatacaaaattagttgggcctagtggtgcatgcctataatctcagctactggggaggctgaggcaggagaatcacttgaaccctggaggtggaggttgcagtgagccgagatcgccccattgcactccagcctgggcaagaagagc

SEQ ID NO: 103408 - DNA, 245 bp, Homo sapiens
ggagttcgagaccagcctgagcaacatagtgagacttcctccctatttaaaaaataataataaaaaccaggcgtggtggtgcgcacctgtaatctcagctacttgagaggctgaaggaggaacactgcttgaattcagggaggtcaaggctgcagtgagctgtgatgacgccactgcactccagcctggacaacagacccagtctccaaaaaaaaaaagaaatgttaatatgtaaggccttatcc

SEQ ID NO: 103409 - DNA, 115 bp, Homo sapiens
tgtacacagaggctgatcgattctccctgaacagcctattacggaggcactgcagatcaagcccgcctggagaggtggagtttcaagagtcccttcctggttcaccgtctccttt

SEQ ID NO: 103410 - DNA, 197 bp, Homo sapiens
ttttcttacttgaattaatcaaaacacacgaagttgctaattcgacttcctgatcactgtgggctcactggtgctggcacactgagttggcataagctccaggaaggcccagagcggagtccttcacacacttctcatggtcaaatatgtggtttcctttggattttttgaaatgttggaaattgttcattgatcct

SEQ ID NO: 103411 - DNA, 472 bp, Homo sapiens
tttatgtgggacagagaaagcaggcgagcaaggcagatggaatgaggcaagacaagcctggaaaagcaagagatttggtccacaattatgattcatttttatttcttactgtatgtttccacattttggagcagttgaaaaattctaggtaaagaggaaaacctagtttaaaattctttaaactaaccctcacttgttcaatggtgttttaagaagtctagaaagacagatactaaattttccataggtcttctttagtaatgatgtggaaaagcatgatatacttgcagcctggctgctgctaaaaatgactaagtcatttataaaatcttatcaatgtttgttttgatatggcttctccatttccgatgttacctaacacacatttccatcttcataatccaagccattcttgtttcaaatactataactaagacaactttgtaaagaatttcctgatatgtaaatctct

SEQ ID NO: 103412 - DNA, 341 bp, Homo sapiens
ccaacataaaactaaatatgtagatctcaagcattagtgagtcatttgggttggacataaataagagaattttgtcactcagaaaatacactacactaggaatggggagtcagaaagcatagactagctatcatagctatcataatgtacatatggtacaatactgtttcatggtagacgtgccattcaatttttgagaggcagccatatgatgtaaagtggactattaactgttgatgtcaaaattaacaatactctatatagaaaatgtccacagattcatgaatttgaaatgaatttaaaaaataagtaaaaaatgtctgtgggcccagaattgacca

SEQ ID NO: 103413 - DNA, 2171 bp, Homo sapiens
  misc_feature (847)..(847): n is a, c, g, or t
  misc_feature (1675)..(1675): n is a, c, g, or t
  misc_feature (2070)..(2070): n is a, c, g, or t
tcaggtatctttacagcagcaccccactctctgtagtaccaatttactgtattagtctgttctcatgctgctgttaagaaatacccacaactaggtaatttataaacaaaagaggtttaattgactcacagttctgcatggctggggaggcctcagaaaacttacaatcatggcagaaggcacctcttcacggggtggcaggagagagaatgagtgcaagcaggggaaatgccagatggcttataaaaccatcagatcttgtgagactcactcactatcatgagaacagcatggggaactgccttcatgatctgattatctctacttggtcacacccctgacacatggggattatggagagtataattctagatgagattttggggggacacagccaaaccatatcaggcactaagcatttttccccttgaattgtgggatttctttggttttctttttgtcttttgggtgttttttggtagacatatctttgttctgccagacttgagagcagggtctttatctgattcccactgactcacaaggtgctaaccacttggtcttatacacagcaagtgttgaatacatacttgggttcttatttacttctttttttattccacagggatctgtgtggcagcagggaatctattgctaatgatttgagtagtctcagctatgctaatataccagataatgatgagggtgattatttattcagtaaatgattgttgagcacctgctatgcgccaggcatagttctgggcatagtgcaaagcagtgatgcaaagtttctgcccttcaggagcttacattttactcaggggagacagacaataaatgaagnaaaacatttaattccacagggaatttcctcctagaggtgcccaggctctgtcacctggcgctctgggtccacaggtgtgtttcccttttcccgtggttcatccctgtggaataactcagcacttcctgtgtcccctctgccccctcacagatccactcacacaaaagaatttgtgagcgaccaagacattagagagcttacagggagccaaagcaagggcttcactttatactcaactgttaataccaaagcgttcccctgttgccacttcctcccaccacacagctcccaagtgcagatccctgagggatgtttttattcctgaccccagcctgcctgcccatcttggtgcttggtgaacgggcacatggagcccacccttcccagaagcagtgggagtacagacagcaaatgaacaaagcagcagccttccttccagtgcctcacaggtgcagagctctggacagtgctgtgagggaggttgttcccactttcccctttacagatgtgtttccatgtcatgccgttgagatgttagactggccaagggcttgttcatcagattgcttctctctcttaactccttcaccagtgatctcagtccatgccatggctttaaatgtcattcaggtctctattcaaatgtcacttcctcagagaccttccttgacaaccctgtctgaaatagcacatgcatgcacatataccccttaacctgctttatttctcttcatagcatttatgttaatatctttttcgtttattgtctgtctctgaaggtagggactttgcctcatttactgcttttcagttcttggaacaatgctnggcacataggcaatcaacgaatgtttgttgaataaatgatttttttctctggaaattgtcaaaatctgcatgaggtgtatcaggccagccattgtcagcctcagtttagaggcaaggaaataggttcagaaaggttcaaggacgtgctgaagtcacagggcgaggcagcagcagagagcctgcttgttgagagccaagtcttatgggacttgcctccttctctcccactgaggctggggacaccaggtggcccagaggcatgtggatacctccagtgggaggttaggagagtgctacacagaaactctgagttctaacactcttgggaccataaaaaatggaacaagtctgggcatggtaactcacgcctgtaatcacagtattttgagaggctnaggtgggaggatcacttgtggccaggagttcgaggctgcagtgagctatgatcctgccactgtactccagcctgggcaacacagagagacctcacttcttt

SEQ ID NO: 103414 - DNA, 321 bp, Homo sapiens
tccagtttattttttattttatcacattccatctataaaatatattctgcatctaatgacttctcatcacttccattgctaccaccttattccaagccacgattatctttatcctagatgattgtaatagcccactctattacaaacatattccagggtaataacagaacctactctagggaaataatggaagccaattagtcacaacattgttaaatacctgaaagaacaaacagaagagttaggataatccagacattagttattatagccagctgctacccctagagatggtatcatgggaaaccaaaagctgagatc

SEQ ID NO: 103415 - DNA, 415 bp, Homo sapiens
tcacctccttcacgaggccttccatgaacctccacctctgattcctctcttacagtaacccgttagcttcctttttactgctgtgcaatctgtaatgtttatttgtggattgtttaccagactgggagctccactgggataggggctgctgtttgtcactgcttgacacggtgcacagtgcccaagaaacacagtatgagaaagggcgggaggaatagctgagggttcgggaagggagagagctcatttgttttttgttgtttttgtttgtttgtttttgagatggagtctcgccctgtcacccaggctgaagtgtagtggcgaaatcttggctctctgcaacctccacctcccaggttcaagtgattctcctgcctcagcctctcgagtagctgggattacaggcatgcaccac

SEQ ID NO: 103416 - DNA, 751 bp, Homo sapiens
atcccatgggccagcatttactgctgctggtttgttaacagaactccgacctcatggacattggttgcttgatggttatgtgctgggagtagggaatgggaagatgattggaacacctggagtataagtggagtaaagagtacagaagaaatgcctctggcggaaaatttgaagcagtttctgtgcaagactggagctcacacatgaagccaactctgaggaagtacaaagtgttgtccccaatcctcgtaatatccagcttctttggcagcttgctctgcccaaaagaagataggagacagacagacagacaaacacacaggcatacacacagatgcgcagatggacagacaataaacttttcctggggatgtgaagaaagaatctaagaagtaaagatgggactccgtttcagatgatgaagctctaaaatgacttcagttgacgggtaaagcccatgacctctggcctcagcaggtttcagagaacaggcagatgggtgataatactcagaaaggcatccatttatcagtgagttttccttctaagctacatcccacacagcagctttgtgaatgccttcatcccacacctcagcaattttgaaccagaacaagtttccgtaaagggtaaggatgatctgtataaaatggtctgtgtaagaatgatctgcataagaaatgaaaagagcaggtgtgttcaaggagtcagacctcttagactctaagcacccccctctctcataatacct

SEQ ID NO: 103417 - DNA, 481 bp, Homo sapiens
  misc_feature (3)..(3): n is a, c, g, or t
  misc_feature (5)..(5): n is a, c, g, or t
ctntntacggttgctaagaactaccttgattaaatttatggacagtttaagaaggagaatgcttaggaaggtgatctttataaaatcagtggatcctctgggtaaagacggtagggcagaggccgggcgcagtgactcatgcctgtaatcccagcactttgggaggccaaggtgggcagatcgcctgaggtcaggagtttgagaccagcctggccaacatggtgaaaccctgtctctactacaaatacaattagcccgagcatggtggcgggcgcctgtaatcccagctactcgggaggctgaggcaagagaattgcttgacccgggaggtggaggttgctgtgagccgagatcgcaccactgcactccagcctgggtgatggagtgagattctgcctcaacaaaacaaacaaacaaaaaatcccacaaagaatggccaggttggaggggaggggtctgcagttttaattagcgtggtttg

SEQ ID NO: 103418 - DNA, 125 bp, Homo sapiens
ggcgcctgccggcggaatgggcaccttctctgttcaaggttccaagtggaggtcgggggcttcagaaaggagcaggtggggcctcgccctccccttgcaggagcaggaggcagctcacaggcatg

SEQ ID NO: 103419 - DNA, 114 bp, Homo sapiens
actgctctacatttggcctgtgccagtgaccatgtgaaagtggtcactctcctggttagcagaaaatgccagattgatatctgtgacaaagaaaatagaacgcctttgatacag

SEQ ID NO: 103420 - DNA, 105 bp, Homo sapiens
ccacggccacccccagaagctgagacatcctgacggggcctccgttcctggccacctccaagctcacacatcacggagcccccaagcctggagcagccctctctg

SEQ ID NO: 103421 - DNA, 157 bp, Homo sapiens
tcaagaaacattaactgagatcctactatgtgccagatacaaaaataaatgccttcaagaggcacatgttatggtagaaaacctctgtaaaaacatctgttggggcgggtgcggtggctcacacctgtaatcccagcactttgggaggctaaggcgg

SEQ ID NO: 103422 - DNA, 333 bp, Homo sapiens
ctcattctcctttccctcctctccatctccctattgcattgtgtctgactgattttcagagcaccttcgctgtttcccccttctcgttcccttcccataaaatatctagacaggaaggaggtggctgcagaggctgaacaatctcatattctgcctgcaatgtcatcgtttctttcccccattttagggggctgaagttgcccagcaagggatgcagaggagctggaaaagaaggggggagctctccagaggcagctgcggtcaggggcagggactgccgccagatgtgcctgcctttctgggctttgatgagaaaggggcagcaggaggaaa

SEQ ID NO: 103423 - DNA, 401 bp, Homo sapiens
caacaagagacaagtaaaatacaactttataatggagggtgccactaccctaacgccatggtaaatcttaccttcatccaccatgggtaaacaagtgtacaacatcacttataatacattctagtcacaacgtttaacttgaatctaataaagactttaaatgtaacttctagtttagagtaaatcaatgagatccaggagcaagctaaatcatactatgagaagcaatcaggcaaatctaggccaatctcttgaatgtgccagtgaaatgcaaaatgggtctctactagattaaaagaaccttatgggacacaacaaccagatgcaatgtgaagtcctgaaatcaaccacctctagaggacattttggaagaatttgggaaatctgaatatgaactgggt

SEQ ID NO: 103424 - DNA, 968 bp, Homo sapiens
agaattagaacatcaggaaggcaggcacgttactagagagagttgactaaacaagcaggattccacattaaggatgtacatcaatctgtgtacatcaggtcagttcttggccttgagttcataattttaaaaaattgtataagacaatacctacaagccacccttagtgattaaagagcaggataaaaacaagaataattacaccaatcatatttatgttattagccaagaaagtagtcatttagggtgtttatttttccagatgatcttgtggggctgagacaaggagatgaggagtaggaggaagattctgttgcactagttgtttttggctgaactttacaataacctggggagcttaaaaaaatatttatgccaaggcccgccatggtatgatttaattggtgtgcgataagacctggatgttttgttttttagagttcccccaagtggttttaatgtgcctgcaaggtacagaagatcagagaaagtgaattattggactggaaatggctacttagcctgctttactggagcagggagctgtggattggagattaataaagggtctttgaatccacaatgggaagtcataatttgattctagaagcaggactcagaaggatataaagctatgggaatggtggttgaaaaagttctgacctcaatagttaggagctctagagtcagtgggaaaagcagcattcacttcaggctgcagagctgtgtccagagcctgtgattaaaaaaagttggcgggactgggggagcacagatgagactggtaccctatgcctatgctgtatacctaactaacttccagaatggtgaggctagtgcctccttataagagcagtttagtgaagaacaagaagagactttagtgacatccttaccaacttggatttaacaataacacattttttttttgttattgtcgttttttttgttttgagacggagtctcac

SEQ ID NO: 103425 - DNA, 308 bp, Homo sapiens
actgagataggagaaaaccaccttagggctggaggagagacatgctagtggtaatactgctctttaatgcaccgagatgtttgtacacgtgcacatcaaggcacagcaccttttcttaaccttgtttacgacacagagacttttgtttacatgttttcccgctgaccctctccccactattaccctattgtcctgccacatccccctctccgagatggtagagataatgatcaataaatactgagggaactcagagaccagtaagcaccggtcccctgggcccacttttctttctccacactttgtct

SEQ ID NO: 103426 - DNA, 474 bp, Homo sapiens
ggccctggggcaaggggaaaaaatgagggctccggagagagataggggcgagtctaggcgagggagggaacggggtggaaagttgatacctagggtgagacttgggttcagggaggagggtctgggtcctgcagagaggccgcgggcacgactaggtcccaagggagctgggagaagtagggagcccggaccggagaagtcaaggtcggaggcaggggctggaggggcagctggggaggggctggagcccgagggaggagggaggaagggaatcctagggaataagtgggagtcttggtagcttgtcggatgtgagacaacacccaggggtccgacctggcgtcacaagtcacgggatcaggctgggcgcagtgactcacgcctgtaatcccagcactttggggagagggaggatcgcttgagcccttgagtttgagaccagcctaggcaacatagtgagaccaatgtttctag

SEQ ID NO: 103427 - DNA, 815 bp, Homo sapiens
tagattttagttacttaaaagatattcatatggagatattcagaaatggtgtgaaacttaagaggagctagagctgccgttttaggaatcatcacctcgtgatattaactgagctcggactggccacaatagctcagagagagtgtagagagagctgaaggtaaaactgggaaacgccaacatatgagatgaggagtggccagaaaaggcaggagagcacccaagtgtgactggtgtcaccgaagccaagatgggaatacatttcaagaagaatggacacatttaaacagaaagataagtatacacacacacacacacacacacacacacacacacacacactttctctctctctctgccccctggtgaccttttccagaggagtttgcctccagtgggcaagtgacaggaaagttgtaggactgagcaggcaaggaaagagacaactagaggggtcatctctgaactgaggaaatatggccagggacaaataaaagtaatgaatagagtgaggtccctgcagagtagaattggagccagagcacaggtggagaagttgcctggggatgttacctaaagtgtaggacacagagatggctgactgttccaattaatctgtaggtggggaaaaggtaacttagaagtacctccatctgctagccactgcctttgctaactaggagagggcttggtcatctccattcaaattgtcccaaagttgttgtccctgataacagtctgtagagcaggccttctctgattgttcccccccgagagccccaaatgacagaaaacacaaaaagccagtcaaccca

SEQ ID NO: 103428 - DNA, 472 bp, Homo sapiens
ctccatttgctctccagttttccaagaagccttctacctgactggttttgctctaaaccactatctcagactgaaattcttcacaaattccacccaggaataataagggttcatttctgaactggactcagcatgccatatgacccatggagatattttcctcatgagatttgacacaggggtcattggccatgccgcaccctagctgatgactgggcaagttaccaaaaaccatctgagccagcctcctcgtctatgcaggggaataatatggttctgcaggatggttgaggtcagggaaaaatgtattcaaattagcaaattcttgccaaaatacaaaaagcgagattcttcccaccaactctcactcatcatatagaactactcagtgccccatgtatacaaatgtaacaagcctgcatgttgtgcacatgtaccctaaaacttaaagtatcatagtaataaaatttaa

SEQ ID NO: 103429 - DNA, 355 bp, Homo sapiens
aaaaaaatcatgaacatccaggctgcagtccatattccagttgtctcatttgtcctgacactgccctttgtatcattttcccctccagtgcaggctgcagcagccaaggatcgtgtattgcatttagttgtcatgcattagggagacagagcaaaagatgatgatggaacaaaatggggcaaaatgttaaatattgatgaatatgggtacgggaatgttctccccatgtgacccctgctgacctctttatcccagtctcaagacttgtactcttgccaactatacggcagctccagtggcattctttttgttcctcagacaaaccaagctattcctacctttgagccattgactc

SEQ ID NO: 103430 - DNA, 442 bp, Homo sapiens
ctaacacggtgaaaccccgtctctactaaaaatacaaaaaattatctggacgtggtggtgtgtgcctgtagtcccagctactcgggaggctgaggcaggagaatggcgtgaacccaggaggcagagcttgcagtgagccgagatcgcgccactgcactccagcctggtagacagagcaagactccatctaaaaaaaaaaaaaagaaagaaaagacagaggcaaagatgccttccctgctgctgctgatggttgggtcaaaagaagacacacagaatcctatctactgagcttggcagagataaagggtgagaaaatggccttcaagatgccaccaagagccagccagatgtggtggctcacgcctgtaatcccagcactttgggaggctggggcgggtggatcacttgagttcaggagttcgagaccagcctggccaacatg

SEQ ID NO: 103431 - DNA, 375 bp, Homo sapiens
ccatccaggggcacggggacacggctggaacacccggcatgccagcactgcactatgccagcaggggctggcagtagaaatgagagttactcactggcgtcaccctcaccagtgccctctgcttggcccaagaaacgttaagttatgagtgcacagggccccgcagaggctcaggctgctgatttggtaacactggccacctgtgggacagccacagcaggtcagaggcagagatgtgacaacagactgcaaatgagccaaagaacagaatccccaacagaccagttctcacaatcccaccccgggcttctgggaaaagacccaattatctgtgtgagacagtgcctgcctaacaccacagagaacacacaacac

SEQ ID NO: 103432 - DNA, 886 bp, Homo sapiens
ccaccttggcctcccaaagtgctgggattacaggcatgagcctccgcaccccgccagtttcacaatacttttgagcatgggcatcaaagtatcctcaaggttaaaaatgttggggtccaagcattctacctctttgatttgtatggtttgaattatgactcagcattttaggaacatgttggctccataatctttcacccacaccccacttgaaaaagaagataatttttcagatacacttgcagatacaactacatattatccacatcatttttcttggaactgaaaactggttttatactcaaacatcctattgggcaactgtcaaataaattaattctgacatttgttaaaaaaaaaaaaaaaaaaaaaaaaaaaaaaaaaaaaaaaacaaaaaaaaaaaaaaaaaaaaaaaaaaaaaacaaacaaaaaacagacaaaacacaacaccagacacgagagggaggagcgaggcgagcacagaagcgaggcctggcaacgaaaaccagacagggagagaggggagagagacagcgaaggagagagagggaccacacagggcggccggcgcgagagacacgggggacatacgagagagagagaagaggagacagaagagacaaacgaggaggagggaaagagaaagaggaagaaaaaagaaaagaacaggaacgcggcgacgccgaggggaacagatggagagagactagaagaagagaggagaagggagggagggaaggagaaggaagcaccagaaggaaggacagggagagaggcggaagcgggaggggcaggaacagagacagcgccagaagaggaagggaacgaaagaagggagcggcacaagcacagctaggcagaggaggacgcagagggcggggaggga

SEQ ID NO: 103433 - DNA, 170 bp, Homo sapiens
ggaaacttataatcgtggcggaaggtgaggggaaaggaagcacgtcttagcacagcgaagcaagagagatagagccagaaagcgcaagtgcgcatgtgcgatgggggatgtgccacacactttaaaacacccagatcttggccaggcgcggtggctcacgcctgtaatcc

SEQ ID NO: 103434 - DNA, 207 bp, Homo sapiens
ttactatcagtaatctatgctctttaagtaacagttttattctcaggacattaaaatgtttagggagctggcccaagttgtggcggcatgtacttgtagtcccagcttccttagaggctgaggtgagaagatcactttagcccaggaattcaaggccagcctgagcaatatagtgagaccttgtctctaacaaaaaaaaaaaataaa

SEQ ID NO: 103435 - DNA, 424 bp, Homo sapiens
attgcttgcttagctgggtaatcagcaaagtcccagaacttaacattcatctcaaagcctgttctatgtagttagcagttaacttaggtaaaattagagtttcagaacatctggattctgtttatcagaattttaaaaataagatgtcacctagaagataattacaacatttttgtttgtccattaaaatatgaaaacatatttttactttttttccctatgtagtagagaggtataaagctttttaaaaagtgtctttcttatctttcatgattgtttctgactgtcatcttctgtttctctgtattaatctcttacgttttagctttttggtctgctctttgttagtgtggtacatataattttgtaatgatgaggaaaccaaacccaactgctaatgagggttatttagttgataatatag

SEQ ID NO: 103436 - DNA, 347 bp, Homo sapiens
aattggcaaataaggtactcagtggaattaaaaaaaattttttttggggagcctgcattgcatgtgaaaggtgactctgcatggataaaaatgaaaaaatgaaggaaagttatgagtactgtgcacggaagatgtggtacgaatcaaaactgtggagttaggaaaaattttagaagttccctttcagtagtacagcttatgttttctgtgaattcgtgtctcttacctacctgtagtttctttttaagtaaacttattgaggtgtgatataaatacagaaaactgtgccaatcttacatatacagcttgatgaattttcacaaagtgagcacacctgtgcaaccacc

SEQ ID NO: 103437 - DNA, 580 bp, Homo sapiens
ctccctgaagtctcgagtcaaatatccagctacctccttgacatctttactccgatgttcaccaggtgcagaaaaaaactcttactaccctccctctccaagcatttgaaaaaatgagtcccattcttccagacactcaggccaaaagtcttctagtcatgcttaacgctcctctctctctcaccacatatgcttcctcagcaaatcccactggctctacttccaaaagagaagcagaacctgaccatttctcagcagctccactgtcatcgtctggttcaagccactatcaactgccacacagatgagcacagcagcctccacacctgtgtccctgcttctggtccccgaccatgctccacacagcagccagatgacctctttaaagtggtaagtctgcgcctgtaatcctagctactcaggaggctgaggcaggagaatcgcttgaatctgggaggcggaggttgtggtgagccaagatcgcaccattgcactccagcctgggcaacaagagcaaaaatctgtcttaaaaatatatatataaataacggctgggagcggtggctcacacctgtaatcc

SEQ ID NO: 103438 - DNA, 402 bp, Homo sapiens
cagaaatctaatatttacaatattagatttaatattttaaatatttaatctatgtaaatttaatatttacaattcatggattcctcactggctctacagaggcagataaggccttcctatcactcagctactggtctcaggctggccccagtgcccattcttcctatgttgtgcacaacccctttctcagaaagacaggggcaaagctgtcaagagaactttctatcacttccagattcgatcttccaggcagtgtggacttgagtttttacagctgagattctccaaaatgacactcaaaaaaagaaaagagaagagagaagcacttctagaacagctgccttctcagtgcctggggcagggaagagacagcccaaagatcttgaaccagaaaacaaagcc

SEQ ID NO: 103439 - DNA, 1406 bp, Homo sapiens
agatgcattgtctcttcctctgcagttgagctgaatgaatacctccgaagccgctttgttctccagatgtgaatagctccactataccagcctcgtcttccttccgggggacaacgtgggtcagggcacagagagatatttaatgtcaccctcttggggctttcatgggactccctctgccacattttttggaggttgggaaagttgctagaggcttcagaactccagcctaatggatcccaaactcgggagaatggctgcgtccctgctggctgtgctgctgctgctgctgctggagcgcggcatgttctcctcaccctccccgcccccggcgctgttagagaaagtcttccagtacattgacctccatcaggatgaatttgtgcagacgctgaaggagtgggtggccatcgagagcgactctgtccagcctgtgcctcgcttcagacaagagctcttcagaatgatggccgtggctgcggacacgctgcagcgcctgggggcccgtgtggcctcggtggacatgggtcctcagcagctgcccgatggtcagagtcttccaatacctcccgtcatcctggccgaactggggagcgatcccacgaaaggcaccgtgtgcttctacggccacttggacgtgcagcctgctgaccggggcgatgggtggctcacggacccctatgtgctgacggaggtagacgggaaactttatggacgaggagcgaccgacaacaaaggccctgtcttggcttggatcaatgctgtgagcgccttcagagccctggagcaagatcttcctgtgaatatcaaattcatcattgaggggatgggaagaggctggctctgttgccctggaggaacttgtggaacaaagaacaggaccgattcttctctggtgtggactacattgtaatttcagataaacctgtggatcagccaaaggaagccagcaatcacttatggaacccgggggaacagctacttcatggtggaggtgaaatgcgagaccaggatttcactcaggaacctttggtggcatccttcatgaaccaatggctgatctggttgctcttctcggtagcctggtagactcgtctggtcatatcctggtccctggaatctatgatgaagtggttcctcttacagaagaggaaataaatacatacaaagccatccatctagacctagaagaataccggaatagcagccgggttgagaaatttctgttcgatactaaggaggagattctaatgcactctggaggtaccatctctttctattcatgggatcgagggcgcgtttggatgagcctggaataaaagagtcatacctgggcgagttataggaaaatgttcaatccggctagtccgtcacataaatgtgtctgaggtggaaaaaagggtgat

SEQ ID NO: 103440 - DNA, 1090 bp, Homo sapiens
  misc_feature (716)..(716): n is a, c, g, or t
  misc_feature (763)..(763): n is a, c, g, or t
  misc_feature (765)..(765): n is a, c, g, or t
  misc_feature (807)..(807): n is a, c, g, or t
  misc_feature (1037)..(1037): n is a, c, g, or t
agatgcattgtctcttcctctgcagttgagctgaatgaatacctccgaagccgctttgttctccagatgtgaatagctccactataccagcctcgtcttccttccgggggacaacgtgggtcagggcacagagagatatttaatgtcaccctcttggggctttcatgggactccctctgccacattttttggaggttgggaaagttgctagaggcttcagaactccagcctaatggatcccaaactcgggagaatggctgcgtccctgctggctgtgctgctgctgctgctgctggagcgcggcatgttctcctcaccctccccgcccccggcgctgttagagaaagtcttccagtacattgacctccatcaggatgaatttgtgcagacgctgaaggagtgggtggccatcgagagcgactctgtccagcctgtgcctcgcttcagacaagagctcttcagaatgatggccgtggctgcggacacgctgcagcgcctgggggcccgtgtggcctcggtggacatgggtcctcagcagctgcccgatggtcagagtcttccaatacctcccgtcatcctggccgaactggggagcgatcccacgaaaggcaccgtgtgcttctacggccacttggacgtgcagcctgctgaccggggcgatgggtggctcacggacccctatgtgctgacggaggtagacggaaccttatgacgangagcgaccgacacaaggccctgcttgcttcgacaacgcgcgggcgcntnagagccttgagcagacttcctgggatatcacatcatcattgngggatggaaaaagctgctttgtgcctgaagacctgttgaaagaaaggacgatctctctgtgtgactccatggattcagataccgtggtcagccatggagccagcatcactattgacccggggaccagtcttattgggagtgaatgacagacaggtattactcagaactttgtgcatcttatgacaacggtgactgttgttctttgagccggtaaccgtggcctgtcgcgntgaattatagaggggtccttacgcaagaatattctccaagcctcttagactta

SEQ ID NO: 103441 - DNA, 1243 bp, Homo sapiens
agatgcattgtctcttcctctgcagttgagctgaatgaatacctccgaagccgctttgttctccagatgtgaatagctccactataccagcctcgtcttccttccgggggacaacgtgggtcagggcacagagagatatttaatgtcaccctcttggggctttcatgggactccctctgccacattttttggaggttgggaaagttgctagaggcttcagaactccagcctaatggatcccaaactcgggagaatggctgcgtccctgctggctgtgctgctgctgctgctgctggagcgcggcatgttctcctcaccctccccgcccccggcgctgttagagaaagtcttccagtacattgacctccatcaggatgaatttgtgcagacgctgaaggagtgggtggccatcgagagcgactctgtccagcctgtgcctcgcttcagacaagagctcttcagaatgatggccgtggctgcggacacgctgcagcgcctgggggcccgtgtggcctcggtggacatgggtcctcagcagggaaactttatggacgaggagcgaccgacaacaaaggccctgtcttggcttggatcaatgctgtgagcgccttcagagccctggagcaagatcttcctgtgaatatcaaattcatcattgaggggatgggaagaggctggctctgttgccctggaggaacttgtggaacaaagaacaggaccgattcttctctggtgtggactacattgtaatttcagataaacctgtggatcagccaaaggaagccagcaatcacttatggaacccgggggaacagctacttcatggtggaggtgaaatgcgagaccaggatttcactcaggaacctttggtggcatccttcatgaaccaatggctgatctggttgctcttctcggtagcctggtagactcgtctggtcatatcctggtccctggaatctatgatgaagtggttcctcttacagaagaggaaataaatacatacaaagccatccatctagacctagaagaataccggaatagcagccgggttgagaaatttctgttcgatactaaggaggagattctaatgcactctggaggtaccatctctttctattcatgggatcgagggcgcgtttggatgagcctggaataaaagagtcatacctgggcgagttataggaaaatgttcaatccggctagtccgtcacataaatgtgtctgaggtggaaaaaagggtgat

SEQ ID NO: 103442 - DNA, 646 bp, Homo sapiens
aatgtgtgaagagaaagtttaactcttcacccactatgttgtttttagttattttgggctgccatattgaattttttgtttgtttgttttgagaaggcgtttcgctcttgttgcccaggctggagtgcaatggcgtgatcttggctcactgcaacctcctgcttcctgggttcaagcgattctcctgcctcagcctcctgagtagctgggattacaggcatgcaccaccatgcccggctaattttgcatttttagtagagacggggtttctccatgttggtcaggctggtctcaaactcttgacttcagatgatctacccaccttggcatcctaaagtgctgggattacaggcgtgagctaccaagcccggctttttttgttttgacatggagtttcgctcttgtcacccaggcaggagtgcagtggcgttatcttggttcactgcaacctccgcctcccggattcaagtgattctcctgcctgagcctcccaagtagctgggattacaggtgtgacccaccacatctggttaattttgtattgccatattgaatttttgtttagaaaagatatgtgtttatgtttccagttttattacctttccctatttataataaagggattctttatgcttttaaaaaaaaa

SEQ ID NO: 103443 - DNA, 562 bp, Homo sapiens
gtggctgaatgaacagctgggactatgcttaacccattcccagcttataaaagccccatggcagctgcagtgaagcatcagaaaagtatagtaagaagaaactgaatttgaagtggattcttacaaaggaaaaagaaaatcactattgtaactataccaaattactatgtatgtgatgcaacaaaattcaaatatgaaaaccatcttggaggccgggcgcggtggctcatgcctttaatcccagcactttgggaggccgaggcacggtgcctcacacctgtaatcccagcactttaggaggctgaggcgggcggatcacctgaggtcgagagttcgagaccagcctggccaacatgaagaaactccatctctactaaaaatacaaaaaattagccaggcatggtggcgcatgcctgtaatcccagctactcgggaggctgaggcaggagaatggcttgaacctgggaggcggaggttgcagtgagccgagatcacgccattgttctccagcctgggcaacaagagcaaaactctgtctcaaaaataaaataaaaaattgttt

SEQ ID NO: 103444 - DNA, 800 bp, Homo sapiens
caggggggctcccagggcagcctggcccagggagcagtcctgactctgcaggggatgcccagcaaggggggctgcagacccctcagagcctcccctcctctctccctggaaaggagctggggaacccatagtgcaaatctgtggaccactcagttatggagggaggctgtgcctgaaggtggacactggggtgcactccctccaccatctcgccctgcaccgctgtcctcagtacagccacttctcgtaagagtgcaggccatggatgccaccgtcgatctgggctgacatggtctgcttctcaaacttgagctcccctgagtacatcatggaccgaaggacagacaggctgtgggccccgatatcctggcagccatgctggatgcccactatgaggtagggcacgaacttctgaatggaccctttgtcctggatggagcccaagacatcctgcgtgatcttcgccttatccccgtcgttgaagtattgtttctggctgctgctgctcttctccatggcatccagtgagcccatgccctggtacttcttgagctgcattccgtctgagaagaagcactcgccgggggcctccatggtggcggccagcagggagcccatcatcactgtggaggctcctagggccagggccttgaccacatgccccatggtctggatgccaccatcggctatgatgggcacaccaaagttctgggtatgcttggccaccttgtacacagcagtgccctggggctgactgcaggctatcacttcctggttgatgtagatggagccgcgcagtc

SEQ ID NO: 103445 - DNA, 513 bp, Homo sapiens
cacgatctcggctcactgaaagctctgcctcctgggttcacgccattcttctgctgcagcctcccaagtagctgggactacaggcacctgccaccacgcctggctaatttttttgtatttttagtagagatggggtttcaccatgttagccaggatggtcttgatctcctgagctcgtgatccgcacgccgtggcctcccaaagtgctgggattacaggcgtgagctactgcaccccaacaatatttttattttaaaaagagaatttagcatgtacgatatttagaaatctgagatttttctttacaatttctacacagcttagaaaaatgtaacttttactttccaaggtagtatgcctgtttcaaaaacaataattaagtttccaatgtctctgccaggaagaagaatatgtatcttctccctaaccgacattcaatcaatttattgactataaacccagggcttataatggatgaaaatgagctgataataaataagaaaacgtatgttg

SEQ ID NO: 103446 - DNA, 413 bp, Homo sapiens
ggctggtctcgaactcctgacctcagttgatccgcccacctcagcctcccaaagtgctgggattacaggtgtgaaccaccacacctgacctattgattgagttttttagagacgaggtcttgctatgttgcccaggttagacttgaactcctgggttgaagctatcctcccgcctcagcctccacacagctgggactacagatgtgagctactgaatctggctctaggtgtccttttagtaacacttttcaaatgattttgttagtgttatttatgtctatctctccctttatccccatgccctgtgagctactcggtgtgtttaattcatctttgtatctcttctatcttgcatatcttttatatagaaccttctcagttcatatttattgaatggatgtgaatatactagg

SEQ ID NO: 103447 - DNA, 598 bp, Homo sapiens
ctaaaatacattgactccagatggatttttaaaaagataacaacaataataataatgtgaattttttttccaagcatttctgttcaggtagagaattagagaagtttctctcttcttcttctccaagagccatctggctggatagcttttggtggatatttcatgagaggtaccagccaaacaaggagctccagaataatctgtttgaccggatagcccagcactatgccttacttttgtttcgtgtacccaagtcccactctgaagaggcgctcttaaaaaggctgccatcacttctcagcaaagccgtgtacaccagcttctgttgctgctttccacagtcctggttcgacacgcacgaattcaagtctgacatctgtaacacaatgagcctgtggatttcaggcacctatcctagcccacagagctatgacagctgggactactcggaactagacccagagcgattccgcagagaagaattaatgttgtacagaagaagactgacaaaggggagagagttttctttgtttgctggtaagagagccttctcccagaagccagcccagagcaggaaattctaccaccctcaggtaag

SEQ ID NO: 103448 - DNA, 657 bp, Homo sapiens
taaagctctcctggtgattctaatagccagtattgggtaatcaatgttttagctaaatgtgacactggtttgagagtaggcaacaaaattaaagttcaccagacatctctttgtggtagagtttttttttttttaaactgggaccagatttcacagagcttattcaagatacatggaggaataataaagaagattaaggctactgctcattatcatttttgtctttcatattttttaagggtttgcatttctaggacttggaatagttgaccatatacatagctaaaggacatgtccctgaatgagaccattatatatattatctgtaaaatatttcactatttttttattttataaatctttgtagaaataagcaatgaaatactactttcatcttttgaaatgggatttttcaaggcagtgtccttttggcattaaggtaggggggagttaatattctctctgccttgtttccacgtgaatcaatattaaagtcatggacattttaaaatctcaatttaatttcttcttatttactatgcagtatagccgtgaacaagtaatgtagatttagttttctcatcttcaaatgccctgatcaccctacctcacagggttgttgtggggataaataaaacttttatggaagcaaaaaaa

SEQ ID NO: 103449 - DNA, 791 bp, Homo sapiens
ctcgccagaacttccggttctctagctttttatacatcctactcacactcgtcctactgatttccacttaggactgcaactacccgtcctctctgcttgtccatcaggaatattgactttcccaaacatttcttaaaaattgaaaagttaaaccaaaaatacacacttttattttcttatttttattttttctaagccaaactgtatccagctttattaaagacactttccataaacaatcctggaatttcagtcaggacatgggcagacaattattaacagtatacaacaactttcaaaaatccttctctaatggactaccaaaaatcagaaagccactataaaactcaatgaagtcttcatctgatgcactgagcagggaaagttttgagtgagggttgacatttcacatttagcatgtttttaacaacttttcacaaccgaccctgactttcagaaatgaaatgaaaatggcagaatttatttgaagattcacaatctagaaacataaccactgctcttttgaggcacgccatctcagtggcaccactggaaagtccagattgcctgatgcattggtgaccaattaatgggattccggtcccaacagatgtctgggtttaagggagttaagtctatgctggaaggtggaaagggagaagaaaacataagaactaatttgttttccataccacaaggcttttgcaccaaggtggccatgtatgtcaaagtcaggaaatctttcctcctgggaaccaagaggaagtctctcaaaactagaagggaaaggt

SEQ ID NO: 103450 - DNA, 317 bp, Homo sapiens
taggtactgagaatacagcagggaaaaaatagacaaaaatattatattccaactgtgaatccagctaattatttgtgcgtgtgtgaatatatatatttacatcgcattacattgtattaggtattaaaagtaatctagagatgatttaaagtacacaggaggatgtacatatgttatatgcaaatacaatttttttttttttttttgagacagtcttgctctgtcgcccaggctggagtgcagtggcgcaatctctgatccctgcaagatccgcctcccgggttcatgccattctcttgcctcagcctcccgagtag

SEQ ID NO: 103451 - DNA, 736 bp, Homo sapiens
gtctcaactgggtaccaaaatcccccctacccatccccacttgagaaccaccaaaggaattcctctgattaactgtgctgggcatcccctcttctgggcctcagtttccccatctgtcaaatgaatggcttagcccagaagatggatagctattggcctccccaaagcagagttttccccaactctaaattttgtggtgaaaacccaccaagttctaagaacaggcttgggacaaggaggagaaaggacattcggccctcagctggagggaggcagagccctgcagatgcccatctcaggtccaccttttgcggcctcttgtctggctctaggccctctcccttgccagtttcctgttggccaccatgttttcccagttgctctgggaacacgtttccttcccacatcccactgggaataggaaagtccattgaatattcatgaacgtataaaatgaatttgtggttgatatcgatctagttcctgaggcctaagctggcctcatcttccccaagtggcctctcagccctggcttcatgtttctaagggaacttgtcctggttttcttgaaaggtaatcttcttgcggatcaactttgctaagaaaatgaaaagctttttcctctccctttaaatccctgctcgtatctgccaagagcaggaagagtccctgccagagccttgggattgcattgggcatttgagctctggagtcaggaaggtctctgttcaaatac

SEQ ID NO: 103452 - DNA, 857 bp, Homo sapiens
agcctatgagtattaatgcggacttcccagaaagattgctggttcccgtggaatatgtaatataacattgtttacttgattaaaatttaaattttatattacatttgtaataaaactagaaagcatagataagctatcaatcaaaatcacccaaatcctgtgactactactcactgcaaacattttaatgtgcaatttgtacttaattctttactttgtaatacatacaaatatgtccagacactgtgacatatgcttgtgaacttttcaaaggtgatatcctgctgtgtattatattctgttcttttcatgtggcacattacaaatgccctgtaatacagataattatcaaatacttcttagcattcttttatgtataaatgtaccatagtagtaaatttcttccttcacattgagactttttttaaaactataaacagtactctgaattgctataaaatatgttctatatcaattcattcaaataaatatatagaagttgaaaaaaaaaaaaaaaaaaaaaaaagacacaaaagaaaaaaagcaaaaaaggggggcgcaaaaacaaatagatagacgagggacgcacacagaaacgatagaccaccgacgacgaggcaagagcaaacgcagacactccatagcgcagaggagatcaactcaaccgccagagcatctagtaaaaaaccgagtggcgtcactacacacaaccagacggaatgaatcaatgcgcacccctatggcgagggacaaaaacacatgcatccgtaccagcaaagatgaacaccaggaacagtaaacacagaagcaataaccaccagtgcgtgcagccgaacaaccacgtcggcggtcagcac

SEQ ID NO: 103453 - DNA, 446 bp, Homo sapiens
ggattatctgtgtaagatatatttacccaggatgcttaacaagcgttaaacagtaacagttccaaaaatagagccacatttacactgcctactgcactgttttgaaacagttaaccagtggaagatgctaacttttggtacatatatttgttgctggttttggcccgaagaagataaatctggaagcactctaaatggctaagttccttataaaaaataaaggccgggcacagtggctcacgcctgtaattcctagcacttcgggaggctgaggcagacagatcacttgagctcagttctagaccagcctgggcaacatcgtgagacaaaaaattagctgggtgtggtggggtgcccctgtagtcccagctgcttgggaggctgtggtgagaggactgcttgagcccgggagattgaggctgcagtgagctgagaccatgccactg

SEQ ID NO: 103454 - DNA, 380 bp, Homo sapiens
acaggagcaattcaccattaagtcattcaataatggagtccagtaaaagggctaatttacgtgcttggatcctgaaaccactgagtctagggccagagccaacaagaattcaacatgctcccgtggaaagtaagccataccaactaggatatttatgtttgggacatataggagcattgattggggctcttgttcagccagaaccttggctggactctgattagtttgaaccataactactgtttacctgactgtatttgtatcctggttcttggacctagaggtgagtgttgccaaatgaaggagagagcagtgctgagtggctcattcaggatcctagcatcagcttgtggagaacagggaaaagtgttccatctcct

SEQ ID NO: 103455 - DNA, 173 bp, Homo sapiens
accttttggaaaatgaacataattaaagacattttaaagcacatcattttcattaaaatttaatgaaagattaaagcataacattttctaaagattaagaatgttaaatgcaacatatgacactacaaaaaattcactttcattcacacagtcagcctctgctgaccttaggc

SEQ ID NO: 103456 - DNA, 491 bp, Homo sapiens
acgaacccaggcagtctaactcactgctttacactgcccttctgtacatatgcatatatactgccttcttcaaaatctaacgtcaggttaagtatacggcatcctgttacaatgtgaaataagagggctgataaactgtgagaaataaggaaagtgggcatagtacatgatgaataaaaatacaggaatgtagccaggcacggtggcatgcacttgcagtcctagctactcaagaggctgaggcgagagaaaggcatgaacgcgggaggttagggatgcttgagctatgactgcaccactgcactccagccagagcgacagaacgagaccctgtctctaaaagaattaacttaaaaaaaaaaacaggaatacacactatatttgccagactgtattttaaggaaatgagttgttctttacactgttaacaaaagggaggggcattcatgtctgcataggctaagggaaggctggctgaaggtgggagaaat

SEQ ID NO: 103457 - DNA, 141 bp, Homo sapiens
gacccacaaacaagtccttccttgaatgcctgaggcttcctaacagtgaaagagccctgttcttagagtaggcaaactgattctgaggcattgtaggtggtagggatctggtagtaggtagcattaggtgggctcccggca

SEQ ID NO: 103458 - DNA, 213 bp, Homo sapiens
tgggaacagcacggtatgctctcatgtccctggctgcaaagactgtttctgtgcacggcctccttaaaccatttcccggactgaaccgtctgtagagccgaggctgcgagcgcacgtgaaggttttcacagcaggaacgtggcggcctcagtccagactcccgcccccgcagaagtgcttccatgacaccaaagcacaaggaacagagagaaa

SEQ ID NO: 103459 - DNA, 739 bp, Homo sapiens
ccaagttcaggggagatgacaaagcacatacatatgggcacacgccagccaggagggggtgatcctcctctatgtgtgagaacagaagacaccccactggccaccttgtcaatttcaacccaagggcaacagagggtgcaatgactcgtccaaggccaagtctgcaggaggctgtcagagctgctgcctggacccctggctccccgagggtgctgtcaccccagctggtcccctgtgccagcttcatcaccaacacaacacagctggcaccctcttcccatggctggcttcggagctggtttcctgggcaggggagggggcatgataaacctccctttggggcccaggctccccagacagcgtggggacataccagctggccaatgtgcctgcactgtgttcatcggagcttcctgttttgctcaatacagcaggcccttcagcggggaccacagcattccacctggggaggcctgggatgactagactatttgccagggggtgttgggcaggcactaaatctgacctcagtaactgttagcctccaagtgacaggctcctggtgtgaaggggaaataatccaggctcttatccgccgcccccagcagggctgaccatgccacaggcaggtaaggggccctcctaggggcagagccccaatgtggcgggcagtaaaccccatatactgtcacctcttgagacaagaatcccaacagcaactggccctgagaagacagca

SEQ ID NO: 103460 - DNA, 345 bp, Homo sapiens
gtatttttagtagagatggggtttcactgtgttagccaggatggtctcgatctcttgacctcatcatccgcccaccttggccttccaaaatgctgggattacaggcatgagccaccgtgcctggcctcatagttaacaactttcttgatctatctacctgcattttataattggatacatgaatcaatccaagctgtctgaatatttttttttcttcctgcacccacaaaagccagtgagaagtaggaacctaagacaatctctggaacaggtaaccatctcttaccacttacaacataagattaaacaaagagttctctcttgtggcttatttgcatatttcat

SEQ ID NO: 103461 - DNA, 458 bp, Homo sapiens
cttaattattcaattacattagatacatgttatttaataatatacctgaaccagaggcttagggatttcagacgctctgtgttaaaggaatacaaaataagcttgttttaaaatgtaatacatcatgcttctgtccccatgtttacctatgtaattttatgattccataggtaaaatagctgaaagagaaccattatgttatcaaacactgtgtcatgcttgctgagtttgcaaaaatgtaaaacgtacaatgtgtaacttttatcttcaggaagtttataacctaataaataagattcaatacacataaaacctttaatgtacgattaagtgataaagtattaagactataagtgttgtgggagttaaataattttaaaacagattttaggaataatctaatatctcattttattgacgaggaaacaaaagtctggactagctgtttaactcaaaaa

SEQ ID NO: 103462 - DNA, 180 bp, Homo sapiens
gattattcagtatttcattggaattcagtatggattatgcagtattagatcagtgttaattttcagaagtacaattttgtggtcatagggttttaacattttcagatctctgatgttaatataattagaattgtcttggtcataaatattctgtatcctgtataatcttgtatcagccag

SEQ ID NO: 103463 - DNA, 1037 bp, Homo sapiens
gcactgaggtgtttggtttggaatagggaaaaaggtaagagactaacgtggaaaggtgctaactcagagactggagattatagtttacagctgtactttccagatcttctatgtgacacaatgcactgtccttgtgggtttgtcatttattggttaatgctctagtttcaaaaccaccctgttgaaagttccagttatttatatgcccaacaaatttcatagcctgctgaactgaactgagtgtgtcagaagtgctggttaatgacgagaagagattgcctgaaaaacaacaaactgctttctggttagctgaaggcaagtgtgaaaatcagaatttagaatatttagagctaagcttctggaaccacgtagtttctacacgtggcaggccaagaatgggaggctgactcaaaactagatagaaaaatataaaataatcttcgaccacttgatagctctcaaatatatatttaaaagatttatgaatacaaaccatttatggtttatgatttctaaaaagaaagcacaattaattttatagagaggttttttatttttttaatatttctattgcaaaagtctatccgatttgatgcactttgaatattgagatattttgcacggatgaatgtatgggaactacccatgatgatgtaagaggaaagaacatttttttgtgattcaccagacatcactttaaacttggtgatgagtttaaatccagtagctaatcccttcctgagactcaaagatcgtgacgctggttggaatttctgactgtgccctttagggcctcctgagtttcaaaaggaggaagtgttcgtgcttgtgtccctgaagttccctgttgcatgagcctgcgacaggacctcacccccaccaccaggcttctatttgggattcacatcagtattagtatcgtagctacaccaagttcaggcttctctttttgtttttttacctagaaattgggctcagtggtcttcaacttgaggacgagggtgattttcctaagaaatcagcaaagagggaaggca

SEQ ID NO: 103464 - DNA, 648 bp, Homo sapiens
cttaaaaaaaaatttaaaaagatgaaattaaattttaaaaaagaaagatttgtaactggaggcaattgtgtgtgcatatatgtataaatatatagtatttgaatgtacaatattggcaaatatccagatttatctcatagcaagattaaccttttcagtctaggaactgttttcatctgattttgaatccttgtttcattgtgcagtatatattatacaggttctcaaatggtaattgaattgaaaccttcgtttttttttaaagaaatgtaaacctgcattataattgcattattggtattcatatttaaaagctgcatattggaagaaaaatagtttcccatagttggttttacattaatgataaagtttgtatcgacaggataccacttacagcatcttcttactatatgacaagttgtactaggctccctaacatttaattttttgtttctcacaacaaccctattgaggttgtttactgaggttcagaattgttagagacttgcccaagatcacttagctaataagtggccaagcttactttttgaatccaattctgcctaattccagaacactcctttacatggtgatacactgcctcccagtgggatgatttatagatttcatagtgatactttctttggg

SEQ ID NO: 103465 - DNA, 243 bp, Homo sapiens
ctacctctgcctcccaaagtgctgggattacaggtgtgagccaccacgcccagccccacagaatacttctgacaccagatgtgtgggagccccacataccaagtaagcaatcaattctgcagctggcagacaccagctgggtgtcctctaattcagttcctacactatccacctggaaatagcatcagatcccacaggtttagttccccaagactgcccctgacttgcgacatcaattgcaag

SEQ ID NO: 103466 - DNA, 563 bp, Homo sapiens
aaatactactgtgtgccggggattaccctaaatgctttatcttttttatctcattcttacaacatgattactattcctactttatatataaggaaattgaaacctagcaaggtgaagtaatttgagctaagttatgtaaagggagtggcaggacaagattcagactcatgtctgactttctttgcgtgtgtgtgtgtgtgtgtgtgtgtacgtaccactaagcattgaaaattggaagcgccttctcttagccctctttactgtccaagtaaccaaagtattatcttcctccttccattggaaaccaagttatcttattaattatatgtaatttaaattttttttctctctaaatttcaagtttccttgattactgttgaccaataaattgtaattttggaactgagtatattagttatttatttcccaggataattgccacaaacaaatgcagttttagaagaatgatagtgctcccagctatatgtctttcactaaaacttttaacgtcattctttgtataagaagatgagattatttatgtatcagcaataaataagtaa

SEQ ID NO: 103467 - DNA, 1008 bp, Homo sapiens
cagttcagttgtgaaatggtatttatatgtcactggcctgattagcgcttagtaaaagaattcttgaaattaaaggtttagcttcttacttttagctactgtcatcttcatatgttttgatttataataagtcagcctcctaattaatataccaattatttaggagctagagaactagatcttgggcttcttttccattgtgctttccttttggccacctgactgattgtaactcctgtttaggttggctggaggaaacggagagaaaatttacatctggtggagcataaagaaaccagctagaggactggccttgtcattatctaactgtgttgtgacgaactggcacttcctcatctctaaaagcagggccctgaactagaagaccgccacgtcacatgatgaaaaacactcaaactaacacttcttacccttgtgagcagccctactagcagatttaatgtgggaggaggttcacactacgggataaaaatcaagttttaggattccattttatctaagctgaccaccacaaggcagaggatcaagacttagctaaatacagccctcaggcaagcttcacttccccatctgtgaagggagaataaatacacatgttaagataaatgagagagctggtcaagtgtttcgagctctttggcagacaagcctgactttccaaaaaaagacaaaccacaacttcggagccagtgctatttcttctgtgcatggtgaggtgacttccccagttgtaaaggatttagagctgaaattccatattgtctggagctataattacaagtctcttgcactaaaacagaggtcagctggcctaaagcatgctgaaagaaggtaaatgtctggtcacatttccatgtggtatactcctttcctaactttttggcacaaatttcatgttgatagaacattcattcactccacaaatatctggcaagtaggtgctgagtgctgtgtatagacgagtgaacacaacacagaccctgccct

SEQ ID NO: 103468 - DNA, 1049 bp, Homo sapiens
ggaagaacattccaggcagagggaacaacaaaagtacaaaggttctcaggtagaactttgagggaacaacaaaggagaccaggaggcctggggaacaatgagtaaggcagagagggaacagaggcttgtaggccactgtgcggactttggcgtttagtctgagctggggacccactggaggattctgagcagagcagtgacatgattgcgcttacatttttaagacttactctggctgctgtgttgagaacagatgaccatggggcatagacagaagcagaaaggttggctggaggaaacggagagaaaatttacatctggtggagcataaagaaaccagctagaggactggccttgtcattatctaactgtgttgtgacgaactggcacttcctcatctctaaaagcagggccctgaactagaagaccgccacgtcacatgatgaaaaacactcaaactaacacttcttacccttgtgagcagccctactagcagatttaatgtgggaggaggttcacactacgggataaaaatcaagttttaggattccattttatctaagctgaccaccacaaggcagaggatcaagacttagctaaatacagccctcaggcaagcttcacttccccatctgtgaagggagaataaatacacatgttaagataaatgagagagctggtcaagtgtttcgagctctttggcagacaagcctgactttccaaaaaaagacaaaccacaacttcggagccagtgctatttcttctgtgcatggtgaggtgacttccccagttgtaaaggatttagagctgaaattccatattgtctggagctataattacaagtctcttgcactaaaacagaggtcagctggcctaaagcatgctgaaagaaggtaaatgtctggtcacatttccatgtggtatactcctttcctaactttttggcacaaatttcatgttgatagaacattcattcactccacaaatatctggcaagtaggtgctgagtgctgtgtatagacgagtgaacacaacacagaccctgccct

SEQ ID NO: 103469 - DNA, 450 bp, Homo sapiens
ggaagaacattccaggcagagggaacaacaaaagtacaaaggttctcaggtagaactttgagggaacaacaaaggagaccaggaggcctggggaacaatgagtaaggcagagagggaacagaggcttgtaggccactgtgcggactttggcgtttagtctgagctggggacccactggaggattctgagcagagcagtgacatgattgcgcttacatttttaagacttactctggctgctgtgttgagaacagatgaccatggggcatagacagaagcagaaaggtgagttggaagctattccagtaaagcaggccagagatggaggaggtctgaaccaggtgatagagggaagagttagaaaaaagtgtctggattctggatatgttctgaaggtatgttgtgccgaaggctagatgtgtggtatgggagaaagagcaaggtcaagtac

SEQ ID NO: 103470 - DNA, 643 bp, Homo sapiens
  misc_feature (389)..(389): n is a, c, g, or t
caaataattcagtgctgctgtctcttacacttttatccctatctgtaaaacaaactacaaattgagagagtacattccatagcttgggaaaaaacccaattgtgttgtacctaaactaatcatcttaaggcagtagttcagaagaacagtactactataagcctcagaaagaggaaactacctgggtatggcgggtgggagcggagagaggatccgaaaaaaatacctatcgagttctatgcttattactggggtgatgaaattatctgtacaacaaatctctgtgacatgcactttatatataatacaaacctgcacaaaaacctaaaataaaagttaaaaaaaatgacaatcagtttacacaaatcaaagaaaaaaagaaaaaaaangaaaatacctggctggatctaccctctaacatttttaggactcagggcaagacaaatgaaagcctacatactatgtgtctaaatattaaacattataaataggctaacaaatggttaagtaaaatatgctttgtctttctaccttgacaaataaatgttgataatgacaaaattgaaaaatatatggaaagctgtcattcttgaagtcaacaaaatgtccatgatgactgtaatcattattgtgtaatctgata

SEQ ID NO: 103471 - DNA, 574 bp, Homo sapiens
acctttggacatcttcgaatcatctttggacaaaaagatatggcccatatgatcatgtcccagaataactgttaactgttcatttaactcttacgtcaaaagacatcactatattttcacctctttgtcttcaaagatgatggtgtctgttaagagttactagaaagaggggctttaggccattgttgtggctcacgcctgtattttcagcattttgggaggctgaggtgggaggatggcttgagcccaggagtttgagatcagcctgggcttaacataatgagacctcgtctctacataaaaattagccaggtgtggtggtttgtgcctgtagccccagctactcccgggagctgagttgggaggatcgcttgagactgggaggttgaggctgcagtgagccatgatcatacatgtcatgcctagcagtgaacaccaggttgtgtctggtcttctgcagtctgccatggtgaataatcccgtacgtgtgtcatttcacacgctgcaggtgaatctacagggtgaattcctagaagcgggattgctggctcaaaagtgaaatgtattttaatgt

SEQ ID NO: 103472 - DNA, 555 bp, Homo sapiens
atattgtctttaaattgtttcttgttgacacttcccacaatggaaaaattaccaaattaaacctgttttatggatggcagcttggagcatagcaagaatttggaggatttgaattccattcccagttctcattgcgttttgtttcttaaaactataataattggttactgttataaagtttaaaaggtggttttaatatgaatagcaaattctggtatattgtgactaacgcttaagaatgcctgtctttgagaggaaggtgttataatattaatcaacagtgccaaatacactgtgcatatctacaatttaatctttgaatgtttgttactggattagctccctcctccttctgtgtgatggtaccatgcatagagtcaatcaaatccttgtgatgttttgtatggactttgacaacatgtaactaatgtgtaaagcaagtttttatgattaaggaatcaaatttattgaattttattattgaaagttgaaacttaacatgtataaacaaaaaacaataaaataataaactattttcattgactataaaaatta

SEQ ID NO: 103473 - DNA, 502 bp, Homo sapiens
gctaaaactattaatggtgcatcaaagaacgccttcctagtcgaaggaggggaatgaaaggagagcatgatttcaccccttcctcagccaatcaagaaagcatacagaatagacgtgaatgagagaggtgttttcttttagagatatccattcacccttaaaatgtgggacactcgcattttgtagagacacagtgcagttcagtatctcggttgagagttccttccttcccccatttaattaaatgctgaagtttgtgtttcagaaagccctgagtttgcgtgccagctccacgtacttgttttgcagccttgtccttaaatcctgcagctcttggttggagcttctgttttgttcctgtgaactgtccccacaggtctgactcctgcagagcacagttgaagggacaggagagaacatcgagggacacccatggtggcacacactggctcactccagttcctgcacagatctacgaaagcttcagggcctcgttcactcc

SEQ ID NO: 103474 - DNA, 406 bp, Homo sapiens
tgaagatggtggaatttattctttaacagtggagaatccagctggttcaaaaactgtctcagtaaaagtacttgtattaggtaagaattttactacttaggccattaaaaataaattttgataattttgagctcttatatggataaaattacttatcaaactgttatttaacactttttagataaacctgggccacctagagatctggaagtcagtgaaattaggaaagattcatgttaccttacttggaaagaaccactggatgatggtggttctgttattaccaattatgtggttgagaggagagatgttgccagcgcccagtggtcacctctctcagctacatcaaagaaaaagagtcacttcgctaagcatctgaatgaaggcaaccagtacctcttccgag

SEQ ID NO: 103475 - DNA, 544 bp, Homo sapiens
  misc_feature (1)..(1): n is a, c, g, or t
naagtacctgggattacaggcacgtgccgccatgcccagttaatttttggatttttattagagacagggtttcagcatgttggccaggatggtcttgatctcctgacctcatgatctgcccacctcggcctcccaaagtgttgggattacaggcgtgagccaccgtgcccggcctgtttttgtttttaagagacagggtcttgctttgtcacccaggctggagtgcagtggtacaaacgtaattcactgcaatctcaacctcctgggctcaagggctcctctcgttttagcctctcaagtatctgggactaaaggcgtgtgctaccattcctggctaatttttttttttaatagagatggtgtctcgctatgttgcccagtctggtcttgaacctctgggctcaagtgatctgcccaccttggctccccaaagtgttgggattacaggcatgaaccactgcacccagccatgtttttattttatctgagagaaaactgaggttcagaacttaactgtatacttctggaatcttcacagagaaat

SEQ ID NO: 103476 - DNA, 384 bp, Homo sapiens
ctgaatgaaaatgaaaagatgtagtaatgatgaaaagtaatattatatagtatcattaatagtgtgtagtaatcctctcagtagtcatctactcattcaatcagtaaatatttttgagtactttactgccagacactgtttaggatatgccattgaataaaataggcaatcacacttgtccttgtggagcttacattttcatggagggaggcagacaataagaagaagaagaagtaaataaatatgcagtatattagaagatgagagctgccatggaaagaagaaaaaatagagaagggtaagagaagttaaaagtaatatcacttgacaactttcttttatcaagcacattacacatgagccttatgaaattactttgaagta

SEQ ID NO: 103477 - DNA, 404 bp, Homo sapiens
tccaaaacaaaattagatgtcagagatcaattcgtttataagagaactagaaaatgacattaaagccaccaactaagaaagcactacctcatctaaagtagcactttccctccacccgatgatgctccattatatttcttttttctccttttgaacatttatcactctgtcttaaaactaccctcccccttatctcaattactttctaccacattcaacttttgcttcctttgtaacatttatcacaatctataattaccttatgtatgattttgtttacctgtttctttctgtctcccctaccagaaaagtctatggaggcaggaacctcgtcttctcttgctcaccactatagcatggtgcctggcacatagtaggcaattaatcaatatttgttgaataat

SEQ ID NO: 103478 - DNA, 748 bp, Homo sapiens
cagcgggagagtgggaagaaacacaaaagaaggcggcaggatcccatgtgtttctaatccaagagaatatcactgatttgaattcatcacctctactgattcccattaataaatgttaatggaatgggcaaggaaatgatccgaccttttgaagatccatggactgcaagcaaatatgacgagtagggtggctctacccttgataatttcaaaaggcacaagcaataagggggttcatctgcatgacactggcccctgtggacaggaacctgaattcactctcaaaagaagaagatttgccaaccttatgactattccaagaattggctccaggctttgaaagtaacactacaagaagaatttcaaaaagattttgtgcaattgctgcattgttggaaaagttcttgggttcctttggtgactacttttaaagacacaacattcacatgcttttaaaacacatcagtcacatcactttatagaaacactctgtacttgtgcaaagaagaacccatctatggtttttaaaaattggaatccatgaatgactgctgtgccaattaggacgtagagcttcaactgaaaaaatgaacttctctactgctaagctggagcacagataaatatgcaagtatccaaagaggtacctgtgtttaacaatacagagaaagcacaagtgcttaattgacagctaatcttgtcttctacagaacattagaaattctttcaatgttagaattgtagaatg

SEQ ID NO: 103479 - DNA, 534 bp, Homo sapiens
actattcttactcaccaaatttggcttcaagtaactccaggttgtttttcagaacctgaattcactctcaaaagaagaagatttgccaaccttatgactattccaagaattggctccaggctttgaaagtaacactacaagaagaatttcaaaaagattttgtgcaattgctgcattgttggaaaagttcttgggttcctttggtgactacttttaaagacacaacattcacatgcttttaaaacacatcagtcacatcactttatagaaacactctgtacttgtgcaaagaagaacccatctatggtttttaaaaattggaatccatgaatgactgctgtgccaattaggacgtagagcttcaactgaaaaaatgaacttctctactgctaagctggagcacagataaatatgcaagtatccaaagaggtacctgtgtttaacaatacagagaaagcacaagtgcttaattgacagctaatcttgtcttctacagaacattagaaattctttcaatgttagaattgtagaatg

SEQ ID NO: 103480 - DNA, 563 bp, Homo sapiens
cagcgggagagtgggaagaaacacaaaagaaggcggcaggatcccatgtgtttctaatccaagagaatatcactgatttgaattcatcacctctactgattcccattaataaatgttaatggaatgggcaaggaaatgatccgaccttttgaagatccatggactgcaagcaaatatgacgagtagggtggctctacccttgataatttcaaaaggcacaagcaataagggggttcatctgcatgacactggcccctgtggacagggtctttaaaatgaatatgtacaaaagaagtgataatcctgctacaataatggagggaaaccatcaacagaagactgatttctgaaactttctgaaatatggaaaaacggaaagcggaaagtaaagtacaatatttactcatgcagcaaagcaagggaagccataatcttgaatataggcatcaacgggggataagaaaacaccgacccgtttgtcagaagtccagtgaggtgctacaggaggagtgggtgagaagtttccgaaaacactagatttaattaaagatgtggctgtgaga

SEQ ID NO: 103481 - DNA, 355 bp, Homo sapiens
tatatgatgtcctaggcctcttctagccactacagtgtatgattccacaatgctgaaatcacagggcaaatacccctcagcagttcaaggtaaatgagtttaatttcagatacaggccattgaagctattcacagacataaattccctgggaattctagggattacatttttttggaagctatgaaaaaacatttgttctctatttgaaaataaaattatctgtacaaatgtcaacttgccttttatttatattattcacagatttgaattcatcacctctactgattcccattaataaatgttaatggaatgggcaaggaaatgatccgaccttttgaagatccatggactgca

SEQ ID NO: 103482 - DNA, 397 bp, Homo sapiens
tgtcgatagatttattagcagatagataaaaggagtgtcaaaaatatagtattctctaatttcagcaaaaccgtcaatgaaatgtgaaaggctttcagttcaggatggagaatgggagcacaaatgtttgcttctcctttctttctaaggtctttaaaatgaatatgtacaaaagaagtgataatcctgctacaataatggagggaaaccatcaacagaagactgatttctgaaactttctgaaatatggaaaaacggaaagcggaaagtaaagtacaatatttactcatgcagcaaagcaagggaagccataatcttgaatataggcatcaacgggggataagaaaacaccgacccgtttgtcagaagtccagtgaggtgctacaggaggagtggg

SEQ ID NO: 103483 - DNA, 472 bp, Homo sapiens
aactcttccaatgtttttcaaaattttaaacggcttccacttgagtgctggcacattttgagagagacttatctcgtgcagagatctcatttccgtggttggactaggccactggaagttgaactgcaagcataaagttaaaccgcatttttttaaattccacatcctcattttcatttttcagactgaagattaacctgatgaacagtctttttctttctttctttcttctttctttctttttttttttttttttttaccgagtgtcactctgtcacccaggctgaagtgcagtgccatattcttggctcactgcaacctcctccacctcctgggttcaggtgattctcctgcctcagctactagggaggctgcaacaggagaatcgcttgaacctgggaggcggaggttgcagtgagccaagatcatgccattgcactccagcctgggcgacagagcaagatccgtctca

SEQ ID NO: 103484 - DNA, 821 bp, Homo sapiens
caccccacctgaaccagttttattatgtggggtgggaagtgacttaaagttaaacatcaattatctaaatatacatataaggtgggaatagagggtcagaaaagcatttttgttctctaacttgaggactccagctaaaaacataaaaatcgccaatggctgggtgcagtggctcatgcctgtaatcccagcactttgggaggccaaggcaggtggatcacctgaggtcaggagttcaagactagcctggccaacatggtgaaaccctgtctctactaaaaatacaaaaattagccaggcctggtggcacacgcctatagtcccagctactcaagagactgaggcaggagaatcgcttgaacctgggaggcggaggttgcggtgagccgagatcacaccattgcactccagccttctgtgacagagcgagactccatctcaaaaaaaaaaaaaaaaaaaaaaaggggggggggcccttatttttcttataagggggacaacagaaaaacattgtggagaaatatagacccaaattaacaatttgcggaattaaaaaaaaaaaaaaagagggacgccacgacacaagaaaacagaaagaggcccaaggttacggaaacccagaacagggaaaaagaggggacacaaaagagagagagaaataaaaagggaggcgcgcgacacacacacacagcggccaacggcaaaaacaggcgaaccggggaaccctcggcaaggaaaccacgaaaagagaggggcgaacacaaggcgacaaacaccacccaaaagaataggcccccgggccacaacacaaaaaggcaaaa

SEQ ID NO: 103485 - DNA, 331 bp, Homo sapiens
tgggatggggtgggtggcagtcttggggactgagccatcaacccatgggatctgatactatctccaggtagacagtgtcagaattgaattggaggacacctggctggtgtccactgcttggtgtgtgggggagaaaccccacgcatttggtcacaaaagccttctgtgttgctgtggtgtgacagaaaaaaacatggtttgagagtttttttcctatatatatgtggaataatttggcaatatctgtgaacattttaaatgcatatactctttaacccagaaattttatttctaggaatttattctacggatatagtttcatgtgtgaaat

SEQ ID NO: 103486 - DNA, 432 bp, Homo sapiens
caatttcatttcatttattttattgtaccaaactaccaggaccattaatttaatctacagctaaatctattattctttcatgttagaaattcaacaagaaaatttttccctaatgaaacctcacatttcaagcataaggagcctgggcgagttggctcacacctgtaatcccagcactttgggaggccgagacaggtgcatcacttgaggtcaggagttggagactagcctggcaaacatgatgaaaccctgtctctactaaaaacataaaaattggctgggcgtggtggcatgtgcctgtaatcccagctactctggaggctgaggcagggaaatagcttcaacctgggaagcagagcttgcagtgagctgagatggcaccactgcactctagcctgggctacagagcaagactctgtctcaaaaataaat

SEQ ID NO: 103487 - DNA, 101 bp, Homo sapiens
ctccgcatccccttgcaccgtccgctcgcgtgctgcggggcacgcgcagcactaccttcggcggggccgcagaaccctcagctcccgggactcccccaccg

SEQ ID NO: 103488 - DNA, 181 bp, Homo sapiens
gtaaaccttgacttgatttgtatcaactggccaggccatccttcctgatggctgcttcttggcgttgggaggctgtggacatgtctaaagcactggaattcagctgggtctcctcttaaattgcacgagtgctgcgctctagctgtctaccttcattacctgcccacctggatgtagctgg

SEQ ID NO: 103489 - DNA, 229 bp, Homo sapiens
tttcacttcattcatgggcaaacacaaattcctcccaaaagctaaagaaagcccttttctgtttcaaacttcttacagtccctagagttcctctgttcttaattataatttctggtcttagggacatgtttaggttataacagcattagtgattaacatccacccacagaggccaaatgaattaccttaatctgggatccagggatggatttcagaggggtcctgaaac

SEQ ID NO: 103490 - DNA, 358 bp, Homo sapiens
tgatataatctgcagcctcagaaactgaaaaagaaagatggagagtttcctttcctttgtctgagtgatacacagtcagaaacagtgccttggcaccgtcataaattttgtgaataagatcctctcatctattgtcttgtcttacaatttaggcaatcagttacactttaatcattaaaacattagtatacactgaactgtgtcacggtggtattttaaactgtttcctaaaagtccaatgaaattccactcaaatcctggtcattaaaattcacgcccagtgaaacaggagagtatgggaggcccattaaataccactgctagacaaccacatattctaaccacaaatagggcctct

SEQ ID NO: 103491 - DNA, 605 bp, Homo sapiens
cacctgcatttacagagaacacacattgggcaaaatatgtgtctgtcctactgggaaagtttatcaactctacatcatagaactgagaacaaatgcggggagagctaatgttttaccaagatgaacttaaccaaacaaagagatagaaataaaattcaaagccaagagccttacgtatagataaaaatggaggaatgagaacatagcatttatccaggaatcatgagttaatcatgttaccaggctttagggcaaggggctgggtgaacagtcactataatattacatgcatagttctttgaaaatgtcaaggaaaaggccgggcgcagtggctcacacctgtaatcccagcactttgggaggccaaggcaggcagatcacgaggtcaggagatcgagaccatcctggctaacatagtgaaaccctgtctctactaaaaatacaaaaaataaaaaattagccaggcgtggtggcgggcacctgtagtcccagctactcaggagactgaggcaggataatggcatgaacccaggaggcagaggttgcagtgaggcgagatcacgccactgcactccagcctgggtgacagagcgagactctgtctc

SEQ ID NO: 103492 - DNA, 731 bp, Homo sapiens
atctcattatatcttaaacaattttgaattttattccaaagcaaaattatttaaaaaagaagtaaatcaataaatataattcatttccataattaatttttgaagaaatttctaaaacttgagaacttgactgaaaagaaaaatagcattctaaattaatctactcttttaattacatattaatggaaaaaaattattttcaataaaaataaaatgcatgaaaattatcttattttccttgtattatgagacatataaagaaattcatcaaaaatatgatatgaaaaataggtttttgcaagatggatatttttctcaattaggagtacaatcaagggacaggcatggtgactcacacctgtaactccagcacttttggaggccaaggcaggcagcacacttgaagccaggagcttgagacaggcctggccactatggtgaaaccccatcaggtgtagaggtgctcacctgtaatctcagctaatcaagaagttcaggcagaataatcacttgaaactgggaagcagggggttgtagtgtgccaagattgcactgctgtactccagccaaagagacagtgtgagattcctttatacaaataaaagaaaataaattcaatcaattaagaagtgatatataataatttagttttcaatgcagtttgtggcaactatgaattttaattacaaaatgccttgaatacactgcctcccaaagtgctggagtcaggg

SEQ ID NO: 103493 - DNA, 951 bp, Homo sapiens
agccccaaaaggtaacacaatcaaggcaaggcaaaggttgaagagagtactgaaaaatcttttcaaactgtttagagagttcaacatctaatatataaagattgctctgactactacgcaataggcaaaagaagcagtgagacctacagagttacacctgatcccaaaaatagtagctttgaagtttactgtgacatggagaccatggggggaggctggacagtgctgcaggcacgtctcgatgggagcaccaacttcaccagaacatggcaagactacaaagcaggctttggaaacctcagaagggaattttggctggggaacgataaaattcatcttctgaccaagagtaaggaaatgattctgagaatagatcttgaagactttaatggtgtcgaactatatgccttgtatgatcagttttatgtggctaatgagtttctcaaatatcgtttacacgttggtaactataatggcacagctggagatgcattacgtttcaacaaacattacaaccacgatctgaagtttttcaccactccagataaagacaatgatcgatatccttctgggaactgtgggctgtactacagttcaggctggtggtttgatgcatgtctttctgcaaacttaaatggcaaatattatcaccaaaaatacagaggtgtccgtaatgggattttctggggtacctggcctggtgtaagtgaggcacaccctggtggctacaagtcctccttcaaagaggctaagatgatgatcagacccaagcactttaagccataaatcactctgttcattcctccaggtattcgttatctaatagggcaattaattccttcagcactttagaatatgccttgtttcatatttttcatagctaaaaaatgatgtctgacggctaggttcttatgctacacagcatttgaaataaagctgaaaaacaatgca

SEQ ID NO: 103494 - DNA, 393 bp, Homo sapiens
gcggccgcctactactactactgctcgaattcaagcttctaacgatgtacggggacatgtctttctgcaaacttaaatggcaaatattatcaccaaaaatacagaggtgtccgtaatgggattttctggggtacctggcctggtgtaagtgaggcacaccctggtggctacaagtcctccttcaaagaggctaagatgatgatcagacccaagcactttaagccataaatcactctgttcattcctccaggtattcgttatctaatagggcaattaattccttcagcactttagaatatgccttgtttcatatttttcatagctaaaaaatgatgtctgacggctaggttcttatgctacacagcatttgaaataaagctgaaaaacaatgca

SEQ ID NO: 103495 - DNA, 1525 bp, Homo sapiens
gccctgcgcactccctgctggggtgagcagcactgtaaagatgaagctggctaactggtactggctgagctcagctgttcttgccacttacggttttttggttgtggcaaacaatgaaacagaggaaattaaagatgaaagagcaaaggatgtctgcccagtgagactagaaagcagagggaaatgcgaagaggcaggggagtgcccctaccaggtaagcctgccccccttgactattcagctcccgaagcaattcagcaggatcgaggaggtgttcaaagaagtccaaaacctcaaggaaatcgtaaatagtctaaagaaatcttgccaagactgcaagctgcaggctgatgacaacggagacccaggcagaaacggactgttgttacccagtacaggagccccgggagaggttggtgataacagagttagagaattagagagtgaggttaacaagctgtcctctgagctaaagaatgccaaagaggagatcaatgtacttcatggtcgcctggagaagctgaatcttgtaaatatgaacaacatagaaaattatgttgacagcaaagtggcaaatctaacatttgttgtcaatagtttggatggcaaatgttcaaagtgtcccagccaagaacaaatacagtcacgtccagttcaacatctaatatataaagattgctctgactactacgcaataggcaaaagaagcagtgagacctacagagttacacctgatcccaaaaatagtagctttgaagtttactgtgacatggagaccatggggggaggctggacagtgctgcaggcacgtctcgatgggagcaccaacttcaccagaacatggcaagactacaaagcaggctttggaaacctcagaagggaattttggctggggaacgataaaattcatcttctgaccaagagtaaggaaatgattctgagaatagatcttgaagactttaatggtgtcgaactatatgccttgtatgatcagttttatgtggctaatgagtttctcaaatatcgtttacacgttggtaactataatggcacagctggagatgcattacgtttcaacaaacattacaaccacgatctgaagtttttcaccactccagataaagacaatgatcgatatccttctgggaactgtgggctgtactacagttcaggctggtggtttgatgcatgtctttctgcaaacttaaatggcaaatattatcaccaaaaatacagaggtgtccgtaatgggattttctggggtacctggcctggtgtaagtgaggcacaccctggtggctacaagtcctccttcaaagaggctaagatgatgatcagacccaagcactttaagccataaatcactctgttcattcctccaggtattcgttatctaatagggcaattaattccttcagcactttagaatatgccttgtttcatatttttcatagctaaaaaatgatgtctgacggctaggttcttatgctacacagcatttgaaataaagctgaaaaacaatgca

SEQ ID NO: 103496 - DNA, 1731 bp, Homo sapiens
gccctgcgcactccctgctggggtgagcagcactgtaaagatgaagctggctaactggtactggctgagctcagctgttcttgccacttacggttttttggttgtggcaaacaatgaaacagaggaaattaaagatgaaagagcaaaggatgtctgcccagtgagactagaaagcagagggaaatgcgaagaggcaggggagtgcccctaccaggtaagcctgccccccttgactattcagctcccgaagcaattcagcaggatcgaggaggtgttcaaagaagtccaaaacctcaaggaaatcgtaaatagtctaaagaaatcttgccaagactgcaagctgcaggctgatgacaacggagacccaggcagaaacggactgttgttacccagtacaggagccccgggagaggttggtgataacagagttagagaattagagagtgaggttaacaagctgtcctctgagctaaagaatgccaaagaggagatcaatgtacttcatggtcgcctggagaagctgaatcttgtaaatatgaacaacatagaaaattatgttgacagcaaagtggcaaatctaacatttgttgtcaatagtttggatggcaaatgttcaaagtgtcccagccaagaacaaatacagtcacgtccagttcaacatctaatatataaagattgctctgactactacgcaataggcaaaagaagcagtgagacctacagagttacacctgatcccaaaaatagtagctttgaagtttactgtgacatggagaccatggggggaggctggacagtgctgcaggcacgtctcgatgggagcaccaacttcaccagaacatggcaagactacaaagcaggctttggaaacctcagaagggaattttggctggggaacgataaaattcatcttctgaccaagagtaaggaaatgattctgagaatagatcttgaagactttaatggtgtcgaactatatgccttgtatgatcagttttatgtggctaatgagtttctcaaatatcgtttacacgttggtaactataatggcacagctggagatgcattacgtttcaacaaacattacaaccacgatctgaagtttttcaccactccagataaagacaatgatcgatatccttctgggaactgtgggctgtactacagttcaggctggtggtttgatgcatgtctttctgcaaacttaaatggcaaatattatcaccaaaaatacagaggtgtccgtaatgggattttctggggtacctggcctggtgtaagtgaggcacaccctggtggctacaagtcctccttcaaagaggctaagatgatgatcagacccaagcactttaagccataaatcactctgttcattcctccaggtattcgttatctaatagggcaattaattccttcagcactttagaatatgccttgtttcatatttttcatagctaaaaaatgatgtctgacggctaggttcttatgctacacagcatttgaaataaagctgaaaaacaatgcattttaaaggagtcctttgttgttatgctgttatccaatgaacacttgcaagcaattagcaatattgagaattatacattagatttacaattcttttaatttctattgaaactttttctattgcttgtattacttgctgtatttaaaaaataattgttggctgggtgtggtagctcacgcctgtaatcccagcactttggaatgtca

SEQ ID NO: 103497 - DNA, 1503 bp, Homo sapiens
gccctgcgcactccctgctggggtgagcagcactgtaaagatgaagctggctaactggtactggctgagctcagctgttcttgccacttacggttttttggttgtggcaaacaatgaaacagaggaaattaaagatgaaagagcaaaggatgtctgcccagtgagactagaaagcagagggaaatgcgaagaggcaggggagtgcccctaccaggtaagcctgccccccttgactattcagctcccgaagcaattcagcaggatcgaggaggtgttcaaagaagtccaaaacctcaaggaaatcgtaaatagtctaaagaaatcttgccaagactgcaagctgcaggctgatgacaacggagacccaggcagaaacggactgttgttacccagtacaggagccccgggagaggttggtgataacagagttagagaattagagagtgaggttaacaagctgtcctctgagctaaagaatgccaaagaggagatcaatgtacttcatggtcgcctggagaagctgaatcttgtaaatatgaacaacatagaaaattatgttgacagcaaagtggcaaatctaacatttgttgtcaatagtttggatggcaaatgttcaaagtgtcccagccaagaacaaatacagtcacgtccagttcaacatctaatatataaagattgctctgactactacgcaataggcaaaagaagcagtgagacctacagagttacacctgatcccaaaaatagtagctttgaagtttactgtgacatggagaccatggggggaggctggacagtgctgcaggcacgtctcgatgggagcaccaacttcaccagaacatggcaagactacaaagcaggctttggaaacctcagaagggaattttggctggggaacgataaaattcatcttctgaccaagagtaaggaaatgattctgagaatagatcttgaagactttaatggtgtcgaactatatgccttgtatgatcagttttatgtggctaatgagtttctcaaatatcgtttacacgttggtaactataatggcacagctggagatgcattacgtttcaacaaacattacaaccacgatctgaagtttttcaccactccagataaagacaatgatcgatatccttctgggaactgtgggctgtactacagttcaggctggtggtttgatgcatgtctttctgcaaacttaaatggcaaatattatcaccaaaaatacagaggtgtccgtaatgggattttctggggtacctggcctggtgtaagtgaggcacaccctggtggctacaagtcctccttcaaagaggctaagatgatgatcagacccaagcactttaagccataaatcactctgttcattcctccaggtattcgttatctaatagggcaattaattccttcagcactttagaatatgccttgtttcatatttttcatagctaaaaaatgtttgacatcctttgagatattttattactaaaatctgcc

SEQ ID NO: 103498 - DNA, 1096 bp, Homo sapiens
gccctgcgcactccctgctggggtgagcagcactgtaaagatgaagctggctaactggtactggctgagctcagctgttcttgccacttacggttttttggttgtggcaaacaatgaaacagaggaaattaaagatgaaagagcaaaggatgtctgcccagtgagactagaaagcagagggaaatgcgaagaggcaggggagtgcccctaccaggtaagcctgccccccttgactattcagctcccgaagcaattcagcaggatcgaggaggtgttcaaagaagtccaaaacctcaaggaaatcgtaaatagtctaaagaaatcttgccaagactgcaagctgcaggctgatgacaacggagacccaggcagaaacggactgttgttacccagtacaggagccccgggagaggttggtgataacagagttagagaattagagagtgaggttaacaagctgtcctctgaggataaaattcatcttctgaccaagagtaaggaaatgattctgagaatagatcttgaagactttaatggtgtcgaactatatgccttgtatgatcagttttatgtggctaatgagtttctcaaatatcgtttacacgttggtaactataatggcacagctggagatgcattacgtttcaacaaacattacaaccacgatctgaagtttttcaccactccagataaagacaatgatcgatatccttctgggaactgtgggctgtactacagttcaggctggtggtttgatgcatgtctttctgcaaacttaaatggcaaatattatcaccaaaaatacagaggtgtccgtaatgggattttctggggtacctggcctggtgtaagtgaggcacaccctggtggctacaagtcctccttcaaagaggctaagatgatgatcagacccaagcactttaagccataaatcactctgttcattcctccaggtattcgttatctaatagggcaattaattccttcagcactttagaatatgccttgtttcatatttttcatagctaaaaaatgatgtctgacggctaggttcttatgctacacagcatttgaaataaagctgaaaaacaatgca

SEQ ID NO: 103499 - DNA, 2776 bp, Homo sapiens
cggacgcgtgggggcgcgacggcggcggcggcggccggttgggggcggggggctcggacgctgcggggactcatttttcccgtcagcggagcggagggagcggtgctgcggcccgcgccgccatcttggattttactctccatttttctctggaattatttttggtgattaattttctgggggggactgggacgcggggcccggcggcgcggccccgcatcgcagcggccgggcagcggggcctgggacgcgccccgaggaggagcggggcggcgcaggcggagagaacattgaaagtattctctaagctatttgaagagagtgactaaatgcacctgggtcaggctgtctgtgggtatgaagtggttgggagaatccaagaacatggtggtgaatggcaggagaaatggaggcaagttgtctaatgaccatcagcagaatcaatcaaaattacagcacacggggaaggacaccctgaaggctggcaaaaatgcagtcgagaggaggtcgaacagatgtaatggtaactcgggatttgaaggacagagtcgctatgtaccatcctctggaatgtccgccaaggaactctgtgaaaatgatgacctagcaaccagtttggttcttgatccctatttaggttttcaaacacacaaaatgaatactagcgcctttccttcgaggagctcaaggcatttttcaaaatctgacagtttttctcacaacaaccctgtgagatttaggcctattaaaggaaggcaggaagaactaaaggaagtaattgaacgttttaagaaagatgaacacttggagaaagccttcaaatgtttgacttcaggcgaatgggcacggcactattttctcaacaagaataaaatgcaggagaaattattcaaagaacatgtatttatttatttgcgaatgtttgcaactgacagtggatttgaaatattgccatgtaatagatactcatcagaacaaaatggagccaaaatagttgcaacaaaagagtggaaacgaaatgacaaaatagaattactggtgggttgtattgccgaactttcagaaattgaggagaacatgctacttagacatggagaaaacgacttcagtgtcatgtactccacaaggaaaaactgtgctcaactctggctgggtcctgctgcgtttataaaccatgtttgtgtcaactggtcgagatacagcatgtgtgaaggctctaagagacattgaacctggagaagaaatttcttgttattatggagatgggttctttggagaaaataatgagttctgcgagtgttacacttgcgaaagacggggcactggtgcttttaaatccagagtgggactgcctgcgcctgctcctgttatcaatagcaaatatggactcagagaaacagataaacgtttaaataggcttaaaaagttaggtgacagcagcaaaaattcagacagtcaatctgtcagctctaacactgatgcagataccactcaggaaaaaaacaatgcaagtaagtaagggagatttgataagcatatcttttaaaagtattttcacacaatttgctttataaagtgtgcttcagtagttttaaacttttaaatactcagagagactgggacttgtgagctttggctgcacttcaaggctctagacgtgatttgagtagaggcacagtctgtatcccatctctaacttcagtaccgtcctctagactatttttcttgaataccttggtaactggatatgagttcttcatcatatgttccaaggtcatcatatgttttaaacattttcaaggtgttagagactgtgatgatgtcgctaagtcctgcaagaagacaaaaggactgagtagaattaaattagactctatacattccagtgcctagccagtttgttagaaaagatgatggacttggggaattcatagcttctggccttaaggcttccaccttttcattgcttgctgacctttttcaaaacgaactgactcagttcagcagaccaccagtaccagactcagaattgtgatagaggagcattttgaacagtgccgtattgtgacatgctgtattggctactccagaaagtaggagtaaagatggaaaggagaaagaagcaacctctgagattccagtggtgtgtgggggcaagatctgatggaaactgaaaaagagaacgaagactaaacaaagagaaaggaaagagaagaaaccctaaatgggcaaaggaaagcacatcctgtttgcggagctttgaaatattggaaccatttctaattgctcctgtttttctgggtaacaccagttttctgtagttgccactaaagcagtagactcttgagtctcacttgtctctgagagagacagaagttagaaagttttgacttggcgattccgaaagtatgcctttgttggcacttaaatgtccagtgagacttcttggcaccttagagccctctgagatactgattattttaggttcttctccctactttcagatgttttcagcccaacactgggtgctctcttccactacagagaatcctgaagaaaagggaaggtgtttcccatgatggtgaatgtcactgccatgaattcctgaatctacctgctgctgggagtcagagtccaagcataacccgtgtagcataaaagcagcgctgtagccctattccagtctttttcgttaatgtccagagtgaacaacaagagttagtcaatcattaactgttgactgttgattctcataataaatgcagcataacgacca

SEQ ID NO: 103500 - DNA, 927 bp, Homo sapiens
  misc_feature (838)..(839): n is a, c, g, or t
  misc_feature (845)..(846): n is a, c, g, or t
  misc_feature (858)..(858): n is a, c, g, or t
  misc_feature (860)..(860): n is a, c, g, or t
  misc_feature (872)..(872): n is a, c, g, or t
  misc_feature (877)..(877): n is a, c, g, or t
  misc_feature (882)..(882): n is a, c, g, or t
  misc_feature (888)..(888): n is a, c, g, or t
  misc_feature (892)..(892): n is a, c, g, or t
cggacgcgtgggggcgcgacggcggcggcggcggccggttgggggcggggggctcggacgctgcggggactcatttttcccgtcagcggagcggagggagcggtgctgcggcccgcgccgccatcttggattttactctccatttttctctggaattatttttggtgattaattttctgggggggactgggacgcggggcccggcggcgcggccccgcatcgcagcggccgggcagcggggcctgggacgcgccccgaggaggagcggggcggcgcaggcggagagaacattgaaagtattctctaagctatttgaagagagtgactaaatgcacctgggtcaggctgtctgtgggtatgaagtggttgggagaatccaagaacatggtggtgaatggcaggagaaatggaggcaagttgtctaatgaccatcagcagaatcaatcaaaattacagcacacggggaaggacaccctgaaggctggcaaaaatgcagtcgagaggaggtcgaacagatgtaatggtaactcgggatttgaaggacagagtcgctatgtaccatcctctggaatgtccgccaaggaactctgtgaaaatgatgacctagcaaccagtttggttcttgatccctatttaggttttcaaacacacaaaatgaatactagcgcctttccttcgaggagctcaaggcatttttcaaaatctgacagtttttctcacaacaaccctgtgagatttaggcctattaaaggaaggcaggaagaactaaaggaagtaattgaacgttttaagaaagatgaacacttggagaagctcaatgttgatcagggatggccgnntatttnncagataatgggnanttcagactgttnttggnagtgncgcggntgantgcggaaacccgcaggcatttgccggggagcaagg

SEQ ID NO: 103501 - DNA, 5846 bp, Homo sapiens
cggacgcgtgggggcgcgacggcggcggcggcggccggttgggggcggggggctcggacgctgcggggactcatttttcccgtcagcggagcggagggagcggtgctgcggcccgcgccgccatcttggattttactctccatttttctctggaattatttttggtgattaattttctgggggggactgggacgcggggcccggcggcgcggccccgcatcgcagcggccgggcagcggggcctgggacgcgccccgaggaggagcggggcggcgcaggcggagagaacattgaaagtattctctaagctatttgaagagagtgactaaatgcacctgggtcaggctgtctgtgggtatgaagtggttgggagaatccaagaacatggtggtgaatggcaggagaaatggaggcaagttgtctaatgaccatcagcagaatcaatcaaaattacagcacacggggaaggacaccctgaaggctggcaaaaatgcagtcgagaggaggtcgaacagatgtaatggtaactcgggatttgaaggacagagtcgctatgtaccatcctctggaatgtccgccaaggaactctgtgaaaatgatgacctagcaaccagtttggttcttgatccctatttaggttttcaaacacacaaaatgaatactagcgcctttccttcgaggagctcaaggcatttttcaaaatctgacagtttttctcacaacaaccctgtgagatttaggcctattaaaggaaggcaggaagaactaaaggaagtaattgaacgttttaagaaagatgaacacttggagaaagccttcaaatgtttgacttcaggcgaatgggcacggcactattttctcaacaagaataaaatgcaggagaaattattcaaagaacatgtatttatttatttgcgaatgtttgcaactgacagtggatttgaaatattgccatgtaatagatactcatcagaacaaaatggagccaaaatagttgcaacaaaagagtggaaacgaaatgacaaaatagaattactggtgggttgtattgccgaactttcagaaattgaggagaacatgctacttagacatggagaaaacgacttcagtgtcatgtactccacaaggaaaaactgtgctcaactctggctgggtcctgctgcgtttataaaccatgattgcagacctaattgtaagtttgtgtcaactggtcgagatacagcatgtgtgaaggctctaagagacattgaacctggagaagaaatttcttgttattatggagatgggttctttggagaaaataatgagttctgcgagtgttacacttgcgaaagacggggcactggtgcttttaaatccagagtgggactgcctgcgcctgctcctgttatcaatagcaaatatggactcagagaaacagataaacgtttaaataggcttaaaaagttaggtgacagcagcaaaaattcagacagtcaatctgtcagctctaacactgatgcagataccactcaggaaaaaaacaatgcaacttctaaccgaaaatcttcagttggcgtaaaaaagaatagcaagagcagaacgttaacgaggcaatctatgtcaagaattccagcttcttccaactctacctcatctaagctaactcatataaataattccagggtaccaaagaaactgaagaagcctgcaaagcctttactttcaaagataaaattgagaaatcattgcaagcggctggagcaaaagaatgcttcaagaaaactcgaaatgggaaacttagtactgaaagagcctaaagtagttctgtataaaaatttgcccattaaaaaagataaggagccagagggaccagcccaagccgcagttgccagcgggtgcttgactagacacgcggcgagagaacacagacagaatcctgtgagaggtgctcattcgcagggggagagctcgccctgcacctacataactcggcggtcagtgaggacaagaacaaatctgaaggaggcctctgacatcaagcttgaaccaaatacgttgaatggctataaaagcagtgtgacggaaccttgccccgacagtggtgaacagctgcagccagctcctgtgctgcaggaggaagaactggctcatgagactgcacaaaaaggggaggcaaagtgtcataagagtgacacaggcatgtccaaaaagaagtcacgacaaggaaaacttgtgaaacagtttgcaaaaatagaggaatctactccagtgcacgattctcctggaaaagacgacgcggtaccagatttgatgggtccccattctgaccagggtgagcacagtggcactgtgggcgtgcctgtgagctacacagactgtgctccttcacccgtcggttgttcagttgtgacatcagatagcttcaaaacaaaagacagctttagaactgcaaaaagtaaaaagaagaggcgaatcacaaggtatgatgcacagttaatcctagaaaataactctgggattcccaaattgactcttcgtaggcgtcatgatagcagcagcaaaacaaatgaccaagagaatgatggaatgaactcttccaaaataagcatcaagttaagcaaagaccatgacaacgataacaatctctatgtagcaaagcttaataatggatttaactcaggatcaggcagtagttctacaaaattaaaaatccagctaaaacgagatgaggaaaatagggggtcttatacagaggggcttcatgaaaatggggtgtgctgcagtgatcctctttctctcttggagtctcgaatggaggtggatgactatagtcagtatgaggaagaaagtacagatgattcctcctcttctgagggcgatgaagaggaggatgactatgatgatgactttgaagacgattttattcctcttcctccagctaagcgcttgaggttaatagttggaaaagactctatagatattgacatttcttcaaggagaagagaagatcagtctttaaggcttaatgcctaagctcttggtcttaacttgacctgggataactactttaaagaaataaaaaattccagtcaattattcctcaactgaaagtttagtggcagcacttctattgtcccttcacttatcagcatactattgtagaaagtgtacagcatactgactcaattcttaagtctgatttgtgcaaatttttatcgtactttttaaatagccttcttacgtgcaattctgagttagaggtaaagccctgttgtaaaataaaggctcaagcaaaattgtacagtgatagcaactttccacacaggacgttgaaaacagtaatgtggctacacagtttttttaactgtaagagcatcagctggctctttaatatatgactaaacaataatttaaaacaaatcatagtagcagcatattaagggtttctagtatgctaatatcaccagcaatgatctttggctttttgatttatttgctagatgtttcccccttggagttttgtcagtttcacactgtttgctggcccaggtgtactgtttgtggcctttgttaatatcgcaaaccattggttgggagtcagattggtttcttaaaaaaaaaaaaaaaacgacatacgtgacagctcacttttcagttcattatatgtacgagggtagcagtgtgtgggatgaggttcgatacagcgtatttattgcttgtcatgtaaattaaaaaccttgtatttaactcttttcaatccttttagataaaattgttctttgcaagaatgattggtgcttattttttcaaaaatttgctgtgaacaacgtgatgacaacaagcaacatttatctaatgaactacagctatcttaatttggttcttcaagttttctgttgcacttgtaaaatgctacaaggaatattaaaaaaatctattcactttaacttataatagtttatgaaataaaaacatgagtcacagcttttgttctgtggtaacctataaaaaaagtttgtctttgagattcaatgtaaagaactgaaaacaatgtatatgttgtaaatatttgtgtgttgtgagaaatttttgtcataagaaattaaaagaacttaccaggaaggtttttaagtttagaaatattcatgccaataaaataggaaattataaatatatagttttaagcactgcatcagtgggagttcttggcttatgttagtttatgttagtttattatgaaaacatcaaagatttttttgactatattatcagttaaacaaaaaggagtcagatttaatttgttttttgaagcactttgagaaattaattttaattaacttaatgagcaaatttttattactactttatgttcaataccaggttcttttcatttctctggattattttgcaaatcattggacagagaatttgggaatataaatctgtaacaggtgtttgacaccagtaggtctctttatttctgggaaatgtgtacctgtactttctgatatacagtgttcctaagtaaaaatcaattcaggggatttgtatagtgtctataggaaagtagcccatgtcttgaaatatgaaaaggaatctgaaggtcatgaaaagtccagtggagaaaatctcaatgcttactgttactactaattgattcctactagtttccaggtttggggggatattgtttcaatgacgctccttaagactgttgattgcccataggttccaaatagaaattaagactcatgaacatttttagaaagtagattgttttctcctggttctctaaggaactacttctgcagtcttacatagtctcatccttgtttgttgtggtgcagtcgaactcctcaggcgtttggaaagcatgtggtagaccttcttccacacccacccatacccccgttcactgcgtctggaggtcttcaacagtgaagtagggcagcccacacagcctctcaggagcacctgtccgaggcacccggagcactttgcagagcacgtccagccctcatggggtccctgcatagaaatgtgaacccctgccactgaggaagatgaaggtagaccctgtgtctggaggtgctggagggcagcgggtcacctcttgtattcccaccttagtttggggtgttttgaagaggttcagagactaaatcttaaaccttatttgaataccaacgatagctattttgggaatttcgatcttaaaaagtgacaaaacacatttcccattttcatttttcagctgaattttagtaacttatttttgatgttttaattttatcatggcctcctctttggaggccaaccttcccatgggtctcaaagcagtgacatttggtagtaaatcactgcctctcaggagtcggtatgcacaagcactcagcagccactgttgatgccttctagggaaacctaatttccgttggtaaaggtaggggcctcggaactgttccggatctgctgtagaacttcaccgtgtggaatggtgacagccacacaccgttgaccagtttagaagaggttgcattcaataaaactcttagcttgagcttatgcaatgattggttaagattttggcattgtaagaattaggagatgatcatagaaatatatgtaaagtattcaattttcaatcattttcaaattactgttataaattgtttttgctgagttgtaatacttttgagatacaatgtattccttgtactgaaagaatgaaaaaggactttttcagcatttgaggtaagttctttaacgtttcattaaaaacattttttacaaatattttgtacatgcacttgcagtattgaggttaatcattttaataaattcggaaattaaaacaaaaaaac

SEQ ID NO: 103502 - DNA, 5710 bp, Homo sapiens
  misc_feature (21)..(21): n is a, c, g, or t
gcggcggtgcgggcggcaggncagcggggcgatgaggtgaggacgcccgggaaccggaggcggcaccgcgcggcgcacggacctgggacgcggagtcctgaagccggcggacggttttcgtacgggcggccgtgcgcgaggcgaggagagaacattgaaagtattctctaagctatttgaagagagtgactaaatgcacctgggtcaggctgtctgtgggtatgaagtggttgggagaatccaagaacatggtggtgaatggcaggagaaatggaggcaagttgtctaatgaccatcagcagaatcaatcaaaattacagcacacggggaaggacaccctgaaggctggcaaaaatgcagtcgagaggaggtcgaacagatgtaatggtaactcgggatttgaaggacagagtcgctatgtaccatcctctggaatgtccgccaaggaactctgtgaaaatgatgacctagcaaccagtttggttcttgatccctatttaggttttcaaacacacaaaatgaatactagcgcctttccttcgaggagctcaaggcatttttcaaaatctgacagtttttctcacaacaaccctgtgagatttaggcctattaaaggaaggcaggaagaactaaaggaagtaattgaacgttttaagaaagatgaacacttggagaaagccttcaaatgtttgacttcaggcgaatgggcacggcactattttctcaacaagaataaaatgcaggagaaattattcaaagaacatgtatttatttatttgcgaatgtttgcaactgacagtggatttgaaatattgccatgtaatagatactcatcagaacaaaatggagccaaaatagttgcaacaaaagagtggaaacgaaatgacaaaatagaattactggtgggttgtattgccgaactttcagaaattgaggagaacatgctacttagacatggagaaaacgacttcagtgtcatgtactccacaaggaaaaactgtgctcaactctggctgggtcctgctgcgtttataaaccatgattgcagacctaattgtaagtttgtgtcaactggtcgagatacagcatgtgtgaaggctctaagagacattgaacctggagaagaaatttcttgttattatggagatgggttctttggagaaaataatgagttctgcgagtgttacacttgcgaaagacggggcactggtgcttttaaatccagagtgggactgcctgcgcctgctcctgttatcaatagcaaatatggactcagagaaacagataaacgtttaaataggcttaaaaagttaggtgacagcagcaaaaattcagacagtcaatctgtcagctctaacactgatgcagataccactcaggaaaaaaacaatgcaacttctaaccgaaaatcttcagttggcgtaaaaaagaatagcaagagcagaacgttaacgaggcaatctatgtcaagaattccagcttcttccaactctacctcatctaagctaactcatataaataattccagggtaccaaagaaactgaagaagcctgcaaagcctttactttcaaagataaaattgagaaatcattgcaagcggctggagcaaaagaatgcttcaagaaaactcgaaatgggaaacttagtactgaaagagcctaaagtagttctgtataaaaatttgcccattaaaaaagataaggagccagagggaccagcccaagccgcagttgccagcgggtgcttgactagacacgcggcgagagaacacagacagaatcctgtgagaggtgctcattcgcagggggagagctcgccctgcacctacataactcggcggtcagtgaggacaagaacaaatctgaaggaggcctctgacatcaagcttgaaccaaatacgttgaatggctataaaagcagtgtgacggaaccttgccccgacagtggtgaacagctgcagccagctcctgtgctgcaggaggaagaactggctcatgagactgcacaaaaaggggaggcaaagtgtcataagagtgacacaggcatgtccaaaaagaagtcacgacaaggaaaacttgtgaaacagtttgcaaaaatagaggaatctactccagtgcacgattctcctggaaaagacgacgcggtaccagatttgatgggtccccattctgaccagggtgagcacagtggcactgtgggcgtgcctgtgagctacacagactgtgctccttcacccgtcggttgttcagttgtgacatcagatagcttcaaaacaaaagacagctttagaactgcaaaaagtaaaaagaagaggcgaatcacaaggtatgatgcacagttaatcctagaaaataactctgggattcccaaattgactcttcgtaggcgtcatgatagcagcagcaaaacaaatgaccaagagaatgatggaatgaactcttccaaaataagcatcaagttaagcaaagaccatgacaacgataacaatctctatgtagcaaagcttaataatggatttaactcaggatcaggcagtagttctacaaaattaaaaatccagctaaaacgagatgaggaaaatagggggtcttatacagaggggcttcatgaaaatggggtgtgctgcagtgatcctctttctctcttggagtctcgaatggaggtggatgactatagtcagtatgaggaagaaagtacagatgattcctcctcttctgagggcgatgaagaggaggatgactatgatgatgactttgaagacgattttattcctcttcctccagctaagcgcttgaggttaatagttggaaaagactctatagatattgacatttcttcaaggagaagagaagatcagtctttaaggcttaatgcctaagctcttggtcttaacttgacctgggataactactttaaagaaataaaaaattccagtcaattattcctcaactgaaagtttagtggcagcacttctattgtcccttcacttatcagcatactattgtagaaagtgtacagcatactgactcaattcttaagtctgatttgtgcaaatttttatcgtactttttaaatagccttcttacgtgcaattctgagttagaggtaaagccctgttgtaaaataaaggctcaagcaaaattgtacagtgatagcaactttccacacaggacgttgaaaacagtaatgtggctacacagtttttttaactgtaagagcatcagctggctctttaatatatgactaaacaataatttaaaacaaatcatagtagcagcatattaagggtttctagtatgctaatatcaccagcaatgatctttggctttttgatttatttgctagatgtttcccccttggagttttgtcagtttcacactgtttgctggcccaggtgtactgtttgtggcctttgttaatatcgcaaaccattggttgggagtcagattggtttcttaaaaaaaaaaaaaaaacgacatacgtgacagctcacttttcagttcattatatgtacgagggtagcagtgtgtgggatgaggttcgatacagcgtatttattgcttgtcatgtaaattaaaaaccttgtatttaactcttttcaatccttttagataaaattgttctttgcaagaatgattggtgcttattttttcaaaaatttgctgtgaacaacgtgatgacaacaagcaacatttatctaatgaactacagctatcttaatttggttcttcaagttttctgttgcacttgtaaaatgctacaaggaatattaaaaaaatctattcactttaacttataatagtttatgaaataaaaacatgagtcacagcttttgttctgtggtaacctataaaaaaagtttgtctttgagattcaatgtaaagaactgaaaacaatgtatatgttgtaaatatttgtgtgttgtgagaaatttttgtcataagaaattaaaagaacttaccaggaaggtttttaagtttagaaatattcatgccaataaaataggaaattataaatatatagttttaagcactgcatcagtgggagttcttggcttatgttagtttatgttagtttattatgaaaacatcaaagatttttttgactatattatcagttaaacaaaaaggagtcagatttaatttgttttttgaagcactttgagaaattaattttaattaacttaatgagcaaatttttattactactttatgttcaataccaggttcttttcatttctctggattattttgcaaatcattggacagagaatttgggaatataaatctgtaacaggtgtttgacaccagtaggtctctttatttctgggaaatgtgtacctgtactttctgatatacagtgttcctaagtaaaaatcaattcaggggatttgtatagtgtctataggaaagtagcccatgtcttgaaatatgaaaaggaatctgaaggtcatgaaaagtccagtggagaaaatctcaatgcttactgttactactaattgattcctactagtttccaggtttggggggatattgtttcaatgacgctccttaagactgttgattgcccataggttccaaatagaaattaagactcatgaacatttttagaaagtagattgttttctcctggttctctaaggaactacttctgcagtcttacatagtctcatccttgtttgttgtggtgcagtcgaactcctcaggcgtttggaaagcatgtggtagaccttcttccacacccacccatacccccgttcactgcgtctggaggtcttcaacagtgaagtagggcagcccacacagcctctcaggagcacctgtccgaggcacccggagcactttgcagagcacgtccagccctcatggggtccctgcatagaaatgtgaacccctgccactgaggaagatgaaggtagaccctgtgtctggaggtgctggagggcagcgggtcacctcttgtattcccaccttagtttggggtgttttgaagaggttcagagactaaatcttaaaccttatttgaataccaacgatagctattttgggaatttcgatcttaaaaagtgacaaaacacatttcccattttcatttttcagctgaattttagtaacttatttttgatgttttaattttatcatggcctcctctttggaggccaaccttcccatgggtctcaaagcagtgacatttggtagtaaatcactgcctctcaggagtcggtatgcacaagcactcagcagccactgttgatgccttctagggaaacctaatttccgttggtaaaggtaggggcctcggaactgttccggatctgctgtagaacttcaccgtgtggaatggtgacagccacacaccgttgaccagtttagaagaggttgcattcaataaaactcttagcttgagcttatgcaatgattggttaagattttggcattgtaagaattaggagatgatcatagaaatatatgtaaagtattcaattttcaatcattttcaaattactgttataaattgtttttgctgagttgtaatacttttgagatacaatgtattccttgtactgaaagaatgaaaaaggactttttcagcatttgaggtaagttctttaacgtttcattaaaaacattttttacaaatattttgtacatgcacttgcagtattgaggttaatcattttaataaattcggaaattaaaacaaaaaaac

SEQ ID NO: 103503 - DNA, 5301 bp, Homo sapiens
ctctcgagttcaagcaattcccctgcctcagcctcctgagtacctgggactacaggcgtgtaccgctacgtgggcctggctaattttttgcattttagagatggggtttcaccaggttggccaggatggtctcgatctcctgacctcgtgatccatccgcctcgacctcccaaagtgctgggattatagatttaggcctattaaaggaaggcaggaagaactaaaggaagtaattgaacgttttaagaaagatgaacacttggagaaagccttcaaatgtttgacttcaggcgaatgggcacggcactattttctcaacaagaataaaatgcaggagaaattattcaaagaacatgtatttatttatttgcgaatgtttgcaactgacagtggatttgaaatattgccatgtaatagatactcatcagaacaaaatggagccaaaatagttgcaacaaaagagtggaaacgaaatgacaaaatagaattactggtgggttgtattgccgaactttcagaaattgaggagaacatgctacttagacatggagaaaacgacttcagtgtcatgtactccacaaggaaaaactgtgctcaactctggctgggtcctgctgcgtttataaaccatgattgcagacctaattgtaagtttgtgtcaactggtcgagatacagcatgtgtgaaggctctaagagacattgaacctggagaagaaatttcttgttattatggagatgggttctttggagaaaataatgagttctgcgagtgttacacttgcgaaagacggggcactggtgcttttaaatccagagtgggactgcctgcgcctgctcctgttatcaatagcaaatatggactcagagaaacagataaacgtttaaataggcttaaaaagttaggtgacagcagcaaaaattcagacagtcaatctgtcagctctaacactgatgcagataccactcaggaaaaaaacaatgcaacttctaaccgaaaatcttcagttggcgtaaaaaagaatagcaagagcagaacgttaacgaggcaatctatgtcaagaattccagcttcttccaactctacctcatctaagctaactcatataaataattccagggtaccaaagaaactgaagaagcctgcaaagcctttactttcaaagataaaattgagaaatcattgcaagcggctggagcaaaagaatgcttcaagaaaactcgaaatgggaaacttagtactgaaagagcctaaagtagttctgtataaaaatttgcccattaaaaaagataaggagccagagggaccagcccaagccgcagttgccagcgggtgcttgactagacacgcggcgagagaacacagacagaatcctgtgagaggtgctcattcgcagggggagagctcgccctgcacctacataactcggcggtcagtgaggacaagaacaaatctgaaggaggcctctgacatcaagcttgaaccaaatacgttgaatggctataaaagcagtgtgacggaaccttgccccgacagtggtgaacagctgcagccagctcctgtgctgcaggaggaagaactggctcatgagactgcacaaaaaggggaggcaaagtgtcataagagtgacacaggcatgtccaaaaagaagtcacgacaaggaaaacttgtgaaacagtttgcaaaaatagaggaatctactccagtgcacgattctcctggaaaagacgacgcggtaccagatttgatgggtccccattctgaccagggtgagcacagtggcactgtgggcgtgcctgtgagctacacagactgtgctccttcacccgtcggttgttcagttgtgacatcagatagcttcaaaacaaaagacagctttagaactgcaaaaagtaaaaagaagaggcgaatcacaaggtatgatgcacagttaatcctagaaaataactctgggattcccaaattgactcttcgtaggcgtcatgatagcagcagcaaaacaaatgaccaagagaatgatggaatgaactcttccaaaataagcatcaagttaagcaaagaccatgacaacgataacaatctctatgtagcaaagcttaataatggatttaactcaggatcaggcagtagttctacaaaattaaaaatccagctaaaacgagatgaggaaaatagggggtcttatacagaggggcttcatgaaaatggggtgtgctgcagtgatcctctttctctcttggagtctcgaatggaggtggatgactatagtcagtatgaggaagaaagtacagatgattcctcctcttctgagggcgatgaagaggaggatgactatgatgatgactttgaagacgattttattcctcttcctccagctaagcgcttgaggttaatagttggaaaagactctatagatattgacatttcttcaaggagaagagaagatcagtctttaaggcttaatgcctaagctcttggtcttaacttgacctgggataactactttaaagaaataaaaaattccagtcaattattcctcaactgaaagtttagtggcagcacttctattgtcccttcacttatcagcatactattgtagaaagtgtacagcatactgactcaattcttaagtctgatttgtgcaaatttttatcgtactttttaaatagccttcttacgtgcaattctgagttagaggtaaagccctgttgtaaaataaaggctcaagcaaaattgtacagtgatagcaactttccacacaggacgttgaaaacagtaatgtggctacacagtttttttaactgtaagagcatcagctggctctttaatatatgactaaacaataatttaaaacaaatcatagtagcagcatattaagggtttctagtatgctaatatcaccagcaatgatctttggctttttgatttatttgctagatgtttcccccttggagttttgtcagtttcacactgtttgctggcccaggtgtactgtttgtggcctttgttaatatcgcaaaccattggttgggagtcagattggtttcttaaaaaaaaaaaaaaaacgacatacgtgacagctcacttttcagttcattatatgtacgagggtagcagtgtgtgggatgaggttcgatacagcgtatttattgcttgtcatgtaaattaaaaaccttgtatttaactcttttcaatccttttagataaaattgttctttgcaagaatgattggtgcttattttttcaaaaatttgctgtgaacaacgtgatgacaacaagcaacatttatctaatgaactacagctatcttaatttggttcttcaagttttctgttgcacttgtaaaatgctacaaggaatattaaaaaaatctattcactttaacttataatagtttatgaaataaaaacatgagtcacagcttttgttctgtggtaacctataaaaaaagtttgtctttgagattcaatgtaaagaactgaaaacaatgtatatgttgtaaatatttgtgtgttgtgagaaatttttgtcataagaaattaaaagaacttaccaggaaggtttttaagtttagaaatattcatgccaataaaataggaaattataaatatatagttttaagcactgcatcagtgggagttcttggcttatgttagtttatgttagtttattatgaaaacatcaaagatttttttgactatattatcagttaaacaaaaaggagtcagatttaatttgttttttgaagcactttgagaaattaattttaattaacttaatgagcaaatttttattactactttatgttcaataccaggttcttttcatttctctggattattttgcaaatcattggacagagaatttgggaatataaatctgtaacaggtgtttgacaccagtaggtctctttatttctgggaaatgtgtacctgtactttctgatatacagtgttcctaagtaaaaatcaattcaggggatttgtatagtgtctataggaaagtagcccatgtcttgaaatatgaaaaggaatctgaaggtcatgaaaagtccagtggagaaaatctcaatgcttactgttactactaattgattcctactagtttccaggtttggggggatattgtttcaatgacgctccttaagactgttgattgcccataggttccaaatagaaattaagactcatgaacatttttagaaagtagattgttttctcctggttctctaaggaactacttctgcagtcttacatagtctcatccttgtttgttgtggtgcagtcgaactcctcaggcgtttggaaagcatgtggtagaccttcttccacacccacccatacccccgttcactgcgtctggaggtcttcaacagtgaagtagggcagcccacacagcctctcaggagcacctgtccgaggcacccggagcactttgcagagcacgtccagccctcatggggtccctgcatagaaatgtgaacccctgccactgaggaagatgaaggtagaccctgtgtctggaggtgctggagggcagcgggtcacctcttgtattcccaccttagtttggggtgttttgaagaggttcagagactaaatcttaaaccttatttgaataccaacgatagctattttgggaatttcgatcttaaaaagtgacaaaacacatttcccattttcatttttcagctgaattttagtaacttatttttgatgttttaattttatcatggcctcctctttggaggccaaccttcccatgggtctcaaagcagtgacatttggtagtaaatcactgcctctcaggagtcggtatgcacaagcactcagcagccactgttgatgccttctagggaaacctaatttccgttggtaaaggtaggggcctcggaactgttccggatctgctgtagaacttcaccgtgtggaatggtgacagccacacaccgttgaccagtttagaagaggttgcattcaataaaactcttagcttgagcttatgcaatgattggttaagattttggcattgtaagaattaggagatgatcatagaaatatatgtaaagtattcaattttcaatcattttcaaattactgttataaattgtttttgctgagttgtaatacttttgagatacaatgtattccttgtactgaaagaatgaaaaaggactttttcagcatttgaggtaagttctttaacgtttcattaaaaacattttttacaaatattttgtacatgcacttgcagtattgaggttaatcattttaataaattcggaaattaaaacaaaaaaac

SEQ ID NO: 103504 - DNA, 5322 bp, Homo sapiens
agaggatccccgagataagcaggagaaattattcaaagaacatgtatttatttatttgcgaatgtttgcaactgacagtggatttgaaatattgccatgtaatagatactcatcagaacaaaatggagcccaaatagttgcaaccaaagagtggaaacgaaatgaccaaatagaattactggtggcttgtattgccgaactttcagaaattgaggagaacatgctacttagacatggagaaaacgacttcagtgtcatgtactccacaaggaaaaactgtgctcaactctggctggctcctgcttattcaggcgaatgggcacggcactattttctcaacaagaataaaatgcaggagaaattattcaaagaacatgtatttatttatttgcgaatgtttgcaactgacagtggatttgaaatattgccatgtaatagatactcatcagaacaaaatggagccaaaatagttgcaacaaaagagtggaaacgaaatgacaaaatagaattactggtgggttgtattgccgaactttcagaaattgaggagaacatgctacttagacatggagaaaacgacttcagtgtcatgtactccacaaggaaaaactgtgctcaactctggctgggtcctgctgcgtttataaaccatgattgcagacctaattgtaagtttgtgtcaactggtcgagatacagcatgtgtgaaggctctaagagacattgaacctggagaagaaatttcttgttattatggagatgggttctttggagaaaataatgagttctgcgagtgttacacttgcgaaagacggggcactggtgcttttaaatccagagtgggactgcctgcgcctgctcctgttatcaatagcaaatatggactcagagaaacagataaacgtttaaataggcttaaaaagttaggtgacagcagcaaaaattcagacagtcaatctgtcagctctaacactgatgcagataccactcaggaaaaaaacaatgcaacttctaaccgaaaatcttcagttggcgtaaaaaagaatagcaagagcagaacgttaacgaggcaatctatgtcaagaattccagcttcttccaactctacctcatctaagctaactcatataaataattccagggtaccaaagaaactgaagaagcctgcaaagcctttactttcaaagataaaattgagaaatcattgcaagcggctggagcaaaagaatgcttcaagaaaactcgaaatgggaaacttagtactgaaagagcctaaagtagttctgtataaaaatttgcccattaaaaaagataaggagccagagggaccagcccaagccgcagttgccagcgggtgcttgactagacacgcggcgagagaacacagacagaatcctgtgagaggtgctcattcgcagggggagagctcgccctgcacctacataactcggcggtcagtgaggacaagaacaaatctgaaggaggcctctgacatcaagcttgaaccaaatacgttgaatggctataaaagcagtgtgacggaaccttgccccgacagtggtgaacagctgcagccagctcctgtgctgcaggaggaagaactggctcatgagactgcacaaaaaggggaggcaaagtgtcataagagtgacacaggcatgtccaaaaagaagtcacgacaaggaaaacttgtgaaacagtttgcaaaaatagaggaatctactccagtgcacgattctcctggaaaagacgacgcggtaccagatttgatgggtccccattctgaccagggtgagcacagtggcactgtgggcgtgcctgtgagctacacagactgtgctccttcacccgtcggttgttcagttgtgacatcagatagcttcaaaacaaaagacagctttagaactgcaaaaagtaaaaagaagaggcgaatcacaaggtatgatgcacagttaatcctagaaaataactctgggattcccaaattgactcttcgtaggcgtcatgatagcagcagcaaaacaaatgaccaagagaatgatggaatgaactcttccaaaataagcatcaagttaagcaaagaccatgacaacgataacaatctctatgtagcaaagcttaataatggatttaactcaggatcaggcagtagttctacaaaattaaaaatccagctaaaacgagatgaggaaaatagggggtcttatacagaggggcttcatgaaaatggggtgtgctgcagtgatcctctttctctcttggagtctcgaatggaggtggatgactatagtcagtatgaggaagaaagtacagatgattcctcctcttctgagggcgatgaagaggaggatgactatgatgatgactttgaagacgattttattcctcttcctccagctaagcgcttgaggttaatagttggaaaagactctatagatattgacatttcttcaaggagaagagaagatcagtctttaaggcttaatgcctaagctcttggtcttaacttgacctgggataactactttaaagaaataaaaaattccagtcaattattcctcaactgaaagtttagtggcagcacttctattgtcccttcacttatcagcatactattgtagaaagtgtacagcatactgactcaattcttaagtctgatttgtgcaaatttttatcgtactttttaaatagccttcttacgtgcaattctgagttagaggtaaagccctgttgtaaaataaaggctcaagcaaaattgtacagtgatagcaactttccacacaggacgttgaaaacagtaatgtggctacacagtttttttaactgtaagagcatcagctggctctttaatatatgactaaacaataatttaaaacaaatcatagtagcagcatattaagggtttctagtatgctaatatcaccagcaatgatctttggctttttgatttatttgctagatgtttcccccttggagttttgtcagtttcacactgtttgctggcccaggtgtactgtttgtggcctttgttaatatcgcaaaccattggttgggagtcagattggtttcttaaaaaaaaaaaaaaaacgacatacgtgacagctcacttttcagttcattatatgtacgagggtagcagtgtgtgggatgaggttcgatacagcgtatttattgcttgtcatgtaaattaaaaaccttgtatttaactcttttcaatccttttagataaaattgttctttgcaagaatgattggtgcttattttttcaaaaatttgctgtgaacaacgtgatgacaacaagcaacatttatctaatgaactacagctatcttaatttggttcttcaagttttctgttgcacttgtaaaatgctacaaggaatattaaaaaaatctattcactttaacttataatagtttatgaaataaaaacatgagtcacagcttttgttctgtggtaacctataaaaaaagtttgtctttgagattcaatgtaaagaactgaaaacaatgtatatgttgtaaatatttgtgtgttgtgagaaatttttgtcataagaaattaaaagaacttaccaggaaggtttttaagtttagaaatattcatgccaataaaataggaaattataaatatatagttttaagcactgcatcagtgggagttcttggcttatgttagtttatgttagtttattatgaaaacatcaaagatttttttgactatattatcagttaaacaaaaaggagtcagatttaatttgttttttgaagcactttgagaaattaattttaattaacttaatgagcaaatttttattactactttatgttcaataccaggttcttttcatttctctggattattttgcaaatcattggacagagaatttgggaatataaatctgtaacaggtgtttgacaccagtaggtctctttatttctgggaaatgtgtacctgtactttctgatatacagtgttcctaagtaaaaatcaattcaggggatttgtatagtgtctataggaaagtagcccatgtcttgaaatatgaaaaggaatctgaaggtcatgaaaagtccagtggagaaaatctcaatgcttactgttactactaattgattcctactagtttccaggtttggggggatattgtttcaatgacgctccttaagactgttgattgcccataggttccaaatagaaattaagactcatgaacatttttagaaagtagattgttttctcctggttctctaaggaactacttctgcagtcttacatagtctcatccttgtttgttgtggtgcagtcgaactcctcaggcgtttggaaagcatgtggtagaccttcttccacacccacccatacccccgttcactgcgtctggaggtcttcaacagtgaagtagggcagcccacacagcctctcaggagcacctgtccgaggcacccggagcactttgcagagcacgtccagccctcatggggtccctgcatagaaatgtgaacccctgccactgaggaagatgaaggtagaccctgtgtctggaggtgctggagggcagcgggtcacctcttgtattcccaccttagtttggggtgttttgaagaggttcagagactaaatcttaaaccttatttgaataccaacgatagctattttgggaatttcgatcttaaaaagtgacaaaacacatttcccattttcatttttcagctgaattttagtaacttatttttgatgttttaattttatcatggcctcctctttggaggccaaccttcccatgggtctcaaagcagtgacatttggtagtaaatcactgcctctcaggagtcggtatgcacaagcactcagcagccactgttgatgccttctagggaaacctaatttccgttggtaaaggtaggggcctcggaactgttccggatctgctgtagaacttcaccgtgtggaatggtgacagccacacaccgttgaccagtttagaagaggttgcattcaataaaactcttagcttgagcttatgcaatgattggttaagattttggcattgtaagaattaggagatgatcatagaaatatatgtaaagtattcaattttcaatcattttcaaattactgttataaattgtttttgctgagttgtaatacttttgagatacaatgtattccttgtactgaaagaatgaaaaaggactttttcagcatttgaggtaagttctttaacgtttcattaaaaacattttttacaaatattttgtacatgcacttgcagtattgaggttaatcattttaataaattcggaaattaaaacaaaaaaac

SEQ ID NO: 103505 - DNA, 5312 bp, Homo sapiens
ggcacaaggctgtggagctccagggtaggagagaagatagccaggtggggatcccagtgagctaactaaagtatagacagctaggccttttcagtttctgatatttattgtcaggattattttattaaaagaagccttactatatttaattactagtaatttttaacacatcacatattttaaataggaaacgaaatgacaaaatagaattactggtgggttgtattgccgaactttcagaaattgaggagaacatgctacttagacatggagaaaacgacttcagtgtcatgtactccacaaggaaaaactgtgctcaactctggctgggtcctgctgcgtttataaaccatgaagctgtgtttccaaggtgttggcgctagtgttggccattcctgctaactgctagaatggccttgtcaacctcagtcaaacctttatcttcctttaaaggagaatttgaaatagaaatgtttccacaaacttattaaaataaatgtatattcctttagttgaacttgagacctaaactcctatcaaaagttgtaaagttatatggaaagcttatttcagatttctataattgttcgtgtttcagatcttatcaacagttaattgactttatcttttggacatttttcagattgcagacctaattgtaagtttgtgtcaactggtcgagatacagcatgtgtgaaggctctaagagacattgaacctggagaagaaatttcttgttattatggagatgggttctttggagaaaataatgagttctgcgagtgttacacttgcgaaagacggggcactggtgcttttaaatccagagtgggactgcctgcgcctgctcctgttatcaatagcaaatatggactcagagaaacagataaacgtttaaataggcttaaaaagttaggtgacagcagcaaaaattcagacagtcaatctgtcagctctaacactgatgcagataccactcaggaaaaaaacaatgcaacttctaaccgaaaatcttcagttggcgtaaaaaagaatagcaagagcagaacgttaacgaggcaatctatgtcaagaattccagcttcttccaactctacctcatctaagctaactcatataaataattccagggtaccaaagaaactgaagaagcctgcaaagcctttactttcaaagataaaattgagaaatcattgcaagcggctggagcaaaagaatgcttcaagaaaactcgaaatgggaaacttagtactgaaagagcctaaagtagttctgtataaaaatttgcccattaaaaaagataaggagccagagggaccagcccaagccgcagttgccagcgggtgcttgactagacacgcggcgagagaacacagacagaatcctgtgagaggtgctcattcgcagggggagagctcgccctgcacctacataactcggcggtcagtgaggacaagaacaaatctgaaggaggcctctgacatcaagcttgaaccaaatacgttgaatggctataaaagcagtgtgacggaaccttgccccgacagtggtgaacagctgcagccagctcctgtgctgcaggaggaagaactggctcatgagactgcacaaaaaggggaggcaaagtgtcataagagtgacacaggcatgtccaaaaagaagtcacgacaaggaaaacttgtgaaacagtttgcaaaaatagaggaatctactccagtgcacgattctcctggaaaagacgacgcggtaccagatttgatgggtccccattctgaccagggtgagcacagtggcactgtgggcgtgcctgtgagctacacagactgtgctccttcacccgtcggttgttcagttgtgacatcagatagcttcaaaacaaaagacagctttagaactgcaaaaagtaaaaagaagaggcgaatcacaaggtatgatgcacagttaatcctagaaaataactctgggattcccaaattgactcttcgtaggcgtcatgatagcagcagcaaaacaaatgaccaagagaatgatggaatgaactcttccaaaataagcatcaagttaagcaaagaccatgacaacgataacaatctctatgtagcaaagcttaataatggatttaactcaggatcaggcagtagttctacaaaattaaaaatccagctaaaacgagatgaggaaaatagggggtcttatacagaggggcttcatgaaaatggggtgtgctgcagtgatcctctttctctcttggagtctcgaatggaggtggatgactatagtcagtatgaggaagaaagtacagatgattcctcctcttctgagggcgatgaagaggaggatgactatgatgatgactttgaagacgattttattcctcttcctccagctaagcgcttgaggttaatagttggaaaagactctatagatattgacatttcttcaaggagaagagaagatcagtctttaaggcttaatgcctaagctcttggtcttaacttgacctgggataactactttaaagaaataaaaaattccagtcaattattcctcaactgaaagtttagtggcagcacttctattgtcccttcacttatcagcatactattgtagaaagtgtacagcatactgactcaattcttaagtctgatttgtgcaaatttttatcgtactttttaaatagccttcttacgtgcaattctgagttagaggtaaagccctgttgtaaaataaaggctcaagcaaaattgtacagtgatagcaactttccacacaggacgttgaaaacagtaatgtggctacacagtttttttaactgtaagagcatcagctggctctttaatatatgactaaacaataatttaaaacaaatcatagtagcagcatattaagggtttctagtatgctaatatcaccagcaatgatctttggctttttgatttatttgctagatgtttcccccttggagttttgtcagtttcacactgtttgctggcccaggtgtactgtttgtggcctttgttaatatcgcaaaccattggttgggagtcagattggtttcttaaaaaaaaaaaaaaaacgacatacgtgacagctcacttttcagttcattatatgtacgagggtagcagtgtgtgggatgaggttcgatacagcgtatttattgcttgtcatgtaaattaaaaaccttgtatttaactcttttcaatccttttagataaaattgttctttgcaagaatgattggtgcttattttttcaaaaatttgctgtgaacaacgtgatgacaacaagcaacatttatctaatgaactacagctatcttaatttggttcttcaagttttctgttgcacttgtaaaatgctacaaggaatattaaaaaaatctattcactttaacttataatagtttatgaaataaaaacatgagtcacagcttttgttctgtggtaacctataaaaaaagtttgtctttgagattcaatgtaaagaactgaaaacaatgtatatgttgtaaatatttgtgtgttgtgagaaatttttgtcataagaaattaaaagaacttaccaggaaggtttttaagtttagaaatattcatgccaataaaataggaaattataaatatatagttttaagcactgcatcagtgggagttcttggcttatgttagtttatgttagtttattatgaaaacatcaaagatttttttgactatattatcagttaaacaaaaaggagtcagatttaatttgttttttgaagcactttgagaaattaattttaattaacttaatgagcaaatttttattactactttatgttcaataccaggttcttttcatttctctggattattttgcaaatcattggacagagaatttgggaatataaatctgtaacaggtgtttgacaccagtaggtctctttatttctgggaaatgtgtacctgtactttctgatatacagtgttcctaagtaaaaatcaattcaggggatttgtatagtgtctataggaaagtagcccatgtcttgaaatatgaaaaggaatctgaaggtcatgaaaagtccagtggagaaaatctcaatgcttactgttactactaattgattcctactagtttccaggtttggggggatattgtttcaatgacgctccttaagactgttgattgcccataggttccaaatagaaattaagactcatgaacatttttagaaagtagattgttttctcctggttctctaaggaactacttctgcagtcttacatagtctcatccttgtttgttgtggtgcagtcgaactcctcaggcgtttggaaagcatgtggtagaccttcttccacacccacccatacccccgttcactgcgtctggaggtcttcaacagtgaagtagggcagcccacacagcctctcaggagcacctgtccgaggcacccggagcactttgcagagcacgtccagccctcatggggtccctgcatagaaatgtgaacccctgccactgaggaagatgaaggtagaccctgtgtctggaggtgctggagggcagcgggtcacctcttgtattcccaccttagtttggggtgttttgaagaggttcagagactaaatcttaaaccttatttgaataccaacgatagctattttgggaatttcgatcttaaaaagtgacaaaacacatttcccattttcatttttcagctgaattttagtaacttatttttgatgttttaattttatcatggcctcctctttggaggccaaccttcccatgggtctcaaagcagtgacatttggtagtaaatcactgcctctcaggagtcggtatgcacaagcactcagcagccactgttgatgccttctagggaaacctaatttccgttggtaaaggtaggggcctcggaactgttccggatctgctgtagaacttcaccgtgtggaatggtgacagccacacaccgttgaccagtttagaagaggttgcattcaataaaactcttagcttgagcttatgcaatgattggttaagattttggcattgtaagaattaggagatgatcatagaaatatatgtaaagtattcaattttcaatcattttcaaattactgttataaattgtttttgctgagttgtaatacttttgagatacaatgtattccttgtactgaaagaatgaaaaaggactttttcagcatttgaggtaagttctttaacgtttcattaaaaacattttttacaaatattttgtacatgcacttgcagtattgaggttaatcattttaataaattcggaaattaaaacaaaaaaac

SEQ ID NO: 103506 - DNA, 4932 bp, Homo sapiens
cggacgcgtgggggcgcgacggcggcggcggcggccggttgggggcggggggctcggacgctgcggggactcatttttcccgtcagcggagcggagggagcggtgctgcggcccgcgccgccatcttggattttactctccatttttctctggaattatttttggtgattaattttctgggggggactgggacgcggggcccggcggcgcggccccgcatcgcagcggccgggcagcggggcctgggacgcgccccgaggaggagcggggcggcgcaggcggagagaacattgaaagtattctctaagctatttgaagagagtgactaaatgcacctgggtcaggctgtctgtgggtatgaagtggttgggagaatccaagaacatggtggtgaatggcaggagaaatggaggcaagttgtctaatgaccatcagcagaatcaatcaaaattacagcacacggggaaggacaccctgaaggctggcaaaaatgcagtcgagaggaggtcgaacagatgtaatggtaactcgggatttgaaggacagagtcgctatgtaccatcctctggaatgtccgccaaggaactctgtgaaaatgatgacctagcaaccagtttggttcttgatccctatttaggttttcaaacacacaaaatgaatactagcgcctttccttcgaggagctcaaggcatttttcaaaatctgacagtttttctcacaacaaccctgtgagatttaggcctattaaaggaaggcaggaagaactaaaggaagtaattgaacgttttaagaaagatgaacacttggagaaagccttcaaatgtttgacttcaggcgaatgggcacggcactattttctcaacaagaataaaatgcaggagaaattattcaaagaacatgtatttatttatttgcgaatgtttgcaactgacagtggatttgaaatattgccatgtaatagatactcatcagaacaaaatggagccaaaatagttgcaacaaaagagtggaaacgaaatgacaaaatagaattactggtgggttgtattgccgaactttcagaaattgaggagaacatgctacttagacatggagaaaacgacttcagtgtcatgtactccacaaggaaaaactgtgctcaactctggctgggtcctgctgcgtttataaaccatgattgcagacctaattgtaagtttgtgtcaactggtcgagatacagcatgtgtgaaggctctaagagacattgaacctggagaagaaatttcttgttattatggagatgggttctttggagaaaataatgagttctgcgagtgttacacttgcgaaagacggggcactggtgcttttaaatccagagtgggactgcctgcgcctgctcctgttatcaatagcaaatatggactcagagaaacagataaacgtttaaataggcttaaaaagttaggtgacagcagcaaaaattcagacagtcaatctgtcagctctaacactgatgcagataccactcaggaaaaaaacaatgcaacttctaaccgaaaatcttcagttggcgtaaaaaagaatagcaagagcagaacgttaacgaggcaatctatgtcaagaattccagcttcttccaactctacctcatctaagctaactcatataaataattccagggtaccaaagaaactgaagaagcctgcaaagcctttactttcaaagataaaattgagaaatcattgcaagcggctggagcaaaagaatgcttcaagaaaactcgaaatgggaaacttagtactgaaagagcctaaagtagttctgtataaaaatttgcccattaaaaaagataaggagccagagggaccagcccaagccgcagttgccagcgggtgcttgactagacacgcggcgagagaacacagacagaatcctgtgagaggtgctcattcgcagggggagagctcgccctgcacctacataactcggcggtcagtgaggacaagaacaaatctgaaggaggcctctgacatcaagcttgaaccaaatacgttgaatggctataaaagcagtgtgacggaaccttgccccgacagtggtgaacagctgcagccagctcctgtgctgcaggaggaagaactggctcatgagactgcacaaaaaggggaggcaaagtgtcataagagtgacacaggcatgtccaaaaagaagtcacgacaaggaaaacttgtgaaacagtttgcaaaaatagaggaatctactccagtgcacgattctcctggaaaagacgacgcggtaccagatttgatgggtccccattctgaccagggtgagcacagtggcactgtgggcgtgcctgtgagctacacagactgtgctccttcacccgtcggttgttcagttgtgacatcagatagcttcaaaacaaaagacagctttagaactgcaaaaagtaaaaagaagaggcgaatcacaaggtatgatgcacagttaatcctagaaaataactctgggattcccaaattgactcttcgtaggcgtcatgatagcagcagcaaaacaaatgaccaagagaatgatggaatgaactcttccaaaataagcatcaagttaagcaaagaccatgacaacgataacaatctctatgtagcaaagcttaataatggatttaactcaggatcaggcagtagttcttaaaaaaaaaaaaaaaacgacatacgtgacagctcacttttcagttcattatatgtacgagggtagcagtgtgtgggatgaggttcgatacagcgtatttattgcttgtcatgtaaattaaaaaccttgtatttaactcttttcaatccttttagataaaattgttctttgcaagaatgattggtgcttattttttcaaaaatttgctgtgaacaacgtgatgacaacaagcaacatttatctaatgaactacagctatcttaatttggttcttcaagttttctgttgcacttgtaaaatgctacaaggaatattaaaaaaatctattcactttaacttataatagtttatgaaataaaaacatgagtcacagcttttgttctgtggtaacctataaaaaaagtttgtctttgagattcaatgtaaagaactgaaaacaatgtatatgttgtaaatatttgtgtgttgtgagaaatttttgtcataagaaattaaaagaacttaccaggaaggtttttaagtttagaaatattcatgccaataaaataggaaattataaatatatagttttaagcactgcatcagtgggagttcttggcttatgttagtttatgttagtttattatgaaaacatcaaagatttttttgactatattatcagttaaacaaaaaggagtcagatttaatttgttttttgaagcactttgagaaattaattttaattaacttaatgagcaaatttttattactactttatgttcaataccaggttcttttcatttctctggattattttgcaaatcattggacagagaatttgggaatataaatctgtaacaggtgtttgacaccagtaggtctctttatttctgggaaatgtgtacctgtactttctgatatacagtgttcctaagtaaaaatcaattcaggggatttgtatagtgtctataggaaagtagcccatgtcttgaaatatgaaaaggaatctgaaggtcatgaaaagtccagtggagaaaatctcaatgcttactgttactactaattgattcctactagtttccaggtttggggggatattgtttcaatgacgctccttaagactgttgattgcccataggttccaaatagaaattaagactcatgaacatttttagaaagtagattgttttctcctggttctctaaggaactacttctgcagtcttacatagtctcatccttgtttgttgtggtgcagtcgaactcctcaggcgtttggaaagcatgtggtagaccttcttccacacccacccatacccccgttcactgcgtctggaggtcttcaacagtgaagtagggcagcccacacagcctctcaggagcacctgtccgaggcacccggagcactttgcagagcacgtccagccctcatggggtccctgcatagaaatgtgaacccctgccactgaggaagatgaaggtagaccctgtgtctggaggtgctggagggcagcgggtcacctcttgtattcccaccttagtttggggtgttttgaagaggttcagagactaaatcttaaaccttatttgaataccaacgatagctattttgggaatttcgatcttaaaaagtgacaaaacacatttcccattttcatttttcagctgaattttagtaacttatttttgatgttttaattttatcatggcctcctctttggaggccaaccttcccatgggtctcaaagcagtgacatttggtagtaaatcactgcctctcaggagtcggtatgcacaagcactcagcagccactgttgatgccttctagggaaacctaatttccgttggtaaaggtaggggcctcggaactgttccggatctgctgtagaacttcaccgtgtggaatggtgacagccacacaccgttgaccagtttagaagaggttgcattcaataaaactcttagcttgagcttatgcaatgattggttaagattttggcattgtaagaattaggagatgatcatagaaatatatgtaaagtattcaattttcaatcattttcaaattactgttataaattgtttttgctgagttgtaatacttttgagatacaatgtattccttgtactgaaagaatgaaaaaggactttttcagcatttgaggtaagttctttaacgtttcattaaaaacattttttacaaatattttgtacatgcacttgcagtattgaggttaatcattttaataaattcggaaattaaaacaaaaaaac

SEQ ID NO: 103507 - DNA, 855 bp, Homo sapiens
agcaggagaagtatctaccttcatcttcctcagtggcaggcgttcacacttctatgcagggaccccatgcgggctggacgtgctggagggcagcgggtcacctcttgtattcccaccttagtttggggtgttttgaagaggttcagagactaaatcttaaaccttatttgaataccaacgatagctattttgggaatttcgatcttaaaaagtgacaaaacacatttcccattttcatttttcagctgaattttagtaacttatttttgatgttttaattttatcatggcctcctctttggaggccaaccttcccatgggtctcaaagcagtgacatttggtagtaaatcactgcctctcaggagtcggtatgcacaagcactcagcagccactgttgatgccttctagggaaacctaatttccgttggtaaaggtaggggcctcggaactgttccggatctgctgtagaacttcaccgtgtggaatggtgacagccacacaccgttgaccagtttagaagaggttgcattcaataaaactcttagcttgagcttatgcaatgattggttaagattttggcattgtaagaattaggagatgatcatagaaatatatgtaaagtattcaattttcaatcattttcaaattactgttataaattgtttttgctgagttgtaatacttttgagatacaatgtattccttgtactgaaagaatgaaaaaggactttttcagcatttgaggtaagttctttaacgtttcattaaaaacattttttacaaatattttgtacatgcacttgcagtattgaggttaatcattttaataaattcggaaattaaaacaaaaaaac

SEQ ID NO: 103508 - DNA, 1763 bp, Homo sapiens
cggacgcgtgggggcgcgacggcggcggcggcggccggttgggggcggggggctcggacgctgcggggactcatttttcccgtcagcggagcggagggagcggtgctgcggcccgcgccgccatcttggattttactctccatttttctctggaattatttttggtgattaattttctgggggggactgggacgcggggcccggcggcgcggccccgcatcgcagcggccgggcagcggggcctgggacgcgccccgaggaggagcggggcggcgcaggcggagagaacattgaaagtattctctaagctatttgaagagagtgactaaatgcacctgggtcaggctgtctgtgggtatgaagtggttgggagaatccaagaacatggtggtgaatggcaggagaaatggaggcaagttgtctaatgaccatcagcagaatcaatcaaaattacagcacacggggaaggacaccctgaaggctggcaaaaatgcagtcgagaggaggtcgaacagatgtaatggtaactcgggatttgaaggacagagtcgctatgtaccatcctctggaatgtccgccaaggaactctgtgaaaatgatgacctagcaaccagtttggttcttgatccctatttaggttttcaaacacacaaaatgaatactagcgcctttccttcgaggagctcaaggcatttttcaaaatctgacagtttttctcacaacaaccctgtgagatttaggcctattaaaggaaggcaggaagaactaaaggaagtaattgaacgttttaagaaagatgaacacttggagaaagccttcaaatgtttgacttcaggcgaatgggcacggcactattttctcaacaagaataaaatgcaggagaaattattcaaagaacatgtatttatttatttgcgaatgtttgcaactgacagtggatttgaaatattgccatgtaatagatactcatcagaacaaaatggagccaaaatagttgcaacaaaagagtggaaacgaaatgacaaaatagaattactggtgggttgtattgccgaactttcagaaattgaggagaacatgctacttagacatggagaaaacgacttcagtgtcatgtactccacaaggaaaaactgtgctcaactctggctgggtcctgctgcgtttataaaccatgattgcagacctaattgtaagtttgtgtcaactggtcgagatacagcatgtgtgaaggctctaagagacattgaacctggagaagaaatttcttgttattatggagatgggttctttggagaaaataatgagttctgcgagtgttacacttgcgaaagacggggcactggtgcttttaaatccagagtgggactgcctgcgcctgctcctgttatcaatagcaaatatggactcagagaaacagataaacgtttaaataggcttaaaaagttaggtgacagcagcaaaaattcagacagtcaatctgtcagctctaacactgatgcagataccactcaggaaaaaaacaatgcaaagaatcctgaagaaaagggaaggtgtttcccatgatggtgaatgtcactgccatgaattcctgaatctacctgctgctgggagtcagagtccaagcataacccgtgtagcataaaagcagcgctgtagccctattccagtctttttcgttaatgtccagagtgaacaacaagagttagtcaatcattaactgttgactgttgattctcataataaatgcagcataacgacca

SEQ ID NO: 103509 - DNA, 1182 bp, Homo sapiens
  misc_feature (21)..(21): n is a, c, g, or t
gcggcggtgcgggcggcaggncagcggggcgatgaggtgaggacgcccgggaaccggaggcggcaccgcgcggcgcacggacctgggacgcggagtcctgaagccggcggacggttttcgtacgggcggccgtgcgcgaggcgaggagagaacattgaaagtattctctaagctatttgaagagagtgactaaatgcacctgggtcaggctgtctgtgggtatgaagtggttgggagaatccaagaacatggtggtgaatggcaggagaaatggaggcaagttgtctaatgaccatcagcagaatcaatcaaaattacagcacacggggaaggacaccctgaaggctggcaaaaatgcagtcgagaggaggtcgaacagatgtatgtacacacttaaaccttcaatgttctgattgtgatatggggtagtaattctttccagtttgtaatgtgtattctgttttcttttgtcttaaataattttttgcattttcataattaacaatatagtctttttactctcaaagttgtgtcaatttttattctcatcaaactatataaaactcaagtttaatgcttcatataattattttaatcatgcttttctgtctgttactttatattttgtagaatttacctgaatggttgatatgtcttactaaatttttaaaattttaattgaacttcttacaggttaacctgtatttttttaatagatgtaagtataggtatgtacttctttgctaatttccacaaatgtttcatggaataatatgaataatgacgccaactgtaatttacataagtagaatgaggatagatagaactgactgctttagggcagcctcacaaatcatagcaatttattctatttatacagggtagacagttgttcatcctgacagtgaaacactgctgataagttactttatttcctctatacctcttgataggaaagaggctgctttttgagagttcaggaagttgtagatttggtgcgtatttcatagttcctctaaaagtagtaaaatgactgaggacaagtgtatacctaactaggcagctatatgtccaaacgtatgtcatgttaaagaggacagcttttcttctttttctaacgtgaatctagccacctttgaatatccttaattcagattggcattggcctgtttccagggattt

SEQ ID NO: 103510 - DNA, 506 bp, Homo sapiens
ccgtttctcagtgttccttggagagaagggggtgggggagagtcaagcatttgaaccaaattctcacgactacccagaccccattcttgggaacctgctattactacctgctaacgataatactctcagtaatggagatagtttactgcatttggttttctgtcttatgcaaaggttattaaattcttaattactaaaatgattgatttttcagttctttattaccagcttgaatgggcaatgccgctaaagattttaaggcagatttaagtagttttcaatttgagtaatttttcttgcttttgcttttcacaggtaatggtaactcgggatttgaaggacagagtcgctatgtaccatcctctggaatgtccgccaaggaactctgtgaaaatgatgacctagcaaccagtttggttcttgatccctatttaggttttcaaacacacaaaatgaatactaggtaattttcagtctttatcctgaatggaacagatgattatgtt

SEQ ID NO: 103511 - DNA, 5465 bp, Homo sapiens
ggactgaagagctgatctgcgactcctcactcagcgtctacaaactgtggatttgcagctaaactttcttcagagggggaaatgtgttcactatgttgcctcatggttttattttatatcttaaatatttgagcatttttctctcttcctctctccttccctgtctcccttttttctgttccccttcctgttccccacccctccagtcagctcttgattgtgcatgctaatgaagggcacagtagcacagctaatacagtctacaacttttcttcactgccacagtggggagacagaaaaaccaaatagcaagaaaacctgggaagtgagtctctggaaagagtggggaacagatttaggcctattaaaggaaggcaggaagaactaaaggaagtaattgaacgttttaagaaagatgaacacttggagaaagccttcaaatgtttgacttcaggcgaatgggcacggcactattttctcaacaagaataaaatgcaggagaaattattcaaagaacatgtatttatttatttgcgaatgtttgcaactgacagtggatttgaaatattgccatgtaatagatactcatcagaacaaaatggagccaaaatagttgcaacaaaagagtggaaacgaaatgacaaaatagaattactggtgggttgtattgccgaactttcagaaattgaggagaacatgctacttagacatggagaaaacgacttcagtgtcatgtactccacaaggaaaaactgtgctcaactctggctgggtcctgctgcgtttataaaccatgattgcagacctaattgtaagtttgtgtcaactggtcgagatacagcatgtgtgaaggctctaagagacattgaacctggagaagaaatttcttgttattatggagatgggttctttggagaaaataatgagttctgcgagtgttacacttgcgaaagacggggcactggtgcttttaaatccagagtgggactgcctgcgcctgctcctgttatcaatagcaaatatggactcagagaaacagataaacgtttaaataggcttaaaaagttaggtgacagcagcaaaaattcagacagtcaatctgtcagctctaacactgatgcagataccactcaggaaaaaaacaatgcaacttctaaccgaaaatcttcagttggcgtaaaaaagaatagcaagagcagaacgttaacgaggcaatctatgtcaagaattccagcttcttccaactctacctcatctaagctaactcatataaataattccagggtaccaaagaaactgaagaagcctgcaaagcctttactttcaaagataaaattgagaaatcattgcaagcggctggagcaaaagaatgcttcaagaaaactcgaaatgggaaacttagtactgaaagagcctaaagtagttctgtataaaaatttgcccattaaaaaagataaggagccagagggaccagcccaagccgcagttgccagcgggtgcttgactagacacgcggcgagagaacacagacagaatcctgtgagaggtgctcattcgcagggggagagctcgccctgcacctacataactcggcggtcagtgaggacaagaacaaatctgaaggaggcctctgacatcaagcttgaaccaaatacgttgaatggctataaaagcagtgtgacggaaccttgccccgacagtggtgaacagctgcagccagctcctgtgctgcaggaggaagaactggctcatgagactgcacaaaaaggggaggcaaagtgtcataagagtgacacaggcatgtccaaaaagaagtcacgacaaggaaaacttgtgaaacagtttgcaaaaatagaggaatctactccagtgcacgattctcctggaaaagacgacgcggtaccagatttgatgggtccccattctgaccagggtgagcacagtggcactgtgggcgtgcctgtgagctacacagactgtgctccttcacccgtcggttgttcagttgtgacatcagatagcttcaaaacaaaagacagctttagaactgcaaaaagtaaaaagaagaggcgaatcacaaggtatgatgcacagttaatcctagaaaataactctgggattcccaaattgactcttcgtaggcgtcatgatagcagcagcaaaacaaatgaccaagagaatgatggaatgaactcttccaaaataagcatcaagttaagcaaagaccatgacaacgataacaatctctatgtagcaaagcttaataatggatttaactcaggatcaggcagtagttctacaaaattaaaaatccagctaaaacgagatgaggaaaatagggggtcttatacagaggggcttcatgaaaatggggtgtgctgcagtgatcctctttctctcttggagtctcgaatggaggtggatgactatagtcagtatgaggaagaaagtacagatgattcctcctcttctgagggcgatgaagaggaggatgactatgatgatgactttgaagacgattttattcctcttcctccagctaagcgcttgaggttaatagttggaaaagactctatagatattgacatttcttcaaggagaagagaagatcagtctttaaggcttaatgcctaagctcttggtcttaacttgacctgggataactactttaaagaaataaaaaattccagtcaattattcctcaactgaaagtttagtggcagcacttctattgtcccttcacttatcagcatactattgtagaaagtgtacagcatactgactcaattcttaagtctgatttgtgcaaatttttatcgtactttttaaatagccttcttacgtgcaattctgagttagaggtaaagccctgttgtaaaataaaggctcaagcaaaattgtacagtgatagcaactttccacacaggacgttgaaaacagtaatgtggctacacagtttttttaactgtaagagcatcagctggctctttaatatatgactaaacaataatttaaaacaaatcatagtagcagcatattaagggtttctagtatgctaatatcaccagcaatgatctttggctttttgatttatttgctagatgtttcccccttggagttttgtcagtttcacactgtttgctggcccaggtgtactgtttgtggcctttgttaatatcgcaaaccattggttgggagtcagattggtttcttaaaaaaaaaaaaaaaacgacatacgtgacagctcacttttcagttcattatatgtacgagggtagcagtgtgtgggatgaggttcgatacagcgtatttattgcttgtcatgtaaattaaaaaccttgtatttaactcttttcaatccttttagataaaattgttctttgcaagaatgattggtgcttattttttcaaaaatttgctgtgaacaacgtgatgacaacaagcaacatttatctaatgaactacagctatcttaatttggttcttcaagttttctgttgcacttgtaaaatgctacaaggaatattaaaaaaatctattcactttaacttataatagtttatgaaataaaaacatgagtcacagcttttgttctgtggtaacctataaaaaaagtttgtctttgagattcaatgtaaagaactgaaaacaatgtatatgttgtaaatatttgtgtgttgtgagaaatttttgtcataagaaattaaaagaacttaccaggaaggtttttaagtttagaaatattcatgccaataaaataggaaattataaatatatagttttaagcactgcatcagtgggagttcttggcttatgttagtttatgttagtttattatgaaaacatcaaagatttttttgactatattatcagttaaacaaaaaggagtcagatttaatttgttttttgaagcactttgagaaattaattttaattaacttaatgagcaaatttttattactactttatgttcaataccaggttcttttcatttctctggattattttgcaaatcattggacagagaatttgggaatataaatctgtaacaggtgtttgacaccagtaggtctctttatttctgggaaatgtgtacctgtactttctgatatacagtgttcctaagtaaaaatcaattcaggggatttgtatagtgtctataggaaagtagcccatgtcttgaaatatgaaaaggaatctgaaggtcatgaaaagtccagtggagaaaatctcaatgcttactgttactactaattgattcctactagtttccaggtttggggggatattgtttcaatgacgctccttaagactgttgattgcccataggttccaaatagaaattaagactcatgaacatttttagaaagtagattgttttctcctggttctctaaggaactacttctgcagtcttacatagtctcatccttgtttgttgtggtgcagtcgaactcctcaggcgtttggaaagcatgtggtagaccttcttccacacccacccatacccccgttcactgcgtctggaggtcttcaacagtgaagtagggcagcccacacagcctctcaggagcacctgtccgaggcacccggagcactttgcagagcacgtccagccctcatggggtccctgcatagaaatgtgaacccctgccactgaggaagatgaaggtagaccctgtgtctggaggtgctggagggcagcgggtcacctcttgtattcccaccttagtttggggtgttttgaagaggttcagagactaaatcttaaaccttatttgaataccaacgatagctattttgggaatttcgatcttaaaaagtgacaaaacacatttcccattttcatttttcagctgaattttagtaacttatttttgatgttttaattttatcatggcctcctctttggaggccaaccttcccatgggtctcaaagcagtgacatttggtagtaaatcactgcctctcaggagtcggtatgcacaagcactcagcagccactgttgatgccttctagggaaacctaatttccgttggtaaaggtaggggcctcggaactgttccggatctgctgtagaacttcaccgtgtggaatggtgacagccacacaccgttgaccagtttagaagaggttgcattcaataaaactcttagcttgagcttatgcaatgattggttaagattttggcattgtaagaattaggagatgatcatagaaatatatgtaaagtattcaattttcaatcattttcaaattactgttataaattgtttttgctgagttgtaatacttttgagatacaatgtattccttgtactgaaagaatgaaaaaggactttttcagcatttgaggtaagttctttaacgtttcattaaaaacattttttacaaatattttgtacatgcacttgcagtattgaggttaatcattttaataaattcggaaattaaaacaaaaaaac

SEQ ID NO: 103512 - DNA, 2796 bp, Homo sapiens
cggacgcgtgggggcgcgacggcggcggcggcggccggttgggggcggggggctcggacgctgcggggactcatttttcccgtcagcggagcggagggagcggtgctgcggcccgcgccgccatcttggattttactctccatttttctctggaattatttttggtgattaattttctgggggggactgggacgcggggcccggcggcgcggccccgcatcgcagcggccgggcagcggggcctgggacgcgccccgaggaggagcggggcggcgcaggcggagagaacattgaaagtattctctaagctatttgaagagagtgactaaatgcacctgggtcaggctgtctgtgggtatgaagtggttgggagaatccaagaacatggtggtgaatggcaggagaaatggaggcaagttgtctaatgaccatcagcagaatcaatcaaaattacagcacacggggaaggacaccctgaaggctggcaaaaatgcagtcgagaggaggtcgaacagatgtaatggtaactcgggatttgaaggacagagtcgctatgtaccatcctctggaatgtccgccaaggaactctgtgaaaatgatgacctagcaaccagtttggttcttgatccctatttaggttttcaaacacacaaaatgaatactagcgcctttccttcgaggagctcaaggcatttttcaaaatctgacagtttttctcacaacaaccctgtgagatttaggcctattaaaggaaggcaggaagaactaaaggaagtaattgaacgttttaagaaagatgaacacttggagaaagccttcaaatgtttgacttcaggcgaatgggcacggcactattttctcaacaagaataaaatgcaggagaaattattcaaagaacatgtatttatttatttgcgaatgtttgcaactgacagtggatttgaaatattgccatgtaatagatactcatcagaacaaaatggagccaaaatagttgcaacaaaagagtggaaacgaaatgacaaaatagaattactggtgggttgtattgccgaactttcagaaattgaggagaacatgctacttagacatggagaaaacgacttcagtgtcatgtactccacaaggaaaaactgtgctcaactctggctgggtcctgctgcgtttataaaccatgattgcagacctaattgtaagtttgtgtcaactggtcgagatacagcatgtgtgaaggctctaagagacattgaacctggagaagaaatttcttgttattatggagatgggttctttggagaaaataatgagttctgcgagtgttacacttgcgaaagacggggcactggtgcttttaaatccagagtgggactgcctgcgcctgctcctgttatcaatagcaaatatggactcagagaaacagataaacgtttaaataggcttaaaaagttaggtgacagcagcaaaaattcagacagtcaatctgtcagctctaacactgatgcagataccactcaggaaaaaaacaatgcaagtaagtaagggagatttgataagcatatcttttaaaagtattttcacacaatttgctttataaagtgtgcttcagtagttttaaacttttaaatactcagagagactgggacttgtgagctttggctgcacttcaaggctctagacgtgatttgagtagaggcacagtctgtatcccatctctaacttcagtaccgtcctctagactatttttcttgaataccttggtaactggatatgagttcttcatcatatgttccaaggtcatcatatgttttaaacattttcaaggtgttagagactgtgatgatgtcgctaagtcctgcaagaagacaaaaggactgagtagaattaaattagactctatacattccagtgcctagccagtttgttagaaaagatgatggacttggggaattcatagcttctggccttaaggcttccaccttttcattgcttgctgacctttttcaaaacgaactgactcagttcagcagaccaccagtaccagactcagaattgtgatagaggagcattttgaacagtgccgtattgtgacatgctgtattggctactccagaaagtaggagtaaagatggaaaggagaaagaagcaacctctgagattccagtggtgtgtgggggcaagatctgatggaaactgaaaaagagaacgaagactaaacaaagagaaaggaaagagaagaaaccctaaatgggcaaaggaaagcacatcctgtttgcggagctttgaaatattggaaccatttctaattgctcctgtttttctgggtaacaccagttttctgtagttgccactaaagcagtagactcttgagtctcacttgtctctgagagagacagaagttagaaagttttgacttggcgattccgaaagtatgcctttgttggcacttaaatgtccagtgagacttcttggcaccttagagccctctgagatactgattattttaggttcttctccctactttcagatgttttcagcccaacactgggtgctctcttccactacagagaatcctgaagaaaagggaaggtgtttcccatgatggtgaatgtcactgccatgaattcctgaatctacctgctgctgggagtcagagtccaagcataacccgtgtagcataaaagcagcgctgtagccctattccagtctttttcgttaatgtccagagtgaacaacaagagttagtcaatcattaactgttgactgttgattctcataataaatgcagcataacgacca

SEQ ID NO: 103513 - DNA, 3085 bp, Homo sapiens
cggacgcgtgggggcgcgacggcggcggcggcggccggttgggggcggggggctcggacgctgcggggactcatttttcccgtcagcggagcggagggagcggtgctgcggcccgcgccgccatcttggattttactctccatttttctctggaattatttttggtgattaattttctgggggggactgggacgcggggcccggcggcgcggccccgcatcgcagcggccgggcagcggggcctgggacgcgccccgaggaggagcggggcggcgcaggcggagagaacattgaaagtattctctaagctatttgaagagagtgactaaatgcacctgggtcaggctgtctgtgggtatgaagtggttgggagaatccaagaacatggtggtgaatggcaggagaaatggaggcaagttgtctaatgaccatcagcagaatcaatcaaaattacagcacacggggaaggacaccctgaaggctggcaaaaatgcagtcgagaggaggtcgaacagatgtaatggtaactcgggatttgaaggacagagtcgctatgtaccatcctctggaatgtccgccaaggaactctgtgaaaatgatgacctagcaaccagtttggttcttgatccctatttaggttttcaaacacacaaaatgaatactagcgcctttccttcgaggagctcaaggcatttttcaaaatctgacagtttttctcacaacaaccctgtgagatttaggcctattaaaggaaggcaggaagaactaaaggaagtaattgaacgttttaagaaagatgaacacttggagaaagccttcaaatgtttgacttcaggcgaatgggcacggcactattttctcaacaagaataaaatgcaggagaaattattcaaagaacatgtatttatttatttgcgaatgtttgcaactgacagtggatttgaaatattgccatgtaatagatactcatcagaacaaaatggagccaaaatagttgcaacaaaagagtggaaacgaaatgacaaaatagaattactggtgggttgtattgccgaactttcagaaattgaggagaacatgctacttagacatggagaaaacgacttcagtgtcatgtactccacaaggaaaaactgtgctcaactctggctgggtcctgctgcgtttataaaccatgaagctgtgtttccaaggtgttggcgctagtgttggccattcctgctaactgctagaatggccttgtcaacctcagtcaaacctttatcttcctttaaaggagaatttgaaatagaaatgtttccacaaacttattaaaataaatgtatattcctttagttgaacttgagacctaaactcctatcaaaagttgtaaagttatatggaaagcttatttcagatttctataattgttcgtgtttcagatcttatcaacagttaattgactttatcttttggacatttttcagattgcagacctaattgtaagtttgtgtcaactggtcgagatacagcatgtgtgaaggctctaagagacattgaacctggagaagaaatttcttgttattatggagatgggttctttggagaaaataatgagttctgcgagtgttacacttgcgaaagacggggcactggtgcttttaaatccagagtgggactgcctgcgcctgctcctgttatcaatagcaaatatggactcagagaaacagataaacgtttaaataggcttaaaaagttaggtgacagcagcaaaaattcagacagtcaatctgtcagctctaacactgatgcagataccactcaggaaaaaaacaatgcaagtaagtaagggagatttgataagcatatcttttaaaagtattttcacacaatttgctttataaagtgtgcttcagtagttttaaacttttaaatactcagagagactgggacttgtgagctttggctgcacttcaaggctctagacgtgatttgagtagaggcacagtctgtatcccatctctaacttcagtaccgtcctctagactatttttcttgaataccttggtaactggatatgagttcttcatcatatgttccaaggtcatcatatgttttaaacattttcaaggtgttagagactgtgatgatgtcgctaagtcctgcaagaagacaaaaggactgagtagaattaaattagactctatacattccagtgcctagccagtttgttagaaaagatgatggacttggggaattcatagcttctggccttaaggcttccaccttttcattgcttgctgacctttttcaaaacgaactgactcagttcagcagaccaccagtaccagactcagaattgtgatagaggagcattttgaacagtgccgtattgtgacatgctgtattggctactccagaaagtaggagtaaagatggaaaggagaaagaagcaacctctgagattccagtggtgtgtgggggcaagatctgatggaaactgaaaaagagaacgaagactaaacaaagagaaaggaaagagaagaaaccctaaatgggcaaaggaaagcacatcctgtttgcggagctttgaaatattggaaccatttctaattgctcctgtttttctgggtaacaccagttttctgtagttgccactaaagcagtagactcttgagtctcacttgtctctgagagagacagaagttagaaagttttgacttggcgattccgaaagtatgcctttgttggcacttaaatgtccagtgagacttcttggcaccttagagccctctgagatactgattattttaggttcttctccctactttcagatgttttcagcccaacactgggtgctctcttccactacagagaatcctgaagaaaagggaaggtgtttcccatgatggtgaatgtcactgccatgaattcctgaatctacctgctgctgggagtcagagtccaagcataacccgtgtagcataaaagcagcgctgtagccctattccagtctttttcgttaatgtccagagtgaacaacaagagttagtcaatcattaactgttgactgttgattctcataataaatgcagcataacgacca

SEQ ID NO: 103514 - DNA, 876 bp, Homo sapiens
cggacgcgtgggggcgcgacggcggcggcggcggccggttgggggcggggggctcggacgctgcggggactcatttttcccgtcagcggagcggagggagcggtgctgcggcccgcgccgccatcttggattttactctccatttttctctggaattatttttggtgattaattttctgggggggactgggacgcggggcccggcggcgcggccccgcatcgcagcggccgggcagcggggcctgggacgcgccccgaggaggagcggggcggcgcaggcggagagaacattgaaagtattctctaagctatttgaagagagtgactaaatgcacctgggtcaggctgtctgtgggtatgaagtggttgggagaatccaagaacatggtggtgaatggcaggagaaatggaggcaagttgtctaatgaccatcagcagaatcaatcaaaattacagcacacggggaaggacaccctgaaggctggcaaaaatgcagtcgagaggaggtcgaacagatgtaatggtaactcgggatttgaaggacagagtcgctatgtaccatcctctggaatgtccgccaaggaactctgtgaaaatgatgacctagcaaccagtttggttcttgatccctatttaggttttcaaacacacaaaatgaatactagcgcctttccttcgaggagctcaaggcatttttcaaaatctgacagtttttctcacaacaaccctgtgagatttaggcctattaaaggaaggcaggaagaactaaaggaagtaattgaacgttttaagaaagatgaacacttggagaaagccttcaaatgtttgacttcaggcgaatgggcacgacagcccaaaacggtaccgagctcgatt

SEQ ID NO: 103515 - DNA, 259 bp, Homo sapiens
gtcatcagctccacgcatctcagcaacggacactttcgcaacatcaagggagttttccggggccctctcagcaagaacgggaacaaaactctggactatgctgagaaggaaaataccatagcaaaagctctggaagatctgaaggcaaatttttactgtgaactctgtgacaagcagtactataagcaccaggagtttgacaatcacattaattcatatgaccatgctcacaagcaggtaagaaagagatgtgaaaaaa

SEQ ID NO: 103516 - DNA, 920 bp, Homo sapiens
gtcatcagctccacgcatctcagcaacggacactttcgcaacatcaagggagttttccggggccctctcagcaagaacgggaacaaaactctggactatgctgagaaggaaaataccatagcaaaagctctggaagatctgaaggcaaatttttactgtgaactctgtgacaagcagtactataagcaccaggagtttgacaatcacattaattcatatgaccatgctcacaagcaggtgggattctaagatggccatcaagattaccagtacccctaatgtatacacctcatcaatcagacattaatttattttctactgtgaagtaattttgcgatacaattaagatctcaaatcagctaagtttaacattgtcccattggggctaatctaattccctgagctctttaaaaatgtggagttttctgtggctgctctaaaaagaggaagccagagatttgaagcatgagaagaatttgacacatgagaaattccccagtgctggctttgaagatggaaggagcaacataacaaagaatgaggcagcatgcagtagataagggagatctctgactgacagccaacaagaaaacaggtatctcagacctccagccatgaagaactgaatcctgccaacaacatgagtaagctcagaaacagatatttctccagagcttccagatgagaacccagtctttgatcccagtcatatataccctgaggagagaacacagccactgtgcctcacttttcatctatgaaactgtgacaatctatgaaacatggattattttaagccatttagtttctgttaattttttacacagcagtagaaaactagcacattctctcaccatcctgtatttgttatgttaaactctaaaaattacttctacattctcatgtcattgtttctgact

SEQ ID NO: 103517 - DNA, 756 bp, Homo sapiens
gtcattcttaaccacagatcttagcaatctcggcatatgatttcttttctttccttattgagaaccttcaccttttcatttaaagggaacactttacagcttctctttggcatatatgaattgccagagtcactattcttgtactttggggccattaggaagtaaaatagggtgacttgaatacaagcactgtgatatcgtcacagccaatctgataaccaagaaggttactaagtgactaatgggcagggagcgcctacagtgtggttcagctggacaaaaggaggactcacatcctgtgcgggagggagcaggatggcacgagatttcatcacgctactcaaatggcatgcaatttaaaacttatgaattgtttatttctggaattgtccatttaatattttcagactgtggttgaccgaatgtaactgaaacaacgaaaagggaaaccatagagaaaggggagctgctatagttgttttttttaaaccattatgaacacatggatttaaatatctttgaagggtttcattctatcgtaattattatccttaatgaagctcaagttgtcccatcttggccaaaattgcctcttgtgtccccttggcagaactgtagttgtctttgttagcttccttgctatcttgtatgacaagatgctataaagtatatcactgacttttggtaggatgtgatattgacttaggaatagacaaatatgttgatggaaataaggaatgggataattcataaggt

SEQ ID NO: 103518 - DNA, 233 bp, Homo sapiens
acattattgaatcctctccattctcctggctcttatgcagattacacctgttgcctggtctactcctgggtcagattctttgtcattccctctggcaggaaaaccttttgtcttttctccatccgccctgtaaatgcctatttatccttcaaactatggtatcctttcttccaaagacccttttctaatcttctgtttccttcctcccaccaggctagacactgtcagccaac

SEQ ID NO: 103519 - DNA, 393 bp, Homo sapiens
atcaatcattaaaaaaatttttttaaagaaatatggtcttgctacattggccaggctggtcttgaactcctggcctcaagggatcctcccacctcagcctcctaaagagctaggattacaggtgtgagccactgcactggccaaaggcccctttttaactatatggaattggctggccccaaagaaaattgtgaagtagaccaaacctttctaggcatttctaggcctgagtatgcaggcctctttaggaatttgatgctgaggccaggattaaaatcattgcaaggacctttcctacccttcagaccgctttgtatgtgccctatgataaaaattctactaatgtgagtttggtatatttagagctgatctttggtcattcataactaccct

SEQ ID NO: 103520 - DNA, 411 bp, Homo sapiens
cacacgccaccatgcccggctgattttttttttctatttctagtagagacggggtttcaccacattggccaggctggtcttgaactcctggcctcaagggatcctcccacctcagcctcctaaagagctaggattacaggtgtgagccactgcactggccaaaggcccctttttaactatatggaattggctggccccaaagaaaattgtgaagtagaccaaacctttctaggcatttctaggcctgagtatgcaggcctctttaggaatttgatgctgaggccaggattaaaatcattgcaaggacctttcctacccttcagaccgctttgtatgtgccctatgataaaaattctactaatgtgagtttggtatatttagagctgatctttggtcattcataactaccct

SEQ ID NO: 103521 - DNA, 798 bp, Homo sapiens
gtggttcatgcctgtgttcccagctattcaggaggctgaggtgggaggattgcttgagcctaggaggtcgaggctgcagtgggatgtgatcataccactgtactgcagtctgggccacacagaaagactgtctccagaaaaaaaaaagttctttggagaagccacagaccacctgtcttcaggcgcctccttcaactcctgagtcccagccagccgctcccaggggcctgcacacatggagaggcctccctgatcctgggtgcttctcgtggagtacaagccggactgtgctgaggttgggacagagccccctcccctgcagaggcagaaggaagcagcgtgcgtcctgtctccttccaggctgtgggcctgcccttcagttatttatagctggagctggagaggctggctcagatgaggagtgaccccgggggcacacaggctccacactgccacccagcttccaaggctgagtctcctccctaacggggaagtgacggggttttgtctctatcatctcaggcgtcaaccacatgcacacacacactgtcacgttctgtggcgctaacagcatcctgatcctgacggacttcaccggggctctccaggcatctcttctgacaaacactgcaggaggtgagggtgtctgacgtgcactgagggcagaggcccccttattcctgaggcggctacagctcaccgtggggaagatcaactgtggtgatgtttttgggacagtttcttggcaaaggtggccgcgctgtcagtaccaagtagctggaggtggtgatcagatga

SEQ ID NO: 103522 - DNA, 292 bp, Homo sapiens
caaagataacctagaactcctcctgatgaaccattacatcaaaccagggctgaaaaacaacttcaaagaaacggcatttgatattgccaggaggacaagtatctatcactccttctttgtaatggtggaaggctatacaaattcttcacctcagtcttaatggttctagtaattttaggtgtctaagtaccagtggctccttcgtgcaagatataaaatattcccataagacaaagttgatttaaaacgtcttactacaaaaattcagtggtaaggtagttactattatgtt

SEQ ID NO: 103523 - DNA, 633 bp, Homo sapiens
acatcatggtgtctagactcaacgggctgaaggtgttcagaaaggtgagctaaaacaggaagtgggggctgggtgcggtggctcacacctataatcctagcactttgggaggccgaggcaggcagatcacttgaggtcaggagttcaaaaccagcctggtcacatggtgaaacccggtctccactaaaaatacaaaacaattagctgggtgtggtggtgggtgcctgtaatcccagctactagggaggctgaggcaggagactcgcttgaacctgggaggcagagattgcagtgagcggagatcagcccactgcactccaacgtgggcaacaaagcgagactctatctcaaacaacaacaacaacaacagcaacaacaaccaggaagtggggccattgcagaaaaggagcaagactccagctactgggtgacattgggggcaggttttgctgggaaagagaaagagagctcttccctctaccctccagtcgcactccctccagccaggtgccccaacctgggagtcagcataaccgctcttattctcacccgaccggtcccctcttatctacttcctgaggctgcatgggcagcgtctctgtctctcagtcctcactgccactctgcagctca

SEQ ID NO: 103524 - DNA, 169 bp, Homo sapiens
ctcttcacggactctgagatgttagtgatctccaggattctgtcttcggccttattctttagtcattctctgggctctccgtgggctacagcagctatggcttcattagtcattgtagctcactacctgagctatcatctcagaactacacatttccatctgcaagttc

SEQ ID NO: 103525 - DNA, 207 bp, Homo sapiens
agtcagtgatgtcatgtgagaaggtcttgaccaggttgctggatttgaagatggaaggaaactaagcaaaggactctagaagcagggaacagcaagattctctcttggaagcatccaggaaatgcctcctacattctgtagcccaccaagactaagatctttgctgaatgtctgactgacagagctgtaagataataaatttgtgtt

SEQ ID NO: 103526 - DNA, 225 bp, Homo sapiens
gcagaggctactgctcaccactagtgtaggaggaccagtgacagaggtgtcagaagcttccctggcaggacctgctcatcctcctggaccttgtagttttgtggaatccacaaggcaaggcagacagatccagcaaacatcagcttgaaagtaccagggacaagcagagggagtagaggtcatgggctctgttctctaagttcactgttcactttggaagtcaag

SEQ ID NO: 103527 - DNA, 1069 bp, Homo sapiens
cctcaggtctaggtcacatttgtttcatgctttcacagcggtggtgtagtgtatactggttcttcttatccctcaggtgtctcctcacaaggactgctctgtttctgctaagtgttgcattctcaccacccagtggaggctttggcctgtggaagattctaattttggtggccagcctcatgggttgaaaagtaaaggtcaagtagttaaaggaagggcgttccaggcagagggatcagcgtaggtgcagaggtaaggtagggatagctttgagggctccttaggagggagtgaaacccctgagggtcaaggagccctagtttggaaggccttgctactaagggatctggattttgtcctgaagcctagagtagtttctttaagagtctgatctcggcaggcctagagtagtttctttaagagtctgatctcggccaggcctagagtagtttctttaagagtctgatctcggccaggcgcagtggctcacgcctgtaatcccagtacttcggaaggccaaggcaggcagatcacgaggtcaggagttccagaccatcctggctaacacggtgaaacccgtctctactaaaaatacaaaaaattagctgggcctggtggcacgtgcctgtagtcccagctactcgggaggctgaggcaggagaattgcttgaaccggggaggtggaggttgtagtgagcagagatcatgccactgcactgcagcctgggtgataagagtgagactccatctcaacaacaacaaaaaaagtctgatctcagcactgtcctgcctagactgcttctttttttaggacaagtttttattgctacctgctaaaaacgcacttattgtcacggtgcaggctaggttggaggagtaaaactagagacaagaagagttaagaagccactgcagtattcaagacaaatgagtcaagccaaaggctgagatgctgtacaggaaggtctctagggggaccctaaatttagctgggggtggtggtgcaagattcctacgaagtggcactaaaggagggactgagtacttactaaagaccttatgactaaga

SEQ ID NO: 103528 - DNA, 394 bp, Homo sapiens
caggagtgacaaagccccattaacattcttctttgtaggaaacacattatccctatggggtctttctcaccaagactagcagctctagctcttagtatcatgactgacccttgcatacatcttggaaaaatggggattagtaagtgcaaataatgatcaagacttctccggggctgatatataaaggaaatgatgatcactcctgagaaatgctcaactagaggcaattcagtacataatgaatcttacaggtacaaaaagtccactaaacttacatacgtatttgtgtggtttcacttgattttttgtttttttagagatggagtcttgctctgtcacccaggctggagtgcagtggcacgatctcccctacctgcgtgagagagggaagatg

SEQ ID NO: 103529 - DNA, 828 bp, Homo sapiens
gggacactggtatatcagaatggtccatgcagtacttttttaaaaatcttttttctttgtacaagttgagccacatgacttcatattagattgtggactttattttaggtagggagaatatatatttgtctttttctaaagctgagaagtaatttttaaccagatgctaaaagtcatcttgaaaagatgacattttccaagtgctttgatgattttattttgctataaatgaataatttatctgtttaataaaatcttttcatttgacacaatgactataataaaagtgacaataaatatatgcctgcccctcccacattaacaatgccttttgtgtactaatatttagaataactaatataggtagaggaaaacaagtatggtccttgaaggaatcaataataattagatttgagaagaaaagaagtgaaatgaagttttaataatttttgtatgtttgtttgtggtaattttgggcagtataaaggagacatatgcagcatacttgaaacttctatttttatgcctattgaacaggagtagtagaaaaaggtctaagagatagttgagatatgccccagtatgactaggtatgattttccatacattgttagaagaaaagtctgtaagactccctcctaagagggactttcgtattcacaggtgaagcatcatgttttcaatgtgtgctgagcacctactgttgtaccagccagtgttttaggttctggaattctaggagtggccagtatctggtgatatctgattatctccgtagatgacagagaaaagtccttaaacaacatttatacctatttaaacaaatac

SEQ ID NO: 103530 - DNA, 240 bp, Homo sapiens
cctaaagacaaaccaaagccaagaaaaacaaaatcaaaagcattacacaatgctatgaatatatttaatacctctgaaatgtatgcttaaaaattgttaagatgacaaagaggcaagacatttcaccctggagtgatgggaatgttttgcacttacgtagagatgagattgcacaacatcgtggatgtgctaaatgccactaaattgttcactttaaaatgatcgattttatgttctgtg

SEQ ID NO: 103531 - DNA, 485 bp, Homo sapiens
tcaacctctctgtgttcattttctaatgtgtaaattaggggtaataccattacctatttccttgagtaattgtgaaaattaaatgaaataataaatgtaaagctcttagaattgtccttacagtaaatgttagctgcttcaactatttctgctactaccaccaccactactgcttccaccacactaccaccagtctttccaacatcaatagtgaatgcattttgtctaaatactacgatgaatacaaaaaatatggagctcagtgtctgccctctagaaacttaaaatgtagttagggctaacagacaaaaacaaatgcataaataagtcaactatatgaggctgtctaatttgaattgaggcttaagtgatgggtagtatagaaacttagtgcaaggaaaaagtatttttgaattgacactaccatggaaaacttcatggataagattcaggaaactagatggattgtagattttaggtaattg

SEQ ID NO: 103532 - DNA, 310 bp, Homo sapiens
caccctcctcggcctcccaaagtgctgggattacaggcgtgaaccaccttgctcagtcaagatattttaaatggttagttcgtaaggtctttttgaaatgcttaatgtgtctttttgtgtgtactgagcttacttaaataggattcagttatacgtgcaattaaagtatcagactaaaaaaataaaatctaaaaaacctttataatcaagtgatcacatatacctacctgtaatttaggtaattcaaaactggtattttatttactaacttttgcaactataacttatactatgtgaattagttataaag

SEQ ID NO: 103533 - DNA, 344 bp, Homo sapiens
ctcagtgatctctgtaaccggagtagctggggctataggtgtgcaccaccacagccagctaatttttataacatgattttttattcaatatatctgtggaataaagtcctagaattggaattgctgggtgaaagtgtttgtgtattagtccttcagagtattttaccaattaacactctaagcagcgatataaagaaagtgcacaaaatactttcaacaattttaaggagttactgaatttactggctattctgcccattgttatctgtaactatcctgaagaaccaagaatccatttatttgataagcaaaaccaacatttgcattgaggggctcttttctta

SEQ ID NO: 103534 - DNA, 750 bp, Homo sapiens
ctggtctcgaactcctgacctcaagtgatccacctgcctcagcctccaaaagtgctgggattacaggcatgagccaccgcaccaggtcagaaactcactttaaatataatggtataggtaagttaaaagaaaggaaaaaaatacaccatacacacacaaatcaaaagatggagtagctatatgactatcaggtaaaatagacttcagagcaaggaaaaatgccagagataaagagggacattacataacgataaaagtgtagattcaccaaaacgacataattctagatgtgcatgcaacaatcagaattttgaaatatataaaacaaaaatttatagaactaaaaggaaaaatgggtaaatccacaattttggttgcacatttcaacattcttctctcagtaatcagcagaaaagacaatcagcaaaggatagagaaaaatgtaataatactatcaactaactagatctataaatgatatttatactataccccacccaacaatggcagaatacacatgcttttcaagtacaaatggaacatgcaccaagtctgaccatatcctaggtcaaactttgtatgatttaagtttgacctaggtcaaacttacatacaaagggtgttctctgaccacgatgttattatattgaaatcaataacataaatatattataaaatatttatctctgtcttgatacaatctcataaaagtaaagcacgtttcctctgagtctataataatgaactgtt

SEQ ID NO: 103535 - DNA, 267 bp, Homo sapiens
ccctcttcctatccttcctccttcttcttctgtactttttcctgctttttctgtttttcgttttcttttcctatcccgcgtgaaactagaacgtgaactggggtgtatgtttgtgtggatggaggggcacagggaggaggggactctccaaatgccccagcttagcacgaggagaaactccatgttttcatttaaacaacctttccccacatctaggccttcatatatgagagaaaaattcacttgttttcctttccacactttaca

SEQ ID NO: 103536 - DNA, 550 bp, Homo sapiens
atgagattacaatgaatactaaatatttctctggcacttgatgtttttcaaagcaatttcaaatatgtaatttgattttacagcaacttgatagaataagtagtaattgttattctcattttaaaaataatttgacatttagaagagttaaatgactttcttacacagctggtaagtggtggaggtgctacttatactccggtcttccaactccagatcatctaagttttgcattgtagcaccccttaaatagaaggatgggtcaggcacagtggctcatgcctgtcatcccagcactttgggaggccaaggcaggaggatcacttgagcccaggagttcaagaccagcctgggcaacatggcagaaaccccatctgtactaaaaattatccaggtgcggtgacatttgcctgtagtcccagctactcaggagactgaggtgagaggatcacctgagcctggaagtgaaaggctgtagtgagccatggttgtactgtactccagcagcctgggtgacagagtgagaccctgtctcaaaaaaaaaaaaaaa

SEQ ID NO: 103537 - DNA, 508 bp, Homo sapiens
gtttcatgatcttcatgaaaaatctagctcaatattcttctttttcatttttcactgaactttgtctttggaaacgctaaatttacagcctatggattaaagggaccaaaaagcattaaaacactcaaaaattatttattaataatgaggttatttagaagaaaataaaaattacatctgttgaggtgtttcacacatgctttaatttttactacagctttaacatgtaattattattctctttttcaaacaaagaatctgaaactcaagttaacttgcctgactgaggccacatgagtatgtggaaaagccacaaaaagttcagtactagggttctcctatttcaaaatctggattagataaaatgattcaagccagattttaactataagagtatatatccatggtggaaaggttgatgtttgtcattcattgactattagttttaattatgacgttaccttttactaatgaagctatttctataagatatataatttaacctctt

SEQ ID NO: 103538 - DNA, 442 bp, Homo sapiens
atccccataagaagatggccatgtagtgatagagacacaaaaggagaatgccatgtagacacaggccacacttggagctataccgctgcaagctaaggaactccaaggtccagcaaaccaacagaagttaggaagagaaaaggaaggattcttctaccagtttcagcgggaacacggccctgctgacaccttgattttgaacatctagcttccagaaagtgagaaaatacatgtttaaagccaccagcttctggtactttgtcatggctcccctaagaaactaatacactaattttaaattacttttatacactatcactgttgcaataggatactgctccaaaaactttattactttcccaacatgtccattctgccacgttctcttataatttaaaggaaatgcaggcatgtcattaagaaaattggtaaacattattta

SEQ ID NO: 103539 - DNA, 140 bp, Homo sapiens
ccagtgatgcgaaaccaggttcctgccaccctccatgaggaccacaacaaagatgagcccatgatggcaggccagcttagtcccctggccctgtgcccagagcccagccacaggcccaaagcataaacagaacactgcag

SEQ ID NO: 103540 - DNA, 429 bp, Homo sapiens
cccactgcctaactgctactaccagtaggtgtctgccttctcggggggctcatctccccatccacacgatggggggtgccttttagtcctgcctggttctccctttgcaaaccctaaagtgccgagtacacggcaggagctgaggtccaggtctgggctggacagccccagatccctgcccaactttgtcttctcctagctgcatgatgacttcacctctctgagcctcagttgcctcacctatgaaatggggatatggataacaaggccacctctgggggtggttaagggctcaaggagctgatggttgagagggtggcatgcaaattcaacgttcagcccagtatgctcctcactgacacaggcagggctggctgcgcctgggagcacaactgcccactgagtaggtggcacagaggttcaaagtga

SEQ ID NO: 103541 - DNA, 698 bp, Homo sapiens
ttccttgctctgttaactctgactttcggtaaattgcttcagttttctaagcttccatttccttctatgtaaaaaagtgaaaataataccacatggagttgcctgtaggttaaattacatattttatgaaaatcacttagcacagctcctggcaaaaccgaataagtgctatctacgtcagcatttggcgtttgttgccctgggcataaaataccctaggacccctctttctatttcgcctggctcagaagttttgacgtggctactgaaatacaagacaaggcctgctacttactagtgctgcttttagtgaaagtgtgctaaaagtatttatagattttatagctttaataatataaaatgtcaagaacaggcagcaatttggcaagagaaattccagattgcattttacagcttctatgataaatgactgttacataagcaggaaacatacctcattgaaaatggcaactcttttggcatctatagcaaatataatgaaacatgctgtttaatatttcacttggcagaaattgtatttttaagtctttctctgcatataaatgtgctttaaactgtcgtatgttcaaagttcatttttaagtctcttgttcagaattttaaagatatttcttgtcaaactgatgttcccaataggttttcaaaacagtaaatgtaagagttttttgtttgtttgt

SEQ ID NO: 103542 - DNA, 147 bp, Homo sapiens
gcatcagaagacaactgtgaaccagatggacatggattctgttctcaacggaccccagcagctatggcccacgctgggaagccagaggggagagtctggaagtgctggggaagcagagaagagctggatgcagagtccgagggcttg

SEQ ID NO: 103543 - DNA, 519 bp, Homo sapiens
ctctccagtagtccccagtgtctattgttgtatctttatgtccatgagtacccaatgtttaagggagaacatgctgcactgtttggttttctgttcctgtgttaattcactcaggataatggcctccagctgcatccatgttgcctgaaaaggacacgagctcattcttttttatagctgcaagaggaaggcttttctattccctgcttctccatggttattcttactgtgctgtcctggaaggccaaatacttcttccagcagaagggtcctgcccatcccacattcccagattggtcaggcagaagagggataagtggttcaggaaatgaagattggggagtagaaaacattgggagtcagaggcccagttttctttcatagccattattagttggaaatatgtaccaatttctctgtgacctatggcatgtctcgctgagcagaagaatgtgtttctcaaagataggtaaacaccatgggaatgttaaagtaccacccttgcaagcttcttactga

SEQ ID NO: 103544 - DNA, 227 bp, Homo sapiens
aggactgcaacctccatggcagccactgccaagactgaggccactttgcagccggctggctgagttctgctctgacaccaaagcatgtctgccctggctttggccttcattacccggatgggacaggccagggtccagtttgcaatctgtgcatttgggtggtgatggagagcagctgttggccatcctctttctaacaagcatttgtatgcttaacatgcaccctg

SEQ ID NO: 103545 - DNA, 333 bp, Homo sapiens
gatacctacctgctaccacgccggactcaagcgttgctgcagcatctgggacacacctcaaagcgaagccgactccagccctcgggaggatctgcagagacaggaagcagatctgcgcctgcctaggacatggggggcaggaggcaagtactggggggctatggctaaggggtgcaatgtttcttttgggggtgatgaaaaacgttttaaaattgtgttaggccgggcgcagtggctcacgcctgtaatcccagagctttggcgggtcgaagtgggcggatcacaaggtcaggagttcgagaccagcctgtccaacacggtaaaaccccgtct

SEQ ID NO: 103546 - DNA, 275 bp, Homo sapiens
tagagacagggtctcactatgttgcccaggctagcaggctagtcttgaactcctggctcaaacaatcttcctacctcagcttcccaaattgccggatggcaggcatgagccatagcacctgccgcacaccaattttcatcctgaagccagttaattgacacagaaattctgagtcaaggaagtaccctgtcatggcaccacaagcatatgtgatacatatttcctcaactttccccccaaaagacctgtggccacttaccagagtctctgggtat

SEQ ID NO: 103547 - DNA, 498 bp, Homo sapiens
gacagaactgctcaaccattttgctggctgtactgcctctggaatatggtggagtcaagagaagtgggaggtctatgactcccaggaacacctttaagctgcctcatcaatcctgagtctcatcatcattgcctggacttcacaatgtaagtcagcccatcaaggcaacacagtgcatgcaccacattttcaacttgcagaccagtcagtctacagagaaagatgtctatctaatttctgtatatttgtcaaataatggcatgtctgagccatggcaggaaacacatggtcaccctcttaccttgggtttctcaggtgttttggccagcagatatttaggctctgggatcaaagacctccaggttccacatgtgaggatctccagcacaattaaaggaaagttgatcaacatgtctgtttaattaatgtttctaatatttctttaaaaatcaagttttgatgagaaaaaaattaaagacaaattatatccagaatgtt

SEQ ID NO: 103548 - DNA, 685 bp, Homo sapiens
acataactatacacatttgtatatattcactgttaactaaaacttagttttaacagtgtaccttatgatcgaaagtggttgttcaaaaaatgcctgtaaacattcctctgaatatattcctgttattttataatcacattaatattacatactgttacgtttgttttatatgtgagtctggcattataaatgctggctgaatgaattgggctaagacaactacaacagatgtgatcaagaaaccgatagtgattaccagaaattatatttggtgcttactctgatgatgctcttaagttttttacagactatatgaactcctttaattttcacaaccaccctttgaggtagatacatttctaatccccatgtacaaatgagacaaaggcacagaggttagttcacatagctatgaggcacaggcagaattcaaacacaggcagtttggcttcagagaccatgatcttaactgctatgctctgatgtctctccaaaaaagtataaacatgagcagggttaattgtagcagctacttggtttttacgtcaagaatcataaaccacaagaggaaacatgaagtttttgttttttacttttcaagatggagtctcgctctgtcactcaggctggaatgcagtggccctatctcagctcactgcaacctcagcctccagggttcaagtga

SEQ ID NO: 103549 - DNA, 410 bp, Homo sapiens
gtttgaatttctgttatccacccacctctatcattgtgctcagtgatgtttttaaaacaactgtttggttttacagttaaaatattacttaaaaatagcagaacatatgtttctttgaatcagaactccctgtttctactagtatttttcgaagggttgaactccaaagaaatctggtaatctggcctttaatatgcctgctctgttatttagctcttgaaaagcgataagactcttttaggctgggcgcagtggctcacgcctataatcccagcactttgggaagccgaggtgggaggatcaacaggagttcaagaccagcctggccaacaaggtgaaaccctgcctctactaaaaatacaaaaattagccgggcatggtggcgggagcctgtagtcccagctacttgg

SEQ ID NO: 103550 - DNA, 114 bp, Homo sapiens
aatgatttcaatctctttgagttcaacatacagtgatgcttttcaaggtaatgaattagttcattgattagtttatctattataagacagtaaattgatgtaatgagtcactga

SEQ ID NO: 103551 - DNA, 237 bp, Homo sapiens
taatcttgatgacagctggcacaagaaacataaccctgaaccttggaacaaagatggttttctgctcagtgcaagtactattgcagcgttattacagcaagctcagaaagacagccagacttctgaattacattattcctttttaagttgctaaaattgaggctgaggcaggagagttgtttgaggcttccatttgacactgtaaaaaataagaacttcagttcatcaaaagacacc

SEQ ID NO: 103552 - DNA, 461 bp, Homo sapiens
ggctggcttcaaagggacacatgagttgttctgggatgacagattctgcatcctgatggtgatagtgtttgcatgactgagtgcgtttgtcctgtacctaacaggctgaattttactctatgtaaattaaacctcaattaatctaaccttgaaaaatcaatcaatcagtcaatacacaagagagccttgaatgaagaaaatcagaactgtgtgaaacaaacttggtcctcaggacaatcagccacgttgatctagtttggacgtctgtccccttccaatctcatttggaatttggtccccaatgtggggatgtttgggtcatgaggaagatcccacgtgaatggcttggtgcccaccccaaggtagtgagtgagttctggatcaattaggtccctggagagctggctgttcaaatgagcctggcacctccctccgttctcaacaggtggtctctgcatgca

SEQ ID NO: 103553 - DNA, 218 bp, Homo sapiens
atatgatgcaatgaaggggcgcgtcgcctccgtggcattcttccccaaattcataacctcggtgttatcatgagaaagcatgaaacaaacccagattgagggacagtctacaaaatagctgaccggtactcttcaaactgtcacaatcatgcagtgttgtaccaacattcatctcttagtttttgtaactgtaccacagctaaataagatgttaacat

SEQ ID NO: 103554 - DNA, 400 bp, Homo sapiens
ggctcatcctacttcactatgactttatcttaacttaaatagttacatctgtaaggacccaatttccaaataaagtcacaatctgagatactgtgtgttaggacttcaacatatgcccggcatttggttttttaaacataatcttttattattactgaaatcataaatatttattgtataaattaatgacatttacactggcaaaaagaaaataagataaaatgtcacattgtcactatccataaattattgttgttaatattttagattatatttctgtaccatttatatgcaaactacacagatacaaaacaaacatgtgccattatttttactgacttttaaaaataaatgtattagttaaccttttaataaactattttgtaatagttgatttaca

SEQ ID NO: 103555 - DNA, 330 bp, Homo sapiens
ctctcacaaatgctttccaaattttttatatcagtaagtcttgtttctacaaataaattacaaacgtttcatgaagagaaatgcatcttctatttctccaagctccatgcacacatgtcagatggataatatatactttcaattctaaattaagaaataaaattacagtgaggtaaaagaaaggagagaaactgctaataactttaagactttcaagtagacagctgctgtgcaagtaacacacaggagcaggccagagcttgaggtgaaacaaaatgagggaacctgatggtcaggaagagagcttcagcttcaatccaccacttctgg

SEQ ID NO: 103556 - DNA, 461 bp, Homo sapiens
cctgctcacagggggattgctatacccaggtttattgataattggatagttggtgtaaatgaatggggtagaagcccaaggaggttggttgaggcagtgaagataattagggatattattataagggatcaggtttgtcctttaatgttatgggtaattattatctgttttagtgcaggttggattaatcatcgttgaatagaaaataatcggttactaatttgatgactagaggttggaaacagtgggaaacagaatgattaatactactgctggtaggcctagaattgtaggggtagcaaaagagatgaatagatttcgttcattttaattctcaggaagccttgtgtttttgtgttttgattatttttggtgtagggataatataaatgaaatttaataattttaactgaataatggagaataaagttatgattattgacaggataataatggatcat

SEQ ID NO: 103557 - DNA, 916 bp, Homo sapiens
ggaatactggtcgggtatttcatagaatgtccggaaggaagaccacaagagatgaagtgccctttgccatcacgccatatcaagggtacacactatcaacctcattgattaccaatgatgttaattaacctttatcacccggctgagttgtactgtaaagtttcttcactgtaaagttacttcctccacaccccattccttggaagaaagtcactaagctcatactcaatgagtgaggaattaagctccacctcctggggagatgtgtacatatattatatggaattcttttgtatgggagatttgtttactctccatttatttattcaatcatttatttctactaagtatggactcatgaatatttattttatccttggggttataatccagtgctatgttattttgttactcaaactgttctggctttggccattgggagttctttcaggttagctctgtgtttctctgacatacacccaccattttgatttttgagtactttcactttctgacactataggatattccacacacatcttgtatattccctgtcccagccctaaaatcagtgatttctcctaggagccatgaattcttttactggagaatggtgttctgaatccaacatctgggccaggtgcggtggctcacacctgtaatcccaacactttgggaggcagaggtgggcggatcacttgaggtcaggagatcaagaccagcctggtcaacacggtaaaaccctgtctctactaaaaatacaaaaattagctgagtgtggtggcgtgcacctgttatctgagctactcaggaggctgaggtgaaagaatcagttgaattcaacaggcagaggttgcagtgtgctgagactgcaccactgcactccagcctgagcaacagagtgagactctgtctc

SEQ ID NO: 103558 - DNA, 433 bp, Homo sapiens
gcacaggccgtggctttgtcatctccagccctaactgggagcaccgagggttccaaccaggcaaatgcaggccctaacgggctctttgaaaacgggcttttctagaaccaggaacctcaagtaaaaactcccccagctacctctaaggcccatcacactcctgtctcacgcccacctatgagaaaggaaaaggtgatggtcattgagctgggctgcagaggagtgtgaggtgcagacaccatgaggtacccacagccaggaaaacgaggatggtcggggagacgcgccagcgaagagctgggcccctgcgtgggacccctcagtggttcccagggggcgtgggacttgcgcagtcctttcagagggctgtttaccaacaggaaccgtaacattaaacctgctcagaccccttgactcagcaatttcatgtctg

SEQ ID NO: 103559 - DNA, 155 bp, Homo sapiens
cgcagtcctagacacatctgcagagttggcttctgaaggctgggagaggccctggaacctgcatttctaaagctgctcaaatccaggcctttggaggcttaaggctaagcctgccccatttcaaactaaatacagtcaagagagaaagatcccag

SEQ ID NO: 103560 - DNA, 297 bp, Homo sapiens
tgggctgtaatttataaaattccacagtatgaataattctgcctttctcactccaaagaatgcacctggatggcaagcagagtttcagaagaaaaggggttattcctgcatcaaaaactagaactcctctattcttgaataaataaatgatgttacttctttttgtcagtttcattcagtgagtttctgaagcttggtttctatttctgtctcatttatgtcaaccagtttttgtagattatctggtatgtgcaaagcactgtgcattgatttggaggtgaaactattttctgcatt

SEQ ID NO: 103561 - DNA, 508 bp, Homo sapiens
ggaggatgtgggcaccacctgaccctggggacacagatggctcatgactagggctttgtgtgtccagacccagccacatgcaggccctggccattaggtccagagtcacgcgcctggctgccccatgatgcaatgatggttttccttctccggaccaggggtattcactggccatgggacccagaacaagtcacctaaatcctactttcttcttccataaaatcatatagtatctacctaataaagttgttgtggtaaataaaaaaaaaaaaaaaaaaaaaaaaaaaaaaaaaaaaaaaaaaaaaaaaaaaaacaaaaaaaaaaccaaaacacaaaacaaaaacaagaaaaaaaaaaacgaaaagaagcacgcgaacaaggatagacgacagaaggggcagcgagaagaagactcgaaacggaacaaggagagagacgaatagaaaggctagaagacgaaagcagaagcggacgagcaaagagcgaggagggcagagcacgactcgag

SEQ ID NO: 103562 - DNA, 351 bp, Homo sapiens
tttaattgaattcatttgactgtggctgatttttccaattagtctgacccttttccagaagtacactatttcttttaggtaaatgaatgacatcagctcccccgcatccctttttatgttgatttccacattgacctcttccattcagtcatcttctatgtctcaggtccacctcggtgatgctttgcatttttttaaacacttacagtgcacacatactacacacggtgcaggagtcttgtttcctcccatgaattcttgatatgtacttaccagtaggacagcttgaatttttactaatctgggcattgtgcatactttttgggtaatatataatttcagaaataaagg

SEQ ID NO: 103563 - DNA, 267 bp, Homo sapiens
ggcacctgaccctcagccactccaccctgtggcctcttccttgagaaggccattggagagccccaggatgggggattgctgatgacgaggtagaaagcatggtgagggttatttctggaaggggagaggcttctgaagatgcctgtgtctgacatcaggccctcttggttgtcttcccagggtggtgacaataaggccagatcaaggcatggctttggaggagcaggcctggcaccatagtcattctattattattttttgtttttt

SEQ ID NO: 103564 - DNA, 350 bp, Homo sapiens
tgagacagagtttgctctgttgcccaggctggagtgcaagtggcgtgatctctgctcactgcaacctccacttctcaggttcaagcaattctcccgcctcagcctcccaagtagctgggattacaggtgcccaccaccatgccaggctaatttttaaaatatttttagtagagacagggtttcaccaagttgggcaggctgctcttgaactcctgacctcaggtgatccgcctgcttgggcctcccaaagtgttaggattacaggtgtgagccaaccacacccggccatgcgcataatttaaaagatgtacctcacttggactctgatcaccaaattccatcacagcaac

SEQ ID NO: 103565 - DNA, 455 bp, Homo sapiens
ttacagactgcttctcaattgacacccctgccacaagcatcagagccccccaggacaccctgccccctccacactactgtcgcacaggtcttttcaggagagggaggtaggggacatccatattttgtgatgttttaaatctttctgtaacaatgcagcatatatgtatatatacacacacacacacacacacacacacacacacacaccatatatagatatatagatttttttcccctcttcaccttgctcatggtgttacttctgctggaaaaccttccctcttctggcacctggcagaactgagttcaaaactcagaaaagagttcaaaactgagttggctaggagtgtgtgtgtcacgcctgtaatcctaggactttgggaggccaaggtggtaggatcacttgagctcagttcaaaaccagccaagtcaacacagacctcatctccattt

SEQ ID NO: 103566 - DNA, 396 bp, Homo sapiens
taacaccgggtttgcagtcttcaatgaaaactatagtacaagataccaattttctttgtaaaaatctgaattcaggcaaaaagaagtataaagaaccccagatttaaaattattttaaaaaattaacagttcttctgacctcgcaaatcaaaggacaatgtgtccaatacgtcaatattttcagttacaatctggtggtaattcaatgaagacacgttactaagcaggtaaaaaagggttttgagctgtgtgttatcaggctgtgaagacaggagcacagaagttgagtggttctgcaaaatctatgagaatatgacaaagctgtcatatctgatcactgtaatcaacttggatgtggacgtatttttgtttcttttttttttttttttgagacgg

SEQ ID NO: 103567 - DNA, 400 bp, Homo sapiens
aaataatcctttgaaaaactttatgggtcttctgtgatcctattgagtctgttccaccaaataaaagcccacccacacatctcttcaagaccatcccttctctccgctgggcttctgctgagggacaatgcccttaagcttcttagaagctctgttgtttgactgagaagatctttaacatctcttaaaatctttacagagcttttggtctgactgaatagtactctgaggcagcaccgctgaactttctaagatcttgacaaagacttcatagccacaccctccacctcatctttggactatgctttcctgagagtgccatgtataatgaaactttaaggttcctatggtcactgatctagaggctgaattagatacattgtgtttaggggcaagtaga

SEQ ID NO: 103568 - DNA, 424 bp, Homo sapiens
acctgtccttctttggaaggctttccaagcattcaaaggcacttgggtgttgtgctctaagtttctggtcactgcagccccatctgtattagggagcaccccaagcccagtaacaatatggttcttgcagacttatagagatacttcttggtggtcttggatcagatctggaagaattgtctggattaccaggaaaagactcatgttctctttccttacgttctcccaaacagctcagctctgtgctgagctaactaggctagaagagaggtgacacaaatactcctgttgtcaccactattaggactgtgctgggtcagacctgaaactagtatggtactggggtctcacccaagggctgtggttaccactgcctgactatcacctatgctcacccaaatccctagggctctacaatcatcag

SEQ ID NO: 103569 - DNA, 449 bp, Homo sapiens
tttttagttgctttcttgtgttttagtgagagtatagttaccctgtgattaaaattagttaagaatttaaaaaaaatctttcaaatgatcccatattcttttgatgatctgtttttgaatatggatccactgagttttgtactctttcttcgaaagaagctgccatcagctgggtgtagtcgttacgcctgtaatcccagcactttggaaggccgaggcaggtggatcacctgaggtcaggagttcgagaccagcctgacgaacatggagaaatcccgtctctactaaaaatacaaaattagccaggcgtggtggcgcatgcctctaatcccagctactcgggaggctgaggcaggagaatcgcttgaacttgggaggtggaggttgcgctgagctgagatcgcgccattgcactccagcctgggcaacaagagcgaaactccatctca

SEQ ID NO: 103570 - DNA, 749 bp, Homo sapiens
tttgtaatgttaccgtttgtgaggatgtgctttttagtttacaactgaggaagcctgtcatcatcattagtactcattcattcagcatgagcacctgttttatcttaggcactagagatgcgaatatgaataaaacatgattcctgttctggaaaacgctgggggagaaaaataacttagatagttacatttcaaagtgatatgttctatataataaatatgaaaaagtgttatagtaatatacgagagggagcaataaacttgggggaatggtaaggattcaaaggggaagtgacagttgagccaagtattgaaggatgaatgggaattttctatttggagggtagaggagcaggggaggaggcaatacagggtagggaagagcctatgcaaaaactaaaggacatgcatgggacacgctaggaaaggagaaggtcttcagagtggctggataaaaggatgtgtgggaaagaactgagttgaaattaggagttagaattttattctttggtactaaggaatcattgaagattttaaaattagggctgacataatcagatttgagtttggaaacctatagtttgggactggaggaagacaggtgccagacaccagttaaaaagctgttattttctaagcagtagacaaaggtttacactgacaatagctgtggagatagagaaaagctgcgagatttcagagttttccaaggtgtaaacaactaaattttgtgatcaaaatgataaggg

SEQ ID NO: 103571 - DNA, 239 bp, Homo sapiens
gccaggatccatctctctgcctgggcaacagagtgatactccatctctaaataaataaataaataaataaataaacaaacacgaaagagatttaagaagaagaaagggggcattagataagcacttcatataattctctcaactgtaaaagcaagacaatacttaccttgtctaaccaatgccattgctatgaggagcaaataaatcaataaaggtcaaataaaagtactgtaaactgt

SEQ ID NO: 103572 - DNA, 456 bp, Homo sapiens
tggtggagttagagaaagggaggtcagtcaaggtcagccaagtgattgtaacgtgtgtgacccgcattagataacacaggtgtcatggtgaacccagacttgggaggtcaagaaaagtatgctagataaatgtcatgtttaggctgatatttgaagaagaaggattagctaggcaggtcagacaaataacttaaatctataacacacacaccactgtggagccccacagcccgatgactttccccccagaagctgcatcacagggtagcatttcaaaaacagattccattgttaggatagctgaagattctctctctctctctctctcacacacacacacacacacacacacacgcatgcgcgtgcacacacacacacaccacacaacactgcctgggttgtagattgttccttcaaaaatttttttctgttttttttaataaacattctgtgaag

SEQ ID NO: 103573 - DNA, 249 bp, Homo sapiens
  misc_feature (24)..(24): n is a, c, g, or t
gcagcctgcaatacaataacttgnctttttaatagttttgattactcttgatacctacagcacaaatgctggacctgaatcagctcttcaaggaccctagcacaaatgtcaactgatcacctctgggagagtagaaaacttttttttttttgagacgaagtctcgctctgttgcccaggctggagtgcagtggcaccatctcagctcactgcagcgtccgcctcttgggttcaagtgattctcctgcct

SEQ ID NO: 103574 - DNA, 324 bp, Homo sapiens
tcagtcatttctcagagataaagcccagattgtcacaatcttagataccaatgcctccgctgaatcctaatagcagctctgcaacttgacgtgaaataaaaataagaatgccccctccaaagacaaaaccacaatatgtgtaggtaccatgttggggtttagacccttgcaaagtattgttttaaaggaaagagtgcgtgtgtgttgatacacatatacactcatcaccacatttcacagattaggaaacagtttcagaggtgaaataacttgcccaaggccacatcgacagtaagtgacagaactgggactcacatccaggtc

SEQ ID NO: 103575 - DNA, 730 bp, Homo sapiens
tcaagctctgcctcccgggtttacaccattctcctgcctcagcctcccgagtagctgggactacaggcacccgcaccatgcctggctaattttttgtatttttagtagagactaaaaatttcaccgtgttagccaggatggtctcgatctcctgacctcgtgatccactcgcctcggcctcccaaagtgctgggactacaagcatgagccaccgcgcccagcctaaaatgacgtttttaaaaagccctcctacactgctatttttaaagttttattttaaatcttgtgcccttaaatggctctttttcccttccacttagaattatttttccagattaaagttcataactcttttataaaatatatatcataaatatttttgcatattttaaaaaattatatagcaaacagtgatgtttgggagcttttgctagaattataaaggatttttttttaaggaagtccaaagcaaagtccaaagcagagggaagctgctgcagaagggaaaatgatgactttctgcccctctatgatcctggggttggtagatggcttttcatctctagctcactggaactgactgaaggcagaggtcatatgtcttacttggaacatctctatagtggctggtacagggctctgtgcacagggtaggctagaatggcatttatagagaaatcatctcagctgtcacttattaagcacaaacaatgtgctacatcttaccaga

SEQ ID NO: 103576 - DNA, 661 bp, Homo sapiens
cctagttctacagggaggcccagagtgggtcagccctgtactctctgttcctgaggctcacagtgaaaagaatgggtctgcctggcaggcagggggtgttcgtgcatgagacagggcacagatcccaaaaggcggctcacacccccttcgtctcctgccttcgcagttattctggctcacgtcagcccccagcaggcccagccaagccccatgagcaggggacagaaatctgggggtggtcaatttggcctgggttgcagaaagggaggctgaaactaggacatttggaaaacgagttgtgctgggtgaagctggactgggtggccatgtgcccagaggcggagcacctgctcttcccacatcctgtcctcatgcccagagccactgttggacaccccataccgggtctgggtctgagagcaaggttgtgtcttggggattgtggcaggcagagggacgtgcatggtcacgtgctggctggctgattcgggggtttgcaccagggtgggagtagctgagcaggtttgggtttggaatgggagagcactgaccctggggcttatcttgaagttccccttggtgagggagggcttcccaggctctgactcagtgacgccagcactgaaatcagagaggcctgcatggcagccttctgccttgg

SEQ ID NO: 103577 - DNA, 585 bp, Homo sapiens
gctaacatgacgaaaccctgtctctactaaaaatacaaaaaaaaaaaaaaaaaaaaaaattagccgggcgtggtggtgtgtgcctgtagtcccagctactctgtagactgaggcacgagaatcgcttgaacccaggaagcataagttgcagtgagccgagatcgcaccactgcactccagtctggatgacagagcgagacttcgtgtcaagtaataataataaaaaaagatgtgctgtaattgtctccgttttacaaaagaggtcaagtagttgacacaggtcccacgctagtgagggttttgggattcaagcacagaccaccttcgcccctatgctacaccacctcaggctgtcgggagataggcgcccagtcaaaaggcacatggaagaaagcccacgacttctcaagcattgaagcaggagtggcgcatcggtattctcaacttcaaactttgagaacagtcatggtaggaatgcattttattcaagaatgggttcaggtgagggtggatatgggcactgggttcaaaggacaaatttggagaattcatgatccaggagagtgaacaaataaggaagggcta

SEQ ID NO: 103578 - DNA, 662 bp, Homo sapiens
agagtctgctttatccaggctggagtgcaatggcacaatcttgcctcactgcaatctcttggcctcctgggttcaagtgattctcctgcttcagcctcctgagtagctgggattacagtcatgtgccaccatgcctagctaatttttttgtatttttggtggagacggggttttgccatgttggccaggctggtcttgaactcctgacctcaagtgatccgccgcctcagcctcccaaagttctgggattacaggcgtgagccattgcatccagcccgccctcatggcttttacacctcttttcctggtttgcagaaagcaaggctggggtgtggaccctgcatcgaagctggttctgcttatgtccatgtgaagtgctttcaagtaaaatgctgatctgcaaaaagatgctgaaagtcctttgtctctttctggctaagttcaaatgccgaatttgattcagcaaatagttgtgagtgccttgaagtgcaaagaatgatccaggatcaggactccttccctacatatcattattttgatatgtatgtatgtatatatgtttagtgacggagtcttgctgtatcacccgggctggtctcaaattcctggcctcaagccgtcctccaacctcagcctcctcagtcgttggggttacaggagtg

SEQ ID NO: 103579 - DNA, 89 bp, Homo sapiens
gtgaagtgagaaatgatcaggtagttcagtttcccctgcaaatggaccaccagacaattgaaggaattaaatgcttcttaaaagtgcag

SEQ ID NO: 103580 - DNA, 798 bp, Homo sapiens
caaattgcttagaaaaactctggaaagatacatgacacaataataaagtatttacctcttgttgggaggcatgaggactggatagatggtgaatagagtggaaacttcattctgcatcattttatgttttttaaaaaactgtgtaagtatattacctctgagactgctgatttcctctcagtgtccatttttcatttcttccttttacaagtaggacatcccccctgagtttttggagggcatatcctagcctcctctgcagctaagtacattcctgtgactgaatttttgccagtggaatgtgaacacaggtgacttatattatttccatgtcacttccttaaatggaaactaatatcttccactttcttttctttaccctttccatgggctagaatgtggatatggtgctggtgagactgttttgatcagagtagataaggtaacaatcggaaataaacatctaggctgggtgcggtggcccacgtctgtaatcccagcattttgggaggccgaggcaggtagatcacctgaggtcaggagtttgagaccagtctggccaacatggtgaaatctcatctctactagaaatacacaaaaattagccgtgcatggtggcttgcacctgtagtcccagctatttgggagaccggggcaggagaatcacttgaacccaggaggtggagtttacaatgagctgagatcgcaccactgcactccagcctgggtgacagagcaagactgtctcaaaaacaaacaaacaaaaaaccatctatttttctttaaccaatgactctt

SEQ ID NO: 103581 - DNA, 160 bp, Homo sapiens
ctggccaatgcttccaagccaaatattgaagaaatgcagacgtccagttttttgggacgggtgggacacaggagtctgttttttaactagctccccagagcacctgagcagcaaatcatgggctgtcctagccccttttcagatgagaaaggaggaggag

SEQ ID NO: 103582 - DNA, 435 bp, Homo sapiens
ttctggaaatggaactgctatgtcaaaaggtatgatagaaaagatgttacagctattgccaaattgccctcggtagacattttgtgatgcatacccaaatattcaacagcgtctatatcttctcactaataaagtgttagccttaaaaatatttatattttgaagtacctagcataatagctggcacacaaaataacaatcatcattttaatcgtgactagcgctaaactttttgatctttgcaaatgtaaaaggttaaaaaatattccactacagtttcatttgcattttcttcttaagagtaaagctgagtgtatttccatatatttaagcacttattaaaatttttcttgttttgtgaattagctgtttgtatgtacattttgccaatttatctaacgggttgttgattgaaacatttagtataaatgattc

SEQ ID NO: 103583 - DNA, 389 bp, Homo sapiens
agaccctgtctcaaaaaaagaatatacatatatacatttacatatttatatataaatttaaatgtttagtttatataaatgtatatatatgtaatatatataaaaatatatatttgcatatggatagaaaagtccaggagaatagaaggatataaaaagaaaacttaaaggccctcttctcattattaacagtttcttatgtatccttccagaaaatacaaattatatatatgtgagcagaaaatacaaattatgtgagcagatacacatatatattcctttagaagttacataaaaatatgcatgtttagtgcatattttttcattactcaataagtcttagaggccttttgctatcaacatacagagatttactttatttaaaaaat

SEQ ID NO: 103584 - DNA, 644 bp, Homo sapiens
ggataaggtgatgaaaattgttgggaagaagtgtgtactattttaaatcggataaccagggaatatgcccctcagaaggttacatttaagctgaaacctgaatgaagtggaggagactgtagcagctggctctgaagctttgagaatagaaggcgctggagagacattgcaggaggaaacgggtttgcttcctggttgcgatgggcttggataggttcctgcagcacacaagatttcagcttatgccttctccagcatcagactcctgcagtgtataaggtttctccagcacgggctcctgcagtgcttgcagcttctccagggcccagcctctgcagcacgcagcagcctgcagcttcccctggcagcctcttaggcagttgtgtgagagacctctccatcatcagctttcaccagcactccacagggcagtttcctggcaagttccactgctgagcaccacaccagcctctctgcatatctgcaagtcaatgtctgttctcagtcctggttgtggaggaggaggtcttggtggctctatcttagccttggggatagtagctgctcctattatctgtgatttctgtattttcttggtttgttctctttacttctttttattaaactttatctattatctatca

SEQ ID NO: 103585 - DNA, 401 bp, Homo sapiens
ggttattctgtgtgtgtgttgcggggggagtaccgttttctgttgctgtcatgaattctttttcattgggatgcctgaaagctggcattaattattgtagtggtatgtctacccagagatttcctgcagctgcctggaaaaccagatattcgaggagagccagaaaatcaccccagatgtgttctattacagtttagaaatcagcctgtacaaaactgatgtccaatttataatttaatatatttgacaagatctctttttattatgtgtttaaataagggttaccatttttaaaaattgtgtttcctgggactcagaggctttgaaaaatttttggaaatatatcttccattctcttacctaatcacttttttttgacattaatatttgtgtggcctttt

SEQ ID NO: 103586 - DNA, 269 bp, Homo sapiens
aaaggcttggcagtgggatggcagggagcctgacaaagtggaaaatgtgtgggttaaaggagggagggcggggtcctggaagacactgacatcctcctgctacgtgggaggagacacagggctcatctgtagccatagacagacatgccaaggaaacgcgcaggcctgcccgactctccagaagggaaattgtccctggccccagctcaccaagcctgggtggggaattagggcctgaggtctagggaacaggtgagctgttccttcca

SEQ ID NO: 103587 - DNA, 883 bp, Homo sapiens
agaattttttttgtagagacaggatcttgccatgttgcctagactggtctcaaactcctgggctcaaacaatctgtctgcctcagccttctaaagtgctgagattacaggtgtgaggtactgcacctggcaatacgttattttaaaagtaaacgctaagccatttatgactttggttatattcagtcagttggatttagtaactaataactagctttcttccattctaaggtacttttatagtttctagcaattagtttgttacaattagcttatatcagatataacagttcttaatataatgtttataaaaggttttaagtctgttgcctgatttttaaatttatatctagttaacattttaattttaaaattgccaacttttgggagatttcacatattttacctctatattttatttttccaggattggtatggaggagtagtaccttctattcttggtttatttttatttgctagacataatttcttaactacatatgtaagtataaattcataaaaatcacactgaaagaataggttgatttcaaccattttgagggtactggtaggtaacacactgttggggaataaactaaagaatttctgatttctacaatagatttaagtatgaaatttgagtatactgtgtagctgtgtagatcaacttaatgcttaaaaaattacctccttaatgattagattaatagaacagtgttagattatcaagggaagagtttggaatgtaaacataaacatgctgcataggtggtggttatttgtgagtaggactacttttaaatggtactagtaaagatttatcaaacaatgctgctattatgttgctatatttttaataaaatgaaaatcttaaaatcttgcca

SEQ ID NO: 103588 - DNA, 228 bp, Homo sapiens
cgcgttctatggctgcttgtactgtggctgcgtgcctgtcaccgtgcggcccccgcaccctcagaacctcggcaccacactgcccaccgtcaagatgatcgtggaggtcagcaagtctgcatgcgtcctcaccacgcaggctgtcacacggctgctcaggtccaaggaggctgctgctgccgtggacatcaggacctggcccaccatcctagacacaggtgcgtgtcc

SEQ ID NO: 103589 - DNA, 427 bp, Homo sapiens
gtggcaagaggctaccatgttggacagcgccaccctagagccttgctatggcctaaggatgtgcaacgtgtgcgtttcctgggagcctgggagatgtggagaatctcagacgtcaccccagacctgctggatctgaacctgctttttaatacaatctccaggtggtttaagaaacactgggccagccttgaaacctctcagtgtctttccagagacttccaggcagttgtgctggtcaaggatggaaggttcttgctgtcttctttgccttctcagctgttctcacaacctgctgtggttttcaggggacccatgtgtgtgggtccctgtggttaagagatcaaagaaaaaagttctgtagctgtcatcttaggatgaaacgctgttttgtgtattcctcctcataaacctccttaatctctgtatt

SEQ ID NO: 103590 - DNA, 813 bp, Homo sapiens
ggccggtgggacgggggccggcaggtgctccgcagccgtctgtgccacccagagccggcgggccgctaggtccccggagaccctgctatggtgcgtgcgggcgccgtgggggctcatctccccgcgtccggcttggatatcttcggggacctgaagaagatgaacaagcgccagctctattaccaggttttaaacttcgccatgatcgtgtcttctgcactcatgatatggaaaggcttgatcgtgctcacaggcagtgagagccccatcgtggtggtgctgagtggcagtatggagccggcctttcacagaggagacctcctgttcctcacaaatttccgggaagacccaatcagagctggtgaaatagttgtttttaaagttgaaggacgagacattccaatagttcacagagtaatcaaagttcatgaaaaagataatggagacatcaaatttctgactaaaggagataataatgaagttgatgatagaggcttgtacaaagaaggccagaactggctggaaaagaaggacgtggtgggaagagcaagagggtttttaccatatgttggtatggtcaccataataatgaatgactatccaaaattcaagtatgctcttttggctgtaatgggtgcatatgtgttactaaaacgtgaatcctaaaatgagaagcagttcctgggaccagattgaaatgaattctgttgaaaaagagaaaaactaatatatttgagatgttccattttctgtataaaagggaacagtgtggagatgtttttgtcttgtccaaataaaagattcaccagtaaa

SEQ ID NO: 103591 - DNA, 1220 bp, Homo sapiens
ggccggtgggacgggggccggcaggtgctccgcagccgtctgtgccacccagagccggcgggccgctaggtccccggagaccctgctatggtgcgtgcgggcgccgtgggggctcatctccccgcgtccggcttggatatcttcggggacctgaagaagatgaacaagcgccagctctattaccaggttttaaacttcgccatgatcgtgtcttctgcactcatgatatggaaaggcttgatcgtgctcacaggcagtgagagccccatcgtggtggtgctgagtggcagtatggagccggcctttcacagaggagacctcctgttcctcacaaatttccgggaagacccaatcagagctggtgaaatagttgtttttaaagttgaaggacgagacattccaatagttcacagagtaatcaaagttcatgaaaaagataatggagacatcaaatttctgactaaaggagataataatgaagttgatgatagaggcttgtacaaagaaggccagaactggctggaaaagaaggacgtggtgggaagagcaagagggtttttaccatatgttggtatggtcaccataataatgaatgactatccaaaattcaagtatgctcttttggctgtaatgggtgcatatgtgttactaaaacgtgaatcctaaaatgagaagcagttcctgggaccagattgaaatgaattctgttgaaaaagagaaaaactaatatatttgagatgttccattttctgtataaaagggaacagtgtggagatgtttttgtcttgtccaaataaaagattcaccagtaaaaaaaaaaaaaaaaaaaaaaaaaaagaaaaaaaaatgaaaagaatctgcgaaaaatataaataataatggagacattgggtaaaggaaaagagaagaagaaggggggcgcctgaacaactcacaggaggccccagacatatcacacaccacgctcttatttatgagaggggccacaacaggaggagcttcaataaatacacgaaggaggggcgggctcaaacaaacacagtgcgtagtgaagaaacatcgcagcggcatagtgtgtggagagaaccccccacttgtggggggggcagaacatgagaacaccacatgggatgttaagtagccgagagtaaaaaaatacggagatgtggggacaagcacatattgtggggagaatgtgccgcgggtataaaaataggtga

SEQ ID NO: 103592 - DNA, 2333 bp, Homo sapiens
ggccggtgggacgggggccggcaggtgctccgcagccgtctgtgccacccagagccggcgggccgctaggtccccggagaccctgctatggtgcgtgcgggcgccgtgggggctcatctccccgcgtccggcttggatatcttcggggacctgaagaagatgaacaagcgccagctctattaccaggttttaaacttcgccatgatcgtgtcttctgcactcatgatatggaaaggcttgatcgtgctcacaggcagtgagagccccatcgtggtggtgctgagtggcagtatggagccggcctttcacagaggagacctcctgttcctcacaaatttccgggaagacccaatcagagctggtgaaatagttgtttttaaagttgaaggacgagacattccaatagttcacagagtaatcaaagttcatgaaaaagataatggagacatcaaatttctgactaaaggagataataatgaagttgatgatagaggcttgtacaaagaaggccagaactggctggaaaagaaggacgtggtgggaagagcaagagggtgaggattcacctttaagttatatagaaggttatgaaaaacacttagaaatgaagaaattaaatcaataggctaatgagtcgttaattacaaatatgacatatcaggagagttttaagcagttctagtttatcctgtgaagactaaatacaacttagaaattcctaaagacctaaaatctaaaactgaacccaattatattatctatatgatgggttcaaatctgtttcaaaataaatccagccaggcgcagtggctcacacctgtaatcccagcacctttgggaggctgaggcaggaggatcacttgagcccaggagttccagaccagcctgagtaacatagggataccccatctctattaataaaaattttaaaaaatttgttctaaaaaaagaagaaatataaatcctcactgagagattagttatttgtggattttaaataaccattacaagaaagtctcccagagataaccactgtttaacatttcagggaatgctgtaggtactctctgggctggtacagatgtgtgttatgcatatatataattttacttagaatttgattatttttcacccaacaggaagttggaaatagcttttcgtgtcaaatctacatctgtatctttttaagtggctacaagctgttttattgcgaataattatttatttaaccaatccccttttggtggacacttagattatttcctgtttttcgcaactaaaaacatttctgtgatacatcttttagtattcatctttgtatagttgtccagcaatgagttctgcttctgattgacataacagagaatgtatcctcattaaaaaccaaacaagggaattcttcccctctcttggcaaccctttttatgtttaacagccattagaaatgtttttttatcttacctaaatctcactagctttttaaggctggagagactggctcccattttgtcaggtttagcgttattagtcagattgtggcttacagcttcttcctcctcctttaaccatttttctttgttgcattttcacttgaacatctccggggggaccaggagggcttccagttagtccatcctgtctttccagacactctggtgaaaggctttggataagagagaggatggaactactgatttataaaagactggagggtacctatgggtgtgttaccttgtttcccatgagcagagatgattgagacctgggtccatctgattacatattgctgttgattttgtgagcataatcgttggctggtttatgcactgaacctccttgctctgggatcataatcatatttgagtataagttatggtattcacatttgtatttgctacccaatacatttatttgttatatctgacaagcactgggaaatgaaaataattatttgcattacaaactcattattcatgtactttgaaagctttatctaacagcagtttttatatgggctatctgaatcttatcttctaaataaaaactagatttgtgaaagttgcctattctttttgtacaagcggcttaactattttaattgtagcaagtgaagacaaccagcatcactatctcaacccaagtgcctacttagaaaacttgtcctggctgccagtgctgatgctccttactaataaagctgtttgagacagggctgaatacatccttacagccctggtcagtggcattccctcgtacaattcatttcttaagactgatctatagtgttttcagatgttgccatcatcatgttataagcagcttttatatctctt

SEQ ID NO: 103593 - DNA, 589 bp, Homo sapiens
  misc_feature (42)..(42): n is a, c, g, or t
  misc_feature (46)..(46): n is a, c, g, or t
  misc_feature (48)..(49): n is a, c, g, or t
  misc_feature (62)..(62): n is a, c, g, or t
  misc_feature (70)..(70): n is a, c, g, or t
  misc_feature (72)..(72): n is a, c, g, or t
  misc_feature (88)..(88): n is a, c, g, or t
gggggagcccgacactggcacggccgcgttctggtctttatncccngnnccttcggggtgcnaattaccngncttcgcgctttccagnggagacctcctgttcctcacaaatttccgggaagacccaatcagagctggtgaaatagttgtttttaaagttgaaggacgagacattccaatagttcacagagtaatcaaagttcatgaaaaagataatggagacatcaaatttctgactaaaggagataataatgaagttgatgatagaggcttgtacaaagaaggccagaactggctggaaaagaaggacgtggtgggaagagcaagagggtttttaccatatgttggtatggtcaccataataatgaatgactatccaaaattcaagtatgctcttttggctgtaatgggtgcatatgtgttactaaaacgtgaatcctaaaatgagaagcagttcctgggaccagattgaaatgaattctgttgaaaaagagaaaaactaatatatttgagatgttccattttctgtataaaagggaacagtgtggagatgtttttgtcttgtccaaataaaagattcaccagtaaa

SEQ ID NO: 103594 - DNA, 595 bp, Homo sapiens
  misc_feature (46)..(46): n is a, c, g, or t
  misc_feature (48)..(48): n is a, c, g, or t
  misc_feature (60)..(60): n is a, c, g, or t
  misc_feature (73)..(73): n is a, c, g, or t
  misc_feature (76)..(76): n is a, c, g, or t
  misc_feature (81)..(81): n is a, c, g, or t
  misc_feature (87)..(87): n is a, c, g, or t
  misc_feature (93)..(93): n is a, c, g, or t
cgggagggccggccctggacaggaggggtttaggttctttttaccngntttatctttgtnttacttataacgntgnctggngctttncacganaggagacctcctgttcctcacaaatttccgggaagacccaatcagagctggtgaaatagttgtttttaaagttgaaggacgagacattccaatagttcacagagtaatcaaagttcatgaaaaagataatggagacatcaaatttctgactaaaggagataataatgaagttgatgatagaggcttgtacaaagaaggccagaactggctggaaaagaaggacgtggtgggaagagcaagagggtttttaccatatgttggtatggtcaccataataatgaatgactatccaaaattcaagtatgctcttttggctgtaatgggtgcatatgtgttactaaaacgtgaatcctaaaatgagaagcagttcctgggaccagattgaaatgaattctgttgaaaaagagaaaaactaatatatttgagatgttccattttctgtataaaagggaacagtgtggagatgtttttgtcttgtccaaataaaagattcaccagtaaa

SEQ ID NO: 103595 - DNA, 404 bp, Homo sapiens
atctttagtccatcagtatatttttgggtttttgaccataatgtagcattgaacagctcatttagagaacaagccatggggggaagaggtaatcttttgattctgtcctcagcgcagtatttaacggacttcatctgaatacatttacagaccaaatttctttgtagacctcacagtgattttccattgtgttttctttccagtatgctcttttggctgtaatgggtgcatatgtgttactaaaacgtgaatcctaaaatgagaagcagttcctgggaccagattgaaatgaattctgttgaaaaagagaaaaactaatatatttgagatgttccattttctgtataaaagggaacagtgtggagatgtttttgtcttgtccaaataaaagattcaccagtaaa

SEQ ID NO: 103596 - DNA, 800 bp, Homo sapiens
attttcattaaggaggtggcagccgtctgtgccacccagagccggcgggccgctaggtccccggagaccctgctatggtgcgtgcgggcgccgtgggggctcatctccccgcgtccggcttggatatcttcggggacctgaagaagatgaacaagcgccagctctattaccaggttttaaacttcgccatgatcgtgtcttctgcactcatgatatggaaaggcttgatcgtgctcacaggcagtgagagccccatcgtggtggtgctgagtggcagtatggagccggcctttcacagaggagacctcctgttcctcacaaatttccgggaagacccaatcagagctggtgaaatagttgtttttaaagttgaaggacgagacattccaatagttcacagagtaatcaaagttcatgaaaaagataatggagacatcaaatttctgactaaaggagataataatgaagttgatgatagaggcttgtacaaagaaggccagaactggctggaaaagaaggacgtggtgggaagagcaagagggtttttaccatatgttggtatggtcaccataataatgaatgactatccaaaattcaagtatgctcttttggctgtaatgggtgcatatgtgttactaaaacgtgaatcctaaaatgagaagcagttcctgggaccagattgaaatgaattctgttgaaaaagagaaaaactaatatatttgagatgttccattttctgtataaaagggaacagtgtggagatgtttttgtcttgtccaaataaaagattcaccagtaaa

SEQ ID NO: 103597 - DNA, 822 bp, Homo sapiens
ggccggtgggacgggggccggcaggtgctccgcagccgtctgtgccacccagagccggcgggccgctaggtccccggagaccctgctatggtgcgtgcgggcgccgtgggggctcatctccccgcgtccggcttggatatcttcggggacctgaagaagatgaacaagcgccagctctattaccaggttttaaacttcgccatgatcgtgtcttctgcactcatgatatggaaaggcttgatcgtgctcacaggcagtgagagccccatcgtggtggtgctgagtggcagtatggagccggcctttcacagaggagacctcctgttcctcacaaatttccgggaagacccaatcagagctggtgaaatagttgtttttaaagttgaaggacgagacattccaatagttcacagagtaatcaaagttcatgaaaaagataatggagacatcaaatttctgactaaaggagataataatgaagttgatgatagaggcttgtacaaagaaggccagaactggctggaaaagaaggacgtggtgggaagagcaagagggtttttaccatatgttggtatggtcaccataataatgaatgactatccaaaattcaagtatgctcttttggctgtaatgggtgcatatgtgttactaaaacgtgaatcctaaaatgagaagcagttcctgggaccagattgaaatgaattctgttgaaaaagagaaaaactaatatatttgagatgttccattttctgtataaaagggaacagtgagaccctcttttgtctgtccagtaagttcgggggagggcgcgaggggcggggg

SEQ ID NO: 103598 - DNA, 554 bp, Homo sapiens
ctactactactaaattcgcggctgctggcagtatggagccggcctttcacagaggagacctcctgttcctcacaaatttccgggaagacccaatcagagctggtgaaatagttgtttttaaagttgaaggacgagacattccaatagttcacagagtaatcaaagttcatgaaaaagataatggagacatcaaatttctgactaaaggagataataatgaagttgatgatagaggcttgtacaaagaaggccagaactggctggaaaagaaggacgtggtgggaagagcaagagggtttttaccatatgttggtatggtcaccataataatgaatgactatccaaaattcaagtatgctcttttggctgtaatgggtgcatatgtgttactaaaacgtgaatcctaaaatgagaagcagttcctgggaccagattgaaatgaattctgttgaaaaagagaaaaactaatatatttgagatgttccattttctgtataaaagggaacagtgtggagatgtttttgtcttgtccaaataaaagattcaccagtaaa

SEQ ID NO: 103599 - DNA, 895 bp, Homo sapiens
ggccggtgggacgggggccggcaggtgctccgcagccgtctgtgccacccagagccggcgggccgctaggtccccggagaccctgctatggtgcgtgcgggcgccgtgggggctcatctccccgcgtccggcttggatatcttcggggacctgaagaagatgaacaagcgccagctctattaccaggttttaaacttcgccatgatcgtgtcttctgcactcatgatatggaaaggcttgatcgtgctcacaggcagtgagagccccatcgtggtggtgctgagtggcagtatggagccggcctttcacagaggagacctcctgttcctcacaaatttccgggaagacccaatcagagctggtgaaatagttgtttttaaagttgaaggacgagacattccaatagttcacagagtaatcaaagttcatgaaaaagataatggagacatcaaatttctgactaaaggagataataatgaagttgatgatagaggcttgtacaaagaaggccagaactggctggaaaagaaggacgtggtgggaagagcaagagggtttttaccatatgttggtatggtcaccataataatgaatgactatccaaaattcaaggtaggaatttatgtgtgtctatatttatttacttcgttaaatattggagcttttacttctgcaactgtaaacaggcagtcttcttaaaacatgttgccattaataggcctgcagaatatctgtagttaactacaaattaatgtagtcatttaaagcagcaacacttaaattatttaaaatagctactttccccttgtatgttcagtgttctaaaatggcatttatctaattgttgctttttattatggaaattttcatacacacacaaaagtagtaccataaa

SEQ ID NO: 103600 - DNA, 755 bp, Homo sapiens
ggccggtgggacgggggccggcaggtgctccgcagccgtctgtgccacccagagccggcgggccgctaggtccccggagaccctgctatggtgcgtgcgggcgccgtgggggctcatctccccgcgtccggcttggatatcttcggggacctgaagaagatgaacaagcgccagctctattaccaggttttaaacttcgccatgatcgtgtcttctgcactcatgatatggaaaggcttgatcgtgctcacaggcagtgagagccccatcgtggtggtgctgagtggcagtatggagccggcctttcacagaggagacctcctgttcctcacaaatttccgggaagacccaatcagagctggtgaaatagttgtttttaaagttgaaggacgagacattccaatagttcacagagtaatcaaagttcatgaaaaagataatggagacatcaaatttctgactaaaggagataataatgaagttgatgatagaggcttgtacaaagaaggccagaactggctggaaaagaaggacgtggtgggaagagcaagaggtatgctcttttggctgtaatgggtgcatatgtgttactaaaacgtgaatcctaaaatgagaagcagttcctgggaccagattgaaatgaattctgttgaaaaagagaaaaactaatatatttgagatgttccattttctgtataaaagggaacagtgtggagatgtttttgtcttgtccaaataaaagattcaccagtaaa

SEQ ID NO: 103601 - DNA, 727 bp, Homo sapiens
attttcattaaggaggtggcagccgtctgtgccacccagagccggcgggccgctaggtccccggagaccctgctatggtgcgtgcgggcgccgtgggggctcatctccccgcgtccggcttggatatcttcggggacctgaagaagatgaacaagcgccagctctattaccaggttttaaacttcgccatgatcgtgtcttctgcactcatgatatggaaaggcttgatcgtgctcacaggcagtgagagccccatcgtggtggtgctgagtggcagtatggagccggcctttcacagaggagacctcctgttcctcacaaatttccgggaagacccaatcagagctgagataatggagacatcaaatttctgactaaaggagataataatgaagttgatgatagaggcttgtacaaagaaggccagaactggctggaaaagaaggacgtggtgggaagagcaagagggtttttaccatatgttggtatggtcaccataataatgaatgactatccaaaattcaagtatgctcttttggctgtaatgggtgcatatgtgttactaaaacgtgaatcctaaaatgagaagcagttcctgggaccagattgaaatgaattctgttgaaaaagagaaaaactaatatatttgagatgttccattttctgtataaaagggaacagtgtggagatgtttttgtcttgtccaaataaaagattcaccagtaaa

SEQ ID NO: 103602 - DNA, 203 bp, Homo sapiens
ttaaatcttcgcttcaacacttactagctctgtaactttgggcaagttaatgaaactcttgtacctcaggttccccgtttagaaaatatgtcaagtgtgtatacagtgcctgacacgtggtaagcacttagtaactggtagctagtaggttgaaactagaagtgaagattgtacattggtggagttaatagttggagattaat

SEQ ID NO: 103603 - DNA, 326 bp, Homo sapiens
atcaaacagcctgttctgacaaatgaaattgctaagcattgtagtaagtatataaatgagctggagccttgttgaaggctgtacaatcaatctcactttgaaatgaatgggttatcttgataatagttttgtttgtgtgtttgatactcagctgaatctgttagtataagtaaaacttggaagtagacaccaaatctctttttttttccttgaaaatcaaacatcttgttgatgaactggctttcagaactaaatttaatttatttagtttattagcatcaaacttataactcataggaagaaaaaacaaaaaaaaagtcaagact

SEQ ID NO: 103604 - DNA, 397 bp, Homo sapiens
gtcttttaattccagactgataacgatggaactgataaaaagaaaacactccatgcaactgggttaaggctgattaaatgttatgttcactattattattattaaacatttcgtaaatatatgctttacaataaatttacctaaccacacttcccaacatcaaattgaaaactggaagttaagggtcaggcatggtggctcacacctgtaatcccagcactttgggaggccaaggcaggcggatcatgaggtcaggagattgagaccatcctggctaacacggtgaaaccttgtctctactaaaaatataaaaaatagccgggcgtgggccgggcacctgtagtcccagctactggggaggctgaggcaggagagtggcgtgaacccaggaggtgga

SEQ ID NO: 103605 - DNA, 483 bp, Homo sapiens
gacggagtctcattctgtcgcccaggctggggtgcagtggggcgatttctgctcactgcaagctccgcctcccgggttcatgccattctcctgcctcagcctcccgagtagctgggactacaggtgcccaccaccacacccagctaatttttttgtatttttagtagagacgggatttcaccgtgttagccaggatggtctcgatctcctaacctcgtgatccgcctgtctcggccgcccaaagtgctgggattacagacgtaagccaccgcgcccggccacggactgctattcttagggacgttattctgaactgtctctcctttgtcctaaaaagacctaggagagaaacaaagtaatgtccgcgaagttcctgcttaaagcaactgttgtttttttttttaatggtcatagctgtagaaaacaacatacttcttgtttgttttctatagctatgaccgttacaaaaaaaaaaagggttag

SEQ ID NO: 103606 - DNA, 114 bp, Homo sapiens
gggagccaaaggactagccccagaaggatgatagaaatttggggatggttattcaccatttgccccagattggaagattaaggggaaaaaaaaaatcagaaggcagagtttatc

SEQ ID NO: 103607 - DNA, 283 bp, Homo sapiens
gggctgttcaaaagccctaaagtggagggagttggctgccccttcctgctgatatcaaaggcagaaagtagacttaatagatattggaaaaaaatacttttccaacacaaagcaaagtctgtgtattgttgctattaagtaacggttttactctgcatgtggcaaggcagattaatgagacatttctgcctcttcgataaccaaaagagagaccagatccaaaatgatctctagcttaactcagtttcaccttggataaagaaagccatttgttaaatgtaga

SEQ ID NO: 103608 - DNA, 637 bp, Homo sapiens
cctaaaatcaagctattgctggagccacattcctcttggaggctgtaggggagaatctgtttccttgcatttaccagcttgcagaggctgcctgcgttccgtcacttgtggcatcttcctccattttctagccaattgtggaggatctttaaatctctttactaaagaccctggtgattactttgtgtccacctggataatccaggataatcccccaactcaaaaatgcttcatttagtcacatctgcacagtcccttttgccatgtaaaatttataacttcaggggattaggatatggacatatctggggagctgctattcagcctaccatgactataaatatcattaacctaattaaaatggcctaaattagctggctgtggtggctcacctataatcccaggactttgggaggccaagatgggaggatcgcttgagctcaagagttcaagaccgaccagcctggtcaacagagtgagaccccatctacacacacacacacaaaaattagctgggtgtggtggcccacagctgtagtcctagctaattgggaggctaaggcaagagaatcacctgagttcaggagatggaagctgcagtgagttgtgatcaggccacttcactccaccctgggtg

SEQ ID NO: 103609 - DNA, 494 bp, Homo sapiens
tggcgtctagaggatcccgataagagcatcccctctctttggaatatctccataacgttattgtggaaggtgcaacgagaggctcagtaactgcctgcagaatttgttacaaatttgtattcgttcctttccagattttgaatttacacacacccacaactgcacccacacatatatacatcacacagattataaaccaaaaattgactgaggcatgtctcaatcattttagagggttattttgccaaggttgaggatgcacctggggaagggggaaaaaaacaatcacaggagcatctgtaatctgtgcttttcccaaagacaattttgaggacttcaatatttaaaggggaaagagtaagcaggaggggaaggaggaaagtaaataaaagcgggaggataggcaatggagacaagtgggttacagtcttgtgaggctttgattagcactcagggaatctacgttttacgtgtaaacaggtgggtagaggaaa

SEQ ID NO: 103610 - DNA, 395 bp, Homo sapiens
aacaatgagtacacatggatgcaaagaagggaacaatggccaccagggcttatttgagaatggaaggtgggaggagggtgagaatcaataaactacctattgggtaaccatcatcaccatccatctccagaacttttttcatcttcctaaaatgaaactctgtacccactaaatagtaactgcctactacccccaacccctggccgctggcaacctccattgtaccttctgtctccatgaattgtgatgactcccggtgcggtacgtaagtggaaccatacagtatttgtctttttgtgactggcatattttacttagcgtaatgtcttcaggcctcatccatattgtagcatgtgttagaatttcctcccttttaaggctgaataatattctgt

SEQ ID NO: 103611 - DNA, 352 bp, Homo sapiens
ttagtttctgatctgctggtgaagagcccgttgccaccccctagctcctcttcgccatgtgacctctgcacaggctggatcccttcaccttcccccatgagtggaagcagcatgaggccctcaccagatgcaggtgctggtgccatgctttttatacagcctgcagaaccatgaaccaaatagacctcttttcttttcaaatcattcagcctcaggtgttccttaatagcagcaccaatggactaagatgagccctgtttatttctggatttaacttattgtcaagacccctaaaaatctatctcgaaagcttgtttctcttttctatctctgctaagcagaaattgaaata

SEQ ID NO: 103612 - DNA, 841 bp, Homo sapiens
aaaataacaagtgttggcaaggatgtggagaaaattggaacccttgtgcactgttggtgggaatataaaatggtgcagcctcaatggaaagcagtatggaggttcctcaaaaacctgaaaatagaattaccatatgacccagcaatactacttatgcatataaattcaaaagaattgaaagtgtgatttgaaagaaatgcttgtacacccatgttcattgtcgcatttttgtaatagccaagaggtgaaagcagttccagtgttcattgtcagatgaacaaaccaagaaaatacagtgtatacatatgttggaatatcattcagccttaaagaaggaaatcctgttactggaactttgaggacattatgctgagtgaaataagtgagtcaagaggacaaattactgtgtaattccacttatgcgtggtaccttgagtagtcaaattcatagagaaaatggaatggtcgttgccaaggaccaggaggacaaagggataaggagttagtgttaagtgggtatagcatttcagttttgcaagataaaaaagttctagagcccaggtgcagtggtgcatgcctgtaatcccagcactttgtaaggccaaggtggatggatcacctgagctcaggagtttgagaccttggccaacatggtgaaaccccgtctctactaaaaatacaaaaaaattagctgggtgtggtggcgcacacctgtaattccaactacttgataggctgaggcaggagaattgcttggatctgggaggcggacgttgcagtgaaccgagatcacacaattgcactccagcctgggtgacaagagcaagactccgtctcagga

SEQ ID NO: 103613 - DNA, 407 bp, Homo sapiens
aaaggggtgagggataaaagactataaattgggttcagtgtatactgctccagtgatgggtgcaccaaaatctcacaaatcaccactaaggaacttactcatgtaaccaaatatcacctgttccccaaaaacctatggaaataaaaaattaaaaatattaaatatggatctcataaatatttatctattaggatgtacctatgcttctttcattcgacacttatttactgaatgctgaattacctgtatgttaggaggcattacttaaaatcatgagaaactgggactggaaaagtgtgaacacagcaaactggttaaataaattctgcatacaataaaatacaatgtagccattaaaaatgctacagaagctgggcacagtggctcacgcctgtaatcccagtact

SEQ ID NO: 103614 - DNA, 288 bp, Homo sapiens
ctcccctctactctccccctctcccttcttccctctgtctggaagttcaagttgccatctccttctctggatcagagaggaagatgaggatcatgaaactggtgaagatcatagctcactcccagagagtgcttctgcctctccaagccttccacatgtgttagccacactcatggctttctttggaagggctggtgggtcccttttaccaacccatttcatgcatgctccgggaaagtgccagagctggtaggagccttctgcagctctgacctttgggtgagatcc

SEQ ID NO: 103615 - DNA, 257 bp, Homo sapiens
ttgggaaggctgaggcagaaggatggcttaagcccaggagttcaaggctgcatggtacaattacagcttatggcagcctcaatctcctgggctcaagcaatcctcctgcctcagcctcccaagtagctgggactacaggcactacaccagcttctgagaactgtgtctgtaggtagttctgattagtactttggtgatattctttctggaaagatcagactattgataggactataccatgccgggctaattttgtt

SEQ ID NO: 103616 - DNA, 113 bp, Homo sapiens
gacatccggcccgggtccctcgccgcgcccgccgcccgccgcccgcttcggcgccgcagcccgggagccggccacccctacacgcgccagggctgtcccctgccctcccctcc

SEQ ID NO: 103617 - DNA, 117 bp, Homo sapiens
gtctgcgtcgagttcccatgtgcccagagtggttcttctcttccacagactccaaaccaccacatggctcttcaggacacacctgtaccagacatgagctcacctgcctgtttcctg

SEQ ID NO: 103618 - DNA, 430 bp, Homo sapiens
aaaaaaaaaagcctcttccatgtaacattcttcatctcattcacttacctgctctgaaggtgcatctagtcacgtcgtagtaagacagctgcatcttttaaaatcataacaaagagactgaaaactcccaaggttaaatctgaggaaattcagtgcattaagcatatttgcactgttgtgcagccatctcaccctagccattcctagaacttttcattatcccaaacagaaactgtactcatgaaaacagtagctccccattcttccctcccccagctctggaaacaaccatgctactttctgcctctgcgcatttgactactctaggtacctctgtaagtggaatcctagtgagaggtgaagccagctgggcttctgggttgagtggggacttggagaacttttgtgtctagttaaaggattgtaaatg

SEQ ID NO: 103619 - DNA, 479 bp, Homo sapiens
gcaacctctgcttccgggttcaagtgattctcctgtctcagcctcctgagtagctggaactacaggtgcatgccaccacaccaggctaatttttgtatttttagtagagatggggtttcaccatactggtcaggctggtctcgaactcctgatgtcaggtaattcaccctcctcggcttcccaaagtgccatggtcctttctcttaaagaccaatggcaatggctgtatcgctgcatgtgttcatgcattcagtcaacaaacattcattaagggttttctctgtgcaagataccgcattaggcattggggctacaaagatgaaaagacatcggttctactttcaaggagctttctcttctgtggaggtatagacataaaaacagacagtagtacaacgtgatgtcaacattgacaagaactgagttgagaagaatgaaagctgagtgtagagtatgtattttcaagagcagaaaccagt

SEQ ID NO: 103620 - DNA, 252 bp, Homo sapiens
tttattgtgtcatgccttatggtgggtacctgggatagaaatgacttgagcaggttctctgttaaagtctaatgaaggagataaatatggaaacatcactggtcttataatgatatgaacaaaatgctatgggggcaaaagggaaaactagtagctactgctgcttacagacagagaaggcctcaagaggaaataacccctgagcttagtcttggaaaataagtagaaatttgccttgagatgagggagaaa

SEQ ID NO: 103621 - DNA, 688 bp, Homo sapiens
ggaggcctggcgggcaccgtaaccagcgccgcggacaccggcaccggcgccacggactccgcaggaccccgcgcccgccgccgccgctatgctggggctgctggtggcgttgctggccctggggctcgctgtctttgcgctgctggacgtctggtacctggtgcgccttccgtgcgccgtgctgcgcgcgcgcctgctgcagccgcgcgtccgtgacctgctagctgagcagcgcttcccgggccgcgtgctgccctcggacttggacctgctgttgcacatgaacaacgcgcgctacctgcgcgaggccgactttgcgcgcgtcgcgcacctgacccgctgcggggtgctcggggcgctgagggagttgcgggcgcacacggtgctggcggcctcgtgcgcgcgccaccgccgctcgctgcgcctgctggagcccttcgaggtgcgcacccgcctgctgggctgggacgaccgcgcgttctacctggaggcgcgctttgtcagcctgcgggacggtttcgtgtgcgcgctgctgcgcttccggcagcacctgctgggcacctcacccgagcgcgtcgtgcagcacctgtgccagcgcagggtggagccccctgagctgcccgctgatctgcagcactggatctcctacaacgaggccagcagccagctgctccgcatggagagtggg

SEQ ID NO: 103622 - DNA, 186 bp, Homo sapiens
gaatgaggacgtctactctgcgtggacttctgacaccgctctctctggccgtctgttctcctgtgtgctccggtacaggctggaggaagcgccacataagtgtaaccatcattagtatttcggcctccaccatctcctctctgcctcacatggtggccttggccctgaggacacagaacagctcaa

SEQ ID NO: 103623 - DNA, 357 bp, Homo sapiens
tggtggtgcacgcctatagtccctgctactcaggaggctaagacaggaggattgcttcaacccaggagttcgaggctgcagtgagccataatcactccactgcattccagcctgggcaacagagggagaccctgtctcagagaaaaaaaaaaattaaacactgtatgactcaagtaaagccaaatttccctctggtgctgaaggattgcaacatgaagttagtaaaacagaactctcaactgtggttcctctcatccactcatcccttctcccacccatcctgccagcccgccatgtgtgaatgtatatgtgaagcatcttctgcttgccagacgcaaggtgaagcactgggcccat

SEQ ID NO: 103624 - DNA, 103 bp, Homo sapiens
caactgaaataatcagacagaatacatgaaacagtggcttccaagaccccgacatcaggcaaaattaaatgcggtgatcccagagagaaaggaaacaagcaag

SEQ ID NO: 103625 - DNA, 551 bp, Homo sapiens
cagctttctgagggttaactgacggctgatgggttcaagaaggaggacacgggcacagggactcaggggcagtgaggggcagcagggccgatggtgtgaggagcaccagggagcaggagggaacgggcctggggcgtgaatctggccctactgtcggatgagttctcttccgccacccaaatctggtccgaccgttaacagcgtggccttcggcaagtgactaaagggcttcctgcctcagctttcccacccataaacagaggataacaggccaggcgcggtggctcacgcctgtaatcccagcactttgggaggtggagatgggtggatcatgaggtcaggagatcgagaccatcctggctaacacggtgaaaccccgtctctactaaaaatacaaaaaaattagccgggcgcggtgacaggcgcctgtagtcccagctactcgggaggctgaggcaggagaatggcgtgaacctgggaggcggagcttgcagtgagccgagattgcgccactgcactccagcctgggcgacagagcaagactccgtctc

SEQ ID NO: 103626 - DNA, 449 bp, Homo sapiens
atttccatcccctccctcctagaggaaactgtataaacaagtgtgatgtttgcacttaaatatttatgactcctttaaaaaataagctttaaaataagctgctttatgtgtggatttgtttttagcttgctgaactgacattgtgctagagatactgttttgtttcttttttcattcaacaatatactttttagttatggtcgtgtctctatgtgtagaattagtttattgcttctaacagcagcacagtattccattagtaggcatctatcacattttgcaaggatggtcactgtgttacttccaactccctgatgtcataagcaaacctctctatgtgtaattcttattagctctacatctaaagtgttaccttgaatctgccaattcaagttaacttttttccttttgtttactctttctcccatgggctgtctccatagagcagc

SEQ ID NO: 103627 - DNA, 782 bp, Homo sapiens
tgggccacatcatcctaaatcctgtaatgagcaagttattagagttggttgatggccccagctgagttttatctcttgactacttccctccaattatgtctaaatacctgtgtgcctgttccctatttcctctcagttttctttgttagaaccaccagtctccagaattattgcattaccattgctggttcatgttttagggacttttaaaatgaaagtgtcagttctctaaatagccctttatgtagtttctctttgaaacatgtctaggccctgagaatctctgaagtgtttgtcagtggctggtgatcgctgcagttgagggcttgggattccagggaaaggtgcaaggtgtctagccaggaaaacttacatctttattcgctatgagtactacagcacttgagaagaaaaggaggtagaattctgttttctatttgtaccttttgcctgatctaatcattccaaatgatatgcctatagaaaacatttcacctcttgcaaattatcaatagtgtacaaagtagaagggaatatagagatcttttattcaatcatgtgtctatagaggtttcattgaacacattctcatgcacatctaggtgccagataaatttaagactcttgttggttttcagaaagcttgcagtcttaatggaagagacagtggcagagagttgtaggtgacattgaggtaattaatacaaagttttactgaagttccatgggaacacccttatagggcactatacccagtagggatatcctctgagagcagttct

SEQ ID NO: 103628 - DNA, 425 bp, Homo sapiens
agccaatcagccatgcatttcttattgttggaaaattcactctggtcagcaattaagcttttcacatacttcacattgaagtgaatctaaatgaattgttctaagtaaaataatttttggaacacaaatatttggcttctggttatataagccatcatcctcagacatagattttaaaaattatattagagtttattttaacttgtatcaaccataaaataaaaaagagctcaaaacatacacagttggaatgagaccttcattctgaaagcagcaaggaactagtgaaagttaacattgttcactcgaatggagaataacctttttttgcatgttaaattttaggatttaaatgataaattgagcctcaccactactgctgatctgggaagaatctgacctagtaaaggttttcaaatgtcttt

SEQ ID NO: 103629 - DNA, 312 bp, Homo sapiens
tacccatttttccttaggatcacaacaataacagaaaccatcatttcactatgtgtatacccaagtgttgaaatagaggattcatgataatcataatgactttagcacaccaattccagtctccataatggccttccaggactgcagggggccaatcagcgccttcctcctggagaaaacagtgattctaaagtttggaaaggctctcaaaagtagtaaaataggtcataaaacagagttaaatatgttttatatagcttcacagactgatgtgccgtagaatttattgaggtacttaaatggattttgggc

SEQ ID NO: 103630 - DNA, 228 bp, Homo sapiens
ggccttgcctggccttgtgtggagtggcctgcctgccttgccatcctcctcttcctctctcactgagccctgagcccactggccggtggtcctggaaggccatgtgcattgtcgcctgtgccggtgcacgtgtgctgcttctgcccctggagcaagctcctcctttccctgggcatcctccctcccgggtcgggctggatacctcttcattaccacctgaagggccag

SEQ ID NO: 103631 - DNA, 635 bp, Homo sapiens
tgctgactcttctcttcctaggccttggtctgcaccttatactttcctttctactgcgggctgatcccccccgagttcagaggggagactgcccctccaccatcacggtgtcgcccttccatgggacagtggacatctgcccccagagcacctcccccaacctgcatgagctgaacgtcttcaacttcagcttccaaatctccactgagaacttcttcctggggctcatatgtctcataccccccagcctcgaggtagtggccgacaactgcagacaaggctacctggatgccctgaggttcctggagagacgtggactcaccaaggaaccagtgctatggacgctggtgtctaaggaacccccagccccggctgacggaaactgggatgctggctgtgaccaacgctggaaggggggcctgtctctcaactggaaagtgccccatgtgcaagtcaaggatgtacccaactttgagcagctctcaccagagctggaggctgcactgaagaaagcatgtacgagggatcccagccggtgggcccgcttctggcactcggggcctggacaggtgctgacgtacctgctgctaccctgcacactgcccttcgagtacatctacttccgcagcagaagg

SEQ ID NO: 103632 - DNA, 1180 bp, Homo sapiens
atttgggcccagccccgtccaaggctgcatcccggccctatcccgggtcacggagtgacccttcctcgtcccgatcaccccgcccggtccacccgccatgggcttcttagaggaggagggcagatggaacctgtccttctccggcgccggctacctgggcgcccaccacgtgggcgccaccgaatgcctgcgccagcgagccccgcgcctcctccagggcgcccgccgcatctacggttcctcgtctggggcgctcaacgcagtcagcatcgtctgcggcaagtcggtcgacttctgctgctcccacctcctgggcatggttgggcagttggagcggctgagcctaagcatcctgcacccggcctacgcgcccatcgagcacgtcaagcagcagctgcaggatgctctgccccccgacgcccacgtcctggcctcccagcggctgggcatttcgctgacccgctggcctgacggacgcaacttcttggtcactgacttcgccacctgcgatgagctcatccaggccttggtctgcaccttatactttcctttctactgcgggctgatcccccccgagttcagaggggagcgctacatcgatggggctctgagcaacaacttgccctttgcagactgcccctccaccatcacggtgtcgcccttccatgggacagtggacatctgcccccagagcacctcccccaacctgcatgagctgaacgtcttcaacttcagcttccaaatctccactgagaacttcttcctggggctcatatgtctcataccccccagcctcgaggtagtggccgacaactgcagacaaggctacctggatgccctgaggttcctggagagacgtggactcaccaaggaaccagtgctatggacgctggtgtctaaggaacccccagccccggctgacggaaactgggatgctggctgtgaccaacgctggaaggggggcctgtctctcaactggaaagtgccccatgtgcaagtcaaggatgtacccaactttgagcagctctcaccagagctggaggctgcactgaagaaagcatgtacgagggatcccagccggtgggcccgcttctggcactcggggcctggacaggtgctgacgtacctgctgctaccctgcacactgcccttcgagtacatctacttccgcagcagaagg

SEQ ID NO: 103633 - DNA, 612 bp, Homo sapiens
atttgggcccagccccgtccaaggctgcatcccggccctatcccgggtcacggagtgacccttcctcgtcccgatcaccccgcccggtccacccgccatgggcttcttagaggaggagggcagatggaacctgtccttctccggcgccggctacctgggcgcccaccacgtgggcgccaccgaatgcctgcgccagcgagccccgcgcctcctccagggcgcccgccgcatctacggttcctcgtctggggcgctcaacgcagtcagcatcgtctgcggcaagtcggtcgacttctgctgctcccacctcctgggcatggttgggcagttggagcggctgagcctaagcatcctgcacccggcctacgcgcccatcgagcacgtcaagcagcagctgcaggatgctctgccccccgacgcccacgtcctggcctcccagcggctgggcatttcgctgacccgctggcctgacggacgcaacttcttggtcactgacttcgccacctgcgatgagctcatccaggtgtggggcggggggtgcccagggcttggctggtgggcgggctccatctagtccagagtgacatccaggtacttccccgtcagacgttt

SEQ ID NO: 103634 - DNA, 202 bp, Homo sapiens
tggaggtaccaaaggaccaaagatgtttggagagatataaactaatttggtagagaattaatgaaataatatgaaagccttgattcaggatgagtagtaagcattatgtaacgtaaaggtactggatcgtaacatggaagattctccccatcccactccaagacttcataccatatttaaaggggataattgactggtgagg

SEQ ID NO: 103635 - DNA, 1494 bp, Homo sapiens
gggacgcggccttcctgcctcccacactcccaaatccatgccttgtttatctttttagaatggatctctgatgcctgcccaccacgcggctggagtggcgccagcatccccagggcacgtctgtgatgaccgatgaggtccaccacctctaccccagaccctcccatacccaaaggctccctctgcccagtgaagtccccttcgccccagcattcctgcaccaggcacatcccaagggtggccccgtgtcctgcaggtggcaggagagtgcaccctcctcagacaccagtctgatatgtcaccaggagagagcgggcggtcctcagtgtatgctcttttcttgtctctggggagcttgttttggctcctcaagaagaccttggaaaaagcacaggttgtagaggcggcattcgccgggcagaaccatgtcccaagacaactggttagtgaggccaggcgtgacaatcataatcggagcagcaactgtgcaatggcataggcaaagggggccgaaggcgcagcagccaccaccattatagtcagactgggcaccgtttcctaaatgtcacacatccttccagccccttgatctttgcttatgaaaagggtcattccctctacaatcctctagaactctttgtaggtttttgtttgttttccaaacactgtacttgcttctttatctgtctctctatgaaccgtgagtcccagaggacctcgtggtcctcaattatccttgcttctctgtggcctgtgccatggggctgaatgtttgtagcccccagaatccatatgtggaagccctaatccccactgtgctggtattaggaggtggggcctttgggatgtgattagggttagatgagggcatgagggtggggccctcataatgagattagtgaccttatcaagaggatgagacactagatcccttgctccctctctgcctgcaatcaccagtgaaaggccaagtgaggacataatagaagccatcccttcccagaacccagccatgctggcaccctgatctctagcttctcagcctccagaactgtgagaaataaatgtctgttgtctactccacccaggtcgtggtcattcattatagcagcacaaacagactaagacagtagggaacagtgattgttacattataggtgcttagctaacttgctcactgatcggctgaggtctctcccctgccattaaacagtgaaccaacaattagttagcaaatgcaatttcagcttctactgagggaaagataatacacccagcagtgtgaagaaatttctttgcagaaccaaactaaaggtccaggttactaaacacagcattagtttttctcaaatcagtatgtgttgttatacaggcaagcctaattaatcatatttccagggtatacactgaataatctgagagaagaaatcaattacctaaattcgtggttctcataattcgaagcagtcgaatttcaaagtgtaggttttaaat

SEQ ID NO: 103636 - DNA, 385 bp, Homo sapiens
agggcagggactgtgctggcttcactcgccagcacagtgagcactttacacagaggtaagtgttcatgttaaaaagaaacaaaccaggctgggcatggtggctcacgcctgtaattccagcactttgagaggctgaggcaggcagattgcttgagcctaggagttcaggaccagcctgggcaacatggcaaaaccctgtctctacaaaaaatattaatacaaaaattagccagatgtggtggcgcattcctgtggtcccagctactcgagaggctggggtgggaggatcatctgagcctggggagattgagggttcagtgagctgtgatcacaccactacactgtagcctgagtgacagagcaagaccctgtctcaaaaaaaaga

SEQ ID NO: 103637 - DNA, 516 bp, Homo sapiens
catggcagacggggttcaggaaacttatgatcatagcagaaggcgaagcaaacaaatccttctttacatgggcagcagcaagaagaagtgccgagcaaaagggggaaaagacccttataaaaagacccatcagatctgtgagaactcactcactatcacaagaacagcagcatgggactaactgcccccatgattcaattacctcccaccaggtccctcccatgacacatggagattatgggaactacatttcatgatgagattgggatagggacacagccaagctatattagcttcactgctgctgaattctacaaacatttacagaaaaacaaatatgaatccaaacttttccaaaaatggaagaggaaagattacttccaaatgcgtaaccctgatgccaaaggcagacaaacacctcaaaagtaaagaaaatggggcgaggtggcgggtgcctgtagtcccagctactcaggaggctgaggcaggagaatggcatgaaccccggggggtgga

SEQ ID NO: 103638 - DNA, 438 bp, Homo sapiens
ccagggtcacagagacagtacctggggcatctgagcccaggtgtaacagagtccggacgctgggcttcgctaagccacaaggctatggaaagtgccctcgccacctgaccagcatccagtccctcttacctcttctttaataacataatcctgattttgtttggggcagtcacgtgtccaggtaaaactgctcactatcccagccccccttttgcagctagaggtggccctgcgacacagttctgccaacgagaatcccagggaagagtgtccctcccacacccatataaaataataaaacttcactagaacaaggctctcagcccttccttcttcctgactggaaaattgatgtgatggctgaaggcacagcagccctctgccaccacgaggagagctgcactgaggactgccagtcaaaaagacaggaggtcccag

SEQ ID NO: 103639 - DNA, 289 bp, Homo sapiens
gtcataactgaactgtttttatattgaagtcaaatgtattcacagtttatagtttagaggaaatagttctatgtaccttaacctaggtacacattaataatttacacattgggcagcaatgcctgatttgcacattttaaaaatgattgaaaatttacaaaagaaataaaaagcacaactgtttgcacatagattaatttgctattggaagaaaatctgcacaaagctacctatgccatgaggaaaacattctaacttctgtcagaatgaaaggactttataggttgtg

SEQ ID NO: 103640 - DNA, 139 bp, Homo sapiens
tcttcgtcttagagtggagccagggcaaaagaggaattcaagctggaacaaggagtccgagaagacgcgactgctggacagaacaagcgatgaagccagtccccaaactgatgagcccgcagctccatccaaattaaat

SEQ ID NO: 103641 - DNA, 734 bp, Homo sapiens
gggtacagctgcctgggcttttggcacatcttgatctttagttacagagagtcaggacaagactgagatcttttgtggctgagaaacgattcaagggctgggtgcagtggttcacgcctgtaatcccagcactttgggaggccgaggcaggtggattacctgaggtcaggagttggagaccagcctggccaacagggtgaaaccccgtctctactaaaaatacaaaaattagccgggcgtggtggcacacacctgtaatcccagctacttgggaggctgaggcaagagaatcactggaacccagagggcagtggctgcagtgagccgagattgtgccactgcattccagcctgggtgacagaatgagactcttgtctcaaataataataataataataataataataataataatgtgtacaactcattggtttttagaatgttcagagttgtgcagtcattaccatagttggttttagaacattttcttcttcctagaaaggaaccccatacccattagctgtcacttcacattttctctcactgccattagtccctgggaaccactaatctgctttctgtctctctagatttgcctgttctggacatttcatataaatgagattatacaatgtgtggtcttttgtgtctggctgtcttcactcaacataatattttcaaggttcatccatgttggagcatgaatcaatacttcattttatgatcaaataatg

SEQ ID NO: 103642 - DNA, 295 bp, Homo sapiens
gctgggtatattcaaaattagaaaattacagctatgaatagttgttttccacttgattggtctaaagtcaactgaattctagagaaaactcctttgaaagtgtgttgccttggaaatggatgatcgtagcagtataatagcttttaccgtatttgaaattccagcagtttaggtgacagttgtgtctttctgaagggtgtgggcagattctgaacgggcttttcccgttgctcatcagcttggccatggctgctcttattacagcagtcactcattttcacagatgtctttaaaa

SEQ ID NO: 103643 - DNA, 208 bp, Homo sapiens
ataaatgtgtgcagctatcaattcatccatccatctatccatccaccaacagtattttactgagtgcctactatgttccaggctgtatactggcactgggcttacggtaatgagcatatactcatgagcaatgcagacatagaccctgcccccatggaacattcagtctagtaagacagactgaatacagaaaacagtcatacaaata

SEQ ID NO: 103644 - DNA, 354 bp, Homo sapiens
tgagtttatgtcttgataacctggatcttggttatacatttctctgtacaattttcatcgagttgccttggaggagttcaatgcctgtttgtataatagcttttcattgtttcagtgaacctctcatcattatcaaagggtttttcagaaaagagttaagtctgatagcctgagcattaatgaactaaaccaaaaatagatttaatcaggcatgtgcatgccgctgttcataaataatgtctattcattgctgagttaaactagatgtcaagtttttttccctttaatcttgtacatgattctgcacatagggccaaggaaaccacacctatgctgtatacttttctctgtgtc

SEQ ID NO: 103645 - DNA, 418 bp, Homo sapiens
actttttccctgtaacattcctgtcacataatctagctgccacattcagtgcagtagagaaatgatgacgaagacaggagcagatgtttgttgtaacttactatgagccaccttttaagtatttcccatgtatcaactttcttaatccttacaatgactctaagagtccttttactctcctcattaagagatgaggaaattgagccacagagatgttaagtaatttcttcaaggtcacacagccagcgaagggcagagcttttaatcactaagccgtttgcaatgattctttcatttctaggtgatattgttaggaaaatgttttaagcttcatctggaatctgccttcaagtgcctgtgatccgctggtcctaattatcatcatttcagaacaaaataagcacgttactctaaatgg

SEQ ID NO: 103646 - DNA, 487 bp, Homo sapiens
  misc_feature (37)..(37): n is a, c, g, or t
  misc_feature (98)..(98): n is a, c, g, or t
acgagcttatctctcgacatcctgtgaccctcacccngcctggctcttcctctgaccctcagcccgcctgcccttcctctgaccctcaccccgcctgnccttcctctgagactctacaatggcttttcatccaacccagcagggtctgccattcccgcaaggtggaggcatctcagaggccctgcttggccttgccctgtccaggcaggcgggccgtgggttgacctccatgagacagcagggctgggcctgctcctttgggttttaaccaacataaaggtggcaggcaattgaggacctgcacctcttaagaataatcccccaaagctgagaacaccagcatctctgcagagagcacaagttgcagggaagtagctgaaccactgcctgggtgggggaggcaccggtgggaagccctctggcacagtgacccccgccagcagtgatgccacctggcttcctgcgccaggccctgcaggaatggagt

SEQ ID NO: 103647 - DNA, 464 bp, Homo sapiens
ctctcctggcaaaataaatttttgttatagctgtttaagaaggaaactggcagataatcagaactggacggcaaagtgttttgtgatcctcctgcagattccagggtttcagtatcacctccagccatgctgatttaaccagacagacagacagcactatcacaaaagagcacacctgcagcttcctttcctggtaagcaaatggtcctctacgcagtcctctgcactcatctctgcctctcagctccctattctattcttattaaacctgagaaggaactatcacaagggcaggtagagtccaacaattctaagcacacagagctcagtataaaattctacaaaaaataggaactgctgatgctcgacagagctgaaactcagctgccacctgggccggggccggccagttgctgggcctccaccctaggtgctgctgcacacccttcagagcacagttactt

SEQ ID NO: 103648 - DNA, 358 bp, Homo sapiens
gactcctctgctgctcacagatgcattgggtgaccctggaagccctgttctgggccttgggttccccttctgatggccagggtcccttccaacccagtcgacaaactgagtatttctgcagcagacacctctacctgtgtgtgaccctgcaggcggggttgtggggaggaagagaatggacacattggtgaagggatggggcagtgggcccagaaacacacacctgcccacgtctggcccctcctttcccactcagctgtgagctcccaaaggaccaggcagtagacagtgagtggtgggcacgtaggagtccatcctattcactgcgaccctcctttcctggcccccgtgcctggct

SEQ ID NO: 103649 - DNA, 100 bp, Homo sapiens
tgtgtgcccatggcataatttcattactatgtttgccattctgcctgatttttttgtatctacccttctgaagtagatggaggtggaattttctagtgtt

SEQ ID NO: 103650 - DNA, 890 bp, Homo sapiens
attttaatacacaatattttatgtcaaatgttattggaaattatattgtgatttaccataaaatccatatgttgcttagtagaagaaatatttttttagttttacagatcaccactcattgtttttccaaccttttagaaaaatttgctactcatttattgaagaaactaggtcatttgttttatagcttcccgtgttcagatttttactgtttgcctcctgtggtgtcacttaatgtttaacttattgccaatgtcattgaaattttatttcaatgtaaatttcccctctctttcctgtaaattgatggttaaatctagaggcttgatcagattttggcgagagattttttggcaagaatacttcacaagtgttgctgtgtacttccatcagcaaacatgtaacaacgagttatttttttctgatgttagccatcaatgatctttgtctacatcttagttaattaagatttgaaaaatggtgaaagtctattgcagtcaatattactgaaaaagtaaggttctccgtgtcagctatatgactgctacataagtcgaattcaatcagaaaaaggtagaataggctggatgaggtggctcatgcctgtaatcctagcactttgggaggccgaggcgggtggatcacctgaggccaggagttcgagaccagcctggccaatatggcgaaaccctgtctctactaaaaatacaaacattagccaggcatggggatgcatgcctgtagtcccagctacttgggaggctgaggcaggagaatcgcttgaaccgaggactcagaggttgcagtgagccaagatcacgccactgcactccagcctgggcgacagagtgagattcaaaaaaagactgtctcaataaataaataaataa

SEQ ID NO: 103651 - DNA, 540 bp, Homo sapiens
ttacatggcactcctaaaatcctgatatgtcttagtatatgccattagtaatatgtgtattatgttaaattgttgtatgccacagaaataaccagatttccttgacaattgtatatttaatgtgtctttgactagaatgtcttaaaaattttatcatctacaattattgttttattggattcttctcaaaaagcggcttacagtcaactacagtccaaaatttgctccttggaagactcctgaatgcaggtttctgatgatgtcagaaagactgtgctgttggattagacagaaaacttctaggactctaattaaaaggctgatgtggtcataaagattgctaacccagtatgaagcaaaacaagagttaattgcatggactgagctaatagaggactgaactgattcttttgtggcttttttggtttgaaacattgctgattctttttgttgttcagtgtcaaattttttttctcttgagctatttgtagcccttaacaattgagtatactcttgtaaataaaatttaaagcagaaaac

SEQ ID NO: 103652 - DNA, 211 bp, Homo sapiens
gtgctgggcatggctgccccttggccttgttggtggctgccctgcagctctgggaggaaagtccctctaaagccaccgtgaaggcacctgtgattccagccacgctcagcagatagtgaattctcctggtaaaatgcagtgtctgcatctgagacatcatccacctggcacaccgaccgagaagctgctgcgccatgcactaggaatcgag

SEQ ID NO: 103653 - DNA, 243 bp, Homo sapiens
tgtctgtgccaggtgagtgatactggatcttggtcactgcactccgctccgggttcagcattctcctgaatgtgtatgcaacatttctttattaaagtagaaaaggtcgtaacatcacaaggaaaggaaaacagaagccatctgggagacaagctacatctaacaataaaaaataacaaaatttaggccaggcacagtggctcatgcatgtaatcccagcactttgggaggccgagctaggcg

SEQ ID NO: 103654 - DNA, 113 bp, Homo sapiens
gcacttgtaaatgtatgcagagactattaaacagaaatagcacgcaataaaaacaatgaatatataataaacataatgtctttccataattatttcccatcagcttgaaaggg

SEQ ID NO: 103655 - DNA, 226 bp, Homo sapiens
ggtgattcttaaagggccaccgcacaattagccccctcagcaaggcccctaatgatacgtctaattagcagccccctaattagcaacaacttaggcataattacaaacccaccaggatccaaagcaaaggctcatgctcccttctccctccgcctccctggctttcaggagaaacaggggccagccgggagtcaggaattcttctaaagcatcaaaccaaaccccg

SEQ ID NO: 103656 - DNA, 291 bp, Homo sapiens
gtagttttaatgttaaaaacaatttaggaatagctgatttccaaccatccccagtggactgatctcagatttctatcttgaaacaaagaggttggaaatctgagatcagtccactggggatggttggagggacaggagtgattttaggaattggttttacttaagatctctcttgccaggtgcggtggctcacgcctgtaatcccagcactttgggaggcctaggcgggtggatcatgaggtcaggagatcaagaccatcctggctaacacagtgaaaccccgactctact

SEQ ID NO: 103657 - DNA, 611 bp, Homo sapiens
aggcgcacgcttggcgacgtcgaaggtccgtccgcagttaaggaagcttttgcagccggacaggtcgcgaagcacacatggggcagggtccgcgctctccacacaaggtggggcgccggttcccagctggtggcaaacgggggcgcggggccaaggggtcggggcgccccttaccaggccgtaagcggcaaccctggccgcctccggatgggcgctcggagccggctccagattcgcacccgcacctgagcccggaagctctgggatatttccgccgggcgctgtcagcattgaaagaggctcccgagactggggaagaacgagatctgatggtgcacaatataatgaaggaagtagagactcaggccctagctttgtccacgaacaggactggcagtgagatgctgcaggaactgttgggattcagtcccttgaaaccgctttgtcgcgtgtgggctgctctgcgctctaacttgcgcactgtggcctgtcaccgatgcggggtccatgtattacaaagtgctttgctacagctccctcgattgctggggagtgctgcagaggaggaggaggaggaggaggaggatggaaaggatggtcccacggagacc

SEQ ID NO: 103658 - DNA, 406 bp, Homo sapiens
acttctatgtggtgatgtctaagttggaagtgtttccagtcaggagtttggggtggaaatggctagttagctaatatttgttatgcatctcttatgaaaccagcccaattgtcactgctatacacggtgagcttttgaaagatgtgtaagtcatgccaccaactgtaacatgaggcagacgaacctagcagagttgaattgcattcaggaaaaacgtatttcacggtaggtgcaagctactgtgccagagatgacaaaatgagcaagacacaaccttaaccttaatggaacttgcagaacagagaggggaaggcaaagtatttcaaataagcatgcatgttgctttctagttataccaggttttctcttctatattcatgattaatggcactacttttcagccaga

SEQ ID NO: 103659 - DNA, 298 bp, Homo sapiens
ggtgggcgttgttcttgctctctgttgtctcatccagaccattaatactcccttctccagctgaatgctttgaggttcatgtctctaacctttcctattgatgtaatcaccgtctcattcattgacgattggagttcgtagattataaccttcctcttatgctctttgtctgttagcactcttagtgattttgatacctgtgtggatgagtcatccaaaaccttaacctcttacctccttaacctctttgtctcctgtgaacatttcttaactcttccctgattacaggctagaccct

SEQ ID NO: 103660 - DNA, 507 bp, Homo sapiens
tgaatttagattctcacgtgttttaaacatgtgtggtaactctattaggtaatcctttcattgctataaagaaatacattttaaatgaccagatcttgtgtaaactcagagcaagagcacacttatcaccaagaagatggcccaagtcattcatgagggatccatcctcatgaccaaaacaccatccaccaggccacacctccaacactgggcattacatctcaatatgagatttgagcaggaacaaatatccaaaccatattatttaacctctggcctatcctaaatgtcatatcgttctcacattgcaaaatacaattcatgccttctcaatagtcccccaatagtcccattaaattccagtatgaactcaaatacccaaagtccaaagtcttatctgagacaagacaagtcctttccacctatgagcctgtaaaataaaaaacaagttagttactttcaagataaaatgggggtgtcagcactgggtaaacattcttcttccaa

SEQ ID NO: 103661 - DNA, 384 bp, Homo sapiens
ctctgagcctttactgtgtgccggggacttcactttcatggccccagggaatacagaatcttagcctcatttcacaaatgagaaaattggggttcagagaagctcagcaagtggtggccgcttgtccaacataacacagccacactaggccgtctgggtccaaagtgtgtgtttggaaagcaaaatatccatctgtggctcctcgggctaagtggaatgtttggctccaactgagccagagaagtaggaacacatggatttgctctcaactcgggacagaggagacgggccaggcaggcgtggaggagaccctcaatgcagaggctctcaagaggtgctgccttcttcttcgaggacgggatgtttctgtaagcctttcttatc

SEQ ID NO: 103662 - DNA, 199 bp, Homo sapiens
tgattatttggtttttaggtcatcattaataggaaatataaaatttgtcagacaagattctatcttgaagttaaataagggcaaattgttacaatctgttgagactatttctacacaagcaggcaggcgagtcaacccccaacactcagtcacatgaccagaaatggtgaagcaggaccccacctgcctgcagtctgtg

SEQ ID NO: 103663 - DNA, 1147 bp, Homo sapiens
taatcatatttaaggagtgtccatcaggacagcttcacctccttgaggattaaagcctaacagtactgagctatttgtctgtcaaaatgtctgcaaaattgggaaagtcatcatcactcctaacacaaacttcagaggagtgtaatgggattctgacagagaagatggaagaggaagagcagacctgtgatccagactctagcctccactggagcagcagctacagcccagagaccttccgccagcaattcaggcagtttggctaccaggattcacctgggccccatgaggctctgagccggctctgggaactttgtcatctctggctgaggccggaagtgcacaccaaggagcagatcctggagctgctggtgctggagcagttcctggccatcctcccaaaagagcttcaggcctgggtgcagaagcatcatccagagaatggagaggaaactgtgactatgctggaggatgtggagagagagcttgatggaccaaagcagatcttttttggacgaaggaaggacatgattgcagagaagctagcaccttcagaaatcactgaggaattgccaagtagccagctcatgcccgtgaagaagcagctccagggagcatcatgggagcttcagtccttaagaccacatgatgaagacatcaaaactacaaatgtgaaatctgcttcaaggcaaaagacttctttaggcatagaactgcattgcaatgtttccaatatccttcatatgaatggctcccagagttccacatatagaggaacctatgaacaagatggtaggtttgaaaagagacaaggaaacccttcttggaaaaaacaacagaaatgtgatgaatgtggcaaaatctttagtcagagctcagcccttattttacatcagagaatccacagtggaaagaaaccttatgcatgtgacgagtgtgcaaaggcattcagccgaagcgcaattctgattcagcatcgacgaacccatactggtgagaagccctacaagtgtcatgactgtggcaaagcctttagtcagagctcaaatctttttagacataggaaaagacacattagaaaaaaagtcccataagtatcatgagggaatcaaagcatttactcagagctatttcagcacaagggaag

SEQ ID NO: 103664 - DNA, 610 bp, Homo sapiens
cctctccagtggcactggcaaggtgaaaagaaagtcagaaccaactctacagaatgctctgcagacaacccagtcccctacaaaagaaattctaagtgtgagcctgactcatatctgctcaccattttatcgagctctcaggctgcagcctaaatactttaaccacacggaggatggcctgtgttttgtaggtgtcatgatgtgaggcctggtggatgtgaagagggtaagagcggggaggaacaatgtgcagatgactagctaatcacatcctatagctctgggtgtctgaagggttagaggagcagttcctaaagggtcgacgtaaactagataaactcccagggtccatctcattgttaggagctgttgtaggtctaaaagatgacacaactaaaagcagtgaagctgtttctcccactgggctggagtaatgaccccccccccaatcctcatggctcccccaaaatgcaaaaatccagcttaaaaccacaccactgtgccctgcaatcagccagctttccatgtggaggggcctacattccagctaggtttatgaagcaaggtaataagtgaagggcttgccatttcccgaatggtggcggcagca

SEQ ID NO: 103665 - DNA, 493 bp, Homo sapiens
gctactctgactaattcctatgtagtaggccatgattctcagtcatttgttgattaagaaagtgtataatttcagaagctactgtgagttcagaactgtctttaaaattaatttatattatcacagattattttttatatactggaaaagtggactaggacctagtttggctattgcatattaacgcatagggcaaaatatgtttggtgtatatggattttaagagttttgtagcaaattcaagccccccccgccccgcctgcctcacacacacagacacttccatacctcccctcagtagaaactactgtaattaggggatactggttttaaagcagagtccttgaagatagcagatattttgatatttgtcagatgaattttggttaatgtattaagaggcttttagtggagtccaacccaagatttctatatcaagatcaactgttgttgtttgataaaaggcagagttgttagattagatgtctcttaa

SEQ ID NO: 103666 - DNA, 416 bp, Homo sapiens
agtctcactctgtcacccaggctacagtgcaatggcatgatcttggctctctgtaacctccacttctgaggttcaagcgattctcctgcctcagcctcctaagtagctgggattacaggcatgtgccaagctgcctagctaatttttgtgtttttagtagagacaggtttcaccacgttggcccggctagtcttcaactcctggcctcaagtgatccacctacatgggcctcccaaagtactgggattacaagtgtgagccaccgtgcctggcccctagaggttttttgattaagttcacccaaaccttccagaggcagaaagcactcaggttgtactgcacagaatacagaaaaaggtaaccatttctaaattgatctcacaaagcaagcaataatcctaatttgaaaatagagt

SEQ ID NO: 103667 - DNA, 377 bp, Homo sapiens
aattctcccacctcagcctcctgagtagctgggactacaggcacctaccaccagagtccagctaattttttttaatttttgtagagacagagttttgccatgttgcccaggctggtctcaagctgctcggctcaagcattctacctgtcttggcctcccaaagtgctgggattacaggtgtgagccactgcacacagcccactttgtgcttttgaactcattttctcttcctggatcacccttccattcctaaactcctgcacgaattctttccacatttcaattatttgtctgtgtctttctcaacattaaaatgaaccctttctattttatgagtttgcaactcttcagtgtgatgccaagtttaatgtaaagaa

SEQ ID NO: 103668 - DNA, 470 bp, Homo sapiens
tgaaatagtaattgcataaggaaggaaatcaatctaggtgtgtgtcagtggcaacacaaattctatcagtagcactggtgtaggtactgatacttcctggaatatcagaatcacatggagggctggttacaacacagattgctggacgtcatggccaaggttcggattctgtggatctggagtgggcctgagaatgtgcatttctaacaagttattggctgattcaggtgctgctggtatggggaccatatttggagaaccactgctgtaggcaatgtaattcttttcccaaggttgttagtgactgataagcttccaaactacagtacagtttttgtgtttcaggaaattgtgccaaaaccatgaaaatatactgtgtgtgggtgtctgtatatacagatatatataataatatataataatggagttctaatttctaggctcagatagttaataggacaggctttgta

SEQ ID NO: 103669 - DNA, 762 bp, Homo sapiens
gttgacaaagatgtggaccagataagtagatgctagtgtttggggtggaggactgttcaggtaggcactaatgttgtgtcttagtctgttttcttttaattctggaggctgggaagtccaagttggaggggctgcttctggtaagggttttcttgctagtggggaatccgcagtgcaggacatcacctgtcaagggggttcacgagggacagccaaactgacttgtaaaacagctccactctcacgataactaacccgttccctcaataacccattaatccatcaatccttgaatgcatcaatccattcatgagggtagagctctcatgacccagtcacctcccaaaagttctgcctctcaacactgctgcagtggggaccaagtttctaacacaagaattctagggaacacactcaaacttagcacattacaagtagtcagctcatttgtgactttctgtgacattaaaacttttgttttcctgcagcaactgagacagtgaccactgtttacagaagtcaccctgtatttgtaacttataggtttgtctcccctgaaagaccaggcatttttggggggaggcagggatctgggtttatttggacactgtcagcatttcagtattgaatgaatggcccacatagaactcactttttgtgtgtctcttgactagaatttctccaaaactttgtcaggatccttgaattcctctccacatcatggccctgctctctgagatcctgcctcagtcctcaggcctt

SEQ ID NO: 103670 - DNA, 355 bp, Homo sapiens
gaataggctcatcgaaaggcccaggactagcagtctgaagaaatgacatcaacaagggcagggacacagtcaatctggtacccagtgtcacgctgtgtttgctgaatgagtaagactaaattagcttcagcacacttatttataaaaagtagagggcaggcgcggtggctcacgcctgtaatcccagcactttgggaggccgaggcgggcggatcacgaggtcaggagatcgagaccatcctggctaaaacggtgaaaccccatctctactaaaaatagtaaaaattagccggacttggtggcgggcgcctgtagtcccagctactcggggggctgaggcaggagaatggcatga

SEQ ID NO: 103671 - DNA, 2199 bp, Homo sapiens
  misc_feature (1111)..(1111): n is a, c, g, or t
  misc_feature (1162)..(1162): n is a, c, g, or t
  misc_feature (1206)..(1206): n is a, c, g, or t
  misc_feature (1308)..(1308): n is a, c, g, or t
  misc_feature (1328)..(1328): n is a, c, g, or t
  misc_feature (2032)..(2032): n is a, c, g, or t
caaatgcagaaagagaaaaccaaatacctcatgttctcacttctttgttgttgttgttgagacagactctctgttgcccaggctggagtgcagtggcgctgtcctggctcactgcaacctctgcctcccgagttcgggtagttctcctgcctcagcctcccaggtagctggggctacgggcgcccgccaccacgcccagctaattttttgtgtttttagtagagacagggcttcaccgtgttggccaggatggtcttgatctcctgacctcgtgatctcccctcctcggcctcccaaagtgctgggattacaggcgtgagccaccacacccagccatgttctcactttgaagtgggagctaaacattgggtattcatggatgtaaagatggcaacatcagaccctgggattactaggaaggagagaggggagggagcaagggctgaaaaactatgtattgggcactatgctcactacctgggtgatggtatcatttatattccaaaccttagcatcatgcaaaatccctatgcagcaaacctgaatctaaaataaaagttgaaattattattttaaaagaaaatttacatataaccaggtatttggttcactgagcacacatgtagtaaaatcttccctagagccaggcaaagcttttcagtttttagtgaggagtgcggtgttctctcaccaggttcctagagcacatgatccagcttggactctcccaggatctgttggagaaacatgtaggctcacgatactgaatgagaggagggaccttctatgtacacaataaatacatcaatccttgttttcttacaatctgtttcaagtgaaatgggttcctggagcacaatgggttgagagacgctcttctgtgcggatgttccctccccatatctcattttgaaaaatgatcctggatcccctccccattgcatctttaaagcaaagtgacattaatgggataccactggagccggggcattatgcagaccagagtaaagcatgcctctcctatgctttgttgttactattagcttatccactcacgtagagagactatttttgctgcgtggagtctaccctcctgaaccattgtcacagnactcaaggaaggatgcttcggcgtgatggaaacaaaatgtgtgaattccanttctgccacctagttgcagaatgaccatgttagattagttgttncatgtctaagatcctcattatcttcatttgaaaaataggaataataatagcttcttcttagacctgatgagattactaaaatagatcagcagttttcaaacnttctggtttcagggtccctntgtactcttaaaaattattgagaaccgcagagagcttttgtttatatgagttatagcaatcattatgtatcatatgtcaagttaaacagaaaattatgaaggtttattcattttaaaatgacaactattatgctaacatttttctgtgagaaatatcttccaaaacaaaagaattactgagaatagtgtttttgttttaaatttttgtaagtctctttaatgtctggatttatagaagacaactggattttcaaatatgcttctgaattcagtgtgtcatgttatgttttagttggattatgtagcaaaaataaagcttcacatagatacgtaattggtaagagaagggtatttcgatacccttctcagttaaatgcggatgttcttatttgattaatcagtaaactttgataattgatgttgtcttaaaagttgtgatgtgcaatcagaagccatattgtgaactttatgtactcaatgacataaaatccattggtttaccttgcacttggaatgacttttttgcttttaaaacagtgtcattggccatttggaaaatattagttacctagattgtacagatctcctgaaaattgactcattttatcaaaccatatcaaaaaatcataattcttaatattaccactagtctcatcagataagtcttcagtattgagaagctgtcaagcttaggatggcagatntatgttttccaaaatgctaatttttgcttgaaaactcaaattttatcattggcaacaagtgttgttttcctggaagtgacaggctcacttcattcatttcagtaatatatctgccaaatgctcaagtctgaataaccacagtttatctaaaactgttctttcaagtt

SEQ ID NO: 103672 - DNA, 996 bp, Homo sapiens
gctatctgatctgttccctgcgggccttggccattcctgtcctggcctttactggcagtctctattctaaaatgtgggcatcccacatgaggtccagcttctcctgagatccccggaggtgcagctgctgtgatggtgaccttgtttagcagatgctccctgcagtccaaactcccacccatcgtcctgccctttgatccatttcccatgaactgcttacctcagttttctcatctgtaagatggagagataactgtaagtgcttagcacagtgtttactagcacagactactgctattactgtcaagtcacttttcctttgctgccaataggtcattttctgtttatggcttcttcagtatgaactgatcaactgtaacttgaaaatttccagacttaggacttttggactcatagtgaaaggatcctttcccaattcccttgatcggtttttcctttaaaaaaaaaaaagatatttgacatcttttcactttcaagttcagtttctcttctcctttttttctgggtgatggtttattatttaaaaaatttctatgtatatgtgatttaaaagtaaacccacgtagctgaaaatgtctcataggtttttcttgcattttcagttgacccattcactttgcaaatctttagagtattatatttaagacagcttgcagctgttttcttatatatattttacatgacaaaattatatttaaaacatattaaactttaaaaaaccatagtttataatttataagccatgtagcatatttctatttttgagacaggatcttactctgtcacccaggctggagtgcagtggctcgatcatggctcactgcagccttgacctcctgggctcaagtaatcctcctgcctcagcctcccaagtagttgggactacaggcacatgccaccatgcccagctaatttttatattttttgtagagatggggtttcaccacgttgctcaggctgtaatttttaaaaact

SEQ ID NO: 103673 - DNA, 428 bp, Homo sapiens
ggttgggtcacttgcttgctgtctgttcacctcctaaaatgtagtcctttgtctttttcatggcatctgatagcagcacccactgcagtgcaggacagacacagcactgtgcaaacagccatggatggtggattcaggtatcaccctggacatgagaccccgcctgagccttgccctgccctgctctcggccagcacattgtctcccagagtccacctcatctctgttggaacagacagcaaatccatgccaatgacaacccatgccaatggcaaatctgtgcaaaggccttccagagagaagcaaggcaggtcccagacgccgcccccaccccatttcatgacagtctctgcatctgcccccatgctgcagatacggacaaactggaaagacaaatgttctgagctgtctcaggaaacctgggaggg

SEQ ID NO: 103674 - DNA, 422 bp, Homo sapiens
tgagaaaattctttgacttccaaccattgtagaaatctttcctgttagttttgatagtagggtctttcggctatataattccaagcctgatcaactggcattattaagttttctgtcatggctagttcagcaactggagtagatatagatttatatgtggataattagctccagtttgataagtaaacaaagataatgtcatgggctgatggaataactgagttttggaaacttttgctatattgagtttggctatgctggtcataacgcattagagctggcggtgtccacaggagcacagtcactcagggctcgattttcttatgcaaaagacaaacgtgtcaacgggaacagcaattgtgataaggaagtaaaatatgggagggatctgtttcctgttggtgattgctcctacgttacct

SEQ ID NO: 103675 - DNA, 141 bp, Homo sapiens
cccctctcactgctccaacggccatgccccttcattcactagccttgtcttatcccaccctgaccctctgaacccttccatggtttactggagtctctgattccactccacttccacccttccctctaactttccacaatt

SEQ ID NO: 103676 - DNA, 247 bp, Homo sapiens
tgggttaaacatcttgagttccttcaactatacctctttgtgaagttttaaaaatcccttctccttcttgttggctctgtttggaatatgcttccatttatctgtatttttcttcaagtatgccctaaacacacacagcactaatgcaggttggtttcaccaatgtggatttataattctccttgttctacaacattctgtgtttcttttaaggcaccttaagaccaaagaaagttgttaacaggct

SEQ ID NO: 103677 - DNA, 686 bp, Homo sapiens
tctctgtagtcacttgttccagggagcagacaggctgttggactgtaagaatcaggtgcagccaggtgagactgtagagtccaggagtgtgccaaaagagatgcccctttgcatcatcaccattctctggtcctgatctgtctgtgatgcaggacatgggtgagacacatgctgcactggcatcccagcctgctcttacttgctggagggtagttaataacctcatgtaacacaggccaaggagcagctaaaccaaagtttaagaagaagaaacacatgcccatgcagtgaccagaagctttggcacccggctcatctcagttgctgcattgcacaatccccacaatttaaggtgatgggttggcccagtggggctcttgcatggtgcctatgactcagtttttgctagaaagatggcatggccccactccaggctggcacataggaggtgctcggcaagttttgaataaataaaccccttgggactgaggaaagaatgcttctttcgctttgcggagttcttcagtgctcagccagagccagattgtgaatctaggcagtctggcttcagggcctgtagactcagccacttaatttatacatgcaaggtattgggttttattgggggagtggtggtggtggtagtggtattattttttataaaagtaaaaaaaaaaaaaaaaagc

SEQ ID NO: 103678 - DNA, 134 bp, Homo sapiens
tcaggctacattttagctactcatctcaattgtcatctcaaatttactcatctcaattttcacaagagaacgtgactcctatctttaacttagtgaattgtttgggtcttcaaaagaaaaagctgctctggatc

SEQ ID NO: 103679 - DNA, 663 bp, Homo sapiens
gtcccttaacaggttcagcagtccatttctgaagcctgtgtcagaaaggcaggccccagggtacaaggatgtggtgaaaagacccatggacttaactagcctgaagagaaatctctctaagggtcggattcgcaccatggcccaattcctgcgagacctgatgctgatgttccaaaatgctgtaatgtacaatgactctgatcatcatgtataccatatggctgtggagatgcggcgagaagtcctggagcagattcaggtactgaatatctggttagacaaaagaaaaggctcaagtagtctggaaggagaaccagctaacccagtggatgatggaaaacctgttttctaacctggagctgctatcctgactttttctagagtttgaatctctcccggaactctgacctagagaggatcctggtacttctttgccatgtcctcattttcttttccaacaagaataataccttaactcacaaccaacgagtcaaagatgcatgtggacataatataaagaaaaaaaggggaagctgaggtttggatttatgccataaatgttgcccacatctttgttccatcggcttgatttaaagacaattccattagatcttttctaagccttttactctataaataaatgtatttacacaataggaatat

SEQ ID NO: 103680 - DNA, 723 bp, Homo sapiens
ctcgaactcctgacctcaaatgatctgcctgccttggcctccctaagttgttgggattacaggcgtgagccactgtgcctggtcaagaaatggaactcttacacactgctggtgggaatgtgaaatggtaagccacttcggaaaacagtttgacaatttcttatgctaaaaatacacctatcagatgatttagccacttctaggtatttacttaagaaaaaataaggcatacatccatatgaagacttgtaaataaatgttctcattatttttatttgaaatagctaaaactggaaacaacccaaatatccatcagcaagtgaatggataaacaaattgtaatatttgtatgcaatataacaccactcagtaatatgaaaatgaactactgatgtatgcaaaaacgtgaaattcaaaataattatgctgagtgacagaatccagacaacaaataatacataatgtattattctatttacataaagttttagaaaatccaaactaatctaagtaacaaagcataccaatggtatatggggcttggggcaggtgagacggattatagagaaaaaagtaggaggtgatagacatgtttagtttttttgcttgtttgtttttactgtggtaatggtttttcaagtgtgtatgtcaaaacttatcaaattgtacctaatttattgtagttttattgatacctcaataaaattaatagttacatacata

SEQ ID NO: 103681 - DNA, 97 bp, Homo sapiens
agggccaccatgcggatcccagggcttcaaaactctcagccagctgctcaccccttgtttcctgaactggagctgcgtattttcacagtgactaacg

SEQ ID NO: 103682 - DNA, 444 bp, Homo sapiens
cagggattgtgaagaccctgtttcccaagctgtgaagctgcaaggtcactagacagataaattcaagtcacaaaacaggtttttccttgaaaagaagtccacatataaaatcgtgtgtgaaactattctatttgaggtgtatttctgtgccctaggatccagatataggtactcaaatttctacaaactgacaacataatatgcttacttgaaaatattaccagaataattgaagttgataattaaaaatgaaagataaaaaatatgagaattgctgaagccttgtggtgggtatgtatgataaatgttagtttataattctccctatgtttgctaagattttttattttcataatatcttttaaatatataatttaagaattttatggaaactttcacatactgtatattagccttgttttacaataaaacaagtcaaacatc

SEQ ID NO: 103683 - DNA, 500 bp, Homo sapiens
agaactactctgtggatattgttctttccactgaataagtttaatttcaaaggacgcaagttatatcaggacctgtgtaaactgtctagtccagtacctgggcacagagaaagcattcaaaatgttcatgcttttctccttcctttcttggcattggcaaatttgttaactttacacaaagcttattttgggagatatatagaacttggacctattttacttatctaaaccggatgagtcattttgatagaattgatagagtcacttcttccctcatgagataatacagcttctcaagcactttgatcctctgatattaggtgaaaactgaaaaaggtttttttggaactcagctttctaattttaactttaacctgcccaattactaagtgtgttgagttctatggataaaactacagggtcagtttgtggatttcagggctcctttctgtattagaggattggaaagacaatagactaatctggagaattgcatctga

SEQ ID NO: 103684 - DNA, 181 bp, Homo sapiens
aaggctggatacctagtgtgggagatttactgcgaagctaatgggcgcttgaaaggctgagtgtggaggggaagccaggttgctattagaatacatctcaggtaagttgtgcatggagatcaaaagggagagaagccagtctccaagattccagtaatgtgccgtggtttccgaaacttaa

SEQ ID NO: 103685 - DNA, 491 bp, Homo sapiens
aacatgtgtgagacatgatgcagctcatcaagtaattattgaatacttggtgtgtgtagcttcctgttctaggcactggagattcaaagatgactcacgatgtgtttcctgcccttggactcaaaatttaactagtaaaactggttaaaacaaacacacaaaaaattaatgcaataactgttatagtggaaagaaatgagctcacagctaaaggagtaaatcactccaggagtatctcatttcagctgggtctaaaggattagcaaagcattaacaagtgacacgaagacatgtaaggtgaagagccatgatcaaaggcataaaagtctacaagagtatttgggggacagcgagtcatcttacaccattggatgagggtgtagagtagtgatgctaaacctttaaagacatttggaaagctttcattgtctgccaacatcaactgccaagcctaaccacttctaacatttaaattttttttttccccaaga

SEQ ID NO: 103686 - DNA, 579 bp, Homo sapiens
gtgactacaactgtgtgattgtccaacttcagtgtccattcatgtctcttagattcttgaagtagaggccagttggcccagcttctcctttaggcaagcccacatttcagaggtcctagcagatgtgcttgagccagccctggcccaggaggccgcccggtgcagcccctgggcccagagccatggtgaggcgatccttagcccagagggaggcgggcatggacagtgctctgtggtggcctttccaccctccaaaagtgattgcttcttgatttctctttccctgagtctgcctcccaacttcccagactttaagctgaaaccttctcctatttcattgaaaaaaacagaagcctttagtcccccaaccctcacagtacggagccacccctcgcccccagtgccatcttcctacctcctcttgttgagttcaaagggtcctttgcctctcgaaggcaggtctgtccattcagcttcttgtcttgctcctacagagacctcttcttttttcagtgtcagggttttctcccattctattagacccctcaaacatcattctctagtttcgcttattattta

SEQ ID NO: 103687 - DNA, 372 bp, Homo sapiens
aaacataaactctgtagataaaggatttatgtatcaaaactaaaattatagaattcttagtaaaaataatgaacatcttttagacttcaggactgagaaagatttcttaaggcacacacaaaaatttgactaaaaaaacattgatttgattgtgttaaaattaagaacttttgctcatgaaaatgcatcttaaataaaaagacaaggtataaactgggagaagatattcacaatacataaaatcagcaaaagataagtagaaagaatatattaaatatcctatagatcaataagaaaaatacaaccaatctgacagaaagacaaaaggccgggtgcggtggctcacacctgtaatctcagcactttgggagg

SEQ ID NO: 103688 - DNA, 244 bp, Homo sapiens
tattttttttgtagagacaggaattcaccatgttgcccagcctggtctggaactcctgggctcaagcgattcacccacctcagtgtccccaagtgttgggattacagacaggcacgagccaccacgcctggtccacgcatgtttatttgaaagtattttgacacattgcagccccaagtatttcagcattctcttataaataagagcaaaatgttgttacataaccaccataccatttccccac

SEQ ID NO: 103689 - DNA, 1128 bp, Homo sapiens
atttgaagtaaatggcaaagtttactgactcctatgtcagttagtgataaaaaccaaagggaaaaacctacattccgggttactttgcagaacagtggtagattcttaggcctacaagggaggcatagactatactcaggagaaaagctgtttaataaataagattcaaggtgaggagtaggtagaaaagacagagttatttgattttcattttttaaggtattaaaattttttactttatatatgaaaatgtcatgaaatttataagcaataatgtattgatactcaaatttttaaaaatttttaaattttaaaatatttaatcaacttctattatttttcctcttctgggatgaattaagtggcaaacttggccattctaatatttactcactgatagccaaattttatagcgtctctatctaaagaagacagtaccagattccatttgatctagggagatagcactacaaaacttttttccttgaaaaaatattcctgaaggccggacgtggtggctcacgcctgtaatcccagcactttgggaggccaaggtgggcagatcacttgaggttagcagtttgagaacagcctggccaatatggtgaagccctgtctctactcagaatacaaaaattagccagatatggtggggtgtgcctgtaatcccagctacttgggaggctgaggcataagaatcagttgatcccaggaggtggaggttgccatgagctgagatcgtgccactgcactccagcctgggagacagagcaagactctgtctaaaaagaagaaagaaagaaaaaaagaaatattcctgagacattaactggatcccttggttgaaacagcagaggaagcagatttttgaacctgaagaaaaggcacatagaaaccaaaaaagttctcaacattattttacccccttgcagaagctagaatctcccagtttcagctgttttctcttctcccagcttcctaatgtacttactccctgagccagatattctccaactttggaagttcctcagaactcctgggaagcatgattacaaagtcagaattgtaagtagagggtggtcccagacagcaggctaccggaaccatcagacctcactggaagaaaca

SEQ ID NO: 103690 - DNA, 407 bp, Homo sapiens
attggcaataatgtgcactcaggagaatataaaagggaattctcacatgctgctgttggaagaaaagttcagtaaaaccactctggaaaacaatttggccttttctactaacaacataccttatgaccaagagatttcgatcttagatatatatccaacagaaatggcttcacatgtgcattaaaaaacacatatgaggccgggcacggtggctcatgcctgtaatcccagcactctgggaggctgaggcaggtggatcacctgaggtcaggagtttgagaccagcctggccaacatggcgaaacttcatctctacgaaaaatacaaaaattagccaggcacagtggcgggtgcctgtcatcccagctactcaggaggctgaggcaggagaaccacttggaacccgg

SEQ ID NO: 103691 - DNA, 332 bp, Homo sapiens
gacaaaataaaagcaataagaagtggaacaaagatacacaagatgaataagagcttattaattgtaaatcaaagttattataatcatcattgtctaataatcatgtatacagaattaaataataaatcttcatctctttaagttgtatcttaaacattaaatcctttttaaagaaataagagccactatttattgcatgcctgtcacatgccaggcactctttcatatattatctcaatactcaaaaccactagagagagaaaaatattatatcttagctattatagttgagggaaccagggctctcaaagtttaagtatacggcctctata

SEQ ID NO: 103692 - DNA, 519 bp, Homo sapiens
gagaatgccttctcgccgggctctctggtgcaccccccggtgatttccgggctcccctatgtaccccgcgttgatttccggcgaggccagggctgggtggtactcagtggggagcccgaggcggcgggcggatggagaaggggcgagccgaatgagaaactaccccgacagcctccaccccacacacagccggctccgcgggatacccggggagtggctgtttagccctggaccccgggtgctcggctgactttttcctagcgggggcgggtgtgaagggtgtggagggagggaggtggggtaggatggatggatcctctgcgggcaggaaggaggcaggtgctagcatagaggcggaccgttctaaacgccaccggtaaactccccactcctctgggctggaccggcctggccgtagagtagcccgacacgtgggatctcccgggattttcggggtcgggaccccctctcccagcggttctactgagcaaggcgggaggacgatcgtggagacgaggg

SEQ ID NO: 103693 - DNA, 124 bp, Homo sapiens
ggagtgagaatggaagaaaaggctttgggccctgggagtgaagcccaggactcagaacaaactcaggtagtggggagaggggatgtgtggaaaacacacaggtatagaagtctgaacacgaacg

SEQ ID NO: 103694 - DNA, 747 bp, Homo sapiens
aggcatgagccaccgtgaccggccagctgtcattatttttaacattaacaattcatctattaccttagctatggatggtgctatgtaatttgccctgcctgctccttcaccttcacatcctgccactctcccctgttaagtcagaaactgtgaagtgtcttagagtttgtccttcttgcaagctaataggttagcttgccacagtttcatatacatatactgccagaagacaccagactgctgggctggtgccataaaagatttgctactgaaagcacaaagcatttacaacaccttgtgtcatttccccatgccccatttcccgtaaggcaacagatgtttcctgtgcagtgggttgcatcacaggagaagaatcttaaatttagaagcctccaagcttttatcaaagctgctggtgacctacccattcctcccattcaggagagaaattattcattatcttgaaatgtaagtgaatttcctctgggaagaggaagaaggcccctctaggtttatcaccctggaatgtaacacactctggggtttgggaggtggatattaatatcattatgcgctttctcacctacagaagactagtctgaacttgtggcaggaacctagccagcttgattgcctgctaaaacaaaaatatcaacattcttaataggatttaaataagatccagcatctcaaaacagaatattcaaaatatccatgatacggtccaaaattacaaagcaaacaaac

SEQ ID NO: 103695 - DNA, 548 bp, Homo sapiens
tcaaattatgaggctgggaatcatttttaatctctctaatgctgattttaatacattaacctatataacatcaacttcacagtaccagtcatattctttccacattctcctataagtttaggtttaaaaaatcagctaagacctttgatcacatcagagcacagagactgatctaattttttttttttttttttttttttttgagacagggtcccactctgtcacttagactggagtgcagaggcgtgatctcggctcactacagcctcgactttgtgggctcaagcgatcctcccacctcagcctgctgaatagctgggaccacaggtgtgcaccaccacacccagctaattttttttgtattttttctagagatgggtctcaccttgttgcctaggctgattttgaaatcctgggctcaagcgatccattcccctcagcctcccaaagtgccgggattacaggtgtaagccagcacgcctggcctaaaaatgtttttaatctgactttatttctatcaacagtgaagggagcataactcagttaca

SEQ ID NO: 103696 - DNA, 106 bp, Homo sapiens
actgctctccagtctgggtgacagcgagaccccgtctcaaagaaaaggtatctataaaaacattagattctatcttgtctgaaaaaattcaaagcaaaaaagtttg

SEQ ID NO: 103697 - DNA, 478 bp, Homo sapiens
agttagaggcaggtaaggcgcctgcttcagggtaaaactagaacaaaataggattcaaaaggcagatcacaagtcaggaatgtaatatctggagttgttatgtacctgtctgcatttgttagtggttcttccaccatttgaccctgctctgtagattaatgcctcccttgctagcctttctgcttccctatggaaaatcttagcaacaaaacattgagtgcatctgagaaatatgaaaagttgagcattcagtgtttaggaggggtggtaaccaaggcagctctgtagacacaatgattgaagcacttggaaccttcagacactgtgagtctccattaagatgtttcaattcccaggataaaaatgtctgattattccaggtttcttcctagatgaatcaggtatttcttggagtgaaggtagggggtgggatgtcatgtagcacagtagggacactgaaggcccatcttatgcatca

SEQ ID NO: 103698 - DNA, 363 bp, Homo sapiens
tagaggttaaaaaaaaggtcccacattatgaaatgttaaaaatactggacttaatattcaaaatatcttttaaatgcatcgttgagctgacaagaggtaaggaaactttccagaggcccagaacaagaaatcttgaatccagggaggtaagttagtagtgatactggctcccgtgctgagggttctggtatttgtaagtccttcaaaacccagaactttggcttttgcagggtggccatagggtaccagacggtgtctagggatcaagcagttgctaagtaagatccagagacctttgtgtaaagctgaagctccctgaaagctgtcagtgggtttaactaggaaaaagcaaaaaacctatcc

SEQ ID NO: 103699 - DNA, 641 bp, Homo sapiens
gggactacaggcgcctgccaccatgcccggctaatttttttttgtatttttagtagaggcgggtttcaccgtgttagccaggatgttctctatctcctgacctcgtgatctgcccgccttgacctcccaaagtgctgggactacaggcgtgagccaccgcgcccggcctcgtgtgatttttaacaaaactttaaaatttggaataatcaataacttcaaatccataggaagctataaatatagtacacgaaaaaaaaaaaaaaaaaaaaaaaaatttttgggccgcgggacccttggaaaaagctttttcaagaaaccattgcgtttggggcgccgcgggggccccagtgaggttaggtgtgaaccctgtggatcatagacgcggtgtttccccagagggaaaaaccggggggcacacaggaaccagagtggctctgggaattcctcccccaattaaaaaagccccggcggggggcacaccggaagctgctttctgaaacaaattcccaaaagggaagtcccggggaggctccataagcgcagatcctctcaacagggagtttcaagacggagactcccaatataaatttagcccgcagacggcgggaaacagaccaagacagcagacacacacaaagagc

SEQ ID NO: 103700 - DNA, 369 bp, Homo sapiens
aacttaatgaattatgacattatagtatataaaattgatatagttttagtctccagtgtatagtgggtttcatttctatgtcagcctgcagaattattcaaataccacattctcatcctcccacgggaacaaaggaaaatcttaccctcttgatgctacagtgtgccattcaaaaatattcgtgatcatggatttaggaaagattctatgatatgacaatacaagcactaggaacaaagaaaaagtatgtaattgagactgcattgaaattttaaacttttttgtgtttcaaaggacaccacaccaggaagacattgaaaagcatatagccatgccagcctgaatgcacctgatcttttttgatctcag

SEQ ID NO: 103701 - DNA, 617 bp, Homo sapiens
gactctgtctcaaaaagagagagagagaaaggagggaaggagggaagagaaggaagggagaaggaaaggaagaaagagagagagaaaataaatatattgtaaaaattcaggatcatatattcccatgtccttaatggcaaataggcatggtctgaataagtgatttgttaaatatcatagatttgggggtagttactggaccaacactcagatttcttggcttcagaccaagcagtcttactctattttcatccaagtgattttttaaagttttagtgttgttaatgattgctctattttccgtttatggttagctttattttattctagtcatttaaaatatatatagattagcattgtgtcatagccagtgttttgccttaccagctcttactagctgacaagagccgaatctgttaaacttttaggaatttagcaagtatggttgacatcacactgatatcttaaaattggctattatgagctgggcactgtggtttatacttgtagtcccagctacttggaaagccaaagcagaaggatcacttcagctcagtagtacaagtccagcctgggcaatgtagccagattgcatctctaaaaaaaaataaataaaa

SEQ ID NO: 103702 - DNA, 628 bp, Homo sapiens
gaggccaagttctcaattccacattctctgtctccagtggtgcagctgtggctctgaaaatgctgttctgatttgaaacatagggagtttgtttggaacacatcttaagtggaattagccctcttagtctacatttagatttgttttatgaagctctaatatggcgagcagccccatccatttatgaatcatgaaagcagcattatcaaggagctgggatgctgcttctggtgacagtctggagaagatatggggcagtaaattttcaggtcttaaattgtaccaggaggagtcttgtgctgccagagggcatgacttagtagtctaattaagtgtgcaatgcctggcctcccaagtccttagttaacatctctagtagcccaggggctgggaaagaaaatgacgcatggtcctctggccagccctgcattgactgtcttactcatgtaaatgagggggcatcctggtgcagataacggcttttatttctctttggcttcgggtgtgtcatagttgggggtgttttattacatccatttattggattcatccaccaaatatctttgcttcccaattgttttgtaaaaacagattcatagtaagtttaatctgccttctatcataaaaa

SEQ ID NO: 103703 - DNA, 278 bp, Homo sapiens
gtggatagagggatggatcggtagatagatggacagggggatgcgtggacagacgaatgaacgaacaaactttctgagtgggaaccactgtggtaggctggacccttggctcaagatctcagggaagggagcagctctttgggctcctcaagcaggctgggacacgctggccggagctgccccacctcgaccgccactccattatcaggcaagctcagttatgcagtaggctctcttaccctcttgctttgtgggctctgggatagcaagagaccccc

SEQ ID NO: 103704 - DNA, 105 bp, Homo sapiens
actcaaaacaatcccgacagaaattccagccagcttttttgtagaatgtgacaagttgattctaaaacagaaatgcaaaggacctaggactggtaattgttgaag

SEQ ID NO: 103705 - DNA, 470 bp, Homo sapiens
tcatgggacatcaaactgtctgagataatatcttaaaacactcatatacacatgatagcccccaaccccttcccagcctcaggtgggagtgtcaaacctgcttgggttatttttttccccgggctaaatgtttctaggtcacttccatcctcccccactgagagctcccatacaggaaacgctaaggattccactccagtccccgagcctccataattaatgggatcactggaaaccagccggaaggatgctaggggcgaggggtcttatctctctggtctccaggcagagaagcttctcgccagatgagatgctgagtctatgcaggccctcgggccacatctgctgacactgatccagctccttactagcccacctggggctggcagtctcggggcctctttctcttcctgccccaccaccctctggagctgtctctttctataattcttccctcgtcgagtctatta

SEQ ID NO: 103706 - DNA, 655 bp, Homo sapiens
aaaaatacttcagtaaattcaagtaagaataaataattcttattctgtaataagttcaaaaccaaggaaaactgtgtgtgtaaggatcaatatacagttgtcctcagctggttccaggcccccccccaccccttaccaaaatctgctcatactgaagtcccgaagttagccctgcaaagaccctacagaacctgcacttaggaaaaggcagccctctgaataccagggattcgagtccctgaccatggatatgtgggtccacgtggttcaaacaagttttttttttgagacagtgtctcactgttgcccaggctggagtgcagtggtgtgatctcggctcactgcaacctccacctccgcctcccaagtagctgtgcctacaggcgtgtgccaccacacccagataatttttgtatttttagtagagaccaggttttaccatgttggccaggctggtcttgaactgctgacctcaggtgatccacccacctcagcctcccaaagtgctgggattacaggtgtgagccaccacgcccggccaagtttgtcattttgaaaacatatccttgttggattataaaagtaacttgtgcattatagaaattgtgaaaaataagacgggcacagagacagcaccctcagtcataattccccc

SEQ ID NO: 103707 - DNA, 776 bp, Homo sapiens
aagggggtatgttctgagaattgacttattaggcaatttagtcgttgagcaaacattatagaatatatttacacaaacctagatggtagagcctactacacacctaggctagatggtgtagcctattgctcctaggctacagacctgtatagcatgttactgtactgaatactgtagacagttgtaacataatggtaagtatctgtgtatcgaaacatagagcacagtaaaaatatggtattataatcttctggggctactgtcgtgtatgtggtccgtcattaattgagatgtcatgtagtgcatgacagattgctctgggttcattcttggttaggaaggacttccagtaagaggtatataagaaaaatgggatgatatggggatatgtggggaagtggatgtgtttctgcgagagactgtgttgacctcgggatgccaggttcaagggcactgcctctataaagatggatctgacctgtccttgtagatcctatattgtgacaatgtaaggattgtccaaggatgaatagcacattaatctcccataaccttaggtgcctcactaagtatgattaagtcttaggagtgagaataattttcattattttggtctgtagtcagcttctgatcaccaccacaatttcaaaagatctcgatttagtgtttccctgcttctgaataggccgagtgactgccttctttctcctcagtcttatcttgccagcattttaaatgtaattgatatcacctgcaattttatgccgtcctaaaca

SEQ ID NO: 103708 - DNA, 479 bp, Homo sapiens
tggcagttctcaggagctgggtggaggaataagagaggaaatgagttgcttaatggatcattaaacaggcccacatatacacaatactgtatataaaaacctcaaatgttttcaagattcttcagtttagctgaggttaaattgtccttcattcctatccatgtgactgtaacaagttgcattttctttcatgacatttgaacgtaaaacttgaatgtctcacatcacaaaaaccctgttttatggtcagacacgtatggagagagttggtcctggagatggaagataagtggaaaatgatgcttacttatgtcagagagacatgtgcctaatctatgaacatttacacataccagtgagtagaaaattcaatatcacataacaaatgctatcttatttctgaggactagcaggtaagtaaagtcactctgtatataggccactaaatccaaaaggtaggagacattatccctgtcctg

SEQ ID NO: 103709 - DNA, 326 bp, Homo sapiens
cggattcagcaccatggacagcgggcccatgacgccttgcctctgagtcactgccaccagggatgagagctgagacatcagagctgccccaaaatctacagcatttattctaatgtttaagttggggcaattccaatacatgagcaagtattttccttggttatggcccaaagcactgccttcttcactgagaggatacacaacttacatctactaaaatctgtttcagtgttcacctttacaataaagccatgagacttttgtaaaaatagaaatgattctgccattgacacaggaactgaaataatcaaaactgatacacagaa

SEQ ID NO: 103710 - DNA, 635 bp, Homo sapiens
gcagtaggccagagatttgctgggcagggatcagtacataccgtgtaagccctgggaggattgcttaaacttaggagtttgagaccagcctgggcaacacggtgaaaccctgtctctgtaaaaaatttttaaaaagctgggcacggtggctcaagcctgtaatcccagcactctgggaggccaaggtgggtgaatcacgaggtcaggagttgaagaccagtctgacaaacatggtgaaaccccgtctcaactaaaaatgcaaaagttagccaggtgtggtggcacgcacgtacaatcccacctccagagtagctgggaatacaggcatgcgccactacacccggctaatatttgtatttttagtagagacgaggtctctccctgttggtcaggctggtctcaaactcttgaccttaggtgaatcacaatgatctttataaaagaaagagggtaggagagtcagaactggagcaggagatgtgatggaagccgaggtcagagagggagatttgaagatgcttcacttctgactttgaaaatggagtaaggggccatgatccaaggaatgggggtggcttctagaagctggaaaagccaagagaaaatgttagagcctagagccttcaaaaggaatg

SEQ ID NO: 103711 - DNA, 685 bp, Homo sapiens
gcagtaggccagagatttgctgggcagggatcagtacataccgtgtaagccctgggaggattgcttaaacttaggagtttgagaccagcctgggcaacacggtgaaaccctgtctctgtaaaaaatttttaaaaagctgggcacggtggctcaagcctgtaatcccagcactctgggaggccaaggtgggtgaatcacgaggtcaggagttgaagaccagtctgacaaacatggtgaaaccccgtctcaactaaaaatgcaaaagttagccaggtgtggtggcacgcacgtacaatcccagctacttaggaggctgaggcaggagaatcgcttgaacctgggaggtggaggttgcagtgagctgagatcacaccactgcactttagcctgggcaacagagctagactcttgtctcagtaaataaattaaccgagtgcggtggtgtgcagttactaattccagttactacagaactagactccatctcaataaattaaataaataaataaataaatgaataaataactgagtgtggtggcatgcacctgtagttccagttactagggaagctgaggtgggaggatgttttgatctggggactggggaggcttaggttgcagtgaggtaagattgtgccactgcactctagcctggataaaagagccagacactttctcaaaaaaaa

SEQ ID NO: 103712 - DNA, 366 bp, Homo sapiens
atccctgaaaaaaaaatgctcataacagaatcacttgaaatagtcaaaagctggaacaaaccatttgcctatcaataatataatggataaaaattatggtgctttgatacaatgggttattgttatacagccatgagaataaaccagccagatctataaggatgaatatgacaaatataatgctgaatggacagaagccacacactaaaagcacatactctatgattccatttgtataaagttcaaaaaaaggcaaaacaaatctatggtgatgaagtcggaatagtgattacctttgggcatggcgattttggggggacatcacgaaggaggcctcttgggtgctgtcaacattgtatatctcta

SEQ ID NO: 103713 - DNA, 328 bp, Homo sapiens
aagaaaatgtcagcagggagaaaagtgcacaagtttcagtagcagagggagacattaatcctaacacaaatcaattaccgtacgaactttacatgtgattactgtaccattagtggtgctatttgtaatcacaccagcctcctagactttagcaaatttattatctgtaatgtatccccctttggccctgtctaaccctgtttgaggcaatactcaggacagttcctatactagcggcctcacagagcctcctgatatgccctgcacaagccctgagcacgtcggggaaagagaggtcctaacagcacggtagttccatattgccagt

SEQ ID NO: 103714 - DNA, 352 bp, Homo sapiens
tgtgccttagcctcccgaatacctaggaatacaggtgcatgccaacatgcccagttaatcttttaaatttagttttattttttctactttctttaatttttatttttgctctttcagcagaatcattttctaacaattttttatagagatggtatcttgctgtgttgctcaggctggtcttgaactcctggcctcagcactgggattataagtatgagacaccacacttagcctcacccgtctttttaaaactttaaagtacttggctgcaggaaacacttttatggaaagcaaaaggtaaatgctggaataaattcagggaacagtcataaaattttctactttccttctg

SEQ ID NO: 103715 - DNA, 441 bp, Homo sapiens
tttttttgagaaaaagtctcactctgtaccccaggctggagtgcagtggcgtgatcttggctcaccacaacctccgactcccgagttgaagcgattctcctgcctcagcctcagcacaccactgcacccagctaattttttgtatttttagtagagatgggatttcaccatgttggccagactggtcttgaactcctgacctcaggtaatctgcccaccttagcctcccaaagtgctaggattacaggtgtgagccaccacacccagcctcaaatatcctttaaccttttcagagacacgaaatgaaaggcattaccatcctctttacttctctccaaagtgagagctgttgatgacacagcatcacctcctacatctaggcttttatttggggttgttttttttttgtttttgttttttttttaataaaagagatggagt

SEQ ID NO: 103716 - DNA, 424 bp, Homo sapiens
caccccagggccaaatattaagacattatagctacaaaacttaattgacaaaccacataaaagatcgtaaagcaaagaatagtggagagagatgatttatgaaagctaatcgtgtccagaaaagccgggcctcccagggctggtctgggctgcctgaaagcagcccagtggacaggttccttgttcggtgcaaccaattcaccagcaccatcgccaaaccttcacaggggattgtggagaaattgaaatatcctgagtgtgtaccagataggtccagaagtgcctggggagagcaacagacattaatctctcaagtagttcactgaatgcccactatgtggcaggaactgctccaagctccctcggggagtcctctcggggaggacctcagaagttcttgtgtttgtttgttttatttttattt

SEQ ID NO: 103717 - DNA, 370 bp, Homo sapiens
aagggtttgcctgagactcatagccaaagctctgtgactttcaaaatgagactggggaaataatcccctgctgttactatgtgattcaaggcacctggtcactttctttccttactttctttgtaacactaaaggacagtcttctcttcttgttaacctttcatgtaaatataagttaatgtatgtatttgtattaggagtaagcaagtgtgtgtgtaatgaatttgtctttcttgaaatgcaaagggatgttagacttaactattatcaaaatgtaacttccaaaaagaaattttaaatagtacacattgtctttactatggtaagcaaactatttcttggaagggatccatggatcttgacttacttt

SEQ ID NO: 103718 - DNA, 2434 bp, Homo sapiens
  misc_feature (1718)..(1718): n is a, c, g, or t
  misc_feature (1751)..(1751): n is a, c, g, or t
  misc_feature (1820)..(1820): n is a, c, g, or t
taaaaaaaaaaaccttgtggcaaatcactttgcaaagcagacttactttataaatatgttgcccttttgttttaaagccagattttaaagtacggcttgaaaataggttatatttcagaagttagtttagatgaggtatttggaacttggaaagaattttacaggtaagtatcagtaattcgtcttatgggtaaactgtgcatccatctagaattagtatgttttaaaagaagaatcatgaaaataaaaattaaagttttcagtgaagtagaaaaggtaattcagacgattagaattatccttaagatttcaagtaatatataggtaatgagaaatgaaactgtttgaaaaataaatagaaatgataggaattttgaattatcagaagttgggagtacttttacatttcctgcttaataaaatgggcctgagttacacaaaatatttcagcttagtcaaatttttgctaggttgggaattataatctctgtaaatggggcctttgtgtcagcaagagcttaagacgtaaaagctcctctgttccttgtaataaccgagcggggcaggttctggccttacctccattttacacctgaggaaactgaggcacagaggtccagaccttggcaaggtcatgctgttcctgagctcgggtttgaagccagctgttggagtcccaggtgtgtgctcccacgctcttactgtcacctccactcttagtgggtgagggatggaaaatagggctccaagtgctgtatgattaagcctgattagtggcgaatgaaacccgcacttcccagataaactgcaggagtcccaggaagtgccctaccagccccttgactggctgggaacattccccttccagtgaccttggcaggaccgacgcccttggatgagcggctccaggtgtagctcaggcatttattccagccccattgccagggcactgccatctcgaggggttctgaaatgctgcttggagaggagagaaaagtgttgaagtcggattgtttagatcagtgctggccaatagacaaagcaagccccatgtgaaattttcccttttctagggaccatgttaaaagagtaaagagaaacaggggaaaactgattctaataatatgtcctaaatacaattttgaaatgtaatgaatatttaaaaattgagatattttacattcttttttcataccaaatctttgaaatcaagtgtgccttttacactgacggcacctctcaattcacacgagccctgttttgtgtgctcagtaattgcatgtgactcgtggctcccacactgatcagtgtgggtttagatagtagctaaatggtgacataacagccccactaatgctgaccatccccttcccctagatggcaagagacttctggggccccagtggctggactatgactgtgaccgagctgtgatcgaggactgggtgttcagggtcccccatgtggccatattcctgagtgtggtcatttgcaagggctttctcgtcctgtgctcgtctcttgatctgactaccctggtccctgagcgtcaagtggaccagggcaggggttttgagagcatcctggatgtcctctctgtcatgtacatcaacgcccagctgcctcgggagcagcggcaccgctggcgcctgctcttttcgtctgagctccatggacacagcttctcccagctctgtggccacatcactcaccggggnccctgtgtggctgtcctcgaggaccatgacaancatgtgttcggtgggtttgcctcttgctcttgggaggtgaagcctcagtttcaaggtaagacttggtgncctgaaccttgacgagtggcacagcacgggcaaagagctctggagaaagggagagggtgggggtgctaaatagggctctcccatcttctccaagtgtttctctagacgcagtcggggcgataggaaaatgtgatgctgctctgtggtgtttatcacatcagggttcttcaggacaggccgtgtgacccccagttttcaggtgagggcacgggcccagttattacacggtgccgggtctatggggcgtgggagaagtcaagccacagatgcctccgaggggaccaggagatggtaattggttcagatcggacattttccttccctgggccttcctgcccctgcccccaccgccacgcgtttgcttgttggaatttggaagctttgtgcatgaccttgaatgcactggatgaaaggttctaagtaaattcttttccttccctcaaggaagaatactctgatgaaaagagtcctttaaaaatatttaaaacacaggccaggtgcagtggctcacacctggaatcccagcattttgggaggctgaggcaggaggatcacttgaacccaggagtttgagaccagcatgggcaacatagtgagaccttgcctctatctta

SEQ ID NO: 103719 - DNA, 1672 bp, Homo sapiens
  misc_feature (956)..(956): n is a, c, g, or t
  misc_feature (989)..(989): n is a, c, g, or t
  misc_feature (1058)..(1058): n is a, c, g, or t
ctctcgagaggagcccgtgggctgctggaccggaccggacagcaccaggaagcccggcaggagaattctgccagatatcaggacagatggggaacagcagaagccgtgtggggcggagcttttgttcacagtttcttcctgaggaacaggcagagattgatcaattgtttgatgctctgtcatcagataaaaacagcccgaatgtctcatccaaatccttctctctgaaggcactacagaaccacgtcggggaagctcttcccccagagatggtcaccaggctgtatgatggcatgcggagggtcgacctgacagggaaggcgaagggacccagtgagaacgtgtcccaggagcagttcacagcatccatgtcccacctgttgaaaggaaactccgaggagaagagtctcatgattatgaaaatgatttctgccacagaaggtcccgtgaaggccagagaagtccaaaagtttacagaggatctggttggctctgtggtgcacgtgctaagccacagacaggagctgagaggctggactgggaaggaagccccagggcccaacccccgggtgcaggtgctggctgctcagctgctctctgagatgaagctgcaagatggcaagagacttctggggccccagtggctggactatgactgtgaccgagctgtgatcgaggactgggtgttcagggtcccccatgtggccatattcctgagtgtggtcatttgcaagggctttctcgtcctgtgctcgtctcttgatctgactaccctggtccctgagcgtcaagtggaccagggcaggggttttgagagcatcctggatgtcctctctgtcatgtacatcaacgcccagctgcctcgggagcagcggcaccgctggcgcctgctcttttcgtctgagctccatggacacagcttctcccagctctgtggccacatcactcaccggggnccctgtgtggctgtcctcgaggaccatgacaancatgtgttcggtgggtttgcctcttgctcttgggaggtgaagcctcagtttcaaggtaagacttggtgncctgaaccttgacgagtggcacagcacgggcaaagagctctggagaaagggagagggtgggggtgctaaatagggctctcccatcttctccaagtgtttctctagacgcagtcggggcgataggaaaatgtgatgctgctctgtggtgtttatcacatcagggttcttcaggacaggccgtgtgacccccagttttcaggtgagggcacgggcccagttattacacggtgccgggtctatggggcgtgggagaagtcaagccacagatgcctccgaggggaccaggagatggtaattggttcagatcggacattttccttccctgggccttcctgcccctgcccccaccgccacgcgtttgcttgttggaatttggaagctttgtgcatgaccttgaatgcactggatgaaaggttctaagtaaattcttttccttccctcaaggaagaatactctgatgaaaagagtcctttaaaaatatttaaaacacaggccaggtgcagtggctcacacctggaatcccagcattttgggaggctgaggcaggaggatcacttgaacccaggagtttgagaccagcatgggcaacatagtgagaccttgcctctatctta

SEQ ID NO: 103720 - DNA, 1920 bp, Homo sapiens
  misc_feature (1204)..(1204): n is a, c, g, or t
  misc_feature (1237)..(1237): n is a, c, g, or t
  misc_feature (1306)..(1306): n is a, c, g, or t
ctctcgagaggagcccgtgggctgctggaccggaccggacagcaccaggaagcccggcaggagtcttgctctgtcacccaggctggagtgcactgttgtgatcttggctcactgcgacctctgcctcctggttcaagcgatcttcccacctcagcctcctgaatagctggaactatagtcacacgccaccacacccggctgagagaattctgccagatatcaggacagatggggaacagcagaagccgtgtggggcggagcttttgttcacagtttcttcctgaggaacaggcagagattgatcaattgtttgatgctctgtcatcagataaaaacagcccgaatgtctcatccaaatccttctctctgaaggcactacagaaccacgtcggggaagctcttcccccagagatggtcaccaggctgtatgatggcatgcggagggtcgacctgacagggaaggcgaagggacccagtgagaacgtgtcccaggagcagttcacagcatccatgtcccacctgttgaaaggaaactccgaggagaagagtctcatgattatgaaaatgatttctgccacagaaggtcccgtgaaggccagagaagtccaaaagaaatcttttggagaaaggattttagaggaaaatgagtctcagggcttgggttttgtctgatctgtcatgtccagaatggtttattcctagtcagatatgtttttagtttacagaggatctggttggctctgtggtgcacgtgctaagccacagacaggagctgagaggctggactgggaaggaagccccagggcccaacccccgggtgcaggtgctggctgctcagctgctctctgagatgaagctgcaagatggcaagagacttctggggccccagtggctggactatgactgtgaccgagctgtgatcgaggactgggtgttcagggtcccccatgtggccatattcctgagtgtggtcatttgcaagggctttctcgtcctgtgctcgtctcttgatctgactaccctggtccctgagcgtcaagtggaccagggcaggggttttgagagcatcctggatgtcctctctgtcatgtacatcaacgcccagctgcctcgggagcagcggcaccgctggcgcctgctcttttcgtctgagctccatggacacagcttctcccagctctgtggccacatcactcaccggggnccctgtgtggctgtcctcgaggaccatgacaancatgtgttcggtgggtttgcctcttgctcttgggaggtgaagcctcagtttcaaggtaagacttggtgncctgaaccttgacgagtggcacagcacgggcaaagagctctggagaaagggagagggtgggggtgctaaatagggctctcccatcttctccaagtgtttctctagacgcagtcggggcgataggaaaatgtgatgctgctctgtggtgtttatcacatcagggttcttcaggacaggccgtgtgacccccagttttcaggtgagggcacgggcccagttattacacggtgccgggtctatggggcgtgggagaagtcaagccacagatgcctccgaggggaccaggagatggtaattggttcagatcggacattttccttccctgggccttcctgcccctgcccccaccgccacgcgtttgcttgttggaatttggaagctttgtgcatgaccttgaatgcactggatgaaaggttctaagtaaattcttttccttccctcaaggaagaatactctgatgaaaagagtcctttaaaaatatttaaaacacaggccaggtgcagtggctcacacctggaatcccagcattttgggaggctgaggcaggaggatcacttgaacccaggagtttgagaccagcatgggcaacatagtgagaccttgcctctatctta

SEQ ID NO: 103721 - DNA, 628 bp, Homo sapiens
ctctcgagaggagcccgtgggctgctggaccggaccggacagcaccaggaagcccggcaggagtcttgctctgtcacccaggctggagtgcactgttgtgatcttggctcactgcgacctctgcctcctggttcaagcgatcttcccacctcagcctcctgaatagctggaactatagtcacacgccaccacacccggctgagagaattctgccagatatcaggacagatggggaacagcagaagccgtgtggggcggagcttttgttcacagtttcttcctgaggaacaggcagagattgatcaattgtttgatgctctgtcatcagataaaaacagcccgaatgtctcatccaaatccttctctctgaaggcactacagaaccacgtcggggaagctcttcccccagagatggtcaccaggctgtatgatggcatgcggagggtcgacctgacagggaaggcgaaggtagtgtaacagatattacctggtctgaacaacagagagaaaaaatattttaaaaaaaatgaacagagcctcagggactttgggaatgatacccaaatgtctaacatttgtgtcatcagaggtcctgaaggagaggagaaagagtgtggggcataaaatt

SEQ ID NO: 103722 - DNA, 136 bp, Homo sapiens
atgaggagatggaggcaagagaggggaagtgacttgcccaagctctcatagccagcacttgtaatgaagatttgaacccaggtagtcactccagaggcttcatgcttaaccacctccaagactgaaaatcttgtag

SEQ ID NO: 103723 - DNA, 115 bp, Homo sapiens
ggtagagggtagttaggatgatccatgatctccatcatgatgatgatggtattgatgatgtaagtcactgaaaatatttggtgttataagaataatttcttcctgattgtcagtt

SEQ ID NO: 103724 - DNA, 306 bp, Homo sapiens
catgggacaaaagaatctgaacaacagccttcagccctagaacttccctctgacagaggctacccaaatgagaagcaaccagaaaaccaaccctggtaatatgacaaaacaaggctcttcaatgcctccaaaaaaatcatactagtttaaccagcaatggctccaaatgaagaagaaatccctgatttacctgaaaaagaattcaggaggttagttactaaactaatcagagagggaccagagaaaggcaaagcctaatgcaaggaaatccagaatatggtacaagaaatgaagggagaaatattc

SEQ ID NO: 103725 - DNA, 2005 bp, Homo sapiens
tagtatgtatcaaaatttccttccttttttaaggccaaataatattcagttgtatgtatatagcacattttgtttacctatctgtcagtggacacttgggttgcttgtgcctttgggtaactgtgaataatgctgctgtgaatatgggtatacagatacctctgtgaccctgctttcagttcttgtgggtatatacccataagtggaattgctggagcacacagttattctaattttttcaggatcagccgtactgttttccacagcagccatactagtctacagtaacagcacacaaggatttcaacttttccacattcttgcctatacttgttattttttatttttttttaaatagtggccatcctaataggtgtgaagtatctcagtgtggttttaatttgcatcttcctaatgattagtggtgaacataatttcatgtacttgttggccatttgtatatctctttggagagatgtctcaagtcattttgaatgagttaaatcattcaaatgggttaaatcccttaaaatggttaaggtggtagatgggtattaaaaaaataggttgtttgctcttttattgttgaagttccttgtatattctagatgttaacctcttatcagatgcatgatttgcaaatattttctcccattctgtaggctgcctttttttttttttttaaatgcacaggggttttgcattttggtgtagtctagtttgtttttacttttgttgcctgtgcttttggtgtcatacccaagtcaccgctgactccaatgaagtttctcctgtgttttcttctaggagttagagttttagcttttaaattatgtctttgatctattttgagttaacttttgtatatggtgtgagtgtccagcttttttgcctaaggatagctggttttcccaacaccatttgttgaaaagatgttctttccccattgaatggtcttggcatcctgtggaaaatcatttgaccatatatgccagggtttatttctgggcatgctattctattctgcacttctgtctgtacatatttatgccagtgccacattattttgattactgtagctctgtaataataagctttgaaatcaggaagtatgcgacctccagctttgttctttttcaagattgttttggctacctggggttccttgagattcgatgtaaatcttaggatggatttttctatttccacacacaaaaaaatcagttgggaatttgatggggggggggtacattgaatctgtagctcacttttgatagtactgtcatcttaacaatattaggtctttcaatccatgtgcgcaagatgtctttccattttttggcattcttaatttctttgcagcaaaattttgtagttttcaatatacaagacttttgcctctttggttgtttattcctgagtattttctttatgatgctactgtacatagaactgtttccttaatttcctttggagattgttcaacaatggtgggttgttttttttttaaacttttagaaatacatttaattcaattctataaatattagtcattcaaaatctggccacaatcttaggaatacaaaagtaaaatcccagttctttttttcctaaaatgtcacaatgtaatagatctaacattgcatatatttctgatgtgatgaaatgttgatatatattttctatcgtgcaaactacagctctaaaatttttcaaagatagtacatgtattatgttttctataatacttacaccatcattattgttttaccttttatatctcatattctattttaattatggaatggtattattacatatccctgataaaaatattaaaatgtgctatgggaaaattaagaaaagacatattaaataaaccttgttatgtagtagcagggacgtgggaaagctccttggaagaagtaaggttcatcactcagaagtcaacctatttaatacagagataatgattcaactttacttcagagaatttaaatctgca

SEQ ID NO: 103726 - DNA, 1035 bp, Homo sapiens
tccttatctttttaaaaaaattattcttcacttttttgcctcctattacttgttagggagacccaatggtagttttattccttggggatacatagtaaatacttcattaaagtcgagtacagaatttgatgaaaagtgtggatgtgtgggatgtactgccgccttcagaagtccacacactgcctggagggagagaactgctgtttattcactgattaagcacttgctgtgtaccaactacttttcatgtcttatcttaattctcataacagtcatttgatattttaaaaaaccccagaaatctgagaaagagataaagtggtttgctcaaggttatagaacagactaccatgtgttgtatttcagattttaattcatgtttgtctgattttaagttttgttcgcttgccagggtaccccacaaaaatgccaggcagggcattttcatgatgcacttgagatacctgaaatgacagggtagcatcacacctgagaggggtaaaggatgggaacctaccttccatggccgctgcttggcagtctcttgctgcatgctagcagagccactgtatatgtgccgaggctctgagaattaactgcttaaagaactgccttctggagggagaagagcacaagatcacaattaaccatatacacatcttactgtgcgaggtcattgagcaatacaggagggattttatacattttagcaactatcttcaaaacctgagctatagttgtattctgcccccttcctctgggcaaaagtgtaaaagtttgctgctacaaagaatacagaaaactcagaaagaaatgctaacatacacatttagctggccctatggatatatcatattaactgcttatcgttaggggctgtatatttgtaaaataaaagaattttgggagttccatctctcggctttggagcccccctccttttgtctctgtatggaggagcttcgtccttctgcctttttctttacctgttaaattctccactccttaaaactaaaaaaaaaaaaaaaacaaaaa

SEQ ID NO: 103727 - DNA, 811 bp, Homo sapiens
tccttatctttttaaaaaaattattcttcacttttttgcctcctattacttgttagggagacccaatggtagttttattccttggggatacatagtaaatacttcattaaagtcgagtacagaatttgatgaaaagtgtggatgtgtgggatgtactgccgccttcagaagtccacacactgcctggagggagagaactgctgtttattcactgattaagcacttgctgtgtaccaactacttttcatgtcttatcttaattctcataacagtcatttgatattttaaaaaaccccagaaatctgagaaagagataaagtggtttgctcaaggttatagaacagactaccatgtgttgtatttcagattttaattcatgtttgtctgattttaagttttgttcgcttgccagggtaccccacaaaaatgccaggcagggcattttcatgatgcacttgagatacctgaaatgacagggtagcatcacacctgagaggggtaaaggatgggaacctaccttccatggccgctgcttggcagtctcttgctgcatgctagcagagccactgtatatgtgccgaggctctgagaattaactgcttaaagaactgccttctggagggagaagagcacaagatcacaattaaccatatacacatcttactgtgcgaggtcattgagcaatacaggagggattttatacattttagcaactatcttcaaaacctgagctatagttgtattctgccccttctttggccagggggttgctggtccacagaatccggaactcagaggtggttccttccct

SEQ ID NO: 103728 - DNA, 1034 bp, Homo sapiens
tccttatctttttaaaaaaattattcttcacttttttgcctcctattacttgttagggagacccaatggtagttttattccttggggatacatagtaaatacttcattaaagtcgagtacagaatttgatgaaaagtgtggatgtgtgggatgtactgccgccttcagaagtccacacactgcctggagggagagaactgctgtttattcactgattaagcacttgctgtgtaccaactacttttcatgtcttatcttaattctcataacagtcatttgatattttaaaaaaccccagaaatctgagaaagagataaagtggtttgctcaaggttatagaacagactaccatgtgttgtatttcagattttaattcatgtttgtctgattttaagttttgttcgcttgccagggtaccccacaaaaatgccaggcagggcattttcatgatgcacttgagatacctgaaatgacagggtagcatcacacctgagaggggtaaaggatgggaacctaccttccatggccgctgcttggcagtctcttgctgcatgctagcagagccactgtatatgtgccgaggctctgagaattaactgcttaaagaactgccttctggagggagaagagcacaagatcacaattaaccatatacacatcttactgtgcgaggtcattgagcaatacaggagggattttatacattttagcaactatcttcaaaacctgagctatagttgtattctgcccccttcctctgggcaaaagtgtaaaagtttgctgctacaaagaatacagaaaactcagaaagaaatgctaacatacacatttagctggccctatggatatatcatattaactgcttatcgttaggggctgtatcagggctgcttatgcgctctttctaccaagtgggcaaggaagttcgacccccctccttttgtctctgtatggaggagcttcgtccttctgcctttttctttacctgttaaattctccactccttaaaactaaaaaaaaaaaaaaaacaaaaa

SEQ ID NO: 103729 - DNA, 1187 bp, Homo sapiens
ctcccaagtagctgggactacaggcgcctgccaccatgcccggctaatttttatatttttagcagagatggggtttcactctgttggccaggctggtctcaaactgctgaccacaagtgatctgcccacgtcggcctcccaaagtgttgggattacaggcggtagccactgtgcccagcttgtatacacgtttaatagaccttgccagtgatttttagtatctgcttttctcactggggaaagaactatatctgaactttttaaattttagtcttccttggtgatgtgatacatcgtaggcatccaaatgtttgccttgaatttttactgctatcacttggttgctactgacacccaaaccaatcagacctactaaatatcatatattattatctttatacctgtaattttcctataccatttccttttctctaaattatcagaattttcttcggtgctatcttaagaataattcccttatattatattaatcttgaatcccattgacttttcctgaaaaaaaattaactcccatttccacatggatcttaatagttcaactctttatttacatgaatttttctcaaaactttgtgattccatgtagtagaaatgaaatataagtccaaatgatacacttcaaagacaaacccaagatacatgagtaaggaatcctgctcatcaactatctttatatgttaatcacattatactagtatttatttcaaagagatatatggactggaaggatacactttataatagagtacctcttgaaggggttgagtggtcaaagaaggaatattacttttatttgtaatgttttaatatttatatgagggacaataaatacataggtacatatgaacataccacataatttaagtacctacattgcaaaaacaatggaggctgggcagtggctcacacccataatcgcaacactttgggaggccgaggtgggaggatcacttgtcatgacttgagaccagcctggacaatatagatacagcgtgtttcttcaaaaattttaaaaaattagccaggcgtggtggtacatgcctgtgattcgagctactcgggaggctgaggtgggaggatagtttaagcacggaagattgaggctgcagtgatctttgatcctgccattgtactccagcctggcaacagagtgagaccctgtctcc

SEQ ID NO: 103730 - DNA, 481 bp, Homo sapiens
caggtgttgggcttgactacatgccacctctaagagtctgggccatgcagagaagaaaacaatcccttcttaggaacttcagtgacacctaaacaagcagggcagctctggtaactggttaacaagcattctccagaaagcatttcctgacacccacttgcagtcctgtctccccccttgcagcacaggtggtcctgcatcaccacagcttttctcttgcctatacctgtttctggacaggaagccctttgggggtggggatgggttggtgtgtagctgtgcaagggacatcacagctctcagcaaggagagcttgagtgggtgggacttccctcagatgtctgcctagtgttggagcacaatgtcggggtcacatccttgaccagaccctaagctgcttgaaggctggtactccagtttctccctctctctgtagcttccccatgttctgggaaggggctggcctggcacccagcaggcg

SEQ ID NO: 103731 - DNA, 412 bp, Homo sapiens
aggcacaaaggaagtgattccctggtgagattgcagcaaagtaaagaacattagtgcactccaacaccaccagtagtacctcctcaccttctcactacagcctgaggctctgtgtttatcctcctcaaagccaaagtcggagaagcctatgtaaattaggtttgagattttcccaaaaacctaaattgctaggagagccgaggatggtgaacccgaagttatggcctgctatttttcctgctatttagaggccttgcataaaatgcacgtccaaaacaaccctgcataatttcagaggccaaatcttgcagagattattgatggacaattagaagccagaaattctatttcaagtttatttttattttttaaacttatatttgtcatgtgtctgaactctgctaagcatttt

SEQ ID NO: 103732 - DNA, 730 bp, Homo sapiens
gcaaaagttacccaactcttgtagactttttgtgaatgtaagttggcaggctgttttctatacagacatctcagctgaaattttattggctaaatccccactgaaagaagtttaccctttgcctttcttctcagcaaagctcggagcatctttatttttctgtttccagggccagtgactctattcctattttgtggagggagatgttttggctcagaggcacagtgctttggcctgaggaatgataggcagaatcaagtcgaagagggctttctgccctagagatctttcctaggctgcaagaatagccatgctttattggccagtatgacaagatgaagaggtccctgtcagatttggaagggcctgccccttaggcaagatctttagaagttaaagctgggccaggaggattggaaagagcaagaatttgaaaaaggctttactaggccaggtgtggtggctcacgcctgtaatcccagcactttgggaggctgacgcaggaggatcacctaaggtcaggagttcgagaccagcctggacaacatggcaaaaccccatctctactaaaaatacaaaaattagtcaggcatggtggcacacacctgtaatcccagctacctgggaggctaaggcaggagaattgcttgaactcgagagacagaggttgcagtgagccaagattgtgccactgcactccagcctgggtgacacagcaagactctgtctc

SEQ ID NO: 103733 - DNA, 421 bp, Homo sapiens
taatgtgacaggtgctaccacagtctgaaaggacagaacagcagctgacaaaggggcaaagaatcccgtggctaggcttggctttgtctatttgatacgtgttttatttgtggtgggggctgagggagggggtgaggttggtcaagggatacatttccattacatagaaagaattgagagatctattgtacaacatggtgactacagttagtaacaatgtattgtattcttgaaaattgtgaagagagtagattttaagtgtcctcaccaacaaaaaaaaagttatgtgacttcacataagtaattcacatatgtattacttaatacatatgttaattagctcaatgtagccattccacagtatttacatatttcaaagcaacatgttgtacataaatatatacaatttttatttgccaat

SEQ ID NO: 103734 - DNA, 407 bp, Homo sapiens
cagccttttggagattccaaggattttagaaattgtatgtcaggaaatggggatgaaaaccaaatatatatttcacaatatcacagctatccaaagtgttaataccttttaatacactgcagagcaagagtttgtcgatgttccccactcccacaatagtaatagtaataattcttttacatttttatccaactgggtagatgaaaaatggtatctcagtccatttactccaatctcagacaagtttctaaaatgtttggttgtgtgcttgccaaacccacagtagatcagaagcaggaactttggaagaagaaagatgcactgatatagtcaagtccactggcagcagcatgagtaatagcagacagaccaacagtgagcaaggatacaagaaaccccccacacag

SEQ ID NO: 103735 - DNA, 372 bp, Homo sapiens
ctgaaaaatcagaacacaggcccttcattcattcatttgttaattctgcccctactgattgagttcctgctgtatgctaggcatagttaaggcactaggaaatcgaaagtaagtgaggcaaaatcccagtcttcctggagcttaaagcctaggcgggagagataaaaacataactagtaaaacaaataaatttatgtgtcaggcgatgtattgtagaaggaaataaggtagagtcagaggtttaagaggtgtaggaattgaagtaggggcatccaatatatgtagggtggtccaaaaaggccttaaaaaactaagagagtggataaaccaagtggatgtcaagggagagaccatttcagagacaaggaacag

SEQ ID NO: 103736 - DNA, 290 bp, Homo sapiens
aacagcagtagcactggtcataacaatgatgaagaacgcatatttttgccaggtcgctgaacattttaaagatcctcccacagtgctgggtttacaggcatgagccaccatgcccgacctcacaggatttttttataaccatttcaagcccaggaactacatctacatgacctgatggtgttcttgaatcccacagtgtgtgtgttagtctcagctttgtagatggcattcatagaagacatgaaacaaggtagtatggtgagatggagtacaggctttattatcatacc

SEQ ID NO: 103737 - DNA, 374 bp, Homo sapiens
gaacatgcgttcagaaactcgcaattctaaacagttgcagcaggacgaggcattctcattttcaaatgggctttttgctcaacaagtattttccactctaagaatgattaattattctcctgattaataatttcaacacaatctacagtcagaagggagcacagctttactgaccaagatgtgtttctaattaacacaaaagcctgtcatttctaacagggggtacaaaagagacacctcattcatttgcaggtaatatatttccagtctcattataggtactgagtcatacattaaacatagtcttggaaaatcagacaggaagtttattctcagatgaaacaaatcatgaataaaaaggaactaaatattac

SEQ ID NO: 103738 - DNA, 238 bp, Homo sapiens
tttaagacaaagtttcacttttgtcacccaggctggaatgcagtggtgcgatctcagctcactgcaacctcagcctcccaggttcaagcgactctcccgcctcagcctctttaatagcttatccctatgctttttaagagaagcagttgtatgtttgaagacccgtctgggtgatgctggctcaacaagtaggagttgacatgactgagtgctgtactcatgtgaggactaggtatgg

SEQ ID NO: 103739 - DNA, 357 bp, Homo sapiens
gaaagtacaagtggggatattgtattcctatataaattatgattgaggccaggttaattttttctaggttacatatggatgagagaaagggtgtgtgcatttttatgaggtcatggacggtcagggcttactaatgtctctgaataagtatcttatgcatggcatttaaccctctcccagctacctcttggagaaaaaaccaaacaggtggacagccacccacagcctgccattcctgtgtcagagcccttgctggaaaatccactctcccatgtggaggaaggtccatgaacttgctcctcatggcacagaatgactgatagtcaccctcctgtctcttggatgctgggtcaaaca

SEQ ID NO: 103740 - DNA, 1427 bp, Homo sapiens
gtgttttctgaggcctgtgtttgagtgactattgagagcgggcacatggggcatatgttctgcaccgttttccttatggtgggtctgagtcacctggaaccagccatgatctctggtacactgagcttgtgctcagtgatgggaactggccggatgtgggattaacacaattaattggcctgcataaagattcaattattaaccttaaattcaacacatttttattggatttctttttctttgtttttttgagacggagttttgctcttgttgcccaggacggagtgcaatagtgcgatcttggctcactgcaacttccacctcccaggttcaagtgattcttctgcctcagcctcccagctattcgggaggctgaggcaggaaaatcgcttgaacccgggaggcggaggttgcagtgagctgagagcgtgccattgcactccagcctgggcaacaagagcgaaactcagtctaaaaaaaaaaaagataaaaagataaaaagacagccattactggcacaacataaatggtaataatcactatcatttattgagcacttactgggtgctaggtactgttccaaggaatttaatgtttaatctaccaacaagtatggaagagaccaaattcatttctttttcctcctagacacagagacttcatttctcagcctgctttgacataagtgggtccggggtattgtgcaaagtgtattgcctttaggtctgatccataacccctcccctcatccacccagctcttctccagatgatcttcctctatctggcagttagcagaaccacaaaatggaaggaacatgaactgaatttccatgtggaaggttgcccattgaatactcatttggactattttacacgtggagtcaacctttattatactaagccaggaagattcaagggttcatctgttaaagcagctagagtccctacctaattgcacaagcccacaagtagtgctattactattgtcattttcaaataaggcttttcaagcagagagtagctttcccaaggcctcaacgagtaagtaccagagtcaagattcaaatccaagccatttggtgccaaagcctatgctggtagccactagttctctcctataaggagtagtggggatgaatgagataatgcatacacagtgttagcatagtgaaggaagcatggccactgttaaataaagtcaactcaatgtacttgttcatgattattatgaatgtcctgaggtccttcgtagactcttcttccagtcccatcctgatgccccaaccctcaatgtgggggcacatttctgtcacctgaagaaaaggagccatgaaaaaataggcaaatttgtattctaataaaccctaactcacacctattatgtgtctctgaccaactatagggaataaaatatttgctaccttt

SEQ ID NO: 103741 - DNA, 533 bp, Homo sapiens
ctcacattccagtccttcctttggattatccttcctccttccccaccctcagactaggattgctggatctgattcaaaatgtggtctctcgcactgggctggagcaagaaatgagctgcaagaaaattccagagatcaacgggaccctcaacatgcctttcactcaaacaccccacacacttttctcatgttagcatgaaccaggagaggctagttcacagctcaccttaggcaccattcctgaatccagcagcacttcgaaccccaaatccccctgttgtctaatcccagttcttgtctacatctcaagtcagtttcctcctcccattgtcagcaaagatggggaaagcaatattataggttccaagtaattcttactactcaagtgctggcaagtcagcgctgagtgcttcttcagccttctctgcaactgattctatacctgattcttcactacacctgattctttcaccttgttttgttggccctccttgaaaaatcttttagtcttaataaccataattatctcttat

SEQ ID NO: 103742 - DNA, 841 bp, Homo sapiens
agaaaaacgttttgaggaagcatgaccagaggagggagatgagtccagaagccttcaggattgtccaggggagagataaggagggtttggaccaagggaaaagcaaagagatggagagaagctggggcttgcgatgtctcggggaggaagaacgatgtggggaaggagggtggccgaagagtgcagagtggccatcagtctcctgacttggaagatggcagcatgggtaaaatggccttcttggagaaagggagagatggggcactcagggtgggggcagctctggaggtcagttcagaacaggttggcaaagagtccagtaggtggatggatggatgcgaatgtaacttagaaagaaaattccactttagtcaaacaggcaaatacaaaactacacaacagaaatcgccaatcacataagtggaaatggagagaaatgaacaggtttgcaaaagaattactcattcagtaaaagggttctttataaagttccatctaagttaaattatatctggtataataaaatgtgattcatttacatatttcatttccacagagaaattgttgggaatgtggctgtcacattatgcttggtctgacatagacaagtgactatgtgtggcaatatttttgtcgcttttggcaaaggttctcttatcttttccttctccatttctggcaaaataattgttcacttattgactgaattcttgttccagtgggtaaagtctttccttcacaatcaggagtaacacttcatgccggtgctcctaggagaagagttggtggcagccattcacactgtagtataaatgactaaagagcaaagtctgatgaaggg

SEQ ID NO: 103743 - DNA, 206 bp, Homo sapiens
cgactgaagtctgcgttcaaggactcagactacgtttacccctcactggagtcagctggagaagaacgtggttgaagccttcaagaccatgcacaagtgcgtgaagcagtttaaggacatgccaggtagggagccaagccggccaatcccctcctccctgcctctgccgcctgcctctcatgcgtttctgtcttacccggcagcct

SEQ ID NO: 103744 - DNA, 158 bp, Homo sapiens
aaaggatgctcatggccagcacctgaggctcagcctgggggccttattctggcttcaggagtcccttacccagtgtacaaggccagtgcaaagtgctacagagtggctccccccacccactcagcagacccagcctgtgagggaaactactttgggag

SEQ ID NO: 103745 - DNA, 372 bp, Homo sapiens
gggttcttagccaaagaaattgccagtgacacagtgacaaaggctgtaaagtagaaggatgcctgagctgaactaaggatagcaaggggtccagaatgccagaggtgaataagaaaaggcatagacagtggaaagggggcaaagtcagagaagcaatgtgggtgggcaaagcacccacattttcccaagagctttgtaggcattgggaaaactttggtttttcattccaagtaaaatgggaaggaactgtatgtctttgcattgaggtgtgatatgatctgactggatttaaaaggactattctgcgaggtcaggagttcaagaccagcctgagcaatatggtgaaaccccgtctctactaaaaatacaaaa

SEQ ID NO: 103746 - DNA, 433 bp, Homo sapiens
gcctctaggcagagtggggacacagaaacttcctcacaacaatctaagcagagaacatcttcttcctttacctgctggtgcatttgtcaatatatttggttgaattaatctgcttaataatctagcctgcagctacctcagactcactcttgaaacacaaaacacaaccttctctttcaggcaaggtgcttccaactcctggtagttatgagtagtgggaaaagaagaaatgcattttgctgcatgttttgttcccaggacacaggttcaagcttgcccttcacccccaagcaagttttattctctggaaatcttccttgaacattggcaggctcagagaatctctgttctcgatgagctataaactggcatttctggcctgatgagaagtttgttattgtctagatgttgctcataaaatggatttgttgtg

SEQ ID NO: 103747 - DNA, 834 bp, Homo sapiens
attatggctggacagttaagggagagtgacctaaataaagttcatattggcgggagagcagcttgccacagggttacacagaataggcagtggtggtaaaggcagcatttgaatccaggtccatttggctttggaatgtgctgttatagcagcagagggcaagtgtgaaacataattcaaggaaataattgctgtagccatccagaccagaggaggatcgctttgatctaggaaaacatctcagtagtctttgaaaaaatgtacagaatatgaaagatattataggtcttttcctcctataatacaaccaggaaattattcaggctaattttttcagaaaaattattacaataaattatgatctccctttgaaaggtataatgtattcaaacctttttaattagctaatcttttcctgtgaaatcttaaatatttgcacgtataattggtaattttagcttttatgtaggtatgtttccccctggtgttacttacaaaacctggcttactcaaggcccaaagtccaccccactagtaaactctctcgtctctgttcctgtgccaagtgctcttcctttgttaccaggtccacataattaatagctttatcatatgaggtaattcagttactcagcaaaacaaatgatatacacttttagaaatagctctagaaagtaaacttgaacgtaaaattgtttagtaagaggaaatttctgtttgtctttaattaagagaaactgtatggaaatgtaagctaaggatgcattaatcagagaagttggcattgcactgttcttcatttttatttggcatagattgcatgggtgctcatta

SEQ ID NO: 103748 - DNA, 693 bp, Homo sapiens
gacttaatcagccatttcagcagaaggtaggagtagagatatattataccagcaaatacacttccagtttgaactgaaggagacagagaaagcaggacagaatgagaaaaggatactggactttctggattctacagaaccagaccatagagctatttggctgtgaatgtgtactattcttcagggaaaggaaagaatgcccccaaaagtgatacagaagtcatcagggttgccacttccaccacagacccagaggccaaggcagtttcctttttggtttcaaagggcaaaactgtctctctggttttagtgagccctcaggatgaccctgcctagtgtctcagaagcagagctatcctcacagaaagctgtgtggatggagcccttagagagagcaggctgtcttgcagagccctagaacctgccattccgtggacctggaaggcagagcatcaaaccaaacagagctattctcaagccttataagccttaagatgtgacagaatttaccttaataagttttggatttgcttgggacccatcacccttgctttctttcctatatctcctttttggaataagacgtccatcctatgcctgtcccaccattgtattatggaaaagaaacatgtagctcaactggtttcacaagttcacagctggtgatgaatttgccttatcatgaatcacacc

SEQ ID NO: 103749 - DNA, 467 bp, Homo sapiens
gtggggagcattgcagggaaggtgtgaatgtggaaatgggaaaaaccaagacaggtgcccctcctctttcaccatattgctaagcagactaaggggacattcctaatctcaacttttcttcagggagacgagaataaagtttctataatttccatcctgcccacataagggggaaaattaagggtctagcctggggagaggacaggggtggttgtgttccctgagtcttgtctggggcccatctccccattccaggctaaggtctccagtccctttctcacccctccatgcaacttctctcccatccctctgatttctgagaccctggaaacccctgtcccatgcaggcacttcctcctctctccatttccccaggacccaggcaagtggggtggggagacactggccttctctgctctgtaatactccactgtgaccatgaataaaatgcccttgcaaactgtcct

SEQ ID NO: 103750 - DNA, 390 bp, Homo sapiens
atttcagttaaggaagaaaagaaagtgcctacttcctaagacccaaggattaaacaatctcatcctttcattcatcattactgacccagttttaggacttcatgtacttagaatatggacttctgttcatctctatctaagaggcttagatgacttgaaaccaatgttgactgttttaattgaattaatggtatcaaatcaaacacttaggtttgggcactgattcctgactattttcagagactcttatttattggaaattgacagaccccaggcaggattcaagctaaccagtggtcccagaccttatacttctaagtgggaactgcataataacaatctaaaatatataacatatagaaacaaatctgggacaaagtctaaggaaac

SEQ ID NO: 103751 - DNA, 800 bp, Homo sapiens
  misc_feature (710)..(710): n is a, c, g, or t
  misc_feature (784)..(784): n is a, c, g, or t
  misc_feature (797)..(797): n is a, c, g, or t
ggtgcttgtagtcccagctactcctgaggctgaggcaggggaatcgcttgaacccgggaggtggaggctgcagttagccgagatcgcgccaccgctctccagcctgcgagcctgggccacagagagaaactccacctcaaaaagataaatagaaagcagcatttaagaaatatctgagctcctatgatttttttcctccaaaactgcctcttcttttcattaagtatcttctcattaaataccactattcatccatcttattaagtgcaggccccattctaggtgccaagaacacaatgcacatcaaagggagccgggggtccctgttctaatagagctcactcttgtggtggagtggggggtgtgatgaaccaaactgtgagtgttctttgcatccctgctactactggtggtctaagcttcctgacccctcatgtggatgacaacacattaagtgtttttcctaactttcttgccagccctccagaaaaacctgccagagaaattagatcacaagtcagatgagatccatctgttactcaaaacccttctgcgaccctccattgcacttggactcaaacccaaactcctctctatggctgacaaggccttgcaggatctgcccgcccccagccctagacatcacctcttcccatcttcacacagtcctctaggcttgaaatattcccctacctgatcacttgactggntcatctcaggtctcactcacgtcatttaaacaggacctctcggctggcacagcggctgacacctgtaatctcancactttgggaggncaa

SEQ ID NO: 103752 - DNA, 546 bp, Homo sapiens
ttcttttttctttttttctcttcttttcttttctcttttcttttcttagagatagggtcttggtactttgctcagactagtctcaaattcctgggctgaagcaatcctccaaactcactcctcagagtagctgggactagaggtgcacacccccgcacccagctaagaattgctgggtcacagggtatgtggatattttttaaggctttaaagatacacattgtcaagctaaaggtaaagcttagaaacagtagtggaaagtttttttatgaagcatccatactacagtattactggaagacttttcattaaagcattttttcagtctcttaataaaaattgcttttgagtggctggttgtggtggctcacaccactttgagaggcttaggtgggaagactgcttgaggccaagagttcaagactagcctgggcaaagggagagaggctgtctctacaaaagaaagaaacaatacaagatagggatctttaacaatacaacagaaaagcatctttaaggtgccaaaagatagaaactgtctatcta

SEQ ID NO: 103753 - DNA, 691 bp, Homo sapiens
gactgtacacattggccaaatgtacaccctctttagggcatctttcttctcatttaagtccccgatgccaccttttcagcaaggccattcctgccctctcaactcagagtggccccttgccatcactttgtcttctgttgctctgtttaaaaggttcaactttgagatataatttatatagagtcaaatgaaccattgtaagtgtacggtttgaaaagatgtgacaagtttacatacttaacgtgataatcaccacagttaaggtacagaagggaaccatcgctggcagaagttcctcagcccctgctccaggaaggcacccatctgcttcctgtcactgtagatgggatttgatttcccgaagtttcatatacaggagtcccttcttatccgtggggcatgcgtcccaagacccccagtggatggttgaaactgtagatggtaccacaccctctgtatatgatctttttttcctgtacatacatacttttgataaagtttataaattaggcacagtaagagactagcagcaataactaataataatatggatcagttataacagtgtgttagcatcaccactctcgtgctgtggggctattattaaataaagggaaggtcacctgaactcaagcactgtgatgctgcagtagtcggtctgaccactaaggtggctactgagtgactcagg

SEQ ID NO: 103754 - DNA, 352 bp, Homo sapiens
agagagagagaacaggattgcaatgctgaatcattataatgaagtctagtaatcagaaaaccatactattatcttcactaataaaatttttaatcaaaacctcataaaacactatcatctagaaaaaggagaatatgcccctcataaaaaatacatatctcgaaacaaaaccaacatcacagtgggacaaaaatgaggtatttctatgagtctgaaaaaagtaacaatgagtacactatcattatttctattatgatctcttccataacttagtgcaatacattaagaaaactatatgtaagtacttaaactgaggacacagaattatcattagttacaaataatataacgg

SEQ ID NO: 103755 - DNA, 453 bp, Homo sapiens
gttgtaggagaaaagagaaaatccagttctgcttccataggatgtgctgcgcgatcatcaatgtcattgttccttaacttgtatccatgggatccagctgatgatgttttcaatattggagccttttgtttcccagcatgatgggatgatggagcactttgtacatctcatcaggagtatctgattcatgtttctcctaactgtgccagcaagaattacttatcagaatttttttccctttactgtagtaaaaagttgctgttagcacagttgtgaaatttcttctacccgtgttgagtttgaggcctctgattctttttactcatcgaatgggtttctgttttatatgtttatggtaaccatggaaccttgtctagagcctcatgtgtaagattgcagactctgtttgtgaggtgttctcaacatcgttgattttgagacaatgtgtgaggg

SEQ ID NO: 103756 - DNA, 140 bp, Homo sapiens
cacggggacggccagccgcatgcagtatcatgcgcctctctcatccatgatgggaagaacaggcatgccctctgatttcacgcccgcctgggacacattttcccaagagaagagcaaggaggcagcgccccaggtgagag

SEQ ID NO: 103757 - DNA, 802 bp, Homo sapiens
aagggacgcagccagcccacgctgctcatctccagagcttcaccgcctgttttgctgacatctagggggatgctgagttagacacgcctgcctttgggacctggtaccggtccagatggtcacacggagtcaggcctctgggtgtgaggttaaccatagtggtgctggtgacagacagcactgacagcctgaaatttggtttccagcactgctcacacagcagcagcatccccaacaccatccttcccaagattccaggatgccggcatgttcagggaccctggagggagcttacagtcggttccagttgagtggctgtcccagctttctcagcccggctggcccctgcatcactcagtgctttaggctccagggtcctgctctgcccacccacctgccctcccctggcctgctcagctttgccaacaggtggtagtgcccaggaccaggcagggtgggtagatgtgagtggtgaaggagatccaggaaaacccccagctcagcccagccccatgtcccagcacatggaaccaacccctcgagtggcagccccacccaggggtctggagcatcctaggtcacctgctaagtgaagccagccctagaagagaacctccagttcacccggcccacctccacagtcagaggcaactgacacccgggggccggtgatgcccaactcgacagggcaggccggtgacggggttcctgccctacagatctggaaaggggacagtcattgtaaaaatgtcaaagcccacttggaaaagctgactctgtcctgggcactgtgactcctgag

SEQ ID NO: 103758 - DNA, 352 bp, Homo sapiens
ctgcagattccagctggaaatggaaactccaggagcaaaggcagcacttgaaccactgagactgccgtggccgctgtgttcacctcgatccccagaaagcagccacttccagcatctcaccccctcctgggggctcccatcatggaagcctaagggccaggcccaaggagtaatgggtgacattcccccagcccacccagagcctggtctgtggaggccacacggctggagggtctggtggaatcacttagaaacacttgaatgttgcgaagatattctgcctggccctagttgcagggacagagcaaggctcacaccgggatggggattatttgtcaggatagtgtgagtt

SEQ ID NO: 103759 - DNA, 342 bp, Homo sapiens
taagagagaggtatgggtttaaatacaactggggcaggtgaaatttgatacctttcccaagagtagagataggatttcaaaagtcatttacaaagaagggagagatttggcaaagggcacgttaactgaaaaaagctctgagctgggcaccttaacacggaacaaaggggtcccaagaggaagataagaattagaatcagtacctgtatgcgacactggtcatactcccgcttggtgggaggctcctggctgggagaagagggaacaggacctggctctggtgccactgggggtggctgagagcccacactgccaccatactaaagggcaaagtaaaacagt

SEQ ID NO: 103760 - DNA, 268 bp, Homo sapiens
gcaccccatcccctctccacctgcccttctcttccctctccatccaccatctccagccctgtgaagggaatgtactttcggtcttatacccccattacccattacccaaaagttaccttttttttttttttttttttttttttttttttttttttttttttttttttttttttttttttttttttttttggggggggcccccccaaaaacccccggggggggcgcaagggggggggggggggggataaaaaaggggggagagggaaaa

SEQ ID NO: 103761 - DNA, 207 bp, Homo sapiens
tcccggtcctcacctcacctgcatcctgtgccctccatccccaccaggagggaggagaaaaccaaccccaatggtgcccgcatctggaattatctccctggcgctcaggtcaacagcctttccaagaacactcgatgtgagcatctgcagcctttgcttctcatttcctcctaagaggagcccctgggatgctatgaaggaaagcat

SEQ ID NO: 103762 - DNA, 745 bp, Homo sapiens
gcacagtggcatgtgcctgtagtcccagccattagggaggctgagacaggagaataggagaattgcttgatcctggaagttccaggctgcagtcagctatgatcgtgccactgcattccagcattagtgagacctgatctcaaaatatatatatattttacatcattagctttatacaagctatatattaataaattaccagaaatgtacatatagaccagcaagactttctgtcaaatgagtatcagtcacaggattattttattgattctgtctaaagttttatcagaatagtttctgattgtctcttttcattgtatcaaagagagaacagagtatggttataattttatgctaatcattccccacattagattaaaaacctagcattttattcttttcctgtctccatcatcattcacatgaaggagaagtaagagttggcaagcaactccataaccaaactaccctgaggcagtttccttcaaatcactcccaagaatagatatttatggctttcaaataaagggtctttggtagcaaattaatttgttagtgggagagggagttatggggaacattttaaattattactgcctggatgtgatgaagaaataaaaagtagtataatccaatagctgactatcctgcatttctttgcttctctctatacagtcatttgggaataagagtacccctgaacgtaatagcagtaatatttcaagagaactcaaattgttattgg

SEQ ID NO: 103763 - DNA, 420 bp, Homo sapiens
agtttgaggtcagcctgggcaacatagcaagatattgtctctacaaaaagtaattaaaaaaaattaagccagacatagtggctcatgcctgtagtcccagctacttgggagattgaagtgggaggatcatttgatcctgggagttcgaggctgcagtgggctttggttacaccactgcattccagaagggttacagaaggagaccttgtctcaataacaacaacaacaacaacaacaacaatgaaacaaacaaatagctgggcatggtggtgcatccctgtggcccaacctatctaggaagctgaggtgggaggatggtttaagtccgggaattcaaggttgcactgagctgtgatggtgctgttgcactccagcttgggtgtcagagaatgaccctgtctctaaaaacattaaaaaaaa

SEQ ID NO: 103764 - DNA, 320 bp, Homo sapiens
gggtcatagaaatacaccacgccgacctgccctctgtggatgtccaagacggagcaacgggcaggaaggcctccaggggacgctgtcaccctagaaaaccaaacagcaaggttttcctaaggattctaagccctagtttccccagcaaagcaaaaccaagccagacttgagaattataagaggagaactgcttcaagacaagttttatataggtaagagtgaggaagacagcggcaagtctgagtgttcgccctgtgaggtgatggactgatctgggtcccaaaaaatggtcacccagggccaacctgtgcttcagaggc

SEQ ID NO: 103765 - DNA, 811 bp, Homo sapiens
gctggtctcgaacccctgatttcaaatgatctgcctacgtcggcctcccaaagttctgggattacaggcatgagccgccctgcctagatattttggtttttggtttaattggctcaggtgagtccatgggctgaggggcttcatcacacctgtttcctcacctgtgagtggggaggggtggtcacctggcagggcggtggtgaggccggcccgtgcctgcccttccctccactgttcagagttgggccagggctgaaggaggcgtggccagcttcagaggaaggtgtgggagccgcagctctgcctggcactgacatctgggctgcaaattctttctaattctcaacttctcccccactactgccagccagccccttcagcttcatttaaaagttcagacaggattcaaaagtaggttgatatataaagacctattaaaactcaatactaagaaaacaactcaattaaaaaatgggcaaaagacctgaacagacacttcgccaaagacgatacacagatggcaaatatatatgtcacgtcatatgtcatcagggaaatgcaaattaaaacagcaatgagataccactgcacatctatcagaatggcccaaatccaaaacactgacaaccccaaatgctggtgaggctgtggagcaacaggaattctcattcagggctggtaatacaaaatgctatagccacttgggaagacagcttggcagtttcttacaaagctaaacatacttttaccatacgatccagcaatcgtgttccttggcatttacccgaattagttgttggaaattgtgtcc

SEQ ID NO: 103766 - DNA, 153 bp, Homo sapiens
atgaggatattgacaaccaggaggtggaagtcacagccaaggacacatcttgagtcatgaagagaaactgtcaactcactggcctcccgaccctgtttgcatctcaccctcaaagggttttggcctcagcgcttgcccgccggtctctggaac

SEQ ID NO: 103767 - DNA, 726 bp, Homo sapiens
gtatgtattataatttttataccatagatagtctaggtagtatagcaaggcagaaaaagaatgggttatcagcaagaattagccatgtgcagctaaattattagtcatgaaattattacaggactcttcttaacacataaaagcagtaataagaaccagacattaggacccctaaatctcaataaattgagttgacattgtgtggtactctgtagtccaactttggtggttgggagggacgtttcttaggctaatgaagtcaaaagttagctggcatcagaatcacctgaaagataaattttgctgctcttcacatggtgcagaatatctgactcagtagtgtgagatggagcccaagaattttcatttttgacaagttttgagttgatgctctgcatgctgctagttagggggctatatatactttgaacaccactggcctagtagttcccaaacctgacataaaaaaaaaagcaaaaaaacgaagaccctggagattttctttttttgcttttacggaatcttagaccctataattatctactgaatcgaagtaacttaattggctgtatgtgtcagtgtacactgtacaatcagggctcattggaccatttttcatttctgaattatttcgagcagttctgtttgtaaggattgaaatttcatgacttattctttcttagggatcttcaaaagaataaagaaaactgagctatatttctcata

SEQ ID NO: 103768 - DNA, 195 bp, Homo sapiens
ggaaagagctctcaacatcttgccccagcaccacccagacccccagcaggtcaagggcacctggcagtccaggagggtttgacctggccactgggtcctgcccgacttcccctacccccaccaagccctggctggttccccttccctctctcggccgctgctgttcctgggccccatgcccctgccctgcttgcc

SEQ ID NO: 103769 - DNA, 394 bp, Homo sapiens
acagatcagaaacgcctcccttcgcttccctggcttttacggcagcccgtgatgttattctcgtggaattccgtgtgcagagtccctgggtgctggccgtaccagccagggctgtatctggagggagcaagaccatctgtgtgcttctgttccacaatttaatgaaaacgcaagtgttagattttttccctgctccctatttcagaactatccttaaagctctttagaaaatccttttaatgtttctaatttgttctatatccccaggaagaaaaaaacatcttttggaaatatttgcaagctcaaattgagcaagagctgaaaataaaaacctggcatgcagttggtaagttggctttcaagaagtgcacaaatgtacttcctggaaactata

SEQ ID NO: 103770 - DNA, 409 bp, Homo sapiens
ttgtagttctccaaatagaatgttatcacagcctttacaatcatttctcttttatctaatggacatagttaaagcagaataggtataaagtcatttagtcattaaagaattacatgaagagactgggcacggtggcttatgcctgtaatcccagcactttgggaggccgaggccaggggatcacctcaggtcaggagttcaagaccagcctggccaacatggcgaaatcctgtctctgctaagaatacaaaaaaattagctgggcatggtggcaggcgcctgtaatctcagctgcttcaggaggctgaggcaggaggattgcttgaacccgggaggcagaggttgccatgagccaagatcacaccattgcactccagtctgggcgacaagagaaactcttgtctcaaaa

SEQ ID NO: 103771 - DNA, 154 bp, Homo sapiens
ccatctgtgcacctccttgtaaaatctgctttatccaaaaactcatttagtaagaacccctctccctcagtagctgatcaaccgtgacatctgatcaagttcctcatcctccactatcccacaggtaataaatcaccttgttctgtttttagca

SEQ ID NO: 103772 - DNA, 317 bp, Homo sapiens
ctgccagttaaaaactattacaagaattaggggtcaatcatggaatgaatgcatattgctcttcccactacaaaaaagctaatttgacaaccttaaacactgtgatagagaacttatccagagtgataatccagcaaagtatctgcccttttcctcctaatgaaaatgtaagctcactatcctaaaagttactttgaaaaatccctaatgctggccagactcagtggttcatgcctgtaatcccagcactctgggaggcccagatgggagtattgcttgagaccaggagtttgagaccagcctgatctaaatagcaa

SEQ ID NO: 103773 - DNA, 373 bp, Homo sapiens
tgccagtgattggagggtgctcccccaaggcccaggagtggacatggaaatgggggtcacttctctactcccagcactgcagagcacagcaataaatgtgaggaaagacagaggagcagcccagctgccaagtttgagcctatttactggacattactcttaattgccatctactggatcacagtccaagctacaacaccaaaaatattttgcttatatactcccctatgaaacaatgggcaagagttcagccacaaataaagaccctgtgcagagggttggccacttgaaaatatccagaaatgaatacaattgactataatataacttttcacaaggatatatcatggctatgaaatagccattatattca

SEQ ID NO: 103774 - DNA, 413 bp, Homo sapiens
ctttaaagaaaaatacaaaaatgaaaaatactacataggctttatagtagaacggttaaaagactctagagtcactgtctttgaatcccagctctgccacctagctgcgcaaatgtaggcagattactttatctctgagcctcagtttcctcatctataaaaggaatataatagtgtctacctcagagaatgttggcttaatattattattaaatgagctaacacatataaagttgcttagaagaatacctaatggataccaagaacccagtaaatattagcttaattaatatcaaaccagtatcacaggggagtagaggatactcaaaggatatgggactgattaataaactgcccttagactataggttactgtcattcaaaaagtatatatattagcataataattctgc

SEQ ID NO: 103775 - DNA, 564 bp, Homo sapiens
gtaccagtgatgtttctagagagtgcatggttagcctacactcttcctgtcttcacagatcccacctcacgtggaaataggtactcaaaaatccattgtgcttctgtaatggattaagcttcgagcccaccccatcggctcccatcacatcaactcaccaaacattggctcagggagtacctgggccagcctgggtgcccactaaccatccctgggacgggacgacctcgactagcccgctatgtcatgttttcttattccatgggcataaggcttggcagaatgcggagattctgagctcagaagtttctgacttttccttaaaaaagaactgaaacattagagctttaggctgtgcttccaccatgcggatccacattggttcccatctgtgtggtccagcagaagcagctccctgatcactgtgcaggttcctgtggccgagatggtcggcgtttgggtcaggcggctcccagcacaggagtgggagctggcaggagtgccctgtgagtgccttaatgagatgccactgcattcacccttcatttgccctgtgccgatgga

SEQ ID NO: 103776 - DNA, 138 bp, Homo sapiens
gtacaagactatagtcccatatacttggggggctgaatttggagactcacttgagcccagggtgggggtcgaggctgttgtgagctacgattttgccactgtatttcagcctgggtgacagagtgagactttgtctca

SEQ ID NO: 103777 - DNA, 364 bp, Homo sapiens
agatgtggtcttggtccttgaacagctcaaatccatagccgtcgtgttcctggtcacctggggtcatctacatctgagttcttcagagtatcaggggccaagtaaggaagacagctgtgccctggtcaggtgatggagatggggtgacctaaaagtggtggttcctacatagctcatgaattccagctgggccctggagctgcagagctgagaaagcaagaccagcttaaagacagaccctgatttgcttcggcttagtacaggtgaagaaggtaaactggggtagaggaggagccttcttcacttcaaaggatagcaattcctctagaattgtgagttgtcaaagctggaaaggaacacagaa

SEQ ID NO: 103778 - DNA, 264 bp, Homo sapiens
tgctccctctgtggggatcctacagggttatttgccattcattctttatctagagtctctgactatacatttacttcacttcagactcttggcaacttcagactaaaggactcctgcagtcagcatgattttcaatccctcctcaccagctacactctacttctctcccaagaaaggtaatgctaagaaatgaacttagcatgatggtggggagtggggagattctggtgacaggaggaaaggggcaggaaacagcaagaccaa

SEQ ID NO: 103779 - DNA, 253 bp, Homo sapiens
ggtgcccatatatcaataccatttttgtatgcatttgtctctatcatactatgagattacagaaccatttatctacctttgtatcctcatgtgctgcatcttgttctgtcttcactgaataggtgcttaaataatgtttatcgaattaaatcaatgttggtggtcacttatcctccttgttgctaaattttataatgtgtgtataagaaaaatacttggctcattgaaggataagtctagttagtcatataca

SEQ ID NO: 103780 - DNA, 381 bp, Homo sapiens
tttgagacagagtctcgctctgtcagccaggctggagtgcagtggcacgatctcggctcactgcaagctccatctcccagttcacgccattctcctgcctcagcttcccgagtagttgggactacaggcgcctaccaccacgcccggctatttttttgtatttttagtagagacggggtttcactgtgttaggatggtctcgatctcctgacctcgtgatccgcctgtctcggcctcccaaagtgctgggattacaggtgtgagccactgcacccggccacaaagtgacaattctaagaacaaaagcaaaaccacaccaggaaggccagggaatcccagcagagagaacctggatctgcagcaaagtcccctgcttcaggg

SEQ ID NO: 103781 - DNA, 422 bp, Homo sapiens
ggatatactccaaaatgctaatagccgcttgccaatgagcgatagatttactggtaattcttattttctctatttcttcttttatttgtccaaaaaagtattactttggtgatttaaatatattttaaaagactcaaaatggtatatatgtcagcaacagaaataacagaaaattgataatcaattataaagcggaatactatgcagctatcaaaactaacgatatagatctatagatgtctatatatagtgttaaataagaaacaggatgggcacagcacagtggctgacatctgcaattccagcactttgggaggcagaggcaggaggattacttgagtccaggggttcgagaccagtctgggcaatatagtaagaccttgtctctattaaaaattaaaaagaattagctgggtatggtg

SEQ ID NO: 103782 - DNA, 389 bp, Homo sapiens
ttgtttcctttaatctggaactgtccctcagcctttctttgtcttttaccacatcaacatttttgaagaggatagcagttgttctctagaatgtctgatcctttgtcgtgattagattcggattatccatgtggggcaggaacactgaatccattatgttatattcttctcagtgcatgacatcgtaaggccttgatgttgctttgtcccatgctgggtgatgctcactttgatcacttgactaaggtggggtataccatgtttctgcactatgaagaaatttttcccctttgtttttactaagtgatctgtgggagatactctgctctgaatcaccaatgaaatactacctatagatttttagatccattagtgatttttacctgaat

SEQ ID NO: 103783 - DNA, 535 bp, Homo sapiens
ggtttattgaaagatgtaggaaaatgccatgggggtgaggtgcaagtagggttggggggcagtgggagtaatgtatattctttcctagaaagggtatttgccacaacttgagagaaatttcttctttctgatcacctgaagggcacggaaaatccaaactcttaggaggctgatgtctaaggctgggttgaggggctttgcagagtgactgcaacccaagtttaggtacccacctgggctcaccaaggctttttcatacagaggaaatggagtgggatctacaaacccatcaaatcaagtagaggaaacaacacatccaagccatttaaccatttccttatcacatgctgactcaaccctcagtttcctccagtggaagtaagagggaaacttggaaccaaaattatgcaaatagcagagctaagccccaggtagaggcagagcactacctcacactttgtttctggggctgagaaatggctatctgggtggacaaaaaaacccaaatcgtagtttctcctaagagtctcccctt

SEQ ID NO: 103784 - DNA, 751 bp, Homo sapiens
gggtgatacccacattggaaagcatcaaggtcaaaatatattttatgagtcaactttaatttgattaataacttaaaaccctctaccatagtatatgctactttattttcataactactcatgagtatggaatggaaaacattaatttatctttctaagaaaagtatttggctggaggagaaaagaatattaaagtgtcatggacattataaaatttggtagcacagtcttttttcccctacatttttagtttcagttcactgtttctgttgtttctaaatattttaccactaatgaaaaccttatttaggtaaaacgttttcttttgatttaaaagatttttgttgaattccttgcccagatgtgagagaagtgtctacatctattcaaactttaactttgggtcttagaggtgatgaatcacttggcagaacaaccatgagatgttgaataatctcatgatttggttgacttatttttagaagccactccctattaactcatttaattcctgttatacgggaagagggacagggaaaggattggaagaagaggtcagtcatatacaggccttgccctcctaaagcttctgaacttattttttgtttgttttttgagacagagtcttactgtgttgcctaagctggagtggcgccatctcagcttactgcaacctctgcctcccagctactcaggaggctgagcggggaggatagcttgagcctgggaggtcgaggctgcagtgagctga

SEQ ID NO: 103785 - DNA, 452 bp, Homo sapiens
gtgatccacccacctcaacctcccaaagtgctgggattacaggcgtgagccactgcacccggcctggaaagacatttagatgttagatgtgtagaagggaggctcagtagggtcaggtgactgatttgatgtcagggacgggcaggaggaaggcatttcagcctattcatagatctccagcttgtaggattgaatgtgcggttgtgctgcttcctgggagaggaaacacagaatgtggggcaggcttgagaagggagcgttatctgctggagctaacaaggatacccaggcctgcaagcccaggctgctgtcagcaactgccgatgcagccacagaggagatccgggagcctctgcccttccaggccaagagtcctccaaggccggggcctcgtgcctgaggtctctctttgcccctccagtacctttagaagctgtagaaatatgtctaga

SEQ ID NO: 103786 - DNA, 333 bp, Homo sapiens
tgtagagatagggtatctccctgttgtgtaggatagtctcaaatgcctggcctcaagcaatcctcctgccttagctctccaaagtgctgggattatgggtgtgagccactattcatgcccagccaaacccaagagtttgagaccagcctaggcaacagagaccacatgtcaaaaaaaaaaaaaggaggggtatgcagggggaataatgatgagattagatatccagcaaagtaactacctcttatcataaacaatcaaggtaaactgtgacatcatctcatatttcaaaagaaaatgaaaatcttccaaagtttaatgtgttactttgagaat

SEQ ID NO: 103787 - DNA, 823 bp, Homo sapiens
ctaacaatatttaaacacgcaaagaaaagactattttaacagcaattatgctactttctaatgcttgcttatttatgtttaggttaaaacaatagttagggtgcaaatgtgaatgataaatactattcaactagttaactgaaaaaaagtgaaaattttggaaagccaattataattaagatagtcattgtatctaagatattaaataataaagcagtgagttttaaattcactcaagaattagaaagcaaaaaaattacaaaaaaataattagaaagcaaagataaatactagcaacataacacttagtgagtggtcaatgaatattaactgaagaaattttttaaaagaggtaaataaatgtataaacaatcctaaattaaatggttaacagaccccctgaactcaccgccattcccaagtgattattttcttttctgaaataatatacctaatatagaaatagtaagaaggccattttggggaactctataatcatctatcaaaactggagaaaaagataaagtgaataaaattttaaaaaggtagacagaatgagaaaagttcatatgtctttttttggctaattatagacaacactggaaagctcttagaaatttactaacattcaaccatgatttccataagagctcttcaggacaggtagaaaggaaatgttgagaaactacacagaattctgaaaaccagagggcaagaaaactcacacagtgagtctttcgttttctctagagtaagacactaatggacttgaactattaaaaacatcatctaagactatatccactgccgtcacactccccca

SEQ ID NO: 103788 - DNA, 556 bp, Homo sapiens
ttcatccgcaagaaaagcagtgtccctttaaatagaaattgaattcagtccaccggtagagaaagacaacaggttcatggggcaacttactatcatagcttccccaagtcgatttgtgtacgactgttattttctggttcttctcagaatgttacttgtaaatggtatttgccttgatacagatttcggtggagaagtaattagtttacaaagaagaattctcagcatgtggatgtaggcttaattgagtcctcatggtgttttacaattagcttctctagctgtgggatttcaagaaatatgtgaggtagctgatgacacccaagttgtcttaacataactgtacaccttgcacatgctcttgtttacagatgtggaatgattgctttccacaagcagctgactgatgtaaacactggggattttcttcaagtttaaaagcattaaggaatcaaagtaaaaatttcttgggtatattcttataaaatgagccatagagcataggagtaattcattcattcatcagttatatatactatgtgccaggaacatttct

SEQ ID NO: 103789 - DNA, 409 bp, Homo sapiens
tactgtgaacactttagttttaagaattagctagaaaaaataatacatttattttattcattgtaataagatagaatcatttttaaagagaattctgaaagtgaatttaatttgtctgttttcccatttttttctgtcttcctctatttctttgatctgtgtttaaacattactagaaatcaccataacaatatcataagcaatccaagtgtatttaaagagtaatacaatccaaacaacattgtgtggagctttgtgtatttttaatgacactactagacttgcttcagacaagttgagactttcctaaggtaatagtgggtcctttgctgattgccttaattttagcatttaaatgcatttagcaatcacttctttgaaaactgaatttcagtcactgattcaaaaa

SEQ ID NO: 103790 - DNA, 700 bp, Homo sapiens
aggttgcccaggctggtttccaactcctgggctcaagtgatccacccacctctgcctccccaagtactgggattacaggtgtgagccatcgtgcccggacttgtctcacagatactaaacacagaacgctcaaacctgctactcctgcaggcttcctctcctcaccattcacctacttgctcgggaggctgaggcggcagaattgcttgagcctgggaggtggagggttgcagtgagccgggattgcgatcctgcctaaaaaaaaaaaaataaaaaaaaaaacaaaaaaaaaaaaaaacaacccgtggtgtggtggagggggatacccccctgtggtgggcccccacccctctttggggggaggcgtgagcgggggaaaaaactcgctgtggaaaccccgcgggaggaagaaacgggagagggggggggcgggaaaattgtgacccatatgtggatgtatccaggacacggggcacgaaaagagagtgaaatgggtcaacaccacagcaacaaagaagagcagcagcgtggaacaacgcttaaaaaacagcaacaagcaaacgcaacaacaaaaatgggggggccaccccgagagaagcgtatagatcatagagcacccagatgaaaagtgcccccacaagaggtatgcgaggataaacaaacaggcagggagagaacacacggggcacggacatagacc

SEQ ID NO: 103791 - DNA, 1733 bp, Homo sapiens
ctaggaggcagtccccaacttccagagccagggtataggctacttctatgtgtcccatggtactgccacagaagagtctcagctctctccaggattcagttctaaggtcagtgcctaagataaaaatggagtgtaattaaaattcctcttagaaatctaaggaaggtgccctattgaagaccaacatcttgaggtcccatgtagtcatttcttgcccatgtgggaacacattactgtttggttgagtaccaggtgaagtgattggcctgcagttagggctgtgttgtgcaaaaatcacttgttttggggtgttagaaccacatttaggcgagaagatcacttttggggagcttgggaactgaggcaggccgcaggtgcagcagaggcatgagcttgcccgggcccgccctcttgtctatgctcatggagtgaaggaggggccagcggaatggcccaaacaactgatttgtttttctttttttaaatctttttcagacaaataccattgtgtttaagcgaaatgtgtgtataatgccaaatcactgtaccccacaaccctgcacacctctacactggactgtaatttcttgttcctagtttgtcttgctagactgtaagctccgtgagagcagggaccgtgtctgcttgttgagtgggctttcccctgtgcctgccagcatgcctggcatctagcaggtcttctgtaaagatgggatgagtttgtaaaccctccagcctcaggagtggctccatcctctgaggctctggggccctctggcaggctagtcatttttctgccatgtacgtacaatgctttattttcatgttgtattttcctttctagccagtaagcaagctcctaatgagcaagtttctttgtggtgttatctctgtatcctttcatcaggccagcccagagtaagtagtgcttcgaaagtgtttggtaaatgaatgaattatggtaacccagcccagttctggcatcactgtctgcaggttagtctaattccagatgaaagccccagattcgaaaaagggaagattattcagaagtgcatatggttgtataagaaaaaaaaatctcattaaatagacctgagtaaacttcaaattttgatgatctggccatgtcggagctgaagcttaccagctctctaaagcatttgctagggaatcatgcagatggtccaaaatattttttagaaaagcattcatctgtcccgggatagaagtagaggaagctggtaggcaggcgctagaccctaaagaaggactgctgagccagttcttaagcctgtggtcctgtcggtgaggaaagtgagagcagtccagagcaggtgaaaagagcagagctcattcctccagtggctcttttgcctaaagcagcattcctcaaacttctcactcgaagcattaagttacggtgagatgctaacacacgctttagacttaagtcaaaatttactgtgaagccacagcaaaccatggcttcacagatgaattagttgctacacaaataagttcgatacataagtacagtaattgcttttaaaccttataataagcagtaaattagaagttaaaccatgtttttcttttacgaactgaaagaagagaatgcttttgatactgagaatcgcacactgtgtccaggaagattgttcttgcataaccagacccacaataaatatctacaacttttcttacatgtttataaaataaatcttagaaga

SEQ ID NO: 103792 - DNA, 1910 bp, Homo sapiens
ctaggaggcagtccccaacttccagagccagggtataggctacttctatgtgtcccatggtactgccacagaagagtctcagctctctccaggattcagttctaaggtcagtgcctaagataaaaatggagtgtaattaaaattcctcttagaaatctaaggaaggtgccctattgaagaccaacatcttgaggtcccatgtagtcatttcttgcccatgtgggaacacattactgtttggttgagtaccaggtgaagtgattggcctgcagttagggctgtgttgtgcaaaaatcacttgttttggggtgttagaaccacatttaggcgagaagatcacttttggggagcttgggaactgaggcaggccgcaggtgcagcagaggcatgagcttgcccgggcccgccctcttgtctatgctcatggagtgaaggaggggccagcggaatggcccaaacaactgatttgtttttctttttttaaatctttttcagacaaataccattgtgtttaagcgaaatgtgtgtataatgccaaatcactgtaccccacaaccctgcacacctctacactggactgtaatttcttgttcctagtttgtcttgctagactgtaagctccgtgagagcagggaccgtgtctgcttgttgagtgggctttcccctgtgcctgccagcatgcctggcatctagcaggtcttctgtaaagatgggatgagtttgtaaaccctccagcctcaggagtggctccatcctctgaggctctggggccctctggcaggctagtcatttttctgccatgtacgtacaatgctttattttcatgttgtattttcctttctagccagtaagcaagctcctaatgagcaagtttctttgtggtgttatctctgtatcctttcatcaggccagcccagagtaagtagtgcttcgaaagtgtttggtaaatgaatgaattatggtaacccagcccagttctggcatcactgtctgcaggttagtctaattccagatgaaagccccagattcgaaaaagggaagattattcagaagtgcatatggttgtataagaaaaaaaaatctcattaaatagacctgagtaaacttcaaattttgatgatctggccatgtcggagctgaagcttaccagctctctaaagcatttgctagggaatcatgcagatggtccaaaatattttttagaaaagcattcatctgtcccgggatagaagtagaggaagctggtaggcaggcgctagaccctaaagaaggactgctgagccagttcttaagcctgtggtcctgtcggtgaggaaagtgagagcagtccagagcaggtgaaaagagcagagctcattcctccagtggctcttttgcctaaagcagcattcctcaaacttctcactcgaagcattaagttacggtgagatgctaacacacgctttagacttaagtcaaaatttactgtgaagccacagcaaaccatggcttcacagatgaattagttgctacacaaataagttcgatacataagtacagtaattgcttttaaaccttataataagcagtaaattagaagttaaaccatgtttttcttttacgaactgaaagaagagaatgcttttgatactgagaatcgcacactgtgtccaggaagattgttcttgcataaccagacccacaataaatatctacaacttttcttacatgtttataaaataaatcttagaagaaaaaatattgtagctttttttttttttttttttcaatgaagctctatgaacatttcacagaactttgttcctgggagtagttagggaaatgctgcttcaaaaagccaattttaagtagttgtgaggcatccgagtggaatttggctgcactatccataaaacttgagagtataggcg

SEQ ID NO: 103793 - DNA, 196 bp, Homo sapiens
ggagaaacgcggagttctcaactgaagctcaaggtggagagcgagagaaggaggcggattcatgaaatatttcggagagaggagccacggggccctgagggcggcagaagctgcggccgagaggaaaagcaccaagaacaccgccctgccgggaactagttttaaatccacgtccaggttttgtatgagcctcgct

SEQ ID NO: 103794 - DNA, 715 bp, Homo sapiens
aaatataaatgtcgtggacattcttaagtgccctcaaaactggccccattcttggaagattcagattattacatgatagagggattattattcaatcattatgggttgttttctttttgccatgaaaatagccataatcccctgcattagttaagttgaggaagaggctgaaagttacacagactcactctctgatgtccaagtcatgtccaagtaaccccatatctacagttcagaaactgtgacataaactgtgtcatagacttcacctgtgtaagcccattggaaattccagctttcactggacagtgatgactgcatactcattccttccaatcatgttccttggcttaaaatattagggatgacatgtgcattacaattaccagctttgtgaggcaaagatccaggtcaagatatattttcggcttgaattatccaggattattgcctctgttttctacattgccaaatagaaacagcagattggttggtaattctgccaactgaatgatatgtgttttcatacatgccatctttattgtacattacaatcaacaaaggatcttgaaaatgcaaagagaaaaaaatgtggtgcagagaataaactttggtttaagggtccaaggataggcattccttaaaaagcattatgtacaatacataaaaatgttgactaaattccatctttctaaaatcaatgactattttataa

SEQ ID NO: 103795 - DNA, 268 bp, Homo sapiens
tttttgtgtttttagtagagacagggtttcaccatgttggccagggtggtttccaactcctgacctcaagggatcctccagcctcagcttcccacagtgctgggattacaggtgtaagccaccatgcctggccataaacttgtatttttttaataacacagagtctccctttgttgctgaggctgatctcaacctcctgtgctcaagggatcctctagcctcagcttcccaggtagctgggaccacagacatgtaccatgtgcctggc

SEQ ID NO: 103796 - DNA, 339 bp, Homo sapiens
ctccgatgctgtcctgtttggctttggtggtgacaaggtctctgcctcctctctaaatgcgtcgtgcctctccaccctataatggctgacttcatggatcattgggtatccctaatgccacctaacagccccactgactgtgtgcagggctgtgcttagcgatttccacatgggaactcatgcttcacgacactccaaaggaggtacgatatcagaccccatttcacagatgaggaaactgaggcacagagaagccagggaactcgcctaaagtcacacaccttgtaagcggtagagctgggatttgaacccaagtggcctgcactcttgtccagtgtc

SEQ ID NO: 103797 - DNA, 450 bp, Homo sapiens
gttgtcatagaccataaatttctagtcacttatgaaatatatataatagaaatatataatgggtaaatttcaaaggtgctctttcctgtatcctgagcttaagggccatatttccagctgtcaattgaataccactttggatggagtgctgagctccacccttgacatatctggagtactgaccatctcctctcacctccaaaccaactttccaccctatttgcccaatcttgataacggtaccatttttccaggctcaatatctgagagctgcctaccctcctttctttcaaacaatacaggtagccacagagcttggctgttcttgcctttgaagtgttctaacatcttttgattttcattttcattgcctccacctggtcctgattcatggcatttccattgtcataatagcaggctaatttctctccctgttttctaaatgtaccc

SEQ ID NO: 103798 - DNA, 377 bp, Homo sapiens
ggtagaggtcttagatctgagcaagagagaaatggctccttccacatggtaactttatggtgagcaccatttatatcttgcctcagggagagcacacatattacacataatgggccttctggatctcattagagaggttaaaaccaaaattgcaacagaggtatcctgcctatgatggcactcaaatgtatcccaagtctgtacatttgctaaactaacagggatgaggagcttacaccaaggtaacattaattccagttgccttggtctgtggtatgcacttgtgtttgaaaccttgaaccttcttcagaaaaactgtttgaaaaatatttagttagccgggtccattggttcacgcctgtaatctcagcactttg

SEQ ID NO: 103799 - DNA, 800 bp, Homo sapiens
ggtcgcccgggagggcgggctgcactccctccacgtacctggctggcagagcgtctccagggacaaaaggtgccctgggatcaaagccgagcccccgcccccgcgaggatgctgccctccggaaggaggggcgctgcccccaaggtactctccccgggcacccagggggaggttccatttcaacctccgatgaaaaacacggccctcccgggtacttaggagggtctgagggtaagtgccaagatggagaaaacacgccggcccctcacagagtatctcctgaggaatgagaactatctagcgggcaaggagggcttcctgcatagcagagggcaccccctctgatcccccaaggccaagggaaaaaaatcactcttcaccggcgcccctgagccaggacaggctccagtgcagccacccaccttataattttccgcggatgctgccttgatcagatgtctgaagatgactttaaggactacaagcaaatctcaagggaaaaattcagaccttgaacaacagccttgaactttttcagggttagacaagtactccccagtggagtttctgcccttatttcttcgttcttctcttaattcttccatattttaacagaacacagacctgccgaaacgacacaggatggctctttgctttttgttagttctccaaccttccaaacccttggggcacatgcaagcactgtggaaaaacttcattaaaccaagagtcatcttactccagatcccagactgcttgggaagttggacatgcatattcccaaagagaacagtgttgga

SEQ ID NO: 103800 - DNA, 1217 bp, Homo sapiens
aaagtatcccgcgggcaatactcgctcggaaccgcagcggcgcttcccgggcaacaaaaaaatactgaactaatggatttaagacagcaaaaccaagcattggaaaagcagttagaaaaaatgagaaaatttttagatgagcaagccattgacagagaacatgagagagatgtattccaacaggaaatacagaaactagaacagcaacttaaggttgttcctcgattccagcctatcagtgaacatcaaactagagaggttgaacagttagcaaatcatctgaaagaaaaacacagacaaatgcagtgagcttattgctctctaacagagccagcttcacaaggtgcatataccaagacaaggaatgagagcaacatcagcagcaacactgtgagttcagcagtaaagaggaactgggcagcaaggcagcatatcgttgtgacgtgcaggcataccttttcaacaacggtcagcaggaccgacccaacgagcgttagcgagcgtgtagcaagctgaaaccgagcaatagtccactagcaagtcacaacatcgcacgggctgaacgaaggcatgccataagaccagcaacggcaagcacacgaggcatgcacaacagcttagcaagagccaatcagcacacagtcacgagcacgcaaggaacgtggggacacacagtaaaggaactgcaacggaaagtgcgaaccagagtaagcatactgcacagatagacaaactcacaaggaaaaaacggaccgctaacctaagccggccctaccgcacgaaagctcgcaaccagggacaaagccaactgaagcgccacgggcatggcaatactggggccaagcaaacgaccaggggacaacctgggccaacgtcaccaggaaaccagtgaacgagcccactgagcccagctcaacggaaccaacgaaggcggcacaataaggggaaaaactagggatcacaaatccaaaaccggcaaaaacgaagcgacgaaacaccgcaaccaaagagaaaacaggcacaccagggcaccgcacaagcctccgagacacgcaaacagaaaacagagtacccacgacgaatacacaaggggaaccaggcacaaacaaacaggaccaactcgataaaggtcaccctcgacacccccagacgggcaacctgccaggaagcaaacaaacaaccaaaccgcgcgcaacacacacagacacaagaaacag

SEQ ID NO: 103801 - DNA, 678 bp, Homo sapiens
gtaattcttaattataaaattagcatagtagtatcgaaaaagttgatgtagcatccagaagtaatggttcctgtcctttccttgaggggcttaagaaggaagagaactaacatttattgctctttgctggttgtttttcctttgcagacctctaaatacctgattcctcagtccttggggtttatttctgtattttaggtctttatctttgtatctttcaataccaactataagctgataacttccagttttctaccttcggcccacaccgttcccagactcctgtatttcattccaaactcagtctttttacttgcatgcctcactagcacctcagatttaatatataaaataggacctgatcctccccacaacctctcttccattttttcattatctgtttaaatagtccaattgcatccagcaactcaagccagaaacttggagtaattatttacactcctcatcctctacatctagaccaccactaagtccttttttttttcttttaaagagacagggtcttgctccatctcccaggctggagtgtgatggcacagtcatagctcaccgcagcctcggactcctaggctcaagcaatcctcctgcctctgtctccagagtagctgggactacagacatacaccaccgcacacagctaatttttaaattttttaa

SEQ ID NO: 103802 - DNA, 1196 bp, Homo sapiens
agcgggatagtacgcgccggctcgcctggcccggctgcagtggatgttgctggaacccacgcggaggaaggaagagacgcaggcaggctgcggttacccaagcggccacccgggcctcagggaccccttccccgagagacggcaccatgacccagggaaagctctccgtggctaacaaggcccctgggaccgaggggcagcagcaggtgcatggcgagaagaaggaggctccagcagtgccctcagccccaccctcctatgaggaagccacctctggggaggggatgaaggcaggggccttccccccagcccccacagcggtgcctctccaccctagctgggcctatgtggaccccagcagcagctccagctatgacaacggtttccccaccggagaccatgagctcttcaccactttcagctgggatgaccagaaagttcgtcgagtctttgtcagaaaggtctacaccatcctgctgattcagctgctggtgaccttggctgtcgtggctctctttactttctgtgaccctgtcaaggactatgtccaggccaacccaggctggtactgggcatcctatgctgtgttctttgcaacctacctgaccctggcttgctgttctggacccaggaggcatttcccctggaacctgattctcctgaccgtctttaccctgtccatggcctacctcactgggatgctgtccagctactacaacaccacctccgtgctgctgtgcctgggcatcacggcccttgtctgcctctcagtcaccgtcttcagcttccagaccaagttcgacttcacctcctgccagggcgtgctcttcgtgcttctcatgactcttttcttcagcggactcatcctggccatcctcctacccttccaatatgtgccctggctccatgcagtttatgcagcactgggagcgggtgtatttacattgttcctggcacttgacacccagttgctgatgggtaaccgacgccactcgctgagccctgaggagtatatttttggagccctcaacatttacctagacatcatctatatcttcaccttcttcctgcagctttttggcactaaccgagaatgaggagccctccctgccccaccgtcctccagagaatgcgcccctcctggttccctgtccctcccctgcgctcctgcgagaccagatataaaactagctgcc

SEQ ID NO: 103803 - DNA, 847 bp, Homo sapiens
catagggagtagccaccatggtctacacctcccactacaaatcccctgggcgcagacccctgaagactcaccccaccgtgacctactggagggtcaatgaaggtctggtgtttgtgggtgtcctcctcccttccctacacacccgccggcccactttccctctcttttccccttccctctgtggcctggccacctgggctttcgcagaatatgtagacaggacacgagggagaagtgaaggacaagagggcaagggtcttcaggcctcaggtttgcagtgggtctacctctctcccccttcctcatttcccatatcctcgttgctaggactgctgttttaaggaatgttttccaaggaactgtcgaggcaggaaggcagctatgacagacatttactaagtgtgtgccagggcacagggttcgcgtctgggtttgtttcggaggatgcattgatttgcaagacctgctgggatctctgtcctcagagagctgactgtatagacaagtgattggacaactaccacacagtgacacaaacacagtgacagatgcctcagcaccttacctaacccacctaacagtcagggaaggcttcctggaagaagcggtatccacactgagtcccaaaggataggcatgagttagtctggtgaagaggcaggaaaatgagtgtttaaggctgaaagaatagaatgtgcaggggctcacaggcaagagaatacatggttgaaaaaatatacttgggttgagaacctgatcgggggaggaatgtatagcggggctggagggtgctgcgcagggaggccgcggaggctttcttaagaaacttgaacttgagtgaagggca

SEQ ID NO: 103804 - DNA, 4786 bp, Homo sapiens
agcgggatagtacgcgccggctcgcctggcccggctgcagtggatgttgctggaacccacgcggaggaaggaagagacgcaggcaggctgcggttacccaagcggccacccgggcctcagggaccccttccccgagagacggcaccatgacccagggaaagctctccgtggctaacaaggcccctgggaccgaggggcagcagcaggtgcatggcgagaagaaggaggctccagcagtgccctcagccccaccctcctatgaggaagccacctctggggaggggatgaaggcaggggccttccccccagcccccacagcggtgcctctccaccctagctgggcctatgtggaccccagcagcagctccagctatgacaacggtttccccaccggagaccatgagctcttcaccactttcagctgggatgaccagaaagttcgtcgagtctttgtcagaaaggtctacaccatcctgctgattcagctgctggtgaccttggctgtcgtggctctctttactttctgtgaccctgtcaaggactatgtccaggccaacccaggctggtactgggcatcctatgctgtgttctttgcaacctacctgaccctggcttgctgttctggacccaggaggcatttcccctggaacctgattctcctgaccgtctttaccctgtccatggcctacctcactgggatgctgtccagctactacaacaccacctccgtgctgctgtgcctgggcatcacggcccttgtctgcctctcagtcaccgtcttcagcttccagaccaagttcgacttcacctcctgccagggcgtgctcttcgtgcttctcatgactcttttcttcagcggactcatcctggccatcctcctacccttccaatatgtgccctggctccatgcagtttatgcagcactgggagcgggtgtatttacattgttcctggcacttgacacccagttgctgatgggtaaccgacgccactcgctgagccctgaggagtatatttttggagccctcaacatttacctagacatcatctatatcttcaccttcttcctgcagctttttggcactaaccgagaatgaggagccctccctgccccaccgtcctccagagaatgcgcccctcctggttccctgtccctcccctgcgctcctgcgagaccagatataaaactagctgccaacccagcctgtggccaggtcactgtctaccccagcccagcccagccctctgccgcttgtacatacgccatggggaccctgaggaactgaggccacgtcaatccctgtgccgccccattcgcccgttacatcttccaaactgggacggtcaaggctgaaggctcctctgggtttgagggtccaagggacaaggaggagaagcctagcaggatttcagatgcaggagagagacccaggaagcccggcagagccctgagccccactgcaattcctcctagggctgcacaatcatgtggccttagggcacactgtcctgcatccagtctgtgtcctcctgtctttctcatccaggtcaggcattgacactttgtaagaaagggggtaggggacacagctgggcaggtggagtgggtgggcaggatggctgtcccagtctgcccatcttctcttggctctgggaccagcggcttgttctagggatttggacctggaggccaagggcaataggagagggtctgaagcctgtgctgtctgctgcttgctgtgaatggccctcccgggtcatgacagagctcttttggggcaggaggtgagggcagggggccccgctccttggtaagggcctgccctggggctcccagggaagtgggagctggggagccaatccacccagacccgcgtccacctgggaggcatttggggttgcaggaccgagacccacatcctctcactcacttctccacccgccaggcagctgccacaggcctaaggctgagtgaggtgtgattgggccctccggctggatgttctgggggaggaggcaatcgctgtagctgccaggccagccccatctggaaggagtccctgctctgcctcagccctaacccgaggctgtgtgggagtcccttctgcacctcttatttcctaaacccttcctgtcagctgctgtttgctggctcgtccccagccaggcctcctgaggtcttcatagttggcacagtccacatctcttctagcttcactggccactcactcagcccagagtccctaagtgctcccccacttatctctgcatctctccaatttggaagccatccagctgatgctaacagccagggccagtccctccagctggtcccatgtaatgaggccagggctccttatcagcttccaggcggctgggatctcaggcagggtgtgcgtcagccctccaacccccagaggggcgcctgtggggagggaaccaggaggccacactgggggagcgtgcagccagcatgtgcagtggccaactccaggccagtggaaagttactgtgtggatacaggaaggctctgagtggctagcaggaccctcccttggttcgccctcctcctcttctctctcccctgtgctgggagctccgtctgccttgggaagggagacgaggtgtgctgttccttcccagccccatccctccccacccttcctactcccagctttcaagaaacattgcagaagcatttgaagttttgttccatcttggatatttgaagagaaaaggagccaagaactggcgggtggtgtgtgtgcagcaaaggcattgggggcacgggtgagatgcccactgtgtgctggtctaaattaatccatcgcagtgatcctccagagacagcgctctgctcatgtccgtagcagagggaaaagccgaggtgctcagaaaggctcggtaatgagtcccaggtcatacggctagcgagtggcgggcctggggttcagacccacagctgcctcaagcaaacagggtatcacgcttgcccctgggcctgggtgggggccggaatgagaccacatgagagcgcagagaggtgggtggtcaggccctgatgtcctggggatttcttgtcctcagtgccacccggcctcccgtctttcctgaaacccctcgccagattttgcactctgaggtttctatcttccagacaagagctgggaggcaagatttctggtttctggttcctagcctcactgccagcgggctcctgctattaggtgagggtttcttgctgtctggaattcagtttttccatctgccacatggaagttcatagccaggatagggcgggagaggcaccagaacatttctctccactgactttctcacccggttcccaccctcctccacctcctctcctccgggcccctcagtttcctctcctcatctctggcctcagttccagagggttagccccagcaccccactctcctgccactgtcagatagccttggtcatgcttcctagaatctacttgtccaagttctcctctccctgggataagttactgcagaaactggggatttagaagcttattcagggctgagtgccaaaagcttgggggaggagggacaggtcctcggcaataaacagtgtcacacacgcatcacagccatttgagaaatggcttctttgcagagctggggaagccgggcagaagatgccgcagcctcctactctgggtcctgagggggggtggcaggtaccacagtgtaggcagcagggtcagggccaaagtctatgcgttccatctccaatccaggcagtgaggaatcctgaaacaccaggagaggcgtcagaagtaggaagggcaggggaacaggaatgcaagattaaggaaaccgcagctgagcaggtgtcacaagctgtaaaggaggaagggagtctgcaggcccttcacatttttggcctgggtggggctgggcccaggaaggggtgggctggattttgtaaagctggaggcagccaggaatctgactgtccggaatgtgagttgaggggtctcccactgaagtcctcttctggaagctgcagatgggggcccgggaggcacacacgagtctgggactcattcccgggcacacctatggctccttcggtatcacctggggaagccccggaatcttagttcttccattccctactcttccttccgagggagtcaggatgggacagacacccattttccaaaaggctccttgcctccttccctggcccacctgaagccaagtcccaggtgtcctggctgctctcctgggcggggtgggatttttgcataagcactttgctgccctccagtggctgcttgaggaaacgcagggcctggtttgggagagtcaccgagggcccatgtggctggaggttgggggcaggatctggcccgagctctcctcagacctccccagacctgtcttctcatcagccaccgctgttttcttttgccgaacgatggttgcatctctcggacacagtgtaccccctcccaagccctccctgagccgttctcctgagtccctgagggcagacacagctccagggacccaggccggctgccacacccccgacactcctgctgtccactggccttagctcctgcaagttccccagtgtccgcacctgttcccttccctgacctcaccttcctggggtctgtgactgactggagataaaaataaaagcaattgtgacacctgagacttggcttcaggtgggccagggaaggaggcaaggagccttttggaagctgggtgtctgtcccatcctgactcccgtcgac

SEQ ID NO: 103805 - DNA, 4531 bp, Homo sapiens
catagggagtagccaccatggtctacacctcccactacaaatcccctgggcgcagacccctgaagactcaccccaccgtgacctactggagggtcaatgaaggcagcagctccagctatgacaacggtttccccaccggagaccatgagctcttcaccactttcagctgggatgaccagaaagttcgtcgagtctttgtcagaaaggtctacaccatcctgctgattcagctgctggtgaccttggctgtcgtggctctctttactttctgtgaccctgtcaaggactatgtccaggccaacccaggctggtactgggcatcctatgctgtgttctttgcaacctacctgaccctggcttgctgttctggacccaggaggcatttcccctggaacctgattctcctgaccgtctttaccctgtccatggcctacctcactgggatgctgtccagctactacaacaccacctccgtgctgctgtgcctgggcatcacggcccttgtctgcctctcagtcaccgtcttcagcttccagaccaagttcgacttcacctcctgccagggcgtgctcttcgtgcttctcatgactcttttcttcagcggactcatcctggccatcctcctacccttccaatatgtgccctggctccatgcagtttatgcagcactgggagcgggtgtatttacattgttcctggcacttgacacccagttgctgatgggtaaccgacgccactcgctgagccctgaggagtatatttttggagccctcaacatttacctagacatcatctatatcttcaccttcttcctgcagctttttggcactaaccgagaatgaggagccctccctgccccaccgtcctccagagaatgcgcccctcctggttccctgtccctcccctgcgctcctgcgagaccagatataaaactagctgccaacccagcctgtggccaggtcactgtctaccccagcccagcccagccctctgccgcttgtacatacgccatggggaccctgaggaactgaggccacgtcaatccctgtgccgccccattcgcccgttacatcttccaaactgggacggtcaaggctgaaggctcctctgggtttgagggtccaagggacaaggaggagaagcctagcaggatttcagatgcaggagagagacccaggaagcccggcagagccctgagccccactgcaattcctcctagggctgcacaatcatgtggccttagggcacactgtcctgcatccagtctgtgtcctcctgtctttctcatccaggtcaggcattgacactttgtaagaaagggggtaggggacacagctgggcaggtggagtgggtgggcaggatggctgtcccagtctgcccatcttctcttggctctgggaccagcggcttgttctagggatttggacctggaggccaagggcaataggagagggtctgaagcctgtgctgtctgctgcttgctgtgaatggccctcccgggtcatgacagagctcttttggggcaggaggtgagggcagggggccccgctccttggtaagggcctgccctggggctcccagggaagtgggagctggggagccaatccacccagacccgcgtccacctgggaggcatttggggttgcaggaccgagacccacatcctctcactcacttctccacccgccaggcagctgccacaggcctaaggctgagtgaggtgtgattgggccctccggctggatgttctgggggaggaggcaatcgctgtagctgccaggccagccccatctggaaggagtccctgctctgcctcagccctaacccgaggctgtgtgggagtcccttctgcacctcttatttcctaaacccttcctgtcagctgctgtttgctggctcgtccccagccaggcctcctgaggtcttcatagttggcacagtccacatctcttctagcttcactggccactcactcagcccagagtccctaagtgctcccccacttatctctgcatctctccaatttggaagccatccagctgatgctaacagccagggccagtccctccagctggtcccatgtaatgaggccagggctccttatcagcttccaggcggctgggatctcaggcagggtgtgcgtcagccctccaacccccagaggggcgcctgtggggagggaaccaggaggccacactgggggagcgtgcagccagcatgtgcagtggccaactccaggccagtggaaagttactgtgtggatacaggaaggctctgagtggctagcaggaccctcccttggttcgccctcctcctcttctctctcccctgtgctgggagctccgtctgccttgggaagggagacgaggtgtgctgttccttcccagccccatccctccccacccttcctactcccagctttcaagaaacattgcagaagcatttgaagttttgttccatcttggatatttgaagagaaaaggagccaagaactggcgggtggtgtgtgtgcagcaaaggcattgggggcacgggtgagatgcccactgtgtgctggtctaaattaatccatcgcagtgatcctccagagacagcgctctgctcatgtccgtagcagagggaaaagccgaggtgctcagaaaggctcggtaatgagtcccaggtcatacggctagcgagtggcgggcctggggttcagacccacagctgcctcaagcaaacagggtatcacgcttgcccctgggcctgggtgggggccggaatgagaccacatgagagcgcagagaggtgggtggtcaggccctgatgtcctggggatttcttgtcctcagtgccacccggcctcccgtctttcctgaaacccctcgccagattttgcactctgaggtttctatcttccagacaagagctgggaggcaagatttctggtttctggttcctagcctcactgccagcgggctcctgctattaggtgagggtttcttgctgtctggaattcagtttttccatctgccacatggaagttcatagccaggatagggcgggagaggcaccagaacatttctctccactgactttctcacccggttcccaccctcctccacctcctctcctccgggcccctcagtttcctctcctcatctctggcctcagttccagagggttagccccagcaccccactctcctgccactgtcagatagccttggtcatgcttcctagaatctacttgtccaagttctcctctccctgggataagttactgcagaaactggggatttagaagcttattcagggctgagtgccaaaagcttgggggaggagggacaggtcctcggcaataaacagtgtcacacacgcatcacagccatttgagaaatggcttctttgcagagctggggaagccgggcagaagatgccgcagcctcctactctgggtcctgagggggggtggcaggtaccacagtgtaggcagcagggtcagggccaaagtctatgcgttccatctccaatccaggcagtgaggaatcctgaaacaccaggagaggcgtcagaagtaggaagggcaggggaacaggaatgcaagattaaggaaaccgcagctgagcaggtgtcacaagctgtaaaggaggaagggagtctgcaggcccttcacatttttggcctgggtggggctgggcccaggaaggggtgggctggattttgtaaagctggaggcagccaggaatctgactgtccggaatgtgagttgaggggtctcccactgaagtcctcttctggaagctgcagatgggggcccgggaggcacacacgagtctgggactcattcccgggcacacctatggctccttcggtatcacctggggaagccccggaatcttagttcttccattccctactcttccttccgagggagtcaggatgggacagacacccattttccaaaaggctccttgcctccttccctggcccacctgaagccaagtcccaggtgtcctggctgctctcctgggcggggtgggatttttgcataagcactttgctgccctccagtggctgcttgaggaaacgcagggcctggtttgggagagtcaccgagggcccatgtggctggaggttgggggcaggatctggcccgagctctcctcagacctccccagacctgtcttctcatcagccaccgctgttttcttttgccgaacgatggttgcatctctcggacacagtgtaccccctcccaagccctccctgagccgttctcctgagtccctgagggcagacacagctccagggacccaggccggctgccacacccccgacactcctgctgtccactggccttagctcctgcaagttccccagtgtccgcacctgttcccttccctgacctcaccttcctggggtctgtgactgactggagataaaaataaaagcaattgtgacacctgagacttggcttcaggtgggccagggaaggaggcaaggagccttttggaagctgggtgtctgtcccatcctgactcccgtcgac

SEQ ID NO: 103806 - DNA, 1426 bp, Homo sapiens
cccgctcagagccagtttctcccgctcagagccagtttctcccgctcagttccagagggttagccccagcaccccactctcctgccactgtcagatagccttggtcatgcttcctagaatctacttgtccaagttctcctctccctgggataagttactgcagaaactggggatttagaagcttattcagggctgagtgccaaaagcttgggggaggagggacaggtcctcggcaataaacagtgtcacacacgcatcacagccatttgagaaatggcttctttgcagagctggggaagccgggcagaagatgccgcagcctcctactctgggtcctgagggggggtggcaggtaccacagtgtaggcagcagggtcagggccaaagtctatgcgttccatctccaatccaggcagtgaggaatcctgaaacaccaggagaggcgtcagaagtaggaagggcaggggaacaggaatgcaagattaaggaaaccgcagctgagcaggtgtcacaagctgtaaaggaggaagggagtctgcaggcccttcacatttttggcctgggtggggctgggcccaggaaggggtgggctggattttgtaaagctggaggcagccaggaatctgactgtccggaatgtgagttgaggggtctcccactgaagtcctcttctggaagctgcagatgggggcccgggaggcacacacgagtctgggactcattcccgggcacacctatggctccttcggtatcacctggggaagccccggaatcttagttcttccattccctactcttccttccgagggagtcaggatgggacagacacccattttccaaaaggctccttgcctccttccctggcccacctgaagccaagtcccaggtgtcctggctgctctcctgggcggggtgggatttttgcataagcactttgctgccctccagtggctgcttgaggaaacgcagggcctggtttgggagagtcaccgagggcccatgtggctggaggttgggggcaggatctggcccgagctctcctcagacctccccagacctgtcttctcatcagccaccgctgttttcttttgccgaacgatggttgcatctctcggacacagtgtaccccctcccaagccctccctgagccgttctcctgagtccctgagggcagacacagctccagggacccaggccggctgccacacccccgacactcctgctgtccactggccttagctcctgcaagttccccagtgtccgcacctgttcccttccctgacctcaccttcctggggtctgtgactgactggagataaaaataaaagcaattgtgacacctgagacttggcttcaggtgggccagggaaggaggcaaggagccttttggaagctgggtgtctgtcccatcctgactcccgtcgac

SEQ ID NO: 103807 - DNA, 281 bp, Homo sapiens
cctgcatcgatagcgctcgtggacgctacgccgcgacgagtaggagggccgctgactgcataccaacgccgcccagtctgtgtcctcctgtctttctcatccaggtcaggcattgacactttgtaagaaagggggtaggggacacagctgggcaggtggagtgggtgggcaggatggctgtcccagtctgcccatcttctcttggctctgggaccagctggcgttggatagccgtacgacttgcaatcaaatgcatgcaagaatgcatccaacgccgatga

SEQ ID NO: 103808 - DNA, 4683 bp, Homo sapiens
agcgggatagtacgcgccggctcgcctggcccggctgcagtggatgttgctggaacccacgcggaggaaggaagagacgcaggcaggctgcggttacccaagcggccacccgggcctcagggaccccttccccgagagacggcaccatgacccagggaaagctctccgtggctaacaaggcccctgggaccgaggggcagcagcaggtgcatggcgagaagaaggaggctccagcagtgccctcagccccaccctcctatgaggaagccacctctggggaggggatgaaggcaggggccttccccccagcccccacagcggtgcctctccaccctagctgggcctatgtggaccccagcagcagctccagctatgacaacggtttccccaccggagaccatgagctcttcaccactttcagctgggatgaccagaaagttcgtcgagtctttgtcagaaaggtctacaccatcctgctgattcagctgctggtgaccttggctgtcgtggctctctttactttctgtgaccctgtcaaggactatgtccaggccaacccaggctggtactgggcatcctatgctgtgttctttgcaacctacctgaccctggcttgctgttctggacccaggaggcatttcccctggaacctgattctcctgaccgtctttaccctgtccatggcctacctcactgggatgctgtccagctactacaacaccacctccgtgctgctgtgcctgggcatcacggcccttgtctgcctctcagtcaccgtcttcagcttccagaccaagttcgacttcacctcctgccagggcgtgctcttcgtgcttctcatgactcttttcttcagcggactcatcctggccatcctcctacccttccaatatgtgccctggctccatgcagtttatgcagcactgggagcgggtgtatttacattgttcctggcacttgacacccagttgctgatgggtaaccgacgccactcgctgagccctgaggagtatatttttggagccctcaacatttacctagacatcatctatatcttcaccttcttcctgcagctttttggcactaaccgagaatgaggagccctccctgccccaccgtcctccagagaatgcgcccctcctggttccctgtccctcccctgcgctcctgcgagaccagatataaaactagctgccaacccagcctgtggccaggtcactgtctaccccagcccagcccagccctctgccgcttgtacatacgccatggggaccctgaggaactgaggccacgtcaatccctgtgccgccccattcgcccgttacatcttccaaactgggacggtcaaggctgaaggctcctctgggtttgagggtccaagggacaaggaggagaagcctagcaggatttcagatgcaggagagagacccaggaagcccggcagagccctgagccccactgcaattcctcctagggctgcacaatcatgtggccttagggcacactgtcctgcatccagtctgtgtcctcctgtctttctcatccaggtcaggcattgacactttgtaagaaagggggtaggggacacagctgggcaggtggagtgggtgggcaggatggctgtcccagtctgcccatcttctcttggctctgggaccagcggcttgttctagggatttggacctggaggccaagggcaataggagagggtctgaagcctgtgctgtctgctgcttgctgtgaatggccctcccgggtcatgacagagctcttttggggcaggaggtgagggcagggggccccgctccttggtaagggcctgccctggggctcccagggaagtgggagctggggagccaatccacccagacccgcgtccacctgggaggcatttggggttgcaggaccgagacccacatcctctcactcacttctccacccgccaggcagctgccacaggcctaaggctgagtgaggtgtgattgggccctccggctggatgttctgggggaggaggcaatcgctgtagctgccaggccagccccatctggaaggagtccctgctctgcctcagccctaacccgaggctgtgtgggagtcccttctgcacctcttatttcctaaacccttcctgtcagctgctgtttgctggctcgtccccagccaggcctcctgaggtcttcatagttggcacagtccacatctcttctagcttcactggccactcactcagcccagagtccctaagtgctcccccacttatctctgcatctctccaatttggaagccatccagctgatgctaacagccagggccagtccctccagctggtcccatgtaatgaggccagggctccttatcagcttccaggcggctgggatctcaggcagggtgtgcgtcagccctccaacccccagaggggcgcctgtggggagggaaccaggaggccacactgggggagcgtgcagccagcatgtgcagtggccaactccaggccagtggaaagttactgtgtggatacaggaaggctctgagtggctagcaggaccctcccttggttcgccctcctcctcttctctctcccctgtgctgggagctccgtctgccttgggaagggagacgaggtgtgctgttccttcccagccccatccctccccacccttcctactcccagctttcaagaaacattgcagaagcatttgaagttttgttccatcttggatatttgaagagaaaaggagccaagaactggcgggtggtgtgtgtgcagcaaaggcattgggggcacgggtgagatgcccactgtgtgctggtctaaattaatccatcgcagtgatcctccagagacagcgctctgctcatgtccgtagcagagggaaaagccgaggtgctcagaaaggctcggtaatgagtcccaggtcatacggctagcgagtggcgggcctggggttcagacccacagctgcctcaagcaaacagggtatcacgcttgcccctgggcctgggtgggggccggaatgagaccacatgagagcgcagagaggtgggtggtcaggccctgatgtcctggggatttcttgtcctcagtgccacccggcctcccgtctttcctgaaacccctcgccagattttgcactctgaggtttctatcttccagacaagagctgggaggcaagatttctggtttctggttcctagcctcactgccagcgggctcctgctattaggtgagggtttcttgctgtctggaattcagtttttccatctgccacatggaagttcatagccaggatagggcgggagaggcaccagaacatttctctccactgactttctcacccggttcccaccctcctccacctcctctcctccgggcccctcagtttcctctcctcatctctggcctcagttccagagggttagccccagcaccccactctcctgccactgtcagatagccttggtcatgcttcctagaatctacttgtccaaataaacagtgtcacacacgcatcacagccatttgagaaatggcttctttgcagagctggggaagccgggcagaagatgccgcagcctcctactctgggtcctgagggggggtggcaggtaccacagtgtaggcagcagggtcagggccaaagtctatgcgttccatctccaatccaggcagtgaggaatcctgaaacaccaggagaggcgtcagaagtaggaagggcaggggaacaggaatgcaagattaaggaaaccgcagctgagcaggtgtcacaagctgtaaaggaggaagggagtctgcaggcccttcacatttttggcctgggtggggctgggcccaggaaggggtgggctggattttgtaaagctggaggcagccaggaatctgactgtccggaatgtgagttgaggggtctcccactgaagtcctcttctggaagctgcagatgggggcccgggaggcacacacgagtctgggactcattcccgggcacacctatggctccttcggtatcacctggggaagccccggaatcttagttcttccattccctactcttccttccgagggagtcaggatgggacagacacccattttccaaaaggctccttgcctccttccctggcccacctgaagccaagtcccaggtgtcctggctgctctcctgggcggggtgggatttttgcataagcactttgctgccctccagtggctgcttgaggaaacgcagggcctggtttgggagagtcaccgagggcccatgtggctggaggttgggggcaggatctggcccgagctctcctcagacctccccagacctgtcttctcatcagccaccgctgttttcttttgccgaacgatggttgcatctctcggacacagtgtaccccctcccaagccctccctgagccgttctcctgagtccctgagggcagacacagctccagggacccaggccggctgccacacccccgacactcctgctgtccactggccttagctcctgcaagttccccagtgtccgcacctgttcccttccctgacctcaccttcctggggtctgtgactgactggagataaaaataaaagcaattgtgacacctgagacttggcttcaggtgggccagggaaggaggcaaggagccttttggaagctgggtgtctgtcccatcctgactcccgtcgac

SEQ ID NO: 103809 - DNA, 3209 bp, Homo sapiens
aaaaactaggctagtacgaggcccgtgtgggtgggcaggatggctgtcccagtctgcccatcttctcttggctctgggaccagcggcttgttctagggatttggacctggaggccaagggcaataggagagggtctgaagcctgtgctgtctgctgcttgctgtgaatggccctcccgggtcatgacagagctcttttggggcaggaggtgagggcagggggccccgctccttggtaagggcctgccctggggctcccagggaagtgggagctggggagccaatccacccagacccgcgtccacctgggaggcatttggggttgcaggaccgagacccacatcctctcactcacttctccacccgccaggcagctgccacaggcctaaggctgagtgaggtgtgattgggccctccggctggatgttctgggggaggaggcaatcgctgtagctgccaggccagccccatctggaaggagtccctgctctgcctcagccctaacccgaggctgtgtgggagtcccttctgcacctcttatttcctaaacccttcctgtcagctgctgtttgctggctcgtccccagccaggcctcctgaggtcttcatagttggcacagtccacatctcttctagcttcactggccactcactcagcccagagtccctaagtgctcccccacttatctctgcatctctccaatttggaagccatccagctgatgctaacagccagggccagtccctccagctggtcccatgtaatgaggccagggctccttatcagcttccaggcggctgggatctcaggcagggtgtgcgtcagccctccaacccccagaggggcgcctgtggggagggaaccaggaggccacactgggggagcgtgcagccagcatgtgcagtggccaactccaggccagtggaaagttactgtgtggatacaggaaggctctgagtggctagcaggaccctcccttggttcgccctcctcctcttctctctcccctgtgctgggagctccgtctgccttgggaagggagacgaggtgtgctgttccttcccagccccatccctccccacccttcctactcccagctttcaagaaacattgcagaagcatttgaagttttgttccatcttggatatttgaagagaaaaggagccaagaactggcgggtggtgtgtgtgcagcaaaggcattgggggcacgggtgagatgcccactgtgtgctggtctaaattaatccatcgcagtgatcctccagagacagcgctctgctcatgtccgtagcagagggaaaagccgaggtgctcagaaaggctcggtaatgagtcccaggtcatacggctagcgagtggcgggcctggggttcagacccacagctgcctcaagcaaacagggtatcacgcttgcccctgggcctgggtgggggccggaatgagaccacatgagagcgcagagaggtgggtggtcaggccctgatgtcctggggatttcttgtcctcagtgccacccggcctcccgtctttcctgaaacccctcgccagattttgcactctgaggtttctatcttccagacaagagctgggaggcaagatttctggtttctggttcctagcctcactgccagcgggctcctgctattaggtgagggtttcttgctgtctggaattcagtttttccatctgccacatggaagttcatagccaggatagggcgggagaggcaccagaacatttctctccactgactttctcacccggttcccaccctcctccacctcctctcctccgggcccctcagtttcctctcctcatctctggcctcagttccagagggttagccccagcaccccactctcctgccactgtcagatagccttggtcatgcttcctagaatctacttgtccaagttctcctctccctgggataagttactgcagaaactggggatttagaagcttattcagggctgagtgccaaaagcttgggggaggagggacaggtcctcggcaataaacagtgtcacacacgcatcacagccatttgagaaatggcttctttgcagagctggggaagccgggcagaagatgccgcagcctcctactctgggtcctgagggggggtggcaggtaccacagtgtaggcagcagggtcagggccaaagtctatgcgttccatctccaatccaggcagtgaggaatcctgaaacaccaggagaggcgtcagaagtaggaagggcaggggaacaggaatgcaagattaaggaaaccgcagctgagcaggtgtcacaagctgtaaaggaggaagggagtctgcaggcccttcacatttttggcctgggtggggctgggcccaggaaggggtgggctggattttgtaaagctggaggcagccaggaatctgactgtccggaatgtgagttgaggggtctcccactgaagtcctcttctggaagctgcagatgggggcccgggaggcacacacgagtctgggactcattcccgggcacacctatggctccttcggtatcacctggggaagccccggaatcttagttcttccattccctactcttccttccgagggagtcaggatgggacagacacccattttccaaaaggctccttgcctccttccctggcccacctgaagccaagtcccaggtgtcctggctgctctcctgggcggggtgggatttttgcataagcactttgctgccctccagtggctgcttgaggaaacgcagggcctggtttgggagagtcaccgagggcccatgtggctggaggttgggggcaggatctggcccgagctctcctcagacctccccagacctgtcttctcatcagccaccgctgttttcttttgccgaacgatggttgcatctctcggacacagtgtaccccctcccaagccctccctgagccgttctcctgagtccctgagggcagacacagctccagggacccaggccggctgccacacccccgacactcctgctgtccactggccttagctcctgcaagttccccagtgtccgcacctgttcccttccctgacctcaccttcctggggtctgtgactgactggagataaaaataaaagcaattgtgacacctgagacttggcttcaggtgggccagggaaggaggcaaggagccttttggaagctgggtgtctgtcccatcctgactcccgtcgac

SEQ ID NO: 103810 - DNA, 516 bp, Homo sapiens
agcagtaaaaaatacccctcaaattgtaaagactgttgattatgtaaaagtcaccaactgaataatagatactgtttttaaaaatcaagcatttccgtatctgttatgtcaattttaatgttttctttttttctctttcattccaatgagctttcatttggctttttatatataggaattttatttatagtcagaatctttcgttaatttctttaattattcataaaatgttttaattccgtggacatcttatttttcttttgagaaatttaacaaatattaggacatttccagaatgatattgtaaacatcaagtacattaaacagtgtacattaagctatatatatgtgtgtgtatatacatatatgtgtgtgtgtgtgtgtatatatatatgtatatgtaaaaaatactgtcgggtgtgtctgtagttcagctactcaggaggctgaagcaggagaatcacttggggccgggagtttgaggatgtggtgtattatgattgtgcctgtgaatag

SEQ ID NO: 103811 - DNA, 779 bp, Homo sapiens
ctcagtgttttcatagatagaatttgtttcattttagcctcaaaaaagagtatatgcacttcctatcttgtaaaattttattttgctatagaagaaactctccttagtttcttttttcttttctttctttcttttttttttaacctgagtttgacttaactgaagtagccaaggtgactcagaaaaattaagaaattcatgaggatgaggattagcttgctatgtcccagatgttcagttttcagcctagtattcttttatttatttctttttttttaacctgagctggacttaactgaaatagccaaggtgacccagaaaaattaagaaattcatgaggatgaggattagcttgctgtgtcccagatgttcagttttcagcctagtacatagggccaccccaggactctgcagtcagtgaaaatgtcaactgaggcatgaggccaggactctgagctccacactcaatttgaaagtggtgtcagtgggaacttacaaaagaggacaatctgggtggaatgacaggaggatcttcatgacctgggttcagggtcaattgccagctttattatttacttgcttcaggaacctggtcacatttcttaaccacttcatgccccagttgcttcatttttgtcaaataagcataaaatagtgcccacctcattgggtgaggtgtgaggagtaaatgaaataatgtataccaatgcttagaataatggctggcacattactctaagcgttggcatacattaaaccatcaagaattctttttggag

SEQ ID NO: 103812 - DNA, 115 bp, Homo sapiens
gattggtctgaggggttgagagccactgccttgccagggagctcgctgcccctgctcaggagccttttgaggctcccctctgcctgcagcagaagtcctgaccccttggcctggc

SEQ ID NO: 103813 - DNA, 445 bp, Homo sapiens
tttttttttttgtagagatgggactgtcactatgttgcctaaattgatctcaaatttctggcctcaagcaatcctcgtgccttggtttcccaaagtgctgggattacaggcatgagtcactgcattcaacctacattttgtttaaaatccttccatttgtattcggcttccttgtttacagtttttcacatatatctcataactggattatgagaatcaagggccaattagaagaagtaggtattgttacttattttatataaagagaagaattatggcttaaagaagtgagcaactgaaagtcaaacaacaggagcttgaaattaagcctatgtcattagattccgtagccaatgcactatcagatggtttcctacataaagctaaatttcttgggaaattttacaaagacgggatatatgtatcctcaatggaattagcataa

SEQ ID NO: 103814 - DNA, 729 bp, Homo sapiens
ctttgatccatgggctatttaaaagtatactattagtttccagatatttgaggaatttctggatagggtcctgttctgtattttttttctaattaaattccattttgatgatgtaaaacctttcaaattcattgagacttcttttatagtctctctctctcctctctctctttttttttttttttttttgagatggagtcctgctctgtcgcccaggctggagtacagtggtacaatctcagctcactgcaacctccacctcccaggttgaagtgattctcctgcctcaggctcctgaatagctgggactacaggcgcacgccaccacgcccagctaatttttgtatttttagtagagacagggtttcaccatgttggccaggctggtctcaaactcttgacctcaggtgatccacctgccttggcctcccaaagtgctgggattacaggcctgagccatcatgcctagcttgttttatagtctctctaaatgatctgtgggcttctgaaaacaatgtctgttccactgtgttattccattacatcaatcataaccctgtgatttcatagttttataaatggagacacacaataacttcgtgggtgatagcttactaattgatgccaggaggaaaaaaaatctttatttaactaccagttgagtttcttgggaactcagtgaccttggttgtgtcattcaccattctgagtcttattgctgcctcttcc

SEQ ID NO: 103815 - DNA, 359 bp, Homo sapiens
cacggacacacacagacacacacacacacacacaccactcaatgttctgtttttattttaaatgcaaaaccacagatgagtcacgagtctttggttctgcccatcaagcctatattattccctaagtctgcccattatccactatctgagatgacgacttcacacctcctccccttctcgagccatttaccccttgtctactgcatctgtttctagctcttgacctcgtttcctatttcactaagaaacaaacactcataattgccacatatcccatcaacacatccacccgtcacactcctctgagccccaagactctgcctccctgtccccaagaccctcagagaccagatctccat

SEQ ID NO: 103816 - DNA, 558 bp, Homo sapiens
gaggtcagcacttgggcccactgacagtgactgactgggggagaaggtcctgcagcccccttcccctgggtgtgttctggggacctgtggtttgctggcggaaacaagtgatgaggctggttagcggatgtgggaggctgtgaccccagggggccatagggtgcggtggaactgcaggccctgcagatgacggcagccagctgcttccaggaaccaggtgtccaaggccacctctgcaggggtttcctcttcagcctgcctggggtgagaggtcagtgcaccacagccgaggctggagcacagggagcttctgttgttctgatctatctctggaaaaccagccattcctcctccctgcagtcagaattctttgccctgtctgacctgaacttgcttagggagtcatgccactccccactgtggccatagtttctcttcctgtaaaattttattattttagttttttgtttttgagatatgcttcttctcttcctgtggttccatccgaaggattgtggtgagccccgtgccttcagttaataaagatttgtattgtga

SEQ ID NO: 103817 - DNA, 1871 bp, Homo sapiens
gaggtcagcacttgggcccactgacagtgactgactgggggagaaggtcctgcagcccccttcccctgggtgtgttctggggacctgtggtttgctggcggaaacaagtgatgaggctggttagcggatgtgggaggctgtgaccccagggggccatagggtgcggtggaactgcaggccctgcagatgacggcagccagctgcttccaggaaccaggtgtccaaggccacctctgcaggggtttcctcttcagcctgcctggggtgagaggtcagtgcaccacagccgaggctggagcacagggagcttctgttgttctgatctatctctggaaaaccagccattcctcctccctgcagtcagaattctttgccctgtctgacctgaacttgcttagggagtcatgccactccccactgtggccatagtttctcttcctgtaaaattttattattttagttttttgtttttgagatgtagtctcaccctgtcgcccaggctggagtgcaatgccgtgatctccgctcactgccacctccgcctctctagttcaagcgattttcctgcctcagcctcccgagtagctgggattccaggcgcccgccaccacgcctggctaattttttgtatttttagtagagacgggattttatcatgttggccaggctggtctcgaactcctgacctcaggtgatctgcccaccttggcctcccaaagtgctgggattacaggcatgagccactgtgcctggccccttcctgtaaaatttttaaatggagaattgggtgcgagatgtggtttccagcctggtgcctggggtgctgagctagtgagtggtgcagtccaggacacctttgctttatgtcacttacacggtcacctggagccggctcaagtggctaaagcatcctggggcccagagccaggtgataggtccctctggccaactggacagttgaggcctgtggttacccgaagcccagctggggccctggtccagcctcgcctcccagactctgcacctgctagcacagctgtccacgtctgtgtgagctgctctaggccgagggcctcagtttcaagagtgtgttggggtgggatggggcaggccgtggtcctccagcatgaagaaggagccatgaggagttcccatgacctcccgagacttgccataagtgttctagtccacatataagggtagggttgggattaccatttactgaccacatctgtgaggtgccgagctgggtgcttgacatcatttgcttggagaagcagctgctagtagacccattttacaggtgagagaaccaagtctcacagaggcctgggttcaagtcccacctctgccactaactggcatgtgaccctatctatccttcactgctctgagcctagaccctggcccctgcctggctccctgccaggctccctgccacccctcacgacctctgatggtcgttgtgggggtctcttgcctggctcccagggctagggttagggctctggaggtgctttcactcaaccaagggggccacagcactggggagtgaaactgccccgcctcaccctgcgttgccctctgggtctgtgagggtgggctggcaggaggcctaggccttgccctaggggcagtcctgcttcctcattttatagatagggaaactgaggctttgggaggactcactgacatacctaccttcaagatgagttcaggtgggctcagttctggggcttgggaaaagggccccagtggctttgggaagcacccccagcccagggtgaaacatgcttcttctcttcctgtggttccatccgaaggattgtggtgagccccgtgccttcagttaataaagatttgtattgtga

SEQ ID NO: 103818 - DNA, 1852 bp, Homo sapiens
gaggtcagcacttgggcccactgacagtgactgactgggggagaaggtcctgcagcccccttcccctgggtgtgttctggggacctgtggtttgctggcggaaacaagtgatgaggctggttagcggatgtgggaggctgtgaccccagggggccatagggtgcggtggaactgcaggccctgcagatgacggcagccagctgcttccaggaaccaggtgtccaaggccacctctgcaggggtttcctcttcagcctgcctggggtgagaggtcagtgcaccacagccgaggctggagcacagggagcttctgttgttctgatctatctctggaaaaccagccattcctcctccctgcagtcagaattctttgccctgtctgacctgaacttgcttagggagtcatgccactccccactgtggccatagtttctcttcctgtaaaattttattattttagttttttgtttttgagatgtagtctcaccctgtcgcccaggctggagtgcaatgccgtgatctccgctcactgccacctccgcctctctagttcaagcgattttcctgcctcagcctcccgagtagctgggattccaggcgcccgccaccacgcctggctaattttttgtatttttagtagagacgggattttatcatgttggccaggctggtctcgaactcctgacctcaggtgatctgcccaccttggcctcccaaagtgctgggattacaggcatgagccactgtgcctggccccttcctaattgggtgcgagatgtggtttccagcctggtgcctggggtgctgagctagtgagtggtgcagtccaggacacctttgctttatgtcacttacacggtcacctggagccggctcaagtggctaaagcatcctggggcccagagccaggtgataggtccctctggccaactggacagttgaggcctgtggttacccgaagcccagctggggccctggtccagcctcgcctcccagactctgcacctgctagcacagctgtccacgtctgtgtgagctgctctaggccgagggcctcagtttcaagagtgtgttggggtgggatggggcaggccgtggtcctccagcatgaagaaggagccatgaggagttcccatgacctcccgagacttgccataagtgttctagtccacatataagggtagggttgggattaccatttactgaccacatctgtgaggtgccgagctgggtgcttgacatcatttgcttggagaagcagctgctagtagacccattttacaggtgagagaaccaagtctcacagaggcctgggttcaagtcccacctctgccactaactggcatgtgaccctatctatccttcactgctctgagcctagaccctggcccctgcctggctccctgccaggctccctgccacccctcacgacctctgatggtcgttgtgggggtctcttgcctggctcccagggctagggttagggctctggaggtgctttcactcaaccaagggggccacagcactggggagtgaaactgccccgcctcaccctgcgttgccctctgggtctgtgagggtgggctggcaggaggcctaggccttgccctaggggcagtcctgcttcctcattttatagatagggaaactgaggctttgggaggactcactgacatacctaccttcaagatgagttcaggtgggctcagttctggggcttgggaaaagggccccagtggctttgggaagcacccccagcccagggtgaaacatgcttcttctcttcctgtggttccatccgaaggattgtggtgagccccgtgccttcagttaataaagatttgtattgtga

SEQ ID NO: 103819 - DNA, 2126 bp, Homo sapiens
gaggtcagcacttgggcccactgacagtgactgactgggggagaaggtcctgcagcccccttcccctgggtgtgttctggggacctgtggtttgctggcggaaacaagtgatgaggctggttagcggatgtgggaggctgtgaccccagggggccatagggtgcggtggaactgcaggccctgcagatgacggcagccagctgcttccaggaaccaggtgtccaaggccacctctgcaggggtttcctcttcagcctgcctggggtgagaggtcagtgcaccacagccgaggctggagcacagggagcttctgttgttctgatctatctctggaaaaccagccattcctcctccctgcagtcagaattctttgccctgtctgacctgaacttgcttagggagtcatgccactccccactgtggccatagtttctcttcctgtaaaattttattattttagttttttgtttttgagatgtagtctcaccctgtcgcccaggctggagtgcaatgccgtgatctccgctcactgccacctccgcctctctagttcaagcgattttcctgcctcagcctcccgagtagctgggattccaggcgcccgccaccacgcctggctaattttttgtatttttagtagagacgggattttatcatgttggccaggctggtctcgaactcctgacctcaggtgatctgcccaccttggcctcccaaagtgctgggattacaggcatgagccactgtgcctggccccttcctgtaaaatttttaaatggagaattgggtgcgagatgtggtttccagcctggtgcctggggtgctgagctagtgagtggtgcagtccaggacacctttgctttatgtcacttacacggtcacctggagccggctcaagtggctaaagcatcctggggcccagagccaggtgataggtccctctggccaactggacagttgaggcctgtggttacccgaagcccagctggggccctggtccagcctcgcctcccagactctgcacctgctagcacagctgtccacgtctgtgtgagctgctctaggccgagggcctcagtttcaagagtgtgttggggtgggatggggcaggccgtggtcctccagcatgaagaaggagccatgaggagttcccatgacctcccgagacttgccataagtgttctagtccacatataagggtagggttgggattaccatttactgaccacatctgtgaggtgccgagctgggtgcttgacatcatttgcttggagaagcagctgctagtagacccattttacaggtgagagaaccaagtctcacagaggcctgggttcaagtcccacctctgccactaactggcatgtgaccctatctatccttcactgctctgagcctagaccctggcccctgcctggctccctgccaggctccctgccacccctcacgacctctgatggtcgttgtgggggtctcttgcctggctcccagggctagggttagggctctggaggtgctttcactcaaccaagggggccacagcactggggagtgaaactgccccgcctcaccctgcgttgccctctgggtctgtgagggtgggctggcaggaggcctaggccttgccctaggggcagtcctgcttcctcattttatagatagggaaactgaggctttgggaggactcactgacatacctaccttcaagatgagttcaggtgggctcagttctggggcttgggaaaagggccccagtggctttgggaagcacccccagcccagggtgaaacatgcttcttctcttcctgtggttccatccgaaggattgtggtgagccccgtgccttcagttaataaagatttgtattgtgaaaagattttttcttttttttttgggacacagtctcactctgtcgcccaggctagagtggattggcgtgatctcggctcaatgcaaatctccagggttcaatcgattctcctgcctcaccctcccagctacttaggaggctgaagcaggagaatcgcttgaacccaggaggcagaggttgcagtgagccaagattgtgccactgcactccacactccagcctggcgacaaagtgagactgtctcaaaaaaaaaaaa

SEQ ID NO: 103820 - DNA, 1646 bp, Homo sapiens
gaggtcagcacttgggcccactgacagtgactgactgggggagaaggtcctgcagcccccttcccctgggtgtgttctggggacctgtggtttgctggcggaaacaagtgatgaggctggttagcggatgtgggaggctgtgaccccagggggccatagggtgcggtggaactgcaggccctgcagatgacggcagccagctgcttccaggaaccaggtgtccaaggccacctctgcaggggtttcctcttcagcctgcctggggtgagaggtcagtgcaccacagccgaggctggagcacagggagcttctgttgttctgatctatctctggaaaaccagccattcctcctccctgcagtcagaattctttgccctgtctgacctgaacttgcttagggagtcatgccactccccactgtggccatagtttctcttcctgtaaaattttattattttagttttttgtttttgagatgtagtctcaccctgtcgcccaggctggagtgcaatgccgtgatctccgctcactgccacctccgcctctctagttcaagcgattttcctgcctcagcctcccgagtagctgggattccaggcgcccgccaccacgcctggctaattttttgtatttttagtagagacgggattttatcatgttggccaggctggtctcgaactcctgacctcaggtgatctgcccaccttggcctcccaaagtgctgggattacaggcatgagccactgtgcctggccccttcctgtaaaatttttaaatggagaattgggtgcgagatgtggtttccagcctggtgcctggggtgctgagctagtgagtggtgcagtccaggacacctttgctttatgtcacttacacggtcacctggagccggctcaagtggctaaagcatcctggggcccagagccaggtgataggtccctctggccaactggacagttgaggcctgtggttacccgaagcccagctggggccctggtccagcctcgcctcccagactctgcacctgctagcacagctgtccacgtctgtgtgagctgctctaggccgagggcctcagtttcaagagtgtgttggggtgggatggggcaggccgtggtcctccagcatgaagaaggagccatgaggagttcccatgacctcccgagacttgccataagtgttctagtccacatataagggtagggttgggattaccatttactgaccacatctgtgaggtgccgagctgggtgcttgacatcatttgcttggagaagcagctgctagtagacccattttacaggtgagagaaccaagtctcacagaggcctgggttcaagtcccacctctgccactaactggcatgtgaccctatctatccttcactgctctgagccttgccctaggggcagtcctgcttcctcattttatagatagggaaactgaggctttgggaggactcactgacatacctaccttcaagatgagttcaggtgggctcagttctggggcttgggaaaagggccccagtggctttgggaagcacccccagcccagggtgaaacatgcttcttctcttcctgtggttccatccgaaggattgtggtgagccccgtgccttcagttaataaagatttgtattgtga

SEQ ID NO: 103821 - DNA, 871 bp, Homo sapiens
tagtagacccattttacaggtgagagaaccaagtctcacagaggcctgggttcaagtcccacctctgccactaactggcatgtgaccctatctatccttcactgctctgagcctagaccctggcccctgcctggctccctgccaggctccctgccacccctcacgacctctgatggtcgttgtgggggtctcttgcctggctcccagggctagggttagggctctggaggtgctttcactcaaccaagggggccacagcactggggagtgaaactgccccgcctcaccctgcgttgccctctgggtctgtgagggtgggctggcaggaggcctaggccttgccctaggggcagtcctgcttcctcattttatagatagggaaactgaggctttgggaggactcactgacatacctaccttcaagatgagttcaggtgggctcagttctggggcttgggaaaagggccccagtggctttgggaagcacccccagcccagggtgaaacatgcttcttctcttcctgtggttccatccgaaggattgtggtgagccccgtgccttcagttaataaagatttgtattgtgaaaagattttttcttttttttttgggacacagtctcactctgtcgcccaggctagagtggattggcgtgatctcggctcaatgcaaatctccagggttcaatcgattctcctgcctcaccctcccatgtagctgggattacagctgcctgccaaatttttgtatttttagtggaaccggggtttcaccatgttggccaggctggtcttgaactcctgacctcaactgatccgcccaccttggcctcccaagtgctgggattacaggcgcgagccacggcgcccag

SEQ ID NO: 103822 - DNA, 405 bp, Homo sapiens
aaggtatatgttcaaacaatgcatccttaattttttttagagacagggtctcgctgtgttgcccaggcaggtcttgaactcctgacctcaagcaattctcccacctaggcctcccaaagtgctgggattataggcatgagccaccacgcctggccatccttaatttttaagactccaaattaagttggaatagactgatatatctaaatcagatgaagcatgtttctctttaaaggagggaacttacaaaacagaagtatttttgttacatgagctaagaggcaataaagccttatttgacagtgtgctaggtacccacgatggcagcatgaagacaaaaacaggaggaatcaaagcaattgtactgtgcagataacatggttctttagggtcaaaggaaggctt

SEQ ID NO: 103823 - DNA, 277 bp, Homo sapiens
aaataagccaaacgccctccctcacatttgaaaactgacaattatttttatttgtgcaggcttaagatggaaataagaacttctaaaagaatttgaaaaataccctacttaccaaaaaagcttaaatcatttcctctgaaagtttccttccatctaaggtttgcttcggttccacagaccagcctcctcctgtcctcaatctgagggggaggaacgtgaccttcagtttccgctgatactgattttagggtcccacaagggtctctgtacttgccct

SEQ ID NO: 103824 - DNA, 534 bp, Homo sapiens
tgaggcagagtgtagatctgtcacccacgctggagtgcagtggtgcgatcttggctcactgcaacctccacctcccaggttgaagcgattctcctgcctcagcctcctgagtagctgagattacaggcacccaccaccacacccggctaatttttctatttttagtagtagagacagttttcaccgtgttgcgctgtctggtcttgaactcctgacctcatgatccaccctccttggcttcccgaagtgtttggattacaggtgtgacccactgttcaggtggggcattcaaaatgttaattcagcttgttgtggtttcttaaatttgagtgcacaactccgctaatatgcctgaaaaagatacaacaaaaattacccagataagagaagctgaggcaaaatggtgcagtgcataagaataggaaatgagagcggatggcaggtgtcctgggtgcagcctggagaagagactcctggatgattcccatgcacagccctgggggagaacagccttattgatgctgatcagcagag

SEQ ID NO: 103825 - DNA, 305 bp, Homo sapiens
tcgaagtgaatcaggtcaaagaaaaacctgaaataaggcccaaggaatactagtaaataattgatggcatctcagtttatctaagctgctgattatcactctgactgaattaaagaatgtagaaataatctggtttcagtaacatgaaaatacactcagtaaaagaaaccaaatgattaataggcctgtaatctcagcactttgggaggccgaggcaggaggactgcttgagcccaggaatttcagaccagcctgggcaacacagcaagaccctgtctctacaaaacgcaaaggaaaaaaaagga

SEQ ID NO: 103826 - DNA, 782 bp, Homo sapiens
gtattccagatcatttctctccattccaggaagtttgcatagctccctggacttctgctttgcactgccctgcaggagtgggtggggaaaggaagtggctttgaggcacacagaggggcttggtgaggccaccggaggaagcttctgccaccaatatgggacctgtgcccagcctaccagaagagagcatctgaaaacatgtatcgacatggtaacccctctgcttgaagcctcacatggctccctattgccttggtgctgaacaccctatggctgaccgtggcccagcctctgcaacagctctgcctcctctccagtggtgaagacccagcctgctgagactcctcctgcagttcctcaacatgcctgcatttctgctgcctcagggcctttgcgaaggttgttccttgtaactggaatgcccttccatcccttttttattcaaaaggctgcaattttaattgaagaaagttcccttccaaggttcatgagttgcctgacttgcccaccggtttcctgcaagatcccttggcctggcacttagtgctcaggaaatatttggtgatgggccaactgagtgagaaggtgggatctggtgggaaggaaagcggaaaggtagaaattctgctcacttcctcattcccacctcccaaggaacccctggtgtccctgtggaacccgctttgggaaccggtggttcaggtcagccttttcactttgtactcaaagccacatcgcattgaagccacaggtggggcaaggtcatgcatgacctgagtctc

SEQ ID NO: 103827 - DNA, 626 bp, Homo sapiens
aaggggttctgggtggcatccttggggtaccaaccctgcttccatcctgcgctctgaatttcctcacagcccttttctgtctctggtagaaggtgcagaaggtaggctttgccaccttccctgggcctggcaccaagctcgggggtcttgtacacactttcccttctctaactggggtgtgggcccatttcctagatgagcttgctgagaatcaggacagctggtatcagagccaggacttcccagtcttgcacaaacaacctgtgcatttttgagtccaccaaataaggcctcctgcctggtccggctcacccctgccagcccccagcaaatgcagcctggtgcgtccccacccctgccaagagcccaggagtgctctggcagagaagtgcagggatgaggaaggaggctgtgccctccaggggactcagctgcgttagaggaggtgctgctgcagtggcaggggtctccagacatcccacgcaggggtcctttcagatcaggcatctcttcaccagaccaccgtattcctttttcagccctcgtctcttgcacgtgggggtgcagtgtttggctctcacatccccacattccagctggtgggggtttgagctgggtgttccttc

SEQ ID NO: 103828 - DNA, 443 bp, Homo sapiens
  misc_feature (415)..(415): n is a, c, g, or t
  misc_feature (422)..(422): n is a, c, g, or t
atcacaaatgattaatgagctatcagtttatttttctgacagttgatatcaagctactcggtgtgtcatttccaaattttttatttcttttgaaaaccaggtttgtttgtttttttttttcctacttccaattttctttctcagtgattcttttgagattactggtaatggtactgcaactcagagggttgctttgacaggactagagacttcatcctggatttcactttcttcttagccatggatatgtcatcctttttaattttttgcctgttctctttgctaaagctaaaaataggattggactagacctgttttctctctcttacagcttaacttcacccagtgggcctattgcttcttgcctcttcagcctctcaacatcccacgagggatcagaaattcttcgaagtangtagtantaagccggccggtcttagaag

SEQ ID NO: 103829 - DNA, 580 bp, Homo sapiens
tggcaattagctgatccaagtgaaaaaggtagagaatgtgctctcaactggaaaatgccaattaaggaagcagctctgacttcccacccgccctggctaagctgggagcttatcttccccgagaagaatctgctgggataagggggcttgggaaacaccgagggcagggctgcctcctcacctcctcagcttcctctgagagcagattagccgtggccttgtgccagcagggcctgggtgccacaccgggtggcagcgggtggcagagccgggccccgctccggcactgggatttggggtggcgggacccagtggggcacccgcttgtgggcagcactgagggcggtgacgtaggcagcgggtgccggtgtctgcccctccatctggccgggctccccaccctgctcctgcagccctggacctcagggcccatttgcggtgcaaggcggctcttggtcggtctccactcctaaacatttatgcgttgaaaatgcccatttgtttgttttcttgtgttccatttatgtgttctgtatccttttttacttaatttaaataatttttaaatgtgaaatcgtta

SEQ ID NO: 103830 - DNA, 936 bp, Homo sapiens
tcacccttcgtggccatggaagcatcccaacaggtggagattaattccatcctgactgcccaaggaagatcaatagcaaacacagatcacccttcgtgactgcgaggcgactgtttatacatgaaagcatccatgatgaggttgtaaacagacttaaaaaggcctatgcacagatccgagttgggaacccatgggaccctaatgttctctatgggccactccacaccaagcaggcagtgagcatgtttcttggagcagtggaagaagcaaagaaagaaggtggcacagtggtctatgggggcaaggttatggatcgccctggaaattatgtagaaccgacaattgtgacaggtcttggccacgatgcgtccattgcacacacagagacttttgctccgattctctatgtctttaaattcaagaatgaagaagaggtctttgcatggaataatgaagtaaaacagggactttcaagtagcatctttaccaaagatctgggcagaatctttcgctggcttggacctaaaggatcagactgtggcattgtaaatgtcaacattccaacaagtggggctgagattggaggtgcctttggaggagaaaagcacactggtggtggcagggagtctggcagtgatgcctggaaacagtacatgagaaggtctacttgtactatcaactacagtaaagaccttcctctggcccaaggaatcaagtttcagtaaaggtgttttagatgaacatcccttaatttgaggtgttccagcagctgtttttggagaagacaaagaaaattaaagttttccctgaataaatgcattattatgactgtgacagtgactaatccccctatgaccccaaagccctgattaaatcaagagattccttttttaaaaatcaaaataaaattgttacaacatagccatagttactaaa

SEQ ID NO: 103831 - DNA, 869 bp, Homo sapiens
caaatctactggccccagagcgtttttccaccggaaacgcccaccctcctctgagggccccgggaaaatcaagttccgctcctaagggcggagaagaaataaatctcccaggggacgtgaatcttcaaggtctgaaaccaaggggccaaacttggtgacggcatccaccccttatcctcggcctgccctccgcgagctccccggccctcggccccggccccgtccacggccgcgacccccggccccgatgccactgccgaaacctccgcggaagccaccgcggttccccatcccagggccaccagggcccccgggcccccccgctgcaccggcgtcatccgccatttggtgcaagaatgaagaagaggtctttgcatggaataatgaagtaaaacagggactttcaagtagcatctttaccaaagatctgggcagaatctttcgctggcttggacctaaaggatcagactgtggcattgtaaatgtcaacattccaacaagtggggctgagattggaggtgcctttggaggagaaaagcacactggtggtggcagggagtctggcagtgatgcctggaaacagtacatgagaaggtctacttgtactatcaactacagtaaagaccttcctctggcccaaggaatcaagtttcagtaaaggtgttttagatgaacatcccttaatttgaggtgttccagcagctgtttttggagaagacaaagaaaattaaagttttccctgaataaatgcattattatgactgtgacagtgactaatccccctatgaccccaaagccctgattaaatcaagagattccttttttaaaaatcaaaataaaattgttacaacatagccatagttactaaa

SEQ ID NO: 103832 - DNA, 393 bp, Homo sapiens
  misc_feature (18)..(18): n is a, c, g, or t
  misc_feature (33)..(33): n is a, c, g, or t
cctattaaatttttcctnttgtcctttctcccnaaaaaacagtgcggaacacctcaaattaaggatgttcatctaaaacacctttactgaaacttgattccttgggccagaggaaggtctctacttgtactatcaactacagtaaagaccttcctctggcccaaggaatcaagtttcagtaaaggtgttttagatgaacatcccttaatttgaggtgttccagcagctgtttttggagaagacaaagaaaattaaagttttccctgaataaatgcattattatgactgtgacagtgactaatccccctatgaccccaaagccctgattaaatcaagagattccttttttaaaaatcaaaataaaattgttacaacatagccatagttactaaa

SEQ ID NO: 103833 - DNA, 617 bp, Homo sapiens
agtcaataaacctccaatttggggatatgtacatgtgcaagcaggatctggccatgcactgattgagcagtggaatcccgtaggcctggttggaatcatcacggcattcaatttccctgtggcagtgtatggttggaacaacgccatcgccatgatctgtggaaatgtctgcctctggaaaggagctccaaccacttccctcattagtgtggctgtcacaaagataatagccaaggttctggaggacaacaagctgcctggtgcaatttgttccttgacttgtggtggagcagatattggcacagcaatggccaaagatgaacgagtgaacctgctgtccttcactgggagcactcaggtgggaaaacaggtgggcctgatggtgcaggagaggtttggagcaatggaaatgagaagatactctgctgttgtcacatatgctcctgatatcacaaatgaataaaagttattcacatggaagctgattttaaagtgcacttaaggaaatcgatgatcaaaagatcagtaataaatgtatgtctaaggctgggcacagtggctcacgtctgtaatcctagcactttgggaggctgaggtgggtgaattgcctgagctca

SEQ ID NO: 103834 - DNA, 217 bp, Homo sapiens
gatctgctacattttaaaagtgggcatgaaaatcttctgttatgtatgtactgtcattaattctgttattttttcccactagtactatcaactacagtaaagaccttcctctggcccaaggaatcaagtttcagtaaaggtgttttagatgaacatcccttaatttgaggtgttccagcagctgtttttggaggtagcacctggggatcctgataga

SEQ ID NO: 103835 - DNA, 2369 bp, Homo sapiens
tatcattaattagaaaactttaatttgtaatctaccaaaacagtgaaaacaaccaacccttcccccgccccccaatacaaaccctccgttgcctactccagggacaagaggcgtcaccatcgctgaggagctggttaggaatgtcggctctccgaccctagcccagacttactgaatcagaatgtgcatttaccacgacgaccaggtcattacacgcattttacagtttcagaacccctgctatagcctactgtacttcagcgccaatattttgctgaaaagaattcccagctggaactgtggctcccggagtctttcaccagatggcagcagcccactcctccctgtagcactcccattgttccaggcaggattcagccgcaggctcctccggaagaccaggggcagacggggcggtggcggggtcgtgcccagtgggaggggtcgggtctgcccaatgggttctcccgggcggggggcggggctctatttcagcagctctcagggccttgggctcatcccgagtcccgggctcagtatgtggcgccttcctcgcgcgctgtgtgtgcacgctgcaaagaccagcaagctctctggaccttggagcaggcctgccgccttcatgtccactctcctcatcaatcagccccagtatgcgtggctgaaagagctggggctccgcgaggaaaacgagggcgtgtataatggaagctggggaggccggggagaggttattacgacctattgccctgctaacaacgagccaatagcaagagtccgacaggccagtgtggcagactatgaagaaactgtaaagaaagcaagagaagcatggaaaatctgggcagatattcctgctccaaaacgaggagaaatagtaagacagattggcgatgccttgcgggagaagatccaagtactaggaagcttggtgtctttggagatggggaaaatcttagtggaaggtgtgggtgaagttcaggagtatgtggatatctgtgactatgctgttggtttatcaaggatgattggaggacctatcttgccttctgaaagatctggccatgcactgattgagcagtggaatcccgtaggcctggttggaatcatcacggcattcaatttccctgtggcagtgtatggttggaacaacgccatcgccatgatctgtggaaatgtctgcctctggaaaggagctccaaccacttccctcattagtgtggctgtcacaaagataatagccaaggttctggaggacaacaagctgcctggtgcaatttgttccttgacttgtggtggagcagatattggcacagcaatggccaaagatgaacgagtgaacctgctgtccttcactgggagcactcaggtgggaaaacaggtgggcctgatggtgcaggagaggtttgggagaagtctgttggaacttggaggaaacaatgccattattgcctttgaagatgcagacctcagcttagttgttccatcagctctcttcgctgctgtgggaacagctggccagaggtgtaccactgcgaggcgactgtttatacatgaaagcatccatgatgaggttgtaaacagacttaaaaaggcctatgcacagatccgagttgggaacccatgggaccctaatgttctctatgggccactccacaccaagcaggcagtgagcatgtttcttggagcagtggaagaagcaaagaaagaaggtggcacagtggtctatgggggcaaggttatggatcgccctggaaattatgtagaaccgacaattgtgacaggtcttggccacgatgcgtccattgcacacacagagacttttgctccgattctctatgtctttaaattcaagaatgaagaagaggtctttgcatggaataatgaagtaaaacagggactttcaagtagcatctttaccaaagatctgggcagaatctttcgctggcttggacctaaaggatcagactgtggcattgtaaatgtcaacattccaacaagtggggctgagattggaggtgcctttggaggagaaaagcacactggtggtggcagggagtctggcagtgatgcctggaaacagtacatgagaaggtctacttgtactatcaactacagtaaagaccttcctctggcccaaggaatcaagtttcagtaaaggtgttttagatgaacatcccttaatttgaggtgttccagcagctgtttttggagaagacaaagaaaattaaagttttccctgaataaatgcattattatgactgtgacagtgactaatccccctatgaccccaaagccctgattaaatcaagagattccttttttaaaaatcaaaataaaattgttacaacatagccatagttactaaa

SEQ ID NO: 103836 - DNA, 1866 bp, Homo sapiens
gaaaaaaaaaaaaaaaaaaaaaaaaaaaaaaaaatatgtggcgccttcctcgcgcgctgtgtgtgcacgctgcaaagaccagcaagctctctggaccttggagcaggcctgccgccttcatgtccactctcctcatcaatcagccccagtatgcgtggctgaaagagctggggctccgcgaggaaaacgagggcgtgtataatggaagctggggaggccggggagaggttattacgacctattgccctgctaacaacgagccaatagcaagagtccgacaggccagtgtggcagactatgaagaaactgtaaagaaagcaagagaagcatggaaaatctgggcagatattcctgctccaaaacgaggagaaatagtaagacagattggcgatgccttgcgggagaagatccaagtactaggaagcttggtgtctttggagatggggaaaatcttagtggaaggtgtgggtgaagttcaggagtatgtggatatctgtgactatgctgttggtttatcaaggatgattggaggacctatcttgccttctgaaagatctggccatgcactgattgagcagtggaatcccgtaggcctggttggaatcatcacggcattcaatttccctgtggcagtgtatggttggaacaacgccatcgccatgatctgtggaaatgtctgcctctggaaaggagctccaaccacttccctcattagtgtggctgtcacaaagataatagccaaggttctggaggacaacaagctgcctggtgcaatttgttccttgacttgtggtggagcagatattggcacagcaatggccaaagatgaacgagtgaacctgctgtccttcactgggagcactcaggtgggaaaacaggtgggcctgatggtgcaggagaggtttgggagaagtctgttggaacttggaggaaacaatgccattattgcctttgaagatgcagacctcagcttagttgttccatcagctctcttcgctgctgtgggaacagctggccagaggtgtaccactgcgaggcgactgtttatacatgaaagcatccatgatgaggttgtaaacagacttaaaaaggcctatgcacagatccgagttgggaacccatgggaccctaatgttctctatgggccactccacaccaagcaggcagtgagcatgtttcttggagcagtggaagaagcaaagaaagaaggtggcacagtggtctatgggggcaaggttatggatcgccctggaaattatgtagaaccgacaattgtgacaggtcttggccacgatgcgtccattgcacacacagagacttttgctccgattctctatgtctttaaattcaagaatgaagaagaggtctttgcatggaataatgaagtaaaacagggactttcaagtagcatctttaccaaagatctgggcagaatctttcgctggcttggacctaaaggatcagactgtggcattgtaaatgtcaacattccaacaagtggggctgagattggaggtgcctttggaggagaaaagcacactggtggtggcagggagtctggcagtgatgcctggaaacagtacatgagaaggtctacttgtactatcaactacagtaaagaccttcctctggcccaaggaatcaagtttcagtaaaggtgttttagatgaacatcccttaatttgaggtgttccagcagctgtttttggagaagacaaagaaaattaaagttttccctgaataaatgcattattatgactgtgacagtgactaatccccctatgaccccaaagccctgattaaatcaagagattccttttttaaaaatcaaaataaaattgttacaacatagccatagttactaaa

SEQ ID NO: 103837 - DNA, 3891 bp, Homo sapiens
tatcattaattagaaaactttaatttgtaatctaccaaaacagtgaaaacaaccaacccttcccccgccccccaatacaaaccctccgttgcctactccagggacaagaggcgtcaccatcgctgaggagctggttaggaatgtcggctctccgaccctagcccagacttactgaatcagaatgtgcatttaccacgacgaccaggtcattacacgcattttacagtttcagaacccctgctatagcctactgtacttcagcgccaatattttgctgaaaagaattcccagctggaactgtggctcccggagtctttcaccagatggcagcagcccactcctccctgtagcactcccattgttccaggcaggattcagccgcaggctcctccggaagaccaggggcagacggggcggtggcggggtcgtgcccagtgggaggggtcgggtctgcccaatgggttctcccgggcggggggcggggctctatttcagcagctctcagggccttgggctcatcccgagtcccgggctcagtatgtggcgccttcctcgcgcgctgtgtgtgcacgctgcaaagaccagcaagctctctggaccttggagcaggcctgccgccttcatgtccactctcctcatcaatcagccccagtatgcgtggctgaaagagctggggctccgcgaggaaaacgagggcgtgtataatggaagctggggaggccggggagaggttattacgacctattgccctgctaacaacgagccaatagcaagagtccgacaggccagtgtggcagactatgaagaaactgtaaagaaagcaagagaagcatggaaaatctgggcagatattcctgctccaaaacgaggagaaatagtaagacagattggcgatgccttgcgggagaagatccaagtactaggaagcttggtgtctttggagatggggaaaatcttagtggaaggtgtgggtgaagttcaggagtatgtggatatctgtgactatgctgttggtttatcaaggatgattggaggacctatcttgccttctgaaagatctggccatgcactgattgagcagtggaatcccgtaggcctggttggaatcatcacggcattcaatttccctgtggcagtgtatggttggaacaacgccatcgccatgatctgtggaaatgtctgcctctggaaaggagctccaaccacttccctcattagtgtggctgtcacaaagataatagccaaggttctggaggacaacaagctgcctggtgcaatttgttccttgacttgtggtggagcagatattggcacagcaatggccaaagatgaacgagtgaacctgctgtccttcactgggagcactcaggtgggaaaacaggtgggcctgatggtgcaggagaggtttgggagaagtctgttggaacttggaggaaacaatgccattattgcctttgaagatgcagacctcagcttagttgttccatcagctctcttcgctgctgtgggaacagctggccagaggtgtaccactgcgaggcgactgtttatacatgaaagcatccatgatgaggttgtaaacagacttaaaaaggcctatgcacagatccgagttgggaacccatgggaccctaatgttctctatgggccactccacaccaagcaggcagtgagcatgtttcttggagcagtggaagaagcaaagaaagaaggtggcacagtggtctatgggggcaaggttatggatcgccctggaaattatgtagaaccgacaattgtgacaggtcttggccacgatgcgtccattgcacacacagagacttttgctccgattctctatgtctttaaattcaagaatgaagaagaggtctttgcatggaataatgaagtaaaacagggactttcaagtagcatctttaccaaagatctgggcagaatctttcgctggcttggacctaaaggatcagactgtggcattgtaaatgtcaacattccaacaagtggggctgagattggaggtgcctttggaggagaaaagcacactggtggtggcagggagtctggcagtgatgcctggaaacagtacatgagaaggtctacttgtactatcaactacagtaaagaccttcctctggcccaaggaatcaagtttcagtaaaggtgttttagatgaacatcccttaatttgaggtgttccagcagctgtttttggagaagacaaagaaaattaaagttttccctgaataaatgcattattatgactgtgacagtgactaatccccctatgaccccaaagccctgattaaatcaagagattccttttttaaaaatcaaaataaaattgttacaacatagccatagttactaaaagatgagttaggtggatttttattatgtcaactagttgtacatggctttttaaaagttaatgattattttgtaattagaaaaaaatagtacgtaccagggtaggaatttgggaaaatacagaaccgaggagaaaacagaagtctttgcagtagatacagggtgtctcctgaccaagtgaaggattcaggggcggggggtgaatattgcttgacattacccacctatggcatgtgttggatgtcgtgtgattgaaagggggatgcattcccctgtatgcttggaccacagttcagtattcatgtggaataacttgcagtgcttaaaatgacaacaggcattcatcacagttatggctcttgcttatgaaggctgtgtcaacttggaagagatttctggggtagacagattttgttcctgtgctggagtctgccacctgctggaggactctgaggccaaaattgcctgtgcagagttgtatagaaaatgcgtctggaggctgggcaaggtggcttatgcctataatcccagcactttgagaggccgaggcgggtggatcagtagaggctaggagtttgagaccagcctggccgatatcgtgaaaccccatctttaccaaaaaatacaaaaattagcccagtgtggtggcaggcacctgtaatcccagctattagggaggctgaggcaggagaattgtgtgaacccaggaggcagaggttgcagtgagcctagattgtgccactgcctgggcaacagtgagatcctgtctacaaaaaaaaaaaaaaaaaaaagtgcatctggatttttttatacaaccttagaccaccttctttagctttaggcgtctgcggttgcccttggatctgttctcaatcctcagtgtgtgtggcagcatgtggtcatagagagctgggcaaagttcactttctctttgctgacagtctcaccttttctcactgggaagctgcacaggagcctttgggctggttcagcccagaggcccctgttctcctgccttcctggcattctctgctccccttctgcatggcacccctctactcctgccaggttagaatggagcagaggcctttgaacaagatgacatttgtagacaacctgatccatcaggatgtggagagatctggacaaatggcaaataatttggggttgaattatggcccagagaagtaagcaaatgaaaaactaaacaattataaatgtatctgggaagcaaaggtattcataatatgtcccatggccagctgcgagcagtatttaactagacatgctgttgtcaatattgaacatgaatcaagccaaatactgatatagctattgagagaaggttggcaggaagaaatcatgggtgagggtatgtgggagtgataatcttagctatagattttaggtaaaactgattctgaaagctttctttgaaacaaatttataatttttcttctacatgtttctagcacaaggactcaatttttttggttataatgttcattaaaacatatgccttca

SEQ ID NO: 103838 - DNA, 4545 bp, Homo sapiens
tatcattaattagaaaactttaatttgtaatctaccaaaacagtgaaaacaaccaacccttcccccgccccccaatacaaaccctccgttgcctactccagggacaagaggcgtcaccatcgctgaggagctggttaggaatgtcggctctccgaccctagcccagacttactgaatcagaatgtgcatttaccacgacgaccaggtcattacacgcattttacagtttcagaacccctgctatagcctactgtacttcagcgccaatattttgctgaaaagaattcccagctggaactgtggctcccggagtctttcaccagatggcagcagcccactcctccctgtagcactcccattgttccaggcaggattcagccgcaggctcctccggaagaccaggggcagacggggcggtggcggggtcgtgcccagtgggaggggtcgggtctgcccaatgggttctcccgggcggggggcggggctctatttcagcagctctcagggccttgggctcatcccgagtcccgggctcagtatgtggcgccttcctcgcgcgctgtgtgtgcacgctgcaaagaccagcaagctctctggaccttggagcaggcctgccgccttcatgtccactctcctcatcaatcagccccagtatgcgtggctgaaagagctggggctccgcgaggaaaacgagggcgtgtataatggaagctggggaggccggggagaggttattacgacctattgccctgctaacaacgagccaatagcaagagtccgacaggccagtgtggcagactatgaagaaactgtaaagaaagcaagagaagcatggaaaatctgggcagatattcctgctccaaaacgaggagaaatagtaagacagattggcgatgccttgcgggagaagatccaagtactaggaagcttggtgtctttggagatggggaaaatcttagtggaaggtgtgggtgaagttcaggagtatgtggatatctgtgactatgctgttggtttatcaaggatgattggaggacctatcttgccttctgaaagatctggccatgcactgattgagcagtggaatcccgtaggcctggttggaatcatcacggcattcaatttccctgtggcagtgtatggttggaacaacgccatcgccatgatctgtggaaatgtctgcctctggaaaggagctccaaccacttccctcattagtgtggctgtcacaaagataatagccaaggttctggaggacaacaagctgcctggtgcaatttgttccttgacttgtggtggagcagatattggcacagcaatggccaaagatgaacgagtgaacctgctgtccttcactgggagcactcaggtgggaaaacaggtgggcctgatggtgcaggagaggtttgggagaagtctgttggaacttggaggaaacaatgccattattgcctttgaagatgcagacctcagcttagttgttccatcagctctcttcgctgctgtgggaacagctggccagaggtgtaccactgcgaggcgactgtttatacatgaaagcatccatgatgaggttgtaaacagacttaaaaaggcctatgcacagatccgagttgggaacccatgggaccctaatgttctctatgggccactccacaccaagcaggcagtgagcatgtttcttggagcagtggaagaagcaaagaaagaaggtggcacagtggtctatgggggcaaggttatggatcgccctggaaattatgtagaaccgacaattgtgacaggtcttggccacgatgcgtccattgcacacacagagacttttgctccgattctctatgtctttaaattcaagaatgaagaagaggtctttgcatggaataatgaagtaaaacagggactttcaagtagcatctttaccaaagatctgggcagaatctttcgctggcttggacctaaaggatcagactgtggcattgtaaatgtcaacattccaacaagtggggctgagattggaggtgcctttggaggagaaaagcacactggtggtggcagggagtctggcagtgatgcctggaaacagtacatgagaaggtctacttgtactatcaactacagtaaagaccttcctctggcccaaggaatcaagtttcagtaaaggtgttttagatgaacatcccttaatttgaggtgttccagcagctgtttttggagaagacaaagaaaattaaagttttccctgaataaatgcattattatgactgtgacagtgactaatccccctatgaccccaaagccctgattaaatcaagagattccttttttaaaaatcaaaataaaattgttacaacatagccatagttactaaaagatgagttaggtggatttttattatgtcaactagttgtacatggctttttaaaagttaatgattattttgtaattagaaaaaaatagtacgtaccagggtaggaatttgggaaaatacagaaccgaggagaaaacagaagtctttgcagtagatacagggtgtctcctgaccaagtgaaggattcaggggcggggggtgaatattgcttgacattacccacctatggcatgtgttggatgtcgtgtgattgaaagggggatgcattcccctgtatgcttggaccacagttcagtattcatgtggaataacttgcagtgcttaaaatgacaacaggcattcatcacagttatggctcttgcttatgaaggctgtgtcaacttggaagagatttctggggtagacagattttgttcctgtgctggagtctgccacctgctggaggactctgaggccaaaattgcctgtgcagagttgtatagaaaatgcgtctggaggctgggcaaggtggcttatgcctataatcccagcactttgagaggccgaggcgggtggatcagtagaggctaggagtttgagaccagcctggccgatatcgtgaaaccccatctttaccaaaaaatacaaaaattagcccagtgtggtggcaggcacctgtaatcccagctattagggaggctgaggcaggagaattgtgtgaacccaggaggcagaggttgcagtgagcctagattgtgccactgcctgggcaacagtgagatcctgtctacaaaaaaaaaaaaaaaaaaaagtgcatctggatttttttatacaaccttagaccaccttctttagctttaggcgtctgcggttgcccttggatctgttctcaatcctcagtgtgtgtggcagcatgtggtcatagagagctgggcaaagttcactttctctttgctgacagtctcaccttttctcactgggaagctgcacaggagcctttgggctggttcagcccagaggcccctgttctcctgccttcctggcattctctgctccccttctgcatggcacccctctactcctgccaggttagaatggagcagaggcctttgaacaagatgacatttgtagacaacctgatccatcaggatgtggagagatctggacaaatggcaaataatttggggttgaattatggcccagagaagtaagcaaatgaaaaactaaacaattataaatgtatctgggaagcaaaggtattcataatatgtcccatggccagctgcgagcagtatttaactagacatgctgttgtcaatattgaacatgaatcaagccaaatactgatatagctattgagagaaggttggcaggaagaaatcatgggtgagggtatgtgggagtgataatcttagctatagattttaggtaaaactgattctgaaagctttctttgaaacaaatttataatttttcttctacatgtttctagcacaaggactcaatttttttggttataatgttcattaaaacatatgccttcaatttgttcctcttatttcttttttgctgatttagcagatataaatcacttgttagtatttttaactatccaagttaaaatgtacatttgtaagtgttattactggtcttatatttgaaggtgcaaggggtcttgtgctgctcattactggttatcttgagcatttcataactgctgcctcctcctaaatcctgtgttccaaccgctactgctggcaatgcccagcctccattgtggatgcggggaattgtgttcagcatgcttgcttctgccacggcactaaagcctaacttgcttaggatcttgctgtacttggagagagcatccattcgctgagcctagcagccaggctcttgtgactccctgggaagtgggtgaagacctggctcctggctgcagcagtgaggaggcaggccctccaggtgaagacttctcacaatggagggaaggcagttttctcaaaggaaattgagtgctattatgtactctgcttcctactttctctttcagggtgggaatctgttaagcctcctctctctcttgctctgcaaccacagaacacttctttttttttggtgtctcagttttgcccacactgcgagtgcagtgctagattgtgccactgcctgggcaacagtgagatcctgtctacaaa

SEQ ID NO: 103839 - DNA, 4098 bp, Homo sapiens
tatcattaattagaaaactttaatttgtaatctaccaaaacagtgaaaacaaccaacccttcccccgccccccaatacaaaccctccgttgcctactccagggacaagaggcgtcaccatcgctgaggagctggttaggaatgtcggctctccgaccctagcccagacttactgaatcagaatgtgcatttaccacgacgaccaggtcattacacgcattttacagtttcagaacccctgctatagcctactgtacttcagcgccaatattttgctgaaaagaattcccagctggaactgtggctcccggagtctttcaccagatggcagcagcccactcctccctgtagcactcccattgttccaggcaggattcagccgcaggctcctccggaagaccaggggcagacggggcggtggcggggtcgtgcccagtgggaggggtcgggtctgcccaatgggttctcccgggcggggggcggggctctatttcagcagctctcagggccttgggctcatcccgagtcccgggctcagtatgtggcgccttcctcgcgcgctgtgtgtgcacgctgcaaagaccagcaagctctctggaccttggagcaggcctgccgccttcatgtccactctcctcatcaatcagccccagtatgcgtggctgaaagagctggggctccgcgaggaaaacgagggcgtgtataatggaagctggggaggccggggagaggttattacgacctattgccctgctaacaacgagccaatagcaagagtccgacaggccagtgtggcagactatgaagaaactgtaaagaaagcaagagaagcatggaaaatctgggcagatattcctgctccaaaacgaggagaaatagtaagacagattggcgatgccttgcgggagaagatccaagtactaggaagcttggtgtctttggagatggggaaaatcttagtggaaggtgtgggtgaagttcaggagtatgtggatatctgtgactatgctgttggtttatcaaggatgattggaggacctatcttgccttctgaaagatctggccatgcactgattgagcagtggaatcccgtaggcctggttggaatcatcacggcattcaatttccctgtggcagtgtatggttggaacaacgccatcgccatgatctgtggaaatgtctgcctctggaaaggagctccaaccacttccctcattagtgtggctgtcacaaagataatagccaaggttctggaggacaacaagctgcctggtgcaatttgttccttgacttgtggtggagcagatattggcacagcaatggccaaagatgaacgagtgaacctgctgtccttcactgggagcactcaggtgggaaaacaggtgggcctgatggtgcaggagaggtttgggagaagtctgttggaacttggaggaaacaatgccattattgcctttgaagatgcagacctcagcttagttgttccatcagctctcttcgctgctgtgggaacagctggccagaggtgtaccactgcgaggcgactgtttatacatgaaagcatccatgatgaggttgtaaacagacttaaaaaggcctatgcacagatccgagttgggaacccatgggaccctaatgttctctatgggccactccacaccaagcaggcagtgagcatgtttcttggagcagtggaagaagcaaagaaagaaggtggcacagtggtctatgggggcaaggttatggatcgccctggaaattatgtagaaccgacaattgtgacaggtcttggccacgatgcgtccattgcacacacagagacttttgctccgattctctatgtctttaaattcaagaatgaagaagaggtctttgcatggaataatgaagtaaaacagggactttcaagtagcatctttaccaaagatctgggcagaatctttcgctggcttggacctaaaggatcagactgtggcattgtaaatgtcaacattccaacaagtggggctgagattggaggtgcctttggaggagaaaagcacactggtggtggcagggagtctggcagtgatgcctggaaacagtacatgagaaggtctacttgtactatcaactacagtaaagaccttcctctggcccaaggaatcaagtttcagtaaaggtgttttagatgaacatcccttaatttgaggtgttccagcagctgtttttggagaagacaaagaaaattaaagttttccctgaataaatgcattattatgactgtgacagtgactaatccccctatgaccccaaagccctgattaaatcaagagattccttttttaaaaatcaaaataaaattgttacaacatagccatagttactaaaagatgagttaggtggatttttattatgtcaactagttgtacatggctttttaaaagttaatgattattttgtaattagaaaaaaatagtacgtaccagggtaggaatttgggaaaatacagaaccgaggagaaaacagaagtctttgcagtagatacagggtgtctcctgaccaagtgaaggattcaggggcggggggtgaatattgcttgacattacccacctatggcatgtgttggatgtcgtgtgattgaaagggggatgcattcccctgtatgcttggaccacagttcagtattcatgtggaataacttgcagtgcttaaaatgacaacaggcattcatcacagttatggctcttgcttatgaaggctgtgtcaacttggaagagatttctggggtagacagattttgttcctgtgctggagtctgccacctgctggaggactctgaggccaaaattgcctgtgcagagttgtatagaaaatgcgtctggaggctgggcaaggtggcttatgcctataatcccagcactttgagaggccgaggcgggtggatcagtagaggctaggagtttgagaccagcctggccgatatcgtgaaaccccatctttaccaaaaaatacaaaaattagcccagtgtggtggcaggcacctgtaatcccagctattagggaggctgaggcaggagaattgtgtgaacccaggaggcagaggttgcagtgagcctagattgtgccactgcctgggcaacagtgagatcctgtctacaaaaaaaaaaaaaaaaaaaagtgcatctggatttttttatacaaccttagaccaccttctttagctttaggcgtctgcggttgcccttggatctgttctcaatcctcagtgtgtgtggcagcatgtggtcatagagagctgggcaaagttcactttctctttgctgacagtctcaccttttctcactgggaagctgcacaggagcctttgggctggttcagcccagaggcccctgttctcctgccttcctggcattctctgctccccttctgcatggcacccctctactcctgccaggttagaatggagcagaggcctttgaacaagatgacatttgtagacaacctgatccatcaggatgtggagagatctggacaaatggcaaataatttggggttgaattatggcccagagaagtaagcaaatgaaaaactaaacaattataaatgtatctgggaagcaaaggtattcataatatgtcccatggccagctgcgagcagtatttaactagacatgctgttgtcaatattgaacatgaatcaagccaaatactgatatagctattgagagaaggttggcaggaagaaatcatgggtgagggtatgtgggagtgataatcttagctatagattttaggtaaaactgattctgaaagctttctttgaaacaaatttataatttttcttctacatgtttctagcacaaggactcaatttttttggttataatgttcattaaaacatatgccttcaatttgttcctcttatttcttttttgctgatttagcagatataaatcacttgttagtatttttaactatccaagttaaaatgtacatttgtaagtgttattactggtcttatatttgaaggtgcaaggggtcttgtgctgctcattactggttatcttgagcctagattgtgccactgcctgggcaacagtgagatcctgtctacaaa

SEQ ID NO: 103840 - DNA, 2283 bp, Homo sapiens
tatcattaattagaaaactttaatttgtaatctaccaaaacagtgaaaacaaccaacccttcccccgccccccaatacaaaccctccgttgcctactccagggacaagaggcgtcaccatcgctgaggagctggttaggaatgtcggctctccgaccctagcccagacttactgaatcagaatgtgcatttaccacgacgaccaggtcattacacgcattttacagtttcagaacccctgctatagcctactgtacttcagcgccaatattttgctgaaaagaattcccagctggaactgtggctcccggagtctttcaccagatggcagcagcccactcctccctgtagcactcccattgttccaggcaggattcagccgcaggctcctccggaagaccaggggcagacggggcggtggcggggtcgtgcccagtgggaggggtcgggtctgcccaatgggttctcccgggcggggggcggggctctatttcagcagctctcagggccttgggctcatcccgagtcccgggctcagtatgtggcgccttcctcgcgcgctgtgtgtgcacgctgcaaagaccagcaagctctctggaccttggagcaggcctgccgccttcatgtccactctcctcatcaatcagccccagtatgcgtggctgaaagagctggggctccgcgaggaaaacgagggcgtgtataatggaagctggggaggccggggagaggttattacgacctattgccctgctaacaacgagccaatagcaagagtccgacaggccagtgtggcagactatgaagaaactgtaaagaaagcaagagaagcatggaaaatctgggcagatattcctgctccaaaacgaggagaaatagtaagacagattggcgatgccttgcgggagaagatccaagtactaggaagcttggtgtctttggagatggggaaaatcttagtggaaggtgtgggtgaagttcaggagtatgtggatatctgtgactatgctgttggtttatcaaggatgattggaggacctatcttgccttctgaaagatctggccatgcactgattgagcagtggaatcccgtaggcctggttggaatcatcacggcattcaatttccctgtggcagtgtatggttggaacaacgccatcgccatgatctgtggaaatgtctgcctctggaaaggagctccaaccacttccctcattagtgtggctgtcacaaagataatagccaaggttctggaggacaacaagctgcctggtgcaatttgttccttgacttgtggtggagcagatattggcacagcaatggccaaagatgaacgagtgaacctgctgtccttcactgggagcactcaggtgggaaaacaggtgggcctgatggtgcaggagaggtttgggagaagtctgttggaacttggaggaaacaatgccattattgcctttgaagatgcagacctcagcttagttgttccatcagctctcttcgctgctgtgggaacagctggccagaggtgtaccactgcgaggcgactgtttatacatgaaagcatccatgatgaggttgtaaacagacttaaaaaggcctatgcacagatccgagttgggaacccatgggaccctaatgttctctatgggccactccacaccaagcaggcagtgagcatgtttcttggagcagtggaagaagcaaagaaagaaggtggcacagtggtctatgggggcaaggttatggatcgccctggaaattatgtagaaccgacaattgtgacaggtcttggccacgatgcgtccattgcacacacagagacttttgctccgattctctatgtctttaaattcaagaatgaagaagaggtctttgcatggaataatgaagtaaaacagggactttcaagtagcatctttaccaaagatctgggcagaatctttcgctggcttggacctaaaggatcagactgtggcattgtaaatgtcaacattccaacaagtggggctgagattggaggtgcctttggaggagaaaagcacactggtggtggcagggagtctggcagtgatgcctggaaacagtacatgagaaggtctacttgtactatcaactacagtaaagaccttcctctggcccaaggaatcaagtttcagtaaaggtgttttagatgaacatcccttaatttgaggtgttccagcagctgtttttggagaagacaaagaaaattaaagttttccctgaataaatgcattattatgactgtgacagtgactaatccccc

SEQ ID NO: 103841 - DNA, 3838 bp, Homo sapiens
tatcattaattagaaaactttaatttgtaatctaccaaaacagtgaaaacaaccaacccttcccccgccccccaatacaaaccctccgttgcctactccagggacaagaggcgtcaccatcgctgaggagctggttaggaatgtcggctctccgaccctagcccagacttactgaatcagaatgtgcatttaccacgacgaccaggtcattacacgcattttacagtttcagaacccctgctatagcctactgtacttcagcgccaatattttgctgaaaagaattcccagctggaactgtggctcccggagtctttcaccagatggcagcagcccactcctccctgtagcactcccattgttccaggcaggattcagccgcaggctcctccggaagaccaggggcagacggggcggtggcggggtcgtgcccagtgggaggggtcgggtctgcccaatgggttctcccgggcggggggcggggctctatttcagcagctctcagggccttgggctcatcccgagtcccgggctcagtatgtggcgccttcctcgcgcgctgtgtgtgcacgctgcaaagaccagcaagctctctggaccttggagcaggcctgccgccttcatgtccactctcctcatcaatcagccccagtatgcgtggctgaaagagctggggctccgcgaggaaaacgagggcgtgtataatggaagctggggaggccggggagaggttattacgacctattgccctgctaacaacgagccaatagcaagagtccgacaggccagtgtggcagactatgaagaaactgtaaagaaagcaagagaagcatggaaaatctgggcagatattcctgctccaaaacgaggagaaatagtaagacagattggcgatgccttgcgggagaagatccaagtactaggaagcttggtgtctttggagatggggaaaatcttagtggaaggtgtgggtgaagttcaggagtatgtggatatctgtgactatgctgttggtttatcaaggatgattggaggacctatcttgccttctgaaagatctggccatgcactgattgagcagtggaatcccgtaggcctggttggaatcatcacggcattcaatttccctgtggcagtgtatggttggaacaacgccatcgccatgatctgtggaaatgtctgcctctggaaaggagctccaaccacttccctcattagtgtggctgtcacaaagataatagccaaggttctggaggacaacaagctgcctggtgcaatttgttccttgacttgtggtggagcagatattggcacagcaatggccaaagatgaacgagtgaacctgctgtccttcactgggagcactcaggtgggaaaacaggtgggcctgatggtgcaggagaggtttgggagaagtctgttggaacttggaggaaacaatgccattattgcctttgaagatgcagacctcagcttagttgttccatcagctctcttcgctgctgtgggaacagctggccagaggtgtaccactgcgaggcgactgtttatacatgaaagcatccatgatgaggttgtaaacagacttaaaaaggcctatgcacagatccgagttgggaacccatgggaccctaatgttctctatgggccactccacaccaagcaggcagtgagcatgtttcttggagcagtggaagaagcaaagaaagaaggtggcacagtggtctatgggggcaaggttatggatcgccctggaaattatgtagaaccgacaattgtgacaggtcttggccacgatgcgtccattgcacacacagagacttttgctccgattctctatgtctttaaattcaagaatgaagaagaggtctttgcatggaataatgaagtaaaacagggactttcaagtagcatctttaccaaagatctgggcagaatctttcgctggcttggacctaaaggatcagactgtggcattgtaaatgtcaacattccaacaagtggggctgagattggaggtgcctttggaggacgtagagaaggtctattttactatcaactacagtaaagaccttcctctggcccaaggaatcaagtttcagtaaaggtgttttagatgaacatcccttaatttgaggtgttccagcagctgtttttggagaagacaaagaaaattaaagttttccctgaataaatgcattattatgactgtgacagtgactaatccccctatgaccccaaagccctgattaaatcaagagattccttttttaaaaatcaaaataaaattgttacaacatagccatagttactaaaagatgagttaggtggatttttattatgtcaactagttgtacatggctttttaaaagttaatgattattttgtaattagaaaaaaatagtacgtaccagggtaggaatttgggaaaatacagaaccgaggagaaaacagaagtctttgcagtagatacagggtgtctcctgaccaagtgaaggattcaggggcggggggtgaatattgcttgacattacccacctatggcatgtgttggatgtcgtgtgattgaaagggggatgcattcccctgtatgcttggaccacagttcagtattcatgtggaataacttgcagtgcttaaaatgacaacaggcattcatcacagttatggctcttgcttatgaaggctgtgtcaacttggaagagatttctggggtagacagattttgttcctgtgctggagtctgccacctgctggaggactctgaggccaaaattgcctgtgcagagttgtatagaaaatgcgtctggaggctgggcaaggtggcttatgcctataatcccagcactttgagaggccgaggcgggtggatcagtagaggctaggagtttgagaccagcctggccgatatcgtgaaaccccatctttaccaaaaaatacaaaaattagcccagtgtggtggcaggcacctgtaatcccagctattagggaggctgaggcaggagaattgtgtgaacccaggaggcagaggttgcagtgagcctagattgtgccactgcctgggcaacagtgagatcctgtctacaaaaaaaaaaaaaaaaaaaagtgcatctggatttttttatacaaccttagaccaccttctttagctttaggcgtctgcggttgcccttggatctgttctcaatcctcagtgtgtgtggcagcatgtggtcatagagagctgggcaaagttcactttctctttgctgacagtctcaccttttctcactgggaagctgcacaggagcctttgggctggttcagcccagaggcccctgttctcctgccttcctggcattctctgctccccttctgcatggcacccctctactcctgccaggttagaatggagcagaggcctttgaacaagatgacatttgtagacaacctgatccatcaggatgtggagagatctggacaaatggcaaataatttggggttgaattatggcccagagaagtaagcaaatgaaaaactaaacaattataaatgtatctgggaagcaaaggtattcataatatgtcccatggccagctgcgagcagtatttaactagacatgctgttgtcaatattgaacatgaatcaagccaaatactgatatagctattgagagaaggttggcaggaagaaatcatgggtgagggtatgtgggagtgataatcttagctatagattttaggtaaaactgattctgaaagctttctttgaaacaaatttataatttttcttctacatgtttctagcacaaggactcaatttttttggttataatgttcattaaaacatatgccttca

SEQ ID NO: 103842 - DNA, 2422 bp, Homo sapiens
tatcattaattagaaaactttaatttgtaatctaccaaaacagtgaaaacaaccaacccttcccccgccccccaatacaaaccctccgttgcctactccagggacaagaggcgtcaccatcgctgaggagctggttaggaatgtcggctctccgaccctagcccagacttactgaatcagaatgtgcatttaccacgacgaccaggtcattacacgcattttacagtttcagaacccctgctatagcctactgtacttcagcgccaatattttgctgaaaagaattcccagctggaactgtggctcccggagtctttcaccagatggcagcagcccactcctccctgtagcactcccattgttccaggcaggattcagccgcaggctcctccggaagaccaggggcagacggggcggtggcggggtcgtgcccagtgggaggggtcgggtctgcccaatgggttctcccgggcggggggcggggctctatttcagcagctctcagggccttgggctcatcccgagtcccgggctcagtatgtggcgccttcctcgcgcgctgtgtgtgcacgctgcaaagaccagcaagctctctggaccttggagcaggcctgccgccttcatgtccactctcctcatcaatcagccccagtatgcgtggctgaaagagctggggctccgcgaggaaaacgagggcgtgtataatggaagctggggaggccggggagaggttattacgacctattgccctgctaacaacgagccaatagcaagagtccgacaggccagtgtggcagactatgaagaaactgtaaagaaagcaagagaagcatggaaaatctgggcagatattcctgctccaaaacgaggagaaatagtaagacagattggcgatgccttgcgggagaagatccaagtactaggaagcttggtgtctttggagatggggaaaatcttagtggaaggtgtgggtgaagttcaggagtatgtggatatctgtgactatgctgttggtttatcaaggatgattggaggacctatcttgccttctgaaagatctggccatgcactgattgagcagtggaatcccgtaggcctggttggaatcatcacggcattcaatttccctgtggcagtgtatggttggaacaacgccatcgccatgatctgtggaaatgtctgcctctggaaaggagctccaaccacttccctcattagtgtggctgtcacaaagataatagccaaggttctggaggacaacaagctgcctggtgcaatttgttccttgacttgtggtggagcagatattggcacagcaatggccaaagatgaacgagtgaacctgctgtccttcactgggagcactcaggtgggaaaacaggtgggcctgatggtgcaggagaggtttgggagaagtctgttggaacttggaggaaacaatgccattattgcctttgaagatgcagacctcagcttagttgttccatcagctctcttcgctgctgtgggaacagctggccagaggtgtaccactgcgaggcgactgtttatacatgaaagcatccatgatgaggttgtaaacagacttaaaaaggcctatgcacagatccgagttgggaacccatgggaccctaatgttctctatgggccactccacaccaagcaggcagtgagcatgtttcttggagcagtggaagaagcaaagaaagaaggtggcacagtggtctatgggggcaaggttatggatcgccctggaaattatgtagaaccgacaattgtgacaggtcttggccacgatgcgtccattgcacacacagagacttttgctccgattctctatgtctttaaattcaagaatgaagaagaggtctttgcatggaataatgaagtaaaacagggactttcaagtagcatctttaccaaagatctgggcagaatctttcgctggcttggacctaaaggatcagactgtggcattgtaaatgtcaacattccaacaagtggggctgagattggaggtgcctttggaggagaaaagcacactggtggtggcagggagtctggcagtgatgcctggaaacagtacatgagaaggtctacttgtactatcaactacagtaaagaccttcctctggcccaaggaatcaagtttcagtaaaggtgttttagatgaacatcccttaatttgaggtgttccagcagctgtttttggagaagacaaagaaaattaaagttttccctgaataaatgcattattatgactgtgacagtgactaatccccctatgaccccaaagccctgattaaatcaagagattccttttttaaaaatcaaaataaaattgttacaacatagccatagttactaaataaaaaataaaataaaactgaggggggggccggtactcaatttgcctatagtg

SEQ ID NO: 103843 - DNA, 2413 bp, Homo sapiens
tatcattaattagaaaactttaatttgtaatctaccaaaacagtgaaaacaaccaacccttcccccgccccccaatacaaaccctccgttgcctactccagggacaagaggcgtcaccatcgctgaggagctggttaggaatgtcggctctccgaccctagcccagacttactgaatcagaatgtgcatttaccacgacgaccaggtcattacacgcattttacagtttcagaacccctgctatagcctactgtacttcagcgccaatattttgctgaaaagaattcccagctggaactgtggctcccggagtctttcaccagatggcagcagcccactcctccctgtagcactcccattgttccaggcaggattcagccgcaggctcctccggaagaccaggggcagacggggcggtggcggggtcgtgcccagtgggaggggtcgggtctgcccaatgggttctcccgggcggggggcggggctctatttcagcagctctcagggccttgggctcatcccgagtcccgggctcagtatgtggcgccttcctcgcgcgctgtgtgtgcacgctgcaaagaccagcaagctctctggaccttggagcaggcctgccgccttcatgtccactctcctcatcaatcagccccagtatgcgtggctgaaagagctggggctccgcgaggaaaacgagggcgtgtataatggaagctggggaggccggggagaggttattacgacctattgccctgctaacaacgagccaatagcaagagtccgacaggccagtgtggcagactatgaagaaactgtaaagaaagcaagagaagcatggaaaatctgggcagatattcctgctccaaaacgaggagaaatagtaagacagattggcgatgccttgcgggagaagatccaagtactaggaagcttggtgtctttggagatggggaaaatcttagtggaaggtgtgggtgaagttcaggagtatgtggatatctgtgactatgctgttggtttatcaaggatgattggaggacctatcttgccttctgaaagatctggccatgcactgattgagcagtggaatcccgtaggcctggttggaatcatcacggcattcaatttccctgtggcagtgtatggttggaacaacgccatcgccatgatctgtggaaatgtctgcctctggaaaggagctccaaccacttccctcattagtgtggctgtcacaaagataatagccaaggttctggaggacaacaagctgcctggtgcaatttgttccttgacttgtggtggagcagatattggcacagcaatggccaaagatgaacgagtgaacctgctgtccttcactgggagcactcaggtgggaaaacaggtgggcctgatggtgcaggagaggtttggatatacatgcacagaggaaagattggaagacactatcaaaattggagaagtctgttggaacttggaggaaacaatgccattattgcctttgaagatgcagacctcagcttagttgttccatcagctctcttcgctgctgtgggaacagctggccagaggtgtaccactgcgaggcgactgtttatacatgaaagcatccatgatgaggttgtaaacagacttaaaaaggcctatgcacagatccgagttgggaacccatgggaccctaatgttctctatgggccactccacaccaagcaggcagtgagcatgtttcttggagcagtggaagaagcaaagaaagaaggtggcacagtggtctatgggggcaaggttatggatcgccctggaaattatgtagaaccgacaattgtgacaggtcttggccacgatgcgtccattgcacacacagagacttttgctccgattctctatgtctttaaattcaagaatgaagaagaggtctttgcatggaataatgaagtaaaacagggactttcaagtagcatctttaccaaagatctgggcagaatctttcgctggcttggacctaaaggatcagactgtggcattgtaaatgtcaacattccaacaagtggggctgagattggaggtgcctttggaggagaaaagcacactggtggtggcagggagtctggcagtgatgcctggaaacagtacatgagaaggtctacttgtactatcaactacagtaaagaccttcctctggcccaaggaatcaagtttcagtaaaggtgttttagatgaacatcccttaatttgaggtgttccagcagctgtttttggagaagacaaagaaaattaaagttttccctgaataaatgcattattatgactgtgacagtgactaatccccctatgaccccaaagccctgattaaatcaagagattccttttttaaaaatcaaaataaaattgttacaacatagccatagttactaaa

SEQ ID NO: 103844 - DNA, 2313 bp, Homo sapiens
tatcattaattagaaaactttaatttgtaatctaccaaaacagtgaaaacaaccaacccttcccccgccccccaatacaaaccctccgttgcctactccagggacaagaggcgtcaccatcgctgaggagctggttaggaatgtcggctctccgaccctagcccagacttactgaatcagaatgtgcatttaccacgacgaccaggtcattacacgcattttacagtttcagaacccctgctatagcctactgtacttcagcgccaatattttgctgaaaagaattcccagctggaactgtggctcccggagtctttcaccagatggcagcagcccactcctccctgtagcactcccattgttccaggcaggattcagccgcaggctcctccggaagaccaggggcagacggggcggtggcggggtcgtgcccagtgggaggggtcgggtctgcccaatgggttctcccgggcggggggcggggctctatttcagcagctctcagggccttgggctcatcccgagtcccgggctcagtatgtggcgccttcctcgcgcgctgtgtgtgcacgctgcaaagaccagcaagctctctggaccttggagcaggcctgccgccttcatgtccactctcctcatcaatcagccccagtatgcgtggctgaaagagctggggctccgcgaggaaaacgagggcgtgtataatggaagctggggaggccggggagaggttattacgacctattgccctgctaacaacgagccaatagcaagagtccgacaggccagtgtggcagactatgaagaaactgtaaagaaagcaagagaagcatggaaaatctgggcagatattcctgctccaaaacgaggagaaatagtaagacagattggcgatgccttgcgggagaagatccaagtactaggaagcttggtgtctttggagatggggaaaatcttagtggaaggtgtgggtgaagttcaggagtatgtggatatctgtgactatgctgttggtttatcaaggatgattggaggacctatcttgccttctgaaagatctggccatgcactgattgagcagtggaatcccgtaggcctggttggaatcatcacggcattcaatttccctgtggcagtgtatggttggaacaacgccatcgccatgatctgtggaaatgtctgcctctggaaaggagctccaaccacttccctcattagtgtggctgtcacaaagataatagccaaggttctggaggacaacaagctgcctggtgcaatttgttccttgacttgtggtggagcagatattggcacagcaatggccaaagatgaacgagtgaacctgctgtccttcactgggagcactcaggtgggaaaacaggtgggcctgatggtgcaggagaggtttgggagaagtctgttggaacttggaggaaacaatgccattattgcctttgaagatgcagacctcagcttagttgttccatcagctctcttcgctgctgtgggaacagctggccagaggtgtaccactgcgaggcgactgtttatacatgaaagcatccatgatgaggttgtaaacagacttaaaaaggcctatgcacagatccgagttgggaacccatgggaccctaatgttctctatgggccactccacaccaagcaggcagtgagcatgtttcttggagcagtggaagaagcaaagaaagaaggtggcacagtggtctatgggggcaaggttatggatcgccctggaaattatgtagaaccgacaattgtgacaggtcttggccacgatgcgtccattgcacacacagagacttttgctccgattctctatgtctttaaattcaagaatgaagaagaggtctttgcatggaataatgaagtaaaacagggactttcaagtagcatctttaccaaagatctgggcagaatctttcgctggcttggacctaaaggatcagactgtggcattgtaaatgtcaacattccaacaagtggggctgagattggaggtgcctttggaggagaaaagcacactggtggtggcagggagtctggcagtgatgcctggaaacagtacatgagaaggtctacttgtactatcaactacagtaaagaccttcctctggcccaaggaatcaagtttcagtaaaggtgttttagatgaacatcccttaatttgaggtgttccagcagctgtttttggagaagacaaagaaaattaaagttttccctgaataaatgcattattatgactgtgacagtgactaatcccccgcttagcaaggacccacgctctgcaagacc

SEQ ID NO: 103845 - DNA, 2161 bp, Homo sapiens
  misc_feature (2108)..(2108): n is a, c, g, or t
  misc_feature (2111)..(2111): n is a, c, g, or t
tatcattaattagaaaactttaatttgtaatctaccaaaacagtgaaaacaaccaacccttcccccgccccccaatacaaaccctccgttgcctactccagggacaagaggcgtcaccatcgctgaggagctggttaggaatgtcggctctccgaccctagcccagacttactgaatcagaatgtgcatttaccacgacgaccaggtcattacacgcattttacagtttcagaacccctgctatagcctactgtacttcagcgccaatattttgctgaaaagaattcccagctggaactgtggctcccggagtctttcaccagatggcagcagcccactcctccctgtagcactcccattgttccaggcaggattcagccgcaggctcctccggaagaccaggggcagacggggcggtggcggggtcgtgcccagtgggaggggtcgggtctgcccaatgggttctcccgggcggggggcggggctctatttcagcagctctcagggccttgggctcatcccgagtcccgggctcagtatgtggcgccttcctcgcgcgctgtgtgtgcacgctgcaaagaccagcaagctctctggaccttggagcaggcctgccgccttcatgtccactctcctcatcaatcagccccagtatgcgtggctgaaagagctggggctccgcgaggaaaacgagggcgtgtataatggaagctggggaggccggggagaggttattacgacctattgccctgctaacaacgagccaatagcaagagtccgacaggccagtgtggcagactatgaagaaactgtaaagaaagcaagagaagcatggaaaatctgggcagatattcctgctccaaaacgaggagaaatagtaagacagattggcgatgccttgcgggagaagatccaagtactaggaagcttggtgtctttggagatggggaaaatcttagtggaaggtgtgggtgaagttcaggagtatgtggatatctgtgactatgctgttggtttatcaaggatgattggaggacctatcttgccttctgaaagatctggccatgcactgattgagcagtggaatcccgtaggcctggttggaatcatcacggcattcaatttccctgtggcagtgtatggttggaacaacgccatcgccatgatctgtggaaatgtctgcctctggaaaggagctccaaccacttccctcattagtgtggctgtcacaaagataatagccaaggttctggaggacaacaagctgcctggtgcaatttgttccttgacttgtggtggagcagatattggcacagcaatggccaaagatgaacgagtgaacctgctgtccttcactgggagcactcaggtgggaaaacaggtgggcctgatggtgcaggagaggtttgggagaagtctgttggaacttggaggaaacaatgccattattgcctttgaagatgcagacctcagcttagttgttccatcagctctcttcgctgctgtgggaacagctggccagaggtgtaccactgcgaggcgactgtttatacatgaaagcatccatgatgaggttgtaaacagacttaaaaaggcctatgcacagatccgagttgggaacccatgggaccctaatgttctctatgggccactccacaccaagcaggcagtgagcatgtttcttggagcagtggaagaagcaaagaaagaaggtggcacagtggtctatgggggcaaggttatggatcgccctggaaattatgtagaaccgacaattgtgacaggtcttggccacgatgcgtccattgcacacacagagacttttgctccgattctctatgtctttaaattcaagaatgaagaagaggtctttgcatggaataatgaagtaaaacagggactttcaagtagcatctttaccaaagatctgggcagaatctttcgctggcttggacctaaaggatcagactgtggcattgtaaatgtcaacattccaacaagtggggctgagattggaggtgcctttggaggagaaaagcacactggtggtggcagggagtctggcagtgatgcctggaaacagtacatgagaaggtctacttgtactntcnactacagtaaagaccttcctctggcccacactggccgtgatccccacatg

SEQ ID NO: 103846 - DNA, 2341 bp, Homo sapiens
tatcattaattagaaaactttaatttgtaatctaccaaaacagtgaaaacaaccaacccttcccccgccccccaatacaaaccctccgttgcctactccagggacaagaggcgtcaccatcgctgaggagctggttaggaatgtcggctctccgaccctagcccagacttactgaatcagaatgtgcatttaccacgacgaccaggtcattacacgcattttacagtttcagaacccctgctatagcctactgtacttcagcgccaatattttgctgaaaagaattcccagctggaactgtggctcccggagtctttcaccagatggcagcagcccactcctccctgtagcactcccattgttccaggcaggattcagccgcaggctcctccggaagaccaggggcagacggggcggtggcggggtcgtgcccagtgggaggggtcgggtctgcccaatgggttctcccgggcggggggcggggctctatttcagcagctctcagggccttgggctcatcccgagtcccgggctcagtatgtggcgccttcctcgcgcgctgtgtgtgcacgctgcaaagaccagcaagctctctggaccttggagcaggcctgccgccttcatgtccactctcctcatcaatcagccccagtatgcgtggctgaaagagctggggctccgcgaggaaaacgagggcgtgtataatggaagctggggaggccggggagaggttattacgacctattgccctgctaacaacgagccaatagcaagagtccgacaggccagtgtggcagactatgaagaaactgtaaagaaagcaagagaagcatggaaaatctgggcagatattcctgctccaaaacgaggagaaatagtaagacagattggcgatgccttgcgggagaagatccaagtactaggaagcttggtgtctttggagatggggaaaatcttagtggaaggtgtgggtgaagttcaggagtatgtggatatctgtgactatgctgttggtttatcaaggatgattggaggacctatcttgccttctgaaagatctggccatgcactgattgagcagtggaatcccgtaggcctggttggaatcatcacggcattcaatttccctgtggcagtgtatggttggaacaacgccatcgccatgatctgtggaaatgtctgcctctggaaaggagctccaaccacttccctcattagtgtggctgtcacaaagataatagccaaggttctggaggacaacaagctgcctggtgcaatttgttccttgacttgtggtggagcagatattggcacagcaatggccaaagatgaacgagtgaacctgctgtccttcactgggagcactcaggtgggaaaacagggagaagtctgttggaacttggaggaaacaatgccattattgcctttgaagatgcagacctcagcttagttgttccatcagctctcttcgctgctgtgggaacagctggccagaggtgtaccactgcgaggcgactgtttatacatgaaagcatccatgatgaggttgtaaacagacttaaaaaggcctatgcacagatccgagttgggaacccatgggaccctaatgttctctatgggccactccacaccaagcaggcagtgagcatgtttcttggagcagtggaagaagcaaagaaagaaggtggcacagtggtctatgggggcaaggttatggatcgccctggaaattatgtagaaccgacaattgtgacaggtcttggccacgatgcgtccattgcacacacagagacttttgctccgattctctatgtctttaaattcaagaatgaagaagaggtctttgcatggaataatgaagtaaaacagggactttcaagtagcatctttaccaaagatctgggcagaatctttcgctggcttggacctaaaggatcagactgtggcattgtaaatgtcaacattccaacaagtggggctgagattggaggtgcctttggaggagaaaagcacactggtggtggcagggagtctggcagtgatgcctggaaacagtacatgagaaggtctacttgtactatcaactacagtaaagaccttcctctggcccaaggaatcaagtttcagtaaaggtgttttagatgaacatcccttaatttgaggtgttccagcagctgtttttggagaagacaaagaaaattaaagttttccctgaataaatgcattattatgactgtgacagtgactaatccccctatgaccccaaagccctgattaaatcaagagattccttttttaaaaatcaaaataaaattgttacaacatagccatagttactaaa

SEQ ID NO: 103847 - DNA, 2046 bp, Homo sapiens
tatcattaattagaaaactttaatttgtaatctaccaaaacagtgaaaacaaccaacccttcccccgccccccaatacaaaccctccgttgcctactccagggacaagaggcgtcaccatcgctgaggagctggttaggaatgtcggctctccgaccctagcccagacttactgaatcagaatgtgcatttaccacgacgaccaggtcattacacgcattttacagtttcagaacccctgctatagcctactgtacttcagcgccaatattttgctgaaaagaattcccagctggaactgtggctcccggagtctttcaccagatggcagcagcccactcctccctgtagcactcccattgttccaggcaggattcagccgcaggctcctccggaagaccaggggcagacggggcggtggcggggtcgtgcccagtgggaggggtcgggtctgcccaatgggttctcccgggcggggggcggggctctatttcagcagctctcagggccttgggctcatcccgagtcccgggctcagtatgtggcgccttcctcgcgcgctgtgtgtgcacgctgcaaagaccagcaagctctctggaccttggagcaggcctgccgccttcatgtccactctcctcatcaatcagccccagtatgcgtggctgaaagagctggggctccgcgaggaaaacgagggcgtgtataatggaagctggggaggccggggagaggttattacgacctattgccctgctaacaacgagccaatagcaagagtccgacaggccagtgtggcagactatgaagaaactgtaaagaaagcaagagaagcatggaaaatctgggcagatattcctgctccaaaacgaggagaaatagtaagacagattggcgatgccttgcgggagaagatccaagtactaggaagcttggtgtctttggagatggggaaaatcttagtggaaggtgtgggtgaagttcaggagtatgtggatatctgtgactatgctgttggtttatcaaggatgattggaggacctatcttgccttctgaaagatctggccatgcactgattgagcagtggaatcccgtaggcctggttggaatcatcacggcattcaatttccctgtggcagtgtatggttggaacaacgccatcgccatgatctgtggaaatgtctgcctctggaaaggagctccaaccacttccctcattagtgtggctgtcacaaagataatagccaaggttctggaggacaacaagctgcctggtgcaatttgttccttgacttgtggtggagcagatattggcacagcaatggccaaagatgaacgagtgaacctgctgtccttcactgggagcactcaggtgggaaaacaggtgggcctgatggtgcaggagaggtttgggagaagtctgttggaacttggaggaaacaatgccattattgcctttgaagatgcagacctcagcttagttgttccatcagctctcttcgctgctgtgggaacagctggccagaggtgtaccactgcgaggcgactgtttatacatgaaagcatccatgatgaggttgtaaacagacttaaaaaggcctatgcacagatccgagttgggaacccatgggaccctaatgttctctatgggccactccacaccaagcaggcagtgagcatgtttcttggagcagtggaagaagcaaagaaagaaggtggcacagtggtctatgggggcaaggttatggatcgccctggaaattatgtagaaccgacaattgtgacaggtcttggccacgatgcgtccattgcacacacagagacttttgctccgattctctatgtctttaaattcaagaatgaagaagaggtctttgcatggaataatgaagtaaaacagggactttcaagtagcatctttaccaaagatctgggcagaatctttcgctggcttgggtacaactttgtctattttgaaaatttatataagtctgatttatgtgacctacaggatcagactgtggcatcgataaaacgggtaccgagctc

SEQ ID NO: 103848 - DNA, 1767 bp, Homo sapiens
tatcattaattagaaaactttaatttgtaatctaccaaaacagtgaaaacaaccaacccttcccccgccccccaatacaaaccctccgttgcctactccagggacaagaggcgtcaccatcgctgaggagctggttaggaatgtcggctctccgaccctagcccagacttactgaatcagaatgtgcatttaccacgacgaccaggtcattacacgcattttacagtttcagaacccctgctatagcctactgtacttcagcgccaatattttgctgaaaagaattcccagctggaactgtggctcccggagtctttcaccagatggcagcagcccactcctccctgtagcactcccattgttccaggcaggattcagccgcaggctcctccggaagaccaggggcagacggggcggtggcggggtcgtgcccagtgggaggggtcgggtctgcccaatgggttctcccgggcggggggcggggctctatttcagcagctctcagggccttgggctcatcccgagtcccgggctcagtatgtggcgccttcctcgcgcgctgtgtgtgcacgctgcaaagaccagcaagctctctggaccttggagcaggcctgccgccttcatgtccactctcctcatcaatcagccccagtatgcgtggctgaaagagctggggctccgcgaggaaaacgagggcgtgtataatggaagctggggaggccggggagaggttattacgacctattgccctgctaacaacgagccaatagcaagagtccgacaggccagtgtggcagactatgaagaaactgtaaagaaagcaagagaagcatggaaaatctgggcagatattcctgctccaaaacgaggagaaatagtaagacagattggcgatgccttgcgggagaagatccaagtactaggaagcttggtgtctttggagatggggaaaatcttagtggaaggtgtgggtgaagttcaggagtatgtggatatctgtgactatgctgttggtttatcaaggatgattggaggacctatcttgccttctgaaagatctggccatgcactgattgagcagtggaatcccgtaggcctggttggaatcatcacggcattcaatttccctgtggcagtgtatggttggaacaacgccatcgccatgatctgtggaaatgtctgcctctggaaaggagctccaaccacttccctcattagtgtggctgtcacaaagataatagccaaggttctggaggacaacaagctgcctggtgcaatttgttccttgacttgtggtggagcagatattggcacagcaatggccaaagatgaacgagtgaacctgctgtccttcactgggagcactcaggtgggaaaacaggtgggcctgatggtgcaggagaggtttgggagaagtctgttggaacttggaggaaacaatgccattattgcctttgaagatgcagacctcagcttagttgttccatcagctctcttcgctgctgtgggaacagctggccagaggtgtaccactgcgaggcgactgtttatacatgaaagcatccatgatgaggttgtaaacagacttaaaaaggcctatgcacagatccgagttgggaacccatgggaccctaatgttctctatgggccactccacaccaagcaggcagtgagcatgtttcttggagcagtggaagaagcaaagaaagaaggtggcacagtggtctatgggggcaaggtaagggatgctctgagatcaattgtgac

SEQ ID NO: 103849 - DNA, 1724 bp, Homo sapiens
agcatttctccattgcccagggcttaacaccgcgcctgatacccattactgctcaaaacaatgttttatagaatacaatggaaaggttattacgacctattgccctgctaacaacgagccaatagcaagagtccgacaggccagtgtggcagactatgaagaaactgtaaagaaagcaagagaagcatggaaaatctgggcagatattcctgctccaaaacgaggagaaatagtaagacagattggcgatgccttgcgggagaagatccaagtactaggaagcttggtgtctttggagatggggaaaatcttagtggaaggtgtgggtgaagttcaggagtatgtggatatctgtgactatgctgttggtttatcaaggatgattggaggacctatcttgccttctgaaagatctggccatgcactgattgagcagtggaatcccgtaggcctggttggaatcatcacggcattcaatttccctgtggcagtgtatggttggaacaacgccatcgccatgatctgtggaaatgtctgcctctggaaaggagctccaaccacttccctcattagtgtggctgtcacaaagataatagccaaggttctggaggacaacaagctgcctggtgcaatttgttccttgacttgtggtggagcagatattggcacagcaatggccaaagatgaacgagtgaacctgctgtccttcactgggagcactcaggtgggaaaacaggtgggcctgatggtgcaggagaggtttgggagaagtctgttggaacttggaggaaacaatgccattattgcctttgaagatgcagacctcagcttagttgttccatcagctctcttcgctgctgtgggaacagctggccagaggtgtaccactgcgaggcgactgtttatacatgaaagcatccatgatgaggttgtaaacagacttaaaaaggcctatgcacagatccgagttgggaacccatgggaccctaatgttctctatgggccactccacaccaagcaggcagtgagcatgtttcttggagcagtggaagaagcaaagaaagaaggtggcacagtggtctatgggggcaaggttatggatcgccctggaaattatgtagaaccgacaattgtgacaggtcttggccacgatgcgtccattgcacacacagagacttttgctccgattctctatgtctttaaattcaagaatgaagaagaggtctttgcatggaataatgaagtaaaacagggactttcaagtagcatctttaccaaagatctgggcagaatctttcgctggcttggacctaaaggatcagactgtggcattgtaaatgtcaacattccaacaagtggggctgagattggaggtgcctttggaggagaaaagcacactggtggtggcagggagtctggcagtgatgcctggaaacagtacatgagaaggtctacttgtactatcaactacagtaaagaccttcctctggcccaaggaatcaagtttcagtaaaggtgttttagatgaacatcccttaatttgaggtgttccagcagctgtttttggagaagacaaagaaaattaaagttttccctgaataaatgcattattatgactgtgacagtgactaatccccctatgaccccaaagccctgattaaatcaagagattccttttttaaaaatcaaaataaaattgttacaacatagccatagttactaaa

SEQ ID NO: 103850 - DNA, 1997 bp, Homo sapiens
tctatttcaacagttctcagggacttgggctcatcccgacgtcaccgggctcagttatgtgcgacagcctgtccctccgtacagctgatgtggtgcactgcatggccaatagacccagggaacgctcgtcttggaccattggtagcaagctcggtgacgaactgtcattgctctcacgtcatccttctagtcgaaatcgagaccctcagtatgtcgttggcgtgaaaagtagactgggggcatacacgtagcacgtgaacaagacggatgtgtggcgatgttactataaatgggtaaagacttagtggggaagtgcctggagggatgatggtttattgtagctgaaccatattttgctcgctgtattagactaagggagctcagataaggaagagtctcgatgaggtcatgagtggtggactatgaagaaactgtagagaaaggcaaaaaggaagcatggaacaatctggggcagagtattcctgctccaaaacgaggagaaatagtaagacagattggcgatgccttgcgggagaagatccaagtactaggaagcttggtgtctttggagatggggaaaatcttagtggaaggtgtgggtgaagttcaggagtatgtggatatctgtgactatgctgttggtttatcaaggatgattggaggacctatcttgccttctgaaagatctggccatgcactgattgagcagtggaatcccgtaggcctggttggaatcatcacggcattcaatttccctgtggcagtgtatggttggaacaacgccatcgccatgatctgtggaaatgtctgcctctggaaaggagctccaaccacttccctcattagtgtggctgtcacaaagataatagccaaggttctggaggacaacaagctgcctggtgcaatttgttccttgacttgtggtggagcagatattggcacagcaatggccaaagatgaacgagtgaacctgctgtccttcactgggagcactcaggtgggaaaacaggtgggcctgatggtgcaggagaggtttgggagaagtctgttggaacttggaggaaacaatgccattattgcctttgaagatgcagacctcagcttagttgttccatcagctctcttcgctgctgtgggaacagctggccagaggtgtaccactgcgaggcgactgtttatacatgaaagcatccatgatgaggttgtaaacagacttaaaaaggcctatgcacagatccgagttgggaacccatgggaccctaatgttctctatgggccactccacaccaagcaggcagtgagcatgtttcttggagcagtggaagaagcaaagaaagaaggtggcacagtggtctatgggggcaaggttatggatcgccctggaaattatgtagaaccgacaattgtgacaggtcttggccacgatgcgtccattgcacacacagagacttttgctccgattctctatgtctttaaattcaagaatgaagaagaggtctttgcatggaataatgaagtaaaacagggactttcaagtagcatctttaccaaagatctgggcagaatctttcgctggcttggacctaaaggatcagactgtggcattgtaaatgtcaacattccaacaagtggggctgagattggaggtgcctttggaggagaaaagcacactggtggtggcagggagtctggcagtgatgcctggaaacagtacatgagaaggtctacttgtactatcaactacagtaaagaccttcctctggcccaaggaatcaagtttcagtaaaggtgttttagatgaacatcccttaatttgaggtgttccagcagctgtttttggagaagacaaagaaaattaaagttttccctgaataaatgcattattatgactgtgacagtgactaatccccctatgaccccaaagccctgattaaatcaagagattccttttttaaaaatcaaaataaaattgttacaacatagccatagttactaaa

SEQ ID NO: 103851 - DNA, 2288 bp, Homo sapiens
tatcattaattagaaaactttaatttgtaatctaccaaaacagtgaaaacaaccaacccttcccccgccccccaatacaaaccctccgttgcctactccagggacaagaggcgtcaccatcgctgaggagctggttaggaatgtcggctctccgaccctagcccagacttactgaatcagaatgtgcatttaccacgacgaccaggtcattacacgcattttacagtttcagaacccctgctatagcctactgtacttcagcgccaatattttgctgaaaagaattcccagctggaactgtggctcccggagtctttcaccagatggcagcagcccactcctccctgtagcactcccattgttccaggcaggattcagccgcaggctcctccggaagaccaggggcagacggggcggtggcggggtcgtgcccagtgggaggggtcgggtctgcccaatgggttctcccgggcggggggcggggctctatttcagcagctctcagggccttgggctcatcccgagtcccgggctcagtatgtggcgccttcctcgcgcgctgtgtgtgcacgctgcaaagaccagcaagctctctggaccttggagcaggcctgccgccttcatgtccactctcctcatcaatcagccccagtatgcgtggctgaaagagctggggctccgcgaggaaaacgagggcgtgtataatggaagctggggaggccggggagaggttattacgacctattgccctgctaacaacgagccaatagcaagagtccgacaggccagtgtggcagactatgaagaaactgtaaagaaagcaagagaagcatggaaaatctgggcagatgtgtctttggagatggggaaaatcttagtggaaggtgtgggtgaagttcaggagtatgtggatatctgtgactatgctgttggtttatcaaggatgattggaggacctatcttgccttctgaaagatctggccatgcactgattgagcagtggaatcccgtaggcctggttggaatcatcacggcattcaatttccctgtggcagtgtatggttggaacaacgccatcgccatgatctgtggaaatgtctgcctctggaaaggagctccaaccacttccctcattagtgtggctgtcacaaagataatagccaaggttctggaggacaacaagctgcctggtgcaatttgttccttgacttgtggtggagcagatattggcacagcaatggccaaagatgaacgagtgaacctgctgtccttcactgggagcactcaggtgggaaaacaggtgggcctgatggtgcaggagaggtttgggagaagtctgttggaacttggaggaaacaatgccattattgcctttgaagatgcagacctcagcttagttgttccatcagctctcttcgctgctgtgggaacagctggccagaggtgtaccactgcgaggcgactgtttatacatgaaagcatccatgatgaggttgtaaacagacttaaaaaggcctatgcacagatccgagttgggaacccatgggaccctaatgttctctatgggccactccacaccaagcaggcagtgagcatgtttcttggagcagtggaagaagcaaagaaagaaggtggcacagtggtctatgggggcaaggttatggatcgccctggaaattatgtagaaccgacaattgtgacaggtcttggccacgatgcgtccattgcacacacagagacttttgctccgattctctatgtctttaaattcaagaatgaagaagaggtctttgcatggaataatgaagtaaaacagggactttcaagtagcatctttaccaaagatctgggcagaatctttcgctggcttggacctaaaggatcagactgtggcattgtaaatgtcaacattccaacaagtggggctgagattggaggtgcctttggaggagaaaagcacactggtggtggcagggagtctggcagtgatgcctggaaacagtacatgagaaggtctacttgtactatcaactacagtaaagaccttcctctggcccaaggaatcaagtttcagtaaaggtgttttagatgaacatcccttaatttgaggtgttccagcagctgtttttggagaagacaaagaaaattaaagttttccctgaataaatgcattattatgactgtgacagtgactaatccccctatgaccccaaagccctgattaaatcaagagattccttttttaaaaatcaaaataaaattgttacaacatagccatagttactaaa

SEQ ID NO: 103852 - DNA, 1628 bp, Homo sapiens
tatcattaattagaaaactttaatttgtaatctaccaaaacagtgaaaacaaccaacccttcccccgccccccaatacaaaccctccgttgcctactccagggacaagaggcgtcaccatcgctgaggagctggttaggaatgtcggctctccgaccctagcccagacttactgaatcagaatgtgcatttaccacgacgaccaggtcattacacgcattttacagtttcagaacccctgctatagcctactgtacttcagcgccaatattttgctgaaaagaattcccagctggaactgtggctcccggagtctttcaccagatggcagcagcccactcctccctgtagcactcccattgttccaggcaggattcagccgcaggctcctccggaagaccaggggcagacggggcggtggcggggtcgtgcccagtgggaggggtcgggtctgcccaatgggttctcccgggcggggggcggggctctatttcagcagctctcagggccttgggctcatcccgagtcccgggctcagtatgtggcgccttcctcgcgcgctgtgtgtgcacgctgcaaagaccagcaagctctctggaccttggagcaggcctgccgccttcatgtccactctcctcatcaatcagccccagtatgcgtggctgaaagagctggggctccgcgaggaaaacgagggcgtgtataatggaagctggggaggccggggagaggttattacgacctattgccctgctaacaacgagccaatagcaagagtccgacaggccagtgtggcagactatgaagaaactgtaaagaaagcaagagaagcatggaaaatctgggcagatattcctgctccaaaacgaggagaaatagtaagacagattggcgatgccttgcgggagaagatccaagtactaggaagcttggtgtctttggagatggggaaaatcttagtggaaggtgtgggtgaagttcaggagtatgtggatatctgtgactatgctgttggtttatcaaggatgattggaggacctatcttgccttctgaaagatctggccatgcactgattgagcagtggaatcccgtaggcctggttggaatcatcacggcattcaatttccctgtggcagtgtatggttggaacaacgccatcgccatgatctgtggaaatgtctgcctctggaaaggagctccaaccacttccctcattagtgtggctgtcacaaagataatagccaaggttctggaggacaacaagctgcctggtgcaatttgttccttgacttgtggtggagcagatattggcacagcaatggccaaagatgaacgagtgaacctgctgtccttcactgggagcactcaggtgggaaaacaggtgggcctgatggtgcaggagaggtttggagcaatggaaatgagaagatactctgctgttgtcacatatgctcctgatatcacaaatgaataaaagttattcacatggaagctgattttaaagtgcacttaaggaaatcgatgatcaaaagatcagtaataaatgtatgtctaaggctgggcacagtggctcacgtctgtaatcctagcactttgggaggctgaggtgggtgaattgcctgagctca

SEQ ID NO: 103853 - DNA, 2100 bp, Homo sapiens
tatcattaattagaaaactttaatttgtaatctaccaaaacagtgaaaacaaccaacccttcccccgccccccaatacaaaccctccgttgcctactccagggacaagaggcgtcaccatcgctgaggagctggttaggaatgtcggctctccgaccctagcccagacttactgaatcagaatgtgcatttaccacgacgaccaggtcattacacgcattttacagtttcagaacccctgctatagcctactgtacttcagcgccaatattttgctgaaaagaattcccagctggaactgtggctcccggagtctttcaccagatggcagcagcccactcctccctgtagcactcccattgttccaggcaggattcagccgcaggctcctccggaagaccaggggcagacggggcggtggcggggtcgtgcccagtgggaggggtcgggtctgcccaatgggttctcccgggcggggggcggggctctatttcagcagctctcagggccttgggctcatcccgagtcccgggctcagtatgtggcgccttcctcgcgcgctgtgtgtgcacgctgcaaagaccagcaagctctctggaccttggagcaggcctgccgccttcatgtccactctcctcatcaatcagccccagtatgcgtggctgaaagagctggggctccgcgaggaaaacgagggcgtgtataatggaagctggggaggccggggagaggttattacgacctattgccctgctaacaacgagccaatagcaagagtccgacaggccagtgtggcagactatgaagaaactgtaaagaaagcaagagaagcatggaaaatctgggcagatattcctgctccaaaacgaggagaaatagtaagacagattggcgatgccttgcgggagaagatccaagtactaggaagcttggtgtctttggagatggggaaaatcttagtggaaggtgtgggtgaagttcaggagtgacaacaagctgcctggtgcaatttgttccttgacttgtggtggagcagatattggcacagcaatggccaaagatgaacgagtgaacctgctgtccttcactgggagcactcaggtgggaaaacaggtgggcctgatggtgcaggagaggtttgggagaagtctgttggaacttggaggaaacaatgccattattgcctttgaagatgcagacctcagcttagttgttccatcagctctcttcgctgctgtgggaacagctggccagaggtgtaccactgcgaggcgactgtttatacatgaaagcatccatgatgaggttgtaaacagacttaaaaaggcctatgcacagatccgagttgggaacccatgggaccctaatgttctctatgggccactccacaccaagcaggcagtgagcatgtttcttggagcagtggaagaagcaaagaaagaaggtggcacagtggtctatgggggcaaggttatggatcgccctggaaattatgtagaaccgacaattgtgacaggtcttggccacgatgcgtccattgcacacacagagacttttgctccgattctctatgtctttaaattcaagaatgaagaagaggtctttgcatggaataatgaagtaaaacagggactttcaagtagcatctttaccaaagatctgggcagaatctttcgctggcttggacctaaaggatcagactgtggcattgtaaatgtcaacattccaacaagtggggctgagattggaggtgcctttggaggagaaaagcacactggtggtggcagggagtctggcagtgatgcctggaaacagtacatgagaaggtctacttgtactatcaactacagtaaagaccttcctctggcccaaggaatcaagtttcagtaaaggtgttttagatgaacatcccttaatttgaggtgttccagcagctgtttttggagaagacaaagaaaattaaagttttccctgaataaatgcattattatgactgtgacagtgactaatccccctatgaccccaaagccctgattaaatcaagagattccttttttaaaaatcaaaataaaattgttacaacatagccatagttactaaa

SEQ ID NO: 103854 - DNA, 1915 bp, Homo sapiens
  misc_feature (18)..(18): n is a, c, g, or t
  misc_feature (33)..(33): n is a, c, g, or t
cctattaaatttttcctnttgtcctttctcccnaaaaaacagtgcggaacacctcaaattaaggatgttcatctaaaacacctttactgaaacttgattccttgggccagaggaaggtctctacttgtactatcaactacagtaaagaccttcctctggcccaaggaatcaagtttcagtaaaggtgttttagatgaacatcccttaatttgaggtgttccagcagctgtttttggagaagacaaagaaaattaaagttttccctgaataaatgcattattatgactgtgacagtgactaatccccctatgaccccaaagccctgattaaatcaagagattccttttttaaaaatcaaaataaaattgttacaacatagccatagttactaaaagatgagttaggtggatttttattatgtcaactagttgtacatggctttttaaaagttaatgattattttgtaattagaaaaaaatagtacgtaccagggtaggaatttgggaaaatacagaaccgaggagaaaacagaagtctttgcagtagatacagggtgtctcctgaccaagtgaaggattcaggggcggggggtgaatattgcttgacattacccacctatggcatgtgttggatgtcgtgtgattgaaagggggatgcattcccctgtatgcttggaccacagttcagtattcatgtggaataacttgcagtgcttaaaatgacaacaggcattcatcacagttatggctcttgcttatgaaggctgtgtcaacttggaagagatttctggggtagacagattttgttcctgtgctggagtctgccacctgctggaggactctgaggccaaaattgcctgtgcagagttgtatagaaaatgcgtctggaggctgggcaaggtggcttatgcctataatcccagcactttgagaggccgaggcgggtggatcagtagaggctaggagtttgagaccagcctggccgatatcgtgaaaccccatctttaccaaaaaatacaaaaattagcccagtgtggtggcaggcacctgtaatcccagctattagggaggctgaggcaggagaattgtgtgaacccaggaggcagaggttgcagtgagcctagattgtgccactgcctgggcaacagtgagatcctgtctacaaaaaaaaaaaaaaaaaaaagtgcatctggatttttttatacaaccttagaccaccttctttagctttaggcgtctgcggttgcccttggatctgttctcaatcctcagtgtgtgtggcagcatgtggtcatagagagctgggcaaagttcactttctctttgctgacagtctcaccttttctcactgggaagctgcacaggagcctttgggctggttcagcccagaggcccctgttctcctgccttcctggcattctctgctccccttctgcatggcacccctctactcctgccaggttagaatggagcagaggcctttgaacaagatgacatttgtagacaacctgatccatcaggatgtggagagatctggacaaatggcaaataatttggggttgaattatggcccagagaagtaagcaaatgaaaaactaaacaattataaatgtatctgggaagcaaaggtattcataatatgtcccatggccagctgcgagcagtatttaactagacatgctgttgtcaatattgaacatgaatcaagccaaatactgatatagctattgagagaaggttggcaggaagaaatcatgggtgagggtatgtgggagtgataatcttagctatagattttaggtaaaactgattctgaaagctttctttgaaacaaatttataatttttcttctacatgtttctagcacaaggactcaatttttttggttataatgttcattaaaacatatgccttca

SEQ ID NO: 103855 - DNA, 1870 bp, Homo sapiens
gatctgctacattttaaaagtgggcatgaaaatcttctgttatgtatgtactgtcattaattctgttattttttcccactagtactatcaactacagtaaagaccttcctctggcccaaggaatcaagtttcagtaaaggtgttttagatgaacatcccttaatttgaggtgttccagcagctgtttttggagaagacaaagaaaattaaagttttccctgaataaatgcattattatgactgtgacagtgactaatccccctatgaccccaaagccctgattaaatcaagagattccttttttaaaaatcaaaataaaattgttacaacatagccatagttactaaaagatgagttaggtggatttttattatgtcaactagttgtacatggctttttaaaagttaatgattattttgtaattagaaaaaaatagtacgtaccagggtaggaatttgggaaaatacagaaccgaggagaaaacagaagtctttgcagtagatacagggtgtctcctgaccaagtgaaggattcaggggcggggggtgaatattgcttgacattacccacctatggcatgtgttggatgtcgtgtgattgaaagggggatgcattcccctgtatgcttggaccacagttcagtattcatgtggaataacttgcagtgcttaaaatgacaacaggcattcatcacagttatggctcttgcttatgaaggctgtgtcaacttggaagagatttctggggtagacagattttgttcctgtgctggagtctgccacctgctggaggactctgaggccaaaattgcctgtgcagagttgtatagaaaatgcgtctggaggctgggcaaggtggcttatgcctataatcccagcactttgagaggccgaggcgggtggatcagtagaggctaggagtttgagaccagcctggccgatatcgtgaaaccccatctttaccaaaaaatacaaaaattagcccagtgtggtggcaggcacctgtaatcccagctattagggaggctgaggcaggagaattgtgtgaacccaggaggcagaggttgcagtgagcctagattgtgccactgcctgggcaacagtgagatcctgtctacaaaaaaaaaaaaaaaaaaaagtgcatctggatttttttatacaaccttagaccaccttctttagctttaggcgtctgcggttgcccttggatctgttctcaatcctcagtgtgtgtggcagcatgtggtcatagagagctgggcaaagttcactttctctttgctgacagtctcaccttttctcactgggaagctgcacaggagcctttgggctggttcagcccagaggcccctgttctcctgccttcctggcattctctgctccccttctgcatggcacccctctactcctgccaggttagaatggagcagaggcctttgaacaagatgacatttgtagacaacctgatccatcaggatgtggagagatctggacaaatggcaaataatttggggttgaattatggcccagagaagtaagcaaatgaaaaactaaacaattataaatgtatctgggaagcaaaggtattcataatatgtcccatggccagctgcgagcagtatttaactagacatgctgttgtcaatattgaacatgaatcaagccaaatactgatatagctattgagagaaggttggcaggaagaaatcatgggtgagggtatgtgggagtgataatcttagctatagattttaggtaaaactgattctgaaagctttctttgaaacaaatttataatttttcttctacatgtttctagcacaaggactcaatttttttggttataatgttcattaaaacatatgccttca

SEQ ID NO: 103856 - DNA, 1163 bp, Homo sapiens
tatcattaattagaaaactttaatttgtaatctaccaaaacagtgaaaacaaccaacccttcccccgccccccaatacaaaccctccgttgcctactccagggacaagaggcgtcaccatcgctgaggagctggttaggaatgtcggctctccgaccctagcccagacttactgaatcagaatgtgcatttaccacgacgaccaggtcattacacgcattttacagtttcagaacccctgctatagcctactgtacttcagcgccaatattttgctgaaaagaattcccagctggaactgtggctcccggagtctttcaccagatggcagcagcccactcctccctgtagcactcccattgttccaggcaggattcagccgcaggctcctccggaagaccaggggcagacggggcggtggcggggtcgtgcccagtgggaggggtcgggtctgcccaatgggttctcccgggcggggggcggggctctatttcagcagctctcagggccttgggctcatcccgagtcccgggctcagtatgtggcgccttcctcgcgcgctgtgtgtgcacgctgcaaagaccagcaagctctctggaccttggagcaggcctgccgccttcatgtccactctcctcatcaatcagccccagtatgcgtggctgaaagagctggggctccgcgaggaaaacgagggcgtgtataatggaagctggggaggccggggagaggttattacgacctattgccctgctaacaacgagccaatagcaagagtccgacaggccagtgtggcagactatgaagaaactgtaaagaaagcaagagaagcatggaaaatctgggcagatattcctgctccaaaacgaggagaaatagtaagacagattggcgatgccttgcgggagaagatccaagtactaggaagcttggtgtctttggagatggggaaaatcttagtggaaggtgtgggtgaagttcaggagtatgtggatatctgtgactatgctgttggtttatcaaggatgattggaggacctatcttgccttctgaaatgtgaaataaaaagccttgcactgtttgatccaacggaatcccgaaagttctgggtggaaacatcacgggtcttaattttccctgatgcaaagatatgtttgtaccca

SEQ ID NO: 103857 - DNA, 1287 bp, Homo sapiens
tatcattaattagaaaactttaatttgtaatctaccaaaacagtgaaaacaaccaacccttcccccgccccccaatacaaaccctccgttgcctactccagggacaagaggcgtcaccatcgctgaggagctggttaggaatgtcggctctccgaccctagcccagacttactgaatcagaatgtgcatttaccacgacgaccaggtcattacacgcattttacagtttcagaacccctgctatagcctactgtacttcagcgccaatattttgctgaaaagaattcccagctggaactgtggctcccggagtctttcaccagatggcagcagcccactcctccctgtagcactcccattgttccaggcaggattcagccgcaggctcctccggaagaccaggggcagacggggcggtggcggggtcgtgcccagtgggaggggtcgggtctgcccaatgggttctcccgggcggggggcggggctctatttcagcagctctcagggccttgggctcatcccgagtcccgggctcagtatgtggcgccttcctcgcgcgctgtgtgtgcacgctgcaaagaccagcaagctctctggaccttggagcaggcctgccgccttcatgtccactctcctcatcaatcagccccagtatgcgtggctgaaagagctggggctccgcgaggaaaacgagggcgtgtataatggaagctggggaggccggggagaggtacgcgggcgctcaagaaatctctgcagccgccggggctcgctcgaggaggccgggcgggcactgacctaccgactccccgctggcgctggatgcggtagtagcatgggagattttgaagctccacagtaaaagttttctcgtgtagggtgcctttaaaacaaaaacttagattttaggtccttgtgtgctatgcagaatcgacgtcattttggagctgtaggggctaaacttcccgcgcatatttaaaacattatggtctaccgggcgcggtggctcacccctgtaatcccagcactttgggaggcctaggcgggcggatcacctgaggtagcgagttcaagaccagcctgaccgacatggagaaaccttgtctctactaaaaaaaatacaaaatagccgggcgtggtggcgcatgcctgtaatcccagctactagggaggctgaggcaggagaatcgcttgaacccgggaggtggaggtcgtagtgagccgagatcgtgccattgcactccagcctgagcaacaagagcgaaattccgtctcaaaaaaaaaaaa

SEQ ID NO: 103858 - DNA, 203 bp, Homo sapiens
gcttggtgtctttggagatggggaaaatcttagtggaaggtgtgggtgaagttcaggagtatgtggatatctgtgactatgctgttggtttatcaaggatgattggaggacctatcttgccttctgaaaagtaagcaatgaaattagttaagctgagttttgtactctgatatacagagctccaaaaaaaataaaatactctg

SEQ ID NO: 103859 - DNA, 671 bp, Homo sapiens
gtctgttcattgagaaagctgttctaataataaaacgatgccataaagggcaaaatgatgagccagccttccttttctctctccagctaatgttctctatgggccactccacaccaagcaggcagtgagcatgtttcttggagcagtggaagaagcaaagaaagaaggtggcacagtggtctatgggggcaaggtaagggatgctctgagatcaattgtgacagctttttaaccttcttttccctgagacacaagcagggctctgggcatattggaaaagccaccccatttgacatccttcttctcctgtctttatttatatatattattataaaacaaggaaacacatgtttttgtttgtttgtctgtttttgagacagagtcttactctgtgcccaggatggagtgcagtggcgcaatcttggctcacggcaacctccgcctcccaggttcaagtgattctcctgcttcagcctcccgagtagctgggattacaggtgcatgtcaccacacccagctaatttttatattttttggtagagatggggtttcccatgttagccaggctggtctctaactcctggcctcaagtgatccacccaccctggcctcctaaggtgttgggattacaggcatgaaccaccacacttggctctgtttgtttttgtgac

SEQ ID NO: 103860 - DNA, 2276 bp, Homo sapiens
tatcattaattagaaaactttaatttgtaatctaccaaaacagtgaaaacaaccaacccttcccccgccccccaatacaaaccctccgttgcctactccagggacaagaggcgtcaccatcgctgaggagctggttaggaatgtcggctctccgaccctagcccagacttactgaatcagaatgtgcatttaccacgacgaccaggtcattacacgcattttacagtttcagaacccctgctatagcctactgtacttcagcgccaatattttgctgaaaagaattcccagctggaactgtggctcccggagtctttcaccagatggcagcagcccactcctccctgtagcactcccattgttccaggcaggattcagccgcaggctcctccggaagaccaggggcagacggggcggtggcggggtcgtgcccagtgggaggggtcgggtctgcccaatgggttctcccgggcggggggcggggctctatttcagcagctctcagggccttgggctcatcccgagtcccgggctcagtatgtggcgccttcctcgcgcgctgtgtgtgcacgctgcaaagaccagcaagctctctggaccttggagcaggcctgccgccttcatgtccactctcctcatcaatcagccccagtatgcgtggctgaaagagctggggctccgcgaggaaaacgagggcgtgtataatggaagctggggaggccggggagaggttattacgacctattgccctgctaacaacgagccaatagcaagagtccgacaggccagtgtggcagactatgaagaaactgtaaagaaagcaagagaagcatggaaaatctgggcagatattcctgctccaaaacgaggagaaatagtaagacagattggcgatgccttgcgggagaagatccaagtactaggaagcttggtgtctttggagatggggaaaatcttagtggaaggtgtgggtgaagttcaggagtatgtggatatctgtgactatgctgttggtttatcaaggatgattggaggacctatcttgccttctgaaagatctggccatgcactgattgagcagtggaatcccgtaggcctggttggaatcatcacggcattcaatttccctgtggcagtgtatggttggaacaacgccatcgccatgatctgtggaaatgtctgcctctggaaaggagctccaaccacttccctcattagtgtggctgtcacaaagataatagccaaggttctggaggacaacaagctgcctggtgcaatttgttccttgacttgtggtggagcagatattggcacagcaatggccaaagatgaacgagtgaacctgctgtccttcactgggagcactcaggtgggaaaacaggtgggcctgatggtgcaggagaggtttgggagaagtctgttggaacttggaggaaacaatgccattattgcctttgaagatgcagacctcagcttagttgttccatcagctctcttcgctgctgtgggaacagctggccagaggtgtaccactgcgaggcgactgtttatacatgaaagcatccatgatgaggttgtaaacagacttaaaaaggcctatgcacagatccgagttgggaacccatgggaccctaatgttctctatgggccactccacaccaagcaggcagtgagcatgtttcttggagcagtggaagaagcaaagaaagaaggtggcacagtggtctatgggggcaaggttatggatcgccctggaaattatgtagaaccgacaattgtgacaggtcttggccacgatgcgtccattgcacacacagagacttttgctccgattctctatgtctttaaattcaagaatgaagaagaggtctttgcatggaataatgaagtaaaacagggactttcaagtagcatctttaccaaagatctgggcagaatctttcgctggcttgggtacaactttgtctattttgaaaatttatataagtctgatttatgtggtgagtggacttaaaaaaactgctgtagtctaaaatcagtttttcagtattgaaagcctttgagctttggtttagattttttatttatttttgtttgtttttaatttcctgttcattgctctcaccatgcctccctttttacacagacctaaaggatcagactgtggcattgtaaatgtcaacattccaacaagtggggctgagattggaggtgcctttggaggacgtagagaaggtctatttctccttttccatgttgggcagcaaagaaaaacc

SEQ ID NO: 103861 - DNA, 1955 bp, Homo sapiens
tatcattaattagaaaactttaatttgtaatctaccaaaacagtgaaaacaaccaacccttcccccgccccccaatacaaaccctccgttgcctactccagggacaagaggcgtcaccatcgctgaggagctggttaggaatgtcggctctccgaccctagcccagacttactgaatcagaatgtgcatttaccacgacgaccaggtcattacacgcattttacagtttcagaacccctgctatagcctactgtacttcagcgccaatattttgctgaaaagaattcccagctggaactgtggctcccggagtctttcaccagatggcagcagcccactcctccctgtagcactcccattgttccaggcaggattcagccgcaggctcctccggaagaccaggggcagacggggcggtggcggggtcgtgcccagtgggaggggtcgggtctgcccaatgggttctcccgggcggggggcggggctctatttcagcagctctcagggccttgggctcatcccgagtcccgggctcagtatgtggcgccttcctcgcgcgctgtgtgtgcacgctgcaaagaccagcaagctctctggaccttggagcaggcctgccgccttcatgtccactctcctcatcaatcagccccagtatgcgtggctgaaagagctggggctccgcgaggaaaacgagggcgtgtataatggaagctggggaggccggggagaggttattacgacctattgccctgctaacaacgagccaatagcaagagtccgacaggccagtgtggcagactatgaagaaactgtaaagaaagcaagagaagcatggaaaatctgggcagatattcctgctccaaaacgaggagaaatagtaagacagattggcgatgccttgcgggagaagatccaagtactaggaagcttggtgtctttggagatggggaaaatcttagtggaaggtgtgggtgaagttcaggagtatgtggatatctgtgactatgctgttggtttatcaaggatgattggaggacctatcttgccttctgaaagatctggccatgcactgattgagcagtggaatcccgtaggcctggttggaatcatcacggcattcaatttccctgtggcagtgtatggttggaacaacgccatcgccatgatctgtggaaatgtctgcctctggaaaggagctccaaccacttccctcattagtgtggctgtcacaaagataatagccaaggttctggaggacaacaagctgcctggtgcaatttgttccttgacttgtggtggagcagatattggcacagcaatggccaaagatgaacgagtgaacctgctgtccttcactgggagcactcaggtgggaaaacaggtgggcctgatggtgcaggagaggtttgggagaagtctgttggaacttggaggaaacaatgccattattgcctttgaagatgcagacctcagcttagttgttccatcagctctcttcgctgctgtgggaacagctggccagaggtgtaccactgcgaggcgactgtttatacatgaaagcatccatgatgaggttgtaaacagacttaaaaaggcctatgcacagatccgagttgggaacccatgggaccctaatgttctctatgggccactccacaccaagcaggcagtgagcatgtttcttggagcagtggaagaagcaaagaaagaaggtggcacagtggtctatgggggcaaggttatggatcgccctggaaattatgtagaaccgacaattgtgacaggtcttggccacgatgcgtccattgcacacacagagacttttgctccgattctctatgtctttaaattcaagaatgaagaagaggtctttgcatggaataatgaagtaaaacaggggcctagggagccgccccttgtcatgtaccatcaataaagtaccctgtgctcaacca

SEQ ID NO: 103862 - DNA, 1665 bp, Homo sapiens
taagctagtacgggcctgggtttgaatcggccgaggagactattgcctgctaacaacgagccaatagcaagagtcgacaggccagtgtggcagactatgaagaaactgtaaagaaagcaagagaagcatggaaaatctgggcagatattcctgctccaaaacgaggagaaatagtaagacagattggcgatgccttgcgggagaagatccaagtactaggaagcttggtgtctttggagatggggaaaatcttagtggaaggtgtgggtgaagttcaggagtatgtggatatctgtgactatgctgttggtttatcaaggatgattggaggacctatcttgccttctgaaagatctggccatgcactgattgagcagtggaatcccgtaggcctggttggaatcatcacggcattcaatttccctgtggcagtgtatggttggaacaacgccatcgccatgatctgtggaaatgtctgcctctggaaaggagctccaaccacttccctcattagtgtggctgtcacaaagataatagccaaggttctggaggacaacaagctgcctggtgcaatttgttccttgacttgtggtggagcagatattggcacagcaatggccaaagatgaacgagtgaacctgctgtccttcactgggagcactcaggtgggaaaacaggtgggcctgatggtgcaggagaggtttgggagaagtctgttggaacttggaggaaacaatgccattattgcctttgaagatgcagacctcagcttagttgttccatcagctctcttcgctgctgtgggaacagctggccagaggtgtaccactgcgaggcgactgtttatacatgaaagcatccatgatgaggttgtaaacagacttaaaaaggcctatgcacagatccgagttgggaacccatgggaccctaatgttctctatgggccactccacaccaagcaggcagtgagcatgtttcttggagcagtggaagaagcaaagaaagaaggtggcacagtggtctatgggggcaaggttatggatcgccctggaaattatgtagaaccgacaattgtgacaggtcttggccacgatgcgtccattgcacacacagagacttttgctccgattctctatgtctttaaattcaagaatgaagaagaggtctttgcatggaataatgaagtaaaacagggactttcaagtagcatctttaccaaagatctgggcagaatctttcgctggcttggacctaaaggatcagactgtggcattgtaaatgtcaacattccaacaagtggggctgagattggaggtgcctttggaggagaaaagcacactggtggtggcagggagtctggcagtgatgcctggaaacagtacatgagaaggtctacttgtactatcaactacagtaaagaccttcctctggcccaaggaatcaagtttcagtaaaggtgttttagatgaacatcccttaatttgaggtgttccagcagctgtttttggagaagacaaagaaaattaaagttttccctgaataaatgcattattatgactgtgacagtgactaatccccctatgaccccaaagccctgattaaatcaagagattccttttttaaaaatcaaaataaaattgttacaacatagccatagttactaaa

SEQ ID NO: 103863 - DNA, 2314 bp, Homo sapiens
tatcattaattagaaaactttaatttgtaatctaccaaaacagtgaaaacaaccaacccttcccccgccccccaatacaaaccctccgttgcctactccagggacaagaggcgtcaccatcgctgaggagctggttaggaatgtcggctctccgaccctagcccagacttactgaatcagaatgtgcatttaccacgacgaccaggtcattacacgcattttacagtttcagaacccctgctatagcctactgtacttcagcgccaatattttgctgaaaagaattcccagctggaactgtggctcccggagtctttcaccagatggcagcagcccactcctccctgtagcactcccattgttccaggcaggattcagccgcaggctcctccggaagaccaggggcagacggggcggtggcggggtcgtgcccagtgggaggggtcgggtctgcccaatgggttctcccgggcggggggcggggctctatttcagcagctctcagggccttgggctcatcccgagtcccgggctcagtatgtggcgccttcctcgcgcgctgtgtgtgcacgctgcaaagaccagcaagctctctggaccttggagcaggcctgccgccttcatgtccactctcctcatcaatcagccccagtatgcgtggctgaaagagctggggctccgcgaggaaaacgagggcgtgtataatggaagctggggaggccggggagaggttattacgacctattgccctgctaacaacgagccaatagcaagagtccgacaggccagtgtggcagactatgaagaaactgtaaagaaagcaagagaagcatggaaaatctgggcagatattcctgctccaaaacgaggagaaatagtaagacagattggcgatgccttgcgggagaagatccaagtactaggaagcttgatgtggatatctgtgactatgctgttggtttatcaaggatgattggaggacctatcttgccttctgaaagatctggccatgcactgattgagcagtggaatcccgtaggcctggttggaatcatcacggcattcaatttccctgtggcagtgtatggttggaacaacgccatcgccatgatctgtggaaatgtctgcctctggaaaggagctccaaccacttccctcattagtgtggctgtcacaaagataatagccaaggttctggaggacaacaagctgcctggtgcaatttgttccttgacttgtggtggagcagatattggcacagcaatggccaaagatgaacgagtgaacctgctgtccttcactgggagcactcaggtgggaaaacaggtgggcctgatggtgcaggagaggtttgggagaagtctgttggaacttggaggaaacaatgccattattgcctttgaagatgcagacctcagcttagttgttccatcagctctcttcgctgctgtgggaacagctggccagaggtgtaccactgcgaggcgactgtttatacatgaaagcatccatgatgaggttgtaaacagacttaaaaaggcctatgcacagatccgagttgggaacccatgggaccctaatgttctctatgggccactccacaccaagcaggcagtgagcatgtttcttggagcagtggaagaagcaaagaaagaaggtggcacagtggtctatgggggcaaggttatggatcgccctggaaattatgtagaaccgacaattgtgacaggtcttggccacgatgcgtccattgcacacacagagacttttgctccgattctctatgtctttaaattcaagaatgaagaagaggtctttgcatggaataatgaagtaaaacagggactttcaagtagcatctttaccaaagatctgggcagaatctttcgctggcttggacctaaaggatcagactgtggcattgtaaatgtcaacattccaacaagtggggctgagattggaggtgcctttggaggagaaaagcacactggtggtggcagggagtctggcagtgatgcctggaaacagtacatgagaaggtctacttgtactatcaactacagtaaagaccttcctctggcccaaggaatcaagtttcagtaaaggtgttttagatgaacatcccttaatttgaggtgttccagcagctgtttttggagaagacaaagaaaattaaagttttccctgaataaatgcattattatgactgtgacagtgactaatccccctatgaccccaaagccctgattaaatcaagagattccttttttaaaaatcaaaataaaattgttacaacatagccatagttactaaa

SEQ ID NO: 103864 - DNA, 2315 bp, Homo sapiens
tatcattaattagaaaactttaatttgtaatctaccaaaacagtgaaaacaaccaacccttcccccgccccccaatacaaaccctccgttgcctactccagggacaagaggcgtcaccatcgctgaggagctggttaggaatgtcggctctccgaccctagcccagacttactgaatcagaatgtgcatttaccacgacgaccaggtcattacacgcattttacagtttcagaacccctgctatagcctactgtacttcagcgccaatattttgctgaaaagaattcccagctggaactgtggctcccggagtctttcaccagatggcagcagcccactcctccctgtagcactcccattgttccaggcaggattcagccgcaggctcctccggaagaccaggggcagacggggcggtggcggggtcgtgcccagtgggaggggtcgggtctgcccaatgggttctcccgggcggggggcggggctctatttcagcagctctcagggccttgggctcatcccgagtcccgggctcagtatgtggcgccttcctcgcgcgctgtgtgtgcacgctgcaaagaccagcaagctctctggaccttggagcaggcctgccgccttcatgtccactctcctcatcaatcagccccagtatgcgtggctgaaagagctggggctccgcgaggaaaacgagggcgtgtataatggaagctggggaggccggggagaggttattacgacctattgccctgctaacaacgagccaatagcaagagtccgacaggccagtgtggcagactatgaagaaactgtaaagaaagcaagagaagcatggaaaatctgggcagatattctgcttgtcgttttatattgcttggtgtctttggagatggggaaaatcttagtggaaggtgtgggtgaagttcaggagtatgtggatatctgtgactatgctgttggtttatcaaggatgattggaggacctatcttgccttctgaaagatctggccatgcactgattgagcagtggaatcccgtaggcctggttggaatcatcacggcattcaatttccctgtggcagtgtatggttggaacaacgccatcgccatgatctgtggaaatgtctgcctctggaaaggagctccaaccacttccctcattagtgtggctgtcacaaagataatagccaaggttctggaggacaacaagctgcctggtgcaatttgttccttgacttgtggtggagcagatattggcacagcaatggccaaagatgaacgagtgaacctgctgtccttcactgggagcactcaggtgggaaaacaggtgggcctgatggtgcaggagaggtttgggagaagtctgttggaacttggaggaaacaatgccattattgcctttgaagatgcagacctcagcttagttgttccatcagctctcttcgctgctgtgggaacagctggccagaggtgtaccactgcgaggcgactgtttatacatgaaagcatccatgatgaggttgtaaacagacttaaaaaggcctatgcacagatccgagttgggaacccatgggaccctaatgttctctatgggccactccacaccaagcaggcagtgagcatgtttcttggagcagtggaagaagcaaagaaagaaggtggcacagtggtctatgggggcaaggttatggatcgccctggaaattatgtagaaccgacaattgtgacaggtcttggccacgatgcgtccattgcacacacagagacttttgctccgattctctatgtctttaaattcaagaatgaagaagaggtctttgcatggaataatgaagtaaaacagggactttcaagtagcatctttaccaaagatctgggcagaatctttcgctggcttggacctaaaggatcagactgtggcattgtaaatgtcaacattccaacaagtggggctgagattggaggtgcctttggaggagaaaagcacactggtggtggcagggagtctggcagtgatgcctggaaacagtacatgagaaggtctacttgtactatcaactacagtaaagaccttcctctggcccaaggaatcaagtttcagtaaaggtgttttagatgaacatcccttaatttgaggtgttccagcagctgtttttggagaagacaaagaaaattaaagttttccctgaataaatgcattattatgactgtgacagtgactaatccccctatgaccccaaagccctgattaaatcaagagattccttttttaaaaatcaaaataaaattgttacaacatagccatagttactaaa

SEQ ID NO: 103865 - DNA, 1447 bp, Homo sapiens
tatcattaattagaaaactttaatttgtaatctaccaaaacagtgaaaacaaccaacccttcccccgccccccaatacaaaccctccgttgcctactccagggacaagaggcgtcaccatcgctgaggagctggttaggaatgtcggctctccgaccctagcccagacttactgaatcagaatgtgcatttaccacgacgaccaggtcattacacgcattttacagtttcagaacccctgctatagcctactgtacttcagcgccaatattttgctgaaaagaattcccagctggaactgtggctcccggagtctttcaccagatggcagcagcccactcctccctgtagcactcccattgttccaggcaggattcagccgcaggctcctccggaagaccaggggcagacggggcggtggcggggtcgtgcccagtgggaggggtcgggtctgcccaatgggttctcccgggcggggggcggggctctatttcagcagctctcagggccttgggctcatcccgagtcccgggctcagtatgtggcgccttcctcgcgcgctgtgtgtgcacgctgcaaagaccagcaagctctctggaccttggagcaggcctgccgccttcatgtccactctcctcatcaatcagccccagtatgcgtggctgaaagagctggggctccgcgaggaaaacgagggcgtgtataatggaagctggggaggccggggagaggttattacgacctattgccctgctaacaacgagccaatagcaagagtccgacaggccagtgtggcagactatgaagaaactgtaaagaaagcaagagaagcatggaaaatctgggcagatattcctgctccaaaacgaggagaaatagtaagacagattggcgatgccttgcgggagaagatccaagtactaggaagcttggtgtctttggagatggggaaaatcttagtggaaggtgtgggtgaagttcaggagtatgtggatatctgtgactatgctgttggtttatcaaggatgattggaggacctatcttgccttctgaaagatctggccatgcactgattgagcagtggaatcccgtaggcctggttggaatcatcacggcattcaatttccctgtggcagtgtatggttggaacaacgccatcgccatgatctgtggaaatgtctgcctctggaaaggagctccaaccacttccctcattagtgtggctgtcacaaagataatagccaaggttctggaggacaacaagctgcctggtgcaatttgttccttgacttgtggtggagcagatattggcacagcaatggccaaagatgaacgagtgatcttctgcaaggtgatcttctgacgatgaggtgatcttctgcacgataaggtgatcttctgcacgatgaggtgatcttctgcacgataaggtgatcttctgcacgat

SEQ ID NO: 103866 - DNA, 1359 bp, Homo sapiens
tatcattaattagaaaactttaatttgtaatctaccaaaacagtgaaaacaaccaacccttcccccgccccccaatacaaaccctccgttgcctactccagggacaagaggcgtcaccatcgctgaggagctggttaggaatgtcggctctccgaccctagcccagacttactgaatcagaatgtgcatttaccacgacgaccaggtcattacacgcattttacagtttcagaacccctgctatagcctactgtacttcagcgccaatattttgctgaaaagaattcccagctggaactgtggctcccggagtctttcaccagatggcagcagcccactcctccctgtagcactcccattgttccaggcaggattcagccgcaggctcctccggaagaccaggggcagacggggcggtggcggggtcgtgcccagtgggaggggtcgggtctgcccaatgggttctcccgggcggggggcggggctctatttcagcagctctcagggccttgggctcatcccgagtcccgggctcagtatgtggcgccttcctcgcgcgctgtgtgtgcacgctgcaaagaccagcaagctctctggaccttggagcaggcctgccgccttcatgtccactctcctcatcaatcagccccagtatgcgtggctgaaagagctggggctccgcgaggaaaacgagggcgtgtataatggaagctggggaggccggggagaggttattacgacctattgccctgctaacaacgagccaatagcaagagtccgacaggccagtgtggcagactatgaagaaactgtaaagaaagcaagagaagcatggaaaatctgggcagatattcctgctccaaaacgaggagaaatagtaagacagattggcgatgccttgcgggagaagatccaagtactaggaagcttggtgtctttggagatggggaaaatcttagtggaaggtgtgggtgaagttcaggagtgacaacaagctgcctggtgcaatttgttccttgacttgtggtggagcagatattggcacagcaatggccaaagatgaacgagtgaacctgctgtccttcactgggagcactcaggtgggaaaacaggtgggcctgatggtgcaggagaggtttggagcaatggaaatgagaagatactctgctgttgtcacatatgctcctgatatcacaaatgaataaaagttattcacatggaagctgattttaaagtgcacttaaggaaatcgatgatcaaaagatcagtaataaatgtatgtctaaggctgggcacagtggctcacgtctgtaatcctagcactttgggaggctgaggtgggtgaattgcctgagctca

SEQ ID NO: 103867 - DNA, 562 bp, Homo sapiens
agaacatggtctacattctgccttccgaaatccatattaacatttggtggctgcttgttgaagctaggtgatagcattagagagtcctggtgtcatgaaagccagagcatcctagtgaactttcagggatggggtggaaggtggagaagaaatgggctatggagtagttcagaatgtctccaatggggctacttttgagagagaatgctctctttcaccatttgtcttccaggatatgaacagaatatagagttgctatcttccttagagtgtgaaagtctaggctgtctgcaagacagcatgttatggtttttattattttttattgattgattgattgtagagacggcatctcgctgtgttgcccaggctggtctcaaactcgtggccaacatagtgaaactccatctctactaaaaatacaaaaattagctgggtgcctataatcccagctaatcgggaggctgaggccggagaattgcttgaaccctgggggcggaggttgcagtgagctgagtgccactgcactccagcctgggcaacaaaacaaaactccatcaaa

SEQ ID NO: 103868 - DNA, 652 bp, Homo sapiens
acgaaagcacagaatatgaatgggagaagagtgaggaaagcttctaaaggtatatagaggccttaggtttagacgcaccagccagatatccaggtggatgaacttctgtggaagctgaaaatggtggcactatagtttgagagttggagctaatctttgtagaggtaatacttgaaaccatggcactgaataaaggttaaaataagagacagtgcagagagagaacggggtttgagtctttttgaagactatatgtgaagaggtggagaaagaaagtagtgagcagagataaagacatcagaccagtaggagcataatcagatcatgtgaagaggaaaggagtttcaaagtagaggaagtggattctgtagaaagatcaaggacaggacaggcgcagtggctcacacctgtaatcccagcactttgggaggccgaggcgggtggatcacctgacatcaggagttcaagaccaacctggccaacatagtgaaactccatctctactaaaaatacaaaaattagctgggtgcctataatcccagctaatcgggaggctgaggccggagaattgcttgaaccctgggggcggaggttgcagtgagctgagtgccactgcactccagcctgggcaacaaaacaaaactccatcaaa

SEQ ID NO: 103869 - DNA, 737 bp, Homo sapiens
catatcttgagtttattatgtatagagtaaggctattttctttttgaaggtaaaaatcacataatataaaattaataacaaccattttaaagcatacaatgcacttgcttttagtatattcacaatgttccagggcaatttcatcatgtcccttccaaaaacccattatgcataaagttgttacaccctattctgcttccctgagccctaacgaccactaatctaatttatatcccaattgatttgccaattcctgatgtttcatgtgaataaaatcaagtaatatttgtccttttgtgcacttaacataatgctttcaaatttcacccatattataacatatataagtacttcattctttgttatagctgaaaattgggtgtccatttatgagtcaacaagcgtatggattgtttccactttttgactgtatgaatattactgctgtaaatattcatgcacatgtttattttttgagcacctatgttttgtaagattaacagctgacttaagagaaacaatggaaggcaagaggcagtagaataatatattcaaaagatgcaaaggaaaaaaaactctcggccacgaattccttatccagcaattatttttcaaaaatgaagataacacaaagacttacccagataaacagaaatattaactgaagttgttgctggcagacctaccacattaaaaaaaacgctaaaataaattcctaaggctaaaagcaagtcaca

SEQ ID NO: 103870 - DNA, 477 bp, Homo sapiens
aaagagaatttattggctgatatacatgaaaattacagaagtttccttcagacaaatttgactgtaaatcctcattatgttatcaggactcagtctgtctcaccctctctccttcctctctcctggtgtctcccacagtctcctagctctgtccattcttggcttttttcttaggcaccatctctctttgtggtagcaaagatgaccccctcacagctgccagattacataatccttagccctctgatgatctgagagagggcttcatctgaaatagcaaaagtccaaaggctggcacatatccaccatgcccaagctcattaacatattctctatatctcattggcctcccgtgattctagaatttgatcacttcttctgcatgcttttcctattccaggtccttgctttgacattgatgtgctttttagcagaaactgtgtgtaaaactaagaattaagcttaacactaatctaa

SEQ ID NO: 103871 - DNA, 194 bp, Homo sapiens
tcaaaccagatttacaagccatgcaactaggacaacaccagaattaccccacagaactgcttcagtggaggtcttaactgctgcaggtgttaaacacaaggacacttggcagtgcatagtggacaccaccgctagaaaacgctgcctctgaaacctggcagccatgcttgtctacttcacatcacttgcttcct

SEQ ID NO: 103872 - DNA, 354 bp, Homo sapiens
accaaattcatttctggatcaggaatatcgaaagagatttaatattgtcgaagaagatactgtcttatattgctatgaatatgaaaaaggaagatcaagtagtcaaggaagacgagaaagcaccccaacttatggcaagctacgacctatatctatgccagtggaatataattgggtgggggactatgaagatccaaataagatgaagagagatagtagaagagaaaactctctacttcggtatatgagcaatgaaaagattgctcaagaagaatacatgtttcagagaaacagcaaaaaggacacagggaagaagtcaaaaaagaagggtgataagagtaatagcccaactca

SEQ ID NO: 103873 - DNA, 390 bp, Homo sapiens
cgctgaaaggtttacagaaagtgttcccaggacggtgctaaggcgctgaagcaagggcaggggctgagtgcaaagggaacttcaggccctctagctagacaagaggatggagctttgcatggagagaaagctagtgacaaggctgggggaaggggccctgcaggggcttcatcctggaggggtctgagccagacaggaatgtgggtagatgtacatttccggttctctgtgcggaagcagggtggtgggccaggaaggagggcagtgggcttgtgtggttggagggtggtactctttcttccggctcccctttccccccgagtgcctccttcccactgtggatggcacttaccatgtgcgcaatgggacaactctgcctgaccccagcac

SEQ ID NO: 103874 - DNA, 236 bp, Homo sapiens
ttccttcctctctcacgtcacactgataggagaacaataacgtaggaagataactggagtatattaacaacttttcatttatttctacaatatcaaacctactcttaaaactgaaattctacttctattagattgttagctagctggataaaaggccattttccctgattttcactctgtcacccaggctggagtgcagtggcgttatcatggctcacagaagcctcgacctccca

SEQ ID NO: 103875 - DNA, 503 bp, Homo sapiens
cacctgagcctcccagaggctagcatgatatagtttgaacttgtgtacagaatatgaccttaacctacttgaaaaactctgtgttgtgatggctgctgctttcctggcattatagaggggggttgactttatatatctacctaatggctgattgtatttatccatttgggcttccataacaaaataccatagactgggtggcttaaacaacagacatttttttcttacagttctggaggctgggaagtccaagatcaaagagcccagtgatttggttctgggtgaggaatctctttctggcttgcagatgccaccttcttgctatattctcatttggtggagagagagcactggtctctcttcctcttgtaaggggactaattccaacaccacagctcccccaccatgacctcattaaaacctaattatctcccaaggctccatttccaaatacagtcacattggggttagggcttcaacatatggattttagggggacatga

SEQ ID NO: 103876 - DNA, 254 bp, Homo sapiens
ctcggtacccatccttccctctctacgttcatgtgttctcattgttcaactcccacttaggagtgagaacacgtagtgtctggttttctttctagtgaagcagcaatttctcttctctacctagctgaacacagtgtggctgagcagctatctgaagtgaaatgaatgctgactcttgtatatctttattttttattttttgagacggagtttcgctcttgctgcccaggctggagtacaatagcgtaacacgg

SEQ ID NO: 103877 - DNA, 200 bp, Homo sapiens
taactgccccctctccccagcacacaaataattctttctagtgaagcagcaatttctcttctctacctagctgaacacagtgtggctgagcagctatctgaagtgaaatgaatgctgactcttgtatatctttattttttattttttgagacggagtttcgctcttgctgcccaggctggagtacaatagcgtaacacgg

SEQ ID NO: 103878 - DNA, 372 bp, Homo sapiens
gaccaatgtttagggaaagcagtgggtggtggcagctgatttcctgagaatgagcaatgaactcatagaccaggttccaagtggaaaagcctggggctttctctcttggctttcttggcagaatgggctgtgagtgtgtgtgtgtgtgagagagagagcttaacctggtctggctaatgataataacaacagcagacacatgcagagcagttactttgtgccaggcacttgtcttaactcatgtacaccccatggcaccgctcagtaggtgctgttatcatccccatctgctggatgtgtaaacagaggccggggatgggaggtaacttactcaggtcacactgttagcaagtgataggactcgttttttgt

SEQ ID NO: 103879 - DNA, 330 bp, Homo sapiens
aaactgacaaagaggctgtgtaaatctgatgctcacagacggaaacttgcacaagcttcagctctttttctagactggtgattcaaattattgtcattttttgacacagggtctcatttgtcacccaggctggagtgaaatggtgtgatcacggctcactgcagcctcaacctcctgggctcaaacaatcctcttagcctctggagtggctgggaccacagttgtatagactatgaccagctaatttttcaaattattaagtgagagacaattagccgggctcagtggctcacgcccattatcccagcactttgggaggccgaggcaggt

SEQ ID NO: 103880 - DNA, 424 bp, Homo sapiens
gctaacgtcattgaacactaaaaaattaaaatccagtactattaataatatcatgcacacagtagcaagacttcaggaattaatctatcaaatgagtgtgagagtctggtacactagaactcaaaaaggcacaaattgtttgtaccagaaacagaaatgaaagattctttaaaaagatttgtatttctacaagataatgtgaatttttataggctaaagtatagcacgaaataatttaaaaacaggcagagctacagagatctgataattttgtgatttccaaatttgtttaagctatgacactccttttttcccccgaagaaatttcatattgaagctcaatatataaaaaagattggcttggacagtggtccctgagtccctcttgaaaactggttgggtttagtattatttgaaagcccct

SEQ ID NO: 103881 - DNA, 883 bp, Homo sapiens
gagcttccatgtcctcaggacatatcaccttcccagcacattgctgcgcatcaccaactaggaatctcactcagacatcagtgtccaaagtttttgttggagtttcattaactattatgactgattgaattattggccacatgatgtgattgaacttaatctccaacctcctcctctcccaagagttcaaactgatatcacgtgtctcagagccctaattctctacatggttggtctttctggcatggccggtatcatcctgaaactatctcgggggcccaccatgagtcacctggttaaacagaaactcacgtgtgatcagcgagatctaccatgcaggacaaagacacttgcagaaactccaaagcttagaggctcccgggaactggtgacaaagaccaagtgaatccttcattatatgacagtggggaaactaaggagtagctagaaacttctatatgaagaggcatcgccatcatgcatactgaagtgatggatctgtggtcagttggcttctttcttgggtttccatatattctatatgtcaaatctgaatttaggtgaggagatacttctaaggcagagttttgctccctgtttaaccaggctggagtgcagtggcacaatttcagctcactgcagcctccgcctcccaggttcaagtgattttcctgcctcagtctccagagtagctaggattacaggcacccgccaccacgcccggctaatttttggtatagttagtagggacggggtttcaccatattgaccaggctggtcttgaactactgacctcgggcgatccacctgcctcagcctcccaaagtgccaggattacaggcgtgagccaccgcctggcatgtatgtatgtttgtttgtttgt

SEQ ID NO: 103882 - DNA, 651 bp, Homo sapiens
  misc_feature (501)..(501): n is a, c, g, or t
gagcttccatgtcctcaggacatatcaccttcccagcacattgctgcgcatcaccaactaggaatctcactcagacatcagtgtccaaagtttttgttggagtttcattaactattatgactgattgaattattggccacatgatgtgattgaacttaatctccaacctcctcctctcccaagagttcaaactgatatcacgtgtctcagagccctaattctctacatggttggtctttctggcatggccggtatcatcctgaaactatctcgggggcccaccatgagtcacctggttaaacagaaactcacgtgtgatcagcgagatctaccatgcaggacaaagacacttgcagaaactccagcctgggcaacaacagtgaaactctctctctcaaaaaaagaaagtcatccacttaaagcatagatatagtgtgtcagaatcaaaccatagatttaaccttaacaattgctgtatttaagaactatgttgaggctcantggtgtggtcccagcactcaagaggccccaagccaggggatcttttaaccccagaatatgagacaacctgctagcctgggcacattggcaaaatccatctccaccaaaaaacaaaaccgaccaaaaaccttgttgaggccaaaacagggc

SEQ ID NO: 103883 - DNA, 504 bp, Homo sapiens
aatcatgaaaggttattagatttttatcatatgctttttcatatgttgaattggtcttgcattcctgggataaatcacatgtagtcatggagtagaatccttttaatatgcctctgtatgctgatggttggaattttgtgtttgttttcagaagggatgttggtcttttcttgtgatatccttgccaggctttagtattaggatgtctcgaggagactattgtgattgatgtagggactgtactggcattcaaagtttcaggcttttatccaccacactctttattctatcttagatttgtctggtttcgtaggtctaattgttgggcgtcaagctattccttccacctgaaaccgttttcttactctcccagatgcatttgtcaaaagtctatcaagactcatatcgaaggccactagttctgggagaacagttctagctctttaactggaagcaatcacattagtcttgggctcccatagaacgttatacagagcttcctta

SEQ ID NO: 103884 - DNA, 732 bp, Homo sapiens
tctttatgtagtttggatattaacctgttattagatgtatgatttgcaaatattttctttcattgccttggttgtgttttcactctgttggttgtttgctttgatggatagatgtttttaagtttgatgtagtccagtttgtctgtttttgtttctgttgcctatgtttttgatgtcatatctcaaagtcattatttaagcatagattcccatatgtaaaattagtaagtctcaaagatatttgggggtggagatactagtaatagtagtaataagcccagatattttggagttgtttgataagtctggccagattgccttcagcacacagtcatcaattcaatctccagtctgaaatgtctggaattgcctatttcacatcaccagtgccagcactgggcactgacatttaagtttcttttctgctaaattgacaggttaaaagtaaagattggctgggcatggttgctcacgcctgtaatcccagcactttgggaggctgaggtgggcggatcacaaggtcaggagtttgagaccagcctggccaatatggcaaaaccccatctctactaaaaatacaaaaattagctcagtgtggtggtgggcgcctgtagtcccagctacttgggaggctgaggcaggagaatcacttgaacccgggaggcggaggttatagtgagctggattgcgccactgcacttcagcctgggccacagagcaagactctgattg

SEQ ID NO: 103885 - DNA, 1197 bp, Homo sapiens
  misc_feature (1029)..(1029): n is a, c, g, or t
caggaaggggagtaagaacctagggtacagtgtcccccatgggaaagcagtgcttaccctcttggatgtagcttgggaccacagtaacagaagtatttacagtttgatttttgtaacaggagaaatcatattttcctctaagttgagacacattcttccatcttcctaccttacaccctcccccattcctggcagctctgaaacacttgctcaagccttgcttaatatagcaaaagcagctaatctgttgatcatctgaggtcagaactaacattcagaaagttctcctaagggtttgggtcttcattccaagtcagtcatcctacccaggagaccacacctcacccaccttcatgcactccacactccaatcccacacaccttgctccccactccccccccacacaaaccctaaaccctaagcagaatgacattaagataataatttgtaattgcaatacacacagcaggcattcaaaaatggaagaagaaaggaaaagctgcagaaaaatctttaagtactccacaaactgcacaagccacagacgattgaataatcaagctgactttcctagggaaaatagcattgctattaaaacaagctgagtcatcaaatattaggcagttataaacaaacttctacatcatccagtctagtgggtctggcaaacataccctatggaccaagtccaacctggctggcctggtttttggtaaattaactgtcatcaggcataactcacacccatttgtttacctgctatctgtaaacagaagtttcagcgaatagttccctcttttaaaagcagagttgaatagttcctgcagagtagtctctgcaggaatgttttggccccacaaagccaaatacatttatgatgtggccctttacagagaaagtctgctgcacctatctaattcatcaaacccattcaaaggtaaggaaactaaggcccaaagtggtgaacctccaacaggaggcaaagtcagaataagaagctcaggtctctcagtaaacagccctttgtntcgttcggtgcccggctctacaaattatttattgcttgagtatgaagttaatctgaacttcagtttcttcatgtataaaatgagattacaatgctgatcctcttcccagcattaatgaccatttttggagaattcttagagttcggggaaagctcagttctttctgcc

SEQ ID NO: 103886 - DNA, 298 bp, Homo sapiens
tggggggggaaacactatgttgcagtttttgctgggaaatgagtgttaagcattttgtttggtactcggaaaatctgccttgacagtccttcataataaaaccaattatcaggggtgctattacatataaacttccggaccccaatttaaataaaagggggggatcattttttttgtaaaatagtctccataacacttaaaatcaaccatttgtgaaaacctacatgcttatcaaggggacaacatgggactgaaaatacttgttacctaaataaatacttctgaggctgggatgatt

SEQ ID NO: 103887 - DNA, 429 bp, Homo sapiens
aagttttgggggtggttatagtgaccaactcagtgggctcctttctgaggcaggctctgatttttactttcctggagggatttttttggtgccccacaccatgggacaggctgaactagaccatggtactttctgttctgtctccttagatgacttgcacacgtgctcttgaaaaattattcagaaaccaccaggagaaagcagatcctttgggtatttgggaaaactgcttggaattgtctctgaaatttcagcatgttcccttcgcctttcctccttccaccaccattggcaaaggctctctcatttcactaatgagaggagatgaatgctttggtgaaggccatagcaggcagagcaggcaaggaaggggcagagagccccttagaagtgacttcggcattgggtatagagcacaggatttcttcc

SEQ ID NO: 103888 - DNA, 412 bp, Homo sapiens
ttaagaataggttgaaaacacagggccttgttcattaggatagacaaaaactgacttaaaagtaatagcttatagtataatttgagagcaacgaattttttttttacttgtgcagttgatgagtaatttttcatcacttggatgaagaacaggtttacatttgtcatggtccaggttgcccttttggtaccctgcagaagaaacagagtgtgcacacacagaaagtaaccaccgaacattttgtgagagaaccctgagaatcttgtggtcagcctgaacctttcactttgtttagcctgcttggcccttgtgaactgacactgcctgcttctcccaggctcgtgtcttaatgctctcccctcactccacgctccagccagctgtcttccactctgttccttgcattccgccc

SEQ ID NO: 103889 - DNA, 632 bp, Homo sapiens
gccctaagcacctcgacttgccgccccgggccaggtcggcggggttcgtgcaggggctccgtggggccgcgtcgggcaggggccgcccgggcccgagcacggcacccacaaacaggctggcgtcccgcgacggagacccgggtccggcccggagccgcccgggaggcttgaggccaagggcctggcccagcgcgcggccggagcgggtcgggggcgcagagctgtgcggcggcgccttccgggccccgggcctgtgcagggccggcttccccttgcggggcgaggctgcgggccgggctgcggtgcggggttccaacaaaggaccgaggccccagaagcggcccccacgcgtcctttgtttctgcgtggaacaaactttacacacgtgtgtgttttccgagggtttcccgtgtgctgagcgcttgcaaagcggagtcgcgcccggggagacgcgaagccggtgcccgcggctcacccagggaccccagccagacagcggcacccgcggggcgcgtgcgggacccccaggcgaccgggggaagcaccggtaaccgccccccacccgtgctttttctctcacggagaatgttcccgcgcgttcgttgtgcaactaaaaattaatgtgaaacatc

SEQ ID NO: 103890 - DNA, 359 bp, Homo sapiens
atgcaataggaagggagagatgattatggaactgtagtcactggagaatagtgtgcagtagaggtggggatgggttactctgtgcagacagaatgggatttgaacaggcagaataggacagatgacagatgagaagaaattaggaaaggtacagaacttcctttttcctctatcactcattcattcaacaacttttacggaaagtctacagtaagctaggcactaggcttaggctgagcgggaactacaaagaaaaaaggacacaaatcatgtcctcaaggagattatagtctggcaatgaagaaaaacgtgttataaataaccgtaatacaatgcagatgtaatatgggtcaaaagag

SEQ ID NO: 103891 - DNA, 336 bp, Homo sapiens
gcttattgtagacccaggatactcctataattatgaaaaatgtttctttaatttgacttaatccagagttttctatggaatatctattaacatcttaagaactagtgttctgtaaatcaaggtttgtgacatgttgggttaaatattattgtttctgtgactaatttctttggacattcctaacatcatagctttgcattaagagaagaggagatatgtataaaccaatgcacaccttgaataatcaatttattcttcaaattttccaggaaattcaaccacaatcacgttatttcacagatcatgtcaagaatatagtcaactctcatttctcat

SEQ ID NO: 103892 - DNA, 207 bp, Homo sapiens
gggggtgctgggggctcaggaaggggatgggagtttgtgtttcatggggacagagtgtcagttctgtaagaggaaaaggttctggagatggatggttgggacagctgtacagcagtgtgaacatatgtaataaaacagaactggacactgacagttaaaatcatatatattgatgtataattttgatgctacatgttttacataatt

SEQ ID NO: 103893 - DNA, 506 bp, Homo sapiens
ttttgactcccatgtgtatgctccacctgcatggctccagccctgcccactccgctgaacttcagcccattgaacatccctcaaacggctccaataccccagaaatctgcagtggaagtcatcggcccctcgcctccaagtccttttacttcctatttcccatctcaggcagtggccaaggacagatgcctactcattcattctccctcctcttttctgcactccccagctcacactggctctgtgttttgtctctttacccggttcttattcctccttaaagatttggctccaaggtggttttgcagaaccccaggtggaagagagctcacctagtggcctgcacagaactctaccttactacctcttacgagatgacattgaagcacctgtctatgactgtccttcaaactacaccccccaaccccagggcccaccggactctaagtgcttcaacgacacgggctttttgttgggtttttgtacccactaagcctagcacactg

SEQ ID NO: 103894 - DNA, 710 bp, Homo sapiens
aatcattggcctaaatatagtataactatagggaaaaaaagcccctttatctttgctattatttacttatttatttatttattgtagaatatttggagttttttttatcttattggatgtggctctcatccttgctaacctaattttcactgatagcaaagtttatattcctttggattatcattctattttttctagctattgccttattttttctcatgaatggtcttcttcgagtatttgtagaagggtaagtttgattattttcataatgcataaagctattttgtacttttataagaagcactttgtgagactgaggcaggaggatcaggaggtcaggagttcaagaccactgcacccagcctaaatcattgtcttataaagatacatgcatgcatgcatagacatggaatcaatctaaatgccatcaatgatagattggataatgaaaatgtggtacatagagagaatgggacatctggcttccgagcagaaacctttgtagtgccagcgatgaaagagataattaaatacgggtgatgttgagaaaggcaagaagatttttgttcagaagtgtgcccagtgccacaccgtggaaagggaggcaagcacaagactgggcctaatctccatggtctcttcaggcaggagacaggtcaggccattggattctcttacacagatgccaataagaacaaaggcatcac

SEQ ID NO: 103895 - DNA, 489 bp, Homo sapiens
ccagccatcatccaatatatattttaggcagctaactctgatagcattggttaaggtgacctaaagtgacaagtgtactgatgcagaagtaccagttagaaagcagtgggcatagtacaggtgaggatatctgagggttgcattgtaagtattgattgtctgagggcttgatgttttctaagtgtggagcctgtttgtgaatgttttaggggaacgagcttcctgaaagcacagccatcttacttttcttgtctaaaaaaaaaatgctaagtccttttttactcttactggatccagttttgaactaaatttataaattagcaatcactgcttcttagaacagcagtgactggcattgagatcacttgtcaatgcctgctggccccacagcctgacagctattgtctacggaatagtcctgggttctagtcttggctgaggctgtgatttattatctgatcttgagccggcccctttcccatcctaggc

SEQ ID NO: 103896 - DNA, 787 bp, Homo sapiens
tgtgatgtatgtggcaaagactttaatcagaagcgataccttgcacaccatcgtagatgtcacactggtgagaaaccttacatgtgtaataaatgtggcaaggtttttaataaaaaagcataccttgcacgtcattatagacgtcatactggagaaaaaccttacaagtgtaatgagtgtggcaagacgttcagtgacaagtcagccctcttagttcacaagacaattcatactggagagaaaccttacaagtgtaatgaatgtggcaaggtttttaatcaacaatcaaaccttgcacgtcatcatagagttcatactggagagaaaccttaccaatgtaaagaatgtgacaaagttttcagtcgcaaatcataccttgaaagacataggagaattcacactggtgagaaaccatacaaatgtaaggtttgtgacaaggctttcagacatgattcacacctggcacagcatattgtaattcacactagagagaaaccttacaagtgtaatgagtgtggcaaaacgtttggtgaaaattcagccctcttagttcacaagacaattcatactggagagaaaccttacaagtgtaatgaatgtggcaaggttttcaatcaacaatcaaaccttgcacgtcatcatagacttcatactggagagaaaccttacaaatgtaaagaatgtgacaaagttttcagtcgcaaatcacaccttgaaagacataggagaattcacactggtgagaaaccatacaaatgtaaggtttgtgacaaggctttcagacgtg

SEQ ID NO: 103897 - DNA, 379 bp, Homo sapiens
agcgccactcttggaaagaagagttgcctgcatagcgctttgggaggcttaggtgggaggataacttaggagtttgagaccagtctggggaacatagtgagactctacctctatttttaatgtttaaaaatttaaaaaagtaactccagatcacggctcaaccattttactgcagtaacttgctagccccaacccagtttgttatattaaaacatcctggctttctccctcattcactgactcacccctttctttacattgtaatgagtcctccagcagaggtctgtctttcataccaaagaagggaataccaaaggtacactaaaggcttttacccattgattctaagccaggcaccatactatgtagtttacatgta

SEQ ID NO: 103898 - DNA, 300 bp, Homo sapiens
gtaggtgatggaggtggaggtggggctggcattgtgggtggcatgagggactcctgtagtcctggctggccaggaggcacaagactggagccagcccacttaagtataggcctaacctttcataaacggtatctcaaaggatgagtccttaatcactttggattcagttttctcccctgttactgagaataatgatcaattctaccctactacgtaggactgtcctagcaattgaataggagaatgtgtgttttcaggattcccttgtggagaaaccccagccctctctataattctgcc

SEQ ID NO: 103899 - DNA, 162 bp, Homo sapiens
tgttgaaagaactatcaggggaaaggaagaagagaagacagaccagcatggatgcaaaatcagggacttcaagggatttccagatccatctgagatgagagtttcataataatcctgccacacttcctagcaaagctccctttctgccactctcagaagcag

SEQ ID NO: 103900 - DNA, 218 bp, Homo sapiens
tatgtaaaggacttaacccaattaaaattgaacacaggatttgaatagttactttggcaaagaagatatgcggatcacaaacttgcgagaagatgattagtcattaggggaatgcaacttaaaaccataaggagataccactacatatgcactagaatggctaaaagtgttgactgggggccaggcgcggtggcttattcctgtaattccagcacttc

SEQ ID NO: 103901 - DNA, 488 bp, Homo sapiens
taacggtgataggaggattgacaggagggagggagtattggctgagcgcaagagagtgttgactgtgcgagaagaggcctggctggccccagggatgaggcttcacaaacaagcgcatcattaggagagtcgcagctgcagaggctgcagaggtcccagcagatccccgtgcccgtctccctgctgctccctgtacgtgggtgcggcacccaccacgagcaatgagccagtgtctacacagcgcagctactgaagtccacgcttgattccggcttccttggttcccctcatgccttttcctgcccagccctctgggttgggacagtttcccgtttttgacgccctgggcagtcctgagtggggcgcccctcgagtggtctgcctggggtgggggttgtaagaggccgggtgcctgctcagacctttccggcaccgcgaggaggccctggcgttttgttccaagtgcttggttatctgggccctcccac

SEQ ID NO: 103902 - DNA, 152 bp, Homo sapiens
ggccaacctgcctggaacccctggagcagagcgcagaagaccagacactgcgccaaaaacgcgcccgcatcttatctttaagctggctccatcttctcaactgcaccagcagctagtgccccagccacctatccacctaagacgagcccaag

SEQ ID NO: 103903 - DNA, 348 bp, Homo sapiens
atttgcttagttttttttttttttttttggacagagtctcgcactgtcacccagctggagtgcaatggcacgacctccgcctcccaggttcatgcgattctcctgcctcagcctcccgagtagctggggttacaggattacaggtgcacatcaccatacctggctaatttattgtatttttagtagatatgaggtttcactatgttggccagactggtctcgaactcctgaactcgtgatccgcccacctcggcaacccaaagtgcatttgcttaattttttaacagctccacagtgaagttacctcaaatcagtaaaagccctatcaattctaatccatttattttc

SEQ ID NO: 103904 - DNA, 381 bp, Homo sapiens
tggaccaggggcaattctctttgtataatgtggattattgtttatgttcctatcttgtttccctgttagactgtgagctggagagtttgcacttttatgtgtcgttctaacactctcagtccttacagttcactgaacccagcagccagtcaaaaatctttgccactgttgaattgtaatgctgtacgttcaggggaatacattgctatttattaaatgaaggagaactttcaaatttaagaagagattgttttgcatgctgaagacagtaggtattataaaatacttaaatgggagcctttcccaccccagaacaacctacttagcattagataaatttactatttaaagtagccaaagaccacttctagaaatagaacc

SEQ ID NO: 103905 - DNA, 276 bp, Homo sapiens
gaacccttgacctcaggtgatccacccaccttggcctcccaaagtgctgggattacaggcatgagccacctcacctggtctaaaactaaaattttttcaataacaaatagattgatgggttgagtcacgtatctatttaccatagatttccctaggtttgggggactgaaatatgaattagaagttgtccttaccctcagtgagcttagttagtctattaaaggagattgataggaggacagattttttagcaatttagtatgataatattttatc

SEQ ID NO: 103906 - DNA, 476 bp, Homo sapiens
ctgcttctttcccccagccctaacctattccatgtctctgtggatttgtctgtcctgaagttgcagttgtactttgtgtgaatggaatcacgcgatatgtggtcctttgtggctggcttctttcactcggcctaatgttttcaagattcatctatgttgtagcatgcatcgatacttcattcctttttgttttcaaataatattccattatataaatggaacgcatttgatttgtgggttcagctgttgacgggtacttgggttgcctctgcttcttggctatgatgcataacactgctatgaccattcctgccatggttttgtgtgtaagagggggtctatatgatggaaattcagtccatggccaccctgaccaaatccctggttatccaggaggatggagccctcactccgaagtcaggaaggtctccgagtttagttccggggcctggatggcttcattgtcattttcacca

SEQ ID NO: 103907 - DNA, 305 bp, Homo sapiens
atattggctttgggaccagaaaaggccatgctcattcccacgtaacagctcttttaaaatgaaggcagctcttttgtccatctgaattgcttctcttccaggccacgcttctcttgtccctcagctgttctttattagagaggctttgaggacttttattactctgagagcctcatcagaatgtttctctctgctgctatttctcattggagtctatgacaaaccactcgactgcctcatgactacattgacaccatagcaatccatcatacatctcaaacaataatcacaggtaacagaggtcc

SEQ ID NO: 103908 - DNA, 411 bp, Homo sapiens
tcctatctctggtatcctcactttgcaacctttctgctgtagagtagtatacaaggccaggtttttcatctaggctcttcctacagattgcttacatttggagaatgacttctttccctattggctaggtgagttggcaagttgatttaaggacttgcgcctgtaagatgagtaaaataacagcaacttctcacagatatttttgaagattaagtgaactagtatataggaaactcttagtaagaattaaatgttagccatctaatctctaaattcaggttttatcatatcttacacttgctgaaaaacataccgacgactattgtgtattgtatcatcaattaagtatttttctgcctgatgttctaagcttgcttcctaactctaaccccatgttaacttctaatcttt

SEQ ID NO: 103909 - DNA, 386 bp, Homo sapiens
tgctggtgctttgcacggtgttggtgccgaaggcagaggctgcggaggagggcaggtgctggaggactggccatcccattgcttgaggagtgctgtgggcgccacattttgaggatctctagatagatcccaaagcctgtcctttccttaaggagtccttccttgttcaactggtgacatctgcagagactatctccaaagcgtctcatccacgggaactttgccattggccctggcattggtggctgcttagaatagcagaccctgtcctgttcccgccagggcagtggtgggcggggccgcctgaacacacctggaggcggaatgcatggggcactgctggtgcactgcgtgttagtccattcttgtgtttctgtaaaggaata

SEQ ID NO: 103910 - DNA, 218 bp, Homo sapiens
aagaggtgggagaaattgtgagaaggtgaaaggagttctgaggaggcgggaggagttctgaggaggtgggaggagctctgaagaggaatcctgaggagccaggaggaattctgaggaagtgaaaggattctgaggatggaggaggagttctgaggaaggaggaggagttctgaggagggaggaggaattctgaggaggtgggaagagttctgaggagg

SEQ ID NO: 103911 - DNA, 418 bp, Homo sapiens
cctttaacaagatagctgtggggatgtatacagtgacatttgaaatgctttgggggtacttttaataaaagcacaagtggactttgatgtatgtagtccatgtgcttctgaaaagttgaggtgacacaaaaccacattgtgaacaaaacagtagagccacccattgaaagaaactcaaatgttgatccctttggaaacatgaataaccgtctttttgtgttgcaaattccgttctcataatgtatgttatttatgtaaagtaggatagatttatgctaaaaaaaaatcaaggattttttttgggtgtacgatttaaaatctgacttgagagaatttaccaaacagaactggaaagccatttcttattcagaagatatttaagtttgaaatagtaggagtacacccttctcctaaaaaa

SEQ ID NO: 103912 - DNA, 104 bp, Homo sapiens
ttggctggaaacttgattttggacctttgtgttgaggaatgggggcttgcctgggatctggtggcctcgttatggggcatctgagctggtttgcttgttcccag

SEQ ID NO: 103913 - DNA, 2109 bp, Homo sapiens
tggaatcaccaagaatttgagcaggaggcatcataaaatgaagctgttcttcaggaagattagaatggtcatggtatgtgggatagacaggcccagtctttctgggacttactacctaacgagggactgaacttactggaccctttgcctacatatgagaaactggaatagctccatggggaaggggcaaagtacacatacttacagtgtcagggttgaaaggctttcttagtgcacacctgggctcccccaccccgctccatcttataaatgaagaagctgaggcccagagaggtcacttgcccaaagtcacacagtagttgagccaggttcacagcaaggccccttcatttccaatccataactctccttattcctgcaagtagctgcctttcaggctctgtagaaactatgccctttccacaggaaatacaggactttcctgctcaatccagtcacatacacacctacactcccatccccagtgcatcagcagcagaggaaacacatctctctagggctactggattagttcacactcgaagccactggtatctggcatggctagaagggaaagctgctagatgaaatctatttatcagagaaaggaaggctagaacatttttcaacagctcaggtcctgttctctacaagcgatactggcacataagccagggaggggagacgaggttggggcagtaaaagctcggaactgggttgttagaaaactggaatcttctgattcttgttctgttaacttcctaggtgtccttgggcaaatgagttttcctctctggatctcattttcttcatatataaaatgagatggttaaatttgatcagttcctcaaactttgtaccataaagaatatctctttattatatttcctcccaaactctgctatcaaactgtagtttaagtgatcatctgttgtggtccttttgtaggtatagatatgattttgttatttttgaaatgctggaaaacactggaattcctaggtccctccctttagtgacaaacaattggtgactctagagctctagggcctcctccaggactgaaaggatgattcatgggaccctcaagcccctaagataccattggtcaaaagggactttatagagtctctaggccagccctctgatttgacaaattgagattgaggctggagagcaaaggaaagtgcaggctcccggatcacatcctggagtcagggctgcactgcaagagcactcaggtctcttctccttgctgggtgcattcaccattgtaccctgctgtcctcaccgactttggtccttcaatttgctttaactgtcaagaacgaaccctcagacctttcctgccttctctgattctccacacctgctcatctgacctttacgtcctgcctgcccatctgggcctggctggacttctgctctgcctctggacacctgcctgtgctcctaaggctctccagcatccctagggagttaatgccagctctgccaaacgacctctgtcctgctgcagcccacgctctggcatggcaccaagacatgtggggccctacctttccagcatgtgggggagttacacagacaccacacagatgccaggacagcctgtggcagactcccagagccctgggacagccaacacaataatggcagccagttcccaggctctcgttgggtctcagggagctcaccccaccctcctctccagcagtccctgtctgctcaaggtagtgagcttggcatctaacccatagctccctggaaacttagattaaatcacagccacacagtcaccaattaaacaaatgtaacatctgataagggctgttacctctacacatagacaaaagaatgaatttgggagctgggggtgctgttggcaattaataggaagatatgtccattatagccactcatccaatgaatcaagaaagatttcttggaaaaaaatgggattccagatccatttgagtaatgtgtccctatgcctatcactcctggaaattaaatgatttaatttaactctggtgcacttatctccaaaaacccagaaagactcacggaatttcagatagactggcagcaataaacggtggtgccatt

SEQ ID NO: 103914 - DNA, 252 bp, Homo sapiens
tgcaaatatcaaacctgcattcataagttaaagtgttgtgatatttaatacatcagttgatgtttttaataaataaggctctctgcagcttttctgttatgaatcacagtcttcaacattcatccgaacgatggatattcggcatgccttaagttcaagttttttgttctcttatagccaagtggctacaaaataatagtatcaatctacttcaaaggcagtctgatagagtgtaaaagggcttcacttggg

SEQ ID NO: 103915 - DNA, 244 bp, Homo sapiens
agatgcagtttctgtgaaatcaaatctatcgtttatttttaaaagtgtgaagggagttgagggtaaaagggcaaaacccagcagtcctgggaacagacacacttctcatgggttcttccaagttggattcctaaacagcataatctttggtatacactttgactaagaaaaatattctagtacaacaacgctggtaactcaactgtaggattcatcagtgatttggtgggcagcaaaatcccct

SEQ ID NO: 103916 - DNA, 196 bp, Homo sapiens
gctatcctcagaccatcatcacctttctcttgggcagttggacagcacctcggtggtttcctgacttcatcctcacctggccctgatactcctccccttagcagccagatgaatctttccagaaggctatcctcagaccatcatcacctttctcttgggcagttggacagcacctcggtggtttcctgacttcatc

SEQ ID NO: 103917 - DNA, 710 bp, Homo sapiens
agtgtttcacattggagacatctgctaatataaatgggaggttttactgtcaagtccaattagcaaaacgtggtaataatttttttgtcagtattttcagattacatgataaaattttacatttgagcttctagcattgattaatataggatattgaccacgtttatgtttaaatttcattttgttcagcagacaaaatgtacttcccttaactttcattaatagtgtttacatcttttgtcagcacagcaaacttttagaaagtaatagttttacttatttttatcttctgttttctctttgtactgctttgtcttgcattgtgttccaacacatgagacttactgctcactgaattttggagtcttttagaggtaaattgtggactcaggattttttgaaacttggtgtgtaactctaaatcttgtatatgcatctttgttgcttattacatatttacacacacaaccacaaattttaaacttatgatgaaaatttacaataacctgaaagatccagagatgtatgagagcattttgtaacttgttattcagttactaaatttgaggtgaataattaaaaagaaaaggacattaggagagtgaaaatcttctcttcaaataatctttgatagataaaaatggaaggtaagatgtttctagatagaatgttttcatacaatttcagcttcatatcataaatttttctgg

SEQ ID NO: 103918 - DNA, 283 bp, Homo sapiens
tgtttgttttggagagacagggtttcaccgtaggatggccacactggcctcagactcctgacctcaagtgatccacctgccttggtctcccaaagtactgggattataggcatgggccactgcgcctggcctcaagtaatcttttgttaagaaaagatgtaatacattctgctgtcagaattgtagcttttctttaataaattcagtactagaaaaaataagtagttcttaaaattattatacaatggagtcactgctgtgagatttatttaaataatattag

SEQ ID NO: 103919 - DNA, 739 bp, Homo sapiens
gtcactgtgcccagccacacgtaaaattttaaaacacgtgcatggctgtggacactcctgccagagctgtggtctagctcctgggaagtaacatccaaccttccacccctcaccccttccattggtgtccttaaagtcctgcacagtttgtagccagggtactggcattgattgcttaccttggactcatcctaggttgtcttttctgacttgttcctatcttggctggatttaggataagaggaggggagaagaagtgttgggaggcagcaggatagggcctgggcattgcttaaactgggagtaagggacattcctttcttctacttgtacattttgtgtaattggaagatttggagatcttttgtctccaaatgaatcactcccacatctggtgggcccatgagaaaaagaaatgttggatctagcttcattcccattgtggggaaggaagtggaatcacagaaaggcaggaggattatacatgctcctgcttgtggaccaaccatatgaatagagaaggtgaggaatcctttggtgttcacaatgggcaggagtcaaggaggcagaggatatacataataggatatatagaaagagaatctcatactgtgcctccccagtggtcggccaaccacttacctttagttctctctggccaagtgtcttgtccactgtggacctatcattcttgtgatagtccgacccctggccttcaccccactcagaggtcctgggc

SEQ ID NO: 103920 - DNA, 282 bp, Homo sapiens
agaaacagcagtttccaaaaactcgatttttagaaggaccaaggcagaatgcattttgtgaaaatcaccttctcaatttacattgttgaggtctcattatagaaggaaaagagcaccagggagctggcttttcagaaaaataaaatggaatcttcagaggaaaggatagggccaggcacggtggctgaggcctgtaatctcagcactttgggaggccaaggcaggcggatcacttaaggtcaggagttcaagtccagcctggccaacatggtgaaaccttgt

SEQ ID NO: 103921 - DNA, 459 bp, Homo sapiens
gaaaatgagctcatctccttggtagttatgaatatcaaatgctgcaacttataacagtggctgtaagactttagtcagcataaaaatcatctggaaagcttgtgaaaaaatgcaggattctaggtcccacccccagggagtctgatctaatagctctagagcagggcccaggaatctgcattttgaaaaaaacatctgaggtgaatctcataccgttggatcatgctttgagaaacacagatacagaaactgcaaagataagttactacttttaagtgcagtggacgtaatagttcaatagcctatttgtggtactaactagatgctggctgcatgaataaatgccagtggcttcctggaggtgattcatccaagatcagcttcagaacagatgaatcatatacagcccggcattgccattacgtgacttccctctccaatgccagctccgtaacctct

SEQ ID NO: 103922 - DNA, 252 bp, Homo sapiens
aaatgaactcccatgacttccatctttctgtatttcagaactccgcctggctaagcatgaggaggcagccaaaagggcagaaaacactgcgtgtaaactgctgtgtgtaattagctcctaagtaatcagggtgtacttccagaggaagtggcccactggaaggtgtttggcagtgtacaaagggcctgggttctagctctcactgggtgtgagctatgtgaccacctgcagcacaccttaagtccctaagct

SEQ ID NO: 103923 - DNA, 316 bp, Homo sapiens
gtagttttaatggttttaatttggtcaaaattattgaacagttttaatacgaaattatgttctcgtaggaaattggtaaaaccagaattaaaatagtgttttatagtagaaaaggtattggctggaagccgagagacctgatgtgatcctggctctcccaatacctttctgacgtcactgtgggccttttagtttcttcatctataaaataagattctttttaaatccaagattctacatcttggcaattatattcaccctctgcataatgatgtttcagtcaatgatcgagtgcatatgactatggtccaataat

SEQ ID NO: 103924 - DNA, 282 bp, Homo sapiens
gtgccctgacagccctgagtctgtttccaggcggtgagcaaggtgggattgagaacttgccccaggatacccgtctcccagctgcaaaataaaagggcttggtttttcccctgcctgtggagtctgcacaccagatttgtgccttcccccaagttctggccagagggcttcttgccctgttcaagagcattttctctttgtcacagtttgctctgtccaagtgtggacagatcaagatttgtagccctgtgaccaaggcagaaagggcctggtaacactggt

SEQ ID NO: 103925 - DNA, 260 bp, Homo sapiens
ggaggaggagagagaccgggagggcgcccgggaggcagggcgcgcgcacactccgagggacgcagcgagcgcagagccgccgccgggcgcccccctgccgccccatgctgtgctccatggcgaactcgggctgcctcctgctgtccaactccggcagcatgctcccgcactccgtgccctgcccgcccgccttcctctacctccaacagagcgatcaggacgccacggctccgcctgaagcgatggcccagccctacccc

SEQ ID NO: 103926 - DNA, 159 bp, Homo sapiens
gtagtacttgaaacttcaaaaataacattatacgataaaacacatgttatttctttgttatcttaaaatagcaacaaattctatatacgtagaaagacctatgtagaaaaaaaatgaacattctagcctggacaacatagcaagaccccatcttaaaaa

SEQ ID NO: 103927 - DNA, 462 bp, Homo sapiens
ccatgttggccaggctggtcttgaactcctgacctcaagtgatccggctgccttggcctcccaaaatgctgggattacagatgtgagccaccatgtctggccctcatgttgagcttcgaccataacttgggtgtgccctgggaatggcaaagacataggaagtgggtgctggtcgctgctttgaaagggtctaaagccgagttcctcctcaccttcgaggacttgttggattctatggtgcttgctcctaagctccgagcaggctgcagcacaggggacctgcacgtagaatgtttttgtttgtaggttagatactcctactaccttctttctatacttattttattacttgctgagtttaacttcacaaatagttcccttgtgcctgcttatctgatttcttgcagagatcagaggcagcaagtatgggcataaactcagcgagttctaacctcctagctc

SEQ ID NO: 103928 - DNA, 429 bp, Homo sapiens
  misc_feature (312)..(312): n is a, c, g, or t
  misc_feature (325)..(325): n is a, c, g, or t
tggctctggaacttctctacactgtctacaagttaaaaataagctgatgttccaggagagtacggttggatcctgagagtaagacctggtagaataaacagtatcgtcagtgttctcagattccttgaaagcaggaactaggtgatattcttttttttttttctgagacagtttcactttgttgcccaggctgaagtgcagtggcatgatcttagctcactgcctgccgggttcaagcaattcttgtgcctcagctacccgggaggctgaggcgggagaatcgtctgaacccggaaggcggaggttgcagtnagccgagattgtntcactgcactccagcctgagtgacagcatgacactctgtctcaaaaaaccaacaacaacagcaccaaaaaattgggtttggctttgtatttctgtcactttact

SEQ ID NO: 103929 - DNA, 544 bp, Homo sapiens
agatgtctcattttccctactgaaggcatttgctgtggctttcatggcaaaatgcttgcacctagaagactctagagataattgtgggccagtattaaatcttaagactttggttttacaacataaatatctactttggagaaggagataatataattgaaaggagctagaggaatgtataatgtttacccattaacactatccctttatttaacagccccatgggggaaattccctttataccccaggagcccatgtcttaccaggtaagaagcccagattgaactggagggacattcttccagtcctcttagtaacataaactcctgggatgtggtccaagtttgacctgtcattaaaaattccatactccagtgggttagaagctagattccaatgaaggcggttggttttgtttttctatttacaaccattcttagtcacattcttctctgggcttttgttgtatactttaaaaaaactgtttgatgtgcaatttgttacctgtaactttctaaatgaataaaagaagattgaaaaaata

SEQ ID NO: 103930 - DNA, 303 bp, Homo sapiens
agaaccgcctggaaagggggatcagttggcaggtgggtgagtggatgaatgaggagtccacacgactttttccatggtttttgcatgtgtccagaggttgccctagaaacctcatacttgagagtgttgaggcctggaaggataaacaggagtctaccaagtagatgagaggaggggagaagaaggatcttctcagcaaaggacagaaagagcaaaagcacagaaaaatgcaagtgtgttatttgttcaagaaaaggcaagcagttcagtgtagctggggcctagggtacaagctgagagggc

SEQ ID NO: 103931 - DNA, 322 bp, Homo sapiens
ggtataattaatgctatcttttcataaggacactgagattcagagaggttgagcaaatttcttaaagtcttttagcaagtgagaggcaggatagatatttggaccccactctccctggttcttatacctactctcttaatcagtttgctgtcttcatcctcctggttgctaaagccaagctgtagcccttgtcatgggtacattgtctgcatttaggaggactaggctccctcaggacttgggtagctttcttggtctatcatagtccacatagccagtttcattagctaaagagggcatttgctctgtaataaatgtgccc

SEQ ID NO: 103932 - DNA, 660 bp, Homo sapiens
tttactggctactgttctttcagagaaagaaagtttgagaaggaaaatatttcagttctctcaagttatcttagtgatcacttaaatttgaataagacaatgaaaatcattgaccagcaacaaataagtatcaataaacatttaggaatcaaaaaaagggcttgccagtcaggatttgcaccattagataaagagccacaacttaaaaatccatgtataatatattgattgattaaattctcttaggcccatatagaacacactaaaattttggaagaaagaaacaaataaataaaataaatgcctttgctgtcttaatacatttaacaaatatgtgtggaatagctattaagtgctggcaatatggcaggcactggagataacaatgatgaacagaaattgacttgtcctcatggagagtacatcctagcagaagaatcaggtattattcaaatgataactcaagcaaatgtgaaatttcaaatgggatacatgttgtaaggaaggcagctagtaggaatatttgacctagagaagggcaaggaaagctctccctgaggaggtcaacaatgagctgaaatctaacatgaatggaagtgaactaagcaaagagcaggaagaaaaagctaacagcttgtacacagcttgcttggtaagaac

SEQ ID NO: 103933 - DNA, 413 bp, Homo sapiens
cctccttagcctcccaaagtgctgggattacaggtgtgagccacctcgcctggccggaatggggaaatttgaccccccagaaagaaaagagaacagagtaagtaggagggtcccagactgcagtgcagctctcagatgattttggccaaactgacccaagtccccattagaatctggcaggaagtgaccttattatcccatagtcgctgtctgggcgtagccctcaggaagcacggtcttattgtaaatgtggtggtggtagattcagaggacagcagttgaggttctcagtcaattacacctgcagcaggagatccgagtggggtctttccacagttgtcatcatcccactggtttcaaaacagctccattcattcactgaggggctgaccacccgggatgtttctgtggca

SEQ ID NO: 103934 - DNA, 606 bp, Homo sapiens
taattttttttagtacagacagggttttgccacattggccaggctggtctcaaactcctgacctcagacgatacacttgcctcggcctcccaaaatgctaggattacaggcacgagccaccttgacccagcctaatatagtaatttttattatgcataaaaagttataaagtaaatatgcctcatgggacatcgttgtttcatttttatatgaaataaaataactttctatttttacatggaaatcagaattcatatgtctcacgtgtttttggtgttgttatccacaggagaccaatcattttgcaatggcaatccctaatgatctattccctaatcaactggaaatacttccaaatcagttaataaacttctttcaatgtttaaagtttgaaatatccaagttggggttaaagggaaagctcatgtttagttgtcagtgtatctcagcagcacatcatgggaatatttatttgtattgttgggaacatgttttctttcctgttatgtgctggaggagttggctcatgggttgcaggaccaaaacctgaaaatatctctgactgtgtgtcaccagaccacacaatgaatacatcacttaggttag

SEQ ID NO: 103935 - DNA, 89 bp, Homo sapiens
cagaaagccaaaaagactagatgaggaaataccatcattgtgtggaatattctggattgggagtggagtgctcagctaccctgcaccag

SEQ ID NO: 103936 - DNA, 345 bp, Homo sapiens
aaggtagaggagagagataataactttgtgtaactttgtcagtcagtctgaataatgccagcatttcatgtcctcatacagtgatgatggcgacatacagggtagtaactccctcttctatttttttaaagaaggaatgcctttggggtattaatggagaatatgccttgataagtacagtaagatgtgttattaggtattaggatataccagccttccagtgagaagacttagtaataaatgagtagcattttaatgataacatttaatgtttctacttaaataatatatgcagacaatgtaacgagtcaaacagaaaagatcacgaagaaaagcaagagccat

SEQ ID NO: 103937 - DNA, 318 bp, Homo sapiens
aagaaacaccagcactgttattagtgtgtggaggtagcagagaacagaatggactgctcggagaaggaaagagaagccacaatgaggggaaaccatagactggtcttctttgtaattttcattgagaagcactttttgcaccacagttagtctgtattcagagtacttagcttactaaggcaagctggcaggtaccagttttgagaatgagttcacacaaatgttattacgttaaatgggacaaaggagaacttaaaagtaatacctagccaggcacagtggctcacacctgtaatctcagtgctttgagaggctaag

SEQ ID NO: 103938 - DNA, 298 bp, Homo sapiens
agcattacatcttacagctggagaataatctcctttgactccatgtcctgcatcatgggcacacgggtgcagggttgggcctccaaggcctcaagtggttccaccccgtggctttactatgctcagtccatatgtcagcccttgtaggttacagttgggtgcctgtggctttcgcaggttggacctgcatgctggtggtatagttctgggatctcagcagcattcctgctcccacagctccattaggcattactttagtggggactctgctgcggccttgcttctggctgcactaggc

SEQ ID NO: 103939 - DNA, 974 bp, Homo sapiens
tttttttttttttttttggcttatagtccattttgaaaatgtggtagacattttaaaacatagtgcacatcagcatgtaacctcaaaatctggcatgcaaattcagaggttcacaaaatctctgcagcccacccactgtagccttcccagagttaagagcacctggcctgtgctacatggattggtgaaatattagaaaagatgagagaaaatcagtatgagcataaattttatcttctttttggtgagtactttgaaagaaaattaggacctaatcccctagtttaagtgaaagaggtaatttggttgctacatgatagagattcattgaaggagaaagaagtagacagtagacaaagttgttgttcaaagtataatcaagagtcaggcatccaattgaggtctgaacaatagcttttattcatgttctctcaccagtctgtgttacatgaagctttaatgatatttgatgattgaattcattttttaaaatagctgcattgcagaaaagtggtttgctattaaaatattacgtaccttaggagactgaggtggaaggattacttgagcccaggagtttaagacaagcctgggcaacatagcaagaccctgtctctaaaaataataataataataactgagcatggtggcttccgcctgtggtccctgctacgtgggaggctgaggcagaaggatcacttgatgccatgaggtggaggctgccgtgaggcgtggtggtgccatggccctccagcctgggtaacaaagcaaaacctgcctcttaaaaaagaaaaaattacgtacttgagtttggatcatacagattaatgaaagaactacaaaagatttttactgcttaattctgtatttggggtctcttcatttttaaaaataataaagcaatttgctttatcttacattggggttttatattcccaattatttcaccttaattttacaatttttactatatg

SEQ ID NO: 103940 - DNA, 475 bp, Homo sapiens
tttttttttttttttttggcttatagtccattttgaaaatgtggtagacattttaaaacatagtgcacatcagcatgtaacctcaaaatctggcatgcaaattcagaggttcacaaaatctctgcagcccacccactgtagccttcccagagttaagagcacctggcctgtgctacatggattggtgaaatattagaaaagatgagagaaaatcagtatgagcataaattttatcttctttttggtgagtactttgaaagaaaattaggacctaatcccctagtttaagtgaaagaggtaatttggttgctacatgatagagattcattgaaggagaaagaagtagacagtagacaaagttgttgttcaaagtataatcaagagtcaggcatccaattgaggtctgaacaatagcttttattcatgttctctcaccagtctgtgttacatattacgtggggtcctctaggtcgac

SEQ ID NO: 103941 - DNA, 648 bp, Homo sapiens
tttttttttaacaaagaagtacacactaaatcttttttaaatttttaaaaatattttaatatttttaaaatttttaaaaaattttttttcttgctatgttgcccaggctgaactcgaacacctggcatcaagcaatcctcctacctcaacagtagctgaggcaggagaatggcttgcacctgggaggtggaggttgcagtgagcagagattgcaccactgtactacaacctggaagacagagtgagactctgtctcaaaataaataaataaataaatatataaataaaaattaaaattaaaaaatggctttacaaatggtttatatccttacataattaccacttaaaatactgaaccaatgcacaaaaatagatgagagctaaaatttattgagtgcttactatgtattaatcactatgctaagcattttacatgtattatttaatactcacaagaactctattaaataggtaccattaccatccttattttatagtgaggagtcagatttaccaagaggttaaataattggctcaagggcatacagctggagccaaaatttgaacttaagatgcctaaatcaagagcctgttggagtaagcactttactataattgtctccaaagcttggttttggtatagaaagc

SEQ ID NO: 103942 - DNA, 279 bp, Homo sapiens
aaagcaagttacagaagaatacctgctctatatttttatggacataaaatttaatatagcaaaattagatggtttattgcttagggatacatatatatgtgacgaggagagtataaagaaaagcaaaggaggccgggcacagtggctcatacctataatcctagcactttgagaggccgaggtgggtggatcacttgaggtcgagaccagcctaggcaacatggtgaaaccctgtctctataaaaaataccaaaattagccaggtgtggtggcgcatgc

SEQ ID NO: 103943 - DNA, 174 bp, Homo sapiens
caaggtcatacagccaaaaaacaaagaacgctgcagccaggatcaaaaccccagtctgactccaattgctattctacctataacactgacaactgattgtcaagcactgtaaaaccagcctcttgatataactttagacacatccagggatccattccactttagagtgctata

SEQ ID NO: 103944 - DNA, 431 bp, Homo sapiens
ttgtcttgaactgactgactcatgccagccctacagaagtgccttttacatattggagcaacagtgtgttggcttggctgttgacatggatgaaattgaaaagtaccaagaagtggaagaagaccaagacccatcatgccccaggctcagcagggagctgctggctgagaaagagcctgaagtcttgcaggacccactggatagatgttattcgactccttcaggttatcttgaactgcctgacttaggccagccctacagcagtgctgtttactcattggaggaacagtaccttggcttggctcttgacgtggacagaattaaaaaggaccaagaagaggaagaagaccaaggcccaccatgccccaggtaactgagcaattgtgaacagctacttctgtgttgacatctggagacttctggttcaggga

SEQ ID NO: 103945 - DNA, 309 bp, Homo sapiens
gagctcagaattagacctagataaatgtagtcaactaatctttgacaaaggagcaaaggcaatacaataaacaatagatagactttgaacaaatggcactggagcaactggacattcacatacaaaaacatgaatcttaagacatagaccttacactcttcataaaagtaaacccaatataaattatagacctaaatgtaaaatgtaaaaatataaaacttctagaatataacacaggagaaaacctaggttaacatgaatatggtgatgactttttagatacaacaccaaaggcatgacctatgaggg

SEQ ID NO: 103946 - DNA, 494 bp, Homo sapiens
attaaaagtcgttcgacaacattaataactgttcaaatcatcatacaatcctattgtttaattgtctttataaacttgagatattgccttctttagggcatctttttagaattctgtcccagtttctgacttgttcagcagtttcactaatataacaaattgaccatgtagcttaccttacacaaattaaaatacaaatttttgaggttggttgtggtggctcacgcctgtaatcccagcactttgggaggccaaggcggtcagatcatgaggtcaggagatcaagaccatcctggccaacatggtaaaaccctgtctctactaaaaatacaaaaattagtcagatgtggtggtgcgtgcctgtaatcccagctacttgggaggctgaggcagtagaatatcttgaaccagggagttggaggttgcagtgagtggagatcgtgctctgccctccagcctgggtaacagtgagactctgtctcaaagaaagaaaa

SEQ ID NO: 103947 - DNA, 263 bp, Homo sapiens
tgtaggttgggcctggtgggaggtgatttaatcacaaacgggaggttggtaggggtggaagggaaaacaaatgggtaggatgaggaggagtaggctggcagtagggtagtgagaggttcgtgggcagtagtaagggggagtagcctgctgcagaggcaaagcctcaaggaaaacctccaccagggcagtgcacctatggctttgcagggtgtagcccccatggctgccctcataggctgggctgttgttgagtgcctgtagct

SEQ ID NO: 103948 - DNA, 291 bp, Homo sapiens
ctgtgagcttataattgctttgaaatttttgtctgctgtatctagtatcttcaatactcagaggcaatttctattgactgcatttttttcttgagtacgagtcacactcctgtttctttgtaggtcttataatttttttgttaagaactgggcattttagataatatagcagctgtggattctgatcctcccaaattgctgttgttacttttttgtctgttcattgctctttgtttagtaacatgtttgtcaaacctgtgaaatctttttcctgtggtttgtggccattaa

SEQ ID NO: 103949 - DNA, 429 bp, Homo sapiens
ctaaaatgcatgtgaccaggctcacactgattattgtctatattaagcacctgctgcatacaaagttctgtgcaatgcagggttaagcagcagaaacctttgttagagggctgcagaagacagtggtcattaaagatatgaagggattggcattagaggtcccctgggagcagtggaaagcctctggtgcaggggttggtgagcctgggaaagatttctggacagtgggactcagataagaccaggtttgacactctgccactataaagatccagacagagggtttttctctatacagtgagtgcaccagtcctaaaggaaactactccagggaagtcacagggggtgagtgggcagttctcatcccatagcaagcagtagtttctgggcagaggcataacatgataggagcagtattttaaaaaagat

SEQ ID NO: 103950 - DNA, 200 bp, Homo sapiens
ggctacttttgctcccacccccagccagccctcctgggacaggtgtgaaggctccagtgccctgacagcatgtcttgaggtgatgtgaggcagccctgaggcagcctctcacagctgagcagaggagtgggtccacccttcaaccctccccagcaccaggctgactgtactgtgggagctggcccacatgaggctgacag

SEQ ID NO: 103951 - DNA, 325 bp, Homo sapiens
agtggaacccttcctttacccaaagaaagttttcatgaaatgattttgtgtgtgtgacagcttcccaggtgcatagtccttcctcagtactgtagtgctgttctgggaggcactgcttctagaattccactgccggcatctcaccacccacttgctatgctggacctggaaggagaaatgaggttttcaggccatgccaggcagctagctgtttccaggggagagttaaaaatatttgagctcacttactgctctttgtttattagtggactcagccctttttctgagtaaatacagaccccgtcttagtcctaagacacctcag

SEQ ID NO: 103952 - DNA, 525 bp, Homo sapiens
gcctgaagaaagctgctgatggggctgctgagccaggcgttgtggggcagatgatcgaggcagctgaagagcgcccgtggactgtaagtaggctgaccgttgatcattgttggctggataaggaacttgatggttttttaaaatgcgcgtgatacaatagttctctctttaaaacccaagcacagctcatacataaattgagagtgttctctagaagacattaaaaatagtgcattttaggccgggagcggtggctcacgcctgtaatcccagcactttgggaggtgagcagattgcctgactttaggattttgagatcagcctgggcaacatggtgaaaccctgtctctattttttaaaaaagcaaaaaatttagccaggcgtggtggcgggaatctgtaaccccagctacttgggaggccgaggcaccagaatcacttgaacccaggaggcagaggttgcagtgagcccacattgtgccactgtgctccagcctgggcgacagagtgagactctgtctccaaa

SEQ ID NO: 103953 - DNA, 1409 bp, Homo sapiens
tagaagacatcaaagtgctgttttacagcaagggttggcagactgtttctgtgaagggccagacagtgaaggttttagagtctgcagggcaggcagtcgctgtcgcagctcctcagcaccaccactgcagctataaatgtatgggcatggctgggttcctataaaactttatttacaaaaacaggcctctggtgggatttggtcggtgggtggaggggtgtagcttgccccagttctggagggatgtggccaaagtgttctgtgaggacgctgtagtgaccctaaggagaggcacccaactccatcagggctcagggaaggcttcctggagggggtggcgcctgaatgagcatgagctggccgagacgaagagcagcctggctgaacgggtcgggtctcacaacacggtgctcatgaggaacgctcttaatgtgcacactgtcctgtgtctctgcagagcctgctcgctcagcacaaagactttggagcagcttttgagcccctgcagaggaagctcttggacctccaggtcagggtccaagccgagaaggggcttcagcgggaccttcctggaaaacaggcccagctctcaaggttgcaggtgaggggtctgtgaggcctgaatcactcctgcccaggtgctcagctgcacctggaagcagcgtctccctctagcagtaaccagcaaagcaacagctgccgtgagccagaaatttagacccttagttgagatctgacctttcacctcaacagaacctctgcttatttatctgatggttcctgacctcaaacaactgagtcttgagctcagcaaaatgacaaactgtctttctgtttactcctcagttccaaagtctaacattggtatttgtttttagaattgctttgctaagtattcttaatgagtccagaggtgttcagttaaaccaactttgggattaagaataaatgttctgaaacgtggactgtaagtaggctgaccgttgatcattgttggctggataaggaacttgatggttttttaaaatgcgcgtgatacaatagttctctctttaaaacccaagcacagctcatacataaattgagagtgttctctagaagacattaaaaatagtgcattttaggccgggagcggtggctcacgcctgtaatcccagcactttgggaggtgagcagattgcctgactttaggattttgagatcagcctgggcaacatggtgaaaccctgtctctattttttaaaaaagcaaaaaatttagccaggcgtggtggcgggaatctgtaaccccagctacttgggaggccgaggcaccagaatcacttgaacccaggaggcagaggttgcagtgagcccacattgtgccactgtgctccagcctgggcgacagagtgagactctgtctccaaa

SEQ ID NO: 103954 - DNA, 228 bp, Homo sapiens
aaaatgcgcgtgatacaatagttctctctttaaaacccaagcacagctcatacataaattgagagtgttctctagaagacattaaaaatagtgcattttaggccgggagcggtggctcacgcctgtaatcccagcactttgggaggtgagcagattgcctgactttaggattttgagatcagcctgggcaacatggtgaaaccctgtctctacttaaaataaaaaatt

SEQ ID NO: 103955 - DNA, 714 bp, Homo sapiens
gatggagggttgaatgccaaaacttcgtaatcgtagaaaattctggaaagccgccggcggggcaaggccacgaggatcctcctcgcagcaccgcgccgcgcggggcccaggggccgcgctcacgcccgccgctcggcgcagacacgagtgcccccgacttgagccgaacctctagccgatgccggcgccgccgccgccggggatgcgtaagccgactgggaagcgagggggggaggcggcctgcgcggcaccgcccgacctggccgcggcgggctgagccccaggttccggaggaatgctcgctccccgctggagtcctaccagcccaacacggacctgagccgcgaccacgcgggctgcagcctgcagcacatcagctacccggagaacgcggacgcggaagcaccgctgctcagcacccccgaagaaacacggaatccagagaggcacaggcaccgccccggcgcgcacagctgcactcagcggcttccttcctactacatacatacataggagtgggagccgaggaccacttgttgcttgcggacttcctctagcataaaagatggaaagaaaacacacaccgaagcaagggaccaaaggaacagaaaagaaacgcagagatcataggaaaactgcaaagaaatacttgataatatcttccaaacgattagagaagacataacattcattaagaatacacatatagatgta

SEQ ID NO: 103956 - DNA, 390 bp, Homo sapiens
tgtggcggccgcagtaacgcaaacctgagggctcctccgctgcggagcggcgggcgggcgcggaggccgagggcgagcggggcagccgcccgctcgtcgccgctgaccccgagcccggccgcggtttccgccccctgccgtggcgggcgggcctcccctgcgctaccccctcgcccgcgcccgccagcgcccgaggccggggagaaaggggagcagcgggagccggggactaccggagatgggagcacgcctcctgctgctgtcgtccagccccaggttccggaggaatgctcgctccccgctggagtcctaccagcccaacacggacctgagccgcgaccacgcgggctgcagcctgcagcacatcagctacccggagaacgcggacgc

SEQ ID NO: 103957 - DNA, 467 bp, Homo sapiens
gacatactcatcccacttagttgagagaagagatttctagtttgggttacagttgcccaaccttccctttaaagagaatccagtcatgttttcaatggtaaaaagccttaaaaagctgcccttcgaagatctcctatgactgcatgtcaaggtattttgtacctacaatcccagaacttggttccttccccatgaggactaacaaatgttcacaacaatcatgatcaagtgtgcactggaagaaaaaatccacaatctgggcttctcacttcgtgcttcataaatgacaatcactgcttgatgcagatgttgcactgtatccactcagggatgtttccttaaaaaaaaaaaatacatcaagaaggaggaaaaaattaaaaacaggaaaatgacaacaaaatgtgaatggtataaattaaatatgttgctgagagcacctctctgacaaggctttcagaccaacaagc

SEQ ID NO: 103958 - DNA, 923 bp, Homo sapiens
  misc_feature (359)..(359): n is a, c, g, or t
  misc_feature (458)..(458): n is a, c, g, or t
  misc_feature (464)..(464): n is a, c, g, or t
  misc_feature (481)..(481): n is a, c, g, or t
  misc_feature (484)..(484): n is a, c, g, or t
  misc_feature (568)..(568): n is a, c, g, or t
  misc_feature (781)..(781): n is a, c, g, or t
  misc_feature (784)..(784): n is a, c, g, or t
  misc_feature (787)..(788): n is a, c, g, or t
  misc_feature (805)..(805): n is a, c, g, or t
  misc_feature (811)..(812): n is a, c, g, or t
  misc_feature (819)..(819): n is a, c, g, or t
gtggaaccactgttcaaagctagatatttgtatgtttgcgggggagggtaatggccccctgcatttttcacccacatttaaaatcaaaagctatattatgaggagttggactgttctgtcaaaggcaaaacaaaaataatatagaaggcctaggttttgcatagtcttcttttttttaagagttggggtcttgccgtgttgcccaggctggtctgaaactcctgggctcaactgatcctcccgcctcagcctcccaggtgctgggattactggagtgagccatcgggcctggccagattttgcatagtaaaacagtgaaacagatagagttgtatttaaggtcagtattctaggcctcncttcaactgcagtcataccatcatagaagatagttctatgtcatcctgttatctggacattataataaacaacaagccctctatacacaggttccaaancccgtnatctagacattatcaanaanaagccctctctctatacagagtttccaaattctgaagctgatagcgcacttggtctcactgagcctccctccccgccctcctgntgctcctcagacatctgggctgcagacacattgcagttacagcacatacacttctagctcggaaaagcctagtttcttgtatttctttcaggtaactgccagtttctgtggctgaatttaagcacttacagcatcttcctagctgggtgttggtggctcacaactgtaatctcagcactttgggagggtgaggcgggcagatcacctgaagtnggnagnntgagaccagcctgaacnacatgnngaaaccngtctctacctaaaattccaaaattaggttgggcgtgggtggtgcattgctctggtatccaggtactccgggagagtgaagggggagaattgcttggaacccagg

SEQ ID NO: 103959 - DNA, 328 bp, Homo sapiens
tgtagagacaggggtttcaccatgttgattaggctggtcttgaactcctggcctgaagtgatccacccctctaggccacccaaagtgctgggattacaggcatgagccactgcgccccgccagtttctgtattttgatagtagccatcataatgggtgtgaagcagcatctcattgtggttttgatttgcatttccctaaccatgagtgaattgtgtgtttattggtgaattatgactattttaaatcaatctggatcattcttattttctccttgaatgttgtttctctgattctctgtattttctctcttctcttcctatatcaaa

SEQ ID NO: 103960 - DNA, 304 bp, Homo sapiens
gcacgttgtaggatacttgaaccaggagtcaagagcagcctggaacattagagacactatctctacaaaaagcaaaagtgagccaccgcgcccgaccttattgtctcttaaagcctttcatttaaagttctaaatattgtcttgtaacataaacagcagtatttttgctgccaaatttccttacaagtctcctgtttgggggatgtgttcttactggctttttattagttaatcctgtccctgtatggattattttgaatagttcatagcccaattgctttttatcatttccataaattctatc

SEQ ID NO: 103961 - DNA, 1491 bp, Homo sapiens
ccgatgcgagtatacattcgaatgactgactattggagggaggtggtgtgttcacgtgagcctacatccgagggtgctcttcgtaaggggtagttgttgttttatagctccaaatggtttttttattctcagtgtagcaactgtttgatttttttttggatacagctgtatgaacacttttctattttatactgaaatcacacaggtttgtgatctaagtgccagaaccatggaggagactctggccttatctgtagggacctaaattttttaagtgctatgaacactgatcaagtagttgtggagagatgagaagaatatatgcagcaaaggtgctgtgagcccagttccaacggctgtgttctggtaatcgtgcagaacagcatgtgggctctgggccttggcaggtgcacagacgggcgggcgtcacgtgtgttcagagcttgtctccacctcacggctctgtgctcttctgtgtgctgcgttgtggccgtgaagtgggagctctcctttccaaaggcagagcttactgtcatggctcagatgttcactcgcatcttcaccccaaacttccctgaattgcagtgatttctgttataaggcacatagcaagcctgtaccactctacagtaaaatctctacactaacagtttaaagcccgaaagctgaagcattcagcctctgcaagtgtagactactggactgtagtagaggcatttggaatacttacaaagtcaagtgctgtggcttcagttcccccggctccccacccctgacatccatacttatgttgtctggaagagccatggacacatcattattttcagcaaccagctgcagtgaaactccatttacagcaaccccatagtataaaaccacaatgcctcattgtaatgggatattgaagttcattgaagaattactaggttgccatgtggctcacttatttaaaaaaaaaaaaaaaaactcacccgttttcctgggatttgttgtaaggagttttcactggcctcactcagaccaatttctgcttcaaaaagcactgaatgtgacctgttgcattcagttgtagcatcaaatccacacctagtcattgcttgaggggccaaattgtgttctgtcccatgcacgctctatttggtgttaaaatggaaccttacggttgtgttttaagtattcattgaaaccagcttcagaaaacaagatgccatagtaaattgagaataacattttttccttcttcagggtggctgtaattccaggtggccgtgatttctttcttccccactgcccactccttcgccaaacccacgtattcagtgttctgatcttgtttgtgcagagtgaactctgatgcagtatcagtcttgtcctgggagccgggtcctgctgctcacaagcccagagctgccagggagctcctggcagtagcacgttgtttagaaagttgggtggcttcattcagcatggaacaagctaatggcacaggag

SEQ ID NO: 103962 - DNA, 434 bp, Homo sapiens
gtaagctaaacaggaaaataacgtatttataagtgtatagacaatgatgctgaagttgattattcacagccttgcttgtggaaagtttaatatcaaatgtataacaatgcagaatgatgcttttgtttttgtttttaataggagcatcttgtttaaaacgtcatttcagaacatcttttctgagtcttgggtgggcacatggggcagggaggctataggagaaggactgtatttgctggataattttcattagtatgaggtaatcttagaaatttcttaagattgttttgaatgtattaatgctgtgcattcaaatttgcccaaatatgtggattttccctttacctataaagcagcaattctaacggaagtcagtatactttatgctactgagcatgagcatgatctctgggcaaaaaatactaattcattat

SEQ ID NO: 103963 - DNA, 918 bp, Homo sapiens
ggattggacaagcttggtctgggggagtgaagaccattcaacatcagctgcaggagagcatgtttaaagctatgagaagagatgcagcaatagtggtggcatttattggagtcaaggaagtcttcccaggaaggggactgaagcctgaaggatgagcaggaatcaatgtagtgaagtgggtgggaggaaccaagtgtggccccagtcagaacttcaggaacaaaggccagaggcaagcggccacatggtggactgcaggagctgaggagttcagcctggctggagtggagagtgcaagtgggtgggtcagaaagatgatgctagaggtggcccaccctggaagagtttgtttcagatacgtcaccctgactccactccagaccgttaatgagacgggggagaaatcagtgaccagatagaaggctctttcagcaaacgggcaagagatcaagtgcctgacctagaggaatggtagtgggaacggcaagaaattgctagctttgcacaatgattaggactagagtggagagattttttggaagaggtaatgattgactgaatgctttagaacatggctcagttcttcctcagctttgctggtctttctgtacaacttggaaagaatgtggtcattgttctggttatatataaatgcttttgtgtaggtgtaagtaggtatatttgttagttttaggagataaggtcttgctctgttgcccaggctggagtgcagtggcaccatatcggttcactgctgcctcgaactccggggtcaagtgatcctccaactcagtgtctgaagagtagggactacacaggtgcatgccaccacacctagataatgtctgtcttatctttttttgcgacaggatctcactttgttgcccaggctggtcacaaactcctggcttcaagcaa

SEQ ID NO: 103964 - DNA, 619 bp, Homo sapiens
gcaaaaaatgtttccaaattctgtatgggctcagtgttggtatatagttaaggtaaaatggtaataatgagattaattctttactcctaactatgtgctttccttagatagtgagcacagtgattttatgtagcaactgttaagtggagtgtctccaacagagttctaattaatatccaaaataaagatgacattattatttatatgcactggatcttattggataatttcttaagtatggtcttcttttccttgtttaataagttgatctagatatttttttcatagtccctattttgctaagtcatcacttctgagagtaatatctgttctgtattatgggcaagcagctgacgaaaccaaataaaagctaagagaattactcttctggtatgtcacaaaaatgaggtccaagttcaggttagttacattcaaggccactgaggattcttatggttattatcatggtatcactgttattaaactttgaagcatcacaaagaattggtgaagagccaaaagactgaagactggcacaattgtttaccatcaccttcaataagggatggaaattggattctggaagccacaaaccagaaagtctggtgtcacatcttaa

SEQ ID NO: 103965 - DNA, 321 bp, Homo sapiens
agacataaatggacagtattgttttatgaatacatcagtaagaaaatactttaacaggaacgggaaattctccaggttcagtgtgagatttccacctataattttcatttggctggcgagactgacttgcgttacttgagttatgctattttaaaagtatttgtcaccagtatgtatcccttctttgatatttttcctcccttctacagtgacttttaaaatccaaatctaatcaagctgccactgaggacatattgttatattaaacatacaaatgtttaagccttattaaatacagactgggtttcagtaaatcagaaa

SEQ ID NO: 103966 - DNA, 418 bp, Homo sapiens
tctttgtttggcttggcagtaaaaagactgaaaagtgtaatggaaagaagccttcgcaataaaatcctccagctaatatttctaatgtagcttcaaagaagaaacacacattcttcataccactcttttagcacggaaggggtagtgttctattaaaccaagtaataggaccacttattaactttaactcataactgataaagagtgaatttgtaatactattgctcaataatcaacacaccagccctagggcaggtggatgagagtacaagtaggaactctgtgcacaggcttctatttcaattactacttctggtaaaatttgaagactaccctagacctcctgtgtctcagctttttctcattcttgcttctcaaaaagcaggacagaaagaggaccagcacatgccaagtcccg

SEQ ID NO: 103967 - DNA, 297 bp, Homo sapiens
caggcattcatttccgtaagcctctctctttcctcctatatggtatgtgatgagtttgggggaaagcatctgcatttaagctctgttctggtggagagagggaagaggtctcagtgtttatcgtctcccatgagttgagtgtgcaggatctgtagccaacaactcttgagttttgagagttccatgtgagcctcactacatgctaagtcagaaccacagggtgagtgaatgctctttctctgctccatctggcttctgtcttcttaacagcatatctgctgtttcacatagctgcat

SEQ ID NO: 103968 - DNA, 562 bp, Homo sapiens
tcgaacatctcatcagacactttctctaaaagaaaacaatactgtctattctgagaaaagacaacatcacagcaccttcaatcccagtgcctttcacaggttcttccaccttccaaatccaataaaatcatcaatcttaaattctgctttttaaatgtccttccaatgcaacccttctccatttcctataccttatgttcctgttttcttcttaatcagtatccttgtccccaacctctactcaacaactcaccccataaaactgtaatctttcttaaaaaaattaatcgccaactctaaaagatcctgaatacatttctacctactccacatcctctcctagctgaactctgttgtgcctctactcctctgcaattatctatttttgcttgtctcccccactcaggttgagttaggaacagtcttgtacctctctgcatcttcaatgattagtaactgcctggttccataagtgtttgccaaatggactgtatgaatgaacttatatgatttgctatgaaagaagggttaagaatctcaaagcatctgaagctatgagaag

SEQ ID NO: 103969 - DNA, 342 bp, Homo sapiens
aaccttcagcttggctcataccttgcccccagagctggtcatccctgagtgctagttcttgagtgctcttcccctactgtcctacctttaggtctcaaacgggtcccatctgtgtactcatcatccatctattcattcatccatttatccatttacctatccaccttccacccatctgctatccaccatccatccatccatccatccatcatctgtccattcatctatcatccatccttctatcgtctgtccatcaatccattcattcaaccaatagccctgggcgtacgcctaaacgctaacattactgcaggccacctactcatgcacctcattggaagc

SEQ ID NO: 103970 - DNA, 233 bp, Homo sapiens
tctgcagcttgttgggtaaataactcttatctgtaatcatgccttggggatttgaagtaaaagttgaagggttagggaagggcagtgtgaatagtaaacacttggtccaggaagagaacatgtaataactttagacagttagataaaagctctctttgcccttcccgctgcaggaagcctgtttgtaggtacacttgccaaaactcacaaaagagaagaattgttttaaagaa

SEQ ID NO: 103971 - DNA, 576 bp, Homo sapiens
taaataaattaaaatataaaaaattatccaggcgtggtggcaggcgtctgtagtcccagcttcttgggaggctgaggcaggacaatggcgtgaacccgggaggcggagcttgcagtgagcggagatcgcgccactgcactccagcccgggcgacagtgtgagattctgtctcaaaaggaaaaaaaaaatttctctaagttataaaaggcaataaatctaaaataatttaagagtagtcttgatgctaatacagcattggaattggaatctgaataaaattgtagtagttgtaaaagttgcacaaaaagaagcaaacctggctcataatacccaattactttaacaatgagaccatcttaaagcccttttagttatttgcatgagtatcagaagtagctattcagaagttttccccaaaatgaactgatttgaaataccacagatgattaaaatttctgtagttgctaatcaccttgttgttttaaataaacatcatctagatgcatgttatccttcagacaaatccctgagggaaacctatgtgctgactataaacgtgttaccatttctgacgta

SEQ ID NO: 103972 - DNA, 413 bp, Homo sapiens
ccaaaactgaccttccccaataaaatgcctaatgaagatagggaagaaggaaagaggcagatttcccagcccaaaaaggccctaagggacccacatcccagactgaactagagatggttccctaaggtaacccaatctcttggggctggggcttgactagaagataaaactatataggaatgaaggcactgaactcttctttataatcctcacactgagatttcttttctatctatataattaatgttgtgtgtatacgtcaaaatactgcaatctctcacattttaatcacacattttaattattctctagctctggatggaacacatctagcactttaaaagtatgtattaaatactgatactgttatagtgtgatttttataaaatatatctaaatacataaatatattg

SEQ ID NO: 103973 - DNA, 144 bp, Homo sapiens
aaacgtagtcctaaatcctggcttcaccttctctgcccatgtgaccttgagcaaccttggaggaggctttcctgtgtcacctcatctgtaacatggagtcagacctacctctcaacaaaaagcccgtaccagatggctttgctg

SEQ ID NO: 103974 - DNA, 185 bp, Homo sapiens
atcattagtggtatggcaggaagaaggtcttgccaaaccctgaattcaaagaagaggaggggtagggtagaggatgtaagaaattgagaaggagccgtgaggtaatggggcaggaggaggaagaaggtgggttctctttccaggacagagccttctgaggatgccagagctgggtgcaggctgtt

SEQ ID NO: 103975 - DNA, 248 bp, Homo sapiens
acagttctagggtccacactgatttgcctgtagaggcctgccagtggcttcagatagtatccctatctgccactgacacttcaagcaccattggatctcctgaaacataaagcccaagtgggagagcagcttgcacagcagcctggacctgttgcagagcctgcttttatcctgggcttaaaactagcagctttttgggtcacttggcaaataggtcagagagtaacacactcaattgaggaatatgt

SEQ ID NO: 103976 - DNA, 472 bp, Homo sapiens
gtgggggtggagacgccctccaggactgacatggctccctgtaaatgtaaacccccaaaccagagactcagttataggatacatatattagggagtttggtatggtgagtgagcacttagggttggggttcaagtcttgtttcggttactctgtgactttggacaagtttcttaacctctctgagcatttaaaaaatctcatctgcaaaatgggaaggtatgatctaatttattaataatttattctttatgaggtctcaagctcctgggattcttctgaggcttcaatgggacaatgaatctaaagcacttagcaaggtgtttggcagagtcagccctccccaaatggctgtttttgttgttgttgcaactagtaaaacagagaaattcacctgagagttcctagggagcttagtctattttctgttgcttataatggaatacctgaacctggaagcccaaggtcaagggg

SEQ ID NO: 103977 - DNA, 2913 bp, Homo sapiens
actctatgtctcctctcgttggattgtgacaccgggaggtcagggaactccaggaccttgttctctgctggattcgcagcaaccagcacagcacgtagggcgtagttggtgctggatggatgtttgttgaatgaatgaatgatgaatggctggcaccttgtctgctcatccctaactcctgttccttcatctgtgcagccctaatctttgtttcctcatctgtccatccctttatttgtgcatcctcattcttagccccttcactgcccttctccatctcttcctccttgttcatttgtccctgttctctgtcctctactccactcatgcccatctctgtccccttgacttacccagtccctgctactatctccatccctaatttctgccctcttgtctgtctactcctaattccttttccttgtccatccctaatacctgtcaccttgtccttcttcctcgaatctccatccctaatccatctgcccctaatctctgtcccctttgcccatccttccttttctcggtgtctctttccacccttatctccacacctgcccaccctgcactcccattctgtttcccatctgcacccttgccccatccctcccacacacaggaccagacggccaccatgtcaggagactacgaggatgacctctgccggcgggcactcatcctggtctcggacctctgtgcgcgggtccgagatgctgacaccaacgacaggtgccaggagttcaatgaccgaatccgaggctatccccggggtccagatgcagacatctccgtgagcctgctgtcggtcatcgtgacattctgtggcattgtccttctgggtgtctctctcttcgtgtcctggaagttgtgctgggtgccctggcgggacaagggaggctcggcagtgggcggtggccccctgcgcaaagacctaggccctggtgtcgggctggcaggcctggtaggcggaggcgggcaccacctggcggctggcctgggtggccatcctctgctgggcggcccacaccaccatgcccatgccgcccaccatccaccctttgctgagctgctggagccaggcagcctggggggttctgacacccctgagccctcctacttggacatggactcgtatccagaggctgcagcagcagcagtggccgctggggtcaaaccgagccaaacatcccctgagctgccctctgaggggggagcaggctctgggttgctcctgctgccccccagtggtgggggcttgcccagtgcccagtcacatcagcaggtcacaagcctggcacccactaccaggtacccagccctgccccgacccctcacccagcagactctgacctcccagccggaccccagcagtgaggagcgcccacctgccctgcccttacccctgcctggaggcgaggaaaaagccaaactcattgggcagattaagccagagctgtaccaggggactggccctggtggccggcggagcggtgggggcccaggctctggagaggcaggcacaggggcaccctgtggccgtatcagcttcgccctgcggtacctctatggctcggaccagctggtggtgaggatcctgcaggccctggacctccctgccaaggactccaacggcttctcagacccctacgtcaagatctacctgctgcctgaccgcaagaaaaagtttcagaccaaggtgcacaggaagaccctgaaccccgtcttcaatgagacgtttcaattctcggtgcccctggccgagctggcccaacgcaaactgcacttcagcgtctatgactttgaccgcttctcgcggcacgacctcatcggccaggtggtgctggacaacctcctggagctggccgagcagccccctgaccgcccgctctggagggacatcgtggagggcggctcggaaaaagcagatcttggggagctcaacttctcactctgctacctccccacggccgggcgcctcaccgtgaccatcatcaaagcctctaacctcaaagcgatggacctcactggcttctcagacccctacgtgaaggcctccctgatcagcgaggggcggcgtctgaagaagcggaaaacctccatcaagaagaacacgctgaaccccacctataatgaggcgctggtgttcgacgtggcccccgagagcgtggagaacgtggggctcagcatcgccgtggtggactacgactgcatcgggcacaacgaggtgatcggcgtgtgccgtgtgggccccgacgctgccgacccgcacggccgcgagcactgggcagagatgctggccaatccccgcaagcccgtggagcactggcatcagctagtggaggaaaagactgtgaccagcttcacaaaaggcagcaaaggactatcagagaaagagaactccgagtgaggggtctggcctaggcccgggatcggaccaggctccctcaggaccccatcctttcctgcccggaccgtgaattcatctccttgaagccataacgtccgagctgctggtgcggggcagccctggccctaggcttcctaaccctggaagcgagaggatgagaggaggccggcccagctccttctttcagggtgggggtcattcagcctccactgtgtctgtcttttcttccctggggctccccctcgaggcgaggggccatgcatgtctgggggacccctgccccccaaaaccctctgtctgtctctgtctctttgctgtttgtccaagactcagtgtcccgacccttgttctcgccgtgaatgtcaatgggccaatcctctctgtcctttcagacacacacacacctgtgtccaccccttctgttcgccacaccctgcgtctggccggtccccccactgctgctgctatcaacgccagaataaacacactctgtgggtctcactcca

SEQ ID NO: 103978 - DNA, 631 bp, Homo sapiens
actctatgtctcctctcgttggattgtgacaccgggaggtcagggaactccaggaccttgttctctgctggattcgcagcaaccagcacagcacgtagggcgtagttggtgctggatggatgtttgttgaatgaatgaatgatgaatggctggcaccttgtctgctcatccctaactcctgttccttcatctgtgcagccctaatctttgtttcctcatctgtccatccctttatttgtgcatcctcattcttagccccttcactgcccttctccatctcttcctccttgttcatttgtccctgttctctgtcctctactccactcatgcccatctctgtccccttgacttacccagtccctgctactatctccatccctaatttctgccctcttgtctgtctactcctaattccttttccttgtccatccctaatacctgtcaccttgtccttcttcctcgaatctccatccctaatccatctgcccctaatctctgtcccctttgcccatccttccttttctcggtgtctctttccacccttatgttcgccacaccctgcgtctggccggtccccccactgctgctgctatcaacgccagaataaacacactctgtgggtctcactcca

SEQ ID NO: 103979 - DNA, 2479 bp, Homo sapiens
ggcgcgcggggctgcggcggcggcggcggcggcagcggcggctccggcccctagatcagacattctctctcattacccggcgcgtgggaacgggtccacagccccttgtccgccctagaacccccatgggctgccgcccgccgccgcctcggctgccacccaggacacggcagagataagcgcaggaccagacggccaccatgtcaggagactacgaggatgacctctgccggcgggcactcatcctggtctcggacctctgtgcgcgggtccgagatgctgacaccaacgacaggtgccaggagttcaatgaccgaatccgaggctatccccggggtccagatgcagacatctccgtgagcctgctgtcggtcatcgtgacattctgtggcattgtccttctgggtgtctctctcttcgtgtcctggaagttgtgctgggtgccctggcgggacaagggaggctcggcagtgggcggtggccccctgcgcaaagacctaggccctggtgtcgggctggcaggcctggtaggcggaggcgggcaccacctggcggctggcctgggtggccatcctctgctgggcggcccacaccaccatgcccatgccgcccaccatccaccctttgctgagctgctggagccaggcagcctggggggttctgacacccctgagccctcctacttggacatggactcgtatccagaggctgcagcagcagcagtggccgctggggtcaaaccgagccaaacatcccctgagctgccctctgaggggggagcaggctctgggttgctcctgctgccccccagtggtgggggcttgcccagtgcccagtcacatcagcaggtcacaagcctggcacccactaccaggtacccagccctgccccgacccctcacccagcagactctgacctcccagccggaccccagcagtgaggagcgcccacctgccctgcccttacccctgcctggaggcgaggaaaaagccaaactcattgggcagattaagccagagctgtaccaggggactggccctggtggccggcggagcggtgggggcccaggctctggagaggcaggcacaggggcaccctgtggccgtatcagcttcgccctgcggtacctctatggctcggaccagctggtggtgaggatcctgcaggccctggacctccctgccaaggactccaacggcttctcagacccctacgtcaagatctacctgctgcctgaccgcaagaaaaagtttcagaccaaggtgcacaggaagaccctgaaccccgtcttcaatgagacgtttcaattctcggtgcccctggccgagctggcccaacgcaaactgcacttcagcgtctatgactttgaccgcttctcgcggcacgacctcatcggccaggtggtgctggacaacctcctggagctggccgagcagccccctgaccgcccgctctggagggacatcgtggagggcggctcggaaaaagcagatcttggggagctcaacttctcactctgctacctccccacggccgggcgcctcaccgtgaccatcatcaaagcctctaacctcaaagcgatggacctcactggcttctcagacccctacgtgaaggcctccctgatcagcgaggggcggcgtctgaagaagcggaaaacctccatcaagaagaacacgctgaaccccacctataatgaggcgctggtgttcgacgtggcccccgagagcgtggagaacgtggggctcagcatcgccgtggtggactacgactgcatcgggcacaacgaggtgatcggcgtgtgccgtgtgggccccgacgctgccgacccgcacggccgcgagcactgggcagagatgctggccaatccccgcaagcccgtggagcactggcatcagctagtggaggaaaagactgtgaccagcttcacaaaaggcagcaaaggactatcagagaaagagaactccgagtgaggggtctggcctaggcccgggatcggaccaggctccctcaggaccccatcctttcctgcccggaccgtgaattcatctccttgaagccataacgtccgagctgctggtgcggggcagccctggccctaggcttcctaaccctggaagcgagaggatgagaggaggccggcccagctccttctttcagggtgggggtcattcagcctccactgtgtctgtcttttcttccctggggctccccctcgaggcgaggggccatgcatgtctgggggacccctgccccccaaaaccctctgtctgtctctgtctctttgctgtttgtccaagactcagtgtcccgacccttgttctcgccgtgaatgtcaatgggccaatcctctctgtcctttcagacacacacacacctgtgtccaccccttctgttcgccacaccctgcgtctggccggtccccccactgctgctgctatcaacgccagaataaacacactctgtgggtctcactcca

SEQ ID NO: 103980 - DNA, 2843 bp, Homo sapiens
ggcgcgcggggctgcggcggcggcggcggcggcagcggcggctccggcccctagatcagacattctctctcattacccggcgcgtgggaacgggtccacagccccttgtccgccctagaacccccatgggctgccgcccgccgccgcctcggctgccacccaggacacggcagagataagcgcagccccttcactgcccttctccatctcttcctccttgttcatttgtccctgttctctgtcctctactccactcatgcccatctctgtccccttgacttacccagtccctgctactatctccatccctaatttctgccctcttgtctgtctactcctaattccttttccttgtccatccctaatacctgtcaccttgtccttcttcctcgaatctccatccctaatccatctgcccctaatctctgtcccctttgcccatccttccttttctcggtgtctctttccacccttatctccacacctgcccaccctgcactcccattctgtttcccatctgcacccttgccccatccctcccacacacaggaccagacggccaccatgtcaggagactacgaggatgacctctgccggcgggcactcatcctggtctcggacctctgtgcgcgggtccgagatgctgacaccaacgacaggtgccaggagttcaatgaccgaatccgaggctatccccggggtccagatgcagacatctccgtgagcctgctgtcggtcatcgtgacattctgtggcattgtccttctgggtgtctctctcttcgtgtcctggaagttgtgctgggtgccctggcgggacaagggaggctcggcagtgggcggtggccccctgcgcaaagacctaggccctggtgtcgggctggcaggcctggtaggcggaggcgggcaccacctggcggctggcctgggtggccatcctctgctgggcggcccacaccaccatgcccatgccgcccaccatccaccctttgctgagctgctggagccaggcagcctggggggttctgacacccctgagccctcctacttggacatggactcgtatccagaggctgcagcagcagcagtggccgctggggtcaaaccgagccaaacatcccctgagctgccctctgaggggggagcaggctctgggttgctcctgctgccccccagtggtgggggcttgcccagtgcccagtcacatcagcaggtcacaagcctggcacccactaccaggtacccagccctgccccgacccctcacccagcagactctgacctcccagccggaccccagcagtgaggagcgcccacctgccctgcccttacccctgcctggaggcgaggaaaaagccaaactcattgggcagattaagccagagctgtaccaggggactggccctggtggccggcggagcggtgggggcccaggctctggagaggcaggcacaggggcaccctgtggccgtatcagcttcgccctgcggtacctctatggctcggaccagctggtggtgaggatcctgcaggccctggacctccctgccaaggactccaacggcttctcagacccctacgtcaagatctacctgctgcctgaccgcaagaaaaagtttcagaccaaggtgcacaggaagaccctgaaccccgtcttcaatgagacgtttcaattctcggtgcccctggccgagctggcccaacgcaaactgcacttcagcgtctatgactttgaccgcttctcgcggcacgacctcatcggccaggtggtgctggacaacctcctggagctggccgagcagccccctgaccgcccgctctggagggacatcgtggagggcggctcggaaaaagcagatcttggggagctcaacttctcactctgctacctccccacggccgggcgcctcaccgtgaccatcatcaaagcctctaacctcaaagcgatggacctcactggcttctcagacccctacgtgaaggcctccctgatcagcgaggggcggcgtctgaagaagcggaaaacctccatcaagaagaacacgctgaaccccacctataatgaggcgctggtgttcgacgtggcccccgagagcgtggagaacgtggggctcagcatcgccgtggtggactacgactgcatcgggcacaacgaggtgatcggcgtgtgccgtgtgggccccgacgctgccgacccgcacggccgcgagcactgggcagagatgctggccaatccccgcaagcccgtggagcactggcatcagctagtggaggaaaagactgtgaccagcttcacaaaaggcagcaaaggactatcagagaaagagaactccgagtgaggggtctggcctaggcccgggatcggaccaggctccctcaggaccccatcctttcctgcccggaccgtgaattcatctccttgaagccataacgtccgagctgctggtgcggggcagccctggccctaggcttcctaaccctggaagcgagaggatgagaggaggccggcccagctccttctttcagggtgggggtcattcagcctccactgtgtctgtcttttcttccctggggctccccctcgaggcgaggggccatgcatgtctgggggacccctgccccccaaaaccctctgtctgtctctgtctctttgctgtttgtccaagactcagtgtcccgacccttgttctcgccgtgaatgtcaatgggccaatcctctctgtcctttcagacacacacacacctgtgtccaccccttctgttcgccacaccctgcgtctggccggtccccccactgctgctgctatcaacgccagaataaacacactctgtgggtctcactcca

SEQ ID NO: 103981 - DNA, 2345 bp, Homo sapiens
ggcgcgcggggctgcggcggcggcggcggcggcagcggcggctccggcccctagatcagacattctctctcattacccggcgcgtgggaacgggtccacagccccttgtccgccctagaacccccatgggctgccgcccgccgccgcctcggctgccacccaggacacggcagagataagcgcaggaccagacggccaccatgtcaggagactacgaggatgacctctgccggcgggcactcatcctggtctcggacctctgtgcgcgggtccgagatgctgacaccaacgacaggtgccaggagttcaatgaccgaatccgaggctatccccggggtccagatgcagacatctccgtgagcctgctgtcggtcatcgtgacattctgtggcattgtccttctgggtgtctctctcttcgtgtcctggaagttgtgctgggtgccctggcgggacaagggaggctcggcagtgggcggtggccccctgcgcaaagacctaggccctggtgtcgggctggcaggcctggtaggcggaggcgggcaccacctggcggctggcctgggtggccatcctctgctgggcggcccacaccaccatgcccatgccgcccaccatccaccctttgctgagctgctggagccaggcagcctggggggttctgacacccctgagccctcctacttggacatggactcgtatccagaggctgcagcagcagcagtggccgctggggtcaaaccgagccaaacatcccctgagctgccctctgaggggggagcaggctctgggttgctcctgctgccccccagtggtgggggcttgcccagtgcccagtcacatcagcaggtcacaagcctggcacccactaccaggtacccagccctgccccgacccctcacccagcagactctgacctcccagccggaccccagcagtgaggagcgcccacctgccctgcccttacccctgcctggaggcgaggaaaaagccaaactcattgggcagattaagccagagctgtaccaggggactggccctggtggccggcggagcggtgggggcccaggctctggagaggcaggcacaggggcaccctgtggccgtatcagcttcgccctgcggtacctctatggctcggaccagctggtggtgaggatcctgcaggccctggacctccctgccaaggactccaacggcttctcagacccctacgtcaagatctacctgctgcctgaccgcaagaaaaagtttcagaccaaggtgcacaggaagaccctgaaccccgtcttcaatgagacgtttcaattctcggtgcccctggccgagctggcccaacgcaaactgcacttcagcgtctatgactttgaccgcttctcgcggcacgacctcatcggccaggtggtgctggacaacctcctggagctggccgagcagccccctgaccgcccgctctggagggacatcgtggagggcggctcggaaaaagcagatcttggggagctcaacttctcactctgctacctccccacggccgggcgcctcaccgtgaccatcatcaaagcctctaacctcaaagcgatggacctcactggcttctcagacccctacgtgaaggcctccctgatcagcgaggggcggcgtctgaagaagcggaaaacctccatcaagaagaacacgctgaaccccacctataatgaggcgctggtgttcgacgtggcccccgagagcgtggagaacgtggggctcagcatcgccgtggtggactacgactgcatcgggcacaacgaggtgatcggcgtgtgccgtgtgggccccgacgctgccgacccgcacggccgcgagcactgggcagagatgctggccaatccccgcaagcccgtggagcactggcatcagctagtggaggtgagtaggggtcccacaccgacccctgacaagcacccgtgcaccctcggccccttcatccatgcaacgaacgccctgcatgttcgtgagtcgcagagccaggcgtcctaggtttcaatccctgctgtgccaactttagctgtgcggcttagagccagttacccaagcgctctgtgcctcaatttacccactaggaaatgggactgttgatagcatcttctgttaggatagaggtgagatgtgctgagttaaacgttctgtaggtggtcgctgctgttgttacccatgaggctaagttgaaaatagagggggctgggcgtgagccaccgcgcctggctattggcttctctctcgggtaggtgtttgcagtggcaatgagatggtcacttggagctccaggtgtataatgctgtatctgttatgataccttcggctgaa

SEQ ID NO: 103982 - DNA, 1652 bp, Homo sapiens
ggcgcgcggggctgcggcggcggcggcggcggcagcggcggctccgggtacccagccctgccccgacccctcacccagcagactctgacctcccagccggaccccagcagtgaggagcgcccacctgccctgcccttacccctgcctggaggcgaggaaaaagccaaactcattgggcagattaagccagagctgtaccaggggactggccctggtggccggcggagcggtgggggcccaggctctggagaggcaggcacaggggcaccctgtggccgtatcagcttcgccctgcggtacctctatggctcggaccagctggtggtgaggatcctgcaggccctggacctccctgccaaggactccaacggcttctcagacccctacgtcaagatctacctgctgcctgaccgcaagaaaaagtttcagaccaaggtgcacaggaagaccctgaaccccgtcttcaatgagacgtttcaattctcggtgcccctggccgagctggcccaacgcaaactgcacttcagcgtctatgactttgaccgcttctcgcggcacgacctcatcggccaggtggtgctggacaacctcctggagctggccgagcagccccctgaccgcccgctctggagggacatcgtggagggcggctcggaaaaagcagatcttggggagctcaacttctcactctgctacctccccacggccgggcgcctcaccgtgaccatcatcaaagcctctaacctcaaagcgatggacctcactggcttctcagacccctacgtgaaggcctccctgatcagcgaggggcggcgtctgaagaagcggaaaacctccatcaagaagaacacgctgaaccccacctataatgaggcgctggtgttcgacgtggcccccgagagcgtggagaacgtggggctcagcatcgccgtggtggactacgactgcatcgggcacaacgaggtgatcggcgtgtgccgtgtgggccccgacgctgccgacccgcacggccgcgagcactgggcagagatgctggccaatccccgcaagcccgtggagcactggcatcagctagtggaggaaaagactgtgaccagcttcacaaaaggcagcaaaggactatcagagaaagagaactccgagtgaggggtctggcctaggcccgggatcggaccaggctccctcaggaccccatcctttcctgcccggaccgtgaattcatctccttgaagccataacgtccgagctgctggtgcggggcagccctggccctaggcttcctaaccctggaagcgagaggatgagaggaggccggcccagctccttctttcagggtgggggtcattcagcctccactgtgtctgtcttttcttccctggggctccccctcgaggcgaggggccatgcatgtctgggggacccctgccccccaaaaccctctgtctgtctctgtctctttgctgtttgtccaagactcagtgtcccgacccttgttctcgccgtgaatgtcaatgggccaatcctctctgtcctttcagacacacacacacctgtgtccaccccttctgttcgccacaccctgcgtctggccggtccccccactgctgctgctatcaacgccagaataaacacactctgtgggtctcactcca

SEQ ID NO: 103983 - DNA, 1115 bp, Homo sapiens
ggaagcctgagccctggatgtcagggtgtaaagcaggaggctccgaccggagagaaaatcagggagagttgaagaggggctgaggcaagatatcgctgaccttttccccaactgcaggaaaaagcagatcttggggagctcaacttctcactctgctacctccccacggccgggcgcctcaccgtgaccatcatcaaagcctctaacctcaaagcgatggacctcactggcttctcagacccctacgtgaaggcctccctgatcagcgaggggcggcgtctgaagaagcggaaaacctccatcaagaagaacacgctgaaccccacctataatgaggcgctggtgttcgacgtggcccccgagagcgtggagaacgtggggctcagcatcgccgtggtggactacgactgcatcgggcacaacgaggtgatcggcgtgtgccgtgtgggccccgacgctgccgacccgcacggccgcgagcactgggcagagatgctggccaatccccgcaagcccgtggagcactggcatcagctagtggaggaaaagactgtgaccagcttcacaaaaggcagcaaaggactatcagagaaagagaactccgagtgaggggtctggcctaggcccgggatcggaccaggctccctcaggaccccatcctttcctgcccggaccgtgaattcatctccttgaagccataacgtccgagctgctggtgcggggcagccctggccctaggcttcctaaccctggaagcgagaggatgagaggaggccggcccagctccttctttcagggtgggggtcattcagcctccactgtgtctgtcttttcttccctggggctccccctcgaggcgaggggccatgcatgtctgggggacccctgccccccaaaaccctctgtctgtctctgtctctttgctgtttgtccaagactcagtgtcccgacccttgttctcgccgtgaatgtcaatgggccaatcctctctgtcctttcagacacacacacacctgtgtccaccccttctgttcgccacaccctgcgtctggccggtccccccactgctgctgctatcaacgccagaataaacacactctgtgggtctcactcca

SEQ ID NO: 103984 - DNA, 562 bp, Homo sapiens
cttctagttccttgtatatattcatgttcctttttctgtatggagttcccctcctccttaccctcctatccatttgaaatcctaccccttgtataatatccaggtcagatgccacattcctcaagttcccacaccatgaattctcatttttcatcagcattgtgtttttatctttaactgtcttatgttagtgtttatgtacatggtttatttcttcttggttttaagcttgttgaaggcaaggactgtgtctcttaccttctttggcatctcttttggtacatgtgatagttgcttagtgtttgttgaatttgtgaatgaattgtggttctacgtgaccatacttatgaattgtttgacctagagtgaattgcctgttaaattaactgtctttaaattataatcttcctagttgctgaagtttttagattgctaaattacaccttttcaaccttaacacagtaatgccacattttctttctggctattattgctagtttgtttatgagcattagttagagttctctgatgaagtgtactcattctgtttaatatcaaaata

SEQ ID NO: 103985 - DNA, 397 bp, Homo sapiens
ggtggttatccagcctcgtgtgctcagaacagtgtgaggtggatgaggcactggtggatgtttgcgtggcaaggatggtgggaccccaggcccatgttcttcccgttacctttctctggtgttaactgttagcatcatttctgctgtttttatacaacaggtgctttttgtatggattcaagtgaaataaaaactagcacggctgtaacttataaacgtgcccccttttgtatctgtagttagaaaggtgcagatagtattaaaagggtagcttacttcagacactctgtctctggatctgaccaccgctcgggaggccagcacacgcagagctggcgtctcatccccagccattggtgatcatcggcgaaggcggagttcaggtccatcgttcctg

SEQ ID NO: 103986 - DNA, 778 bp, Homo sapiens
cttcatgttgattttcctttttcctgtagtctagttcagtaattcagaaaccttactctaccaggctgtgtattacaaaacacatatgcttgatataatggttttaagagattttcaagggacattttgcctatacccaatgtagaacctattctctgatttaagagtcagctccacatattacacatatgtaagcaaactgtacaaacaggtaattttcataaagcacctgtatttacatagctgatattaaaagttacatagttgatcatatagataggtcagtgattcactatgtagtatgtatgctacttttgctacatgattataccttttaatcttttttactctagtaactaggtatttattttaatgcctattggaaaatacactgaataaatcaaagctatattttttggatattattgcttaagacaaggtccaaaaaagctaccatatttgattggctctaatacacgttgatcttgctgatgttggactgtgtcttaaaactggtgtcagatcatagcttactgggtagcatttttttctcagtggtacataaaatggtgtgtcttacaatttatagcatctcatactcagaaataaagtatataatcttaaatttttaattcaatgcaaagaaaaccaactcatatttcatgtatatgtgtgaatatggcaaatatcttgaaggtgttatacaaataactgacatttggcaagcactgaaaatagtctatttttaaacaaaatgctgatcatgctttgtatatag

SEQ ID NO: 103987 - DNA, 904 bp, Homo sapiens
tgcatcaccagataatgagcttcaccacttgtctgcctcctgtgtccttccgcggggagtaaatgtcacttcagcttgccgcatctctaaataggcaaattttcagtgctcagaaaaggacctgatctttgcacaaagtgctttgatggttgcctgcttgagtcactcccaatcccttcctgaagccctttctttataattcttctgttgaaatagccatcatattcacagtactaatcacagcatctcacatttactaaaaacttaccccataccaggaacccagagttgggggggctgtgtcagaattatgtaatttacgtgtcccaataatcctagatgcttcttgaccatctagttttgtcaaatgagaaaactgaggttccaaagaagtcaataaacttgtccaaagtctgaaaaaaaaaaaaaaaaaaaaaaaaaaaaaaaaaaaacacaacaaaaaaaaaaaaaaaaaaaataaaacaaaaaaaaaaaaaaaaaacaaccgaagaagaaccaaggaaaacaaacaagcataacaacaatagaccaaagaggcgcgcgggacggccgaacaaagctctccaaagagcggagacaggccagaacagcatacaaggctggggccccggcagatattgcaacaaaagagagcaagtggcctcgacagtaagatggaccggatacctaactccagaagagcaccgaccggagatgaggagcagaaagtggacgaacagagagaccaagaaattgtgcgagaagtagaactaagactagaggagaaacagcaacaaacggagggtagtctacgcgaaacaaagcagcagaaacaacacgcaacgcagaccggacgagaaactgcagagagagacaaaaagcaaaggagagggggagaagacaa

SEQ ID NO: 103988 - DNA, 634 bp, Homo sapiens
tgcatcaccagataatgagcttcaccacttgtctgcctcctgtgtccttccgcggggagtaaatgtcacttcagcttgccgcatctctaaataggcaaattttcagtgctcagaaaaggacctgatctttgcacaaagtgctttgatggttgcctgcttgagtcactcccaatcccttcctgaagccctttctttataattcttctgttgaaatagccatcatattcacagtactaatcacagcatctcacatttactaaaaacttaccccataccaggaacccagagttgggggggctgtgtcagaattatgtaatttacgtgtcccaataatcctagatgcttcttgaccatctagttttgtcaaatgagaaaactgaggttccaaagaagtcaataaacttgtccaaagtctgaccgactctgcttgccatgtgacgagtctgtcttagaactgggtcattgccctgcttgcaatgctgtgccctctgcaagcccccccacccccctggtctcctgagctcggtaaggtgctccagctgcctctaccatagcacttcctacatggactgtaacatttctttactgctccaacttctcattaaattgggggctcctcaaagccagggttggt

SEQ ID NO: 103989 - DNA, 518 bp, Homo sapiens
  misc_feature (7)..(7): n is a, c, g, or t
  misc_feature (10)..(10): n is a, c, g, or t
ggtagtngtntcacaagtgcagctgctggcataaagagctaaatattcactcccaatcccttcctgaagccctttctttataattcttctgttgaaatagccatcatattcacagtactaatcacagcatctcacatttactaaaaacttaccccataccaggaacccagagttgggggggctgtgtcagaattatgtaatttacgtgtcccaataatcctagatgcttcttgaccatctagttttgtcaaatgagaaaactgaggttccaaagaagtcaataaacttgtccaaagtctgaccgactctgcttgccatgtgacgagtctgtcttagaactgggtcattgccctgcttgcaatgctgtgccctctgcaagcccccccacccccctggtctcctgagctcggtaaggtgctccagctgcctctaccatagcacttcctacatggactgtaacatttctttactgctccaacttctcattaaattgggggctcctcaaagccagggttggt

SEQ ID NO: 103990 - DNA, 835 bp, Homo sapiens
cctgtttacaagatggtgcctgggctgacaggtacccctcgggttctgggtctcaaccctcccctgccagatcctgcacggggaagggcagcagggcctgtgggaggcggtgtgcatccgacaaatcagtgcacacctgctttgtgcctggccccgagctggctgcagagaccctggtccctaccctggggacctcttactgatattaactcagaggatatcctgcctgcaccagcacccagagaagacaggtgcccaggcagcagcgcccatgtcatcatccagaaggggtagagacagggtcacctgaaccttgcaaccactaggcagttacactgtgcgtgggtggagaggagcccccagcagctgctggaatttggagcccggacacctcctggggccttgcttttctcatgcacacaatgggcatgtggaggatagtaatttgggccagcgtgtttccattctagcggggcgcagccatcgcagaccttctttcagaaggctggtgtttaaccccacatgagcccctgcctgccagtggtctccaaaactccaaagcccagatggcgtcctccttccctcccatctggccacgggtggtggggggtctcgaggtcaaagtgcggaggtgcccttctgagaccacccaggaagcgtgcgtcttttccctcttcctcccagctgggccctcctgtgagtcaccatgcggagcagccgcagctggggctctgctccaggccagcgtgccctcgcggggagaagcctataaactcccaggcacctgcagctcatcaggaggaggccgagcggggagcctggtctcatctccctg

SEQ ID NO: 103991 - DNA, 379 bp, Homo sapiens
caaagaatctcaattttacctattttacagatcgtgaaaaagaaatcttaccaactggacatcatggatagtgctgtgatgaataacaaaagattttttaaaaaagggaaaaacaggccaggcgcagtagctcgtgcctgtaatctctgcattttgggaggccgaggcaggtggatcacttgaggtcaggagttcaagaccagcctggccaacatggtgaaaccccatctctactaaaaatacaaaaattaacctggcgtggtggtgcatgcctgtaatcccagctactcgggaggctgacacagaagaatcgcttgaacccaggaggcagaggttgtggtgagctgagattgcgccattgcactccagcctgggcaac

SEQ ID NO: 103992 - DNA, 844 bp, Homo sapiens
aaaggtttaaaggctttatagttcacttaacaaataagaaagctaacctagtaacagattattttctagagtttctagtttctagagttttattttctggtagtttccagactttctgcttttggtgagaatggatagatattactcccaaaatttggaagaattgagtccactgaaatttaaccccttgtttgagaaggctaatgaaaaggttatagacagcaaagaaactattataaatagaataaaaatgtgactcaatactttcatttgattcttttcttcatcttatataattttttaatctttaaagatatttttatctacaactttgtaaccattacacaactttgaagtttcagttatgttaaattgaattatatcattacataaactcatgtaatcatcatgtaaaaagtataaaaacatttgtatacatacaataagtagtccaccaaaatatctacaaatagaaaaatgctctccacattaactatggttgggttgtcagatctactcttcgacttcctttttgctcctaagtgcagctacactacaaagagttgctgtcccatagccatcatcaggtaatcagccatcaaaaggaataattggaatttgtgcactttgtgtctgttctaacttgaagaaaggttcctgtgcttctatgttcctgagcttctttgttctgtcgaagattacaaaaggctaatgtttcaagatcataataaaatccatatataggccgggcgcggtggactcacacctgtaatcccagcactttgggaggctgaggcgagcagatcacaaggtcaggagattgagaccatcctggctaacacgg

SEQ ID NO: 103993 - DNA, 325 bp, Homo sapiens
agagggcgagggcagagcatccttgggcggagatgcctttaaaaaatcatccaccgcagcggtagaaacagttttgtttggctttatttatacggaatggtttttcagtgaaatgctgtcttgcttaaaagaagagatgcctccccaggagctcacccggcgactggccacagtgatcactcatgtcgatgaaattatgcagcaggaagtcagacccctgatggcggtggagataatagaacaacttcacagacaatttgccattctttcaggaggccgaggggaggatggcgcccccatcatcacggtcccagagttttcgggg

SEQ ID NO: 103994 - DNA, 680 bp, Homo sapiens
tcatgtataaacatgaagattttggtgccattgaccaaagtgtggaaagcatgaggaaaagaaactaggtgtgcagacgaggtcgggcatctagagagggagttagcgtgttcaattggaaatatgaactttgaggtgtgcaggctgtaaggcagctagaaagttgggtgtggcgttttgaagttaggtcagctagagaaacaactgagctttgagatcctgctgatcagagaggtgagcgctaaagatagctaagtgtaataccccaggagcatcaacttttaaggtggcattaatttgatttattagcccacagaaaactttttaatgataatgcatcaacagaatgcatacaagagctcatcatttataatatgtgctgggaggaatgtagaaaacaatatatgatttttctggtaaattaattgctgcaatatgtgaaaaaatggtcttcatatgcatgtttttattttgtaacaaaaccaaaaattaccaaaataataatttagaggaatcttttttttgacaagaaaatgtgtcagattttgaaaaaatgcaacatctatcggatgattttaataatactatcactccgtgtgcattattttgcttttttgcttaagtcacatcctcatatttcattagaaaccatattgttgcactggacctctatattgagt

SEQ ID NO: 103995 - DNA, 323 bp, Homo sapiens
ctttctcctctcagctattgattacagtaaatcaagcaagcaaaaaaatacttccttctatatgatccctccccttcccctgctgctttttctttcaatcttagtattagctttaaactctcaatctctcttaaaacattcaggggaagataatcaggaaccagaagccagtggcatagttttactagtgtatgcaaaagacaaatttgacctgcatttcaatgaaagacctaagctttatgtgttattggggacttcatcaagggaatttgaataaggaagggacaaagaaatgaatgaagagatggatatgtcaaaaaaac

SEQ ID NO: 103996 - DNA, 781 bp, Homo sapiens
cattcaaattcagagtgctgacagggtcaaggtctctctgaaggctcaagggaaggatccctccttgcctctctctagcttctggtggttgccagccaccccttggcactccttggctggtagatgcatccctccaatcttggcctccatcctcacatctctttctctctgaatgcatttgtgtctaagtttccctcatcttataatgacaccagtcactgaattagggctcaccataattcagtacgatgacctcatcttaacttgattacatctgcaaagaccttatttccaaatgcggtcacattcacaggtactaggggttaggacttaaacagatattttggggaacacaattcaacctgaacagcctaaaatgatacatttttaaggaaaatattctgataattctcaaaattatatggcaaatactgtaatactgtgctgttttcaaaatgaagcacaaaataaaaacattaagagtatattttaataaaaatgagcatagaaccagcaatttgaattgtattcttctgtttcatttgttattcccattgtagacggcataaactctaatatatgtagagattttgtattagatttttcctcactctcgaactgccccagcacttaatttcaaaagaaattcctggcattttcccactacatatacttttcagctcctttctgaacatcgctgcttagcatcaaaattactttcagccaatttgtaatctcccaggtctcagatggctgaagcagagttccttgggaagtccca

SEQ ID NO: 103997 - DNA, 294 bp, Homo sapiens
  misc_feature (172)..(172): n is a, c, g, or t
gtttgcccaaatacatggttaggctcatcttggacttgtttttgttttatatcttctgttacttctatgcacatattaatagatacctaattaatatttggttggaaatcttaaaagttaggattttttttttctttttttttgagacgccatctcagagagaaaaaaaagnaattacgcgtggtggcccatgcctgtcatcccagctactgaggaggctgaggcaggagaatcgcttgaacatgggaggtggaggttgcagtgagccgagatggcgccactgcactccagctt

SEQ ID NO: 103998 - DNA, 428 bp, Homo sapiens
  misc_feature (378)..(378): n is a, c, g, or t
taaacatggagaaagtgtggatcccagtggagatgggatttgaacccaggtctgtccaagcccagggtctgtgttttgattgtatcagaccaccttctgactatatgccagcccccttgctggaatttgtttctcccaggcaagcaaattctcctttctaccgtctattaatattaaaagagtgcactccccatactgacttttttcagttctctaggcttgtcctgacttccccatttctactactagtagtaacagtgataacagtatcgtatcttcaattttttaaagatagttgttcttgggctgcttttggagaccagcaggctactgaatctcatcatcgaaaggaagcctggcagtacataggacagatgnaaatattgatactccgggaaccccccccgcaactagaccccgcccgcact

SEQ ID NO: 103999 - DNA, 423 bp, Homo sapiens
gggccctgctgatcacaaaattttcctctgcaaggttcccaacatctatccaaagagaaatcttcagtaatgctctgattagaaaaggtgaatgtcattatctgggtactgtccttatctatcatcaacacctagatatctttctcagtttaaaaaaaattaatttaagagctaatcagaattctttgagatagcgatgtataacggaaagaaaactatactgggattctgagctccaattctggttctgccctttgttaactgcataatattgggaagatagttaaaccactatcaatggtggtttgtcatcactaaaatggaaaagtctatatttaactcatataattgatattggactttttagggtcaaaaagtaccatcctaaagtatgatgctttggcatgctgagtactttgaact

SEQ ID NO: 104000 - DNA, 533 bp, Homo sapiens
aacaagcgatcccgggtgactgaagttttaactcagagtccaaatgctgcatagaagagcagctgctggcttcatttatcgtgacgagtaaaataaaacataggaaaacagtcgcagttttaatttaagcataatctaaacttcaacttgatccttgcaatgtagcatcataccttatggagaaacatgaagacaaaggttgtaataaaatttggatgataaaaaaagttggatgacaaagaagatgtggaaagcagaaagaggattggtatgcaaaacccatttaggttctgctgctcacagttctaacctcagagggtggagagatacacagcccatacttcacatagtcagatgctgaaaacaagcatctaggccagtgccatccaacagagctttctgtaatgatggaaacactctgcgtctgcaccgtctaatacaaaagccactgatacgcatgtgccacaaagtccttggcatgtgtgtagtgcaaacaaggaattatttcatttaattttaaacaaatttaaata

SEQ ID NO: 104001 - DNA, 520 bp, Homo sapiens
  misc_feature (21)..(21): n is a, c, g, or t
  misc_feature (25)..(25): n is a, c, g, or t
  misc_feature (59)..(59): n is a, c, g, or t
ttagaggatcccgcgggagcnttancctggcacactgtgctgagcatttcccttgcagnctgtgccacactgtgctgagcgtcttcccctgcagcgtgtgccacactgctgagcgtgtaaccctgcagctgtgtccctgctctgggagagttgagagtggggagcagccaccttggagggccaggtggatggggctgggtgaggctgaactgttccccttacacaggacacagtgacaggcagagggcccagggccatggtaggttgggggtggggtgggagccacagcactgccattggaggtcaccagggtgtccatcccactggcaggcagtttggcggtgaatgcagccccagagagttgtccacaagaccatggggtgagaggctcccatggggttggccaccccacggtgattatgttggcgcgggagccgtgggaaggaacgagagtcttggttcagatgacctcggcctgtgtcctcagctgcacagagctgtgggaacaaacaagaccatc

SEQ ID NO: 104002 - DNA, 1474 bp, Homo sapiens
cctataaaacttctttaagtattgtaattccagtctgccccaactttaaaaaaaattcttattaatatgtcagtcattaattgctagtttgggctctcattatttcctgttttttaacaattttgtgataattttattattggcaaattaatacatcaacacttaaatcattgactataataataccttctggctacctctgtatcaaccaaattctgtaggtgcaaacatataccagggaattcttactggcaaaatgatcaatctggagtgtgcatccactgtgaatggagcaaattgccctatacccattgataacctagctttcttagtttgtagatgtaggaaacaaaatagtgacagagagagaagggggtccacagggcatggtatatttatcagcagtggaaaaaaagtgcatagatcatttagtccaagaacttaaaactaaatagagccataatttactttggagagtcattttaatttgtctttggtaccaaggagaagacggaaccaaaaacaaactctccaagtatattcacacattcaacaaaatttttgcatgccttctatgtcgtaggcatttttagttcctggggatttggacatggctaagtcagagaaggccattgctcaccatgaacactgtataccagaaggagagtggggaggagacaaaaaacaaataagaccacttcagacaatcaaagtatcagttaagagaatgaaaacaggcctgactcagtggctcacgcctgtaatcccagtactttgggaggcggaggttgggggatcacctgaggtcaggagatcgagaccagcctggacaacatggtgaaaacccgtctctactaaaaatacaaaaattaactgggcatggtggcaggcacctgtaatcccagctactggggaagctgaggcaggagaatcgcttgaacctgggaggcggaggttgcagtgagccaagattctgccactgcacttcagcctgggtgacagtgcgagactccatctcaacatcaaaaaaaaaaaaaaaaaagaataaaaacagggtaacataatgcaaagtaactgtgtggaattaaaaattgattattttagaaaatgtgactggcttaggacggggataatatgtgaacagaaatctatctcatgagaaagtgctactgttgtcaaaattaccttatctgagtgaatggtattttttttatcttttccacacatgcgtgggaaaggtatgatttctgcatgtaattgcagtttaacccttatttctaggttgatcataggtcccagtttacccaggaaaattccagtttatacctgttgtacctgtgtaattattggtagcactccctttcactcttacaatgtcttggtttggatgatatatggtgaagtttttgttgaaactaaattatgaagtctgatatatttggataaaaataaagaattgcttttcttctccttt

SEQ ID NO: 104003 - DNA, 463 bp, Homo sapiens
gaggaggcagcaggaggccggcagacccagcgaggaagggacagcgagaaatggaagggaggatggggacaggaggaggagggaactgtgaggagggaggacattcagtaagggggacctccctgggcctggcaggttagtcacatccaaggtcccgcccagcctccctgccacctcagcatggcacagcagaggaggaaacccacttgtccaggccatgcccaggcctcaggggaaggaggctgaggaactgggtctgctgcaggagcctggagtgcagcccagcctggcaccctgggctgggctcacagtggcacttcaggcgggagtgggtggtgaaacacatcgccacctgccccatctccacggcctgccctctcccggactcccagcatctaggtccgccgtgatgggggccatcctccttgcagcctccagaagaaagcaaagcacagctctcatg

SEQ ID NO: 104004 - DNA, 92 bp, Homo sapiens
aaagaagagcatagagcatagagtatttggttcattttggtgtccctggacaaaagacttggactcagattggcaacgacaggattctgaag

SEQ ID NO: 104005 - DNA, 384 bp, Homo sapiens
gtttcacgaaaagcagcccctgagacaaagatttggtgcaagtagttaattgagaggtgatgccagaatatggtgagggagcgaggaagtgatcagggaagtgaagaaagctaatgaggtggggggtgttcctgtaggagtcatcacagtgggcaactgggctcactcctgctggggatgttcaagacacagtgtcacacaaagctctggactgccccatgaagggacactcccacctgtgaagggtcgcttgctcctgggacagtgacccccagtaccctcagccttctcccctgtatgggctaagctgctctaacaggtagaggacaccctacctgagagagcgggtgccccggatgggaagtcatcagtgttctggaactt

SEQ ID NO: 104006 - DNA, 373 bp, Homo sapiens
tggaaaagctgtcaatgactggtgcttgtattttgttatcttacctaatggaaactttcagaaaatttcatttaaaataccttataaaatagaaaatactaggattaatctcagtggtatgttatgaagataaaatgatactttaaagtgcttagagccaagctaggcccatcgaaagcattcaataaatgccagctatttcgataattatcaggattgccactactcatcaattgattattaactttcgggttgcttattcctacagtttggttctctttagcttttccttcctttgatctctctctgagctggtgtcaacccaatatttctcaatttcagtgggaatctttttacttgcctggtcaaacac

SEQ ID NO: 104007 - DNA, 375 bp, Homo sapiens
tttttttttaaattagagacagcatttcatcatgttgcccaggctgaccttgaactcatgggttcaagggatctgcccacctcagcctctcaaagtgctgggattccgggtgtgagccagtgctctcacaggggaaaaccatgtacctgtacaaggttcttcatcacagtctacatcaactccaaggaaaacaatttctagagcaatgtggtcagcgatgggaaggggacactttccacaaggccaacaccacctctgggtctggctttatgtatttctgaagtgcctgctattctgagtcatgaaatgagtgacacacatgctcccttggcttcaaggtgactaaattcccagaactgtgggctgggaagggac

SEQ ID NO: 104008 - DNA, 475 bp, Homo sapiens
gtgcctgtgttaacgtatctatttatgattgcattggagacaaatggcaggcttgaacttctaatgcagtgttacccaaatgttacccaaattctgtgggtgtacgagtgctcaagtgtgagaaacactgaagtatgtgtgcagactcaaccctaacaggggaagcccacatgtcacatcacatgtggggcctttgcacccccaccccacctgccgcctcttcccagcttccccatctcagtcatcagctcacagccagcccctcaaagcccagccttgcggtcgtcctcagatccttcactcctgacgctgccccctccctctagccccccagcgagtcctgacagttctgcccatgatggctctctcaccccctccacttctctccacgcccaccactgccatagtaatctgcgtccccatggcctctctcctgcatggtggaacctcctctggcctgcccgtggccactgta

SEQ ID NO: 104009 - DNA, 197 bp, Homo sapiens
tgggctcaagcaatctgcccacctcagcctcccagggtgctgggattacaggcatgagccaccgcccctggcctatttgtagttttaaatcagtattaacagaagccaaatgtgtaagtaaagtcagccatgaatagaaaagttcattaaaaatccatttcatagcttcttggcgttcagtgtaaatacaaaaagga

SEQ ID NO: 104010 - DNA, 406 bp, Homo sapiens
aaataaatttttttaaataattaattaattaattaattaattaaaaaagaacatagaatcatcagggtgtatgttaccaagagacagtatagggaaagagggagagagcccacacatgaaggccgagggacagtgagtgtcttctgtggcctcccaaggagtttgggctttatctgtgtatggtagacagctgttgcaggattttaggacggttgacttttgcattcctgtagtacctggaatcaggtgcagggtctggagtcacctgtaggagtggtagagccctctagtggcagtctgtagaatgcagtgggagaaagacccggaaaaggggagtaattgacgaatgccaccgttggctggcgaggtggctcacacctgtaatcccagcactttgggaggctga

SEQ ID NO: 104011 - DNA, 744 bp, Homo sapiens
ccaagatacagaaaacctgagagaaaggaaatgaatttaaatggatgaaaatagggcgggagagttagagtttctctgtctgccagtgggggaaagtaggcagaagactctgcttccaagggagagacttatactttaaccttggagcataagaagaggaaactgaggctgagagggaggaagtatcttgcccaaggtcccccaggcaacaagcaatggaaccaggatttgaaaccaggacttttcatcttaatcttcctcctgtggatatataagatcattataacatgaggaatttggaagagccaacgtactaaggtattgaactgatccttaccaggatgaaagctcctttctagtgaatgtcactagcctgtgatagacagagagcaaaggcagagatccttgtctcttttcttcactgtggtgctcccagcactgagaacaatgcttggcaaatgggtggaatattttcccagatggggagagagacttatgcaagccattaaggaggctgctctgcctgcgtgtcgaaggaggacatcttcagtgactgaagttttcactgagcagttggcagtcgacgcacatggaggacacacatgaggcctaggaaggcagccgtcaacagaactgtcttattgtctgtcctcatggaattgactttccagtggagaaggcaaagccctgtcctaactatgggagtcacagagatgcataaaataaattccctcatctccggaa

SEQ ID NO: 104012 - DNA, 444 bp, Homo sapiens
ccaagatacagaaaacctgagagaaaggaaatgaatttaaatggatgaaaatagggcgggagagttagagtttctctgtctgccagtgggggaaaggtacagtgccttcttgctttttatcctgtttccattccaggctgtaagattgatgctgtccatgatcataggaaaatgccaaaggctgggcatgctctgactcggcactcagatggagcaccatgcctggccaggctgttctctgacaagctctctggctcctggcattgtagtccccctgcccttttaaaaaacaaaaaacaaacaaacaaaaaatgagcacggcttgtttctctaagaaatatgaaatactttctaaaatttgagcaccacaccaagctttcctgtgagggaggttcaaatcaccataggaataaaataaagcctcttttcaatgcttagctgttc

SEQ ID NO: 104013 - DNA, 529 bp, Homo sapiens
gctgctggcagcatgtaccctcatcctgcctcactccttagcagctagtgtgaacgtgaagaattgagaaatatagtgatcacatcagtgtgtattcattctggtcagcaaactaggcatatcttaagttttttaggaaatcactgttggcctccttttgtgtatcatagtgcaaaacagttttaattagttgaattattatagatacacaagaatttagaaaatgcgtctgggcgtggtagctcacacctgtagtcccggcactttgggagtccaaggcgaatggatctgcttaagtccaggagtttgagaccagcctgggcaacatggtgaaaccctgtgtctacaaaaactaccgtgtctacaaaaaaattagccaatcatggtgttgcatgtctatggttccaactactttgagaggctgtggttggaaagatcacttgagcccaggagttagaggttgcagtgagccgagatcacaccactgcactccagcatgggcaaaaaaaaatgagactcttgtttaaag

SEQ ID NO: 104014 - DNA, 521 bp, Homo sapiens
gctgctggcagcatgtaccctcatcctgcctcactccttagcagctagtgtgaacgtgaagaattgagaaatatagtgatcacatcagtgtgtattcattctggtcagcaaactaggcatatcttaagttttttaggaaatcactgttggcctccttttgtgtatcatagtgcaaaacagttttaattagttgaattattatagatacacaagaatttagaaaatgcgtctgggcgtggtagctcacacctgtagtcccggcactttgggagtccaaggctgaggtgggtggatcatgaggtcaggagatcgagaccatcctggctaatacggtcaaaccccgcctctactaaaaatacaaaaaatcagctgggcgtggtggcaggtgcctgtagtcccaactactcgtgaggctgaggcgggagaatggtgtgaacccgggaggcagagcttgcagtgagccgagattgcgtcactgcactccagcctgggcgacagagcgagactccatctcaaaaaaa

SEQ ID NO: 104015 - DNA, 2229 bp, Homo sapiens
aatgaaccaaattcacaatcaaaatttccaatttttcggtttccttcatcattctcttctcccgttggaatggtatttcatccccgaagccactttttgtatgcttatggcaatcaggaatgggaagatacagtgcagtcggaagtgttactgagagaattttcacattatactatgatcacttgggattcctacataagctgactctgggtcgctttgaagctagtggaccacccacagcctttggaaattctagaaatctttttggacagcctccagatatgggctttgagactgcgcttgccccacagcacacctccttagatgaaattatcttttttgcatatgtacctgagaacgaaccccaggaaacgatctacagcaagaagttcggcaatatacactatggaaaagtgatacactctgggaaaactggaagagcttacataagaaaggtattgcaacatacgactcctaaaggatttttgtcctcagttattgcagaaatgaaagagccctttggattagaagaagtgaatgagagctcttgtttgtctagttcccttttgattaataaagctggaaatgtctataaactcactcttgattcacaagttgttcaggccttgtttgaagatacagatatagagaagactgtagtgcttcccgggtacagcagcttcctcatcacaagcattttagataataagaatgcattagccattgctaccatgcctgaaagtgcacccaacaatatgacctttctaaagagcacatggttcttatacaactttgggcaaaggaatggacgaacatggaaaatatattcaaaaccatgtaattattggtttcaacatgatgattcaccatccctcaacattgtgaaatacattgatctgggaaactcttatgttttaaaagctaaggtcatacggaatgcaaaaggttttcgaatgcttgaaataccactactgactgtgtttgttggaaaccctaatttgttggaagttacagctgaagtcacttttgatgatactgacagttatgtaataacaatttctgcagctagcaaagttttacatcagggttcaacttcactggcatttattatgtggtcagcctctactgagtgctttgttacgacaatggtgccaacactgaaaagcagctgtagttatctcagatctatgcatcacattcctagcaaatttatcccatttgaagactggattagtggagttcataaagacagtcagggttttaacctcatcaaaactttgccgataaactacaggcctccatctaatatgggaattgctattccactcacagataatttttatcatgcagatcctagcaaacccataccaagaaacatgtttcacatgtcaaagaaaaccggtaaattcaaacagtgtgctaatgtttccactcgggaggagtgtaactgcacaaaggatcagaagttttcacatgctgttgctttctcggattgcagggaaaaagttcctcgctttaagtttccaattacacaatatccagtttctttggaaattatcaacgaggatggacgtgtcccattgcaatctccatatctggttactgtgactgaagtgaacatgaggcacaactggaaactgaaacacactgtgccagaaaatattaaaagaatgaaacaattagtagaaccaattcttggtgctgcagtgtataatccttcaggtctcaacttaagcataaagggctctgaacttttccactttagagtgaccgtcatttcaggagtaactttttgtaacttaattgaagaatttcagatttatgttgatgaggcaccattgccattcccaggacacacgcttattgccgtggcaacagcggtagtgctagggggattaatttttatagcatttatgtttcaactgcaaggcatccatccgtggaggacattccaaagatggattagaagaaaccaagagaagttttcaagtatctctctcagtgagctgattcatagatcaaagtctgaagagtgaacacatggtgatcataatttctctttattttctagttttatcagccaattcctagaacaatatatttaaatgttaaatatgcaagctacataaaatcctaaagaattgtcattataattcaaactgctacttgtcaatatattcaccatttccttttcttattttgaatacatagaaaatgtcttatgccagg

SEQ ID NO: 104016 - DNA, 699 bp, Homo sapiens
ccgaataggaacagctccggtctacagctcccagcgtgagcgacacagaagacgggtgatttctgcatttccatctgaggaatgggaagatacagtgcagtcggaagtgttactgagagaattttcacattatactatgatcacttgggattcctacataagctgactctgggtcgctttgaagctagtggaccacccacagcctttggaaattctagaaatctttttggacagcctccagatatgggctttgagactgcgcttgccccacagcacacctccttagatgaaattatcttttttgcatatgtacctgagaacgaaccccaggaaacgatctacagcaagaagttcggcaatatacactatggaaaagtgatacactctgggtagtgatatgcatttatttagatggcatattggtttctagaatctactttttaaattttttgagatagggtcttgctctgtcatccaggctggagtgcagtagtgcgatgacagctcactgcagcctcaatctcccaggctcaagcaatgctctggccccagcctccagaatagctgggactgcaggcacacaccaccaagcccggctaagttttgtattttttgtagagatggggtttcaccatgttgcccaggctggtctcaaacccctgagctcaagggattcacccacctcagcttcccaaactg

SEQ ID NO: 104017 - DNA, 416 bp, Homo sapiens
aggggcaggagccggagctattcctggggtcagcaaaggccagggtggggggcagattttggtgctgtggcttcccgaggatgctaatgggaacctggaggcctcggatttggactcaaccatcccctggctggggacttcaacggacttgtggaaattcccaggaggcccccagccattctggtaccatcatcacctgacatacgaccgaccagcctcccccactgtgtgctgccctctcttcctccacaagagactctggtctttgtttcccacatggtgctcagaggcacccagtataaacagcagcacataagcagagtgatgggctttgtgcccactgctaagtctcggcagaaattctagggaagattctcaacatggtttgtgcagattgagccgaacgctgtgatcag

SEQ ID NO: 104018 - DNA, 306 bp, Homo sapiens
gaccatcagaacagctagagcacacctgaggcacggcctcatcctctccaagtcacttcctgccacagatgctcgggaagtgctgcttctctgtgcagcatctcctgccctcctccatctggtgttggaggcatcttagatgttctctgggacctgaggtctgtaggaaaccccggctgtggacttcacacaagggtcgctctttcccacactccaggtttccctttaagctgctaatttgtaacaggcattcatagaaacagaataagatagagaaattctattaaaggaacttatgtgcttttg

SEQ ID NO: 104019 - DNA, 371 bp, Homo sapiens
ctgccaccctgtttcgctcatctcttctcaagcccagaccaatcaatagctatcaaatgatctgattacaatattttgtggcgtgaatttaccttctgtattgctgtatgagggatctttctaaaactttcctttgttccacatttataaagcattgtcaagaatgaattaatccttataaatactaaaaagaaacagtatttccaaataattaagccattgtctctgaatgtttttatttttgtattttgtcagttgttttgtggaaatctttctaatgtatatgcgaagatttctgctctgagaaaaatatataacaaagttatatccttccatgtacttctctttttgttttttttttttttaagaca

SEQ ID NO: 104020 - DNA, 441 bp, Homo sapiens
ccccgtcttctctttgctcagttccctgaactagtcatgtgaaacttcattttcaaaatattttaccgtgatcctggctcttcagagaacttcaaaatgcttcaaaatgctccaagtctttctttaatgattgtgaatgaagccctcatcctctagtaagaagctacccaagagccaagtggaatagcaacatacacatatctcatttgagacaagagatgttttttcctcgaagctgcttgtgttttgatttttttaaacttgaattttaactgcacgtatgggtttgccattagaattccagttaaaatttggattcttcatttctgtgaacataaggctttaatgggtgactctgtgcacaccatgcatccattgttttcttaaaatgagacacacctgtagtacagacttggatatttacagaatgcacattaagaa

SEQ ID NO: 104021 - DNA, 331 bp, Homo sapiens
tacggtcatagctgactcttgaggatccccatatttttcttgggaagctgcaaatcgtatacttctgtgatacttattttactaactgttgactttgttagtgtgagttttaattgcaaactgtagaaaatcacagtaaatgataattcacagaagatgtttggtctctaaaagatttggatacccagcactgaagtagggaatcttccttttttgtaagctgacgtttttgttatcattcagaatttataaaagaacagatttaagtttatcatattcacaaagacatctttccattataaattttgttgtttatgccctaggtctgtga

SEQ ID NO: 104022 - DNA, 466 bp, Homo sapiens
aggaaaaatatctttatgtactcctcattttgctcattttgagttctttaaacatcaaaaaagttaatccattaactatttcaaataagtcatatatgatttctgtataatatgttgccatggaattttgttaatcacagagtaagttaaactatgctataagagcaaaaagcttgctttgaatgcttctgcaaagccctaggcaacaggaaaagcaatatttcctcccttaattattacagggaggtcactgatcgttacataattgccccgattctcatcctgaggatacaagaaagaatgctctggaagagggctgctttgcaaggacatgatcaggctgtgtcctgggaggactacaatagagctttagaaggtatagggtttgcccacagtttaaactagcttctcaacaatagaactctatgctttttccaactaggacatatgtgaactgtgcaggtta

SEQ ID NO: 104023 - DNA, 422 bp, Homo sapiens
tcaaaaattaacaggtcagtatggataaaagtaagtcaagaaaataaagtgttacaggttgagagaattttaacttcataaagaaacaaccagttgccacaatatacctaaacatgacaactaagacaaaggtatttccttttttaattataagagaatgattgaaaaaactgaagtatgtaatttatgtttaacaaatgcaagaggaggaggatgaaaaggtttgacagtcttatttcctattagtgcaagattttcccataaagcacttgagtggacttttataaaataaatgttattcaatccatcattgtgcatgatagttttacaactaatcacttatggcttttacaaccaagtgttaatgattatgattagaaaaggaacagatttttctgtgtttctggtagtggcttttacta

SEQ ID NO: 104024 - DNA, 207 bp, Homo sapiens
gcagaatgctttaggatgacttattgcttacctcttctaccctgcctggccttccaccggtgggtgagaacatcaaatgccaggagtgtggcccggctccagaacctgggcctgcctgccggggtggttggcacagctgggatgccccatgtcctgttgctggtcccagggtcagcaagtgtgaggctgtgccaactgggacaacag

SEQ ID NO: 104025 - DNA, 264 bp, Homo sapiens
ttgattcctgactactttgttgtgaattgcacaactcacacagtaatgtagcttcacatacagcttgggaagcacataggcatcgaagatgcccgcttcagaaatgtccctgactgctgcggcctccactatgtttcgaatgacgaatttcttaatggccttgtccttgggcacgcattgggcacagttagtgcagcaaataggctgcacgtggccatggccctttttggcacgaccgttgttccttcttttgtcatcttggag

SEQ ID NO: 104026 - DNA, 402 bp, Homo sapiens
gtcgaggaggacttcaacagataggaagaagaagttcatcaggatggaagagatatttaagtcagggagaaacatactagaaggaaatagactaagaaaaatggcagaggtgggatgaagggtagtattttcaggggaaggctggccccacaagatgaatatcactcattctttatggtctacatggatgccagctatcaacactgagctttgacatagtggaatttggcttggacagtattcctttaagaaagaaaaattaaaaacaaaccaaatgcattctgaaaaagacaaaacaaaacataatcaaacaaacaatgttcttctttggatatctgcctcacacacaaagctttgccctctaatatgtctctgctaaggacagaaaatcatattgccaaa

SEQ ID NO: 104027 - DNA, 355 bp, Homo sapiens
agcacgcgggcctctgggcacagctatatgttctgaaaatgaacaccttcatttgttttctctgggcttccaagaattcgggtccacctgaaaagttcgccactccgtgtggcttcatcccttaggaggcttcctgagagcaagaactgcccctcagagcactcctggaggaaaaagggattttgcagataacttggttatcacagagagttatcacagagacctccaaattgttaccccatcttcagactccagaggattctggggtacccccagtcagggcatttggaaggcactgctgagcctagcctcagtgtcctggactgggctccactgtatggtctcatgtgttcta

SEQ ID NO: 104028 - DNA, 473 bp, Homo sapiens
ttcttacatttgaatctcagatccattttgaaacttggtttaagataggagtaatgaaatctaattttgttattttccagatggctttccaattatgtcaacctcacttttcaagaaattcatcatggtgctgaggcaactgtatgtccacatagaaaagaataaaattgtacccccgtctcagacctaaatttatttatttatttattttttctttaacttttattttaagctcaggggtacatgtgcagaacgtgcaggtttgtttacataggtaaatgtgtgccatggtgttttgctgcacagatcataccatcacctgggtattaagccagcatccattagctattcttcctgatgctttccctcccccacacccccgacaggccccagtgtgtgttgttcccccttccttgtgtccgtgtgtttgcatcattcagctcccagttgtaagtgagaacatgtttggtttt

SEQ ID NO: 104029 - DNA, 788 bp, Homo sapiens
cccacccatccccattcagaatccagatctcaccggaaacattcttgttgccacagcctacctctcccttgcacctttcgcttgagtagctccctgggacagtgctaaaagcttcaggctgcctagacaagtctccccaccaagccactccctgtacagaatctgttcttgagctttgtgctctgatattctcgattctaaacatgggtaggctatattccttttaatcaagttcttcaagctgaacctggtgaatggctttgcaagtgccatttttcagggactaaacatatcgtgctacaaaatcaatagatgttatattcaaagttaattatcatttctaggtaaatttaaattaactgagaatttccttgaacgtttttgtttgttgtcatccttatgttttcctccttaagaggcagaccatgtgtcaatcttacaaatccagctatgccctctctttgcaacctcctgagatgctctgcaggactttatgtggtgactacctgtcctccttcagggactgcaggcctgtgattatgaaatagaaataaagcaaaattccccagctcataaaagacttcactcacaccacgtggctgccaaccaataggagtaagatgggctagtgaaaattgcaagtacttgtggagaagattagatgattgattcaaataatgtcactactataaagaaaattttaatctggatttatcaagcccctttggtccaggtctctgaactaatatttagaggcaaagaggacagaaaaaaaaaaaaaaaaaaag

SEQ ID NO: 104030 - DNA, 1310 bp, Homo sapiens
tcagttgtgagatcgtctgatacataagtaccatcaattcgcctctactctatatgcatgtgctgcaattaagtatgactcgggtctgcttactaggtgccgcacgatttcataatacttaaataagaaggacctccatatacgatactgtacaggggccaataacgctcacacccgctatcatttgccaaggaacctaacttccgtgggaggctgtacttggggagagaacttaaagtaaataagaagctgtcaccgtgttaagtataagcataggctctctagactgcttgtgtgagagaaaggtgacgattatggctttgactcgtgtggcattcatgataaagctatagtagtatggatgataaattgaaacattgtaatcaaaacacacatttaaaatgttggctatcatctgtttacccaaaacctagctgagagaaatgattctgaggaaagatggtataagtcaatgatttttctgccttctttttttaaagcacagaagaaagcatatgtagacccctagaatggcagaactgttgtgattcagtggagtgtgttagtccatttggcactgctataaaggaatacctgaggctgggtaatttataaagaaaagaggtttatttggctcacagttctgcaggctgtacaagcatggcaccgatatctgctcagcttctggtgaggcctcaggaagcttttactcgtgggggaaggtggagaggaagcaggcgtgacacatagtgagaaagggagcaagagagaagagggggaaggggccagaccctttttaataaccagaccttgcaataactaatagaatgagaactcactcattactgcaagaatggcaccaagcccttcgtgagggatccgcccccatgacccaaaaactcccaccagggcccaactccactattggaggtcacatttcaacatgagatttggaggcaacaaacatctgaaccatatcatggagtaaggaaagtaaatggcctcaagccctgccccctgtaattcctcttacccttttgggggtccctggagcacctctgggaatcctgaggttatagaacacagcatgaaaaccacagatcaagggggtggttgtctgtgtgttcttctaggtttgaaaagtttgattcttagattcagtttagcaactaagcccttcagtgctccctgcgttcagccatgagatgctgctcttatgattctttgtgtgctgtgaaactgtggctagggtcgtattccttatcctgttcagtcccttccagagcagtagttccaagacacacgatgtg

SEQ ID NO: 104031 - DNA, 429 bp, Homo sapiens
ggagtgcagtggcgtgatcttggctcactgcaacctttgcctcccgggttcaagcgattcttgccagggttcaagcaaatctcgtgccttagcctcctgagtagctggaattacagacatgcaccaccatccccggctgatttttttgtatttttagtagagacagggtttcaccatattggccaggctggtcttgaacttctgacctcaagtgatctgcccccctaggccccccaaagtgctgggattacaggcataagccaccgtgcccagcccccattcctttctaccaacttaaatcctatatttcttcaagtcttggcttaggactctacatgcagtcttccttggttccctcactgcaaatatttactttaaacacgctgaaagattgttaattatataaagggtatactgtaagtagttatt

SEQ ID NO: 104032 - DNA, 251 bp, Homo sapiens
actgtgtgctgtatgctctaccaggggctgtgagggcactgtagggataagcaaggcattggatcttcccacggcactcagcacaagagtgtgcccagagtagatgcttaggaaatgttaaaattgaattggtttgacttgaacttgcacttgcaattctgaaggctatctaatgttagatgtctacaggaatctttaggcttggtcaagaatgtctgaacacatggcctatggttatgggttgtaagcaa

SEQ ID NO: 104033 - DNA, 588 bp, Homo sapiens
  misc_feature (15)..(15): n is a, c, g, or t
ggttgattctagagnatcacagttcgacggagactctcagccacatgcaccaactactcaggaagctgtggctggagatcttattagctctggagttggagcttacagtgagctaggatgggaccactgcaatccagtctggagaagagtgtgagaccctgcctggaaaaaaaaaagttaaaaatgtaaacattaaagggagcggtcaagagtgataggtgccataaacatgtcaaataagctctgaaagatgctgtttgagttggcaattgattattgatcatattattgaacactttataattgatcagtgaacttggcaattgatcattcactggtgactggtgagaatgaagttagtggaaagataggaaatcaatggaaagattgactacagtggattgaaggaggagtggtagattgaatatagaattttctcaagaagcttaagtaaagtgatagcaagagaaaggactgtagctgtaaaactgagattttatgaagttgaaatatggttttttttcttaaaaatgataagaacctttagcatgctgtggcaaagagccaagagagagtctccgtcgaagt

SEQ ID NO: 104034 - DNA, 406 bp, Homo sapiens
gaaaacggtctggaattatataatgatgacggttgtacctctttatgaatatacaccactgaattgtataatttaaaattatgaatattatggtatgtgaattatatttcaatacaaaaatgtttaaaatggatcagatgtggtggctcatgcctgtaatcccaacactttgggaggcagaagtgggaggattgcttgaggccaggagttcaagaccaacctgggcaacatagctagactccatctctaaaaaaatttttaaaacagctggttgtggtggcacatgcaccaactactcaggaagctgtggctggagatcttattagctctggagttggagcttacagtgagctaggatgggaccactgcaatccagtctggagaagagtgtgagaccctgcctgga

SEQ ID NO: 104035 - DNA, 1136 bp, Homo sapiens
caatatatcagaagtataaatcttttgggtgttcaaacacatcacctactttcaattttatcttttcctccgtcctctcccaacctgaattaattaccccgaaataaatgtaaagtaatacaacatatggctgtgctataaataatacttacagtcataataatgtggatgttcaacagtgcttgagactagaagatatcatctagagtaaggatggggtcactgagatgagacttctagcgactcgtgttaaatcccaagctatttcggaaagggctcgaatgcgatggagaaggatttccaatgaggggcatgcaagtcctgataactcagccactgatgcaagcagtaggtgaagaacatgcccacgcgtagtacccctagaatcgtgctaatcagataaagaagaacacttatatgcgggtggtaggtgtatgctgaaaactgtttagactgcagacctattgctcgtacccgggagagctgggttatgggaggatcctgtgtggtggacgacccacgtgatatacccacagctgattaggaggctgatggatagagtaagcagctttgtagatcgcagtcgcttgtggatgcacccaggagactaatgcacacctgtggctgggaaacataaatgtatggggtgtaacggtggggcttcacagccaagtgaatgcccagacactttgaggatgaatcgaggacggaatgtgatcagccataaagggtgcatgcgaagttcaaaggatcagccgtgaccaaaatggatgaagagcgggttgtctactactaaagtgcccaggatgagccgggcatggtggggcatgcctgtgaatccctagattaactcaagtgaaggctgagagcaggagcacttcggcttggaacccgggaaggaacggaaatggcagtgagccccagatcaacccaggcgcataaaggctgggccacaaagaggcagaataccgtctccaaagaaaaatacaaagccatatggcccgcgcccgggtacacacgagaaaactcaactggaaagacaaagggacaccagggccaaaacgagacccgcactgggacccgggccaccacaaaaacaagggcactgaatacggagcccgtcacacaatggggct

SEQ ID NO: 104036 - DNA, 479 bp, Homo sapiens
gagacttcgtctcaaaacaaataaacaaacaaacaaaaattcccaaccatgagcccagacaccctcaattggttgctattgttagagaatccccaaaccaaattcctaaggaaggccatgccttgctttttgtttttgttcttttgagacgaactctaccctgtcacccaggctggattgcagtggtatgatgaaagctcgctgaagccttgacctcctgggctcaagcaatcttcccacctcagcctctcaagtagctgggactataggtgcatgccgccatgcccggctaatttttgtattttttgtagggatggggttttgccatgttgcctaggctggtctcaaactcttgagctcaagctgtctgcctgcctcagcctcccaaagtgttaggattacaggtttgagccaccgtgccccactggccatgccttttaatatatattagtcagaaccttctttgggaaattttttgt

SEQ ID NO: 104037 - DNA, 688 bp, Homo sapiens
agcaagtttattaggaaagtaaaggaataaagaatgtctaccccatagacagagcagcccagaatggttttaggtggatgggtcaagagggtcttttacctcaatggttggctttccttgcttctttccccaaaacacacaggatggctgcagggtcccatcaatttcgttaagtactataaaggtgagatttttgctagtgcaattgactcgaaaggaaacaagctctaattgttgtcaagcttatcttgagatcgatttgggtgacttcattttggaaggtgattaacttgtgagaattttttaaatatgtttttaattctcctcccagagggctagtggaagttacccatgacgactctaaaagcagtttaggaagtctgtcagatgatttcagcccagggaatcagccttaaaagaccgaacatgaaacctgctgtcagtagttcaagtgactgggaaatccactgggattgaactcccagtagctgggttttctcacctgcaaaaccaagactaccgtgtctggccttcgtgcatctctcagggtaaagaaaaatagcaacttataaaattttccacagggagcttagtgaagggaccatgccaagtctgaggtctgtgtgcttgggccctgctggtgactgacagccagaaaggggagagatgaggccactcctccctccca

SEQ ID NO: 104038 - DNA, 470 bp, Homo sapiens
gcaatggcagaattgctccaatatgtgagaacggtcactgtggcggttgccgattatggaagccatgagccattattgttaccatgaaaatacgcatgatttatacattacttctactgttgccatgcgtgaccaaataaggatcttttgctttacattgtttctgctggaacaaagtaaagaagttcaacagtccaagagttttcttttctagtccagttattatgttactttttcagaaagcttaggatcttgataatagttcattcctgaggctgaaggggtttcattattaacaagtcagataattttcatttcagttttgataaaagatttttttttaattttgagcaaaggttgaagcacttaatgcttattgtaataattagttttatattttctattttgattgattcattggttgattttgattttaaggatttaaatagctgaaagtatggaccatattt

SEQ ID NO: 104039 - DNA, 332 bp, Homo sapiens
gtctgaaatttaaaagctgttctaaaataattcttggacgagttttcaattgtagatgaaaacaaattatggaagtaatattttggatgtgtatgataaacatgttggagcatacattagtataatttcccaatgggggttacttaagttttgaagttattctactttgcttattttattaagttatattttagttcttaatatttttcttaaagttcttattaccacataacaatttacatttagaatgtaaatgtatggagacaaacagtttcaaaggccattatcattgcatttctgcattatcaataaggttcagttatttataagat

SEQ ID NO: 104040 - DNA, 518 bp, Homo sapiens
tggctggacaacagactctccaaaaaaatgcatgtgtatacattatgcttattataaaatttactaataaaatgacatggaagacaattaaaattataataaaatatacaatgctcaacatttaaattctatatggccaattgattcttacagaatgcctttttgatttttgtccaactcttgcatctgtagtcaacctgtggtcgcaattgacagaagagtttaattctttctttgtgctcttactcctgggtccctcattgtacagtgatcatcaaatgcaacatccttcatgaaaatgaatagcttcactttttggcatttccttcctttttatgtgtcatagaatacactacattattcttgattttacagttaatttgtaaattgtttctaacccccactagtttataaactccttaagaatgagaagcttgcattaatcacttctatatatatagtgttttgaatatccttggcattcattaaatgtttagtgaattgaatgcgatgtttct

SEQ ID NO: 104041 - DNA, 406 bp, Homo sapiens
ttttaatcgtgactaaaatgcttttgagaaaataaaacttcttgactgttaactgttcacaggttctttttctgcctcagtggctccaaattttaatccctacccttgcccaccacaacttccaacttcctttacatatccttctttttttttttttcgagatgcagtcttgttctgtcgcccaggctgctggagtgcagtggcgcgatctcggctcatcgcgacctccgtctcctgggttcaagcaattcttatgcctcagcctcctgatgtagctgggattataggcatgtgccaccacgcccggctaatttttgtaattttaatagagacagggtttcaccatgttggccaggctgatctcgaactcttggcctcaggcaatccaccctcctcagcctcccaa

SEQ ID NO: 104042 - DNA, 350 bp, Homo sapiens
ggaagagtagtcagagaggtagtaataaaaggataagagagcttcaagaaggaagtagcggtgaagaaaagagcatactgtaaagagatcaaggagaaaacggaggagattaagcacagtcagatggtaagacagtgactgttgggtacagaacagactggtggagcccataccacagtaaggaagtctatccaggagatcattgccagaaacatgattcaaggtgttgagggactaatgtgagagacaacaaccttatttatgacctacacgctgcagaagggcgaatatagcgaagaaaaagagatcttatgaaaataagatctgttattccagagccagagactgtg

SEQ ID NO: 104043 - DNA, 787 bp, Homo sapiens
gagatctcactgtggtcttagtttgcatttgcttggttactgatgagcaccttgtcaaatatttatataccatttgtgtttatttttttaaataaaatgcttgctcatgcttttttgcccatttgcaaaaaaacttggggccgggtgcagtggctcatgcctgtagtcccagctctttgggaggccaaggtgggcagatcgcttgagcccaggagttcgagaccagccttggcaacatggcgaaaccctgtctttacaaaaaatacaaaaattagccgggtgtggtggtgtgcacctgaagtcccagctactcagtaggttcgctttgagcctgggaggcagaggttgcagtgagctgggaccgcatcactacacttcagcctgggcaacagagaaaaaccttttctcagaaacaaacaaacccaaatgtggttgtttgtcctgattcctaaaaggtctttatgtattctagataataatctttggtcagttatatgtgttaaaaaatatcttctttgtggccaggcacggtagctcacacctgtaatcccagcactttgcggggctgaggtgggtggatcatctgaggtcaagagttcaagatcagcctggccaacacagtgaaaccccatctctactaaacatgtacaaaacttagctgggtatggtggcgggtgcctgtaaccccagctgctccagaggctgtggcagaagaatcgcttgaacccaggaggcagaggttgcagcgagccaagattgtgccattgcactccagactgggtgacaa

SEQ ID NO: 104044 - DNA, 375 bp, Homo sapiens
accagaaaatggctgtatttctcctagcagagacacaggtgcaatgctgatctttgaaaattaggagtattgtcttgtcccaaaggacaggtggtaccattggctgggaactgaaatggaaaaggcatcttttgctgtctccatcactgctgcagacacaatcatgacgttttctgctgggggtttgtgtggatgcacttggaaacaggcttttcagtacacttagggcagctgcaccccagttgaaagtgtccccaccaacctggacttgctcaaagggtgggacttatctcttcctccccatacaaagcagcagcatttctgcaccatagaatgaaccagctacagagtatagaccagctacagctgtctatt

SEQ ID NO: 104045 - DNA, 471 bp, Homo sapiens
tcatagcaagaaactggtgatcttcaattaataggtaaaaagcgaaaaagatgtatgaaggcttttcagatgctacatgacaattttaacattaaaaatcatcacgttaaaacatttttgaataaagtctaattgcctcaataacatcttagcatagatcatcagaatatgacttacgttcagttaagactgaaaagaaagctgataagctctgattacaaacatgattctttgccagaatttaattttttccttgaattcaatcaaactagttctactgggtaaatgcagatagtgtctagaatttgtttttctctacatgccacagcatttataaagaatttaccaggtcatcaaagatatccctttggtgcacatgaatagtaatcagagtctcgtatttcactcgttccgtggaactcagatccctcgtggtgacgtctatcaatgtattgagtagctccaggaaag

SEQ ID NO: 104046 - DNA, 401 bp, Homo sapiens
agatcattgttaattaaatattttattcgtgagttcatgcattgttccattttccaagtatttttgcacactgaatgtatgacatgccactcccttatataaagccttacttagtgctcacatgaactaaatgagatagtatttttatctccattttacagataaggaaattaggatttagattaactgcccaaagtcagtaacaccaaacacaaaatggtagagctgaggcctgaacacaggtctttttagttgaaaactctgagctctgcttaatcattgtgctagtaagttcgtatcccaagtttaaagtccttcttcactttggaggatttccatgaaatagcctaccaatcctacttcccatttctgctgcacttggattttctatttcatatttc

SEQ ID NO: 104047 - DNA, 233 bp, Homo sapiens
atacatctcatttctttttttgactttttttaagttttgcctttgaaacctcaacactcttctttgggtaaattaagtagttcaatgagtaggtccctcattattactttaaataatcaagagttccaacctgatttctacaatcatttttattttgtctctagttaaatactacttgaatgaatgagagtggtctctttttccataacaatgcaattttaaatgtttcaata

SEQ ID NO: 104048 - DNA, 738 bp, Homo sapiens
atgagagcaggactggagttggtgagaaccactcggtcacccctgcctcattcatttttttccccaggccccaccactggaagaactttgaggggtgaggtggagactccagaatgggacactcccgtgtgactttaaacttacaggacagacggaggccttcctctgggttgctgagtcacaaggggccaccgttcaaggcagaagagcctcccagaagtaaagagggtgcgtttggtgggagcatctcttgtttaagccaaattctagcaccaccccagggctgctcccaggggtgtgtgcaggaagccaaggatccccgaccgtcagcccagctccttcctacaagaaccacatgccttatacacgaggagttacccaccaccaacaaacaataaaaaaaaaaactaacaagagcacaaaagcaaacccacggtgagtagccagaggaagcacagagaagtagcacaagaaggtaaaagaaaacggagagaggagatgagtggggagaaagagcaccagaacaaccgatggagtgaacaagaacctaaatgacccgaacgaacgaccagaacacgaaagaaaaattctacagacagaaaaaccgaacaccgaccaacggaaccccaggacaaagcacccccgagacacagagaacgcaagaccgaagtcagaagtcgagacgaacaacgaaagaggaacgaagaggaagatcccagaaccccagagagaagacca

SEQ ID NO: 104049 - DNA, 861 bp, Homo sapiens
gctctggctcctgcccagctgctccttgagctgggagccaaaccccagactcccttgtctcaggaactggtccagaatggccttagtagtcagctaagaagagctctatatgaaggcctgggagggctggctgcccagactctggctgcctgggtgggctgccaggacccctcctctgtatagacctgccccagctcagcaaaggaaggacatgtaaggaaaaggcaaggctaccagtggaactgcagtgctgttgggggtgggtgtgagtctttgcaccagctgacctctcctttttctggggctggaaggaatttgatgtcaccagtatcttagagccacatgcctcattcttcaggaacaacctcttgggatcctggaggcatacaaggtctcctgaggccttggacttgtgtctgcatgccagcagatgaggctggaactgtgacagagtgtgagcacgtgcaggtgacctcttcaaatgcttctcccttgttcctttccttgggagtcacactgcctgatttgtccagtggtggacactcttgagcctttgaggtttagtattaggattgccagcataggttggtcaatttttaatttgatttctatgttgatatggtttgaatgtgtgtcccctctaaatcttaagttgaaatgtaatccctggtgttggaggcggggcctggtgtaacgtgtttgggtcaatgggaatggatcctccatgaatgtcttggtgctgtcctcccagtaatgagtgagttcttgctctgaattcatgtgagatctggttgttgaaaagacaggttgttaaaagagagcatctcctctcttgctcctttgctccctctcttgccatgt

SEQ ID NO: 104050 - DNA, 306 bp, Homo sapiens
gtgacagggattgatctgagaaaggagaggtgagggaaggaacagtggccttaggtggagggtggactcaagcccagaaccacgctggcccacccaggtgctgtaggaccacctactccttgagagcaagactcccacccgcattggggttttcgcctagaaacagttcagcttgtccagaatctcccagccttgaagaccccttagagtcctaccttctttgggtcctgcttccttccaaatagatagtatcttaagcactgtcctagacaagtttgtttctccctctgctcaaactctcctttt

SEQ ID NO: 104051 - DNA, 211 bp, Homo sapiens
agacaagctacagggtgaaagaaaatatttacaaaccctatatgcaacaaattactaagatgtagactatataaaggattcataaaacttaatagtaagcaaaaatccaattatggaatgaacaaaaaacacaaagaagtaacttctcaaaaagaatatatagatgacaaataagcttataaaaacatgtttaacatcgttagccattagg

SEQ ID NO: 104052 - DNA, 986 bp, Homo sapiens
cttgattttcccaaggctacgggaaggtaggggccattatcccccactttacacgaggagaagttcaggctcaagaagatgaaatggcttattcaaagcgggtgcttattaagtgacagagttgagatttgaaccaagatctgcccaacttcaaaactaaagtcaccagatgacctcctccaaaatatgaaacctttaggaacaagaagggagccagtgagaaatatacagtcatccctcagtatcccttgggcgatttctgccaggacctctgtgaacaccaggatctgtggctgctcaattccctgatataaaatggagtagtgtttgcatgtaacctatgcacaccttcctatgtacttcgaatcatctctggattacttctaatacctaatacaatgtaaatgctacataaatagttgttatactgtaatgtttagggaataaggacaagaaaaaatgtctatacatgtttagtacagatagaattttattttgcatctcttgaattcacagatggagaacccatgaatatggagggccaactgcatagactgcatatatttccaccctttttccatctcaccatctcagacaaaagtcataatagtatacataactcaaattattaatttaattaaattaattggataaaattcaaaaaaaaaaaaaaaaaaaaaaaaaaaaaattgtgggggggccggggccccggaaaaggtttttgaaacccactccgttgggggggccggggcccccagagaggataaaggagcaccgggggcagacagggcgtgatcccaaggaagaaaacccggggcaaggaacaaaggcgctgggggtatccaccaccgagtataaaaagagccggaggggaacaccagcaagggtatcggtgaacacaaactccagaagagggaggtcaccgagggcaaacaaagggggctaccacaacagaggggcccgagcgacgccggatataaagtagg

SEQ ID NO: 104053 - DNA, 1135 bp, Homo sapiens
cttgattttcccaaggctacgggaaggtaggggccattatcccccactttacacgaggagaagttcaggctcaagaagatgaaatggcttattcaaagcgggtgcttattaagtgacagagttgagatttgaaccaagatctgcccaacttcaaaactaaagtcaccagatgacctcctccaaaatatgaaacctttaggaacaagaagggagccagtgagaaatatacagtcatccctcagtatcccttgggcgatttctgccaggacctctgtgaacaccaggatctgtggctgctcaattccctgatataaaatggagtagtgtttgcatgtaacctatgcacaccttcctatgtacttcgaatcatctctggattacttctaatacctaatacaatgtaaatgctacataaatagttgttatactgtaatgtttagggaataaggacaagaaaaaatgtctatacatgtttagtacagatagaattttattttgcatctcttgaattcacagatggagaacccatgaatatggagggccaactgcatagactgcatatatttccaccctttttccatctcaccatctcagacaaaagtcataatagtatacataactcaaattattaatttaattaaattaattggataaaattcactcaagctttttctctattaattccactggttaatcacattaatgctatgaggtagttttaacattatacaggcattataagtaaggaaatggaggcacagagatgttacgttcccagtaagggattctagccctggaagtctctggctcttaagccctcaggcttaactactaatttatgctacatctccatcattaaggttatctaataaagtgtgtactctcaagagctgaacagcctagcagcaaacagataatgagaaggggaaacaatgcaggaagctaaagaaatcttcacataacaaaaggatcccagggtctttttaagaaacactgtctgaagtgtttgtttacagatcattaaatacttaacagaggaagaaactaaaaaccactgactttctctaagccaatactgattaagtaccaaagagatgttaacataaagcaaataagaaattataataattattaa

SEQ ID NO: 104054 - DNA, 1042 bp, Homo sapiens
ttgaacctggtggtggggagggagggcggaggttgcagtgagctgagattgtgccacttcactccagcctgggcgaaagagcgaaactcatctcaataataataatgaaaaataaaaataaaacaaaacaaaataaaataaaatgaattgagcttatattttgggattccctttctgccaaagctgagtagttcttcatgctctggagcagtggttcttaactgaaggtgattttgctccccagggcacacttgccaaggtctggagttggttgtgagattgtcgggggagcggtctactgcatccagtaggtagaggccattgatgctgctcagtgtcctacaatacacaggacagctcccacacagcaaagaattacccggccgcaaataccaatagggctgagattgagaaaccacggtctagaatccagcaaaatctttcgatcttcaccactgtcgactggggagggctcagcacaactcatgaagccatgggtttcagcacagccagggaaggtccccgagtgaaggtcagatggggagaggcctgcatggctggcaccgaggagacacagccagaccagtagctgcatgctcttgggcaagctcttcccgtctgagtttagtttcctttaaatgccaagtgaagaaagccagccagggtatcacgaaaaccctttctagaactcatattccaagattctggccctgaccctctattctcataacctgggcatgattcaagaaatgtgtgagccaggcacagtggctcatgcatgtaatcccacccctttgggaggccaaggcaggtggatcacttgaggtccagggattgagaccagcctgcccaacatggtgaaaccctgtctctactaaaaatacaaaaattagctggacgtggtggtgtgtgcctgtaatcccaggtactcgggaggctaaggcaggagaatcacttgaacctgggaggcagaggttgcagtgagctgaggttgcaccactcactccagcttgggctgcagagcgtgagactctgtctcaaa

SEQ ID NO: 104055 - DNA, 429 bp, Homo sapiens
cctggctgcccccataatgcagttttatctgcccttttatagcatctaagtctttaaagataaaaatgcaccccccaaaaggaagtttcattattgtttgtagcctgcatttgatgagctagatattttacagatgtccagaacggggcaacttctctcttcaatatgcctttcccaccaaaaaacttaaaaaaactgagggcatgatcaagggtgataataaatcaaggatgaatgctttaatagaggccaaggagaaaaccttggggaaaactaaggcaaagaagatactttgaacattttgccagttgcatttgaaataactttttcctgcagcacgagtcttcttgcatattctagaggcaacacaggtgcaaactgctccctgggacttcctagtcatatttagcacttagaataacttctctg

SEQ ID NO: 104056 - DNA, 90 bp, Homo sapiens
cagaagtcatgagttggggggaaatgctaactggaatccagaaaagaaaaaataatggaagaaatttcatgacgctattgaggactgaaa

SEQ ID NO: 104057 - DNA, 824 bp, Homo sapiens
gtaaatcatgaagggcctagtatgtaaggacttaattttgtgaggcactagtaggaagttgcagagcaacttgatgcagagttgtggtagtttgtcctttcagatgagacagatgttggggatgaggagggagggcttcagcatgattggtgaattggtgcttttcacagtgacagggtgttcctgaatgggcttaggagtgaattttggacatgatgagtgtgaggtgtcagaaggacatggaggtaggtggtgatgtctagcttaccgttagaaataaatagaggtcaggtgcggtggctcacactggtaatcccagtgtttccggaggccagggcaggagaattgcttgaggccaggagtttgagaccagcctgggcagcaaagtgagaccccgtctctaaaaaaaaaataagaaaaattagctgggtatggtgaagcgtacttgtagtcctagctactcaggaggctgacgcggaaggatcacttgagcctaggagattgaggctgcagtgagctgtgatcaatgcgttgcactccagcgtgggtgacagtgtaagatctatctataaacaaaacaaaacaaaaagccaaatgaattgagtcactgcagattgaaactggtctccagtcctaaatcacagtggaaaagttcatacatttctatcatttaaaaattaaaattatggggatcctcttttctctccaccctcttccccaaacctaagaggtagaagaaaaggaaaatgttacaaccaacttttagagggaaaatcatgtttacttttctctttaaaaatttggagcaattgaaataaactagg

SEQ ID NO: 104058 - DNA, 533 bp, Homo sapiens
agcagtgctggaattacaggcatggagccactgtgcctggcccttgtttcacttttggatccttgtggttacaaattgggcccacccgagcactgcgaggtcatctccctctctgctgattagtaacctcagttcccttttccacgtaacctaaggcattcacaggttccaggggtgagcaagctggaggtttttccagtaatgttcccttgctgtcctcagatgccatccgggatcccacattgcatttagttgtcatgtctccttaatctcgtctgcaaccatttctcagcgtttccctgtttttcatgaccttggcagttttgatgagggcagtcatctttttttatgtctttgtgactgaccgttcacacattggcatgtttgtaaagcacggtgtggctgacgtgtggctcacctgactgcttttccaaatggggtgcagtgtgctctacagtgggagaacagctttgtgtcttcttttagctggaaggagctacatgttttatagaagggacttctgaaactagaca

SEQ ID NO: 104059 - DNA, 417 bp, Homo sapiens
atgctttcctctccattatttagtggggtcaccttggcctgtataaatcccacttccagatcccttcccccatcatagtgcatgttataggctcttgtgtcatttctgtcttaataccttttagtgtaggttaccttcccctaagtataattaaacaaatctataattactatgtctgttcctgctttatttcctttatagtggagatttgttgactatagatagcttgaatgtctcggtttactttatagggatttttagaggaaaaagtaaatatttctttgaaatttctatgtacttatcaagggatatagataatttgttttctgtctttcagaattttgatggggatttggtttaaactttatctgctctttgagttttatagtataaatctttttaagaaattgtgtttat

SEQ ID NO: 104060 - DNA, 378 bp, Homo sapiens
cgtgccagggccctcggtagcccagacctgccgtactctaccagccgagcacagcccgaaggccagggaacaaacacagacggaggccgagtgggcccggagcagggtcttgccgcgaagggcctgggctcaacgttagagcgtggcgcgaccctattctggctgcaacgagaggggtgaatgaagtgggcgccggggacctcccagaatcggagctccagacgcgggcgggccaggggccgccggaaaactgcgcgcgccccgccctaccccgtccggccccgcgtcgcgttctcctcccccactgcgcagccctcggctgccccctgccgccgccgggcggaccctgcaagccccgctgtccccgccttcgcaccg

SEQ ID NO: 104061 - DNA, 382 bp, Homo sapiens
gataggaggctactagtctaatgtcttctttgcccctagctaattacatggcctcaggaaaatcactaagctctctgagtttaaatttcttaatctaaaagtgaggcagtatattgttatttcctaaagtttggttcatgatccatctatttcaaaaacacctgggctgctttactgggatctaccccatatcatctaaatcagtgtctctgtggttaggcctgggaatttgcatgttaacaaattcctcaagcttttaatgtgttttaaaggttgtaagcactggactgtataaggggtttcttttagcttttacatgttgtgattcttccctgtcagtcttgcatgatggagttggtgctaagaaagagtaaaattgtaa

SEQ ID NO: 104062 - DNA, 302 bp, Homo sapiens
gcatcctttgtcactgagaatgatgacagaggtggtgctggctcctactgctgctctgaaaggctgggttaagaggaaagcggaggtgggagcagcagttctgcttttcatgacaaccagggaataggggaggtgggagccaacaagggacctacatgaacacccagtctgtgtcttcgtctatattactcactgtttactcccaggctctcacaccttatcagaggggaaaagtaaacctcccacaaaacaccatttggttcaactacagatgtattttggatatcttcaatcaacgcttg

SEQ ID NO: 104063 - DNA, 231 bp, Homo sapiens
ggaagcctcctaacacccctgctcttcgttaggctgcagctgctttcctgtccatgatttaagcatccttagatcccagctgtccaggaagctctccccacgcacctcagcctaagtccagcctcccactgagctcccatggcatgactgtccaggccccagcgcccttgtgccctaaccggggctgttccatgttgatatgtggtctcctcaggcatggtgtacactact

SEQ ID NO: 104064 - DNA, 437 bp, Homo sapiens
ttgcttaaaccaaaacggattcctcttcctctcatgatccaaactcctgagtcccttcaccttttgcctacactatcacagtgacctccttgctgctttcacactggagagcgtgggctccctgtgatctactctccacatggcagccagtgtcatctggtaaacctttgctgaaaccctgccatgcccttcagttgccctggaaacctgaactcatcctcagcctgctcgcagagccctcatgccgctgggacgtcacgttatgtccctctcctgctggcccgctgcacccagccgcaccacatgccggccgcacctcacacacgctgcctcttggcccttcctcgaacacacggcgcttgtccttgttgtcccctcatctttgcatggccgatttctttttctcattcagctctaagtttaaactttcaacagtt

SEQ ID NO: 104065 - DNA, 333 bp, Homo sapiens
cacgggatctcatagatttatagaatcatctggtctagtgggtctcaaacttttttaaaaagcagtggaatccttttgtccaacagaaccccaagttctggctgaagtttcgccgcgcagtcttcgccaccatgccgccctgaaccgtggtctatttcccagttcgaggccgctgcgcggacctgagcatgctgctggcagatcagggccagagctggaaggaggaggtggtgaccgtggagatgtggcaggagggctcactcaaagcctcctgcctatacgggcagctccccaatgttccagtgacggagacctcacccttgtaccaagtcc

SEQ ID NO: 104066 - DNA, 142 bp, Homo sapiens
gaagctgcaagcagataaatgtgtccttagtcacatcttaaataatctcagaaaagaattttaccaaagatcaatacagaaaaggctttgtctaggtccagaagacacactatgctaaagaattataatagcggcataaaac

SEQ ID NO: 104067 - DNA, 403 bp, Homo sapiens
tgttctggcttccccttgtttcccacggccagtcattcaacaatgacctgattccattctagaatccctctcctccttgagttcatctcttcctcagcaagcctctgctctgattaacctccatcacctattttctccagtacccagcttttaaactgttaagcagtagcagagaaaagtaataaaatctgaacaggtctactaaaaaaagttatgctacttactctcagctatgtcctcattcactgttacttagcaatccttttattcattctaattggttcaatcaacaaattctaaaaagctgttgtgtgccaggaattttctcacctccaacaaacttacaaggctagtctacagagcccctctagcactcatcatccaacatttttctaacccctct

SEQ ID NO: 104068 - DNA, 334 bp, Homo sapiens
agacactgaaggattttagtcaggacagaaaatacatctcatttatatttcaaaacttatattgaaggccagggcaatcccaggaatctctcaagggagataggaaaatccaaatctatgctccaaagcccaggcaccactggaagacttttaattaataaaatgaaacaagtggagttccttcacagaagtgttggctgtggttcaatttacattatagtatgtggaaaattttccctttctgtctgctagagcaggaaaatttccttccaactatatccttccactccccaactctggggcatggatggaactaggatcatagaattctttt

SEQ ID NO: 104069 - DNA, 727 bp, Homo sapiens
actcatgtgcttacttagtcctgaatggagacaccgtcatcatccacatagcccactgtcgtaatccatacaggctgctacaaggaaatgcattagaccaggtagcttataaacaatagaactttgtttctcacagtcctggaggctgagaagtgcaagatcaaggtgccggcagtcttggtgtctggtgaaggcctgctttctcatagaggcttccttcttgctgtgtcttcacatggggagaggaacaaacaagctcccttgtgcctttaataaggtgctaatcccagtcatgagggcagagtctcatgtaaggcttaacctcctaatacatcaccttgagggttaggattttaacacatgaacattgacggaacacaacgttcattccatagcaccagggtagtctcctcatgtgaaggtctttacctgagtcacatgcatgatgtaccattttcatgtaaggttctaggaatctgtggacatctttggggggggccgttattttgctgatcacatattacatatattttaatattctagactagtatgaaaacaatgccacttccattgctttatatatgtatatatatatatacacattgtctaatgctataattaaaaaaaagttgtagacacaaatatacccatttaaaaaaaaacccattttttgctattttactttatactgccaactcctttttcctgaaactgcttcaactctgga

SEQ ID NO: 104070 - DNA, 421 bp, Homo sapiens
cttcctttgtaaaacagtgcttttacttactttacctatctcacacagttgttataaagaataaaattcagtctttgaaagtatttgtaaatgctatacacatatgagttagcattattttcattcattgaggttacctttaaaatattatttataaatctctttcaaaatgattttgagtgactctcaaaggttttctgtaaagaaagccaatacctctatttacaaactgctttctaaaagtaagtgtagtgttcacttcagtagcacatatactaaaaggtaagtgtgtattttctagtctttatgcatagatgctgtgatttcagggcagttgcaagatcctactagaccaccaatctttcttctttttagtgctgatcttctctcctacctcacctgaaatttatcaattagcgtt

SEQ ID NO: 104071 - DNA, 457 bp, Homo sapiens
gcagacgttcaagccatgtagggccattccctcatcaggccccttagcagatgggccctggcttctcttcagtggaaacagttcagtgtgcacctccggggtgccagggaagaaataaggccctttagggggttgggtttacgtccattgtcacaagagtggcacgaaaatgttctgcctcttaggacccctggctgatggggaacatcacagccaacttagttcagagtaaaatagagcaaaattcagtaagaacaaaacaataatgacaatccacttattcatatttgtctaccagcctgtcaaaacaataaaggtatttaaaagtgtatctggaatgagaaatgagaaagaattacaagaaaaattttcaaaaaggagggtaatgagttgagtattttcttatgaattcttacaatatgacaatatgcaagccatatgtggagacgggggtcca

SEQ ID NO: 104072 - DNA, 409 bp, Homo sapiens
ttcttcaataccctgcgtctccctgaaactttctaatgggtatgggtagtatataagaaagctattgacatttatctgctttgtcctatagctgactatattattcccttattaaacttttaaattatggaaccactatgcttttactagagaaattttaaacacacacataaaaattcagatcatttgcagtcctaccatcaaagacaactacttttaacagctgctatataatttttctgcacggcatatcataaattaaaatatattttataaaaataggatcatattgtgcatgttgttttactgtcacctagtaaagatttagtgaatgtaggttaatactaatgttataatcaacattattatcaactgtcaacataaatcttcctgcgtaaagatcaggatt

SEQ ID NO: 104073 - DNA, 245 bp, Homo sapiens
gaacccaaataatctgaatctaccctcttctaccacttccaagctgcttgaccttggggaaaaggaaggtccttatgtcatagtctcctcttcagtaagcaaaggataacaacagtaaccgcaacaacaataatacctacttaataggactgttacaagaattaaagaaggtaatttttataaaatatttagtgtctggcacataatgagtcttctattaataacatctattagttcatccattc

SEQ ID NO: 104074 - DNA, 352 bp, Homo sapiens
cccacccacagtctcttctctcctatttgaaacacaggactctgtctcctcctagatacacaccaaggttgaacaagcactcctaggggaataaagccactagttgagccatgccaatcaaatcctctcttttggaaacttgaacaaagacatagagattacaatgagaatttgaaggacgctgtataagatactagactgacagccgtgcatggtcatgagcagcccagggatgaccactgggagaagagaaggcggagagcagcagagatcacagaaatcatgaggccctgaaaagtgaagatcccgccctcactttctcactttcctgatgcagtcatgtgaaatttgt

SEQ ID NO: 104075 - DNA, 191 bp, Homo sapiens
aagaagaaaatgaaaaacatttaaaattttataaaattccaatggctcagcaacatcacactccctagtgataccttgacacatagtaggtttacaacaaatgccgatattttttccttcatgtagaaggcgaatggggaattacaggggcctttttattttctctctcatccatatctgggctttctgcc

SEQ ID NO: 104076 - DNA, 428 bp, Homo sapiens
gtgaccagggcaggctttgcttaggtgtcctaagatgatctgaagacggggaggcctgggatggttgacggcacctctggctgtggaacagcataagcttgctatgggagtgagtgtgtctgggacagctttaaggagcgtggtttgcctgaagccaagggccgggtttgggggaagaaagccttggtgtcggatggggaaagatagggcgggtcactgggggtctgaatgggagaaggctggactggacctttcaggccaccgaaggattcaggccgaggagctgcatagtgaccgagggtgatgaagctggttttggcttggggatggctggccagaggtgggagaacaggtgtctagggaggcttcttggacaaggggctctgggactgagtcttgagggtgggcatggtttggagagcaggggc

SEQ ID NO: 104077 - DNA, 422 bp, Homo sapiens
agacagagattaaatatatatgtcttttcttttttttttgagacaggatcaggctcttttgtccaagctggagtgcagtggcacaatctcagcttactgtaacctaagcctccccagtccccagctcaaggtatcctctcatctcagcttccctagtagttggaactctaggtgcacaacaccacgccagttattattattattttttaattttttatagagacaggttttcaccatgttgcccaggctggtctcaaactcctgagtttaagcgatcctcccaccttggcctcccaaagtgctgagattacaggcatgagccactgcatccagcatgcacgtctctttcattgactgtttctgagatgtatccttcacaatgaaccagtaataggaaatgaactggccagatgtggtggctc

SEQ ID NO: 104078 - DNA, 393 bp, Homo sapiens
tccatttctggctttaaaaagcactaccaagaaccaggtaagatggccagctagatgcagccaggagatgcctcttccaccaagtggaaccaaaatatagagtaaacaatcacactttgaacaggtcttttgagagaaaacattgaaagttgatagaaaggagacacagacaccatagatgaagagggcggaagctgggtagcctactctgagtccctgggcaccaggactgtccccagtcctgagctggacctaaagaaggggttaaggaattccagggtactacattctcaccatagacctctgggatcctagctacaggagctcccatgacccccatagatctttgaaatggcagaagccgcctcccagagatcagggagaagcacagct

SEQ ID NO: 104079 - DNA, 224 bp, Homo sapiens
catgtactactgctacactcatccctcactcccacccacctttcggaggtaggccgcccatcactagatttagcagagcatccgctgactgaaatgagacacagctgggaggcacccaccaccacccgcctttgtagaacagctacccaaaaagacaaggatagcaagtcccctgaagcttttccaatctattcctttttgtgattgttttccttttgaaatag

SEQ ID NO: 104080 - DNA, 331 bp, Homo sapiens
attttttcatcttcccgtttccttcctcttctccaggacttccatcttggaggagcaggaatatggtttatcatttgagagtgatataagtcagcaaatacagaatatctgttcttctggtgctgtattccgggagaaagccatagacccttcctcttagggagctgagataggatagtagggaggcaggaaggtagaaatacacatgtattctgagtgccagggtggacgcctgcatgtgagattgttgatacaacaagagagggagtgggagttctcctgggcgggtcttgagctgagatttgaaagaggagtgggtgttttgttgtat

SEQ ID NO: 104081 - DNA, 658 bp, Homo sapiens
ggctctcacctggggcctgagttcttcttgagttccttttcttgctcatgcgaggcttgactcaggacctcactgctctgagtgagaatctggtgggagggaaacggggtcctaggcagctgtgactgctgtgggcattgtccctctagcctcagttctgtaccctcaccccctccccgtggagatgctgcaggccccctgagctacacaccacactgcctgggagtgtagggccctcacaggcagcaaggagtgtggggcctgggtgggcttgaggtggcttggcgaggtgtgggggccacatgatggagctttcttgcagaatctccctaagcgacgctctgccagccctacccgatggctccctgtagctggggctgctactgatcccccactcttgctgccaagcacaaaagcagcccttctggaaatgcaaatggctcggctcagccgtcatctctcctaattttggatttggtaactgagctctcagaaaccaaattgcaggaatctcttttgtgttaggaagatgaagttagtttagcatttttgtcagtaagtgcatatcagcagcaattccccatcgtttgcctccccagcgccttcatgccctaattttcccaatgtgaaataaaagaatagatgtctgtgatttaaa

SEQ ID NO: 104082 - DNA, 662 bp, Homo sapiens
ctctcttttaaaaaaatcaatcttttgaaaattaccccctaaaatgcctttctgacttttttctgataacctctatgaaattttaataaaacagatatactatctattgtttacattgttacatatactatctattgtttacttatactgtaagtatagctgttccttgtatataagaagtaagatttttggctggttacagtgactcacgcctgtaatcccagcacttagggaggccgaggtgggcggatcacttgagtccaagagtttgagaccagtctgggcaacatggtgaaaccccatctctacaaaaactacaaaaattagccaggcgtggtggcacgtgcctgtagtaccagctactagggaggctgatgtgggaggattgctgagtctgggaggtggcagttacagtgagctgagattgtgccacagcactcaaccccgggcaatagagtgagaccttgtcccaaaaaaaaaaaaaaaaaaaaagtaagtttttttgccccctccaagaggtgattttcacccccttagccccactgagagtgatgctataaacagaaaagaatttgaggtgagtgatgtccgtgaatgtagtaacatctgacatttgggataaagccaatctgaaagagtgaacaatcaagtggtagaatgac

SEQ ID NO: 104083 - DNA, 384 bp, Homo sapiens
tggttcttgaaggtcacagtagttccttgactgctaagactacaatatctgcaatagaatgtgtgttttctataattgctttaaacaggtaaacaccagtgctctaatcaaaatgaccattcaatctaaacagaaaactacttttttttttccaggagaacatgtagtatttaacaaatgacatcctaaggttgtaaaggaatggataatttaaagtagctaatgggaatgacaatgttagttgtactgccccaaatctaactgccaataagaatgcctctgtagttttaccacctgaaatacttccagtataggcagctaatctaacctgcaacacagccaattcaatcattgctgacactttcaccatcaacactgatcact

SEQ ID NO: 104084 - DNA, 469 bp, Homo sapiens
tgatatgctagctaactttatttttttcatacataaaacaatgtgtttaaccccaagtgtattaacaatgctttgcaatttcctgcaatgctcaggaaatatctaagactactataccaaaaagcagattgaatttgaattctatttttacatagtaaatataaaattgtattttatagtcctaaaattatatttaataaatatagtgtgaacagggtattattttagtagtttctgtcatgaaatacttatgcctcacaaaaccaatagtgtaaaaaaaatttcaagaacacatcaaataagttacagtttaataaacaatgatttgtccatgaagagtgattatgccttaaattaatattgttgcaaggtcaaaaagttgacattggtaacacaccactcttgaggatacagacattttggcaaaaaaataacccattacgggatcaaattagaaggaaagttagta

SEQ ID NO: 104085 - DNA, 910 bp, Homo sapiens
agagtctgaaaattaatcctgtgtgcttatctcagaagcccttgtgatctctaagcatccctcataatgctttcagaaacaaccaattagaaaccctactggaaaattatgatctagtctctccctctccccaagtgggtcacattttaagtcaagtgtcgacaatagtacttactcaatgacttgattttttattgaacttagcaaaattttaatttttttaaaccattaacttaaagatgacttcagagacttcatcatgaggaattttatcttttttacttttgaacattatctatttttccctcaaagtttctgttgtactctgaacctgttttaatgggaagcacagacatttccatcatctcaggttcagaaaaattaaaaaaaaattttattatggaaaaataaacatatacaaaagtagagcaaataggataatgaagccccatgtatgcatcactcatcttcacccattttcaacacatggccagtttttcatttatttcaggggtcaataaactttttctgtgaagagctgcatagtatatatattttcagccttgctggacacatttgatctttatcacttattttatttttaaatcttttgaaaatgtaaacatcagccgggtgcagtggcttacacctgtaatcccagtaattggagaggctgaggctgccagatcacttgagctcatgagttcgacaccagcccaggcaacatggcaaaaccctgtctcaacaaaaaatagaaaaattagccaagcgtggtggtgagcacctgtagtcccagctacttgggaggctaaggtgggaggatcacttgagtccaggaggcagaggctgaagtgagccagtcacaccactgcactctagcctgggtgacacagccagatcttgtctaaaa

SEQ ID NO: 104086 - DNA, 376 bp, Homo sapiens
tatttatttaaaaaatatgagcatgattacattaaactatatattatacaatctatccaaagtttaactaacttaaataataaaacctggttgagcagggtggctcacacctgtaatcccagcactttgggaggccgaggcaggcggatcagttgagcccaggtgttcgagaccagcctggccaacatggcgaaatcctgtttctacaaaaaatacaaaatacaaaaaatttgccgggcatagtgttgtgtgcctaggaggcacaactacttgggaggctgaggtgagaggatcacttgaacccaggttgaggctgcagtgagctgtgatgtcgtcactgcactccaccttgggtgacagagtgagaccttgtctc

SEQ ID NO: 104087 - DNA, 358 bp, Homo sapiens
tggatattaactaagtttgggcctaacaagtataccttagtgcccaactgcctcattcaactcattgggcagttgttgcaccgggtggggaggtctctgctgggatcactgaaccaaaggaaggcagaatcagcaagacctgttgctcatggccttttacccactcacagagtctgactcaggctcctgttctcattcagggtcagtcatcctttcagtctcatcccctggatctcaactcctccaccttcctggacatcttataataatttatctcgtgcctccttcctccttccagaatgacaaaattagcatcatattagtcagtgggcttatgtgccagatagctcagttgttt

SEQ ID NO: 104088 - DNA, 384 bp, Homo sapiens
gggatagtggcagcacctgtctcactaggtggtcagggtgcctagaacagtgccctacaggttgtgaatccctgaatagtgattggtgcttcttcctccttctttgcttcctcctccttctccccttctccttcctgtcattttcggaattctctcagcaacttcagcaaagagtgagcgctctccaaggctaactcttcagccacggccccagatagagactcgctggcccatctagggttgtgcacttgtcctggagacaaaggttgggtggggtcaaccctacgtaaagcacatggttaggaagggatattttccaaaaggaaaatcaggatactggtgccagaaaaagggggaaaggcaaaaaacagcagctgtcccctt

SEQ ID NO: 104089 - DNA, 161 bp, Homo sapiens
aatttcacagcctcggggaaagacattgtttcccctaaagatcaggtcttgaagttggaagttgtcatttggtctataacttacactaatgaaaagcctcttagagtgcttactgtgtgccagacacattaatcatagtagtaacagctgacatttgagcg

SEQ ID NO: 104090 - DNA, 120 bp, Homo sapiens
acgcatcgtgcctcagtcatcgagagtgaatcagaaatcctgcaccatgagaagcagtacgagccattctactcatcttttgttgcactttccacacactatattacaacagtttgcagt

SEQ ID NO: 104091 - DNA, 282 bp, Homo sapiens
agtgagctgatgatcgctccatggcactccagcctgggcaacagagcaagactaagaaaaaaaaagaaagaaaaagaaaaagaaaacaaagtaatgtaaaaggtgttattcaggctggggacccccaaagtgctgggattacaggcatgagccccagggcaggcctaggatttgcattacaaggctctgcattgttcctgagaactggagagagtgctcaatctacctttcgctattgagcaacattcagaagtcagttttaaatctcttatcttctgcata

SEQ ID NO: 104092 - DNA, 331 bp, Homo sapiens
agctgttaagatgccgttcaaccccaaggttccacgagtgagtgatcgcaattgctgctgcagccccgcctccactggggattattatcagagattgattttccactccaggctctcccgtttctagtgccactgctgaagtcctaagtcactgcctcctaactggtcctcctaccctaactcctcccagacaggcttcctgccctaactcctctctgaccagccctcctgccctgacttctccctgaccggtcctcctgccctaactcctccctgaccagtcctcctgccctaagtcttctccctgacctgttctcctgccctaagtctc

SEQ ID NO: 104093 - DNA, 228 bp, Homo sapiens
tagagcccgtgaggctgggtctcgggcaagagagctgggcatgcgacatctctcagggaggcctctggtccagggaccctgacagcatctctgcaacatctgcagctggactttctgggttcaaatcccacaaggtaactgtccatgagtcacaaaatgtccctggactctggatccccaaaaacaaagcaagcacagtgatgatggtcacttcaaggagctgctcag

SEQ ID NO: 104094 - DNA, 390 bp, Homo sapiens
aaagactttatgtctcaggttccatgtttgtgaaatgagaaataattatagctgctgcacaggcttgtcaaagaggattatataaagagccttggtgtgacccctagccatgtccttttcagagtacgtggctggaactcttagctccttcagtctgacattggagatgactagagaccttgaaccaagtgcccaggaggcagaaactctccaaccactacatctctgtgctggcctccaagaaggattgcccacattgtgggaaagatcatttttattctcagaaaggagcccctggtcagataacttgcttggaagcatctgggtttccccagtgggctatcagctgcctccaatgctgagaaaacaaagtgtcacatcgctctgcag

SEQ ID NO: 104095 - DNA, 206 bp, Homo sapiens
aaaaaaatgacgataaccaacgcaccctcacacttctttgagccctctgctgttctaggtttacaaagctgggctttcaattcccttcccatgtcacctcgctgtcttcctgagttcaattaaagaaaacagtaacagcaagaggctgacgttattggaaccctttttgggccgcaggtcttgcttctacgaggcccttttgaagt

SEQ ID NO: 104096 - DNA, 370 bp, Homo sapiens
gtaggaatggagaagaaataatgatttaaaaacatttaagggatccttctaacaaaacccagtgattagtggtacatctggaatgagggattattccaaggtttattatttagataataggtgactcatgcagagactaaacacaggaaaaacaattttcaggaaaaattagaaaagttgctatttatacatgttaaatttgagttgtctataacagatctgtctactgatatcaatttggctatcgaaatcaggagtaaaattttgtctaaagataaaagatgaaaattagaagtgcctaaaactgacaacgggtctagtatctagatcatccaaggaacttctgcaaattcatcagactaaaaagaag

SEQ ID NO: 104097 - DNA, 315 bp, Homo sapiens
tctgcctttaccttggagtgtccagaaaagacagcaggggccaaatgacaagccaaagttagtgtgacatttccacggagtaggggttgcaaaattgccgttggaaagaggagaaataaaggccatggaaagaaactctagggaaatgacaggccttattcacagactatgtccagaataaaggagccccagggtcaagggtcaacagtaggcctgttggaaactagggtcccattggagtcaggaaataaaaaattcaagtgattcataaaagtcttgaaaggcatgacaatttctaacagttgctagaaatgg

SEQ ID NO: 104098 - DNA, 142 bp, Homo sapiens
gctttctgtgtaaggacctacagaactggacacccatgctgccagcactataccacaggccaggcggagggcaggcctcacccagggatagctgtggccatgacaagcctctctcccttccaggccttggcttcctcatctg

SEQ ID NO: 104099 - DNA, 119 bp, Homo sapiens
gcttttagcctcccaatacctggaaacctgctcctgtcaagaaaggacccattatctctttctttcccacgagacgtggagatgaggaggggtgtgtgcctgccgagatgatatcaaag

SEQ ID NO: 104100 - DNA, 142 bp, Homo sapiens
aaaaaaaaaaaaaaaaaaaaaaagcttttacgtaggcctctatgtaagaaaaacttcaggaggaggcgttccccctgctttctgaggacgccctactgcgtaactggtagctttcaataaactctctcgcctcactacactc

SEQ ID NO: 104101 - DNA, 338 bp, Homo sapiens
gcagatttcagcaaatatttgccaattgatctcttagtttagagagttggtaaagtattttaaaattgccacatctcattttccaggattgaaattcctatcttttttgaaattcacataaagtcccatgaatatgattttgttggtttcagatagaatttcccttcaggacaatagcattctctacttaagaatgtgccagctgattggaggtccagccctttcctatctgcattagttacatttaccacatgctttctgagctgtctctcagctgtggctaccggatcgaatctgctggctcccaagtatgcgggggctctttcacatgcaccccc

SEQ ID NO: 104102 - DNA, 793 bp, Homo sapiens
cggcgcgttggagcccgggcggcgccgggaacagctgccgcggcgtcctctagcagcgcgcggctctcccgggacctgcgccggccgggggcggggagaggcggggaggggaggccggcgggcgggaaggggcggggagcgcgctcctgcggcggcgacggcggcggccgtcctcatcccggcgcttgagaggacgcggggctgcgcaaatggcttgtcccgctctcggtctggaagctcttcagcccctgcagcccgagccgccccccgagcccgccttctccgaggcgcagaagtggattgaggttgctgaatgctataaagccaggacttgtaaaaaagatcaatagattgcctacccccatggcaggactggacaatattatcttattcttgagcaggttgtacagagctcggccttaaagaatctcaacttttggacccgagtgacctccaggatacatccaacagagtaacagtcaagagccttgattatagtaggaagctgaaaaatgtattagttaccatttactggctgggaaaagcaggaaacagttgcacatcctacagcggaacggaactaaacctgaaggagtctgaaggatcgtggctcagatgcgacaggacactgatgacattgacagtcttaacgcagtatcgagaaagtggtacatcgactggtgggattccgaagcgcagagaatccctctctcctcctcgcacggcaagcatgatcctcgacagctggatcctttgggtccgcctcggaagaggctcaccagatgagaccagg

SEQ ID NO: 104103 - DNA, 166 bp, Homo sapiens
tatctggggagagggtagaggtcaggatgacatttaagtcactccaggttaaagtgaaggactgagttagatattggaattcctgtatatatttattggggtctgatgagaaagagccaaaatgctgactgatttgggaaaggtctgatagagaaaaaggcacatg

SEQ ID NO: 104104 - DNA, 438 bp, Homo sapiens
gtcccctattcagaaagatgacagactccaggtaactgacggaacagatcttgatcttgcttcttgcttaaatgaaggtttagaacatcttcagatgcaggcacatttattattgttcatctgaataattttggtgaaaatttttttgcctcttatgtaccattttgtccctggtgttttggttctgttttccttgatgtaggcttttttttttttttgtcttcctgagatggagtcttgctctgtctcccaggctggagtgcagtggtgtaatctcgactcactgcagcccctgcctcccggttacagggaaaaattctcctgcctcagcctcctgagtagctgggattacaggcgtccagctaatttttgtatttttagtagagacgagattccaccatgttggccggcctgttcttggactcctgactcaggtga

SEQ ID NO: 104105 - DNA, 247 bp, Homo sapiens
agcaacaaaagtcaagtgctcgggaatctaacatttacaaaattggttttgctttaacacaaacaaagatttctttttcatttgtaattatggtaaaatacacataacatagaatttatcatcttaaccatttttaagtgtacagttcagtaatggtaagtacattcacactgttgtatattctgtctctggaactcttctcatcttgcaaaatgaaaactttaaacccattaaatgacaagtcttc

SEQ ID NO: 104106 - DNA, 333 bp, Homo sapiens
tgagagctgatcatggtgggactgggggaagatgaccctagcttcttcctgttggcaaggggcacagttgaggtaagagtcaggattagaggaacgaaactgccttggagtaacctgtaagtatttacaagtgctcagttggggatctcaggggtgcagtacaaacaccttagtgctccaatccactgtcttagcacagcatttaattgcacaccagactataagataataatttatcttttagtctctgataatatttcatgaaacacagggccagaatctgaaactattcaatctcactgggacaatctgttttccattgccaacgcactg

SEQ ID NO: 104107 - DNA, 374 bp, Homo sapiens
tacctctctcatggtcctctccctcgaattcagcctgtcctacttgaaattttcctctcccttgaattcagcctgtcctacttgaacttttcctctccctctgaaagggctactcccctttgcccacccacagtgagtgccaacaccacccaacaacaaaagcccaacccacaggccagctttttaaaatgatcctccattactagtggaaatatcttcaaaatctctcttgcccactgctcactcaagtctagcttcctaaatggccatgctttctttggtatcaccacctacagtccctcagtccctttttttgagacagagtcttgccctgctgcccaggctggagtgcaatggcttgatctcggcttact

SEQ ID NO: 104108 - DNA, 467 bp, Homo sapiens
ttttttttttgagatggagtctcattctgtcacccaggctggaatgcagtggcgcgatctcagctcaccgcaagctccacctcccgggttcacgccattctcctgcctcagcctcctgagtagctgggactacaggcgcccgccaccatgcccggctaattttttgtatttttagtaaagatggggtttcaccgggttagccaggatggtctcgatctcttgacctcgtgatccacccgcctcggcctcccaaagtgctgggattacaggcgtgagccaccatgcccggccatcagatggtatttcttaaaatccaaaaaaaaggatttttgaaaagtagatgaggatagttattatcattactatgtatttgtttatatgctatcttaaccaaggaattaaagttgctcaatttaaaggttttctaaataatctacacttacattacaaagttcagacacatatat

SEQ ID NO: 104109 - DNA, 324 bp, Homo sapiens
cttgctaggtagagatcacaaatatttaaagaaaatgtctcttgtaaaagtaggagaacaaataaatgaaaaaatttaaaagattattagaggaaacagagacaattcaaaaattcaagaagagttaaaaaaaagaaaaattcatcttctccctgaagtcagtaactacagagagctgtgagaagatacacaatctataaaactagaatagaatactattgaaaaagtgactatattggaacaacaaaaattcttgaatttaagcaatcaaaataactgttggtagagaaacagcactgaggaaacctcaacgaaaaaagaaca

SEQ ID NO: 104110 - DNA, 324 bp, Homo sapiens
tacatttaaaattttattttatatttagaatcacattaccctttaagttctaaataccaaaataaagagaaaggacatcaaagtcagccttaggagtaagaatttcagtcaatctagcacatctgtagagctcctcaaggctgaaaggaggggctctgaaactcccaaaatgtgtacaagttgttgtatttataaggaaactggcatctttcttgggagatgctttacaactttctctaaattctcaaaagggaaagcaatatattttttaaaagtttaaaaccaccatagtaagtaagattctctttccatcgtttatctaat

SEQ ID NO: 104111 - DNA, 700 bp, Homo sapiens
cgtggtggtgggcacctgtaatcccagctactcgggaagctgggataggataatcacttgaacccaggaggtggagcttgcgttgcagtgagccaagactgtgccactgtactccagcctgggcgacagagtgagactgtctcaagagaaaaaaaaatcttttcagtgctgcatcacaaatggatgggggaaaggagcgggtgcagaccaacaatgaatgcaagctgacccattatggtagcacagatgaaagatcttggctacccagattggatgtgaatgctacagacacaatagaaatatcataaaaatcattagtgccaaggatttggcagctgaatgaggggggctgaaggacagggacgaatcaagacttggcaatttttggcttgaacacccaaaaggatgatgtgccatgtattgttttcattaaatgtttaagggaaaacatgatgtgaaattactatgtggaatagtgttgtttttaatacttaagaaaaattacattgttaactacaaagtaatttcaaacttaatgtgtatttcttgatcaactatagtcttcccacaatttctcaatgtctgagcttacttaaaaattgccaacatcaattttagattcttcttagacaattttctactgtccttagaataacggattctaaacatggcctaccaagactgttcccaccctgtcctt

SEQ ID NO: 104112 - DNA, 118 bp, Homo sapiens
acctggaaagaggaggtgattctaactcctcacttaggtgaatggagacatggcattgccactaaaaggaatagagaatactggaaaagaaacaaacatctgaaggggaagtagctct

SEQ ID NO: 104113 - DNA, 177 bp, Homo sapiens
tcctcacttccatctacttccacttagaaagtctacaaatccaggagtctacttcatttatctggacaatagcccagtgcagagaagcagagactataccaactaaaaagcagaggaactggagaaaattttccctgaatcactctggagggcttcaaaagaatggagacagatgag

SEQ ID NO: 104114 - DNA, 282 bp, Homo sapiens
gaggatatctgccgttttgggacttgcatgtggtgatattgatggaagctgaagtcgagatggtgaaactacttatagggaatgttggtatgggttgataaaatgagtttaatttgggccatgttgaatttgaggtgatatggaacatacaagtagaagtgatcatagatgctgaacatgcatggtgcaggtgatagtggttgatattattttgagggttattagctaagttgaggccttgaaaataaatgagttctcctagggactttgggtagagattgt

SEQ ID NO: 104115 - DNA, 499 bp, Homo sapiens
ttcttttctttctttctttctttcttggttttttaaaatagcattttggcggtcgaaattggtactccccagcgaagtccccattgatgagctaagcctctgtctacatgtctagtatattttagttttaaccaaaggaattgtaatttaatagaaaaaacataaccaaatttcctcattccttgagcattctagtttaatcagtgttttatcactattgagaggagcatttaaaactttcaattagtcatttacagggaaagtatggattggcagaaggatcctttccccaatcttcttacaaagacacctaaaatgtgaggtaaccaagctggcccatttgtaatagtctagtaaacactagagaattttttgactaacacccagaaggtgagagttaggagagttagagctcacatggatcagaaccagttttcctagtcctccagcctgggtgacagagtgagactctctctcaaaaaaaaataataataataat

SEQ ID NO: 104116 - DNA, 1114 bp, Homo sapiens
ggcctccccagccatgtggaacaggtcaaaatgggagattttctggagcttcgtgaaatggaaggaagttgcctgcatttccaatgtttgttatggccagcagagccacccagctgtacaactccatgatgcattctttcaacttgttcagtgcacaatcccataaactatgaagcaagtatgctttgacatgaatgcatgtgtttcctctgggccaagaaaatgccatggaacataactggaatgaactgtcttgatatggtcccaaactggaaagctagcttcctgagctacctctatctggagggatatttccagaaggcagaagataaaagtgggttataagaggctaccacttataaacttcagcggtgaatcggggaattccagtgtgtacacacctatgggagagattctgaagactccattgacagaggccttggaaaagaaagtatttggatgcttgtcacactcagagatattgacaaggaaggcaggtctgcaaaaaaccctacttagatataaagaattttgccctgtttctaagtattcttttactctcaattaaggaggatctggaatatcaacaaaagagaagaagtagacaataaaacaaaatcacaatgtgagagaagcaaaacccggggttttaaccagttctctgaaatgggttccatagctatgacctcaactgaaagggagagaagacgcgttacattaaatataagcttgaggttttgggttaaactggtaatttcaacccctgaagagtaatggtaattatcaaaaatgaacttatatttgtaactgtgactcaaaagccagggacttttctgagtttttgctatgcagggacagataaaagaggtttgacacaacacataggagttaatgaaaggaggaaaaataaactaagttttgatagcatttaaatcagttcagaaatttcaaaacctgggaaaattttaactccaaatattttttagagactttaaacatgctaacatgttaatctgtttattttgaataaacaatatcagacttaatttatatatgaataataaaacatgcatttaattttctatagtcagaatgaaagttaaaacaacaaata

SEQ ID NO: 104117 - DNA, 347 bp, Homo sapiens
tcagctgggagtgagaaggccccaagatggctcagtcagacattgctcttccccacacctcgccaagactcggtttgctcttctagaaaacaaaacagaagcccagatcaggagacaaatcttagagagagaagtgaggtgttaggcaggtgtctggggccatcatcaccttcccctgctcctccgctgaaggaggctgtaggaggaacgagcatgttattatgccatttgctagtttcgtgatcttggacaggtggctttgcctctctcgacctcagtttcctcatctgtagagtgaaggtaataattgcgcttatcttggaagcatggtgagggttccgtgggtc

SEQ ID NO: 104118 - DNA, 348 bp, Homo sapiens
cctgagctcctttgcctggtctatgtttctctttgtcctaacattttttaactgctagcacaccggatcattgatctttcatggtttattgtatatcgtcttattcccctgctggaatgtcagcttcttgagggcagtgatcttttatctgcatccccaggatccagtacagtgcccagcacatagtaagtgcttgatatctgctgaattatgtacacccagcagtcagctctgggcaggcacagagagggtatttctgagtgaaggctgaatgaatgaattaatgaattgttgctgctgggaggaggcaaggctgcacatctgccagcctgctccccccaggcccac

SEQ ID NO: 104119 - DNA, 177 bp, Homo sapiens
ggtttttgtcctgtctcctggcaagaagctcctgcaacccttggaatagcctctgaagtgatcaaagtgtcttttatatgctaatgagatgactgttagctggctgcccctaggtagcttctggatggaagctggtcaccagaaaaccagacaggattagaaggttgggaatttcat

SEQ ID NO: 104120 - DNA, 139 bp, Homo sapiens
gcttctttcatctggaaccgccttccctttccctctctccgttctgttctgtctttctgtcttttatgacgttttggaagggtctgggcctcttgtcttgtagaatatcctcccatcgggatctgtctgtctcctcacg

SEQ ID NO: 104121 - DNA, 154 bp, Homo sapiens
tgcctggcaaggaagttgttgtttgctgacgatggttggatggggcctggactctggagcagaagtggcgcttgagcacagttgctgtttgctgacggtggctggatgtggctcggactctttggagcagaagtggcgcttgcgcacatctcga

SEQ ID NO: 104122 - DNA, 278 bp, Homo sapiens
tgaaggtgaacacatgctgagagaggacactttttatgctctccattgcctcggccaccacccctatctgttagctcttattcttaagtgccatctgctaaactatagcctgaaatataccaccaaacaaaaatacatcactgcaataagaaacatctgagaaagccactgcatgaatctatctgcagccaaggaacctgtatggagcctcagcaccttgaaagcactcaaaaataaagccaattgattatatgcaacatatatcacggtcatgccat

SEQ ID NO: 104123 - DNA, 197 bp, Homo sapiens
tacaaaatggttatcataagggttcaaaactttgtaatcagtgatatcacttaatgtttgccattatatagtctgcttcttgttcttgctaaagaaagatttttgagttgatttgtgtgcttcacagagctggaattcaatttcaaagcagaatgctgaattaataaatatgagcattatttttagggcttttgaag

SEQ ID NO: 104124 - DNA, 171 bp, Homo sapiens
cgaaggcgactctaaggatccccactgcatcggtgctcaaaaaacaaacaaaacactaccaccaaaaacctaactagccatagtcaagtagaagtatacaaatattccagaagaactaaactataaggtgtttgtaaatatttagatgtgaatgagtataaacaacgcatc

SEQ ID NO: 104125 - DNA, 144 bp, Homo sapiens
ctgctccagccatgttcctgctctcttgttcacttttcaccacgattgtaagtttcctgagacctcgccagaatcagaagccactgtgtttcctgtacagcttgcagaactgtgagccaattaaacctcattcctttataaatt

SEQ ID NO: 104126 - DNA, 372 bp, Homo sapiens
ttcctttacctgccatttctcttgcctcttgtgtttgcttcctaggattgattggctatatcttactttgtatctctactgttctttgattatcggtgtgaatgttttaatgaagttctcaaattaacttccattataatgaaaggcagtgatctttttaactttaaattatggcaacttacatagttgtaaaattatgttccggtcttaggatgggttggcaattcaaacatctaggtccacttttcaaacaggtactttagagtcataggtactagggtgtgtcccactcttgcaaatcagtagctgattcacgtgttacaaaagatgtgtcattaaccatttgtttactctgaaacttcatatagtata

SEQ ID NO: 104127 - DNA, 542 bp, Homo sapiens
agcaaggaaggcaactcctactgtcctcacttagaaccagaggaacagtcctgcccagggtgaactcaccctcgagccagccaaactggtgaatgcccttccccaagcgggagaagccctcatatctccaagcagccaacatgcttctgggttgaaggagcagctatgtgcccacacccaggtcctgagaaacagccgcacagtgccccacccactacagacaagccccagtcccgcccaacagctttgtatccacaattagagcctgcgaaacagacctgtgtgctgcccctgacagacatgctccttggctatctgaacagctctgcgctcacatgccaggactgagaaatagtctgcaggccacccctggtgggaaagccctcgagtcagccaattatccctgtgcccatatcccaggctgagaagcagccctccaagcagtatcttgtgggcagatacttccaaaaggaagcaaaagacctctacaatgaaaactacaaaacacttatgaaagaaattgaggaggatacaaacaagtg

SEQ ID NO: 104128 - DNA, 478 bp, Homo sapiens
tgagtatgggcaataacagtttgtgctgtgctaatacattctgatttcatcctataggccatggtggtcccctggagaattttaggcaggtgagcgacaaaatggaatttgtgttttagatttcaaggtccttgacagccgggcgggggcgggggtcttgttcatccttgtgtcatcagtaagtcacccatcttttgactcatagtaagaaatcaatgagcatttgtgaaatgagtgaaagacaacgccggagactatggaggccagaggggcatcagggagacaacccagggcctgttgcactagcctaggtgggagcaatgagagtgtggacagaggcagcaggaggtgctgggggaaggtcacactcccctccaacttgggaaggagggtcacagtatttggtgactgatgggggagatggatgaagttaaagcaaagatgactttatatttttagctagggtgatggcaaaact

SEQ ID NO: 104129 - DNA, 428 bp, Homo sapiens
  misc_feature (114)..(114): n is a, c, g, or t
aaaacccaaccaaaaaaccctcatttcctgctgtttaatttcaactttttaccaaccctcaattttggaaggccccaatccccaagcaaaaaagccccttgggacttgggcaangggcccagctggggctgggccctgggttttgagaaactcgctggcaccacagtgggcccctggacccggccgcgcagctggtggactgtaggggctcctgactgggcacaggagctcccagcttttgtccacggccagcaggatgggctgtcgtgtatatagctggggcgagggggcaggccccccttgtgcagagccaggggtctgagggcacctggctgtgttcccagctgagggagggctggggcgggggccgggcttggaacgatgtacgataccctcatagtgaccattaaacctgatcctccaccgcg

SEQ ID NO: 104130 - DNA, 2958 bp, Homo sapiens
atccttaattaaattaatccccctcccccctcgggtccgggcagcgctctcccgggagcggcggcacgcgcggagcgccgggtgcggccatgcggggaccgggcccgaccccgagcccgaccccgagcccaagcccgagccggagcccgagcgagaccccgagcccgagcccgagcgcgacccccggtgcggcgcggctaccccggcggaggcggcgggcgcggggcgcgctctgaggcccgggggatgcgccgccgcctcgaccatgggcgccgccgcctccaggaggagggcgctgaggagcgaggccatgtcctcggtggcggccaaagtgcgagcagcccgagcgtttggagagtacctgtcccagagtcaccctgagaaccgcaacggcgcagatcacctgctggctgatgcctactctggccacgacgggtcccccgagatgcagccggccccccagaacaagcgccgcctgtccctcgtctccaacggctgctacgagggcagcctctcagaggagcccagcattaggaagcccgcaggcgagggccctcagcctcgagtgtacaccatctctggggagcctgccctgctgcccagccctgaggcggaggccattgagctggcggtggtgaaggggcggcggcagcggcaccctcaccatcacagccagcccctgcgcgccagccctggtggcagccgggaggacgtcagcaggccctgccagagctgggcgggcagccgccagggctccaaggagtgccccggatgtgcccagctggctcctggccccacccctcgggcctttgggctggaccagccacctctgcctgagacctccggtcgccgcaagaagctggagaggatgtacagcgttgaccgtgtgtctgacgacatccctattcgtacctggttccccaaggaaaatcttttcagcttccagacagcaaccacaactatgcaagccatctcgaacttccgcaaacacctgcgcatggtcggcagccggagggtgaaggcccagacgttcgctgagcggcgcgagcggagcttcagccggtcctggagcgaccccacccccatgaaagccgacacttcccacgactcccgagacagcagtgacctgcagagctcccactgcacgctggacgaggccttcgaggacctggactgggacactgagaagggcctggaggctgtggcctgcgacaccgaaggcttcgtgccaccaaaggtcatgctcatttcctccaaggtgcccaaggctgagtacatccccactatcatccgccgggatgacccctccatcatccccatcctctacgaccatgagcacgcaaccttcgaggacatccttgaggagatagagaggaagctgaacgtctaccacaagggagccaagatctggaaaatgctgattttctgccagggaggtcctggacacctctatctcctcaagaacaaggtggccacctttgccaaagtggagaaggaagaggacatgattcacttctggaagcggctgagccgcctgatgagcaaagtgaacccagagccgaacgtcatccacatcatgggctgctacattctggggaaccccaatggagagaagctgttccagaacctcaggaccctcatgactccttatagggtcaccttcgagtcacccctggagctctcagcccaagggaagcagatgatcgagacgtactttgacttccggttgtatcgcctgtggaagagccgccagcactcgaagctgctggactttgacgacgtcctgtgaggggcagaggcctccgcccagtcaccatcaggccactccctctgcaccgggacctggggctgggccgcctcgtgctccccgggactgtgtggctccggtctcgcctggagccacttcagggcacctcagacgttgctcaggttccccctgtgggttccggtcctcgctgcacccgtggccgcagaggctgcagtccctgggggccgggaggatcccgccctgtggcccgtggatgctcagcggccaggcactgacctgccatgcctcgcctggaggctcagctgtgggcatccctccatggggttcatagaaataagtgcaatttctacacccccgaaacaattcaaagggaagcagcatttcttgttaactagttaagcactatgctgctagttacagtgtaggcaccccggcccagcagcccagcagcccacatgtgttcaggaccctccctgcccaccccctccctgccgtatcgatcaccagcaccagggtggcccgtgtgcgtggggccagcgtcgccgggctgcccagcctggctctgtctacactggccgagtctctgggtctgtctacactggccgagtctccgactgtctgtgctttcacttacactcctcttgccaccccccatccctgcttacttagacctcagccggcgccggacccggtaggggcagtctgggcagcaggaaggaagggcgcagcgtcccctccttcagaggaggctctgggtggggcctgctccccatccccccaagcccacccagcactctcattgctgctgttgagttcagcttttaccagcctcagtgtggaggctccatcccagcacacaggcctggggcttggcaggggcccagctggggctgggccctgggttttgagaaactcgctggcaccacagtgggcccctggacccggccgcgcagctggtggactgtaggggctcctgactgggcacaggagctcccagcttttgtccacggccagcaggatgggctgtcgtgtatatagctggggcgagggggcaggccccccttgtgcagagccaggggtctgagggcacctggctgtgttcccagctgagggagggctggggcgggggccgggcttggaacgatgtacgataccctcatagtgaccattaaacctgatcctccaccgcg

SEQ ID NO: 104131 - DNA, 2373 bp, Homo sapiens
cgaccactggcctggccctgctctggggacgtggcaggcaggagaggccatgtggcccgggctgcaggaaagcatctcaccctcagtcctgcactccgagggcacgtgtctctgtctgggctggggccagcagcaaggcccccctcccccactccaatcacacagatgtgtctgggaagcttttttgcccgttttggatgttgggccttggcagggtccaaagtttggtggaggagaggacctgcccctgaggtggctcaaggacacagagcaggagagggggctcctgcaggcccccagcccgccatggggtggtgcagacaggagccccgctctgctgcagcgcaggcaggctggatcctctgccacatgggcgtggaggctcagggcgaacttccgcaaacacctgcgcatggtcggcagccggagggtgaaggcccagacgttcgctgagcggcgcgagcggagcttcagccggtcctggagcgaccccacccccatgaaagccgacacttcccacgactcccgagacagcagtgacctgcagagctcccactgcacgctggacgaggccttcgaggacctggactgggacactgagaagggcctggaggctgtggcctgcgacaccgaaggcttcgtgccaccaaaggtcatgctcatttcctccaaggtgcccaaggctgagtacatccccactatcatccgccgggatgacccctccatcatccccatcctctacgaccatgagcacgcaaccttcgaggacatccttgaggagatagagaggaagctgaacgtctaccacaagggagccaagatctggaaaatgctgattttctgccagggaggtcctggacacctctatctcctcaagaacaaggtggccacctttgccaaagtggagaaggaagaggacatgattcacttctggaagcggctgagccgcctgatgagcaaagtgaacccagagccgaacgtcatccacatcatgggctgctacattctggggaaccccaatggagagaagctgttccagaacctcaggaccctcatgactccttatagggtcaccttcgagtcacccctggagctctcagcccaagggaagcagatgatcgagacgtactttgacttccggttgtatcgcctgtggaagagccgccagcactcgaagctgctggactttgacgacgtcctgtgaggggcagaggcctccgcccagtcaccatcaggccactccctctgcaccgggacctggggctgggccgcctcgtgctccccgggactgtgtggctccggtctcgcctggagccacttcagggcacctcagacgttgctcaggttccccctgtgggttccggtcctcgctgcacccgtggccgcagaggctgcagtccctgggggccgggaggatcccgccctgtggcccgtggatgctcagcggccaggcactgacctgccatgcctcgcctggaggctcagctgtgggcatccctccatggggttcatagaaataagtgcaatttctacacccccgaaacaattcaaagggaagcagcatttcttgttaactagttaagcactatgctgctagttacagtgtaggcaccccggcccagcagcccagcagcccacatgtgttcaggaccctccctgcccaccccctccctgccgtatcgatcaccagcaccagggtggcccgtgtgcgtggggccagcgtcgccgggctgcccagcctggctctgtctacactggccgagtctctgggtctgtctacactggccgagtctccgactgtctgtgctttcacttacactcctcttgccaccccccatccctgcttacttagacctcagccggcgccggacccggtaggggcagtctgggcagcaggaaggaagggcgcagcgtcccctccttcagaggaggctctgggtggggcctgctccccatccccccaagcccacccagcactctcattgctgctgttgagttcagcttttaccagcctcagtgtggaggctccatcccagcacacaggcctggggcttggcaggggcccagctggggctgggccctgggttttgagaaactcgctggcaccacagtgggcccctggacccggccgcgcagctggtggactgtaggggctcctgactgggcacaggagctcccagcttttgtccacggccagcaggatgggctgtcgtgtatatagctggggcgagggggcaggccccccttgtgcagagccaggggtctgagggcacctggctgtgttcccagctgagggagggctggggcgggggccgggcttggaacgatgtacgataccctcatagtgaccattaaacctgatcctccaccgcg

SEQ ID NO: 104132 - DNA, 2581 bp, Homo sapiens
cgaccactggcctggccctgctctggggacgtggcaggcaggagaggccatgtggcccgggctgcaggaaagcatctcaccctcagtcctgcactccgagggcacgtgtctctgtctgggctggggccagcagcaaggcccccctcccccactccaatcacacagatgtgtctgggaagcttttttgcccgttttggatgttgggccttggcagggtccaaagtttggtggaggagaggacctgcccctgaggtggctcaaggacacagagcaggagagggggctcctgcaggcccccagcccgccatggggtggtgcagacaggagccccgctctgctgcagcgcaggcaggctggatcctctgccacatgggcgtggaggctcagggcgtaagtcccgggcgaggacggaaggtcagagcctgggaatgcagctcgggaggagacttgatccagagcgccaggcactgcacctttgttctggagttgaaggggagccctggaaggctgtcgcgggaagagcactgggtgggatttgcctttgggtgggaggtggtgccaggagccagggagagcactggcttcccacaccgaaggggaacttccgcaaacacctgcgcatggtcggcagccggagggtgaaggcccagacgttcgctgagcggcgcgagcggagcttcagccggtcctggagcgaccccacccccatgaaagccgacacttcccacgactcccgagacagcagtgacctgcagagctcccactgcacgctggacgaggccttcgaggacctggactgggacactgagaagggcctggaggctgtggcctgcgacaccgaaggcttcgtgccaccaaaggtcatgctcatttcctccaaggtgcccaaggctgagtacatccccactatcatccgccgggatgacccctccatcatccccatcctctacgaccatgagcacgcaaccttcgaggacatccttgaggagatagagaggaagctgaacgtctaccacaagggagccaagatctggaaaatgctgattttctgccagggaggtcctggacacctctatctcctcaagaacaaggtggccacctttgccaaagtggagaaggaagaggacatgattcacttctggaagcggctgagccgcctgatgagcaaagtgaacccagagccgaacgtcatccacatcatgggctgctacattctggggaaccccaatggagagaagctgttccagaacctcaggaccctcatgactccttatagggtcaccttcgagtcacccctggagctctcagcccaagggaagcagatgatcgagacgtactttgacttccggttgtatcgcctgtggaagagccgccagcactcgaagctgctggactttgacgacgtcctgtgaggggcagaggcctccgcccagtcaccatcaggccactccctctgcaccgggacctggggctgggccgcctcgtgctccccgggactgtgtggctccggtctcgcctggagccacttcagggcacctcagacgttgctcaggttccccctgtgggttccggtcctcgctgcacccgtggccgcagaggctgcagtccctgggggccgggaggatcccgccctgtggcccgtggatgctcagcggccaggcactgacctgccatgcctcgcctggaggctcagctgtgggcatccctccatggggttcatagaaataagtgcaatttctacacccccgaaacaattcaaagggaagcagcatttcttgttaactagttaagcactatgctgctagttacagtgtaggcaccccggcccagcagcccagcagcccacatgtgttcaggaccctccctgcccaccccctccctgccgtatcgatcaccagcaccagggtggcccgtgtgcgtggggccagcgtcgccgggctgcccagcctggctctgtctacactggccgagtctctgggtctgtctacactggccgagtctccgactgtctgtgctttcacttacactcctcttgccaccccccatccctgcttacttagacctcagccggcgccggacccggtaggggcagtctgggcagcaggaaggaagggcgcagcgtcccctccttcagaggaggctctgggtggggcctgctccccatccccccaagcccacccagcactctcattgctgctgttgagttcagcttttaccagcctcagtgtggaggctccatcccagcacacaggcctggggcttggcaggggcccagctggggctgggccctgggttttgagaaactcgctggcaccacagtgggcccctggacccggccgcgcagctggtggactgtaggggctcctgactgggcacaggagctcccagcttttgtccacggccagcaggatgggctgtcgtgtatatagctggggcgagggggcaggccccccttgtgcagagccaggggtctgagggcacctggctgtgttcccagctgagggagggctggggcgggggccgggcttggaacgatgtacgataccctcatagtgaccattaaacctgatcctccaccgcg

SEQ ID NO: 104133 - DNA, 3216 bp, Homo sapiens
  misc_feature (3048)..(3048): n is a, c, g, or t
atccttaattaaattaatccccctcccccctcgggtccgggcagcgctctcccgggagcggcggcacgcgcggagcgccgggtgcggccatgcggggaccgggcccgaccccgagcccgaccccgagcccaagcccgagccggagcccgagcgagaccccgagcccgagcccgagcgcgacccccggtgcggcgcggctaccccggcggaggcggcgggcgcggggcgcgctctgaggcccgggggatgcgccgccgcctcgaccatgggcgccgccgcctccaggaggagggcgctgaggagcgaggccatgtcctcggtggcggccaaagtgcgagcagcccgagcgtttggagagtacctgtcccagagtcaccctgagaaccgcaacggcgcagatcacctgctggctgatgcctactctggccacgacgggtcccccgagatgcagccggccccccagaacaagcgccgcctgtccctcgtctccaacggctgctacgagggcagcctctcagaggagcccagcattaggaagcccgcaggcgagggccctcagcctcgagtgtacaccatctctggggagcctgccctgctgcccagccctgaggcggaggccattgagctggcggtggtgaaggggcggcggcagcggcaccctcaccatcacagccagcccctgcgcgccagccctggtggcagccgggaggacgtcagcaggccctgccagagctgggcgggcagccgccagggctccaaggagtgccccggatgtgcccagctggctcctggccccacccctcgggcctttgggctggaccagccacctctgcctgagacctccggtcgccgcaagaagctggagaggatgtacagcgttgaccgtgtgtctgacgacatccctattcgtacctggttccccaaggaaaatcttttcagcttccagacagcaaccacaactatgcaagccatctcggtgttcaggggctacgcggagaggaagcgccggaaacgggagaatgattccgcgtctgtaatccagaggaacttccgcaaacacctgcgcatggtcggcagccggagggtgaaggcccagacgttcgctgagcggcgcgagcggagcttcagccggtcctggagcgaccccacccccatgaaagccgacacttcccacgactcccgagacagcagtgacctgcagagctcccactgcacgctggacgaggccttcgaggacctggactgggacactgagaagggcctggaggctgtggcctgcgacaccgaaggcttcgtgccaccaaaggtcatgctcatttcctccaaggtgcccaaggctgagtacatccccactatcatccgccgggatgacccctccatcatccccatcctctacgaccatgagcacgcaaccttcgaggacatccttgaggagatagagaggaagctgaacgtctaccacaagggagccaagatctggaaaatgctgattttctgccagggaggtcctggacacctctatctcctcaagaacaaggtggccacctttgccaaagtggagaaggaagaggacatgattcacttctggaagcggctgagccgcctgatgagcaaagtgaacccagagccgaacgtcatccacatcatgggctgctacattctggggaaccccaatggagagaagctgttccagaacctcaggaccctcatgactccttatagggtcaccttcgagtcacccctggagctctcagcccaagggaagcagatgatcgagacgtactttgacttccggttgtatcgcctgtggaagagccgccagcactcgaagctgctggactttgacgacgtcctgtgaggggcagaggcctccgcccagtcaccatcaggccactccctctgcaccgggacctggggctgggccgcctcgtgctccccgggactgtgtggctccggtctcgcctggagccacttcagggcacctcagacgttgctcaggttccccctgtgggttccggtcctcgctgcacccgtggccgcagaggctgcagtccctgggggccgggaggatcccgccctgtggcccgtggatgctcagcggccaggcactgacctgccatgcctcgcctggaggctcagctgtgggcatccctccatggggttcatagaaataagtgcaatttctacacccccgaaacaattcaaagggaagcagcatttcttgttaactagttaagcactatgctgctagttacagtgtaggcaccccggcccagcagcccagcagcccacatgtgttcaggaccctccctgcccaccccctccctgccgtatcgatcaccagcaccagggtggcccgtgtgcgtggggccagcgtcgccgggctgcccagcctggctctgtctacactggccgagtctctgggtctgtctacactggccgagtctccgactgtctgtgctttcacttacactcctcttgccaccccccatccctgcttacttagacctcagccggcgccggacccggtaggggcagtctgggcagcaggaaggaagggcgcagcgtcccctccttcagaggaggctctgggtggggcctgctccccatccccccaagcccacccagcactctcattgctgctgttgagttcagcttttaccagcctcagtgtggaggctccatcccagcacacaggcctggggcttggcaggggcccagctggggctgggccctgggttttgagaaactcgctggcaccacagtgggcccctggacccggccgcgcagctggtggactgtaggggctcctgactgggcacaggagctcccagcttttgtccacggccagcaggatgggctgtcgtgtatatagctggggcgagggggcaggccccccttgtgcagagccaggggtctgagggcacctggctgtgttcccagctgagggagggctggggcgggggccgggcttggaacgatgtacgataccctcatagtgaccattaaacctgatcctccaccgcgaaaaaaaaaaaaaaaaaaaanaaaaaaaaagaagagaaagaaagaaagaaaaaaaaaaaaaaaaaaaaaaaaaaaaaagaaaacaacatatgacaccaaaacacaataaaaaaccacacgcagggagcacgaacgaaacataggcgaagctacacacagacaagagaaaaaataaaaaataacaaagag

SEQ ID NO: 104134 - DNA, 3556 bp, Homo sapiens
  misc_feature (3388)..(3388): n is a, c, g, or t
cgaccactggcctggccctgctctggggacgtggcaggcaggagaggccatgtggcccgggctgcaggaaagcatctcaccctcagtcctgcactccgagggcacgtgtctctgtctgggctggggccagcagcaaggcccccctcccccactccaatcacacagatgtgtctgggaagcttttttgcccgttttggatgttgggccttggcagggtccaaagtttggtggaggagaggacctgcccctgaggtggctcaaggacacagagcaggagagggggctcctgcaggcccccagcccgccatggggtggtgcagacaggagccccgctctgctgcagcgcaggcaggctggatcctctgccacatgggcgtggaggctcagggcgtaagtcccgggcgaggacggaaggtcagagcctgggaatgcagctcgggaggagacttgatccagagcgccaggcactgcacctttgttctggagttgaaggggagccctggaaggctgtcgcgggaagagcactgggtgggatttgcctttgggtgggaggtggtgccaggagccagggagagcactggcttcccacaccgaaggggaacttccgcaaacacctgcgcatggtcggcagccggagggtgaaggcccagacgttcgctgagcggcgcgagcggagcttcagccggtcctggagcgaccccacccccatgaaagccgacacttcccacgactcccgagacagtaggtgccccgcacaggcccgcccaccttccccagagcctcccctagaccccagacccctgctgggggtcccctgccagggccgctgggctgcgcttttgcactcctgaatcttggtttacctgtttgtgagatggggacgccctcagcatctccgatcgcaaaggcggggctaacaacggccgcggcagtgctggccgggggcgcctgtagggccgtgcccaccgccactcgcaagaggccctcaggggcagggggctgcggtgcccgcccccactccctcccaggcgcccggcggacttggctggagctgatgcctgcacgcgccttccaccggcctcgcaccagggtctcccttcccacatcaggccgctgcccagtggtgtccacaggcctgtcctgccgggctggcggcgacctctgtatggtcctcccacttgcttggaggaccctccgggatggggctttcgggccctgtgggccttggggccatggccaggataggaggtgctgccgggcctgctgtcctggtgaccctcttgcttcccaggcagtgacctgcagagctcccactgcacgctggacgaggccttcgaggacctggactgggacactgagaagggcctggaggctgtggcctgcgacaccgaaggcttcgtgccaccaaaggtcatggtgaggcccagcccgggcagtgctcctctacaccccgagcaggactccgccccaacccgagtccagccagctctgcctgggaccacgcagccttctccagctgcctgggggagggtgtctcacagggctatacccttgggctgcctggcagccagaaggtagcctcatgggggctcccacagccccttggcttttggatgggcctggggcccctgagcagctctttgtctccgcagctcatttcctccaaggtgcccaaggctgagtacatccccactatcatccgccgggatgacccctccatcatccccatcctctacgaccatgagcacgcaaccttcgaggacatccttgaggagatagagaggaagctgaacgtctaccacaagggagccaagatctggaaaatgctgattttctgccagggaggtcctggacacctctatctcctcaagaacaaggtggccacctttgccaaagtggagaaggaagaggacatgattcacttctggaagcggctgagccgcctgatgagcaaagtgaacccagagccgaacgtcatccacatcatgggctgctacattctggggaaccccaatggagagaagctgttccagaacctcaggaccctcatgactccttatagggtcaccttcgagtcacccctggagctctcagcccaagggaagcagatgatcgagacgtactttgacttccggttgtatcgcctgtggaagagccgccagcactcgaagctgctggactttgacgacgtcctgtgaggggcagaggcctccgcccagtcaccatcaggccactccctctgcaccgggacctggggctgggccgcctcgtgctccccgggactgtgtggctccggtctcgcctggagccacttcagggcacctcagacgttgctcaggttccccctgtgggttccggtcctcgctgcacccgtggccgcagaggctgcagtccctgggggccgggaggatcccgccctgtggcccgtggatgctcagcggccaggcactgacctgccatgcctcgcctggaggctcagctgtgggcatccctccatggggttcatagaaataagtgcaatttctacacccccgaaacaattcaaagggaagcagcatttcttgttaactagttaagcactatgctgctagttacagtgtaggcaccccggcccagcagcccagcagcccacatgtgttcaggaccctccctgcccaccccctccctgccgtatcgatcaccagcaccagggtggcccgtgtgcgtggggccagcgtcgccgggctgcccagcctggctctgtctacactggccgagtctctgggtctgtctacactggccgagtctccgactgtctgtgctttcacttacactcctcttgccaccccccatccctgcttacttagacctcagccggcgccggacccggtaggggcagtctgggcagcaggaaggaagggcgcagcgtcccctccttcagaggaggctctgggtggggcctgctccccatccccccaagcccacccagcactctcattgctgctgttgagttcagcttttaccagcctcagtgtggaggctccatcccagcacacaggcctggggcttggcaggggcccagctggggctgggccctgggttttgagaaactcgctggcaccacagtgggcccctggacccggccgcgcagctggtggactgtaggggctcctgactgggcacaggagctcccagcttttgtccacggccagcaggatgggctgtcgtgtatatagctggggcgagggggcaggccccccttgtgcagagccaggggtctgagggcacctggctgtgttcccagctgagggagggctggggcgggggccgggcttggaacgatgtacgataccctcatagtgaccattaaacctgatcctccaccgcgaaaaaaaaaaaaaaaaaaaanaaaaaaaaagaagagaaagaaagaaagaaaaaaaaaaaaaaaaaaaaaaaaaaaaaagaaaacaacatatgacaccaaaacacaataaaaaaccacacgcagggagcacgaacgaaacataggcgaagctacacacagacaagagaaaaaataaaaaataacaaagag

SEQ ID NO: 104135 - DNA, 3685 bp, Homo sapiens
atccttaattaaattaatccccctcccccctcgggtccgggcagcgctctcccgggagcggcggcacgcgcggagcgccgggtgcggccatgcggggaccgggcccgaccccgagcccgaccccgagcccaagcccgagccggagcccgagcgagaccccgagcccgagcccgagcgcgacccccggtgcggcgcggctaccccggcggaggcggcgggcgcggggcgcgctctgaggcccgggggatgcgccgccgcctcgaccatgggcgccgccgcctccaggaggagggcgctgaggagcgaggccatgtcctcggtggcggccaaagtgcgagcagcccgagcgtttggagagtacctgtcccagagtcaccctgagaaccgcaacggcgcagatcacctgctggctgatgcctactctggccacgacgggtcccccgagatgcagccggccccccagaacaagcgccgcctgtccctcgtctccaacggctgctacgagggcagcctctcagaggagcccagcattaggaagcccgcaggcgagggccctcagcctcgagtgtacaccatctctggggagcctgccctgctgcccagccctgaggcggaggccattgagctggcggtggtgaaggggcggcggcagcggcaccctcaccatcacagccagcccctgcgcgccagccctggtggcagccgggaggacgtcagcaggccctgccagagctgggcgggcagccgccagggctccaaggagtgccccggatgtgcccagctggctcctggccccacccctcgggcctttgggctggaccagccacctctgcctgagacctccggtcgccgcaagaagctggagaggatgtacagcgttgaccgtgtgtctgacgacatccctattcgtacctggttccccaaggaaaatcttttcagcttccagacagcaaccacaactatgcaagccatctcggtgttcaggggctacgcggagaggaagcgccggaaacgggagaatgattccgcgtctgtaatccagaggaacttccgcaaacacctgcgcatggtcggcagccggagggtgaaggcccagacgttcgctgagcggcgcgagcggagcttcagccggtcctggagcgaccccacccccatgaaagccgacacttcccacgactcccgagacagcagtgacctgcagagctcccactgcacgctggacgaggccttcgaggacctggactgggacactgagaagggcctggaggctgtggcctgcgacaccgaaggcttcgtgccaccaaaggtcatgctcatttcctccaaggtgcccaaggctgagtacatccccactatcatccgccgggatgacccctccatcatccccatcctctacgaccatgagcacgcaaccttcgaggacatccttgaggagatagagaggaagctgaacgtctaccacaagggagccaagatctggaaaatgctgattttctgccagggaggtcctggacacctctatctcctcaagaacaaggtggccacctttgccaaagtggagaaggaagaggacatgattcacttctggaagcggctgagccgcctgatgagcaaagtgaacccagagccgaacgtcatccacatcatgggctgctacattctggggaaccccaatggagagaagctgttccagaacctcaggaccctcatgactccttatagggtcaccttcgagtcacccctggagctctcagcccaagggaagcagatgatcgagacgtactttgacttccggttgtatcgcctgtggaagagccgccagcactcgaagctgctggactttgacgacgtcctgtgaggggcagaggcctccgcccagtcaccatcaggccactccctctgcaccgggacctggggctgggccgcctcgtgctccccgggactgtgtggctccggtctcgcctggagccacttcagggcacctcagacgttgctcaggttccccctgtgggttccggtcctcgctgcacccgtggccgcagaggctgcagtccctgggggccgggaggatcccgccctgtggcccgtggatgctcagcggccaggcactgacctgccatgcctcgcctggaggctcagctgtgggcatccctccatggggttcatagaaataagtgcaatttctacacccccgaaacaattcaaagggaagcagcatttcttgttaactagttaagcactatgctgctagttacagtgtaggcaccccggcccagcagcccagcagcccacatgtgttcaggaccctccctgcccaccccctccctgccgtatcgatcaccagcaccagggtggcccgtgtgcgtggggccagcgtcgccgggctgcccagcctggctctgtctacactggccgagtctctgggtctgtctacactggccgagtctccgactgtctgtgctttcacttacactcctcttgccaccccccatccctgcttacttagacctcagccggcgccggacccggtaggggcagtctgggcagcaggaaggaagggcgcagcgtcccctccttcagaggaggctctgggtggggcctgctccccatccccccaagcccacccagcactctcattgctgctgttgagttcagcttttaccagcctcagtgtggaggctccatcccagcacacaggcctggggcttggcaggggcccagctggggctgggccctgggttttgagaaactcgctggcaccacagtgggcccctggacccggccgcgcagctggtggactgtaggggctcctgactgggcacaggagctcccagcttttgtccacggccagcaggatgggctgtcgtgtatatagctggggcgagggggcaggccccccttgtgcagagccaggggtctgagggcacctggctgtgttcccagctgagggagggctggggcgggggccgggcttggaacgatgtacgataccctcatagtgaccattaaacctgatcctccaccgcggccgccgcgtgggtctgtcctctcagtgctttccaggggccttcctgtgcccagcttctgggcccactcctgtgaggtcactgctgcagggccttcctgcctggacagagttggagctaggccactagaccaccccacagggcatagccagggggaccagcacaggaggggacggagaggagctgcaggagggctggggggaggctgcagtctcggaggggggcctcgccgggtctggaggggacagcagagacagcccgttccccctgccgcctgagggcaccagggagagggctgtatgtccctcacgccacactgtgtgtgcagtcagcagtgtggccacagatgggggccactctctcaacctcaggtgtcctcagggcccagaccgctgctgggcacagccaggctggctgccagctggttccctgccccgtggctgggggacagagcagcacgtatcagctgggctagggtcagggggccactggtgcgcagcctggcacagcctggcaggcttgaggcccagtgtgctgggggtggtcacacagccgtcagccacctccagctcttccagggcattctagatggggtcccgggagggggcaggttttggtgccaatttgagtgtataaagttttaggtaaataccaaatgc

SEQ ID NO: 104136 - DNA, 3107 bp, Homo sapiens
atccttaattaaattaatccccctcccccctcgggtccgggcagcgctctcccgggagcggcggcacgcgcggagcgccgggtgcggccatgcggggaccgggcccgaccccgagcccgaccccgagcccaagcccgagccggagcccgagcgagaccccgagcccgagcccgagcgcgacccccggtgcggcgcggctaccccggcggaggcggcgggcgcggggcgcgctctgaggcccgggggatgcgccgccgcctcgaccatgggcgccgccgcctccaggaggagggcgctgaggagcgaggccatgtcctcggtggcggccaaagtgcgagcagcccgagcgtttggagagtacctgtcccagagtcaccctgagaaccgcaacggcgcagatcacctgctggctgatgcctactctggccacgacgggtcccccgagatgcagccggccccccagaacaagcgccgcctgtccctcgtctccaacggctgctacgagggcagcctctcagaggagcccagcattaggaagcccgcaggcgagggccctcagcctcgagtgtacaccatctctggggagcctgccctgctgcccagccctgaggcggaggccattgagctggcggtggtgaaggggcggcggcagcggcaccctcaccatcacagccagcccctgcgcgccagccctggtggcagccgggaggacgtcagcaggccctgccagagctgggcgggcagccgccagggctccaaggagtgccccggatgtgcccagctggctcctggccccacccctcgggcctttgggctggaccagccacctctgcctgagacctccggtcgccgcaagaagctggagaggatgtacagcgttgaccgtgtgtctgacgacatccctattcgtacctggttccccaaggaaaatcttttcagcttccagacagcaaccacaactatgcaagccatctcgaacttccgcaaacacctgcgcatggtcggcagccggagggtgaaggcccagacgttcgctgagcggcgcgagcggagcttcagccggtcctggagcgaccccacccccatgaaagccgacacttcccacgactcccgagacagcagtgacctgcagagctcccactgcacgctggacgaggccttcgaggacctggactgggacactgagaagggcctggaggctgtggcctgcgacaccgaaggcttcgtgccaccaaaggtcatgctcatttcctccaaggtgcccaaggctgagtacatccccactatcatccgccgggatgacccctccatcatccccatcctctacgtgagtcccgccccgggcctgcccccaacagatgccctcttgcggccccaccctgggccagcgccggcaccccaggtccccagggtgctgtggcgctgctggctctgacgcagccttgatgtggccttgtggcctgtgtctgtccccaggaccatgagcacgcaaccttcgaggacatccttgaggagatagagaggaagctgaacgtctaccacaagggagccaagatctggaaaatgctgattttctgccagggaggtcctggacacctctatctcctcaagaacaaggtggccacctttgccaaagtggagaaggaagaggacatgattcacttctggaagcggctgagccgcctgatgagcaaagtgaacccagagccgaacgtcatccacatcatgggctgctacattctggggaaccccaatggagagaagctgttccagaacctcaggaccctcatgactccttatagggtcaccttcgagtcacccctggagctctcagcccaagggaagcagatgatcgagacgtactttgacttccggttgtatcgcctgtggaagagccgccagcactcgaagctgctggactttgacgacgtcctgtgaggggcagaggcctccgcccagtcaccatcaggccactccctctgcaccgggacctggggctgggccgcctcgtgctccccgggactgtgtggctccggtctcgcctggagccacttcagggcacctcagacgttgctcaggttccccctgtgggttccggtcctcgctgcacccgtggccgcagaggctgcagtccctgggggccgggaggatcccgccctgtggcccgtggatgctcagcggccaggcactgacctgccatgcctcgcctggaggctcagctgtgggcatccctccatggggttcatagaaataagtgcaatttctacacccccgaaacaattcaaagggaagcagcatttcttgttaactagttaagcactatgctgctagttacagtgtaggcaccccggcccagcagcccagcagcccacatgtgttcaggaccctccctgcccaccccctccctgccgtatcgatcaccagcaccagggtggcccgtgtgcgtggggccagcgtcgccgggctgcccagcctggctctgtctacactggccgagtctctgggtctgtctacactggccgagtctccgactgtctgtgctttcacttacactcctcttgccaccccccatccctgcttacttagacctcagccggcgccggacccggtaggggcagtctgggcagcaggaaggaagggcgcagcgtcccctccttcagaggaggctctgggtggggcctgctccccatccccccaagcccacccagcactctcattgctgctgttgagttcagcttttaccagcctcagtgtggaggctccatcccagcacacaggcctggggcttggcaggggcccagctggggctgggccctgggttttgagaaactcgctggcaccacagtgggcccctggacccggccgcgcagctggtggactgtaggggctcctgactgggcacaggagctcccagcttttgtccacggccagcaggatgggctgtcgtgtatatagctggggcgagggggcaggccccccttgtgcagagccaggggtctgagggcacctggctgtgttcccagctgagggagggctggggcgggggccgggcttggaacgatgtacgataccctcatagtgaccattaaacctgatcctccaccgcg

SEQ ID NO: 104137 - DNA, 2978 bp, Homo sapiens
atccttaattaaattaatccccctcccccctcgggtccgggcagcgctctcccgggagcggcggcacgcgcggagcgccgggtgcggccatgcggggaccgggcccgaccccgagcccgaccccgagcccaagcccgagccggagcccgagcgagaccccgagcccgagcccgagcgcgacccccggtgcggcgcggctaccccggcggaggcggcgggcgcggggcgcgctctgaggcccgggggatgcgccgccgcctcgaccatgggcgccgccgcctccaggaggagggcgctgaggagcgaggccatgtcctcggtggcggccaaagtgcgagcagcccgagcgtttggagagtacctgtcccagagtcaccctgagaaccgcaacggcgcagatcacctgctggctgatgcctactctggccacgacgggtcccccgagatgcagccggccccccagaacaagcgccgcctgtccctcgtctccaacggctgctacgagggcagcctctcagaggagcccagcattaggaagcccgcaggcgagggccctcagcctcgagtgtacaccatctctggggagcctgccctgctgcccagccctgaggcggaggccattgagctggcggtggtgaaggggcggcggcagcggcaccctcaccatcacagccagcccctgcgcgccagccctggtggcagccgggaggacgtcagcaggccctgccagagctgggcgggcagccgccagggctccaaggagtgccccggatgtgcccagctggctcctggccccacccctcgggcctttgggctggaccagccacctctgcctgagacctccggtcgccgcaagaagctggagaggatgtacagcgttgaccgtgtgtctgacgacatccctattcgtacctggttccccaaggaaaatcttttcagcttccagacagcaaccacaactatgcaagccatctcggtgttcaggggctacgcggagaggaagcgccggaaacgggagaatgattccgcgtctgtaatccagaggaacttccgcaaacacctgcgcatggtcggcagccggagggtgaaggcccagacgttcgctgagcggcgcgagcggagcttcagccggtcctggagcgaccccacccccatgaaagccgacacttcccacgactcccgagacagcagtgacctgcagagctcccactgcacgctggacgaggccttcgaggacctggactgggacactgagaagggcctggaggctgtggcctgcgacaccgaaggcttcgtgccaccaaaggtcatgctcatttcctccaaggtgcccaaggctgagtacatccccactatcatccgccgggatgacccctccatcatccccatcctctacgaccatgagcacgcaaccttcgaggacatccttgaggagatagagaggaagctgaacgtctaccacaagggagccaagatctggaaaatgctgattttctgccagggaggtcctggacacctctatctcctcaagaacaaggtggccacctttgccaaagtggagaaggaagaggacatgattcacttctggaagcggctgagccgcctgatgagcaaagtgaacccagagccgaacgtcatccacatcatgggctgctacattctggggaaccccaatggagagaagctgttccagaacctcaggaccctcatgactccttatagggtcaccttcgagtcacccctggagctctcagcccaagggaagcagatgatcgagacgtactttgacttccggttgtatcgcctgtggaagagccgccagcactcgaagctgctggactttgacgacgtcctgtgaggggcagaggcctccgcccagtcaccatcaggccactccctctgcaccgggacctggggctgggccgcctcgtgctccccgggactgtgtggctccggtctcgcctggagccacttcagggcacctcagacgttgctcaggttccccctgtgggttccggtcctcgctgcacccgtggccgcagaggctgcagtccctgggggccgggaggatcccgccctgtggcccgtggatgctcagcggccaggcactgacctgccatgcctcgcctggaggctcagctgtgggcatccctccatggggttcatagaaataagtgcaatttctacacccccgaaacaattcaaagggaagcagcatttcttgttaactagttaagcactatgctgctagttacagtgtaggcaccccggcccagcagcccagcagcccacatgtgttcaggaccctccctgcccaccccctccctgccgtatcgatcaccacctggctctgtctacactggccgagtctctgggtctgtctacactggccgagtctccgactgtctgtgctttcacttacactcctcttgccaccccccatccctgcttacttagacctcagccggcgccggacccggtaggggcagtctgggcagcaggaaggaagggcgcagcgtcccctccttcagaggaggctctgggtggggcctgctccccatccccccaagcccacccagcactctcattgctgctgttgagttcagcttttaccagcctcagtgtggaggctccatcccagcacacaggcctggggcttggcaggggcccagctggggctgggccctgggttttgagaaactcgctggcaccacagtgggcccctggacccggccgcgcagctggtggactgtaggggctcctgactgggcacaggagctcccagcttttgtccacggccagcaggatgggctgtcgtgtatatagctggggcgagggggcaggccccccttgtgcagagccaggggtctgagggcacctggctgtgttcccagctgagggagggctggggcgggggccgggcttggaacgatgtacgataccctcatagtgaccattaaacctgatcctccaccgcg

SEQ ID NO: 104138 - DNA, 1659 bp, Homo sapiens
ggccgcaaaatctacgggcgaacggaatggaagcctgcccgcaaccttcgaggacatcctggaggagatagagaggaagctgaacgtctaccacaagggagccaagatctggaaaatgctgattttctgccagggaggtcctggacacctctatctcctcaagaacaaggtggccacctttgccaaagtggagaaggaagaggacatgattcacttctggaagcggctgagccgcctgatgagcaaagtgaacccagagccgaacgtcatccacatcatgggctgctacattctggggaaccccaatggagagaagctgttccagaacctcaggaccctcatgactccttatagggtcaccttcgagtcacccctggagctctcagcccaagggaagcagatgatcgagacgtactttgacttccggttgtatcgcctgtggaagagccgccagcactcgaagctgctggactttgacgacgtcctgtgaggggcagaggcctccgcccagtcaccatcaggccactccctctgcaccgggacctggggctgggccgcctcgtgctccccgggactgtgtggctccggtctcgcctggagccacttcagggcacctcagacgttgctcaggttccccctgtgggttccggtcctcgctgcacccgtggccgcagaggctgcagtccctgggggccgggaggatcccgccctgtggcccgtggatgctcagcggccaggcactgacctgccatgcctcgcctggaggctcagctgtgggcatccctccatggggttcatagaaataagtgcaatttctacacccccgaaacaattcaaagggaagcagcatttcttgttaactagttaagcactatgctgctagttacagtgtaggcaccccggcccagcagcccagcagcccacatgtgttcaggaccctccctgcccaccccctccctgccgtatcgatcaccagcaccagggtggcccgtgtgcgtggggccagcgtcgccgggctgcccagcctggctctgtctacactggccgagtctctgggtctgtctacactggccgagtctccgactgtctgtgctttcacttacactcctcttgccaccccccatccctgcttacttagacctcagccggcgccggacccggtaggggcagtctgggcagcaggaaggaagggcgcagcgtcccctccttcagaggaggctctgggtggggcctgctccccatccccccaagcccacccagcactctcattgctgctgttgagttcagcttttaccagcctcagtgtggaggctccatcccagcacacaggcctggggcttggcaggggcccagctggggctgggccctgggttttgagaaactcgctggcaccacagtgggcccctggacccggccgcgcagctggtggactgtaggggctcctgactgggcacaggagctcccagcttttgtccacggccagcaggatgggctgtcgtgtatatagctggggcgagggggcaggccccccttgtgcagagccaggggtctgagggcacctggctgtgttcccagctgagggagggctggggcgggggccgggcttggaacgatgtacgataccctcatagtgaccattaaacctgatcctccaccgcg

SEQ ID NO: 104139 - DNA, 1587 bp, Homo sapiens
  misc_feature (28)..(28): n is a, c, g, or t
  misc_feature (33)..(33): n is a, c, g, or t
aacataggcttaggtacgaggctgggtngtgcnagatctggaaaatgctgattttctgccaggaggtcctggacacctctatctcctcaagaacaaggtggccacctttgccaaagtggagaaggaagaggacatgattcacttctggaagcggctgagccgcctgatgagcaaagtgaacccagagccgaacgtcatccacatcatgggctgctacattctggggaaccccaatggagagaagctgttccagaacctcaggaccctcatgactccttatagggtcaccttcgagtcacccctggagctctcagcccaagggaagcagatgatcgagacgtactttgacttccggttgtatcgcctgtggaagagccgccagcactcgaagctgctggactttgacgacgtcctgtgaggggcagaggcctccgcccagtcaccatcaggccactccctctgcaccgggacctggggctgggccgcctcgtgctccccgggactgtgtggctccggtctcgcctggagccacttcagggcacctcagacgttgctcaggttccccctgtgggttccggtcctcgctgcacccgtggccgcagaggctgcagtccctgggggccgggaggatcccgccctgtggcccgtggatgctcagcggccaggcactgacctgccatgcctcgcctggaggctcagctgtgggcatccctccatggggttcatagaaataagtgcaatttctacacccccgaaacaattcaaagggaagcagcatttcttgttaactagttaagcactatgctgctagttacagtgtaggcaccccggcccagcagcccagcagcccacatgtgttcaggaccctccctgcccaccccctccctgccgtatcgatcaccagcaccagggtggcccgtgtgcgtggggccagcgtcgccgggctgcccagcctggctctgtctacactggccgagtctctgggtctgtctacactggccgagtctccgactgtctgtgctttcacttacactcctcttgccaccccccatccctgcttacttagacctcagccggcgccggacccggtaggggcagtctgggcagcaggaaggaagggcgcagcgtcccctccttcagaggaggctctgggtggggcctgctccccatccccccaagcccacccagcactctcattgctgctgttgagttcagcttttaccagcctcagtgtggaggctccatcccagcacacaggcctggggcttggcaggggcccagctggggctgggccctgggttttgagaaactcgctggcaccacagtgggcccctggacccggccgcgcagctggtggactgtaggggctcctgactgggcacaggagctcccagcttttgtccacggccagcaggatgggctgtcgtgtatatagctggggcgagggggcaggccccccttgtgcagagccaggggtctgagggcacctggctgtgttcccagctgagggagggctggggcgggggccgggcttggaacgatgtacgataccctcatagtgaccattaaacctgatcctccaccgcg

SEQ ID NO: 104140 - DNA, 1936 bp, Homo sapiens
aggctggtacaggtctgggatgcagtgacctgcagagctcccactgcacgctggacgaggccttcgaggacctggactgggacactgagaagggcctggaggctgtggcctgcgacaccgaaggcttcgtgccaccaaaggtcatgctcatttcctccaaggtgcccaaggctgagtacatccccactatcatccgccgggatgacccctccatcatccccatcctctacgaccatgagcacgcaaccttcgaggacatccttgaggagatagagaggaagctgaacgtctaccacaagggagccaagatctggaaaatgctgattttctgccagggaggtcctggacacctctatctcctcaagaacaaggtggccacctttgccaaagtggagaaggaagaggacatgattcacccctcctccacggtccgctctgtggagtggggtgcctgtcccctgccactgggtgacccacccctctccaccagcttctggaagcggctgagccgcctgatgagcaaagtgaacccagagccgaacgtcatccacatcatgggctgctacattctggggaaccccaatggagagaagctgttccagaacctcaggaccctcatgactccttatagggtcaccttcgagtcacccctggagctctcagcccaagggaagcagatgatcgagacgtactttgacttccggttgtatcgcctgtggaagagccgccagcactcgaagctgctggactttgacgacgtcctgtgaggggcagaggcctccgcccagtcaccatcaggccactccctctgcaccgggacctggggctgggccgcctcgtgctccccgggactgtgtggctccggtctcgcctggagccacttcagggcacctcagacgttgctcaggttccccctgtgggttccggtcctcgctgcacccgtggccgcagaggctgcagtccctgggggccgggaggatcccgccctgtggcccgtggatgctcagcggccaggcactgacctgccatgcctcgcctggaggctcagctgtgggcatccctccatggggttcatagaaataagtgcaatttctacacccccgaaacaattcaaagggaagcagcatttcttgttaactagttaagcactatgctgctagttacagtgtaggcaccccggcccagcagcccagcagcccacatgtgttcaggaccctccctgcccaccccctccctgccgtatcgatcaccagcaccagggtggcccgtgtgcgtggggccagcgtcgccgggctgcccagcctggctctgtctacactggccgagtctctgggtctgtctacactggccgagtctccgactgtctgtgctttcacttacactcctcttgccaccccccatccctgcttacttagacctcagccggcgccggacccggtaggggcagtctgggcagcaggaaggaagggcgcagcgtcccctccttcagaggaggctctgggtggggcctgctccccatccccccaagcccacccagcactctcattgctgctgttgagttcagcttttaccagcctcagtgtggaggctccatcccagcacacaggcctggggcttggcaggggcccagctggggctgggccctgggttttgagaaactcgctggcaccacagtgggcccctggacccggccgcgcagctggtggactgtaggggctcctgactgggcacaggagctcccagcttttgtccacggccagcaggatgggctgtcgtgtatatagctggggcgagggggcaggccccccttgtgcagagccaggggtctgagggcacctggctgtgttcccagctgagggagggctggggcgggggccgggcttggaacgatgtacgataccctcatagtgaccattaaacctgatcctccaccgcg

SEQ ID NO: 104141 - DNA, 2395 bp, Homo sapiens
atccttaattaaattaatccccctcccccctcgggtccgggcagcgctctcccgggagcggcggcacgcgcggagcgccgggtgcggccatgcggggaccgggcccgaccccgagcccgaccccgagcccaagcccgagccggagcccgagcgagaccccgagcccgagcccgagcgcgacccccggtgcggcgcggctaccccggcggaggcggcgggcgcggggcgcgctctgaggcccgggggatgcgccgccgcctcgaccatgggcgccgccgcctccaggaggagggcgctgaggagcgaggccatgtcctcggtggcggccaaagtgcgagcagcccgagcgtttggagagtacctgtcccagagtcaccctgagaaccgcaacggcgcagatcacctgctggctgatgcctactctggccacgacgggtcccccgagatgcagccggccccccagaacaagcgccgcctgtccctcgtctccaacggctgctacgagggcagcctctcagaggagcccagcattaggaagcccgcaggcgagggccctcagcctcgagtgtacaccatctctggggagcctgccctgctgcccagccctgaggcggaggccattgagctggcggtggtgaaggggcggcggcagcggcaccctcaccatcacagccagcccctgcgcgccagccctggtggcagccgggaggacgtcagcaggccctgccagagctgggcgggcagccgccagggctccaaggagtgccccggatgtgcccagctggctcctggccccacccctcgggcctttgggctggaccagccacctctgcctgagacctccggtcgccgcaagaagctggagaggatgtacagcgttgaccgtgtgtctgacgacatccctattcgtacctggttccccaaggaaaatcttttcagcttccagacagcaaccacaactatgcaagccatctcggtgttcaggggctacgcggagaggaagcgccggaaacgggagaatgattccgcgtctgtaatccagaggaacttccgcaaacacctgcgcatggtcggcagccggagggtgaaggcccagacgttcgctgagcggcgcgagcggagcttcagccggtcctggagcgaccccacccccatgaaagccgacacttcccacgactcccgagacagcagtgacctgcagagctcccactgcacgctggacgaggccttcgaggacctggactgggacactgagaagggcctggaggctgtggcctgcgacaccgaaggcttcgtgccaccaaaggtcatgctcatttcctccaaggtgcccaaggctgagtacatccccactatcatccgccgggatgacccctccatcatccccatcctctacgaccatgagcacgcaaccttcgaggacatccttgaggagatagagaggaagctgaacgtctaccacaagggagccaagatctggaaaatgctgattttctgccagggaggtcctggacacctctatctcctcaagaacaaggtggccacctttgccaaagtggagaaggaagaggacatgattcacttctggaagcggctgagccgcctgatgagcaaagtgaacccagagccgaacgtcatccacatcatgggctgctacattctggggaaccccaatggagagaagctgttccagaacctcaggaccctcatgactccttatagggtcaccttcgagtcacccctggagctctcagcccaagggaagcagatgatcgagacgtactttgacttccggttgtatcgcctgtggaagagccgccagcactcgaagctgctggactttgacgacgtcctgtgaggggcagaggcctccgcccagtcaccatcaggccactccctctgcaccgggacctggggctgggccgcctcgtgctccccgggactgtgtggctccggtctcgcctggagccacttcagggcacctcagacgttgctcaggttccccctgtgggttccggtcctcgctgcacccgtggccgcagaggctgcagtccctgggggccgggaggatcccgccctgtggcccgtggatgctcagcggccaggcactgacctgccatgcctcgcctggaggctcagctgtgggcatccctccatggggttcatagaaataagtgcaatttctacacccccgaaacaattcaaagggaagcagcatttcttgttaactagttaagcactatgctgctagttacagtgtaggcaccccggcccagcagcccagcagcccacatgtgtgctgtgttcccagctgagggagggctggggcgggggccgggcttggaacgatgtacgataccctcatagtgaccattaaacctgatcctccaccgcg

SEQ ID NO: 104142 - DNA, 2523 bp, Homo sapiens
atccttaattaaattaatccccctcccccctcgggtccgggcagcgctctcccgggagcggcggcacgcgcggagcgccgggtgcggccatgcggggaccgggcccgaccccgagcccgaccccgagcccaagcccgagccggagcccgagcgagaccccgagcccgagcccgagcgcgacccccggtgcggcgcggctaccccggcggaggcggcgggcgcggggcgcgctctgaggcccgggggatgcgccgccgcctcgaccatgggcgccgccgcctccaggaggagggcgctgaggagcgaggccatgtcctcggtggcggccaaagtgcgagcagcccgagcgtttggagagtacctgtcccagagtcaccctgagaaccgcaacggcgcagatcacctgctggctgatgcctactctggccacgacgggtcccccgagatgcagccggccccccagaacaagcgccgcctgtccctcgtctccaacggctgctacgagggcagcctctcagaggagcccagcattaggaagcccgcaggcgagggccctcagcctcgagtgtacaccatctctggggagcctgccctgctgcccagccctgaggcggaggccattgagctggcggtggtgaaggggcggcggcagcggcaccctcaccatcacagccagcccctgcgcgccagccctggtggcagccgggaggacgtcagcaggccctgccagagctgggcgggcagccgccagggctccaaggagtgccccggatgtgcccagctggctcctggccccacccctcgggcctttgggctggaccagccacctctgcctgagacctccggtcgccgcaagaagctggagaggatgtacagcgttgaccgtgtgtctgacgacatccctattcgtacctggttccccaaggaaaatcttttcagcttccagacagcaaccacaactatgcaagccatctcggtgttcaggggctacgcggagaggaagcgccggaaacgggagaatgattccgcgtctgtaatccagaggaacttccgcaaacacctgcgcatggtcggcagccggagggtgaaggcccagacgttcgctgagcggcgcgagcggagcttcagccggtcctggagcgaccccacccccatgaaagccgacacttcccacgactcccgagacagcagtgacctgcagagctcccactgcacgctggacgaggccttcgaggacctggactgggacactgagaagggcctggaggctgtggcctgcgacaccgaaggcttcgtgccaccaaaggtcatgctcatttcctccaaggtgcccaaggctgagtacatccccactatcatccgccgggatgacccctccatcatccccatcctctacgaccatgagcacgcaaccttcgaggacatccttgaggagatagagaggaagctgaacgtctaccacaagggagccaagatctggaaaatgctgattttctgccagggaggtcctggacacctctatctcctcaagaacaaggtggccacctttgccaaagtggagaaggaagaggacatgattcacttctggaagcggctgagccgcctgatgagcaaagtgaacccagagccgaacgtcatccacatcatgggctgctacattctggggaaccccaatggagagaagctgttccagaacctcaggaccctcatgactccttatagggtcaccttcgagtcacccctggagctctcagcccaagggaagcagatgatcgagacgtactttgacttccggttgtatcgcctgtggaagagccgccagcactcgaagctgctggactttgacgacgtcctgtgaggggcagaggcctccgcccagtcaccatcaggccactccctctgcaccgggacctggggctgggccgcctcgtgctccccgggactgtgtggctccggtctcgcctggagccacttcagggcacctcagacgttgctcaggttccccctgtgggttccggtcctcgctgcacccgtggccgcagaggctgcagtccctgggggccgggaggatcccgccctgtggcccgtggatgctcagcggccaggcactgacctgccatgcctcgcctggaggctcagctgtgggcatccctccatggggttcatagaaataagtgcaatttctacacccccgaaacaattcaaagggaagcagcatttcttgttaactagttaagcactatgctgctagttacagtgtaggcacccctggacccggccgcgcagctggtggactgtaggggctcctgactgggcacaggagctcccagcttttgtccacggccagcaggatgggctgtcgtgtatatagctggggcgagggggcaggccccccttgtgcagagccaggggtctgagggcacctggctgtgttcccagctgagggagggctggggcgggggccgggcttggaacgatgtacgataccctcatagtgaccattaaacctgatcctccaccgcg

SEQ ID NO: 104143 - DNA, 881 bp, Homo sapiens
tgcccatgcagagctcagtgcactggaccggcgatttacacagccccgaaacaattcaaagggaagcagcatttcttgttaactagttaagcactatgctgctagttacagtgtaggcaccccggcccagcagcccagcagcccacatgtgttcaggaccctccctgcccaccccctccctgccgtatcgatcaccagcaccagggtggcccgtgtgcgtggggccagcgtcgccgggctgcccagcctggctctgtctacactggccgagtctctgggtctgtctacactggccgagtctccgactgtctgtgctttcacttacactcctcttgccaccccccatccctgcttacttagacctcagccggcgccggacccggtaggggcagtctgggcagcaggaaggaagggcgcagcgtcccctccttcagaggaggctctgggtggggcctgctccccatccccccaagcccacccagcactctcattgctgctgttgagttcagcttttaccagcctcagtgtggaggctccatcccagcacacaggcctggggcttggcaggggcccagctggggctgggccctgggttttgagaaactcgctggcaccacagtgggcccctggacccggccgcgcagctggtggactgtaggggctcctgactgggcacaggagctcccagcttttgtccacggccagcaggatgggctgtcgtgtatatagctggggcgagggggcaggccccccttgtgcagagccaggggtctgagggcacctggctgtgttcccagctgagggagggctggggcgggggccgggcttggaacgatgtacgataccctcatagtgaccattaaacctgatcctccaccgcg

SEQ ID NO: 104144 - DNA, 1816 bp, Homo sapiens
atccttaattaaattaatccccctcccccctcgggtccgggcagcgctctcccgggagcggcggcacgcgcggagcgccgggtgcggccatgcggggaccgggcccgaccccgagcccgaccccgagcccaagcccgagccggagcccgagcgagaccccgagcccgagcccgagcgcgacccccggtgcggcgcggctaccccggcggaggcggcgggcgcggggcgcgctctgaggcccgggggatgcgccgccgcctcgaccatgggcgccgccgcctccaggaggagggcgctgaggagcgaggccatgtcctcggtggcggccaaagtgcgagcagcccgagcgtttggagagtacctgtcccagagtcaccctgagaaccgcaacggcgcagatcacctgctggctgatgcctactctggccacgacgggtcccccgagatgcagccggccccccagaacaagcgccgcctgtccctcgtctccaacggctgctacgagggcagcctctcagaggagcccagcattaggaagcccgcaggcgagggccctcagcctcgagtgtacaccatctctggggagcctgccctgctgcccagccctgaggcggaggccattgagctggcggtggtgaaggggcggcggcagcggcaccctcaccatcacagccagcccctgcgcgccagccctggtggcagccgggaggacgtcagcaggccctgccagagctgggcgggcagccgccagggctccaaggagtgccccggatgtgcccagctggctcctggccccacccctcgggcctttgggctggaccagccacctctgcctgagacctccggtcgccgcaagaagctggagaggatgtacagcgttgaccgtgtgtctgacgacatccctattcgtacctggttccccaaggaaaatcttttcagcttccagacagcaaccacaactatgcaagccatctcggtgttcaggggctacgcggagaggaagcgccggaaacgggagaatgattccgcgtctgtaatccagaggaacttccgcaaacacctgcgcatggtcggcagccggagggtgaaggcccagacgttcgctgagcggcgcgagcggagcttcagccggtcctggagcgaccccacccccatgaaagccgacacttcccacgactcccgagacagcagtgacctgcagagctcccactgcacgctggacgaggccttcgaggacctggactgggacactgagaagggcctggaggctgtggcctgcgacaccgaaggcttcgtgccaccaaaggtcatgctcatttcctccaaggtgcccaaggctgagtacatccccactatcatccgccgggatgacccctccatcatccccatcctctacgaccatgagcacgcaaccttcgaggacatccttgaggagatagagaggaagctgaacgtctaccacaagggagccaagatctggaaaatgctgattttctgccagggaggtcctggacacctctatctcctcaagaacaaggtggccacctttgccaaagtggagaaggaagaggacatgattcacttctggaagcggctgagccgcctgatgagcaaagtgaacccagagccgaacgtcatccacatcatgggctgctacattctggggaaccccaatggagagaagccccttgtgcagagccaggggtctgagggcacctggctgtgttcccagctgagggagggctggggcgggggccgggcttggaacgatgtacgataccctcatagtgaccattaaacctgatcctccaccgcg

SEQ ID NO: 104145 - DNA, 632 bp, Homo sapiens
gggcagtgctgactcgcggtggtttcccagggtgttcaggggctacgcggagaggaagcgccggaaacgggagaatgattccgcgtctgtaatccagaggtagggcctgccagccactcgccaccagggtccatctctggtctgtgctggcctggcctgggccccctcggccctggcagacctgatgggggaagggtggtggcgaccactggcctggccctgctctggggacgtggcaggcaggagaggccatgtggcccgggctgcaggaaagcatctcaccctcagtcctgcactccgagggcacgtgtctctgtctgggctggggccagcagcaaggcccccctcccccactccaatcacacagatgtgtctgggaagcttttttgcccgttttggatgttgggccttggcagggtccaaagtttggtggaggagaggacctgcccctgaggtggctcaaggacacagagcaggagagggggctcctgcaggcccccagcccgccatggggtggtgcagacaggagccccgctctgctgcagcgcaggcaggctggatcctctgccacatgggcgtggaggctcagggcgtaagtcccgggcgaggacggaaggtcagagcctgggaat

SEQ ID NO: 104146 - DNA, 3027 bp, Homo sapiens
atccttaattaaattaatccccctcccccctcgggtccgggcagcgctctcccgggagcggcggcacgcgcggagcgccgggtgcggccatgcggggaccgggcccgaccccgagcccgaccccgagcccaagcccgagccggagcccgagcgagaccccgagcccgagcccgagcgcgacccccggtgcggcgcggctaccccggcggaggcggcgggcgcggggcgcgctctgaggcccgggggatgcgccgccgcctcgaccatgggcgccgccgcctccaggaggagggcgctgaggagcgaggccatgtcctcggtggcggccaaagtgcgagcagcccgagcgtttggagagtacctgtcccagagtcaccctgagaaccgcaacggcgcagatcacctgctggctgatgcctactctggccacgacgggtcccccgagatgcagccggccccccagaacaagcgccgcctgtccctcgtctccaacggctgctacgagggcagcctctcagaggagcccagcattaggaagcccgcaggcgagggccctcagcctcgagtgtacaccatctctggggagcctgccctgctgcccagccctgaggcggaggccattgagctggcggtggtgaaggggcggcggcagcggcaccctcaccatcacagccagcccctgcgcgccagccctggtggcagccgggaggacgtcagcaggccctgccagagctgggcgggcagccgccagggctccaaggagtgccccggatgtgcccagctggctcctggccccacccctcgggcctttgggctggaccagccacctctgcctgagacctccggtcgccgcaagaagctggagaggatgtacagcgttgaccgtgtgtctgacgacatccctattcgtacctggttccccaaggaaaatcttttcagcttccagacagcaaccacaactatgcaagccatctcggtgttcaggggctacgcggagaggaagcgccggaaacgggagaatgattccgcgtctgtaatccagaggaacttccgcaaacacctgcgcatggtcggcagccggagggtgaaggcccagacgttcgctgagcggcgcgagcggagcttcagccggtcctggagcgaccccacccccatgaaagccgacacttcccacgactcccgagacagcagtgacctgcagagctcccactgcacgctggacgaggccttcgaggacctggactgggacactgagaagggcctggaggctgtggcctgcgacaccgaaggcttcgtgccaccaaaggtcatgctcatttcctccaaggtgcccaaggctgagtacatccccactatcatccgccgggatgacccctccatcatccccatcctctacgaccatgagcacgcaaccttcgaggacatccttgaggagatagagaggaagctgaacgtctaccacaagggagccaagatctggaaaatgctgattttctgccagggaggtcctggacacctctatctcctcaagaacaaggtggccacctttgccaaagtggagaaggaagaggacatgattcacttctggaagcggctgagccgcctgatgagcaaagtgaacccagagccgaacgtcatccacatcatgggctgctacattctggggaaccccaatggagagaagctgttccagaacctcaggaccctcatgactccttatagggtcaccttcgagtcacccctggagctctcagcccaagggaagcagatgatcgagacgtactttgacttccggttgtatcgcctgtggaagagccgccagcactcgaagctgctggactttgacgacgtcctgtgaggggcagaggcctccgcccagtcaccatcaggccactccctctgcaccgggacctggggctgggccgcctcgtgctccccgggactgtgtggctccggtctcgcctggagccacttcagggcacctcagacgttgctcaggttccccctgtgggttccggtcctcgctgcacccgtggccgcagaggctgcagtccctgggggccgggaggatcccgccctgtggcccgtggatgctcagcggccaggcactgacctgccatgcctcgcctggaggctcagctgtgggcatccctccatggggttcatagaaataagtgcaatttctacacccccgaaacaattcaaagggaagcagcatttcttgttaactagttaagcactatgctgctagttacagtgtaggcaccccggcccagcagcccagcagcccacatgtgttcaggaccctccctgcccaccccctccctgccgtatcgatcaccagcaccagggtggcccgtgtgcgtggggccagcgtcgccgggctgcccagcctggctctgtctacactggccgagtctctgggtctgtctacactggccgagtctccgactgtctgtgctttcacttacactcctcttgccaccccccatccctgcttacttagacctcagccggcgccggacccggtaggggcagtctgggcagcaggaaggaagggcgcagcgtcccctccttcagaggaggctctgggtggggcctgctccccatccccccaagcccacccagcactctcattgctgctgttgagttcagcttttaccagcctcagtgtggaggctccatcccagcacacaggcctggggcttggcaggggcccagctggggctgggccctgggttttgagaaactcgctggcaccacagtgggcccctggacccggccgcgcagctggtggactgtaggggctcctgactgggcacaggagctcccagcttttgtccacggccagcaggatgggctgtcgtgtatatagctggggcgagggggcaggccccccttgtgcagagccaggggtctgagggcacctggctgtgttcccagctgagggagggctggggcgggggccgggcttggaacgatgtacgataccctcatagtgaccattaaacctgatcctccaccgcg

SEQ ID NO: 104147 - DNA, 3194 bp, Homo sapiens
atccttaattaaattaatccccctcccccctcgggtccgggcagcgctctcccgggagcggcggcacgcgcggagcgccgggtgcggccatgcggggaccgggcccgaccccgagcccgaccccgagcccaagcccgagccggagcccgagcgagaccccgagcccgagcccgagcgcgacccccggtgcggcgcggctaccccggcggaggcggcgggcgcggggcgcgctctgaggcccgggggatgcgccgccgcctcgaccatgggcgccgccgcctccaggaggagggcgctgaggagcgaggccatgtcctcggtggcggccaaagtgcgagcagcccgagcgtttggagagtacctgtcccagagtcaccctgagaaccgcaacggcgcagatcacctgctggctgatgcctactctggccacgacgggtcccccgagatgcagccggccccccagaacaagcgccgcctgtccctcgtctccaacggctgctacgagggcagcctctcagaggagcccagcattaggaagcccgcaggcgagggccctcagcctcgagtgtacaccatctctggggagcctgccctgctgcccagccctgaggcggaggccattgagctggcggtggtgaaggggcggcggcagcggcaccctcaccatcacagccagcccctgcgcgccagccctggtggcagccgggaggacgtcagcaggccctgccagagctgggcgggcagccgccagggctccaaggagtgccccggatgtgcccagctggctcctggccccacccctcgggcctttgggctggaccagccacctctgcctgagacctccggtcgccgcaagaagctggagaggatgtacagcgttgaccgtgtgtctgacgacatccctattcgtacctggttccccaaggaaaatcttttcagcttccagacagcaaccacaactatgcaagccatctcgaacttccgcaaacacctgcgcatggtcggcagccggagggtgaaggcccagacgttcgctgagcggcgcgagcggagcttcagccggtcctggagcgaccccacccccatgaaagccgacacttcccacgactcccgagacagcagtgacctgcagagctcccactgcacgctggacgaggccttcgaggacctggactgggacactgagaagggcctggaggctgtggcctgcgacaccgaaggcttcgtgccaccaaaggtcatggtgaggcccagcccgggcagtgctcctctacaccccgagcaggactccgccccaacccgagtccagccagctctgcctgggaccacgcagccttctccagctgcctgggggagggtgtctcacagggctatacccttgggctgcctggcagccagaaggtagcctcatgggggctcccacagccccttggcttttggatgggcctggggcccctgagcagctctttgtctccgcagctcatttcctccaaggtgcccaaggctgagtacatccccactatcatccgccgggatgacccctccatcatccccatcctctacgaccatgagcacgcaaccttcgaggacatccttgaggagatagagaggaagctgaacgtctaccacaagggagccaagatctggaaaatgctgattttctgccagggaggtcctggacacctctatctcctcaagaacaaggtggccacctttgccaaagtggagaaggaagaggacatgattcacttctggaagcggctgagccgcctgatgagcaaagtgaacccagagccgaacgtcatccacatcatgggctgctacattctggggaaccccaatggagagaagctgttccagaacctcaggaccctcatgactccttatagggtcaccttcgagtcacccctggagctctcagcccaagggaagcagatgatcgagacgtactttgacttccggttgtatcgcctgtggaagagccgccagcactcgaagctgctggactttgacgacgtcctgtgaggggcagaggcctccgcccagtcaccatcaggccactccctctgcaccgggacctggggctgggccgcctcgtgctccccgggactgtgtggctccggtctcgcctggagccacttcagggcacctcagacgttgctcaggttccccctgtgggttccggtcctcgctgcacccgtggccgcagaggctgcagtccctgggggccgggaggatcccgccctgtggcccgtggatgctcagcggccaggcactgacctgccatgcctcgcctggaggctcagctgtgggcatccctccatggggttcatagaaataagtgcaatttctacacccccgaaacaattcaaagggaagcagcatttcttgttaactagttaagcactatgctgctagttacagtgtaggcaccccggcccagcagcccagcagcccacatgtgttcaggaccctccctgcccaccccctccctgccgtatcgatcaccagcaccagggtggcccgtgtgcgtggggccagcgtcgccgggctgcccagcctggctctgtctacactggccgagtctctgggtctgtctacactggccgagtctccgactgtctgtgctttcacttacactcctcttgccaccccccatccctgcttacttagacctcagccggcgccggacccggtaggggcagtctgggcagcaggaaggaagggcgcagcgtcccctccttcagaggaggctctgggtggggcctgctccccatccccccaagcccacccagcactctcattgctgctgttgagttcagcttttaccagcctcagtgtggaggctccatcccagcacacaggcctggggcttggcaggggcccagctggggctgggccctgggttttgagaaactcgctggcaccacagtgggcccctggacccggccgcgcagctggtggactgtaggggctcctgactgggcacaggagctcccagcttttgtccacggccagcaggatgggctgtcgtgtatatagctggggcgagggggcaggccccccttgtgcagagccaggggtctgagggcacctggctgtgttcccagctgagggagggctggggcgggggccgggcttggaacgatgtacgataccctcatagtgaccattaaacctgatcctccaccgcg

SEQ ID NO: 104148 - DNA, 2119 bp, Homo sapiens
tagtcgctcaaggatcccccggaggcgttgaatggccagacgttcgctgagcggcgcgagcggagcttcagccggtcctggagcgaccccacccccatgaaagccgacacttcccacgactcccgagacagcagtgacctgcagagctcccactgcacgctggacgaggccttcgaggacctggactgggacactgagaagggcctggaggctgtggcctgcgacaccgaaggcttcgtgccaccaaaggtcatgctcatttcctccaaggtgcccaaggctgagtacatccccactatcatccgccgggatgacccctccatcatccccatcctctacgtgagtcccgccccgggcctgcccccaacagatgccctcttgcggccccaccctgggccagcgccggcaccccaggtccccagggtgctgtggcgctgctggctctgacgcagccttgatgtggccttgtggcctgtgtctgtccccaggaccatgagcacgcaaccttcgaggacatccttgaggagatagagaggaagctgaacgtctaccacaagggagccaagatctggaaaatgctgattttctgccagggaggtcctggacacctctatctcctcaagaacaaggtggccacctttgccaaagtggagaaggaagaggacatgattcacttctggaagcggctgagccgcctgatgagcaaagtgaacccagagccgaacgtcatccacatcatgggctgctacattctggggaaccccaatggagagaagctgttccagaacctcaggaccctcatgactccttatagggtcaccttcgagtcacccctggagctctcagcccaagggaagcagatgatcgagacgtactttgacttccggttgtatcgcctgtggaagagccgccagcactcgaagctgctggactttgacgacgtcctgtgaggggcagaggcctccgcccagtcaccatcaggccactccctctgcaccgggacctggggctgggccgcctcgtgctccccgggactgtgtggctccggtctcgcctggagccacttcagggcacctcagacgttgctcaggttccccctgtgggttccggtcctcgctgcacccgtggccgcagaggctgcagtccctgggggccgggaggatcccgccctgtggcccgtggatgctcagcggccaggcactgacctgccatgcctcgcctggaggctcagctgtgggcatccctccatggggttcatagaaataagtgcaatttctacacccccgaaacaattcaaagggaagcagcatttcttgttaactagttaagcactatgctgctagttacagtgtaggcaccccggcccagcagcccagcagcccacatgtgttcaggaccctccctgcccaccccctccctgccgtatcgatcaccagcaccagggtggcccgtgtgcgtggggccagcgtcgccgggctgcccagcctggctctgtctacactggccgagtctctgggtctgtctacactggccgagtctccgactgtctgtgctttcacttacactcctcttgccaccccccatccctgcttacttagacctcagccggcgccggacccggtaggggcagtctgggcagcaggaaggaagggcgcagcgtcccctccttcagaggaggctctgggtggggcctgctccccatccccccaagcccacccagcactctcattgctgctgttgagttcagcttttaccagcctcagtgtggaggctccatcccagcacacaggcctggggcttggcaggggcccagctggggctgggccctgggttttgagaaactcgctggcaccacagtgggcccctggacccggccgcgcagctggtggactgtaggggctcctgactgggcacaggagctcccagcttttgtccacggccagcaggatgggctgtcgtgtatatagctggggcgagggggcaggccccccttgtgcagagccaggggtctgagggcacctggctgtgttcccagctgagggagggctggggcgggggccgggcttggaacgatgtacgataccctcatagtgaccattaaacctgatcctccaccgcg

SEQ ID NO: 104149 - DNA, 3053 bp, Homo sapiens
atccttaattaaattaatccccctcccccctcgggtccgggcagcgctctcccgggagcggcggcacgcgcggagcgccgggtgcggccatgcggggaccgggcccgaccccgagcccgaccccgagcccaagcccgagccggagcccgagcgagaccccgagcccgagcccgagcgcgacccccggtgcggcgcggctaccccggcggaggcggcgggcgcggggcgcgctctgaggcccgggggatgcgccgccgcctcgaccatgggcgccgccgcctccaggaggagggcgctgaggagcgaggccatgtcctcggtggcggccaaagtgcgagcagcccgagcgtttggagagtacctgtcccagagtcaccctgagaaccgcaacggcgcagatcacctgctggctgatgcctactctggccacgacgggtcccccgagatgcagccggccccccagaacaagcgccgcctgtccctcgtctccaacggctgctacgagggcagcctctcagaggagcccagcattaggaagcccgcaggcgagggccctcagcctcgagtgtacaccatctctggggagcctgccctgctgcccagccctgaggcggaggccattgagctggcggtggtgaaggggcggcggcagcggcaccctcaccatcacagccagcccctgcgcgccagccctggtggcagccgggaggacgtcagcaggccctgccagagctgggcgggcagccgccagggctccaaggagtgccccggatgtgcccagctggctcctggccccacccctcgggcctttgggctggaccagccacctctgcctgagacctccggtcgccgcaagaagctggagaggatgtacagcgttgaccgtgtgtctgacgacatccctattcgtacctggttccccaaggaaaatcttttcagcttccagacagcaaccacaactatgcaagccatctcggtgttcaggggctacgcggagaggaagcgccggaaacgggagaatgattccgcgtctgtaatccagaggaacttccgcaaacacctgcgcatggtcggcagccggagggtgaaggcccagacgttcgctgagcggcgcgagcggagcttcagccggtcctggagcgaccccacccccatgaaagccgacacttcccacgactcccgagacagcagtgacctgcagagctcccactgcacgctggacgaggccttcgaggacctggactgggacactgagaagggcctggaggctgtggcctgcgacaccgaaggcttcgtgccaccaaaggtcatgctcatttcctccaaggtgcccaaggctgagtacatccccactatcatccgccgggatgacccctccatcatccccatcctctacgaccatgagcacgcaaccttcgaggacatccttgaggagatagagaggaagctgaacgtctaccacaagggagccaagatctggaaaatgctgattttctgccagggaggtcctggacacctctatctcctcaagaacaaggtggccacctttgccaaagtggagaaggaagaggacatgattcacttctggaagcggctgagccgcctgatgagcaaagtgaacccagagccgaacgtcatccacatcatgggctgctacattctggggaaccccaatggagagaagctgttccagaacctcaggaccctcatgactccttatagggtcaccttcgagtcacccctggagctctcagcccaagggaagcagatgatcgagacgtactttgacttccggttgtatcgcctgtggaagagccgccagcactcgaagctgctggactttgacgacgtcctgtgaggggcagaggcctccgcccagtcaccatcaggccactccctctgcaccgggacctggggctgggccgcctcgtgctccccgggactgtgtggctccggtctcgcctggagccacttcagggcacctcagacgttgctcaggttccccctgtgggttccggtcctcgctgcacccgtggccgcagaggctgcagtccctgggggccgggaggatcccgccctgtggcccgtggatgctcagcggccaggcactgacctgccatgcctcgcctggaggctcagctgtgggcatccctccatggggttcatagaaataagtgcaatttctacacccccgaaacaattcaaagggaagcagcatttcttgttaactagttaagcactatgctgctagttacagtgtaggcaccccggcccagcagcccagcagcccacatgtgtgctgtgttcccagctgagggagggctggggcgggggccgggcttggaacgatgtacgataccctcatagtgaccattaaacctgatcctccaccgcggccgccgcgtgggtctgtcctctcagtgctttccaggggccttcctgtgcccagcttctgggcccactcctgtgaggtcactgctgcagggccttcctgcctggacagagttggagctaggccactagaccaccccacagggcatagccagggggaccagcacaggaggggacggagaggagctgcaggagggctggggggaggctgcagtctcggaggggggcctcgccgggtctggaggggacagcagagacagcccgttccccctgccgcctgagggcaccagggagagggctgtatgtccctcacgccacactgtgtgtgcagtcagcagtgtggccacagatgggggccactctctcaacctcaggtgtcctcagggcccagaccgctgctgggcacagccaggctggctgccagctggttccctgccccgtggctgggggacagagcagcacgtatcagctgggctagggtcagggggccactggtgcgcagcctggcacagcctggcaggcttgaggcccagtgtgctgggggtggtcacacagccgtcagccacctccagctcttccagggcattctagatggggtcccgggagggggcaggttttggtgccaatttgagtgtataaagttttaggtaaataccaaatgc

SEQ ID NO: 104150 - DNA, 2478 bp, Homo sapiens
atccttaattaaattaatccccctcccccctcgggtccgggcagcgctctcccgggagcggcggcacgcgcggagcgccgggtgcggccatgcggggaccgggcccgaccccgagcccgaccccgagcccaagcccgagccggagcccgagcgagaccccgagcccgagcccgagcgcgacccccggtgcggcgcggctaccccggcggaggcggcgggcgcggggcgcgctctgaggcccgggggatgcgccgccgcctcgaccatgggcgccgccgcctccaggaggagggcgctgaggagcgaggccatgtcctcggtggcggccaaagtgcgagcagcccgagcgtttggagagtacctgtcccagagtcaccctgagaaccgcaacggcgcagatcacctgctggctgatgcctactctggccacgacgggtcccccgagatgcagccggccccccagaacaagcgccgcctgtccctcgtctccaacggctgctacgagggcagcctctcagaggagcccagcattaggaagcccgcaggcgagggccctcagcctcgagtgtacaccatctctggggagcctgccctgctgcccagccctgaggcggaggccattgagctggcggtggtgaaggggcggcggcagcggcaccctcaccatcacagccagcccctgcgcgccagccctggtggcagccgggaggacgtcagcaggccctgccagagctgggcgggcagccgccagggctccaaggagtgccccggatgtgcccagctggctcctggccccacccctcgggcctttgggctggaccagccacctctgcctgagacctccggtcgccgcaagaagctggagaggatgtacagcgttgaccgtgtgtctgacgacatccctattcgtacctggttccccaaggaaaatcttttcagcttccagacagcaaccacaactatgcaagccatctcggtgttcaggggctacgcggagaggaagcgccggaaacgggagaatgattccgcgtctgtaatccagaggaacttccgcaaacacctgcgcatggtcggcagccggagggtgaaggcccagacgttcgctgagcggcgcgagcggagcttcagccggtcctggagcgaccccacccccatgaaagccgacacttcccacgactcccgagacagcagtgacctgcagagctcccactgcacgctggacgaggccttcgaggacctggactgggacactgagaagggcctggaggctgtggcctgcgacaccgaaggcttcgtgccaccaaaggtcatgctcatttcctccaaggtgcccaaggctgagtacatccccactatcatccgccgggatgacccctccatcatccccatcctctacgaccatgagcacgcaaccttcgaggacatccttgaggagatagagaggaagctgaacgtctaccacaagggagccaagatctggaaaatgctgattttctgccagggaggtcctggacacctctatctcctcaagaacaaggtggccacctttgccaaagtggagaaggaagaggacatgattcacttctggaagcggctgagccgcctgatgagcaaagtgaacccagagccgaacgtcatccacatcatgggctgctacattctggggaaccccaatggagagaagctgttccagaacctcaggaccctcatgactccttatagggtcaccttcgagtcacccctggagctctcagcccaagggaagcagatgatcgagacgtactttgacttccggttgtatcgcctgtggaagagccgccagcactcgaagctgctggactttgacgacgtcctgtgaggggcagaggcctccgcccagtcaccatcaggccactccctctgcaccgggacctggggctgggccgcctcgtgctccccgggactgtgtggctccggtctcgcctggagccacttcagggcacctcagacgttgctcaggttccccctgtgggttccggtcctcgctgcacccgtggccgcagaggctgcagtccctgggggccgggaggatcccgccctgtggcccgtggatgctcagcggccaggcactgacctgccatgcctcgcctggaggctcagctgtgggcatccctccatggggttcatagaaataagtgcaatttctacacccccgaaacaattcaaagggaagcagcatttcttgttaactagttaagcactatgctgctagttacagtgtaggcaccccggcccagcagcccagcagcccacatgtgttcaggaccctccctgcccaccccctggagctctcagcccaagggaagcagatgatcgagacgtactttgacttccggttgtatgctgtgttcccagctgagggagggctggggcgggggccgggcttggaacgatgtacgataccctcatagtgaccattaaacctgatcctccaccgcg

SEQ ID NO: 104151 - DNA, 2430 bp, Homo sapiens
atccttaattaaattaatccccctcccccctcgggtccgggcagcgctctcccgggagcggcggcacgcgcggagcgccgggtgcggccatgcggggaccgggcccgaccccgagcccgaccccgagcccaagcccgagccggagcccgagcgagaccccgagcccgagcccgagcgcgacccccggtgcggcgcggctaccccggcggaggcggcgggcgcggggcgcgctctgaggcccgggggatgcgccgccgcctcgaccatgggcgccgccgcctccaggaggagggcgctgaggagcgaggccatgtcctcggtggcggccaaagtgcgagcagcccgagcgtttggagagtacctgtcccagagtcaccctgagaaccgcaacggcgcagatcacctgctggctgatgcctactctggccacgacgggtcccccgagatgcagccggccccccagaacaagcgccgcctgtccctcgtctccaacggctgctacgagggcagcctctcagaggagcccagcattaggaagcccgcaggcgagggccctcagcctcgagtgtacaccatctctggggagcctgccctgctgcccagccctgaggcggaggccattgagctggcggtggtgaaggggcggcggcagcggcaccctcaccatcacagccagcccctgcgcgccagccctggtggcagccgggaggacgtcagcaggccctgccagagctgggcgggcagccgccagggctccaaggagtgccccggatgtgcccagctggctcctggccccacccctcgggcctttgggctggaccagccacctctgcctgagacctccggtcgccgcaagaagctggagaggatgtacagcgttgaccgtgtgtctgacgacatccctattcgtacctggttccccaaggaaaatcttttcagcttccagacagcaaccacaactatgcaagccatctcggtgttcaggggctacgcggagaggaagcgccggaaacgggagaatgattccgcgtctgtaatccagaggaacttccgcaaacacctgcgcatggtcggcagccggagggtgaaggcccagacgttcgctgagcggcgcgagcggagcttcagccggtcctggagcgaccccacccccatgaaagccgacacttcccacgactcccgagacagcagtgacctgcagagctcccactgcacgctggacgaggccttcgaggacctggactgggacactgagaagggcctggaggctgtggcctgcgacaccgaaggcttcgtgccaccaaaggtcatgctcatttcctccaaggtgcccaaggctgagtacatccccactatcatccgccgggatgacccctccatcatccccatcctctacgaccatgagcacgcaaccttcgaggacatccttgaggagatagagaggaagctgaacgtctaccacaagggagccaagatctggaaaatgctgattttctgccagggaggtcctggacacctctatctcctcaagaacaaggtggccacctttgccaaagtggagaaggaagaggacatgattcacttctggaagcggctgagccgcctgatgagcaaagtgaacccagagccgaacgtcatccacatcatgggctgctacattctggggaaccccaatggagagaagctgttccagaacctcaggaccctcatgactccttatagggtcaccttcgagtcacccctggagctctcagcccaagggaagcagatgatcgagacgtactttgacttccggttgtatcgcctgtggaagagccgccagcactcgaagctgctggactttgacgacgtcctgtgaggggcagaggcctccgcccagtcaccatcaggccactccctctgcaccgggacctggggctgggccgcctcgtgctccccgggactgtgtggctccggtctcgcctggagccacttcagggcacctcagacgttgctcaggttccccctgtgggttccggtcctcgctgcacccgtggccgcagaggctgcagtccctgggggccgggaggatcccgccctgtggcccgtggatgctcagcggccaggcactgacctgccatgcctcgcctggaggctcagctgtgggcatccctccatggggttcatagaaataagtgcaatttctacacccccgaaacaattcaaagggaagcagcatttcttgttaactagttaagcactatgctgctagttacagtgtaggcaccccggcccagcagcccagcagcccacatgtgtccccttgtgcagagccaggggtctgagggcacctggctgtgttcccagctgagggagggctggggcgggggccgggcttggaacgatgtacgataccctcatagtgaccattaaacctgatcctccaccgcg

SEQ ID NO: 104152 - DNA, 1015 bp, Homo sapiens
  misc_feature (791)..(791): n is a, c, g, or t
  misc_feature (806)..(806): n is a, c, g, or t
  misc_feature (814)..(814): n is a, c, g, or t
  misc_feature (884)..(884): n is a, c, g, or t
  misc_feature (890)..(890): n is a, c, g, or t
  misc_feature (895)..(895): n is a, c, g, or t
  misc_feature (899)..(899): n is a, c, g, or t
  misc_feature (1014)..(1014): n is a, c, g, or t
atccttaattaaattaatccccctcccccctcgggtccgggcagcgctctcccgggagcggcggcacgcgcggagcgccgggtgcggccatgcggggaccgggcccgaccccgagcccgaccccgagcccaagcccgagccggagcccgagcgagaccccgagcccgagcccgagcgcgacccccggtgcggcgcggctaccccggcggaggcggcgggcgcggggcgcgctctgaggcccgggggatgcgccgccgcctcgaccatgggcgccgccgcctccaggaggagggcgctgaggagcgaggccatgtcctcggtggcggccaaagtgcgagcagcccgagcgtttggagagtacctgtcccagagtcaccctgagaaccgcaacggcgcagatcacctgctggctgatgcctactctggccacgacgggtcccccgagatgcagccggccccccagaacaagcgccgcctgtccctcgtctccaacggctgctacgagggcagcctctcagaggagcccagcattaggaagcccgcaggcgagggccctcagcctcgagtgtacaccatctctggggagcctgccctgctgcccagccctgaggcggaggccattgagctggcggtggtgaaggggcggcggcagcggcaccctcaccatcacagccagcccctgcgcgccagccctggtggcagccgggaggacgtcagcaggccctgccagagctgggcgggcagccgccagggctccaaggagtgccccggatgtgcccagctgctctgcncactctcggtctttngctgacancactctgctaactctgtgcgcaaagtgaagattacgtacgttttataatctatgtctgttcagaatttantcaaanacaanatanattgactcgaaactgtatgtgacgagtagcaagtgtatgtcacgactactgtctgacacaccatatatcaatcaaatatatatataagtaatatgatagtattttaagttcaagnt

SEQ ID NO: 104153 - DNA, 327 bp, Homo sapiens
tccctgcggagggccctgcagtgcctcggaaggaacccacccagcctttgggaagcacccgtgagaggccctgggtgggaccctgcagcatggcaggggctcgccaggtctccagacccctggctgcgcataggacagaatccccatccccggcattgccacagaccattaattctgggctctcatgctctcaggaagcctcacccgggcccctggctcctgctgcacagccaggagggggttggattccggttccggtgacactgtcgggggctgctcctcacccccaggtgtgcacctggcacagccactgtcccaggatccctg

SEQ ID NO: 104154 - DNA, 208 bp, Homo sapiens
ccgggaacctagcccggacggcctcgttctccacattaattcgtggtccaccagttcagcagcctgtcctctcagcttcttctagggtggcttataatgaaggtagcaagttcaatgttttcttgttttttttttttttcctcctggagggaggattatgtgaatttaaaatctcctaggcattcaaaaccaaaaccaaaaccaacca

SEQ ID NO: 104155 - DNA, 413 bp, Homo sapiens
tgctctagtcacgccctcaaaactgggtaaagtacctctctcgtcatctccctaatacccattcttggaaatgaaagcaatgtcactttataatctctttcctgatctttattttcccactagactagtgattattaaccatagtgatgtgattgtcaggtgtgtcacagtaatctagttttcagagtcacactgacttccatgcttaagctggcaggtaatttatcatacatacgatcttagattccaaatcttttttatttgactgttacatttgccttatgtgtttcagaagatggaacaacaatgtcgggcattatagtctgtgtaccaatatatatcctgaaaatctctctggaaatgggttactccttcaatgtggctctaacacagagctgcactatcccataaac

SEQ ID NO: 104156 - DNA, 451 bp, Homo sapiens
agatccttgaagacttggagcagagcctccagtcagtgctcagtggatgtataacatgaaagagaataaaatctttgttattataacctagtcaaatctgactgctacagttggtattaattaatgtcttctttaaaggaacatttatcaaataaacacatctcagataaaaacagttgttctcccatggtgtatgtatcttcatgtttgtccttagtggttataataatctgtataaattatgaagagaatctgctggaatgattagtaaggtgctttatttgtgggccaaatagtagcaggtattagatacgttggtgggccaagaaatgaagggaagccaagaatggagtgatacatcttacaaaagagaccaaatttcatacccgatgacatcaaattttatacctaatgatgtcaaatataggccatttgtttcaggaaaaaaaaa

SEQ ID NO: 104157 - DNA, 421 bp, Homo sapiens
attaggaattgaaatccaggaagccattgcttagaagcaaaaatcatatcttagaaaagtttcaaaaatgaaattcccattagtacctggaaatattacatgggaataaataaatatcaaaggtaacactgaaatttccatggtaatacaacatccctaacagatggacatctagctgtgtttgaatgtttctggtatgtggcagttactaccattctacaattttaagctttaactgtagaatatcattaaggtaaccacatctacctctgctgggcttggtggctcatgcctgtaaccctgacattttgggaaagcaaggtaggccaattgcttgagctgaggatttcgagactagcctgggcaacatggcaaaaccctgtctctacaacaaatacaaaaattaactgggcatagtggt

SEQ ID NO: 104158 - DNA, 480 bp, Homo sapiens
agaagagagagttaactttgacaacggcaataacagaacaaagaatgtactttatgtatgttttctttgttctttgtttaccccattctagcaatgcagaaacagttagaagacactcaccgagccccacctggcttcccacctgtgaccaggtgaggcaacagtgtgggggaggatgaggcagctgccctcggcattgcctgtggcaaggccagcaacacaacccaggaaaggggaccgttttcagtgtctagtgggataataatatctagcatttactgggcatactcaatcttgctaccaccctggttttgaaaacacaaatctgttcaaatgcagttgatacatgggggagcactttgtgcatgatgtaattttgcattctcctatgaatgatgaatgacgggttgctagtctggttgaacagttacagatggatttgtaagctagacagtgtccctcaggaccatggaatgtgtg

SEQ ID NO: 104159 - DNA, 353 bp, Homo sapiens
tagttctgcgcactaaaaaagtggataagacattaatcttttaaaagtgctctgtgcctccagaatatgtgtcagccatggctgggcgccgtggctcatgcctgtaatcccagcactttgggaggctgaggcaggcagatcacgaagtcagtagtttgagaccagcctggccaacataatgaaaccccgtctctactaaaaatacaaaaattagctgggcgtggtggcacacgactgcaatcccagctactcgggaggctgaggcaggagaattgcttgaacccgggaggcagaggtggcagtgagctgagatcacgccattacactccagcctggatgacagagcgagactc

SEQ ID NO: 104160 - DNA, 360 bp, Homo sapiens
cattgcaattcttatgtaaatctaaaagcattctaaagtaaaaagtctacttaaaaaaaataaatgatgtctttactatctgacttctcaaatgctttaatatgctgagacattttgagtattcccaaattaatatgactaaagaactgaatagctgttacattctcgggtcctagggttctctagaatagttaggaatgataataataatagctaacatttattagagaggctctgagcttcgtggttaataactttatcccgtgagccagactccctgctcacctatgaccatcactacttaagagctgtataatcaaggctgggcatggtggctctcccctgtaatcccagcatttt

SEQ ID NO: 104161 - DNA, 387 bp, Homo sapiens
tttttttttttttttttttggtagagatgagttctcattatgttacccaggttgatcttgaactcctgggctcaggtgatcctcccccctcagcttctggagtagctggaacaacaggcataagccaccatgcctggcttcagtgttttttacaatagccaaaaaaaaccccaaaaaaatcagaaattaacaaaatacctcttggggctactgaagtcacaaataatatttagagtgcactaacctcaggtcagcccttgtctgaagggttttgcatgccttatctcatttagttctgacaaccactgaagaaagtcttggtataacccatctttataatcaaggaaagtaaggctcaggacactatgtaacttgtccaaggaagta

SEQ ID NO: 104162 - DNA, 420 bp, Homo sapiens
gtgttatctgaatccagaaattctacagcagaggtttggctccacctcaccattgatttcctttcggtgattttgtaagtcatcactttgtaatgcaatttctctctgtatgaaacaaacgagtatttttttttaccaccccttctgagactgttgataaaacacactcgacaaacgttttacagcacccttgtgaggcactaaggaatggggagaaatctacacctaaccaccaccaccaccaggcatcccagtgtgctcagggcagcgccagtttttgcagaagtattaatagcccctcctttcactcccccaagcgtcttcgatgggatggttagttataaggtcacgctacagaaaacataacaccaggcctggagaagttcagagtcagggtgagagaaaagactgggaggagga

SEQ ID NO: 104163 - DNA, 369 bp, Homo sapiens
cgttttgccatgttgcccaggctcatctcgaattcctgagctcatgcgatctgcctggcctcggtctcccagagtgctaggattacaggcatgagccaccgtgccagttcttatcattttaatttcaaagagtgtttttgttcatcttctgaatgttcctttctgtagcatctgtgtttttgtttttttgagacagaatcttgccctgtcaccccggctggagtgcaatggtgcaatcttggcttactccaacctctacctcccgggttcaaacgattctcatacctcagtctcctgagtagctgagattacaggcatctgccaccatacctggctaatttttgtatttttagtagagacgtgatttca

SEQ ID NO: 104164 - DNA, 3306 bp, Homo sapiens
  misc_feature (1336)..(1336): n is a, c, g, or t
  misc_feature (1492)..(1492): n is a, c, g, or t
  misc_feature (1497)..(1497): n is a, c, g, or t
  misc_feature (2759)..(2759): n is a, c, g, or t
gatcaccatgacagatataataacataatagtaacagaaaagtttgaaaaatgcaaattaccaaaatgtgagctcatggttttggagaaaatggttccaatagactcaccagatgcagggttgccacaaatcttcaatttgtaaaaaacgcaatatctctgaaccacagtaaagttgaagtgcaacaaaattaggtatgcctgtatggaaacgcagagctcacacccttctgatgaacagacagaagtgtcagatccttttctatgctagcaaaggattttaagggtttggaattctctaaaagtgtaaagctcttaggagggcgttacttggcaaagcagtgctttatcccattctcttgtttgcctgttcaaacttcccacccattgtagacccacttgctgtgttattgcaggttaagcccccaagacccttttctctcaccttttttgttcacttcccatcccctttccttctcaggtcatcctccatgcccttctgatgtccacatgtctcttcattttcttctcaggcctcctctttctctcaccatctaagttattgaaattcttgaaatcctaagcaggcctggcactgagaggtaagcacctgagagtgtcagtcttccctagataaatggaactgtgtgcagatctgggactgctggaagggtgtggggtagggatttaaggatggcgcaagtagggtggggctaaaaaagaccttgtcttctttatataggagcatcgagattaaagggtgtgaggtaggggtttaaggatggcgcaagtcaggtggggctaaaaaagaccttgtcttctttatataggagcatcgagattaaacactgaattcagcagtgttcaattcatttcttattttccactgtatttcatttcaacccatcctctatattttgtgagcccaaagcctttagatatgtgtagaggaaggtgtgatacagctttcaacttcttgaaatttgcccaagaaatactttgtatcatgaggtctgcagttatttatacaaatccctgaaaatatttcatggcaaatctgtagcacccagttgagatgagaccaaactggaaaaatctctgtggctgtggttattgtcagttctgtaagatgaagatgggaccagtgacaagaatgtgcactatttactgagcactcacctgcacggggccatgtgcttttcagacattgcctctttcagtcttgagcacaatgccagttgtgccatcccctgacatatagatgagatgaagatccagacataaccagcaagggcagggctgggatgcgatccatgtgtgcctggttcccagggttngcatgtttgcagtgttctctccataatggtttgccttaatgaagagaggattcaggatgtccagtttcagcctcactggctgggctggaatcttccattgacccttccactctacattcctccctggcctgggatgctcactcgagtgggcttctngctgngcttggccagtgggggttgccatcaggagacaacagggcatctgcttctccagggcatcccccagggcacagtgctttgtgactcaagggtctgcccctcttggtttccctaaacctcactcctctctttgtaaacagcccctttataaattacgcaccttgagggtgtcatctgctttctttcaggagcaggactgactcactagcatcactcctaaataatgtgaacttgttttgattttttgtttgaggcagagtctctcacagtgttcctaggctggagtgcagtggcatggtcttggctcattctgggctcaagcaatcctttcaccttagccatctcagtagctgggactataggcatgcgccaccatgctcggctaatttttaaaatatttgtagagatggggtcttgctatgttgccaggctggtcttgaactccagggctcaagtgatccttctgcctcggcttcctaaagtgttgggattacaggtatgagccactgcacctgcccaatgatgtgaacttttagtaagtcacttcagttatctgggcccaacttgctttacctgtcaagcagggaccatggtgcctggtctcccagattgtgaatgtcaaagaaaacaggtagagaggcactttggaagataaacactcctcagaatgggagctagcagtgtaattccacaaggcacagaatgggcattcactgcatagcctgactggaagtggagcatcctttgtgagaaaaggaaacctctgagacagtgaatatgttcccattttgaaaagcttgatgcaatcaaaatagaagaaagagcaccgctgaagagaataagagaagagatctttgttttgtttttgcttgtttctttgtggtagtgacagcgtatttcatgtaggaacctgtgacaaagctccccataataaacatcagaaagtcaaggatgatggttttggccaaggagcaaatgacacatgccacagctctcctggcaggtccccttttcgagattgtgtcctcccggataggactctcaagcagctgcaacaggcatcttccagctgggaaaggccacttgacctctttttctctttcgaaagccgggcagctgtgagtccaggcttgtcactcctgggtgcaggctcaggaattgaaggcgggtctgccaagccacacaccctcgttgaaacacctctgctctgtggccaggcttttcagcccctccccactccccatcagcagtggcttctggaatntccctgtctgtagaatgagaatagttacatcaaaatttcttcccaaggagctaattggaatattgtaatacaaatatttgcagagaattaatactgagagatgctaaaggagaatttagctcatgtaattactaatcagtgtcttttttccaggtactctgtaagggagctgaaacttccagcctttcttcctattcacaaacccacctttacccgcccccaatgctggactttggtttttcatattgcttttgcagaactttaaaacatttgaatctttccctgatgagtttttgtcctgaggggccagtgcagttttcttgccactttgttttcctctcatataacttttccctgtcaataaggcatttaggctgagagaaaaagttattgagcatgtgcatccaaatttgagatgattgttatttcattacctaatgactttaacttctttgatactgtgtttgtcttatgaatataatggctttctcactttaatgaaaagttatacaataaaattgaaaagtaagtactgtatctgtaaaaa

SEQ ID NO: 104165 - DNA, 558 bp, Homo sapiens
tctaatgttattgatagtttgctccagatgacggtggaatctagtcatcctccatgcccttctgatgtccacatgtctcttcattttcttctcaggcctcctctttctctcaccatctaagttattgaaattcttgaaatcctaagcaggcctggcactgagaggtactctgtaagggagctgaaacttccagcctttcttcctattcacaaacccacctttacccgcccccaatgctggactttggtttttcatattgcttttgcagaactttaaaacatttgaatctttccctgatgagtttttgtcctgaggggccagtgcagttttcttgccactttgttttcctctcatataacttttccctgtcaataaggcatttaggctgagagaaaaagttattgagcatgtgcatccaaatttgagatgattgttatttcattacctaatgactttaacttctttgatactgtgtttgtcttatgaatataatggctttctcactttaatgaaaagttatacaataaaattgaaaagtaagtactgtatctgtaaaaa

SEQ ID NO: 104166 - DNA, 3087 bp, Homo sapiens
gcggggcgggccggcggcggaggccgggccgcggagccaggagtgactagcagcagttggccgtgccgtagcagcgtcccgcgcgcggcgggcagcggcccaggaggcgcgtggtgcgggtttcggcggcggctgaggaagaagcgcgggcggcgccttcgggaggcgagcaggcagcagttggccgtgccgtagcagcgtcccgcgcgcggcgggcagcggcccaggaggcgcgtggcggcgctcggcctcgcggcggcggcggcggcagcggcccagcagttggcggcgagcgcgtctgcgcctgcgcggcgggccccgcgcccctcctccccccctgggcgcccccggcggcgtgtgaatggcggcctccgcggcggcagcctcggcagcagcggcctcggccgcctctggcagcccgggcccgggcgagggctccgctggcggcgaaaagcgctccaccgccccttcggccgcagcctcggcctctgcctcagccgcggcgtcgtcgcccgcggggggcggcgccgaggcgctggagctgctggagcactgcggcgtgtgcagagagcgcctgcgacccgagagggagccccgcctgctgccctgtttgcactcggcctgtagtgcctgcttagggcccgcggcccccgccgccgccaacagctcgggggacggcggggcggcgggcgacggcaccgtggtggactgtcccgtgtgcaagcaacagtgcttctccaaagacatcgtggagaattatttcatgcgtgatagtggcagcaaggctgccaccgacgcccaggatgcgaaccagtgctgcactagctgtgaggataatgccccagccaccagctactgtgtggagtgctcggagcctctgtgtgagacctgtgtagaggcgcaccagcgggtgaagtacaccaaggaccatactgtgcgctctactgggccagccaagtctcgggatggtgaacgtactgtctattgcaacgtacacaagcatgaaccccttgtgctgttttgtgagagctgtgatactctcacctgccgagactgccagctcaatgcccacaaggaccaccagtaccagttcttagaggatgcagtgaggaaccagcgcaagctcctggcctcactggtgaagcgccttggggacaaacatgcaacattgcagaagagcaccaaggaggttcgcagctcaatccgccaggtgtctgacgtacagaagcgtgtgcaagtggatgtcaagatggccatcctgcagatcatgaaggagctgaataagcggggccgtgtgctggtcaatgatgcccagaaggtgactgaggggcagcaggagcgcctggagcggcagcactggaccatgaccaagatccagaagcaccaggagcacattctgcgctttgcctcttgggctctggagagtgacaacaacacagcccttttgctttctaagaagttgatctacttccagctgcaccgggccctcaagatgattgtggatcccgtggagccacatggcgagatgaagtttcagtgggacctcaatgcctggaccaagagtgccgaggcctttggcaagattgtggcagagcgtcctggcactaactcaacaggccctgcacccatggcccctccaagagccccaggcccctgagcaagcagggctctggcagcagccagcccatggaggtgcaggaaggctatggctttgggtcaggagatgatccctactcaagtgcagagccccatgtgtcaggtgtgaaacggtcccgctcaggtgagggcgaggtgagcggccttatgcgcaaggtgccacgagtgagccttgaacgcctggacctggacctcacagctgacagccagccacccgtcttcaaggtcttcccaggcagtaccactgaggactacaaccttattgttattgaacgtggcgctgccgctgcagctaccggccagccagggactgcgcctgcaggaacccctggtgccccacccctggctggcatggccattgtcaaggaggaggagacggaggctgccattggagcccctcctactgccactgagggccctgagaccaaacctgtgcttatggctcttgcggagggtcctggtgctgagggtccccgcctggcctcacctagtggcagcaccagctcagggctggaggtggtggctcctgagggtacctcagccccaggtggtggcccgggaaccctggatgacagtgccaccatttgccgtgtctgccagaagccaggcgatctggttatgtgcaaccagtgtgagttttgtttccacctggactgtcacctgccggccctgcaggatgtaccaggggaggagtggagctgctcactctgccatgtgctccctgacctgaaggaggaggatggcagcctcagcctggatggtgcagacagcactggcgtggtggccaagctctcaccagccaaccagcggaaatgtgagcgtgtactgctggccctattctgtcacgaaccctgccgccccctgcatcagctggctaccgactccaccttctccctggaccagcccggtggcaccctggatctgaccctgatccgtgcccgcctccaggagaagttgtcacctccctacagctccccacaggagtttgcccaggatgtgggccgcatgttcaagcaattcaacaagttaactgaggacaaggcagacgtgcagtccatcatcggcctgcagcgcttcttcgagacgcgcatgaacgaggccttcggtgacaccaagttctctgctgtgctggtggagcccccgccgatgagcctgcctggtgctggcctgagttcccaggagctgtctggtggccctggtgatggcccctgaggctggagcccccatggccagcccagcctggctctgttctctgtcctgtcaccccatccccactcccctggtggcctgactcccactccctggtggccccatcccccagttcctcacgatatggtttttacttctgtggatttaataaaaacttcaccagttcctcaggcgttggctggttgggggactgtggtcctggggcctggtttattgactgta

SEQ ID NO: 104167 - DNA, 533 bp, Homo sapiens
tccctagcaactctgtggggagctgtagggaggtgacacacttctcctggaggcgggcacggatcaggtcagatccaggtgcaccgggctggtcagggagaaggtggagtcggtagccagctgatgcagtgtggcggcagtgcttcgtgacagaatagggccgcatgttcaagcaattcaacaagttaactgaggacaaggcagacgtgcagtccatcatcggcctgcagcgcttcttcgagacgcgcatgaacgaggccttcggtgacaccaagttctctgctgtgctggtggagcccccgccgatgagcctgcctggtgctggcctgagttcccaggagctgtctggtggccctggtgatggcccctgaggctggagcccccatggccagcccagcctggctctgttctctgtcctgtcaccccatccccactcccctggtggcctgactcccactccctggtggccccatcccccagttcctcacgatatggtttttacttctgtggatttaataaaaacttcaccagtt

SEQ ID NO: 104168 - DNA, 208 bp, Homo sapiens
gcggccgcctactactactactactgctcgaattcaagcttctaacgatgtacggggacatggccagcccagcctggctctgttctctgtcctgtcaccccatccccactcccctggtggcctgactcccactccctggtggccccatcccccagttcctcacgatatggtttttacttctgtggatttaataaaaacttcaccagtt

SEQ ID NO: 104169 - DNA, 265 bp, Homo sapiens
gcggccgcctactactactactactgctcgaattcaagcttctaacgatgtacggggacatggccagcccagcctggctctgttctctgtcctgtcaccccatccccactcccctggtggcctgactcccactccctggtggccccatcccccagttcctcacgatatggtttttacttctgtggatttaataaaaacttcaccagttcctcaggcgttggctggttgggggactgtggtcctggggcctggtttattgactgta

SEQ ID NO: 104170 - DNA, 2831 bp, Homo sapiens
cggcggcgaagagacgcgggttgaggaagagggacggattgcccatgcgcttgggcgcacagcggcccgcttctgtgtggtctggaggtggagctgagaggggaatcacactctataaaggttcgcataccccactggcggattcaattgcggcagtgacgtcacagaggccccgccccgcccccacaagagccccaccgacgtggggttggcggtggtggaaggactaggagttggcgcgtgcgtactggcggcctctcccgcaccgaccggcctgggccccgcccccgggcgtgaggcgcccaatgcgcgtgcgcggcggcgtcggcgccagttatttctgtcccgccccccggcctcggctctttctgcgagcgggcgcgcgggcgagcggttgtgcttgtgcttgtggcgcgtggtgcgggtttcggcggcggctgaggaagaagcgcgggcggcgccaacagctcgggggacggcggggcggcgggcgacggcaccgtggtggactgtcccgtgtgcaagcaacagtgcttctccaaagacatcgtggagaattatttcatgcgtgatagtggcagcaaggctgccaccgacgcccaggatgcgaaccagtgctgcactagctgtgaggataatgccccagccaccagctactgtgtggagtgctcggagcctctgtgtgagacctgtgtagaggcgcaccagcgggtgaagtacaccaaggaccatactgtgcgctctactgggccagccaagtctcgggatggtgaacgtactgtctattgcaacgtacacaagcatgaaccccttgtgctgttttgtgagagctgtgatactctcacctgccgagactgccagctcaatgcccacaaggaccaccagtaccagttcttagaggatgcagtgaggaaccagcgcaagctcctggcctcactggtgaagcgccttggggacaaacatgcaacattgcagaagagcaccaaggaggttcgcagctcaatccgccaggtgtctgacgtacagaagcgtgtgcaagtggatgtcaagatggccatcctgcagatcatgaaggagctgaataagcggggccgtgtgctggtcaatgatgcccagaaggtgactgaggggcagcaggagcgcctggagcggcagcactggaccatgaccaagatccagaagcaccaggagcacattctgcgctttgcctcttgggctctggagagtgacaacaacacagcccttttgctttctaagaagttgatctacttccagctgcaccgggccctcaagatgattgtggatcccgtggagccacatggcgagatgaagtttcagtgggacctcaatgcctggaccaagagtgccgaggcctttggcaagattgtggcagagcgtcctggcactaactcaacaggccctgcacccatggcccctccaagagccccaggcccctgagcaagcagggctctggcagcagccagcccatggaggtgcaggaaggctatggctttgggtcaggagatgatccctactcaagtgcagagccccatgtgtcaggtgtgaaacggtcccgctcaggtgagggcgaggtgagcggccttatgcgcaaggtgccacgagtgagccttgaacgcctggacctggacctcacagctgacagccagccacccgtcttcaaggtcttcccaggcagtaccactgaggactacaaccttattgttattgaacgtggcgctgccgctgcagctaccggccagccagggactgcgcctgcaggaacccctggtgccccacccctggctggcatggccattgtcaaggaggaggagacggaggctgccattggagcccctcctactgccactgagggccctgagaccaaacctgtgcttatggctcttgcggagggtcctggtgctgagggtccccgcctggcctcacctagtggcagcaccagctcagggctggaggtggtggctcctgagggtacctcagccccaggtggtggcccgggaaccctggatgacagtgccaccatttgccgtgtctgccagaagccaggcgatctggttatgtgcaaccagtgtgagttttgtttccacctggactgtcacctgccggccctgcaggatgtaccaggggaggagtggagctgctcactctgccatgtgctccctgacctgaaggaggaggatggcagcctcagcctggatggtgcagacagcactggcgtggtggccaagctctcaccagccaaccagcggaaatgtgagcgtgtactgctggccctattctgtcacgaaccctgccgccccctgcatcagctggctaccgactccaccttctccctggaccagcccggtggcaccctggatctgaccctgatccgtgcccgcctccaggagaagttgtcacctccctacagctccccacaggagtttgcccaggatgtgggccgcatgttcaagcaattcaacaagttaactgaggacaaggcagacgtgcagtccatcatcggcctgcagcgcttcttcgagacgcgcatgaacgaggccttcggtgacaccaagttctctgctgtgctggtggagcccccgccgatgagcctgcctggtgctggcctgagttcccaggagctgtctggtggccctggtgatggcccctgaggctggagcccccatggccagcccagcctggctctgttctctgtcctgtcaccccatccccactcccctggtggcctgactcccactccctggtggccccatcccccagttcctcacgatatggtttttacttctgtggatttaataaaaacttcaccagtt

SEQ ID NO: 104171 - DNA, 2421 bp, Homo sapiens
  misc_feature (31)..(31): n is a, c, g, or t
  misc_feature (64)..(64): n is a, c, g, or t
  misc_feature (83)..(83): n is a, c, g, or t
gtctctctgagatgcgtcatagtggctcgcntcagctcctggttgtgccgcccagcatcctgangcccacagctactggatcnccgctgctgctccagtccaagcttctggttgattaatgagggcatggggtggtccctcaagaccttcccctaccttttgtgaaaccagtgatgcctcaaagacagtgtccccttccagccagtgctgcactagctgtgaggataatgccccagccaccagctactgtgtggagtgctcggagcctctgtgtgagacctgtgtagaggcgcaccagcgggtgaagtacaccaaggaccatactgtgcgctctactgggccagccaagtctcgggatggtgaacgtactgtctattgcaacgtacacaagcatgaaccccttgtgctgttttgtgagagctgtgatactctcacctgccgagactgccagctcaatgcccacaaggaccaccagtaccagttcttagaggatgcagtgaggaaccagcgcaagctcctggcctcactggtgaagcgccttggggacaaacatgcaacattgcagaagagcaccaaggaggttcgcagctcaatccgccaggtgtctgacgtacagaagcgtgtgcaagtggatgtcaagatggccatcctgcagatcatgaaggagctgaataagcggggccgtgtgctggtcaatgatgcccagaaggtgactgaggggcagcaggagcgcctggagcggcagcactggaccatgaccaagatccagaagcaccaggagcacattctgcgctttgcctcttgggctctggagagtgacaacaacacagcccttttgctttctaagaagttgatctacttccagctgcaccgggccctcaagatgattgtggatcccgtggagccacatggcgagatgaagtttcagtgggacctcaatgcctggaccaagagtgccgaggcctttggcaagattgtggcagagcgtcctggcactaactcaacaggccctgcacccatggcccctccaagagccccaggcccctgagcaagcagggctctggcagcagccagcccatggaggtgcaggaaggctatggctttgggtcaggagatgatccctactcaagtgcagagccccatgtgtcaggtgtgaaacggtcccgctcaggtgagggcgaggtgagcggccttatgcgcaaggtgccacgagtgagccttgaacgcctggacctggacctcacagctgacagccagccacccgtcttcaaggtcttcccaggcagtaccactgaggactacaaccttattgttattgaacgtggcgctgccgctgcagctaccggccagccagggactgcgcctgcaggaacccctggtgccccacccctggctggcatggccattgtcaaggaggaggagacggaggctgccattggagcccctcctactgccactgagggccctgagaccaaacctgtgcttatggctcttgcggagggtcctggtgctgagggtccccgcctggcctcacctagtggcagcaccagctcagggctggaggtggtggctcctgagggtacctcagccccaggtggtggcccgggaaccctggatgacagtgccaccatttgccgtgtctgccagaagccaggcgatctggttatgtgcaaccagtgtgagttttgtttccacctggactgtcacctgccggccctgcaggatgtaccaggggaggagtggagctgctcactctgccatgtgctccctgacctgaaggaggaggatggcagcctcagcctggatggtgcagacagcactggcgtggtggccaagctctcaccagccaaccagcggaaatgtgagcgtgtactgctggccctattctgtcacgaaccctgccgccccctgcatcagctggctaccgactccaccttctccctggaccagcccggtggcaccctggatctgaccctgatccgtgcccgcctccaggagaagttgtcacctccctacagctccccacaggagtttgcccaggatgtgggccgcatgttcaagcaattcaacaagttaactgaggacaaggcagacgtgcagtccatcatcggcctgcagcgcttcttcgagacgcgcatgaacgaggccttcggtgacaccaagttctctgctgtgctggtggagcccccgccgatgagcctgcctggtgctggcctgagttcccaggagctgtctggtggccctggtgatggcccctgaggctggagcccccatggccagcccagcctggctctgttctctgtcctgtcaccccatccccactcccctggtggcctgactcccactccctggtggccccatcccccagttcctcacgatatggtttttacttctgtggatttaataaaaacttcaccagtt

SEQ ID NO: 104172 - DNA, 2255 bp, Homo sapiens
cggctaggtcgaggcccgggggtaatcggccgaggacagtgctgcactagctgtgaggataatgccccagccaccagctactgtgtggagtgctcggagcctctgtgtgagacctgtgtagaggcgcaccagcgggtgaagtacaccaaggaccatactgtgcgctctactgggccagccaagtctcgggatggtgaacgtactgtctattgcaacgtacacaagcatgaaccccttgtgctgttttgtgagagctgtgatactctcacctgccgagactgccagctcaatgcccacaaggaccaccagtaccagttcttagaggatgcagtgaggaaccagcgcaagctcctggcctcactggtgaagcgccttggggacaaacatgcaacattgcagaagagcaccaaggaggttcgcagctcaatccgccaggtgtctgacgtacagaagcgtgtgcaagtggatgtcaagatggccatcctgcagatcatgaaggagctgaataagcggggccgtgtgctggtcaatgatgcccagaaggtgactgaggggcagcaggagcgcctggagcggcagcactggaccatgaccaagatccagaagcaccaggagcacattctgcgctttgcctcttgggctctggagagtgacaacaacacagcccttttgctttctaagaagttgatctacttccagctgcaccgggccctcaagatgattgtggatcccgtggagccacatggcgagatgaagtttcagtgggacctcaatgcctggaccaagagtgccgaggcctttggcaagattgtggcagagcgtcctggcactaactcaacaggccctgcacccatggcccctccaagagccccaggcccctgagcaagcagggctctggcagcagccagcccatggaggtgcaggaaggctatggctttgggtcaggagatgatccctactcaagtgcagagccccatgtgtcaggtgtgaaacggtcccgctcaggtgagggcgaggtgagcggccttatgcgcaaggtgccacgagtgagccttgaacgcctggacctggacctcacagctgacagccagccacccgtcttcaaggtcttcccaggcagtaccactgaggactacaaccttattgttattgaacgtggcgctgccgctgcagctaccggccagccagggactgcgcctgcaggaacccctggtgccccacccctggctggcatggccattgtcaaggaggaggagacggaggctgccattggagcccctcctactgccactgagggccctgagaccaaacctgtgcttatggctcttgcggagggtcctggtgctgagggtccccgcctggcctcacctagtggcagcaccagctcagggctggaggtggtggctcctgagggtacctcagccccaggtggtggcccgggaaccctggatgacagtgccaccatttgccgtgtctgccagaagccaggcgatctggttatgtgcaaccagtgtgagttttgtttccacctggactgtcacctgccggccctgcaggatgtaccaggggaggagtggagctgctcactctgccatgtgctccctgacctgaaggaggaggatggcagcctcagcctggatggtgcagacagcactggcgtggtggccaagctctcaccagccaaccagcggaaatgtgagcgtgtactgctggccctattctgtcacgaaccctgccgccccctgcatcagctggctaccgactccaccttctccctggaccagcccggtggcaccctggatctgaccctgatccgtgcccgcctccaggagaagttgtcacctccctacagctccccacaggagtttgcccaggatgtgggccgcatgttcaagcaattcaacaagttaactgaggacaaggcagacgtgcagtccatcatcggcctgcagcgcttcttcgagacgcgcatgaacgaggccttcggtgacaccaagttctctgctgtgctggtggagcccccgccgatgagcctgcctggtgctggcctgagttcccaggagctgtctggtggccctggtgatggcccctgaggctggagcccccatggccagcccagcctggctctgttctctgtcctgtcaccccatccccactcccctggtggcctgactcccactccctggtggccccatcccccagttcctcacgatatggtttttacttctgtggatttaataaaaacttcaccagtt

SEQ ID NO: 104173 - DNA, 2332 bp, Homo sapiens
attcgcaccaaggccgggggccaaccacaagggcttttccaagaacatgggggaaaataatttctggcgggaaaatgggaacaaaggctgccaccgacccccagaatgcgaaccagtgctgcactagctgtgaggataatgccccagccaccagctactgtgtggagtgctcggagcctctgtgtgagacctgtgtagaggcgcaccagcgggtgaagtacaccaaggaccatactgtgcgctctactgggccagccaagtctcgggatggtgaacgtactgtctattgcaacgtacacaagcatgaaccccttgtgctgttttgtgagagctgtgatactctcacctgccgagactgccagctcaatgcccacaaggaccaccagtaccagttcttagaggatgcagtgaggaaccagcgcaagctcctggcctcactggtgaagcgccttggggacaaacatgcaacattgcagaagagcaccaaggaggttcgcagctcaatccgccaggtgtctgacgtacagaagcgtgtgcaagtggatgtcaagatggccatcctgcagatcatgaaggagctgaataagcggggccgtgtgctggtcaatgatgcccagaaggtgactgaggggcagcaggagcgcctggagcggcagcactggaccatgaccaagatccagaagcaccaggagcacattctgcgctttgcctcttgggctctggagagtgacaacaacacagcccttttgctttctaagaagttgatctacttccagctgcaccgggccctcaagatgattgtggatcccgtggagccacatggcgagatgaagtttcagtgggacctcaatgcctggaccaagagtgccgaggcctttggcaagattgtggcagagcgtcctggcactaactcaacaggccctgcacccatggcccctccaagagccccaggcccctgagcaagcagggctctggcagcagccagcccatggaggtgcaggaaggctatggctttgggtcaggagatgatccctactcaagtgcagagccccatgtgtcaggtgtgaaacggtcccgctcaggtgagggcgaggtgagcggccttatgcgcaaggtgccacgagtgagccttgaacgcctggacctggacctcacagctgacagccagccacccgtcttcaaggtcttcccaggcagtaccactgaggactacaaccttattgttattgaacgtggcgctgccgctgcagctaccggccagccagggactgcgcctgcaggaacccctggtgccccacccctggctggcatggccattgtcaaggaggaggagacggaggctgccattggagcccctcctactgccactgagggccctgagaccaaacctgtgcttatggctcttgcggagggtcctggtgctgagggtccccgcctggcctcacctagtggcagcaccagctcagggctggaggtggtggctcctgagggtacctcagccccaggtggtggcccgggaaccctggatgacagtgccaccatttgccgtgtctgccagaagccaggcgatctggttatgtgcaaccagtgtgagttttgtttccacctggactgtcacctgccggccctgcaggatgtaccaggggaggagtggagctgctcactctgccatgtgctccctgacctgaaggaggaggatggcagcctcagcctggatggtgcagacagcactggcgtggtggccaagctctcaccagccaaccagcggaaatgtgagcgtgtactgctggccctattctgtcacgaaccctgccgccccctgcatcagctggctaccgactccaccttctccctggaccagcccggtggcaccctggatctgaccctgatccgtgcccgcctccaggagaagttgtcacctccctacagctccccacaggagtttgcccaggatgtgggccgcatgttcaagcaattcaacaagttaactgaggacaaggcagacgtgcagtccatcatcggcctgcagcgcttcttcgagacgcgcatgaacgaggccttcggtgacaccaagttctctgctgtgctggtggagcccccgccgatgagcctgcctggtgctggcctgagttcccaggagctgtctggtggccctggtgatggcccctgaggctggagcccccatggccagcccagcctggctctgttctctgtcctgtcaccccatccccactcccctggtggcctgactcccactccctggtggccccatcccccagttcctcacgatatggtttttacttctgtggatttaataaaaacttcaccagtt

SEQ ID NO: 104174 - DNA, 3503 bp, Homo sapiens
  misc_feature (3359)..(3359): n is a, c, g, or t
cggcggcgaagagacgcgggttgaggaagagggacggattgcccatgcgcttgggcgcacagcggcccgcttctgtgtggtctggaggtggagctgagaggggaatcacactctataaaggttcgcataccccactggcggattcaattgcggcagtgacgtcacagaggccccgccccgcccccacaagagccccaccgacgtggggttggcggtggtggaaggactaggagttggcgcgtgcgtactggcggcctctcccgcaccgaccggcctgggccccgcccccgggcgtgaggcgcccaatgcgcgtgcgcggcggcgtcggcgccagttatttctgtcccgccccccggcctcggctctttctgcgagcgggcgcgcgggcgagcggttgtgcttgtgcttgtggcgcgtggtgcgggtttcggcggcggctgaggaagaagcgcgggcggcgccttcgggaggcgagcaggcagcagttggccgtgccgtagcagcgtcccgcgcgcggcgggcagcggcccaggaggcgcgtggcggcgctcggcctcgcggcggcggcggcggcagcggcccagcagttggcggcgagcgcgtctgcgcctgcgcggcgggccccgcgcccctcctccccccctgggcgcccccggcggcgtgtgaatggcggcctccgcggcggcagcctcggcagcagcggcctcggccgcctctggcagcccgggcccgggcgagggctccgctggcggcgaaaagcgctccaccgccccttcggccgcagcctcggcctctgcctcagccgcggcgtcgtcgcccgcggggggcggcgccgaggcgctggagctgctggagcactgcggcgtgtgcagagagcgcctgcgacccgagagggagccccgcctgctgccctgtttgcactcggcctgtagtgcctgcttagggcccgcggcccccgccgccgccaacagctcgggggacggcggggcggcgggcgacggcaccgtggtggactgtcccgtgtgcaagcaacagtgcttctccaaagacatcgtggagaattatttcatgcgtgatagtggcagcaaggctgccaccgacgcccaggatgcgaaccagtgctgcactagctgtgaggataatgccccagccaccagctactgtgtggagtgctcggagcctctgtgtgagacctgtgtagaggcgcaccagcgggtgaagtacaccaaggaccatactgtgcgctctactgggccagccaagtctcgggatggtgaacgtactgtctattgcaacgtacacaagcatgaaccccttgtgctgttttgtgagagctgtgatactctcacctgccgagactgccagctcaatgcccacaaggaccaccagtaccagttcttagaggatgcagtgaggaaccagcgcaagctcctggcctcactggtgaagcgccttggggacaaacatgcaacattgcagaagagcaccaaggaggttcgcagctcaatccgccaggtgtctgacgtacagaagcgtgtgcaagtggatgtcaagatggccatcctgcagatcatgaaggagctgaataagcggggccgtgtgctggtcaatgatgcccagaaggtgactgaggggcagcaggagcgcctggagcggcagcactggaccatgaccaagatccagaagcaccaggagcacattctgcgctttgcctcttgggctctggagagtgacaacaacacagcccttttgctttctaagaagttgatctacttccagctgcaccgggccctcaagatgattgtggatcccgtggagccacatggcgagatgaagtttcagtgggacctcaatgcctggaccaagagtgccgaggcctttggcaagattgtggcagagcgtcctggcactaactcaacaggccctgcacccatggcccctccaagagccccaggcccctgagcaagcagggctctggcagcagccagcccatggaggtgcaggaaggctatggctttgggtcaggagatgatccctactcaagtgcagagccccatgtgtcaggtgtgaaacggtcccgctcaggtgagggcgaggtgagcggccttatgcgcaaggtgccacgagtgagccttgaacgcctggacctggacctcacagctgacagccagccacccgtcttcaaggtcttcccaggcagtaccactgaggactacaaccttattgttattgaacgtggcgctgccgctgcagctaccggccagccagggactgcgcctgcaggaacccctggtgccccacccctggctggcatggccattgtcaaggaggaggagacggaggctgccattggagcccctcctactgccactgagggccctgagaccaaacctgtgcttatggctcttgcggagggtcctggtgctgagggtccccgcctggcctcacctagtggcagcaccagctcagggctggaggtggtggctcctgagggtacctcagccccaggtggtggcccgggaaccctggatgacagtgccaccatttgccgtgtctgccagaagccaggcgatctggttatgtgcaaccagtgtgagttttgtttccacctggactgtcacctgccggccctgcaggatgtaccaggggaggagtggagctgctcactctgccatgtgctccctgacctgaaggaggaggatggcagcctcagcctggatggtgcagacagcactggcgtggtggccaagctctcaccagccaaccagcggaaatgtgagcgtgtactgctggccctattctgtcacgaaccctgccgccccctgcatcagctggctaccgactccaccttctccctggaccagcccggtggcaccctggatctgaccctgatccgtgcccgcctccaggagaagttgtcacctccctacagctccccacaggagtttgcccaggatgtgggccgcatgttcaagcaattcaacaagttaactgaggacaaggcagacgtgcagtccatcatcggcctgcagcgcttcttcgagacgcgcatgaacgaggccttcggtgacaccaagttctctgctgtgctggtggagcccccgccgatgagcctgcctggtgctggcctgagttcccaggagctgtctggtggccctggtgatggcccctgaggctggagcccccatggccagcccagcctggctctgttctctgtcctgtcaccccatccccactcccctggtggcctgactcccactccctggtggccccatcccccagttcctcacgatatggtttttacttctgtggatttaataaaaacttcaccagttaaaaaaaaaaaaaaaaaaaaaaanaaaaaaaaaggaaaagaaaaaaaaaaaaaaaggagagcaaaagcaagaaaaagaaaacacaagaaaaggcgagaaaaaaaaaaaaaaaaagagcggcggccgagcacgcaaagacctccccgggggggcagtaaatagcgagcg

SEQ ID NO: 104175 - DNA, 3337 bp, Homo sapiens
cggcggcgaagagacgcgggttgaggaagagggacggattgcccatgcgcttgggcgcacagcggcccgcttctgtgtggtctggaggtggagctgagaggggaatcacactctataaaggttcgcataccccactggcggattcaattgcggcagtgacgtcacagaggccccgccccgcccccacaagagccccaccgacgtggggttggcggtggtggaaggactaggagttggcgcgtgcgtactggcggcctctcccgcaccgaccggcctgggccccgcccccgggcgtgaggcgcccaatgcgcgtgcgcggcggcgtcggcgccagttatttctgtcccgccccccggcctcggctctttctgcgagcgggcgcgcgggcgagcggttgtgcttgtgcttgtggcgcgtggtgcgggtttcggcggcggctgaggaagaagcgcgggcggcgccttcgggaggcgagcaggcagcagttggccgtgccgtagcagcgtcccgcgcgcggcgggcagcggcccaggaggcgcgtggcggcgctcggcctcgcggcggcggcggcggcagcggcccagcagttggcggcgagcgcgtctgcgcctgcgcggcgggccccgcgcccctcctccccccctgggcgcccccggcggcgtgtgaatggcggcctccgcggcggcagcctcggcagcagcggcctcggccgcctctggcagcccgggcccgggcgagggctccgctggcggcgaaaagcgctccaccgccccttcggccgcagcctcggcctctgcctcagccgcggcgtcgtcgcccgcggggggcggcgccgaggcgctggagctgctggagcactgcggcgtgtgcagagagcgcctgcgacccgagagggagccccgcctgctgccctgtttgcactcggcctgtagtgcctgcttagggcccgcggcccccgccgccgccaacagctcgggggacggcggggcggcgggcgacggcaccgtggtggactgtcccgtgtgcaagcaacagtgcttctccaaagacatcgtggagaattatttcatgcgtgatagtggcagcaaggctgccaccgacgcccaggatgcgaaccagtgctgcactagctgtgaggataatgccccagccaccagctactgtgtggagtgctcggagcctctgtgtgagacctgtgtagaggcgcaccagcgggtgaagtacaccaaggaccatactgtgcgctctactgggccagccaagtctcgggatggtgaacgtactgtctattgcaacgtacacaagcatgaaccccttgtgctgttttgtgagagctgtgatactctcacctgccgagactgccagctcaatgcccacaaggaccaccagtaccagttcttagaggatgcagtgaggaaccagcgcaagctcctggcctcactggtgaagcgccttggggacaaacatgcaacattgcagaagagcaccaaggaggttcgcagctcaatccgccaggtgtctgacgtacagaagcgtgtgcaagtggatgtcaagatggccatcctgcagatcatgaaggagctgaataagcggggccgtgtgctggtcaatgatgcccagaaggtgactgaggggcagcaggagcgcctggagcggcagcactggaccatgaccaagatccagaagcaccaggagcacattctgcgctttgcctcttgggctctggagagtgacaacaacacagcccttttgctttctaagaagttgatctacttccagctgcaccgggccctcaagatgattgtggatcccgtggagccacatggcgagatgaagtttcagtgggacctcaatgcctggaccaagagtgccgaggcctttggcaagattgtggcagagcgtcctggcactaactcaacaggccctgcacccatggcccctccaagagccccaggcccctgagcaagcagggctctggcagcagccagcccatggaggtgcaggaaggctatggctttgggtcaggagatgatccctactcaagtgcagagccccatgtgtcaggtgtgaaacggtcccgctcaggtgagggcgaggtgagcggccttatgcgcaaggtgccacgagtgagccttgaacgcctggacctggacctcacagctgacagccagccacccgtcttcaaggtcttcccaggcagtaccactgaggactacaaccttattgttattgaacgtggcgctgccgctgcagctaccggccagccagggactgcgcctgcaggaacccctggtgccccacccctggctggcatggccattgtcaaggaggaggagacggaggctgccattggagcccctcctactgccactgagggccctgagaccaaacctgtgcttatggctcttgcggagggtcctggtgctgagggtccccgcctggcctcacctagtggcagcaccagctcagggctggaggtggtggctcctgagggtacctcagccccaggtggtggcccgggaaccctggatgacagtgccaccatttgccgtgtctgccagaagccaggcgatctggttatgtgcaaccagtgtgagttttgtttccacctggactgtcacctgccggccctgcaggatgtaccaggggaggagtggagctgctcactctgccatgtgctccctgacctgaaggaggaggatggcagcctcagcctggatggtgcagacagcactggcgtggtggccaagctctcaccagccaaccagcggaaatgtgagcgtgtactgctggccctattctgtcacgaaccctgccgccccctgcatcagctggctaccgactccaccttctccctggaccagcccggtggcaccctggatctgaccctgatccgtgcccgcctccaggagaagttgtcacctccctacagctccccacaggagtttgcccaggatgtgggccgcatgttcaagcaattcaacaagttaactgaggacaaggcagacgtgcagtccatcatcggcctgcagcgcttcttcgagacgcgcatgaacgaggccttcggtgacaccaagttctctgctgtgctggtggagcccccgccgatgagcctgcctggtgctggcctgagttcccaggagctgtctggtggccctggtgatggcccctgaggctggagcccccatggccagcccagcctggctctgttctctgtcctgtcaccccatccccactcccctggtggcctgactcccactccctggtggccccatcccccagttcctcacgatataatcccggctgtgattataatacctctcgcgcgtcttttcgg

SEQ ID NO: 104176 - DNA, 3427 bp, Homo sapiens
cggcggcgaagagacgcgggttgaggaagagggacggattgcccatgcgcttgggcgcacagcggcccgcttctgtgtggtctggaggtggagctgagaggggaatcacactctataaaggttcgcataccccactggcggattcaattgcggcagtgacgtcacagaggccccgccccgcccccacaagagccccaccgacgtggggttggcggtggtggaaggactaggagttggcgcgtgcgtactggcggcctctcccgcaccgaccggcctgggccccgcccccgggcgtgaggcgcccaatgcgcgtgcgcggcggcgtcggcgccagttatttctgtcccgccccccggcctcggctctttctgcgagcgggcgcgcgggcgagcggttgtgcttgtgcttgtggcgcgtggtgcgggtttcggcggcggctgaggaagaagcgcgggcggcgccttcgggaggcgagcaggcagcagttggccgtgccgtagcagcgtcccgcgcgcggcgggcagcggcccaggaggcgcgtggcggcgctcggcctcgcggcggcggcggcggcagcggcccagcagttggcggcgagcgcgtctgcgcctgcgcggcgggccccgcgcccctcctccccccctgggcgcccccggcggcgtgtgaatggcggcctccgcggcggcagcctcggcagcagcggcctcggccgcctctggcagcccgggcccgggcgagggctccgctggcggcgaaaagcgctccaccgccccttcggccgcagcctcggcctctgcctcagccgcggcgtcgtcgcccgcggggggcggcgccgaggcgctggagctgctggagcactgcggcgtgtgcagagagcgcctgcgacccgagagggagccccgcctgctgccctgtttgcactcggcctgtagtgcctgcttagggcccgcggcccccgccgccgccaacagctcgggggacggcggggcggcgggcgacggcaccgtggtggactgtcccgtgtgcaagcaacagtgcttctccaaagacatcgtggagaattatttcatgcgtgatagtggcagcaaggctgccaccgacgcccaggatgcgaaccagtgctgcactagctgtgaggataatgccccagccaccagctactgtgtggagtgctcggagcctctgtgtgagacctgtgtagaggcgcaccagcgggtgaagtacaccaaggaccatactgtgcgctctactgggccagccaagtctcgggatggtgaacgtactgtctattgcaacgtacacaagcatgaaccccttgtgctgttttgtgagagctgtgatactctcacctgccgagactgccagctcaatgcccacaaggaccaccagtaccagttcttagaggatgcagtgaggaaccagcgcaagctcctggcctcactggtgaagcgccttggggacaaacatgcaacattgcagaagagcaccaaggaggttcgcagctcaatccgccaggtgtctgacgtacagaagcgtgtgcaagtggatgtcaagatggccatcctgcagatcatgaaggagctgaataagcggggccgtgtgctggtcaatgatgcccagaaggtgactgaggggcagcaggagcgcctggagcggcagcactggaccatgaccaagatccagaagcaccaggagcacattctgcgctttgcctcttgggctctggagagtgacaacaacacagcccttttgctttctaagaagttgatctacttccagctgcaccgggccctcaagatgattgtggatcccgtggagccacatggcgagatgaagtttcagtgggacctcaatgcctggaccaagagtgccgaggcctttggcaagattgtggcagagcgtcctggcactaactcaacaggccctgcacccatggcccctccaagagccccaggcccctgagcaagcagggctctggcagcagccagcccatggaggtgcaggaaggctatggctttgggtcaggagatgatccctactcaagtgcagagccccatgtgtcaggtgtgaaacggtcccgctcaggtgagggcgaggtgagcggccttatgcgcaaggtgccacgagtgagccttgaacgcctggacctggacctcacagctgacagccagccacccgtcttcaaggtcttcccaggcagtaccactgaggactacaaccttattgttattgaacgtggcgctgccgctgcagctaccggccagccagggactgcgcctgcaggaacccctggtgccccacccctggctggcatggccattgtcaaggaggaggagacggaggctgccattggagcccctcctactgccactgagggccctgagaccaaacctgtgcttatggctcttgcggagggtcctggtgctgagggtccccgcctggcctcacctagtggcagcaccagctcagggctggaggtggtggctcctgagggtacctcagccccaggtggtggcccgggaaccctggatgacagtgccaccatttgccgtgtctgccagaagccaggcgatctggttatgtgcaaccagtgtgagttttgtttccacctggactgtcacctgccggccctgcaggatgtaccaggggaggagtggagctgctcactctgccatgtgctccctgacctgaaggaggaggatggcagcctcagcctggatggtgcagacagcactggcgtggtggccaagctctcaccagccaaccagcggaaatgtgagcgtgtactgctggccctattctgtcacgaaccctgccgccccctgcatcagctggctaccgactccaccttctccctggaccagcccggtggcaccctggatctgaccctgatccgtgcccgcctccaggagaagttgtcacctccctacagctccccacaggagtttgcccaggatgtgggccgcatgttcaagcaattcaacaagttaactgaggacaaggcagacgtgcagtccatcatcggcctgcagcgcttcttcgagacgcgcatgaacgaggccttcggtgacaccaagttctctgctgtgctggtggagcccccgccgatgagcctgcctggtgctggcctgagttcccaggagctgtctggtggccctggtgatggcccctgaggctggagcccccatggccagcccagcctggctctgttctctgtcctgtcaccccatccccactcccctggtggcctgactcccactccctggtggccccatcccccagttcctcacgatacaggaaacaacacggggatactgaaccaagccccaagacacaccaagggggcgtagcacagcacagggcgatacaacggacggagcacagcaggaaccgcggccacaccctcgaccctcacggcgcagcgcgc

SEQ ID NO: 104177 - DNA, 2052 bp, Homo sapiens
tgaccagaggattatggatcatgcagtctgaagcactgtaggtggggagctgccccagcctcccagctgggagagactcactgcagccaattgggaacccatactggcattgccccagaggacgctggctttctctcctgtgtgtctcagccacagtgttgcatggaccccattcggatccatgcaggtttgcaagaagagcaccaaggaggttcgcagctcaatccgccaggtgtctgacgtacagaagcgtgtgcaagtggatgtcaagatggccatcctgcagatcatgaaggagctgaataagcggggccgtgtgctggtcaatgatgcccagaaggtgactgaggggcagcaggagcgcctggagcggcagcactggaccatgaccaagatccagaagcaccaggagcacattctgcgctttgcctcttgggctctggagagtgacaacaacacagcccttttgctttctaagaagttgatctacttccagctgcaccgggccctcaagatgattgtggatcccgtggagccacatggcgagatgaagtttcagtgggacctcaatgcctggaccaagagtgccgaggcctttggcaagattgtggcagagcgtcctggcactaactcaacaggccctgcacccatggcccctccaagagccccaggcccctgagcaagcagggctctggcagcagccagcccatggaggtgcaggaaggctatggctttgggtcaggagatgatccctactcaagtgcagagccccatgtgtcaggtgtgaaacggtcccgctcaggtgagggcgaggtgagcggccttatgcgcaaggtgccacgagtgagccttgaacgcctggacctggacctcacagctgacagccagccacccgtcttcaaggtcttcccaggcagtaccactgaggactacaaccttattgttattgaacgtggcgctgccgctgcagctaccggccagccagggactgcgcctgcaggaacccctggtgccccacccctggctggcatggccattgtcaaggaggaggagacggaggctgccattggagcccctcctactgccactgagggccctgagaccaaacctgtgcttatggctcttgcggagggtcctggtgctgagggtccccgcctggcctcacctagtggcagcaccagctcagggctggaggtggtggctcctgagggtacctcagccccaggtggtggcccgggaaccctggatgacagtgccaccatttgccgtgtctgccagaagccaggcgatctggttatgtgcaaccagtgtgagttttgtttccacctggactgtcacctgccggccctgcaggatgtaccaggggaggagtggagctgctcactctgccatgtgctccctgacctgaaggaggaggatggcagcctcagcctggatggtgcagacagcactggcgtggtggccaagctctcaccagccaaccagcggaaatgtgagcgtgtactgctggccctattctgtcacgaaccctgccgccccctgcatcagctggctaccgactccaccttctccctggaccagcccggtggcaccctggatctgaccctgatccgtgcccgcctccaggagaagttgtcacctccctacagctccccacaggagtttgcccaggatgtgggccgcatgttcaagcaattcaacaagttaactgaggacaaggcagacgtgcagtccatcatcggcctgcagcgcttcttcgagacgcgcatgaacgaggccttcggtgacaccaagttctctgctgtgctggtggagcccccgccgatgagcctgcctggtgctggcctgagttcccaggagctgtctggtggccctggtgatggcccctgaggctggagcccccatggccagcccagcctggctctgttctctgtcctgtcaccccatccccactcccctggtggcctgactcccactccctggtggccccatcccccagttcctcacgatatggtttttacttctgtggatttaataaaaacttcaccagtt

SEQ ID NO: 104178 - DNA, 3424 bp, Homo sapiens
cggcggcgaagagacgcgggttgaggaagagggacggattgcccatgcgcttgggcgcacagcggcccgcttctgtgtggtctggaggtggagctgagaggggaatcacactctataaaggttcgcataccccactggcggattcaattgcggcagtgacgtcacagaggccccgccccgcccccacaagagccccaccgacgtggggttggcggtggtggaaggactaggagttggcgcgtgcgtactggcggcctctcccgcaccgaccggcctgggccccgcccccgggcgtgaggcgcccaatgcgcgtgcgcggcggcgtcggcgccagttatttctgtcccgccccccggcctcggctctttctgcgagcgggcgcgcgggcgagcggttgtgcttgtgcttgtggcgcgtggtgcgggtttcggcggcggctgaggaagaagcgcgggcggcgccttcgggaggcgagcaggcagcagttggccgtgccgtagcagcgtcccgcgcgcggcgggcagcggcccaggaggcgcgtggcggcgctcggcctcgcggcggcggcggcggcagcggcccagcagttggcggcgagcgcgtctgcgcctgcgcggcgggccccgcgcccctcctccccccctgggcgcccccggcggcgtgtgaatggcggcctccgcggcggcagcctcggcagcagcggcctcggccgcctctggcagcccgggcccgggcgagggctccgctggcggcgaaaagcgctccaccgccccttcggccgcagcctcggcctctgcctcagccgcggcgtcgtcgcccgcggggggcggcgccgaggcgctggagctgctggagcactgcggcgtgtgcagagagcgcctgcgacccgagagggagccccgcctgctgccctgtttgcactcggcctgtagtgcctgcttagggcccgcggcccccgccgccgccaacagctcgggggacggcggggcggcgggcgacggcaccgtggtggactgtcccgtgtgcaagcaacagtgcttctccaaagacatcgtggagaattatttcatgcgtgatagtggcagcaaggctgccaccgacgcccaggatgcgaaccagtgctgcactagctgtgaggataatgccccagccaccagctactgtgtggagtgctcggagcctctgtgtgagacctgtgtagaggcgcaccagcgggtgaagtacaccaaggaccatactgtgcgctctactgggccagccaagtctcgggatggtgaacgtactgtctattgcaacgtacacaagcatgaaccccttgtgctgttttgtgagagctgtgatactctcacctgccgagactgccagctcaatgcccacaaggaccaccagtaccagttcttagaggatgcagtgaggaaccagcgcaagctcctggcctcactggtgaagcgccttggggacaaacatgcaacattgcagaagagcaccaaggaggttcgcagctcaatccgccaggtgtctgacgtacagaagcgtgtgcaagtggatgtcaagatggccatcctgcagatcatgaaggagctgaataagcggggccgtgtgctggtcaatgatgcccagaaggtgactgaggggcagcaggagcgcctggagcggcagcactggaccatgaccaagatccagaagcaccaggagcacattctgcgctttgcctcttgggctctggagagtgacaacaacacagcccttttgctttctaagaagttgatctacttccagctgcaccgggccctcaagatgattgtggatcccgtggagccacatggcgagatgaagtttcagtgggacctcaatgcctggaccaagagtgccgaggcctttggcaagattgtggcagagcgtcctggcactaactcaacaggccctgcacccatggcccctccaagagccccaggcccctgagcaagcagggctctggcagcagccagcccatggaggtgcaggaaggctatggctttgggtcaggagatgatccctactcaagtgcagagccccatgtgtcaggtgtgaaacggtcccgctcaggtgagggcgaggtgagcggccttatgcgcaaggtgccacgagtgagccttgaacgcctggacctggacctcacagctgacagccagccacccgtcttcaaggtcttcccaggcagtaccactgaggactacaaccttattgttattgaacgtggcgctgccgctgcagctaccggccagccagggactgcgcctgcaggaacccctggtgccccacccctggctggcatggccattgtcaaggaggaggagacggaggctgccattggagcccctcctactgccactgagggccctgagaccaaacctgtgcttatggctcttgcggagggtcctggtgctgagggtccccgcctggcctcacctagtggcagcaccagctcagggctggaggtggtggctcctgagggtacctcagccccaggtggtggcccgggaaccctggatgacagtgccaccatttgccgtgtctgccagaagccaggcgatctggttatgtgcaaccagtgtgagttttgtttccacctggactgtcacctgccggccctgcaggatgtaccaggggaggagtggagctgctcactctgccatgtgctccctgacctgaaggaggaggatggcagcctcagcctggatggtgcagacagcactggcgtggtggccaagctctcaccagccaaccagcggggtgagggctggggttacttaggtggggttgcccagagaggctttataggtgctgcccagagctgtgacatcccttacaatgtttgtagaaatgtgagcgtgtactgctggccctattctgtcacgaaccctgccgccccctgcatcagctggctaccgactccaccttctccctggaccagcccggtggcaccctggatctgaccctgatccgtgcccgcctccaggagaagttgtcacctccctacagctccccacaggagtttgcccaggatgtgggccgcatgttcaagcaattcaacaagttaactgaggacaaggcagacgtgcagtccatcatcggcctgcagcgcttcttcgagacgcgcatgaacgaggccttcggtgacaccaagttctctgctgtgctggtggagcccccgccgatgagcctgcctggtgctggcctgagttcccaggagctgtctggtggccctggtgatggcccctgaggctggagcccccatggccagcccagcctggctctgttctctgtcctgtcaccccatccccactcccctggtggcctgactcccactccctggtggccccatcccccagttcctcacgatatggtttttacttctgtggatttaataaaaacttcaccagtt

SEQ ID NO: 104179 - DNA, 3427 bp, Homo sapiens
cggcggcgaagagacgcgggttgaggaagagggacggattgcccatgcgcttgggcgcacagcggcccgcttctgtgtggtctggaggtggagctgagaggggaatcacactctataaaggttcgcataccccactggcggattcaattgcggcagtgacgtcacagaggccccgccccgcccccacaagagccccaccgacgtggggttggcggtggtggaaggactaggagttggcgcgtgcgtactggcggcctctcccgcaccgaccggcctgggccccgcccccgggcgtgaggcgcccaatgcgcgtgcgcggcggcgtcggcgccagttatttctgtcccgccccccggcctcggctctttctgcgagcgggcgcgcgggcgagcggttgtgcttgtgcttgtggcgcgtggtgcgggtttcggcggcggctgaggaagaagcgcgggcggcgccttcgggaggcgagcaggcagcagttggccgtgccgtagcagcgtcccgcgcgcggcgggcagcggcccaggaggcgcgtggcggcgctcggcctcgcggcggcggcggcggcagcggcccagcagttggcggcgagcgcgtctgcgcctgcgcggcgggccccgcgcccctcctccccccctgggcgcccccggcggcgtgtgaatggcggcctccgcggcggcagcctcggcagcagcggcctcggccgcctctggcagcccgggcccgggcgagggctccgctggcggcgaaaagcgctccaccgccccttcggccgcagcctcggcctctgcctcagccgcggcgtcgtcgcccgcggggggcggcgccgaggcgctggagctgctggagcactgcggcgtgtgcagagagcgcctgcgacccgagagggagccccgcctgctgccctgtttgcactcggcctgtagtgcctgcttagggcccgcggcccccgccgccgccaacagctcgggggacggcggggcggcgggcgacggcaccgtggtggactgtcccgtgtgcaagcaacagtgcttctccaaagacatcgtggagaattatttcatgcgtgatagtggcagcaaggctgccaccgacgcccaggatgcgaaccagtgctgcactagctgtgaggataatgccccagccaccagctactgtgtggagtgctcggagcctctgtgtgagacctgtgtagaggcgcaccagcgggtgaagtacaccaaggaccatactgtgcgctctactgggccagccaagtctcgggatggtgaacgtactgtctattgcaacgtacacaagcatgaaccccttgtgctgttttgtgagagctgtgatactctcacctgccgagactgccagctcaatgcccacaaggaccaccagtaccagttcttagaggatgcagtgaggaaccagcgcaagctcctggcctcactggtgaagcgccttggggacaaacatgcaacattgcagaagagcaccaaggaggttcgcagctcaatccgccaggtgtctgacgtacagaagcgtgtgcaagtggatgtcaagatggccatcctgcagatcatgaaggagctgaataagcggggccgtgtgctggtcaatgatgcccagaaggtgactgaggggcagcaggagcgcctggagcggcagcactggaccatgaccaagatccagaagcaccaggagcacattctgcgctttgcctcttgggctctggagagtgacaacaacacagcccttttgctttctaagaagttgatctacttccagctgcaccgggccctcaagatgattgtggatcccgtggagccacatggcgagatgaagtttcagtgggacctcaatgcctggaccaagagtgccgaggcctttggcaagattgtggcagagcgtcctggcactaactcaacaggccctgcacccatggcccctccaagagccccaggcccctgagcaagcagggctctggcagcagccagcccatggaggtgcaggaaggctatggctttgggtcaggagatgatccctactcaagtgcagagccccatgtgtcaggtgtgaaacggtcccgctcaggtgagggcgaggtgagcggccttatgcgcaaggtgccacgagtgagccttgaacgcctggacctggacctcacagctgacagccagccacccgtcttcaaggtcttcccaggcagtaccactgaggactacaaccttattgttattgaacgtggcgctgccgctgcagctaccggccagccagggactgcgcctgcaggaacccctggtgccccacccctggctggcatggccattgtcaaggaggaggagacggaggctgccattggagcccctcctactgccactgagggccctgagaccaaacctgtgcttatggctcttgcggagggtcctggtgctgagggtccccgcctggcctcacctagtggcagcaccagctcagggctggaggtggtggctcctgagggtacctcagccccaggtggtggcccgggaaccctggatgacagtgccaccatttgccgtgtctgccagaagccaggcgatctggttatgtgcaaccagtgtgagttttgtttccacctggactgtcacctgccggccctgcaggatgtaccaggggaggagtggagctgctcactctgccatgtgctccctgacctgaaggaggaggatggcagcctcagcctggatggtgcagacagcactggcgtggtggccaagctctcaccagccaaccagcggaaatgtgagcgtgtactgctggccctattctgtcacgaaccctgccgccccctgcatcagctggctaccgactccaccttctccctggaccagcccggtggcaccctggatctgaccctgatccgtgcccgcctccaggagaagttgtcacctccctacagctccccacaggagtttgcccaggatgtgggccgcatgttcaagcaattcaacaagttaactgaggtgagccagtggaatggagaggctgtgggcagggggagatgtgaaggaaagaactaggacccattcatccactgcattcctgcttggcccaggacaaggcagacgtgcagtccatcatcggcctgcagcgcttcttcgagacgcgcatgaacgaggccttcggtgacaccaagttctctgctgtgctggtggagcccccgccgatgagcctgcctggtgctggcctgagttcccaggagctgtctggtggccctggtgatggcccctgaggctggagcccccatggccagcccagcctggctctgttctctgtcctgtcaccccatccccactcccctggtggcctgactcccactccctggtggccccatcccccagttcctcacgatatggtttttacttctgtggatttaataaaaacttcaccagtt

SEQ ID NO: 104180 - DNA, 1597 bp, Homo sapiens
aaaattacggctaggtacgaggcctggtgatctacttccagctgcaccgggccctcaagatgattgtggatcccgtggagccacatggcgagatgaagtttcagtgggacctcaatgcctggaccaagagtgccgaggcctttggcaagattgtggcagagcgtcctggcactaactcaacaggccctgcacccatggcccctccaagagccccaggcccctgagcaagcagggctctggcagcagccagcccatggaggtgcaggaaggctatggctttgggtcaggagatgatccctactcaagtgcagagccccatgtgtcaggtgtgaaacggtcccgctcaggtgagggcgaggtgagcggccttatgcgcaaggtgccacgagtgagccttgaacgcctggacctggacctcacagctgacagccagccacccgtcttcaaggtcttcccaggcagtaccactgaggactacaaccttattgttattgaacgtggcgctgccgctgcagctaccggccagccagggactgcgcctgcaggaacccctggtgccccacccctggctggcatggccattgtcaaggaggaggagacggaggctgccattggagcccctcctactgccactgagggccctgagaccaaacctgtgcttatggctcttgcggagggtcctggtgctgagggtccccgcctggcctcacctagtggcagcaccagctcagggctggaggtggtggctcctgagggtacctcagccccaggtggtggcccgggaaccctggatgacagtgccaccatttgccgtgtctgccagaagccaggcgatctggttatgtgcaaccagtgtgagttttgtttccacctggactgtcacctgccggccctgcaggatgtaccaggggaggagtggagctgctcactctgccatgtgctccctgacctgaaggaggaggatggcagcctcagcctggatggtgcagacagcactggcgtggtggccaagctctcaccagccaaccagcggaaatgtgagcgtgtactgctggccctattctgtcacgaaccctgccgccccctgcatcagctggctaccgactccaccttctccctggaccagcccggtggcaccctggatctgaccctgatccgtgcccgcctccaggagaagttgtcacctccctacagctccccacaggagtttgcccaggatgtgggccgcatgttcaagcaattcaacaagttaactgaggacaaggcagacgtgcagtccatcatcggcctgcagcgcttcttcgagacgcgcatgaacgaggccttcggtgacaccaagttctctgctgtgctggtggagcccccgccgatgagcctgcctggtgctggcctgagttcccaggagctgtctggtggccctggtgatggcccctgaggctggagcccccatggccagcccagcctggctctgttctctgtcctgtcaccccatccccactcccctggtggcctgactcccactccctggtggccccatcccccagttcctcacgatatggtttttacttctgtggatttaataaaaacttcaccagtt

SEQ ID NO: 104181 - DNA, 3514 bp, Homo sapiens
  misc_feature (2177)..(2177): n is a, c, g, or t
  misc_feature (2208)..(2208): n is a, c, g, or t
  misc_feature (2218)..(2218): n is a, c, g, or t
  misc_feature (2224)..(2224): n is a, c, g, or t
  misc_feature (2241)..(2241): n is a, c, g, or t
  misc_feature (2243)..(2243): n is a, c, g, or t
  misc_feature (2247)..(2247): n is a, c, g, or t
  misc_feature (2360)..(2360): n is a, c, g, or t
cggcggcgaagagacgcgggttgaggaagagggacggattgcccatgcgcttgggcgcacagcggcccgcttctgtgtggtctggaggtggagctgagaggggaatcacactctataaaggttcgcataccccactggcggattcaattgcggcagtgacgtcacagaggccccgccccgcccccacaagagccccaccgacgtggggttggcggtggtggaaggactaggagttggcgcgtgcgtactggcggcctctcccgcaccgaccggcctgggccccgcccccgggcgtgaggcgcccaatgcgcgtgcgcggcggcgtcggcgccagttatttctgtcccgccccccggcctcggctctttctgcgagcgggcgcgcgggcgagcggttgtgcttgtgcttgtggcgcgtggtgcgggtttcggcggcggctgaggaagaagcgcgggcggcgccttcgggaggcgagcaggcagcagttggccgtgccgtagcagcgtcccgcgcgcggcgggcagcggcccaggaggcgcgtggcggcgctcggcctcgcggcggcggcggcggcagcggcccagcagttggcggcgagcgcgtctgcgcctgcgcggcgggccccgcgcccctcctccccccctgggcgcccccggcggcgtgtgaatggcggcctccgcggcggcagcctcggcagcagcggcctcggccgcctctggcagcccgggcccgggcgagggctccgctggcggcgaaaagcgctccaccgccccttcggccgcagcctcggcctctgcctcagccgcggcgtcgtcgcccgcggggggcggcgccgaggcgctggagctgctggagcactgcggcgtgtgcagagagcgcctgcgacccgagagggagccccgcctgctgccctgtttgcactcggcctgtagtgcctgcttagggcccgcggcccccgccgccgccaacagctcgggggacggcggggcggcgggcgacggcaccgtggtggactgtcccgtgtgcaagcaacagtgcttctccaaagacatcgtggagaattatttcatgcgtgatagtggcagcaaggctgccaccgacgcccaggatgcgaaccagtgctgcactagctgtgaggataatgccccagccaccagctactgtgtggagtgctcggagcctctgtgtgagacctgtgtagaggcgcaccagcgggtgaagtacaccaaggaccatactgtgcgctctactgggccagccaagtctcgggatggtgaacgtactgtctattgcaacgtacacaagcatgaaccccttgtgctgttttgtgagagctgtgatactctcacctgccgagactgccagctcaatgcccacaaggaccaccagtaccagttcttagaggatgcagtgaggaaccagcgcaagctcctggcctcactggtgaagcgccttggggacaaacatgcaacattgcagaagagcaccaaggaggttcgcagctcaatccgccaggtgtctgacgtacagaagcgtgtgcaagtggatgtcaagatggccatcctgcagatcatgaaggagctgaataagcggggccgtgtgctggtcaatgatgcccagaaggtgactgaggggcagcaggagcgcctggagcggcagcactggaccatgaccaagatccagaagcaccaggagcacattctgcgctttgcctcttgggctctggagagtgacaacaacacagcccttttgctttctaagaagttgatctacttccagctgcaccgggccctcaagatgattgtggatcccgtggagccacatggcgagatgaagtttcagtgggacctcaatgcctggaccaagagtgccgaggcctttggcaagattgtggcagagcgtcctggcactaactcaacaggccctgcacccatggcccctccaagagccccaggcccctgagcaagcagggctctggcagcagccagcccatggaggtgcaggaaggctatggctttgggtcaggagatgatccctactcaagtgcagagccccatgtgtcaggtgtgaaacggtcccgctcaggtgagggcgaggtgagcggccttatgcgcaaggtgccacgagtgagccttgaacgcctgagcgccctgcgtaccatggcaccgctcacaatncttatgacaatgccaccaggcctccatcacncagttccatntccganacgcgcgtcatttcccncnaagngtccatgctaacccaatccttgaatgcgtatcttaaccataactcgtataacttcgcttcatttgaaactgattggcagcctgcccgtcgttgccaaagcttatcctgagccnctaaggcgccacatgtgcgaatcatttgtcctgactcttttgtcaagggggaaaacccctcccctttgggttaggtccaccccccaaagccccgcccccagttggtggcctttgtggccaatttgtgcccactttgtcaaaggacggaggaggagacggaggctgccattggagcccctcctactgccactgagggccctgagaccaaacctgtgcttatggctcttgcggagggtcctggtgctgagggtccccgcctggcctcacctagtggcagcaccagctcagggctggaggtggtggctcctgagggtacctcagccccaggtggtggcccgggaaccctggatgacagtgccaccatttgccgtgtctgccagaagccaggcgatctggttatgtgcaaccagtgtgagttttgtttccacctggactgtcacctgccggccctgcaggatgtaccaggggaggagtggagctgctcactctgccatgtgctccctgacctgaaggaggaggatggcagcctcagcctggatggtgcagacagcactggcgtggtggccaagctctcaccagccaaccagcggaaatgtgagcgtgtactgctggccctattctgtcacgaaccctgccgccccctgcatcagctggctaccgactccaccttctccctggaccagcccggtggcaccctggatctgaccctgatccgtgcccgcctccaggagaagttgtcacctccctacagctccccacaggagtttgcccaggatgtgggccgcatgttcaagcaattcaacaagttaactgaggacaaggcagacgtgcagtccatcatcggcctgcagcgcttcttcgagacgcgcatgaacgaggccttcggtgacaccaagttctctgctgtgctggtggagcccccgccgatgagcctgcctggtgctggcctgagttcccaggagctgtctggtggccctggtgatggcccctgaggctggagcccccatggccagcccagcctggctctgttctctgtcctgtcaccccatccccactcccctggtggcctgactcccactccctggtggccccatcccccagttcctcacgatatggtttttacttctgtggatttaataaaaacttcaccagtt

SEQ ID NO: 104182 - DNA, 3629 bp, Homo sapiens
  misc_feature (2999)..(2999): n is a, c, g, or t
  misc_feature (3063)..(3063): n is a, c, g, or t
  misc_feature (3080)..(3080): n is a, c, g, or t
  misc_feature (3096)..(3096): n is a, c, g, or t
  misc_feature (3514)..(3514): n is a, c, g, or t
  misc_feature (3519)..(3519): n is a, c, g, or t
cggcggcgaagagacgcgggttgaggaagagggacggattgcccatgcgcttgggcgcacagcggcccgcttctgtgtggtctggaggtggagctgagaggggaatcacactctataaaggttcgcataccccactggcggattcaattgcggcagtgacgtcacagaggccccgccccgcccccacaagagccccaccgacgtggggttggcggtggtggaaggactaggagttggcgcgtgcgtactggcggcctctcccgcaccgaccggcctgggccccgcccccgggcgtgaggcgcccaatgcgcgtgcgcggcggcgtcggcgccagttatttctgtcccgccccccggcctcggctctttctgcgagcgggcgcgcgggcgagcggttgtgcttgtgcttgtggcgcgtggtgcgggtttcggcggcggctgaggaagaagcgcgggcggcgccttcgggaggcgagcaggcagcagttggccgtgccgtagcagcgtcccgcgcgcggcgggcagcggcccaggaggcgcgtggcggcgctcggcctcgcggcggcggcggcggcagcggcccagcagttggcggcgagcgcgtctgcgcctgcgcggcgggccccgcgcccctcctccccccctgggcgcccccggcggcgtgtgaatggcggcctccgcggcggcagcctcggcagcagcggcctcggccgcctctggcagcccgggcccgggcgagggctccgctggcggcgaaaagcgctccaccgccccttcggccgcagcctcggcctctgcctcagccgcggcgtcgtcgcccgcggggggcggcgccgaggcgctggagctgctggagcactgcggcgtgtgcagagagcgcctgcgacccgagagggagccccgcctgctgccctgtttgcactcggcctgtagtgcctgcttagggcccgcggcccccgccgccgccaacagctcgggggacggcggggcggcgggcgacggcaccgtggtggactgtcccgtgtgcaagcaacagtgcttctccaaagacatcgtggagaattatttcatgcgtgatagtggcagcaaggctgccaccgacgcccaggatgcgaaccagtgctgcactagctgtgaggataatgccccagccaccagctactgtgtggagtgctcggagcctctgtgtgagacctgtgtagaggcgcaccagcgggtgaagtacaccaaggaccatactgtgcgctctactgggccagccaagtctcgggatggtgaacgtactgtctattgcaacgtacacaagcatgaaccccttgtgctgttttgtgagagctgtgatactctcacctgccgagactgccagctcaatgcccacaaggaccaccagtaccagttcttagaggatgcagtgaggaaccagcgcaagctcctggcctcactggtgaagcgccttggggacaaacatgcaacattgcagaagagcaccaaggaggttcgcagctcaatccgccaggtgtctgacgtacagaagcgtgtgcaagtggatgtcaagatggccatcctgcagatcatgaaggagctgaataagcggggccgtgtgctggtcaatgatgcccagaaggtgactgaggggcagcaggagcgcctggagcggcagcactggaccatgaccaagatccagaagcaccaggagcacattctgcgctttgcctcttgggctctggagagtgacaacaacacagcccttttgctttctaagaagttgatctacttccagctgcaccgggccctcaagatgattgtggatcccgtggagccacatggcgagatgaagtttcagtgggacctcaatgcctggaccaagagtgccgaggcctttggcaagattgtggcagagcgtcctggcactaactcaacaggccctgcacccatggcccctccaagagccccaggcccctgagcaagcagggctctggcagcagccagcccatggaggtgcaggaaggctatggctttgggtcaggagatgatccctactcaagtgcagagccccatgtgtcaggtgtgaaacggtcccgctcaggtgagggcgaggtgagcggccttatgcgcaaggtgccacgagtgagccttgaacgcctggacctggacctcacagctgacagccagccacccgtcttcaaggtcttcccaggcagtaccactgaggactacaaccttattgttattgaacgtggcgctgccgctgcagctaccggccagccagggactgcgcctgcaggaacccctggtgccccacccctggctggcatggccattgtcaaggaggaggagacggaggctgccattggagcccctcctactgccactgagggccctgagaccaaacctgtgcttatggctcttgcggagggtcctggtgctgagggtccccgcctggcctcacctagtggcagcaccagctcagggctggaggtggtggctcctgagggtacctcagccccaggtggtggcccgggaaccctggatgacagtgccaccatttgccgtgtctgccagaagccaggcgatctggttatgtgcaaccagtgtgagttttgtttccacctggactgtcacctgccggccctgcaggatgtaccaggggaggagtggagctgctcactctgccatgtgctccctgacctgaaggaggaggatggcagcctcagcctggatggtgcagacagcactggcgtggtggccaagctctcaccagccaaccagcggaaatgtgagcgtgtactgctggccctattctgtcacgaaccctgccgccccctgcatcagctggctaccgactccaccttctccctggaccagcccggtggcaccctggatctgaccctgatccgtgcccgcctccaggagaagttgtcacctccctacagctccccacaggagtttgcccaggatgtgggccgcatgttcaagcaattcaacaagttaactgagaanggggggaaaaaaaacccaaaagggccccaagacgtgcagtccatcatcggcctcgcacgcgctntcttttcccgggaaggnaacgggccggcccaantttggaaaaaccccggggaaaacggggggggggccccccccccttttttttccggcagagcgcgtgaggaacccccaaaccccgccccaaagaagagggcagcgttttcctttcccggctttttcccccaccgttttgggagggccccccccacattttttgtggggggctatttgtgggggcgcccccacctttttggcgggcgcgcgcgcgcgacttttgaggggcggggggcaaaaaacacgggggccgcctctcccccactaccagacacccctgacacccgtggggggtggacaccccacatgccccccaggggggggcacaccaaccactttttggggggcaacacaagaggggaccccgccccccctgggttgtggggcccccaacccccccctcctttttgtgggggcgngggancccttatgtgggggacgcccactttttggtggggggggggtaccccctcccaccctgcttttttgggggcgaaaaaccggggcgagctttttttttttttccccacaccg

SEQ ID NO: 104183 - DNA, 2918 bp, Homo sapiens
cggcggcgaagagacgcgggttgaggaagagggacggattgcccatgcgcttgggcgcacagcggcccgcttctgtgtggtctggaggtggagctgagaggggaatcacactctataaaggttcgcataccccactggcggattcaattgcggcagtgacgtcacagaggccccgccccgcccccacaagagccccaccgacgtggggttggcggtggtggaaggactaggagttggcgcgtgcgtactggcggcctctcccgcaccgaccggcctgggccccgcccccgggcgtgaggcgcccaatgcgcgtgcgcggcggcgtcggcgccagttatttctgtcccgccccccggcctcggctctttctgcgagcgggcgcgcgggcgagcggttgtgcttgtgcttgtggcgcgtggtgcgggtttcggcggcggctgaggaagaagcgcgggcggcgccttcgggaggcgagcaggcagcagttggccgtgccgtagcagcgtcccgcgcgcggcgggcagcggcccaggaggcgcgtggcggcgctcggcctcgcggcggcggcggcggcagcggcccagcagttggcggcgagcgcgtctgcgcctgcgcggcgggccccgcgcccctcctccccccctgggcgcccccggcggcgtgtgaatggcggcctccgcggcggcagcctcggcagcagcggcctcggccgcctctggcagcccgggcccgggcgagggctccgctggcggcgaaaagcgctccaccgccccttcggccgcagcctcggcctctgcctcagccgcggcgtcgtcgcccgcggggggcggcgccgaggcgctggagctgctggagcactgcggcgtgtgcagagagcgcctgcgacccgagagggagccccgcctgctgccctgtttgcactcggcctgtagtgcctgcttagggcccgcggcccccgccgccgccaacagctcgggggacggcggggcggcgggcgacggcaccgtggtggactgtcccgtgtgcaagcaacagtgcttctccaaagacatcgtggagaattatttcatgcgtgatagtggcagcaaggctgccaccgacgcccaggatgcgaaccagtgctgcactagctgtgaggataatgccccagccaccagctactgtgtggagtgctcggagcctctgtgtgagacctgtgtagaggcgcaccagcgggtgaagtacaccaaggaccatactgtgcgctctactgggccagccaagtctcgggatggtgaacgtactgtctattgcaacgtacacaagcatgaaccccttgtgctgttttgtgagagctgtgatactctcacctgccgagactgccagctcaatgcccacaaggaccaccagtaccagttcttagaggatgcagtgaggaaccagcgcaagctcctggcctcactggtgaagcgccttggggacaaacatgcaacattgcagaagagcaccaaggaggttcgcagctcaatccgccaggtgtctgacgtacagaagcgtgtgcaagtggatgtcaagatggccatcctgcagatcatgaaggagctgaataagcggggccgtgtgctggtcaatgatgcccagaaggtgactgaggggcagcaggagcgcctggagcggcagcactggaccatgaccaagatccagaagcaccaggagcacattctgcgctttgcctcttgggctctggagagtgacaacaacacagcccttttgctttctaagaagttgatctacttccagctgcaccgggccctcaagatgattgtggatcccgtggagccacatggcgagatgaagtttcagtgggacctcaatgcctggaccaagagtgccgaggcctttggcaagattgtggcagagcgtcctggcactaactcaacaggccctgcacccatggcccctccaagagccccaggcccctgagcaagcagggctctggcagcagccagcccatggaggtgcaggaaggctatggctttgggtcaggagatgatccctactcaagtgcagagccccatgtgtcaggtgtgaaacggtcccgctcaggtgagggcgaggtgagcggccttatgcgcaaggtgccacgagtgagccttgaacgcctggacctggacctcacagctgacagccagccacccgtcttcaaggtcttcccaggcagtaccactgaggactacaaccttattgttattgaacgtggcgctgccgctgcagctaccggccagccagggactgcgcctgcaggaacccctggtgccccacccctggctggcatggccattgtcaaggaggaggagacggaggctgccattggagcccctcctactgccactgagggccctgagaccaaacctgtgcttatggctcttgcggagggtcctggtgctgagggtccccgcctggcctcacctagtggcagcaccagctcagggctggaggtggtggctcctgagggtacctcagccccaggtggtggcccgggaaccctggatgacagtgccaccatttgccgtgtctgccagaagccaggcgatctggttatgtgcaaccagtgtgagttttgtttccacctggactgtcacctgccggccctgcaggatgtaccaggggaggagtggagctgctcactctgccatgtgctccctgacctgaaggaggaggatggcagcctcagcctggatggtgcagacagcactggcgtggtggccaagctctcaccagccaaccagcggaaatgtgagcgtgtactgctggccctattctgtcacgaaccctgccgccccctgcatcagctgactcccactccctggtggccccatcccccagttcctcacgatatggtttttacttctgtggatttaataaaaacttcaccagtt

SEQ ID NO: 104184 - DNA, 3416 bp, Homo sapiens
cggcggcgaagagacgcgggttgaggaagagggacggattgcccatgcgcttgggcgcacagcggcccgcttctgtgtggtctggaggtggagctgagaggggaatcacactctataaaggttcgcataccccactggcggattcaattgcggcagtgacgtcacagaggccccgccccgcccccacaagagccccaccgacgtggggttggcggtggtggaaggactaggagttggcgcgtgcgtactggcggcctctcccgcaccgaccggcctgggccccgcccccgggcgtgaggcgcccaatgcgcgtgcgcggcggcgtcggcgccagttatttctgtcccgccccccggcctcggctctttctgcgagcgggcgcgcgggcgagcggttgtgcttgtgcttgtggcgcgtggtgcgggtttcggcggcggctgaggaagaagcgcgggcggcgccttcgggaggcgagcaggcagcagttggccgtgccgtagcagcgtcccgcgcgcggcgggcagcggcccaggaggcgcgtggcggcgctcggcctcgcggcggcggcggcggcagcggcccagcagttggcggcgagcgcgtctgcgcctgcgcggcgggccccgcgcccctcctccccccctgggcgcccccggcggcgtgtgaatggcggcctccgcggcggcagcctcggcagcagcggcctcggccgcctctggcagcccgggcccgggcgagggctccgctggcggcgaaaagcgctccaccgccccttcggccgcagcctcggcctctgcctcagccgcggcgtcgtcgcccgcggggggcggcgccgaggcgctggagctgctggagcactgcggcgtgtgcagagagcgcctgcgacccgagagggagccccgcctgctgccctgtttgcactcggcctgtagtgcctgcttagggcccgcggcccccgccgccgccaacagctcgggggacggcggggcggcgggcgacggcaccgtggtggactgtcccgtgtgcaagcaacagtgcttctccaaagacatcgtggagaattatttcatgcgtgatagtggcagcaaggctgccaccgacgcccaggatgcgaaccagtgctgcactagctgtgaggataatgccccagccaccagctactgtgtggagtgctcggagcctctgtgtgagacctgtgtagaggcgcaccagcgggtgaagtacaccaaggaccatactgtgcgctctactgggccagccaagtctcgggatggtgaacgtactgtctattgcaacgtacacaagcatgaaccccttgtgctgttttgtgagagctgtgatactctcacctgccgagactgccagctcaatgcccacaaggaccaccagtaccagttcttagaggatgcagtgaggaaccagcgcaagctcctggcctcactggtgaagcgccttggggacaaacatgcaacattgcagaagagcaccaaggaggttcgcagctcaatccgccaggtgtctgacgtacagaagcgtgtgcaagtggatgtcaagatggccatcctgcagatcatgaaggagctgaataagcggggccgtgtgctggtcaatgatgcccagcagcaaggtgcactgcaggggcagccaggcagcgcacatggagcaggcagacaacatggacccatgaccaaagatccaagaagcaacacaggaggacaacaattcgtgcagctatagcctcattggagcatctggagacgtgacaacaaccacagcccatatttgactattctcacagaagttgatctacttccagacatgccaccggagacctcaagcatgcattgtcggcatcccgtggcagccacatggcgagatgacagtatccagaagggaccatcaatgcctggcaccaaagaagtagccgaaggactatacggcgaacgcaaagatggcaagcgcagtccctgagcaataaactccaagcagagcccatgagagcgcaatggaaccactccaaagcagcccccagggaccccagaagcaaagcagggctctggcagcagccagcccatggaggtgcaggaaggctatggcttgggtcaggagatgatccctactcaagtgcagagccccatgtgtcaggtgtgaaacggtcccgctcaggtgagggcgaggtgagcggccttatgcgcaaggtgccacgagtgagccttgaacgcctggacctggacctcacagctgacagccagccacccgtcttcaaggtcttcccaggcagtaccactgaggactacaaccttattgttattgaacgtggcgctgccgctgcagctaccggccagccagggactgcgcctgcaggaacccctggtgccccacccctggctggcatggccattgtcaaggaggaggagacggaggctgccattggagcccctcctactgccactgagggccctgagaccaaacctgtgcttatggctcttgcggagggtcctggtgctgagggtccccgcctggcctcacctagtggcagcaccagctcagggctggaggtggtggctcctgagggtacctcagccccaggtggtggcccgggaaccctggatgacagtgccaccatttgccgtgtctgccagaagccaggcgatctggttatgtgcaaccagtgtgagttttgtttccacctggactgtcacctgccggccctgcaggatgtaccaggggaggagtggagctgctcactctgccatgtgctccctgacctgaaggaggaggatggcagcctcagcctggatggtgcagacagcactggcgtggtggccaagctctcaccagccaaccagcggaaatgtgagcgtgtactgctggccctattctgtcacgaaccctgccgccccctgcatcagctggctaccgactccaccttctccctggaccagcccggtggcaccctggatctgaccctgatccgtgcccgcctccaggagaagttgtcacctccctacagctccccacaggagtttgcccaggatgtgggccgcatgttcaagcaattcaacaagttaactgaggacaaggcagacgtgcagtccatcatcggcctgcagcgcttcttcgagacgcgcatgaacgaggccttcggtgacaccaagttctctgctgtgctggtggagcccccgccgatgagcctgcctggtgctggcctgagttcccaggagctgtctggtggccctggtgatggcccctgaggctggagcccccatggccagcccagcctggctctgttctctgtcctgtcaccccatccccactcccctggtggcctgactcccactccctggtggccccatcccccagttcctcacgatatggtttttacttctgtggatttaataaaaacttcaccagtt

SEQ ID NO: 104185 - DNA, 3008 bp, Homo sapiens
cggcggcgaagagacgcgggttgaggaagagggacggattgcccatgcgcttgggcgcacagcggcccgcttctgtgtggtctggaggtggagctgagaggggaatcacactctataaaggttcgcataccccactggcggattcaattgcggcagtgacgtcacagaggccccgccccgcccccacaagagccccaccgacgtggggttggcggtggtggaaggactaggagttggcgcgtgcgtactggcggcctctcccgcaccgaccggcctgggccccgcccccgggcgtgaggcgcccaatgcgcgtgcgcggcggcgtcggcgccagttatttctgtcccgccccccggcctcggctctttctgcgagcgggcgcgcgggcgagcggttgtgcttgtgcttgtggcgcgtggtgcgggtttcggcggcggctgaggaagaagcgcgggcggcgccttcgggaggcgagcaggcagcagttggccgtgccgtagcagcgtcccgcgcgcggcgggcagcggcccaggaggcgcgtggcggcgctcggcctcgcggcggcggcggcggcagcggcccagcagttggcggcgagcgcgtctgcgcctgcgcggcgggccccgcgcccctcctccccccctgggcgcccccggcggcgtgtgaatggcggcctccgcggcggcagcctcggcagcagcggcctcggccgcctctggcagcccgggcccgggcgagggctccgctggcggcgaaaagcgctccaccgccccttcggccgcagcctcggcctctgcctcagccgcggcgtcgtcgcccgcggggggcggcgccgaggcgctggagctgctggagcactgcggcgtgtgcagagagcgcctgcgacccgagagggagccccgcctgctgccctgtttgcactcggcctgtagtgcctgcttagggcccgcggcccccgccgccgccaacagctcgggggacggcggggcggcgggcgacggcaccgtggtggactgtcccgtgtgcaagcaacagtgcttctccaaagacatcgtggagaattatttcatgcgtgatagtggcagcaaggctgccaccgacgcccaggatgcgaaccagtgctgcactagctgtgaggataatgccccagccaccagctactgtgtggagtgctcggagcctctgtgtgagacctgtgtagaggcgcaccagcgggtgaagtacaccaaggaccatactgtgcgctctactgggccagccaagtctcgggatggtgaacgtactgtctattgcaacgtacacaagcatgaaccccttgtgctgttttgtgagagctgtgatactctcacctgccgagactgccagctcaatgcccacaaggaccaccagtaccagttcttagaggatgcagtgaggaaccagcgcaagctcctggcctcactggtgaagcgccttggggacaaacatgcaacattgcagaagagcaccaaggaggttcgcagctcaatccgccaggtgtctgacgtacagaagcgtgtgcaagtggatgtcaagatggccatcctgcagatcatgaaggagctgaataagcggggccgtgtgctggtcaatgatgcccagaaggtgactgaggggcagcaggagcgcctggagcggcagcactggaccatgaccaagatccagaagcaccaggagcacattctgcgctttgcctcttgggctctggagagtgacaacaacacagcccttttgctttctaagaagttgatctacttccagctgcaccgggccctcaagatgattgtggatcccgtggagccacatggcgagatgaagtttcagtgggacctcaatgcctggaccaagagtgccgaggcctttggcaagattgtggcagagcgtcctggcactaactcaacaggccctgcacccatggcccctccaagagccccaggcccctgagcaagcagggctctggcagcagccagcccatggaggtgcaggaaggctatggctttgggtcaggagatgatccctactcaagtgcagagccccatgtgtcaggtgtgaaacggtcccgctcaggtgagggcgaggtgagcggccttatgcgcaaggtgccacgagtgagccttgaacgcctggacctggacctcacagctgacagccagccacccgtcttcaaggtcttcccaggcagtaccactgaggactacaaccttattgttattgaacgtggcgctgccgctgcagctaccggccagccagggactgcgcctgcaggaacccctggtgccccacccctggctggcatggccattgtcaaggaggaggagacggaggctgccattggagcccctcctactgccactgagggccctgagaccaaacctgtgcttatggctcttgcggagggtcctggtgctgagggtccccgcctggcctcacctagtggcagcaccagctcagggctggaggtggtggctcctgagggtacctcagccccaggtggtggcccgggaaccctggatgacagtgccaccatttgccgtgtctgccagaagccaggcgatctggttatgtgcaaccagtgtgagttttgtttccacctggactgtcacctgccggccctgcaggatgtaccaggggaggagtggagctgctcactctgccatgtgctccctgacctgaaggaggaggatggcagcctcagcctggatggtgcagacagcactggcgtggtggccaagctctcaccagccaaccagcggcccccgccgatgagcctgcctggtgctggcctgagttcccaggagctgtctggtggccctggtgatggcccctgaggctggagcccccatggccagcccagcctggctctgttctctgtcctgtcaccccatccccactcccctggtggcctgactcccactccctggtggccccatcccccagttcctcacgatatggtttttacttctgtggatttaataaaaacttcaccagtt

SEQ ID NO: 104186 - DNA, 2798 bp, Homo sapiens
  misc_feature (2735)..(2735): n is a, c, g, or t
  misc_feature (2739)..(2739): n is a, c, g, or t
  misc_feature (2742)..(2742): n is a, c, g, or t
  misc_feature (2745)..(2745): n is a, c, g, or t
  misc_feature (2757)..(2757): n is a, c, g, or t
  misc_feature (2764)..(2764): n is a, c, g, or t
cggcggcgaagagacgcgggttgaggaagagggacggattgcccatgcgcttgggcgcacagcggcccgcttctgtgtggtctggaggtggagctgagaggggaatcacactctataaaggttcgcataccccactggcggattcaattgcggcagtgacgtcacagaggccccgccccgcccccacaagagccccaccgacgtggggttggcggtggtggaaggactaggagttggcgcgtgcgtactggcggcctctcccgcaccgaccggcctgggccccgcccccgggcgtgaggcgcccaatgcgcgtgcgcggcggcgtcggcgccagttatttctgtcccgccccccggcctcggctctttctgcgagcgggcgcgcgggcgagcggttgtgcttgtgcttgtggcgcgtggtgcgggtttcggcggcggctgaggaagaagcgcgggcggcgccttcgggaggcgagcaggcagcagttggccgtgccgtagcagcgtcccgcgcgcggcgggcagcggcccaggaggcgcgtggcggcgctcggcctcgcggcggcggcggcggcagcggcccagcagttggcggcgagcgcgtctgcgcctgcgcggcgggccccgcgcccctcctccccccctgggcgcccccggcggcgtgtgaatggcggcctccgcggcggcagcctcggcagcagcggcctcggccgcctctggcagcccgggcccgggcgagggctccgctggcggcgaaaagcgctccaccgccccttcggccgcagcctcggcctctgcctcagccgcggcgtcgtcgcccgcggggggcggcgccgaggcgctggagctgctggagcactgcggcgtgtgcagagagcgcctgcgacccgagagggagccccgcctgctgccctgtttgcactcggcctgtagtgcctgcttagggcccgcggcccccgccgccgccaacagctcgggggacggcggggcggcgggcgacggcaccgtggtggactgtcccgtgtgcaagcaacagtgcttctccaaagacatcgtggagaattatttcatgcgtgatagtggcagcaaggctgccaccgacgcccaggatgcgaaccagtgctgcactagctgtgaggataatgccccagccaccagctactgtgtggagtgctcggagcctctgtgtgagacctgtgtagaggcgcaccagcgggtgaagtacaccaaggaccatactgtgcgctctactgggccagccaagtctcgggatggtgaacgtactgtctattgcaacgtacacaagcatgaaccccttgtgctgttttgtgagagctgtgatactctcacctgccgagactgccagctcaatgcccacaaggaccaccagtaccagttcttagaggatgcagtgaggaaccagcgcaagctcctggcctcactggtgaagcgccttggggacaaacatgcaacattgcagaagagcaccaaggaggttcgcagctcaatccgccaggtgtctgacgtacagaagcgtgtgcaagtggatgtcaagatggccatcctgcagatcatgaaggagctgaataagcggggccgtgtgctggtcaatgatgcccagaaggtgactgaggggcagcaggagcgcctggagcggcagcactggaccatgaccaagatccagaagcaccaggagcacattctgcgctttgcctcttgggctctggagagtgacaacaacacagcccttttgctttctaagaagttgatctacttccagctgcaccgggccctcaagatgattgtggatcccgtggagccacatggcgagatgaagtttcagtgggacctcaatgcctggaccaagagtgccgaggcctttggcaagattgtggcagagcgtcctggcactaactcaacaggccctgcacccatggcccctccaagagccccaggcccctgagcaagcagggctctggcagcagccagcccatggaggtgcaggaaggctatggctttgggtcaggagatgatccctactcaagtgcagagccccatgtgtcaggtgtgaaacggtcccgctcaggtgagggcgaggtgagcggccttatgcgcaaggtgccacgagtgagccttgaacgcctggacctggacctcacagctgacagccagccacccgtcttcaaggtcttcccaggcagtaccactgaggactacaaccttattgttattgaacgtggcgctgccgctgcagctaccggccagccagggactgcgcctgcaggaacccctggtgccccacccctggctggcatggccattgtcaaggaggaggagacggaggctgccattggagcccctcctactgccactgagggccctgagaccaaacctgtgcttatggctcttgcggagggtcctggtgctgagggtccccgcctggcctcacctagtggcagcaccagctcagggctggaggtggtggctcctgagggtacctcagccccaggtggtggcccgggaaccctggatgacagtgccaccatttgccgtgtctgccagaagccaggcgatctggttatgtgcaaccagtgtgagttttgtttccacctggactgtcacctgccggccctgcaggatgtaccaggggaggagtggagctgctcactctgccatgtgctccctgacctgaaggagagggggtgggctctcctggtgtgggaccctgctgggccngccnccnccncgggagtggggntgtggcntttgaacgccccgtttggtcccttccggcgggct

SEQ ID NO: 104187 - DNA, 3319 bp, Homo sapiens
  misc_feature (3175)..(3175): n is a, c, g, or t
cggcggcgaagagacgcgggttgaggaagagggacggattgcccatgcgcttgggcgcacagcggcccgcttctgtgtggtctggaggtggagctgagaggggaatcacactctataaaggttcgcataccccactggcggattcaattgcggcagtgacgtcacagaggccccgccccgcccccacaagagccccaccgacgtggggttggcggtggtggaaggactaggagttggcgcgtgcgtactggcggcctctcccgcaccgaccggcctgggccccgcccccgggcgtgaggcgcccaatgcgcgtgcgcggcggcgtcggcgccagttatttctgtcccgccccccggcctcggctctttctgcgagcgggcgcgcgggcgagcggttgtgcttgtgcttgtggcgcgtggtgcgggtttcggcggcggctgaggaagaagcgcgggcggcgccttcgggaggcgagcaggcagcagttggccgtgccgtagcagcgtcccgcgcgcggcgggcagcggcccaggaggcgcgtggcggcgctcggcctcgcggcggcggcggcggcagcggcccagcagttggcggcgagcgcgtctgcgcctgcgcggcgggccccgcgcccctcctccccccctgggcgcccccggcggcgtgtgaatggcggcctccgcggcggcagcctcggcagcagcggcctcggccgcctctggcagcccgggcccgggcgagggctccgctggcggcgaaaagcgctccaccgccccttcggccgcagcctcggcctctgcctcagccgcggcgtcgtcgcccgcggggggcggcgccgaggcgctggagctgctggagcactgcggcgtgtgcagagagcgcctgcgacccgagagggagccccgcctgctgccctgtttgcactcggcctgtagtgcctgcttagggcccgcggcccccgccgccgccaacagctcgggggacggcggggcggcgggcgacggcaccgtggtggactgtcccgtgtgcaagcaacagtgcttctccaaagacatcgtggagaattatttcatgcgtgatagtggcagcaaggctgccaccgacgcccaggatgcgaaccagtgctgcactagctgtgaggataatgccccagccaccagctactgtgtggagtgctcggagcctctgtgtgagacctgtgtagaggcgcaccagcgggtgaagtacaccaaggaccatactgtgcgctctactgggccagccaagtctcgggatggtgaacgtactgtctattgcaacgtacacaagcatgaaccccttgtgctgttttgtgagagctgtgatactctcacctgccgagactgccagctcaatgcccacaaggaccaccagtaccagttcttagaggatgcagtgaggaaccagcgcaagctcctggcctcactggtgaagcgccttggggacaaacatgcaacattgcagaagagcaccaaggaggttcgcagctcaatccgccaggtgtctgacgtacagaagcgtgtgcaagtggatgtcaagatggccatcctgcagatcatgaaggagctgaataagcggggccgtgtgctggtcaatgatgcccagaaggtgactgaggggcagcaggagcgcctggagcggcagcactggaccatgaccaagatccagaagcaccaggagcacattctgcgctttgcctcttgggctctggagagtgacaacaacacagcccttttgctttctaagaagttgatctacttccagctgcaccgggccctcaagatgattgtggatcccgtggagccacatggcgagatgaagtttcagtgggacctcaatgcctggaccaagagtgccgaggcctttggcaagattgtggcagagcgtcctggcactaactcaacaggccctgcacccatggcccctccaagagccccaggcccctgagcaagcagggctctggcagcagccagcccatggaggtgcaggaaggctatggctttgggtcaggagatgatccctactcaagtgcagagccccatgtgtcaggtgtgaaacggtcccgctcaggtgagggcgaggtgagcggccttatgcgcaaggtgccacgagtgagccttgaacgcctggacctggacctcacagctgacagccagccacccgtcttcaaggtcttcccaggcagtaccactgaggactacaaccttattgttattgaacgtggcgctgccgctgcagctaccggccagccagggactgcgcctgcaggaacccctggtgccccacccctggctggcatggccattgtcaaggaggaggagacggaggctgccattggagcccctcctactgccactgagggccctgagaccaaacctgtgcttatggctcttgcggagggtcctggtgctgagggtccccgcctggcctcacctagtggcagcaccagctcagggctggaggtggtggctcctgagggtacctcagccccaggtggtggcccgggaaccctggatgacagtgccaccatttgccgtgtctgccagaagccaggcgatctggttatgtgcaaccagtgtgagttttgtttccacctggactgtcacctgccggccctgcaggatgtaccagggtgtgtgtatgtgtgatctctgccctggaccagcccggtggcaccctggatctgaccctgatccgtgcccgcctccaggagaagttgtcacctccctacagctccccacaggagtttgcccaggatgtgggccgcatgttcaagcaattcaacaagttaactgaggacaaggcagacgtgcagtccatcatcggcctgcagcgcttcttcgagacgcgcatgaacgaggccttcggtgacaccaagttctctgctgtgctggtggagcccccgccgatgagcctgcctggtgctggcctgagttcccaggagctgtctggtggccctggtgatggcccctgaggctggagcccccatggccagcccagcctggctctgttctctgtcctgtcaccccatccccactcccctggtggcctgactcccactccctggtggccccatcccccagttcctcacgatatggtttttacttctgtggatttaataaaaacttcaccagttaaaaaaaaaaaaaaaaaaaaaaanaaaaaaaaaggaaaagaaaaaaaaaaaaaaaggagagcaaaagcaagaaaaagaaaacacaagaaaaggcgagaaaaaaaaaaaaaaaaagagcggcggccgagcacgcaaagacctccccgggggggcagtaaatagcgagcg

SEQ ID NO: 104188 - DNA, 1179 bp, Homo sapiens
gccagtgcaaacaggttagcgcatactatacggcaggtcagcgggtggcgaacgcagtacaaccttattgttattgaacgtggcgctgccgctgcagctaccggccagccagggactgcgcctgcaggaacccctggtgccccacccctggctggcatggccattgtcaaggaggaggagacggaggctgccattggagcccctcctactgccactgagggccctgagaccaaacctgtgcttatggctcttgcggagggtcctggtgctgagggtccccgcctggcctcacctagtggcagcaccagctcagggctggaggtggtggctcctgagggtacctcagccccaggtggtggcccgggaaccctggatgacagtgccaccatttgccgtgtctgccagaagccaggcgatctggttatgtgcaaccagtgtgagttttgtttccacctggactgtcacctgccggccctgcaggatgtaccaggggaggagtggagctgctcactctgccatgtgctccctgacctgaaggaggaggatggcagcctcagcctggatggtgcagacagcactggcgtggtggccaagctctcaccagccaaccagcggaaatgtgagcgtgtactgctggccctattctgtcacgaaccctgccgccccctgcatcagctggctaccgactccaccttctccctggaccagcccggtggcaccctggatctgaccctgatccgtgcccgcctccaggagaagttgtcacctccctacagctccccacaggagtttgcccaggatgtgggccgcatgttcaagcaattcaacaagttaactgaggacaaggcagacgtgcagtccatcatcggcctgcagcgcttcttcgagacgcgcatgaacgaggccttcggtgacaccaagttctctgctgtgctggtggagcccccgccgatgagcctgcctggtgctggcctgagttcccaggagctgtctggtggccctggtgatggcccctgaggctggagcccccatggccagcccagcctggctctgttctctgtcctgtcaccccatccccactcccctggtggcctgactcccactccctggtggccccatcccccagttcctcacgatatggtttttacttctgtggatttaataaaaacttcaccagtt

SEQ ID NO: 104189 - DNA, 2984 bp, Homo sapiens
cggcggcgaagagacgcgggttgaggaagagggacggattgcccatgcgcttgggcgcacagcggcccgcttctgtgtggtctggaggtggagctgagaggggaatcacactctataaaggttcgcataccccactggcggattcaattgcggcagtgacgtcacagaggccccgccccgcccccacaagagccccaccgacgtggggttggcggtggtggaaggactaggagttggcgcgtgcgtactggcggcctctcccgcaccgaccggcctgggccccgcccccgggcgtgaggcgcccaatgcgcgtgcgcggcggcgtcggcgccagttatttctgtcccgccccccggcctcggctctttctgcgagcgggcgcgcgggcgagcggttgtgcttgtgcttgtggcgcgtggtgcgggtttcggcggcggctgaggaagaagcgcgggcggcgccttcgggaggcgagcaggcagcagttggccgtgccgtagcagcgtcccgcgcgcggcgggcagcggcccaggaggcgcgtggcggcgctcggcctcgcggcggcggcggcggcagcggcccagcagttggcggcgagcgcgtctgcgcctgcgcggcgggccccgcgcccctcctccccccctgggcgcccccggcggcgtgtgaatggcggcctccgcggcggcagcctcggcagcagcggcctcggccgcctctggcagcccgggcccgggcgagggctccgctggcggcgaaaagcgctccaccgccccttcggccgcagcctcggcctctgcctcagccgcggcgtcgtcgcccgcggggggcggcgccgaggcgctggagctgctggagcactgcggcgtgtgcagagagcgcctgcgacccgagagggagccccgcctgctgccctgtttgcactcggcctgtagtgcctgcttagggcccgcggcccccgccgccgccaacagctcgggggacggcggggcggcgggcgacggcaccgtggtggactgtcccgtgtgcaagcaacagtgcttctccaaagacatcgtggagaattatttcatgcgtgatagtggcagcaaggctgccaccgacgcccaggatgcgaaccagtgctgcactagctgtgaggataatgccccagccaccagctactgtgtggagtgctcggagcctctgtgtgagacctgtgtagaggcgcaccagcgggtgaagtacaccaaggaccatactgtgcgctctactgggccagccaagtctcgggatggtgaacgtactgtctattgcaacgtacacaagcatgaaccccttgtgctgttttgtgagagctgtgatactctcacctgccgagactgccagctcaatgcccacaaggaccaccagtaccagttcttagaggatgcagtgaggaaccagcgcaagctcctggcctcactggtgaagcgccttggggacaaacatgcaacattgcagaagagcaccaaggaggttcgcagctcaatccgccaggtgtctgacgtacagaagcgtgtgcaagtggatgtcaagatggccatcctgcagatcatgaaggagctgaataagcggggccgtgtgctggtcaatgatgcccagcaagatccagaagcaccaggagcacattctgcgctttgcctcttgggctctggagagtgacaacaacacagcccttttgctttctaagaagttgatctacttccagctgcaccgggccctcaagatgattgtggatcccgtggagccacatggcgagatgaagtttcagtgggacctcaatgcctggaccaagagtgccgaggcctttggcaagattgtggcagagcgtcctggcactaactcaacaggccctgcacccatggcccctccaagagccccaggcccctgagcaagcagggctctggcagcagccagcccatggaggtgcaggaaggctatggctttgggtcaggagatgatccctactcaagtgcagagccccatgtgtcaggtgtgaaacggtcccgctcaggtgagggcgaggtgagcggccttatgcgcaaggtgccacgagtgagccttgaacgcctggacctggacctcacagctgacagccagccacccgtcttcaaggtcttcccaggcagtaccactgaggactacaaccttattgttattgaacgtggcgctgccgctgcagctaccggccagccagggactgcgcctgcaggaacccctggtgccccacccctggctggcatggccattgtcaaggaggaggagacggaggctgcatggaggagtggagctgctcactctgccatgtgctccctgacctgaaggaggaggatggcagcctcagcctggatggtgcagacagcactggcgtggtggccaagctctcaccagccaaccagcggaaatgtgagcgtgtactgctggccctattctgtcacgaaccctgccgccccctgcatcagctggctaccgactccaccttctccctggaccagcccggtggcaccctggatctgaccctgatccgtgcccgcctccaggagaagttgtcacctccctacagctccccacaggagtttgcccaggatgtgggccgcatgttcaagcaattcaacaagttaactgaggacaaggcagacgtgcagtccatcatcggcctgcagcgcttcttcgagacgcgcatgaacgaggccttcggtgacaccaagttctctgctgtgctggtggagcccccgccgatgagcctgcctggtgctggcctgagttcccaggagctgtctggtggccctggtgatggcccctgaggctggagcccccatggccagcccagcctggctctgttctctgtcctgtcaccccatccccactcccctggtggcctgactcccactccctggtggccccatcccccagttcctcacgatatggtttttacttctgtggatttaataaaaacttcaccagtt

SEQ ID NO: 104190 - DNA, 2558 bp, Homo sapiens
  misc_feature (2148)..(2148): n is a, c, g, or t
cggcggcgaagagacgcgggttgaggaagagggacggattgcccatgcgcttgggcgcacagcggcccgcttctgtgtggtctggaggtggagctgagaggggaatcacactctataaaggttcgcataccccactggcggattcaattgcggcagtgacgtcacagaggccccgccccgcccccacaagagccccaccgacgtggggttggcggtggtggaaggactaggagttggcgcgtgcgtactggcggcctctcccgcaccgaccggcctgggccccgcccccgggcgtgaggcgcccaatgcgcgtgcgcggcggcgtcggcgccagttatttctgtcccgccccccggcctcggctctttctgcgagcgggcgcgcgggcgagcggttgtgcttgtgcttgtggcgcgtggtgcgggtttcggcggcggctgaggaagaagcgcgggcggcgccttcgggaggcgagcaggcagcagttggccgtgccgtagcagcgtcccgcgcgcggcgggcagcggcccaggaggcgcgtggcggcgctcggcctcgcggcggcggcggcggcagcggcccagcagttggcggcgagcgcgtctgcgcctgcgcggcgggccccgcgcccctcctccccccctgggcgcccccggcggcgtgtgaatggcggcctccgcggcggcagcctcggcagcagcggcctcggccgcctctggcagcccgggcccgggcgagggctccgctggcggcgaaaagcgctccaccgccccttcggccgcagcctcggcctctgcctcagccgcggcgtcgtcgcccgcggggggcggcgccgaggcgctggagctgctggagcactgcggcgtgtgcagagagcgcctgcgacccgagagggagccccgcctgctgccctgtttgcactcggcctgtagtgcctgcttagggcccgcggcccccgccgccgccaacagctcgggggacggcggggcggcgggcgacggcaccgtggtggactgtcccgtgtgcaagcaacagtgcttctccaaagacatcgtggagaattatttcatgcgtgatagtggcagcaaggctgccaccgacgcccaggatgcgaaccagtgctgcactagctgtgaggataatgccccagccaccagctactgtgtggagtgctcggagcctctgtgtgagacctgtgtagaggcgcaccagcgggtgaagtacaccaaggaccatactgtgcgctctactgggccagccaagtctcgggatggtgaacgtactgtctattgcaacgtacacaagcatgaaccccttgtgctgttttgtgagagctgtgatactctcacctgccgagactgccagctcaatgcccacaaggaccaccagtaccagttcttagaggatgcagtgaggaaccagcgcaagctcctggcctcactggtgaagcgccttggggacaaacatgcaacattgcagaagagcaccaaggaggttcgcagctcaatccgccaggtgtctgacgtacagaagcgtgtgcaagtggatgtcaagatggccatcctgcagatcatgaaggagctgaataagcggggccgtgtgctggtcaatgatgcccagaaggtgactgaggggcagcaggagcgcctggagcggcagcactggaccatgaccaagatccagaagcaccaggagcacattctgcgctttgcctcttgggctctggagagtgacaacaacacagcccttttgctttctaagaagttgatctacttccagctgcaccgggccctcaagatgattgtggatcccgtggagccacatggcgagatgaagtttcagtgggacctcaatgcctggaccaagagtgccgaggcctttggcaagattgtggcagagcgtcctggcactaactcaacaggccctgcacccatggcccctccaagagccccaggcccctgagcaagcagggctctggcagcagccagcccatggaggtgcaggaaggctatggctttgggtcaggagatgatccctactcaagtgcagagccccatgtgtcaggtgtgaaacggtcccgctcaggtgagggcgaggtgagcggccttatgcgcaaggtgccacgagtgagccttgaacgcctggacncaacagatggaagcaagcaaccggttaacaggcgtcccagggaggacactgggggcatcaagaccgttatagggagtagacagtgggggctacgcgagagagagaacgggcaagcagggttgggcagggaagaaccccgggtggtgcacacacgggtgtggacggtgcacaggtaacgaggaggaatacaaaggactacaatagggcaaccacaaatagaaagaagggcgcgcaaaaaaaaatgacgctgagccctgaaagcaacgacacaaagacgagcacagcgagcaactcatcgacgcaacacagagcgagagggtgacgcacagacaacacaataaggaggcagacaacgaaacaacgaatagacagcagacagaacgacgacgccgacagaggagaagacaaga

SEQ ID NO: 104191 - DNA, 2261 bp, Homo sapiens
cggcggcgaagagacgcgggttgaggaagagggacggattgcccatgcgcttgggcgcacagcggcccgcttctgtgtggtctggaggtggagctgagaggggaatcacactctataaaggttcgcataccccactggcggattcaattgcggcagtgacgtcacagaggccccgccccgcccccacaagagccccaccgacgtggggttggcggtggtggaaggactaggagttggcgcgtgcgtactggcggcctctcccgcaccgaccggcctgggccccgcccccgggcgtgaggcgcccaatgcgcgtgcgcggcggcgtcggcgccagttatttctgtcccgccccccggcctcggctctttctgcgagcgggcgcgcgggcgagcggttgtgcttgtgcttgtggcgcgtggtgcgggtttcggcggcggctgaggaagaagcgcgggcggcgccttcgggaggcgagcaggcagcagttggccgtgccgtagcagcgtcccgcgcgcggcgggcagcggcccaggaggcgcgtggcggcgctcggcctcgcggcggcggcggcggcagcggcccagcagttggcggcgagcgcgtctgcgcctgcgcggcgggccccgcgcccctcctccccccctgggcgcccccggcggcgtgtgaatggcggcctccgcggcggcagcctcggcagcagcggcctcggccgcctctggcagcccgggcccgggcgagggctccgctggcggcgaaaagcgctccaccgccccttcggccgcagcctcggcctctgcctcagccgcggcgtcgtcgcccgcggggggcggcgccgaggcgctggagctgctggagcactgcggcgtgtgcagagagcgcctgcgacccgagagggagccccgcctgctgccctgtttgcactcggcctgtagtgcctgcttagggcccgcggcccccgccgccgccaacagctcgggggacggcggggcggcgggcgacggcaccgtggtggactgtcccgtgtgcaagcaacagtgcttctccaaagacatcgtggagaattatttcatgcgtgatagtggcagcaaggctgccaccgacgcccaggatgcgaaccagtgctgcactagctgtgaggataatgccccagccaccagctactgtgtggagtgctcggagcctctgtgtgagacctgtgtagaggcgcaccagcgggtgaagtacaccaaggaccatactgtgcgctctactgggccagccaagtctcgggatggtgaacgtactgtctattgcaacgtacacaagcatgaaccccttgtgctgttttgtgagagctgtgatactctcacctgccgagactgccagctcaatgcccacaaggaccaccagtaccagttcttagaggatgcagtgaggaaccagcgcaagctcctggcctcactggtgaagcgccttggggacaaacatgcaacattgcagaagagcaccaaggaggttcgcagctcaatccgccaggtgtctgacgtacagaagcgtgtgcaagtggatgtcaagatggccatcctgcagatcatgaaggagctgaataagcggggccgtgtgctggtcaatgatgcccagaaggtgactgaggggcagcaggagcgcctggagcggcagcactggaccatgaccaagatccagaagcaccaggagcacattctgcgctttgcctcttgggctctggagagtgacaacaacacagcccttttgctttctaagaagttgatctacttccagctgcaccgggccctcaagatgattgtggatcccgtggagccacatggcgagatgaagtttcagtgggacctcaatgcctggaccaagagtgccgaggcctttggcaagattgtggcagagcgtcctggcactaactcaacaggccctgcacccatggcccctccaagagccccaggcccctgagcaagcagggctctggcagcagccagcccatggaggtgcaggaaggctatggctttgggtcaggagatgatccctactcaagtgcagagccccatgtgtcaggtgtgaaacggtccgtcaggtgagggcgaggtggggggctttgcgcaggtgccgagtgagcctgaacgctggactggactcaagtgaggcagcccgtcttcggtcttccgggcgtcctgggctcactttggtttgagtggggcgcggggacggcacaggtggccggggaccggggcccccggggtggttgtgggggg

SEQ ID NO: 104192 - DNA, 1875 bp, Homo sapiens
cggcggcgaagagacgcgggttgaggaagagggacggattgcccatgcgcttgggcgcacagcggcccgcttctgtgtggtctggaggtggagctgagaggggaatcacactctataaaggttcgcataccccactggcggattcaattgcggcagtgacgtcacagaggccccgccccgcccccacaagagccccaccgacgtggggttggcggtggtggaaggactaggagttggcgcgtgcgtactggcggcctctcccgcaccgaccggcctgggccccgcccccgggcgtgaggcgcccaatgcgcgtgcgcggcggcgtcggcgccagttatttctgtcccgccccccggcctcggctctttctgcgagcgggcgcgcgggcgagcggttgtgcttgtgcttgtggcgcgtggtgcgggtttcggcggcggctgaggaagaagcgcgggcggcgccttcgggaggcgagcaggcagcagttggccgtgccgtagcagcgtcccgcgcgcggcgggcagcggcccaggaggcgcgtggcggcgctcggcctcgcggcggcggcggcggcagcggcccagcagttggcggcgagcgcgtctgcgcctgcgcggcgggccccgcgcccctcctccccccctgggcgcccccggcggcgtgtgaatggcggcctccgcggcggcagcctcggcagcagcggcctcggccgcctctggcagcccgggcccgggcgagggctccgctggcggcgaaaagcgctccaccgccccttcggccgcagcctcggcctctgcctcagccgcggcgtcgtcgcccgcggggggcggcgccgaggcgctggagctgctggagcactgcggcgtgtgcagagagcgcctgcgacccgagagggagccccgcctgctgccctgtttgcactcggcctgtagtgcctgcttagggcccgcggcccccgccgccgccaacagctcgggggacggcggggcggcgggcgacggcaccgtggtggactgtcccgtgtgcaagcaacagtgcttctccaaagacatcgtggagaattatttcatgcgtgatagtggcagcaaggctgccaccgacgcccaggatgcgaaccagtgctgcactagctgtgaggataatgccccagccaccagctactgtgtggagtgctcggagcctctgtgtgagacctgtgtagaggcgcaccagcgggtgaagtacaccaaggaccatactgtgcgctctactgggccagccaagtctcgggatggtgaacgtactgtctattgcaacgtacacaagcatgaaccccttgtgctgttttgtgagagctgtgatactctcacctgccgagactgccagctcaatgcccacaaggaccaccagtaccagttcttagaggatgcagtgaggaaccagcgcaagctcctggcctcactggtgaagcgccttggggacaaacatgcaacattgcagaagagcaccaaggaggttcgcagctcaatccgccaggtgtctgacgtacagaagcgtgtgcaagtggatgtcaagatggccatcctgcagatcatgaaggagctgaataagcggggccgtgtgctggtcaatgatgcccagaaggtgactgaggggcagcaggagcgcctggagcggcagcactggaccatgaccaagatccagaagcaccaggagcacattctgcgctttgcctcttgggctctggagagtgacaacaacacagcccttttgctttctaagaagttgatctacttccagctgcaccgggccctcaagatgattgtggatcccgtggagccacatggggctctgcacttgagtagggatcatctcctgacccaaagccatagcctt

SEQ ID NO: 104193 - DNA, 1235 bp, Homo sapiens
gggacctggacctcacagctgacagccagccacccgtcttcacctgagcaagcagggctctggcagcagccagcccatggaggtgcaggaaggctatggcttgggtcaggagatgatccctactcaagtgcagagccccatgtgtcaggtgtgaaacggtcccgctcaggtgagggcgaggtgagcggccttatgcgcaaggtgccacgagtgagccttgaacgcctggacctggacctcacagctgacagccagccacccgtcttcaaggtcttcccaggcagtaccactgaggactacaaccttattgttattgaacgtggcgctgccgctgcagctaccggccagccagggactgcgcctgcaggaacccctggtgccccacccctggctggcatggccattgtcaaggaggaggagacggaggctgccattggagcccctcctactgccactgagggccctgagaccaaacctgtgcttatggctcttgcggagggtcctggtgctgagggtccccgcctggcctcacctagtggcagcaccagctcagggctggaggtggtggctcctgagggtacctcagccccaggtggtggcccgggaaccctggatgacagtgccaccatttgccgtgtctgccagaagccaggcgatctggttatgtgcaaccagtgtgagttttgtttccacctggactgtcacctgccggccctgcaggatgtaccagggtgtgtgtatgtgtgatctctgccctggaccagcccggtggcaccctggatctgaccctgatccgtgcccgcctccaggagaagttgtcacctccctacagctccccacaggagtttgcccaggatgtgggccgcatgttcaagcaattcaacaagttaactgaggacaaggcagacgtgcagtccatcatcggcctgcagcgcttcttcgagacgcgcatgaacgaggccttcggtgacaccaagttctctgctgtgctggtggagcccccgccgatgagcctgcctggtgctggcctgagttcccaggagctgtctggtggccctggtgatggcccctgaggctggagcccccatggccagcccagcctggctctgttctctgtcctgtcaccccatccccactcccctggtggcctgactcccactccctggtggccccatcccccagttcctcacgatatggtttttacttctgtggatttaataaaaacttcaccagtt

SEQ ID NO: 104194 - DNA, 403 bp, Homo sapiens
atctctagaagctagaagaaagggatgtgtttctcagctatgttggggcagaggattctgggagcaaggagttgggcttgcaggcctgtgttcttccctggccacaccctctacatcttcccaataaatggcccagtgtcacagaacaggccggaaatgaggccccaactcattctgcttcctgagttgggggtggtgaagggcaaggtccagccttatgattcccactccccagggccagccaagtctcgggatggtgaacgtactgtctattgcaacgtacacaagcatgaaccccttgtgctgttttgtgagagctgtgatactctcacctgccgagactgccagctcaatgcccacaaggaccaccagtgagtcccaaggcatagtggttgggtgggtg

SEQ ID NO: 104195 - DNA, 185 bp, Homo sapiens
tgggtcaagggaccaatcttaaatctccggttgtattttctgggatgtaaacgtggatctatcaagttgtcttgccttctctgaccctgcctttgtctggcagtgctgcactagctgtgaggataatgccccagccaccagctactgtgtggagtgctcggagcctctgtgtgagacctgtgtag

SEQ ID NO: 104196 - DNA, 636 bp, Homo sapiens
gtcttcccaggcagtaccactgaggactacaaccttattgttattgaacgtggcgctgccgctgcagctaccggccagccagggactgcgcctgcaggaacccctggtgccccacccctggctggcatggccattgtcaaggtaagcctgtcccaaggaactatagctgtaggatgaagcctgtagtccaggtctggaccctgttgaacacccctcatcaccaccttgcaggaggaggagacggaggctgccattggagcccctcctactgccactgagggccctgagaccaaacctgtgcttatggctcttgcggagggtcctggtgctgagggtccccgcctggcctcacctagtggcagcaccagctcagggctggaggtggtggctcctgagggtacctcagccccaggtggtggcccgggaaccctggatgacagtgccaccatttgccgtgtctgccagaagccaggcgatctggttatgtgcaaccagtgtgagttttgtttccacctggactgtcacctgccggccctgcaggatgtaccagggtgagtgtgaggctggtgggggtcaagtctgggtgttgggctgtctggacaggatcatgtgcagacccttattttcttcacccta

SEQ ID NO: 104197 - DNA, 655 bp, Homo sapiens
gacagccagccacccgtcttcaaggtcttcccaggcagtaccactgaggactacaaccttattgttattgaacgtggcgctgccgctgcagctaccggccagccagggactgcgcctgcaggaacccctggtgccccacccctggctggcatggccattgtcaaggtaagcctgtcccaaggaactatagctgtaggatgaagcctgtagtccaggtctggaccctgttgaacacccctcatcaccaccttgcaggaggaggagacggaggctgccattggagcccctcctactgccactgagggccctgagaccaaacctgtgcttatggctcttgcggagggtcctggtgctgagggtccccgcctggcctcacctagtggcagcaccagctcagggctggaggtggtggctcctgagggtacctcagccccaggtggtggcccgggaaccctggatgacagtgccaccatttgccgtgtctgccagaagccaggcgatctggttatgtgcaaccagtgtgagttttgtttccacctggactgtcacctgccggccctgcaggatgtaccagggtgagtgtgaggctggtgggggtcaagtctgggtgttgggctgtctggacaggatcatgtgcagacccttattttcttca

SEQ ID NO: 104198 - DNA, 3335 bp, Homo sapiens
cggcggcgaagagacgcgggttgaggaagagggacggattgcccatgcgcttgggcgcacagcggcccgcttctgtgtggtctggaggtggagctgagaggggaatcacactctataaaggttcgcataccccactggcggattcaattgcggcagtgacgtcacagaggccccgccccgcccccacaagagccccaccgacgtggggttggcggtggtggaaggactaggagttggcgcgtgcgtactggcggcctctcccgcaccgaccggcctgggccccgcccccgggcgtgaggcgcccaatgcgcgtgcgcggcggcgtcggcgccagttatttctgtcccgccccccggcctcggctctttctgcgagcgggcgcgcgggcgagcggttgtgcttgtgcttgtggcgcgtggtgcgggtttcggcggcggctgaggaagaagcgcgggcggcgccttcgggaggcgagcaggcagcagttggccgtgccgtagcagcgtcccgcgcgcggcgggcagcggcccaggaggcgcgtggcggcgctcggcctcgcggcggcggcggcggcagcggcccagcagttggcggcgagcgcgtctgcgcctgcgcggcgggccccgcgcccctcctccccccctgggcgcccccggcggcgtgtgaatggcggcctccgcggcggcagcctcggcagcagcggcctcggccgcctctggcagcccgggcccgggcgagggctccgctggcggcgaaaagcgctccaccgccccttcggccgcagcctcggcctctgcctcagccgcggcgtcgtcgcccgcggggggcggcgccgaggcgctggagctgctggagcactgcggcgtgtgcagagagcgcctgcgacccgagagggagccccgcctgctgccctgtttgcactcggcctgtagtgcctgcttagggcccgcggcccccgccgccgccaacagctcgggggacggcggggcggcgggcgacggcaccgtggtggactgtcccgtgtgcaagcaacagtgcttctccaaagacatcgtggagaattatttcatgcgtgatagtggcagcaaggctgccaccgacgcccaggatgcgaaccagtgctgcactagctgtgaggataatgccccagccaccagctactgtgtggagtgctcggagcctctgtgtgagacctgtgtagaggcgcaccagcgggtgaagtacaccaaggaccatactgtgcgctctactgggccagccaagtctcgggatggtgaacgtactgtctattgcaacgtacacaagcatgaaccccttgtgctgttttgtgagagctgtgatactctcacctgccgagactgccagctcaatgcccacaaggaccaccagtaccagttcttagaggatgcagtgaggaaccagcgcaagctcctggcctcactggtgaagcgccttggggacaaacatgcaacattgcagaagagcaccaaggaggttcgcagctcaatccgccaggtgtctgacgtacagaagcgtgtgcaagtggatgtcaagatggccatcctgcagatcatgaaggagctgaataagcggggccgtgtgctggtcaatgatgcccagaaggtgactgaggggcagcaggagcgcctggagcggcagcactggaccatgaccaagatccagaagcaccaggagcacattctgcgctttgcctcttgggctctggagagtgacaacaacacagcccttttgctttctaagaagttgatctacttccagctgcaccgggccctcaagatgattgtggatcccgtggagccacatggcgagatgaagtttcagtgggacctcaatgcctggaccaagagtgccgaggcctttggcaagattgtggcagagcgtcctggcactaactcaacaggccctgcacccatggcccctccaagagccccaggcccctgagcaagcagggctctggcagcagccagcccatggaggtgcaggaaggctatggctttgggtcaggagatgatccctactcaagtgcagagccccatgtgtcaggtgtgaaacggtcccgctcaggtgagggcgaggtgagcggccttatgcgcaaggtgccacgagtgagccttgaacgcctggacctggacctcacagctgacagccagccacccgtcttcaaggtcttcccaggcagtaccactgaggactacaaccttattgttattgaacgtggcgctgccgctgcagctaccggccagccagggactgcgcctgcaggaacccctggtgccccacccctggctggcatggccattgtcaaggaggaggagacggaggctgccattggagcccctcctactgccactgagggccctgagaccaaacctgtgcttatggctcttgcggagggtcctggtgctgagggtccccgcctggcctcacctagtggcagcaccagctcagggctggaggtggtggctcctgagggtacctcagccccaggtggtggcccgggaaccctggatgacagtgccaccatttgccgtgtctgccagaagccaggcgatctggttatgtgcaaccagtgtgagttttgtttccacctggactgtcacctgccggccctgcaggatgtaccaggggaggagtggagctgctcactctgccatgtgctccctgacctgaaggaggaggatggcagcctcagcctggatggtgcagacagcactggcgtggtggccaagctctcaccagccaaccagcggaaatgtgagcgtgtactgctggccctattctgtcacgaaccctgccgccccctgcatcagctggctaccgactccaccttctccctggaccagcccggtggcaccctggatctgaccctgatccgtgcccgcctccaggagaagttgtcacctccctacagctccccacaggagtttgcccaggatgtgggccgcatgttcaagcaattcaacaagttaactgaggacaaggcagacgtgcagtccatcatcggcctgcagcgcttcttcgagacgcgcatgaacgaggccttcggtgacaccaagttctctgctgtgctggtggagcccccgccgatgagcctgcctggtgctggcctgagttcccaggagctgtctggtggccctggtgatggcccctgaggctggagcccccatggccagcccagcctggctctgttctctgtcctgtcaccccatccccactcccctggtggcctgactcccactccctggtggccccatcccccagttcctcacgatatggtttttacttctgtggatttaataaaaacttcaccagtt

SEQ ID NO: 104199 - DNA, 763 bp, Homo sapiens
ctcagcctggatggtgcagacagcacatggcagaggctgccatcctcctccttcaggtcagggagcagaggatggcagcctcagcctggatggtgcagacagcactggcgtggtggccaagctctcaccagccaaccagcggaaatgtgagcgtgtactgctggccctattctgtcacgaaccctgccgccccctgcatcagctggctaccgactccaccttctccctggaccagcccggtggcaccctggatctgaccctgatccgtgcccgcctccaggagaagttgtcacctccctacagctccccacaggagtttgcccaggatgtgggccgcatgttcaagcaattcaacaagttaactgaggacaaggcagacgtgcagtccatcatcggcctgcagcgcttcttcgagacgcgcatgaacgaggccttcggtgacaccaagttctctgctgtgctggtggagcccccgccgatgagcctgcctggtgctggcctgagttcccaggagctgtctggtggccctggtgatggcccctgaggctggagcccccatggccagcccagcctggctctgttctctgtcctgtcaccccatccccactcccctggtggcctgactcccactccctggtggccccatcccccagttcctcacgatatggtttttacttctgtggatttaataaaaacttcaccagttcctcaggcgttggctggttgggggactgtggtcctggggcctggtttattgactgta

SEQ ID NO: 104200 - DNA, 572 bp, Homo sapiens
cgacccacgcgtccggacccacgcgtccgggagtttgcccaggatgtgggccgcatgttcaagcaattcaacaagttaactgaggtgagccagtggaatggagaggctgtgggcagggggagatgtgaaggaaagaactaggacccattcatccactgcattcctgcttggcccaggacaaggcagacgtgcagtccatcatcggcctgcagcgcttcttcgagacgcgcatgaacgaggccttcggtgacaccaagttctctgctgtgctggtggagcccccgccgatgagcctgcctggtgctggcctgagttcccaggagctgtctggtggccctggtgatggcccctgaggctggagcccccatggccagcccagcctggctctgttctctgtcctgtcaccccatccccactcccctggtggcctgactcccactccctggtggccccatcccccagttcctcacgatatggtttttacttctgtggatttaataaaaacttcaccagttcctcaggcgttggctggttgggggactgtggtcctggggcctggtttattgactgta

SEQ ID NO: 104201 - DNA, 2595 bp, Homo sapiens
tgcagagatgaggatgccacctgggcgagaggatgggggcccggacagggcacgggaaatactttctgggtcctgcatacgaacgtgggtttgtgctggccgctgagatgggacatctgactaaagttggagaaaagaaggctcggggaggggaggggctggttcgctgcgggataatggtcgggggcccacccagcaggggaatggtgggggccataacctgggtgggaacttgtaacagtctcccacatccctgcttctcgaagtggtggactgtcccgtgtgcaagcaacagtgcttctccaaagacatcgtggagaattatttcatgcgtgatagtggcagcaaggctgccaccgacgcccaggatgcgaaccagtgctgcactagctgtgaggataatgccccagccaccagctactgtgtggagtgctcggagcctctgtgtgagacctgtgtagaggcgcaccagcgggtgaagtacaccaaggaccatactgtgcgctctactgggccagccaagtctcgggatggtgaacgtactgtctattgcaacgtacacaagcatgaaccccttgtgctgttttgtgagagctgtgatactctcacctgccgagactgccagctcaatgcccacaaggaccaccagtaccagttcttagaggatgcagtgaggaaccagcgcaagctcctggcctcactggtgaagcgccttggggacaaacatgcaacattgcagaagagcaccaaggaggttcgcagctcaatccgccaggtgtctgacgtacagaagcgtgtgcaagtggatgtcaagatggccatcctgcagatcatgaaggagctgaataagcggggccgtgtgctggtcaatgatgcccagaaggtgactgaggggcagcaggagcgcctggagcggcagcactggaccatgaccaagatccagaagcaccaggagcacattctgcgctttgcctcttgggctctggagagtgacaacaacacagcccttttgctttctaagaagttgatctacttccagctgcaccgggccctcaagatgattgtggatcccgtggagccacatggcgagatgaagtttcagtgggacctcaatgcctggaccaagagtgccgaggcctttggcaagattgtggcagagcgtcctggcactaactcaacaggccctgcacccatggcccctccaagagccccaggcccctgagcaagcagggctctggcagcagccagcccatggaggtgcaggaaggctatggctttgggtcaggagatgatccctactcaagtgcagagccccatgtgtcaggtgtgaaacggtcccgctcaggtgagggcgaggtgagcggccttatgcgcaaggtgccacgagtgagccttgaacgcctggacctggacctcacagctgacagccagccacccgtcttcaaggtcttcccaggcagtaccactgaggactacaaccttattgttattgaacgtggcgctgccgctgcagctaccggccagccagggactgcgcctgcaggaacccctggtgccccacccctggctggcatggccattgtcaaggaggaggagacggaggctgccattggagcccctcctactgccactgagggccctgagaccaaacctgtgcttatggctcttgcggagggtcctggtgctgagggtccccgcctggcctcacctagtggcagcaccagctcagggctggaggtggtggctcctgagggtacctcagccccaggtggtggcccgggaaccctggatgacagtgccaccatttgccgtgtctgccagaagccaggcgatctggttatgtgcaaccagtgtgagttttgtttccacctggactgtcacctgccggccctgcaggatgtaccaggggaggagtggagctgctcactctgccatgtgctccctgacctgaaggaggaggatggcagcctcagcctggatggtgcagacagcactggcgtggtggccaagctctcaccagccaaccagcggaaatgtgagcgtgtactgctggccctattctgtcacgaaccctgccgccccctgcatcagctggctaccgactccaccttctccctggaccagcccggtggcaccctggatctgaccctgatccgtgcccgcctccaggagaagttgtcacctccctacagctccccacaggagtttgcccaggatgtgggccgcatgttcaagcaattcaacaagttaactgaggacaaggcagacgtgcagtccatcatcggcctgcagcgcttcttcgagacgcgcatgaacgaggccttcggtgacaccaagttctctgctgtgctggtggagcccccgccgatgagcctgcctggtgctggcctgagttcccaggagctgtctggtggccctggtgatggcccctgaggctggagcccccatggccagcccagcctggctctgttctctgtcctgtcaccccatccccactcccctggtggcctgactcccactccctggtggccccatcccccagttcctcacgatatggtttttacttctgtggatttaataaaaacttcaccagtt

SEQ ID NO: 104202 - DNA, 2324 bp, Homo sapiens
gttgttatctctagaagctagaagaaagggatgtgtttctcagctatgttggggcagaggattctgggagcaaggagttgggcttgcaggcctgtgttcttccctggccacaccctctacatcttcccaataaatggcccagtgtcacagaacaggccggaaatgaggccccaactcattctgcttcctgagttgggggtggtgaagggcaaggtccagccttatgattcccactccccagggccagccaagtctcgggatggtgaacgtactgtctattgcaacgtacacaagcatgaaccccttgtgctgttttgtgagagctgtgatactctcacctgccgagactgccagctcaatgcccacaaggaccaccagtaccagttcttagaggatgcagtgaggaaccagcgcaagctcctggcctcactggtgaagcgccttggggacaaacatgcaacattgcagaagagcaccaaggaggttcgcagctcaatccgccaggtgtctgacgtacagaagcgtgtgcaagtggatgtcaagatggccatcctgcagatcatgaaggagctgaataagcggggccgtgtgctggtcaatgatgcccagaaggtgactgaggggcagcaggagcgcctggagcggcagcactggaccatgaccaagatccagaagcaccaggagcacattctgcgctttgcctcttgggctctggagagtgacaacaacacagcccttttgctttctaagaagttgatctacttccagctgcaccgggccctcaagatgattgtggatcccgtggagccacatggcgagatgaagtttcagtgggacctcaatgcctggaccaagagtgccgaggcctttggcaagattgtggcagagcgtcctggcactaactcaacaggccctgcacccatggcccctccaagagccccaggcccctgagcaagcagggctctggcagcagccagcccatggaggtgcaggaaggctatggctttgggtcaggagatgatccctactcaagtgcagagccccatgtgtcaggtgtgaaacggtcccgctcaggtgagggcgaggtgagcggccttatgcgcaaggtgccacgagtgagccttgaacgcctggacctggacctcacagctgacagccagccacccgtcttcaaggtcttcccaggcagtaccactgaggactacaaccttattgttattgaacgtggcgctgccgctgcagctaccggccagccagggactgcgcctgcaggaacccctggtgccccacccctggctggcatggccattgtcaaggaggaggagacggaggctgccattggagcccctcctactgccactgagggccctgagaccaaacctgtgcttatggctcttgcggagggtcctggtgctgagggtccccgcctggcctcacctagtggcagcaccagctcagggctggaggtggtggctcctgagggtacctcagccccaggtggtggcccgggaaccctggatgacagtgccaccatttgccgtgtctgccagaagccaggcgatctggttatgtgcaaccagtgtgagttttgtttccacctggactgtcacctgccggccctgcaggatgtaccaggggaggagtggagctgctcactctgccatgtgctccctgacctgaaggaggaggatggcagcctcagcctggatggtgcagacagcactggcgtggtggccaagctctcaccagccaaccagcggaaatgtgagcgtgtactgctggccctattctgtcacgaaccctgccgccccctgcatcagctggctaccgactccaccttctccctggaccagcccggtggcaccctggatctgaccctgatccgtgcccgcctccaggagaagttgtcacctccctacagctccccacaggagtttgcccaggatgtgggccgcatgttcaagcaattcaacaagttaactgaggacaaggcagacgtgcagtccatcatcggcctgcagcgcttcttcgagacgcgcatgaacgaggccttcggtgacaccaagttctctgctgtgctggtggagcccccgccgatgagcctgcctggtgctggcctgagttcccaggagctgtctggtggccctggtgatggcccctgaggctggagcccccatggccagcccagcctggctctgttctctgtcctgtcaccccatccccactcccctggtggcctgactcccactccctggtggccccatcccccagttcctcacgatatggtttttacttctgtggatttaataaaaacttcaccagtt

SEQ ID NO: 104203 - DNA, 3371 bp, Homo sapiens
cggcggcgaagagacgcgggttgaggaagagggacggattgcccatgcgcttgggcgcacagcggcccgcttctgtgtggtctggaggtggagctgagaggggaatcacactctataaaggttcgcataccccactggcggattcaattgcggcagtgacgtcacagaggccccgccccgcccccacaagagccccaccgacgtggggttggcggtggtggaaggactaggagttggcgcgtgcgtactggcggcctctcccgcaccgaccggcctgggccccgcccccgggcgtgaggcgcccaatgcgcgtgcgcggcggcgtcggcgccagttatttctgtcccgccccccggcctcggctctttctgcgagcgggcgcgcgggcgagcggttgtgcttgtgcttgtggcgcgtggtgcgggtttcggcggcggctgaggaagaagcgcgggcggcgccttcgggaggcgagcaggcagcagttggccgtgccgtagcagcgtcccgcgcgcggcgggcagcggcccaggaggcgcgtggcggcgctcggcctcgcggcggcggcggcggcagcggcccagcagttggcggcgagcgcgtctgcgcctgcgcggcgggccccgcgcccctcctccccccctgggcgcccccggcggcgtgtgaatggcggcctccgcggcggcagcctcggcagcagcggcctcggccgcctctggcagcccgggcccgggcgagggctccgctggcggcgaaaagcgctccaccgccccttcggccgcagcctcggcctctgcctcagccgcggcgtcgtcgcccgcggggggcggcgccgaggcgctggagctgctggagcactgcggcgtgtgcagagagcgcctgcgacccgagagggagccccgcctgctgccctgtttgcactcggcctgtagtgcctgcttagggcccgcggcccccgccgccgccaacagctcgggggacggcggggcggcgggcgacggcaccgtggtggactgtcccgtgtgcaagcaacagtgcttctccaaagacatcgtggagaattatttcatgcgtgatagtggcagcaaggctgccaccgacgcccaggatgcgaaccagtgctgcactagctgtgaggataatgccccagccaccagctactgtgtggagtgctcggagcctctgtgtgagacctgtgtagaggcgcaccagcgggtgaagtacaccaaggaccatactgtgcgctctactgggccagccaagtctcgggatggtgaacgtactgtctattgcaacgtacacaagcatgaaccccttgtgctgttttgtgagagctgtgatactctcacctgccgagactgccagctcaatgcccacaaggaccaccagtaccagttcttagaggatgcagtgaggaaccagcgcaagctcctggcctcactggtgaagcgccttggggacaaacatgcaacattgcagaagagcaccaaggaggttcgcagctcaatccgccaggtgtctgacgtacagaagcgtgtgcaagtggatgtcaagatggccatcctgcagatcatgaaggagctgaataagcggggccgtgtgctggtcaatgatgcccagaaggtgactgaggggcagcaggagcgcctggagcggcagcactggaccatgaccaagatccagaagcaccaggagcacattctgcgctttgcctcttgggctctggagagtgacaacaacacagcccttttgctttctaagaagttgatctacttccagctgcaccgggccctcaagatgattgtggatcccgtggagccacatggcgagatgaagtttcagtgggacctcaatgcctggaccaagagtgccgaggcctttggcaagattgtggcagagcgtcctggcactaactcaacaggccctgcacccatggcccctccaagagccccaggcccctgagcaagcagggctctggcagcagccagcccatggaggtgcaggaaggctatggctttgggtcaggagatgatccctactcaagtgcagagccccatgtgtcaggtgtgaaacggtcccgctcaggtgagggcgaggtgagcggccttatgcgcaaggtgccacgagtgagccttgaacgcctggacctggacctcacagctgacagccagccacccgtcttcaaggtcttcccaggcagtaccactgaggactacaaccttattgttattgaacgtggcgctgccgctgcagctaccggccagccagggactgcgcctgcaggaacccctggtgccccacccctggctggcatggccattgtcaaggaggaggagacggaggctgccattggagcccctcctactgccactgagggccctgagaccaaacctgtgcttatggctcttgcggagggtcctggtgctgagggtccccgcctggcctcacctagtggcagcaccagctcagggctggaggtggtggctcctgagggtacctcagccccaggtggtggcccgggaaccctggatgacagtgccaccatttgccgtgtctgccagaagccaggcgatctggttatgtgcaaccagtgtgagttttgtttccacctggactgtcacctgccggccctgcaggatgtaccaggggaggagtggagctgctcactctgccatgtgctccctgacctgaaggaggaggatggcagcctcagcctggatggtgcagacagcactggcgtggtggccaagctctcaccagccaaccagcggaaatgtgagcgtgtactgctggccctattctgtcacgaaccctgccgccccctgcatcagctggctaccgactccaccttctccctggaccagcccggtggcaccctggatctgaccctgatccgtgcccgcctccaggagaagttgtcacctccctacagctccccacaggagtttgcccaggatgtgggccgcatgttcaagcaattcaacaagttaactgaggacaaggcagacgtgcagtccatcatcggcctgcagcgcttcttcgagacgcgcatgaacgaggccttcggtgacaccaagttctctgctgtgctggtggagcccccgccgatgagcctgcctggtgctggcctgagttcccaggagctgtctggtggccctggtgatggcccctgaggctggagcccccatggccagcccagcctggctctgttctctgtcctgtcaccccatccccactcccctggtggcctgactcccactccctggtggccccatcccccagttcctcacgatatggtttttacttctgtggatttaataaaaacttcaccagttgtccacggccccgcccctagtagtagtagcgcccgc

SEQ ID NO: 104204 - DNA, 1860 bp, Homo sapiens
ctacctagcctgacctgctgtgtcccctagaatccgccaggtgtctgacgtacagaagcgtgtgcaagtggatgtcaagatggccatcctgcagatcatgaaggagctgaataagcggggccgtgtgctggtcaatgatgcccagaaggtgactgaggggcagcaggagcgcctggagcggcagcactggaccatgaccaagatccagaagcaccaggagcacattctgcgctttgcctcttgggctctggagagtgacaacaacacagcccttttgctttctaagaagttgatctacttccagctgcaccgggccctcaagatgattgtggatcccgtggagccacatggcgagatgaagtttcagtgggacctcaatgcctggaccaagagtgccgaggcctttggcaagattgtggcagagcgtcctggcactaactcaacaggccctgcacccatggcccctccaagagccccaggcccctgagcaagcagggctctggcagcagccagcccatggaggtgcaggaaggctatggctttgggtcaggagatgatccctactcaagtgcagagccccatgtgtcaggtgtgaaacggtcccgctcaggtgagggcgaggtgagcggccttatgcgcaaggtgccacgagtgagccttgaacgcctggacctggacctcacagctgacagccagccacccgtcttcaaggtcttcccaggcagtaccactgaggactacaaccttattgttattgaacgtggcgctgccgctgcagctaccggccagccagggactgcgcctgcaggaacccctggtgccccacccctggctggcatggccattgtcaaggaggaggagacggaggctgccattggagcccctcctactgccactgagggccctgagaccaaacctgtgcttatggctcttgcggagggtcctggtgctgagggtccccgcctggcctcacctagtggcagcaccagctcagggctggaggtggtggctcctgagggtacctcagccccaggtggtggcccgggaaccctggatgacagtgccaccatttgccgtgtctgccagaagccaggcgatctggttatgtgcaaccagtgtgagttttgtttccacctggactgtcacctgccggccctgcaggatgtaccaggggaggagtggagctgctcactctgccatgtgctccctgacctgaaggaggaggatggcagcctcagcctggatggtgcagacagcactggcgtggtggccaagctctcaccagccaaccagcggaaatgtgagcgtgtactgctggccctattctgtcacgaaccctgccgccccctgcatcagctggctaccgactccaccttctccctggaccagcccggtggcaccctggatctgaccctgatccgtgcccgcctccaggagaagttgtcacctccctacagctccccacaggagtttgcccaggatgtgggccgcatgttcaagcaattcaacaagttaactgaggacaaggcagacgtgcagtccatcatcggcctgcagcgcttcttcgagacgcgcatgaacgaggccttcggtgacaccaagttctctgctgtgctggtggagcccccgccgatgagcctgcctggtgctggcctgagttcccaggagctgtctggtggccctggtgatggcccctgaggctggagcccccatggccagcccagcctggctctgttctctgtcctgtcaccccatccccactcccctggtggcctgactcccactccctggtggccccatcccccagttcctcacgatatggtttttacttctgtggatttaataaaaacttcaccagtt

SEQ ID NO: 104205 - DNA, 3282 bp, Homo sapiens
cggcggcgaagagacgcgggttgaggaagagggacggattgcccatgcgcttgggcgcacagcggcccgcttctgtgtggtctggaggtggagctgagaggggaatcacactctataaaggttcgcataccccactggcggattcaattgcggcagtgacgtcacagaggccccgccccgcccccacaagagccccaccgacgtggggttggcggtggtggaaggactaggagttggcgcgtgcgtactggcggcctctcccgcaccgaccggcctgggccccgcccccgggcgtgaggcgcccaatgcgcgtgcgcggcggcgtcggcgccagttatttctgtcccgccccccggcctcggctctttctgcgagcgggcgcgcgggcgagcggttgtgcttgtgcttgtggcgcgtggtgcgggtttcggcggcggctgaggaagaagcgcgggcggcgccttcgggaggcgagcaggcagcagttggccgtgccgtagcagcgtcccgcgcgcggcgggcagcggcccaggaggcgcgtggcggcgctcggcctcgcggcggcggcggcggcagcggcccagcagttggcggcgagcgcgtctgcgcctgcgcggcgggccccgcgcccctcctccccccctgggcgcccccggcggcgtgtgaatggcggcctccgcggcggcagcctcggcagcagcggcctcggccgcctctggcagcccgggcccgggcgagggctccgctggcggcgaaaagcgctccaccgccccttcggccgcagcctcggcctctgcctcagccgcggcgtcgtcgcccgcggggggcggcgccgaggcgctggagctgctggagcactgcggcgtgtgcagagagcgcctgcgacccgagagggagccccgcctgctgccctgtttgcactcggcctgtagtgcctgcttagggcccgcggcccccgccgccgccaacagctcgggggacggcggggcggcgggcgacggcaccgtggtggactgtcccgtgtgcaagcaacagtgcttctccaaagacatcgtggagaattatttcatgcgtgatagtggcagcaaggctgccaccgacgcccaggatgcgaaccagtgctgcactagctgtgaggataatgccccagccaccagctactgtgtggagtgctcggagcctctgtgtgagacctgtgtagaggcgcaccagcgggtgaagtacaccaaggaccatactgtgcgctctactgggccagccaagtctcgggatggtgaacgtactgtctattgcaacgtacacaagcatgaaccccttgtgctgttttgtgagagctgtgatactctcacctgccgagactgccagctcaatgcccacaaggaccaccagtaccagttcttagaggatgcagtgaggaaccagcgcaagctcctggcctcactggtgaagcgccttggggacaaacatgcaacattgcagaagagcaccaaggaggttcgcagctcaatccgccaggtgtctgacgtacagaagcgtgtgcaagtggatgtcaagatggccatcctgcagatcatgaaggagctgaataagcggggccgtgtgctggtcaatgatgcccagcaagatccagaagcaccaggagcacattctgcgctttgcctcttgggctctggagagtgacaacaacacagcccttttgctttctaagaagttgatctacttccagctgcaccgggccctcaagatgattgtggatcccgtggagccacatggcgagatgaagtttcagtgggacctcaatgcctggaccaagagtgccgaggcctttggcaagattgtggcagagcgtcctggcactaactcaacaggccctgcacccatggcccctccaagagccccaggcccctgagcaagcagggctctggcagcagccagcccatggaggtgcaggaaggctatggctttgggtcaggagatgatccctactcaagtgcagagccccatgtgtcaggtgtgaaacggtcccgctcaggtgagggcgaggtgagcggccttatgcgcaaggtgccacgagtgagccttgaacgcctggacctggacctcacagctgacagccagccacccgtcttcaaggtcttcccaggcagtaccactgaggactacaaccttattgttattgaacgtggcgctgccgctgcagctaccggccagccagggactgcgcctgcaggaacccctggtgccccacccctggctggcatggccattgtcaaggaggaggagacggaggctgccattggagcccctcctactgccactgagggccctgagaccaaacctgtgcttatggctcttgcggagggtcctggtgctgagggtccccgcctggcctcacctagtggcagcaccagctcagggctggaggtggtggctcctgagggtacctcagccccaggtggtggcccgggaaccctggatgacagtgccaccatttgccgtgtctgccagaagccaggcgatctggttatgtgcaaccagtgtgagttttgtttccacctggactgtcacctgccggccctgcaggatgtaccaggggaggagtggagctgctcactctgccatgtgctccctgacctgaaggaggaggatggcagcctcagcctggatggtgcagacagcactggcgtggtggccaagctctcaccagccaaccagcggaaatgtgagcgtgtactgctggccctattctgtcacgaaccctgccgccccctgcatcagctggctaccgactccaccttctccctggaccagcccggtggcaccctggatctgaccctgatccgtgcccgcctccaggagaagttgtcacctccctacagctccccacaggagtttgcccaggatgtgggccgcatgttcaagcaattcaacaagttaactgaggacaaggcagacgtgcagtccatcatcggcctgcagcgcttcttcgagacgcgcatgaacgaggccttcggtgacaccaagttctctgctgtgctggtggagcccccgccgatgagcctgcctggtgctggcctgagttcccaggagctgtctggtggccctggtgatggcccctgaggctggagcccccatggccagcccagcctggctctgttctctgtcctgtcaccccatccccactcccctggtggcctgactcccactccctggtggccccatcccccagttcctcacgatatggtttttacttctgtggatttaataaaaacttcaccagtt

SEQ ID NO: 104206 - DNA, 3444 bp, Homo sapiens
cggcggcgaagagacgcgggttgaggaagagggacggattgcccatgcgcttgggcgcacagcggcccgcttctgtgtggtctggaggtggagctgagaggggaatcacactctataaaggttcgcataccccactggcggattcaattgcggcagtgacgtcacagaggccccgccccgcccccacaagagccccaccgacgtggggttggcggtggtggaaggactaggagttggcgcgtgcgtactggcggcctctcccgcaccgaccggcctgggccccgcccccgggcgtgaggcgcccaatgcgcgtgcgcggcggcgtcggcgccagttatttctgtcccgccccccggcctcggctctttctgcgagcgggcgcgcgggcgagcggttgtgcttgtgcttgtggcgcgtggtgcgggtttcggcggcggctgaggaagaagcgcgggcggcgccttcgggaggcgagcaggcagcagttggccgtgccgtagcagcgtcccgcgcgcggcgggcagcggcccaggaggcgcgtggcggcgctcggcctcgcggcggcggcggcggcagcggcccagcagttggcggcgagcgcgtctgcgcctgcgcggcgggccccgcgcccctcctccccccctgggcgcccccggcggcgtgtgaatggcggcctccgcggcggcagcctcggcagcagcggcctcggccgcctctggcagcccgggcccgggcgagggctccgctggcggcgaaaagcgctccaccgccccttcggccgcagcctcggcctctgcctcagccgcggcgtcgtcgcccgcggggggcggcgccgaggcgctggagctgctggagcactgcggcgtgtgcagagagcgcctgcgacccgagagggagccccgcctgctgccctgtttgcactcggcctgtagtgcctgcttagggcccgcggcccccgccgccgccaacagctcgggggacggcggggcggcgggcgacggcaccgtggtggactgtcccgtgtgcaagcaacagtgcttctccaaagacatcgtggagaattatttcatgcgtgatagtggcagcaaggctgccaccgacgcccaggatgcgaaccagtgctgcactagctgtgaggataatgccccagccaccagctactgtgtggagtgctcggagcctctgtgtgagacctgtgtagaggcgcaccagcgggtgaagtacaccaaggaccatactgtgcgctctactgggccagccaagtctcgggatggtgaacgtactgtctattgcaacgtacacaagcatgaaccccttgtgctgttttgtgagagctgtgatactctcacctgccgagactgccagctcaatgcccacaaggaccaccagtaccagttcttagaggatgcagtgaggaaccagcgcaagctcctggcctcactggtgaagcgccttggggacaaacatgcaacattgcagaagagcaccaaggaggttcgcagctcaatccgccaggtgtctgacgtacagaagcgtgtgcaagtggatgtcaagatggccatcctgcagatcatgaaggagctgaataagcggggccgtgtgctggtcaatgatgcccagaaggtgactgaggggcagcaggagcgcctggagcggcagcactggaccatgaccaagatccagaagcaccaggagcacattctgcgctttgcctcttgggctctggagagtgacaacaacacagcccttttgctttctaagaagttgatctacttccagctgcaccgggccctcaagatgattgtggatcccgtggagccacatggcgagatgaagtttcagtgggacctcaatgcctggaccaagagtgccgaggcctttggcaagattgtggcagagcgtcctggcactaactcaacaggccctgcacccatggcccctccaagagccccaggcccctgagcaagcagggctctggcagcagccagcccatggaggtgcaggaaggctatggctttgggtcaggagatgatccctactcaagtgcagagccccatgtgtcaggtgtgaaacggtcccgctcaggtgagggcgaggtgagcggccttatgcgcaaggtgccacgagtgagccttgaacgcctggacctggacctcacagctgacagccagccacccgtcttcaaggtcttcccaggcagtaccactgaggactacaaccttattgttattgaacgtggcgctgccgctgcagctaccggccagccagggactgcgcctgcaggaacccctggtgccccacccctggctggcatggccattgtcaaggaggaggagacggaggctgccattggagcccctcctactgccactgagggccctgagaccaaacctgtgcttatggctcttgcggagggtcctggtgctgagggtccccgcctggcctcacctagtggcagcaccagctcagggctggaggtggtggctcctgagggtacctcagccccaggtggtggcccgggaaccctggatgacagtgccaccatttgccgtgtctgccagaagccaggcgatctggttatgtgcaaccagtgtgagttttgtttccacctggactgtcacctgccggccctgcaggatgtaccaggggaggagtggagctgctcactctgccatgtgctccctgacctgaaggaggaggatggcagcctcagcctggatggtgcagacagcactggcgtggtggccaagctctcaccagccaaccagcggaaatgtgagcgtgtactgctggccctattctgtcacgaaccctgccgccccctgcatcagctggctaccgactccaccttctccctggtgagtcctaggatgggaaaggggaagggggtggtggctgctgggtctcgccctcaacctgtgcatgtatatgtgtgtctttgtgtgtgtatgtgtgatctctgccctggaccagcccggtggcaccctggatctgaccctgatccgtgcccgcctccaggagaagttgtcacctccctacagctccccacaggagtttgcccaggatgtgggccgcatgttcaagcaattcaacaagttaactgaggacaaggcagacgtgcagtccatcatcggcctgcagcgcttcttcgagacgcgcatgaacgaggccttcggtgacaccaagttctctgctgtgctggtggagcccccgccgatgagcctgcctggtgctggcctgagttcccaggagctgtctggtggccctggtgatggcccctgaggctggagcccccatggccagcccagcctggctctgttctctgtcctgtcaccccatccccactcccctggtggcctgactcccactccctggtggccccatcccccagttcctcacgatatggtttttacttctgtggatttaataaaaacttcaccagtt

SEQ ID NO: 104207 - DNA, 1625 bp, Homo sapiens
cggtaagctacgtcgaccagcgtcgaacaaacatccgttgcgctttctatgaagttgatctacttccagctgcaccgggccctcaagatgattgtggatcccgtggagccacatggcgagatgaagtttcagtgggacctcaatgcctggaccaagagtgccgaggcctttggcaagattgtggcagagcgtcctggcactaactcaacaggccctgcacccatggcccctccaagagccccaggcccctgagcaagcagggctctggcagcagccagcccatggaggtgcaggaaggctatggctttgggtcaggagatgatccctactcaagtgcagagccccatgtgtcaggtgtgaaacggtcccgctcaggtgagggcgaggtgagcggccttatgcgcaaggtgccacgagtgagccttgaacgcctggacctggacctcacagctgacagccagccacccgtcttcaaggtcttcccaggcagtaccactgaggactacaaccttattgttattgaacgtggcgctgccgctgcagctaccggccagccagggactgcgcctgcaggaacccctggtgccccacccctggctggcatggccattgtcaaggaggaggagacggaggctgccattggagcccctcctactgccactgagggccctgagaccaaacctgtgcttatggctcttgcggagggtcctggtgctgagggtccccgcctggcctcacctagtggcagcaccagctcagggctggaggtggtggctcctgagggtacctcagccccaggtggtggcccgggaaccctggatgacagtgccaccatttgccgtgtctgccagaagccaggcgatctggttatgtgcaaccagtgtgagttttgtttccacctggactgtcacctgccggccctgcaggatgtaccaggggaggagtggagctgctcactctgccatgtgctccctgacctgaaggaggaggatggcagcctcagcctggatggtgcagacagcactggcgtggtggccaagctctcaccagccaaccagcggaaatgtgagcgtgtactgctggccctattctgtcacgaaccctgccgccccctgcatcagctggctaccgactccaccttctccctggaccagcccggtggcaccctggatctgaccctgatccgtgcccgcctccaggagaagttgtcacctccctacagctccccacaggagtttgcccaggatgtgggccgcatgttcaagcaattcaacaagttaactgaggacaaggcagacgtgcagtccatcatcggcctgcagcgcttcttcgagacgcgcatgaacgaggccttcggtgacaccaagttctctgctgtgctggtggagcccccgccgatgagcctgcctggtgctggcctgagttcccaggagctgtctggtggccctggtgatggcccctgaggctggagcccccatggccagcccagcctggctctgttctctgtcctgtcaccccatccccactcccctggtggcctgactcccactccctggtggccccatcccccagttcctcacgatatggtttttacttctgtggatttaataaaaacttcaccagtt

SEQ ID NO: 104208 - DNA, 3484 bp, Homo sapiens
cggcggcgaagagacgcgggttgaggaagagggacggattgcccatgcgcttgggcgcacagcggcccgcttctgtgtggtctggaggtggagctgagaggggaatcacactctataaaggttcgcataccccactggcggattcaattgcggcagtgacgtcacagaggccccgccccgcccccacaagagccccaccgacgtggggttggcggtggtggaaggactaggagttggcgcgtgcgtactggcggcctctcccgcaccgaccggcctgggccccgcccccgggcgtgaggcgcccaatgcgcgtgcgcggcggcgtcggcgccagttatttctgtcccgccccccggcctcggctctttctgcgagcgggcgcgcgggcgagcggttgtgcttgtgcttgtggcgcgtggtgcgggtttcggcggcggctgaggaagaagcgcgggcggcgccttcgggaggcgagcaggcagcagttggccgtgccgtagcagcgtcccgcgcgcggcgggcagcggcccaggaggcgcgtggcggcgctcggcctcgcggcggcggcggcggcagcggcccagcagttggcggcgagcgcgtctgcgcctgcgcggcgggccccgcgcccctcctccccccctgggcgcccccggcggcgtgtgaatggcggcctccgcggcggcagcctcggcagcagcggcctcggccgcctctggcagcccgggcccgggcgagggctccgctggcggcgaaaagcgctccaccgccccttcggccgcagcctcggcctctgcctcagccgcggcgtcgtcgcccgcggggggcggcgccgaggcgctggagctgctggagcactgcggcgtgtgcagagagcgcctgcgacccgagagggagccccgcctgctgccctgtttgcactcggcctgtagtgcctgcttagggcccgcggcccccgccgccgccaacagctcgggggacggcggggcggcgggcgacggcaccgtggtggactgtcccgtgtgcaagcaacagtgcttctccaaagacatcgtggagaattatttcatgcgtgatagtggcagcaaggctgccaccgacgcccaggatgcgaaccagtgctgcactagctgtgaggataatgccccagccaccagctactgtgtggagtgctcggagcctctgtgtgagacctgtgtagaggcgcaccagcgggtgaagtacaccaaggaccatactgtgcgctctactgggccagccaagtctcgggatggtgaacgtactgtctattgcaacgtacacaagcatgaaccccttgtgctgttttgtgagagctgtgatactctcacctgccgagactgccagctcaatgcccacaaggaccaccagtaccagttcttagaggatgcagtgaggaaccagcgcaagctcctggcctcactggtgaagcgccttggggacaaacatgcaacattgcagaagagcaccaaggaggttcgcagctcaatccgccaggtgtctgacgtacagaagcgtgtgcaagtggatgtcaagatggccatcctgcagatcatgaaggagctgaataagcggggccgtgtgctggtcaatgatgcccagaaggtgactgaggggcagcaggagcgcctggagcggcagcactggaccatgaccaagatccagaagcaccaggagcacattctgcgctttgcctcttgggctctggagagtgacaacaacacagcccttttgctttctaagaagttgatctacttccagctgcaccgggccctcaagatgattgtggatcccgtggagccacatggcgagatgaagtttcagtgggacctcaatgcctggaccaagagtgccgaggcctttggcaagattgtggcagagcgtcctggcactaactcaacaggccctgcacccatggcccctccaagagccccaggcccctgagcaagcagggctctggcagcagccagcccatggaggtgcaggaaggctatggctttgggtcaggagatgatccctactcaagtgcagagccccatgtgtcaggtgtgaaacggtcccgctcaggtgagggcgaggtgagcggccttatgcgcaaggtgccacgagtgagccttgaacgcctggacctggacctcacagctgacagccagccacccgtcttcaaggtcttcccaggcagtaccactgaggactacaaccttattgttattgaacgtggcgctgccgctgcagctaccggccagccagggactgcgcctgcaggaacccctggtgccccacccctggctggcatggccattgtcaaggaggaggagacggaggctgccattggagcccctcctactgccactgagggccctgagaccaaacctgtgcttatggctcttgcggagggtcctggtgctgagggtccccgcctggcctcacctagtggcagcaccagctcagggctggaggtggtggctcctgagggtacctcagccccaggtggtggcccgggaaccctggatgacagtgccaccatttgccgtgtctgccagaagccaggcgatctggttatgtgcaaccagtgtgagttttgtttccacctggactgtcacctgccggccctgcaggatgtaccaggggaggagtggagctgctcactctgccatgtgctccctgacctgaaggaggaggatggcagcctcagcctggatggtgcagacagcactggcgtggtggccaagctctcaccagccaaccagcggaaatgtgagcgtgtactgctggccctattctgtcacgaaccctgccgccccctgcatcagctggctaccgactccaccttctccctggaccagcccggtggcaccctggatctgaccctgatccgtgcccgcctccaggagaagttgtcacctccctacagctccccacaggagtttgcccaggatgtgggccgcatgttcaagcaattcaacaagttaactgaggtgagccagtggaatggagaggctgtgggcagggggagatgtgaaggaaagaactaggacccattcatccactgcattcctgcttggcccaggacaaggcagacgtgcagtccatcatcggcctgcagcgcttcttcgagacgcgcatgaacgaggccttcggtgacaccaagttctctgctgtgctggtggagcccccgccgatgagcctgcctggtgctggcctgagttcccaggagctgtctggtggccctggtgatggcccctgaggctggagcccccatggccagcccagcctggctctgttctctgtcctgtcaccccatccccactcccctggtggcctgactcccactccctggtggccccatcccccagttcctcacgatatggtttttacttctgtggatttaataaaaacttcaccagttcctcaggcgttggctggttgggggactgtggtcctggggcctggtttattgactgta

SEQ ID NO: 104209 - DNA, 3612 bp, Homo sapiens
  misc_feature (3468)..(3468): n is a, c, g, or t
cggcggcgaagagacgcgggttgaggaagagggacggattgcccatgcgcttgggcgcacagcggcccgcttctgtgtggtctggaggtggagctgagaggggaatcacactctataaaggttcgcataccccactggcggattcaattgcggcagtgacgtcacagaggccccgccccgcccccacaagagccccaccgacgtggggttggcggtggtggaaggactaggagttggcgcgtgcgtactggcggcctctcccgcaccgaccggcctgggccccgcccccgggcgtgaggcgcccaatgcgcgtgcgcggcggcgtcggcgccagttatttctgtcccgccccccggcctcggctctttctgcgagcgggcgcgcgggcgagcggttgtgcttgtgcttgtggcgcgtggtgcgggtttcggcggcggctgaggaagaagcgcgggcggcgccttcgggaggcgagcaggcagcagttggccgtgccgtagcagcgtcccgcgcgcggcgggcagcggcccaggaggcgcgtggcggcgctcggcctcgcggcggcggcggcggcagcggcccagcagttggcggcgagcgcgtctgcgcctgcgcggcgggccccgcgcccctcctccccccctgggcgcccccggcggcgtgtgaatggcggcctccgcggcggcagcctcggcagcagcggcctcggccgcctctggcagcccgggcccgggcgagggctccgctggcggcgaaaagcgctccaccgccccttcggccgcagcctcggcctctgcctcagccgcggcgtcgtcgcccgcggggggcggcgccgaggcgctggagctgctggagcactgcggcgtgtgcagagagcgcctgcgacccgagagggagccccgcctgctgccctgtttgcactcggcctgtagtgcctgcttagggcccgcggcccccgccgccgccaacagctcgggggacggcggggcggcgggcgacggcaccgtggtggactgtcccgtgtgcaagcaacagtgcttctccaaagacatcgtggagaattatttcatgcgtgatagtggcagcaaggctgccaccgacgcccaggatgcgaaccagtgctgcactagctgtgaggataatgccccagccaccagctactgtgtggagtgctcggagcctctgtgtgagacctgtgtagaggcgcaccagcgggtgaagtacaccaaggaccatactgtgcgctctactgggccagccaagtctcgggatggtgaacgtactgtctattgcaacgtacacaagcatgaaccccttgtgctgttttgtgagagctgtgatactctcacctgccgagactgccagctcaatgcccacaaggaccaccagtaccagttcttagaggatgcagtgaggaaccagcgcaagctcctggcctcactggtgaagcgccttggggacaaacatgcaacattgcagaagagcaccaaggaggttcgcagctcaatccgccaggtgtctgacgtacagaagcgtgtgcaagtggatgtcaagatggccatcctgcagatcatgaaggagctgaataagcggggccgtgtgctggtcaatgatgcccagaaggtgactgaggggcagcaggagcgcctggagcggcagcactggaccatgaccaagatccagaagcaccaggagcacattctgcgctttgcctcttgggctctggagagtgacaacaacacagcccttttgctttctaagaagttgatctacttccagctgcaccgggccctcaagatgattgtggatcccgtggagccacatggcgagatgaagtttcagtgggacctcaatgcctggaccaagagtgccgaggcctttggcaagattgtggcagagcgtcctggcactaactcaacaggccctgcacccatggcccctccaagagccccaggcccctgagcaagcagggctctggcagcagccagcccatggaggtgcaggaaggctatggctttgggtcaggagatgatccctactcaagtgcagagccccatgtgtcaggtgtgaaacggtcccgctcaggtgagggcgaggtgagcggccttatgcgcaaggtgccacgagtgagccttgaacgcctggacctggacctcacagctgacagccagccacccgtcttcaaggtcttcccaggcagtaccactgaggactacaaccttattgttattgaacgtggcgctgccgctgcagctaccggccagccagggactgcgcctgcaggaacccctggtgccccacccctggctggcatggccattgtcaaggaggaggagacggaggctgccattggagcccctcctactgccactgagggccctgagaccaaacctgtgcttatggctcttgcggagggtcctggtgctgagggtccccgcctggcctcacctagtggcagcaccagctcagggctggaggtggtggctcctgagggtacctcagccccaggtggtggcccgggaaccctggatgacagtgccaccatttgccgtgtctgccagaagccaggcgatctggttatgtgcaaccagtgtgagttttgtttccacctggactgtcacctgccggccctgcaggatgtaccaggggaggagtggagctgctcactctgccatgtgctccctgacctgaaggaggaggatggcagcctcagcctggatggtgcagacagcactggcgtggtggccaagctctcaccagccaaccagcggaaatgtgagcgtgtactgctggccctattctgtcacgaaccctgccgccccctgcatcagctggctaccgactccaccttctccctggtgagtcctaggatgggaaaggggaagggggtggtggctgctgggtctcgccctcaacctgtgcatgtatatgtgtgtctttgtgtgtgtatgtgtgatctctgccctggaccagcccggtggcaccctggatctgaccctgatccgtgcccgcctccaggagaagttgtcacctccctacagctccccacaggagtttgcccaggatgtgggccgcatgttcaagcaattcaacaagttaactgaggacaaggcagacgtgcagtccatcatcggcctgcagcgcttcttcgagacgcgcatgaacgaggccttcggtgacaccaagttctctgctgtgctggtggagcccccgccgatgagcctgcctggtgctggcctgagttcccaggagctgtctggtggccctggtgatggcccctgaggctggagcccccatggccagcccagcctggctctgttctctgtcctgtcaccccatccccactcccctggtggcctgactcccactccctggtggccccatcccccagttcctcacgatatggtttttacttctgtggatttaataaaaacttcaccagttaaaaaaaaaaaaaaaaaaaaaaanaaaaaaaaaggaaaagaaaaaaaaaaaaaaaggagagcaaaagcaagaaaaagaaaacacaagaaaaggcgagaaaaaaaaaaaaaaaaagagcggcggccgagcacgcaaagacctccccgggggggcagtaaatagcgagcg

SEQ ID NO: 104210 - DNA, 3037 bp, Homo sapiens
cggcggcgaagagacgcgggttgaggaagagggacggattgcccatgcgcttgggcgcacagcggcccgcttctgtgtggtctggaggtggagctgagaggggaatcacactctataaaggttcgcataccccactggcggattcaattgcggcagtgacgtcacagaggccccgccccgcccccacaagagccccaccgacgtggggttggcggtggtggaaggactaggagttggcgcgtgcgtactggcggcctctcccgcaccgaccggcctgggccccgcccccgggcgtgaggcgcccaatgcgcgtgcgcggcggcgtcggcgccagttatttctgtcccgccccccggcctcggctctttctgcgagcgggcgcgcgggcgagcggttgtgcttgtgcttgtggcgcgtggtgcgggtttcggcggcggctgaggaagaagcgcgggcggcgccttcgggaggcgagcaggcagcagttggccgtgccgtagcagcgtcccgcgcgcggcgggcagcggcccaggaggcgcgtggcggcgctcggcctcgcggcggcggcggcggcagcggcccagcagttggcggcgagcgcgtctgcgcctgcgcggcgggccccgcgcccctcctccccccctgggcgcccccggcggcgtgtgaatggcggcctccgcggcggcagcctcggcagcagcggcctcggccgcctctggcagcccgggcccgggcgagggctccgctggcggcgaaaagcgctccaccgccccttcggccgcagcctcggcctctgcctcagccgcggcgtcgtcgcccgcggggggcggcgccgaggcgctggagctgctggagcactgcggcgtgtgcagagagcgcctgcgacccgagagggagccccgcctgctgccctgtttgcactcggcctgtagtgcctgcttagggcccgcggcccccgccgccgccaacagctcgggggacggcggggcggcgggcgacggcaccgtggtggactgtcccgtgtgcaagcaacagtgcttctccaaagacatcgtggagaattatttcatgcgtgatagtggcagcaaggctgccaccgacgcccaggatgcgaaccagtgctgcactagctgtgaggataatgccccagccaccagctactgtgtggagtgctcggagcctctgtgtgagacctgtgtagaggcgcaccagcgggtgaagtacaccaaggaccatactgtgcgctctactgggccagccaagtctcgggatggtgaacgtactgtctattgcaacgtacacaagcatgaaccccttgtgctgttttgtgagagctgtgatactctcacctgccgagactgccagctcaatgcccacaaggaccaccagtaccagttcttagaggatgcagtgaggaaccagcgcaagctcctggcctcactggtgaagcgccttggggacaaacatgcaacattgcagaagagcaccaaggaggttcgcagctcaatccgccaggtgtctgacgtacagaagcgtgtgcaagtggatgtcaagatggccatcctgcagatcatgaaggagctgaataagcggggccgtgtgctggtcaatgatgcccagaaggtgactgaggggcagcaggagcgcctggagcggcagcactggaccatgaccaagatccagaagcaccaggagcacattctgcgctttgcctcttgggctctggagagtgacaacaacacagcccttttgctttctaagaagttgatctacttccagctgcaccgggccctcaagatgattgtggatcccgtggagccacatggcgagatgaagtttcagtgggacctcaatgcctggaccaagagtgccgaggcctttggcaagattgtggcagagcgtcctggcactaactcaacaggccctgcacccatggcccctccaagagccccaggcccctgagcaagcagggctctggcagcagccagcccatggaggtgcaggaaggctatggctttgggtcaggagatgatccctactcaagtgcagagccccatgtgtcaggtgtgaaacggtcccgctcaggtgagggcgaggtgagcggccttatgcgcaaggtgccacgagtgagccttgaacgcctggacctggacctcacagctgacagccagccacccgtcttcaaggtcttcccaggcagtaccactgaggactacaaccttattgttattgaacgtggcgctgccgctgcagctaccggccagccagggactgcgcctgcaggaacccctggtgccccacccctggctggcatggccattgtcaaggaggaggagacggaggctgcatggaggagtggagctgctcactctgccatgtgctccctgacctgaaggaggaggatggcagcctcagcctggatggtgcagacagcactggcgtggtggccaagctctcaccagccaaccagcggaaatgtgagcgtgtactgctggccctattctgtcacgaaccctgccgccccctgcatcagctggctaccgactccaccttctccctggaccagcccggtggcaccctggatctgaccctgatccgtgcccgcctccaggagaagttgtcacctccctacagctccccacaggagtttgcccaggatgtgggccgcatgttcaagcaattcaacaagttaactgaggacaaggcagacgtgcagtccatcatcggcctgcagcgcttcttcgagacgcgcatgaacgaggccttcggtgacaccaagttctctgctgtgctggtggagcccccgccgatgagcctgcctggtgctggcctgagttcccaggagctgtctggtggccctggtgatggcccctgaggctggagcccccatggccagcccagcctggctctgttctctgtcctgtcaccccatccccactcccctggtggcctgactcccactccctggtggccccatcccccagttcctcacgatatggtttttacttctgtggatttaataaaaacttcaccagtt

SEQ ID NO: 104211 - DNA, 3009 bp, Homo sapiens
  misc_feature (2890)..(2890): n is a, c, g, or t
  misc_feature (2896)..(2896): n is a, c, g, or t
cggcggcgaagagacgcgggttgaggaagagggacggattgcccatgcgcttgggcgcacagcggcccgcttctgtgtggtctggaggtggagctgagaggggaatcacactctataaaggttcgcataccccactggcggattcaattgcggcagtgacgtcacagaggccccgccccgcccccacaagagccccaccgacgtggggttggcggtggtggaaggactaggagttggcgcgtgcgtactggcggcctctcccgcaccgaccggcctgggccccgcccccgggcgtgaggcgcccaatgcgcgtgcgcggcggcgtcggcgccagttatttctgtcccgccccccggcctcggctctttctgcgagcgggcgcgcgggcgagcggttgtgcttgtgcttgtggcgcgtggtgcgggtttcggcggcggctgaggaagaagcgcgggcggcgccttcgggaggcgagcaggcagcagttggccgtgccgtagcagcgtcccgcgcgcggcgggcagcggcccaggaggcgcgtggcggcgctcggcctcgcggcggcggcggcggcagcggcccagcagttggcggcgagcgcgtctgcgcctgcgcggcgggccccgcgcccctcctccccccctgggcgcccccggcggcgtgtgaatggcggcctccgcggcggcagcctcggcagcagcggcctcggccgcctctggcagcccgggcccgggcgagggctccgctggcggcgaaaagcgctccaccgccccttcggccgcagcctcggcctctgcctcagccgcggcgtcgtcgcccgcggggggcggcgccgaggcgctggagctgctggagcactgcggcgtgtgcagagagcgcctgcgacccgagagggagccccgcctgctgccctgtttgcactcggcctgtagtgcctgcttagggcccgcggcccccgccgccgccaacagctcgggggacggcggggcggcgggcgacggcaccgtggtggactgtcccgtgtgcaagcaacagtgcttctccaaagacatcgtggagaattatttcatgcgtgatagtggcagcaaggctgccaccgacgcccaggatgcgaaccagtgctgcactagctgtgaggataatgccccagccaccagctactgtgtggagtgctcggagcctctgtgtgagacctgtgtagaggcgcaccagcgggtgaagtacaccaaggaccatactgtgcgctctactgggccagccaagtctcgggatggtgaacgtactgtctattgcaacgtacacaagcatgaaccccttgtgctgttttgtgagagctgtgatactctcacctgccgagactgccagctcaatgcccacaaggaccaccagtaccagttcttagaggatgcagtgaggaaccagcgcaagctcctggcctcactggtgaagcgccttggggacaaacatgcaacattgcagaagagcaccaaggaggttcgcagctcaatccgccaggtgtctgacgtacagaagcgtgtgcaagtggatgtcaagatggccatcctgcagatcatgaaggagctgaataagcggggccgtgtgctggtcaatgatgcccagaaggtgactgaggggcagcaggagcgcctggagcggcagcactggaccatgaccaagatccagaagcaccaggagcacattctgcgctttgcctcttgggctctggagagtgacaacaacacagcccttttgctttctaagaagttgatctacttccagctgcaccgggccctcaagatgattgtggatcccgtggagccacatggcgagatgaagtttcagtgggacctcaatgcctggaccaagagtgccgaggcctttggcaagattgtggcagagcgtcctggcactaactcaacaggccctgcacccatggcccctccaagagccccaggcccctgagcaagcagggctctggcagcagccagcccatggaggtgcaggaaggctatggctttgggtcaggagatgatccctactcaagtgcagagccccatgtgtcaggtgtgaaacggtcccgctcaggtgagggcgaggtgagcggccttatgcgcaaggtgccacgagtgagccttgaacgcctggacctggacctcacagctgacagccagccacccgtcttcaaggtcttcccaggcagtaccactgaggactacaaccttattgttattgaacgtggcgctgccgctgcagctaccggccagccagggactgcgcctgcaggaacccctggtgccccacccctggctggcatggccattgtcaaggaggaggagacggaggctgccattggagcccctcctactgccactgagggccctgagaccaaacctgtgcttatggctcttgcggagggtcctggtgctgagggtccccgcctggcctcacctagtggcagcaccagctcagggctggaggtggtggctcctgagggtacctcagccccaggtggtggcccgggaaccctggatgacagtgccaccatttgccgtgtctgccagaagccaggcgatctggttatgtgcaaccagtgtgagttttgtttccacctggactgtcacctgccggccctgcaggatgtaccaggggaggagtggagctgctcactctgccatgtgctccctgacctgaaggaggaggatggcagcctcagcctggatggtgcagacagcactggcgtggtggccaagctctcaccagccaaccagcggacacagcggaaatgtgagcgtgtactggtggcctattctgtcacgaacctgcgccctgatcagtggtacgatcactttcctggacagccgtggcctggttgacctgtcgggccgtcggnaagtgnctcctaagcccaaggtgcaggtggggggtcagctccagtctggcggggtcggccagggggggtgagcgaaggtggcacctttgttggcccggtgtgggacagtggtgcggtcc

SEQ ID NO: 104212 - DNA, 2975 bp, Homo sapiens
cggcggcgaagagacgcgggttgaggaagagggacggattgcccatgcgcttgggcgcacagcggcccgcttctgtgtggtctggaggtggagctgagaggggaatcacactctataaaggttcgcataccccactggcggattcaattgcggcagtgacgtcacagaggccccgccccgcccccacaagagccccaccgacgtggggttggcggtggtggaaggactaggagttggcgcgtgcgtactggcggcctctcccgcaccgaccggcctgggccccgcccccgggcgtgaggcgcccaatgcgcgtgcgcggcggcgtcggcgccagttatttctgtcccgccccccggcctcggctctttctgcgagcgggcgcgcgggcgagcggttgtgcttgtgcttgtggcgcgtggtgcgggtttcggcggcggctgaggaagaagcgcgggcggcgccttcgggaggcgagcaggcagcagttggccgtgccgtagcagcgtcccgcgcgcggcgggcagcggcccaggaggcgcgtggcggcgctcggcctcgcggcggcggcggcggcagcggcccagcagttggcggcgagcgcgtctgcgcctgcgcggcgggccccgcgcccctcctccccccctgggcgcccccggcggcgtgtgaatggcggcctccgcggcggcagcctcggcagcagcggcctcggccgcctctggcagcccgggcccgggcgagggctccgctggcggcgaaaagcgctccaccgccccttcggccgcagcctcggcctctgcctcagccgcggcgtcgtcgcccgcggggggcggcgccgaggcgctggagctgctggagcactgcggcgtgtgcagagagcgcctgcgacccgagagggagccccgcctgctgccctgtttgcactcggcctgtagtgcctgcttagggcccgcggcccccgccgccgccaacagctcgggggacggcggggcggcgggcgacggcaccgtggtggactgtcccgtgtgcaagcaacagtgcttctccaaagacatcgtggagaattatttcatgcgtgatagtggcagcaaggctgccaccgacgcccaggatgcgaaccagtgctgcactagctgtgaggataatgccccagccaccagctactgtgtggagtgctcggagcctctgtgtgagacctgtgtagaggcgcaccagcgggtgaagtacaccaaggaccatactgtgcgctctactgggccagccaagtctcgggatggtgaacgtactgtctattgcaacgtacacaagcatgaaccccttgtgctgttttgtgagagctgtgatactctcacctgccgagactgccagctcaatgcccacaaggaccaccagtaccagttcttagaggatgcagtgaggaaccagcgcaagctcctggcctcactggtgaagcgccttggggacaaacatgcaacattgcagaagagcaccaaggaggttcgcagctcaatccgccaggtgtctgacgtacagaagcgtgtgcaagtggatgtcaagatggccatcctgcagatcatgaaggagctgaataagcggggccgtgtgctggtcaatgatgcccagaaggtgactgaggggcagcaggagcgcctggagcggcagcactggaccatgaccaagatccagaagcaccaggagcacattctgcgctttgcctcttgggctctggagagtgacaacaacacagcccttttgctttctaagaagttgatctacttccagctgcaccgggccctcaagatgattgtggatcccgtggagccacatggcgagatgaagtttcagtgggacctcaatgcctggaccaagagtgccgaggcctttggcaagattgtggcagagcgtcctggcactaactcaacaggccctgcacccatggcccctccaagagccccaggcccctgagcaagcagggctctggcagcagccagcccatggaggtgcaggaaggctatggctttgggtcaggagatgatccctactcaagtgcagagccccatgtgtcaggtgtgaaacggtcccgctcaggtgagggcgaggtgagcggccttatgcgcaaggtgccacgagtgagccttgaacgcctggacctggacctcacagctgacagccagccacccgtcttcaaggtcttcccaggcagtaccactgaggactacaaccttattgttattgaacgtggcgctgccgctgcagctaccggccagccagggactgcgcctgcaggaacccctggtgccccacccctggctggcatggccattgtcaaggaggaggagacggaggctgccattggagcccctcctactgccactgagggccctgagaccaaacctgtgcttatggctcttgcggagggtcctggtgctgagggtccccgcctggcctcacctagtggcagcaccagctcagggctggaggtggtggctcctgagggtacctcagccccaggtggtggcccgggaaccctggatgacagtgccaccatttgccgtgtctgccagaagccaggcgatctggttatgtgcaaccagtgtgagttttgtttccacctggactgtcacctgccggccctgcaggatgtaccaggggaggagtggagctgctcactctgccatgtgctccctgacctgaaggaggaggatggcagcctcagcctggatggtgcagacagcactggccccccgccgatgagcctgcctggtgctggcctgagttcccaggagctgtctggtggccctggtgatggcccctgaggctggagcccccatggccagcccagcctggctctgttctctgtcctgtcaccccatccccactcccctggtggcctgactcccactccctggtggccccatcccccagttcctcacgatatggtttttacttctgtggatttaataaaaacttcaccagtt

SEQ ID NO: 104213 - DNA, 1360 bp, Homo sapiens
cgcgatctagaactaggcacctccatgggctggctatggctttgggtcaggagatgatccctactcaagtgcagagccccatgtgtcaggtgtgaaacggtcccgctcaggtgagggcgaggtgagcggccttatgcgcaaggtgccacgagtgagccttgaacgcctggacctggacctcacagctgacagccagccacccgtcttcaaggtcttcccaggcagtaccactgaggactacaaccttattgttattgaacgtggcgctgccgctgcagctaccggccagccagggactgcgcctgcaggaacccctggtgccccacccctggctggcatggccattgtcaaggaggaggagacggaggctgccattggagcccctcctactgccactgagggccctgagaccaaacctgtgcttatggctcttgcggagggtcctggtgctgagggtccccgcctggcctcacctagtggcagcaccagctcagggctggaggtggtggctcctgagggtacctcagccccaggtggtggcccgggaaccctggatgacagtgccaccatttgccgtgtctgccagaagccaggcgatctggttatgtgcaaccagtgtgagttttgtttccacctggactgtcacctgccggccctgcaggatgtaccaggggaggagtggagctgctcactctgccatgtgctccctgacctgaaggaggaggatggcagcctcagcctggatggtgcagacagcactggcgtggtggccaagctctcaccagccaaccagcggaaatgtgagcgtgtactgctggccctattctgtcacgaaccctgccgccccctgcatcagctggctaccgactccaccttctccctggaccagcccggtggcaccctggatctgaccctgatccgtgcccgcctccaggagaagttgtcacctccctacagctccccacaggagtttgcccaggatgtgggccgcatgttcaagcaattcaacaagttaactgaggacaaggcagacgtgcagtccatcatcggcctgcagcgcttcttcgagacgcgcatgaacgaggccttcggtgacaccaagttctctgctgtgctggtggagcccccgccgatgagcctgcctggtgctggcctgagttcccaggagctgtctggtggccctggtgatggcccctgaggctggagcccccatggccagcccagcctggctctgttctctgtcctgtcaccccatccccactcccctggtggcctgactcccactccctggtggccccatcccccagttcctcacgatatggtttttacttctgtggatttaataaaaacttcaccagtt

SEQ ID NO: 104214 - DNA, 856 bp, Homo sapiens
aataagtcatagtgcgaggcgggtgtgaatcgtcagaggcgggaacctggatgacagtgccaccatttgccgtgtctgccagaagccaggcgatctggttatgtgcaaccagtgtgagttttgtttccacctggactgtcacctgccggccctgcaggatgtaccaggggaggagtggagctgctcactctgccatgtgctccctgacctgaaggaggaggatggcagcctcagcctggatggtgcagacagcactggcgtggtggccaagctctcaccagccaaccagcggaaatgtgagcgtgtactgctggccctattctgtcacgaaccctgccgccccctgcatcagctggctaccgactccaccttctccctggaccagcccggtggcaccctggatctgaccctgatccgtgcccgcctccaggagaagttgtcacctccctacagctccccacaggagtttgcccaggatgtgggccgcatgttcaagcaattcaacaagttaactgaggacaaggcagacgtgcagtccatcatcggcctgcagcgcttcttcgagacgcgcatgaacgaggccttcggtgacaccaagttctctgctgtgctggtggagcccccgccgatgagcctgcctggtgctggcctgagttcccaggagctgtctggtggccctggtgatggcccctgaggctggagcccccatggccagcccagcctggctctgttctctgtcctgtcaccccatccccactcccctggtggcctgactcccactccctggtggccccatcccccagttcctcacgatatggtttttacttctgtggatttaataaaaacttcaccagtt

SEQ ID NO: 104215 - DNA, 2590 bp, Homo sapiens
cggcggcgaagagacgcgggttgaggaagagggacggattgcccatgcgcttgggcgcacagcggcccgcttctgtgtggtctggaggtggagctgagaggggaatcacactctataaaggttcgcataccccactggcggattcaattgcggcagtgacgtcacagaggccccgccccgcccccacaagagccccaccgacgtggggttggcggtggtggaaggactaggagttggcgcgtgcgtactggcggcctctcccgcaccgaccggcctgggccccgcccccgggcgtgaggcgcccaatgcgcgtgcgcggcggcgtcggcgccagttatttctgtcccgccccccggcctcggctctttctgcgagcgggcgcgcgggcgagcggttgtgcttgtgcttgtggcgcgtggtgcgggtttcggcggcggctgaggaagaagcgcgggcggcgccttcgggaggcgagcaggcagcagttggccgtgccgtagcagcgtcccgcgcgcggcgggcagcggcccaggaggcgcgtggcggcgctcggcctcgcggcggcggcggcggcagcggcccagcagttggcggcgagcgcgtctgcgcctgcgcggcgggccccgcgcccctcctccccccctgggcgcccccggcggcgtgtgaatggcggcctccgcggcggcagcctcggcagcagcggcctcggccgcctctggcagcccgggcccgggcgagggctccgctggcggcgaaaagcgctccaccgccccttcggccgcagcctcggcctctgcctcagccgcggcgtcgtcgcccgcggggggcggcgccgaggcgctggagctgctggagcactgcggcgtgtgcagagagcgcctgcgacccgagagggagccccgcctgctgccctgtttgcactcggcctgtagtgcctgcttagggcccgcggcccccgccgccgccaacagctcgggggacggcggggcggcgggcgacggcaccgtggtggactgtcccgtgtgcaagcaacagtgcttctccaaagacatcgtggagaattatttcatgcgtgatagtggcagcaaggctgccaccgacgcccaggatgcgaaccagtgctgcactagctgtgaggataatgccccagccaccagctactgtgtggagtgctcggagcctctgtgtgagacctgtgtagaggcgcaccagcgggtgaagtacaccaaggaccatactgtgcgctctactgggccagccaagtctcgggatggtgaacgtactgtctattgcaacgtacacaagcatgaaccccttgtgctgttttgtgagagctgtgatactctcacctgccgagactgccagctcaatgcccacaaggaccaccagtaccagttcttagaggatgcagtgaggaaccagcgcaagctcctggcctcactggtgaagcgccttggggacaaacatgcaacattgcagaagagcaccaaggaggttcgcagctcaatccgccaggtgtctgacgtacagaagcgtgtgcaagtggatgtcaagatggccatcctgcagatcatgaaggagctgaataagcggggccgtgtgctggtcaatgatgcccagaaggtgactgaggggcagcaggagcgcctggagcggcagcactggaccatgaccaagatccagaagcaccaggagcacattctgcgctttgcctcttgggctctggagagtgacaacaacacagcccttttgctttctaagaagttgatctacttccagctgcaccgggccctcaagatgattgtggatcccgtggagccacatggcgagatgaagtttcagtgggacctcaatgcctggaccaagagtgccgaggcctttggcaagattgtggcagagcgtcctggcactaactcaacaggccctgcacccatggcccctccaagagccccaggcccctgagcaagcagggctctggcagcagccagcccatggaggtgcaggaaggctatggctttgggtcaggagatgatccctactcaagtgcagagccccatgtgtcaggtgtgaaacggtcccgacaccagtgaagggaagaagagcgagggacatctatgagcaaggcgcaaagagccgcacacatgcaaagaatgcgccctgcaaataaagcactggcagacccgcaaaaagacttcacggatattacaggcacgtcaaaccgcgggatccaacaactttcggtgacttcgagaagggcgcgctcggcgatcgaccacttcagggaacagaacggcggcccgcgaacggagcaaccacagggtgggcacaccacaccgatcgcgatgggaacatggcgcccgacgcggacgcacaagacgcggcgccaccgggccaacctaatcgcggccgtcggggaggtgaagcgaggagagaatgcggatcgcaaagaagaagaagaagaaaaagccgcgcggaactgagaaaaaccccccgtgctcgcggtcgctgccgcccacacgcgtgccgcacgccgcagccccccgagcgccacacagcggtgcccgacgaggcgacgagcccagcgggcagc

SEQ ID NO: 104216 - DNA, 2120 bp, Homo sapiens
cggcggcgaagagacgcgggttgaggaagagggacggattgcccatgcgcttgggcgcacagcggcccgcttctgtgtggtctggaggtggagctgagaggggaatcacactctataaaggttcgcataccccactggcggattcaattgcggcagtgacgtcacagaggccccgccccgcccccacaagagccccaccgacgtggggttggcggtggtggaaggactaggagttggcgcgtgcgtactggcggcctctcccgcaccgaccggcctgggccccgcccccgggcgtgaggcgcccaatgcgcgtgcgcggcggcgtcggcgccagttatttctgtcccgccccccggcctcggctctttctgcgagcgggcgcgcgggcgagcggttgtgcttgtgcttgtggcgcgtggtgcgggtttcggcggcggctgaggaagaagcgcgggcggcgccttcgggaggcgagcaggcagcagttggccgtgccgtagcagcgtcccgcgcgcggcgggcagcggcccaggaggcgcgtggcggcgctcggcctcgcggcggcggcggcggcagcggcccagcagttggcggcgagcgcgtctgcgcctgcgcggcgggccccgcgcccctcctccccccctgggcgcccccggcggcgtgtgaatggcggcctccgcggcggcagcctcggcagcagcggcctcggccgcctctggcagcccgggcccgggcgagggctccgctggcggcgaaaagcgctccaccgccccttcggccgcagcctcggcctctgcctcagccgcggcgtcgtcgcccgcggggggcggcgccgaggcgctggagctgctggagcactgcggcgtgtgcagagagcgcctgcgacccgagagggagccccgcctgctgccctgtttgcactcggcctgtagtgcctgcttagggcccgcggcccccgccgccgccaacagctcgggggacggcggggcggcgggcgacggcaccgtggtggactgtcccgtgtgcaagcaacagtgcttctccaaagacatcgtggagaattatttcatgcgtgatagtggcagcaaggctgccaccgacgcccaggatgcgaaccagtgctgcactagctgtgaggataatgccccagccaccagctactgtgtggagtgctcggagcctctgtgtgagacctgtgtagaggcgcaccagcgggtgaagtacaccaaggaccatactgtgcgctctactgggccagccaagtctcgggatggtgaacgtactgtctattgcaacgtacacaagcatgaaccccttgtgctgttttgtgagagctgtgatactctcacctgccgagactgccagctcaatgcccacaaggaccaccagtaccagttcttagaggatgcagtgaggaaccagcgcaagctcctggcctcactggtgaagcgccttggggacaaacatgcaacattgcagaagagcaccaaggaggttcgcagctcaatccgccaggtgtctgacgtacagaagcgtgtgcaagtggatgtcaagatggccatcctgcagatcatgaaggagctgaataagcggggccgtgtgctggtcaatgatgcccagaaggtgactgaggggcagcaggagcgcctggagcggcagcactggaccatgaccaagatccagaagcaccaggagcacattctgcgctttgcctcttgggctctggagagtgacaacaacacagcccttttgctttctaagaagttgatctacttccagctgcaccgggccctcaagatgattgtggatcccgtggagccacatggcgagatgaagtttcagtgggacctcaatgcctggaccaagagtgccgaggcctttggcaagattgtggcagagcgtcctggcactaactcaacaggccctgcacccatggcccctccaagagccccaggcccctgagcaagcagggctctggcagcagccagcccatggaggtgcaggaaggctatggctttgggtcaggagatgatccctactcaagtgcagagccccatgtgtcaggtgtgaaacggtccaggtccaggcgttcaaggctcactcgtgcaccttacgcatag

SEQ ID NO: 104217 - DNA, 1303 bp, Homo sapiens
cggcggcgaagagacgcgggttgaggaagagggacggattgcccatgcgcttgggcgcacagcggcccgcttctgtgtggtctggaggtggagctgagaggggaatcacactctataaaggttcgcataccccactggcggattcaattgcggcagtgacgtcacagaggccccgccccgcccccacaagagccccaccgacgtggggttggcggtggtggaaggactaggagttggcgcgtgcgtactggcggcctctcccgcaccgaccggcctgggccccgcccccgggcgtgaggcgcccaatgcgcgtgcgcggcggcgtcggcgccagttatttctgtcccgccccccggcctcggctctttctgcgagcgggcgcgcgggcgagcggttgtgcttgtgcttgtggcgcgtggtgcgggtttcggcggcggctgaggaagaagcgcgggcggcgccttcgggaggcgagcaggcagcagttggccgtgccgtagcagcgtcccgcgcgcggcgggcagcggcccaggaggcgcgtggcggcgctcggcctcgcggcggcggcggcggcagcggcccagcagttggcggcgagcgcgtctgcgcctgcgcggcgggccccgcgcccctcctccccccctgggcgcccccggcggcgtgtgaatggcggcctccgcggcggcagcctcggcagcagcggcctcggccgcctctggcagcccgggcccgggcgagggctccgctggcggcgaaaagcgctccaccgccccttcggccgcagcctcggcctctgcctcagccgcggcgtcgtcgcccgcggggggcggcgccgaggcgctggagctgctggagcactgcggcgtgtgcagagagcgcctgcgacccgagagggagccccgcctgctgccctgtttgcactcggcctgtagtgcctgcttagggcccgcggcccccgccgccgccaacagctcgggggacggcggggcggcgggcgacggcaccgtggtggactgtcccgtgtgcaagcaacagtgcttctccaaagacatcgtggagaattatttcatgcgtgatagtggcagcaaggctgccaccgacgcccaggatgcgaaccagtgctgcactagctgtgaggataatgccccagccaccagctactgtgtggagtgctcggagcctctgtgtgagacctgtgtagaggcgcaccagcgggtgaagtacaccaaggaccatactgtgcgctctactgcgacaccagcgcagtcatcagatcaccacgacaaagtgcaccacgacacag

SEQ ID NO: 104218 - DNA, 178 bp, Homo sapiens
catgaactatattatatattcaatgcaacatcttgagaccttagatagtatccactggccaaatatgagggcaattttgagagtataagtcacaccgaaagcctgtgacagttcagggtagcataagtgatatggattcaactccagcatcactttcttcatcagaaacatctatagg

SEQ ID NO: 104219 - DNA, 250 bp, Homo sapiens
tgagaaagagcacaaaataagtttatttcataggatagaaaaacccatgtgaaagggattttcccagttcagagcaacagagaaaatgggtaataaaagataatagcagaagatacaggcagtcatgctagaatccataaaacatacctacacattcttgctgtaaaataaatctcaaaaagtcccccctcaacagaatggagaatccagaaatcaagctgcacacctgcagccatttgatctttgacaa

SEQ ID NO: 104220 - DNA, 220 bp, Homo sapiens
tccccatatctgaggagaacgtccactgagttcttatctacagttacactagtgaagaacgctgggtctggaatcagaagcctcaggtcttagttctgtcatcaactattttgcgaccttggacaaaagacttgatcactcacagtcccagtttcccacaaggttactgtaaagcacacaatttaaaaaaagacaaaatacacataatagtatgttaact

SEQ ID NO: 104221 - DNA, 168 bp, Homo sapiens
tctccttccattccctttggaacccacccccactagggttccatctctatcactccactgcaactgctcttgtcaaggtcacctgaaaagacttaatgttaaatttgttatcaatgctcagccctatctcctttgacctatcagccagcagtatgcaacacagttaat

SEQ ID NO: 104222 - DNA, 389 bp, Homo sapiens
ggtgacagagatgtttagaatcaggaatcttgtgtatttagggaacccactggtgtaagaaaaggagttgttaatgttggtgctgtatagccagggccgtgggaatatgtgtatgtaaacggtgggagacaacttctgcttcaagctctaccttccctcttctaacctgtattggaattcaaaattcaatacaccaagcactttctccctgtcttcttcccacctcctaattttgttctcaggagaatctgttcatttccagggcctctgaggtatagcacccttatgattatgccaaaaattaaaatattcacagtgtcaggggaagtagaatgaatatgtgatgctggtatatgtaggtgatagggagtggtgggagctgtggtgaa

SEQ ID NO: 104223 - DNA, 176 bp, Homo sapiens
ctgccccttctgtgttttcagctcactcaaggctccagtcataccataattctccctttcctcatcagacctgggagtgtattctgttcccattgttgctaaaccttgaatgcattcactcggtttccctcaatagcttctctccaaaatcattttctccttcgctgataccatga

SEQ ID NO: 104224 - DNA, 225 bp, Homo sapiens
aaaaactttaacgacttcctagttgagagaaaacttgacatataaaaggctgtgaatttttctgcttggaggaagagcccaaccttggttgctttgaagttacaagcccccttgtgccaggtgaggggcttgtgagtcatttttgtctccatttgaggaagagtggtattcgttgtgactaggagcaagggaaagtggagttatttttgtttgtgcaaattattt

SEQ ID NO: 104225 - DNA, 104 bp, Homo sapiens
tgttcttggggaagatcccgacttagccattttccagtggcacctcttccaccatgagttcctgaggcagtccgatggggctactttattccagaacaatcaca

SEQ ID NO: 104226 - DNA, 465 bp, Homo sapiens
atctccccaacctcacagatcttatctccactggcagatggtcaaattctttccactgacactgcctcaggcataagtggcattagcctggaattcaagcagcttttgccactacctggtaagcctcggtggtgggaagtgtccctggagactgatggaagcagagctaaaagagccacatgaggctgggcacagtggctcacgcctgtaatcccagcactttgggaggctgaggcaggtggatcatttgaggtcaggagttcgagaccagcctggtcaacatggtgaaatccggtcgctactaaaaatacagaaattagacaggtgtggtgatacacgcttgtaatcccagctactcgggaggctgaggcagaattgcttgaacccgggagacggaggttgcagtgagccgagaccgcaccactgcactccagcctgagcaacgaagtgagactccgtctcaaa

SEQ ID NO: 104227 - DNA, 984 bp, Homo sapiens
agggtgggaggcttcaggactgcatgaactgagtagaaagatttggcctttggggacagagcatgcaacgggcagctgttcccggtgacctgggcatctgggacttactgagggagagacgtgatcttggcctagctgaccaccatcgaaaccactcatcggaggcgtggatgcagtttgctgggaagatgagcaccgatctgtctggtggtcacatggagggctttgcagatctctgacactggatatttccccttgccctggtgccaaggactaggggagagatcactctgggcttgagtcagggacagggatgccaggcacagcgaaagaagatgactgtggtacaaacccagctgatgaagtggaaaataaataaaagagaaggaatcaagctggttcatgtaggaagcatgcacacactcatcccatccattgttccacatcgggcacctccctgagctagctgccactcctgctgcactctgccactccttggaaggcagcacagggcagtggttagagccttctctttcagtgtcagacaggcctgggttcatgtccaggtctgccactttacttactagctgtgggatgctgatgagcccaagctctctcctagcctgcttcttgatcagtaaaatgacaatgactagagtacctagtatatggagttactgcaggacttgaatgtgccaatacatctaacatgcttagcatagggcctgatcatggttggcatttgataagtgctagttgttatcattattaatattactaatcatcaaagaaagatcttcagttggatatttgggcaaaattatgaaatttatccctaatcttttgatttacagattggtgtggatctgttattaagtgttttctttttttttttttaagttatcttgtttcctgactcctgaattgaagagtgtttcttctatgaatttcttttcttacagaaataaaattgaaagaactttt

SEQ ID NO: 104228 - DNA, 212 bp, Homo sapiens
ccagggagtggctatcccacacatgctcaagggaaggaggtattatacaggggtgtgcacaccaagggggctgggagttttgctttccacaaagctctggttcctttctttcttcctctctctctctctctctctctctctctctctccccctctctccccctctctccctccctcctccctccctcccctctctcccctctctcccctctc

SEQ ID NO: 104229 - DNA, 165 bp, Homo sapiens
ggtgaccgtttgtgctttgaagctactatcataggaacatttcataggctaacattagtaaggcacagattgtcaataagaaatttggatatcagcacacatggatttgctatacagatgagtaagagttttcaccaattaagaagtacctaactaaaaaaaaaa

SEQ ID NO: 104230 - DNA, 468 bp, Homo sapiens
tttttttttaaagctggtaacagacttcaaaaaaaaaaaacaacttctggacaggccaggattacagcactttgggaggctgagatgggaggaacgcttgagcccaggagtttgagaccagccttggcaacatggcaagaccccatctctattttatataatttaatatatagtaaaagaaaaaaaatacaacttcttggagaggtcaataaacctatacacgtcttctccagtgagcctaaaattgttttgtctattaaagattaaattatgttaaatttatattgatgctatctgtactttgcacagatattttttgttgctagttaacgtctgcaccagcacagaccactaagcattttggataaagtggatactctaaagatgtgaggcctagagaaatcaatgtcaagtccacaggcatcacttgccattaaggatttaaaggtctactatatttttatattc

SEQ ID NO: 104231 - DNA, 566 bp, Homo sapiens
tagcataaaatagttgctcaataaatccttattgtttaaaatcagattcattttttttcttccttcaaacttcccttagagccatgagaagattgagatgcaggttctaccataaccaccctggcaccttactaaaatccatccagccagatattccttcattttggttctttgttttttattactatgaggttgaaagttgaaggtaaaaagctgcaaagctgaaataaccaaagatctatctatctgaagcattcagaagaaagaagaaggactcaggatgtactctgaagggacttacgtagttactaggataatgacatgtaaaggagtgagaaatctaaggagaagccaggccaagctggtccataggacagtcactgtgtgtgtgtgtgtgtgtgtgtgtgtgtgtgtgtgtgtgtgtgtgaaagagagagagacagacgagggcagaggagagagagcgaggctttgagagaaagagcaagtatttttggagtctgatttctcctctgagcctatgaatatttgtactgatagagctaagaatgtgagagttatttttg

SEQ ID NO: 104232 - DNA, 932 bp, Homo sapiens
ggctaactcttaaagtaattagcacgatgattggaacggagcattctctccaacacagcatttcttttggcactttgcttcttgtgcagtttagctccagaaagtattaaggaatgactttagtgctcatttggatgcagtaagtggtttgatctcagggtggcaaaaagaatgctttttttataccttttcacattcggataacttgtttagaagacagaggttctaactaggttttggcctattaagaactgcaaactagcagcagcagaactctggctaaaggggcaagcttattaggaaattgagtatttaaaagttgagctaccatatgatccaacaatcccactgctgggtatatacccagaagaaaatcggtatatcaaagagatatctgcactcctatgtttgttgtagcactgtttataatagctaagatttagaagcaaccttagtgtccatcgggatgaatggataaagaaaatgtacctatacgcggccaggcacggtggcttgtgcctagcactttggaaagccgaggcgggtggatcacctgaggtcaggagttcgagaccagcctggccaagatagtgaaaccccgtctctagtaaaaatacaaaaattagccgggcttgtggtgtgggcctgtaatctcagccacccgggaggctgaggcaggagaatcgctggaacctgggaggcagaggctgcagtgagccgagatcacgccactgtactccagcctgggcgacagagcaagactccatctcaaaaaaaaaaaaacaccacaaaaaaaaggggggggaaaaaattccggggggcatgccccgtttggaaaagggcccaggggaaaaaagggggggaaaagcggggaacgggctggagaccccggggcggggccccaaacggaaatgggggacctcgggtgaaca

SEQ ID NO: 104233 - DNA, 190 bp, Homo sapiens
atgcagtattaacttggcagcaatgtgaagcagatgtattctctccgtgctagtaagtcggttagaagagttctgtctctaatcagcagcaaaagcagaggtgacttcaggagcatcagggagcacaggaagagagaagcaacaacaggaccatccctcacaaacccctactcaccaggccatgaagggg

SEQ ID NO: 104234 - DNA, 472 bp, Homo sapiens
agcagaataaaaagtcagtctgcttcataaggaccacctctggaaaattctgtgagtgtgtaaaggaccccaccagataaatagcatgatctcttggcacagtcggtttcactctactggttatggtaaagtgagggtgaaatacctattttgtattctaccattgtgataaatgtgttcataaataaacgaaacccaaagtttcaaggacctgggaagccccagtggaggcctgtggcagaagagtagagcagggattctcaaccagggctacccatggaaatcacttaggcagctttaaaagacaaatgccttagtcccacttacagagatccaaatttgtttgctctgcatgtgttcgggctatctgaatgttgaatctggccagttcaactctgcagctaaagtggaagagctccggtgtaaagccttgctagataaggccagacgcacgttcagcgacacccctgga

SEQ ID NO: 104235 - DNA, 721 bp, Homo sapiens
aacgggttctttttaattgacactggtagaggcagtagacttccaagtaagctagacctgctggaattccagtactgctagttttgagagcttggtcgggttaataggctgagtttactacatccagatttgaccaataataccacccttgaaggacatttgtgaggaatagaaataatcaatgcagagtgcctaatatgagtatctggcagtgaatgctgccagtcaaagtagttgttattgttatgatataaacaaatatttatggactaagttgtagtattctgatataaaaataaggattataatttttaagctatatatagaatttatatttaatttttcctatttggaagtgtggtatatagaacaagttaccttcaaacatggtacacatttaaagcataaatagtgtccattaaattgtagatgaattaatgatatatccatgacatataaagaaaagattggaacttgagacatccactcttgacttttgaagagcgttttagaggcttccaaccctgcttgttcacagctattgaggccttgacctctgtgggagatagtcttgagtttggtgggtggatgggtccacagaagagacaactgtttttcatgcttttgtgttttttgaaatctgacattgaggatgttatttctgctgtatatttaccttgtattcaagaatcattttggtatgaggtcagaacactagtgt

SEQ ID NO: 104236 - DNA, 436 bp, Homo sapiens
acgagacacgataccagcttactccgagtccataggacgaccttattagaaacgaaagcacatatccacacaaaaacttgcacacaagtgttcagagcagccaaaaggtggaaacaacccacacggtcatcactgaacagtgtgatgaagattttatcacgacgacctcattgtgagtggatggacaaaactcggtctatttatacaatgaaaccctagtcagcaataaaaataaagggctgagagatgctaccacgtggaggagtctcaaagccatgacgtgaagtggaaggagccagatggaaggatagcgcatggagcaactctgttcccacgagaggtccagaaccggcaaacccagagaaaaagcgcatgggtgtggctgtcaggccctgggggctgactgctaatgtgtgatgaaaatttcccttctaaa

SEQ ID NO: 104237 - DNA, 231 bp, Homo sapiens
aaagaagcaatttggtgatggggcccttagaatgtccttgaaaacagctggaatttactgctagcatatattgggtcagatgaatgagggagcatgggtttggctgatttgcaatgttcaagaaatattgatattcttagaagacaatacagaatatatgttgggtcttattttccaaaatgtcaaagtgtccttcatatgccttttgttctgtgagataacagttgttgg

SEQ ID NO: 104238 - DNA, 336 bp, Homo sapiens
ccagatgactttatttctaccactaagtaggcacaaagaaaaaaagaggctgttttaacttaactccatctttcttcacattgtttgacacctgaaaatagtattttgcttaagtcacagaagcccatatagtgcgtcttcaaaaagaatgttatgttgcgaatacacgacagaaagtccactttatatatctgaatttcacaaacttaggacctatgctcttttgttctcaaaacaggctcattaagttaaattataagaggtcagctgggggaaaaaagtttgaaaacagggcactggtttgctgcttttaaaacgtcattactctgactagtt

SEQ ID NO: 104239 - DNA, 288 bp, Homo sapiens
cagcagccaatacaaagcctcaatcccacttggcattcggcacttttgcatcagaaactgcctgtgttattgtgccagtggttgccctaggtgttcatcatgagcacttaaaatgattgcttttgcagttgcagatggctgtaccggttccaaacaaagagggtcactgagggctctgcttatagagtgcagtttctggaaggaattcaccacagattgtacaatgaagcccaagctcgctggactctgctggcccagggaatttttacaaggttaagtcagccataa

SEQ ID NO: 104240 - DNA, 330 bp, Homo sapiens
tgcttgttgagtcagtgaggaaaaatgtgccaggttagataatactgagcaagttcctctgctgcaggacttctcaggacctttaatctctgataccctgtccgagaatgtgatgattattagaccttggcacccttcttcaagaaacaaccaccaacatctcaatgaatgcttgccttctgagcactgctgcctgggaaaggctattttcctgatactattgtgttttctaaaaacattgtgaaaaaaaaaatgaaatgtctccaacagtgaaaataagaacaactgtaattatttatactcattgacaacaagaataggatttattct

SEQ ID NO: 104241 - DNA, 544 bp, Homo sapiens
ctctccccctccttccctcctggagctgggacacccttcttttcctgcccttggacatcagaaactccaggttctcctgccttgggattccgggacgtgcaccaatagccccttgggttctcaggccttcagccttaaactgaaccagttatggactttcctcattgtctagcttgagatggcatagtgtgggacttagcctccataatctcatgagccaattccccgaataaatcccatctctatccatatgtatgtatcctattggtgctttctggagaacacttactaacacatcaggtaagggcaatcctcaagcttctaaacagtcatgagtcatgctatgctcaacccacaagcacagttgaaagcaaccggcaatctagtccaagagagacaaaaacaataacttgctatacagcagacctttatatggtgtcaacacatagacagttcctcttcctttaaatgtgcaagactctgacgagatgccagcacacagtcatagtgaacaattgagctaaggagaacaggaagctggaag

SEQ ID NO: 104242 - DNA, 346 bp, Homo sapiens
tcgagatggagtcttgctctgtccacccaggccggagtgcactggtgtgatctcagctcactgcaacctccgcctcccgggttgaagccattctcctgcctcagcctcccgagcagctgggattacaggtataagccaccactcccagctagaaatcacaattttcacttctgtcatcatcaatgaattttgttgttcgtgacctttaaatggaaccatacagtatgtactcttttgtgctcagatgtttttttcactgagcatagtgtctatgagtactatgtggtggtgttggtagttcattccttcttactgctgagtagtattccacctttggctatgccaa

SEQ ID NO: 104243 - DNA, 208 bp, Homo sapiens
ttgccagcctcctgtccctcaaacatgctgttcctccttcctggacaactttgcccagcacttactcagcatgcaggtctcagcttcagcagaacctcctccaggaggaacctcttctcttgagttcctgagagcctctcttgttctcctgagtcctcaacctatgtgctatctttgcctggtcaccatcagctctttgatatagacc

SEQ ID NO: 104244 - DNA, 333 bp, Homo sapiens
aaataaatgagtacatgtaagatggggctgtctcacactaaggggtcaggaaggggctttctgaggaggtgatattggcactgagacctgaacaaccagaagaatcagccatgtaaggattgtggggaaaggcatcccaggagacgagaagagcaaatgcaaaatccccaaggggtattgaggtgtgtgcatatgaggggcagagaaaaccaacacagccgccacactgtgagcaaaaggtagggagaggatgttgtagaagatgaggatacagaggcttataggagcccttctgggccttaaaggtcacagcaaggagactgatgttcattt

SEQ ID NO: 104245 - DNA, 383 bp, Homo sapiens
aagactaaaggcaaaaggatctggctgtaaacactgtgctctagctgatggagtttttttcccacagggtgtgggttaacagttctgataccactgtgcaggtatactgaaaatgaaccatgaactcaaggaatggtgaattgacaggtaggcaagtggaggaggctagaacgatccatctggtaacagatgagggctggagacatcagcacacactcatgtttggcttcatacagctacagatggccacagacagaaataccgatagattcctgtatagacataggttagtatgtatacatatatgtatttgctctgccagctgagagcctgaaaaagggatacttcagtagcaacctgaaatgatgatagtgaacgctgcc

SEQ ID NO: 104246 - DNA, 201 bp, Homo sapiens
cccaacctctcttaacctcgtttcttttcctataaaatgcagcattatctaatgaccttacaagctattatgagggccaaatgactataatgaaactgtacttcagaagtgctatacaacttgtagcacatatattcatgatgtaaaacagcaccattagtaataataaacatgcatctcatgaaaaaaatttatgccact

SEQ ID NO: 104247 - DNA, 702 bp, Homo sapiens
attttgacatctttgtcagataatgcaaaactcaatccttaagaagatctttgcattatctgacaaagatgtcaaaataatgatactaagtatgctcaataacaaaaatagaacaaagatcttcttaaggattgagttttggaaatttatttcttcaagtggggtatgttttctgtcttttttttttatgttacgtgatccttttatgaaatttgaaaacttaaaaacagccatctaatctaatatttaaagacttgcttaaagaatggctgtagcaatgagccacgctatagattttttagtgcttcacaaacatgttctcagttatgtctttgaacttttgtgtgtaatttctaagttaaagagattttttcctcattttcttgtcagattctataatcttttgcttccttagatgactgtggcatggcagttcctctagtattataacaacattcaccttctagcagatacaaactgtaattctcattactccatcattttcatgttaagggagacagactctattaatcagaactttaaacagacctgttgttttagatttctcttgaggataatactgggagttgattgtgttttacttagaccaattgctgttgaaggaaagaaaggttgtgttggaaagtctttaagctagacctggttaccttctgcagcatagaaagtattactggaatgtga

SEQ ID NO: 104248 - DNA, 759 bp, Homo sapiens
gtgtcaaaactggaagacaaccagtcacctttctgaagtatattttcctagctgttttcctgatttaatcttagctcaataagcatttcttaatgttggcatcatttgctttctgtatagactgagaattttcaaaacaatcaaaacctgctgtctctttgtttaacagtctgcattaagctgctcttgcattgctataaagaaatatctcagctggcgcagtggctcatgcctgtaatcccagcactttgggaggccagggcgggcagatcacctgaggtcgggagttcaaggtcagcctggccaacatggcaaaaccccatctctactaaaaatacaaaacttagccgggcgtggtggcaggcccctgtgatcccagctattggggaggctgaggcaggagaatcacttgaacccaggaggcagagtgagccaagatcgtgccattgcactccagcctgggtgacagaacgaggctccttctcaaaaaaaaacaaaacaaaacaaaaaaaactcagcctggccaacgtggtgaaaccccgtctactaaaaatacaaaagttagctgggcgcagtagcacatgtctgtaatcccagctactcaggaggctgaggcaggagaatcgctggaacccaagaggcagaggttgcaatgagccgagattgtcattgcaccccagcctgggtgacagagtgagactgtctcgagaaaagaaaagaaaaaaagaaatacctgaggttgagtaatctataaagaaa

SEQ ID NO: 104249 - DNA, 447 bp, Homo sapiens
caagaataatataaccttttttaaaaaaatactaccttcttcatacataatgggtaaagataagcactatattggatccttatttgaagtgttcagttcccagctttctcagtgtaattccattcctctttaactcccacttggacaaaagtacatatgaatgaataaaattgatgttgtagcaagaatccaaaatttactgtgctttatcgaaatgagtaattctttccaaaaacttgctgtgattcaaatgatcatgttatatccccatgtttccacatagaggctgagaatagttaacttggaaccttctatggagaagggaagaggctggttattccttacattagaatacaaaggaagttaaattacaaaggaagatgactatgatgtggcatagagttttacaagtgagataataattatacgatatagggtagttctgat

SEQ ID NO: 104250 - DNA, 312 bp, Homo sapiens
gcctactactactatactactactaaattcacggcgctcgactttaaaaatttttttagtagaggtggggtttcactacgtattggccaggctggtctggaactcctgacctcaggtgatccacccaccttggcctcccaaagttctgggattacaggcgtgagccaccacaccgggcctccctgttaagcccagtttatccagtatttctaggtgttttgtacaaaagagttttcagggcatttagcctaacataaagcagaaacaaaagtcaggatgagtcaagtaacagtatttgagaaaacttcagag

SEQ ID NO: 104251 - DNA, 278 bp, Homo sapiens
agtagctgggattacaggcatgcgccaccacgcctggctaatttttttgtatttttagtagaaatggcgttcaccatgttggtcaggctggtctcgaactcctgaactcaaatgatcctcctgctttggcctcccaaagtgttgggattataggcatgagccaccatgcccagcctggaattgattttaatgtatagcatgaggtttgctgtagaattttatctgtttatgaaatgatctatgtgaagataattttatttcttcatagttacagtcac

SEQ ID NO: 104252 - DNA, 140 bp, Homo sapiens
tgagaattggagcgggttccagatgtctgcaactgtgaggagggctgctaaggagaggcagctccgtgttttatgtggaagctgcatagccttcccgtgggtgtccacgcggtcgctgggagcgcatcatctgccttggt

SEQ ID NO: 104253 - DNA, 706 bp, Homo sapiens
taccgaaaaacagtacggaggttcctcacaaattaaaagtagaattgccatacaatccaacaatcccactgtggctagatattcacaaagcaaagtgaattatttccaaataattcaaggagatacttgcacacccatgttcatcacaagactatttccaatagccaagaggtgaagcaactcaaatgtccatcaacaggtgaatagataatgaaaatgtggcatatacatacagtgaaaaaccatgcaaccttagtaaaggaaggaaatcatgtcacatacacacatggatgaaccttgaggatattatgcgaagtggaagaaagcccagtgaccaaaaggataaatacctataggattccccactccctatgatgtattccatagcagtccaaaatccatagacacagacagtagaaaggtggttatccaagggctggtaggagagggagttagtatttagtggtatagagttttagtgtttcccgggtaaaaatgttcctagagatctgttgcaaccatgtgaatatacttaacactaccgtactgtacactgaaaaaatggttaagaggataaatttaaatggttaagaggaaaaatggttaagaggataatgttgttttgttaccacagtagtaacttttaaaaaccctcatgtatgttctttccctttcatggcaaataaacttaaatgtggaaaaaaaa

SEQ ID NO: 104254 - DNA, 281 bp, Homo sapiens
gaggagtggagtgggccaaatgcttgtaaactgcctgggagagaggtagagaatggcaagtggatctaaaacaaaataaaatacccagaccctgctgttggcaaaacatcaattggcctagttaatacaggggaaacttaggggaaccttctggttagactgagaggtaaaactaaagaataactggagttgccagaaaagtggatggtagcatgatgtcataaatttgacaggcagacctgcatgttaggaaaagcacacggttcaggaaaggctcaagt

SEQ ID NO: 104255 - DNA, 853 bp, Homo sapiens
atgaaataataaaatatttagtacagtgcctggcatacaataagtgctcaataaatgttaacggctattttaaattctattcattgtaatggcagataataagggatgactagtaatacatttatcaagaaatctgcagaatttagattaagcatacttaaaataactcttttaagagataaagaggaatccatacatttcttaaatagggagattcaaaactgtaatgatgtcttttatttctaaatatgttaggtcagtgtaccatccgatgcaaaatctcataaggatttttttaagtcttaaaattagttcctagttaatctaaaaggataagtatttagtaatactaagggaaattttagaaaaatattttgagaatttttacttaccagttttagtatgatatacaatataccgttgtacataccataaagttaagagaacttaaaccctatggtataaccataggaatagatatgcttatctattcaggcatagtcctgaaatagtttatgataaaggtgttggtatagctatgtgagaaagagaaactgttcattaattgtgacaactcttctccagtcatctggaaataatcttaggcctaatacattctggaaggctcataaacatgtaaaaatgaacattcataagcatggaaaaaaaaataggtgaatgttaatatatttaatatattgcagtgaggaagacccttctaaggatgattgaaaagtaagaaagcataaagtaaaaattgtcgggttaaaattagtcatttttatactgcaaaatatctaaagttagaaacaaattatggaatgggggaaatatctgtaacacaaaatgctaa

SEQ ID NO: 104256 - DNA, 794 bp, Homo sapiens
tcccggggaatgcaacagctgattcacctgctccacgctgattaataatcaaactaccattgtgtggggcctatcttcctactggacctcaaaacccacctactccacaagtttatcttcacaattatgagctacctgcttcacgtcacactacagcacctaaaagcaaataataaagtttattcttgagttaacctgcctctgtgttcagccaatccctcctgcacgtgagtgatgcacctggatgctgcataaggagagatggaaatacctaaggtgtggtccttacttccaaggggcttatagcagaacgaagactcgaaagcaagcacacccacaaccacaacacagccgctggcacacacagcaggaaagacaccgggtttaatggagcagagaaagggggcgtcatctccaggcacagctccatgaagaagatgacattgacctgggagctctgagccttcatataatgagtaagctttcagctggaagaaatcccaagtggagaaacaggaagctataaaagagcaatggttttggattcacaaaacctgcctgagtgaacctggttgccattctagcacagagatcctgtctcaaaaaaaaaaaaaaaagaggcctgagagaacgtgtttatgtcttttcccatgtgaagacacagctagaaagcaccatccttgaaactgagagcaagccctcatcagtcagtgaatctgctgatgccatgttcttggaattcccagcttccagaactgtgagcaataaatgtacatagattgcaaattaaaaaa

SEQ ID NO: 104257 - DNA, 426 bp, Homo sapiens
tgggcaggcagctgggggctgtcacagcacacacacgatgccgacggagtcaagatctcggagtagaaagcaaagcggtgagtaccaggattataggaaaggggaaacggagacgagagggaggcaggtgaaattaacatagtgaaccataaactggctgccctgaagacttcagcaaggtactctactaaagaatattttgatgagatatctggaaatggaagagttttcaaacatacggaaattaaaaactgaatcaaattaactttcatttgcaaacaaagagaaggtttccaaccaaacccactttttgtaaccatcatgctgttttagagcagcgatatacccaaatggcaaacatagccagaaagtcaaatcatgtgttaaacgggaagtaaagggggcagggggaggactgggcaacac

SEQ ID NO: 104258 - DNA, 530 bp, Homo sapiens
gaataacaccagtgagggtgaaggatacagaataacaccagtgagggtgaaggatacagaattggggcaagggtgggattgaactggtgatgctgtttaatggagacctcagctgacctgaggctgtcctttagggttgtcctaaatgaagcaagtggggctggccttctctatcctgactcaagtaatctttcatgcaggctatttccaagaagtggggtgtggccttgggtgagcgacttaatttggatgagagcattccttgaagaaagatttagatctacattacatttctagatggtattgcacaatcggatgtaactatttggccattttcaacccattttcttcttttgtaagatgccgaaaaggaagaggggaataggaactaggaaggatatagattgaagcagattagctgtaagatcatttaaagtatgagaggtttttgggcagtatcttgaattttatatatttctcacttacctttctctgtaaatatttgagggaaaaaaaggaaatcattcttt

SEQ ID NO: 104259 - DNA, 99 bp, Homo sapiens
agtgcttattactatggaccggcatgtcccccacctcaccaaatttatatgttgaagataatgctgaatatgatgcttcggaaatgagccctttgggag

SEQ ID NO: 104260 - DNA, 485 bp, Homo sapiens
tgatgacagatttctgtcttccagtcccgatctgttccttcacgaaaatgagcccagtagcccgtccaagccagaaatggacttttagcccccaccccctgccaactctgccctttccctcatccccagttgcttaaaccaaaacggattcctcttcctctcatgatccaaactcctgagtcccttcaccttttgcctacactatcacagtgacctccttgctgctttcacactggagagcgtgggctccctgtgatctactctccacatggcagccagtgtcatctggtaaacctttgctgaaaccctgccatgcccttcagttgccctggaaacctgaactcatcctcagcctggctcgcagagccctcatgccgctgggacgtcacgttatgtccctctcctgctggcccgctgcacccagccgcaccacatgccggccgcacctcacacacgctggcctcttggcccttcctcgaacacac

SEQ ID NO: 104261 - DNA, 171 bp, Homo sapiens
catcatctcatatagttacctttctttttgtgtgataagagtctccaaaatctactctcttagcaaatttccaatatacaatacaatattaactatagtcttcatgttccacatgagatttctagatttattctcctataggaaccacaactttgtactctttgacctaca

SEQ ID NO: 104262 - DNA, 474 bp, Homo sapiens
actatccaaaaccacacgaatctcacatgaaatgatcaaagcatgagaactcctcaccgcccagcagtcccactttagcccactctacacacaccatgcaaagatctacacacctaaaatgctgccttcaacacatcagccaataaacaacttataccatctctctgtgctcttaaggctgttgatcatctgtgctgttcttggaaacttctccctgatgacaagcacctctcttctactcctctgccggtctcaactactgtctcaactcttgctacccagcctgcaattaatccttccctaaaggtgagtctgtcacctccctggccgtctccagctttctctaacttcaaccaggcagagactcctctacctgcttccggccctggtcacagtcgctagcctgacccaacaacctgctgccaggtggatgcttcctccagacaatgtctcatgagtgccccacactgaaca

SEQ ID NO: 104263 - DNA, 744 bp, Homo sapiens
cttttaatcactatgctatggttgccgttaaggtattttaaaagtcaggcctaagcaaatgaaatagaatatttatcaaacttctttttttgttgttgtttttgaggcggagtcttgctctgtcgccaggcaggagtgcggtgccgcgatctcatctcactgcaacctccgcctcctgagttcaagcgattctcctgcctcagcctctcaagtagctgggattacagtcacctgccaccacgcccagctaatttttttgtatttttagtagagacggggtttcaccatgttggccaggatgctccccatctcctgactttgtgatctgtcctcctcagcctcccaaaatgctgggattacaggcatgagccaccatgcctggcctatatatagttttttaagacaatgtagagaggatacaaaatatttatctgtagccataaaaaagaacgagatcatttcctttgcagtgacatggttggagctggaggccattatccataacaaattaacaggaacagaaaaccaaataccccatgttctcacttataagtaagaactaaatgatgagaacacatggacacacagagtgaaacaacacacattggggcctattggaggacagagggtagggcgagggagaggaccaggaaaaataactagtgggtactaggctaaatacctgggtgatggaataatctgtacaacaaacccccatgacacaaatttacctacctaacaaac

SEQ ID NO: 104264 - DNA, 732 bp, Homo sapiens
aaggtatgaattttgcaaggtgctagtatacaagatcaatatatataaaacaattatttttctgtaaactgccgtatactaatacacgtacaaatgtgtgtgtgtgtgtgtgtgtgtgtgtgtgtgtgtgtgtgtgtatcagctggtggagtgaagaattaatattggtaagttgtccgtttcagccagaatccagaaagctggtctagggcagcagtccccaacctttttggcaccagaaactggtttcgtggaaaaaaatttttccatgggtagcggggggatggttttggaatgaaactattctcagacattagattctcataaggaatgtgaaacctagatcccttgcatgcgcagttcacaatagggttcgcactcctaagagcatctaatgccgctgctgatctgacaggaggcggagcttaggcggtaatatccgctcacctgccactcacctcctgctgtgtgacccagttcctaacaggccacagccagtactggtctgtggcctgggtgttggggacccctggtgtatggaattgctccaagacatattggccttataagactttttaagacagcatggatcttgcacctacctgatccgcatctcatgtccttgagcttggggagagatcccgcacagatagccgtgtggttggctgcaaggttaaattagaagagaaaggcctgatggtgtcaatgctgacagttgttggtttctgcaaa

SEQ ID NO: 104265 - DNA, 765 bp, Homo sapiens
cttcagataaggtgccttttgtcacttggccactggtaggttctgcgaaaggaagtgatgtcagggatttagggactttcttcgcagaattggaaaaaactactttaaagttcatatagaaccaaaaaagagcccacattgccaagacaatcctaagccaaaagaacaaagctggaggcatcatgctacctgacttcaaaccatactacaaggctacagtaaccaaaacagcatggtgctggtaccaaaacagagatgtagaccaatggaacagaacagaggcctcaaaaataacaccacacatctacaaccacctgatctttgacaaatgtgacaaaaacaagaaatggggaaaggattccctgtgtaataaatgatgctgggaaaactggctagccatatgtagaaagctgaaactggatcccttccttacaccttatacaaaaattaattcaagatggattaaagacttacatgttagacctaaaaccataaaaaccctagaagaaaacctaggcaataccattcaggacataggcatgggcaagaacttcatgactaaaacaccaaaagcaatggcaacaaaagccaaaatagacaaatgggatctaattaagctaaagagcttctgcacagcaaaagaaaccaccatcagagtgaacaggcaacctacagaaagggagaaaatttttgcaatctacccatctgacaaagggctaatatccagaatctacaaagaatttaaatttacaagaataaacaaac

SEQ ID NO: 104266 - DNA, 857 bp, Homo sapiens
  misc_feature (618)..(618): n is a, c, g, or t
  misc_feature (621)..(621): n is a, c, g, or t
cctagaggatcccgtctgcatttcagccgcccagcagccccgactattcgtgggcatgatcctgattctcatcttcgccgaggtgctcggcctctacggtctcatcgtcgccctcatcctctccacaaagtagaccctctccgagcccaccagccacagaatattatgtaaagaccacccctcctcattccagaacgaacagcctgacacatacgcacggggccgccgcccccagtagttggtcttgtacatgcgcagtgtcctagtgcccatcgtctgtttccccggccttgcccccgcccgccccgtgccgtggacatctgggcccactcatcgcccctccaggcccccggcgccccaccccctagagtgctctgtgtatgcggatgatttagaattgtcatttctctttactggatgtttatttataaagatctggcctgttcctgcgtctgcggagcggcccttgtctcccagctatctataaccttagctagagtgtcgccttgtgggttcctgttgctgagacttcctggatggagccgccctcaccgccgggcccgtggccctgcgcggagctgtgtccaataaagttcttggatgtgaaaaaaaaaccanaanaacacggcagggcccagtgcggggcggacaacaaaggcaggcagggcccaggtcatggggtcccagaccgggttcggtccagggagactgcgggcccaaaggaaggaaaacgcagcacaggtacggtagaccggaagagaagacgcgaggcgggagacacctgaccaaagcgcggcacgctggacaccaccaccgcgcgcgcacaacgatcacacgcaacggtgtccacgcccgcc

SEQ ID NO: 104267 - DNA, 1961 bp, Homo sapiens
  misc_feature (1)..(3): n is a, c, g, or t
  misc_feature (8)..(8): n is a, c, g, or t
  misc_feature (11)..(11): n is a, c, g, or t
nnnaagcncgngcggagggtgtgagatggcagacaggtttgcaggaaaccctcagaaagggggctggaggatttagccactctgtcctccccttccggcagtccagggcctcctcccgagcacagcggcgctatggactctccaggatacaactgcttcgtggacaaagacaagatggacgctgccatccaggacctggggcccaaggagctgagctgcactgaactgcaggaactgaagcagctggcgcgccagggctactgggcccaaagccacgccctgcggggaaaggtgtaccagcgcctgatccgggacattccctgccgcacggtcacgcctgacgccagcgtgtacagcgacatcgtgggcaagatcgtgggcaagcacagcagcagctgcctgccgctgcccgagttcgtggacaacacgcaggtgcccagctactgcctgaatgcacgcggcgagggggccgtgcgcaagatcctcctgtgcctggccaaccagttccccgacatctccttctgccccgccctgccggccgtggtggccctgctgctgcactacagcatcgacgaggccgagtgcttcgagaaggcctgccgcatcctggcctgcaatgaccccggcaggaggctgatcgaccagagcttcctggcctttgagtcgtcctgcatgacgtttggggacctggtgaacaagtactgccaggcggcccacaagctgatggtggccgtgtcggaggatgtcctgcaggtctatgcggactggcagcgctggctgtttggggagctgcccctctgctacttcgcccgggtctttgacgtcttcctggtggagggctacaaggtgctgtaccgcgtggcgctggccatcctcaagttcttccacaaggtgagggccgggcagccgctggagtcggacagcgtgaagcaggacatccgcacgttcgtcagagacatcgcgaagacggtgtcccctgagaagctgctggagaaagcgttcgccatccgcctcttctcccgcaaggagatccagctcctgcagatggccaatgagaaagccctgaagcagaagggcatcaccgtgaagcagaagaggtccctgggcgctgcctatggcacagccaagagcggtaccggcattgcggccatgtctgtcatgcggccggagcagatcatgaagtccatcatcccagtggtcatggctggcatcatcgccatctacggcctggtggtggcagtcctcatcgccaactccctgaatgacgacatcagcctctacaagagcttcctccagctgggcgccggcctgagcgtgggcctgagcggcctggcagccggctttgccatcggcatcgtgggggacgctggcgtgcggggcaccgcccagcagccccgactattcgtgggcatgatcctgattctcatcttcgccgaggtgctcggcctctacggtctcatcgtcgccctcatcctctccacaaagtagaccctctccgagcccaccagccacagaatattatgtaaagaccacccctcctcattccagaacgaacagcctgacacatacgcacggggccgccgcccccagtagttggtcttgtacatgcgcagtgtcctagtgcccatcgtctgtttccccggccttgcccccgcccgccccgtgccgtggacatctgggcccactcatcgcccctccaggcccccggcgccccaccccctagagtgctctgtgtatgcggatgatttagaattgtcatttctctttactggatgtttatttataaagatctggcctgttcctgcgtctgcggagcggcccttgtctcccagctatctataaccttagctagagtgtcgccttgtgggttcctgttgctgagacttcctggatggagccgccctcaccgccgggcccgtggccctgcgcggagctgtgtccaataaagttcttggatgtga

SEQ ID NO: 104268 - DNA, 4491 bp, Homo sapiens
  misc_feature (1)..(3): n is a, c, g, or t
  misc_feature (8)..(8): n is a, c, g, or t
  misc_feature (11)..(11): n is a, c, g, or t
  misc_feature (1102)..(1102): n is a, c, g, or t
  misc_feature (1105)..(1105): n is a, c, g, or t
  misc_feature (1107)..(1110): n is a, c, g, or t
  misc_feature (1325)..(1325): n is a, c, g, or t
nnnaagcncgngcggagggtgtgagatggcagacaggtttgcaggaaaccctcagaaagggggctggaggatttagccactctgtcctccccttccggcagtccagggcctcctcccgagcacagcggcgctatggactctccaggatacaactgcttcgtggacaaagacaagatggacgctgccatccaggacctggggcccaaggagctgagctgcactgaactgcaggaactgaagcagctggcgcgccagggctactgggcccaaagccacgccctgcggggaaaggtgtaccagcgcctgatccgggacattccctgccgcacggtcacgcctgacgccagcgtgtacagcgacatcgtgggcaagatcgtgggcaagcacagcagcagctgcctgccgctgcccgagttcgtggacaacacgcaggtgcccagctactgcctgaatgcacgcggcgagggggccgtgcgcaagatcctcctgtgcctggccaaccagttccccgacatctccttctgccccgccctgccggccgtggtggccctgctgctgcactacagcatcgacgaggccgagtgcttcgagaaggcctgccgcatcctggcctgcaatgaccccggcaggaggctgatcgaccagagcttcctggcctttgagtcgtcctgcatgacgtttggggacctggtgaacaagtactgccaggcggcccacaagctgatggtggccgtgtcggaggatgtcctgcaggtctatgcggactggcagcgctggctgtttggggagctgcccctctgctacttcgcccgggtctttgacgtcttcctggtggagggctacaaggtgctgtaccgcgtggcgctggccatcctcaagttcttccacaaggtgagggccgggcagccgctggagtcggacagcgtgaagcaggacatccgcacgttcgtcagagacatcgcgaagacggtgtcccctgagaagctgctggagaaagcgttcgccatccgcctcttctcccgcaaggagatccagctcctgcagatggccaatgagaaagccctgaagcagaagggcatcaccgtgaagcagaagaggttcnctncnnnnaggcagtttgtacacttggccgtccatgcagagaacttccgctcggagatcgtcagcgtgagggagatgagagacatctggtcctgggtccccgagcgctttgccctgtgccagccccttctgctgttctcctccctgcagcacgggtacagcctggccaggttctacttccagtgtgaaggacatgagcctaccctcttgctcatcaagaccangcagaaggaggtgtgtggtgcttacctgtccacagactggagtgagagaaataagtttggaggcaaactgggcttctttgggaccggagaatgctttgtgtttaggctgcagcctgaggtgcagcgctacgagtgggtggtgatcaagcaccccgagctgaccaagcccccacccttgatggctgccgagcccaccgccccactcagccactccgcctcctcagaccccgctgaccgcctctcgcccttcctggccgctcgccacttcaacctgccctccaagaccgagtccatgttcatggcggggggcagcgactgcctcatcgtcgggggaggaggcggccaggcgctctacatcgatggggacctgaaccggggccgcacaagccactgcgacaccttcaacaaccagcccctctgctccgagaacttcctcattgctgccgtggaggcctggggcttccaggaccctgacacccagtgacggcctgtgccacggtgactgagccgtggtggggcggtgggccgaggctgggctgccgcctcgggcagcagagagcagatgaaacccccatgtggtaggcagggttgggggacggcaggaccccatggccaagcctggcgttgcctggacctgctgctgcctctacctggggtttgggctgggcttccccagtccacctgcatctgggtcagagctggagggcctgctgtgcccccagccccacccagagctggcataggaagtaccttcctcctccgtggaggcttccatagcccaaggccttgggagtgtctgggtcttgctgcccctgagcctctctaggcagcctgagcccctggggtgggagtacaacggcagtgggaacgtgcagctaagggtgggcctgtggtgccccctgctggtgccgcatagcatcgcgccctcctgagcagggccctgcagcctggctggctggcgactgaatcccagcgtagatcccgagaacagactggcacccttgggcctgccccctggcggaccccagccccctgtcctgggcgtttgccccagttccctccccaggcctcctgggccacctctcacattaacccttcttggctgcctctgaggctcccctgggctgcgtttgggagctgctgggtgggaggaggagggtgggatttgtgctgggctccacccccagggagggtgggagctggagggggatgtcacatgtccttgtgtttctgcagagcctgaagcttttgctgggcctccctgcgtgttcccatctgaagaggtagccccgggagaggccctcagggaccgacccagaccagcaagctccatttccaggggtctgcccagagaagcctggacccagggggcttctcagctcccctcccttccagcccaggcctccttgagctcctgtagcctctgcagctgcccatttcacctctttgtcattgcaatgacctggggcccagggtcacgcccaagcccctctttgtggcatgctcatctcagtgcagccccaactgcttctctgcaccaggccccgtgccctcccctggccctggccacacagcacctccttggccaccttgcatggatgcatgtcctccctctgtccctcttgtggtgctgtggctggccacgtgtcagggttttctgtgagcctctcaccttacagcctttgggcccctgggcccctgccctgcctgagccctgcgctggccagacgcaggtaggtgccaggggaggccttgcctctgggcactatagggggcagccccctgccttgtgacctccctccatgccccatgacctccttcaactcgtcttgagggtctggtcaccacggaggggagaagggagacacagaggcccaagtggctgttctgggaccatggaagcctgggtcacagaggcaggtaccagcagtcctgcccccacccccgtccctgctggcctccagccagtgccacttggagtcccctgcaccgtgccactttccatccccacaccattgcctgctcctcccatggggctttagcctcccctgaccatctgctcatgtagcctctgactgggcgcacagtggtgcaggaggaaggaccgggaaccctgtgtggctttgggcaagctgacaaacccgtctggaactcagtttccccagctgtgaaatggggccagtccccatgccctgctgtcctcctcacaggactgttgagaggctcgcagggggatggggtgaatccctctcacggggagaggtatgggagggaagtcgccactcatctcagcccaccgcagccctccaggcccccgcctgagcccctgaggccctcatctgtaccgccagctttggtgttcattaaacatggtcttgctgcatcaactccagggctccaagctgagtctgatctcttcagccagaggggcctccgggggcttcctgggcctacagccaagcaggtgtgggaggctgcccgctgtagtgctcacccacattctatgactggaatgctgcaagcctcttccagagggagccctccaggagcagggaagtcatatccgtggaccatttgtaggtttccctctgcaaacttcctgaactgggtggtgatttttctggcgagttaagtccagcaggttctgcgtggctgcccccagggggccccacccgggccttccagtgatctggaccaggaagacggattgctgctgggtcatgatttccacatcatgagcgaagttctttgttttttgtgtgcatgcaaaatattgtttctttaaatttaatatcttttcctaacttttctactaacctagaaggtatgtgtgattattatcttttttattcttatcactgtacttgttagtatctgatattaggtattcccaaatagaacataatttattttgttaatgttctctatttcttcttgattatttattagctttggatgttaaaaattagccaaaagtggctgctctgcctatgaagtagccattctttgtttaaaaaaaaaaaaagccaacatttgttgaaactgcataataaattatcatttgtttttagaaacattcaaagaattattttttgattttttttttttttgggacagagtcacccaggctggagtgcagtggcatgatcttggctcactgcaacct

SEQ ID NO: 104269 - DNA, 1088 bp, Homo sapiens
cccctgcgccgggtctccctcttctcgctccgtctcccctctgctcctcccgttcgccgttcctgctcctcccgctttctcccgttctccccccctcttcgtttccgttgctccggcccagctcgcccgtcccgtctccgcgtctgtctcttctctctttctcctcctgtctgctgtcttcttgctctcctgctgtccctctcctgtccttcccgctcccctctgtcctctcccgtcctctccttttgttgtttgtgtttcttcttgctcgttgttttttcggtttggtttggcttttggtttgttcttgtcgtcgttggttttgttttcgcgtgtttgtcgctttggctgctggtttgtgttgtttgtttgtttgtttcgcgattatggtttctgctggtgttgttttctttggtctttgtggtataaaactgtgtgttctttaagccttatcttctgttttggtgttactttcttctttctgtttggtgatttttgctgcgcttgtttttatcccttcttgtacgctcttcaatacgtgctatacattccccccatggatgcgttctattgttcctggtgtgtgaacgtggttcccatattttcactatgcacacgtatttgaagtgttcgttaccactagagggtgcacacgctagactgcgttgttgccagcatccgtgactctgttttgtaactagctggtcccaggtgctcgttacttgttagtagatactgcctcctttaaatggatcccacgcttgtatcataacaaaactctggggaccgtcttaacttgtggccccttggggatattttggaaaaccccctcttttttttttttttttttttttttttttttttcacatccaagaactttattggacacagctccgcgcagggccacgggcccggcggtgagggcggctccatccaggaagtctcagcaacaggaacccacaaggcgacactctagctaaggttatagatagctgggagacaagggccgctccgcagacgcaggaacaggccagatctttataaataaacatccagtaaagagaaatgacaattctaaatcatccgca

SEQ ID NO: 104270 - DNA, 676 bp, Homo sapiens
  misc_feature (31)..(31): n is a, c, g, or t
attcggcatgagggcgccctggggaccatantggacgagccaagagcggtaccggcattgcggccatgtctgtcatgcggccggagcagatcatgaagtccatcatcccagtggtcatggctggcatcatcgccatctacggcctggtggtggcagtcctcatcgccaactccctgaatgacgacatcagcctctacaagagcttcctccagctgggcgccgctcaggcccacgctcaggcgggccggatcgccttcgccgccgcccgcccgcaaccttcgtgcccggcccgtcctcgcccccgggcatgcgccgacctgattcggggccgctgatgctttgatcctcttctcttcccggagacgtagctgcccagggttcagggacgcgatccctgaggtcatcgcatccgacatcgcgacgacagagattaataggggtcgatcctcggaagccgcaaaaaagtggtaatacaaactagatctcattgtgaaaacatagccatcaatgatcacactcaatctcaagaacagcgaaaccagggctgtagcacgaatcaagtcaacctggtcccatggcggcccgagcaataaaatcgagttaaggtctaattgaacaaggtcgactaattgctgatagtaatggaactcataacgtgtggtggtggaaacatcaa

SEQ ID NO: 104271 - DNA, 267 bp, Homo sapiens
tttagagcttctccatttttattacacaaaattgttaagttttcacatccaagaactttattggacacagctccgcgcagggccacgggcccggcggtgagggcggctccatccaggaagtctcagcaacaggaacccacaaggcgacactctagctaaggttatagatagctgggagacaagggccgctccgcagacgcaggaacaggccagatctttataaataaacatccagtaaagagaaatgacaattctaaatcatccgca

SEQ ID NO: 104272 - DNA, 1336 bp, Homo sapiens
cccggcgcgagaccggtccaacgctgcggagatccagaggccggcggcgcccggaaacacccgcggaggccgaggcagggcggggccgggcgccggggccgggtcgctgggcgggcggcacagcccgggggaggtcaacgggccggccgggcgtcccggggacgcgtctcccccacggtgcgaagtggtacggctcgcaggggcggggcccaggtcatgtgacgcggccgcggccgccattttgttctgcggtgctggtatttagagcgcagcggctgacgggccggatcgccttcgccgccgcccgcccgcaaaccttcgtgcccggcccgtcctcgcccccgcctccgccaccgcctcggcccgcagagcttgccccctccccacccgcagacatgtccgagtccaagagcggccccgagtatgcttcgtttttcgccgtcatgggcgcctcggccgccatggtcttcagcgccctgggcgctgcctatggcacagccaagagcggtaccggcattgcggccatgtctgtcatgcggccggagcagatcatgaagtccatcatcccagtggtcatggctggcatcatcgccatctacggcctggtggtggcagtcctcatcgccaactccctgaatgacgacatcagcctctacaagagcttcctccagctgggcgccggcctgagcgtgggcctgagcggcctggcagccggctttgccatcggcatcgtgggggacgctggcgtgcggggcaccgcccagcagccccgactattcgtgggcatgatcctgattctcatcttcgccgaggtgctcggcctctacggtctcatcgtcgccctcatcctctccacaaagtagaccctctccgagcccaccagccacagaatattatgtaaagaccacccctcctcattccagaacgaacagcctgacacatacgcacggggccgccgcccccagtagttggtcttgtacatgcgcagtgtcctagtgcccatcgtctgtttccccggccttgcccccgcccgccccgtgccgtggacatctgggcccactcatcgcccctccaggcccccggcgccccaccccctagagtgctctgtgtatgcggatgatttagaattgtcatttctctttactggatgtttatttataaagatctggcctgttcctgcgtctgcggagcggcccttgtctcccagctatctataaccttagctagagtgtcgccttgtgggttcctgttgctgagacttcctggatggagccgccctcaccgccgggcccgtggccctgcgcggagctgtgtccaataaagttcttggatgtga

SEQ ID NO: 104273 - DNA, 1587 bp, Homo sapiens
  misc_feature (1348)..(1348): n is a, c, g, or t
  misc_feature (1351)..(1351): n is a, c, g, or t
cccggcgcgagaccggtccaacgctgcggagatccagaggccggcggcgcccggaaacacccgcggaggccgaggcagggcggggccgggcgccggggccgggtcgctgggcgggcggcacagcccgggggaggtcaacgggccggccgggcgtcccggggacgcgtctcccccacggtgcgaagtggtacggctcgcaggggcggggcccaggtcatgtgacgcggccgcggccgccattttgttctgcggtgctggtatttagagcgcagcggctgacgggccggatcgccttcgccgccgcccgcccgcaaaccttcgtgcccggcccgtcctcgcccccgcctccgccaccgcctcggcccgcagagcttgccccctccccacccgcagacatgtccgagtccaagagcggccccgagtatgcttcgtttttcgccgtcatgggcgcctcggccgccatggtcttcagcgccctgggcgctgcctatggcacagccaagagcggtaccggcattgcggccatgtctgtcatgcggccggagcagatcatgaagtccatcatcccagtggtcatggctggcatcatcgccatctacggcctggtggtggcagtcctcatcgccaactccctgaatgacgacatcagcctctacaagagcttcctccagctgggcgccggcctgagcgtgggcctgagcggcctggcagccggctttgccatcggcatcgtgggggacgctggcgtgcggggcaccgcccagcagccccgactattcgtgggcatgatcctgattctcatcttcgccgaggtgctcggcctctacggtctcatcgtcgccctcatcctctccacaaagtagaccctctccgagcccaccagccacagaatattatgtaaagaccacccctcctcattccagaacgaacagcctgacacatacgcacggggccgccgcccccagtagttggtcttgtacatgcgcagtgtcctagtgcccatcgtctgtttccccggccttgcccccgcccgccccgtgccgtggacatctgggcccactcatcgcccctccaggcccccggcgccccaccccctagagtgctctgtgtatgcggatgatttagaattgtcatttctctttactggatgtttatttataaagatctggcctgttcctgcgtctgcggagcggcccttgtctcccagctatctataaccttagctagagtgtcgccttgtgggttcctgttgctgagacttcctggatggagccgccctcaccgccgggcccgtggccctgcgcggagctgtgtccaataaagttcttggatgtgaaaaaaaaaccanaanaacacggcagggcccagtgcggggcggacaacaaaggcaggcagggcccaggtcatggggtcccagaccgggttcggtccagggagactgcgggcccaaaggaaggaaaacgcagcacaggtacggtagaccggaagagaagacgcgaggcgggagacacctgaccaaagcgcggcacgctggacaccaccaccgcgcgcgcacaacgatcacacgcaacggtgtccacgcccgcc

SEQ ID NO: 104274 - DNA, 1090 bp, Homo sapiens
  misc_feature (1)..(1): n is a, c, g, or t
  misc_feature (33)..(33): n is a, c, g, or t
  misc_feature (47)..(48): n is a, c, g, or t
nagacaccccatttactggtgccattggtagcngtatggccttgtgnngtttgcagaaacttctgtgcatcgtaggtgccggcccgtcctcgcccccgcctccgccaccgcctcggcccgcagagcttgccccctccccacccgcagacatgtccgagtccaagagcggccccgagtatgcttcgtttttcgccgtcatgggcgcctcggccgccatggtcttcagcgccctgggcgctgcctatggcacagccaagagcggtaccggcattgcggccatgtctgtcatgcggccggagcagatcatgaagtccatcatcccagtggtcatggctggcatcatcgccatctacggcctggtggtggcagtcctcatcgccaactccctgaatgacgacatcagcctctacaagagcttcctccagctgggcgccggcctgagcgtgggcctgagcggcctggcagccggctttgccatcggcatcgtgggggacgctggcgtgcggggcaccgcccagcagccccgactattcgtgggcatgatcctgattctcatcttcgccgaggtgctcggcctctacggtctcatcgtcgccctcatcctctccacaaagtagaccctctccgagcccaccagccacagaatattatgtaaagaccacccctcctcattccagaacgaacagcctgacacatacgcacggggccgccgcccccagtagttggtcttgtacatgcgcagtgtcctagtgcccatcgtctgtttccccggccttgcccccgcccgccccgtgccgtggacatctgggcccactcatcgcccctccaggcccccggcgccccaccccctagagtgctctgtgtatgcggatgatttagaattgtcatttctctttactggatgtttatttataaagatctggcctgttcctgcgtctgcggagcggcccttgtctcccagctatctataaccttagctagagtgtcgccttgtgggttcctgttgctgagacttcctggatggagccgccctcaccgccgggcccgtggccctgcgcggagctgtgtccaataaagttcttggatgtga

SEQ ID NO: 104275 - DNA, 1320 bp, Homo sapiens
cccggcgcgagaccggtccaacgctgcggagatccagaggccggcggcgcccggaaacacccgcggaggccgaggcagggcggggccgggcgccggggccgggtcgctgggcgggcggcacagcccgggggaggtcaacgggccggccgggcgtcccggggacgcgtctcccccacggtgcgaagtggtacggctcgcaggggcggggcccaggtcatgtgacgcggccgcggccgccattttgttctgcggtgctggtatttagagcgcagcggctgacgggccggatcgccttcgccgccgcccgcccgcaaaccttcgtgcccggcccgtcctcgcccccgcctccgccaccgcctcggcccgcagagcttgccccctccccacccgcagacatgtccgagtccaagagcggccccgagtatgcttcgtttttcgccgtcatgggcgcctcggccgccatggtcttcagcgccctgggcgctgcctatggcacagccaagagcggtaccggcattgcggccatgtctgtcatgcggccggagcagatcatgaagtccatcatcccagtggtcatggctggcatcatcgccatctacggcctggtggtggcagtcctcatcgccaactccctgaatgacgacatcagcctctacaagagcttcctccagctgggcgccggcctgagcgtgggcctgagcggcctggcagccggctttgccatcggcatcgtgggggacgctggcgtgcggggcaccgcccagcagccccgactattcgtgggcatgatcctgattctcatcttcgccgaggtgctcggcctctacggtctcatcgtcgccctcatcctctccacaaagtagaccctctccgagcccaccagccacagaatattatgtaaagaccacccctcctcattccagaacgaacagcctgacacatacgcacggggccgccgcccccagtagttggtcttgtacatgcgcagtgtcctagtgcccatcgtctgtttccccggccttgcccccgcccgccccgtgccgtggacatctgggcccactcatcgcccctccaggcccccggcgccccaccccctagagtgctctgtgtatgcggatgatttagaattgtcatttctctttactggatgtttatttataaagatctggcctgttcctgcgtctgcggagcggcccttgtctcccagctatctataaccttagctagagtgtcgccttgtgggttcctgttgctgagacttcctggatggagccgccctcaccgccggcccataaccggcgactttcattttttttgttt

SEQ ID NO: 104276 - DNA, 1016 bp, Homo sapiens
aaggaacacagcacaaagctaagctaggacaggctgggatgaaatcggcagagggccccctccccacccgcagacatgtccgagtccaagagcggccccgagtatgcttcgtttttcgccgtcatgggcgcctcggccgccatggtcttcagcgccctgggcgctgcctatggcacagccaagagcggtaccggcattgcggccatgtctgtcatgcggccggagcagatcatgaagtccatcatcccagtggtcatggctggcatcatcgccatctacggcctggtggtggcagtcctcatcgccaactccctgaatgacgacatcagcctctacaagagcttcctccagctgggcgccggcctgagcgtgggcctgagcggcctggcagccggctttgccatcggcatcgtgggggacgctggcgtgcggggcaccgcccagcagccccgactattcgtgggcatgatcctgattctcatcttcgccgaggtgctcggcctctacggtctcatcgtcgccctcatcctctccacaaagtagaccctctccgagcccaccagccacagaatattatgtaaagaccacccctcctcattccagaacgaacagcctgacacatacgcacggggccgccgcccccagtagttggtcttgtacatgcgcagtgtcctagtgcccatcgtctgtttccccggccttgcccccgcccgccccgtgccgtggacatctgggcccactcatcgcccctccaggcccccggcgccccaccccctagagtgctctgtgtatgcggatgatttagaattgtcatttctctttactggatgtttatttataaagatctggcctgttcctgcgtctgcggagcggcccttgtctcccagctatctataaccttagctagagtgtcgccttgtgggttcctgttgctgagacttcctggatggagccgccctcaccgccgggcccgtggccctgcgcggagctgtgtccaataaagttcttggatgtga

SEQ ID NO: 104277 - DNA, 1007 bp, Homo sapiens
tcacatccaagaactttattggacacagctccgcgcagggccacggccccctccccacccgcagacatgtccgagtccaagagcggccccgagtatgcttcgtttttcgccgtcatgggcgcctcggccgccatggtcttcagcgccctgggcgctgcctatggcacagccaagagcggtaccggcattgcggccatgtctgtcatgcggccggagcagatcatgaagtccatcatcccagtggtcatggctggcatcatcgccatctacggcctggtggtggcagtcctcatcgccaactccctgaatgacgacatcagcctctacaagagcttcctccagctgggcgccggcctgagcgtgggcctgagcggcctggcagccggctttgccatcggcatcgtgggggacgctggcgtgcggggcaccgcccagcagccccgactattcgtgggcatgatcctgattctcatcttcgccgaggtgctcggcctctacggtctcatcgtcgccctcatcctctccacaaagtagaccctctccgagcccaccagccacagaatattatgtaaagaccacccctcctcattccagaacgaacagcctgacacatacgcacggggccgccgcccccagtagttggtcttgtacatgcgcagtgtcctagtgcccatcgtctgtttccccggccttgcccccgcccgccccgtgccgtggacatctgggcccactcatcgcccctccaggcccccggcgccccaccccctagagtgctctgtgtatgcggatgatttagaattgtcatttctctttactggatgtttatttataaagatctggcctgttcctgcgtctgcggagcggcccttgtctcccagctatctataaccttagctagagtgtcgccttgtgggttcctgttgctgagacttcctggatggagccgccctcaccgccgggcccgtggccctgcgcggagctgtgtccaataaagttcttggatgtga

SEQ ID NO: 104278 - DNA, 989 bp, Homo sapiens
aggctggtacggcacggagtggtggatgccccctccccacccgcagacatgtccgagtccaagagcggccccgagtatgcttcgtttttcgccgtcatgggcgcctcggccgccatggtcttcagcgccctgggcgctgcctatggcacagccaagagcggtaccggcattgcggccatgtctgtcatgcggccggagcagatcatgaagtccatcatcccagtggtcatggctggcatcatcgccatctacggcctggtggtggcagtcctcatcgccaactccctgaatgacgacatcagcctctacaagagcttcctccagctgggcgccggcctgagcgtgggcctgagcggcctggcagccggctttgccatcggcatcgtgggggacgctggcgtgcggggcaccgcccagcagccccgactattcgtgggcatgatcctgattctcatcttcgccgaggtgctcggcctctacggtctcatcgtcgccctcatcctctccacaaagtagaccctctccgagcccaccagccacagaatattatgtaaagaccacccctcctcattccagaacgaacagcctgacacatacgcacggggccgccgcccccagtagttggtcttgtacatgcgcagtgtcctagtgcccatcgtctgtttccccggccttgcccccgcccgccccgtgccgtggacatctgggcccactcatcgcccctccaggcccccggcgccccaccccctagagtgctctgtgtatgcggatgatttagaattgtcatttctctttactggatgtttatttataaagatctggcctgttcctgcgtctgcggagcggcccttgtctcccagctatctataaccttagctagagtgtcgccttgtgggttcctgttgctgagacttcctggatggagccgccctcaccgccgggcccgtggccctgcgcggagctgtgtccaataaagttcttggatgtga

SEQ ID NO: 104279 - DNA, 1555 bp, Homo sapiens
cccggcgcgagaccggtccaacgctgcggagatccagaggccggcggcgcccggaaacacccgcggaggccgaggcagggcggggccgggcgccggggccgggtcgctgggcgggcggcacagcccgggggaggtcaacgggccggccgggcgtcccggggacgcgtctcccccacggtgcgaagtggtacggctcgcaggggcggggcccaggtcatgtgacgcggccgcggccgccattttgttctgcggtgctggtatttagagcgcagcggctgacgggccggatcgccttcgccgccgcccgcccgcaaaccttcgtgcccggcccgtcctcgcccccgcctccgccaccgcctcggcccgcagagcttgccccctccccacccgcagacatgtccgagtccaagagcggccccgagtatgcttcgtttttcgccgtcatgggcgcctcggccgccatggtcttcagcggtgagcgcggaaggcagggagggactcgggggcgggggcgcgcgcagtcgctcatgcccgcagctcgccggggtccggtgtgtgacgtcactctgacgtaatcccagagctgacgggggcgcccgggcctcgtgtgacagcgggcgggggtcggcgccccgagggctgcggggagccgccgggggtccggggcgcagggcatgcgggcctggacggggtccctgggcgctgcctatggcacagccaagagcggtaccggcattgcggccatgtctgtcatgcggccggagcagatcatgaagtccatcatcccagtggtcatggctggcatcatcgccatctacggcctggtggtggcagtcctcatcgccaactccctgaatgacgacatcagcctctacaagagcttcctccagctgggcgccggcctgagcgtgggcctgagcggcctggcagccggctttgccatcggcatcgtgggggacgctggcgtgcggggcaccgcccagcagccccgactattcgtgggcatgatcctgattctcatcttcgccgaggtgctcggcctctacggtctcatcgtcgccctcatcctctccacaaagtagaccctctccgagcccaccagccacagaatattatgtaaagaccacccctcctcattccagaacgaacagcctgacacatacgcacggggccgccgcccccagtagttggtcttgtacatgcgcagtgtcctagtgcccatcgtctgtttccccggccttgcccccgcccgccccgtgccgtggacatctgggcccactcatcgcccctccaggcccccggcgccccaccccctagagtgctctgtgtatgcggatgatttagaattgtcatttctctttactggatgtttatttataaagatctggcctgttcctgcgtctgcggagcggcccttgtctcccagctatctataaccttagctagagtgtcgccttgtgggttcctgttgctgagacttcctggatggagccgccctcaccgccgggcccgtggccctgcgcggagctgtgtccaataaagttcttggatgtga

SEQ ID NO: 104280 - DNA, 1283 bp, Homo sapiens
cccggcgcgagaccggtccaacgctgcggagatccagaggccggcggcgcccggaaacacccgcggaggccgaggcagggcggggccgggcgccggggccgggtcgctgggcgggcggcacagcccgggggaggtcaacgggccggccgggcgtcccggggacgcgtctcccccacggtgcgaagtggtacggctcgcaggggcggggcccaggtcatgtgacgcggccgcggccgccattttgttctgcggtgctggtatttagagcgcagcggctgacgggccggatcgccttcgccgccgcccgcccgcaaaccttcgtgcccggcccgtcctcgcccccgcctccgccaccgcctcggcccgcagagcttgccccctccccacccgcagacatgtccgagtccaagagcggccccgaccctgggcgctgcctatggcacagccaagagcggtaccggcattgcggccatgtctgtcatgcggccggagcagatcatgaagtccatcatcccagtggtcatggctggcatcatcgccatctacggcctggtggtggcagtcctcatcgccaactccctgaatgacgacatcagcctctacaagagcttcctccagctgggcgccggcctgagcgtgggcctgagcggcctggcagccggctttgccatcggcatcgtgggggacgctggcgtgcggggcaccgcccagcagccccgactattcgtgggcatgatcctgattctcatcttcgccgaggtgctcggcctctacggtctcatcgtcgccctcatcctctccacaaagtagaccctctccgagcccaccagccacagaatattatgtaaagaccacccctcctcattccagaacgaacagcctgacacatacgcacggggccgccgcccccagtagttggtcttgtacatgcgcagtgtcctagtgcccatcgtctgtttccccggccttgcccccgcccgccccgtgccgtggacatctgggcccactcatcgcccctccaggcccccggcgccccaccccctagagtgctctgtgtatgcggatgatttagaattgtcatttctctttactggatgtttatttataaagatctggcctgttcctgcgtctgcggagcggcccttgtctcccagctatctataaccttagctagagtgtcgccttgtgggttcctgttgctgagacttcctggatggagccgccctcaccgccgggcccgtggccctgcgcggagctgtgtccaataaagttcttggatgtga

SEQ ID NO: 104281 - DNA, 1081 bp, Homo sapiens
ctcgtgacgaattcggcagtggctgtcctggcctccttttgcttgcccgtggctgttcctcctgggtcctcttgccctgggctggatgccttcttcggctccccctctgcatgtgataacttggggtggcccttggagctgtgccaaagctacacctcggggtcctagtctcaactggcctgcgtactgctgtgggctcaccccgccttcctcccacagccctgggcgctgcctatggcacagccaagagcggtaccggcattgcggccatgtctgtcatgcggccggagcagatcatgaagtccatcatcccagtggtcatggctggcatcatcgccatctacggcctggtggtggcagtcctcatcgccaactccctgaatgacgacatcagcctctacaagagcttcctccagctgggcgccggcctgagcgtgggcctgagcggcctggcagccggctttgccatcggcatcgtgggggacgctggcgtgcggggcaccgcccagcagccccgactattcgtgggcatgatcctgattctcatcttcgccgaggtgctcggcctctacggtctcatcgtcgccctcatcctctccacaaagtagaccctctccgagcccaccagccacagaatattatgtaaagaccacccctcctcattccagaacgaacagcctgacacatacgcacggggccgccgcccccagtagttggtcttgtacatgcgcagtgtcctagtgcccatcgtctgtttccccggccttgcccccgcccgccccgtgccgtggacatctgggcccactcatcgcccctccaggcccccggcgccccaccccctagagtgctctgtgtatgcggatgatttagaattgtcatttctctttactggatgtttatttataaagatctggcctgttcctgcgtctgcggagcggcccttgtctcccagctatctataaccttagctagagtgtcgccttgtgggttcctgttgctgagacttcctggatggagccgccctcaccgccgggcccgtggccctgcgcggagctgtgtccaataaagttcttggatgtga

SEQ ID NO: 104282 - DNA, 1572 bp, Homo sapiens
  misc_feature (558)..(558): n is a, c, g, or t
  misc_feature (641)..(642): n is a, c, g, or t
  misc_feature (644)..(646): n is a, c, g, or t
  misc_feature (657)..(657): n is a, c, g, or t
  misc_feature (663)..(663): n is a, c, g, or t
tttagagcttctccatttttattacacaaaattgttaagttttcacatccaagaactttattggacacagctccgcgcagggccacgggcccggcggtgagggcggctccatccaggaagtctcagcaacaggaacccacaaggcgacactctagctaaggttatagatagctgggagacaagggccgctccgcagacgcaggaacaggccagatctttataaataaacatccagtaaagagaaatgacaattctaaatcatccgcatacacagagcactctaggggggtggggcgccgggggcctggaggggcgatgagtgggcccagatgtccacggcacggggcgggcgggggcaaggccggggaaacagacgatgggcactaggacactgcgcatgtacaagaccaactactgggggcggcggccccgtgcgtatgtgtcaggctgttcgttctggaatacagaggggtggtctttacataatattctgtggctggtgggctcggagagggtctactttgtggagaggatgagggcgacgatgagaccgtagangccgagcacctcggcgaagatgagaatcaggatcatgcccacgaatagtcggggctgctgggcggtgcccgcacgccagcgtnncnnncgatgccgatngcaaanccggctgccaggccgctcaggccacgctcaggccggcgcccagctggaggaagctcttgtagaggctgatgtcgtcattcagggagttggcgatgaggactgccaccaccaggccgtagatggcgatgatgccagccatgaccactgggataatggcatcatcgccatctacggcctggtggtggcagtcctcatcgccaactccctgaatgacgacatcagcctctacaagagcttcctccagctgggcgccggcctgagcgtgggcctgagcggcctggcagccggctttgccatcggcatcgtgggggacgctggcgtgcggggcaccgcccagcagccccgactattcgtgggcatgatcctgattctcatcttcgccgaggtgctcggcctctacggtctcatcgtcgccctcatcctctccacaaagtagaccctctccgagcccaccagccacagaatattatgtaaagaccacccctcctcattccagaacgaacagcctgacacatacgcacggggccgccgcccccagtagttggtcttgtacatgcgcagtgtcctagtgcccatcgtctgtttccccggccttgcccccgcccgccccgtgccgtggacatctgggcccactcatcgcccctccaggcccccggcgccccaccccctagagtgctctgtgtatgcggatgatttagaattgtcatttctctttactggatgtttatttataaagatctggcctgttcctgcgtctgcggagcggcccttgtctcccagctatctataaccttagctagagtgtcgccttgtgggttcctgttgctgagacttcctggatggagccgccctcaccgccgggcccgtggccctgcgcggagctgtgtccaataaagttcttggatgtga

SEQ ID NO: 104283 - DNA, 2393 bp, Homo sapiens
  misc_feature (1379)..(1379): n is a, c, g, or t
  misc_feature (1462)..(1463): n is a, c, g, or t
  misc_feature (1465)..(1467): n is a, c, g, or t
  misc_feature (1478)..(1478): n is a, c, g, or t
  misc_feature (1484)..(1484): n is a, c, g, or t
cccctgcgccgggtctccctcttctcgctccgtctcccctctgctcctcccgttcgccgttcctgctcctcccgctttctcccgttctccccccctcttcgtttccgttgctccggcccagctcgcccgtcccgtctccgcgtctgtctcttctctctttctcctcctgtctgctgtcttcttgctctcctgctgtccctctcctgtccttcccgctcccctctgtcctctcccgtcctctccttttgttgtttgtgtttcttcttgctcgttgttttttcggtttggtttggcttttggtttgttcttgtcgtcgttggttttgttttcgcgtgtttgtcgctttggctgctggtttgtgttgtttgtttgtttgtttcgcgattatggtttctgctggtgttgttttctttggtctttgtggtataaaactgtgtgttctttaagccttatcttctgttttggtgttactttcttctttctgtttggtgatttttgctgcgcttgtttttatcccttcttgtacgctcttcaatacgtgctatacattccccccatggatgcgttctattgttcctggtgtgtgaacgtggttcccatattttcactatgcacacgtatttgaagtgttcgttaccactagagggtgcacacgctagactgcgttgttgccagcatccgtgactctgttttgtaactagctggtcccaggtgctcgttacttgttagtagatactgcctcctttaaatggatcccacgcttgtatcataacaaaactctggggaccgtcttaacttgtggccccttggggatattttggaaaaccccctcttttttttttttttttttttttttttttttttcacatccaagaactttattggacacagctccgcgcagggccacgggcccggcggtgagggcggctccatccaggaagtctcagcaacaggaacccacaaggcgacactctagctaaggttatagatagctgggagacaagggccgctccgcagacgcaggaacaggccagatctttataaataaacatccagtaaagagaaatgacaattctaaatcatccgcatacacagagcactctaggggggtggggcgccgggggcctggaggggcgatgagtgggcccagatgtccacggcacggggcgggcgggggcaaggccggggaaacagacgatgggcactaggacactgcgcatgtacaagaccaactactgggggcggcggccccgtgcgtatgtgtcaggctgttcgttctggaatacagaggggtggtctttacataatattctgtggctggtgggctcggagagggtctactttgtggagaggatgagggcgacgatgagaccgtagangccgagcacctcggcgaagatgagaatcaggatcatgcccacgaatagtcggggctgctgggcggtgcccgcacgccagcgtnncnnncgatgccgatngcaaanccggctgccaggccgctcaggccacgctcaggccggcgcccagctggaggaagctcttgtagaggctgatgtcgtcattcagggagttggcgatgaggactgccaccaccaggccgtagatggcgatgatgccagccatgaccactgggataatggcatcatcgccatctacggcctggtggtggcagtcctcatcgccaactccctgaatgacgacatcagcctctacaagagcttcctccagctgggcgccggcctgagcgtgggcctgagcggcctggcagccggctttgccatcggcatcgtgggggacgctggcgtgcggggcaccgcccagcagccccgactattcgtgggcatgatcctgattctcatcttcgccgaggtgctcggcctctacggtctcatcgtcgccctcatcctctccacaaagtagaccctctccgagcccaccagccacagaatattatgtaaagaccacccctcctcattccagaacgaacagcctgacacatacgcacggggccgccgcccccagtagttggtcttgtacatgcgcagtgtcctagtgcccatcgtctgtttccccggccttgcccccgcccgccccgtgccgtggacatctgggcccactcatcgcccctccaggcccccggcgccccaccccctagagtgctctgtgtatgcggatgatttagaattgtcatttctctttactggatgtttatttataaagatctggcctgttcctgcgtctgcggagcggcccttgtctcccagctatctataaccttagctagagtgtcgccttgtgggttcctgttgctgagacttcctggatggagccgccctcaccgccgggcccgtggccctgcgcggagctgtgtccaataaagttcttggatgtga

SEQ ID NO: 104284 - DNA, 2198 bp, Homo sapiens
  misc_feature (1184)..(1184): n is a, c, g, or t
  misc_feature (1267)..(1268): n is a, c, g, or t
  misc_feature (1270)..(1272): n is a, c, g, or t
  misc_feature (1283)..(1283): n is a, c, g, or t
  misc_feature (1289)..(1289): n is a, c, g, or t
cccctgcgccgggtctccctcttctcgctccgtctcccctctgctcctcccgttcgccgttcctgctcctcccgctttctcccgttctccccccctcttcgtttccgttgctccggcccagctcgcccgtcccgtctccgcgtctgtctcttctctctttctcctcctgtctgctgtcttcttgctctcctgctgtccctctcctgtccttcccgctcccctctgtcctctcccgtcctctccttttgttgtttgtgtttcttcttgctcgttgttttttcggtttggtttggcttttggtttgttcttgtcgtcgttggttttgttttcgcgtgtttgtcgctttggctgctggtttgtgttgtttgtttgtttgtttcgcgattatggtttctgctggtgttgttttctttggtctttgtggtataaaactgtgtgttctttaagccttatcttctgttttggtgttactttcttctttctgtttggtgatttttgctgcgcttgtttttatcccttcttgtacgctcttcaatacgtgctatacattccccccatggatgcgttctattgttcctggtgtgtgaacgtggttcccatattttcactatgcacacgtatttgaagtgttcgttaccactagagggtgcacacgctagactgcgttgttgccagcatccgtgactctgttttgtaactagctggtcccaggtgctcgttacttgttagtagatactgcctcctttaaatggatcccacgcttgtatcataacaaaactctggggaccgtcttaacttgtggccccttggggatattttggaaaaccccctcttttttttttttttttttttttttttttttttcacatccaagaactttattggacacagctccgcgcagggccacgggcccggcggtgagggcggctccatccaggaagtctcagcaacaggaacccacaaggcgacactctagctaaggttatagatagctgggagacaagggccgctccgcagacgcaggaacaggccagatctttataaataaacatccagtaaagagaaatgacaattctaaatcatccgcatacagaggggtggtctttacataatattctgtggctggtgggctcggagagggtctactttgtggagaggatgagggcgacgatgagaccgtagangccgagcacctcggcgaagatgagaatcaggatcatgcccacgaatagtcggggctgctgggcggtgcccgcacgccagcgtnncnnncgatgccgatngcaaanccggctgccaggccgctcaggccacgctcaggccggcgcccagctggaggaagctcttgtagaggctgatgtcgtcattcagggagttggcgatgaggactgccaccaccaggccgtagatggcgatgatgccagccatgaccactgggataatggcatcatcgccatctacggcctggtggtggcagtcctcatcgccaactccctgaatgacgacatcagcctctacaagagcttcctccagctgggcgccggcctgagcgtgggcctgagcggcctggcagccggctttgccatcggcatcgtgggggacgctggcgtgcggggcaccgcccagcagccccgactattcgtgggcatgatcctgattctcatcttcgccgaggtgctcggcctctacggtctcatcgtcgccctcatcctctccacaaagtagaccctctccgagcccaccagccacagaatattatgtaaagaccacccctcctcattccagaacgaacagcctgacacatacgcacggggccgccgcccccagtagttggtcttgtacatgcgcagtgtcctagtgcccatcgtctgtttccccggccttgcccccgcccgccccgtgccgtggacatctgggcccactcatcgcccctccaggcccccggcgccccaccccctagagtgctctgtgtatgcggatgatttagaattgtcatttctctttactggatgtttatttataaagatctggcctgttcctgcgtctgcggagcggcccttgtctcccagctatctataaccttagctagagtgtcgccttgtgggttcctgttgctgagacttcctggatggagccgccctcaccgccgggcccgtggccctgcgcggagctgtgtccaataaagttcttggatgtga

SEQ ID NO: 104285 - DNA, 1065 bp, Homo sapiens
cccggcgcgagaccggtccaacgctgcggagatccagaggccggcggcgcccggaaacacccgcggaggccgaggcagggcggggccgggcgccggggccgggtcgctgggcgggcggcacagcccgggggaggtcaacgggccggccgggcgtcccggggacgcgtctcccccacggtgcgaagtggtacggctcgcaggggcggggcccaggtcatgtgacgcggccgcggccgccattttgttctgcggtgctggtatttagagcgcagcggctgacgggccggatcgccttcgccgccgcccgcccgcaaaccttcgtgcccggcccgtcctcgcccccgcctccgccaccgcctcggcccgcagagcttgccccctccccacccgcagacatgtccgagtccaagagcggccccgagtatgcttcgtttttcgccgtcatgggcgcctcggccgccatggtcttcagcgccctgggcgctgcctatggcacagccaagagcggtaccggcattgcggccatgtctgtcatgcggccggagcagatcatgaagtccatcatcccagtggtcatggctggcatcatcgccatctacggcctggtggtggcagtcctcatcgccaactccctgaatgacgacatcagcctctacaagagcttcctccagctgggcgccggcctgagcgtgggcctgagcggcctggcagccggctttgccatcggcatcgtgggggacgctggcgtgcggggcaccgcccagcagccccgactattcgtgggcatgatcctgattctcatcttcgccgaggtgctcggcctctacggtctcatcgtcgccctcatcctctccacaaagtagaccctctccgagcccaccagccacagaatattatgtaaagaccacccctcctcattccagaacgaacagcctgacacatacgcacggggccgccgcccccagtagttggtcttgtacatgcgcagtgtcctagtgcccatcgtctgtttccccggccttgccccccattatttgcccttcgtgtcttggggtcttccccctt

SEQ ID NO: 104286 - DNA, 826 bp, Homo sapiens
atcgccaactccctgaatgacgacatcaggccgtagatggcgatgatgccagccatgaccactgggataatggcatcatcgccatctacggcctggtggtggcagtcctcatcgccaactccctgaatgacgacatcagcctctacaagagcttcctccagctgggcgccggcctgagcgtgggcctgagcggcctggcagccggctttgccatcggcatcgtgggggacgctggcgtgcggggcaccgcccagcagccccgactattcgtgggcatgatcctgattctcatcttcgccgaggtgctcggcctctacggtctcatcgtcgccctcatcctctccacaaagtagaccctctccgagcccaccagccacagaatattatgtaaagaccacccctcctcattccagaacgaacagcctgacacatacgcacggggccgccgcccccagtagttggtcttgtacatgcgcagtgtcctagtgcccatcgtctgtttccccggccttgcccccgcccgccccgtgccgtggacatctgggcccactcatcgcccctccaggcccccggcgccccaccccctagagtgctctgtgtatgcggatgatttagaattgtcatttctctttactggatgtttatttataaagatctggcctgttcctgcgtctgcggagcggcccttgtctcccagctatctataaccttagctagagtgtcgccttgtgggttcctgttgctgagacttcctggatggagccgccctcaccgccgggcccgtggccctgcgcggagctgtgtccaataaagttcttggatgtga

SEQ ID NO: 104287 - DNA, 1220 bp, Homo sapiens
  misc_feature (558)..(558): n is a, c, g, or t
tttagagcttctccatttttattacacaaaattgttaagttttcacatccaagaactttattggacacagctccgcgcagggccacgggcccggcggtgagggcggctccatccaggaagtctcagcaacaggaacccacaaggcgacactctagctaaggttatagatagctgggagacaagggccgctccgcagacgcaggaacaggccagatctttataaataaacatccagtaaagagaaatgacaattctaaatcatccgcatacacagagcactctaggggggtggggcgccgggggcctggaggggcgatgagtgggcccagatgtccacggcacggggcgggcgggggcaaggccggggaaacagacgatgggcactaggacactgcgcatgtacaagaccaactactgggggcggcggccccgtgcgtatgtgtcaggctgttcgttctggaatacagaggggtggtctttacataatattctgtggctggtgggctcggagagggtctactttgtggagaggatgagggcgacgatgagaccgtagangccgagcacctcggcgaagatgagaatcaggatcatgcccacgaatagtcggggctgctgggcggtgcccgcacgccagcgtccgcccagcagccccgactattcgtgggcatgatcctgattctcatcttcgccgaggtgctcggcctctacggtctcatcgtcgccctcatcctctccacaaagtagaccctctccgagcccaccagccacagaatattatgtaaagaccacccctcctcattccagaacgaacagcctgacacatacgcacggggccgccgcccccagtagttggtcttgtacatgcgcagtgtcctagtgcccatcgtctgtttccccggccttgcccccgcccgccccgtgccgtggacatctgggcccactcatcgcccctccaggcccccggcgccccaccccctagagtgctctgtgtatgcggatgatttagaattgtcatttctctttactggatgtttatttataaagatctggcctgttcctgcgtctgcggagcggcccttgtctcccagctatctataaccttagctagagtgtcgccttgtgggttcctgttgctgagacttcctggatggagccgccctcaccgccgggcccgtggccctgcgcggagctgtgtccaataaagttcttggatgtga

SEQ ID NO: 104288 - DNA, 1846 bp, Homo sapiens
  misc_feature (1184)..(1184): n is a, c, g, or t
cccctgcgccgggtctccctcttctcgctccgtctcccctctgctcctcccgttcgccgttcctgctcctcccgctttctcccgttctccccccctcttcgtttccgttgctccggcccagctcgcccgtcccgtctccgcgtctgtctcttctctctttctcctcctgtctgctgtcttcttgctctcctgctgtccctctcctgtccttcccgctcccctctgtcctctcccgtcctctccttttgttgtttgtgtttcttcttgctcgttgttttttcggtttggtttggcttttggtttgttcttgtcgtcgttggttttgttttcgcgtgtttgtcgctttggctgctggtttgtgttgtttgtttgtttgtttcgcgattatggtttctgctggtgttgttttctttggtctttgtggtataaaactgtgtgttctttaagccttatcttctgttttggtgttactttcttctttctgtttggtgatttttgctgcgcttgtttttatcccttcttgtacgctcttcaatacgtgctatacattccccccatggatgcgttctattgttcctggtgtgtgaacgtggttcccatattttcactatgcacacgtatttgaagtgttcgttaccactagagggtgcacacgctagactgcgttgttgccagcatccgtgactctgttttgtaactagctggtcccaggtgctcgttacttgttagtagatactgcctcctttaaatggatcccacgcttgtatcataacaaaactctggggaccgtcttaacttgtggccccttggggatattttggaaaaccccctcttttttttttttttttttttttttttttttttcacatccaagaactttattggacacagctccgcgcagggccacgggcccggcggtgagggcggctccatccaggaagtctcagcaacaggaacccacaaggcgacactctagctaaggttatagatagctgggagacaagggccgctccgcagacgcaggaacaggccagatctttataaataaacatccagtaaagagaaatgacaattctaaatcatccgcatacagaggggtggtctttacataatattctgtggctggtgggctcggagagggtctactttgtggagaggatgagggcgacgatgagaccgtagangccgagcacctcggcgaagatgagaatcaggatcatgcccacgaatagtcggggctgctgggcggtgcccgcacgccagcgtccgcccagcagccccgactattcgtgggcatgatcctgattctcatcttcgccgaggtgctcggcctctacggtctcatcgtcgccctcatcctctccacaaagtagaccctctccgagcccaccagccacagaatattatgtaaagaccacccctcctcattccagaacgaacagcctgacacatacgcacggggccgccgcccccagtagttggtcttgtacatgcgcagtgtcctagtgcccatcgtctgtttccccggccttgcccccgcccgccccgtgccgtggacatctgggcccactcatcgcccctccaggcccccggcgccccaccccctagagtgctctgtgtatgcggatgatttagaattgtcatttctctttactggatgtttatttataaagatctggcctgttcctgcgtctgcggagcggcccttgtctcccagctatctataaccttagctagagtgtcgccttgtgggttcctgttgctgagacttcctggatggagccgccctcaccgccgggcccgtggccctgcgcggagctgtgtccaataaagttcttggatgtga

SEQ ID NO: 104289 - DNA, 606 bp, Homo sapiens
cctagaggatcccgtctgcatttcagccgcccagcagccccgactattcgtgggcatgatcctgattctcatcttcgccgaggtgctcggcctctacggtctcatcgtcgccctcatcctctccacaaagtagaccctctccgagcccaccagccacagaatattatgtaaagaccacccctcctcattccagaacgaacagcctgacacatacgcacggggccgccgcccccagtagttggtcttgtacatgcgcagtgtcctagtgcccatcgtctgtttccccggccttgcccccgcccgccccgtgccgtggacatctgggcccactcatcgcccctccaggcccccggcgccccaccccctagagtgctctgtgtatgcggatgatttagaattgtcatttctctttactggatgtttatttataaagatctggcctgttcctgcgtctgcggagcggcccttgtctcccagctatctataaccttagctagagtgtcgccttgtgggttcctgttgctgagacttcctggatggagccgccctcaccgccgggcccgtggccctgcgcggagctgtgtccaataaagttcttggatgtga

SEQ ID NO: 104290 - DNA, 619 bp, Homo sapiens
attgagcaataacaggtctgtgatgcccttagatgtccgccgcccagcagccccgactattcgtgggcatgatcctgattctcatcttcgccgaggtgctcggcctctacggtctcatcgtcgccctcatcctctccacaaagtagaccctctccgagcccaccagccacagaatattatgtaaagaccacccctcctcattccagaacgaacagcctgacacatacgcacggggccgccgcccccagtagttggtcttgtacatgcgcagtgtcctagtgcccatcgtctgtttccccggccttgcccccgcccgccccgtgccgtggacatctgggcccactcatcgcccctccaggcccccggcgccccaccccctagagtgctctgtgtatgcggatgatttagaattgtcatttctctttactggatgtttatttataaagatctggcctgttcctgcgtctgcggagcggcccttgtctcccagctatctataaccttagctagagtgtcgccttgtgggttcctgttgctgagacttcctggatggagccgccctcaccgccgggcccgtggccctgcgcggagctgtgtccaataaagttcttggatgtga

SEQ ID NO: 104291 - DNA, 605 bp, Homo sapiens
gctgacttgaggatccgacactctaccgcccagcagccccgactattcgtgggcatgatcctgattctcatcttcgccgaggtgctcggcctctacggtctcatcgtcgccctcatcctctccacaaagtagaccctctccgagcccaccagccacagaatattatgtaaagaccacccctcctcattccagaacgaacagcctgacacatacgcacggggccgccgcccccagtagttggtcttgtacatgcgcagtgtcctagtgcccatcgtctgtttccccggccttgcccccgcccgccccgtgccgtggacatctgggcccactcatcgcccctccaggcccccggcgccccaccccctagagtgctctgtgtatgcggatgatttagaattgtcatttctctttactggatgtttatttataaagatctggcctgttcctgcgtctgcggagcggcccttgtctcccagctatctataaccttagctagagtgtcgccttgtgggttcctgttgctgagacttcctggatggagccgccctcaccgccgggcccgtggccctgcgcggagctgtgtccaataaagttcttggatgtga

SEQ ID NO: 104292 - DNA, 1303 bp, Homo sapiens
cccggcgcgagaccggtccaacgctgcggagatccagaggccggcggcgcccggaaacacccgcggaggccgaggcagggcggggccgggcgccggggccgggtcgctgggcgggcggcacagcccgggggaggtcaacgggccggccgggcgtcccggggacgcgtctcccccacggtgcgaagtggtacggctcgcaggggcggggcccaggtcatgtgacgcggccgcggccgccattttgttctgcggtgctggtatttagagcgcagcggctgacgggccggatcgccttcgccgccgcccgcccgcaaaccttcgtgcccggcccgtcctcgcccccgcctccgccaccgcctcggcccgcagagcttgccccctccccacccgcagacatgtccgagtccaagagcggccccgagtatgcttcgtttttcgccgtcatgggcgcctcggccgccatggtcttcagcgccctgggcgctgcctatggcacagccaagagcggtaccggcattgcggccatgtctgtcatgcggccggagcagatcatgaagtccatcatcccagtggtcatggctggcatcatcgccatctacggcctggtggtggcagtcctcatcgccaactccctgaatgacgacatcagcctctacaagagcttcctccagctgggcgccggcctgagcgtgggcctgagcggcctggcagccggctttgccatcggcatcgtgggggacgctggcgtgcggggcaccgcccagcagccccgactattcgtgggcatgatcctgattctcatcgtcgccctcatcctctccacaaagtagaccctctccgagcccaccagccacagaatattatgtaaagaccacccctcctcattccagaacgaacagcctgacacatacgcacggggccgccgcccccagtagttggtcttgtacatgcgcagtgtcctagtgcccatcgtctgtttccccggccttgcccccgcccgccccgtgccgtggacatctgggcccactcatcgcccctccaggcccccggcgccccaccccctagagtgctctgtgtatgcggatgatttagaattgtcatttctctttactggatgtttatttataaagatctggcctgttcctgcgtctgcggagcggcccttgtctcccagctatctataaccttagctagagtgtcgccttgtgggttcctgttgctgagacttcctggatggagccgccctcaccgccgggcccgtggccctgcgcggagctgtgtccaataaagttcttggatgtga

SEQ ID NO: 104293 - DNA, 1000 bp, Homo sapiens
tttagagcttctccatttttattacacaaaattgttaagttttcacatccaagaactttattggacacagctccgcgcagggccacgggcccggcggtgagggcggctccatccaggaagtctcagcaacaggaacccacaaggcgacactctagctaaggttatagatagctgggagacaagggccgctccgcagacgcaggaacaggccagatctttataaataaacatccagtaaagagaaatgacaattctaaatcatccgcatacacagagcactctaggggggtggggcgccgggggcctggaggggcgatgagtgggcccagatgtccacggcacggggcgggcgggggcaaggccggggaaacagacgatgggcactaggacactgcgcatgtacaagaccaactactgggggcggcggccccgtgcgtatgtgtcaggctgttcgttctggaatacagaggggtggtctttacataatattctgtggctggtgggctcggagagggtctactttgtggagaggatgagggcccaccagccacagaatattatgtaaagaccacccctcctcattccagaacgaacagcctgacacatacgcacggggccgccgcccccagtagttggtcttgtacatgcgcagtgtcctagtgcccatcgtctgtttccccggccttgcccccgcccgccccgtgccgtggacatctgggcccactcatcgcccctccaggcccccggcgccccaccccctagagtgctctgtgtatgcggatgatttagaattgtcatttctctttactggatgtttatttataaagatctggcctgttcctgcgtctgcggagcggcccttgtctcccagctatctataaccttagctagagtgtcgccttgtgggttcctgttgctgagacttcctggatggagccgccctcaccgccgggcccgtggccctgcgcggagctgtgtccaataaagttcttggatgtga

SEQ ID NO: 104294 - DNA, 1221 bp, Homo sapiens
cccggcgcgagaccggtccaacgctgcggagatccagaggccggcggcgcccggaaacacccgcggaggccgaggcagggcggggccgggcgccggggccgggtcgctgggcgggcggcacagcccgggggaggtcaacgggccggccgggcgtcccggggacgcgtctcccccacggtgcgaagtggtacggctcgcaggggcggggcccaggtcatgtgacgcggccgcggccgccattttgttctgcggtgctggtatttagagcgcagcggctgacgggccggatcgccttcgccgccgcccgcccgcaaaccttcgtgcccggcccgtcctcgcccccgcctccgccaccgcctcggcccgcagagcttgccccctccccacccgcagacatgtccgagtccaagagcggccccgagtatgcttcgtttttcgccgtcatgggcgcctcggccgccatggtcttcagcgccctgggcgctgcctatggcacagccaagagcggtaccggcattgcggccatgtctgtcatgcggccggagcagatcatgaagtccatcatcccagtggtcatggctggcatcatcgccatctacggcctggtggtggcagtcctcatcgccaactccctgaatgacgacatcagcctctacaagagcttcctccagctgggcgccggcctgagcgtgggcctgagcggcctggcagccggctttgccatcggcatcgtgggggacgctggcgtgcggggcaccgcccagcagccccgactattcgtgggcatgatcctgattctcatcttcgccgaggtgctcggcctctacggtctcatcgtcgccctcatcctctccacaaagtagaccctctccgagcccaccagccacagaatattatgtaaagaccacccctcgcccgccccgtgccgtggacatctgggcccactcatcgcccctccaggcccccggcgccccaccccctagagtgctctgtgtatgcggatgatttagaattgtcatttctctttactggatgtttatttataaagatctggcctgttcctgcgtctgcggagcggcccttgtctcccagctatctataaccttagctagagtgtcgccttgtgggttcctgttgctgagacttcctggatggagccgccctcaccgccgggcccgtggccctgcgcggagctgtgtccaataaagttcttggatgtga

SEQ ID NO: 104295 - DNA, 1135 bp, Homo sapiens
cccggcgcgagaccggtccaacgctgcggagatccagaggccggcggcgcccggaaacacccgcggaggccgaggcagggcggggccgggcgccggggccgggtcgctgggcgggcggcacagcccgggggaggtcaacgggccggccgggcgtcccggggacgcgtctcccccacggtgcgaagtggtacggctcgcaggggcggggcccaggtcatgtgacgcggccgcggccgccattttgttctgcggtgctggtatttagagcgcagcggctgacgggccggatcgccttcgccgccgcccgcccgcaaaccttcgtgcccggcccgtcctcgcccccgcctccgccaccgcctcggcccgcagagcttgccccctccccacccgcagacatgtccgagtccaagagcggccccgagtatgcttcgtttttcgccgtcatgggcgcctcggccgccatggtcttcagcgccctgggcgctgcctatggcacagccaagagcggtaccggcattgcggccatgtctgtcatgcggccggagcagatcatgaagtccatcatcccagtggtcatggctggcatcatcgccatctacggcctggtggtggcagtcctcatcgccaactccctgaatgacgacatcagcctctacaagagcttcctccagctgggcgccgctcaggcccacgctcaggcgggccggatcgccttcgccgccgcccgcccgcaaccttcgtgcccggcccgtcctcgcccccgggcatgcgccgacctgattcggggccgctgatgctttgatcctcttctcttcccggagacgtagctgcccagggttcagggacgcgatccctgaggtcatcgcatccgacatcgcgacgacagagattaataggggtcgatcctcggaagccgcaaaaaagtggtaatacaaactagatctcattgtgaaaacatagccatcaatgatcacactcaatctcaagaacagcgaaaccagggctgtagcacgaatcaagtcaacctggtcccatggcggcccgagcaataaaatcgagttaaggtctaattgaacaaggtcgactaattgctgatagtaatggaactcataacgtgtggtggtggaaacatcaa

SEQ ID NO: 104296 - DNA, 873 bp, Homo sapiens
cccggcgcgagaccggtccaacgctgcggagatccagaggccggcggcgcccggaaacacccgcggaggccgaggcagggcggggccgggcgccggggccgggtcgctgggcgggcggcacagcccgggggaggtcaacgggccggccgggcgtcccggggacgcgtctcccccacggtgcgaagtggtacggctcgcaggggcggggcccaggtcatgtgacgcggccgcggccgccattttgttctgcggtgctggtatttagagcgcagcggctgacgggccggatcgccttcgccgccgcccgcccgcaaaccttcgtgcccggcccgtcctcgcccccgcctccgccaccgcctcggcccgcagagcttgccccctccccacccgcagacatgtccgagtccaagagcggccccgagtatgcttcgtttttcgccgtcatgggcgcctcggccgccatggtcttcagcgccctgggcgctgcctatggcacagccaagagcggtaccggcattgcggccatgtctgtcatgcggccggagcagatcatgaagtccatcatcccagtggtcatggctggcatcatcgccatctacggcctggtggtggcagtcctcatcgccaacccctagagtgctctgtgtatgcggatgatttagaattgtcatttctctttactggatgtttatttataaagatctggcctgttcctgcgtctgcggagcggcccttgtctcccagctatctataaccttagctagagtgtcgccttgtgggttcctgttgctgagacttcctggatggagccgccctcaccgccgggcccgtggccctgcgcggagctgtgtccaataaagttcttggatgtga

SEQ ID NO: 104297 - DNA, 1048 bp, Homo sapiens
  misc_feature (809)..(809): n is a, c, g, or t
  misc_feature (812)..(812): n is a, c, g, or t
tttagagcttctccatttttattacacaaaattgttaagttttcacatccaagaactttattggacacagctccgcgcagggccacgggcccggcggtgagggcggctccatccaggaagtctcagcaacaggaacccacaaggcgacactctagctaaggttatagatagctgggagacaagggccgctccgcagacgcaggaacaggccagatctttataaataaacatccagtaaagagaaatgacaattctaaatcatccgcatacacagagcactctaggggggtggggcgccgggggcctggaggggcgatgagtgggcccagatgtccacggcacggggcgggcgggggcaaggccggggaaacagacgatgggcactaggacactgcgcatgtacaagaccaactactgggggcggcggccccgtgcgtatgtgtcaggctgttcgttctggaatacagaggggtggtctttacataatatgcccgccccgtgccgtggacatctgggcccactcatcgcccctccaggcccccggcgccccaccccctagagtgctctgtgtatgcggatgatttagaattgtcatttctctttactggatgtttatttataaagatctggcctgttcctgcgtctgcggagcggcccttgtctcccagctatctataaccttagctagagtgtcgccttgtgggttcctgttgctgagacttcctggatggagccgccctcaccgccgggcccgtggccctgcgcggagctgtgtccaataaagttcttggatgtgaaaaaaaaaccanaanaacacggcagggcccagtgcggggcggacaacaaaggcaggcagggcccaggtcatggggtcccagaccgggttcggtccagggagactgcgggcccaaaggaaggaaaacgcagcacaggtacggtagaccggaagagaagacgcgaggcgggagacacctgaccaaagcgcggcacgctggacaccaccaccgcgcgcgcacaacgatcacacgcaacggtgtccacgcccgcc

SEQ ID NO: 104298 - DNA, 606 bp, Homo sapiens
cccggcgcgagaccggtccaacgctgcggagatccagaggccggcggcgcccggaaacacccgcggaggccgaggcagggcggggccgggcgccggggccgggtcgctgggcgggcggcacagcccgggggaggtcaacgggccggccgggcgtcccggggacgcgtctcccccacggtgcgaagtggtacggctcgcaggggcggggcccaggtcatgtgacgcggccgcggccgccattttgttctgcggtgctggtatttagagcgcagcggctgacgggccggatcgccttcgccgccgcccgcccgcaaaccttcgtgcccggcccgtcctcgcccccgcctccgccaccgcctcggcccgcagagctttgcgcgccgcgtccccacaccgcggctaggactatgtccggagtccaaggaggcggaaccaccgagtatgcattcagtcatgtcagcacagatcactggtgctgctcatctgagacagctcgatggtcttttcagccggcgccatgggcggcttgacttactggctacatgcccaagatgcgcggtacgccaggcatagcggggcgatgtcttgtctaatgcgtgccgggag

SEQ ID NO: 104299 - DNA, 997 bp, Homo sapiens
cccggcgcgagaccggtccaacgctgcggagatccagaggccggcggcgcccggaaacacccgcggaggccccctccccacccgcagacatgtccgagtccaagagcggccccgagtatgcttcgtttttcgccgtcatgggcgcctcggccgccatggtcttcagcgccctgggcgctgcctatggcacagccaagagcggtaccggcattgcggccatgtctgtcatgcggccggagcagatcatgaagtccatcatcccagtggtcatggctggcatcatcgccatctacggcctggtggtggcagtcctcatcgccaactccctgaatgacgacatcagcctctacaagagcttcctccagctgggcgccggcctgagcgtgggcctgagcggcctggcagccggctttgccatcggcatcgtgggggacgctggcgtgcggggcaccgcccagcagccccgactattcgtgggcatgatcctgattctcatcgtcgccctcatcctctccacaaagtagaccctctccgagcccaccagccacagaatattatgtaaagaccacccctcctcattccagaacgaacagcctgacacatacgcacggggccgccgcccccagtagttggtcttgtacatgcgcagtgtcctagtgcccatcgtctgtttccccggccttgcccccgcccgccccgtgccgtggacatctgggcccactcatcgcccctccaggcccccggcgccccaccccctagagtgctctgtgtatgcggatgatttagaattgtcatttctctttactggatgtttatttataaagatctggcctgttcctgcgtctgcggagcggcccttgtctcccagctatctataaccttagctagagtgtcgccttgtgggttcctgttgctgagacttcctggatggagccgccctcaccgccgggcccgtggccctgcgcggagctgtgtccaataaagttcttggatgtga

SEQ ID NO: 104300 - DNA, 1061 bp, Homo sapiens
  misc_feature (558)..(558): n is a, c, g, or t
tttagagcttctccatttttattacacaaaattgttaagttttcacatccaagaactttattggacacagctccgcgcagggccacgggcccggcggtgagggcggctccatccaggaagtctcagcaacaggaacccacaaggcgacactctagctaaggttatagatagctgggagacaagggccgctccgcagacgcaggaacaggccagatctttataaataaacatccagtaaagagaaatgacaattctaaatcatccgcatacacagagcactctaggggggtggggcgccgggggcctggaggggcgatgagtgggcccagatgtccacggcacggggcgggcgggggcaaggccggggaaacagacgatgggcactaggacactgcgcatgtacaagaccaactactgggggcggcggccccgtgcgtatgtgtcaggctgttcgttctggaatacagaggggtggtctttacataatattctgtggctggtgggctcggagagggtctactttgtggagaggatgagggcgacgatgagaccgtagangccgagcacctcggcgaagatgagaatcaggatcatgcccacgaatagtcggggctgctgggcggtgcccgcacgccagcgtccgcccagcagccccgactattcgtgggcatgatcctgattctcatcttcgccgaggtgctcggcctctacggtctcatcgtcgccctcatcctctccacaaagtagaccctctccgagcccaccagccacagaatattatgtaaagaccacccctcctcattccagaacgaacagcctgacacatacgcacggggccgccgcccccagtagttggtcttgtacatgcgcagtgtcctagtgcccatcgtctgtttccccggccttgcccccatcgttcaggccttaccaaccacgtatggctcatcttgtcgattaaccacttacactgggggccagtaggaccgcgctgttataaagctggagatgagcagtggacctactcttgccgggacagtggttattcaccctaatgtgttcgt

SEQ ID NO: 104301 - DNA, 658 bp, Homo sapiens
ctataggctagtacgaggcctggtttgaattggccgaggctggtatttagagcgcagcggctgacgggccggatcgccttcgccgccgcccgcccgcaaaccttcgtgcccggcccgtcctcgcccccgcctccgccaccgcctcggcccgcagagcttgccccctccccacccgcagacatgtccgagtccaagagcggccccgagtatgcttcgtttttcgccgtcatgggcgcctcggccgccatggtcttcagcgccctgggcgctgcctatggcacagccaagagcggtaccggcattgcggccatgtctgtcatgcggccggagcagatcatgaagtccatcatcccagtggtcatggctggcatcatcgccatctacggcctggtggtggcagtcctcatcgccaacccctagagtgctctgtgtatgcggatgatttagaattgtcatttctctttactggatgtttatttataaagatctggcctgttcctgcgtctgcggagcggcccttgtctcccagctatctataaccttagctagagtgtcgccttgtgggttcctgttgctgagacttcctggatggagccgccctcaccgccgggcccgtggccctgcgcggagctgtgtccaataaagttcttggatgtga

SEQ ID NO: 104302 - DNA, 869 bp, Homo sapiens
  misc_feature (558)..(558): n is a, c, g, or t
  misc_feature (641)..(642): n is a, c, g, or t
  misc_feature (644)..(646): n is a, c, g, or t
  misc_feature (657)..(657): n is a, c, g, or t
  misc_feature (663)..(663): n is a, c, g, or t
  misc_feature (851)..(851): n is a, c, g, or t
tttagagcttctccatttttattacacaaaattgttaagttttcacatccaagaactttattggacacagctccgcgcagggccacgggcccggcggtgagggcggctccatccaggaagtctcagcaacaggaacccacaaggcgacactctagctaaggttatagatagctgggagacaagggccgctccgcagacgcaggaacaggccagatctttataaataaacatccagtaaagagaaatgacaattctaaatcatccgcatacacagagcactctaggggggtggggcgccgggggcctggaggggcgatgagtgggcccagatgtccacggcacggggcgggcgggggcaaggccggggaaacagacgatgggcactaggacactgcgcatgtacaagaccaactactgggggcggcggccccgtgcgtatgtgtcaggctgttcgttctggaatacagaggggtggtctttacataatattctgtggctggtgggctcggagagggtctactttgtggagaggatgagggcgacgatgagaccgtagangccgagcacctcggcgaagatgagaatcaggatcatgcccacgaatagtcggggctgctgggcggtgcccgcacgccagcgtnncnnncgatgccgatngcaaanccggctgccaggccgctcaggccacgctcaggccggcgcccagctggaggaagctcttgtagaggctgatgtcgtcattcagggagttggcgatgaggactgccaccaccaggccgtagatggcgatgatgccagccatgaccactgggataatggacttcatgatctgctccggccgcatgacaganatggccgccatgccggta

SEQ ID NO: 104303 - DNA, 307 bp, Homo sapiens
aaaaattgagttggagtctcactctgtcacccaggctggagtacagtggtgcaatcttggctctctgaaacctctgcctcccaaattcaaatggttctcatgtctcagcctcccaaaatgctgggattacaggcatgagctgctgtgcctggcctgtaatagctttttaatattagggaaattagttaccttataaaatatattactgatatttttctttgtcttttgactttgtgtgtgtgtctaatataaaatgaaaatgcttttatttttatagtcagatttttctgtttttttttctctttat

SEQ ID NO: 104304 - DNA, 400 bp, Homo sapiens
tcctgggttcttaaattaaaaatcgttgtttgtttatttattgaggtaccattttccaaatttcccacatttagtgaaagggcttttggcaaaatgagcaagctgttgaacgttcaagtctaacacattctgttaaacttccgtgatgcccctcggaaatattttatcttgacgtttcggacaattaaatgatacttgggcgctcacaacaccgcagcttgtagtctaaacaccttcccctaaagtgttacctttacttaatcctgaacagaatgaacttggggtggctcttttaacttatctgatctcacctatattatcaattacttgtttccagaaagattacagttgagtgatcttgagccagaaagagatttgaaagaattatttacagagtcaa

SEQ ID NO: 104305 - DNA, 698 bp, Homo sapiens
atgtgccaaaaagtaaggaaacatttaaagaaagatggatggggacatgtcagaaaacccacaggagccagcctgaaatagctcctaatgaccaaagataaaacaatttgagcaagaaaatagtattgttttttagcccctaaaataaaataaatatctatgagttcatactattgtaataaataaattaatgaattagtaaatctagaaggaaagagggaaatagagaattgctattaggcagataacacagtaataaatgttgcagacaagattcctcaaaggatgcaaaaattaatgggtagaaatttgagcaaggtacttacaaagtataaggtaaaactttatattacagaaacctgacagacaccaacttgacaaaatagtcaaggtaaacagcaccagtatataagacatatcagcatcatgaaccccttggtaaaatgcgctgagaagcagacattatttttttagcagtcttgccaaaaatgcataatttctatcatgaaaaaacttcagacaaacccatattgaggaacattctataaaataactgatcagtactctttagaggtatcaaagtcatacataaaagatgaggaaaaattgaggaattgttatagactagaggagactgtggagatatagcaactgaatgcaagtgggatcctggaattacaaaaaaaaaaaaaaaaaag

SEQ ID NO: 104306 - DNA, 351 bp, Homo sapiens
tcattccaacatttcttaatagtatttgttaaaagtatattatagtcaaacaacaactttaaatttgtcattcattcttaaagttttagatcatttactagaattttaaaatcacacataaatttggtaataacaatatacggatagaaaaaactcagaaatataaatagcagagagcaaaacatttaaagaatacatatttattggactactgaggatagataaaatgacttgaaagggggaaaatggagaggaaaaaatatatttattataagaaaatttgaggctgggtgtggtggctcacacctgtaatcccagcaccttgggaggtagagtcagaagaatcacttg

SEQ ID NO: 104307 - DNA, 436 bp, Homo sapiens
ggttagagaacataacatcctctataatttcagtcttttgaaatttattcaggcttgctttatgttctaatcatatggaatatgttggtgagtgttccatgagtacttgcaaagactatgtattctgcagttgttgagtgtagcattctataaatgtcatgaagatcaaatgtgttattagtattgttgaaatctctatatcttttctgattttttttgccatcttctatcagttactaaaaattctccactatgattgtagatatatctatttttccttttggttctatcactttttgctttgtatattttgagtccctgttattgggtgtatatatttagtataggttttgttttctagattaattgaccttattttttataaaacatctgtctttttacctgttaataaatacttcttttcttgcgtgtacct

SEQ ID NO: 104308 - DNA, 371 bp, Homo sapiens
gccccatcacaccgccttgctgtttttactgtgggacaaaagcactctgatctgcgtgttccggggggccctccccccagcccgacttgacgggaagtcagggttcaggtatcatctgtgcaccctggggcggggtagtctgcactgaacctgccagagtcccctcctcatttcactgaaagtcacagtctccagggctgtgttgctaaccttacgttctctccgtttgcttaatctattaagagccctaacaggagaggatgggctttctctgttgtctggggccctgctgttggccggtgctcttagcaagaggtcatttttctaggttgcgctgggacattgtgagtttggtgagggtcatggatgtg

SEQ ID NO: 104309 - DNA, 766 bp, Homo sapiens
cccaggctggagtgcagtggcagaatcttggctcactgcaagctctgcctcacgggttcacgccattctcctgcctcagcctcccaagtagctgggactacaggtgcccgccaccatgcccgggtaattttttgtatttttagtagagatggggtttcaccatgttagccaggatggtctcgatctcctgaccttgtgatccgcctgccttggcctcccaaagtgctgggattacaggtgtgagccaccgtgcccggcctaatctgcatgttaactccaagaagcatgtcttcctggacccacgctggaaagggtgtagagcagttaagcatcttaccagtgtctcacccatgaagtggtggggatgggattggaatgcagtcatctgactccaaaacactgcattttttcaggcactccagtattaagctactttgcactgtgcatataatggtatataaaactcatgactgccagcagggtgccagttgccatgggtttattgaacaagtgttagatggctagccaaattcccaatttactgaccacctgctgtgtccctgttctgcaagttggggataaagaagctgttctgtcttgaaagctctgaggtagttaatgacgatcccatgatctggcttctgttcctttctgtgaagtagcagatagtgtatgactgtgacgtgatagaaattgagagccaagaagatcagtgcagggaggctgggtcttggaaggcttccaggagacatacagcagtccccac

SEQ ID NO: 104310 - DNA, 197 bp, Homo sapiens
ttatagggttagattgtggggtgggcatgtgatcagttctagtccagcaagacacaagagtgcctgctgcagaccatctgggagaagcattttttgatcttcaagaggtataagaaagaatccttcaatctgcttaactctgtcaggtcttcacgaacattctggaccggcaataggcaacatgcagccgtgagtga

SEQ ID NO: 104311 - DNA, 363 bp, Homo sapiens
atttataaatactctatttatcaaccttttacagagtcagtctcctctagaaaatgagttttactctttgaaatcaggaataggtgaggacctgccacagcggtaactaaagaagaagtgaagtgttgcctcatttatgtttagaaactatcagaagtgcttttgttttaaaattacgtgcaaagactttagatcacacctacgtttcaaataccagaaattgaaatgaactgttaatgtattggagaacaaaagggcttagttttaggtaagaagtgtaggcaaaaaggcagtagtccattctgtgttcagttgtctttgaggtaataaaatttagtaacagtttgttagctaaaggataca

SEQ ID NO: 104312 - DNA, 843 bp, Homo sapiens
ctccaactccacacctcaagtgatccacctgcctcggcatcccaaagtactgggattacaggcgtgagccaccgcacccggcctatcatgtataattgtaactatttactgaagggtctctcccagtagattatacacttcttgtggccaaggctaataatgccttttctctttggaccctagtgcctagcatagtattcaacacatacgagtactatccctgagatactgcaaggtttatataatggtatgtagataccaatggtagtatctaaatacctgggtaaacaaatactttcaaaagcaagtctttttcaatgaatattttacatctgactgatttatttagcgaccgtaggttttatttttcaaaaatagccaccataatatatttcatttcacatgctacttgtacaatgagaaggtgacactcctcccatcaagtagtgtggcatatatcccctctgcttgaacttgtgcagtctccgtgactgccttgatcaacagtgtatatagctggaagtgatgccatatgacttccaaagatgggtcgtaaaaatgccatacattctgccttatcctcttgggacacattcttgggatccaaacactatgtaaggaaggcaagatcccatatggaaaggccacatgcaggtgttccagccagcagcagcctcagctgaggccccagccattcgccagcatcaactactagatatgtaagggactcggatggttgcagcccctaacagttgagtcaccagctgacactgcatggaaagaaataggctgtccccgcagagccctgcccaaattgcagatgcatgtgcaaaataaatgatg

SEQ ID NO: 104313 - DNA, 726 bp, Homo sapiens
tcaaatgttgctagtacggctgggcatggtggctcacgtctgtaatcccagcactttgggaggccgaggaggatggatcacctgaggtcaggagttcaagaccagcctggccaacatggcaaaaccccatctctactaaaaatccttgcatatttttcatgtcatattgtgatttatttttcttaaatattttattaatggatgctataataatagattctgatctgaaatgttcttgctagttcctccaataatgaacttttgatttcactgctgggacttaagggtgctgctcctctttcactctcacatttggaatcagatgtggggttcatccatgtggagctcagaatattggctttattactaataagcttgagtcagaagatgcagcttgaccagtcaggctccctagcattagacccacatgactgaaatgtaaacacctgattcctgggggaccagctcttctttaaaggaaggagggcaaagcaaaccggaccagctcagtttttctacagtcttaacagtcacagaagtcaactcttctcctttgggagaggaatgcttgaagaagaggaagtgctagaagttttctagcagaaaatctccccccacctggaaacatgaaggaagcgagaggaccctcctaaaaggccagttttataactagtattgtgtgttggtttcccagattaaaacgagggatactgtgcagtaaccaaa

SEQ ID NO: 104314 - DNA, 400 bp, Homo sapiens
caacctgctgaccgaccaaccctaggcggtgaattccttaaatgctgaagaatggagaggctgatcccagcaaactgtcaccaggaccccctgcccccaaccctgactcaagcctatggcctcaggccctgcagcctgaaaccagtgtacaaagcccatcatggttcccctgactgcactttacagtttgcaaagccttttgcttccatttggcctccggggtgtcccttggaacaacccagtgggtggacagggcggggaatatgaatcccattttacagatgtggcaactgaggcccagaggacccagagttgagttgctcaagatcacacaatgaggcagggacacgactgagatgtaccttccaggatccagaggtccccaggctggtgctctgcc

SEQ ID NO: 104315 - DNA, 349 bp, Homo sapiens
cgtggtggcatgtgcctgtagtctctgctactcgggaggctgaggtgggatgatcacttgagctgagtgatagaggctacagtgagctatgattgtaccaccgcatgcactctagcctgggtaaaagagcaagaccctgtctcaaaaaataaaataaagatgtttgggcttttgagttaagaaagctgtggaatttaagttcacagtgtttatgtgatatttatgttaggtggacggtatacttgtaaaaaaagaatttaggagcaaataatcgaattatttaaataaaactcaaagcaaactccttccccaaaaagatgttcatcagatgttagctaccatcctctgt

SEQ ID NO: 104316 - DNA, 258 bp, Homo sapiens
ttgttttaaaatttgcaagtatattctctttattaaatgactgtatattaggagaggctttatcaggtgcagaaataaacccccaaatctcaaaagcttaacatgaaagttgatctctcattcactcaaagactgctgctggtctagaggaattttcaggaatcatttttccaagcagtaatgaaagattttagactacttgcctacccattttagcaatgccatctgaaacatgtggccccccagggtcactatgaa

SEQ ID NO: 104317 - DNA, 552 bp, Homo sapiens
atggtggaaggtgaaggaagcacatcttatcatggcagagcaggaggtagagagagccaagagagaagtgctacacacttttaaaccatcagttcctgtgggaactcactactgtgagaacagcaagggggaaaccacccccatgatccaatcacctccaaccaggtccctctcctaacactgggaattacaattcaacatgagatttgcgtgaggacacagagccaaatcgtatcagccatgctactggcattctaggtgacctccagcttgcacgtggcctatcatgggacttctcagcctccataattgcgagagccaattcccctaataagtcttctcttacatatctatatatcctattggttctatttctctggagaatcctgattaatatggccacatagcctttagaatttatatcctaggctgggtgcagtggctcacgcctgtaatcccagcactttgagaggccgaggtggtcggatcacgaggtcaggagattgagaccaccctggctaacacggtgaaaccccatctctactaaaaata

SEQ ID NO: 104318 - DNA, 432 bp, Homo sapiens
aagagagaagaggagacattttatttgaacatgtgtgctgtagatgaaatgcacctgacaattcaatatgtggatccttcttggaagtaacagagcatgctggccaaagagttactgcaaaaatgctcctaaatcaagtaaacaaggaaaagaacaggagctgataatgctgttgtttgttaatgctcttattgtaaactactttttggaagataaaccttttgtgggaaggccaggtactaggctccttcattgccttagatgatccaagagactgagtaatcaagatggagcaaagagcaagaagagtgtctgcaacacttttaacttcacaaagaagttaccaggcagaaggggacaattgcagtgactgattttcctgacaaaatgacagtgtcttgacaatggctatgaagtcttgatgacccttaa

SEQ ID NO: 104319 - DNA, 260 bp, Homo sapiens
tggtctgtgccacatctgaggcctgtcagacaatttcaaacccaggttctcagggaagggtctggtgggaagcacccaagcgctgggtcctgggtcctgcagagcctggacttgggtggacactgtgctgcgaccccacccactgtgtaaggagtctccaaggctgcagctcggctcagctcagcacagtatagacggcctaagaggggtggggagggggcccagcgtgtgcatccctcccaaccccatgagaccaacca

SEQ ID NO: 104320 - DNA, 500 bp, Homo sapiens
gctgtccatcccattgcagagcacacacacagccacgcttgttcagactgggacaatgtgggcacacctgtgaatcgaacaggcacagttttggcatgtgggaaggaaccataggacctggagagaactcacacagacgtagggagaatgtgcaaacttcacacagacagggccccagtggggaattaatttttctcgtgaatgttacaccaaaacaactttgaatgaaatgatgctattccaggacatgcttacgcttgttaacagcatggtcattggcatcaaaagagcctgggtttgagttccatttctgcctcctgttagatctgtgaccttggataagtcgactaacacaatagtagtaccttcctcacaggctgtgtgatgattaaatgatacaatacttgtaacacacttaacatagaaattgacactgtaattgctcaataaattttagctattaatgctattatttaatacagatgttcttgtaaataggg

SEQ ID NO: 104321 - DNA, 530 bp, Homo sapiens
ccacaaatagctttacactgttccctgacttcaagccaacctcactgctacgataagcattttggttcttgaatccaactgtcttagtttcttcacagtatttccatcagggtcttcaagaaggctcatttctcagtctcagaaagggagggaaaatcatgaaaaaggtggccattttcaggcaaccttcctgtggccagaatttcttcttttttgtatgaggaagatttctttataagtatagcacttaggattttttttttgtttttccaggtattattctttttatattgacaaataaaatttgtatatatttatggaataaaacatgacattctgacatgtcatatatatgtgtgtgtgtatatatacataaacatatatatatatatacacacacacacacacacacacacacattgtggagtggctaaattgagctaattaacatgggcattacctcacatacttgccatttttgtgtgtggtgaaaacacaatctactctcttagcaatttgcaaatacatga

SEQ ID NO: 104322 - DNA, 498 bp, Homo sapiens
tgttaaatggtgacctagagaaagccaaacacattaggcacattataccaaaagaacttgacttttaaataatggttttagaaatggaagctggtgttcttctgcgctgtggacgcggaggagaatggagcaggtctgcacagccaaagtgcctcctttcactccagggtccaggcatccagcagccgaagcgcctcctttcactccagggtccacacatccagcagccgaagcgcctcctttcactccagggtccacacatccagcagccgaagcgcctcttttcactccagggtccacacatccagcagccgaagcgcctcctttcaatccagggtccacacatccagcagccgaagcgcctcctttcactccagggtccacacatccagcagccgaagcgcctcctttctctccagggtccacacatccagcagccgaagcgcctcctttcactccagggtccacacatccagcagccgaagcgcctcctttcac

SEQ ID NO: 104323 - DNA, 193 bp, Homo sapiens
ggaaaataatctagaaatgtccataaaaagtcattgttcctcttattaacgagaggaaataatgcctaaaaaaagaaaaagggtggaggggatgtgaaagggagaaaaaactctttgagtgatgtcaaagaactatttccagaaaactggggaaaaactgtacatataacttttaacctttaggtgagattta

SEQ ID NO: 104324 - DNA, 311 bp, Homo sapiens
tgaaactcttgagtacagtaagacgtgcccatcacgtgagagcatatgcaatcattacaaagctttggcatgcagttttctgcttggatcaagaatatcagtccttaccctaaaaatgaatccccataggcattcatttgaattgccaatacttttagaaaaaggaaatcgttaagtgccaccttgtagccattaaaaccatggccggacagttcactgaagctcagtcatagaaattcagccatgatttggaagcattgttttgcacaagcttaattacatcaagcaattcatctgtacaactccacaac

SEQ ID NO: 104325 - DNA, 675 bp, Homo sapiens
gtagcgtgatcatagctcactgcagccgtaaactcctgggctcaagcaatcctcctgccactgcctcttgattaggtggaaccacaggcatgcaccaccacacgtacctaattttatatatatatttttttatttttcatttttatttatttttgtttttttgagttgaagtctcactctgttgcccaggccggagtacagtggcacaatcttggctcactgcaacctctgcctcccaagatcaagcaattctcgtgcttcagcctccaaagtagctgagattacaggtacccaccataatgcctggctgatttttgtatttttcgtagagacaaggtttcaccttgttggccaggctgatctcaaactcctgacctcaagtgatccacctcccccggctacccaaagtactgggattataggtgtgagccaccatgcctgggtaacacccaactaattttaaatatatattttgtagagatggggtctagccttgttgcccacgctggtctcaaattcctgggctcaagtgatcctctcgcctgagcttcccaaagtggtagaattgcaggcatgaattgctgcacccagcctcatctgtgctgtgaattatgtgctgtattgactctcaagcatgatgaccattggtggtttctgtaccatttcctgttactt

SEQ ID NO: 104326 - DNA, 311 bp, Homo sapiens
ttaccagcaactcacggcaatcacacatacacacatacttacacaaatacagtaattacatacagttccttaaaaggtagattccctagcaccagggagtaactaaaaaaaaattgaagaatttcaaagctcgctgaaaaatgccctcacgaggatcacccaagacggagctcccaccgcatcctgatcacagcgttgcagagatcatgagacccggcctttgcaggcaagagttgcttgtcattcaaagcattttccctgaattccagacagcctctgcagtagtcctgacattcttccagaaaagcact

SEQ ID NO: 104327 - DNA, 123 bp, Homo sapiens
tggcttctgaaacctgtcacccgtccatggctccacttgaaccaggaactgactctctgtctgctatgcttagaaaacaaggtgccatgactggccccattccagcggattcacccggtgaag

SEQ ID NO: 104328 - DNA, 487 bp, Homo sapiens
ggaatcagaccagataccatgaccctcatctcctgtttcacattgattagatgcaaacttgagctgtagttcacatgatgttcaacatatgttgaatcttctgtgtttccctcaaaaatttaaaatatcctatggcatacagttttggagttgtggcatgaacacatttatcatcagaaaggatgttttaaagatgctagagatgaggtaagttaaaagaggaagagtactgaagtcaaatttcctgtttatggtcatactcttggacaaattactttacctctgttaaatgaaggtttttctatatacctcttttataacctctaaagttctttttcagttccaaaacacattaactctatggctcatctaaagcctttgctatattcttaataccaatgagccattcctttgctgctagaatttatttgcagatttgtaaatctaatgtaaataagttaccttcttgatgactatttaaatcttc

SEQ ID NO: 104329 - DNA, 282 bp, Homo sapiens
tgtagaatattctttgaaaatcatccttttttagctttcaaatgcaattatttgctgtcttactcctaagatataaatttcttgcaggtagaattggtttatttccttagaatagattgccaagaatattgttactggcccaactggtatgaacattttttcccattcttaacacttccaaggttttcaaaaggggttgtattaatttcactgtaatccttctaccacctggatattttgaaataaagaatctttttcaaacttggtaggggaaacaatata

SEQ ID NO: 104330 - DNA, 598 bp, Homo sapiens
gttttgtaaaactgctttcaggaagtaattaaggtagatacacacaagcccaagttgaacaacattatatctcacttactttgaatggcctagtcaggaatattgtatatatccataaacgtgaaagtaaaacatttgacgatgtattttctttaggtgtattaagatataaggccaggctgggcatggtggctcatacctgtaatcccaacactttgagtggctgaggtgggaagatcacttgagcccaggatttcaagacgagcctgggacacatagtgaaaccctgtctctacaaaaaaaaaaaaaaaaattatctaggtgtggtggcgcacacctgtagtcccagctactcggtaggctaagacagggaggatcactttagccctgaaggttgaggctgcagtgtgctatgatcatgccactgcactgcagtctggaagacagagtgagattctgtctcaaaaaataataataataatggtatgaggccagttcatcacagtaaaaaataatattgtggaaaatctatagtgttgagttagattcaacttagaaattagcaaacactgataactacttgtcaaaaatgctgata

SEQ ID NO: 104331 - DNA, 247 bp, Homo sapiens
ctctttagatagctaactttatttggggtttgtttctgaatgcaagataggcatactgtagtaaattcccttctttcaaccctgggttgaaatcctgtcaattaattagttgtatttagtcttacaatagataaaccaggtagtttcacatagcctgtttctagggttttatctaggacatcgtaggagtttcttgaaggaaaatatagctatagggaacattttaatttggatctgcttcattact

SEQ ID NO: 104332 - DNA, 756 bp, Homo sapiens
  misc_feature (1)..(1): n is a, c, g, or t
ncactggggcttggcactgaaatagctactgtggcggactacggacacgacggacactttgaggatcttgctggaatgaagccaaaggaggctttggcaaaggaaaaatatcaatattagaaatatctttcatgggaataagtctggccacaatgtacagaacagaccaaataacaagagtttggaaaggaggcaaatccggacctgaactagattaaggtcactattaaaaaaaggaaggaatgttaacaatactgacaaaacggaccctataggatgtggagagcaattattagacagatgtggcaaaggaaatgaaaaagtcaatgacaattaggaagttgagccttggggatgaatatacagtcatattactcactatgggcagtgcagtagagtgcaaagagttctatacttgtggatcagatcacctgtcctcaatttccaggtcagtgctaagtatataagctgttcttactaccttatataactgttggttcaaagattgaagtgaactgcagggtaggaaaaactggaaataaagtaaaaatgccttgtgtgctttgttgggagagaaacaaaggtgataaacacaggtagcaaggtcttgggaaaggaagattttaagagcatgcttggattaactttgaaaataaggggcttagggtacttctgaaatagcaacagagggaggaaaggatggaaatattgatggcaagagaaagaagctcacattagccatgctacacgctgtat

SEQ ID NO: 104333 - DNA, 354 bp, Homo sapiens
aaggaaatgacagaataaagagacaacccacagattgagaaaaaaatatttacaaaatatacattagatcagggactaatatccaaaatgtacaaactcagaccgctcaataacaataaaacaaataaccctattaaaaatgggcagggccaggtgcagtggctcatgcctgtagtcccagtactttgaggggctgaggcaggaggactgcttcaacccaggagtttgagacaagtctgggcaatatagtgtgaccccacctctaaaaaaataatgataatattaatacaaagcttctgggctgaattatgtcctcctcagaagttactgaagtcctaacctgccagtacccgt

SEQ ID NO: 104334 - DNA, 631 bp, Homo sapiens
ttggtagaaacgggggtcactatgttgcccaggctgggagaagctttcccattgatggattgattcagggtctcgcttgtctgtcacccagggtggagtgcagcagcgtgatctcgcctcactgcctcaacctctcaaactcaagtgatctccagcctcagcctcccaagtagctgggactacagatgcacaccaccatgcctggctaatttttgtactttttgtagagatggggtctcccctgtgttgtccaggctggtctgtaactcctgagctcaaatgatcacctgccttggccttccaatgtgttgggattacaggtgtgagccattgtgtctggccattcgccttttattagaagatggcagtctttcccaggggcttcagtacaattttttaatgtcatcaccaacaaagaaaaatgaggttagtgtgattggcttaggacagtcacagttcatgtcctgagatgccctctaatcaaatacaggtgtccggtaggaagttagaagtggggatttctattgtgtgataaccagcagtgtctgtctttagacagcttgagaactatgcttttatgagtcatacacgagttttattttgtggaaaggaatctgggtgttgaatggtg

SEQ ID NO: 104335 - DNA, 801 bp, Homo sapiens
attgttttctgttccatcaagagaaggagttaacaatcatctgtgcctctacttgtttttgcaaataaagttttattgggacacagctacagcctatgactgctttcaggccttgctggcagagttgagtggttgcagctgagcttgtatagcttacagaaccaaacaatatttcctatttgtccctttacacaaaatgtttggtggtccctgatccaggagcacaggaagtgcagcatttcttgcaagaatgtccactctcatctcggggatgttttttgttttttgtttttttggagacaaggtctcactgtcaccaggctggagtgcagtggtgtgatcatggctcactgcagcctcaaactcctgggctcaagcaatcctcccacctcagcttcctgagtagctaggactacaggtgtgtaccaccatgcctggctaatttttaaattattttttgttgacatggggtctcgctatgttgcccaggctgatctaaaactcctgggctcaggtaattcttccacctcagcctcccaaacctctgggattgtaggcgtgagccactgcgcccagcctgtgatggttcttaagtcctgtaaagtatttggttgctttgcaagaaaatcttggccaggcacggtggctcatgcctgtaatcctagaactttgggaggccaaggcgggtggattacctgagatcaggagtttgagactagcctggccaacatggcgaaaccctatctctactaaaaccttatctttactaaaaaaaaatacaaaaattagctaggcatggtg

SEQ ID NO: 104336 - DNA, 799 bp, Homo sapiens
tgtggaggtcccttcggcctctcaaatcaccatttacagggcagtcacctgatcacagggctgccctgtcccaacagcagcttgttggagtctttactaggccaggcttactgcttcaacaggttcatgagtccttggcctcctatcccatgcagcatccttggtgggagaggatgtgcttggtgctcaccctgaggcagagcagtcctgtggtccagagagccaccaaatgtctagagcagccacagcttatggagccatctccccagagagacaccaccagtaggcaggcagtgtggtgtcttccatggtagaagagtgtcctgggtttaaactctaactctgccactttctccatgaccttgccacataatatcaagcttcctagagctttagtttcctttataaaatgggggtgccgggagggttcaggagagctgtggtcagatgtaaggcattcagccaatgcctgtacacagcaagtgctcagtaagtagatgtatacatacagaatatagaagtcaccttttcatgagggcctaccacatgcaggcattgcaccaggccctgcagccacaccagcaagttattaaattattcaaatgcattatattctctagaaagttatagaaagagatgaaagtatggggaccccaaataggtacattcctatttcagaagaagctcaaagcccaactaagggcagacagcgaggtgtcattaaatgagcactggactggaagtccagccccacaggcctcaggcagcacccacacactgcggcaggctcggagcctcc

SEQ ID NO: 104337 - DNA, 189 bp, Homo sapiens
gaacatgacagagggccctgatggaagatgctgaaatcatctttctaacaagtcctgaggcctctggactccatgccaggcaccggcagacccagcctcagcctttaaggtgctccaagccattcttcatgccttctctatgccacaggcaggagtgacctggaggcctcttccccttgcactgctgag

SEQ ID NO: 104338 - DNA, 732 bp, Homo sapiens
agcaaaaacaaaaaataaaacaatttgtttgcctaagatccttcatctctatccatcacaaggctcattcttgcctgctagtgtggcctacatgccacttacattttaagttatttaggaatacaaaggacagacaaaaaagagccatatgcacaggcctcattttctcttatttttgttctgtctagtaattcttttcctgcctgtctcttctccattttccttcttatttttctttttcctttttaaacagttttcatactcttcactgtcttccatttggtcttgattaggtgcatccatctcttcacttggtcttccacaaacaaaaattctgccttcagacatttggtgttagtatttcacactcagttctccctctttttacataaggattgagttttttttaatgatgattttacttttatagcagttctgaattttgcattctgttgctagtattgattccgatacaccattaaaatacaacattctagaagtctgttaccttaggagttaattaaacatgatatttgaagaaaaatgaaatgctttatagttgtttgaggcataccaatgtgtatttgttttactggatcatgttttgaactgactagggagggtagcacctgcctcagatggtaccaacaattctatttcactgggtagtctaaaactagcttatagcttaacttaacttgtgtatgtgaatttagggatgaaaactttttt

SEQ ID NO: 104339 - DNA, 263 bp, Homo sapiens
ttggcatggggacctgcccaccgtgccctgcccaggctctgtgccaccagggggcccatgcatggttgcccagcttgctctggccttgctttacgcctgtgcccagcaagcccctccagtcctatgccgccacctccaaaaccctgcaagccccttctctcctgcacagcctccccaggttgccagcagctcatcctgcaaaccccctggcagggagcctcggagccagtgtcacgtgtgcagcgtagtgcagccacacagcc

SEQ ID NO: 104340 - DNA, 680 bp, Homo sapiens
aggctgcctccggcttcaccgctcctccccgagcacagcctttgtggggcctacggggcagtaggagacaggacgcttgtcctgcggaatggcaaggaatcagctctccatttcagggcaaagtggggcctggattgtgggccttgaacatgaaggcaggtgggcgagggactaggggaccgcgtgaggcccgacgtgcacacggcagggcccggcacccatggttgcgttcggtcggccttggccggctggctcctgcttggaaacttgctgggtggtgtctgcgggaaacagtactgagtctggtgaggaggcaaacgctcagaatctactgcaggtgttagttctgcagaggagtcttcctgcttaagggctcatttgatgttctggaaatttgccaggtactgaaatacagccagtcttcccaaagattcctccgctcctctgagtgcacgtgtgtgtgtgtgtgtgtgtgtgtgtgtgtgtacagccacacaaccgtgactctgtgttcacacacaggggccctggccgaagtgtgagggtctccacgtgacaaaggatagtgagtaaacaacttcaacattgtggtttccctctgaggcttgcaaagagggtgttaagagcacaagatctaaactcatacaactttattaaaagccaaacagcccaatgtgcga

SEQ ID NO: 104341 - DNA, 688 bp, Homo sapiens
atatctgggcctgctaactaatttgcctctgacatttgcaaagagtataactgcacgaagaacttggtgccctggtgtagtcaattcagtcatggagttctcaatcttctagcatttacagtaatggccctgtggcctccccgccttggactgcctcctgtcctgcacctattcactctttgtgggccttgcagggccaggaaaggagaagaggcagagatgagtcaacaatgctccttctcaggcacagtactcataaaaatgtttgacgggagggatggacgaatcaagactagggcaaagttcaaaaatattcatgaaaaatggacatggagacatatttaggaaggtaaatacagataccacacactatcaactttgaaaatcacagatcttctttctaaacttcagtataagagaaatcaaaagtcagtatagtcagtgacagaaagcatttaaaaaatgcttgtgactaatgacattgcttatagcataaggaattatatgggagaaaactgaaagaaaacagtaactgaagaatcaggatcactcttgaaatttgtcaagtgtcaagatgggctttttatctttacagggaaaaaaacaggttcaggagagtgcttcaaaaaattaccactgggaatttttaccaaaattaagcatgctattaagaaggtttacctgaaga

SEQ ID NO: 104342 - DNA, 490 bp, Homo sapiens
accgcttcgtagctggatgcctctgggtgagtcctggaagatctgtgctgtgggagggtgcctagtggacgatccctggctgctgctgaaatgtttcctgtgagttcctggaggccttgatgcccaggagcactgtggaagcactatgcatccctcacccttgtgaacactttggagctatgagccaggtcagcccagagtcccaggctcactgtggctggagggagaggcccacttaggggagttgaaggcttccctagcttcctatgaccagagaagtttgtaatcctggaggcctgtctgtgcaagggcctgggggtgactctgggggcgtccaggatagattgcctgagagtgggggtcaccagatggtgaagtgttgtgactggcaaatacagaaagccaggagtgtgtgtcctttgtccgcctctcttccctcaggtctcctgttctttgagattacactggtgaccatactacatggatgtgc

SEQ ID NO: 104343 - DNA, 648 bp, Homo sapiens
ttgtattgggaggcttaggtatttttgttgttgtttgtttgttttgagatagagacttactctgttgcccaggctggagtgcagtggtgcaatctcagctcactgtaccgtccacctcccgggttcaagcgattctcctgcttcagcctccagagtagctgggattacaggtgcctgccaccatgctgggctgattttttataattttaataggggtggggtttcacagtgttggccaggctggtcgcaaactcctgacctcaagtgatccacgtgcctcggcctcccaaagtgctgggattacaggtgtgagccaacatgcctggccagaaggttctggtttgttaaccaggtaaggtctgcacatttaaaactgagaaatgctagcttcctagcaagcagaatggaatatatagaattgactgcatggtctcctttacttcctatcggaaaagtctttttactctgctgactagagtgtatgtgtgtgtgtgtgtgtgtgtgtgtgtgtgtgtgtatttcttttgcttcaattcattaaaaaaaaaaatagaatgagctgggtttggaagctgaggcaggaggattgcttgagccctaggagtttgaatccagcctgtgcaatacagcaagatctcatctctggga

SEQ ID NO: 104344 - DNA, 1322 bp, Homo sapiens
taagtttcaccaggaggagggaatatccactcacaagaattttagtgtctgtttttttagtatcatggtctaaaacaattgggtgaaatacagaggtcttgtttacttcttttctactaatttgctatggaatgtggatttcaaatttctgtgtgtagaaaatgtcttccatttgtcaaagctcattttaagtcccacgacctctaagaagtgttatggactaaatagctatattctcataattcccaaaacaaataaaaataaaaattcttccactccttgattttagtatgttgtgaatgaggagttaaaaattatttttataactggatctccttttgaaatcaatatgttgaaggattgttgagccaggagaagttagcaggagatttgatgtttgagaattgctgggtacatcagatcttctagagactaaatagtttataaaatcttacttggtcatcagatgtaggtcttttcatgctacagtgcgagaaataataccataatgtaatattctagcataaatatattaggccaaaaaccaaacccagtggcgacagtggcatcaggataaggagaacataagggatatatatatacatgcagaagagtttaccttttcctttggaactagttcaagtcagttccaagtactggaaattgtagtgaaccaagattggggatattactgtgtcatcttaggcaaagtgatcaactcttctttgtcccagtttccttatgaaggtgttcctgttggattagttgcctctggggcccatcttgttgagggttgtcgagaaaaataaactctctctagtgggttttccttaaagctaaattcacttaactaggaaaaaaaagccacctgtaatcccagcactttgggagactaaagcaggaggattccttgagtccaggaattcaacaccagcctcggcaacatggccaaaccttgtctctacaaaagatttttaaaaactagccaggtgtggtggcacatgcttgtagtcccaactacttgggaggctgaggtgggaggattgcttgggccgaggaggtcaagggtgcagtgagccatgattgcaccactgtactccagccacagtaacagagtgacaccctgcctcaaaaaaagaaaaaagtatactattatgagattgcctttccttttttcttcattactatcctttctttcataaataatttttaatgatcttacttgtcaataaaaaaataaaagtaactttttcccaaaatatttatgttttcaaattttactggtccatgaactttaagagaagactagatagtttttaatg

SEQ ID NO: 104345 - DNA, 295 bp, Homo sapiens
caaattttaggaatgttagtgctctgcagaaatttagactggtgaatcactgaataagtagacaattggaaatttttgagcaggggagtggcatgataaaagtggtatttgaggaagcttgatctggagacaacctttttttatattataggcttaagccactgctggcaagcgtgggtgagggtcgcaggggtggagaagagggagacgcaagggtttaaagccatgctgaggaacagcttcctgtgtctttgtactttcatttccacatttgctcaagtgggatgtacttgct

SEQ ID NO: 104346 - DNA, 1016 bp, Homo sapiens
catcaagctagtacgagcccccgggttaatcggccgaggcagggaccagagcttatcgtggactatcagatgtatgattatagcttggacatgtggagtttgggctgtatgttagcaagcatgatctttcgaagggaaccattcttccatggacaggacaactatgaccagcttgttcgcattgccaaggttctgggtacagaagaactgtatgggtatctgaagaagtatcacatagacctagatccacacttcaacgatatcctgggacaacattcacggaaacgctgggaaaactttatccatagtgagaacagacaccttgtcagccctgaggccctagatcttctggacaaacttctgcgatacgaccatcaacagagactgactgccaaagaggccatggagcacccatacttctaccctgtggtgaaggagcagtcccagccttgtgcagacaatgctgtgctttccagtggtctcacggcagcacgatgaagactggaaagcgacgggtaatgcggcattgatgcttgccaataaaaccaaccaaccaaacacaaaccttgaaggaaaactacagtgtgataaaaagaaattcttatcattccttctaaatgcacagaagagtaaagacctaaaagtctgtcaaaaagcaagaaagaaactccccagtgctagtctccagggagctgtcactgtggcagcatggggatgcacctagttcaggatctgaaggagctctgcctttggaatgcatgggagatagagactcggagttgttgtacatttacctttgtttaacagggcaccactgttgaattaacccattcagtcaacaagctctgaatgtctgacttcctatctattccattgtggtctgggtttcctttggtgaaattcaggctcaagtcttagcgaaatgtcagcagtctatactgacacaccagcctcatttacaaaaaggagatattaaaacagtgacagtattttttttttaagctctttacaaatcc

SEQ ID NO: 104347 - DNA, 628 bp, Homo sapiens
  misc_feature (623)..(623): n is a, c, g, or t
tttttttttggcagccttgtaaggagaacttcaccatttcccagcacatccctatgtgtgcgcctattttaatgcacctctctgaaacagagacctttttgttcacaaccataactaaagctggaaagtcagtcttcaggcaaggcgagggaggaaaacatcccattagaattttttcaggaaagacttatggaaaaaaatatctctctcccacctccttttatccccatgagacacagtttcccactgtaatcagggtaatatgcatttgtaagttctgatatgtgatacatttatgtgatggcaaagataagtctgtcttgcatgcaggtactagagttgtgtgggcagggtcatctgaaactcaagcaactcagaggaatatacaaggggcttggggaagaaaatggtgctcccggagcaagtgttggatccattttgcaaaccttcatgttagcagagaaagctagagtttgtttaaacaaaaatagggctgatgtggtagacacctctagttctagcctaggtgtgtgaagtccccacagctgtgcatggccctgcagctggggtgaggggactgcctacaaaccatgttgctcctgagtccccaaaatgaaatcagncgtcg

SEQ ID NO: 104348 - DNA, 3386 bp, Homo sapiens
tttttttttggcagccttgtaaggagaacttcaccatttcccagcacatccctatgtgtgcgcctattttaatgcacctctctgaaacagagacctttttgttcacaaccataactaaagctggaaagtcagtcttcaggcaaggcgagggaggaaaacatcccattagaattttttcaggaaagacttatggaaaaaaatatctctctcccacctccttttatccccatgagacacagtttcccactgtaatcagggtaatatgcatttgtaagttctgatatgtgatacatttatgtgatggcaaagataagtctgtcttgcatgcaggtactagagttgtgtgggcagggtcatctgaaactcaagcaactcagaggaatatacaaggggcttggggaagaaaatggtgctcccggagcaagtgttggatccattttgcaaaccttcatgttagcagagaaagctagagtttgtttaaacaaaaatagggctgatttcattttggggactcaggagcaacatggtttgtaggcagtcccctcaccccagctgcagggccatgccacagctgtggggacttcacacacctaggctagaactagaggtgtctaccacatcaccctttaagatttctttattaactatttaataatgccatacatttttataaggttagatgtttgtttgaaacatttgtttacattccatattccaataaaatcttattggtattggtagcagatcctactctaaatgtagattctatttttgtcgtttggtctgtgggaacttaaaatacaaatgaaactcttctcttattatagagttgagtttatagagtaaaaaataaataagatcccaaagccaaggaatgcattcagttaaggttctcataccaatgctgcctgcttgcattgcacattctgtatactaatgtaaacatttgttctacctgaaaatcaaaagcaagatgtgagctctttggctaaacctgtattgatatgtcaggcagcaaaactcagtgtttgagattatcaaaagccttctaatatgcccttataggcaatcctgaagcattggttatcatcagggagatgtgccactgcgtgtctttcctgctccccctccaatctcctttatcaccccaccccactcctcagccctccctttttttttttaagttgcctgtctggaccaggcaagaggtgcctactggagggtcttggtgaagcggtaactccattcctttcccttgggtcccccaaaggtaataaaagtacctggaggagaatagtcaggtgattgacctctgcctgtctctctgacggtgatgtaggtgcagacaccgcctgcctgccttgtcctggggttttgtaactgcagctttgacacaggcattcttcctttgaagcacacagcttgcttttccagcacctagacttttacctctcttcatgccttagacttagaccataactgggcttgaaatgctcaccccttcctgggtctggtcttggcacctaggctattcctttccaaactgaagtgagtccagtttcagaccatctcttttcctgtctccaaaaaccatttttgtttccaaacctagctcccccgaaattttaagactatttacctagattcggagatggtcttggagagttccaaaaggggtgtgtgtgtgtctgtgtgtgtgtctgtgtgtgtgtctgtgtgtgtgtctgtgtgtgtgtctgtgtgtctaatatttagactaaaccatggtaaatgtacgcacccagtatccttttcagttagcatattctttcttaaactcatctcagtacttttcatttgtttgcttcattatcttaaacaggttaaaagtgcctatgataaggacttaattatttcctaaagaaaagcaaaaaatgtggggaacagggtagtgttatactatcatctcaggtactgcctatgttcaagaacatagacctggtatggtgagaacaaaaggttcctatgccaaatccagatggctatatcatttgttggctacaagtgagcctgactgcaaggtttgcttctgctgagaaatcccatggtgagagtagaactcatgaagtgctgagtcacatttgcacctctggtgtggtggcagttcactctcccctggatgctgtcagctggccttgctttcatcctatccctgtaggcagggtaggtggctgggtaggagaagctattgagtgtatgacgcagaccaagctttcctgggccttctcaccaactagagaagcgctgatgtcgttcattgaggcacttaaacaccagtcactcagccaggcctcctcccagacattctgtaacatgtcagcactcacaaggtttaaagcaaatgtgttcccttgcagagaggaaggtgctctcagactgatagattagaggagacagacaaactcgtaatccttggggacttgaagagagtggctaggggaagggctgttaaaagaaaagggaccaataagaaaatccatctaaaggtagctcttgaggaggaaattaacttcttgaggggataaattagagggtaccaagtttatgttctggaatgtaccctggggagggcgctgcccactggattggtcccagtggactgaaaggtggtgctctcgagtcaggcgcttagtcccagagagagctgggtgccgcggggctcgtggtctgtgcctactcagggaaatgacttaggttctcccaggtgctctgttgataaggatggaagcagaactactttgagacacaagcaacaattggaagagtttttttatatgaactgaaatagatctaagagagcctggttaacagtttcctttaataccagttcagattaaatggttactttaggaacctgtgttactgtgtgagcacccacagaaacaagcaaacttatttcctacaaaaaatgaggggataataaccgatcagagtcacagtcgtttcaatataaacccttccgaaagcaaaagcagggaccacatgagcacacaagaagccaaagtttgtcagtgatcttaataaattaagactgagtaacatcctgcctttagaaaaaaataaccccgaggtggagaccagggcaggggaggtggcggagaagcatcgggccagatcaaccgttaataacatgcttctgagctatgtggatgtataaatgaaaacacccccaactaggtattgtagaggctggaaaaagatgtgatgggattatacaggtgatgcatatttttgttttgagactcaacaatgtgctacaaatgtgatacttaaccctgaactgcatgtattggggattgttttttaaaaagaaaaaaaacaactttgaatcaataaattaacagttt

SEQ ID NO: 104349 - DNA, 3799 bp, Homo sapiens
cgcgggcagcagggcccgggtctacgccgaggtgaacagtctgaggagccgcgagtactgggactacgaggctcacgtcccgagctggggtaatcaagatgattaccaactggttcgaaaacttggtcggggaaaatatagtgaagtatttgaggccattaatatcaccaacaatgagagagtggttgtaaaaatcctgaagccagtgaagaaaaagaagataaaacgagaggttaagattctggagaaccttcgtggtggaacaaatatcattaagctgattgacactgtaaaggaccccgtgagtcaaagacaccagctttggtatttgaatatatcaataatacagattttaagcaactctaccagatcctgacagactttgatatccggttttatatgtatgaactacttaaagctctggattactgccacagcaagggaatcatgcacagggatgtgaaacctcacaatgtcatgatagatcaccaacagaaaaagctgcgactgatagattggggtctggcagaattctatcatcctgctcaggagtacaatgttcgtgtagcctcaaggtacttcaagggaccagagctcctcgtggactatcagatgtatgattatagcttggacatgtggagtttgggctgtatgttagcaagcatgatctttcgaagggaaccattcttccatggacaggacaactatgaccagcttgttcgcattgccaaggttctgggtacagaagaactgtatgggtatctgaagaagtatcacatagacctagatccacacttcaacgatatcctgggacaacattcacggaaacgctgggaaaactttatccatatttgcaaaccttcatgttagcagagaaagctagagtttgtttaaacaaaaatagggctgatttcattttggggactcaggagcaacatggtttgtaggcagtcccctcaccccagctgcagggccatgccacagctgtggggacttcacacacctaggctagaactagaggtgtctaccacatcaccctttaagatttctttattaactatttaataatgccatacatttttataaggttagatgtttgtttgaaacatttgtttacattccatattccaataaaatcttattggtattggtagcagatcctactctaaatgtagattctatttttgtcgtttggtctgtgggaacttaaaatacaaatgaaactcttctcttattatagagttgagtttatagagtaaaaaataaataagatcccaaagccaaggaatgcattcagttaaggttctcataccaatgctgcctgcttgcattgcacattctgtatactaatgtaaacatttgttctacctgaaaatcaaaagcaagatgtgagctctttggctaaacctgtattgatatgtcaggcagcaaaactcagtgtttgagattatcaaaagccttctaatatgcccttataggcaatcctgaagcattggttatcatcagggagatgtgccactgcgtgtctttcctgctccccctccaatctcctttatcaccccaccccactcctcagccctccctttttttttttaagttgcctgtctggaccaggcaagaggtgcctactggagggtcttggtgaagcggtaactccattcctttcccttgggtcccccaaaggtaataaaagtacctggaggagaatagtcaggtgattgacctctgcctgtctctctgacggtgatgtaggtgcagacaccgcctgcctgccttgtcctggggttttgtaactgcagctttgacacaggcattcttcctttgaagcacacagcttgcttttccagcacctagacttttacctctcttcatgccttagacttagaccataactgggcttgaaatgctcaccccttcctgggtctggtcttggcacctaggctattcctttccaaactgaagtgagtccagtttcagaccatctcttttcctgtctccaaaaaccatttttgtttccaaacctagctcccccgaaattttaagactatttacctagattcggagatggtcttggagagttccaaaaggggtgtgtgtgtgtctgtgtgtgtgtctgtgtgtgtgtctgtgtgtgtgtctgtgtgtgtgtctgtgtgtctaatatttagactaaaccatggtaaatgtacgcacccagtatccttttcagttagcatattctttcttaaactcatctcagtacttttcatttgtttgcttcattatcttaaacaggttaaaagtgcctatgataaggacttaattatttcctaaagaaaagcaaaaaatgtggggaacagggtagtgttatactatcatctcaggtactgcctatgttcaagaacatagacctggtatggtgagaacaaaaggttcctatgccaaatccagatggctatatcatttgttggctacaagtgagcctgactgcaaggtttgcttctgctgagaaatcccatggtgagagtagaactcatgaagtgctgagtcacatttgcacctctggtgtggtggcagttcactctcccctggatgctgtcagctggccttgctttcatcctatccctgtaggcagggtaggtggctgggtaggagaagctattgagtgtatgacgcagaccaagctttcctgggccttctcaccaactagagaagcgctgatgtcgttcattgaggcacttaaacaccagtcactcagccaggcctcctcccagacattctgtaacatgtcagcactcacaaggtttaaagcaaatgtgttcccttgcagagaggaaggtgctctcagactgatagattagaggagacagacaaactcgtaatccttggggacttgaagagagtggctaggggaagggctgttaaaagaaaagggaccaataagaaaatccatctaaaggtagctcttgaggaggaaattaacttcttgaggggataaattagagggtaccaagtttatgttctggaatgtaccctggggagggcgctgcccactggattggtcccagtggactgaaaggtggtgctctcgagtcaggcgcttagtcccagagagagctgggtgccgcggggctcgtggtctgtgcctactcagggaaatgacttaggttctcccaggtgctctgttgataaggatggaagcagaactactttgagacacaagcaacaattggaagagtttttttatatgaactgaaatagatctaagagagcctggttaacagtttcctttaataccagttcagattaaatggttactttaggaacctgtgttactgtgtgagcacccacagaaacaagcaaacttatttcctacaaaaaatgaggggataataaccgatcagagtcacagtcgtttcaatataaacccttccgaaagcaaaagcagggaccacatgagcacacaagaagccaaagtttgtcagtgatcttaataaattaagactgagtaacatcctgcctttagaaaaaaataaccccgaggtggagaccagggcaggggaggtggcggagaagcatcgggccagatcaaccgttaataacatgcttctgagctatgtggatgtataaatgaaaacacccccaactaggtattgtagaggctggaaaaagatgtgatgggattatacaggtgatgcatatttttgttttgagactcaacaatgtgctacaaatgtgatacttaaccctgaactgcatgtattggggattgttttttaaaaagaaaaaaaacaactttgaatcaataaattaacagttt

SEQ ID NO: 104350 - DNA, 3711 bp, Homo sapiens
tttttttttggcagccttgtaaggagaacttcaccatttcccagcacatccctatgtgtgcgcctattttaatgcacctctctgaaacagagacctttttgttcacaaccataactaaagctggaaagtcagtcttcaggcaaggcgagggaggaaaacatcccattagaattttttcaggaaagacttatggaaaaaaatatctctctcccacctccttttatccccatgagacacagtttcccactgtaatcagggtaatatgcatttgtaagttctgatatgtgatacatttatgtgatggcaaagataagtctgtcttgcatgcaggtactagagttgtgtgggcagggtcatctgaaactcaagcaactcagaggaatatacaaggggcttggggaagaaaatggtgctcccggagcaagtgttggatccattttgcaaaccttcatgttagcagagaaagctagagtttgtttaaacaaaaatagggctgatttcattttggggactcaggagcaacatggtttgtaggcagtcccctcaccccagctgcagggccatgccacagctgtggggacttcacacacctaggctagaactagaggtgtctaccacatcaccctttaagatttctttattaactatttaataatgccatacatttttataaggttagatgtttgtttgaaacatttgtttacattccatattccaataaaatcttattggtattggtagcagatcctactctaaatgtagattctatttttgtcgtttggtctgtgggaacttaaaatacaaatgaaactcttctcttattatagagttgagtttatagagtaaaaaataaataagatcccaaagccaaggaatgcattcagttaaggttctcataccaatgctgcctgcttgcattgcacattctgtatactaatgtaaacatttgttctacctgaaaatcaaaagcaagatgtgagctctttggctaaacctgtattgatatgtcaggcagcaaaactcagtgtttgagattatcaaaagccttctaatatgcccttataggcaatcctgaagcattggttatcatcagggagatgtgccactgcgtgtctttcctgctccccctccaatctcctttatcaccccaccccactcctcagccctccctttttttttttaagttgcctgtctggaccaggcaagaggtgcctactggagggtcttggtgaagcggtaactccattcctttcccttgggtcccccaaaggtaataaaagtacctggaggagaatagtcaggtgattgacctctgcctgtctctctgacggtgatgtaggtgcagacaccgcctgcctgccttgtcctggggttttgtaactgcagctttgacacaggcattcttcctttgaagcacacagcttgcttttccagcacctagacttttacctctcttcatgccttagacttagaccataactgggcttgaaatgctcaccccttcctgggtctggtcttggcacctaggctattcctttccaaactgaagtgagtccagtttcagaccatctcttttcctgtctccaaaaaccatttttgtttccaaacctagctcccccgaaattttaagactatttacctagattcggagatggtcttggagagttccaaaaggggtgtgtgtgtgtctgtgtgtgtgtctgtgtgtgtgtctgtgtgtgtgtctgtgtgtgtgtctgtgtgtctaatatttagactaaaccatggtaaatgtacgcacccagtatccttttcagttagcatattctttcttaaactcatctcagtacttttcatttgtttgcttcattatcttaaacaggttaaaagtgcctatgataaggacttaattatttcctaaagaaaagcaaaaaatgtggggaacagggtagtgttatactatcatctcaggtactgcctatgttcaagaacatagacctggtatggtgagaacaaaaggttcctatgccaaatccagatggctatatcatttgttggctacaagtgagcctgactgcaaggtttgcttctgctgagaaatcccatggtgagagtagaactcatgaagtgctgagtcacatttgcacctctggtgtggtggcagttcactctcccctggatgctgtcagctggccttgctttcatcctatccctgtaggcagggtaggtggctgggtaggagaagctattgagtgtatgacgcagaccaagctttcctgggccttctcaccaactagagaagcgctgatgtcgttcattgaggcacttaaacaccagtcactcagccaggcctcctcccagacattctgtaacatgtcagcactcacaaggtttaaagcaaatgtgttcccttgcagagaggaaggtgctctcagactgatagattagaggagacagacaaactcgtaatccttggggacttgaagagagtggctaggggaagggctgttaaaagaaaagggaccaataagaaaatccatctaaaggtagctcttgaggaggaaattaacttcttgaggggataaattagagggtaccaagtttatgttctggaatgtaccctggggagggcgctgcccactggattggtcccagtggactgaaaggtggtgctctcgagtcaggcgcttagtcccagagagagctgggtgccgcggggctcgtggtctgtgcctactcagggaaatgacttaggttctcccaggtgctctgttgataaggatggaagcagaactactttgagacacaagcaacaattggaagagtttttttatatgaactgaaatagatctaagagagcctggttaacagtttcctttaataccagttcagattaaatggttactttaggaacctgtgttactgtgtgagcacccacagaaacaagcaaacttatttcctacaaaaaatgaggggataataaccgatcagagtcacagtcgtttcaatataaacccttccgaaagcaaaagcagggaccacatgagcacacaagaagccaaagtttgtcagtgatcttaataaattaagactgagtaacatcctgcctttagaaaaaaataaccccgaggtggagaccagggcaggggaggtggcggagaagcatcgggccagatcaaccgttaataacatgcttctgagctatgtggatgtataaatgaaaacacccccaactaggtattgtagaggctggaaaaagatgtgatgggattatacaggtgatgcatatttttgttttgagactcaacaatgtgctacaaatgtgatacttaaccctgaactgcatgtattggggattgttttttaaaaagaaaaaaaacaactttgaatcaataaattaacagtttttcacttgctggctcttcttgctgtaaatggtgactaagaggttgggacagaaatcttgacaactagtggaaaacttggataatcttcaaggaccatggagccttctgtttccttctgtttgcagaaaagcaacactgcctgggttgtgatcctttacaagtgactacttcagacacaattggccacctctttgtatcactggatgactgatgtatgatttatgtgctgctgcccttagagggaagaaaaatgccatgttaaatcctgttttcttaaataaaaatgttgacaataaccagccttcccaagtgggagacaaaccat

SEQ ID NO: 104351 - DNA, 908 bp, Homo sapiens
  misc_feature (826)..(826): n is a, c, g, or t
gtgatttggtcagtttgttttgtgtttcagcttgttcgcattgccaaggttctgggtacagaagaactgtatgggtatctgaagaagtatcacatagacctagatccacacttcaacgatatcctgggacaacattcacggaaacgctgggaaaactttatccatagtgagaacagacaccttgtcagccctgaggccctagatcttctggacaaacttctgcgatacgaccatcaacagagactgactgccaaagaggccatggagcacccatacttctaccctgtggtgaaggagcagtcccagccttgtgcagacaatgctgtgctttccagtggtctcacggcagcacgatgaagactggaaagcgacgggtctgttgcggttctcccacttttccataagcagaacaagaaccaaatcaaacgtcttaacgcgtatagagagatcacgttccgtgagcagacacaaaacggtggcaggtttggcgagcacgaactagaccaagcgaagggcagcccaccaccgtatatcaaacctcacttccgaatgtaaaaggctcacttgcctttggcttcctgttgacttcttcccgacccagaaagcatggggaatgtgaagggtatgcagaatgttgttggttactgttgctccccgagcccctcaactcgtcccgtggccgcctgtttttccagcaaaccacgctaactagctgaccacagactccacagtggggggacgggcgcagtatgtggcatggcggcagttacatattattattttaaaagtatatattattgaataaaaggttttaaaagatataaanatattaaaaataaaaactcaagggggggcccggtaccaatttcgcccttagtgagtcgttttacgcgcgctaattggccgct

SEQ ID NO: 104352 - DNA, 3655 bp, Homo sapiens
tttttttttggcagccttgtaaggagaacttcaccatttcccagcacatccctatgtgtgcgcctattttaatgcacctctctgaaacagagacctttttgttcacaaccataactaaagctggaaagtcagtcttcaggcaaggcgagggaggaaaacatcccattagaattttttcaggaaagacttatggaaaaaaatatctctctcccacctccttttatccccatgagacacagtttcccactgtaatcagggtaatatgcatttgtaagttctgatatgtgatacatttatgtgatggcaaagataagtctgtcttgcatgcaggtactagagttgtgtgggcagggtcatctgaaactcaagcaactcagaggaatatacaaggggcttggggaagaaaatggtgctcccggagcaagtgttggatccattttgcaaaccttcatgttagcagagaaagctagagtttgtttaaacaaaaatagggctgatttcattttggggactcaggagcaacatggtttgtaggcagtcccctcaccccagctgcagggccatgccacagctgtggggacttcacacacctaggctagaactagaggtgtctaccacatcaccctttaagatttctttattaactatttaataatgccatacatttttataaggttagatgtttgtttgaaacatttgtttacattccatattccaataaaatcttattggtattggtagcagatcctactctaaatgtagattctatttttgtcgtttggtctgtgggaacttaaaatacaaatgaaactcttctcttattatagagttgagtttatagagtaaaaaataaataagatcccaaagccaaggaatgcattcagttaaggttctcataccaatgctgcctgcttgcattgcacattctgtatactaatgtaaacatttgttctacctgaaaatcaaaagcaagatgtgagctctttggctaaacctgtattgatatgtcaggcagcaaaactcagtgtttgagattatcaaaagccttctaatatgcccttataggcaatcctgaagcattggttatcatcagggagatgtgccactgcgtgtctttcctgctccccctccaatctcctttatcaccccaccccactcctcagccctccctttttttttttaagttgcctgtctggaccaggcaagaggtgcctactggagggtcttggtgaagcggtaactccattcctttcccttgggtcccccaaaggtaataaaagtacctggaggagaatagtcaggtgattgacctctgcctgtctctctgacggtgatgtaggtgcagacaccgcctgcctgccttgtcctggggttttgtaactgcagctttgacacaggcattcttcctttgaagcacacagcttgcttttccagcacctagacttttacctctcttcatgccttagacttagaccataactgggcttgaaatgctcaccccttcctgggtctggtcttggcacctaggctattcctttccaaactgaagtgagtccagtttcagaccatctcttttcctgtctccaaaaaccatttttgtttccaaacctagctcccccgaaattttaagactatttacctagattcggagatggtcttggagagttccaaaaggggtgtgtgtgtgtctgtgtgtgtgtctgtgtgtgtgtctgtgtgtgtgtctgtgtgtgtgtctgtgtgtctaatatttagactaaaccatggtaaatgtacgcacccagtatccttttcagttagcatattctttcttaaactcatctcagtacttttcatttgtttgcttcattatcttaaacaggttaaaagtgcctatgataaggacttaattatttcctaaagaaaagcaaaaaatgtggggaacagggtagtgttatactatcatctcaggtactgcctatgttcaagaacatagacctggtatggtgagaacaaaaggttcctatgccaaatccagatggctatatcatttgttggctacaagtgagcctgactgcaaggtttgcttctgctgagaaatcccatggtgagagtagaactcatgaagtgctgagtcacatttgcacctctggtgtggtggcagttcactctcccctggatgctgtcagctggccttgctttcatcctatccctgtaggcagggtaggtggctgggtaggagaagctattgagtgtatgacgcagaccaagctttcctgggccttctcaccaactagagaagcgctgatgtcgttcattgaggcacttaaacaccagtcactcagccaggcctcctcccagacattctgtaacatgtcagcactcacaaggtttaaagcaaatgtgttcccttgcagagaggaaggtgctctcagactgatagattagaggagacagacaaactcgtaatccttggggacttgaagagagtggctaggggaagggctgttaaaagaaaagggaccaataagaaaatccatctaaaggtagctcttgaggaggaaattaacttcttgaggggataaattagagggtaccaagtttatgttctggaatgtaccctggggagggcgctgcccactggattggtcccagtggactgaaaggtggtgctctcgagtcaggcgcttagtcccagagagagctgggtgccgcggggctcgtggtctgtgcctactcagggaaatgacttaggttctcccaggtgctctgttgataaggatggaagcagaactactttgagacacaagcaacaattggaagagtttttttatatgaactgaaatagatctaagagagcctggttaacagtttcctttaataccagttcagattaaatggttactttaggaacctgtgttactgtgtgagcacccacagaaacaagcaaacttatttcctacaaaaaatgaggggataataaccgatcagagtcacagtcgtttcaatataaacccttccgaaagcaaaagcagggaccacatgagcacacaagaagccaaagtttgtcagtgatcttaataaattaagactgagtggcggagaagcatcgggccagatcaaccgttaataacatgcttctgagctatgtggatgtataaatgaaaacacccccaactaggtattgtagaggctggaaaaagatgtgatgggattatacaggtgatgcatatttttgttttgagactcaacaatgtgctacaaatgtgatacttaaccctgaactgcatgtattggggattgttttttaaaaagaaaaaaaacaactttgaatcaataaattaacagtttttcacttgctggctcttcttgctgtaaatggtgactaagaggttgggacagaaatcttgacaactagtggaaaacttggataatcttcaaggaccatggagccttctgtttccttctgtttgcagaaaagcaacactgcctgggttgtgatcctttacaagtgactacttcagacacaattggccacctctttgtatcactggatgactgatgtatgatttatgtgctgctgcccttagagggaagaaaaatgccatgttaaatcctgttttcttaaataaaaatgttgacaataaccagccttcccaagtgggagacaaaccat

SEQ ID NO: 104353 - DNA, 927 bp, Homo sapiens
gattttcaggattcccgcgagaggcgcttaaaacgaactggcaccatttgcaaaatccatctaaaggtagctcttgaggaggaaattaacttcttgaggggataaattagagggtaccaagtttatgttctggaatgtaccctggggagggcgctgcccactggattggtcccagtggactgaaaggtggtgctctcgagtcaggcgcttagtcccagagagagctgggtgccgcggggctcgtggtctgtgcctactcagggaaatgacttaggttctcccaggtgctctgttgataaggatggaagcagaactactttgagacacaagcaacaattggaagagtttttttatatgaactgaaatagatctaagagagcctggttaacagtttcctttaataccagttcagattaaatggttactttaggaacctgtgttactgtgtgagcacccacagaaacaagcaaacttatttcctacaaaaaatgaggggataataaccgatcagagtcacagtcgtttcaatataaacccttccgaaagcaaaagcagggaccacatgagcacacaagaagccaaagtttgtcagtgatcttaataaattaagactgagtaacatcctgcctttagaaaaaaataaccccgaggtggagaccagggcaggggaggtggcggagaagcatcgggccagatcaaccgttaataacatgcttctgagctatgtggatgtataaatgaaaacacccccaactaggtattgtagaggctggaaaaagatgtgatgggattatacaggtgatgcatatttttgttttgagactcaacaatgtgctacaaatgtgatacttaaccctgaactgcatgtattggggattgttttttaaaaagaaaaaaaacaactttgaatcaataaattaacagttt

SEQ ID NO: 104354 - DNA, 2281 bp, Homo sapiens
tttttttttggcagccttgtaaggagaacttcaccatttcccagcacatccctatgtgtgcgcctattttaatgcacctctctgaaacagagacctttttgttcacaaccataactaaagctggaaagtcagtcttcaggcaaggcgagggaggaaaacatcccattagaattttttcaggaaagacttatggaaaaaaatatctctctcccacctccttttatccccatgagacacagtttcccactgtaatcagggtaatatgcatttgtaagttctgatatgtgatacatttatgtgatggcaaagataagtctgtcttgcatgcaggtactagagttgtgtgggcagggtcatctgaaactcaagcaactcagaggaatatacaaggggcttggggaagaaaatggtgctcccggagcaagtgttggatccattttgcaaaccttcatgttagcagagaaagctagagtttgtttaaacaaaaatagggctgatttcattttggggactcaggagcaacatggtttgtaggcagtcccctcaccccagctgcagggccatgccacagctgtggggacttcacacacctaggctagaactagaggtgtctaccacatcaccctttaagatttctttattaactatttaataatgccatacatttttataaggttagatgtttgtttgaaacatttgtttacattccatattccaataaaatcttattggtattggtagcagatcctactctaaatgtagattctatttttgtcgtttggtctgtgggaacttaaaatacaaatgaaactcttctcttattatagagttgagtttatagagtaaaaaataaataagatcccaaagccaaggaatgcattcagttaaggttctcataccaatgctgcctgcttgcattgcacattctgtatactaatgtaaacatttgttctacctgaaaatcaaaagcaagatgtgagctctttggctaaacctgtattgatatgtcaggcagcaaaactcagtgtttgagattatcaaaagccttctaatatgcccttataggcaatcctgaagcattggttatcatcagggagatgtgccactgcgtgtctttcctgctccccctccaatctcctttatcaccccaccccactcctcagccctccctttttttttttaagttgcctgtctggaccaggcaagaggtgcctactggagggtcttggtgaagcggtaactccattcctttcccttgggtcccccaaaggtaataaaagtacctggaggagaatagtcaggtgattgacctctgcctgtctctctgacggtgatgtaggtgcagacaccgcctgcctgccttgtcctggggttttgtaactgcagctttgacacaggcattcttcctttgaagcacacagcttgcttttccagcacctagacttttacctctcttcatgccttagacttagaccataactgggcttgaaatgctcaccccttcctgggtctggtcttggcacctaggctattcctttccaaactgaagtgagtccagtttcagaccatctcttttcctgtctccaaaaaccatttttgtttccaaacctagctcccccgaaattttaagactatttacctagattcggagatggtcttggagagttccaaaaggggtgtgtgtgtgtctgtgtgtgtgtctgtgtgtgtgtctgtgtgtgtgtctgtgtgtgtgtctgtgtgtctaatatttagactaaaccatggtaaatgtacgcacccagtatccttttcagttagcatattctttcttaaactcatctcagtacttttcatttgtttgcttcattatcttaaacaggttaaaagtgcctatgataaggacttaattatttcctaaagaaaagcaaaaaatgtggggaacaggagtcagagctgacaggaaaacgttagagtggctataacatttttaaaataatctttgagtcgtaaaatagtaagtcacacattccaagttttccatagaaaggccaacatgtaaaccggttacgaactaagtattcttgaattgaactgacccagtcatctgtagtacatcttaagaattaatgcgagatgtggcgcacttgacgcgagtcactggcgtgctttttaacgaactgctgtccatttccaacgccccccaacccactcgccccctgcccagaccacccgacacccccacccgccgcaagcacacgcccgcgccgcgccaatagcacctccgggggccccccacccg

SEQ ID NO: 104355 - DNA, 615 bp, Homo sapiens
tgtgtcagtgaacagcccttcccctagccactctcttcaagtcccgcaaggataacgagttggtctgtctcctctaatctatcagtctgagagcaccttcctctcggcaagggaacacatttgctcgtgactgtgtgagcacccacagaaacaagcaaacttatttcctacaaaaaatgaggggataataaccgatcagagtcacagtcgtttcaatataaacccttccgaaagcaaaagcagggaccacatgagcacacaagaagccaaagtttgtcagtgatcttaataaattaagactgagtaacatcctgcctttagaaaaaaataaccccgaggtggagaccagggcaggggaggtggcggagaagcatcgggccagatcaaccgttaataacatgcttctgagctatgtggatgtataaatgaaaacacccccaactaggtattgtagaggctggaaaaagatgtgatgggattatacaggtgatgcatatttttgttttgagactcaacaatgtgctacaaatgtgatacttaaccctgaactgcatgtattggggattgttttttaaaaagaaaaaaaacaactttgaatcaataaattaacagttt

SEQ ID NO: 104356 - DNA, 1014 bp, Homo sapiens
cgcgggcagcagggcccgggtctacgccgaggtgaacagtctgaggagccgcgagtactgggactacgaggctcacgtcccgagctggggtaatcaagatgattaccaactggttcgaaaacttggtcggggaaaatatagtgaagtatttgaggccattaatatcaccaacaatgagagagtggttgtaaaaatcctgaagccagtgaagaaaaagaagataaaacgagaggttaagattctggagaaccttcgtggtggaacaaatatcattaagctgattgacactgtaaaggaccccgtgagtcaaagacaccagctttggtatttgaatatatcaataatacagattttaagcaactctaccagatcctgacagactttgatatccggttttatatgtatgaactacttaaagctctggattactgccacagcaagggaatcatgcacagggatgtgaaacctcacaatgtcatgatagatcaccaacagaaaaagctgcgactgatagattggggtctggcagaattctatcatcctgctcaggagtacaatgttcgtgtagcctcaaggtacttcaagggaccagagctcctcgtggactatcagatgtatgattatagcttggacatgtggagtttgggctgtatgttagcaagcatgatctttcgaagggaaccattcttccatggacaggacaactatgaccagcttgttcgcattgccaaggttctgggtacagaagaactgtatgggtatctgaagaagtatcacatagacctagatccacacttcaacgatatcctgggacaacattcacggaaacgctgggaaaactttatccatagtgagaacagacaccttgtcagccctgaggccctagatcttctggacaaacttctgcgatacgaccatcaacagagactgactgccaaagaggccatggagcacccatacttctaccctgtggtgaacggactctggcctcgtgaccggggatcctctacgagt

SEQ ID NO: 104357 - DNA, 323 bp, Homo sapiens
ggggttagagatgatattaatattgaaagaaaataaatgtagaaatttgaacagtgggaaattagagtttctatgcctcttagcattgagtctgtactccgaggaagggtaagagttgactgcaataacaatttccctgatcatttttcagtgtttggtttttatatggctggaattccgtgatttccgtctctcctgttgcccccctgaccctggcttgcccatcagtctgtctctctttccgttgaaagggtgggtttgccatgggcttctctcagcactcaccaccctgattgcctgactttcctcctgctttcttgcag

SEQ ID NO: 104358 - DNA, 1592 bp, Homo sapiens
  misc_feature (1510)..(1510): n is a, c, g, or t
cgcgggcagcagggcccgggtctacgccgaggtgaacagtctgaggagccgcgagtactgggactacgaggctcacgtcccgagctggggtaatcaagatgattaccaactggttcgaaaacttggtcggggaaaatatagtgaagtatttgaggccattaatatcaccaacaatgagagagtggttgtaaaaatcctgaagccagtgaagaaaaagaagataaaacgagaggttaagattctggagaaccttcgtggtggaacaaatatcattaagctgattgacactgtaaaggaccccgtgagtcaaagacaccagctttggtatttgaatatatcaataatacagattttaagcaactctaccagatcctgacagactttgatatccggttttatatgtatgaactacttaaagctctggattactgccacagcaagggaatcatgcacagggatgtgaaacctcacaatgtcatgatagatcaccaacagaaaaagctgcgactgatagattggggtctggcagaattctatcatcctgctcaggagtacaatgttcgtgtagcctcaaggtacttcaagggaccagagctcctcgtggactatcagatgtatgattatagcttggacatgtggagtttgggctgtatgttagcaagcatgatctttcgaagggaaccattcttccatggacaggacaactatgaccagcttgttcgcattgccaaggttctgggtacagaagaactgtatgggtatctgaagaagtatcacatagacctagatccacacttcaacgatatcctgggacaacattcacggaaacgctgggaaaactttatccatagtgagaacagacaccttgtcagccctgaggccctagatcttctggacaaacttctgcgatacgaccatcaacagagactgactgccaaagaggccatggagcacccatacttctaccctgtggtgaaggagcagtcccagccttgtgcagacaatgctgtgctttccagtggtctcacggcagcacgatgaagactggaaagcgacgggtctgttgcggttctcccacttttccataagcagaacaagaaccaaatcaaacgtcttaacgcgtatagagagatcacgttccgtgagcagacacaaaacggtggcaggtttggcgagcacgaactagaccaagcgaagggcagcccaccaccgtatatcaaacctcacttccgaatgtaaaaggctcacttgcctttggcttcctgttgacttcttcccgacccagaaagcatggggaatgtgaagggtatgcagaatgttgttggttactgttgctccccgagcccctcaactcgtcccgtggccgcctgtttttccagcaaaccacgctaactagctgaccacagactccacagtggggggacgggcgcagtatgtggcatggcggcagttacatattattattttaaaagtatatattattgaataaaaggttttaaaagatataaanatattaaaaataaaaactcaagggggggcccggtaccaatttcgcccttagtgagtcgttttacgcgcgctaattggccgct

SEQ ID NO: 104359 - DNA, 1559 bp, Homo sapiens
cgcgggcagcagggcccgggtctacgccgaggtgaacagtctgaggagccgcgagtactgggactacgaggctcacgtcccgagctggggtaatcaagatgattaccaactggttcgaaaacttggtcggggaaaatatagtgaagtatttgaggccattaatatcaccaacaatgagagagtggttgtaaaaatcctgaagccagtgaagaaaaagaagataaaacgagaggttaagattctggagaaccttcgtggtggaacaaatatcattaagctgattgacactgtaaaggaccccgtgagtcaaagacaccagctttggtatttgaatatatcaataatacagattttaagcaactctaccagatcctgacagactttgatatccggttttatatgtatgaactacttaaagctctggattactgccacagcaagggaatcatgcacagggatgtgaaacctcacaatgtcatgatagatcaccaacagaaaaagctgcgactgatagattggggtctggcagaattctatcatcctgctcaggagtacaatgttcgtgtagcctcaaggtacttcaagggaccagagctcctcgtggactatcagatgtatgattatagcttggacatgtggagtttgggctgtatgttagcaagcatgatctttcgaagggaaccattcttccatggacaggacaactatgaccagcttgttcgcattgccaaggttctgggtacagaagaactgtatgggtatctgaagaagtatcacatagacctagatccacacttcaacgatatcctgggacaacattcacggaaacgctgggaaaactttatccatagtgagaacagacaccttgtcagccctgaggccctagatcttctggacaaacttctgcgatacgaccatcaacagagactgactgccaaagaggccatggagcacccatacttctaccctgtggtgaaggagcagtcccagccttgtgcagacaatgctgtgctttccagtggtctcacggcagcacgatgaagactggaaagcgacgggtaatgcggcattgatgcttgccaataaaaccaaccaaccaaacacaaaccttgaaggaaaactacagtgtgataaaaagaaattcttatcattccttctaaatgcacagaagagtaaagacctaaaagtctgtcaaaaagcaagaaagaaactccccagtgctagtctccagggagctgtcactgtggcagcatggggatgcacctagttcaggatctgaaggagctctgcctttggaatgcatgggagatagagactcggagttgttgtacatttacctttgtttaacagggcaccactgttgaattaacccattcagtcaacaagctctgaatgtctgacttcctatctattccattgtggtctgggtttcctttggtgaaattcaggctcaagtcttagcgaaatgtcagcagtctatactgacacaccagcctcatttacaaaaaggagatattaaaacagtgacagtattttttttttaagctctttacaaatcc

SEQ ID NO: 104360 - DNA, 1795 bp, Homo sapiens
  misc_feature (1124)..(1124): n is a, c, g, or t
atttttgtgaaggtaccgtggaaaatatttcatttttcttctcaccggagcaattgtaaatgctatgcggtaagaggagttacctgtggaaaggtggttaagagattaggtaaagaaaaggaaaggacaccaaaataaagtgctgcggaagaatttttgtccagctgtgagacgacgagtgcgtgaagtgaaggcgattgagaggggctgagggaattgtcctctgtggaagggactttcttttggccctaggccccttcctgcccctgtcgtcagcagagagatggaaaacttgatgactagctccaccctaccgcccctttttgcagatgaagacggttccaaggagagtaatgatctggctaccactgggttaaatcacccagaggttccatacagtagtggcgccacatcatccaccaacaatccagaatttgtggaggatctctctcaaggtcagttgcttcagagtgagtcttcaaatgcagcagaaggcaatgaacagaggcatgaagatgaggtaagctgaagtatctccttctgttcctatcatctgaaacttctgaagaagcagtcacaaggaaggtgtgttgatcaaggtgttcatatgaccttcttatattcttaggctgatacctgcaaaattttgttttctatttcttgttttatacggaaccatattaataattttaatgacatagacaggtagactcttttttccctgttccctaagaaatgtatacttacctcatattagatgttgaacaaatacttgttgaatgagtgaatgatttaatcattaataagtaactaatgagaagtgtacatgcccttgctcaaggctctgctcagcaagccctgctgcatggagccctatgtgcccaaaggattcatactacttaccaaatctttcaccctcccatagggggtaactttccttaactcacacaaaggcgtatgagcctgggcagtcatgcccttgttggactttcagtgtttcttacaaataactgattacattgtcagtgttttaaggcactcttttttttttttaagccaataaagagtgccaccattgatttttgtcttttttcttattttaaaaaagctggccgggcatggtngctcatgcctgtaatcctagcacttggccctccaaagtgctgggattacaggtgtgaaccaccgtgccagcccacagtagctttaatgtaactaggtttaaaaaaagaaaaacctaataccaaatacataatttgcccagtggtgaattataccattttatatatatttggaggagtagagtactacaattagtatttagatatttttgtccttgtttatttatatttctcttgtctgaaataagaattcttgtatccatgaaatattaactgatacggctgtatttgtaaaattatgaagtaaaaatattatgtaccttacatcttatttaaagggccaagaagaaaggctgtggtgaaacatcagtggtacctcagtccttttcatttctttagtttttttcagaggtgattcaatcttttgatttacctggtaactcaacatataaagacctctgactataaaatgtacatctaggccgggagccaccgtgcccggccacaaactctatttttaaaagagaagaaacaattgggaatttgaatgcagactgaatatttgatattaaggaattactattttttacatgtgatagtggtgtggtggttttattttttacaaaagaggcttttcttttcaaaacatactgaaatatttactgacaaaaacc

SEQ ID NO: 104361 - DNA, 4193 bp, Homo sapiens
atttttgtgaaggtaccgtggaaaatatttcatttttcttctcaccggagcaattgtaaatgctatgcggtaagaggagttacctgtggaaaggtggttaagagattaggtaaagaaaaggaaaggacaccaaaataaagtgctgcggaagaatttttgtccagctgtgagacgacgagtgcgtgaagtgaaggcgattgagaggggctgagggaattgtcctctgtggaagggactttcttttggccctaggccccttcctgcccctgtcgtcagcagagagatggaaaacttgatgactagctccaccctaccgcccctttttgcagatgaagacggttccaaggagagtaatgatctggctaccactgggttaaatcacccagaggttccatacagtagtggcgccacatcatccaccaacaatccagaatttgtggaggatctctctcaaggtcagttgcttcagagtgagtcttcaaatgcagcagaaggcaatgaacagaggcatgaagatgagcaacgaagtaaacgaggaggttggtccaaaggaagaaagaggaagaaacctcttcgagacagcaatgcacccaaatccccccttacaggatatgttcggttcatgaatgagcgtcgagaacaacttcgagcaaagagaccagaagtcccatttccagaaatcacaaggatgttaggcaatgaatggagtaaactgcctcctgaggaaaaacagcgctaccttgatgaagcagacagagataaggagcgttacatgaaggaactggaacagtatcagaaaacagaggcctacaaggtcttcagtaggaaaacccaggaccgtcagaaaggcaaatctcataggcaagatgcagcccggcaggccactcatgatcatgagaaagaaacagaggtaaaggaacggtctgtttttgacatccctatatttacagaggaattcttgaaccatagcaaagctcgggaagcagagctccgccagcttcgcaaatccaacatggagtttgaggagaggaatgcagccctgcaaaagcacgtggagagcatgcgcacagcagtggagaagctggaggtggatgtgatccaggagcggagccgcaacacagtcttacagcagcacctggagaccctgcggcaggtgctgaccagcagctttgccagcatgcccttgcctggaagtggagagacacctacagtggacaccattgactcatatatgaacagactgcacagtattattttagctaatccccaagacaatgaaaacttcatagctacagttcgagaagttgtgaacagactcgatcgttagggaatggtcttagaactccaagatgttccataagtgtttttacttgtgaggaatgagaagccatccatggaaatttgaactgagtgggggcagagaaagagtgcagatccctttgcttgtgaaagaattatcagtgagtgaaaggccatcaccccaggaagccaaatgagggagcagcaacatgtatatgagcttcctatggaattgtccttatgtgaagctttgaaggtgtacagccactctcccgggtcttcaggttcctaccatttccatttctgttaaagtggatctgcatatcttcagcttactaggtgacccggatgctgacatctgctgctgcagaaaggaagacttttcattgtaatttcgcttagacccttttatcagtggagctccagttttcttacctagctgtcacttttttaaatgcctctgggggttatttttgctttccttggcccccaccaatttatacatctccattttctgacctctggactaactggttgctcagcaaggttctgaaggagagtttcttgcattggacaggcccagtcttctcccatcattgccctgctgtgactccaaagaaaggagcttcttgctgacagtgccctgtggagcaaggctgtgtttcctaccccacacggtgctcagtgggtgccagccctcagtgtggctttgtgattgctgccctaaaggagaatgctctttccttcctcactggtactgcctgctgttttctaagcattgctcctgcacagacatggagtcccagccccagcaaggctcttctgttcccatctgttgacaatgtcttgtggagcatttttgctgaggaaaaggtcacttgtaaacagaggagaaagggaaagagtacaaagccctaagtttattgtaagtgaaaactgagggaattcctgtcttctttaggagtaatgattcatagatctagataggtggaaatatcattcaaaatagtcacttgagctcacaaaaaaagcaaggaagaattctcatgtcctttgtcttccttctgtagccattaactgctgaatccatgtgaggaagacaggcttcccttccttccccctccttagtgattttttctttaacagcataagtaaagaggactttctggttcatttttgtttgttttgttttgttttgttttgtttacagatgaggtcttgctgtgttgcccaggctggagtgcggtggctattcacagatgctatcatagcacactacagcctccaactcttgggctcaagcatcacgcctagcagtttctggttcctttaacagcaaaaggaaagagaggttctgattcttacctcagggttttttggttgttcattgtttttgtttttgtttttgttttgacactgcagagcacaaggctaaaggttacagctgagatctttggaaccaaaggcagagcaagcagagcccgttgtctgggccccacaccactgcaggcaggtggatagaagtgcggcccctctcatagtatgcccataagtcagggcatagggcagaactacctgtcatgttgctacaccatcctgtcttctcagcatctccttgcctgttttctttattagtccaaaggaaaacaacagcaacaaaatctgtttttaaaatgtcttatatgaacatatatcaaatatccatgcgctgaaacccacataccatcacttggcaattttttagaataagaccccattattatctattgctataaacctagccagttctcttgctcttctgtattttcctatttccctgccatcatctgctatttctgccacttctcttagactccttgtctgcaaagcccaagctagaactcactgtctatggcagaaggacatccagagcccattctggagttttgttttttccttctgccagatgctttgtgtcctgtcttccttcctcctcatatttctgtttctcatttgtgttcagttttgtgcagcattgctagcactgcttttgtgaccagaaaaggccataacatggtccaggatcatcattcttctgactctagatgggacacttgacagtgacttgaaacatttgcatattcaggaatgcatgagatttcaagagagcctacagtatgaaatcattttcacaaaataagcagcttgcttctgaaatgctgtctttcccagtagctactcacctgcctctggtggctgggattcagatgccacaaaactgtcagtatctatagaccaggtctgtgccacctcctctctcctctgtgctcagtgaggaggcagtaaatgaagttacaggctagcacaatacctaattcatgtttcccagtacacctgtagatattactgtacttttatgttctcaagaaataagttgttgcctattcagtgttacagatttctttgtttctttttaattaaaatacaagaagcagctgaggaaagggagacaaggtattttatttctgactgattttagaaaaaacttgtgtacatgtgtttggaactgttgaaatgccaagttttctgtataagtgtttttgtaattaaactttcagattttctttgttttttaagaagttgatgtgcttgtttgacatttgtctcattaaaacttttctacgttggaaaaaacacaccccacacacgaagaccaacaaacaacgcaacacacgacaaaaacacagagagacaacaacaacacgctaagcaaaaaaagacggcgaaccaagggccgccgcggcaaccgcggcagcgcgctactcgcacctataagggcacgagataaacaagcggggcggacccggaaaagcgcgaatgcgctcgtggacaaccacacaaacaaagcagcggag

SEQ ID NO: 104362 - DNA, 4065 bp, Homo sapiens
atttttgtgaaggtaccgtggaaaatatttcatttttcttctcaccggagcaattgtaaatgctatgcggtaagaggagttacctgtggaaaggtggttaagagattaggtaaagaaaaggaaaggacaccaaaataaagtgctgcggaagaatttttgtccagctgtgagacgacgagtgcgtgaagtgaaggcgattgagaggggctgagggaattgtcctctgtggaagggactttcttttggccctaggccccttcctgcccctgtcgtcagcagagagatggaaaacttgatgactagctccaccctaccgcccctttttgcagatgaagacggttccaaggagagtaatgatctggctaccactgggttaaatcacccagaggttccatacagtagtggcgccacatcatccaccaacaatccagaatttgtggaggatctctctcaaggtcagttgcttcagagtgagtcttcaaatgcagcagaaggcaatgaacagaggcatgaagatgagcaacgaagtaaacgaggaggttggtccaaaggaagaaagaggaagaaacctcttcgagacagcaatgcacccaaatccccccttacaggatatgttcggttcatgaatgagcgtcgagaacaacttcgagcaaagagaccagaagtcccatttccagaaatcacaaggatgttaggcaatgaatggagtaaactgcctcctgaggaaaaacagcgctaccttgatgaagcagacagagataaggagcgttacatgaaggaactggaacagtatcagaaaacagaggcctacaaggtcttcagtaggaaaacccaggaccgtcagaaaggcaaatctcataggcaagatgcagcccggcaggccactcatgatcatgagaaagaaacagaggtaaaggaacggtctgtttttgacatccctatatttacagaggaattcttgaaccatagcaaagctcgggaagcagagctccgccagcttcgcaaatccaacatggagtttgaggagaggaatgcagccctgcaaaagcacgtggagagcatgcgcacagcagtggagaagctggaggtggatgtgatccaggagcggagccgcaacacagtcttacagcagcacctggagaccctgcggcaggtgctgaccagcagctttgccagcatgcccttgcctggaagtggagagacacctacagtggacaccattgactcatatatgaacagactgcacagtattattttagctaatccccaagacaatgaaaacttcatagctacagttcgagaagttgtgaacagactcgatcgttagggaatggtcttagaactccaagatgttccataagtgtttttacttgtgaggaatgagaagccatccatggaaatttgaactgagtgggggcagagaaagagtgcagatccctttgcttgtgaaagaattatcagtgagtgaaaggccatcaccccaggaagccaaatgagggagcagcaacatgtatatgagcttcctatggaattgtccttatgtgaagctttgaaggtgtacagccactctcccgggtcttcaggttcctaccatttccatttctgttaaagtggatctgcatatcttcagcttactaggtgacccggatgctgacatctgctgctgcagaaaggaagacttttcattgtaatttcgcttagacccttttatcagtggagctccagttttcttacctagctgtcacttttttaaatgcctctgggggttatttttgctttccttggcccccaccaatttatacatctccattttctgacctctggactaactggttgctcagcaaggttctgaaggagagtttcttgcattggacaggcccagtcttctcccatcattgccctgctgtgactccaaagaaaggagcttcttgctgacagtgccctgtggagcaaggctgtgtttcctaccccacacggtgctcagtgggtgccagccctcagtgtggctttgtgattgctgccctaaaggagaatgctctttccttcctcactggtactgcctgctgttttctaagcattgctcctgcacagacatggagtcccagccccagcaaggctcttctgttcccatctgttgacaatgtcttgtggagcatttttgctgaggaaaaggtcacttgtaaacagaggagaaagggaaagagtacaaagccctaagtttattgtaagtgaaaactgagggaattcctgtcttctttaggagtaatgattcatagatctagataggtggaaatatcattcaaaatagtcacttgagctcacaaaaaaagcaaggaagaattctcatgtcctttgtcttccttctgtagccattaactgctgaatccatgtgaggaagacaggcttcccttccttccccctccttagtgattttttctttaacagcataagtaaagaggactttctggttcatttttgtttgttttgttttgttttgttttgtttacagatgaggtcttgctgtgttgcccaggctggagtgcggtggctattcacagatgctatcatagcacactacagcctccaactcttgggctcaagcatcacgcctagcagtttctggttcctttaacagcaaaaggaaagagaggttctgattcttacctcagggttttttggttgttcattgtttttgtttttgtttttgttttgacactgcagagcacaaggctaaaggttacagctgagatctttggaaccaaaggcagagcaagcagagcccgttgtctgggccccacaccactgcaggcaggtggatagaagtgcggcccctctcatagtatgcccataagtcagggcatagggcagaactacctgtcatgttgctacaccatcctgtcttctcagcatctccttgcctgttttctttattagtccaaaggaaaacaacagcaacaaaatctgtttttaaaatgtcttatatgaacatatatcaaatatccatgcgctgaaacccacataccatcacttggcaattttttagaataagaccccattattatctattgctataaacctagccagttctcttgctcttctgtattttcctatttccctgccatcatctgctatttctgccacttctcttagactccttgtctgcaaagcccaagctagaactcactgtctatggcagaaggacatccagagcccattctggagttttgttttttccttctgccagatgctttgtgtcctgtcttccttcctcctcatatttctgtttctcatttgtgttcagttttgtgcagcattgctagcactgcttttgtgaccagaaaaggccataacatggtccaggatcatcattcttctgactctagatgggacacttgacagtgacttgaaacatttgcatattcaggaatgcatgagatttcaagagagcctacagtatgaaatcattttcacaaaataagcagcttgcttctgaaatgctgtctttcccagtagctactcacctgcctctggtggctgggattcagatgccacaaaactgtcagtatctatagaccaggtctgtgccacctcctctctcctctgtgctcagtgaggaggcagtaaatgaagttacaggctagcacaatacctaattcatgtttcccagtacacctgtagatattactgtacttttatgttctcaagaaataagttgttgcctattcagtgttacagatttctttgtttctttttaattaaaatacaagaagcagctgaggaaagggagacaaggtattttatttctgactgattttagaaaaaacttgtgtacatgtgtttggaactgttgaaatgccaagttttctgtataagtgtttttgtaattaaactttcagattttctttgttttttaagaagttgatgtgcttgtttgacatttgtctcattaaaacttttctacgttgcctcgggccccaatttcacctcaccttcccccatctcccccctatatcgtcccattcccacatctccctggcccctcctcttcccctctctctcccctgg

SEQ ID NO: 104363 - DNA, 3776 bp, Homo sapiens
  misc_feature (3774)..(3774): n is a, c, g, or t
atttttgtgaaggtaccgtggaaaatatttcatttttcttctcaccggagcaattgtaaatgctatgcggtaagaggagttacctgtggaaaggtggttaagagattaggtaaagaaaaggaaaggacaccaaaataaagtgctgcggaagaatttttgtccagctgtgagacgacgagtgcgtgaagtgaaggcgattgagaggggctgagggaattgtcctctgtggaagggactttcttttggccctaggccccttcctgcccctgtcgtcagcagagagatggaaaacttgatgactagctccaccctaccgcccctttttgcagatgaagacggttccaaggagagtaatgatctggctaccactgggttaaatcacccagaggttccatacagtagtggcgccacatcatccaccaacaatccagaatttgtggaggatctctctcaaggtcagttgcttcagagtgagtcttcaaatgcagcagaaggcaatgaacagaggcatgaagatgagcaacgaagtaaacgaggaggttggtccaaaggaagaaagaggaagaaacctcttcgagacagcaatgcacccaaatccccccttacaggatatgttcggttcatgaatgagcgtcgagaacaacttcgagcaaagagaccagaagtcccatttccagaaatcacaaggatgttaggcaatgaatggagtaaactgcctcctgaggaaaaacagcgctaccttgatgaagcagacagagataaggagcgttacatgaaggaactggaacagtatcagaaaacagaggcctacaaggtcttcagtaggaaaacccaggaccgtcagaaaggcaaatctcataggcaagatgcagcccggcaggccactcatgatcatgagaaagaaacagaggtaaaggaacggtctgtttttgacatccctatatttacagaggaattcttgaaccatagcaaagctcgggaagcagagctccgccagcttcgcaaatccaacatggagtttgaggagaggaatgcagccctgcaaaagcacgtggagagcatgcgcacagcagtggagaagctggaggtggatgtgatccaggagcggagccgcaacacagtcttacagcagcacctggagaccctgcggcaggtgctgaccagcagctttgccagcatgcccttgcctggaagtggagagacacctacagtggacaccattgactcatatatgaacagactgcacagtattattttagctaatccccaagacaatgaaaacttcatagctacagttcgagaagttgtgaacagactcgatcgttagggaatggtcttagaactccaagatgttccataagtgtttttacttgtgaggaatgagaagccatccatggaaatttgaactgagtgggggcagagaaagagtgcagatccctttgcttgtgaaagaattatcagtgagtgaaaggccatcaccccaggaagccaaatgagggagcagcaacatgtatatgagcttcctatggaattgtccttatgtgaagctttgaaggtgtacagccactctcccgggtcttcaggttcctaccatttccatttctgttaaagtggatctgcatatcttcagcttactaggtgacccggatgctgacatctgctgctgcagaaaggaagacttttcattgtaatttcgcttagacccttttatcagtggagctccagttttcttacctagctgtcacttttttaaatgcctctgggggttatttttgctttccttggcccccaccaatttatacatctccattttctgacctctggactaactggttgctcagcaaggttctgaaggagagtttcttgcattggacaggcccagtcttctcccatcattgccctgctgtgactccaaagaaaggagcttcttgctgacagtgccctgtggagcaaggctgtgtttcctaccccacacggtgctcagtgggtgccagccctcagtgtggctttgtgattgctgccctaaaggagaatgctctttccttcctcactggtactgcctgctgttttctaagcattgctcctgcacagacatggagtcccagccccagcaaggctcttctgttcccatctgttgacaatgtcttgtggagcatttttgctgaggaaaaggtcacttgtaaacagaggagaaagggaaagagtacaaagccctaagtttattgtaagtgaaaactgagggaattcctgtcttctttaggagtaatgattcatagatctagataggtggaaatatcattcaaaatagtcacttgagctcacaaaaaaagcaaggaagaattctcatgtcctttgtcttccttctgtagccattaactgctgaatccatgtgaggaagacaggcttcccttccttccccctccttagtgattttttctttaacagcataagtaaagaggactttctggttcatttttgtttgttttgttttgttttgttttgtttacagatgaggtcttgctgtgttgcccaggctggagtgcggtggctattcacagatgctatcatagcacactacagcctccaactcttgggctcaagcatcacgcctagcagtttctggttcctttaacagcaaaaggaaagagaggttctgattcttacctcagggttttttggttgttcattgtttttgtttttgtttttgttttgacactgcagagcacaaggctaaaggttacagctgagatctttggaaccaaaggcagagcaagcagagcccgttgtctgggccccacaccactgcaggcaggtggatagaagtgcggcccctctcatagtatgcccataagtcagggcatagggcagaactacctgtcatgttgctacaccatcctgtcttctcagcatctccttgcctgttttctttattagtccaaaggaaaacaacagcaacaaaatctgtttttaaaatgtcttatatgaacatatatcaaatatccatgcgctgaaacccacataccatcacttggcaattttttagaataagaccccattattatctattgctataaacctagccagttctcttgctcttctgtattttcctatttccctgccatcatctgctatttctgccacttctcttagactccttgtctgcaaagcccaagctagaactcactgtctatggcagaaggacatccagagcccattctggagttttgttttttccttctgccagatgctttgtgtcctgtcttccttcctcctcatatttctgtttctcatttgtgttcagttttgtgcagcattgctagcactgcttttgtgaccagaaaaggccataacatggtccaggatcatcattcttctgactctagatgggacacttgacagtgacttgaaacatttgcatattcaggaatgcatgagatttcaagagagcctacagtatgaaatcattttcacaaaataagcagcttgcttctgaaatgctgtctttcccagtagctactcacctgcctctggtggctgggattcagatgccacaaaactgtcagtatctatagaccaggtctgtgccacctcctctctcctctgtgctcagtgaggaggcagtaaatgaagttacaggctagcacaatacctaattcatgtttcccagtacacctgtagatattactgtacttttatgttctcaagaaataagttgttgcctattcagtgttatattacggcccggccgcgcgccacccccatacaagaagcatntg

SEQ ID NO: 104364 - DNA, 395 bp, Homo sapiens
ggactaatttcatttctttgagatctaaaagtctctcctctaaaattaaaagcatgtctgtggagcagaccacattagaatcactgtttctttgaaattgtgttttatggtacaactgaatagggaggattttcttactttcttcttatctcacttcaggaagtggagagacacctacagtggacaccattgactcatatatgaacagactgcacagtattattttagctaatccccaagacaatgaaaacttcatagctacagttcgagaagttgtgaacagactcgatcgttagggaatggtgagtgctcactgataaatatttatatgccagcacatcatcaaaaataagatgtcatcagactttatcaatactactaaaaccctgggatta

SEQ ID NO: 104365 - DNA, 3965 bp, Homo sapiens
atttttgtgaaggtaccgtggaaaatatttcatttttcttctcaccggagcaattgtaaatgctatgcggtaagaggagttacctgtggaaaggtggttaagagattaggtaaagaaaaggaaaggacaccaaaataaagtgctgcggaagaatttttgtccagctgtgagacgacgagtgcgtgaagtgaaggcgattgagaggggctgagggaattgtcctctgtggaagggactttcttttggccctaggccccttcctgcccctgtcgtcagcagagagatggaaaacttgatgactagctccaccctaccgcccctttttgcagatgaagacggttccaaggagagtaatgatctggctaccactgggttaaatcacccagaggttccatacagtagtggcgccacatcatccaccaacaatccagaatttgtggaggatctctctcaaggtcagttgcttcagagtgagtcttcaaatgcagcagaaggcaatgaacagaggcatgaagatgagcaacgaagtaaacgaggaggttggtccaaaggaagaaagaggaagaaacctcttcgagacagcaatgcacccaaatccccccttacaggatatgttcggttcatgaatgagcgtcgagaacaacttcgagcaaagagaccagaagtcccatttccagaaatcacaaggatgttaggcaatgaatggagtaaactgcctcctgaggaaaaacagcgctaccttgatgaagcagacagagataaggagcgttacatgaaggaactggaacagtatcagaaaacagaggcctacaaggtcttcagtaggaaaacccaggaccgtcagaaaggcaaatctcataggcaagatgcagcccggcaggccactcatgatcatgagaaagaaacagaggtaaaggaacggtctgtttttgacatccctatatttacagaggaattcttgaaccatagcaaagctcgggaagcagagctccgccagcttcgcaaatccaacatggagtttgaggagaggaatgcagccctgcaaaagcacgtggagagcatgcgcacagcagtggagaagctggaggtggatgtgatccaggagcggagccgcaacacagtcttacagcagcacctggagaccctgcggcaggtgctgaccagcagctttgccagcatgcccttgcctggaagtggagagacacctacagtggacaccattgactcatatatgaacagactgcacagtattattttagctaatccccaagacaatgaaaacttcatagctacagttcgagaagttgtgaacagactcgatcgttagggaatggtcttagaactccaagatgttccataagtgtttttacttgtgaggaatgagaagccatccatggaaatttgaactgagtgggggcagagaaagagtgcagatccctttgcttgtgaaagaattatcagtgagtgaaaggccatcaccccaggaagccaaatgagggagcagcaacatgtatatgagcttcctatggaattgtccttatgtgaagctttgaaggtgtacagccactctcccgggtcttcaggttcctaccatttccatttctgttaaagtggatctgcatatcttcagcttactaggtgacccggatgctgacatctgctgctgcagaaaggaagacttttcattgtaatttcgcttagacccttttatcagtggagctccagttttcttacctagctgtcacttttttaaatgcctctgggggttatttttgctttccttggcccccaccaatttatacatctccattttctgacctctggactaactggttgctcagcaaggttctgaaggagagtttcttgcattggacaggcccagtcttctcccatcattgccctgctgtgactccaaagaaaggagcttcttgctgacagtgccctgtggagcaaggctgtgtttcctaccccacacggtgctcagtgggtgccagccctcagtgtggctttgtgattgctgccctaaaggagaatgctctttccttcctcactggtactgcctgctgttttctaagcattgctcctgcacagacatggagtcccagccccagcaaggctcttctgttcccatctgttgacaatgtcttgtggagcatttttgctgaggaaaaggtcacttgtaaacagaggagaaagggaaagagtacaaagccctaagtttattgtaagtgaaaactgagggaattcctgtcttctttaggagtaatgattcatagatctagataggtggaaatatcattcaaaatagtcacttgagctcacaaaaaaagcaaggaagaattctcatgtcctttgtcttccttctgtagccattaactgctgaatccatgtgaggaagacaggcttcccttccttccccctccttagtgattttttctttaacagcataagtaaagaggactttctggttcatttttgtttgttttgttttgttttgttttgtttacagatgaggtcttgctgtgttgcccaggctggagtgcggtggctattcacagatgctatcatagcacactacagcctccaactcttgggctcaagcatcacgcctagcagtttctggttcctttaacagcaaaaggaaagagaggttctgattcttacctcagggttttttggttgttcattgtttttgtttttgtttttgttttgacactgcagagcacaaggctaaaggttacagctgagatctttggaaccaaaggcagagcaagcagagcccgttgtctgggccccacaccactgcaggcaggtggatagaagtgcggcccctctcatagtatgcccataagtcagggcatagggcagaactacctgtcatgttgctacaccatcctgtcttctcagcatctccttgcctgttttctttattagtccaaaggaaaacaacagcaacaaaatctgtttttaaaatgtcttatatgaacatatatcaaatatccatgcgctgaaacccacataccatcacttggcaattttttagaataagaccccattattatctattgctataaacctagccagttctcttgctcttctgtattttcctatttccctgccatcatctgctatttctgccacttctcttagactccttgtctgcaaagcccaagctagaactcactgtctatggcagaaggacatccagagcccattctggagttttgttttttccttctgccagatgctttgtgtcctgtcttccttcctcctcatatttctgtttctcatttgtgttcagttttgtgcagcattgctagcactgcttttgtgaccagaaaaggccataacatggtccaggatcatcattcttctgactctagatgggacacttgacagtgacttgaaacatttgcatattcaggaatgcatgagatttcaagagagcctacagtatgaaatcattttcacaaaataagcagcttgcttctgaaatgctgtctttcccagtagctactcacctgcctctggtggctgggattcagatgccacaaaactgtcagtatctatagaccaggtctgtgccacctcctctctcctctgtgctcagtgaggaggcagtaaatgaagttacaggctagcacaatacctaattcatgtttcccagtacacctgtagatattactgtacttttatgttctcaagaaataagttgttgcctattcagtgttacagatttctttgtttctttttaattaaaatacaagaagcagctgaggaaagggagacaaggtattttatttctgactgattttagaaaaaacttgtgtacatgtgtttggaactgttgaaatgccaagttttctgtataagtgtttttgtaattaaactttcagattttctttgttttttaagaagttgatgtgcttgtttgacatttgtctcattaaaacttttctacgttg

SEQ ID NO: 104366 - DNA, 4058 bp, Homo sapiens
atttttgtgaaggtaccgtggaaaatatttcatttttcttctcaccggagcaattgtaaatgctatgcggtaagaggagttacctgtggaaaggtggttaagagattaggtaaagaaaaggaaaggacaccaaaataaagtgctgcggaagaatttttgtccagctgtgagacgacgagtgcgtgaagtgaaggcgattgagaggggctgagggaattgtcctctgtggaagggactttcttttggccctaggccccttcctgcccctgtcgtcagcagagtctctacaaggaagataacggactgtaaaattctataaagcaaagctacacatcacttgacaccatacaccatcttggttacataatgaagagagatggaaaacttgatgactagctccaccctaccgcccctttttgcagatgaagacggttccaaggagagtaatgatctggctaccactgggttaaatcacccagaggttccatacagtagtggcgccacatcatccaccaacaatccagaatttgtggaggatctctctcaaggtcagttgcttcagagtgagtcttcaaatgcagcagaaggcaatgaacagaggcatgaagatgagcaacgaagtaaacgaggaggttggtccaaaggaagaaagaggaagaaacctcttcgagacagcaatgcacccaaatccccccttacaggatatgttcggttcatgaatgagcgtcgagaacaacttcgagcaaagagaccagaagtcccatttccagaaatcacaaggatgttaggcaatgaatggagtaaactgcctcctgaggaaaaacagcgctaccttgatgaagcagacagagataaggagcgttacatgaaggaactggaacagtatcagaaaacagaggcctacaaggtcttcagtaggaaaacccaggaccgtcagaaaggcaaatctcataggcaagatgcagcccggcaggccactcatgatcatgagaaagaaacagaggtaaaggaacggtctgtttttgacatccctatatttacagaggaattcttgaaccatagcaaagctcgggaagcagagctccgccagcttcgcaaatccaacatggagtttgaggagaggaatgcagccctgcaaaagcacgtggagagcatgcgcacagcagtggagaagctggaggtggatgtgatccaggagcggagccgcaacacagtcttacagcagcacctggagaccctgcggcaggtgctgaccagcagctttgccagcatgcccttgcctggaagtggagagacacctacagtggacaccattgactcatatatgaacagactgcacagtattattttagctaatccccaagacaatgaaaacttcatagctacagttcgagaagttgtgaacagactcgatcgttagggaatggtcttagaactccaagatgttccataagtgtttttacttgtgaggaatgagaagccatccatggaaatttgaactgagtgggggcagagaaagagtgcagatccctttgcttgtgaaagaattatcagtgagtgaaaggccatcaccccaggaagccaaatgagggagcagcaacatgtatatgagcttcctatggaattgtccttatgtgaagctttgaaggtgtacagccactctcccgggtcttcaggttcctaccatttccatttctgttaaagtggatctgcatatcttcagcttactaggtgacccggatgctgacatctgctgctgcagaaaggaagacttttcattgtaatttcgcttagacccttttatcagtggagctccagttttcttacctagctgtcacttttttaaatgcctctgggggttatttttgctttccttggcccccaccaatttatacatctccattttctgacctctggactaactggttgctcagcaaggttctgaaggagagtttcttgcattggacaggcccagtcttctcccatcattgccctgctgtgactccaaagaaaggagcttcttgctgacagtgccctgtggagcaaggctgtgtttcctaccccacacggtgctcagtgggtgccagccctcagtgtggctttgtgattgctgccctaaaggagaatgctctttccttcctcactggtactgcctgctgttttctaagcattgctcctgcacagacatggagtcccagccccagcaaggctcttctgttcccatctgttgacaatgtcttgtggagcatttttgctgaggaaaaggtcacttgtaaacagaggagaaagggaaagagtacaaagccctaagtttattgtaagtgaaaactgagggaattcctgtcttctttaggagtaatgattcatagatctagataggtggaaatatcattcaaaatagtcacttgagctcacaaaaaaagcaaggaagaattctcatgtcctttgtcttccttctgtagccattaactgctgaatccatgtgaggaagacaggcttcccttccttccccctccttagtgattttttctttaacagcataagtaaagaggactttctggttcatttttgtttgttttgttttgttttgttttgtttacagatgaggtcttgctgtgttgcccaggctggagtgcggtggctattcacagatgctatcatagcacactacagcctccaactcttgggctcaagcatcacgcctagcagtttctggttcctttaacagcaaaaggaaagagaggttctgattcttacctcagggttttttggttgttcattgtttttgtttttgtttttgttttgacactgcagagcacaaggctaaaggttacagctgagatctttggaaccaaaggcagagcaagcagagcccgttgtctgggccccacaccactgcaggcaggtggatagaagtgcggcccctctcatagtatgcccataagtcagggcatagggcagaactacctgtcatgttgctacaccatcctgtcttctcagcatctccttgcctgttttctttattagtccaaaggaaaacaacagcaacaaaatctgtttttaaaatgtcttatatgaacatatatcaaatatccatgcgctgaaacccacataccatcacttggcaattttttagaataagaccccattattatctattgctataaacctagccagttctcttgctcttctgtattttcctatttccctgccatcatctgctatttctgccacttctcttagactccttgtctgcaaagcccaagctagaactcactgtctatggcagaaggacatccagagcccattctggagttttgttttttccttctgccagatgctttgtgtcctgtcttccttcctcctcatatttctgtttctcatttgtgttcagttttgtgcagcattgctagcactgcttttgtgaccagaaaaggccataacatggtccaggatcatcattcttctgactctagatgggacacttgacagtgacttgaaacatttgcatattcaggaatgcatgagatttcaagagagcctacagtatgaaatcattttcacaaaataagcagcttgcttctgaaatgctgtctttcccagtagctactcacctgcctctggtggctgggattcagatgccacaaaactgtcagtatctatagaccaggtctgtgccacctcctctctcctctgtgctcagtgaggaggcagtaaatgaagttacaggctagcacaatacctaattcatgtttcccagtacacctgtagatattactgtacttttatgttctcaagaaataagttgttgcctattcagtgttacagatttctttgtttctttttaattaaaatacaagaagcagctgaggaaagggagacaaggtattttatttctgactgattttagaaaaaacttgtgtacatgtgtttggaactgttgaaatgccaagttttctgtataagtgtttttgtaattaaactttcagattttctttgttttttaagaagttgatgtgcttgtttgacatttgtctcattaaaacttttctacgttg

SEQ ID NO: 104367 - DNA, 3912 bp, Homo sapiens
atttttgtgaaggtaccgtggaaaatatttcatttttcttctcaccggagcaattgtaaatgctatgcggtaagaggagttacctgtggaaaggtggttaagagattaggtaaagaaaaggaaaggacaccaaaataaagtgctgcggaagaatttttgtccagctgtgagacgacgagtgcgtgaagtgaaggcgattgagaggggctgagggaattgtcctctgtggaagggactttcttttggccctaggccccttcctgcccctgtcgtcagcagagagatggaaaacttgatgactagctccaccctaccgcccctttttgcagatgaagacggttccaaggagagtaatgatctggctaccactgggttaaatcacccagaggttccatacagtagtggcgccacatcatccaccaacaatccagaatttgtggaggatctctctcaaggtcagttgcttcagagtgagtcttcaaatgcagcagaaggcaatgaacagaggcatgaagatgagcaacgaagtaaacgaggaggttggtccaaaggaagaaagaggaagaaacctcttcgagacagcaatgcacccaaatccccccttacaggatatgttcggttcatgaatgagcgtcgagaacaacttcgagcaaagagaccagaagtcccatttccagaaatcacaaggatgttaggcaatgaatggagtaaactgcctcctgaggaaaaacagcgctaccttgatgaagcagacagagataaggagcgttacatgaaggaactggaacagtatcagaaaacagaggcctacaaggtcttcagtaggaaaacccaggaccgtcagaaaggcaaatctcataggcaagatgcagcccggcaggccactcatgatcatgagaaagaaacagaggtaaaggaacggtctgtttttgacatccctatatttacagaggaattcttgaaccatagcaaagctcgggaagcagagctccgccagcttcgcaaatccaacatggagtttgaggagaggaatgcagccctgcaaaagcacgtggagagcatgcgcacagcagtggagaagctggaggtggatgtgatccaggagcggagccgcaacacagtcttacagcagcacctggagaccctgcggcaggtgctgaccagcagctttgccagcatgcccttgcctggaagtggagagacacctacagtggacaccattgactcatatatgaacagactgcacagtattattttagctaatccccaagacaatgaaaacttcatagctacagttcgagaagttgtgaacagactcgatcgttagggaatggtcttagaactccaagatgttccataagtgtttttacttgtgaggaatgagaagccatccatggaaatttgaactgagtgggggcagagaaagagtgcagatccctttgcttgtgaaagaattatcagtgagtgaaaggccatcaccccaggaagccaaatgagggagcagcaacatgtatatgagcttcctatggaattgtccttatgtgaagctttgaaggtgtacagccactctcccgggtcttcaggttcctaccatttccatttctgttaaagtggatctgcatatcttcagcttactaggtgacccggatgctgacatctgctgctgcagaaaggaagacttttcattgtaatttcgcttagacccttttatcagtggagctccagttttcttacctagctgtcacttttttaaatgcctctgggggttatttttgctttccttggcccccaccaatttatacatctccattttctgacctctggactaactggttgctcagcaaggttctgaaggagagtttcttgcattggacaggcccagtcttctcccatcattgccctgctgtgactccaaagaaaggagcttcttgctgacagtgccctgtggagcaaggctgtgtttcctaccccacacggtgctcagtgggtgccagccctcagtgtggctttgtgattgctgccctaaaggagaatgctctttccttcctcactggtactgcctgctgttttctaagcattgctcctgcacagacatggagtcccagccccagcaaggctcttctgttcccatctgttgacaatgtcttgtggagcatttttgctgaggaaaaggtcacttgtaaacagaggagaaagggaaagagtacaaagccctaagtttattgtaagtgaaaactgagggaattcctgtcttctttaggagtaatgattcatagatctagataggtggaaatatcattcaaaatagtcacttgagctcacaaaaaaagcaaggaagaattctcatgtcctttgtcttccttctgtagccattaactgctgaatccatgtgaggaagacaggcttcccttccttccccctccttagtgattttttctttaacagcataagtaaagaggactttctggttcatttttgtttgttttgttttgttttgttttgtttacagatgaggtcttgctgtgttgcccaggctggagtgcggtggctattcacagatgctatcatagcacactacagcctccaactcttgggctcaagcatcacgcctagcagtttctggttcctttaacagcaaaaggaaagagaggttctgattcttacctcagggttttttggttgttcattgtttttgtttttgtttttgttttgacactgcagagcacaaggctaaaggttacagctgagatctttggaaccaaaggcagagcaagcagagcccgttgtctgggccccacaccactgcaggcaggtggatagaagtgcggcccctctcatagtatgcccataagtcagggcatagggcagaactacctgtcatgttgctacaccatcctgtcttctcagcatctccttgcctgttttctttattagtccaaaggaaaacaacagcaacaaaatctgtttttaaaatgtcttatatgaacatatatcaaatatccatgcgctgaaacccacataccatcacttggcaattttttagaataagaccccattattatctattgctataaacctagccagttctcttgctcttctgtattttcctatttccctgccatcatctgctatttctgccacttctcttagactccttgtctgcaaagcccaagctagaactcactgtctatggcagaaggacatccagagcccattctggagttttgttttttccttctgccagatgctttgtgtcctgtcttccttcctcctcatatttctgtttctcatttgtgttcagttttgtgcagcattgctagcactgcttttgtgaccagaaaaggccataacatggtccaggatcatcattcttctgactctagatgggacacttgacagtgacttgaaacatttgcatattcaggaatgcatgagatttcaagagagcctacagtatgaaatcattttcacaaaataagcagcttgcttctgaaatgctgtctttcccagtagctactcacctgcctctggtggctgggattcagatgccacaaaactgtcagtatctatagaccaggtctgtgccacctcctctctcctctgtgctcagtgaggaggcagtaaatgaagttacaggctagcacaatacctaattcatgtttcccagtacacctgtagatattactgtacttttatgttctcaagaaataagttgttgcctattcagtgttacagatttctttgtttctttttaattaaaatacaagaagcagctgaggaaagggagacaaggtattttatttctgactgattttagaaaaaacttgtgtacatgtgtttggaactgttgaaatgccaagttttctgtataagtgtttttgtaattaaactttcagattttctttgtttttt

SEQ ID NO: 104368 - DNA, 3580 bp, Homo sapiens
atttttgtgaaggtaccgtggaaaatatttcatttttcttctcaccggagcaattgtaaatgctatgcggtaagaggagttacctgtggaaaggtggttaagagattaggtaaagaaaaggaaaggacaccaaaataaagtgctgcggaagaatttttgtccagctgtgagacgacgagtgcgtgaagtgaaggcgattgagaggggctgagggaattgtcctctgtggaagggactttcttttggccctaggccccttcctgcccctgtcgtcagcagagagatggaaaacttgatgactagctccaccctaccgcccctttttgcagatgaagacggttccaaggagagtaatgatctggctaccactgggttaaatcacccagaggttccatacagtagtggcgccacatcatccaccaacaatccagaatttgtggaggatctctctcaaggtcagttgcttcagagtgagtcttcaaatgcagcagaaggcaatgaacagaggcatgaagatgagcaacgaagtaaacgaggaggttggtccaaaggaagaaagaggaagaaacctcttcgagacagcaatgcacccaaatccccccttacaggatatgttcggttcatgaatgagcgtcgagaacaacttcgagcaaagagaccagaagtcccatttccagaaatcacaaggatgttaggcaatgaatggagtaaactgcctcctgaggaaaaacagcgctaccttgatgaagcagacagagataaggagcgttacatgaaggaactggaacagtatcagaaaacagaggcctacaaggtcttcagtaggaaaacccaggaccgtcagaaaggcaaatctcataggcaagatgcagcccggcaggccactcatgatcatgagaaagaaacagaggtaaaggaacggtctgtttttgacatccctatatttacagaggaattcttgaaccatagcaaagctcgggaagcagagctccgccagcttcgcaaatccaacatggagtttgaggagaggaatgcagccctgcaaaagcacgtggagagcatgcgcacagcagtggagaagctggaggtggatgtgatccaggagcggagccgcaacacagtcttacagcagcacctggagaccctgcggcaggtgctgaccagcagctttgccagcatgcccttgcctggaagtggagagacacctacagtggacaccattgactcatatatgaacagactgcacagtattattttagctaatccccaagacaatgaaaacttcatagctacagttcgagaagttgtgaacagactcgatcgttagggaatggtcttagaactccaagatgttccataagtgtttttacttgtgaggaatgagaagccatccatggaaatttgaactgagtgggggcagagaaagagtgcagatccctttgcttgtgaaagaattatcagtgagtgaaaggccatcaccccaggaagccaaatgagggagcagcaacatgtatatgagcttcctatggaattgtccttatgtgaagctttgaaggtgtacagccactctcccgggtcttcaggttcctaccatttccatttctgttaaagtggatctgcatatcttcagcttactaggtgacccggatgctgacatctgctgctgcagaaaggaagacttttcattgtaatttcgcttagacccttttatcagtggagctccagttttcttacctagctgtcacttttttaaatgcctctgggggttatttttgctttccttggcccccaccaatttatacatctccattttctgacctctggactaactggttgctcagcaaggttctgaaggagagtttcttgcattggacaggcccagtcttctcccatcattgccctgctgtgactccaaagaaaggagcttcttgctgacagtgccctgtggagcaaggctgtgtttcctaccccacacggtgctcagtgggtgccagccctcagtgtggctttgtgattgctgccctaaaggagaatgctctttccttcctcactggtactgcctgctgttttctaagcattgctcctgcacagacatggagtcccagccccagcaaggctcttctgttcccatctgttgacaatgtcttgtggagcatttttgctgaggaaaaggtcacttgtaaacagaggagaaagggaaagagtacaaagccctaagtttattgtaagtgaaaactgagggaattcctgtcttctttaggagtaatgattcatagatctagataggtggaaatatcattcaaaatagtcacttgagctcacaaaaaaagcaaggaagaattctcatgtcctttgtcttccttctgtagccattaactgctgaatccatgtgaggaagacaggcttcccttccttccccctccttagtgattttttctttaacagcataagtaaagaggactttctggttcatttttgtttgttttgttttgttttgttttgtttacagatgaggtcttgctgtgttgcccaggctggagtgcggtggctattcacagatgctatcatagcacactacagcctccaactcttgggctcaagcatcacgcctagcagtttctggttcctttaacagcaaaaggaaagagaggttctgattcttacctcagggttttttggttgttcattgtttttgtttttgtttttgttttgacactgcagagcacaaggctaaaggttacagctgagatctttggaaccaaaggcagagcaagcagagcccgttgtctgggccccacaccactgcaggcaggtggatagaagtgcggcccctctcatagtatgcccataagtcagggcatagggcagaactacctgtcatgttgctacaccatcctgtcttctcagcatctccttgcctgttttctttattagtccaaaggaaaacaacagcaacaaaatctgtttttaaaatgtcttatatgaacatatatcaaatatccatgcgctgaaacccacataccatcacttggcaattttttagaataagaccccattattatctattgctataaacctagccagttctcttgctcttctgtattttcctatttccctgccatcatctgctatttctgccacttctcttagactccttgtctgcaaagcccaagctagaactcactgtctatggcagaaggacatccagagcccattctggagttttgttttttccttctgccagatgctttgtgtcctgtcttccttcctcctcatatttctgtttctcatttgtgttcagttttgtgcagcattgctagcactgcttttgtgaccagaaaaggccataacatggtccaggatcatcattcttctgactctagatgggacacttgacagtgacttgaaacatttgcatattcaggaatgcatgagatttcaagagagcctacagtatgaaatcattttcacaaaataagcagcttgcttctgaaatgctgtctttcccagtagctactcacctgcctctggtggctcgagcgccgccggtttaccctcaggaatcagctgatgaccatgg

SEQ ID NO: 104369 - DNA, 1615 bp, Homo sapiens
tctcattgtttatatttttattttcagaaaaacagagttcacttgaatacaattctcactagttaaatcacaattagagcatcggccggcgaccgttccggcggccattgcgaaaacttccccacggctactgcgtccacgtggcggtggcgtggggactccctgaaagcagagcggcagggcgcccggaagtcgtgagtcgagtcttcccgggctaatccatgccgggttggaggctgctgacgcaggtcggcgcccaggtgctgggtcgactcggggacggcctgggtgctgccctgggcccggggaacagaacacacatctggctttttgttagaggtcttcatggaaagagtggtacatggtgggatgagcatctttctgaagaaaatgtcccattcattaagcagttggtctctgatgaagataaagcccaattagcaagtaaactgtgtcctctgaaagatgaaccatggcctatacatccttgggaaccaggttcctttagagttggtcttattgccttgaagctgggcatgatgcctttatggaccaaggatggtcaaaagcatgtggtcacattacttcaggtacaagactgtcatgtcttaaaatatacgtcaaaggaaaactgtaatggaaaaatggcaaccctgtctgtaggaggaaaaactgtatcacgttttcgtaaagctacatccatattggaattttaccgggaacttggattgccgccgaaacagacagttaaaatctttaatataacagataatgctgcaattaaaccaggcactcctctttatgctgctcactttcgtccaggacagtatgtggatgtcacagccaaaactattggtaaaggttttcaaggtgtcatgaaaagatggggatttaaaggccagcctgctacgcatggtcaaacgaaaacccacaggagacctggagctgttgcaactggtgatattggcagagtctggcctggaactaaaatgcctggaaaaatgggaaacatatacaggacagaatatggactgaaagtgtggagaataaacacaaagcacaacataatctatgtaaatggctctgtacctggacataaaaattgcttagtaaaggtcaaagattctaaactgcctgcatataaggatctcggtaaaaatctaccattccctacatattttcctgatggagatgaagaggaactgccagaagatttgtatgatgaaaacgtgtgtcagcccggtgcgccttctattacatttgcctaacatctttggacgtggcagaaccttacatattctgtgagcttcgatgagccagagtgatatcataaccaccagaaatcatactctcctttcttagtcacaacaaaatcacacatgtcatctttgtcaagggcataaatatatcattcatacccccattaaattttgttagaaaaattaccacattaaatatatgagttaagtagattggatttgctgaaattggtgttgggcatattagcaaaatattcttaatttgtggactcgattcttttttactacatatttcccaagttatcttaagatgtctgtaaatttaacttttattaaagttttgtcaatctttgtga

SEQ ID NO: 104370 - DNA, 916 bp, Homo sapiens
  misc_feature (843)..(843): n is a, c, g, or t
  misc_feature (850)..(850): n is a, c, g, or t
  misc_feature (879)..(879): n is a, c, g, or t
gtaaaacgcaccggaagtgggtccggcggctttctttccgtcgcagagaagagcatcggccggcgaccgttccggcggccattgcgaaaacttccccacggctactgcgtccacgtggcggtggcgtggggactccctgaaagcagagcggcagggcgcccggaagtcgtgagtcgagtcttcccgggctaatccatgccgggttggaggctgctgacgcaggtcggcgcccaggtgctgggtcgactcggggacggcctgggtgctgccctgggcccggggaacagaacacacatctggctttttgttagaggtcttcatggaaagagtggtacatggtgggatgagcatctttctgaagaaaatgtcccattcattaagcagttggtctctgatgaagataaagcccaattagcaagtaaactgtgtcctctgaaagatgaaccatggcctatacatccttgggaaccaggttcctttagagttggtcttattgccttgaagctgggcatgatgcctttatggaccaaggatggtcaaaagcatgtggtcacattacttcaggtacaagactgtcatgtcttaaaatatacgtcaaaggaaaactgtaatggaaaaatggcaaccctgtctgtaggaggaaaaactgtatcacgttttcgtaaagctacatccatattggaattttaccgggaacttggattgccgccgaaacagacagttaaaatctttaatataacagataatgctgcaattaaaccagcactccctctttattgctgctcactttccgtccaaggacaattataatgggatgtcacaagcccaaaaacctatttgggnaaaaggnttttcaaaggggggtccattgaaaaaagnattgggggaattttaaaaggggccaaacccttgctta

SEQ ID NO: 104371 - DNA, 815 bp, Homo sapiens
ctaggtcgaggctggtgttaatcggacgagggtcacgtggcggtggcgtggggactccctgaaagcagagcggcagggcgcccggaagtcgtgagtcgagtcttcccgggctaatccatgccgggttggaggctgctgacgcaggtcggcgcccaggtgctgggtcgactcggggacggcctgggtgctgccctgggcccggggaacagaacacacatctggctttttgttagaggtcttcatggaaagagtggtacatggtgggatgagcatctttctgaagaaaatgtcccattcattaagcagttggtctctgatgaagataaagcccaattagcaagtaaactgtgtcctctgaaagatgaaccatggcctatacatccttgggaaccaggttcctttagagttggtcttattgccttgaagctgggcatgatgcctttatggaccaaggatggtcaaaagcatgtggtcacattacttcaggtacaagactgtcatgtcttaaaatatacgtcaaaggaaaactgtaatggaaaaatggcaaccctgtctgtaggaggaaaaactgtatcacgttttcgtaaagctacatccatattggaattttaccgggaacttggattgccgccgaaacagacagttaaaatctttaatataacagataatgctgcaattaaaccaggtttttctctgcctatataaatccaggttgggttataacttaaaggaagttccccccctgcaatcttacagcactttgctgcttgtattaaataaactataactataaataaactttcagttacattctc

SEQ ID NO: 104372 - DNA, 336 bp, Homo sapiens
  misc_feature (9)..(9): n is a, c, g, or t
attcctctncactgtttgcctaccggtcagagagcatcggccggcgaccgttccggcggccattgcgaaaacttccccacggctactgcgtccacgtggcggtggcgtggggactccctgaaagcagagcggcagggcgcccggaagtcgtgagtcgagtcttcccgggctaatccatgccgggttggaggctgctgacgcaggtcggcgcccaggtgctgggtcgactcggggacggcctgggtgctgccctgggcccggggaacagggtaacgactaacagtttaaatgtgagccttatccgaaggaatgtggggagtgaggaaaaggttggag

SEQ ID NO: 104373 - DNA, 1744 bp, Homo sapiens
gacccccactaggctaggacaggctgggtgaatcggacgaagagcatcggccggcgaccgttccggcggccattgcgaaaacttccccacggctactgcgtccacgtggcggtggcgtggggactccctgaaagcagagcggcagggcgcccggaagtcgtgagtcgagtcttcccgggctaatccatgccgggttggaggctgctgacgcaggtcggcgcccaggtgctgggtcgactcggggacggcctgggtgctgccctgggcccggggaacagaacacacatctggctttttgttagaggtcttcatggaaagagtggtacatggtgggatgagcatctttctgaagaaaatgtcccattcattaagcagttggtctctgatgaagataaagcccaattagcaagtaaactgtgtcctctgaaagatgaaccatggcctatacatccttgggaaccaggttcctttagagttggtcttattgccttgaagctgggcatgatgcctttatggaccaaggatggtcaaaagcatgtggtcacattacttcaggtacaagactgtcatgtcttaaaatatacgtcaaaggaaaactgtaatggaaaaatggcaaccctgtctgtaggaggaaaaactgtatcacgttttcgtaaagctacatccatattggaattttaccgggaacttggattgccgccgaaacagacagttaaaatctttaatataacagataatgctgcaattaaaccaggcactcctctttatgctgctcactttcgtccaggacagtatgtggatgtcacagccaaaactattggtaaaggttttcaaggtgtcatgaaaagatggggatttaaaggccagcctgctacgcatggtcaaacgaaaacccacaggagacctggagctgttgcaactggtgatattggcagagtctggcctggaactaaaatgcctggaaaaatgggaaacatatacaggacagaatatggactgaaagtgtggagaataaacacaaagcacaacataatctatgtaaatggctctgtacctggacataaaaattgcttagtaaaggtcaaagattctaaactgcctgcatataaggatctcggtaaaaatctaccattccctacatattttcctgatggagatgaagaggaactgccagaagatttgtatgatgaaaacgtgtgtcagcccggtgcgccttctattacatttgcctaacatctttggacgtggcagaaccttacatattctgtgagcttcgatgagccagagtgatatcataaccaccagaaatcatactctcctttcttagtcacaacaaaatcacacatgtcatctttgtcaagggcataaatatatcattcatacccccattaaattttgttagaaaaattaccacattaaatatatgagttaagtagattggatttgctgaaattggtgttgggcatattagcaaaatattcttaatttgtggactcgattcttttttactacatatttcccaagttatcttaagatgtctgtaaatttaacttttattaaagttttgtcaatctttgtgaaatagtggttgtggaacagtagaaaaccatatggggactatagtgcaacctatttgggtaaagaaaccatttgctaaaatggagaaagtaaatagatttttatttaaattacagaaacatgttaaaggccggacaaaggaaagacaataaaatcataaattatc

SEQ ID NO: 104374 - DNA, 1585 bp, Homo sapiens
  misc_feature (14)..(14): n is a, c, g, or t
  misc_feature (17)..(17): n is a, c, g, or t
  misc_feature (19)..(19): n is a, c, g, or t
  misc_feature (21)..(21): n is a, c, g, or t
  misc_feature (38)..(38): n is a, c, g, or t
aagtgtcttgagtntancncngccccctcccgggttancgggatgagagcatcggccggcgaccgttccggcggccattgcgaaaacttccccacggctactgcgtccacgtggcggtggcgtggggactccctgaaagcagagcggcagggcgcccggaagtcgtgagtcgagtcttcccgggctaatccatgccgggttggaggctgctgacgcaggtcggcgcccaggtgctgggtcgactcggggacggcctgggtgctgccctgggcccggggaacagaacacacatctggctttttgttagaggtcttcatggaaagagtggtacatggtgggatgagcatctttctgaagaaaatgtcccattcattaagcagttggtctctgatgaagataaagcccaattagcaagtaaactgtgtcctctgaaagatgaaccatggcctatacatccttgggaaccaggttcctttagagttggtcttattgccttgaagctgggcatgatgcctttatggaccaaggatggtcaaaagcatgtggtcacattacttcaggtacaagactgtcatgtcttaaaatatacgtcaaaggaaaactgtaatggaaaaatggcaaccctgtctgtaggaggaaaaactgtatcacgttttcgtaaagctacatccatattggaattttaccgggaacttggattgccgccgaaacagacagttaaaatctttaatataacagataatgctgcaattaaaccaggcactcctctttatgctgctcactttcgtccaggacagtatgtggatgtcacagccaaaactattggtaaaggttttcaaggtgtcatgaaaagatggggatttaaaggccagcctgctacgcatggtcaaacgaaaacccacaggagacctggagctgttgcaactggtgatattggcagagtctggcctggaactaaaatgcctggaaaaatgggaaacatatacaggacagaatatggactgaaagtgtggagaataaacacaaagcacaacataatctatgtaaatggctctgtacctggacataaaaattgcttagtaaaggtcaaagattctaaactgcctgcatataaggatctcggtaaaaatctaccattccctacatattttcctgatggagatgaagaggaactgccagaagatttgtatgatgaaaacgtgtgtcagcccggtgcgccttctattacatttgcctaacatctttggacgtggcagaaccttacatattctgtgagcttcgatgagccagagtgatatcataaccaccagaaatcatactctcctttcttagtcacaacaaaatcacacatgtcatctttgtcaagggcataaatatatcattcatacccccattaaattttgttagaaaaattaccacattaaatatatgagttaagtagattggatttgctgaaattggtgttgggcatattagcaaaatattcttaatttgtggactcgattcttttttactacatatttcccaagttatcttaagatgtctgtaaatttaacttttattaaagttttgtcaatctttgtga

SEQ ID NO: 104375 - DNA, 1771 bp, Homo sapiens
  misc_feature (14)..(14): n is a, c, g, or t
  misc_feature (17)..(17): n is a, c, g, or t
  misc_feature (19)..(19): n is a, c, g, or t
  misc_feature (21)..(21): n is a, c, g, or t
  misc_feature (38)..(38): n is a, c, g, or t
aagtgtcttgagtntancncngccccctcccgggttancgggatgagagcatcggccggcgaccgttccggcggccattgcgaaaacttccccacggctactgcgtccacgtggcggtggcgtggggactccctgaaagcagagcggcagggcgcccggaagtcgtgagtcgagtcttcccgggctaatccatgccgggttggaggctgctgacgcaggtcggcgcccaggtgctgggtcgactcggggacggcctgggtgctgccctgggcccggggaacagaacacacatctggctttttgttagaggtcttcatggaaagagtggtacatggtgggatgagcatctttctgaagaaaatgtcccattcattaagcagttggtctctgatgaagataaagcccaattagcaagtaaactgtgtcctctgaaagatgaaccatggcctatacatccttgggaaccaggttcctttagagttggtcttattgccttgaagctgggcatgatgcctttatggaccaaggatggtcaaaagcatgtggtcacattacttcaggtacaagactgtcatgtcttaaaatatacgtcaaaggaaaactgtaatggaaaaatggcaaccctgtctgtaggaggaaaaactgtatcacgttttcgtaaagctacatccatattggaattttaccgggaacttggattgccgccgaaacagacagttaaaatctttaatataacagataatgctgcaattaaaccaggcactcctctttatgctgctcactttcgtccaggacagtatgtggatgtcacagccaaaactattggtaaaggttttcaaggtgtcatgaaaagatggggatttaaaggccagcctgctacgcatggtcaaacgaaaacccacaggagacctggagctgttgcaactggtgatattggcagagtctggcctggaactaaaatgcctggaaaaatgggaaacatatacaggacagaatatggactgaaagtgtggagaataaacacaaagcacaacataatctatgtaaatggctctgtacctggacataaaaattgcttagtaaaggtcaaagattctaaactgcctgcatataaggatctcggtaaaaatctaccattccctacatattttcctgatggagatgaagaggaactgccagaagatttgtatgatgaaaacgtgtgtcagcccggtgcgccttctattacatttgcctaacatctttggacgtggcagaaccttacatattctgtgagcttcgatgagccagagtgatatcataaccaccagaaatcatactctcctttcttagtcacaacaaaatcacacatgtcatctttgtcaagggcataaatatatcattcatacccccattaaattttgttagaaaaattaccacattaaatatatgagttaagtagattggatttgctgaaattggtgttgggcatattagcaaaatattcttaatttgtggactcgattcttttttactacatatttcccaagttatcttaagatgtctgtaaatttaacttttattaaagttttgtcaatctttgtgaaatagtggttgtggaacagtagaaaaccatatggggactatagtgcaacctatttgggtaaagaaaccatttgctaaaatggagaaagtaaatagatttttatttaaattacagaaacatgttaaaggccggacaaaggaaagacaataaaatcataaattatcaagtgagaaaatgaacacaatg

SEQ ID NO: 104376 - DNA, 1364 bp, Homo sapiens
  misc_feature (14)..(14): n is a, c, g, or t
  misc_feature (17)..(17): n is a, c, g, or t
  misc_feature (19)..(19): n is a, c, g, or t
  misc_feature (21)..(21): n is a, c, g, or t
  misc_feature (38)..(38): n is a, c, g, or t
  misc_feature (1330)..(1330): n is a, c, g, or t
aagtgtcttgagtntancncngccccctcccgggttancgggatgagagcatcggccggcgaccgttccggcggccattgcgaaaacttccccacggctactgcgtccacgtggcggtggcgtggggactccctgaaagcagagcggcagggcgcccggaagtcgtgagtcgagtcttcccgggctaatccatgccgggttggaggctgctgacgcaggtcggcgcccaggtgctgggtcgactcggggacggcctgggtgctgccctgggcccggggaacagaacacacatctggctttttgttagaggtcttcatggaaagagtggtacatggtgggatgagcatctttctgaagaaaatgtcccattcattaagcagttggtctctgatgaagataaagcccaattagcaagtaaactgtgtcctctgaaagatgaaccatggcctatacatccttgggaaccaggttcctttagagttggtcttattgccttgaagctgggcatgatgcctttatggaccaaggatggtcaaaagcatgtggtcacattacttcaggtacaagactgtcatgtcttaaaatatacgtcaaaggaaaactgtaatggaaaaatggcaaccctgtctgtaggaggaaaaactgtatcacgttttcgtaaagctacatccatattggaattttaccgggaacttggattgccgccgaaacagacagttaaaatctttaatataacagataatgctgcaattaaaccaggcactcctctttatgctgctcactttcgtccaggacagtatgtggatgtcacagccaaaactattggtaaaggttttcaaggtgtcatgaaaagatggggatttaaaggccagcctgctacgcatggtcaaacgaaaacccacaggagacctggagctgttgcaactggtgatattggcagagtctggcctggaactaaaatgcctggaaaaatgggaaacatatacaggacagaatatggactgaaagtgtggagaataaacacaaagcacaacataatctatgtaaatggctctgtacctggacataaaaattgcttagtaaaggtcaaagattctaaactgcctgcatataaggatctcggtaaaaatctaccattccctacatattttcctgatggagatgaagaggaactgccagaagatttgtatgatgaaaacgtgtgtcagcccggtgcgccttctattacatttgcctaacatctttggacgtggcagaaccttacatattctgtgagcttcgatgagccagagtgatatcataaccaccagaaatcatactctcctttcanaaatcccttctccggccggtaaattttttaccaa

SEQ ID NO: 104377 - DNA, 1630 bp, Homo sapiens
  misc_feature (14)..(14): n is a, c, g, or t
  misc_feature (17)..(17): n is a, c, g, or t
  misc_feature (19)..(19): n is a, c, g, or t
  misc_feature (21)..(21): n is a, c, g, or t
  misc_feature (38)..(38): n is a, c, g, or t
aagtgtcttgagtntancncngccccctcccgggttancgggatgagagcatcggccggcgaccgttccggcggccattgcgaaaacttccccacggctactgcgtccacgtggcggtggcgtggggactccctgaaagcagagcggcagggcgcccggaagtcaacacacatctggctttttgttagaggtcttcatggaaagagtggtacatggtgggatgagcatctttctgaagaaaatgtcccattcattaagcagttggtctctgatgaagataaagcccaattagcaagtaaactgtgtcctctgaaagatgaaccatggcctatacatccttgggaaccaggttcctttagagttggtcttattgccttgaagctgggcatgatgcctttatggaccaaggatggtcaaaagcatgtggtcacattacttcaggtacaagactgtcatgtcttaaaatatacgtcaaaggaaaactgtaatggaaaaatggcaaccctgtctgtaggaggaaaaactgtatcacgttttcgtaaagctacatccatattggaattttaccgggaacttggattgccgccgaaacagacagttaaaatctttaatataacagataatgctgcaattaaaccaggcactcctctttatgctgctcactttcgtccaggacagtatgtggatgtcacagccaaaactattggtaaaggttttcaaggtgtcatgaaaagatggggatttaaaggccagcctgctacgcatggtcaaacgaaaacccacaggagacctggagctgttgcaactggtgatattggcagagtctggcctggaactaaaatgcctggaaaaatgggaaacatatacaggacagaatatggactgaaagtgtggagaataaacacaaagcacaacataatctatgtaaatggctctgtacctggacataaaaattgcttagtaaaggtcaaagattctaaactgcctgcatataaggatctcggtaaaaatctaccattccctacatattttcctgatggagatgaagaggaactgccagaagatttgtatgatgaaaacgtgtgtcagcccggtgcgccttctattacatttgcctaacatctttggacgtggcagaaccttacatattctgtgagcttcgatgagccagagtgatatcataaccaccagaaatcatactctcctttcttagtcacaacaaaatcacacatgtcatctttgtcaagggcataaatatatcattcatacccccattaaattttgttagaaaaattaccacattaaatatatgagttaagtagattggatttgctgaaattggtgttgggcatattagcaaaatattcttaatttgtggactcgattcttttttactacatatttcccaagttatcttaagatgtctgtaaatttaacttttattaaagttttgtcaatctttgtgaaatagtggttgtggaacagtagaaaaccatatggggactatagtgcaacctatttgggtaaagaaaccatttgctaaaatggagaaagtaaatagatttttatttaaattacagaaacatgttaaaggccggacaaaggaaagacaataaaatcataaattatc

SEQ ID NO: 104378 - DNA, 1160 bp, Homo sapiens
  misc_feature (14)..(14): n is a, c, g, or t
  misc_feature (17)..(17): n is a, c, g, or t
  misc_feature (19)..(19): n is a, c, g, or t
  misc_feature (21)..(21): n is a, c, g, or t
  misc_feature (38)..(38): n is a, c, g, or t
aagtgtcttgagtntancncngccccctcccgggttancgggatgagagcatcggccggcgaccgttccggcggccattgcgaaaacttccccacggctactgcgtccacgtggcggtggcgtggggactccctgaaagcagagcggcagggcgcccggaagtcgtgagtcgagtcttcccgggctaatccatgccgggttggaggctgctgacgcaggtcggcgcccaggtgctgggtcgactcggggacggcctgggtgctgccctgggcccggggaacagaacacacatctggctttttgttagaggtcttcatggaaagagtggtacatggtgggatgagcatctttctgaagaaaatgtcccattcattaagcagttggtctctgatgaagataaagcccaattagcaagtaaactgtgtcctctgaaagatgaaccatggcctatacatccttgggaaccaggttcctttagagttggtcttattgccttgaagctgggcatgatgcctttatggaccaaggatggtcaaaagcatgtggtcacattacttcaggtacaagactgtcatgtcttaaaatatacgtcaaaggaaaactgtaatggaaaaatggcaaccctgtctgtaggaggaaaaactgtatcacgttttcgtaaagctacatccatattggaattttaccgggaacttggattgccgccgaaacagacagttaaaatctttaatataacagataatgctgcaattaaaccaggcactcctctttatgctgctcactttcgtccaggacagtatgtggatgtcacagccaaaactattggtaaaggttttcaaggtgtcatgaaaagatggggatttaaaggccagcctgctacgcatggtcaaacgaaaacccacaggagacctggagctgttgcaactggtgatattggcagagtctggcctggaactaaaatgcctggaaaaatgggaaacatatacaggacagaatatggactgaaatgtgggattacacccaaggccactatctatgtaatggtcgtgctggctaaatggtcggcaggtcaggatttacggcgctttagtccggaaaattacattccaattttcggtgggtcaaggcgcgcacatttttaggcggttccggggcttaag

SEQ ID NO: 104379 - DNA, 1012 bp, Homo sapiens
  misc_feature (14)..(14): n is a, c, g, or t
  misc_feature (17)..(17): n is a, c, g, or t
  misc_feature (19)..(19): n is a, c, g, or t
  misc_feature (21)..(21): n is a, c, g, or t
  misc_feature (38)..(38): n is a, c, g, or t
aagtgtcttgagtntancncngccccctcccgggttancgggatgagagcatcggccggcgaccgttccggcggccattgcgaaaacttccccacggctactgcgtccacgtggcggtggcgtggggactccctgaaagcagagcggcagggcgcccggaagtcgtgagtcgagtcttcccgggctaatccatgccgggttggaggctgctgacgcaggtcggcgcccaggtgctgggtcgactcggggacggcctgggtgctgccctgggcccggggaacagaacacacatctggctttttgttagaggtcttcatggaaagagtggtacatggtgggatgagcatctttctgaagaaaatgtcccattcattaagcagttggtctctgatgaagataaagcccaattagcaagtaaactgtgtcctctgaaagatgaaccatggcctatacatccttgggaaccaggttcctttagagttggtcttattgccttgaagctgggcatgatgcctttatggaccaaggatggtcaaaagcatgtggtcacattacttcaggtacaagactgtcatgtcttaaaatatacgtcaaaggaaaactgtaatggaaaaatggcaaccctgtctgtaggaggaaaaactgtatcacgttttcgtaaagctacatccatattggaattttaccgggaacttggattgccgccgaaacagacagttaaaatctttaatataacagataatgctgcaattaaaccaggcactcctctttatgctgctcactttcgtccaggacagtatgtggatgtcacagccaaaactattggtaaaggttttcaaggtgtcatgaaaagatggggatttaaaggccagcctgctacgcatggtcaaacgaaaacccacaggagacctggagctgttgcaactggtgattttggcggagtctggcctggacctaattgcctggaaattgggaacttttccgggcgttttggctgaagtgtggagattac

SEQ ID NO: 104380 - DNA, 984 bp, Homo sapiens
tgggaatggtctatgctcttttcattatgtaaattctaacgtttgttttgttcagtattggtaaaggttttcaaggtgtcatgaaaagatggggatttaaaggccagcctgctacgcatggtcaaacgaaaacccacaggagacctggagctgttgcaactggtgatattggcagagtctggcctggaactaaaatgcctggaaaaatgggaaacatatacaggacagaatatggactgaaagtgtggagaataaacacaaagcacaacataatctatgtaaatggctctgtacctggacataaaaattgcttagtaaaggtcaaagattctaaactgcctgcatataaggatctcggtaaaaatctaccattccctacatattttcctgatggagatgaagaggaactgccagaagatttgtatgatgaaaacgtgtgtcagcccggtgcgccttctattacatttgcctaacatctttggacgtggcagaaccttacatattctgtgagcttcgatgagccagagtgatatcataaccaccagaaatcatactctcctttcttagtcacaacaaaatcacacatgtcatctttgtcaagggcataaatatatcattcatacccccattaaattttgttagaaaaattaccacattaaatatatgagttaagtagattggatttgctgaaattggtgttgggcatattagcaaaatattcttaatttgtggactcgattcttttttactacatatttcccaagttatcttaagatgtctgtaaatttaacttttattaaagttttgtcaatctttgtgaaatagtggttgtggaacagtagaaaaccatatggggactatagtgcaacctatttgggtaaagaaaccatttgctaaaatggagaaagtaaatagatttttatttaaattacagaaacatgttaaaggccggacaaaggaaagacaataaaatcataaattatc

SEQ ID NO: 104381 - DNA, 982 bp, Homo sapiens
ggggagagagtggtgcatgtgtaaacataatcttccacacccacacacaaccttgtggtgacaaggttttcattagtggtggaaacatggggatttaaaggccagcctgctacgcatggtcaaacgaaaacccacaggagacctggagctgttgcaactggtgatattggcagagtctggcctggaactaaaatgcctggaaaaatgggaaacatatacaggacagaatatggactgaaagtgtggagaataaacacaaagcacaacataatctatgtaaatggctctgtacctggacataaaaattgcttagtaaaggtcaaagattctaaactgcctgcatataaggatctcggtaaaaatctaccattccctacatattttcctgatggagatgaagaggaactgccagaagatttgtatgatgaaaacgtgtgtcagcccggtgcgccttctattacatttgcctaacatctttggacgtggcagaaccttacatattctgtgagcttcgatgagccagagtgatatcataaccaccagaaatcatactctcctttcttagtcacaacaaaatcacacatgtcatctttgtcaagggcataaatatatcattcatacccccattaaattttgttagaaaaattaccacattaaatatatgagttaagtagattggatttgctgaaattggtgttgggcatattagcaaaatattcttaatttgtggactcgattcttttttactacatatttcccaagttatcttaagatgtctgtaaatttaacttttattaaagttttgtcaatctttgtgaaatagtggttgtggaacagtagaaaaccatatggggactatagtgcaacctatttgggtaaagaaaccatttgctaaaatggagaaagtaaatagatttttatttaaattacagaaacatgttaaaggccggacaaaggaaagacaataaaatcataaattatc

SEQ ID NO: 104382 - DNA, 912 bp, Homo sapiens
  misc_feature (14)..(14): n is a, c, g, or t
  misc_feature (17)..(17): n is a, c, g, or t
  misc_feature (19)..(19): n is a, c, g, or t
  misc_feature (21)..(21): n is a, c, g, or t
  misc_feature (38)..(38): n is a, c, g, or t
  misc_feature (839)..(839): n is a, c, g, or t
  misc_feature (846)..(846): n is a, c, g, or t
  misc_feature (875)..(875): n is a, c, g, or t
aagtgtcttgagtntancncngccccctcccgggttancgggatgagagcatcggccggcgaccgttccggcggccattgcgaaaacttccccacggctactgcgtccacgtggcggtggcgtggggactccctgaaagcagagcggcagggcgcccggaagtcgtgagtcgagtcttcccgggctaatccatgccgggttggaggctgctgacgcaggtcggcgcccaggtgctgggtcgactcggggacggcctgggtgctgccctgggcccggggaacagaacacacatctggctttttgttagaggtcttcatggaaagagtggtacatggtgggatgagcatctttctgaagaaaatgtcccattcattaagcagttggtctctgatgaagataaagcccaattagcaagtaaactgtgtcctctgaaagatgaaccatggcctatacatccttgggaaccaggttcctttagagttggtcttattgccttgaagctgggcatgatgcctttatggaccaaggatggtcaaaagcatgtggtcacattacttcaggtacaagactgtcatgtcttaaaatatacgtcaaaggaaaactgtaatggaaaaatggcaaccctgtctgtaggaggaaaaactgtatcacgttttcgtaaagctacatccatattggaattttaccgggaacttggattgccgccgaaacagacagttaaaatctttaatataacagataatgctgcaattaaaccagcactccctctttattgctgctcactttccgtccaaggacaattataatgggatgtcacaagcccaaaaacctatttgggnaaaaggnttttcaaaggggggtccattgaaaaaagnattgggggaattttaaaaggggccaaacccttgctta

SEQ ID NO: 104383 - DNA, 776 bp, Homo sapiens
ctcgcttcccctcccacaccaacacaagggcctgtggggacagacataaaccttgcacaacataatctatgtaaatggctctgtacctggacataaaaattgcttagtaaaggtcaaagattctaaactgcctgcatataaggatctcggtaaaaatctaccattccctacatattttcctgatggagatgaagaggaactgccagaagatttgtatgatgaaaacgtgtgtcagcccggtgcgccttctattacatttgcctaacatctttggacgtggcagaaccttacatattctgtgagcttcgatgagccagagtgatatcataaccaccagaaatcatactctcctttcttagtcacaacaaaatcacacatgtcatctttgtcaagggcataaatatatcattcatacccccattaaattttgttagaaaaattaccacattaaatatatgagttaagtagattggatttgctgaaattggtgttgggcatattagcaaaatattcttaatttgtggactcgattcttttttactacatatttcccaagttatcttaagatgtctgtaaatttaacttttattaaagttttgtcaatctttgtgaaatagtggttgtggaacagtagaaaaccatatggggactatagtgcaacctatttgggtaaagaaaccatttgctaaaatggagaaagtaaatagatttttatttaaattacagaaacatgttaaaggccggacaaaggaaagacaataaaatcataaattatc

SEQ ID NO: 104384 - DNA, 723 bp, Homo sapiens
agagagagagagagagagagagagagagagagagtggacataaaaatggcttagtaaaggtcaaagattctaaactgcctgcatataaggatctcggtaaaaatctaccattccctacatattttcctgatggagatgaagaggaactgccagaagatttgtatgatgaaaacgtgtgtcagcccggtgcgccttctattacatttgcctaacatctttggacgtggcagaaccttacatattctgtgagcttcgatgagccagagtgatatcataaccaccagaaatcatactctcctttcttagtcacaacaaaatcacacatgtcatctttgtcaagggcataaatatatcattcatacccccattaaattttgttagaaaaattaccacattaaatatatgagttaagtagattggatttgctgaaattggtgttgggcatattagcaaaatattcttaatttgtggactcgattcttttttactacatatttcccaagttatcttaagatgtctgtaaatttaacttttattaaagttttgtcaatctttgtgaaatagtggttgtggaacagtagaaaaccatatggggactatagtgcaacctatttgggtaaagaaaccatttgctaaaatggagaaagtaaatagatttttatttaaattacagaaacatgttaaaggccggacaaaggaaagacaataaaatcataaattatc

SEQ ID NO: 104385 - DNA, 384 bp, Homo sapiens
  misc_feature (14)..(14): n is a, c, g, or t
  misc_feature (17)..(17): n is a, c, g, or t
  misc_feature (19)..(19): n is a, c, g, or t
  misc_feature (21)..(21): n is a, c, g, or t
  misc_feature (38)..(38): n is a, c, g, or t
aagtgtcttgagtntancncngccccctcccgggttancgggatgagagcatcggccggcgaccgttccggcggccattgcgaaaacttccccacggctactgcgtccacgtggcggtggcgtggggactccctgaaagcagagcggcagggcgcccggaagtcgtgagtcgagtcttcccgggctaatccatgccgggttggaggctgctgacgcaggtcggcgcccaggtgctgggtcgactcggggacggcctgggtgctgccctgggcccggggaacagaacacacatctggctttttgttagaggtcttcatggaaagagtggtacatggtgggatgagcatctttctgaagacctctaaaaaaaaaccggcgcggccg

SEQ ID NO: 104386 - DNA, 745 bp, Homo sapiens
agagagagagagagagagagagagagagagagagtggacataaaaatggcttagtaaaggtcaaagattctaaactgcctgcatataaggatctcggtaaaaatctaccattccctacatattttcctgatggagatgaagaggaactgccagaagatttgtatgatgaaaacgtgtgtcagcccggtgcgccttctattacatttgcctaacatctttggacgtggcagaaccttacatattctgtgagcttcgatgagccagagtgatatcataaccaccagaaatcatactctcctttcttagtcacaacaaaatcacacatgtcatctttgtcaagggcataaatatatcattcatacccccattaaattttgttagaaaaattaccacattaaatatatgagttaagtagattggatttgctgaaattggtgttgggcatattagcaaaatattcttaatttgtggactcgattcttttttactacatatttcccaagttatcttaagatgtctgtaaatttaacttttattaaagttttgtcaatctttgtgaaatagtggttgtggaacagtagaaaaccatatggggactatagtgcaacctatttgggtaaagaaaccatttgctaaaatggagaaagtaaatagatttttatttaaattacagaaacatgttaaaggccggacaaaggaaagacaataaaatcataaattatcaagtgagaaaatgaacacaatg

SEQ ID NO: 104387 - DNA, 1749 bp, Homo sapiens
  misc_feature (14)..(14): n is a, c, g, or t
  misc_feature (17)..(17): n is a, c, g, or t
  misc_feature (19)..(19): n is a, c, g, or t
  misc_feature (21)..(21): n is a, c, g, or t
  misc_feature (38)..(38): n is a, c, g, or t
aagtgtcttgagtntancncngccccctcccgggttancgggatgagagcatcggccggcgaccgttccggcggccattgcgaaaacttccccacggctactgcgtccacgtggcggtggcgtggggactccctgaaagcagagcggcagggcgcccggaagtcgtgagtcgagtcttcccgggctaatccatgccgggttggaggctgctgacgcaggtcggcgcccaggtgctgggtcgactcggggacggcctgggtgctgccctgggcccggggaacagaacacacatctggctttttgttagaggtcttcatggaaagagtggtacatggtgggatgagcatctttctgaagaaaatgtcccattcattaagcagttggtctctgatgaagataaagcccaattagcaagtaaactgtgtcctctgaaagatgaaccatggcctatacatccttgggaaccaggttcctttagagttggtcttattgccttgaagctgggcatgatgcctttatggaccaaggatggtcaaaagcatgtggtcacattacttcaggtacaagactgtcatgtcttaaaatatacgtcaaaggaaaactgtaatggaaaaatggcaaccctgtctgtaggaggaaaaactgtatcacgttttcgtaaagctacatccatattggaattttaccgggaacttggattgccgccgaaacagacagttaaaatctttaatataacagataatgctgcaattaaaccaggcactcctctttatgctgctcactttcgtccaggacagtatgtggatgtcacagccaaaactattggtaaaggttttcaaggtgtcatgaaaagatggggatttaaaggccagcctgctacgcatggtcaaacgaaaacccacaggagacctggagctgttgcaactggtgatattggcagagtctggcctggaactaaaatgcctggaaaaatgggaaacatatacaggacagaatatggactgaaagtgtggagaataaacacaaagcacaacataatctatgtaaatggctctgtacctggacataaaaattgcttagtaaaggtcaaagattctaaactgcctgcatataaggatctcggtaaaaatctaccattccctacatattttcctgatggagatgaagaggaactgccagaagatttgtatgatgaaaacgtgtgtcagcccggtgcgccttctattacatttgcctaacatctttggacgtggcagaaccttacatattctgtgagcttcgatgagccagagtgatatcataaccaccagaaatcatactctcctttcttagtcacaacaaaatcacacatgtcatctttgtcaagggcataaatatatcattcatacccccattaaattttgttagaaaaattaccacattaaatatatgagttaagtagattggatttgctgaaattggtgttgggcatattagcaaaatattcttaatttgtggactcgattcttttttactacatatttcccaagttatcttaagatgtctgtaaatttaacttttattaaagttttgtcaatctttgtgaaatagtggttgtggaacagtagaaaaccatatggggactatagtgcaacctatttgggtaaagaaaccatttgctaaaatggagaaagtaaatagatttttatttaaattacagaaacatgttaaaggccggacaaaggaaagacaataaaatcataaattatc

SEQ ID NO: 104388 - DNA, 2122 bp, Homo sapiens
  misc_feature (14)..(14): n is a, c, g, or t
  misc_feature (17)..(17): n is a, c, g, or t
  misc_feature (19)..(19): n is a, c, g, or t
  misc_feature (21)..(21): n is a, c, g, or t
  misc_feature (38)..(38): n is a, c, g, or t
aagtgtcttgagtntancncngccccctcccgggttancgggatgagagcatcggccggcgaccgttccggcggccattgcgaaaacttccccacggctactgcgtccacgtggcggtggcgtggggactccctgaaagcagagcggcagggcgcccggaagtcgtgagtcgagtcttcccgggctaatccatgccgggttggaggctgctgacgcaggtcggcgcccaggtgctgggtcgactcggggacggcctgggtgctgccctgggcccggggaacagaacacacatctggctttttgttagaggtcttcatggaaagagtggtacatggtgggatgagcatctttctgaagaaaatgtcccattcattaagcagttggtctctgatgaagataaagcccaattagcaagtaaactgtgtcctctgaaagatgaaccatggcctatacatccttgggaaccaggttcctttagagttggtcttattgccttgaagctgggcatgatgcctttatggaccaaggatggtcaaaagcatgtggtcacattacttcaggtacaagactgtcatgtcttaaaatatacgtcaaaggaaaactgtaatggaaaaatggcaaccctgtctgtaggaggaaaaactgtatcacgttttcgtaaagctacatccatattggaattttaccgggaacttggattgccgccgaaacagacagttaaaatctttaatataacagataatgctgcaattaaaccaggcactcctctttatgctgctcactttcgtccaggacagtatgtggatgtcacagccaaaactattggtaaaggttttcaaggtgtcatgaaaagatggggatttaaaggccagcctgctacgcatggtcaaacgaaaacccacaggagacctggagctgttgcaactggtgatattggcagagtctggcctggaactaaaatgcctggaaaaatgggaaacatatacaggacagaatatggactgaaagtgtggagaataaacacaaagcacaacataatctatgtaaatggctctgtacctggacataaaaattgcttagtaaaggtcaaagattctaaactgcctgcatataaggatctcggtaaaaatctaccattccctacatattttcctgatggagatgaagaggaactgccagaagatttgtatgatgaaaacgtgtgtcagcccggtgcgccttctattacatttgcctaacatctttggacgtggcagaaccttacatattctgtgagcttcgatgagccagagtgatatcataaccaccagaaatcatactctcctttcttagtcacaacaaaatcacacatgtcatctttgtcaagggcataaatatatcattcatacccccattaaattttgttagaaaaattaccacattaaatatatgagttaagtagattggatttgctgaaattggtgttgggcatattagcaaaatattcttaatttgtggactcgattcttttttactacatatttcccaagttatcttaagatgtctgtaaatttaacttttattaaagttttgtcaatctttgtgaaatagtggttgtggaacagtagaaaaccatatggggactatagtgcaacctatttgggtaaagaaaccatttgctaaaatggagaaagtaaatagatttttatttaaattacagaaacatgttaaaggccggacaaaggaaagacaataaaatcataaattatcggtcctgtttacatttttgttgggagaggtgattactttttagttttatcactcaattataagatcagtgtgttttggttttgttttgttttgttctgtttaggcagggttttgctgtgttgcccaggctggagtgcagtgcagtggtgcgatcttggctcactgcagccacgaccttctgagctcaagtgatccttccacctcagcctcccatgtatctgggactataggtgcccaccaccatgcctggctaatatttgtatttttttgtaaaaatagaatcccactatgttgcccagggtggtcttgaacttctgagttcaagctttttaccttccatggcctcccaaagtgtcaggattacaggcgtgag

SEQ ID NO: 104389 - DNA, 1440 bp, Homo sapiens
  misc_feature (14)..(14): n is a, c, g, or t
  misc_feature (17)..(17): n is a, c, g, or t
  misc_feature (19)..(19): n is a, c, g, or t
  misc_feature (21)..(21): n is a, c, g, or t
  misc_feature (38)..(38): n is a, c, g, or t
aagtgtcttgagtntancncngccccctcccgggttancgggatgagagcatcggccggcgaccgttccggcggccattgcgaaaacttccccacggctactgcgtccacgtggcggtggcgtggggactccctgaaagcagagcggcagggcgcccggaagtcgtgagtcgagtcttcccgggctaatccatgccgggttggaggctgctgacgcaggtcggcgcccaggtgctgggtcgactcggggacggcctgggtgctgccctgggcccggggaacagaacacacatctggctttttgttagaggtcttcatggaaagagtggtacatggtgggatgagcatctttctgaagaaaatgtcccattcattaagcagttggtctctgatgaagataaagcccaattagcaagtaaactgtgtcctctgaaagatgaaccatggcctatacatccttgggaaccaggttcctttagagttggtcttattgccttgaagctgggcatgatgcctttatggaccaaggatggtcaaaagcatgtggtcacattacttcaggtacaagactgtcatgtcttaaaatatacgtcaaaggaaaactgtaatggaaaaatggcaaccctgtctgtaggaggaaaaactgtatcacgttttcgtaaagctacatccatattggaattttaccgggaacttggattgccgccgaaacagacagttaaaatctttaatataacagataatgctgcaattaaaccaggcactcctctttatgctgctcactttcgtccaggacagtatgtggatgtcacagccaaaactattggtaaaggttttcaaggtgtcatgaaaagatggggatttaaaggccagcctgctacgcatggtcaaacgaaaacccacaggagacctggagctgttgcaactggtgatattggcagagtctggcctggaactaaaatgcctggaaaaatgggaaacatatacaggacagaatatggactgaaagtgtggagaataaacacaaagcacaacataatctatgtaaatggctctgtacctggacataaaaattgcttagtaaaggtcaaagattctaaactgcctgcatataaggatctcggtaaaaatctaccattccctacatattttcctgatggagatgaagaggaactgccagaagatttgtatgatgaaaacgtgtgtcagcccggtgcgccttctattacatttgcctaacatctttggacgtggcagaaccttacatattctgtgagcttcgatgagccagagtgatatcataaccaccagaaatcatactctcctttcttagtcacaacaaaatcacacatgtcatctttgtcaagggcataaatatatcattcatacccccattaaattttgttagaaaaattaccacattaaatatatgagttaagta

SEQ ID NO: 104390 - DNA, 1696 bp, Homo sapiens
  misc_feature (14)..(14): n is a, c, g, or t
  misc_feature (17)..(17): n is a, c, g, or t
  misc_feature (19)..(19): n is a, c, g, or t
  misc_feature (21)..(21): n is a, c, g, or t
  misc_feature (38)..(38): n is a, c, g, or t
aagtgtcttgagtntancncngccccctcccgggttancgggatgagagcatcggccggcgaccgttccggcggccattgcgaaaacttccccacggctactgcgtccacgtggcggtggcgtggggactccctgaaagcagagcggcagggcgcccggaagtcgtgagtcgagtcttcccgggctaatccatgccgggttggaggctgctgacgcaggtcggcgcccagaacacacatctggctttttgttagaggtcttcatggaaagagtggtacatggtgggatgagcatctttctgaagaaaatgtcccattcattaagcagttggtctctgatgaagataaagcccaattagcaagtaaactgtgtcctctgaaagatgaaccatggcctatacatccttgggaaccaggttcctttagagttggtcttattgccttgaagctgggcatgatgcctttatggaccaaggatggtcaaaagcatgtggtcacattacttcaggtacaagactgtcatgtcttaaaatatacgtcaaaggaaaactgtaatggaaaaatggcaaccctgtctgtaggaggaaaaactgtatcacgttttcgtaaagctacatccatattggaattttaccgggaacttggattgccgccgaaacagacagttaaaatctttaatataacagataatgctgcaattaaaccaggcactcctctttatgctgctcactttcgtccaggacagtatgtggatgtcacagccaaaactattggtaaaggttttcaaggtgtcatgaaaagatggggatttaaaggccagcctgctacgcatggtcaaacgaaaacccacaggagacctggagctgttgcaactggtgatattggcagagtctggcctggaactaaaatgcctggaaaaatgggaaacatatacaggacagaatatggactgaaagtgtggagaataaacacaaagcacaacataatctatgtaaatggctctgtacctggacataaaaattgcttagtaaaggtcaaagattctaaactgcctgcatataaggatctcggtaaaaatctaccattccctacatattttcctgatggagatgaagaggaactgccagaagatttgtatgatgaaaacgtgtgtcagcccggtgcgccttctattacatttgcctaacatctttggacgtggcagaaccttacatattctgtgagcttcgatgagccagagtgatatcataaccaccagaaatcatactctcctttcttagtcacaacaaaatcacacatgtcatctttgtcaagggcataaatatatcattcatacccccattaaattttgttagaaaaattaccacattaaatatatgagttaagtagattggatttgctgaaattggtgttgggcatattagcaaaatattcttaatttgtggactcgattcttttttactacatatttcccaagttatcttaagatgtctgtaaatttaacttttattaaagttttgtcaatctttgtgaaatagtggttgtggaacagtagaaaaccatatggggactatagtgcaacctatttgggtaaagaaaccatttgctaaaatggagaaagtaaatagatttttatttaaattacagaaacatgttaaaggccggacaaaggaaagacaataaaatcataaattatc

SEQ ID NO: 104391 - DNA, 1695 bp, Homo sapiens
  misc_feature (14)..(14): n is a, c, g, or t
  misc_feature (17)..(17): n is a, c, g, or t
  misc_feature (19)..(19): n is a, c, g, or t
  misc_feature (21)..(21): n is a, c, g, or t
  misc_feature (38)..(38): n is a, c, g, or t
aagtgtcttgagtntancncngccccctcccgggttancgggatgagagcatcggccggcgaccgttccggcggccattgcgaaaacttccccacggctactgcgtccacgtggcggtggcgtggggactccctgaaagcagagcggcagggcgcccggaagtcgtgagtcgagtcttcccgggctaatccatgccgggttggaggctgctgacgcaggtcggcgcccaggtgctgggtcgactcggggacggcctgggtgctgccctgggcccggggaacagaacacacatctggctttttgttagaggtcttcatggaaagagtggtacatggtgggatgagcatctttctgaagcaagtaaactgtgtcctctgaaagatgaaccatggcctatacatccttgggaaccaggttcctttagagttggtcttattgccttgaagctgggcatgatgcctttatggaccaaggatggtcaaaagcatgtggtcacattacttcaggtacaagactgtcatgtcttaaaatatacgtcaaaggaaaactgtaatggaaaaatggcaaccctgtctgtaggaggaaaaactgtatcacgttttcgtaaagctacatccatattggaattttaccgggaacttggattgccgccgaaacagacagttaaaatctttaatataacagataatgctgcaattaaaccaggcactcctctttatgctgctcactttcgtccaggacagtatgtggatgtcacagccaaaactattggtaaaggttttcaaggtgtcatgaaaagatggggatttaaaggccagcctgctacgcatggtcaaacgaaaacccacaggagacctggagctgttgcaactggtgatattggcagagtctggcctggaactaaaatgcctggaaaaatgggaaacatatacaggacagaatatggactgaaagtgtggagaataaacacaaagcacaacataatctatgtaaatggctctgtacctggacataaaaattgcttagtaaaggtcaaagattctaaactgcctgcatataaggatctcggtaaaaatctaccattccctacatattttcctgatggagatgaagaggaactgccagaagatttgtatgatgaaaacgtgtgtcagcccggtgcgccttctattacatttgcctaacatctttggacgtggcagaaccttacatattctgtgagcttcgatgagccagagtgatatcataaccaccagaaatcatactctcctttcttagtcacaacaaaatcacacatgtcatctttgtcaagggcataaatatatcattcatacccccattaaattttgttagaaaaattaccacattaaatatatgagttaagtagattggatttgctgaaattggtgttgggcatattagcaaaatattcttaatttgtggactcgattcttttttactacatatttcccaagttatcttaagatgtctgtaaatttaacttttattaaagttttgtcaatctttgtgaaatagtggttgtggaacagtagaaaaccatatggggactatagtgcaacctatttgggtaaagaaaccatttgctaaaatggagaaagtaaatagatttttatttaaattacagaaacatgttaaaggccggacaaaggaaagacaataaaatcataaattatc

SEQ ID NO: 104392 - DNA, 1650 bp, Homo sapiens
  misc_feature (14)..(14): n is a, c, g, or t
  misc_feature (17)..(17): n is a, c, g, or t
  misc_feature (19)..(19): n is a, c, g, or t
  misc_feature (21)..(21): n is a, c, g, or t
  misc_feature (38)..(38): n is a, c, g, or t
aagtgtcttgagtntancncngccccctcccgggttancgggatgagagcatcggccggcgaccgttccggcggccattgcgaaaacttccccacggctactgcgtccacgtggcggtggcgtggggactccctgaaagcagagcggcagggcgcccggaagtcgtgagtcgagtcttcccgggctaatccatgccgggttggaggctgctgacgcaggtcggcgcccaggtgctgggtcgactcggggacggcctgggtgctgccctgggcccggggaacagaacacacatctggctttttgttagaggtcttcatggaaagagtggtacatggtgggatgagcatctttctgaagaaaatgtcccattcattaagcagttggtctctgatgaagataaagcccaattagcaagtaaactgtgtcctctgaaagatgaaccatggcctatacatccttgggaaccaggttcctttagagttggtcttattgccttgaagctgggcatgatgcctttatggaccaaggatggtcaaaagcatgtggtcacattacttcagaaagctacatccatattggaattttaccgggaacttggattgccgccgaaacagacagttaaaatctttaatataacagataatgctgcaattaaaccaggcactcctctttatgctgctcactttcgtccaggacagtatgtggatgtcacagccaaaactattggtaaaggttttcaaggtgtcatgaaaagatggggatttaaaggccagcctgctacgcatggtcaaacgaaaacccacaggagacctggagctgttgcaactggtgatattggcagagtctggcctggaactaaaatgcctggaaaaatgggaaacatatacaggacagaatatggactgaaagtgtggagaataaacacaaagcacaacataatctatgtaaatggctctgtacctggacataaaaattgcttagtaaaggtcaaagattctaaactgcctgcatataaggatctcggtaaaaatctaccattccctacatattttcctgatggagatgaagaggaactgccagaagatttgtatgatgaaaacgtgtgtcagcccggtgcgccttctattacatttgcctaacatctttggacgtggcagaaccttacatattctgtgagcttcgatgagccagagtgatatcataaccaccagaaatcatactctcctttcttagtcacaacaaaatcacacatgtcatctttgtcaagggcataaatatatcattcatacccccattaaattttgttagaaaaattaccacattaaatatatgagttaagtagattggatttgctgaaattggtgttgggcatattagcaaaatattcttaatttgtggactcgattcttttttactacatatttcccaagttatcttaagatgtctgtaaatttaacttttattaaagttttgtcaatctttgtgaaatagtggttgtggaacagtagaaaaccatatggggactatagtgcaacctatttgggtaaagaaaccatttgctaaaatggagaaagtaaatagatttttatttaaattacagaaacatgttaaaggccggacaaaggaaagacaataaaatcataaattatc

SEQ ID NO: 104393 - DNA, 889 bp, Homo sapiens
  misc_feature (14)..(14): n is a, c, g, or t
  misc_feature (17)..(17): n is a, c, g, or t
  misc_feature (19)..(19): n is a, c, g, or t
  misc_feature (21)..(21): n is a, c, g, or t
  misc_feature (38)..(38): n is a, c, g, or t
aagtgtcttgagtntancncngccccctcccgggttancgggatgagagcatcggccggcgaccgttccggcggccattgcgaaaacttccccacggctactgcgtccacgtggcggtggcgtggggactccctgaaagcagagcggcagggcgcccggaagtcgtgagtcgagtcttcccgggctaatccatgccgggttggaggctgctgacgcaggtcggcgcccaggtgctgggtcgactcggggacggcctgggtgctgccctgggcccggggaacagaacacacatctggctttttgttagaggtcttcatggaaagagtggtacatggtgggatgagcatctttctgaagaaaatgtcccattcattaagcagttggtctctgatgaagataaagcccaattagcaagtaaactgtgtcctctgaaagatgaaccatggcctatacatccttgggaaccaggttcctttagagttggtcttattgccttgaagctgggcatgatgcctttatggaccaaggatggtcaaaagcatgtggtcacattacttcaggtacaagactgtcatgtcttaaaatatacgtcaaaggaaaactgtaatggaaaaatggcaaccctgtctgtaggaggaaaaactgtatcacgttttcgtaaagctacatccatattggaattttaccgggaacttggattgccgccgaaacagacagttaaaatctttaatataacagataatgctgcaattaaaccaggtttttctctgcctatataaatccaggttgggttataacttaaaggaagttccccccctgcaatcttacagcactttgctgcttgtattaaataaactataactataaataaactttcagttacattctc

SEQ ID NO: 104394 - DNA, 1199 bp, Homo sapiens
  misc_feature (14)..(14): n is a, c, g, or t
  misc_feature (17)..(17): n is a, c, g, or t
  misc_feature (19)..(19): n is a, c, g, or t
  misc_feature (21)..(21): n is a, c, g, or t
  misc_feature (38)..(38): n is a, c, g, or t
aagtgtcttgagtntancncngccccctcccgggttancgggatgagagcatcggccggcgaccgttccggcggccattgcgaaaacttccccacggctactgcgtccacgtggcggtggcgtggggactccctgaaagcagagcggcagggcgcccggaagtcgtgagtcgagtcttcccgggctaatccatgccgggttggaggctgctgacgcaggtcggcgcccaggtgctgggtcgactcggggacggcctgggtgctgccctgggcccggggaacagaacacacatctggctttttgttagaggtcttcatggaaagagtggtacatggtgggatgagcatctttctgaagaaaatgtcccattcattaagcagttggtctctgatgaagataaagcccaattagcaagtaaactgtgtcctctgaaagatgaaccatggcctatacatccttgggaaccaggttcctttagagttggtcttattgccttgaagctgggcatgatgcctttatggaccaaggatggtcaaaagcatgtggtcacattacttcaggtacaagactgtcatgtcttaaaatatacgtcaaaggaaaactgtaatggaaaaatggcaaccctgtctgtaggaggaaaaactgtatcacgttttcgtgtaaggatgtattttcatagctagaatactgcatttttcatcagtttcaaatctggatgagtttatgttttgagattgttccacagccacaaacttgcatttgtttgtgaggtaaattgtgtatttgggggaggcagtctggcacagccattttgcccaggagtcttggagactcttgagtttgttctaatacctctccctgtatctggaacaagtaattttacctctctaagctgtagtgcttgtatatctgtacaatgggaacaaaaatactacatacctaatagatttatcacaaggattaaattaggtttttcagatgtgcttggaatataacagacactcagtagatttggttattttgttattgttttatgtttcatttcactttcttcctatggaaaattgtcttaactcttgacaccaagagcatgtggaaattaattttgtgtattctggaaggagctttcagtgtttgggagaaagctgtataagaatccaaatcagattttttttaataaagcatttttttttaagtag

SEQ ID NO: 104395 - DNA, 2807 bp, Homo sapiens
cccacgcgtgagaactggaaagccgagggtagccgagcggggcgggcgctctggagcggcgggtgctcgggctgccgtccgctccgccagaagcaccgagcagccgagccggggcccgccgccctcctcctccatgaggcccgagtgaggcgcggcggctatagccgacccgcggcgccttccccccgcgtcctatcgcgagcgcagcggcagcggcccctggaggaggaggcggaggaggaggagcatgtcggacggtttcgatcgggccccaggtgctggtcggggccggagccggggcctgggccgcggagggggcgggcctgagggcggcggtttcccgaacggagcggggcctgctgagcgggcgcggcaccagccgccgcaacccaaagccccgggcttcctgcagccaccgccgctgcgccagcccaggacgaccccgccgccaggggcccagtgcgaggtccccgccagcccccagcggccttcccggcccggggcgctcccagagcaaacgaggcccctgagagctccacctagttcacaggataaaatcccacagcagaactcggagtcagcaatggctaagccccaggtggttgtagctcctgtattaatgtctaagctgtctgtgaatgcccctgaattttacccttcaggttattcttccagttacacagaatcctatgaggatggttgtgaggattatcctactctatcagaatatgttcaggattttttgaatcatcttacagagcagcctggcagttttgaaactgaaattgaacagtttgcagagaccctgaatggttgtgttacaacagatgatgctttgcaagaacttgtggaactcatctatcaacaggccacatctatcccaaatttctcttatatgggagctcgcctgtgtaattacctgtcccatcatctgacaattagcccacagagtggcaacttccgccaattgctacttcaaagatgtcggactgaatatgaagttaaagatcaagctgcaaaaggggatgaagttactcgaaaacgatttcatgcatttgtactctttctgggagaactttatcttaacctggagatcaagggaacaaatggacaggttacaagagcagatattcttcaggttggtcttcgagaattgctgaatgccctgttttctaatcctatggatgacaatttaatttgtgcagtaaaattgttaaagttgacaggatcagttttggaagatgcttggaaggaaaaaggaaagatggatatggaagaaattattcagagaattgaaaacgttgtcctagatgcaaactgcagtagagatgtaaaacagatgctcttgaagcttgtagaactccggtcaagtaactggggcagagtccatgcaacttcaacatatagagaagcaacaccagaaaatgatcctaactactttatgaatgaaccaacattttatacatctgatggtgttcctttcactgcagctgatccagattaccaagagaaataccaagaattacttgaaagagaggacttttttccagattatgaagaaaatggaacagatttatccggggctggtgatccatacttggatgatattgatgatgagatggacccagagatagaagaagcttatgaaaagttttgtttggaatcagagcgtaagcgaaaacagtaaagttaaatttcagcatatcagttttataaagcagtttaggtatggtgatttagcagaacacaagagagcaagaaaatgtgtcacatctataccaaattaaggatgttgagttatgttactaatgtatgcaactttaattttgtttaacactatctgccaaaataaactttattccctataacttaaaatgtgtatatatatataatagtttattatgtacagttaattctactgttttggctgcaataaaatcgattttgaaataaatgaaatgttgaaaattttgctagttggttagatgcttatcctttaaattctacttttcttgaggggaaaaagtcttcgtctggaaatacatattactgcaaaaatgtagcatccttttttaggtaggagtattatagctttcattttagtttgacatttagtgtcccaatgaattgaatttcaaatatgaatcataatcttgaaaatctttagcactaaagtcttggaatatatcaacaactgatttacatatgcagatgctatttgataccaagggctttttaaatgtcatgggggggaaaaacccaacttggtgaactcccagctaaacaaccaagacttcactgaagatttattccaattctagaattgttcttttttatttttattttttcaactgactaacttcattaccttaaagcctagaacattattctgctttatttatatggctttctcacttttattttgtagcatgggttgcatcgacttttttactagagaattttactagatatttgtcattcaagttttcatctgctttataattgatacaccttgagggtcacttttctaatacttttactataatgtggtaccacctcagccctaataaataatatttttacctaatgtcaaatctttttccagctaactaaaaactgtgtacaaaaggattgcttgtaaatatgcatgtaaatagttctgttaataacccactgttttacatttggtacatctgtgtctgctaatacagttagctttctcacttttctgcttgtttgttcagtctgaattaaaattagactttgaaaataaagcttaaatagttgtttcctctaaaaaaaatatt

SEQ ID NO: 104396 - DNA, 1714 bp, Homo sapiens
cccacgcgtgagaactggaaagccgagggtagccgagcggggcgggcgctctggagcggcgggtgctcgggctgccgtccgctccgccagaagcaccgagcagccgagccggggcccgccgccctcctcctccatgaggcccgagtgaggcgcggcggctatagccgacccgcggcgccttccccccgcgtcctatcgcgagcgcagcggcagcggcccctggaggaggaggcggaggaggaggagcatgtcggacggtttcgatcggccagagcaaacgaggcccctgagagctccacctagttcacaggataaaatcccacagcagaactcggagtcagcaatggctaagccccaggtggttgtagctcctgtattaatgtctaagctgtctgtgaatgcccctgaattttacccttcaggttattcttccagttacacagaatcctatgaggatggttgtgaggattatcctactctatcagaatatgttcaggattttttgaatcatcttacagagcagcctggcagttttgaaactgaaattgaacagtttgcagagaccctgaatggttgtgttacaacagatgatgctttgcaagaacttgtggaactcatctatcaacaggccacatctatcccaaatttctcttatatgggagctcgcctgtgtaattacctgtcccatcatctgacaattagcccacagagtggcaacttccgccaattgctacttcaaagatgtcggactgaatatgaagttaaagatcaagctgcaaaaggggatgaagttactcgaaaacgatttcatgcatttgtactctttctgggagaactttatcttaacctggagatcaagggaacaaatggacaggttacaagagcagatattcttcaggttggtcttcgagaattgctgaatgccctgttttctaatcctatggatgacaatttaatttgtgcagtaaaattgttaaagttgacaggatcagttttggaagatgcttggaaggaaaaaggaaagatggatatggaagaaattattcagagaattgaaaacgttgtcctagatgcaaactgcagtagagatgtaaaacagatgctcttgaagcttgtagaactccggtcaagtaactggggcagagtccatgcaacttcaacatatagagaagcaacaccagaaaatgatcctaactactttatgaatgaaccaacattttatacatctgatggtgttcctttcactgcagctgatccagattaccaagagaaataccaagaattacttgaaagagaggacttttttccagattatgaagaaaatggaacagatttatccggggctggtgatccatacttggatgatattgatgatgagatggacccagagatagaagaagcttatgaaaagttttgtttggaatcagagcgtaagcgaaaacagtaaagttaaatttcagcatatcagttttataaagcagtttaggtatggtgatttagcagaacacaagagagcaagaaaatgtgtcacatctataccaaattaaggatgttgagttatgttactaatgtatgcaactttaattttgtttaacactatctgccaaaataaactttattccctataacttaaaatgtgtatatatatataatagtttattatgtacagttaattctactgttttggctgcaataaaatcgattttgaaataaa

SEQ ID NO: 104397 - DNA, 2521 bp, Homo sapiens
ccaggctgttacggtccgagttctttgctcgtccgctccgccagaagcaccgagcagccgagccggggcccgccgccctcctcctccatgaggcccgagtgaggcgcggcggctatagccgacccgcggcgccttccccccgcgtcctatcgcgagcgcagcggcagcggcccctggaggaggaggcggaggaggaggagcatgtcggacggtttcgatcggccagagcaaacgaggcccctgagagctccacctagttcacaggataaaatcccacagcagaactcggagtcagcaatggctaagccccaggtggttgtagctcctgtattaatgtctaagctgtctgtgaatgcccctgaattttacccttcaggttattcttccagttacacagaatcctatgaggatggttgtgaggattatcctactctatcagaatatgttcaggattttttgaatcatcttacagagcagcctggcagttttgaaactgaaattgaacagtttgcagagaccctgaatggttgtgttacaacagatgatgctttgcaagaacttgtggaactcatctatcaacaggccacatctatcccaaatttctcttatatgggagctcgcctgtgtaattacctgtcccatcatctgacaattagcccacagagtggcaacttccgccaattgctacttcaaagatgtcggactgaatatgaagttaaagatcaagctgcaaaaggggatgaagttactcgaaaacgatttcatgcatttgtactctttctgggagaactttatcttaacctggagatcaagggaacaaatggacaggttacaagagcagatattcttcaggttggtcttcgagaattgctgaatgccctgttttctaatcctatggatgacaatttaatttgtgcagtaaaattgttaaagttgacaggatcagttttggaagatgcttggaaggaaaaaggaaagatggatatggaagaaattattcagagaattgaaaacgttgtcctagatgcaaactgcagtagagatgtaaaacagatgctcttgaagcttgtagaactccggtcaagtaactggggcagagtccatgcaacttcaacatatagagaagcaacaccagaaaatgatcctaactactttatgaatgaaccaacattttatacatctgatggtgttcctttcactgcagctgatccagattaccaagagaaataccaagaattacttgaaagagaggacttttttccagattatgaagaaaatggaacagatttatccggggctggtgatccatacttggatgatattgatgatgagatggacccagagatagaagaagcttatgaaaagttttgtttggaatcagagcgtaagcgaaaacagtaaagttaaatttcagcatatcagttttataaagcagtttaggtatggtgatttagcagaacacaagagagcaagaaaatgtgtcacatctataccaaattaaggatgttgagttatgttactaatgtatgcaactttaattttgtttaacactatctgccaaaataaactttattccctataacttaaaatgtgtatatatatataatagtttattatgtacagttaattctactgttttggctgcaataaaatcgattttgaaataaatgaaatgttgaaaattttgctagttggttagatgcttatcctttaaattctacttttcttgaggggaaaaagtcttcgtctggaaatacatattactgcaaaaatgtagcatccttttttaggtaggagtattatagctttcattttagtttgacatttagtgtcccaatgaattgaatttcaaatatgaatcataatcttgaaaatctttagcactaaagtcttggaatatatcaacaactgatttacatatgcagatgctatttgataccaagggctttttaaatgtcatgggggggaaaaacccaacttggtgaactcccagctaaacaaccaagacttcactgaagatttattccaattctagaattgttcttttttatttttattttttcaactgactaacttcattaccttaaagcctagaacattattctgctttatttatatggctttctcacttttattttgtagcatgggttgcatcgacttttttactagagaattttactagatatttgtcattcaagttttcatctgctttataattgatacaccttgagggtcacttttctaatacttttactataatgtggtaccacctcagccctaataaataatatttttacctaatgtcaaatctttttccagctaactaaaaactgtgtacaaaaggattgcttgtaaatatgcatgtaaatagttctgttaataacccactgttttacatttggtacatctgtgtctgctaatacagttagctttctcacttttctgcttgtttgttcagtctgaattaaaattagactttgaaaataaagcttaaatagttgtttcctctaaaaaaaatatt

SEQ ID NO: 104398 - DNA, 2351 bp, Homo sapiens
  misc_feature (26)..(26): n is a, c, g, or t
agcggacgcacgtctctcctgagaantaccgagtaggtcgggcctgcctgtgccagagcaaacgaggcccctgagagctccacctagttcacaggataaaatcccacagcagaactcggagtcagcaatggctaagccccaggtggttgtagctcctgtattaatgtctaagctgtctgtgaatgcccctgaattttacccttcaggttattcttccagttacacagaatcctatgaggatggttgtgaggattatcctactctatcagaatatgttcaggattttttgaatcatcttacagagcagcctggcagttttgaaactgaaattgaacagtttgcagagaccctgaatggttgtgttacaacagatgatgctttgcaagaacttgtggaactcatctatcaacaggccacatctatcccaaatttctcttatatgggagctcgcctgtgtaattacctgtcccatcatctgacaattagcccacagagtggcaacttccgccaattgctacttcaaagatgtcggactgaatatgaagttaaagatcaagctgcaaaaggggatgaagttactcgaaaacgatttcatgcatttgtactctttctgggagaactttatcttaacctggagatcaagggaacaaatggacaggttacaagagcagatattcttcaggttggtcttcgagaattgctgaatgccctgttttctaatcctatggatgacaatttaatttgtgcagtaaaattgttaaagttgacaggatcagttttggaagatgcttggaaggaaaaaggaaagatggatatggaagaaattattcagagaattgaaaacgttgtcctagatgcaaactgcagtagagatgtaaaacagatgctcttgaagcttgtagaactccggtcaagtaactggggcagagtccatgcaacttcaacatatagagaagcaacaccagaaaatgatcctaactactttatgaatgaaccaacattttatacatctgatggtgttcctttcactgcagctgatccagattaccaagagaaataccaagaattacttgaaagagaggacttttttccagattatgaagaaaatggaacagatttatccggggctggtgatccatacttggatgatattgatgatgagatggacccagagatagaagaagcttatgaaaagttttgtttggaatcagagcgtaagcgaaaacagtaaagttaaatttcagcatatcagttttataaagcagtttaggtatggtgatttagcagaacacaagagagcaagaaaatgtgtcacatctataccaaattaaggatgttgagttatgttactaatgtatgcaactttaattttgtttaacactatctgccaaaataaactttattccctataacttaaaatgtgtatatatatataatagtttattatgtacagttaattctactgttttggctgcaataaaatcgattttgaaataaatgaaatgttgaaaattttgctagttggttagatgcttatcctttaaattctacttttcttgaggggaaaaagtcttcgtctggaaatacatattactgcaaaaatgtagcatccttttttaggtaggagtattatagctttcattttagtttgacatttagtgtcccaatgaattgaatttcaaatatgaatcataatcttgaaaatctttagcactaaagtcttggaatatatcaacaactgatttacatatgcagatgctatttgataccaagggctttttaaatgtcatgggggggaaaaacccaacttggtgaactcccagctaaacaaccaagacttcactgaagatttattccaattctagaattgttcttttttatttttattttttcaactgactaacttcattaccttaaagcctagaacattattctgctttatttatatggctttctcacttttattttgtagcatgggttgcatcgacttttttactagagaattttactagatatttgtcattcaagttttcatctgctttataattgatacaccttgagggtcacttttctaatacttttactataatgtggtaccacctcagccctaataaataatatttttacctaatgtcaaatctttttccagctaactaaaaactgtgtacaaaaggattgcttgtaaatatgcatgtaaatagttctgttaataacccactgttttacatttggtacatctgtgtctgctaatacagttagctttctcacttttctgcttgtttgttcagtctgaattaaaattagactttgaaaataaagcttaaatagttgtttcctctaaaaaaaatatt

SEQ ID NO: 104399 - DNA, 2762 bp, Homo sapiens
cccacgcgtgagaactggaaagccgagggtagccgagcggggcgggcgctctggagcggcgggtgctcgggctgccgtccgctccgccagaagcaccgagcagccgagccggggcccgccgccctcctcctccatgaggcccgagtgaggcgcggcggctatagccgacccgcggcgccttccccccgcgtcctatcgcgagcgcagcggcagcggcccctggaggaggaggcggaggaggaggagcatgtcggacggtttcgatcgggccccaggtgctggtcggggccggagccggggcctgggccgcggagggggcgggcctgagggcggcggtttcccgaacggagcggggcctgctgagcgggcgcggcaccagccgccgcaacccaaagccccgggcttcctgcagccaccgccgctgcgccagcccaggacgaccccgccgccaggggcccagtgcgaggtccccgccagcccccagcggccttcccggcccggggcgctcccagagcaaacgaggcccctgagagctccacctagttcacaggatatggttgtagctcctgtattaatgtctaagctgtctgtgaatgcccctgaattttacccttcaggttattcttccagttacacagaatcctatgaggatggttgtgaggattatcctactctatcagaatatgttcaggattttttgaatcatcttacagagcagcctggcagttttgaaactgaaattgaacagtttgcagagaccctgaatggttgtgttacaacagatgatgctttgcaagaacttgtggaactcatctatcaacaggccacatctatcccaaatttctcttatatgggagctcgcctgtgtaattacctgtcccatcatctgacaattagcccacagagtggcaacttccgccaattgctacttcaaagatgtcggactgaatatgaagttaaagatcaagctgcaaaaggggatgaagttactcgaaaacgatttcatgcatttgtactctttctgggagaactttatcttaacctggagatcaagggaacaaatggacaggttacaagagcagatattcttcaggttggtcttcgagaattgctgaatgccctgttttctaatcctatggatgacaatttaatttgtgcagtaaaattgttaaagttgacaggatcagttttggaagatgcttggaaggaaaaaggaaagatggatatggaagaaattattcagagaattgaaaacgttgtcctagatgcaaactgcagtagagatgtaaaacagatgctcttgaagcttgtagaactccggtcaagtaactggggcagagtccatgcaacttcaacatatagagaagcaacaccagaaaatgatcctaactactttatgaatgaaccaacattttatacatctgatggtgttcctttcactgcagctgatccagattaccaagagaaataccaagaattacttgaaagagaggacttttttccagattatgaagaaaatggaacagatttatccggggctggtgatccatacttggatgatattgatgatgagatggacccagagatagaagaagcttatgaaaagttttgtttggaatcagagcgtaagcgaaaacagtaaagttaaatttcagcatatcagttttataaagcagtttaggtatggtgatttagcagaacacaagagagcaagaaaatgtgtcacatctataccaaattaaggatgttgagttatgttactaatgtatgcaactttaattttgtttaacactatctgccaaaataaactttattccctataacttaaaatgtgtatatatatataatagtttattatgtacagttaattctactgttttggctgcaataaaatcgattttgaaataaatgaaatgttgaaaattttgctagttggttagatgcttatcctttaaattctacttttcttgaggggaaaaagtcttcgtctggaaatacatattactgcaaaaatgtagcatccttttttaggtaggagtattatagctttcattttagtttgacatttagtgtcccaatgaattgaatttcaaatatgaatcataatcttgaaaatctttagcactaaagtcttggaatatatcaacaactgatttacatatgcagatgctatttgataccaagggctttttaaatgtcatgggggggaaaaacccaacttggtgaactcccagctaaacaaccaagacttcactgaagatttattccaattctagaattgttcttttttatttttattttttcaactgactaacttcattaccttaaagcctagaacattattctgctttatttatatggctttctcacttttattttgtagcatgggttgcatcgacttttttactagagaattttactagatatttgtcattcaagttttcatctgctttataattgatacaccttgagggtcacttttctaatacttttactataatgtggtaccacctcagccctaataaataatatttttacctaatgtcaaatctttttccagctaactaaaaactgtgtacaaaaggattgcttgtaaatatgcatgtaaatagttctgttaataacccactgttttacatttggtacatctgtgtctgctaatacagttagctttctcacttttctgcttgtttgttcagtctgaattaaaattagactttgaaaataaagcttaaatagttgtttcctctaaaaaaaatatt

SEQ ID NO: 104400 - DNA, 2478 bp, Homo sapiens
cccacgcgtgagaactggaaagccgagggtagccgagcggggcgggcgctctggagcggcgggtgctcgggctgccgtccgctccgccagaagcaccgagcagccgagccggggcccgccgccctcctcctccatgaggcccgagtgaggcgcggcggctatagccgacccgcggcgccttccccccgcgtcctatcgcgagcgcagcggcagcggcccctggaggaggaggcggaggaggaggagcatgtcggacggtttcgatcggccagagcaaacgaggcccctgagagctccacctagttcacaggataaaatcccacagcagaactcggagtcagcaatggctaagccccaggtggttgtagctcctgtattaatgtctaagctgtctgtgaatgcccctgaattttacccttcaggttattcttccagttacacagaatcctatgaggatggttgtgaggattatcctactctatcagaatatgttcaggattttttgaatcatcttacagagcagcctggcagttttgaaactgaaattgaacagtttgcagagaccctgaatggttgtgttacaacagatgatgctttgcaagaacttgtggaactcatctatcaacaggccacatctatcccaaatttctcttatatgggagctcgcctgtgtaattacctgtcccatcatctgacaattagcccacagagtggcaacttccgccaattgctacttcaaagatgtcggactgaatatgaagttaaagatcaagctgcaaaaggggatgaagttactcgaaaacgatttcatgcatttgtactctttctgggagaactttatcttaacctggagatcaagggaacaaatggacaggttacaagagcagatattcttcaggttggtcttcgagaattgctgaatgccctgttttctaatcctatggatgacaatttaatttgtgcagtaaaattgttaaagttgacaggatcagttttggaagatgcttggaaggaaaaaggaaagatggatatggaagaaattattcagagaattgaaaacgttgtcctagatgcaaactgcagtagagatgtaaaacagatgctcttgaagcttgtagaactccggtcaagtaactggggcagagtccatgcaacttcaacatatagagaagcaacaccagaaaatgatcctaactactttatgaatgaaccaacattttatacatctgatggtgttcctttcactgcagctgatccagattaccaagagaaataccaagaattacttgaaagagaggacttttttccagattatgaagaaaatggaacagatttatccggggctggtgatccatacttggatgatattgatgatgagatggacccagagatagaagaagcttatgaaaagttttgtttggaatcagagcgtaagcgaaaacagtaaagttaaatttcagcatatcagttttataaagcagtttaggtatggtgatttagcagaacacaagagagcaagaaaatgtgtcacatctataccaaattaaggatgttgagttatgttactaatgtatgcaactttaattttgtttaacactatctgccaaaataaactttattccctataacttaaaatgtgtatatatatataatagtttattatgtacagttaattctactgttttggctgcaataaaatcgattttgaaataaaacaaaaacaacacaaaaaaaaaaaaaaacaaaaaaaaaaaaaaaaaaaaaaaaaaaacaacaaccacaaaacaaaaaaaaacaacaaaaaaaacaaaaaaaaaaacaaaaagaaaaacaacaaccaccacacaaaaaaaacaaacaagcaaacagaaacaaccaagaaaaaacgaaaaaaagaaaaaacaaagacaaaaagaaacacaaaaaagaaaaaagaagaaaagtagagccgcgacgaagagcgaaaaaaagtagaaacaacgaaagagagacagcacgagacgaagaagacaagaaaatagaaaaacagaccaagagacgagaagaatgcaaacgaagccacaaccaggagaacaaagagagagataaagaaaaacagaagagccaagacagagcgaccagaacccggaagacagacagaggaagagcagagagaggagagagcgcagagagtcaataaagagaacaagagaggagacacagaaacaaaaaacaaaagaatcaaagaagaaaacgaaagaaacgaaaggcgaggcagggaacggaaaacccaacactatctcaccgaagggtagcagaaagcgagaagaggaaaacaaagcaaaacagaaggcaaccgacgagggagaagaaggagaagagcaaaacaaagaacgaaaagaaaaaaaaaagaagagagaagaggacagaacataacaagaagagacagactgactaagaaaacaaaaagcacaaaaaaaacaagagcagacacaaaat

SEQ ID NO: 104401 - DNA, 1637 bp, Homo sapiens
cccacgcgtgagaactggaaagccgagggtagccgagcggggcgggcgctctggagcggcgggtgctcgggctgccgtccgctccgccagaagcaccgagcagccgagccggggcccgccgccctcctcctccatgaggcccgagtgaggcgcggcggctatagccgacccgcggcgccttccccccgcgtcctatcgcgagcgcagcggcagcggcccctggaggaggaggcggaggaggaggagcatgtcggacggtttcgatcggccagagcaaacgaggcccctgagagctccacctagttcacaggataaaatcccacagcagaactcggagtcagcaatggctaagccccaggtggttgtagctcctgtattaatgtctaagctgtctgtgaatgcccctgaattttacccttcaggttattcttccagttacacagaatcctatgaggatggttgtgaggattatcctactctatcagaatatgttcaggattttttgaatcatcttacagagcagcctggcagttttgaaactgaaattgaacagtttgcagagaccctgaatggttgtgttacaacagatgatgctttgcaagaacttgtggaactcatctatcaacaggccacatctatcccaaatttctcttatatgggagctcgcctgtgtaattacctgtcccatcatctgacaattagcccacagagtggcaacttccgccaattgctacttcaaagatgtcggactgaatatgaagttaaagatcaagctgcaaaaggggatgaagttactcgaaaacgatttcatgcatttgtactctttctgggagaactttatcttaacctggagatcaagggaacaaatggacaggttacaagagcagatattcttcaggttggtcttcgagaattgctgaatgccctgttttctaatcctatggatgacaatttaatttgtgcagtaaaattgttaaagttgacaggatcagttttggaagatgcttggaaggaaaaaggaaagatggatatggaagaaattattcagagaattgaaaacgttgtcctagatgcaaactgcagtagagatgtaaaacagatgctcttgaagcttgtagaactccggtcaagtaactggggcagagtccatgcaacttcaacatatagagaagcaacaccagaaaatgatcctaactactttatgaatgaaccaacattttatacatctgatggtgttcctttcactgcagctgatccagattaccaagagaaataccaagaattacttgaaagagaggacttttttccagattatgaagaaaatggaacagatttatccggggctggtgatccatacttggatgatattgatgatgagatggacccagagatagaagaagcttatgaaaagttttgtttggaatcagagcgtaagcgaaaacagtaaagttaaatttcagcatatcagttttataaagcagtttaggtatggtgatttagcagaacacaagagagcaagaaaatgtgtcacatctataccaaattaaggatgttgagttatgttactaatgtatgcaactttaattttgtttaacactatctgccaaaataaactttattccctataacttaaaatg

SEQ ID NO: 104402 - DNA, 2036 bp, Homo sapiens
cccacgcgtgagaactggaaagccgagggtagccgagcggggcgggcgctctggagcggcgggtgctcgggctgccgtccgctccgccagaagcaccgagcagccgagccggggcccgccgccctcctcctccatgaggcccgagtgaggcgcggcggctatagccgacccgcggcgccttccccccgcgtcctatcgcgagcgcagcggcagcggcccctggaggaggaggcggaggaggaggagcatgtcggacggtttcgatcggccagagcaaacgaggcccctgagagctccacctagttcacaggataaaatcccacagcagaactcggagtcagcaatggctaagccccaggtggttgtagctcctgtattaatgtctaagctgtctgtgaatgcccctgaattttacccttcaggttattcttccagttacacagaatcctatgaggatggttgtgaggattatcctactctatcagaatatgttcaggattttttgaatcatcttacagagcagcctggcagttttgaaactgaaattgaacagtttgcagagaccctgaatggttgtgttacaacagatgatgctttgcaagaacttgtggaactcatctatcaacaggccacatctatcccaaatttctcttatatgggagctcgcctgtgtaattacctgtcccatcatctgacaattagcccacagagtggcaacttccgccaattgctacttcaaagatgtcggactgaatatgaagttaaagatcaagctgcaaaaggggatgaagttactcgaaaacgatttcatgcatttgtactctttctgggagaactttatcttaacctggagatcaagggaacaaatggacaggttacaagagcagatattcttcaggttggtcttcgagaattgctgaatgccctgttttctaatcctatggatgacaatttaatttgtgcagtaaaattgttaaagttgacaggatcagttttggaagatgcttggaaggaaaaaggaaagatggatatggaagaaattattcagagaattgaaaacgttgtcctagatgcaaactgcagtagagatgtaaaacagatgctcttgaagcttgtagaactccggtcaagtaactggggcagagtccatgcaacttcaacatatagagaagcaacaccagaaaatgatcctaactactttatgaatgaaccaacattttatacatctgatggtgttcctttcactgcagctgatccagattaccaagagaaataccaagaattacttgaaagagaggacttttttccagattatgaagaaaatggaacagatttatccggggctggtgatccatacttggatgatattgatgatgagatggacccagagatagaagaagcttatgaaaagttttgtttggaatcagagcgtaagcgaaaacagtaaagttaaatttcagcatatcagttttataaagcagtttaggtatggtgatttagcagaacacaagagagcaagaaaatgtgtcacatctataccaaattaaggatgttgagttatgttactaatgtatgcaactttaattttgtttaacactatctgccaaaataaactttattccctataacttaaaatgaaaaaaaaaaaaaaaaaaaaaacaacgtgttgtggggcgcgcgcctgtgggccctctggaaaaacattttctacaacaccaatccgggtggggcgcgcgggggccccatgttgggtctaggggacacggggccaaaaacgcggtcccaaaggaaacccggggccatgagaaaagggcggggggggttcttctccacaattaataaaaaagaggcgccggggggggagcaaccccagagggtgtttctgtgagaacaaatttctccagagatggggggtcttcaaggaggggccaatatagacgggggagtcttttattcaaccaggggagggtcctccaaagcgagaagagccccggattttctaaaaattatcgccccgcggggctcgttgtggtggt

SEQ ID NO: 104403 - DNA, 1723 bp, Homo sapiens
gagctcggtacccgagattagaagtgatacgaggatctattatacgagtagggctagggatgaatagctgaaagctgggcgtcgtaattccatatgtcgtgacagggtttaatttgtgcagtaaaattgttaaagttgacaggatcagttttggaagatgcttggaaggaaaaaggaaagatggatatggaagaaattattcagagaattgaaaacgttgtcctagatgcaaactgcagtagagatgtaaaacagatgctcttgaagcttgtagaactccggtcaagtaactggggcagagtccatgcaacttcaacatatagagaagcaacaccagaaaatgatcctaactactttatgaatgaaccaacattttatacatctgatggtgttcctttcactgcagctgatccagattaccaagagaaataccaagaattacttgaaagagaggacttttttccagattatgaagaaaatggaacagatttatccggggctggtgatccatacttggatgatattgatgatgagatggacccagagatagaagaagcttatgaaaagttttgtttggaatcagagcgtaagcgaaaacagtaaagttaaatttcagcatatcagttttataaagcagtttaggtatggtgatttagcagaacacaagagagcaagaaaatgtgtcacatctataccaaattaaggatgttgagttatgttactaatgtatgcaactttaattttgtttaacactatctgccaaaataaactttattccctataacttaaaatgtgtatatatatataatagtttattatgtacagttaattctactgttttggctgcaataaaatcgattttgaaataaatgaaatgttgaaaattttgctagttggttagatgcttatcctttaaattctacttttcttgaggggaaaaagtcttcgtctggaaatacatattactgcaaaaatgtagcatccttttttaggtaggagtattatagctttcattttagtttgacatttagtgtcccaatgaattgaatttcaaatatgaatcataatcttgaaaatctttagcactaaagtcttggaatatatcaacaactgatttacatatgcagatgctatttgataccaagggctttttaaatgtcatgggggggaaaaacccaacttggtgaactcccagctaaacaaccaagacttcactgaagatttattccaattctagaattgttcttttttatttttattttttcaactgactaacttcattaccttaaagcctagaacattattctgctttatttatatggctttctcacttttattttgtagcatgggttgcatcgacttttttactagagaattttactagatatttgtcattcaagttttcatctgctttataattgatacaccttgagggtcacttttctaatacttttactataatgtggtaccacctcagccctaataaataatatttttacctaatgtcaaatctttttccagctaactaaaaactgtgtacaaaaggattgcttgtaaatatgcatgtaaatagttctgttaataacccactgttttacatttggtacatctgtgtctgctaatacagttagctttctcacttttctgcttgtttgttcagtctgaattaaaattagactttgaaaataaagcttaaatagttgtttcctctaaaaaaaatatt

SEQ ID NO: 104404 - DNA, 1347 bp, Homo sapiens
cccctccccgccccttccccccagcgctcagggatccagattaccaagagaaataccaagaattacttgaaagagaggacttttttccagattatgaagaaaatggaacagatttatccggggctggtgatccatacttggatgatattgatgatgagatggacccagagatagaagaagcttatgaaaagttttgtttggaatcagagcgtaagcgaaaacagtaaagttaaatttcagcatatcagttttataaagcagtttaggtatggtgatttagcagaacacaagagagcaagaaaatgtgtcacatctataccaaattaaggatgttgagttatgttactaatgtatgcaactttaattttgtttaacactatctgccaaaataaactttattccctataacttaaaatgtgtatatatatataatagtttattatgtacagttaattctactgttttggctgcaataaaatcgattttgaaataaatgaaatgttgaaaattttgctagttggttagatgcttatcctttaaattctacttttcttgaggggaaaaagtcttcgtctggaaatacatattactgcaaaaatgtagcatccttttttaggtaggagtattatagctttcattttagtttgacatttagtgtcccaatgaattgaatttcaaatatgaatcataatcttgaaaatctttagcactaaagtcttggaatatatcaacaactgatttacatatgcagatgctatttgataccaagggctttttaaatgtcatgggggggaaaaacccaacttggtgaactcccagctaaacaaccaagacttcactgaagatttattccaattctagaattgttcttttttatttttattttttcaactgactaacttcattaccttaaagcctagaacattattctgctttatttatatggctttctcacttttattttgtagcatgggttgcatcgacttttttactagagaattttactagatatttgtcattcaagttttcatctgctttataattgatacaccttgagggtcacttttctaatacttttactataatgtggtaccacctcagccctaataaataatatttttacctaatgtcaaatctttttccagctaactaaaaactgtgtacaaaaggattgcttgtaaatatgcatgtaaatagttctgttaataacccactgttttacatttggtacatctgtgtctgctaatacagttagctttctcacttttctgcttgtttgttcagtctgaattaaaattagactttgaaaataaagcttaaatagttgtttcctctaaaaaaaatatt

SEQ ID NO: 104405 - DNA, 1441 bp, Homo sapiens
  misc_feature (27)..(27): n is a, c, g, or t
  misc_feature (51)..(51): n is a, c, g, or t
  misc_feature (69)..(69): n is a, c, g, or t
  misc_feature (116)..(116): n is a, c, g, or t
ggggcccccagaacccggaaaaatttncccctcccccaaataaagccattngggtggccccgaagaccngcccataatggaaatccccaaaggtagggcctgtggtcccataatanccccagcccaggaaaggtgtattaccattatttttttccatgatttagcaccctacctttcctgagttgaaaaacccctacacctatgaatccatcctttgcttttacagataccttggatgatattgatgatgagatggacccagagatagaagaagcttatgaaaagttttgtttggaatcagagcgtaagcgaaaacagtaaagttaaatttcagcatatcagttttataaagcagtttaggtatggtgatttagcagaacacaagagagcaagaaaatgtgtcacatctataccaaattaaggatgttgagttatgttactaatgtatgcaactttaattttgtttaacactatctgccaaaataaactttattccctataacttaaaatgtgtatatatatataatagtttattatgtacagttaattctactgttttggctgcaataaaatcgattttgaaataaatgaaatgttgaaaattttgctagttggttagatgcttatcctttaaattctacttttcttgaggggaaaaagtcttcgtctggaaatacatattactgcaaaaatgtagcatccttttttaggtaggagtattatagctttcattttagtttgacatttagtgtcccaatgaattgaatttcaaatatgaatcataatcttgaaaatctttagcactaaagtcttggaatatatcaacaactgatttacatatgcagatgctatttgataccaagggctttttaaatgtcatgggggggaaaaacccaacttggtgaactcccagctaaacaaccaagacttcactgaagatttattccaattctagaattgttcttttttatttttattttttcaactgactaacttcattaccttaaagcctagaacattattctgctttatttatatggctttctcacttttattttgtagcatgggttgcatcgacttttttactagagaattttactagatatttgtcattcaagttttcatctgctttataattgatacaccttgagggtcacttttctaatacttttactataatgtggtaccacctcagccctaataaataatatttttacctaatgtcaaatctttttccagctaactaaaaactgtgtacaaaaggattgcttgtaaatatgcatgtaaatagttctgttaataacccactgttttacatttggtacatctgtgtctgctaatacagttagctttctcacttttctgcttgtttgttcagtctgaattaaaattagactttgaaaataaagcttaaatagttgtttcctctaaaaaaaatatt

SEQ ID NO: 104406 - DNA, 2659 bp, Homo sapiens
cccacgcgtgagaactggaaagccgagggtagccgagcggggcgggcgctctggagcggcgggtgctcgggctgccgtccgctccgccagaagcaccgagcagccgagccggggcccgccgccctcctcctccatgaggcccgagtgaggcgcggcggctatagccgacccgcggcgccttccccccgcgtcctatcgcgagcgcagcggcagcggcccctggaggaggaggcggaggaggaggagcatgtcggacggtttcgatcgggccccaggtgctggtcggggccggagccggggcctgggccgcggagggggcgggcctgagggcggcggtttcccgaacggagcggggcctgctgagcgggcgcggcaccagccgccgcaacccaaagccccgggcttcctgcagccaccgccgctgcgccagcccaggacgaccccgccgccaggggcccagtgcgaggtccccgccagcccccagcggccttcccggcccggggcgctcccagagcaaacgaggcccctgagagctccacctagttcacaggataaaatcccacagcagaactcggagtcagcaatggctaagccccaggtggttgtagctcctgtattaatgtctaagctgtctgtgaatgcccctgaattttacccttcaggttattcttccagttacacagaatcctatgaggatggttgtgaggattatcctactctatcagaatatgttcaggattttttgaatcatcttacagagcagcctggcagttttgaaactgaaattgaacagtttgcagagaccctgaatggttgtgttacaacagatgatgctttgcaagaacttgtggaactcatctatcaacaggccacatctatcccaaatttctcttatatgggagctcgcctgtgtaattacctgtcccatcatctgacaattagcccacagagtggcaacttccgccaattgctacttcaaagatgtcggactgaatatgaagttaaagatcaagctgcaaaaggggatgaagttactcgaaaacgatttcatgcatttgtactctttctgggagaactttatcttaacctggagatcaagggaacaaatggacaggttacaagagcagatattcttcaggttggtcttcgagaattgctgaatgccctgttttctaatcctatggatgacaatttaatttgtgcagtaaaattgttaaagttgacaggatcagttttggaagatgcttggaaggaaaaaggaaagatggatatggaagaaattattcagagaattgaaaacgttgtcctagatgcaaactgcagtagagatgtaaaacagatgctcttgaagcttgtagaactccggtcaagtaactggggcagagtccatgcaacttcaacatatagagaagcaacaccagaaaatgatcctaactactttatgaatgaaccaacattttatacatctgatggtgttcctttcactgcagctgatccagattaccaagagaaataccaagaattacttgaaagagaggacttttttccagattatgaagaaaatggaacagatttatccggggctggtgatccatacttggatgatattgatgatgagatggacccagagatagaagaagcttatgaaaagttttgtttggaatcagagcgtaagcgaaaacagtaaagttaaatttcagcatatcagttttataaagcagtttaggtatggtgatttagcagaacacaagagagcaagaaaatgtgtcacatctataccaaattaaggatgttgagttatgttactaatgtatgcaactttaattttgtttaacactatctgccaaaataaactttattccctataacttaaaatgtgtatatatatataatagtttattatgtacagttaattctactgttttggctgcaataaaatcgattttgaaataaatgaaatgttgaaaattttgctagttggttagatgcttatcctttaaattctacttttcttgaggggaaaaagtcttcgtctggaaatacatattactgcaaaaatgtagcatccttttttaggtaggagtattatagctttcattttagtttgacatttagtgtcccaatgaattgaatttcaaatatgaatcataatcttgaaaatctttagcactaaagtcttggaatatatcaacaactgatttacatatgcagatgctatttgataccaagggctttttaaatgtcatgggggggaaaaacccaacttggtgaactcccagctaaacaaccaagacttcactgaagatttattccaattctagaattgttcttttttatttttattttttcaactgactaacttcattaccttaaagcctagaacattattctgctttatttatatggctttctcacttttattttgtagcatgggttgcatcgacttttttactagagaattttactagatatttgtcattcaagttttcatctgctttataattgatacaccttgagggtcacttttctaatacttttactataatgtggtaccacctcagccctaataaataatatttttacctaatgtcaaatctttttccagctaactaaaaactgtgtacaaaaggatgctgttcactggggccgagctcgacgg

SEQ ID NO: 104407 - DNA, 2567 bp, Homo sapiens
cccacgcgtgagaactggaaagccgagggtagccgagcggggcgggcgctctggagcggcgggtgctcgggctgccgtccgctccgccagaagcaccgagcagccgagccggggcccgccgccctcctcctccatgaggcccgagtgaggcgcggcggctatagccgacccgcggcgccttccccccgcgtcctatcgcgagcgcagcggcagcggcccctggaggaggaggcggaggaggaggagcatgtcggacggtttcgatcggccagagcaaacgaggcccctgagagctccacctagttcacaggataaaatcccacagcagaactcggagtcagcaatggctaagccccaggtggttgtagctcctgtattaatgtctaagctgtctgtgaatgcccctgaattttacccttcaggttattcttccagttacacagaatcctatgaggatggttgtgaggattatcctactctatcagaatatgttcaggattttttgaatcatcttacagagcagcctggcagttttgaaactgaaattgaacagtttgcagagaccctgaatggttgtgttacaacagatgatgctttgcaagaacttgtggaactcatctatcaacaggccacatctatcccaaatttctcttatatgggagctcgcctgtgtaattacctgtcccatcatctgacaattagcccacagagtggcaacttccgccaattgctacttcaaagatgtcggactgaatatgaagttaaagatcaagctgcaaaaggggatgaagttactcgaaaacgatttcatgcatttgtactctttctgggagaactttatcttaacctggagatcaagggaacaaatggacaggttacaagagcagatattcttcaggttggtcttcgagaattgctgaatgccctgttttctaatcctatggatgacaatttaatttgtgcagtaaaattgttaaagttgacaggatcagttttggaagatgcttggaaggaaaaaggaaagatggatatggaagaaattattcagagaattgaaaacgttgtcctagatgcaaactgcagtagagatgtaaaacagatgctcttgaagcttgtagaactccggtcaagtaactggggcagagtccatgcaacttcaacatatagagaagcaacaccagaaaatgatcctaactactttatgaatgaaccaacattttatacatctgatggtgttcctttcactgcagctgatccagattaccaagagaaataccaagaattacttgaaagagaggacttttttccagattatgaagaaaatggaacagatttatccggggctggtgatccatacttggatgatattgatgatgagatggacccagagatagaagaagcttatgaaaagttttgtttggaatcagagcgtaagcgaaaacagtaaagttaaatttcagcatatcagttttataaagcagtttaggtatggtgatttagcagaacacaagagagcaagaaaatgtgtcacatctataccaaattaaggatgttgagttatgttactaatgtatgcaactttaattttgtttaacactatctgccaaaataaactttattccctataacttaaaatgtgtatatatatataatagtttattatgtacagttaattctactgttttggctgcaataaaatcgattttgaaataaatgaaatgttgaaaattttgctagttggttagatgcttatcctttaaattctacttttcttgaggggaaaaagtcttcgtctggaaatacatattactgcaaaaatgtagcatccttttttaggtaggagtattatagctttcattttagtttgacatttagtgtcccaatgaattgaatttcaaatatgaatcataatcttgaaaatctttagcactaaagtcttggaatatatcaacaactgatttacatatgcagatgctatttgataccaagggctttttaaatgtcatgggggggaaaaacccaacttggtgaactcccagctaaacaaccaagacttcactgaagatttattccaattctagaattgttcttttttatttttattttttcaactgactaacttcattaccttaaagcctagaacattattctgctttatttatatggctttctcacttttattttgtagcatgggttgcatcgacttttttactagagaattttactagatatttgtcattcaagttttcatctgctttataattgatacaccttgagggtcacttttctaatacttttactataatgtggtaccacctcagccctaataaataatatttttacctaatgtcaaatctttttccagctaactaaaaactgtgtacaaaaggattgcttgtaaatatgcatgtaaatagttctgttaataacccactgttttacatttggtacatctgtgtctgctaatacagttagctttctcacttttctgcttgtttgttcagtctgaattaaaattagactttgaaaataaagcttaaatagttgtttcctctaaaaaaaatatt

SEQ ID NO: 104408 - DNA, 2482 bp, Homo sapiens
agcgggatggggggaggggccgggtgcgcggtctcggagttcggggtcccgggaggaagtaaaaatcgcctcccctcagcagccctctaaagcgagaccctagcgagtaaccacctcttttccaccgacccctttaaaacgacagagaggaaaaaagctcgcaagcactcatttgagaggcagccagagcaaacgaggcccctgagagctccacctagttcacaggataaaatcccacagcagaactcggagtcagcaatggctaagccccaggtggttgtagctcctgtattaatgtctaagctgtctgtgaatgcccctgaattttacccttcaggttattcttccagttacacagaatcctatgaggatggttgtgaggattatcctactctatcagaatatgttcaggattttttgaatcatcttacagagcagcctggcagttttgaaactgaaattgaacagtttgcagagaccctgaatggttgtgttacaacagatgatgctttgcaagaacttgtggaactcatctatcaacaggccacatctatcccaaatttctcttatatgggagctcgcctgtgtaattacctgtcccatcatctgacaattagcccacagagtggcaacttccgccaattgctacttcaaagatgtcggactgaatatgaagttaaagatcaagctgcaaaaggggatgaagttactcgaaaacgatttcatgcatttgtactctttctgggagaactttatcttaacctggagatcaagggaacaaatggacaggttacaagagcagatattcttcaggttggtcttcgagaattgctgaatgccctgttttctaatcctatggatgacaatttaatttgtgcagtaaaattgttaaagttgacaggatcagttttggaagatgcttggaaggaaaaaggaaagatggatatggaagaaattattcagagaattgaaaacgttgtcctagatgcaaactgcagtagagatgtaaaacagatgctcttgaagcttgtagaactccggtcaagtaactggggcagagtccatgcaacttcaacatatagagaagcaacaccagaaaatgatcctaactactttatgaatgaaccaacattttatacatctgatggtgttcctttcactgcagctgatccagattaccaagagaaataccaagaattacttgaaagagaggacttttttccagattatgaagaaaatggaacagatttatccggggctggtgatccatacttggatgatattgatgatgagatggacccagagatagaagaagcttatgaaaagttttgtttggaatcagagcgtaagcgaaaacagtaaagttaaatttcagcatatcagttttataaagcagtttaggtatggtgatttagcagaacacaagagagcaagaaaatgtgtcacatctataccaaattaaggatgttgagttatgttactaatgtatgcaactttaattttgtttaacactatctgccaaaataaactttattccctataacttaaaatgtgtatatatatataatagtttattatgtacagttaattctactgttttggctgcaataaaatcgattttgaaataaatgaaatgttgaaaattttgctagttggttagatgcttatcctttaaattctacttttcttgaggggaaaaagtcttcgtctggaaatacatattactgcaaaaatgtagcatccttttttaggtaggagtattatagctttcattttagtttgacatttagtgtcccaatgaattgaatttcaaatatgaatcataatcttgaaaatctttagcactaaagtcttggaatatatcaacaactgatttacatatgcagatgctatttgataccaagggctttttaaatgtcatgggggggaaaaacccaacttggtgaactcccagctaaacaaccaagacttcactgaagatttattccaattctagaattgttcttttttatttttattttttcaactgactaacttcattaccttaaagcctagaacattattctgctttatttatatggctttctcacttttattttgtagcatgggttgcatcgacttttttactagagaattttactagatatttgtcattcaagttttcatctgctttataattgatacaccttgagggtcacttttctaatacttttactataatgtggtaccacctcagccctaataaataatatttttacctaatgtcaaatctttttccagctaactaaaaactgtgtacaaaaggattgcttgtaaatatgcatgtaaatagttctgttaataacccactgttttacatttggtacatctgtgtctgctaatacagttagctttctcacttttctgcttgtttgttcagtctgaattaaaattagactttgaaaataaagcttaaatagttgtttcctctaaaaaaaatatt

SEQ ID NO: 104409 - DNA, 2333 bp, Homo sapiens
caagatgaaaaagagggcagagttacactgaaagccagagcaaacgaggcccctgagagctccacctagttcacaggataaaatcccacagcagaactcggagtcagcaatggctaagccccaggtggttgtagctcctgtattaatgtctaagctgtctgtgaatgcccctgaattttacccttcaggttattcttccagttacacagaatcctatgaggatggttgtgaggattatcctactctatcagaatatgttcaggattttttgaatcatcttacagagcagcctggcagttttgaaactgaaattgaacagtttgcagagaccctgaatggttgtgttacaacagatgatgctttgcaagaacttgtggaactcatctatcaacaggccacatctatcccaaatttctcttatatgggagctcgcctgtgtaattacctgtcccatcatctgacaattagcccacagagtggcaacttccgccaattgctacttcaaagatgtcggactgaatatgaagttaaagatcaagctgcaaaaggggatgaagttactcgaaaacgatttcatgcatttgtactctttctgggagaactttatcttaacctggagatcaagggaacaaatggacaggttacaagagcagatattcttcaggttggtcttcgagaattgctgaatgccctgttttctaatcctatggatgacaatttaatttgtgcagtaaaattgttaaagttgacaggatcagttttggaagatgcttggaaggaaaaaggaaagatggatatggaagaaattattcagagaattgaaaacgttgtcctagatgcaaactgcagtagagatgtaaaacagatgctcttgaagcttgtagaactccggtcaagtaactggggcagagtccatgcaacttcaacatatagagaagcaacaccagaaaatgatcctaactactttatgaatgaaccaacattttatacatctgatggtgttcctttcactgcagctgatccagattaccaagagaaataccaagaattacttgaaagagaggacttttttccagattatgaagaaaatggaacagatttatccggggctggtgatccatacttggatgatattgatgatgagatggacccagagatagaagaagcttatgaaaagttttgtttggaatcagagcgtaagcgaaaacagtaaagttaaatttcagcatatcagttttataaagcagtttaggtatggtgatttagcagaacacaagagagcaagaaaatgtgtcacatctataccaaattaaggatgttgagttatgttactaatgtatgcaactttaattttgtttaacactatctgccaaaataaactttattccctataacttaaaatgtgtatatatatataatagtttattatgtacagttaattctactgttttggctgcaataaaatcgattttgaaataaatgaaatgttgaaaattttgctagttggttagatgcttatcctttaaattctacttttcttgaggggaaaaagtcttcgtctggaaatacatattactgcaaaaatgtagcatccttttttaggtaggagtattatagctttcattttagtttgacatttagtgtcccaatgaattgaatttcaaatatgaatcataatcttgaaaatctttagcactaaagtcttggaatatatcaacaactgatttacatatgcagatgctatttgataccaagggctttttaaatgtcatgggggggaaaaacccaacttggtgaactcccagctaaacaaccaagacttcactgaagatttattccaattctagaattgttcttttttatttttattttttcaactgactaacttcattaccttaaagcctagaacattattctgctttatttatatggctttctcacttttattttgtagcatgggttgcatcgacttttttactagagaattttactagatatttgtcattcaagttttcatctgctttataattgatacaccttgagggtcacttttctaatacttttactataatgtggtaccacctcagccctaataaataatatttttacctaatgtcaaatctttttccagctaactaaaaactgtgtacaaaaggattgcttgtaaatatgcatgtaaatagttctgttaataacccactgttttacatttggtacatctgtgtctgctaatacagttagctttctcacttttctgcttgtttgttcagtctgaattaaaattagactttgaaaataaagcttaaatagttgtttcctctaaaaaaaatatt

SEQ ID NO: 104410 - DNA, 2292 bp, Homo sapiens
caagatgaaaaagagggcagagttacactgaaagccagagcaaacgaggcccctgagagctccacctagttcacaggataaaatcccacagcagaactcggagtcagcaatggctaagccccagggcccctgaattttacccttcaggttattcttccagttacacagaatcctatgaggatggttgtgaggattatcctactctatcagaatatgttcaggattttttgaatcatcttacagagcagcctggcagttttgaaactgaaattgaacagtttgcagagaccctgaatggttgtgttacaacagatgatgctttgcaagaacttgtggaactcatctatcaacaggccacatctatcccaaatttctcttatatgggagctcgcctgtgtaattacctgtcccatcatctgacaattagcccacagagtggcaacttccgccaattgctacttcaaagatgtcggactgaatatgaagttaaagatcaagctgcaaaaggggatgaagttactcgaaaacgatttcatgcatttgtactctttctgggagaactttatcttaacctggagatcaagggaacaaatggacaggttacaagagcagatattcttcaggttggtcttcgagaattgctgaatgccctgttttctaatcctatggatgacaatttaatttgtgcagtaaaattgttaaagttgacaggatcagttttggaagatgcttggaaggaaaaaggaaagatggatatggaagaaattattcagagaattgaaaacgttgtcctagatgcaaactgcagtagagatgtaaaacagatgctcttgaagcttgtagaactccggtcaagtaactggggcagagtccatgcaacttcaacatatagagaagcaacaccagaaaatgatcctaactactttatgaatgaaccaacattttatacatctgatggtgttcctttcactgcagctgatccagattaccaagagaaataccaagaattacttgaaagagaggacttttttccagattatgaagaaaatggaacagatttatccggggctggtgatccatacttggatgatattgatgatgagatggacccagagatagaagaagcttatgaaaagttttgtttggaatcagagcgtaagcgaaaacagtaaagttaaatttcagcatatcagttttataaagcagtttaggtatggtgatttagcagaacacaagagagcaagaaaatgtgtcacatctataccaaattaaggatgttgagttatgttactaatgtatgcaactttaattttgtttaacactatctgccaaaataaactttattccctataacttaaaatgtgtatatatatataatagtttattatgtacagttaattctactgttttggctgcaataaaatcgattttgaaataaatgaaatgttgaaaattttgctagttggttagatgcttatcctttaaattctacttttcttgaggggaaaaagtcttcgtctggaaatacatattactgcaaaaatgtagcatccttttttaggtaggagtattatagctttcattttagtttgacatttagtgtcccaatgaattgaatttcaaatatgaatcataatcttgaaaatctttagcactaaagtcttggaatatatcaacaactgatttacatatgcagatgctatttgataccaagggctttttaaatgtcatgggggggaaaaacccaacttggtgaactcccagctaaacaaccaagacttcactgaagatttattccaattctagaattgttcttttttatttttattttttcaactgactaacttcattaccttaaagcctagaacattattctgctttatttatatggctttctcacttttattttgtagcatgggttgcatcgacttttttactagagaattttactagatatttgtcattcaagttttcatctgctttataattgatacaccttgagggtcacttttctaatacttttactataatgtggtaccacctcagccctaataaataatatttttacctaatgtcaaatctttttccagctaactaaaaactgtgtacaaaaggattgcttgtaaatatgcatgtaaatagttctgttaataacccactgttttacatttggtacatctgtgtctgctaatacagttagctttctcacttttctgcttgtttgttcagtctgaattaaaattagactttgaaaataaagcttaaatagttgtttcctctaaaaaaaatatt

SEQ ID NO: 104411 - DNA, 1980 bp, Homo sapiens
  misc_feature (1)..(1): n is a, c, g, or t
  misc_feature (25)..(25): n is a, c, g, or t
ntcgtgtcgtcactgactctcttancctaccacggctaacggccacatctatcccaaatttctcttatatgggagctcgcctgtgtaattacctgtcccatcatctgacaattagcccacagagtggcaacttccgccaattgctacttcaaagatgtcggactgaatatgaagttaaagatcaagctgcaaaaggggatgaagttactcgaaaacgatttcatgcatttgtactctttctgggagaactttatcttaacctggagatcaagggaacaaatggacaggttacaagagcagatattcttcaggttggtcttcgagaattgctgaatgccctgttttctaatcctatggatgacaatttaatttgtgcagtaaaattgttaaagttgacaggatcagttttggaagatgcttggaaggaaaaaggaaagatggatatggaagaaattattcagagaattgaaaacgttgtcctagatgcaaactgcagtagagatgtaaaacagatgctcttgaagcttgtagaactccggtcaagtaactggggcagagtccatgcaacttcaacatatagagaagcaacaccagaaaatgatcctaactactttatgaatgaaccaacattttatacatctgatggtgttcctttcactgcagctgatccagattaccaagagaaataccaagaattacttgaaagagaggacttttttccagattatgaagaaaatggaacagatttatccggggctggtgatccatacttggatgatattgatgatgagatggacccagagatagaagaagcttatgaaaagttttgtttggaatcagagcgtaagcgaaaacagtaaagttaaatttcagcatatcagttttataaagcagtttaggtatggtgatttagcagaacacaagagagcaagaaaatgtgtcacatctataccaaattaaggatgttgagttatgttactaatgtatgcaactttaattttgtttaacactatctgccaaaataaactttattccctataacttaaaatgtgtatatatatataatagtttattatgtacagttaattctactgttttggctgcaataaaatcgattttgaaataaatgaaatgttgaaaattttgctagttggttagatgcttatcctttaaattctacttttcttgaggggaaaaagtcttcgtctggaaatacatattactgcaaaaatgtagcatccttttttaggtaggagtattatagctttcattttagtttgacatttagtgtcccaatgaattgaatttcaaatatgaatcataatcttgaaaatctttagcactaaagtcttggaatatatcaacaactgatttacatatgcagatgctatttgataccaagggctttttaaatgtcatgggggggaaaaacccaacttggtgaactcccagctaaacaaccaagacttcactgaagatttattccaattctagaattgttcttttttatttttattttttcaactgactaacttcattaccttaaagcctagaacattattctgctttatttatatggctttctcacttttattttgtagcatgggttgcatcgacttttttactagagaattttactagatatttgtcattcaagttttcatctgctttataattgatacaccttgagggtcacttttctaatacttttactataatgtggtaccacctcagccctaataaataatatttttacctaatgtcaaatctttttccagctaactaaaaactgtgtacaaaaggattgcttgtaaatatgcatgtaaatagttctgttaataacccactgttttacatttggtacatctgtgtctgctaatacagttagctttctcacttttctgcttgtttgttcagtctgaattaaaattagactttgaaaataaagcttaaatagttgtttcctctaaaaaaaatatt

SEQ ID NO: 104412 - DNA, 1887 bp, Homo sapiens
tgctttgggtaacaataataatggcatggattttaacttacagaagtaacacaaaaaagaaaaaaagttaagataagggagtgttgtaaaattaaatgcctaagcagcatatttaactggtgatcaagaaagtgactaaacttgatgctaaaacataattaaaacattcctacattttcatataaaatatatgtcaaatattggcttacatttccaaatgacagcaagttaatgtagccaatgacgttatttattcaaccaagagtgtcgctttaatttgtgcagtaaaattgttaaagttgacaggatcagttttggaagatgcttggaaggaaaaaggaaagatggatatggaagaaattattcagagaattgaaaacgttgtcctagatgcaaactgcagtagagatgtaaaacagatgctcttgaagcttgtagaactccggtcaagtaactggggcagagtccatgcaacttcaacatatagagaagcaacaccagaaaatgatcctaactactttatgaatgaaccaacattttatacatctgatggtgttcctttcactgcagctgatccagattaccaagagaaataccaagaattacttgaaagagaggacttttttccagattatgaagaaaatggaacagatttatccggggctggtgatccatacttggatgatattgatgatgagatggacccagagatagaagaagcttatgaaaagttttgtttggaatcagagcgtaagcgaaaacagtaaagttaaatttcagcatatcagttttataaagcagtttaggtatggtgatttagcagaacacaagagagcaagaaaatgtgtcacatctataccaaattaaggatgttgagttatgttactaatgtatgcaactttaattttgtttaacactatctgccaaaataaactttattccctataacttaaaatgtgtatatatatataatagtttattatgtacagttaattctactgttttggctgcaataaaatcgattttgaaataaatgaaatgttgaaaattttgctagttggttagatgcttatcctttaaattctacttttcttgaggggaaaaagtcttcgtctggaaatacatattactgcaaaaatgtagcatccttttttaggtaggagtattatagctttcattttagtttgacatttagtgtcccaatgaattgaatttcaaatatgaatcataatcttgaaaatctttagcactaaagtcttggaatatatcaacaactgatttacatatgcagatgctatttgataccaagggctttttaaatgtcatgggggggaaaaacccaacttggtgaactcccagctaaacaaccaagacttcactgaagatttattccaattctagaattgttcttttttatttttattttttcaactgactaacttcattaccttaaagcctagaacattattctgctttatttatatggctttctcacttttattttgtagcatgggttgcatcgacttttttactagagaattttactagatatttgtcattcaagttttcatctgctttataattgatacaccttgagggtcacttttctaatacttttactataatgtggtaccacctcagccctaataaataatatttttacctaatgtcaaatctttttccagctaactaaaaactgtgtacaaaaggattgcttgtaaatatgcatgtaaatagttctgttaataacccactgttttacatttggtacatctgtgtctgctaatacagttagctttctcacttttctgcttgtttgttcagtctgaattaaaattagactttgaaaataaagcttaaatagttgtttcctctaaaaaaaatatt

SEQ ID NO: 104413 - DNA, 1285 bp, Homo sapiens
cccacgcgtgagaactggaaagccgagggtagccgagcggggcgggcgctctggagcggcgggtgctcgggctgccgtccgctccgccagaagcaccgagcagccgagccggggcccgccgccctcctcctccatgaggcccgagtgaggcgcggcggctatagccgacccgcggcgccttccccccgcgtcctatcgcgagcgcagcggcagcggcccctggaggaggaggcggaggaggaggagcatgtcggacggtttcgatcggccagagcaaacgaggcccctgagagctccacctagttcacaggataaaatcccacagcagaactcggagtcagcaatggctaagccccaggtggttgtagctcctgtattaatgtctaagctgtctgtgaatgcccctgaattttacccttcaggttattcttccagttacacagaatcctatgaggatggttgtgaggattatcctactctatcagaatatgttcaggattttttgaatcatcttacagagcagcctggcagttttgaaactgaaattgaacagtttgcagagaccctgaatggttgtgttacaacagatgatgctttgcaagaacttgtggaactcatctatcaacaggccacatctatcccaaatttctcttatatgggagctcgcctgtgtaattacctgtcccatcatctgacaattagcccacagagtggcaacttccgccaattgctacttcaaagatgtcggactgaatatgaagttaaagatcaagctgcaaaaggggatgaagttactcgaaaacgatttcatgcatttgtactctttctgggagaactttatcttaacctggagatcaagggaacaaatggacaggttacaagagcagatattcttcaggttggtcttcgagaattgctgaatgccctgttttctaatcctatggatgacaatttaatttgtgcagtaaaattgttaaagttgacaggatcagttttggaagatgcttggaaggaaaaaggaaagatggatatggaagaaattattcagagaattgaaaacgttgtcctagatgcaaactgcagtagagatgtaaaacagatgctcttgaagcttgtagaactccggtcaagtaactggggcagagtccatgcaacttcaacatatagagaagcaacaccagaaaatgatcctaactactttatgaatgaaccaacattttatacatctgatggtgttcctttcactgcagctatcagatacgatatgtggggatcctctaggtcc

SEQ ID NO: 104414 - DNA, 4052 bp, Homo sapiens
tagccttcctgtgtccttcccacccttagtcccaggcatctgactaccgggaacctcagccagagtccgggagccccccaccccgtccaggagccaacagagcccccgtcttgctggcgtgagaatacattgctctcctttggttgaatcagctgtccctcttcgtgggaaaatgaaccagaagacaatcctcgtgctcctcattctggccgtcatcaccatctttgccttggtttgtgtcctgctggtgggcaggggtggagatgggggtgaacccagccagcttccccattgcccctctgtatctcccagtgcccagccttggacacaccctggccagagccagctgtttgcagacctgagccgagaggagctgacggctgtgatgcgctttctgacccagcggctggggccagggctggtggatgcagcccaggcccggccctcggacaactgtgtcttctcagtggagttgcagctgcctcccaaggctgcagccctggctcacttggacagggggagccccccacctgcccgggaggcactggccatcgtcttctttggcaggcaaccccagcccaacgtgagtgagctggtggtggggccactgcctcacccctcctacatgcgggacgtgactgtggagcgtcatggaggccccctgccctatcaccgacgccccgtgctgttccaagagtacctggacatagaccagatgatcttcaacagagagctgccccaggcttctgggcttctccaccactgttgcttctacaagcaccggggacggaacctggtgacaatgaccacggctccccgtggtctgcaatcaggggaccgggccacctggtttggcctctactacaacatctcgggcgctgggttcttcctgcaccacgtgggcttggagctgctagtgaaccacaaggcccttgaccctgcccgctggactatccagaaggtgttctatcaaggccgctactacgacagcctggcccagctggaggcccagtttgaggccggcctggtgaatgtggtgctgatcccagacaatggcacaggtgggtcctggtccctgaagtcccctgtgcccccgggtccagctccccctctacagttctatccccaaggcccccgcttcagtgtccagggaagtcgagtggcctcctcactgtggactttctcctttggcctcggagcattcagtggcccaaggatctttgacgttcgcttccaaggagaaagactagtttatgagataagcctccaagaggccttggccatctatggtggaaattccccagcagcaatgacgacccgctatgtggatggaggctttggcatgggcaagtacaccacgcccctgacccgtggggtggactgcccctacttggccacctacgtggactggcacttccttttggagtcccaggcccccaagacaatacgtgatgccttttgtgtgtttgaacagaaccagggcctccccctgcggcgacaccactcagatctctactcgcactactttgggggtcttgcggaaacggtgctggtcgtcagatctatgtccaccttgctcaactatgactatgtgtgggatacggtcttccaccccagtggggccatagaaatacgattctatgccacgggctacatcagctcggcattcctctttggtgctactgggaagtacgggaaccaagtgtcagagcacaccctgggcacggtccacacccacagcgcccacttcaaggtggatctggatgtagcaggactggagaactgggtctgggccgaggatatggtctttgtccccatggctgtgccctggagccctgagcaccagctgcagaggctgcaggtgacccggaagctgctggagatggaggagcaggccgccttcctcgtgggaagcgccacccctcgctacctgtacctggccagcaaccacagcaacaagtggggtcacccccggggctaccgcatccagatgctcagctttgctggagagccgctgccccaaaacagctccatggcgagaggcttcagctgggagaggtaccagctggctgtgacccagcggaaggaggaggagcccagtagcagcagcgttttcaatcagaatgacccttgggcccccactgtggatttcagtgacttcatcaacaatgagaccattgctggaaaggatttggtggcctgggtgacagctggttttctgcatatcccacatgcagaggacattcctaacacagtgactgtggggaacggcgtgggcttcttcctccgaccctataacttctttgacgaagacccctccttctactctgccgactccatctacttccgaggggaccaggatgctggggcctgcgaggtcaaccccctagcttgcctgccccaggctgctgcctgtgcccccgacctccctgccttctcccacgggggcttctctcacaactaggcggtcctgggatggggcatgtggccaagggctccagggccagggtgtgagggatggggagcagctgggcactgggccggcagcctggttccctctttcctgtgccaggactctctttcttccactaccctccctcgcatccgcctctgagccaggagcctcctgaccctgtgatgcctgacacaggggacactgaaccttgttgatgccagctgtactgagttctcatccacagaggccaggcatggcccagcctggagccgtggccgagggcttccctagatggttccctttgttgctgtctggctttcccgaatctttttaggccacctccaaggactctaaaagggggctattccctggagaccccagagtagggttgccagtcctgcaagtccatagctgagctggaaaggatgcttctgctcacattccctctcatccaggtcctttccttctcgtcttcctctctctcacctacttcctcctcctcctcctgttcctgccttctcttctatcctgcaatttctcccgaatcctgaggggatatccctatgtcccagcccctggtactcccccagccctcagttttcagtcaagttccgtctcctctccagccctatggaagtctcaaggtcacgggacccctaatcagagtggccaatccctgtgtgtcgttcccttgtgtctgttgcttattgggagtaggagttgctcctacccctgtcctggggctgggtgtgtttcaggacagctgcttctgtgcatttgtgtctgcctgcctcatgctctctatagaggaggatggtcatcgtgacagcagcagctcaagttagcatttcaagtgatttgggggtgcaatgataatgaagaatggccattttgtaccagggctctgtattctgcaacagcctgtttgggaggctggagtggaaacaaagggtgggcatcaaagatgagaagccaaagcccctacaactccagccacccagccaggaggggctgtccaatcacattcaggcatgcgaatgagctgggccctgggtgaggtgggggtctggcctagtggggaggggcctggcctgggtggggcagggcctggcctggtccaggcttgggctccattcccatcactgctgtccctcctgaggtctggattggggatggggacaaagaaatagcaagagatgagaaacaacagaaacttttttctctaaaggactggttaaatcaattctgatacagccttacaatacaatagtatgcagctaaaaaataattgtatgtctttatatactaatatgtaataatcttcaggtgaaaaaggcaagccacagaaatgtgtatagcgcacttcccatttgtgtttcagaaaggagtagaatataaacacataattgcttatgtatgcctattcagaataaatgggtaacactgattacttttgggaggggaaccagtaggttgaggacaggagagggaagggtcttaacacttacacccttttgtacattttgaattttgaaccatgtgactgtattacctattcaaaataaacaataaatgggcccaaacaggaaaaaaaaat

SEQ ID NO: 104415 - DNA, 4092 bp, Homo sapiens
tagccttcctgtgtccttcccacccttagtcccaggcatctgactaccgggaacctcagccagagtccgggagccccccaccccgtccaggagccaacagagcccccgtcttgctggcgtgagaatacattgctctcctttggttgaatcagctgtccctcttcgtgggaaaatgaaccagaagacaatcctcgtgctcctcattctggccgtcatcaccatctttgccttggtttgtgtcctgctggtgggcaggggtggagatgggggtgaacccagccagcttccccattgcccctctgtatctcccagtgcccagccttggacacaccctggccagagccagctgtttgcagacctgagccgagaggagctgacggctgtgatgcgctttctgacccagcggctggggccagggctggtggatgcagcccaggcccggccctcggacaactgtgtcttctcagtggagttgcagctgcctcccaaggctgcagccctggctcacttggacagggggagccccccacctgcccgggaggcactggccatcgtcttctttggcaggcaaccccagcccaacgtgagtgagctggtggtggggccactgcctcacccctcctacatgcgggacgtgactgtggagcgtcatggaggccccctgccctatcaccgacgccccgtgctgttccaagagtacctggacatagaccagatgatcttcaacagagagctgccccaggcttctgggcttctccaccactgttgcttctacaagcaccggggacggaacctggtgacaatgaccacggctccccgtggtctgcaatcaggggaccgggccacctggtttggcctctactacaacatctcgggcgctgggttcttcctgcaccacgtgggcttggagctgctagtgaaccacaaggcccttgaccctgcccgctggactatccagaaggtgttctatcaaggccgctactacgacagcctggcccagctggaggcccagtttgaggccggcctggtgaatgtggtgctgatcccagacaatggcacaggtgggtcctggtccctgaagtcccctgtgcccccgggtccagctccccctctacagttctatccccaaggcccccgcttcagtgtccagggaagtcgagtggcctcctcactgtggactttctcctttggcctcggagcattcagtggcccaaggatctttgacgttcgcttccaaggagaaagactagtttatgagataagcctccaagaggccttggccatctatggtggaaattccccagcagcaatgacgacccgctatgtggatggaggctttggcatgggcaagtacaccacgcccctgacccgtggggtggactgcccctacttggccacctacgtggactggcacttccttttggagtcccaggcccccaagacaatacgtgatgccttttgtgtgtttgaacagaaccagggcctccccctgcggcgacaccactcagatctctactcgcactactttgggggtcttgcggaaacggtgctggtcgtcagatctatgtccaccttgctcaactatgactatgtgtgggatacggtcttccaccccagtggggccatagaaatacgattctatgccacgggctacatcagctcggcattcctctttggtgctactgggaagtacgggaaccaagtgtcagagcacaccctgggcacggtccacacccacagcgcccacttcaaggtggatctggatgtagcaggactggagaactgggtctgggccgaggatatggtctttgtccccatggctgtgccctggagccctgagcaccagctgcagaggctgcaggtgacccggaagctgctggagatggaggagcaggccgccttcctcgtgggaagcgccacccctcgctacctgtacctggccagcaaccacagcaacaagtggggtcacccccggggctaccgcatccagatgctcagctttgctggagagccgctgccccaaaacagctccatggcgagaggcttcagctgggagaggtaccagctggctgtgacccagcggaaggaggaggagcccagtagcagcagcgttttcaatcagaatgacccttgggcccccactgtggatttcagtgacttcatcaacaatgagaccattgctggaaaggatttggtggcctgggtgacagctggttttctgcatatcccacatgcagaggacattcctaacacagtgactgtggggaacggcgtgggcttcttcctccgaccctataacttctttgacgaagacccctccttctactctgccgactccatctacttccgaggggaccaggatgctggggcctgcgaggtcaaccccctagcttgcctgccccaggctgctgcctgtgcccccgacctccctgccttctcccacgggggcttctctcacaactaggcggtcctgggatggggcatgtggccaagggctccagggccagggtgtgagggatggggagcagctgggcactgggccggcagcctggttccctctttcctgtgccaggactctctttcttccactaccctccctcgcatccgcctctgagccaggagcctcctgaccctgtgatgcctgacacaggggacactgaaccttgttgatgccagctgtactgagttctcatccacagaggccaggcatggcccagcctggagccgtggccgagggcttccctagatggttccctttgttgctgtctggctttcccgaatctttttaggccacctccaaggactctaaaagggggctattccctggagaccccagagtagggttgccagtcctgcaagtccatagctgagctggaaaggatgcttctgctcacattccctctcatccaggtcctttccttctcgtcttcctctctctcacctacttcctcctcctcctcctgttcctgccttctcttctatcctgcaatttctcccgaatcctgaggggatatccctatgtcccagcccctggtactcccccagccctcagttttcagtcaagttccgtctcctctccagccctatggaagtctcaaggtcacgggacccctaatcagagtggccaatccctgtgtgtcgttcccttgtgtctgttgcttattgggagtaggagttgctcctacccctgtcctggggctgggtgtgtttcaggacagctgcttctgtgcatttgtgtctgcctgcctcatgctctctatagaggaggatggtcatcgtgacagcagcagctcaagttagcatttcaagtgatttgggggtgcaatgataatgaagaatggccattttgtaccagggctctgtattctgcaacagcctgtttgggaggctggagtggaaacaaagggtgggcatcaaagatgagaagccaaagcccctacaactccagccacctcaaagatgagaagccaaagcccctacaactccagccacccagccaggaggggctgtccaatcacattcaggcatgcgaatgagctgggccctgggtgaggtgggggtctggcctagtggggaggggcctggcctgggtggggcagggcctggcctggtccaggcttgggctccattcccatcactgctgtccctcctgaggtctggattggggatggggacaaagaaatagcaagagatgagaaacaacagaaacttttttctctaaaggactggttaaatcaattctgatacagccttacaatacaatagtatgcagctaaaaaataattgtatgtctttatatactaatatgtaataatcttcaggtgaaaaaggcaagccacagaaatgtgtatagcgcacttcccatttgtgtttcagaaaggagtagaatataaacacataattgcttatgtatgcctattcagaataaatgggtaacactgattacttttgggaggggaaccagtaggttgaggacaggagagggaagggtcttaacacttacacccttttgtacattttgaattttgaaccatgtgactgtattacctattcaaaataaacaataaatgggcccaaacaggaaaaaaaaat

SEQ ID NO: 104416 - DNA, 4105 bp, Homo sapiens
  misc_feature (3745)..(3746): n is a, c, g, or t
tagccttcctgtgtccttcccacccttagtcccaggcatctgactaccgggaacctcagccagagtccgggagccccccaccccgtccaggagccaacagagcccccgtcttgctggcgtgagaatacattgctctcctttggttgaatcagctgtccctcttcgtgggaaaatgaaccagaagacaatcctcgtgctcctcattctggccgtcatcaccatctttgccttggtttgtgtcctgctggtgggcaggggtggagatgggggtgaacccagccagcttccccattgcccctctgtatctcccagtgcccagccttggacacaccctggccagagccagctgtttgcagacctgagccgagaggagctgacggctgtgatgcgctttctgacccagcggctggggccagggctggtggatgcagcccaggcccggccctcggacaactgtgtcttctcagtggagttgcagctgcctcccaaggctgcagccctggctcacttggacagggggagccccccacctgcccgggaggcactggccatcgtcttctttggcaggcaaccccagcccaacgtgagtgagctggtggtggggccactgcctcacccctcctacatgcgggacgtgactgtggagcgtcatggaggccccctgccctatcaccgacgccccgtgctgttccaagagtacctggacatagaccagatgatcttcaacagagagctgccccaggcttctgggcttctccaccactgttgcttctacaagcaccggggacggaacctggtgacaatgaccacggctccccgtggtctgcaatcaggggaccgggccacctggtttggcctctactacaacatctcgggcgctgggttcttcctgcaccacgtgggcttggagctgctagtgaaccacaaggcccttgaccctgcccgctggactatccagaaggtgttctatcaaggccgctactacgacagcctggcccagctggaggcccagtttgaggccggcctggtgaatgtggtgctgatcccagacaatggcacaggtgggtcctggtccctgaagtcccctgtgcccccgggtccagctccccctctacagttctatccccaaggcccccgcttcagtgtccagggaagtcgagtggcctcctcactgtggactttctcctttggcctcggagcattcagtggcccaaggatctttgacgttcgcttccaaggagaaagactagtttatgagataagcctccaagaggccttggccatctatggtggaaattccccagcagcaatgacgacccgctatgtggatggaggctttggcatgggcaagtacaccacgcccctgacccgtggggtggactgcccctacttggccacctacgtggactggcacttccttttggagtcccaggcccccaagacaatacgtgatgccttttgtgtgtttgaacagaaccagggcctccccctgcggcgacaccactcagatctctactcgcactactttgggggtcttgcggaaacggtgctggtcgtcagatctatgtccaccttgctcaactatgactatgtgtgggatacggtcttccaccccagtggggccatagaaatacgattctatgccacgggctacatcagctcggcattcctctttggtgctactgggaagtacgggaaccaagtgtcagagcacaccctgggcacggtccacacccacagcgcccacttcaaggtggatctggatgtagcaggactggagaactgggtctgggccgaggatatggtctttgtccccatggctgtgccctggagccctgagcaccagctgcagaggctgcaggtgacccggaagctgctggagatggaggagcaggccgccttcctcgtgggaagcgccacccctcgctacctgtacctggccagcaaccacagcaacaagtggggtcacccccggggctaccgcatccagatgctcagctttgctggagagccgctgccccaaaacagctccatggcgagaggcttcagctgggagaggtaccagctggctgtgacccagcggaaggaggaggagcccagtagcagcagcgttttcaatcagaatgacccttgggcccccactgtggatttcagtgacttcatcaacaatgagaccattgctggaaaggatttggtggcctgggtgacagctggttttctgcatatcccacatgcagaggacattcctaacacagtgactgtggggaacggcgtgggcttcttcctccgaccctataacttctttgacgaagacccctccttctactctgccgactccatctacttccgaggggaccaggatgctggggcctgcgaggtcaaccccctagcttgcctgccccaggctgctgcctgtgcccccgacctccctgccttctcccacgggggcttctctcacaactaggcggtcctgggatggggcatgtggccaagggctccagggccagggtgtgagggatggggagcagctgggcactgggccggcagcctggttccctctttcctgtgccaggactctctttcttccactaccctccctcgcatccgcctctgagccaggagcctcctgaccctgtgatgcctgacacaggggacactgaaccttgttgatgccagctgtactgagttctcatccacagaggccaggcatggcccagcctggagccgtggccgagggcttccctagatggttccctttgttgctgtctggctttcccgaatctttttaggccacctccaaggactctaaaagggggctattccctggagaccccagagtagggttgccagtcctgcaagtccatagctgagctggaaaggatgcttctgctcacattccctctcatccaggtcctttccttctcgtcttcctctctctcacctacttcctcctcctcctcctgttcctgccttctcttctatcctgcaatttctcccgaatcctgaggggatatccctatgtcccagcccctggtactcccccagccctcagttttcagtcaagttccgtctcctctccagccctatggaagtctcaaggtcacgggacccctaatcagagtggccaatccctgtgtgtcgttcccttgtgtctgttgcttattgggagtaggagttgctcctacccctgtcctggggctgggtgtgtttcaggacagctgcttctgtgcatttgtgtctgcctgcctcatgctctctatagaggaggatggtcatcgtgacagcagcagctcaagttagcatttcaagtgatttgggggtgcaatgataatgaagaatggccattttgtaccagggctctgtattctgcaacagcctgtttgggaggctggagtggaaacaaagggtgggcatcaaagatgagaagccaaagcccctacaactccagccacccagccaggaggggctgtccaatcacattcaggcatgcgaatgagctgggccctgggtgaggtgggggtctggcctagtggggaggggcctggcctgggtggggcagggcctggcctggtccaggcttgggctccattcccatcactgctgtccctcctgaggtctggattggggatggggacaaagaaatagcaagagatgagaaacaacagaaacttttttctctaaaggactggttaaatcaattctgatacagccttacaatacaaccgaaggcgcccctttttaccannaattacccccaaaaaatttagaaggggggtagtatgcagctaaaaaataattgtatgtctttatatactaatatgtaataatcttcaggtgaaaaaggcaagccacagaaatgtgtatagcgcacttcccatttgtgtttcagaaaggagtagaatataaacacataattgcttatgtatgcctattcagaataaatgggtaacactgattacttttgggaggggaaccagtaggttgaggacaggagagggaagggtcttaacacttacacccttttgtacattttgaattttgaaccatgtgactgtattacctattcaaaataaacaataaatgggcccaaacaggaaaaaaaaat

SEQ ID NO: 104417 - DNA, 157 bp, Homo sapiens
atggaggcctgaccagtgcctccctaggtaccagctggctgtgacccagcggaaggaggaggagcccagtagcagcagcgttttcaatcagaatgacccttgggcccccactgtggatttcagtgacttcatcaacaatgagaccattgctggaaag

SEQ ID NO: 104418 - DNA, 2530 bp, Homo sapiens
ccggaagttgcctaggccatgctcctctcacaggacaggccagtcagtggtttgtctgtctgcgtggaaagcaagagggtcaacagctttggctaaaggattggaggtatcctggggagagggaagagaaggaggggcacactcagttctgggctgctctttggcccccactctgaagccagatgggggcagagtccagaggggccagggcagttgcctgacaggccctcccctatcccaccctgagcaggactggagaactgggtctgggccgaggatatggtctttgtccccatggctgtgccctggagccctgagcaccagctgcagaggctgcaggtgacccggaagctgctggagatggaggagcaggccgccttcctcgtgggaagcgccacccctcgctacctgtacctggccagcaaccacagcaacaagtggggtcacccccggggctaccgcatccagatgctcagctttgctggagagccgctgccccaaaacagctccatggcgagaggcttcagctgggagaggtaccagctggctgtgacccagcggaaggaggaggagcccagtagcagcagcgttttcaatcagaatgacccttgggcccccactgtggatttcagtgacttcatcaacaatgagaccattgctggaaaggatttggtggcctgggtgacagctggttttctgcatatcccacatgcagaggacattcctaacacagtgactgtggggaacggcgtgggcttcttcctccgaccctataacttctttgacgaagacccctccttctactctgccgactccatctacttccgaggggaccaggatgctggggcctgcgaggtcaaccccctagcttgcctgccccaggctgctgcctgtgcccccgacctccctgccttctcccacgggggcttctctcacaactaggcggtcctgggatggggcatgtggccaagggctccagggccagggtgtgagggatggggagcagctgggcactgggccggcagcctggttccctctttcctgtgccaggactctctttcttccactaccctccctcgcatccgcctctgagccaggagcctcctgaccctgtgatgcctgacacaggggacactgaaccttgttgatgccagctgtactgagttctcatccacagaggccaggcatggcccagcctggagccgtggccgagggcttccctagatggttccctttgttgctgtctggctttcccgaatctttttaggccacctccaaggactctaaaagggggctattccctggagaccccagagtagggttgccagtcctgcaagtccatagctgagctggaaaggatgcttctgctcacattccctctcatccaggtcctttccttctcgtcttcctctctctcacctacttcctcctcctcctcctgttcctgccttctcttctatcctgcaatttctcccgaatcctgaggggatatccctatgtcccagcccctggtactcccccagccctcagttttcagtcaagttccgtctcctctccagccctatggaagtctcaaggtcacgggacccctaatcagagtggccaatccctgtgtgtcgttcccttgtgtctgttgcttattgggagtaggagttgctcctacccctgtcctggggctgggtgtgtttcaggacagctgcttctgtgcatttgtgtctgcctgcctcatgctctctatagaggaggatggtcatcgtgacagcagcagctcaagttagcatttcaagtgatttgggggtgcaatgataatgaagaatggccattttgtaccagggctctgtattctgcaacagcctgtttgggaggctggagtggaaacaaagggtgggcatcaaagatgagaagccaaagcccctacaactccagccacccagccaggaggggctgtccaatcacattcaggcatgcgaatgagctgggccctgggtgaggtgggggtctggcctagtggggaggggcctggcctgggtggggcagggcctggcctggtccaggcttgggctccattcccatcactgctgtccctcctgaggtctggattggggatggggacaaagaaatagcaagagatgagaaacaacagaaacttttttctctaaaggactggttaaatcaattctgatacagccttacaatacaatagtatgcagctaaaaaataattgtatgtctttatatactaatatgtaataatcttcaggtgaaaaaggcaagccacagaaatgtgtatagcgcacttcccatttgtgtttcagaaaggagtagaatataaacacataattgcttatgtatgcctattcagaataaatgggtaacactgattacttttgggaggggaaccagtaggttgaggacaggagagggaagggtcttaacacttacacccttttgtacattttgaattttgaaccatgtgactgtattacctattcaaaataaacaataaatgggcccaaacaggaaaaaaaaat

SEQ ID NO: 104419 - DNA, 2396 bp, Homo sapiens
tagccttcctgtgtccttcccacccttagtcccaggcatctgactaccgggaacctcagccagagtccgggagccccccaccccgtccaggagccaacagagcccccgtcttgctggcgtgagaatacattgctctcctttggttgaatcagctgtccccatggctgtgccctggagccctgagcaccagctgcagaggctgcaggtgacccggaagctgctggagatggaggagcaggccgccttcctcgtgggaagcgccacccctcgctacctgtacctggccagcaaccacagcaacaagtggggtcacccccggggctaccgcatccagatgctcagctttgctggagagccgctgccccaaaacagctccatggcgagaggcttcagctgggagaggtaccagctggctgtgacccagcggaaggaggaggagcccagtagcagcagcgttttcaatcagaatgacccttgggcccccactgtggatttcagtgacttcatcaacaatgagaccattgctggaaaggatttggtggcctgggtgacagctggttttctgcatatcccacatgcagaggacattcctaacacagtgactgtggggaacggcgtgggcttcttcctccgaccctataacttctttgacgaagacccctccttctactctgccgactccatctacttccgaggggaccaggatgctggggcctgcgaggtcaaccccctagcttgcctgccccaggctgctgcctgtgcccccgacctccctgccttctcccacgggggcttctctcacaactaggcggtcctgggatggggcatgtggccaagggctccagggccagggtgtgagggatggggagcagctgggcactgggccggcagcctggttccctctttcctgtgccaggactctctttcttccactaccctccctcgcatccgcctctgagccaggagcctcctgaccctgtgatgcctgacacaggggacactgaaccttgttgatgccagctgtactgagttctcatccacagaggccaggcatggcccagcctggagccgtggccgagggcttccctagatggttccctttgttgctgtctggctttcccgaatctttttaggccacctccaaggactctaaaagggggctattccctggagaccccagagtagggttgccagtcctgcaagtccatagctgagctggaaaggatgcttctgctcacattccctctcatccaggtcctttccttctcgtcttcctctctctcacctacttcctcctcctcctcctgttcctgccttctcttctatcctgcaatttctcccgaatcctgaggggatatccctatgtcccagcccctggtactcccccagccctcagttttcagtcaagttccgtctcctctccagccctatggaagtctcaaggtcacgggacccctaatcagagtggccaatccctgtgtgtcgttcccttgtgtctgttgcttattgggagtaggagttgctcctacccctgtcctggggctgggtgtgtttcaggacagctgcttctgtgcatttgtgtctgcctgcctcatgctctctatagaggaggatggtcatcgtgacagcagcagctcaagttagcatttcaagtgatttgggggtgcaatgataatgaagaatggccattttgtaccagggctctgtattctgcaacagcctgtttgggaggctggagtggaaacaaagggtgggcatcaaagatgagaagccaaagcccctacaactccagccacccagccaggaggggctgtccaatcacattcaggcatgcgaatgagctgggccctgggtgaggtgggggtctggcctagtggggaggggcctggcctgggtggggcagggcctggcctggtccaggcttgggctccattcccatcactgctgtccctcctgaggtctggattggggatggggacaaagaaatagcaagagatgagaaacaacagaaacttttttctctaaaggactggttaaatcaattctgatacagccttacaatacaatagtatgcagctaaaaaataattgtatgtctttatatactaatatgtaataatcttcaggtgaaaaaggcaagccacagaaatgtgtatagcgcacttcccatttgtgtttcagaaaggagtagaatataaacacataattgcttatgtatgcctattcagaataaatgggtaacactgattacttttgggaggggaaccagtaggttgaggacaggagagggaagggtcttaacacttacacccttttgtacattttgaattttgaaccatgtgactgtattacctattcaaaataaacaataaatgggcccaaacaggaaaaaaaaat

SEQ ID NO: 104420 - DNA, 2104 bp, Homo sapiens
tagccttcctgtgtccttcccacccttagtcccaggcatctgactaccgggaacctcagccagagtccgggagccccccaccccgtccaggagccaacagagcccccgtcttgctggcgtgagaatacattgctctcctttggttgaatcagctgtccctcttcgtgggaaaatgaaccagaagacaatcctcgtgctcctcattctggccgtcatcaccatctttgccttggtttgtgtcctgctggtgggcaggggtggagatgggggtgaacccagccagcttccccattgcccctctgtatctcccagtgcccagccttggacacaccctggccagagccagctgtttgcagacctgagccgagaggagctgacggctgtgatgcgctttctgacccagcggctggggccagggctggtggatgcagcccaggcccggccctcggacaactgtgtcttctcagtggagttgcagctgcctcccaaggctgcagccctggctcacttggacagggggagccccccacctgcccgggaggcactggccatcgtcttctttggcaggcaaccccagcccaacgtgagtgagctggtggtggggccactgcctcacccctcctacatgcgggacgtgactgtggagcgtcatggaggccccctgccctatcaccgacgccccgtgctgttccaagagtacctggacatagaccagatgatcttcaacagagagctgccccaggcttctgggcttctccaccactgttgcttctacaagcaccggggacggaacctggtgacaatgaccacggctccccgtggtctgcaatcaggggaccgggccacctggtttggcctctactacaacatctcgggcgctgggttcttcctgcaccacgtgggcttggagctgctagtgaaccacaaggcccttgaccctgcccgctggactatccagaaggtgttctatcaaggccgctactacgacagcctggcccagctggaggcccagtttgaggccggcctggtgaatgtggtgctgatcccagacaatggcacaggtgggtcctggtccctgaagtcccctgtgcccccgggtccagctccccctctacagttctatccccaaggcccccgcttcagtgtccagggaagtcgagtggcctcctcactgtggactttctcctttggcctcggagcattcagtggcccaaggatctttgacgttcgcttccaaggagaaagactagtttatgagataagcctccaagaggccttggccatctatggtggaaattccccagcagcaatgacgacccgctatgtggatggaggctttggcatgggcaagtacaccacgcccctgacccgtggggtggactgcccctacttggccacctacgtggactggcacttccttttggagtcccaggcccccaagacaatacgtgatgccttttgtgtgtttgaacagaaccagggcctccccctgcggcgacaccactcagatctctactcgcactactttgggggtcttgcggaaacggtgctggtcgtcagatctatgtccaccttgctcaactatgactatgtgtgggatacggtcttccaccccagtggggccatagaaatacgattctatgccacgggctacatcagctcggcattcctctttggtgctactgggaagtacgggaaccaagtgtcagagcacaccctgggcacggtccacacccacagcgcccacttcaaggtggatctggatgtagcaggtaagacattttggtggggagaaggcttctggaagaagggctgaaaagttgtttccattagctttgggttttatgtagattatcccagaaaggaagacgtggatttttgtacttccccttttgctggatgggagagagttggctgctgagttttatttggatcttagctcactggctgggtgcaaagctgcagccttcctctacgtgacctcatccaaagatcttgggaaatggccgagctcagggaggaggcaggatttgggctaacagtgtccccattgccctcttctctcccttgtacttatatgggctctgctgctgggagcagcctt

SEQ ID NO: 104421 - DNA, 414 bp, Homo sapiens
cggaggcggcgttcagaaatagggcgctggctttgccaggagcggctcctctccaagcctggcggtcactgccctgtgtccccttttgggcctctcctggtcctcctggttggattaggaggcctctcagcccggagtctgggtcgccgaagtacaggccccttcactgaagcgacccacggcgcaggggtttctggaagccatcgccaggctccgagtgttcagatgcagctgccaggctcaggacgcagagaactggcttccagctcgcaggagcgcctgtccgtggtgggtagggtcgcaggcgtggggtgtgcaggagcagtgggacagcactgaaacgcagtcggtaaggcgtagcggctaccctctggagaggaaaaccatgacagggcggggcttggggcgcgggcg

SEQ ID NO: 104422 - DNA, 1786 bp, Homo sapiens
cggaggcggcgttcagaaatagggcgctggctttgccaggagcggctcctctccaagcctggcggtcactgccctgtgtccccttttgggcctctcctggtcctcctggttggattaggaggcctctcagcccggagtctgggtcgccgaagtacaggccccttcactgaagcgacccacggcgcaggggtttctggaagccatcgccaggctccgagtgttcagatgcagctgccaggctcaggacgcagagaactggcttccagctcgcaggagcgcctgtccgtggtgggtagggtcgcaggcgtggggtgtgcaggagcagtgggacagcactgaaacgcagtcggaagagataccacggtgtgcaggcacagggaaaagaccacgtgaggacacagagagaagacggccgtctgcaagccaaggagagaggcctcaggtgaaaccaaacctgcaggcaccttgatcttggacttccagcctccagaagcttgagaaaagaaatttctgttgtttaagacacccattctgtggtatttgttctggcagccctaacaaactaatatagggatctaaagattccttgtcttcattttgagtaagagactataaactcagaactgtggagatctagttaggtattgtacagctagcctcattctgtcttaaactccaggtaaaagagaaaaatatggagacagcccctgactttggagaacttgcagttttgtggaggtgaaaggaggcagccacaagaaaaacccctgacatcaattcaaaactataaataacaaagactaacttgttctatgcacaacaggtactacagcactgtccaacatggggacatgtgagtggcctgaagcagcacaagaactgggcaataaacttgagatgaacctcaaagcatcaatattattcatgactaaactgggttctaagaatttctatttttactctcagtgttcagtagaggtcattaaaaaaaaatctagcaatttttttttctaaaatgaatatgtaataagaatgaaaaacaaaaagcactataatgtttttaattaatgaaatgcctttacgaaccaaggtgccatcttggagaagctaggcattatgaggagctatcaggagcacatttgctaacagcttggcatgagcaggattttcttgaccaactggcaagatggggctgctcagctcctgctggcagatttttatggagcatagttttacaaattcagcctacaactctgatacgttccaatgtattttaaacatctattcagttgcaactctaatcccaggaacctgtggctaacagaaggcagatttaactgactagcagctgtgggattttcaaagtctaaactgaaatgaacatgcgaaacagttggactaccccaaaagctgaattacaattccagcactcaccagctctgaaacctcacttggttacctaacgcctctgtgcctcagttccccagctataaaatggaaaaggcaacaataccaaccttgtagattatgttttggattaaatgaggcaacacatacacagcacttagaacgtgcaaggcacaatggaagcatgcagtgaacatgacttgtaatgatgctgactgtcataactctcatccatagggatgctgcctctgcttgtcacccttgacctatatattttcaggcagtcctcacccagtccccatttgtgtgttctagatagaaaaggccccatactatgaaatgactactgtccttctgcatgaagcctggtgaacctgat

SEQ ID NO: 104423 - DNA, 212 bp, Homo sapiens
gtgatgcatgcagctggagatgttgaaggtcagatgcaggtggtcaagcattttagtttcctgtggctactgtaataactaaagtggctgaaaacaacaggaattcattatcttacagttctggagacaagaagtccaaaatcactttcactgaactagaattgaggtggtggcaggaccttggtccttctgaaggctctgggggtgaatct

SEQ ID NO: 104424 - DNA, 391 bp, Homo sapiens
atacggctaataggagtataacttagctactttggagaacaatccagcaatatcctgtgaaaagttgagcttttgctaaactatgactcagaaaatttaatactaagactattacaataaacttgcacctgtgtatgaggtggcaaatactatttatattagtagcactgttcataatagaataacaataacaaaaatattgcaaaatatgatcatcagtacattgatatgtaaattatgcaatagtcacaacaatataaatcatagactataattttggaatattcacaaaacagagtgtgatatagcagtaaatgtacatgacttgataagctgattccaaaaatttatatatgtgagaggacttcaaaaattttgtggaaaaatataa

SEQ ID NO: 104425 - DNA, 601 bp, Homo sapiens
gaaaaaggagttgtgtgattgtcttgagtttgtaagtggaactacttttttcatcgagcaccgtttttacttgaaataacaaagtatgaatatgaatgcagatttggccatttggcagatttttatttatttatttgagacaaggtcttgctgtgtcacccagactggggtgcagctcactgcagcctttacctcctgggctcaagtgatcctcctgcctcagcctccttagttgctgggaccacaggtgtgcagcaccatgctcagctaatttttaaattttttgtggagacaaggtctgaccatgttgcccaggctggtctcgaactcctgggctcaatagatcctctgtccttggtctcccaaagtgctggctcagtcattatgttctttactgccatccattgcagtataaaaagaataacagttttccctcagaatattcttggtgaaacagtaacaattattaattttattaaatcttggctcttgagcaaatgtcattttaatattctgtgtgataaaatagcaatgtcacataaagtgcttttacatacttaagtactatggttgtctgaagaaaaaggagttgtgtgattgt

SEQ ID NO: 104426 - DNA, 353 bp, Homo sapiens
ggggaatgaaaaaaagcctttcagaggcttgctgcctagtgaggagtaaagataagtcaatgattataattcagtatagactcgttacaagtagtaaaggaggcacaaaacacactggaatcaagggaacagggagagagagtaattgcaccaaagatgacacggtgtctggcaaaacctcatatgctatatctgttggagaacatgctaaggtacctggtagagggtccttgaattttggaataaggcagatactctagatttgtatcataactctgccttactaacttttccaacttgggtctagttagttaataggctcataatgtgaaacagtttcttatagggttgtt

SEQ ID NO: 104427 - DNA, 580 bp, Homo sapiens
caaaattcagttttaaaattttttataatttaaggatatagtattaatagcttcatgtcagtttaaaggaaatatattatttgcagttgttcaaaattttatctgtatttatacctatattttacttcagggttcccatcttttccacttttatttttttcccagaaaataaggtgaatttctaaaattagaaatagcagttaagtagttagtgcctgtgtcctgtagttctaggtgtttatgtgtaatagagtagaaattatggaaagatattttcaagctggtaagttggtgagcggccacagttaaaagctgaagggttgaatgtttcagcatgagaaatagtggcgggaggatttctaacttactcattgattgtgttcagttctgaaaaagttttcttgatgtcccattgcagatttgaatgtggtcttataataccccaaatgtatcatcacttttatttctctgagtaaagaaaatctggtgtcgagagtttgcttttgctgattgagcagtttatacttttttctcaagaaattgtaataccttttatcatgatgttcaggtctgaatgata

SEQ ID NO: 104428 - DNA, 388 bp, Homo sapiens
ggcttgacaaaacctaaccaatcacattgcaaggagagatagtacagaaagggaggaaggggcatgtggggggtgttgtcacaaaaattgcaggaatacaaccattattggccctattagatggacttctctcaagccacagttaggttatacaaacaggtgagccagtagtcataaagcatttacaacaaagtcaagctctactgagctttgcccatctgtttttctgtagcccattcattaatcatattccttatgagtcacccgattcctttgccagaaccacagttatgtttcaagaatattagaactcacagccaggcagacagacgctctgggcttgacattcatctttcaaagtgtcagtgtctttataaagcgaccacca

SEQ ID NO: 104429 - DNA, 104 bp, Homo sapiens
aaatctttgaagacagttccttcaaccctcccctcctcctcccacaaaattatattgaggtggaacaggaggggaaagcagtggagaagaacacagcgctaaag

SEQ ID NO: 104430 - DNA, 443 bp, Homo sapiens
ttcctctctacaaaacatctctcctgagcatcttttgttgttgttgttgttttttgacagtctcattctgtcactcaagctggagtgcagaggcaccatcttggctcactgcaaactccatctcccaggttcaaaggattctcatgcctcagcctcccaagtggctgagactacaggcatgcaccactatgcttggctaatttttgcatttttagtagagacggggtttcagcatgttggccaggctggtctcaaactcatgacctcaagtgatccacccacctaggcctcacaaagggctgggattataggtgtgagccaccatgcccggccctgaacatctttaacagatggtaaagaccttcttctgcaccttattgtgaaattggaaagagaaataggatgcctttgtcagaggatggtatgagtaataaaagccacaa

SEQ ID NO: 104431 - DNA, 150 bp, Homo sapiens
acatgtcaatatgtaccagcacttaaaagtactcaacgcatttaccaggtgaagtgtaatttacaatgagctgagaaacatcttcaagtgtcttaggagaaacaagatcaaagaattccttctcctctctttcctttcctctctcttttt

SEQ ID NO: 104432 - DNA, 390 bp, Homo sapiens
ggaaaacagcacttaactacctcacataatatagatgagctcattttcattgcttctcctttgtgtaatacctcctgtctaaattaactcctgcttatacaaaacagggcaaagcttttattacaattaaaatattttaaaaactgaacagataggaagtccataccttatataaattttgacagaaaatggaaattttcctctttccccctagtgttttttttgaatgggttgctttggagggggagaggaggaggccaaatcatcatcatcatgatattaaattgcatatgcaataggttattattaatgcagatactttatgctagatgtcttcatgcttgccaaaaccaattctgaacattttgatttatttctgaccagatataa

SEQ ID NO: 104433 - DNA, 360 bp, Homo sapiens
ttttttgagatggagtttcactcttgttgcccaagctggagtgcaatggcgcgatcttggctgaccgcaacttacacctcccaggttcaagtgattctgctgcctcagcctcctgagtaactgggatcacaggtatgtaccaccacgcccagctaattttgtatttttagtagagacggggtttctccatgttggtcaggctgatctggaactcccgacctcaggtgatctgccaacctcggcctcccaaagtgctgggattacaggcgtgagccaccgtgcctaggcgactcatttttaaaaatgagtttcattactgacaagaataaagatgaatatttttacctggaacacagacta

SEQ ID NO: 104434 - DNA, 401 bp, Homo sapiens
aaccagatggttctgatagaactgatccagagagtggcatttaaaaactgctgcctcatgggatatgtaatctcctcaatctctttttaccctttttaggagaataaaaatcaagacactttctacaatgtgtatgccaagtatggcctgaccggcacactccagaacagacccactctcctcccctacacgtgaaacctgagatgccatcccgtcaactgtaagagtggggaaaatggcgcccaagcacacagctagagattcagcgtggccactcccctcagactttgtgcctctagcttttttcccccatgctagtcttcacgtgaagtgcatctctcgaaggcaattaaaattacacagtgccctgatttcagtcttcctgtaaccatgctgaatat

SEQ ID NO: 104435 - DNA, 249 bp, Homo sapiens
ggaattgtgggagcttcaattcaagatgaaatcagagtggggacacagccaaagcatatcaaacagcttgtttgtttatagagaattaactgcatatcaaatatgtgagtcagacttaaagtcatagagaactgaccacagcaacccctgcatgaggctcagatttggaaagatctcttgttcctggcctcctcatatcatatatagttactttatcattacttttagctctgtggcttgcactaagtc

SEQ ID NO: 104436 - DNA, 1047 bp, Homo sapiens
taaactactactaactaatctacggacattcaaattttgccagttttcccgatgatgtcctttgtctggtccagggtcccatattgcattttgttgtggtgtttccttcatctctgtcagcctgtgacagtttcttggtctttatctttcatgaccttgacactttggaagagtccaggccagttattttatagaatattccccagttttagtttgtttaatgtttttacatgatatgattgaggatctgcatttttgccaagacaaccacagaagtgatactgtgctattcttagtgcctcctagcggagggtggtggtaactttttgttttggttttttttttttttttgagacggagtcccgctctgtcacccaggatggagtgcagtggcgcaatctcggctcactgcaacctctgcctcctgggttcaaagtgattctcctgcctcagcctcctgagtagctgggattgcaggtgcccaccaccacacccagctaatttttgtatttttagtagagacaggttttcgccatgttggccaggctggtcttgaactcctgacctcaggtgatccacccacctcggcctcccaaagtgctgagattacaggcatgagccaccacacctagactaggtggtggtaactttgatcacatggctaaggtggtgtgtgccaggtttctccactgtaaaattaggaattttccctttgaaattaacaagaatcttccactttgaagctgtgtgaatgtcttattcttaaaattttgcctactgattttcatttccatcatcaatgattcttgcttataacaggtattaatgttatgcttgcctaatggtgactttgtttcattattttacctgtatttattaattggtattctactataaggaagagctgtcccttttccccatttatttatttgataatttatatcagtatgaatgagtggatatctgttttattctacaggctacaatctaatgctaacagtttatttggttgctcaaattggctcagatttggccagtgagaactca

SEQ ID NO: 104437 - DNA, 616 bp, Homo sapiens
tgagcaccataagatggtgaaaaataaataaaattttatccttgtaaaagattgatggccaggcatggtggtggcccacacctgtaatcctagcactttggaaggccaaggcaggctggtcttgaactcctgacctcaggtgatccacccacctcggcctcccaaagtgctgagattacaggcatgagccaccacacctagactaggtggtggtaactttgatcacatggctaaggtggtgtgtgccaggtttctccactgtaaaattaggaattttccctttgaaattaacaagaatcttccactttgaagctgtgtgaatgtcttattcttaaaattttgcctactgattttcatttccatcatcaatgattcttgcttataacaggtattaatgttatgcttgcctaatggtgactttgtttcattattttacctgtatttattaattggtattctactataaggaagagctgtcccttttccccatttatttatttgataatttatatcagtatgaatgagtggatatctgttttattctacaggctacaatctaatgctaacagtttatttggttgctcaaattggctcagatttggccagtgagaactca

SEQ ID NO: 104438 - DNA, 349 bp, Homo sapiens
cttggctaggaattctaggcttttagattctttgggcaatggctactaaatgttcataatgttgctcagttgcaaaaacaagacattcaaactatagccagggagataagtagtcacgaactcaaggcctaaattctgctgatggagccgatgagaattgggtgctaaggcaaagagagttgccaatattatattcttcggggttttttgtttttattcgcattttggaaaaggaaaatattagcattcctctgacttaatattgagaagacattgggcactctttttcctcccacacttgtcttctttcactaggtgacaagggaagaggtagcatgaggtggtggtc

SEQ ID NO: 104439 - DNA, 348 bp, Homo sapiens
aaacatgtgacttcagagaattatcccctgtgagcctgagtttccacccctgaaaaaggaaggataggccgggtgcagtggctcaggcctgtaatcccagcactttgggaggccgaggtgggcagatcacctgaggtcaggtgttcgagaccagcctggccaacatggtgaaaccccgtctttactaaaatacaaaaattagctgggtgtggtgatgcgagcctgtaatcccagctactcaggaggctgcggcaggagaatcgcttgaacccgggaggcagaagttgcagtgagccaagattgcaccattgcactccagcctgggcgacagagcaagactccatctca

SEQ ID NO: 104440 - DNA, 724 bp, Homo sapiens
gttttttacttcttcagtttttcaagataattttgctgtttttgctttttatttatttgcaactagaaattgcatgtgccagttacttaatttaatacatctaatgggagattcaaagcaaaccattaaaactaccatataaactcaaatgaaattttatgacattctaatgtacatactcgccaagaaatgctacaaggagcctctctgcaaatgcctgatggggcactctgagaattaaacaggaaatggacaggaaaagaggcaaagcatagaatagcctctgtggtatacacacagacaatgtaaaatccaagaaatataaggtccaaggaggaattggttattgaagtagagaacctcatcatgagatttgagaatagctttagagttactcttgggatagtgtctcatggccctgtgagggaactctacaaattttatccattttgctgggcagttttaagagctactttttgtctgtactttccttaattttcatattatttctagcttttacttcatcttatgaaagattaacttagaggttagaatgcttacatttgcaaatagcctgaggaataaatatgtgctttatcaaagtggaacttctgattttctgtaatattaggatggacatgtgtctggcttatccttcctatctaggaaactggtgtcattaggaaatacgttaacataagatccctgactataaagtaagact

SEQ ID NO: 104441 - DNA, 1104 bp, Homo sapiens
ttcagcaacagagccgtgtattggaagcaaagccccaaaacacgataagagtagaggagcagacaacccagttgcagatttgaagaagcatgtggaattccttgtggcggagaaggaaagattatggaaagaaagtaaacaggtaaaggctgaaaaggccagacttctaaaaggtccagtagaaaaggagctggatgtgggtgctgattttgtggaaaagtcagagttacggagctcgcctctgcattcagaaactgctataccctcttcagccttgcagaggtttgcagcagatgccaggaaagccaagtacattccaatacccaatcttttccctcagattttccatctccagagcttccctttatggagctttctgaggatattctgaaaggatttatgagtaactaaaatggaaggccatagaagaagggagaagaggaaataatactaagtcatacagttaatccagcaacaaaaaatgaaaagggaaagccacaggcaagggtaatcctggaaatgcctcgtcatctggtgtactgtaggagaagacgcattgccaggatgtggggaacagtcgctgtgaagcgtgtcacatacctgattcactgacttgagctgatgatgccgacctggcagacactaaactcgtggagggtcagtttctcttgacaccaaccaaatggctgcctgaaagaattttttcaagcaacaattatttttcttatcttcagggttaaaatgtataaaagtatgttatgtataattaatctgttatgtcataagtgactcatcaaccctaaatttattatggcagcctgaggggctgcttcgtatttgaaacatgctttgtctcaggcgttgacgtatgtatgcatttggttactggcgttttgtataaggtgtgagacacacctttccagatgaaaccatatgtgccgcactgtgcactactcataacggtgataacctcaagaccatcaggagaaatatttaaatttccgtgttatgaagaaagaaaccaaattattagttatgctttttaacacaaattaccagtttacataataaatttagggttgatgaggatctgcagatgctccg

SEQ ID NO: 104442 - DNA, 1228 bp, Homo sapiens
ttcagcaacagagccgtgtattggaagcaaagccccaaaacacgataagagtagaggagcagacaacccagttgcagatttgaagaagcatgtggaattccttgtggcggagaaggaaagattatggaaagaaagtaaacaggtaaaggctgaaaaggccagacttctaaaaggtccagtagaaaaggagctggatgtgggtgctgattttgtggaaaagtcagagttacggagctcgcctctgcattcagaaactgctataccctcttcagccttgcagaggtttgcagcagatgccaggaaagccaagtacattccaatacccaatcttttccctcagattttccatctccagagcttccctttatggagctttctgaggatattctgaaaggatttatgagtaactaaaatggaaggccatagaagaagggagaagaggaaataatactaagtcatacagttaatccagcaacaaaaaatgaaaagggaaagccacaggcaagggtaatcctggaaatgcctcgtcatctggtgtactgtaggagaagacgcattgccaggatgtggggaacagtcgctgtgaagcgtgtcacatacctgattcactgacttgagctgatgatgccgacctggcagacactaaactcgtggagggtcagtttctcttgacaccaaccaaatggctgcctgaaagaattttttcaagcaacaattatttttcttatcttcagggttaaaatgtataaaagtatgttatgtataattaatctgttatgtcataagtgactcatcaaccctaaatttattatggcagcctgaggggctgcttcgtatttgaaacatgctttgtctcaggcgttgacgtatgtatgcatttggttactggcgttttgtataaggtgtgagacacacctttccagatgaaaccatatgtgccgcactgtgcactactcataacggtgataacctcaagaccatcaggagaaatatttaaatttccgtgttatgaagaaagaaaccaaattattagttatgctttttaacacaaattaccagtttacataataaatgagggtgcattttaagttctaactttattgtataaggcatcatttgaaagtaccaaggaagtcttctttgtttttagtgatccgtgagtggaaggaattctagttggcagtatttgattgtaagaaatcaataaagtaattgtgtttaaaaaaaa

SEQ ID NO: 104443 - DNA, 337 bp, Homo sapiens
caatcctcaggtaatctacaaattgacccttgttagagtatgtcataggatcttgctgctttaactgacctgggtttaggttcatggagacggaggagaattgttctatgatagatttgtagtggatggtggacagagggtgatggtgtgaggttgaaggtttccagaaatcaaggtgatttgagggctctatggggaccttctgcctgcatgagggggtgcagataagcacgtataacctttttcgtgtttcaggacccttcagagatcttacctccttccccaatttttcacttcaacttgttggggaagacccccaggggttggtcgtattacc

SEQ ID NO: 104444 - DNA, 427 bp, Homo sapiens
cctatctttctaataaagtacttttggttaatgtggaatatctatacccaataatgtacttcaaaaagtatgtgacatgggtaatttgttgcctataaggtctggttctgtaatagcatattgctttgatttttaagtaattaatcaatggctaggtgtggtggctcacacctgcaatcccagcactttggaaggccaaggtgggaggatcacttgagcccaggagttggagaccagtatgggcaacataatgagacctcatctctgccaaaaattaaaaaaattagctggatgtggtggtgcatccctgtagtcccagctactcaggaggctgaggtgggaaaattgcttgagcctgggatgtggaggctgcagtgagccatgatggcaccacagcactccagcctgagcaacagagagaccctgt

SEQ ID NO: 104445 - DNA, 355 bp, Homo sapiens
gttgaggaagaaagaatagtgtgtgcagaggcacagaacagaagcatgaggaacgcattctcaaaactggatttcccaaagttcaaacccttcctttgaaaaggatatgttgaaatgatcctagagatgagattcctaggggatgtgataggagatgaggctggaaaggtaggttagagttcgagttctagaaccttgaatgatacagggtatattgtgtaggtagggaggacacgagcagccaggcacagtgactcatgcttataaccacagtgctttggaaggctgaggcttgaggccaaaagtgcaagaccagcctggtcaacatagtgagaccccatcactacaaaaaaaa

SEQ ID NO: 104446 - DNA, 169 bp, Homo sapiens
cagggcccccaaattctctacaacccataccctgggccttctgttgtcatagaagtcagagttgggggactcttagagtggtacctgatctggcttcctcccatgggaagaaaaggggactgaagctcagaaatggtcagtagtgtgcccaaggtcacacagcacgcag

SEQ ID NO: 104447 - DNA, 630 bp, Homo sapiens
gttgcaacaattactgcatggtccataacgcttctttttttgtcatttccaaaaatgtttgctaacccctgatctaaggattgatgcagtatgtatttctttttacaggtaatatatattgtctttgcagtaaaatgtagtggtaacaataaagacaaaatctctttttgaactattttaaagagataagtaaagagtactgggtaagtgtaccatctttagaggatgatgacctggatttaaatttatattctgccatatcgcctgtgccaccttgggcaaattacctccatgcggagtctgtctcctcatctgtagaaaatggggatgaaagtgttatctttttcaaaatttaatgagaattaaatgagacaatatgtgcaaagcacttattataatacattaattacatcagtgaggtcatcatcatctttatcaactacccttttatccaccactaccaccgccaccaccatcattttcatttcaacaaaatattctgacctttaaatgaggaatctagagatacggagaagcaaccatgttttagctagagggttggtaactttaatagggtgcagccagggaaacagaaaccacagcaactaacaataaaaatacactacatgg

SEQ ID NO: 104448 - DNA, 381 bp, Homo sapiens
ttgtattgattctcaacatgtgtctttccacactgaagtcctaatcattttagttggttttcacgcagcttctcttcagccactgagcgatttttttgcagcttttcgtagacctctgggtcagcgatcacttttgtaggtgcattaaagttctcctgtgttgccgacgtacattccaatgggctccagtgatttgggggtcctatctccatagtattcatgatgtctgttctcctgatacccatttttgaaagggattggcttgtcctctttatggaaatggcccctcctaggaagcccacagttttggtcaagttcttctacctactttttggtttgctacgtggtcctgaaaaagtaataaattaagatgttaagatg

SEQ ID NO: 104449 - DNA, 309 bp, Homo sapiens
tcagaattatactctaagaagagataacataagcctatttccctactacacactttatcatcatcatcatagttactatttggtgtgtgtactttctttctagatattgctttaggcacttaccacacataatcctcctacaaccctcctgcaatattagtctcattttacagatgaaggagagactcaaaatgattaacttgcctacagtcctatagctaaaatgtggtagagtttgaatttgagctcaggttagctctaaaaactttgctctttccactacacacagcaagaagcctaaaagcccaa

SEQ ID NO: 104450 - DNA, 378 bp, Homo sapiens
gtaagttgaaagttttgtaattgtgacttccctagtgaaaaagatgtttattcattccagaagtttagagtttttttatgttcataatgctgaatttggcttagtatctgttttataagtaaagcaagcttgttagactgtaagattatagttaatcttctttcaaccctggccttttaattcatttagaccatttttgtccacaagttattttcctcatcatctgtcgttttacatacatgaatctgagcattgattttaaatgattttaagaacacaaaagtttgactaaccaagggcctgaggattactttcccatatatgggaaaaggacttactgtagcgatggagagagattctaccaagtgatttctcata

SEQ ID NO: 104451 - DNA, 555 bp, Homo sapiens
cgcaacgctcttcctcctgcgccacagtcccggcggcggcgctggtcgcgggtcgcaccgtgaggctcgcgtgggcggcgataggcgctgggcccgggcccggtgaggagcgcgccggcgtccccttctcctcaggagtggcgggccgggaagtgacgtggtgcacgggcaggagcgcgtttgaatcggttcccgggtgatcctcgcgcctgccgctgctcggcgccgccgctgacgaggagctgcagcgcgccgggcgaggcctcgagccgccccgggagctggagctgaaggcgccgcgcggagcgcgcacctcagccctgagcccggcggcggcaggcgtcgctgtcttttctccttttccccaatatggcagcggcggacggcggcgggcctggtggggcctctgtggggactgaggaggatggcggaggcgtcggccacaggacggtgtacttgtttgatcggcgcgaaaaggagtccgagctcggggaccggcctctgcaggtcggggagcgctcggactacgcgggatttcgcgcctgtgtgtgtcag

SEQ ID NO: 104452 - DNA, 131 bp, Homo sapiens
agacaggagcagacagtggtgggccaggcctccaagaatgacgtcagaggagacatgcgacttggctgagatgttgcagggggagcaggatgtcggcagactggaataagatggccagaccatccagggag

SEQ ID NO: 104453 - DNA, 303 bp, Homo sapiens
agtgggatgacatcaggttcatcaccattgtttcaccattgcaaccagaggcttgggttgggtaggtgatatatccagagtcttaaaattagcttgaactcatcgacaaaaaaacttagtagccgagtttgcatttcacgataacttttacttttatgagggtaaccattctgagaatagatcacagttctttcctacttaccttaactgcttctaaatgagtataatcataaataataatacagaataaggatgtctttttttttttttagactgagtctcactctgtcacccaggctggag

SEQ ID NO: 104454 - DNA, 521 bp, Homo sapiens
ctagcttctcccattttctcctagtgaatggttattctgctcttatctagcaggtgataaatctgtcaacagatagtttttcctttttgttttatgtgtaagttgttatttcttccttaaagttcataatcttttcccatttattctctaaattttagactataaccaggatgtgtttaggttgatatctttgcttatctattctgcctggaaatcaggaacctcttccaatattcagacttgtgttttcagctcagaataattattttatcatttgtttgattattcctttagttgcactggatcttagttaaaatgcccattctgattcaaagtatctggaaggcaagtatttgtcaactaagggaaaggtgaccatgcatcattggttttgctgagactacctggtttacaccttcaggctttatacttagaaaatattgcgatcatcttctggtcatgaagttacaaacttcaggacaaaggctaaccagctaagactagcagagcaaattccaaga

SEQ ID NO: 104455 - DNA, 303 bp, Homo sapiens
agccccactgtgcagtcctggccacgcaagttattcttgatcctgcaccatggcagctggggagaatccccaccccctaagcagtcacttgtctctgcttctctggggagaagacaccccttagaggagggtgaacgaagtgcacattcccagagccagcacttccagcagcctccatcctcaagtcccctgagttctggaataatcagacagagttgggagagtgagggggtacatatcaggaaatatatgctgtcccaccgaagagggaagaccgccaagtgagaggcccagtagcaaaga

SEQ ID NO: 104456 - DNA, 344 bp, Homo sapiens
acatgggctttctcattaccaacttggcaaggcagtagcacccaagctgagctgctcagcgacccttctgacaaaatgcctccagcgccagcaagtcctgcacctcagctgggaggcagaggatgaccagaagagcagcagaggaaagactgtagacatggtaccttcttggacttgttccaaaaattgtggccgggcacggtgcctcatgcctataatcccagctactcgggaggctgaggcaggagaatcacttgaacctgggaggtggaggtttcaatgagccaagattgcaccacttgactccaggctgatttcgtctcaaaaaaaacaaccaaaaaagg

SEQ ID NO: 104457 - DNA, 668 bp, Homo sapiens
agtagagacggaattttgccatgttggccaggctagtctcaaactcttgccctcaggtgatctgcccacctcggcctcccaaacagctgggattacaggcgtgagccaccacgtcaggcctattaataatagcttttatctgatctttccaaccttaaagcccactataccactaatatataatcccagctctacacaggtgaagaactgcttggtccttctcacctgtaaaaccactgcttacccatctggaatttcctcatcccctaccaaccaaaagtgcatcttcataaagccttccctaaacagatagttccatcatttggcgttctgtaccatacagacaatataaagttggactgtcagttctttcccatcatgtgtttaatttgtctcctcaacaaaacattaataaaaagtgatattattaccatatgattaccttacacaactacattagctcatgctaactagggcaatgattttttatacagtctttagtatatgccaagcatctatctaagagcttgttaactagaaatgcatttaattctcacaacaggcctatgagggaactattaatcatccctgtttttacacctgaggaaactgaggaacagactaagtaacttgctaaaagttagtcagtaagtggcagatttaatgaa

SEQ ID NO: 104458 - DNA, 184 bp, Homo sapiens
aaaaatgggcaaaaacattgaacaagaactttttaatatgtatgcccagtaaatctttgaaaatgtgttcaatctcattagttttcatggagcacaaaataatatatgaagtgagatatgaggtgaaataacagatatgaagtgagtttacaaatatggcaatgccaagtcttggtgaggatat

SEQ ID NO: 104459 - DNA, 392 bp, Homo sapiens
acaggatttcaagcacacagcttttgtctcataagaagctgattctttgtgagatagcagctcaaccttttcctttaaatatgtataaaatcattcaataattggttatcatgccataaaagacttccccgtcagtgaaactgaatagttctggagaaaaatgctttctcaactatacacccatcaaccagaagaacccatgcttggttttaaagttaaggataggtttactttttattacccttttgtttggtttgaatacttccagtgatttccagctcaaatgtttactttgttcatcaccataaaaaaatcccaaaacacatagattatattaagggcagtcttctagtctgcccttagaagaaatcaaatactgaaaccctagggaa

SEQ ID NO: 104460 - DNA, 315 bp, Homo sapiens
gaagtctgatgaaatgggataaggatgggatctgatcctgctcataggaccatgaaagtggtgtaggggaggtgggagctggtagagatgaggagaaacagcaaaaggagatgcagaacccgagtcttagtggaaaccaaacactgaaatccgaactcaggcttgcagacactgaaaactcaggcaaacagaagtagagcagcaacagatcctagacagatctgactggaggccaggtaaaagaatgcagacaataaaaggttgaacatggcacagaagaacaccaccaccaagttgttttgatgctcagctgag

SEQ ID NO: 104461 - DNA, 540 bp, Homo sapiens
gacagtttgtgaggttccaccccctgttgcctgagtcacatctcagacggaggtcaggtagctgagcgatccagcttccacttttgtccctgaaactgtcctgccagagacatttgcattataccagaactttatatgctagatataaaggccctcagaccggacactggcgtttaccgaagaagcttctgaacggggacataggtgtgcgcgcagggaatgccagacaagagtttccagataaagcgaaccccttgatgactgactctttgaggagtaaatccacagcaaaagggccctggaggcaaggccatactggatcaggagagtcagatattctccagaggacagtggcttggcatcatgctgccaggacactcagaactgtgaccccgtaggttcacagagaccaggcaatgtttacatttttaattttaagttttgttgtgggtacatagtaggtgtatatatttatgagttacatgagatattttgatgtaagcatgcaatgcctaataatcacatcatggtaaatgggga

SEQ ID NO: 104462 - DNA, 542 bp, Homo sapiens
aacttcttcctctctttaggaaatcctcttatgagatagagctcagctcctcctgtagaagctgaaattccagacactggacttcccagtctcccttgccactagatatggacacgtgatcaagattccaccaatcagatggtctttgaatctgctagtgacaaaaagaaaggaacatgccaaatccattctggcagatttaagacacaatggcagctacatccagttcccagaggcagcagggccagtggttctagcatcggcatccaagaacacttgctgatggtgcagatggtgtgagctgcagtgtccaggtgcagtatggctgctatggtgtcctcaatgaatgaatcctgcagtggaatttacagtgttgttcctggctgcacagtcttcaagcctttttctctggatactctaggaattctttgagtttcccagtgtcctttcaataaattcttcttcctaaattaagtagagcctatttctgtggcttgcaacaaagcatcccaaaagatacaatattaaattactaattaaga

SEQ ID NO: 104463 - DNA, 308 bp, Homo sapiens
aacttcttcctctctttaggaaatcctcttatgagatagagctcagctcctcctgtagaagctgaaattccagacactggacttcccagtctcccttgccactagatatggacacgtgatcaagattccaccaatcagatggtctttgaatctgctagtgacaaaaagaaaggaacatgccaaatccattctggcagatttaagacacaatggcagctacatccagttcccatctgcaccatcagcaagtgttcttggatgccgatgctagaaccactggccctgctgcctctgggaactggatgtag

SEQ ID NO: 104464 - DNA, 364 bp, Homo sapiens
gtggaggtatatctagacctgagccatttctgtgggtttaaatctcatcttccctgtcattaactgtcactgtggccttggacaaattatttgaactctgagccccccacctaccttccttatctgtaaaatgggcatagcaataatagtgcccgcctcctagagttatttttgaggatagataacaggatacacatgaagtgcttactgtggggtttggtgcttactaagtgttgagccagtgctaactactgttaccacagttgttaccattgtcatcagtatcatccttattgattcttcgtcacttccccaggtcctggttggctcccttccccctcccccgcattggggtgttattggc

SEQ ID NO: 104465 - DNA, 304 bp, Homo sapiens
atacagcctgttcccttctcaaggtacttgaaattaagtgttcaagctaaactttcttctccttgaggttcacggggggattcattactttacaaagagactgcatcaagtttacatgttaaaaagaaaacatcctggtctcagatggcttataaaatagatactagaaaacaaagatttttgcaaccaacataactctctgaaattaaaaaagtaaaaacaaatctcatctctaaattcacttaaatatccttcaaataaatcaactaatttttgtcatgttgctaattaaatattctctgag

SEQ ID NO: 104466 - DNA, 1156 bp, Homo sapiens
ccacgcctgcatcttgcggaaagcggggtggaggtttagggctggactcttgggtcctttaaaggtgagtggtctgggggcctctgggcttggggccagacccctgggtcctctatgaaagaacgtgctggggaccctgattttgggatgttagaaagttggaactcttttgttctgataggggaaggtagtggggctccggactcccgactcccggggaaagagtgggctggggtttctgcttctggatcttaggaagaggatagggtcagtctggactacttggcctccagtgggtggaagtccggttctgcgccctcacctgggtcccccgttcccagatgttcgagcctgtgagctgcaccttcacgtacctgctgggtgacagagagtcccgggaggccgttctgatcgacccagtcctggaaacagcgcctcgggatgcccagctgatcaaggagctggggctgcggctgctctatgctgtgaatacccactgccacgcggaccacattacaggctcggggctgctccgttccctcctccctggctgccagtctgtcatctcccgccttagtggggcccaggctgacttacacattgaggatggagactccatccgcttcgggcgcttcgcgttggagaccagggccagccctggccacaccccaggctgtgtcaccttcgtcctgaatgaccacagcatggccttcactggagatgccctgttgatccgtgggtgtgggcggacagacttccagcaaggctgtgccaagaccttgtaccactcggtccatgaaaagatcttcacacttccaggagactgtctgatctaccctgctcacgattaccatgggttcacagtgtccaccgtggaggaggagaggactctgaaccctcggctcaccctcagctgtgaggagtttgtcaaaatcatgggcaacctgaacttgcctaaacctcagcagatagactttgctgttccagccaacatgcgctgtggggtgcagacacccactgcctgatctcacttctgtcagatgctcccatccactattaatgcactaggtgggaggagagggcggcaatgacactgcacctctcctttcccaccgcattccctggagctccctaaataaaactttttttaacgtga

SEQ ID NO: 104467 - DNA, 965 bp, Homo sapiens
tcagtgccgtagcgcccggctcctgcaggcgctcggcctccgctcattcctgaccccgcagtgggcgcgatggcggaggctgtactgagggtcgcccggcggcagctgagccagcgcggcgggtctggagcccccatcctcctgcggcagatgttcgagcctgtgagctgcaccttcacgtacctgctgggtgacagagagtcccgggaggccgttctgatcgacccagtcctggaaacagcgcctcgggatgcccagctgatcaaggagctggggctgcggctgctctatgctgtgaatacccactgccacgcggaccacattacaggctcggggctgctccgttccctcctccctggctgccagtctgtcatctcccgccttagtggggcccaggctgacttacacattgaggatggagactccatccgcttcgggcgcttcgcgttggagaccagggccagccctggccacaccccaggctgtgtcaccttcgtcctgaatgaccacagcatggccttcactggagatgccctgttgatccgtgggtgtgggcggacagacttccagcaaggctgtgccaagaccttgtaccactcggtccatgaaaagatcttcacacttccaggagactgtctgatctaccctgctcacgattaccatgggttcacagtgtccaccgtggaggaggagaggactctgaaccctcggctcaccctcagctgtgaggagtttgtcaaaatcatgggcaacctgaacttgcctaaacctcagcagatagactttgctgttccagccaacatgcgctgtggggtgcagacacccactgcctgatctcacttctgtcagatgctcccatccactattaatgcactaggtgggaggagagggcggcaatgacactgcacctctcctttcccaccgcattccctggagctccctaaataaaactttttttaacgtga

SEQ ID NO: 104468 - DNA, 756 bp, Homo sapiens
tcagtgccgtagcgcccggctcctgcaggcgctcggcctccgctcattcctgaccccgcagtgggcgcgatggcggaggctgtactgagggtcgcccggcggcagctgagccagcgcggcgggtctggagcccccatcctcctgcggcagatgttcgagcctgtgagctgcaccttcacgtacctgctgggtgacagagagtcccgggaggccgttctgatcgacccagtcctggaaacagcgcctcgggatgcccagctgatcaaggagctggggctgcggctgctctatgctgtgaatacccactgccacgcggaccacattacaggctcggggctgctccgttccctcctccctggctgccagctgtgccaagaccttgtaccactcggtccatgaaaagatcttcacacttccaggagactgtctgatctaccctgctcacgattaccatgggttcacagtgtccaccgtggaggaggagaggactctgaaccctcggctcaccctcagctgtgaggagtttgtcaaaatcatgggcaacctgaacttgcctaaacctcagcagatagactttgctgttccagccaacatgcgctgtggggtgcagacacccactgcctgatctcacttctgtcagatgctcccatccactattaatgcactaggtgggaggagagggcggcaatgacactgcacctctcctttcccaccgcattccctggagctccctaaataaaactttttttaacgtga

SEQ ID NO: 104469 - DNA, 932 bp, Homo sapiens
tcagtgccgtagcgcccggctcctgcaggcgctcggcctccgctcattcctgaccccgcagtgggcgcgatggcggaggctgtactgagggtcgcccggcggcagctgagccagcgcggcgggtctggagcccccatcctcctgcggcagatgttcgagcctgtgagctgcaccttcacgtacctgctgggtgacagagagtcccgggaggccgttctgatcgacccagtcctggaaacagcgcctcgggatgcccagctgatcaaggagctggggctgcggctgctctatgctggctcggggctgctccgttccctcctccctggctgccagtctgtcatctcccgccttagtggggcccaggctgacttacacattgaggatggagactccatccgcttcgggcgcttcgcgttggagaccagggccagccctggccacaccccaggctgtgtcaccttcgtcctgaatgaccacagcatggccttcactggagatgccctgttgatccgtgggtgtgggcggacagacttccagcaaggctgtgccaagaccttgtaccactcggtccatgaaaagatcttcacacttccaggagactgtctgatctaccctgctcacgattaccatgggttcacagtgtccaccgtggaggaggagaggactctgaaccctcggctcaccctcagctgtgaggagtttgtcaaaatcatgggcaacctgaacttgcctaaacctcagcagatagactttgctgttccagccaacatgcgctgtggggtgcagacacccactgcctgatctcacttctgtcagatgctcccatccactattaatgcactaggtgggaggagagggcggcaatgacactgcacctctcctttcccaccgcattccctggagctccctaaataaaactttttttaacgtga

SEQ ID NO: 104470 - DNA, 321 bp, Homo sapiens
tgtgaactctccaaatattcattcatcaggaaaggtgggttttatctgggccatatttgcaattctagacaaatagctcccatctttgagattgtggtcagctcttgggctctagaacctaccagcaccagccctagaaaacacttggatcattgctacatcaagccagtagagatctggccactccaagtgagagctctccaaatcttaccttgctcatctgccccaactttttttttttttttttttaaggcagaatacttaaggaagagtatttactaaatgttcatcatttttacattacaggaaactcactttggg

SEQ ID NO: 104471 - DNA, 207 bp, Homo sapiens
gagagtttttgcctcatttacatgattaataggattcaatgttccagaaacaaaacacacacatgcttagaggtggaggggaagacagtaaacatacatactaagtgttaacagtaattatctttagatggtataaatatgggtaattacggccggacagtggcttacacctgtaaccccagcactttgagaggccaaggcaggtgg

SEQ ID NO: 104472 - DNA, 383 bp, Homo sapiens
agaaatttcaaagtggaagttcaataaaagcagtcctttaggtcctttaccttaagggtatacaaattaacattcagttcagcacagataaagaattaaagttgaagaaaaatttgttgagatcccaagtatgagccaacaaaattaacctatacatagaagcaatgtggggaagtgtctgagctttggacgcagtctggaactggaatctcaattcccccacttactagctgtgtgaccttggggaggtcatttagcctctctgagctacagcttccacatcatcatcatagtgatattaatgagactttaaaagataacaataatgacaatacctaacatttatataacaatgactacgtgacagaaactattctaagtgg

SEQ ID NO: 104473 - DNA, 686 bp, Homo sapiens
atcggtcagcgtggataaacacatctcagggagggggcccatgaaatatggttgtgggctcagactgagaaggcctcattttcaaactagagctggacgggaaactgcatctgaaagtatttcctggaatagcttgctccgtttcttgagtggcaagtttttttggtaaagatactctcccagacagtggaggtgccatggccttcgaaccagatccttccaatagtaaatcatgttgtcagttcctccttggtggatgggatccatttgtatcatgccagagagccttcaaagtagggtcaagaaacccagaaaattggcccctgcctgctcttggctggctatgggatagaaagagaagcctgagggcaatcgagcaaattaacagagtgagggaagagcaggaactccaatctgttctaacaagtttcctctggtcatagctgatcctgagaaccagcatctcagacccttcgtgtgtaagccgtagggctgttttctttttttctttctttctttcttttttttttttgagacggagtctcgctctgtcacccaggctggagtgcagtggcgcgatcttgtctcactgcaacctccgcctcccaggttcacacacaggctgctgtctcagcctccccagcagctgggactacaggcgcccgccaccatgccaggctaatttt

SEQ ID NO: 104474 - DNA, 1036 bp, Homo sapiens
ccccggatcctgggtacatgatgccaagagctggctctctagataggtttcaggttgggctggtctcgaactcctgacctcaagtgatctgcccgccttggcctcccaatatgctgggattacaggtgtcagccaccatacctggccaagacctcatttcacatggggtcatgattacagctgcaggggttcagacggggatgtgcctgtgggggacacagctcatctgaagcagcatccacttgtggagggggtggagcaggcaacgtgtgggctgggccgactgcacctgctcgccggttgcgcagttgggagctgtggggtctccaggtggcttctgcccgatgtcgtctgagaacacaacgagctccttccgcctcggggccctcacactgccgcgcccctgcctggacatgctctgccccttccccggctgttctcttccgtcaggcctcaactgacacatcccctcttgagagaccccttcctggccccttgctccccagaccccccagagttctttattgaggcacacactgctgcctggcacttcatcgccaccatgtgctgtgcacctgcggtgtgctgggcaccaccgtgagctctgggcgggcagccatggaggaggaagatgtggtcatcgttgacgcctgtggaagcggccccaggctgggttggatagaccacagagtggcccgggtgtctgggggtggtccccagccaggcagcctgtgtccctggaggcaagttctgggcggcaggggttcctggaaccccctcatggcgacggggcaccgggagcctgaggaaggtggtcgggaagtgggggctccgcgccaggctctcagacagctgctggaagaagccagctttgagggtctccaggctgggacaagcccatcagtggccacccctgtgccccgctgtgtgggcggggccccatgaccccacaggtttgctttcagagctgctgctgcccccactcactgttcctgccctgtcccacgtgcagtgggggaccctgacttgctgaggg

SEQ ID NO: 104475 - DNA, 281 bp, Homo sapiens
cacacacataccctgtagtgagaaaaaaatccgtttatatggttctataaaaatctctagctgcttcgagctttaatttcttgaatcaaaagagtattgtttttaatactgagcttctatctaaataaatgctttatttacttaaatgtgtgcttttcaaaaactagtatgattaagacattaacaggatcttagacgtaaaggaacagtcctgttgcttcttccagaagataatatgactcgtttggaattttcctatagtgtagttttttgtctagtgt

SEQ ID NO: 104476 - DNA, 398 bp, Homo sapiens
tgtggattggacatttggtgttatatctaaaaaaaaatctgcctaacccatagccttatgtgttttcttctagaagttttatagttttaggttttacatttgggtctatggtccattttgagttaatttttgtatatggtataagatgcagattgaagatttttttttaatatgtggaaaactgattgttccagcactatttattgaaaagactaatttctccattaaattgtctttgtacctttgttgtgaatcatttgcctatatatgtgtgagtctatttctgaattctcttttctgtttcagtgattcatctatgttgatgccaatgctacactgtcctgataactgtagttaataaagtcttaaagttaggtagtaaaagtctgctattttct

SEQ ID NO: 104477 - DNA, 733 bp, Homo sapiens
ctgttttcttctctcttcatattcagttttgcaacttagggtattggcctaccatataatcggtagtggttgagtcttgccaatttattcttctccgtatccattccttaatgactgtgagatatggcttcagtgtcccctataataattcaagttgtttttattgcattcttggcatgtgtagtacaacttttgtgttttcattaccaattattctggacactgattaacatgtagttgtcaatctcctatcaccttgatgtctttaaaacacacaaaccacgtcagagacctaagtactacatgggctatatctgttcttgccatcttaattggctaccaatcaaagacgtcaataaaagcataaatgtaaatgaaaactcttgagctagccctggtttttaacaccaattttttatgatggattcacaggtgaatagtttcccttctccaccaagacttacattattagaactgtaagaggcagcaaaagtgttaaacaggatggattgtacaaagcattaggctaaaactggatattcattttctgcgtaactgaacaatggcataaaaccagtgtcttgggaagtctagaagagcagtcattctgctttgatttttgaatcacgtaatttcaggatgagtcaagtacagtaatttcatagacacattcctgtaaatctgtgaccaacttctgaaaagaattgcctaatgttaaccatctttctctgga

SEQ ID NO: 104478 - DNA, 277 bp, Homo sapiens
aggaggtgaggctgggattccagactgagagggaaccagtgctaggctgtggcatcaagcagggattcccttgggttgcgggactacactgtctgctagcctgagcccccacccccttttggtgtggctccaactggctggctagctgggttgtaccatttttccttggtagcctacaggcgtgtcctgggctggggctcttgaggctgagagcagtgacaatggaggatgctaccctgcctgcagtgccacagcagctgggcctggctgtgcctgg

SEQ ID NO: 104479 - DNA, 949 bp, Homo sapiens
ggccgagtgtaaagcattgcttgaggttgcccaggtagtttcgccttacacttcttgtcccagtgcaattattagtatgagctccctttcactgtcaaatttccggttggggataaattgcattgtcgttttggtttgagataggaacgatgaggggaggaaggaggtgaggcggtaaggggcgttctctctcttgggtcccgcgcccaagcttccgctggcccaaagaacactataattttgaaccaacagacctctgctggcatctgcgattgcatttttcctgttttaacaacggctgtgctagacgaagtggtgaagcccaaagacttatttttgagctcgctgtaagactgagaaatcacgtagtccttcctgaaaccactaagaggaaaaatgtctgtgacactgcatacagatgtaggtgatattaaaattgaagtcttctgtgagaggacacccaaaacatgtgagatggagtctcgctgtgtcccccaggctggagtacaatggcgcgatctcggctcactgcaacctccgcctcctgggttcaagcaagtcttctgcctcagcctcccgagaactggaagaggaggcaacagtatttggggcaagaagtttgaggatgaatacagtgaatatcttaagcacaatgttagaggtgtgtatctatggtaataatgggccggaaaaccaatggatctcagttcttcatcacctatggcaaaacagccacatttggacctgaaatacaccgtaatttggaaaggtaatagatggtcctggaaactctagatgaggttggagaaagttggccagtaatgtggaagacttttcggactcctaatgatgttcccctttaggacttactattctgggcaaccatttgtccagtattttattgaactggccaatatattgtcaatggtggaacccttatgtggttacc

SEQ ID NO: 104480 - DNA, 351 bp, Homo sapiens
ggctcatgcctgtaatctgagaactttgggaggctgagcaggaggactgcttgaggccaggagttcaagattaacctggccaacatagtgagaccctgtctctattatttaaaaaaaagaaaagtcatggtttgggaatgaaaaaggaagtacagcttaaattacaactttccaaactcattaccctaagaacctgaaagtaacaaccacctcaaacaaagattagataaatccttggataatgcattcataatgcatcacccaagaaacatgtgttggcaatgtgttgggatataccccaaactagtttgatcaaactagtttgattttccagtagtccagtattatctg

SEQ ID NO: 104481 - DNA, 684 bp, Homo sapiens
attgtgttatttttgtaatatcaacaaatttagattcatttcatttcggaaaatttgtcataaatgccagctttctaaacaagaacatgtctagttcatgtggacgtccaaaaatccgtttgtatttttcccagatcaggaattgttttgaagcctttggctatgtttctgtaagcacatggagatttttggaaaaggtagaaatatctgggtaattaaaagttaatggctattttattttcacttaggtaactttttattactctaaaaatttagtagcaagaattagaattatctatatcagagaaaatatgttcctttaatttttttaagaaatcatctgtcttgcaaatgttttctttatgtcacaacaggaaagcttttcagtgagttgagttgtatcttaaagggtaagctgaaagctttctaggcaatgatagtggtgaggagtgggtaagtggagaaaggtgagggaatagcacatttcaagcagagtgaaaacttgtgtgggtacatgagacttggactatttgaagaatagccaggtaggtgaacattctcaaagtagtaccttcatatatattgggaatattgttttcaaattgtatcattgtactataaaatcgacttaaattacttaaaagcctattttttgttttacagttttaaaaattgtattatata

SEQ ID NO: 104482 - DNA, 354 bp, Homo sapiens
taacaaattgtcagacttttttcctgtatgtactcatgctcatagcacaataattggccagaatgaagtaaatttaatatactcatattattttggagagtgtatgctagtaaaacattttggaatcagctggcatctatcaaccttgacacatggttgacattcatcagttgatgtttttaccttaggtatgcatcctttctccccagaaaatctacatgtagatatttatcctaggctgggcgcggtggctcatgcctgtaatcccagcactttgggaggccgaggcgggcagatcacgaggtcaggagatggagaccatcctggctaacatggtgaaaccccatctctact

SEQ ID NO: 104483 - DNA, 152 bp, Homo sapiens
tttttgaatgtgtgacttagaaaagaattacgtgtgtgtgacaacttaaccttagctctgggttgaccctggcactggattagtttctggtcctgacttgtaaccatggaactgggagaaatttaggcagattcttattgagaccaggctcc

SEQ ID NO: 104484 - DNA, 217 bp, Homo sapiens
tcctctgttggcttcccgggtgaggtttggaaaggcgcaggactcaggatggccaggcaggatgatggactcccagctccagctgtcctgggaatgtcttctgtcttggaaatgacccaggagaggcccaggtgtcagggccaggcaggccagggaccacaggggcagtgacagtgcacagggccagccccaccttcctggtgcccctactcagaca

SEQ ID NO: 104485 - DNA, 309 bp, Homo sapiens
acaggcatgtgccatcacgctggctaatttttgtatttttagtagagacggggttttgccatgttgtccaggctggtcttgaattcctgacctcaggtgatctgcctgcctcagcctcccaaagtgctgggattataggcgtgaaccaccacgccgggccagaaacccccagttttgaagtgtgtgtgtcgtcacttcctgcccggtatcagtccctctggtgactgctctttgtttcttgaagaattcagcccctggctggccacggtggctcaacgcctgtaatcccagcactttgggaggccgagg

SEQ ID NO: 104486 - DNA, 418 bp, Homo sapiens
cagatgtgagccgccgtgcctggccatattttttattttattttttccagagtccagatgaggaagaacattgggatatttttaaaatcctgattatattatcctattgatgattaggcattgactatttttttattgtaattgcatattggtcccactctccccactccctgccataagattataagctccttgaaaacaagccttgtgtcttctttacccttgtatctcaagcgtatcttaaggcctggtgtgatgtcattctgtcacatagcagtcagcaagtagttcagtggcagaaagaagttagaaagatttaataagcttgcctttttagatttttaccaatgttattaataaaaatattccttgtgatggttaaaaaaaggaaatttattttgaaagaagatcaattgac

SEQ ID NO: 104487 - DNA, 411 bp, Homo sapiens
acgctccacaccctcagtcatgtggctctgcagagacgccacagctggagcagtcagagggccacacccacctgagactccccagccagcttcccctccagggtgctgggcctagttctggggctccagccagaccttacccccaaaatcactgccttgggtcaggcccagacaacaggaagctgggtgcgctcagcctccattgcctaagctttccggccaggccctgctggagaggtgaaactgcccctccgccaggccccccgcccccagcggctgaagggggtggaatacgtcattcctctcccctattgcgaaagtgagcctggattgaggaaaccaccgctgtctcatcagccgccctcccccagccctccaagggccaggacagctcctgctaccacaggggca

SEQ ID NO: 104488 - DNA, 753 bp, Homo sapiens
gaccttgtaaaagcccatattcagggggcttttacatccaaatgtcgcttttgatatcagtgaaatacaaagtaaaattcttgacttgaataagcagactcaagagtttcaaccttctttagaaacttggacagaattccagcagggtttagaaagtctcaatccttagacctacgttaaacatcaccttaatgtctcttttagacttataggaacaatgttattatgtctctgttttctgtttatagtctgtaagactgggtggaccaccaactggcaattgaaagttgcacagcctggaattacctttattcaattaatgcaaaaacataaagggggagatgttggactgaaggaatgagggttgtcaactcagtataccattggaggctgtatgagcaaacagcaaactgttcttgtgaaagcagttggcaaggtgacaactgaatctgccaccagaaggaatgctgagggcagtcacatcccaggtgccatgttccttgaaattatctacagaaacatctggagcctgttgaacaaaaaaggcaatcacttacacctgtgttaaattaaatagttgactgacagttaccccttcctctctgtttactctacccaataaatatgaagggctgtagaagctcagggctcttgttctctagaagcaaagagcccccgatcccttcttgcaaacagatacttttgtctttgactccatactccattcccgtgttcgtcctcctccattcagtc

SEQ ID NO: 104489 - DNA, 198 bp, Homo sapiens
  misc_feature (2)..(2): n is a, c, g, or t
cnaacatataactgaactcctcacacccaattggacctatctatcaccctatagaggaactaatgttagtataagtaacatgaaaacattcggctcttgttctctagaagcaaagagcccccgatcccttcttgcaaacagatacttttgtctttgactccatactccattcccgtgttcgtcctcctccattcagtc

SEQ ID NO: 104490 - DNA, 794 bp, Homo sapiens
gtgtgacttaaacatctgaatgatgtttagtttcaccattgcagtgtgtatacctttatgcatgtaaaggcagtgttgaaaaattgtgacaaccaggagactggggtttcagcacgatcaaaacagcacccatactagggtcaggctgttgggaattagatcatcactggggcctttcctattagagaggaaagaaaccctatctggagatgaattgcctttcaaatgagcaggaagtcttgtggcggttgtgtttaccaaaagactatatctggattgtaaaactgtactattgttattcctcagaaagctaaacagaattaccgtatgacccagtaattttactgctatctatgtaccctgaataattaaaaacagaggctcaaacagataacctgtatgtcagtattcatagcattattcatagtagccaaaaagtggaaaaaacccaagtgtctgtcaacagatgagtggataaacaaaatttggttaatctataaactggaatattcatctataaaaaggaatgaagttgtgatgcatggatacaacatggttgaaccttaatgttatactaagtgggctgggcgcagtggattacgcttgtaatcccagcactttgggaggctgaggcaggcggatcacgaggtcaggagatcgacaccatcgtggcgaacacagtgaaaccccgtctctactaaaaatacaaaaaaattagccgggcatggtggcgggcacctgtagtcccagctactcaggaggctgaggcaggagaatggtgtgaacccaggagg

SEQ ID NO: 104491 - DNA, 476 bp, Homo sapiens
gactctagaggacccctcgcgaacgtgttatcctgaaggtgccttagttgacaggaggtggaagtcagggggtatcttggctaagggaacaggtggctaaaagaaaccatgtaatgatattaggatgaccacctcaagatgactgcagctcctcctcagctatcactgtaccttcaatctgtgcaacagatctctatgaaaaatgcacgtctcatcttcttataccttccctgtccttgctttcatgatgcaggccaagggttctgagttccagagtggatgacctaggctggagctctggctttgttattgagctgtgtgactttgggtctgttactcaccttctctgtacctcaatctcttcatttttcaaatgtaaataatagaagtatttatcccatggggttaatagcatcaataataaattgatacatttaaccccatgggataacacgttcgcgaggggtacagagctc

SEQ ID NO: 104492 - DNA, 267 bp, Homo sapiens
atctacctctttggcctcccaaagtgctgggattacaggtgtgagccactgtgcccggccagataacctttaagaattcttagaagcccagaaataaagccaaacctatatggtcaactaatttttggcaagagtaacaagaagacacctgggaaaagaacagtatcttcaataaatggtactgagaaaacttgatttccacaggtaaaagaataaaattagactcttacaccacatgcaaaaatcaactcaaaatgcatgcaagac

SEQ ID NO: 104493 - DNA, 388 bp, Homo sapiens
ttctgcactcccagccctgcaaaagatagtgagtcaaattatatgcccaatatattggtacaacaatcagcatttgagaaagccactgcacaaaaactatctataaccaagaaactcatctagagccttagccccctgaaggcacccagaattgaagccaaatgattacacacaacatataatcacacccccaaaagagaaaagaattgaaaattgaaaatgttcttcaaatgaaagcaaatagaaaataactaagtgacagcttctataaatgagaaataatgtgagaacttcagcagtacagaaagacagagtgttttgacacccacaaaggatcacagcagttctgaagcaatggattctaacaaataaaactaaagtgacacat

SEQ ID NO: 104494 - DNA, 773 bp, Homo sapiens
cattcagtatggaaattggattataatgaagctagagtttcttcagaggttgagtaagctgcctaagaaggaacttctgaccacagacatcctgtttcctaaaaataagcagggttaaagctcagtaggaatttagctatgttgcataaacattgcattgggcaacaaaagtggggtaggggtccagctaagtcacctgggcattgcagtgggtaacagttccatctatattctgccatgaggcttatggcaagtgctctaaggaagcactaagtcccctaatggagcagtaagtaccctaaggaaggggaaaacaagactccctaatctgtcaagcatgctgttaaattttaaaaggaggaatccagtgtggttgataaaagctgaacagggtcttataggtaagttgttttgagctgggcttttctgtgtaagatattaacaaggcacacgggttgagataagggcttcttgaattaatgaataaatcccaggcagagtcctctaagacttggaggctctatttaaggacagtcagtaatctgttttgaccagggcttggaccaaatggaggacggcagtggaaaataagcttgggagagggatttgggacccattctagtggacctgggtgcttggttgtaaatagattgggttttatttggttcaatgccactgaaagcttgtggacagtgtcgtgggatggtcaggatctgtttaaggcagacatgtggtatgatcagtaaaggaaactgggagaatagttaagaaga

SEQ ID NO: 104495 - DNA, 870 bp, Homo sapiens
tgggaggccaaggcaggtggatctcttgaggtcaggaatttgagaccagcctgaccaataggccaaaaccctgtctctactaaaaatgcaaaaattagccgggcatggtggcgcacgcctgtagtcgcagctgcttgggaggctgaggcaggagaatcactggaacccgggaggtggaggttgcagtgagccgagatcgcgccactgtactccagcctgggcaatagagcaagactgtctcaaaaagtaaaataaaaataggccaggcgcgatggctcacgcctataatcccagcactttgggaggccaaggtgagcaaatcacgaagtaaggagttcgagaccagcctggccagcatattgaaaccccgtctctactaaaaatacaaaaattagctgggcgtggtggcacacgcctatagtcccagctacgcaggaggctgaggcaggagaatcacttgaacccaggaggcagagtttgcagtgagccaagatcgtgccaccgcactccagcctgggcaacagagcgaggctctatctcaaaagaaaaaaaaaagttactaaagggatacttttagacagaaaacacaggcctgagtgtggcggttgctctccttggtaagggaggtgagggagaagcagcagcccggtgccagtggagcactgggcagtggcagcacccaggaggccaaaggaagtgtctgccatgtccagtgctgttgggccgagtgaagccgtcactggtgactgtgatgggagagtgtgtgacgtgatggagcaaagctctgactggaggagttccagtgagatggaggagaggacatggagacagcgagtgtagacaactgtgacaaaacggggaaatgaagaa

SEQ ID NO: 104496 - DNA, 288 bp, Homo sapiens
atctggttggaccacagtttctggtcctgtttaaatccaagttttgttctacttgttcttctccagtgcttctttctcaaatcttggtcgtttacttcacgtacgtgtactgatgatcagaaccagctgaagactcaaggagaacacttctgagctcttatattatgtagttctctcctctgatttttaccatgtaaattctgatgccttcacctcccagatcttcatactgtttgctcaactcaaagaggtggtcaacatctgtttgggttgctcctccctgtgctg

SEQ ID NO: 104497 - DNA, 135 bp, Homo sapiens
gagatttgtcctttcacctcctgcccttgattctcagaggctcttactgagcctcctcagttttcatggcaacgtaggtatttgcatggtgtcttgtgggcggaggattacctaggtgccgaggcaagagactga

SEQ ID NO: 104498 - DNA, 469 bp, Homo sapiens
gtaatctatagattcactctgcaagaccagttgctttctcagatacagcactctgtctgtggcccacagagtctttctactgtatctaagacctaaacatttggagaagtcagtttttgagccaggtgcggtggcacgcacctatagtcccagctactcgggaggctgagaagggaggatcacttgaatccaggaattggaggctgcagtgagcaatgattgtgtcagtgcattccacagcctgagagacagagcaagaccccatctctttaaaaaaaaaaaaaaaaaaagcaggctgggcacaatggctcgtgcctgtaatctcagcattttgggtggctgaggtgggaggatcttgagtcaggagtttgagaccagcctggacaatatagtgatactccatctcgaaaaagaaaaaatatattggaaaaagaaaaaaaacagtttttgaagtgtttttttttttttt

SEQ ID NO: 104499 - DNA, 757 bp, Homo sapiens
tttggctcaggaaactaggccaacaatggaattcaaagacaatcccaccaaagagaaaaccagcagggtgggcgacgcctgggctccaagaaccggtggggagctccatttccctcagatggagcgtttcctaaccccggggcaactttcccgaaacatggcaggcttgcctgacccaaatagcccctcattcttggctgcacttgtgaccaccgggccgagctcctcggaggcgtggacaaaggaggccttggcgagaacagggttcggtggccagtgggtggagaagtcggtgctggctgcgccgtggagcccgtggatcaacatttgctgaggacctcagtgcggaaagtcgtggtcgcacttccttccgggtctgctgagctgccactcacggcgggagagttgggacgtcctggaattctggaaagcctcctgctctgaaggagttcaaggttttcctgtccggtctgacatccccagacgtttgccctgctagggctggagaaaggtgtccaggcattgaaggaacaatttgagggacaatctggcttttttttttttaacagttcttttctaaacacctcagaatgaatgaaacaaagtcctatttatcactagagatgaagacacatccctgatttacgttgccacgtggggagaagtgctttgtttctactcagcagaaggagacaggggcaggcgggaggagctgtctcaggaacaccagcctgggtttcccaccctccctgctgtg

SEQ ID NO: 104500 - DNA, 328 bp, Homo sapiens
tctaatataaaatatttaattttgaatggttctccattaaggcaacaaattgccagaggatagggagtgcctgggaaaggtgacagatgccaagtcacattctgtttgagttgcaccctgaaacccatgccaggaaaatgaaatgtggagttctgtttgactgcttccactcaacagctccctctcctcaggagaatgcatgttcccaaaacaatactgagagggaggttcaatgtttaattcatcttaaaaattattttttatatttggaagcatgcaaaacacagtaaaatttacaataaaaagcatcctgacaaaatgcagagaa

SEQ ID NO: 104501 - DNA, 506 bp, Homo sapiens
aaaggaaaaagtaatattgtgaaaatctcaaattatcccaggtggaaggagaaggaattttgtttttcatgttttcatggcttatcttatgtttataagagcaacacacctaccttcaagaaaaaatacagacttttgtacgcaacttactaggggaagtaaaaaatgtaggttgaggaaaatcttataaataatgctttaaaagaacatttcatttagactccgattctcatcttaaattccatattttataagaaatcaggaggagcggatatttagaagtgttatgagagagtaagttgggcataaaggctgctttaagtataattcagatcacctgcattttataattttatttccaaggtaggccatgtaaaattaaaatgcacacactccactgggttttttatatacctctataattgacactttcttctttaaaattatgttcaaataaatatactgaatcatccaaaactctttttaccctactttaaaagctgatc

SEQ ID NO: 104502 - DNA, 433 bp, Homo sapiens
aatgacacaatttcacttgactcttgaccaataggaatgaaaacaggaagcattctggaaacatctgttatttcaatgatacccacccaaatccttccctcctaggacttagtagtatcattgaaatgacagatgtcttcagatgtttcatctagttaaatattttccttctatatctgaaatttttaaaattaaaacattccacctgccaagctctcactaccctctctactaatgaggtagagacatatgaagtatttctctgaattaaccaatttatttttttttgcaatcaaaataaaaccgtgtttccagaggtcaaagactaactaacttaaatctccattagcattttatattaatgtatattctccagacatctatagaaataacacacctatgctacattttggaggtaatgctttggtgatag

SEQ ID NO: 104503 - DNA, 209 bp, Homo sapiens
tgggggagggcagaataggattacaaattgagttgtattgattctaaatggtatttgaggataaaaaagatgtttccagccaagcgtggtggctcacacctgtaatcccagcattttgggaggtcaaggtggatggatcacctgaggtcaggagttcgagaccagcctggccaacatggtgaaaccccatctgtatgaaaaacacaatg

SEQ ID NO: 104504 - DNA, 202 bp, Homo sapiens
ctccaatgtcccctggggccaggtaggtacataaaggagtgagggaggttaggaggggtctgtggtgtgtgaggaagcacacagccactgctcaaatcctgcatagttgctctatggtggtgtgggcccagtgtggcctgatttgatgaaattttttttttttttgaggcgaagtcttgctctgtagttaccaggctggagt

SEQ ID NO: 104505 - DNA, 275 bp, Homo sapiens
aggccacgtgatttgtatctgtctactctccccatggaactgaaactctccaggggcccttaggagggtaaaggtaagaaaagcaaggacttctgagggtcatttcctccaagaagccaagccaagctgcaagaaggcgacgtctcaaactgtggctgtgataagacaaatccatcttcactctgggagaagcacctgttccctggctctcaatgggagatgcaaatggccctgtgatttaacctgtctggctcagccacagctgtgcatgcctc

SEQ ID NO: 104506 - DNA, 434 bp, Homo sapiens
ggagccctgtgggtccaggggaggggactggacgcagccccatgacaatgctcagacctgggctaggaactggaagcctgtggttcctctgggctgtaggggttggggccccacagtgatggcagagccaggacctcatacacagcagcatggactccagacccgagcgggacctccgttctggtcccagggtgacctgggctgagtggcccagcaatcagggaccacttcagggtccctctgcactggtctgtccctctcacccagtctggacccctgtggggcacttgccctgtccccagttttccttacaggggacctgggcaaagcccagggaagcttgcacctgttaaggaggccattctcctgcctcccccttggggatccagtttctttctctcgccttggaccttccccaggatcctatggaaact

SEQ ID NO: 104507 - DNA, 190 bp, Homo sapiens
ccctccattggctcagtccctaagactcagcatcctgtgagtaaccctgtggctctcacccagggtcgagctggaagggagaaatgggagcagcttggagaaaataaactagacatggttgcctatctttcagccaaacctctgtcctataaacaagtctctcattgccatcccagggacagagccacaa

SEQ ID NO: 104508 - DNA, 635 bp, Homo sapiens
tgttgtgagagaaaaggagcaggtagaggaatagtcaatgatatatttgtctcacgcccagtaaatcagctctttatataagataaggtgagcatagagtagctacctgtagagatatttaaccttttatctgtagctttctgcttaggaacaaaaggaagggtatcttcttgcatgaaagcatccagcttattttttttcctttggcatagtaaattgaggcaccaagtttttattttccgttcacatttcttcccctccccttttaaaaaaagtcttcagaaaatgcattttagaagaaaatgcgtctctagtcttgggggttttgtctggtctcttgtgactaagacagtttatttctagacaggtcccacgtggttaggaaagctcatttttagcaggttgtaaagtctcatgacccatgaaggaaaaaaataggtggaggaagagagagagaaacaaacaaacaaacaaacaaaaataaagggagaacaatcctggaaaactgacataaaccgtattactctgaagtccctatgtcagtaggcaggtatgaaagtgatttacgtatataaataggttcctgttattttcttccaaagttgacgttgtctagcttcagtttacagggcttt

SEQ ID NO: 104509 - DNA, 604 bp, Homo sapiens
gggaaatacagaaatttataaatggaaattaaaagtattcattatcccgcttccgagaagcaaccagtgttaacattttggtgtgtttctttccattcaatgttactcattaacaactgtacataacttttcatttaactccctttctcaacaaccctgataggattgattttaaagctggggcaagtgaggcacaaaaggtaaggtaataaccttccccagaccagcatagtgatttgtagtatacacacacacccgcccgaagagcctcagtgcttacactaaggagtcgtcttctatgcaatagtgtgagttcatggagtaggaggaagcaatacaaccaaaggttggacagtggaaagctttttagacatcaaccctggccctgtagtcattagcctgtgctttacatagtaactggctaaatataatgaaactcccatcatgactaggatttggcagaagagaatcaatagaaccagtgtcagatgctctgtggttatcctgcaagtcagtggttccaatgtgttttgagaacaagctgttctgttgaaggggtcataccaaggtatggtctggtaattaatgcagtttcctgagacaa

SEQ ID NO: 104510 - DNA, 543 bp, Homo sapiens
agctcagcaggtttaattacaagggacccctcagggtactctgtgagcatagaggagtgtggccctggtggggacacaggcatgcatggatgacagtgctgtcagcctcatcttattctgacctgggctcagccaggagtcacattaaaggtatcatcatggagtcctcccacctcagttcatgacatttcctccaggaaatgtgggatctgggactgatttggttaccatgatctctataacttgggccagccatataaaactgccatggacctcagtttttgtttatatatatttttcctttcaaatttgtcttgtgccccagggggcaacaggaccagtttctcagggttttggtgaagatcagatggaattagggatgtgaaaagatcttgaacagtttaaagcatagagaaagtgcatggagtatcattcgtccatccatccagtcatccatctactcaatgaacatttattattattattttattttttgagatggagtttcgctcttattgcccaagctggagcgcaatggtgtga

SEQ ID NO: 104511 - DNA, 2754 bp, Homo sapiens
ggtgtccggagccgcggacctagagatcccagaagccacagcgcagcggcccggcccgccactatttccaggctctgcggggcaggggccgccgcccaccgcccgccgccatggggctgaaggccgcccagaagacgctgttcccgctgcgctccatcgacgacgtggtgcgcctgtttgctgccgagctgggccgagaggagccggacctggtgctcctttccttggtgctgggcttcgtggagcattttctggctgtcaaccgcgtcatccctaccaacgttcccgagctcaccttccagcccagccccgcccccgacccgcctggcggcctcacctactttcccgtggccgacctgtctatcatcgccgccctctatgcccgcttcaccgcccagatccgaggcgccgtcgacctgtccctctatcctcgagaagggggtgtctccagccgtgagctggtgaagaaggtctccgatgtcatatggaacagcctcagccgctcctacttcaaggatcgggcccacatccagtccctcttcagcttcatcacaggcaccaaattggacagctccggtgtggcctttgctgtggttggggcctgccaggccctgggtctccgggatgtccacctcgccctgtctgaggatcatgcctgggtagtgtttgggcccaatggggagcagacagctgaggtcacctggcacggcaagggcaacgaggaccgcaggggccagacagtcaatgccggtgtggctgagcggagctggctgtacctgaaaggatcatacatgcgctgtgaccgcaagatggaggtggcgttcatggtgtgtgccatcaacccttccattgacctgcacaccgactcgctggagcttctgcagctgcagcagaagctgctctggctgctctatgacctgggacatctggaaaggtaccccatggccttagggaacctggcagatctagaggagctggagcccacccctggccggccagacccactcaccctctaccacaagggcattgcctcagccaagacctactatcgggatgaacacatctacccctacatgtacctggctggctaccactgtcgcaaccgcaatgtgcgggaagccctgcaggcctgggcggacacggccactgtcatccaggactacaactactgccgggaagacgaggagatctacaaggagttctttgaagtagccaatgatgtcatccccaacctgctgaaggaggcagccagcttgctggaggcgggcgaggagcggccgggggagcaaagccagggcacccagagccaaggttccgccctccaggaccctgagtgcttcgcccacctgctgcgattctacgacggcatctgcaaatgggaggagggcagtcccacgcctgtgctgcacgtgggctgggccacctttcttgtgcagtccctaggccgttttgagggacaggtgcggcagaaggtgcgcatagtgagccgagaggccgaggcggccgaggccgaggagccgtggggcgaggaagcccgggaaggccggcggcggggcccacggcgggagtccaagccagaggagcccccgccgcccaagaagccagcactggacaagggcctgggcaccggccagggtgcagtgtcaggacccccccggaagcctcctgggactgtcgctggcacagcccgaggccctgaaggtggcagcacggctcaggtgccagcacccgcagcatcaccaccgccggagggtccagtgctcactttccagagtgagaagatgaagggcatgaaggagctgctggtggccaccaagatcaactcgagcgccatcaagctgcaactcacggcacagtcgcaagtgcagatgaagaagcagaaagtgtccacccctagtgactacactctgtctttcctcaagcggcagcgcaaaggcctctgaactactggggacttcggaccgcttgtggggacccaggctccgcccttagtcccccaactctgagcccatgttctgcccccagcccaaaggggacaggcctcacctctacccaaaccctaggttcccggtcccgagtacagtctgtatcaaacccacgattttctccagctcagaacccagggctctgccccagtcgttagaatataggtctcttctcccagaatcccagccggccaatggaaacctcacgctgggtcctaattaccagtctttaaaggcccagcccctagaaacccaagctcctcctcggaaccgctcacctagagccagaccaacgttactcagggctcctcccagcttgtaggagctgaggtttcacccttaacccaaggagcacaggtcccacctccagcccgggagcctaggaccactcagcccctaggagtatatttccgcacttcagaattccatatcttgcgaatccaagctccctgccccaaataacttcagtcctgcttcagaatttggaaatcctagtttcctctccttcgtatcccgagtctgggacacaaaactccgcccccagcctatgagcatcctgagccccgccctcttcctgacgaaactggccccggatcagagcaggacctcccttccgaccctctgggaacctcccagaggtccagcccatctcggagcatcccggaggaaatctgcagaggggttaggagtgggtgacaagagcctgatctcttcctgttttgtacatagatttatttttcagttccaagaaagatgaatacattttgtt

SEQ ID NO: 104512 - DNA, 2385 bp, Homo sapiens
ctaagatcccggacgagcatccttatacggccctgggtctccgggatgtccacctcgccctgtctgaggatcatgcctgggtagtgtttgggcccaatggggagcagacagctgaggtcacctggcacggcaagggcaacgaggaccgcaggggccagacagtcaatgccggtgtggctgagcgggtattgttccctccccccagccttgtccccttcatactgtagtagcccaagccacccaagggactccattttcttgggccacacccctttcttcccatcaccacccacataggaagggaagacagaagagccccttttcctggctgtcattccctgaagcaggcacagggtgggccatcatgagacataatgatctcatccccccctaagagctggctgtacctgaaaggatcatacatgcgctgtgaccgcaagatggaggtggcgttcatggtgtgtgccatcaacccttccattgacctgcacaccgactcgctggagcttctgcagctgcagcagaagctgctctggctgctctatgacctgggacatctggaaaggtaccccatggccttagggaacctggcagatctagaggagctggagcccacccctggccggccagacccactcaccctctaccacaagggcattgcctcagccaagacctactatcgggatgaacacatctacccctacatgtacctggctggctaccactgtcgcaaccgcaatgtgcgggaagccctgcaggcctgggcggacacggccactgtcatccaggactacaactactgccgggaagacgaggagatctacaaggagttctttgaagtagccaatgatgtcatccccaacctgctgaaggaggcagccagcttgctggaggcgggcgaggagcggccgggggagcaaagccagggcacccagagccaaggttccgccctccaggaccctgagtgcttcgcccacctgctgcgattctacgacggcatctgcaaatgggaggagggcagtcccacgcctgtgctgcacgtgggctgggccacctttcttgtgcagtccctaggccgttttgagggacaggtgcggcagaaggtgcgcatagtgagccgagaggccgaggcggccgaggccgaggagccgtggggcgaggaagcccgggaaggccggcggcggggcccacggcgggagtccaagccagaggagcccccgccgcccaagaagccagcactggacaagggcctgggcaccggccagggtgcagtgtcaggacccccccggaagcctcctgggactgtcgctggcacagcccgaggccctgaaggtggcagcacggctcaggtgccagcacccgcagcatcaccaccgccggagggtccagtgctcactttccagagtgagaagatgaagggcatgaaggagctgctggtggccaccaagatcaactcgagcgccatcaagctgcaactcacggcacagtcgcaagtgcagatgaagaagcagaaagtgtccacccctagtgactacactctgtctttcctcaagcggcagcgcaaaggcctctgaactactggggacttcggaccgcttgtggggacccaggctccgcccttagtcccccaactctgagcccatgttctgcccccagcccaaaggggacaggcctcacctctacccaaaccctaggttcccggtcccgagtacagtctgtatcaaacccacgattttctccagctcagaacccagggctctgccccagtcgttagaatataggtctcttctcccagaatcccagccggccaatggaaacctcacgctgggtcctaattaccagtctttaaaggcccagcccctagaaacccaagctcctcctcggaaccgctcacctagagccagaccaacgttactcagggctcctcccagcttgtaggagctgaggtttcacccttaacccaaggagcacaggtcccacctccagcccgggagcctaggaccactcagcccctaggagtatatttccgcacttcagaattccatatcttgcgaatccaagctccctgccccaaataacttcagtcctgcttcagaatttggaaatcctagtttcctctccttcgtatcccgagtctgggacacaaaactccgcccccagcctatgagcatcctgagccccgccctcttcctgacgaaactggccccggatcagagcaggacctcccttccgaccctctgggaacctcccagaggtccagcccatctcggagcatcccggaggaaatctgcagaggggttaggagtgggtgacaagagcctgatctcttcctgttttgtacatagatttatttttcagttccaagaaagatgaatacattttgtt

SEQ ID NO: 104513 - DNA, 2616 bp, Homo sapiens
ggcacgagggggcggcgtgcgccgcggtgcctagtgtgggatgtaagcgcggaggccgccgcccaccgcccgccgccatggggctgaaggccgcccagaagacgctgttcccgctgcgctccatcgacgacgtggtgcgcctgtttgctgccgagctgggccgagaggagccggacctggtgctcctttccttggtgctgggcttcgtggagcattttctggctgtcaaccgcgtcatccctaccaacgttcccgagctcaccttccagcccagccccgcccccgacccgcctggcggcctcacctactttcccgtggccgacctgtctatcatcgccgccctctatgcccgcttcaccgcccagatccgaggcgccgtcgacctgtccctctatcctcgagaagggggtgtctccagccgtgagctggtgaagaaggtctccgatgtcatatggaacagcctcagccgctcctacttcaaggatcgggcccacatccagtccctcttcagcttcatcacaggcaccaaattggacagctccggtgtggcctttgctgtggttggggcctgccaggccctgggtctccgggatgtccacctcgccctgtctgaggatcatgcctggagctggctgtacctgaaaggatcatacatgcgctgtgaccgcaagatggaggtggcgttcatggtgtgtgccatcaacccttccattgacctgcacaccgactcgctggagcttctgcagctgcagcagaagctgctctggctgctctatgacctgggacatctggaaaggtaccccatggccttagggaacctggcagatctagaggagctggagcccacccctggccggccagacccactcaccctctaccacaagggcattgcctcagccaagacctactatcgggatgaacacatctacccctacatgtacctggctggctaccactgtcgcaaccgcaatgtgcgggaagccctgcaggcctgggcggacacggccactgtcatccaggactacaactactgccgggaagacgaggagatctacaaggagttctttgaagtagccaatgatgtcatccccaacctgctgaaggaggcagccagcttgctggaggcgggcgaggagcggccgggggagcaaagccagggcacccagagccaaggttccgccctccaggaccctgagtgcttcgcccacctgctgcgattctacgacggcatctgcaaatgggaggagggcagtcccacgcctgtgctgcacgtgggctgggccacctttcttgtgcagtccctaggccgttttgagggacaggtgcggcagaaggtgcgcatagtgagccgagaggccgaggcggccgaggccgaggagccgtggggcgaggaagcccgggaaggccggcggcggggcccacggcgggagtccaagccagaggagcccccgccgcccaagaagccagcactggacaagggcctgggcaccggccagggtgcagtgtcaggacccccccggaagcctcctgggactgtcgctggcacagcccgaggccctgaaggtggcagcacggctcaggtgccagcacccgcagcatcaccaccgccggagggtccagtgctcactttccagagtgagaagatgaagggcatgaaggagctgctggtggccaccaagatcaactcgagcgccatcaagctgcaactcacggcacagtcgcaagtgcagatgaagaagcagaaagtgtccacccctagtgactacactctgtctttcctcaagcggcagcgcaaaggcctctgaactactggggacttcggaccgcttgtggggacccaggctccgcccttagtcccccaactctgagcccatgttctgcccccagcccaaaggggacaggcctcacctctacccaaaccctaggttcccggtcccgagtacagtctgtatcaaacccacgattttctccagctcagaacccagggctctgccccagtcgttagaatataggtctcttctcccagaatcccagccggccaatggaaacctcacgctgggtcctaattaccagtctttaaaggcccagcccctagaaacccaagctcctcctcggaaccgctcacctagagccagaccaacgttactcagggctcctcccagcttgtaggagctgaggtttcacccttaacccaaggagcacaggtcccacctccagcccgggagcctaggaccactcagcccctaggagtatatttccgcacttcagaattccatatcttgcgaatccaagctccctgccccaaataacttcagtcctgcttcagaatttggaaatcctagtttcctctccttcgtatcccgagtctgggacacaaaactccgcccccagcctatgagcatcctgagccccgccctcttcctgacgaaactggccccggatcagagcaggacctcccttccgaccctctgggaacctcccagaggtccagcccatctcggagcatcccggaggaaatctgcagaggggttaggagtgggtgacaagagcctgatctcttcctgttttgtacatagatttatttttcagttccaagaaagatgaatacattttgtt

SEQ ID NO: 104514 - DNA, 2195 bp, Homo sapiens
ctaagatcccggacgagcatccttatacggccctgggtctccgggatgtccacctcgccctgtctgaggatcatgcctgggtagtgtttgggcccaatggggagcagacagctgaggtcacctggcacggcaagggcaacgaggaccgcaggggccagacagtcaatgccggtgtggctgagcgggtattgttccctccccccagccttgtccccttcatactgtagtagcccaagccacccaagggactccattttcttgggccacacccctttcttcccatcaccacccacataggaagggaagacagaagagccccttttcctggctgtcattccctgaagcaggcacagggtgggccatcatgagacataatgatctcatccccccctaagagctggctgtacctgaaaggatcatacatgcgctgtgaccgcaagatggaggtggcgttcatggtgtgtgccatcaacccttccattgacctgcacaccgactcgctggagcttctgcagctgcagcagaagctgctctggctgctctatgacctgggacatctggaaaggtaccccatggccttagggaacctggcagatctagaggagctggagcccacccctggccggccagacccactcaccctctaccacaagggcattgcctcagccaagacctactatcgggatgaacacatctacccctacatgtacctggctggctaccactgtcgcaaccgcaatgtgcgggaagccctgcaggcctgggcggacacggccactgtcatccaggactacaactactgccgggaagacgaggagatctacaaggagttctttgaagtagccaatgatgtcatccccaacctgctgaaggaggcagccagcttgctggaggcgggcgaggagcggccgggggagcaaagccagggcacccagagccaaggttccgccctccaggaccctgagtgcttcgcccacctgctgcgattctacgacggcatctgcaaatgggaggagggcagtcccacgcctgtgctgcacgtgggctgggccacctttcttgtgcagtccctaggccgttttgagggacaggtgcggcagaaggtgcgcatagtgagccgagaggccgaggcggccgaggccgaggagccgtggggcgaggaagcccgggaaggccggcggcggggcccacggcgggagtccaagccagaggagcccccgccgcccaagaagccagcactggacaagggcctgggcaccggccagggtgcagtgtcaggacccccccggaagcctcctgggactgtcgctggcacagcccgaggccctgaaggtggcagcacggctcaggtgccagcacccgcagcatcaccaccgccggagggtccagtgctcactttccagagtgagaagatgaagggcatgaaggagctgctggtggccaccaagatcaactcgagcgccatcaagctgcaactcacggcacagtcgcaagtgcagatgaagaagcagaaagtgtccacccctagtgactacactctgtctttcctcaagcggcagcgcaaaggcctctgaactactggggacttcggaccgcttgtggggacccaggctccgcccttagtcccccaactctgagcccatgttctgcccccagcccaaaggggacaggcctcacctctacccaaaccctaggttcccggtcccgagtacagtctgtatcaaacccacgattttctccagctcagaacccagggctctgccccagtcgttagaatataggtctcttctcccagaatcccagccggccaatggaaacctcacgctgggtcctaattaccagtctttaaaggcccagcccctagaaacccaagctcctcctcggaaccgctcacctagagccagaccaacgttactcagggctcctcccagcttgtaggagctgaggtttcacccttaacccaaggagcacaggtcccacctccagcccgggagcctaggaccactcagcccctaggagtatatttccgcacttcagaattccatatcttgcgaatccaagctccctgccccaaataacttcagtcctgcttcagaatttggaaatcctagtttcctctccttcgtatcccgagtctgggacacaaaactccgccccaccccgcccgtcagatcctcaagtcacctagcctccgc

SEQ ID NO: 104515 - DNA, 243 bp, Homo sapiens
tatttgtagtagagacagggtttcaccatgttggccaggctggtctcgaactcctgatctcaggtgatccacccgccttggcctcccaaagtgctgggattacagtgtgagccaccgcaccccggcctggggatggctttaaggcaaggaatgagtgaggtagtgaggcagtctctgaccccttgtctattcagggtccagcatacattctgtcacaggggtagtttcatttgttggatgagg

SEQ ID NO: 104516 - DNA, 757 bp, Homo sapiens
gagtagctgggactacaggcacctgccgccacgcctggctaattttttgtatttttagtagagacagggtttcaccatgttagccaggatggtctcgatctcctgacgtcgtgatccgcctgcctcgacctctcaaagtgctaggattacaggcgtgagccaccgtgcccggccgcctagttgatcttaattctggtaggaaatttggaaatcatctagtgcagcccctcctttttctcaatcatgacatttgagactcgggcacagtggtttataccttaatctcagcactttgggaggaccggggtgggaggattacttgagccctggaggctgaggctgcagtgagccatgatcatgccactgcactccagcctgggtgacagagtaaaacactgtctaaaaagaaagatattgagacccaaattacttaagtgatttacccagttaccttccttcatggaatttgagtgaaactttctttccgttttacatggatttattgttcaggataacctagattggtggtttccaagctttttaatagaactttttttttccttaaaaaaaaaaaaaatctcacctagtccgggtgcggtgactcacgcctgtaattccagcactttgggaggccaaggcggggggattgcttgagcccaggagttcgaaccagcctaggcaacatgatgaaaccccgcctctgtaaaaaataccgaaattagccaggtatggtggcgtgcgcctgcagtcccagctg

SEQ ID NO: 104517 - DNA, 5762 bp, Homo sapiens
cggtcccccgagatcagcaggagattactgcttactctgggtccgcgccacctttaaagctcacggccgcggtctgcgtcttcgttcttgaagtcagcaagaccgcaagcccaccgggaggagcagacgactccggacgcgccatctttaagagctgtaacactcaccgcgaggtccgtggttttattcttaaagtcggcgagaccaacaacccagcagaaggaataaattccgcacacagggaaaagatgccgttccaccatgtgaccgccggcttgttgtacaaggggaattacctcaaccgatcgctctctgctggcagtgacagcgaacagctggctaatatctccgtggaggagctcgatgaaatccgagaggcctttcgggttctggaccgggatgggaacggcttcatctccaagcaggagctgggcatggccatgcgctctttggggtacatgccaagcgaggtggagctggccatcatcatgcagcgcttggacatggacggggatggccaggtggattttgatgaattcatgaccattcttggccccaaactggtgtcttcagaaggtcgcgatggttttcttgggaacacgatagacagcatattctggcagtttgacatgcaaaggataactctggaagagttgaagcacattctctatcatgccttccgagaccacctaacgatgaaggacattgagaacatcattatcaatgaggaagagagcctgaatgagacctcggggaactgccaaacagagtttgaaggagtgcattcccagaagcagaacagacagacctgcgtccggaagagcctcatatgcgcctttgctatggccttcatcatcagtgtcatgctgattgcagccaaccagatactccggagcggcatggagtagcagcctcccgccagccacactgtgttgcagctcaccgcgcatgtgcatgccgtgcgggcagactcttcctccacacagcagacacggacctatggactatggatggatgcggacgatggaaccgttcagtaaagaacccaaggttgagtgcaactggggttgcacttcagcttcatctccttggcagggacactaaagggctgtcttcagtgctttaatggttttgttttctaatgcaataaatcgccaggatttccaaattattgcttcaaccatcagtcataactctagagaaaaacttcatcttcatctcggaattccagcagccatccaggtataatggtgagagagcaagagagaggcatgaacacacagtcacctccactccccattctttcaacccaagggtcaacaggagactctctgctgaggtcaaccctcagttccaagaggctgacttcagggttgccacagaagagggggctttccatcccaccctggcttccttcctccacccagtggagacccccccaaggcatgaggggaaagccattaagtggggtgcagcccctggcggtcttcagctgcacccctcaccgcttccgttcttactgccttttctagaggactgccattggtagagctggggtgctctcagtttccgtcggcacttggctttctgttcctagagcccatcccgcaccagcattttggaacctgcagagagcctttctcccagctttgccgcctgtgctgccattagagaaaaaaagaagcataatcgtgggcatctctataacatagacagatatatatatttggcttcttcgtgtgtgatgtcattcttccctaatcgcttacacctaatataagcttgtcctccctcccacactcatccctgcttctttggggcaggggtgaggcaggttgaggggggaggggactgggactggcggtgaggttttgatacccacacccagccatctggagtcatggagacccaccacgtctctatgccggatgacctttgtaagttaaggtccttgtgcatcttacctttcccttaccttggagtttgctttgttagtcttccccagctaaaaagagaaatgcaatccaaaatggaaagatggagagatcaaacgactgtattttcacataagatcttctggccttcagattctgcaactgactcattttcaggaggttgggggaaaagatgtttatgagtttagccaacagaacaggtaatttactcctgcctgcagaatacttttcgttggggaagagaactgaatccaaggatctgttttcaacaccattccaagtctgtaatttcctgacttttcctagatgtcagccactactatgaattcaagcttgtgtagtcagattagccagtaatctctagatgtaatagttccctttgtacttttccaagctcaggtctttattttgtaatggaattaccttgctcctacttcttttgattacatcctaaaactacatgcttccccccttccagtagcgagccaccagaagctttcttgtctctatgcagtgggtaggattttttggtgcgttgtgtgttcctgatctccctccctgtcttcctgctcagctttctccctactgccttttcagacttggagcacccaaggtctccaatgaaagttttctcattcacctctgcaagtgctactggcaacagcctgagggcagctgtagaaactttccctctgtgggagactatgaatattcctgatgagcacaagtaaaactaaggcttcagccataatatggaggagggagcagatgtaagctcccaagagcctgggggatcacaggtccctctgcaaaacttcctggagttcagcccagcaaggccagaccaaggaggcagcaacctgcctttcccccttacctgccctgctgcctgcacactgcatgcctgccccttctgctgctcctgttggctgactcaccactgtccccttaggattggaattctcaactagaaccggtccaaatgcagaatattaatacatcgaacaacttcatccttaatctctgccctgggcagtttgccctctcccatctggacttagatgggagggcatagcagatcttgaagggatatactttcctgtttttccctgacccccgaaccacccaaccacatccataggggtgcaggaccctaagtagactgggtagaaaccccagggatgattcttcaaagccccctcctccatgagaggggactgaaatgctgcagctgaggctggtcttcagggcagaaaatgagtacttctttgaaggtggcttttctgcgagttcttctgcctcctgctggagaacagagacccttcaagaggtgagggttagatttcattggcagagagattagccactgtgcaggagtagggaggaaaaggagttctggagaggcgccgccatcctgttttctggaaaggctgcaggattcctttcctaacggtgaccttcttcttgctcccagtgacctggaagcaagcccaccctccccaggggaaaatctaggagaatgcattcctctgcagactgctagagagagatggcaagaaggaagacacagaattctttctgacagcctaggagttatcttcccactgtggtaaccccccatgtggcacccagggactgaaggacacagtgcgtggagacggccctgagctagcggcattccttagacttcaggagctcagagtttgtcccggtgacttgcaccctggctgctttgcttggacagtttgtcttgggtatagggaagccttccttgtcaggcagccaactcccagccctgttcacacaaattttatgctagggccccatgccagtcagtgtccccatcatggtggctatgaagctcacggctgaagattccagaaggtcctggtctcccatgcccaagggatgccatgtagccccagctggaagtgacttccgcaggaattgagagggaatagctcacccctcattctgtcctccggacttaggaaccagtgaccttggctgcccaactgtgtggaggctgagtgattgacaaacacaggttggctcattcttgctgcaagagcaggtaccccccgccgcccccctggaaagcacaagtgatgagcaagaaggcattttccttgggagagaaggggaaatggaccctgacccccttgatccccaaagaagctgcgccccacctttccagatacccacaaagcccccagacagaatctagcatcgggactattagcaatggcttccagaatgtgcttgggtcccacgtgactgatctgacaaaaaaaaaagagggatattaccatggcaacccttgcattccaccctgagtttgccaaggcacacaaaaatagggaacattttcttaaagaacactccaattcagcctgagtgcaacctgactctctgcatctgtatcctgctgggagaggcaattacccttaaagaatctgggtggtatctctgcctttttgtctggcatttgaacttgtccttctatttactcaggagagcaggagctacctgtaagccctggtatctccccatccctactcccagccccttctcccagggtccagagccaggaccccttaatctaggtaaattgacagaaatatcatcttggaaggcaaacaagatattaagcctccaatctttaaaagtatcggtttgcctgttgagcacactcctgcaagccaaacacgtgaactttggtgaactgaggtttaggtgtggtcttaggcaaacccagtggtttcagaaatgtctgggtgttttatttgcagagaacaagatgtgtcttatgagtcttctttctcaatacctgccctgtctcaaatctcacttgacaaatggtctacgatcttgcagttatccaaaagagcctatgaaaaatggacagctgcttttgacaataatgcccctcccaacttcccattcatagaatcataaagcgatatgtttcagaactgagagagaaaagtttaccttttattccaaatgcctcgtactcggtttaagtccagactcaggtcataaatcaaagacagttttgcacgttgctcttcacctaaatctagcagtttccctgaggccctatgagggcatggacagaaaatgaaggatgcaaccacccaggacagctccctggtttgggctggcctggccacgtgtggtcacatgtcctgggatctgtgtttactgtgtccttgctctccttccttgcagaagctgctaagctctgctcctcctaactgcaggtctcaaaccctattgggtcattttgccacactatttctccaaaggcccatagtcattacattttttaccatttcaccaagataacagggggggtctggaattcccctgctaggaagggccccttttcctatatcaccgtgatggtacagatgaactgagatgaaacttttagacttcagcacgtcacacatcctggttgtataaccaggaggtctgcagagctgcaacccctgaagaacatctgtcttaaaagacctcaaatcagaacattctcattggcctcttcagtgatccccatggagctaagagtccgtaacctaaaggccttaccatagccatcttccctccacacctgattgctcaactgccccagaaggggagaatctatctgaaatagaaaagaagcattaaggaccaggtgcggtggctcacacctataatcccagcactttgggaggccaaggcaggtggatcacttaagatcaggagttcaagaccagcctggccaacgtggtgaaaccccatctctactaaaaaaaa

SEQ ID NO: 104518 - DNA, 5793 bp, Homo sapiens
cgcccagatcgcgctccgagtcgacgagggggctcgtgcaggtcccggcgcgcgcgtggggagcggcccgggggcgccgagggagccggcggcagcgaggatgccggcacggggacgcggctgcctgctgggggtgtgagcgagaggctgagcgctgcccgctcggcgcatccattccgcaccgccccctccctgcgggcctcggaggaagccccccgcgctgtgcggaggcgcctcggctgccgggctgcggagccccggcccagcaagagggaaaagatgccgttccaccatgtgaccgccggcttgttgtacaaggggaattacctcaaccgatcgctctctgctggcagtgacagcgaacagctggctaatatctccgtggaggagctcgatgaaatccgagaggcctttcgggttctggaccgggatgggaacggcttcatctccaagcaggagctgggcatggccatgcgctctttggggtacatgccaagcgaggtggagctggccatcatcatgcagcgcttggacatggacggggatggccaggtggattttgatgaattcatgaccattcttggccccaaactggtgtcttcagaaggtcgcgatggttttcttgggaacacgatagacagcatattctggcagtttgacatgcaaaggataactctggaagagttgaagcacattctctatcatgccttccgagaccacctaacgatgaaggacattgagaacatcattatcaatgaggaagagagcctgaatgagacctcggggaactgccaaacagagtttgaaggagtgcattcccagaagcagaacagacagacctgcgtccggaagagcctcatatgcgcctttgctatggccttcatcatcagtgtcatgctgattgcagccaaccagatactccggagcggcatggagtagcagcctcccgccagccacactgtgttgcagctcaccgcgcatgtgcatgccgtgcgggcagactcttcctccacacagcagacacggacctatggactatggatggatgcggacgatggaaccgttcagtaaagaacccaaggttgagtgcaactggggttgcacttcagcttcatctccttggcagggacactaaagggctgtcttcagtgctttaatggttttgttttctaatgcaataaatcgccaggatttccaaattattgcttcaaccatcagtcataactctagagaaaaacttcatcttcatctcggaattccagcagccatccaggtataatggtgagagagcaagagagaggcatgaacacacagtcacctccactccccattctttcaacccaagggtcaacaggagactctctgctgaggtcaaccctcagttccaagaggctgacttcagggttgccacagaagagggggctttccatcccaccctggcttccttcctccacccagtggagacccccccaaggcatgaggggaaagccattaagtggggtgcagcccctggcggtcttcagctgcacccctcaccgcttccgttcttactgccttttctagaggactgccattggtagagctggggtgctctcagtttccgtcggcacttggctttctgttcctagagcccatcccgcaccagcattttggaacctgcagagagcctttctcccagctttgccgcctgtgctgccattagagaaaaaaagaagcataatcgtgggcatctctataacatagacagatatatatatttggcttcttcgtgtgtgatgtcattcttccctaatcgcttacacctaatataagcttgtcctccctcccacactcatccctgcttctttggggcaggggtgaggcaggttgaggggggaggggactgggactggcggtgaggttttgatacccacacccagccatctggagtcatggagacccaccacgtctctatgccggatgacctttgtaagttaaggtccttgtgcatcttacctttcccttaccttggagtttgctttgttagtcttccccagctaaaaagagaaatgcaatccaaaatggaaagatggagagatcaaacgactgtattttcacataagatcttctggccttcagattctgcaactgactcattttcaggaggttgggggaaaagatgtttatgagtttagccaacagaacaggtaatttactcctgcctgcagaatacttttcgttggggaagagaactgaatccaaggatctgttttcaacaccattccaagtctgtaatttcctgacttttcctagatgtcagccactactatgaattcaagcttgtgtagtcagattagccagtaatctctagatgtaatagttccctttgtacttttccaagctcaggtctttattttgtaatggaattaccttgctcctacttcttttgattacatcctaaaactacatgcttccccccttccagtagcgagccaccagaagctttcttgtctctatgcagtgggtaggattttttggtgcgttgtgtgttcctgatctccctccctgtcttcctgctcagctttctccctactgccttttcagacttggagcacccaaggtctccaatgaaagttttctcattcacctctgcaagtgctactggcaacagcctgagggcagctgtagaaactttccctctgtgggagactatgaatattcctgatgagcacaagtaaaactaaggcttcagccataatatggaggagggagcagatgtaagctcccaagagcctgggggatcacaggtccctctgcaaaacttcctggagttcagcccagcaaggccagaccaaggaggcagcaacctgcctttcccccttacctgccctgctgcctgcacactgcatgcctgccccttctgctgctcctgttggctgactcaccactgtccccttaggattggaattctcaactagaaccggtccaaatgcagaatattaatacatcgaacaacttcatccttaatctctgccctgggcagtttgccctctcccatctggacttagatgggagggcatagcagatcttgaagggatatactttcctgtttttccctgacccccgaaccacccaaccacatccataggggtgcaggaccctaagtagactgggtagaaaccccagggatgattcttcaaagccccctcctccatgagaggggactgaaatgctgcagctgaggctggtcttcagggcagaaaatgagtacttctttgaaggtggcttttctgcgagttcttctgcctcctgctggagaacagagacccttcaagaggtgagggttagatttcattggcagagagattagccactgtgcaggagtagggaggaaaaggagttctggagaggcgccgccatcctgttttctggaaaggctgcaggattcctttcctaacggtgaccttcttcttgctcccagtgacctggaagcaagcccaccctccccaggggaaaatctaggagaatgcattcctctgcagactgctagagagagatggcaagaaggaagacacagaattctttctgacagcctaggagttatcttcccactgtggtaaccccccatgtggcacccagggactgaaggacacagtgcgtggagacggccctgagctagcggcattccttagacttcaggagctcagagtttgtcccggtgacttgcaccctggctgctttgcttggacagtttgtcttgggtatagggaagccttccttgtcaggcagccaactcccagccctgttcacacaaattttatgctagggccccatgccagtcagtgtccccatcatggtggctatgaagctcacggctgaagattccagaaggtcctggtctcccatgcccaagggatgccatgtagccccagctggaagtgacttccgcaggaattgagagggaatagctcacccctcattctgtcctccggacttaggaaccagtgaccttggctgcccaactgtgtggaggctgagtgattgacaaacacaggttggctcattcttgctgcaagagcaggtaccccccgccgcccccctggaaagcacaagtgatgagcaagaaggcattttccttgggagagaaggggaaatggaccctgacccccttgatccccaaagaagctgcgccccacctttccagatacccacaaagcccccagacagaatctagcatcgggactattagcaatggcttccagaatgtgcttgggtcccacgtgactgatctgacaaaaaaaaaagagggatattaccatggcaacccttgcattccaccctgagtttgccaaggcacacaaaaatagggaacattttcttaaagaacactccaattcagcctgagtgcaacctgactctctgcatctgtatcctgctgggagaggcaattacccttaaagaatctgggtggtatctctgcctttttgtctggcatttgaacttgtccttctatttactcaggagagcaggagctacctgtaagccctggtatctccccatccctactcccagccccttctcccagggtccagagccaggaccccttaatctaggtaaattgacagaaatatcatcttggaaggcaaacaagatattaagcctccaatctttaaaagtatcggtttgcctgttgagcacactcctgcaagccaaacacgtgaactttggtgaactgaggtttaggtgtggtcttaggcaaacccagtggtttcagaaatgtctgggtgttttatttgcagagaacaagatgtgtcttatgagtcttctttctcaatacctgccctgtctcaaatctcacttgacaaatggtctacgatcttgcagttatccaaaagagcctatgaaaaatggacagctgcttttgacaataatgcccctcccaacttcccattcatagaatcataaagcgatatgtttcagaactgagagagaaaagtttaccttttattccaaatgcctcgtactcggtttaagtccagactcaggtcataaatcaaagacagttttgcacgttgctcttcacctaaatctagcagtttccctgaggccctatgagggcatggacagaaaatgaaggatgcaaccacccaggacagctccctggtttgggctggcctggccacgtgtggtcacatgtcctgggatctgtgtttactgtgtccttgctctccttccttgcagaagctgctaagctctgctcctcctaactgcaggtctcaaaccctattgggtcattttgccacactatttctccaaaggcccatagtcattacattttttaccatttcaccaagataacagggggggtctggaattcccctgctaggaagggccccttttcctatatcaccgtgatggtacagatgaactgagatgaaacttttagacttcagcacgtcacacatcctggttgtataaccaggaggtctgcagagctgcaacccctgaagaacatctgtcttaaaagacctcaaatcagaacattctcattggcctcttcagtgatccccatggagctaagagtccgtaacctaaaggccttaccatagccatcttccctccacacctgattgctcaactgccccagaaggggagaatctatctgaaatagaaaagaagcattaaggaccaggtgcggtggctcacacctataatcccagcactttgggaggccaaggcaggtggatcacttaagatcaggagttcaagaccagcctggccaacgtggtgaaaccccatctctactaaaaaaaa

SEQ ID NO: 104519 - DNA, 6037 bp, Homo sapiens
ggctgaataagagaataaaagctggctccccgagcccgctggggaagctcgctggggtgctatccgcttgagtttgtgtttttttctttcctgcttcttaataaagcttactgcttactctgggtccgcgccacctttaaagctcacggccgcggtctgcgtcttcgttcttgaagtcagcaagaccgcaagcccaccgggaggagcagacgactccggacgcgccatctttaagagctgtaacactcaccgcgaggtccgtggttttattcttaaagtcggcgagaccaacaacccagcagaaggaataaattccgcacacagagtctcagtgccttcgctgacgttcctttgatgagcttctaactctctctgagaacatcgccctggacccccgatgcggctgccagagcaacccggagaggggaagcccgagaatgagaaaaagggggacggaggagccctcggagggggagaggagccgccgaggagccaggcccccgacttccccacctgggaaaagatgccgttccaccatgtgaccgccggcttgttgtacaaggggaattacctcaaccgatcgctctctgctggcagtgacagcgaacagctggctaatatctccgtggaggagctcgatgaaatccgagaggcctttcgggttctggaccgggatgggaacggcttcatctccaagcaggagctgggcatggccatgcgctctttggggtacatgccaagcgaggtggagctggccatcatcatgcagcgcttggacatggacggggatggccaggtggattttgatgaattcatgaccattcttggccccaaactggtgtcttcagaaggtcgcgatggttttcttgggaacacgatagacagcatattctggcagtttgacatgcaaaggataactctggaagagttgaagcacattctctatcatgccttccgagaccacctaacgatgaaggacattgagaacatcattatcaatgaggaagagagcctgaatgagacctcggggaactgccaaacagagtttgaaggagtgcattcccagaagcagaacagacagacctgcgtccggaagagcctcatatgcgcctttgctatggccttcatcatcagtgtcatgctgattgcagccaaccagatactccggagcggcatggagtagcagcctcccgccagccacactgtgttgcagctcaccgcgcatgtgcatgccgtgcgggcagactcttcctccacacagcagacacggacctatggactatggatggatgcggacgatggaaccgttcagtaaagaacccaaggttgagtgcaactggggttgcacttcagcttcatctccttggcagggacactaaagggctgtcttcagtgctttaatggttttgttttctaatgcaataaatcgccaggatttccaaattattgcttcaaccatcagtcataactctagagaaaaacttcatcttcatctcggaattccagcagccatccaggtataatggtgagagagcaagagagaggcatgaacacacagtcacctccactccccattctttcaacccaagggtcaacaggagactctctgctgaggtcaaccctcagttccaagaggctgacttcagggttgccacagaagagggggctttccatcccaccctggcttccttcctccacccagtggagacccccccaaggcatgaggggaaagccattaagtggggtgcagcccctggcggtcttcagctgcacccctcaccgcttccgttcttactgccttttctagaggactgccattggtagagctggggtgctctcagtttccgtcggcacttggctttctgttcctagagcccatcccgcaccagcattttggaacctgcagagagcctttctcccagctttgccgcctgtgctgccattagagaaaaaaagaagcataatcgtgggcatctctataacatagacagatatatatatttggcttcttcgtgtgtgatgtcattcttccctaatcgcttacacctaatataagcttgtcctccctcccacactcatccctgcttctttggggcaggggtgaggcaggttgaggggggaggggactgggactggcggtgaggttttgatacccacacccagccatctggagtcatggagacccaccacgtctctatgccggatgacctttgtaagttaaggtccttgtgcatcttacctttcccttaccttggagtttgctttgttagtcttccccagctaaaaagagaaatgcaatccaaaatggaaagatggagagatcaaacgactgtattttcacataagatcttctggccttcagattctgcaactgactcattttcaggaggttgggggaaaagatgtttatgagtttagccaacagaacaggtaatttactcctgcctgcagaatacttttcgttggggaagagaactgaatccaaggatctgttttcaacaccattccaagtctgtaatttcctgacttttcctagatgtcagccactactatgaattcaagcttgtgtagtcagattagccagtaatctctagatgtaatagttccctttgtacttttccaagctcaggtctttattttgtaatggaattaccttgctcctacttcttttgattacatcctaaaactacatgcttccccccttccagtagcgagccaccagaagctttcttgtctctatgcagtgggtaggattttttggtgcgttgtgtgttcctgatctccctccctgtcttcctgctcagctttctccctactgccttttcagacttggagcacccaaggtctccaatgaaagttttctcattcacctctgcaagtgctactggcaacagcctgagggcagctgtagaaactttccctctgtgggagactatgaatattcctgatgagcacaagtaaaactaaggcttcagccataatatggaggagggagcagatgtaagctcccaagagcctgggggatcacaggtccctctgcaaaacttcctggagttcagcccagcaaggccagaccaaggaggcagcaacctgcctttcccccttacctgccctgctgcctgcacactgcatgcctgccccttctgctgctcctgttggctgactcaccactgtccccttaggattggaattctcaactagaaccggtccaaatgcagaatattaatacatcgaacaacttcatccttaatctctgccctgggcagtttgccctctcccatctggacttagatgggagggcatagcagatcttgaagggatatactttcctgtttttccctgacccccgaaccacccaaccacatccataggggtgcaggaccctaagtagactgggtagaaaccccagggatgattcttcaaagccccctcctccatgagaggggactgaaatgctgcagctgaggctggtcttcagggcagaaaatgagtacttctttgaaggtggcttttctgcgagttcttctgcctcctgctggagaacagagacccttcaagaggtgagggttagatttcattggcagagagattagccactgtgcaggagtagggaggaaaaggagttctggagaggcgccgccatcctgttttctggaaaggctgcaggattcctttcctaacggtgaccttcttcttgctcccagtgacctggaagcaagcccaccctccccaggggaaaatctaggagaatgcattcctctgcagactgctagagagagatggcaagaaggaagacacagaattctttctgacagcctaggagttatcttcccactgtggtaaccccccatgtggcacccagggactgaaggacacagtgcgtggagacggccctgagctagcggcattccttagacttcaggagctcagagtttgtcccggtgacttgcaccctggctgctttgcttggacagtttgtcttgggtatagggaagccttccttgtcaggcagccaactcccagccctgttcacacaaattttatgctagggccccatgccagtcagtgtccccatcatggtggctatgaagctcacggctgaagattccagaaggtcctggtctcccatgcccaagggatgccatgtagccccagctggaagtgacttccgcaggaattgagagggaatagctcacccctcattctgtcctccggacttaggaaccagtgaccttggctgcccaactgtgtggaggctgagtgattgacaaacacaggttggctcattcttgctgcaagagcaggtaccccccgccgcccccctggaaagcacaagtgatgagcaagaaggcattttccttgggagagaaggggaaatggaccctgacccccttgatccccaaagaagctgcgccccacctttccagatacccacaaagcccccagacagaatctagcatcgggactattagcaatggcttccagaatgtgcttgggtcccacgtgactgatctgacaaaaaaaaaagagggatattaccatggcaacccttgcattccaccctgagtttgccaaggcacacaaaaatagggaacattttcttaaagaacactccaattcagcctgagtgcaacctgactctctgcatctgtatcctgctgggagaggcaattacccttaaagaatctgggtggtatctctgcctttttgtctggcatttgaacttgtccttctatttactcaggagagcaggagctacctgtaagccctggtatctccccatccctactcccagccccttctcccagggtccagagccaggaccccttaatctaggtaaattgacagaaatatcatcttggaaggcaaacaagatattaagcctccaatctttaaaagtatcggtttgcctgttgagcacactcctgcaagccaaacacgtgaactttggtgaactgaggtttaggtgtggtcttaggcaaacccagtggtttcagaaatgtctgggtgttttatttgcagagaacaagatgtgtcttatgagtcttctttctcaatacctgccctgtctcaaatctcacttgacaaatggtctacgatcttgcagttatccaaaagagcctatgaaaaatggacagctgcttttgacaataatgcccctcccaacttcccattcatagaatcataaagcgatatgtttcagaactgagagagaaaagtttaccttttattccaaatgcctcgtactcggtttaagtccagactcaggtcataaatcaaagacagttttgcacgttgctcttcacctaaatctagcagtttccctgaggccctatgagggcatggacagaaaatgaaggatgcaaccacccaggacagctccctggtttgggctggcctggccacgtgtggtcacatgtcctgggatctgtgtttactgtgtccttgctctccttccttgcagaagctgctaagctctgctcctcctaactgcaggtctcaaaccctattgggtcattttgccacactatttctccaaaggcccatagtcattacattttttaccatttcaccaagataacagggggggtctggaattcccctgctaggaagggccccttttcctatatcaccgtgatggtacagatgaactgagatgaaacttttagacttcagcacgtcacacatcctggttgtataaccaggaggtctgcagagctgcaacccctgaagaacatctgtcttaaaagacctcaaatcagaacattctcattggcctcttcagtgatccccatggagctaagagtccgtaacctaaaggccttaccatagccatcttccctccacacctgattgctcaactgccccagaaggggagaatctatctgaaatagaaaagaagcattaaggaccaggtgcggtggctcacacctataatcccagcactttgggaggccaaggcaggtggatcacttaagatcaggagttcaagaccagcctggccaacgtggtgaaaccccatctctactaaaaaaaa

SEQ ID NO: 104520 - DNA, 5504 bp, Homo sapiens
ttgctggagtcaggaactggaagaaattttagcagcagaagtcaaaattgcaaaattatggaaccaacctaaaagcccatcaaccaatgagtggataaagaaaatgtgaaatccgagaggcctttcgggttctggaccgggatgggaacggcttcatctccaagcaggagctgggcatggccatgcgctctttggggtacatgccaagcgaggtggagctggccatcatcatgcagcgcttggacatggacggggatggccaggtggattttgatgaattcatgaccattcttggccccaaactggtgtcttcagaaggtcgcgatggttttcttgggaacacgatagacagcatattctggcagtttgacatgcaaaggataactctggaagagttgaagcacattctctatcatgccttccgagaccacctaacgatgaaggacattgagaacatcattatcaatgaggaagagagcctgaatgagacctcggggaactgccaaacagagtttgaaggagtgcattcccagaagcagaacagacagacctgcgtccggaagagcctcatatgcgcctttgctatggccttcatcatcagtgtcatgctgattgcagccaaccagatactccggagcggcatggagtagcagcctcccgccagccacactgtgttgcagctcaccgcgcatgtgcatgccgtgcgggcagactcttcctccacacagcagacacggacctatggactatggatggatgcggacgatggaaccgttcagtaaagaacccaaggttgagtgcaactggggttgcacttcagcttcatctccttggcagggacactaaagggctgtcttcagtgctttaatggttttgttttctaatgcaataaatcgccaggatttccaaattattgcttcaaccatcagtcataactctagagaaaaacttcatcttcatctcggaattccagcagccatccaggtataatggtgagagagcaagagagaggcatgaacacacagtcacctccactccccattctttcaacccaagggtcaacaggagactctctgctgaggtcaaccctcagttccaagaggctgacttcagggttgccacagaagagggggctttccatcccaccctggcttccttcctccacccagtggagacccccccaaggcatgaggggaaagccattaagtggggtgcagcccctggcggtcttcagctgcacccctcaccgcttccgttcttactgccttttctagaggactgccattggtagagctggggtgctctcagtttccgtcggcacttggctttctgttcctagagcccatcccgcaccagcattttggaacctgcagagagcctttctcccagctttgccgcctgtgctgccattagagaaaaaaagaagcataatcgtgggcatctctataacatagacagatatatatatttggcttcttcgtgtgtgatgtcattcttccctaatcgcttacacctaatataagcttgtcctccctcccacactcatccctgcttctttggggcaggggtgaggcaggttgaggggggaggggactgggactggcggtgaggttttgatacccacacccagccatctggagtcatggagacccaccacgtctctatgccggatgacctttgtaagttaaggtccttgtgcatcttacctttcccttaccttggagtttgctttgttagtcttccccagctaaaaagagaaatgcaatccaaaatggaaagatggagagatcaaacgactgtattttcacataagatcttctggccttcagattctgcaactgactcattttcaggaggttgggggaaaagatgtttatgagtttagccaacagaacaggtaatttactcctgcctgcagaatacttttcgttggggaagagaactgaatccaaggatctgttttcaacaccattccaagtctgtaatttcctgacttttcctagatgtcagccactactatgaattcaagcttgtgtagtcagattagccagtaatctctagatgtaatagttccctttgtacttttccaagctcaggtctttattttgtaatggaattaccttgctcctacttcttttgattacatcctaaaactacatgcttccccccttccagtagcgagccaccagaagctttcttgtctctatgcagtgggtaggattttttggtgcgttgtgtgttcctgatctccctccctgtcttcctgctcagctttctccctactgccttttcagacttggagcacccaaggtctccaatgaaagttttctcattcacctctgcaagtgctactggcaacagcctgagggcagctgtagaaactttccctctgtgggagactatgaatattcctgatgagcacaagtaaaactaaggcttcagccataatatggaggagggagcagatgtaagctcccaagagcctgggggatcacaggtccctctgcaaaacttcctggagttcagcccagcaaggccagaccaaggaggcagcaacctgcctttcccccttacctgccctgctgcctgcacactgcatgcctgccccttctgctgctcctgttggctgactcaccactgtccccttaggattggaattctcaactagaaccggtccaaatgcagaatattaatacatcgaacaacttcatccttaatctctgccctgggcagtttgccctctcccatctggacttagatgggagggcatagcagatcttgaagggatatactttcctgtttttccctgacccccgaaccacccaaccacatccataggggtgcaggaccctaagtagactgggtagaaaccccagggatgattcttcaaagccccctcctccatgagaggggactgaaatgctgcagctgaggctggtcttcagggcagaaaatgagtacttctttgaaggtggcttttctgcgagttcttctgcctcctgctggagaacagagacccttcaagaggtgagggttagatttcattggcagagagattagccactgtgcaggagtagggaggaaaaggagttctggagaggcgccgccatcctgttttctggaaaggctgcaggattcctttcctaacggtgaccttcttcttgctcccagtgacctggaagcaagcccaccctccccaggggaaaatctaggagaatgcattcctctgcagactgctagagagagatggcaagaaggaagacacagaattctttctgacagcctaggagttatcttcccactgtggtaaccccccatgtggcacccagggactgaaggacacagtgcgtggagacggccctgagctagcggcattccttagacttcaggagctcagagtttgtcccggtgacttgcaccctggctgctttgcttggacagtttgtcttgggtatagggaagccttccttgtcaggcagccaactcccagccctgttcacacaaattttatgctagggccccatgccagtcagtgtccccatcatggtggctatgaagctcacggctgaagattccagaaggtcctggtctcccatgcccaagggatgccatgtagccccagctggaagtgacttccgcaggaattgagagggaatagctcacccctcattctgtcctccggacttaggaaccagtgaccttggctgcccaactgtgtggaggctgagtgattgacaaacacaggttggctcattcttgctgcaagagcaggtaccccccgccgcccccctggaaagcacaagtgatgagcaagaaggcattttccttgggagagaaggggaaatggaccctgacccccttgatccccaaagaagctgcgccccacctttccagatacccacaaagcccccagacagaatctagcatcgggactattagcaatggcttccagaatgtgcttgggtcccacgtgactgatctgacaaaaaaaaaagagggatattaccatggcaacccttgcattccaccctgagtttgccaaggcacacaaaaatagggaacattttcttaaagaacactccaattcagcctgagtgcaacctgactctctgcatctgtatcctgctgggagaggcaattacccttaaagaatctgggtggtatctctgcctttttgtctggcatttgaacttgtccttctatttactcaggagagcaggagctacctgtaagccctggtatctccccatccctactcccagccccttctcccagggtccagagccaggaccccttaatctaggtaaattgacagaaatatcatcttggaaggcaaacaagatattaagcctccaatctttaaaagtatcggtttgcctgttgagcacactcctgcaagccaaacacgtgaactttggtgaactgaggtttaggtgtggtcttaggcaaacccagtggtttcagaaatgtctgggtgttttatttgcagagaacaagatgtgtcttatgagtcttctttctcaatacctgccctgtctcaaatctcacttgacaaatggtctacgatcttgcagttatccaaaagagcctatgaaaaatggacagctgcttttgacaataatgcccctcccaacttcccattcatagaatcataaagcgatatgtttcagaactgagagagaaaagtttaccttttattccaaatgcctcgtactcggtttaagtccagactcaggtcataaatcaaagacagttttgcacgttgctcttcacctaaatctagcagtttccctgaggccctatgagggcatggacagaaaatgaaggatgcaaccacccaggacagctccctggtttgggctggcctggccacgtgtggtcacatgtcctgggatctgtgtttactgtgtccttgctctccttccttgcagaagctgctaagctctgctcctcctaactgcaggtctcaaaccctattgggtcattttgccacactatttctccaaaggcccatagtcattacattttttaccatttcaccaagataacagggggggtctggaattcccctgctaggaagggccccttttcctatatcaccgtgatggtacagatgaactgagatgaaacttttagacttcagcacgtcacacatcctggttgtataaccaggaggtctgcagagctgcaacccctgaagaacatctgtcttaaaagacctcaaatcagaacattctcattggcctcttcagtgatccccatggagctaagagtccgtaacctaaaggccttaccatagccatcttccctccacacctgattgctcaactgccccagaaggggagaatctatctgaaatagaaaagaagcattaaggaccaggtgcggtggctcacacctataatcccagcactttgggaggccaaggcaggtggatcacttaagatcaggagttcaagaccagcctggccaacgtggtgaaaccccatctctactaaaaaaaa

SEQ ID NO: 104521 - DNA, 443 bp, Homo sapiens
gcttgcaggctttacaaaaacatactgtgggatggattaggtttgcaggcagttggcctggattttccagagtgcctactaaattaatttacctaccaccagcctgcagttaggaaaaaatggctctggtttgaactctgaatgttaatgagaaaaaccagtttacccttctccacactcccttcctcttaaggcagtagttactaaacctggcaaaattacctagagaacctttttaaaaaccagattcacagaactgctactgaatcactttctgggcccaagaaccagttttgaaaaccttaatatttggtaatgccctctaaaccttccacaaatgattggtagtttctccccgcaagacgcagccctagtaagaaagcaaaaagcttaactgtatacttttggggaaataaagagcagtggtcttttaattgggtgac

SEQ ID NO: 104522 - DNA, 256 bp, Homo sapiens
tctctttaaatgcctgttaacctgattttaagaatatctttattgtatacatcttattctttaaatgtaccccataactaatagtaccaattttatgttttcaacatttaagttatgatattatacatttcctttaacttgctttttctattcaaactggttgatagctgtagatctgattttgttttctatatttaattcccttgaagtcacataccacggtttatccaatccctgatttttttttttttttttt

SEQ ID NO: 104523 - DNA, 332 bp, Homo sapiens
caacaagtgcttgtatttgttcagtaaggatatattgagtacggtactaggctgcaggaatatgttggtgaagaaaaccaacatgttctctattgtacactcaccgcccttgtgagcttacaatctaggtgaggggtggtgataaacagatctgtgactaagcgctgtgaaggaaggcagcagggttcagtggcttcctacgcattttccctaagtcaagggtcaggcactttgtatcagtctcttttttatgtagatattttatcagcccccttcttctgtgtagatattatatatagatttgtaaaaatctcccccaccttcatcttaaa

SEQ ID NO: 104524 - DNA, 513 bp, Homo sapiens
atgcatagatgtcatctttttctttcatacactctttcttctggatttctcatcaaaagcctgctccgccgcctcctccctgcggcgctccggggctgtagacggctactttattgtctcggctgcgcaccgcgcgggacctggggacccggctctgagccagtcctgcaagtccactctgcgctgtgccttccccggcggcggctgccttcctcttcttcctcttcctctctgtccaagctccagctcagcacgtgagctacgcagcccgactcccgggctctctgggcagccagcgcctgccgcatcccccggcccgggtctgcaggtcgcccccgccaccgccgctcgccgtgcgtcctcgctttgctccacacttacagctgtgccccgggccgcctttctcgcgtccttccgtcctgcctgcctcctctcgctgtcagccggggctttcggctccctctctccccagcagcccccgcccgccgcctctccgggggctggggcggccgc

SEQ ID NO: 104525 - DNA, 444 bp, Homo sapiens
aggcgtggtggcgggcgcctgtggtcccagctactcaggaggctgaggcaggagaatggtgtgaacctgggagcttgagcttgcagtgagccgagatcgagccactgcactccagcctgggcgacagagccagactccatctcaaaaaaaagaactttgagtccagggccaaaaccacatttttatgcaaaacacctttgcaacttcttctttcaaagtgtccagaaaagggggtgggggactgaaggaagtcgttcaatttattcagccctgtgagatgtggatataaaattctttctgcatttttaccattactgtcatcataaatggttatttagaactgcacattgattgtgtctcaggggttctcagaaccggcgttcagcagaacagaacttaataaatgctgattcagggatgcagaatcgaacacactcatgctgt

SEQ ID NO: 104526 - DNA, 466 bp, Homo sapiens
atgcagatatgttgtggaaaaggtaagcgtatacacatttggttatcttcactactacttaattaggctgatcaagaattaccaattgctcctttttggaaagttcactttccctgctttataatttttttcctaactaaaccaagagttgcaattgtgtatctttatttttacttattaagaaatgtttgaaaactaagatgtctcttttcgtttacacgtttcttatgtcaggtccccagtagcatgcagtgactgtatagtggttagcactctgtgttgtggccacagcaaccatggttcaaatctgagtcatgacattgtgggaacatgttccttatttcagccacaaatcaatgaggtctgagtttgtgtagtataaacatttaatgtacagtaaatattttatgacatgaatttgtataatataaatatttaatatacaataaagaataagtaatcattc

SEQ ID NO: 104527 - DNA, 123 bp, Homo sapiens
cttgaatttgtgaacactttcccctccctaccaaaatttcttgagttttatgctcctcaaatgcgaagcatatattattattgatttctgaatactttcaataagtttgtttatttatttatt

SEQ ID NO: 104528 - DNA, 425 bp, Homo sapiens
ttatcaaaacagtcctgggaggtggtttatctctgttttcagacatagggtctacaaagcagaaaagaaggtgatgcacagcagaaatgaaagaggagtttgctttacactctgtggtacgtagcattgatcagggagccaccatggctggcatgcagtgggcatttgatatgtgtttgtccaataaatgaatagcaggcactcaacaaatcatccttgatttgaaataaaagtttttctggattttgcttccagctcactctggtcttctttactctctggctgtttcttctcttccctgttgggttagctcctctccctggcccttgcacttgtcccaggcctgcgaggggagattgacacccagaggttgctggatcgtggtgatgcagaggcatcttgcggtgactcctgggagccagcag

SEQ ID NO: 104529 - DNA, 426 bp, Homo sapiens
tgagacggagtttcactgttgttgcccagtctggagtgcaatggagtgatctcggctcactgcaacctccccctcccaggttcaagcgattctcccacttcagcctcccaagtagctgggattacaggcatgtgctaccatgcccagctgattttttatttttagtagagacagggtttcaccatgttggtcaggttggtcttgaactccagacctcaggtgatgctcccacctcagcctcccaaagtgctgggattacaggtgtgaaccaccacacctggcccctctttccctttcaagcatcataggaaattaagattatttaaggagaagggtagataataatgatccaaacacgagtgtgtttgggggttcatctcaagcaatcaattacagagtaaatacacataatacacacaacttgta

SEQ ID NO: 104530 - DNA, 689 bp, Homo sapiens
ttgggagcactggcgggagcccatggtccggggccgaaccagcccccttctgtttccctgaagaagggtgaggctgagggccctcggaacagagcccctgtgtcattctgtgcagggccgggatagccactagtcactgtgggcagaagcaagaagcagaggctcaggctccatcccaagcctgtgctcctgctgggctgtgggaggtgtgacccttccactgtttcgtagactgagaacatggagggactggcatttgctgtgttaccctgtggtgccatcagcgtgttgtgacaggggcaggaggagtgtgctagaacccacccactctggtactgcccatctctgtggccttgggccagccaccaaaccgtaccatgccttagttcccctatgattcatagctgcttcatgggctgatgtgaggattaaacagcttactatgtgttgggtctggttttgtttggctttgttttgttttttgagacaaggtctcactctgctgctcaggctggagtgcagtggtgcaatcacagctcacagcaggctccacctctcaggctcaagcgatcctcccatctcagcctccctggtaggtgggactataggcacatgcccccatacctggctaattttaaattttttgtagagatagggtctcactatgttgcccaggctggggcttacag

SEQ ID NO: 104531 - DNA, 863 bp, Homo sapiens
  misc_feature (541)..(541): n is a, c, g, or t
gatgtagcagaagcgacgctgtgtgagttcccaggctgaggctgcagagatttgaggcatcttctctcacccagcttgaagtccttccccttggaagccagtcaccgtgaaaaaactcaccatgctgtgaggaagcccaagagagctgcatggagagaagggcctgtggaagagctctgaggtgccactcacatgaagtgagcctttgtggaccttccagcccagccaccagcaaacacaacccagtaagtgtccccagtcaatgcttctctccataggagacctgtaaatgggcggtggggggaggaattttctggtctcacacactattatgggttgaattttccccctcccgaattcttgtgttgaagctcccacctccagtactttacaaagtaacatatttggagataagatcttttttttttttttttggagacggagtctggcggtgtcctcaggctggagtgcctggtgcaatctcggctcatggaacctctgtctcccgggtccagggatcctggggcctaagctcccaagngttgattgagtcctgcttgtgcggacacccacgaggatcagactgtcggcgtctatctaggaagggacgacttagagcccccttttggaaagcctgtgcttaaattatggtggcggagatgtgtcattggtgtttgccccggcctttgccctcctccttgcccacgcggggtctcaaagctggttgttgaccccggtcagggactagggcgcagggcgctgtacacagtgttccgcgtttggggagactccctcttgttccaaccgggcagcttgaacgggcctcctaagggttcacgtcccaatgaatgtgcgtgagagcc

SEQ ID NO: 104532 - DNA, 1902 bp, Homo sapiens
agtagagatgggtttctccgtgttggtcaggctggtcttgaattccccacctcaggtgatctgcctgcctcagcctcccaaagtgctgggattacaggtgtgagccaccacgcctggtcttctacaaaaaaattttaaaaaattagctgggggtggggagggtggggtggtgctgcatgcctgtagtcccagctatttgggaggctgagatgggaggattgcttgagcccatgagattgaggctgtagtgagccatgattgtgccactgcactctaggctgggcaacagaacaagcacctgtatcaaaacaaacaaaaaagtgcaagattggaagcttcgaggcttcttgaggcctagtctcagaactggcacaatatcacttcataaggctatctcagattcaagggagtaagaggagagatgctacctattaaaaggagaagcagcaaatactatggccattctcttcacaatagttgtcaccaaaacgtaatcgatttgtttatgggtttacattgtcatgtctccacaggacaatgcacatggtatgtttgtcagaacccagttggagttttgtttcccagcatccaaaggaaatccctaactttcattttttcttcccgtaagcagccccgaacacttacttataagccatctctacctgaattagcaatcatggataagctcaataactgatcatttccttatcagtttaaaccatatatattttaacactgtctctttttcacacacactagttagctaagaatgagctggggggctgggcgtggtggttcacgcctgtaatcccagcactttgggaggcggaggtgggcggatcacttgaggtcaggagtttgagaccagcctggctaacatggtgaaaccccgtctctactgaaaatgcaaaaattagctgggtgtggtggcaggcatctgtaatcctagctactcaggaggctgaggcaggagaatcccttgaacccaggaggcagaggttgcagtgggccaagatcacaccactgcactccagtctgggtgataaaacgagattccgtctcaaaaaaaaaaaaaaaactgccaaaacgctttttgcaaagtggttgtaccattttatattctcaccaccatgaatgaaagttccaattgctatattcttgccctcatttgataatatttttagttttagccattctaatggatatatagtaataatttgatggttttaatttgcatttctctgatgatcaataacattaagttttgattcaggtacttgttgggcactcatatctttggtgaaatatctgttcaaatcatttgctcttttttttttcttagcacttaaaaaagactttttgccaggcacagtggcacatgcctgtagacctagctactcaggaggctaagacaggaggatcacttgagtccagaagttctgggttgtagtgagctatgtcaatcaggtgtttgcactaagttcagcataaatgtagtgacctcctgggtcactgggacccagagttgcctaaggagcgtcagaagtggagcaggtcaaaactcctgtgctgatcagtagtgggatcacacctgtgaatagccactgcactgcagcctgggcaacatagtgagatcctcatctcctgaaaaaaaaaaaaaaactttagtttttaaaagtagttttaggttctgagcaaaattgagaggagggtacagaaataacttatatatcctcagtgctcccctcccccatgcctccctcatcaccatcccccagcagagtggcacattggttacaattgataaacctacactgacacatcattatcacccaaagcctattgtttccattagggttcactcttggtgctgtacaatctatgggtttgaacaaaggtaca

SEQ ID NO: 104533 - DNA, 439 bp, Homo sapiens
agtcacactctccacctgagggcagaaagggtggggcaggcatgtgagatcctggctcccctccctcttccactctttcccattcactgactccggggttgggtgccctgtccttccctggggctcatgtcttggggcccaattcccctgtctcaaggaaagggcagaaatagcaccatgaggtccgtcaccaccccaaatactttaccccctaccttcccctccagctgtgggaacagtttcaggaccactgacatagaggcttccacaaagaagtttttgaaggtctcatagtcactgccctactttcccttcagttccacctgccactcctcaaaccactcgtaggtgctgggtatgagcatgatcatggtggaccggcctggggatcagagctgatattactactgcccggcccctccctccaccccctcaccca

SEQ ID NO: 104534 - DNA, 1375 bp, Homo sapiens
agaccaaagccatgaagtcaccccaagttcaaacccaaaatgcaatttgcagtggttagaaatgacaaaggatgggtggtaggatccagagaaaaaacagtgaaacccgatggaccttaaatagatctgagggcactgatttgattattttgggtgaaatcttttaagaaaatcttgtcagattcttcacagaaaatttggtaaagcctatatttcatcgccagcctagcaaaggcaagctggcaaacagggaaacaaggagaactgtgtgctcagccctccagagtggcacggattatgaggaggtgatggtccttccccgccaagatcctgagacactgtcactccggaatccaaaaagagattcagataccatgaaaggatttgagcgtttttttatgtgaatccaaagatgacatttacaaaaggtggagaagcagttccctactgagggacgtggatacaaaaagcagatgacacaacacatcccatagagttcccagggaagaatgaacccagattcttgacctgcagaggtggcgtactggctggagaaatctctggctggcgaccgtgctattctgtctgtccacctaactgtgggctcccagatcaccactgccatgggcagggggccgtggggtgggcctgcttggggtgacaggctagctgtgctcccatagcagaggtgggagaagggaatcacatctggtgagcagctatgtcgtgccaggcactgtgctgtgtattgcacacatctcaaaccttgtgacaaatgtgtaagatattttttatgtattacaaatgaaggaactgggctcagaaaagctccattatttgcccaaattgcagcagtaatgcaggaatttgaatccacattaatctgactccacaacccatgttctttcactgaattcccatatccttgttccccctactgtcctcactggtcaaggtgagcttggtcttccacaaacaggctagaaaagtatgcttacttatctttagctttatgcttttaaactaattcttaaaaatcttctctggataagtcaaagacaatgggaatgtgtatttctaatacattaattataatacattaccggtttacacaatgccatcaccttgtcattttctttgacacaacgtccccctcccctctagtttataaatgaggacattgaggcacaaagtgggtaagtgacttgcccaagggggagatttgtccaatcataaagatgggcctgaactttttctactttgcattcttacttgaaaggcaggaaacatatgctcaagagggagatctcacgaaatttcatgtcatatagtgctctcgctaatttaatcctgtcattcctggttatatcccttt

SEQ ID NO: 104535 - DNA, 839 bp, Homo sapiens
agaccaaagccatgaagtcaccccaagttcaaacccaaaatgcaatttgcagtggttagaaatgacaaaggatgggtggtaggatccagagaaaaaacagtgaaacccgatggaccttaaatagatctgagggcactgatttgattattttgggtgaaatcttttaagaaaatcttgtcagattcttcacagaaaatttggtaaagcctatatttcatcgccagcctagcaaagttcaccttgtgcccaaccttctgtctccctgagtcagacctgcagacgattgcatgccaccagctgtcttcactcctgagaacatgacacaaaggaatgctccctgtcaagttcttcattatccttctgatgaatttcccctggtttaaacaagttggtggtagacagacctttctcgcattttcacagacgtgccaggaggaaacccagcgtctctcagtttcctttaaatatatgagataccatgaaaggatttgagcgtttttttatgtgaatccaaagatgacatttacaaaaggtggagaagcagttccctactgagggacgtggatacaaaaagcagatgacacaacacatcccatagagttcccagggaagaatgaacccagattcttgacctgcagaggttatcgcagtcgacttcaggctggaacgggcattgctcttgcactgaagaaagtctgtcctgactccctcagagtgcctcaacatcaaccaagagccaccgtgaacctctggggcactgagcctggccaccagcacccccaccccagcccatatggcctgggcctctcccttggtaagcctcttccaacagggtatca

SEQ ID NO: 104536 - DNA, 650 bp, Homo sapiens
gatcaaatgctaaacgaggggtggattattcatgagttttctgggaaaggggcagggaattcctggaactgaggattcccctttcacaccatgtagggtaacttccacatattgccatgacatttgtaaactgtcttggtgctggcgggagtttcctatagcatgccaatgtattataattagcatacgatgagcagccaggagacctgagactgctttcattgccttgttgattttggcgggttttggctggctttgccacagactgttgtattaggggttctttgtgacctgtatcttgtgaaaccagtcctgctgaattcctgtatcagcaggggctcctcctgcaaatgcagaggctccccaagagagcacaagggggctcaatcagtacttgtgggatgaaggcatggtggtgctccaagagggacgacggatgattcctcggaagccttctctgctgctgatccatagtaaagccccttgagtgccttccttatctccttcaccatcatcttggtaaccaccaaggtgttgactggagtgagttcctggaaagagctccagagctaaggtctgctgcactagggagggaggtgcaccctctcattaagaatgggcaggcgtggtggctcatgcctgtaatccca

SEQ ID NO: 104537 - DNA, 492 bp, Homo sapiens
tatatatatctttctccacctttattaacctataacagacttgaatccatgctctctttaaggcaaagtagaatgtttaaaacgatatactttataaactcaaaaaagtgctttggcattttttttttctttttttttctttttggtacagggtctcactctgtcgctgggctggagtgcgatgtaggctctctgcaacctctccctccttggttcaagcaatcctcccacctcagcctctcaagtagctggggctacagatgtgtgcgaccatgcctacctaatttttgtattttttgtagagaccacgtttcgtcatgttgcccaggctagtcttgaactcctgggttcgagtgatctgcctccctcagtctcccaaagtgctgtgattacaggcatgaaccattgcaccgggctgaaacggcttttaataaagggtgggatcataactaaaaggtcattttgagttcaaatcaccaatccaaaaatggc

SEQ ID NO: 104538 - DNA, 534 bp, Homo sapiens
caggctgatccctgtgtccagattttaattcaggaaacgggagagcacgttttagtcacagcaggagaagtccaccttcagcgatgcctggatgacttaaaagaaaggttaggtgaaaatgatagcgatggagaaatgatagctctcaatcaatgggatgttttagtgtttcctaaaccagttgaacttagactgcggcttatttttggagaaaaatgaaatgccctcaattcagacatgaacagttattcgattgtagacttattttttaataactgaaaaatggcattcactgcctacacttgaataattttgcatttttagcttaagtcataaaatgtttttctgtgtatgtattttactttaagcatgtacacaaaacacacaaaataccaggacaacaaaacaagatattattttgtaaatgttggctatgtaattaggatagacttcttctcttattgatgtggtctttacaatgtaaaccttctggaaatctttatgtttttctataaagatgatatgtattataaa

SEQ ID NO: 104539 - DNA, 355 bp, Homo sapiens
aaaaacgaagaattcaaataggaaattaggaaaacaactctgtttatgattacataaagcagaataaactaggaataaacttaaccaaggaggtgaaagacttgcacactgaaactacaaaattttgctaaaataaattaaagaagagataaatgtaaagacattcaatgctcatggagtctcactctgtcgcccaggctgggctggagtgcaatggcgcgatctcagctcactgcaacctctgcctcccgggttcaagcaattctcctgcctcagcttcctgagtagctgggattagaggcgcacgccaccacgcccagcttatttttgtatttagtagaggcggaggtcgacg

SEQ ID NO: 104540 - DNA, 308 bp, Homo sapiens
attctccagaaaacccctctggtcatcagatgtccaccatgctctgagagggaagagtaatttggtcctagtctgctctctcattttttattagttagaaccaagttattttccagtcttgggattaggcaggttcaagattgactaaggctaacagtagactatgtttagactgatttataaacttcctcaaaatttaggccatgatgaaaggaccagaaatagaccttttccagttatagcctaggatatgatacactggtaaatctaaattccattctgttaattgactttaaaatttaatgctc

SEQ ID NO: 104541 - DNA, 512 bp, Homo sapiens
gtggtacatctacacaatggagtactactcagctattaaaaagaatgaatttatgaaattcctaggcaaatggatggacctggagggcatcatcctgagtgaggtaacacattcacaaaggaactcacacaatatgtactcactgataagtggatattagcccaaaacctaggatacccaagataaaagatacaatttcctaaacacatgaaactcaagaaaaatgaagactgaagtgtggacactatgcccctccttagaagtgggaacaaaacacccttggaaggagttacagagacaaagtttggagctgagatgaaaggatggaccatgtagagactgccatatccagggatccaccccataatcagcatccaaacgctgacaccattgcatacactagcaagattttatcgaaaggacccagatatagctgtctcttgtgagactatgccggggcctagcaaacacagaagtggatgctcacagtcagctaatggatggatcacagg

SEQ ID NO: 104542 - DNA, 409 bp, Homo sapiens
agaatacaacattgagtcttcccatccaagacaattgtaaagcctcttcctgtctcaggctctgttttggtgacatgctcaagtcttatagtagattttaagacactcatgaatgggatgtgtatgtaccttgatttagtagtgcttaaatacttgttgaaggaatgatagctttaggctgagctagctctacttttgtgatgttatttgtacttacttgatgttcaatccctacactcttgttttttctgtcagaaaatatggtctactttgccgggcgtggtggctcacgcttgtaattctagcactttgggaggctgaggcaggagaatcgcttgaacctgggaggtggaggttgcgatgagccaagatctcaccattgcactccagcctgagcaacaagagtgaa

SEQ ID NO: 104543 - DNA, 634 bp, Homo sapiens
acacccagcctggcctccatggcccctgtgcccttaggggtcctgcaggtgtgtcaggagcctcccagagtgctatgagcagattatgggaagtacccagctgggctccaggcctagctccaccccagtctcagcgggtccctgcccggggttgagtgccttggcatcttcgaagccgagtttcctcctcctcctcgcagctctgacagtgctctgtgtgcctctgagatagacccacgcagggtgtccccagggcaggtttcccaacctcgaatgagaaggttgggggcgggcactgcatcagcctaggatgaggcggcctgagcattctcctgtcccccacagttctgacctgtggtccagaggggccatgccgtcccctgctctacccaggcctggtccttgacagcccctgcaggcgctgaggttgggacagccagggtccacatccctcctggctttgtgatgagctcgtggcgaggccatgcggctctttaagcagcctctctagggctgcagtcaaggctggggtgtgctgggaaagcaaccctgaaagcccagcctgtgcaggtggaggacaggcccaagaggggctgaggaagctggagggaggagagagctggggggagcgagg

SEQ ID NO: 104544 - DNA, 320 bp, Homo sapiens
agctcggtacccctccttccctctctcacgcactgaatacattttccgtgtgaggtggggagaggaatagtcacttatgccttgagctcagggaatctatattgtcacaaatgataaacatagagcaagggaagaaatcagatatgcatttgttgcaggcaagcagagggataactttgatttctgtcctttgttccatgcctgtgaagataagctattaacttacattgtcagggtgaaattcaacagaactggttcacgggaaagatcttagggctcacaaggaatttccttgtcggcaaattgtgagggagatatgt

SEQ ID NO: 104545 - DNA, 494 bp, Homo sapiens
tgattcttaactgctgttttctttgacctcctccacttctaccacctaaaaaccttcttcctcaccaccacccccacttctctgaagctccctctttctcccccatccactcttcagctgaccacaggtggcttctttgtagttgcttgagcatatgtgagccatgaaagggtttcgtttccccttctgttctcagcccagctgtgccagcctctgtgatccttgtgagctttaaatgaggcactccagacccttcttacgcaggccatggcatttctggaactgccacacctaaaatccaggtatgaggaaggaaggagacaactatttgaacacctacattgtaccaggccccgtgcttgacatagagacactgagcccaacctttaaaggcctcagcttccaggtccttccaggcatcttactgatgggcacctggaggctctgagatgattggtctgattccatctgcagtctgtctgtctgtctgtggg

SEQ ID NO: 104546 - DNA, 367 bp, Homo sapiens
accacctcggcctcccaaagtgctgggattacatgtgccaccatgccttgcctaaaatcccatttgattgttcccaggtattataggaaatggcctgcctcatgtcaattgaaacaatgacctattagctcgtcttactctccttctagatgagtacaagatacaggcctcttccttccccaggtactttctataggccatatatgtgtttctgtccagagcacaggcccacctctcaaggttctctacctcccataactgcacttggcttcccctcaagaggggagtaagagggtggtgacaatgagacccccttcccctttagagagggacatgacttgtctcatcctgactgctcttccatggc

SEQ ID NO: 104547 - DNA, 505 bp, Homo sapiens
ggggactggaggcacagcatgggggaggaaatggggcaaaggtgagttaaaaagccatgaaatttcctatggctttgaatgtgtctttttcttggttgggtgggcttggttgctgtagatctttgacttccaaagcttgtcaaaagaagttattttagccacttcctagttggttatttaacatttctgtaggaaaatgagggcctggagctttctagtccaccatcttgctgacattcctctccactgcctaaatcttagacccaaagggtataacccaaggagatagtatggagcctcagtggtcagagcagagccaaggctgagaggtaacaagagacaagttaaataggaaaaggtggggagcggaggtctggaaattggaaactgaagacttagacttaattctgtgaaattaacaagcaactataacaatgcctggcaaggcaacaaagccaaggcatgcgctgggtgatagctcatgcctgtaatcccagccctgtgg

SEQ ID NO: 104548 - DNA, 187 bp, Homo sapiens
gctttaaatgctttgtaaatcatagcaaaaaataatggccttctaacagagagtcatataccgtaatcaactggaagaaagtcagcattgtaatttaaaataaaaaaaaatccttatgtgagtctctcgtttaaattaagagacaggacgtgattcaaataataaggcccaagtgaggctggttttt

SEQ ID NO: 104549 - DNA, 330 bp, Homo sapiens
caattctcctgtctcagcctccctaatagctgggattacaggcatccaccaccacacccggctaatttttgtatttttagttagagacagggtttcatcatattggacaggctggtctcaaactcttgacctcaggtgatcctcaggcctcagcctcccaaagtgctgggattacaggtgtgagccactactcccagcccattttgtttttaattgggattatattatagatcttttaaaagctgctatataacctgatatattgagaacattttacttcaaatagttaaaaacacacaatcacccattatcctaccagctagagagaac

SEQ ID NO: 104550 - DNA, 472 bp, Homo sapiens
gtacttggctatgggggaagataactccgacattttaatatcttgatcaatttgtgacattcaaaataattccatttaagaaacattaatcaaaacttaaagagacataccactaagtatcccacacagtatactgaaaataaatatagaaatacaaccagaagtctacagatcaccacagtagacagactggtgaagccccagctatcatgagctgttgagttacaacagctgatgactatcatttcagccacttttcctacagagtaggatggactttagttagaagcctccctaagataaattcagttgttgcaagacctgatgttagtaatgcgataatttgtaagtcgatgctgaatcagtttctgctccagagagatttaactttagggatgactgattgttgttgaaagttttgttttcaaaccagtttttgtaattacgtacttttctgggtcctttttgtagt

SEQ ID NO: 104551 - DNA, 395 bp, Homo sapiens
cagatgaggaaatgaagaccgacggaagctatctcttgagctcgtcatgcagctggcgaagggtggagcagggcttcaaatgcagacctttccaactccattgtccctgctctcctgcgtgccctttcctgccttttctcaagggagaccatgagatcaagaaaaaagattttcttctccacggcaactgaagtgttgactttgacagtgaaagctacagagtgtatgatgtttccctttttgccgtgcttgccaggaagcttgtgctttttgtcaaactgcttacttcccctttccatggttttggtcttctacctttgacagacttttattcacaagtcttactgtaagctgttctactcatagaataagctgaataaatagaaattgaattg

SEQ ID NO: 104552 - DNA, 232 bp, Homo sapiens
aaggacttgcttgtgctaccccctttatagttgcttcctacttccaatgtccgtataccctggatatcactattccattctccatttctaaaactgtcacttcaaaaatgttacaaaattaaagtattttttttttgagactggcctttttcatttagcataatgctcctaagatgcacccggttgttgtgtaccaatagttcatttctttccattgccaaacagtattcta

SEQ ID NO: 104553 - DNA, 559 bp, Homo sapiens
tatagtacacagggcagtagcacaagtttagagttaggcagacctgggttcaaaattcaggttatcataaccaaggccattttttatttaaactttttattttgaaataatgatagaaaagacaaaaataacacagagtcctatgaaccctgtgtaaacttctcccaatggtggctttgtatatagctatagtacaatatcaaaagcagattttaaaaaataatttattttagtttcagggagtgcttgtatacttgttacatggtatattgcataatgctgaagtttggggtatgactgatcctgtcacctaggtaatgagcatagtactcaatggttactttttcaaccttgccctttcttttccttcccccttattagtgttgccatttttatgtccatgtttacccaatgtcaaaaaccgaaaattgatattgttacattactgttgtctagactacagactttattcagttttaacaatttttaaacttgcattcatgtgaatgtgtgtatatatgtgtgtagttctttgtagttgtatttaatgaatagattc

SEQ ID NO: 104554 - DNA, 2250 bp, Homo sapiens
ttgcatggagttagtcattgtgattgtagctttatttcataatatattaagacttgcactgctatttactagcagtgagaagaaacctcaggaaaggatatgaaaaagcaagtggccagtgtctgggatactgggccttggtaaagcagaggagggcacacccacagtcctcttattctctgttttactgcttgttttgaggttctggggtctggcaaagaggatgcagtttgacacctgcagccctttctcaatcccactaatgtcttactaatgtggaacagtccatattagctccagagagtgtcaaacccagagaaatgtgtgcaaaaatgatactcttttctgcattagccccaccattgtgttcaccaatgcttggaacactgcctgaaggcactcattttttaatttttattttatttttaattttttatatctttatgagacgatctcactctgtcaccaggttggagtacagtggtacaatcacaactcaccgtagcctcaaactcctgggctcaagtgattctcccacctcaggcacccaaatagctggaactacaggcatataccgccacacccagctaattttattttttgaaaagacaaggttccctatgttgcccagctggtcttaaactcctgggctccagcaattatcccagcttgggctccaaaagtgctgggattacaggcatgagtcaccatgcctggcctcattttttaaaacaaatgaataaatggacaaatgagtaaatgagaaagtctcacaccatgaaagatgctagtccaatgagctgaatacagaggtaatataaatgtcttccagctgttgcttttctgttctcaagctgcccctcctggggtaggagcataatctacatcactgggcagtcacaggacactctatagcaaggttgtagcgtcctctccagtggggggagaaaaggaactgtgcctaccaaaggtactctcttgtcagcaatttccatttctatactttatgggacactagaaactaaaagcaacaaataatctgatataagtccttgtatagtcatccttcaattcagtagcaatattttctggtcactactaacctgtattgtattaaaatgagactattggaaggaaatggtgctaaaactaataacatctcttaccaacctttacccaactcctgggttggcaaacagctgaccaaactgccatcacctcccacttggaagtgtatggccgacagcatgaaatagctgagcccagatgttccttctgcatcctccgaatcccagggctgggtgtaggtagccgttggaggccatcgctacagggcacctatctgttatcgctgctgtcctcccaacagctgtctccagttctagttccttggttttcaggcacagtgggggatgttctgcacccagtggacttcaaaagagttttgaagacttaattttttgtaaaacaagtacttgagattttggtttatccataatagaatgtatttcattagattctctgattctatataagaatgtgaaaagattgatatattgttgttagaaataatgttatttctttccaattttttttttttttttttttgagatggagtctcgctctgtcacccaggctggagtcagtggtgtgatctcggctcactgcagcctctaactcccaggttcaagctattctcctgcctcagcctcccaagtagctggattacaggcatacaccaccacgcctggctatgttttgtatttttcgtagagatagggtttcaccatgttggccaggctggtctcaaactcctgacctcaagtgatccacccacttcagcttcccaaagcactgggattacaggtgtgagccactgtgcccggcaaatttttttacctttacagaaggttttgcttatttaattgtgagctcatttttctttgttacttttgtccccccagatttgggggacaaaataaaattaatcttttaaaatgtgtcagccatatgtatggggcttccatttggggtgatgagaaagttctggaactagatagtggtcatggttatacaacatcataaatgcaattactgccactgaattgtatgttttaaagtggttaaaatgttaagttttatgttttattacaatttttaaatgtgtcaaccaactttatagtacataaattatatctcagtaaagctgttaaataaataaatatagtaaaaattttagaactaaaaaaa

SEQ ID NO: 104555 - DNA, 358 bp, Homo sapiens
gtccggaatccgcggccaggacccgcgcaggcccctccttagctgaggggcggccgggtactcgggtcccgacccgcgaccaccgcacccatcaccaccacagcgggaactgcccggcggcccccagaagccccggcccggccgcagaggtgggcccccgagcacagaggccccgaaactcggctcgcagccctcagccccaatgtcggggggcgcggtggccccgggcgaccccccaccccgctcctggagcccacaggtggccccacaacttcgcggcccgcgctgcgcccgcggggcctagcacgctgccgcgggacctgcccaacgtggagtgtgtgcctgccccctcccgccc

SEQ ID NO: 104556 - DNA, 566 bp, Homo sapiens
cacccggcagagagcaggggcagcagggatgggttatcaagaccagcgaggagctggacctctgggagaagaagggagggtcaggatctgagtgaacacgggggaaggggacagaagctggggcgcagggctgagatgagagggccctggggctggtggcggtgggggtgcggggaatcactgagggacaagaatggggatcactatggtcaagggctgttggggagcacttggcaatagaaagttatcgggagaaggccgggcacggtgactcatgcctgtaatccccaccgcctgtaatcccagcactttgggaggccgaggcgggcagatcacgaggtcaggagatcaagaccatcctggctaacacagtgaaacccagtctctactaaaaaatacaaaaaattagccgggcatggtggcaagtgcctgtagtcccagcctcccgagcagctgggattacaggcgcccactaatttttgtattcttagtagaaacgaggtttcaacatgttggccaggatggtctcaatctcttgacctcttgatccacccgacttggcctcc

SEQ ID NO: 104557 - DNA, 383 bp, Homo sapiens
cattgattgggaaaatggcagaactactctgaggccagtaatacgttaaaattttttaaaatgtatttatacataatctatatagttttaacataattataatgggtcaaacatcaatgcttgatgtgcttatagacttcaagatttttccaataactgaaactttgcagagatccactgccctgggaaagtggctagaaccagtcctctagggcagtaaaattcccccaaaattttatttgatgaaactctgtagcattagcacttgttacctaaattagtctttcatctttctggctgggcatggtactcatgcctgtaatccaagcactttgagaggccaaggcagcccaggagttttgggaccagcctgggcaacgtag

SEQ ID NO: 104558 - DNA, 560 bp, Homo sapiens
aaggaattgaccacagctgctgcaaggacaggctgagtgtggagattcacagctggagaacaatttgcctcaggaagaatcacaccttgagtctcactcatatttgatttacctgagacttttgattttagacttttgagttgattccggaaggagttaagacttttggggctattggaatgaaatgaatgcattttgtatgtgagaaggacataagttttggggagggtatggagcagaacgctatggtttggatgtatcctctccaaaattcagatgttaccagtgtgctgacattaagagatgggacctttaagaggtgattacgccatgagggctccttcctaataaggaatgaatacataaatgggataaataaattaatgagattaaggctcttaaaaaagagccttcatgctgcacttggctagcttgctgtcttgcctttctgccttctgccatgagatgacacagcagagggccctcacccgatggtggcaacttgatcttggacttcccagtcttcagaactgtgacaaataaatttcttttctttataa

SEQ ID NO: 104559 - DNA, 861 bp, Homo sapiens
gtgaaatgatcctttccaggtaacagccgagaataggggactgcgggacatctccgcctcttccttggctctgggccttcgatgtaaggcgttagaggacaatctttgttggctggatttctgttcttcccctagagatatctggttctttggaggccacttgggcaattgggttaacaatcacttacctgatacctgctcccaaaacgaatcctattgatgaaggatcttctttctgagcagtaaacctgtgtttaattaaccttatgcaaatgagcttaattgcttatcagtggctgttgtccagaagcacctagggattccttccctcagacattttcagcacctagatgaaccgcaaagttggaagcctttcatctacacatgtgttgtgtgcctgtggagccctgggccctgtgttgaagattgcaaggaaaagcaaggtgtgacccctgctgtggacttactttcagtcttagggcaacagacacttacaaccaagaataacaaagggagccgtcggaacatcctgggactccaaggctccgacccccagcgcaaaggactctagggactggcttcctggctgtaccgcgcagcgggactcctcgtctgcacagcttcggggaggcccagagcacgcccctactagccggctccgtccaaggcccaccaagacaacccgccacgaaacttcccggccccctcagcccagggctcccggtcccgagctgctggccggtggcgcggggcctgccgcccgccttctacgagccgcatggacggaggcctgcgtgttatttcatagaggccgaaacggagacccaggaaagataaaagaagggctcaacccgggacccc

SEQ ID NO: 104560 - DNA, 604 bp, Homo sapiens
aatccatgaatcaatagagataatcaaggaaaagtcatcagaacaaaatctatcaccaaccactgaaaaactcctttgtcacctatggaagtgaccaacttttccgaaaattagaagttataaggaaagaagtaagtacttttccttcctctttcagagatactgtagttcatcccgttgatgaaatatagcacttcttaggctgggcgtggtggctcaggcctgtaatcccagcactttgggaggcggaggcgggtggattacctgaggtcaggagttcaagaccagcctgatgaacatggtgaatccctgtctctactaaaattacaaaattagcccggtgtggtggcatgcttctgtaattccagctccttgggagactgaggcaaaagaatcgcttgaacccaggagacggaagttgcaatgagccaagattgtgccactgcactccagcctgggcgacaagagcgaaactccatctcaaaaaaaaaaaaaaatacagctcttcttgagctatgctacatagtaaatgtattattcttccagagaatgtattcttcaaaagtacactattatagttaataaagtaatgataaagctgata

SEQ ID NO: 104561 - DNA, 437 bp, Homo sapiens
gtcgaccccccacccccaatccgtggaaaaactgtcttccacgaaaccagtccctggtgccaaaaaggtgggggatggttttgggatgacactgttccacctcaaatcatcaggcgttagagtctcataaggagaccgtaacctagatcccttgcacgtgcagttcaccataggagttgtgctcctgtgagaatctaattctgctgctgatctgacaggaggagttcaggaggtaatgagagcaatggagagtggctgcaaatacagatgaagctttgctcactcacccgccactcacctcctgctgtgtggcccagttcctaacaggccacagaccagtaagtcttgggggcctgctgggggttgggggcccctgcttgaggagacatccctgtcaaaatctctagtgacacaggaatccatttggacaaattata

SEQ ID NO: 104562 - DNA, 273 bp, Homo sapiens
acctaataaatacagagggctgtgtaaagctcacggcccttgtccactagaggcaagatgccccttgacctcttcttccaaatatactcttttgtgtcttgtcttttattcccacattcgcccccctttgttcagtcccccgaggtccatgcaggttacaagtggcaccccaaacagcaacaggatcgggtgctctgcatagtggcatccgaacacaggacttcgaggacatgaatgaagaaagtccgctggagcagaggaactgaaattgac

SEQ ID NO: 104563 - DNA, 350 bp, Homo sapiens
actactaaaactataaatgtgttaggaagggaaaagcaataacagctaagcctatggtaaacataatcaaagggaaaacacaaaccagaaggaaagaagatgacatagagctagcgtctgaagaaaattttaatgtgttaagttctttggacaatggtgcacttgctaaatttgaaagtttcagtaaggtgggaaaatttaacttgtctaaatggattcaaaaagaagcagaaaaattaagtggttatgaaccttggaaaaagatatgtgtcaaataatttcctcaaaaaagtcccttggcccagagagttttatagacacgttctttcaaatcgtgagagaggaaggat

SEQ ID NO: 104564 - DNA, 83 bp, Homo sapiens
aaggtgatgaggggcctctccatctgcaccacctgcctcctgagcatgttccaggccattaccatcagccccagcacctcctg

SEQ ID NO: 104565 - DNA, 305 bp, Homo sapiens
agtacacctagtatctttacagtgactattaagtatttttgaactcaaagtatatattcatcttaaactcctggaactatgaaccctcccatgtaattttctgatgaatgaaaaggaaaactttctttcaaataagtgtcatctgttgcaaaagtatgtgatttaaaaacacatgtaaatataatcttagctctaatgttttcctttgggagtttgggaaaaagcagttacatttctctgttgtctggtttttatcatttgaaaattggaagattcattctgattgctgagctgcatcagtaggg

SEQ ID NO: 104566 - DNA, 382 bp, Homo sapiens
ggttagagggcctgatgtataaaccggacaccagttgattcattttttaaggagtggtttcactgccaggctgagtggatattgcctcatctgggctaggacaccctctccctgcaggccacccagataaacagccacaggtgagaaggctgctgagtgcccctggaaggtgagctagaggagccagaaggtggttagggtgttgaagagggtcagatgctgacagtgtgctgggccagccccagcccaggcaagcatccctggcctcactgggtccctttcccccagacagagtaagtacaggcgctgtcagcatttacttctctggctgacctttctcttttctaatcctgtgcattaggcctttcatatgttagtgtca

SEQ ID NO: 104567 - DNA, 419 bp, Homo sapiens
cccggaggcaacacaagggagaagaggcctttttatgttgggaggtcagagactcaggagagcaactatagccaggaaagtcacatcgcctgaaagatcaaaacaagaaggcaagaaaacaggccacaggaaaatgatacttcagagggaaattcctctctgaggtaggctcttctaggtagatatgtctatgcagaatagaacaaatctagaggtagaattgttggcaggatggttataattagataataaaggtagattcttagatagctatggtacgatatgaaaatcaaagtaaatattattttcaccaaatcataaagtacttctgtaacacataaaaatgtgccaatgaaattactcagaaatgtgaaagtagttatatataaaatgtggatatctgaataaattcacttgga

SEQ ID NO: 104568 - DNA, 537 bp, Homo sapiens
ggagggtcctggctgtcacagttggacgcgcgaacggcagcgtctgggcgacaggcgatgtcccagccactgaaaccgtatttgggggcactttcaaaatagatcaggagaaaataaaaacaatttgatttttgatttttagagataccaaaatcacaacttgatttttggaggaattaaagcaacctgcgatgtcaaggctacgtaggttgaactttgcaggttgaccgtgtgtgacttggctaacgcaagagtgagtgacagatgtaagcatcggaaagggcatcatttctttgactgcttgttctcaagtctggaagagatcggcgtcgtaatcacagaagccagacctccactttcctgtgacagagggagattaccgaggcattttagagccaaggcgggtcaaatgataattgcttctaattggcatccccagaagcaccttaattatttatctgcagctgtcactcaaagagggaaattcttcctacctttggaaaactggttttctttcatattgttattctaatacat

SEQ ID NO: 104569 - DNA, 411 bp, Homo sapiens
tcagacggagtcttgctcattgtccaggctggagtgcagtgatgcacgatctcggctcactgcaacctccgcctcctgggttcaagccattctcctgcctcagcctccctagtagctgggactacaggcatgtgccaccacacccaactaattttttctatttttagtagagatggggttttgccgtgttagccaggatggtcttgatctcatgacttcgtgatccacccacctcggcctcccaaagtgctgggattacaggcatgagccaccatgcctggcctcaagtccagaatctttaatatacgttcaaagatgattggagaccaggctcttgatttaccttccagcctctttccccctcagcctataactcccaaactcaggctgcgctgtgctgtctttaacaaa

SEQ ID NO: 104570 - DNA, 689 bp, Homo sapiens
actttccttcttactggtcactatgtagtataggttgagtatcccttatctgaaacacctgggacccgttttaaccaaagggaaatgacagaagtaatgttgctccagttccaggtgtaggccttaagagtctagcagttcaactttggctctctggagaaacctagttgtcatgtgagaagtccaagtaccctgagaccaccatgttttgaagaggcccaagctggccacatgtagagcatcaaagagcccggacaagtgagaatcaaggtcacagacacaggcctggtgaggtgttctatccccaagctattcgagccatcccagcagattccatagagccaagatgagctgaacctgctaagtcctgacaagctgcagaattatgagcaaataataaaactgttattggtttaagccagcaaatttaggggtttgtcatataagagataaaccaaaatgccaattcatttgcttttctgcttaagccagcttgagctgggcatttgtcattttaacaaaaaatgttctagctgacagctttggtcttgacgggcaatcagggcggaacattcccctccccttggagtgcttttcagttccataagtctgtgagacattgtattacatcagtcccctcaagaagcacaccagaaacccttacctgcaagtcacagttcccctgacta

SEQ ID NO: 104571 - DNA, 409 bp, Homo sapiens
aacctgcaggggaagaaagtcagataggccagtgagaattccagcaggcctggtttccgtcctcacacacttggctcctgtttgtgtccagggacgttacttgcacacaggggagaatagattgaggcgttactcgtgggtctttgtagagagaatgtgctcttccacttagcattagtgtagagcgtagaccaaagatttgccagtgaacattccttgttgtgagatcataagaggtacctgtctgcagatcttgcaaaccatctctatgctcctgaatattgtccactgtcccggagactcttggctgatggggtgtgagatatatgtgtggcatttctatttctgaatgccttttttgctattgctctctccaataccatatttaaaaggctcctggagcaattcc

SEQ ID NO: 104572 - DNA, 488 bp, Homo sapiens
attagagtgagaggatggacctcagccttggggtcagaactcccgtgcttgggatgggggttggcaaaaataaagtagaattaataagacatgggctgaaggtccagatgaagacagaagccctgttatcagaaccaaagcccagtgctagatatgtgtgcatccaggagggctgggttctaaatcctggaggatggggatgcttaggctccctacattcctcccactaataatggtcagtatgaatcatgtggctggctgaggtgaggtttaacttagccatatagtcttctccctgacccccaggttttcttttaaagcaaaatacctgcttcatcatggaaacagagtctttgacttaacaatggactattacaattccacatgagagcattagagacctaatacaaggaagcaaggaagtgaattcagcttctggctccagacaccggctgggtggtcctggacatgaacccttaccatgctgg

SEQ ID NO: 104573 - DNA, 159 bp, Homo sapiens
tgctggtcagggggcgctggtgcgcaggcgcgcggggccgccgtcgcagctaccttcctgcgccgattcggagagggccccctaatctctactcggcccgcaccagcagcgctggcgtcagggcgcggtgggggcaagacgggtgactggcagcagggc

SEQ ID NO: 104574 - DNA, 417 bp, Homo sapiens
ctctactaaaaatacaaaaattagctgggcatggtgacacgcgcctgtagtcctggctacttgggaggctgagggaggagaattgcttgaatctggcaggtggaggctgcaatgagccaagatcgtgccactacactccagcctggcaacagagtgacactgtctcaaaacaaaaagaaaaaaaaaagaaaaaagaaaaactcacctaaatatgggatgatcatattgtttgtagtccagactgggaaacttgagagtgaaagtgacacagaggcagcaggtgtatcctgagatagcccaggcaagcgaacaaggtttccctatctaaatcctattactagcaaagcatccattaaggatgaggaaattggctgggcatggtggctcacgcctgtaaccccagcactttgggaggct

SEQ ID NO: 104575 - DNA, 230 bp, Homo sapiens
gcgtgatgagctagcgggagccggagccccagccaggggagaggatcttgcagccagcaaccctggggcagccataccagagaagtggcaaaggggcaggagaaatgcccgatttttctctcatttcacttccagtttcctgcctttggccaaacacacaggaagccagtgggcaaagtcagcatcctgagcacagggcaggtcagagaagggtggagaatagaaagtgg

SEQ ID NO: 104576 - DNA, 205 bp, Homo sapiens
cgcagggagaaacgacaacgcatattaatcacttgattatgatgtgtaatcatttttgtcatttttagaatgtcaaaaaaatctgttgcaaaaaaaaatctccttattgagttttaaaacgtctgtaggtttctcccagtaccctggggcaatagagacccatcataacatcaaccagtgatgagccctgctaatgtgctgggtg

SEQ ID NO: 104577 - DNA, 415 bp, Homo sapiens
tctaatgattaaaatcagtaatttcattcaaagaacaattctaacaatttggtaatgtggatttcccattcacagttacttagcacatttgtagtaatagggactactattgctaggaccaaccacatcaatgagttagtgggcaaaacacatgtgcacccacaaggaaaagataaaactggctattaaaaagctactatataattacattaaacggcccctgaatggtttggctgtgtcccacccaaatctcattttgaattgtagctgccaaaattcctacgtgttgtgggagggacccacattgtatcatggggcacatctttcccatactgttcttatgatagtgaataagtcttatgagatctgatggttttataagggggagtttccctgcacaagctctctctttgcc

SEQ ID NO: 104578 - DNA, 696 bp, Homo sapiens
tcaaaatagggtgtaaaatataaaactataaaacttttaggaaaacacagaagaaaatatttgggatctatgatggacagagttcctaaataccaaaagcatgatccacaaaaagagaggaaagtccaaaagcatgatttataaattggaccgcatcaaagttccaaatgtttgccctgtgaaagcccatgtgaagaggatgaaaagacaagctacagactggaagaaaatatctgtaaaccacatatccaacaaaggactagaattttattttattgtattgagatagagtctcactgtcgcccaggctggagtgatcacagctcactgcagcctcaacctccctggcctcagctgatcctcccatctcagtctctcagatagctgaaactacaggtgcacaccaccacatccagctaatttttttcttttttgtagagatagggtttcgccatgttgcccaagctagtctcaaacaactcacccacctaagcctcccaaagtgctgggattacaggtgtgagccactgcacctggtcaagactagaattttaaatgtacaaagaattctctaaactcaacagttaaaaaacaatccaattagaaaattggcaaccacatgaacagacatttttccaaagatggcaaataagcacataaaaggacttttcaacacctttggcaatcaggaaaatg

SEQ ID NO: 104579 - DNA, 714 bp, Homo sapiens
cttcccaggttcaagcagttctcctgcctcagcctcctgagtagctgggattacaggcatgcaccaccacgcccagctaatttttgtatttttagtagagacgcggtttctccatgttggccaggctggtctcgaactcccgacctcaggtgatccacctgcctccgcctcccaaagtgctgggattacaggcgtgagccaccgcacccagccgttgttttgttctttatttactttattcgaccctgaagtgtggtactactatctgttctgttgataaggaaacagagacaaaagttgaaggcactgcaggggcagagctcttaagccactgcctagaactggccatgtacaatagtcctcccttatctgtgcggcgatatcttccaagacccccagtgggtgcctgaaagtaccagaccctatatgtacaaatgcccctcggtatccgtagggggttggttccaggactccctgaggatactgaaatttgtggaatatataaaattgcatggtatttgcatataaaccattaatacgtacattctcctgtatacgttaaatcatctctagattacttataatacctcatacaacgtagatattatgtaagtagttgttatgctatattgtttagggaataatgacaagaaaaaaagtgtacacattcagtacaggcacaaccatcgtaggcctactaactacatttttgat

SEQ ID NO: 104580 - DNA, 451 bp, Homo sapiens
taaggagtatacacgtttaagggagtgggggtggaggatgcagctatgaagttagaccacttgagtttgaatctaggctttgtcacgttaaaactgtggtcttaggcaagttacttaacctacctaaaccttagtttcctggtttgtaaagtggaggcagtaacagtatcaacctcaaagggttattttgagataatccgtgtagaaactagcgctctgcctgtcactagcaattaatacatgctactattgttatcgttatcaactgcaacactaacagaaatagcaatgctattaacctctttgcttagaggtgatagccacaagcatcaggaaggtaaatccacagacagaagatgataaaacgttttgtaagaaagcacgtgttaatttgatcacgcttctcaccacaagcaacgtaaattttctagaattatctctggaaccaaaa

SEQ ID NO: 104581 - DNA, 172 bp, Homo sapiens
agcagaggctttcctatattattgaaaacttcagaatgatttttaagttaccatgaaaagcttcaaatgacattctccttattgtgtctttattcagtcatctgatgttgactatactagatgaaatgcattcctgtaaatgctgatgtgtgtatagaaatgagcttcttgc

SEQ ID NO: 104582 - DNA, 177 bp, Homo sapiens
gctttcttggctttgcctgcccagttgtttcatgccaggaggaggagccgcctgctggaggctggagcttgtggcaccaccgctcgcctcgctgtggttggtggcggccatggagactaaagactcagcgctggagtggtaggagggcggcaatgaaaactgaagagcaccagagcg

SEQ ID NO: 104583 - DNA, 408 bp, Homo sapiens
aaaaaaaaaaaaaagacaaaaattagccaggcgtggtggcctgcgcctgtaatcccagctactcagtaggctgaggcaggagaatcgcttgaacctgggaggcggaggttgcagtgagccgagatggcaccactgcactccagcctgggcgacaagagcaaggctccgtctcaaaaaaacaaaaacaaacaaaaaaacagactgagctagcaaatagtatacccagcatagtgcctcatcgttggctgactgcatagtagctcttattacagctaccttccctacagaatttaggcatgctgtgggccagactcccaattttataagtgcttacaatggaaagagcactggattgggagtcaggacaacttgagttgagtcttggctctattactagctgttgatgga

SEQ ID NO: 104584 - DNA, 703 bp, Homo sapiens
ttcctctcagtcaaaacaagtgatcatatcaaaaaaaaaaaaaaatggagtttgttatgctacattccagtcacatttattctcttatttcagggaagcctacaaatgactaataagttaagaaactacactaaatatgtatgtaaatattctttagaatttttttctgaaaccatgtattcgttatcactagcaggtattttacatatagctttctaaatataaaacatgcatggtttcctattctgcattagtatgtttgaatagataaattttttaatgctcagaagatgttgtcagcattttgtttctttttaatttgagaattactttacagctttatatagtgagggcaatgtgtacaaaggttaagagtgatggtgacacattaaagcgaattctttaacttgctgactttggagtattcaagatcatcatctcattggtgatcatgcttgggtaatgcatttgaaaagctatctttttttttaactttaaagagttactttctgcttcattgttttgcttatgtaaatataattaattcattaactgttgccataaagcaatgcaactgatattaagtgatttttctacatggaatttcagaaattatttttttaatttcccaattaagggccgatttactgctaatcatagagccatctgtgtgaaactcagtgcccttcagtctgaaaaatga

SEQ ID NO: 104585 - DNA, 367 bp, Homo sapiens
attgtatgcagctgcaggtgtatcctttttatgaaaaagaagggaaaaaaaaacagttttttgtccctatctttcagcattctcaaaaggatgagtgacccaaaaatcattacagattcctgtctcagagtaatgagttccacatggttattgcctatgcaacgtcattgcctattgacatttgtcctgaaggctttcacaagtaacaaagggtgtctccttattttctatgtttggggatctgtgaatgagcctctgttcccttcagccttgcatttgtgctttcttaagaacctgtgagtgagcaaatatgtaaactaagtaacaccctgcccttgtagccttcctgaagtgccttccatacgtg

SEQ ID NO: 104586 - DNA, 169 bp, Homo sapiens
tctccacacagctaccacagtgtgcaagtagaagtctcagccatatcaccacactcctgctttaatgtccctactccattgcttcttttctccttcagaagagtttaagcttaatgaagctgggcaacttcacatatttttccacgagctggagatcacttggtttaag

SEQ ID NO: 104587 - DNA, 112 bp, Homo sapiens
atactgcatagtggatggattagtttgtggttcctgggatcttctgtgttttgtgttgaagctcaacaaccacattactgcagacctccaaaattttacaaaagactgcata

SEQ ID NO: 104588 - DNA, 417 bp, Homo sapiens
taaagtaagatatcattctctcattcctttcacatacctgcctaaagatctctgataaaagaggccttcattttcttccataccccatcaccctttatcctctactatacattattttgttttacttattatcatcttatatattttgttcatgctttgttgtctgtctcctcacttaagaactaaatttcatgacagcagagattttgttttgtcactgctgttttctctgcacttaaaaagagttgttggcacatagtattatagattaatagaaacttaaatatttgccaaggaatgtcatttatataagcacaacaacatggaaaacaatcttgtattttgtttagaaacatatggatattcctaatgttgtgcctaggcatgataactaccaaatgcaggagaatggttacc

SEQ ID NO: 104589 - DNA, 643 bp, Homo sapiens
ttaaatgagataagacaaacacagagcaactccttgctaacagccatgcagtaccaagcaaggcacagcaaagggaaagagaaatccagtggcaccagtgggctgagaaactgtcgggtttggctgctgctgttgtctgcatctcccgccttcctcctgagccgtgcttccagggcagccccggcccttcatgtcagctggtgacatttctgcaattgttcctaaagaggggcctgtgggtcgagtgagctaagcagggcttggcaaggtggtgtcccccggtcagtgccagagtctccctaatgtggcctgtgagacagagctgatgctgaacaaaggaacagggtgatctgggagcagcagcagccgctgtcctgagcatctgggtcaggacgacacggatgccaccccaggacccctggcatagggagccgagcagggcagccgggcagaggcaggaatgaatcctactcagctgcagaatagtcacagacacctctccaccagcaacgtccctgaaacagtctttcttattaaaaaatattgagtgtcagttatgtgtcaggcactgttctggacacgaggtctcaggaacaaacaaaatatacagaaacttggcccttgtgttgctcaggatgaagag

SEQ ID NO: 104590 - DNA, 525 bp, Homo sapiens
tgccaatattctgttcttctgataatggttttaccatgacattgaggagtatactgcttgaagattttgaagtttttcacaactgaaattaaaaatgtcgtaattttatgttatttccccttttgtctttttttggtgaaatctagaaaaggagactttctttcatctcatttttaaatttttagaataaggtattctgccagtggccaacattaactttataataggcctgagcaaataaacccatttctttcacatattgtgtctagtgaacatccaatcagggattctcctagctttatcagctcacaactctgcctctgtaaagctttgctgccttttatttttgtggttgctataaagctagaagtcacgagcttttatcattattgcacagtctgttgttgataaccctaatttctcaataaaattggaaggcaagatatctgagttgatttttcctgttctttcaaaatattgctaaagaaatttgtcttaaacttttttgggtaaacaaatgggaat

SEQ ID NO: 104591 - DNA, 1824 bp, Homo sapiens
  misc_feature (1)..(3): n is a, c, g, or t
  misc_feature (72)..(72): n is a, c, g, or t
  misc_feature (202)..(202): n is a, c, g, or t
  misc_feature (362)..(362): n is a, c, g, or t
  misc_feature (643)..(643): n is a, c, g, or t
  misc_feature (919)..(919): n is a, c, g, or t
nnnattgcctatacagaacaggcaacccttgggctaaatctgttcagtgagaagaatggatcacagggaagnttattaagaaaggattcaccctggctactgactgacagactgcgcatgtgtgtgttcagtgcatgtatgtgtacccatgcctttcctcacgttgccgtgatacggaagcgcaggttggctcctgtcgatngggatgggtaagatccgaattcgaggtcacacccccgccatggggctgtcttcagctgtaggtgtgggcctcgttgaaccgcatttcctcctgggtgaaatgtggatggcatctcccatgcagggtgttacgcaaatggcacagtgtctggaaggggctnagtatactgcgctgcgcagagaaagcggggaagctgatcattttttaaaaattaactttttatttggaaataattccagagaaaagttgccaagacaatagtgtttctgtatggtctgcacccatcctcttcccgttaacatcttatgtcaccataggagagtcggcaaaactaagaaaacaacgttggtatgttacattaactaaagtccagattttattccatggtaatattttcaatgattatcattaatggaaagagatctaaagtataatatgcancaaaagttccccagaatttggtatataagtgatctagtgagtgtgaccttcccttcgcagtcctgcatgagactgcaatatacttccatcaacagtggggaaattacagggcagagaaagtctcaggaagttttccggaatgattaggctgaagctcagttcagcaaacacacctgcccctatccaaatgtcaccttctcctgagtaaacacacctgagaaggagatggacgcccaaggcctgcttcttgctggcaaagccacattacctgctttnttcaaaaacaaggaaactggtttggtgagttctaataacttcaggagttcttttccttgtgaaagcaagaacagtttactcagctgttcaaatgagttcagagaaagccacttaacaacctttggcgtgcagtcaggactcccaaatgccagccctgaggtgactggcagaggctgagtgcaaggtggccagctgggttccccgagacaggtggaaggcctgctttgctacagagtgccttggtagattctgcagggtacaaaactccacttacgagccagctgggagctgggagacagcaagcagtcagtcgtacaaagaggccctcggaattggctatggggtgcacgcagttttcatggaggatcagctgcatgttttaggagaaactttggccagagtcacgtggaaagcatgcgggagactggctgggaggaccagactgactgaatgtcgagatatcactgagcagccaaggctctgtgagacagtgaggaaggagaggggaggccacctagagttttgaacacagtcagctcagaggatggtcatgaaaatgggagggaagtcaaagaagccaggaagaaagaagcatacaagtacgataagggaagatgagcttgctttgggaatgataattttgagggccctgtgataaagtgctccaaacagttggaaatgtgggtcccaggctttggaaagaaatgaggcagaaaggtgtaggtttggaagttatccacaagaagaatcagatcttcaaggaagagaacattaagaggaaaagagagctgagggcagaatcttctcgactatacctttatggcagcttgctttccataaacgtagatcatggcagcataaaaaccagcaaaggaaacagaggccaccagaggtttgaaaaaaaa

SEQ ID NO: 104592 - DNA, 974 bp, Homo sapiens
ccttggagaaaaattgagtttggttccaagggctgtctgtgctcttttgggaatctaagggtaggagtcttacagatctgggtcagttaatgtgcacaaaacgttgtggcatatttactccctttgatacctaaccctggaacttttaggctttcaaagaaagtcaccactgtagtcctagctcatccctggggcatgatggttctgtgaggaccagtccagtcatcctcttgctcctgcaggcttagtcctgcagtctaggaagccatgcaaagaaggtgagagggtcccttctttccattgttcatggcacctgagggattcttcactttgagagcagcttccattcccttagaactcatgggaccaggacttatgcagagaacagtagtgagaaaatacttgtggtcattttcttgattccaggatcttccaaagattatgcaatcagtctttaaaaaaacagaataattaattttaataaaaaatgtttcttgattttaaatgttttaaaagataggacccaaaattccacttcatctggcctggcatcatccttgcaggctttggatatgtctcccgtgtgcggacctgggaggcagtgagaactaattatttctttgttgcttaacaaaaggcggtgctgtttggcactttcacagactggcttatctccagcaaccactgcagaagacagtgttatcaccattttatagaggagaaaactgagacttagagaggtaaagtaatttgcccaaagttacatatctaggaagcctcagcacaagaattcaaatcctggccatctgattccagagcctgggctcttggccagcacagcctgactgtcactggttgggggaaggggcggtgatgcttttagaaacaggcttcttgagacaccaggcagctttccagttccctgcaaacatgggggaatgccctgatcagtcctaaaggtgtgacatagtcta

SEQ ID NO: 104593 - DNA, 362 bp, Homo sapiens
gcccaggagagttgctcacttcccagagaggaaacttcctgtattgatgtgtgggaggcaccagtggttaaacagtgcttgatttatacctcttggcgttctgtaggtgatacctaatacctatggcctcatacatacagccttttcttcagtgagacgatgaaattttaaaggaatgaaagaaaaatagtgggaagtagatggtcatctttagacttaccttgaaggattactttttgcttttgtttattgaaactatgccatgaacatttgtgcttccacaaatatgtcattgaatacattacccacttgttcaatttttcttgtacaaggatgacagattccttctagaacttaattcc

SEQ ID NO: 104594 - DNA, 197 bp, Homo sapiens
tagagtttcattttccagtctctagagcagcagttcacagttgcagttttaccacacccggagtaactaacacatattatcccagtgggcaccacaggctttatttgaattcaccatagtcaaatgaataggagatatgtaccatattgggtgactgggaaaggggcagggaggtttttatgaaatcagatccataa

SEQ ID NO: 104595 - DNA, 1302 bp, Homo sapiens
gtgctgcaaaggacgccgctgttatacgtcacttccacggctcagcgtcaggcaagttggcctctctgttgtaaattagtggttaaggttatctattattgccacttttccagcgctaaaggctgttttggaaccagtgttgcttgttccgcgggtgattggcttttttttttggcaaaccagttattcaagtttctggtctttaaaaaactctgtggcggtacggtaaccgaggaggttccagcgcggcggaagtaccccgcgggtgggtgtgtgcgcaaggccagggccagaggggcacgtggcgccgggaggagagagaatgtcttttcgaggcggaggtcgtggaggctttaatcgaggtggtggaggtggcggcttcaaccgaggcggcagcagcaaccacttccgaggtggaggcggcggtggaggcggcggcaatttcagaggcggcggcaggggaggatttggacgagggggtggccgcggaggctttaacaaaggccaagaccaaggacctccagaacgtgtagtcttattaggagagttcctgcatccctgtgaagatgacatagtttgtaaatgtaccacagatgaaaataaggtgccttatttcaatgctcctgtttacttagaaaacaaagaacaaattggaaaagtggatgaaatatttggacaactcagagatttttatttttcagttaagttgtcagaaaacatgaaggcttcatcctttaaaaaactacagaagttttatatagacccatataagctgctgccactgcagaggtttttacctcgacctccaggtgagaaaggacctccaagaggtggtggcaggggaggccgaggaggaggaagaggaggaggtggcagaggtggtggcagaggcggtggttttagaggtggaagaggaggtggaggtgggggcttcagaggaggaagaggtggtggtttcagagggagaggacattaagtgaaacagttgacagacatcaccagttgacttctgcattaacctgcatgatctgtttctactatggattggaaacttgtttcttgaacaagtcttgaagatcttggtcattttatgacaatggatctaaaatgtcagcatcatgcaaagtgcaacggaatagtgaattttgctctaaaagagcatgaacaagtctttctaatgttttgtacagtgcctggcactctgtgggtgctcaataaatggataggagttttcatttgaaggatatttgaatttttaaaataaagtgttttattcccttaaaaaaaaaacaacaacccaga

SEQ ID NO: 104596 - DNA, 1023 bp, Homo sapiens
gtgctgcaaaggacgccgctgttatacgtcacttccacggctcagcgtcagggaggagagagaatgtcttttcgaggcggaggtcgtggaggctttaatcgaggtggtggaggtggcggcttcaaccgaggcggcagcagcaaccacttccgaggtggaggcggcggtggaggcggcggcaatttcagaggcggcggcaggggaggatttggacgagggggtggccgcggaggctttaacaaaggccaagaccaaggacctccagaacgtgtagtcttattaggagagttcctgcatccctgtgaagatgacatagtttgtaaatgtaccacagatgaaaataaggtgccttatttcaatgctcctgtttacttagaaaacaaagaacaaattggaaaagtggatgaaatatttggacaactcagagatttttatttttcagttaagttgtcagaaaacatgaaggcttcatcctttaaaaaactacagaagttttatatagacccatataagctgctgccactgcagaggtttttacctcgacctccaggtgagaaaggacctccaagaggtggtggcaggggaggccgaggaggaggaagaggaggaggtggcagaggtggtggcagaggcggtggttttagaggtggaagaggaggtggaggtgggggcttcagaggaggaagaggtggtggtttcagagggagaggacattaagtgaaacagttgacagacatcaccagttgacttctgcattaacctgcatgatctgtttctactatggattggaaacttgtttcttgaacaagtcttgaagatcttggtcattttatgacaatggatctaaaatgtcagcatcatgcaaagtgcaacggaatagtgaattttgctctaaaagagcatgaacaagtctttctaatgttttgtacagtgcctggcactctgtgggtgctcaataaatggataggagttttcatttgaaggatatttgaatttttaaaataaagtgttttattcccttaa

SEQ ID NO: 104597 - DNA, 631 bp, Homo sapiens
taagtttaattttctctgccagcaagtatatagaacaccatggtgttctttgcttagcctaatttgtggtttcattttatatcactttttttttgccttttcttttcaattttttcacctaattctaatttgttttgctttattattaatttgaaaaataaaagtgtaatatgaatgacagttaaatttggtaaagtatgtttgctaaacattattggaactaatgctgattttaaacttgagatttaggttataatactattaaaaatccattttctgtgcccttaatactttaattttctcttaatcagggagaggacattaagtgaaacagttgacagacatcaccagttgacttctgcattaacctgcatgatctgtttctactatggattggaaacttgtttcttgaacaagtcttgaagatcttggtcattttatgacaatggatctaaaatgtcagcatcatgcaaagtgcaacggaatagtgaattttgctctaaaagagcatgaacaagtctttctaatgttttgtacagtgcctggcactctgtgggtgctcaataaatggataggagttttcatttgaaggatatttgaatttttaaaataaagtgttttattcccttaa

SEQ ID NO: 104598 - DNA, 426 bp, Homo sapiens
ggctggctggcctgccatttgcctctccccagaggcggtggttttagaggtggaagaggaggtggaggtgggggcttcagaggaggaagaggtggtggtttcagagggagaggacattaagtgaaacagttgacagacatcaccagttgacttctgcattaacctgcatgatctgtttctactatggattggaaacttgtttcttgaacaagtcttgaagatcttggtcattttatgacaatggatctaaaatgtcagcatcatgcaaagtgcaacggaatagtgaattttgctctaaaagagcatgaacaagtctttctaatgttttgtacagtgcctggcactctgtgggtgctcaataaatggataggagttttcatttgaaggatatttgaatttttaaaataaagtgttttattcccttaa

SEQ ID NO: 104599 - DNA, 148 bp, Homo sapiens
tcaagcttctaacgatgtacggggacatgaacaagtctttctaatgttttgtacagtgcctggcactctgtgggtgctcaataaatggataggagttttcatttgaaggatatttgaatttttaaaataaagtgttttattcccttaa

SEQ ID NO: 104600 - DNA, 1034 bp, Homo sapiens
aggaggaagcccgcattaatcggaagagggcaagttggcctctctgttgtaaattagtggttaaggttatctattattgccacttttccagcgctaaaggctgttttggaaccagtgttgcttgttccgcgggtgattggcttttttttttggcaaaccagttattcaagtttctggtctttaaaaaactctgtggcggtacggtaaccgaggaggttccagcgcggcggaagtaccccgcgggtgggtgtgtgcgcaaggccagggccagaggggcacgtggcgccgtattaggagagttcctgcatccctgtgaagatgacatagtttgtaaatgtaccacagatgaaaataaggtgccttatttcaatgctcctgtttacttagaaaacaaagaacaaattggaaaagtggatgaaatatttggacaactcagagatttttatttttcagttaagttgtcagaaaacatgaaggcttcatcctttaaaaaactacagaagttttatatagacccatataagctgctgccactgcagaggtttttacctcgacctccaggtgagaaaggacctccaagaggtggtggcaggggaggccgaggaggaggaagaggaggaggtggcagaggtggtggcagaggcggtggttttagaggtggaagaggaggtggaggtgggggcttcagaggaggaagaggtggtggtttcagagggagaggacattaagtgaaacagttgacagacatcaccagttgacttctgcattaacctgcatgatctgtttctactatggattggaaacttgtttcttgaacaagtcttgaagatcttggtcattttatgacaatggatctaaaatgtcagcatcatgcaaagtgcaacggaatagtgaattttgctctaaaagagcatgaacaagtctttctaatgttttgtacagtgcctggcactctgtgggtgctcaataaatggataggagttttcatttgaaggatatttgaatttttaaaataaagtgttttattcccttaa

SEQ ID NO: 104601 - DNA, 1684 bp, Homo sapiens
agaagaaaatctactaaagtatacttttgagggacttcatttctttgggttattcatgttttcttggacattttaataaaccgtaagattatcttaattttaattccttagttaatattattgagtgtagactgcatgctgaaagctggtcatacattcttttaatttccatgtatatatttttaatactcagcgaaaccttttgagatagatgatatccttattttatgaatgaggaaacggagacttacagaaattaatttgccccaatcaaacaattggcagacccaagaattaaaatgcatatcttctgatgtcatgtcaagaactattactaataaattcattactgtgatctcactgttgtgatgtatgcctttcccccaaggttttggggtattttgatgtatgcctgttttgatgtatgcctttcccctaaggtttgggcacattcatcattatggacagctaggtgatgagcagggctctggggagtggggctgccatgccctgtgagtaggagaagggcgagtgatggggtgatgggcagagccaaagtggaaagggagaggagctgaaagttgggcttggacagcttttgttactggatcagaaaaagagaaggaacgcctcacttttggcgtttctcaatttaatcaccatttcactccataaaggtatttttttgtgtccatataggtaggaaaattctcaggggtaccttcttgagaatttgatgaacagagattcccctattctcatgttatgttgagtatcatttaacatttcaaaaaattcacagctgtcttatttttttaaaatcttacttatgtagctcagttaatcttaactatcatatttattatcttacccccagagcaaaagcacccatatctgccacccgtcgtgttaggataaaaagccacagttccatcaaactatccttagttgaatcaaaaaagtatttatcataagcaagagctaaggcaatagtcatacatttaacaagactgaatcatactttaacaagtttttctaatttattgaaatggaataatctggggttttagcctgttgcccagttggtaaactactacagtttctccatttttatcttctaaaattttttccctgataaaatatgtgaatctatatttattcattataattatagttattgtattgatctttttaggcttatcaatataagaggttatacagttaataacttaatgattattatattctattgttatttaaatactttgcgttattatttaataaatgttttttaggtggttttagaggtggaagaggaggtggaggtgggggcttcagaggaggaagaggtggtggtttcagagggagaggacattaagtgaaacagttgacagacatcaccagttgacttctgcattaacctgcatgatctgtttctactatggattggaaacttgtttcttgaacaagtcttgaagatcttggtcattttatgacaatggatctaaaatgtcagcatcatgcaaagtgcaacggaatagtgaattttgctctaaaagagcatgaacaagtctttctaatgttttgtacagtgcctggcactctgtgggtgctcaataaatggataggagttttcatttgaaggatatttgaatttttaaaataaagtgttttattcccttaa

SEQ ID NO: 104602 - DNA, 1221 bp, Homo sapiens
gaggatccccgctccacccgacggggtgggagtggggctgccatgccctgtgagtaggagaagggcgagtgatggggtgatgggcagagccaaagtggaaagggagaggagctgaaagttgggcttggacagcttttgttactggatcagaaaaagagaaggaacgcctcacttttggcgtttctcaatttaatcaccatttcactccataaaggtatttttttgtgtccatataggtaggaaaattctcaggggtaccttcttgagaatttgatgaacagagattcccctattctcatgttatgttgagtatcatttaacatttcaaaaaattcacagctgtcttatttttttaaaatcttacttatgtagctcagttaatcttaactatcatatttattatcttacccccagagcaaaagcacccatatctgccacccgtcgtgttaggataaaaagccacagttccatcaaactatccttagttgaatcaaaaaagtatttatcataagcaagagctaaggcaatagtcatacatttaacaagactgaatcatactttaacaagtttttctaatttattgaaatggaataatctggggttttagcctgttgcccagttggtaaactactacagtttctccatttttatcttctaaaattttttccctgataaaatatgtgaatctatatttattcattataattatagttattgtattgatctttttaggcttatcaatataagaggttatacagttaataacttaatgattattatattctattgttatttaaatactttgcgttattatttaataaatgttttttaggtggttttagaggtggaagaggaggtggaggtgggggcttcagaggaggaagaggtggtggtttcagagggagaggacattaagtgaaacagttgacagacatcaccagttgacttctgcattaacctgcatgatctgtttctactatggattggaaacttgtttcttgaacaagtcttgaagatcttggtcattttatgacaatggatctaaaatgtcagcatcatgcaaagtgcaacggaatagtgaattttgctctaaaagagcatgaacaagtctttctaatgttttgtacagtgcctggcactctgtgggtgctcaataaatggataggagttttcatttgaaggatatttgaatttttaaaataaagtgttttattcccttaa

SEQ ID NO: 104603 - DNA, 1203 bp, Homo sapiens
gctggtaactgtcaccagggaactggcaagggaaaaaggacgggggaggcatgcaagagcgagaatcccaaaaaaagttgaaatggttaggagctgaaagttgggcttggacagcttttgttactggatcagaaaaagagaaggaacgcctcacttttggcgtttctcaatttaatcaccatttcactccataaaggtatttttttgtgtccatataggtaggaaaattctcaggggtaccttcttgagaatttgatgaacagagattcccctattctcatgttatgttgagtatcatttaacatttcaaaaaattcacagctgtcttatttttttaaaatcttacttatgtagctcagttaatcttaactatcatatttattatcttacccccagagcaaaagcacccatatctgccacccgtcgtgttaggataaaaagccacagttccatcaaactatccttagttgaatcaaaaaagtatttatcataagcaagagctaaggcaatagtcatacatttaacaagactgaatcatactttaacaagtttttctaatttattgaaatggaataatctggggttttagcctgttgcccagttggtaaactactacagtttctccatttttatcttctaaaattttttccctgataaaatatgtgaatctatatttattcattataattatagttattgtattgatctttttaggcttatcaatataagaggttatacagttaataacttaatgattattatattctattgttatttaaatactttgcgttattatttaataaatgttttttaggtggttttagaggtggaagaggaggtggaggtgggggcttcagaggaggaagaggtggtggtttcagagggagaggacattaagtgaaacagttgacagacatcaccagttgacttctgcattaacctgcatgatctgtttctactatggattggaaacttgtttcttgaacaagtcttgaagatcttggtcattttatgacaatggatctaaaatgtcagcatcatgcaaagtgcaacggaatagtgaattttgctctaaaagagcatgaacaagtctttctaatgttttgtacagtgcctggcactctgtgggtgctcaataaatggataggagttttcatttgaaggatatttgaatttttaaaataaagtgttttattcccttaa

SEQ ID NO: 104604 - DNA, 943 bp, Homo sapiens
ctcatatgatagttcagattaactgagctacatcagtagacttttacaaaaactcagaccgctgtcttatttttttaaaatcttacttatgtagctcagttaatcttaactatcatatttattatcttacccccagagcaaaagcacccatatctgccacccgtcgtgttaggataaaaagccacagttccatcaaactatccttagttgaatcaaaaaagtatttatcataagcaagagctaaggcaatagtcatacatttaacaagactgaatcatactttaacaagtttttctaatttattgaaatggaataatctggggttttagcctgttgcccagttggtaaactactacagtttctccatttttatcttctaaaattttttccctgataaaatatgtgaatctatatttattcattataattatagttattgtattgatctttttaggcttatcaatataagaggttatacagttaataacttaatgattattatattctattgttatttaaatactttgcgttattatttaataaatgttttttaggtggttttagaggtggaagaggaggtggaggtgggggcttcagaggaggaagaggtggtggtttcagagggagaggacattaagtgaaacagttgacagacatcaccagttgacttctgcattaacctgcatgatctgtttctactatggattggaaacttgtttcttgaacaagtcttgaagatcttggtcattttatgacaatggatctaaaatgtcagcatcatgcaaagtgcaacggaatagtgaattttgctctaaaagagcatgaacaagtctttctaatgttttgtacagtgcctggcactctgtgggtgctcaataaatggataggagttttcatttgaaggatatttgaatttttaaaataaagtgttttattcccttaa

SEQ ID NO: 104605 - DNA, 1280 bp, Homo sapiens
aggaggaagcccgcattaatcggaagagggcaagttggcctctctgttgtaaattagtggttaaggttatctattattgccacttttccagcgctaaaggctgttttggaaccagtgttgcttgttccgcgggtgattggcttttttttttggcaaaccagttattcaagtttctggtctttaaaaaactctgtggcggtacggtaaccgaggaggttccagcgcggcggaagtaccccgcgggtgggtgtgtgcgcaaggccagggccagaggggcacgtggcgccgggaggagagagaatgtcttttcgaggcggaggtcgtggaggctttaatcgaggtggtggaggtggcggcttcaaccgaggcggcagcagcaaccacttccgaggtggaggcggcggtggaggcggcggcaatttcagaggcggcggcaggggaggatttggacgagggggtggccgcggaggctttaacaaaggccaagaccaaggacctccagaacgtgtagtcttattaggagagttcctgcatccctgtgaagatgacatagtttgtaaatgtaccacagatgaaaataaggtgccttatttcaatgctcctgtttacttagaaaacaaagaacaaattggaaaagtggatgaaatatttggacaactcagagatttttatttttcagttaagttgtcagaaaacatgaaggcttcatcctttaaaaaactacagaagttttatatagacccatataagctgctgccactgcagaggtttttacctcgacctccaggtgagaaaggacctccaagaggtggtggcaggggaggccgaggaggaggaagaggaggaggtggcagaggtggtggcagaggcggtggttttagaggtggaagaggaggtggaggtgggggcttcagaggaggaagaggtggtggtttcagagggagaggacattaagtgaaacagttgacagacatcaccagttgacttctgcattaacctgcatgatctgtttctactatggattggaaacttgtttcttgaacaagtcttgaagatcttggtcattttatgacaatggatctaaaatgtcagcatcatgcaaagtgcaacggaatagtgaattttgctctaaaagagcatgaacaagtctttctaatgttttgtacagtgcctggcactctgtgggtgctcaataaatggataggagttttcatttgaaggatatttgaatttttaaaataaagtgttttattcccttaaaaaaaaaacaacaacccaga

SEQ ID NO: 104606 - DNA, 292 bp, Homo sapiens
tagatatttcaacctgcttaagtggagaaatagtagacttgaaccaattgaaaaaacccagaacgatacacaccaatttgctgagtcctgaaaagaatgcaattccaaatctattcatctaccgaaaccatgacccaaaccaatatcaccaccaaacctacccaccccaccaaacacacactctgagaagggagagaggatgcggaataaggaccaaaggattaaagaagaatgtcaaataattctgcatagtaaacctgaactaaagtaaaattatatcaatcctcctttt

SEQ ID NO: 104607 - DNA, 256 bp, Homo sapiens
cccacaggtaatagcaaagttttctccctgcctcgtctcccaccccaaatatttgatttccacatatactgcacaggggaattgaatttgatgtcgaaagccataagaaaaagagaaactttgctttttactgcttttactaggaaatagaaaacatttttagtgacaggctatgcttcatcatgaaaatacggttgggtgttttaggccttcacaaatttgatttcattgtacttagtgatggatgttagtaagc

SEQ ID NO: 104608 - DNA, 806 bp, Homo sapiens
cacatacaccagcacggtgctggctgtttcccatgtgcccactctccgtgtgctcaccaggctgcctgtgtggagggcatcaacaaggctggctcctctgccctccgacttctaggtggggaggaggtgctcccaggagactggagcataggagcacagtgaggctgggagggagcagagtgaagttttgtttttgccaattttcctccatgagtctctgctggctggccacgccccacaccgggaaggttgcagctcctgtcaggtagcctccctacctctctccccttcttgtcccgctgggattaggggcagtcagtgagtgggccatcacctccagctggttttccatacctttgtaatttgtcttttgaaaaagactcttcaattacccaacgccagtgcaacatctatttcctcctcagagcttgtcaagaatagcccaggattgtaagtacagttgctagatttagcaaataaaaacgcagcacgtccagttaaatgtgattttcaaataaacaataatgttttagttccaagcatgtcccaaatattgcacatgacaaatattgcatttagtacaagtatatcccatgcagtatttgggatatacactaaagtgttattcattgtttacctgaaactcaaatttaactgggagccgtgtattttatgtggcaatcctgtcttatcctctatttagagggcattaccaagctgatactttcaaaactgaatatttggcatgacagctggttcaactttctctctcccactagacagtgagtgactgaaagacaagggct

SEQ ID NO: 104609 - DNA, 3152 bp, Homo sapiens
gccgcgtttgaagtcgcgcggcctggggatcaggggaaggcgggcggcgggagccccggctgggggtgcgcggggatccccgattccgcgcccggggctggcgtgctccaggccggcgccgtggggccggcgcgcggggggcagggcgcagaggaggtgggggagtcggcaggaggaggggaggagcgccgggttcgccatccccaggcgccggctctgcggctgctgaatcggaagccgcagggaggatccggggaaataaagacgccggagaatgacctccagcgaggccgcctgagccggggcccgcgcacagccccgccagcccccggcatgggcgaccgcagcgggcagcaggagcgctcggtcccgcactctccaggggcccccgtgggcaccagcgccgccgctgtgaacgggctgctgcacaacggcttccatccgccgccagtccagccgccgcacgtctgcagccggggtccagtgggcggcagcgacgcggcgccccagcgcctcccgctcctgccggagctgcagccgcagccactgctccctcagcatgactccccggccaagaaatgccggctgcggaggaggatggactcggggagaaagaacaggccgccattcccatggtttggcatggacatcggtggaacgctggttaaattggtgtatttcgagccgaaggatattacagccgaagaggagcaagaggaagtggagaacctgaagagcatccggaagtatttgacttctaatactgcttatgggaaaactgggatccgagacgtccacctggaactgaaaaacctgaccatgtgtggacgcaaagggaacctgcacttcatccgctttcccagctgtgctatgcacaggttcattcagatgggcagcgagaagaacttctctagccttcacaccaccctctgtgccacaggaggcggggctttcaaattcgaagaggacttcagaatgattgctgacctgcagctgcataaactggatgaactggactgtctgattcagggcctgctttatgtcgactctgttggcttcaacggcaagccagaatgttactattttgaaaatcccacaaatcctgaattgtgtcaaaaaaagccgtactgccttgataacccataccctatgttgctggttaacatgggctcaggtgtcagcattctagccgtgtactccaaggacaactataaaagagttacagggaccagtcttggaggtggaacattcctaggcctatgttgcttgctgactggttgtgagacctttgaagaagctctggaaatggcagctaaaggcgacagcaccaatgttgataaactggtgaaggacatttacggaggagactatgaacgatttggccttcaaggatctgctgtagcatcaagctttggcaacatgatgagtaaagaaaagcgagattccatcagcaaggaagacctcgcccgggccacattggtcaccatcaccaacaacattggctccattgctcggatgtgtgcgttgaatgagaacatagacagagttgtgtttgttggaaattttctcagaatcaatatggtctccatgaagctgctggcatatgccatggatttttggtccaaaggacaactgaaagctctgtttttggaacatgagggttattttggagccgttggggcactgttggaactgttcaaaatgactgatgacaagtagagacgagcagtggaggaaacagcctcccaaaaggacagagaactaaaaaattgctgctggagaaggtgaaagtcgctttgggacggaagccaagccattatggcagatgaacctgctggatttgtaaataatttaaaatccttccagatgatcttttactcttaggttttgagctaatgattcaaaacgggggaatataaaaggttttttttctgtatactgtatttttttaaaaaaatggtgcagcgtggccaaacctaccaattgtatgcattaactttgaaaagttgtttgatgtttaagaaggacctgatatgtaagcgctggtcatttttcttctggggtttactgatcagtgtggtgattttaacttcatttagtaattactctaggagattttaccttgacttatatttttcatgacgtttcatgatttgctgttggtttcaaatgaaactacaaatctggcatgttttactgtgaacacttttgttatttgttttgtacccttttttgtcttgtttttctgttttagttgtcttctgaaaaaagagtcgttccctctgtttctgtcctcagatgatgtccctccccctacctgtaacctttctttgacataattgttcatatcaatgaaggtgctgaccagctcaatacaaagttaagcacaagatctaaagctcttgaaaatgcccgtgaagagaagactgaatgtgttaatgaatttaatgagtctggcaaaagttgcaaattatatgcaagtttgtcctatcgcttataaatgtagtgtttcattggatttattttatgctaggttatattaagttgaaatagtctgtgattaaatgtcctcatccatgcacagaatatgaatggcagcaaatctttgtgcaagaaatttgaaacttattgggaaaagcctcccagtagattaattgttcatatcaggagatttagggtaagtcatgggttgaggtgtcagatagtaatatctatttgttttgtacatgtatatatctaggaactttgtaacaacacatctttaataatgttaaaggttttttcatttttaatattttaaactaaaaactgtacttcaatctcagtttctaaaattaaaaataatttatactgatctatatattttttctttttgaaagatttcattaagactgatgggtaactttcaaatgagggtcatgtacaaatattgggatgcatgagatcccatgatcttgtgtattgagcttattgttgaaagggatttttgaaggacagaacaattactccatgatgaatcttcctttctctgccttctgagcaccgtctttaatttccatatcttcaagtcttgaagaagttgatgttaattgaagaattcacttgtctggttgaaataaagcctgtttctgttgtgatgtttttagtgtata

SEQ ID NO: 104610 - DNA, 2975 bp, Homo sapiens
gccgcgtttgaagtcgcgcggcctggggatcaggggaaggcgggcggcgggagccccggctgggggtgcgcggggatccccgattccgcgcccggggctggcgtgctccaggccggcgccgtggggccggcgcgcggggggcagggcgcagaggaggtgggggagtcggcaggaggaggggaggagcgccgggttcgccatccccaggcgccggctctgcggctgctgaatcggaagccgcagggaggatccggggaaataaagacgccggagaatgacctccagcgaggccgcctgagccggggcccgcgcacagccccgccagcccccggcatgggcgaccgcagcgggcagcaggagcgctcggtcccgcactctccaggggcccccgtgggcaccagcgccgccgctgtgaacgggctgctgcacaacggcttccatccgccgccagtccagccgccgcacgtctgcagccggggtccagtgggcggcagcgacgcggcgccccagcgcctcccgctcctgccggagctgcagccgcagccactgctccctcagcatgactccccggccaagaaatgccggctgcggaggaggatggactcggggagaaagaacaggccgccattcccatggtttggcatggacatcggtggaacgctggttaaattggtgtatttcgagccgaaggatattacagccgaagaggagcaagaggaagtggagaacctgaagagcatccggaagtatttgacttctaatactgcttatgggaaaactgggatccgagacgtccacctggaactgaaaaacctgaccatgtgtggacgcaaagggaacctgcacttcatccgctttcccagctgtgctatgcacaggttcattcagatgggcagcgagaagaacttctctagccttcacaccaccctctgtgccacaggaggcggggctttcaaattcgaagaggacttcagaatgattgctgacctgcagctgcataaactggatgaactggactgtctgattcagggcctgctttatgtcgactctgttggcttcaacggcaagccagaatgttactattttgaaaatcccacaaatcctgaattgtgtcaaaaaaagccgtactgccttgataacccataccctatgttgctggttaacatgggctcaggtgtcagcattctagccgtgtactccaaggacaactataaaagagttacagggaccagctttggcaacatgatgagtaaagaaaagcgagattccatcagcaaggaagacctcgcccgggccacattggtcaccatcaccaacaacattggctccattgctcggatgtgtgcgttgaatgagaacatagacagagttgtgtttgttggaaattttctcagaatcaatatggtctccatgaagctgctggcatatgccatggatttttggtccaaaggacaactgaaagctctgtttttggaacatgagggttattttggagccgttggggcactgttggaactgttcaaaatgactgatgacaagtagagacgagcagtggaggaaacagcctcccaaaaggacagagaactaaaaaattgctgctggagaaggtgaaagtcgctttgggacggaagccaagccattatggcagatgaacctgctggatttgtaaataatttaaaatccttccagatgatcttttactcttaggttttgagctaatgattcaaaacgggggaatataaaaggttttttttctgtatactgtatttttttaaaaaaatggtgcagcgtggccaaacctaccaattgtatgcattaactttgaaaagttgtttgatgtttaagaaggacctgatatgtaagcgctggtcatttttcttctggggtttactgatcagtgtggtgattttaacttcatttagtaattactctaggagattttaccttgacttatatttttcatgacgtttcatgatttgctgttggtttcaaatgaaactacaaatctggcatgttttactgtgaacacttttgttatttgttttgtacccttttttgtcttgtttttctgttttagttgtcttctgaaaaaagagtcgttccctctgtttctgtcctcagatgatgtccctccccctacctgtaacctttctttgacataattgttcatatcaatgaaggtgctgaccagctcaatacaaagttaagcacaagatctaaagctcttgaaaatgcccgtgaagagaagactgaatgtgttaatgaatttaatgagtctggcaaaagttgcaaattatatgcaagtttgtcctatcgcttataaatgtagtgtttcattggatttattttatgctaggttatattaagttgaaatagtctgtgattaaatgtcctcatccatgcacagaatatgaatggcagcaaatctttgtgcaagaaatttgaaacttattgggaaaagcctcccagtagattaattgttcatatcaggagatttagggtaagtcatgggttgaggtgtcagatagtaatatctatttgttttgtacatgtatatatctaggaactttgtaacaacacatctttaataatgttaaaggttttttcatttttaatattttaaactaaaaactgtacttcaatctcagtttctaaaattaaaaataatttatactgatctatatattttttctttttgaaagatttcattaagactgatgggtaactttcaaatgagggtcatgtacaaatattgggatgcatgagatcccatgatcttgtgtattgagcttattgttgaaagggatttttgaaggacagaacaattactccatgatgaatcttcctttctctgccttctgagcaccgtctttaatttccatatcttcaagtcttgaagaagttgatgttaattgaagaattcacttgtctggttgaaataaagcctgtttctgttgtgatgtttttagtgtata

SEQ ID NO: 104611 - DNA, 2289 bp, Homo sapiens
gccgcgtttgaagtcgcgcggcctggggatcaggggaaggcgggcggcgggagccccggctgggggtgcgcggggatccccgattccgcgcccggggctggcgtgctccaggccggcgccgtggggccggcgcgcggggggcagggcgcagaggaggtgggggagtcggcaggaggaggggaggagcgccgggttcgccatccccaggcgccggctctgcggctgctgaatcggaagccgcagggaggatccggggaaataaagacgccggagaatgacctccagcgaggccgcctgagccggggcccgcgcacagccccgccagcccccggcatgggcgaccgcagcgggcagcaggagcgctcggtcccgcactctccaggggcccccgtgggcaccagcgccgccgctgtgaacgggctgctgcacaacggcttccatccgccgccagtccagccgccgcacgtctgcagccggggtccagtgggcggcagcgacgcggcgccccagcgcctcccgctcctgccggagctgcagccgcagccactgctccctcagcatgactccccggccaagaaatgccggctgcggaggaggatggactcggggagaaagaacaggccgccattcccatggtttggcatggacatcggtggaacgctggttaaattggtgtatttcgagccgaaggatattacagccgaagaggagcaagaggaagtggagaacctgaagagcatccggaagtatttgacttctaatactgcttatgggaaaactgggatccgagacgtccacctggaactgaaaaacctgaccatgtgtggacgcaaagggaacctgcacttcatccgctttcccagctgtgctatgcacaggttcattcagatgggcagcgagaagaacttctctagccttcacaccaccctctgtgccacaggaggcggggctttcaaattcgaagaggacttcagaatgattgctgacctgcagctgcataaactggatgaactggactgtctgattcagggcctgctttatgtcgactctgttggcttcaacggcaagccagaatgttactattttgaaaatcccacaaatcctgaattgtgtcaaaaaaagccgtactgccttgataacccataccctatgttgctggttaacatgggctcaggtgtcagcattctagccgtgtactccaaggacaactataaaagagttacagggaccagtcttggaggtggaacattcctaggcctatgttgcttgctgactggttgtgagacctttgaagaagctctggaaatggcagctaaaggcgacagcaccaatgttgataaactggtgaaggacatttacggaggagactatgaacgatttggccttcaaggatctgctgtagcatcaagctttggcaacatgatgagtaaagaaaagcgagattccatcagcaaggaagacctcgcccgggccacattggtcaccatcaccaacaacattggctccattgctcggatgtgtgcgttgaatgagaacatagacagagttgtgtttgttggaaattttctcagaatcaatatggtctccatgaagctgctggcatatgccatggatttttggtccaaaggacaactgaaagctctgtttttggaacatgagggttattttggagccgttggggcactgttggaactgttcaaaatgactgatgacaagtagagacgagcagtggaggaaacagcctcccaaaaggacagagaactaaaaaattgctgctggagaaggtgaaagtcgctttgggacggaagccaagccattatggcagatgaacctgctggatttgtaaataatttaaaatccttccagatgatcttttactcttaggttttgagctaatgattcaaaacgggggaatataaaaggttttttttctgtatactgtatttttttaaaaaaatggtgcagcgtggccaaacctaccaattgtatgcattaactttgaaaagttgtttgatgtttaagaaggacctgatatgtaagcgctggtcatttttcttctggggtttactgatcagtgtggtgattttaacttcatttagtaattactctaggagattttaccttgacttatatttttcatgacgtttcatgatttgctgttggtttcaaatgaaactacaaatctggcatgttttactgtgaacacttttgttatttgttttgtacccttttctgcatgcttcccttcagtctgtaatgaaagactgttgttgtcatcagacaatgtat

SEQ ID NO: 104612 - DNA, 1329 bp, Homo sapiens
gccgcgtttgaagtcgcgcggcctggggatcaggggaaggcgggcggcgggagccccggctgggggtgcgcggggatccccgattccgcgcccggggctggcgtgctccaggccggcgccgtggggccggcgcgcggggggcagggcgcagaggaggtgggggagtcggcaggaggaggggaggagcgccgggttcgccatccccaggcgccggctctgcggctgctgaatcggaagccgcagggaggatccggggaaataaagacgccggagaatgacctccagcgaggccgcctgagccggggcccgcgcacagccccgccagcccccggcatgggcgaccgcagcgggcagcaggagcgctcggtcccgcactctccaggggcccccgtgggcaccagcgccgccgctgtgaacgggctgctgcacaacggcttccatccgccgccagtccagccgccgcacgtctgcagccggggtccagtgggcggcagcgacgcggcgccccagcgcctcccgctcctgccggagctgcagccgcagccactgctccctcagcatgactccccggccaagaaatgccggctgcggaggaggatggactcggggagaaagaacaggccgccattcccatggtttggcatggacatcggtggaacgctggttaaattggtgtatttcgagccgaaggatattacagccgaagaggagcaagaggaagtggagaacctgaagagcatccggaagtatttgacttctaatactgcttatgggaaaactgggatccgagacgtccacctggaactgaaaaacctgaccatgtgtggacgcaaagggaacctgcacttcatccgctttcccagctgtgctatgcacaggttcattcagatgggcagcgagaagaacttctctagccttcacaccaccctctgtgccacaggaggcggggctttcaaattcgaagaggacttcagaatgattgctgacctgcagctgcataaactggatgaactggactgtctgattcagggcctgctttatgtcgactctgttggcttcaacggcaagccagaatgttactattttgaaaatcccacaaatcctgaattgtgtcaaaaaaagccgtactgccttgataacccataccctatgttgctggttaacatgggctcaggtgtcagcattctagccgtgtactccaaggacaactataaaagagttacagggaccaggtaaacatgtttctgcttgtgcttgaacccagacctctttcttgatgaccagtttatagtaaaaggttatttatattgaatacatttttaaaagaaa

SEQ ID NO: 104613 - DNA, 179 bp, Homo sapiens
gtcagcagctacaagtaacacttcattaccaatatattctgcaaaactgtcattgctaaatttcccttctgcaaaaacatcatttcctcagcatgcctgctagattggccatttctattttaaacaacatttaaagacatttaccacaagtttctctttagcaacttgtattaactctg

SEQ ID NO: 104614 - DNA, 618 bp, Homo sapiens
tatggagaattgctccctcttcaagaaacgcctccatcctgatgtatatcagctttcatatccccatggatattttacaggcattgctacctctttaaacatttatgctattaaaaaaatcagaccaattgttgacataaagctaacatagcagcttctatatagacagaatatgaattttttatgctgttgatgagaagtttatgtcatttatatactatagtagggtagaagatggatttggaatcctgaaaaagctactgtttgtaccattcagaatattagcttgtgctttgaatcgaaatattaagatacctgtattgtcaatgtgagtgtttctgtgcaaagtggcttacatatgggtggaatgggagaaattgctctacctggagaaaatagcaatagttttctttcgtttatgttttgttttgtgaaaggaagggttaatagcatttaatacctgatttatctgtgcttctctgcaccattaaaagaatgaactgttgtggtaataaaaccatatttcattgaattaaaagtgccatcacttgcaagatgcaacattattttatgtacctctaaaaaactacactaacaaactgacatgtcaaactgaca

SEQ ID NO: 104615 - DNA, 461 bp, Homo sapiens
tgctatctctttcttgccaagacactaacatatataacaatatgttatgcaacatattgttatagtatatatattagttaaacatatagtgaataatataacaatatactgtgtccataaacaatattttagttctgtcaggtttttatctttaagtgaaggaacacagtatatttttctttttcttggcctttgtcaatatttgtgagattcacccatattgaagcatgtagttattgttcatttttactgccatatggtattgcattggatgaacatatacaaatttacaagtttgtttagtggtggggatggatatttgggttggttattttgaacacatggcacaaaacattcttgtacgtatcttttggtaaagacatagatatacatatacataatatacacctacatatacatatacagagtctctagggtaccaacctgggagtaaaattgct

SEQ ID NO: 104616 - DNA, 409 bp, Homo sapiens
ggcatgtggaggctgagatggaggatatcaccaagcccaagaggtcaaagatgcagtgagccataatcgtgctgttgcactcaaggttgtgcaacagagtgagaccctgtctcaaaaacatacaacagttggtattaagcaattacttacagatctgtgttgaggtagattaatatggcaccaatttgggtagactggaagccatttttctgttgactagaagatcagtttcttggaatagtgcaggcagaggtataataaaggtcttctgctttgtattttcaaccatgtaaatgatctgaattttaaaaaaaattttttaaaaagcttttagattgggaaagggcataagggaacagataagattacataacaagatttgggaaacaggatatgaagagacaaatta

SEQ ID NO: 104617 - DNA, 228 bp, Homo sapiens
tgcttctgctggccctccatgggctgcacccactgtctaaccagtcccaatgagatgaaccgggtacctcagttggaaatgcagaaatcacctgccttctgccttggtctcactgggagctgcagaccggagctgttcctgttctgccatcttgcctgggaatccaaaaacctattacttcttcctaagagctaggccggcacttctggtggctgcctctgtgtgtaa

SEQ ID NO: 104618 - DNA, 262 bp, Homo sapiens
caagggatcctaatcctggtgaaatatacaatcccctcagtacagggaaggcagaagaataattctcttgcttttactgactttgggtctaggagagcgcctttaacttacacctggaattattgaggaataaattgaacaggagataacatttatagagcactgactgcataccagctcctgggctctgtgccttaatgtctgtcatccctacataattacaaggaaggaattgtcctcgttattcaaatgaggcttagag

SEQ ID NO: 104619 - DNA, 316 bp, Homo sapiens
aggtgcaagcccaaataaccacttttctttataaattatccagggtcaggaacttcttcatagcaacgcaaaaacagatgaacacaaccatcaatcaactgtatataatagatatctatagactactttatgcaaaaatagcacaatacacattcttttcaggttcacatggaacactcagtaagacagaccatattctaggccataaaatacacatttctaaatttaaaagaatagaaattatgcaatgtctatccttagactacaatggaattaagttagaaattaataacagaatgaaatgagaaaattccca

SEQ ID NO: 104620 - DNA, 314 bp, Homo sapiens
gccaattggaataatcattttgtactggaaaaaagaaacacaggctttggagtcaaacagaattagtttcaaataccagccttgcccctcagtagtggggtgactcaggcaagttactaacttctctaaatctcagttttttcacctctaaccaaggataatgcattccttacacacttcttgagaagataatttgatgtaaagcacccaggacaatgtttggtgtatagcagttacttcaatttttgaaaggtggcatacaaacataattatagcaggctttggcaggaagaggtataaaatattatcttaag

SEQ ID NO: 104621 - DNA, 401 bp, Homo sapiens
aggcgctgtgttttggagagaggcaatgttagagttctgatggcatccagccagatgcctccaaatgccaattaaaacaagcaccccatctggacgtgtatattttaatacatagccacgggccgttctctcgcttctggaggagctgcacccaacgctcctcgcgctcagtatctttccatgagcacgcccccttcctagggctctgtggcttcccacatgctaagacccttgttttggaaccaagttcttctaatttagttcagagaaaacctaggttggtgtagcaaaggaaccccagtttggccaatgtaaaaaggtccattgctccagataaacggggctggagtccagagggggcacaactgttacgaggtttagacgcacagagtcccatactt

SEQ ID NO: 104622 - DNA, 375 bp, Homo sapiens
cttcattttatcagccacatcctgttgttcatcaaaccttttagaacttctgtcaattcggaattttttttctacttcccactttcattgtattcctacttgttactgtttagtttgggccttcatcagttcaaatcaattatttgcaacagttttccttctttcttggctgcttttaattagatcttccttgttccagtctacactaccaccagagcatagcttcttaatctttttagggcagtagtccagaatccctcttttgtttattgccttaagtctgaacccattgatctttctgtgtcttccattagttggtttaattttgtttacttggttttcttttttgaactccttttctatcagcccgtacca

SEQ ID NO: 104623 - DNA, 412 bp, Homo sapiens
gtcctcaagtgattctctcacctcagcctcctgagtatagatattaaaatataagtgttaatattatgttaatgataattttaccagaattaaaaatacattatatatttgaatctcaggtattcactcccctagtggaattataatcatgaactcatggaaataatggactaagaagcaactagaaaagtccagaaaagattggttaaatcttagttgagccttcttctacttctgatgaggccatgagcaagtcactgagcatatctgggcttaatttcttcatctttaaaatattctttcataaagttgttcaaaggattaatgaagtaaatggtaaatggtaaagtaaatgaagtaatttacttcatgaagtgataaagtaaatggtaaatatattacaaaatatttt

SEQ ID NO: 104624 - DNA, 316 bp, Homo sapiens
aatctcacaccatcccgctcagtcctgctcaagaggtgaatcatctctttgtccatatccgtatccatatccatgttctagacacaacctgcctgttagtcacacagtaaccatctcagttatcagatagaaaaaacacagtacatattacattagggtttggtactatccacggtttcaggcatccactggggaacttgggatgtatcccctgcacgagagggggaattactgtattactatttttgtgccagtttctgaatcccaattcctacagcatgacgtgaagagggttgtattattataggaaaagaac

SEQ ID NO: 104625 - DNA, 375 bp, Homo sapiens
tctggctcctgtgatgtactctgcagagaggccagtggggcgtttattatattttccggggacggccctctcccctgtccctatgcctattttcagggctttggcgtttgtagagggactattttaatccatgtgggaaatgggttcctaaatatggacttagtggggcagaagccttgagaggctccagctcagggcagctccacctgctcctctacctcagcaaagcacaggatgcaggcccaggctggaaggctctccagcccctccttggccatctaccgccctccttctttccctctggctcctcctatctccctccagtcctgggcccatcctcccatcctttgtttgctcggaagcccagtgtttcct

SEQ ID NO: 104626 - DNA, 852 bp, Homo sapiens
gattacgtgaaataggccgggtatggtgcctagtgaagagctcaagaagtgtgagacattattactatcgtgggcagggaatttggacacctgtggtgtaagctgccccaagagattgggtttctgtaagggcgtttcatattaggctgggccctattctagagatgaggatatcttcctataggccagctccgcccctgtcactccagaatcgctctctgcctgcagtatgccacaagagcagacttgcccagggacccagggtggtcactgacaccccattcccaccaaatacacacactctcccctggtgtcctccttagccccttgctgggtctcttctgctagcaggagctgctggatttgccatcaggactggctttccctgtgacccctttgtgggtggggccttgcctggtaatcggagatccagattcagctctgttactgacttatggatatcttaggcaagtcactttcctgttttgggcctcagaactgtacattgacttttccatctagaagactagtctgaggccagtttccaatccaattctctgactctaggtaatgtggaggagagatgaacagtatgtttggggggcggaggatggagcaaggacctgttggtggaagctctagggagacagaaggtcatatgtgggatgggagtgggggtgatttgagctataaatcagcggttgcatcagattcttgtgccctggcataggtatttatttaaatttacataagcttaattgtagtaaattacttactagaattaaggtaattctagtgtgcagtcagtattgaaaactgctgccctagatggtctcataggtcccctaagtc

SEQ ID NO: 104627 - DNA, 299 bp, Homo sapiens
gaaaaggggaagccaattattctttgtcatcaggggaaaggaaagagtaaagaaaggaaactggaaaatatgggtagggatttattaggggccattttgaggacagagctcccaacatcatttgatccaacattcggttgtgtatcattcaatcccaatattcatggagtgcgctggagccatgagcagtgaatgaagaactctggtcaatgtaggtgacacgttgtgcccgccaccccccatttagcagttatcctcccctgttagcttgatttttcaggaggtctggagaggtggtt

SEQ ID NO: 104628 - DNA, 256 bp, Homo sapiens
tttgtgtcatacttaggaagtctttaaaaggagtgttttggacttgtcgagtttgctggacagccagatagaaatgccctttggttgttagaaatatggggctgatattcagataagaattcaggcttggccggatgtggtgactcagtcctgtaatcccagcattttgggaggctgaggtgggcagatcacctgaggtcgggagtttgagaccagcctgggcaacatggtgaaaccctgtctctactaaaaatac

SEQ ID NO: 104629 - DNA, 359 bp, Homo sapiens
tgcattattatagtaataccaaacaataattaatcgatagcaaagtaaatggtttataggaaaagacagcaaatactgtgaagtagttattcccatttttggattaagaaattgatgcttttgaagtcaggagcactctgaaaaagaaggaaggactagcttcttcataaaagagcaaaacatatcataaggttggagtaattaactatgaacataaatgaatagactaacagatcgattgaacagaacagagtctaaaagtagacccaaatacatagctgagtaaataatcacagtaatattaagtattagtgagcaatagaaaactaattcagtaaatggtattgtgacaactgggg

SEQ ID NO: 104630 - DNA, 446 bp, Homo sapiens
cgagccaccgcgcctggctgacaaccttaatgacaacacacatacaaaaaggaaagcattttaaggatgcactgaaatagaatttcgaacaaaaagatttaactccatactgacaggatgcttaggaaacaaacctggacatcagcaggaaacaaactggcgataaaacagacacccattttgagatgaacacacccttaagatacacacattactgtcagccacacatttaaatagaagctgcacccaagaaaattttcacacgcagagtggaaagaaatttaaaactatactagttttctccaccataaaataagtgtatttcctaacaaacaaaaatatgtgggagaggttacctcattttttttttaattttttttttctgagacggagtttcactattgttgcccaagctggagtgcagtggcgccatctcggctaactgc

SEQ ID NO: 104631 - DNA, 429 bp, Homo sapiens
aatccatcctctcatctccatcccactaaaactctgcctaccatgatcgacacaataaaatctgagtccaggcccctgttttttcgctcctcttctaatgcagcagcctcttaactgatcttcctgccttcattcaagactccttaaacccactctccacatggattccagagtgaacaatcaaaaatgcctgccttacatatcatttggggtcaggaattcaagaccagcctggccaacatggtgaaaccccatctctactaaaaatacaaaagtcagccgggcatggtggcatgcaccggtagtcccagctacttgggaggctgaagcaggagaattgcttgcttgaacctgggaggcagaggttgcagtgagccaagatcacgccactgcactccagcctgggtgacagagcaagactccgtctca

SEQ ID NO: 104632 - DNA, 381 bp, Homo sapiens
agttcttcaggaccaagcaggataatttctcagacctctagatcctttgtaagggcttaactgattatgtcaggcccacctaggatactttcccttttgattcattcagtgtcaactaatcaggaaccataattatagctgctaaatctctttgctgtgtaaggagaatttccatcctaatcgtgggtcctgtccacactcaagggggcagggattatgatagagcataggccattgggatcatcttagaattttgcctaccatacctgtttattttctcactgtgtttctctcagggtcaggaggtgggggcaaagatcctctttgctctgcatagctgctttcagactattattttccgtcctctcatgaaaaataaca

SEQ ID NO: 104633 - DNA, 383 bp, Homo sapiens
  misc_feature (63)..(63): n is a, c, g, or t
  misc_feature (249)..(249): n is a, c, g, or t
  misc_feature (262)..(262): n is a, c, g, or t
gcctagtagctgccccaataattagtttccttcccattttccattttatggaatctaatcctngtcttcccaactgtaatgaatttaaggcagagctaatcctttaagaatcctttggccgggcacggtggctcatgcctgtaatcccagcactttgggaggacgaggtgggcaaatcaccaggtcaagagatagagaccatcctggctaacacggtgaaaccccatctctactaaaaatacaaaaaanttagctgggcgtnggtggcgggcacctgtagtcccagctactcaggaggctgaggcaggggaatggcgtgaacccaggaggtggagcttgcagtgagccgagatcgcaccactgcactccagcctggacgacag

SEQ ID NO: 104634 - DNA, 136 bp, Homo sapiens
gctttggtttcccggtctgtaaaatgggctcccacctgcctcactgcattgcctggacagtcagatgaaacccaacaacctcatccagcgaagggactccacaccttcaggaagatgtaactggtccccagagcag

SEQ ID NO: 104635 - DNA, 266 bp, Homo sapiens
gcctgggcgacagagcgagactccgtctcaaaaaaaaaaaaaaagaaagtgttcagtaagtggattttgtaaactgatgtgttcagccctaaaaagcagaatactgatgatcttgattattcagggtcccactggtctagatttatatttttaagaataactaggctgggcacagtggctcacacctataatcccagcactttgggaggtcgaggagagtagatcacctgagaccaggagtccaagaccaccctggccaacatggc

SEQ ID NO: 104636 - DNA, 280 bp, Homo sapiens
ggtatttctcggcccgccctgatagccaaacacaacggatagaaactctggtggtctcttgaaagtgccattgcctggctggaagccaaccaactcagatcattacagcaactcatgacagaataaccctgatcccaggaaggataagataatacctaattctacttcctgcaacgtcctggctaaccagaggtcctgagtgtgtccagaggacaactgtactgctggcataaccagcattggagatagccagtacaataaacatatctacaaccaagga

SEQ ID NO: 104637 - DNA, 135 bp, Homo sapiens
gccgtatgctcccaggccaaggtgtggacgggcctgggaactgcctgcgaaagttacccacgaaagtacaagatcaccttcacccagcaggatacagccctccccgcatctgaagttacccaaataaaagcctcg

SEQ ID NO: 104638 - DNA, 627 bp, Homo sapiens
aacaatatcaggactttgtgaagctgggttttccatggttgccgtgataaaatgcacgcactgcacaaaaatgagtgtggaacaggaaatgacactgacagtgtccactgattccaaggtttgagaagttctatagtgctcaacaggtgcacacatgctattaaatatttgtgattagttaagaatgaaataggaatatgagtttttctttcagtgtctgtgtatttttttaagtcacttttaagctgttaggacatagatacttattaggttgtttagacctaatgactttaaaaattgaactgttaagcatttcttttagcttgggagacactgaaaaatttacaggaacactaaaggtgctaagaatctctgacctacaccttggcttcgcagtattgaccccatggctttcaccattaccaaaacacagggagttgtggacatccaagaccaagacagtataaatgtgcccttgaatgaatcatacttcattttgttaatttgtgtggatcactaaaattagaaagatattcctttcacatgaaagttacatttgagaatagcttcatatattttattttaatacattgactaaaacctactttgtttttcttttcttttctt

SEQ ID NO: 104639 - DNA, 688 bp, Homo sapiens
gatggctatatcctactgtgtaaagggaagaaaggactaacataaaccactctgtcgcccaggctggagtgcagtggcgtgatctcagctcactgcaacctctgctgcccggagtcaagcgattctcctacctcagtctcccgagtaaccagtaattcagggtgaaacatctcacagtggaagaggagcattctgtgttgagaatttccattgacgaagccaactgagtggcctgattcccttggaccagcaatctagagctagggaagatgttgccccaaggaagaggcacagcagacacttggctctcctcttgggtttctgctttctctgagaaaacagaagtttgaggcctctagaagcactgcattccctccaaagggaggttgtagatacattaattaatatgattttaattcaaaacttcctgaggcagataattctaaatgattatcccaaaaatatttccaacacccttctttttaccacccactggcccccaaatcctcaattttccagtctcccttgagctaagtgtggccctatgactcacttccagccatgaaaacaagtgcaaatctgttaggagtatgttctggggcaatttttgctctcctgatgaagacaaaggctgttgatccactgaacccacccaggtaatcacttattttgttcttgttctaagaga

SEQ ID NO: 104640 - DNA, 361 bp, Homo sapiens
  misc_feature (361)..(361): n is a, c, g, or t
ctgtcacccaggctggaatgcagcgatcatggctccctgcagccttgacctcccgggctcgggtggtcttttcatgtcagcccccgcagagccaggaccataggcacacaccaccatgactggctaatgttttaaatttttgtgtagagagagggtctccctatgttatccaggctggtctcaaacccctggctcaagcgatcctcccgccttggcctcccgaagtgttgggattacaggcatgagccaccaagcccggccaaattttttttttccaacatctgttttgtgggaccagccagaattttcaacctccgctgcctcatgacttccaagtcacatggtctaaaaggagctaagn

SEQ ID NO: 104641 - DNA, 320 bp, Homo sapiens
tggagtttgaaggatgtgctatggaaacttgggagacagtttgaagaaaaccaattagcccctcaacaagtattaacaggttggcaaggagctgtgtttgaatcttggctctgctactggcttgctgtatgaacttggcaaggattctctgtgaacttgtttccttatatataaatgaagatagaggtgcctcctctactaacctcagtggtgattgagaagtttcagtaacgttggtaataaatgttaaattctaaagtactacataaatataaagcattaagcaagtgtgcttctaagagtcaagccaattagaaaaa

SEQ ID NO: 104642 - DNA, 343 bp, Homo sapiens
atttaaaagcaaaatttccctcaccctccctgtcattcattcccttaaaggcaaattttaacagagcattcaataaagataagtaaatactaaagtggttttttaaaatatataatcacaaaaatttttaaaggctactcaagtgaagcagtgggagtggagaaagatatgatcacacaattttatatgacaaagatttcttattggtaaacaattttgttctcgttaacaaggaatgtttattctagatttaaaacctaacgtggccaagtgtggtggttcatgcctgtaatcccagccggccagtaaaatgtttaatctggacatcagtaaggatcagttt

SEQ ID NO: 104643 - DNA, 803 bp, Homo sapiens
agcatcgcacttgttgcccaggcttgagtacacaggtgcaatcatggctcactgcaaccttgacttccctgggctcaagcaatcctcccatctcagcctcccaagtagctgggactacaggcacatgccaccactcctggctaatatttttttgtattttgtagaggcaggttttcaccatggtgcccaggctcgtcttaatctcctgggctcgattgatcctcccacctcagcctcccagagtattgagtataggcatgagccactgcacctggcctagtatcagtttttaaaagtagacctgtttatctgcagtgcagggaaggagagcgtatgtcttaggaaaataccaaaaactaaagaaatgtgaatttttataaaatgatatatgttagttctgttctttgctttttattgttttagtcttgactcgttattgattgtggaaattttttttctagtaattcactacagtattactttttgtaagagattgcccgataataattctgaaggatgatgttcacataaaacagttacctaaagatacagtcataacattgatattccacattcataaccctttgaggatgagaacaatacagcttaattggtgcttttatacattttatatagtgtgcttttatatgtttatttttcatgtgttccttaagatatagagactcctttggaatttggatgctagttgctttgttagaacagtgttttcaaattaatgcctcattgggtgacattggggaaaaaattactgattcttgcctttttgccttgctccagatctt

SEQ ID NO: 104644 - DNA, 312 bp, Homo sapiens
ggaaaacatgttttagtgcagagaaaacagaactttcactcacttagttgccatttcattcaacaggcatccatggaagacctttctgtagggctcccagctatacacagacccttccccagatgttgacaattctgaaatgttctgccaccaatattagctttgtgaccctgacgaagttacctaatgtctttgatcttgatttaccttattaagcaaaggagttgtgcagcttatttcacagagagtatgggcattgatgagacaatgcatgtgaaagtagcattgtatgcctgaaatgcacagtgaggt

SEQ ID NO: 104645 - DNA, 975 bp, Homo sapiens
agggggaagagagcggaagcggggcggtgctacacactcttaaacaaccagatctagcaagaactcacccactatcatgagaacagcaaggggaaaattcactcccatgatccagtcatctctcaccaggcccctcctccaacattgggaattacagtttgacatgagatttgggcagggacacaaatccaaaccatatcagtatataaatagttttggtttggtccttgctgggaccaaactgggctgaggtgtggactgatgagcagggcagaaatcagcttgtgacaaggtagacagcaaggagcctggtgggtgaggccacctgaaacacagcacatgcctgcagaacaaacccctcaatgatcctagggcagaagccacctgtctgggagcttcttttctacttcttgcctaggtgggaagtgatctgacattctgagcctttggaggttgcagaaatgactagagtgatgaggatgatatataacatgctctaccacgtatcaaacacctactatgtctaagaagtgctctaatgtaatggatcaccacaacaactttgtagggcttatcaattcaggacgttatgaacatgaacatcattactatcaataattattctgggaagaaggtataaactgacccgggcaaactaggatgcgtaattatcccacttaggaggtgcttacactattcccattttatagatgaggaaactaagaaaataaatagccattgtggatgcttttctgtttcatgccatgatgttggaatgtcatgtttagacacatctcttcattgtttcttccaagaaatcagattagctggtagcaactatattaaaccaaatttcagtatgaaaatgtctccattttgccttcctcctcctgctcagaatgatatgtgggggaagtcatgggcataacgttctgtaatagaagtagaatttcttaaacttgcttctaactaaca

SEQ ID NO: 104646 - DNA, 311 bp, Homo sapiens
ctcaaatataaacagtgcaagcgttggaggaagggcacacaaggagaggaaactatctgcatggggaaaatgtcatgattttattcactgcattaattattagtttaacctcagcttgctaaaaggtagcacattcctaacagaagaaatgagctttccatttgaagatcgagaaaggcagcctgtgttttttctctgtaccgtacattcatccgcttagtgactatctactgggcacctgcctggttctagtcacccagctcctgcaaggcggcagtaagcgagacagcctccctcctccactaaaatga

SEQ ID NO: 104647 - DNA, 332 bp, Homo sapiens
ctttcataaagtgatgtgacttcttaatatttaatcttctctgcgacttcttgattactgtaatttctttgcatctctatcctctttttcttctgattcttttcacatttgttctctcgccgacttcatgtaaatcagggctcttggctgaccttccatggctacaaagtctgagttgctcaagggacttgggcttacttaagaaactattttctgccaactgttagtctccctgcctgccatgccatctcctcctccccccaccttttcaccacacaccaagtcactcttcaggtgtcagcttaatttacttcctgaaaaaggtctgaatc

SEQ ID NO: 104648 - DNA, 665 bp, Homo sapiens
tgcagaagaggcatagaagccttagtttatttaagctgaatcactcctctgtgtttctgttggttacaagtttgctctgccccatcaaagagggccaagatgtcttgtgactacagcggacagtgaaatatgactgccatttaaaagcctcaaacttgatcacccgcctaattttcagtggagccctggtgactgtgtaatatgcaagacacctctgcagctggttcattaaatttggatgattggcattgagttggatgagaataaatccagccattgtgtcagatattaattgtaaatcagaacaagctatttataagtcccaagaagtttgataaagctaatttttccagggtttgtgtttgatgtcaactctttaaaaaatatgcttcaaagtggttttgtgtacatgtatgtcattatttttaaaaattttgagcagaatgttttcttgccctactggaaaataacaggcctcattttgaagtttggctgtaagggactgttgcctagattttcccaggaactacttccagcaccttgcaggaaccttttgtttcaaaactactgttgctgatgtttaaaggccattcctttccctttttctttcttttttcttttctctttctttttgagagagggtattgctctgtcacctaggctgg

SEQ ID NO: 104649 - DNA, 354 bp, Homo sapiens
tgctagctgtggggttgaattgttcttgtttctctaattattttcattgtgatactaggttgttaatttgagatctttctaactttttgatgtggacatttattgctatgaatttccctattaacactatctgagctgtggccgggcgcagtggctcacgcctgtaatctcagcactttgggaggccgagatgggcggatcacgaggtcaggagatcgagataacagtattagcactgaataaaatatttttaaaagtacaatttgtgagatttccattttctttcatagtccctactggaaactcaaactgagcacaacagcttcaatgggaactaataatgatgggaaaggc

SEQ ID NO: 104650 - DNA, 232 bp, Homo sapiens
cgggagcctgaagtggcagggctgcttaagcacccgggcctgcctgactccatgctgtggggctggaggcggcacactgggcaagcttctttaggaccagtagctcccctctgctgtcttattctagtgcctgtaagataaccattcaagtgctttattaagcatcctgtccctccattttctcacttgtaaaatgaggatgataataacaacaaacatatccttaatggtg

SEQ ID NO: 104651 - DNA, 163 bp, Homo sapiens
ggtgattcgaggacttatggagaccaggctgagaatattcgcagtgcacgcacatttttctttactagaatttatattccagattcttgtctggtcacccaccctagacagagctcttgggatcctcagggccttttttacttaaaatacagactgtagtaag

SEQ ID NO: 104652 - DNA, 650 bp, Homo sapiens
ggggagatgggggtaaaataaaggaacagctaagaagtggttctgcagaatgtgtacttatatccgaaagcctggatggaaaggacggtggctttggaaggggtgtaaaatgggagggggtggcaatcgctgaagcatgacaagcctccgaaggcctctgggacttgaacacaaaaaagggagctttttgcagctctttcacatgcacacgtctccctctgccccatccatcctcccctgctgttttgtaaatctcccagttggaaatttttaacatgggagagcttcttcctgtgcttcagttggcagaatgctcacacgcagctgcaaagaatttgcttttccttttcacagcatctctcatttaaaagcattagtgagactacagaacaaaataaaaacttcaggatttttcagaagtggaagccaagtttaattaaagtcaaggaagttcggggctctaactcttttgttaaacctcttaaagtcaggcgtgtgcgtgtgcccatggcaggcaaggtaggaaatgccagtgcctgtttctcgttaggaaatttaaaggcctacttgtctggtgtgtgcttggggaatgtcctagaatttatcaaaagatgtgctgaaccatcatgtctttggtggcctcaaaatgc

SEQ ID NO: 104653 - DNA, 274 bp, Homo sapiens
gtaataaaatattagataatacttctatatttaataaacagtcaatatttgatgtataatgtttaaaaaaatgaaaatcactacaaaatcataatttttaagtatccatcaagaaagaatgctcctttaagattaaaaataaataaatacagcaacagcactaattactaagactaaaacaagtaatctaccctccatagtgaaaagtatttaacttaaatgacaactttggaaacacccaaaatactattataggcctttgtttctaaaaaag

SEQ ID NO: 104654 - DNA, 406 bp, Homo sapiens
tcgatctcctgacctcgtgatcctcccgcctcggcctcccaaagtgctgggattacaagcgtgagccactgcgcccagccccagctttagttctaaaggaaaagatgggccttttgcttaaggagattcacattgattggtcaaagctctcattgacgtatgctgagcaatgtgtcggcagagaaaaccatggcaagcgtgttattatgctctttatagtctagttggatttttagacatatgaattggtctataaaatagacaacaatctcaggtgggaaccttagtacatcaagtttctgaaatgtacaaatgagtattccctggcttgtgttatctgccactgtagaaatgagagcaaaattgaagcatcaaattttaagtcgtgatatgtttgcttctctgc

SEQ ID NO: 104655 - DNA, 441 bp, Homo sapiens
cttatttctcacagttctggaaactagaagtccaagatcaaggtgttggcaggttcagtgtctggtgaaggctattctccccttccaagatgatactttgttgctacatcctccagaggggaagaacgctgctcccttttatggcggaggtacagggtaaaaagggcaaatccctttttataacatcattgatcccaatcatgagggctccaccctcatgacttaatcatctcctagagacccaccacttaatactatcacattgatcacattgatgattaagtttcagcatatgaatttgagaaggcacattcagacagcagcagtgattttcttttttttttttcactctatattgaaattctgtaaggaagatgtcccatctcctgcttattttctcatgtatttatatcagcatggatgtttattttactctatggc

SEQ ID NO: 104656 - DNA, 680 bp, Homo sapiens
gggactatgtcttttacctctggtatctcagagcacgtgactatcccaagggtatttcatgagtgaatatctagatgttgaagttggtgactgatgtttatctcaagagttcccaagtcaatttggagtaagggtagcccaaagaatataggactgagaatcagaagatctcggcttagttcttttccaactaactactagctttgtgaccttgggcagattagccaatcttttctgaatcccaaataacctttttccaaaatgagaataattgtccctaccttgctttcctttcaggtttgccttgagcatcagatgacctcacacaggggagagttttgtgaactgtaaagtatttaacacatgtgcaacattattgtttgtatcatattgccatcaccaccatacttggtgaaacatgagctcacatgtagctcttgttatataaatatcaatatgtcattttggcttcttcacagtgttcaaaactgtagttccttaatgtttgggatgttctttctcctcaaagcaggcatccaaggtattcacctcaagcattttgaagggttttaaatggctcttgattttatcacttgcctgttttaaaatctctggcccaaaatttcaaagttacactttctcccaggagaggtcctgtaagaattgtaactaatcatagc

SEQ ID NO: 104657 - DNA, 710 bp, Homo sapiens
tcatggctccctaggactctgtcctgggttctcagctcagctcagctcagctcatctcctctttacactcagagatctcaaaatagcaaccttcaagaaggcctggtccacagaaatgttctgttggagcttcacaatactttaaaaaaattagtttctacatttccattttttcacctaacaattcctatttctggcttcttttgaaaaatcagggcgtttcagcatgccaggcttgtgtttctgtgtgatcatggccagctggagctatgagtagagcagtcttaatcagggcatttccaaattcttacaaccatcttcacttaattctgttcactgccccgcccctctaggcagcttaagttgtcattcctattgtgctagccctaggtaagttatggctccgcaaaacaaggacagccaaatttttatttttcagcccaccgtgaccctcatgcccacagccaaattcccatacatgttccaataaatcccagactttctccggccctctcttgctgctcacacttgctgcagcccttcttctctatccctttagcataaccttcagaactcaacattccatctgagagagtgttcagatctggaattctaaaaggaaaaaaataaattatgttatgcattactacttggaggcatgctagttgggcaccactactctataagaagactctagttacataataaaa

SEQ ID NO: 104658 - DNA, 411 bp, Homo sapiens
ctccttccctctctcacgtctctttagtatcttttaatttgggagcacagactccatttctctggagtttgtgtttcccagatggccattctcagcttttcacttgaataaagctagactctgattctttcgattatttcaggttaacacttgcttggtgtctggggaaaaaaccccacacatttcacagaagtctactgtgttgattgttgctgggtgagagaacagaaaaagcactttgagtgttttttccatagagatggccatttgtgttctttccaatcttttgctattacaaataaaggcacaaagaatgactttacagatatgttcttttatattttttgcaaatttgcctttgggatatattcccaaaagtgtgattgcttaattaaaggtatatgcatattt

SEQ ID NO: 104659 - DNA, 156 bp, Homo sapiens
ggttgcagtgagccgagattgcgccactgcactccagcctgggcttcagagtgaaactccatctcaaaaaaaccccactcagtgggagttaattaacagattaggcacatctgaagggaaaattactaaactggatcagaatgcaacagattaaag

SEQ ID NO: 104660 - DNA, 306 bp, Homo sapiens
tgcacgcttgaactcctaggctcaagcaatcttcccacctcagactcccaaagtgctggaattacaggtgtgcgtcaccacacccgaccaagagatcatctctgtactccaagtcagaaggcctagctttggactatatctccactcgtctcctctggttcatattaacggtgccactttggggtatttgcccttggccaagcacagccactcattttacagcaggccatcactctatcgttgctcctgccccttggggaagaggtgccaaggagcccagctacactaactgcaggatcagagggc

SEQ ID NO: 104661 - DNA, 444 bp, Homo sapiens
agtcatctgagaactgttgccagaggccccagaggaaaagattgaaggctgcactctcaggtcaagttgtacatggcagtccttgctcaaaaagacaaaagttcaggtctgtgtatttattcttagggctgccataaaaaattaccacaacctggccgggcgcagcgctcatgcccgtaatcccagcactttggtaggccgaggtgggcgggtcacttgagatcaggagttcaagactagcctggccaacatgatgaaaccctgtctctactgaaaatatagaaattagccaggcttggagctgtgtgcctgtaatcccagctaaccaggaggctgaggcaggagaatcacttgaacccaggaggcagaggttgcagtgagccgagaccatgccactgcactccggcctgggtgacaaagcaagactctgtctcaaaaaaaaaa

SEQ ID NO: 104662 - DNA, 453 bp, Homo sapiens
ttttgcttaatttgcaaagtcactgtaatctgatggcaatgatggacaaaatctatttgattcctgccactggtcaaatacattagagaaatgtgcttactggattaatttattgtgtggtttaaactgggcactttaaataaaactaagctatgaaacccagagaaggggtagattctttctttcaaaagataaagaaacaacaatggcattatcacaccttttaaacatatgagagagggccaggtgcggtggctcacgcctgtaatcccagaactttgggaagctgaagcgagtggatcacatgaggtcaggggttcgagaccagcctggccaacatggcaaaatcccacctctactaaaaatacaaaaattagctgcatgtggtggcgtgcgcctgtagtcccagctactcggtaggctgaggcaggagaacctcttgaattcgggagg

SEQ ID NO: 104663 - DNA, 251 bp, Homo sapiens
tctgcattcaaattgattcccattaaataaaattaagaattgagtctcttggtcataccggtcacattgtaagtatgcaagtagctacacatggctagtgacttgttttggacagcacagatttagaacatctccatcgtctcaggaagttctgttgggcagccccgtttcagagggaggagcgacaggctacaagaactgacaggtcagcccgcgcttggcttctcaggagaactgaggcatcgattgtg

SEQ ID NO: 104664 - DNA, 475 bp, Homo sapiens
accaggcaccacattaagagccttatatacgatctgtcattcaatcctcactgcatccaagggtaccctctattattatccccagttaacaggtaatgaagactgaggattgggaaagttacataactcacttaccagccacacaactagctattatgaaatgaacaaatattacaagctaaggattaatagacccactttacaagggaaatttttttttttttttgagacagtcttgctctgtcacccagcctggagtgcagtggtgcgatcttggctcactacaagctccgcctcccgggttcacgccattctcctgcctcagcctcccgagtagctgggactacaggcgcccgccaccacgcccggctaattttttttatttttagtagagacggggtttcaccatgttagccaggatggtcttgatctcctgacctcgtgatctgcccgcctcggcctcccaaagtgctgg

SEQ ID NO: 104665 - DNA, 183 bp, Homo sapiens
ataaaccagatcccacagccaacctggagtcagcttccctgaactgcatgcattgtacatgggagaaaagacagaatccagagctagaccagagatgaacaggaggaggcagaaagacacggaattggctgccatgcctaggaggatcgcaaccctggaaatgggagcagacacccagccctg

SEQ ID NO: 104666 - DNA, 637 bp, Homo sapiens
tggcaaaactttttcttgttcctcaagtttactcaacataagagagttcatactgaagagaaatcccacaaatgtaaagaatgtgggaaagcctttaaccagtccttaagccttactaaacttatgagaattcatactggaaaaaaatcatacaaattggaagactgtggcaaaatcttttaagtattgctcaaatatatccagccataattcatactaaagattatgcctatgaacctaaggaagtttggcaaagcttatgaatacacctcaaactttcctaagccttggagaaatatcagtgagaaacctcagaaaactgaacaatgctgcaagccctttaaatggttgtcacatcttactgtaggtaaaataattgatagtggagaaaatctctacaaacaaagaatgtgtcaaaacttctaacatgctcatactttatggcacataaaagcgtttatacttgaaaaattatacagagtgtggaaaagccatttctatctgctcacatcatagtcaacatcaggaagttcatacttaataaaattattataaatgtaattactgttcaaagaccttggaaaatataaacccttaaaataaaaaagagtattctggagacaaacattacaaatat

SEQ ID NO: 104667 - DNA, 131 bp, Homo sapiens
cccagcagagctggcctgccacagcccaagcgtcttgttttggttaaaaaatgagtctcttggcctttcatgcctgggcgttctccggaactcagatgtttgtgaaccaggttcagggactctcaagttca

SEQ ID NO: 104668 - DNA, 496 bp, Homo sapiens
ggactagttagtcaaagtctatttctaaaacatacctccttttcgtcattgcaaaggagaagtacactttactttcaaggctgactttgggcattgagaacacagaaagatgatttcctacattcttagctaattaattttaagtgtagctggaagcctggtgaggcagaacttaaagaagatgctacttcttgacttttaagcagaggcagcaaatcacttacagtaaaaattactcaaggaaatcactcaattggctttttttgctatggaattgtgacttttttcctataatgccctagggaaagaatataactgtacctcccttccttccaatttcttcaatgtccatagctttaaagaagaggtcaaaattttgtattaaaggactcaagaacctctcggaaagggacaagctctaagagtccaatctcttaccactctcagcgtcaaggttagggcaccttcattggaaggaaactgcacggtccagttc

SEQ ID NO: 104669 - DNA, 793 bp, Homo sapiens
atatctaatgtaactattcttattttatatattttctttattatactggaacagctcgtgccctcggtctcttgcctcggcacctgggcgacttgctgcccacaaaattcaccattgaaataaacctaattagtttaacatctctcttataaggtcacaggacagatcctttgaggtcttccaggggccctccaggaaatctcaagtcagtctgagatcaagacaatgtcacaggccacatgcagtggttcacgcctataatcccaacactttgggagtccgaggagggaggattccttgagcccaggagtttgagaccagcctgagaaacatgctgaggccctgtctctacaaaacaaaaaattgaaaaattagctgggcatggtggtacatgtctgtagtcccatgtactctgaagactgaggcgggaggatcacttgagcccaggagttcaaggttgcagtgagctgtaattgcaccactgcactccagcctcagtaacagagtgagactctgtcactaaaaaaaatttaggctgggtgcagcggctcacgcctataatcccagcattttgggaggtcaaggtggacagatcacctgagatcaggagttcaagaccaggctggccaacatggcaaaaccccatctgtactaaaaatacaaaaattagctgggcgtggtgccatgtgcctgtggtcccagctacttgggaggctgagacagcagaattgcttaagcctgggaggcagaggttacagtgagcccagatcacaccatggcactccagcctggg

SEQ ID NO: 104670 - DNA, 499 bp, Homo sapiens
ttctctcttctactgatcgataatgctccgcaaggacagagacctggtacatcccctttaaattctgagtttcccagtgcctggaacagggcttggtttctgacaggtagtgtagtgggtttgattcctgcacaaaaatctgcttaaccgcaggcctagactataactctaggagggtggagacccagtctccctcccacccacggcgtccccagtactaacatggaacctaccctgaagcccagtcaatactcttgaaatgaatgatgggctgaacagatgctaaaatcacagacaagcatcatttaatcttgtaattatcaatctcagttgacacacgggggaaagaggctcaatgctggcctgatttgtccctcctcaagcaaacaaaacaaaacaaaacatggctgagaagtggagaagtcaaaattaaaacccaggaggccaagatccagcctttaaagctgagcttaattaatcctaaccacaggtgacagag

SEQ ID NO: 104671 - DNA, 413 bp, Homo sapiens
agttgctgtaactcagccacgttccattttatcttcatgttaatgaaaccgcacagcaaaattctggggcacgtggagggcaaagtccgctgcctgctcaccagccctgagagtgccttcttgttgcttctgggccttgtcctgcacgtctcaaaggatatcgcccatttcatggcctgtgaggccatcacacccctttagtgagagttctttctctccctctctttctcatcttttctgcagtgtagacaatttgcatgcactttcccttacccctgccctgccaagatctaggcatggttgatagtgaactgagtagtgttcaaattggaagaaaaagaaaatccctgtccctcctttcagtggttgaggaagtggtcaatacaaaagatctatgtagcatcattttatac

SEQ ID NO: 104672 - DNA, 698 bp, Homo sapiens
gctaaactaaaaattggatataagattgagaatgtattatataatttgcaagacatagaggatgtttatagaatatactaaagtatccctcagcaccaatatgggagtatcctggtctcaagtttataatttttgcacatataatctaaagaagagactttaaaaataaagtacacaaatatgaaccaaagagtagcttaaaaatactttcttctaggtctgaaattttcttttctttctttttttgttttggagacagagtctcactctgtcgcccagggtggagtacagtggcgcaatcccagctcactacaacctccgcctcccaggttcaagcaattctcctgcctcagcctcctgagtagctgggattacacgcatgccctaccacacccagcaaatttttgtatttttagtagagatgacatttcaccatattggccaggctggtctcgaactcctggtctcaggtgatcctccaccttggcctcccaaagtgctgggattacaggtgtgagccattgctcctggccccagctctgaaattttaacttagttttggattccttggaatttgaaaatatgctaacacgaaggattgtaaataggtagtttgaggttatcaggaacagtaacttgaagcaagaacatcagaaattgttcaccatgcaaatatttagtactctgaatcaaggaac

SEQ ID NO: 104673 - DNA, 431 bp, Homo sapiens
tagtgtgcaatgatcactgatcctgtgaatagcccactgccccactccagccctggaaaacatagcgggaactgactaagaaagaaaaaaagacatacaataatatatagatggtcttcaacttacaatttatgcactttacgatggtatgaaagggacacacattcagtcaaaactatactttgaatattgggttttgatcttttcccaggctggcgatatgcagtacagtatctgtcacgaagctgggcagcaacagtgagttgcagttcccagtaagccgcgcaatcactagggtagacaactagtacttggtggctcatgcctggaatcccagcactttgggaggctgaggtgggagggttgtttgagcctaggagtttaagaccagcctgggcaacatatggaaaccctgtctctccaaaaaaaaa

SEQ ID NO: 104674 - DNA, 380 bp, Homo sapiens
tggagaaccattgctacaaggggacagaggactccgtgtgagctctcctgccttccctgaataaacttacacaatttagtgctgggacatttgaaccttttctgaaaatttgagtcagggagagcatcttggggaggtgggaaggaaggtagaaggagcaaagcaacacccccctgaagcctgggaatattgtcagaaccttaaatataattcagctcaccattctgggtaaggacagactctaccaatgaaaatgggtgattaccagctgtgaaacacaaaaacatactttcacggttacacattcctttacaaacaaccgtgtacatttcagcctcctaccccaccatttcttttctccaggcgggaaggctgcatgt

SEQ ID NO: 104675 - DNA, 645 bp, Homo sapiens
caggggacatgttagccacatctccattgaatggcagtagctgtcatttagcaagattgaggaaaaatttctcttaatcttgaacttgaaaagagcagttaccacagagaagagggatttttagcttttttttttctatttgtagagacggggtttcactatgtgtcccaggctggttttgaactcctgagctcaagtgatccttctgcttggcctcccaaaagtgctgggattacaggtgtgagccactgtgcctggtccaaaaaggagagtttattttaaaaaaaaaaacccacaatagcatgtccttgattaggaatccttttaaactgtcagcattacattctctattgtttgttttttgagacagtgtctcactctgtcacccaggctggagtgcaatggagcgatcatggctcactgcaacctccgcttcctgggttcaaccagttctcctgcttcagcctccctagtatatgggactacaggtgtaccaccactatgcccagctaatttttgtattttttggtagagatggggttttactgtgatggctaggctacagtttctattgttttatttagaatgtatcacagatgtcatgtgttaacaacatttaatttttttataactgagttaattatg

SEQ ID NO: 104676 - DNA, 1277 bp, Homo sapiens
ggagactccaggtgcaggagagggggaggtggacttcctcttggtcttcccaagccatgaaacttcctggcttggtggtaacagaagagtctcctccagttcccttgaagaatccaccttcctgcagggttgggggagcgcagaatgggaggaagatacaaataccaattttatagcaagaatgcaaaaagaggccagcgcggtggctcgagcctggaatcccagcactttggaaggcgagctgggcggatcacttgagatgtgaccaggtgacccccctctggccagggaacaatgggccgaagtcctcaggggatttgtggggaagcgcgccccctcctccttggggttttcttgcggagctgctgtgaagactcagctcagctgtgataattacctgaggtcagcttctccagaatgcccttatctcctaaggcctttgagataagcaggaattgtggtgtctgccttgcctccaaacctttatccttgcttatctcagtggaaaattccagcagggatttctgaacaccaagttaaattcctccactcaacaatcagtttggcacgtggctgcccgccagtctgggcagaacagaggggagccaagggaataaacccaagtcctgcccccaggtgcccagagcctggcggggatgggacagttgcctgcagagcaagaggctgccacccagtttcacacaggccagagaggctgacctacctgcccagaggcaggggaagaatccagaggacctctcccggaggaggcacgagaagcccacgtggcagccaagaagagggagagcatcctgggccccggaagcacaatgccaggggcagacatgcactgggaggcacggggccagggacaccttcagtgagcacagggtctgggtaggcttcgggaggggtgagggcggagaggcagccaagccgggttgtgggaggccctgcctaattctgtaaagactaggattagaaacatgacaaaaatgggttaggcacggtggctcacacctgttatccactttgggaggctgaggctggtggatcatctgaggctgggagttcaagaccaacctggccaacatggtgaaaccccgtctctactaaaaatacaaaaattagccgggcgtggtggcgcacacctattaatcccaggtactaaggaggttgaggcaggagaattgcttcaacccaggaggcagaggttgcagtgagcccagaccatgccactgcactccagcctgggcaacagaacaagtctctgtctg

SEQ ID NO: 104677 - DNA, 372 bp, Homo sapiens
agagtctttgagggaaagaatgctgacttacacaggatgcacaaaataaatgtcactgtgtggaggggaaaccagcctgaccttggctatgggtcagaccaagacatttttggctcaagagttaaacggaatctcataatttcaagattagaaacaggacagacatgcaagatagaaaacagaatgaaacttaaagtcttctggatatggagaagcagaaataaattctatggcaatatatggtttaaatacacctatctgaaacacaggtctgagacaggttttccgcttaagaaaaaaacattggctgaagctccatcactgggaaaggaggctgagaaaagctgatgctgctggctatggctcatgtag

SEQ ID NO: 104678 - DNA, 449 bp, Homo sapiens
gttcctgcagctaggtgtgctgctcctggagtgaagtggccactgtaggcctctgtgggtgtctgccccactcatgatgttcccttgtctgggaactgcctctcccatccacagaggtgagcctcaaggagtcacctgtgttctgtgggaccttggattagtcagggtcccccagagaaacggagccgagagaagagtaggatgtgcattaattggctcatgtgattacagaggctgacaagttctaaggcctgcagccagcgagctggagacccaggagaactgaccagttcttgacatcatttctcacacaggcctttgttggagtccaaaggcctgagcccagaaggcccaatggtgtagctcctgttccaaggccagcaggctcccaacccaggaagaaccagtgtccctgttcaaaggtactcaggcagggggagagttccctc

SEQ ID NO: 104679 - DNA, 340 bp, Homo sapiens
aatagaaatttctacagaaacagtaacttttgttattgccactctgactctactttctgactcgttttcccactcaaaaaatcgattttgaagtaattttttatgagctcagttaccttacagattcatatatgacagcatattacactattatctgctcattttgatctaagtgattattattagatattttaatatttgtattacattttatactatcttaagaatacttatttaactttaactttgtttttttttttaattttctgccattcttaccttatttttgtttatcattttgaagagggactgttttttcaacttttagtttagattcatg

SEQ ID NO: 104680 - DNA, 705 bp, Homo sapiens
ttaataaactatgtagttgatactaaagacaattttgctagatagagttttataattaggttcaaaaattctcaagttttaaataatatattaagtatcaataatatgagctttgttagagattagttatcttaaaaaagagttaatatttagctcctctaaatggattgttcatacagtcaactcttttttgaaacctttgctctgtccggtggtgaaacagtgcttgttttataaatttattatagataatactgaaagtataaaatatttatgtaatagtgcagctacagcatgattactgaaagatacctatttatggtagatccataagataaaggcttatgtttagcaaagcattatttgaagtagtaaacattttatgaaatgcagttcttatgggtaaaaatgcccaataaagagctccacaaaagcatttaaaactgatcttattcacctatttctcattgaaaaataaagtgatcttaatttatctagaaatttacttaaactaagatttttttctgtccttggtctttgtctcttagtaaaaaatgtatttaaaagtatcattgatggccaggcacaggggctcacacctgtaattccagcactttggaaggccaaggcaggaggattgcttgaggccaggagttcaagaccagcttggtcaacatagtgagacccccgtgtctttaaaaaaaa

SEQ ID NO: 104681 - DNA, 2977 bp, Homo sapiens
tagcaagtttggcggctccaagccaggcgcgcctcaggatccaggctcatttgcttccacctagcttcggtgccccctgctaggcggggaccctcgagagcgatgccgatggatttgattttagttgtgtggttctgtgtgtgcactgccaggacagtggtgggctttgggatggaccctgaccttcagatggatatcgtcaccgagcttgaccttgtgaacaccacccttggagttgctcaggtgtctggaatgcacaatgccagcaaagcatttttatttcaagacatagaaagagagatccatgcagctcctcatgtgagtgagaaattaattcagctgttccagaacaagagtgaattcaccattttggccactgtacagcagaagccatccacttcaggagtgatactgtccattcgagaactggagcacagctattttgaactggagagcagtggcctgagggatgagattcggtatcactacatacacaatgggaagccaaggacagaggcacttccttaccgcatggcagatggacaatggcacaaggttgcactgtcagttagcgcctctcatctcctgctccatgtcgactgtaacaggatttatgagcgtgtgatagaccctccagataccaaccttcccccaggaatcaatttatggcttggccagcgcaaccaaaagcatggcttattcaaagggatcatccaagatgggaagatcatctttatgccgaatggatatataacacagtgtccaaatctaaatcacacttgcccaacctgcagtgatttcttaagcctggtgcaaggaataatggatttacaagagcttttggccaagatgactgcaaaactaaattatgcagagacaagacttagtcaattggaaaactgtcattgtgagaagacttgtcaagtgagtggactgctctatcgagatcaagactcttgggtagatggtgaccattgcaggaactgcacttgcaaaagtggtgccgtggaatgccgaaggatgtcctgtccccctctcaattgctccccagactccctcccagtgcacattgctggccagtgctgtaaggtctgccgaccaaaatgtatctatggaggaaaagttcttgcagaaggccagcggattttaaccaagagctgtcgggaatgccgaggtggagttttagtaaaaattacagaaatgtgtcctcctttgaactgctcagaaaaggatcacattcttcctgagaatcagtgctgccgtgtctgtagaggtcataacttttgtgcagaaggacctaaatgtggtgaaaactcagagtgcaaaaactggaatacaaaagctacttgtgagtgcaagagtggttacatctctgtccagggagactctgcctactgtgaagatattgatgagtgtgcagctaagatgcattactgtcatgccaatactgtgtgtgtcaaccttcctgggttatatcgctgtgactgtgtcccaggatacattcgtgtggatgacttctcttgtacagaacacgatgaatgtggcagcggccagcacaactgtgatgagaatgccatctgcaccaacactgtccagggacacagctgcacctgcaaaccgggctacgtggggaacgggaccatctgcagagctttctgtgaagagggctgcagatacggtggaacgtgtgtggctcccaacaaatgtgtctgtccatctggattcacaggaagccactgcgagaaagatattgatgaatgttcagagggaatcattgagtgccacaaccattcccgctgcgttaacctgccagggtggtaccactgtgagtgcagaagcggtttccatgacgatgggacctattcactgtccggggagtcctgtattgacattgatgaatgtgccttaagaactcacacctgttggaacgattctgcctgcatcaacctggcagggggttttgactgtctctgcccctctgggccctcctgctctggtgactgtcctcatgaaggggggctgaagcacaatggccaggtgtggaccttgaaagaagacaggtgttctgtctgctcctgcaaggatggcaagatattctgccgacggacagcttgtgattgccagaatccaagtgctgacctattctgttgcccagaatgtgacaccagagtcacaagtcaatgtttagaccaaaatggtcacaagctgtatcgaagtggagacaattggacccatagctgtcagcagtgtcggtgtctggaaggagaggtagattgctggccactcacttgccccaacttgagctgtgagtatacagctatcttagaaggggaatgttgtccccgctgtgtcagtgacccctgcctagctgataacatcacctatgacatcagaaaaacttgcctggacagctatggtgtttcacggcttagtggctcagtgtggacgatggctggatctccctgcacaacctgtaaatgcaagaatggaagagtctgttgttctgtggattttgagtgtcttcaaaataattgaagtatttacagtggactcaacgcagaagaatggacgaaatgaccatccaacgtgattaaggataggaatcggtagtttggtttttttgtttgttttgtttttttaaccacagataattgccaaagtttccacctgaggacggtgtttcggaggttgccttttggacctaccactttgctcattcttgctaacctagtctaggtgacctacagtgccgtgcatttaagtcaatggttgttaaaagaagtttcccgtgttgtaaatcatgtttcccttatcagatcatttgcaaatacatttaaatgatctcatggtaaatggttgatgtattttttgggtttattttgtgtactaaccataatagagagagactcagctccttttatttattttgttgatttatggatcaaattctaaaataaagttgcctgttgtgactttt

SEQ ID NO: 104682 - DNA, 434 bp, Homo sapiens
  misc_feature (426)..(426): n is a, c, g, or t
  misc_feature (429)..(429): n is a, c, g, or t
gagagcctaaagatcatgactaaggccaagtctttgcgcattgctgaatatccttccagctggcccagaagatgggatgcaaaaaagtgatggctgtgcacaaggtcaacatcacgaaactgggagatggtctcttcctccagtgctgtgggggaggtggcatcccgctatcctcagctcaccttagaagacatgattgtggagaatgccacaatgcactttctgtgaagagggctgcagatacggtggaacgtgtgtggctcccaacaaatgtgtctgtccatctggattcacaggaagccactgcgagaaagtggtgagaatgctggctccatgaaagaggtctgcgagagcagggaccttgtttgctctccagggcttactgcaacagactggcacataagtgtctaataaatattccgacanaanaaaaa

SEQ ID NO: 104683 - DNA, 2895 bp, Homo sapiens
ggctggttcatcaggactgacatgcttcatgactcctggctgctgtggaaaagaatttttcccctccttctgatagcaagatggagtctggctctctgtcacccaggctggagtgcagtggcgccaccttggcttattacaacttcctcctcccaggttcaagtgattctcctgccttagcctcccaagttgctgggattacagacatagaaagagagatccatgcagctcctcatgtgagtgagaaattaattcagctgttccagaacaagagtgaattcaccattttggccactgtacagcagaagccatccacttcaggagtgatactgtccattcgagaactggagcacagctattttgaactggagagcagtggcctgagggatgagattcggtatcactacatacacaatgggaagccaaggacagaggcacttccttaccgcatggcagatggacaatggcacaaggttgcactgtcagttagcgcctctcatctcctgctccatgtcgactgtaacaggatttatgagcgtgtgatagaccctccagataccaaccttcccccaggaatcaatttatggcttggccagcgcaaccaaaagcatggcttattcaaagggatcatccaagatgggaagatcatctttatgccgaatggatatataacacagtgtccaaatctaaatcacacttgcccaacctgcagtgatttcttaagcctggtgcaaggaataatggatttacaagagcttttggccaagatgactgcaaaactaaattatgcagagacaagacttagtcaattggaaaactgtcattgtgagaagacttgtcaagtgagtggactgctctatcgagatcaagactcttgggtagatggtgaccattgcaggaactgcacttgcaaaagtggtgccgtggaatgccgaaggatgtcctgtccccctctcaattgctccccagactccctcccagtgcacattgctggccagtgctgtaaggtctgccgaccaaaatgtatctatggaggaaaagttcttgcagaaggccagcggattttaaccaagagctgtcgggaatgccgaggtggagttttagtaaaaattacagaaatgtgtcctcctttgaactgctcagaaaaggatcacattcttcctgagaatcagtgctgccgtgtctgtagaggtcataacttttgtgcagaaggacctaaatgtggtgaaaactcagagtgcaaaaactggaatacaaaagctacttgtgagtgcaagagtggttacatctctgtccagggagactctgcctactgtgaagatattgatgagtgtgcagctaagatgcattactgtcatgccaatactgtgtgtgtcaaccttcctgggttatatcgctgtgactgtgtcccaggatacattcgtgtggatgacttctcttgtacagaacacgatgaatgtggcagcggccagcacaactgtgatgagaatgccatctgcaccaacactgtccagggacacagctgcacctgcaaaccgggctacgtggggaacgggaccatctgcagagctttctgtgaagagggctgcagatacggtggaacgtgtgtggctcccaacaaatgtgtctgtccatctggattcacaggaagccactgcgagaaagatattgatgaatgttcagagggaatcattgagtgccacaaccattcccgctgcgttaacctgccagggtggtaccactgtgagtgcagaagcggtttccatgacgatgggacctattcactgtccggggagtcctgtattgacattgatgaatgtgccttaagaactcacacctgttggaacgattctgcctgcatcaacctggcagggggttttgactgtctctgcccctctgggccctcctgctctggtgactgtcctcatgaaggggggctgaagcacaatggccaggtgtggaccttgaaagaagacaggtgttctgtctgctcctgcaaggatggcaagatattctgccgacggacagcttgtgattgccagaatccaagtgctgacctattctgttgcccagaatgtgacaccagagtcacaagtcaatgtttagaccaaaatggtcacaagctgtatcgaagtggagacaattggacccatagctgtcagcagtgtcggtgtctggaaggagaggtagattgctggccactcacttgccccaacttgagctgtgagtatacagctatcttagaaggggaatgttgtccccgctgtgtcagtgacccctgcctagctgataacatcacctatgacatcagaaaaacttgcctggacagctatggtgtttcacggcttagtggctcagtgtggacgatggctggatctccctgcacaacctgtaaatgcaagaatggaagagtctgttgttctgtggattttgagtgtcttcaaaataattgaagtatttacagtggactcaacgcagaagaatggacgaaatgaccatccaacgtgattaaggataggaatcggtagtttggtttttttgtttgttttgtttttttaaccacagataattgccaaagtttccacctgaggacggtgtttcggaggttgccttttggacctaccactttgctcattcttgctaacctagtctaggtgacctacagtgccgtgcatttaagtcaatggttgttaaaagaagtttcccgtgttgtaaatcatgtttcccttatcagatcatttgcaaatacatttaaatgatctcatggtaaatggttgatgtattttttgggtttattttgtgtactaaccataatagagagagactcagctccttttatttattttgttgatttatggatcaaattctaaaataaagttgcctgttgtgactttt

SEQ ID NO: 104684 - DNA, 2836 bp, Homo sapiens
tagcaagtttggcggctccaagccaggcgcgcctcaggatccaggctcatttgcttccacctagcttcggtgccccctgctaggcggggaccctcgagagcgatgccgatggatttgattttagttgtgtggttctgtgtgtgcactgccaggacagtggtgggctttgggatggaccctgaccttcagatggatatcgtcaccgagcttgaccttgtgaacaccacccttggagttgctcaggtgtctggaatgcacaatgccagcaaagcatttttatttcaagacatagaaagagagatccatgcagctcctcatgtgagtgagaaattaattcagctgttccagaacaagagtgaattcaccattttggccactgtacagcagaagccatccacttcaggagtgatactgtccattcgagaactggagcacagctattttgaactggagagcagtggcctgagggatgagattcggtatcactacatacacaatgggaagccaaggacagaggcacttccttaccgcatggcagatggacaatggcacaaggttgcactgtcagttagcgcctctcatctcctgctccatgtcgactgtaacaggatttatgagcgtgtgatagaccctccagataccaaccttcccccaggaatcaatttatggcttggccagcgcaaccaaaagcatggcttattcaaagggatcatccaagatgggaagatcatctttatgccgaatggatatataacacagtgtccaaatctaaatcacacttgcccaacctgcagtgatttcttaagcctggtgcaaggaataatggatttacaagagcttttggccaagatgactgcaaaactaaattatgcagagacaagacttagtcaattggaaaactgtcattgtgagaagacttgtcaagtgagtggactgctctatcgagatcaagactcttgggtagatggtgaccattgcaggaactgcacttgcaaaagtggtgccgtggaatgccgaaggatgtcctgtccccctctcaattgctccccagactccctcccagtgcacattgctggccagtgctgtaaggtctgccgaccaaaatgtatctatggaggaaaagttcttgcagaaggccagcggattttaaccaagagctgtcgggaatgccgaggtggagttttagtaaaaattacagaaatgtgtcctcctttgaactgctcagaaaaggatcacattcttcctgagaatcagtgctgccgtgtctgtagaggtcataacttttgtgcagaaggacctaaatgtggtgaaaactcagagtgcaaaaactggaatacaaaagctacttgtgagtgcaagagtggttacatctctgtccagggagactctgcctactgtgaagatattgatgagtgtgcagctaagatgcattactgtcatgccaatactgtgtgtgtcaaccttcctgggttatatcgctgtgactgtgtcccaggatacattcgtgtggatgacttctcttgtacagaacacgatgaatgtggcagcggccagcacaactgtgatgagaatgccatctgcaccaacactgtccagggacacagctgcacctgcaaaccgggctacgtggggaacgggaccatctgcagagctttctgtgaagagggctgcagatacggtggaacgtgtgtggctcccaacaaatgtgtctgtccatctggattcacaggaagccactgcgagaaagacattgatgaatgtgccttaagaactcacacctgttggaacgattctgcctgcatcaacctggcagggggttttgactgtctctgcccctctgggccctcctgctctggtgactgtcctcatgaaggggggctgaagcacaatggccaggtgtggaccttgaaagaagacaggtgttctgtctgctcctgcaaggatggcaagatattctgccgacggacagcttgtgattgccagaatccaagtgctgacctattctgttgcccagaatgtgacaccagagtcacaagtcaatgtttagaccaaaatggtcacaagctgtatcgaagtggagacaattggacccatagctgtcagcagtgtcggtgtctggaaggagaggtagattgctggccactcacttgccccaacttgagctgtgagtatacagctatcttagaaggggaatgttgtccccgctgtgtcagtgacccctgcctagctgataacatcacctatgacatcagaaaaacttgcctggacagctatggtgtttcacggcttagtggctcagtgtggacgatggctggatctccctgcacaacctgtaaatgcaagaatggaagagtctgttgttctgtggattttgagtgtcttcaaaataattgaagtatttacagtggactcaacgcagaagaatggacgaaatgaccatccaacgtgattaaggataggaatcggtagtttggtttttttgtttgttttgtttttttaaccacagataattgccaaagtttccacctgaggacggtgtttcggaggttgccttttggacctaccactttgctcattcttgctaacctagtctaggtgacctacagtgccgtgcatttaagtcaatggttgttaaaagaagtttcccgtgttgtaaatcatgtttcccttatcagatcatttgcaaatacatttaaatgatctcatggtaaatggttgatgtattttttgggtttattttgtgtactaaccataatagagagagactcagctccttttatttattttgttgatttatggatcaaattctaaaataaagttgcctgttgtgactttt

SEQ ID NO: 104685 - DNA, 1867 bp, Homo sapiens
  misc_feature (1859)..(1859): n is a, c, g, or t
  misc_feature (1862)..(1862): n is a, c, g, or t
tagcaagtttggcggctccaagccaggcgcgcctcaggatccaggctcatttgcttccacctagcttcggtgccccctgctaggcggggaccctcgagagcgatgccgatggatttgattttagttgtgtggttctgtgtgtgcactgccaggacagtggtgggctttgggatggaccctgaccttcagatggatatcgtcaccgagcttgaccttgtgaacaccacccttggagttgctcaggtgtctggaatgcacaatgccagcaaagcatttttatttcaagacatagaaagagagatccatgcagctcctcatgtgagtgagaaattaattcagctgttccagaacaagagtgaattcaccattttggccactgtacagcagaagccatccacttcaggagtgatactgtccattcgagaactggagcacagctattttgaactggagagcagtggcctgagggatgagattcggtatcactacatacacaatgggaagccaaggacagaggcacttccttaccgcatggcagatggacaatggcacaaggttgcactgtcagttagcgcctctcatctcctgctccatgtcgactgtaacaggatttatgagcgtgtgatagaccctccagataccaaccttcccccaggaatcaatttatggcttggccagcgcaaccaaaagcatggcttattcaaagggatcatccaagatgggaagatcatctttatgccgaatggatatataacacagtgtccaaatctaaatcacacttgcccaacctgcagtgatttcttaagcctggtgcaaggaataatggatttacaagagcttttggccaagatgactgcaaaactaaattatgcagagacaagacttagtcaattggaaaactgtcattgtgagaagacttgtcaagtgagtggactgctctatcgagatcaagactcttgggtagatggtgaccattgcaggaactgcacttgcaaaagtggtgccgtggaatgccgaaggatgtcctgtccccctctcaattgctccccagactccctcccagtgcacattgctggccagtgctgtaaggtctgccgaccaaaatgtatctatggaggaaaagttcttgcagaaggccagcggattttaaccaagagctgtcgggaatgccgaggtggagttttagtaaaaattacagaaatgtgtcctcctttgaactgctcagaaaaggatcacattcttcctgagaatcagtgctgccgtgtctgtagaggtcataacttttgtgcagaaggacctaaatgtggtgaaaactcagagtgcaaaaactggaatacaaaagctacttgtgagtgcaagagtggttacatctctgtccagggagactctgcctactgtgaagatattgatgagtgtgcagctaagatgcattactgtcatgccaatactgtgtgtgtcaaccttcctgggttatatcgctgtgactgtgtcccaggatacattcgtgtggatgacttctcttgtacagaacacgatgaatgtggcagcggccagcacaactgtgatgagaatgccatctgcaccaacactgtccagggacacagctgcacctgcaaaccgggctacgtggggaacgggaccatctgcagagctttctgtgaagagggctgcagatacggtggaacgtgtgtggctcccaacaaatgtgtctgtccatctggattcacaggaagccactgcgagaaagtggtgagaatgctggctccatgaaagaggtctgcgagagcagggaccttgtttgctctccagggcttactgcaacagactggcacataagtgtctaataaatattccgacanaanaaaaa

SEQ ID NO: 104686 - DNA, 670 bp, Homo sapiens
acatgaactgggattgttctgaccatagtgctttaacttggagcatgatttctctggaagttggctgctgggtcttactccttcggagaatggctaagaaaagttggaaagcatgactagaactggacttgtttatcactgcaagtttctcccactgttgtggggatgggggagggttgcactgtgtcttctcactactggaacttagttagattgaaaaactagattaatttatttaaaatggtctgaataacaaagtaagttctggttcctgatttaacctcaggctttgtggaattagggattcttaatctttcagagagcaaagaaagtaattagaattttggatgttggaagaacttataaaaatctgacccatatatacaagtttccaaaataaatctctaaaatttgagctcctcctttatgtaaatttgccaaactcgctatagaaatttatgaaagccagccagcaagtgattttgtagaataggccagaggactggtgaaaactttggagaattactggcttttcaaaagctgataatggccaggtgtggtggcttgtgcccataatcccagatgtttggaggcctggggtgagaggatcgcttggggccaggagttggagaccagtctgggcaacatagacctcagctttaccaaaaaa

SEQ ID NO: 104687 - DNA, 328 bp, Homo sapiens
tgagacagggtcttgctctgtcacccaggctggagtgcagtggcgtgaacgtggctcactgcagcctccacctcttgagctcaaatgattctcctgcctcacctccccctgtagctgggaccacaggtgtgcgtcaccatgcccagctattttttgtgtttatttgtagagacgggatttcagccatgttgcccaggctggtcttgaacatttgaagaggaaggatgaccaaaattagtttgtagagctaataggctttagttttatattattgcagagtctagggagggagagatttatattttaaatttcccttaaaatcatgaaa

SEQ ID NO: 104688 - DNA, 296 bp, Homo sapiens
tgctgggattacaggcatgagccactgcgcctggcctatattcaaatttttatacaacatatctttagattttttttttttcttaagagatgggatctcactgtatttcccaggctggtcttgaactcctgggctcaagcaatcctcccgtcttggcctcccaaagtgctgggactacaggtgtaagccaccctacctggcctctttagaaattttttatctttctaaactgaaactctatataccattgaagaaaaactccgtgtttcccttttcccctattctttggcaacctt

SEQ ID NO: 104689 - DNA, 220 bp, Homo sapiens
agaagttatacgaatttaccatgtgataaggataatccagcaacccggggagaaaaggaaagcttattacaaaagcttgtaaaaaagcttatgtaaagagtttttctccatgataagaagagaacatgctccgttcattagtgattgtagtaattctttctttcttctactttcctgtttttttttgagacagagtcttgctttgttgcccaggctggag

SEQ ID NO: 104690 - DNA, 392 bp, Homo sapiens
tttgagacagagtttcgctctgtcgccaggctggagtacagtgtggcacaatgtcggctcactgcaacctcagactccctggtccaagcgattctcctgcctcagtctcccaagtagctgggaccacaggcgtgtgccaccacacccagctaacttttgtatttttagtagagacagggttccaccatgttggccaggatggtctccatctcttgaccttgtgatctggccccctcggcctcccaaagtgctgggattacaggcgtgagcaccgcacccggccctgatttgactattctttatgcctcatgtaagtgggatcataacagtatttgtccttttgtctgacttactttacttagcataatgtcctcatagttcatccgtgttgt

SEQ ID NO: 104691 - DNA, 226 bp, Homo sapiens
tctcccagtgatgaacacaacctcctttcacactaagcagggcctggagggatgaacttgcccgagctgggagctcagcagggccaggctccagctgtgcccttacaccctgccctctcgccatggacctctgccacctctgccagccagaataccgggggattctcagctttcaagcccctctcctcgtccatcttgggcttcattctcccactctcttgccccc

SEQ ID NO: 104692 - DNA, 794 bp, Homo sapiens
gagggacagagtctgggagatgagatttttggaaaaaccagacttaggactaaggggagtcaactatcagagaattgcatggaaatgtcagtacgaaatgaatcagagtaattgaatatcacattttgttcccaaagggggagattcaagaagctggattgtgaagtaacagtaaaggttctctggttgtaaggaatgataaaaacagtacaacaatacactttttttttctttttaagacggtctcttgctcatgtactcaggatggagtgcaatgcgtgatcttggctcactgcaacctccacttcctgggttcaagcgattctcctgcctcagcctcccaagtagctgggattataggtgcttgccaccacgcccaactgatttttgtatttttagtagagatggggttccaccatgttggccaggctggtctcgaacccctgagctcaggcaatctgcccgccccggcctctcaaagtgttgggattacaggtgtgagccagcgtgcccagccaacaatacacctttgtgtttgtctcccagaagggagttttagtaaagtggtgaagatgaatgatggcagatataggaagtttgagatagaatggatgatgagaagagagaggactgacaatacggtattgccacaccatgtatatccaagaacactacattggtaaaggatatccatagagcagctaaggatatcttcagtgtcttgaattattaaataatgatgacatcatctcatatgtattgtagacttatatatattgattttatatatgata

SEQ ID NO: 104693 - DNA, 491 bp, Homo sapiens
cgcctcagcctcccaaagtgcttggatgacaggcgtgagacactgcacccggccttctggctccttcttacctttcaggtcattaggctgaaacacctcttttgagttgctttccctaaaatcctatccaaagtagaccctttctcctgcactcttctctgccatataatatttatcaagaggcatcctgtgcccttggcagaaagctgatgcttaggggtgagtaccacatatggagtgcagggacaggataacagtcaacatttaccactcaggctacttctcatgtaccccacacacagacattccagattttaaccagtgtggaccaatgacagagagtcagcagaccttgactataaaatccaaacgttcaaatcaggcgcagtggctcacacctgtaatcccagcattttggaaggccaaggcgggaggatcccttgaggccaggagtttgagaccaacctgggcaacataatgagaccgtctca

SEQ ID NO: 104694 - DNA, 296 bp, Homo sapiens
agatcttgccactgcactccgccctgggcaccagagcaaaagtccatctcaaaaaaaaaaagaagtgaatggctccaccatttaccctttgaaagattcttttgttgaaaaactgcatagaaagaataaattatgagaatataatgatttataaacatttcaatatgaactgttataggagacttgcgaaaggtatgagtttttttttttttttaaatccaagaaactggtgtgtaggaatggtctgcagaggcatgctgagataatacagtgttagtcattaaatacaaagcatt

SEQ ID NO: 104695 - DNA, 470 bp, Homo sapiens
ataaaaagtgtattaaaaataatactgcggcgaggcatgatgggtcaggtctgtaaccccagcactttgggaggctgaggtgggtggattggttgaagtcagcagttcgagaccagcctggccaatatggtgaaaccctgtttctactaaaatacaaaaattagctaggcttggtggctggcgcctgtaatcccagctacttgggaggctgaggcaggagaattacttgaacccaggaggcagaggttgccgtgagctgagatagcgccactgcactctagcctgggtgacagagcgagattccatttcaaataattaaataaataaataataatactgcacattgaaaaagttaatgattgtttttaccattattatttaaaaggctttgctcaggaggctgaggccagaggatcaatcgggcccaagagtttaagactagcctgggcaacatagtgagaccctgtctc

SEQ ID NO: 104696 - DNA, 598 bp, Homo sapiens
atttgagtccagaaacaatgtaagaagttaatattatgttgattagtaggtgaggcttcgaaacagagttagacccagcatgtgtaaaattgctttaaaatttgcaccatacactgcctcccctgtccactgttgcctttttctgatgccttctctactcttcagctggagttacctctgtaaaatgaaagtttgatcatgccatcacttaaaaaccctctggtttaaaacactctagtggcttctcctcttcagctgccccatgatgccctgggcagtgtggtcccacctactcctcaggtcccatctcttgtacccagttgactggcctggcctttgtcagggaatcaagtcctttctgtgtcagatgcatttccttctgcctgggacacccttaccattcagttcaccttacctcttatccttcagtttctggctaagtactgattcctcagagacgttttcctgacatcctgcctaggtctgatctcatggcactttgtgcttttccttcagagcacttgtcacagttgaatcacgtgtgttgcgggtgcatatttttaatgtctcgttagatggcgaattctgtgaaacaaga

SEQ ID NO: 104697 - DNA, 999 bp, Homo sapiens
ggaggagagggaggaggaggagggaggtggcggcgccgtggcggaggagcaggagcaggagggggatggagaggagaaggctcctgggtggcatggcgctcctgctcctccaggcgctgcccagccccttgtcagccagggctgaacccccgcaggtaaggaagcctgtgtgggtaccatgcaatcaaagctacatctgtgacttcaggacactgctgtggacagtctcagtgctgcaacgtactactatgaactctggtggttctggctggatgtggatgcctcttcctccacaagggccacagtgttgtggagggctaaggttggttctgtgactcatgcctcataccctaactccatctccttatctctctaaggtcaaatctcaacctacctgttgggtcagagagatgtgtttgaaaagccccctgggtaaggaggctgggactgtgtcctgaggatgatattctctgcgtgactggatatcaggcttggtgcactgacacatagccttatcaaaaagctgagcgcgatactcccttccgggacagggggggtcacgtcataggtactcatgacctcgaacaaaggagaaaggctcaatacgtacttcggactgtctaccggtgctgcccgtgtcactgccatgcttactctcatgcaagcaaaactagggaccgggcaagaatgagaaaggacacggacgccgaccaggtgatcaacgaagaaccggcaggacgataccgacaaaccacgagcacaccacgaggaacaccatccacaagacggaagcaagaccccacacacgacagactgacgatgccacgggaaaggtaccgcgacgcgagagcggaggccacacacaaacgaaccaacagaacacgagccgagactgaagccagggaggcgagagagggaatagcagccacacactacggcccaacaaagacaccggagacccagcccgacaaacacagcgcaaacaactacacgacgcac

SEQ ID NO: 104698 - DNA, 3318 bp, Homo sapiens
aaagcctcggctacttccgagggggtgagtggcttcaccgccggtcccttgcagcgctgcctttcgatctctccacatctcggtggcgcgggatctcaagatgcgcctccacctgctcctgctgctcgcgctgtgcggtgcaggcaccaccgccgcggagctcagttacagcttgcgtggcaactggagcatctgcaatgggaacggctcgctggagctgcccggggcggtccctggctgcgtgcacagcgccttgttccagcagggcctgatccaggattcttactacagatttaatgaccttaactacagatgggtctctttggataactggacctatagcaaagaatttaaaatcccctttgaaattagcaaatggcaaaaagtaaatttgattcttgagggagtggatacggtttcaaaaatcctgttcaatgaagtcactattggggaaacagacaatatgttcaatagatatagctttgatattaccaacgtggtcagggacgtgaactccattgagctgcgtttccagtcagcggtgttgtatgcagcacagcagagcaaagctcacactcgctaccaggttcccccagactgccctccacttgtgcagaagggtgaatgccatgtcaactttgttcggaaggagcaatgttcctttagttgggactgggggccttcctttcctacccagggaatctggaaagatgttagaattgaagcctataatatttgtcacctgaactacttcacattttccccaatatatgataagagtgcccaggagtggaatctggaaatagagtctacatttgatgttgtcagctcaaagccagttggtggtcaagtgatcgtagccatccctaagttgcaaacacaacagacatacagcattgaacttcaacctgggaaaaggattgttgagctatttgtgaacattagcaagaatattactgtagaaacttggtggcctcatggacatggaaaccagactgggtacaacatgactgttctttttgaactggatggaggcttaaatattgaaaaatcagctaaggtttattttaggacagtggaacttatagaagagcctataaaagggtctcctggtttgagtttctatttcaaaattaatggatttcccatatttctaaaaggctcaaactggatcccagcagattcattccaggaccgagtaacctctgagttgttacggctccttttacagtctgttgtggatgctaatatgaatactcttcgggtttggggaggaggaatttatgagcaggatgaattctatgaactctgtgatgaactaggaataatggtatggcaggattttatgtttgcctgtgccctttatccaactgatcagggcttcctggattcagtgacagcagaagttgcctaccagatcaagagactgaaatctcatccttctatcatcatatggagtggcaataatgaaaatgaggaggcgctgatgatgaattggtatcatatcagtttcactgaccggccaatctacatcaaggactatgtgacactctatgtgaaaaacatcagagagctcgtactggcaggagacaagagtcgtccttttattacgtccagtcctacaaatggggctgaaactgttgcagaagcctgggtctctcaaaaccctaatagcaattattttggtgatgtacatttttatgactatatcagtgattgctggaactggaaagttttcccaaaagctcgatttgcatctgaatatggatatcagtcctggccgtccttcagtacattagaaaaggtctcgtctacagaggactggtctttcaatagcaagttttcacttcatcgacaacatcacgaaggtggtaacaaacaaatgctttatcaggctggacttcatttcaaactcccccaaagcacagatccattacgcacatttaaagataccatctaccttactcaggtgatgcaggcccagtgtgtcaaaacagaaactgaattctaccgccgtagtcgcagcgagatagtggatcagcaagggcacacgatgggggcactttattggcagttgaatgacatctggcaagctccttcctgggcttctcttgagtacggaggaaagtggaaaatgcttcattactttgctcagaatttctttgctccactgttgccagtaggctttgagaatgaaaacacgttctatatctatggtgtgtcagatcttcactcggattattcgatgacactcagtgtgagagtccatacatggagctccctggagcccgtgtgctctcgtgtgactgaacgttttgtgatgaaaggaggagaggctgtctgcctttatgaggagccagtgtctgaattgctgaggagatgtgggaattgcacacgggaaagctgtgtggtttccttttacctttcagctgaccatgaactcctgagcccgaccaactaccacttcctgtcctcaccgaaggaggccgtggggctctgcaaggcgcagatcactgccatcatctctcagcaaggtgacatatttgtttttgacctggagacctcagctgtcgctccctttgtttggttggatgtaggaagcatcccagggagatttagtgacaatggtttcctcatgactgagaagacacgaactatattattttacccttgggagcccaccagcaagaatgagttggagcaatcttttcatgtgacctccttaacagatatttactgaaggaatctaggttgtattttcagtggacaatgggaataaagcatttctaaagcaccgactggagaggaaggcaacagagacaaggagagaagccgagagacatgtctgcgtgctgccacgcatctgagcgattgctctgtgaagagttgtacactgaacactttcaggggaggctgtttacccaggcaatgtcctcaaacaagcctgtgccggggtgtcctggaatctgtgccaggactgtgtttttagcccttcacctctcagctttagcaggacatgaaccagttataacaagatggccctgcagctggttacaagaatgtgacatggcaggatctatggaaccaaatggaaggttttgaggtgatgtaggtctttcacagctagctttggggaatacggaatactcaaataaagtgctttgttattatttcagagggaatggcgattgaaatgttacaacagagatttcttggtggtagctatttgggtaaaggtatatgggtatttttctgtacatgtgaaattatataaaaataaaagttatataaattacattgacaactaaaaaaaaaaaa

SEQ ID NO: 104699 - DNA, 3107 bp, Homo sapiens
tggctcccaggaagagtccgtaccatagcaggttctccaggaaagtgggctcaggcacctccagaggattcttactacagatttaatgaccttaactacagatgggtctctttggataactggacctatagcaaagaatttaaaatcccctttgaaattagcaaatggcaaaaagtaaatttgattcttgagggagtggatacggtttcaaaaatcctgttcaatgaagtcactattggggaaacagacaatatgttcaatagatatagctttgatattaccaacgtggtcagggacgtgaactccattgagctgcgtttccagtcagcggtgttgtatgcagcacagcagagcaaagctcacactcgctaccaggttcccccagactgccctccacttgtgcagaagggtgaatgccatgtcaactttgttcggaaggagcaatgttcctttagttgggactgggggccttcctttcctacccagggaatctggaaagatgttagaattgaagcctataatatttgtcacctgaactacttcacattttccccaatatatgataagagtgcccaggagtggaatctggaaatagagtctacatttgatgttgtcagctcaaagccagttggtggtcaagtgatcgtagccatccctaagttgcaaacacaacagacatacagcattgaacttcaacctgggaaaaggattgttgagctatttgtgaacattagcaagaatattactgtagaaacttggtggcctcatggacatggaaaccagactgggtacaacatgactgttctttttgaactggatggaggcttaaatattgaaaaatcagctaaggtttattttaggacagtggaacttatagaagagcctataaaagggtctcctggtttgagtttctatttcaaaattaatggatttcccatatttctaaaaggctcaaactggatcccagcagattcattccaggaccgagtaacctctgagttgttacggctccttttacagtctgttgtggatgctaatatgaatactcttcgggtttggggaggaggaatttatgagcaggatgaattctatgaactctgtgatgaactaggaataatggtatggcaggattttatgtttgcctgtgccctttatccaactgatcagggcttcctggattcagtgacagcagaagttgcctaccagatcaagagactgaaatctcatccttctatcatcatatggagtggcaataatgaaaatgaggaggcgctgatgatgaattggtatcatatcagtttcactgaccggccaatctacatcaaggactatgtgacactctatgtgaaaaacatcagagagctcgtactggcaggagacaagagtcgtccttttattacgtccagtcctacaaatggggctgaaactgttgcagaagcctgggtctctcaaaaccctaatagcaattattttggtgatgtacatttttatgactatatcagtgattgctggaactggaaagttttcccaaaagctcgatttgcatctgaatatggatatcagtcctggccgtccttcagtacattagaaaaggtctcgtctacagaggactggtctttcaatagcaagttttcacttcatcgacaacatcacgaaggtggtaacaaacaaatgctttatcaggctggacttcatttcaaactcccccaaagcacagatccattacgcacatttaaagataccatctaccttactcaggtgatgcaggcccagtgtgtcaaaacagaaactgaattctaccgccgtagtcgcagcgagatagtggatcagcaagggcacacgatgggggcactttattggcagttgaatgacatctggcaagctccttcctgggcttctcttgagtacggaggaaagtggaaaatgcttcattactttgctcagaatttctttgctccactgttgccagtaggctttgagaatgaaaacacgttctatatctatggtgtgtcagatcttcactcggattattcgatgacactcagtgtgagagtccatacatggagctccctggagcccgtgtgctctcgtgtgactgaacgttttgtgatgaaaggaggagaggctgtctgcctttatgaggagccagtgtctgaattgctgaggagatgtgggaattgcacacgggaaagctgtgtggtttccttttacctttcagctgaccatgaactcctgagcccgaccaactaccacttcctgtcctcaccgaaggaggccgtggggctctgcaaggcgcagatcactgccatcatctctcagcaaggtgacatatttgtttttgacctggagacctcagctgtcgctccctttgtttggttggatgtaggaagcatcccagggagatttagtgacaatggtttcctcatgactgagaagacacgaactatattattttacccttgggagcccaccagcaagaatgagttggagcaatcttttcatgtgacctccttaacagatatttactgaaggaatctaggttgtattttcagtggacaatgggaataaagcatttctaaagcaccgactggagaggaaggcaacagagacaaggagagaagccgagagacatgtctgcgtgctgccacgcatctgagcgattgctctgtgaagagttgtacactgaacactttcaggggaggctgtttacccaggcaatgtcctcaaacaagcctgtgccggggtgtcctggaatctgtgccaggactgtgtttttagcccttcacctctcagctttagcaggacatgaaccagttataacaagatggccctgcagctggttacaagaatgtgacatggcaggatctatggaaccaaatggaaggttttgaggtgatgtaggtctttcacagctagctttggggaatacggaatactcaaataaagtgctttgttattatttcagagggaatggcgattgaaatgttacaacagagatttcttggtggtagctatttgggtaaaggtatatgggtatttttctgtacatgtgaaattatataaaaataaaagttatataaattacattgacaactaaaaaaaaaaaa

SEQ ID NO: 104700 - DNA, 3030 bp, Homo sapiens
aaagcctcggctacttccgagggggtgagtggcttcaccgccggtcccttgcagcgctgcctttcgatctctccacatctcggtggcgcgggatctcaagatgcgcctccacctgctcctgctgctcgcgctgtgcggtgcaggcaccaccgccgcggagctcagttacagcttgcgtggcaactggagcatctgcaatgggaacggctcgctggagctgcccggggcggtccctggctgcgtgcacagcgccttgttccagcagggcctgatccaggattcttactacagatttaatgaccttaactacagatgggtctctttggataactggacctatagcaaagaatttaaaatcccctttgaaattagcaaatggcaaaaagtaaatttgattcttgagggagtggatacggtttcaaaaatcctgttcaatgaagtcactattggggaaacagacaatatgttcaatagatatagctttgatattaccaacgtggtcagggacgtgaactccattgagctgcgtttccagtcagcggtgttgtatgcagcacagcagagcaaagctcacactcgctaccaggttcccccagactgccctccacttgtgcagaagggtgaatgccatgtcaactttgttcggaaggagcaatgttcctttagttgggactgggggccttcctttcctacccagggaatctggaaagatgttagaattgaagcctataatatttgtcacctgaactacttcacattttccccaatatatgataagagtgcccaggagtggaatctggaaatagagtctacatttgatgttgtcagctcaaagccagttggtggtcaagtgatcgtagccatccctaagttgcaaacacaacagacatacagcattgaacttcaacctgggaaaaggattgttgagctatttgtgaacattagcaagaatattactgtagaaacttggtggcctcatggacatggaaaccagactgggtacaacatgactgttctttttgaactggatggaggcttaaatattgaaaaatcagctaaggtttattttaggacagtggaacttatagaagagcctataaaagggtctcctggtttgagtttctatttcaaaattaatggatttcccatatttctaaaaggctcaaactggatcccagcagattcattccaggaccgagtaacctctgagttgttacggctccttttacagtctgttgtggatgctaatatgaatactcttcgggtttggggaggaggaatttatgagcaggatgaattctatgaactctgtgatgaactaggaataatggtatggcaggattttatgtttgcctgtgccctttatccaactgatcagggcttcctggattcagtgacagcagaagttgcctaccagatcaagagactgaaatctcatccttctatcatcatatggagtggcaataatgaaaatgaggaggcgctgatgatgaattggtatcatatcagtttcactgaccggccaatctacatcaaggactatgtgacactctatgtgaaaaacatcagagagctcgtactggcaggagacaagagtcgtccttttattacgtccagtcctacaaatggggctgaaactgttgcagaagcctgggtctctcaaaaccctaatagcaattattttggtgatgtacatttttatgactatatcagtgattgctggaactggaaagttttcccaaaagctcgatttgcatctgaatatggatatcagtcctggccgtccttcagtacattagaaaaggtctcgtctacagaggactggtctttcaatagcaagttttcacttcatcgacaacatcacgaaggtggtaacaaacaaatgctttatcaggctggacttcatttcaaactcccccaaagcacagatccattacgcacatttaaagataccatctaccttactcaggtgagagtccatacatggagctccctggagcccgtgtgctctcgtgtgactgaacgttttgtgatgaaaggaggagaggctgtctgcctttatgaggagccagtgtctgaattgctgaggagatgtgggaattgcacacgggaaagctgtgtggtttccttttacctttcagctgaccatgaactcctgagcccgaccaactaccacttcctgtcctcaccgaaggaggccgtggggctctgcaaggcgcagatcactgccatcatctctcagcaaggtgacatatttgtttttgacctggagacctcagctgtcgctccctttgtttggttggatgtaggaagcatcccagggagatttagtgacaatggtttcctcatgactgagaagacacgaactatattattttacccttgggagcccaccagcaagaatgagttggagcaatcttttcatgtgacctccttaacagatatttactgaaggaatctaggttgtattttcagtggacaatgggaataaagcatttctaaagcaccgactggagaggaaggcaacagagacaaggagagaagccgagagacatgtctgcgtgctgccacgcatctgagcgattgctctgtgaagagttgtacactgaacactttcaggggaggctgtttacccaggcaatgtcctcaaacaagcctgtgccggggtgtcctggaatctgtgccaggactgtgtttttagcccttcacctctcagctttagcaggacatgaaccagttataacaagatggccctgcagctggttacaagaatgtgacatggcaggatctatggaaccaaatggaaggttttgaggtgatgtaggtctttcacagctagctttggggaatacggaatactcaaataaagtgctttgttattatttcagagggaatggcgattgaaatgttacaacagagatttcttggtggtagctatttgggtaaaggtatatgggtatttttctgtacatgtgaaattatataaaaataaaagttatataaattacattgacaactaaaaaaaaaaaa

SEQ ID NO: 104701 - DNA, 1029 bp, Homo sapiens
  misc_feature (1029)..(1029): n is a, c, g, or t
aaagcctcggctacttccgagggggtgagtggcttcaccgccggtcccttgcagcgctgcctttcgatctctccacatctcggtggcgcgggatctcaagatgcgcctccacctgctcctgctgctcgcgctgtgcggtgcaggcaccaccgccgcggagctcagttacagcttgcgtggcaactggagcatctgcaatgggaacggctcgctggagctgcccggggcggtccctggctgcgtgcacagcgccttgttccagcagggcctgatccaggattcttactacagatttaatgaccttaactacagatgggtctctttggataactggacctatagcaaagaatttaaaatcccctttgaaattagcaaatggcaaaaagtaaatttgattcttgagggagtggatacggtttcaaaaatcctgttcaatgaagtcactattggggaaacagacaatatgttcaatagatatagctttgatattaccaacgtggtcagggacgtgaactccattgagctgcgtttccagtcagcggtgttgtatgcagcacagcagagcaaagctcacactcgctaccaggttcccccagactgccctccacttgtgcagaagggtgaatgccatgtcaactttgttcggaaggagcaatgttcctttagttgggactgggggccttcctttcctacccagggaatctggaaagatgttagaattgaagcctataatatttgtcacctgaactacttcacattttccccaatatatgataagagtgcccaggagtggaatctggaaatagagtctacatttgatgttgtcagctcaaagccagttggtggtcaagtgatcgtagccatccctaagttgcaaacacaacagacatacagcattgaaccggatagcttgccggcaagctatccggttcaatggacacaggtcacaggtttgactttgagggcttatatgggggcctcacttctggtggtactggttgagtatactttcttgcacaggaggcgtan

SEQ ID NO: 104702 - DNA, 675 bp, Homo sapiens
agctttgatattaccaacgtggtcagggacgtgaactccattgagctgcgtttccagtcagcggtgttgtatgcagcacagcagagcaaagctcacactcgctaccaggttcccccagactgccctccacttgtgcagaagggtgaatgccatgtcaactttgttcggaaggtaatggtctctcaaacaggtcgggttttatttttgaggacggggtgtgctggcatatgaaatgcttatttgaagactcccatggcatttcagaagttaggaatctctttcctgatcccttagtggggtttgaaaatttgaaataagaaccaaaagattatttgaaatattgtggagaatctttatctttttctaagttttcttcctgaagcgtgttcagaacttaggtaacagaaaaagaaaggaaaaatatgtggctgataatggaactttacaaattatttttttaacatttaagtttatcaaacttttcaccagattgtgaaaatgtattagtgattcttgtttctaggaagccctctgcaaatattagtatatttgatgatatgttcttgcatcttactgtcaggttctcataaaatctaacaaaaagataacaaagtccacaaaagtaattatttttcttagagtatgattccagtctaagaggacttggatctattt

SEQ ID NO: 104703 - DNA, 906 bp, Homo sapiens
catgctcactcccttagaaccccgatgagccacaaacagctgggccattggacagtgcctctctgactacttgaccttgccgtctcctgacactcttgattattttcagagtacggaggaaagtggaaaatgcttcattactttgctcagaatttctttgctccactgttgccagtaggctttgagaatgaaaacacgttctatatctatggtgtgtcagatcttcactcggattattcgatgacactcagtgtgagagtccatacatggagctccctggagcccgtgtgctctcgtgtgactgaacgttttgtgatgaaaggaggagaggctgtctgcctttatgaggagccagtgtctgaattgctgaggagatgtgggaattgcacacgggaaagctgtgtggtttccttttacctttcagctgaccatgaactcctgagcccgaccaactaccacttcctgtcctcaccgaaggaggccgtggggctctgcaaggcgcagatcactgtaagcacaggtcatggcggagggcaggggactgtggccttgtggggttctcctgctcttgggccagctccttgcatcctgagatttgcatgtgtcccccttggtgctgagtttacctgaggcttgggggaagattggcctgttcccactaaaagcaaacaccaaatgatttctatttcgaatccaggatttgtcagagttgctggtgaccactactcgtttgtcccatcacccctccttagtgggcaggtgcagtgatgggagaggaggctcgagtcatcaccactgcctgcatgccactaggttccaggctgtgttctaggtccttcactgcatagtctctgactttcaccacagctccaggcattatcatctgcattttcgtaagtttgaagc

SEQ ID NO: 104704 - DNA, 2911 bp, Homo sapiens
aaagcctcggctacttccgagggggtgagtggcttcaccgccggtcccttgcagcgctgcctttcgatctctccacatctcggtggcgcgggatctcaagatgcgcctccacctgctcctgctgctcgcgctgtgcggtgcaggcaccaccgccgcggagctcagttacagcttgcgtggcaactggagcatctgcaatgggaacggctcgctggagctgcccggggcggtccctggctgcgtgcacagcgccttgttccagcagggcctgatccaggattcttactacagatttaatgaccttaactacagatgggtctctttggataactggacctatagcaaagaatttaaaatcccctttgaaattagcaaatggcaaaaagtaaatttgattcttgagggagtggatacggtttcaaaaatcctgttcaatgaagtcactattggggaaacagacaatatgttcaatagatatagctttgatattaccaacgtggtcagggacgtgaactccattgagctgcgtttccagtcagcggtgttgtatgcagcacagcagagcaaagctcacactcgctaccaggttcccccagactgccctccacttgtgcagaagggtgaatgccatgtcaactttgttcggaaggagcaatgttcctttagttgggactgggggccttcctttcctacccagggaatctggaaagatgttagaattgaagcctataatatttgtcacctgaactacttcacattttccccaatatatgataagagtgcccaggagtggaatctggaaatagagtctacatttgatgttgtcagctcaaagccagttggtggtcaagtgatcgtagccatccctaagttgcaaacacaacagacatacagcattgaacttcaacctgggaaaaggattgttgagctatttgtgaacattagcaagaatattactgtagaaacttggtggcctcatggacatggaaaccagactgggtacaacatgactgttctttttgaactggatggaggcttaaatattgaaaaatcagctaaggtttattttaggacagtggaacttatagaagagcctataaaagggtctcctggtttgagtttctatttcaaaattaatggatttcccatatttctaaaaggctcaaactggatcccagcagattcattccaggaccgagtaacctctgagttgttacggctccttttacagtctgttgtggatgctaatatgaatactcttcgggtttggggaggaggaatttatgagcaggatgaattctatgaactctgtgatgaactaggaataatggtatggcaggattttatgtttgcctgtgccctttatccaactgatcagggcttcctggattcagtgacagcagaagttgcctaccagatcaagagactgaaatctcatccttctatcatcatatggagtggcaataatgaaaatgaggaggcgctgatgatgaattggtatcatatcagtttcactgaccggccaatctacatcaaggactatgtgacactctatgtgaaaaacatcagagagctcgtactggcaggagacaagagtcgtccttttattacgtccagtcctacaaatggggctgaaactgttgcagaagcctgggtctctcaaaaccctaatagcaattattttggtgatgtacatttttatgactatatcagtgattgctggaactggaaagttttcccaaaagctcgatttgcatctgaatatggatatcagtcctggccgtccttcagtacattagaaaaggtctcgtctacagaggactggtctttcaatagcaagttttcacttcatcgacaacatcacgaaggtggtaacaaacaaatgctttatcaggctggacttcatttcaaactcccccaaagcacagatccattacgcacatttaaagataccatctaccttactcaggtgatgcaggcccagtgtgtcaaaacagaaactgaattctaccgccgtagtcgcagcgagatagtggatcagcaagggcacacgatgggggcactttattggcagttgaatgacatctggcaagctccttcctgggcttctcttgagtacggaggaaagtggaaaatgcttcattactttgctcagaatttctttgctccactgttgccagtaggctttgagaatgaaaacacgttctatatctatggtgtgtcagatcttcactcggattattcgatgacactcagtgtgagagtccatacatggagctccctggagcccgtgtgctctcgtgtgactgaacgttttgtgatgaaaggaggagaggctgtctgcctttatgaggagccagtgtctgaattgctgaggagatgtgggaattgcacacgggaaagctgtgtggtttccttttacctttcagctgaccatgaactcctgagcccgaccaactaccacttcctgtcctcaccgaaggaggccgtggggctctgcaaggcgcagatcactgtaagcacaggtcatggcggagggcaggggactgtggccttgtggggttctcctgctcttgggccagctccttgcatcctgagatttgcatgtgtcccccttggtgctgagtttacctgaggcttgggggaagattggcctgttcccactaaaagcaaacaccaaatgatttctatttcgaatccaggatttgtcagagttgctggtgaccactactcgtttgtcccatcacccctccttagtgggcaggtgcagtgatgggagaggaggctcgagtcatcaccactgcctgcatgccactaggttccaggctgtgttctaggtccttcactgcatagtctctgactttcaccacagctccaggcattatcatctgcattttcgtaagtttgaagc

SEQ ID NO: 104705 - DNA, 991 bp, Homo sapiens
aaagcctcggctacttccgagggggtgagtggcttcaccgccggtcccttgcagcgctgcctttcgatctctccacatctcggtggcgcgggatctcaagatgcgcctccacctgctcctgctgctcgcgctgtgcggtgcaggcaccaccgccgcggagctcagttacagcttgcgtggcaactggagcatctgcaatgggaacggctcgctggagctgcccggggcggtccctggctgcgtgcacagcgccttgttccagcagggcctgatccaggattcttactacagatttaatgaccttaactacagatgggtctctttggataactggacctatagcaaagaatttaaaatcccctttgaaattagcaaatggcaaaaagtaaatttgattcttgagggagtggatacggtttcaaaaatcctgttcaatgaagtcactattggggaaacagacaatatgttcaatagatatagctttgatattaccaacgtggtcagggacgtgaactccattgagctgcgtttccagtcagcggtgttgtatgcagcacagcagagcaaagctcacactcgctaccaggttcccccagactgccctccacttgtgcagaagggtgaatgccatgtcaactttgttcggaaggagcaatgttcctttagttgggactgggggccttcctttcctacccagggaatctggaaagatgttagaattgaagcctataatatttgtcacctgaactacttcacattttccccaatatatgagtgaggagaaggcttacgtctagtgagggagagattgggtatatgattgagatgggggctagtttttgtcatgtgagaagaagcaggccggatgtcagaggggtgccttgggtaacctctgggactcagaagtgaaagggggctattcctagttttattgctatagccattatgattattaatgatgagtattgataggtagtataggttatggttc

SEQ ID NO: 104706 - DNA, 338 bp, Homo sapiens
gggttggactcacactcagattagacagtgctccgaagagaaggagcccgtcactccacaggcagccatctgtcctcatctgtccactcccggtaaaccaagagtggttgagagacaagatcaggggcccggctggcaccaaggctgcacccaggatcgggctctccctggatcccatggtgctggtgggccccatacggtggtgggcttggaagagagagggtgggaaaggcacgggggagactgagctgagacgggcgaggggaggtggctgggagcggggatgctggctcctcacgtaattctactaagcacctgctacgggttcagccgggtgg

SEQ ID NO: 104707 - DNA, 117 bp, Homo sapiens
taggtcatgaggcagaatgccatttgattattttctttgctttcactaactgccccttgtgcgctggcttggagcaccatcttgttgaaagataaatcctttacataataagggtgg

SEQ ID NO: 104708 - DNA, 473 bp, Homo sapiens
atgagaacacctttggaagcttaaagaaaaatagtaggccaatctagaagacagtgtgcaggtaaaagtgttagaaaaagaccttgccagtgtctaacaatgtagggttctgtagaccaaataacagagttggattttattcttaaaataatgagaagccaggcaaaaatcttaatcaggggagtgccataatctcactttagttgcaaaacatcattctggctacagggtgggaaacagtaggagacaaaagagtaatctagaagccaagtgactagctatgaggcatgtcactcaccatgataaaattcctttttaggaacttagagatgttaattctcagattgcattttcacatctttcttgcagcacttaaaatggctcatgatgttgagcacgttctaatatgcctgttttagaactaatagtgtaatgtggaatgtgttcataatacaaaggataaatgcttaagg

SEQ ID NO: 104709 - DNA, 267 bp, Homo sapiens
tcagggccgtgagggaggcaagactggcctgtccactgcaccgagtggtgccatcagtaaagtgaagactgtgtcctctctcatgtcccacctgccaggagtgtcaggatcacagggatcccaaagggtatggtgcttgtggagctctcaactgccccaccctaaactcgagtgtgcttgttaaagtggacagggtgccagtggaggctggtgggccaatctccacagggacaagtgacgtgtttgttacacacggctgctaggtcg

SEQ ID NO: 104710 - DNA, 464 bp, Homo sapiens
aaaaagcagtttgttccttgaaactattctgtatgctgcaataatggtggatgcatgtaattatacatatgtcaaaacccaaagaatgggtggggcctcagtagctcatgtctataatcctaccattttgggaggctgaagagggaggattgcttcaaccctggagttccagaccagtctgggcaacatagggagaccccgtctctacaaaaaatgtaaaaattagtgggacatggtagtgtatgcctataatcccagctgcttctgaggctgaggcaggatgatcgcttgagcccaggaggtgaggttgcaggaagctgtgattgtgccagtgcactccagcctgggtggcagagcgagaccctgtcacagaaaacaaacccgtaggctatacacaagcaagagtgaaccttgatgtaaaatccggactttgggtaacaatgatgtgtcgatataggtttgtt

SEQ ID NO: 104711 - DNA, 496 bp, Homo sapiens
gggatcggcggcccagagttgattgttgtggccccagcagcaggatgatggctgtagagcacctgctcaggagttggcctatctccagctatggggcgggaaggctccctaccagaccacacacatcttgatgtactcaccctgtgagcccaggacccctgtgatacctgctgaggtgaaggctgaatgagtgagagctcccagcctccagcatcagggcattagggagaagaagcagctagactcaagccagggatgcagagggagggaacaggcatcaggtagtaggtgttttaatgtcacctacctcttattatgttgtatgtttctggaggatgggtccatggctgatccatccttgtgtctctactacaaccagcagattactttacagagagttgatactcagtaagtacagcttattgaaggtgtaaccaaaagccagtaggcaggatgacagatggcatccgccttgcatgtctgggtcatcagggaa

SEQ ID NO: 104712 - DNA, 409 bp, Homo sapiens
gccaaaccctgtttgagacactggggatgtaacgattcattagcttacattctgatgagaaatggtgaagtgagtggtctgtttaaataaacagccaaggccaagtaattgtcaggaataatatttcagaaggtaaatacagtcatgcatcattaggctcttccatcattgtgcaaacatatatttacaaaaacctaaatggtagaacccacggcacacctaggctataaggtgtagcctgttactcctaggctacaaacctctacagcatggtaccatagtgagtactaaaggcagtgtaagacaatggtaagtatttatgtatctaaacatacctaaggcatagtaaatgtatagtaaaaatactgtataaaaggtaaaaaaaaatggagctgtgtgcagtggctca

SEQ ID NO: 104713 - DNA, 234 bp, Homo sapiens
tctgtctcaggatgcaggcagggctggtgcaggcttctccatactcccttccacttggcaccagcaggcatcgagcaaccagggatcttaaactggcctctccaaatactccattgaacaggactgcaggctgcacccaggctaatgggagattggtgtgttgatgatacagtgtttaagatgagattgcagtgagttcctccttaatcccagaagggcaccatgatgagccag

SEQ ID NO: 104714 - DNA, 617 bp, Homo sapiens
attttgtttattataaaggcatactgacttgggttaacattgcctcaaactgaaagacatgaagataaaggacaaagagagatgtctttcttctaagaaacatctcttgctggctccccaagcaagacccgggagtgtggggtttacagttgccgtggtctcaggtctagtactgagcttcatggggccccaaaacttgattttgtcagatttgatgaaggattagttttttagtaaccaaccaactaggaccagatgccaatttattcatttataatgaagcataaaacttccaggtagaccagatgccagaggtgactactcgaccgacctattctctctccagtagcaatgtccagattagagcagaagattgcttgaaagtcgtgaaattaaaactaggtagggaggagaggtgttgagaattttttagtgaccttgatcaagatatgcacattgtccattctgtcagtcatgtttgtgaaatatcttctagagtggatcacatctgtagacaaattaacctcattcatgtattcattcttagtagctttgctctcactttagctcaggttttgggggtacctgtattgcaaatctggcataatgaattgtgc

SEQ ID NO: 104715 - DNA, 229 bp, Homo sapiens
tatacgtatatatgtatatatacacgtatatatgtatatatgtatatatacacgtatatatgtatatatacacgtatatacgtatatatacgtgtatatatatgtatatatgtatatctgtgtgtgtgtatgtatatacatatatatgtatatacatatatacgtatatatgtatactgcaaagctacagtaaccaaaacagcgtgtattggtattaaaacagacacaa

SEQ ID NO: 104716 - DNA, 284 bp, Homo sapiens
aaggcccattgctgcaagacacaggtgactctgtgggtgacttggcctgaggttttaccattgacctggctgaaacattcttaaaactacacagtgcactgagactctgtctcccctaccctctttccctctcctttaccgggagggctgagagctgcatcatagtctgatgcttctccttacttcttccctgcattccgccatcctctcacaagcattttccccagtaaatctcttctacagctaatccaaccttagcttctgcttcttggaggatctgaact

SEQ ID NO: 104717 - DNA, 360 bp, Homo sapiens
ataaaaaggtgttgcccttatagaaccacactaacttccctcccatctttaacccctggcaaccaccagtctgtcctctgtttctaaaactgtcattccaaaatgttacataaatgaaatcatataggatgtactcttttgagactggcttttttcactccacataagtccctggagattcttccaaggtgttgctcatttcatgtttgtgtctttattgctgagtggtactcatggtatgtatggatgcgccacagtttgatgaaccgttcacctgtggaaggatatctggacagctatcagtatgtggtgccaccttatcacagggccctggtggctgaggccacccaccctccaacc

SEQ ID NO: 104718 - DNA, 417 bp, Homo sapiens
tgtcactgcaaactgaggctcaggtggccagtgacttgcccaagtccacaaggctgtgggaggtggagcagggattcaagggaggccctgaggccacccagcctgggtgggtctcaaaagcaattttcttctcttccctcctccacccattcatagtggaaagcaagcctgcaccccaggagctcccattcataccctctctgtcccctctctgttcttcctcctcccgcctgccccatgcacctcccaccctgaagttccctgccacccctcgccctgtgccagcttgtctctgcaggctctcagtcctgggggctggagaacaggtgctcagtcctctttgctgcccacagaagtctcagaacattcttgccccaccctcccttgggccaaagccctttagggtcccgtcctttc

SEQ ID NO: 104719 - DNA, 552 bp, Homo sapiens
gatttgtgtacatcaagtcctagaaaatacaatattggaccaggtcccgctctaactgataactagaatagctagctttgccttcaagtcctttaatgctacagtaataaatacactagagcaagaagtcttctgtcgtggcgaatgttaggtgcacagcgtaaatttgtggaagctttcgcccctcgctctgtatttaagccatcagacactgagttcagccgacttaaccaattattcagtgtaagactcatttagtgattaatcagtgtcattttaaatagtgagttccctgaatacctgttaagtaggattcacgtcttcgaaaagttttatttgcacgaaggtcataacttcagttgcattatgcaaaatttgcccgtaggtcttttaggatctctgcagggttgggtatgttttcatgtttccttataccccccgtaggaggtagggggcagggccgctgccacagaatgggcactactgaggccaagaatgcttgaccccactagggagaatttttgagagcctgacttgggaggtggaagcagg

SEQ ID NO: 104720 - DNA, 386 bp, Homo sapiens
tcgcgacgtgtatccagttatacctaaaaatgtggtaacactataaagaaaagcaggaaataactgatataaattactttctgggaaaaaaggataaaggaattaacaaggaccacgtaaggagcctctaagataatgacaacagtgtttttatttcttcagctacgtagggggtacaacagttggggtttttttattactatcctttaaaatatgtgtgtggtaaattataatcattatgaacgatctcttttctaaaaagaaaaaatgctgaactgaggttgagaatgtcaagtcgtgaacgtagaattataccccatgtgaactcaattctaacaaacggcctacaaaaaatggagtacacatggtgataacacgttcgcgag

SEQ ID NO: 104721 - DNA, 269 bp, Homo sapiens
ttttctctcccctgtgctagatctcctgtcctcattcttagtaaaacatatctttcattagcttcaggaaaaatgatgtgtaggaggtaatcttttttgagtcttgcatgtctgaaaatgtctttatgctattctcaaatttgactaatagtttacagctaaatatacaattctggactggaaaaaaatttccttcagaattttgagggcattcctcattgttctctagcttctgatattgcttattgtaagtccgcagcctttctgat

SEQ ID NO: 104722 - DNA, 796 bp, Homo sapiens
tttgattgacttgtccccagaacttcaatattgactttgatgccatatttaagaattacaatctagggacacaggccccattggaaataccatcaaacctgtcatttaaaaaaaaagtctcagaaataggtttttgtgactctactattactactaatgatatagccacaccactattgaggttttaatattaatttttggtgtgggagaatggttcagaacatcttagattatagactataaatagtgtgctatgataggctggctttgttgaggttaaacataaaaagaaacatctgattaaagagaaggtcatgcaaatcaacttactttgatccttttccttaacttgccccaaaacgcagccttggagatagaacgttcatctcagccctgttccacggagcattccagctgccgaaagcagggataagataactgcagcttctgtggcaaaagagcaagtgtctgaagggatgattcctaaatactcagtaacctccgaaaaaaactccccctgaaccgtaagcagccagcacatcagaacttactggaatagttctcttaggttacataacatcgattcgattatgctaccggagccatgcattaaattttaacttgtcacagatacattacattaacacttcacaaatccacagagtaccaggtagctttggggtgttggtaattgtgtaggacttgctgcaatccaggcaaaaatacttacttgtacattttgtttcttctgtactatagtttaactcttttcaggggtgcaaacatcctgcaaata

SEQ ID NO: 104723 - DNA, 225 bp, Homo sapiens
cagaggctgggccaggacagcctcacgcctgagcaggtggcctggcgcaagctgcaggaggagtactacgaagagaaacggcggaaagaggaacagattgggctgcatgggagccgtcctctgcaggacatgatgggcatggggggcatgatggtgagggggcccccgcctccttaccacagcaagcctggggatcagtggccacctgggaggtggtgcgcagct

SEQ ID NO: 104724 - DNA, 454 bp, Homo sapiens
tgagacacagtctcactctgtagcccaagctggagtgcagtggtgcaatctcagctcattgcaacctccacctccggggctcaagcgatttttgtgcctcagcctcctgagtagctgggaccacaggtgtgcgccaccacgcccagctaattttttgtattttagtagagacggggatttgccatgtaacccagggtggtctcgaactcctgagctcaggagatccacctgcctcagcctcctaaagtgttgggattacaggcatgaaccattgcgcccagccagaaaatttttctagagcaggtctatcttctctccattctagaactctctcttatcctccaaatgagccaagattctttcagttcttcaactttcttcagcctcaacctctccccaacctcttgattccttaaagggctgttattttcggaatcaaaagaaaaccaaaccc

SEQ ID NO: 104725 - DNA, 448 bp, Homo sapiens
gaaaaatacaaaacattagctgggtgtgatggtgcgcacttgtagttccagctacttgggggagctgaggcgggaggattgcttgagcccagagaggtcaaggctagagtgagccgagatcgtactgctacattccaacccgggtaacaaagtaagaccttgtctcaaataaaaaaaagaaaaaaacaatttgcggtaaaccgtttgtcagtgaccacttctgccaccaggagtagaactgcctgtgtcttcctgcctccacgaccctctcactggagctactggtcggcttgctgcctgtttccctgttttagggtccttcccacctcttaagggaggagtccgaaggagtctacccatgggcctgcttgctctttctcccactgctggctgacctcatccacgccagtttcttcaaccactcctcatacattcattgtgcccagat

SEQ ID NO: 104726 - DNA, 266 bp, Homo sapiens
gacaggagaatcgcttgaacccgggaagtggaggttgcagtaaaccaagattgcaccattgcactctagcctgggcaacaagaatgagactccgtctcaaaaaaaaaaaaaagagagagagattttctctatataaaataatgcatgtgtatttcctttatttttactctttttttttaaagtacaaatgatagcactcattaaatactattatgtatcttttctttctcaaagatatatcttggagaccattattttattccata

SEQ ID NO: 104727 - DNA, 378 bp, Homo sapiens
attttctaccacaaccaaaggttctgatttactttcagagaaaaccctcctaggctgggcatgatggctgacaccagtaataccaggtctttggcagcccaaggcagacgggatcatttgaagccaggagtttgagaccagcctgtgcaacacagcaagacacctcccccctaccctcacccaccccactcgtctctacaaaaaataaaaattagcctggtgtggtgacatgtgcttgtaatcccacctactcaggaggtgaggcaggaggatctcttgaacccaggagtttgaggctgcagtgagctatgcttacaccactgcaccaccactctgtctgggtgacagagcaggactgtgccccttgggaaaaaaaaa

SEQ ID NO: 104728 - DNA, 627 bp, Homo sapiens
gggttcacctacattatggaggacagtctgctttactcaaagtccatcaatgtaaatgttagtgtcatctaaaagtactctcacagaaagacccataataatgtttacccaaatatctgggcacactgtggttcatccaagatgacacataaaattaaccatcatggacatcttaatttgaggcagccagtgtgtctgcactctaggggaagggtcggcaaactacagtccacaggacaaatctgttttgtaagtaaaggtttgggaattcagccacacttgttcatgtacatattgtctatggctgcttttgcagtaccatgccaaaactgagtgttctaatgagaccatatggcgtacaaaaccgaaatttgactctgtctgtacagaatggctgatccctgttttaggcagttatgtgcccagctaaatactgggattatttagagagagagaaaggaaatggtggtaggcagatagcaatcttgatccacagcagcataaaggacttgctgctgagatcttctaagaaatctcccagccattcagcagcaatttttttgtgcaatctatgagatactgaaggaattacaaagaagtacaagccatttcccccaatctcaggaa

SEQ ID NO: 104729 - DNA, 320 bp, Homo sapiens
tctaacatagatctatgatcgaattctgtcaatttcctctcaagagggtgagacgattgaattggataaacctgtcatggcagagggcaatgtggaagtttggcttaattctcttttggaagaatctcagtcctcattgcatcttgtgattcgccaggcagccgcaaatattcaagaaacaggtttccaactaactgaatttctttcatccttccctgctcaggtcagtgtattgaaatttgaaagtatgttttgtaaaatagtcattttaagtctcagacattacctattgtaagcttcaaaaatggctataatttaac

SEQ ID NO: 104730 - DNA, 394 bp, Homo sapiens
taatataaagaaaagtggtttatttggttcatggttctgtacatttgttcaaagtctcaccgtacccactcttacttgtcccctgcctcgggggttatctgagcctttcagaaatgcagcagcggtcatcagaaactttgagaatttgcccagagcacttgaaggtgtttccagacctgggaggtttctggtcacagccaagggtgagcagcagggtggggaagggaatctcatcccccagaggcagacagagctcagcctgaagaccctggcccagcacttccctgctggggatgaccccgggcaagttagcaggctccctgtgcttcagttttctcttctgtaaaatggggacactagttcctgtatcatagggttgctgtactaatcaagt

SEQ ID NO: 104731 - DNA, 690 bp, Homo sapiens
gatgtgctgtgagcatttgtctttcagctcttcttcagcatggaaatatttaaaccacaggctcttctctgccaccacggatgtgctagctttcaggagcagattaagatttgggtgactggggccgggcgcggtggctcgcgcctgtaatcccagcactttgggaggctgaggcgggcagatcaccaagtcaggagatgaaggctaacacggtgaaaccccgtctctactaaaaatacaaaaaaattagccaggcgtggtgggcggctttgtcccagctactcaggaggctgaggcaggagaatggcgtgaacccaggagacggaggttgcagtgagctgagatcatgccactgcactccagcctgggcgacagagtgagactccgtctcaaaaaaaaaaaaaaaaaaaaaagatttgggtgactggcccagtacctgaaaacatacattcccatggttttcagacttctttccgagcagggccctttcttcaaataaaatctcacatgacacccaaacagacatagcagatcccaggagagctgcccagaggaaacccagagttgtgttcactcagtccccagcccccagcagccttgaaagcccaaaagctggccagccgcggtggctcacgcctgtaatctcagcacttttgggaggccaaggtgggcggatcaccggaggtcagg

SEQ ID NO: 104732 - DNA, 182 bp, Homo sapiens
aggcagaaccattcctgtggtagttgcctctgcactaccttatttaaaactgacaatagcccatcaaggtaattatcacaggcctgttctcaggcaaggaaactgagacctagagtcattacagagaatagctaaggccccatgactgcaggaggcaggagaaggatttgactttaagttca

SEQ ID NO: 104733 - DNA, 333 bp, Homo sapiens
gtcaagtgaaaaatagagataaaaagtaaagtaatttgagtcaaaaatctctttgcttctagcatcaaaacagttcaggcaaaaatcttttattttttttcatgtatttttcctttgcaaacatcagggcatcataaagggatatcttcaaactgaattgataccacttagtattaaactcaaaacagttgtaagtaaaatattaatattttattggatctctcataactcactcatcactaccgtggtgtgctatgtttacattaaaaggagaatctaacacttggcggcggggagggggcaaactagctatgtgctataaactgccgcaag

SEQ ID NO: 104734 - DNA, 297 bp, Homo sapiens
cagtcaaaaacttcaatactttttctaaataatttataaaacaagtagacagtaaggaaatagaatagaataatactaactgacttgacctaagtgttgttaatggaatatgataccatgaacagaatacataatattttcaaatgaaagtgaaaaaatttaccaagacatatcacattacaggccatcaaacagacctacaaattaaaaatattagaaatgatgtgaattatttttttaaaacaaaattaaacataattagtaacaaaatctgcaaattttcaaaatatttataat

SEQ ID NO: 104735 - DNA, 337 bp, Homo sapiens
tctgagacccctgcagccacctcagggcagcgggctcaggatgccaggcccaaggctcagcgtgggcatgtgaagtgttttggggacagaagggcgcgcccaggggaggacctgcttccgcaggaggaacagagcagcatatggtttgggcagctggtcttcagaagctcgcggcttcgggagtgaaaattacctgacggggccccggcctagctctcctcctggcaccccagtgctggccatggacacagccattccctgcccacgcagcctgcccagtggtgccccagctttgcagctgccaaggagaaaggcagctttgttgacctcagggcct

SEQ ID NO: 104736 - DNA, 422 bp, Homo sapiens
ggagctgttggaaatttaaggtttgcttcaagtggttctggaaattaattggtctttgttctctactcacgattttaggggttaaagttgagactcgagattaaaatatgggttataagcatgagtgtgatcgcttctgaatagctagacgtttttaagttgtataaagaatgagtttcagccaggcgcggtggctcaggcctgttatcccagcactttgggaggccgaagcgggcggatcacgaggtcaggagatcgagaccatcctggctaacacggtgagaccccgtctctgctaaaaatacaaaacattagccgggcgtggtggcgggcgcctgcagtcccagctgctcgggaggctgaggcaggagaatggcgtgaacccgggaggcggagcttgcagtgagccgagatcgcgccac

SEQ ID NO: 104737 - DNA, 964 bp, Homo sapiens
gaagagggccgtcctctggagccgagagagtctggttgaagccccaggtctgtggtcgtttgttagggctgcgggagctgagactccccgggggctccagggcctcatcattcgccaggggttttgaggcagcttctcctgaaatccggagtttctggggaaggacagcagcagtgggcatctggttcacccagatccgtcagccaccgtctgcctgggctcacagtgtgagtggagcacagaaagcagcgtcttcagggagcttcctgtccactgctgttcagcccccaggttctggagagccgggctttgcgggctcagctctgacccccgtttgtggtggctgagggaacagatctgggggcagacgtggtgtgaacacccagacgtctgtattttcctttcaatcatggcctcagataggccgcaaaaaacacggagccataaatgcagatcactaagggaaagaaaatgctacacactgtgattccaaccctagggggttctggaaaaggcaacaccgtgaggaccaaaaacatcaagagagtgcaggggctaggaaggcacaggcggagcacaggaggtctccggggcatgggctcctctgcatggccccacagtggtgaatccacactgtcacgtgcctgtccacacccacgggactgacggtgccctgggcgagctgggcgggaactctgggcgtggggcgacgacaagggcaggcccagcagctgtgagcagcgtgtcctgtggtgggggaggctgggcagggcaggacgggcaaggcaggggcatggggacttggctgcaccttctgctcattttgctgggagcctaaaactgccctgatatatgcctacttaagaaaatggcttcaggccgggcgcggtagctcacgcctgtaatcccagagctttggagaggctgaggcaggtggatcacctgaggtcaggagttcaagacc

SEQ ID NO: 104738 - DNA, 730 bp, Homo sapiens
gagctactggtgatttttatctatttgcacaaatcttggtttcactgccctcatgtattttattactgaatacattatctgataatcagagttaggaacttcagttttattgtgaatacaattaaatttacagcagaacagtaatttacagacagaagttatctctaaattaaaaattataatctcataacttataatttgtcagtattcacataaaattttcaacatataagtacatgtattttggcataaataaacataattttatagtttataatttctgcatataaatttttctctgtctctattttatttaattataagtgagttttcttcctgtacttgttttcatactttttagagaagttaaaattattagttgataatattttacgactttaataagatgagaaaaatctaattttgaattcatactttttgccccaaatttcattatactaaaaactaataaaaaatgtaaaacaacagtgcttggtgatttaacatccaaacctaacatataagtaattaaccttttaaaaagatttagtctcctttacatatctattcatttatgagcctcaattcttgaaatttatattttttaagtgataaatactttaaaatagttttctttgatgaccaaaagttttaaccctaatcagatttcaaatactaatttagcctccattgtgtggtttggtggcaagaaggaaatatattttttctc

SEQ ID NO: 104739 - DNA, 225 bp, Homo sapiens
gggtcaggccagctacatgctcagcctctgagcctcagctctcagctctcatccagtgagggggcgtggtgctctcagccaagagctgccccgggtgaggagggctgggggtgtcgggggcaggccaggcggcgctcatctctctgtctcccctcactgctgctgctgcaggatctgtgtgaggtagggtcccgagtcctcccctgccctcccctccctgcaccc

SEQ ID NO: 104740 - DNA, 383 bp, Homo sapiens
ccaagggatgttttcaggctctgcaagtgagcccagtgtgctgccagggctgagaaccacagggcaagaaggctgagagaacgggagaaagctggggctcaaagctgcacttcccaagatatccctatgtccacagagtggtcattccttgagatagtcctaaaatagtttttgggaaatgatagatgctatatcatttcccattatatgatatcacatatatcacatgctatatctctttgagggtccttccacagagtattgtcttttaattcattacactgagatttgaacttgcccagcttgtttgaatacggtatcctttattcagtatttccctaatgccatcctattattgatccaagatacgtatgatgggaaac

SEQ ID NO: 104741 - DNA, 392 bp, Homo sapiens
gtaatgttacattttttcaattcaattgagaaaatacttattgagtgccaagaatttgcacagcattttgcaatgaatgattggtgatgccaaaatgatgagagatgttctctgctaatttatggagcagataattatttccccaaaaccccaaaatttataagacaaattctgaaatgcacagtaattatttatttctacatttgctaaattcatgctatatgaaaggcattttgaaaagcaatgatcatattagacaaaaagacccaggccttatctttaaatatcacataatcaaaatttagacacacaaagaagcacggaattagagactataacaattgctataaagaacataggcacatatacagtgtgcctctgagccatatata

SEQ ID NO: 104742 - DNA, 211 bp, Homo sapiens
acttttcacccaatttcaccttcccccatactcccatataattatgtttcaattttggttaaaccaatatgagatgattgcattgttgctgaacaagaggtacaatattacgttctctttttgtatacaaagactattaatttagagacctagagctttcagatcttggaggggttcttctatctcaataactacccaacccccattttct

SEQ ID NO: 104743 - DNA, 367 bp, Homo sapiens
aaggaacccaccgggtacaagacatgctccgtacctcaccgtccagttgcccatctccagagcccacagcacccttccaccctgagcactgtgggatggagtctggtatcctaagagggccccaggtacatggctggctggccaggcccaccttatttggatctgattctgatccataaggcacccttctcagaactctataaagataaagcacctttgcagagaggctttactattgccacaactgagactacaggagagggaaagtcagccagacccaaaagctggccttaaaaggcccagctccccaaaggccaaagccccacacagctacacagagcccagccccaggtggccagcagaggcc

SEQ ID NO: 104744 - DNA, 533 bp, Homo sapiens
gatagccagtctgtgaggcactggcatgaaggactaacaggttttctgtgtgccgtctttcccctgacagtcacacccttcttaatttggcattttatcttttgtgcttcaacacatagaacagctatgttttctcaggaaatacttgctgtttctgaaatgtctccacttttctttgatacaaatgtcataaacgcatatactgaaacagatgaaattgcgacggatcaccctgtttcttcacctgaatttagaattcgaggagacctaggaattatgttcaatcacgccatttcacaatgaagaaattaaggtccactggagctaagatattaccaagggtcaccctgctaggaatcagaaaagccgaggtttagaacagatttcactaatcagaatcgtccctttgaaaagtccatgttccattgtaaaattcacttagcgttttggcgttttgtcatgtttacacattacagctttcctagttataaaaaatatcagtaatttttttttttttttgagatggagtctca

SEQ ID NO: 104745 - DNA, 374 bp, Homo sapiens
gcatctaatttatgtttcagttgctttattggctccctgtaaagcaaaatattgacaataaaattgctatttttgtcttaccagctaccacatggtctttgttcctctgtctttaatggttgcatgctcttctcttccaaatgcctccctgttcccttgacagaaagccacggcaatggtggttccagaataatgtctgtaatctttaccagcaaactgtctatcctgctgaccctgtggaaaactaggaacatattgaatatatcacagaacaaattaagggtgtgaggtttaatgcagccaaggaagtgatcataatgccacatgtctgggaactttgagtgattcttagagcttcagcttatagagttact

SEQ ID NO: 104746 - DNA, 271 bp, Homo sapiens
tatctctatcaaatatgtgaaaacaaaagtggtctccttgatttccatgtaattatggttcagggtatgtcagaaaaactcaaaaacagattagaaagtactttcaaaggctatgggaggatttaaacgattactattggtatccaagaccctcaggttagcctcccaggaatcatggtgttcagaggttgtattttgggaatactcatgagcagatatgcaagagattatacaatgctggcaatgtagcatggcttaaatgtaatgttcc

SEQ ID NO: 104747 - DNA, 187 bp, Homo sapiens
ttactctgggatgcctagaacttataaaaaccaagacagggatctaactccaagtaaaaaatatttacctctttattgttttataccagtaaagtttgattcaatatgtagtcatctggaaaactagaacaatcttttcttatacaaattaacttcctccctcttcattgtgacatagcatgaaggc

SEQ ID NO: 104748 - DNA, 345 bp, Homo sapiens
ctgccccagcttcccaagtagctgctgggttataggttcatactaccgcagctggtgggatttctcttaagttagaggggctgggctgtagctgcattattttgagggtcatcccaaggcccaccttcctgtctagtgagggctccagaacacaagttcactctcagagtctgtcgggagccgcgggggggaatagtgctgggcattttgtccccagtgcaggaataagggtgccagccagtccagagtgggatcctgaggcagctgaagggatttgcgtaacctttcaagtcattgagcttggccatctcaccctcccacctctactgggcccaggccccagtg

SEQ ID NO: 104749 - DNA, 495 bp, Homo sapiens
ggaaggggagagggaggggactatattttttaaaaagaatgaagaatctagtgttttggatttggaaaataagttcatatttcataaataatatgatcagttgtctaaatcaaaatagtcatgcttgggaaaatgttcataattagcttaagtggggaaaaatacaacatacattctatcatctcaatctctgtgtacatgtgtcggaaggaaatagatcaaaatgataatagcttctgtcacccactgggctgtaggattttgaatggaatgatttttatgttcttttttatatctttcaactttttaaaagcacacatattttataattaaagaagtactttaaaaaaataaaatagggtaggcgcagtggccattcctgtaatcccagcactttgggaggctgaggtggctggatcacttgaggctgggagttggagaccagcctggccaacatggtgaaactctgtgtctactaaaaatacaaaaattagc

SEQ ID NO: 104750 - DNA, 375 bp, Homo sapiens
actgttccttccctgcatctatcctcaacagacctgccagagattgattcaaatcacatcactcctctgtttgtaagtttcatcatgtcactctgcccagaatcccccagtggcttcctatctctcactcacagttcatgccaaggtctttacaatgatcttctgggccctatatgacctgacctgtctgtacccagctcccaccatcctttcctgccatcatcctttccctccttcattctgctccagccacgctgacctctctgctgttcctcagacctaccaggaactattcccacctcagggcctttggacttgctgttccttcagctgatattcttctcctagacatcctcacttccttcaagtcctccc

SEQ ID NO: 104751 - DNA, 539 bp, Homo sapiens
aacaggaaatgggattgcaaacctagtagctgcgcgtgccggctattcaggactagcgcaggactctgggcgacctcacatcccactcgtgctgctgccccgggcactcgcctcccgcgaaaagtcgtgggaccacgtcgaatatggggagtatcctttcctgtttgaaaagctgctcttagggcatagggaaaggtggggagggcagaggttgggaccctgggaggtgcctggtagtgacctttttggtctagctgtggagggctgagagcgctggcaccgattggtgggctccagcagcttggttttagtttttctgttttttgtttttttttttcctgggactcgctgccatcctagaatcaggggaggtgggactgctttaaagaatggtcaggggagtcgccgcactggtttgagatttagagcgcgagccctcccactctgagagcttctgtcacctgtcctttagtgaattcgtcctctttgaaattgttgggaaactgtgcgagaacagaggcaaggcaacaggagtttgc

SEQ ID NO: 104752 - DNA, 405 bp, Homo sapiens
gtcgacttttaaaagcagtgctgcaaagaatatatatgcatgtatcagaaaatttttgtaaatgttgatttttttttaatgtaatgggagttgaatctagaaaggactaaataattatcagtaaagtataaatcaaacaattattattgtaaggtacccatgtgttcaataagaatcaacatttacggctgggtgtggtggctcacgcctgtaaccccaacaccttgggaggctgaggcggatggatcacttgaggtcaggagttcgagaccagcctgaccaacatggagaaaccccatctctactaaaatacaaaattagccaggcgtggtggcgcatgcctgtaatcccagctactcaagaggctgaggcaggagactcgcttgaacccaggaggtggaggtt

SEQ ID NO: 104753 - DNA, 339 bp, Homo sapiens
gagagaggtacgtagttgttatttgaggctaggttttcgaagtgggacatagcgtgttccgaacaaaccgacgtttggcatcactgattgctgtctggagcagtgcttcgcaaaagtttggcacaattaccggtgctggtccttgaagaaacaaatatggaaattgaaagcgtttaaaaccttttgaaagcaatataacaataattttatacctgttaaatgtaataaattggggcctgcattttgtatgtttcttttattccatatttctctaaggattcatttttattgttttatgaaactaccagtctgtgacatggaaggtagaggaaaaagatt

SEQ ID NO: 104754 - DNA, 559 bp, Homo sapiens
tgagacagagtctcactctgttgcccaggctggagtgcagtggtgtgatctcagctcactggaaactctgcctcccgggttcaaacgattctcctgcctcagcctcctgagttgctgggactacaggtgtgcactaccatgcctggctaatttttgtatttttagtagagacggggtttccccatgttggccaggctggtctcaaattcctgacctcaagtgatccacccgcctcggcctcccaaagtaccgggattataggcaggagccaccgcacccagccgagcatctttcactaatcttggtataaaaggctaattatgctgttaagatgtagctaatttaagatttaaataacttttaagtctgatatgttttcttttaaaagcaatatgggagcatcagtggaaagttgaggatagtggtttccaacctggattcccaatccacatttgggggcccctgaaggaaatactaggcaataataatgaagatctgaaaagttattgctaagtatcaaaatgaagattcacaactacatcttactaagctcacatac

SEQ ID NO: 104755 - DNA, 390 bp, Homo sapiens
aattcctgatcccatctaaatcatgttaatacctgtcataaacagataactaacagattaataagcagcttatatacaggcttagctacaaatcattccatataatattttacacaaactgttttttcctagttttgtgttgaagtgaatgaagctctagaaagccaaaggacagaaggagccaggacctctgagtcatttggaggagtgctaccctagaaagccacccctatcatgttaaaccacaaatttgggacttgtttgctatagtagatagtgctaattctatgtaatatactctcgtttttacttctcatagcatttattgttctctaccataaataattattcgcgtaaatatattttttcattttagtctattagttgctt

SEQ ID NO: 104756 - DNA, 358 bp, Homo sapiens
cctgtgccacagtgcaggaagaaaaggaacagagagatcacgggcatgtttttttaggtggtttcatgccatcttattttctccttgaaatacattcacattttgtgttgaagtgaatgaagctctagaaagccaaaggacagaaggagccaggacctctgagtcatttggaggagtgctaccctagaaagccacccctatcatgttaaaccacaaatttgggacttgtttgctatagtagatagtgctaattctatgtaatatactctcgtttttacttctcatagcatttattgttctctaccataaataattattcgcgtaaatatattttttcattttagtctattagttgctt

SEQ ID NO: 104757 - DNA, 530 bp, Homo sapiens
ttttttttgagacagagtgtcactctgtcacccaggccggagtgcaactggcataatcttggctcactgcaacctccccacctctcaggctcaagtgatcctcccacctcagcctccagagtagctgggactacaggtgtgtgccatcacgcccagcaaatgttttgtatttttggtagagatgaggtttcgtcatgttgcccaggatggtctctaactcctgagctcagatgatctacctgccttggctttccaaagtgctgggattacaggggtgagccaccatgcctggcctaatgctaattagagagatggttagcataaggtttttattactagtactgtttttgtggactgatatcaatgaataaagtaatggattaaaaattaaaatatgttaccagatcattttaacattattactcctgtgataaaagttaatattttattgggccatattttataacttactatgcatactcaatgtagaaagaaaacaaaatcaaaatcacctttaatcccacatgaaa

SEQ ID NO: 104758 - DNA, 262 bp, Homo sapiens
gtttgactttttcattataaccattctattgggtgaaaaatgatattaaatctgttgttttaatttgcatttccctgatgactaattaagttgaacatctttgcatgtgcatattggccattcatatatcttctttggataaacattgcaagagcacatcttaagttattgtgtacttctatcagggggcacatagtgtatgcttgtctcattttattgggatatcagccattggtataatagattcataataataataata

SEQ ID NO: 104759 - DNA, 501 bp, Homo sapiens
gaatgtgaccctgtctcttaaaaaataaaaataaaaagatatgaatagtgaccatttcaggatggtagggtagactatgaagaattaatttcctctctacttttgtgtatttcctaattttaaaaattagcatacattttatttcttaaagccttattttttaaattaaaaagcatgaagggagggagggtgagaagagatcttctgatttgccagccaggtactccttctccagccccctccccgcaatccagccatcttattgtcctgtggcaggtggcctgtcccccagaggggacagtgggttaagtgcatgaacatacctgagagtttgctgcccctgtgaggtgagtcctgcctgacactgagccattgctgtgtctatgggcttttgcctgcaaaatcaaagtgctctgcctggggaggggcagtggtcacagggctaaggatcaggcaacacctctaccaccaggaccattgcctgccatcctgggttttacc

SEQ ID NO: 104760 - DNA, 223 bp, Homo sapiens
gtacaactaagagggttgcattttattggtgtaaattttacctcaaaaaatctgacctaaaataaaacagaaaaagtatgatttccacaaaagatgcaatttgagaacacaactgttcctttttttctatgtaccctactaaaggtgctcatccaggattctgtctttggcattaacttcacgttattagactctcctgtgccactgtatggtatctactccc

SEQ ID NO: 104761 - DNA, 331 bp, Homo sapiens
catcctacccagcagttgaaactactgcagcgaaactgcaaggaaacctaacccatgttttcttgtaatgctaccctttgggggtcatgcatgctgctttctgctccaacagtcttaacgtgggaattggggacacttactttttgacctggaacaaatctctaagactcgtaagccaccaattgattcaccttttgtagcagggcttgtatgacaaactcttttgtgagaacaaaaggaaagtcccttccctttttgccattcttgttctgtagattaattagcaaagacgtagtggagaaatgtgtcacttgcaagacatttctggcac

SEQ ID NO: 104762 - DNA, 279 bp, Homo sapiens
aaatgcaaaacaatgaaactcatagaaaataacataggaaaaaatctcagtaatcttggatattgtgatgactttttagttacagcaccaaaggcactatctgtgaaagaaatccctgattagctggacttcattaaaattgtaaacttccactctgtgaaagacaatgtcaagagaatgagaatacaaaccacaggttgagaaaaatacagatggtgctgacttaaaacggttcaacttacgatttttcaactttacgacagtgcaaaagtgatactc

SEQ ID NO: 104763 - DNA, 681 bp, Homo sapiens
ttgattatagcaactacatgaggacatatatttaacagtgaaatgaagatactttatttcaggggaaaaatgacttttaagaggctctaattttttttcttggctttgcacagacaaaatcaccacattttgctcaaccctaattttgtcatttataaaatgaaacgtttagcctaaataatctctcaggtctctttccaactcgtaccatgaatctgagagacctggaaaggaagtgggacaacatttctgttgtgaagaaggcaaggctggtgatgtgggcgtgaaggttaaagatgctggcccctcatgacattggcgaacgtggcccttcttccacctgctcagccagaaacgctactgagtgcagacgtttgtatactaagaggtatttgggtgcatacgatttaatccttagcctgatgagcttataagtgtgaagagaagcaagactgttcacaaattgctaaaacaaaatatgatgctacatttacccaacaaacctaagattctgtgtacaaaacattgcagtagtatcactggaattgtgtgtgggctgctgtgagttcagcgtcctctcagagcaccgtggttccaagtggacggaccttaaagggttccataatcaggacaggttgaaagaatagtgaatgccacacaaatgcccccacacccttgacc

SEQ ID NO: 104764 - DNA, 728 bp, Homo sapiens
gtataggtatgtggttggcagggacatgaaggatgctgaagaaaggagagcctgggctgggcatgatggctcatgcctgtaataccagcacttagggaggctgaggtgggtggatcacttgaggtcaggagttcaagaccagcctggccaacatggtgaaaccctgcctctactaaaaatagaaaaagctactaaaaatagaaaaggaaaaattagccaggtgtggtggtgcactcctgtaatcctaactactcaggaggctgaggtgggaggattgcttaaacctaggagggagaggttgcagtgagccaagatcgcaccactgtactctccagcctaggcgacagagtgagatttcatcgataaataaataaataaaaatacaaaaattagatgggcatagtggcatgcatctgtaatcccagctactcgggaggctgaggcagaagaatcacttgaacccgattaaagggaggcagaggttgcagtgagccaagatcgtgccactgcactccagcccgggtgacagagcaagactgtctcgcaaaataaaaatacaaaagaaaggagagcctggagccggagagaaagctgggaggtggttgtggtattccttgacacaaagagatgaggattttggttagaggaatggctgtgaaaatggtgagaaaatgtgaatactataggcaattcagaggaataaatgagagaccatcatcctttttttt

SEQ ID NO: 104765 - DNA, 223 bp, Homo sapiens
cagtaaagttgctcttcggcaagctttacatgtggtcagaggtggcttgtattggtcattctttcatgcccgtgtactatcaggctgtttctggtccgcctgctactgctcattccagggtgattttttacctcctccaggctacagatcaattcttcctttaggttttctttgtgtcagaatatgcctttaactcgctctttcagaagatatcataggatgg

SEQ ID NO: 104766 - DNA, 815 bp, Homo sapiens
tttataggtgttttgaaatacacaatacattgctgttaacaatagttactctactctgctattaaacattataaattattccttcttggccatatgtggtggcttacacctgtaatcccagcacttgaggaggctacagtgggaggatagcttgaggccaggaatttgagacaagcctggacgacatagccagaatccatatctacaaaaaaattcctctcatgaactgtgtatttgtatacatcaatcaacctctctttatcccctcaccacctttacactgaagtatatcattctactctctacatccatgagaccaagtttttagcttccacatatgagtgagaacatgaggtatttgtctgatggtgcctggtttatttcacttagcataatgacctccagttccatccatattgcagcaaatgacatgatttaattctttgttatgaccaaacagtattcaaataggtatatataccacattttttttatccattcatctattgatggacacttagcttaattccatatcttgaatattatgaatagtgctgcaataaaaatgggagtgtaggtatccctttgacatatactaatttatttgcctttgaataaatacatagtagagggattgctggattatatggtagttttatttttggtgttttgtaaatctccatactgtttaccatagtggctgtactaatttacatttccgctgacggtgtataagagttcccttttctccatattgtcaccaacagctgttaatttttctctttttaatctagccattctgaggttagatgtta

SEQ ID NO: 104767 - DNA, 550 bp, Homo sapiens
  misc_feature (465)..(465): n is a, c, g, or t
gtaaaaactgaagttgaaaaaaatgtattcatgctaatagcacaggaatgatccacaattggattccaaggcttcttgtacattcagcatagggtgtatgaaagagtccactattctagcaacagataaaattcctactgacacgcaacctcaggttcccactcgtttagaaggctgcgtatggtcttctacttaaagcctcaagtagcagtcatggcagtgacaaatcctcattgcctccatagaacctctaggctcatgtgtgagcccaggctgggctggggcccctgggagcccagggtgaggggccagtccctgggcagctccgtgagccaggagcagctgtgccacctggggaagggctgcacggtcgatgggtcttttctgcagaagagtgtgccccagcccttgctgggcacagatcaaagaggtgttcatgggtcgaaatacaattaaagctgtttnagatagtggggcctgggctagccattaaaattaagggtttttcaagtgaaaaagtttttccccattcccggcttcccacctgggt

SEQ ID NO: 104768 - DNA, 440 bp, Homo sapiens
gaggtttgtagtggtgtttattcttgctccttcctcgtggttcctaaacttttgatttttgtgaaatgaaggaaatatggttataggccccagctgcaggggagacttggttgcccctgggtataagcacctcagtgtggatttccatgtcatcaagcaattttagcagatacatttttttgaagggggctgacagtaattggtttttctttgcaagtgctgataggcaggcagtggtgtcactcttgcccgaattacttagagcacaagcatcatacataaaaaccctttatttatttgtttatttatttatttcaaaccaaaaataaacaattatgaagagcatgtggccaaaatgaaaactcagcttttggtttatttccaatgcctccttgctctccaacatctttatgttgtttatcaaaaccataagttagttc

SEQ ID NO: 104769 - DNA, 312 bp, Homo sapiens
gtcaaagtctatacactgttaggatgggactgtacagttttaatatgagtctttcgggttaggctttaagaaaagaagaagaatctgcttggcttgtgattattgaagccaatgtttttaatgccagaactgattcttctaccacttgtgacttctgtttgaaagttgctattaaggtcttaaggaaaggattttcccacacacatgtttctgaataacctattctggtcaagttcacagtcttgacctgccaccatgtttcatcctacctggtctgggtgcccagagacctggagcatctgagctggcagg

SEQ ID NO: 104770 - DNA, 516 bp, Homo sapiens
tcccattcatgagggctctaccctcatgacctaaccacatcccaaaggccccacctgctaacgctatcacattggtgattagctttcaacacgtgaattttgggggcatagtgggtccacctggatggtccaggataatctccccatctcaaaaaattgaatcacatcttcaaagtcacttttgccatataaggtctaatcttgggttctagggattgggatgtggatatatttggaggttgtatgtgggagaggggctggatggggctaattcctaatctgggcttgactgcatggctggaagaggtggtctggcagactaggaggaaggtctgggagcaaaacatggctcactttgagatgagggggccaagccggcccaccacttgggcagacctgccatcatcaccgactctcgtgggccgctgtcagaattcaggcagatgcgagaccaccagcttctcctgcgatctggctttgggaggcagtggaagacagatctttgaaagcagcacg

SEQ ID NO: 104771 - DNA, 114 bp, Homo sapiens
gtatttgtagaagttaacattctggaacactgacttccaacacagcaagagggacagccacacatgtaaaatacaatgacagagcaggactcacaagtgcattctgctgaaaag

SEQ ID NO: 104772 - DNA, 461 bp, Homo sapiens
tgcatctggctctcagaggtacattacaataggtaccatgtttacattatcgtaagtgaacacgacttttatcctgaaaatttctggctgggcgcagtggctcacacctgtaatcccagcacttggggaggccgaggtttcaccatgttggtcaggatggtcttgatttctgtgtttttatgtttgtctcttcttccaaatatgtctgaggatcttaggataatatgtaaataacaattgatagcaaatacataatggatttgccaaaaatgactatttataatctttattccacttaatgggataaatatttacacagtgattactttgcatcaggcactgttctaactgttttatggatattaacccatatagtcctcataacaagtttatgagttcaactcatttcattacattgtcaattttataggtgatgaaatggaggcacagaaaggttagta

SEQ ID NO: 104773 - DNA, 111 bp, Homo sapiens
tgagattctgtgatgtgagtagaatcaagggcttaaagctgaaggggatctcaagaggttagcgaatgcagtctccttcatcaaatggtgacaatattacacacccatttt

SEQ ID NO: 104774 - DNA, 335 bp, Homo sapiens
aggacttaaagattatctagtcaagaggttgcaaactataggcctttggtgtggctcccacacatgggattttgtttggataacacagtattttaaaggcctttggatttaacatttaaacattgggaaagctcacatgaaacccagatttgtggcttcacttggcagcacggggcccacattcctacatctgacaatctgcaggagctaaatagtggctgttctcttttggaatgacccgtttgcttcagtattgcacagtctctacctgtgcacttcactctttacctctggtgagtgttacaatcccggtctaatccagtctacccatttta

SEQ ID NO: 104775 - DNA, 804 bp, Homo sapiens
atatcgtcgacccacgccgtcgttattagacatgcctttcatgtaagcataaagacaacaaacagttattactgaatatatacattctttgcttttaaattcaaattactctatacttaatataattatcaatatctaaaatataattcttatgtattttatttatatggaaatatgtaagcacaggtattaattataacttcatttttattacattctgattgaacattaccaagtgtttaaactctgttgttcccttatgttttcataataaatattttcattgtttactttccacatagaaacttgttaatttaatacaatttacaacacacctgctggcactttgatcttggacctccctgctgtctgaactgtgagtaatatatctgtatggttaatagattgcttagtttgtgatattttattatagcagtacaaacaaagtaagattactctctattttatttaccagttagcctgtatctgctccccaaattctaatacaaatatttatttcaatgttggaaactttgtcattaatacactatctattcaatatccaattaggtatatccacataattcctttacgtcttctttttgaatatccaagttttcattgggaaggtgtgcttaatctattgaagaaatttaaattttattttctttagagtttgtaataactaattcactccaattttttaaattccttgaaaattattttgtttcatgttacattaaaagtatattttcacttcttattgacttccaacttagccataacccataggaaaccagatat

SEQ ID NO: 104776 - DNA, 3305 bp, Homo sapiens
actgggctcgtgcggggccccgggcgtcgcgatgaacatcgtggtggagttcttcgtggtcactttcaaagtgctctgggcgttcgtgctggccgcggcgcgctggctggtgcggcccaaggagaagagcgtggcgggccaggtgtgcctcatcaccggcgccggcagcggcctgggccgcctcttcgcgctggagttcgcccggcgtcgggcgctgctggtgctgtgggacatcaacacgcaaagcaacgaggagacggctggcatggtgcgccacatctaccgcgacctggaggcggccgacgccgctgcgctgcaagctgggaatggtgaggaagaaattctgccccactgtaacttgcaggtttttacctacacctgtgacgtggggaagagggagaacgtctacctgacggctgaaagagtccgcaaggaggttggcgaagtctcagtcctggtcaataatgctggtgtggtctctgggcatcaccttctggaatgtcctgatgagctcattgagagaaccatgatggtcaattgccatgcacacttctggaccactaaggcttttcttcctacgatgctggagattaatcatggtcatattgtgacagttgcaagttccttgggattgttcagtactgccggagttgaggattactgtgccagtaaatttggagttgtgggttttcatgaatccctgagccatgaactaaaggctgctgaaaaggatggaattaaaacaaccttggtttgcccttatcttgtagacactggcatgttcagaggctgccgaatcaggaaagaaattgagccttttctgccacctctgaagcctgattactgtgtgaagcaggccatgaaggccatcctcactgaccagcccatgatctgcactccccgcctcatgtacatcgtgaccttcatgaagagcatcctaccatttgaagcagttgtgtgcatgtatcggttcctaggagcggacaagtgtatgtacccctttattgctcaaagaaagcaagccacaaacaataatgaagcaaaaaatggaatctaagaatctttttgtatggaatattacttctatcagaagatgatcaagatgtttcagtccagtgcacatcagcattgctgacattttatggattctaaacttgtgttgtttcttttttaaatcaactttttaaaaaaataaagtgtaaattaaccgactagagtacttggaaaatgtgatcagtacaagtgaacttaggttgttgccaacagggtccttttaggcagaacccagaaaccagtcaaatctgtagagaagcagtgtgacatcttcaggttaccattattttttaatgagcaggaagtctagaaatgataactagactgtatgtttcatgtgtgtgatttttcagaattcccagagtttactcattcttgttattaaactctagccagttgacatcttcgcaatttcaaggactgatagtgctgtattttctcacgttttctaagtttccgttttgcaaggcctaggtgactttttcatggtgttgtatgtttagctcttttgaaaaggaattttgaaatctccatcaactgaagtaaatgatgtctgagtgttacagtaaaggtgaccaagtctctttcttaaagtcacaatgactaaagtattagttgaattttttttttttttttttggatggagtctcgctcttgtcaccaggctggagtgcagtagcacaatcacggctcactgcaatctctgcctcccggtttcaaggtgattctgctgtctcagcctcccaagtagctgggactacaggcatgcgccaccacgcccagctaatttttgtatttttagtagagacggggtttcaccatgttggtcaggatggtctccatctcttgacattgtgatccacctgcctcggcctcccaaagtgctgggattacaggcatgagccactgcacccagccttgaatttttaattttatctctgatatacttcattaagtgtctggagacctaattatcctaaaagatcatacattttctacctatgaattttgctgcatacagaaagtgccctttcctcaggaagttgctgtgtttcatttctttggatggactcttatctagaatacatagcagctctgcaaagaaacagtttttaaaaatgggaacttctacattgaaaagtccccatttttgtgccaactatgattagtgagaggaagaaatcttattctatggcatatgtatggaagggtgtaaagattcttttgaaaggtttattcacattgtagaacagcaaatgacatttttacagtatttttttgtaaagcaaactattttgtgccttgaatttggtatatgtgtattagtgaaacattgtaaaggtgaacttctacctctgtatctaaatgtataccatccacttgtaaatgactataaactattatgtgattgcttttttttttagaatgtcttgtttaaatagtggccaatgtttaaggctgttaaaataagccaacttttactaattggggagttttataaatgactgattaaatttaaagaattaacttacatgcaattgtgtgattattagttatcagcagtgttgtaaggaaaattattgtgtttttttttatgatcattatcccactttaggtaaagaaaaatattggaatggaatagtgttgggaaacagacattaacaacctagggtgcctgcactcaaatagccgatgttactgtccctagattagagacttgattaagggcttgtttgtaccaaaagtggggaaacaatgccatgacctgtgttttagtttggctgcaccacagatcaaatctgcactgtgtctacatataggaaaggtcctggtgtgtgctaatgttcccaatgcaggacttgaggaagagctctgttatatgtttccatttctctttatcaaagataaccaaaccttatggcccttataacaatggaggcactggctgcctcttaattttcaatcatggacctaaagaagtactctgaagggtctcaacaatgccaggtggggacagatatactcagagattatccaggtctgcctcccagcgagcctggagtacaccagaccctcctagagaaatctgttataatttaacaacccacttatccaccttaaaactgaggaaagtcgtctttacatctaattttattcttgtgtgttataacttaaacctatttctatttttgtttgttattgcccttataagggtgtccatctccaagttcaataaactaattcatttaact

SEQ ID NO: 104777 - DNA, 3251 bp, Homo sapiens
actgggctcgtgcggggccccgggcgtcgcgatgaacatcgtggtggagttcttcgtggtcactttcaaagtgctctgggcgttcgtgctggccgcggcgcgctggctggtgcggcccaaggagaagagcgtggcgggccaggtgtgcctcatcaccggcgccggcagcggcctgggccgcctcttcgcgctggagttcgcccggcgtcgggcgctgctggtgctgtgggacatcaacacgcaaagcaacgaggagacggctggcatggtgcgccacatctaccgcgacctggaggcggccgacgccgctgcgctgcaagctgggaatggtgaggaagaaattctgccccactgtaacttgcaggtttttacctacacctgtgacgtggggaagagggagaacgtctacctgacggctgaaagagtccgcaaggaggttggcgaagtctcagtcctggtcaataatgctggtgtggtctctgggcatcaccttctggaatgtcctgatgagctcattgagagaaccatgatggtcaattgccatgcacacttctggaccactaaggcttttcttcctacgatgctggagattaatcatggtcatattgtgacagttgcaagttccttgggattgttcagtactgccggagttgaggattactgtgccagtaaatttggagttgtgggttttcatgaatccctgagccatgaactaaaggctgctgaaaaggatggaattaaaacaacgaaagaaattgagccttttctgccacctctgaagcctgattactgtgtgaagcaggccatgaaggccatcctcactgaccagcccatgatctgcactccccgcctcatgtacatcgtgaccttcatgaagagcatcctaccatttgaagcagttgtgtgcatgtatcggttcctaggagcggacaagtgtatgtacccctttattgctcaaagaaagcaagccacaaacaataatgaagcaaaaaatggaatctaagaatctttttgtatggaatattacttctatcagaagatgatcaagatgtttcagtccagtgcacatcagcattgctgacattttatggattctaaacttgtgttgtttcttttttaaatcaactttttaaaaaaataaagtgtaaattaaccgactagagtacttggaaaatgtgatcagtacaagtgaacttaggttgttgccaacagggtccttttaggcagaacccagaaaccagtcaaatctgtagagaagcagtgtgacatcttcaggttaccattattttttaatgagcaggaagtctagaaatgataactagactgtatgtttcatgtgtgtgatttttcagaattcccagagtttactcattcttgttattaaactctagccagttgacatcttcgcaatttcaaggactgatagtgctgtattttctcacgttttctaagtttccgttttgcaaggcctaggtgactttttcatggtgttgtatgtttagctcttttgaaaaggaattttgaaatctccatcaactgaagtaaatgatgtctgagtgttacagtaaaggtgaccaagtctctttcttaaagtcacaatgactaaagtattagttgaattttttttttttttttttggatggagtctcgctcttgtcaccaggctggagtgcagtagcacaatcacggctcactgcaatctctgcctcccggtttcaaggtgattctgctgtctcagcctcccaagtagctgggactacaggcatgcgccaccacgcccagctaatttttgtatttttagtagagacggggtttcaccatgttggtcaggatggtctccatctcttgacattgtgatccacctgcctcggcctcccaaagtgctgggattacaggcatgagccactgcacccagccttgaatttttaattttatctctgatatacttcattaagtgtctggagacctaattatcctaaaagatcatacattttctacctatgaattttgctgcatacagaaagtgccctttcctcaggaagttgctgtgtttcatttctttggatggactcttatctagaatacatagcagctctgcaaagaaacagtttttaaaaatgggaacttctacattgaaaagtccccatttttgtgccaactatgattagtgagaggaagaaatcttattctatggcatatgtatggaagggtgtaaagattcttttgaaaggtttattcacattgtagaacagcaaatgacatttttacagtatttttttgtaaagcaaactattttgtgccttgaatttggtatatgtgtattagtgaaacattgtaaaggtgaacttctacctctgtatctaaatgtataccatccacttgtaaatgactataaactattatgtgattgcttttttttttagaatgtcttgtttaaatagtggccaatgtttaaggctgttaaaataagccaacttttactaattggggagttttataaatgactgattaaatttaaagaattaacttacatgcaattgtgtgattattagttatcagcagtgttgtaaggaaaattattgtgtttttttttatgatcattatcccactttaggtaaagaaaaatattggaatggaatagtgttgggaaacagacattaacaacctagggtgcctgcactcaaatagccgatgttactgtccctagattagagacttgattaagggcttgtttgtaccaaaagtggggaaacaatgccatgacctgtgttttagtttggctgcaccacagatcaaatctgcactgtgtctacatataggaaaggtcctggtgtgtgctaatgttcccaatgcaggacttgaggaagagctctgttatatgtttccatttctctttatcaaagataaccaaaccttatggcccttataacaatggaggcactggctgcctcttaattttcaatcatggacctaaagaagtactctgaagggtctcaacaatgccaggtggggacagatatactcagagattatccaggtctgcctcccagcgagcctggagtacaccagaccctcctagagaaatctgttataatttaacaacccacttatccaccttaaaactgaggaaagtcgtctttacatctaattttattcttgtgtgttataacttaaacctatttctatttttgtttgttattgcccttataagggtgtccatctccaagttcaataaactaattcatttaact

SEQ ID NO: 104778 - DNA, 3171 bp, Homo sapiens
actgggctcgtgcggggccccgggcgtcgcgatgaacatcgtggtggagttcttcgtggtcactttcaaagtgctctgggcgttcgtgctggccgcggcgcgctggctggtgcggcccaaggagaagagcgtggcgggccaggtgtgcctcatcaccggcgccggcagcggcctgggccgcctcttcgcgctggagttcgcccggcgtcgggcgctgctggtgctgtgggacatcaacacgcaaagcaacgaggagacggctggcatggtgcgccacatctaccgcgacctggaggcggccgacgccgctgcgctgcaagctgggaatggtgaggaagaaattctgccccactgtaacttgcaggtttttacctacacctgtgacgtggggaagagggagaacgtctacctgacggctgaaagagtccgcaaggaggttggcgaagtctcagtcctggtcaataatgctggtgtggtctctgggcatcaccttctggaatgtcctgatgagctcattgagagaaccatgatggtcaattgccatgcacacttctggaccactaaggcttttcttcctacgatgctggagattaatcatggtcatattgtgacagttgcaagttccttgggattgttcagtactgccggagttgaggattactgtgccagtaaatttggagttgtgggttttcatgaatccctgagccatgaactaaaggctgctgaaaaggatggaattaaaacaaccttggtttgcccttatcttgtagacactggcatgttcagaggctgccgaatcaggaaagaaattgagccttttctgccacctctgaagcctgattactgtgtgaagcaggccatgaaggccatcctcactgaccagcccatgatctgcactccccgcctcatgtacatcgtgaccttcatgaagagcatcctaccatttgaagcagttgtgtgcatgtatcggttcctaggagcggacaagtgtatgtacccctttattgctcaaagaaagcaagccacaaacaataatgaagcaaaaaatggaatctaagaatctttttgtatggaatattacttctatcagaagatgatcaagatgtttcagtccagtgcacatcagcattgctgacattttatggattctaaacttgtgttgtttcttttttaaatcaactttttaaaaaaataaagtgtaaattaaccgactagagtacttggaaaatgtgatcagtacaagtgaacttaggttgttgccaacagggtccttttaggcagaacccagaaaccagtcaaatctgtagagaagcagtgtgacatcttcaggttaccattattttttaatgagcaggaagtctagaaatgataactagactgtatgtttcatgtgtgtgatttttcagaattcccagagtttactcattcttgttattaaactctagccagttgacatcttcgcaatttcaaggactgatagtgctgtattttctcacgttttctaagtttccgttttgcaaggcctaggtgactttttcatggtgttgtatgtttagctcttttgaaaaggaattttgaaatctccatcaactgaagtaaatgatgtctgagtgttacagtaaaggtgaccaagtctctttcttaaagtcacaatgactaaagtattagttgaattttttttttttttttttggatggagtctcgctcttgtcaccaggctggagtgcagtagcacaatcacggctcactgcaatctctgcctcccggtttcaaggtgattctgctgtctcagcctcccaagtagtgggattacaggcatgagccactgcacccagccttgaatttttaattttatctctgatatacttcattaagtgtctggagacctaattatcctaaaagatcatacattttctacctatgaattttgctgcatacagaaagtgccctttcctcaggaagttgctgtgtttcatttctttggatggactcttatctagaatacatagcagctctgcaaagaaacagtttttaaaaatgggaacttctacattgaaaagtccccatttttgtgccaactatgattagtgagaggaagaaatcttattctatggcatatgtatggaagggtgtaaagattcttttgaaaggtttattcacattgtagaacagcaaatgacatttttacagtatttttttgtaaagcaaactattttgtgccttgaatttggtatatgtgtattagtgaaacattgtaaaggtgaacttctacctctgtatctaaatgtataccatccacttgtaaatgactataaactattatgtgattgcttttttttttagaatgtcttgtttaaatagtggccaatgtttaaggctgttaaaataagccaacttttactaattggggagttttataaatgactgattaaatttaaagaattaacttacatgcaattgtgtgattattagttatcagcagtgttgtaaggaaaattattgtgtttttttttatgatcattatcccactttaggtaaagaaaaatattggaatggaatagtgttgggaaacagacattaacaacctagggtgcctgcactcaaatagccgatgttactgtccctagattagagacttgattaagggcttgtttgtaccaaaagtggggaaacaatgccatgacctgtgttttagtttggctgcaccacagatcaaatctgcactgtgtctacatataggaaaggtcctggtgtgtgctaatgttcccaatgcaggacttgaggaagagctctgttatatgtttccatttctctttatcaaagataaccaaaccttatggcccttataacaatggaggcactggctgcctcttaattttcaatcatggacctaaagaagtactctgaagggtctcaacaatgccaggtggggacagatatactcagagattatccaggtctgcctcccagcgagcctggagtacaccagaccctcctagagaaatctgttataatttaacaacccacttatccaccttaaaactgaggaaagtcgtctttacatctaattttattcttgtgtgttataacttaaacctatttctatttttgtttgttattgcccttataagggtgtccatctccaagttcaataaactaattcatttaact

SEQ ID NO: 104779 - DNA, 3342 bp, Homo sapiens
actgggctcgtgcggggccccgggcgtcgcgatgaacatcgtggtggagttcttcgtggtcactttcaaagtgctctgggcgttcgtgctggccgcggcgcgctggctggtgcggcccaaggagaagagcgtggcgggccaggtgtgcctcatcaccggcgccggcagcggcctgggccgcctcttcgcgctggagttcgcccggcgtcgggcgctgctggtgctgtgggacatcaacacgcaaagcaacgaggagacggctggcatggtgcgccacatctaccgcgacctggaggcggccgacgccgctgcgctgcaagctgggaatggtgaggaagaaattctgccccactgtaacttgcaggtttttacctacacctgtgacgtggggaagagggagaacgtctacctgacggctgaaagagtccgcaaggaggttggcgaagtctcagtcctggtcaataatgctggtgtggtctctgggcatcaccttctggaatgtcctgatgagctcattgagagaaccatgatggtcaattgccatgcacacttctggaccactaaggcttttcttcctacgatgctggagattaatcatggtcatattgtgacagttgcaagttccttgggattgttcagtactgccggagttgaggattactgtgccagtaaatttggagttgtgggttttcatgaatccctgagccatgaactaaaggctgctgaaaaggatggaattaaaacaaccttggtttgcccttatcttgtagacactggcatgttcagaggctgccgaatcaggaaagaaattgagccttttctgccacctctgaagcctgattactgtgtgaagcaggccatgaaggccatcctcactgaccagcccatgatctgcactccccgcctcatgtacatcgtgaccttcatgaagagcatcctaccatttgaagcagttgtgtgcatgtatcggttcctaggagcggacaagtgtatgtacccctttattgctcaaagaaagcaagccacaaacaataatgaagcaaaaaatggaatctaagaatctttttgtatggaatattacttctatcagaagatgatcaagatgtttcagtccagtgcacatcagcattgctgacattttatggattctaaacttgtgttgtttcttttttaaatcaactttttaaaaaaataaagtgtaaattaaccgactagagtacttggaaaatgtgatcagtacaagtgaacttaggttgttgccaacagggtccttttaggcagaacccagaaaccagtcaaatctgtagagaagcagtgtgacatcttcaggttaccattattttttaatgagcaggaagtctagaaatgataactagactgtatgtttcatgtgtgtgatttttcagaattcccagagtttactcattcttgttattaaactctagccagttgacatcttcgcaatttcaaggactgatagtgctgtattttctcacgttttctaagtttccgttttgcaaggcctaggtgactttttcatggtgttgtatgtttagctcttttgaaaaggaattttgaaatctccatcaactgaagtaaatgatgtctgagtgttacagtaaaggtgaccaagtctctttcttaaagtcacaatgactaaagtattagttgaattttttttttttttttttggatggagtctcgctcttgtcaccaggctggagtgcagtagcacaatcacggctcactgcaatctctgcctcccggtttcaaggtgattctgctgtctcagcctcccaagtagctgggactacaggcatgcgccaccacgcccagctaatttttgtatttttagtagagacggggtttcaccatgttggtcaggatggtctccatctcttgacattgtgatccacctgcctcggcctcccaaagtgctgggattacaggcatgagccactgcacccagccttgaatttttaattttatctctgatatacttcattaagtgtctggagacctaattatcctaaaagatcatacattttctacctatgaattttgctgcatacagaaagtgccctttcctcaggaagttgctgtgtttcatttctttggatggactcttatctagaatacatagcagctctgcaaagaaacagtttttaaaaatgggaacttctacattgaaaagtccccatttttgtgccaactatgattagtgagaggaagaaatcttattctatggcatatgtatggaagggtgtaaagattcttttgaaaggtttattcacattgtagaacagcaaatgacatttttacagtatttttttgtaaagcaaactattttgtgccttgaatttggtatatgtgtattagtgaaacattgtaaaggtgaacttctacctctgtatctaaatgtataccatccacttgtaaatgactataaactattatgtgattgcttttttttttagaatgtcttgtttaaatagtggccaatgtttaaggctgttaaaataagccaacttttactaattggggagttttataaatgactgattaaatttaaagaattaacttacatgcaattgtgtgattattagttatcagcagtgttgtaaggaaaattattgtgtttttttttatgatcattatcccactttaggtaaagaaaaatattggaatggaatagtgttgggaaacagacattaacaacctagggtgcctgcactcaaatagccgatgttactgtccctagattagagacttgattaagggcttgtttgtaccaaaagtggggaaacaatgccatgacctgtgttttagtttggctgcaccacagatcaaatctgcactgtgtctacatataggaaaggtcctggtgtgtgctaatgttcccaatgcaggacttgaggaagagctctgttatatgtttccatttctctttatcaaagataaccaaaccttatggcccttataacaatggaggcactggctgcctcttaattttcaatcatggacctaaagaagtactctgaagggtctcaacaatgccaggtggggacagatatactcagagattatccaggtctgcctcccagcgagcctggagtacaccagaccctcctagagaaatctgttataatttaacaacccacttatccaccttaaaactgaggaaagtcgtctttacatctaattttattcttgtgtgttataacttaaacctatttctatttttgtttgttattgcccttataagggtgtccatctccaagttcaataaactaattcatttaactcttaaaaaaaaaattactggccggcgtttaccagcgt

SEQ ID NO: 104780 - DNA, 3247 bp, Homo sapiens
actgggctcgtgcggggccccgggcgtcgcgatgaacatcgtggtggagttcttcgtggtcactttcaaagtgctctgggcgttcgtgctggccgcggcgcgctggctggtgcggcccaaggagaagagcgtggcgggccaggtgtgcctcatcaccggcgccggcagcggcctgggccgcctcttcgcgctggagttcgcccggcgtcgggcgctgctggtgctgtgggacatcaacacgcaaagcaacgaggagacggctggcatggtgcgccacatctaccgcgacctggaggcggccgacgccgctgcgctgcaagctgggaatggtgaggaagaaattctgccccactgtaacttgcaggtttttacctacacctgtgacgtggggaagagggagaacgtctacctgacggctgaaagagtccgcaaggaggttggcgaagtctcagtcctggtcaataatgctggtgtggtctctgggcatcaccttctggaatgtcctgatgagctcattgagagaaccatgatggtcaattgccatgcacacttctggaccactaaggcttttcttcctacgatgctggagattaatcatggtcatattgtgacagttgcaagttccttgggattgttcagtactgccggagttgaggattactgtgccagtaaatttggagttgtgggttttcatgaatccctgagccatgaactaaaggctgctgaaaaggatggaattaaaacaaccttggtttgcccttatcttgtagacactggcatgttcagaggctgccgaatcaggaaagaaattgagccttttctgccacctctgaagcctgattactgtgtgaagcaggccatgaaggccatcctcactgaccagcccatgatctgcactccccgcctcatgtacatcgtgaccttcatgaagagcatcctaccatttgaagcagttgtgtgcatgtatcggttcctaggagcggacaagtgtatgtacccctttattgctcaaagaaagcaagccacaaacaataatgaagcaaaaaatggaatctaagaatctttttgtatggaatattacttctatcagaagatgatcaagatgtttcagtccagtgcacatcagcattgctgacattttatggattctaaacttgtgttgtttcttttttaaatcaactttttaaaaaaataaagtgtaaattaaccgactagagtacttggaaaatgtgatcagtacaagtgaacttaggttgttgccaacagggtccttttaggcagaacccagaaaccagtcaaatctgtagagaagcagtgtgacatcttcaggttaccattattttttaatgagcaggaagtctagaaatgataactagactgtatgtttcatgtgtgtgatttttcagaattcccagagtttactcattcttgttattaaactctagccagttgacatcttcgcaatttcaaggactgatagtgctgtattttctcacgttttctaagtttccgttttgcaaggcctaggtgactttttcatggtgttgtatgtttagctcttttgaaaaggaattttgaaatctccatcaactgaagtaaatgatgtctgagtgttacagtaaaggtgaccaagtctctttcttaaagtcacaatgactaaagtattagttgaattttttttttttttttttggatggagtctcgctcttgtcaccaggctggagtgcagtagcacaatcacggctcactgcaatctctgcctcccggtttcaaggtgattctgctgtctcagcctcccaagtagctgggactacaggcatgcgccaccacgcccagctaatttttgtatttttagtagagacggggtttcaccatgttggtcaggatggtctccatctcttgacattgtgatccacctgcctcggcctcccaaagtgctgggattacaggcatgagccactgcacccagccttgaatttttaattttatctctgatatacttcattaagtgtctggagacctaattatcctaaaagatcatacattttctacctatgaattttgctgcatacagaaagtgccctttcctcaggaagttgctgtgtttcatttctttggatggactcttatctagaatacatagcagctctgcaaagaaacagtttttaaaaatgggaacttctacattgaaaagtccccatttttgtgccaactatgattagtgagaggaagaaatcttattctatggcatatgtatggaagggtgtaaagattcttttgaaaggtttattcacattgtagaacagcaaatgacatttttacagtatttttttgtaaagcaaactattttgtgccttgaatttggtatatgtgtattagtgaaacattgtaaaggtgaacttctacctctgtatctaaatgtataccatccacttgtaaatgactataaactattatgtgattgcttttttttttagaatgtcttgtttaaatagtggccaatgtttaaggctgttaaaataagccaacttttactaattggggagttttataaatgactgattaaatttaaagaattaaaaaaaaaaaaaaaaaaaaaaaaaaaaaaaaaaaaaaaaaaaaaaaaaaaaaaaaaaaaaaaaaaaaaaaaaaaaaaaaaaaaaaaaacaacaaacaacacaaacaaaaacaacaagaaaaacacaaaaaaagacaaacacaacgaagaggaggcgggcggcgcggcagcagacaatcaaaacatcacaggcgcggagggaggcagacaaatgaccagcctccccacatccttcatcttgcatcaaagacagcacccgccctactactgatagagcagagagctaaaatcataaaagcagcagcaggcgcgggcgagtcaacaaaacacccagagtagcacagaaaacaacacaaaacgcagtaaattagaaagacaacaagaccccacaccactgcgggcgagggagagatcacacaacacagcagaacacaccacaccgaccaacgcatagagaagacccgacgacagggaacctacaacaaaaagtagagagcgcagaggagtcgagcacgacaacaccacacactagaacaaggcgcgcgacagaagaacatcgcgacagaggacgccatcaattataaacaacaaaataaacggagagcgagaacgaaaaacacacgcacgacctcgaccacgaacacaaaacacagccaccagacaccagac

SEQ ID NO: 104781 - DNA, 931 bp, Homo sapiens
acctatacagcataaactattacagcataaactattacagcataaactattacagcataaactattacagtataaactattatgtgattgcttttttttttagaatgtcttgtttaaatagtggccaatgtttaaggctgttaaaataagccaacttttactaattggggagttttataaatgactgattaaatttaaagaattaacttacatgcaattgtgtgattattagttatcagcagtgttgtaaggaaaattattgtgtttttttttatgatcattatcccactttaggtaaagaaaaatattggaatggaatagtgttgggaaacagacattaacaacctagggtgcctgcactcaaatagccgatgttactgtccctagattagagacttgattaagggcttgtttgtaccaaaagtggggaaacaatgccatgacctgtgttttagtttggctgcaccacagatcaaatctgcactgtgtctacatataggaaaggtcctggtgtgtgctaatgttcccaatgcaggacttgaggaagagctctgttatatgtttccatttctctttatcaaagataaccaaaccttatggcccttataacaatggaggcactggctgcctcttaattttcaatcatggacctaaagaagtactctgaagggtctcaacaatgccaggtggggacagatatactcagagattatccaggtctgcctcccagcgagcctggagtacaccagaccctcctagagaaatctgttataatttaacaacccacttatccaccttaaaactgaggaaagtcgtctttacatctaattttattcttgtgtgttataacttaaacctatttctatttttgtttgttattgcccttataagggtgtccatctccaagttcaataaactaattcatttaact

SEQ ID NO: 104782 - DNA, 2741 bp, Homo sapiens
actgggctcgtgcggggccccgggcgtcgcgatgaacatcgtggtggagttcttcgtggtcactttcaaagtgctctgggcgttcgtgctggccgcggcgcgctggctggtgcggcccaaggagaagagcgtggcgggccaggtgtgcctcatcaccggcgccggcagcggcctgggccgcctcttcgcgctggagttcgcccggcgtcgggcgctgctggtgctgtgggacatcaacacgcaaagcaacgaggagacggctggcatggtgcgccacatctaccgcgacctggaggcggccgacgccgctgcgctgcaagctgggaatggtgaggaagaaattctgccccactgtaacttgcaggtttttacctacacctgtgacgtggggaagagggagaacgtctacctgacggctgaaagagtccgcaaggaggttggcgaagtctcagtcctggtcaataatgctggtgtggtctctgggcatcaccttctggaatgtcctgatgagctcattgagagaaccatgatggtcaattgccatgcacacttctggaccactaaggcttttcttcctacgatgctggagattaatcatggtcatattgtgacagttgcaagttccttgggattgttcagtactgccggagttgaggattactgtgccagtaaatttggagttgtgggttttcatgaatccctgagccatgaactaaaggctgctgaaaaggatggaattaaaacaaccttggtttgcccttatcttgtagacactggcatgttcagaggctgccgaatcaggaaagaaattgagccttttctgccacctctgaagcctgattactgtgtgaagcaggccatgaaggccatcctcactgaccagcccatgatctgcactccccgcctcatgtacatcgtgaccttcatgaagagcatcctaccatttgaagcagttgtgtgcatgtatcggttcctaggagcggacaagtgtatgtacccctttattgctcaaagaaagcaagccacaaacaataatgaagcaaaaaatggaatctaagaatctttttgtatggaatattacttctatcagaagatgatcaagatgtttcagtccagtgcacatcagcattgctgacattttatggattctaaacttgtgttgtttcttttttaaatcaactttttaaaaaaataaagtgtaaattaaccgactagagtacttggaaaatgtgatcagtacaagtgaacttaggttgttgccaacagggtccttttaggcagaacccagaaaccagtcaaatctgtagagaagcagtgtgacatcttcaggttaccattattttttaatgagcaggaagtctagaaatgataactagactgtatgtttcatgtgtgtgatttttcagaattcccagagtttactcattcttgttattaaactctagccagttgacatcttcgcaatttcaaggactgatagtgctgtattttctcacgttttctaagtttccgttttgcaaggcctaggtgactttttcatggtgttgtatgtttagctcttttgaaaaggaattttgaaatctccatcaactgaagtaaatgatgtctgagtgttacagtaaaggtgaccaagtctctttcttaaagtcacaatgactaaagtattagttgaattttttttttttttttttggatggagtctcgctcttgtcaccaggctggagtgcagtagcacaatcacggctcactgcaatctctgcctcccggtttcaaggtgattctgctgtctcagcctcccaagtagctgggactacaggcatgcgccaccacgcccagctaatttttgtatttttagtagagacggggtttcaccatgttggtcaggatggtctccatctcttgacattgtgatccacctgcctcggcctcccaaagtgctgggattacaggcatgagccactgcacccagccttgaatttttaattttatctctgatatacttcattaagtgtctggagacctaattatcctaaaagatcatacattttctacctatgaattttgctgcatacagaaagtgccctttcctcaggaagttgctgtgtttcatttctttggatggactcttatctagaatacatagcagctctgcaaagaaacagtttttaaaaatgggaacttctacattgaaaagtccccatttttgtgccaactatgattagtgagaggaagaaatcttattctatggcatatgtatggaagggtgtaaagattcttttgaaaggtttattcacattgtagaacagcaaatgacatttttacagtatttttttgtaaagcaaactattttgtgccttgaatttggtatatgtttccatttctctttatcaaagataaccaaaccttatggcccttataacaatggaggcactggctgcctcttaattttcaatcatggacctaaagaagtactctgaagggtctcaacaatgccaggtggggacagatatactcagagattatccaggtctgcctcccagcgagcctggagtacaccagaccctcctagagaaatctgttataatttaacaacccacttatccaccttaaaactgaggaaagtcgtctttacatctaattttattcttgtgtgttataacttaaacctatttctatttttgtttgttattgcccttataagggtgtccatctccaagttcaataaactaattcatttaact

SEQ ID NO: 104783 - DNA, 469 bp, Homo sapiens
tgaacattcgtgtcccataatagaaccttgataaatatccatgaaagaaatttatatatgagattcaaggcaggacttgaggaagagctctgttatatgtttccatttctctttatcaaagataaccaaaccttatggcccttataacaatggaggcactggctgcctcttaattttcaatcatggacctaaagaagtactctgaagggtctcaacaatgccaggtggggacagatatactcagagattatccaggtctgcctcccagcgagcctggagtacaccagaccctcctagagaaatctgttataatttaacaacccacttatccaccttaaaactgaggaaagtcgtctttacatctaattttattcttgtgtgttataacttaaacctatttctatttttgtttgttattgcccttataagggtgtccatctccaagttcaataaactaattcatttaact

SEQ ID NO: 104784 - DNA, 792 bp, Homo sapiens
actgggctcgtgcggggccccgggcgtcgcgatgaacatcgtggtggagttcttcgtggtcactttcaaagtgctctgggcgttcgtgctggccgcggcgcgctggctggtgcggcccaaggagaagagcgtggcgggccaggtgtgcctcatcaccggcgccggcagcggcctgggccgcctcttcgcgctggagttcgcccggcgtcgggcgctgctggtgctgtgggacatcaacacgcaaagcaacgaggagacggctggcatggtgcgccacatctaccgcgacctggaggcggccgacgccgctgcgctgcaagctgggaatggtgaggaagaaattctgccccactgtaacttgcaggtttttacctacacctgtgacgtggggaagagggagaacgtctacctgacggctgaaagagtccgcaaggaggttggcgaagtctcagtcctggtcaataatgctggtgtggtctctgggcatcaccttctggaatgtcctgatgagctcattgagagaaccatgatggtcaattgccatgcacacttctggaccactaaggcttttcttcctacgatgctggagattaatcatggtcatattgtgacagttgcaagttccttgggattgttcagtactgccggagttgaggattactgtgccagtaaatttggagttgtgggttttcatgaatccctgagccatgaactaccagctgatctataggttgggagtctatcctgcctctggtcgcccttatttttgacgacactggcagtgttcagagc

SEQ ID NO: 104785 - DNA, 931 bp, Homo sapiens
tacaaacagaaaaatataacattttcccccttagaataatatatatatatatataaaacttaaggttctattgtatgtatccgaacaacaaaatctggaaaccagcatgaaactctattattcacatgttaaaatgttgaaactatgaccaaaatatgaaaactgctggagctatcagaaagacacaagacaaaaagcttcttgcatatgtataaactaaatgtgataatctcaaaaaactgttcaaaattataattactttccagtttaaaaactttaatcctaaattaaaaaaaaaaaatctatacacaaaccactgatttgcccagagcaaagaaagaaagaaagaaagaaagaaagaaagaaagagaaatcagcggtaaggtaagcaggacccagaggagctgatattcacagttcttacatgtacaactctttcaggaattatccataaagtactttattttacaacctgctttacttgtaaaactaaaggtgcacttttttacataaaagttttatacagtgttaaaaccagaactgtgtgtaaaatactgcatgtaaatgtttctaaatagtcttgttccagtggttcatcggtgacttctgtggcttcgtcatcattatccatggatgattctgaaagaatctctccagttttactggaattggatcctactaattcttctgtttcacggcagtcagaagaaccactactttcagggccttcgttttcactaccttcagaatgtagtaaatctttctcagcttgagacacatcagattcctccatttcattattttcctcagaagtctcttcattcacagttgaggcatcatcagattctttttcttggttttttctttctgggaccatttctcttgatgtcataaaagactctaaaaataagcaaatgttgttgtacttaaa

SEQ ID NO: 104786 - DNA, 750 bp, Homo sapiens
atggagtctcactgtcttgcccaggctggtctcaaactcctaggctcaagcgatcctcccgcctctactaatatgaattattagcctatactaatatgaattcctatactaatatgattgaaattagtttgacttgtataataattgttctcccagattggccttctgttttgatagtagaactaaattattaggctatttcaagaaattaatatattactggtagaaaaactgaagctacaaaatggcctggtttctcacttcagttaaatttgtgcttctgagtgcttgtattgtaggtgaaaccgcactgagaaggtatttgtggcccgtatgctgattgattgatgagacttctttgcacaggagagctgctaaaaattactgcggtgaacagtcttgttccagtggttcatcggtgacttctgtggcttcgtcatcattatccatggatgattctgaaagaatctctccagttttactggaattggatcctactaattcttctgtttcacggcagtcagaagaaccactactttcagggccttcgttttcactaccttcagaatgtagtaaatctttctcagcttgagacacatcagattcctccatttcattattttcctcagaagtctcttcattcacagttgaggcatcatcagattctttttcttggttttttctttctgggaccatttctcttgatgtcataaaagactctaaaaataagcaaatgttgttgtacttaaa

SEQ ID NO: 104787 - DNA, 460 bp, Homo sapiens
atggagtctcactgtcttgcccaggctggtctcaaactcctaggctcaagcgatcctcccgcctctactaatatgaattattagcctatactaatatgaattcctatactaatatgattgaaattagtttgacttgtataataattgttctcccagattggccttctgttttgatagtagaactaaattattaggctatttcaagaaattaatatattactggtagaaaaactgaagctacaaaatggcctggtttctcacttcagttaaatttgtgcttctgagtgcttgtattgtaggtgaaaccgcactgagaaggtatttgtggcccgtatgctgattgattgatgagacttctttgcacaggagagctgctaaaaattactgcggtgaacaggtatgaagaagactgttctctgcccttctttttgcaataaaatgttacaaactatcttgagat

SEQ ID NO: 104788 - DNA, 229 bp, Homo sapiens
attcttgaagtttcttaatacatcactgtgcttttacacgatacgtgagttcacaaaagtgcctggaaagattataaaggactgtcatggaagtgctaaggtgctttaccagtgctttaaaatcccctaatcaaacactaatatttaagggtacatactctctgccaggccctgtgacaatcttacctcatttttaaaacaaccccacagatgcaggttctactatcac

SEQ ID NO: 104789 - DNA, 292 bp, Homo sapiens
acctctatgatactgccatatacacgagggtcaattctagctagtatactaggaatattgagaacatccatgatgataaagacaaattccaaagtaacctcccctaaaaagaatataatgccagccaggcatggtggctcacgcctgtaatcccagcactttgggaggctgaggcgggtggatcacttgaggtcaggagttcgagaccagcctaggcaacaaggcaaaaccccgtctctactaaatatacaaaaattagccgggcatggtggcacatgcctgtgatcccagc

SEQ ID NO: 104790 - DNA, 338 bp, Homo sapiens
atataatgtagtacaaaatagctggaaacttttctcatgtccagaatatattatgcatttaatacatatgtgtttattgaatgaatatattaatgtctctatacttttggaaagtggagtgattagacagacaattaatacaagcatttcatgtattcaatcattcgttacttatgtattgagggcctactctgtgccaaatactgtgataagaattactgataaaagaataagtaatatgagcatcctgcctcagaagaattcaacatctagaaaagaaaacgaaattcaactttaaaacatcatgttgaacagcataaatatatacgatatttatc

SEQ ID NO: 104791 - DNA, 632 bp, Homo sapiens
ataaaccataacaaaaaacaactaacaaaccataataccaaaacaacacacccacacaacaccaccacaaccaaaaaaaaaaaaaaaaaaaaaaaaaaaaaccaaaaaacaaaaaaaaaaaaaaaaaaaaaacaaaaaaaaaaacaaaaaccagaaagactgattctgccaccgtgaaatgacgccgtggttaacgtctgtagcagccgcgtgtgctgaggatttctgcagtgggcatgtttgcttttccatccacagcgagtcctcactcagtgtcacccgccccgaggcccttggaaactgcaacttttttttttttgagagggtctccctctgtcacccaggctgaagtgcaatggcgtgatcctggctcactgtagcctcaacctccctggctcaagtgatcctcccacctcagcctcccaagtagctgggaccacaggtttatgtatcaccatgcccagctaaattttgtattttttgtagggacagagtctccctacgttgcctaggctggtcttgaaatcccagagtgctgggatttcagggatgagccacctcacctggccagaaactgtgactttaagcaaaacgacaaacagcaggcccttgaataaagactgttttgttca

SEQ ID NO: 104792 - DNA, 269 bp, Homo sapiens
ttgcaggagcagctgggagctgtcacctgtgtaggcagcctggatctgtcagacaatgggttcgactcggacctcctgacactggtgcctgcacttggcaagaacaagtccctcaagcacctgtttttgggcaagaacttcaatgtcaaggccaagtgaggccccctttccatgcccacagaccctcatcccatcattcacccatcctcttggctcaccgtattacctctggccacctctctcctcctccaatagcatgaccccagccc

SEQ ID NO: 104793 - DNA, 808 bp, Homo sapiens
cactactctcttcaaagctgtcagacagggacatttaagtctgcagaagtttctgctgccgtttgttcaactatgccctgcccccagtactggagtccaggaaggcaggcaggcctccttgagctttggtgggctccacccagttcagtcttcccggctgctttgtttacctactcaagcttcagcaatggcggatgcccctccctcagccttgctgacaccttgcggcttgatctcagactgctgtgttagcagtgagtgaggctccgtgggtgtgggactctccgagccaggtgcgggatataatctcctggtgttccgtttgctaagaccattggaaaagcgcagtattagggtgggagggtcccgattttccaggtactatctgtcatggcttcccttggctaggaaagggaattccccaaccccttgcacttcccaggtgaggcaatgccccacgctgctccttgggctgcacccactgtgtgacaagccccagtgagatgaacccggtacctctgttggaaatgcagaaatcacctgtcttctgcgtcgctcacgctgggagctgtagactggagctgttcctttttggccatcttggaacctcggttcaaacctgagttgtaatactcactcttcctgttgctgcctatgtaattttgtagaagttacctaattgcttccaagcttctgttggattttttgagaactgaatgacatagtacattttgaatgcttaatgtattgctttgtgcatggtattatttaataaatattagctttggttatacttgcaatgttctgt

SEQ ID NO: 104794 - DNA, 490 bp, Homo sapiens
ttgggtcacagtgggagaattaaatagttgttaaattattcctttattttattgaatatattccaagtttaaaacatgatattttgatatatatatttacatagtaaaatgattactatagccaagctaataacatatccatcatctcatatagttaccctttgtgtgtgtatggcaaaattacctaaaacctacgtgccttttttttcaaatttctggtttatgactcaattttattaactataattctcatgcagtacattagatctccagataacctgtttttttaaagaaagacagttgtgtgcagcttataaaaaatacactggattacaaagggcttaaaacaaacactgaaattcaccaggatgcttaaaatttgtcaattatccagctatgacaaaaccaccgccaacaatatactgaatcagcaaagcctggaaatatccccctagagaactagaacaagacaaggattcccagtctcacc

SEQ ID NO: 104795 - DNA, 226 bp, Homo sapiens
ttttgaatcatattagattcttgtaaaattacaaatattttatttatagctactatgtcataaaacctttgctgtcaaattatgtctgtctatatgcttgactatgcagaatgactagcaaatattacatttaataagttggaacttaaactcagagtaataccttatcaacctcattcagtatgatattgtaatatttccaagatatttcaatcattgtgttttc

SEQ ID NO: 104796 - DNA, 711 bp, Homo sapiens
tctgagccctgtgctggcatgagactgtagggctggcccacattactagccacaccaatgcctcagttctccctggaggcctactcaccccactccaaacagctctgagatctcaattctccccttggttcctgggcctgaaaggaacccctggagccccacagtgcaaggcctcttgttcattcttgcaggcaggtagttctttcatgttgtaagcataattacagcaacaatgataataacagcaggcacagctgcatgcttgcctcgtgcacttatgtagacaaacatccttggccctcaccaccacctgatgagctgggtgccggatcccagtttcgaagatggggaaactgaggtacagaaagattgatgccacttccttacagtcactcagggtgtgtctgggccttaaacctgttcctggctgccgggctggcctgccagagtcagtagtaacccgtggtaggtggtgtttcatcaaattcaacctggtgttctgtaatcggtggggttttcaggctcccatggtcccggtgggacataaaacttgttacaggagggctttgtgagtccgttggaggcatcatataccattgcctcagcatccagacctgtgccaaaaatttcaggcatggcagcaaaaaccctcaaccttgtaagctttcaaaatttgtctaaaatttgtctagttactgtggtgcacgcctg

SEQ ID NO: 104797 - DNA, 444 bp, Homo sapiens
tgggtagggggttccccaggagtcacacagtgcctcccagtgggggtgccaaggaccacgttgcacaggagccctggcttaggctgtgctggggaaaccaagaggacttgggggatctcccaggaatgtgaggctggggagggagtgagtcattctcccactggtgtttggagaaagcttcagagatccagacagctctccaatattcttcctaaaaagccacatcagggctgtcagggccagagggccaggaagctcaagaatgtctgggcagcatggtgggatcattccagatcgagaccttgcatggagacattgtcttttccattattatttttttttccaaaatggaaaaagctctattgcttttctcctattataaaagtaatacacctgcactactggtagtgtatcaccagtacggtaagaaagtaaaatttctcg

SEQ ID NO: 104798 - DNA, 713 bp, Homo sapiens
ggaggggataggacgagaaacatgaaagaaaagaaagtaaaaagagattatactaaaaaaatttccaataactctgacacaaactatacacctgtcttcaaagagattgtgtctaaaaccaaagtgctacatctataggcctgggggctttgtcagtcaaaaaggatgagttaaatctctagtgacctccttctttggagaaagcctaagacaaaatcatttgcaacatctaaattatttgaaatttttaaatattatttgaaatttctaaatattaagtatacaaaaaaaaaccacactaaagctaatagattacttttaagaagcaacaaaatttgaactatgacagttacaaaaaggactctgtaatgaagatcacagagaaacagatcatgatagtaagaaaatcctacagttctgaggacaagagaaacatatttcttaacagactggaaaaatatatagtttatacaaagaaaaactatcccacattttaatcaagagcaaagcaatagaaaataatggctcttgtctatggccataccaccttaaatgtgcccaatcttgtctgatgtcggaagtttagcaggactggggctggttaatacttggatgggagactgcctgggaatatcaggtgctataggctttaaaatatatatatatatatataagaaagaaagaaaataatggttataactgagattgagctt

SEQ ID NO: 104799 - DNA, 314 bp, Homo sapiens
gtagattaaaatctgctaaacatacttctgtctcttggtagaaatgtgtaaagtccttgaaaagtgaaacaaaatattttctacatttgtactctactccatgcgtagcaaagtatgaagggcattttaataatgaaagttgtcagttatgtagatgattattgctgttgcatgaaaacagtattcaagtgagtgcatgactacatataggatattaaggtcccaacaagcatctgttttcaaattaatgtagcagaatagaagtttcaaggtcagtgctttcaacccagctatagaacatgctatgtgagagt

SEQ ID NO: 104800 - DNA, 352 bp, Homo sapiens
ttgttgcccaggctggaatgcagtggcgtgatcatggcacactgcagccttcaattcctgaactcaagcgatctttctgcctcagcctcccgagtagctaaaactactggtgcacagcaccacacttggctaattttcaaagacttttggtagagatggagtctcctatgttgcccaggctggggctgttacctgcagcataatctagcctatcctgtctactaaaggcactgaatttgagagacagtactgtaatataatgaggccatctagatgttccagaatatgtttacatggtgttatttacattattaaaacaaaagttaaaattatcataaccagaatgatattg

SEQ ID NO: 104801 - DNA, 902 bp, Homo sapiens
gatcccttgaaaactaggagagaggaagcacattcatctttaacttgaattcaagtgaaaagcaagcactaatagaatactatgctttcttcctacattgattttatctgcttcagaaaattgacaacctaaattgaaatcaggtagatgaaaaatacatttcttcaaacattgtgcccttgagggaaaaattacacacacagcgtgatatgtgcatgcacacatgcgcacacacacacacaaaattgaaaagtgaagacattttaatggagatttaatagtgcttccagactaatgaactaatggagtttggctccactcatgagtgtatttgaaatgtaagtaaccagctacaaagaataagtgtcacttcatttgattatgactaccaatcaagagaaggaggaatacatttctgaggagtgatactaaaccatttgagcttaaatgagtacctgattttgcagccattaaaatgagtcaataactatgtggaaatatagaaacaatattttataatataatactaagaaagaggacagtaggccataaatgtgttagcagtgttatgctatgtctatataaataagcgtggccattaaaatagcaactgaaacagtcatgtgtggggggcaagttcagaagtacttctatgtttctaagaagggagttcctttatggttggccccggtcgaggactaaaaactgggtagatccgaattacccaaagttgtttaggtcctcgtctaggaattaacccaggcatggacccccgggggggcacctgtaacacccttggggaaggcggaacttacccaggtgagcacccggcacgaagtgtctttaaaaggaggcttctcgagggagaaaaaacttcaaggaaaacaccagacaaagaggca

SEQ ID NO: 104802 - DNA, 227 bp, Homo sapiens
ggctccctgtgtggggctcccttgcaaggcttggggtgcagcattccctcagccagtgccgtcccctttgttccactcgagcctctggcggggccgtgtattgacaaacctagtgaccagaagtggggtctcactgctaggggcttaagcggagggagtcgagccactcgcgcagggggtggaagctacgccgaggactacgattccgatgcgactcgcacgtatac

SEQ ID NO: 104803 - DNA, 278 bp, Homo sapiens
gttcatcattccaaataaaatcaaaataagatatctttaaaggtttctcactagaaatgatgatgaagagagcaccatcaataaaagagacagacgtgcctgaaagctccttccctgccctgccctttccagtttcctgtggattctcaagaccatgaaaggttagaaatattagctgcagagagaaaagaaacataacatgaacatattttcctatcagtggattttcccctacaagatcatttttgaagaagctaatggttaggagcacggcctct

SEQ ID NO: 104804 - DNA, 306 bp, Homo sapiens
gagacggagtctcgctctgtcacccaggctggagtgcagtggcgctatctcagctcactgcaagctctgcctcctgggttcacgccattctcctgcctcagcctcccaaagtgctgggattacaggcgtgagccaccgcacctggccttcagtgtttcttttaaatatgctctgaaaactgtgtaccattaatttctgtataagccaaatatctaaaactttgcatagagactcacttgttttactagttttttgtcaactaaagaatttaggcttctcagtcctaattactgtaattaaaaatgt

SEQ ID NO: 104805 - DNA, 2823 bp, Homo sapiens
agattcactggtgtggcaagttgtctctcagactgtacatgcattaaaattttgcttggcattactcaaaagcaaaagaaaagtaaaaggaagaaacaagaacaagaaaaaagattatattgattttaaaatcatgcaaaaactgcaactctgtgtttatatttacctgtttatgctgattgttgctggtccagtggatctaaatgagaacagtgagcaaaaagaaaatgtggaaaaagaggggctgtgtaatgcatgtacttggagacaaaacactaaatcttcaagaatagaagccattaagatacaaatcctcagtaaacttcgtctggaaacagctcctaacatcagcaaagatgttataagacaacttttacccaaagctcctccactccgggaactgattgatcagtatgatgtccagagggatgacagcagcgatggctctttggaagatgacgattatcacgctacaacggaaacaatcattaccatgcctacagagtctgattttctaatgcaagtggatggaaaacccaaatgttgcttctttaaatttagctctaaaatacaatacaataaagtagtaaaggcccaactatggatatatttgagacccgtcgagactcctacaacagtgtttgtgcaaatcctgagactcatcaaacctatgaaagacggtacaaggtatactggaatccgatctctgaaacttgacatgaacccaggcactggtatttggcagagcattgatgtgaagacagtgttgcaaaattggctcaaacaacctgaatccaacttaggcattgaaataaaagctttagatgagaatggtcatgatcttgctgtaaccttcccaggaccaggagaagatgggctgaatccgtttttagaggtcaaggtaacagacacaccaaaaagatccagaagggattttggtcttgactgtgatgagcactcaacagaatcacgatgctgtcgttaccctctaactgtggattttgaagcttttggatgggattggattatcgctcctaaaagatataaggccaattactgctctggagagtgtgaatttgtatttttacaaaaatatcctcatactcatctggtacaccaagcaaaccccagaggttcagcaggcccttgctgtactcccacaaagatgtctccaattaatatgctatattttaatggcaaagaacaaataatatatgggaaaattccagcgatggtagtagaccgctgtgggtgctcatgagatttatattaagcgttcataacttcctaaaacatggaaggttttcccctcaacaattttgaagctgtgaaattaagtaccacaggctataggcctagagtatgctacagtcacttaagcataagctacagtatgtaaactaaaagggggaatatatgcaatggttggcatttaaccatccaaacaaatcatacaagaaagttttatgatttccagagtttttgagctagaaggagatcaaattacatttatgttcctatatattacaacatcggcgaggaaatgaaagcgattctccttgagttctgatgaattaaaggagtatgctttaaagtctatttctttaaagttttgtttaatatttacagaaaaatccacatacagtattggtaaaatgcaggattgttatataccatcattcgaatcatccttaaacacttgaatttatattgtatggtagtatacttggtaagataaaattccacaaaaatagggatggtgcagcatatgcaatttccattcctattataattgacacagtacattaacaatccatgccaacggtgctaatacgataggctgaatgtctgaggctaccaggtttatcacataaaaaacattcagtaaaatagtaagtttctcttttcttcaggggcattttcctacacctccaaatgaggaatggattttctttaatgtaagaagaatcatttttctagaggttggctttcaattctgtagcatacttggagaaactgcattatcttaaaaggcagtcaaatggtgtttgtttttatcaaaatgtcaaaataacatacttggagaagtatgtaattttgtctttggaaaattacaacactgcctttgcaacactgcagtttttatggtaaaataatagaaatgatcgactctatcaatattgtataaaaagactgaaacaatgcatttatataatatgtatacaatattgttttgtaaataagtgtctccttttttatttactttggtatatttttacactaaggacatttcaaattaagtactaaggcacaaagacatgtcatgcatcacagaaaagcaactacttatatttcagagcaaattagcagattaaatagtggtcttaaaactccatatgttaatgattagatggttatattacaatcattttatatttttttacatgattaacattcacttatggattcatgatggctgtataaagtgaatttgaaatttcaatggtttactgtcattgtgtttaaatctcaacgttccattattttaatacttgcaaaaacattactaagtataccaaaataattgactctattatctgaaatgaagaataaactgatgctatctcaacaataactgttacttttattttataatttgataatgaatatatttctgcatttatttacttctgttttgtaaattgggattttgttaatcaaatttattgtactatgactaaatgaaattatttcttacatctaatttgtagaaacagtataagttatattaaagtgttttcacatttttttgaaagacaaaaa

SEQ ID NO: 104806 - DNA, 319 bp, Homo sapiens
caccaccacgcccagctaatttttgtatttttagtagagacgaggtttcaccatgttggccaggctggtcttgaactcctgatctcaagtgatccgcctgcctcagcttcccaaagtgttgggattacaggcgtgagccaccactcccagccaattacagacaattaatataacaattatgtgcaacatgcaaacgtcttttttttctttctttctttcttttgtttttgtgagatggagtcttgctctcttgccaggctggagtgcagtggtaggaatctccacttgctgcaacctccacctcccaggttcaagtgat

SEQ ID NO: 104807 - DNA, 221 bp, Homo sapiens
atgagatgaacgatgagatgaaatgatgagatgaaatgagatgaaaaatgatgagatgaaaaatgagatgaaatgaaataatgaaatgagatgaaatgaaatgaagtaatgaaaggaaattatgaaatgtaatgatgaaattgaaatgaaattgaaatgagatgatttgacatgatgagatgtaatgatgaaatgaaatgatgaaatgagatgagataaaa

SEQ ID NO: 104808 - DNA, 125 bp, Homo sapiens
tgctcactgcttgcctcaccggcctctttcctcttcttcctgttgtgactccaggcatggctgggaccccgaagccgtgggccaggtctttgcttcctgcctcctcgtagttttgacctagtttg

SEQ ID NO: 104809 - DNA, 266 bp, Homo sapiens
acaaataaaccacatttcacattcacttaattggaccatgtggcggatttatgccaacagaatgcagacagaagtgatattcatcatttctagactgtagtggtttgaaaatatgttcacaaattctttgatactacttctttcaagaagtggaacttgattccccttcttctgagtgggggttggacatagtgattctcttctaatgaacaaatacggcggagatggcagtatatgacttctgagactagatcataaaagccatt

SEQ ID NO: 104810 - DNA, 381 bp, Homo sapiens
gtaatatgagggtacataattttgttattctggggtagttttgaagaaaattgcccttatctgaacttttgcctacccttttgctctataaatgttttgtaagttctataggtttaactttaaagaataatacaaatgttaaataatgtgaaagccctaaaatcaagatgtaaggtattctaataaaaccaggacagttacttcaattatcatacatgcttcagtgggcagaattcttgaacaacagtgtgaagaatgttgagagttttttttttggtttctttttctttgttatttgttttttgacaggatcttgctctgtcgcccaggctgaaatgcagtgatgtgatcatagcttattgcagcctcaaactcctgggc

SEQ ID NO: 104811 - DNA, 147 bp, Homo sapiens
gcctgcatgaagggcaattatgtaatatatattaaagtgacaaatgcttttacgctttggcctagcaattcctcttctagaaattgtcatttagatattgtgtacagggaaataatgtatgtattccatttggtggaataatctgga

SEQ ID NO: 104812 - DNA, 201 bp, Homo sapiens
tgagctgggtaaaggatatgtggggactctgtacaatctctgcaacttactctgtaacaccgaacttttttcaaaatagagttagaacgaaaaaacctttaaaaattttggttttctggcttctcttgaaaattgggcagacctggcccttgggcacctgcatgcctctggcacccacccccagagccaagcaatcggctg

SEQ ID NO: 104813 - DNA, 381 bp, Homo sapiens
tgggaacgatgcatctacaagctaagttacaccaagaattattggtaactctaggaaactaggagaggccaagaaaggtcttctctagagccttcaggagaagcatggccctgtggacaccctgacttcaggcttctagattattccagaactgtgagagaatacatttctgttgtgtttaagtcactgagtttgtggtactttgttatggcagccccaggaaatgaataaacatagtaatggaagattctgagacaggcactatgctttacgtacactgtgtgtatgtatgtatgtatgtatatatgtatgtatgtatgtatgtatgtatgtacgtacatacttacttacttatttgagacagagccttgctctgtcatc

SEQ ID NO: 104814 - DNA, 264 bp, Homo sapiens
gaccaagtctaatgttgactaggctagttttgaatttctagcttcaagggatcctcccacctctgcctcccaaagtgctggggttgcaggcatgagctactacaccaaatgggaaagtatttttttaaagatgcctatgaacggagactcctgaaggttgttgacttcacggtagcattttcagcctagctagtgttatcgtgggttaagaaagataaattcattagcaatataactttactaaggataacctgattgtgatat

SEQ ID NO: 104815 - DNA, 264 bp, Homo sapiens
ttcatatacagttgacccttgaacaacatggtggttaggggcaccaattccctgcatagtggaagaaaagccatatataattgttgattctccaaaagtttaagtactcaatagcatgctgttgactggaaatcttaacaacaacataaacattcaattaaatatatgtacgttatatgtattaaatactgtattctttttttttttttttttttttgagacagggtctgactttgtcacccaggctggagtgcagcggcatga

SEQ ID NO: 104816 - DNA, 314 bp, Homo sapiens
caagagagtatgagagcaagagagggccaaactcactcttgtaacaacccactctcatgataatgacattaatcaattcatgaaggcagattcctcatggcctgatcagctttttacagtccaatctctgaataccatcacaatgacaattaaatttaaatacgggttttgacaaacatattcaaaccattgcacttaccatccaacagtggtatctttttaatagcatctgtgacagtgagtcatccagccactgcattaacacttccagtaacagtgaatacctcaagaaatgttttctatgcacattaaag

SEQ ID NO: 104817 - DNA, 1972 bp, Homo sapiens
  misc_feature (10)..(10): n is a, c, g, or t
  misc_feature (15)..(15): n is a, c, g, or t
  misc_feature (1709)..(1709): n is a, c, g, or t
  misc_feature (1713)..(1714): n is a, c, g, or t
ggatgtaagngggangccgccgcccaccgcccgccgccatggggctgaaggccgcccagaagacgctgttcccgctgcgctccatcgacgacgtggtgcgcctgtttgctgccgagctgggccgagaggagccggacctggtgctcctttccttggtgctgggcttcgtggagcattttctggctgtcaaccgcgtcatccctaccaacgttcccgagctcaccttccagcccagccccgcccccgacccgcctggcggcctcacctactttcccgtggccgacctgtctatcatcgccgccctctatgcccgcttcaccgcccagatccgaggcgccgtcgacctgtccctctatcctcgagaagggggtgtctccagccgtgagctggtgaagaaggtctccgatgtcatatggaacagcctcagccgctcctacttcaaggatcgggcccacatccagtccctcttcagcttcatcacaggcaccaaattggacagctccggtgtggcctttgctgtggttggggcctgccaggccctgggtctccgggatgtccacctcgccctgtctgaggatcatgcctgggtagtgtttgggcccaatggggagcagacagctgaggtcacctggcacggcaagggcaacgaggaccgcaggggccagacagtcaatgccggtgtggctgagcggagctggctgtacctgaaaggatcatacatgcgctgtgaccgcaagatggaggtggcgttcatggtgtgtgccatcaacccttccattgacctgcacaccgactcgctggagcttctgcagctgcagcagaagctgctctggctgctctatgacctgggacatctggaaaggtaccccatggccttagggaacctggcagatctagaggagctggagcccacccctggccggccagacccactcaccctctaccacaagggcattgcctcagccaagacctactatcgggatgaacacatctacccctacatgtacctggctggctaccactgtcgcaaccgcaatgtgcgggaagccctgcaggcctgggcggacacggccactgtcatccaggactacaactactgccgggaagacgaggagatctacaaggagttctttgaagtagccaatgatgtcatccccaacctgctgaaggaggcagccagcttgctggaggcgggcgaggagcggccgggggagcaaagccaggcacccagagccaaggttccgccctccaggaccctgagtgcttcgcccacctgctgcgattctacgacggcatctgcaaatgggaggagggcagtcccacgcctgtgctgcacgtgggctgggccacctttcttgtgcagtccctaggccgttttgagggacaggtgcggcagaaggtgcgcatagtgagccgagaggccgaggcggccgaggccgaggagccgtggggcgaggaagcccgggaaggccggcggcggggcccacggcgggagtccaagccagaggagcccccgccgccaagaagccagcactggacaagggcctgggcaccggccaggtgcagtgtcaggacccccccggaagcctcctgggactgtcgcatggcacagcccgaggccctgaaggtggcagcacggctcaggtgccagcaaccgcaagcatcaccaccggcggagggtccagtgctcactttccagagtgagaagntgannggcatgaaggagctgatggtggccacaaagatcactcgagcgccattcaaagcctgcagtcacggcacagtcgcagttgcagatgaggaagcagaaagtgtccaccctagtggttaactctgtcttgtctcaagcggaacgcgaaaggcctcttgaactaatggggactacggaccgttgttgggacccaggtccgcctaatccccaattgtaacccatgtctgcccgacccaaggggacagcttcccttaacaagct

SEQ ID NO: 104818 - DNA, 2182 bp, Homo sapiens
  misc_feature (10)..(10): n is a, c, g, or t
  misc_feature (15)..(15): n is a, c, g, or t
  misc_feature (1919)..(1919): n is a, c, g, or t
  misc_feature (1923)..(1924): n is a, c, g, or t
ggatgtaagngggangccgccgcccaccgcccgccgccatggggctgaaggccgcccagaagacgctgttcccgctgcgctccatcgacgacgtggtgcgcctgtttgctgccgagctgggccgagaggagccggacctggtgctcctttccttggtgctgggcttcgtggagcattttctggctgtcaaccgcgtcatccctaccaacgttcccgagctcaccttccagcccagccccgcccccgacccgcctggcggcctcacctactttcccgtggccgacctgtctatcatcgccgccctctatgcccgcttcaccgcccagatccgaggcgccgtcgacctgtccctctatcctcgagaagggggtgtctccagccgtgagctggtgaagaaggtctccgatgtcatatggaacagcctcagccgctcctacttcaaggatcgggcccacatccagtccctcttcagcttcatcacaggcaccaaattggacagctccggtgtggcctttgctgtggttggggcctgccaggccctgggtctccgggatgtccacctcgccctgtctgaggatcatgcctgggtagtgtttgggcccaatggggagcagacagctgaggtcacctggcacggcaagggcaacgaggaccgcaggggccagacagtcaatgccggtgtggctgagcgggtattgttccctccccccagccttgtccccttcatactgtagtagcccaagccacccaagggactccattttcttgggccacacccctttcttcccatcaccacccacataggaagggaagacagaagagccccttttcctggctgtcattccctgaagcaggcacagggtgggccatcatgagacataatgatctcatccccccctaagagctggctgtacctgaaaggatcatacatgcgctgtgaccgcaagatggaggtggcgttcatggtgtgtgccatcaacccttccattgacctgcacaccgactcgctggagcttctgcagctgcagcagaagctgctctggctgctctatgacctgggacatctggaaaggtaccccatggccttagggaacctggcagatctagaggagctggagcccacccctggccggccagacccactcaccctctaccacaagggcattgcctcagccaagacctactatcgggatgaacacatctacccctacatgtacctggctggctaccactgtcgcaaccgcaatgtgcgggaagccctgcaggcctgggcggacacggccactgtcatccaggactacaactactgccgggaagacgaggagatctacaaggagttctttgaagtagccaatgatgtcatccccaacctgctgaaggaggcagccagcttgctggaggcgggcgaggagcggccgggggagcaaagccaggcacccagagccaaggttccgccctccaggaccctgagtgcttcgcccacctgctgcgattctacgacggcatctgcaaatgggaggagggcagtcccacgcctgtgctgcacgtgggctgggccacctttcttgtgcagtccctaggccgttttgagggacaggtgcggcagaaggtgcgcatagtgagccgagaggccgaggcggccgaggccgaggagccgtggggcgaggaagcccgggaaggccggcggcggggcccacggcgggagtccaagccagaggagcccccgccgccaagaagccagcactggacaagggcctgggcaccggccaggtgcagtgtcaggacccccccggaagcctcctgggactgtcgcatggcacagcccgaggccctgaaggtggcagcacggctcaggtgccagcaaccgcaagcatcaccaccggcggagggtccagtgctcactttccagagtgagaagntgannggcatgaaggagctgatggtggccacaaagatcactcgagcgccattcaaagcctgcagtcacggcacagtcgcagttgcagatgaggaagcagaaagtgtccaccctagtggttaactctgtcttgtctcaagcggaacgcgaaaggcctcttgaactaatggggactacggaccgttgttgggacccaggtccgcctaatccccaattgtaacccatgtctgcccgacccaaggggacagcttcccttaacaagct

SEQ ID NO: 104819 - DNA, 1833 bp, Homo sapiens
  misc_feature (1570)..(1570): n is a, c, g, or t
  misc_feature (1574)..(1575): n is a, c, g, or t
gggatgtaatgcgcggaggtgggcgatgggggaccgaggccaggactctccttggggtttgggggcttgacctgggtgcgctttctggacagactttacagcccccgacccgcctggcggcctcacctactttcccgtggccgacctgtctatcatcgccgccctctatgcccgcttcaccgcccagatccgaggcgccgtcgacctgtccctctatcctcgagaagggggtgtctccagccgtgagctggtgaagaaggtctccgatgtcatatggaacagcctcagccgctcctacttcaaggatcgggcccacatccagtccctcttcagcttcatcacaggcaccaaattggacagctccggtgtggcctttgctgtggttggggcctgccaggccctgggtctccgggatgtccacctcgccctgtctgaggatcatgcctgggtagtgtttgggcccaatggggagcagacagctgaggtcacctggcacggcaagggcaacgaggaccgcaggggccagacagtcaatgccggtgtggctgagcggagctggctgtacctgaaaggatcatacatgcgctgtgaccgcaagatggaggtggcgttcatggtgtgtgccatcaacccttccattgacctgcacaccgactcgctggagcttctgcagctgcagcagaagctgctctggctgctctatgacctgggacatctggaaaggtaccccatggccttagggaacctggcagatctagaggagctggagcccacccctggccggccagacccactcaccctctaccacaagggcattgcctcagccaagacctactatcgggatgaacacatctacccctacatgtacctggctggctaccactgtcgcaaccgcaatgtgcgggaagccctgcaggcctgggcggacacggccactgtcatccaggactacaactactgccgggaagacgaggagatctacaaggagttctttgaagtagccaatgatgtcatccccaacctgctgaaggaggcagccagcttgctggaggcgggcgaggagcggccgggggagcaaagccaggcacccagagccaaggttccgccctccaggaccctgagtgcttcgcccacctgctgcgattctacgacggcatctgcaaatgggaggagggcagtcccacgcctgtgctgcacgtgggctgggccacctttcttgtgcagtccctaggccgttttgagggacaggtgcggcagaaggtgcgcatagtgagccgagaggccgaggcggccgaggccgaggagccgtggggcgaggaagcccgggaaggccggcggcggggcccacggcgggagtccaagccagaggagcccccgccgccaagaagccagcactggacaagggcctgggcaccggccaggtgcagtgtcaggacccccccggaagcctcctgggactgtcgcatggcacagcccgaggccctgaaggtggcagcacggctcaggtgccagcaaccgcaagcatcaccaccggcggagggtccagtgctcactttccagagtgagaagntgannggcatgaaggagctgatggtggccacaaagatcactcgagcgccattcaaagcctgcagtcacggcacagtcgcagttgcagatgaggaagcagaaagtgtccaccctagtggttaactctgtcttgtctcaagcggaacgcgaaaggcctcttgaactaatggggactacggaccgttgttgggacccaggtccgcctaatccccaattgtaacccatgtctgcccgacccaaggggacagcttcccttaacaagct

SEQ ID NO: 104820 - DNA, 1867 bp, Homo sapiens
  misc_feature (10)..(10): n is a, c, g, or t
  misc_feature (15)..(15): n is a, c, g, or t
  misc_feature (1604)..(1604): n is a, c, g, or t
  misc_feature (1608)..(1609): n is a, c, g, or t
ggatgtaagngggangccgccgcccaccgcccgccgccatggggctgaaggccgcccagaagacgctgttcccgctgcgctccatcgacgacgtggtgcgcctgtttgctgccgagctgggccgagaggagccggacctggtgctcctttccttggtgctgggcttcgtggagcattttctggctgtcaaccgcgtcatccctaccaacgttcccgagctcaccttccagcccagccccgcccccgacccgcctggcggcctcacctactttcccgtggccgacctgtctatcatcgccgccctctatgcccgcttcaccgcccagatccgaggcgccgtcgacctgtccctctatcctcgagaagggggtgtctccagccgtgagctggtgaagaaggtctccgatgtcatatggaacagcctcagccgctcctacttcaaggatcgggcccacatccagtccctcttcagcttcatcacaggcaccaaattggacagctccggtgtggcctttgctgtggttggggcctgccaggccctgggtctccgggatgtccacctcgccctgtctgaggatcatgcctggagctggctgtacctgaaaggatcatacatgcgctgtgaccgcaagatggaggtggcgttcatggtgtgtgccatcaacccttccattgacctgcacaccgactcgctggagcttctgcagctgcagcagaagctgctctggctgctctatgacctgggacatctggaaaggtaccccatggccttagggaacctggcagatctagaggagctggagcccacccctggccggccagacccactcaccctctaccacaagggcattgcctcagccaagacctactatcgggatgaacacatctacccctacatgtacctggctggctaccactgtcgcaaccgcaatgtgcgggaagccctgcaggcctgggcggacacggccactgtcatccaggactacaactactgccgggaagacgaggagatctacaaggagttctttgaagtagccaatgatgtcatccccaacctgctgaaggaggcagccagcttgctggaggcgggcgaggagcggccgggggagcaaagccaggcacccagagccaaggttccgccctccaggaccctgagtgcttcgcccacctgctgcgattctacgacggcatctgcaaatgggaggagggcagtcccacgcctgtgctgcacgtgggctgggccacctttcttgtgcagtccctaggccgttttgagggacaggtgcggcagaaggtgcgcatagtgagccgagaggccgaggcggccgaggccgaggagccgtggggcgaggaagcccgggaaggccggcggcggggcccacggcgggagtccaagccagaggagcccccgccgccaagaagccagcactggacaagggcctgggcaccggccaggtgcagtgtcaggacccccccggaagcctcctgggactgtcgcatggcacagcccgaggccctgaaggtggcagcacggctcaggtgccagcaaccgcaagcatcaccaccggcggagggtccagtgctcactttccagagtgagaagntgannggcatgaaggagctgatggtggccacaaagatcactcgagcgccattcaaagcctgcagtcacggcacagtcgcagttgcagatgaggaagcagaaagtgtccaccctagtggttaactctgtcttgtctcaagcggaacgcgaaaggcctcttgaactaatggggactacggaccgttgttgggacccaggtccgcctaatccccaattgtaacccatgtctgcccgacccaaggggacagcttcccttaacaagct

SEQ ID NO: 104821 - DNA, 482 bp, Homo sapiens
ggggtctcaccatgtggtccaggctaagaatttgcgtttctaacaagttgccaggtggtgctgctgcagctgatcctgtgaacacgcttggcgaagcacagcactagcagaaacaggacagctcctctgaggatgaaccgctgagtttctggaatgttttctgtggcagtcagtgtgcttgcgttttccttggatgatctcagattgtccccatagcctgccagaaactggcgctttcattatacccactttgcagatgagaatgccgaggcaccaagagaatcagacagctgtgggcacagactcccgagcctgtcctctttactaccacgctgatcagcagtcctcaaaatgggctccccagactagcagcatcactggaaacctgttagatctgcagattcccaagcccattcagacctactgaattagcacctctgcaggtggctgcggtgggctcagtattttgtggtttcacaggc

SEQ ID NO: 104822 - DNA, 425 bp, Homo sapiens
tgatgattcaagctcattacatttttcattagattctcctaagaagcacgcaacccagatcccttgcatgcacagttcacaataaggttcgtgctcctttgagaatctaatgcctccactgatctgacagaagatggattgcttgcctgccactcacctcttgctgtgcagcctagttcctaaacccagggattggggtcccctgtcctagatgacatcttcttccaatataaggccattttgtctacactgaaaacctgttgtctagttgtagccatcttcatcaatgatcttagctccatattctagataacttgtgcagcttctacatcagcacttgctgcttcaccttgcacttctatgttatggagatggcttctttccttaaatctcatgaactgccgggcacactggctcatacctgt

SEQ ID NO: 104823 - DNA, 444 bp, Homo sapiens
acagacattttttaaagcactgctgctctgagaagagcacccggaagttatagaagagcaactaaaacacacacacacacagtgtcttccttgaagaataactggtcagtcgagagacgcaggtggcctgaggccaatgacctcagtggctcaataaatcccaggaaaagatcccatggaaggtcactgctgtcatcctgggctagggaggaaggaaacaaagcttcaggctacaggttggagacagtctgggacccaggatgaatgtaactgagccttcacctgtcgctacctcagtttacccatctgcaagatgcagtggtccccacatataaatgtcctttctgggctgggcacggtggctcacgcctgtaatcccaacactttgggaggccgaagcgagtggatcacctgaggccaggagttccagaccagcctggtcaa

SEQ ID NO: 104824 - DNA, 288 bp, Homo sapiens
taaaaatgtatataacctacagtctaaaaaacactgataatacagctcttcaatatgtcatttttaaatgttaaagttgagggttaagatgataatggataaattatttgtaacaaataaacaaaaccacctttcaaagcaacaacagtagcaagctcataaaacagatggaagtgatagagccaacatcaggctatagatgttaactgtaacaaatgaggggataaaggcaacaactaagccttcctaaggaagaagacctgcttcatggaaaagttaccacagcgc

SEQ ID NO: 104825 - DNA, 186 bp, Homo sapiens
aatttggcaactctcttgatgttgttgccatttttggtgggaagagagggatacgtatttacatgtatgttgaggtgggagagggagagacatggaagtgactagaaaagtactctccaccgcttgcagtgagccgagatcgcgccactgcactccagcctgggcgacagagcgagactctgtctc

SEQ ID NO: 104826 - DNA, 481 bp, Homo sapiens
ctgaagtggagagaatggttcctggagcctagggaaggtaatttttatgagaagacatgacctgttaaggagggagctagaaaagtaaataactgatctcaactcttctcataccctccagtctcttgtttgtgtcttgtaagggcaagagggcaagggatctcattgatgcagttgattcaagtcagcctcttgggtggagtagggtggaatgggaaagggacgatacatagcatcttttctagtttgattttttcttttttgagatagggtctggctctgttgcccaggctgaagtgcagtggcatgatgttgattcattgcaacctctgcctcccaggctcaagctattctcccacctcagcctgtgcctcctaagtggctgaaactacaggcgtgtgccacgcagcccggctaatttttgcattttttgtagagatggggtctcactttgttgtccaggctggtcttaaacacttaa

SEQ ID NO: 104827 - DNA, 145 bp, Homo sapiens
gaccctcttttccagcaacatctttcagcaacaccgtgaacggacaccaagacaagacccccactccaaggaaaacaatctacacagaatcagtcagctgacacctggcaagtgtgctgtcttttagaatcgtgaagccattctg

SEQ ID NO: 104828 - DNA, 210 bp, Homo sapiens
tggcatttgcttctgttccttgtatctgtggaagtcaagtagcccttctcaaaaatgagaagccaagctttaaatagcaaactacagggtattaaaagactaactcttcagttaagaacactgtagaaatggtagaccaacttaaagtctaccttttaacaatctttaccccaaacctaaagattctaggggtcacttatctctattacg

SEQ ID NO: 104829 - DNA, 739 bp, Homo sapiens
ttttaaatggaattaagaggaggtttttagagctttggtaataatcagcaccctgctgaatgttgctggtctcctggaatccttttatgttgtcagccttacctgatgaagacttgccccatttctcctggtggctggccttgctggcgtgtgcgtaacagatccaggtcatgggatgtctggggccctggtggtgatggtccggttccatcactaccactgccagagcattttgcaaacaagtactgtgtactggtttgtctcaaggatccagaatctttttttttttgaaacaaggtcttgctttgtcacccaggctggggtgcagtggtacaatctcggctcattgcaccctctgcctcctgggttcaagcagttcttgtgccttggcctcccaagtagctggaattataggcatggaccaccaaccccagctaatttctacatttttagtagagatggggtttcactgtgttggccaggctggtcttgaactcctggcctcaagtgatccacctgccttggcctcccaaagtgctgggattacaggcatgagccactgctcctggcagattcagaatcttgaaggctgcaacttcccctaaatggaaggcattgaacaatcagatttcaagatcagaattcccagtagaaaactcctgctaataaagagacgtccatgagtctgaggaagtaaattgctcctgctaagtctcctccactccatcttattaaattt

SEQ ID NO: 104830 - DNA, 1141 bp, Homo sapiens
  misc_feature (795)..(795): n is a, c, g, or t
  misc_feature (1140)..(1140): n is a, c, g, or t
ggggattctgggaggtgacgtcgcgggtctcggtcgcggggcccgtttgcagagcccgcggcgccgggaggactttgttcttcttcagaagagaaaactgaagaaggaggaatggctgtggggctttgtaaagccatgtcccaggggttggtgaccttcagagatgtggcgctagacttttcccaagaagagtgggaatggctgaagccatctcagaaggatttatacagagatgtcatgttggagaactacaggaacttggtatggcttggactctccatttctaagcccaacatgatctccttactggagcaagggaaggaaccgtggatggtggagagaaagatgtcacagggtcactgtgcaggttctcactctgttgcccaggctggagtgcagtggcatgatcttggctcactgcagcctatacctacggaactcaagcaatcttctcacctcagcatgcacaccactgcacctggttaatttttttgtttatttttcttgtagagacgaggtctcactgtgttgcccaggctggtctagcactcctgggctcaagcgatcctcccatcttggcatcccaaactgttgggattactggcatacttccacttttggagaattagattatttttctttttcttactgatttgtagtagaactaaattctgggcattattcatttttctatgatatatgttttagttgttttttctcagattgtcccttgccttttgactttgtgttttctcccgcacacaagttttcaaggttaatgtcaaattcattccnttcaaccagatgtcgtcaggatggtagtgaggaggtcatgctccccttcactgtgttctctgtgtcttgcaggtttttaatgctgtaagtgtgtttctcttgatatttttttcatgaccttttccacaatgatagggaattttacaagtcaaccctggttgagttctttcacagagattttggtggaagaaaggtataaaatgcaagggcttaggtcctattattggttttggaatgttctttttttgttcataattttcttttatattattgattacttttgtccaagtttatttaaaataattttcttaagttctgaaataaaatccttatggaattctggtng

SEQ ID NO: 104831 - DNA, 5130 bp, Homo sapiens
  misc_feature (2155)..(2155): n is a, c, g, or t
  misc_feature (3377)..(3377): n is a, c, g, or t
  misc_feature (3446)..(3446): n is a, c, g, or t
ggggattctgggaggtgacgtcgcgggtctcggtcgcggggcccgtttgcagagcccgcggcgccgggaggactttgttcttcttcagaagagaaaactgaagaaggaggaatggctgtggggctttgtaaagccatgtcccaggggttggtgaccttcagagatgtggcgctagacttttcccaagaagagtgggaatggctgaagccatctcagaaggatttatacagagatgtcatgttggagaactacaggaacttggtatggcttggactctccatttctaagcccaacatgatctccttactggagcaagggaaggaaccgtggatggtggagagaaagatgtcacagggtcactgtgcagactgggagtcttggtgtgaaattgaggaattatctccaaaatggttcattgatgaagatgaaatatcccaggagatggtaatggaaaggctagcaagtcatggccttgaatgctccagtttcagagaagcctggaaatataagggtgaatttgagctacatcagggaaatgcggagaggcatttcatgcaagtgacagctgttaaggaaatctctactgggaaaagagacaatgaatttagtaattctgggagaagcatacccctgaaatcagtatttttaacacaacagaaagttcctaccatacagcaagtacataaatttgatatttatgataaactcttcccccaaaattcagtcataattgaatataaaagactccatgctgagaaggaatctttgataggtaatgaatgtgaagaattcaaccagagtacgtaccttagtaaagatataggaattcctcctggggagaaaccttatgaaagtcatgatttttcaaagctcttaagtttccactcattatttactcaacatcagaccactcattttggaaaattaccccatggatacgatgaatgtggtgatgcctttagctgttactcattctttactcaacctcagagaattcacagtggagaaaaaccatatgcatgcaatgactgtggaaaagcctttagccacgacttctttctcagtgaacatcaaagaactcatattggggagaaaccttatgaatgtaaggaatgtaacaaagctttcagacagagtgctcaccttgctcaacatcagaggatccacactggagagaaaccgtttgcgtgcaatgaatgtgggaaggcctttagccgttatgccttccttgttgaacatcagagaattcacacaggtgagaaaccatatgaatgtaaagaatgtaataaagccttcagacagagtgctcaccttaatcaacatcagaggattcacactggagagaaaccctatgaatgtaatcagtgtggaaaagccttcagcagacgcatagcccttactctacatcaaagaattcacacaggagagaaacccttcaaatgtagtgaatgtgggaagacctttggctatcgctcacacctgaatcaacatcagagaattcataccggagaaaagccctatgaatgcatcaaatgtgggaagttttttaggactgactcacaacttaatcgacatcatagaattcacactggagagagaccatttgaatgcagtaaatgtgggaaagccttcagtgatgctttagttctaattcaccataagagaagtcatgcaggagagaaaccctatgaatgtaacaaatgtggaaaggccttcagttgtggctcatatcttaatcaacatcaaagaattcatactggagagaaaccctatgaatgtagtgaatgtgggaaggcttttcatcagatcttgtccctaagactacaccagagaattcacgctggagaaaaaccttataaatgtaacgaatgtgggaataattttagctgtgtctcagcccttagacgacatcagagaattcataatagagaaacgctctgattataacaagtataggaaagaaaacatgtggttaccactcaatccttattaaatattagtgagttctttttggttagtaattctttgaatgtagttcatatttcagttcatgagtatccgttatttgaagtagctcagtagtagacatctgttacttttttttttttcagacagagtctcgctctgttgcccaggctggagtgcagtggtgtantcttggctcactgcagcctctgcctcctgggttcaagcaatcctcctgcctcagcctcctgagtagctgggattacaggtgcctgccaccatacctggctaatttttgtatttttagtagagacggggtttcaccacattggtcaggctgatctcgaactcctgactttaggtgatccacacgcctcagactcccaaagtgctgggattatgggcgtgagccaccgcgcctggccacatctgttactttttgatctgttctatacctggcttagcccaccctcaatgcatatgattcagatgaaactgttaatcagggacagcagtggactggtcacaggctggccaattatttcccccaacctagtgataagggattggcaaatggccctgtctggatcaatgaagtcctttgcgggtattcctatgggcagtaagagaggttttattctggaactgcaagtttcaaggatttaataagattaaaaactcaccagtagcctttttgccactcatgaggaaagctttcccaaagagaaatctaacagaggaaaatggagatgagagacagaaatatgatgatacagcttgatctcctggatccagtcattcctgacagctacaccatcaccatcctttttcattttttgtgatccaataaatttcctttttttgcttaatttggattatatttttgcctcatggaattagagtgctgattcacacattctatgtttgctatacataaaagaaagccttaattttttacgtggcataattatttatcctgaggagcaaccttctgatataacaagtttatgaaagttgaatacacagccttcataaaactgagataattgttacattttatttgtcgataaaactattttagtgtttcttagtttttttcacattatggctgaatattttaaaattcaccaagtaaaattctttaacaggcttccccttaaggagttaaaatcatttgtcacagtgactcaccatttgcctgtaaagagagaatggaaagctaagagaataatactttcatttgtttaatgaatggctcttcatcttcaaggaattacttgattttcttctttcagtatgggtctaaacatattctgtggcagaatataataacaattaaattgtaaatgaggtcttttgtgggtgggctctaaatttggtttaagacccagtgcggtggctcacgcctgtantccgagcactttgggaggccgaggtgggcagatcacctgaggtcaggagttcgagaccagcctgaccancatggagaaaccccgtctctactaaaaatacaaaattagccgggtgtggtggtgcgtgcttgtagtcccagctactcaggagggtggggcgggagaatcacttgagcctgggaagtggaggttacagtgagcgaagatcgcgccattgtactccagcctgggcaacaagagcgaaactccttctcaaaaaaaaaaaaaaaataaataaataaataaataaataaataaataaatttggtttaagaagtgtatggataacttctttgcagctagagatatcaaacaaagatattgctggcagaaagaatgagtcatttttaacaaatggtaaaagtaaagcagttaatgcctaaaatttttagagactaaatcatttccattattgggagtaatgaggaagatgaaggtgtagggcaatacgtttcttttttatctgagtggatatagggaaataaactggtgatatggcagctgggccatcttgaatagtgagaaccagtaagaatattgggtattgcctgaagagcatctgtaaaaacatatcagaacaaatgaaagaggaaagaatgaaggatttatatgtgtgcatagagtgaatatatgtgtgcatagagtgaaatattcaacttatacttatttctaataaaatctgaaaattatttttcataaatattcaaattccctttaaacagcttaaaatacagatttagtgactcagtacttcaaaccttgaatagaaacaaatatgattataaaatatttccaaacttatgttacatctaatctgaaacatattaatattataagcttaattcatgtcatcatttctttattttttattatatttcctggaggtataaggatatttatttttataatttccaagcactgagtaataatttatttcagaaagtttcagaaggttacagtaaactttaccaaacttgaagaagaatgactcagatcagtaagaagagtctgagttactcactaattgatttttattttatttatttattttttttgagacagggtctcactctgttatccaggctggaatgcggtgacacaatcatggctcgctgcagcctcaacttcccaggctcaagcgaccctcccgcctcagcctcctgagtagctgggactgcaggtgtgctctaccacacctggctaagtttcgcgtttttctgtagagatggggtttcgcgagttgcccaggctggtctccaactcttggcctggagtgatttgcccatctcggcttcccaaagtgctgagattatagggatgagtcactgtgcacagctactaattgatttttgatctatgtatggcacctgatttcatcctcgagagtgacgtaaacctaagctactggttcattctctgtttatatagttaaacttcacttgtaatgttgataaaatcttttgtacccatgtgtttagcttcagtgtattttacaatctgatgtttctcctcacaatgaagtactaaattttgtttcttttcaactgtacaacccattgtcttgtgatatattgacctgatctcttaggattagtgaaaatttatgctttattaatatttgattgttattaggaccatctagagatttctgtttatgtgtgtgtatgtgcatctgaagatgtgtattttatttaaattttttgtattaagtgcc

SEQ ID NO: 104832 - DNA, 723 bp, Homo sapiens
ggtgcaagaattttgccttttttagggatttatttgtatctgaaaaataaatgataaagaaggagtatattaatttgtaggccatttttatggttttatgtgataacatttaacttttggtaaaccttatattacttactgagaaactattttttaaaaaagatagggaggttaagataaaatactctttttgctttagtagacaaaatttgaaatgagcattctgaattgacatggatcataggaatttatttgaccactacttcattggcttagatttgattctttttttgacagttacctttatttgctttttactgatcaatttctcttatcatacagtagaagtatctataaagtaatgttcaaatgtacatattggagccttgattttaatactataatatttcaacattagcatacgaagtagtggattacaagaaatactaacaagctcttgttaaaatacagtttgtcacatgaattctacaagtaacgtcacaaagtgttactgtattttttccccctagtgtgatggtgaaaatagtttgcatcatagtgaaagagaatagacattttagaaattgtcttttaggacagtttcctttgtgacttaaaataatcttgtattgttaagatgttaaacttgttgagtcctagttccatacaaagtaccagccttttaattttattaatatagttataaattctttttatataatt

SEQ ID NO: 104833 - DNA, 825 bp, Homo sapiens
gaggtgtcactatgttggccaggctggtcttgaactcctggcctcaggtgatccgcccttctcggcctcccaaagtgctgggattacaggcatgagccactgtgcccggccacctgtttctctaaagtaataattcgtcacagctggtgccagggaaggacagtttcctaatagatagaaaatacctgaaactgatcagcagcttcccagtaagatctcaggaatggggagaagttataatgcaagatcccggaagtatgccaatatataaagccccaagtccagaggtcaagctgcacactggtttctcaggtcatcccacttccctcttccaagttgtattttccttcttttttttccctttccttcctttccttactgttctaaagctttttaataaacttccactcctgctctgaaacatgcctctgtctcttctgccctatgcccctcggttgaattctttcttccaaggaggcaagaattaaggttgccgcagatccgtacagattcaccgtgggtaactccaggtaactcagatatcttccatcagtaacgaaactgtttaatttactaatgaaccattgattaaattatgtaacactattttttaaaatcgaggtaacattcacataaatttacattcacaacaaatttaaacttcatcatttaagaatttaaaatttaggctaagcacagtggctcatgcctgtaattttaacactttgagacaggaggctgagacaggaagattgcttgaggccaggagtttgagaccaggcttggcaatatagcaagaccttgtctctacaaaaaatagaaaaa

SEQ ID NO: 104834 - DNA, 835 bp, Homo sapiens
ccccacgcgtggaccctagaagaccgactaggtatgggcgttcactcggagcctctgttcacgctcttgaaaaccgaatgaacagagaagtgccctccacccttcgcctgcgccagggcagttaacgtgcaggcgccgccgggattttcctggaacaaacccgggcacttgatcttccgcaccctcggagctgccctgggaagtcgaaacaagtctgggcgcccggactgcggagactggaaagcagggggcggagggcgggagactgggggcgggaagtggaggtgcaggctgcagctggggaccgcggtgggcgttggaggggagggtctgtgtgcgcggctgtcctccagcgctgggggagcggacgggccaggggcctctagggaagcggcgctccgggaccggggtggctttcccgtctctgtgtgcgcggcgatccccacacccagctcgggcggaggagccctgagagaagcggctagctgagagtggggtgggcgttttggggaaaggtttgcgtgcgctgcggccctaccgctgctagagaagtggaagagagagagtgggcgccgggagggggtctataggcgccgcgacctaccccatctccctccacgcttgtgggggagtgagtggggaaggggctttgggagaggcggcgcgcgggcactgaggtgcatcgtgagcttcccggacttgacagcatcaaaggaaaatcctggcgagcagccagggccagcgagcgaccccagcagcagggacgcggccgtgcgagagctcgcggacaggcgagggggatcccaggggagcagctgctgcccacgggccacgg

SEQ ID NO: 104835 - DNA, 115 bp, Homo sapiens
gtggcagccaagttcatcagttatgtgaagaattgcttccggatgactgaccaagaggctattcaagatctctggcagtggaggaagtctctttaagaaaatagtttaaacaatt

SEQ ID NO: 104836 - DNA, 437 bp, Homo sapiens
tttctttgcaactctgagctcttattgccaacaatttgggagctcatctgggattaccgttctccttcaggagaagcccacgatcacctctcttgaggagaggcatcccaccacctctttgcggtggcctcacaaacaggagattgggtcccacccaaggtgacacataaacccagactctcagcaacacaggcggaaaggatcctcacatactgcggtgaccaggtaactgcacagaccaagttaagaaaagtcacaggggcgacaaagtatttccttggtggtcagggcattttagaggttgaaagtgtgtcaatgagacgcacaactgagtgcgaagcgagcgatgattccggatctgtgattccatggtcacctcgtatagcttatggtggattcctgtcatggggcttatactgacacaccaatgctaagga

SEQ ID NO: 104837 - DNA, 342 bp, Homo sapiens
ccctttcagcgatgtgcattttgtaagcactttggagccactatcaaatgctgtgaagagaaatgtacccagatgtatcattatccttgtgctgcaggagccggctcctttcaggatttcagtcacatcttcctgctttgtccagaacacattgaccaagctcctgaaagatgatgagttcctgtcctttgtagggacacggatgaagatggaaaccatcattctcagcaaactatcgcaaggacaaaaaaacaaacactgcatgttctcactcataggtgggaattgaacaatgagaaacatggacacaggaaggggaacatcacacaccggggactgttg

SEQ ID NO: 104838 - DNA, 359 bp, Homo sapiens
taaataagagactgttactcatgctggagtgcagtggccaatcatggttcactgcaaactccacctcccaggctcaggtgatcctcccaccttagcctcctgggtagctgggaccacaggtgcacaccaccacacctggctaattttttgtagagacaaggtttcaccacgttgcccaggctggtctcgaactctcgagctcaagtgatctgctcacttcagcctcccaaagtgctgggattacagacatgaaccaccgcgcccggccagggtattttcaagtgtgaatcttgtagcccctaccaccattccctgccaccgttttggcattctttgaagttaaagctttcttatcatag

SEQ ID NO: 104839 - DNA, 350 bp, Homo sapiens
gaggtgaattgatgaggaaacaggcagtaagaagttattcagcatctgtctttttaatcatctaatttgtgcaaaactgagtgggagtttataaactactctttatagcactgccgtaggatttttgcctcatttagtatttagcacatgtgagtcatttattccttcttctcaatgatggtaaacagtatgatggtagggactgttttatttttttgtttaattagtttttgtttttgtaacagcactaactacagtgctcttcccacaaatatcaacaaatacctgttaaataagaaaacatttaagggtttgacagtgaaagaaaagaccaagcaagataacagcac

SEQ ID NO: 104840 - DNA, 443 bp, Homo sapiens
tttttttgagaccaagtttccctcttattgcccaggctagagtgcacaggtgtgatcctggctcactgcaaactctgtctcctgggttcacgcaactctcctgcctcagtctcctgagtagctgggattacaggcgcccgccaccatgcccagctaatttttgtatttttagtagagatagggtttcacgatgttgcccaggcttgtcttgaactcctgaactcaggtgatccgctcacctcggcctcccaaagcactgggattacaggcgtgagccactgtgtctggccaggattttgctttttagacattgtggttcatttttctatacatgggtgcacgttacacaatctccatagcagatttttctcttttagtaatgtaatgatctcccactaggtatgtggcaaaatactggaacacgagggaaaatcagagcattg

SEQ ID NO: 104841 - DNA, 168 bp, Homo sapiens
caccaaatatgtccatgtcctcataaaaagagaggagacacacagagggaagatgatgtaaagacagggaaggaggctatgtaaagatataggcagagattggagttaagcagctgcaagctgagaaaagcaaaggattgcgggaaccaccagaagcgaggaagaggc

SEQ ID NO: 104842 - DNA, 309 bp, Homo sapiens
ctgtttacatttctcctgtccacttaaaaacatgtcctctttctcagtttgttttgacattggtatttgccagttttttctaaggcctaagtggttgtaatttctttttcgttgcggatatccattttcgttcctggtttttgcattttttttcccgagagcgctccaaacagcacgacgatcccggtggcccgcagagtgcgcgcagtcggggagtgatacgtcgcactccagcgcctgcgcactcgtcgctgcgtctctgcgccccgcactggacgtgggcacgccacgtgacccccccccccgccg

SEQ ID NO: 104843 - DNA, 251 bp, Homo sapiens
gggcagagggtgcgccggagctgctctctgattcaggtggtcacccgttttcatcccagatatccattttcgttcctggtttttgcattttttttcccgagagcgctccaaacagcacgacgatcccggtggcccgcagagtgcgcgcagtcggggagtgatacgtcgcactccagcgcctgcgcactcgtcgctgcgtctctgcgccccgcactggacgtgggcacgccacgtgacccccccccccgccg

SEQ ID NO: 104844 - DNA, 259 bp, Homo sapiens
tatgatgcaggcaaaagtgatctgtgatctgttaccattatgatgcaggcaaaagtgatctgtgatctgttaccattatgatgcaggtgaaagtgatctgtgatctgttaccattatgatgcaggcagaagtgatctgtgatctgttaccattatgctgcagatgaaagtgatctgttaccattatgatgcaggcagaagtgatctgtgatctgttaccattatgatgcagatgaaagtgatctgtgatctgttaccat

SEQ ID NO: 104845 - DNA, 375 bp, Homo sapiens
ggaatatcatgatgttctccaagttaatgaggaacatatcgagcatcagaaagctaaatcattataaaatgaaatctgcaagattttctttggattttagctttccaatcatttttttaaatatatatatttataggtttctaaaagattctataatgtggtcttctctccactaacatgaataaattcattttaccaaacatattctctgaattcattcacataaatactaatgtttccaaacatgaatataaagtgggcaaaataaaaaacagtggtctctggagagcttacatctgtcacaagttggcttaggctattgcaaatgaatttgtaagatgagccaagaaacttatcaaagggaaggaaaacaat

SEQ ID NO: 104846 - DNA, 349 bp, Homo sapiens
tgagacggggtctcgctgtcgcccaagctggagtgcaatggccacccggcacctcgcccagctaattttttttggatttttagtagagacggggtttcaccgtgttaggcaggatggtctcgatctcctgacaggtggtatatagaaatgtattcagtataatttagaagtctcaaataaatagcttgtatttttttggtgacttgaatatattaataatacatttttgaactttttactgaagtgtaacataagtacagaaaagtaaatagcttatttgattttcacaaactgaggaacactccaaaccaggacccagatcaagaactagaacctaaccagcacccca

SEQ ID NO: 104847 - DNA, 189 bp, Homo sapiens
tgatagtaaagtgtgggcagtctcaagtaactcggtgtaacaagagcctgagtgtgtgaataggaaattaatcaaaactcccttgtatgttgtgttgggcagtacttagaggatcaggctatagcaactgtactttccccctcttctgtagaatagggattgggctggatcgtgatcctcaggcctttt

SEQ ID NO: 104848 - DNA, 728 bp, Homo sapiens
ggactggaaggtcagggagctcaggtgacgtgcccaaggtcatggagccaataaatggcagatccaaaattcataccagatcagccttattccaaaatccatgttggcgggagaggggaaatgcagtgccagagagatttaagatcctcaatttagactgctggtagggtaccaagaaatggcagctctgtgaataggatgttttactgtaaagctcgtaaatagtttacctgtttaatttttctctgccttttaaaagtttggcttttttaagattccataaacacactattcaatatagatgcagtaaaatcgtttttcttcaaaatacacagtattcagaagattctagtttcaggaattgtggagtagctcatatcagactactcctcccacagatagcaatgataaactatggacaaagtagcaaccaccaggacaaaaagaaacaactatttgaaggccctggagaataacaaagatcaggtagaaactggagagaatttcatgcttgataaaaaggaactgcattgggtgagatgcatgttacttatacggccccttcctgaagggcactttctaggccacagcacttaggagttagaactcaaaaagttccattattattggcttgagatcttgtaggatggggtttagagctgccagagtagctggaagtggaggagggaaatcccaaaaagaagggagactaaagggtgggactccca

SEQ ID NO: 104849 - DNA, 319 bp, Homo sapiens
tcctgttgagttgtaggagttatttatatattctgagtatcaatcccttttgagatatatgatttgcaaatattttctattttataggttgtcttttcactctgttgatagctaataaacaaaagtttttaatttgatgaaatccaatttatctatttttttacttttgttacctatgcttttggtttcaaattcaagaagtcactgtcatatccaatgtcacaaagattatcccctaggttttcttgtaagttttatagttttagctcttaaatctttgatccatttggagttcatttctgtacgtggcataattctt

SEQ ID NO: 104850 - DNA, 115 bp, Homo sapiens
ttggctgagcgcagtggcgtacacctgtagtcccatctacttgggaggtcgagatgggaggatggcttgccattactagaatgggcaaagtcacaggagggcaggttggaggagg

SEQ ID NO: 104851 - DNA, 194 bp, Homo sapiens
taagaattggatgaaattatagctataaaaatttaagacaaatctgaattcatgagaatataagtgaaacaagtaaaagcaggttgtttttagttaataaatgtttacttacagtaaggaaacagtagttgtttaatgctatgaacatttccacagcaatatatcaatagaggtagtctaaccttaataggcta

SEQ ID NO: 104852 - DNA, 338 bp, Homo sapiens
actaccgctactacctccctagttcaagccaccatcattcccagcctcaattgttacaaatcctaactggttctccctgcttctgcactttgctcttcataatttattcttgaaacaggcataactctgcctcagagaaatcctgttaagtgttaagatgtaagtcacctggccaggcgcagtagctcacgcctgtaatcccaacactttgggaggccaaggctggtggattacttaagaccaggagttcaagaccagcctggccaacatggtctctactaaaaatacaaaaattagcatggtggcacacacttgtaatcccagccactcaggtggct

SEQ ID NO: 104853 - DNA, 578 bp, Homo sapiens
ctttaagatctcagatgctctgatcaagcgcgtccaggtgtctcaggagcagtgggtcaaaggcgccctggagccgaaagtgtctgcggagtttgatctgactttggacagcgagccgctgctgcaggccatccaccagctggacttcattcagatgaaatgtagggtgccacccgtccccctactgcagctggagaaatgctgcacccgtaacaacagcgtcacgctggcctggaggatgccacccttcacccacagccccgtggacggctacatcctggagctggacgacggtgccgggggacagttccgggaagtgtacgtcggtaaggagactttgtgtaccatcgacggtcttcacttcaacagcacctacaacgcccgagtcaaagctttcaactcttctggtgtcgggccttacagtaaaactgtcgtcctgcagacatccgatgtggcctggttcacatttgaccccaactctgggcatcgggacatcattttatccaatgacaaccagacagccacctgcagcagctatgacgaccgggtggtgctgggcacagctgcgttctccaagg

SEQ ID NO: 104854 - DNA, 288 bp, Homo sapiens
gggtgacatggctctatatgattattattatttgaatagcaatcagtgtgtagctagacggagcacagaaggctccccacggtggggacgctctgtttggctttcatgcctcacctgtccctctactctcccaggctcacctgatctccatttggttctgtactctccctgtcatcctcactcaggtggtaggtcccagctgttaacctgagctattgccacctgtactgcaacctgccatggccaattttcttttctttctttctagttttcttttctttcttttgt

SEQ ID NO: 104855 - DNA, 399 bp, Homo sapiens
cactcaatctgtctctcaaactataccaagaagttgtccctgatttctagttttagaatcatcagagatgatttctggttttattttgatttgctttagacaacctaatatttcccatatataacaaataaaagcagtaaattagtgaatcagtagcagttcactaagagctatttggcaaaatcattctaccaaacagcttgaatacttccaaagcaccagaggacatcaacacattaagcacggcaaggcaaaaactgatgctattaatgattccaaatcttgaaatacattttaagaaaacaaaagttaaattgtattgactgtattgtttaatgagaagagtacacagtttataagaacatctgctctacaagaatccttttttctttttttgag

SEQ ID NO: 104856 - DNA, 683 bp, Homo sapiens
tcaggtgatgggtatcccaaaatctcagaaatcaccactaaagaacttatccatgtaaccaaataccacttgttccctaaaaactattgaaataaaaaaattaagctaaaacatttcaaaataagatagaaacattaaatatctaatgaatggaaaaataacacggaatatactgaagatacaagtgaaacaagtcaaaaatacaaattccaaaatgaaaatatctgtaccaacctcacgcaggtggcgtgaggtggtgctgagaaccagcaggccttctttgggccaaatttctggttacagatcccacaagtagaaaacaggacctttgggctctcccgtatttgcagaaggttcaacacttcattccttctaggttaaaaataagaatgtgggagggagatggctcctagagagccttgagctctaggttattcatctcctccccataaatcaagcaaaagcacccatgatctcctctccccaaacccagcttttaaattaagttttaactcagaatgagagtgacaaattccttaatagcagtatataaataatttttgtgttttgaccaaatttaattcaggcatatcttaaaaagatcaatgttaatcatatttaaaattatgttttgaagttaatttaaattatatgtttagtctgtcctagatattaaacacaat

SEQ ID NO: 104857 - DNA, 440 bp, Homo sapiens
caaaataggttcacgattcatatccaaattatgctttgcaattggaaaagggtttaaaattttatttatatttctggtagtacctgcactaactgaattgaaggtagtgcttatgttatttttgttcctttttttcctgacttcggtttatgttttccatttcctttggagtaatgcctgcctctagattgttctaaatagaatgtgggcttcataatttttttttcccacaaaaacagagtagtcaacttatatagtcaattacatcaggacattttgtgtttcttacagaagcaaaccataggctcctcttttccttaaaactacttagataaactgtattcgtgaactgcatgctggaaaatgctactattatgctaaataatgctaaccaacatttaaaatgtgcaaaactaataaagattacattttttatttta

SEQ ID NO: 104858 - DNA, 533 bp, Homo sapiens
caaaataggttcacgattcatatccaaattatgctttgcaattggaaaagggtttaaaattttatttatatttctggtagtacctgcactaactgaattgaaggtagtgcttatgttatttttgttcctttttttcctgacttcggtttatgttttccatttcctttggagtaatgcctgcctctagattgttctaaatagaatgtgggcttcataatttttttttcccacaaaaacagagtagtcaacttatatagtcaattacatcaggacattttgtgtttcttacagaagcaaaccataggctcctcttttccttaaaactacttagataaactgtattcgtgaactgcatgctggaaaatgctactattatgctaaataatgctaaccaacatttaaaatgtgcaaaactaataaagattacattttttattttattgtttgcccagtcactttttgttaacagaatattctaatgatatggagattttttacattacaaattgggggagaaggggagcgcgcgcgca

SEQ ID NO: 104859 - DNA, 108 bp, Homo sapiens
gacactctccaagatgaaattaaccatcacacatccaccccttgtcatcctggtgctcatacacatctccttacaccacgattaatctccactaaaggcgataacaag

SEQ ID NO: 104860 - DNA, 398 bp, Homo sapiens
cagggatgctgtcggggactatggcggggatgctgctggggaccttctgtagacgtggatgccgcccccaccgcacgatagcggcagtgcatttcttccttctgttttagtggtacattcacaggaaatcgcccgtttctagaacttgctgtttcatataggacctggtggtgtcagggagaccagcctggccccatgggaagcgtctgtggctcctgctgcccgtggttagcacactctgctgggggtctgtgtggcctatcatctgtggccacacggacgcagggcctctgggtgtctggcctggttcccacactgcccctcggaaggctgccaggatggaggccatgctctcgcgtgctggggcctttggatgcaaagtgctggcccgagcagtc

SEQ ID NO: 104861 - DNA, 497 bp, Homo sapiens
  misc_feature (17)..(17): n is a, c, g, or t
atctagaggatcctatnagagcatacccctctggaagagagagttgagtgaagctgtaggagtagatttcatagcttagaaagagtgtaaagaatctgaagagaaaaggactagggatgggatcctggaaacacccgcctgtaaggggttgaccagagagcagcactgtcctaagacttcaccaacaggcaacaaaagacctgtgctttaaaggtcctcatatggccttcctccagcagctacaaccctacccatagagtgaagactttgtggggggccaaggtgactagactagtctacctggtctctttctagatcagtctttgaatatttgatcctagaatttcctgcccatgtgtcccttcacaactgtcttctctgattctttcctctcttgactgtacgacacatatgggatcccctgtgtttaagggatggccaaggagcagctgtttgcagtcatgtgaccagagcttggacctgtaggctttatatat

SEQ ID NO: 104862 - DNA, 544 bp, Homo sapiens
tgctctcaaatcaggagacattaatttagaagttgacaccccctcggaaaataataacagaaacatctatctactctgaggcagataatcattcccactttacaaatgaggaaatgcggataatataaacttttgtgactcacctacattgctgatgagtaacaaatactggattcaaactcacatctcttctgcttcaaactccaggtagccttctctatgtgcagtggaggttataggattcttgtttcataggttgtcgtaagaatgttgacagggctttgcagacttcagagataagggggattgctgttgctgctgttaaaatataagccccaaggcaggaagaggtgaggattcacatgaggtatagagaagggtgtaagcagagaacaaagttagagggaagaataagttagtagcccagtgggatgggtgaacggatgaaaaagggtgtcagagaacagttaaccacagcgcgccctgatttcaaagctctggcctgttgggttgtgacattacatagatgtgttctgacccatct

SEQ ID NO: 104863 - DNA, 441 bp, Homo sapiens
gtgtttttcgttctgacaaagtattttcatgtggccttttattatagtatagttaagctagatttaaaatcacattccagactgagggaaaagcgtagtcgtttcagcacatttgagatttgccccttaaactaaaacagtattatatctcctttttagaacaacgtttttggaaattaactgacaagaaatataaactgaagcgtgtgccggctgggccctgcccccattctgttgcttcctataaccgctgttaatggatgggtggcagacccttctaggtttttcctgagcacacgggcagccgtcgtgctattcctaatattacggttttcttccttaataacaaccgatttcaatattaattggtgattaaataaattagtgattaattagttattagtattttatggcttcagagtatggaataaagaaatttac

SEQ ID NO: 104864 - DNA, 615 bp, Homo sapiens
cctgccttgggttggggaaaggagagcaggaaaacatcaaagagactctgtttcccaaggccggctttctgaggtccacagcgcccagcatataacaagatgttgtaacaaaacttatgggagttgggagctaggaactgtggatgaaaaccaataagtatataattataatatcacagattgtgatattgctttggagagacattttatctgttgtgataattaacttttattataggtcttttcccccaagtctctcctagtttttccctttgtgacttgttttttgtcacactttaaaattctgtgtgttaaattataaaattattcattatagcccaggcgaggtggctcacccctgtaatcccaaaactctgggaggccgaggcgggcggatcacgaggtcaggagattgagaccatcctggccaacatgatgaaaccccatctgtactaaaaatacaaaaattagccaggtgtggtggcacacgcctgtagtcccagctactcgggaggctgaggcaggagaatcgcttgaacccaggaagcagaggttgcagtgagctgagattgcgccactgcactccagcctgacaacagagcgagactccgtctc

SEQ ID NO: 104865 - DNA, 997 bp, Homo sapiens
gagatcattaccctgttctgtctcttgtaaaatatatgaaaactctcagggcatatattttctatagtcctccctgtatttaaggcaggaagttaaatctggccctattactttatcatggacaatagtagtagtcctgtattccttcttgaatcaaaattaatatatacttttctataaatttttccatttcttctaatttattgataagctaattaataattttatctttatcttttaattctgcttttctatagttaggtctacttttctatttataagaaatatatatgtgactttttgttttccttgactattctttccaaagttctgtattgtttgttagactgttcaatgaaacaaatttgctttctttgagccttttatttgttttttctgtttacttgacttttctgttattgttactattttctaatattatttttactttcttcaatttttaatagtttactatcttctgctttctcttagtttattctgttgtttcttttctactttattagttgaactttaatgttcttcctttattatttttgtaatacaagcacttacactataaatttagattgaaatagagcttttactgaaccccacaaattttggtatgtgatgttgtcattatcacccaatttttagtatttttacaattccattataatttctaacttgatcctgaaaatatgttttttaaaaatttccaggccagacgtggaggctcacacctgtaatcccagcactttgggaggctgaggtgtgaggatggcttgagtctaggagtttgagaccagcctaggcaacagaatgagactctatctctacaaaaattttaaaaaatacctgggcacagtggcgcatgcctgtagtctcagctgctcaggaggctaaggcaagaggattgcttgagctcaggaggttgaagctgcattgggccgtccttacaccactgcactccagcctgagcaacagagtgagactg

SEQ ID NO: 104866 - DNA, 339 bp, Homo sapiens
ttcttagtgaacatgttgaggatgtacatttccccgtgtattgaagggcggtgcccctcaccttaaatattgttaccagagctcattttcctttgcccagagtgcctggaacattgaggcccaaggtcaaagggatgggggtgtctgaaagctggcagagagccctgggcactagatggggtacaggcactctcacagcctgacatgatggaaggaacagatcacctgctacagagagtcagcagatcttcatttgtttgtttgtttttattagcttctcaaccagctcctcaaagtgggttccatggaccactgcatttccatgagattcagctgagt

SEQ ID NO: 104867 - DNA, 565 bp, Homo sapiens
  misc_feature (18)..(18): n is a, c, g, or t
  misc_feature (29)..(29): n is a, c, g, or t
  misc_feature (47)..(47): n is a, c, g, or t
  misc_feature (443)..(443): n is a, c, g, or t
  misc_feature (455)..(455): n is a, c, g, or t
  misc_feature (499)..(499): n is a, c, g, or t
  misc_feature (514)..(514): n is a, c, g, or t
  misc_feature (519)..(519): n is a, c, g, or t
  misc_feature (531)..(531): n is a, c, g, or t
aggaccaggattacgaanttaatacgacncaccaatagggaaatttngccctcgaggcccaagaattccggcacgagtgcagaaaacacctttgagtatatggatttcttcatatttctagttatttccttaaggtaggttcccaggtatgatttttgagtcaaaggatatgagagttttttaatcttgaaatgtggttaaattgcttctcaaaaggatagtattactagtactgtttcactgtattcttttagattgggtattagtgctgttttctccttcccccaacttactaggcgagaaaggtacttcactgttgtggttttagagtgcatttctttatgtaacagttttttcatgaagagtaaaattgattataatgtcctaagacatgaactttaaaaaatgtgatattacttttaattaagcggccgcaagcttanttccctttagtngaggggttaatttttagcttgggcactgggccgttcgtttttancaacgtccgtggacnggggnaaaacccgggcntttaccccacttaattcgccttggcaggcacagg

SEQ ID NO: 104868 - DNA, 458 bp, Homo sapiens
tgactagtcagtactgctcaaaaatgtcaagattatgaaagacaaagaaagactaaggtactttccagatttaaagaaattaaatagacaggactactaaatgcaatatatgagtctgaattggaccctggactaaaattaggcagacagttggtgaattttgagtcaagtctgtagagtagttaatagtatttctggttttgatcatcataatatggttatttaagatgttaacatttggtggatctgggtgaaaagtatatgaggattctctcgcagtatttttgcaatttttttaaatctgaaattcttttaaaatgagaagttggctgggcacagtggctcacacctgtaatcccagcactttgaaacaccaaggcaggagactcgcttgagcccaggagtttgagaccatcctgcgtaagatggcaagactccatctctttaaaaaaaaagaa

SEQ ID NO: 104869 - DNA, 737 bp, Homo sapiens
ttatgatccttagtttcaaccttaaaattaaaatacccactttattaacttgctcattccctatcttatctattgaaaaaggaacaaaacatgaaactgagcttagttatagatgaatgtcttttaggatgcagctcattaatatgatagatcagaggataatgatctttcagcttccctgggccacactggaagaattgtcttaggccacacataaaatacactaatgctaatgatagctgatgagctaaacaacaacaacaaatcacaaaatgttttaagaaagtttacaaatttgtgttgggctgatttaaacgccatcctgggccacagactggacaagcttgttctaaattaatcaatttttttcacttctataacattttttgttgttgttgacagtcttcttgctctgtcaccctggctggaatgcagtggtgcgatcttggctcactacaccctctgcctcccaagtccctctgcctcccaagttcaagcaattctcatgcctcagcctcccaagtggttgggactacaggtgtgtgccaccacgcccagctaatttttgtattttttatagaaacagggtttcactgtgttggccaggctggtcttgaactcctgtcctcaggacatccaactgcctcagcttcctaaagtgctgggattataggcattaaccaccacacctggcccctaacaagttttaattcactttatccatgaccattaacgtt

SEQ ID NO: 104870 - DNA, 217 bp, Homo sapiens
ggcatgtgatccgacactactgagagcccaactagtctgggaagccggacacaggcacagcagattctgatgcaggagatgactgaccacactgggaaactgctgctgagtcccttcccttcttgcgtctctcctgcacccgaatcagctgcctttcctgccatgctcccatctccaagggaagaaccaaatgctgggaggcccagtcatcagtcag

SEQ ID NO: 104871 - DNA, 739 bp, Homo sapiens
caaaaagatgcacatagaacccactgggatcacttcttatggatatagaagctggagaatgagagctgttttttggtgtaaatgagccaaaatcagggtcacttttgttcaagctgttattgacttggttttcactgtaaacactggaagtagtctcgaattttagcccaggatgtacagcctcagagcaaaagacaagtaggtggaacacagcatcccttcctctagacaccgttacattaaaatggcaatcattacaagtacagcaagtatacttcataatgaattcattattctgttcataagctttttagggactatattattatcccatctaagaggcaggatccactgatcatgcttggtcgaggttggcttcccctgcctgtttgcgaatggtgccttgtaacgtggagacagggagtggggagagtgagggctgagaatctctactcagaggctttttcacactgtccagatatcatgaaataaaaataaatattttgacagtctaagagaagattacagtaacgtgatctaccttaacacaatagaacacagataataaggacacttgtaagaaccagaattcacaaaaggacaaatattcctctagattcctaagagtttaaactaagcaaaaaaatcctaagtggtgaatttttaaagtgtcttttaaaatttcactaattcagtaaacaacatataaatggattttttattgctttcactggtttct

SEQ ID NO: 104872 - DNA, 221 bp, Homo sapiens
ctttgccttttagatgcgattttttttttttggggagaccaaatgtcaccagcttatcatctacattgatagtaccattctcagaacatttctcaactgacactgtatggacatacttagtaattcttttcacataaagcattacattctgattcaacatgaaatttttaaatagcattattattaattgagaagagcttccactcaattccattagtcct

SEQ ID NO: 104873 - DNA, 176 bp, Homo sapiens
gtggcaacccccgatctgttttttgtctctgtagtttcagcagtgtgattttaactgaaagccttgatgaaccagagcttattgttgttttttctgtggaaagcaagtgcacatcagggattcagtgtaaaacctttccaggggccgggtgcagtggctcatgcctgcaatcccag

SEQ ID NO: 104874 - DNA, 400 bp, Homo sapiens
ggttgttgattttaatgtcctcgataccgtacatgttacatacattctttggtgttgtacaatatttcacaagaaaaagatgatggaagacagtcgcccaccctcagccacagaaccgtcacccactggcccgggttctacacacgtactcccctcttccctccctcaaaccatgcctaccatctcagccttgacgaaaagcagctgtgaactaagtaaatgtcctttgctgaggggttccccaaggagggagtgagctaaggctgcttttgggggatgttaggattggaaagagcagttacaactgtccccaggttttgcccaccagtccagtaggttttcataaaaactaggtgtctatccaaatcttccaccaacatagctacttttagtttctttc

SEQ ID NO: 104875 - DNA, 216 bp, Homo sapiens
tatagaggtttccgattttgaatcagaagtttcacatttcgttgaaggtagacatcactctttctctatttgcttttgtgatttgtgtcttgctcaaggccttccctgtcctacccccatgtcataagcatgttctccactattttctttcagtccttaatctttcttccgtaggtagccaatgtccagcacgtttggtaatgacacctcctcggt

SEQ ID NO: 104876 - DNA, 363 bp, Homo sapiens
gctctgtcacccaggctggagtgcagtggcacaatcttggctcactgcaacctccacctcctgggttcaagtaattctcctgtctcaccctccaagtagctgggattacaggcgtgtgccgccatgcccagctaatttttgtattttgggtagaggtgggggtttcaccatcttgaccaggctggtctcgaactcctgacctcaggtgatccgcccacctcggcctcccaaagtattgggattacaggcatgagccaccacgccctgcccacttttgcattttaaaatgattaaaggaaaaacaaggagagacgtgaaccaaagggtgcaaagtttcagatgggaggaatacgttctaggaat

SEQ ID NO: 104877 - DNA, 793 bp, Homo sapiens
gtctgcttctaacaaataagatacagcaaaggggatgaaatggatgtgatcctgtgtccatgatcatgttacataactcagaaacctgctgggagaggaaacactctgccttgctggccttgataaagcaagcaaccatgttgggaaggctcctatggcaaagaactaaggactgcttccagccaacagccagcaagagactgaggcccttagtccaacaacctgcaagaaacttaattttgccaaaaccacatgagcttggaaatggacccttccccagttgagcctcagatgagacagcagctgtagccaacacctccatggcaggtttgcaagactctgcagcagaggacccagctaagccacgcctggattcgtgactcaaagaaactgtaagatccaaatgtgtgtcgcttcaagccactaagtttgtggctgcatggctatggcagccaatcagttgccatccccatttggcctgccagctgtgagacactgggcaagtttctcacctttactgagctgcagttttctcctctgtaaaatgagggcactgccaccatctaagaggattacatggagagtgagtgagagggtacatgggaaaggcctagcaagggcctggcacacagcacacactccatacatcagcactgcttaacactgggtttgcacaacaggctggattaatggaatcgaagtctagtgattacacatgacctatgcttataaaaagctttttaaacgtaaaaacattttgattttgtaaaataaaatatcaatggtgtgcgat

SEQ ID NO: 104878 - DNA, 126 bp, Homo sapiens
gacacctatgggcattcaatacagcagttccagtatttcaaagcagcatttccataacgtcatggaacttactttcaaaactaggagactaggggtttttgaaagtatttgttcccttactcccct

SEQ ID NO: 104879 - DNA, 452 bp, Homo sapiens
ttttttccctttgagacagggtctcactctattgccaggctggagtgcaatggcattatcatggctcactgtagcagtcttgaactcccaggctcaagtgatcctcccaccttggcctcctgagtagctggggctacaggtgcatgccatcatgcctggctaactttttaatttttcttttgtagagaaagggtctcactatgttgcccaggctggtctcaagtgatcctcacacctcagcctcctaaagtgctgggattacaggtgtgagccaccacacccagctaaatactgccttttaataatacaatcctttcataaataaacgattaggtataatgggaaaaaatcctccaagctgtacatactgaaatacttgaatccaataatttagaaatgatatcttacatttcatttagctaactagaccctaactagaatcctgggtgtac

SEQ ID NO: 104880 - DNA, 376 bp, Homo sapiens
attgttctgagacttggctgcatggctgaccacgtgtgcatgcgcatatacaagcacatacacacatgctgcaaatacgggcatatatacacacacacatacacatacacgtgcacacactcacataaatgtccatcttccaaggccatgtgcagtgctagatgtgcaaaggaattcaaacgcttggctcataatccagggcaactaggaagatcagggaaacaaactttgaaatttctcaaaggctaaagtgagtgaacttaagaatgatacaatttgtccaaagcaaactgctgaagtgtactacccagcccatcattagggaaacttcaaatcacaagctataagtagccaaggctgtatttcctgtaagact

SEQ ID NO: 104881 - DNA, 416 bp, Homo sapiens
tgcttatcacagcagtgggctaaagtattatacgtgtggttggcttcctcattacatgacaagccccactagggcagggacagcctcttattcttctgtttcccccgtgaccagtgcctgccacacaaatcatgagtaactattgcaggtttcacaaatggctggaaatgggagacacaaagatgaattagatataggcccagaccttaaagaatctataaggagtggaggaaataaaacatacacacaaagatattagagagtaaaaagtattaataatgcctacctgacaaaggggaaaaaatcactttaattagttcaagttttaatatggtgtccatattgtaccatgtaccccaaatttaggacaaacaatgtctgtgatttaaaagtttacacaaaaagtaaaaaaaaaa

SEQ ID NO: 104882 - DNA, 206 bp, Homo sapiens
ctttttcttgactcatccattcgtaggaagcttcatcttagacttcttagtttattaaagtttattaagagtatttggggctgggcatggtggctagtgcctgtaatcccagcgctttgggaagccgaggcgggtggatcacctaaggtcaggagttggagaccagcctgaccaacatgaagaaaccccgtctctactaaaaatac

SEQ ID NO: 104883 - DNA, 206 bp, Homo sapiens
ttcctaagataaaagtgagcaccccatcacctctatgggtgccccatgatcatgcccatttatcagggataacaccagtgactggggccagccaattcggggagggggcccttccaacccacagatcccagaaaaatgtactccttggagacatttaaaccaataccccagctggtgcggtggctcatgctggtagaatttgggaa

SEQ ID NO: 104884 - DNA, 695 bp, Homo sapiens
ctgataaggtgtacactccctgctggtgcacctgctgcccattcttagccacacctttttccaggtggctcagatcagcagtcaaggagaaagtgggggtggcagactaaattcattaaaccaccaaagcaccagcccagatggcctctttttcagttaattcgcattagctacttattcaggtttgataagtgggagagaagttgttacttgcagaagcatcttgtgatagatgttttgcattgttctaaggcctgagcagtcttggagacaggcagacactggtcgctcactgtgatcactggaggaaacagttactgagaggcagctgacagggtgaagggagtgggggaggaaggccacgcatttgtgcttcccaaggtcccacaggtgacatcctttaaaggaaactgtgtcatacttggggtggaagatttgaaaggcagaggaaaagaatgctttataattagggacctgtcttcatctcaggcgactcttcccgagcacgaactctgtctttccacacaccttgggaataaaagtattggagaaagagagtgaaagggtccctttgatcagtggtccagggcacgatatagaggtctcagttgttcaggaatctctgtctctagggaaccaaatttattccaacccccagatccttcactcattagaatgggattctgcaaatctct

SEQ ID NO: 104885 - DNA, 482 bp, Homo sapiens
caaaactattaaacttctagaagaaaatagaagggaaaggatttaggacagtaatttcttgtctatgacaccaaatgcaaggcaacaaaataaaaaaacaaacaaacaaatgggactacatcaaacttaaaaacttctgcatagccatagaaaacaatcaacagaatgaaaaggcaaccaacagtatgggaagaaataattgcaaatattatatctgataaggtattaatatccagaatatgtaaaaaaacaaatagatttaaaaattgggcaaagaagttgaatagatatttcttcacaaaagatatacaagtgggcccattaaacacataaaaagatgttcaatatcactaatcattaggggaactgcaaattcaaatttacattgagggtttcaccttcacatccctcaggatgggccgctttcaaccggaacaccaaaacaggcagtgttttgttgaggggtgtgaagaagctggaac

SEQ ID NO: 104886 - DNA, 328 bp, Homo sapiens
ctgtgatggtgccatcacactccagcctgggtgacagagcaagaccctgtctcaaaataataataataattttttttttaaaaaaatcctgagttgtttgtagatagtagcaaagacaagtgaaatttttggctacatatttcaaaattttactttctatcaatcattactactaaacatctattttatatattcagctatcataaccaagactaaagtatatcagattattattgttctatgtgattttcttttttactttgctgagtcagtgagtgggatcccaactaaattctatgaagagatcaaatctgaactaaaagttctt

SEQ ID NO: 104887 - DNA, 458 bp, Homo sapiens
gttttttccctaccctagcactggaattaatcatttctgcatggatccctacttccttttattgggaaatgacttttagaaaccaagatctgggcactagatgttgagttgtcattttttaacctgtcagaatgtcagatataaaaactgataacactaaatgttgctaagggtacggaaaatagacactcttgtaggctttggatgggagtataagtaagtataacctttggggagggcatttggcattatctattaaaattttaagtatgtagatttagaaaatccacattttgatctctattatatagaaatacttacatgtgttcaaagagataggcacaagaatattcattgcatcgtaatagcaaaaacctggaaacaaaatttcatcaataggggactgattggtttaaaattatggtacaaccgtgcaataaaatatcatgttggcagtc

SEQ ID NO: 104888 - DNA, 382 bp, Homo sapiens
aatttagtttagaggcaataaatgtttcaatcattggcatctaaactaggcagattacagtgtcctgttatctttgccttgttcctattttttctcttcattcccattttattttctaagtttaaatcttcatttcttcttggattattaatcaggtatttaatggttacttggcatgtccttcagtgtatggagctttcttaatatcaaaaacttcattttctgatctacagcaatactttcacgtacatgtttgtcatttgttaaatttgggctatttcatgtctatttcttgtgtatgtcttatcaaaaagtcatgagtttttagttggtataggtacttttttggaaaactggcaaggggctgctaggtaacaatttt

SEQ ID NO: 104889 - DNA, 88 bp, Homo sapiens
agaccatagtgtcttgagacctgaaactgagttggagactattaggaccagaagaacaattagggtgacatgtgtgcattgagtaaac

SEQ ID NO: 104890 - DNA, 251 bp, Homo sapiens
agatgctgggattacaggtgtgagccaccacacccagctaattttatatttttagtagagatggggtttcaccatgttggccaggctggtctcgaactcctgacctcaggtgatctgcccgcctcgacctcccaaaatgttgggattacaggtgtgagccactgcgcccagcctccccatgttcccttcattccaaaaagttactagtatctgcttagggcagcgagactcaaggatgtagcccagggtgg

SEQ ID NO: 104891 - DNA, 482 bp, Homo sapiens
acagcagcactattcacagagccagaaggtggaggcaccccaagcatccatcgacaggtgaatggacaaaaagtggtgcatccaaacaatggaatcccattcagcctttgaaaggaaggaaattctcacgcatgcgacgacatgggtgaacttgaaacaagccaagcacaaaaaggcaaatactgtatgattccacttttgtgaggtccctagaggtccctaggtagtcacagtcatagagatgaagatagaatggtgggcgccagaggctgcaggaggagagatgggagttaagagttggatggggacagagcttcagtggagaagatgaacgttctaagacggatggtggtgatagctgcagagcaatgggaatgctcctagtgccgctgagctgcgcacttacaaatagttaagatgttatattttatgttacgtgtgttttcccacatttaaaattaataataaagtttttaaaaaag

SEQ ID NO: 104892 - DNA, 292 bp, Homo sapiens
tggttctataacaggcttttcattttaaactttagctgtctgggccaccaccactgtgacaaaatgctctgactacagtctacggttaggttaaatctgcaagagaaaagattatgtgttgctttaccaggttttagcttgcttccaaaatccatctttttagtttactttttagagaccttgtgaattatcctggtgggctcatgtaattgttaagtgtccttaaaagacaaaagaaggaagcagaagccaagacttggagagatatttgaagatggtccactgctggctt

SEQ ID NO: 104893 - DNA, 380 bp, Homo sapiens
tcctctcactcagcgtcctgtgattccaaagaaatgagtctctgctgtttttgggcagcagatatcctagaatggactctgacctaagcatcaaaattaatcatcataacgttatcattttatggccccttcttcctatatctggtagcttttaaatgatgaccatgtagataatctttattgttcctctttcagcagacggtattttcttatgctacagtatgactgctaatacttacacgttagaaccattctgagtcctcaagaatctcatttaactcttattatcagtgaatttatcatcatccccaattttacataaggaaatggggttagaaagaccaaataacattttttcaacatcaaaacactagcttgag

SEQ ID NO: 104894 - DNA, 146 bp, Homo sapiens
ggctgtgttctccaatgacagtcacatcaagctgggagatggaatccaccccaaagacaagagagcaaaccaagaaagaggaagacaccaaatagaggaaatcagaattccaacaatggaaagaagtgaaaaaaagaaaatccttg

SEQ ID NO: 104895 - DNA, 367 bp, Homo sapiens
gcagggctagctgcttgtccaggggcccatgattccagggctatatttggccccacagccatccaggatgagttgtttctcagccaccaagtcttaaaatgtatatgcattaaacttagtaaaatcgcacttctttgagatgtggctttttgggcattcactgaacttgaatttggccctaaataaggcctcagtcacatgctccagggtttgcagcttggtatggatgaacatggccaatgtgaactctgacctctgggtcctgaggctttccaaaggcatactacatccggtcttaaacctagactagggaaagcactagatccaagacataaatgtccaatggcaaaggctgttgtacgcaagg

SEQ ID NO: 104896 - DNA, 270 bp, Homo sapiens
caaattaccctctctgtttaacaatttaccactttgtcctccttcagtgcttcctcaaagcttaattcttccaagacgtctttctagatgaacaaaaagtccttaaagatgtgttagtgtcagcatgcatggcgttgaacagtttgcactgagaacaaaatctgtctttctctgtgactttcacttttttcctattgatttgtttttggtctatgtaatttagattatgaagccttcttaatatgaaaatgtcatcctttatacaatatt

SEQ ID NO: 104897 - DNA, 489 bp, Homo sapiens
tgagacggagtctcgctctgtcgcccaggctggagtgcagtggtgcgatctcagctcactgcaagcttcgcctcccgggttcgtgccattctcctgcctcaggctcccgagtagctgggactacaggcacccaccaccacgcctggctaatttttttgtatttttagtagagacgggctttcattgtgttagctaggatggtctcgatcgtctgacctcgtgatccgcccgcctcggcctcccaaagtactgggattacaggcatgagccaccgtgcccggccggtaccttgggttttaagataacagaaaatatttacagattaatattttctgaaatttaaagtatttttataagagatatactgttaacaaatgactaggaaagagaatgtaacttattttagagaaaagaatactcaatacacaatcctataaataatatgaacatttaaatggaaaacagggaaaaaatagttaattatagaca

SEQ ID NO: 104898 - DNA, 374 bp, Homo sapiens
ccttcagattgagaacggggtgaaaaggcatccccacacagaaccgacgccccagtcgctagctggctccttggcacccgtcgcatggccccgaagctctggcagggactctgggcatctgtaccagtgagcacccggccatctcggccaggtctgtgagggagcgattctacccttgccatgtgacagccggcaactagggcccagatctcttctttcaagtagcacctaaaatattctccgggtgaacctagggctaaatacggcatggcctacaggtgccgggtctggaccttttaacgccattctaagatacgatcgagaacccacgaggcctttggtagcctggagtccagttactggggccaaatggg

SEQ ID NO: 104899 - DNA, 425 bp, Homo sapiens
ttgaaggatgcactggagttgggcaggtagctattaggcatatgaggaggaggggacagcccagcaatgattctgagatgagaaagcttgccctgcttgaggtgattgagtggctaatgttgggggagcatagcactgaaggggactctggttttcctgctccaaatgccagaccaagttgttggaatgccaatctttcaggagtgtagagaagcagtgcatttcaaacttgggaatgatgggacaatgaccttttagggaggtgatgctaatgttctggagaggagaaatgggaggtgaggctgcagcagaataaggagtaagaggggctctcggctcaggagtggttgtgttaagccgtgttcagaggaagctcagacatgcatcgtagcatactggcacaggaagagatggaggactgggac

SEQ ID NO: 104900 - DNA, 168 bp, Homo sapiens
gcttattggctcattcaggggctactacagtacgatatgggttagggggtgctgctctgaaaagggggacatttgcgctgaggcctgaaggaagccagggaacacactgtggggccctggagtaagtgactcatgggaggacggaagatcacggggtaccgaagctcg

SEQ ID NO: 104901 - DNA, 346 bp, Homo sapiens
gttttgctgtgaaactaaaattgctctaaaaaatacattcaaaacaaaagcagcttgttaaaattgctctaaaaaatacattcaaaataaaaactaaaattgctctaaaaaataaattcaaaacaaaagcagcttgttaggaagttattagggtgtttcctctctaaatatgaaatttttagaaatgttcccacatttttaaatttggtattcttcaatgtctgtgaccaaacatttttctagggaaatgcatatctagttttaacagaaatttagtttacatcaaacttttccagatttattttgttaaactgactttttatccaagtgtacggtggatttaatg

SEQ ID NO: 104902 - DNA, 374 bp, Homo sapiens
atttaaaatgaatttattccaaaagttcctaggttgtggatattctatgtgaggtttgggagatttcaatggaaatccacttccagcccattcaatttctcatcccaggaatcctagcttgtatttaaaaatgattccgccattccctagaagatcccactaatctgccttttaaaaatacactttcatgatgcctactctatggtcactctgagttaaatggaaaaaaacagaataatctacagaaaacaggaaaaaagtcatttgtatacctttagagatggctctctggggctttaaataaagtaaaagactggagtaggaaaaatcatacaaatatagctctgaaatctacccggagaacagagtttcaa

SEQ ID NO: 104903 - DNA, 793 bp, Homo sapiens
cctggaggaccttatgctaaatgaaataaggcagacaaacattgcatgatctcacttacaggtggaatccaaaaataaaagtcaaactcatagtaagagtagatgagtggttggcagggtctagggagcatgggaaaggaagagatggtggtcaaagggtgcaaacttgcagttagaggatgagtaagttctggagacctaacgtacagcacagtgactactgttgatcacagtgtattgtgcgttgctaacggagtagctctccagtgttctcactacacacaaacacacatgcacgcacacaagcatgcatacacacaaaaacgcacatacattcacacacaaatgcatgcatgcacacgaacacacacgtgcaggcacacatgtgcacacaaacacacacacacgaaaggtgactatgtgaggatatgctaaccacgttatacaacttaaatatatacaatttttatttgtcaatcatttctcaatataactggggcaaaaaagaacactgcctcccctctaccctgccctactgggcccagcaggtgggaaagggactcaaaatgctaggtaaatgaatgaatgattttttaaacaaaaatatttgttctggatatgccaattggcctaggcatcataattataactcttgagcatttttatactgttaagcaccctaaaaatgcttcagcattaatgtacattttataataaatttgggaaatcggcaggaattccagcaagatcctagcaagggctaggaaatggggagagggttgcctaaaagagt

SEQ ID NO: 104904 - DNA, 742 bp, Homo sapiens
ctacaaaaacatggaaaaaactaatcttaaaggaagcaggtgattcagagttcagaaagtgcagaaaataaaaaagttataattggcctcctcagagagatgtgagatattacatccataaaacagagcatgatgctgtaaaagtgaataatcagggaataaagaagagcttctaaaggtaaaaatattactattgatatacaaaatacattagaagatttggaagttaaatttttaagatagctgtgagaatatagcataaaaagacaagaaaacagaaacaagagaaaaagataagacacagaaatcaatctataaatgttcaatgttcaactggtaggaattctagaaattaataagtgaaaaaaatcaatggaaataaatttgtaatcatataggaaaattttccagagttaaaaattgtcacaaattctcacattgaaaagacagtgggctgatcagaatgataatatagttttttttttttttcagacagagtcttactctgtctcccaggctgaagtgcagtgaagtgaccatggctcgttgcagccttgacctcccgtgttcaggtgatcctcccacctcagcctcccaagtggctgggacgacaggtgtgcacaaccatacccaactaattttttgtaaagacggagtttcaccatgttgcccagactggtcttgaactcctgagctcaggtaatccatccatcttggcttcccaaagtgctgggattccaag

SEQ ID NO: 104905 - DNA, 348 bp, Homo sapiens
cagtggcgcgatctcggctcattgcaagctccgcctcccaggttcacgccattttcctgcctcagcctcccgagtagctgggactacaggtgcccgccaccacgcccggctaattttttgcatttttagtagagacggggtttcaccgtgttagccaggatggtctcgatctcttgacctcgtgatccgcctgcctcggcctccctatttcactggcttacctttctcagtttaccttgtgccgcctcctgttttttgtttctcagttgttaatattttctagaattcattcggttacatcccctgcagtttatattaatgcttatccttgggtgatgcatcaactta

SEQ ID NO: 104906 - DNA, 4079 bp, Homo sapiens
accgccgctagatccgctgctgctgccgcggcgggcggacctgcaggaggcggcggcggcggcggcggccgaggctgaaggaagatggcggacggcgtggaccacatagacatttacgcggatgtcggcgaagagttcaaccaggaagctgaatatggtgggcatgatcagatagatttgtatgacgatgtcatatctccatctgcaaataatggagatgccccagaagaccgagattacatggatactctcccaccaactgttggtgatgatgtgggtaaaggagcagcaccaaatgttgtctatacatatactggaaagagaattgcattatatattggaaatctaacatggtggacaacagatgaagacttaactgaagcagttcattctttgggagtaaatgatattttggagataaaattttttgaaaatcgagcaaatggccagtcaaaggggtttgcccttgttggtgttggatctgaagcatcttcaaaaaagttaatggatctgttacctaaaagagaacttcatggtcagaatcctgttgtaactccatgcaataaacagttcctgagtcaatttgaaatgcagtccaggaaaactacacaatcaggacaaatgtctggggaaggtaaagctggtcctccaggaggcagttcccgtgcagcatttccacaaggtggtagaggacggggccgttttccaggggctgttcctggtggggacagatttcctgggccagcaggaccaggagggccacccccaccttttccagctggacagactccaccacgtccacccttaggtcctccaggcccacctggtccaccaggtcctccacctcctggtcaggttctgcctcctcctctagctgggcctcctaatcgaggagatcgccctccaccaccagttctttttcctggacaaccttttgggcagcctccattgggtccacttcctcctggccctccacctccagttccaggctacggcccccctcctggcccaccacctccacaacagggaccacctccacctccaggcccctttccacctcgtccacccggtccacttgggccaccccttacactagctcctcctccgcatcttcctggaccacctccaggtgccccaccgccagctccgcatgtgaacccagctttctttcctccaccaactaacagtggcatgcctacatcagatagccgaggtccaccaccaacagatccatatgggcgacctccaccatatgataggggtgactatggcccccctggaagggaaatggatactgcaagaacgccattgagtgaagctgaatttgaagaaatcatgaatagaaatagggcaatctcaagcagtgctatttcgagagctgtgtctgatgccagtgctggtgattatgggagtgctattgagacactggtaactgcaatttctttaattaaacaatccaaagtatctgctgatgatcgttgcaaagttcttattagttctttgcaagattgccttcatggaattgagtccaagtcttatggttctggatcaagacgtgaacgatcaagagagagggaccatagtagatcacgagaaaagagtcgacgtcataaatcccgtagtagagaccgtcatgacgattattacagagagagaagcagagaacgagagaggcaccgggatcgtgaccgagaccgtgaccgagagcgtgaccgagagcgcgaatatcgtcatcgttagaagctgaaggaagaggatcaccttccaagacaaaacagtcttcatgggggaaaaatgacgcttgtccagcagtttgcttcttgtgattgaactgaacctgtaaggattcatggataaaatgaacaggaatagatctgaataaagcaaatctgcataaatggtaaccagtagctctacttttattttttatgttgcttaactgttttatttgaaggaaacctgtgtgatttaaaaagttatagcttttgcaactttattactggttatatacatttggccattatgatgtgcaagcaattggaaaaaaagtcaagtaaatgcttgtttttgtagtagtttgttcttgttaaaaatgtttatatgataatgtctgtaaacagcatcactttgattacaatagatgtagtgttgtaataaactgtttaatggggctgatgtgtaaagctgttcaagttatttgatgtttacacctcagggaaagtcttgtgttcagcaatatctaaagataatgttactatgacaacatttttactgtcctttaaagcattgcaatagcgtttttggatatgcctcaatctaatcttgcgttcagtgaattaaacatagtaattaagtgtcttttgcccttgattttgatattagaataggtgattacatggatatttaatatttctatattctgcttttctagctgtttttacctagttagcttgtgactttgctgaatggtatgtaaacttgtaaaaatagagatttgacagacatagcaatctagtcaatgtgtaaggggtcaaaaaaacagaggttttaacacataagtaaaaacccgtacatatttgatgtgtaatgcaggttaattacaacacagatgtaccgaaacacttaattgtgaaccgctaacattgaagaaattttgacaattccgatttgatgctgcaattacttgctgtttttattgatcttatggtttatttcttaagccatagtcagtgtaaatacagccctgcagcaggtaaatgtgagtaaagagagccttatattttccaattggtataaatttttgaaggatgtgatgttcattaacattcggttgtattccccagtatttgtaatgggaaattacagataaaccgtgtctgcacagtttaaggaatactatgtatattcatgcaccgtattgattcatgctatagttacttaatcaaagatttttttcaaacctgccttacatataggcccactttaaaagcacctgactagcatgtgttcttgattgcaaaattggcagaggcagggtgtcaacttgattaggtgtttttatgggaatgtaatttgaaatcactacttcagaaatttgacttaaaattcttgagcacgttaatatgtttttaagatctgattatctttgagagatcttctgttaatacacattggttgttaaagagtacccaaattctaggacaatgcttaaagtgttaaaataccctagatactgtgttatgtgcaactgtagaaaccctccagaaatttccactgctgttcttcactttcatcttgtctgctatcaaaccacttctgacaaaattagctgttttgaattacccatatcactgccagttttattttaaaatattttgtgtttgaagtatctgtgcatgggatcgttgatgtttatcagaactgttcactttcagaaatgattttttaaagcattttgttgaaaatgcggttgcttttttaacattattttagagttgtatcaaaattttcctgttttctgtatattgttgtgtcatttcttggctttttaatattttgactacaatgccctaatgcgaagaagtatggacatataaatattacaagagaaattagttaatagtaaagggttaaaaggtaagtaaaatgtccatgaaaataaaattttctttgaacagtttaaaaatggaatcacaaaaatctaactgcacttgaaatgaaactggaaattttatactaattaaatcctttatttaccttttcatattttatcaatggaaccttttaattgctccttctatatcactcttctccttgcttggctgatctcattacatgactttcgttacagacagtgtgagtgtactagatttgtttgctgctaatccgttattttaagtgttgtcagaaggaaataacttcttggtttgaccaagtaattttgcaaagtccttctctacctgataacacgtgaatgtatagcagtaaaggtgaaaattgcaggccttgttttgttcttcatacccccttcagttgtttatgggttaatgttatttgaaaactcttcctttttttaatgt

SEQ ID NO: 104907 - DNA, 2280 bp, Homo sapiens
accgccgctagatccgctgctgctgccgcggcgggcggacctgcaggaggcggcggcggcggcggcggccgaggctgaaggaagatggcggacggcgtggaccacatagacatttacgcggatgtcggcgaagagttcaaccaggaagctgaatatggtgggcatgatcagatagatttgtatgacgatgtcatatctccatctgcaaataatggagatgccccagaagaccgagattacatggatactctcccaccaactgttggtgatgatgtgggtaaaggagcagcaccaaatgttgtctatacatatactggaaagagaattgcattatatattggaaatctaacatggtggacaacagatgaagacttaactgaagcagttcattctttgggagtaaatgatattttggagataaaattttttgaaaatcgagcaaatggccagtcaaaggggtttgcccttgttggtgttggatctgaagcatcttcaaaaaagttaatggatctgttacctaaaagagaacttcatggtcagaatcctgttgtaactccatgcaataaacagttcctgagtcaatttgaaatgcagtccaggaaaactacacaatcaggacaaatgtctggggaaggtaaagctggtcctccaggaggcagttcccgtgcagcatttccacaaggtggtagaggacggggccgttttccaggggctgttcctggtggggacagatttcctgggccagcaggaccaggagggccacccccaccttttccaggaaatttgatcaagcatcttgttaaaggaactcggcctttgttcctggaaactaggattccatggcatatggggcacagcatagaggaaatacccatttttggcctaaaagctggacagactccaccacgtccacccttaggtcctccaggcccacctggtccaccaggtcctccacctcctggtcaggttctgcctcctcctctagctgggcctcctaatcgaggagatcgccctccaccaccagttctttttcctggacaaccttttgggcagcctccattgggtccacttcctcctggccctccacctccagttccaggctacggcccccctcctggcccaccacctccacaacagggaccacctccacctccaggcccctttccacctcgtccacccggtccacttgggccaccccttacactagctcctcctccgcatcttcctggaccacctccaggtgccccaccgccagctccgcatgtgaacccagctttctttcctccaccaactaacagtggcatgcctacatcagatagccgaggtccaccaccaacagatccatatgggcgacctccaccatatgataggggtgactatggcccccctggaagggaaatggatactgcaagaacgccattgagtgaagctgaatttgaagaaatcatgaatagaaatagggcaatctcaagcagtgctatttcgagagctgtgtctgatgccagtgctggtgattatgggagtgctattgagacactggtaactgcaatttctttaattaaacaatccaaagtatctgctgatgatcgttgcaaagttcttattagttctttgcaagattgccttcatggaattgagtccaagtcttatggttctggatcaagacgtgaacgatcaagagagagggaccatagtagatcacgagaaaagagtcgacgtcataaatcccgtagtagagaccgtcatgacgattattacagagagagaagcagagaacgagagaggcaccgggatcgtgaccgagaccgtgaccgagagcgtgaccgagagcgcgaatatcgtcatcgttagaagctgaaggaagaggatcaccttccaagacaaaacagtcttcatgggggaaaaatgacgcttgtccagcagtttgcttcttgtgattgaactgaacctgtaaggattcatggataaaatgaacaggaatagatctgaataaagcaaatctgcataaatggtaaccagtagctctacttttattttttatgttgcttaactgttttatttgaaggaaacctgtgtgatttaaaaagttatagcttttgcaactttattactggttatatacatttggccattatgatgtgcaagcaattggaaaaaaagtcaagtaaatgcttgtttttgtagtagtttgttcttgttaaaaatgtttatatgataatgtctgtaaacagcatcactttgattacaatagatgtagtgttgtaataaactgtttaatgg

SEQ ID NO: 104908 - DNA, 1950 bp, Homo sapiens
accgccgctagatccgctgctgctgccgcggcgggcggacctgcaggaggcggcggcggcggcggcggccgaggctgaaggaagatggcggacggcgtggaccacatagacatttacgcggatgtcggcgaagagttcaaccaggaagctgaatatggtgggcatgatcagatagatttgtatgacgatgtcatatctccatctgcaaataatggagatgccccagaagaccgagattacatggatactctcccaccaactgttggtgatgatgtgggtaaaggagcagcaccaaatgttgtctatacatatactggaaagagaattgcattatatattggaaatctaacatggtggacaacagatgaagacttaactgaagcagttcattctttgggagtaaatgatattttggagataaaattttttgaaaatcgagcaaatggccagtcaaaggggtttgcccttgttggtgttggatctgaagcatcttcaaaaaagttaatggatctgttacctaaaagagaacttcatggtcagaatcctgttgtaactccatgcaataaacagttcctgagtcaatttgaaatgcagtccaggaaaactacacaatcaggacaaatgtctggggaaggtaaagctggtcctcctctagctgggcctcctaatcgaggagatcgccctccaccaccagttctttttcctggacaaccttttgggcagcctccattgggtccacttcctcctggccctccacctccagttccaggctacggcccccctcctggcccaccacctccacaacagggaccacctccacctccaggcccctttccacctcgtccacccggtccacttgggccaccccttacactagctcctcctccgcatcttcctggaccacctccaggtgccccaccgccagctccgcatgtgaacccagctttctttcctccaccaactaacagtggcatgcctacatcagatagccgaggtccaccaccaacagatccatatgggcgacctccaccatatgataggggtgactatggcccccctggaagggaaatggatactgcaagaacgccattgagtgaagctgaatttgaagaaatcatgaatagaaatagggcaatctcaagcagtgctatttcgagagctgtgtctgatgccagtgctggtgattatgggagtgctattgagacactggtaactgcaatttctttaattaaacaatccaaagtatctgctgatgatcgttgcaaagttcttattagttctttgcaagattgccttcatggaattgagtccaagtcttatggttctggatcaagacgtgaacgatcaagagagagggaccatagtagatcacgagaaaagagtcgacgtcataaatcccgtagtagagaccgtcatgacgattattacagagagagaagcagagaacgagagaggcaccgggatcgtgaccgagaccgtgaccgagagcgtgaccgagagcgcgaatatcgtcatcgttagaagctgaaggaagaggatcaccttccaagacaaaacagtcttcatgggggaaaaatgacgcttgtccagcagtttgcttcttgtgattgaactgaacctgtaaggattcatggataaaatgaacaggaatagatctgaataaagcaaatctgcataaatggtaaccagtagctctacttttattttttatgttgcttaactgttttatttgaaggaaacctgtgtgatttaaaaagttatagcttttgcaactttattactggttatatacatttggccattatgatgtgcaagcaattggaaaaaaagtcaagtaaatgcttgtttttgtagtagtttgttcttgttaaaaatgtttatatgataatgtctgtaaacagcatcactttgattacaatagatgtagtgttgtaataaactgtttaatgg

SEQ ID NO: 104909 - DNA, 653 bp, Homo sapiens
ataatatttaagaagaatgaaatcagaatgtctcagtttaatcatcaggtaaattggaacatttcaccaccacaaaggcagctactgtttcagttaattcttattttgtgttagaatacataacagtgaagtagatgcacgacttgtgtatgtatagttaagccagcgtttttctgtgtattttggggaatagcaaaatctacatcacaaattttgacacattacagctgaaggaagaggatcaccttccaagacaaaacagtcttcatgggggaaaaatgacgcttgtccagcagtttgcttcttgtgattgaactgaacctgtaaggattcatggataaaatgaacaggaatagatctgaataaagcaaatctgcataaatggtaaccagtagctctacttttattttttatgttgcttaactgttttatttgaaggaaacctgtgtgatttaaaaagttatagcttttgcaactttattactggttatatacatttggccattatgatgtgcaagcaattggaaaaaaagtcaagtaaatgcttgtttttgtagtagtttgttcttgttaaaaatgtttatatgataatgtctgtaaacagcatcactttgattacaatagatgtagtgttgtaataaactgtttaatgg

SEQ ID NO: 104910 - DNA, 671 bp, Homo sapiens
accgccgctagatccgctgctgctgccgcggcgggcggacctgcaggaggcggcggcggcggcggcggccgaggctgaaggaagatggcggacggcgtggaccacatagacatttacgcggatgtcggcgaagagttcaaccagattacagagagagaagcagagaacgagagaggcaccgggatcgtgaccgagaccgtgaccgagagcgtgaccgagagcgcgaatatcgtcatcgttagaagctgaaggaagaggatcaccttccaagacaaaacagtcttcatgggggaaaaatgacgcttgtccagcagtttgcttcttgtgattgaactgaacctgtaaggattcatggataaaatgaacaggaatagatctgaataaagcaaatctgcataaatggtaaccagtagctctacttttattttttatgttgcttaactgttttatttgaaggaaacctgtgtgatttaaaaagttatagcttttgcaactttattactggttatatacatttggccattatgatgtgcaagcaattggaaaaaaagtcaagtaaatgcttgtttttgtagtagtttgttcttgttaaaaatgtttatatgataatgtctgtaaacagcatcactttgattacaatagatgtagtgttgtaataaactgtttaatgg

SEQ ID NO: 104911 - DNA, 404 bp, Homo sapiens
accgccgctagatccgctgctgctgccgcggcgggcggacctgcaggaggcggcggcggcggcggcggccgaggctgaaggaagatggcggacggcgtggaccacatagacatttacgcggatgtcggcgaagagttcaaccagattacagagagagaagcagagaacgagagaggcaccgggatcgtgaccgagaccgtgaccgagagcgtgaccgagagcgcgaatatcgtcatcgttagaagctgaaggaagaggatcaccttccaagacaaaacagtcttcatgggggaaaaatgacgcttgtccagcagtttgcttcttgtgattgaactgaacctgtaaggattcatggataaaatgaacaggaatagatctgaataaagcaaatctgcataaatggt

SEQ ID NO: 104912 - DNA, 3006 bp, Homo sapiens
accgccgctagatccgctgctgctgccgcggcgggcggacctgcaggaggcggcggcggcggcggcggccgaggctgaaggaagatggcggacggcgtggaccacatagacatttacgcggatgtcggcgaagagttcaaccaggaagctgaatatggtgggcatgatcagatagatttgtatgacgatgtcatatctccatctgcaaataatggagatgccccagaagaccgagattacatggatactctcccaccaactgttggtgatgatgtgggtaaaggagcagcaccaaatgttgtctatacatatactggaaagagaattgcattatatattggaaatctaacatggtggacaacagatgaagacttaactgaagcagttcattctttgggagtaaatgatattttggagataaaattttttgaaaatcgagcaaatggccagtcaaaggggtttgcccttgttggtgttggatctgaagcatcttcaaaaaagttaatggatctgttacctaaaagagaacttcatggtcagaatcctgttgtaactccatgcaataaacagttcctgagtcaatttgaaatgcagtccaggaaaactacacaatcaggacaaatgtctggggaaggtaaagctggtcctccaggaggcagttcccgtgcagcatttccacaaggtggtagaggacggggccgttttccaggggctgttcctggtggggacagatttcctgggccagcaggaccaggagggccacccccaccttttccagctggacagactccaccacgtccacccttaggtcctccaggcccacctggtccaccaggtcctccacctcctggtcaggttctgcctcctcctctagctgggcctcctaatcgaggagatcgccctccaccaccagttctttttcctggacaaccttttgggcagcctccattgggtccacttcctcctggccctccacctccagttccaggctacggcccccctcctggcccaccacctccacaacagggaccacctccacctccaggcccctttccacctcgtccacccggtccacttgggccaccccttacactagctcctcctccgcatcttcctggaccacctccaggtgccccaccgccagctccgcatgtgaacccagctttctttcctccaccaactaacagtggcatgcctacatcagatagccgaggtccaccaccaacagatccatatgggcgacctccaccatatgataggggtgactatggcccccctggaagggaaatggatactgcaagaacgccattgagtgaagctgaatttgaagaaatcatgaatagaaatagggcaatctcaagcagtgctatttcgagagctgtgtctgatgccagtgctggtgattatgggagtgctattgagacactggtaactgcaatttctttaattaaacaatccaaagtatctgctgatgatcgttgcaaagttcttattagttctttgcaagattgccttcatggaattgagtccaagtcttatggttctggatcaagacgtgaacgatcaagagagagggaccatagtagatcacgagaaaagagtcgacgtcataaatcccgtagtagagaccgtcatgacgattattacagagagagaagcagagaacgagagaggcaccgggatcgtgaccgagaccgtgaccgagagcgtgaccgagagcgcgaatatcgtcatcgttagaagctgaaggaagaggatcaccttccaagacaaaacagtcttcatgggggaaaaatgacgcttgtccagcagtttgcttcttgtgattgaactgaacctgtaaggattcatggataaaatgaacaggaatagatctgaataaagcaaatctgcataaatggtaaccagtagctctacttttattttttatgttgcttaactgttttatttgaaggaaacctgtgtgatttaaaaagttatagcttttgcaactttattactggttatatacatttggccattatgatgtgcaagcaattggaaaaaaagtcaagtaaatgcttgtttttgtagtagtttgttcttgttaaaaatgtttatatgataatgtctgtaaacagcatcactttgattacaatagatgtagtgttgtaataaactgtttaatggggctgatgtgtaaagctgttcaagttatttgatgtttacacctcagggaaagtcttgtgttcagcaatatctaaagataatgttactatgacaacatttttactgtcctttaaagcattgcaatagcgtttttggatatgcctcaatctaatcttgcgttcagtgaattaaacatagtaattaagtgtcttttgcccttgattttgatattagaataggtgattacatggatatttaatatttctatattctgcttttctagctgtttttacctagttagcttgtgactttgctgaatggtatgtaaacttgtaaaaatagagatttgacagacatagcaatctagtcaatgtgtaaggggtcaaaaaaacagaggttttaacacataagtaaaaacccgtacatatttgatgtgtaatgcaggttaattacaacacagatgtaccgaaacacttaattgtgaaccgctaacattgaagaaattttgacaattccgatttgatgctgcaattacttgctgtttttattgatcttatggtttatttcttaagccatagtcagtgtaaatacagccctgcagcaggtaaatgtgagtaaagagagccttatattttccaattggtataaatttttgaaggatgtgatgttcattaacattcggttgtattccccagtatttgtaatgggaaattacagataaaccgtgtctgcacagtttaaggaatactatgtatattcatgcacagatacttcaaacacaaaatattttaaaataaaactggcagtgatatgggtaattcaaaacagctaattttgtcagaagtggtttggtcgacg

SEQ ID NO: 104913 - DNA, 2697 bp, Homo sapiens
accgccgctagatccgctgctgctgccgcggcgggcggacctgcaggaggcggcggcggcggcggcggccgaggctgaaggaagatggcggacggcgtggaccacatagacatttacgcggatgtcggcgaagagttcaaccaggaagctgaatatggtgggcatgatcagatagatttgtatgacgatgtcatatctccatctgcaaataatggagatgccccagaagaccgagattacatggatactctcccaccaactgttggtgatgatgtgggtaaaggagcagcaccaaatgttgtctatacatatactggaaagagaattgcattatatattggaaatctaacatggtggacaacagatgaagacttaactgaagcagttcattctttgggagtaaatgatattttggagataaaattttttgaaaatcgagcaaatggccagtcaaaggggtttgcccttgttggtgttggatctgaagcatcttcaaaaaagttaatggatctgttacctaaaagagaacttcatggtcagaatcctgttgtaactccatgcaataaacagttcctgagtcaatttgaaatgcagtccaggaaaactacacaatcaggacaaatgtctggggaaggtaaagctggtcctccaggaggcagttcccgtgcagcatttccacaaggtggtagaggacggggccgttttccaggggctgttcctggtggggacagatttcctgggccagcaggaccaggagggccacccccaccttttccagctggacagactccaccacgtccacccttaggtcctccaggcccacctggtccaccaggtcctccacctcctggtcaggttctgcctcctcctctagctgggcctcctaatcgaggagatcgccctccaccaccagttctttttcctggacaaccttttgggcagcctccattgggtccacttcctcctggccctccacctccagttccaggctacggcccccctcctggcccaccacctccacaacagggaccacctccacctccaggcccctttccacctcgtccacccggtccacttgggccaccccttacactagctcctcctccgcatcttcctggaccacctccaggtgccccaccgccagctccgcatgtgaacccagctttctttcctccaccaactaacagtggcatgcctacatcagatagccgaggtccaccaccaacagatccatatgggcgacctccaccatatgataggggtgactatggcccccctggaagggaaatggatactgcaagaacgccattgagtgaagctgaatttgaagaaatcatgaatagaaatagggcaatctcaagcagtgctatttcgagagctgtgtctgatgccagtgctggtgattatgggagtgctattgagacactggtaactgcaatttctttaattaaacaatccaaagtatctgctgatgatcgttgcaaagttcttattagttctttgcaagattgccttcatggaattgagtccaagtcttatggttctggatcaagacgtgaacgatcaagagagagggaccatagtagatcacgagaaaagagtcgacgtcataaatcccgtagtagagaccgtcatgacgattattacagagagagaagcagagaacgagagaggcaccgggatcgtgaccgagaccgtgaccgagagcgtgaccgagagcgcgaatatcgtcatcgttagaagctgaaggaagaggatcaccttccaagacaaaacagtcttcatgggggaaaaatgacgcttgtccagcagtttgcttcttgtgattgaactgaacctgtaaggattcatggataaaatgaacaggaatagatctgaataaagcaaatctgcataaatggtaaccagtagctctacttttattttttatgttgcttaactgttttatttgaaggaaacctgtgtgatttaaaaagttatagcttttgcaactttattactggttatatacatttggccattatgatgtgcaagcaattggaaaaaaagtcaagtaaatgcttgtttttgtagtagtttgttcttgttaaaaatgtttatatgataatgtctgtaaacagcatcactttgattacaatagatgtagtgttgtaataaactgtttaatggggctgatgtgtaaagctgttcaagttatttgatgtttacacctcagggaaagtcttgtgttcagcaatatctaaagataatgttactatgacaacatttttactgtcctttaaagcattgcaatagcgtttttggatatgcctcaatctaatcttgcgttcagtgaattaaacatagtaattaaaaaaaaaaaaaaaaaaaaaaaaaaaaaaaaaaaaaaaaaaaaaaaaaaaaaaaaaaaaaaaaaaaaaaaaaaaaagaaaaaaaaaagaaaaaagaaaaaaaaaaaaacaaggaataagacaataaaaaaaaaaaataacaaaaaaaaaggaaaataaaaaacaaggacgtgcagcgagtcagtctatctatatattctatctagtcacgtaagtaggtagcatcgacgcccacccccatattatatataagtggaagcacgctcaaatcatgtaagtgttagaaaaataaaacgacgaagactggcgcgaataactaaacacaagtgcccacatacaatacgat

SEQ ID NO: 104914 - DNA, 4031 bp, Homo sapiens
accgccgctagatccgctgctgctgccgcggcgggcggacctgcaggaggcggcggcggcggcggcggccgaggctgaaggaagatggcggacggcgtggaccacatagacatttacgcggatgtcggcgaagagttcaaccaggaagctgaatatggtgggcatgatcagatagatttgtatgacgatgtcatatctccatctgcaaataatggagatgccccagaagaccgagattacatggatactctcccaccaactgttggtgatgatgtgggtaaaggagcagcaccaaatgttgtctatacatatactggaaagagaattgcattatatattggaaatctaacatggtggacaacagatgaagacttaactgaagcagttcattctttgggagtaaatgatattttggagataaaattttttgaaaatcgagcaaatggccagtcaaaggggtttgcccttgttggtgttggatctgaagcatcttcaaaaaagttaatggatctgttacctaaaagagaacttcatggtcagaatcctgttgtaactccatgcaataaacagttcctgagtcaatttgaaatgcagtccaggaaaactacacaatcaggacaaatgtctggggaaggtaaagctggtcctccaggaggcagttcccgtgcagcatttccacaaggtggtagaggacggggccgttttccaggggctgttcctggtggggacagatttcctgggccagcaggaccaggagggccacccccaccttttccagctggacagactccaccacgtccacccttaggtcctccaggcccacctggtccaccaggtcctccacctcctggtcaggttctgcctcctcctctagctgggcctcctaatcgaggagatcgccctccaccaccagttctttttcctggacaaccttttgggcagcctccattgggtccacttcctcctggccctccacctccagttccaggctacggcccccctcctggcccaccacctccacaacagggaccacctccacctccaggcccctttccacctcgtccacccggtccacttgggccaccccttacactagctcctcctccgcatcttcctggaccacctccaggtgccccaccgccagctccgcatgtgaacccagctttctttcctccaccaactaacagtggcatgcctacatcagatagccgaggtccaccaccaacagatccatatgggcgacctccaccatatgataggggtgactatggcccccctggaagggaaatggatactgcaagaacgccattgagtgaagctgaatttgaagaaatcatgaatagaaatagggcaatctcaagcagtgctatttcgagagctgtgtctgatgccagtgctggtgattatgggagtgctattgagacactggtaactgcaatttctttaattaaacaatccaaagtatctgctgatgatcgttgcaaagttcttattagttctttgcaagattgccttcatggaattgagtccaagtcttatggttctggatcaagacgtgaacgatcaagagagagggaccatagtagatcacgagattacagagagagaagcagagaacgagagaggcaccgggatcgtgaccgagaccgtgaccgagagcgtgaccgagagcgcgaatatcgtcatcgttagaagctgaaggaagaggatcaccttccaagacaaaacagtcttcatgggggaaaaatgacgcttgtccagcagtttgcttcttgtgattgaactgaacctgtaaggattcatggataaaatgaacaggaatagatctgaataaagcaaatctgcataaatggtaaccagtagctctacttttattttttatgttgcttaactgttttatttgaaggaaacctgtgtgatttaaaaagttatagcttttgcaactttattactggttatatacatttggccattatgatgtgcaagcaattggaaaaaaagtcaagtaaatgcttgtttttgtagtagtttgttcttgttaaaaatgtttatatgataatgtctgtaaacagcatcactttgattacaatagatgtagtgttgtaataaactgtttaatggggctgatgtgtaaagctgttcaagttatttgatgtttacacctcagggaaagtcttgtgttcagcaatatctaaagataatgttactatgacaacatttttactgtcctttaaagcattgcaatagcgtttttggatatgcctcaatctaatcttgcgttcagtgaattaaacatagtaattaagtgtcttttgcccttgattttgatattagaataggtgattacatggatatttaatatttctatattctgcttttctagctgtttttacctagttagcttgtgactttgctgaatggtatgtaaacttgtaaaaatagagatttgacagacatagcaatctagtcaatgtgtaaggggtcaaaaaaacagaggttttaacacataagtaaaaacccgtacatatttgatgtgtaatgcaggttaattacaacacagatgtaccgaaacacttaattgtgaaccgctaacattgaagaaattttgacaattccgatttgatgctgcaattacttgctgtttttattgatcttatggtttatttcttaagccatagtcagtgtaaatacagccctgcagcaggtaaatgtgagtaaagagagccttatattttccaattggtataaatttttgaaggatgtgatgttcattaacattcggttgtattccccagtatttgtaatgggaaattacagataaaccgtgtctgcacagtttaaggaatactatgtatattcatgcaccgtattgattcatgctatagttacttaatcaaagatttttttcaaacctgccttacatataggcccactttaaaagcacctgactagcatgtgttcttgattgcaaaattggcagaggcagggtgtcaacttgattaggtgtttttatgggaatgtaatttgaaatcactacttcagaaatttgacttaaaattcttgagcacgttaatatgtttttaagatctgattatctttgagagatcttctgttaatacacattggttgttaaagagtacccaaattctaggacaatgcttaaagtgttaaaataccctagatactgtgttatgtgcaactgtagaaaccctccagaaatttccactgctgttcttcactttcatcttgtctgctatcaaaccacttctgacaaaattagctgttttgaattacccatatcactgccagttttattttaaaatattttgtgtttgaagtatctgtgcatgggatcgttgatgtttatcagaactgttcactttcagaaatgattttttaaagcattttgttgaaaatgcggttgcttttttaacattattttagagttgtatcaaaattttcctgttttctgtatattgttgtgtcatttcttggctttttaatattttgactacaatgccctaatgcgaagaagtatggacatataaatattacaagagaaattagttaatagtaaagggttaaaaggtaagtaaaatgtccatgaaaataaaattttctttgaacagtttaaaaatggaatcacaaaaatctaactgcacttgaaatgaaactggaaattttatactaattaaatcctttatttaccttttcatattttatcaatggaaccttttaattgctccttctatatcactcttctccttgcttggctgatctcattacatgactttcgttacagacagtgtgagtgtactagatttgtttgctgctaatccgttattttaagtgttgtcagaaggaaataacttcttggtttgaccaagtaattttgcaaagtccttctctacctgataacacgtgaatgtatagcagtaaaggtgaaaattgcaggccttgttttgttcttcatacccccttcagttgtttatgggttaatgttatttgaaaactcttcctttttttaatgt

SEQ ID NO: 104915 - DNA, 4190 bp, Homo sapiens
accgccgctagatccgctgctgctgccgcggcgggcggacctgcaggaggcggcggcggcggcggcggccgaggctgaaggaagatggcggacggcgtggaccacatagacatttacgcggatgtcggcgaagagttcaaccaggaagctgaatatggtgggcatgatcagatagatttgtatgacgatgtcatatctccatctgcaaataatggagatgccccagaagaccgagattacatggatactctcccaccaactgttggtgatgatgtgggtaaaggagcagcaccaaatgttgtctatacatatactggaaagagaattgcattatatattggaaatctaacatggtggacaacagatgaagacttaactgaagcagttcattctttgggagtaaatgatattttggagataaaattttttgaaaatcgagcaaatggccagtcaaaggggtttgcccttgttggtgttggatctgaagcatcttcaaaaaagttaatggatctgttacctaaaagagaacttcatggtcagaatcctgttgtaactccatgcaataaacagttcctgagtcaatttgaaatgcagtccaggaaaactacacaatcaggacaaatgtctggggaaggtaaagctggtcctccaggaggcagttcccgtgcagcatttccacaaggtggtagaggacggggccgttttccaggggctgttcctggtggggacagatttcctgggccagcaggaccaggagggccacccccaccttttccaggaaatttgatcaagcatcttgttaaaggaactcggcctttgttcctggaaactaggattccatggcatatggggcacagcatagaggaaatacccatttttggcctaaaagctggacagactccaccacgtccacccttaggtcctccaggcccacctggtccaccaggtcctccacctcctggtcaggttctgcctcctcctctagctgggcctcctaatcgaggagatcgccctccaccaccagttctttttcctggacaaccttttgggcagcctccattgggtccacttcctcctggccctccacctccagttccaggctacggcccccctcctggcccaccacctccacaacagggaccacctccacctccaggcccctttccacctcgtccacccggtccacttgggccaccccttacactagctcctcctccgcatcttcctggaccacctccaggtgccccaccgccagctccgcatgtgaacccagctttctttcctccaccaactaacagtggcatgcctacatcagatagccgaggtccaccaccaacagatccatatgggcgacctccaccatatgataggggtgactatggcccccctggaagggaaatggatactgcaagaacgccattgagtgaagctgaatttgaagaaatcatgaatagaaatagggcaatctcaagcagtgctatttcgagagctgtgtctgatgccagtgctggtgattatgggagtgctattgagacactggtaactgcaatttctttaattaaacaatccaaagtatctgctgatgatcgttgcaaagttcttattagttctttgcaagattgccttcatggaattgagtccaagtcttatggttctggatcaagacgtgaacgatcaagagagagggaccatagtagatcacgagaaaagagtcgacgtcataaatcccgtagtagagaccgtcatgacgattattacagagagagaagcagagaacgagagaggcaccgggatcgtgaccgagaccgtgaccgagagcgtgaccgagagcgcgaatatcgtcatcgttagaagctgaaggaagaggatcaccttccaagacaaaacagtcttcatgggggaaaaatgacgcttgtccagcagtttgcttcttgtgattgaactgaacctgtaaggattcatggataaaatgaacaggaatagatctgaataaagcaaatctgcataaatggtaaccagtagctctacttttattttttatgttgcttaactgttttatttgaaggaaacctgtgtgatttaaaaagttatagcttttgcaactttattactggttatatacatttggccattatgatgtgcaagcaattggaaaaaaagtcaagtaaatgcttgtttttgtagtagtttgttcttgttaaaaatgtttatatgataatgtctgtaaacagcatcactttgattacaatagatgtagtgttgtaataaactgtttaatggggctgatgtgtaaagctgttcaagttatttgatgtttacacctcagggaaagtcttgtgttcagcaatatctaaagataatgttactatgacaacatttttactgtcctttaaagcattgcaatagcgtttttggatatgcctcaatctaatcttgcgttcagtgaattaaacatagtaattaagtgtcttttgcccttgattttgatattagaataggtgattacatggatatttaatatttctatattctgcttttctagctgtttttacctagttagcttgtgactttgctgaatggtatgtaaacttgtaaaaatagagatttgacagacatagcaatctagtcaatgtgtaaggggtcaaaaaaacagaggttttaacacataagtaaaaacccgtacatatttgatgtgtaatgcaggttaattacaacacagatgtaccgaaacacttaattgtgaaccgctaacattgaagaaattttgacaattccgatttgatgctgcaattacttgctgtttttattgatcttatggtttatttcttaagccatagtcagtgtaaatacagccctgcagcaggtaaatgtgagtaaagagagccttatattttccaattggtataaatttttgaaggatgtgatgttcattaacattcggttgtattccccagtatttgtaatgggaaattacagataaaccgtgtctgcacagtttaaggaatactatgtatattcatgcaccgtattgattcatgctatagttacttaatcaaagatttttttcaaacctgccttacatataggcccactttaaaagcacctgactagcatgtgttcttgattgcaaaattggcagaggcagggtgtcaacttgattaggtgtttttatgggaatgtaatttgaaatcactacttcagaaatttgacttaaaattcttgagcacgttaatatgtttttaagatctgattatctttgagagatcttctgttaatacacattggttgttaaagagtacccaaattctaggacaatgcttaaagtgttaaaataccctagatactgtgttatgtgcaactgtagaaaccctccagaaatttccactgctgttcttcactttcatcttgtctgctatcaaaccacttctgacaaaattagctgttttgaattacccatatcactgccagttttattttaaaatattttgtgtttgaagtatctgtgcatgggatcgttgatgtttatcagaactgttcactttcagaaatgattttttaaagcattttgttgaaaatgcggttgcttttttaacattattttagagttgtatcaaaattttcctgttttctgtatattgttgtgtcatttcttggctttttaatattttgactacaatgccctaatgcgaagaagtatggacatataaatattacaagagaaattagttaatagtaaagggttaaaaggtaagtaaaatgtccatgaaaataaaattttctttgaacagtttaaaaatggaatcacaaaaatctaactgcacttgaaatgaaactggaaattttatactaattaaatcctttatttaccttttcatattttatcaatggaaccttttaattgctccttctatatcactcttctccttgcttggctgatctcattacatgactttcgttacagacagtgtgagtgtactagatttgtttgctgctaatccgttattttaagtgttgtcagaaggaaataacttcttggtttgaccaagtaattttgcaaagtccttctctacctgataacacgtgaatgtatagcagtaaaggtgaaaattgcaggccttgttttgttcttcatacccccttcagttgtttatgggttaatgttatttgaaaactcttcctttttttaatgt

SEQ ID NO: 104916 - DNA, 4128 bp, Homo sapiens
actcccggcaagaaattcactttttagacctgttcaagaatacatctattgcataaagtggaaaaagatttgtactgaaatccttggcctttttccatcagatttttaaaacaaaaagttgaatttgtattcaagtctattttagtagtattttgacttttgtataatctagagcattatttctgtatctcaggaagctgaatatggtgggcatgatcagatagatttgtatgacgatgtcatatctccatctgcaaataatggagatgccccagaagaccgagattacatggatactctcccaccaactgttggtgatgatgtgggtaaaggagcagcaccaaatgttgtctatacatatactggaaagagaattgcattatatattggaaatctaacatggtggacaacagatgaagacttaactgaagcagttcattctttgggagtaaatgatattttggagataaaattttttgaaaatcgagcaaatggccagtcaaaggggtttgcccttgttggtgttggatctgaagcatcttcaaaaaagttaatggatctgttacctaaaagagaacttcatggtcagaatcctgttgtaactccatgcaataaacagttcctgagtcaatttgaaatgcagtccaggaaaactacacaatcaggacaaatgtctggggaaggtaaagctggtcctccaggaggcagttcccgtgcagcatttccacaaggtggtagaggacggggccgttttccaggggctgttcctggtggggacagatttcctgggccagcaggaccaggagggccacccccaccttttccagctggacagactccaccacgtccacccttaggtcctccaggcccacctggtccaccaggtcctccacctcctggtcaggttctgcctcctcctctagctgggcctcctaatcgaggagatcgccctccaccaccagttctttttcctggacaaccttttgggcagcctccattgggtccacttcctcctggccctccacctccagttccaggctacggcccccctcctggcccaccacctccacaacagggaccacctccacctccaggcccctttccacctcgtccacccggtccacttgggccaccccttacactagctcctcctccgcatcttcctggaccacctccaggtgccccaccgccagctccgcatgtgaacccagctttctttcctccaccaactaacagtggcatgcctacatcagatagccgaggtccaccaccaacagatccatatgggcgacctccaccatatgataggggtgactatggcccccctggaagggaaatggatactgcaagaacgccattgagtgaagctgaatttgaagaaatcatgaatagaaatagggcaatctcaagcagtgctatttcgagagctgtgtctgatgccagtgctggtgattatgggagtgctattgagacactggtaactgcaatttctttaattaaacaatccaaagtatctgctgatgatcgttgcaaagttcttattagttctttgcaagattgccttcatggaattgagtccaagtcttatggttctggatcaagacgtgaacgatcaagagagagggaccatagtagatcacgagaaaagagtcgacgtcataaatcccgtagtagagaccgtcatgacgattattacagagagagaagcagagaacgagagaggcaccgggatcgtgaccgagaccgtgaccgagagcgtgaccgagagcgcgaatatcgtcatcgttagaagctgaaggaagaggatcaccttccaagacaaaacagtcttcatgggggaaaaatgacgcttgtccagcagtttgcttcttgtgattgaactgaacctgtaaggattcatggataaaatgaacaggaatagatctgaataaagcaaatctgcataaatggtaaccagtagctctacttttattttttatgttgcttaactgttttatttgaaggaaacctgtgtgatttaaaaagttatagcttttgcaactttattactggttatatacatttggccattatgatgtgcaagcaattggaaaaaaagtcaagtaaatgcttgtttttgtagtagtttgttcttgttaaaaatgtttatatgataatgtctgtaaacagcatcactttgattacaatagatgtagtgttgtaataaactgtttaatggggctgatgtgtaaagctgttcaagttatttgatgtttacacctcagggaaagtcttgtgttcagcaatatctaaagataatgttactatgacaacatttttactgtcctttaaagcattgcaatagcgtttttggatatgcctcaatctaatcttgcgttcagtgaattaaacatagtaattaagtgtcttttgcccttgattttgatattagaataggtgattacatggatatttaatatttctatattctgcttttctagctgtttttacctagttagcttgtgactttgctgaatggtatgtaaacttgtaaaaatagagatttgacagacatagcaatctagtcaatgtgtaaggggtcaaaaaaacagaggttttaacacataagtaaaaacccgtacatatttgatgtgtaatgcaggttaattacaacacagatgtaccgaaacacttaattgtgaaccgctaacattgaagaaattttgacaattccgatttgatgctgcaattacttgctgtttttattgatcttatggtttatttcttaagccatagtcagtgtaaatacagccctgcagcaggtaaatgtgagtaaagagagccttatattttccaattggtataaatttttgaaggatgtgatgttcattaacattcggttgtattccccagtatttgtaatgggaaattacagataaaccgtgtctgcacagtttaaggaatactatgtatattcatgcaccgtattgattcatgctatagttacttaatcaaagatttttttcaaacctgccttacatataggcccactttaaaagcacctgactagcatgtgttcttgattgcaaaattggcagaggcagggtgtcaacttgattaggtgtttttatgggaatgtaatttgaaatcactacttcagaaatttgacttaaaattcttgagcacgttaatatgtttttaagatctgattatctttgagagatcttctgttaatacacattggttgttaaagagtacccaaattctaggacaatgcttaaagtgttaaaataccctagatactgtgttatgtgcaactgtagaaaccctccagaaatttccactgctgttcttcactttcatcttgtctgctatcaaaccacttctgacaaaattagctgttttgaattacccatatcactgccagttttattttaaaatattttgtgtttgaagtatctgtgcatgggatcgttgatgtttatcagaactgttcactttcagaaatgattttttaaagcattttgttgaaaatgcggttgcttttttaacattattttagagttgtatcaaaattttcctgttttctgtatattgttgtgtcatttcttggctttttaatattttgactacaatgccctaatgcgaagaagtatggacatataaatattacaagagaaattagttaatagtaaagggttaaaaggtaagtaaaatgtccatgaaaataaaattttctttgaacagtttaaaaatggaatcacaaaaatctaactgcacttgaaatgaaactggaaattttatactaattaaatcctttatttaccttttcatattttatcaatggaaccttttaattgctccttctatatcactcttctccttgcttggctgatctcattacatgactttcgttacagacagtgtgagtgtactagatttgtttgctgctaatccgttattttaagtgttgtcagaaggaaataacttcttggtttgaccaagtaattttgcaaagtccttctctacctgataacacgtgaatgtatagcagtaaaggtgaaaattgcaggccttgttttgttcttcatacccccttcagttgtttatgggttaatgttatttgaaaactcttcctttttttaatgt

SEQ ID NO: 104917 - DNA, 3860 bp, Homo sapiens
accgccgctagatccgctgctgctgccgcggcgggcggacctgcaggaggcggcggcggcggcggcggccgaggctgaaggaagatggcggacggcgtggaccacatagacatttacgcggatgtcggcgaagagttcaaccaggaagctgaatatggtgggcatgatcagatagatttgtatgacgatgtcatatctccatctgcaaataatggagatgccccagaagaccgagattacatggatactctcccaccaactgttggtgatgatgtgggtaaaggagcagcaccaaatgttgtctatacatatactggaaagagaattgcattatatattggaaatctaacatggtggacaacagatgaagacttaactgaagcagttcattctttgggagtaaatgatattttggagataaaattttttgaaaatcgagcaaatggccagtcaaaggggtttgcccttgttggtgttggatctgaagcatcttcaaaaaagttaatggatctgttacctaaaagagaacttcatggtcagaatcctgttgtaactccatgcaataaacagttcctgagtcaatttgaaatgcagtccaggaaaactacacaatcaggacaaatgtctggggaaggtaaagctggtcctcctctagctgggcctcctaatcgaggagatcgccctccaccaccagttctttttcctggacaaccttttgggcagcctccattgggtccacttcctcctggccctccacctccagttccaggctacggcccccctcctggcccaccacctccacaacagggaccacctccacctccaggcccctttccacctcgtccacccggtccacttgggccaccccttacactagctcctcctccgcatcttcctggaccacctccaggtgccccaccgccagctccgcatgtgaacccagctttctttcctccaccaactaacagtggcatgcctacatcagatagccgaggtccaccaccaacagatccatatgggcgacctccaccatatgataggggtgactatggcccccctggaagggaaatggatactgcaagaacgccattgagtgaagctgaatttgaagaaatcatgaatagaaatagggcaatctcaagcagtgctatttcgagagctgtgtctgatgccagtgctggtgattatgggagtgctattgagacactggtaactgcaatttctttaattaaacaatccaaagtatctgctgatgatcgttgcaaagttcttattagttctttgcaagattgccttcatggaattgagtccaagtcttatggttctggatcaagacgtgaacgatcaagagagagggaccatagtagatcacgagaaaagagtcgacgtcataaatcccgtagtagagaccgtcatgacgattattacagagagagaagcagagaacgagagaggcaccgggatcgtgaccgagaccgtgaccgagagcgtgaccgagagcgcgaatatcgtcatcgttagaagctgaaggaagaggatcaccttccaagacaaaacagtcttcatgggggaaaaatgacgcttgtccagcagtttgcttcttgtgattgaactgaacctgtaaggattcatggataaaatgaacaggaatagatctgaataaagcaaatctgcataaatggtaaccagtagctctacttttattttttatgttgcttaactgttttatttgaaggaaacctgtgtgatttaaaaagttatagcttttgcaactttattactggttatatacatttggccattatgatgtgcaagcaattggaaaaaaagtcaagtaaatgcttgtttttgtagtagtttgttcttgttaaaaatgtttatatgataatgtctgtaaacagcatcactttgattacaatagatgtagtgttgtaataaactgtttaatggggctgatgtgtaaagctgttcaagttatttgatgtttacacctcagggaaagtcttgtgttcagcaatatctaaagataatgttactatgacaacatttttactgtcctttaaagcattgcaatagcgtttttggatatgcctcaatctaatcttgcgttcagtgaattaaacatagtaattaagtgtcttttgcccttgattttgatattagaataggtgattacatggatatttaatatttctatattctgcttttctagctgtttttacctagttagcttgtgactttgctgaatggtatgtaaacttgtaaaaatagagatttgacagacatagcaatctagtcaatgtgtaaggggtcaaaaaaacagaggttttaacacataagtaaaaacccgtacatatttgatgtgtaatgcaggttaattacaacacagatgtaccgaaacacttaattgtgaaccgctaacattgaagaaattttgacaattccgatttgatgctgcaattacttgctgtttttattgatcttatggtttatttcttaagccatagtcagtgtaaatacagccctgcagcaggtaaatgtgagtaaagagagccttatattttccaattggtataaatttttgaaggatgtgatgttcattaacattcggttgtattccccagtatttgtaatgggaaattacagataaaccgtgtctgcacagtttaaggaatactatgtatattcatgcaccgtattgattcatgctatagttacttaatcaaagatttttttcaaacctgccttacatataggcccactttaaaagcacctgactagcatgtgttcttgattgcaaaattggcagaggcagggtgtcaacttgattaggtgtttttatgggaatgtaatttgaaatcactacttcagaaatttgacttaaaattcttgagcacgttaatatgtttttaagatctgattatctttgagagatcttctgttaatacacattggttgttaaagagtacccaaattctaggacaatgcttaaagtgttaaaataccctagatactgtgttatgtgcaactgtagaaaccctccagaaatttccactgctgttcttcactttcatcttgtctgctatcaaaccacttctgacaaaattagctgttttgaattacccatatcactgccagttttattttaaaatattttgtgtttgaagtatctgtgcatgggatcgttgatgtttatcagaactgttcactttcagaaatgattttttaaagcattttgttgaaaatgcggttgcttttttaacattattttagagttgtatcaaaattttcctgttttctgtatattgttgtgtcatttcttggctttttaatattttgactacaatgccctaatgcgaagaagtatggacatataaatattacaagagaaattagttaatagtaaagggttaaaaggtaagtaaaatgtccatgaaaataaaattttctttgaacagtttaaaaatggaatcacaaaaatctaactgcacttgaaatgaaactggaaattttatactaattaaatcctttatttaccttttcatattttatcaatggaaccttttaattgctccttctatatcactcttctccttgcttggctgatctcattacatgactttcgttacagacagtgtgagtgtactagatttgtttgctgctaatccgttattttaagtgttgtcagaaggaaataacttcttggtttgaccaagtaattttgcaaagtccttctctacctgataacacgtgaatgtatagcagtaaaggtgaaaattgcaggccttgttttgttcttcatacccccttcagttgtttatgggttaatgttatttgaaaactcttcctttttttaatgt

SEQ ID NO: 104918 - DNA, 3632 bp, Homo sapiens
accgccgctagatccgctgctgctgccgcggcgggcggacctgcaggaggcggcggcggcggcggcggccgaggctgaaggaagatggcggacggcgtggaccacatagacatttacgcggatgtcggcgaagagttcaaccaggaagctgaatatggtgggcatgatcagatagatttgtatgacgatgtcatatctccatctgcaaataatggagatgccccagaagaccgagattacatggatactctcccaccaactgttggtgatgatgtgggtaaaggagcagcaccaaatgttgtctatacatatactggaaagagaattgcattatatattggaaatctaacatggtggacaacagatgaagacttaactgaagcagttcattctttgggagtaaatgatattttggagataaaattttttgaaaatcgagcaaatggccagtcaaaggggtttgcccttgttggtgttggatctgaagcatcttcaaaaaagttaatggatctgttacctaaaagagaacttcatggtcagaatcctgttgtaactccatgcaataaacagttcctgagtcaatttgaaatgcagtccaggaaaattccacctcgtccacccggtccacttgggccaccccttacactagctcctcctccgcatcttcctggaccacctccaggtgccccaccgccagctccgcatgtgaacccagctttctttcctccaccaactaacagtggcatgcctacatcagatagccgaggtccaccaccaacagatccatatgggcgacctccaccatatgataggggtgactatggcccccctggaagggaaatggatactgcaagaacgccattgagtgaagctgaatttgaagaaatcatgaatagaaatagggcaatctcaagcagtgctatttcgagagctgtgtctgatgccagtgctggtgattatgggagtgctattgagacactggtaactgcaatttctttaattaaacaatccaaagtatctgctgatgatcgttgcaaagttcttattagttctttgcaagattgccttcatggaattgagtccaagtcttatggttctggatcaagacgtgaacgatcaagagagagggaccatagtagatcacgagaaaagagtcgacgtcataaatcccgtagtagagaccgtcatgacgattattacagagagagaagcagagaacgagagaggcaccgggatcgtgaccgagaccgtgaccgagagcgtgaccgagagcgcgaatatcgtcatcgttagaagctgaaggaagaggatcaccttccaagacaaaacagtcttcatgggggaaaaatgacgcttgtccagcagtttgcttcttgtgattgaactgaacctgtaaggattcatggataaaatgaacaggaatagatctgaataaagcaaatctgcataaatggtaaccagtagctctacttttattttttatgttgcttaactgttttatttgaaggaaacctgtgtgatttaaaaagttatagcttttgcaactttattactggttatatacatttggccattatgatgtgcaagcaattggaaaaaaagtcaagtaaatgcttgtttttgtagtagtttgttcttgttaaaaatgtttatatgataatgtctgtaaacagcatcactttgattacaatagatgtagtgttgtaataaactgtttaatggggctgatgtgtaaagctgttcaagttatttgatgtttacacctcagggaaagtcttgtgttcagcaatatctaaagataatgttactatgacaacatttttactgtcctttaaagcattgcaatagcgtttttggatatgcctcaatctaatcttgcgttcagtgaattaaacatagtaattaagtgtcttttgcccttgattttgatattagaataggtgattacatggatatttaatatttctatattctgcttttctagctgtttttacctagttagcttgtgactttgctgaatggtatgtaaacttgtaaaaatagagatttgacagacatagcaatctagtcaatgtgtaaggggtcaaaaaaacagaggttttaacacataagtaaaaacccgtacatatttgatgtgtaatgcaggttaattacaacacagatgtaccgaaacacttaattgtgaaccgctaacattgaagaaattttgacaattccgatttgatgctgcaattacttgctgtttttattgatcttatggtttatttcttaagccatagtcagtgtaaatacagccctgcagcaggtaaatgtgagtaaagagagccttatattttccaattggtataaatttttgaaggatgtgatgttcattaacattcggttgtattccccagtatttgtaatgggaaattacagataaaccgtgtctgcacagtttaaggaatactatgtatattcatgcaccgtattgattcatgctatagttacttaatcaaagatttttttcaaacctgccttacatataggcccactttaaaagcacctgactagcatgtgttcttgattgcaaaattggcagaggcagggtgtcaacttgattaggtgtttttatgggaatgtaatttgaaatcactacttcagaaatttgacttaaaattcttgagcacgttaatatgtttttaagatctgattatctttgagagatcttctgttaatacacattggttgttaaagagtacccaaattctaggacaatgcttaaagtgttaaaataccctagatactgtgttatgtgcaactgtagaaaccctccagaaatttccactgctgttcttcactttcatcttgtctgctatcaaaccacttctgacaaaattagctgttttgaattacccatatcactgccagttttattttaaaatattttgtgtttgaagtatctgtgcatgggatcgttgatgtttatcagaactgttcactttcagaaatgattttttaaagcattttgttgaaaatgcggttgcttttttaacattattttagagttgtatcaaaattttcctgttttctgtatattgttgtgtcatttcttggctttttaatattttgactacaatgccctaatgcgaagaagtatggacatataaatattacaagagaaattagttaatagtaaagggttaaaaggtaagtaaaatgtccatgaaaataaaattttctttgaacagtttaaaaatggaatcacaaaaatctaactgcacttgaaatgaaactggaaattttatactaattaaatcctttatttaccttttcatattttatcaatggaaccttttaattgctccttctatatcactcttctccttgcttggctgatctcattacatgactttcgttacagacagtgtgagtgtactagatttgtttgctgctaatccgttattttaagtgttgtcagaaggaaataacttcttggtttgaccaagtaattttgcaaagtccttctctacctgataacacgtgaatgtatagcagtaaaggtgaaaattgcaggccttgttttgttcttcatacccccttcagttgtttatgggttaatgttatttgaaaactcttcctttttttaatgt

SEQ ID NO: 104919 - DNA, 3716 bp, Homo sapiens
tatatatagaatatttacatccgtcttactttcttacctcttaaaaaaatcctttcaagatcatttttccttgtttcactttctagcttggcatcagagtagaatataaggtgggtgatttcactgtaagaagtgtgtgtacacggaaagatggaaaatatctctaggcattgtaatatttttttattaaagttttcgtttcaataatttttcttaagcataaattgagctagttaaatttgtaaggatatacttcattgtagttggtagtgtaacatttaccatacgggtttaatttaaagacaaagacttggtgtatgctctatgcgtttaaagtataatcttggcatataaaagttaaaatatcttattagtgaagtgttttttttttctctctttctcctttgttttttagctggacagactccaccacgtccacccttaggtcctccaggcccacctggtccaccaggtcctccacctcctggtcaggttctgcctcctcctctagctgggcctcctaatcgaggagatcgccctccaccaccagttctttttcctggacaaccttttgggcagcctccattgggtccacttcctcctggccctccacctccagttccaggctacggcccccctcctggcccaccacctccacaacagggaccacctccacctccaggcccctttccacctcgtccacccggtccacttgggccaccccttacactagctcctcctccgcatcttcctggaccacctccaggtgccccaccgccagctccgcatgtgaacccagctttctttcctccaccaactaacagtggcatgcctacatcagatagccgaggtccaccaccaacagatccatatgggcgacctccaccatatgataggggtgactatggcccccctggaagggaaatggatactgcaagaacgccattgagtgaagctgaatttgaagaaatcatgaatagaaatagggcaatctcaagcagtgctatttcgagagctgtgtctgatgccagtgctggtgattatgggagtgctattgagacactggtaactgcaatttctttaattaaacaatccaaagtatctgctgatgatcgttgcaaagttcttattagttctttgcaagattgccttcatggaattgagtccaagtcttatggttctggatcaagacgtgaacgatcaagagagagggaccatagtagatcacgagaaaagagtcgacgtcataaatcccgtagtagagaccgtcatgacgattattacagagagagaagcagagaacgagagaggcaccgggatcgtgaccgagaccgtgaccgagagcgtgaccgagagcgcgaatatcgtcatcgttagaagctgaaggaagaggatcaccttccaagacaaaacagtcttcatgggggaaaaatgacgcttgtccagcagtttgcttcttgtgattgaactgaacctgtaaggattcatggataaaatgaacaggaatagatctgaataaagcaaatctgcataaatggtaaccagtagctctacttttattttttatgttgcttaactgttttatttgaaggaaacctgtgtgatttaaaaagttatagcttttgcaactttattactggttatatacatttggccattatgatgtgcaagcaattggaaaaaaagtcaagtaaatgcttgtttttgtagtagtttgttcttgttaaaaatgtttatatgataatgtctgtaaacagcatcactttgattacaatagatgtagtgttgtaataaactgtttaatggggctgatgtgtaaagctgttcaagttatttgatgtttacacctcagggaaagtcttgtgttcagcaatatctaaagataatgttactatgacaacatttttactgtcctttaaagcattgcaatagcgtttttggatatgcctcaatctaatcttgcgttcagtgaattaaacatagtaattaagtgtcttttgcccttgattttgatattagaataggtgattacatggatatttaatatttctatattctgcttttctagctgtttttacctagttagcttgtgactttgctgaatggtatgtaaacttgtaaaaatagagatttgacagacatagcaatctagtcaatgtgtaaggggtcaaaaaaacagaggttttaacacataagtaaaaacccgtacatatttgatgtgtaatgcaggttaattacaacacagatgtaccgaaacacttaattgtgaaccgctaacattgaagaaattttgacaattccgatttgatgctgcaattacttgctgtttttattgatcttatggtttatttcttaagccatagtcagtgtaaatacagccctgcagcaggtaaatgtgagtaaagagagccttatattttccaattggtataaatttttgaaggatgtgatgttcattaacattcggttgtattccccagtatttgtaatgggaaattacagataaaccgtgtctgcacagtttaaggaatactatgtatattcatgcaccgtattgattcatgctatagttacttaatcaaagatttttttcaaacctgccttacatataggcccactttaaaagcacctgactagcatgtgttcttgattgcaaaattggcagaggcagggtgtcaacttgattaggtgtttttatgggaatgtaatttgaaatcactacttcagaaatttgacttaaaattcttgagcacgttaatatgtttttaagatctgattatctttgagagatcttctgttaatacacattggttgttaaagagtacccaaattctaggacaatgcttaaagtgttaaaataccctagatactgtgttatgtgcaactgtagaaaccctccagaaatttccactgctgttcttcactttcatcttgtctgctatcaaaccacttctgacaaaattagctgttttgaattacccatatcactgccagttttattttaaaatattttgtgtttgaagtatctgtgcatgggatcgttgatgtttatcagaactgttcactttcagaaatgattttttaaagcattttgttgaaaatgcggttgcttttttaacattattttagagttgtatcaaaattttcctgttttctgtatattgttgtgtcatttcttggctttttaatattttgactacaatgccctaatgcgaagaagtatggacatataaatattacaagagaaattagttaatagtaaagggttaaaaggtaagtaaaatgtccatgaaaataaaattttctttgaacagtttaaaaatggaatcacaaaaatctaactgcacttgaaatgaaactggaaattttatactaattaaatcctttatttaccttttcatattttatcaatggaaccttttaattgctccttctatatcactcttctccttgcttggctgatctcattacatgactttcgttacagacagtgtgagtgtactagatttgtttgctgctaatccgttattttaagtgttgtcagaaggaaataacttcttggtttgaccaagtaattttgcaaagtccttctctacctgataacacgtgaatgtatagcagtaaaggtgaaaattgcaggccttgttttgttcttcatacccccttcagttgtttatgggttaatgttatttgaaaactcttcctttttttaatgt

SEQ ID NO: 104920 - DNA, 2169 bp, Homo sapiens
accgccgctagatccgctgctgctgccgcggcgggcggacctgcaggaggcggcggcggcggcggcggccgaggctgaaggaagatggcggacggcgtggaccacatagacatttacgcggatgtcggcgaagagttcaaccaggaagctgaatatggtgggcatgatcagatagatttgtatgacgatgtcatatctccatctgcaaataatggagatgccccagaagaccgagattacatggatactctcccaccaactgttggtgatgatgtgggtaaaggagcagcaccaaatgttgtctatacatatactggaaagagaattgcattatatattggaaatctaacatggtggacaacagatgaagacttaactgaagcagttcattctttgggagtaaatgatattttggagataaaattttttgaaaatcgagcaaatggccagtcaaaggggtttgcccttgttggtgttggatctgaagcatcttcaaaaaagttaatggatctgttacctaaaagagaacttcatggtcagaatcctgttgtaactccatgcaataaacagttcctgagtcaatttgaaatgcagtccaggaaaactacacaatcaggacaaatgtctggggaaggtaaagctggtcctccaggaggcagttcccgtgcagcatttccacaaggtggtagaggacggggccgttttccaggggctgttcctggtggggacagatttcctgggccagcaggaccaggagggccacccccaccttttccagctggacagactccaccacgtccacccttaggtcctccaggcccacctggtccaccaggtcctccacctcctggtcaggttctgcctcctcctctagctgggcctcctaatcgaggagatcgccctccaccaccagttctttttcctggacaaccttttgggcagcctccattgggtccacttcctcctggccctccacctccagttccaggctacggcccccctcctggcccaccacctccacaacagggaccacctccacctccaggcccctttccacctcgtccacccggtccacttgggccaccccttacactagctcctcctccgcatcttcctggaccacctccaggtgccccaccgccagctccgcatgtgaacccagctttctttcctccaccaactaacagtggcatgcctacatcagatagccgaggtccaccaccaacagatccatatgggcgacctccaccatatgataggggtgactatggcccccctggaagggaaatggatactgcaagaacgccattgagtgaagctgaatttgaagaaatcatgaatagaaatagggcaatctcaagcagtgctatttcgagagctgtgtctgatgccagtgctggtgattatgggagtgctattgagacactggtaactgcaatttctttaattaaacaatccaaagtatctgctgatgatcgttgcaaagttcttattagttctttgcaagattgccttcatggaattgagtccaagtcttatggttctggatcaagacgtgaacgatcaagagagagggaccatagtagatcacgagaaaagagtcgacgtcataaatcccgtagtagagaccgtcatgacgattattacagagagagaagcagagaacgagagaggcaccgggatcgtgaccgagaccgtgaccgagagcgtgaccgagagcgcgaatatcgtcatcgttagaagctgaaggaagaggatcaccttccaagacaaaacagtcttcatgggggaaaaatgacgcttgtccagcagtttgcttcttgtgattgaactgaacctgtaaggattcatggataaaatgaacaggaatagatctgaataaagcaaatctgcataaatggtaaccagtagctctacttttattttttatgttgcttaactgttttatttgaaggaaacctgtgtgatttaaaaagttatagcttttgcaactttattactggttatatacatttggccattatgatgtgcaagcaattggaaaaaaagtcaagtaaatgcttgtttttgtagtagtttgttcttgttaaaaatgtttatatgataatgtctgtaaacagcatcactttgattacaatagatgtagtgttgtaataaactgtttaatgg

SEQ ID NO: 104921 - DNA, 2439 bp, Homo sapiens
accgccgctagatccgctgctgctgccgcggcgggcggacctgcaggaggcggcggcggcggcggcggccgaggctgaaggaagatggcggacggcgtggaccacatagacatttacgcggatgtcggcgaagagttcaaccaggaagctgaatatggtgggcatgatcagatagatttgtatgacgatgtcatatctccatctgcaaataatggagatgccccagaagaccgagattacatggatactctcccaccaactgttggtgatgatgtgggtaaaggagcagcaccaaatgttgtctatacatatactggaaagagaattgcattatatattggaaatctaacatggtggacaacagatgaagacttaactgaagcagttcattctttgggagtaaatgatattttggagataaaattttttgaaaatcgagcaaatggccagtcaaaggggtttgcccttgttggtgttggatctgaagcatcttcaaaaaagttaatggatctgttacctaaaagagaacttcatggtcagaatcctgttgtaactccatgcaataaacagttcctgagtcaatttgaaatgcagtccaggaaaactacacaatcaggacaaatgtctggggaaggtaaagctggtcctccaggaggcagttcccgtgcagcatttccacaaggtggtagaggacggggccgttttccaggggctgttcctggtggggacagatttcctgggccagcaggaccaggagggccacccccaccttttccagctggacagactccaccacgtccacccttaggtcctccaggcccacctggtccaccaggtcctccacctcctggtcaggttctgcctcctcctctagctgggcctcctaatcgaggagatcgccctccaccaccagttctttttcctggacaaccttttgggcagcctccattgggtccacttcctcctggccctccacctccagttccaggctacggcccccctcctggcccaccacctccacaacagggaccacctccacctccaggcccctttccacctcgtccacccggtccacttgggccaccccttacactagctcctcctccgcatcttcctggaccacctccaggtgccccaccgccagctccgcatgtgaacccagctttctttcctccaccaactaacagtggcatgcctacatcagatagccgaggtccaccaccaacagatccatatgggcgacctccaccatatgataggggtgactatggcccccctggaagggaaatggatactgcaagaacgccattgagtgaagctgaatttgaagaaatcatgaatagaaatagggcaatctcaagcagtgctatttcgagagctgtgtctgatgccagtgctggtgattatgggagtgctattgagacactggtaactgcaatttctttaattaaacaatccaaagtatctgctgatgatcgttgcaaagttcttattagttctttgcaagattgccttcatggaattgagtccaagtcttatggttctggatcaagacgtgaacgatcaagagagagggaccatagtagatcacgagaaaagagtcgacgtcataaatcccgtagtagagaccgtcatgacgattattacagagagagaagcagagaacgagagaggcaccgggatcgtgaccgagaccgtgaccgagagcgtgaccgagagcgcgaatatcgtcatcgttagaagctgaaggaagaggatcaccttccaagacaaaacagtcttcatgggggaaaaatgacgcttgtccagcagtttgcttcttgtgattgaactgaacctgtaaggattcatggataaaatgaacaggaatagatctgaataaagcaaatctgcataaatggtaaccagtagctctacttttattttttatgttgcttaactgttttatttgaaggaaacctgtgtgatttaaaaagttatagcttttgcaactttattactggttatatacatttggccattatgatgtgcaagcaattggaaaaaaagtcaagtaaatgcttgtttttgtagtagtttgttcttgttaaaaatgtttatatgataatgtctgtaaacagcatcactttgattacaatagatgtagtgttgtaataaactgtttaatggccgccgattcccaaagctcttatacttatatacagtaaacaacctttttctattttctccctgtcattataactggcacttcctccatccacatttcccactccttttcccatctccttctatctcaacccccccatctcgttcctcatccatctcttacttatgtaacacattaaatcgtcccacccgttatacccacactccactctttactctccctaagaataatacttctacacttcttctaccatacacttttagcaaacaaag

SEQ ID NO: 104922 - DNA, 3356 bp, Homo sapiens
accgccgctagatccgctgctgctgccgcggcgggcggacctgcaggaggcggcggcggcggcggcggccgaggctgaaggaagatggcggacggcgtggaccacatagacatttacgcggatgtcggcgaagagttcaaccaggaagctgaatatggtgggcatgatcagatagatttgtatgacgatgtcatatctccatctgcaaataatggagatgccccagaagaccgagattacatggatactccacctccagttccaggctacggcccccctcctggcccaccacctccacaacagggaccacctccacctccaggcccctttccacctcgtccacccggtccacttgggccaccccttacactagctcctcctccgcatcttcctggaccacctccaggtgccccaccgccagctccgcatgtgaacccagctttctttcctccaccaactaacagtggcatgcctacatcagatagccgaggtccaccaccaacagatccatatgggcgacctccaccatatgataggggtgactatggcccccctggaagggaaatggatactgcaagaacgccattgagtgaagctgaatttgaagaaatcatgaatagaaatagggcaatctcaagcagtgctatttcgagagctgtgtctgatgccagtgctggtgattatgggagtgctattgagacactggtaactgcaatttctttaattaaacaatccaaagtatctgctgatgatcgttgcaaagttcttattagttctttgcaagattgccttcatggaattgagtccaagtcttatggttctggatcaagacgtgaacgatcaagagagagggaccatagtagatcacgagaaaagagtcgacgtcataaatcccgtagtagagaccgtcatgacgattattacagagagagaagcagagaacgagagaggcaccgggatcgtgaccgagaccgtgaccgagagcgtgaccgagagcgcgaatatcgtcatcgttagaagctgaaggaagaggatcaccttccaagacaaaacagtcttcatgggggaaaaatgacgcttgtccagcagtttgcttcttgtgattgaactgaacctgtaaggattcatggataaaatgaacaggaatagatctgaataaagcaaatctgcataaatggtaaccagtagctctacttttattttttatgttgcttaactgttttatttgaaggaaacctgtgtgatttaaaaagttatagcttttgcaactttattactggttatatacatttggccattatgatgtgcaagcaattggaaaaaaagtcaagtaaatgcttgtttttgtagtagtttgttcttgttaaaaatgtttatatgataatgtctgtaaacagcatcactttgattacaatagatgtagtgttgtaataaactgtttaatggggctgatgtgtaaagctgttcaagttatttgatgtttacacctcagggaaagtcttgtgttcagcaatatctaaagataatgttactatgacaacatttttactgtcctttaaagcattgcaatagcgtttttggatatgcctcaatctaatcttgcgttcagtgaattaaacatagtaattaagtgtcttttgcccttgattttgatattagaataggtgattacatggatatttaatatttctatattctgcttttctagctgtttttacctagttagcttgtgactttgctgaatggtatgtaaacttgtaaaaatagagatttgacagacatagcaatctagtcaatgtgtaaggggtcaaaaaaacagaggttttaacacataagtaaaaacccgtacatatttgatgtgtaatgcaggttaattacaacacagatgtaccgaaacacttaattgtgaaccgctaacattgaagaaattttgacaattccgatttgatgctgcaattacttgctgtttttattgatcttatggtttatttcttaagccatagtcagtgtaaatacagccctgcagcaggtaaatgtgagtaaagagagccttatattttccaattggtataaatttttgaaggatgtgatgttcattaacattcggttgtattccccagtatttgtaatgggaaattacagataaaccgtgtctgcacagtttaaggaatactatgtatattcatgcaccgtattgattcatgctatagttacttaatcaaagatttttttcaaacctgccttacatataggcccactttaaaagcacctgactagcatgtgttcttgattgcaaaattggcagaggcagggtgtcaacttgattaggtgtttttatgggaatgtaatttgaaatcactacttcagaaatttgacttaaaattcttgagcacgttaatatgtttttaagatctgattatctttgagagatcttctgttaatacacattggttgttaaagagtacccaaattctaggacaatgcttaaagtgttaaaataccctagatactgtgttatgtgcaactgtagaaaccctccagaaatttccactgctgttcttcactttcatcttgtctgctatcaaaccacttctgacaaaattagctgttttgaattacccatatcactgccagttttattttaaaatattttgtgtttgaagtatctgtgcatgggatcgttgatgtttatcagaactgttcactttcagaaatgattttttaaagcattttgttgaaaatgcggttgcttttttaacattattttagagttgtatcaaaattttcctgttttctgtatattgttgtgtcatttcttggctttttaatattttgactacaatgccctaatgcgaagaagtatggacatataaatattacaagagaaattagttaatagtaaagggttaaaaggtaagtaaaatgtccatgaaaataaaattttctttgaacagtttaaaaatggaatcacaaaaatctaactgcacttgaaatgaaactggaaattttatactaattaaatcctttatttaccttttcatattttatcaatggaaccttttaattgctccttctatatcactcttctccttgcttggctgatctcattacatgactttcgttacagacagtgtgagtgtactagatttgtttgctgctaatccgttattttaagtgttgtcagaaggaaataacttcttggtttgaccaagtaattttgcaaagtccttctctacctgataacacgtgaatgtatagcagtaaaggtgaaaattgcaggccttgttttgttcttcatacccccttcagttgtttatgggttaatgttatttgaaaactcttcctttttttaatgt

SEQ ID NO: 104923 - DNA, 3537 bp, Homo sapiens
tttaataattcttgggtgtcctctagaggtgaccgtctcataaaaaggctatggtccctggcattgctggcagaagaggtacgcatatgcgagagcatttaccgaacatataaataaacacttctgaagtctatagcaaaactaaaagttaccagtgttctgaagatttcctcaacttctcttttgatacaaatgtcaaaaatctaaaatgacaattcatgttcagaagagatataaaatataagaaacctgtgaaaagccatcatctcaaggtcaagagttatctgaatcactgacatcgagcaaaggaaatttacaccataaaaagtatgaacagtttttaaattcacttttaagactgtcagtagttcaaaacctctatcatttctttaaaccaacgaacacttccaaatgtgtagagacagtaagatctgccatgtataaatccatgagtactatttcgagagtcttggccaagccaagactctcgaaatcgaccccttgtacagttccacctcgtccacccggtccacttgggccaccccttacactagctcctcctccgcatcttcctggaccacctccaggtgccccaccgccagctccgcatgtgaacccagctttctttcctccaccaactaacagtggcatgcctacatcagatagccgaggtccaccaccaacagatccatatgggcgacctccaccatatgataggggtgactatggcccccctggaagggaaatggatactgcaagaacgccattgagtgaagctgaatttgaagaaatcatgaatagaaatagggcaatctcaagcagtgctatttcgagagctgtgtctgatgccagtgctggtgattatgggagtgctattgagacactggtaactgcaatttctttaattaaacaatccaaagtatctgctgatgatcgttgcaaagttcttattagttctttgcaagattgccttcatggaattgagtccaagtcttatggttctggatcaagacgtgaacgatcaagagagagggaccatagtagatcacgagaaaagagtcgacgtcataaatcccgtagtagagaccgtcatgacgattattacagagagagaagcagagaacgagagaggcaccgggatcgtgaccgagaccgtgaccgagagcgtgaccgagagcgcgaatatcgtcatcgttagaagctgaaggaagaggatcaccttccaagacaaaacagtcttcatgggggaaaaatgacgcttgtccagcagtttgcttcttgtgattgaactgaacctgtaaggattcatggataaaatgaacaggaatagatctgaataaagcaaatctgcataaatggtaaccagtagctctacttttattttttatgttgcttaactgttttatttgaaggaaacctgtgtgatttaaaaagttatagcttttgcaactttattactggttatatacatttggccattatgatgtgcaagcaattggaaaaaaagtcaagtaaatgcttgtttttgtagtagtttgttcttgttaaaaatgtttatatgataatgtctgtaaacagcatcactttgattacaatagatgtagtgttgtaataaactgtttaatggggctgatgtgtaaagctgttcaagttatttgatgtttacacctcagggaaagtcttgtgttcagcaatatctaaagataatgttactatgacaacatttttactgtcctttaaagcattgcaatagcgtttttggatatgcctcaatctaatcttgcgttcagtgaattaaacatagtaattaagtgtcttttgcccttgattttgatattagaataggtgattacatggatatttaatatttctatattctgcttttctagctgtttttacctagttagcttgtgactttgctgaatggtatgtaaacttgtaaaaatagagatttgacagacatagcaatctagtcaatgtgtaaggggtcaaaaaaacagaggttttaacacataagtaaaaacccgtacatatttgatgtgtaatgcaggttaattacaacacagatgtaccgaaacacttaattgtgaaccgctaacattgaagaaattttgacaattccgatttgatgctgcaattacttgctgtttttattgatcttatggtttatttcttaagccatagtcagtgtaaatacagccctgcagcaggtaaatgtgagtaaagagagccttatattttccaattggtataaatttttgaaggatgtgatgttcattaacattcggttgtattccccagtatttgtaatgggaaattacagataaaccgtgtctgcacagtttaaggaatactatgtatattcatgcaccgtattgattcatgctatagttacttaatcaaagatttttttcaaacctgccttacatataggcccactttaaaagcacctgactagcatgtgttcttgattgcaaaattggcagaggcagggtgtcaacttgattaggtgtttttatgggaatgtaatttgaaatcactacttcagaaatttgacttaaaattcttgagcacgttaatatgtttttaagatctgattatctttgagagatcttctgttaatacacattggttgttaaagagtacccaaattctaggacaatgcttaaagtgttaaaataccctagatactgtgttatgtgcaactgtagaaaccctccagaaatttccactgctgttcttcactttcatcttgtctgctatcaaaccacttctgacaaaattagctgttttgaattacccatatcactgccagttttattttaaaatattttgtgtttgaagtatctgtgcatgggatcgttgatgtttatcagaactgttcactttcagaaatgattttttaaagcattttgttgaaaatgcggttgcttttttaacattattttagagttgtatcaaaattttcctgttttctgtatattgttgtgtcatttcttggctttttaatattttgactacaatgccctaatgcgaagaagtatggacatataaatattacaagagaaattagttaatagtaaagggttaaaaggtaagtaaaatgtccatgaaaataaaattttctttgaacagtttaaaaatggaatcacaaaaatctaactgcacttgaaatgaaactggaaattttatactaattaaatcctttatttaccttttcatattttatcaatggaaccttttaattgctccttctatatcactcttctccttgcttggctgatctcattacatgactttcgttacagacagtgtgagtgtactagatttgtttgctgctaatccgttattttaagtgttgtcagaaggaaataacttcttggtttgaccaagtaattttgcaaagtccttctctacctgataacacgtgaatgtatagcagtaaaggtgaaaattgcaggccttgttttgttcttcatacccccttcagttgtttatgggttaatgttatttgaaaactcttcctttttttaatgt

SEQ ID NO: 104924 - DNA, 3056 bp, Homo sapiens
agctatctagaggatcccagactcggcattccacctcgtccacccggtccacttgggccaccccttacactagctcctcctccgcatcttcctggaccacctccaggtgccccaccgccagctccgcatgtgaacccagctttctttcctccaccaactaacagtggcatgcctacatcagatagccgaggtccaccaccaacagatccatatgggcgacctccaccatatgataggggtgactatggcccccctggaagggaaatggatactgcaagaacgccattgagtgaagctgaatttgaagaaatcatgaatagaaatagggcaatctcaagcagtgctatttcgagagctgtgtctgatgccagtgctggtgattatgggagtgctattgagacactggtaactgcaatttctttaattaaacaatccaaagtatctgctgatgatcgttgcaaagttcttattagttctttgcaagattgccttcatggaattgagtccaagtcttatggttctggatcaagacgtgaacgatcaagagagagggaccatagtagatcacgagaaaagagtcgacgtcataaatcccgtagtagagaccgtcatgacgattattacagagagagaagcagagaacgagagaggcaccgggatcgtgaccgagaccgtgaccgagagcgtgaccgagagcgcgaatatcgtcatcgttagaagctgaaggaagaggatcaccttccaagacaaaacagtcttcatgggggaaaaatgacgcttgtccagcagtttgcttcttgtgattgaactgaacctgtaaggattcatggataaaatgaacaggaatagatctgaataaagcaaatctgcataaatggtaaccagtagctctacttttattttttatgttgcttaactgttttatttgaaggaaacctgtgtgatttaaaaagttatagcttttgcaactttattactggttatatacatttggccattatgatgtgcaagcaattggaaaaaaagtcaagtaaatgcttgtttttgtagtagtttgttcttgttaaaaatgtttatatgataatgtctgtaaacagcatcactttgattacaatagatgtagtgttgtaataaactgtttaatggggctgatgtgtaaagctgttcaagttatttgatgtttacacctcagggaaagtcttgtgttcagcaatatctaaagataatgttactatgacaacatttttactgtcctttaaagcattgcaatagcgtttttggatatgcctcaatctaatcttgcgttcagtgaattaaacatagtaattaagtgtcttttgcccttgattttgatattagaataggtgattacatggatatttaatatttctatattctgcttttctagctgtttttacctagttagcttgtgactttgctgaatggtatgtaaacttgtaaaaatagagatttgacagacatagcaatctagtcaatgtgtaaggggtcaaaaaaacagaggttttaacacataagtaaaaacccgtacatatttgatgtgtaatgcaggttaattacaacacagatgtaccgaaacacttaattgtgaaccgctaacattgaagaaattttgacaattccgatttgatgctgcaattacttgctgtttttattgatcttatggtttatttcttaagccatagtcagtgtaaatacagccctgcagcaggtaaatgtgagtaaagagagccttatattttccaattggtataaatttttgaaggatgtgatgttcattaacattcggttgtattccccagtatttgtaatgggaaattacagataaaccgtgtctgcacagtttaaggaatactatgtatattcatgcaccgtattgattcatgctatagttacttaatcaaagatttttttcaaacctgccttacatataggcccactttaaaagcacctgactagcatgtgttcttgattgcaaaattggcagaggcagggtgtcaacttgattaggtgtttttatgggaatgtaatttgaaatcactacttcagaaatttgacttaaaattcttgagcacgttaatatgtttttaagatctgattatctttgagagatcttctgttaatacacattggttgttaaagagtacccaaattctaggacaatgcttaaagtgttaaaataccctagatactgtgttatgtgcaactgtagaaaccctccagaaatttccactgctgttcttcactttcatcttgtctgctatcaaaccacttctgacaaaattagctgttttgaattacccatatcactgccagttttattttaaaatattttgtgtttgaagtatctgtgcatgggatcgttgatgtttatcagaactgttcactttcagaaatgattttttaaagcattttgttgaaaatgcggttgcttttttaacattattttagagttgtatcaaaattttcctgttttctgtatattgttgtgtcatttcttggctttttaatattttgactacaatgccctaatgcgaagaagtatggacatataaatattacaagagaaattagttaatagtaaagggttaaaaggtaagtaaaatgtccatgaaaataaaattttctttgaacagtttaaaaatggaatcacaaaaatctaactgcacttgaaatgaaactggaaattttatactaattaaatcctttatttaccttttcatattttatcaatggaaccttttaattgctccttctatatcactcttctccttgcttggctgatctcattacatgactttcgttacagacagtgtgagtgtactagatttgtttgctgctaatccgttattttaagtgttgtcagaaggaaataacttcttggtttgaccaagtaattttgcaaagtccttctctacctgataacacgtgaatgtatagcagtaaaggtgaaaattgcaggccttgttttgttcttcatacccccttcagttgtttatgggttaatgttatttgaaaactcttcctttttttaatgt

SEQ ID NO: 104925 - DNA, 2739 bp, Homo sapiens
aagaaattgcagttaccagtgtctcaatagcactcccataatcaccagcactggcatcagacacagctctcgaaatagcactgcttgagattgcccaatttctttaattaaacaatccaaagtatctgctgatgatcgttgcaaagttcttattagttctttgcaagattgccttcatggaattgagtccaagtcttatggttctggatcaagacgtgaacgatcaagagagagggaccatagtagatcacgagaaaagagtcgacgtcataaatcccgtagtagagaccgtcatgacgattattacagagagagaagcagagaacgagagaggcaccgggatcgtgaccgagaccgtgaccgagagcgtgaccgagagcgcgaatatcgtcatcgttagaagctgaaggaagaggatcaccttccaagacaaaacagtcttcatgggggaaaaatgacgcttgtccagcagtttgcttcttgtgattgaactgaacctgtaaggattcatggataaaatgaacaggaatagatctgaataaagcaaatctgcataaatggtaaccagtagctctacttttattttttatgttgcttaactgttttatttgaaggaaacctgtgtgatttaaaaagttatagcttttgcaactttattactggttatatacatttggccattatgatgtgcaagcaattggaaaaaaagtcaagtaaatgcttgtttttgtagtagtttgttcttgttaaaaatgtttatatgataatgtctgtaaacagcatcactttgattacaatagatgtagtgttgtaataaactgtttaatggggctgatgtgtaaagctgttcaagttatttgatgtttacacctcagggaaagtcttgtgttcagcaatatctaaagataatgttactatgacaacatttttactgtcctttaaagcattgcaatagcgtttttggatatgcctcaatctaatcttgcgttcagtgaattaaacatagtaattaagtgtcttttgcccttgattttgatattagaataggtgattacatggatatttaatatttctatattctgcttttctagctgtttttacctagttagcttgtgactttgctgaatggtatgtaaacttgtaaaaatagagatttgacagacatagcaatctagtcaatgtgtaaggggtcaaaaaaacagaggttttaacacataagtaaaaacccgtacatatttgatgtgtaatgcaggttaattacaacacagatgtaccgaaacacttaattgtgaaccgctaacattgaagaaattttgacaattccgatttgatgctgcaattacttgctgtttttattgatcttatggtttatttcttaagccatagtcagtgtaaatacagccctgcagcaggtaaatgtgagtaaagagagccttatattttccaattggtataaatttttgaaggatgtgatgttcattaacattcggttgtattccccagtatttgtaatgggaaattacagataaaccgtgtctgcacagtttaaggaatactatgtatattcatgcaccgtattgattcatgctatagttacttaatcaaagatttttttcaaacctgccttacatataggcccactttaaaagcacctgactagcatgtgttcttgattgcaaaattggcagaggcagggtgtcaacttgattaggtgtttttatgggaatgtaatttgaaatcactacttcagaaatttgacttaaaattcttgagcacgttaatatgtttttaagatctgattatctttgagagatcttctgttaatacacattggttgttaaagagtacccaaattctaggacaatgcttaaagtgttaaaataccctagatactgtgttatgtgcaactgtagaaaccctccagaaatttccactgctgttcttcactttcatcttgtctgctatcaaaccacttctgacaaaattagctgttttgaattacccatatcactgccagttttattttaaaatattttgtgtttgaagtatctgtgcatgggatcgttgatgtttatcagaactgttcactttcagaaatgattttttaaagcattttgttgaaaatgcggttgcttttttaacattattttagagttgtatcaaaattttcctgttttctgtatattgttgtgtcatttcttggctttttaatattttgactacaatgccctaatgcgaagaagtatggacatataaatattacaagagaaattagttaatagtaaagggttaaaaggtaagtaaaatgtccatgaaaataaaattttctttgaacagtttaaaaatggaatcacaaaaatctaactgcacttgaaatgaaactggaaattttatactaattaaatcctttatttaccttttcatattttatcaatggaaccttttaattgctccttctatatcactcttctccttgcttggctgatctcattacatgactttcgttacagacagtgtgagtgtactagatttgtttgctgctaatccgttattttaagtgttgtcagaaggaaataacttcttggtttgaccaagtaattttgcaaagtccttctctacctgataacacgtgaatgtatagcagtaaaggtgaaaattgcaggccttgttttgttcttcatacccccttcagttgtttatgggttaatgttatttgaaaactcttcctttttttaatgt

SEQ ID NO: 104926 - DNA, 2563 bp, Homo sapiens
ataatatttaagaagaatgaaatcagaatgtctcagtttaatcatcaggtaaattggaacatttcaccaccacaaaggcagctactgtttcagttaattcttattttgtgttagaatacataacagtgaagtagatgcacgacttgtgtatgtatagttaagccagcgtttttctgtgtattttggggaatagcaaaatctacatcacaaattttgacacattacagctgaaggaagaggatcaccttccaagacaaaacagtcttcatgggggaaaaatgacgcttgtccagcagtttgcttcttgtgattgaactgaacctgtaaggattcatggataaaatgaacaggaatagatctgaataaagcaaatctgcataaatggtaaccagtagctctacttttattttttatgttgcttaactgttttatttgaaggaaacctgtgtgatttaaaaagttatagcttttgcaactttattactggttatatacatttggccattatgatgtgcaagcaattggaaaaaaagtcaagtaaatgcttgtttttgtagtagtttgttcttgttaaaaatgtttatatgataatgtctgtaaacagcatcactttgattacaatagatgtagtgttgtaataaactgtttaatggggctgatgtgtaaagctgttcaagttatttgatgtttacacctcagggaaagtcttgtgttcagcaatatctaaagataatgttactatgacaacatttttactgtcctttaaagcattgcaatagcgtttttggatatgcctcaatctaatcttgcgttcagtgaattaaacatagtaattaagtgtcttttgcccttgattttgatattagaataggtgattacatggatatttaatatttctatattctgcttttctagctgtttttacctagttagcttgtgactttgctgaatggtatgtaaacttgtaaaaatagagatttgacagacatagcaatctagtcaatgtgtaaggggtcaaaaaaacagaggttttaacacataagtaaaaacccgtacatatttgatgtgtaatgcaggttaattacaacacagatgtaccgaaacacttaattgtgaaccgctaacattgaagaaattttgacaattccgatttgatgctgcaattacttgctgtttttattgatcttatggtttatttcttaagccatagtcagtgtaaatacagccctgcagcaggtaaatgtgagtaaagagagccttatattttccaattggtataaatttttgaaggatgtgatgttcattaacattcggttgtattccccagtatttgtaatgggaaattacagataaaccgtgtctgcacagtttaaggaatactatgtatattcatgcaccgtattgattcatgctatagttacttaatcaaagatttttttcaaacctgccttacatataggcccactttaaaagcacctgactagcatgtgttcttgattgcaaaattggcagaggcagggtgtcaacttgattaggtgtttttatgggaatgtaatttgaaatcactacttcagaaatttgacttaaaattcttgagcacgttaatatgtttttaagatctgattatctttgagagatcttctgttaatacacattggttgttaaagagtacccaaattctaggacaatgcttaaagtgttaaaataccctagatactgtgttatgtgcaactgtagaaaccctccagaaatttccactgctgttcttcactttcatcttgtctgctatcaaaccacttctgacaaaattagctgttttgaattacccatatcactgccagttttattttaaaatattttgtgtttgaagtatctgtgcatgggatcgttgatgtttatcagaactgttcactttcagaaatgattttttaaagcattttgttgaaaatgcggttgcttttttaacattattttagagttgtatcaaaattttcctgttttctgtatattgttgtgtcatttcttggctttttaatattttgactacaatgccctaatgcgaagaagtatggacatataaatattacaagagaaattagttaatagtaaagggttaaaaggtaagtaaaatgtccatgaaaataaaattttctttgaacagtttaaaaatggaatcacaaaaatctaactgcacttgaaatgaaactggaaattttatactaattaaatcctttatttaccttttcatattttatcaatggaaccttttaattgctccttctatatcactcttctccttgcttggctgatctcattacatgactttcgttacagacagtgtgagtgtactagatttgtttgctgctaatccgttattttaagtgttgtcagaaggaaataacttcttggtttgaccaagtaattttgcaaagtccttctctacctgataacacgtgaatgtatagcagtaaaggtgaaaattgcaggccttgttttgttcttcatacccccttcagttgtttatgggttaatgttatttgaaaactcttcctttttttaatgt

SEQ ID NO: 104927 - DNA, 366 bp, Homo sapiens
gatctcactgtgttgcccaggctggagtgcagtagtgtgattataggttactgtagcctcaaactcctgggctcaagcaatcctcgtgcctcaaccttctaagcagctgggattacaggcatgagccactgtgcccagctgttgttttagataaaagcagattaagacctttttacagaagaataacagtaataatattgatctctttttactttgtatcctcaccccttaaacactttttaggtttgcccttgttggtgttggatctgaagcatcttcaaaaaagttaatggatctgttacctaaaagagaacttcatggtcagaatcctgttgtaactccatgcaataaacagttcctgagtca

SEQ ID NO: 104928 - DNA, 3412 bp, Homo sapiens
  misc_feature (222)..(222): n is a, c, g, or t
ggtacggcaagactctgaaaggtgactcaggtttcactccttgtcactgggttttaaattgtaagtctggaagttactagaacaatcccagaattagctcacacactttcactctgtttttccctttcttcctggggttatatttacccagcattcctaggtgtttgtggtgggagatccgcccctacgttatcttaatttgttgccatatttctgaaccangaatcccatttaccacattgagttctggacatcaaggttctccgggcatcactttctatgctgtgtcatcagtgaagcccataaacttacccgttatcagaaaagcgaagatttcgagagtcttggccaagccaagactctcgaaatcgaccccttgtacagttccacctcgtccacccggtccacttgggccaccccttacactagctcctcctccgcatcttcctggaccacctccaggtgccccaccgccagctccgcatgtgaacccagctttctttcctccaccaactaacagtggcatgcctacatcagatagccgaggtccaccaccaacagatccatatgggcgacctccaccatatgataggggtgactatggcccccctggaagggaaatggatactgcaagaacgccattgagtgaagctgaatttgaagaaatcatgaatagaaatagggcaatctcaagcagtgctatttcgagagctgtgtctgatgccagtgctggtgattatgggagtgctattgagacactggtaactgcaatttctttaattaaacaatccaaagtatctgctgatgatcgttgcaaagttcttattagttctttgcaagattgccttcatggaattgagtccaagtcttatggttctggatcaagacgtgaacgatcaagagagagggaccatagtagatcacgagaaaagagtcgacgtcataaatcccgtagtagagaccgtcatgacgattattacagagagagaagcagagaacgagagaggcaccgggatcgtgaccgagaccgtgaccgagagcgtgaccgagagcgcgaatatcgtcatcgttagaagctgaaggaagaggatcaccttccaagacaaaacagtcttcatgggggaaaaatgacgcttgtccagcagtttgcttcttgtgattgaactgaacctgtaaggattcatggataaaatgaacaggaatagatctgaataaagcaaatctgcataaatggtaaccagtagctctacttttattttttatgttgcttaactgttttatttgaaggaaacctgtgtgatttaaaaagttatagcttttgcaactttattactggttatatacatttggccattatgatgtgcaagcaattggaaaaaaagtcaagtaaatgcttgtttttgtagtagtttgttcttgttaaaaatgtttatatgataatgtctgtaaacagcatcactttgattacaatagatgtagtgttgtaataaactgtttaatggggctgatgtgtaaagctgttcaagttatttgatgtttacacctcagggaaagtcttgtgttcagcaatatctaaagataatgttactatgacaacatttttactgtcctttaaagcattgcaatagcgtttttggatatgcctcaatctaatcttgcgttcagtgaattaaacatagtaattaagtgtcttttgcccttgattttgatattagaataggtgattacatggatatttaatatttctatattctgcttttctagctgtttttacctagttagcttgtgactttgctgaatggtatgtaaacttgtaaaaatagagatttgacagacatagcaatctagtcaatgtgtaaggggtcaaaaaaacagaggttttaacacataagtaaaaacccgtacatatttgatgtgtaatgcaggttaattacaacacagatgtaccgaaacacttaattgtgaaccgctaacattgaagaaattttgacaattccgatttgatgctgcaattacttgctgtttttattgatcttatggtttatttcttaagccatagtcagtgtaaatacagccctgcagcaggtaaatgtgagtaaagagagccttatattttccaattggtataaatttttgaaggatgtgatgttcattaacattcggttgtattccccagtatttgtaatgggaaattacagataaaccgtgtctgcacagtttaaggaatactatgtatattcatgcaccgtattgattcatgctatagttacttaatcaaagatttttttcaaacctgccttacatataggcccactttaaaagcacctgactagcatgtgttcttgattgcaaaattggcagaggcagggtgtcaacttgattaggtgtttttatgggaatgtaatttgaaatcactacttcagaaatttgacttaaaattcttgagcacgttaatatgtttttaagatctgattatctttgagagatcttctgttaatacacattggttgttaaagagtacccaaattctaggacaatgcttaaagtgttaaaataccctagatactgtgttatgtgcaactgtagaaaccctccagaaatttccactgctgttcttcactttcatcttgtctgctatcaaaccacttctgacaaaattagctgttttgaattacccatatcactgccagttttattttaaaatattttgtgtttgaagtatctgtgcatgggatcgttgatgtttatcagaactgttcactttcagaaatgattttttaaagcattttgttgaaaatgcggttgcttttttaacattattttagagttgtatcaaaattttcctgttttctgtatattgttgtgtcatttcttggctttttaatattttgactacaatgccctaatgcgaagaagtatggacatataaatattacaagagaaattagttaatagtaaagggttaaaaggtaagtaaaatgtccatgaaaataaaattttctttgaacagtttaaaaatggaatcacaaaaatctaactgcacttgaaatgaaactggaaattttatactaattaaatcctttatttaccttttcatattttatcaatggaaccttttaattgctccttctatatcactcttctccttgcttggctgatctcattacatgactttcgttacagacagtgtgagtgtactagatttgtttgctgctaatccgttattttaagtgttgtcagaaggaaataacttcttggtttgaccaagtaattttgcaaagtccttctctacctgataacacgtgaatgtatagcagtaaaggtgaaaattgcaggccttgttttgttcttcatacccccttcagttgtttatgggttaatgttatttgaaaactcttcctttttttaatgt

SEQ ID NO: 104929 - DNA, 1902 bp, Homo sapiens
accgccgctagatccgctgctgctgccgcggcgggcggacctgcaggaggcggcggcggcggcggcggccgaggctgaaggaagatggcggacggcgtggaccacatagacatttacgcggatgtcggcgaagagttcaaccaggaagctgaatatggtgggcatgatcagatagatttgtatgacgatgtcatatctccatctgcaaataatggagatgccccagaagaccgagattacatggatactctcccaccaactgttggtgatgatgtgggtaaaggagcagcaccaaatgttgtctatacatatactggaaagagaattgcattatatattggaaatctaacatggtggacaacagatgaagacttaactgaagcagttcattctttgggagtaaatgatattttggagataaaattttttgaaaatcgagcaaatggccagtcaaaggggtttgcccttgttggtgttggatctgaagcatcttcaaaaaagttaatggatctgttacctaaaagagaacttcatggtcagaatcctgttgtaactccatgcaataaacagttcctgagtcaatttgaaatgcagtccaggaaaactacacaatcaggacaaatgtctggggaaggtaaagctggtcctccaggaggcagttcccgtgcagcatttccacaaggtggtagaggacggggccgttttccaggggctgttcctggtggggacagatttcctgggccagcaggaccaggagggccacccccaccttttccagctggacagactccaccacgtccacccttaggtcctccaggcccacctggtccaccaggtcctccacctcctggtcaggttctgcctcctcctctagctgggcctcctaatcgaggagatcgccctccaccaccagttctttttcctggacaaccttttgggcagcctccattgggtccacttcctcctggccctccacctccagttccaggctacggcccccctcctggcccaccacctccacaacagggaccacctccacctccaggcccctttccacctcgtccacccggtccacttgggccaccccttacactagctcctcctccgcatcttcctggaccacctccaggtgccccaccgccagctccgcatgtgaacccagctttctttcctccaccaactaacagtggcatgcctacatcagatagccgaggtccaccaccaacagatccatatgggcgacctccaccatatgataggggtgactatggcccccctggaagggaaatggatactgcaagaacgccattgagtgaagctgaatttgaagaaatcatgaatagaaatagggcaatctcaagcagtgctatttcgagagctgtgtctgatgccagtgctggtgattatgggagtgctattgagacactggtaactgcaatttctttaattaaacaatccaaagtatctgctgatgatcgttgcaaagttcttattagttctttgcaagattgccttcatggaattgagtccaagtcttatggttctggatcaagacgtgaacgatcaagagagagggaccatagtagatcacgagaaaagagtcgacgtcataaatcccgtagtagagaccgtcatgacgattattacagagagagaagcagagaacgagagaggcaccgggatcgtgaccgagaccgtgaccgagagcgtgaccgagagcgcgaatatcgtcatcgttagaagctgaaggaagaggatcaccttccaagacaaaacagtcttcatgggggaaaaatgacgcttgtccagcagtttgcttcttgtgattgaactgaacctgtaaggattcatggataaaatgaacaggaatagatctgaataaagcaaatctgcataaatggt

SEQ ID NO: 104930 - DNA, 2581 bp, Homo sapiens
accgccgctagatccgctgctgctgccgcggcgggcggacctgcaggaggcggcggcggcggcggcggccgaggctgaaggaagatggcggacggcgtggaccacatagacatttacgcggatgtcggcgaagagttcaaccagattacagagagagaagcagagaacgagagaggcaccgggatcgtgaccgagaccgtgaccgagagcgtgaccgagagcgcgaatatcgtcatcgttagaagctgaaggaagaggatcaccttccaagacaaaacagtcttcatgggggaaaaatgacgcttgtccagcagtttgcttcttgtgattgaactgaacctgtaaggattcatggataaaatgaacaggaatagatctgaataaagcaaatctgcataaatggtaaccagtagctctacttttattttttatgttgcttaactgttttatttgaaggaaacctgtgtgatttaaaaagttatagcttttgcaactttattactggttatatacatttggccattatgatgtgcaagcaattggaaaaaaagtcaagtaaatgcttgtttttgtagtagtttgttcttgttaaaaatgtttatatgataatgtctgtaaacagcatcactttgattacaatagatgtagtgttgtaataaactgtttaatggggctgatgtgtaaagctgttcaagttatttgatgtttacacctcagggaaagtcttgtgttcagcaatatctaaagataatgttactatgacaacatttttactgtcctttaaagcattgcaatagcgtttttggatatgcctcaatctaatcttgcgttcagtgaattaaacatagtaattaagtgtcttttgcccttgattttgatattagaataggtgattacatggatatttaatatttctatattctgcttttctagctgtttttacctagttagcttgtgactttgctgaatggtatgtaaacttgtaaaaatagagatttgacagacatagcaatctagtcaatgtgtaaggggtcaaaaaaacagaggttttaacacataagtaaaaacccgtacatatttgatgtgtaatgcaggttaattacaacacagatgtaccgaaacacttaattgtgaaccgctaacattgaagaaattttgacaattccgatttgatgctgcaattacttgctgtttttattgatcttatggtttatttcttaagccatagtcagtgtaaatacagccctgcagcaggtaaatgtgagtaaagagagccttatattttccaattggtataaatttttgaaggatgtgatgttcattaacattcggttgtattccccagtatttgtaatgggaaattacagataaaccgtgtctgcacagtttaaggaatactatgtatattcatgcaccgtattgattcatgctatagttacttaatcaaagatttttttcaaacctgccttacatataggcccactttaaaagcacctgactagcatgtgttcttgattgcaaaattggcagaggcagggtgtcaacttgattaggtgtttttatgggaatgtaatttgaaatcactacttcagaaatttgacttaaaattcttgagcacgttaatatgtttttaagatctgattatctttgagagatcttctgttaatacacattggttgttaaagagtacccaaattctaggacaatgcttaaagtgttaaaataccctagatactgtgttatgtgcaactgtagaaaccctccagaaatttccactgctgttcttcactttcatcttgtctgctatcaaaccacttctgacaaaattagctgttttgaattacccatatcactgccagttttattttaaaatattttgtgtttgaagtatctgtgcatgggatcgttgatgtttatcagaactgttcactttcagaaatgattttttaaagcattttgttgaaaatgcggttgcttttttaacattattttagagttgtatcaaaattttcctgttttctgtatattgttgtgtcatttcttggctttttaatattttgactacaatgccctaatgcgaagaagtatggacatataaatattacaagagaaattagttaatagtaaagggttaaaaggtaagtaaaatgtccatgaaaataaaattttctttgaacagtttaaaaatggaatcacaaaaatctaactgcacttgaaatgaaactggaaattttatactaattaaatcctttatttaccttttcatattttatcaatggaaccttttaattgctccttctatatcactcttctccttgcttggctgatctcattacatgactttcgttacagacagtgtgagtgtactagatttgtttgctgctaatccgttattttaagtgttgtcagaaggaaataacttcttggtttgaccaagtaattttgcaaagtccttctctacctgataacacgtgaatgtatagcagtaaaggtgaaaattgcaggccttgttttgttcttcatacccccttcagttgtttatgggttaatgttatttgaaaactcttcctttttttaatgt

SEQ ID NO: 104931 - DNA, 413 bp, Homo sapiens
ttattttagtattttttggtctataataatagatatataaagagaaaaaaagaaacttactatcattcccagtgaccccttctgggtgccaactactgaggaggaatacttgcactttggggagaaggctgactctgagaaccaagcccggaagtacatgaacgcagtacgaaagcggaaggggctttatgtggaagaaaagattgtggagcatgcagaaaagcagaggacactcagcaaaaataagtagctacctactactggtggattcttttccttatagtgaatttaaaagtatcatcaagggtttaatattgggaaaatttctttttgccacattatctctgtttattcactttcaataaagttgatccatataaatattttaaagaggatgttagagaacgttttcc

SEQ ID NO: 104932 - DNA, 905 bp, Homo sapiens
agcaggctggtactggtctgggatgttaggatggcgcgcgggcgtgtcggacccgcagagctctcggactttcggaagctctcggtgtgggtgcgacccgagagaaggagcggggctggtggggctgctgcagccggtgagtgtgggctggcgctgggggctggaacctcctaggccagcctttgggcggtgccggaggaacccgctcgctgcggctctgaggcgggaacaggggctggggccgagcgcgggctgggagcttcggtccccggagtgccgcttcccgtctggggccggggcggtcgcctgtctgtgtggacccaggatcctcaaagagaacgaatctgggaccctgcagaaatgaagggcatgtagtgtagaggtttttcctttttatttagaaaggaatgaaagaccggcagtgcacctgcttggataataagcacgtgacccaaaactttgttcgggctccatgggcaggaataaagctgggtatttgacctcgcgcgaggacgagcgagaatgtcagaatgagggacttgggggaagactgaagagagaaagggagcatcttcttcagcattttctctccctcctggatgcaacccttcctgtacgtggtcattggcctggagatgtttactggagtactcctccaccggcagggttactggtgtcactgtgcacccagtcccctcgagctgcgtgattcatcgcagcctttggatccggaaggatgagcaaactccttaagtgtaatcgtggtaggatactgactttagtgctcgaactggacttaggccttggtggtctatctcatcaataaacattcactgggttcttggtttaaggggtttgagaagcttgccacctcccagcgtttattattatttttttcttttgcc

SEQ ID NO: 104933 - DNA, 3681 bp, Homo sapiens
agcaggctggtactggtctgggatgttaggatggcgcgcgggcgtgtcggacccgcagagctctcggactttcggaagctctcggtgtgggtgcgacccgagagaaggagcggggctggtggggctgctgcagccgtcacaggaaataagtaatcatggtgctcaacagtttggataagatgattcaactccagaaaaacactgccaacatcaggaatatttgtgttttggctcatgttgaccatggaaaaactactctggctgactgtcttatatctagcaatggaatcatctccagccgcctagcaggcaagttaaggtacatggacagcagagaagatgaacagatccgagggatcactatgaaatccagtgccatttccctacattatgcaacaggtaatgaggagtacctgatcaatctgatagactctccaggacacgtggacttttcctcagaagtatcaaccgctgttcgcatttgtgatggatgcatcattgtggtagatgctgtggaaggagtctgtccacagacacaggcagttctgcgacaagcttggcttgaaaacatccgtccggttttagtgattaataagattgatcgcttgatagtggaactgaaattcaccccacaagaggcctattctcacctcaagaatattttagaacagattaatgcgctcacagggactctttttacttctaaagtcctagaagaaagagcagagagggagactgaatcccaagtgaatccaaattctgaacaaggagagcaagtatatgactggagcactggcttggaggacacagatgattctcacctttacttctctccagaacagggaaatgtggtgtttaccagtgcaatagatgggtggggctttggaattgagcacttcgccagaatctacagtcaaaaaattggcatcaaaaaggaagttcttatgaaaaccttgtggggagattactatataaatatgaaggctaaaaagatcatgaagggtgatcaggccaaaggaaagaaacctttatttgtacagttgatcctggaaaatatatggagtttgtatgatgctgttttgaaaaaggacaaagacaaaattgataaaatagtgacttctttaggattaaaaattggagcccgggaggcacgacattcagaccctaaagttcagatcaacgccatttgcagtcagtggctacccatatcccatgctgttcttgctatggtgtgtcagaaacttcctagtccccttgatattacagctgagagagtggagagactgatgtgcacaggatcacaaacttttgactcttttccaccagaaactcaagcactgaaagcagcttttatgaaatgtggaagtgaggacactgctccagttattatatttgtttccaaaatgtttgcagttgatgctaaggccttgcctcagaataagccaaggcctctcactcaagaagaaattgctcagagacgtgagcgtgcaagacaaaggcatgcagagaagcttgcagcagcacagggacaggcacccttggagcccacccaagatgggagtgccattgaaacatgtccaaaaggagacgagccaagaggtgacgagcaacaggtggaaagtatgacccctaaacctgtgctccaggaagaaaacaaccaagagtcttttattgcatttgctcgggtgttcagtggtgtggctcgaagaggaaagaaaatttttgtcttggggcccaaatacagtcctcttgagtttttacgaagggtaccattaggcttctcagctccaccagatggcctcccccaagtcccccacatggcatactgtgctctggaaaacctgtatcttctgatgggaagggaactggaatatctagaggaggtacctccaggaaatgtgctaggaataggaggccttcaagattttgtgctgaaatctgcaacactgtgtagcctgccatcctgcccaccatttataccactcaacttcgaagccactcctattgtgagagttgctgttgaaccaaaacatccaagtgaaatgcctcagctcgtaaaaggaatgaaactgttaaaccaggctgatccctgtgtccagattttaattcaggaaacgggagagcacgttttagtcacagcaggagaagtccaccttcagcgatgcctggatgacttaaaagaaaggtttgcaaagattcatatcagtgtatctgaacctattattccattcagagaaacaatcacaaaacccccaaaagttgacatggtcaatgaagaaataggcaaacagcaaaaagttgcagtcatacaccaaatgaaagaagatcaaagcaaaatccctgaaggaatccaagttgactctgacgggctaatcaccataacaactcccaataaacttgccacgctcagtgttcgagccatgccccttccagaagaagtcacccagattctggaagaaaatagtgatttgattcgttctatggagcagttgacatcctctttgaatgagggcgaaaatactcacatgattcatcagaagacccaagagaaaatttgggaattcaaaggaaaactggagcaacacctaacagggagaagatggaggaacattgttgaccaaatctggtcatttggcccaagaaaatgtgggcccaacatactagtcaataaaagtgaagattttcagaactcagtatggacaggtccagctgacaaagcttcaaaagaagccagtagataccgagatttgggcaatagcattgtgagtggcttccaactagcaaccctctctggccccatgtgtgaggagcctctcatgggtgtctgttttgttctggaaaaatgggacctaagtaaatttgaggaacaaggagcaagtgatctggcaaaagagggacaggaggaaaatgaaacctgttctggtggaaatgaaaaccaagagctacaagatggctgctctgaggcctttgagaagaggacatcacagaaaggagaatctccactcactgactgctatggacctttctcaggacagctaattgccaccatgaaagaagcatgtcgctatgcactgcaagtgaaacctcagcgcctgatggcagctatgtacacatgtgacatcatggccactggtgatgttctcggtcgagtctatgctgtcttgtcaaagagagaaggtcgggtacttcaagaagaaatgaaagaagggacagacatgttcatcatcaaggctgtgctgcctgttgctgaaagctttggttttgctgatgaaatcaggaagaggacaagtggcctggccagcccacaactagtattcagccattgggagatcattcccagtgaccccttctgggtgccaactactgaggaggaatacttgcactttggggagaaggctgactctgagaaccaagcccggaagtacatgaacgcagtacgaaagcggaaggggctttatgtggaagaaaagattgtggagcatgcagaaaagcagaggacactcagcaaaaataagtagctacctactactggtggattcttttccttatagtgaatttaaaagtatcatcaagggtttaatattgggaaaatttctttttgccacattatctctgtttattcactttcaataaagttgatccatataaatattttaaagaggatgttagagaacgttttcc

SEQ ID NO: 104934 - DNA, 2860 bp, Homo sapiens
aaagctaggtacgagctgcgttcgaatcggccgaggagagaaggagcggggctggtggggctgctgcagccgtcacaggaaataagtaatcatggtgctcaacagtttggataagatgattcaactccagaaaaacactgccaacatcaggaatatttgtgttttggctcatgttgaccatggaaaaactactctggctgactgtcttatatctagcaatggaatcatctccagccgcctagcaggcaagttaaggtacatggacagcagagaagatgaacagatccgagggatcactatgaaatccagtgccatttccctacattatgcaacaggtaatgaggagtacctgatcaatctgatagactctccaggacacgtggacttttcctcagaagtatcaaccgctgttcgcatttgtgatggatgcatcattgtggtagatgctgtggaaggagtctgtccacagacacaggcagttctgcgacaagcttggcttgaaaacatccgtccggttttagtgattaataagattgatcgcttgatagtggaactgaaattcaccccacaagaggcctattctcacctcaagaatattttagaacagattaatgcgctcacagggactctttttacttctaaagtcctagaagaaagagcagagagggagactgaatcccaagtgaatccaaattctgaacaaggagagcaagtatatgactggagcactggcttggaggacacagatgattctcacctttacttctctccagaacagggaaatgtggtgtttaccagtgcaatagatgggtggggctttggaattgagcacttcgccagaatctacagtcaaaaaattggcatcaaaaaggaagttcttatgaaaaccttgtggggagattactatataaatatgaaggctaaaaagatcatgaagggtgatcaggccaaaggaaagaaacctttatttgtacagttgatcctggaaaatatatggagtttgtatgatgctgttttgaaaaaggacaaagacaaaattgataaaatagtgacttctttaggattaaaaattggagcccgggaggcacgacattcagaccctaaagttcagatcaacgccatttgcagtcagtggctacccatatcccatgctgttcttgctatggtgtgtcagaaacttcctagtccccttgatattacagctgagagagtggagagactgatgtgcacaggatcacaaacttttgactcttttccaccagaaactcaagcactgaaagcagcttttatgaaatgtggaagtgaggacactgctccagttattatatttgtttccaaaatgtttgcagttgatgctaaggccttgcctcagaataagccaaggcctctcactcaagaagaaattgctcagagacgtgagcgtgcaagacaaaggcatgcagagaagcttgcagcagcacagggacaggcacccttggagcccacccaagatgggagtgccattgaaacatgtccaaaaggagacgagccaagaggtgacgagcaacaggtggaaagtatgacccctaaacctgtgctccaggaagaaaacaaccaagagtcttttattgcatttgctcgggtgttcagtggtgtggctcgaagaggaaagaaaatttttgtcttggggcccaaatacagtcctcttgagtttttacgaagggtaccattaggcttctcagctccaccagatggcctcccccaagtcccccacatggcatactgtgctctggaaaacctgtatcttctgatgggaagggaactggaatatctagaggaggtacctccaggaaatgtgctaggaataggaggccttcaagattttgtgctgaaatctgcaacactgtgtagcctgccatcctgcccaccatttataccactcaacttcgaagccactcctattgtgagagttgctgttgaaccaaaacatccaagtgaaatgcctcagctcgtaaaaggaatgaaactgttaaaccaggctgatccctgtgtccagattttaattcaggaaacgggagagcacgttttagtcacagcaggagaagtccaccttcagcgatgcctggatgacttaaaagaaaggtttgcaaagattcatatcagtgtatctgaacctattattccattcagagaaacaatcacaaaacccccaaaagttgacatggtcaatgaagaaataggcaaacagcaaaaagttgcagtcatacaccaaatgaaagaagatcaaagcaaaatccctgaaggaatccaagttgactctgacgggctaatcaccataacaactcccaataaacttgccacgctcagtgttcgagccatgccccttccagaagaagtcacccagattctggaagaaaatagtgatttgattcgttctatggagcagttgacatcctctttgaatgagggcgaaaatactcacatgattcatcagaagacccaagagaaaatttgggaattcaaaggaaaactggagcaacacctaacagggagaagatggaggaacattgttgaccaaatctggtcatttggcccaagaaaatgtgggcccaacatactagtcaataaaagtgaagattttcagaactcagtatggacaggtccagctgacaaagcttcaaaagaagccagtagataccgagatttgggcaatagcattgtgagtggcttccaactagcaaccctctctggccccatgtgtgaggagcctctcatgggtgtctgttttgttctggaaaaatgggacctaagtaaatttgtttgagttcattatagattctggatattaggcctttgtcacatgagtagcctgttcgattaa

SEQ ID NO: 104935 - DNA, 2571 bp, Homo sapiens
aaagctaggtacgagctgcgttcgaatcggccgaggagagaaggagcggggctggtggggctgctgcagccgtcacaggaaataagtaatcatggtgctcaacagtttggataagatgattcaactccagaaaaacactgccaacatcaggaatatttgtgttttggctcatgttgaccatggaaaaactactctggctgactgtcttatatctagcaatggaatcatctccagccgcctagcaggcaagttaaggtacatggacagcagagaagatgaacagatccgagggatcactatgaaatccagtgccatttccctacattatgcaacaggtaatgaggagtacctgatcaatctgatagactctccaggacacgtggacttttcctcagaagtatcaaccgctgttcgcatttgtgatggatgcatcattgtggtagatgctgtggaaggagtctgtccacagacacaggcagttctgcgacaagcttggcttgaaaacatccgtccggttttagtgattaataagattgatcgcttgatagtggaactgaaattcaccccacaagaggcctattctcacctcaagaatattttagaacagattaatgcgctcacagggactctttttacttctaaagtcctagaagaaagagcagagagggagactgaatcccaagtgaatccaaattctgaacaaggagagcaagtatatgactggagcactggcttggaggacacagatgattctcacctttacttctctccagaacagggaaatgtggtgtttaccagtgcaatagatgggtggggctttggaattgagcacttcgccagaatctacagtcaaaaaattggcatcaaaaaggaagttcttatgaaaaccttgtggggagattactatataaatatgaaggctaaaaagatcatgaagggtgatcaggccaaaggaaagaaacctttatttgtacagttgatcctggaaaatatatggagtttgtatgatgctgttttgaaaaaggacaaagacaaaattgataaaatagtgacttctttaggattaaaaattggagcccgggaggcacgacattcagaccctaaagttcagatcaacgccatttgcagtcagtggctacccatatcccatgctgttcttgctatggtgtgtcagaaacttcctagtccccttgatattacagctgagagagtggagagactgatgtgcacaggatcacaaacttttgactcttttccaccagaaactcaagcactgaaagcagcttttatgaaatgtggaagtgaggacactgctccagttattatatttgtttccaaaatgtttgcagttgatgctaaggccttgcctcagaataagccaaggcctctcactcaagaagaaattgctcagagacgtgagcgtgcaagacaaaggcatgcagagaagcttgcagcagcacagggacaggcacccttggagcccacccaagatgggagtgccattgaaacatgtccaaaaggagacgagccaagaggtgacgagcaacaggtggaaagtatgacccctaaacctgtgctccaggaagaaaacaaccaagagtcttttattgcatttgctcgggtgttcagtggtgtggctcgaagaggaaagaaaatttttgtcttggggcccaaatacagtcctcttgagtttttacgaagggtaccattaggcttctcagctccaccagatggcctcccccaagtcccccacatggcatactgtgctctggaaaacctgtatcttctgatgggaagggaactggaatatctagaggaggtacctccaggaaatgtgctaggaataggaggccttcaagattttgtgctgaaatctgcaacactgtgtagcctgccatcctgcccaccatttataccactcaacttcgaagccactcctattgtgagagttgctgttgaaccaaaacatccaagtgaaatgcctcagctcgtaaaaggaatgaaactgttaaaccaggctgatccctgtgtccagattttaattcaggaaacgggagagcacgttttagtcacagcaggagaagtccaccttcagcgatgcctggatgacttaaaagaaaggttaggtgaaaatgatagcgatggagaaatgatagctctcaatcaatgggatgttttagtgtttcctaaaccagttgaacttagactgcggcttatttttggagaaaaatgaaatgccctcaattcagacatgaacagttattcgatggtagacttattttttaataactgaaaaatggcattcactgcctacacttgaataattttgcatttttagcttaagtcataaaatgtttttctgtgtatgtattttactttaagcatgtacacaaaacacacaaaataccaggacaacaaaacaagatattattttgtaaatgttggctatgtaattaggatagacttcttctcttattgatgtggtctttacaatgtaaaccttctggaaatctttatgtttttctataaagatgatatgtattataaaatgggcatcccaaatttttataa

SEQ ID NO: 104936 - DNA, 403 bp, Homo sapiens
  misc_feature (47)..(47): n is a, c, g, or t
accgaactgttcaagtgttagacgtccatagcacaacaaagagaatngcttatcattcccagtgaccccttctgggtgccaactactgaggaggaatacttgcactttggggagaaggctgactctgagaaccaagcccggaagtacatgaacgcagtacgaaagcggaaggggctttatgtggaagaaaagattgtggagcatgcagaaaagcagaggacactcagcaaaaataagtagctacctactactggtggattcttttccttatagtgaatttaaaagtatcatcaagggtttaatattgggaaaatttctttttgccacattatctctgtttattcactttcaataaagttgatccatataaatattttaaagaggatgttagagaacgttttcc

SEQ ID NO: 104937 - DNA, 3617 bp, Homo sapiens
aaagctaggtacgagctgcgttcgaatcggccgaggagagaaggagcggggctggtggggctgctgcagccgtcacaggaaataagtaatcatggtgctcaacagtttggataagatgattcaactccagaaaaacactgccaacatcaggaatatttgtgttttggctcatgttgaccatggaaaaactactctggctgactgtcttatatctagcaatggaatcatctccagccgcctagcaggcaagttaaggtacatggacagcagagaagatgaacagatccgagggatcactatgaaatccagtgccatttccctacattatgcaacaggtaatgaggagtacctgatcaatctgatagactctccaggacacgtggacttttcctcagaagtatcaaccgctgttcgcatttgtgatggatgcatcattgtggtagatgctgtggaaggagtctgtccacagacacaggcagttctgcgacaagcttggcttgaaaacatccgtccggttttagtgattaataagattgatcgcttgatagtggaactgaaattcaccccacaagaggcctattctcacctcaagaatattttagaacagattaatgcgctcacagggactctttttacttctaaagtcctagaagaaagagcagagagggagactgaatcccaagtgaatccaaattctgaacaaggagagcaagtatatgactggagcactggcttggaggacacagatgattctcacctttacttctctccagaacagggaaatgtggtgtttaccagtgcaatagatgggtggggctttggaattgagcacttcgccagaatctacagtcaaaaaattggcatcaaaaaggaagttcttatgaaaaccttgtggggagattactatataaatatgaaggctaaaaagatcatgaagggtgatcaggccaaaggaaagaaacctttatttgtacagttgatcctggaaaatatatggagtttgtatgatgctgttttgaaaaaggacaaagacaaaattgataaaatagtgacttctttaggattaaaaattggagcccgggaggcacgacattcagaccctaaagttcagatcaacgccatttgcagtcagtggctacccatatcccatgctgttcttgctatggtgtgtcagaaacttcctagtccccttgatattacagctgagagagtggagagactgatgtgcacaggatcacaaacttttgactcttttccaccagaaactcaagcactgaaagcagcttttatgaaatgtggaagtgaggacactgctccagttattatatttgtttccaaaatgtttgcagttgatgctaaggccttgcctcagaataagccaaggcctctcactcaagaagaaattgctcagagacgtgagcgtgcaagacaaaggcatgcagagaagcttgcagcagcacagggacaggcacccttggagcccacccaagatgggagtgccattgaaacatgtccaaaaggagacgagccaagaggtgacgagcaacaggtggaaagtatgacccctaaacctgtgctccaggaagaaaacaaccaagagtcttttattgcatttgctcgggtgttcagtggtgtggctcgaagaggaaagaaaatttttgtcttggggcccaaatacagtcctcttgagtttttacgaagggtaccattaggcttctcagctccaccagatggcctcccccaagtcccccacatggcatactgtgctctggaaaacctgtatcttctgatgggaagggaactggaatatctagaggaggtacctccaggaaatgtgctaggaataggaggccttcaagattttgtgctgaaatctgcaacactgtgtagcctgccatcctgcccaccatttataccactcaacttcgaagccactcctattgtgagagttgctgttgaaccaaaacatccaagtgaaatgcctcagctcgtaaaaggaatgaaactgttaaaccaggctgatccctgtgtccagattttaattcaggaaacgggagagcacgttttagtcacagcaggagaagtccaccttcagcgatgcctggatgacttaaaagaaaggtttgcaaagattcatatcagtgtatctgaacctattattccattcagagaaacaatcacaaaacccccaaaagttgacatggtcaatgaagaaataggcaaacagcaaaaagttgcagtcatacaccaaatgaaagaagatcaaagcaaaatccctgaaggaatccaagttgactctgacgggctaatcaccataacaactcccaataaacttgccacgctcagtgttcgagccatgccccttccagaagaagtcacccagattctggaagaaaatagtgatttgattcgttctatggagcagttgacatcctctttgaatgagggcgaaaatactcacatgattcatcagaagacccaagagaaaatttgggaattcaaaggaaaactggagcaacacctaacagggagaagatggaggaacattgttgaccaaatctggtcatttggcccaagaaaatgtgggcccaacatactagtcaataaaagtgaagattttcagaactcagtatggacaggtccagctgacaaagcttcaaaagaagccagtagataccgagatttgggcaatagcattgtgagtggcttccaactagcaaccctctctggccccatgtgtgaggagcctctcatgggtgtctgttttgttctggaaaaatgggacctaagtaaatttgaggaacaaggagcaagtgatctggcaaaagagggacaggaggaaaatgaaacctgttctggtggaaatgaaaaccaagagctacaagatggctgctctgaggcctttgagaagaggacatcacagaaaggagaatctccactcactgactgctatggacctttctcaggacagctaattgccaccatgaaagaagcatgtcgctatgcactgcaagtgaaacctcagcgcctgatggcagctatgtacacatgtgacatcatggccactggtgatgttctcggtcgagtctatgctgtcttgtcaaagagagaaggtcgggtacttcaagaagaaatgaaagaagggacagacatgttcatcatcaaggctgtgctgcctgttgctgaaagctttggttttgctgatgaaatcaggaagaggacaagtggcctggccagcccacaactagtattcagccattgggagatcattcccagtgaccccttctgggtgccaactactgaggaggaatacttgcactttggggagaaggctgactctgagaaccaagcccggaagtacatgaacgcagtacgaaagcggaaggggctttatgtggaagaaaagattgtggagcatgcagaaaagcagaggacactcagcaaaaataagtagctacctactactggtggattcttttccttatagtgaatttaaaagtatcatcaagggtttaatattgggaaaatttctttttgccacattatctctgtttattcactttcaataaagttgatccatataaatattttaaagaggatgttagagaacgttttcc

SEQ ID NO: 104938 - DNA, 2008 bp, Homo sapiens
ttcatagcattagggcagcaccccaggcctatgagcaccaaagattggttggttggttaattgaaatgccttctggatacttgcatttatatggtaccattaggcttctcagctccaccagatggcctcccccaagtcccccacatggcatactgtgctctggaaaacctgtatcttctgatgggaagggaactggaatatctagaggaggtacctccaggaaatgtgctaggaataggaggccttcaagattttgtgctgaaatctgcaacactgtgtagcctgccatcctgcccaccatttataccactcaacttcgaagccactcctattgtgagagttgctgttgaaccaaaacatccaagtgaaatgcctcagctcgtaaaaggaatgaaactgttaaaccaggctgatccctgtgtccagattttaattcaggaaacgggagagcacgttttagtcacagcaggagaagtccaccttcagcgatgcctggatgacttaaaagaaaggtttgcaaagattcatatcagtgtatctgaacctattattccattcagagaaacaatcacaaaacccccaaaagttgacatggtcaatgaagaaataggcaaacagcaaaaagttgcagtcatacaccaaatgaaagaagatcaaagcaaaatccctgaaggaatccaagttgactctgacgggctaatcaccataacaactcccaataaacttgccacgctcagtgttcgagccatgccccttccagaagaagtcacccagattctggaagaaaatagtgatttgattcgttctatggagcagttgacatcctctttgaatgagggcgaaaatactcacatgattcatcagaagacccaagagaaaatttgggaattcaaaggaaaactggagcaacacctaacagggagaagatggaggaacattgttgaccaaatctggtcatttggcccaagaaaatgtgggcccaacatactagtcaataaaagtgaagattttcagaactcagtatggacaggtccagctgacaaagcttcaaaagaagccagtagataccgagatttgggcaatagcattgtgagtggcttccaactagcaaccctctctggccccatgtgtgaggagcctctcatgggtgtctgttttgttctggaaaaatgggacctaagtaaatttgaggaacaaggagcaagtgatctggcaaaagagggacaggaggaaaatgaaacctgttctggtggaaatgaaaaccaagagctacaagatggctgctctgaggcctttgagaagaggacatcacagaaaggagaatctccactcactgactgctatggacctttctcaggacagctaattgccaccatgaaagaagcatgtcgctatgcactgcaagtgaaacctcagcgcctgatggcagctatgtacacatgtgacatcatggccactggtgatgttctcggtcgagtctatgctgtcttgtcaaagagagaaggtcgggtacttcaagaagaaatgaaagaagggacagacatgttcatcatcaaggctgtgctgcctgttgctgaaagctttggttttgctgatgaaatcaggaagaggacaagtggcctggccagcccacaactagtattcagccattgggagatcattcccagtgaccccttctgggtgccaactactgaggaggaatacttgcactttggggagaaggctgactctgagaaccaagcccggaagtacatgaacgcagtacgaaagcggaaggggctttatgtggaagaaaagattgtggagcatgcagaaaagcagaggacactcagcaaaaataagtagctacctactactggtggattcttttccttatagtgaatttaaaagtatcatcaagggtttaatattgggaaaatttctttttgccacattatctctgtttattcactttcaataaagttgatccatataaatattttaaagaggatgttagagaacgttttcc

SEQ ID NO: 104939 - DNA, 404 bp, Homo sapiens
cgcatcttaaatcagcagaagccaccgaaatgaactcacacaaaaaacgttaatcattcccagtgaccccttctgggtgccaactactgaggaggaatacttgcactttggggagaaggctgactctgagaaccaagcccggaagtacatgaacgcagtacgaaagcggaaggggctttatgtggaagaaaagattgtggagcatgcagaaaagcagaggacactcagcaaaaataagtagctacctactactggtggattcttttccttatagtgaatttaaaagtatcatcaagggtttaatattgggaaaatttctttttgccacattatctctgtttattcactttcaataaagttgatccatataaatattttaaagaggatgttagagaacgttttcc

SEQ ID NO: 104940 - DNA, 555 bp, Homo sapiens
actgagacattttaaaatacatgtttaatttctacatgtctagacatacagtgagtatttcctgggaaattgtaccaaaatttaagatactaaggtatttttcaagcttagcaagtagatcttaataaaacaagttcaggattaagtaggtaaaattacaaagctttaaggtatttctttcaatataaaagttttctcaaaactcattatcttacttggtaaagcatcatgtcagaacagaaggttttaaaacactaatttattaaacattttctccatattatttgccttttttttttcatatacctttcatgtaattgggatactaagccaaaatgggcagttccagaaattagatgacttttatagagcatagatttgctttactatccaggttttgtaacacatttttttttccctagccatcactttcacatttgactttatactttggaagactgtttgggttttttgctttctttttgtttctagtgagttcagtgtatgaaaacatgtctataaataaatatgtaagttccttttctgatttcttag

SEQ ID NO: 104941 - DNA, 2382 bp, Homo sapiens
ggagcccagtagggccccattgctgaatgtttatcacacttctggctagggcttatggatgagcagaccacgtaggagctaggatttactcagttccacctcactgacagcttttctaggtgccaagcaactgacttttcctgtgtaaggaagcccaagtacttgaccagtgatatatatggccatggcaaaagtataaatggatggatgtagaccatattcaacgcagaatacattttagatcggtatctggcattgtaatcattttgtcttttgaattaacatgccctgcttgtcttttctgaatggaagggtaggaaagtggaaggtactaaaaaggaaaatgtagttttagtttcttttctaagctaaagaactggctttactactgctatattttactaccacatagtagtgtagatgtagtataacttgcttaggaatgctttcaaaaaggttacctccatagtcaaaaaaagggggagtatacagctgattgttgcatttatgaaactgcatttcaatatgctatgctgttactgtgcttagacacttccttacgtttgagttccaaggagagagagtgagaagaggaactccttttgctgagctctggtccaaattaatgtgaatccccaaagtaaattgctgcatatgaacaacaggttttaggtttaaattgaagatacattcattttatatgtatttgttgtgaatgagagaaattgagtgatctgattggccattaaaattatggtgaatgggtcgggcgcagtggctcacgcctgtaatcccagcactttgggaggccgaggtgggtagatacctgaggtcaggagtttgagaccagcctgaccaacatggtgaaaccccatctctactaaaaataccaaaatcaccagggtgtggtggcccatgcctgtaatcctagctactcgggaggctgaggcaggagaatcggcttgaacccaggaggcagaggttgcagtgagctgagatcgcaccactgtagtccagcctgggtgtcagagcaagactctgtcacaaaaagaaaaattatggggaatggccgggcgcggtggctcacacctgtaatcccagcactttgggaggccgaggtgggtggatcacctgaagtcaggagctcaagaccagcctggccaacatggtgaaaccccacctcaacagaatatacaaaaaaattagctgggtgtggtggcgggtgcctgtaatctcagctactttgggatgctgaggcaggagaatagcttgaacccaggaggtggaggttgcagtgagtcgagattgcaccattgcactccagcctgggcaacaagagcaaaactctgtctcaaaaaaaaaaaaaatggtgaccatgcgttcaaccatataatttcttactgaaattgagctcctccttttgaataaccatgtacatatttttaaaagtattttatagccctatgtaaatagttgatgtctttttataaatgtttattgcatattcatcttgaatgtgaatttactgttgtaattcacatactggtgtcatgtttctgagtgagaataatgctagtcagtcagatcacagatttttctccatgaaggttttacttattgagagggacatctgaggcagtagtcttcgtctttaatttttgggggcagattggtgctttggttttaataaaaactaactttgatggatttttactgtcaatattttaccacaaggattttttaatagaaaaattactgaatgttacttcagcagagttctaactactttgagtctccattactactactgttgttcccctagctgtaacattgatccatataggggcaagctactagtccataaatagctgtaataggaaaacagttttttaaaattctaacacgtgtatttcaccagccttaaaagatttaaaaaaaaatctgacaggaaggaaagcgggtggtaagtatcttggattattctgcctcataccagccactcccaaagtaggaggaccaaagatgccatgaagacttctagttgtctggaagttatttggggaaggggggaaagacacagagtggggacctttggaagtcattttaaaaatttagctatgttaattccacttgtaaagtttgaaaggttttgattcttgtaatttctgagaattactatgttttaaatttactattggatatttaacagatctttcatggggccaacctatttgcttccttaattttcaaattaagtcctaatttgagtcctaaaaaaatctttccttgttagttgcaagttaaacatttaataaaattattttcccacgttttcacatgtggtatggaataaaggctgttttaacattccctgcgagatac

SEQ ID NO: 104942 - DNA, 450 bp, Homo sapiens
gtgttccccagaaccttaagagctgctctggctgttgctctgcaccccacatcttgaaataggacctttgtggacagcatgggatcagcacactcccccacagctcagtgtaactgtgagcatctgatgtcccagagaactggaactttataattcatcctgaagcctggttgtcaacatctctgaggatgtgtgcatagcattaagccaatttaccatcgggaattcctgctctcttttgctgttgttgctcatggattcgtcaggtgaggaaattctagtctctagtttttcccaaactggtgctgaaataattacgcttggttctctgttgcttcttacctctttgctcttctgtgccacaacaatgtattctaagttaggtgccagcagcagaaacttttcttccacctataactagagttttaggcgtgaggaagggctagcttt

SEQ ID NO: 104943 - DNA, 356 bp, Homo sapiens
  misc_feature (13)..(13): n is a, c, g, or t
ggcacgagctggngaaacatcatccattctctctccataccaccccccaaaaattttcaccaccccaacacttcaacactattttgttttatttttcttattaagaaggcaggaatgtcaggcctctgagcccaagccaagccatcgcatcccctatgacctgcacatatacgcccagatggcctgaagtaactgaagaatcacaaaagaagtgaatatgccctgccccaccttaactgatgacattccaccacgaaagaagtgaaaatggccggtccttgccttaagtgatgacattaccttgtgaaagtccttttcctggctcatcttggctcaaaaatcacccccactgagca

SEQ ID NO: 104944 - DNA, 763 bp, Homo sapiens
ttaaaggagtgtccatacaacatcgggaatccagaagtgcctgggactcagggcttatgtgtattgctgaactcagctgcctgagtttgggctttttcagggcctttggctgattgtagtgtgggatttgcaagagtgagttgtccgagtttcttgtaactaacctgatgctattttgcaggtgtgcagtaaagttttcccacattatgttaaagctggaggtagtaaaaacacagagaaaaatgaaacctccaagcatctgttgaagtggttctgtttggacgatgccacttctgttgtcattttataaaggttcattgtgctttacacctttgaatctgtatgagactcagaatgtttagtggcaaaaaaaaataagccaactccacctcccccatcaaggaagagaaaaacagagacaaaacccaaccatctggagcattgaaatttggtacagcacattacaagctggatcttcagctctcgggctaatttaccctgagtctcacgaggaacgtgtttttaaaatgttcctcaagtattataaatctccccaaataagtcattgttccagtggtttatgcctggtggttctgtcgtcaggagagataattggtttggaagcctttattgctggagatgaatggagggaagcccacccgtctggcaaggcactccctcagagtggcagtgtgattcctagcacaggctggatactgcggagcttcacagaatgtcagggaggagtgacagcatagaccag

SEQ ID NO: 104945 - DNA, 389 bp, Homo sapiens
aaaccatggcactgctggagaagagcagaagcacaggtgaagagcttggcatatttggagtcgaggataggagagaaccctttacagtgttacaggtttatcgatgacctccagccctactggaacaccaaaggtgatccttactgaaacagagaagggaggacccttaatcatgccacacacaggtgtgagccatgcaggagaaaccacactgggtcagacctgcattttggtcagacctatattctactgtcacctgcgatttgagagaacatgacataaagggccatggctgctatctgcctgccttctttgtccaaatcctttaggatctacttttatcttgtgtcagtatcttttgcaggtaacaagttccaaaagattatcat

SEQ ID NO: 104946 - DNA, 890 bp, Homo sapiens
aaataggttaaatcctgaaagatcaaaatccctcacatctaaaatctcaaaaatcacagtcccaaagtgatcgttcttgttgcccaggctgaagtgcaatggtgcgatctcagctcactgcaacctccgcctcccaggttcaagtgcttctcctgcctcagcctcacgagtagctgggattacaggtgtgcaccaccatgcctgacttattttttgtctttttagtagagacaggctttcaccctgttgctcaggctggtctcaaactccggacctcagaagatccacctacttcagcttcccaaattgctgggattataggcatgagcctgggtgacagagcgagattccgtctcaaaaaaaaaaaaaaaagcccacctgaaagcctgtctcttcccactttggtgggcccttccagggggattatcgagcatgtggtttttccatagtgccttttcccttattccaggggtggcttctgaggggtgtttttttttttacatgggttgggtttacaaaaccagtcaaggggcgcaaaagttttgcgccaattggtctcctactcggtgtaaattttttcccctcggggccgggggacccaggttaggagcaacgtgagcacccacgcccggtgttggtacaggcgggaggcagctaccccggcgtgtgattcataagccacgggaggctttagagccaccgggtttaaggggtttgtagacccctcgggggggttccgggactgtctctgcccaggtcgccctgtgtgatttttatgggccccggggacacagggacaggtttccgcgcggctatgccagttccatggatcggcttcacggcggtcggaacctgcccccgtctcggtgtggcccgcccttcctatttac

SEQ ID NO: 104947 - DNA, 298 bp, Homo sapiens
attatctatatagtaaaatatgcacgaagaaaaaacagaaacagacaataaatgttaatgtaattttttaaaatgaattaggggccaacatcatagaaactatgattatatttcacaagtgtctgggtttcattataagaacacaagtgatatccctcactaagtaggtctagtggaggggagaacaaaaagactaaaagaataagaacattcattaaaggaaaaaaccattagcattatttcagatatgaatacgcaacttatcaaatgaagtcaaagtccttcacggtatcttaac

SEQ ID NO: 104948 - DNA, 582 bp, Homo sapiens
tgcactggtaattacaatggaacagaacaggacagggattttcaccgtgtttttctttttctataaaatgtctgtaatctataggtaacataaccgattaggtcaggggttgatcattaactagcatgtcctgcctttaggcaaagaaagggaaggcagagtttttcttttatttgtttcttctcaatcgtcttcagctcaaaataatccttatgccaaagaagcatatgttagggtggcatattctggtgtaacatctttgtctcagcaggcagtgaaaaataatttaaaaagccaccttctctgcccgttgtcctgctgcacactgccccttggtggccatcattttaactgtctttggtaaaggtagcttttcttttttttgctttgagacggagtttcgctcttacggcccaggctggagtgcaatggcacatctcggctcactgcaacttccacctccccagttcaagcgattctcctgcctcagcttcccgagtagctgcaattacaggcgcctgccaccacacccagctaatttttgtatttttagcagacgggggtgtttcaccatgttggcca

SEQ ID NO: 104949 - DNA, 743 bp, Homo sapiens
ttctaggtgatggactatttatcaacttgctccataatccgtttagagttaaagaggaccacagaaactccacctccaggtgtcacaggttactaaacacaataactaaaacaaattaaaaaacttatctcagattccctcctggagtctactgccttgcttatacagttggacgacaaagtcagccactgcctgaattcatattctgcactatgtgattcaggaaacaacgttatgcttctcctatgttcccaatatgctggacatcaggtgtgggtaataacagtaccatgattttcctttggagactccaaatcctcagtccaaatgactttattccacttataactccatagaagccatgaaatccagacctcagtacagacggtgacttccatgaacttagctaaaatttttggacaaagtttactccctctggattctaaatggatagggtaatgttgctggctcagtgaagcaccttctgagcctactgaagcaggagccgatgctgaggcagaactgaaagatgcagaggcagagtccggataacactgtctgaacacctgaaaacacactgaacactgatgaattttactgttccgttttagcccaaggtcagtaagcatcttctgtaaagggctagattgcaaatattttaggttttatggaacataaggtttgggtgcaactattaagctccagtgtcggatatggctgtgttgcaattaaacttgatttac

SEQ ID NO: 104950 - DNA, 333 bp, Homo sapiens
gcctagaggatcccctcgcgagtatatccagcaagggctgctgcagacatctctaaaatgctttcaaggccggtttcccactgtcttggctttttgcactgggttcctttttatacaaataccctaagccttcttgaattttccctctcaaaatcggcttttctttttgaccacttagccaggctccacattttccaaactttagatctccacttgaagttccaacttgaagtcacttcttaggtcacccataagaacacaagctgttcaatgtaggcaggacacctcttgtgctatgctgcctagatgttcatttcaccagatacatcctaa

SEQ ID NO: 104951 - DNA, 308 bp, Homo sapiens
gaggccgaggcaggagaatggcttgaacccgggaggcagaagttgtagtgagccaagattgagccaaagcactccagccttggcgacaaagcgagcgagactccatctcaaaaaaaaaaaaaaaaaaaaaaaaaagattcccattatccttctctgctgtcctccgctatagggcgggaattctctgcaccagcacaatgaataggagcggttctttaaatatgttgcagtccagagtaggcaatatttttcagtggtgacggaggctctctacaacaaaactaactggcactgggaaagaaaaatgt

SEQ ID NO: 104952 - DNA, 596 bp, Homo sapiens
tgagacaaagtttcactcttgttgcccaggctggagggcagtggcgcgatctcagctcactgcaacctccgcctcccgggttcaagcaattctcctgcctcagccttccccagtagctgggattacaggcacccgccaccatgcccggctaattttgtatttttagtagagacggggtttctccacgttggtcaggctggtctggaactctcaacctcaggggatccgcctgcctcggcctcccatagtgctggaattacaggcgtaagcccaccgtgcccggccctgacaggtgtttttttttttaaagtcccaatatgagcaaatatctcaaaatgatcttcagacaaatacaaagaatgttaacaagattgccagaaaaatctaatgaaaaatttctaactattctttgaaggaccagcctcatgagtaaaggagccggcaggagcaagggagccccctgcttcacagcagctgttacagtcgagcacaatactaacatgtatatcagtgtttcactccaccagggcccagtcccatctctcagaatacctagacaatatgtcattattcaaaaagttaagtcttctctcctc

SEQ ID NO: 104953 - DNA, 154 bp, Homo sapiens
cacacacacacacacacacacacactctgaataaataagtaaattttagaattagccaagcgtgatggcgcacacctaaggaggaccacatgagcctggaaggtcaaggctgccatgagttcttttcacaccactgcaccccagcctgggcaac

SEQ ID NO: 104954 - DNA, 326 bp, Homo sapiens
cctttatgtaacagggctgtttccaggtcctggcagatggtccatagtaacagtgctttgctgatttggttggagctgagcctgtgaaatgaaaaatcctcagtagcagatgcctctcccaggccctggccatggaaaagtcctcctctccaaggaaagtactgtagcttgggtggtaactgtctctggtgggactaagtgtgagcaccctgaaagataatcttaaactgtgtcaagtttttacaaaaggtcacattggtgacttggaggttcttggcagttgagctgctagtagagggtgtttgtattctgggacctgagggaca

SEQ ID NO: 104955 - DNA, 292 bp, Homo sapiens
gaaaaagcattgaacagcagcatttttaatattaaccccatatctgaaagtttccatttccatcataagaaaacacagggctgacttcaaaaaaagttattacgtaatcaagaaagctgctaattatacaagttgggtatttcactgtgtttatcatactcagagaaaagtcgcttgaagttttcatttttttaatgtatccacatgtagaatatctagtagcttctaacatagtgtggtagctttccatgtagtctctctatcttttctttttaacctaaattcaccacat

SEQ ID NO: 104956 - DNA, 296 bp, Homo sapiens
ctaaaagaagcagagagtagaacagtggttaccagggttggagggaaggcatgggggaatggggagatgatagtcaaaggggaggaatttttttctttgagatatgttgcacagtatggtgaatatagtgactaataatgtactttatacttgctaagagtaacttttaaaagttttcactacaaaaaaaatttgaggtcatggatatgttaactagatttaattattccacattgtattcataaatcatcactttgtacctcataaatatataactatagtcagtttataattaa

SEQ ID NO: 104957 - DNA, 476 bp, Homo sapiens
ctcccaaagtgctggaattacaggcatgagccaccgtgccccggttctcatacgaccattctgttttttcactttcagtacagtattcaattacatgagatattcaaaattgtaacataagctctgtgttagatgatgttgcccgtaggctcatggaaatgttctggcacatttgcagtaggctatgctaagtaagttatggtgttcggcaggttacatatattacatgcgtttttgacttgtgacgttttcaacatatgatgggtttgtccttataagttgaggaacatttgtagccatttcatcgtctgtgaagaggcctgagtggattttgtgctggagaccggtgtgactcagctccagtgttgactgaccttctaaccatgggcttgtgactgaatgtcctgagccttcattttcttccctgtgaggattaaaatgaacctcaggaaatgctggcttgtcctctttctgtc

SEQ ID NO: 104958 - DNA, 138 bp, Homo sapiens
tttgcagtggagtaaagcaagaaggaactagtaggcgtatggagtagtttatgactctttcctgcctcctttcagaaggcaggtgaagtacttgcagctgcattctgaggaaggtggagtttccagtttctaccttct

SEQ ID NO: 104959 - DNA, 330 bp, Homo sapiens
gactctgttaataagatgaatggacaagctaaagactggcagaaaatatttgcaaaccacatatcagagaaaaagaataccgtctaaactatataaaaaactctaagaaatatacaagagaaaactcaaccaatctaattggaaaataggcaaaagacctgaacagacatttcaccaaagaggatagatagatggcatgtaaacacgtgaaaagatgttcaacatcattagccattaagaaaaattagattaaaaccacagtgaactatcactacacatctgtcagaatggttaaaaattaatattcacaaatagtgacaacatcagaca

SEQ ID NO: 104960 - DNA, 335 bp, Homo sapiens
tttttttttttctacagcatctttttattgtctttaccattactttaatgcattttaaaatttatctacattaattgggaactatttgcatttttttcatcctctctctctttttctttttctttttttggatttgtcttggccagagaggttctccaacacccgggtggacttggaatttttttatcagctgcaatctgaagacttgtctttactgtggaataggtgacattcctttaggacctcagaagctcaagtagtttaatgccaagtctttccagagcctcactctcttttattttttaaattagaattgtgatttattgaagccttac

SEQ ID NO: 104961 - DNA, 843 bp, Homo sapiens
agttgcagagatctttccagtagaaattatgtcaggaaggagggggtccacatcttgactggccttcccagcaagagcccctctggtccttgcacggctaattccaaaacacccgtgacttcagagataaggtcagcctgggactgtgcgtctgtgcgtcctcccaacttgaagcttcagttactgtttgactgctcagggcttcttcctgtgtgccattcagacctacagccactgagtgaaacccttctcttgcttttgtactgctttggaggcagctgcctccccacagatgaacagtgtgacctcgcaggccactcggcactgtgagctcctgtgctgctgtcccagccagaatcctgtccttgaaaggagggctccctgtgcctcctgtcaggtgatgggaggctctgtccctggccagagtccccgtggggatggagacctacaaaactcaaatgccctttgtagttactccctcttcttctgttcttgctcagtggcttttatttggttccctttgagttcccagcccctatttctcttcagaggttactgatgagccaagcctcagaacatatcagaagcagccagaggctgtctcctggtgaggctgcaatgcatttcaccaagcagacatcaccttgggcagcaggcccatttggttgtcatgacaacgtgggtagtttgtgtcgtggagtgtgctgtgccctcattctggcttcccaaggtcccttgccccagctttctttcccagaccctttcaacagactcccggcttcctggcgccacctccacattaactgttgttcaatttggagtagctttgtcttgatcagcaaa

SEQ ID NO: 104962 - DNA, 1442 bp, Homo sapiens
tgtggctgaacaccacagcctcagctgctcagagcctgggcccatgatcggctgtgactctggtcctgcacagcaggggaaccagtccccactgcccacactcaagtaagaggaaaagtctggcagtcctccccagggcaaacctgcccttgagccagccaaactgctgtgtaccttcccctgagcaggagagatccttgaaccactgagtggcttacataccctcaggctggtagagtggctatgtgtctgtgcccaggtcccgagaaacagcccactgggtgacttctggcagacacagccccaggctgaccgagcatctgtgtgtctgcatcccctgcctgagaaacagctccataggctgcccctggcaaatacatccccaggctgacctagcaactgtgcatccttgtcttaggtctgagaaacagccccatgggctgcccctaccaaatatcctcctaggctagccatcaatattctgggtctgagaaacaaccctgcaagccacctctggcagaaatgcccctaggccagctgagcagctgtgtgcacctgtcccaggcctgagaaatagccctgtgggctacctccagcagacacacacccaggccagctgagaagctgtgtagccatgtactggaccttagaaacagtccttggcaggtactcccccaggctggactagcagctgtgcacctatgcccccagccagaataacagactgcaaaccagaccctaagttggccaacttaccatgtgcatgtatgcaccctgacctgagaaacagcccagcaagcccacccatggcaaagttgcaccatcgctgccacatactctctcagccttggccaccgagctactcataaatgtcatgaatgtggattacaactgaagaaactgcatagagaaacactactgtgtccaactagaaacaaacccaatgcaccttcactaaactgacacccagggcccatctatatgagtaagtctcttcttatcctactccataaaattagaagaggtgactcttctaccagatgcatagaaatcaacatacggacacatcaaacatgaaaaagcaaggaaacgacacctttaaaggaatataataatacttcagtaatagactttaatcataaggaaatatacaaaatgccagaagtggaattcagaataataaggaaagtcagtgagatacaagagaatataggtagaaaattcaacaaaatcaggaaaataattcatgatatgaatgaggaatttaacagagagatggatataacccataaccaatcagaaatcttagagctgaagaatttaattaatgaaataaaaaatactatcaggagctgcaacaacagatttagaccatgcagaaaaaagaattctgcaacttgaagacaagccttttgaaatagcacagacaaaaataaataact

SEQ ID NO: 104963 - DNA, 126 bp, Homo sapiens
ggtgaacacccacaatgtcccttcatcagcacttcctaataattttactctgctcttgctaatcaccttatttgcccgttccattgatatgagttcattcactgattttttttttttttttttttt

SEQ ID NO: 104964 - DNA, 362 bp, Homo sapiens
tgaccagagaaacagccgtatcggaaatcgaggatgagccatatagattatttacagcatggttttgaaagtaaatccgcatgactctagtgtggtgatagaccatgtgaaatcacagttttggggacagttaacaaaccagttagtacaaacagtaaattaggtaactcccttatctcccccatgccccctgaaccaaatacattttcatggttacggtatcaatatattcaaatcagtggggggcctaatgcaccagcaatactcagaaaatgtaatgcaggccgggcgcggtggctcacgcctgtcatcccagcactttgggaggccgaggcgggcggatcatgaggtcaggagatcaa

SEQ ID NO: 104965 - DNA, 488 bp, Homo sapiens
tctccttcctctctacgtgctagacaccaagacagtcttctaagagaacagatctcaagttgataaatgaagagctgcttcatggttttaagcaaatatttgactccataatgttattgttaccttcaaaacttagacagatattctggaagggaattactacttgctttactcagaatcagaattgaaacgaagcagtttcctcccgttcatcaaaagacacttccgccgcagcttcagaacctctggaactggtttagtaacaattctttatcctagaaaaaaatcccccctaaaaagaaaaactcactcatgataaacttgagatgttttccaggatgaagggaggcagctttcctgttaccacctctgaagtgcttcctaacagtgtgggggccgtgaaacacacctcaaggggctgagacacagagcacggtttgccagcctgggtttgcatcagtgagctggacctgaagcttggtcctgcc

SEQ ID NO: 104966 - DNA, 782 bp, Homo sapiens
ggcagaagaggaattcaccatgttcacccaggcctaggccaggtcaagcaccagcctcagcaggaagtgctgaaggagagctcaggcccggccctctcgccttgtgaggatgactgggaagactgcacgagtgtaggggaggatctgcaaaccgggctgagaggggaaagcagcctacaaccatttaaggccaaaactggccagggggagagaatgaagggtggcaggtggtgccctccgcacctgagccaggtctagccagacctggaggaggtagtgggatggtcaggtgccaggcttggtcggcggcctctgtgacagccgagtccagggtccctttgctgctgccagtttctccaattgctccatccaggatgaccacgtccctatgcatgccctgtaagggagacagctagacttcaacacatttctgctgcacagtgactaatcatgcccctcccagccatggccccgccgctaactgggctctggttattcacgtatgccttgcattactgcttgcaaacagccatgaccgttgggctttaaagccctgcctccacgctgtctcagctttagacagctgacttcagagccactcatctgctgctcagcagctgggtaaacccaggtcagtcacccagcctttcagcttcagacttcaggccgcttgtctgaattagaaattgtgtgaagcactttgcctgcagaccaggcacgtaacgtgctcactaaagggaagccataaccatataatacccaagctggagaagggggttagg

SEQ ID NO: 104967 - DNA, 396 bp, Homo sapiens
gttttgctatatatcaaaacccaaaataagagttgcttaaaaatcaaattcctcttttcatgtgaaaaagggtctgcaagttgagcagtctggagctggtatggcagttccagtggagcagactttttctatcttgctgttcttccatcctcatctctcacctcactgaacaaagtggcttcttgagctctagccatcaagtcatactactgatagcaaggtggaaggagttgctaagaagagcacatcaccttcttttaaggaaactttacagaattcccatcccacctctgcttgcatttctttggtcagatttcagggatatgctgctcctagttacaagagtctggactcaaggccaccttgattaaaatcagtattttttttttttccact

SEQ ID NO: 104968 - DNA, 252 bp, Homo sapiens
ggcaggagaattgcttcagcccaggagttcaaggctgcagtgagctatgattgcaccactgcactctagcctaggtgagacagcaaacagcaagactccgtctcaaaaaaaaagaaagaaaaacatattctaagactgggtatagtggctcatacctataatcccagcaccttttgggaggctgaggcaggagtatcacttgaactcaaaagttcgagaccaatctagccagacccccattgctaccgaaaa

SEQ ID NO: 104969 - DNA, 647 bp, Homo sapiens
aaatttcccatttgcaaatagggctttattacttggatcatatgtgaatctaaggatggtaggcaaaaaagtatgaaaatgggaaagagttatacagatataaaggaggttattagatggtcagcaaagtgtgcagcttgagggcagtgcacagtcccctcccagcactcactgaccctctctctgtgagactgaaactcacatgctcaggtcctgtttcccaaaggccccacatcaacatccctgagattactgggaaagcactagaagttccattgttagtagaaatcaatagccctctttgcaataaacaagactcattagcaaatctgaaaaaaaactgtgggctactaggtaccaaagggtctagatgaccaagagtaggatacccagaagatgagtttggtggaaaaggagaagaaaggagaggaggccagagaaagaagagaacaaaagcatgagggccaattttgaggccctggggtagaactaaggtaggcagtgcccttagaggctgggacgggaaagagtgaggctggggcaggggactgctctccccaaggtcacttaacagagcaccttgggacaggacctgcctcccatcctgaggtgtgagacaaaaagactccctagagaactccagggat

SEQ ID NO: 104970 - DNA, 1074 bp, Homo sapiens
gggtacaaggacagttgtgttacatggatatattgcttagtgttgaaatctgggcttttagtgtacccatcaccgaaatagtgtacattgtacccaataggtggtatttcatccctcaaatataattttaaacacacactcgtgcccacatggacaaattatatcacatgactgaggaaacttagaaattccttttccctgaagatctgttaagaataggtctcatctcctgccctggttaggtgctatattatatggagaagggtattgagactttgggggtcatgtttgggctgtgataactggcttgaaccagtgaccatcctttctgcctcgccaaggtctcttataccagcttcttcacatatgctgcttcctcccagctttcccttctgacttcttgttactctgcaactatgtgtcaaggccttaccttttcctgatgttttcaaacctcctgcattactttgatcatcacttcttcagccatctcactgaagtccttggtgctagctgggcttttgtgacaactttcaccttctctgaactttttccttgctgggaagcatctgcgtgtgtgagggggctacggagggaagtgtgtgtgtgtgtaagagagaggcaaaaggatgcttcaaaagctataaacaactctagcaagcatcctaagtcctatgtgaggttttgcagttctagtgaatttctgttttagtaggtttcaattagcatttactgcctaaaggagaaaaaccatatccaaggaccttttagccatgcttgctattaccaagctggaccagtgtgatgtagatccaacatgtcttcagcttacagatgctctcagaacagttccaagaattgaagagagctaagtttttatgctgaagaggagaatggagcactagctagtcctaactattgctagaaatagaaatgtttattttctcctttattattgagaaattatctaatttaaggagtaaccattttcatttagggatttttttaatgactgcccatcactacagaaatatgttctttttataaaataaaactaatgtgaggttggtttgt

SEQ ID NO: 104971 - DNA, 145 bp, Homo sapiens
ccttccacagctatcccaaccctcttcctctctgaagtccttcctggctacagttgctgttttctccacgtcagaagtgagagtcttcaatgtgatggtcaaatgcaaattcagatgcagttcttcctggctccaaaatgaatgg

SEQ ID NO: 104972 - DNA, 284 bp, Homo sapiens
tggagcgggtgcgtgtgacatctcccccacccacatgcttgccaaccgtaatactcaaggagaactgtttcatgaaggacgcagaagggagccaaacaccgccagagactttttacagaaacaatttgagcatgcccttcctctcgggagtgcttggtccaaatacatttatcttgctaatattcctctgtcagactaaatttcagacacactggaatctccacagcatgtgtggctccaacagacatgtgtgctccacaattcccagctgtaactcacccgtg

SEQ ID NO: 104973 - DNA, 380 bp, Homo sapiens
gcacaatagaatcacctggaaagcttttcagaaataacaatgcctaggcccccgcccaaccaattgaatcagaatttctggggggtggaagttgagcatccatgttttccaagagatttctagatgattctaataggcagctggcatgaagaaccagtgctctcaatgaactgaataccatgtttcttgagaacctgaaacaggcgccgcatgcataaaacaagcccagggaactgagactcactcggctgactctaaacagtgctctgccactagcacaggactccaccctcaaggtggcgtccccgaaggtctcccagaaggcctcacccctttcccagcgccaccacccatacctcctcagaggaagtctcagcact

SEQ ID NO: 104974 - DNA, 847 bp, Homo sapiens
  misc_feature (257)..(257): n is a, c, g, or t
gtgagcaggctagattttatttttgaacttttgtacttcagggtcacaattaatatacattatgcgttaataggtgtctctcactttgtatatatatcaactttgggaatatgttcctaaacaaaattttaaatatataaaatgttatttttgttttgtttgagatggaatttcgctcttgttgcccaggctggatccggtctgccaaaccgccgcttccagtttttcaactggttaaggagagggctgtgggtcancgtggtaaccagttttggctatgccttaagtatgattccgttcgttaaacgccatgaagatcaggtaatgacgttcctgatgatcctgccaattgccttgttaaccgctggcttgttaggcacgctgtttgtggtgattaaaaaaaaatactgtaacgcctgacgattttccccgttcccggttgctggaccgggaacgtatttaattcccctgcatcgcccccattctttccgcatttttcccccggggtcacaccgaaagaacggtttaaactcacggggtaatgtgcgatgcgctttcatagccgacgcgcatccgttggtgcgctgggcttaatgccggcatggataataatcatccgcgccttatccagacggaatttttcaaatactgcaacgggaagggctggggaaccacttaaatttgggtggacccccagcccctttggtggcttttgccggcagtcgtcgaccgttaagtttttgggtgaatatttaaacccggtgaacacccgggtaataagattaaaagaagttgacgattgccgcgccctaacccggctgcggagggcgggccaccagtgtaaaag

SEQ ID NO: 104975 - DNA, 282 bp, Homo sapiens
ttctcagttatatgtgtgagagaaagagacagagacacaaacaaggtttcagtgtagtgtgtatttcttactttggattattgcaaaaggatttgaatgccattgtcttcataggtttagaccttagctctcttatatatgaaatagggataataacacagctcctatttaccttatagagttaacgtaaatatcagcattacttatgtgaggttattcaggaaacttcagcaaagtgctttaaagtgttgttgaaagtaaggatgagtcatgtgttttaca

SEQ ID NO: 104976 - DNA, 455 bp, Homo sapiens
agagcagactcatcttcatttaccagtagttaagttttgtttctccaagtagcacattatcaatcatgcagtaagtgtgcaactaatgcaggtaatttggttgcctcttgaacaccagggatgcattttgcaaaacttacatagatcatgaaatcaaggaaccatgtcagattattttgcaaaatagagattattgatatctgtttcaaagtaagcttcacatccattactactagccctctgtattagctttcggattctaaataacttatcgcacccaaagttccaaccgccaatacaagaaaaaagagctttaggaaattcttaggaaagtaggctggcatggtgactcacacctttaatcccaacactttgggaggccaaggaggatggatcacctgaggttgggagtttgagaccagcctgaccaatatggtgaaacaccatctctacta

SEQ ID NO: 104977 - DNA, 426 bp, Homo sapiens
catgtgatctctttgcacacacccacttcgcttccactttctgccatgagtggaagcagactgaagccctcaccagatgcagctgcccgtcctggactttccagccaccagaatcgtgagcaatttctttatatattacccagtcgcaggtgttctgttgcaaaacacaaaatggactaagaaaattgtcttgctaagattaatctatgaaaaataatatatataactcatctttttaaatagaggtatttttaaaaatttttatttgccatatttactaacaattccctaacaaatgaattgttttggaagatcttgaaatgactgagttcattattcacatgctcataaaaatgcttttacaggccaggcacggtggctcacgcctgtaatcccagctacttgggaggctgaggcagggagatc

SEQ ID NO: 104978 - DNA, 239 bp, Homo sapiens
aaaaaaaaaaagaaaagaaaagaaaatagaggccaaccacaagtcttagtttaggttggcagggacagtccaaggcaaagtgatagaggggcatccatcaggtagggagtgggaatccagggcctcagaggctggcactgacatttttcagcagacactatttgcaaggaatactactggagtgtctggctagggttctaggtccagagaaggaaaatccatacatgtaagtcagggtt

SEQ ID NO: 104979 - DNA, 729 bp, Homo sapiens
aacaagatcaaggttctatcagtgataaataagggaggctaaggtattgaggaaccatataatgttatttacactacctactttctaatctgcctcatctactcaccttcctctttctcttcctgtaatcttattgcatggaagaaatttttggtgaagacaagttgtctgtttttcttaaaatcatttttttagctagtggtatgtctcgaacactttcctaatagttcattgagataaagtcataacattttttttttctttcttcgctaccctcactcattgccccattggaattgactgcaaattgcaattttctagagaaagaatcagtaatcctttctacacagtggccttggtgatttcaaaactttaagaatatttaaaatattcaagttctttctccaaaaactggtgactttctgctgctgagctcctgaaagtttttgagaagaaagttgaaaggttgaaaatggtgctgtgtttatttgaatatctgaagggtaaactccaagctacttatctgaaaacaaatattctctgaaacctgcagagtaaagaagtataacttgacatttcttctgcaagaaaaaaacaagaagatggtgactttcaagacctcagtcaatgactaaagttctgtgaccacagtgagcatattactgcggtaaccagggcagtaatgtcaagacaaaggtcagggttggctttaagaaagaagcctgagaa

SEQ ID NO: 104980 - DNA, 383 bp, Homo sapiens
ccctacaaaggacatgaactcgtcattttttatggctgcatagtattccatggtgtatatgtgccacattttcttaatccagtctatcgctgttagacatttaggttggttccaagtctttgctattgtgaatagtgccgctataaacatacgacacactgaatatttgtaagtctccccccaaacacttttttttggttggcttcttgtcactcttctttccccatttctgtccaaaatatcttcacacccaccaaagaggcccacgtttataaccaatttgtattcatttgcttttttactagcatcatataattttatgaggcatatatacgcatacacacatataagaaaatcttttgaacattgttttaacaaaaatg

SEQ ID NO: 104981 - DNA, 588 bp, Homo sapiens
cattaaggcaggaattattcatctacagaattttttttttcctgaagaggttaaatgagcagtattttcaggtaatgaagaataagttaaaatcttgggcttcaacaaagaaaaatttttggcctctgatgttgtgtaatgttacttactatcattccagtattgatgaaaatattattgaatggttttagcctgcaaacttctgttgactcatactctcaagagtggtggggctgtgaaaatgaagaaaatgtacctcaaacacagtgcaaacactcagatggtgagtagagcgataattttatgtcagcactaacctcactttaaatgtgtgagagagaagtttgtctacaggagtagaaacagttctgtttctaaagaaatgtgatgtaaccaatgtaaccatggatgatctatatctgcctttacacatttcatctctgttttaaaatatttttatgataatcatatttaaaattgtttttagattataaggaagctgcatgttaaaaattgagctgtataagaaagaggaaatatagtgaaaactttggggttttaatctgtgcatgtgagagagagtgagaa

SEQ ID NO: 104982 - DNA, 457 bp, Homo sapiens
ttaaaatacccatttacacagcactaatttgagaatcataaaggggctgtccgaaataggattggggctgtctgaaataggattggggttcacgagatcaagccattgcattccagtctggacaacaagagcaaaaactctgtcccaaacaaaaaaacaaaacacaactacaaatggggggaccaggtatggtgactcacacctgtaatcccagcactttgggaggccggggtggatgcatcacctgagttcagaagtttgagaccagcctgggcaacaaggtaagaccccatctctacaaaaaataacctgggtgtgtggtagcatgtatctgtggttccatccaccatggagactgaggtgggaggatcacctgagcctgcgaagtcaaggctgtgtgagctgagatcacgccacagcactccagcctgaatgacaaagcaagaactggtctcaa

SEQ ID NO: 104983 - DNA, 1245 bp, Homo sapiens
gtgcctgtggcgggcaccaggctgggctggggcagccaaagatgagggccaggcccctcactgccaatgctcagcctccaggaacccaagacaggcccagagtggtcggatgggctctttgccaaatgactgccggagagtgtctaggcgcacggtggcccaggcttgtccagggccctccttgtgcacctactgtgtgctggggcaggggtcacagcagatctgggtcccaccctcttgaggctcccagtccagcgcgggatcaactgggagtagccgtcgggggtcagtgctgcatgggatggccagcgctgcgggatgcaggagccccattacagggatccatggtacacagcacctcagctcacgggagttacgaggagcacaaggaaggcattcctggataagcagtgtgggaaacagcctgagtacctgaccggaggtctcaggcaattaacgcctctgcgtgaatcccacagcgctgcacggacaagggcacgtcggaccaacaggaacagcggaagcacgcgcttggccagacagccatccagcggctccgcgttcactagcctgaccaatccctcaggaacccagaagtaacaacacgcaacacgaacacatgaccagcaaccggcaacacgactgcaaccaagccactggaccccaaaggtacaaatggcaaccaccggagaggacacacacagagagaacacacagaccaggatcaaccgacaaagagagcaacgcgaaccgcagacacacaggccggaatccctatggaacccgagcatgcgatccgcacaaggacactcacctgggacggcaaccgcaaatgtgaaccccaactacacggaaccagtacaacgccaaccatggcgcccccccacaggccaattcctaagcccacgtgtccaccacactcaccggcaacaagccagcgcgcactgcaccgcgtcctaccagcgcagacgacaatatcatacttcttcgcctcatgaatctgctcggagccacactgtctccgacccttcacctcccccaccagtcccagcaccaacacataccaacctcaccctccactatccactaacttccctacttcttctcacatgctacacgacaatcaacctcgctccatgcaccctaccacaatacaacaagacgccaccactacccccgagtaatattagtccaaccaaatactcaaacacactaattcatctcatcatcctaccatctatccct

SEQ ID NO: 104984 - DNA, 234 bp, Homo sapiens
cagtcctggctgcttctgtggctgtcagcagaactgtctgcaggtgtaaccatcacctgctctgtttctcctactctagcccttcttctttgtgcctgagaaaggggggttgttaattatagctcagcaaactcctcttatctttgctgatgccatagttgggatttagatttggacaactggcaggatggatggtaatttttattccccagcttccctacttcctgctgggag

SEQ ID NO: 104985 - DNA, 803 bp, Homo sapiens
cccatagcacttggcatttggtattacaccctacgtatggtactgtgaaaaccttctctaatgccatgtaaaaattttacagatgatactagagtctgagtagtaaattactttcccttttctaagttgattttatgctgcttgatattgagatggggatgtagtacaaatatttacttgtttcttggagttaaattttaaaaaatcccatattgcaggtctaagaccataaatttgtcttttactgctttcaaatggtcgtgagttggaattttccaattagtatttttagagacttctctaggtgaatgtttatggtagcctacaagctaccatacaaaattacaaaaattagctgggcatggtggcacgtgcctgtaatcccagccactcaggaggctgagacaggagaatcgcttgaacccaggagttagaggttgcagtgagccgagatcgtgtcactgccttccagcctgggtgacagagcaagactccatctcaaaaaaaaaaatgagtttctagactggacgtggtgactcacatctgtaatcccagcactttgggaggccaaggtgggtggattgcttgaggtcaggtgttcgagaccagcctggccaacatggtgaaacaccgtctctactaaaagtacaaaaattagctgggcttggtggcgcttgcctgtaatcccagctgctcagaaggctgaggcacgagaaatacttgaacccaggaggcaaatgttgcagtgagcaaagatcgcgccactgtactgcagcctgggtgacagagcgagactctgtctg

SEQ ID NO: 104986 - DNA, 180 bp, Homo sapiens
gtttctgcttgctgttatgcaatattagctttggaataatctggtaattcttacttaacaccaattaataaggaattagagtaataattttagatgtgaataaattgcttcaaattataacatgttttgtagtttatataaattgttattagtgatgggaaaataatcaacaaggcatgc

SEQ ID NO: 104987 - DNA, 581 bp, Homo sapiens
ctttctgattgatacagatttgtttggttttaattttttatttattccttttactggtttcgaagtgatgatccttttattattcttttagcgcttaccttcaaattttaaatggacattattgaggcttgtcaacgtctacaaaagtgtactggaattttgattgggattatgttgaatcactggatcaatttttggagaactgacaactcaacaatattgagtgtgtaggtttatatatgtgatatagctctccatgtatttagatttttagtttccctccacaatcttttatagttttaattaaacaaattgcacacatattttaaaaaatgtatccctaggtattttatttttgatgctattgtaaatgctattgggctttttaaaaaatcgtttcaattttctgttgtttttgttaaatataaaaatgcaaataatttgtgttcatagaccttatatctggaaacgttgctaaatgtatttttttattccattagctcttttgcttattccttactattttctttgtgggcagtcatgtcatctacaaataaacagttttactccttttcaaccta

SEQ ID NO: 104988 - DNA, 781 bp, Homo sapiens
ctttctgattgatacagatttgtttggttttaattttttatttattccttttactggtttcgaagtgatgatccttttattattcttttagcgcttaccttcaaattttaaatggacattattgaggcttgtcaacgtctacaaaagtgtactggaattttgattgggattatgttgaatcactggatcaatttttggagaactgacaactcaacaatattgagtgtgtaggtttatatatgtgatatagctctccatgtatttagatttttagtttccctccacaatcttttatagttttaattaaacaaattgcacacatattttaaaaaatgtatccctaggtattttatttttgatgctattgtaaatgctattgggctttttaaaaaatcgtttcaattttctgttgtttttgttaaatataaaaatgcaaataatttgtgttcatagaccttatatctggaaacgttgctaaatgtatttttttattccattagctcttttgcttattccttactattttctttgtgggcagtcatgtcatctacaaataaacagttttactccttttcaacctatataattttatttctttttcttgccttattgcacaggttaggacctctatttctatgttgaataaaattaggaaaaatggacactcttgtcttgttggtgatattaagggaaagcattctgtctttcaccattaaatatgatgttaagtgtaaggttttttctctattgactttatcaggttgataaagttcccttttat

SEQ ID NO: 104989 - DNA, 446 bp, Homo sapiens
ctttctgattgatacagatttgtttggttttaattttttatttattccttttactggtttcgaagtgatgatccttttattattcttttagcgcttaccttcaaattttaaatggacattattgaggcttgtcaacgtctacaaaagtgtactggaattttgattgggattatgttgaatcactggatcaatttttggagaactgacaactcaacaatattgagtgtgtaggtttatatatgtgatatagctctccatgtatttagatttttagtttccctccacaatcttttatagttttaattaaacaaattgcacacatattttaaaaaatgtatccctaggtattttatttttgatgctattgtaaatgctattgggctttttaaaaaatcgtttcaattttctgttgtttttgttaaatataaaaatgcaaataatttgtg

SEQ ID NO: 104990 - DNA, 412 bp, Homo sapiens
tgcataaccaaaaaacataatcccacaattatggcaaaaacatatatggtcattgctatagtttggatatttgaccctccaaacctcatgttgaaatctgatctttaatgtaacaggaggcatctgggttgtgggggtggatccctcctagatggtttggtgcctcctcgcagtaatgagtgagtcttgctctattagttcctgcaggagtttccctgagagctgattgttaaaagagcctggcaactgttccacctctctcttccttcctctcctgccatatgatctcggtgtggccagctccccttcaccttccactgagggaagcaggctgaagctttaccagaagcagatgctggcgccatgctcttgtacagtgtgcaaaaccgtgagccaaataaacctcttttct

SEQ ID NO: 104991 - DNA, 1676 bp, Homo sapiens
cactctaacctgggcaatagaatgagactctgtctccaaaaaaaaaaagttgctatgtctgaagaggtaaacaggtgataaatcatgaagagatttgtgtctgaaactgtaattgaaggatttcaaacaggaaaaagataatcacatttatacttaagattagagaggtatgatactggaggcagagagacctgttagaaaatttatactaattcaggcaagatgatgaagggcagaactaaagcaatgaaaatagggaaagcaagtacagaagaacaaaacttaaagatttagagagcagcactgacccagctgggacaagttctagttgtccattctattgccagtgctgcagagtccagaggcagcacagtgcatcatttggtgagggagttcacaagggagaaccaaactagcttttataacagacccatttgtggtaactaacccagtcccttgataataaccattaatccatgcatagattaatccatttatggggacatagatagccttcatgacccaatcaccacttaaaggccctacctcttcgtactgatacattggggatcaagtttagcacaagtttcagtgggggcaaacattcaaatcatagcagtgtctattaggctgcaggaggtgtctctacccaaatgtcggtaagtatgtgataagtgggatagttgagctagtttaacgatgtctaggttggttgggttggacttttcctcgtgtcacctccctgcttagctctagctgcttattggaatgcagccgtgctttcctgggtttacttaggaaatgctgagatgcactctgaagcattcttgaggttttccctttggttcatttgtcccatactctctccgttataccagtcttctcagatcttcacaacacaagtaaatctgttggaagcaaggtcttgtagatgtagacatatgggaaagatagagcctgctctcctgatggatgctgttgttgagataggttgggttggcctaggtaagaggaggaccagaagagatttatgatttcttggaaggctatgagttgctgctggccccatcataatcttttttgtttagcagaagtcaggaaacgaatactggtacacttacatttcttggaagagcagcagaaaccttgggatatccttgtgggtcaaggaggcaactctcctcacggattccctgatttgataacaacatactcatggaaacaccaatccaagttttcacaagtttctcttaaagttaacttaagacttcctagaccaagaattcctaccacgcaaggcctgtgaaaatattgtaaacttaatatccgacagggagatattcaaagatgccaaagtacctgtttttataaatattaccacatggtttaagatttgacttctcacataaaatgagtaaaaataacaatgatttttctgcagtaccttaatgatgctgtaattatgaagcagggttttaaaattctgccatgtagtgccttatttttatagtaatgttttctatgaaccttctaatttaatgtgtattaagagatttaaagagtatgtaattaaaaaatatctttccacaaagtcaccttgagatttaatgctttctaattggcttgatcatttgatggcaagataactagttgggtaactgaacatagactctaca

SEQ ID NO: 104992 - DNA, 912 bp, Homo sapiens
cctaagtgctgggattatagaagtgagccactgcacccagccggattttttattttttgagacgagacatcattgtgtcccatgctggtctgaaactccttggctcaagcggtcctcctgccttggcctcccaaagtgctgggattacaggcctgagctcactgtgcccagcctgaattaaagttatttttaaatgctggcacatctttactgagggctattatttgtataaattgttttgttaacagtggtaaagtatacagagattggaaagccaaggtgcttactgtatgttatattcgtcttatgttgtttgtatctaccaggatgaattgcactttatattagcttaaggtagtggctgtcaaccctgacagcatgttagaatcacctgaggaagcttttaaactgatgcccaagccctaccccagactagtacatcagaatttctgcaggtggaacccatatgtcaatatagttaaatcttcccaggtgattctaatgtgtagccaaggtccagaaccactgatttaaggcaaaagataatttgttggcttacctctttgacaatcctactctttgtctttatctttagtattcacctcagtgcctgagaccaaatgaattgttttgtggtttgttttgagtgaatgaacaaattgttaaacacaaagagctgaactttttaaaagacaacataactcagaattcagtgatgtctaggtatttgcttagggaagaaaattaaggatctgctgtatgggagtctgtctcatgttacctcatgggttcttaaaacagtcctagatatgagtaggttttataatcacaaatgaagaaactaagacccaagcaatttagcagtaaagctggcatgtgaaactgtatctgactcccagtgattttgaggaa

SEQ ID NO: 104993 - DNA, 646 bp, Homo sapiens
cctaagtgctgggattatagaagtgagccactgcacccagccggattttttattttttgagacgagacatcattgtgtcccatgctggtctgaaactccttggctcaagcggtcctcctgccttggcctcccaaagtgctgggattacaggcctgagctcactgtgcccagcctgaattaaagttatttttaaatgctggcacatctttactgagggctattatttgtataaattgttttgttaacagtggtaaagtatacagagattggaaagccaaggtgcttactgtatgttatattcgtcttatgttgtttgtatctaccaggatgaattgcactttatattagcttaaggtagtggctgtcaaccctgacagcatgttagaatcacctgaggaagcttttaaactgatgcccaagccctaccccagactagtacatcagaatttctgcaggtggaacccatatgtcaatatagttaaatcttcccaggtgattctaatgtgtagccaaggtccagaaccactgatttaaggcaaaagataatttgttggcttacctctttgacaatcctactctttgtctttatctttagtattcacctcagtgcctgaggccccgtctccaccgggatcctctagacgac

SEQ ID NO: 104994 - DNA, 2368 bp, Homo sapiens
tggcacggagcatttccagcctcacgcgctttaattttctcagctttaattttctgtggggtcggccaagccatcttccttgtttagcggaggaagccaggctcagagagggagaggagttggcccaagggcacacagcagccaagtggccaaggccggaaggtgcacccgcaaggagaagggggcagcggagccctctccctggctgttgttactgggacactagagccgcgccttccccaggcctccgccgaggctgctggagcgggtcccgcggtgccagggcctgttccccgcgctccgccagggatgctggggcctccgagggctccggaggcggtttagggggcgggggcgcggaggcgcggctccgagcagggggcgggggctggatgccggagaggccactcacccccgcccacccccagtccccctcccttcgcaagcacgctgtcccccttctcccacacggctgcggagcctgggctgggcgcgggggaggcggagggcatcgcggaggggatcccgccccctcccccggccgctcggtgcccccacacccacgtgagcgcagggccggcccggatccctcccgcagcatagcgcgtcccggctccgcgccggtgcctccacggtccggtccccgcgccggtgctgcacagtccctggcgggtccccgcggccccggccgggcgcttcgccgggctccggctcctgcatccgggcgcagcgcgcaggccgaggcgcgggcaggccgcccccgccgctccggacgccgatagaccatgagcagccatggcaacagcctgttccttcgggagagcggccagcggctgggccgggtgggctggctgcagcggctgcaggaaagcctgcagcagagagcactgcgcacgcgcctgcgcctgcagaccatgaccctcgagcacgtgctgcgcttcctgcgccgaaacgccttcattctgctgacggtcagcgccgtggtcattggggtcagcctggcctttgccctgcgcccatatcagctcacctaccgccagatcaagtacttctcttttcctggagagcttctgatgaggatgctgcagatgctggtgttacctctcattgtctccagcctggtcacaggtatggcatccctggacaacaaggccacggggcggatggggatgcgggcagctgtgtactacatggtgaccaccatcatcgcggtcttcatcggcatcctcatggtcaccatcatccatcccgggaagggctccaaggaggggctgcaccgggagggccggatcgagaccatccccacagctgatgccttcatggacctgatcagaaatatgtttccaccaaaccttgtggaggcctgcttcaaacagttcaagacgcagtacagcacgagggtggtaaccaggaccatggtgaggacagagaacgggtctgagccgggtgcctccatgcctcctccattctcagtggagaacggaaccagcttcctggaaaatgtcactcgggccttgggtaccctgcaggagatgctgagctttgaggagactgtacccgtgcctggctccgccaatggcatcaacgccctgggcctcgtggtcttctctgtggcctttgggctggtcattggtggcatgaaacacaagggcagagtcctcagggacttcttcgacagcctcaatgaggctattatgaggctggtgggcatcattatctggtatgcacctgtgggcatcctgttcctgattgctgggaagattctggagatggaagacatggccgtcctggggggtcagctgggcatgtacaccctgaccgtcatcgtgggcctgttcctccatgccggcattgtccttcccctcatctacttcctcgtcactcaccggaaccccttccccttcattgggggcatgctacaagccctcatcaccatggtcattgtgcttacgtcggtcggcttgcccacggaagacatcacgctcatcattgccgtggactggttccttgaccggcttcgcacaatgaccaacgtactgggggactcaattggagcggccgtcatcgagcacttgtctcagcgggagctggagcttcaggaagctgagcttaccctccccagcctggggaaaccctacaagtccctcatggcacaggagaagggggcatcccggggacggggaggcaacgagagtgctatgtgaggggcctccagctctgcccccccagagaggagggaagggggctggggaggggagtcctggtgacacatctgttgcccaactgaccgtgggctgaacacacgttctgcttgactcatttaggggggagggaaaagtgaaataaaggagcaggaatgaaaggtaaa

SEQ ID NO: 104995 - DNA, 431 bp, Homo sapiens
ctgagctgagatcgcaccattgcactccagtctgggcgaaggagagtccgtctcaaaaaaaaaatagttaggttatggtgcaaaacaagagaaaacaagactcaatagaggatggggtgaaagtgtggaaaaggtggcttggagtagagggaaggcagtaggatagtggagtgctgcttgggataagggttgggatggcgtgtgagggtgtgtatttggaaaattagaagtagaaagatggtggtgcgggtgaatgggtaatgggtgggttttggggtgggctataggaaaagggatgcttggtgggtcggctgttgagttggtgatatggggagggtggaacggatgctaggagagctggcgttgggtatgcatggagctgcgggggccacatcatctgtccttcaggtatggcatccctggacaacaag

SEQ ID NO: 104996 - DNA, 2644 bp, Homo sapiens
tggcacggagcatttccagcctcacgcgctttaattttctcagctttaattttctgtggggtcggccaagccatcttccttgtttagcggaggaagccaggctcagagagggagaggagttggcccaagggcacacagcagccaagtggccaaggccggaaggtgcacccgcaaggagaagggggcagcggagccctctccctggctgttgttactgggacactagagccgcgccttccccaggcctccgccgaggctgctggagcgggtcccgcggtgccagggcctgttccccgcgctccgccagggatgctggggcctccgagggctccggaggcggtttagggggcgggggcgcggaggcgcggctccgagcagggggcgggggctggatgccggagaggccactcacccccgcccacccccagtccccctcccttcgcaagcacgctgtcccccttctcccacacggctgcggagcctgggctgggcgcgggggaggcggagggcatcgcggaggggatcccgccccctcccccggccgctcggtgcccccacacccacgtgagcgcagggccggcccggatccctcccgcagcatagcgcgtcccggctccgcgccggtgcctccacggtccggtccccgcgccggtgctgcacagtccctggcgggtccccgcggccccggccgggcgcttcgccgggctccggctcctgcatccgggcgcagcgcgcaggccgaggcgcgggcaggccgcccccgccgctccggacgccgatagaccatgagcagccatggcaacagcctgttccttcgggagagcggccagcggctgggccgggtgggctggctgcagcggctgcaggaaagcctgcagcagagagcactgcgcacgcgcctgcgcctgcagaccatgaccctcgagcacgtgctgcgcttcctgcgccgaaacgccttcattctgctgacggtcagcgccgtggtcattggggtcagcctggcctttgccctgcgcccatatcagctcacctaccgccagatcaagtacttctcttttcctggagagcttctgatgaggatgctgcagatgctggtgttacctctcattgtctccagcctggtcacaggtatggcatccctggacaacaaggccacggggcggatggggatgcgggcagctgtgtactacatggtgaccaccatcatcgcggtcttcatcggcatcctcatggtcaccatcatccatcccgggaagggctccaaggaggggctgcaccgggagggccggatcgagaccatccccacagctgatgccttcatggacctgatcagaaatatgtttccaccaaaccttgtggaggcctgcttcaaacagttcaagacgcagtacagcacgagggtggtaaccaggaccatggtgaggacagagaacgggtctgagccgggtgcctccatgcctcctccattctcagtggagaacggaaccagcttcctggaaaatgtcactcgggccttgggtaccctgcaggagatgctgagctttgaggagactgtacccgtgcctggctccgccaatggcatcaacgccctgggcctcgtggtcttctctgtggcctttgggctggtcattggtggcatgaaacacaagggcagagtcctcagggacttcttcgacagcctcaatgaggctattatgaggctggtgggcatcattatctggtatgcacctgtgggcatcctgttcctgattgctgggaagattctggagatggaagacatggccgtcctggggggtcagctgggcatgtacaccctgaccgtcatcgtgggcctgttcctccatgccggcattgtccttcccctcatctacttcctcgtcactcaccggaaccccttccccttcattgggggcatgctacaagccctcatcaccgctatgggcacgtcttccagctcggcaacgctgcccatcaccttccgctgcctggaggagggcctgggtgtggaccgccgcatcaccaggttcgtcctgcccgtgggcgccacggtcaacatggatggcactgccctctacgaggccctggctgccatcttcattgctcaagttaacaactacgagctcaacctgggtcagatcacaaccatcagcatcacggccacagcagccagtgttggggctgctggcatcccccaggcgggtctggtcaccatggtcattgtgcttacgtcggtcggcttgcccacggaagacatcacgctcatcattgccgtggactggttccttgaccggcttcgcacaatgaccaacgtactgggggactcaattggagcggccgtcatcgagcacttgtctcagcgggagctggagcttcaggaagctgagcttaccctccccagcctggggaaaccctacaagtccctcatggcacaggagaagggggcatcccggggacggggaggcaacgagagtgctatgtgaggggcctccagctctgcccccccagagaggagggaagggggctggggaggggagtcctggtgacacatctgttgcccaactgaccgtgggctgaacacacgttctgcttgactcatttaggggggagggaaaagtgaaataaaggagcaggaatgaaaggtaaa

SEQ ID NO: 104997 - DNA, 1336 bp, Homo sapiens
tggcacggagcatttccagcctcacgcgctttaattttctcagctttaattttctgtggggtcggccaagccatcttccttgtttagcggaggaagccaggctcagagagggagaggagttggcccaagggcacacagcagccaagtggccaaggccggaaggtgcacccgcaaggagaagggggcagcggagccctctccctggctgttgttactgggacactagagccgcgccttccccaggcctccgccgaggctgctggagcgggtcccgcggtgccagggcctgttccccgcgctccgccagggatgctggggcctccgagggctccggaggcggtttagggggcgggggcgcggaggcgcggctccgagcagggggcgggggctggatgccggagaggccactcacccccgcccacccccagtccccctcccttcgcaagcacgctgtcccccttctcccacacggctgcggagcctgggctgggcgcgggggaggcggagggcatcgcggaggggatcccgccccctcccccggccgctcggtgcccccacacccacgtgagcgcagggccggcccggatccctcccgcagcatagcgcgtcccggctccgcgccggtgcctccacggtccggtccccgcgccggtgctgcacagtccctggcgggtccccgcggccccggccgggcgcttcgccgggctccggctcctgcatccgggcgcagcgcgcaggccgaggcgcgggcaggccgcccccgccgctccggacgccgggatgtaagaggctccgagaagcagcccacacatctcatcagatctaagtgtctagaggtcgggagaaccaagtgggaaagacccaccctcacccctcaccctgtagaaactgggaacactagaagggacattttctgagcaggaaacccaagagacagggttttacgctgtcacccaagttggagtgcagtggtacgatcatagctcattgcagcctcaaactcctgggttcaagcgatcctcctgctttagcctcttgagtggctaggactacaggcacaggccaccgtgcctggctaatttttaatttttaaaaaagagacagggtctggctatgttgcccaggctggccatgaactcctgggctcaagcggttctccagccttcacctcccaaagtgttgggattgcaggcatgagccactgcgtctggcccacagatgctaagtgctgtctgctcttctccaggggtcagcaaattttttcagcaaatggcccaagagtaaacattttgagctttgtggcccgtacaatctctgtcccaacaactcaactcag

SEQ ID NO: 104998 - DNA, 251 bp, Homo sapiens
aaatgtaaatatgtgtgcatatttatatacatgtatgtataaatgtgtggataaatatgaattgttgaccacggtttatggaaaaaaaggtgtaaacatgtgtaaatatgtgcaaatatgtgcatatttatatacgtacatatttggacttataggtgtaaatatgtgtgcatatttatatacatgtatgtgtaaatgtgtggataagtatgaaattttgagttatatggagttaaataaaatatataatc

SEQ ID NO: 104999 - DNA, 241 bp, Homo sapiens
tcctctctctgagcccctgagtccctagttctatgtcagtgatgttttctgttcctgtcccatgtcatgtcaccatgtcaccaagtcagtgagtgaattgacagaagtcctattcaagatgctgtgcctttagcttttcccttctagtctcataaatttgtagcctcaagacccacccaggccctagcatcaagcagtgaactggccttctttgcatgcagtaatgcgacccaggccaaac

SEQ ID NO: 105000 - DNA, 461 bp, Homo sapiens
tttttccctttgtgccggaggatgtaccaaagcttcccaggaggatctttgttaatttagagcatttctgtctctgccctagcatggaaggttctatcgtgtatctgtcccagatcacaggacttgaagtgcttttgcaacttacaatatcatgaaaaataaaacagttagggctaaaacaaaagagttcatctacagcagtggccctctatatgtggtccgcaaccattggtggcagcatctcctgggagcttggcaaaaatgcacgttctcagcccacccaataccgactgaatcagaaactctggggtaggagtctagcaatctgtgttttaacaaatccttcagaggattctgatgttcactcaactttctgttcctctgccctaaaggaacagaaagaggagacacctcggtctttgacttgaagtgggtattgaacaagaggtctcaaagacttc

SEQ ID NO: 105001 - DNA, 372 bp, Homo sapiens
catcagtctgtctcaaaaacaaatgcaaactaaacccccaaactggcctgagaacctaaacaaagctctaattcatcctcacagctatccatatagggagtgtcagcagagaatacttgcttccatttctgtgtagacctattattccttcagccctagggacagccgtttgctcaagcaaaatgtgaggcactctcagacattcacattacttctaaggaccccattctctccatgcccatcccctccttcccagaagctccagagagaggcgcccgatttcctgctcaagactgattcttccacctggtctcctcatcatctccaggtccaggatctgcctctaatactcattccctaacactttttttt

SEQ ID NO: 105002 - DNA, 161 bp, Homo sapiens
cctacgaaagggttttgagcagaggagtgacatgatctgaatcaggctttgaaaggatcaccctgcaactgaattgagaagactggaagagatatgagggttgaagcaaggaaccagttagaagcatgttgcattttgcaagctatgcatctgacaaaggt

SEQ ID NO: 105003 - DNA, 154 bp, Homo sapiens
cttgatttcttcaaataatgaaggaaattcattagttcaagataaaacaatctgatgcactgcaagatgagaacaaaaatagagagggaccttgcagatggtttttcagggttcaaggcaattctcaaatatcagaactttgtgacttcacttt

SEQ ID NO: 105004 - DNA, 433 bp, Homo sapiens
gtgtgagggagaaaactgcaaagccagccagggctacgcttcttatggaatgatccctggagtaaaagggatttatagtcgaggagttatgtttagaaaggacccactcagaacaggaatgagcttagaaacttcataccaactaaagcttcatccctggccagctgagtacccccttctcccctctatcaccctacgaatccattcaccatctttgcttggattttttttttttaaactctcagatttcccagcccccaaactcttgcctctccagtatcttcaaaactggggtccaagatggtgagccccttaacgaaaaggctaggtattaatatcctgtgttacctctacacccagcacagtaaaataaatttgaagcgaatgaataaagaagcaaaccaatgaatgtatgtcccttgggcagctccac

SEQ ID NO: 105005 - DNA, 415 bp, Homo sapiens
ggggtgccccttcctgtagctcaacatcattgcttagatctcagaaacagcagagaagtgcagacaggttttttagttcagtttgattgtgttttgtttatttgttttcttaagcattttataagcttgtttcagagcccatctgctccttgcagttccccgagcagtccctgtgtgttcacaccacggtgcctttgttgaggctgtgtcatctgcttgcaagactttcaccacttcacacacccccgtctttcagggaggccagttctttgctcacctttccctgcgtcaccaggcagaaggaagagtcccctcctttgcagtccctttctcttgggatatttcccacagcctgtgagttccatgtcttattcattgctctatcacccagcactgtggagcttctccttggctg

SEQ ID NO: 105006 - DNA, 581 bp, Homo sapiens
atgtttatttgcacggtgttacatgaaattgcaatccacttttaagagaacaaggcaatcaatcactctttcaaatctctctcacacatgtgggcacacacacacctcaactatctaatttcctgggaacaccagggactcagtattttagattaattacacacatgtgcagtctataatactgtcctcaatttaatgacttgcttattccaaaagttcacttccaagttgcttggactggagaactccaaagcataaaatacttaaatggaactctattactcttaagcatcaacctctacctctaccactgtctccactaagaccagcagaaggctattagatcttggtgcaggtaagaaattgatcggcctctgttacagttatctattgctgcctaacaaccactcaaatagttagtggcctaaaataacaataatcatactgttcacaaatctgattggaggagggctcagcagggaaacctggtctctgctccacatgaaataagctggggctgctcaacttggctagaagatagtcttccaagatggcaagttggtgtttactgttagctggga

SEQ ID NO: 105007 - DNA, 212 bp, Homo sapiens
tcatgttttatgtagtaatttagaatcagaattgttacttaaaatatttaaataaaaataatggcttttaatatttttccctaatttttgttctaaaatcttttggatttatcttttggatttgctatactctgacatttggtgagagattttcttttctttgaaagtggaatattcagcactttgggaggccgaggcgggcggatcatgag

SEQ ID NO: 105008 - DNA, 626 bp, Homo sapiens
taacaaattaatgtcctatgtatttgtttggagtgtaagagggagccaaaaataaaggtacaaatgaaggttcacttctgaaggcaagctatgcttagttacatgaactgcaacatgcccaaaggggaagcatacagagttctgtctttttaaccatctgttcactgataatgtttagtgaagtccctggggtcagatagatatttaatgtttaaaatgaatatgtctttaaacttaatttcaggggaaatactgttgaaattgggaagattaaaagaagccagtgaagtgttcaaaaacttgattgatcgaaatgcagaaaattggtgttattatgaaggcttggaaaaagctctacaaattagtatgtaatgatttttctcctctttctcataactactgattgaagtataataaaatgtaaagttgtaataatacttgggaacaaataattttagcattagtactcatttttccatttagtaaaattataggttaaacatgggagtaaaaatgaattcaaatagttacacttaagtgtaagtgattgcagatatgttaggttccttgacccttacctgtgatagtattggaaggtgaggcaaaaataaaacaaagccaaacca

SEQ ID NO: 105009 - DNA, 404 bp, Homo sapiens
tatctcctgacctcgtgatctgcccgccttgacctcccaaagtgctgggataataggcatgagccaccgcagccggccgccccactaaatcttttaaagaacacttttgagcctttatcttctaaatagtaaactatgcaatttcagagagattattccagccccaacgttttcatattatgagttggtttttcccaataggaaagacttgtctgttccatttttcctaaacccagttctccaacaccaaccgggtgtcccacaattcaattaaattctgataccacctggcatttagtgcagactccacaggttaaatactcaatcccacaagactgaccccacttcagatgccagccgcaaatggggtccccaggctaactgcacttctgcctagggactac

SEQ ID NO: 105010 - DNA, 468 bp, Homo sapiens
gaagaatgtcttaggtattttgatatggattgtgttgaagctatagattgcttttggtattattaatatttttacaatattcttccaatctatgaacaagggatgtctccccccggcccacactcttttttttttttttttttaatttttcagtttccttcaccagtgttttacagtttcccttgtagagctctttcatatccttggttgaatttattcctaggtattttttttgtagctattgtaaatggaattactttcttgatttttttccactagtttgttattgggatgtagagatgctactaatttatttatttcttattttatttttattttttgagacagagtctcgctctgtcgcccaggctggagtgcagtggcgtgatctcggctcactgcaacctctgcctcccagattcaagcaattctcctgcctatctccccttttatactaataatcttata

SEQ ID NO: 105011 - DNA, 697 bp, Homo sapiens
ataccacttgatgtatagaataaaaacactacacatctaaatacttacattcatagcatataccgtatctattcttcatttctttgtgtacatctatttttctggctgggcgcagtggctcacgcctgtaatcccagcactttgggaggctgaggtgggcagatcacaaggtcagaagttcgagaccagcctggccaacatggtgaaaccccgtctctactaaaaatacaaaaattagccatgcatggtggcctgcacctgtaatcccagctacttgagagactgaggcaggagaatcactagaatccaggaggtggaggtgcagtgagccaagatcactgctctccagcctgagtgacagagagagactccgtctgcaaaaacatatgtatatttttccatctggcatcattttacttctgctaaaactacctttaatcttttagtgcagatctgctggtgacaaattcattcagcttttaaattctacattttaccttcgcttttgaaaggtatttttactaggtatagaatgctagatagactttttctgtagttaaaggattttgtttcactgtcttctggtttgcattacttttgccgagaaatgttatttcatctttatctttgtacttccgtacatatgtgtcttttctctatgactacttttaagattttctcatttttactttttttt

SEQ ID NO: 105012 - DNA, 765 bp, Homo sapiens
ggcaaattcaggctccccagagggcagttgggcattcacccagaggcctgtgggtaaaccttttcttttttagcagattggaggtaacaatagccagaacacctagaaaactctctttcaattgtctggcttccagggaatctggctggcttttgtgggaaagtttcactcaccctgagcaagggtcacccctggcctgaggtggggatatttgacctagacttaggcttgtgttagtcttggggttcttcagcagaactgggcagctggccaggctgagacttaggccgcagtcaaaagagagggaaacaggaggaaaaagtggggaagtgagtagagagcaggaacacacaatgagtgccttccaccgcattgactgcttcagttgccttctgtgggccagaaccaccttggggagctcacgggtttccagattcggttccttgacccttctgcccctgaccagcatcaagccagaagctcaatgtcccggaattttaccagtctaaagaaacacatgtgccacttgagtcagcttttccatttgagagtggccgttggctcgacaggggcctggatcctagcactattctctgtcactaaatcagtctgtgacgtgagccaagtcacttcctctctgtgagtctctgtttccccttttgtgaaacgaaagggctggattaggtgatctttaagggcgtttccagctctaacattgtatggtgcttatgtttcctttttctccagcctcatttcttttaggtc

SEQ ID NO: 105013 - DNA, 306 bp, Homo sapiens
gagaatcagttaaaattactctaataactattcccagagagcatggggaattgggctttatattccaccaggtttgaaattaaatggcaataactgcaagtgtaccaggtctagaattaatgtggaaagaagtgtggtacttttacctggggcttttacatggaacgcctcatgagcctccatacacagcaaaatcgtataggaaaaattcattcttcctatccctttttttttgaaatggagtctcactctgtcatccaggctggagtgcaggggcacgattctcggctcactgcaacctccgcc

SEQ ID NO: 105014 - DNA, 357 bp, Homo sapiens
cctctgctgagctccccgctagcaactgccaccagctgccaaccatgcaagtaagccgtcttagacactgagtcttcagatggctttagccactgctgccatttgatagcctgagataccgtgcaaaaactgcttagttcaacccaggcagcccacagaaccatgagagataataattgctacttaaagccactgaggtttggggtggtttattacacatcagttgataactggaacagataataaagactgttaggaatatatattaacatggttaagatcatcattaaaagaacaggtgtagagatgataacttctgatctatagagggaaaaatggaatgagaaatttaaaatg

SEQ ID NO: 105015 - DNA, 420 bp, Homo sapiens
gtggtaaaaacaaaacaaaaaaactggtaaatgaatgaacctgtcctcaaagtccatcctccaggatggaagccatcgtccacgctggactgagttggcctggagatagggatgacaattataacttgaccacttctgggccaggcacagtggcgcacacctgtaatcccagcactttgggaggctgaggcgggcagatcacttgaggtcaggagttccagaccagcctggccaacatgatgaaaccccatctgtactaaaaatacaaaaattagctgggtgtggtggtgcacgcttgtaaccccagctactcaggtggctgaggcaggagaattgcttgaaccggggaggtggcggttgcagcgagcagagattgcgccactgcattccagcctgggcgacagagtgagactctgcctc

SEQ ID NO: 105016 - DNA, 452 bp, Homo sapiens
gaccgttatgagagtgaacacgctaaactcgctgtccgagaggatacctgtaagaggttctcagtgctctatctacgcattaaagtgctctatacccatgctggaaggaaatgtactgtgatttaatagtgttaacacctatcaactagttaggctagtcaaccttgcagtatccaacaaatatccaaatctcactagctaacttctatttcttgtctcattttaagtccctgtggatgggcaggactctcctctaacctgtgatgccggcatctcaacatgtggctttcaggactattatggcagaacaagagcgggagggcctcacaatggctcttcgatgctttagttcggcagtgacacaaatcatttctgctcagagcccactggtcagaactactcacgtggctccgaaacaagggggcttggaaatgtggaggtacagcaggcta

SEQ ID NO: 105017 - DNA, 801 bp, Homo sapiens
  misc_feature (775)..(775): n is a, c, g, or t
tttagttacctctcccgtgcaacgttgaaacatacttacacaaaaatattatttattgcttctctgaatcaaatttaactattttatctagctgcctgagtgtagagcttcaagacttttaaccactgatctgatgcgagaaacaaaggcaaaaagaagtcacagaagtctttagggttttaagcttgagtcattgggaatccagggagtccatactactaattaagaaaaggaagtcaggatattttgtggagtggataaaagtttaattggaaatgtatggtgggtgagatgattaacaagttatcttacaatagcagttctcaatcaggggtgattttgcctcccagtggacattgggcagtgtctggagacgtttttggttgtcacagcacaggggagggattgccactggtgtctagtggataaaggctgagatgttgctaaacagctcacggccttatgacaaagaattatcccatccaaaatgtcaacagtggtgaggctgagaaacccagtattacagtatggggtgaaaaaagatacttttaggatgtttatattaagtccgcattggactttaataatctaagtttactctctgtttagcaagtatttaatcagcatccaatatgtagcaggctgtttaccaggaacacgaagaggaataagatatagtatgagctttctaaaaactcagcctatcaggggaaatgaatgcgtaaaagtttctgaataaaagcttgcggccaggcgcggtggctcacgcctgctngtgcgaatcctgcagaccgggggatc

SEQ ID NO: 105018 - DNA, 747 bp, Homo sapiens
  misc_feature (721)..(721): n is a, c, g, or t
tttagttacctctcccgtgcaacgttgaaacatacttacacaaaaatattatttattgcttctctgaatcaaatttaactattttatctagctgcctgagtgtagagcttcaagacttttaaccactgatctgatgcgagaaacaaaggcaaaaagaagtcacagaagtctttagggttttaagcttgagtcattgggaatccagggagtccatattggaaatgtatggtgggtgagatgattaacaagttatcttacaatagcagttctcaatcaggggtgattttgcctcccagtggacattgggcagtgtctggagacgtttttggttgtcacagcacaggggagggattgccactggtgtctagtggataaaggctgagatgttgctaaacagctcacggccttatgacaaagaattatcccatccaaaatgtcaacagtggtgaggctgagaaacccagtattacagtatggggtgaaaaaagatacttttaggatgtttatattaagtccgcattggactttaataatctaagtttactctctgtttagcaagtatttaatcagcatccaatatgtagcaggctgtttaccaggaacacgaagaggaataagatatagtatgagctttctaaaaactcagcctatcaggggaaatgaatgcgtaaaagtttctgaataaaagcttgcggccaggcgcggtggctcacgcctgctngtgcgaatcctgcagaccgggggatc

SEQ ID NO: 105019 - DNA, 461 bp, Homo sapiens
tattaaaattgcagtgtttttttttcacagtaatcaaaaatacaattctaaaatttacatgaaactaaaataaactttgactagccaaagcaatcatgaggaaaaagaacaaagcagaaggatatcatacttaaaatttcaaactatacatttcaagactatatagtaataaaacagaaaaatgaacaaaaaaatggaacagaaactaatactttcacacacacatttaagacctgatgcaaaaagagaacttaaagagttttagtttctcaaaatcatgcagatacttgtgtgtccccaaaacaatggaaaaacagccagattgtgcagtctcttatctgtcatgaagaggactttggctctcagtgtgaacttgaaggaagctcaccgaaagaaaaatagaattcttagagaattgaaaagcataagacagaagatgcctctttgtgagagcaaaatta

SEQ ID NO: 105020 - DNA, 571 bp, Homo sapiens
acagcaaccaattgcaacaaaacaaaatgttaagaaatgatctttttatgaggcaattggaaatttgaacactgatcaactataggatgattggaattattaattttgtaaaggtgtgataagatactgcacttggctgggcacagtggcacatgcctgtaatcccagctacttggcaggctgaggtgggagaatcgcttgagctcaggagttcgagaccagcctgggcaatgtggcgaaatccccgtctttacaaaaacaaacaaacaaacaaaaaagatattgcagttgtgttgtaagcgtccttatctttcagagctacatagtggaatgtttatggaatatttaggataaatgatatacgcatttgggatttgctgcaaaatgacccagagtcaggggtcagggggagaggtagagatgagacaagaggtagaggggagaggtagaggtagccacgagctgataattacagacaagagatgcggagtatgtgggggctcattatcctgcatagtctatctttgtatatctttgaacttttcaagaataaaaaagcttaaaaagtata

SEQ ID NO: 105021 - DNA, 390 bp, Homo sapiens
acagcaaccaattgcaacaaaacaaaatgttaagaaatgatctttttatgaggcaattggaaatttgaacactgatcaactataggatgattggaattattaattttgtaaaggtgtgataagatactgcacttggctgggcacagtggcacatgcctgtaatcccagctacttggcaggctgaggtgggagaatcgcttgagctcctgacctcaggtgatctgaccgccttggcttccgaaagtgctgagattacagttgcgagccactgtgcatggccagaactttataataattaaaagagacttgaagctgggtgtgacggtgcacacctctagtcccagctactcgggaggccaaggcagaaggatcaccttgaggccaggagtt

SEQ ID NO: 105022 - DNA, 805 bp, Homo sapiens
ggcctaggactagttttggctaatggatgaaagcaacatcagtctgggctggagcatttaattactgatgggaaactctgcagtctgtttccctttctggcacagtgaccagccacattcaagatgatgtcagttacatgagcctgggtccttgagtaactgagcagagccctcttgccaacctgttatggttgagagagaaataaaaacattgattgtttaagccactgagatttgggagttgattgttaaccatcacacagtataaccaaccctttcctcatggttacaatggtgagtaaactaagttggttaagatctggtggaaattataaggaaaaagagttttttggctgcatgttctaaagagctaacattctgaagaaacaagcccaagaaacccccagattgaaacgattccagtaaggcagagatcagagagattgtgagtttggtgctaaactaccacaacagagtaaatacagcaataggcaaatcacaaagattttttggtttcccagtgcatataaaagatatgtttagtctccctgcagtggctcacacctgtaatcctaacatcttgggagcccaacgtgtgaggactgcttcaggccaggagttcaagatcagcctgggcaacagagcaagaccctgtctctacaaaaaaatttaaagattagcccagtgtggtggcatgcatctgtagtcctagctactcagaaggctgaggtgggaggatcacctgaatctaggagtttgaggttacagtgagattgatcacaccactgcatttcagccagggtga

SEQ ID NO: 105023 - DNA, 997 bp, Homo sapiens
  misc_feature (996)..(996): n is a, c, g, or t
tctgagctgtgctgcatggtagggtgaccgcagtgggctgccctgggtgccccatgaaggactgagcagtggggtgacccttcatctagcagacgttcatcagggacctgctgtgggccaggctggggtcacactcagaactgactgcagccaggtggagaccccacctcgagagctcctccttcctagctgtgtagcccacaccccctggggagccgtagcagtgtgggggcagctctgatggaggggtgtgtacctggccacagctgtctctgggctgtggtcatcacccacaggtccttttcagatgcggtgcccacctgggtgtgtggacatgacccttgcctaagggagggagagaggaaggcctggtaccaggcagtgtcctctgcctgtgcccctgctggggaggacgtgagggcctgtggcttttaggaaccttgaggaggtgggggtggtcttctgacgccggcggggctcctgaaggtgcaggaaggcacagtttgtgcggagtccccttcggaggaagcaacgcctgtccctggcggggccgctgagccaaaggccgtgtctcagtggcaccctctcccagccgaggatgtcggcaccatttgggcccgtggacttcctccagtctctgggtggtggtgagtggggcctgctgccggctctgggagccgctagctgtccaagccccgattaccagtgtgaagatggaccttgaatccggcaacagtgaacacggctatggctgcaggtccgcacatgacgagggtatcgggtgacaattcaatggaggggggcccgagcccatggggtccggcgttggcataggtgatctcactcgcttcctctcatagctcaagcgccacgcctgagagacataggggcaacacacaatagcgttcagacacagcagaggcacaacgaaagcagacgcgcgaaaacagaagacacgcatcagctctcttcgagtagctggcggcgtctcgtgcnc

SEQ ID NO: 105024 - DNA, 1094 bp, Homo sapiens
gggctggtcttgtttcctggcctcaaatgatcctcccacctcagcctcccagagttctgagatcacaggcatgaatgactatgcccagcccacattatttaaaaaaaaaaagagagaaagaattatttggggaaaataggtattctcaagattcagcactattcttgagttgaaagagatataattacaggtagttaaaggaggggagaaaaaaacaaaactctagaaaaacaaaaaaacttcacaagaaaggaatgattttcttagtatactatatggatttactaaaagtagttagtaaacgtattagtaaatacttttaacagaatcctgacactgtaaacactatgtagttataacatttagaatcaatttatatacaaagcataggagacaattttattagccttgacgatgtaaaacggaaagtatagaagataaagtttgggagatgaaaagggacaggacctctgaaaatagcagggctggtgtaacatccttatcttccaaaatggggagtcaagagatactgtctatagatgatggaaatacacttcttttaggaagagaagaggtgggggattggcctaagtaaattcttatctagcatagcagaaagcaatagataatgtctacagttgataaatccaaggaaatccataataaaagcctatttctttagagatgtttatggtgacttctagaagaatgagttaaaaattattctaggatactggagaacacaagtagtggtggagagtggagtcagtagaagactttctttttatcaaaaatctagcacaaggccaggcgcagcggctcacgcctatcatcccaacactttgggagaccgatgcaggtggatcacctgaggtcaggtgttcaagaccagcctcaccattatggtgcaaccctgtctctactaaaaatacaaaaattagccaggcctggtggcaggcacctataatcccagctacttgggaggctgaggctggagaattgcttgagcctgggaggcagaggttacagtgagccaagatcgcgccactgcattccagcctgggtgacagaccaagactccatctcaaaaaaaa

SEQ ID NO: 105025 - DNA, 274 bp, Homo sapiens
cctccctcagaacttcaatacattcccagagaactttcctcagaacctaatgcgttcccagggaacttccatcagaacctaatgcattcccagataacctccctcagaacctgaatgcgttcccaaagaacctccctcagaacctaatgtgttcccggagaacctcactcaggacctcaatgcgttcccagagaactcccttctgaaccaaatgcgttcccagagaatctccctcagaacctaatgggttcccatagaacctccctcagaatct

SEQ ID NO: 105026 - DNA, 371 bp, Homo sapiens
cgcttgagaccaggagttcaagaacaacatgacaaaaccccgtctctactacaaaaaaacaacaacaaaaaaatctgggcatggtggtgtgtgcctataatcccagctactccagaggctgaggcaggataattgcttgaactttggaggtggaggctgcagtgagccaagatcgcaccactgcactccagcctgggcgacagagtgagactccatctcaagaaaaaaaaccacatggaggccctgagctgaggcagaggtcaggccctatgtcccacctcccatcctggccctacctaccaggcaggtggggctccctcctggtccctagaggaacatggactctgtcacagggtcacaaagcagccagg

SEQ ID NO: 105027 - DNA, 378 bp, Homo sapiens
caccctactgttgtggctacctattcttctaagtaatacttttaggtagtatgtccctcccaagtagccataaaatcttgagagaaatgtacattcacttttgccctaacagactatgaaagtgcagtccatttctaagcagatcactttggctctaacttttagaatatatttactcatgaaccccataccaattactgtgtcctcaaattctagggagcatctgtcttgctctttgattgtttctgtcaatatatgtccctggctgggattaaaatgagagtagcattagcgccacatctagatggagacgagaaacatcatgattctccaattttctctttaaagaaatactgtacttcttttcttcatctttat

SEQ ID NO: 105028 - DNA, 309 bp, Homo sapiens
gtgacaccctgaattatttcctgcatgagatccaagaacctgctcttggggtctcagacaagacctcttttctagcgacagtcttctttaaacatgccactatagcttggatttgagccatgattgtaccaactaaaatgcacaataattactgccatcatattctcctacctaggtaatatcacttcctttcttgtactctttacatacgtgtaagccacccacattttaaatttaatttttattttgtcaaagaaatatgtggacataatttcaaaagtctgttagttctttaaagctaataaaggg

SEQ ID NO: 105029 - DNA, 229 bp, Homo sapiens
ccagtttcaggtcatgcagggccttattggccgtgatagagaagttggcctttatttttaggtgcaatacaaagacattgtagagttttaagccagaaagtgttatgatctggtttgcaattttaaaagatcactgtggctgttgtgtggaaaatggactgtggggagcaagaatagagataggggagtcctttcaggaactgtaataattgtccatcctctcttaatt

SEQ ID NO: 105030 - DNA, 585 bp, Homo sapiens
acacagtcaaaatttggtaattgatagcacaaaagatgataagaaaatagaaaacacaaattacccatatcaggaatgttcctacagccattaaaagatcaataagggactatcataaatcactttgtaacaataaatttgacagcttaggtgaaatggacaaattccttaagaaacatacattaccaaaaacaaaaacaaataaatgcgtgagtgaaagaaagaagcaaaatataaattagccctatatatactaaggaagttgaattatcaacccttccaacttagaattcctgttccagaagagtttactgatgaattctatgaaacatttttgcaagtgacagtgtcaatcttgcataaatttattcagaaaatagagggatattgaatgccctccaattaattttgtgaagcaagcaaagccctgataccaaaaccaagcaacgacataaaaaaaaataaaaaaacttcaggtggggccccgttccccaattggcccttatggggatgtcggattacaattaaatggtcccgactttttaaaaccgtctgaaacttggaaaaaaccctgggcgttatccc

SEQ ID NO: 105031 - DNA, 828 bp, Homo sapiens
tagagtcgataactctttctcagagtggctagaaaggatggtttggtaaatggaaagaaatcacagcctcaattcttctcttgcagccttagtaggtgtactcgttctcgttgggtgttgtgtcataccatgcatccgtgggctagtataaagacttatagaagcaacacttactaaaacttcccttagctctcctccaccttattcagatcagttttttcttttataggattaaattgaacaacaaagccaagacctgttagaaaagtttgaagagaaactactatgaaaattgaaaagggggaaattgtaggataataataataaattcctgtccaaaggttttagcctgtaaattgttaagtataaagttctgagatcctctccaaagaaccaatgtatcagtatgttcagctcccctgttctttgttctacattataaagtttaacttcctcattctttatgtctccttgcacctagtttcagtaaacaaccccctcctagcctctatcacctgctctgaccttagtcacccttcgtcacctactctgttcttagtcatcctgagtcacctgttctgtaaccatcattcccaccaaactgctcaccctgcctctctggctcatacccttgctgtctttaaaatagccagtcagaattagcttagactgtgtggtccaaccatagccaatgggggaatgacacagcagtaggggctacctgcatcagggataagaacccctttccctcacttgttcaggtgtgctctcaccattgctccatccaggagatgcacccttctatagaagtaaaattgccttgctgag

SEQ ID NO: 105032 - DNA, 325 bp, Homo sapiens
tgcactgctcctactcctaaccactccacctaaacacggggagctcctccctcccaggctggctctgccctctgtgcactgcatctgtgggtcccgctcacaccccccgagtccctgtgccattttcgagcacactggctcctgagtgttttcacctctggcagccagcgcctatgtctcccagatggaagaagtccccaggccacgggcccgctgtgcctgttcagggaagggcagaagtgcctgggaatgtgtgtggcccagggcctggcccttactcaggactgacgggtgtgggtggccttgctcctacgcggaattaact

SEQ ID NO: 105033 - DNA, 190 bp, Homo sapiens
ggttgcgatcagagcatacccctttctacttatagttccatgcagcatggatgtgggaaaaagtctcctctgcaaagggggttaatgcaggtcactctacgtatgtgcacgaggtcgttataaagctcgaaaatatgggctcaccaaccaggtgatttttttagttatccaaccagaagacataacatat

SEQ ID NO: 105034 - DNA, 462 bp, Homo sapiens
agtgcattcctagtgcttatcttatagtagaatttcatgaggttaattcacttaataactctagagaattttccatgttgtatatactgttcttggctcgggaagttccttattcatctcccacgtgtgataagactttggtgaataaatgcaccattttattccgtggatatttatttagttgtgtttcctaatttttgccaagaaatggaaacagcagcaatgaaattggtttttatttttttggatccttaagaaataggtgctttttgaagaatcaggggagaagtaacgcaagaccccagaagtatgccaacatataaaaccccaagtcaaaaggtcaaaccacgcatttgatccctcaagtcccctgcttgaccctcttccaagtgtactttccttcctttcattcctgctctaaagctttttaatactttcactcctgctcaaaagaaaaaaaaa

SEQ ID NO: 105035 - DNA, 703 bp, Homo sapiens
gccaaccataaattccaataagggttaataccccaaatatctccaaaactcatattacttagtaaccaaaaagtaacctacaagtaaaagtgggcaaaaggacctggatagacatttttccaaagaaagtatagtaatggtcaacaggtatatgacacactgcttagtagaactaatcagggaatttcaaatcaaatccatcatgaaatatcacctcatatcttaggatggctttattagtcagttttcatactgctgataaagacatacccaagactgggaaatttagaaagaggtttaattgactcacagtactacatggctggaaggcctctggaaacttagaatcatggcagaaggtgagggaaagcaaggcacttcttcacaaggcggcaggagaattgtcaagcagagacggaagagcccaataaaatcattagatcttgtgagaactcactatcacaagaacagcatggaggaaaccacccccatgcacctggtctcccttgacacgtgggtatttgtggagattacaattgaagatgagatttgggtgggggcacaaagcctaactacatcagtggatgttaatcaaaaagttaaaagtgatactgaggatgtggagaaaagagaacaaaccatacagtcctggtgggggatataaattggtacagccattatggaaaacagatgaaggttactt

SEQ ID NO: 105036 - DNA, 326 bp, Homo sapiens
gtttatggagcacttgctctgtgcagggtactgcgacaggctctgggaacacagagaccagtgagtcacagtctctgtcctcgaggagcctgagacagcacaaggagtggagttcaggccagcaggggcagggacagttgggccacccctggaaggagttggtctttgcctgtcctacgtgttgaaggacagaggtactgtgagaggagagtagggagttgtggggacttgcctggggtgtcagaggggacggggtaggaggtggagggaagagatggatgggacagcacacaccgccctgtcatctcccatcctgggctgccgct

SEQ ID NO: 105037 - DNA, 412 bp, Homo sapiens
gtcaggctcgtcttgaactcctgacctcaggtgatctgcccgtctcagcctcccaaagtgctgggattacaggcatgagcctccatgccgggcttcgtgtcattttagtggggtttcaggaaaaagcacggggcaaatgcgtgtgtgcaatctgctaccatctataactggaaatcttccacactaatattgatttgcccttttcacttatttagggttcctaagactttggaatttcttggtattcattcctcatccttagggaatgcagaattctaacaaacttctgtgggatagatatgccatcactcacacactggtctttactaatttagacccttagtgttatacatggctcatatgaagagtaaaggggagcctgtcggtagctaggcccacatgtgtgcatgcc

SEQ ID NO: 105038 - DNA, 341 bp, Homo sapiens
cagagtgaagaagcaggggctgtgggaggctggctttgtagtatcagcagggtggagcttcctctagtgcctgtgggaggatgtgactgtctcgtttgaataatgctatggggtggcaggcaactgaaccccactactcagagataagcaggaaccgtgactggttcctgtgataaggaggatggcttggctagggtaccttatctgtggaaaaagagtggggatgggaacttgcagttagggcatttgaggccctcacagtttttcccagatgtcaaagcatgcataatattggatcttaattttaggccttataccaccgtatctccaccttcccgctt

SEQ ID NO: 105039 - DNA, 746 bp, Homo sapiens
aggtggtaaaagcaaaatttctaaaattgaaatcaagcaaaaacaaatgggcctaatgtttttcaaatgtatagcatcagcacctacagaaaaaagaattcaagtaacttttaagcactcgaactatatacccatagtgagtatattctaaggataaaccaccaaagaaatcaaacttaataggtttgttgttgtgagtggtgttggcattgtaattctgaaacagttttgaatatcaaggccattgggaactggaaaaagaaagatataaatatggaatgggggagataagaactttatggtattagatttcagttggggatgtcaatatgaactcatgatttttaaacagcatttaggttgaaccacatgaaattgccagtttttaggccacaaatagtcaaatattaacaatttcatgtgattcaacccaacattttctaactctgctagctgaaagggcctggaggcaatgagcatatcttatgccccatcctggtttctaaatgccattcccaccagaaggaatttgggctccttagggaagtcggtaattataaacctggggcagggattgtacagcttgtgagacttgccacagggatatagaggctcacttgaaagggctcccaccagcctaatttgggaaaatttatgtatcaaaaagaatagtagtggtagtcgtggtaatggattataacacagtgaatttttttaaaaaatcaatgaatttgtaatgacactaa

SEQ ID NO: 105040 - DNA, 157 bp, Homo sapiens
cccctcctcctccagccaagccctcactcacatctcctcttcacaccaagcttcttgataaagctgtccacatcctccacccttactttgtcatctcacactcactttgcaaccctctgcaactggcttctgtccctggctttgaaattggtgacag

SEQ ID NO: 105041 - DNA, 127 bp, Homo sapiens
atgtgaaaaccgaggcagagccaggactcaaatccagacagtctgcatgctggtagccatgcagtactgcccgggcaatccagtatatcgagatggagagtgtctggagtgactgggagtctgacag

SEQ ID NO: 105042 - DNA, 994 bp, Homo sapiens
ctgtatctaaatcacaaaggcaggtgtgtcctcactttagcacagtccaagattctgagttccttggaggacagaggcttatctctgtatccctcagtacatggcacagtgctgggcacacaatcactatttggtgaaataaatttgaggaaggacagaggagctcaagagttaatacctaaagcgcacaactactcattggagtgcagggccactggtgaggaacaaacagcagggcatgctagattagggagaggccatgctctccggtgctttccatttctcccggagataagagaggttagctaggggacactaacaataaactcaatcaagtgaaaagtccaacccccaagctaataaagcctaagaagaattttttttagaaactgagaaggcctagagtctttgggacttcaggatggttaagataggtcactgcattacctgttttcagatggccttgattttaatgcttgactggtaataaaatttctatgcagtgaaatcttatgtaaattaaatctgagttttaaaaaattcaagagggctggctgacaggatgctgggagagggcatcagcattccacagaggcaggctaacactaaggagatgggcactcagctgcacaactgcgcggcaggtccccgcacctatctccatggggttcacccacagcctggagcctgttaaaaaagcatgcaaagagggcaacaggcaacagaataccttgagatggtacctccagatacatttacttatggttttgttcttcctcaaaatgcctttgttgcttaaaacatctcagaccagtacactgcctagaatgatcccttcaggaactaccaaaaagctgactagacagggggaagtaagcaccatcaatacttcctgccccaccaaatgctctccagttgcacctacccaggttgattataacaggacagatgacacttgatataacctttctgttagagggattcaaaagaaaca

SEQ ID NO: 105043 - DNA, 940 bp, Homo sapiens
ctgtatctaaatcacaaaggcaggtgtgtcctcactttagcacagtccaagattctgagttccttggaggacagaggcttatctctgtatccctcagtacatggcacagtgctgggcacacaatcactatttggtgaaataaatttgaggaaggacagaggagctcaagagttaatacctaaagcgcacaactactcattggagtgcagggccactggtgaggaacaaacagcagggcatgctagattagggagaggccatgctctccggtgctttccatttctcccggagataagagaggttagctaggggacactaacaataaattttagaaactgagaaggcctagagtctttgggacttcaggatggttaagataggtcactgcattacctgttttcagatggccttgattttaatgcttgactggtaataaaatttctatgcagtgaaatcttatgtaaattaaatctgagttttaaaaaattcaagagggctggctgacaggatgctgggagagggcatcagcattccacagaggcaggctaacactaaggagatgggcactcagctgcacaactgcgcggcaggtccccgcacctatctccatggggttcacccacagcctggagcctgttaaaaaagcatgcaaagagggcaacaggcaacagaataccttgagatggtacctccagatacatttacttatggttttgttcttcctcaaaatgcctttgttgcttaaaacatctcagaccagtacactgcctagaatgatcccttcaggaactaccaaaaagctgactagacagggggaagtaagcaccatcaatacttcctgccccaccaaatgctctccagttgcacctacccaggttgattataacaggacagatgacacttgatataacctttctgttagagggattcaaaagaaaca

SEQ ID NO: 105044 - DNA, 432 bp, Homo sapiens
gactggatataacataattgttaaaacttgtctgggttcaaatcttggcttaaccatttgttagccatgtggtcttgggtaagctatttaacctctcagtgtccttgcctataacaggaataatactagtatccacctcatgttgtcatgacgaaataagaaaatattaaatagtagatactgttaaagtatactagttttattaactacaaatgattttttctttttattttagtttttattgttattttttgagaaagagtcttgctgtgttgcccagactagtgtgcagtgtcatgatctcgtctcactgcagcctccacctcccagattcaagtgattcttgtgccttagcctcctgagtagttgggactacaggtgtgcgccaccacacccggctaagttttgtacttttagtaaagatggggtttt

SEQ ID NO: 105045 - DNA, 470 bp, Homo sapiens
gcctagttccccactctgccctcctcctcttctctcagtctgctcctggaacacctgcctcagtttccatgctctctccagtgccctccccggtgaagcaggtaggtgttcaggccaccacagagacaatctctgtgggagattgtcttgcaatctcccacagatttcaatcaggattttgttatttcctactttgagctttaaagggaaatgggcctcatgggtggggaaaggatggtgggtccttccagcccaatttagtgatgcccagggcagatattatcctcagttcccaagagcaatcatacttttccacacataccgtgtgtctcatgttaggtaaatgtatttttacaatgagcaccacttctgtggaaaaagttccctgcacggggaggtccagcttccagactgctccatcgcataaggacttccccattcccctaaatgctgctctgtcagaacctgcc

SEQ ID NO: 105046 - DNA, 381 bp, Homo sapiens
gtgtatgatgcacattccaaagtggcaagtgtcattgtagatcaattccctggtgagaaaactgaggtccttggagatcaccaacataacttgcttgaggtcacttagctagttcctggcaaagccagagatcaaatccatgcatctatgaagcaacaatgaaggttgtgcatctgaggagtgtttgtgcaaggcggccaagggaaggtgactggcactgtagcagagagaaatgaacatgttctggagtcaccaaagtggaggaggtggggagaggtgaaagaggtgtcatcaataagggtgaatttacacaatgacagatttaggtgaggaaaggaaagaacaaggagaccagcctcaatgaaactgcagcctgggcag

SEQ ID NO: 105047 - DNA, 1104 bp, Homo sapiens
  misc_feature (498)..(498): n is a, c, g, or t
gaagaagtgcctttcatatcctgccatgattctgaggcctccccagacatgtggaactagtgatgcagagatgtgacccaacgggtctacctaccagggaggaggtgtggtttttactggaatattctggcaggcaaaagatctctccttttggctttctccctgcttctgaaacacatccctttccaggaatgcatgctttctgaggcagacaaaagaagagttgttcaaggagaagaagacttagagacacagacacacagagggaagaaggccatagaaagacaaaggcaaagattggagttgtactgccacaagcccaagaatgaggaaaccaccaggagctagaagaaacaagcaaggattcgtccctggattggtctttcaaagggagcatggccctgctgacactttaatttcagacttctaggctgcagaaccattaaagaataaatttcctttgtttcaaaaaaaaaaaaaaaaaaaaaaaaaaactcnggggctccaattccggggtcgcggagaaaaccgcggtgtatcgacgacatgtgggccacgtgcgccatagtctggtcctcctggaccacagctttctgggcacccagtggggccaaattcgccgggtcccccattataggagagctcgatatacatcgcgatacgcgccaggggctacccccgcggcttaacgagccgacgcgacaacagccctcacgcccgacactaccgcacagcagcgcccagccgccacacaccccgacgccacgaccacgcaccgaggaccaaccaccccaactctagagcaccaccacacacacgcgcggagcaaagcagcggaagaaacacacggactaataccacaccagatgagcgcgaaagagaaaacacagcaccacttgaccgacaacccagcgcaagagacgagcagaagcgccacaagcacacgcgcacgcgacgcgaccgccgcgggaacacccaaagccgaccagaagagagacgacgagcagccaagcaagcggcgaagacgaacgaacggaaacaacaaggaggagagaaggcgacgagccagaacacccacaacacagacgacagcacaccagcaag

SEQ ID NO: 105048 - DNA, 1020 bp, Homo sapiens
  misc_feature (498)..(498): n is a, c, g, or t
gaagaagtgcctttcatatcctgccatgattctgaggcctccccagacatgtggaactagtgatgcagagatgtgacccaacgggtctacctaccagggaggaggtgtggtttttactggaatattctggcaggcaaaagatctctccttttggctttctccctgcttctgaaacacatccctttccaggaatgcatgctttctgaggcagacaaaagaagagttgttcaaggagaagaagacttagagacacagacacacagagggaagaaggccatagaaagacaaaggcaaagattggagttgtactgccacaagcccaagaatgaggaaaccaccaggagctagaagaaacaagcaaggattcgtccctggattggtctttcaaagggagcatggccctgctgacactttaatttcagacttctaggctgcagaaccattaaagaataaatttcctttgtttcaaaaaaaaaaaaaaaaaaaaaaaaaaactcngggggattaaggggggggggggaaaaaggggcgtatgagaaggggccgggcgccaataggtgctcccggacccagttttttggcatacagggggaaaactcgcgagggtccccaataaagggaggcggaatataaattcggaaaacgccggggtaaccctgcttatgtctctcccgaaaaaacgtgcacagacacgagagagaacagacggagcagagacatgtaaaacgaaggggggctttcaacaagttggtggtccaaaaaaagcgggggttcagaagaacagacttgaaacaactgtacaaagtaaagagaatcttatccgagcacaaacaaagaaagagaagcgaacggcaccacgaaaaacagaaaaaaaaacaaacccaagaacgaaaagaacaacgaaaccaacagaagagaggggaaccaagacgcagaaggacaacggaggcgcaaggagagaagacaggaggaaagaacaagagagagaggagagaagctaagaaggaagagagcgcgaaa

SEQ ID NO: 105049 - DNA, 469 bp, Homo sapiens
gaagaagtgcctttcatatcctgccatgattctgaggcctccccagacatgtggaactagtgatgcagagatgtgacccaacgggtctacctaccagggaggaggtgtggtttttactggaatattctggcaggcaaaagatctctccttttggctttctccctgcttctgaaacacatccctttccaggaatgcatgctttctgaggcagacaaaagaagagttgttcaaggagaagaagacttagagacacagacacacagagggaagaaggccatagaaagacaaaggcaaagattggagttgtactgccacaagcccaagaatgaggaaaccaccaggagctagaagaaacaagcaaggattcgtccctggattggtctttcaaagggagcatggccctgctgacactttaatttcagacttctaggctgcagaaccattaaagaataaatttcctttgtttcaa

SEQ ID NO: 105050 - DNA, 273 bp, Homo sapiens
gaaattttatcgtacactacgggatggcggctttaggcgcaccagcattagcatctcagacacacagagggaagaaggccatagaaagacaaaggcaaagattggagttgtactgccacaagcccaagaatgaggaaaccaccaggagctagaagaaacaagcaaggattcgtccctggattggtctttcaaagggagcatggccctgctgacactttaatttcagacttctaggctgcagaaccattaaagaataaatttcctttgtttcaa

SEQ ID NO: 105051 - DNA, 210 bp, Homo sapiens
tccaacttttatcttttggtgtggctaacacatcaaaggggaaacaaagatcatgcagaattccagcaatattacccgtagaaaagagtcttacttttccaaggcaagttctgtaatcatctcgctttcacagacatgcagacatctactagagctcaactgtgcaaagcagcctgtggaattaagtgcatttcttggctttccactcac

SEQ ID NO: 105052 - DNA, 698 bp, Homo sapiens
ctcagccaggccgctcactgcgcgatggcagctgtgcttccccctcccagagaagaagatggtccttcaatttgaaaacaaacagaaacttaaaagacgtatttatagccccattatcctgaaatacgcatttttggctttatttgttattgttgtttttgggccagggtcttgctctgtcacctagggtggagtgcagtggcatgatcatggctcactgcaggctcgacctcctgtgctcaagtgatcctcccaccttaggctcctgagtagctgggcagccatgcaccactatacccagctaagttttaaacattgttttgtagagacagagccttactatgttgtccgggctggtatcaaactcctagcctcaagtgatcctcctgccttgggcttccaaaatgctaggattacaggtgtgagtcactgtgcctggcttatggaaatgtttttttttcttgattgagattgatgatttatgagagtatacacttatcaaaactcactgaaactgtacactcaaaatgtgtgctttttattgtatgcaaattatacttcaaagttgattaaaaagtactctccaggtcaatactctgtggactaaacaaaaaacgtttgcgtgccaaatttgattgaggtagccagttcttaacagctaatctacactgccacacatgtgtgtactgtaagagtgc

SEQ ID NO: 105053 - DNA, 394 bp, Homo sapiens
ttctaagaaaatatttggcaaataccctaggttggataactatagcttatctgtcattgtgataagcagaaaaacatgcactaccacctctaacaccccaaagatgtattcacttcccaatccctgggacctgtgcatgttaccttttaaggcccaagaagtgatgaagttaaggatcttgaggaaaggggcttatcctggattagccaggtgggtcctaaatccaatgacaagtcccttataagagaggcagaaagagatttgagacacacagaagaggagaagacacagagacacaaagacgagaagatcatgtgaagacggaggcagagactgaagtgatgcagccacaagacaaggaccgccaaagcatgcccatcaccaccagaagcca

SEQ ID NO: 105054 - DNA, 311 bp, Homo sapiens
aaggcccagtccccgaggactgtaggcagccggggcccctcttagggaccctgtccctgggcctctcctcagcccctctctttgtctccgtggccatggcaacctggctgggtgcttggcacttcccggcccagcccccagcctgaccagccggcctcctcctctgcagaggctgccctggcaggctccagcctggctgggaagccacccccaccacccactgatgggggctcctgggcagtactggtgctgccctgcagtgtgggaaggaccccaagcaaaggctcctgctgggcctcctctctgcctcc

SEQ ID NO: 105055 - DNA, 255 bp, Homo sapiens
tcatatataccacatattcttgtctatttatctgatgataaacaggttgctgttgtgtcttagttattgtgaataatgctgcaataaatatgggagtatgcatactttgggcagagtgattttaattcctttggatatgtacccaaaactagcattgctggatcatatggttgttatattttggttttctgagtatgatttcactacatgtaaaatctaaaaacactgaactcataaaagtacagaatagaatag

SEQ ID NO: 105056 - DNA, 544 bp, Homo sapiens
ctccacactgctttccacagtggctgaactaatttacatttccaccaacagtgtgtgagtgttcccttttctctgcaacctggccaacatctgttatttttttgactttttaataatagccatcgtgactggtgtgagatggtgtcttgttgcagttttgacttacatttctcaaatgattagtgatgttgagcattttttcatatacctgttggccacatgtatgtcttcttttgagaagtatctgttcatgtcctttacccattttttttttctttcagagcaggaatgaaagtttattgaaaagctttacagttgggcatggtggatcacttgaggtcaggagttcgagaccagccttgtcaacatggtgaaaccccgtctctactaaaaatacaaaaaattagctgggtgtggtgacaacgcctgtaatcccagctactcaggaggctgaggcacaagaatagcttcaacacgggaggcggaggttgcagtgggccgagatcgcaccactgcactccagcctgggtgaaaatccgtctca

SEQ ID NO: 105057 - DNA, 113 bp, Homo sapiens
agtgtccttataagaagaggaagagaccagagctcgctccttccccaccatgtaaggacacagtgagaagacagctgcctgcaaacaggaggaggagcctccagaactgtgag

SEQ ID NO: 105058 - DNA, 483 bp, Homo sapiens
gagctcaggagttcaagaccagcctgggccacatggtgaaatcccgtcatgcctgtaatcctagcactttgggaggccaaggcaggtggattgcctgtgctcaggagttcgagaccagcctgggcaacatggtaaaactccgtctctactaaaaaaaaaatacaaaaaattagcctggcgtggcagcgtgtgcctgtagtcccagctacttaagaggctgaagcaggagaattgctagaacctgggaggtgaggttgcagtgagccaagataatgccactgcattccagcctgggtgacagagtgagactccatctccaaaaaaaagaaaaaagaaattataagaaatctatttaaaaaatctattagattttagtagtaataagtgaatttagcaatgtcacaggatgccatgtcagtatagaaaaatcatttgtattcctgtataccagcaacaaactagaaaataaatttttaaaaattt

SEQ ID NO: 105059 - DNA, 244 bp, Homo sapiens
cagccctgcagggccgtctcccccaagaggcttgaatccacccaggaacccccggcagaaaaggctgggcaggagctcaggcccaacatcccccatatcttcactttgcgtcccctccccagccggccctcccctgcccacgcctcccagagctgcagtcgtagccaatgcagggaggtctcagttaccctgcagcaatgctgacagcttagttggttgattcagtcttcattttcatggtttt

SEQ ID NO: 105060 - DNA, 345 bp, Homo sapiens
tcttgagaaatataggtaaaacaaggtgtacttggggcagggtgagtgaggagagaggggaattttgtcccatactttttccaatactcgataaacaattccatggtgaaaaagatacatttacaatattaattgagaaataaaattcagggaaaaagagatcaggatggaaacaagcaaaatgaaaatttaaaagacagaaaactgtctgcgtgaggtggctcaagcctataatcccagcaccttgggaggccgaggtgggaggatcatgaggtcaggagttcaagaccagcctgaccaatattatggtgaaaccccatctctactgaaaataacaaattggcc

SEQ ID NO: 105061 - DNA, 136 bp, Homo sapiens
gctctgatctaggacgacagtttctatgatgtgcccatctagagaaatactcaaattgcaactttaggaagagaaaaagagggccctgcaaaaggcatctacaggccccatgtgctgttcacctttcttatttatg

SEQ ID NO: 105062 - DNA, 871 bp, Homo sapiens
ggctgcaggtcccgagccctgccctgccctgcagggaggcagctaaggcccagcgagaaattgagcacagcagctgctggcccaggtgctaagcccctcactgcccggggccagcagagccggtcggctggccgctctgagtgcagggcctgccgagcccacgcccacccggaactcttgctggcctgcaagcctgcccacatccctggttcccacccgcgtctgtctctccatccacacctccctgcaagctgagggagccggctctggccttggccagcccagaaaggggctcccacagtgcagcggcgggctgaagggctcctcaagggcagccagagtgggtgccaaggccaaggaggtgccgagagcaagcgagggctgagagggctgccagcacactgtcacctctcactaccagacccgagcagagctgtggacaacacagtatgggaattaagcaggtgagatgaccagagtcctcactggcactagaagatggcagcccaggagaaagctaccagccagagcgaggcctgccagagatagccacatctcctctcagagaatgggggtgatgaggccctgcaggccaatctgccctgtgctgtggggcagaggaagctgtgggactggacaactccaacattcacagttgtggcaccagctgcaggtgagaaatgtgaggagggaccctgccccctcaacctctgaggggccctggcagactgggggctgtcgccacctgagggttcccagccttcctacaaggcagtgtgcatggtgatgactgaagtctcggggtaatctcccagcaagaggtcaggtcctggttgtgcgtcccagggtgtcagtgaaattggctgctccc

SEQ ID NO: 105063 - DNA, 654 bp, Homo sapiens
tgtagttaatcttcccttcttcaacgcatcttcactccaagctatcctctactccactggtcaaataatgatggtgcagggtcaaatctggcctgctgcttttggtatataaagcatctgcccactcctttatgtattatcaatgactgcttttgtgtttcagtggtgaaagagactgtacagtccataaaacctgaaatatttactacctggtccttcagagaaagtttgtccaacccactactgccaggatgattctgatcaaaaatacaaatctgatcacgttgcttccatgcttaaaagactttggtagttacattaggtggtgaggtaccaatctgtgactgccaaatgcagcacttctggccacactaaataaacccctgatcttgaaggtgccttgtacattgatgtcaactttgtccttctgtgctgttgcatatgctgtgcattttgtataccatgcccttgatgtgaataattcattttcatcctcccagattcagttcaaatgtcatcaccatgtaagccttccttgactcctctcaacagtgagatcctccctacataccttatttccatatactttgtacatttgtctattttgcatttatcactatttcattcattcattcttctatttacacatctggt

SEQ ID NO: 105064 - DNA, 435 bp, Homo sapiens
tgatcaagatatcaggccttggtctaactgtctagcttagacttcagttacacatgctaattcaattttagtaaatgcatagtaacagtatgaagtcatgtaaaactgcctttgtgagaaaaagatagattgtttaaatgggttttctgtgaatgctgacatttcattttctattgtgaattaattatatgtacttgtacctggggtgtgatctattctgttatgtcccttgctctttgaagacagagattttatcaaatcatctttggagttcttactacacctcgtcaagcattttgaccattctaagcattaaaaaaaagtgtgctaactttgttttcctcgtgctagcattcagctattcatttattcaaaataaacacctacaatctgaaataagtataatgggaaaacttgaacgttctatttttctcc

SEQ ID NO: 105065 - DNA, 473 bp, Homo sapiens
gttaatatgtataaagaactcctgaaatctatacagagaaccccaatatgcaaataagcagtcatagttattcccaaaatacctattatattcccaaaatacctattatattccagatgctttgttcattctctcatttaattttttcaataatcatgcaatgtcttgattgttattctagtcttgccgctgagaaaattgtagcttagcaagattaactcacccaagcttagttagtggcagaggcatcttttaaatgggactccaaggtctgtattttgtctgccatgtcattccatgtaattgaaagcatgaagatcacgaacagactctatatagcttctgtactatattatcctcaaatataacctgagtaaattaaagcaacttgcaggtaaatgttaagcattctaaaatatctttagatttaatgataacacaaatattgatataggtttgataatggaaggaag

SEQ ID NO: 105066 - DNA, 4764 bp, Homo sapiens
aagcagtgagcggggttggggcgggttgttgggctgggggttccaattacaggcagggcagccagggagacctcagccagaggggatgcctgagggtgggagtgtctgctgggcctggtctctgaggcaggcatgtgtctgcccagcaaggcagcagcagcttctgaccgcagcgcccagtgctgtaggtggggctttggataccgtcctgtgggctatggctctgccttatgtgtgggagttctgaaaggaggaccggctggtggcagctcgggacaggcagggctctggtgatcacctggcagcagcaggagatggtggcaatggggacagagaagtgccaggatcctggatatttactttttaggcagagacaaccggcctcgctgctgaattggttgtagttacaaaaagatgagccatcagtaagcgtgtctcgagttatggaacggaaggagactgtcctgggtcttctcctttctgtctctgcgcccccaagcccctgccagagctgtaccccaggctcgggaggaaaacgtccttcctgagctgggcagaagccgcccttggccgtgaggcggtgttggttctgatgcggcttcccatggctttggtgtctccacaggcagttcttatggagcttcaggctgcccggggaggcgcagaagattgatcgcatgatggaggctttcgcttctcgctactgcctgtgcaaccccggggtcttccagtccacaggtcagtgcagagcccacagcctggccccttgccaggcacagcctccagctctggagggggcggcccctgtgggcacagcccagcgtgtgttcctggggacctgccttccctgagcgaggacgacctgtgggccgggcacctcttgcaggcgggcccccagcacgcggggtcccactgtccactggaggttctggctgagcccagcaccccggactcgttgcagacacgtgctacgtgctgtcattcgccatcatcatgctcaacaccagcctccacaaccacaacgtgcgtgacaagcccacggcagaacggttcatcgccatgaaccgcggcatcaacgagggcggggacctccctgaggagctgctgaggaatttgtatgagagcattaagaacgagccatttaagatcccggaggacgacgggaacgacctgacccacaccttcttcaaccccgaccgcgagggctggctcctgaagctgggagggcgtgtgaagacctggaagcgccggtggttcatcctgaccgataactgcctctattactttgaatacacaacagataaggagcccaggggaatcatcccgttggaaaacctcagcatcagggaggtggaggacccccggaaacccaactgttttgagctctacaatcccagccacaaagggcaggtcatcaaggcctgtaagacggaggccgacggccgcgtggtagaggggaaccatgtggtgtaccggatctcagccccgagcccggaggagaaggaggagtggatgaaatccatcaaagccagtatcagcagagatcccttctatgacatgttggcaacgaggaaacgaaggattgccaataaaaaatagctttcctggctaaaagacccaggtaaaagacccaaccccagcagaaagacaccgcgggcggcccctccgcggaaggcgtggcagggaggcagtcgccctgcggtgcaagctgctgctccagagcataccgtggcccaggtggtatccccaaggcctcgtgccgtggctggggtcctgggaggtggtcgccctgcagtgcaagctgctgctccagagcgtaccgtggcccagactgatcctcgaggcctcctgccgtggctggggtcatggtcggctgcgcatgtccagaagcatttccttcctgcgaccatcccggcgcccctagggggagaagccaggacagcagcttccgctgtctccacagcagacacgggacggattccacagacgggagcctcattcgtaccatgccaaacgcattcactcggggcagtattaaccgttctagaaagccactgttttatagcaaaacaggaaaggaaaagctaccagttttttattcagaatttttctcagatatataggattatagcttttatatgcctttttatattctgaaattataacaaaagatactttctaacagtagtatttttagaatggcagctataaagttaactcctggacacaagtatatactgtgcactgaaaaaatatccatctacacagcacccaaggggagggctgggggcaccggcacgggggcagcgtgcagccctgccctgtcaggctgtcagacaagccccggggggcagcaggtgggctcgggacgggctgggggagggacggccatggcacttgggggctccagggtgactcccatgaggcctcccttcaaccaggctttttggccccacaaatactttaagcaaatcattaaaattataacagttaatggtttgggggtgtttaggctgtaactgctaactcctaggaaacagccttttccctggacacagatggtccatacgctgagccacgtgaaactgctgatgttttgtttagatgcacacacatggcagcgtttcatacaggtcagcaggttagaccggcttttgaccatattcatcgctatttaaaacctgtggcaaaatgaacgcttattttacagactttctaatttgaccagatttcttaatgaatagacacagaattaactaaaaacagtctcaccccatgtagtgcgccgtgtcctgagagaggtgccctccctacgaggagggaagaacaggccctggggtgcagaggcccggcacgtagagaacccagatagacgccggtggtggaactggtcaaactccacgcccgcctgggaggttgtcaggttgctgtggatgtaaggataggaggtgcccagtgctccgctcaaggaaggctggatctgggccccacctacagagagggctcagggctggaccgggggcattgtgtgcttgggccgacccgggccggtggcagacgctgttctctgtcgggagatttgcgtccccaggaccctgttacacagtgggctgttgggttggtggctggcttttcctctatggacttcctcttcctgccccacctgcataggcacacacaccttgaatctgcaccctctggagggcatctgtactcctgtgcaaaatgcccagtccagagacaaaacctcagactttgtgcacctaggtttccttctcagcagcggagactgttctttgagttgccttgaagtggaggccgagcggctgcgggcccttcgcctccctgcggctgaccttgatgtagctttaagtcacactagactgcagaggggtccgaggccagaaacccctgtcctgcatcagactttcattcccacgttcttaggctttgttactgatacctcaaatcggaagttttagttctgagaaaggcaagtcagcgttcttgaaatgcctgactggtagatatgcaactctggcctccagtcttccatgaaaataaatgctgcctggacccccacccagaccacacactgacggccggctccggcggtgcccacccctcaggctggcccggcacccaagactggccacagccagctctgtcagcatgttgtgctcggacaagctgtttccttcttctgaccaacccaggtgtgacctggggatgcagagctttctgttttgggtgttgggagaagcagcaggaaggagtcgccagatgatcaagctccccctttgctgtcatctgtgaatgagcttcgccaggtggtgggcacctgggagccatgcagaggctgtggtgctgagttagactccaggtactttgtggtcaaaggaaatcgcctagctccaggctgtgttaggacagtattagcatgaaggctgtgcgaccatcatgcctgctgatccttgaggcaggcctggtccagaaaactctgggtcagtgactgcgcagggccagccgctaccaggacggccctgaaacaggacacatctgttttttgtccctcaccctgggcaggccgcgtcacaatcacagtcctcctcctccccaccctgacgtctgagcgcagggcttgaattgttagtcccaactctggccaaagatacttttttccagagacagaggccaggaggcagtgaggggagccccgcggggaggcggcggcgactgccacagcccttccagcctgtcttgctggccgccctggttcatatttgagtttaattgtactgaccctggacccagataagcagcaactttgtgtctttggggtcacagaacattttggggcagtttaatgtggtaccaaactgaaaataggagctatttatagatggagcagcacttagtgcttcatagaaagcaatgcctatttttaaagttacaaacgcagatatctacatagatatgctttgctgagaagttaggtctgtggtagaccagaaaccacaaattgactttttttcttagaaaatatttctatttgcggtaaatatagtaatatgtaaataatgtacatctgttgatttctggagtgtctgttattcaatgatgtatatactcccacagctcgcatgaaggaacagcctctattgatacttggttgtaaagtgaagtaagattggagggtggatggctgtcagagctcttgcagatactgtgttcactaaataaaaatcacatgtattgttaaaa

SEQ ID NO: 105067 - DNA, 4784 bp, Homo sapiens
agcggaggaggcccggccgcgacccgggccgcgcgctgaggagccgcccggtcgcctgcgcgctcactccggcggcgtccccagcccgcggcccctctgctgccggcccccggctcgccggctgcgggagtggcctcaagatggatgaagacggcggcggcgagggtggtggcgtgcctgaagacctctcattagaagagagagaagaacttctagacattcgtcgaagaaaaaaggaacttattgatgacattgagaggctgaaatatgaaattgcagaggtgatgacagagatcgacaatctaacttccgtagaggagagcaaaacgactcagaggaacaaacagatagccatgggaagaaagaaattcaacatggatcccaaaaagggaattcagtttctaatagaaaatgacctgctacagagttccccagaagacgtcgcccagttcctttataaaggagaaggcctaaataagaccgtcattggggactacctgggtgaaagggatgaatttaatattaaagttcttcaagcctttgttgaactccatgagtttgctgatctcaaccttgtacaagccttaaggcagttcttatggagcttcaggctgcccggggaggcgcagaagattgatcgcatgatggaggctttcgcttctcgctactgcctgtgcaaccccggggtcttccagtccacagacacgtgctacgtgctgtcattcgccatcatcatgctcaacaccagcctccacaaccacaacgtgcgtgacaagcccacggcagaacggttcatcgccatgaaccgcggcatcaacgagggcggggacctccctgaggagctgctgaggaatttgtatgagagcattaagaacgagccatttaagatcccggaggacgacgggaacgacctgacccacaccttcttcaaccccgaccgcgagggctggctcctgaagctgggagggcgtgtgaagacctggaagcgccggtggttcatcctgaccgataactgcctctattactttgaatacacaacagataaggagcccaggggaatcatcccgttggaaaacctcagcatcagggaggtggaggacccccggaaacccaactgttttgagctctacaatcccagccacaaagggcaggtcatcaaggcctgtaagacggaggccgacggccgcgtggtagaggggaaccatgtggtgtaccggatctcagccccgagcccggaggagaaggaggagtggatgaaatccatcaaagccagtatcagcagagatcccttctatgacatgttggcaacgaggaaacgaaggattgccaataaaaaatagctttcctggctaaaagacccaggtaaaagacccaaccccagcagaaagacaccgcgggcggcccctccgcggaaggcgtggcagggaggcagtcgccctgcggtgcaagctgctgctccagagcataccgtggcccaggtggtatccccaaggcctcgtgccgtggctggggtcctgggaggtggtcgccctgcagtgcaagctgctgctccagagcgtaccgtggcccagactgatcctcgaggcctcctgccgtggctggggtcatggtcggctgcgcatgtccagaagcatttccttcctgcgaccatcccggcgcccctagggggagaagccaggacagcagcttccgctgtctccacagcagacacgggacggattccacagacgggagcctcattcgtaccatgccaaacgcattcactcggggcagtattaaccgttctagaaagccactgttttatagcaaaacaggaaaggaaaagctaccagttttttattcagaatttttctcagatatataggattatagcttttatatgcctttttatattctgaaattataacaaaagatactttctaacagtagtatttttagaatggcagctataaagttaactcctggacacaagtatatactgtgcactgaaaaaatatccatctacacagcacccaaggggagggctgggggcaccggcacgggggcagcgtgcagccctgccctgtcaggctgtcagacaagccccggggggcagcaggtgggctcgggacgggctgggggagggacggccatggcacttgggggctccagggtgactcccatgaggcctcccttcaaccaggctttttggccccacaaatactttaagcaaatcattaaaattataacagttaatggtttgggggtgtttaggctgtaactgctaactcctaggaaacagccttttccctggacacagatggtccatacgctgagccacgtgaaactgctgatgttttgtttagatgcacacacatggcagcgtttcatacaggtcagcaggttagaccggcttttgaccatattcatcgctatttaaaacctgtggcaaaatgaacgcttattttacagactttctaatttgaccagatttcttaatgaatagacacagaattaactaaaaacagtctcaccccatgtagtgcgccgtgtcctgagagaggtgccctccctacgaggagggaagaacaggccctggggtgcagaggcccggcacgtagagaacccagatagacgccggtggtggaactggtcaaactccacgcccgcctgggaggttgtcaggttgctgtggatgtaaggataggaggtgcccagtgctccgctcaaggaaggctggatctgggccccacctacagagagggctcagggctggaccgggggcattgtgtgcttgggccgacccgggccggtggcagacgctgttctctgtcgggagatttgcgtccccaggaccctgttacacagtgggctgttgggttggtggctggcttttcctctatggacttcctcttcctgccccacctgcataggcacacacaccttgaatctgcaccctctggagggcatctgtactcctgtgcaaaatgcccagtccagagacaaaacctcagactttgtgcacctaggtttccttctcagcagcggagactgttctttgagttgccttgaagtggaggccgagcggctgcgggcccttcgcctccctgcggctgaccttgatgtagctttaagtcacactagactgcagaggggtccgaggccagaaacccctgtcctgcatcagactttcattcccacgttcttaggctttgttactgatacctcaaatcggaagttttagttctgagaaaggcaagtcagcgttcttgaaatgcctgactggtagatatgcaactctggcctccagtcttccatgaaaataaatgctgcctggacccccacccagaccacacactgacggccggctccggcggtgcccacccctcaggctggcccggcacccaagactggccacagccagctctgtcagcatgttgtgctcggacaagctgtttccttcttctgaccaacccaggtgtgacctggggatgcagagctttctgttttgggtgttgggagaagcagcaggaaggagtcgccagatgatcaagctccccctttgctgtcatctgtgaatgagcttcgccaggtggtgggcacctgggagccatgcagaggctgtggtgctgagttagactccaggtactttgtggtcaaaggaaatcgcctagctccaggctgtgttaggacagtattagcatgaaggctgtgcgaccatcatgcctgctgatccttgaggcaggcctggtccagaaaactctgggtcagtgactgcgcagggccagccgctaccaggacggccctgaaacaggacacatctgttttttgtccctcaccctgggcaggccgcgtcacaatcacagtcctcctcctccccaccctgacgtctgagcgcagggcttgaattgttagtcccaactctggccaaagatacttttttccagagacagaggccaggaggcagtgaggggagccccgcggggaggcggcggcgactgccacagcccttccagcctgtcttgctggccgccctggttcatatttgagtttaattgtactgaccctggacccagataagcagcaactttgtgtctttggggtcacagaacattttggggcagtttaatgtggtaccaaactgaaaataggagctatttatagatggagcagcacttagtgcttcatagaaagcaatgcctatttttaaagttacaaacgcagatatctacatagatatgctttgctgagaagttaggtctgtggtagaccagaaaccacaaattgactttttttcttagaaaatatttctatttgcggtaaatatagtaatatgtaaataatgtacatctgttgatttctggagtgtctgttattcaatgatgtatatactcccacagctcgcatgaaggaacagcctctattgatacttggttgtaaagtgaagtaagattggagggtggatggctgtcagagctcttgcagatactgtgttcactaaataaaaatcacatgtattgttaaaaaaaaaaaaaaaaaaaaaaaaaaaaaaaaaaaaaaaaaaaaataaaaaaaaaaaaaaaaaaaaaaaaaaaaaaaccttgtataccacttaacccaaaaccaattttagattaaaacaccctttatgaacgatccctaaattagggctcattggtccaattccccctatggggcgtgcaattccatttaacgggaccccctttaaaaacgccgtaacttggcaaatccctggggttccccaatttcgcttttgcatccccttttccccttggcgcatatcc

SEQ ID NO: 105068 - DNA, 187 bp, Homo sapiens
tattggtttttccatccctgtgatgctccggtgagaccgcagggaagcttgtcacaagagaactaaaatttctgagtctcaggggaggaaggttaagacccactccccacctcgaaattcttcttttttgacagaggctgaaatatgaaattgcagaggtgatgacagagatcgacaatctaacttc

SEQ ID NO: 105069 - DNA, 4505 bp, Homo sapiens
agcggaggaggcccggccgcgacccgggccgcgcgctgaggagccgcccggtcgcctgcgcgctcactccggcggcgtccccagcccgcggcccctctgctgccggcccccggctcgccggctgcgggagtggcctcaagatggatgaagacggcggcggcgagggtggtggcgtgcctgaagacctctcattagaagagagagaagaacttctagacattcgtcgaagaaaaaaggaacttattgatgacattgagaggctgaaatatgaaattgcagaggtgatgacagagatcgacaatctaacttccgtagaggagagcaaaacgactcagaggaacaaacagatagccatgggaagaaagaaattcaacatggatcccaaaaagggaattcagtttctaatagaaaatgacctgctacagagttccccagaagacgtcgcccagttcctttataaaggagaaggcctaaataagaccgtcattggggactacctgggtgaaagggatgaatttaatattaaagttcttcaagcctttgttgaactccatgagtttgctgatctcaaccttgtacaagccttaaggcagttcttatggagcttcaggctgcccggggaggcgcagaagattgatcgcatgatggaggctttcgcttctcgctactgcctgtgcaaccccggggtcttccagtccacagacacgtgctacgtgctgtcattcgccatcatcatgctcaacaccagcctccacaaccacaacgtgcgtgacaagcccacggcagaacggttcatcgccatgaaccgcggcatcaacgagggcggggacctccctgaggagctgctgaggaatttgtatgagagcattaagaacgagccatttaagatcccggaggacgacgggaacgacctgacccacaccttcttcaaccccgaccgcgagggctggctcctgaagctgggagggcgtgtgaagacctggaagcgccggtggttcatcctgaccgataactgcctctattactttgaatacacaacagataaggagcccaggggaatcatcccgttggaaaacctcagcatcagggaggtggaggacccccggaaacccaactgttttgagctctacaatcccagccacaaagggcaggtcatcaaggcctgtaagacggaggccgacggccgcgtggtagaggggaaccatgtggtgtaccggatctcagccccgagcccggaggagaaggaggagtggatgaaatccatcaaagccagtatcagcagagatcccttctatgacatgttggcaacgaggaaacgaaggattgccaataaaaaatagctttcctggctaaaagacccaggtaaaagacccaaccccagcagaaagacaccgcgggcggcccctccgcggaaggcgtggcagggaggcagtcgccctgcggtgcaagctgctgctccagagcataccgtggcccaggtggtatccccaaggcctcgtgccgtggctggggtcctgggaggtggtcgccctgcagtgcaagctgctgctccagagcgtaccgtggcccagactgatcctcgaggcctcctgccgtggctggggtcatggtcggctgcgcatgtccagaagcatttccttcctgcgaccatcccggcgcccctagggggagaagccaggacagcagcttccgctgtctccacagcagacacgggacggattccacagacgggagcctcattcgtaccatgccaaacgcattcactcggggcagtattaaccgttctagaaagccactgttttatagcaaaacaggaaaggaaaagctaccagttttttattcagaatttttctcagatatataggattatagcttttatatgcctttttatattctgaaattataacaaaagatactttctaacagtagtatttttagaatggcagctataaagttaactcctggacacaagtatatactgtgcactgaaaaaatatccatctacacagcacccaaggggagggctgggggcaccggcacgggggcagcgtgcagccctgccctgtcaggctgtcagacaagccccggggggcagcaggtgggctcgggacgggctgggggagggacggccatggcacttgggggctccagggtgactcccatgaggcctcccttcaaccaggctttttggccccacaaatactttaagcaaatcattaaaattataacagttaatggtttgggggtgtttaggctgtaactgctaactcctaggaaacagccttttccctggacacagatggtccatacgctgagccacgtgaaactgctgatgttttgtttagatgcacacacatggcagcgtttcatacaggtcagcaggttagaccggcttttgaccatattcatcgctatttaaaacctgtggcaaaatgaacgcttattttacagactttctaatttgaccagatttcttaatgaatagacacagaattaactaaaaacagtctcaccccatgtagtgcgccgtgtcctgagagaggtgccctccctacgaggagggaagaacaggccctggggtgcagaggcccggcacgtagagaacccagatagacgccggtggtggaactggtcaaactccacgcccgcctgggaggttgtcaggttgctgtggatgtaaggataggaggtgcccagtgctccgctcaaggaaggctggatctgggccccacctacagagagggctcagggctggaccgggggcattgtgtgcttgggccgacccgggccggtggcagacgctgttctctgtcgggagatttgcgtccccaggaccctgttacacagtgggctgttgggttggtggctggcttttcctctatggacttcctcttcctgccccacctgcataggcacacacaccttgaatctgcaccctctggagggcatctgtactcctgtgcaaaatgcccagtccagagacaaaacctcagactttgtgcacctaggtttccttctcagcagcggagactgttctttgagttgccttgaagtggaggccgagcggctgcgggcccttcgcctccctgcggctgaccttgatgtagctttaagtcacactagactgcagaggggtccgaggccagaaacccctgtcctgcatcagactttcattcccacgttcttaggctttgttactgatacctcaaatcggaagttttagttctgagaaaggcaagtcagcgttcttgaaatgcctgactggtagatatgcaactctggcctccagtcttccatgaaaataaatgctgcctggacccccacccagaccacacactgacggccggctccggcggtgcccacccctcaggctggcccggcacccaagactggccacagccagctctgtcagcatgttgtgctcggacaagctgtttccttcttctgaccaacccaggtgtgacctggggatgcagagctttctgttttgggtgttgggagaagcagcaggaaggagtcgccagatgatcaagctccccctttgctgtcatctgtgaatgagcttcgccaggtggtgggcacctgggagccatgcagaggctgtggtgctgagttagactccaggtactttgtggtcaaaggaaatcgcctagctccaggctgtgttaggacagtattagcatgaaggctgtgcgaccatcatgcctgctgatccttgaggcaggcctggtccagaaaactctgggtcagtgactgcgcagggccagccgctaccaggacggccctgaaacaggacacatctgttttttgtccctcaccctgggcaggccgcgtcacaatcacagtcctcctcctccccaccctgacgtctgagcgcagggcttgaattgttagtcccaactctggccaaagatacttttttccagagacagaggccaggaggcagtgaggggagccccgcggggaggcggcggcgactgccacagcccttccagcctgtcttgctggccgccctggttcatatttgagtttaattgtactgaccctggacccagataagcagcaactttgtgtctttggggtcacagaacattttggggcagtttaatgtggtaccaaactgaaaataggagctatttatagatggagcagcacttagtgcttcatagaaagcaatgcctatttttaaagttacaaacgcagatatctacatagatatgctttgctgagaagttaggtctgtggtagaccagaaaccacaaattgactttttttcttagaaaatatttctatttgcggtaaatatagtaatatgtaaataatgtacatctgttgatttctggagtgtctgttattcaatgatgtatatactcccacagctcgcatgaaggaacagcctctattgatacttggttgtaaagtgaagtaagattggagggtggatggctgtcagagctcttgcagatactgtgttcactaaataaaaatcacatgtattgttaaaa

SEQ ID NO: 105070 - DNA, 4566 bp, Homo sapiens
ctactttatgaatgtaccgcaatttattcgtgttcttactgatgaatatttaggctgtttcctggttataaagagcgctcctatgagtgtctcagatacagtctcaatgggagcatttctttaggataaatacctgcgtatggaattgctgggtggcagcatgtacccacctcaaccttgctggatgttgccaatgtgttctccaaagtagttaattatttttttcttctttcagtgcctgaagacctctcattagaagagagagaagaacttctagacattcgtcgaagaaaaaaggaacttattgatgacattgagaggctgaaatatgaaattgcagaggtgatgacagagatcgacaatctaacttccgtagaggagagcaaaacgactcagaggaacaaacagatagccatgggaagaaagaaattcaacatggatcccaaaaagggaattcagtttctaatagaaaatgacctgctacagagttccccagaagacgtcgcccagttcctttataaaggagaaggcctaaataagaccgtcattggggactacctgggtgaaagggatgaatttaatattaaagttcttcaagcctttgttgaactccatgagtttgctgatctcaaccttgtacaagccttaaggcagttcttatggagcttcaggctgcccggggaggcgcagaagattgatcgcatgatggaggctttcgcttctcgctactgcctgtgcaaccccggggtcttccagtccacagacacgtgctacgtgctgtcattcgccatcatcatgctcaacaccagcctccacaaccacaacgtgcgtgacaagcccacggcagaacggttcatcgccatgaaccgcggcatcaacgagggcggggacctccctgaggagctgctgaggaatttgtatgagagcattaagaacgagccatttaagatcccggaggacgacgggaacgacctgacccacaccttcttcaaccccgaccgcgagggctggctcctgaagctgggagggcgtgtgaagacctggaagcgccggtggttcatcctgaccgataactgcctctattactttgaatacacaacagataaggagcccaggggaatcatcccgttggaaaacctcagcatcagggaggtggaggacccccggaaacccaactgttttgagctctacaatcccagccacaaagggcaggtcatcaaggcctgtaagacggaggccgacggccgcgtggtagaggggaaccatgtggtgtaccggatctcagccccgagcccggaggagaaggaggagtggatgaaatccatcaaagccagtatcagcagagatcccttctatgacatgttggcaacgaggaaacgaaggattgccaataaaaaatagctttcctggctaaaagacccaggtaaaagacccaaccccagcagaaagacaccgcgggcggcccctccgcggaaggcgtggcagggaggcagtcgccctgcggtgcaagctgctgctccagagcataccgtggcccaggtggtatccccaaggcctcgtgccgtggctggggtcctgggaggtggtcgccctgcagtgcaagctgctgctccagagcgtaccgtggcccagactgatcctcgaggcctcctgccgtggctggggtcatggtcggctgcgcatgtccagaagcatttccttcctgcgaccatcccggcgcccctagggggagaagccaggacagcagcttccgctgtctccacagcagacacgggacggattccacagacgggagcctcattcgtaccatgccaaacgcattcactcggggcagtattaaccgttctagaaagccactgttttatagcaaaacaggaaaggaaaagctaccagttttttattcagaatttttctcagatatataggattatagcttttatatgcctttttatattctgaaattataacaaaagatactttctaacagtagtatttttagaatggcagctataaagttaactcctggacacaagtatatactgtgcactgaaaaaatatccatctacacagcacccaaggggagggctgggggcaccggcacgggggcagcgtgcagccctgccctgtcaggctgtcagacaagccccggggggcagcaggtgggctcgggacgggctgggggagggacggccatggcacttgggggctccagggtgactcccatgaggcctcccttcaaccaggctttttggccccacaaatactttaagcaaatcattaaaattataacagttaatggtttgggggtgtttaggctgtaactgctaactcctaggaaacagccttttccctggacacagatggtccatacgctgagccacgtgaaactgctgatgttttgtttagatgcacacacatggcagcgtttcatacaggtcagcaggttagaccggcttttgaccatattcatcgctatttaaaacctgtggcaaaatgaacgcttattttacagactttctaatttgaccagatttcttaatgaatagacacagaattaactaaaaacagtctcaccccatgtagtgcgccgtgtcctgagagaggtgccctccctacgaggagggaagaacaggccctggggtgcagaggcccggcacgtagagaacccagatagacgccggtggtggaactggtcaaactccacgcccgcctgggaggttgtcaggttgctgtggatgtaaggataggaggtgcccagtgctccgctcaaggaaggctggatctgggccccacctacagagagggctcagggctggaccgggggcattgtgtgcttgggccgacccgggccggtggcagacgctgttctctgtcgggagatttgcgtccccaggaccctgttacacagtgggctgttgggttggtggctggcttttcctctatggacttcctcttcctgccccacctgcataggcacacacaccttgaatctgcaccctctggagggcatctgtactcctgtgcaaaatgcccagtccagagacaaaacctcagactttgtgcacctaggtttccttctcagcagcggagactgttctttgagttgccttgaagtggaggccgagcggctgcgggcccttcgcctccctgcggctgaccttgatgtagctttaagtcacactagactgcagaggggtccgaggccagaaacccctgtcctgcatcagactttcattcccacgttcttaggctttgttactgatacctcaaatcggaagttttagttctgagaaaggcaagtcagcgttcttgaaatgcctgactggtagatatgcaactctggcctccagtcttccatgaaaataaatgctgcctggacccccacccagaccacacactgacggccggctccggcggtgcccacccctcaggctggcccggcacccaagactggccacagccagctctgtcagcatgttgtgctcggacaagctgtttccttcttctgaccaacccaggtgtgacctggggatgcagagctttctgttttgggtgttgggagaagcagcaggaaggagtcgccagatgatcaagctccccctttgctgtcatctgtgaatgagcttcgccaggtggtgggcacctgggagccatgcagaggctgtggtgctgagttagactccaggtactttgtggtcaaaggaaatcgcctagctccaggctgtgttaggacagtattagcatgaaggctgtgcgaccatcatgcctgctgatccttgaggcaggcctggtccagaaaactctgggtcagtgactgcgcagggccagccgctaccaggacggccctgaaacaggacacatctgttttttgtccctcaccctgggcaggccgcgtcacaatcacagtcctcctcctccccaccctgacgtctgagcgcagggcttgaattgttagtcccaactctggccaaagatacttttttccagagacagaggccaggaggcagtgaggggagccccgcggggaggcggcggcgactgccacagcccttccagcctgtcttgctggccgccctggttcatatttgagtttaattgtactgaccctggacccagataagcagcaactttgtgtctttggggtcacagaacattttggggcagtttaatgtggtaccaaactgaaaataggagctatttatagatggagcagcacttagtgcttcatagaaagcaatgcctatttttaaagttacaaacgcagatatctacatagatatgctttgctgagaagttaggtctgtggtagaccagaaaccacaaattgactttttttcttagaaaatatttctatttgcggtaaatatagtaatatgtaaataatgtacatctgttgatttctggagtgtctgttattcaatgatgtatatactcccacagctcgcatgaaggaacagcctctattgatacttggttgtaaagtgaagtaagattggagggtggatggctgtcagagctcttgcagatactgtgttcactaaataaaaatcacatgtattgttaaaa

SEQ ID NO: 105071 - DNA, 1726 bp, Homo sapiens
gcctgaatcttcaggacccctatctattccatcctatccattttgctgattgagtcgatatgtattgcagcctcttacataggagcataagatgacttttggattgttaatactgatttaaatagctgaagttctcctaataaagcattcccaaggagagagaaagtttgtctactgggggtaaaaatatcagatggtgcacattaaaagggagatgagatttgtcggagacagatttcagaatccttttagatgatccaattcaagaaaaccctctataaaatttaataaactgtataagttaactataatattttatactttctttttggtgtcttaaaaatttaaagaagcgaggaacatgccatttggtgagtaccgttggaagctattttaatttctaggaaaagccccaaatatcactccaaatagattttgtttgcagatctcagttcagaatgcacacacacacacacacacacacacacacacacacacacacacacagagatgtatttatctttccaaattggattctggtttcagagatagagagttggtataaataattgaaaggataaatctaaaaccccctgacagtccgccaaattcaagaacagaagtggttgccaactctctaacaacaatgtttgggaagctgattccaaagtagctgaggatgaggtcataagcatactgtgaaacccaagattcttcttccctggtagaattacaatagttactcttgataaatataagtattccatgtcttgccctctttcctcactctctgcttatccttttagacctaagtttcattggaaatagcctgaattagaagaaagcccatccgaatctttattagccccctctaatgattagtttccaggctgcgttcatacctttgacctctcagtgtcaaagtcctacctaggcctccccacaacagagagggccgtaacagcaatccctgcccctcctttacctcccagcctcttgcagaggagcccagtgataacacatgtgaagttctttggctgtcctcttgtagaaggtgctgcagtgcaaagtattaatacggtcttagacaaaataactgtcatgatttgggaccagtttggttgagcttgtcagaagacatttcatttgtttcatttctgcacttctctatgaatttgggatactatatttctgtgaaggacttattgtatagacaactcaaaaaggaaagaaactttccagtattaccacttcttcctggaatatagctgtagtatttctcactagtattattagatacctgtgtacagaaagtatgcagttattcaggttaatgtttcatattaaagaatgtatttgtaaaatgtaacatgatcagtagttaccttttttcaagctctgaagaagttcagattacgtgttagacttaagttacagtgaaaactgttttaatactacttttgtggctagcaaaggttgtgcatctatttaaaattatttacaggatgctctaaataaggggcattaaagataggtttagctcttaattttagaaattgtgacactactgatgtctgtcatacagttattcttcagaagttctctgagatgtcaaatataatttttgtttaattcagagataagtaacacctgctctattgattcactattacaacaaaccctaattttgtcattaaatattttaactctgtgaaaaaaaaaaaat

SEQ ID NO: 105072 - DNA, 1712 bp, Homo sapiens
gcctgaatcttcaggacccctatctattccatcctatccattttgctgattgagtcgatatgtattgcagcctcttacataggagcataagatgacttttggattgttaatactgatttaaatagctgaagttctcctaataaagcattcccaaggagagagaaagtttgtctactgggggtaaaaatatcagatggtgcacattaaaagggagatgagatttgtcggagacagatttcagaatccttttagatgatccaattcaagaaaaccctctataaaatttaataaactgtataagttaactataatattttatactttctttttggtgtcttaaaaatttaaagaagcgaggaacatgccatttggtgagtaccgttggaagctattttaatttctaggaaaagccccaaatatcactccaaatagattttgtttgcagatctcagttcagaatgcacacacacacacacacacacacacacacacagagatgtatttatctttccaaattggattctggtttcagagatagagagttggtataaataattgaaaggataaatctaaaaccccctgacagtccgccaaattcaagaacagaagtggttgccaactctctaacaacaatgtttgggaagctgattccaaagtagctgaggatgaggtcataagcatactgtgaaacccaagattcttcttccctggtagaattacaatagttactcttgataaatataagtattccatgtcttgccctctttcctcactctctgcttatccttttagacctaagtttcattggaaatagcctgaattagaagaaagcccatccgaatctttattagccccctctaatgattagtttccaggctgcgttcatacctttgacctctcagtgtcaaagtcctacctaggcctccccacaacagagagggccgtaacagcaatccctgcccctcctttacctcccagcctcttgcagaggagcccagtgataacacatgtgaagttctttggctgtcctcttgtagaaggtgctgcagtgcaaagtattaatacggtcttagacaaaataactgtcatgatttgggaccagtttggttgagcttgtcagaagacatttcatttgtttcatttctgcacttctctatgaatttgggatactatatttctgtgaaggacttattgtatagacaactcaaaaaggaaagaaactttccagtattaccacttcttcctggaatatagctgtagtatttctcactagtattattagatacctgtgtacagaaagtatgcagttattcaggttaatgtttcatattaaagaatgtatttgtaaaatgtaacatgatcagtagttaccttttttcaagctctgaagaagttcagattacgtgttagacttaagttacagtgaaaactgttttaatactacttttgtggctagcaaaggttgtgcatctatttaaaattatttacaggatgctctaaataaggggcattaaagataggtttagctcttaattttagaaattgtgacactactgatgtctgtcatacagttattcttcagaagttctctgagatgtcaaatataatttttgtttaattcagagataagtaacacctgctctattgattcactattacaacaaaccctaattttgtcattaaatattttaactctgtgaaaaaaaaaaaat

SEQ ID NO: 105073 - DNA, 201 bp, Homo sapiens
ccaggcatccaggatgtgtggccacttcagtgcccaggacatgcagcaggcctcaagcgggctgggagtgcaggtctcccaggtccaggcccacaccgagcacttccagaggtccagtggagcagttcagaggcagcagctgggtgcaaggatcccaggttgaggtctcaccacaagccaggtatctcccagtctgtcatc

SEQ ID NO: 105074 - DNA, 474 bp, Homo sapiens
ggaaagtgccaggcacggagagagggcgaattccatccactggggagctctggggggccctgtctgtggaggccctgtcatgtgaaagccgcaggaatacttgttacgttgtgtcacgtgaatggttaccctgggtgaggcggtgggggagaggaaggatgctagttacatgctggcaatgtcccacccgcgaaaagcccctgcaccgtacgcttaggcacgacgcacccactctttctaagtgtgtgggtatttcagtaaaatgtttaagaagtcagccaggtgggcagaggccacaggggcgttcctgcaggctgaggggaagagtgagatttccttctaagtgaaactggaagactgcagggttttgagctgggaagtgatttcgcatcatttatattttcaaagcatcaccttggcctttccagcatgttagaaagcacgtcccacagtcggcacgttagaaagcatgcc

SEQ ID NO: 105075 - DNA, 368 bp, Homo sapiens
gaatcaggcggtcacacctgtgttctccgcacactttctgcacttggctttcaggacaccgggggatcctggttcacctccaacctcacttgccccttcagtcgtcctgccaagtctcatggaattccgttcccgagccgacaaccctcatgttcgcatctctgggcatcccttccctcccaaacatcacatgtgtatccacgctcacttgacttcccatttggatgttgaccaattgtctcccacttgccctaaacagaactttgggtcccctcttcccaccccctcattctccatcaatctgttcctcctcccacagtcctcccctcccaggggatggtgcctgccacccacagaggtcacagcct

SEQ ID NO: 105076 - DNA, 361 bp, Homo sapiens
ttgaccccatgtaattaattccaaattaactaggtatacacatttctgaagaactcttactggatgacaaatttgggcctggttctccctggcttgcactttacttccactgcctttgttttgttgtgcttccctttcccaacccttcatgtttccttcaacccagtgagtctttgccagagattgagttcatcaaggcacgcatccaagtcaagtttaagtcccatggtgcatatttcttgtagaatgtaagaggggatgaccaatgactgccactggtactgcatgtctctaggtggagaatgtgaccttctctggaagcaacagatgaaggtgaaacattgtcaccttcaccgtccgg

SEQ ID NO: 105077 - DNA, 398 bp, Homo sapiens
gattccatgtgacctctttccagaggcaaccaggcatcattcacatattccaaaaacatctgttctctggtacactgcccagggccctctatcatggtgaatcctccagggtcacataaataaaaccagcacagcaccttgcccaacagaggaagccaccagcatttgcatgagggacaaagtgaggaaatgtctaagggaggcaagggcagaaacaccctctatctgcccactgagagaacacctgaagccacactttgcacatcacaacaggaaaggtgccaacctcagagagggaagcaacacgctgcatatgaacatattactaagctgtctttttaaaaatgtccccatacagtaagtctgtttccatttgcctaaaagttaatttggggcag

SEQ ID NO: 105078 - DNA, 676 bp, Homo sapiens
cagaccctctgttcctcagcatcctctccccagcctccacctggagcctctgggctcctttctgggtgactccctctattttttgagacggagtcttgctctgtctcccaggctggagtccagtggtgtgatctcagctcactgcagcctccgcctcctgggttcaagtgattctcgtgcctcagcctcccgagcagctgagactacaggctaattaccacactggctaatttttgtatttttagtagagacggggtttcaccatgttggccaggctggtctcaaactcctgagctcaggtgatcctcccacctcagcctcccaaagtgctgggattacaggcgtgagccattgcaccctgcctgggcgactctcctttgcctgcctcttcccttcctgtgccccactcctcagcctcttctcctcacaccatgccttcctctcctcaggcaccaggtgcactgcttagtccctgcccccacccaggtctccattctgagctccagtcacccacacacgcttccccgggcatccccaggctcctcgaatgcgtgtgtccagacataatgctcccccgacacgctgccccagccggtacgaggctgccccagctgctgtctccctcaggaagggtcgcccacccccagccttcccaagcccctccgtgcccctgtct

SEQ ID NO: 105079 - DNA, 274 bp, Homo sapiens
cagggaggaattgaggagatctgctatcttattcacctctagcagataagtgctctcagagagctacaaaggcaaaatccccaaggaacctacaataaagacacctgggtcatcttgtggagcgatgccagctgaaacccagaggctgtttctgtgaatatataaaatgacctggagaatccaacttcactctgaacacactgatcactttttccaaatgtcaaatgaaaacctgaaatttcaaggtaaagatctggaaccttctatctcttag

SEQ ID NO: 105080 - DNA, 262 bp, Homo sapiens
ggagacagagtgagactccatttcaaaaataaatgaataaaaatgaaaataaggccaggaggccaggtggggtggctcacgcctgtaatcccagcaatttgggaggctgaggcgggcagatcacaaggtcaagagatcgagaccattccggccaacatggtgaaaccccgtctgtactaaatatacagaaattagctgggcacggtggtgtgcgcctgtagtcccagctactcgggaggctgaggcaggagaatggcttgaa

SEQ ID NO: 105081 - DNA, 538 bp, Homo sapiens
gtggttgcctacttgggggtggggaatccctctccacgggctcagctgtccaatctcaggggatctctaggacaggagctgatgtaaacagtcgccctattccttgctgtctttggccctggagaaggaggagggagctggggagggtctccacttcccagacaatctctaagcagccaggacatgggtgagatgagtgagatactgacttctgggacagaatttgagagggtgccaaaaaactcagtaatcaagataaataggccgggcgcagtggctcacgtctgtaatcccagcactttgggaggccggatcacttgaggtcaagagttcgagaccagcctggccaagatggtgaaaccccatctctactaaaaatacaaaaattagcccagtgtggtggcgctagcctgtaatcccagccactcaggaggctgaggcaagagaattgcttgacccaggaggcagaggttgcagtgagccgagatcatgccactgtactccagcctggacaacagagggagactatctcaaaaaa

SEQ ID NO: 105082 - DNA, 378 bp, Homo sapiens
ccgagtagctaggattacaggagcacagcaccatacccagctaatttttgtatttttagtagagacggggtttcaccatattggccaggctggtctcaaaggcctgacctcagatgatccacccacattggcctcccaaagtgctgggattacaggaatgagacactgtgcccagccaggaaggatagacttttaacaaatggtgctggaacaattggttaatcacattttctctaaagtagagttggactcctacttggtactggacacaaaaatcaagtctggatgggacttaaatgtgaaaggcaaaattatgaaacatttagaagataacacagtctgctttttgatcttggagtagggaaggatttctcaaat

SEQ ID NO: 105083 - DNA, 157 bp, Homo sapiens
aaatgaaaagggagcttaggggtgggagaggtatcggcaggggcagcgctgccgccggggcctggggctgacccgtctgacttcccgtccgtgccgagcccactcgagccgcagccatgtctggggacgagatgatttttgatcctactatgagcaa

SEQ ID NO: 105084 - DNA, 822 bp, Homo sapiens
agtggtggtttcccctgttctcgctctttcctgctgccttgtgaggaaggtacttgcttctcctttgccttgtgccgtgattgtaagtttcctgaggcctccccaaccatgcagaactgagcagacaattgagaggcctggctcatggatgggtttgaaccacctcaggactgaagatgagcggctcagtttcactaacaacaagaacagtgacaaattccctgcccggcccaagctctgtggtccttatgcaggtagagtcctcatgctgaatgtttgcaagctgactcttcaataagaccgtgagctccttgagaaaggaattgggtctctgtgcagtgtatcacatctacctcaatgctctgcttagaggaagtgtttgaaaattttttgtgtgataaataataatactaatccagttaagatatactgccctcggtatgaaaaactctatcccaaggtggagcagctttgaaaatgtggttggacgaaaatgaaatttcagatgtgtgtgtctcagcattgatttttctatttgtaataacacaccctggcatatctcctttgatatcaagaggataaaatgtccctaacagcatgctcttcattctgggatgccagtggcacccctgtcccagatgtgacaaccaaaaatgatgtcagacattgctgaattgtcccctggaggaggagaaaaatcaacccctttgagaactgctgggcagctctaaaggtcatccctaagttcagggtgaggagatgacctacccttctgccccgcaacgccatcctacatctgaaattcttcttaagggcatggtg

SEQ ID NO: 105085 - DNA, 316 bp, Homo sapiens
ctcgggactagcagacaagcataaccatttgccactgggagcagggcctggcacctgcctggagcggagagatctgagagtcatgaagttcagccctgcttcatgtacagatgagaaactgaggccctgagaagtaagcaggcccttttgtccagcttccattcatctttatagagggttatcttttatcttacaaagatcctttttgatatcctcaagatggttaatggagaacccctagctctcactgtttaatcattcaatttcttaatgtttgttttaattgaattgccaccaacttgactaacttttattg

SEQ ID NO: 105086 - DNA, 296 bp, Homo sapiens
ctgcatcatggtgggaaccttagaactccagccacagggaagtaaattctgccaacgggtgagcttggaagagaaccctaaacctcagatgagaccacagccctgacaataccttatctcaacttcacgagatcctgagtagaggacccagttattggactcttggctacagaaattgtgagatactcaggaagaatagttttaaactgctgaatttgggggtaatgtgttactcagcaacagaaaattaatacatttgaaacctcacttacctttcaaatctcaccagaggagat

SEQ ID NO: 105087 - DNA, 315 bp, Homo sapiens
gggacgatcaccttgactaaaacaaaaggtccaaaaagtcagcaagtcaagtgtctagtgattttctgtatctctgtctctctctcgttctctctctggaagtcttttgacttttgaatgtttctgggaagccataaacagttacctttgttttgcagattaggaaaaggggtaaagaaatggatgagtggccaggcacggaggctcatgcctgtaatcttggcactttgggaagctgaggaaggaggatctcttgagccccagagttcaccaccagcctgggcaacagagtgggaccttgtctctacaaaaatt

SEQ ID NO: 105088 - DNA, 351 bp, Homo sapiens
ctagaaaatcaaagatgaataagacagtttcccatatgaggaactagagtctctacaaggccataggctatagtagaaaagagggaaggtaatagtcattgtgcctggacatgtgtgatgccaagggtagtcatctaatccatcctgagggtcatggaggttttgaagagctgactagagataacatgtcctctaggggtatgttatagttttcttgataaataaaagtagaaatcatgatcagacagaggaaaggtcttatgccaaggcctgagatggtaaagaatatacctacagacttattcagagggcatgtgatattaagacacacacaaactattttcaagttct

SEQ ID NO: 105089 - DNA, 90 bp, Homo sapiens
gtgtcctccgcctggactttcccaaagtgtccccaggcggcatctctgaaggctttggggctgtcaggcttgcggtcaccacctccccag

SEQ ID NO: 105090 - DNA, 831 bp, Homo sapiens
agtgagccaagattgtgccactgcactccagcctgggtgatagagtgagactctgtctcaaaaaaaaaaaaaaaattctgataattaaggcaacttaaagtaaggatcattttcataaatggtctccaagttgcttttaaagaggatgttaccaaaatgttttcagcactggcaccaacttaattagaaatatacaatttctctagatgactacttcgaaaaggatatccttcaactggacatggaaattttgtcatgtttattaaaaattcctttattatttcctttattattttcatatagtcattcatatactgcaaatctagttataattattataataagccacacttttattaaagtgctcaataatacatctacaaaatcacctacaaagctgatatgctgaattttagcttcattagatacgtaacaagcatgctgatgaaattgttaggatttttacctaaaaccctaaaactctatatgtacatttaaaattaactggtgataccttagatgtaataaaaacatgttgttgttctcctttaaaaaacaaaaaacaaccaacaaaacacaaacaagacacaaacaaaacaaagacaacagaccaacatccgaccccacaacaacacaacacaaccgaggcggcggggccgacaaaatcaccgaggggccacaaaccagcaccccctctgaaagaaagcccacaaaaacgataacgagaagacgcgcgcccaaaccacctgagaaaaccctcgcgtgggagaccccctgccgggatgggcccacacactgcccgcacaactggtggaccgctcgcacgcgata

SEQ ID NO: 105091 - DNA, 719 bp, Homo sapiens
gtccaccactttgttaggtgtgtgatcctgggcaaatcacttaccttccttgtatcttattcctccatctataaaatggagctacctcatagggttgtgaagaatacattattgtaacaatactgggcacacagtgcacagtttcccaattattattatacttacagttttgttttctgtttttttttttgacaaggtctccctctgttgctcaggctggagtgtagtgatgtgaccataggtcacctcagccttgaactcctgggctcaagagatgctcctgcctcaacctcccctatagttaggaatacaggcatgtgccaccatgcccgactaagtttttatttttattttttgtaaacatggggtttcactattttgctcaggctggtcttgcggtcctggcctcaagcgatcatcctgcctcagcttctctaagtgctgggaatacaggtgtgagccaccatgcctggcctatacttaaaaagtttttattaggattggttgctatattatatcaagtttaaaaactccatcattgtaattttatgagttatggttttttctttttgtaattcattttcttgacaagtttgcaaatatttgcaatttccttgtacttttcaagtaaaatctatttgttcatagtgaatttttattaagtacagaagtagattcaatttggtaatgctttgctagctttgcaaaagaatttggaa

SEQ ID NO: 105092 - DNA, 137 bp, Homo sapiens
ctcaacaatcacaggacttacacaatatcaaacaattccagctcatgaaccatcagacagtgatggactcccctgctctgccagccatggctacagctttgactggtcaagaggctgattgcagtaactttcttctg

SEQ ID NO: 105093 - DNA, 1227 bp, Homo sapiens
agcggagtccagtcccaagatggcggccaccatgaagaaggcggctgcagaagatgtcaatgttactttcgaagatcaacaaaagataaacaaatttgcacggaatacaagtagaatcacagagctgaaggaagaaatagaagtaaaaaagaaacaactccaaaacctagaagatgcttgtgatgacatcatgcttgcagatgatgattgcttaatgataccttatcaaattggtgatgtcttcattagccattctcaagaagaaacgcaagaaatgttagaagaagcaaagaaaaatttgcaagaagaaattgacgccttagaatccagagtggaatcaattcagcgagtgttagcagatttgaaagttcagttgtatgcaaaattcgggagcaacataaaccttgaagctgatgaaagttaaacattttataatactttttttatttgtttaataaacttgaatattgtttaaaatgataattttccttcttcaaatgacatggaaagcaaaactttcttttttaaaaattttcatttatttaatggaaacttgcccattttcacatgtctgcttatttattttatatttttaaaagaagacagtattcacctatgtattttgcataacgattatatcaagtctaggggcttcatgtcatgttattaaaatcagttaagcaatcttttatgtttctatattatttagaatatttgttgttgcaattttcacataagaaaatttaacagttgtgtcatgttgtttctgtctgattttaattgctgtctaatgacggggaaagcacgatgaaaagatgtacaatcctgcatccttgcttatttcacaactaaagctttgtcatagacttcaaaatatatatgtatatattttatttaaatatatgttacatattatatttaaacatacatatttaacattttttacatatctatcaatatcagagatttgggtaaaagaatgggtaatgtttaaacatgtggaggcatgtggagctttatacaaacagggcagaaccacagaagaacgttttagaaaccaagagatgtgcagaaagaaatgtttagtgttttttcgttttaaattttagattttattttagtgctttgtaattaattggggtttatattgataaagatgtggaagttaaacagctatgtatgtaaaagtaaggcttatttcttaaataaaggatgcatttcttccca

SEQ ID NO: 105094 - DNA, 477 bp, Homo sapiens
agcggagtccagtcccaagatggcggccaccatgaagaaggcggctgcagaagatgtcaatgttactttcgaagatcaacaaaagataaacaaatttgcacggaatacaagtagaatcacagagctgaaggaagaaatagaagtaaaaaagaaacaactccaaaacctagaagatgcttgtgatgacatcatgcttgcagatgatgattgcttaatgataccttatcaaattggtgatgtcttcattagccattctcaagaagaaacgcaagaaatgttagaagaagcaaagaaaaatttgcaagaagaaattgacgccttagaatccagagtggaatcaattcagcgagtgttagcagatttgaaagttcagttgtatgcaaaattcgggagcaacataaaccttgaagctgatgaaagttaaacattttataatactttttttatttgtttaataaacttgaatattgtttaaaa

SEQ ID NO: 105095 - DNA, 708 bp, Homo sapiens
agcggagtccagtcccaagatggcggccaccatgaagaaggcggctgcagaagatgtcaatgttactttcgaagatcaacaaaagataaacaaatttgcacggaatacaagtagaatcacagagctgaaggaagaaatagaagtaaaaaagaaacaactccaaaacctagaagatgcttgtgatgacatcatgcttgcagatgatgattgcttaatgataccttatcaaattggtgatgtcttcattagccattctcaagaagaaacgcaagaaatgttagaagaagcaaagaaaaatttgcaagaagaaattgacgccttagaatccagagtggaatcaattcagcgagtgttagcagatttgaaagttcagttgtatgcaaaattcgggagcaacataaaccttgaagctgatgaaagttaaacattttataatactttttttatttgtttaataaacttgaatattgtttaaaatgataattttccttcttcaaatgacatggaaagcaaaactttcttttttaaaaattttcatttatttaatggaaacttgcccattttcacatgtctgcttatttattttatatttttaaaagaagacagtattcacctatgtattttgcataacgattatatcaagtctaggggcttcatgtcatgttattaaaatcagttaagcatcaaaaaaaaaaaatctcaagcgct

SEQ ID NO: 105096 - DNA, 1230 bp, Homo sapiens
  misc_feature (811)..(811): n is a, c, g, or t
cgccctgagcgttagcggctcggcacctggccagccgaggcggggcgccggggctggggccgggagcctcgaaggacgcaggtccgcctcccgcgatgccgagggtgcccccggggagtctgaggaacctgcagccccggcctcgcccctgaggtgtgggaagccgaaggtcccgttgagtgtggttggccttgactcgggcgttgcaccggcatgatcgcattagcctcactggttatgggtagctgctgctgggagcgtggttacgggtagagaaacttagacacagagcagttagaggccctaaagtgactcagctagtaagaagcagagctggagttcaaactcaggctgcagaagatgtcaatgttactttcgaagatcaacaaaagataaacaaatttgcacggaatacaagtagaatcacagagctgaaggaagaaatagaagtaaaaaagaaacaactccaaaacctagaagatgcttgtgatgacatcatgcttgcagatgatgattgcttaatgataccttatcaaattggtgatgtcttcattagccattctcaagaagaaacgcaagaaatgttagaagaagcaaagaaaaatttgcaagaagaaattgacgccttagaatccagagtggaatcaattcagcgagtgttagcagatttgaaagttcagttgtatgcaaaattcgggagcaacataaaccttgaagctgatgaaagttaaacattttataatactttttttatttgtttaataaacttgaatattgtttaaaaaaaaaaaaaaaaaaaaaaaaaaaaaanagaaaaaaaaaaaagaaaaaaaaaaaaaaaaaaaaaaaaaaggggggggggggaaaaaaaaaccccgggggggggcccattcgcccccgctttttttggaaaaaggggggcccccaaatgggggggggggaaaaaaaagacagagggaggggggaggcttaaacaagggtgtgtggggagaaaaaagcgcggcgtgtggtctctttgggggaagagcccccaacttgtgcgcgtgccgatatggcgaccaccacccaaggattaagaggcccgggagaataaaaacttggggggttgatgggggacccacggctattgtggggggaggattggtctggtatttatacggttcgtagtatgaaacataagaatgtagtagtatagagcgcgaggagaagagaacgtgttgagaagatgtc

SEQ ID NO: 105097 - DNA, 756 bp, Homo sapiens
tatcacctcaaatacttagaaaatatctgagttttcactgggcaaagctgctctttcttacaaatgaggcactttttaccactcttttccaaagtttagctccagaggcctcaaagttagtgaaaatttctgccagatttggatcataagttgttcttcttaattattggtggttggtggtgtgagtttctatcatttcctgtagtctcatagttatttttgttgttggaaaaagctgggttagaagccagcaggcccaggataaactatttatagaagtctttgtatttggttctttgttaggaaataatttagacagtaattttttactattttttagatcagcagaaactgagaaaacaaacttgatttattctgtgataagcagatatggaccatgaattaaaaatgcccacattcagacatttagatctaattatcagtgttacttagctgcctgtccaagtttagaaggttcttgacctaaaattcttcccaaatattatttcagacacagatgctcagaaatcatcctattgaatagaattaatttaaaatattttttttccagaaaaatttgcaagaagaaattgacgccttagaatccagagtggaatcaattcagcgagtgttagcagatttgaaagttcagttgtatgcaaaattcgggagcaacataaaccttgaagctgatgaaagttaaacattttataatactttttttatttgtttaataaacttgaatattgtttaaaa

SEQ ID NO: 105098 - DNA, 1534 bp, Homo sapiens
cgccctgagcgttagcggctcggcacctggccagccgaggcggggcgccggggctggggccgggagcctcgaaggacgcaggtccgcctcccgcgatgccgagggtgcccccggggagtctgaggaacctgcagccccggcctcgcccctgaggtgtgggaagccgaaggtcccgttgagtgtggttggccttgactcgggcgttgcaccggcatgatcgcattagcctcactggttatgggtagctgctgctgggagcgtggttacgggtagagaaacttagacacagagcagttagaggccctaaagtgactcagctagtaagaagcagagctggagttcaaactcaggctgcagaagatgtcaatgttactttcgaagatcaacaaaagataaacaaatttgcacggaatacaagtagaatcacagagctgaaggaagaaatagaagtaaaaaagaaacaactccaaaacctagaagatgcttgtgatgacatcatgcttgcagatgatgattgcttaatgataccttatcaaattggtgatgtcttcattagccattctcaagaagaaacgcaagaaatgttagaagaagcaaagaaaaatttgcaagaagaaattgacgccttagaatccagagtggaatcaattcagcgagtgttagcagatttgaaagttcagttgtatgcaaaattcgggagcaacataaaccttgaagctgatgaaagttaaacattttataatactttttttatttgtttaataaacttgaatattgtttaaaatgataattttccttcttcaaatgacatggaaagcaaaactttcttttttaaaaattttcatttatttaatggaaacttgcccattttcacatgtctgcttatttattttatatttttaaaagaagacagtattcacctatgtattttgcataacgattatatcaagtctaggggcttcatgtcatgttattaaaatcagttaagcaatcttttatgtttctatattatttagaatatttgttgttgcaattttcacataagaaaatttaacagttgtgtcatgttgtttctgtctgattttaattgctgtctaatgacggggaaagcacgatgaaaagatgtacaatcctgcatccttgcttatttcacaactaaagctttgtcatagacttcaaaatatatatgtatatattttatttaaatatatgttacatattatatttaaacatacatatttaacattttttacatatctatcaatatcagagatttgggtaaaagaatgggtaatgtttaaacatgtggaggcatgtggagctttatacaaacagggcagaaccacagaagaacgttttagaaaccaagagatgtgcagaaagaaatgtttagtgttttttcgttttaaattttagattttattttagtgctttgtaattaattggggtttatattgataaagatgtggaagttaaacagctatgtatgtaaaagtaaggcttatttcttaaataaaggatgcatttcttccca

SEQ ID NO: 105099 - DNA, 1337 bp, Homo sapiens
cgccctgagcgttagcggctcggcacctggccagccgaggcggggcgccggggctggggccgggagcctcgaaggacgcaggtccgcctcccgcgatgccgagggtgcccccggggagtctgaggaacctgcagccccggcctcgcccctgaggctgcagaagatgtcaatgttactttcgaagatcaacaaaagataaacaaatttgcacggaatacaagtagaatcacagagctgaaggaagaaatagaagtaaaaaagaaacaactccaaaacctagaagatgcttgtgatgacatcatgcttgcagatgatgattgcttaatgataccttatcaaattggtgatgtcttcattagccattctcaagaagaaacgcaagaaatgttagaagaagcaaagaaaaatttgcaagaagaaattgacgccttagaatccagagtggaatcaattcagcgagtgttagcagatttgaaagttcagttgtatgcaaaattcgggagcaacataaaccttgaagctgatgaaagttaaacattttataatactttttttatttgtttaataaacttgaatattgtttaaaatgataattttccttcttcaaatgacatggaaagcaaaactttcttttttaaaaattttcatttatttaatggaaacttgcccattttcacatgtctgcttatttattttatatttttaaaagaagacagtattcacctatgtattttgcataacgattatatcaagtctaggggcttcatgtcatgttattaaaatcagttaagcaatcttttatgtttctatattatttagaatatttgttgttgcaattttcacataagaaaatttaacagttgtgtcatgttgtttctgtctgattttaattgctgtctaatgacggggaaagcacgatgaaaagatgtacaatcctgcatccttgcttatttcacaactaaagctttgtcatagacttcaaaatatatatgtatatattttatttaaatatatgttacatattatatttaaacatacatatttaacattttttacatatctatcaatatcagagatttgggtaaaagaatgggtaatgtttaaacatgtggaggcatgtggagctttatacaaacagggcagaaccacagaagaacgttttagaaaccaagagatgtgcagaaagaaatgtttagtgttttttcgttttaaattttagattttattttagtgctttgtaattaattggggtttatattgataaagatgtggaagttaaacagctatgtatgtaaaagtaaggcttatttcttaaataaaggatgcatttcttccca

SEQ ID NO: 105100 - DNA, 1453 bp, Homo sapiens
cgccctgagcgttagcggctcggcacctggccagccgaggcggggcgccggggctggggccgggagcctcgaaggacgcaggtccgcctcccgcgatgccgagggtgcccccggggagtctgaggaacctgcagccccggcctcgcccctgaggtgtgggaagccgaaggtcccgttgagtgtggttggccttgactcgggcgttgcaccggcatgatcgcattagcctcactggttatgggtagctgctgctgggagcgtggttacgggctgcagaagatgtcaatgttactttcgaagatcaacaaaagataaacaaatttgcacggaatacaagtagaatcacagagctgaaggaagaaatagaagtaaaaaagaaacaactccaaaacctagaagatgcttgtgatgacatcatgcttgcagatgatgattgcttaatgataccttatcaaattggtgatgtcttcattagccattctcaagaagaaacgcaagaaatgttagaagaagcaaagaaaaatttgcaagaagaaattgacgccttagaatccagagtggaatcaattcagcgagtgttagcagatttgaaagttcagttgtatgcaaaattcgggagcaacataaaccttgaagctgatgaaagttaaacattttataatactttttttatttgtttaataaacttgaatattgtttaaaatgataattttccttcttcaaatgacatggaaagcaaaactttcttttttaaaaattttcatttatttaatggaaacttgcccattttcacatgtctgcttatttattttatatttttaaaagaagacagtattcacctatgtattttgcataacgattatatcaagtctaggggcttcatgtcatgttattaaaatcagttaagcaatcttttatgtttctatattatttagaatatttgttgttgcaattttcacataagaaaatttaacagttgtgtcatgttgtttctgtctgattttaattgctgtctaatgacggggaaagcacgatgaaaagatgtacaatcctgcatccttgcttatttcacaactaaagctttgtcatagacttcaaaatatatatgtatatattttatttaaatatatgttacatattatatttaaacatacatatttaacattttttacatatctatcaatatcagagatttgggtaaaagaatgggtaatgtttaaacatgtggaggcatgtggagctttatacaaacagggcagaaccacagaagaacgttttagaaaccaagagatgtgcagaaagaaatgtttagtgttttttcgttttaaattttagattttattttagtgctttgtaattaattggggtttatattgataaagatgtggaagttaaacagctatgtatgtaaaagtaaggcttatttcttaaataaaggatgcatttcttccca

SEQ ID NO: 105101 - DNA, 1506 bp, Homo sapiens
tatcacctcaaatacttagaaaatatctgagttttcactgggcaaagctgctctttcttacaaatgaggcactttttaccactcttttccaaagtttagctccagaggcctcaaagttagtgaaaatttctgccagatttggatcataagttgttcttcttaattattggtggttggtggtgtgagtttctatcatttcctgtagtctcatagttatttttgttgttggaaaaagctgggttagaagccagcaggcccaggataaactatttatagaagtctttgtatttggttctttgttaggaaataatttagacagtaattttttactattttttagatcagcagaaactgagaaaacaaacttgatttattctgtgataagcagatatggaccatgaattaaaaatgcccacattcagacatttagatctaattatcagtgttacttagctgcctgtccaagtttagaaggttcttgacctaaaattcttcccaaatattatttcagacacagatgctcagaaatcatcctattgaatagaattaatttaaaatattttttttccagaaaaatttgcaagaagaaattgacgccttagaatccagagtggaatcaattcagcgagtgttagcagatttgaaagttcagttgtatgcaaaattcgggagcaacataaaccttgaagctgatgaaagttaaacattttataatactttttttatttgtttaataaacttgaatattgtttaaaatgataattttccttcttcaaatgacatggaaagcaaaactttcttttttaaaaattttcatttatttaatggaaacttgcccattttcacatgtctgcttatttattttatatttttaaaagaagacagtattcacctatgtattttgcataacgattatatcaagtctaggggcttcatgtcatgttattaaaatcagttaagcaatcttttatgtttctatattatttagaatatttgttgttgcaattttcacataagaaaatttaacagttgtgtcatgttgtttctgtctgattttaattgctgtctaatgacggggaaagcacgatgaaaagatgtacaatcctgcatccttgcttatttcacaactaaagctttgtcatagacttcaaaatatatatgtatatattttatttaaatatatgttacatattatatttaaacatacatatttaacattttttacatatctatcaatatcagagatttgggtaaaagaatgggtaatgtttaaacatgtggaggcatgtggagctttatacaaacagggcagaaccacagaagaacgttttagaaaccaagagatgtgcagaaagaaatgtttagtgttttttcgttttaaattttagattttattttagtgctttgtaattaattggggtttatattgataaagatgtggaagttaaacagctatgtatgtaaaagtaaggcttatttcttaaataaaggatgcatttcttccca

SEQ ID NO: 105102 - DNA, 1115 bp, Homo sapiens
agcggagtccagtcccaagatggcggccaccatgaagaaggcggctgcagaagatgtcaatgttactttcgaagatcaacaaaagataaacaaatttgcacggaatacaagtagaatcacagagctgaaggaagaaatagaagtaaaaaagaaacgcaagaaatgttagaagaagcaaagaaaaatttgcaagaagaaattgacgccttagaatccagagtggaatcaattcagcgagtgttagcagatttgaaagttcagttgtatgcaaaattcgggagcaacataaaccttgaagctgatgaaagttaaacattttataatactttttttatttgtttaataaacttgaatattgtttaaaatgataattttccttcttcaaatgacatggaaagcaaaactttcttttttaaaaattttcatttatttaatggaaacttgcccattttcacatgtctgcttatttattttatatttttaaaagaagacagtattcacctatgtattttgcataacgattatatcaagtctaggggcttcatgtcatgttattaaaatcagttaagcaatcttttatgtttctatattatttagaatatttgttgttgcaattttcacataagaaaatttaacagttgtgtcatgttgtttctgtctgattttaattgctgtctaatgacggggaaagcacgatgaaaagatgtacaatcctgcatccttgcttatttcacaactaaagctttgtcatagacttcaaaatatatatgtatatattttatttaaatatatgttacatattatatttaaacatacatatttaacattttttacatatctatcaatatcagagatttgggtaaaagaatgggtaatgtttaaacatgtggaggcatgtggagctttatacaaacagggcagaaccacagaagaacgttttagaaaccaagagatgtgcagaaagaaatgtttagtgttttttcgttttaaattttagattttattttagtgctttgtaattaattggggtttatattgataaagatgtggaagttaaacagctatgtatgtaaaagtaaggcttatttcttaaataaaggatgcatttcttccca

SEQ ID NO: 105103 - DNA, 811 bp, Homo sapiens
  misc_feature (392)..(392): n is a, c, g, or t
agcggagtccagtcccaagatggcggccaccatgaagaaggcggctgcagaagatgtcaatgttactttcgaagatcaacaaaagataaacaaatttgcacggaatacaagtagaatcacagagctgaaggaagaaatagaagtaaaaaagaaacgcaagaaatgttagaagaagcaaagaaaaatttgcaagaagaaattgacgccttagaatccagagtggaatcaattcagcgagtgttagcagatttgaaagttcagttgtatgcaaaattcgggagcaacataaaccttgaagctgatgaaagttaaacattttataatactttttttatttgtttaataaacttgaatattgtttaaaaaaaaaaaaaaaaaaaaaaaaaaaaaanagaaaaaaaaaaaagaaaaaaaaaaaaaaaaaaaaaaaaaaggggggggggggaaaaaaaaaccccgggggggggcccattcgcccccgctttttttggaaaaaggggggcccccaaatgggggggggggaaaaaaaagacagagggaggggggaggcttaaacaagggtgtgtggggagaaaaaagcgcggcgtgtggtctctttgggggaagagcccccaacttgtgcgcgtgccgatatggcgaccaccacccaaggattaagaggcccgggagaataaaaacttggggggttgatgggggacccacggctattgtggggggaggattggtctggtatttatacggttcgtagtatgaaacataagaatgtagtagtatagagcgcgaggagaagagaacgtgttgagaagatgtc

SEQ ID NO: 105104 - DNA, 1278 bp, Homo sapiens
tattcagctactatacagaaaaaggatgaacaaattaatttatttctaattgagccagttagacataatgcatataacgtgatatttggttcatgaaagagttgttttcatgtggttattgtagggagtatatataattgtggaaggggtatgggaagagttgtgtatagttagttgttatctctacaagtttgaaagttttcccatcaaacattatcaatataccaatgttttaaaaattgagtgagggttattatttgtatttgatgaaagaaaatccaaataaagcccacctagaaatagatattttattatatatgtgctatagatatacctatatagtacaaatagacatgtgtgatgcatatatacaatgttatatatgtgtatatgtctgtatacacactgagtctgtaatatgtatacactaaatttgtgttatgctaacatcttcagggtctgcactgtgaactcccctggagataagtaagtccactttagaataaagaagttcttttgagacttcagttactaacgtgctttaagaggtatctactttataactgaattctatgtcgttcatacgtagagttacagtaagggtctagtatgtccaaatcttaataataaagaagaaaagtaaaggcttcaagctagcaatgtattcgaattacagttttcagattgtggctccaggccttgtgtttctcatttaagtagcaccttttaataaaaaccgtttctttgtgtaggcaaaagcacaagtgtttcaaatgtaaatagcaggaaaaaaaaagagtttacagagatagcattgctgcacagaataattgctactgagtatttcttatagaatttgtggaactgaaagatgaggtttattctgtcaagttcaagttcattctgttcaacactgttttcttattgtttgtgtatagcaaccgggtattattgttttatcatttgtaaaattgtaaaataaattaatccctttttttcactgtttctcttatctcatatatccaagcccttggttatactttgtatgtcaatgttaggtgatcatttttaacaagctttggcttgtgctttgcttttccactccccttagccctagtggttggcaattaggcaaaccatttatttttaagtgtatacatgggaatatgaacaatgtcaaaaaccccatgaatattaggaaatccttaacgatattttgtgtagcacattctgtttgcggttgagggaataaagtatttcacaagtgaaagtcattta

SEQ ID NO: 105105 - DNA, 615 bp, Homo sapiens
acacacggggtaagtttgtgccccaagtgtacaaacacacactctacactgttctcccaggcctgctcctcggagcatctctgctatcttcagcccgtccatctgcccccaagactggagtcccagtccgggagccagggctggcatctctgaggggaccagattccccccccaacagttgatcatttccgcgtgtcacccttgtgttagtttccagctggtagcttgctataaccttgtttctcacagtccctgctgagcccccacagatacaaaccaccccttgggcacctcatagaggggcctctgctgagctcaggggggtctttgccccccgcggtgttcctactgcatttcagcacatggaagagagatccaggctggtgtttcagcttcccgcggtggagcggcagtgccgacccttccaccagtgctgtgatattgctgtgccctttctaatggaatcacaaagagaaaccacccagggcttggaaaccagggctgtgggaatgaggagtgcatctgtttcctgcactcggagtggtttctctggtggagtatttgactagtaatggatttcctattagggaaagaatctatgacctgctgatttcc

SEQ ID NO: 105106 - DNA, 492 bp, Homo sapiens
cccataatcccagcactttgggaggctgaggcagaaggattgcttgagtttgggagttcaagaccagcctggctaacatagcaagactccagctattgggatggctgaggtgagtagattgtttgagcctgggaggttgaggctgtagtgagccatgattgcaccactgcactccagcctgggtgcagagggagaccctgtctccaaaaagaaaaaatgaaaaaaaaacacatacaaataaaaacaaacaaaagaaataaaaaattcccagagtaacaaagcaggaaataataattctataatccaaaaaacactgggtgatccttcagttggagagaggaggagtcagttaagtagctcacacagtagatatggacaaaccagagttgaggttggttgatgtggcttctaggagttaagttctccacctaaggcaattaagggataattaattgttcttgagggataattagtcatcttgaaaaaaggaaa

SEQ ID NO: 105107 - DNA, 658 bp, Homo sapiens
cgtccaaatatcccaattttaagaattaaggaaagtaaaatagactggatgtataggcaatcaagcttaagcttgattgcctacagtacagaaacaattactgggtcatttcaacaacgcctgactgactgccaaatttcaacacctgaaactaggagtttactgaagagtaagacctgggtcctaccctgaaggatctcaccacttactggcaaggattggttaaaacagaaaacgagggttgaatgtgaagttctctaatggaacatggaagcccccctggggattccaggtagggacacgttcctggaaagaaaacagaacagaaactgggcatcatgggcaatcaagcttaagcttgattgccctccaaaaagaaaaaatgaaaaaaaaacacatacaaataaaaacaaacaaaagaaataaaaaattcccagagtaacaaagcaggaaataataattctataatccaaaaaacactgggtgatccttcagttggagagaggaggagtcagttaagtagctcacacagtagatatggacaaaccagagttgaggttggttgatgtggcttctaggagttaagttctccacctaaggcaattaagggataattaattgttcttgagggataattagtcatcttgaaaaaaggaaa

SEQ ID NO: 105108 - DNA, 264 bp, Homo sapiens
gggaggatcgcctgagcccgggatacccaggctgcagtgagctgtgatggcaccattacactgcagcctagacaacagagccaggcactgtctcaaaaaaaaacaaacaattgtaacaatgcttagcgtgagatctgccctcttaagaagcatctgaggttcagtacagcattcaccacgggcccagtggtgggcagcagggctctgcggcccgctcacccgtcctgtataactgacacttcacacgtgctaagcagcagctcc

SEQ ID NO: 105109 - DNA, 338 bp, Homo sapiens
ctaaaactatgtgaaaagaactggtagtttcttctgaaatgtactatatatttcttaaaaagaccagagggcaaacataaactgaggaagagttgccgcattttttttttttaagatggaatcttactctgttgctcaggctggagtgcagtggtgcaatctcggctcactgcaatctccacctcccaggttcaagtgattctcctgcctcagcctcctgagtagctgagattacaggcacctgccaccatgtccggctaattttttgtatttttagtagagacagggtttcaccatgttggccaggctggtctaaaactcctgatctcaagcaatcc

SEQ ID NO: 105110 - DNA, 657 bp, Homo sapiens
tcgactatagccaggcattattccatgtgctgtgccaatggcggtgaacagaacagattatatctctgtctgcatggagcttatgttctagtagatggagacagacagcaaagcaaattaactattgcttaagtaaatagtgatcagcaaatatgaagaaaagaaagctggaaatggcatggagagtgactgaaagggaaccaattggcctggtacagttaggggagacctctctcaggaggagagctgaaacctgaaagatgagaaggagtcagctaggtaaagatctagaggatgagcattccagagaaggaatggatgcaaagactgtgatgtgagaatagacttgccacagttgaggaatggaaagaagcctggggtggctgaggcatagtcaagaagtctggggaggaatggtacgacttcagagagttgggcaaattcctgttggggccattctctgggatgactgaacaggggaaggggagcagatgtggggctgggcgagatgaaggaaaggatgtgttcacttaggatatgactttgaaggtacgtgtgggaccacagaaaatggctggtaaagagatggaggtaagcatcttctgtgcacaaggccctagggtctgaggataaacaggagtctgtactcatggagcg

SEQ ID NO: 105111 - DNA, 130 bp, Homo sapiens
gtttctaagtgtctgagaccccaaggaatgctccactagtgccccatagatgtttctggctatctcaagcagcctgcctctccactcctgccatggaaaaacccatgcactgctgaacctcatggcacag

SEQ ID NO: 105112 - DNA, 220 bp, Homo sapiens
agacggataagtaaataaacaaattagtaattctggaacttttagtgatactaagaagaaaaaatgttaaagggtaatacaatgagagtgacctgaaggggactgtgtgattcggtggtcaagaaaagcctcaggggaggtgattttttttttctttttttttaactgagacagagtcttgctctgttggcaggctggagtgccctggcacgatcttggc

SEQ ID NO: 105113 - DNA, 376 bp, Homo sapiens
cttcgggctgtgagaagtccctaacagagcaaatctggggacaagggctcaggaaaggttggccacggccccctaggaatgggggctctgcaagatccctggccttagaggctgtgagagggaacaggggtccatccccaagtaagggacacggtctttgaggaaatcccaggccagggcctgaagggcactgtcaggaacacaggctgtttcagtctgttgagattcaccggggcgctgctcactgtgagcacggactcctcaggccaatgtggcagaagagcccacctttgaaagcgagcgggtgggggtggcggggctggtgctggtgcgtgcttctgcacagccacctgggaaggtatgccgctggttgacc

SEQ ID NO: 105114 - DNA, 747 bp, Homo sapiens
tcaacagccgtacttgccaacaccaaatactctaaacctcaacctcacagtaaattctagttcatccttctgaaataccttcttgatgaagattttcttgacacccatatctaaaaattattcccatcactttgttcttctttttgctgcaaataccacatgtgattcaattgctctatggggaagaactgtgccttaatcctctctgtattcccatctacacatgtaaatggcacactgtgtagatgggaaattattcaaaaaaataattttgttgaaaaaaaatggattagaggtgaagatctcctcttttcttggtaccaacaaccaagatgctaaatacagcaatagctatcatcatcaaattgcctgcactgacaaaggccatcacggaagaagtactaagtataacaaaagtctgggggcagaggaaaagtaaatgatcatgctatcaagcagcacatatgtcagtcaatactatttaaaagcaaacatgaaacaacccactagacactacgagagaaatagaggaatgtgaaggaagctgggatgaaggacattcttctgacaaagtctcattactctagtatgtgttactttttctaggtcaatgcaatctgggtaaacatgggttatacaaatagttttaatgaagttccaataaccaaactaaatcctcaataataaattgtcatgtctaactacattgaagataatgatttagattagaaattaataaaacatatg

SEQ ID NO: 105115 - DNA, 797 bp, Homo sapiens
agttgatgactcccatatacctcacaagcatttacctcaaaagtgtagtttgtaccatcagagaatatataaacacctctatgtgaataaactagaaaatccagaagaaattgataaattcctgtatacatacaccttcccaacactaaaccaggaagaagtcgaatcccttaatagaccaatatcaagttctgaaattcaggcagtaattaatagcctacaaaccaaaaaacaacccatgaccagatggaattacaggtgaatcctagcagaggtacaaagaggagctggtaccattccttcagaaactattccaggcaatataaaaagagggactcctccctaactcattttatgaggccagcatcatcctgggaccaaaacctggcagagacacaacaaaaacagaaaatttcaggccaatatccctgatgaacatcgatgcgaaaattctcaataaaatactggcaaactgagtccagcagcacatcaaaaagcttatccaccatgatcaagtgggcttcatccctgggatgcaaggctggttcaacatatgcaaatcaataaacttaatcacataaacagaaccaatgacaataaccacatgattatctcaacagatgcagaaaagtccttcaataaatattaacatccttcatgctaaaaactctccataaattaggtattgatgcaacgtatctcaaaataataagagctatttatgtcaaacccacagccaatatcatactgaatgggcaaaagctggaagcattccctttgaaaactagtacaagaca

SEQ ID NO: 105116 - DNA, 356 bp, Homo sapiens
gcccctctcccccgacccagaatttccttctggggctgaactgtaccatgcgacctgctcctagtggttctgtctgcttgtcactccagcacccagaggtttaaggaagcagggtaagttgtacattcacaccaccttgttatgaacagaggctcctttgaggaaaggaggtggcctaaaagtgactttccctaggagaaatactagatgtactaagtaacccaggcaggatccctgtcctcactctcccaagcccacctccagagctgtttatttttaattaagatgctcctggcagccagtttgcagctgataacgttggcacagccatcactactggcaaagcaatattgcct

SEQ ID NO: 105117 - DNA, 421 bp, Homo sapiens
attaggaggtgaggtctttgggaggtgattatatcataagggcagaaccctcatgagtggtattagttcccttataaaagagaacccagagaggtgccttgccttccctaccatgtgaggacacagcaagaaggcacaatctgtgagaaagtaggccctcgccagacaccaccagtgctttgatcttggatttcccagcctccagaactgtgaaaaatgattttctgttgtaaattacctagtgtttggcattttgttatagtggcttgactggactaagacaggcccctttgtaaaacactgagagagggatggacttcataccctttaggggatccttctctgtagaattctttttttcagaagattttttttttcttttattaataagctttttatttttgaatacttttttattggt

SEQ ID NO: 105118 - DNA, 299 bp, Homo sapiens
tattattccaccctgtatgtcatgtgtacccattgtttagctcccagttataactagagatatgttggaagtaaaatgcaacgggcttgatgaccttgcaggaagtcagcgaggagtgatcagcgctgatagaggcttatatctttggagtttgtgtgaccatgctaacttttaaacaggaggaatgatacaaaataagatgcaggtttggggttcttttccaaggtcttgcctttacctattggatgtcaactatcttcttgggtcattgaacaggagctcttcctcttggcttgtgg

SEQ ID NO: 105119 - DNA, 176 bp, Homo sapiens
ggcagacaaaagccagaaacagagacaggagcccaggccaaaatagaggatgggacccagagcctccgaaagttcccaggatgtatgtttgacagaccatcccccaggtctctggagttgggcaggcctctggagttggacaggcctctggagttggtcaggcctctggagttggg

SEQ ID NO: 105120 - DNA, 224 bp, Homo sapiens
agaaggagtgtttctctggtaccaaccctaggtattctccatgggtttggaataaactgggtctgagcagtcaaggtgggtttcatgtcattccaaatcagctatttaaactcactgtcccagaagcttgaatctttaagagaccacaaagatactgagccattcccaaggtggcctgaagaagaagctgtccgttagttccaggtttacttctgggtggcaaa

SEQ ID NO: 105121 - DNA, 184 bp, Homo sapiens
ctgactgcccactatatccagctttggtgcaggaaaatgatgggacctaagcctttggacagtgactcctgatctggccaagcaaggggcctccctcacttcagttttggccctaggtttgcctactgccatacttcattaatatctgacaattaccccatcctggtaaaagctggttcatatt

SEQ ID NO: 105122 - DNA, 773 bp, Homo sapiens
agtcctcccaccacagcctcccaaggtgttgggattacaggcatgagccactgaacctggcccaagtctatctctctactgattgtttttttctgcttgttctaccagttacttacagaggtgtatttaaatatctcactatgatttggatttgaccatttttctttttagttctgttcagttttactttatatattttggaggctatgttatttgatgtatacaaatttagaattgttatgcttccctcctggattgatccctttctcactgtgtccctctttatccctggggatgcttcctaccttcaaatccattttatctgctattagtacaactataccacttcgattttggttagtatttacatgagaagtaatagatcatgcctcctgaaattcatattaaccaaaggaaaaaaaaaccactaagcacagttagacacaagaaatagactacagcaaaacagatttttaaaattcaaagaaaatacatgttgagctcatggccagagactttaaagtgaagacaacgtcatgctattttgaccaggctggtcttgaaatcctgggctacaagcagtcctcccaccacagcgttccaatgtggagggattacaggcatgagccactgaacctggcccaagtctatctctctactgattgtttttttctgcttgttctaccagtacttacagaggtgtatttaaatatctcactagatttggatttgaccatttctctcagtagttcctgcttcagtaaggagagaca

SEQ ID NO: 105123 - DNA, 251 bp, Homo sapiens
gatgtaggcctggtagttcctcatacggatagggtgaggccctagtcactgtctactgttaaccaaaagaggtgggcaggaacccctggcctacacacctttgccattgtaggaaatatagcataggcattacatctaaagcaagctttcctaatattactaccctgttcctaactaccaatggttcttttttttttttttttttttttgagatggagtctctctgttgcccaggctggagtgcagtggcc

SEQ ID NO: 105124 - DNA, 437 bp, Homo sapiens
ctctctcacctcatctcttgccattctcccccaactcagccatactgtcatttttcatgcttcctttggtctcaggtcctctcatatgctgttctctcagcttcttctcacctccccagcccctgactcacatctagggaacttatatgtattcttcagaccccaggtcaagcattttctcaggacaatttcccaggctcctcaaactgttgtgcccctgtactactcccacgcaacactgatcacagcttgttattatatattggcgtgactatcagaagaatgtttatcaatcccatgagaactataagcttcgtgagggagaaactgtttgcggtgctcaccatcatatcctagcacctggcatagtgcttaacacatactggactctcagatactcaatgaatacagaatgaaagattggaactggagctaga

SEQ ID NO: 105125 - DNA, 660 bp, Homo sapiens
  misc_feature (305)..(306): n is a, c, g, or t
  misc_feature (318)..(318): n is a, c, g, or t
  misc_feature (320)..(320): n is a, c, g, or t
  misc_feature (342)..(342): n is a, c, g, or t
  misc_feature (396)..(396): n is a, c, g, or t
actcaaccagaggtgattcctgtgccccttcctgacactgtacttctacccggagcctcagtgcagatgtcaatggtggttacgtgggcctgatgaataaggtgtccatgaaagttaagctgtttgtctgttactattgaagaagtgtcatccaaagctggccataaaagtacgggcacagaagtatcaatagacacacgtggcaacttattctgtaccaggtcggtctttaacagtgtacgcggccgactgtccctgcagaagtatattctcttgaaaaatgaagaaaggcagaaggaggcaanntatgcctagtcncnttgtggatgtggaaaataccanataactagtgaacgcaggcgttaaagcgaattccacgatagtgcaaagtatcanagtacgtagcaaaacactgggaagttacacgaaatctgtaagatctttctggaaaacaaagataccaaacttgccagtagggagaagggaaagttttgctttaaggcaataagatgtgagaaagaagaagcggccacacagtcctctgaaaaatatacctttgcagatatcatctttggaaatgaacagataataagttcagcaagcccatgtgcagacttcttttatcgaagtttatcttctgaattgaaaaaaccacaagct

SEQ ID NO: 105126 - DNA, 428 bp, Homo sapiens
tgccatttgtatattttctttggagaaatgtctatgcaggtcttttgcccatttttaaattgggtcattttgttattgacccaacttaatttgcaggagttattgcaggagttctctatatattccagatattgatcccttatccaatatatggtttgcaaatattttctcatattctgtaggttagcttttcactctgttgactatttcctttactatgactttttaattaatttttgcttattaaaatgccttttaatttaaatccttcatagtgtaagttcttatagtatgtgttatttatagttatagttaacaaaaattgctgagcaaattgccccttctacctagatttccaggctattcccagatcatgataccatacggcagtgttcctcaaggtattgtttaacagccacttgcattga

SEQ ID NO: 105127 - DNA, 221 bp, Homo sapiens
gagtgacaagacatggcacaaagggcctgcctgggctctcctctgcccccgagttcttagttgacctacacatacggttaaagacaaaaccaacccaaaagtgacaacccagacaaataaatgccctccctatctggccactaatgccaaattgatgtgagctgcacacagaaaaagagattacgtgtactcatgaacaaggaataaacaactgagcgatg

SEQ ID NO: 105128 - DNA, 445 bp, Homo sapiens
gggagatgttggtcaaaggacatatacttacagttagatagaaggaataataaattgtctagaataggcaaatacagaaagacagaaagtaggtaagtgattgcctcctggagatgagggtggcagggaaggggaaagaatagggtgggagagtgtgaaatggggagtaactactaatggttatggagtttctttttaggtaataaaaatgttttaaaatggattgtggtgatggttgcacaactatgtgaagaaactaaaaatcactggattttacactgtaattgggtgaactgtatgttatgtgaatcacatctcaataaagctgtcttttaaaaaatttctttatgtcaagcattatttattcttgtttgcaaattttataaatgcacatcaataacatatttttcctattatctaaaactggtatgaattctcctatgac

SEQ ID NO: 105129 - DNA, 881 bp, Homo sapiens
ccatattgaaactcagctaagcagccatcagaggatttgaaccaggtctctctgaagctttaggccaggcatgctattttcattaggccacactgaaagaaatcgcccaagtatgatgttttcgccatcttatctttccgttttcatttgtacttttcctgagtggtaccaacagcaggtttgtaaaatgattttatgaaggaatgctgagttggaagggtgtctgctgcttgtctggtttggatttgtgtgaatgtgtgcagtcccacaatatgtgattgataacactttgacttcttgaactttttctgttttaacttgaaaaaacaagtttgcacagggccttaaaaaggtgactgaaataaactgcagcttatcttccctgatttatcccaccacagtctgctctgagcacttcttagtctccttttcttcttagctttgtgtatgtgtgtgtgtgtgtaggattgggaataaccaccaccttcctatgtaccctaaaactctgctttagcttcttttgagggggccccacaatatttgcataactctgttgaaaaatttcacgttttcattcagcaaacttgtgttgagcaggccctggctgagtgtagactagggcctgctcaacagaaggccctattctgtgctcaaggagctccaagtattggagggaaatagaatatctgtaatcacagcccattgtaatgatgctgaaattgttaggtagcccaggtttctgagttggagggcagtgtgggaagaccttggggaagatgaggatcattggaggatttgaagcacatcatagaattggcagtgccttcttgatctggaagtcagaggaccctcagagtagggagtctgggatgtctcctaag

SEQ ID NO: 105130 - DNA, 312 bp, Homo sapiens
catatttggtagctgaatgcccctaggccagcagcaatttaacacttttgggcttcactttatttactctttgcaaaatggggaagagggcaatgatctctaaggctccatatatctagaatgttatgaattatttttagccaattcaatattcatagcccctttgaggtaagtcaagctcaagtaaaaattgttcacggagaaaaaaagagtaaagcacaatggaaggatgagagaacagggtccatacccagtaaataaggggtgtcaagtactacctgacctcaaggcaactcactgcacactagacca

SEQ ID NO: 105131 - DNA, 1986 bp, Homo sapiens
gcgccctcgccgcggacaccggagctgcggccgctccccgctgtcccccagagatggcagatcctgaggtagttgtgtgtagctgcagctctcatgaagaggaaaatcgctgcaattttaaccagcaaacatctccatctgaggagcttctattagaagaccagatgaggcgaaaactcaaattttttttcatgaatccctgtgagaagttctgggctcgaggtagaaaaccatggaaacttgccatacaaattctaaaaattgcaatggtgactatccagtacttgcagctatacaatgtctccgttgggaatcatgcttatgagaacaaaggtaccaagcaatctgctatggcaatctgtcagcacttctacaagcgaggaaacatctaccctggaaatgatacctttgacatcgatccagaaattgaaactgagtgtttctttgtggagccagatgaaccttttcacattgggacaccagcagaaaataaactgaacttaacactggacttccacagactcctaacagtggagcttcagtttaaactgaaagccattaatctgcagacagttcgtcatcaagaactccctgactgttatgactttactctgactataacatttgacaacaaggcccatagtggaagaattaaaataagtttagataatgacatttccatcagagaatgtaaagactggcatgtatctggatcaattcagaagaacactcattacatgatgatctttgatgcctttgtcattctgacttgcttggtttcattaatcctctgcattagatctgtgattagaggacttcagcttcagcaggagtttgtcaattttttcctcctccattataagaaggaagtttctgtttctgatcaaatggaatttgtcaatggatggtacattatgattattattagtgacatattgacaatcattggatcaattctaaaaatggaaatccaagctaagagtctaactagttatgatgtctgtagcatacttcttgggacttctaccatgctcgtgtggcttggagtcatccgatacctcggtttctttgcaaagtacaacctcctcattttgacccttcaggcagcgctgcccaatgtcatcaggttctgctgctgtgcagctatgatttacttaggttactgcttctgtggatggatcgtgctggggccttaccatgacaagtttcgttctctgaacatggtctctgagtgccttttctctctgataaatggagatgatatgtttgccacgtttgcaaaaatgcagcaaaaaagttacttagtctggctgtttagtagaatttacctctactcattcatcagcctctttatatatatgattttaagtcttttcattgcactgatcactgatacatacgaaacaattaagcaataccaacaagatggcttcccagagactgaacttcgtacatttatatcagaatgcaaagatctacccaactctggaaaatacagattagaagatgaccctccagtatctttattctgctgttgtaaaaagtagctatcaggtttatctgtactttagaggaaaatataatgtgtagctgagttggaacactgtggatattctgagatcagatgtagtatgtttgaagactgttattttgagctaattgagacctataattcaccaataactgtttatatttttaaaagcaatatttaatgtctttgcaactttatgctgggattgtttttaaaaaaactttaatgaggaaagctattggattattattatttcttgtttattttgccatggctttagaatgtattctgtatgcctctcttttgctctgatactgttgctcctgctattctgattgtgcagactgtgtaattagtggaaaacaatccttggtctgactgtgactttggacaactcagtaaccctggcttggaccactctcaggagtccatccttgagagagtgggtgtagtta

SEQ ID NO: 105132 - DNA, 2175 bp, Homo sapiens
cttctaagagcatgcctgatagatacttcggtagcctctccggatggccccttcgtcgggtagcctctcctgatggggtccttcgcccaccctgcctcccgcgccggcgctccgggtgaatgtcaagggtggctggctgcgaatacctccttcagctgctggggttcccgacagtttgcagtttttaaaagtgcaccctcggaagggcttttcagactgggtaaacctgacttttccaagagatggcagatcctgaggtagttgtgtgtagctgcagctctcatgaagaggaaaatcgctgcaattttaaccagcaaacatctccatctgaggagcttctattagaagaccagatgaggcgaaaactcaaattttttttcatgaatccctgtgagaagttctgggctcgaggtagaaaaccatggaaacttgccatacaaattctaaaaattgcaatggtgactatccagtacttgcagctatacaatgtctccgttgggaatcatgcttatgagaacaaaggtaccaagcaatctgctatggcaatctgtcagcacttctacaagcgaggaaacatctaccctggaaatgatacctttgacatcgatccagaaattgaaactgagtgtttctttgtggagccagatgaaccttttcacattgggacaccagcagaaaataaactgaacttaacactggacttccacagactcctaacagtggagcttcagtttaaactgaaagccattaatctgcagacagttcgtcatcaagaactccctgactgttatgactttactctgactataacatttgacaacaaggcccatagtggaagaattaaaataagtttagataatgacatttccatcagagaatgtaaagactggcatgtatctggatcaattcagaagaacactcattacatgatgatctttgatgcctttgtcattctgacttgcttggtttcattaatcctctgcattagatctgtgattagaggacttcagcttcagcaggagtttgtcaattttttcctcctccattataagaaggaagtttctgtttctgatcaaatggaatttgtcaatggatggtacattatgattattattagtgacatattgacaatcattggatcaattctaaaaatggaaatccaagctaagagtctaactagttatgatgtctgtagcatacttcttgggacttctaccatgctcgtgtggcttggagtcatccgatacctcggtttctttgcaaagtacaacctcctcattttgacccttcaggcagcgctgcccaatgtcatcaggttctgctgctgtgcagctatgatttacttaggttactgcttctgtggatggatcgtgctggggccttaccatgacaagtttcgttctctgaacatggtctctgagtgccttttctctctgataaatggagatgatatgtttgccacgtttgcaaaaatgcagcaaaaaagttacttagtctggctgtttagtagaatttacctctactcattcatcagcctctttatatatatgattttaagtcttttcattgcactgatcactgatacatacgaaacaattaagcaataccaacaagatggcttcccagagactgaacttcgtacatttatatcagaatgcaaagatctacccaactctggaaaatacagattagaagatgaccctccagtatctttattctgctgttgtaaaaagtagctatcaggtttatctgtactttagaggaaaatataatgtgtagctgagttggaacactgtggatattctgagatcagatgtagtatgtttgaagactgttattttgagctaattgagacctataattcaccaataactgtttatatttttaaaagcaatatttaatgtctttgcaactttatgctgggattgtttttaaaaaaactttaatgaggaaagctattggattattattatttcttgtttattttgccatggctttagaatgtattctgtatgcctctcttttgctctgatactgttgctcctgctattctgattgtgcagactgtgtaattagtggaaaacaatccttggtctgactgtgactttggacaactcagtaaccctggcttggaccactctcaggagtccatccttgagagagtgggtgtagtta

SEQ ID NO: 105133 - DNA, 356 bp, Homo sapiens
ttccttatcccctcctctgaattttctcttcagcaattatcagcagcaagtgtcccaaagtttctattaacttatttctgttgtctctttcttccctccactagaatgtaagctttatgagagcagagacttttgtttgttcactgctttatccttagcacctaaaacagtgccttactcatacttacctcaatatttattgccaaatgaatttctgctttataatctgattatatttttccactctctcttagagtctaactagttatgatgtctgtagcatacttcttgggacttctaccatgctcgtgtggcttggagtcatccgatacctcggtttctttgcaaagtacaac

SEQ ID NO: 105134 - DNA, 644 bp, Homo sapiens
cttctaagagcatgcctgatagatacttcggtagcctctccggatggccccttcgtcgggtagcctctcctgatggggtccttcgcccaccctgcctcccgcgccggcgctccgggtgaatgtcaagggtggctggctgcgaatacctccttcagctgctggggttcccgacagtttgcagtttttaaaagtgcaccctcggaagggcttttcagactgggtaaacctgacttttccaagagatggcagatcctgaggtagttgtgtgtagctgcagctctcatgaagaggaaaatcgctgcaattttaaccagcaaacatctccatctgaggagcttctattagaagaccagatgaggcgaaaactcaaattttttttcatgaatccctgtgagaagttctgggctcgaggtagaaaaccatggaaacttgccatacaaattctaaaaattgcaatggtgactatccagctggtcttatttgggctaagtaaccagatggtggtagctttcaaggaagagaatactatagcattcaaacaccttttcctaaaaggatatatggaccgaatggatgacacatatgcagtgtacacacaaagtgacgtgtatgatcagttaatcttcgcagtaaaccaggtaaat

SEQ ID NO: 105135 - DNA, 302 bp, Homo sapiens
aaaaactaaatgtaacatatgatcctggattggatattagagaaattttattttattttttgccataaaggccattatttggttaattggtgaagtttgaataagggttgagattagataatagtataggatgaatgttaatttcctgattttgataattataccgtggaaacacaaggactgtccttgttttctaggaaatactaagtatttcagggtaaagaaatgtccattacagagggagaatgataaagaaaatgtaaagcatttgagtaatctgggtgaagggtaattagtagttt

SEQ ID NO: 105136 - DNA, 297 bp, Homo sapiens
atcattacctaaggatagttaataaaggccagtaattccactgtaggtcaagttttttgacaatgactgtgagtcatgaaattggcctgtttggttagtgataagcgaagccgcttctgttcatcaacttcctgaacgtcagccaggctcctcgctgggcttggacaacgccggcttgtcccctgtgcgctgtacagctgccttctttttatttcctgtgcagtctcgcccacagcactgcaggctccgggggaccttttagggcagattatggcacccttgggatggctaccttgg

SEQ ID NO: 105137 - DNA, 335 bp, Homo sapiens
taagccctctgaagtcctaagttaaaaataaagcaacttgtttgataatttttcatcaagaatgtatctgagtctctgagtaattattagtaggaatattccattatcacaattacacagtataagctatttagtctaactttaccaaaaaagggagctacttcaacactgtgtgagacttttaatgggtttgcattgggtatgcactattagcaagataacctattttacagcagtgttttttaacctttccatttatttgaaaggcagctaagatatagtagttaatataatggtttgatgcatttatattacatgtagataatggagataca

SEQ ID NO: 105138 - DNA, 693 bp, Homo sapiens
gtatattcttaatagcctagataaatactaaaatatcatattccatttttctggacaatttcataataaacatcaagtggcaaaacagcatgatgtttcaagatgattggctgtgacttctaggttgtaagttactaggaagttttcattatattgcaatgataggttttagctaacaaaataatttaattagattactgtgaagaccatctggaggaggaaagagtgtgggttatggttttgtgaacactgctgggtttgtgctcattttaggcagtacgaaataacttgtgttgcacaaagctacttaagggacttgaaatacttcttttgtatccagcctctctctagctgtgcatttctgaagagccagcatatccatcatgtctacgtgaagaattggttttaaatcctgatgacacatggctcagaacaaggactagtttcattcaggtacagtcaaacctaggtcaaacccatggttcatgaaccaaataactttttggcagagatgaaaatacaagacttattaattatgttgtttaaaacatgtggcccaggagagaataaaataacacattcataaaacacagtcactgggccagttcctggttttttaaagggcaccagttaaagctaccttgaagatgttttatttaaatagaagatatcaatcatagtctctagctatca

SEQ ID NO: 105139 - DNA, 379 bp, Homo sapiens
tctgcaagctcccacacaccgacacccacaacccacaccccactacacacatacacccacactccaacacatcccctccaaacatacacccacacaccttccccccccacacaaacacatacatacacactcacacacacacacacgtgtacactataagacatcaattcagtcttcaaacacgtgttaaggaaatgggaagaggctaccatcatgggatggattaaaggaagtttccagaagctgggaacaactgtgacctggagcatgggaggcagacacttatcactccatcatgacgtaagttcttgagacccctagtatccacacagggattccccacatccacaatggctacttcttagctttgtgcagatgt

SEQ ID NO: 105140 - DNA, 203 bp, Homo sapiens
gcaaaggggaggaggctggcgggtggaggtgcccagggaggcctggggccgggtcccaccaggctctggaggggcctgtgggacaagggtggagaagcagcctccacaggaggactgggagccgagggcctggcccgggcctagcggttccccccagtgccctgtgccttcttgtctcccggggtgagaagcctcccttctgg

SEQ ID NO: 105141 - DNA, 183 bp, Homo sapiens
taaattggtctctttctcatcatgctgcagaactctggggagtgaaaggtcagattcctgtaaagagcaaggctatggcagtgtagcaaaagaaaagggtaaagccatggacattgttagaatgagcaaaaggaaacacatgagtctcagaagaatacagtgctgctggggtgggagaagctg

SEQ ID NO: 105142 - DNA, 757 bp, Homo sapiens
tggggatggggtgttaacttgcattctttggggttcaggtctcaaatggctcttgtagccctgggatctgaggagcgagaccaggactcagctatctccaccccggaagaaccttccctgctcttccacatccagcccaggcctcggcttcctcgtctgcaaaacgagggtgctgagaagatgggagcaggggtccagcgttttcatcagcagggctgttgagatgtaattcccatgccatagtgcccactggttgaaagtctatacagttcagtggtttctagtgtattttcagatatatgcagccatcactgtggtggactttagaacatctctgtcaccccaaagagcaaccctgtttccattggtgtcactcccggggctccgcattcccagcccagcagcctaggacaagttttctgcctctgcaggaggcccccaagtttcagatcttgatgtctcctttctgtggggagtccagcaggcatctccaccttagggacagcttagtggacagtgctgtgtcaccatcaagggcctgaatccccgctctgtcacctactacctcttttaccttgggcaaattcttcaccctttgccttggtttccttaggtgaaaatgggatcatcgtgctgacctcaagggcagctgtaggattcgatgttcctcatgtcacggtctctaaccgtgtggcacattctgggtgcccatggttacgatgatgggtttgggggctggagggatcagtgactttct

SEQ ID NO: 105143 - DNA, 336 bp, Homo sapiens
atattttatcaatgatacaagaaaaataatatttaagaaaaagctttcagaagttaaaaatattacagcaaaaatacaaaaattcaacaggagtagaagataagttcttaagtctcaaagtaggactaaaaaagagatgataggatattcatttaagagattcaatatcgaataataaaatttcaggaaggaaaaatgcaaaaatttatttttaaaaaagtaatacaaaggaaattttttccgtaatagtagagcacaggtgtccagatatgaagaaataatataatacttagtaaatgaaaaaaaaatcataccaaatacttcataaagttctag

SEQ ID NO: 105144 - DNA, 726 bp, Homo sapiens
tacatttctcctgttatctattttaattaaatgtttgtgtgtaattgagggataatatttttggaggaagcaaatctagttaataatatctaatgactgggtatattgggaaagctatttttaaccacctctgaacactaatcatccagaatcatccagacagttgatagatactgtctgctatttaatttttatgtacatatccaatatgtgaaaaaatatcacaaggcttagtgaccaattattagtaattctgtaaaagataacttttaagtcaaaattgtgcagcaggtacctgaacagcgatttcagtggcaataaaaagccaatagctttcacaagtcttgactatgttggtagtttactgtctagtaaatatcaaaagataaggcctagcaattgttaagtgtctttattgaatgcttctgccaggcactttctcataagagctctgcaaggtaggtattttcctcaagttttggacgaggaatctaggtttggagggatgtaagttatcaccctagatcacacaacttggtggagctgtattgaactcatgctcaatttttttacacttagccactttgcttcccttgtagtagaaaattgaatcaagcattaaatcaactgagttgttctttgtgtttgtaactgtccaaagaattcaaaattggagtccaccatatatgttcttttctttgcaagtacatattttgaatgaaggaa

SEQ ID NO: 105145 - DNA, 358 bp, Homo sapiens
gaggctggaagagagaaagaagtagttagattaccggctagtcaaaggtgcattccatctctccaactttctctgccttggaggaccaataccccaaattattagacatctctcctccccattatctgccaagatatgcaatagctaacagactttggattggtgtagagacttaagcctcttcccttgctcctctgcacacacatcttcagctctcatcttgcagagatgagatacagttaacacatactgtaacacaatcaaatcagtatgtctaggattctgggcaattagtgcttttcacaggattaaatacacataggccttctcttccacccctttagcagttcctagacat

SEQ ID NO: 105146 - DNA, 4779 bp, Homo sapiens
  misc_feature (2105)..(2105): n is a, c, g, or t
  misc_feature (2152)..(2152): n is a, c, g, or t
cgtgtaaaggttagcatgatcgcccagaaggagactcctgtgctgaccagaatagaaaaacaaaagcgcaaagaggaggaagaagagcgtcagattcttctagcagtgcagaagaaggagcaggagcagatgctaaaggaagagaggaaacgcgagttggaggagaaggtcaaggcagtggaagtagatcgagcgaagaggagaaagctcagggaagaaagggcatggctgctggctcaaggaaaggagctccctccagaactttcccatctggaccccaattcccccatgagagaggaaaaaaagactaaagacctctttgagttggatgatgatttcactgctatgtataaagttctagacgtggtaaaggctcacaaggattcctggcccttcttggaacctgtggatgaatcttatgcccctaactattatcagattattaaggcccccatggatatttccagcatggagaagaaactgaatggaggtttatactgtaccaaggaggaatttgtaaatgacatgaagaccatgttcaggaattgtcgaaagtataatggggaaagtagtgagtataccaagatgtctgataatttagagaggtgtttccatcgggcaatgatgaaacattttcctggagaagatggagacacagatgaagaattttggattcgagaggatgaaaagcgggagaaaagacggagtcgggctgggcgaagtggtgggagccatgtttggacccgctccagggacccagaagggtccagcaggaaacagcagcccatggagaatggaggaaagtcgttgccccccacacgccgagcgccctcttctggggacgatcagagcagcagctccacacagcccccgcgggaggtgggcacttccaatggccgaggtttttctcatcccctgcattgtggtgggacacccagccaggcaccctttttaaaccagatgaggccagcagtaccaggaacatttggccctctgcgaggatcagatcctgccaccttgtatggctcctctggagtcctggagccacaccccggggagcctgtgcagcagcgtcagcctttcaccatgcagcctccagttggaattaacagcctccgaggacccaggctaggcacaccagaggagaagcaaatgtgcggggggctgacacacctttctaacatgggcccacaccctggatccttgcagcttgggcagataagtggcccaagtcaggatggaagcatgtatgctccagctcagttccagccaggattcattcctccccggcatgggggggctccagcccggccaccagactttcctgaaagctcagaaattcctcccagccatatgtatcgatcgtacaagtacctgaatcgagtacactctgccgtctggaatgggaaccatggtgctacgaaccaaggacccttgggcccagatgagaagccccacctggggccaggaccctctcaccagcctcgcactctcggtcacgtgatggattcccgagtcatgagaccacctgtcccccccaaccagtggactgaacaatcaggcttcctacctcatggagttccttcctcagggtacatgcgaccgccctgcaagtctgccggacatcggttacagccacctccagtgccagcacccagttctttgtttggagcacctgcccaggctcttcggggggtgcagggaggggactccatgatggacagcccagagatgattgcgatgcagcagctctcctcccgcgtctgccccccaggtgtgccttaccacccccaccagcctgcacacccccgtttacctggcccttttccgcaggtagctcacccaatgtcagtcactgtgtcagcccccaagcctgccctgggcaaccctgggagggcaccggagaacagtgaagcacaagagcctgagaatgaccaagcagagccgttgcctggccttgaagagaaaccaccaggtgttggtacttcagagggggtctacctcacacaactacctcaccccacacctcccctgcagactgactgcaccaggcagagctcaccacaagaaagggaaacagtgggcccggagctcaaaagcagctnctccgaatctgcggacaactgtaaagcaatgaagggcaagaatcccnggccctcggatagcagctaccccggcccagccgcccaagggtgcgtgagagacctctccacggtggcagacaggggcgctctatccgagaacggagtcattggggaagcatctccttgtggatcggaggggaagggccttggtagcagtggttccgaaaagctgctctgccccagaggcagaacgttgcaggaaaccatgccatgcacgggacagaacgcagcgacaccgcccagcacagaccccggtttgacgggaggcactgtgagccagtttcccccgctgtatatgcctggcctagagtacccgaattcagctgcccattaccacatcagtccaggcctgcagggtgtgggccctgtgatgggagggaagtccccagcatcccatccccagcattttcccccaaggggctttcagtctaaccacccacattctggaggctttccccggtatcgccccccacaaggaatgaggtattcctaccacccaccgccacagccttcctaccaccactatcagcgaactccttactatgcctgtccacagagcttttctgactggcagagacctctccatccccagggaagcccaagcggacccccagccagtcagcctcccccaccaaggtccctcttctcagataagaatgccatggccagtctgcaaggctgtgagacactgaatgctgccttaacttctccaacccgtatggatgcagtggctgctaaagtcccaaatgacgggcagaatcctggtccagaggaagagaagctggatgaatctatggagaggccagagagtcccaaagaatttttagacctggacaaccataacgcagctaccaagcggcagagctcgttgtcagccagcgagtatctctatggaactcctccgcctctgagttcaggaatgggatttggttcatctgcatttccaccccacagtgtgatgctgcagacggggcctccctatacccctcagcggccggccagtcactttcagcccagggcttactcttcccctgtggctgccctcccacctcaccacccaggggccacccagcccaacggcctctctcaggagggtcccatctatcgctgccaggaagaaggcctgggtcactttcaagctgtgatgatggaacaaattggcactagaagtggaataagaggacctttccaggaaatgtacagaccatcaggaatgcagatgcacccggtccagtcgcaggcctcgttcccaaagacccccacagcagcaacatcacaggaggaggtgccgcctcataagcctccaacacttcccctggatcagagctagtccaaggaggaaatgagccccaagcaatggaaagctgcacacgaagactggaatgtggagaactggggagtgccctgtcagctctattcccatcacctgctccaccccttcacggcgacccactcgtgccatacttgagctggagccagtcacgggccctaaaaggacactccttagatgactgacacacagattgcaaaggtcctcggccagggatctcttgcacagctgatgtagacagtcaggcaaaactaatgaacgtggagttaatgatgacttttccaaatcctgagacacttttcagggaaaatcactttaaacttgggggagggggtatactcaagaatggagtggtgcttttaaactttgatgagcagctaaactcaggtatatatttggggaagggactactcttagtattaatggttttggagctgggtccagtttacagaattttcatgttgccttttaaaataatttttgttggtggtgaatgtattgtacataaagtgggaagggtgggtggggatgcggaagaaatgggggtcctaactggtgggcacacagcactggagtgatttttatctgtttacaatcatgtcacactgaatacttatgggagccggagatgagggtaggaaaggtttgatcttgtaatatgtcactgtgtttccttagtggccagccagccttcagaatagctaaaggccttccttccttccagtcagcctgagagagaacacctgtcccctaagcacctggtgtctccattggaggcagactgctctcaggagactactagaagcttcagcccggaagacaggctgctctctcatgctggtggcccaaattgagaaagtggtgtcccttcctgattttgccaccagccctaccgaatagttgtaaaccagtatcaggaattgggatcgctagagtgtttcacgtattagaagatgaatcgtcctcatcacagacctccctgtcaggactgtgatctagaaggcatcacacacagctttctggcacgaatcacattttgtggaagtgactactcaggtttgtatattttagtatcaataaagaattgcacaggtttgaataggaaaaatgtattctatagatttacagtttgaatttaggaatatttcagtatatatagtttttattcgttttaagtgaatcatagtaaaatcagtcatggtgatttaaaatagctatcaagaacaagttcttggaattatctgttgtatctgtgataggaaaccattttacagtattaaattactttattacagttgtagagtt

SEQ ID NO: 105147 - DNA, 936 bp, Homo sapiens
ttatgggcacattataaaaaaatcattgtgtaatttagcacggtctttgctgaggactcaaggacttcagtagcagtgagaaggccagtacaggtcagcccccgaggtaaattgggagccctgtcactggaactcagctggagtgagaggtcacaggaggttatgccggaactgccacagaggatcccatggggcaaagcttgccccgtgcctgatccacccggttgtacttgtctttcttttcgtgtgtgctcacataaaacaaccgctcccagccaaatctgtaaactgttcatcaggattgctgttggattctctcttttttgaaaagggaacaatggtggggatagggagcattgtaatatttccatctcttgttcctcaaagtaggtaccaccttcccattatatccgtgtttcttatgctgattgaaaattacataagatacttggacatttttatttatttatttatttatttattgtttgagacagagtctctctctgtcgcccaggctggagtgcagtggcatgatcttggctcactgcgacctccacctcccaggttcaagcgattctcctgcctcagcctcccgagtagctgggattacaggcgcgcgccaccacgcccagctgattttttgtatttttagtagaggtggggtttcaccatgttggccaggctggtcttgaactcctgaccccatgatttgcccgcctcagcctcccaaagtgctgggattacaggcgtgagccaccacgcccagcgatacttgggcatttttagatttgagttatgcttacgtgtaaatttggaatcctcgttctggttttttcctggtgcgttttgttccccatttccccaaaccccttttccgtgctctgtgtagggcctggatgcagacagtctccgtgtggagccattgggtgaagacaa

SEQ ID NO: 105148 - DNA, 374 bp, Homo sapiens
cgagaacggcagctctacaagctcctcagtgaggacttcctgcctgagatctgcaacatgatcgcccagaaggtgcgccacactctctgctctgtcctcctcagtgttaggcctgatgctgcattatttaaggattattcatgagaccttccccatacaccccactgtcctggaaatagtgcagtcttccatcctgtctgaactccagtgttagaatgggacctcatgccaccccctctccttcactgtgggtcctatcatgttctccttcccccagaaagtcctcagtgtctaccacccaccaatagtgacggtggcttttcacagcctggaaccaactttccttctcccatacactcctcaggaaacattcc

SEQ ID NO: 105149 - DNA, 6179 bp, Homo sapiens
  misc_feature (175)..(176): n is a, c, g, or t
  misc_feature (3505)..(3505): n is a, c, g, or t
  misc_feature (3552)..(3552): n is a, c, g, or t
cgggggttgttgttgtggcgcgggcagccccgccccctcctcgtgggcggcccctcccccaggccccgcgtccggcccctccgcccctagccccatctgtttctccggcggggactcgattatattgtaggggactgggggcggccgccgccgcagccgcgggatggggcgagcnngcggaccccgcgggcagccgcagccgcagccgcctcagtagttcgggcccccgcgccgccgccccccgcccggcgcccgccctcggctcctgcactcgccgagcggcggcagcagcgggaggagcgccccgccgcccccgccgaggaccgcgcggaggctgcggcgctgccgcggcgggagtcccaggtcggcgggcagagcgcgggcagcgaggggccgccgcctgtgccgcagcggggagatgtgcccagaggagggcggcgcggccgggctgggcgagctccgctcctggtgggaggtcccggccatcgcgcacttctgctcgctctttcgcaccgcgttccgcctgcccgacttcgagatcgaggagttagaagccgctcttcacagagatgacgtggagtttatcagtgacctgattgcctgcctgcttcagggctgctatcaacgaagagatatcacgcctcagacattccacagctacctagaggacatcatcaactaccgctgggagctcgaagaagggaagcccaaccctctgagggaagccagtttccaggacctgcctcttcgcacacgggtggagatcctgcaccgactctgtgattaccggctggatgcagacgatgtcttcgatcttctaaagggcctggatgcagacagtctccgtgtggagccattgggtgaagacaattctggggcactatattggtatttctatggaacacgaatgtacaaagaggacccggtgcaaggaaaatccaatggagaactctctttgagcagggaaagtgaaggacaaaaaaatgtctcaagtattcctggaaaaacgggaaaaagaagaggaagacccccaaaacggaagaaactgcaggaggagattctgttgagtgaaaagcaggaagaaaattccttggcatccgagccacagacaagacatgggtcccaagggccaggccaaggtacttggtggctcctgtgccagacagaagaggaatggagacaggtcaccgagagttttcgcgagaggacctcccttcgagaacggcagctctacaagctcctcagtgaggacttcctgcctgagatctgcaacatgatcgcccagaagggaaaacgtccacagcgcacaaaggcagagttgcatcctaggtggatgtctgaccacctgtccatcaaacccgtcaagcaagagaggagactcctgtgctgaccagaatagaaaaacaaaagcgcaaagaggaggaagaagagcgtcagattcttctagcagtgcagaagaaggagcaggagcagatgctaaaggaagagaggaaacgcgagttggaggagaaggtcaaggcagtggaaggtatgtgcagtgtccgcgtggtctggagaggtgcatgtctgtcgaccagccgtccttagatcgagcgaagaggagaaagctcagggaagaaagggcatggctgctggctcaaggaaaggagctccctccagaactttcccatctggaccccaattcccccatgagagaggaaaaaaagactaaagacctctttgagttggatgatgatttcactgctatgtataaagttctagacgtggtaaaggctcacaaggattcctggcccttcttggaacctgtggatgaatcttatgcccctaactattatcagattattaaggcccccatggatatttccagcatggagaagaaactgaatggaggtttatactgtaccaaggaggaatttgtaaatgacatgaagaccatgttcaggaattgtcgaaagtataatggggaaagtagtgagtataccaagatgtctgataatttagagaggtgtttccatcgggcaatgatgaaacattttcctggagaagatggagacacagatgaagaattttggattcgagaggatgaaaagcgggagaaaagacggagtcgggctgggcgaagtggtgggagccatgtttggacccgctccagggacccagaagggtccagcaggaaacagcagcccatggagaatggaggaaagtcgttgccccccacacgccgagcgccctcttctggggacgatcagagcagcagctccacacagcccccgcgggaggtgggcacttccaatggccgaggtttttctcatcccctgcattgtggtgggacacccagccaggcaccctttttaaaccagatgaggccagcagtaccaggaacatttggccctctgcgaggatcagatcctgccaccttgtatggctcctctggagtcctggagccacaccccggggagcctgtgcagcagcgtcagcctttcaccatgcagcctccagttggaattaacagcctccgaggacccaggctaggcacaccagaggagaagcaaatgtgcggggggctgacacacctttctaacatgggcccacaccctggatccttgcagcttgggcagataagtggcccaagtcaggatggaagcatgtatgctccagctcagttccagccaggattcattcctccccggcatgggggggctccagcccggccaccagactttcctgaaagctcagaaattcctcccagccatatgtatcgatcgtacaagtacctgaatcgagtacactctgccgtctggaatgggaaccatggtgctacgaaccaaggacccttgggcccagatgagaagccccacctggggccaggaccctctcaccagcctcgcactctcggtcacgtgatggattcccgagtcatgagaccacctgtcccccccaaccagtggactgaacaatcaggcttcctacctcatggagttccttcctcagggtacatgcgaccgccctgcaagtctgccggacatcggttacagccacctccagtgccagcacccagttctttgtttggagcacctgcccaggctcttcggggggtgcagggaggggactccatgatggacagcccagagatgattgcgatgcagcagctctcctcccgcgtctgccccccaggtgtgccttaccacccccaccagcctgcacacccccgtttacctggcccttttccgcaggtagctcacccaatgtcagtcactgtgtcagcccccaagcctgccctgggcaaccctgggagggcaccggagaacagtgaagcacaagagcctgagaatgaccaagcagagccgttgcctggccttgaagagaaaccaccaggtgttggtacttcagagggggtctacctcacacaactacctcaccccacacctcccctgcagactgactgcaccaggcagagctcaccacaagaaagggaaacagtgggcccggagctcaaaagcagctnctccgaatctgcggacaactgtaaagcaatgaagggcaagaatcccnggccctcggatagcagctaccccggcccagccgcccaagggtgcgtgagagacctctccacggtggcagacaggggcgctctatccgagaacggagtcattggggaagcatctccttgtggatcggaggggaagggccttggtagcagtggttccgaaaagctgctctgccccagaggcagaacgttgcaggaaaccatgccatgcacgggacagaacgcagcgacaccgcccagcacagaccccggtttgacgggaggcactgtgagccagtttcccccgctgtatatgcctggcctagagtacccgaattcagctgcccattaccacatcagtccaggcctgcagggtgtgggccctgtgatgggagggaagtccccagcatcccatccccagcattttcccccaaggggctttcagtctaaccacccacattctggaggctttccccggtatcgccccccacaaggaatgaggtattcctaccacccaccgccacagccttcctaccaccactatcagcgaactccttactatgcctgtccacagagcttttctgactggcagagacctctccatccccagggaagcccaagcggacccccagccagtcagcctcccccaccaaggtccctcttctcagataagaatgccatggccagtctgcaaggctgtgagacactgaatgctgccttaacttctccaacccgtatggatgcagtggctgctaaagtcccaaatgacgggcagaatcctggtccagaggaagagaagctggatgaatctatggagaggccagagagtcccaaagaatttttagacctggacaaccataacgcagctaccaagcggcagagctcgttgtcagccagcgagtatctctatggaactcctccgcctctgagttcaggaatgggatttggttcatctgcatttccaccccacagtgtgatgctgcagacggggcctccctatacccctcagcggccggccagtcactttcagcccagggcttactcttcccctgtggctgccctcccacctcaccacccaggggccacccagcccaacggcctctctcaggagggtcccatctatcgctgccaggaagaaggcctgggtcactttcaagctgtgatgatggaacaaattggcactagaagtggaataagaggacctttccaggaaatgtacagaccatcaggaatgcagatgcacccggtccagtcgcaggcctcgttcccaaagacccccacagcagcaacatcacaggaggaggtgccgcctcataagcctccaacacttcccctggatcagagctagtccaaggaggaaatgagccccaagcaatggaaagctgcacacgaagactggaatgtggagaactggggagtgccctgtcagctctattcccatcacctgctccaccccttcacggcgacccactcgtgccatacttgagctggagccagtcacgggccctaaaaggacactccttagatgactgacacacagattgcaaaggtcctcggccagggatctcttgcacagctgatgtagacagtcaggcaaaactaatgaacgtggagttaatgatgacttttccaaatcctgagacacttttcagggaaaatcactttaaacttgggggagggggtatactcaagaatggagtggtgcttttaaactttgatgagcagctaaactcaggtatatatttggggaagggactactcttagtattaatggttttggagctgggtccagtttacagaattttcatgttgccttttaaaataatttttgttggtggtgaatgtattgtacataaagtgggaagggtgggtggggatgcggaagaaatgggggtcctaactggtgggcacacagcactggagtgatttttatctgtttacaatcatgtcacactgaatacttatgggagccggagatgagggtaggaaaggtttgatcttgtaatatgtcactgtgtttccttagtggccagccagccttcagaatagctaaaggccttccttccttccagtcagcctgagagagaacacctgtcccctaagcacctggtgtctccattggaggcagactgctctcaggagactactagaagcttcagcccggaagacaggctgctctctcatgctggtggcccaaattgagaaagtggtgtcccttcctgattttgccaccagccctaccgaatagttgtaaaccagtatcaggaattgggatcgctagagtgtttcacgtattagaagatgaatcgtcctcatcacagacctccctgtcaggactgtgatctagaaggcatcacacacagctttctggcacgaatcacattttgtggaagtgactactcaggtttgtatattttagtatcaataaagaattgcacaggtttgaataggaaaaatgtattctatagatttacagtttgaatttaggaatatttcagtatatatagtttttattcgttttaagtgaatcatagtaaaatcagtcatggtgatttaaaatagctatcaagaacaagttcttggaattatctgttgtatctgtgataggaaaccattttacagtattaaattactttattacagttgtagagtt

SEQ ID NO: 105150 - DNA, 2357 bp, Homo sapiens
  misc_feature (175)..(176): n is a, c, g, or t
cgggggttgttgttgtggcgcgggcagccccgccccctcctcgtgggcggcccctcccccaggccccgcgtccggcccctccgcccctagccccatctgtttctccggcggggactcgattatattgtaggggactgggggcggccgccgccgcagccgcgggatggggcgagcnngcggaccccgcgggcagccgcagccgcagccgcctcagtagttcgggcccccgcgccgccgccccccgcccggcgcccgccctcggctcctgcactcgccgagcggcggcagcagcgggaggagcgccccgccgcccccgccgaggaccgcgcggaggctgcggcgctgccgcggcgggagtcccaggtcggcgggcagagcgcgggcagcgaggggccgccgcctgtgccgcagcggggagatgtgcccagaggagggcggcgcggccgggctgggcgagctccgctcctggtgggaggtcccggccatcgcgcacttctgctcgctctttcgcaccgcgttccgcctgcccgacttcgagatcgaggagttagaagccgctcttcacagagatgacgtggagtttatcagtgacctgattgcctgcctgcttcagggctgctatcaacgaagagatatcacgcctcagacattccacagctacctagaggacatcatcaactaccgctgggagctcgaagaagggaagcccaaccctctgagggaagccagtttccaggacctgcctcttcgcacacgggtggagatcctgcaccgactctgtgattaccggctggatgcagacgatgtcttcgatcttctaaagggcctggatgcagacagtctccgtgtggagccattgggtgaagacaattctggggcactatattggtatttctatggaacacgaatgtacaaagaggacccggtgcaaggaaaatccaatggagaactctctttgagcagggaaagtgaaggacaaaaaaatgtctcaagtattcctggaaaaacgggaaaaagaagaggaagacccccaaaacggaagaaactgcaggaggagattctgttgagtgaaaagcaggaagaaaattccttggcatccgagccacagacaagacatgggtcccaagggccaggccaaggtacttggtggctcctgtgccagacagaagaggaatggagacaggtcaccgagagttttcgcgagaggacctcccttcgagaacggcagctctacaagctcctcagtgaggacttcctgcctgagatctgcaacatgatcgcccagaagaggagactcctgtgctgaccagaatagaaaaacaaaagcgcaaagaggaggaagaagagcgtcagattcttctagcagtgcagaagaaggagcaggagcagatgctaaaggaagagaggaaacgcgagttggaggagaaggtcaaggcagtggaaggtatgtgcagtgtccgcgtggtctggagaggtgcatgtctgtcgaccagccgtccttagatcgagcgaagaggagaaagctcagggaagaaagggcatggctgctggctcaaggaaaggagctccctccagaactttcccatctggaccccaattcccccatgagagaggaaaaaaagactaaagacctctttgagttggatgatgatttcactgctatgtataaagttctagacgtggtaaaggctcacaaggattcctggcccttcttggaacctgtggatgaatcttatgcccctaactattatcagattattaaggcccccatggatatttccagcatggagaagaaactgaatggaggtttatactgtaccaaggaggaatttgtaaatgacatgaagaccatgttcaggaattgtcgaaagtataatggggaaagtagtggtaagcagggaaggagtttgtgctagatacatatctgtaatcaagaataaaatgccttctcttttacaaatacacatcctagtgccttttctgtaggacagtgaacagaatgtgtatgaaaagtcatgggattgaccattccagccacttatacagtgtctgccagggattctctcctgccccacaggacaatagagtgcagctggcagctaactggctcatcctggagaccagtctgggtctggattatactgtgtgtgcctctttaaccaccgaggggactgaccctacatagagctgactcttcaaccatctggggaagctggcgtagtagatctgcaatatcaaagtagaaatggctctttctgaacatcacactccggggcctgttgtgaggtgggggaagaggggagggatagcattaggagatacatatacctaatgtaaatgacgagttaatgggtgca

SEQ ID NO: 105151 - DNA, 109 bp, Homo sapiens
caaaggttttgcatctgtgagaaggagctgcattattttaggaagaatcttttggagtctgatgacttgagttcagatttgggctctgacacaaactacgtgagcttag

SEQ ID NO: 105152 - DNA, 1018 bp, Homo sapiens
agtcagtaatactgaatttgagaagtttgtgaactcaactggctatttgacagaggctgagaagtttggcgactcctttgtctttgaaggcatgttgagtgagcaagtgaagaccaatattcaacaggcaggttgctttgaggttgcagctgctccctggtggttacctgtgaaaggcgctaactggagacacccagaagggcctgactctactattctgcacaggccggatcatccagttctccatgtgtcctggaatgatgcggttgcctactgcacttgggcagggaagcggctgcccacggaagctgagtgggaatacagctgtcgaggaggcctgcataatagacttttcccctggggcaacaaactgcagcccaaaggccagcattatgccaacatttggcagggcgagtttccggtgaccaacactggtgaggatggcttccaaggaactgcgcctgttgatgccttccctcccaatggttatggcttatacaacatagtggggaacgcatgggaatggacttcagactggtggactgttcatcattctgttgaagaaacgcttaacccaaaaggtcccccttctgggaaagaccgagtgaagaaaggtggatcctacatgtgccataggtcccaagagtactatgatccctattttcaagatgtggcatctgagatgttgagaagacacacagccagcaggtggaaggccttctcatctctagaaccatgctgctcaatacgtaggcatcagcaatatgcagctattgaacgtttgacatgtggcaagtttgaattgagatgtgctgtaagtacaaaatacacactgaattttgaagacttagtatgaaataaataatgtaaaaaaccccacaaacatttttatattgattacatgttgaaataatattttgaacatattgtgttaaagtatattattaaaattactatcattgttttttactttttaaaatgtggctcaaatttaaaatgtaaatttttgaaactttga

SEQ ID NO: 105153 - DNA, 899 bp, Homo sapiens
agtcagtaatactgaatttgagaagtttgtgaactcaactggctatttgacagaggctgagaagtttggcgactcctttgtctttgaaggcatgttgagtgagcaagtgaagaccaatattcaacaggcaggttgctttgaggttgcagctgctccctggtggttacctgtgaaaggcgctaactggagacacccagaagggcctgactctactattctgcacaggccggatcatccagttctccatgtgtcctggaatgatgcggttgcctactgcacttgggcagggaagcggctgcccacggaagctgagtgggaatacagctgtcgaggaggcctgcataatagacttttcccctggggcaacaaactgcagcccaaaggccagcattatgccaacatttggcagggcgagtttccggtgaccaacactggtgaggatggcttccaaggaactgcgcctgttgatgccttccctcccaatggttatggcttatacaacatagtggggaacgcatgggaatggacttcagactggtggactgttcatcattctgttgaagaaacgcttaacccaaaaggtcccccttctgggaaagaccgagtgaagaaaggtggatcctacatgtgccataggtcttattgttacaggtatcgctgtgctgctcggagccagaacacacctgatagctctgcttcgaatctgggattccgctgtgcagccgaccgcctgcccactatggactgacaaccaaggaaagtcttccccagtccaaggagcagtcgtgtctgacctacattgggctttctcagaactttgaacgatcccatgcaaagaattcccaccctgaggtgggttacatacctgcccaatggccaaaggaaccgccttgtgagac

SEQ ID NO: 105154 - DNA, 391 bp, Homo sapiens
tatttgataacaacagtttttccaacttagatacttctttctccattccaaatagattctgacctaccacagtgtagaatgtcactacatttttcttattatttgagcttttctgagcaaggtgattctgcaacagatctttaaacagctttccaacagtgcaattaaacaatcttaccaaaaaaaaaaaaaaaaaaaaggtaagtgtataagataatggacaggttaatttgcttggtttaccttcccacaatatatgcatattttaaaacatcatgttgtacaccataaatatatacagcttttaatatatacagcttttatttgtcagttaaaaaaccccaaaaacaataaaagtaataataatcacttcaagtgattttcttttctt

SEQ ID NO: 105155 - DNA, 768 bp, Homo sapiens
tcaaatatactctatatttaattataaaaaaattactattatgaataaagctgctataaatactcatgtacaggtctttgtgtagacctatgtttttatttctcttgagtaaatacctagaggtgaaatgatgaggttgtatgggaaatgtgtgctaacttttggcaaattattttccaaagtggccgttccttgttggattcctaatgtataacagttacagttgctccatatcttcaccaatacttaatattgtggtcttttaaattttagcccttctaataggtgtgaagtggcatctcattacggttttaatttgcatttccccaatggctagtgatgttttgcacctctttatgtgcttattggcctaaggaagtacttgttcaaatattttgcctcttaaaattcagtcatctacttcttttgatataggttttttattgggaaataattgtagattacaggaagactcaaaggcacaggagggaggtccaggtccagagcactcttcagctgggcttcccagtgttaacatcttgcataactgtagtacattattgaaaccaggaaattgacattagcacaatccatagagctgattcagatttcattagttatacagatactcatttgtgtgtgtgtgtttgtgtatagctgtatgcaatgttatcatgagtagctttgtatacaccaccaccacaatctagaatgcctaactgtaccggcacctcaagactccttatgctacccctttatagataccca

SEQ ID NO: 105156 - DNA, 784 bp, Homo sapiens
ggtaatgtatgtaatacttctctaaaatggatttgtataaatacataataatctcatgttgctagacaacctaatttggttttcctgctatctttaaccttttccatttaacaaacattcactcataaattctttagttttcccaaactcaattttcacccagtctgtaaatggaataaacaacatagcatcaagaacatcttgttggccaggcgcggtggctcacgcctgtaatcccagcactttaggaggccgagacggacggatcacgaggtaaggagattgagaccatcctggcgaacacggtgaaaccctgtctctactaaaaaaatacaaaaaattagccgggcgtggtggcaggcgcctgtagtcccagctactcgggaggctgaggcaggagaatggcgtgaacccagaaggcggagcttgcagtgtgagccgaaatcgcgccactgcactccagcctgggcgacagagcgagactctctctcaaaacaaaacaaaaaaaaagaacatcttgttgggctttgttgctgcttacgtgggtgtgctcttaacagcatttgaataccaatgatatgctggatcctaattataatgagatacccttatagcatttctaaccgagtcttttgagtggacattacatgttagttaactgtgccagtgctcagattacaatggtgaacatttctgacatggttcctgctcttttggagcacacaccttgagggtgatataggtaaataggtgactacaatccaggtgtgttagaggaagccca

SEQ ID NO: 105157 - DNA, 450 bp, Homo sapiens
agggaaggcctctcaggaagtgacttttaagctgaaaactaagggatgagaaggagccagctataatgtagagcaaagagtatgtgtgtggaatgttctggaaagagggaacagtggatgcaaaggccctaaagtgggaatgagcttggcacattagaaaaaaaaataaccaaggcctgggcggctctggtgtagcaggcatggggaaagagtagtaagggtggaagctaggccagatacatactgagcgcagtggctcaatcttgtaatcccagcactctggggggccgaggcgggtggatcacttgaggtcaggagtttgagaccagcctggccaacatggtgaaaccccggctccactaaaaatacaaaaattagctgggcatggtgatgtgtgcctctaattccagctacttgggaggctgaggcatgacagtcacttgaacccac

SEQ ID NO: 105158 - DNA, 787 bp, Homo sapiens
actttatgtattaaatactaatcataccatatttttcaattctaacatttatataaacatttgtgttgaaatttggttaatttctctgatgtctactctgatcatctggcaagctaatcagtagctattacatttttacattttaagtaaataagaacaaaacccactaaaatatgagttagcagacctttaagcagtttagaaaataaaaaattgctatagatgacatacatttattttgcagcaaagtcatatattgatgggactatttccaaatgtaaattttcaaaatattctctcagaactaataatttctttagagaagctatactgtctttatcattcttgaacacttcctctacttggagggacagattattaattttttcaaaaatatattcttgataagatacctttgacagccacttgtcaccattgaacaggtcagcaaaattgaactcttctcctttttgtatatttaattcatctttaaggttaaactctttgggtattttgctgtgagataccttgttaacctttatgtggttaaaaaagattttcaggccaggtgtggtggctcatgcctgaattcccagcattttgggaggtcaaggtgggcagatcacctgaagtcaggagtttgagaccagcctggccaacacggtgaaaccccgtctctactaaaaatacaaaaaaaaattaggccgggcgtggtggcggatgcctgtaatctgagctacaggggaggctgaggcaggggaatcacttgaacttgggaggcggaggt

SEQ ID NO: 105159 - DNA, 373 bp, Homo sapiens
aaagatgttctgttgtggggctgttcccaggctcagcttcctcacactgaggcagtgcatccagtactgaaataaggaacattgcaatgatgcctggggtcagcaagtggccttgctgacatcacaacatgtgcatttctcactgttcttggttatttaattctggtctggtccattggattagagccagattaaacatcaataaattttgagtttactattaacaaagagcagagtcctgctaccttactgttactttgctaggtgctaagagagaaatcagaaaatttaaggcatggattttggtcacagggagcaaaatctagtcttcattggctaagaagccttaaaaaccatgtaactgtcacatagt

SEQ ID NO: 105160 - DNA, 646 bp, Homo sapiens
tgaaatatttgcagaagtattatactcattgttttttcatctcaactgtttcctcctcttctgaaaactgctcttgtcttgttactcatttcctattctgcctccttcaccttccctacctttatagtgttccttctagtcagtgacaagcaaagtaccaaaaactgtaatacaattacaatagtagttctaagactttatataacctattctctctaatagcatcaggtcccttaattttactatggacttttagattatttaatgtgaatgagggtcttcacttactgagatcatactgttaatttcatatatactgtggtaactgcatttttttttaaagagatagcatcttccagctgggtgcggtggctcacgcctgtaatcccagaactttgggaggccaaggtgggcggatcatgaggtcaggagatcgaaaccatcctggctaacacggtgaaaccccatctctactaaaaaatacaaaaaaaattagccgggcatggtggcaggtgcctgtattcccagctactcgggaggctgaggcaggagaatggcgtgaacccgggaggcagagcttgcagtgagccgagattgcgccactgcactccagcctgggagacagtgagactccatctcaaaaaaa

SEQ ID NO: 105161 - DNA, 465 bp, Homo sapiens
ttgttaagaagtgattcatgatgactgcagagcagagaacaactgagagcacagagaagcactggacccttccaagcaagggactctgtgtgactgcacaggttgcctgtctataaagctggcatagctagaggtgctagtagtaagttggagatgtagactatgaagaaagaagaattgagatttgtaagctttctacttgagggcttaggtgatattgacgcaaccaacagaaatagaggctataagatggagaatggtcccattgtggtggctcaaacctgtgattccagcagtttgggaaagcctaagcgggaggaccttttaaggccaggagtttgagaccaatagctgggcatggaggtgtgagccagtggtccctgctactctggaggctgagctgctaggaatccttgagcccatcaggaggttgaaggacaatagagcaagaccttgtcttgacaa

SEQ ID NO: 105162 - DNA, 298 bp, Homo sapiens
ccacaagaaatgaaaacttaggttcacatacagaatatacacaaatattcatagccaaatgaaaacttaggttcacatacagaatatacacaaatattcatagcccaaatctggaaacaacataaacgtccccaacaggtgaatctacaaacaaattgtggtatatctacacaatgggatactactgagcaatataaagtaaatgaactatcaatatatacaacaacatgaataagtctcaaaattattctcaaacagtagggtttctaggcaatttaagggtgttgtttctctgtag

SEQ ID NO: 105163 - DNA, 522 bp, Homo sapiens
actttttagagacaggatcttgcgttattgctcactgaaggctcgaacacctgggcacaagtgatcatcttgccttagctcctcatgtagctgagactacaggcacacaccaccatgcttgtttctgctttatgtatatgtataaaattttttcgcagaaccgtttgaaaggacgttacagaccagacactgcttctaaagaccagcgtgtgtcttctaagaacaaaggtgttctacaggccggcatggtggctcacgcctgtaatcccagcactttgggaggccaaggcgggtggatctcttaagcccagaacttcaagatcagcctaggcaacatggcgaaaccttctctctgcaaaaaatacaaaaattagctgggcatgatggcacacacctgtagtcccagctactcaggagactgagactggaggatctcttgagcctgggaggttgagactgcagtgagctgtgattgtgctgctgcactcctccagcctgggtgacagagtgagaccctgtctc

SEQ ID NO: 105164 - DNA, 2034 bp, Homo sapiens
atggtagaaccctattggaaaagtggtaatgggaatagaaggagcagttacctttgtatccgcattgttaaaataggcttttatgctgtgctgtgctttcaagaaaccttgtttgacctctggcattttactgatcagtggaccgttgcactggattataatgggattctactatatacaaatccacattgttcttctccctccagccagatttgcagatgtaatctgggctttccaagtccctctgagtttccttcacttttactgatttttttcttctaaatatggtcaagatagcttctgtcacatgttaagtaaataagctgaagaaatttggtcccggctttgttttaatgtacaaaccggtatgtgatcacttcagtgagcatccctctatagatgggctttagtaaagactgtcccaaagagcccctacttctctaatgccccccccttttttttttaggaaaagaacatgcagttttactcatcacttcttcatgacaccaaatccattgctaggtttagctcctggtcccttttcagcaagattcatgttatccgtcttacaactttgattttggaaagtattatgtcctaaaaatgcactgcttaacacagtggggtttttttcccccgaggtgtctttaactggggaagtaccacaaacatagagcagagactttaatttctatattctacaatagaccatcaccaaacatcttatcatgttgttgctttctgagtaataggtgctacgcaggtaggcgggctttctctaggactaggtgtacgtttattttgtaataacagggctatctacaaggcctctcagccttactcctggcttcataggacacaggtagcatccctctagtcattggcaatggctctttcagctcggaggaagcttggaggaaactcagattacttggtatcttttcctgttgctgcattgcttagtgtttccttgttgctgggtcctactctctagtagatactaaactgctgtgaagtacaccatacacatttcactaagattccagagccaccttggtgacataacagaaacaaaatcatgttggttacaaaacaaattaaatctctattgttaacttttaagcatttcacaaacaacattgtaaatgtgcgatgttacgttttaaatcagaccacagtggtccccaaatattatgtacatatggcaatttcataggtaatcgaacctatgctccaatgttaaattatttgtgtatatgtaaaatacacaagctttaagctatgtgtgtatgaatatgaaagttaatgcaaccatatcaattgtaaaaatggattataattatttttgatggtattaggttatgtagtttcaaactctttgctgtattttgttttgcacctgccattcatttgctaatttttgtggcgtggagattcttttttattaatttgagctcacagcacaagtgtatcactgtttaatgttacccaacaagagttagtgttaagtgatgatcaagttcccatttcacctgctctacttttgctgcattaattaatgacacccggatgaggagacgtgcgctaacttcattgctcatctgggatagtgcatgagcccattgaattagagctgctcctactagataactgagcagtacacataagtgcatgttatgaaacatgaatcacatagagcagtggagttttaccaagtggtgtgtgtggtttttgttttttactatgcaaagatgggaaatgcacaaacttttcaaagactagtgtctgaagaactttacaaacaatacttgaaccctttctttaaagttatcccatcatgttttatagtcattgttgcttccattgttagtttccattttcaagtgctttgtaattttttaagtgcactacctgaaattttgtttgaaattaataaattcattcgtatcttgttggctgcctatgaatggagattcagtagtcattgtatgcatctttaagtcaaatgtgtattaaaactttcgttaacgtaga

SEQ ID NO: 105165 - DNA, 2065 bp, Homo sapiens
atggtagaaccctattggaaaagtggtaatgggaatagaaggagcagttacctttgtatccgcattgttaaaataggcttttatgctgtgctgtgctttcaagaaaccttgtttgacctctggcattttactgatcagtggaccgttgcactggattataatgggattctactatatacaaatccacattgttcttctccctccagccagatttgcagatgtaatctgggctttccaagtccctctgagtttccttcacttttactgatttttttcttctaaatatggtcaagatagcttctgtcacatgttaagtaaataagctgaagaaatttggtcccggctttgttttaatgtacaaaccggtatgtgatcacttcagtgagcatccctctatagatgggctttagtaaagactgtcccaaagagcccctacttctctaatgccccccccttttttttttaggaaaagaacatgcagttttactcatcacttcttcatgacaccaaatccattgctaggtttagctcctggtcccttttcagcaagattcatgttatccgtcttacaactttgattttggaaagtattatgtcctaaaaatgcactgcttaacacagtggggtttttttcccccgaggtgtctttaactggggaagtaccacaaacatagagcagagactttaatttctatattctacaatagaccatcaccaaacatcttatcatgttgttgctttctgagtaataggtgctacgcaggtaggcgggctttctctaggactaggtgtacgtttattttgtaataacagggctatctacaaggcctctcagccttactcctggcttcataggacacaggtagcatccctctagtcattggcaatggctctttcagctcggaggaagcttggaggaaactcagattacttggtatcttttcctgttgctgcattgcttagtgtttccttgttgctgggtcctactctctagtagatactaaactgctgtgaagtacaccatacacatttcactaagattccagagccaccttggtgacataacagaaacaaaatcatgttggttacaaaacaaattaaatctctattgttaacttttaagcatttcacaaacaacattgtaaatgtgcgatgttacgttttaaatcagaccacagtggtccccaaatattatgtacatatggcaaatgtcagtgtaactttttgttacactggcaatttcataggtaatcgaacctatgctccaatgttaaattatttgtgtatatgtaaaatacacaagctttaagctatgtgtgtatgaatatgaaagttaatgcaaccatatcaattgtaaaaatggattataattatttttgatggtattaggttatgtagtttcaaactctttgctgtattttgttttgcacctgccattcatttgctaatttttgtggcgtggagattcttttttattaatttgagctcacagcacaagtgtatcactgtttaatgttacccaacaagagttagtgttaagtgatgatcaagttcccatttcacctgctctacttttgctgcattaattaatgacacccggatgaggagacgtgcgctaacttcattgctcatctgggatagtgcatgagcccattgaattagagctgctcctactagataactgagcagtacacataagtgcatgttatgaaacatgaatcacatagagcagtggagttttaccaagtggtgtgtgtggtttttgttttttactatgcaaagatgggaaatgcacaaacttttcaaagactagtgtctgaagaactttacaaacaatacttgaaccctttctttaaagttatcccatcatgttttatagtcattgttgcttccattgttagtttccattttcaagtgctttgtaattttttaagtgcactacctgaaattttgtttgaaattaataaattcattcgtatcttgttggctgcctatgaatggagattcagtagtcattgtatgcatctttaagtcaaatgtgtattaaaactttcgttaacgtaga

SEQ ID NO: 105166 - DNA, 2237 bp, Homo sapiens
atggtagaaccctattggaaaagtggtaatgggaatagaaggagcagttacctttgtatccgcattgttaaaataggcttttatgctgtgctgtgctttcaagaaaccttgtttgacctctggcattttactgatcagtggaccgttgcactggattataatgggattctactatatacaaatccacattgttcttctccctccagccagatttgcagatgtaatctgggctttccaagtccctctgagtttccttcacttttactgatttttttcttctaaatatggtcaagatagcttctgtcacatgttaagtaaataagctgaagaaatttggtcccggctttgttttaatgtacaaaccggtatgtgatcacttcagtgagcatccctctatagatgggctttagtaaagactgtcccaaagagcccctacttctctaatgccccccccttttttttttaggaaaagaacatgcagttttactcatcacttcttcatgacaccaaatccattgctaggtttagctcctggtcccttttcagcaagattcatgttatccgtcttacaactttgattttggaaagtattatgtcctaaaaatgcactgcttaacacagtggggtttttttcccccgaggtgtctttaactggggaagtaccacaaacatagagcagagactttaatttctatattctacaatagaccatcaccaaacatcttatcatgttgttgctttctgagtaataggtgctacgcaggtaggcgggctttctctaggactaggtgtacgtttattttgtaataacagggctatctacaaggcctctcagccttactcctggcttcataggacacaggtagcatccctctagtcattggcaatggctctttcagctcggaggaagcttggaggaaactcagattacttggtatcttttcctgttgctgcattgcttagtgtttccttgttgctgggtcctactctctagtagatactaaactgctgtgaagtacaccatacacatttcactaagattccagagccaccttggtgacataacagaaacaaaatcatgttggttacaaaacaaattaaatctctattgttaacttttaagcatttcacaaacaacattgtaaatgtgcgatgttacgttttaaatcagaccacagtggtccccaaatattatgtacatatggcaaatgtcagtgtaactttttgttacactggcaatttcataggtaatcgaacctatgctccaatgttaaattatttgtgtatatgtaaaatacacaagctttaagctatgtgtgtatgaatatgaaagttaatgcaaccatatcaattgtaaaaatggattataattatttttgatggtattaggttatgtagtttcaaactctttgctgtattttgttttgcacctgccattcatttgctaatttttgtggcgtggagattcttttttattaatttgagctcacagcacaagtgtatcactgtttaatgttacccaacaagagttagtgttaagtgatgatcaagttcccatttcacctgctctacttttgctgcattaattaatgacacccggatgaggagacgtgcgctaacttcattgctcatctgggatagtgcatgagcccattgaattagagctgctcctactagataactgagcagtacacataagtgcatgttatgaaacatgaatcacatagagcagtggagttttaccaagtggtgtgtgtggtttttgttttttactatgcaaagatgggaaatgcacaaacttttcaaagactagtgtctgaagaactttacaaacaatacttgaaccctttctttaaagttatcccatcatgttttatagtcattgttgcttccattgttagtttccattttcaagtgctttgtaattttttaagtgcactacctgaaattttgtttgaaattaataaattcattcgtatcttgttggctgcctatgaatggagattcagtagtcattgtatgcatctttaagtcaaatgtgtattaaaactttcgttaacgtagaatgttgtagctttatgctttaatcatttcttttaaacccccttttctgtttcctcttgtagtgctgattaaatggccatgtgcctgatatcatcagagttttagcatggatccaaaggcttactgaaaatttaagcagtcagtggcacaaaataaaatctctgattaatgat

SEQ ID NO: 105167 - DNA, 964 bp, Homo sapiens
agaccagcctggccaatgtggcaaaaccccatctgtactaaaaatacaaaaattagccagatgtggtgatgcatgcctgtaatcccagctattcaggaggctgaggcagaagaattacttgaacccaggaggcggaggttgcagtgagccaagatggcgcagtgtactccagcctgggtgacagagtgaaactccgtctcaaaaaaacaaaaattagccaggcatggtggcacacacctgtagtcccagctattcaggaggttgaggcatgagaattgcttgaacccaggaggtggtggttgcagtgagccaagatggtaccactgcactccagcctgggtgacagagtcagactctgtctggaaaaaaagaaaaaatatgttattatttactaccactaatctgagtgaattaatttggatattatatctattctaagaacatatctactgttctctagtcctacattttaaacctattttttgtctagatagcctcttttaccagacagaattgatttgtgtttttaaaagtagatattataaattctccaaactagagttcttgtatttcagtcccacgtatgactgcatttggacaaagggtttgctaccaaatgttgtggtactgctgtgatgttgctctgacaaagaagaacataaggaagagcagaagaggaccctgtgtgtcactagggggacttgggggaggcagcagagtatagatagcatttgagccaaagcttaaaggagaaattggaatttttagggcagacaggctcaggaaatacattccaggaagagcgaagagtgcgggtaatgacatggagtcaaaaggctatattccagccaggcacagtgactataatctcagcttctcggcaggttgaggcagggagatcgcttaagtctaggagtttgagactagcctgggcttagcaagaccctgtggcaaaaaaaaaaaa

SEQ ID NO: 105168 - DNA, 287 bp, Homo sapiens
aagaagcaaatagatgataaaataaatacaagaagctatactactatttaagaagttaagttagaagagaaagcagggttgagtagggcaaaagagtggagacattttagcatgtttatgtgctgagagaaatcagcatctaaacatgctcaaatgggagaagggagaaaaatacatggggagaaaagaggttaattaatgaagcaattctgggagacaagagtaaaggtgatagatagatcactcttacataggagagggcactacttcctttggagaggagataa

SEQ ID NO: 105169 - DNA, 379 bp, Homo sapiens
aactttggtatttccatccctagatttatatacagcaggttaggttccgtacataggcaggttctgaataataaaaaccaacagtgatatagcactcactttgtgccatgcactgttctaagcgatttacatacacttaatttttaaaattgtagtaaaatacacataagtttaccatttgaaccattttaaagtgtacaatcggtagcatttaatgcattcaaaatgatgcacacccatcaccattatgtagctccagaacattttcatcactccaaaaggaaacctcttacccattagcagccacttccaattcctccagcccctggaaaccactaatttgttttctacctctacagatttacccattttagatatt

SEQ ID NO: 105170 - DNA, 413 bp, Homo sapiens
gcacgagcctctgaccctggagacagtgtcgccggggcttctggtgccttgtaataagctctacatccctattcctcttctgattttaacaagattcccgagcaggtgaagaaggctcgatcagggcagtggatcatgccgtgatcggtggcgtcgtggcggtggtggtgttcgccatgctgtgcttgctcatcattctggggcgctattttgccagacataaaggtacatacttcactcatgaagccaaaggagccgatgacgcagcagacgcagacacagctataatcaatgcagaaggaggacagaacaactccgaagaaaagaaagagtacttcatctagatcagcctttttgtttcaatgaggtgtccaactggccctatttagatgataaagagacagtgatattgg

SEQ ID NO: 105171 - DNA, 458 bp, Homo sapiens
tcgacagctaacaatcaggctgtattgattttctgtttgcatgctgttatgaatgagtgattttaagcattcaccttcatgtttcatgtcctttgaacagtggagactgaggaatctttctgcctcgattgcgtattaagaacaaaattacataattgaagaaatgtacttatggattaatacattcatgctatcaaaaacatagatagcaagagatttggctcatgtttttaaagaaattcatcctcagttcttaagtgttttgtttatgtccctcgaggaatgaaaagaaaaacgatttgtttttacttgtaaggccttactcagttgcccaattccgcagaagaactggacagtgaggacctctcaggtaagggctagtcattaggtaaggcactgcagtgtccaacctgtgggtgctctatccacttctacaaaatggccgtttggtttctaca

SEQ ID NO: 105172 - DNA, 4861 bp, Homo sapiens
cgccgaacgccagcgccagggggcggggtgggggagggagcgaggccctccgagagccgggttgggctcgcggcgctgtgattggtctgcccggactccgcctccagcgcatgtcattagcatctcattagctgtccgctcgggctccggaggcagccaacgccgccagtctgaggcaggtgcccgacatggcgagtgtagtgctgccgagcggatcccagtgtgcggcggcagcggcggcggcggcgcctcccgggctccggctccggcttctgctgttgctcttctccgccgcggcactgatccccacaggtgatgggcagaatctgtttacgaaagacgtgacagtgatcgagggagaggttgcgaccatcagttgccaagtcaataagagtgacgactctgtgattcagctactgaatcccaacaggcagaccatttatttcagggacttcaggcctttgaaggacagcaggtttcagttgctgaatttttctagcagtgaactcaaagtatcattgacaaacgtctcaatttctgatgaaggaagatacttttgccagctctataccgatcccccacaggaaagttacaccaccatcacagtcctggtcccaccacgtaatctgatgatcgatatccagaaagacactgcggtggaaggtgaggagattgaagtcaactgcactgctatggccagcaagccagccacgactatcaggtggttcaaagggaacacagagctaaaaggcaaatcggaggtggaagagtggtcagacatgtacactgtgaccagtcagctgatgctgaaggtgcacaaggaggacgatggggtcccagtgatctgccaggtggagcaccctgcggtcactggaaacctgcagacccagcggtatctagaagtacagtataagcctcaagtgcacattcagatgacttatcctctacaaggcttaacccgggaaggggacgcgcttgagttaacatgtgaagccatcgggaagccccagcctgtgatggtaacttgggtgagagtcgatgatgaaatgcctcaacacgccgtactgtctgggcccaacctgttcatcaataacctaaacaaaacagataatggtacataccgctgtgaagcttcaaacatagtggggaaagctcactcggattatatgctgtatgtatacgatccccccacaactatccctcctcccacaacaaccaccaccaccaccaccaccaccaccaccaccatccttaccatcatcacagacacaacggcgacgacagaaccagcagttcacgagattcccgagcaggtgaagaaggctcgatcagggcagtggatcatgccgtgatcggtggcgtcgtggcggtggtggtgttcgccatgctgtgcttgctcatcattctggggcgctattttgccagacataaaggtacatacttcactcatgaagccaaaggagccgatgacgcagcagacgcagacacagctataatcaatgcagaaggaggacagaacaactccgaagaaaagaaagagtacttcatctagatcagcctttttgtttcaatgaggtgtccaactggccctatttagatgataaagagacagtgatattggaacttgcgagaaattcgtgtgtttttttatgaatgggtggaaaggtgtgagactgggaaggcttgggatttgctgtgtaaaaaaaaaaaaaaatgttctttggaaagtacactctgctgtttgacacctcttttttcgtttgtttgtttgtttaatttttatttcttcctaccaagtcaaacttggatacttggatttagtttcagtagattgcagaaaattctgtgccttgttttttgtttgtttgttgcgttcctttcttttccccctttgtgcacatttatttcctccctctaccccaatttcggattttttccaaaatctcccattttggaatttgcctgctgggattccttagactcttttccttcccttttctgttctagttttttacttttgtttatttttatggtaactgctttctgttccaaattcagtttcataaaaggagaaccagcacagcttaggatttcatagttcagaatttagtgtatccataatgcattcttctctgttgtcgtaaagatttgggtgaacaaacaatgaaaactctttgctgctgcccatgtttcaaatacttagagcagtgaagactagaaaattagactgtgattcagaaaatgttctgtttgctgtggaactacattactgtacagggttatctgcaagtgaggtgtgtcacaatgagattgaatttcactgtctttaattctgtatctgtagacggctcagtatagataccctacgctgtccagaaaggtttggggcagaaaggactcctcctttttccatgccctaaacagacctgacaggtgaggtctgttccttttatataagtggacaaattttgagttgccacaggaggggaagtagggaggggggaaatacagttctgctctggttgtttctgttccaaatgattccatccacctttcccaatcggccttacttctcactaatttgtaggaaaaagcaagttcgtctgttgtgcgaatgactgaatgggacagagttgattttttttttttttttcctttgtgcttagttaggaaggcagtaggatgtggcctgcatgtactgtatattacagatatttgtcatgctgggatttccaactcgaatctgtgtgaaactttcattccttcagatttggcttgacaaaggcaggaggtacaaaagaagggctggtattgttctcacactggtctgctgtcgctctcagttctcgataggtcagagcagaggtggaaaaacagcatgtacggattttcagttacttaatcaaaactcaaatgtgagtgtttttatctttttacctttcatacactagccttggcctctttcctcagccttaagaaccatctgccaaaaattactgatcctcgcatgatggcagccatagtgcatagctactaaaatcagtgaccttgaacatatcttagatggggagcctcgggaaaaggtagaggagtcacgttaccatttacatgttttaaagaaagaagtgtggggattttcactgaaacgtctaggaaatctagaagtagtcctgaaggacagaaactaaactcttaccatatgtttggtaagactccagactccagctaacagtccctatggaaagatggcatcaaaaaagatagatctatatatatatataaatatatattctattacattttcagtgagtaattttggattttgcaaggtgcatttttactattgttacattatgtggaaaacttatgctgatttatttaagggggaaaaagtgtcaactctttgttatttgaaaacatgtttatttttcttgtctttattttaacctttgatagaaccattgcaatatgggggccttttgggaacggactggtatgtaaaagaaaatccgttatcgagcagcattttatttacccctcccctatccctaggcacttaaccaagacaaaaagccacaatgaacatccctttttcaatgaattttataatctgcagctctattccgagcccttagcacccattccgaccatagtataatcatatcaaagggtgagaatcatttagcatgttgttgaaaggttttttttcagttgttctttttagaaaaaaagaaaaacaaaaacaaaaacaaaaaaaaaaaatcacaccattgctcacagaattggcatctcatttttgggacctcccatctttctgttttgaaaagtgtacagtagtgcagtgttcctgatgtaactttatggcttacaatgttgacatgtctcaggttcatgtgtttcgattggtgttttccgtctcaggtagattgcaaagtgtaggccccacacattggaaaaaataataataaaacaaagcaaaaacaggaaattatggattttagttgtatattggtttatgtattttttcttaagtatacagtgcactgtttgaaatgtattgttgagtattactttgtacaggttgatcactttttttagagtgaagaaagaacaaacttgttttttgtgttttttaaaggaatataaaataatgaaggatgtataattgatgccaaataagcttgttctttagtcacaccgacgtcttatttttccctttaggccagttctgtttttaaggtgtacatggacaatgttacagtgtaagaaactccatatccatatgttcccattcgcattttgtattggttcatgtataccatttttacaaaaaaaaaaagaaaaaaaagaagtactataaaatatctgtcttcttaataaaaaaaaattaggttaaaaaaaaaaaaaaaaaaaaaaaaaaaaaaaaaaaaaaaaaaaaaaaaaaaaaaaaaaaaaaaaaaaaaaaaaaaaaaaaaaaaaaaaaaaaaaaaaaaaaaaaaaaaaaaaaaaaaaaaaaaaaaaaaaaaaacaaataacaggagggggacgcgactataatcatgcgcgggtacactttacgcctccgagtaacgcgagacccctgtgaatagagagaagagcgggaagtgagacagcacaaacaacagaaaggcagagggacgacaaagacggtcagcgcgggtgtgaatatccaggcaagagcacacaccattcgggggtgggagacaacaaagagagacaacaaaacacaaaaccgagaacaacagcactcgaccgagaggaaaaaaacaaaaggagagatgtagacgataacccgagaagtccccgtaagacgaccgcacgacagagagtcacacacacc

SEQ ID NO: 105173 - DNA, 3736 bp, Homo sapiens
cgccgaacgccagcgccagggggcggggtgggggagggagcgaggccctccgagagccgggttgggctcgcggcgctgtgattggtctgcccggactccgcctccagcgcatgtcattagcatctcattagctgtccgctcgggctccggaggcagccaacgccgccagtctgaggcaggtgcccgacatggcgagtgtagtgctgccgagcggatcccagtgtgcggcggcagcggcggcggcggcgcctcccgggctccggctccggcttctgctgttgctcttctccgccgcggcactgatccccacaggtgatgggcagaatctgtttacgaaagacgtgacagtgatcgagggagaggttgcgaccatcagttgccaagtcaataagagtgacgactctgtgattcagctactgaatcccaacaggcagaccatttatttcagggacttcaggcctttgaaggacagcaggtttcagttgctgaatttttctagcagtgaactcaaagtatcattgacaaacgtctcaatttctgatgaaggaagatacttttgccagctctataccgatcccccacaggaaagttacaccaccatcacagtcctggtcccaccacgtaatctgatgatcgatatccagaaagacactgcggtggaaggtgaggagattgaagtcaactgcactgctatggccagcaagccagccacgactatcaggtggttcaaagggaacacagagctaaaaggcaaatcggaggtggaagagtggtcagacatgtacactgtgaccagtcagctgatgctgaaggtgcacaaggaggacgatggggtcccagtgatctgccaggtggagcaccctgcggtcactggaaacctgcagacccagcggtatctagaagtacagtataagcctcaagtgcacattcagatgacttatcctctacaaggcttaacccgggaaggggacgcgcttgagttaacatgtgaagccatcgggaagccccagcctgtgatggtaacttgggtgagagtcgatgatgaaatgcctcaacacgccgtactgtctgggcccaacctgttcatcaataacctaaacaaaacagataatggtacataccgctgtgaagcttcaaacatagtggggaaagctcactcggattatatgctgtatgtatacgatccccccacaactatccctcctcccacaacaaccaccaccaccaccaccaccaccaccaccaccatccttaccatcatcacagattcccgagcaggtgaagaaggctcgatcagggcagtggatcatgccgtgatcggtggcgtcgtggcggtggtggtgttcgccatgctgtgcttgctcatcattctggggcgctattttgccagacataaaggtacatacttcactcatgaagccaaaggagccgatgacgcagcagacgcagacacagctataatcaatgcagaaggaggacagaacaactccgaagaaaagaaagagtacttcatctagatcagcctttttgtttcaatgaggtgtccaactggccctatttagatgataaagagacagtgatattggaacttgcgagaaattcgtgtgtttttttatgaatgggtggaaaggtgtgagactgggaaggcttgggatttgctgtgtaaaaaaaaaaaaaaatgttctttggaaagtacactctgctgtttgacacctcttttttcgtttgtttgtttgtttaatttttatttcttcctaccaagtcaaacttggatacttggatttagtttcagtagattgcagaaaattctgtgccttgttttttgtttgtttgttgcgttcctttcttttccccctttgtgcacatttatttcctccctctaccccaatttcggattttttccaaaatctcccattttggaatttgcctgctgggattccttagactcttttccttcccttttctgttctagttttttacttttgtttatttttatggtaactgctttctgttccaaattcagtttcataaaaggagaaccagcacagcttaggatttcatagttcagaatttagtgtatccataatgcattcttctctgttgtcgtaaagatttgggtgaacaaacaatgaaaactctttgctgctgcccatgtttcaaatacttagagcagtgaagactagaaaattagactgtgattcagaaaatgttctgtttgctgtggaactacattactgtacagggttatctgcaagtgaggtgtgtcacaatgagattgaatttcactgtctttaattctgtatctgtagacggctcagtatagataccctacgctgtccagaaaggtttggggcagaaaggactcctcctttttccatgccctaaacagacctgacaggtgaggtctgttccttttatataagtggacaaattttgagttgccacaggaggggaagtagggaggggggaaatacagttctgctctggttgtttctgttccaaatgattccatccacctttcccaatcggccttacttctcactaatttgtaggaaaaagcaagttcgtctgttgtgcgaatgactgaatgggacagagttgattttttttttttttttcctttgtgcttagttaggaaggcagtaggatgtggcctgcatgtactgtatattacagatatttgtcatgctgggatttccaactcgaatctgtgtgaaactttcattccttcagatttggcttgacaaaggcaggaggtacaaaagaagggctggtattgttctcacactggtctgctgtcgctctcagttctcgataggtcagagcagaggtggaaaaacagcatgtacggattttcagttacttaatcaaaactcaaatgtgagtgtttttatctttttacctttcatacactagccttggcctctttcctcagccttaagaaccatctgccaaaaattactgatcctcgcatgatggcagccatagtgcatagctactaaaatcagtgaccttgaacatatcttagatggggagcctcgggaaaaggtagaggagtcacgttaccatttacatgttttaaagaaagaagtgtggggattttcactgaaacgtctaggaaatctagaagtagtcctgaaggacagaaactaaactcttaccatatgtttggtaagactccagactccagctaacagtccctatggaaagatggcatcaaaaaagatagatctatatatatatataaatatatattctattacattttcagtgagtaattttggattttgcaaggtgcatttttactattgttacattatgtggaaaacttatgctgatttatttaagggggaaaaagtgtcaactctttgttatttgaaaacatgtttatttttcttgtctttattttaacctttgatagaaccattgcaatatgggggccttttgggaacggactggtatgtaaaagaaaatccgttatcgagcagcattttatttacccctcccctatccctaggcacttaaccaagacaaaaagccacaatgaacatccctttttcaatgaattttataatctgcagctctattccgagcccttagcacccattccgaccatagtataatcatatcaaagggtgagaatcatttagcatgttgttgaaaggttttttttcagttgttcttttttttttttttttttttttttttttttttttttggtgttggggggggtggg

SEQ ID NO: 105174 - DNA, 4712 bp, Homo sapiens
ctctgaaccctaagccttcccaggatttcatcgagatcccaaagagtcactcactcacacacgatgaactgcctatacattgggactgtcaacatcaactaacaagacgagattatttattgaaccctcctacctacttctattaagtggctccttgagtttctgtgaggctgaccaaatagcttagctcaagggcaggtgatgggcagaatctgtttacgaaagacgtgacagtgatcgagggagaggttgcgaccatcagttgccaagtcaataagagtgacgactctgtgattcagctactgaatcccaacaggcagaccatttatttcagggacttcaggcctttgaaggacagcaggtttcagttgctgaatttttctagcagtgaactcaaagtatcattgacaaacgtctcaatttctgatgaaggaagatacttttgccagctctataccgatcccccacaggaaagttacaccaccatcacagtcctggtcccaccacgtaatctgatgatcgatatccagaaagacactgcggtggaaggtgaggagattgaagtcaactgcactgctatggccagcaagccagccacgactatcaggtggttcaaagggaacacagagctaaaaggcaaatcggaggtggaagagtggtcagacatgtacactgtgaccagtcagctgatgctgaaggtgcacaaggaggacgatggggtcccagtgatctgccaggtggagcaccctgcggtcactggaaacctgcagacccagcggtatctagaagtacagtataagcctcaagtgcacattcagatgacttatcctctacaaggcttaacccgggaaggggacgcgcttgagttaacatgtgaagccatcgggaagccccagcctgtgatggtaacttgggtgagagtcgatgatgaaatgcctcaacacgccgtactgtctgggcccaacctgttcatcaataacctaaacaaaacagataatggtacataccgctgtgaagcttcaaacatagtggggaaagctcactcggattatatgctgtatgtatacgatccccccacaactatccctcctcccacaacaaccaccaccaccaccaccaccaccaccaccaccatccttaccatcatcacagattcccgagcaggtgaagaaggctcgatcagggcagtggatcatgccgtgatcggtggcgtcgtggcggtggtggtgttcgccatgctgtgcttgctcatcattctggggcgctattttgccagacataaaggtacatacttcactcatgaagccaaaggagccgatgacgcagcagacgcagacacagctataatcaatgcagaaggaggacagaacaactccgaagaaaagaaagagtacttcatctagatcagcctttttgtttcaatgaggtgtccaactggccctatttagatgataaagagacagtgatattggaacttgcgagaaattcgtgtgtttttttatgaatgggtggaaaggtgtgagactgggaaggcttgggatttgctgtgtaaaaaaaaaaaaaaatgttctttggaaagtacactctgctgtttgacacctcttttttcgtttgtttgtttgtttaatttttatttcttcctaccaagtcaaacttggatacttggatttagtttcagtagattgcagaaaattctgtgccttgttttttgtttgtttgttgcgttcctttcttttccccctttgtgcacatttatttcctccctctaccccaatttcggattttttccaaaatctcccattttggaatttgcctgctgggattccttagactcttttccttcccttttctgttctagttttttacttttgtttatttttatggtaactgctttctgttccaaattcagtttcataaaaggagaaccagcacagcttaggatttcatagttcagaatttagtgtatccataatgcattcttctctgttgtcgtaaagatttgggtgaacaaacaatgaaaactctttgctgctgcccatgtttcaaatacttagagcagtgaagactagaaaattagactgtgattcagaaaatgttctgtttgctgtggaactacattactgtacagggttatctgcaagtgaggtgtgtcacaatgagattgaatttcactgtctttaattctgtatctgtagacggctcagtatagataccctacgctgtccagaaaggtttggggcagaaaggactcctcctttttccatgccctaaacagacctgacaggtgaggtctgttccttttatataagtggacaaattttgagttgccacaggaggggaagtagggaggggggaaatacagttctgctctggttgtttctgttccaaatgattccatccacctttcccaatcggccttacttctcactaatttgtaggaaaaagcaagttcgtctgttgtgcgaatgactgaatgggacagagttgattttttttttttttttcctttgtgcttagttaggaaggcagtaggatgtggcctgcatgtactgtatattacagatatttgtcatgctgggatttccaactcgaatctgtgtgaaactttcattccttcagatttggcttgacaaaggcaggaggtacaaaagaagggctggtattgttctcacactggtctgctgtcgctctcagttctcgataggtcagagcagaggtggaaaaacagcatgtacggattttcagttacttaatcaaaactcaaatgtgagtgtttttatctttttacctttcatacactagccttggcctctttcctcagccttaagaaccatctgccaaaaattactgatcctcgcatgatggcagccatagtgcatagctactaaaatcagtgaccttgaacatatcttagatggggagcctcgggaaaaggtagaggagtcacgttaccatttacatgttttaaagaaagaagtgtggggattttcactgaaacgtctaggaaatctagaagtagtcctgaaggacagaaactaaactcttaccatatgtttggtaagactccagactccagctaacagtccctatggaaagatggcatcaaaaaagatagatctatatatatatataaatatatattctattacattttcagtgagtaattttggattttgcaaggtgcatttttactattgttacattatgtggaaaacttatgctgatttatttaagggggaaaaagtgtcaactctttgttatttgaaaacatgtttatttttcttgtctttattttaacctttgatagaaccattgcaatatgggggccttttgggaacggactggtatgtaaaagaaaatccgttatcgagcagcattttatttacccctcccctatccctaggcacttaaccaagacaaaaagccacaatgaacatccctttttcaatgaattttataatctgcagctctattccgagcccttagcacccattccgaccatagtataatcatatcaaagggtgagaatcatttagcatgttgttgaaaggttttttttcagttgttctttttagaaaaaaagaaaaacaaaaacaaaaacaaaaaaaaaaaatcacaccattgctcacagaattggcatctcatttttgggacctcccatctttctgttttgaaaagtgtacagtagtgcagtgttcctgatgtaactttatggcttacaatgttgacatgtctcaggttcatgtgtttcgattggtgttttccgtctcaggtagattgcaaagtgtaggccccacacattggaaaaaataataataaaacaaagcaaaaacaggaaattatggattttagttgtatattggtttatgtattttttcttaagtatacagtgcactgtttgaaatgtattgttgagtattactttgtacaggttgatcactttttttagagtgaagaaagaacaaacttgttttttgtgttttttaaaggaatataaaataatgaaggatgtataattgatgccaaataagcttgttctttagtcacaccgacgtcttatttttccctttaggccagttctgtttttaaggtgtacatggacaatgttacagtgtaagaaactccatatccatatgttcccattcgcattttgtattggttcatgtataccatttttacaaaaaaaaaaagaaaaaaaagaagtactataaaatatctgtcttcttaataaaaaaaaattaggttaaaaaaaaaaaaaaaaaaaaaaaaaaaaaaaaaaaaaaaaaaaaaaaaaaaaaaaaaaaaaaaaaaaaaaaaaaaaaaaaaaaaaaaaaaaaaaaaaaaaaaaaaaaaaaaaaaaaaaaaaaaaaaaaaaaaaacaaataacaggagggggacgcgactataatcatgcgcgggtacactttacgcctccgagtaacgcgagacccctgtgaatagagagaagagcgggaagtgagacagcacaaacaacagaaaggcagagggacgacaaagacggtcagcgcgggtgtgaatatccaggcaagagcacacaccattcgggggtgggagacaacaaagagagacaacaaaacacaaaaccgagaacaacagcactcgaccgagaggaaaaaaacaaaaggagagatgtagacgataacccgagaagtccccgtaagacgaccgcacgacagagagtcacacacacc

SEQ ID NO: 105175 - DNA, 4460 bp, Homo sapiens
gagagagagagagagagagagagagagagagagagtctgtgattcagctactgaatcccaacaggcagaccatttatttcagggacttcaggcctttgaaggacagcaggtttcagttgctgaatttttctagcagtgaactcaaagtatcattgacaaacgtctcaatttctgatgaaggaagatacttttgccagctctataccgatcccccacaggaaagttacaccaccatcacagtcctggtcccaccacgtaatctgatgatcgatatccagaaagacactgcggtggaaggtgaggagattgaagtcaactgcactgctatggccagcaagccagccacgactatcaggtggttcaaagggaacacagagctaaaaggcaaatcggaggtggaagagtggtcagacatgtacactgtgaccagtcagctgatgctgaaggtgcacaaggaggacgatggggtcccagtgatctgccaggtggagcaccctgcggtcactggaaacctgcagacccagcggtatctagaagtacagtataagcctcaagtgcacattcagatgacttatcctctacaaggcttaacccgggaaggggacgcgcttgagttaacatgtgaagccatcgggaagccccagcctgtgatggtaacttgggtgagagtcgatgatgaaatgcctcaacacgccgtactgtctgggcccaacctgttcatcaataacctaaacaaaacagataatggtacataccgctgtgaagcttcaaacatagtggggaaagctcactcggattatatgctgtatgtatacgatccccccacaactatccctcctcccacaacaaccaccaccaccaccaccaccaccaccaccaccatccttaccatcatcacagattcccgagcaggtgaagaaggctcgatcagggcagtggatcatgccgtgatcggtggcgtcgtggcggtggtggtgttcgccatgctgtgcttgctcatcattctggggcgctattttgccagacataaaggtacatacttcactcatgaagccaaaggagccgatgacgcagcagacgcagacacagctataatcaatgcagaaggaggacagaacaactccgaagaaaagaaagagtacttcatctagatcagcctttttgtttcaatgaggtgtccaactggccctatttagatgataaagagacagtgatattggaacttgcgagaaattcgtgtgtttttttatgaatgggtggaaaggtgtgagactgggaaggcttgggatttgctgtgtaaaaaaaaaaaaaaatgttctttggaaagtacactctgctgtttgacacctcttttttcgtttgtttgtttgtttaatttttatttcttcctaccaagtcaaacttggatacttggatttagtttcagtagattgcagaaaattctgtgccttgttttttgtttgtttgttgcgttcctttcttttccccctttgtgcacatttatttcctccctctaccccaatttcggattttttccaaaatctcccattttggaatttgcctgctgggattccttagactcttttccttcccttttctgttctagttttttacttttgtttatttttatggtaactgctttctgttccaaattcagtttcataaaaggagaaccagcacagcttaggatttcatagttcagaatttagtgtatccataatgcattcttctctgttgtcgtaaagatttgggtgaacaaacaatgaaaactctttgctgctgcccatgtttcaaatacttagagcagtgaagactagaaaattagactgtgattcagaaaatgttctgtttgctgtggaactacattactgtacagggttatctgcaagtgaggtgtgtcacaatgagattgaatttcactgtctttaattctgtatctgtagacggctcagtatagataccctacgctgtccagaaaggtttggggcagaaaggactcctcctttttccatgccctaaacagacctgacaggtgaggtctgttccttttatataagtggacaaattttgagttgccacaggaggggaagtagggaggggggaaatacagttctgctctggttgtttctgttccaaatgattccatccacctttcccaatcggccttacttctcactaatttgtaggaaaaagcaagttcgtctgttgtgcgaatgactgaatgggacagagttgattttttttttttttttcctttgtgcttagttaggaaggcagtaggatgtggcctgcatgtactgtatattacagatatttgtcatgctgggatttccaactcgaatctgtgtgaaactttcattccttcagatttggcttgacaaaggcaggaggtacaaaagaagggctggtattgttctcacactggtctgctgtcgctctcagttctcgataggtcagagcagaggtggaaaaacagcatgtacggattttcagttacttaatcaaaactcaaatgtgagtgtttttatctttttacctttcatacactagccttggcctctttcctcagccttaagaaccatctgccaaaaattactgatcctcgcatgatggcagccatagtgcatagctactaaaatcagtgaccttgaacatatcttagatggggagcctcgggaaaaggtagaggagtcacgttaccatttacatgttttaaagaaagaagtgtggggattttcactgaaacgtctaggaaatctagaagtagtcctgaaggacagaaactaaactcttaccatatgtttggtaagactccagactccagctaacagtccctatggaaagatggcatcaaaaaagatagatctatatatatatataaatatatattctattacattttcagtgagtaattttggattttgcaaggtgcatttttactattgttacattatgtggaaaacttatgctgatttatttaagggggaaaaagtgtcaactctttgttatttgaaaacatgtttatttttcttgtctttattttaacctttgatagaaccattgcaatatgggggccttttgggaacggactggtatgtaaaagaaaatccgttatcgagcagcattttatttacccctcccctatccctaggcacttaaccaagacaaaaagccacaatgaacatccctttttcaatgaattttataatctgcagctctattccgagcccttagcacccattccgaccatagtataatcatatcaaagggtgagaatcatttagcatgttgttgaaaggttttttttcagttgttctttttagaaaaaaagaaaaacaaaaacaaaaacaaaaaaaaaaaatcacaccattgctcacagaattggcatctcatttttgggacctcccatctttctgttttgaaaagtgtacagtagtgcagtgttcctgatgtaactttatggcttacaatgttgacatgtctcaggttcatgtgtttcgattggtgttttccgtctcaggtagattgcaaagtgtaggccccacacattggaaaaaataataataaaacaaagcaaaaacaggaaattatggattttagttgtatattggtttatgtattttttcttaagtatacagtgcactgtttgaaatgtattgttgagtattactttgtacaggttgatcactttttttagagtgaagaaagaacaaacttgttttttgtgttttttaaaggaatataaaataatgaaggatgtataattgatgccaaataagcttgttctttagtcacaccgacgtcttatttttccctttaggccagttctgtttttaaggtgtacatggacaatgttacagtgtaagaaactccatatccatatgttcccattcgcattttgtattggttcatgtataccatttttacaaaaaaaaaaagaaaaaaaagaagtactataaaatatctgtcttcttaataaaaaaaaattaggttaaaaaaaaaaaaaaaaaaaaaaaaaaaaaaaaaaaaaaaaaaaaaaaaaaaaaaaaaaaaaaaaaaaaaaaaaaaaaaaaaaaaaaaaaaaaaaaaaaaaaaaaaaaaaaaaaaaaaaaaaaaaaaaaaaaaaacaaataacaggagggggacgcgactataatcatgcgcgggtacactttacgcctccgagtaacgcgagacccctgtgaatagagagaagagcgggaagtgagacagcacaaacaacagaaaggcagagggacgacaaagacggtcagcgcgggtgtgaatatccaggcaagagcacacaccattcgggggtgggagacaacaaagagagacaacaaaacacaaaaccgagaacaacagcactcgaccgagaggaaaaaaacaaaaggagagatgtagacgataacccgagaagtccccgtaagacgaccgcacgacagagagtcacacacacc

SEQ ID NO: 105176 - DNA, 1967 bp, Homo sapiens
  misc_feature (1938)..(1939): n is a, c, g, or t
cgccgaacgccagcgccagggggcggggtgggggagggagcgaggccctccgagagccgggttgggctcgcggcgctgtgattggtctgcccggactccgcctccagcgcatgtcattagcatctcattagctgtccgctcgggctccggaggcagccaacgccgccagtctgaggcaggtgcccgacatggcgagtgtagtgctgccgagcggatcccagtgtgcggcggcagcggcggcggcggcgcctcccgggctccggctccggcttctgctgttgctcttctccgccgcggcactgatccccacaggtgatgggcagaatctgtttacgaaagacgtgacagtgatcgagggagaggttgcgaccatcagttgccaagtcaataagagtgacgactctgtgattcagctactgaatcccaacaggcagaccatttatttcagggacttcaggcctttgaaggacagcaggtttcagttgctgaatttttctagcagtgaactcaaagtatcattgacaaacgtctcaatttctgatgaaggaagatacttttgccagctctataccgatcccccacaggaaagttacaccaccatcacagtcctggtcccaccacgtaatctgatgatcgatatccagaaagacactgcggtggaaggtgaggagattgaagtcaactgcactgctatggccagcaagccagccacgactatcaggtggttcaaagggaacacagagctaaaaggcaaatcggaggtggaagagtggtcagacatgtacactgtgaccagtcagctgatgctgaaggtgcacaaggaggacgatggggtcccagtgatctgccaggtggagcaccctgcggtcactggaaacctgcagacccagcggtatctagaagtacagtataagcctcaagtgcacattcagatgacttatcctctacaaggcttaacccgggaaggggacgcgcttgagttaacatgtgaagccatcgggaagccccagcctgtgatggtaacttgggtgagagtcgatgatgaaatgcctcaacacgccgtactgtctgggcccaacctgttcatcaataacctaaacaaaacagataatggtacataccgctgtgaagcttcaaacatagtggggaaagctcactcggattatatgctgtatgtatacgatccccccacaactatccctcctcccacaacaaccaccaccaccaccaccaccaccaccaccaccatccttaccatcatcacagattcccgagcaggtgaagaaggctcgatcagggcagtggatcatgccgtgatcggtggcgtcgtggcggtggtggtgttcgccatgctgtgcttgctcatcattctggggcgctattttgccagacataaaggtacatacttcactcatgaagccaaaggagccgatgacgcagcagacgcagacacagctataatcaatgcagaaggaggacagaacaactccgaagaaaagaaagagtacttcatctagatcagcctttttgtttcaatgaggtgtccaactggccctatttagatgataaagagacagtgatattggaacttgcgagaaattcgtgtgtttttttatgaatgggtggaaaggtgtgagactgggaaggcttgggatttgctgtgtaaaaaaaaaaaaaaatgttctttggaaagtacactctgctgtttgacacctcttttttcgtttgtttgtttgtttaatttttatttcttcctaccaagtcaaacttggatacttggatttagtttcagtagattgcagaaaattctgtgccttgttttttgtttgtttgttgcgttcctttcttttccccctttgtgcacatttatttcctccctctaccccaatttcggattttttccaaaatctcccattttggaatttgcctgctgggatnngaggaataatttgggtcgcaatatcccc

SEQ ID NO: 105177 - DNA, 1252 bp, Homo sapiens
cgccgaacgccagcgccagggggcggggtgggggagggagcgaggccctccgagagccgggttgggctcgcggcgctgtgattggtctgcccggactccgcctccagcgcatgtcattagcatctcattagctgtccgctcgggctccggaggcagccaacgccgccagtctgaggcaggtgcccgacatggcgagtgtagtgctgccgagcggatcccagtgtgcggcggcagcggcggcggcggcgcctcccgggctccggctccggcttctgctgttgctcttctccgccgcggcactgatccccacaggtgatgggcagaatctgtttacgaaagacgtgacagtgatcgagggagaggttgcgaccatcagttgccaagtcaataagagtgacgactctgtgattcagctactgaatcccaacaggcagaccatttatttcagggacttcaggcctttgaaggacagcaggtttcagttgctgaatttttctagcagtgaactcaaagtatcattgacaaacgtctcaatttctgatgaaggaagatacttttgccagctctataccgatcccccacaggaaagttacaccaccatcacagtcctggtcccaccacgtaatctgatgatcgatatccagaaagacactgcggtggaaggtgaggagattgaagtcaactgcactgctatggccagcaagccagccacgactatcaggtggttcaaagggaacacagagctaaaaggcaaatcggaggtggaagagtggtcagacatgtacactgtgaccagtcagctgatgctgaaggtgcacaaggaggacgatggggtcccagtgatctgccaggtggagcaccctgcggtcactggaaacctgcagacccagcggtatctagaagtacagtataagcctcaagtgcacattcagatgacttatcctctacaaggcttaacccgggaaggggacgcgcttgagttaacatgtgaagccatcgggaagccccagcctgtgatggtaacttgggtgagagtcgatgatgaaatgcctcaacacgccgtactgtctgggcccaacctgttcatcaataacctaaacaaaacagataatggtacataccgctgtgaagcttcaaacatagtggggaaagctcactcggattatatgctgtatgtatacgatccccccacaactatccctgcttggtgcctctggcctcttggtgcctctggcctccttggtgtctctgg

SEQ ID NO: 105178 - DNA, 1576 bp, Homo sapiens
cgccgaacgccagcgccagggggcggggtgggggagggagcgaggccctccgagagccgggttgggctcgcggcgctgtgattggtctgcccggactccgcctccagcgcatgtcattagcatctcattagctgtccgctcgggctccggaggcagccaacgccgccagtctgaggcaggtgcccgacatggcgagtgtagtgctgccgagcggatcccagtgtgcggcggcagcggcggcggcggcgcctcccgggctccggctccggcttctgctgttgctcttctccgccgcggcactgatccccacaggtgatgggcagaatctgtttacgaaagacgtgacagtgatcgagggagaggttgcgaccatcagttgccaagtcaataagagtgacgactctgtgattcagctactgaatcccaacaggcagaccatttatttcagggacttcaggcctttgaaggacagcaggtttcagttgctgaatttttctagcagtgaactcaaagtatcattgacaaacgtctcaatttctgatgaaggaagatacttttgccagctctataccgatcccccacaggaaagttacaccaccatcacagtcctggtcccaccacgtaatctgatgatcgatatccagaaagacactgcggtggaaggtgaggagattgaagtcaactgcactgctatggccagcaagccagccacgactatcaggtggttcaaagggaacacagagctaaaaggcaaatcggaggtggaagagtggtcagacatgtacactgtgaccagtcagctgatgctgaaggtgcacaaggaggacgatggggtcccagtgatctgccaggtggagcaccctgcggtcactggaaacctgcagacccagcggtatctagaagtacagtataagcctcaagtgcacattcagatgacttatcctctacaaggcttaacccgggaaggggacgcgcttgagttaacatgtgaagccatcgggaagccccagcctgtgatggtaacttgggtgagagtcgatgatgaaatgcctcaacacgccgtactgtctgggcccaacctgttcatcaataacctaaacaaaacagataatggtacataccgctgtgaagcttcaaacatagtggggaaagctcactcggattatatgctgtatgtatacgatccccccacaactatccctcctcccacaacaaccaccaccaccaccaccaccaccaccaccaccatccttaccatcatcacagacacaacggcgacgacagaaccagcagttcacgagattcccgagcaggtgaagaaggctcgatcagggcagtggatcatgccgtgatcggtggcgtcgtggcggtggtggtgttcgccatgctgtgcttgctcatcattctggggcgctattttgccagacataaaggtacatacttcactctgagaccaccggagccacagacacagagccatgaacggtgaccaagccccttctgctgctccatgccctgctcgccgcagtgtcccagtcaccaggcctgaaataaatgctggcacgcttgactgtta

SEQ ID NO: 105179 - DNA, 4826 bp, Homo sapiens
cgccgaacgccagcgccagggggcggggtgggggagggagcgaggccctccgagagccgggttgggctcgcggcgctgtgattggtctgcccggactccgcctccagcgcatgtcattagcatctcattagctgtccgctcgggctccggaggcagccaacgccgccagtctgaggcaggtgcccgacatggcgagtgtagtgctgccgagcggatcccagtgtgcggcggcagcggcggcggcggcgcctcccgggctccggctccggcttctgctgttgctcttctccgccgcggcactgatccccacaggtgatgggcagaatctgtttacgaaagacgtgacagtgatcgagggagaggttgcgaccatcagttgccaagtcaataagagtgacgactctgtgattcagctactgaatcccaacaggcagaccatttatttcagggacttcaggcctttgaaggacagcaggtttcagttgctgaatttttctagcagtgaactcaaagtatcattgacaaacgtctcaatttctgatgaaggaagatacttttgccagctctataccgatcccccacaggaaagttacaccaccatcacagtcctggtcccaccacgtaatctgatgatcgatatccagaaagacactgcggtggaaggtgaggagattgaagtcaactgcactgctatggccagcaagccagccacgactatcaggtggttcaaagggaacacagagctaaaaggcaaatcggaggtggaagagtggtcagacatgtacactgtgaccagtcagctgatgctgaaggtgcacaaggaggacgatggggtcccagtgatctgccaggtggagcaccctgcggtcactggaaacctgcagacccagcggtatctagaagtacagtataagcctcaagtgcacattcagatgacttatcctctacaaggcttaacccgggaaggggacgcgcttgagttaacatgtgaagccatcgggaagccccagcctgtgatggtaacttgggtgagagtcgatgatgaaatgcctcaacacgccgtactgtctgggcccaacctgttcatcaataacctaaacaaaacagataatggtacataccgctgtgaagcttcaaacatagtggggaaagctcactcggattatatgctgtatgtatacgatccccccacaactatccctcctcccacaacaaccaccaccaccaccaccaccaccaccaccaccatccttaccatcatcacagattcccgagcaggtgaagaaggctcgatcagggcagtggatcatgccgtgatcggtggcgtcgtggcggtggtggtgttcgccatgctgtgcttgctcatcattctggggcgctattttgccagacataaaggtacatacttcactcatgaagccaaaggagccgatgacgcagcagacgcagacacagctataatcaatgcagaaggaggacagaacaactccgaagaaaagaaagagtacttcatctagatcagcctttttgtttcaatgaggtgtccaactggccctatttagatgataaagagacagtgatattggaacttgcgagaaattcgtgtgtttttttatgaatgggtggaaaggtgtgagactgggaaggcttgggatttgctgtgtaaaaaaaaaaaaaaatgttctttggaaagtacactctgctgtttgacacctcttttttcgtttgtttgtttgtttaatttttatttcttcctaccaagtcaaacttggatacttggatttagtttcagtagattgcagaaaattctgtgccttgttttttgtttgtttgttgcgttcctttcttttccccctttgtgcacatttatttcctccctctaccccaatttcggattttttccaaaatctcccattttggaatttgcctgctgggattccttagactcttttccttcccttttctgttctagttttttacttttgtttatttttatggtaactgctttctgttccaaattcagtttcataaaaggagaaccagcacagcttaggatttcatagttcagaatttagtgtatccataatgcattcttctctgttgtcgtaaagatttgggtgaacaaacaatgaaaactctttgctgctgcccatgtttcaaatacttagagcagtgaagactagaaaattagactgtgattcagaaaatgttctgtttgctgtggaactacattactgtacagggttatctgcaagtgaggtgtgtcacaatgagattgaatttcactgtctttaattctgtatctgtagacggctcagtatagataccctacgctgtccagaaaggtttggggcagaaaggactcctcctttttccatgccctaaacagacctgacaggtgaggtctgttccttttatataagtggacaaattttgagttgccacaggaggggaagtagggaggggggaaatacagttctgctctggttgtttctgttccaaatgattccatccacctttcccaatcggccttacttctcactaatttgtaggaaaaagcaagttcgtctgttgtgcgaatgactgaatgggacagagttgattttttttttttttttcctttgtgcttagttaggaaggcagtaggatgtggcctgcatgtactgtatattacagatatttgtcatgctgggatttccaactcgaatctgtgtgaaactttcattccttcagatttggcttgacaaaggcaggaggtacaaaagaagggctggtattgttctcacactggtctgctgtcgctctcagttctcgataggtcagagcagaggtggaaaaacagcatgtacggattttcagttacttaatcaaaactcaaatgtgagtgtttttatctttttacctttcatacactagccttggcctctttcctcagccttaagaaccatctgccaaaaattactgatcctcgcatgatggcagccatagtgcatagctactaaaatcagtgaccttgaacatatcttagatggggagcctcgggaaaaggtagaggagtcacgttaccatttacatgttttaaagaaagaagtgtggggattttcactgaaacgtctaggaaatctagaagtagtcctgaaggacagaaactaaactcttaccatatgtttggtaagactccagactccagctaacagtccctatggaaagatggcatcaaaaaagatagatctatatatatatataaatatatattctattacattttcagtgagtaattttggattttgcaaggtgcatttttactattgttacattatgtggaaaacttatgctgatttatttaagggggaaaaagtgtcaactctttgttatttgaaaacatgtttatttttcttgtctttattttaacctttgatagaaccattgcaatatgggggccttttgggaacggactggtatgtaaaagaaaatccgttatcgagcagcattttatttacccctcccctatccctaggcacttaaccaagacaaaaagccacaatgaacatccctttttcaatgaattttataatctgcagctctattccgagcccttagcacccattccgaccatagtataatcatatcaaagggtgagaatcatttagcatgttgttgaaaggttttttttcagttgttctttttagaaaaaaagaaaaacaaaaacaaaaacaaaaaaaaaaaatcacaccattgctcacagaattggcatctcatttttgggacctcccatctttctgttttgaaaagtgtacagtagtgcagtgttcctgatgtaactttatggcttacaatgttgacatgtctcaggttcatgtgtttcgattggtgttttccgtctcaggtagattgcaaagtgtaggccccacacattggaaaaaataataataaaacaaagcaaaaacaggaaattatggattttagttgtatattggtttatgtattttttcttaagtatacagtgcactgtttgaaatgtattgttgagtattactttgtacaggttgatcactttttttagagtgaagaaagaacaaacttgttttttgtgttttttaaaggaatataaaataatgaaggatgtataattgatgccaaataagcttgttctttagtcacaccgacgtcttatttttccctttaggccagttctgtttttaaggtgtacatggacaatgttacagtgtaagaaactccatatccatatgttcccattcgcattttgtattggttcatgtataccatttttacaaaaaaaaaaagaaaaaaaagaagtactataaaatatctgtcttcttaataaaaaaaaattaggttaaaaaaaaaaaaaaaaaaaaaaaaaaaaaaaaaaaaaaaaaaaaaaaaaaaaaaaaaaaaaaaaaaaaaaaaaaaaaaaaaaaaaaaaaaaaaaaaaaaaaaaaaaaaaaaaaaaaaaaaaaaaaaaaaaaaaacaaataacaggagggggacgcgactataatcatgcgcgggtacactttacgcctccgagtaacgcgagacccctgtgaatagagagaagagcgggaagtgagacagcacaaacaacagaaaggcagagggacgacaaagacggtcagcgcgggtgtgaatatccaggcaagagcacacaccattcgggggtgggagacaacaaagagagacaacaaaacacaaaaccgagaacaacagcactcgaccgagaggaaaaaaacaaaaggagagatgtagacgataacccgagaagtccccgtaagacgaccgcacgacagagagtcacacacacc

SEQ ID NO: 105180 - DNA, 4779 bp, Homo sapiens
cgccgaacgccagcgccagggggcggggtgggggagggagcgaggccctccgagagccgggttgggctcgcggcgctgtgattggtctgcccggactccgcctccagcgcatgtcattagcatctcattagctgtccgctcgggctccggaggcagccaacgccgccagtctgaggcaggtgcccgacatggcgagtgtagtgctgccgagcggatcccagtgtgcggcggcagcggcggcggcggcgcctcccgggctccggctccggcttctgctgttgctcttctccgccgcggcactgatccccacaggtgatgggcagaatctgtttacgaaagacgtgacagtgatcgagggagaggttgcgaccatcagttgccaagtcaataagagtgacgactctgtgattcagctactgaatcccaacaggcagaccatttatttcagggacttcaggcctttgaaggacagcaggtttcagttgctgaatttttctagcagtgaactcaaagtatcattgacaaacgtctcaatttctgatgaaggaagatacttttgccagctctataccgatcccccacaggaaagttacaccaccatcacagtcctggtcccaccacgtaatctgatgatcgatatccagaaagacactgcggtggaaggtgaggagattgaagtcaactgcactgctatggccagcaagccagccacgactatcaggtggttcaaagggaacacagagctaaaaggcaaatcggaggtggaagagtggtcagacatgtacactgtgaccagtcagctgatgctgaaggtgcacaaggaggacgatggggtcccagtgatctgccaggtggagcaccctgcggtcactggaaacctgcagacccagcggtatctagaagtacagtataagcctcaagtgcacattcagatgacttatcctctacaaggcttaacccgggaaggggacgcgcttgagttaacatgtgaagccatcgggaagccccagcctgtgatggtaacttgggtgagagtcgatgatgaaatgcctcaacacgccgtactgtctgggcccaacctgttcatcaataacctaaacaaaacagataatggtacataccgctgtgaagcttcaaacatagtggggaaagctcactcggattatatgctgtatgtatacgatccccccacaactatccctcctcccacaacaaccaccaccaccaccaccaccaccaccaccaccatccttaccatcatcacagattcccgagcaggtgaagaaggctcgatcagggcagtggatcatgccgtgatcggtggcgtcgtggcggtggtggtgttcgccatgctgtgcttgctcatcattctggggcgctattttgccagacataaaggtacatacttcactcatgaagccaaaggagccgatgacgcagcagacgcagacacagctataatcaatgcagaaggaggacagaacaactccgaagaaaagaaagagtacttcatctagatcagcctttttgtttcaatgaggtgtccaactggccctatttagatgataaagagacagtgatattggaacttgcgagaaattcgtgtgtttttttatgaatgggtggaaaggtgtgagactgggaaggcttgggatttgctgtgtaaaaaaaaaaaaaaatgttctttggaaagtacactctgctgtttgacacctcttttttcgtttgtttgtttgtttaatttttatttcttcctaccaagtcaaacttggatacttggatttagtttcagtagattgcagaaaattctgtgccttgttttttgtttgtttgttgcgttcctttcttttccccctttgtgcacatttatttcctccctctaccccaatttcggattttttccaaaatctcccattttggaatttgcctgctgggattccttagactcttttccttcccttttctgttctagttttttacttttgtttatttttatggtaactgctttctgttccaaattcagtttcataaaaggagaaccagcacagcttaggatttcatagttcagaatttagtgtatccataatgcattcttctctgttgtcgtaaagatttgggtgaacaaacaatgaaaactctttgctgctgcccatgtttcaaatacttagagcagtgaagactagaaaattagactgtgattcagaaaatgttctgtttgctgtggaactacattactgtacagggttatctgcaagtgaggtgtgtcacaatgagattgaatttcactgtctttaattctgtatctgtagacggctcagtatagataccctacgctgtccagaaaggtttggggcagaaaggactcctcctttttccatgccctaaacagacctgacaggtgaggtctgttccttttatataagtggacaaattttgagttgccacaggaggggaagtagggaggggggaaatacagttctgctctggttgtttctgttccaaatgattccatccacctttcccaatcggccttacttctcactaatttgtaggaaaaagcaagttcgtctgttgtgcgaatgactgaatgggacagagttgattttttttttttttttcctttgtgcttagttaggaaggcagtaggatgtggcctgcatgtactgtatattacagatatttgtcatgctgggatttccaactcgaatctgtgtgaaactttcattccttcagatttggcttgacaaaggcaggaggtacaaaagaagggctggtattgttctcacactggtctgctgtcgctctcagttctcgataggtcagagcagaggtggaaaaacagcatgtacggattttcagttacttaatcaaaactcaaatgtgagtgtttttatctttttacctttcatacactagccttggcctctttcctcagccatagtgcatagctactaaaatcagtgaccttgaacatatcttagatggggagcctcgggaaaaggtagaggagtcacgttaccatttacatgttttaaagaaagaagtgtggggattttcactgaaacgtctaggaaatctagaagtagtcctgaaggacagaaactaaactcttaccatatgtttggtaagactccagactccagctaacagtccctatggaaagatggcatcaaaaaagatagatctatatatatatataaatatatattctattacattttcagtgagtaattttggattttgcaaggtgcatttttactattgttacattatgtggaaaacttatgctgatttatttaagggggaaaaagtgtcaactctttgttatttgaaaacatgtttatttttcttgtctttattttaacctttgatagaaccattgcaatatgggggccttttgggaacggactggtatgtaaaagaaaatccgttatcgagcagcattttatttacccctcccctatccctaggcacttaaccaagacaaaaagccacaatgaacatccctttttcaatgaattttataatctgcagctctattccgagcccttagcacccattccgaccatagtataatcatatcaaagggtgagaatcatttagcatgttgttgaaaggttttttttcagttgttctttttagaaaaaaagaaaaacaaaaacaaaaacaaaaaaaaaaaatcacaccattgctcacagaattggcatctcatttttgggacctcccatctttctgttttgaaaagtgtacagtagtgcagtgttcctgatgtaactttatggcttacaatgttgacatgtctcaggttcatgtgtttcgattggtgttttccgtctcaggtagattgcaaagtgtaggccccacacattggaaaaaataataataaaacaaagcaaaaacaggaaattatggattttagttgtatattggtttatgtattttttcttaagtatacagtgcactgtttgaaatgtattgttgagtattactttgtacaggttgatcactttttttagagtgaagaaagaacaaacttgttttttgtgttttttaaaggaatataaaataatgaaggatgtataattgatgccaaataagcttgttctttagtcacaccgacgtcttatttttccctttaggccagttctgtttttaaggtgtacatggacaatgttacagtgtaagaaactccatatccatatgttcccattcgcattttgtattggttcatgtataccatttttacaaaaaaaaaaagaaaaaaaagaagtactataaaatatctgtcttcttaataaaaaaaaattaggttaaaaaaaaaaaaaaaaaaaaaaaaaaaaaaaaaaaaaaaaaaaaaaaaaaaaaaaaaaaaaaaaaaaaaaaaaaaaaaaaaaaaaaaaaaaaaaaaaaaaaaaaaaaaaaaaaaaaaaaaaaaaaaaaaaaaaacaaataacaggagggggacgcgactataatcatgcgcgggtacactttacgcctccgagtaacgcgagacccctgtgaatagagagaagagcgggaagtgagacagcacaaacaacagaaaggcagagggacgacaaagacggtcagcgcgggtgtgaatatccaggcaagagcacacaccattcgggggtgggagacaacaaagagagacaacaaaacacaaaaccgagaacaacagcactcgaccgagaggaaaaaaacaaaaggagagatgtagacgataacccgagaagtccccgtaagacgaccgcacgacagagagtcacacacacc

SEQ ID NO: 105181 - DNA, 4915 bp, Homo sapiens
cgccgaacgccagcgccagggggcggggtgggggagggagcgaggccctccgagagccgggttgggctcgcggcgctgtgattggtctgcccggactccgcctccagcgcatgtcattagcatctcattagctgtccgctcgggctccggaggcagccaacgccgccagtctgaggcaggtgcccgacatggcgagtgtagtgctgccgagcggatcccagtgtgcggcggcagcggcggcggcggcgcctcccgggctccggctccggcttctgctgttgctcttctccgccgcggcactgatccccacaggtgatgggcagaatctgtttacgaaagacgtgacagtgatcgagggagaggttgcgaccatcagttgccaagtcaataagagtgacgactctgtgattcagctactgaatcccaacaggcagaccatttatttcagggacttcaggcctttgaaggacagcaggtttcagttgctgaatttttctagcagtgaactcaaagtatcattgacaaacgtctcaatttctgatgaaggaagatacttttgccagctctataccgatcccccacaggaaagttacaccaccatcacagtcctggtcccaccacgtaatctgatgatcgatatccagaaagacactgcggtggaaggtgaggagattgaagtcaactgcactgctatggccagcaagccagccacgactatcaggtggttcaaagggaacacagagctaaaaggcaaatcggaggtggaagagtggtcagacatgtacactgtgaccagtcagctgatgctgaaggtgcacaaggaggacgatggggtcccagtgatctgccaggtggagcaccctgcggtcactggaaacctgcagacccagcggtatctagaagtacagtataagcctcaagtgcacattcagatgacttatcctctacaaggcttaacccgggaaggggacgcgcttgagttaacatgtgaagccatcgggaagccccagcctgtgatggtaacttgggtgagagtcgatgatgaaatgcctcaacacgccgtactgtctgggcccaacctgttcatcaataacctaaacaaaacagataatggtacataccgctgtgaagcttcaaacatagtggggaaagctcactcggattatatgctgtatgtatacgatccccccacaactatccctcctcccacaacaaccaccaccaccaccaccaccaccaccaccaccatccttaccatcatcacagacacaacggcgacgacagaaccagcagttcacggccttactcagttgcccaattccgcagaagaactggacagtgaggacctctcagagattcccgagcaggtgaagaaggctcgatcagggcagtggatcatgccgtgatcggtggcgtcgtggcggtggtggtgttcgccatgctgtgcttgctcatcattctggggcgctattttgccagacataaaggtacatacttcactcatgaagccaaaggagccgatgacgcagcagacgcagacacagctataatcaatgcagaaggaggacagaacaactccgaagaaaagaaagagtacttcatctagatcagcctttttgtttcaatgaggtgtccaactggccctatttagatgataaagagacagtgatattggaacttgcgagaaattcgtgtgtttttttatgaatgggtggaaaggtgtgagactgggaaggcttgggatttgctgtgtaaaaaaaaaaaaaaatgttctttggaaagtacactctgctgtttgacacctcttttttcgtttgtttgtttgtttaatttttatttcttcctaccaagtcaaacttggatacttggatttagtttcagtagattgcagaaaattctgtgccttgttttttgtttgtttgttgcgttcctttcttttccccctttgtgcacatttatttcctccctctaccccaatttcggattttttccaaaatctcccattttggaatttgcctgctgggattccttagactcttttccttcccttttctgttctagttttttacttttgtttatttttatggtaactgctttctgttccaaattcagtttcataaaaggagaaccagcacagcttaggatttcatagttcagaatttagtgtatccataatgcattcttctctgttgtcgtaaagatttgggtgaacaaacaatgaaaactctttgctgctgcccatgtttcaaatacttagagcagtgaagactagaaaattagactgtgattcagaaaatgttctgtttgctgtggaactacattactgtacagggttatctgcaagtgaggtgtgtcacaatgagattgaatttcactgtctttaattctgtatctgtagacggctcagtatagataccctacgctgtccagaaaggtttggggcagaaaggactcctcctttttccatgccctaaacagacctgacaggtgaggtctgttccttttatataagtggacaaattttgagttgccacaggaggggaagtagggaggggggaaatacagttctgctctggttgtttctgttccaaatgattccatccacctttcccaatcggccttacttctcactaatttgtaggaaaaagcaagttcgtctgttgtgcgaatgactgaatgggacagagttgattttttttttttttttcctttgtgcttagttaggaaggcagtaggatgtggcctgcatgtactgtatattacagatatttgtcatgctgggatttccaactcgaatctgtgtgaaactttcattccttcagatttggcttgacaaaggcaggaggtacaaaagaagggctggtattgttctcacactggtctgctgtcgctctcagttctcgataggtcagagcagaggtggaaaaacagcatgtacggattttcagttacttaatcaaaactcaaatgtgagtgtttttatctttttacctttcatacactagccttggcctctttcctcagccttaagaaccatctgccaaaaattactgatcctcgcatgatggcagccatagtgcatagctactaaaatcagtgaccttgaacatatcttagatggggagcctcgggaaaaggtagaggagtcacgttaccatttacatgttttaaagaaagaagtgtggggattttcactgaaacgtctaggaaatctagaagtagtcctgaaggacagaaactaaactcttaccatatgtttggtaagactccagactccagctaacagtccctatggaaagatggcatcaaaaaagatagatctatatatatatataaatatatattctattacattttcagtgagtaattttggattttgcaaggtgcatttttactattgttacattatgtggaaaacttatgctgatttatttaagggggaaaaagtgtcaactctttgttatttgaaaacatgtttatttttcttgtctttattttaacctttgatagaaccattgcaatatgggggccttttgggaacggactggtatgtaaaagaaaatccgttatcgagcagcattttatttacccctcccctatccctaggcacttaaccaagacaaaaagccacaatgaacatccctttttcaatgaattttataatctgcagctctattccgagcccttagcacccattccgaccatagtataatcatatcaaagggtgagaatcatttagcatgttgttgaaaggttttttttcagttgttctttttagaaaaaaagaaaaacaaaaacaaaaacaaaaaaaaaaaatcacaccattgctcacagaattggcatctcatttttgggacctcccatctttctgttttgaaaagtgtacagtagtgcagtgttcctgatgtaactttatggcttacaatgttgacatgtctcaggttcatgtgtttcgattggtgttttccgtctcaggtagattgcaaagtgtaggccccacacattggaaaaaataataataaaacaaagcaaaaacaggaaattatggattttagttgtatattggtttatgtattttttcttaagtatacagtgcactgtttgaaatgtattgttgagtattactttgtacaggttgatcactttttttagagtgaagaaagaacaaacttgttttttgtgttttttaaaggaatataaaataatgaaggatgtataattgatgccaaataagcttgttctttagtcacaccgacgtcttatttttccctttaggccagttctgtttttaaggtgtacatggacaatgttacagtgtaagaaactccatatccatatgttcccattcgcattttgtattggttcatgtataccatttttacaaaaaaaaaaagaaaaaaaagaagtactataaaatatctgtcttcttaataaaaaaaaattaggttaaaaaaaaaaaaaaaaaaaaaaaaaaaaaaaaaaaaaaaaaaaaaaaaaaaaaaaaaaaaaaaaaaaaaaaaaaaaaaaaaaaaaaaaaaaaaaaaaaaaaaaaaaaaaaaaaaaaaaaaaaaaaaaaaaaaaacaaataacaggagggggacgcgactataatcatgcgcgggtacactttacgcctccgagtaacgcgagacccctgtgaatagagagaagagcgggaagtgagacagcacaaacaacagaaaggcagagggacgacaaagacggtcagcgcgggtgtgaatatccaggcaagagcacacaccattcgggggtgggagacaacaaagagagacaacaaaacacaaaaccgagaacaacagcactcgaccgagaggaaaaaaacaaaaggagagatgtagacgataacccgagaagtccccgtaagacgaccgcacgacagagagtcacacacacc

SEQ ID NO: 105182 - DNA, 4727 bp, Homo sapiens
cgccgaacgccagcgccagggggcggggtgggggagggagcgaggccctccgagagccgggttgggctcgcggcgctgtgattggtctgcccggactccgcctccagcgcatgtcattagcatctcattagctgtccgctcgggctccggaggcagccaacgccgccagtctgaggcaggtgcccgacatggcgagtgtagtgctgccgagcggtgatgggcagaatctgtttacgaaagacgtgacagtgatcgagggagaggttgcgaccatcagttgccaagtcaataagagtgacgactctgtgattcagctactgaatcccaacaggcagaccatttatttcagggacttcaggcctttgaaggacagcaggtttcagttgctgaatttttctagcagtgaactcaaagtatcattgacaaacgtctcaatttctgatgaaggaagatacttttgccagctctataccgatcccccacaggaaagttacaccaccatcacagtcctggtcccaccacgtaatctgatgatcgatatccagaaagacactgcggtggaaggtgaggagattgaagtcaactgcactgctatggccagcaagccagccacgactatcaggtggttcaaagggaacacagagctaaaaggcaaatcggaggtggaagagtggtcagacatgtacactgtgaccagtcagctgatgctgaaggtgcacaaggaggacgatggggtcccagtgatctgccaggtggagcaccctgcggtcactggaaacctgcagacccagcggtatctagaagtacagtataagcctcaagtgcacattcagatgacttatcctctacaaggcttaacccgggaaggggacgcgcttgagttaacatgtgaagccatcgggaagccccagcctgtgatggtaacttgggtgagagtcgatgatgaaatgcctcaacacgccgtactgtctgggcccaacctgttcatcaataacctaaacaaaacagataatggtacataccgctgtgaagcttcaaacatagtggggaaagctcactcggattatatgctgtatgtatacgatccccccacaactatccctcctcccacaacaaccaccaccaccaccaccaccaccaccaccaccatccttaccatcatcacagattcccgagcaggtgaagaaggctcgatcagggcagtggatcatgccgtgatcggtggcgtcgtggcggtggtggtgttcgccatgctgtgcttgctcatcattctggggcgctattttgccagacataaaggtacatacttcactcatgaagccaaaggagccgatgacgcagcagacgcagacacagctataatcaatgcagaaggaggacagaacaactccgaagaaaagaaagagtacttcatctagatcagcctttttgtttcaatgaggtgtccaactggccctatttagatgataaagagacagtgatattggaacttgcgagaaattcgtgtgtttttttatgaatgggtggaaaggtgtgagactgggaaggcttgggatttgctgtgtaaaaaaaaaaaaaaatgttctttggaaagtacactctgctgtttgacacctcttttttcgtttgtttgtttgtttaatttttatttcttcctaccaagtcaaacttggatacttggatttagtttcagtagattgcagaaaattctgtgccttgttttttgtttgtttgttgcgttcctttcttttccccctttgtgcacatttatttcctccctctaccccaatttcggattttttccaaaatctcccattttggaatttgcctgctgggattccttagactcttttccttcccttttctgttctagttttttacttttgtttatttttatggtaactgctttctgttccaaattcagtttcataaaaggagaaccagcacagcttaggatttcatagttcagaatttagtgtatccataatgcattcttctctgttgtcgtaaagatttgggtgaacaaacaatgaaaactctttgctgctgcccatgtttcaaatacttagagcagtgaagactagaaaattagactgtgattcagaaaatgttctgtttgctgtggaactacattactgtacagggttatctgcaagtgaggtgtgtcacaatgagattgaatttcactgtctttaattctgtatctgtagacggctcagtatagataccctacgctgtccagaaaggtttggggcagaaaggactcctcctttttccatgccctaaacagacctgacaggtgaggtctgttccttttatataagtggacaaattttgagttgccacaggaggggaagtagggaggggggaaatacagttctgctctggttgtttctgttccaaatgattccatccacctttcccaatcggccttacttctcactaatttgtaggaaaaagcaagttcgtctgttgtgcgaatgactgaatgggacagagttgattttttttttttttttcctttgtgcttagttaggaaggcagtaggatgtggcctgcatgtactgtatattacagatatttgtcatgctgggatttccaactcgaatctgtgtgaaactttcattccttcagatttggcttgacaaaggcaggaggtacaaaagaagggctggtattgttctcacactggtctgctgtcgctctcagttctcgataggtcagagcagaggtggaaaaacagcatgtacggattttcagttacttaatcaaaactcaaatgtgagtgtttttatctttttacctttcatacactagccttggcctctttcctcagccttaagaaccatctgccaaaaattactgatcctcgcatgatggcagccatagtgcatagctactaaaatcagtgaccttgaacatatcttagatggggagcctcgggaaaaggtagaggagtcacgttaccatttacatgttttaaagaaagaagtgtggggattttcactgaaacgtctaggaaatctagaagtagtcctgaaggacagaaactaaactcttaccatatgtttggtaagactccagactccagctaacagtccctatggaaagatggcatcaaaaaagatagatctatatatatatataaatatatattctattacattttcagtgagtaattttggattttgcaaggtgcatttttactattgttacattatgtggaaaacttatgctgatttatttaagggggaaaaagtgtcaactctttgttatttgaaaacatgtttatttttcttgtctttattttaacctttgatagaaccattgcaatatgggggccttttgggaacggactggtatgtaaaagaaaatccgttatcgagcagcattttatttacccctcccctatccctaggcacttaaccaagacaaaaagccacaatgaacatccctttttcaatgaattttataatctgcagctctattccgagcccttagcacccattccgaccatagtataatcatatcaaagggtgagaatcatttagcatgttgttgaaaggttttttttcagttgttctttttagaaaaaaagaaaaacaaaaacaaaaacaaaaaaaaaaaatcacaccattgctcacagaattggcatctcatttttgggacctcccatctttctgttttgaaaagtgtacagtagtgcagtgttcctgatgtaactttatggcttacaatgttgacatgtctcaggttcatgtgtttcgattggtgttttccgtctcaggtagattgcaaagtgtaggccccacacattggaaaaaataataataaaacaaagcaaaaacaggaaattatggattttagttgtatattggtttatgtattttttcttaagtatacagtgcactgtttgaaatgtattgttgagtattactttgtacaggttgatcactttttttagagtgaagaaagaacaaacttgttttttgtgttttttaaaggaatataaaataatgaaggatgtataattgatgccaaataagcttgttctttagtcacaccgacgtcttatttttccctttaggccagttctgtttttaaggtgtacatggacaatgttacagtgtaagaaactccatatccatatgttcccattcgcattttgtattggttcatgtataccatttttacaaaaaaaaaaagaaaaaaaagaagtactataaaatatctgtcttcttaataaaaaaaaattaggttaaaaaaaaaaaaaaaaaaaaaaaaaaaaaaaaaaaaaaaaaaaaaaaaaaaaaaaaaaaaaaaaaaaaaaaaaaaaaaaaaaaaaaaaaaaaaaaaaaaaaaaaaaaaaaaaaaaaaaaaaaaaaaaaaaaaaacaaataacaggagggggacgcgactataatcatgcgcgggtacactttacgcctccgagtaacgcgagacccctgtgaatagagagaagagcgggaagtgagacagcacaaacaacagaaaggcagagggacgacaaagacggtcagcgcgggtgtgaatatccaggcaagagcacacaccattcgggggtgggagacaacaaagagagacaacaaaacacaaaaccgagaacaacagcactcgaccgagaggaaaaaaacaaaaggagagatgtagacgataacccgagaagtccccgtaagacgaccgcacgacagagagtcacacacacc

SEQ ID NO: 105183 - DNA, 4070 bp, Homo sapiens
gccaggattaccaactaattagaagggtgttactgaaggcatcggatgggagagagtaagtgctggtactgtggttttgaggcagtgtgtgagtctgattttgcctgatgatatcatttgctaaacattatactttgtgtttttgtcacacagataagcctcaagtgcacattcagatgacttatcctctacaaggcttaacccgggaaggggacgcgcttgagttaacatgtgaagccatcgggaagccccagcctgtgatggtaacttgggtgagagtcgatgatgaaatgcctcaacacgccgtactgtctgggcccaacctgttcatcaataacctaaacaaaacagataatggtacataccgctgtgaagcttcaaacatagtggggaaagctcactcggattatatgctgtatgtatacgatccccccacaactatccctcctcccacaacaaccaccaccaccaccaccaccaccaccaccaccatccttaccatcatcacagattcccgagcaggtgaagaaggctcgatcagggcagtggatcatgccgtgatcggtggcgtcgtggcggtggtggtgttcgccatgctgtgcttgctcatcattctggggcgctattttgccagacataaaggtacatacttcactcatgaagccaaaggagccgatgacgcagcagacgcagacacagctataatcaatgcagaaggaggacagaacaactccgaagaaaagaaagagtacttcatctagatcagcctttttgtttcaatgaggtgtccaactggccctatttagatgataaagagacagtgatattggaacttgcgagaaattcgtgtgtttttttatgaatgggtggaaaggtgtgagactgggaaggcttgggatttgctgtgtaaaaaaaaaaaaaaatgttctttggaaagtacactctgctgtttgacacctcttttttcgtttgtttgtttgtttaatttttatttcttcctaccaagtcaaacttggatacttggatttagtttcagtagattgcagaaaattctgtgccttgttttttgtttgtttgttgcgttcctttcttttccccctttgtgcacatttatttcctccctctaccccaatttcggattttttccaaaatctcccattttggaatttgcctgctgggattccttagactcttttccttcccttttctgttctagttttttacttttgtttatttttatggtaactgctttctgttccaaattcagtttcataaaaggagaaccagcacagcttaggatttcatagttcagaatttagtgtatccataatgcattcttctctgttgtcgtaaagatttgggtgaacaaacaatgaaaactctttgctgctgcccatgtttcaaatacttagagcagtgaagactagaaaattagactgtgattcagaaaatgttctgtttgctgtggaactacattactgtacagggttatctgcaagtgaggtgtgtcacaatgagattgaatttcactgtctttaattctgtatctgtagacggctcagtatagataccctacgctgtccagaaaggtttggggcagaaaggactcctcctttttccatgccctaaacagacctgacaggtgaggtctgttccttttatataagtggacaaattttgagttgccacaggaggggaagtagggaggggggaaatacagttctgctctggttgtttctgttccaaatgattccatccacctttcccaatcggccttacttctcactaatttgtaggaaaaagcaagttcgtctgttgtgcgaatgactgaatgggacagagttgattttttttttttttttcctttgtgcttagttaggaaggcagtaggatgtggcctgcatgtactgtatattacagatatttgtcatgctgggatttccaactcgaatctgtgtgaaactttcattccttcagatttggcttgacaaaggcaggaggtacaaaagaagggctggtattgttctcacactggtctgctgtcgctctcagttctcgataggtcagagcagaggtggaaaaacagcatgtacggattttcagttacttaatcaaaactcaaatgtgagtgtttttatctttttacctttcatacactagccttggcctctttcctcagccttaagaaccatctgccaaaaattactgatcctcgcatgatggcagccatagtgcatagctactaaaatcagtgaccttgaacatatcttagatggggagcctcgggaaaaggtagaggagtcacgttaccatttacatgttttaaagaaagaagtgtggggattttcactgaaacgtctaggaaatctagaagtagtcctgaaggacagaaactaaactcttaccatatgtttggtaagactccagactccagctaacagtccctatggaaagatggcatcaaaaaagatagatctatatatatatataaatatatattctattacattttcagtgagtaattttggattttgcaaggtgcatttttactattgttacattatgtggaaaacttatgctgatttatttaagggggaaaaagtgtcaactctttgttatttgaaaacatgtttatttttcttgtctttattttaacctttgatagaaccattgcaatatgggggccttttgggaacggactggtatgtaaaagaaaatccgttatcgagcagcattttatttacccctcccctatccctaggcacttaaccaagacaaaaagccacaatgaacatccctttttcaatgaattttataatctgcagctctattccgagcccttagcacccattccgaccatagtataatcatatcaaagggtgagaatcatttagcatgttgttgaaaggttttttttcagttgttctttttagaaaaaaagaaaaacaaaaacaaaaacaaaaaaaaaaaatcacaccattgctcacagaattggcatctcatttttgggacctcccatctttctgttttgaaaagtgtacagtagtgcagtgttcctgatgtaactttatggcttacaatgttgacatgtctcaggttcatgtgtttcgattggtgttttccgtctcaggtagattgcaaagtgtaggccccacacattggaaaaaataataataaaacaaagcaaaaacaggaaattatggattttagttgtatattggtttatgtattttttcttaagtatacagtgcactgtttgaaatgtattgttgagtattactttgtacaggttgatcactttttttagagtgaagaaagaacaaacttgttttttgtgttttttaaaggaatataaaataatgaaggatgtataattgatgccaaataagcttgttctttagtcacaccgacgtcttatttttccctttaggccagttctgtttttaaggtgtacatggacaatgttacagtgtaagaaactccatatccatatgttcccattcgcattttgtattggttcatgtataccatttttacaaaaaaaaaaagaaaaaaaagaagtactataaaatatctgtcttcttaataaaaaaaaattaggttaaaaaaaaaaaaaaaaaaaaaaaaaaaaaaaaaaaaaaaaaaaaaaaaaaaaaaaaaaaaaaaaaaaaaaaaaaaaaaaaaaaaaaaaaaaaaaaaaaaaaaaaaaaaaaaaaaaaaaaaaaaaaaaaaaaaaacaaataacaggagggggacgcgactataatcatgcgcgggtacactttacgcctccgagtaacgcgagacccctgtgaatagagagaagagcgggaagtgagacagcacaaacaacagaaaggcagagggacgacaaagacggtcagcgcgggtgtgaatatccaggcaagagcacacaccattcgggggtgggagacaacaaagagagacaacaaaacacaaaaccgagaacaacagcactcgaccgagaggaaaaaaacaaaaggagagatgtagacgataacccgagaagtccccgtaagacgaccgcacgacagagagtcacacacacc

SEQ ID NO: 105184 - DNA, 1586 bp, Homo sapiens
cgccgaacgccagcgccagggggcggggtgggggagggagcgaggccctccgagagccgggttgggctcgcggcgctgtgattggtctgcccggactccgcctccagcgcatgtcattagcatctcattagctgtccgctcgggctccggaggcagccaacgccgccagtctgaggcaggtgcccgacatggcgagtgtagtgctgccgagcggatcccagtgtgcggcggcagcggcggcggcggcgcctcccgggctccggctccggcttctgctgttgctcttctccgccgcggcactgatccccacaggtgatgggcagaatctgtttacgaaagacgtgacagtgatcgagggagaggttgcgaccatcagttgccaagtcaataagagtgacgactctgtgattcagctactgaatcccaacaggcagaccatttatttcagggacttcaggcctttgaaggacagcaggtttcagttgctgaatttttctagcagtgaactcaaagtatcattgacaaacgtctcaatttctgatgaaggaagatacttttgccagctctataccgatcccccacaggaaagttacaccaccatcacagtcctggtcccaccacgtaatctgatgatcgatatccagaaagacactgcggtggaaggtgaggagattgaagtcaactgcactgctatggccagcaagccagccacgactatcaggtggttcaaagggaacacagagctaaaaggcaaatcggaggtggaagagtggtcagacatgtacactgtgaccagtcagctgatgctgaaggtgcacaaggaggacgatggggtcccagtgatctgccaggtggagcaccctgcggtcactggaaacctgcagacccagcggtatctagaagtacagtataagcctcaagtgcacattcagatgacttatcctctacaaggcttaacccgggaaggggacgcgcttgagttaacatgtgaagccatcgggaagccccagcctgtgatggtaacttgggtgagagtcgatgatgaaatgcctcaacacgccgtactgtctgggcccaacctgttcatcaataacctaaacaaaacagataatggtacataccgctgtgaagcttcaaacatagtggggaaagctcactcggattatatgctgtatgtatacgatccccccacaactatccctcctcccacaacaaccaccaccaccaccaccaccaccaccaccaccatccttaccatcatcacagattcccgagcaggtgaagaaggctcgatcagggcagtggatcatgccgtgatcggtggcgtcgtggcggtggtggtgttcgccatgctgtgcttgctcatcattctggggcgctattttgccagacataaaggtacatacttcactcatgaagccaaaggagccgatgacgcagcagacgcagacacagctataatcaatgcagaaggaggacagaacaactccgaagaaaagaaagagtacttcatctagatcagcctttttgtttcaatgaggtgtccaactggccctatttagatgataaagagacagtgatattgg

SEQ ID NO: 105185 - DNA, 670 bp, Homo sapiens
gctaggctgatctcgacctcctgacctcaagtgatctgcctgcctcagcctcccaaagtgctaggattacaggcatgagccaccatgtacaagttttaagtagtaagttttcagaatctttatatctgtgtaacttgcttcataaactgctcatttcagcaacttcacataagggagcttaataacttattagtaactgtggtaatgatgacaaataaagcagtttgaatcattctgaatatgttactatttacttccaaatgttcagagtttagagcatgtagatttaaaagttcagatgactgttgccatgagccacacaaaagggcaccaagtctcctgagatgggaaaaagaaattgatttctctgtgttttttatactccacaacactcttgaaaagcactttctgggcacataactattgatctactgctctggggtaaatatgagatcacatgaaaatgaaacgtgtcattcttttgattcatgcaagatgccttttaaagttcatcagagtcataaaagcatgtgggcatatgtaggctccattcacctgcaataaaacgagaattagggagggctgatgttccttttaaatttgactctgagtattctgtttcattatcacagaaatgtagtaaacatataatgcctaaaactagtattat

SEQ ID NO: 105186 - DNA, 254 bp, Homo sapiens
tggacctctttctccatgtgaatgaactttgaaaagagcttgtacacaatctactaagcaagaggatgactggtagaatattaagcatgcaggaccacatcctatttatctgtaaaccatggtaaattccaattaccactgatgcctattagaagattttaagcagtatgataatataacattcaatatttaaaatgtcactctgagcaatttctggagatgattagacaacaaattggacacaagaaaagctc

SEQ ID NO: 105187 - DNA, 318 bp, Homo sapiens
atacacaccactgcagacaaatgacaaattacaccatctgcttgccaagcacagtatctgattaataatttgcagactgacagcaacagtgcactcccagcatggagacttagtttctccaagatcacctttagcctttctaagatctcctatgtctcaccttattctacatatggctagccagttttcccaacaccatttattaaacagggaatcctttccccatttcttgtttttgtcaggtttgtcaaagatcagggtcgtagatgtgtggtattatttctgagtgctccgttctgttccactggtctgtatctc

SEQ ID NO: 105188 - DNA, 411 bp, Homo sapiens
ggatgaccctgggactcatacagtgtttctggacgcttttatagatactgcgagatgctgttttactgaagttgagattgtgttataagtatttctgactcatttagtgttgttttggggtttttagtctctttgcgtgccacaaagatgtctagcataaatctcataccatgaactcaggtgtgcaaaaaatataaatttcttttccatctatgtaacgtaagccaaaaacctgggagttatccctgagcttccctctttcctgtattcccactgttcctggccaccgccccccacagccatgtacaatgcattggcgaattctgacagttccttcaaagtatatcatgtattcactaacttctcttcatctctctaataccacccaaatctaatcattaatatcacctg

SEQ ID NO: 105189 - DNA, 204 bp, Homo sapiens
tcaaaggtgcaggactcagagtgggcctgggtgctgaggctccaggcaggaccactgatgtctcccccggcttggcaggcacacagcaggtacccaggagcacctgccagctggcccccagcaacgcctggctccatctcaccgagagaggccgaggaccttctagaagcttggctgacccttccttcattcccgactccggct

SEQ ID NO: 105190 - DNA, 1474 bp, Homo sapiens
gataattgcatttgagaattaatttagctagattaatttataactaacttaatcagatatctataaattcacttgtttagacaaagtataatttattgtacatttaatgtgaacagatgaataaataaccacactatttttattgcctcccaaattgtggaacttcatgctaccacataatacagtttatgacttgtgactaacaggcttgagtgatggctgaaatgtcaaatacagaaaaaatttagcaaacatgaattcttttttaaaaagattaacataaacagatatttcagaatttttttgatcattctaatgaatcaccttgtttttccccctctgccatttgaagccactattctatagtatggatataaattgtgaaactgttttcctgtgatcaagatttatgtgtgttcacgtcctctctctcttctctttccctttctctcccctttcctctcctcccctcttcctctctttcctttcctcttccccctcttattccaaataatgctgttatcagcatccttgtatttatattcttgaatatttgtgtaaatgtgtaggtaacagattactaggagtgaatttgattggtcagatggcatacatatttaaaataatcagctactgccatgttacccaaaaacattctgataatttgcactctcaccaatgatcattgaaatatttctagtcacacaattggtagaaagggaaaaggcctgtgtgtagaaaggagaataaaacacaaacatatcagatattctaatgatagtaaaagatgaatgttacctcttaaggagatagagcataggcagtaaaagaatacagataaaagatttttttaactcctagaatctattcattaaggccatagtgagaaagttgtcacctaatatcttgtcttctgatttcccttcagtacttagtagcaaaaaaacagttggcccatacctttagaaaatgtttcttataacccctaatagacatatctaatgtttaattatattttttaatctgcagagcagatgtttagtgcaggaagcattttgatggttcttctttcatttaggaagacttgtggaagagagactttagtttcataacttgacagaatttggttctctgtgactactaacaggagaaaatggagaggatgagatttagaaactaaggcaaatcaagatgaaaacatccggctggggacaatgactcacgcctataatcccagcactttgggaggctgaggcaggtgggtcacttaggccaggagtttgagaccagcctggccaacatggtgaaaccccatctctactaaaaatacaaaaattagctaggcgtggtggcgtgttcctgtattctcaactactgaggaggctgaagcacaagaatctctggaacctaggaggtgaggtggcagtgagctgagatcgcaccactgaactctagcctggacggcagagcaaga

SEQ ID NO: 105191 - DNA, 116 bp, Homo sapiens
tgggagtagcgaggtagaacactgtacgaaatgtttactgtgcaatttcattgaagttcaaaatcaagtgcctcattaccagcattccgttagattttcatttgtaatcatctctt

SEQ ID NO: 105192 - DNA, 407 bp, Homo sapiens
cttcacaatcactttgagagcaccaactctgggccaggtggtggatccggatgtacagaggtcatgtaggcataaagaagtttccaatctcatagtgagcaaattaatactaaagagaaccattaagctttaaatgtatttttaaaattctgctcctctgaagcccattcccacatgttcttttagtccccagatgtgtcagcgatgtaagctatgcctttcaaccagggcatggcacgttttgggtagttaaatgatttgggaggctggcacttagtacttaatcagatgctaggtgccctgctatgctagaaaccagcctccactcacatgacaatagcaccccactgataaacactgggaacggtgggggtgcactggtttcctatggctactctaacactacc

SEQ ID NO: 105193 - DNA, 550 bp, Homo sapiens
gggtggggctttaggtgatgtgcctgtcattgacttgcatggaaggagaattggtctgagtacagtgggcagaggttggtcaggggtctggaagagaaacaattgaaaataaaagactaaagggtctgagttagaagaatgtggttagacacatgagagtaggtatacagtatgcctactagaaaggattcaccatggaagaggtacgaaacaactaagcagacaaaatgactcagccagttgatgtcagccaatcttttttttgttttgttgtttgaggcagagtttcactctgtcaacaggctggagtgcagtggcatgatctgggctcactgcaacctccacctcccgggttcaagtgaatctcctgcttcagcctcccaagtagctgggactacaggtgtgtgccaccatggccagctaatttttgtagttttagtagagatggggtttcaccatgttgggccaggatggtctcgatctcttgacctcgtgattcacctgtctcggcctcccaaagtgctagggttagaggcgtgagccaatcttt

SEQ ID NO: 105194 - DNA, 332 bp, Homo sapiens
cctcggaagccatccctgatacaagtccccagctttcctgcttcccctcttgtggtgtgtggctttgtctccctccctccctcctggaagccccgacctctgaggcaggtgtaaagggtgtgtgctttggtggccacggccaccctgtggtgctggttctcctccgagggaagcagtgcactcctggtcatcttggagacgcccaacacaggaccccacaggcaccaagctttttttgggaaatggtttcacttcccacttgaaaagccctgaatgtcagttccacacttagtgaatttgatccaagctaaactgagtctgtgcctaaaact

SEQ ID NO: 105195 - DNA, 943 bp, Homo sapiens
gggagtttataatctagacagataggatttgtacaggcaacaatagggcagatttgggcaaatcccattacagagcagtatgcaaagtaccatgggaccacagatgaggtgtccggggaagaagtgacatatccctgccctacagcggctccctacctggtggaatgggtgagtaaaaagataggatggaaggagatcagtactcccatagggatagaatactgtgggaacataagagagacaggaggttgggggcaagagagggacatcaatttcggcctgctgactgaggagaggagggggttttagtcaaaaagaattgccattcaagaaccacagatattcagtatggcgggggtgtgatgagggagcctgctagagctgttcccgtgctgagttctgaaaggtcaggaattcatcctggggccagaaatggccaataggtaacaccggtgccatcacttaccctgtgacagctacctcagactgtactaatctatcagtaatttgtcctcttgagttggtctccacatttttctcaacagcgtgcttactgtcctgtaagttaaaacacatttgtcattgtggatgtagggaataggccgttggagggtgtcttggtctgctctggctgctgctgctaagtaccttagattgatggctggacacgggtggctcatgcctgtaatcccagcactttgggaggccgagacgggtggatcacgaggtcaggagatcgagaccatcctggctaacacagtgaaacctcacctctactaaaaatacaaaaaattttgccagacgtgatggcacacgcctataatcccagctacttgggaggctgaggcaggagaatcgcttgaacctgggaggcggagcttgcagtgaaccaagatcacgccactgcactccagcctgggcgacagagtgagactccgtctca

SEQ ID NO: 105196 - DNA, 444 bp, Homo sapiens
gcgcagcaaccatatgatcccactggattgatgaaatagagatttggtaaagatctagtctaagaagctttacattttttaaaaaagcaggtatagaatagcttctaattgcagttcttgaattcactgtctccctgtattttgaatgtttggtagtttaagcctattatccttcctgctttactttttaatttatttgtatcagtttaacaggtagtattttaagttctcagattcttacagttatatgaaacattaatataccgtggtccctttctccaccaatacatgtacctcaagtattagagatggtgttattttgtaaagtatttcagttctttccggtaataaccttgcttgttatccaagtatttcttccgtttcagtttatgtcacattcaacacttttagtctccttttgttaactgttaacattttctatag

SEQ ID NO: 105197 - DNA, 355 bp, Homo sapiens
gagacccctaaaataaaggcccacacctccaaccaactgatcttcaagaaaatcaacaaaaataaacaatgaggaaaggataccctattcaataagtggtgctgggaaaactggctaaacatatgcagaagaatgaaactggatccctatctctcaccatataaaaaaattaacttgagatggattaaatacttaatataagacctccaactataaaaatcttaaaagcaaacctaggaaatactcttctaagactttggcctaagcaaggaatttatgaagacctcataatatatgcagcaaaataaatgcagcaaataaaaggaatttatgaagacctcataataaatgcagc

SEQ ID NO: 105198 - DNA, 340 bp, Homo sapiens
gtccagacagatgaaggcaggaaggattagttttgatcatgcctgctgggtgtatgagtcacattctacctggtaattatttttgacatttgacagttctaggcacaaccttttgcagctctgaaatcttggcaggccatttatttttgaagcttcatattttccttttcacaggatatacctatttgggtaccctgttcaaattaaggtagagatttttgaagagtcacaagcccggaggaaaatgtagagtttcaggaaagaactcatcacttagcaacaacaacaacaacaacgacaacaacaacaacaacaacaacaacaaaagtgtgacctttac

SEQ ID NO: 105199 - DNA, 731 bp, Homo sapiens
gcgtgaaccaccgcgcccggcatattgctgcaagattctcgctcagagtcttctctgccttgtgtgtggtgtggttataaaggtcttcaacatgaccctctgtggcatttagtgttgttccacacaaagagaaagatcctacagcagcccatatgtcctactcttgttgcagacgaggaattattttgtcaagaggttatgaattttccctcatgctttgtcactaactttgaaaaacttactaatctgaggggtttagcaggagctcttcagtctcagcctcccctctcagtatctctctcgttctggcaagtattcagtacaattgggagtcatatctatacacacgcaaagttagagtaatatttgtttgtttattttatcaaagatctagtttattttcaggtttcttacagaagcttttttttgagctttttcaaaatgggaaaaggggaacgatgtaaagcaggcaaagatgtatattttccatctctaataatctgaaaacttattttttggaataaaaatacaatgcatgattaaaggatacccacttataagggtagaatttcatacatatttcatagttttaagggttcattaagactttaaaatctctatttggtatcaatttttctcttgccaatctgtgctgtgtgtatgtgtgtgcatgtgtacattggtgggtatttatttgtaaaaatgtataaagtatttcaaaagaaagtgtg

SEQ ID NO: 105200 - DNA, 412 bp, Homo sapiens
aatatgtgtcgtatggtgctattctttcatgaagctggataaaacagcctactcaggttttttttaaagggtgcatttcactaacataaaaaaaaaaacctgatctccacatttgacattaacctccccctaatatacaatacaagtatctactggctttatatatatacatagatagacgatatagatagcaatagatccatacaggttgctatggatgtattctgaaaaaagatataagattatattttgtatttagaaaatgagaaagaccaatacttggtacacacaggtgtgaaaatttactatcactggttgaccatccccctctttgtcatgaggcctcagaatcctcatcgatagaattcaaacaacataaaccaataaagaaatggtacatgctatgactctt

SEQ ID NO: 105201 - DNA, 576 bp, Homo sapiens
gcatgttgaaaacctaagcatcaaagtcaactgattcaatcattaatttcagtgtaagttgcattacctcttatctagattaatactttaagagtttcccaagaaatatcttaactccaatctggcacatgcaccaaatccacctgaaaatctaaatcttcctcaaccattttcactgtgtcattcctctgctgaaaaccaactattgttctctattatctatcaatcgggtctatacataactctggctatataagcccaccatgatttgacctaatccaatctattcaacttcccttctgtggtgagaacggtaggttaaatgcggttacacattctttgtagttccatcaaccaagatgcagtatctatttcttccatttttgaatatgggtaggcctcttgacttgcaatgaacagaatgtggcagaattgacactgtgttacttctgatgctcagtctcaagaggccatgcaattcctgctattttcctcttggaacactaccatgtaagaaatctgggctatccttccagaaaagaaatatggaagtgagccagttaatggtcgacctaa

SEQ ID NO: 105202 - DNA, 151 bp, Homo sapiens
gggctaaataaaagcacgcgggtggcacactgaaatgtcgtagaaggcaggaagccccgctactatgaacctacaactctccgtttgcggctgacgcatcgctcctgcccgcacgcacctgggtccgtgccaacagcaccgggcagccctc

SEQ ID NO: 105203 - DNA, 356 bp, Homo sapiens
ctgccttggcctcccaaagtcctggggttacaggtataagccaccccatacggcctgattcttttaaaaacagcgtttgggcttgcaccccagacgtttcacttggaggccctgaatgggaccacgccctcttccccaaggcaccatcacacacacacagggctccagcctgtcggacccacgatgcgatggacggccagacggcccacctgggctacggtccacctgggcagtggctccccctctttgggcctctgcttcctcacctgcagaactggggtaaataacagtgcccaggtccgggtgggcaggcatgagaggttaaggaccacacttgagtcctcactccagccaat

SEQ ID NO: 105204 - DNA, 294 bp, Homo sapiens
taatctacaatacagctgcactgttggtagaagtgagaatctaactggtggctggagtgaggtggcataatcacagctgaatgcagcctcaatctcccaggcttaagagatcctccctcctcagcctcctgagtagctgagaaaacaggcatgtgccaccatggccagctaactttttaaattttttttaagagatgggggtctcactgtgttactcaggctggtcttaaattcctgagctcaagctatcctcccacctcatcctcccaaagtgttggaattacaggcatgagc

SEQ ID NO: 105205 - DNA, 307 bp, Homo sapiens
tccaacaggaagaatggaaagtctaagatataagaagcaataatgagtaaagaaagtggcaatatttgggttaatatttgggaattaatttaattttaattaattaattaaaagtgggaatatttgtgttaatctaagtattaattgcttgaaataataatgtctcataactttaaaagtttggcagaaaatatgtgaaaatatagcagatcagtcaaaaaaggacaacttcaaatttttgtactgaaatccttgtatagttgagaaaaagaaaaaagatacctataaacttaattttgataagtat

SEQ ID NO: 105206 - DNA, 263 bp, Homo sapiens
agagcttcatggaagaaggggcttttgagctgggctttgggaaatgattagcatttcttggagcgggaaaataaatctgggtagtaggattgcataagacatgagggccaggatattctagtgttttaatgacagagtagagttgttttgttgaaataaatattgtgcatgaaggagaatgatgcagaataactaaaaataaacccattaaaccttatatcagttttagaaggaatcttaatagttatcatttctgatctttt

SEQ ID NO: 105207 - DNA, 394 bp, Homo sapiens
ctgttcccagcaggccaggagtgtgacttcacggtgaagcgtcacgtccaagttactctgtacgtggcaatgccagctacccacaagaaaggagggctgtgaagggggagctggggccgcttctgggtaatggatttcccccgcccccatttctggcaaagagctctgtggtcacagaattaaaaaaatctatcaattgtaagctaaggcacatgctgggtggaagtgagagtgagggaacctattcttatcactagctctgaggtaagatagaaatgtctggaagctccccgcttgcagctgggaactgtgccttagtcatctttatgtttccatggctttgcacaaagtaggtgctcaggaaatgcttgttcaataagcaaaccacaaggac

SEQ ID NO: 105208 - DNA, 309 bp, Homo sapiens
tacattttgtgctttggggaataactcaaattccataaacaaaactattagtacaaatgttttctggacaatctgtgctgtgattttggaaattgtgtgtgaaagaggagagtagctgggcgtggtggctcgcgcctgtaatcccagcactttgggaggccgaggagggtggatcatgaggtcagttcaagaccagcctggccaagatggtgaaaccctgtctctactaaaaataaaaaaaatagccaggcatggtggtgggtgcctgtaatcccagctactcgggaggctaaggcagagaattgcttg

SEQ ID NO: 105209 - DNA, 400 bp, Homo sapiens
cccctctataaaatatgaaacatctcatagttaaatggtattgcaaaaacatttaagtacaatggtatttataactaaataaataattgttgaggtacagaaataaatgaaatgttcccatcctaatcaaacaggtgatgaagcaatggtgtgatctctaaaacacaaatattcacctccccctgccctcgccaaatcaccccaaatactaggctttcaacgaatgccacattcaatgacacagtgctttgataaaagtcatgtgtgactgagtggggttgccaagaatagccaaggtagcaatggccaacagtgaaaggatgtttgggatgtgccagcgaacatttgaggcattaataaaaataggatatgagagttttaataaaagaatatcacacct

SEQ ID NO: 105210 - DNA, 512 bp, Homo sapiens
tcacatttcatgtttcatctacctaataagcataattcttcccttgcagaactagtgggggtgaaatatgagattgtagaaagcataaggatttgggtcacagaaggttctgagcttctcccaacaccttcttcctatggcctgtctctgccttagcctttagccaactccatcttattctttaatgagtctgtcatcacagatagatggagagcttcttgtaattctttctaacctttgcatgaaatttcaattcaggataatggctgtgtctagggagggaaggaaggagatcggaattgggtagagggacaggagtaggggaatagggaatcattctttaatattttatttattaagctgggtggcgcatacatgtatattcgattaactaattatatttttcacttgaaatatttgatagtctcaagaaagcagcctatatacctatttttactactgaggtgcttcccttgggagcaggtaaaatgaacacacagctgaattctttt

SEQ ID NO: 105211 - DNA, 223 bp, Homo sapiens
atatcttctcccaggtaggtgtggccagctgattacttattcccagggagctggagcagcaggaaggaatggcctggaaactggaaataatcccatttgccggggtaagctagctgtggaaaactgaccaggctgtgggtaccgagagagcagcttcctgctaaacttcctgctgtgggtgaagggcagcgtttaaagagtaagatggtgctccccattccag

SEQ ID NO: 105212 - DNA, 452 bp, Homo sapiens
aaagagggaaaataaagttaccgagctgatcaatgactaaagtagcacaggtaggtagtcatatcaagcctagaaatttagtcattggacttgactaggtttacctaaggtgaatggatgtacagcagaggatttatctacctataaaaaatgatgtgtgccttttggtgacaatttagcccacccgttgaatccattcctaaattaacctatctcggcattcaaagagaaaacatggatcaatatgaagaaaaatggactgatagaagacagtgaactctaatcctagctgttgagtgaatattaagtgtttttctaaatagcattaaataactttctgggagatgttaacaggatgctggggttggaaagatgttgagaaaagtagtttagtgtatcttcctcttatggggtctgggctgctgacacagctgactctgcaactgaagggt

SEQ ID NO: 105213 - DNA, 774 bp, Homo sapiens
tgcttacaggtccccagccctgcccggctgggtggcagtggaggcccgtcgagaatttgagcatggcacgggcaggccggctgtgctgggggacctggcgcccccctctgcagctgctggcccaggtgctaagcccctcactgcccccgggctgggggcgcaggccggctgctcggagtgcgggggcctgccgagcccacgcccacccggaactcacgctggcctgcaagtgtgcgcccaaccctggttcccaccagcgcctctccctccacacctccccacaagcagagggagccagctccagcctcggccagcccagagtggagctcccacagtgcagcggcaggctgaagggctcctcaagcgcggccagagtgggcgcggaggtcgaggaggcgccaagagcgagcgagggctgccagcacgctgtcacctctcactatgaacaattggcaggacagtcatggtctggacctaaggaaggtttgctcagggctgacctacccacgagcagctgctcctggcagtctgagcgcctttcatatttcctgtattaaccttgtggcgcacaaagacagcatcgagaacaagctaatgagaatcatccctctcatcatggaacccgcatcccctgcctcaaaccaagccatgtgcacatgcacacttgatgatagcagaatcgaggcatctgttgacatttgtcttctttttgtttctagagtgtggtgggatgcctccatcactgtagcactgtcagatgggcgacagccttat

SEQ ID NO: 105214 - DNA, 955 bp, Homo sapiens
ccaaagaatatctggtctctgaggtactgggaaatgaggcaaaagtgtctctcttcactgctagctccttggggaccagcaagcggctctcaagttgcgtggtggcccaactggaaaaaaggcagttcggtgcatcctgggaatatccaggtgaaagtgtgagatttacctagaatagcttctgggcctctggggttttcacgctgtctctggtgaaggtgtccattttagaactgaagcaaaaaggtttcaatccgttccgttttctttgtatagcacttacccagtagctccatacaagtgagcactcagtaattaattttctcctagtccttgcattacactttctttgggatggaaatttctattttatgctccagaatagccatttctaactcacccatatggcctcaaagagttgggacttaaacataagcctataagcactcagattattgagaagtatgcataaaaaatggacaagctgaagatatggacaattttactgatgtttaattgcacaattgttaaaattgcatcactgccatcgaggtcaatttgacttaagtaactctgtttagaaatatgaattatgatataaaaacaattaagcaagcaatacttttatgttatttaaaaccttgctgtataggaaaagctacttttaggccaggcacaatggctcacacctgtaatcccggcactttgggaagctgaggtgggaagatcgcttgagctcaggagtttgagagcagcctgggcaacatagcgagacctcatctctactaaaaatacaaaaaattagtcaggcatggtgtcgtgcacctgtagtcccagctgcttgggaggctgaggcaggaggatcacttgagcccaggagattaaggctgcagtgagctgtgatcgtgccactgcactccagcctggatgacatagagagtccctgtctcaagaa

SEQ ID NO: 105215 - DNA, 458 bp, Homo sapiens
taaatttgcaaccgcgtcgacgcacaattgttaaaattgcatcactgccatcgaggtcaatttgacttaagtaactctgtttagaaatatgaattatgatataaaaacaattaagcaagcaatacttttatgttatttaaaaccttgctgtataggaaaagctacttttaggccaggcacaatggctcacacctgtaatcccggcactttgggaagctgaggtgggaagatcgcttgagctcaggagtttgagagcagcctgggcaacatagcgagacctcatctctactaaaaatacaaaaaattagtcaggcatggtgtcgtgcacctgtagtcccagctgcttgggaggctgaggcaggaggatcacttgagcccaggagattaaggctgcagtgagctgtgatcgtgccactgcactccagcctggatgacatagagagtccctgtctcaagaa

SEQ ID NO: 105216 - DNA, 297 bp, Homo sapiens
atgatatattttttcattctttactttcaacctgtatttatatttaaaaagcatctttttaaaacaacatagcattaaatcttgcattttatccagtgttaatatgtttgctttttaattggagagtttattccatttatatgtaatgtaattatttataacatgattgtctctattgcaattttattcataccctccattttcattcctatgttccccattttctgttttcctttgaaatcctttgttcctcattttctgttttcttttgacttgattaaatatttttcatattcc

SEQ ID NO: 105217 - DNA, 992 bp, Homo sapiens
agtctcaattcaagtcagtataaggctttaagaggggaatgctaaaattaacagtttaatgcatttaattccttgtcatcctaatgtttttacagactgaacagtttaaaataataacgtttacagtgaatatacctccaaagcagactttttaaaaaagggaaaaacaccaggccacatttctaagatttaaattgaaggtgaagagtaacactttgctttctgatctttagtacagcaaaatgtggcaataatttttctttttaaatgacataacatatagattcatcagaaaaaccagcataaagaaaatggctatcaaaaaagagaagagtgttttacatacagaggaagaacatatcaagcaataaattgtgaatcagcctgcttactaaaaaggctgagctctactgattatggtaaatttagagcaaaaaatgttactgggcaaaattatactcaaactgtaataatcccattatctacatatacactgctttcattctactcatcagagaaacacatatttaccttttataatggaattacagaaaagcagttgatgactggtttgcaaggcccttcaggatcactgacctgaaattcttgactctctgaaagttgcctttaggttttgttcacttgtgatcctaagtattggtcttcaagctgaatttcattaaatactgacacttgaaactacaggaaacatctttcctttgacaagtctttgagaaggactcgacaacacttgcaaatactcatttcccaacacatttttaagataaagaatcaccacaactgccaccaccacaccatattttcaacttctgctctaatccaataataaaaccaaatttggtaatcaagtacacttaagtagggaacacctaaaccaattaatttttcacaggggttcccccttcataatatgcttcctgtttcaattcccatatgaaaaatccagctgaacttcaaaagccaccacttat

SEQ ID NO: 105218 - DNA, 679 bp, Homo sapiens
attttttctaggattgtcttgaccttgtatcaaaattatagaaatctctttataaaaaaatctctctgaagagttcagcatcccaggctgagctctactgattatggtaaatttagagcaaaaaatgttactgggcaaaattatactcaaactgtaataatcccattatctacatatacactgctttcattctactcatcagagaaacacatatttaccttttataatggaattacagaaaagcagttgatgactggtttgcaaggcccttcaggatcactgacctgaaattcttgactctctgaaagttgcctttaggttttgttcacttgtgatcctaagtattggtcttcaagctgaatttcattaaatactgacacttgaaactacaggaaacatctttcctttgacaagtctttgagaaggactcgacaacacttgcaaatactcatttcccaacacatttttaagataaagaatcaccacaactgccaccaccacaccatattttcaacttctgctctaatccaataataaaaccaaatttggtaatcaagtacacttaagtagggaacacctaaaccaattaatttttcacaggggttcccccttcataatatgcttcctgtttcaattcccatatgaaaaatccagctgaacttcaaaagccaccacttat

SEQ ID NO: 105219 - DNA, 295 bp, Homo sapiens
tgagtcaatattaaatggcattctttgtgtcactaagctgaactcccttgtcttctaaggaagcatttctaatgccagaggtagtcagccaagctaggttccttatctttttagttctatggaaaaacatatcaagttctcttatgagtgctttcctggaaatcagatgagaaagaaaaaaaagtaacaatgtaacaaatcattgtgatgttgttatattgtcgacagataaaggatggatttgatcctgcgtctgaaactaagtaggtaatggtatctacaatatagatcatgc

SEQ ID NO: 105220 - DNA, 298 bp, Homo sapiens
gctggtgcctgtaattccagcttcttgggaggctgaggagggaggtttgctcaaggcccggagtttgagaccagcctgggcaacacagttagaccccggcgggggcaggggagtgagtttctgggtggcctctcaccccagggtgcaccttacaatgaccacgaggtgccaggaaccagggttggtttggcatccacacagggtcaaaaaaatttaatggatctttgttctctgaaagggaacaggaaggtaaacacaggctgccactatttttgttcagtaactggaaaggctgctc

SEQ ID NO: 105221 - DNA, 464 bp, Homo sapiens
atcaatcagagacctaaatgtaaaacaaaactataaaacccctagaacatcacataggaggaaatctaggtgaccttgggtttggcagtaactctttagatatgacaccaaaggcatgatcctcgaaagaaaacattaataggttgggcttcattaaaataatacatttctggctcatgcctgtagtcccagcactttgaggggccaaggtgggagggtcacttgggctcaggagttggagaccagcctggataacagtgaaaccccatctgtacaaaacagtcagaagattaggcaggtgtggtggtgcgtgcccgttgtcccagctactcggaacactgaggtgggaggattgcttgagcctgggaggccgaggctacagtgaactgtggttgcgcggctgtgctcttaacttgcgtgacaaagtgagaccctgtctcaataaaataattaatgaaactgaa

SEQ ID NO: 105222 - DNA, 275 bp, Homo sapiens
gtttggggacagtgactccctttctcccctaagcctatcctggtttgggtttgtgtgacttgcaaacaaagaatctggtcccatagagtagtcgtgctttgtttaaggggtttcttttttttttttttttttgcagccatgaagatgattttatttatctatagttatggttgacatttttcatgcataaaaacttctattgctcaagaaaaaagttaagtacttcctatggaaacaatagacaaatgacaacaagaaatttacaaagaaagaaa

SEQ ID NO: 105223 - DNA, 301 bp, Homo sapiens
gacaaaaagcttatctttcgtttttagcatatgtataaacagaacaaaataaaaacagcaagccttaatatctttcgtttctcattttaatcttgctaaaaaatatttaatcatttgtataaaaatattgcaagcaacaaaagcgtattgtggtaatagttctacaactcaataaatttaataaaaatcagtggatgagtgaattttatatacataaattataccttgataaagctgtttttaaaagttctaaatcaaaggtgaaccaaaccagtatttcattcaaacaagtccatgggaa

SEQ ID NO: 105224 - DNA, 318 bp, Homo sapiens
ggggaataatttacttacagtaaaatgcagaaactttaagtttacacctaggcactattttagatctggcaatattgaattaaagcctgtgctcctatgaagttggccaaaaaaaatcatcagctctgaaaagacaaatcaatcagcaggtcttaaagacagtgagttagtagaaactgccctgagattgaaagacagaggtttaactttattttttaaattcttttaaaaattttattaccagaaaagtaattttgaaaaatattctagattagtgataaattatttgatagatttgcaaataaaactataaatttt

SEQ ID NO: 105225 - DNA, 371 bp, Homo sapiens
tcatgcagtgactagtatgatgtcttcctttacccaagctagtatggcttttttctcttattatttatgtatcaaggaacctcctcaaggttagctgctattataagaaacaactggaaattgtctttgaagtaccacacagaagaaacttggcttgtttcctatctgtttatgattgtttatgctaatgtatggattgtccttcagttgtcaatttctattccagaaacctggcaatacttttgtgcacgtgtgtgtgtgtgtgtgtgtgtgtgtgtgtgtgtgtgttttgaggtgaaattcacataacaaaaaaatagtaaaaaatacttgaaagcatacaattcagtgacatttggtacatttacagt

SEQ ID NO: 105226 - DNA, 354 bp, Homo sapiens
attattgaaaaacaaaacagtaaaacgcatctcagtctccatagttttataggtacatctcatttggtacaagtagaacctgtaatgtttatagaattgaaatgtaaatcagtttcttctgaacttatttgtgtgatttaaagttgctactttttatttattaatcttatagggatatgttgaaaaacaagattttaaatatggattaaaatataaataattttattaaccaaaaatgtcagtttattggaaacataaacaattttgtgtctgttgggtgaaaagtagaatatgttgttttatgcatatgatagattattttccttaacatttaacagtttaacaagttatttt

SEQ ID NO: 105227 - DNA, 401 bp, Homo sapiens
taaacagacatttctaagaagacatatgaatgggcaataagcacatgaaaagatgctcagcatcattagctattggagaaatgcaaatcaaaatcacaaaaagatactgctatgcaccgactaagaaggctgcaacctagaaagcagctaatagcagtgctcatgaggatgtggagaaattggaacctttgtatactgctggtgggaatgtcaaatgaggcggccacttgggaaaacagtctggcagttcttcagtatgttgactgctaatagatgttatggttgcacaactctgtgaatacactgtaagtccttggtttgtataatttaaatgggtgaattacatggtatgtaaattatatcacaataaagctgttattaaatgacattttacaagctta

SEQ ID NO: 105228 - DNA, 379 bp, Homo sapiens
tgccatgttgctcagactggtctcaaactcctgagttcaagcaatccacctgccttggcctcccaaagtgctgggattacagatgtaagcgactgcttacatagagcttttacactttttacataggccggcatagtgcttttgatctgaagtagctttcttcgtattgctgctttttctctcttcagctcagttatttattcattcacctagtgtttattgagcgtgtactaggtggtgatccactaggcactggcgatttcatggtaaacaagataggtaatgtccttgccatacagaccctacttacagagatgttaagttggaggatgttacacagtcgtagttgagcaactaggcagactgagttatttcagag

SEQ ID NO: 105229 - DNA, 241 bp, Homo sapiens
gccccagccagcgatcttcctcaagggttcatcctcaaggttctcctgcatcccggctccctgagctcagccatgcccacgacttgacgagatcaactccttgacttctctgatgacaaagcccccagggtccagccctgacctcactccagagttcagacacatctccgccagggtgtccttcaggtcccctaaacccagcatcagctcttggctcttccactactctctgggggatttg

SEQ ID NO: 105230 - DNA, 371 bp, Homo sapiens
acatccacacacaaacctattatccacatgtacacacacatacacacagacctattacacatgtacacacgcacacatgtgcagacacatgcacacatccacaaacataactattatgtagctacatgcttacacacacctgcacacatacagacacacatgcactcacacatccatacacaaaactattgcatgcacactcacaggcacatgtgcacataaaaacagacatacacattcagacccatgcacatgcccccacacacctattacacacatgctcacacacacaggtgtgctgacacacaaacacgcactaaggcacacatgtccatgcacatatctagtacacatgtgctcacacacacaaa

SEQ ID NO: 105231 - DNA, 775 bp, Homo sapiens
gaaaaatagtccataatccatctacccaaaggtaatttactagtaaaattttggcttatttttttctagcttatctcattttaactgaatattcaagtaaaacctgaatgtattctaactgtaaaatattctggatggcataactagattgactatgtgatagattacctttagtttctttccccggaagtaactactgtcaatttatggtactatgtttaatcctttatctgtgatttgaaatgtaagcatatttacatgtagatcttttaaaaaaggattctccatatacaccttcagcttgcctttttacagtatttcttagcacttttcatgtcaatacatgaagataaatcttactgtatttaaacattgcatagtattccatggatacacctttacttaacacctctaagttgttttctttttactattataaactgtacagtaattaacaatatccttgtaaacatgtcttagaacacattggtatatatttctttagaatagatctctggtaatgaaatttttgagtcaatattatgtatgttagatattgccaaattgccctccagggaaagttctaccgtttatattcataacaggaatgttatttttctggccactgatggcaaaataattaatttaaaaattaatacttatttttaatatgtttattagctacatttatattttttgtgagttacctatttgtgtcctttgcccattttctagatttttttgtcttcctttttgatgtataggaactctttct

SEQ ID NO: 105232 - DNA, 480 bp, Homo sapiens
ctcgcgaacgtgttatcctatattaacctataaacatgggaaaagaagagggcacatacattaaatccttccatttgggaaagaagatcatggtaaacaaggtatgtcatatcctcacagatgggaattctgtttcttggtctgaaagtggagttagttttttggccaaccaatttgggcggttacagaaccaaacactgcctccacagttgctgaaagattcatctcaattcttcattgttgctcttttctgtgttcacatttcccgtgggtgtatctgataggtggaagttaagctatgtgtctgccctgtagaggcaagggattctggggatgtgaatttcctgtattctaccttgggaatgtagaactcataatgtgagaagttatccaagacgtaggatgaatgttgaaaatatatcagtcgcaaacgataaatgtatcctacgtcttggataacacgttcgcgaggggatcctc

SEQ ID NO: 105233 - DNA, 354 bp, Homo sapiens
tacagtcttgggacctgggtcctggccctggttctgcattaccaggggaagtgttctctgcagcctcagtttccctcatctgtaatggaaggggtttcaacaacatcatctctgacatttctccaggctctgacattctgagatacacctaaatgtagctgatggcacaggatttgaaattgggagacctgtgttcaagcctgtatctcacttcttagtgacttggtgactgtgagtgaatcactttaaccccccaaagccccagttcccacatctctcaaatggggacacttgaaatttcctcatgaatattgaatgggttatagaagatgacatggcataaatgtgatttaa

SEQ ID NO: 105234 - DNA, 1423 bp, Homo sapiens
agcgggagagcgcagcgcgcctctccccggccgggcggacacttggttcattccagccgcagaagctcagggctcccgcgtaccgggattttttccgagcagaaaaaagctccagagctctcctgacctcctttctcctcggcggcgagcggagcctctccctcggcgctgccggccgcgccatgccgcgctcgcggggacgggagctggggcgctgcggctgccccgcggggagggctcgcggcgaaaccgggatttcggcgcttgtgccgggcgccgggagccgctggggccgcccgccgccgccaacgccgccgcctctgctgctgttgctgggctgtgggttgctcagcgtctcggccgccgcgggccagaactgcacgttccaactgcacggtcccaatgggacagttgagagcccagggttcccatatggctaccccaattacgccaactgcacgtggaccatcaccgcggaagagcagcacagaatccagcttgtgttccagtcctttgccctggaagaggactttgatgtcctgtcggtgtttgatggtccaccccagccagagaatctgcgtacgaggctcacaggctttcagctgccagccaccattgttagtgcagccaccaccctctctctgcgcctcatcagcgactatgcagtcagtgcccaaggcttccacgccacctatgaaggtaagtgcctccctcatcggccacaggagccggagatgtgatgtcctaatagccacaagcaggactgcattgctcacagatgcagggaagtgttcttcagacccagagcttgcgcctgtcctgacaaggctggttactaaccagtaactcagttacttaaattgtccctcttggttcccaggaaactgagaattgaaatcaaagctcatgtgcagtagtttatcctgagggcctggtaacatctacttctctgtcccctttaactgggttttgttgtgtttttatttttttaattctgttttatattgggcttcattgtataaggtacctcaggttgtttttgaaaataaaagacatataaaccctaagtaaaagaaataaaataagcaactgaaaacaccatacaatgactgccaagagtcagttttatatcattcagagaagaacaatcgatttttccttaatagcatggattaggggcttttggtttgtgctatgcaaataatttgtacttctctcagtctgtttaaatatggtgttagaattcaaattaacactaatatcttcagattatacactattattattattaactttattatgttcagaaggtggtacttctagatctctgtcatttccctgggaaatttacatctcattaataggtaattatgccactcttggctaagacctgcactgttattttgtgttaagatcattaata

SEQ ID NO: 105235 - DNA, 1181 bp, Homo sapiens
agcgggagagcgcagcgcgcctctccccggccgggcggacacttggttcattccagccgcagaagctcagggctcccgcgtaccgggattttttccgagcagaaaaaagctccagagctctcctgacctcctttctcctcggcggcgagcggagcctctccctcggcgctgccggccgcgccatgccgcgctcgcggggacgggagctggggcgctgcggctgccccgcggggagggctcgcggcgaaaccgggatttcggcgcttgtgccgggcgccgggagccgctggggccgcccgccgccgccaacgccgccgcctctgctgctgttgctgggctgtgggttgctcagcgtctcggccgccgcgggccagaactgcacgttccaactgcacggtcccaatgggacagttgagagcccagggttcccatatggctaccccaattacgccaactgcacgtggaccatcaccgcggaagagcagcacagaatccagcttgtgttccagtcctttgccctggaagaggactttgatgtcctgtcggtgtttgatggtccaccccagccagagaatctgcgtacgaggctcacaggctttcagctgccagccaccattgttagtgcagccaccaccctctctctgcgcctcatcagcgactatgcagtcagtgcccaaggcttccacgccacctatgaagatagggatgacgggaagaaatgacccaaaacgagaattaacacaaagagaatattcaccatgattactggccagggagaagggcccttcttaaagaattagggaaacacgcacacagcagatctaaatggattcacccatgttaaacggagaatcctggttacagggcgtttaggggcaacattgtagagataccaacggtccttaggtgtgggttaccccttgcttgttacacaagcgggtatctgggcgcaaaatatctttgttttatcacctttggggaccataccatatatcatcgcggaggcccgggagaaagaaagcgtctctataatacagataatgagtcccggggaaccatgcgtgctaacccgagcaaaatataaacgaaccctctcataaatcgacgaatcccgctaagaaggattagacctatgccggacagaatattcgtgagcaaagcatatatattcacacccggag

SEQ ID NO: 105236 - DNA, 252 bp, Homo sapiens
ctgcttattttattctaattctttgttacatattagaagcaaggaaataaatttaaatgaggaaaagaacagaataaaaagaatatagagatcttttagggaccgctgaggctctccagcagtccttgaagattatataaattcccttttgatgaaattctgaaaattttaccactaatagacctgagctgtagtttctctaggactgatacatgaatttttttagtttatttaaatagagttgttgaaata

SEQ ID NO: 105237 - DNA, 404 bp, Homo sapiens
tgagccctgtagccccacagcctggcgtggtatttgttgaaagaaggcagagcctctaccctcgtgtaactcagtgcgggtggagagcccatggcagacccaggactggaggctcctgcgtcattaggaacattggtggctgaagcttgcttgtcccagctggcgagagccaattacgcctgtctccttccacctccacgtatggtgacatcactttgatagcttgacgtcagccactgggggactatttacatcatggatatgggcaaaagacaccaatctgagcttttgtccttttcttttttttggagtgcctgcacacccgtgagcctttccaacctcgtaacctattattttcctgacgagatagttttttacagatgagaaagttgaggcacagagaa

SEQ ID NO: 105238 - DNA, 415 bp, Homo sapiens
tacagaaaaaaacaacagacacagagtagtgaagtgacttgacccaagtctcacagctaatagttggtatcagagccaggattcacccctaggcaatctgggcactggatctcaataaaggttatattccttctccttcctttcacccttaactttcaagcccagaggaatcccacctttgctactgaatctttcctgaccagcccaggcccagccagcccagtaggagcagaaatccctccctgggggcatgcctccagagggtagggtgtctgtgcatgctttcaacaccatcttctgctaagtccaggtttcagggacgcacctggtgcgtggaggggagaggctgaaggtccttcctgtccccacccctacctcaaagtaagcagcctcacttttatctgctttctatatt

SEQ ID NO: 105239 - DNA, 438 bp, Homo sapiens
gcaagactaggatcagggacagatctggaggcccaggacatggctgagaggtggtcagcaggctgggggcatggagcagagagggcttgggtacaagctggagaggaaggagattctggcatgttggggtgagggcagagggacagatgaggggaggagggtgctggctaaacaggaactgaatgaatggcctgaagctccctctcccaagggttcccactcccattggcctggccctgtacgtgcactctgtcatctccttggtcaccctctgctccaggccttctccaccacaggacctcagctgtccctccttctacccaaggtggagtcccccaaagtcccttctgtctggcctatcctgtgcccaccacctgtggcttcatccagccctcctcctctatctttatctgccataggccgcagccctggccccct

SEQ ID NO: 105240 - DNA, 425 bp, Homo sapiens
ccacctgcctcagcctcccaaagtgctaggattacaggcgtgagccgccgagcccggtggactgtcttctctctaagcagtaagagacagtgggaactgcagaagggtgtttgcagcctcatgcagttgactgaatgaattggccccagagtcacccctagcaccatcttgatatggacaggaggcagggaaatactgggtagaagagggtggttccccagcaaaggccccaccctcaagcctggaaatccggagccctaaatgggaacaggcattcccgtttttgtgcccaaatgttgccttttggctcaccacgcccccctctcctgtatccatataaaccccaaaccccaggctccacaagcagaagagtggcagagcagtgcagcagagaaggagaaaagaaaaggtgcttctgaacattg

SEQ ID NO: 105241 - DNA, 143 bp, Homo sapiens
ggcttgcgcctggtcccccagagatcgtcctgtgtgccactgcccttagctgatttcgctgtcatcttcttgctagaatgaatcttggctgtgggtcctactaggtcatgaagacggaggtcgcggggacgcccccacgcact

SEQ ID NO: 105242 - DNA, 315 bp, Homo sapiens
ccgaggtggctggatcacttgaagtcaggagttcgagaccagcctggccaacacggtgaaaccccgctactataaatacaaaaattagccgggcatggtggcacatgcctgtagtcccagctacttgggaacctgagacaggagagttgcttgaacttgggaggtggaggttcaatgagccgagattgtgccactgcacttgagtctgggtgacagagcgagattctgtcttcaaaaaaagaatgggggctcactgtgttgcctaggctggactcaaactcctgggtgcaagtgatcctccttagcctccaagtt

SEQ ID NO: 105243 - DNA, 584 bp, Homo sapiens
aataattattaaatatctatatgccagatattgctgggacgacccctcaattcataaactgccccctctctcacgacatgtgatcatgtcactcacctccttaagacttatcatgatgccctgttgccttgaggataaagtccaacctcctaatcacagctttggggctttttgtgatccagcctttccctacacctctaacttcactgacctgcccctcaccacctacaccttctgcactgtgttccagatacagtggacttccagcactccccacattcaccctctctgcctccttttcaccgacatctggggtgtctcacctcctccttgcagtgtctcttcactccccaggtggggttgggcaacccacttttgttttcccaaagatccccatgcttgctcctctcaaagtgctaactacactgcagtgaattgtggtttatttgtctagttcccctactagactgcctttagggacagggactagttttattcatcttccaaatctgactccttcatttattactaactgtgtaacatagggcaagttgcttaccttctctgagtctcagagttattat

SEQ ID NO: 105244 - DNA, 536 bp, Homo sapiens
aacgtggcatcaccactccctgctgctccctctgcttgagatgccaatattcctccctcactccttacctctccctttccctagctggcaaactgtttcccacccatgaatggattcaaaagtgtcaccatatctatgaggtctcccctataccccaaatcagtgaatccctctcacagcatttttgagatggggtctcgctctgtcacccaggctggagtgcagtggcacaatcgcggctcactgcaacctccgcctcccgggttcaagtgattctcctgcctcagcctcttgagtagctgggattacaggcacccgccaccacgcccagctaatttttgtatttttagtagagacggggtttcaccatgtttgccaggctgatctcgaactccggacctcaggtgatccgcccacttcagcctctcaaagtgctggaattacaggcatgagccactgtgcccggccacaaactatactcttaaacattggacgtcacattgagggctgggtctagtttccagtcagggactctc

SEQ ID NO: 105245 - DNA, 402 bp, Homo sapiens
tgtatttttagtagtgacagggtttcaccatgtaggccaggctggtctcgaactcctgacctcaggtggtccccctgcctcagccgcccaaagtgctggtattacaggcatgagccaccacgcctggccgagtctcattcttctccggtgtaacctgggctaccccaccccttcaggtgtgcagcacaaggtctgtttccaaatatgcacctgtgtgacctgcagccagaccaggccacagaaggacctcaggcctggaggctccctgagctccctgcttccagcatctcatttttgtataaataccctggtcctctcccagttcaccacagagcagtggccccccctgtgccagacagtgccctaaataccactgcctggggttgtgtctcctaatggtgt

SEQ ID NO: 105246 - DNA, 330 bp, Homo sapiens
ccgaagcctggtttactacccggatgaacagccccgggctttcctgaggcttcacctcatgtcaagactgagcagccaacacctcgtgaaagctggtttatgagaaaacgccaggcagtggccaggccgggcctccgtcgccggatccaggttttgagaactgccctgggcggggagctgcgtgcatttgcgatcgcagctcagctcgcagcagcgtctggctccacgctgctctcgttgtcactatcttaaaagtgccgcccctgaccctgcctctcggtcttctcgatggccagccttattttaccatcacccctttctagagaagag

SEQ ID NO: 105247 - DNA, 372 bp, Homo sapiens
atactttatcatgtctgatgtcttacctgaagtaagtgctcagtgaatgctcaatgaacttgttttggtggcacgcagctacttaacatgacgttaggatgtagcattaatcagctatgaggctgtcactatctgtaacctaagccccttttaggaaaggtagcttctctcagtgataacgacagaccaaatatgacaaccctggtttactacaggtttgttcttcatgggtgtctgggtggggccagggggcctggtgcagacagttgacctggaaagagctggtgactacacagcgtgcttgcttttcggcgaggagggaagagcctgtttgcaaacagactcctacatgtgacatttggcatcatttct

SEQ ID NO: 105248 - DNA, 337 bp, Homo sapiens
tatacaaaatatagatctaaatgtgaaaagtaaaaaaataaagcttctgaaaggaaacagagaacagtaggtaaaaaagaaattttttaaagaatgtgagaagcactaagtaggacatgtcagcttaacatgagctaatactctgttaagattacaaaaacaggctgggcgtggtggctcatacctgtaatcccagcactttgggaggtcaaggtgggtggatcgcttaggtccaggagttcaagaccagcctggtcaacatggtgaaactccatctctactaaaaataaaaaattagccaggtgtggtggcgcacacctgtgaatcccagctactc

SEQ ID NO: 105249 - DNA, 509 bp, Homo sapiens
gatccagattttattaaagttcttcaaaggacatttgacatttggctaactgttgaaatttccagccagtttcagcattctcagagtagggggatgaagtagaatgccataacatctcctgtgaaatggtatgctagtggaattaactgtcacctcagggtgcactgattatctgcatccccaactttctccttactggtagccagtgctccgcagatgctgaagaaccgcaattagtttcactgattttatggtgtgtgaaggccttaggctgtgcttttgactggtaagtatttctataccaacctcagaatttgtcttaaatttctagaactgtgctgctgggccggatatgagcccaatatgttacaatatgtctttctcagatcactttttatttttatatattatttaatttttaaaattaaatccccttttatttacttatttattttgacacagtgttgttctgttgtccaggctggagtgcagtggcacgatctcagctc

SEQ ID NO: 105250 - DNA, 424 bp, Homo sapiens
tgcctggctactttttaaattttttgtagagatgaggtctcacgatgttgctcaggctggtcttgaactcctggataaagcagttctcccatctcggcctcccaaagtgctgggattacaggtatgagccaccacatctagtcctgggtgttttcaaagctaagacctctaccccactagaaaccaacgtcaaggagcctgaggaggcagggagggttgcagctggggtgagatgctcttgggcgaagctgcagggcctccacttcagggcagtgttcccaggtgacagagtgggacagctcagagggcctctgaatctcctgcacagaacaccgagaccagaaaatgggtctctgattaagggctgttattttcttttcgtttttccttccacagggcttttgatgattcttgtaaaaaaaaa

SEQ ID NO: 105251 - DNA, 434 bp, Homo sapiens
ccataaagtttcactgccttccttctggaggggcggatggcagttcctgtttgcgatgtggctgtgtgagaatgtgtgttttcaggatggacatgaatggctgcttgaggaagggcatgactttgaataacacatggttcattttttattgtattttcaaatggctcttctgggggaaaaacagttcaggaaccacattccgattgctggcccaaaatccatgtaagacttagaaaatatttggggtgaaatgatgggcagtgccttgttttgcacattttatgatgtgagttcgtggtcccctctgaagaggcgtttcctctgaatctcctgcacagaacaccgagaccagaaaatgggtctctgattaagggctgttattttcttttcgtttttccttccacagggcttttgatgattcttgtaaaaaaaaa

SEQ ID NO: 105252 - DNA, 342 bp, Homo sapiens
ccgccatgcccagccagtaaattttctctttaaatctcactttcgttttacaactattgagttgtaaaactaagaacattttcttgagccttgtgagtttatatttttttaatttaaatgaataagatttagtttaagatttaggttttttaattaaaaaatgtttagttttatgggtggattacttgagctcaggagtttgagaccaccctgggcaacatggcaaaaactcatctctaaaaaaataaaaataaaaataaccaggggcatggtgacacacacctggcagtcccacctacagaggagatggctgcaggggggcgctggaaatggggaggaact

SEQ ID NO: 105253 - DNA, 265 bp, Homo sapiens
cccaactccagaggcctgcccaactccagaggcctgcttcggcctcccaaagtgctggaattacaggtgtcaaccaccatactcggcctcaactaattttttaatttttttgtagacatggagtctctctctgttgcccaggctggtcttaaactcctgagctcaagggatgctcctgacttggcctcctaaagtacagggattacaggcatgagcccactgtgcctggctcatttacattgtttatacaattcgggccttgctg

SEQ ID NO: 105254 - DNA, 709 bp, Homo sapiens
gcttataccttttaagttgtataatattgtaccttactttcatcttttctaaatgccctgatgcctcatgtgtgaacatttgatatactcaataaaaaaggttgatgccagtacattttttttccctaaatgcaagcaattcaagactttggaaaagctgctgtagacgtttgtcttacttatactactactgcaaaacagaaaaacttaagattactatcctcaggcttgacttattttatagggttcaaaaatagattgatatgaaaaaatgcttttaaatgtttttatatgttgcccatggggttgttctgatcttttctaatagtatatttactcagaggccaaatatgtgaagccaatacataaatgtggctatttattttatgaggactacaaaatacatctgctacacaaaacagaaataatgctatttaagggcttactacagtatcatatttaatctttatataggctcaatgacacacaaacatttccctgatagaatgttatataaaagtcttttttgtaggcttccttacagacaagaataggcaagaaacaaataaaattggctgaagttaatgttttgactaaactcttcttcagaactgactacaaagttaagttcaagataaagcattgtctaaaacagtagctgtttccactttgttttgggtaaaattactctcttatgagattgcatgtg

SEQ ID NO: 105255 - DNA, 333 bp, Homo sapiens
gctggtctcaaactcctggccttaagcgatcatcctgctttcgcctcacaaagtgttgggattacaggcatgagcaactatgcccagccttcaagcatttttttttatattgacataatttcatgtctacagaaaagatgcaagaatagcacaagaattcctgatacccttcacccactgtccccaaagtgttaacattttactacattagctacatttgctttatcatattaattctctccgccatcacatacaaatttgtgcacacatacattgtttcactaaaccatgtatgttactcaaatgaagctccattatctttaaatatttaac

SEQ ID NO: 105256 - DNA, 136 bp, Homo sapiens
tcacagccaacaagtgtggaaaccgcctcaggaccggcttgagtggagcggctgcgggagttacttcatgactgtggtctcacgctgtgtttcgccacccatccctgcctggcctggcttccttccttcctcctgg

SEQ ID NO: 105257 - DNA, 297 bp, Homo sapiens
aaaaaaccgtagtcaaagatggctgggtaaactccaggaatcatgtctgtgtaccacagctataaggagggtggaaggggaaggggaagaaaaaggtacaggatgcaggcctgctatattttaaagaggttcctgggcagggcgcagtggcttacacctgtaatcccagcactttgggaggcagaggccagcggatcacctgaggtcaggagttcgagaccagcctgtccaacatggtgaaacgctgtttctattaaaaataacaaaaactagctgggcgtggtggcaggtaatccc

SEQ ID NO: 105258 - DNA, 416 bp, Homo sapiens
tgccagccccaagagttctaattaatatatatttagctccctgactgtctttagacccaaacagttgagcgtagaagacaggaggaaaaaaatacattgagattggaaaaggaaagtctttcttaaaagaggaaatttttgtgcaatgctctgctcctatgtctatgtcagaaattactttcaggccactgagtgccttatgaaaaatggagtggaagatgataattatttttattgatcacacattcaagttattaattttttagtctactttctttcttttatttttcacaaaaatgttcatgcccagggaattatgtgcattcacaatcctcctctggtttgttctcccctctcctccctctgccctttttctctccgacctcacactattaaaaagcgatattgttcctctt

SEQ ID NO: 105259 - DNA, 177 bp, Homo sapiens
atttgcacagagttggtcctaggtgagcctaagaggaaactgggtgcatggggcctcttcctcttcccctttcctctaaacttattatagttgatatgcaggggcagttgttagttactggttcacttgtttggctaaagacaaagagacgtgttctgagcgtgtcttcctggaggg

SEQ ID NO: 105260 - DNA, 340 bp, Homo sapiens
gattacaggcatgagccactgcacctggccaaaaattgatttattttaaatccagcatggacatgatctagcaatatcaggttctaatcagacataaagtgagaaagaaaaagtggaaagtaatcaacttttgaaagtactgataccttttttgtactatttttaccagttaggattctaaatattattgtatgtatgacattatgttaggtataaacactttattcatattgtctgataatattttccataaagttaattatatcatgaatgagcttttgagtcttctactttttgatagctgtaaaaacttggtttagatccatcgacctttttattg

SEQ ID NO: 105261 - DNA, 328 bp, Homo sapiens
aactcctagcctcaagtggtcctcctgccttggcttcccacagcactgggattgtaggtgcaagccactgagcctgcagtcctgcaattctttttgtatataggatagttctttccagagcagggcttgtaattctcttcttgggatgtgctaagaccctgactatagttattaaccagaggataatgagtcatagtagaggcagatcttaagaataaatgtcattggaccaggcgtggtagctcatgcctgtaatcccagcactttgggaggccaaggtgggcagatcacctgagttgaggcattcgagaccagcctgaccaacatg

SEQ ID NO: 105262 - DNA, 1157 bp, Homo sapiens
  misc_feature (1134)..(1134): n is a, c, g, or t
gccgggctgcacacatccgtgctgggaggcagcctgtctgtgcagcgagcagtcgtgcgcggtggagagccgtagatgcacgggggcgtcacaggtcggacaggcagcatggggaagggagggaaccagggcgacgggggccgccgagcgcgaggatggtcggtgcccaccttcagcttgggagggagattctagatagcattaactcgtgcgcatcgcgacaggtgtgcttggtcattgatcgctgctaaggatttacaaacaatcacactagagagtggtccatccaagcacccagtgggagtgcctagacgggctcgatcggtgcactacgctgcgatgaagatgcaacggatgccgttccggcgaccttccagcgcctggaccctgggagattccgtgtgggcagatgttacgtatgaaacaccacttgactgattggctgtaacctgggccccggggacggagcccaatgaccatggcaccaccggtcacacgaaactcataacgactcacatgaggacttccgggccctgaggaagacggctgaggacatgaacctgttcaagaccaaccacgtgttcttcctcctcctcctggcccacatcatcgccctggagagcattgcatggttcactgtcttttactttggcaatggctggattcctaccctcatcacggcctttgtccttgctacctctcaggcccaagctggatggctgcaacatgattatggccacctgtctgtctacagaaaacccaagtggaaccaccttgtccacaaattcgtcattggccacttaaaggtgcctctggcactggtggaatcatcggccatttcagcaactggacaggctaaatcttcccaaggatccgatgtgacatgctgacgtgttggcctggcgaatgcagcccatccagtaggcaggagaactgtatcggcctagatacagtaccaaatatttcgtaatgtggccgcgaaacacccaggattccgatacaattatcgacagtgccctaaagggggcacgcgtcgcaaaaaaggatcacacgactagaggagccctcccatagttgcgaagtgtggcccacaagagacgacacgtcaacccactggcttacgcgcggtaaatnccacacgtatacacacgccaacc

SEQ ID NO: 105263 - DNA, 448 bp, Homo sapiens
cggaactacaaatcttggagggacaagagacttcagaaatggcaagttcttagtttgggaggctaggtattgaagtttatccaaattaatttggaagtttagatcagttgcaatcaaaatccttatttgattgacagtggggatggataaaatggagtttggatttgaaaatctacataggaggaggaagtaatagtatatctattttattatacgtgtgtgtgtgtgtataactataacaattagaatatcataacactgttaatagaccataaagtgacaaactaccccaaaacaaatcccattttcacataaaaatttaatatatgataaaaaagccttcacaaatcaaaggggaatgaaaggcaagattattcatcagatagttaggtcttcatcttacaccggaataaattcaattgaactgaagagttaaatatgtattaca

SEQ ID NO: 105264 - DNA, 258 bp, Homo sapiens
gaccttgaggctcagggaggttaaggtgccagcctgagatcacacagccagtgagaggcagagacagggcttaaactccaaacgatggctccagagccccctctcttttccatgccctgggctgcctctttccccagtgcaccttgctttttggaaccagatgaccaatgtggaaagacacgaactgattcaatcagagtgtatggagaagggacttagagaccctggtatttttaaagctccctggtaattctcatg

SEQ ID NO: 105265 - DNA, 698 bp, Homo sapiens
attaaagtaagcacaccttattattggaaacaatcccactctggttccttggcctgtgaggtaggggatattgtaaaaagaaatgccaaatggaagcctctgaaattacccttgtactctacagtcaagagagtaaatccaaaataatatcttattctggaaaaatagccacagttagtgccattattaaagacctaaggatccatgggaggtagtcccgatgatatcgccatttattcaccaacataaaaaagtcagatggatctttgagcgtgaaagtgagctactgtaactcaagtaaatttatgccttaattgtagatgctgtgtcatatatgatatcttttctggagcagtggattagttccttcttgcattgctttaaagaaatacctgacactgggtaatttatgagaaaagaagtttaactggttcacagttctgcaggctctacaggaagcatagcgacatctgcttctggagaggccgcaggaagcttccaatcatggcagaaggcaaagggagagaagcctgtcacatgtaagcaagagcaggagaatgagtggggaagtaccgcacactttcaaatgaccagatctcacgagaactcactcactagtaggatttgatcagctcactatgggagtgttacagaaaatagataccatgagcagagattctggcagcagctgggccacc

SEQ ID NO: 105266 - DNA, 755 bp, Homo sapiens
tgtttccctgacatcatcaagtgggccatttaaatagaagattggtcataatgcaaaggactcattggccacctcccttccctgttaaaatacctccatggctccccagtgcccaagaaacagagtctaagtccctctacctgatgagaaaggatcttctagacatggttcccgttagtttctccaccctcccctggccaggctctgcctcatggtcaccttcccagaaagaaataaactacagtacctgcagttcccttcgtgccatgccgtttttctcctccatgtctttgctcatgtggactccatgtctttgctcaaagaggacttccagacaaaatcctctttgcctggaagaactcaccgtaacccctctttgcctggcttagtgcagctcatcctttatgacttcatacaagggccatctctttttggttgccctccctattaccccaggctgggttagtcccttccgcatggcccacaatgtcttgtacattccattctaatggccactgtatctgcctcccaaccttgagggggtagcttcttgaagggacagtcactgtgtcattctgcatctctaggtgccgaacaaggcttgtagacatggtgggtgtagcatacatgtttgtggggcacacagatgcctcaagagagagaatggttgagtttgttatcttgtgttgggagtgatgaagggaaagagatcaggtacttaagatgatagtactaagaagagaaacctaagatct

SEQ ID NO: 105267 - DNA, 512 bp, Homo sapiens
gattggagaagagggtaagagtgatcttattgaattttattttgtctaccaatttagtgcccacattttccccagacatatggaggccctcatgttcctggcacagaggatgagcagtttttgcttgtgcctttgtctgtgcctttagagaggaccagtcctttgtgaaataaaccaactgctctggtaagttcgaaagtctgtaatgccaaatgtatttgactgtcaaattcaacaggaagggaagatgataagaagaaagatctcttttcaattaatttttaaacatgttgttttgtgaataccatcgttaacaagatataaatcctttacatatcatgcttcccataccttttcctttcattctgcttacgtacaatacttaccttgaaagttagcagtgaacactcccagtcaccatgcatagtggaaagcttcaagaaataagaataataataaaaaagttaaaactataatgataacttggccgggcacactggctcactcctgta

SEQ ID NO: 105268 - DNA, 290 bp, Homo sapiens
tctgtattagtaaactcttctcagttgataaatattgccctagtacaatgttttgcatatactattcataaaatattttcttgtatcatactgttagagaaactccagacaaatctcatagatgatataaaaactcacagaatgaagagtgagccaaatattgaacctcatgagaaataacagaatataaaacaatttgcttgctataggctattgctagcaatgcaaggtataagagtagtggtattcccacatttcttcagcctcttcaaaaataatttataatttga

SEQ ID NO: 105269 - DNA, 329 bp, Homo sapiens
tcttggctcactgcaacctctgcctcccaggttgaagcgattctcctgcctcagcctcccaagtagcttggattacaggcgtgcgccgccacctcacccggctgatttttgtatttttagtagagacggggtttctccatgttggtcaggctggtcttgaactcctgacctcaggtgatccacctacctcggccttccaaagtattgggattacaggcatgagccaccacgcctggcccaaaccagtttcttttgtcctatattctcagccccttgatagtaggtagcaccccttaaatacttctggagtggatgtctcaagcaagcct

SEQ ID NO: 105270 - DNA, 322 bp, Homo sapiens
tatgcaagaataaaatgaaatataaatgtatgtgtataacacaccaatcaaaacaaattcacaaatgaaatacagagtaaattaccaacccaagaccactcaattgaaggatattaattcagcctaatgggtaatgtggttttgtggaagcaaaattgctcattcagagcttcagggtagaaagttgcaaccctggttctgggtctgcagtgaatgtttctgtatttgcctgtaatcgtacccttgtataatgtctgttgacatatgtatgtaacacagaatgctaggaacatcttcaaaactttgtctcaacgggataatc

SEQ ID NO: 105271 - DNA, 283 bp, Homo sapiens
attgattcatcttacagttgcatgggctgactgggcagctcttctctctgggcatgcttggcggatttgctggacttcctcatgcttctctggtcagctggcatgttggaggcagccagatgatctagaatgacttccttcatgtgtctgacagttggagggctctttgcaagggaccagctgcttctccacatggagtctcctccatagggggctagcttgaactcagtcacatggtagtcctagagttccaaacacagcaagaggacaagcccagggctca

SEQ ID NO: 105272 - DNA, 754 bp, Homo sapiens
cagcagctgggcaaagctgctcctcacttcccagatggtgtggcagccagggagaggtgcttcttacttcccagactgtggggtggcgaggcagaggtgctaacagcactatgtgtaatagtcagtctggaagcaatccacacatcctttgagataatgggtaaattgtggaagtcacacaacgaaaaaccaatattgtaaatttcaaaattgagaagagtagactttaaatggtctcaacacacaaaaaaagcacgtgaggtgatagatatgtgaattagcttggtttaatcattctactgtgtatgtataaacatatcaaaacatcacatcataccccataaacatatacaattatttgtcaattaaaattaaattggccaggtgtggtggctcatgcctctaattcatcccagccccactttgggaggctgaggcaggaggatcacttgagcccatgagttcaagaccagcctgggcaacatagtgagaccatgtctctataaaaacatttaaaaaaattagccgagcgtggtggtgcacctgcagtctcagttattcgggacgcctgaggtgggaggatcccttgagcccaggatttcaaggctgcagtgagaaaatcatatcactacacttcagcctagatgacagaataagaccatgtataaaataaaataaaatatagaaaataaaatagaaaataaaacaaaatggtcatgagaatgaacaaatgataactacccagatctacttg

SEQ ID NO: 105273 - DNA, 165 bp, Homo sapiens
aaattccttggcactaagtctaatgttgtctagctgctattatctcacacataccacacaagttgctgctagaggaattaagtacctcctgtgtgactcccctgggagaggaatctcggaagcacattcctgatttcctccagactttgccttatgagcttacct

SEQ ID NO: 105274 - DNA, 323 bp, Homo sapiens
tggtagaaattgacaacccaatcctaaagttcacaggaaaatgcaagggatctacactagtcacagccatcttgaaaacaaacagaattaaagacgcacttttttcttctcaatttcaacacttactataaagcttcagtaatcaatacaatgtattaccggcataaaactaataataattgaatcaactaactgaattaaaggtccagatataaatctatacatctgtggtcaactgatttttaagaaggtggctaagaccattcagtaggtgaaaacagtctcttcaagaaatggtgctaagacaaatggatatccacatg

SEQ ID NO: 105275 - DNA, 480 bp, Homo sapiens
ccatgttttggccaggctggtctcaaactcctgacctcagggtgatccacccgcctctgcctcccaaagtgctgggatgacaggcgtgagccactgcgcctgggcaagtctgcgtgcattaaacacaaccccccagcatgggctctgacatgtctctgtaactgactgaagtgaagcacaaatgccagggcgtataaggccaccagaaaatacgaagtaagtgcccctgggtctcttggcacagcctagataattagctggccctgactctcagcattgtttaaaggcattattgagcattatctcttgtttcttttgctatggtagtgaaggggttgggctctggaggctgaaattttagtttaagattgtcacttgccttccactgtctttcttggagtgacactcccctaaactataccccaatcctccttttttttttttcttttttctttttttttgagacagagtctcactctc

SEQ ID NO: 105276 - DNA, 436 bp, Homo sapiens
tataataatcagtttactggtcaagtatacaagtaaaggattctagttcaaacaattacagtagttaaaggtaacagaattcttagtgtttccctaagacaagcattgtaacactgttatcctatttttaaaaatataaagcatgagccactgcgtcgggccaaccttctcttacctctgctctgaagttgtgatttcttcaaggagtcctgattccttatagaagaatagtatttttaagccaaaatctgcatgttagatgtgtaaaaattgtttttaaaatctcacagagggctgagtgcagtggctcacacttgtaatcttagtactttggaagaccaaggtgggaggatctcttgagcccaggagtctgaggctgtagtgagctatgattgtgtcactgcactctagcctgggtgacagagcgactgtcaaa

SEQ ID NO: 105277 - DNA, 625 bp, Homo sapiens
taaaagaaactagctcttactctgtcacccaggctggagtgccatgtgatcatagctcactgtagttttgaacttgggcttgaacaaccttcccacttcagtctctggagtagctggggctacaggcacgtaccaccacactcagctaacagcagttatctttgatgaggatgtagtataggttgagcatccataactggaaaatctgaaatctgaagtgctccaaaatccaaaatttgtctgagcaccaacaggtacaaaattctacaccagaccttatgtgatgggttgcagttaaaatgcacccccggccgggcgcggtggctcacacctgtaatcccagcactttgggaggccgaggcgggtggatcatgaggtcaggagatcgagaccatcctggctaacaaggtgaaaccccgtctctactaaaaatacaaaaaattagccgggcgcggtggcgggcgcctgtagtcccagctactcgggaggctgaggcaggagaatggcgtgaacctgggaagcggagcttgcagtgagccgagattgcaccactgcagtccgcagtccggcctgggcgacagagcgagactccgtctcaaaaaaaaaaaaaaaaaaaaaaaatgca

SEQ ID NO: 105278 - DNA, 379 bp, Homo sapiens
tacagtcagaggaaaaactgcgcagcaaccggaccacagggtgctggtcatccagcagctctggacggggtgaggggaccacggcaggaagcacaaagatagagaaagagaagagggagagacaatgaggggggcactgactagcacaagcattactgggaggtgggggcactcagatccaaggtgagctaagagagaagcagagatggtcagagccactgggcatctcttgcagggaagaacagtggtgtcatcatacaatgagtctgaaagaagggataagtgagatctcatcatacagcaatgccttccccttgctccttgagcataattccgtcagtgcttgtagacatcagtcacatcattgtgaacaggggtg

SEQ ID NO: 105279 - DNA, 293 bp, Homo sapiens
ttcagtgctaccaggatagagattatttgactgctaggaataatacaaaaatcttcaataggatcatctttatttttatgtgggtttagggaaatgttagacagctttctaaagttagactaagagacagtgaggcctagtatccaggaatccttggcttgcctcccatttctaccactaatgagcagtggtcttgtttttccttggctatatggggttggttgaagctccttagttctaccaaagttgttttggggataaagtgaaataatgaaaaacatatggaaattgtg

SEQ ID NO: 105280 - DNA, 681 bp, Homo sapiens
ctcagcataaattcacgagcactcaagaaagctaaagcaaagaatgcatttaacctagctaagaattcacaagaaactaatggaatattttacaaatgcattaagagatagacggagtaaagttttaaatgtactaattaaaacagaagccaaagcaatgttagatagaaataaaaatcttaaagtatgttgtatctcctgatcataattgaagatttcatttaattataattaatgacgatatagaaatttaagtgtttgacagaatgtgttaaacttagttaaggtagtttgttttaaatttatcctgtaacattcttaagtagagacaaacttaagaatcattagtagttattttgtcatatttccttggggaggggaaaaaaaaatcccagatgcataatgggaaatacagagtgacagggaactatggagcccagttcacataactaagaggattctggaataattctttaaaaagcaatttgtaatgcctagaggataacaaggtgttaagtaattgcaatgtgaactcattgccaaaaaataaaatcacaaaatgagtttaccttttttttttttttaacttagaaatagaccttggaattgactaaaaagtagacttagctagaacttctcacaatagatttggaatccagaaagcctatacatttgctaatg

SEQ ID NO: 105281 - DNA, 349 bp, Homo sapiens
tgactataatcgtgttgcttaatttccaactatccaaaggtaacatttttgatttccaaaataattattttttggtcttggagcatactctgtaaaatttcaaccctttgagatttatgaagtcattaaaaattattcagcatgtaagttaccatggtgagttccccatgtgtacttgaaagaaatgtgtaacctacagttgttggttgagtattctgtaaatatcaattaaatcaagtcacttgataatgtttttagatcttctttattcttaacattgtttctacatgttctgccagttattaggagaagagtgttaaattcttcacctgtgattgtgagtttttat

SEQ ID NO: 105282 - DNA, 795 bp, Homo sapiens
gctcaaagtgatttgcctgcctcagcctcctaaagtgctgggattacaggcatgagccaccgtgcccggccgagaagaagttttaaagggctttttattgtggaaaaattcaaatgtacataaaagtggaggagaagatataaggaacactcatgtggccatcactcatcctgtcctcctctcctgctccgcaccctccatagtttgagtcatatcatttcattcataaatattctcttaccattttacttgacaatgattttaggcttacagaaaagtggccagagtagtgcagggctcctatagttggcttcccctgttgccatcatctcgtctgatcgtagggcaggttagcattgctacaggcctcttacccggcctacagctcttaggcacatctgtccatttgactaatggccattttctggatagtccatgctcacttctggagccccctcccacccaggctcccacatggccggtgctgttgcctgaaggcccctcttcctcctgacgtgggaccccttcaggtagccccgcatcttttcagcgtgccccttcacattctgactgttcctcttctggaacctgcaagatgctctgggatccttgtatttttcctgcaccagcccgtttcatccctgagcttctgttattttattggaggatggtgctagaaacacaggtctggatgcaggcaggagacacacgcgtccacactagcatgtgtgtgtacacacatctacatgtgcttatcccccgcgttcatgttaaaaaccatgggatcataccggt

SEQ ID NO: 105283 - DNA, 478 bp, Homo sapiens
tgggatttcattgggatgatcatctaaatatacatgttgtatgctaatcagtttctgaataaacgtttaaaaactaaatactgccaccaaattttcatcatgttgtttgcacttggtgttttgaatcatgcataaactaagtggagaccaaagaatagaaaggttgctaaacaaataaagtctgtttagagaaaaggtgaggatgaagtgagtcattacagaacactgggtagcacaggcaggcaaaagtacctgtactatagaggttataatcatcatgagtgtgaagataatgcatgcatcctatctctgtgtagcttctacataatctgttctccattccagaaatcttggaatacagcttacagatttgatttagaattcgatgactccacaatactaatcacattttcaagggaacgaaaagatgttatagagatctcaggtgatacctcattaaacctgacatttgagggat

SEQ ID NO: 105284 - DNA, 328 bp, Homo sapiens
tataaggaacatagcatttgttttcgttgattttctcagttgcattgtgcacgtttcaggtgctcagtagctgtgtgtgactagtggctactgtactagacagtgcagaatagaacatttctatcgtaggaagttttgatggacagtgctgtggtagagtgtcttccagagaactctgaggaaaaaactatgataaactaagaatcctaaattgatgaagttatcctttacataggcagtgcaacaagatggctttttataggtgtgcaggaactcaaagtatatcactcgactacttgggaaaaaaaaaaagacttaactacaccca

SEQ ID NO: 105285 - DNA, 583 bp, Homo sapiens
cggccccagacgctacagccgccgaaatgttgatgcctaagaagaaccggattgccatttatgaactcctttttaaggagggagccatggtggccaagaaggatgtctacacgcctaagcagccagagttggcagacaagaatgtgcccaaccttcatgtcatgaaggccatgcagtctctcaagtcccgaggctacatgaaggaacagtttgcctggagacatttctactggtaccttaccaatgagggtatccaccatctccgtgattaccttcatctgcccccggagattgtgcctgccaccctatgccacagccgtccagagactggcaggcctcggcctaaaggtctggagggtgagtgacctgcaagactcacaagaggggaagccaacagggatacctacagatggaatgctgtgctccctggtgctgacaagaaagccgatgctgggagtgggtcagcaaccgaattccagtttagaggcagatttggtcgtggacatggtcagccatctcagtaaaattggagaggattattttgcattgaataaacttacagccaaaaaaaaaaaagtcaaac

SEQ ID NO: 105286 - DNA, 247 bp, Homo sapiens
catactctgcaagtgtttgcctcagcataattgtgtttatgtggaattgcactggcattgcaatgtgagaatgacagagttgacaggaccactaacatgtaccctgggaattgtttcccccatccccatagctggctgaagaaactttatttctgagttattatgtagggactgaaaggttttttttttgtttttgtttttgtttttttttacatatatacacagattgttttttacctacaatgag

SEQ ID NO: 105287 - DNA, 702 bp, Homo sapiens
aggctcagggggatgaagtactttgctcagggtaacacagccaggaaggagcagagcaaggccatgagctttggatttttctgtttccaatgtctcctctaccgtgctcaattagatgatgagaaacagttggtgtctgatgctggccaataagagaaaagaaagctcaagtgggctggggctgtcagggagggcttcatggagaggctgtcttgaaaatgacagaggtcaaaagaaaggtcactccaagacgcagctgccagaatggtccaacacagtgaggagttgtgtctggatgggccagtggaacgggggaagtgaaggttgatataagtggaggttgaggcagtttaggcgtgatgtacagtccagccacagcaggttcttgagcaggagggtagcatagtgagcatcaggttctaggaagaagcaccagttcagccatcagatggggcaggatgcctcccagctactcctctccccgagaaggaattgcccccggagcggccctcatttattccaggagaagccaggccctgctgcttcagtttccatcctcactgacgcagataatccaaagagtcacttcagctgcttggaacagcagggttgggtcttgtgctacctgattcttaatttggctgatgtctaccccatttcctccaggcttctctagaggtggcaggggtggggtggggagaa

SEQ ID NO: 105288 - DNA, 331 bp, Homo sapiens
gtaaattctgccttcacccagtatatctttccaatgtaggatgatttatttttcattacatttgttctaagattttgtagtgattactctagtgtttgtcatgtaaatgttagtttatcaaaatcaggctcagttctccagtaatatgtggttaaatttcagtgatgtacacacatatttgtcctctatagctctattatgtttttgcctttctggggtactttgttgcatatgtaacaactcagtgttccacattcaacaatatattcttataattattacttttccactggtagtcatttagttcagtttttatggtgttatttataaa

SEQ ID NO: 105289 - DNA, 525 bp, Homo sapiens
actgttatagcaaattatccaaactccctccccccatgatttatagccagttggtcagaagtacaagaggcctaaacttgtgattggcatccgaagagggggcagccttgtgggactgagcccttaacttgcaggatctgatgctaactccaagtagttagtgtcagcatttaattaaactgtataataggacagccggctggtgtccaaagagttggagaagtgtttgttggtatgaggaaaaacccacacacttggtgtcagaagtgggtagaaacagatcatagtaattggtaccatctgtcaactcatcaatagccaaggaaaaccacttgaaatcatctgccttgttttttaattgactattgatgttgataccatgtaggatttcatttgagaatcagagttccatcaaaaaaagtttaaaagccattctcctatattagtttcactccaatttcttctgtttaaacaactattaaatttcatctgtaattatttttcctctgaaatgcctttcatgtc

SEQ ID NO: 105290 - DNA, 654 bp, Homo sapiens
  misc_feature (12)..(12): n is a, c, g, or t
  misc_feature (15)..(16): n is a, c, g, or t
  misc_feature (32)..(32): n is a, c, g, or t
  misc_feature (37)..(37): n is a, c, g, or t
agtcttttcccnggnngttccgggcatgacgnaccgntattacatgcgaaaagaaccacaattaacactgaagatgtgaagctcttagccaggaggagtaattcactgctaaaatacatcacagacaaaagtgaagagattgctcagattaacctagaacgaaaagcacagaagaaaaagaagtcagaggatggaagcaaaaattcaaggcagccagcagaggctggagtggtggaaagtgagaattaaagtccctcgccgcttggaaagtgcagccttctacaggtagagccacctagaaatgcatatggctgcaaaggaaactttgaagggttaaatagagatttaaaaaaataaaataaaaaggctgggctagggtgctttttgtgctgaattctccacattgttaactgccaaagctagttttagagaatgagaaagtcttaagcaaaatactcccaggtctcactccagaacataaaaatggtgtgtgatcgaatggtatatattagaaattacatctgttgtaattaaaattgtgtgagcaattaaacatggttgactttttcaagcaaaaatcagttcatcttttgatgtaattttctaggctaaatggcaatctctgaaagatgaataaagctatatttatttagc

SEQ ID NO: 105291 - DNA, 1112 bp, Homo sapiens
caggtttcttcccttgacttaaaatgaccaacttttctctaattaaagcaatttctttaaggtattctcttcactttctcatcctcatccgttaaatggaaatgaggcttatcgctatggagcatcttttcattttaatattttctttctcttttctccagggtagtcttttagatcatttttttttttaagtaaggaggagattgcatatctttgaatgcttgctgcctgagccagattgctgagttttctttcctttgccatctgcttctctttaaaagcacatatgcaggaagcggcaggaataaggaaaagcagcctcctgactttcctcgcttggtggtttgagtggacctcccaggccagtgccgggcccctcataggagaggaagcccgggaggtggccaggcggcaggaaggcgcacccccccagcaatccgcgcgccgggacagaatgccctgcaggaacttcttctggaagaccttctcctcctgcaaataaaacctcacccatgaatgctcacgcaagtgtaatgacagacctgaataaaatgtattaagcagcagtgatctttcctctcctccttcccaagtcatttgaaaagtgtttgttatttaaattccaataatgcccaatactgacgtgtcttgagtaatttggaacccaaagtgaagatctttgataaagatttttttgtggttcgactggactgtgctgagtgcgggcactgggcttttcttctgatgttcattatggtgctgggaagctctgtctttgatttaaaataaaatagctaaaggctacacaattaagagttcagaataacatcttatttcagtttatgaattgatatgaattgtctaatttaaaaaatatttccctcacattaaaagcaaatttttaacatcaggctcgaagagcaaaatgattattcctcatgttttagctgaaattaattttaaaacatattaaacagaaaacctgctgacatgcctgtgaaactgatactcgaacttgctgttatgtaccagttttaattagtagcttaatgggttgcaattcttttcatggattatagcttcagatttgctttgggaggaatgaaggctac

SEQ ID NO: 105292 - DNA, 824 bp, Homo sapiens
tgcccggtttttcattgtttcccaaacacctagcatatgcccttactgagttggagctctgcagatagtttggaataagtgagtgaaaccactcagggccttggcaggcatcagtctgacctgtctccccactgacttgccatctaatttcttatctttacctgacataaatcataaccattaacaaggaagtaatgtttccacaagtcgcactccagtgggtctcattaacttattagtacacttgaaaagccactcagccattatggaaagcgccagagggattgggctgagcagaccctctccttggtcttcattttttaaggcgtgaaaagctcttatttgcagccttacccgtgaaatattttgatgtttttccccagaggctaaaggcagcagttcactatactgtgggttgtctttgcgaggaagttgcattggacaaagagatgcagttcagcaaacagaccattgcggccatttcggagctgactttccgacagtgtgaaaattttgccaaagaccttgaaatgtttgcaagcatatgcaggaagcggcaggaataaggaaaagcagcctcctgactttcctcgcttggtggtttgagtggacctcccaggccagtgccgggcccctcataggagaggaagcccgggaggtggccaggcggcaggaaggcgcacccccccagcaatccgcgcgccgggacagaatgccctgcaggaacttcttctggaagaccttctcctcctgcaaataaaacctcacccatgaatgctcacgcaagtgtaatgacagacctgaataaaatgtattaagcagca

SEQ ID NO: 105293 - DNA, 566 bp, Homo sapiens
caggtttcttcccttgacttaaaatgaccaacttttctctaattaaagcaatttctttaaggtattctcttcactttctcatcctcatccgttaaatggaaatgaggcttatcgctatggagcatcttttcattttaatattttctttctcttttctccagggtagtcttttagatcatttttttttttaagtaaggaggagattgcatatctttgaatgcttgctgcctgagccagattgctgagttttctttcctttgccatctgcttctctttaaaagcacatatgcaggaagcggcaggaataaggaaaagcagcctcctgactttcctcgcttggtggtttgagtggacctcccaggccagtgccgggcccctcataggagaggaagcccgggaggtggccaggcggcaggaaggcgcacccccccagcaatccgcgcgccgggacagaatgccctgcaggaacttcttctggaagaccttctcctcctgcaaataaaacctcacccatgaatgctcacgcaagtgtaatgacagacctgaataaaatgtattaagcagca

SEQ ID NO: 105294 - DNA, 1444 bp, Homo sapiens
ggaggcggtttccgcggcaacgcggctggaccctggcctgcgctggctggggaggaagcggttctaggggagcgtgcgggcgccggggtccggcgacgagaggccaccttctggccttgcgatgaatcctcggtttccccttctcagatggggttttcgtgagggtacaacgtcggcattagacattccaggtgacgcccgtacgcggtgggcggttcgggccggagctctggaacgctggccctggaggcgtcgacccctcgttactgatgcagggacgcggtgcggaccagtcaggcccagagctcgtccttagatgtgggttcgaatctctgccccgccaacttgtgatcgtatcgactcggcccagacgcaattttcttctctgcaaaatcgtcataagaataatcacttgtcagggtagctgcgggcatcccattcgttcctttcatcagcgccgggcatatggggcgtcagaggctgagaacgttgccgtgaagaggcttaaaagcaagacccggagtggcgaccttaaagaggacggactgaagaaacgcgggaatgagctccagacgcgggagtttcctctctacaaagttacactgcagcagctgtctaccctgccccttgtcttttgagaagttcaaaccttcagaaaagttgcaagaacacgaggctaaaggcagcagttcactatactgtgggttgtctttgcgaggaagttgcattggacaaagagatgcagttcagcaaacagaccattgcggccatttcggagctgactttccgacagtgtgaaaattttgccaaagaccttgaaatgtttgcaagacatgcgaaaagaaccacaattaacactgaagatgtgaagctcttagccaggaggagtaattcactgctaaaatacatcacagacaaaagtgaagagattgctcagattaacctagaacgaaaagcacagaagaaaaagaagtcagaggatggaagcaaaaattcaaggcagccagcagaggctggagtggtggaaagtgagaattaaagtccctcgccgcttggaaagtgcagccttctacaggtagagccacctagaaatgcatatggctgcaaaggaaactttgaagggttaaatagagatttaaaaaaataaaataaaaaggctgggctagggtgctttttgtgctgaattctccacattgttaactgccaaagctagttttagagaatgagaaagtcttaagcaaaatactcccaggtctcactccagaacataaaaatggtgtgtgatcgaatggtatatattagaaattacatctgttgtaattaaaattgtgtgagcaattaaacatggttgactttttcaagcaaaaatcagttcatcttttgatgtaattttctaggctaaatggcaatctctgaaagatgaataaagctatatttatttagc

SEQ ID NO: 105295 - DNA, 1238 bp, Homo sapiens
ggagctcctgataatgtgtactgcgttacatgatctgtaaatcgtgggctacgcatcctctacacccgactggaacacgctttgcacctatgcgcacacgtgtttcgcggagagtggtgctcagcgttgtgccaggcgctgaatcaggctctggggtgcagcagtgacctcggtggtcatgtccccgcgtcgcccggccacctccgcagagcaagctgagcagggggctggctggaggccgacggcggaatcccctcaacggagcgccgccagggggcgcgcgaggcagggcggagctgcgtactttgtccgcccgcgcggcccgtcgctcgcgccgcggcgggaaaatccgacctggccgcgcaccaccgccccttctcggccctcctgcgtttgcccagggtcggcccgcagtgatggaggaggaggcggagaccgaggagcagcagcgattctcttaccaacagaggctaaaggcagcagttcactatactgtgggttgtctttgcgaggaagttgcattggacaaagagatgcagttcagcaaacagaccattgcggccatttcggagctgactttccgacagtgtgaaaattttgccaaagaccttgaaatgtttgcaagacatgcgaaaagaaccacaattaacactgaagatgtgaagctcttagccaggaggagtaattcactgctaaaatacatcacagacaaaagtgaagagattgctcagattaacctagaacgaaaagcacagaagaaaaagaagtcagaggatggaagcaaaaattcaaggcagccagcagaggctggagtggtggaaagtgagaattaaagtccctcgccgcttggaaagtgcagccttctacaggtagagccacctagaaatgcatatggctgcaaaggaaactttgaagggttaaatagagatttaaaaaaataaaataaaaaggctgggctagggtgctttttgtgctgaattctccacattgttaactgccaaagctagttttagagaatgagaaagtcttaagcaaaatactcccaggtctcactccagaacataaaaatggtgtgtgatcgaatggtatatattagaaattacatctgttgtaattaaaattgtgtgagcaattaaacatggttgactttttcaagcaaaaatcagttcatcttttgatgtaattttctaggctaaatggcaatctctgaaagatgaataaagctatatttatttagc

SEQ ID NO: 105296 - DNA, 1286 bp, Homo sapiens
ggaggcggtttccgcggcaacgcggctggaccctggcctgcgctggctggggaggaagcggttctaggggagcgtgcgggcgccggggtccggcgacgagaggccaccttctggccttgcgatgaatcctcggtttccccttctcagatggggttttcgtgagggtacaacgtcggcattagacattccaggtgacgcccgtacgcggtgggcggttcgggccggagctctggaacgctggccctggaggcgtcgacccctcgttactgatgcagggacgcggtgcggaccagtcaggcccagagctcgtccttagatgtgggttcgaatctctgccccgccaacttgtgatcgtatcgactcggcccagacgcaattttcttctctgcaaaatcgtcataagaataatcacttgtcagggtagctgcgggcatcccattcgttcctttcatcagcgccgggcatatggggcgtcagaggctgagaacgttgccgtgaagaggcttaaaagcaagacccggagtggcgaccttaaagaggacggactgaagaaacgcgggaatgagctccagacgcgggagtttcctctctacaaagttacactgcagcagctgtctaccctgccccttgtcttttgagaagttcaaaccttcagaaaagttgcaagaacacgacatgcgaaaagaaccacaattaacactgaagatgtgaagctcttagccaggaggagtaattcactgctaaaatacatcacagacaaaagtgaagagattgctcagattaacctagaacgaaaagcacagaagaaaaagaagtcagaggatggaagcaaaaattcaaggcagccagcagaggctggagtggtggaaagtgagaattaaagtccctcgccgcttggaaagtgcagccttctacaggtagagccacctagaaatgcatatggctgcaaaggaaactttgaagggttaaatagagatttaaaaaaataaaataaaaaggctgggctagggtgctttttgtgctgaattctccacattgttaactgccaaagctagttttagagaatgagaaagtcttaagcaaaatactcccaggtctcactccagaacataaaaatggtgtgtgatcgaatggtatatattagaaattacatctgttgtaattaaaattgtgtgagcaattaaacatggttgactttttcaagcaaaaatcagttcatcttttgatgtaattttctaggctaaatggcaatctctgaaagatgaataaagctatatttatttagc

SEQ ID NO: 105297 - DNA, 1154 bp, Homo sapiens
tgcccggtttttcattgtttcccaaacacctagcatatgcccttactgagttggagctctgcagatagtttggaataagtgagtgaaaccactcagggccttggcaggcatcagtctgacctgtctccccactgacttgccatctaatttcttatctttacctgacataaatcataaccattaacaaggaagtaatgtttccacaagtcgcactccagtgggtctcattaacttattagtacacttgaaaagccactcagccattatggaaagcgccagagggattgggctgagcagaccctctccttggtcttcattttttaaggcgtgaaaagctcttatttgcagccttacccgtgaaatattttgatgtttttccccagaggctaaaggcagcagttcactatactgtgggttgtctttgcgaggaagttgcattggacaaagagatgcagttcagcaaacagaccattgcggccatttcggagctgactttccgacagtgtgaaaattttgccaaagaccttgaaatgtttgcaagacatgcgaaaagaaccacaattaacactgaagatgtgaagctcttagccaggaggagtaattcactgctaaaatacatcacagacaaaagtgaagagattgctcagattaacctagaacgaaaagcacagaagaaaaagaagtcagaggatggaagcaaaaattcaaggcagccagcagaggctggagtggtggaaagtgagaattaaagtccctcgccgcttggaaagtgcagccttctacaggtagagccacctagaaatgcatatggctgcaaaggaaactttgaagggttaaatagagatttaaaaaaataaaataaaaaggctgggctagggtgctttttgtgctgaattctccacattgttaactgccaaagctagttttagagaatgagaaagtcttaagcaaaatactcccaggtctcactccagaacataaaaatggtgtgtgatcgaatggtatatattagaaattacatctgttgtaattaaaattgtgtgagcaattaaacatggttgactttttcaagcaaaaatcagttcatcttttgatgtaattttctaggctaaatggcaatctctgaaagatgaataaagctatatttatttagc

SEQ ID NO: 105298 - DNA, 1398 bp, Homo sapiens
ggaggcggtttccgcggcaacgcggctggaccctggcctgcgctggctggggaggaagcggttctaggggagcgtgcgggcgccggggtccggcgacgagaggccaccttctggccttgcgatgaatcctcggtttccccttctcagatggggttttcgtgagggtacaacgtcggcattagacattccaggtgacgcccgtacgcggtgggcggttcgggccggagctctggaacgctggccctggaggcgtcgacccctcgttactgatgcagggacgcggtgcggaccagtcaggcccagagctcgtccttagatgtgggttcgaatctctgccccgccaacttgtgatcgtatcgactcggcccagacgcaattttcttctctgcaaaatcgtcataagaataatcacttgtcagggtagctgcgggcatcccattcgttcctttcatcagcgccgggcatatggggcgtcagaggctgagaacgttgccgtgaagaggcttaaaagcaagacccggagtggcgaccttaaagaggacggactgaagaaacgcgggaatgagctccagacgcgggagtttcctctctacaaagttacactgcagcagctgtctaccctgccccttgtcttttgagaagttcaaaccttcagaaaagttgcaagaacacgaggctaaaggcagcagttcactatactgtgggttgtctttgcgaggaagttgcattggacaaagagatgcagttcagcaaacagaccattgcggccatttcggagctgactttccgacagtgtgaaaattttgccaaagaccttgaaatgtttgcaagacatgcgaaaagaaccacaattaacactgaagatgtgaagctcttagccaggaggagtaattcactgctaaaatacatcacagacaaaagtgaagagattgctcagattaacctagaacgaaaagcacagaagaaaaagaagtcagaggatggaagcaaaaattcaaggcagccagcagaggctggagtggtggaaagtgagaattaaagtccctcgccgcttggaaagtgcagccttctacaggtagagccacctagaaatgcatatggctgcaaaggaaactttgaagggttaaatagagatttaaaaaaataaaataaaaaggctgggctagggtgctttttgtgctgaattctccacattgttaactgccaaagctagttttagagaatgagaaagtcttaagcaaaatactcccaggtctcactccagaacataaaaatggtgtgtgatcgaatggtatatattagaaattacatctgttgtaattaaaattgtgtgagcaattaaacatggttgactttttcaagctaacacaaacaaaccaccacaaacaacaacacaca

SEQ ID NO: 105299 - DNA, 1238 bp, Homo sapiens
gcgttccaaaataagagcaaattcgctctaaacacaggaaaagacctgaagctttaattaaggggttacatccaaccccagagcgcttttgtgggcactgattgctccagcttctgcgtcactgcgcgagggaagagggaagaggatccaggcgttagacatgtatagacacaaaaacagctggagattgggcttaaaatacccaccaagctccaaagaagagacccaagtccccaaaacattgatttcagggctgccaggaaggaagagcagcagcagggtgggagagaagctccagtcagcccacaagatgccattgtcccccggcctcctgctgctgctgctctccggggccacggccaccgctgccctgcccctggagggtggccccaccggccgagacagcgagcatatgcaggaagcggcaggaataaggaaaagcagcctcctgactttcctcgcttggtggtttgagtggacctcccaggccagtgccgggcccctcataggagaggaagcccgggaggtggccaggcggcaggaaggcgcacccccccagcaatccgcgcgccgggacagaatgccctgcaggaacttcttctggaagaccttctcctcctgcaaataaaacctcacccatgaatgctcacgcaagtgtaatgacagacctgaataaaatgtattaagcagcagtgatctttcctctcctccttcccaagtcatttgaaaagtgtttgttatttaaattccaataatgcccaatactgacgtgtcttgagtaatttggaacccaaagtgaagatctttgataaagatttttttgtggttcgactggactgtgctgagtgcgggcactgggcttttcttctgatgttcattatggtgctgggaagctctgtctttgatttaaaataaaatagctaaaggctacacaattaagagttcagaataacatcttatttcagtttatgaattgatatgaattgtctaatttaaaaaatatttccctcacattaaaagcaaatttttaacatcaggctcgaagagcaaaatgattattcctcatgttttagctgaaattaattttaaaacatattaaacagaaaacctgctgacatgcctgtgaaactgatactcgaacttgctgttatgtaccagttttaattagtagcttaatgggttgcaattcttttcatggattatagcttcagatttgctttgggaggaatgaaggctac

SEQ ID NO: 105300 - DNA, 647 bp, Homo sapiens
  misc_feature (98)..(98): n is a, c, g, or t
tgaaaatggttttgccaaaaaacatggcgaaaaaagaacccaccaatttaaccacttaaaaatgtgaaagctctttagccaaggaggaagtaattcanctgctaaaatacatcacagacaaaagtgaagagattgctcagattaacctagaacgaaaagcacagaagaaaaagaagtcagaggatggaagcaaaaattcaaggcagccagcagaggctggagtggtggaaagtgagaattaaagtccctcgccgcttggaaagtgcagccttctacaggtagagccacctagaaatgcatatggctgcaaaggaaactttgaagggttaaatagagatttaaaaaaataaaataaaaaggctgggctagggtgctttttgtgctgaattctccacattgttaactgccaaagctagttttagagaatgagaaagtcttaagcaaaatactcccaggtctcactccagaacataaaaatggtgtgtgatcgaatggtatatattagaaattacatctgttgtaattaaaattgtgtgagcaattaaacatggttgactttttcaagcaaaaatcagttcatcttttgatgtaattttctaggctaaatggcaatctctgaaagatgaataaagctatatttatttagc

SEQ ID NO: 105301 - DNA, 1640 bp, Homo sapiens
  misc_feature (1624)..(1624): n is a, c, g, or t
  misc_feature (1636)..(1636): n is a, c, g, or t
ggaggcggtttccgcggcaacgcggctggaccctggcctgcgctggctggggaggaagcggttctaggggagcgtgcgggcgccggggtccggcgacgagaggccaccttctggccttgcgatgaatcctcggtttccccttctcagatggggttttcgtgagggtacaacgtcggcattagacattccaggtgacgcccgtacgcggtgggcggttcgggccggagctctggaacgctggccctggaggcgtcgacccctcgttactgatgcagggacgcggtgcggaccagtcaggcccagagctcgtccttagatgtgggttcgaatctctgccccgccaacttgtgatcgtatcgactcggcccagacgcaattttcttctctgcaaaatcgtcataagaataatcacttgtcagggtagctgcgggcatcccattcgttcctttcatcagcgccgggcatatggggcgtcagaggctgagaacgttgccgtgaagaggcttaaaagcaagacccggagtggcgaccttaaagaggacggactgaagaaacgcgggaatgagctccagacgcgggagtttcctctctacaaagttacactgcagcagctgtctaccctgccccttgtcttttgagaagttcaaaccttcagaaaagttgcaagaacacgaggctaaaggcagcagttcactatactgtgggttgtctttgcgaggaagttgcattggacaaagagatgcagttcagcaaacagaccattgcggccatttcggagctgactttccgacagtgtgaaaattttgccaaagaccttgaaatgtttgcaagacatgcgaaaagaaccacaattaacactgaagatgtgaagctcttagccaggaggagtaattcactgctaaaatacatcacagacaaaagtgaagagattgctcagattaacctagaacgaaaagcacagaagaaaaagaagtcagaggatggaagcaaaaattcaaggcagccagcagaggctggagtggtggaaagtgagaattaaagtccctcgccgcttggaaagtgcagccttctacagcatatgcaggaagcggcaggaataaggaaaagcagcctcctgactttcctcgcttggtggtttgagtggacctcccaggccagtgccgggcccctcataggagaggaagcccgggaggtggccaggcggcaggaaggcgcacccccccagcaatccgcgcgccgggacagaatgccctgcaggaacttcttctggaagaccttctcctcctgcaaataaaacctcacccatgaatgctcacgcaagtgtaatgacagacctgaataaaatgtattaagcagcagtgatctttcctctcctccttcccaagtcatttgaaaagtgtttgttatttaaattccaataatgcccaatactgacgtgtcttgagtaatttggaacccaaagtgaagatctttgataaagatttttttgtggttcgactggactgtgctgagtgcgggcactgggcttttcttctgatgttcattatggtgctgggaagctctgtctttgatttaaaataaaatagctaaaggctacacaattaagagttcaaaaaaaaaaaancggcctgttggnctca

SEQ ID NO: 105302 - DNA, 1114 bp, Homo sapiens
ggaggcggtttccgcggcaacgcggctggaccctggcctgcgctggctggggaggaagcggttctaggggagcgtgcgggcgccggggtccggcgacgagaggccaccttctggccttgcgatgaatcctcggtttccccttctcagatggggttttcgtgagggtacaacgtcggcattagacattccaggtgacgcccgtacgcggtgggcggttcgggccggagctctggaacgctggccctggaggcgtcgacccctcgttactgatgcagggacgcggtgcggaccagtcaggcccagagctcgtccttagatgtgggttcgaatctctgccccgccaacttgtgatcgtatcgactcggcccagacgcaattttcttctctgcaaaatcgtcataagaataatcacttgtcagggtagctgcgggcatcccattcgttcctttcatcagcgccgggcatatggggcgtcagaggctgagaacgttgccgtgaagaggcttaaaagcaagacccggagtggcgaccttaaagaggacggactgaagaaacgcgggaatgagctccagacgcgggagtttcctctctacaaagttacactgcagcagctgtctaccctgccccttgtcttttgagaagttcaaaccttcagaaaagttgcaagaacacgaggctaaaggcagcagttcactatactgtgggttgtctttgcgaggaagttgcattggacaaagagatgcagttcagcaaacagaccattgcggccatttcggagctgactttccgacagtgtgaaaattttgccaaagaccttgaaatgtttgcaagcatatgcaggaagcggcaggaataaggaaaagcagcctcctgactttcctcgcttggtggtttgagtggacctcccaggccagtgccgggcccctcataggagaggaagcccgggaggtggccaggcggcaggaaggcgcacccccccagcaatccgcgcgccgggacagaatgccctgcaggaacttcttctggaagaccttctcctcctgcaaataaaacctcacccatgaatgctcacgcaagtgtaatgacagacctgaataaaatgtattaagcagca

SEQ ID NO: 105303 - DNA, 940 bp, Homo sapiens
ggaggcggtttccgcggcaacgcggctggaccctggcctgcgctggctggggaggaagcggttctaggggagcgtgcgggcgccggggtccggcgacgagaggccaccttctggccttgcgatgaatcctcggtttccccttctcagatggggttttcgtgagggtacaacgtcggcattagacattccaggtgacgcccgtacgcggtgggcggttcgggccggagctctggaacgctggccctggaggcgtcgacccctcgttactgatgcagggacgcggtgcggaccagtcaggcccagagctcgtccttagatgtgggttcgaatctctgccccgccaacttgtgatcgtatcgactcggcccagacgcaattttcttctctgcaaaatcgtcataagaataatcacttgtcagggtagctgcgggcatcccattcgttcctttcatcagcgccgggcatatggggcgtcagaggctgagaacgttgccgtgaagaggcttaaaagcaagacccggagtggcgaccttaaagaggacggactgaagaaacgcgggaatgagctccagacgcgggagtttcctctctacaaagttacactgcagcagctgtctaccctgccccttgtcttttgagaagttcaaaccttcagaaaagttgcaagaacacgaggctaaaggcagcagttcactatactgtgggttgtctttgcgaggaagttgcattggacaaagagatgcagttcagcaaacagaccattgcggccatttcggagctgactttccgacagtgtgaaaattttgccaaagaccttgaaatgtttgcaagcaattaaacatggttgactttttcaagcaaaaatcagttcatcttttgatgtaattttctaggctaaatggcaatctctgaaagatgaataaagctatatttatttagc

SEQ ID NO: 105304 - DNA, 885 bp, Homo sapiens
acagaaggcacacaccccccgttccgccccccccgaccccttcatggtgacgcgagcatatgcaggaagcggcaggaataaggaaaagcagcctcctgactttcctcgcttggtggtttgagtggacctcccaggccagtgccgggcccctcataggagaggaagcccgggaggtggccaggcggcaggaaggcgcacccccccagcaatccgcgcgccgggacagaatgccctgcaggaacttcttctggaagaccttctcctcctgcaaataaaacctcacccatgaatgctcacgcaagtgtaatgacagacctgaataaaatgtattaagcagcagtgatctttcctctcctccttcccaagtcatttgaaaagtgtttgttatttaaattccaataatgcccaatactgacgtgtcttgagtaatttggaacccaaagtgaagatctttgataaagatttttttgtggttcgactggactgtgctgagtgcgggcactgggcttttcttctgatgttcattatggtgctgggaagctctgtctttgatttaaaataaaatagctaaaggctacacaattaagagttcagaataacatcttatttcagtttatgaattgatatgaattgtctaatttaaaaaatatttccctcacattaaaagcaaatttttaacatcaggctcgaagagcaaaatgattattcctcatgttttagctgaaattaattttaaaacatattaaacagaaaacctgctgacatgcctgtgaaactgatactcgaacttgctgttatgtaccagttttaattagtagcttaatgggttgcaattcttttcatggattatagcttcagatttgctttgggaggaatgaaggctac

SEQ ID NO: 105305 - DNA, 692 bp, Homo sapiens
gcgttccaaaataagagcaaattcgctctaaacacaggaaaagacctgaagctttaattaaggggttacatccaaccccagagcgcttttgtgggcactgattgctccagcttctgcgtcactgcgcgagggaagagggaagaggatccaggcgttagacatgtatagacacaaaaacagctggagattgggcttaaaatacccaccaagctccaaagaagagacccaagtccccaaaacattgatttcagggctgccaggaaggaagagcagcagcagggtgggagagaagctccagtcagcccacaagatgccattgtcccccggcctcctgctgctgctgctctccggggccacggccaccgctgccctgcccctggagggtggccccaccggccgagacagcgagcatatgcaggaagcggcaggaataaggaaaagcagcctcctgactttcctcgcttggtggtttgagtggacctcccaggccagtgccgggcccctcataggagaggaagcccgggaggtggccaggcggcaggaaggcgcacccccccagcaatccgcgcgccgggacagaatgccctgcaggaacttcttctggaagaccttctcctcctgcaaataaaacctcacccatgaatgctcacgcaagtgtaatgacagacctgaataaaatgtattaagcagca

SEQ ID NO: 105306 - DNA, 578 bp, Homo sapiens
ggagctcctgataatgtgtactgcgttacatgatctgtaaatcgtgggctacgcatcctctacacccgactggaacacgctttgcacctatgcgcacacgtgtttcgcggagagtggtgctcagcgttgtgccaggcgctgaatcaggctctggggtgcagcagtgacctcggtggtcatgtccccgcgtcgcccggccacctccgcagagcaagctgagcagggggctggctggaggccgacggcggaatcccctcaacggagcgccgccagggggcgcgcgaggcagggcggagctgcgtactttgtccgcccgcgcggcccgtcgctcgcgccgcggcgggaaaatccgacctggccgcgcaccaccgccccttctcggccctcctgcgtttgcccagggtcggcccgcagtgatggaggaggaggcggagaccgaggagcagcagcgattctcttaccaacaggtacaggaaaacgggggtcgggctgggctggggcaggacggcgtcgagtttctggacagaaaagtacccggcagcccccggcggcttctcatcggcaccccgcccccgggc

SEQ ID NO: 105307 - DNA, 1764 bp, Homo sapiens
ggagctcctgataatgtgtactgcgttacatgatctgtaaatcgtgggctacgcatcctctacacccgactggaacacgctttgcacctatgcgcacacgtgtttcgcggagagtggtgctcagcgttgtgccaggcgctgaatcaggctctggggtgcagcagtgacctcggtggtcatgtccccgcgtcgcccggccacctccgcagagcaagctgagcagggggctggctggaggccgacggcggaatcccctcaacggagcgccgccagggggcgcgcgaggcagggcggagctgcgtactttgtccgcccgcgcggcccgtcgctcgcgccgcggcgggaaaatccgacctggccgcgcaccaccgccccttctcggccctcctgcgtttgcccagggtcggcccgcagtgatggaggaggaggcggagaccgaggagcagcagcgattctcttaccaacagatggggttttcgtgagggtacaacgtcggcattagacattccaggtgacgcccgtacgcggtgggcggttcgggccggagctctggaacgctggccctggaggcgtcgacccctcgttactgatgcagggacgcggtgcggaccagtcaggcccagagctcgtccttagatgtgggttcgaatctctgccccgccaacttgtgatcgtatcgactcggcccagacgcaattttcttctctgcaaaatcgtcataagaataatcacttgtcagggtagctgcgggcatcccattcgttcctttcatcagcgccgggcatatggggcgtcagaggctgagaacgttgccgtgaagaggcttaaaagcaagacccggagtggcgaccttaaagaggacggactgaagaaacgcgggaatgagctccagacgcgggagtttcctctctacaaagttacactgcagcagctgtctaccctgccccttgtcttttgagaagttcaaaccttcagaaaagttgcaagaacacgaggctaaaggcagcagttcactatactgtgggttgtctttgcgaggaagttgcattggacaaagagatgcagttcagcaaacagaccattgcggccatttcggagctgactttccgacagtgtgaaaattttgccaaagaccttgaaatgtttgcaagacatgcgaaaagaaccacaattaacactgaagatgtgaagctcttagccaggaggagtaattcactgctaaaatacatcacagacaaaagtgaagagattgctcagattaacctagaacgaaaagcacagaagaaaaagaagtcagaggatggaagcaaaaattcaaggcagccagcagaggctggagtggtggaaagtgagaattaaagtccctcgccgcttggaaagtgcagccttctacaggtagagccacctagaaatgcatatggctgcaaaggaaactttgaagggttaaatagagatttaaaaaaataaaataaaaaggctgggctagggtgctttttgtgctgaattctccacattgttaactgccaaagctagttttagagaatgagaaagtcttaagcaaaatactcccaggtctcactccagaacataaaaatggtgtgtgatcgaatggtatatattagaaattacatctgttgtaattaaaattgtgtgagcaattaaacatggttgactttttcaagcaaaaatcagttcatcttttgatgtaattttctaggctaaatggcaatctctgaaagatgaataaagctatatttatttagc

SEQ ID NO: 105308 - DNA, 1904 bp, Homo sapiens
ggaggcggtttccgcggcaacgcggctggaccctggcctgcgctggctggggaggaagcggttctaggggagcgtgcgggcgccggggtccggcgacgagaggccaccttctggccttgcgatgaatcctcggtttccccttctcagatggggttttcgtgagggtacaacgtcggcattagacattccaggtgacgcccgtacgcggtgggcggttcgggccggagctctggaacgctggccctggaggcgtcgacccctcgttactgatgcagggacgcggtgcggaccagtcaggcccagagctcgtccttagatgtgggttcgaatctctgccccgccaacttgtgatcgtatcgactcggcccagacgcaattttcttctctgcaaaatcgtcataagaataatcacttgtcagggtagctgcgggcatcccattcgttcctttcatcagcgccgggcatatggggcgtcagaggctgagaacgttgccgtgaagaggcttaaaagcaagacccggagtggcgaccttaaagaggacggactgaagaaacgcgggaatgagctccagacgcgggagtttcctctctacaaagttacactgcagcagctgtctaccctgccccttgtcttttgagaagttcaaaccttcagaaaagttgcaagaacacgaggctaaaggcagcagttcactatactgtgggttgtctttgcgaggaagttgcattggacaaagagatgcagttcagcaaacagaccattgcggccatttcggagctgactttccgacagtgtgaaaattttgccaaagaccttgaaatgtttgcaagacatgcgaaaagaaccacaattaacactgaagatgtgaagctcttagccaggaggagtaattcactgctaaaatacatcacagacaaaagtgaagagattgctcagattaacctagaacgaaaagcacagaagaaaaagaagtcagaggatggaagcaaaaattcaaggcagccagcagaggctggagtggtggaaagtgagaattaaagtccctcgccgcttggaaagtgcagccttctacagcatatgcaggaagcggcaggaataaggaaaagcagcctcctgactttcctcgcttggtggtttgagtggacctcccaggccagtgccgggcccctcataggagaggaagcccgggaggtggccaggcggcaggaaggcgcacccccccagcaatccgcgcgccgggacagaatgccctgcaggaacttcttctggaagaccttctcctcctgcaaataaaacctcacccatgaatgctcacgcaagtgtaatgacagacctgaataaaatgtattaagcagcagtgatctttcctctcctccttcccaagtcatttgaaaagtgtttgttatttaaattccaataatgcccaatactgacgtgtcttgagtaatttggaacccaaagtgaagatctttgataaagatttttttgtggttcgactggactgtgctgagtgcgggcactgggcttttcttctgatgttcattatggtgctgggaagctctgtctttgatttaaaataaaatagctaaaggctacacaattaagagttcagaataacatcttatttcagtttatgaattgatatgaattgtctaatttaaaaaatatttccctcacattaaaagcaaatttttaacatcaggctcgaagagcaaaatgattattcctcatgttttagctgaaattaattttaaaacatattaaacagaaaacctgctgacatgcctgtgaaactgatactcgaacttgctgttatgtaccagttttaattagtagcttaatgggttgcaattcttttcatggattatagcttcagatttgctttgggaggaatgaaggctac

SEQ ID NO: 105309 - DNA, 1358 bp, Homo sapiens
ggaggcggtttccgcggcaacgcggctggaccctggcctgcgctggctggggaggaagcggttctaggggagcgtgcgggcgccggggtccggcgacgagaggccaccttctggccttgcgatgaatcctcggtttccccttctcagatggggttttcgtgagggtacaacgtcggcattagacattccaggtgacgcccgtacgcggtgggcggttcgggccggagctctggaacgctggccctggaggcgtcgacccctcgttactgatgcagggacgcggtgcggaccagtcaggcccagagctcgtccttagatgtgggttcgaatctctgccccgccaacttgtgatcgtatcgactcggcccagacgcaattttcttctctgcaaaatcgtcataagaataatcacttgtcagggtagctgcgggcatcccattcgttcctttcatcagcgccgggcatatggggcgtcagaggctgagaacgttgccgtgaagaggcttaaaagcaagacccggagtggcgaccttaaagaggacggactgaagaaacgcgggaatgagctccagacgcgggagtttcctctctacaaagttacactgcagcagctgtctaccctgccccttgtcttttgagaagttcaaaccttcagaaaagttgcaagaacacgaggctaaaggcagcagttcactatactgtgggttgtctttgcgaggaagttgcattggacaaagagatgcagttcagcaaacagaccattgcggccatttcggagctgactttccgacagtgtgaaaattttgccaaagaccttgaaatgtttgcaagacatgcgaaaagaaccacaattaacactgaagatgtgaagctcttagccaggaggagtaattcactgctaaaatacatcacagacaaaagtgaagagattgctcagattaacctagaacgaaaagcacagaagaaaaagaagtcagaggatggaagcaaaaattcaaggcagccagcagaggctggagtggtggaaagtgagaattaaagtccctcgccgcttggaaagtgcagccttctacagcatatgcaggaagcggcaggaataaggaaaagcagcctcctgactttcctcgcttggtggtttgagtggacctcccaggccagtgccgggcccctcataggagaggaagcccgggaggtggccaggcggcaggaaggcgcacccccccagcaatccgcgcgccgggacagaatgccctgcaggaacttcttctggaagaccttctcctcctgcaaataaaacctcacccatgaatgctcacgcaagtgtaatgacagacctgaataaaatgtattaagcagca

SEQ ID NO: 105310 - DNA, 1386 bp, Homo sapiens
  misc_feature (1370)..(1370): n is a, c, g, or t
  misc_feature (1382)..(1382): n is a, c, g, or t
ggaggcggtttccgcggcaacgcggctggaccctggcctgcgctggctggggaggaagcggttctaggggagcgtgcgggcgccggggtccggcgacgagaggccaccttctggccttgcgatgaatcctcggtttccccttctcagatggggttttcgtgagggtacaacgtcggcattagacattccaggtgacgcccgtacgcggtgggcggttcgggccggagctctggaacgctggccctggaggcgtcgacccctcgttactgatgcagggacgcggtgcggaccagtcaggcccagagctcgtccttagatgtgggttcgaatctctgccccgccaacttgtgatcgtatcgactcggcccagacgcaattttcttctctgcaaaatcgtcataagaataatcacttgtcagggtagctgcgggcatcccattcgttcctttcatcagcgccgggcatatggggcgtcagaggctgagaacgttgccgtgaagaggcttaaaagcaagacccggagtggcgaccttaaagaggacggactgaagaaacgcgggaatgagctccagacgcgggagtttcctctctacaaagttacactgcagcagctgtctaccctgccccttgtcttttgagaagttcaaaccttcagaaaagttgcaagaacacgaggctaaaggcagcagttcactatactgtgggttgtctttgcgaggaagttgcattggacaaagagatgcagttcagcaaacagaccattgcggccatttcggagctgactttccgacagtgtgaaaattttgccaaagaccttgaaatgtttgcaagacatgcgaaaagaaccacaattaacactgaagatgtgaagctcttagccaggaggagtaattcactgctaaaatacatcacagacaaaagtgaagagattgctcagattaacctagaacgaaaagcacagaagaaaaagaagtcagaggatggaagcaaaaattcaaggcagccagcagaggctggagtggtggaaagtgagaattaaagtccctcgccgcttggaaagtgcagccttctacagcatatgcaggaagcggcaggaataaggaaaagcagcctcctgactttcctcgcttggtggtttgagtggacctcccaggccagtgccgggcccctcataggagaggaagcccgggaggtggccaggcggcaggaaggcgcacccccccagcaatccgcgcgccgggacagaatgccctgcaggaacttcttctggaagaccttctcctcctgcaaataaaacctcacccatgaatgctcacgcaagtgtaatgacagacctgaataaaatgtattaagcagcaaaaaaaaaaaancggcctgttggnctca

SEQ ID NO: 105311 - DNA, 1181 bp, Homo sapiens
ggaggcggtttccgcggcaacgcggctggaccctggcctgcgctggctggggaggaagcggttctaggggagcgtgcgggcgccggggtccggcgacgagaggccaccttctggccttgcgatgaatcctcggtttccccttctcagatggggttttcgtgagggtacaacgtcggcattagacattccaggtgacgcccgtacgcggtgggcggttcgggccggagctctggaacgctggccctggaggcgtcgacccctcgttactgatgcagggacgcggtgcggaccagtcaggcccagagctcgtccttagatgtgggttcgaatctctgccccgccaacttgtgatcgtatcgactcggcccagacgcaattttcttctctgcaaaatcgtcataagaataatcacttgtcagggtagctgcgggcatcccattcgttcctttcatcagcgccgggcatatggggcgtcagaggctgagaacgttgccgtgaagaggcttaaaagcaagacccggagtggcgaccttaaagaggacggactgaagaaacgcgggaatgagctccagacgcgggagtttcctctctacaaagttacactgcagcagctgtctaccctgccccttgtcttttgagaagttcaaaccttcagaaaagttgcaagaacacgaggctaaaggcagcagttcactatactgtgggttgtctttgcgaggaagttgcattggacaaagagatgcagttcagcaaacagaccattgcggccatttcggagctgactttccgacagtgtgaaaattttgccaaagaccttgaaatgtttgcaagacatgcgaaaagaaccacaattaacactgaagatgtgaagctcttagccaggaggagtaattcactgcatatgcaggaagcggcaggaataaggaaaagcagcctcctgactttcctcgcttggtggtttgagtggacctcccaggccagtgccgggcccctcataggagaggaagcccgggaggtggccaggcggcaggaaggcgcacccccccagcaatccgcgcgccgggacagaatgccctgcaggaacttcttctggaagaccttctcctcctgcaaataaaacctcacccatgaatgctcacgcaagtgtaatgacagacctgaataaaatgtattaagcagca

SEQ ID NO: 105312 - DNA, 1023 bp, Homo sapiens
ggaggcggtttccgcggcaacgcggctggaccctggcctgcgctggctggggaggaagcggttctaggggagcgtgcgggcgccggggtccggcgacgagaggccaccttctggccttgcgatgaatcctcggtttccccttctcagatggggttttcgtgagggtacaacgtcggcattagacattccaggtgacgcccgtacgcggtgggcggttcgggccggagctctggaacgctggccctggaggcgtcgacccctcgttactgatgcagggacgcggtgcggaccagtcaggcccagagctcgtccttagatgtgggttcgaatctctgccccgccaacttgtgatcgtatcgactcggcccagacgcaattttcttctctgcaaaatcgtcataagaataatcacttgtcagggtagctgcgggcatcccattcgttcctttcatcagcgccgggcatatggggcgtcagaggctgagaacgttgccgtgaagaggcttaaaagcaagacccggagtggcgaccttaaagaggacggactgaagaaacgcgggaatgagctccagacgcgggagtttcctctctacaaagttacactgcagcagctgtctaccctgccccttgtcttttgagaagttcaaaccttcagaaaagttgcaagaacacgacatgcgaaaagaaccacaattaacactgaagatgtgaagctcttagccaggaggagtaattcactgcatatgcaggaagcggcaggaataaggaaaagcagcctcctgactttcctcgcttggtggtttgagtggacctcccaggccagtgccgggcccctcataggagaggaagcccgggaggtggccaggcggcaggaaggcgcacccccccagcaatccgcgcgccgggacagaatgccctgcaggaacttcttctggaagaccttctcctcctgcaaataaaacctcacccatgaatgctcacgcaagtgtaatgacagacctgaataaaatgtattaagcagca

SEQ ID NO: 105313 - DNA, 397 bp, Homo sapiens
gtgtttaatttttttgtacctgtaacctccattcccgaacaacctttaccgtcttatctactcctctctggcaaatgcctaccctaagaatccgccacagcatcactatcacgccgaattaactgttgcctcctcttaagttcccggggacaatacttctgtgaattccagaccagggccgctatggatcgcgactcccagcgggcagagacctactccctcctacaaccactacctgctacatgacacctttggaaaaccttggctgactaaatttaaaaaccacatcacccaaggcacacatctcctacatcatacacgtcaatctccacagcctacgtaggaaaatcctcaagggaaccccggcacgaattcaaggccagacccacaagccagg

SEQ ID NO: 105314 - DNA, 839 bp, Homo sapiens
gatcactttgggtagctatatcaacagtattcttccagtgtataaacacaatattttttatttattcatttgtattttatattttttatccatgttttgtcgttttcagagtagagatcttttacctttttagttaagtttgttgctaggtgtattagttgggcttccctagagagatcatgagatcccacaataggttgtctgcaagtttgaggagcaaggagaggtggtccatgtcccaaagctgaagaacttggagtctgatgtttgagggctgcaagtgtccagcacaggagaaagatgtagtctgggagcttaggccagtctctctttttcacgtttttctgcctgctttatattcactgtcagctcattagatggtgctcacccaattaagagtggatctccctttcccagcccactgactcaaatgttaatctcctttggcaacaccctcacagacacacccaggatcaatgctttctatcctccaatccaatcaatttgacaccctgtattagccatcacattaagtattttcatttttgtagcttttgcatatgcagaagaagaattggatgaaattcagccttgattatgatgaaaactctcaacaagttaggaatagaaggtatgtgccttaactcaataaaggccatttatgaaaaagcaatgctaactttatactgaataaggaaaagttgaaagctttctctctgagatctggaacaagacaaatcgtccaaactttcagccctcttattcaacatagtactggaagtcctagccaaggaaattaggcaagaggaagaaataaaagtcatactaattgaaaggat

SEQ ID NO: 105315 - DNA, 246 bp, Homo sapiens
ggagcctaagaggggttgtgaagcagaacttctgttggccctgttcagcttgggggagactctgtgtgggatgtcttgagtgttccaggacgtgcctctcaccttgtctgccattgtattcacagcttagtccccagtggtaggcaaagctcatgctcttaacatttacattatgttgtctttatgaggagctatatccacatgaagtattgtttcaagtgtgtgatatcacacatagactcaaca

SEQ ID NO: 105316 - DNA, 165 bp, Homo sapiens
ggagccacagggaaagggtaatctcacagccttgcggagatggactctggtcacaaagcttcagggactacaagtgctcagtcctttggactgagttgaccacacccagctactcactacttgagagctgagtaggggacaactaggtcctctgaggttctgcgc

SEQ ID NO: 105317 - DNA, 558 bp, Homo sapiens
tttcaattatctagctaatggtcagtcttgtttcatctctacttgcttatttttaaacaaatgcttctatcagttcaatatatagttcagaattttctctagagtgtttagaagaaaacatgcatattacacgtaaaacaacagtaactatgagtaattaattttaatgtcagatattcagacagatatcaaatttccccagttgtaactcactacctcccacccccatgcatatgtggtaaaggttgttggagtcaggatccaactaatgttcataattcatttataattggttacgattgataactctcaagtctataaactccccacctaccttttcttagagtttacttgaagaaaaaccttgctttttatacattatttagataatcttttgcttcatcagcatctgaattcatgaattttgatgtgactttaaaaatgtacttgataaggccagccaccgtttcctgcccgaaactctattttaaaagctggcttcttcccactgatttggctttttgtgtggcggaaaaatcattggtggttaaacccccg

SEQ ID NO: 105318 - DNA, 254 bp, Homo sapiens
gcatatgtggtaaaggttgttggagtcaggatccaactaatgttcataattcatttataattggttacgattgataactctcaagtctataaactccccacctaccttttcttagagtttacttgaagaaaaaccttgctttttatacattatttagataatcttttgcttcatcagcatctgaattcatgaattttgatgtgactttaaaaatgtacttgataaggccggggcacggtggctcacgcctgtaa

SEQ ID NO: 105319 - DNA, 240 bp, Homo sapiens
aaaatactagtttacccgtggggcttgattttcctcttaatagtgattctcattggttgtggtaccctttcctggggcattttggttggcgtggttgtgggaagggcgctactggcatttagttgggggcaagcagaggtgccaaatgccctgcaatgagtgaggcagtccaagaaaatgaagaattgacccttgtacttgggaatttcgtatcttcttctgtaggagcaatatgaatct

SEQ ID NO: 105320 - DNA, 764 bp, Homo sapiens
ccaaacacttgccttgttaaagccaagcaaacatttggtctttatttccttgtcagtaccagcctctatccttctttatccttcagtctttctcctcttctctcccaacctctctaccctcctctgttaagaacctgtacaaattccaactcaggtaggatgacacataacacataattatttctttcactcaaggcctgaggaactaagtcaagtctacgaatctgtttttgttgctaattttttgtttgtggatttttaaaacactaaagttgatcaatttatttgtacgttatttacatatgtgcatatacgaacacatacagtatatgcaaaattcatctttctgtctcagaatttaggagcctaaaggaaagaccatgtgccaaccatgaatctaatacatgacgtatgctaccaacataaacttgcatgcatcagaggctatcagaaataatatgggaaaataggtctctaccaagtgacttcataaggagtgaatgatattttcttgactctaactctaatgagatcatgttttcttctggctcatgtctttgcctgtatgttctgttttctacatctttttcaaattacccttcacttttcagctttattcctctgcttctgtctgacttaaagctaatgtatgaaacgcacaagaatttggatggaaaagcccatggcaagttttggcagaggttccaccagtctttccataaagggcaggaggaaaagtcattttcagaataggtcaggtgaca

SEQ ID NO: 105321 - DNA, 656 bp, Homo sapiens
ggaagatggtgacatgcacaaggctacacaaataataaataaggattgggaaacatacatttgggtctcttgactccaatttggttgctcttttaatgataccaaccactttgaccattcaaaggggtcattgtggtcccaccagcccccctccatacctgctgagcccaagtacagactcaaaaggaatttcccttgtggctagaggatgtactgtataaaagatcaggatcccatttcacctttcctttctttcagaactatcttagctttacctttggataaatgtatgtcattagtgggagatcatctgcctcttaaattcttatctttcacaatggacaccagacttccttttaaggtgctatgtgtgactcatcagtagtttaaaattttgtaagatacatgaacattttctgattgagaaacactttagaaatgctgaacatattattgtgaaataacaatgactaatattgttgttaaattgttgaattgtaatagctttaaccttttttgattcagtctgtttattccaagttatcttgccttttaaatggctttgaaacattggcaaacaatgctggtctctcttacagatctcagtcctgcttttaacaatgacaggcagtgtattcaaaacatacctgaattgg

SEQ ID NO: 105322 - DNA, 598 bp, Homo sapiens
aaaaaaaaagcacatgttagaacaataacattatgatctcatttctgtaaaaattaaaaagaatgggctgtgcatatatgcataaatatgtaggtatatacatttacatctgcataagcataaaaaaatatggaagatagcacccacagtgtcaacagtggtttcctttgaagtgtagggtttaatttcttccttagtttgctcattcattcattcagtaaatgtacactgagtgcctactacacgctaagcactattttaggcactgaggatacaatgatatgtaaaatccctgtcctcatggagcttacactctaatgcaggaagacagacagtaaagaaataaaattatagtatcttggatggtgatatgtgctatagagaaaaataaaatagagaaaggagatgggagggcggtttgcagtttcaaataaagtggattgaaagtgtagagggaacattttatatctttgtatccttaaataattggtaggattatcaagtgttttcctttcttatcatgtgagtagttttctgtatagcccaaataaacagtataaaaaagagaataaaaagttatttttttcccagaattaaa

SEQ ID NO: 105323 - DNA, 172 bp, Homo sapiens
cttttcctaacactcacaacaaaactaactaacactaacatctcagacgctcaggaaatagaaaccgtctgaactaccctccccaccattgcccacccgctgcctgcctgccccatcccccaacccagttccctggtctgcctgcctttattgatgctggcctaccgagaga

SEQ ID NO: 105324 - DNA, 379 bp, Homo sapiens
aatatcacaattgaaattttactcctttacaagcctatggaaagtatattatgaatggtcaattttcagctgtcatcccagtcaccctttcagtggcattcaaacagttactaattgctccatccttcttgaaactctttatttggcctctatgactgtagactcttctggttctcttctaccttattagctttctctgctgggtccttctcaccttcccaacctctaaatactggcccattccagggctccttcatcagatctctttccaatgcctacactcaattcccaaatgatctcccattcatccgttctatacctttaaatctccagtcttggtctctcccctgaactcccaacttttatgtctgactgccct

SEQ ID NO: 105325 - DNA, 117 bp, Homo sapiens
gcgagttcgagaccagcctggacaatatagggagaccctgcctccacaaaaaataaaaattaaaattaatccaatgccctagttgaccaatcatttcggaagggcttggagagggtc

SEQ ID NO: 105326 - DNA, 534 bp, Homo sapiens
attgattctctttctttctttctttctttctttctttctttctttctttctttcttcctttctttctttctttcttttttcctttctttctttctttcttttttttggggagaagaaggaatagaggacagcagaatacctaacgcatttgtgatgcgctgcttataaatgcatgttcagaggcaaatgaccatgataaactaccatctaggaaactgctttatttaaatgaagtcatttccctcctgctgccttacagggcatcaacaaatgagttgtgcgtgaggaagggagaagcacgtagtgctgatgctcactgtgtcatcttgcaggggcttcgttatggagaggtatgccgatgctgatccagacagcctaactggcagcctgaactgactaatggagccatctgcatgttggctgacatctggttttagaagttatttataaagaaaggatcgttgtaatcaaaacagccagagaggttttaaatgtcaaatgtactgggaaagattcacttagggtgactggcac

SEQ ID NO: 105327 - DNA, 234 bp, Homo sapiens
gtacatgcacattgagtagaacagtggcccccaacctttttgcaccaaggactggtttcatggaagacaaattttccatgggctgggagtggggttggggggtggaggggatggttttggggtgaaactgttccacctcaaatcatgaggcattagattcccataaaggagcgtgcaacgtggaaccctcgcatgcacaattcacaatagggttcgctcctttgagaatctaat

SEQ ID NO: 105328 - DNA, 297 bp, Homo sapiens
atcatctagaagagatgaataaactcctagacacatgcaatataccaagattaaagagtaaaaaaaaaaaacatagaaaatctgaacagaccaaaaaaagtgaggagacttgttcagtaattaatgtttcccatcaaagaaaaccccaagacctggtaaacccactgctgaattctattaaacatttgaagaaaaactactatcaattcttctccaaaaccagataacaacactacaaaaggaaggaaggaaggaaggaaggaaagaaggaaggaaggaaggaaggaaggaaggaag

SEQ ID NO: 105329 - DNA, 653 bp, Homo sapiens
gttattgtggcatatattctcaacaactctgaaatattcctgctgaggaaaaaaaaatcagttttcacatcttaaaatttaaagcatattttaacagtggttctcaaagtgtagctgggccacagcaaagtgctgggccagctgcatcagcattaacagggaattgggaaacatgcaaatccctccaccccatcccagaccaaatgaatgaaagagttgaggcccactaaagagttttacaaatcctgggtgatttgaatacacaattttgagaaccaccgtgctaaattcatttttcctaactgcggtacctactcaagatttatattcaaattaacttctgggtcatatagatgtttacattgatctattttagtttcactcttatatttcctctagtgttgagacaatattttatatctttcctctgccttccctgatagtttaacacacttttgaacagaatcttagagtattagaactagaggaaatgatcagccagaatctgtcattttgtgagttaaaaatgcctgatccagtggatgtgaggtcacttgtccatgttcacacagatgtaggtactggtagctcctagatttttgtataccttttcttccatttcaattatagacactctgtctttttcactaaaa

SEQ ID NO: 105330 - DNA, 340 bp, Homo sapiens
ctcacttacaagtgggaaccaaatgatgagaactcatgtacacatagaggggaacaacacacactggggcttgttggagggtagaggatgggaggagggagaggatgaggaaaaacaatgagtaccaggcttaatacctgggtgacaaaataatctgtacaacaaacccccatgacacaactttacctatgtaaaaaacctgcacttgtacccctgagcttaaaataaaagttaaaagaagaaaaaagaaaataacatgtcatccactgttcattaaggtccaggcattgactccagagtttattctctaaggacgctactgctctgcatctcaaatgta

SEQ ID NO: 105331 - DNA, 366 bp, Homo sapiens
aatccttgttgagctctggggctgcttcctaggaaaaggctgtgcttcccctgtactccctgccccatcctacccctcctctcctcccttctttctcttctttgttcctgcttgttaggagccaagagctgcccctgaccaaggccgcaggctgacaggggcaagcgagaggttttccgaggaggggaagacagcactcccgggagggaagcaagacgtctgagaactcagccttcagatgcctttctaagaccttagctttgctagttcctcaaagagctgacatttattgagagctgagccacaattctcttccccttcttctcttctgaactttctgtggattcctctagttggtttttttga

SEQ ID NO: 105332 - DNA, 292 bp, Homo sapiens
  misc_feature (256)..(256): n is a, c, g, or t
cacaggccacttcttctgcagagccctgtgctccgtgactccaccagccgagaaggaaggggaatgcttgacactttgcaagaatgagttaatctcagtgaagatggcagaagctggctccgagttggaaggcgtgtctttggtgacaggtggttcctaaagaattatccaggaagctgtggcctttccaggaagagggattggacaggctcctatcagattggcagaggacgctgtaagctgactacttatgagncaggaggaggaggattcgctaagcatccgtagatca

SEQ ID NO: 105333 - DNA, 1063 bp, Homo sapiens
  misc_feature (790)..(790): n is a, c, g, or t
  misc_feature (853)..(853): n is a, c, g, or t
  misc_feature (1018)..(1018): n is a, c, g, or t
agagaggacatcatggaaaaagtcagactctttctaggatttgaatcgggagtctgaagaggagaggggtgaatgtgcaagcccttaaccaccccacatcactgatctggaccagagaacctgcttggaagaagtgagaagccatgctagcgaaggccaggagcttgcaggggctcagagcctggcagttgcattagtttgctgtgatgcacagtgcaaagaggtggctggtcaaggaccagtggcatggtgaagtgtctccagggtgcaccgcttttgcggcagtttagtatggacagagtctgggcaggctcagtgtagcaagcctgtcatgagaggtgaggaccaaggtggaggttggtgtgacaggaacaaggaaagggaagaacatagagcaggaacacaggagaacaaagaaaggtcaggaccgtcagcctccaaaggccactgaggaagaggggccatccactggaatggaaaacgaagacgtacctgtggggaaaggatcttaaattcagtttaacagagcaggccttcagcaaatacaagaattcttaatttcaggtaggaagatattagcagtgtcttctaatatttgttttcggaaagatttatgtcattttagttcacacaactctgtctgccagcatcattaacttacctaacttgtttagaaacaaaaatgctaacagcaccactgagaccttgctagtctaagtgtgctttggagaccattggcatcagcaccatttaggcacttgttagaatgtagagtctccgggccaggtgnggtggctcacacctgtaatcccagcactttgggaggccaaggcaggcagatcacatgaggttngaagtttgagaccagcctggccaacatggctaaaccctgtctctactaaaaatacaaaaattagccagacacggtggcacacgcctgtagtctcagctatttgggaggctgaggcaggagaattacctgaacccgggaggtggaggtagcagtgagtcaagatcntgccactgcactccagcctgggtgacagagtaagactctgtctcc

SEQ ID NO: 105334 - DNA, 748 bp, Homo sapiens
gcaagatcacagccctcctctccagctgcctggatataaactctgctattggtggggcacagtgggagtgagactggccttgcaggctgcatgagagctaggtgaggtctgtcactgccggctttcctccactttcctggtgacctgtatgacacagcagaggcaaccatagtgcccctgggaacataactccattggcctgagaaccctctcacccccaacactcaaagtggccagagcaagctccactcagggagagtctgatctcagacctgcctaccctacagccacctgatgatttttctctacctgccctggtagcctaagacaaaagacataagctattgggagctgtatggccccacccatcaacaaaaaaccctagtactcatcctggccaacatagggcaagattatatcccccttctactactgcagctggtgccctcttgaaagcatcacctgctggctggatgccaaccaagccattacatcaactaataacagaaaaatcctgctccaaagaaggagaaaacaacagctctttttaccacttgcaacaccctggctagtcagagatcctgagtctgtccacatgacaacttgactgctagcataactagcatttgtggaaaccagtgcactaaacaaaactacaaccagggactcccacagagctcacttcaccccctgccacttccactggagcaggtcctagtatctgtggctgggagacctgaagatgaat

SEQ ID NO: 105335 - DNA, 466 bp, Homo sapiens
ctggggtcagagagaggaggacaaagcaggtgtgtagcccagggaatgacagcaccccttccgagaagacagggagggtgcagacatggccaggttctgagctagaaaactgtcagcagggggctgaagctgaggatagtcattgccaaggaacagcctccgtcacagaggagacgcacagatgcggtgacgagggagggatgcggggctggtgaccgctgggaacggatgtgtgaggcagagtctccaggcatggtctgtggggcggtttgatgatactagaacatctcagagtagaaggacgtcccgacctgcagactggaaagcccccagagctcccggcaggacgtatgagggccagcccacacccaggtctgtcctgatacaactgaacgccacagtgtcttagctcctttactgttgctatcaagaaacacctgaggctgggaaatttatgaagaatcat

SEQ ID NO: 105336 - DNA, 376 bp, Homo sapiens
tctcccttagggggttacgtgggggaccgaatccttttttctaccctggagcaagtgccagcacatggaggtggtagaaatgtttgctcaggtgcccacagccaattgatgccccactgctcttgtgtttgtattgaatccctttgttaatttttttcttgtttagaggaaatacatatggtgattttgcaatcaatgcagcattgcataataattaaagggctagccttggggccagactatttcagattctagccctcccatttgccttgcatgattacttatctcaagctcagttttctcttctgtaaaacggttatttcttaccatgctattaagaggacagaatgaggtaaggatgacccaaatgtcagtc

SEQ ID NO: 105337 - DNA, 394 bp, Homo sapiens
gagaaatacaaggcatgctccaatctatatgttccttcagtagggaaagtgaaaatgttaactttgcagctaagagatgatagccactgtcaggttttgtagggtgtcatctaatactgggaaaatatcatttgcaaaggtggtatatttactgggtcataaaataaagataaaaaataaggagttaggcattttctcccatctttccctatttccttacatttcttcttttaaatagcatttttggatataaaaaaatgcaaggaggatgggatgtaggaactggatagcaagaaagatactccagatggacaacgtcactttcaaattggtaggctgaatccatccaagatgagatgatctgtactttctttcaacctattgtgtcttgaac

SEQ ID NO: 105338 - DNA, 791 bp, Homo sapiens
gtagagaggggtttcaccatgttgctcaggctgatcttgaactcctgacctcaggtgatccacttgcctcggcttcccaaagtgctgggattacaggcataagccaccgcatctggccaacatggtcttttaactgtttgttaacttatctgtctccaacctgggccatatgtctcttgtatactattgtatctcatatatatagtgaagtctaagaagaaactcagtgaacaagtgaggaatgaatgaatgagcacttgtccaagaggacctgtccacgggctgcttagtatcctgaaaaaattttgataatctgaaattttaaaaaaacctaaaactgaaataagttgagcaaattggactggaccatttaggaattacaaaatggggaactgttgagaaaatctgtagttagtcatgggccaaaagctggaagtggtagttgagatgagccatggcaacaatggctgtgtttacactaaaattatgaggaaacaaaaactgtggttaagcagagaagaaaacagagcagtcatacagaaagaagcaattaggtcaaaagacaatgaggcaaagagagcagctcactccatccagactgtgtctggaacagcccttgcccttctttacctgacatgaaagctgagaccatgtgacagctcctcaggaagcctccctgaccagcagtgtttgggggcagaaaccaatgttctctgaaaaaatgatcatatgcttctttctagccctgaatgccaaccccacctgacacacattgtaagaattcagaggcc

SEQ ID NO: 105339 - DNA, 773 bp, Homo sapiens
aatatacatcatgacacctgtattcacactcctcatatactgcagacaaatgccattttgaagagagggagctttattcctgagtgggcggaggaagaaggatgaattgaggaagtgtgttcattacttgtcagctgccaacactgaaaacaacacatgtttattttcttacatttctgtaggtcaggagtctgaaatggatttcactattttaaaatcaaggtgttgggaggcttgcagtctctccagaatctctaggagagaattcatttcttactttttctagtttttacaagccacctgccatccttggctcattagccgttaccccatcttcaaagcacatgactccgacctctgcttccatcctcacatcccttttttctgcggttaaatatctcccttcctctccttataaaagccctgggaccccactgtgattccatagatcattcaaaaaatgtccccatcttaagaaccttacctgaatcctatctgcaaattcctctttgtcctaaaagttcacaagttctaagaattaggatgtgggcatctctggggaccaggattgtacctgccacatagggtttgaacacctgatgggatctgggagcctgatgagggagggtgtcacccctgaggggctgggtcaaagtgaaccaagtagctagaacaggtggtcacaagaagttggtgattcccaagggcaccagcttgggagaagtaagtggggcagctggggacccctccacctctagggtcatggatttgga

SEQ ID NO: 105340 - DNA, 619 bp, Homo sapiens
gcaaaagcaatttgacacttcataacgtctagaaatattttttcaaatgtgatgtatgaataggaagtagcatacaaaaacaaattactgtgctatccctcccccaagaatacatattctctcttcacaccacgtggctgctgctggggcatgggggaggggtggcattggcagttcaagactgtcctaccctcttcagtgactcttttagcaatatgaagttaaaaaccaggtactgttaccactcacctgatgtttaattctcatgaagatgcttttttgtgtagatagttgtcaaatgtgatgttcctgcagggaggacaattggtggaggcttctatttggccaacttgctcctcctcatttgtaaatatttcagtgggtacctgtgatttgctttgaagtacagtaattggagaaagggtaatgagagttaacaaatacggctaaagtggaaacgtggtcagtcttgagctgattattgttgaagctgaatgagggatttataaaggtctgttatgcttttctttctaagagtttgcttgaaatcttttatactttaaagttgagaaaaccaacaatgataccagctcagtacagtactcacacagtgaaggtt

SEQ ID NO: 105341 - DNA, 465 bp, Homo sapiens
gttcccagtgtctcctgctgccaccccggcatctcccgatgggccccagtgagtcagggccatgtggcccaactgctggttcctttgggctctgggcccctcccctggctaggcctgtggcctcccaactccaagcttgagtcttcgaggtggtagaggaagtgggggtggtggcgggggtcacaatccctcacccaaagggcgtttgcccaactcccccacttcccctgcctcaccccacccaccctggaacaacagttgtatttcccaaccacccagggccacccaccttcctcttcctcagccccagccccactccaggtcatgggccctggattctgggccagctggagtcagcctcctcctcctggttccccataggcccctgaggtgtgtggcggacccctgctctggcagctgtggacactgtccagctgttctccagagctgcccatctgcaggctg

SEQ ID NO: 105342 - DNA, 429 bp, Homo sapiens
acccagttacacagctacagctgcttggagtactgtgtacagaaagatctggccggctgctggtggctcctgtctttccagctgatctgtcccactcttgcccccatcctcagcactcagccctccccaccagcagcccaatacaggctaatggccacgcaccacagcctttctgtttgcaggggcttcctctgcaggaggaaaacaacctatgcatataatgttagaatcagacatgtggacctttatgatcccacgtggagaatgataagcatatttttggccttaatgaatctgcttttggagtactcttccccctacctaatgccctccttttccttactgttgaaatcttactcatccttcatgtcccactcaaggcaggctgtgtcagtcatccaggtccaggagattcactgaccctgggct

SEQ ID NO: 105343 - DNA, 636 bp, Homo sapiens
ggttatgttgatgagtgtgtacaaagtgcagggtcaagcctgctctgacaagaggcaatggctttggaagccatttaatggaggcatatttaggagtggagtttcttcctcttctgttcttgctctcccttcttagagtgccttttagactgaacttctccagctactgctcatcatggtgagagccaggtgtagaaaggttaccttatcaccatcaacgcaatattccctttcatttttgcctcctggaggctgaaaaatggcctagattccaagaaagtgaaaaaaagaggtgtggaggagggcctttagcttttctcaatagcgtttccttggggtcctttccaggcaagcatgaccctctctcattttctagatgagaaatcccagggatgagcacttaaatggtatttctaaatcagagtcagggcctgcgtttcagatggaacccacagactctcctgagaggctctggatggggcggatttggcatgcaaaaagtaggctcctggcctggctctgccctcaccaactgggtgaacctgggcaaatcatttccagcctggactgatacctggactggtagcatcagcatcaccagggagcttgtcaaaaatgcaatgttctgccctcctc

SEQ ID NO: 105344 - DNA, 309 bp, Homo sapiens
gaattatagaaagttaaatatcagttagatgactacaagaaaaacataactatttgatccagttaaagaagttacttgctgtcactgtctttcacagtggctaagagccagaatcttgagtttaacataaattataaaattaccatagttttctagttcctaacaatgagaagcagtaatgagcattaattcagcctgctggctctttatattctgggaattcagaaaacagctagctggatgagaaacagtttgattccaggttaagatctaatgttgtagacacagtgaatcaacttttcaaatctg

SEQ ID NO: 105345 - DNA, 736 bp, Homo sapiens
caaatgtcttgggggaggggagaaaactataactcttggaaatttgatagaattgtcaaaagaatataatcagctacatacattgtttaaccaaagttgtagttctatgataaaagataaaaattttcttttatgagaataaaatacctaggaatccaacttacaagggatgtgaaggacctcttcaaggagaactacaaaccactgctcaaggaaataaaagaggatacaaacaaatggaagaacattccatgctcatgggtagaaagaatcaatattgtgaaaatggccatactgctcaaggtaatttatagattcaatgccatccccatcaagctaccaatgactttcttcacagaattggaaaaaactactttaaagttcatatggaaccaaaaaagagcccacatcgccaagtcaatcctaagccagaagaacaaagctggaggcatcacactacctgacttcaaactatactacaaggctacagtcaccaaaacagcatggtactggtaccaaaacagagatatagatcaatggaacagaacagagccctcagaaataatgccgcatatctacaactatctgatctttgacaaacctgagaaaaacaagcaatggggaaaggattccctatttaataaatggtgctgggaaaactggctagccatatgtagaaagctgaaactggatcccttccttacaccttatacaaaaatcaattcaagatggatta

SEQ ID NO: 105346 - DNA, 703 bp, Homo sapiens
gttttaaggactcaacaataagttaatgagacacagtgtttgctttcatggagcttacagtctggaggggacaaaggcttaaacaatactcatataattatatatgtgatcagtacaatgaaggagctcagtggggtaaataagcaggaacctgaacttgatctgttccggagggccacagaaggcttccttgaggccttgagaaagtgatttgcatctgagttctgaaggattgtaagaggtaactagggaaaaagttgacaggaagaggaaggggatccagacaagaaacatttgcaaagatcttgaggcataaatgagcttgagacatctggagaaactgaggaaaagtgagagagtaggcagggcctggagccgcagagccattgctaaccatcctgtgtgagatatcccccattctgtagctttattctcataaccctgctcaattttctttataacacttctcacagatttatatacgtgtttgtttttgttatctgtctctcccaccagaccacagctccatgagagcaaggtctttgcttaccaatatatcactagcacttaaaactatgcctggtacacagtaggttcttaatatgtgttgaatatagccatcaaattgatattggatataattcaatctgataagatattttgagatattaaagagtttttaacttgataccataaaaacttt

SEQ ID NO: 105347 - DNA, 1446 bp, Homo sapiens
  misc_feature (1409)..(1409): n is a, c, g, or t
  misc_feature (1415)..(1415): n is a, c, g, or t
  misc_feature (1418)..(1418): n is a, c, g, or t
cggaggctgaccttagaggacccccacggcaggttgtactgttcttattaaaacatcatcccatgatgggatggtgttgatatatttggaaactcttggtgagagaatgaatggtgtgtatacatactctgtacatttttcttttctcctgtaatatagtcttgtcaccttagagcttgtttatggaagattcaagaaaactataaaatacttaaagatatataaatttaaaaaaacatagctgcaggtctttggtcccagggctgtgccttaactttaaccaatattttcttctgttttgctgcatttgaaaggtaacagtggagctagggctgggcattttacatccaggcttttaattgattagaattctgccaataggtggattttacaaaaccacagacaacctctgaaagattctgagacccttttgagacagaagctcttaagtacttcttgccagggagcagcactgcatgtgtgatggttgtttgccatctgttgatcaggaactacttcagctacttgcatttgattatttcctttttttttttttttaactcggaaacacaactggggaaatatattctttcccagtgattataaacaatctttttctttttttaaagtcctttgggcttctagagctcataggaaaatggacttgatttgaaattggagccagagtttactcgtgtgggttatctattcatcagcttcctgacatgttaagagaatacattaaagagaaaatactgttttttaatcctaaaatttttcttccactaagataaaccaaatgtgcttacatatatgtaaacccatctatttaaacgcaaaggtgggttgatgtcagtttacatagcagaaagcattcactatcctctaagatttgtttctgcaaaactttcattgctttagaattttaaaatttcaccttgtacaatggccagcccctaaagcaggaaacatttataatggattatatggaaacatcctcccagtacttgcccagcccttgaatcatgtggcttttcagtgaaaggaaagattctttttctaggaaaaatgagcctattttattttattttattttattttttgacacaaactgtagattttagcagccctggcccaaaggaatttgattacttttgttttaaacagtacaaaggggacactataattacaaaaacatccttaactgatttgagttgtttttatttctttggatatattttcagagtggtaaattgtgtgtgagaattacaaatgattattcttttagtggtttcttagcctctcttacagcccacggggatagtactgtacatcaataccttcatatgaaatttttatatgcaatgaaaataaaagcatgggttgattctgcctaaaaaaaacaaaancacacnacncccacacaacatcaacacacaaaaaggg

SEQ ID NO: 105348 - DNA, 1896 bp, Homo sapiens
cggaggctgaccttagaggacccccacggcaggttgtactgttcttattaaaacatcatcccatgatgggatggtgttgatatatttggaaactcttggtgagagaatgaatggtgtgtatacatactctgtacatttttcttttctcctgtaatatagtcttgtcaccttagagcttgtttatggaagattcaagaaaactataaaatacttaaagatatataaatttaaaaaaacatagctgcaggtctttggtcccagggctgtgccttaactttaaccaatattttcttctgttttgctgcatttgaaaggtaacagtggagctagggctgggcattttacatccaggcttttaattgattagaattctgccaataggtggattttacaaaaccacagacaacctctgaaagattctgagacccttttgagacagaagctcttaagtacttcttgccagggagcagcactgcatgtgtgatggttgtttgccatctgttgatcaggaactacttcagctacttgcatttgattatttcctttttttttttttttaactcggaaacacaactggggaaatatattctttcccagtgattataaacaatctttttctttttttaaagtcctttgggcttctagagctcataggaaaatggacttgatttgaaattggagccagagtttactcgtgtgggttatctattcatcagcttcctgacatgttaagagaatacattaaagagaaaatactgttttttaatcctaaaatttttcttccactaagataaaccaaatgtgcttacatatatgtaaacccatctatttaaacgcaaaggtgggttgatgtcagtttacatagcagaaagcattcactatcctctaagatttgtttctgcaaaactttcattgctttagaattttaaaatttcaccttgtacaatggccagcccctaaagcaggaaacatttataatggattatatggaaacatcctcccagtacttgcccagcccttgaatcatgtggcttttcagtgaaaggaaagattctttttctaggaaaaatgagcctattttattttattttattttattttttgacacaaactgtagattttagcagccctggcccaaaggaatttgattacttttgttttaaacagtacaaaggggacactataattacaaaaacatccttaactgatttgagttgtttttatttctttggatatattttcagagtggtaaattgtgtgtgagaattacaaatgattattcttttagtggtttcttagcctctcttacagcccacggggatagtactgtacatcaataccttcatatgaaatttttatatgcaatgaaaataaaagcatgggttgattctgcctatttatgactcaatcttttacaaataaaagattattcattttaaattatagttcaatcagcatgtctcttaggatactgaacgtggttgaaatgaaaggatagtgacatcataaatgagcttgagacatctggagaaactgaggaaaagtgagagagtaggcagggcctggagccgcagagccattgctaaccatcctgtgtgagatatcccccattctgtagctttattctcataaccctgctcaattttctttataacacttctcacagatttatatacgtgtttgtttttgttatctgtctctcccaccagaccacagctccatgagagcaaggtctttgcttaccaatatatcactagcacttaaaactatgcctggtacacagtaggttcttaatatgtgttgaatatagccatcaaattgatattggatataattcaatctgataagatattttgagatattaaagagtttttaacttgataccataaaaacttt

SEQ ID NO: 105349 - DNA, 1396 bp, Homo sapiens
cggaggctgaccttagaggacccccacggcaggttgtactgttcttattaaaacatcatcccatgatgggatggtgttgatatatttggaaactcttggtgagagaatgaatggtgtgtatacatactctgtacatttttcttttctcctgtaatatagtcttgtcaccttagagcttgtttatggaagattcaagaaaactataaaatacttaaagatatataaatttaaaaaaacatagctgcaggtctttggtcccagggctgtgccttaactttaaccaatattttcttctgttttgctgcatttgaaaggtaacagtggagctagggctgggcattttacatccaggcttttaattgattagaattctgccaataggtggattttacaaaaccacagacaacctctgaaagattctgagacccttttgagacagaagctcttaagtacttcttgccagggagcagcactgcatgtgtgatggttgtttgccatctgttgatcaggaactacttcagctacttgcatttgattatttcctttttttttttttttaactcggaaacacaactggggaaatatattctttcccagtgattataaacaatctttttctttttttaaagtcctttgggcttctagagctcataggaaaatggacttgatttgaaattggagccagagtttactcgtgtgggttatctattcatcagcttcctgacatgttaagagaatacattaaagagaaaatactgttttttaatcctaaaatttttcttccactaagataaaccaaatgtgcttacatatatgtaaacccatctatttaaacgcaaaggtgggttgatgtcagtttacatagcagaaagcattcactatcctctaagatttgtttctgcaaaactttcattgctttagaattttaaaatttcaccttgtacaatggccagcccctaaagcaggaaacatttataatggattatatggaaacatcctcccagtacttgcccagcccttgaatcatgtggcttttcagtgaaaggaaagattctttttctaggaaaaatgagcctattttattttattttattttattttttgacacaaactgtagattttagcagccctggcccaaaggaatttgattacttttgttttaaacagtacaaaggggacactataattacaaaaacatccttaactgatttgagttgtttttatttctttggatatattttcagagtggtaaattgtgtgtgagaattacaaatgattattcttttagtggtttcttagcctctcttacagcccacggggatagtactgtacatcaataccttcatatgaaatttttatatgcaatgaaaataaaagcatgggttgattctgccta

SEQ ID NO: 105350 - DNA, 1571 bp, Homo sapiens
cggaggctgaccttagaggacccccacggcaggttgtactgttcttattaaaacatcatcccatgatgggatggtgttgatatatttggaaactcttggtgagagaatgaatggtgtgtatacatactctgtacatttttcttttctcctgtaatatagtcttgtcaccttagagcttgtttatggaagattcaagaaaactataaaatacttaaagatatataaatttaaaaaaacatagctgcaggtctttggtcccagggctgtgccttaactttaaccaatattttcttctgttttgctgcatttgaaaggtaacagtggagctagggctgggcattttacatccaggcttttaattgattagaattctgccaataggtggattttacaaaaccacagacaacctctgaaagattctgagacccttttgagacagaagctcttaagtacttcttgccagggagcagcactgcatgtgtgatggttgtttgccatctgttgatcaggaactacttcagctacttgcatttgattatttcctttttttttttttttaactcggaaacacaactggggaaatatattctttcccagtgattataaacaatctttttctttttttaaagtcctttgggcttctagagctcataggaaaatggacttgatttgaaattggagccagagtttactcgtgtgggttatctattcatcagcttcctgacatgttaagagaatacattaaagagaaaatactgttttttaatcctaaaatttttcttccactaagataaaccaaatgtgcttacatatatgtaaacccatctatttaaacgcaaaggtgggttgatgtcagtttacatagcagaaagcattcactatcctctaagatttgtttctgcaaaactttcattgctttagaattttaaaatttcaccttgtacaatggccagcccctaaagcaggaaacatttataatggattatatggaaacatcctcccagtacttgcccagcccttgaatcatgtggcttttcagtgaaaggaaagattctttttctaggaaaaatgagcctattttattttattttattttattttttgacacaaactgtagattttagcagccctggcccaaaggaatttgattacttttgttttaaacagtacaaaggggacactataattacaaaaacatccttaactgatttgagttgtttttatttctttggatatattttcagagtggtaaattgtgtgtgagaattacaaatgattattcttttagtggtttcttagcctctcttacagcccacggggatagtactgtacatcaataccttcatatgaaatttttatatgcaatgaaaataaaagcatgggttgattctgcctatttatgactcaatcttttacaaataaaagattattcattttaaattatagttcaatcagcatgtctcttaggatactgaacgtggttgaaatgaaaggatagtgacatcataagttagtactgatattcataaccaaataaagccaacttgagtaattttgctacattaaaaatt

SEQ ID NO: 105351 - DNA, 862 bp, Homo sapiens
  misc_feature (825)..(825): n is a, c, g, or t
  misc_feature (831)..(831): n is a, c, g, or t
  misc_feature (834)..(834): n is a, c, g, or t
gggcgatctagaggatcccggaagttcctttcaccttttttaaagtcctttgggcttctagagctcataggaaaatggacttgatttgaaattggagccagagtttactcgtgtgggttatctattcatcagcttcctgacatgttaagagaatacattaaagagaaaatactgttttttaatcctaaaatttttcttccactaagataaaccaaatgtgcttacatatatgtaaacccatctatttaaacgcaaaggtgggttgatgtcagtttacatagcagaaagcattcactatcctctaagatttgtttctgcaaaactttcattgctttagaattttaaaatttcaccttgtacaatggccagcccctaaagcaggaaacatttataatggattatatggaaacatcctcccagtacttgcccagcccttgaatcatgtggcttttcagtgaaaggaaagattctttttctaggaaaaatgagcctattttattttattttattttattttttgacacaaactgtagattttagcagccctggcccaaaggaatttgattacttttgttttaaacagtacaaaggggacactataattacaaaaacatccttaactgatttgagttgtttttatttctttggatatattttcagagtggtaaattgtgtgtgagaattacaaatgattattcttttagtggtttcttagcctctcttacagcccacggggatagtactgtacatcaataccttcatatgaaatttttatatgcaatgaaaataaaagcatgggttgattctgcctaaaaaaaacaaaancacacnacncccacacaacatcaacacacaaaaaggg

SEQ ID NO: 105352 - DNA, 205 bp, Homo sapiens
aagctttatgataatttttgaatgcattatttattttttgtgccatgcattttttttctcaccaaatgaccttacctgtaatacagtcttgtttgtctgtttacaaccatgtatttattgcaatgtacatactgtaatgttaattgtaaattatctgttcttattaaaacatcatcccatgatgggatggtgttgatatatttgg

SEQ ID NO: 105353 - DNA, 672 bp, Homo sapiens
ctgatttcagcattctctctcctgtcacatcagaccctttgctggtttagatcacaatagtactgccagtgctgcacccttttagaacttctaaggccatgagttattggagattcagtttccagggtggttcttgaacctaagaaatcttctagaagcctgggtcatgttgtgaggtccttgtgcctgttgggtcgtggttctgtctgcctcaggttactgttggccccagggctctttttcctgcaggccttagttagcaccatgaatggttaggggtatgggggtcagggtgagtggtcaccagtgggtttcaagggattggcctatttcatctaagttgccaaacttatgtgcacagagttgttcgcagtatttccctagcatcttcttaatgtgtgtgggatcagtagtgatatcccctctttcatttctgattttggtcatttgtgcctttctttttttgtttgttagtctgctagaagtctgttacttctttttgttgggtttactttgttcatcttttaaaaaaaattttagagacctttcctcttttctgatataagcatttgatgctgtgaatttgcctccaagcactgctttagctgcatcctacaaatttttatatattgcatttttattttcagtcattccaaaccagtttctaatttt

SEQ ID NO: 105354 - DNA, 293 bp, Homo sapiens
gattctcctgcctcagcctcccaagcagctgggactacaggtatgcaccaccacacctggctaattttttgtatttttagtagagacgggattttgccatgttggccaggctggtctcgaattcctgacctcaagtgatccttctgccttagtgtcccaaagtgctgcatttacaggcatgagccaccacagggggcccaggcttagagattttaacttggccaagcctatcctcctaggaaatggaagggctaagatacaaggagtacaaagacaagagagattggttggga

SEQ ID NO: 105355 - DNA, 492 bp, Homo sapiens
agatcaactatcagattaagccccttggtctttctgcactcggctaatctgcctcctgcctctccactaaggagattcaaatgagaagacagaggcagtcgcctctgaactagaatcttcctactgaaatgcagagcctatgatagaaatgggcaccggggaccatctatccaaaagccagcctaaccgatacactcagaagaatttttctccagtcacactcctggatggagtcaggaacaaccaagaaacaagcaaaactgttcttttgcctcctccttcctgaaagaaccccatcaagaagcctacacatgacccctccagtgtgtaagccccaatcatgcctaaccaccccaaatcaccccaagtactcagccctactcaataactaacaccctctcccatctacacagaacagcgggtataggcagtcactgactcctgccctagaagcatcgggcgaggggtctcactcccagatcaaaggtttgt

SEQ ID NO: 105356 - DNA, 725 bp, Homo sapiens
ctcaaaaaaaaaaaattaaaaataaaagaatgcacagtccagtaatgtcacccagccctatatcagtaaaggtcacactctagagtggtacatatctcagctgcatctaaggccttgctaattagctcattagaatgtcacaaatgggtttttatattacccatgtatagctgccaaaaatgtttaagtgaatctaatcaaagttggaaaaaaaaataagaaaaatccaggttggaagacattcagcaaaacaatttccctgcactacactctaaaaaaagtcaagctagggaattggtccagacagataacacaactgggttggtccattaagtgacccctgatgcagcactgcattgaaggcaaaaaagctgtgagagagatttgagggacaactggggaactttgtagttatatatggactatatattagacagtattattgtatcatcattagatttttcagtgtgacagtggctatttacaagaatgccctagttcttaggatgttagtgctgaatcattagacaagagacctgatggctacaactgacatataaatgcctcagagactgatgtattttatatggaggtaaagcaaatgtaacaaactgttaatagttggtggatctaagtgatgagtctaggtgtgttattgtgcagttttttcaacttttctggaaaacgaacttttcaaaataaaaaattggaaaaatagaattcaa

SEQ ID NO: 105357 - DNA, 476 bp, Homo sapiens
atcaataaaagcttggaagataaacctgaagatatctttcagaatagagaaaaataagaaaagataaccatctaatttccagtttgtccattgttcaacatccagttggagccccagaaaaagtgaagaagaaaaatgagagaaaattagtaagagaataatagagaacgaatgaaaaaacaaagcccacagctgaacataatacagggaaatttcagaactcaaaagaaaaaaacaatatcctaaagggttccaaagaaaaagtacaagttatctgcaagggaaggagagtggactggtaacagatttatcatcagcaacactgcacatcaaaagtcaatggagcaatgtcttcaaagctctgaaggaaaataagttggttaacttatcaaatcggtgttatcatttttggtacctggagagtcaggtacacataacagaggcagacggtgagaggagctacaggaaataatgca

SEQ ID NO: 105358 - DNA, 401 bp, Homo sapiens
cccagatgtttatatttgttgcctccacacttccttcaagtctttatccaaatatcacctttatgagatttctgaattttttattcatctataacatacaaaaagtacagtgcacaaatcctaagtatattgctcaatgaattgttatcaactgatactcctgtgtaaaggtacctagttccagaaactgaatgttatcagcatcccaaaatcccaaccttttcattgaggctttccctaactacctattgaaaattgtgcccaggggatatggggagacatttgtcaaagggtacaatgtttcagctaaaagggatgaataagttctggatatctactgtacaccattaaccttaagagagatctcaaaaaggaaaagaactcacaaaaaaaaattgctg

SEQ ID NO: 105359 - DNA, 305 bp, Homo sapiens
gaacaaacttaagtctgactacacgtctgatttatatagcaagatagaaaaggaaattttgtttttgctttcccagtctatttctaaggagaaaaaaaatattttaaataagccaaacttacatacaatagttgttttactgagtatttgaattattctttcaaaaataattcacagtatggctcctttaagtagttattcctctggaccatttaatatgtggttcaaattataaaaatttacattgttgccttcattttaagtctaagcaatgtaatatgtgtgtcaactttttaaataataaa

SEQ ID NO: 105360 - DNA, 435 bp, Homo sapiens
cagcaaactcagcactgtagctggagaatattgaagaagaaggagagaaagggaagaaggcagagaagtaatgggaagccaattacgtgggacctgataggtagatgtaaggactttggatatagccagaaaagccactaagggatttgagaagaagaggaggaagaaaatctgacttaaatttttaaagaagcattgtggccattgtgttgtgattaggctagactcgagcaagagatctgctgttattttacgatttgcattgaaaactaaaaatattgtaaaatgagttcctctttcttttggttatctcacgccgatgttggttggaaattttaagttatgtttcctattcatggttgatgtaactacacctacgtttttactttgattatatatggtttactgaaaatgaattaaagatattgagctttt

SEQ ID NO: 105361 - DNA, 339 bp, Homo sapiens
gagttctgttttgttttaataagcctttccctctgacttcctttattctttttaatgtttttattatattttaagttctgggatacatgtgcagaatgtgcaggttagttacataggtgcagcaaaccaccacggaacgtgtgtaactatgtaacaaacctccatgttctgcacatataccccaggacttaaaagtgtaataaaaaaaaatcctttttaaagttaaaaaataaaagaaatgatatgatgttttgcatgttgattttatattctgcaactttattgaattcatttattagacctaacagtttttggtggtgtctttgacgttttctacat

SEQ ID NO: 105362 - DNA, 371 bp, Homo sapiens
agcagaaggtgaaaggggagaaagctcatcttccatgactggagcaggaggaagagagagagcagggaggtgctctctcaccaaccagatctcatgagaactcactcactatcaggagaacagcaaccagggaaaaatctgcccccatgatacaatcacctcccaccaggccccacctgcaacattgggaattacattttgacatgagatttgggtggggacacagaggaaaccatgtcacctggctaagtggtgaccacacagttctcacctgtgtgtgggttattcactttctgctcttccctaagactctccttaaattcctggcagactcttgctcatgctctcctttgggagttcttcttctgctc

SEQ ID NO: 105363 - DNA, 783 bp, Homo sapiens
tccggggctacgcgacccggcgccgggcatccgggaccctctctgaaacgcggcctaccagaccctcgcctccgcggcacacagaccagaaccctctcttggagtctgattgggacctttttcttgtgacagattctgccagtttctgttcttggcaggttccatttctacaaattcctcatctctataggtttaggatcagaatgttccagcaggggagcattacagctgtttcaatcctcagggagactactcatcttgggaataattccttcctggagtgattggaaaataattcctaaaagaaattgaaaagtcaaattgttgaacggtaaattcaccatcacgtttaccataaagcatgtagagaaatggaaatagttacacatcatggttgagagtgcaggatttgcagtcagacagtttctggcacttagtagctttagaaagtgacttaagccctctaagccctcagttttcacatctataaaatgaagtaaataatataagcctctcagaagtggagtgagcgttgaatgaaatagtatgtgagtagtttaacgcagagactggcactgacataagaaactattgtgatagaagcagagcagagaaaatattttgaatagctgtatgcatggcaattttttaacctctttattcgtggcaactcatttaattgccacaacaaactaagtacttttattatttccattgttatggactgagctatgctaccctcttcatttcatatgttgatgtcctaagtcccagtgccccata

SEQ ID NO: 105364 - DNA, 695 bp, Homo sapiens
actcagtctcaaaaaaaaaaaaaaaaaaaaaggtggttaaaaatggctgctctggggactggagggagctgggaggatgagacaccatcctgcaaatcaggcctggatgagatggggctgcagggctttctgacaggcacatctgacctcattctgcccctgctcacacagcctctgtggctccctattgccatcaggggagagtcccagctcccctgctccactggattgagtagtgtctggcaagaattcatgtctgagaattcatattcatattctgagaattcatattctgagaattcacctcagaatatgggcttatttggaaatagggtctttatagacagacatgaggttatcatggattagggtggaccctaaatccgatgactgggccaggcacgtggctcatgcctgtaatctcaacactttgggaggccgaggtgggcggatcacctgagttcaggagttcaagaccagcctggccaacatggtgaaaccccgtctctactaaaaatgcaaaaattagctgggtgtggtggcgggtgcctgtaatcccagctacttaggaggctgaagtgggaggatcacttcagcccaggagttggaggctgcagtaagctatgattgtgccactgcactccagcctgggtgacagagtgagaccctgcctcaaaaaaaaaaaaaaaaaaaaa

SEQ ID NO: 105365 - DNA, 388 bp, Homo sapiens
ggagacttaatattgttaagatggtagtactcctcaaattcatttacagattcagagcagtgatctattaaaatcccagctggcttccctgcagaaactgacaatcataaaattcacatggaaatgaaaggaacccaggatagccaaaacaatctttaaaaagaataataaagttaacactatgtggtcctggcatgcaggtagacatacagatctgtggactagagttgagagtccagaaataaaccctcatgtttatggtcagttagttttcaaaaaggatgccaagacaattcagggaaaaggatacagcctttcaacaaatggtcctgcatctttcaaaaaaatgaaattggccccctacttcacaccatatacaaaaattaaa

SEQ ID NO: 105366 - DNA, 323 bp, Homo sapiens
gcatggggctgaggtaaccagagcttgaatagaactgcagaagagacagatgattccagaagggtaaggaggtggaggcccctctttacttccttcccacagcaggcaccaggccagagttgggtgggcacctgctgggggatcctcatggtccagtattggttgtaggttttgagggggctgacaggagaggtggttgccagggaatggttccaagaagatgcaataggggaggaggctggggatacccaggggacatggcccagcttacggaggctcctgagcttccaggggcatagacattaagaaattgcacgctgagc

SEQ ID NO: 105367 - DNA, 242 bp, Homo sapiens
cacatgaccagaactgccagagccaggatggaccctgaccatctggcttcctcacctcccttctcttccgcaggctccagcaagcattggagtcatcttaaacgattggctttaataggaaaaacctctaatattggtctgctctccattttttgcttcatttattctagagaactttcttccttggaacagatagagttgcttcaatcttttttaattgctgcgtagtgttctgttctgtg

SEQ ID NO: 105368 - DNA, 438 bp, Homo sapiens
atgcaggctctattacgatgggactcacacatcacactggtctcggcctttgtcttttcttaatcctggcatgtggagaactaaggttccagagagattacaatgtgtgtaaaggtcacacaccaagtttttggcatacctacatttagagaagacattcagacctctgggctcagatccttggaatccctgtagctttcaagccagccctttgcttaggtcacctgtcagctcattcatccaggcctaaggtagaacacagcagtgcttctcaaacctgaatgtgcagttgaatcacctggggctcttgttaaactgcagattctgattcagtagggctggggtggagcttaggattctccttttctaacaagcttccaggtgatatgaatgctgctggtctatggactgcactttgagaagcaagggaatgatggc

SEQ ID NO: 105369 - DNA, 326 bp, Homo sapiens
tgtaatgactttgggttcatattgcccaaactgttatccaaaagatatgtagcaaatttactttttttaacaagaaggaaacccttaaatgctaaaagtaagaacacattttacacctctaatatctatatataaaatggcaaacaattttttaaattgcattctatatctaaaatactgagtcatgcctcttatactgtatttactgtacatttggagggggaaaaatcctacaatacccaaataatctctagtggttttattttcagcacaatgttgttttgaaaaggtaaactccaaaaagagtgtacttgctgcaaaataag

SEQ ID NO: 105370 - DNA, 351 bp, Homo sapiens
ctcccagacaaacatgctttcctgcccttgaaagccccattcccacctgtgctgttttctccccacctgcctcccttttctactccacagctgttccccatctcagtgcttttcacgccttttctagttcgctcccaagccaagtcccctgcccaaggggaccccttacataggtcaaatagcagagtttgccctcggtgtccaaggtcaggaagcgggcattgctgggcaccatccgccgccaggccatcaccctgagcagcaccaggttggcagcctctgagatgaagcccttgattgagctccaggggaaagaagtcactccagtcttcacttcctgttcagaactga

SEQ ID NO: 105371 - DNA, 1014 bp, Homo sapiens
tgtgattcttggaacacattttaaaaatatgtttactatacccatgaggacttatgtctggactctctcatctgtttcatcattcatttgtctttatgtcagtaccaaactgttttgattactatatgttcatagtatgtttagaaaatagaaagtatgatgcctctgtctttatatttttttcccaatattgtttggctgtttgtgatcacttgaaattccataaaaattgtagaatattttaaaacttctgcaaaaagtttcattggtattttgatagaaagtatattgaatcagctgagggttgtggctcatgcctgtaatcccagcactttgggaggctgaggaaggtggaacacctgaggtcaggagttccagaccagccatggagaaaccccatctctactaaaaatacaaaattagccaggtgtggtggcacatgcctgtattcccagctactcaggaggctgaggcaggagaacagcttgaacccaggaggtggaggctgcagtgaactgagatcacaccattgcactccaccttgggcaacaagagcaaaatccgtctcaaaagaaaaagaaagaaaagaaaagaaagaacattgaatccgtagaccacttttggtagtagtgacattttaacaatattaagtctataacctcttgaacaagagtgtgtttgagaatttgttgtttaatttttacttattctttgacatgctagtgtttttaacttcttgttttattgtatcatagttaggaataatttgtgtaattccatctgctgaaatttgctaagatgtgttttttaacttaacaggtggtctatctggaatattgtggcatgtgtgattaaaagtattgcatattctactgttgagtggagagatataaatgtgactgttaggtctaattgttctattgtgttgttgaaatcctctgtttacttattcatcttatgtttgttttttaatttacattactaaaagtctgataaaaaagtcatctactgtta

SEQ ID NO: 105372 - DNA, 888 bp, Homo sapiens
tgtgattcttggaacacattttaaaaatatgtttactatacccatgaggacttatgtctggactctctcatctgtttcatcattcatttgtctttatgtcagtaccaaactgttttgattactatatgttcatagtatgtttagaaaatagaaagtatgatgcctctgtctttatatttttttcccaatattgtttggctgtttgtgatcacttgaaattccataaaaattgtagaatattttaaaacttctgcaaaaagtttcattggtattttgatagaaagtatattgaatcagctgagggttgtggctcatgcctgtattcccagctactcaggaggctgaggcaggagaacagcttgaacccaggaggtggaggctgcagtgaactgagatcacaccattgcactccaccttgggcaacaagagcaaaatccgtctcaaaagaaaaagaaagaaaagaaaagaaagaacattgaatccgtagaccacttttggtagtagtgacattttaacaatattaagtctataacctcttgaacaagagtgtgtttgagaatttgttgtttaatttttacttattctttgacatgctagtgtttttaacttcttgttttattgtatcatagttaggaataatttgtgtaattccatctgctgaaatttgctaagatgtgttttttaacttaacaggtggtctatctggaatattgtggcatgtgtgattaaaagtattgcatattctactgttgagtggagagatataaatgtgactgttaggtctaattgttctattgtgttgttgaaatcctctgtttacttattcatcttatgtttgttttttaatttacattactaaaagtctgataaaaaagtcatctactgtta

SEQ ID NO: 105373 - DNA, 84 bp, Homo sapiens
ggcgacactccatcttcctccagcacctgtgacgttctcctctgagctgtcgggcgagtaagcgctttgcttcctcactttgtg

SEQ ID NO: 105374 - DNA, 425 bp, Homo sapiens
atccagacacccacgcacagacacactcacacccacgggcacacctagacatggatacacacacaggtagtcacaagcactcacatatccagacacccatgcgcacactcacactcacaggcacacccagacatggatacacaggcacacacatattgggacacccacgcatagacacattcacacacgggcacacccagactgatgcacacgaacacagacatgcactagtatagccagacacccaggcacactcaaactctcacagtcacacattcacatacactcacatgaatacagtgcatgcacacacaaacacatacctatacacttgtgtgtgcagagaacacacactcacacatttgcacttatactcacatgaatacaatagaaacacatgcatacacacttgtgtgcccagaccc

SEQ ID NO: 105375 - DNA, 362 bp, Homo sapiens
tagtagcgatggggtttcactatgttggccaggctggtctcgaactcctggcctcaagtgatcagcccgcctcagcctcccaaattgctgggattacaggtgtgagccaccatgcccagccgagttccacttttatcacagataaatctttttataatacactgcacataaggcagaagcattccttgacctcagcaggcttacaacaagtccctgaagtcatctaagaaagaaaaaactggaccatgtaacttactggcaaaaagaaaaagcatcacaactcagtaacagagagtcacagtcttattgcacttgatgatggatgctatggactcctgatgctgacttgcagcatttctgtt

SEQ ID NO: 105376 - DNA, 1048 bp, Homo sapiens
acctttcagcaaatacaatcttttcttggcattctgttaagttgtgttttttatttttgttttttagtgaaagaattggattgctagtttcatgttatttatattacatctctatgtgacaaataggatgaacttttgacaatatcagccagatcatgttactcccatgtctaaaaccctcttagggccttcatcttcacttggaagaaattcccagcttcttcttttgtcttacaaacccatgcgtgagctgacccttggctgtttgatctcattcagtactgccctccacctaccctattttgctgtagccacactgagcttttctcttgtctttgaccaatacaaacttctttctgtgtcagggtctttgcactactcttctctctgatctttacttgtcttctggggtttagttcttggcttcagtttcacgtctctgaggccttgtgtcactctcaaatctaaaatcatcgggcagttgttttccatcatatccttgtttggatctatcactgattggatatttctatcactggtatttttcagttggatctatcactgatctatcactggtcactgattggattgaatctgtcagtggtattggatctatcactgatatttttctccgtggttttgtgtatcttatttctctcactagagaggaatgtcagcaggagccttattccttcttgtttccaccagtgcttgacactcggtaggttccctatatgcatggaatagattattatttatggtgtatgtgaagagcagctgtgatttcccctcaggtgaggaacataaaagggtagtgtaggtttcacagcagtgcagcttaggtcttacatatctgttgaagaatatgtcttggaacaatcagatgttctaagaactatagtgtttactgttaaaagatcatatgtggtagtcaggcatggtgttgcacacctgtagtcctagctacttgggagtctgagatgggagaattttttgagcctgagaatttgagatcagcctgagcaacatagcaagaccttgtctctta

SEQ ID NO: 105377 - DNA, 748 bp, Homo sapiens
ggtagcagcagcaagaataaagggagacatctccgaggggagccctaaactcggagcaggaagagtgaggaattagatgcacagccaccctttcctccctggaagtgttttctgccgggcttgttttcagactctagaaaatgtcttgtttcagttaagaggggatcctttgccctgtatggtactggtgggggcgggaataagaattgcaaacccagagagcctggggtgccccttgcacccaccacgagcccattgggaaagttgcccttaggggcacctcttcacaaatcctggaggctttggaatgagtggcctaaaggcagcgggcagcaggggatcctaggccccgagtggcaggctagcccgagcccggcctggtctgggacagagctagcatggtgcgccctgtcgagcttcagcattcctttctgactgcatgggtataattagaggttcctttgcctttagtggtagctcatcagatcctatagtttccaagaactgaatctctgatccagaagcgctggcagtggggtagggcgcttgactgagtgagagcagggtgcacaagggagccccgacccagcttcctggggttgtcctccctcagtctgtggatggtgacggcagccctgccccaccgaagtcaggagcgtgggctgagtcactgtggctgcaggaagccgaccctctgcaagggctgggccatggagggctgggttctggcgctcagacatgcagctgt

SEQ ID NO: 105378 - DNA, 206 bp, Homo sapiens
tgggtgtgaattttcaatctggaagcatagtaatgctttggggaagaaggaaaattatacaatcatccgataaccaaaacagataagatgctaaaactacaaattataaaaaatcattagaaatacaaaactttgtgatgagaactaatcatggtgtataactagttgtgattatccatgagggaaaatacacatttaggtaacaa

SEQ ID NO: 105379 - DNA, 433 bp, Homo sapiens
tgggactgagattcactctgttgcccaggctggagtgcaatggcacaatctcagctcactgcaacctccacctcccgggttcgaggaaatctcctgcctcatcctctcaagtaggtgggattacaggcacccaccaccacacctagctaatttttgtatttttggtagagagggtgtttcaccagccaggctggtgttgaactcgtgacctcaggtgatccacccacctcggcctcccaaactgctggttttacaggtgtgagccacggcgcccagccttgttattctactttcataactgtgaatgatcttaatgaagggaagtaagcccagcttgataggtgtttcctaaaagtggcccgaggtgacattatgtgggaatatatggatctatgaagtatgaacgatggcagtttttgccctaacctaccca

SEQ ID NO: 105380 - DNA, 768 bp, Homo sapiens
tattacacaaatatgtaaggctaaattatatatagtgaaaatggccctttgaaattctttatgtcacacataacatataatgtaagactgagatgttgcatgacaaatgcacagattaagaaaccaggttgcactcagctccgtgctcacacaaagagaggtttgcaaaccctcccactctggggagcagcgcatcctcactctgggcatatgctattcggctacttaagaggaatggagccaacacgatttaaattgcactgtctctttttgctgctattttgtggaattcacacatgtaaaaaaaatgctaataatgtgactttacttaactatgcagtaaaagagataagctctaatggtagagcttttgtaaatttctggcagtggactttctagattgctggatcttttcaggagacttgaatgtaagctccacagttgggctctgtagctaggtccagatatatccttagaaagtcattaaaaccacccaggctgtatgtaaaaatgttgctctcttgatgatactctgagaaaaactgtaaaagatgtaaagctttgagcttcttgtgaaatattctccttaatgattggagacgatgtatttccttgatttgtgattataatttggtaacgttccatagcctgtagtcattttccatgtattgttttgtgtttgaaactgcactttagcagttgtagaaccaaagttgtgggaagtggactccttgttaagcccacataaatgtttacaggaactgtata

SEQ ID NO: 105381 - DNA, 362 bp, Homo sapiens
cttggattgcatcatctgttcagcttaacaccttatctaaaactgttgactttgcagttttctgcactgtgccgtagggttttgcagaaatttcatccccttatttttcctttcttctgttccacattgatttacctgctctgtaatgctttgaattttgttttgcctctgtttctccaaaaccctcttctgaatcagttttgtttccttttttaaaaaacacaatgtaacacatatctgttctatctgttgataaaagtaacatgtttgttagagaaaactggaaaataaaaacaagaaataagttacctcttgtaatcacttccaccactcagaagcaacatcagccagtgtgaatattt

SEQ ID NO: 105382 - DNA, 1120 bp, Homo sapiens
accaaatggcatcaggacattctgactacgggttgtggcttatggccagcagtccatctggggaccagtccatctggggtccactccatagcataagtcacatgacctgtgtaaagcagctgacagaaaaacaaaaccaagaatgccttgaaacatcttatattttatgaatgaatactaggaagtcctttttgtttttctgttctttggttttaggtatttcaaaatctgttaaacaggtgaggctgactagggaagccaacaaatatagcttgtgattttggacagttgtgtttccaagttgagggcacttttttgatcaacttccaatcatttataaagcaaaagatagtatccaattagcgcaaatttatgaagtttgttttatgttacatggggatatcataaagaagcatgtttttcattactgctgaatacagcctgtaagatatgcatagcctgatggtcatcgttcattcctacagatatgatgcctcttggcatatctcttaggtgaaagagtttcccttctggtaatgtcctagggaaaaaggtcacttgtgtccaggagattaaaaccaatattaacttctacaatatgtagaggacaggttagtcttggaaaacactttttaattatctgatcatgtggctagaatatgtaggctgataattagactaccttgctatctgaacaccagaaatctcccctgagcccaggctgagatacagtactttcttctcttagatgcttttggttataagttttttcctgaagttgacaggaacatgaaaactacacaacatttaatttttccttgaagaagtgcttatattttcagaacacatagtccctaattagagtaaattactcctgatggaataagcattctgcaaaagcaggaaagaaaccaaatttaatttcccagtgccatagggaggtcttgactattcaaaaactgtctctaaatcttaggaactatgctttcaagggctaaactaatagaactgagcaggaaataagcctgattagcattttgtaagtaattttgagcacaaaagatatatttacaataatagccaagacttatcatctgcaattgaacccaaacactagcaa

SEQ ID NO: 105383 - DNA, 428 bp, Homo sapiens
agttactgctatatgctaaggaaattaaccatttatgttttgctaaaatagagtttacacaagacctctttcaaataatctaacctgggagcccacgtttccataacactatcaccatagtctgtgaccctgcagtgtccaaaaaagggaatttaaagttaaactagagatggaagactggtgtacataaataacaaggcgagagtaaaccatcacattccaggagaatctgttgggaaaacaaatacaaaagtctttctgagaaggaagtgatccctgggacctggagcataaaatcaagggacagcttccccaattcagcaggaccccagcctctcatgtcctcactaatttgccaggcctctggagttggacaggcctctggagttggacaggcctctggagttggacaggcctctggagttggg

SEQ ID NO: 105384 - DNA, 375 bp, Homo sapiens
tgagatggagtttcgctcttgttgcccaggctggagtacaatggcaggatctcggctcactgcaacctccacctcccaggttcaagcaattctcctgcctcagcctccctagtagctgggattacaggcatctgccaccacgcccggctcatttttgtatttttagtagagatggggtttcaccatgttggtcaggctggtctcgaactcctgacctcaggtgatccacccacctcagcctcccaaagtgctgggattacaggcatgagccaccatgcccagccccacagtcccttttcataggcaggaagaggctcatttgcctctgtgtacctagaagctcttcactaatttttttttttttgagatggagtc

SEQ ID NO: 105385 - DNA, 692 bp, Homo sapiens
agtcacccaggttcgagtgcagtggtgccatctcagctcactgcaacctccgcctcccaggttcaaatgattctcctgcctcagcctccctaatagtgggtactacaggtatgcaccacgatgcctggctaatttttgtatttttagtaaaagacagggtttcgccatgttggctaggctggtcttgaactcctgacttcaagtgattgagccatcgcccctggtccctttgtccattttttaatcactttttgttgagttgtgtgtaggtgtgtcttttgctttggatattgaccccttatgaggtgacttgcaagtattttattctgtaggttgtcttttcactcgtttcttttgatgtatagaaatgtttacattttaggttttcaagttccatttgtctgtttttgattttattgtatgtcatatccaagaaatcattgccaaatgtaatgccctgaagcatttaccctatgtattcttctaggagttttattcgctgttaatgtttaggttgttgatccattttgagttaatttttgtttatgatgtaaggtaaaagtccaacttaattttgtttgcatgtggacatccattttttcccagcactatttgtggaagcgatgtttttccctgttatgtaggcttgggactcttgttcaagatagttgagctcagtcatttacttcttt

SEQ ID NO: 105386 - DNA, 778 bp, Homo sapiens
gtgagggaaggacacagttcttatagtcagttaaatagtattaaagaaacaaatttatctgtcagtcttgctgggtccccaagggcttggggcatggggaagaggaaaaagagaaggaagagggtgagaatgagatggaaagcaggaccatcatggaaggaattcacgagtgtagcctttttaggttacagaaagcagcatccaaagtcatgaggaggcaagactaggaggagctgaagcagctggggctccggggaccagcatgtggctcttttggtcacatgagctgggaaccaggggcataggaagcagcatccaggacccagaataatgaggctgatgaggattaggccaagcatctaggctgttactgaaaactttagtgaacatcactgcgttcctggctttgtgctggaagaaacagaaggaatcagacatggtcttcctcaaagttgaagcgattcctccaaaactgaccaggcatgtaaaaacggcaatgacagtggggcacggtcagtgttgtgaaggtggagtggacaacgcattgcaggagctcagaggcagaactcacccactgtgcaaaggtgcagatcagcgctcctaacccatggggaagctgagaaagcagccaactcctacaagccttgcccctcccacccagggctctgggctgtgcttcttctgagaggcagcatcctgaggaagggctgcatggaaaagttgcggtggataaaaatcacaggagttatccatccccaggggctgagtggaatgggag

SEQ ID NO: 105387 - DNA, 281 bp, Homo sapiens
aaaaaatacacctatcatctatctactcaatatcctggaattctggaacaggagtgttctggattcatttgcaaaaaaactggttccccaggtctaatcaaattaaattgagaggtaaatttaaattatatgtattttttatccaacagagaaataaaaagcactttgccaaacagttaaacacttgcgacccagataactaaactcttcagacctaggaattctaaaattaaattgctttcatgaaagtaaaaaattcagtcttcttccaacaaccaaag

SEQ ID NO: 105388 - DNA, 249 bp, Homo sapiens
gaggccattaccctaagtgaactaactcagaaacagaaaatcaaatactgactgttctcacttataagtgggagctaaacaatgggtgcccatggacacgaagatggagagagcaggcaccgggcactttacagtagggaggcgggggcgggggagcgcagaaagagtccctctccatgcgataccggaagcccagtccccaccagtgcacaatattcccatgtgacaaacatgtacacgtgcccctga

SEQ ID NO: 105389 - DNA, 404 bp, Homo sapiens
  misc_feature (364)..(364): n is a, c, g, or t
aaaaaaagtaacaagaaaagacatcagagagaagttgaaaatgctcaaatggaataaatcttgattaaaacagggctgagggcaatcttctatgcataggctttccctgttattctcagcacttaaacagttttatatgtcagagatcaaagttgttttccaaagctgtgcttctaaagcagtaggtttggcctttacattgtcattcccttacctcattctctgtagttaaaggatatcagcattttagagcacaaaggccactttaaaacaatgtggaattaaaatggtacttcaaaacaatgaggacacaaaaatatacatttgggcatggcaaggctagcttccttgctacgtttagacnaaggatccagaattctcgagtagtagtagtagtagtcgac

SEQ ID NO: 105390 - DNA, 946 bp, Homo sapiens
tagaataagggtctggagaagtaaggtccctatttttatccattgttagcattttatggttaccaagaacctaataccaggtgaaggagttcagcagaagaatatatatttgtgacattgttctggctggacagtggaggctgagctggtgaggggagaaaggaatcctgaagaccatattggcagtttttttcagagcccaagagagacagtgggattctgacccagccactagaagggggccagaggagaaggaatagatgtgatgttttgaagataaaatgagcagaccttaagggacacggaagatcaagcagcaaattcccaagccagaagtctgggcctctacatcctggtgagacctacgacatgacaaatgaggccaggcccaggtccgagaggcactgctttccttgcagctctctggagctaccctgtcttcacagtggctaatgcctctctgatgttgggaagggctggagacaagggaggagacaacccaactcatagcaggctacctggctatcgtaggctaccttgacactgactaggttccctacttgtaccatgtgtggttttccaggattcctgtgatctctggtattttccctccaaggactggggttccctcaaggcaagtcaccctactgaaccaatagcaaggttgtaatcatcactactgttagttgaggggttcctgtgtgccaggcaccatactaaatgccaaatgtgttacatctcatttaatcttcacctgaggagggaagttctcttatgccatttgcaaagccagtagtcccagtcaggattagaacaactctgatgtacaagtctgtgcccctttctcccaggtgaacttctcagtgcacccccaaggactcctctccccatgtaagagttctttgttaaattgaaagagcagttcttgcctgtagtaaaaaggtca

SEQ ID NO: 105391 - DNA, 387 bp, Homo sapiens
gtctactcttctgtcctctgcaactcctgcctccattcattcaaaagaggtttgctgtacagagactccttgacttatgggtttatcataagtcaaagagtatactgaatatgtattagtttcacacattgtaaagtcaagaaatcataagtcagggaccatctgtatttgtttaagaaattagataattaccatgtaaacacagtatttaatttcatgaagaatttactaaaataaacaccatggatgtgaacatccacatatttggataacagtatctggccagtgtttcaaatgctgggaaaaaaattcaaatcagaatgcataaagctgcaaagatgataaactacccttaagtttacagtcaaatggagatgccaagcataa

SEQ ID NO: 105392 - DNA, 212 bp, Homo sapiens
tatcctaatatttatatgctttaaattttcagtggcatacaattgcagttttttttttcagcatcgagatgagattatttgaatccaagttaaaagcttactttgacttttctgtgtttaatgaattgatggagaaaagagtggaaatggagagactaattaggaacttgttgtagtccaggtgaaagacaatagtgatagtttaaaagtga

SEQ ID NO: 105393 - DNA, 245 bp, Homo sapiens
gcagaacatgtaaagaagaaagaagtggactggttgatagtttaaatgaattttttataacatttttagaagattctcttaaaaattatggtaaattatataccaatttcatataatcattaaatataatatcaaatattatataattaaataatactaaatatataaatatatactaattttaagcaatatatccatgttcatttaaatatttgaaaactatatatatgtgtgtacatatatat

SEQ ID NO: 105394 - DNA, 263 bp, Homo sapiens
agagttcgggtctcatattattgtccaggctggcctcaaactcctgtcctaaagtgatcctcttgcctcggcctcccaaagtattgggattacaggtgtgagccagtgagcctggcccatttttcttttctgtaataattgtatgtgtgctcactgctggattttggcaacatctgactgacagaggagcctcattacttgcattggtagctgcctctcatgttaagtaatgcttattcttcagtgcacctgttgtcattttt

SEQ ID NO: 105395 - DNA, 162 bp, Homo sapiens
tgctgggattgcaggcaattcttttaaatttaattcagctgaagtttttcttttatcaatagggctaataatccccaccctgccagtatcactaggatgttgtgaggatctgacgcaatttgagttacgggaatgttgagaaagaaaagggcgtaatggagt

SEQ ID NO: 105396 - DNA, 401 bp, Homo sapiens
ccaggctgctacctgagccaccggcccaggcctcctgcctggagcacaggcgtacacagccccactgcctcctgcctcctaagagggtacagctccagttccccttccagggagcaactccctccctccagcacccacagcctctgggaagggccccaagtcggctcctaaatggggtggggatgcagcggaggcctcgggagacggatgcccctcctcaaaggcagagtaggggcatgggctctggagcaattctgcacatgcgtgtttatgtgtacacaggcatgtgtttgcatgcaggcacgtttatgcatgcacaggcatgtgtgtgtttgcatgcagatgtgtttatgcgtgtacaggcatgtgtgtttgcatgcaggcatgtgtttatgtgtgca

SEQ ID NO: 105397 - DNA, 438 bp, Homo sapiens
aacatgctattggccaaaagcatttcaaatgaaatgaacaaattggatgccccaaaaattacatttatgattcatcagaatataagtagaagatagtatgctacatgtagaaagatcgattttttgtagtagtctcatgggtttatattattgttaaaagtaattgtaaaatgttaataaacatcaaagaaatggaggccacctaatcctcataaaaatttatccttgatacattctgaaatcttctgagagaaaaatatgtgcattatcagcaacaactttaattgtacatttaatttttcaaattacgctatgacttaattagaattcattctcctttgagatctctttctttttcatatttctttaactgtcttaggactgtaagagtcttctgcagcaattactaaataggtttttccgttttaaaatttatcc

SEQ ID NO: 105398 - DNA, 471 bp, Homo sapiens
actcgtcaacccaaatcataccaacactgaaaagaagagacaataagaagcattctttctttcaacatcacagacattggcaactctaggatgtctatacagagggataaaaaggggtggcagttggctgggcgtggtggctcatgcctgtaatcccggcactttgggaggcccagggaggtggatcacttgaggtcaggagttccagactgacagtctggcccaccatggtgaaaccccgtttctaataaaaatacagaaaaattagctgtgcgtggtggtgggtgcttgaattcccagcttcttgggaggctgagacaggagaatcgcttgaacttaggtggcggaggttgccgtgagcttgagatcacgttcactgggacgacaaagtgagactctgtcttcaaaaaaaaagggagggggtggtggcaggctttcgaagggaggaactagaggtttgtggtctagctt

SEQ ID NO: 105399 - DNA, 179 bp, Homo sapiens
acacagtaggcaccttataaacgtttgttctcttaatggcaggcacatttgcctctggccttgaagggcttctgagctcccaggtgaatgtagttgctggggaaagacctgggcgagtgcttctaagactggagcaatgggctttagagtgttcctgagctgctgggccagcccccaca

SEQ ID NO: 105400 - DNA, 747 bp, Homo sapiens
ctggaacgaatgaataaaatgtgtagcgtggctaatggtgctaactgctatggaggaaaataaagcaggggtgggagaaggaagtgggggctttgcctcttaaatcgggtggtcagggaaggtgacacttgaacaaagaccccgaggagctgagggacaaagccgtgcagacctctgtgggaggcactctaggcagcaggaacagtaggtgcgaaggccctgaggctggcctttgcttgcttggtgtgtttccggaatggcaaagaggctcctgactggagttgaggcagagcaatggaagagggagaagcgggcagagcagtggaagagggaggagagaagggggcagagcaactgaagagggaggagagaagtgtgggagggccctgaagatagatgagcacagattagagcaaaggtaacaggaagcagcaggccagaggcaggaacatgcccagtgcagtggaggaagggaaaggaggcccacgtgccatgctcagttagcagccagtgcgaaagaggtgaggtgaactgggagtttctctggagccagctgggctgctttcaaggttaagtgtatcaggtgctgtcaagtctaactcaggcctaactctcagcttctccacatgtgcctttaggcaactcacaaacctccctggggaccgcttttctccttacaaaatagggctgcagccgcctccttcatatatcaccttcttagggccatagtgggaatggcaaatgcgg

SEQ ID NO: 105401 - DNA, 733 bp, Homo sapiens
aggagagagccttgttcactatatttaggttaaaagggacgtgcttcactctctgctgcattttctcctcacataaaggagaaaataagatgataaacagttcggccatctccctggccccttcccgacctaccttacccatctaactggttccttctctgtgttgttcttttgaagaggtcttcttggcctaccaggattgcccacgtttctttggacccattgcacacccataaggaccacccccttcattcttttttcctatcataatcagcctctcctaaccagcttgtttttctagctgggcaacaataactcaaatccctgcaagtgtgcaggtgaatggagcaggcagggtgaggaattgatggcattgaagcaggcggaaagcgcttgcccctcccaaggggcagccacagcttggctgcagccagctgttaccttgtggaattgagggccctgacttgccacacatctcctgatttttcaagagaaggcagaaatcaggatttttaagggaaatttcctcatttttaatgttggaagctatttcaatgttttttaaattatattacgcaaatcaacagaccgtggccaaacagcacgtttgtgaactgtgttttgcccacagacggctggtttgtgaccatcttcaggtctttgagcacaagtgtgcctcgtttcctcaaggataatacacatgaatgcagtgctcagctagagcatcgcctcc

SEQ ID NO: 105402 - DNA, 792 bp, Homo sapiens
caaatttaaaagaatttggaaaatttatgaaccattccaaaaattataacaatcaccaaaagagctgtaattctggcttgttctggaaagaaagaaaatgtgtgtgtatgcttgcttgtgagagtgagtgagtagtggctatgtatgtgtgttttatgttgtgttcataaacatgagagaacatcactcaatatgaagttgggttcgaagtcactggctattaaatattaagtaggataactttctcaacagagtagcctggagaatgaaagagaaggtattaaaatgctacttgtaagtaacctttgatagccacattattttgttcctggatggttcttggtatcccagataaaaaagcacaaaacagtttcttgaaagcaattattttaatgttgtcttgaggatattcattatgcctgccatcagtaggagggacattttccttaagtagaatagggagaagggaaaaaacacctagaagagatgatttaaacataaatcagttctgaatgtgacaaagatttgtaaggacaaacgggaagatagtgatgttatgcactaaggactgggtggtgatgagaaagagaagggaagtgtatcacctggttttcccattttaaaaaatgctattataaaattccccctccaatgattatgcattgtttaagaaggaacattctttgaatttcagcttatacaagaaaatactcaaagaatgagagtaaagttattttcattcctttcaaataaaatttattttatgtattatgtaaatagcaaataagctgt

SEQ ID NO: 105403 - DNA, 184 bp, Homo sapiens
tttgggccttaaacagtactagctcttatgagcaaaaaaaggacacaactgcagcctgggcaacgtggtgaaaccctatctatattaaagtacaaaaattagctgggcttggtggtgtgtgcccataatctcagctacttaggaggctgaggcaggagaatcagctgaactagggagatggagg

SEQ ID NO: 105404 - DNA, 6730 bp, Homo sapiens
  misc_feature (947)..(947): n is a, c, g, or t
  misc_feature (1735)..(1735): n is a, c, g, or t
  misc_feature (2061)..(2061): n is a, c, g, or t
  misc_feature (2732)..(2732): n is a, c, g, or t
  misc_feature (2736)..(2736): n is a, c, g, or t
  misc_feature (6034)..(6034): n is a, c, g, or t
  misc_feature (6120)..(6121): n is a, c, g, or t
  misc_feature (6138)..(6138): n is a, c, g, or t
  misc_feature (6146)..(6148): n is a, c, g, or t
  misc_feature (6224)..(6224): n is a, c, g, or t
ggataatcatgccacctcctggggctgctgggggatccagtgagctgatttccatgaaggcggaatgttggcgatgcgagtttttagctagtccccgacacacactgagaacaggaaacgagccactgggtgctcagctctccaagcacggccgtccctgagtgctgggggatgggcaggtccagccatgttcccggaataactccggcctgggcggcggccagcaggtcagagctgggccagaggtgccgacggtgcccagggtaaggggatgccgggaagacgttgaagacaaatgtgtgcctgtggggagcagcatgtttatggcaaataaaactcctgataacgattcacgaatcctggcagccctgccttccttgccgtacctgggggcttgtactgccaggggaggcttcgtctcatttccttcactgctggggaaggactgcccaggactcaaacaggaaaactgagcctcggagacgttcaactccaacagggagcagcagccgctgctgttcggtcgcccagcggcctccctggaggagagtccctcagtgatgcctcttcaaaggctctgcgtgctgcccactgtccgtaaggagtgaggcaggtgtggtcagagtgcctggacccgcatcgccctttgcctccccagctgcaatctcacttgctcacttggggggctttggctgagctttgcaggttggcctggaccggcaggtgggcacaggcccattgcacctgactgggtgtgattaaggaaacaggaatggaaatgcttctccaactggaggaagtcagaaagccacagggcatcctcagacgaaacccctgcttcctccatcagagcgggggcaagcagatggggaggggagatgcttttcctcagagacaccaatgcctctacacccaggcctctccatgcaggtgttatggacattccnggctggataattcttcgttgttagggccatcctgggcatggaagcatgttgaacagcatccctggtttccacccactagatgccaatagcacccccgacaaccaagtgtgtctccaggctttgcccagttcccttgaagggcagaatcacccctcaccgagaaccactgctccacccaatgcaaagatgtaactctcggcatgtttaggaccaagtattgggatgtgcagaaggacgcgcaggacgtggaaccctgtgtgcttgggtcgtggccgtgccttccggatgcttcgagggaaatgacctggctcctggtcagacataaaagtgggaagtgtattttccctctgatgttgtcactactggctggtgccgcagacggactcagaaagcaccgtttcattttgctcgagtaaagaaggcaggcgcagagtgctgctcatatattgattgactcatcaaatgatctgctgcagctgcctgcatttgtttacagggcgaaaattaatgccacagatgtttactgtataataggatttgaaatctgttggggggagcacccgttgaaaccattgggccaagaatgagaaaaacactttgcataaaggaggatttggttcactaagtagcacacggtgcttgctgtcaaatgctaacaagaaacatgggcctcctctcccttggccagcgctggcgttcgcgcctggctccctggctttcttctacactgtgctttgatgtggcaccttccaaagtgttttcatgatggagagggcttcctctgaaangtagcacccgagcctaattaactgatgcgtgattcttcattagcatctgggcaggcctggggcccccagttccctttccttcctcggcccctctttgcagcgggcaaccctggattgcccagcgaggctgcctggcccttgggtgtctgtgtctggggttcccctggtgaccccaccagctcctgttgtgtccctgccttccactgcctggagccaggtctctgaatgaatatagccatcctccgagacgggagctgctttttcttggcacagcatctaagccctgcaaccctgagtgtcttgacggcacagccaattcctcgctntgcccaagggcttttcccaggcatcagggcagacagggacccccagtgcttcttagagcctcctccagaggaaatggctttggggtgtgtctcccagtcgaggacggaggacatggcaggctgctggtgctcctggtgaccattgggaggccctggagggagcctccttcccaggaagtttccttccagtgggttcgagtgtgcatactccgtttgtattttcactttccttatgtttttctcttcagccagctctgattggattcaccacagattaacattttccattatacgttataatgtgtttttttaaaaccaaatctcccttcacagattgctgtctttataatataggaattatttctcagtcactttaaaagtcctgcttcattagcttggtgactgtttggtaatttgcaaagtcactttcgcaagttttaatactgcccggttgaggatcacagcaataaatgtattaggtttgaatagtgttatgattctgtctgaagtgaaaaaattagaatcagtcattagctctgacctcagcatcagcccacaccgtgcaggagatgatgcagatagatgatgcgatcacagcctccgccatgggaagaatcctgggtaaggccttggagccctttgtctcagctctttgccaagactcgaagcantagntcctacatctccagtaccttccacgtttctgttctccttagagtggcttaaagctcccccttccatataagtctctcatgtctagactcagccctccagggaaggcaaatggagactttgaagcccccaaccttgggctccccctccagcttttttgacagatgatggtacctgctgagagaatgtgaccagaggctttcattgggattttgggggccattctgttttcttcctcctcctgtgttgaggccatctctgagccatgctgagaaaacagggaggttgccaagggcagagatgtccagcccctgctctgaggctgtcaagtgcctcctcagggagaaggggagggtgcgcattgctcgattttgctcaattcccagcaggcttctccacctcccaggaggcgcctctgagtccctcccagcccgagactctttccccctggaagagagggtgggcaggctcggggagaaccccagagcctcatgtggccatgtcgtgtttcatttgccctgattaatttggcatctgtatgaaccagagggagtggtgctcgaccctaacctttcacagatgttccaggccgaggttttctggcaaaatcgattttgacattttgataagaaccgttttgctgtgttctgtattttgaatctttgactctaagctgttctgaaaaccagctgtgaagctaaatcttgtttgtaaaatctgcatactgcatcagcagcagaaaacgccagagcctcgaggtcatttcatagacacttgaagcaagttaggtgggatgcgaggatattgaattgcggtggtttgtcagacttctgccatgggaagcattgtgagagatgcataatgaatgtcttgaaccctcttctgtctcttgcagtgtttggaatgcaaaaaaaattagacctttaatggaaagatttggtattcatgagaaagacagagtccctactacttaggaaacttggttgccttgtaaaacagaacatctgtatcaggagcacggtgatcttttgtcatttggtataaggaaaaaaattaaacattggattggaaacatttgaggtcactgtgtaaaaggcacacacctgctgtccaaactgaagttctcatttgcaagcgttatttgagggggaaaaggagtggtttccaaactgccttagcttccaaagaaatggcttgcttccctgcctccctgcgtacctgcactcagaaggaggctctgtttcctgcttcactgtcggagacctcctgaagaaataacacaaaccgacggggacaagcagagtatgcaaggagaaaggtccagagcccaggcgggagggaaaagatgaggcgagtgaccggcaacctcccacctgctctttctcacagcagacagccagtgggaggtgatctggtgggcggggacattgcagctgccctagggctgcctctgacatgagggccactgcaagttcttgaccctctttgtctttcttccaccgtgggtcccttgcatgacagggacgcattctaggtcttgggagcatttcatgaatgacagtggacatgctgttaaaaggctggatgtggcccctgagaaggctgcatggtgacaccaaacaaagaccaaaggaaccaggagccactaggcctgggctccggccacgattctgctcctggcttcctctgtgatgtgggcacagccatctccctttggggcactgggtgtcctgtgtgtacctggggacagtgggatggatgagcagggccctggaatttccgagtgcctgtggcaagccattgttttctctggagcatcactgtacagttagggtgggtttgtggcaggtacttagagaagtcctagtaggagacagcagatcaaaatacagggagatgctgggatccacccactttatagttaaggggtaccctttctagagtcagaagatgaacagattgaccctggaggtaacccccacccgagactcccgtctgtaggtgttgaggtttgcatttgatagcaggaaaaggtgctattaagatcctggagtcattgataaatgaggggtgcatcagtgaatgagcctgtcttagatttcctctctttttcctttgtgaggtcgatggggtttatcttcagctctccaggcctcctcctctgtcccctttccaaccccgccatcacttcccatctctgggcacttagatctttcactgctgtccacatccctttctggcaggagaggatctgagaaattgactcacactaaggcaataatgaatttatgtgtaatctgtcctgtgcgtgtgatacttgctctaaagaggactggatgaagagagtacgcttgcctgaagggaaggggtgctgatggtggggttccaggcatgtgacacccacccgagttccgggatgccctcctgtcccccacaccagcccggaggctggaagctcttgggaaaggagactggtcaagggcttgtgggcagtctctttgggtttattggactccaaatctttactgtccaggagttaaaaggtgatattcttcctctcagctcctcagggagtccatggtttggctgtggggagagcaggtctgtttccctgcagagcccctccccactccagccgggcttgtgggtgccagcatggagcctgcagcctctgcgtgtgcacatccttcattaaatatctctcctgtcctgtgggcagaacatcccctgaccagtttgcagtctgtccacactgggcccttctccagccaggatgagtaaaaggtacacggctgaacatcagtgccagtgagtgagaggctacagaggcacggaacaggatggtggcagagaggtccctgggaagcctgtgccggggcagcaggggtgtggggggctgtgggccggaggaggcagcatcactgtggacaggcaggaaggtggcctcggggggaaggggacagggcagaatgagcctttcccaaaagtgagacactcaaagcctcgtcatgccgggcagcgcccatccctgcctacctgtcccttttgctgtctcggagggagcctgtgggagggaggtcgagatcccagcctctgtgagggcaccgttgggggggggattgggcagggaaaagagtggcgcccacagagcaggacacggagaagccttgagctggaaataaggaggccaatatctaggcctgacctgtcattaacgagccatgaggcatgaggtctttttttttttttttccaagagatcctcccacctcagcctcctgagtggctgggaccacaggtgngtgccaccatgcctggttaatttttaatttttttagggaagaggtcacaccatgttgttcaggctggtcttgaattcttgagctcnngtgatcctcctacctcngcctcccnnngtgctgggattactggcgtgagccactgcagccagtgagccatgaggtcttgagcaaggccgcccctctgttagangtccccttctctatgcctcatggttccacagcctggggtaccccagctccaaatgacacatctccctgcgtttgctgtgcacgtgcctgggtgtgggtgatgctgatttctaatgcatttcttcattcattcagttccacatttatggggcatctcttctagagctagctctgtgccaaaaaggaggtataaagataaatagagcaggcgcggtggctcacggctgtaatctcagcactttgggatgccgagatgggaggatcacctggggtcgggagtttgagaccagcctggccaacatggagacatgtttaatagagacatggccaacatgtctctacaaaaaatacaaaaaaaaaatagccagatgtggtggcacgtgtgatcccaggtacttgggaggctgaggcaggagaatcgcttgaacctgggagacggagattgcagtgagctgagatcgccccactgcactgcagcctgggcaacaagaatgaaaactccacctc

SEQ ID NO: 105405 - DNA, 420 bp, Homo sapiens
atagaatgggctttccctgatacattctaacagagaagtggctttcttttcatattttaaaattttttttgacaatttaaaagttgtatatatggagtacaatgtaatgtttggatgtatgtattaaatcaagctaattaacgtatttatcacctcacctacttttttttttgtggtgagaacattttaaatctattcttttaggaattttgagatatgcagtacattattattaactgtggtcaccatgcagtgcaatagatcactaaaacttactactcctgtccaactgcaactttgtactctttgactaacatctcctcttttcccaatccccaactcccagcctctggtaaacaccattctactctctgcttctatgagttcaagatttttagattctacatgtaagtgacatta

SEQ ID NO: 105406 - DNA, 681 bp, Homo sapiens
gtgtggatacaatacagccacacagaatatcttatgtcatctttaatcttcataaaatgttaggggtacaaagcatttagatatgattcacattcaaggagaaatctaaagcctcaaagctgcagtaacttccccaggttgttcagctacttgggaacagaaccgggtttaaaatctcagcttcttcctctgcaaaatggaataaaaatagggcaactctataaggttgctgtaaggagcagatgagtttttaaataatttgcaatagtccttggctcagtaaatgttagctatccttattattatctaaacccttgtcagtatctcgactgaggccacatggatggccaatgctgttggctgccaagcacggtgctaggtattaggcacatatcatctcaaagaaataagagctgctgacatagcagaagttttgcctctgattctcaatgaattattctgtttctgacataaagtaacaaggcaaaagagacatgaaaagttatctaaatttacaggtcaccaagaaaatggacctcctctatctaattgccacttgaaaggagactaaggaaggaggtgcaagggtacaggagcagtggacatttgaggaggaatttgctgctttagagaatttggcttgtttccactgaattcccctctcccagtggggagaaaaaa

SEQ ID NO: 105407 - DNA, 312 bp, Homo sapiens
cagaaagctgttgtccctgctgttggggtgtgtggctcatgtttagtgaacctggcatggtgcaggacagagccaccggcagacactgcaggcaacaagcttgtgccatctgtgaccaggctccttgtccttggaacttcactcctgactcctcagggaccccgaccctcaggaaatttcaaagaccttttaaaaaatttttattgcagcttattacggttgagtgtcagggattgccgagtcagaattggtttgtcctggaacagagaactgccatcctccccagggcccagcagggacactgtgaccccc

SEQ ID NO: 105408 - DNA, 289 bp, Homo sapiens
gttgtgtggctgagtctgggggtttatgtgggctcagaatggaggaagtgcatgaagtgcatgctgattggtccatgggtaggtctggaaaaaacaccatttgattggctaaaaggcatcaaggaagttctcactccaggttgtggattctgccgggaactggcagcccggttttcaggcttcaggcggcctttggcttgaaggtcaggtttcaccggggacctgctcctatctgcctaggaatttgtctgccattatcacttttatttcttcaactgtcactccattg

SEQ ID NO: 105409 - DNA, 783 bp, Homo sapiens
ctataaaataacagcaagcaccaaggagacataagtagggcaccaacagccactgctacagttcctcttctacctcctttattcctgttcctgacttttagattctgcttctgcttctcatgccctctgaatccattgcatttggaagtccaaggaaaccttaggaatcagacatgtttggactggagaagagtagatagaagctataatccttgttccaatgaacttttatgaagaaaataaactggtgttatttccccttgaagatagtgggcagtccggggagggagagagatataacttaacatagagaaggaccacaccgatcaaaccttatgtattgagatcaaatgcatcagaatttaaagagctccctgctgatggagctgcccagactgagcctgtcagtgatttgtagggaattctggcatcaaatgagaagcaacacaaaatcagggcctctgagatacctctttcatggtcagaacactgtgactgccaaaatgaggaagaaggagcttttaatcatagacttaagctctatatccttctaatatctgttagaatgagaaagaaaaaagcaataatttactgaatctttactatggtccaagcactgtatgaaactttaggtatgttatctgatttaatcctccaaagaaaactatatggtaagaattattgcccccagaattgtaaactcagcttatagaaaatgacatttgcctaaggtcaataattgatagagctacaagtgaattcaggtctactgatttatgcctt

SEQ ID NO: 105410 - DNA, 651 bp, Homo sapiens
  misc_feature (9)..(9): n is a, c, g, or t
  misc_feature (18)..(18): n is a, c, g, or t
gtcttgtancagcacttnagtatggggacaggccctcagtcaaacgagggccgctgatatctaggatacttgagggcactctacgtgtaaagcagcattatgtttgggattcagaaaccaggccctgacaggcgttttaaatagcatcaacacatcttttgtctgtagggaattagtttcttgccactcttcctttttaggcttagcccatgacacagacaattagaaaaccccatttaaccagatggtgctaaaaagatttcatcgtaatgtgctttctaatttcaattggattgaagggggacacatgaaggtcattgttaatatttccccaagactagaccttgaatgaagtgtcttaggcaagtttgttcctgcctgaatgtttcattacccttgcaaaacttctgtcaaagcaaagctgttggacaggttcatgtttaagagccttaggaagctccatcttagcagcaattacagcacctactaaaaataatttacagagacacacagaaagtgtgcatgaaggtgaacagtttgaatgtttctgcctcctataggcaagataaacagcttatcattgtggttgattaattcaacaaaacgactgaacacttgattaactctgaagcggtttggatatgaaataag

SEQ ID NO: 105411 - DNA, 713 bp, Homo sapiens
ggggaagaacacagcacagagtgtgtctattgtctaagcagcctctggacttagccctgtttaggccattggttaattttcagttaactctccatgttcctgagtacttgtcactcctttgggagggctgaggagggctgccaaggggtccagtcccagaccctgttacccacatagacactcagtgctgtggggacctgaggacagagaaagatcaacttgggccaccagcctcagggaaggcttcctagaggaaacagccttgaaggggagacagatgaggcctcaagtcagagggtgaaagaggagatattgctgtgccagcatcagagaagggagcacccgctgctgggagcagagctactgacacacgggaccaatgggaggccgagctgcgtagatagagggcgtcctgtgctgaggagcctggaggagcagctgcagagtcaatctgccctgcaaggtgggtgggcggggttggagtgccttatgcttctacagtccaaggaggggcatgaggaatgtggtggatctggtcggaagcaaggaggtccgaggtcactgtcccttgaaggctgcagcggaggaaacggagaggctgggctggccctaccctacgtagcctaatcaaagcaagaatctgcaggatttagtaacaaactggacaccagtgatgatggaggtgtgagggtggcagttgccatataagactg

SEQ ID NO: 105412 - DNA, 254 bp, Homo sapiens
taaataaggcttccccactttcctcaaattcccatctttcttctttacttccttctctcagctgatgtgttgctttatatctcattaagaaaatagaagccagtaaatggcccactgtcaaatccatttatccattagcatcttcagtgatcttcgtattccctttttgttagagttaatgtgaaaggccattcacactgtatgtagtggttattccattttctctcatctgatcaagaacttcacagcactga

SEQ ID NO: 105413 - DNA, 617 bp, Homo sapiens
atcccatccgagtcgacttgctcaaagcggtcatcacagaggccgtctgctcctttctcttccacagcgctctgctgcacttccaggaagtccgaaccaagcttcgtatccacctgctggctgcactcatcacctttttggtctatgcaggaggaagtctaacaggagctgtatttaatccagctttggcactttcgctacatttcatgtgttttgatgaagcattccctcagttttttatagtatactggctggctccttctttaggtatattgttgatgattttgatgttcagctttttccttccatggctgcataacaaccatacaattaataaaaaggaataactgttccaaagactcagactaacatacaggacagtccagctggatgtgataaagattttatcacctcatatggaaaacaccggctgcactggattcatcagtgttaacttcctttgaggaagctgccttatagttttcatcactgggactttaaaaaaaaattactgtgaaaatgaggtattctgtacttctcagttaagacttgttctttgagtgatgtattaaatgctgctagaaaagcctcattacattaaatataaatcaatctta

SEQ ID NO: 105414 - DNA, 968 bp, Homo sapiens
tagatattttatttgcttgacacatctctaaaaccagttaatggtcagttaaataaggttgagataaaaatgaaaaaactgttaatagttgagattaatgaaaaaagagagactggagaaagtaacctaacattgtttttatttgaacattctaagtgaaaactccgagtgctttcagttgctttattctctaggtatgtccctggggcacggaggaaaaggagagtgttaccattttaaagaggagaaaatgaagacccaagtctagaactaaagagccagaactaaaactacatctttggatttagtttatcctttgaattcattgtttagatcctattggttttaccaaatgcatactgtgtttaaggattcacagttgaagaaaaaataatctgagaataatagatttaaatctgatattagatttaaatctgagaatattagatttaaatatctaacatgtttcacgtagaattgatgtagccaattctttaagcatggctttccaaacatctaggtatataattgtaattttaaaatatacccacctagtgattatgaacctccttaaagattgtttttttattttactgtattttgtctttcaggtatattgtatattgttgatgattttgatgttcagctttttccttccatggctgcataacaaccatacaattaataaaaaggaataactgttccaaagactcagactaacatacaggacagtccagctggatgtgataaagattttatcacctcatatggaaaacaccggctgcactggattcatcagtgttaacttcctttgaggaagctgccttatagttttcatcactgggactttaaaaaaaaattactgtgaaaatgaggtattctgtacttctcagttaagacttgttctttgagtgatgtattaaatgctgctagaaaagcctcattacattaaatataaatcaatctta

SEQ ID NO: 105415 - DNA, 424 bp, Homo sapiens
  misc_feature (61)..(61): n is a, c, g, or t
gtataggattacgaacgagcataacgtcaaacacaaacaccaaggacgtagtgggtaaacngggcagattctttgtatattgttgatgattttgatgttcagctttttccttccatggctgcataacaaccatacaattaataaaaaggaataactgttccaaagactcagactaacatacaggacagtccagctggatgtgataaagattttatcacctcatatggaaaacaccggctgcactggattcatcagtgttaacttcctttgaggaagctgccttatagttttcatcactgggactttaaaaaaaaattactgtgaaaatgaggtattctgtacttctcagttaagacttgttctttgagtgatgtattaaatgctgctagaaaagcctcattacattaaatataaatcaatctta

SEQ ID NO: 105416 - DNA, 500 bp, Homo sapiens
atcccatccgagtcgacttgctcaaagcggtcatcacagaggccgtctgctcctttctcttccacagcgctctgctgcacttccaggaagtccgaaccaagcttcgtatccacctgctggctgcactcatcacctttttggtctatgcaggtatattgttgatgattttgatgttcagctttttccttccatggctgcataacaaccatacaattaataaaaaggaataactgttccaaagactcagactaacatacaggacagtccagctggatgtgataaagattttatcacctcatatggaaaacaccggctgcactggattcatcagtgttaacttcctttgaggaagctgccttatagttttcatcactgggactttaaaaaaaaattactgtgaaaatgaggtattctgtacttctcagttaagacttgttctttgagtgatgtattaaatgctgctagaaaagcctcattacattaaatataaatcaatctta

SEQ ID NO: 105417 - DNA, 407 bp, Homo sapiens
gtccgatgtaaatagttagccggttataaaagacaaaggaggggtgttagtgggtacgtatattgttgatgattttgatgttcagctttttccttccatggctgcataacaaccatacaattaataaaaaggaataactgttccaaagactcagactaacatacaggacagtccagctggatgtgataaagattttatcacctcatatggaaaacaccggctgcactggattcatcagtgttaacttcctttgaggaagctgccttatagttttcatcactgggactttaaaaaaaaattactgtgaaaatgaggtattctgtacttctcagttaagacttgttctttgagtgatgtattaaatgctgctagaaaagcctcattacattaaatataaatcaatctta

SEQ ID NO: 105418 - DNA, 1384 bp, Homo sapiens
tagatattttatttgcttgacacatctctaaaaccagttaatggtcagttaaataaggttgagataaaaatgaaaaaactgttaatagttgagattaatgaaaaaagagagactggagaaagtaacctaacattgtttttatttgaacattctaagtgaaaactccgagtgctttcagttgctttattctctaggtatgtccctggggcacggaggaaaaggagagtgttaccattttaaagaggagaaaatgaagacccaagtctagaactaaagagccagaactaaaactacatctttggatttagtttatcctttgaattcattgtttagatcctattggttttaccaaatgcatactgtgtttaaggattcacagttgaagaaaaaataatctgagaataatagatttaaatctgatattagatttaaatctgagaatattagatttaaatatctaacatgtttcacgtagaattgatgtagccaattctttaagcatggctttccaaacatctaggtatataattgtaattttaaaatatacccacctagtgattatgaacctccttaaagattgtttttttattttactgtattttgtctttcaggtatattgtatattgttgatgattttgatgttcagctttttccttccatggctgcataacaaccatacaattaataaaaaggaataactgttccaaagactcagactaacatacaggacagtccagctggatgtgataaagattttatcacctcatatggaaaacaccggctgcactggattcatcagtgttaacttcctttgaggaagctgccttatagttttcatcactgggactttaaaaaaaaattactgtgaaaatgaggtattctgtacttctcagttaagacttgttctttgagtgatgtattaaatgctgctagaaaagcctcattacattaaatataaatcaatcttaaatgataattgttaactttgatgaaaaacgagtacaggatgagaagggaagtaaaggtgatagtaagatcaacgaatttgtgtatcaagtgtcacccaaatgaacagaatttttaactataaaagtacaaggcgtcaacttacagaactggggagaggatactttcagccaccacctcacaaaatgataccatcaagcagtgtcatctttcaacaggaaagttgcttttagaagtagaatatatattcactcacatgcaagcgatttcctacattttaagtacattaaaatctaatacctaaaatagtttctctaaatagacaatctcactagctccagccaagtggttattctttaatagaatataataaaacaaaacacccatacaaagtcaggatttaagcttttcacattct

SEQ ID NO: 105419 - DNA, 1033 bp, Homo sapiens
atcccatccgagtcgacttgctcaaagcggtcatcacagaggccgtctgctcctttctcttccacagcgctctgctgcacttccaggaagtccgaaccaagcttcgtatccacctgctggctgcactcatcacctttttggtctatgcaggaggaagtctaacaggagctgtatttaatccagctttggcactttcgctacatttcatgtgttttgatgaagcattccctcagttttttatagtatactggctggctccttctttaggtatattgttgatgattttgatgttcagctttttccttccatggctgcataacaaccatacaattaataaaaaggaataactgttccaaagactcagactaacatacaggacagtccagctggatgtgataaagattttatcacctcatatggaaaacaccggctgcactggattcatcagtgttaacttcctttgaggaagctgccttatagttttcatcactgggactttaaaaaaaaattactgtgaaaatgaggtattctgtacttctcagttaagacttgttctttgagtgatgtattaaatgctgctagaaaagcctcattacattaaatataaatcaatcttaaatgataattgttaactttgatgaaaaacgagtacaggatgagaagggaagtaaaggtgatagtaagatcaacgaatttgtgtatcaagtgtcacccaaatgaacagaatttttaactataaaagtacaaggcgtcaacttacagaactggggagaggatactttcagccaccacctcacaaaatgataccatcaagcagtgtcatctttcaacaggaaagttgcttttagaagtagaatatatattcactcacatgcaagcgatttcctacattttaagtacattaaaatctaatacctaaaatagtttctctaaatagacaatctcactagctccagccaagtggttattctttaatagaatataataaaacaaaacacccatacaaagtcaggatttaagcttttcacattct

SEQ ID NO: 105420 - DNA, 458 bp, Homo sapiens
aataaaagtcacatttagtaaccatttatttccagttacaaggaaatggaagataaatcatttgaaatcactctgcttaaaatctgttacaggaggaagtctaacaggagctgtatttaatccagctttggcactttcgctacatttcatgtgttttgatgaagcattccctcagttttttatagtatactggctggctccttctttaggtaagcgtatttttatttaatatgtctgaaagattagggtattttaaaatatgatatgtgtatatcattgtaacatgtcaatttccaaagccacagcaggcacaaaacagaaaatgaaaaaggtagctaacatgcctgaaataatactttgtgtagtatcctttaaaactgttaaaggtagtcagtttcagatatgctatcactttaagaaaccttagatctgagcaccaaaaaagcaacgagtgctta

SEQ ID NO: 105421 - DNA, 732 bp, Homo sapiens
ggtgtgagtcctggtatactgggaagaattacatgcagtttgtctaaaagagctggttagaaaaatagcactaaggttggaaagccagaagggctattgtaagatgagatactgttgatgcttttcctgcttgttcatgttgcatcatgctttactgtattaagaaaattcattttgagtgttcagtgagataatgtctaatgctcttaagtttttagtttttaattgtgggctttctttaagagcataaactctacttctttcgtgcacgctaagagggagattgagggttaccctgttctggtttgcccattacagttctgctgcttcccaagaatagttgccattgttgcacttaagctttctctcaaaggacaaaataagtaatttccgatgaaattgccgccttttcatgggtctctccctccacttactgcatcacagctgggtctcctggctcttcctaatggatatcctgtgctagtggtaaattctaaagaaaagcctcgagatcctaaaagcattgaggggaagattatcttaaacattagcacaaaagactcacaaaccaggcactgtggaccagggactggtttgttaatattttggcatttcagggggttgcaggtgaggaattgcacagggaaacatgagatcattctttgatacatcttgactctccttgcttaaaattgaaaagcagattctctagaatgattgttgaaacctaac

SEQ ID NO: 105422 - DNA, 611 bp, Homo sapiens
caggcaggccttcttgagctgtgatgcttcccagttggagcttcccggctgctttgtttatctaagcaagcctgggcaatggcgggcgcccctcccccagcctcactgccgccttgcagtttgatctcagactgctgtgctagcaagagactccgtgggcgtaggaccctccgagccatgtgcgggatataatctcctggtgcgccatttttttaagcccgtcggaaaagcgcagtattcgggtggaagtgacccaattttccaggtgccgtctgtcacccctttctttgactaggaaagggaactccctgaccccttgctcttctggagtgaggcaatgcctcgccctgctttggctggcacacggtgcgcgcacccactgacctgcgcccactgtctggcactccctagtgagatgaacctggtacctcagatggaaatgcagaaatcacccgtcttctgcgtcgctcacgctgggagctgtacatcagagctgttcctattcggccatcttggctcgtgcctccacattattctttagctagtcttatatgtaactaagaatcactatgtcaaagaattttaagtatgtaggatgaagtatgctattt

SEQ ID NO: 105423 - DNA, 343 bp, Homo sapiens
ctgtggaacagatgctgcatgtgttgatagtacacagaaagaagtgcaagatgccacaaccctgtttgccaaacttaccgggaaaataatagtgctctcaggttaaagtataaaacacacagagtagatgagagtgtagttatgaagagtcaccttatgaagaaagaaaagctcccaggctgagtctcaactatgtaatactcaatgtaagcgttgggtaacaagaagtaaagaggtgggtgtaggaacttagcaagagaagcgccggaaaggaagtatgacagaagcaaatttgagtctcctaagagaatttagaggtgaggatattgtgggctacaaataa

SEQ ID NO: 105424 - DNA, 853 bp, Homo sapiens
caaccaaaaatcaataacatcaaaagtttgcaactacaagccgacggaaaataaatacatgaattctaccacagtgaattggactgcactgggaaacacagatgaagaaagccaacaccgctttgtccttcagtacctggctcccttttcagctcgtcttgcgactccaggcattatgcctgaaaagtctcctggacgcctgtgaggctctaattccctgggacccattgtcatgtctctggatttgcgaagattaaccggaccttctgtggaactcccgtgtccctcaacttttgtgacatgtcccctaattctgcccatggtcatctgcacctgcacgacttagggtccatgttccttggacgggaagagacaggcaggagtcggaatgatgaaccagcacactggggcattttctcatgtagcccaagtgaccccatggtcttcttgagctttggaaccagtcgcgtcccccttgacactgcacccgactcccagtttctcaatcttgttggccctccggcgatctcccgttggatgaattgcatctgctgaaactcgagtcccctttgatttgtgcttcattaattattcatgattcaggttggaaggcctgctgacgaccccctgtggccgttttccgagctttccggtcacatcgtttccttccaccctctttggttccttgtggtcctgctccttctgctgtcagaggagcagagagttgatcttattgattctggatacggatactttgtaggtgatctggataatcaagataacgaccctcaaaagcggcggaaagggagcagccatttggtgtgtctcagcaaatcccgctgagttccgaggc

SEQ ID NO: 105425 - DNA, 261 bp, Homo sapiens
tcagacggatctgaaaaaagagtaacctcttatgcccactacatttacttacaaaaaattcgaaaattaaaataattagaaagtaaccaaccacataatttctttttatttttcttttcttttatacacctacatgaaatcagtgcttacctatcagacgggcaaaaactccaaacgctgggccgggtgcaggggctcacaccgtgtaatcccagcacttcggaaggccgcgcgcccgcggttaccgagcctcgaatccgt

SEQ ID NO: 105426 - DNA, 492 bp, Homo sapiens
aagatcgcaccattacactccagcctgggggacaagagcgaaattccatctcaaaaaaaaaaaaaaaaaaaaaaaaaagaagagaactctgcacctgcactgcagggccgttctgaccaggtgacagatgaggaaactgaggctgagggaggcaggttggtttgtcagaggcacagctgagctgcagctggcctgtgtttctttccagaatccagagaaaatacttcgtgcaggctgaaagcagaggaggacccgctttggggccaacacaacttaaggttgttataggggaaccgccgaaggaggcctaagaaggctgcagccaggttctgctcaagaagtagcagggccaggattgaaaccaggcctttctgctgggcgcagtggtccacgcctattctcagcactctaggaggcccaggcacagggatcgcttgagcccaggagtttaagaccagcctgggcaacggagcaaaactgtatctctacaaa

SEQ ID NO: 105427 - DNA, 231 bp, Homo sapiens
atgaggacatcaagacaatgaaaggttaaacctgcccacgtcgttcaccaggagtgtctgcattccaagcctgctctctggaccactggcccagaatgtccccacagaaggtggagcacctggtggatgtatgaagaggctgagtccaggaggaacaccctggacatggggcaagcaggctatgtcagcccctgagttctggcccatggatcggtgccctcgggagctcca

SEQ ID NO: 105428 - DNA, 570 bp, Homo sapiens
ctgtaagctgtagtttgctgacccctgatctcgataattaaactagaaaagaacagtaaattgtcatttatgaatgagaatttgcacaaattctaagtaaaaatttattaaaattcagcatctattcattataaaaactgttagcaagctaaaaacaaaaggaacttccttaacctgatagagtatctaataaaaccaatagcaaacatcgtatttttgaaatgttcaaagcattcccatgacagataagaataagacagttatgcttgctattatgctaacatttaatattgaactgtgatcctagccactgcaattaagacaagaaaaataaatacaaattgtaaagattccagagacaaaattgtccttatttacagaagatgtgattattaacttagaaaacgaaagaaaaacaacaggaactattattaatagaattagtgaacacatttagaaggactgcaagagataagattgatatctaagaaaaccagctgaatatttctggttctgactagcctgggcaacataatgagaaccccaattctacaaaaaaaaaaaaaaaaa

SEQ ID NO: 105429 - DNA, 548 bp, Homo sapiens
ctgtaagctgtagtttgctgacccctgatctcgataattaaactagaaaagaacagtaaattgtcatttatgaatgagaatttgcacaaattctaagtaaaaatttattaaaattcagcatctattcattataaaaactgttagcaagctaaaaacaaaaggaacttccttaacctgatagagtatctaataaaaccaatagcaaacatcgtatttttgaaatgttcaaagcattcccatgacagataagaataagacagttatgcttgctattatgctaacatttaatattgaactgtgatcctagccactgcaattaagacaagaaaaataaatacaaattgtaaagattccagagacaaaattgtccttatttacagaagatgtgattattaacttagaaaacgaaagaaaaacaacaggaactattattaatagaattagtgaacacatttagaaggactgcaagagataagattgatatctaagaaaaccagctgaatatttctggtctcaaactcctgagtagctgggattacaggggtacc

SEQ ID NO: 105430 - DNA, 561 bp, Homo sapiens
aagagtgcaccagaataagagcgcaccagaataagagcgcaccagctaacaatgtgatacggccatatgtcacttaaggatggagatatgttctgagaaatgtgtcattaggcgattttgtcattaaacatcatagcatgtacttccacaaacctagatggtatagcctactacacacctaggctatttggtatagcctgttggtcctggggtacaaatctgtacaacatgttactgtattgaatacagtaggcaattgtaacacaatggtaagtatctaaacatagaaaagggacagtaaaaatatggttttataatcttctgggaccaccattgtatatgcggtacatcattgaccaaaacatcgttatccagcatatgactgtatttggttatgaaagccaactgttacttgattctgcttttagttcttaagaggatcaggcttttaaatactcatttacaagttttctatcctccttcagtgttaaagtagaaagtaaaaagagtatcttatacatgcatgaaattaaagcatataccaaatgcaaaaaaaatgaa

SEQ ID NO: 105431 - DNA, 680 bp, Homo sapiens
gcctgtctccgcgtggtgcgagcgctgcaccagcccctggctggtggttactgtccgaacggcgtggtgtggtcgctgactctctgggcgtgcagctccgcagccctgccggctcggttcggttcgtgagcggcctgggatttgacttactgcaggattctcagcccttgcctgggagaacagttcaggagacagatggcccccaagagcccagatccaggaccgctgacatttggggatgtggctgtggcctttacccggattgagtggagacacctggatgctgctcagcgggccctgtacagggatgtgatgctggagaactatgggaatctggtgtctgtggggcttctctcttccaaaccaaaactaattactcagttggagcaaggggcagagccctggactgaggtgcgagaggctccatcaggcacacatgcagtcgaggattactggtttgaaacacacgatgtcagccctaaagcacagcacttctgaagcatgcgttctgggagagcgaacgaaacgtgtcatgatggaaaaaggcctggactgggagggcagaagctccacagagaagaactataagtgcacaggaatgtgggaaagtttcagatacaattcggcattataagccacagagagatcaagcaggtgggaacgagataatgtagagaatg

SEQ ID NO: 105432 - DNA, 412 bp, Homo sapiens
caggtgaggccagcatgtgacattacataatactgaataggaaaatgtctctctctctctctctctgtctcatccatccatccatccatccatccatccatccatccatccgtccgtccgtctgtccgtccatccatccatcctgagggttggagtataccttaaatagttcatgatgagttaaaatatacttttcattttggtcatagctgttttacttactagctagaaagcttttaatggaccatggtttaaacaatttaaataaatttagttagtttttctaataacttgatttttatttgtctatgaggatattggcaagctaaaattgtatagacatcagaaggtctgtgtcttttggagaaggtgtatgaaaaaaatgaagcacaaaataagacaaaaataagac

SEQ ID NO: 105433 - DNA, 296 bp, Homo sapiens
gaaaatcataacaaatacataatgagtgagggatactcattttactcagtcccattcctacctcaccagatagttttcattatttctaccctttcctcttaaattcactgctgaatattagaacttctattaatgcatatttgcaggatgattttaattattcatagaatcgcatttataaatttgtagatccccacaggaaaatgttatatctcagcaagtaaacttttaaacggaaattattttctatgccactattgtgggaattgttatagtcatactactacttccaatag

SEQ ID NO: 105434 - DNA, 388 bp, Homo sapiens
ggtttcaccgtgttagccaggatggtctcgatctcctgacctcgtgatccgcccacctcggcctcccaaagtgctgggattacaggcgtgagccaccgcgcccggctattcatgtattaatttcttactttaatgttctttagagtataatgtaaggtgtttcaaatttttggttaaatttatttcaaagtatagttatagttattgagatggaattgttttttaattcattctgagatagttgtcagtgaatagaaattctgacttttggatgttgcttttgtattctgcaagtttaataaatttgtttattctaataggttttagtaaagtcttaggcttttcttatgattatgcatagagataaaatattatataggaataattt

SEQ ID NO: 105435 - DNA, 219 bp, Homo sapiens
cttggcattcttgattttactaattctcagctttctactgtggtcctttctcttcctgtttacttcctcaaatcctaaccactgtccagcctcttccctgtgagatttttctgcttgtttccattcactttgattccctttcatttgtactactacgtcgcgtcttgtctttagatttgatgatcatcatggcagcttaggtagaatggaaagaaccct

SEQ ID NO: 105436 - DNA, 243 bp, Homo sapiens
gttcaaagctaacagttatggggtgcctcctcagtggcaggcactgttctgtgtgctttacacatgtaactcatttaatcctgacaacaaatctatgatatagttactattattatctccatttggcagatgaggaaactaagccacagcaaagttaagtaactcgtttagggtcacacaagccattaagttgaggatcatagccaggctggctacagaacctgtgctccggccacacctctt

SEQ ID NO: 105437 - DNA, 319 bp, Homo sapiens
gctcatgtgtgcgtgcactgtgacacagcttaagttagaagggcaggcagggcgtggtagctcacgcctctaatcccagcactttggagactgagcgggggtggatcacctgaggtcaggagttcgtgaccagcctggccaacatggtgaaaccccgtctctactaaaaatacaaaaaattagccaggcatgttggtgggtgcctgtaatcccagctactcaggaggctgaggcaggagaattgcttgaacctggtgggaggtggaggttgcagtgagccgagatcgctccattgcactccagcctgggcatcaagagt

SEQ ID NO: 105438 - DNA, 690 bp, Homo sapiens
ctaggttatgattatagagcgaggattattataatattggaataaagaataagtactgctgattaattatattcatatataatcatatctaagatctatgtctggcgtaactattgttgttttacattttgttatactggaacagctcgtgtcctcggtctcttgcctctgcacctgggtggcttgccgcccacacatttgcacacacatataacaaaaaatgtatcagttgatttaattttgttaaatatttactaagaatgggtgttgaagataatcacttattttctgtttgaagagggtgtttaacaaagagtgttttctctggagtcaaagttccctgtgttttaaaactggctccactgttgtgagcaagtaatttttctctgtggctctatttctttctctttaaaataaggataataataatgcctatgctatggaattactgtgaaaattaaatttattaacacagtgttatgggtagtgtttagtacaaattaactattaataaaatgtgtaggccgggtgtggtggctcatgcctgtagtcctaacagtttgggagactaaggtgggcagatcatgaggtcaggagttcgagaccagcctagccaatatggtgaaaccctgtctcttctaaaaatacaaaaattagccgggtatggtagctcatgcctgtagtcccagc

SEQ ID NO: 105439 - DNA, 396 bp, Homo sapiens
tccctggccctgacttggcctcgattttcacactctgcagcatgcctgtttacctccaactgtatctggtgttttggctcccagagtccttggtgactggtcagcttgtcacaagcccctgctctgtaatcaagtgacctgtccatcaccagtagaatgtttggggaagctgtcacacatcgcctttggttgcattcaggaaaaaaacaagagttctttgtagatcttttcctctctcccttctttaatgctatccaggtgtggagtttcctccaaactgttaaatgtcttcccttcaaatctcagtctgacacaaattaccagttaaatctcaggaccgctgttacctcgtcccgggattcgaagctctggatcttttataatttccacattgtc

SEQ ID NO: 105440 - DNA, 736 bp, Homo sapiens
tgtgtgtctgggtacatttgctgttgtaacaaatattccttgatatttcggtagctcaacaaaatagcagttgattacccccacaataggcaggggtggcccttttccaagtgggattcagggacccagctccttcccttttgtggttttgccatccctggggccttgcaacgctctgcttcccaaggaaagggtaagagaggttgagggtagccccctgcctaactgctttggccagaagtggaaaaagtaatgcccaggctaaatacactaagctcatcctggggcaatggacatagcacttccgttgccattccatcagtgagagctagtgacatagcctgcctaggtgcaaggcatgctggaaaatggagtccctggctaggcagtggttcctggtggcaatgtgacagcacagaggggaagtacagcttttggaaggcagttagccatcactaccacactcgtcatccatacagaacacaccatcacctgcccttgcctcttgacagcaataaaaagacatccctgacccttgccttctcagagtgcccagtccagtggggggacctggcaccacacagcgatgacctagagtggttcgtaccaaccacaatgaggagcacaggccagatgggtcaggaccgggatgggggaggcacaggcagaggggtgggggctggagttgggggaggcacaggaagttatgggatcccagggaaagtgcctgactcac

SEQ ID NO: 105441 - DNA, 289 bp, Homo sapiens
gtagagacagggtctcactatatcgcccaggctggtctaaaactcccggactcaagtgatccgcctgcctcagcctcccaaagtgctggaattacagtcaggagccacggcgcccaacccatccttgcatcttttacatacttcatgccctctcttctttaccttttttctttctttctcctaattgcattcaactcaatcccttctcacatctgcatgttgttcctctcttcttcctcctcctcctcattctgcggttccctccttctcatcttacttttttctattg

SEQ ID NO: 105442 - DNA, 738 bp, Homo sapiens
aaaggatacatgtactaaatttctcaatagctcaccaaatcaatattttcatttgattcttctaaatttattaagtgccaaacaactatcaggaacaacatacaaagtaccaatgatacaaagatagcaaggctggtcccagtccttaaggagggcttacagtttagtcatggagacaacctgtacagtctagttctgatgagtgttgttggaacatccacagcatgctacgagaatcctgatgagggacacctacattagatggggggtagagaagtcttttctgaagaggaaacaagtaaaatgggtcttgaagcaccaggtgacattagccaggtcacggaaggggtagtacaggagtgttccagatagagaggacagcattttgaaagattacaagaatgaaacagcaagatatctattgtaaaagggaagaatctttgtgtagtagactgaataaaataagtagaggaacagaaggaagcgaggctaggccagtaggtgggttcagaagatgaccagcctatggacttcaccctaaagtttcagagaagcactacaggatttgccctggggaggggggccacggcattcacttttgaagaatcactctggctgctgtgtggagaatggattgtatggggccaagagtggaagctattacaagaatgcaaatgggaactgatgagggctggaattagggcagaaacagtagagacagaaggaagggagagatct

SEQ ID NO: 105443 - DNA, 317 bp, Homo sapiens
ccagagtgttcagtggaggtagtgaaacaaggtcggatcctgaatgtattttaaagattgactgaggctgtggccaggagcccactgggaatgcctgtccacctccgtgaaacaggctgagctagagaactggctcaagttgctgtgtcctgggagtctgagcccttctccttttgtgcttgtcaattcctgtgcctcagccactctgtcataaggtggccttttaacagttggaaaaatagaggcatagtgggtcttcctgatacccttgtctacccttggaattctgatattctgcatttggtctctctcctccc

SEQ ID NO: 105444 - DNA, 508 bp, Homo sapiens
tactctcattaccaggggaagggcgctccccttttccctggtaatactccgggagcccctactcggaagcccaagagtcaaagggatacaggggtgactggagagcagcgggggacagcgtggcctcacccaaggtcagcgctggtccccacgtgtcggccgggggaggggaggggagcggacagtcggagcgttcggatgtccagttgagccgcggcgcggggcagccgggggcgcaaagttggaggcagggctgggcgacgaggagagagggagggccgggagccgaagggacgcccgggtgcaccccgctgcagaggccgagtccgagcggccggagaaggctggtcgcagaagggcggcctccggtgcaaaaaacggaaaccttggagcagaggatgaggaggaatacggaggcggggagcccacagaaaaagatgttgaggaaagaagaggagaccccggcctaaacaaatcgaaactgtgcaatgaacgtggcccgggagaa

SEQ ID NO: 105445 - DNA, 321 bp, Homo sapiens
acaagagagctagtaagtagcttcaaaggagattttaagagtgattttaacttggggaatttaagagctggagtcattgtttacttcactgtggcacctttgaaactgttacattaacataaggtaattgaagaattgttattcctcttgtattcaactgaatatttatggttagcttacagaaatttgcagttgtgaaacagaacagaaacttgtgttgaattcggctactacttaaatatgcatttttaatactctttaacacctcctccctcctcatataatctctcaaggcctgtgattacatattgcatattgaag

SEQ ID NO: 105446 - DNA, 233 bp, Homo sapiens
gttatagttttgggtggctgattagcttataggctttcttcctctttagagtgaaaggtgaacggtatctgagttattggtgacgaatctgtacgtgtctacagcgacctcaatacctgccttctcattagaaagaattcaaccgaggggcgtaagagagaaaaagagacgggcaagtttcagaggaggagtggaagtttatgtaaaaaggctttagaacaggaaagaaagga

SEQ ID NO: 105447 - DNA, 2354 bp, Homo sapiens
tcttcacaggttttgcacactagggaccaagaagccctcggggacactgctgagaaaagactgccgaagggaagaccagcggggatcatggaatctattccagaggaaactaaccaacagtgagcatcttcaactaaaactacccctggatgtaataagtgttgcatgcatcattcctttaattgagcagagttaactggatcaaattatttatgggagagagaggaaaagttataaagaattatagtaatttttaatttccaccaatatactctttgtaagtgaatcactctataattactttctgttgcactgaatgcagcaacaataacacaatagtattttaaggcactggtttttggcatactctaaccttgtaattatttaaataacagccaagtttactcatgtttttgattctgtcaagaaaaaaaaaaagttcctttactcgaaagtgatggccgaaacagaatcggaaatttgttttcttgaaattacataaatacacagaaaatggcacttattagcttttgttaaaacattaccttacctaatcactgcataaaagtccagatttgtagaaaattgtaattttctcagtatctaaaactattttgctttccattaagtttctatttgctattttctcagaattttacaattaaagataaatcacaaactgtttgtttttcttaaagttctttgagaaaatgtctaattatacaatccttggacaatactgtgtttttttggtgctgtgttttttaagaagtcctacttactggaattttgactatttggatatttttgtttttaaaaggggaggggaatttgcttaatacttctaaagatgtgaattgataattgatattaaaatagaattactctcaactcaccagaattaaattttatatctgcatatttaacactattagctcatataaattataagaaaaattttcaaaggatctggttttaattttttggatatgaaatgaatttgccttttctgccttttcttaagtactattttgtaactatattgcactaactatatccaaaacacattctgagcatcactgtgagtaacagccttccagtttgtacccttttgattcacagcatggccctatagttaattaagaggtggataacttaagctcacaactgcctttaatttgatttcacatccacagttataaactttgcatttaaaaggaaaatgagacatttaaataggttcctgttgtttcacatataattggtaaaaacatattcccttgtaggatcctattatcagagcatcaaataccaaagtcagcaacttgggttgccaaataaattaggctcattaattattttgaaaagggctgctgtttccatgtaaatgataattttctttttcatggacaaggttatggtacttatctactaaaagaaacatgcataaacatagtttttatctttaacttcagtattaaaatatgcagttttttgcaaagaggaaaaacatctggttcaattacgctgaactctgactacatgtgggccagtaataatatgaattggacttaagaataaaccttgtgtttaatctctttttttccttaaaattttaatgtgagttttctgttacgcaaattatccatgttagcacatttggaacaaatgtataaatgtactttctgaataaagtcaaaagtctaacttgtttttagttccataatgttttaatgtttaattatattgtgtatttttctccctttccccttactctccaaaatcaccaaatctggaaaacaggctgattgtatctgtctatgagcaaaggaaacctgaaggaaccaagggcctggctggacagagttgtcatgtgtctgcctgtctacacttgctgtgcagaacatccgctcacctgtacagcaggcacagacaggcagtcacatgacaacccagcctgaatgacaaccagccattgaaagaaagcagccctcacaccatagcatctacaccaagagctacaaccaaaatgaggggctcgggggcctggggttttaatctgttggtttaatacttaactcatgtattattttattttgattcaagtattaaaacccaccaaaagtaaagtgagtggtgcctatgaaatataataaaacccatttctgaaaatgttcctgtgcattctatagttctcttttcctaattgttgtcagcaaatcactacccttgacctttattgtacacagctttgcagcaccctatattgatataaaaactcaatataacaaaacaatataacttcagtctgatgcttaacaaagaataaattattctaagaattcttgtccata

SEQ ID NO: 105448 - DNA, 471 bp, Homo sapiens
tgagatggattctcactctgtcacccaggctagagtgcaatgatatgaaccttgctcattgcaaccgctgcctcccgggttcaagtgattctcctgctgcagcctcccaagtagctgggattacaggtgcgcactactgtgcccggctaatttttgtatcttaagtagagacagggtttcactatcttggccaggctggtctccaatacctgacctcaggtgatccacccatcttggcctcccaaagtgctgggattacaggcgtgagccactgcacccagccaggttacatcttgataagccattgttaagttgaaaatatcattaagtcaaaaatacatttaaacctatcgaacatcatggctcagcccagcctactttaaacatgctgggtacacttacattagcctagagttgggcaaaatcatctaacacaaagcctggtttataataaagtgttgaatagctcat

SEQ ID NO: 105449 - DNA, 396 bp, Homo sapiens
tctttttggtagagatggcatctcactttgttgcccaggctagttttgaattcctgggctcaagccatcctcccgccacagcctcccaaagttctgggattacaagtgtgagccactgtgcccagcttttgatttcagacattttaatgcagatcctctcctttacagcactattatttggttatctacttataattactgatttaacattgatctgttttcactagactgtaagctccatgaggacaagtcctgtgccagtatatctctagtgtcagcagacaatactcaaaatttgttgacagactatttaaagctgcccctatttttatcattaattgattgaatattaattaaatatattttattaatttaaaatgaattttaaatgcattt

SEQ ID NO: 105450 - DNA, 271 bp, Homo sapiens
tgtgaatcataacttgttaccatttctcccatccaactactaaccaggcttcaccctgcttagcttccaagattagctgtgttcagggtggtataaccatagacaacttatcaacatttctgttcatcaaattttatttttctgcttatttaacaaagttatggaagctatgaatattcaccagtgacattgggaattggctggtctctggattttagtttaactgcctcatcattccagagttgatagtctccacagtggcaaaaatcct

SEQ ID NO: 105451 - DNA, 457 bp, Homo sapiens
tgtctgcagtcctagctacccaggaggctgaggcagaagaatcgcttgagcccaggagtttgaggcttcagtgaactgtgatggcaccactgcattgcagcctgtgtgacagggcaagacctcgtctcttaaaaaagagtcggccaggtgcagcgactcacgcctgtaatcccagcactttgggaggccaaggcaggtggatcacctgaggtcaggagtttgagaccagcctgaccaacatggtgaaaccccgtctctattaaaaatacaaaaaattagacgggtgtgatgatgcgtgcctgtaatcctagctacttgggaggctggggcaggagaatcgcttgaacctgggagactaaggcgggagaatcgcctgggcctgggaggcagaggttgcagtgagcccagacggcaccattgcactctagcctgggcaacaacaaggagctccgtccca

SEQ ID NO: 105452 - DNA, 496 bp, Homo sapiens
ctgacatgctgcctagcatgcagaggccatgcgacccttggggaggctcctacttgccttggaaaagtagctcctcctcttctcaaatgtaataatggaaaccttacatgggtggatccaggggtaaagctctttgtggtgtatagcaacagaatgttaagtcaaagtggttgtcaacaaagtttatcgaacagcagctatattttttataatgaacactggtttgcctggaaccttgaagtaaccatgaatttttcctagaccctaatactatcagaaagaaacaaatcacccaacaataagatcagtaactaaaaccaacaaatcccaaaggcatctcacagtgctggcatatgtctctgccatagctcatgctcataaactgcaatgagccaaccctggcatcatgaaggaccccgattttaaaaatgggtaaagaagttctgaaagcctgggcaacatagtgagaccattctcttaaaaaaaaaaaattagc

SEQ ID NO: 105453 - DNA, 708 bp, Homo sapiens
tgcagtgagccaagatcaccccactgtactccagcctgggtgataagagtgaaactccgtcttgggggaaaaaaaaaagtgcagggcaaaggcagcccagaggactaactgtgcccagaaaagacagacatctgaaagtaaaggagagataactgggtgttacaggttcaactgtgtctccccaaaatgatatgttgatgtcctaacttccggttcctctgaaaatgaccttaggggatatctgaacacagagacagacatgcactgtctttctgaagacagtgcgaaaacagagagagaaggccccaggaaggttggggactgagtgatgttctgcagtctaggaatgccaaagacggtcagcaaatcaccacatgtggggagagaggcctggagcagcttctcttcacagcctcagaaggaaccaatcctgccaacaccttgatcttggactttgggcccccagaactgtgagaaagtaaatttctgttgtttgaagctccccagcttggtggtactttgttcccgcagctctgggaaaccatacataaagtagacgcaaaaggagagccgttaaagactgcatattgtaggcttggcagctgatttttgaattgttgggttagccagctaattaagcagctagagtggtgcctagcacacagcgagagctcagtaaacacttgtgagtaaccaatgggaggctgg

SEQ ID NO: 105454 - DNA, 504 bp, Homo sapiens
gtggcggacctgtaatcccagctactcaggaggctgaggcaggagaatagcctgaaccaggaggcagaggttgcagcaagctgagatcatgccactgcactctagcctgggcgacagagcaggattctctctcaaaaaaaaaaaaaaagaaagaaaaaaaaaagtcaacatgtgacatctgttaccactgaggaaataagacgaaatacaagctggggagagcagtatgtcatttgattaagacagcagaacctgtgcgtgttggaaagcagacaaaagaaaccaagaaaaaaaagatccgagacacaggacagagacgaaaatcctgtctgaagaatggtacaaaaggaaagcaaaacaccacatgcaaaagttagcctttaccgaaagtggattctctccagcagaaagaaaaagagttttcggttatgtggaacagtctctcaacaggtaaattatgtccaatggtttcaaacctgttattatatccttaaggtcatctgc

SEQ ID NO: 105455 - DNA, 240 bp, Homo sapiens
ctatgttcaggacttttggggatgtatttattcatgtatttgtgataaatgcctaggagtaggactgctgggtggtaagtgcagtgtatgtttaactttataagaaactgccaaactgttttccagagtgaatgtactgttttgcatttctgccagcaatgtatgagagttctagttgtttcacctcctctccaacacatgtaattgccagtatttttacttttctccattgtataatgt

SEQ ID NO: 105456 - DNA, 139 bp, Homo sapiens
tggagggtgttggaattgagtctgagaagcagaaggaggggttggtgagactcaaagccttgaaattggatctgtggttgtttttctctaaaaccaaatgtatacccacccactacccggccagctggtgccctttcag

SEQ ID NO: 105457 - DNA, 363 bp, Homo sapiens
tcagaaagggagaaacattatctttagtcatatgtatttcttggaggatcttggatagttttagtcagaatactttggcagggtggcaaaatgatgcttcctacataaattttgacatttcaaataaaaagatgataaagtgaaaagtgatttaaaaattttagcatgagttatcaaaagctctagaatttcaacaaatacaaatggaagagagtttaaaatttcaaagacaaatattctcaaaacatgataccccagaagagcccgggctcgcgtgctgatgagctcaggtttccggtctgaacacgcagcagctcctcacctgtctgaagccacatggaagccacagggacagtcccaaag

SEQ ID NO: 105458 - DNA, 828 bp, Homo sapiens
gtcaggaactgtcctagaagcagctttccttccttaaggagaaacagtgttctttcccacaggaagcaagtccaaatgtacatggtataggcggggctttgtgcaaaagagcaagggctctgcagccaccacaatgcatccatcacttattagtggtgtagccttgggcaagctatttaatttctccatgtctcagtttcctcatcagccaaaggaagataataatggcatctatcttatagtgttattgtgaaggataaatgagttaatgctcataaaacactcataactgtgcctgatacatagataggtctcagtaatgccactgttacttgtgtgtttctataaccacctgtcacaggatcatgactgaggctgcataattcagagaagtggcagttataccaaggacagaagaaccttcaggaggtcttcattgccaagggcaactggttttaaagaaaggtcacccccactgaaagcaggggtgtaaaatgtcatggtaaaaaaaagttttatcgggaacttacctttaaaatgaaattgtagattatgaaatgaagtgtgttttcaccttttagttaagaatatttagattacaatttcaactttgcattaagtcttagaataaacatggaataaaaggagtgttgactttttggcttaattgtgctgacaaaatgatgtaacagcacaatggagcattctttgttttgtgattgattttttaggactaccttaaaaatcctcatttttgtaaaaataaatcaaaacttaacagtttaacccaaatacctcctttaaccctttggtattcacattattatc

SEQ ID NO: 105459 - DNA, 766 bp, Homo sapiens
tgtgagaagtctgaccacccggaggccacccagtcgtgaggaagtctaagccacatgaagaaaccacagtaggagccatggtcaacagtccccgctgaggctggtcttggagtcatcccagtccagacagcaggcatacacacctgaggaagctcccttatgattctggcctccagctgttcacattctcccatcatggagcagagataagccttcctcactaggccgtctctattcctgacctgcagagtccacaagcctaagagtggttgctgtttaacaccacagtgtttagaagtgctttgtcacacagcagtcgacaataagaacaaaggtgctgcatataacagaggctgccttgtgccaggaagtcatgcgagcgctctccatgaaagtagcattagggctgcgatctgaagggtgaaaagacctccattaatggaaagagagggagaagcaggctgtaggcacaggcactgcaatcagagggagtgtggctggcacagaaaaaacagcacagagtgagaggagagtaaaaaggctgacaaggtaggcaggggtcagaccacattgggtgctttgctggtctggtgcttgacagcacttagaagtccctggaggggttgtctatatacatttttttaattgaaaattcacgtaacataaaagtcactgttatgggttgaactgcatatccccaaaattcacatattgaagtcattaccagcatctcaaaacgtgactttatttggaaatagaatcattg

SEQ ID NO: 105460 - DNA, 790 bp, Homo sapiens
acacacaaatctgtatctgtccacgcctctatctgaactccagacctacatttccacctctctactggacattttttttgagacagggtctcactctgttgcccaggctggggcgcagtggcatgatcatggctcactgaagcctcgacctcctgacctcagcctcccaagtagctgggactacaggcacgcaccaccatgcctggctcatttttttgtattttttttgaagaggcagggttccaccatgttgcccaggctggtggcaaactactgggctcaagcaatccacctgcctcggcctcccaaagtgctaggattacaggcacgagccaccgtgcctggcctccacttggctgtcttaatggcacataaaaattaatatatctaaatctgaaatcatggttttcaatctaaactatattcccttccaacatttcttacctcagtgaatagtgaatgtaacatccatttgcacaaaccagaaaccaaatagacattcttaacatctctctccatcaccttctaaactatttatattgataaagttacagcgatttgaaattctttttctagcctagtaatctgagtaatttgtaggataaacatgttgggggaggggcaggtacatggaggtgtcaaagtgcctgatggctgaggaagcaggctgggattactgcatggaggtgtcagagtttccagctttgtggctccatggttgggtggaggggcagggggagagatccagtggaagccatgttgtgccagtgccctcagggcgaggaggcag

SEQ ID NO: 105461 - DNA, 143 bp, Homo sapiens
agtctgaacgagtgaaagagagtctttaattttaacactaaagataacagatcttgctgtaaagtgcaatgatgcttaatagccctaaagatcaggttgtgattgatgggatttctcatggtgttcttgttaaagataaatag

SEQ ID NO: 105462 - DNA, 417 bp, Homo sapiens
aaggccgtagccgatctagccttctcttctgacttccaggcttctgctctttctcctcagagaggctgaggaccaacagtcttggttggtagcatttctgatctctgtgtgcagtggcagctggtggcaggaaagcagtgaaggcccttgccccagtattgcaggcaggcgggtgtcagtggcactgccctttgctggcagtggcagccaccgttgctccacactagggaaaggggacaccttggtgctgcttctctatgacagggagttggtgaataagtctgggtttcttcctggtagttattactttgacaaggacagaattccaatagggctagttatgcaacatctgggagcctctgcaaccatgactcttcgggagagatgtgttgtttttttaaaagcctgttggaattt

SEQ ID NO: 105463 - DNA, 720 bp, Homo sapiens
atttatgctttcatagaatttagattctaatggcagggggtgtgggtggcagattagtgagttaaatatgctacgggttagtgataaatgctagggtgtaagagtgtgtgtgcacacatgtgcatgcacgcacatatgtggaggctgaagacaatgcttgctcctgccccatccccaccacagacctcgtagcaactggttcccaaactttatttatcataaaagtcattgaccttgaatcacaatgggctgggtccctgcactacacaacatctgaatgtgaatgtgagtcttagattatagataattttccatacttaaaaagttatgagcatatggaaaaagcagtaacagtatacacaatttcatttctcagatgtacatctcttctcatgagttttcgtcctgaaaatacagagagatattagtactatcttgttcattatctggagagtccttgccaaaatattgcacacagttccactgattgagcatttctagggttctcagatgacttatataaataagcagctgctggtagccattgtcagctcattgtcttctttgagtctcattgtcttgttttaggcttagaccatctgccaaaaacaaacccaagggaatagtagtaagttgaagatatcaggttgaaggtatcaggccctagatgtgcatgaatgaaaaactaagagagaacttatttcttatttcccccctgtc

SEQ ID NO: 105464 - DNA, 439 bp, Homo sapiens
tattatgtttcatctgtattactgcatttactatccctagttgattcacttccctgaagtacaatattcagttgtgtggctataccataatttagttattcattttgttgtcagtaaaatttgggtgattatcagatttttttctagcatgaaaaatgctactaggaacattcgtgtatgtgtctaatggtatacactttcaagtgtttttttatatatgtgagagtagattacttggaccttgaagatgaacatgctatcttttccagatactgccaattatttcagcaagatatgagttcccatcattttatatttgtcagcatttgatatttccaggcctagtgatttccagtcatttactggatataatatgattatctctgtagggagttgatttccatctcctcaattactaataaagttaaaaatcttttca

SEQ ID NO: 105465 - DNA, 647 bp, Homo sapiens
aaagcaaggcacagttatgtgttcaatactaaatcagtaataaaaatcagattacattttagcaaacttttagtaaagtacggcattcaaagtaggaagctccatttatttcttggaatgtgcatttggagaattctctaagctaggggtctccaacccacgaactgcagactggtatgggttatgggtcatgggtctgcggcctgttaggaactgggatacacagcaggcagtgagtggctggcgagcaagcattaccacctgagctctgcctcctgtcggatcagcggcagcatgagattctcacagaagcacaaaccctatggcgaactatgcctgcgagggatctaggctgtgtgctccttatgagaatctaactaatgcctgatgacctgaggtgaaatagtttcatcctgaaaccatctctccacctcaatttctctgtggaaaaattgtcttccacgaaactggtcccaggtgtcaaaaaggttgggaaccactgctctaaggggatcattactgaggcatatatatacatttataggagaaagtgaaacaagtttaaaataccacctaacagcaggaaataaacaaaagcttttaaaaatccaaattagctggaaaaacttacagagcctgcgttacct

SEQ ID NO: 105466 - DNA, 517 bp, Homo sapiens
  misc_feature (335)..(335): n is a, c, g, or t
ttatccctctttttgaaccatcttgcccattgccgcctccataactgcctctacttccttcaaacgtcatcttctaggtaagcctttcttgggcactgtatcttaaacagaagccaccgtcacccgttcacgcccacacgcacactcacacatattctacatccctttcttcctttttttgccttagcatttccactaacataccatccatttgacttatttgtgaagtttattttttgcttccctaccaaaaaaaaaaaaagtaagcaccatgggggctggggggttttgtctgttttatttactgttctatctccagcacctagaataatatnaattatgttgagcacataataggtgctcaacaaatatttcttgaaagaataagtgaaagagtagacctaaaattaaaaagaatcgaaagagtagacctaaaaataggtcccatcgtgttgattccttctcattattcaaaagctctattcagccaccaatggtctctatccaccctatttta

SEQ ID NO: 105467 - DNA, 357 bp, Homo sapiens
gttgagggatgggcttgaaaatgctaaccctgtaatcatgcctttgcctttttgctgaccagctccatcctgaagctatcaatcaacatgagcatgcaaaaagacagcactttggagatttcaaggattttaggagttttgtaccaggaaacaggaacaaagaccaaatatatattatatttcacaatatcattggaaccttaagaaagaagcctctctcctttcttacggagcctagaggaataaagataataataaagattactttatttatgaatagtaatactttacaaagtaatctttattatctttattctagtttgcccttgaaccattaaaggttactaagttgaattc

SEQ ID NO: 105468 - DNA, 160 bp, Homo sapiens
gaggtgaggggtgttgtggggtgcagagacaggcagagtggtgagttgagggtgttttgtcattccaaatcagcacctccattaccatccctttggatgtttgagatctgggagtttacccagccccccacccccatctaggcaagtcctcaggatgtcc

SEQ ID NO: 105469 - DNA, 495 bp, Homo sapiens
atggaccaatttgttgaaaaatgtaaacttctataattcagccaatatgaagtagataatttgaagaaccccgtatctattaaagaaattggattaaaaatgtaaaaaattcctaacaaagacatttccagatccagatggtttaatctggagaattctaccaaaggtttaaagaattataccagttctacaccatctcttccagaaggctagacatggtggttcacacctataatcgcagcactctgggaagccaaggtgggaggactgcttaagctccggagtgtgagaccagcctgggcaacgcagggagaccctgtctctacaaataataaaaaaaaaaattagccaggcacagcagtacgcagctgtcgtcccaattacttgggaggctgagacagtaggatcacctgagcccaggaatttgaggctgcagtgagccatgattgtgccactgtcgccagcctgtgtgacacagcaagattctggtggggg

SEQ ID NO: 105470 - DNA, 350 bp, Homo sapiens
gtgaagtcgagtgacttgactttgcccaacaaaagtatttttgacactcagactagtgtctggatcttttcagaaaagaaaataaacaacaaagtctaacaatcagctcttcattggtgttcactttatttccttccatgaaactagcctcagcttaatgtcttgtacttttttaggatatagttccttgtgaataaattgtgtgctctagttcatcattttgtaagttgaatatatatatatatttgaataacaagaattgtttatgtaagcaacaactttctttgaaggcccttggaaaacattaattacattgttctcttgcccaaaatgtctcttgaagctttatg

SEQ ID NO: 105471 - DNA, 275 bp, Homo sapiens
aattgaccttgcttttctagttgggatctttcctgggagtttcagcgggacaacacaacccagctattgtgattcactaactcctacaaagagagctctttctttaaacttaatcacaatgactttgtttctactttagacaaaattaatccatgtccttaaaaaaggaaagcatttgtgttttttcagtctgatagttttcatcacagcatgctaccagataccaaaattcacaagagtatttagtagatatttagggatttttaaggaaaaca

SEQ ID NO: 105472 - DNA, 972 bp, Homo sapiens
ggggtgggagggggagggggacctccgcacgagacccagcggcccgggttggagcgtccagccctgcaacggatcatggtgcagcaggcggagagcttggaagcggagagcaacctgccccgggaggcgctggacacggaggagggcgaattcatggcttgcagcccggtggccctggacgagagcgacccagactggtgcaagacggcgtcgggccacatcaagcggccgatgaacgcgttcatggtatggtccaagatcgaacgcaggaagatcatggagcagtctccggacatgcacaacgccgagatctccaagaggctgggcaagcgctggaaaatgctgaaggacagcgagaagatcccgttcatccgggaggcggagcggctgcggctcaagcacatggccgactaccccgactacaagtaccggccccggaaaaagcccaaaatggacccctcggccaagcccagcgccagccagagcccagagaagagcgcggccggcggcggcggcgggagcgcgggcggaggcgcgggcggtgccaagacctccaagggctccagcaagaaatgcggcagccgcctctactacagcttcaagaacatcaccaagcagcacccgccgccgctcgcgcagcccgcgctgtcgcccgcgtcctcgcgctcggtgtccacctcctcgtccagcagcagcggcagcagcagcggcagcagcggcgaggacgccgacgacctgatgttcgacctgagcttgaatttctctcaaagcgcgcacagcgccagcgagcagcagctggggggcggcgcggcggccgggaacctgtccctgtcgctggtggataaggatttggattcgttcagcgagggcagcctgggctcccacttcgagttccccgactactgcacgcagaagataagaaaaatagaaaaaaggggaatggctgaagaagaacttatcagacctggtgat

SEQ ID NO: 105473 - DNA, 555 bp, Homo sapiens
ctagttttgcatttgataactgctgtttaattctgaaaatgttgtctcaaaccagatgtcagggacaggcttgaagattcctgatgtctcagcacccagcacggctgtcagcctcggcaggaggaagaccacggaaagtgagttttctgggcaggttggagagctgctgacagtgagaatgagcatggtgattacatctcaatatattaaactggctgatagagggaataaaaccacagacaaagtgtagaggggtagattaacatgttttgtcagaaatgtctgaagtagaaaatgaaggaaaaatatcaggggcagttgctgctattgaattcaataccagcaaactccattcctcagtgtctttttttttttcctataaacaatttacagtgtaaatgtattttgacatagaaatcattctgtattgagattcttgatataaaatgcttttatgagagcctgtaagtgatccttggaattattatcagattttttaaaagatgtgtttacatggtgagtgtgtgttgcatattaaatttggttttgtagaaa

SEQ ID NO: 105474 - DNA, 7979 bp, Homo sapiens
  misc_feature (1811)..(1811): n is a, c, g, or t
  misc_feature (1816)..(1816): n is a, c, g, or t
  misc_feature (2021)..(2021): n is a, c, g, or t
  misc_feature (3896)..(3896): n is a, c, g, or t
  misc_feature (3900)..(3900): n is a, c, g, or t
  misc_feature (3909)..(3909): n is a, c, g, or t
  misc_feature (3916)..(3916): n is a, c, g, or t
  misc_feature (3924)..(3925): n is a, c, g, or t
  misc_feature (3927)..(3928): n is a, c, g, or t
  misc_feature (3936)..(3936): n is a, c, g, or t
  misc_feature (3938)..(3938): n is a, c, g, or t
  misc_feature (3944)..(3944): n is a, c, g, or t
  misc_feature (3947)..(3949): n is a, c, g, or t
  misc_feature (3954)..(3956): n is a, c, g, or t
  misc_feature (3959)..(3959): n is a, c, g, or t
  misc_feature (3961)..(3961): n is a, c, g, or t
  misc_feature (3963)..(3963): n is a, c, g, or t
  misc_feature (3966)..(3966): n is a, c, g, or t
  misc_feature (3972)..(3973): n is a, c, g, or t
  misc_feature (3984)..(3984): n is a, c, g, or t
  misc_feature (3992)..(3992): n is a, c, g, or t
  misc_feature (3995)..(3995): n is a, c, g, or t
  misc_feature (3998)..(3998): n is a, c, g, or t
  misc_feature (4000)..(4000): n is a, c, g, or t
  misc_feature (4006)..(4006): n is a, c, g, or t
  misc_feature (4008)..(4008): n is a, c, g, or t
  misc_feature (4014)..(4014): n is a, c, g, or t
  misc_feature (4548)..(4548): n is a, c, g, or t
  misc_feature (4557)..(4557): n is a, c, g, or t
ggggtgggagggggagggggacctccgcacgagacccagcggcccgggttggagcgtccagccctgcaacggatcatggtgcagcaggcggagagcttggaagcggagagcaacctgccccgggaggcgctggacacggaggagggcgaattcatggcttgcagcccggtggccctggacgagagcgacccagactggtgcaagacggcgtcgggccacatcaagcggccgatgaacgcgttcatggtatggtccaagatcgaacgcaggaagatcatggagcagtctccggacatgcacaacgccgagatctccaagaggctgggcaagcgctggaaaatgctgaaggacagcgagaagatcccgttcatccgggaggcggagcggctgcggctcaagcacatggccgactaccccgactacaagtaccggccccggaaaaagcccaaaatggacccctcggccaagcccagcgccagccagagcccagagaagagcgcggccggcggcggcggcgggagcgcgggcggaggcgcgggcggtgccaagacctccaagggctccagcaagaaatgcggcaagctcaaggcccccgcggccgcgggcgccaaggcgggcgcgggcaaggcggcccagtccggggactacgggggcgcgggcgacgactacgtgctgggcagcctgcgcgtgagcggctcgggcggcggcggcgcgggcaagacggtcaagtgcgtgtttctggatgaggacgacgacgacgacgacgacgacgacgagctgcagctgcagatcaaacaggagccggacgaggaggacgaggaaccaccgcaccagcagctcctgcagccgccggggcagcagccgtcgcagctgctgagacgctacaacgtcgccaaagtgcccgccagccctacgctgagcagctcggcggagtcccccgagggagcgagcctctacgacgaggtgcgggccggcgcgacctcgggcgccgggggcggcagccgcctctactacagcttcaagaacatcaccaagcagcacccgccgccgctcgcgcagcccgcgctgtcgcccgcgtcctcgcgctcggtgtccacctcctcgtccagcagcagcggcagcagcagcggcagcagcggcgaggacgccgacgacctgatgttcgacctgagcttgaatttctctcaaagcgcgcacagcgccagcgagcagcagctggggggcggcgcggcggccgggaacctgtccctgtcgctggtggataaggatttggattcgttcagcgagggcagcctgggctcccacttcgagttccccgactactgcacgccggagctgagcgagatgatcgcgggggactggctggaggcgaacttctccgacctggtgttcacatattgaaaggcgcccgctgctcgctctttctctcggagggtgcagagctgggttccttgggaggaagttgtagtggtgatgatgatgatgatgataatgatgatgatgatggtggtgttgatggtggcggtggtagggtggaggggagagaagaagatgctgatgatattgataagatgtcgtgacgcaaagaaattggaaaacatgatgaaaattttggtggagttaaagtgaaatgagtagtttttaaacatttttcctgtcctttttttgtcccccctcccttcctttatcgtgtctcaaggtagttgcatacctagtctggagttgtgattattttcccaaaaaatgtgtttttgtaattactatttctttttcctgaaattcgtgattgcaacaaaggcagagggggcggngcggnggaggggaggtaggacccgctccggaaggcgctgtttgaagcttgtcggtctttgaagtctggaagacgtctgcagaggacccttttggcagcacaactgttactctagggagttggtggagatatttttttttcttaagagaacttaaagaactggtgatttttttttaacaaaaaaagggaccattgcaacttttgttaattnaatttttttttttttttttttttttttttttttggagggagaaaactgatgtcttctatgcatccgattcttaacaaaactgcagggagcttgaaaaaatgcagactgtacaaacgcttacaaaaaaaaaaactgtgaactgacttaagatcagagtttacttttcagatcaaattgtttatggttttacaaatgtgatttctacttgccaactttttttttgtaacttgttcccttatacctccttgattgaataccagacagcctagacctcagtacaaaaggtattgaaacatttttgatacataacagacctcagtcttttttaaaaattaatatattttcaggcgtatttttgtacagtgaaaagggaacattcttgctgtgttttttcagtaagactttcaggcacttcttcccttttgatttcttttttttcctctgttttttagcatgcaagtatgttggtacgttatgtcctggtttaaaaaggattaaaattttaaaataatccttgcatctaaaggccttgtggttttaaaaaaaaaaagcaaacttttttttgtacagctatagtagagatttgttcaatatttgtaggtaaagatttattgaaaatggtgatatagacctcagagctgttatcttagtttaaagattgtatatgtactgtactatagtaggactttatgtatctcatacgctgtgatgtggatggggccccagatggaaggtttgaaactggattctcgatttttagcaaaaaagaaaaaaaaaaggcacatagtttaaaaagtttctcattttgtgcaatataatctaaataaagtacagaccatctgcatattttgtagcaaatggtggcaaagcagactcaatgcactgtcgacatcattgcctgtttttttttttttttttttgtgctggaagtctgtatcttgacaattttaataaatcagctggaactgatagaaactcgcatcgccaatagtctctatggaagtcaaactggaggtcctgttgtcgcagagcattcggtggtgaggctgttgtgtgcgcggatgaggggaggtggcaggagagaattctacatttagggggttaggctgaaaagtgttcaattagcaggctgatttctttttcctcttccgctagttgtgaaagacaggggaagggtgttctttctctctgccctccctttccatctccagctccccatttcctttctcacctcctcctccactccctgcctcttctccccacccatcctggcgggcgggctgcgcggaggctcgggagctggccggggaggggcggatggaggggcctgggttgccagctcccttggtcggggtcctgctcgctggggcttgtgtgttctctgcggcgggccgcgtccccgctgagcctcgcggtgacagccgcctttggcagcgagcgctcggggcacttctatccccgcctctcaaagggtggggacagccgtttccagatttgaattttttctgttctttatttttaacgctgcatcttcgcgtgtgctcagaggtggttgttggcggagaacgccgccgcagtgtttgacctctagcggtgaagggggaaggggaagaggaaaggagagaagtggtcggtgtctgtttccttctgtcccccggggccgtggagctgtcggagggaaggaggacggtgcggggccgcagggggcgcggggcgcggcgggacccaggctacgagcgggagggaggcgggagtcgggggaagacgcggcaggccggccgagggcaccccgaggaacatggcatggcctctgtgcgatccgagtcgcggtctccggggtgcctgggagggccgaaccactggtgagggcgtggngacngggggtggnagagggnacccgggnngnngtccgggncncgcaangcnnngcccnnncgntncnggnccccgnncctggctcttnttgcctcnccnccncntgctcntnggcgcnacgccctccccgcgcgccggctcaggggctgccccggaatcagctccccggggccgccgcaacgaaggtggatccgcatcttgattgttctccgggagcctcctgggggctccggcggcggcgcgggcgcgacccatcccgctggcgctccccgctcgctgaaccccgtttgcctgtccacaccccctcgctccccaccatttttcctgaccggcctgtgtccccgagccctcgcggcaggcccgagcaggcgatcgcggccgggcacgcgcgccccgggctcccgccccccttccgagcatccgccgcctcttttctgctgggtctgggaggagggaggctgggaggccgctcggggcccagcgtgccagccccggagttcagcctcccgagctgcggcgcccgcagcggaggaggttttcagtggctgattgaaactcactgcaaaatcaccacgactctttcacctactgagatgattgaccgaggtttggccttccatttttactgagatttggcgagaccgaatggaancgtccgcanagtaactgcagctgctaggccagaggggccccggcgcccttcccgcctcccctcccgcttgcttttgccttactcgatcttaccaccacccctcccccggccccccgactgagaactcgggcctctcacccgccccccagcctcccgctctgggcgagcctcctccccagcccccacccctgggatgcgaagcagcaagcttttgctgcagatggacaggtttcttttctgtggctttttcctttcgataaaccatcagatttcagtagtacatttgggaaaagaaggggctgatggcgttaaccaggttctcaatatagaactggatttctggagttgtttaccttaccccacaccccctcaacatgtagactaatgcagccattggtggtacatttattttagccacggataattgaaccagcggtttacaattgacacgtgctccgtgctggtgattttatgtggcagccctctgctgcagttccgaaacttgttggcaacgtaaacccattgataggctgatctatgtattttgaaagcctgaaaacttggcatgtcttttctgttttaatcatagatgaatcttggacattttctgtggtgaggtggaaactttaagtaaattagtaaagtaataatttggcttcagaatgggaagagatagtcaagattttttttttttaaagccatgtggcctaacttgatacaaaaataaaagtaattgtttggcaatctaaatttaaaacctgttagaactcaggacaggcgcttcaatgcgctttttaacaatatttaaggctgttttgatgagtgcgttgtgagaatcatcttaatgaattctttattgagtgtctaaaacatagtataatacacatggtattcttgccactggatagtcttcaataaaagtttaattgatttttttttgttggtctcttaagtaagtcttatttttaactaagcattgacagaatatcttaaaatggtaacctgggggtggcgggtgggtgctgtgtgcacggcagcctagccagtggggatcctgctgtttattataagtagttcacagactctgatggcattttggtaagctttccatctttaagaaattgaaccagcattctcttattaattctttaaactgtggaagtaatttccagttcttacactctgatacgcatcccttttatttaaaaaaaaaaaaaatgctaataaaaggcagtgtacttaaactgtgctttgcaaatattgtgtatgttatgaatgactacagacactgggcaaattatttgtagaatgattatcctttagctagagaaagaaatcattacaactcttttgggcagagatgtttctttttaatgttaatcaaggggaagtgatttaaatatgcataaatgtagcagtcagggtgatttagttgcttttttcatgaaagaaaaagactcaaaagacaagacttatttttctcttctgggacttgaaatcataatcatctgatattagtacagtacaagaaatttacatttgttttttacttcagaatttaagtgacttttgcccaaggaatttgagaaataaggcaaataagttgctctattttaaagtagtcattcaatataaatatattatatcaatcttaacttttttattctctgatatgattaataatatgtatattcttacttttcttctaatgggcatatgtatccttgtggacactttgagagaggttttcttggactctcccatttatagaatctttatactcttttactgtgtggttccctgcttttaacagatttctgaggcaaatatatttgtgcttttttcttatgtaggaagaccagcgaaaatagtttactgagttgtcaattttatcagtagataagaaactttctttattacagtttcagggaagattttttcaggatatttctcagttattctaagggccaaattttgtaaaatttccattaggaatgtcagtttcaaataccctttgtatagcctaagcctgtgaggataacaagaatgagccttacctatcctaacacagggatttacaagttcccaaagtaaccgtctccatgtaactcttgacatacttttctgagatttggcttatttttattattggttatttctcactgttcattctatttgatttattctacaacatccccttttatttgatgatctggaaaattctgctctttgataacaactcaggatttttttgttcagttttggtttttgccccttcctgtggagcctacattttcaaccacaataaagatgaaacaaaatttatgaaactgagctctcttccattttacttactgctggctttttttttttttccttgattcctaccataccttcgtttttttcattgtacttttttaacactacctatatccattagctgcctaattagttttatctgttccatgtggatgcagtgagtttataagagaatttcacaaacaagtagttttttagtgaacttaaaataaacagaattttaaaggagacctatttttatactcaataaaagcacaaaagtgcagaaagtataaaacggcttacaaagggagacacaagctcataatgttccatgtataaaagtaataactttattgggtagagatattcttacaagatctagcacctctgccagtgcacagataggactgttttaaatgatttgggaacttttggttgcctgcagttgtgaacagagaacttctctacagagaaacaaaccactaaaagcaatatgaccgagttgagatgtggtttccaatgagcaattggtgaatttaagcaacctggatgtgcatatgtggaggctcccgtctcactgtttgatcaaacttcttttatgtagtcacgtagacttgattttttctgcagatgtcagggacaggcttgaagattcctgatgtctcagcacccagcacggctgtcagcctcggcaggaggaagaccacggaaagtgagttttctgggcaggttggagagctgctgacagtgagaatgagcatggtgattacatctcaatatattaaactggctgatagagggaataaaaccacagacaaagtgtagaggggtagattaacatgttttgtcagaaatgtctgaagtagaaaatgaaggaaaaatatcaggggcagttgctgctattgaattcaataccagcaaactccattcctcagtgtctttttttttttcctataaacaatttacagtgtaaatgtattttgacatagaaatcattctgtattgagattcttgatataaaatgcttttatgagagcctgtaagtgatccttggaattattatcagattttttaaaagatgtgtttacatggtgagtgtgtgttgcatattaaatttggttttgtagaaa

SEQ ID NO: 105475 - DNA, 8736 bp, Homo sapiens
  misc_feature (1811)..(1811): n is a, c, g, or t
  misc_feature (1816)..(1816): n is a, c, g, or t
  misc_feature (2021)..(2021): n is a, c, g, or t
  misc_feature (3896)..(3896): n is a, c, g, or t
  misc_feature (3900)..(3900): n is a, c, g, or t
  misc_feature (3909)..(3909): n is a, c, g, or t
  misc_feature (3916)..(3916): n is a, c, g, or t
  misc_feature (3924)..(3925): n is a, c, g, or t
  misc_feature (3927)..(3928): n is a, c, g, or t
  misc_feature (3936)..(3936): n is a, c, g, or t
  misc_feature (3938)..(3938): n is a, c, g, or t
  misc_feature (3944)..(3944): n is a, c, g, or t
  misc_feature (3947)..(3949): n is a, c, g, or t
  misc_feature (3954)..(3956): n is a, c, g, or t
  misc_feature (3959)..(3959): n is a, c, g, or t
  misc_feature (3961)..(3961): n is a, c, g, or t
  misc_feature (3963)..(3963): n is a, c, g, or t
  misc_feature (3966)..(3966): n is a, c, g, or t
  misc_feature (3972)..(3973): n is a, c, g, or t
  misc_feature (3984)..(3984): n is a, c, g, or t
  misc_feature (3992)..(3992): n is a, c, g, or t
  misc_feature (3995)..(3995): n is a, c, g, or t
  misc_feature (3998)..(3998): n is a, c, g, or t
  misc_feature (4000)..(4000): n is a, c, g, or t
  misc_feature (4006)..(4006): n is a, c, g, or t
  misc_feature (4008)..(4008): n is a, c, g, or t
  misc_feature (4014)..(4014): n is a, c, g, or t
  misc_feature (4702)..(4702): n is a, c, g, or t
  misc_feature (4711)..(4711): n is a, c, g, or t
ggggtgggagggggagggggacctccgcacgagacccagcggcccgggttggagcgtccagccctgcaacggatcatggtgcagcaggcggagagcttggaagcggagagcaacctgccccgggaggcgctggacacggaggagggcgaattcatggcttgcagcccggtggccctggacgagagcgacccagactggtgcaagacggcgtcgggccacatcaagcggccgatgaacgcgttcatggtatggtccaagatcgaacgcaggaagatcatggagcagtctccggacatgcacaacgccgagatctccaagaggctgggcaagcgctggaaaatgctgaaggacagcgagaagatcccgttcatccgggaggcggagcggctgcggctcaagcacatggccgactaccccgactacaagtaccggccccggaaaaagcccaaaatggacccctcggccaagcccagcgccagccagagcccagagaagagcgcggccggcggcggcggcgggagcgcgggcggaggcgcgggcggtgccaagacctccaagggctccagcaagaaatgcggcaagctcaaggcccccgcggccgcgggcgccaaggcgggcgcgggcaaggcggcccagtccggggactacgggggcgcgggcgacgactacgtgctgggcagcctgcgcgtgagcggctcgggcggcggcggcgcgggcaagacggtcaagtgcgtgtttctggatgaggacgacgacgacgacgacgacgacgacgagctgcagctgcagatcaaacaggagccggacgaggaggacgaggaaccaccgcaccagcagctcctgcagccgccggggcagcagccgtcgcagctgctgagacgctacaacgtcgccaaagtgcccgccagccctacgctgagcagctcggcggagtcccccgagggagcgagcctctacgacgaggtgcgggccggcgcgacctcgggcgccgggggcggcagccgcctctactacagcttcaagaacatcaccaagcagcacccgccgccgctcgcgcagcccgcgctgtcgcccgcgtcctcgcgctcggtgtccacctcctcgtccagcagcagcggcagcagcagcggcagcagcggcgaggacgccgacgacctgatgttcgacctgagcttgaatttctctcaaagcgcgcacagcgccagcgagcagcagctggggggcggcgcggcggccgggaacctgtccctgtcgctggtggataaggatttggattcgttcagcgagggcagcctgggctcccacttcgagttccccgactactgcacgccggagctgagcgagatgatcgcgggggactggctggaggcgaacttctccgacctggtgttcacatattgaaaggcgcccgctgctcgctctttctctcggagggtgcagagctgggttccttgggaggaagttgtagtggtgatgatgatgatgatgataatgatgatgatgatggtggtgttgatggtggcggtggtagggtggaggggagagaagaagatgctgatgatattgataagatgtcgtgacgcaaagaaattggaaaacatgatgaaaattttggtggagttaaagtgaaatgagtagtttttaaacatttttcctgtcctttttttgtcccccctcccttcctttatcgtgtctcaaggtagttgcatacctagtctggagttgtgattattttcccaaaaaatgtgtttttgtaattactatttctttttcctgaaattcgtgattgcaacaaaggcagagggggcggngcggnggaggggaggtaggacccgctccggaaggcgctgtttgaagcttgtcggtctttgaagtctggaagacgtctgcagaggacccttttggcagcacaactgttactctagggagttggtggagatatttttttttcttaagagaacttaaagaactggtgatttttttttaacaaaaaaagggaccattgcaacttttgttaattnaatttttttttttttttttttttttttttttttggagggagaaaactgatgtcttctatgcatccgattcttaacaaaactgcagggagcttgaaaaaatgcagactgtacaaacgcttacaaaaaaaaaaactgtgaactgacttaagatcagagtttacttttcagatcaaattgtttatggttttacaaatgtgatttctacttgccaactttttttttgtaacttgttcccttatacctccttgattgaataccagacagcctagacctcagtacaaaaggtattgaaacatttttgatacataacagacctcagtcttttttaaaaattaatatattttcaggcgtatttttgtacagtgaaaagggaacattcttgctgtgttttttcagtaagactttcaggcacttcttcccttttgatttcttttttttcctctgttttttagcatgcaagtatgttggtacgttatgtcctggtttaaaaaggattaaaattttaaaataatccttgcatctaaaggccttgtggttttaaaaaaaaaaagcaaacttttttttgtacagctatagtagagatttgttcaatatttgtaggtaaagatttattgaaaatggtgatatagacctcagagctgttatcttagtttaaagattgtatatgtactgtactatagtaggactttatgtatctcatacgctgtgatgtggatggggccccagatggaaggtttgaaactggattctcgatttttagcaaaaaagaaaaaaaaaaggcacatagtttaaaaagtttctcattttgtgcaatataatctaaataaagtacagaccatctgcatattttgtagcaaatggtggcaaagcagactcaatgcactgtcgacatcattgcctgtttttttttttttttttttgtgctggaagtctgtatcttgacaattttaataaatcagctggaactgatagaaactcgcatcgccaatagtctctatggaagtcaaactggaggtcctgttgtcgcagagcattcggtggtgaggctgttgtgtgcgcggatgaggggaggtggcaggagagaattctacatttagggggttaggctgaaaagtgttcaattagcaggctgatttctttttcctcttccgctagttgtgaaagacaggggaagggtgttctttctctctgccctccctttccatctccagctccccatttcctttctcacctcctcctccactccctgcctcttctccccacccatcctggcgggcgggctgcgcggaggctcgggagctggccggggaggggcggatggaggggcctgggttgccagctcccttggtcggggtcctgctcgctggggcttgtgtgttctctgcggcgggccgcgtccccgctgagcctcgcggtgacagccgcctttggcagcgagcgctcggggcacttctatccccgcctctcaaagggtggggacagccgtttccagatttgaattttttctgttctttatttttaacgctgcatcttcgcgtgtgctcagaggtggttgttggcggagaacgccgccgcagtgtttgacctctagcggtgaagggggaaggggaagaggaaaggagagaagtggtcggtgtctgtttccttctgtcccccggggccgtggagctgtcggagggaaggaggacggtgcggggccgcagggggcgcggggcgcggcgggacccaggctacgagcgggagggaggcgggagtcgggggaagacgcggcaggccggccgagggcaccccgaggaacatggcatggcctctgtgcgatccgagtcgcggtctccggggtgcctgggagggccgaaccactggtgagggcgtggngacngggggtggnagagggnacccgggnngnngtccgggncncgcaangcnnngcccnnncgntncnggnccccgnncctggctcttnttgcctcnccnccncntgctcntnggcgcnccccgccgcgggcccttgaggcgcgcggagacaccagcgctggcttcccgggcccgcgggccggggagggaagcctcggggctgcggggtgagaggaagaaagcaaacccggggagcaggcggctgccgcacccgcgcaccccgggccctcaccacgccctccccgcgcgccggctcaggggctgccccggaatcagctccccggggccgccgcaacgaaggtggatccgcatcttgattgttctccgggagcctcctgggggctccggcggcggcgcgggcgcgacccatcccgctggcgctccccgctcgctgaaccccgtttgcctgtccacaccccctcgctccccaccatttttcctgaccggcctgtgtccccgagccctcgcggcaggcccgagcaggcgatcgcggccgggcacgcgcgccccgggctcccgccccccttccgagcatccgccgcctcttttctgctgggtctgggaggagggaggctgggaggccgctcggggcccagcgtgccagccccggagttcagcctcccgagctgcggcgcccgcagcggaggaggttttcagtggctgattgaaactcactgcaaaatcaccacgactctttcacctactgagatgattgaccgaggtttggccttccatttttactgagatttggcgagaccgaatggaancgtccgcanagtaactgcagctgctaggccagaggggccccggcgcccttcccgcctcccctcccgcttgcttttgccttactcgatcttaccaccacccctcccccggccccccgactgagaactcgggcctctcacccgccccccagcctcccgctctgggcgagcctcctccccagcccccacccctgggatgcgaagcagcaagcttttgctgcagatggacaggtttcttttctgtggctttttcctttcgataaaccatcagatttcagtagtacatttgggaaaagaaggggctgatggcgttaaccaggttctcaatatagaactggatttctggagttgtttaccttaccccacaccccctcaacatgtagactaatgcagccattggtggtacatttattttagccacggataattgaaccagcggtttacaattgacacgtgctccgtgctggtgattttatgtggcagccctctgctgcagttccgaaacttgttggcaacgtaaacccattgataggctgatctatgtattttgaaagcctgaaaacttggcatgtcttttctgttttaatcatagatgaatcttggacattttctgtggtgaggtggaaactttaagtaaattagtaaagtaataatttggcttcagaatgggaagagatagtcaagattttttttttttaaagccatgtggcctaacttgatacaaaaataaaagtaattgtttggcaatctaaatttaaaacctgttagaactcaggacaggcgcttcaatgcgctttttaacaatatttaaggctgttttgatgagtgcgttgtgagaatcatcttaatgaattctttattgagtgtctaaaacatagtataatacacatggtattcttgccactggatagtcttcaataaaagtttaattgatttttttttgttggtctcttaagtaagtcttatttttaactaagcattgacagaatatcttaaaatggtaacctgggggtggcgggtgggtgctgtgtgcacggcagcctagccagtggggatcctgctgtttattataagtagttcacagactctgatggcattttggtaagctttccatctttaagaaattgaaccagcattctcttattaattctttaaactgtggaagtaatttccagttcttacactctgatacgcatcccttttatttaaaaaaaaaaaaaatgctaataaaaggcagtgtacttaaactgtgctttgcaaatattgtgtatgttatgaatgactacagacactgggcaaattatttgtagaatgattatcctttagctagagaaagaaatcattacaactcttttgggcagagatgtttctttttaatgttaatcaaggggaagtgatttaaatatgcataaatgtagcagtcagggtgatttagttgcttttttcatgaaagaaaaagactcaaaagacaagacttatttttctcttctgggacttgaaatcataatcatctgatattagtacagtacaagaaatttacatttgttttttacttcagaatttaagtgacttttgcccaaggaatttgagaaataaggcaaataagttgctctattttaaagtagtcattcaatataaatatattatatcaatcttaacttttttattctctgatatgattaataatatgtatattcttacttttcttctaatgggcatatgtatccttgtggacactttgagagaggttttcttggactctcccatttatagaatctttatactcttttactgtgtggttccctgcttttaacagatttctgaggcaaatatatttgtgcttttttcttatgtaggaagaccagcgaaaatagtttactgagttgtcaattttatcagtagataagaaactttctttattacagtttcagggaagattttttcaggatatttctcagttattctaagggccaaattttgtaaaatttccattaggaatgtcagtttcaaataccctttgtatagcctaagcctgtgaggataacaagaatgagccttacctatcctaacacagggatttacaagttcccaaagtaaccgtctccatgtaactcttgacatacttttctgagatttggcttatttttattattggttatttctcactgttcattctatttgatttattctacaacatccccttttatttgatgatctggaaaattctgctctttgataacaactcaggatttttttgttcagttttggtttttgccccttcctgtggagcctacattttcaaccacaataaagatgaaacaaaatttatgaaactgagctctcttccattttacttactgctggctttttttttttttccttgattcctaccataccttcgtttttttcattgtacttttttaacactacctatatccattagctgcctaattagttttatctgttccatgtggatgcagtgagtttataagagaatttcacaaacaagtagttttttagtgaacttaaaataaacagaattttaaaggagacctatttttatactcaataaaagcacaaaagtgcagaaagtataaaacggcttacaaagggagacacaagctcataatgttccatgtataaaagtaataactttattgggtagagatattcttacaagatctagcacctctgccagtgcacagataggactgttttaaatgatttgggaacttttggttgcctgcagttgtgaacagagaacttctctacagagaaacaaaccactaaaagcaatatgaccgagttgagatgtggtttccaatgagcaattggtgaatttaagcaacctggatgtgcatatgtggaggctcccgtctcactgtttgatcaaacttcttttatgtagtcacgtagacttgattttttctgctgtgaaaatgaaaaaataaagcaatatgacaaaaagtttaaaaatgcataaaaaataggatttcctctaggctcctcgaagagatttttttaatatgatgcttgtcttactttcttagacacgttacatttccccttccaaaaaaaaaaaaaaaggacaactggaagtaatttatcatataaagaattttgatcaaatagatattgacaaagggccctctgtcacatttttcttcatccagcttttgttcaaaaacagtatgcctcctcccttgaatcacatagggagaaacgttatactccattctcattaatttcccattttgtctacttttactcttgtacatatgttgtgggtttaagagtcttttgcatttgttctgtgacacctttttttgaattgactgttttaaaacggaggcctattttttccggtttgggactcctagtggttatggcatcccataatgcttcgtgacggccaccaggacagaaccacctgatgttttagagcagttttcagcatgacactgttaacaagtgtgtattttccaaggccacatgaaacttactttcttagccactccaggtttgggagcagaaaagctgaaaaacccttttgtgtagaagtctgagtggtttgtgggggggaccttttttagagtttgcatgccagcgcacggcctattgctgtgaaacagagagaaggtaaagctacctgaggcagtgcgctggaggatgaagtgtttgatagcactaggggggaaagaaaatgcatggcaaagtttcgtcttctcgtagactatctagcatgcagagtgtagtgtgttgaaacggtgtatgacattgctgtatcaaagttgtaaaattaagcattatttattgaaaactatgtatttttttgtaaaaacctgatcacatagagaatatcagtggcttgtgcttgtgcttcgatctaaccagcttcttgacccacccccccttggtatgcagtgttaatgctcagggttgaaaatagtacactccaatgtctcttttgcaagagtttttcacagaggattacatttgttcaaaagactctaataaaattgtgtgatcaatcttca

SEQ ID NO: 105476 - DNA, 1917 bp, Homo sapiens
ggcacgaggcgcaggcctggcgaggcggcggcgggcggaggctgggccggaggggtggggacggcgaggaggtggaggccggcgctccgctccgctccagctcggtttcatgtcccgccaggcgaaggatgacttcctgcggcactacacagtgtcggaccccaggactcaccccaagggctacaccgagtacaaagtaaccgcgcagttcatctcaaagaaggacccagaggatgtcaaagaggtggtggtctggaagcggtacagcgacttccgcaagctgcatggagacctggcctacacccaccgcaacctcttccgccgcctcgaggagttccccgctttcccccgggcccaggtgtttggccggtttgaagcctcagtgatcgaggagcggcgaaagggggcagaggacctgcttcgcttcactgtgcacatacctgcgctcaacaacagcccccagctcaaggagttcttccggggtggggaggtgacccgacccttggaggtgtccagggacctacacatcctgccaccccctctgatccccaccccgccccctgatgacccccggctatcccaactgctccctgcagaaaggaggggcctcgaggaattggaggtgccagtggaccccccaccatccagccctgcccaggaggccctggatctcctctttaactgtgagagcaccgaggaggcatctggttcccctgcccgaggccccctcaccgaggctgagcttgccctcttcgaccccttctccaaggaagaaggcgcagcccccagccccacccatgtggctgagctggcaacgatggaggtggagtctgcaaggctggaccaggaaccctgggagccaggagggcaggaggaggaagaggatggggaaggagggcccacccctgcctacctaagccaggccacagagctcatcacccaggccctgcgggatgagaaggcaggcgcttacgctgctgcactccagggctatcgagacggcgtgcacgtcttgcttcagggagtccccagtgacccgttgcctgcccgccaggaaggtgtgaagaagaaggcagctgagtacctgaagcgggcagaggagatcctgcgcctgcacctgtctcaactcccaccctaacagggagtgggccattccctgggactctcactcctgcactgccagccccttctcctctccccagggcctggccctacctcctggtcttgtaattacaggagccatttctgtaggtaactggaccaagaatgagaaaaataatgaattcttagctccctgattacacctgccaccttggaatccaggactcacacttctgaccctgcctgtctttttggggtttttttgagttggagtctcgctgtgtcgcccagactggagtgcagtggtgggatcacggctcactgcaacctccacctcccaggttcaagcagttctcctgtctcagcctccccagtagctgagattgcaggcacatgccaccacgcccagctaatattttgtattttcagtagggacggggttacaccatgttggccaggctggtctcgaactcctgacctcaagtgatccacccgcctcagtctcccaaagtgctgagattacaggcatgagtcactacgcccggcccatgtctgtctgtcttgatgtgtgagcagcagctgtggtcattaaaccattagtttacccctctagaactggggtctgcaaactcccacctgcagccaaatctggcccacctcctttttaatgtaagggctgtgagagtggtttttactttttttaatgattaaaaaaatcaaaataatattctgtgacaatgacaggtgaaatttatatgtgacaagtgaaaattatatgaaatttaagagtccataaataaaatttgttggaacaca

SEQ ID NO: 105477 - DNA, 492 bp, Homo sapiens
  misc_feature (11)..(11): n is a, c, g, or t
  misc_feature (42)..(42): n is a, c, g, or t
gggttcaaaanaaggtccaccctggtccacaaccctcccccnagtaagcctagaagatttgaagggcacatgccaccacgcccagctaatattttgtattttcagtagggacggggttacaccatgttggccaggctggtctcgaactcctgacctcaagtgatccacccgcctcagtctcccaaagtgctgagattacaggcatgagtcactacgcccggcccatgtctgtctgtcttgatgtgtgagcagcagctgtggtcattaaaccattagtttacccctctagaactggggtctgcaaactcccacctgcagccaaatctggcccacctcctttttaatgtaagggctgtgagagtggtttttactttttttaatgattaaaaaaatcaaaataatattctgtgacaatgacaggtgaaatttatatgtgacaagtgaaaattatatgaaatttaagagtccataaataaaatttgttggaacaca

SEQ ID NO: 105478 - DNA, 1887 bp, Homo sapiens
cccacgcgatccgcccacgacgatccggggacggcgaggaggtggaggccggcgctccgctccgctccagctcggtttcatgtcccgccaggcgaaggatgacttcctgcggcactacacagtgtcggaccccaggactcaccccaagggctacaccgagtacaaagtaaccgcgcagttcatctcaaagaaggacccagaggatgtcaaagaggtggtggtctggaagcggtacagcgacttccgcaagctgcatggagacctggcctacacccaccgcaacctcttccgccgcctcgaggagttccccgctttcccccgggcccaggtgtttggccggtttgaagcctcagtgatcgaggagcggcgaaagggggcagaggacctgcttcgcttcactgtgcacatacctgcgctcaacaacagcccccagctcaaggagttcttccggggtggggaggtgacccgacccttggaggtgtccagggacctacacatcctgccaccccctctgatccccaccccgccccctgatgacccccggctatcccaactgctccctgcagaaaggaggggcctcgaggaattggaggtgccagtggaccccccaccatccagccctgcccaggaggccctggatctcctctttaactgtgagagcaccgaggaggcatctggttcccctgcccgaggccccctcaccgaggctgagcttgccctcttcgaccccttctccaaggaagaaggcgcagcccccagccccacccatgtggctgagctggcaacgatggaggtggagtctgcaaggctggaccaggaaccctgggagccaggagggcaggaggaggaagaggatggggaaggagggcccacccctgcctacctaagccaggccacagagctcatcacccaggccctgcgggatgagaaggcaggcgcttacgctgctgcactccagggctatcgagacggcgtgcacgtcttgcttcagggagtccccagtgacccgttgcctgcccgccaggaaggtgtgaagaagaaggcagctgagtacctgaagcgggcagaggagatcctgcgcctgcacctgtctcaactcccaccctaacagggagtgggccattccctgggactctcactcctgcactgccagccccttctcctctccccagggcctggccctacctcctggtcttgtaattacaggagccatttctgtaggtaactggaccaagaatgagaaaaataatgaattcttagctccctgattacacctgccaccttggaatccaggactcacacttctgaccctgcctgtctttttggggtttttttgagttggagtctcgctgtgtcgcccagactggagtgcagtggtgggatcacggctcactgcaacctccacctcccaggttcaagcagttctcctgtctcagcctccccagtagctgagattgcaggcacatgccaccacgcccagctaatattttgtattttcagtagggacggggttacaccatgttggccaggctggtctcgaactcctgacctcaagtgatccacccgcctcagtctcccaaagtgctgagattacaggcatgagtcactacgcccggcccatgtctgtctgtcttgatgtgtgagcagcagctgtggtcattaaaccattagtttacccctctagaactggggtctgcaaactcccacctgcagccaaatctggcccacctcctttttaatgtaagggctgtgagagtggtttttactttttttaatgattaaaaaaatcaaaataatattctgtgacaatgacaggtgaaatttatatgtgacaagtgaaaattatatgaaatttaagagtccataaataaaatttgttggaacaca

SEQ ID NO: 105479 - DNA, 1659 bp, Homo sapiens
ggcacgaggcgcaggcctggcgaggcggcggcgggcggaggctgggccggaggggtggggacggcgaggaggtggaggccggcgctccgctccgctccagctcggtttcatgtcccgccaggcgaaggatgacttcctgcggcactacacagtgtcggaccccaggactcaccccaagggctacaccgagtacaaagtaaccgcgcagttcatctcaaagaaggacccagaggatgtcaaagaggtggtggtctggaagcggtacagcgacttccgcaagctgcatggagacctggcctacacccaccgcaacctcttccgccgcctcgaggagttccccgctttcccccgggcccaggtgtttggccggtttgaagcctcagtgatcgaggagcggcgaaagggggcagaggacctgcttcgcttcactgtgcacatacctgcgctcaacaacagcccccagctcaaggagttcttccggggtggggaggtgacccgacccttggaggtgtccagggacctacacatcctgccaccccctctgatccccaccccgccccctgatgacccccggctatcccaactgctccctgcagaaaggaggggcctcgaggaattggaggtgccagtggaccccccaccatccagccctgcccaggaggccctggatctcctctttaactgtgagagcaccgaggaggcatctggttcccctgcccgaggccccctcaccgaggctgagcttgccctcttcgaccccttctccaaggaaggtgacccgttgcctgcccgccaggaaggtgtgaagaagaaggcagctgagtacctgaagcgggcagaggagatcctgcgcctgcacctgtctcaactcccaccctaacagggagtgggccattccctgggactctcactcctgcactgccagccccttctcctctccccagggcctggccctacctcctggtcttgtaattacaggagccatttctgtaggtaactggaccaagaatgagaaaaataatgaattcttagctccctgattacacctgccaccttggaatccaggactcacacttctgaccctgcctgtctttttggggtttttttgagttggagtctcgctgtgtcgcccagactggagtgcagtggtgggatcacggctcactgcaacctccacctcccaggttcaagcagttctcctgtctcagcctccccagtagctgagattgcaggcacatgccaccacgcccagctaatattttgtattttcagtagggacggggttacaccatgttggccaggctggtctcgaactcctgacctcaagtgatccacccgcctcagtctcccaaagtgctgagattacaggcatgagtcactacgcccggcccatgtctgtctgtcttgatgtgtgagcagcagctgtggtcattaaaccattagtttacccctctagaactggggtctgcaaactcccacctgcagccaaatctggcccacctcctttttaatgtaagggctgtgagagtggtttttactttttttaatgattaaaaaaatcaaaataatattctgtgacaatgacaggtgaaatttatatgtgacaagtgaaaattatatgaaatttaagagtccataaataaaatttgttggaacaca

SEQ ID NO: 105480 - DNA, 1955 bp, Homo sapiens
ggcacgaggcgcaggcctggcgaggcggcggcgggcggaggctgggccggaggggtggggacggcgaggaggtggaggccggcgctccgctccgctccagctcggtttcatgtcccgccaggcgaaggatgacttcctgcggcactacacagtgtcggaccccaggactcaccccaagggctacaccgagtacaaagtaaccgcgcagttcatctcaaagaaggacccagaggatgtcaaagaggtggtggtctggaagcggtacagcgacttccgcaagctgcatggagacctggcctacacccaccgcaacctcttccgccgcctcgaggagttccccgctttcccccgggcccaggtgtttggccggtttgaagcctcagtgatcgaggagcggcgaaagggggcagaggacctgcttcgcttcactgtgcacatacctgcgctcaacaacagcccccagctcaaggagttcttccggggtggggaggtgacccgacccttggaggtgtccagggacctacacatcctgccaccccctctgatccccaccccgccccctgatgacccccggctatcccaactgctccctgcagaaaggaggggcctcgaggaattggaggtgccagtggaccccccaccatccagccctgcccaggaggccctggatctcctctttaactgtgagagcaccgaggaggcatctggttcccctgcccgaggccccctcaccgaggctgagcttgccctcttcgaccccttctccaaggaaggtgacccgttgcctgcccgccaggaaggtgtgaagaagaaggcagctgagtacctgaagcgggcagaggagatcctgcgcctgcacctgtctcaactcccaccctaacagggagtgggccattccctgggactctcactcctgcactgccagccccttctcctctccccagggcctggccctacctcctggtcttgtaattacaggagccatttctgtaggtaactggaccaagaatgagaaaaataatgaattcttagctccctgattacacctgccaccttggaatccaggactcacacttctgaccctgcctgtctttttggggtttttttgagttggagtctcgctgtgtcgcccagactggagtgcagtggtgggatcacggctcactgcaacctccacctcccaggttcaagcagttctcctgtctcagcctccccagtagctgagattgcaggcacatgccaccacgcccagctaatattttgtattttcagtagggacggggttacaccatgttggccaggctggtctcgaactcctgacctcaagtgatccacccgcctcagtctcccaaagtgctgagattacaggcatgagtcactacgcccggcccatgtctgtctgtcttgatgtgtgagcagcagctgtggtcattaaaccattagtttacccctctagaactggggtctgcaaactcccacctgcagccaaatctggcccacctcctttttaatgtaagggctgtgagagtggtttttactttttttaatgattaaaaaaatcaaaataatattctgtgacaatgacaggtgaaatttatatgtgacaagtgaaaattatatgaaatttaagagtccataaataaaatttgttggaacacaaccaggctaattcatttagtattgtgatagctgctttcgcgctacactggcagttgaaacagttgcagagttgagtctttgccgcctgcaaatcccaaaacatttacaacctggccctttgcagaaaacatttgctggcccctgagctagaaaatagggagcatagtctcagggaaatagaggacaagccgatggagccggtttattgggtggaagggacgaaggagaggaacccaaagcccgggtacttgtctcagaggccccaaagccaaatcctgattgctcagcgggctgga

SEQ ID NO: 105481 - DNA, 1088 bp, Homo sapiens
ggcacgaggcgcaggcctggcgaggcggcggcgggcggaggctgggccggaggggtggggacggcgaggaggtggaggccggcgctccgctccgctccagctcggtttcatgtcccgccaggcgaaggatgacttcctgcggcactacacagtgtcggaccccaggactcaccccaagggctacaccgagtacaaagtaaccgcgcagttcatctcaaagaaggacccagaggatgtcaaagaggtggtggtctggaagcggtacagcgacttccgcaagctgcatggagacctggcctacacccaccgcaacctcttccgccgcctcgaggagttccccgctttcccccgggcccaggtgtttggccggtttgaagcctcagtgatcgaggagcggcgaaagggggcagaggacctgcttcgcttcactgtgcacatacctgcgctcaacaacagcccccagctcaaggagttcttccggggtggggaggtgacccgacccttggaggtgtccagggacctacacatcctgccaccccctctgatccccaccccgccccctgatgacccccggctatcccaactgctccctgcagaaaggaggggcctcgaggaattggaggtgccagtggaccccccaccatccagccctgcccaggaggccctggatctcctctttaactgtgagagcaccgaggaggcatctggttcccctgcccgaggccccctcaccgaggctgagcttgccctcttcgaccccttctccaaggaagtctcccaaagtgctgagattacaggcatgagtcactacgcccggcccatgtctgtctgtcttgatgtgtgagcagcagctgtggtcattaaaccattagtttacccctctagaactggggtctgcaaactcccacctgcagccaaatctggcccacctcctttttaatgtaagggctgtgagagtggtttttactttttttaatgattaaaaaaatcaaaataatattctgtgacaatgacaggtgaaatttatatgtgacaagtgaaaattatatgaaatttaagagtccataaataaaatttgttggaacaca

SEQ ID NO: 105482 - DNA, 1801 bp, Homo sapiens
ggcacgaggcgcaggcctggcgaggcggcggcgggcggaggctgggccggaggggtggggacggcgaggaggtggaggccggcgctccgctccgctccagctcggtttcatgtcccgccaggcgaaggatgacttcctgcggcactacacagtgtcggaccccaggactcaccccaagggctacaccgagtacaaagtaaccgcgcagttcatctcaaagaaggacccagaggatgtcaaagaggtggtggtctggaagcggtacagcgacttccgcaagctgcatggagacctggcctacacccaccgcaacctcttccgccgcctcgaggagttccccgctttcccccgggcccaggtgtttgggtggggaggtgacccgacccttggaggtgtccagggacctacacatcctgccaccccctctgatccccaccccgccccctgatgacccccggctatcccaactgctccctgcagaaaggaggggcctcgaggaattggaggtgccagtggaccccccaccatccagccctgcccaggaggccctggatctcctctttaactgtgagagcaccgaggaggcatctggttcccctgcccgaggccccctcaccgaggctgagcttgccctcttcgaccccttctccaaggaagaaggcgcagcccccagccccacccatgtggctgagctggcaacgatggaggtggagtctgcaaggctggaccaggaaccctgggagccaggagggcaggaggaggaagaggatggggaaggagggcccacccctgcctacctaagccaggccacagagctcatcacccaggccctgcgggatgagaaggcaggcgcttacgctgctgcactccagggctatcgagacggcgtgcacgtcttgcttcagggagtccccagtgacccgttgcctgcccgccaggaaggtgtgaagaagaaggcagctgagtacctgaagcgggcagaggagatcctgcgcctgcacctgtctcaactcccaccctaacagggagtgggccattccctgggactctcactcctgcactgccagccccttctcctctccccagggcctggccctacctcctggtcttgtaattacaggagccatttctgtaggtaactggaccaagaatgagaaaaataatgaattcttagctccctgattacacctgccaccttggaatccaggactcacacttctgaccctgcctgtctttttggggtttttttgagttggagtctcgctgtgtcgcccagactggagtgcagtggtgggatcacggctcactgcaacctccacctcccaggttcaagcagttctcctgtctcagcctccccagtagctgagattgcaggcacatgccaccacgcccagctaatattttgtattttcagtagggacggggttacaccatgttggccaggctggtctcgaactcctgacctcaagtgatccacccgcctcagtctcccaaagtgctgagattacaggcatgagtcactacgcccggcccatgtctgtctgtcttgatgtgtgagcagcagctgtggtcattaaaccattagtttacccctctagaactggggtctgcaaactcccacctgcagccaaatctggcccacctcctttttaatgtaagggctgtgagagtggtttttactttttttaatgattaaaaaaatcaaaataatattctgtgacaatgacaggtgaaatttatatgtgacaagtgaaaattatatgaaatttaagagtccataaataaaatttgttggaacaca

SEQ ID NO: 105483 - DNA, 1985 bp, Homo sapiens
ggcacgaggcgcaggcctggcgaggcggcggcgggcggaggctgggccggaggggtggggacggcgaggaggtggaggccggcgctccgctccgctccagctcggtttcatgtcccgccaggcgaaggatgacttcctgcggcactacacagtgtcggaccccaggactcaccccaagggctacaccgagtacaaagtaaccgcgcagttcatctcaaagaaggacccagaggatgtcaaagaggtgaggctcctgggaggaagagggactgttctgcagttccagatctggaaactgtcaaggggcagctggtggtggtctggaagcggtacagcgacttccgcaagctgcatggagacctggcctacacccaccgcaacctcttccgccgcctcgaggagttccccgctttcccccgggcccaggtgtttggccggtttgaagcctcagtgatcgaggagcggcgaaagggggcagaggacctgcttcgcttcactgtgcacatacctgcgctcaacaacagcccccagctcaaggagttcttccggggtggggaggtgacccgacccttggaggtgtccagggacctacacatcctgccaccccctctgatccccaccccgccccctgatgacccccggctatcccaactgctccctgcagaaaggaggggcctcgaggaattggaggtgccagtggaccccccaccatccagccctgcccaggaggccctggatctcctctttaactgtgagagcaccgaggaggcatctggttcccctgcccgaggccccctcaccgaggctgagcttgccctcttcgaccccttctccaaggaagaaggcgcagcccccagccccacccatgtggctgagctggcaacgatggaggtggagtctgcaaggctggaccaggaaccctgggagccaggagggcaggaggaggaagaggatggggaaggagggcccacccctgcctacctaagccaggccacagagctcatcacccaggccctgcgggatgagaaggcaggcgcttacgctgctgcactccagggctatcgagacggcgtgcacgtcttgcttcagggagtccccagtgacccgttgcctgcccgccaggaaggtgtgaagaagaaggcagctgagtacctgaagcgggcagaggagatcctgcgcctgcacctgtctcaactcccaccctaacagggagtgggccattccctgggactctcactcctgcactgccagccccttctcctctccccagggcctggccctacctcctggtcttgtaattacaggagccatttctgtaggtaactggaccaagaatgagaaaaataatgaattcttagctccctgattacacctgccaccttggaatccaggactcacacttctgaccctgcctgtctttttggggtttttttgagttggagtctcgctgtgtcgcccagactggagtgcagtggtgggatcacggctcactgcaacctccacctcccaggttcaagcagttctcctgtctcagcctccccagtagctgagattgcaggcacatgccaccacgcccagctaatattttgtattttcagtagggacggggttacaccatgttggccaggctggtctcgaactcctgacctcaagtgatccacccgcctcagtctcccaaagtgctgagattacaggcatgagtcactacgcccggcccatgtctgtctgtcttgatgtgtgagcagcagctgtggtcattaaaccattagtttacccctctagaactggggtctgcaaactcccacctgcagccaaatctggcccacctcctttttaatgtaagggctgtgagagtggtttttactttttttaatgattaaaaaaatcaaaataatattctgtgacaatgacaggtgaaatttatatgtgacaagtgaaaattatatgaaatttaagagtccataaataaaatttgttggaacaca

SEQ ID NO: 105484 - DNA, 1851 bp, Homo sapiens
cccacgcgatccgcccacgacgatccggggacggcgaggaggtggaggccggcgctccgctccgctccagctcggtttcatgtcccgccaggcgaaggatgacttcctgcggcactacacagtgtcggaccccaggactcaccccaagggctacaccgagtacaaagtaaccgcgcaggtggtggtctggaagcggtacagcgacttccgcaagctgcatggagacctggcctacacccaccgcaacctcttccgccgcctcgaggagttccccgctttcccccgggcccaggtgtttggccggtttgaagcctcagtgatcgaggagcggcgaaagggggcagaggacctgcttcgcttcactgtgcacatacctgcgctcaacaacagcccccagctcaaggagttcttccggggtggggaggtgacccgacccttggaggtgtccagggacctacacatcctgccaccccctctgatccccaccccgccccctgatgacccccggctatcccaactgctccctgcagaaaggaggggcctcgaggaattggaggtgccagtggaccccccaccatccagccctgcccaggaggccctggatctcctctttaactgtgagagcaccgaggaggcatctggttcccctgcccgaggccccctcaccgaggctgagcttgccctcttcgaccccttctccaaggaagaaggcgcagcccccagccccacccatgtggctgagctggcaacgatggaggtggagtctgcaaggctggaccaggaaccctgggagccaggagggcaggaggaggaagaggatggggaaggagggcccacccctgcctacctaagccaggccacagagctcatcacccaggccctgcgggatgagaaggcaggcgcttacgctgctgcactccagggctatcgagacggcgtgcacgtcttgcttcagggagtccccagtgacccgttgcctgcccgccaggaaggtgtgaagaagaaggcagctgagtacctgaagcgggcagaggagatcctgcgcctgcacctgtctcaactcccaccctaacagggagtgggccattccctgggactctcactcctgcactgccagccccttctcctctccccagggcctggccctacctcctggtcttgtaattacaggagccatttctgtaggtaactggaccaagaatgagaaaaataatgaattcttagctccctgattacacctgccaccttggaatccaggactcacacttctgaccctgcctgtctttttggggtttttttgagttggagtctcgctgtgtcgcccagactggagtgcagtggtgggatcacggctcactgcaacctccacctcccaggttcaagcagttctcctgtctcagcctccccagtagctgagattgcaggcacatgccaccacgcccagctaatattttgtattttcagtagggacggggttacaccatgttggccaggctggtctcgaactcctgacctcaagtgatccacccgcctcagtctcccaaagtgctgagattacaggcatgagtcactacgcccggcccatgtctgtctgtcttgatgtgtgagcagcagctgtggtcattaaaccattagtttacccctctagaactggggtctgcaaactcccacctgcagccaaatctggcccacctcctttttaatgtaagggctgtgagagtggtttttactttttttaatgattaaaaaaatcaaaataatattctgtgacaatgacaggtgaaatttatatgtgacaagtgaaaattatatgaaatttaagagtccataaataaaatttgttggaacaca

SEQ ID NO: 105485 - DNA, 558 bp, Homo sapiens
aagcaaacaatgtttgtaagtgctgtttttaatattctttccttacactttctccttatgcccacctatcctctgttaccactgatccacattatgtgcataaggaagtatgtatatgtttgataggatgaaaactaacacagctaaaatgagaagggagggctaagaaaaagaaaactctatagggtgttgtcttcatgagtggtagaaggtcaaaactatgtgtaagtcatttttaatctcaacatttgatcttaaaaggagaagcaagaggaagagttgctcactacgttacccccaccaacaccctcccagataaatgcagttggcattgccattgacaaagtggtacaggaatttggcttacacaatgagaacttggaacagaggctagaaattaaacgtatcatggaaaatgtgttccaacacaagttaccaggtattttctagatttgtttttctatttaactacctaaaagtacctcattcatttctcctaccaatagtaattttcatcaaataaaaatttatttaccatgtcatgaagctcttgtgttt

SEQ ID NO: 105486 - DNA, 1303 bp, Homo sapiens
ggagcccggccgggacaggaagaggctggggaccgcggcgaaggtggtgagtgctcttgggcgccttctcccaacgtccctgccagactcgcctccgggctgattctccagttggtttcctggactccagagtagctgtccggcctggccccggaggtgcaaagtaagaaaattgaagtcaaagaccatgggagatacagcaaaaccttatttcgtgaagcgcactaaagaccgggggactatggatgatgatgacttcagaaggggtcacccccaacaagattatttaataatagatgaccatgctaaaggccatggcagtaaaatggaaaagggccttcaaaaaaagaagataacaccagggaactatgggaatacccccagaaaaggaccatgtgctgtttccagcaatccatatgcatttaaaaacccaatctacagtcaacccgcttggatgaatgacagccacaaagatcagagtaagagatggctgtctgatgaacatactggtaattcagacaactggagagaattcaaacctggacctagaattcctgttataaaccgacaaagaaaagactcctttcaagaaaatgaagatggttataggtggcaagacacaagaggctgcagaactgtaagacgactgtttcataaagacctaacaagcctagaaaccacgtcagaaatggaagcaggaagtcctgaaaacaagaagcagaggtccagacctaggaagccacggaagactagaaatgaggaaaatgagcaggatggagacttggaaggccctgtgatcgatgagtctgtactttcaacgaaggagctgctaggcttacagcaggctgaggagagactgaagagagactgcattgacaggctaaaaaggcgaccacgaaactaccctacagcaaagtacacctgcagactctgtgatgttttaattgaatccattgcatttgcccataagcatatcaaggaaaagaggcacaagaaaaacattaaggagaagcaagaggaagagttgctcactacgttacccccaccaacaccctcccagataaatgcagttggcattgccattgacaaagtggtacaggaatttggcttacacaatgagaacttggaacagaggctagaaattaaacgtatcatggaaaatgtgttccaacacaagttaccaggtattttctagatttgtttttctatttaactacctaaaagtacctcattcatttctcctaccaatagtaattttcatcaaataaaaatttatttaccatgtcatgaagctcttgtgttt

SEQ ID NO: 105487 - DNA, 1128 bp, Homo sapiens
ggagcccggccgggacaggaagaggctggggaccgcggcgaaggtggtgagtgctcttgggcgccttctcccaacgtccctgccagactcgcctccgggctgattctccagttggtttcctggactccagagtagctgtccggcctggccccggaggtgcaaagtaagaaaattgaagtcaaagaccatgggagatacagcaaaaccttatttcgtgaagcgcactaaagaccgggggactatggatgatgatgacttcagaaggggtcacccccaacaagattatttaataatagatgaccatgctaaaggccatggcagtaaaatggaaaagggccttcaaaaaaagaagataacaccagggaactatgggaatacccccagaaaaggaccatgtgctgtttccagcaatccatatgcatttaaaaacccaatctacagtcaacccgcttggatgaatgacagccacaaagatcagagtaagagatggctgtctgatgaacatactggtaattcagacaactggagagaattcaaacctggacctagaattcctgttataaaccgacaaagaaaagactcctttcaagaaaatgaagatggttataggtggcaagacacaagaggctgcagaactgtaagacgactgtttcataaagacctaacaagcctagaaaccacgtcagaaatggaagcaggaagtcctggtaatgttttccaacttgtcagatcacaaccccagagtcagcaatgttttattctttttcatccaaatgagttttgttattttcagcaatttagtttcagtttttcacagtttctgttttaagaaatggtcacttagtgtgattattttaaggatagtaatcatgatatttgagcagctaaaacacatttcatatgttgatccctttaaaagtttactttgccccagggctcactttacgtcagtaaacatgttttctgtaacgtgttttttacagaagagggtagctatatgctccaggggaccatatcgtaattgctcagtggtttgtgtgttttcaaaattgtgattataattttgtatttgaataattaatgtgttcataatataaatgacagaatataaagctttttttaaaaaaa

SEQ ID NO: 105488 - DNA, 229 bp, Homo sapiens
ctcaaaaataaatttcatgcacgttagttatcaccctcctgcctatctttctatctccctagccctaagcaaccactaacctactttcggtctctattgatttgtctgttctggatgtttcatgtaaatttaagcaatatgtagtcttttttttttttttgagacagtcttgctctgttgcccaggctggagtgcagtggtgtgatctcggctcactgcagcctctgcc

SEQ ID NO: 105489 - DNA, 739 bp, Homo sapiens
tttgttgctgcacccgccatagggaagaaatactgtatcttctcatgaaggaaggaaccgaagagaatgagtagccactgcaccttgccctgcgccatcaatgagaagatctgctcttagtagagccctgctttcccgctgaaggccctgaaatcacctgtgttccaggccacccactaaggataaacaaagcttccctgatatggggaattagctcaagtggtagagcgcttgcttagcatgcaagaggtagtgggatcaatgcccacattctccaagctttattatttaggtacccaaacccgagtcagtgtctgagagcaagacactgctctcggtgtctttggttcaagacataggagcagcaacaatacaggactggtgacagcttcctgctggcattcagtatagtgtagatctactgtgtaattaattttctgtttcttcgaggagctgtgaaaccaaaggacatataaaactgctcttttctccctgtttctgcctgcagcttggtcctaaatgtgagacaattgtgaaaagtggaggacagagccacctggttaaatacagccccagctttctggtgagaggactgaaaccaagatgtgtcaagtaactagaatgtgcctggacagatactgtagaaagcaaaaccataaagttgttcatgagcttgtggacgcacctgccagctgtgaataagtggctctaatcccgaacaacttacctaaaaagagcc

SEQ ID NO: 105490 - DNA, 277 bp, Homo sapiens
tgctgggattacaggcgtgagccaccatgtctggcctacattgtggctttaaaagagtcagaaactcagctggagaaaaggttttaggacagcaagagtgccttgtattgtgttgtgatagaaacctcttccataaacattatctaggccctggaatgcccacacccacctttcatgggcatgtcacaccccttcttccctgcctgaatgctcctgacccccatctggcctcctcaggtgttagacaccctgcttcgctggccacaattcaagccct

SEQ ID NO: 105491 - DNA, 400 bp, Homo sapiens
  misc_feature (180)..(180): n is a, c, g, or t
tcaacccaaccacccttctgctttctcttcactctaacatttcttgaaaaaaaagttttattttcttttgagatggagtctcactctgtcaacaggctggagtgcagtggcacaatctcggctcactgcaacctccgcctcccaggagaatctcgtgagcccaggaatttgaggccagtntgagcaacatagtgagaccacatctctattaaaaaacacaaaacaaacaaacaaaatttaaaaactttgtctctactaaaatacaaagattagctgggcattgtggtgggtgcctgtggtcccagctgctcgagaggctgaggcaggagaaatggcgtgaacctggggagttggagcttgccgtgagccaagatcgcaccactgcactccagcctaggcg

SEQ ID NO: 105492 - DNA, 445 bp, Homo sapiens
cctcccagaggtagctgaaaacactggtttgaactgctggttccaggcagtactttgtaaatctggaaaggatagtagcttattccccaggaccttttggtctcagttatatgccaggctatggatatggaagacttctttacaactggcaccattttagcccctgggcccatcagtctttcccttgatctcaggcaagcagggagtgtcatgcccccccagttgcctatcccaacaatagtcactactgactgaggtgcttctttggtcccagtgctgtgctggcccttttcagtcctcccaacaatctcacaaggtaggtattattacatcttccatttgtccatttggaaatacttaagtggcttccatgagtcagccaccatgccaggggtacactgaggagtacacctatagcctctgctctctaggtgcttgcagtcaa

SEQ ID NO: 105493 - DNA, 358 bp, Homo sapiens
cctgcttttaagccatctcctcccttggagcatacaaatcagcagcagccgggatttagctacttggatgctttaattcttccctccaaaatgatctgagtgggaatgaccttaatgaggggtgtgctctaaaggtgagctgtgcttctccaggcagtagattgagaaaagtataggaggatgtttggtttgagggagttgcagaggaagggcacattgttcttttacttatttacagtaaatgggaatttcagcacaggagctttattaagtatatttaagttgttggactccttaaagtgcggactcaatttccagagaaaactattagttaatgtgataaatgcagtctttctgc

SEQ ID NO: 105494 - DNA, 390 bp, Homo sapiens
gacacagggcagggaacatcacacaccggggcctgtcatggggtggggggatgggggagggatagcattaggagagatacctaatgtaaatgacgagttaatgggtgcagcaaaccaacatggcacatgtatacctatgtaacaaacatgcatgatgtgcacatgtaccctagaacttaaaagtgtaattaaaaaaacccatacacagtacattaaaacctgtctaaaccaataaatacactaattaaattaggaaaatataaaattaacataaaagtatatctatggtttcatacagtttaactatctgataaaataaagaaaaaatcttatttactataacattaaataataaatttctgaggaaaaaattaaccaaggaggtaatac

SEQ ID NO: 105495 - DNA, 464 bp, Homo sapiens
ccagagggcacaattaaaatcaaaagaaacagactccatgaaaccagatggtaacaatacaataaattctcctggattcctgcactgcactctaacagccctgaaataaacagtttcctcctcggagctcaagacgcaaccctgcagcaggtaatcaagtgttcaagtagggagggaggggcttggccttggaccaaacacagtttggtggtctgtttataatattttagctgaaacactgcaaacaacagatcgagaggcttactgctgtcacgggttactttcagacccaagtcaaagctgatttaaatccccagaaaacagggagatgggagtgctggggaggggaactgcagtaaggagaagcatctagggctttcagtgaaatgtgagtctaccttccaaaatcccaggggacaacagctcagcctctaaacacttggaaaaccaggattcagcctata

SEQ ID NO: 105496 - DNA, 278 bp, Homo sapiens
acgttgtacgctgactttgttcttcaggcagcatatcatcataggataaatggcaaggtctgcctgctgtgcttttaatggcaacagaaaaactgaagcaagactgctgtcataaagcttaatgctaatttttgtatttttagtagagacagggttttgcctgtaatcccagccacttgggaggctgaggcaggagaatcgcttgaacccaggaggtagaggttgcagtgagccatgatcgtgctgctgcactccagcctaggcaacagagcaagact

SEQ ID NO: 105497 - DNA, 510 bp, Homo sapiens
ttctggtgattatgtctttctgtattttccacctgacgtgggtttaccgccatttcctgcttatcagtgttggaccttatccgctagacttcctgctctcattataggctcctctccccgcctcgcaaatggttataattcctttactggttactttttgctgcaagcaacaagcgtttatctttttaatcttgttccatcaactctacagttattttggcccctgcaaccccttcttcacctagccccaggtgactactatttttgtctgttccagaatttcctataaagggaacttacgggtacgtctttatgtctggctttttttccctcagtgtaatgtttttgagattcttctaggttgttgtattgctctgttattgccgagtaacatcccactatatgaacgagccacaatttgtttattcattcacctgtcggtgaacatttgggttgttgcaaatttgaggctattatgaataaagctgtgatgcctattcatattcaagc

SEQ ID NO: 105498 - DNA, 824 bp, Homo sapiens
ttctttttacttcttcctttcctccattccttctttctttccttttcctttctacctttcttttctttttgcctttcaccttttttctcatttaccttctctcttgagcaacgtcagtaattgatcttgcatctcagagagagagaaagagcatgtgtgagagagaaactggtttctatgccagcactcctgaaaccccttactgtaaggatattttctcttaccccttgggatccaggctctgagtctcttctctttgggagtatccatcaaaatgactttttttaaaaacagattttcccccaaccagaagaatctgcacaaacttggcagcgtttttacttgtttaatgagtttaagacattacatggtgaaagagaagcattttggactcctgcatttttatttaccattcccagactgacgagaaaaagaaaattcctcacataacagcccttctctaaagaaaaaggaaaaagtggctgtaagattagaacattgctacaaagggaatgctgcatgttttatcaaaatgcaatgaccaggaatgatggttgattaaaaaaaaacaaaacaaaaaccactctttccccaccccacccccccaaaccctgaactggaatcaggaaagacggaggaaacaatcaaaatcaccattctattgctttgacacctttactaggtgaattggtggcattcacaaagctaatagggacgtttatatcaagaaacatttctgtatatattgttgaattttagttgtacatatactttgtatgtttttgtcttctttcatatatggagtaaaagccacaaaacgctga

SEQ ID NO: 105499 - DNA, 241 bp, Homo sapiens
tttcgtagtcaacatagtttattatgtatttctctataagccaggactgtggtcattacgataatcaatttagtctgcaaacagataatcttacctaagcgacactgagttcaccaaagtgaaaaacaactggaggtgttgtatgattttaaaaaataatgcaactttttagactggcgttaattttgaaatataaaaatttctttagaaaaaataagatattcattgcgctattaacttc

SEQ ID NO: 105500 - DNA, 207 bp, Homo sapiens
aacaaatgcagaaagtgccactgaggcaggaggcaggattttgcccactaaaagtcaaggctgagtcaggggttgaaggagagcatggtactgtgagttctgagacaggcagggagaggaacctgtgagatgggagtgagagagaggagccctctgctctcactggcacccgtgctgctgggcagggtcagccacaggtggaaattc

SEQ ID NO: 105501 - DNA, 4204 bp, Homo sapiens
tgtgaggcggtgcgcaggggcgggcggaggcgctgtccggccccggccaggcgccgggcggggagcatgggaaggggctagaactgctcgagccccccagccccctccccgggatccgcgccccccttcccgggagaggggccgccccccccggacggacatgggctcctgaagttgcgccgctgccggtcgggggaagagacctgacaggtaattaaatgtgtattttgtggacctgggcttggctggaatgctcaggggtcctgaagatcctattatagcttccttctgttgaaccattaagaaaagatggcgaaagtcaacataactagagacctcatccgtaggcagatcaaggagcggggtgccctgagctttgagcggcgctaccatgtcactgacccctttatccggcggctgggcctggaagcagagctgcagggtcactcaggatgtgtcaactgtctggagtggaatgagaaaggagacttgctggcctctggttccgatgaccagcacacgattgtgtgggacccgctgcaccacaagaagctgctctccatgcacacgggacacaccgcaaatatcttctctgtcaagttcctgcctcacgctggggaccgcatcttgatcacgggggcagccgactctaaggtgcatgtgcacgacctgacagtaaaggagaccatccacatgtttggagaccacacaaaccgggtgaagcgcatcgccacagcgcccatgtggcccaacacattctggagtgctgctgaggatgggcttatccgccagtatgaccttcgagagaacagcaaacactcggaggtgctgattgacctgacagagtactgtggccagctggtggaggccaagtgcctcactgtcaacccccaggacaacaactgcctggcagttggggccagcgggcccttcgtgaggctctatgacatccgcatgatccataaccacagaaagagcatgaagcagagcccttcagcgggtgtgcacaccttctgtgaccggcagaaaccccttccggacggtgcagcccagtattacgtagcaggtcacctgccagtgaagcttcctgactacaacaaccgtttgagagtgctggttgccacctatgtgaccttcagccccaatggcacagagctactagtcaacatggggggggaacaggtctatttgtttgacttgacttacaagcagcggccgtacaccttcctcttgcctagaaaatgccactcctcgggggaagtccagaatggcaagatgtccaccaacggtgtgtccaacggtgtgtccaatggcctgcaccttcatagcaatggcttccggctgccggagagtaggggacatgtcagcccccaagtagagctaccaccatacctggagcgtgtgaaacagcaagccaatgaggcttttgcctgccagcagtggacccaagccattcagctttacagcaaggctgtgcagagggcccctcacaatgccatgctttatggaaaccgagcagcagcctacatgaagcgcaagtgggatggtgaccactatgatgccctgagggactgcctcaaggccatctccctaaacccatgccacctgaaggcacactttcgcctggcccgctgcctctttgagctcaagtatgtggctgaagccctggagtgcctggacgacttcaaagggaaatttccggagcaggcccacagcagcgcttgtgatgcattgggccgcgacatcacagctgccctcttctctaaaaatgatggtgaggagaagaagggacctggtggcggcgccccagtccgcctccgcagcacgagccgcaaggactccatctcagaggatgaaatggtgctgcgggagcgaagctacgactatcagttccgctactgcggccactgcaacaccaccacggatatcaaagaggccaatttctttggcagcaacgctcagtatatcgtcagtggctctgacgatggctccttcttcatctgggaaaaggagaccaccaacctggtccgtgtgctccaaggggatgagtccattgtcaactgcctgcagccacaccccagctactgcttcctggccaccagtggcatcgatcctgttgtgcggctctggaacccccgaccagagagtgaagacctcacaggccgagtcgtggaagatatggagggtgcttcacaggccaaccagcggcgcatgaatgcagacccgttggaggtgatgctgctcaacatgggctaccggatcacgggcctgagcagtgggggtgccggggcctctgatgatgaggacagctctgagggccaggtgcagtgccggcccagctagaccctccagccctggtccccagcccctgctactggctggaccctctgccctgggcaggaggtcaggggattctgttttggtttgtcttccccaccacccttttttttcatttcccctgttttgtttgttagtttggcgttaggggtggaggttgctacaacttgctggctttcggactctgggctgattgtcccctgactatccccagccctgaaaaaaagagcaggaggggacacccctccatatgcccccccccatctcctgctttcatgtccctggagggctctggcctgcctcaaaaccccttctgcctcaggtggggaggaacaagctgaactgtcttcagggactgtcctgccctttagctggcagcagcaggaggagtgggattcccaattggtaagggctcgccttggcctgttgccactcttgctccctagcctgcaaggctagctcccctgtggtcttcaggaaaggttttgaaaaaggatgggtcccaccctccctccagagccaccagtgttagagcggagcccaaaggaaggatgggagccctggagtgggcaagaccaggccacctgctgaggtcgctgtggagcaccctcgctcctctcctggctactagctctggccctgcacctactctcactggccacctctggaggctctgcctttcccaagggccctggcagagggtggggcactgcaccttaccccacccatccatgccagcacttctgcactacggccattctcctcttgggcgctcctcagcctcactgtgacctttctgccagagctcccagccaggcctactctgctgaggtggcgcttcctgctaagggcccttctctgccctttctgccctccttcccatcccacatgctgagccgccacaaagaccaaagaagtgatggcttttctctgtcccctgctgctctgaggggagaggggtgggtctcctgagccactcagatgggaaagtcccttactcggcccctccctccccagcagccccaagctttacactggatgcagcgatcaacccaccactcaccaggcctctcctcccctctgcccccggctcttagctccagctgctccaggtagttggttcatccttccccctctctccctccctgcttccccttcagtgcttacttggctccagccctccagctgcagcccctggggaaaagcagcctcccttctcctctccctccactccctcgctccctccctcagcccctgtctctgccaggtgcctcctctcagtcaggcttcagagcagccctggagacaggagggccatgttaaaagctttttcacagttttaagaagacaagtggagggtgaggatagtggtggggggtctggcaccatctcattgctttaatcccagcaacacaggtggcagcttctcccccttccttcccaccccagtccctcttcccacccctctcttctagcttggtaatgaagtatatttattggtgaaggaaacagctgctgctgcttctcctgctgctgggacctgctcccctgtctcttctccgtgacctttctctagccagggagaagggagagcaggagtattggggctgggccctggggcccaaggaccagctgggtcccctttgctttcttgtgttccagccacctgccatttcctccctgcctcccaccctccctccctgccccctgtcctgcttcccaccccctgcctgcccagcctgggccctgcagtgtggagagacacataagccttactgtcctctgggggcaggagccgagcctttttgttgctccgctcccaggagagtgagggtgacgcaattgattaaaaccattttgttctagg

SEQ ID NO: 105502 - DNA, 5776 bp, Homo sapiens
tgtgaggcggtgcgcaggggcgggcggaggcgctgtccggccccggccaggcgccgggcggggagcatgggaaggggctagaactgctcgagccccccagccccctccccgggatccgcgccccccttcccgggagaggggccgccccccccggacggacatgggctcctgaagttgcgccgctgccggtcgggggaagagacctgacaggtaattaaatgtgtattttgtggacctgggcttggctggaatgctcaggggtcctgaagatcctattatagcttccttctgttgaaccattaagaaaagatggcgaaagtcaacataactagagacctcatccgtaggcagatcaaggagcggggtgccctgagctttgagcggcgctaccatgtcactgacccctttatccggcggctgggcctggaagcagagctgcagggtcactcaggatgtgtcaactgtctggagtggaatgagaaaggagacttgctggcctctggttccgatgaccagcacacgattgtgtgggacccgctgcaccacaagaagctgctctccatgcacacgggacacaccgcaaatatcttctctgtcaagttcctgcctcacgctggggaccgcatcttgatcacgggggcagccgactctaaggtgcatgtgcacgacctgacagtaaaggagaccatccacatgtttggagaccacacaaaccgggtgaagcgcatcgccacagcgcccatgtggcccaacacattctggagtgctgctgaggatgggcttatccgccagtatgaccttcgagagaacagcaaacactcggaggtgctgattgacctgacagagtactgtggccagctggtggaggccaagtgcctcactgtcaacccccaggacaacaactgcctggcagttggggccagcgggcccttcgtgaggctctatgacatccgcatgatccataaccacagaaagagcatgaagcagagcccttcagcgggtgtgcacaccttctgtgaccggcagaaaccccttccggacggtgcagcccagtattacgtagcaggtcacctgccagtgaagcttcctgactacaacaaccgtttgagagtgctggttgccacctatgtgaccttcagccccaatggcacagagctactagtcaacatggggggggaacaggtctatttgtttgacttgacttacaagcagcggccgtacaccttcctcttgcctagaaaatgccactcctcgggggaagtccagaatggcaagatgtccaccaacggtgtgtccaacggtgtgtccaatggcctgcaccttcatagcaatggcttccggctgccggagagtaggggacatgtcagcccccaagtagagctaccaccatacctggagcgtgtgaaacagcaagccaatgaggcttttgcctgccagcagtggacccaagccattcagctttacagcaaggctgtgcagagggcccctcacaatgccatgctttatggaaaccgagcagcagcctacatgaagcgcaagtgggatggtgaccactatgatgccctgagggactgcctcaaggccatctccctaaacccatgccacctgaaggcacactttcgcctggcccgctgcctctttgagctcaagtatgtggctgaagccctggagtgcctggacgacttcaaagggaaatttccggagcaggcccacagcagcgcttgtgatgcattgggccgcgacatcacagctgccctcttctctaaaaatgatggtgaggagaagaagggacctggtggcggcgccccagtccgcctccgcagcacgagccgcaaggactccatctcagaggatgaaatggtgctgcgggagcgaagctacgactatcagttccgctactgcggccactgcaacaccaccacggatatcaaagaggccaatttctttggcaggtccgaggccctgaagaggagggtgcagcccagttggcagcgggaggttgagtggggagtgttggggcataatggtttcagagaagaatctcaaatccctgctctgcctctgtacccttgggcaaatggcttcacctttgtcagcctctaaagttttttaatctatgaaatgaccaacctgccatgcccatttatgaggccataacaaggactaataagataacccaagtagagcctccagcgcagtgcctgaactactccttcatcccccacctccttctccctctgtctgcatgtgccagagcttggtttctttatctgcattcaaggaacctccctctgcttgagagtatgaggcagcagccctccaaggctgggaatcttggcacatctgttttgtgctcaaaactgtgccctgtgtactaagggacaaactctgtgtttcagacaccatcatccccacccctcatttgtagatgtactttctttgggtaggtgagacacatgaacatgaatcaagaatctctccataggccaggcacagtggctcatgcccgtaatcccagcacttggggaggctgaagcaggaggatcgcttgagcccaggagtttgagaccagcctggacagcatagacccccatctctacaaaaaatgttttaaattatctgggtgtggtgacgtgcacctgtagtcccagctattcaggaggttgacattggaggaccagttaaggccacagtgagccatgatcatgccactgtactccagcttgggtgacagaatgagaccctgtctctaagaaaaaaaaagaatccatcaagatgccctctaaatgtcagtggtgtgtgaggggcagggggagtctggatgccagaagcctggaactgctcaggggaggcttaaaacagggtattttggagacccgagagatgatgtaagatgatcctggcccaaggaggtaataatgaactataggggagactgtcttggagaaatccaggtagtcgctggccctaggtttaagagaacagtgaccagggctatatacctggaggaattctgggtcaagtgcacaccccagcgtgtgggggactgagtggctgcagacttccttgctccccctttacctaggccatgcagcctctacttgaggctgtagggcagtaccccacctgacctccctgccctttgcccccccgccacaacgctcagtatatcgtcagtggctctgacgatggctccttcttcatctgggaaaaggagaccaccaacctggtccgtgtgctccaaggggatgagtccattgtcaactgcctgcagccacaccccagctactgcttcctggccaccagtggcatcgatcctgttgtgcggctctggaacccccgaccagagagtgaagacctcacaggccgagtcgtggaagatatggagggtgcttcacaggccaaccagcggcgcatgaatgcagacccgttggaggtgatgctgctcaacatgggctaccggatcacgggcctgagcagtgggggtgccggggcctctgatgatgaggacagctctgagggccaggtgcagtgccggcccagctagaccctccagccctggtccccagcccctgctactggctggaccctctgccctgggcaggaggtcaggggattctgttttggtttgtcttccccaccacccttttttttcatttcccctgttttgtttgttagtttggcgttaggggtggaggttgctacaacttgctggctttcggactctgggctgattgtcccctgactatccccagccctgaaaaaaagagcaggaggggacacccctccatatgcccccccccatctcctgctttcatgtccctggagggctctggcctgcctcaaaaccccttctgcctcaggtggggaggaacaagctgaactgtcttcagggactgtcctgccctttagctggcagcagcaggaggagtgggattcccaattggtaagggctcgccttggcctgttgccactcttgctccctagcctgcaaggctagctcccctgtggtcttcaggaaaggttttgaaaaaggatgggtcccaccctccctccagagccaccagtgttagagcggagcccaaaggaaggatgggagccctggagtgggcaagaccaggccacctgctgaggtcgctgtggagcaccctcgctcctctcctggctactagctctggccctgcacctactctcactggccacctctggaggctctgcctttcccaagggccctggcagagggtggggcactgcaccttaccccacccatccatgccagcacttctgcactacggccattctcctcttgggcgctcctcagcctcactgtgacctttctgccagagctcccagccaggcctactctgctgaggtggcgcttcctgctaagggcccttctctgccctttctgccctccttcccatcccacatgctgagccgccacaaagaccaaagaagtgatggcttttctctgtcccctgctgctctgaggggagaggggtgggtctcctgagccactcagatgggaaagtcccttactcggcccctccctccccagcagccccaagctttacactggatgcagcgatcaacccaccactcaccaggcctctcctcccctctgcccccggctcttagctccagctgctccaggtagttggttcatccttccccctctctccctccctgcttccccttcagtgcttacttggctccagccctccagctgcagcccctggggaaaagcagcctcccttctcctctccctccactccctcgctccctccctcagcccctgtctctgccaggtgcctcctctcagtcaggcttcagagcagccctggagacaggagggccatgttaaaagctttttcacagttttaagaagacaagtggagggtgaggatagtggtggggggtctggcaccatctcattgctttaatcccagcaacacaggtggcagcttctcccccttccttcccaccccagtccctcttcccacccctctcttctagcttggtaatgaagtatatttattggtgaaggaaacagctgctgctgcttctcctgctgctgggacctgctcccctgtctcttctccgtgacctttctctagccagggagaagggagagcaggagtattggggctgggccctggggcccaaggaccagctgggtcccctttgctttcttgtgttccagccacctgccatttcctccctgcctcccaccctccctccctgccccctgtcctgcttcccaccccctgcctgcccagcctgggccctgcagtgtggagagacacataagccttactgtcctctgggggcaggagccgagcctttttgttgctccgctcccaggagagtgagggtgacgcaattgattaaaaccattttgttctaggtgtggctggtggcatttgtggggtgcagatgggtcttggaaccaaagtgagggcacctggtccctcacctctgtagctctatgacttagtaaccacacctctactggacagaatgaggcctgccttgaagggtcaccgtgagcagcggccacccagcccagcagggctgagtgcagagcccagctctcatggctgtgatttgtaatcatcagctttcactctctggctgttttctcatcagtaaaataagggacttggaatcttagtggtttttcaaaccattttacattgtgacccaatatacacatgattacttgtagatatgtgtgtgtgtatatatatataaaaaaaatgaacaaaagttttac

SEQ ID NO: 105503 - DNA, 4572 bp, Homo sapiens
tgtgaggcggtgcgcaggggcgggcggaggcgctgtccggccccggccaggcgccgggcggggagcatgggaaggggctagaactgctcgagccccccagccccctccccgggatccgcgccccccttcccgggagaggggccgccccccccggacggacatgggctcctgaagttgcgccgctgccggtcgggggaagagacctgacaggtaattaaatgtgtattttgtggacctgggcttggctggaatgctcaggggtcctgaagatcctattatagcttccttctgttgaaccattaagaaaagatggcgaaagtcaacataactagagacctcatccgtaggcagatcaaggagcggggtgccctgagctttgagcggcgctaccatgtcactgacccctttatccggcggctgggcctggaagcagagctgcagggtcactcaggatgtgtcaactgtctggagtggaatgagaaaggagacttgctggcctctggttccgatgaccagcacacgattgtgtgggacccgctgcaccacaagaagctgctctccatgcacacgggacacaccgcaaatatcttctctgtcaagttcctgcctcacgctggggaccgcatcttgatcacgggggcagccgactctaaggtgcatgtgcacgacctgacagtaaaggagaccatccacatgtttggagaccacacaaaccgggtgaagcgcatcgccacagcgcccatgtggcccaacacattctggagtgctgctgaggatgggcttatccgccagtatgaccttcgagagaacagcaaacactcggaggtgctgattgacctgacagagtactgtggccagctggtggaggccaagtgcctcactgtcaacccccaggacaacaactgcctggcagttggggccagcgggcccttcgtgaggctctatgacatccgcatgatccataaccacagaaagagcatgaagcagagcccttcagcgggtgtgcacaccttctgtgaccggcagaaaccccttccggacggtgcagcccagtattacgtagcaggtcacctgccagtgaagcttcctgactacaacaaccgtttgagagtgctggttgccacctatgtgaccttcagccccaatggcacagagctactagtcaacatggggggggaacaggtctatttgtttgacttgacttacaagcagcggccgtacaccttcctcttgcctagaaaatgccactcctcgggggaagtccagaatggcaagatgtccaccaacggtgtgtccaacggtgtgtccaatggcctgcaccttcatagcaatggcttccggctgccggagagtaggggacatgtcagcccccaagtagagctaccaccatacctggagcgtgtgaaacagcaagccaatgaggcttttgcctgccagcagtggacccaagccattcagctttacagcaaggctgtgcagagggcccctcacaatgccatgctttatggaaaccgagcagcagcctacatgaagcgcaagtgggatggtgaccactatgatgccctgagggactgcctcaaggccatctccctaaacccatgccacctgaaggcacactttcgcctggcccgctgcctctttgagctcaagtatgtggctgaagccctggagtgcctggacgacttcaaagggaaatttccggagcaggcccacagcagcgcttgtgatgcattgggccgcgacatcacagctgccctcttctctaaaaatgatggtgaggagaagaagggacctggtggcggcgccccagtccgcctccgcagcacgagccgcaaggactccatctcagaggatgaaatggtgctgcgggagcgaagctacgactatcagttccgctactgcggccactgcaacaccaccacggatatcaaagaggccaatttctttggcagcaacgctcagtatatcgtcagtggctctgacgatggctccttcttcatctgggaaaaggagaccaccaacctggtccgtgtgctccaaggggatgagtccattgtcaactgcctgcagccacaccccagctactgcttcctggccaccagtggcatcgatcctgttgtgcggctctggaacccccgaccagagagtgaagacctcacaggccgagtcgtggaagatatggagggtgcttcacaggccaaccagcggcgcatgaatgcagacccgttggaggtgatgctgctcaacatgggctaccggatcacgggcctgagcagtgggggtgccggggcctctgatgatgaggacagctctgagggccaggtgcagtgccggcccagctagaccctccagccctggtccccagcccctgctactggctggaccctctgccctgggcaggaggtcaggggattctgttttggtttgtcttccccaccacccttttttttcatttcccctgttttgtttgttagtttggcgttaggggtggaggttgctacaacttgctggctttcggactctgggctgattgtcccctgactatccccagccctgaaaaaaagagcaggaggggacacccctccatatgcccccccccatctcctgctttcatgtccctggagggctctggcctgcctcaaaaccccttctgcctcaggtggggaggaacaagctgaactgtcttcagggactgtcctgccctttagctggcagcagcaggaggagtgggattcccaattggtaagggctcgccttggcctgttgccactcttgctccctagcctgcaaggctagctcccctgtggtcttcaggaaaggttttgaaaaaggatgggtcccaccctccctccagagccaccagtgttagagcggagcccaaaggaaggatgggagccctggagtgggcaagaccaggccacctgctgaggtcgctgtggagcaccctcgctcctctcctggctactagctctggccctgcacctactctcactggccacctctggaggctctgcctttcccaagggccctggcagagggtggggcactgcaccttaccccacccatccatgccagcacttctgcactacggccattctcctcttgggcgctcctcagcctcactgtgacctttctgccagagctcccagccaggcctactctgctgaggtggcgcttcctgctaagggcccttctctgccctttctgccctccttcccatcccacatgctgagccgccacaaagaccaaagaagtgatggcttttctctgtcccctgctgctctgaggggagaggggtgggtctcctgagccactcagatgggaaagtcccttactcggcccctccctccccagcagccccaagctttacactggatgcagcgatcaacccaccactcaccaggcctctcctcccctctgcccccggctcttagctccagctgctccaggtagttggttcatccttccccctctctccctccctgcttccccttcagtgcttacttggctccagccctccagctgcagcccctggggaaaagcagcctcccttctcctctccctccactccctcgctccctccctcagcccctgtctctgccaggtgcctcctctcagtcaggcttcagagcagccctggagacaggagggccatgttaaaagctttttcacagttttaagaagacaagtggagggtgaggatagtggtggggggtctggcaccatctcattgctttaatcccagcaacacaggtggcagcttctcccccttccttcccaccccagtccctcttcccacccctctcttctagcttggtaatgaagtatatttattggtgaaggaaacagctgctgctgcttctcctgctgctgggacctgctcccctgtctcttctccgtgacctttctctagccagggagaagggagagcaggagtattggggctgggccctggggcccaaggaccagctgggtcccctttgctttcttgtgttccagccacctgccatttcctccctgcctcccaccctccctccctgccccctgtcctgcttcccaccccctgcctgcccagcctgggccctgcagtgtggagagacacataagccttactgtcctctgggggcaggagccgagcctttttgttgctccgctcccaggagagtgagggtgacgcaattgattaaaaccattttgttctaggtgtggctggtggcatttgtggggtgcagatgggtcttggaaccaaagtgagggcacctggtccctcacctctgtagctctatgacttagtaaccacacctctactggacagaatgaggcctgccttgaagggtcaccgtgagcagcggccacccagcccagcagggctgagtgcagagcccagctctcatggctgtgatttgtaatcatcagctttcactctctggctgttttctcatcagtaaaataagggacttggaatcttagtggtttttcaaaccattttacattgtgacccaatatacacatgattacttgtagatatgtgtgtgtgtatatatatataaaaaaaatgaacaaaagttttac

SEQ ID NO: 105504 - DNA, 3894 bp, Homo sapiens
tgtgaggcggtgcgcaggggcgggcggaggcgctgtccggccccggccaggcgccgggcggggagcatgggaaggggctagaactgctcgagccccccagccccctccccgggatccgcgccccccttcccgggagaggggccgccccccccggacggacatgggctcctgaagttgcgccgctgccggtcgggggaagagacctgacaggtaattaaatgtgtattttgtggacctgggcttggctggaatgctcaggggtcctgaagatcctattatagcttccttctgttgaaccattaagaaaagatggcgaaagtcaacataactagagacctcatccgtaggcagatcaaggagcggggtgccctgagctttgagcggcgctaccatgtcactgacccctttatccggcggctgggcctggaagcagagctgcagggtcactcaggatgtgtcaactgtctggagtggaatgagaaaggagacttgctggcctctggttccgatgaccagcacacgattgtgtgggacccgctgcaccacaagaagctgctctccatgcacacgggacacaccgcaaatatcttctctgtcaagttcctgcctcacgctggggaccgcatcttgatcacgggggcagccgactctaaggtgcatgtgcacgacctgacagtaaaggagaccatccacatgtttggagaccacacaaaccgggtgaagcgcatcgccacagcgcccatgtggcccaacacattctggagtgctgctgaggatgggcttatccgccagtatgaccttcgagagaacagcaaacactcggaggtgctgattgacctgacagagtactgtggccagctggtggaggccaagtgcctcactgtcaacccccaggacaacaactgcctggcagttggggccagcgggcccttcgtgaggctctatgacatccgcatgatccataaccacagaaagagcatgaagcagagcccttcagcgggtgtgcacaccttcatagcaatggcttccggctgccggagagtaggggacatgtcagcccccaagtagagctaccaccatacctggagcgtgtgaaacagcaagccaatgaggcttttgcctgccagcagtggacccaagccattcagctttacagcaaggctgtgcagagggcccctcacaatgccatgctttatggaaaccgagcagcagcctacatgaagcgcaagtgggatggtgaccactatgatgccctgagggactgcctcaaggccatctccctaaacccatgccacctgaaggcacactttcgcctggcccgctgcctctttgagctcaagtatgtggctgaagccctggagtgcctggacgacttcaaagggaaatttccggagcaggcccacagcagcgcttgtgatgcattgggccgcgacatcacagctgccctcttctctaaaaatgatggtgaggagaagaagggacctggtggcggcgccccagtccgcctccgcagcacgagccgcaaggactccatctcagaggatgaaatggtgctgcgggagcgaagctacgactatcagttccgctactgcggccactgcaacaccaccacggatatcaaagaggccaatttctttggcagcaacgctcagtatatcgtcagtggctctgacgatggctccttcttcatctgggaaaaggagaccaccaacctggtccgtgtgctccaaggggatgagtccattgtcaactgcctgcagccacaccccagctactgcttcctggccaccagtggcatcgatcctgttgtgcggctctggaacccccgaccagagagtgaagacctcacaggccgagtcgtggaagatatggagggtgcttcacaggccaaccagcggcgcatgaatgcagacccgttggaggtgatgctgctcaacatgggctaccggatcacgggcctgagcagtgggggtgccggggcctctgatgatgaggacagctctgagggccaggtgcagtgccggcccagctagaccctccagccctggtccccagcccctgctactggctggaccctctgccctgggcaggaggtcaggggattctgttttggtttgtcttccccaccacccttttttttcatttcccctgttttgtttgttagtttggcgttaggggtggaggttgctacaacttgctggctttcggactctgggctgattgtcccctgactatccccagccctgaaaaaaagagcaggaggggacacccctccatatgcccccccccatctcctgctttcatgtccctggagggctctggcctgcctcaaaaccccttctgcctcaggtggggaggaacaagctgaactgtcttcagggactgtcctgccctttagctggcagcagcaggaggagtgggattcccaattggtaagggctcgccttggcctgttgccactcttgctccctagcctgcaaggctagctcccctgtggtcttcaggaaaggttttgaaaaaggatgggtcccaccctccctccagagccaccagtgttagagcggagcccaaaggaaggatgggagccctggagtgggcaagaccaggccacctgctgaggtcgctgtggagcaccctcgctcctctcctggctactagctctggccctgcacctactctcactggccacctctggaggctctgcctttcccaagggccctggcagagggtggggcactgcaccttaccccacccatccatgccagcacttctgcactacggccattctcctcttgggcgctcctcagcctcactgtgacctttctgccagagctcccagccaggcctactctgctgaggtggcgcttcctgctaagggcccttctctgccctttctgccctccttcccatcccacatgctgagccgccacaaagaccaaagaagtgatggcttttctctgtcccctgctgctctgaggggagaggggtgggtctcctgagccactcagatgggaaagtcccttactcggcccctccctccccagcagccccaagctttacactggatgcagcgatcaacccaccactcaccaggcctctcctcccctctgcccccggctcttagctccagctgctccaggtagttggttcatccttccccctctctccctccctgcttccccttcagtgcttacttggctccagccctccagctgcagcccctggggaaaagcagcctcccttctcctctccctccactccctcgctccctccctcagcccctgtctctgccaggtgcctcctctcagtcaggcttcagagcagccctggagacaggagggccatgttaaaagctttttcacagttttaagaagacaagtggagggtgaggatagtggtggggggtctggcaccatctcattgctttaatcccagcaacacaggtggcagcttctcccccttccttcccaccccagtccctcttcccacccctctcttctagcttggtaatgaagtatatttattggtgaaggaaacagctgctgctgcttctcctgctgctgggacctgctcccctgtctcttctccgtgacctttctctagccagggagaagggagagcaggagtattggggctgggccctggggcccaaggaccagctgggtcccctttgctttcttgtgttccagccacctgccatttcctccctgcctcccaccctccctccctgccccctgtcctgcttcccaccccctgcctgcccagcctgggccctgcagtgtggagagacacataagccttactgtcctctgggggcaggagccgagcctttttgttgctccgctcccaggagagtgagggtgacgcaattgattaaaaccattttgttctagg

SEQ ID NO: 105505 - DNA, 4236 bp, Homo sapiens
tgtgaggcggtgcgcaggggcgggcggaggcgctgtccggccccggccaggcgccgggcggggagcatgggaaggggctagaactgctcgagccccccagccccctccccgggatccgcgccccccttcccgggagaggggccgccccccccggacggacatgggctcctgaagttgcgccgctgccggtcgggggaagagacctgacaggtaattaaatgtgtattttgtggacctgggcttggctggaatgctcaggggtcctgaagatcctattatagcttccttctgttgaaccattaagaaaagatggcgaaagtcaacataactagagacctcatccgtaggcagatcaaggagcggggtgccctgagctttgagcggcgctaccatgtcactgacccctttatccggcggctgggcctggaagcagagctgcagggtcactcaggatgtgtcaactgtctggagtggaatgagaaaggagacttgctggcctctggttccgatgaccagcacacgattgtgtgggacccgctgcaccacaagaagctgctctccatgcacacgggacacaccgcaaatatcttctctgtcaagttcctgcctcacgctggggaccgcatcttgatcacgggggcagccgactctaaggtgcatgtgcacgacctgacagtaaaggagaccatccacatgtttggagaccacacaaaccgggtgaagcgcatcgccacagcgcccatgtggcccaacacattctggagtgctgctgaggatgggcttatccgccagtatgaccttcgagagaacagcaaacactcggaggtgctgattgacctgacagagtactgtggccagctggtggaggccaagtgcctcactgtcaacccccaggacaacaactgcctggcagttggggccagcgggcccttcgtgaggctctatgacatccgcatgatccataaccacagaaagagcatgaagcagagcccttcagcgggtgtgcacaccttcatagcaatggcttccggctgccggagagtaggggacatgtcagcccccaagtagagctaccaccatacctggagcgtgtgaaacagcaagccaatgaggcttttgcctgccagcagtggacccaagccattcagctttacagcaaggctgtgcagagggcccctcacaatgccatgctttatggaaaccgagcagcagcctacatgaagcgcaagtgggatggtgaccactatgatgccctgagggactgcctcaaggccatctccctaaacccatgccacctgaaggcacactttcgcctggcccgctgcctctttgagctcaagtatgtggctgaagccctggagtgcctggacgacttcaaagggaaatttccggagcaggcccacagcagcgcttgtgatgcattgggccgcgacatcacagctgccctcttctctaaaaatgatggtgaggagaagaagggacctggtggcggcgccccagtccgcctccgcagcacgagccgcaaggactccatctcagaggatgaaatggtgctgcgggagcgaagctacgactatcagttccgctactgcggccactgcaacaccaccacggatatcaaagaggccaatttctttggcagcaacgctcagtatatcgtcagtggctctgacgatggctccttcttcatctgggaaaaggagaccaccaacctggtccgtgtgctccaaggggatgagtccattgtcaactgcctgcagccacaccccagctactgcttcctggccaccagtggcatcgatcctgttgtgcggctctggaacccccgaccagagagtgaagacctcacaggccgagtcgtggaagatatggagggtgcttcacaggccaaccagcggcgcatgaatgcagacccgttggaggtgatgctgctcaacatgggctaccggatcacgggcctgagcagtgggggtgccggggcctctgatgatgaggacagctctgagggccaggtgcagtgccggcccagctagaccctccagccctggtccccagcccctgctactggctggaccctctgccctgggcaggaggtcaggggattctgttttggtttgtcttccccaccacccttttttttcatttcccctgttttgtttgttagtttggcgttaggggtggaggttgctacaacttgctggctttcggactctgggctgattgtcccctgactatccccagccctgaaaaaaagagcaggaggggacacccctccatatgcccccccccatctcctgctttcatgtccctggagggctctggcctgcctcaaaaccccttctgcctcaggtggggaggaacaagctgaactgtcttcagggactgtcctgccctttagctggcagcagcaggaggagtgggattcccaattggtaagggctcgccttggcctgttgccactcttgctccctagcctgcaaggctagctcccctgtggtcttcaggaaaggttttgaaaaaggatgggtcccaccctccctccagagccaccagtgttagagcggagcccaaaggaaggatgggagccctggagtgggcaagaccaggccacctgctgaggtcgctgtggagcaccctcgctcctctcctggctactagctctggccctgcacctactctcactggccacctctggaggctctgcctttcccaagggccctggcagagggtggggcactgcaccttaccccacccatccatgccagcacttctgcactacggccattctcctcttgggcgctcctcagcctcactgtgacctttctgccagagctcccagccaggcctactctgctgaggtggcgcttcctgctaagggcccttctctgccctttctgccctccttcccatcccacatgctgagccgccacaaagaccaaagaagtgatggcttttctctgtcccctgctgctctgaggggagaggggtgggtctcctgagccactcagatgggaaagtcccttactcggcccctccctccccagcagccccaagctttacactggatgcagcgatcaacccaccactcaccaggcctctcctcccctctgcccccggctcttagctccagctgctccaggtagttggttcatccttccccctctctccctccctgcttccccttcagtgcttacttggctccagccctccagctgcagcccctggggaaaagcagcctcccttctcctctccctccactccctcgctccctccctcagcccctgtctctgccaggtgcctcctctcagtcaggcttcagagcagccctggagacaggagggccatgttaaaagctttttcacagttttaagaagacaagtggagggtgaggatagtggtggggggtctggcaccatctcattgctttaatcccagcaacacaggtggcagcttctcccccttccttcccaccccagtccctcttcccacccctctcttctagcttggtaatgaagtatatttattggtgaaggaaacagctgctgctgcttctcctgctgctgggacctgctcccctgtctcttctccgtgacctttctctagccagggagaagggagagcaggagtattggggctgggccctggggcccaaggaccagctgggtcccctttgctttcttgtgttccagccacctgccatttcctccctgcctcccaccctccctccctgcctgcccagcctgggccctgcagtgtggagagacacataagccttactgtcctctgggggcaggagccgagcctttttgttgctccgctcccaggagagtgagggtgacgcaattgattaaaaccattttgttctaggtgtggctggtggcatttgtggggtgcagatgggtcttggaaccaaagtgagggcacctggtccctcacctctgtagctctatgacttagtaaccacacctctactggacagaatgaggcctgccttgaagggtcaccgtgagcagcggccacccagcccagcagggctgagtgcagagcccagctctcatggctgtgatttgtaatcatcagctttcactctctggctgttttctcatcagtaaaataagggacttggaatcttagtggtttttcaaaccattttacattgtgacccaatatacacatgattacttgtagatatgtgtgtgtgtatatatatataaaaaaaatgaacaaaagttttac

SEQ ID NO: 105506 - DNA, 3290 bp, Homo sapiens
tgtgaggcggtgcgcaggggcgggcggaggcgctgtccggccccggccaggcgccgggcggggagcatgggaaggggctagaactgctcgagccccccagccccctccccgggatccgcgccccccttcccgggagaggggccgccccccccggacggacatgggctcctgaagttgcgccgctgccggtcgggggaagagacctgacaggtaattaaatgtgtattttgtggacctgggcttggctggaatgctcaggggtcctgaagatcctattatagcttccttctgttgaaccattaagaaaagatggcgaaagtcaacataactagagacctcatccgtaggcagatcaaggagcggggtgccctgagctttgagcggcgctaccatgtcactgacccctttatccggcggctgggcctggaagcagagctgcagggtcactcaggatgtgtcaactgtctggagtggaatgagaaaggagacttgctggcctctggttccgatgaccagcacacgattgtgtgggacccgctgcaccacaagaagctgctctccatgcacacgggacacaccgcaaatatcttctctgtcaagttcctgcctcacgctggggaccgcatcttgatcacgggggcagccgactctaaggtgcatgtgcacgacctgacagtaaaggagaccatccacatgtttggagaccacacaaaccgggtgaagcgcatcgccacagcgcccatgtggcccaacacattctggagtgctgctgaggatgggcttatccgccagtatgaccttcgagagaacagcaaacactcggaggtgctgattgacctgacagagtactgtggccagctggtggaggccaagtgcctcactgtcaacccccaggacaacaactgcctggcagttggggccagcgggcccttcgtgaggctctatgacatccgcatgatccataaccacagaaagagcatgaagcagagcccttcagcgggtgtgcacaccttcatagcaatggcttccggctgccggagagtaggggacatgtcagcccccaagtagagctaccaccatacctggagcgtgtgaaacagcaagccaatgaggcttttgcctgccagcagtggacccaagccattcagctttacagcaaggctgtgcagagggcccctcacaatgccatgctttatggaaaccgagcagcagcctacatgaagcgcaagtgggatggtgaccactatgatgccctgagggactgcctcaaggccatctccctaaacccatgccacctgaaggcacactttcgcctggcccgctgcctctttgagctcaagtatgtggctgaagccctggagtgcctggacgacttcaaagggaaatttccggagcaggcccacagcagcgcttgtgatgcattgggccgcgacatcacagctgccctcttctctaaaaatgatggtgaggagaagaagggacctggtggcggcgccccagtccgcctccgcagcacgagccgcaaggactccatctcagaggatgaaatggtgctgcgggagcgaagctacgactatcagttccgctactgcggccactgcaacaccaccacggatatcaaagaggccaatttctttggcagcaacgctcagtatatcgtcagtggctctgacgatggctccttcttcatctgggaaaaggagaccaccaacctggtccgtgtgctccaaggggatgagtccattgtcaactgcctgcagccacaccccagctactgcttcctggccaccagtggcatcgatcctgttgtgcggctctggaacccccgaccagagagtgaagacctcacaggccgagtcgtggaagatatggagggtgcttcacaggccaaccagcggcgcatgaatgcagacccgttggaggtgatgctgctcaacatgggctaccggatcacgggcctgagcagtgggggtgccggggcctctgatgatgaggacagctctgagggccaggtgcagtgccggcccagctagaccctccagccctggtccccagcccctgctactggctggaccctctgccctgggcaggaggtcaggggattctgttttggtttgtcttccccaccacccttttttttcatttcccctgttttgtttgttagtttggcgttaggggtggaggttgctacaacttgctggctttcggactctgggctgattgtcccctgactatccccagccctgaaaaaaagagcaggaggggacacccctccatatgcccccccccatctcctgctttcatgtccctggagggctctggcctgcctcaaaaccccttctgcctcaggtggggaggaacaagctgaactgtcttcagggactgtcctgccctttagctggcagcagcaggaggagtgggattcccaattggtaagggctcgccttggcctgttgccactcttgctccctagcctgcaaggctagctcccctgtggtcttcaggaaaggttttgaaaaaggatgggtcccaccctccctccagagccaccagtgttagagcggagcccaaaggaaggatgggagccctggagtgggcaagaccaggccacctgctgaggtcgctgtggagcaccctcgctcctctccctccactccctcgctccctccctcagcccctgtctctgccaggtgcctcctctcagtcaggcttcagagcagccctggagacaggagggccatgttaaaagctttttcacagttttaagaagacaagtggagggtgaggatagtggtggggggtctggcaccatctcattgctttaatcccagcaacacaggtggcagcttctcccccttccttcccaccccagtccctcttcccacccctctcttctagcttggtaatgaagtatatttattggtgaaggaaacagctgctgctgcttctcctgctgctgggacctgctcccctgtctcttctccgtgacctttctctagccagggagaagggagagcaggagtattggggctgggccctggggcccaaggaccagctgggtcccctttgctttcttgtgttccagccacctgccatttcctccctgcctcccaccctccctccctgccccctgtcctgcttcccaccccctgcctgcccagcctgggccctgcagtgtggagagacacataagccttactgtcctctgggggcaggagccgagcctttttgttgctccgctcccaggagagtgagggtgacgcaattgattaaaaccattttgttctagg

SEQ ID NO: 105507 - DNA, 3227 bp, Homo sapiens
tgtgaggcggtgcgcaggggcgggcggaggcgctgtccggccccggccaggcgccgggcggggagcatgggaaggggctagaactgctcgagccccccagccccctccccgggatccgcgccccccttcccgggagaggggccgccccccccggacggacatgggctcctgaagttgcgccgctgccggtcgggggaagagacctgacaggtaattaaatgtgtattttgtggacctgggcttggctggaatgctcaggggtcctgaagatcctattatagcttccttctgttgaaccattaagaaaagatggcgaaagtcaacataactagagacctcatccgtaggcagatcaaggagcggggtgccctgagctttgagcggcgctaccatgtcactgacccctttatccggcggctgggcctggaagcagagctgcagggtcactcaggatgtgtcaactgtctggagtggaatgagaaaggagacttgctggcctctggttccgatgaccagcacacgattgtgtgggacccgctgcaccacaagaagctgctctccatgcacacgggacacaccgcaaatatcttctctgtcaagttcctgcctcacgctggggaccgcatcttgatcacgggggcagccgactctaaggtgcatgtgcacgacctgacagtaaaggagaccatccacatgtttggagaccacacaaaccgggtgaagcgcatcgccacagcgcccatgtggcccaacacattctggagtgctgctgaggatgggcttatccgccagtatgaccttcgagagaacagcaaacactcggaggtgctgattgacctgacagagtactgtggccagctggtggaggccaagtgcctcactgtcaacccccaggacaacaactgcctggcagttggggccagcgggcccttcgtgaggctctatgacatccgcatgatccataaccacagaaagagcatgaagcagagcccttcagcgggtgtgcacaccttcatagcaatggcttccggctgccggagagtaggggacatgtcagcccccaagtagagctaccaccatacctggagcgtgtgaaacagcaagccaatgaggcttttgcctgccagcagtggacccaagccattcagctttacagcaaggctgtgcagagggcccctcacaatgccatgctttatggaaaccgagcagcagcctacatgaagcgcaagtgggatggtgaccactatgatgccctgagggactgcctcaaggccatctccctaaacccatgccacctgaaggcacactttcgcctggcccgctgcctctttgagctcaagtatgtggctgaagccctggagtgcctggacgacttcaaagggaaatttccggagcaggcccacagcagcgcttgtgatgcattgggccgcgacatcacagctgccctcttctctaaaaatgatggtgaggagaagaagggacctggtggcggcgccccagtccgcctccgcagcacgagccgcaaggactccatctcagaggatgaaatggtgctgcgggagcgaagctacgactatcagttccgctactgcggccactgcaacaccaccacggatatcaaagaggccaatttctttggcagcaacgctcagtatatcgtcagtggctctgacgatggctccttcttcatctgggaaaaggagaccaccaacctggtccgtgtgctccaaggggatgagtccattgtcaactgcctgcagccacaccccagctactgcttcctggccaccagtggcatcgatcctgttgtgcggctctggaacccccgaccagagagtgaagacctcacaggccgagtcgtggaagatatggagggtgcttcacaggccaaccagcggcgcatgaatgcagacccgttggaggtgatgctgctcaacatgggctaccggatcacgggcctgagcagtgggggtgccggggcctctgatgatgaggacagctctgagggccaggtgcagtgccggcccagctagaccctccagccctggtccccagcccctgctactggctggaccctctgccctgggcaggaggtcaggggattctgttttggtttgtcttccccaccacccttttttttcatttcccctgttttgtttgttagtttggcgttaggggtggaggttgctacaacttgctggctttcggactctgggctgattgtcccctgactatccccagccctgaaaaaaagagcaggaggggacacccctccatatgcccccccccatctcctgctttcatgtccctggagggctctggcctgcctcaaaaccccttctgcctcaggtggggaggaacaagctgaactgtcttcagggactgtcctgccctttagctggcagcagcaggaggagtgggattcccaattggtaagggctcgccttggcctgttgccactcttgctccctagcctgcaaggctagctcccctgtggtcttcaggaaaggttttgaaaaaggatgggtcccaccctccctccagagccaccagtgttagagcggagcccaaaggaaggatgggagccctggagtgggcaagaccaggccacctgctgaggtcgctgtggagcaccctcgctcctctcctggctactagctctggccctgcacctactctcactggccacctctggaggctctgcctttcccaagggccctggcagagggtggggcactgcaccttaccccacccatccatgccagcacttctgcactacggccattctcctcttgggcgctcctcagcctcactgtgacctttctgccagagctcccagccaggcctactctgctgaggtggcgcttcctgctaagggcccttctctgccctttctgccctccttcccatcccacatgctgagccgccacaaagaccaaagaagtgatggcttttctctgtcccctgctgctctgaggggagaggggtgggtctcctgagccactcagatgggaaagtcccttactcggcccctccctccccagcagccccaagctttacactggatgcagcgatcaacccaccacctgcctgcccagcctgggccctgcagtgtggagagacacataagccttactgtcctctgggggcaggagccgagcctttttgttgctccgctcccaggagagtgagggtgacgcaattgattaaaaccattttgttctagg

SEQ ID NO: 105508 - DNA, 1635 bp, Homo sapiens
tgtgaggcggtgcgcaggggcgggcggaggcgctgtccggccccggccaggcgccgggcggggagcatgggaaggggctagaactgctcgagccccccagccccctccccgggatccgcgccccccttcccgggagaggggccgccccccccggacggacatgggctcctgaagttgcgccgctgccggtcgggggaagagacctgacaggtaattaaatgtgtattttgtggacctgggcttggctggaatgctcaggggtcctgaagatcctattatagcttccttctgttgaaccattaagaaaagatggcgaaagtcaacataactagagacctcatccgtaggcagatcaaggagcggggtgccctgagctttgagcggcgctaccatgtcactgacccctttatccggcggctgggcctggaagcagagctgcagggtcactcaggatgtgtcaactgtctggagtggaatgagaaaggagacttgctggcctctggttccgatgaccagcacacgattgtgtgggacccgctgcaccacaagaagctgctctccatgcacacgggacacaccgcaaatatcttctctgtcaagttcctgcctcacgctggggaccgcatcttgatcacgggggcagccgactctaaggtgcatgtgcacgacctgacagtaaaggagaccatccacatgtttggagaccacacaaaccgggtgaagcgcatcgccacagcgcccatgtggcccaacacattctggagtgctgctgaggatgggcttatccgccagtatgaccttcgagagaacagcaaacactcggaggtgctgattgacctgacagagtactgtggccagctggtggaggccaagtgcctcactgtcaacccccaggacaacaactgcctggcagttggggccagcgggcccttcgtgaggctctatgacatccgcatgatccataaccacagaaagagcatgaagcagagcccttcagcgggtgtgcacaccttctgtgaccggcagaaaccccttccggacggtgcagcccagtattacgtagcaggtcacctgccagtgaagcttcctgactacaacaaccgtttgagagtgctggttgccacctatgtgaccttcagccccaatggcacagagctactagtcaacatggggggggaacaggtctatttgtttgacttgacttacaagcagcggccgtacaccttcctcttgcctagaaaatgccactcctcgggggaagtccagaatggcaagatgtccaccaacggtgtgtccaacggtgtgtccaatggcctgcaccttcatagcaatggcttccggctgccggagagtaggggacatgtcagcccccaagtagagctaccaccatacctggagcgtgtgaaacagcaagccaatgaggcttttgcctgccagcagtggacccaagccattcagctttacagcaaggctgtgcagagggcccctcacaatgccatgctttatggaaaccgagcagcagcctacatgaagcgcaagtgggatggtgaccactatgatgccccgagggactgccatgaccatcactatcactatcaccaccactgccatcaccatcgctatcaccatcaccac

SEQ ID NO: 105509 - DNA, 3413 bp, Homo sapiens
tgtgaggcggtgcgcaggggcgggcggaggcgctgtccggccccggccaggcgccgggcggggagcatgggaaggggctagaactgctcgagccccccagccccctccccgggatccgcgccccccttcccgggagaggggccgccccccccggacggacatgggctcctgaagttgcgccgctgccggtcgggggaagagacctgacaggtaattaaatgtgtattttgtggacctgggcttggctggaatgctcaggggtcctgaagatcctattatagcttccttctgttgaaccattaagaaaagatggcgaaagtcaacataactagagacctcatccgtaggcagatcaaggagcggggtgccctgagctttgagcggcgctaccatgtcactgacccctttatccggcggctgggcctggaagcagagctgcagggtcactcaggatgtgtcaactgtctggagtggaatgagaaaggagacttgctggcctctggttccgatgaccagcacacgattgtgtgggacccgctgcaccacaagaagctgctctccatgcacacgggacacaccgcaaatatcttctctgtcaagttcctgcctcacgctggggaccgcatcttgatcacgggggcagccgactctaaggtgcatgtgcacgacctgacagtaaaggagaccatccacatgtttggagaccacacaaaccgggtgaagcgcatcgccacagcgcccatgtggcccaacacattctggagtgctgctgaggatgggcttatccgccagtatgaccttcgagagaacagcaaacactcggaggtgctgattgacctgacagagtactgtggccagctggtggaggccaagtgcctcactgtcaacccccaggacaacaactgcctggcagttggggccagcgggcccttcgtgaggctctatgacatccgcatgatccataaccacagaaagagcatgaagcagagcccttcagcgggtgtgcacaccttctgtgaccggcagaaaccccttccggacggtgcagcccagtattacgtagcaggtcacctgccagtgaagcttcctgactacaacaaccgtttgagagtgctggttgccacctatgtgaccttcagccccaatggcacagagctactagtcaacatggggggggaacaggtctatttgtttgacttgacttacaagcagcggccgtacaccttcctcttgcctagaaaatgccactcctcgggggaagtccagaatggcaagatgtccaccaacggtgtgtccaacggtgtgtccaatggcctgcaccttcatagcaatggcttccggctgccggagagtaggggacatgtcagcccccaagtagagctaccaccatacctggagcgtgtgaaacagcaagccaatgaggcttttgcctgccagcagtggacccaagccattcagctttacagcaaggctgtgcagagggcccctcacaatgccatgctttatggaaaccgagcagcagcctacatgaagcgcaagtgggatggtgaccactatgatgccctgagggactgcctcaaggccatctccctaaacccatgccacctgaaggcacactttcgcctggcccgctgcctctttgagctcaagtatgtggctgaagccctggagtgcctggacgacttcaaagggaaatttccggagcaggcccacagcagcgcttgtgatgcattgggccgcgacatcacagctgccctcttctctaaaaatgatggtgaggagaagaagggacctggtggcggcgccccagtccgcctccgcagcacgagccgcaaggactccatctcagaggatgaaatggtgctgcgggagcgaagctacgactatcagttccgctactgcggccactgcaacaccaccacggatatcaaagaggccaatttctttggcaggagaccaccaacctggtccgtgtgctccaaggggatgagtccattgtcaactgcctgcagccacaccccagctactgcttcctggccaccagtggcatcgatcctgttgtgcggctctggaacccccgaccagagagtgaagacctcacaggccgagtcgtggaagatatggagggtgcttcacaggccaaccagcggcgcatgaatgcagacccgttggaggtgatgctgctcaacatgggctaccggatcacgggcctgagcagtgggggtgccggggcctctgatgatgaggacagctctgagggccaggtgcagtgccggcccagctagaccctccagccctggtccccagcccctgctactggctggaccctctgccctgggcaggaggtcaggggattctgttttggtttgtcttccccaccacccttttttttcatttcccctgttttgtttgttagtttggcgttaggggtggaggttgctacaacttgctggctttcggactctgggctgattgtcccctgactatccccagccctgaaaaaaagagcaggaggggacacccctccatatgcccccccccatctcctgctttcatgtccctggagggctctggcctgcctcaaaaccccttctgcctcaggtggggaggaacaagctgaactgtcttcagggactgtcctgccctttagctggcagcagcaggaggagtgggattcccaattggtaagggctcgccttggcctgttgccactcttgctccctagcctgcaaggctagctcccctgtggtcttcaggaaaggttttgaaaaaggatgggtcccaccctccctccagagccaccagtgttagagcggagcccaaaggaaggatgggagccctggagtgggcaagaccaggccacctgctgaggtcgctgtggagcaccctcgctcctctcctggctactagctctggccctgcacctactctcactggccacctctggaggctctgcctttcccaagggccctggcagagggtggggcactgcaccttaccccacccatccatgccagcacttctgcactacggccattctcctcttgggcgctcctcagcctcactgtgacctttctgccagagctcccagccaggcctactctgctgaggtggcgcttcctgctaagggcccttctctgccctttctgccctccttcccatcccacatgctgagccgccacaaagaccaaagaagtgatggcttttctctgtcccctgctgctctgaggggagaggggtgggtctcctgagccactcagatgggaaagtcccttactcggcccctccctccccagcagccccaagctttacactggatgcagcgatcaacccaccacgagccgagcctttttgttgctccgctcccaggagagtgagggtgacgcaattgattaaaaccattttgttctagg

SEQ ID NO: 105510 - DNA, 3417 bp, Homo sapiens
tgtgaggcggtgcgcaggggcgggcggaggcgctgtccggccccggccaggcgccgggcggggagcatgggaaggggctagaactgctcgagccccccagccccctccccgggatccgcgccccccttcccgggagaggggccgccccccccggacggacatgggctcctgaagttgcgccgctgccggtcgggggaagagacctgacaggtaattaaatgtgtattttgtggacctgggcttggctggaatgctcaggggtcctgaagatcctattatagcttccttctgttgaaccattaagaaaagatggcgaaagtcaacataactagagacctcatccgtaggcagatcaaggagcggggtgccctgagctttgagcggcgctaccatgtcactgacccctttatccggcggctgggcctggaagcagagctgcagggtcactcaggatgtgtcaactgtctggagtggaatgagaaaggagacttgctggcctctggttccgatgaccagcacacgattgtgtgggacccgctgcaccacaagaagctgctctccatgcacacgggacacaccgcaaatatcttctctgtcaagttcctgcctcacgctggggaccgcatcttgatcacgggggcagccgactctaaggtgcatgtgcacgacctgacagtaaaggagaccatccacatgtttggagaccacacaaaccgggtgaagcgcatcgccacagcgcccatgtggcccaacacattctggagtgctgctgaggatgggcttatccgccagtatgaccttcgagagaacagcaaacactcggaggtgctgattgacctgacagagtactgtggccagctggtggaggccaagtgcctcactgtcaacccccaggacaacaactgcctggcagttggggccagcgggcccttcgtgaggctctatgacatccgcatgatccataaccacagaaagagcatgaagcagagcccttcagcgggtgtgcacaccttcatagcaatggcttccggctgccggagagtaggggacatgtcagcccccaagtagagctaccaccatacctggagcgtgtgaaacagcaagccaatgaggcttttgcctgccagcagtggacccaagccattcagctttacagcaaggctgtgcagagggcccctcacaatgccatgctttatggaaaccgagcagcagcctacatgaagcgcaagtgggatggtgaccactatgatgccctgagggactgcctcaaggccatctccctaaacccatgccacctgaaggcacactttcgcctggcccgctgcctctttgagctcaagtatgtggctgaagccctggagtgcctggacgacttcaaagggaaatttccggagcaggcccacagcagcgcttgtgatgcattgggccgcgacatcacagctgccctcttctctaaaaatgatggtgaggagaagaagggacctggtggcggcgccccagtccgcctccgcagcacgagccgcaaggactccatctcagaggatgaaatggtgctgcgggagcgaagctacgactatcagttccgctactgcggccactgcaacaccaccacggatatcaaagaggccaatttctttggcagcaacgctcagtatatcgtcagtggctctgacgatggctccttcttcatctgggaaaaggagaccaccaacctggtccgtgtgctccaaggggatgagtccattgtcaactgcctgcagccacaccccagctactgcttcctggccaccagtggcatcgatcctgttgtgcggctctggaacccccgaccagagagtgaagacctcacaggccgagtcgtggaagatatggagggtgcttcacaggccaaccagcggcgcatgaatgcagacccgttggaggtgatgctgctcaacatgggctaccggatcacgggcctgagcagtgggggtgccggggcctctgatgatgaggacagctctgagggccaggtgcagtgccggcccagctagaccctccagccctggtccccagcccctgctactggctggaccctctgccctgggcaggaggtcaggggattctgttttggtttgtcttccccaccacccttttttttcatttcccctgttttgtttgttagtttggcgttaggggtggaggttgctacaacttgctggctttcggactctgggctgattgtcccctgactatccccagccctgaaaaaaagagcaggaggggacacccctccatatgcccccccccatctcctgctttcatgtccctggagggctctggcctgcctcaaaaccccttctgcctcaggtggggaggaacaagctgaactgtcttcagggactgtcctgccctttagctggcagcagcaggaggagtgggattcccaattggtaagggctcgccttggcctgttgccactcttgctccctagcctgcaaggctagctcccctgtggtcttcaggaaaggttttgaaaaaggatgggtcccaccctccctccagagccaccagtgttagagcggagcccaaaggaaggatgggagccctggagtgggcaagaccaggccacctgctgaggtcgctgtggagcaccctcgctcctctcctggctactagctctggccctgcacctactctcactggccacctctggaggctctgcctttcccaagggccctggcagagggtggggcactgcaccttaccccacccatccatgccagcacttctgcactacggccattctcctcttgggcgctcctcagcctcactgtgacctttctgccagagctcccagccaggcctactctgctgaggtggcgcttcctgctaagggcccttctctgccctttctgccctccttcccatcccacatgctgagccgccacaaagaccaaagaagtgatggcttttctctgtcccctgctgctctgaggggagaggggtgggtctcctgagccactcagatgggaaagtcccttactcggcccctccctccccagcagccccaagctttacactggatgcagcgatcaacccaccactcaccaggcctctcctcccctctgcccccggctcttagctccagctgctccaggtagttggttcatccttccccctctctccctccctgcttccccttcagtgcttacttggctccagccctccagctgcagcccctggggaaaagcagcctcccttctcctctccctccactccctcgctccctccctcagcccctgtctctgccaggtgcctcctctcagtcaggcttcagagcagccctggagacaggagggccatgttaaaagctttttcacagttttaagaagacaagtggagggtcagaacataaggggatcctcaagagtcacc

SEQ ID NO: 105511 - DNA, 2879 bp, Homo sapiens
tgtgaggcggtgcgcaggggcgggcggaggcgctgtccggccccggccaggcgccgggcggggagcatgggaaggggctagaactgctcgagccccccagccccctccccgggatccgcgccccccttcccgggagaggggccgccccccccggacggacatgggctcctgaagttgcgccgctgccggtcgggggaagagacctgacaggtaattaaatgtgtattttgtggacctgggcttggctggaatgctcaggggtcctgaagatcctattatagcttccttctgttgaaccattaagaaaagatggcgaaagtcaacataactagagacctcatccgtaggcagatcaaggagcggggtgccctgagctttgagcggcgctaccatgtcactgacccctttatccggcggctgggcctggaagcagagctgcagggtcactcaggatgtgtcaactgtctggagtggaatgagaaaggagacttgctggcctctggttccgatgaccagcacacgattgtgtgggacccgctgcaccacaagaagctgctctccatgcacacgggacacaccgcaaatatcttctctgtcaagttcctgcctcacgctggggaccgcatcttgatcacgggggcagccgactctaaggtgcatgtgcacgacctgacagtaaaggagaccatccacatgtttggagaccacacaaaccgggtgaagcgcatcgccacagcgcccatgtggcccaacacattctggagtgctgctgaggatgggcttatccgccagtatgaccttcgagagaacagcaaacactcggaggtgctgattgacctgacagagtactgtggccagctggtggaggccaagtgcctcactgtcaacccccaggacaacaactgcctggcagttggggccagcgggcccttcgtgaggctctatgacatccgcatgatccataaccacagaaagagcatgaagcagagcccttcagcgggtgtgcacaccttcatagcaatggcttccggctgccggagagtaggggacatgtcagcccccaagtagagctaccaccatacctggagcgtgtgaaacagcaagccaatgaggcttttgcctgccagcagtggacccaagccattcagctttacagcaaggctgtgcagagggcccctcacaatgccatgctttatggaaaccgagcagcagcctacatgaagcgcaagtgggatggtgaccactatgatgccctgagggactgcctcaaggccatctccctaaacccatgccacctgaaggcacactttcgcctggcccgctgcctctttgagctcaagtatgtggctgaagccctggagtgcctggacgacttcaaagggaaatttccggagcaggcccacagcagcgcttgtgatgcattgggccgcgacatcacagctgccctcttctctaaaaatgatggtgaggagaagaagggacctggtggcggcgccccagtccgcctccgcagcacgagccgcaaggactccatctcagaggatgaaatggtgctgcgggagcgaagctacgactatcagttccgctactgcggccactgcaacaccaccacggatatcaaagaggccaatttctttggcaggtccgaggccctgaagaggagggtgcagcccagttggcagcgggaggttgagtggggagtgttggggcataatggtttcagagaagaatctcaaatccctgctctgcctctgtacccttgggcaaatggcttcacctttgtcagcctctaaagttttttaatctatgaaatgaccaacctgccatgcccatttatgaggccataacaaggactaataagataacccaagtagagcctccagcgcagtgcctgaactactccttcatcccccacctccttctccctctgtctgcatgtgccagagcttggtttctttatctgcattcaaggaacctccctctgcttgagagtatgaggcagcagccctccaaggctgggaatcttggcacatctgttttgtgctcaaaactgtgccctgtgtactaagggacaaactctgtgtttcagacaccatcatccccacccctcatttgtagatgtactttctttgggtaggtgagacacatgaacatgaatcaagaatctctccataggccaggcacagtggctcatgcccgtaatcccagcacttggggaggctgaagcaggaggatcgcttgagcccaggagtttgagaccagcctggacagcatagacccccatctctacaaaaaatgttttaaattatctgggtgtggtgacgtgcacctgtagtcccagctattcaggaggttgacattggaggaccagttaaggccacagtgagccatgatcatgccactgtactccagcttgggtgacagaatgagaccctgtctctaagaaaaaaaaagaatccatcaagatgccctctaaatgtcagtggtgtgtgaggggcagggggagtctggatgccagaagcctggaactgctcaggggaggcttaaaacagggtattttggagacccgagagatgatgtaagatgatcctggcccaaggaggtaataatgaactataggggagactgtcttggagaaatccaggtagtcgctggccctaggtttaagagaacagtgaccagggctatatacctggaggaattctgggtcaagtgcacaccccagcgtgtgggggactgagtggctgcagacttccttgctccccctttacctaggccatgcagcctctacttgaggctgtagggcagtaccccacctgacctccctgccctttgcccccccgccagccatgctgcgacttcgggggaccgagctcgaa

SEQ ID NO: 105512 - DNA, 403 bp, Homo sapiens
tcctgagacagaatcttgctctgtcacccaggctggagtacagtggcacaatcgcagctcactgcaacctccgcctcccaggctcaagcaattctcttccctcaacctcctgagtagctagaattacaggcgtgtgccaccacgcctggctaatttttgtatttttaatagagagtgggtttcaccatcctggtcaggctggtctctaactcccgacctcatgatccgcctgcctcggcctcccaaactgctgggattacaggtttgagccaccacgcccggcctcaatagtgataatattttatatcttaagctttctgttttatttttacaatttagagtatcagtaggattccacttctcattaaattccatgtaaatatcattctttcccaatctacat

SEQ ID NO: 105513 - DNA, 393 bp, Homo sapiens
ttttttttccgtacagatggggttttgccatgttgcccaggctggtctcaaactcctagactcaaaacagtcgcccacactggcctcccaaagtgctgggattacaggcgtgagctaccacacctggtcaaaagttttgcttccttgttaaataatacgtcataagttctttgaaggcagggactgtgtcctctttcttttgccattccccatagtgcctagaatagttatagatggcaggcaggcaacaaatagctctgtggaattaaattgcatatgtatggcatcttctcaggtcccagactgttacaggtctttcccaaatttctcaacattatgtattcttgaacccaaagttgatatcctgatggtacacatcagtttggctgatac

SEQ ID NO: 105514 - DNA, 304 bp, Homo sapiens
gggagctataattccagatgagatttgggtggggacacagccaagcagtatcagacaatgagtctgtgacaatgccagcgccagccttagaccaaattcatgatactctttttactccccacaaaaacattacagatctgtgtgcattctactttattttttactgttacacccttcattggatgaagtacagaccacatatgaaggttaatcattgtatcatttctctgacccagttgcttgcttttgtcttgaaattataattcttatcccatttctaggcttcagttcccaggctgttttt

SEQ ID NO: 105515 - DNA, 513 bp, Homo sapiens
ttagaacaaatttctagaagtagacttgcaggtcaaaggaatgcacatattttaggcttttgataaatgtcaccaaattatttgtagttgcacagactaaaatgtccccatccattttaactttttatttttaacatgaaaaaggctataatgtagcatatttagcataacaaaataaaaccttgagtttgagtatttcattctgtttttagaatgatgagtttatcgaattcaggctgtaccatggggtcttgagaacatagaatttctcatcctcagggtggtttcagagtatatggaattgtaagtgctggcccctgaatcatgtgctaaagggctaatatggaacgtgttcctccttcctttaagaaatgtttggtccttcctgccaattatttgcatttttgagggacaggacaaaaattggaggcaaaatttcactttttccccatgttaagccttttcctgccctatctaaagccaaatctaaacaaaggacaaatttgttcattg

SEQ ID NO: 105516 - DNA, 322 bp, Homo sapiens
catacagtagaaagtgtatacagaggacttcaaagtcctggattcaagcttgacttcactgagtttgtaagtgacttgaacaaataatgtagcattactgaaacatgcttccttatctgtgaaatgaggctaatatcttctatgactacctgtcttgaagggtttcaatgagggttaaatatgaaagacctttggtaacttcaaatgataaacaaatatataggatattgtgattcttggatgtgttctcgttcaagtccaatttgaactgttctcctggctctgtttagccgaacaggagcactatttattttccactttt

SEQ ID NO: 105517 - DNA, 537 bp, Homo sapiens
tttcaagggtcgacgtctaactaaattcccgttaagaattctctttgaaacattaaatgtcttttcttgtttgaaactagaatgtgatcagttggaatattggcaaagaacaggtcattagtgaaaactccaatgaagacaattggctttgggtttgattttcctgtttttgcagttagcttagcaccagatggtgccctagtgagttctgtataaataatacaatcatagggttgagtgattctctaccagtcacagactgaagcagaaaatagcacttgtctttccacacaagctcatgtagattcttttactgctgaattgttcttatgcagctctaacccttaaattgttattatggttggtgtttttttctgtttctttattgggcaggcaagcagccaaatcctcactctgacctagagggaagggctgctggatttgaggatctttagctgatacatacatcccttgcagaaagaagaggcaaagaagtaaaactccctgaattctctctattgttcctggaaaaaaaaa

SEQ ID NO: 105518 - DNA, 585 bp, Homo sapiens
gaagatattcagggcccttccttcaaagggacctgggcagctggcgtccccgcctctggactcagtggtggagcagggaggtccctgtctcaggacccctgagtctcggggccccaggagcccagggccaccagccgtggaggagccctggccttctgccttccacacccaatcccactccgtgctgctgggtccttctctacgacccaggctgcagtggctccacgggcgcaggccacacctgccatggagacagtgggcacagggcaggggaggtgggcgcacacagcctggctgccactgccatctcctgggcactgggggaactgcccccaccgccacacctgtgctctctgcagggggaaaagtgccaactcagacctggcgagctgagccactggggtctgaggggcccagatgccaccgtgagcagagccatgggggagatgcacagacacgcgtgtgaagcctgggggccctacttaccccttgcctggcctctgtccccgcctactccaggccagccccaggagaggggctcagtggcgtctctggcgcacatgatagggagtgtggccacctgga

SEQ ID NO: 105519 - DNA, 370 bp, Homo sapiens
ctgacctcaagtaatctgcctgccttggccttctaaagtgctgggattacaggcgtgggccaccacgcccagccggaatgagggaagtttgaactccaaagctagagtcccttggtgtcttccgtcctggtctcttttgtcccaaagttgagggaaagggtgggcagggaggagagggaaggaagaagattgggaaggccttgagctcccccttcaggtcgaagcccgtgcaggctttagcaatgacagcaggctaggagagcagacctcagggtgtggctcgtgggcccccaggtctcctagagcctttggggaaaggggggttgggttgagaggttgaaactattttcataacaatgctaagacatga

SEQ ID NO: 105520 - DNA, 677 bp, Homo sapiens
atattatgaaggagcagtgatgacagtgtgggtttatttaatgttacaaacagaattgagaaactggttagttttgtaaaccactaaatttataatttaaaacttccacactctgatatctttagatatatatccccaaacttcctatttgagaccatgaagtcataaatccagcactttatcaagcaaaatttcctgaataccaggcagaactcatgggcatttaaaacaaattactaatttaagaggagtctgttgaaatgtgtatgatttattatgaacattctcagtgtcttaaaaataatatttcttaatggtgccaacatgtatggaaccctgaacttctcacaaagccattcatttatgccataggtcactcaaaaactattaggacagaggatcagaaagactaacttgcataaccattgtgtacaagatactgtgttaagtgtttcacataggttattttatcttgtgactgcctggaagttcaagaatacaacacatttgtttgaacactactatgtactggtttgttgtggctttttttttttttttacatgtttttatttaatccgcagcatcctttatgtcttcacaactaaactaccattttcccactagtttatttactcctttgattattaaaaaaggtattttcggccaggcgcggtggc

SEQ ID NO: 105521 - DNA, 357 bp, Homo sapiens
aaacattttgaaagtgaaattcaagcctccaattagagtgagagaaagaaaacaaagttatcttagtttagaaagaccgagaatcactttctctaccctcatccccactaaaaaccaacaattatgagcagtattttagataagtatagcacagggtggttatatagctctgaatttttttaaactgagttatctttgagatattttccctctttgacctctctttcgaaattaaaacctcgttcttcttaatgatttccaggcttcgtcatccatcttctcaccttctccaatccactctaaggcaaaccttggcttctcttattttggtccatcataaatctacctttatatgac

SEQ ID NO: 105522 - DNA, 351 bp, Homo sapiens
ccccagtacttggaatagtgcctgggacagggaggatagtccgtgaatcgttttttgttttgttttgttcgagacagagttttgcccttgttccccaggccggaatgcagtggtgtgatctcagctcactgcaacctctgtctcctgggttcaagctattctcctgcctcagcctcccaagtagctgggattacaggtgtgcaccaccacgcctggctaattttgtaattttgtattttaagtagagttggggaagatcacttgaggtcaggagttctagaccagcctgaccagcatggcaaaatgtcgtctctacttaaaaatacaaaaattagccgggtgtggtggtgt

SEQ ID NO: 105523 - DNA, 1008 bp, Homo sapiens
tcaagattggcccgggaagcacagggagaccacattgctacaaaaaaaaaaaaaaaaaattagccggccttggtggcctgtgccttgtagttccagctacttgcgaggctgaggcaggagaatcacttgagctcaagagttcgaggctgcaatgacctgtgattgcaccactgtactccagcttggatgacaacaagatcctctctctaaaaaaataaaaaagattaaaagaatcaatacatgttacttagtttgtttacccccaaataatgtcccctcccacccctggggtttgctgcctaatgtaaaggtatttcagatccttacccccattagtcatttagagttttcgctgaagttttattttcagtaggtttgtttgcaaagtgtactaatgaggacatgcaagatagtagaaataatgaaagattattttcttgtttgaatatgtgcagatctggagttactgtagttttttaaagtatatttttgaagttactgtatgctaactcgtaactatggattcagctatataaacgggagtttatctttcactaaacaagtgctgctgaggtgaaagttaggtcttattttgacacttaataaacataacaactgtcagaatttgcatgaggaattacaagagctcatcttttaattctggtggtttttttttcatcaggaaagctttgtgagaagtgtttttacagtacaaatgaatgtctgcttattaaatttaatttgaaaacagaatcagtcttcatttatcggagggtcacttatttttcttgccctagtttaaatccttggaatacttttccaaaaaaatattggttcttcattgatagtaaggagctgaaaaaaaaaattcaaagccagttgcagtggcacatgctggtaatcctagctactcagaaggctgaggcccgaggattgtttgagcccagtagttgaggttgtaatgtgttatgattgtgtctgtgactagccactgcactgtagcctggg

SEQ ID NO: 105524 - DNA, 954 bp, Homo sapiens
tcaagattggcccgggaagcacagggagaccacattgctacaaaaaaaaaaaaaaaaaattagccggccttggtggcctgtgccttgtagttccagctacttgcgaggctgaggcaggagaatcacttgagctcaagagttcgaggctgcaatgacctgtgattgcaccactgtactccagcttggatgacaacaagatcctctctctaaaaaaataaaaaagattaaaagaatcaatacatgttacttagtttgtttacccccaaataatgtcccctcccacccctggggtttgctgcctaatgtaaaggtatttcagatccttacccccattagtcatttagagttttcgctgaagttttattttcagtaggtttgtttgcaaagtgtactaatgaggacatgcaagatagtagaaataatgaaagattattttcttgtttgaatatgtgcagatctggagttactgtagttttttaaagtatatttttgaagttactgtatgctaactcgtaactatggattcagctatataaacgggagtttatctttcactaaacaagtgctgctgaggtgaaagttaggtcttattttgacacttaataaacataacaactgtcagaatttgcatgaggaattacaagagctcatcttttaattctggtggtttttttttcatcaggaaagctttgtgagaagtgtttttacagtacaaatgaatgtctgcttattaaatttaatttgaaaacagaatcagtcttcatttatcggagggtcacttatttttcttgccctagtttaaatccttggaatacttttccaaaaaaatattggttcttcattgatagtaaggagctgaaaaaagctgaggcccgaggattgtttgagcccagtagttgaggttgtaatgtgttatgattgtgtctgtgactagccactgcactgtagcctggg

SEQ ID NO: 105525 - DNA, 348 bp, Homo sapiens
gacgtgagaggatttaaggacagggtgaagtagattcattaaaaagaaattacagtcaaactaattgagggaggagcacccaaaactaggcagcagtagttgacatagaaagaggagggatggactcaagaaatacttaggagactgatgagttgacatttgatgagtcatgcagtgtagataacaaggaaagtaaggaatgaaggatgtcctccaagtttctgcttcaggaactgcgtgggttacggcaccgaagatctagtacaatatacatgaaaagggcaggctgcatgtaggacaggggagcagaaggaggtaagaaatcggttgtggacattgtgcctttga

SEQ ID NO: 105526 - DNA, 778 bp, Homo sapiens
tccctctgtcaccaaggctggaatgcagtaatggatcatagctcactccagccttaacctcctgggttcaagtaatcctgcctcagcctcctaagtagctgggattccaggtgtgggccaccatgtccgtctcctaggaataagtctaataaagagatgcaagtaatctctagatagaaatcaattccaatcaaaatcttggcaaggtttcttgtatgactttgcagttaattctaatatttatatggaaaccaacaacaggcaatgaacatctaaaacctcatgaagtactgaggctgggcgtgggtggctcatgccggtaatcccaacactttgggaggccaaggcgggtggatcacctgaggtcaggagttcgagaccagcctgatcaatatggtgaaatctcgtttctactaaaaatgcaaaaattagtctggcgtggtggtgtcacctgtagtcccagctacttgggagtcaggagaattgcttgaacccacccaggaggcagaggttgcagtgagctgagatcacaccattgcactccagcctgggcgacagagcaagactccgtctgaaaaaaataaataaaacctaatatgaggtactgaaaaaaaacagccccacccgtgtactagtcctgtcagaaatgcttgtcctaaatttactgatgagaaaattatcagacaaatctaaatttagggagaaactctgcaaagcagctgttcaactcattgaaaatactaatatcacaagaaaaaaaacacaaaacatggaggaa

SEQ ID NO: 105527 - DNA, 465 bp, Homo sapiens
agacagagtcttgctctggtcgcccaggctggagtgcaatggtgccgtcatagcacactgtgacctcaaactcctgggctcaagcgatcctccctccttagcctcctgagtagctaggtttacaggagcatgccaccatgcccagcaaatttttaaattttttatagagacagtgtctcactgtgttgcccaggctggagtacggtagtgcaatcatagttcaccgtgaccttgaactcctggcctcaagcgatcctcccatctcagcctccaaaagtgctgagattacaggtgtgagcccccgcgtccagccctgtgctacatactttataacgaccatgtctgatcttcacaaacacctcatgagatgcatgctcttatccttcattttacagatgaggaaaacaggctcaggagtttaagtaacttgccacagttgcaaagccaataaatcgtagagccagg

SEQ ID NO: 105528 - DNA, 278 bp, Homo sapiens
tttttcttttccttctctactagtttggaatttataacctctattttctactattttcaatgattatgttagaaaattttcacatgtatttttaactcatcagagttgaacgttaaacaatatttttattatttttttctgaactaaggaccttaaacactggaattacaattacctgctcttctaattgatatgcaattgttactgtgataactctaatctgtattttccattccacaaaatattattttacagagttcatttacatgcatctacgt

SEQ ID NO: 105529 - DNA, 456 bp, Homo sapiens
gtgttcaccttgtaggaagcagtgagataagcgttggttgcaggtgatattaataaaagtgtgagtattcttactcttaagaattttcagatcttgtggtggagatatgaaaatagaaaaatgctaagtcagaaagttatgagagctaagataggtacatggaagtattaactcttacttgaaaagaaataataagagctaaggaaataaggaagtggtaacagaatgtgtacttgccattccatctccacctacgggtattggcagagaaggaagaagagacatatggtagaaatgagagggtaaatagaggatcaaacacaagattgtgttttcttttttaatgggagagtatgttcacacactttgagaaaataatatgttttaaaaagagatgtaggacttctttaaatgtaaacaattgttaaaattactgaagtaaggtaccagtggaaa

SEQ ID NO: 105530 - DNA, 600 bp, Homo sapiens
caatgacaaagttttatcaaatggacccttgggagtttgacttctcctcactatgaatggtttgcttattgcatgctaatgtagaaaagttctcccacaactgatctgcttagggacagtgtccctggtgccctgggtcagcctttgtaaacagaacaggcttttctgtatgcctttgaatatggtctttccgttttctcaaaattgtagtgtactctgcacatggtgggtagaaacacccttccagattttcttccttggcccaagatcatctaggtcttatgcaattcacaggggaaaggagtagtatgcaggacatgcgtaaattctccttaccatgtggttctttcacattgctgttcctttaagagaactcttaggcaattcggcatatgaaaatgcagcctattgtcaaatttgtgaattataaagcgttccgaccccacaacattgtatattttgtttgcttgtttctgtccgccccaacatttagaagtctggtacttagtagggactgggctgggtagaaaaagaatgcggtcttaattcccacaaccctgcctccttgaagtaggtgaatcctaagcctttagaaacgaa

SEQ ID NO: 105531 - DNA, 267 bp, Homo sapiens
aacccttccctcccaccaaacaaaacattagtgctcagagagtaaagctgtgagcacacatacactttggctatgggcagatgcaggatccaggtagaatgttgacctggggtcattcttaaggagttcctgcccaagatgttagctcatcaggctgagaggactccagcagtaaaggttgtgggatctatactttggtagaaaaggagaaaggaccaagaaaagccagctgaggcactgcctcagctgcccatctaaaggaagttg

SEQ ID NO: 105532 - DNA, 348 bp, Homo sapiens
tatttcagttaatttcagctccctgccagctcagaagaatgatgctgtgctgtgtgctgttcccatgaatactacacgcagggcactgctcagtgactcagccttccagggagccagtcagggttttgaagctgcatcgtccctttcatccttgaagttcttttggatttcatcaatggcatggagggatatttttaaaacaatggagatttttcaggactggcaaaagggctcccctcgtcacagtgccaaaaccatcacaaacataagttatgttaaaaaaaatcctaaactaaaaatatctggtacttagggaactaaaagacatctcatgtttgctatcatttc

SEQ ID NO: 105533 - DNA, 370 bp, Homo sapiens
gaaggtggaaagtgtgcccagttcaaaccctgattctctgccagccggtgttgaccttgagcaagtgcgtcattctgagctcagtctcctgagctgcagaatggagatacttgcttacctcagagggttaatgtgaggactaaaagaggtcagggatagtgagacctggaaagccaaacagcccataatgaagagcagtttccatttagtgttatcagaggctcaaatatttgtccaatgaatatttcaaaggcttaagctctgccttttgtgctctgcgctttgtgtgtctgttggctacaacagaagtgtgcacatccaacctcacgcgatgatgatggatgggaagatactgactggtttgtgttct

SEQ ID NO: 105534 - DNA, 718 bp, Homo sapiens
ccactcattcaaactctgatgtccctcctggtttagggaagattacttggtaccaaaagttggctttgaatcacatgtcttggtaaatagtgataagaaatgaatttgattttccttttcttggaaaccactacttttaaaagggctcggcctttccctttgaagaatttcgggcaccctcagcacttcctgtgcacctgagcgggaggaatggagtgaggtgactctgtttgaaggatgacagagttaaggaaaagcagaagccacagttgattgaagtgattttccagaatttcatctgcaaagtcaccattcctggatgtgcttggaagatggatcttccgtgtgaatttaggctgagcttggaggagtataaatcaagggcttaaggttttattatattctcaaagcacaggatttctgcatgggtgtgcagtgaagttcatccttcccagtgagcaccctcgttcaccttttgtcctctgggccccacttgtgtttacagtacatgtttgtaaaacagagagtgacctctaacaccaagtctagtaagaggcagtgccactgtgtatgttacacagtgtgaggcaaaaggaggagtagcgcgcgcacagaaacgccgtattcaagccttggcagcacaccacggcagtaaagctagcggagcccgtccctggggtgcctttaaacccgcctgcattcacacttgcgtctttat

SEQ ID NO: 105535 - DNA, 796 bp, Homo sapiens
ctgaggcgggctgatcacctgaggtcaggagttagagaccagcctggccaacatggcgaaaccctgtctctactagaagtataaaaatcagccgggtgtgatggcaggtgcctgtaatcccagctactttggagtctgcggcaggagaatctcttgaacccaggaggcagaggttgcagtgagccgagatcacgccactgcattctagcctgggtgacagagcgagacttcgtgtaaaaaaaatttctggttgaaacatttaatggataatattttaaatattaagagtgggcttcttaagcacattagatattgcttagattttcttaagcgcatagtgcaaatctgatgattcccattagattcatatgtttattcatttgatcattcaataaatatttgtttgccttgtactatcttctgtttctttagagtagtggttttcaactgggggccattttgttttccagttggcaatgtgtggagaaatttttggttgttacaactcagatggaggtgctactgacagctagtggatagaggccaggaatgctgctatacatccttcttccaacaaagatgtacctggcctacagtgttggtagtgccacagttgtcacaccctgcttgagagtttagttatttccaagtatgcattgaaagaaatagctttattcaacggaagttcatatggttttacaaaattatcatgtatgttcagttctttaatttaaaaaaattaccataaaagttttgagttgaaaattataactccataattcaggtactatcagtt

SEQ ID NO: 105536 - DNA, 425 bp, Homo sapiens
ccagtgccttagctgctccaggtgtgcctctacctactcctctgattagcctgtccctagtttcctcacatcctgttctcaatgtttactcttcccttctccaaggactctaagtccagcaggcagctcttcacctccatcctcctcctgccatctatggtgtcccaggctgctcctcagaacactggcaccgctcaaccacattcccacccttccttctttcaagaacccttccctgatggtgattcaagggtctctcttcccaggcccctaggaactaattagttgaaggggtaaaaaccggctccagagggctggcccactgccagagttttaaacgaagtcacagaaaaaccacactaaaatggacatttaaaaaacagcaaccatctgacaagcaaagaactggcttttcagtatgagtt

SEQ ID NO: 105537 - DNA, 240 bp, Homo sapiens
ctgggatgaccacatcagttccgtctgacaccagcatccgcacaatacaggcaaagccccttccctctcttcggaggtcggcaccacttttcttccaaacggtatttccaaaaggagcacaacttgaaggaaggagcccgggtgagaaaagtcgagtctttgacggttagtccccctcacggggagcagcgtcaagaaaagacacacatgtcaggcaggtgtacaaaggcagagaaggac

SEQ ID NO: 105538 - DNA, 399 bp, Homo sapiens
tggtgtgaaataggagtccaacgtcattcttttgcatgtggatatccagttgtcccaccactatttgctgaaaagactattctttcccccattgaatgatcttggcacccttgtcaaaaaacaattgaccataaatgtgagagggtttatttctggactccaaattctattacctcactttcttcattattgtagctttgtagtaagttttgaaattggggcatgtgagtcctccaactttgctcttcgggattgttttggctattctgggttccttgaatttccatatgaattataactaacttgtccatcattgcaaagaagccagctgggatttcacattggaaactgctcaatacttcagaatttaataaacagtaagatatacgattcataaga

SEQ ID NO: 105539 - DNA, 362 bp, Homo sapiens
ccgagtagctgggactacaggtacgtgccaccatgcccagctaatttttttgtatttttagtagagacggggtttcatcatgttggccagggtggtctcgaactcctgagctcaagtgatccacccgccttggcctcccaaagtgctgggattacaggcgagagccaccgcgcccagcctaatgatataaatattagtagatttctgcttactcacttcaccaccagcattttctagcaaatgtgagttcagcagacaccaaagatttttataaatcaaagtagacagtctttaacgttgagaagattctgttaactcatctgttctacccacactcttgcccttccctcctcacagaaaag

SEQ ID NO: 105540 - DNA, 330 bp, Homo sapiens
ctcttttcaaatttaccaagatttgcatattaccaagataaagccaccaaagtagccattcactttccaggggtcagttgaaacttgtaacctgataactcctgggaactccttagcagatgttagatcagccatagtcaaataacagtggaaaaagtacttgatgttaggatggggctaaattacagtttaaggattctccgacaggcacttatctgaaattctttttttttttttttttttgagacggaatttcactcttgttgcccaggctggagtgcaatggcttgatctcggctcacttcaacctccgcctcctgggttcaagcg

SEQ ID NO: 105541 - DNA, 334 bp, Homo sapiens
  misc_feature (80)..(80): n is a, c, g, or t
cacaccgtggtatgggatgaactggcccctcacgcctttccataacatcactaatcccatcgtgagggctctgcctcatngacttagtcattccctgaaggccccacctgttaatactgtcacagtggtgattaaacttcaacatgtgaatctggcaggacgttcagatcatggcacttggcctcgtcctgctaacctgtggcaggggggcagatgaggatagaacctatctggggcatcccagatgggtggggtctaggcctcgcttctggcagtcagtaatgcagggtcttgataagcctataagccgcagctgccagtggtcagggctgag

SEQ ID NO: 105542 - DNA, 760 bp, Homo sapiens
gtgtgagcacaggcaggtggagggatgaagagagccaacaagcctgcttatactttcttttccaagtagtttcgccaaccgtaaaaatggatggttccagaaggaagaccttgaaatggtttgatttgagataaatctgggcttgaggcctgtccatatgtgctaggtttgatctgatgggagaacagagccagtgagtgcccaccttggggcccagactcctgtgccagcatgagttccagtgtctttcacttcctcaccatatccactggaaacaggcgagcaagacttcttacctccaactctcctatctcatcttttgtgacctttcatctttcctcttgaggaccttcctttctttccctcccatgacatacaccccacctgtttggctttccctttcccattcctcttgttccccaaccctcaatccgaacagttggtagcaccctctctcatctgcacaggaggacaggtggacagaaaagagtaagaagcatgggttgtttaatagaaattgagttcaagatcagcctgggcaagatggtgagactccgttgctacaaaaataaaaaataaataaatacactagccaggcatagtggcatgtgcctgttttcccagctactcaggaggctgaggtgagagaattgcttgagcccaagagtttgaggctgcagtgagctatgatcatgccactgcactctatccagcctgggctacagagcaagaccctgtctcaagaaaaaaagaaagaaag

SEQ ID NO: 105543 - DNA, 988 bp, Homo sapiens
tgctcacagctggcttctttgtggtgaggacagctataattggtgaggcaaaaccagtgtgccacaaaagcagaatacattctgctgtgcaagcaatgaccagacagactagaatgaaaaggcaagagtttcctaaggttacctggaaccccttgccaggtgttgcattaagtttactggcccttgccaacattcttctaatgcttcctcatttcatctggcttcttggcagtgttcagtttttgtggtcttttatttttactgtttgacttcatttctcttcttagctctgtaaagttccacatgtgtttatctttgtggtgaaaacacaataaacttgcttaatataatgttggaagtattaatccattgtattagtgtgtacaggacctggattgctgataaaaaaataactagcaataacagcctgattgcttaaaaatatttagtaagttttgtcggggtggattggggcagggcagaacttttacattaaatatagatgcaagatttgataagaatcagccagagtgtacagtaagtattcacttaatgttgccaataggttcatggaaactgcgaatttaagcaaagatgatgtataatgaaacacattttactaagggttatcgataaaaacaagaagtaaggtccctatggcatatatctgggcacaagaaaattcacaaactttgaataaagaaccaaggacgtttctaatattaatattggtgtaacgtgagatatgcaacattgagcagaattactaaaatatgatactattggtggacaggggtatctgtaatgcagattggggtggacagggcaaaccgaggaggggtcaaacacggaaaggggaacgggtcataagaaaaaaaaacgggtggggacgaaacagaagaaaataggagtgagaaagagagagtaggaaagaaagaaaaaaaaggagagaaagaaacagaggaggatattatatttatttgtgtta

SEQ ID NO: 105544 - DNA, 106 bp, Homo sapiens
ttataactgtaacttactgagtgcttcctaggtgcattgtgcccagtgttggcattatatttcatttaatgtaatcctcacaataatttaagagaatggtgatatt

SEQ ID NO: 105545 - DNA, 210 bp, Homo sapiens
caaaaacttttcaataaacataaaagtagagacaccagtttaatgagctatcatatacccatcacatagatttaaaaactattaacatttgcaatatttacttcatttgtttttctgaagtatttacaaaatagttgacagtagttatgtaattgcatcctgatattcatccctacgtaatttactttccctctaaaaacatgagggcac

SEQ ID NO: 105546 - DNA, 489 bp, Homo sapiens
tagtgctttgtggaatactgtttgagaccagcgcattaggctagaccatgacaggtccaggttaccaaagagaacagtaaacacacaaatgtgtgaatccatgagtattagatacagaatgatctgtaaggtttccagggtgtggagatattggttgggaaagagagtattagtccaaatctgagaagtcaaatacaaaggccaagaatttaaatggtttatcaagttgaaggataaagcaaggtttggtatcagatggttaggcataaggttacgggtgtatatcagaagaggagttctcaattccaagaatgtggtccatccattgctgtctggtcttaaatactctgctgagctagcaacctggtcttaaagggatcgaataatgtcagacaggtctgtgttccttttcttccttccccgttcacttttattgagtagctacagtaagggaaatggtaggaaacaagggagcagaaagggaaatac

SEQ ID NO: 105547 - DNA, 590 bp, Homo sapiens
ttgaatggctcactcaccaccctgtgacctgaccagggtatgggattgcagcgtgcctcctcatccctccagtagggatgaccctgcacggatgaggccgggggcggtggccttgggttgaatggcccactcaccaccctgtgacctggccagggtgtgggattgtgcccggcttccccatccttccagtggggatgacgacaggcatttgctgagttccatgggactgtggaaagggctgtgtcactgtagacgctccatcggaaatgctgatgtgtattcttaccacgggcgtccgtgggccaccattgtctcctggcatctggctgtccttggaacccagcaacacccagggacttgggctgtgatcagaagtcctgcccagagcgagtagggtcacgccagagtgaggctggggacagcatggtccactgtggcccagatgtaacttttagtcctgccttcttatccggtttggcaggaacaggacagggtggttagcaggccacagtgtggtgggagtgaaagtgtactgtcctgtgtgatatttttgcacagcctgacagtgggggcaagtttagagcctttga

SEQ ID NO: 105548 - DNA, 395 bp, Homo sapiens
tgtgagccaccgtgcccggctgatttttacatatttttatctcactctgttgcccaggctggagtgcagtggcttaatcaaaactccaaactccaaaccaaggattactccgaacaagtgatcctttgcctaagcatccccagtagctgggactataggccacaccaccacacccggctaatttttaaattttttctgtagaaatgaggtctcactatgttgcccaggctggtcttgaactcctgctctgcggtgatcctcttaccttgctctcaaaagtgctgatagatgtgagccagtgcttcaggcctttgtctttatttacacaggcatattttattttatttatttatttatttatttatttatttattttgtgagacgagtcttgctct

SEQ ID NO: 105549 - DNA, 804 bp, Homo sapiens
acactaaacgctgactcacaggctccactactggaattgcaaatgttttgttttttattttgccagcacaagggattgaaaaacaatgttaccaggcggatattaaaacgactacaacatgagctgctgcttttctatcattttatattcagcttgctttttatattttacctttctagcccccgtaggcatttgattttgtaactccctggaacaggtcagaggattacattaaaatataattactaggtagtggcatctattcttgctgttgtaaaagcacaattcttaaagttgttaggacaggccaaacttacattaataatgaagaaactagcaggatgacacggagctggttctaagagcatttgcagagcagcattaatagaatcagttgaaagggactgcaaaataaaattttaaattaagtataagataactttctacagggcaatgggtacttaacctttcggagttacttctctattggactataaattcttaatggctcatcattttctgcaggttaacttctaaactcacagggccataaaatatctgcactgttctgctgtgaattgttagtcagatatactgtggcattccctaaatgtcagactggcttattacaaatactcttacatgatatcaaaaagaatctatcattttaccttattccaagctcagaataaatttatcttgactgtcagtactttcaacaattttattctgtaaatttatttaaggctgaagttttgtgttcatttaaggatgttcttgtgttctccatctgaaggatgatga

SEQ ID NO: 105550 - DNA, 296 bp, Homo sapiens
gtatttggcagatggggccatgactgggtgaggctaagattctggagactgccaaatcattttcagccttatggccttgggaagctggcatacctctcatccctctcagataccacaggattttgtgacccatggtttgctcctggggtgaagccatcctatcttctatctttggcaccactgaccacatcagtgggagtcctcaccccagccccagccctggttcttgttcacttcttatctcctgccctgctgggtcttcctgaagtcacttcagttttcaaagacttatgtgc

SEQ ID NO: 105551 - DNA, 1022 bp, Homo sapiens
attttatgctgacaagttatatagttgactttttaaattcttcaaatagttatgtatgaaccagttacaatatatccttaagatttataaacattaaaagaataattatctcagttttccaatattgtaaaagcaattaacagatacactttttaaagaagtaatccatatgtttgttatggtattgtttataaagcattcaataataaaaggctgatgaaataacatgttcagtaggatactgtgcagctacttaaaatagcaagtgaatatttaatgagctaaaaagctgttcattattgaataagtaaaagattatcaaatagttgaatagattcaccagaataattcatatgctaaactgttttactggtttactctgggtgagagataaatcttataggggtgggaggaatcttcttgattataaataagcatgtatgatttctgtgatgggcaaactttgttttttgaaaaggagagagagaaatccttgaaaaataaaagtgattatttgaagcaaccttacatccatataatgatttacttttggaaacctataaaagggaatcctactgtgttgaggaactttagacatgataatgaattaactgtcatggaagaaaaatttcaaaatcagataagtttaaaatcagcttcagaggaacagcgtgctttaagttctcaaagtaatattgaaaaggaattcaagaattacttcttgagttcgtggttgagagatttcactgtcatttccccactcttcaagcccccccagacctcaaaaaaaggtaagtgtaagaaaagggatatttaaatctcttttaatttgaaactatattagtaaacaaactaaagaaatacaaatctggtttattttatagtgataaagatttgataatgcaatgaaactttcatatacaaaaattaagcatttttctgttaagtttaatttttcgtagcataaaagtactatatagacatagaaacctcaggaagagcaaaaaaaaaaaatttaaaaa

SEQ ID NO: 105552 - DNA, 344 bp, Homo sapiens
ctcgcagcctggctccgggaagagggtgccccccacagcctggggttcctttcctggagcaggcagcactgtactgcgtgcagggcgggtgagaccgccagggacacaactgcagaggtgaaaggccggcactccaaggtcgcggtctgcgcttccgtgaaacacttgtggtcgagcgaggccaggccgtggtcttggtgtgggagtcaccaggctgggttttcttttgttttttgagagagggtctcgctgtgtcacccaggctggtatgcagtgatgtaatcacagctcattgtggcctcaaccttctgggctcaagcaatcctcccggcccagcctcccaa

SEQ ID NO: 105553 - DNA, 631 bp, Homo sapiens
tggggccccagataggaacacagttgctgtctttgctcaatagcgcctcagggtgtgtggagagccagcctctgcctttgaagctgggccggctccctgcccctaactgctgaaaaccccagctctccccaagccatgagcaaggcccaaacttgccacacctctggctctttttgcaagagagatgttttaaaatagtcttaaatgtcagacatattttttttcacaacatgcctcagacatctcataaattattctgcagtaaaactttaataggaatgcttagaaaatgaagagttctagtcaatggagtttttggtaacttatacaaccgttaaccccaaatcaccctactttttctaccccagaactcattgaagaaaataatttaaaaatagagatgatttttctgaacccatgttagaggctgtctttgatgactgaggtcttatgtttcttcataatgccatatgttagtttgaacaacgtgatattccaatatttgactattttttactttaaaaagttaatttgagatggttcagtctgataatatgtaggaagtataggagttggagttcagtgttttctgaccagaatacaccgataaagttgattattttttcttaga

SEQ ID NO: 105554 - DNA, 465 bp, Homo sapiens
taaataagaggtggtccgtcacttcttcagatgagcaactacaggcttttcaaaagataattgctaatcaacccctttgtgcctgggttttcttatttgtaaaaatagatactactacctaactccaaagtgtgtggtgaagacaaacaactggggtgatgtatactaaagtaacgaaagtgttgaccacacactacgggctggttagtgttagattcccttgtttttccctcagtatcaaaaacagatctaatttaggtttacataaagacaaagtatgaagataaggtgacttacagttggtactactaacaaaatgggctaagatttgcattattgcatgaaaacaacaaaacatatcaataaataacaaaaagcttggaattcagacaacagatcaagtctgggcttgatctcaagctagtgttttgatgttgaaaaaatgttatttggtctttctaaccc

SEQ ID NO: 105555 - DNA, 617 bp, Homo sapiens
ctcaggtgatccatctgcctcggcttcccaaagtgcggggattaaaggcgtgagccacttgtgcccggcctctttttttttatataacacttattgatatattttatcatataataatattgtataatgcatccatttaaagtgtgcaattcagtgattttgagtatattcacagaattgtgcaatcattaccgctatagaattctgtaacattttcatcatcccccaaagaaacttcatatgcattaagcagtcattctccattccctgctatcacccccagcccataggcaaccacaaactgacttattctctctctacatttgcctattctcttttctttctggttatttgttcaacaaatgtggagattgcctgctatgtgccagacactatgccaggtgctagaggtagggatatgggggagcagaacagacgatgttcctgcccccatggagcttacattctagttgtagcatcttagaatgatgaaataaggacatttaagcacagatccaaaggataaaaataaaccagtcttttcaagatatggggacagaaagaatagcaagtccagcggcctggaggctgacctgtactttgtggctgggaggaat

SEQ ID NO: 105556 - DNA, 504 bp, Homo sapiens
tgatgtttgccaggctggtcttaaactcctgacctcaagtgatctgcctgccttggcctcccaaattgctgggattacaggcatgagccaccacgcctggcctgttcaagtattttctagcaatcttggcaaagcaattatgtttagcccacttggctatctttttaacatcctggagtttctaatcatttttaatgcctatctggggaaagatatttaatattatgttctctgttttcctatattgattgacaatagccatggatctttctgtttatcttcttttgtagatctaccacagccctataacaaaacagcaagaaagtgagtcacttaagtttttggtctactagcattataaactgccagctgtccgattcatagtaaataccatcattaatgatgtgtactactaacgcaagtctgaatatggatgcctttgtgtgaaataaaattcagccatatattttttaaatgtgtctggtaattgaactaaggtagaca

SEQ ID NO: 105557 - DNA, 398 bp, Homo sapiens
tacaggaaatcccataaataccctgtgactattattggatttttctgtgtcttctatcaaactatagccttcttgagaactaggaagtcatcccttttggctttctattactagtgcctagatcagtgcttgacacatagcaggctccaaaaatttttttcaggaataaatcagcaactaagtaaataaatgaacatatcagatgtaagacctaaaaaggttttcttctatttcagcattatttattatcattacttaaatgcctaaagctaatggcaaaaatttcctcaactaatcttcatatccaagaaactgagatgacatacaggcagtctgtgcatatgtcaaaaggcccaccaaaccacgaccaacataggatctagaataccacaacctac

SEQ ID NO: 105558 - DNA, 871 bp, Homo sapiens
ggtgagcgttacgtgtacaagttgtgtgtgagcccgaggccctcttctctttggcctcccaaagtgctgggattacaagcgtgagccaccgcgcccggccctatttacttattttttaacctgacccctggagccccccgtaggagttgatagcaaacagatagacacaatgaataagtggaagtcatggcttgtttctgcaaaacacgatctctcatcccccaccctaaaggacctgatatgagacaagacttcccatcccttaacacatcttcatcttatggtcagcaggactgctggttttgattagacaatagcaattaggtaacctggggagagatggatcagcacaaggtgaaccaccctccaacctgcagcctcaactgctgtgagttccaatcactgggaaagtctcacgacttcttacttggtttaccttcgagttgtgcagctgaatcaagcctctgtctcatactattgccttgcatctaccccatgctcagtcaaaccacctctggtgtcaagaaattacacattataaacatcatatatgtacacctatgaatcgttttatatgtgtgtgcatacattatgatacagccctgatctttaaaaggagcaaaaatcagagaatcgtatgtcttaaagaactatttccttacttttttatgctaggtaatgcccatgtgacaaacatgtaaatattcatcaaagaccacatgttttttttacagcttttccttccccactgatttagctgaatgctggggaccttctcgtgatgagcttgcggcacggcattgcatggaaccaacattgcctcgttggacacggtcgacgcaacatatgtgcttctaaaggaaatacagca

SEQ ID NO: 105559 - DNA, 949 bp, Homo sapiens
ggtgagcgttacgtgtacaagttgtgtgtgagcccgaggccctcttctctttggcctcccaaagtgctgggattacaagcgtgagccaccgcgcccggccctatttacttattttttaacctgacccctggagccccccgtaggagttgatagcaaacagatagacacaatgaataagtggaagtcatggcttgtttctgcaaaacacgatctctcatcccccaccctaaaggacctgatatgagacaagacttcccatcccttaacacatcttcatcttatggtcagcaggactgctggttttgattagacaatagcaattaggtaacctggggagagatggatcagcacaaggtgaaccaccctccaacctgcagcctcaactgctgtgagttccaatcactgggaaagtctcacgacttcttacttggtttaccttcgagttgtgcagctgaatcaagcctctgtctcatactattgccttgcatctaccccatgctcagtcaaaccacctctggtgtcaagaaattacacattataaacatcatatatgtacacctatgaatcgttttatatgtgtgtgcatacattatgatacagccctgatctttaaaaggagcaaaaatcagagaatcgtatgtcttaaagaactatttccttacttttttatgctaggtaatgcccatgtgacaaacatgtaaatattcatcaaagaccacatgtatatattttaaaggcattttttcttctccccaactgtatgtatagctagaatctgcttgctgtgtaaccttttcttctgcatggagcttttggtgaagcaaggccatttgtccagtgtttcatagccttaagcatgtttgcccttcgttttttgaatgttcaaaaaatgtttaagtgatcaagaaaaagctctaactttcgacttttgttaattttatgacatgac

SEQ ID NO: 105560 - DNA, 201 bp, Homo sapiens
ctcccagctctaccagcccaggtggaccatgctgcccagggtccttggatatcctctgagtctgactggtggggtcactacaatttggtgccatgtccccagatgccctgcagagacaatcaatggaaatcctgtgttctgagtatcaggttgctcatgagtctccagtcctccacactgaaactgacctccaatcacaag

SEQ ID NO: 105561 - DNA, 507 bp, Homo sapiens
gatagtttcctaaggattaattgcaatgaggaacctgataccatatcagtatacttttcatactctgttatagtaaatccatgtgtttattttgtgctttgagtagatctttattcaaacttaattttgtagcttcatgcattggctatcaaaaaatatcaaaaaatatcaatttgctgagttatgcaagaacttaaaaatattaacacatttcattgtaaaacatcactttggttaatattaccaaaaagctcattagaaatctttatgaattgggaagctgtcaaatgcatggtgacagatacaagttttccaaaattctgtgtgttttttttttttttttttgctggaaaatatgaattttatcattggtaacaattactgtcagttgtttcccagcgttggttcatttacaagaaaatatcagccagacacccaaggttaaataactgtagtttgtctgtcagacactgtttcaaataaaacgatgttatattttaaaagtgg

SEQ ID NO: 105562 - DNA, 393 bp, Homo sapiens
ctgtaagtagtccattataatttataatgaataattccattattcataattaatttaaccaacctcccaggcttagacatttaagtagtttctgaattatttctccatcattctgcgacaacgtgcatcacataacatacatcagtatgtacttgttcaattatgtcatgaggaaatatttctaaatgtggaattgctagatcacaagatatccaaacattcagaatttttgatactcactgacaaatttcttttcagaaagtttatggcaatttctactcatcggatcataagatggtgtggcacaatatacccatctgcaaaaagtcagcctcaaataattgttctgataaacagtggggaatcactgcgtattctctttgcataataagc

SEQ ID NO: 105563 - DNA, 361 bp, Homo sapiens
aattcagaatcctatccaacaaatttaacagagattgaataatttttaaaaagcaaattctggagttgaaagatgcaattaatacactgaagaatgcatcagagtctcttacttgcagaattgatcaaaaagaactagtgaccctgaaacaggttatttgaacatacacagtcagagggagacaaaaaaacaataaaaaaaagaatgaagcacacctacaagatctagaaaatagcctccaaaagccaaatctaagagctattggccttaaagaggaggtagacagagagataggaatagaaagtttattcaaagagagaataacagagaacttccaaaacctagagagagatatcaatat

SEQ ID NO: 105564 - DNA, 253 bp, Homo sapiens
cctggaaggcttcctggaagaggaggcatttgagcttgactttgaagaatggagaggcttctagcaagcagagatggaatcatacaggaaggaagatggcctgggggagggaagtacagcaggcaactggagggagggattcttctttctgttcctcctaagtatcaggttcccctgacgcagagtcttggcacatgctgttccctctgcctggaaaggctttcttatcccattcttccttcaggcctcagct

SEQ ID NO: 105565 - DNA, 114 bp, Homo sapiens
tgctcagcattggggagggcggtttctgggagggaaccgtgaaaggccgcacgggctggttcccggccgactgcgtggaggaagtgcagatgaggcagcatgacacacggcctg

SEQ ID NO: 105566 - DNA, 373 bp, Homo sapiens
tctaaagatcaccacccattcttgatgactatggatagacagactgtcaggacagtactcaccaagttttgaatttgtctacatttttgcagattatccctctggatcagagagagagagagagaacaatttaagaccattttttcccattttataactttttaattcattcactccacaaatattcatttaagacccattacatgctgacaatgtgggcaacaagttatcactgtcccataatttctcaaaggagaaataagatcttgtattactttaaaataacaattttttttgagacagagcaagactctgtctcaaaaaaaaaattatgtgaaaccccatctctgttagaaatacaaaaattaactgg

SEQ ID NO: 105567 - DNA, 339 bp, Homo sapiens
tgagacggagtcttgctctgtcatccaggctagagtgcagtggcacgatcttgcctcagtgcaacctccacctccctggttaggtcaagcaattcctctgcctcagcctcccgagtagctgggattacaggtgcatgccactgtgcccggctaatttttttgtgtatttttagtagagacagggtttcactgccgaagagggtggattgcctgggctcaggagttctttcccttcttataaggagatagtcctatcaaattagagtgccacccttatgacctcatttaacattaagtatctcctaaaggctccatctctagctatcatcactttggtag

SEQ ID NO: 105568 - DNA, 416 bp, Homo sapiens
tttagtcttgagtgactttcaggcctgggcgagtcaggcttgctcagtattctccagtgcaatgggagtatagacgatgatgcgccccgccaatagagaccactacatcattatccccaaagtggtaaaatactcttcctggaattttgagtctttttcctgtgtgaatcttctgagcaaaatctcagaaccaaaatagtgatcatcaagtctaatgtagaaaattaaagcctctctcttttttttgggggggaacatcttaagttgatttagaatttttgtacacaatattcgtctgtggttgaaagggggcacgctgaggtcaagtgatgtagtgttttccatttttccatatgagtctcacagtgtgcgataaaagcaaactcctttattttgtaagtctgcaagaatttctg

SEQ ID NO: 105569 - DNA, 517 bp, Homo sapiens
gctcagacctagtgaactccacggcctggggcgggaggctgtgcccaggctggcctggcctctccaggtgagctcctggcggcaggagggggcagggccgccgggagctctgagctaattcggaagagtaggaagccgatgacgtcactgggcacgtgggcgagctacgcctccgccggttgccatggcagcggcagtctctccgcggctccccggggacacctgctggtcggaggcgccaggactttcattcatgagagaggacggacaggcccgcccttgaggcctcccagggggcggggcgggggaataaccggcttcagtgccggacagccctggtttggacttagttctgctgcttcctggccgcgaggacttggccaaattagctaatctctgtcagcccctttcctcctgagacagcgacacgggaacagtccagttcatggggccagaggaatgaatcaaagccccgagctcagtgctgcaggcactgggcgctccacacgtgggccgt

SEQ ID NO: 105570 - DNA, 143 bp, Homo sapiens
taaaattctaaaacattctatcatgccattcagcataaaaacaacgtggcaaacattctcaaagatgaaataaatcagagctaatagcacacctgagcttatctagagcagttatataataatacatcttgccagctacaaaa

SEQ ID NO: 105571 - DNA, 377 bp, Homo sapiens
gaactagctcttcctacaataaaatgtgaggtggtgagcttcctgccactggaggcactgaacaaatgctacggggaaaacaaactgagtatttcctgaagattctgaatagaaggctgtgtttggagtttgatgctttgaaagctcaagaaatgattctcagacacagcggagtttggggacatcaagggctctgagtgcattttaaagcagcccaggagagagacaaagcaagaccataatgaaacaccccacccagtcttagagtttgagctacagcacggtgatcatgagcagactccaaacccaaatcctgatactgtcacctgctagctgtgtaaccctagaaaagttacaaaacctctttgggcctcagt

SEQ ID NO: 105572 - DNA, 414 bp, Homo sapiens
tactactactactactaaattcgcggccgcgtcgactcaaagtggccgttggaaccagtttgtgggttaaggattttagtgtagtggcttgtacccaagacttttaaaaaatggaatcagcggccaggcacagtcgctcaggcctgtaatcccagcactttgggaggccgaggcaggcagatcacgaggtcaagagatcaaaatcatcctggccaacatggtgaaaccccatctctactaaaaatacaaaaattagctgggcatggtggcgcacacctgtagtcccagctacgtgggaggctaaggcaggaaaatcacttgaacccgggaggcagaggttgcagtgagccaagatcacaccactgcactccagcctggtgtgagatggagtctcacgtcgacgcggccgcgaat

SEQ ID NO: 105573 - DNA, 764 bp, Homo sapiens
gtagtcccagctacctgggaagctgaggtgagagaattgcttgaacttgggaggcagaggttacagtgatctgagatcatgccactgctctacatcctgggcaacagaggggagactccatctcaaaaaataaataaatcaaaagtaaaataaaattactttttaattaagagaaacctcccattgttggatggactgtgattattgcagtctatggcttgccatggtagcttacatgctcactctttcctccagtcttttttttctggaggttggtctgtttccctttcaaaaggtcctcagtggtctctggaggccagaggaaatatcctaaaatacattcattacaaattccatactttaaagtttatttagaccagtcattttcaaagtggccgttggaaccagtttgtgggttaaggattttagtgtagtggcttgtacccaagacttttaaaaaatggaatcagcggccaggcacagtcgctcaggcctgtaatcccagcactttgggaggccgaggcaggcagatcacgaggtcaagagatcaaaatcatcctggccaacatggtgaaaccccatctctactaaaaatacaaaaattagctgggcatggtggcgcacacctgtagtcccagctacgtgggaggctaaggcaggaaaatcacttgaacccgggaggcagaggttgcagtgagccaagatcacaccactgcactccagcctggtgtgagatggagtctcacgtcgacgcggccgcgaat

SEQ ID NO: 105574 - DNA, 368 bp, Homo sapiens
tccccctggcccaaatattttattcctttgaatattgccctcctatttgtcagttactgttatgatgaagttaattgaagtatttacaaaacttaaaacatttaatctttattatattcccaaatgttaaattaatcagttttaaaattctatatctggaaatttcatgtgtgtggtgggggaaaatttagcttttggctttaacatagcttgctgatttttttgctgtgtaatgctttcacctctccactgtgaatcctttctgtgaaagccaggggagaaagatttagaattttaaaaaagtacttaatagagccttggtaaaagtgactctaaaaataaagttcagtagatgcataaaaaaaaaa

SEQ ID NO: 105575 - DNA, 363 bp, Homo sapiens
tgtctcccctctgtgtgacggggggagtgggtggacgggggatgccccgagctatcccgtcaccgtggctgtgtggactgccccccacgtcgccgcagcgcctctgcttctgctcgcagccaccgccgctcggaagcttgttcggtttgctccaccagccacttgacaatgacctggatatccaacccccccagcctgaggagtcccccgcgggccatttctgaaggccctgcggagccctaagccacgcacggcagtgactggacatggccaaggccagctctggggcctcccctgctgtcaggcacaccccagaagtcaggggtccttgaagcccctacgaagcccagcccggggtcccct

SEQ ID NO: 105576 - DNA, 202 bp, Homo sapiens
ggcggaggaaagtgctgtgagattggggtctgaagggacctggcggggtggagagaggctgaggggagagggcagaataagtctgacgatggaaaagtccagggatcggggagacattgaagggagtcggggagggggtcccagacccggcaagaagtctgacccggagagttccagggtcagaccagaccccgaggcgagt

SEQ ID NO: 105577 - DNA, 1136 bp, Homo sapiens
atagaagcagagagcctgcaagagtcaaggagccctagggtgagggtaagagttctttggggcctgaagagaacttggcttatggagatccacaaaccctgagacgaaaggcagttgtctgaaggaatgttcctgggtcgaaggtctctctggccttcagggtgcttcaggggaaatgaagagtggggccaggtcttccgtagttctgagactgtgtggattctagcctttgtagatgaggagattctcccagtgatgctcccactgcccccaacagaggactgacagcttgcagactggttctgctgctgaagatgttgcagcaacctgaactcagccctaagggtgaatggagccgtagccagcaaagggaaaattttagttgcacacttcactggacccagcaacagagaggaagcacagggagagtgctcagaacaggttgcccgggcagccagcgttataggcactggcgtgaggcaaagtcagctagttatagcaatacaacttcgatctcagagctggctgacattcagtattaagtaaaaaggacattctgcaactaaaaccatgagtttcaattttaaacaatcaggactgggcacggtggctcacagtcccagcactttgggaggctgagataggaggatcacgtaaggccaggagtttgagaacagcctgggtgacatagtaagaccccatctacaaaaaaaataataaaattatcaaataaataatcaggatgggatactcttgaaaacaaaattagtgacttggaaaggtacttggaggaaatattccaaaacaaaaacccaaaatatacagattaaggctgtgagggaaaagttaaggaactcagaagacagattcagaagattcagcatttggggatgagaacatggaagagttaattaatattcatctgaggaagtgaaaaaaaattgtataaccaaaatgatggtaaaaaatgaaatgattaaagataaaagctagaatgaatgacctagaagataaaatagtcacaaggattaataaatacaaaaactgattatttgaaagatccagtgaaatcagttaactcttttcttgcctaaggaaaaaatatatatatacaaataagaaatgagaaagaacat

SEQ ID NO: 105578 - DNA, 499 bp, Homo sapiens
cgcctcttgataagtataaaaatttgacacctcttttaatttcaaaataaattaagtattctgaccaaaagcaaacccagtatttcacatagtattaaacataaattaaacttggacaagaaatttggattgtgtctctcagaccagtgattttcagatttgagtgagcatgagaatcacctggaaaacttaggaaaacacagattgctgggctctacttccacaatttgtttttcagtaagtctggggtggggcgtgacaatgtgaatttctaacacattcccaagtgatgttgatgctctcctttggggaccactgccctgggagtctcatcctttcctctatcttagttgttgagaaaagtgtgggcacctttggaggtctagattcagaagcccacatcataggtgcccgatctgttctgttattcccggtgttgttatatttgctgttagcaacaggaagtcggtgtctaaagctggactagtaagcaggcctt

SEQ ID NO: 105579 - DNA, 382 bp, Homo sapiens
aggttgtacctcaggttccccaaagcacagtggaacaaatgacttttgtgtcttcttgctgaaaatctagaaggaatttgttcttaagatatcagggcctaggccgggcgcggtggctcacacctgtaatcccaggactttgtgaggctgacgcgggtggatcacgaggtcaggagatcgagaccatcctggctaacacggtgaaaccctgtctctactaaaaatacaaaaaattagccaggcatggcagcacgcacctgtagttccagctactcggaatgctgaggcaggagaatcgcttgaacccgggaagcagaggttgcagtgagctgagatctcaccactgcactccagcctgggtgacagagcaagactctgtctc

SEQ ID NO: 105580 - DNA, 656 bp, Homo sapiens
  misc_feature (16)..(17): n is a, c, g, or t
tcctgttagccgcgtnnacataggaccgcgccccagtcaatggaagggtgcaaattaccagtgtcctatgatgtgctaaaagaaagcagacacacagcacattgtctcctctagccacacagacacttgcccaggtgatcatattttctcggcacagatttctttatcacttataaagaacctacatttaaagactacaaaactctaaaaccatgacacttctctatttcacaaaagaaatttctgtcttaatatctactggtttagccaataaagtagactaatgaaaaatttaaaaatacttatgtatccttaatgatgatgaagtcctttggggcttcagaatattcatctttacaggttatccctgctgtagaatttcaatgataacttgcgtggaatagctgtaatcttttataaatagtgtttttttagtgtttgaatttttactatcatacagtaagaaactctgctgtttcctgtcaaaacctttcatcagactatgaacatgacagtttcctgttttcttattaactatactgcatttttatgctttattctttgtaaattgtataataacttatcgctttccttttctcattactaaatgtttttgggggaccagcattgtttaatacacacagagaaattctaaa

SEQ ID NO: 105581 - DNA, 320 bp, Homo sapiens
ctggacctgtctttccctactctagcccttgtgatgggcacaggcaactggggcacacagcacctgccgtggagcagttcagggtgttgtgaggaatctgaatggaaagtaatgaaacaagtgtctttgcctcctctgtagttatgtgcggtcttacactattttacatggtcactatcagcttagttgtttgtcacttgttggtgactgctgtaaggtagatttgagatgtccagggactgcagagctgcctgggatatgactggcattgacacacttgcttgatctcacagcagttgccatggcaggtcaggttgcat

SEQ ID NO: 105582 - DNA, 334 bp, Homo sapiens
tgcgtaagtatgcatattaactatactcttgctagtttctgcaaacctagagatccttaaacaaatataagacaatgacttgagaaagatcgctgagaatatggtaattcactgctccctgccacttgattctttctgtgtttccaggcaaactgtctataataaaacattctggagccagtcactttatttttgagatgagaaagcagaggctctgataactgaagtgactttcccaatatgagagacggtatactgctaatggttaaatacaaggactctagagcctgggttcaaattcagagtctgccacttattactagctatacatcac

SEQ ID NO: 105583 - DNA, 296 bp, Homo sapiens
tcctgggcatcggggatggggtttggggccgaggaggggatggagaccagggtcttgtggtagtttggtgggatcctcagaaggtgtggctctcccccttctgaggacgcaaaaactcccagagtttttggcgattgatgtgccacgtgtgccttgtgccctgtgctgggcgagtgtaggcacagctgtgcagacgacgcccttggcaaggctggagcctggacccctgcctggcagcagctgggcgaactggtgtcttctgcctgtgggcccagcttcacttcactagcttagcg

SEQ ID NO: 105584 - DNA, 766 bp, Homo sapiens
tttctgttaatcaaaaatgccatgaagaaagtagaagacaagccacagtgcaaaggacatatttgcaacacctttaaccaacaagtaattaatatccaaaatatatagagaataagaaatagaaaaagacaaataaccaaatagaaaatgtaaaagacacggacagggatttcttggaagagaacacaggtgagcatgtgaagaactgctccctcgcagtggtaaccaagacaatgcaaaatgagataccactttaatatccagtgcataagaagcctaactgtctgggtgcagtggctgatgcctgtaaccccagtgctttgggaggctgaggtgcgaggatctctggaggccaggagtttgagaccagcctctccaaaaagaaaaaaattagctgggcatggttgtgtgcttgcggtcccagctactcaggaggctgaggtgggaggatcccttgagcctgggagttcaaggctgcagtgagctatgatcgtgccactgcactcaagcctgggtgatagaacaactccatctccaaaaaatacgataaaaggcaaaatgtaaatttcagatgaacaactgtaaaaatttaaagtccaaagtaattcaataaaaccaaaatattttatgaaaatgagactgaggctgggtgcggtggctcacgcctttaattccagcactttgggaagccaaggcaggtggatcacctgaggtcaggagttcgagaccagcctgaccaacatggtgaaaccctgtctctactaaa

SEQ ID NO: 105585 - DNA, 424 bp, Homo sapiens
atacatgatttggctcttcccttctctatcctcatcttgatgcctcttaacttaggttttagaaatgtcaaactacttgcatttctttgaacaccatgttattttagaccttctgtctgccttgttctcccttcttgtccatctggcagctttccacacatttccaatgacctccctccattttagagtcactgtgccttgtaaacaccaggaattgctctacttctgaaataataaattcagatattttattatgtaaccatgacctcctttcctcttttactcagttattcatagtgtactttgtacccttttttaggttttctagtccatagatctacttttttgcaatcttccctttccaatcttgactgcgttcctgatcagcttagatgccatagtccatcactttaaccacactctt

SEQ ID NO: 105586 - DNA, 401 bp, Homo sapiens
aggctgccccaggactggctgccagccctcaaagagccccctgggtccccctggcacaactctctgcatgaagcccccagcaggagaagggctcactgccctgagcccgacacagtacgagacggaggcctcactgagtccaggccccgcactggccctcccctggatcctgagtccaggccccaagccagcccctcccctggatctccccagaccctctctgtgggaacccaggggctggagccgctcgactacatcttggtagctctcatttgggacctcatctttaatctcagcaactcagggatcaaagagaaaaggctgaggcaggcgaggccagggtttcttgctcaagcattcggatcattaaacaaacgaaaaaaatcaaagagaaggaaagc

SEQ ID NO: 105587 - DNA, 4659 bp, Homo sapiens
ccaggtcttaggcagccagagtcgagactgtcaccccaaagcctgtcgggtatcacccatgaccatgtcaggccctaaaaaataccctgaatcgctttcaagatcaggaaaacctcaccatgtgagactggagaatttcaggaagatggaaggcatggtccacccaatcctgcaccggaaaatgagcccgcagaacattggggcggcgcggccgatcaagcgcagcctggaggatttggaccttgtgattgcagggaaaaaggcccgggcagtgtctcccttagacccatccaaggaggtctctgggaaggagaaggcctctgagcaggagagtgaaggcagcaaagcagcgcacggtgggcattccgggggcggatcagaaggccacaagcttcccctctcctcccctatcttcccaggtctgtattccgggagcctgtgtaactcgggcctcaactccaggctcccggctgggtattctcattctctgcagtacttgaaaaaccagactgtgctttctccactcatgcagcccctggctttccactcgcttgtgatgcaaagaggaatttttacatcaccgacaaattctcagcagctgtacagacacttggctgcggctacacctgtaggaagttcatatggggaccttttgcataacagcatttaccctttagctgctataaatcctcaagctgcctttccatcttcccagctgtcatccgtgcaccccagtacaaaactgtaggctcagctctgcccagcagtccaaagcggcatggccaacagagcttcactccttacccaggagtgctggcttatagagttagaagtcagtatttcttctaatctgaggctatgatcagtcccagctgtaggggcccagaggggaggtgaacatgcctgatttttgtgggacaactctagcccacaaactgactggctggtgagtcttgactcccttccaacacagatgcccaggcacctccagatcattcacttcgcacgtgggccttgtgaagggatttgtgaatatccaggaagaacttagaggaccccatctgagttcggatggtcaggaaacaatctgggcaaaaaagaggcaggcatttcaaaggaaggggcaaggaagactggcaaacagatggcaagggatgcccctctttttcataaaactctccaaggttcaatcaatgcaatgtatagtgaaacttcaatagatctttcattttgacactattaaacaatccagagaagtaaacactgttaaattgactgtatatatttgcttcttaaaactacctgtatcactgtttgctcacctaatttatatacaggtagttccattttctcccagttccttctcgtctttttttttttttttttttttttttttattaaatggtattgcttttgtttgcaggtctttttgtttttgttttgtttttgaggctgactgactgtcctagttgttgtgtgtttgtaatttttccacatcttattttgagcagctttgggtggtaaagttattgtttacaaattgaagcaactgattctagtggaacaaatgaaaaagaaacagtcaagcacacaatagtgcaaagaacgttcctttgtagatccgcaacttaaggattttgttcctcataaatggcatagttgaaagagcttatacactgcttacccagccaaatgctttgctttgaagtattgggttctgtgaaaatattgagcattgtacttaccttatctaggctgtgaaactgtcctacataccagagaatcataaaaacaaaaacctcactggcagcaagctgccgaataacaacagagtctagaggacatatttgtgggctgcacagatattttaggaatttcagaaattagaacaggagccaaaatgatttacattggcgttggcactgattcctttaaatggtctgggaaagggggttgggaagaggatggagctcaactggccagaagaggagcagctgcagtcctgatagcttctctagcctcggtcttttgagtgataagtagtcatgttgttttcatccagttggtttcttgtcattcccaagaagaatctcccaggccacatctttggggataactgacatactggattagccttttcaaaagaaaagtcatcctatttggttttatggggtgtgagttttgtgtgtacacacacagaaacatgtaaggtggtttgggtcatgtttttaaccacctggcaatacagtccactttctggtttcttttattgtgggaagtaaatggtcaagctgctcaggcagtgaaaagatgtggagaatgtccgttgtcattcttgccactgtattccatttgctaccgagatataacattaaggtggacacattttctaactgtattaattaaaagtcaatggatacagagagtggattttctccccaagtcccatccctgctgaagaccgcttggatgaactccccaacccactgtgcccctcccgcaacactaccagtagactttagaaccatagttaactaagtcttttacctctgagatacttaattctgggaaaattggtgacaattttcaacttctaaataggtaactcgactgcaaaataatcaaaactgataacaatgaaactgcggctcttaaacaaagccatgcatgccgtgcatttgtattgaaatgtctccatgatatgaagccaaatattcaatgtaacatacttaatatccaaaggtggaaacaaaagaatgtagagatccagtgttaagagttccatttgcttcaattaattatttaccttcctgtggaataatatatatatatatatttaatagaaccatagatagactagtagaatttagattataaatgtgtgagtgcagattatcctgctattgcacaagctagaggggggaaaaatctcaattccagctggcaagatgctagccaggacacatataagaaagttgcactagattgaatggtcacagaatcggaggacatggaagaaaaaggaaacttcggtggttctgcagcagacatgggctaggtcatatgtggtttctatgagttcgtgtctcaaaaaaaaaaggagggggggcatctgtccccggtggagctcacctatttggaatatggggcatttgttttttccactgcaatgatttcagtctggtttcatcatgttggaattcgatcacaccattttcaaacaatgttaacatagtccagcttttgtttttctcatctcttctgagaggagactcactgtttctgtctgaggaagctcataccctcggcaaaacatcaggacaaataaagagaaatgggggtacgcattcccaacagaagcagtgtgttatttgttttaaaactctgaacagagatcttggaaatctttcaaaaagaccattgaattcttcattggctgagaacgacgttttaaaatgtcttaaataaggctttgtttgcattgtttgagttcaaggggccttattattgaatggaattgcacaagcctttctttgtgcaatcaaaccattgttattggtagttctgtaaaggaaactgtggaatcgaattggcagtggagtcataaatctatttactgagtgtggcttccaagaaatgttgcaattcaaaatgcactaagtctgtgatttattggagatttggagattctaaataatatttttaaaaaacttccatgcaacttctggtttaatgtttggcaactccacatgataaaaaaataaaaacagcccaaccgagtttcggaattaagtattcttctagtaagtgattcaaacttgtaatatttgccacaggactgacttatttatttactagctagaagctcttaagttcacttgtttatcagggcatatacagaagggtttgttaaaactcgatgttaactttacaactttctgacctggtgcatgaattctcaagtactgtatttcactgtgttggtgtgtctgatggaaatttcgaggtggtcccacaaaaatattttatgtagtgtgccttcaaagagaaccatttatttctcttcacttatcgtcccacaaagtcacatttggtggtggtcagccaagtcgcatctggtctagttttactcttgtcccaattttaaagagaaatgggaatgagtttgccctggtgagacccataccattgcaatgattatcttgagcacttaaagtccagtgttggctgttagtgtatttgatattctgcctgtctcctcatggttgaaatatgtctgaagaatagcagcataatctcttggctgtttatacttttttaaactttcctgtgttgtaaatattgtatacttttggtgattccagctatgtaacctctatgctctgtaaggtgattatttgtatatagcaacatggcccagtgatattatatagtttcccaatggagaggttattgagtaacctttgcattagtttaaacactaccagaagaatgctgagccaactataaacactcaattttgtatgttttccaaattgtacttattactgcttttgatactgtattacgtgccaatagtttcccaatcacatagcaggcaagagatattttgtactttttgatccactgtaatatttaataaaaaatgttactatctgt

SEQ ID NO: 105588 - DNA, 296 bp, Homo sapiens
atatacaaataatcaccttacagagcatagaggttacatagctggaatcaccaaaagtgatattatatagtttcccaatggagaggttattgagtaacctttgcattagtttaaacactaccagaagaatgctgagccaactataaacactcaattttgtatgttttccaaattgtacttattactgcttttgatactgtattacgtgccaatagtttcccaatcacatagcaggcaagagatattttgtactttttgatccactgtaatatttaataaaaaatgttactatctgt

SEQ ID NO: 105589 - DNA, 4997 bp, Homo sapiens
ccaggtcttaggcagccagagtcgagactgtcaccccaaagcctgtcgggtatcacccatgaccatgtcaggccctaaaaaataccctgaatcgctttcaagatcaggaaaacctcaccatgtgagactggagaatttcaggaagatggaaggcatggtccacccaatcctgcaccggaaaatgagcccgcagaacattggggcggcgcggccgatcaagcgcagcctggaggatttggaccttgtgattgcagggaaaaaggcccgggcagtgtctcccttagacccatccaaggaggtctctgggaaggagaaggcctctgagcaggagagtgaaggcagcaaagcagcgcacggtgggcattccgggggcggatcagaaggccacaagcttcccctctcctcccctatcttcccaggtctgtattccgggagcctgtgtaactcgggcctcaactccaggctcccggctgggtattctcattctctgcagtacttgaaaaaccagactgtgctttctccactcatgcagcccctggctttccactcgcttgtgatgcaaagaggaatttttacatcaccgacaaattctcagcagctgtacagacacttggctgcggctacacctgtaggaagttcatatggggaccttttgcataacagcatttaccctttagctgctataaatcctcaagctgcctttccatcttcccagctgtcatccgtgcaccccagtacaaaactgtaggctcagctctgcccagcagtccaaagcggcatggccaacagagcttcactccttacccaggagtgctggcttatagagttagaagtcagtatttcttctaatctgaggctatgatcagtcccagctgtaggggcccagaggggaggtgaacatgcctgatttttgtgggacaactctagcccacaaactgactggctggtgagtcttgactcccttccaacacagatgcccaggcacctccagatcattcacttcgcacgtgggccttgtgaagggatttgtgaatatccaggaagaacttagaggaccccatctgagttcggatggtcaggaaacaatctgggcaaaaaagaggcaggcatttcaaaggaaggggcaaggaagactggcaaacagatggcaagggatgcccctctttttcataaaactctccaaggttcaatcaatgcaatgtatagtgaaacttcaatagatctttcattttgacactattaaacaatccagagaagtaaacactgttaaattgactgtatatatttgcttcttaaaactacctgtatcactgtttgctcacctaatttatatacaggtagttccattttctcccagttccttctcgtctttttttttttttttttttttttttttattaaatggtattgcttttgtttgcaggtctttttgtttttgttttgtttttgaggctgactgactgtcctagttgttgtgtgtttgtaatttttccacatcttattttgagcagctttgggtggtaaagttattgtttacaaattgaagcaactgattctagtggaacaaatgaaaaagaaacagtcaagcacacaatagtgcaaagaacgttcctttgtagatccgcaacttaaggattttgttcctcataaatggcatagttgaaagagcttatacactgcttacccagccaaatgctttgctttgaagtattgggttctgtgaaaatattgagcattgtacttaccttatctaggctgtgaaactgtcctacataccagagaatcataaaaacaaaaacctcactggcagcaagctgccgaataacaacagagtctagaggacatatttgtgggctgcacagatattttaggaatttcagaaattagaacaggagccaaaatgatttacattggcgttggcactgattcctttaaatggtctgggaaagggggttgggaagaggatggagctcaactggccagaagaggagcagctgcagtcctgatagcttctctagcctcggtcttttgagtgataagtagtcatgttgttttcatccagttggtttcttgtcattcccaagaagaatctcccaggccacatctttggggataactgacatactggattagccttttcaaaagaaaagtcatcctatttggttttatggggtgtgagttttgtgtgtacacacacagaaacatgtaaggtggtttgggtcatgtttttaaccacctggcaatacagtccactttctggtttcttttattgtgggaagtaaatggtcaagctgctcaggcagtgaaaagatgtggagaatgtccgttgtcattcttgccactgtattccatttgctaccgagatataacattaaggtggacacattttctaactgtattaattaaaagtcaatggatacagagagtggattttctccccaagtcccatccctgctgaagaccgcttggatgaactccccaacccactgtgcccctcccgcaacactaccagtagactttagaaccatagttaactaagtcttttacctctgagatacttaattctgggaaaattggtgacaattttcaacttctaaataggtaactcgactgcaaaataatcaaaactgataacaatgaaactgcggctcttaaacaaagccatgcatgccgtgcatttgtattgaaatgtctccatgatatgaagccaaatattcaatgtaacatacttaatatccaaaggtggaaacaaaagaatgtagagatccagtgttaagagttccatttgcttcaattaattatttaccttcctgtggaataatatatatatatatatttaatagaaccatagatagactagtagaatttagattataaatgtgtgagtgcagattatcctgctattgcacaagctagaggggggaaaaatctcaattccagctggcaagatgctagccaggacacatataagaaagttgcactagattgaatggtcacagaatcggaggacatggaagaaaaaggaaacttcggtggttctgcagcagacatgggctaggtcatatgtggtttctatgagttcgtgtctcaaaaaaaaaaggagggggggcatctgtccccggtggagctcacctatttggaatatggggcatttgttttttccactgcaatgatttcagtctggtttcatcatgttggaattcgatcacaccattttcaaacaatgttaacatagtccagcttttgtttttctcatctcttctgagaggagactcactgtttctgtctgaggaagctcataccctcggcaaaacatcaggacaaataaagagaaatgggggtacgcattcccaacagaagcagtgtgttatttgttttaaaactctgaacagagatcttggaaatctttcaaaaagaccattgaattcttcattggctgagaacgacgttttaaaatgtcttaaataaggctttgtttgcattgtttgagttcaaggggccttattattgaatggaattgcacaagcctttctttgtgcaatcaaaccattgttattggtagttctgtaaaggaaactgtggaatcgaattggcagtggagtcataaatctatttactgagtgtggcttccaagaaatgttgcaattcaaaatgcactaagtctgtgatttattggagatttggagattctaaataatatttttaaaaaacttccatgcaacttctggtttaatgtttggcaactccacatgataaaaaaataaaaacagcccaaccgagtttcggaattaagtattcttctagtaagtgattcaaacttgtaatatttgccacaggactgacttatttatttactagctagaagctcttaagttcacttgtttatcagggcatatacagaagggtttgttaaaactcgatgttaactttacaactttctgacctggtgcatgaattctcaagtactgtatttcactgtgttggtgtgtctgatggaaatttcgaggtggtcccacaaaaatattttatgtagtgtgccttcaaagagaaccatttatttctcttcacttatcgtcccacaaagtcacatttggtggtggtcagccaagtcgcatctggtctagttttactcttgtcccaattttaaagagaaatgggaatgagtttgccctggtgagacccataccattgcaatgattatcttgagcacttaaagtccagtgttggctgttagtgtatttgatattctgcctgtctcctcatggttgaaatatgtctgaagaatagcagcataatctcttggctgtttatacttttttaaactttcctgtgttgtaaatattgtatacttttggtgattccagctatgtaacctctatgctctgtaaggtgattatttgtatatagcaacatggcccagtgatattatatagtttcccaatggagaggttattgagtaacctttgcattagtttaaacactaccagaagaatgctgagccaactataaacactcaattttgtatgttttccaaattgtacttattactgcttttgatactgtattacgtgccaatagtttcccaatcacatagcaggcaagagatattttgtactttttgatccactgtaatatttaataaaaaatgttactatctgtaaaaaaaaaaaaaaaaaaaaaaaaaaaaaaaaaaaaaaaaaaaaaaaaaaaaaaaaaaaaaaaaaagaaaaaaaaaaaaaaaagcagaacaacaactcacttcccgagagacgagcggagaagcagaaacgagggcgggcagagaagggggggagccagcgcgaggaccaggagagaagaaaaacaaacaacggggggaaaacaagggtgggagaacacacctaaaagagaaaaagccacaaaagaaaacaagaaaagagaaaaaaaaaaagcgcaaagaaagaaaacaacacaacaacgagaaagaaaagagcgccacacaaaaaaaggaagaagag

SEQ ID NO: 105590 - DNA, 4709 bp, Homo sapiens
  misc_feature (4578)..(4578): n is a, c, g, or t
  misc_feature (4580)..(4580): n is a, c, g, or t
  misc_feature (4592)..(4592): n is a, c, g, or t
  misc_feature (4595)..(4595): n is a, c, g, or t
  misc_feature (4608)..(4608): n is a, c, g, or t
  misc_feature (4616)..(4616): n is a, c, g, or t
ccaggtcttaggcagccagagtcgagactgtcaccccaaagcctgtcgggtatcacccatgaccatgtcaggccctaaaaaataccctgaatcgctttcaagatcaggaaaacctcaccatgtgagactggagaatttcaggaagatggaaggcatggtccacccaatcctgcaccggaaaatgagcccgcagaacattggggcggcgcggccgatcaagcgcagcctggaggatttggaccttgtgattgcagggaaaaaggcccgggcagtgtctcccttagacccatccaaggaggtctctgggaaggagaaggcctctgagcaggagagtgaaggcagcaaagcagcgcacggtgggcattccgggggcggatcagaaggccacaagcttcccctctcctcccctatcttcccaggtctgtattccgggagcctgtgtaactcgggcctcaactccaggctcccggctgggtattctcattctctgcagtacttgaaaaaccagactgtgctttctccactcatgcagcccctggctttccactcgcttgtgatgcaaagaggaatttttacatcaccgacaaattctcagcagctgtacagacacttggctgcggctacacctgtaggaagttcatatggggaccttttgcataacagcatttaccctttagctgctataaatcctcaagctgcctttccatcttcccagctgtcatccgtgcaccccagtacaaaactgtaggctcagctctgcccagcagtccaaagcggcatggccaacagagcttcactccttacccaggagtgctggcttatagagttagaagtcagtatttcttctaatctgaggctatgatcagtcccagctgtaggggcccagaggggaggtgaacatgcctgatttttgtgggacaactctagcccacaaactgactggctggtgagtcttgactcccttccaacacagatgcccaggcacctccagatcattcacttcgcacgtgggccttgtgaagggatttgtgaatatccaggaagaacttagaggaccccatctgagttcggatggtcaggaaacaatctgggcaaaaaagaggcaggcatttcaaaggaaggggcaaggaagactggcaaacagatggcaagggatgcccctctttttcataaaactctccaaggttcaatcaatgcaatgtatagtgaaacttcaatagatctttcattttgacactattaaacaatccagagaagtaaacactgttaaattgactgtatatatttgcttcttaaaactacctgtatcactgtttgctcacctaatttatatacaggtagttccattttctcccagttccttctcgtctttttttttttttttttttttttttttattaaatggtattgcttttgtttgcaggtctttttgtttttgttttgtttttgaggctgactgactgtcctagttgttgtgtgtttgtaatttttccacatcttattttgagcagctttgggtggtaaagttattgtttacaaattgaagcaactgattctagtggaacaaatgaaaaagaaacagtcaagcacacaatagtgcaaagaacgttcctttgtagatccgcaacttaaggattttgttcctcataaatggcatagttgaaagagcttatacactgcttacccagccaaatgctttgctttgaagtattgggttctgtgaaaatattgagcattgtacttaccttatctaggctgtgaaactgtcctacataccagagaatcataaaaacaaaaacctcactggcagcaagctgccgaataacaacagagtctagaggacatatttgtgggctgcacagatattttaggaatttcagaaattagaacaggagccaaaatgatttacattggcgttggcactgattcctttaaatggtctgggaaagggggttgggaagaggatggagctcaactggccagaagaggagcagctgcagtcctgatagcttctctagcctcggtcttttgagtgataagtagtcatgttgttttcatccagttggtttcttgtcattcccaagaagaatctcccaggccacatctttggggataactgacatactggattagccttttcaaaagaaaagtcatcctatttggttttatggggtgtgagttttgtgtgtacacacacagaaacatgtaaggtggtttgggtcatgtttttaaccacctggcaatacagtccactttctggtttcttttattgtgggaagtaaatggtcaagctgctcaggcagtgaaaagatgtggagaatgtccgttgtcattcttgccactgtattccatttgctaccgagatataacattaaggtggacacattttctaactgtattaattaaaagtcaatggatacagagagtggattttctccccaagtcccatccctgctgaagaccgcttggatgaactccccaacccactgtgcccctcccgcaacactaccagtagactttagaaccatagttaactaagtcttttacctctgagatacttaattctgggaaaattggtgacaattttcaacttctaaataggtaactcgactgcaaaataatcaaaactgataacaatgaaactgcggctcttaaacaaagccatgcatgccgtgcatttgtattgaaatgtctccatgatatgaagccaaatattcaatgtaacatacttaatatccaaaggtggaaacaaaagaatgtagagatccagtgttaagagttccatttgcttcaattaattatttaccttcctgtggaataatatatatatatatatttaatagaaccatagatagactagtagaatttagattataaatgtgtgagtgcagattatcctgctattgcacaagctagaggggggaaaaatctcaattccagctggcaagatgctagccaggacacatataagaaagttgcactagattgaatggtcacagaatcggaggacatggaagaaaaaggaaacttcggtggttctgcagcagacatgggctaggtcatatgtggtttctatgagttcgtgtctcaaaaaaaaaaggagggggggcatctgtccccggtggagctcacctatttggaatatggggcatttgttttttccactgcaatgatttcagtctggtttcatcatgttggaattcgatcacaccattttcaaacaatgttaacatagtccagcttttgtttttctcatctcttctgagaggagactcactgtttctgtctgaggaagctcataccctcggcaaaacatcaggacaaataaagagaaatgggggtacgcattcccaacagaagcagtgtgttatttgttttaaaactctgaacagagatcttggaaatctttcaaaaagaccattgaattcttcattggctgagaacgacgttttaaaatgtcttaaataaggctttgtttgcattgtttgagttcaaggggccttattattgaatggaattgcacaagcctttctttgtgcaatcaaaccattgttattggtagttctgtaaaggaaactgtggaatcgaattggcagtggagtcataaatctatttactgagtgtggcttccaagaaatgttgcaattcaaaatgcactaagtctgtgatttattggagatttggagattctaaataatatttttaaaaaacttccatgcaacttctggtttaatgtttggcaactccacatgataaaaaaataaaaacagcccaaccgagtttcggaattaagtattcttctagtaagtgattcaaacttgtaatatttgccacaggactgacttatttatttactagctagaagctcttaagttcacttgtttatcagggcatatacagaagggtttgttaaaactcgatgttaactttacaactttctgacctggtgcatgaattctcaagtactgtatttcactgtgttggtgtgtctgatggaaatttcgaggtggtcccacaaaaatattttatgtagtgtgccttcaaagagaaccatttatttctcttcacttatcgtcccacaaagtcacatttggtggtggtcagccaagtcgcatctggtctagttttactcttgtcccaattttaaagagaaatgggaatgagtttgccctggtgagacccataccattgcaatgattatcttgagcacttaaagtccagtgttggctgttagtgtatttgatattctgcctgtctcctcatggttgaaatatgtctgaagaatagcagcataatctcttggctgtttatacttttttaaactttcctgtgttgtaaatattgtatacttttggtgattccagctatgtaacctctatgctctgtaaggtgattatttgtatatagcaacatggcccagtgatattatatagtttcccaatggagaggttattgagtaacctttgcattagtttaaacactaccagaagaatgctgagccaactataaacactcaattttgtatgttttccaaattgtacttattactgcttttgatactgtattacgtgccaatanangttccatactgnggnagaattggcttgnccggtttntaaagtctctgttcaaaaaacaaaaaattcggcggcgaagtaaaatgggggaaaaaggaatacagtgagagggtcaacggggaagagtaaaag

SEQ ID NO: 105591 - DNA, 3966 bp, Homo sapiens
ccaggtcttaggcagccagagtcgagactgtcaccccaaagcctgtcgggtatcacccatgaccatgtcaggccctaaaaaataccctgaatcgctttcaagatcaggaaaacctcaccatgtgagactggagaatttcaggaagatggaaggcatggtccacccaatcctgcaccggaaaatgagcccgcagaacattggggcggcgcggccgatcaagcgcagcctggaggatttggaccttgtgattgcagggaaaaaggcccgggcagtgtctcccttagacccatccaaggaggtctctgggaaggagaaggcctctgagcaggagagtgaaggcagcaaagcagcgcacggtgggcattccgggggcggatcagaaggccacaagcttcccctctcctcccctatcttcccaggtctgtattccgggagcctgtgtaactcgggcctcaactccaggctcccggctgggtattctcattctctgcagtacttgaaaaaccagactgtgctttctccactcatgcagcccctggctttccactcgcttgtgatgcaaagaggaatttttacatcaccgacaaattctcagcagctgtacagacacttggctgcggctacacctgtaggaagttcatatggggaccttttgcataacagcatttaccctttagctgctataaatcctcaagctgcctttccatcttcccagctgtcatccgtgcaccccagtacaaaactgtaggctcagctctgcccagcagtccaaagcggcatggccaacagagcttcactccttacccaggagtgctggcttatagagttagaagtcagtatttcttctaatctgaggctatgatcagtcccagctgtaggggcccagaggggaggtgaacatgcctgatttttgtgggacaactctagcccacaaactgactggctggtgagtcttgactcccttccaacacagatgcccaggcacctccagatcattcacttcgcacgtgggccttgtgaagggatttgtgaatatccaggaagaacttagaggaccccatctgagttcggatggtcaggaaacaatctgggcaaaaaagaggcaggcatttcaaaggaaggggcaaggaagactggcaaacagatggcaagggatgcccctctttttcataaaactctccaaggttcaatcaatgcaatgtatagtgaaacttcaatagatctttcattttgacactattaaacaatccagagaagtaaacactgttaaattgactgtatatatttgcttcttaaaactacctgtatcactgtttgctcacctaatttatatacaggtagttccattttctcccagttccttctcgtctttttttttttttttttttttttttttattaaatggtattgcttttgtttgcaggtctttttgtttttgttttgtttttgaggctgactgactgtcctagttgttgtgtgtttgtaatttttccacatcttattttgagcagctttgggtggtaaagttattgtttacaaattgaagcaactgattctagtggaacaaatgaaaaagaaacagtcaagcacacaatagtgcaaagaacgttcctttgtagatccgcaacttaaggattttgttcctcataaatggcatagttgaaagagcttatacactgcttacccagccaaatgctttgctttgaagtattgggttctgtgaaaatattgagcattgtacttaccttatctaggctgtgaaactgtcctacataccagagaatcataaaaacaaaaacctcactggcagcaagctgccgaataacaacagagtctagaggacatatttgtgggctgcacagatattttaggaatttcagaaattagaacaggagccaaaatgatttacattggcgttggcactgattcctttaaatggtctgggaaagggggttgggaagaggatggagctcaactggccagaagaggagcagctgcagtcctgatagcttctctagcctcggtcttttgagtgataagtagtcatgttgttttcatccagttggtttcttgtcattcccaagaagaatctcccaggccacatctttggggataactgacatactggattagccttttcaaaagaaaagtcatcctatttggttttatggggtgtgagttttgtgtgtacacacacagaaacatgtaaggtggtttgggtcatgtttttaaccacctggcaatacagtccactttctggtttcttttattgtgggaagtaaatggtcaagctgctcaggcagtgaaaagatgtggagaatgtccgttgtcattcttgccactgtattccatttgctaccgagatataacattaaggtggacacattttctaactgtattaattaaaagtcaatggatacagagagtggattttctccccaagtcccatccctgctgaagaccgcttggatgaactccccaacccactgtgcccctcccgcaacactaccagtagactttagaaccatagttaactaagtcttttacctctgagatacttaattctgggaaaattggtgacaattttcaacttctaaataggtaactcgactgcaaaataatcaaaactgataacaatgaaactgcggctcttaaacaaagccatgcatgccgtgcatttgtattgaaatgtctccatgatatgaagccaaatattcaatgtaacatacttaatatccaaaggtggaaacaaaagaatgtagagatccagtgttaagagttccatttgcttcaattaattatttaccttcctgtggaataatatatatatatatatttaatagaaccatagatagactagtagaatttagattataaatgtgtgagtgcagattatcctgctattgcacaagctagaggggggaaaaatctcaattccagctggcaagatgctagccaggacacatataagaaagttgcactagattgaatggtcacagaatcggaggacatggaagaaaaaggaaacttcggtggttctgcagcagacatgggctaggataaaaaaataaaaacagcccaaccgagtttcggaattaagtattcttctagtaagtgattcaaacttgtaatatttgccacaggactgacttatttatttactagctagaagctcttaagttcacttgtttatcagggcatatacagaagggtttgttaaaactcgatgttaactttacaactttctgacctggtgcatgaattctcaagtactgtatttcactgtgttggtgtgtctgatggaaatttcgaggtggtcccacaaaaatattttatgtagtgtgccttcaaagagaaccatttatttctcttcacttatcgtcccacaaagtcacatttggtggtggtcagccaagtcgcatctggtctagttttactcttgtcccaattttaaagagaaatgggaatgagtttgccctggtgagacccataccattgcaatgattatcttgagcacttaaagtccagtgttggctgttagtgtatttgatattctgcctgtctcctcatggttgaaatatgtctgaagaatagcagcataatctcttggctgtttatacttttttaaactttcctgtgttgtaaatattgtatacttttggtgattccagctatgtaacctctatgctctgtaaggtgattatttgtatatagcaacatggcccagtgatattatatagtttcccaatggagaggttattgagtaacctttgcattagtttaaacactaccagaagaatgctgagccaactataaacactcaattttgtatgttttccaaattgtacttattactgcttttgatactgtattacgtgccaatagtttcccaatcacatagcaggcaagagatattttgtactttttgatccactgtaatatttaataaaaaatgttactatctgt

SEQ ID NO: 105592 - DNA, 3663 bp, Homo sapiens
ccaggtcttaggcagccagagtcgagactgtcaccccaaagcctgtcgggtatcacccatgaccatgtcaggccctaaaaaataccctgaatcgctttcaagatcaggaaaacctcaccatgtgagactggagaatttcaggaagatggaaggcatggtccacccaatcctgcaccggaaaatgagcccgcagaacattggggcggcgcggccgatcaagcgcagcctggaggatttggaccttgtgattgcagggaaaaaggcccgggcagtgtctcccttagacccatccaaggaggtctctgggaaggagaaggcctctgagcaggagagtgaaggcagcaaagcagcgcacggtgggcattccgggggcggatcagaaggccacaagcttcccctctcctcccctatcttcccaggtctgtattccgggagcctgtgtaactcgggcctcaactccaggctcccggctgggtattctcattctctgcagtacttgaaaaaccagactgtgctttctccactcatgcagcccctggctttccactcgcttgtgatgcaaagaggaatttttacatcaccgacaaattctcagcagctgtacagacacttggctgcggctacacctgtaggaagttcatatggggaccttttgcataacagcatttaccctttagctgctataaatcctcaagctgcctttccatcttcccagctgtcatccgtgcaccccagtacaaaactgtaggctcagctctgcccagcagtccaaagcggcatggccaacagagcttcactccttacccaggagtgctggcttatagagttagaagtcagtatttcttctaatctgaggctatgatcagtcccagctgtaggggcccagaggggaggtgaacatgcctgatttttgtgggacaactctagcccacaaactgactggctggtgagtcttgactcccttccaacacagatgcccaggcacctccagatcattcacttcgcacgtgggccttgtgaagggatttgtgaatatccaggaagaacttagaggaccccatctgagttcggatggtcaggaaacaatctgggcaaaaaagaggcaggcatttcaaaggaaggggcaaggaagactggcaaacagatggcaagggatgcccctctttttcataaaactctccaaggttcaatcaatgcaatgtatagtgaaacttcaatagatctttcattttgacactattaaacaatccagagaagtaaacactgttaaattgactgtatatatttgcttcttaaaactacctgtatcactgtttgctcacctaatttatatacaggtagttccattttctcccagttccttctcgtctttttttttttttttttttttttttttattaaatggtattgcttttgtttgcaggtctttttgtttttgttttgtttttgaggctgactgactgtcctagttgttgtgtgtttgtaatttttccacatcttattttgagcagctttgggtggtaaagttattgtttacaaattgaagcaactgattctagtggaacaaatgaaaaagaaacagtcaagcacacaatagtgcaaagaacgttcctttgtagatccgcaacttaaggattttgttcctcataaatggcatagttgaaagagcttatacactgcttacccagccaaatgctttgctttgaagtattgggttctgtgaaaatattgagcattgtacttaccttatctaggctgtgaaactgtcctacataccagagaatcataaaaacaaaaacctcactggcagcaagctgccgaataacaacagagtctagaggacatatttgtgggctgcacagatattttaggaatttcagaaattagaacaggagccaaaatgatttacattggcgttggcactgattcctttaaatggtctgggaaagggggttgggaagaggatggagctcaactggccagaagaggagcagctgcagtcctgatagcttctctagcctcggtcttttgagtgataagtagtcatgttgttttcatccagttggtttcttgtcattcccaagaagaatctcccaggccacatctttggggataactgacatactggattagccttttcaaaagaaaagtcatcctatttggttttatggggtgtgagttttgtgtgtacacacacagaaacatgtaaggtggtttgggtcatgtttttaaccacctggcaatacagtccactttctggtttcttttattgtgggaagtaaatggtcaagctgctcaggcagtgaaaagatgtggagaatgtccgttgtcattcttgccactgtattccatttgctaccgagatataacattaaggtggacacattttctaactgtattaattaaaagtcaatggatacagagagtggattttctccccaagtcccatccctgctgaagaccgcttggatgaactccccaacccactgtgcccctcccgcaacactaccagtagactttagaaccatagttaactaagtcttttacctctgagatacttaattctgggaaaattggtgacaattttcaacttctaaataggtaactcgactgcaaaataatcaaaactgataacaatgaaactgcggctcttaaacaaagccatgcatgccgtgcatttgtattgaaatgtctccatgatatgaagccaaatattcaatgtaacatacttaatatccaaaggtggaaacaaaagaatgtagagatccagtgttaagagttccatttgcttcaattaattatttaccttcctgtggaataatatatatatatatatttaatagaaccatagatagactagtagaatttagattataaatgtgtgagtgcagattatcctgctattgcacaagctagaggggggaaaaatctcaattccagctggcaagatgctagccaggacacatatactgtatttcactgtgttggtgtgtctgatggaaatttcgaggtggtcccacaaaaatattttatgtagtgtgccttcaaagagaaccatttatttctcttcacttatcgtcccacaaagtcacatttggtggtggtcagccaagtcgcatctggtctagttttactcttgtcccaattttaaagagaaatgggaatgagtttgccctggtgagacccataccattgcaatgattatcttgagcacttaaagtccagtgttggctgttagtgtatttgatattctgcctgtctcctcatggttgaaatatgtctgaagaatagcagcataatctcttggctgtttatacttttttaaactttcctgtgttgtaaatattgtatacttttggtgattccagctatgtaacctctatgctctgtaaggtgattatttgtatatagcaacatggcccagtgatattatatagtttcccaatggagaggttattgagtaacctttgcattagtttaaacactaccagaagaatgctgagccaactataaacactcaattttgtatgttttccaaattgtacttattactgcttttgatactgtattacgtgccaatagtttcccaatcacatagcaggcaagagatattttgtactttttgatccactgtaatatttaataaaaaatgttactatctgt

SEQ ID NO: 105593 - DNA, 4317 bp, Homo sapiens
  misc_feature (4183)..(4183): n is a, c, g, or t
  misc_feature (4191)..(4191): n is a, c, g, or t
  misc_feature (4205)..(4205): n is a, c, g, or t
  misc_feature (4219)..(4219): n is a, c, g, or t
  misc_feature (4224)..(4224): n is a, c, g, or t
  misc_feature (4235)..(4235): n is a, c, g, or t
  misc_feature (4244)..(4244): n is a, c, g, or t
  misc_feature (4247)..(4247): n is a, c, g, or t
  misc_feature (4254)..(4254): n is a, c, g, or t
  misc_feature (4267)..(4267): n is a, c, g, or t
  misc_feature (4272)..(4272): n is a, c, g, or t
  misc_feature (4276)..(4276): n is a, c, g, or t
  misc_feature (4298)..(4298): n is a, c, g, or t
ccaggtcttaggcagccagagtcgagactgtcaccccaaagcctgtcgggtatcacccatgaccatgtcaggccctaaaaaataccctgaatcgctttcaagatcaggaaaacctcaccatgtgagactggagaatttcaggaagatggaaggcatggtccacccaatcctgcaccggaaaatgagcccgcagaacattggggcggcgcggccgatcaagcgcagcctggaggatttggaccttgtgattgcagggaaaaaggcccgggcagtgtctcccttagacccatccaaggaggtctctgggaaggagaaggcctctgagcaggagagtgaaggcagcaaagcagcgcacggtgggcattccgggggcggatcagaaggccacaagcttcccctctcctcccctatcttcccaggtctgtattccgggagcctgtgtaactcgggcctcaactccaggctcccggctgggtattctcattctctgcagtacttgaaaaaccagactgtgctttctccactcatgcagcccctggctttccactcgcttgtgatgcaaagaggaatttttacatcaccgacaaattctcagcagctgtacagacacttggctgcggctacacctgtaggaagttcatatggggaccttttgcataacagcatttaccctttagctgctataaatcctcaagctgcctttccatcttcccagctgtcatccgtgcaccccagtacaaaactgtaggctcagctctgcccagcagtccaaagcggcatggccaacagagcttcactccttacccaggagtgctggcttatagagttagaagtcagtatttcttctaatctgaggctatgatcagtcccagctgtaggggcccagaggggaggtgaacatgcctgatttttgtgggacaactctagcccacaaactgactggctggtgagtcttgactcccttccaacacagatgcccaggcacctccagatcattcacttcgcacgtgggccttgtgaagggatttgtgaatatccaggaagaacttagaggaccccatctgagttcggatggtcaggaaacaatctgggcaaaaaagaggcaggcatttcaaaggaaggggcaaggaagactggcaaacagatggcaagggatgcccctctttttcataaaactctccaaggttcaatcaatgcaatgtatagtgaaacttcaatagatctttcattttgacactattaaacaatccagagaagtaaacactgttaaattgactgtatatatttgcttcttaaaactacctgtatcactgtttgctcacctaatttatatacaggtagttccattttctcccagttccttctcgtctttttttttttttttttttttttttttattaaatggtattgcttttgtttgcaggtctttttgtttttgttttgtttttgaggctgactgactgtcctagttgttgtgtgtttgtaatttttccacatcttattttgagcagctttgggtggtaaagttattgtttacaaattgaagcaactgattctagtggaacaaatgaaaaagaaacagtcaagcacacaatagtgcaaagaacgttcctttgtagatccgcaacttaaggattttgttcctcataaatggcatagttgaaagagcttatacactgcttacccagccaaatgctttgctttgaagtattgggttctgtgaaaatattgagcattgtacttaccttatctaggctgtgaaactgtcctacataccagagaatcataaaaacaaaaacctcactggcagcaagctgccgaataacaacagagtctagaggacatatttgtgggctgcacagatattttaggaatttcagaaattagaacaggagccaaaatgatttacattggcgttggcactgattcctttaaatggtctgggaaagggggttgggaagaggatggagctcaactggccagaagaggagcagctgcagtcctgatagcttctctagcctcggtcttttgagtgataagtagtcatgttgttttcatccagttggtttcttgtcattcccaagaagaatctcccaggccacatctttggggataactgacatactggattagccttttcaaaagaaaagtcatcctatttggttttatggggtgtgagttttgtgtgtacacacacagaaacatgtaaggtggtttgggtcatgtttttaaccacctggcaatacagtccactttctggtttcttttattgtgggaagtaaatggtcaagctgctcaggcagtgaaaagatgtggagaatgtccgttgtcattcttgccactgtattccatttgctaccgagatataacattaaggtggacacattttctaactgtattaattaaaagtcaatggatacagagagtggattttctccccaagtcccatccctgctgaagaccgcttggatgaactccccaacccactgtgcccctcccgcaacactaccagtagactttagaaccatagttaactaagtcttttacctctgagatacttaattctgggaaaattggtgacaattttcaacttctaaataggtaactcgactgcaaaataatcaaaactgataacaatgaaactgcggctcttaaacaaagccatgcatgccgtgcatttgtattgaaatgtctccatgatatgaagccaaatattcaatgtaacatacttaatatccaaaggtggaaacaaaagaatgtagagatccagtgttaagagttccatttgcttcaattaattatttaccttcctgtggaataatatatatatatatatttaatagaaccatagatagactagtagaatttagattataaatgtgtgagtgcagattatcctgctattgcacaagctagaggggggaaaaatctcaattccagctggcaagatgctagccaggacacatataagaaagttgcactagattgaatggtcacagaatcggaggacatggaagaaaaaggaaacttcggtggttctgcagcagacatgggctaggtcatatgtggtttctatgagttcgtgtctcaaaaaaaaaaggagggggggcatctgtccccggtggagctcacctatttggaatatggggcatttgttttttccactgcaatgatttcagtctggtttcatcatgttggaattcgatcacaccattttcaaacaatgttaacatagtccagcttttgtttttctcatctcttctgagaggagactcactgtttctgtctgaggaagctcataccctcggcaaaacatcaggacaaataaagagaaatgggggtacgcattcccaacagaagcagtgtgttatttgttttaaaactctgaacagagatcttggaaatctttcaaaaagaccattgaattcttcattggctgagaacgacgttttaaaatgtcttaaataaggctttgtttgcattgtttgagttcaaggggccttattattgaatggaattgcacaagcctttctttgtgcaatcaaaccattgttattggtagttctgtaaaggaaactgtggaatcgaattggcagtggagtcataaatctatttactgagtgtggcttccaagaaatgttgcaattcaaaatgcactaagtctgtgatttattggagatttggagattctaaataatatttttaaaaaacttccatgcaacttctggtttaatgtttggcaactccacatgataaaaaaataaaaacagcccaaccgagtttcggaattaagtattcttctagtaagtgattcaaacttgtaatatttgccacaggactgacttatttatttactagctagaagctcttaagttcacttgtttatcagggcatatacagaagggtttgttaaaactcgatgttaactttacaactttctgacctggtgcatgaattctcaagtactgtatttcactgtgttggtgtgtctgatggaaatttcgaggtggtcccacaaaaatattttatgtagtgtgccttcaaagagaaccatttatttctcttcacttatcgtcccacaaagtcacatttggtggtggtcagccaagtcgcatctggtctagttttactcttgtcccaattttaaagagaaatgggaatgagtttgcccccggggggaggnccccaaanccattggcaatggntaaaccttggggcnccttnaaaggcccagngttgggccnggnaaggggnatttggaaatccngcccnggcnccccccaagggggtgaaaaaanggcccggaaggaaaacccg

SEQ ID NO: 105594 - DNA, 4138 bp, Homo sapiens
ccaggtcttaggcagccagagtcgagactgtcaccccaaagcctgtcgggtatcacccatgaccatgtcaggccctaaaaaataccctgaatcgctttcaagatcaggaaaacctcaccatgtgagactggagaatttcaggaagatggaaggcatggtccacccaatcctgcaccggaaaatgagcccgcagaacattggggcggcgcggccgatcaagcgcagcctggaggatttggaccttgtgattgcagggaaaaaggcccgggcagtgtctcccttagacccatccaaggaggtctctgggaaggagaaggcctctgagcaggagagtgaaggcagcaaagcagcgcacggtgggcattccgggggcggatcagaaggccacaagcttcccctctcctcccctatcttcccaggtctgtattccgggagcctgtgtaactcgggcctcaactccaggctcccggctgggtattctcattctctgcagtacttgaaaaaccagactgtgctttctccactcatgcagcccctggctttccactcgcttgtgatgcaaagaggaatttttacatcaccgacaaattctcagcagctgtacagacacttggctgcggctacacctgtaggaagttcatatggggaccttttgcataacagcatttaccctttagctgctataaatcctcaagctgcctttccatcttcccagctgtcatccgtgcaccccagtacaaaactgtaggctcagctctgcccagcagtccaaagcggcatggccaacagagcttcactccttacccaggagtgctggcttatagagttagaagtcagtatttcttctaatctgaggctatgatcagtcccagctgtaggggcccagaggggaggtgaacatgcctgatttttgtgggacaactctagcccacaaactgactggctggtgagtcttgactcccttccaacacagatgcccaggcacctccagatcattcacttcgcacgtgggccttgtgaagggatttgtgaatatccaggaagaacttagaggaccccatctgagttcggatggtcaggaaacaatctgggcaaaaaagaggcaggcatttcaaaggaaggggcaaggaagactggcaaacagatggcaagggatgcccctctttttcataaaactctccaaggttcaatcaatgcaatgtatagtgaaacttcaatagatctttcattttgacactattaaacaatccagagaagtaaacactgttaaattgactgtatatatttgcttcttaaaactacctgtatcactgtttgctcacctaatttatatacaggtagttccattttctcccagttccttctcgtctttttttttttttttttttttttttttattaaatggtattgcttttgtttgcaggtctttttgtttttgttttgtttttgaggctgactgactgtcctagttgttgtgtgtttgtaatttttccacatcttattttgagcagctttgggtggtaaagttattgtttacaaattgaagcaactgattctagtggaacaaatgaaaaagaaacagtcaagcacacaatagtgcaaagaacgttcctttgtagatccgcaacttaaggattttgttcctcataaatggcatagttgaaagagcttatacactgcttacccagccaaatgctttgctttgaagtattgggttctgtgaaaatattgagcattgtacttaccttatctaggctgtgaaactgtcctacataccagagaatcataaaaacaaaaacctcactggcagcaagctgccgaataacaacagagtctagaggacatatttgtgggctgcacagatattttaggaatttcagaaattagaacaggagccaaaatgatttacattggcgttggcactgattcctttaaatggtctgggaaagggggttgggaagaggatggagctcaactggccagaagaggagcagctgcagtcctgatagcttctctagcctcggtcttttgagtgataagtagtcatgttgttttcatccagttggtttcttgtcattcccaagaagaatctcccaggccacatctttggggataactgacatactggattagccttttcaaaagaaaagtcatcctatttggttttatggggtgtgagttttgtgtgtacacacacagaaacatgtaaggtggtttgggtcatgtttttaaccacctggcaatacagtccactttctggtttcttttattgtgggaagtaaatggtcaagctgctcaggcagtgaaaagatgtggagaatgtccgttgtcattcttgccactgtattccatttgctaccgagatataacattaaggtggacacattttctaactgtattaattaaaagtcaatggatacagagagtggattttctccccaagtcccatccctgctgaagaccgcttggatgaactccccaacccactgtgcccctcccgcaacactaccagtagactttagaaccatagttaactaagtcttttacctctgagatacttaattctgggaaaattggtgacaattttcaacttctaaataggtaactcgactgcaaaataatcaaaactgataacaatgaaactgcggctcttaaacaaagccatgcatgccgtgcatttgtattgaaatgtctccatgatatgaagccaaatattcaatgtaacatacttaatatccaaaggtggaaacaaaagaatgtagagatccagtgttaagagttccatttgcttcaattaattatttaccttcctgtggaataatatatatatatatatttaatagaaccatagatagactagtagaatttagattataaatgtgtgagtgcagattatcctgctattgcacaagctagaggggggaaaaatctcaattccagctggcaagatgctagccaggacacatataagaaagttgcactagattgaatggtcacagaatcggaggacatggaagaaaaaggaaacttcggtggttctgcagcagacatgggctaggtcatatgtggtttctatgagttcgtgtctcaaaaaaaaaaggagggggggcatctgtccccggtggagctcacctatttggaatatggggcatttgttttttccactgcaatgatttcagtctggtttcatcatgttggaattcgatcacaccattttcaaacaatgttaacatagtccagcttttgtttttctcatctcttctgagaggagactcactgtttctgtctgaggaagctcataccctcggcaaaacatcaggacaaataaagagaaatgggggtacgcattcccaacagaagcagtgtgttatttgttttaaaactctgaacagagatcttggaaatctttcaaaaagaccattgaattcttcattggctgagaacgacgttttaaaatgtcttaaataaggctttgtttgcattgtttgagttcaaggggccttattattgaatggaattgcacaagcctttctttgtgcaatcaaaccattgttattggtagttctgtaaaggaaactgtggaatcgaattggcagtggagtcataaatctatttactgagtgtggcttccaagaaatgttgcaattcaaaatgcactaagtctgtgatttattggagatttggagattctaaataatatttttaaaaaacttccatgcaacttctggtttaatgtttggcaactccacatgataaaaaaataaaaacagcccaaccgagtttcggaattaagtattcttctagtaagtgattcaaacttgtaatatttgccacaggactgacttatttatttactagctagaagctcttaagttcacttgtttatcagggcatatacagaagggtttgttaaaactcgatgttaactttacaactttctgacctggtgcatgaattctcaagtactgtatttcactgtgttggtgtgtctgatggaaatttcgaggtggtcccacaaaaatattttatgtagtgtgccttcaaagagaaccatttatttctcttcacttatcaaatccctccatatcaagcttatcgatccaaacgacctcgagggcggatccggatttcactcagc

SEQ ID NO: 105595 - DNA, 559 bp, Homo sapiens
tgagactgagtctcatttcgttgcccaggctggagtgcagtggcgtgatctcggctcactgcaacctccgccacttgggttcaagcaattctctgcctcagcctcctgaatagctgagattgcaggtgcccgccaccacgcccggctaatttttttgtatttttagtagagatggggtttcaccatcttgtccaggttgatattgaactcctgacctcatgatccacctgccttggcctcccaaagtcctgggattacaggcgtgagccaccgcgcctggcctgaattttgtttttttttagacacaggatcttgctgtgtcacccaggctggtcctggactcttggcctcaggcaatcctcttgactctgcctctcaaagtgctataggattacaggtgtgaaccaccatgcctggccaggcaaaaataattaaattcttcctttctggtgcagaaggtgaagctagtgtgtctgctcagtgggatcctgcaggcatcctctgcagctgttgtggaggtagatacagagcttccaggatgtgtatccaccttacctta

SEQ ID NO: 105596 - DNA, 260 bp, Homo sapiens
tgagaggcaaccacggagttgctgccactagaacaggacagggcacacctgcttaaggggagaaccctgctaacactggaatgagctgctttcgggctacccaccatgagcatctgacatgccacagaaccggttttatagacgagttttcttttgccaccgtcactgatctggctacacaggggctcggcctccactacggcagcttcagaggcggcagacgagcagctgagggcccgtgctacagacggagcagggcg

SEQ ID NO: 105597 - DNA, 1708 bp, Homo sapiens
gaaggaagaacagaaaagccttatggggctttatgagaaggtttttccattgtttagtgtgtttgcaaaaaggaattttatggaagtacctaaccaaagctgtgacagaagggtctccttggtcatgtggcattttccagctttccttggattttatgctacattaatttgccctggctgataaatggtgtttgaagaaatgtgaaattttgttactttgatttttattttaattcaagcttattaaaagcatcaagcattatatgccacactcagcattttcatagacatagtcattaggagaatctggacaaagtaatactcttgtagaaacggaagcatcttgctgtacttgaaagataactggactcagagctacttcactcctcacttgggcaaatgccgatatcactttgcttagctataaagtgccatcagtgggatggatcgtcttcacggtgaaccgtgttacacttctgcaattcctcaagttcatattaattaggaagtggcagagctaggacacaaaattcctaattcctgaagatagttagtctcctaattaagtgcttctcactatatgggatgccttctttaggaataagactttcctttaattttcaagttccacaacttctaaaattatttgctatctcgaagcagcagaatattgatcatttttctcagtttaggctaacacagtccacaccattaccacttaaataaagtaaccgaatgctaaatattatccttatcaaacatccatcactttgttgcttttatgagatgtagattgctaaaaacttttgagctagtagacgttacctttaagcatcaatgaatgcaaacagtgaagacctcaaagaagagttacctcattttctctacatgatctccaatgtagtctcagataaggcccatacatagttaaaagctggtaacagctctgaacagaagtatgtattaaatgtttcaaacttgtatatatttttgaatgcttttgtttttggagtgaatttttaatactctgtgttaaaagaaaaacattccatcttgtaggcagtgttcctcagtaaaaatctttgttgcattttcccatataaatgaatcacccttattaaaacaggaggagggagggatttgtggtgacctaccgctgccctccctttctaagagaagaggaggccatggggtatgataactaaatgaacatctctggaagttcctccgtctgatatgtgtattctgacataacagaatttcccaagacttctttgaggaaggctgtccacgcttcaggcaaagtttacccattattattatgattttgaatattccttgttcattacagtccagaaaatctgcagaagttctccatgttcagtggttgaccagaatctgattgttgcgctcaattaaagtgcttattatttagctaaaacaacttatatggaagttaattatttcaggaaatacataataagaccaaaaaaatcactggataatatgtagatatattttagttccattactattaatagcaattagataactctccctccccccattgaggtgagaatgggctcctagatacttggtggtcaatagaactgatttgattaactttcatttaactgtggttattgttacatctactgattttttcaaataaaaatttctagaaggctcagatttgactaaaaaaaaa

SEQ ID NO: 105598 - DNA, 417 bp, Homo sapiens
tgaggacacaagcactttgtagctgaagtgccaaaccaactagagagcctatggcagggtggcaactggctccctggaggtggcctccccaacccagacctataggagaggaagcaaatgttctagtcttgtggaatggtaaggggaaaaaactattgtactgttgggcttgggagagagtgaggtgcagcatgacacacacaggtataccccactctcccaggcacactcagcggagaccacacactaccctagtcacactgaagaaggcagcagcctgcttggtgagaaagcccagggtcatgtttctctcgactgagatctgcacagcctctcaggcagaccctcagggaatgggacttatgcttgggctgggcttattggtactcctagccccttgctaagccaagaacctaa

SEQ ID NO: 105599 - DNA, 752 bp, Homo sapiens
ccaaaatgttattattaaattataaagggggattaaaaactctaaattgtttttgtaatttatttacccaagaaagctcagctcagatgcagcatctggttgtcagcgaggtcctgctttttaaccaattttccagatggttgactgaggaacaaggaggtcaagtgacttgcccaaggtcacacagtaagtcagtggttagccccgcattggaacccaggatcctcctggctcccagtccttggctctaaccagtggaccacacagcctccctatccctgtacatgccagaatagaaaatataagaaggaatgtttttgtgttggcatttgaaaaaatgctttttagatttccttattttttttgagaaaaggtcctaagaccaaaacattccatcatttcaacttttcctaaacacccctcttttagtatatgtgtatgatcatttgaaaaaagattaagtgaaatgaggaattcagatttaagtatcaagtattataaatgtaaactgatatttcactcacatagaaaaatactacatcattttagaaagctattaaaggttttacaatactaaagtgattattataatctcaatttatactcaaaatactagtctctgaacattactaataattgtttcatataatttttttctaccttgaagtactctattctgtatatattaataattggtaagttgtcttccttgtgtcttaatcacactaacaattttacaaaatctaggacct

SEQ ID NO: 105600 - DNA, 350 bp, Homo sapiens
taagtagaagatgagaaatagcttgtatggaacagagaagtctttgtaccgatacatattcaactaaagatctgaaaatcaataatctcaggttttgaaaatagaatgctattcttataccatatgtttaatgtacatctgtataaggttaacaaaaatctattaccatctcactacttagtctgaaatggaaaacctagtgtttttaagtgatcatagataattcattaaagcgtaaggctcctacataataattattgcttgtcacttttgaatcaacaaatagatattatgatggatcagagaacttttgatatatccgtattaattatgattgtctcattaaatat

SEQ ID NO: 105601 - DNA, 358 bp, Homo sapiens
tcataattgtgtaattatccctaagtatttttctttaagtaatagaactagtaattacatcctaattgaatgtgtaatctcatcattaggataggtaaatatataatagtgtgatgatgataaggtaattaaaattccaaggatgactctgccataaaaacctatgacatgttcctgcctctgtcccaggattcccttctccagcaggctttgaaatcccacctggacagaagagataagctccaaggcctaagaaacgtttaatgagacagcacttttcccagtgaacatacaggccatctggagcagtattgtctgcctctctctccacaacccttcccaaaatacctccttggga

SEQ ID NO: 105602 - DNA, 448 bp, Homo sapiens
tctcaggatagggtcccagtcttatttacttaaaactaggtaaataagtgcctgccaggaagtatgcaccaaataattatttgttcaaatatgatctaattacttaatgcttacaatcatctacatttttaaatttttaaatattttaacccatttcccatttaggaaaaaaaaaaaaaagtacagcttgctgccagcacagtattcttggtgcaaatgggaaatcggttaatacagtccaaatcagtgtgtctggttcatttcagctccttcactgccaaaccaggggtcaaggactgctttagcttttctgccttctccttgtctgtgatgatgaatgtgtaaggtatcctctgcattgaactttaaacttcacgttgtccttattgatctattttttaaattaagaaattatggtacaaggagataaagtatctcattcaaaggc

SEQ ID NO: 105603 - DNA, 277 bp, Homo sapiens
taaaagcctcatgaagagttgattacatgataaacataaattgtctaattagtagagagaaactatgctatgcaataaatggtgttaggttacagctaaccgtttggagaaaaatattaaatctcccttacatacacacacattttatatactgcgcatttaaaatgtatgtacttttcagctgggcgccgtgattgttaattactgctgttattaccgttaagaaaaataaatattttaaattggcatttaataaagagattcaaatatgcaaaaa

SEQ ID NO: 105604 - DNA, 319 bp, Homo sapiens
taggtgtatggacagtgcaacaacattgattctggccagtccatgaacttggaatatctttccattttggagtgtcctcttcaatttcctgcatcagtgttttacagttttcattatagatgtctttcacttctgtggttaattcctagctattttgttttatttgtagcaattgtgctctcagtcacccgcatcagtccttctgtatattttgagttgcattaatttgcaggccacttatttaatatgaaactgtgcctgcttgttacttggtagcagacctgggagccaggtggcctgggttcagattccagctccg

SEQ ID NO: 105605 - DNA, 386 bp, Homo sapiens
ggcagttagtaattgaggccagtgcagtaatacaggtaagaaagaaatgctgatgttgcctctaagtagagatagatttgagaagaaaatatgacggaggtgggagctgatgcatggtccaaataaatgtggagatatgtttatgaatgggaagatttgatattgttaggatgttaattctccccaaattaatttagactcctggcagaggaatcattgggttgaagggttcttgatatacattagcaaatttgttttccagagagtagaatgtatttattcccttaccggcactgtacctacttcactgtgtcttcaccaaaattgaatgtttatcttaaaaagctttgtgagacttctcagtaaagatgacagattaagcatac

SEQ ID NO: 105606 - DNA, 373 bp, Homo sapiens
tctggtgaaaagatacatatatacctttagaattagcaagctggactcagattagatgatcccaattttgttggcaacatccaaagcatggtcatcaggagccagtggacacatgccttcttctctccatcaggtcgactcagtgttggccttggccacaccaatgtcatggagcttgctcccttcttctctccatcaggtcgactcagtgttggccttggccacattgatgtcatggagctccctcccttcttctctccatcaggttgactcagtgttgaccttggccacacagatgtcatggaactccttcatagcctgttccatctggtgcttgttggctttaacatccacagtggacacaagtgtgttg

SEQ ID NO: 105607 - DNA, 501 bp, Homo sapiens
cattatatggaaaagcattgtgaaaatccctgtcctgttctgttccattctgattactggtgcatgcagcccccagtcacgtacccactgtttgctcaatcgatcacgaccctctcacgcggactcccttagagttctaagcccttaaaagggacaggaattgctcactcgggagctcggttgttggagacgtgagtcttgccaaagctcccggccgaataaagcccttccttctttaactcggtgtctgaggggttttgtctgcagcttgcctgctacaacactaaccaaacatcttctggtgtttgctggcagtccttggcactccttggtttgtagatgcctcttccagtcacatggtatcttctccctgtgtgtcctcatgacatcatgacatcttttctctgcacatgtctgtttctgtgtccaaatttcccccttgtacgacatcagtcatacaagattggagtccattctgatgatctcattttaatgtgatta

SEQ ID NO: 105608 - DNA, 316 bp, Homo sapiens
atacacacaattagaaatgatgaaaagaatattactaccatcagaaataaaagcaactgtcagaaactactatgagcacctctatgtaaacaagttagaaaacctaggagagatagataaattcctggacacatacaccctcccaaggctgagccaggaagaaattgattccctgaacagaacaataacaagctccaaaattgaatcagtaataaatagcctaccaaccaaaaaaagcttgggacctaatggattcacagtcaaattctaccagatgtagaaaaaagggaaggtaccatttctacagaaactactc

SEQ ID NO: 105609 - DNA, 544 bp, Homo sapiens
cgtgttacccaatagctgtctctcacatgcgcccacatgcacaaagtgggtcatgctgagatcaggcaggagaggctattatttatcttgtttcaagagttcctcaaagtagggaagattaaaaagaaagaagagtttctcatttaggcattactcttgcgactttccttcatccatgttccccgggggattccttgaactcctttgccactgcttcaggcaaatttaggggagttctgctttattctacagtggatggtcccatgcgaggtttatgtgtggggcagtattaggaagctcaatcttgaggccaagtgggagtggattagagagtagaagggattgattagagacaggaagctgatgctccagagagggtgagaagaaacagagacctggatttccaccatggccatgtcccaggatgaggagaagggtcttgattatgaggacactttggaggtggaattataggccttggtaaatcagatgtagtggggaagggagagagaagaccccaagggacaactagttaatttagaac

SEQ ID NO: 105610 - DNA, 387 bp, Homo sapiens
cccaaaggccaattcagtagttctggttggtgcctgggaatctgaaatcgtaatgtcccccaggtgatggccagacttgcacactaaaatccaacttcttgcaagggtagaacagaaatgcaaagaggttaatgactcccttgtaatcaagaagccatgtagtggcaggatatgagggaactcaactctggagctttcttcttggataggaaaattctaatgtggaaaccagatttgcagtgattggaggtattgtcccttctcacaggtaaggacaagccttctaggtcagtggagactcagaactctttgaggggaaggagagggaggagaagcagtgctgaggcagtcacaaacagcaaaacacattcttgagtttccatgtta

SEQ ID NO: 105611 - DNA, 481 bp, Homo sapiens
agtcatgttctcaactataattttagagttctaagaaacatattaatattactatatatattccactcaaccaagttttaaactgctattatcatcagaatggggaagagtctaccaatacttttttgcgtgtcagcatatttaaatgatcacaattagctttagtcctcacttgacaagaactaaattttcttcagtattttccccatacctcttcaaaggtatttattcagtatttctatttttaaggttttgctgtttttggtaaatgtcttatctaatttgataccatacaaaatcaaataaacgaataccacataaaatgaataaaaatgaaaaagttagaaataccactatgaaatcaatttccctttattagaaaagctcacatgtgcctgtcacccataataaattaccaatcatgacttcataaaaggaaataaggtcaactatttgatgattctcgattactcatctaatc

SEQ ID NO: 105612 - DNA, 406 bp, Homo sapiens
ttttgctggaagctgccagaggccaggtgagaggcgtggaacagattcttccctaaaacatcagagggagcatggccccaccaacacctagatttcagacacctagtctgacttgagtaagttttgggcccggagatgacgtcctgggacaggagttgggcctggagaggccaccgtgaggcataagctgcatgtagagaggccagtgtgaggcaagacctgggcctgtctaggctgctgggagacaggcaggaatctggccagggaaggttgccatgagacaaaagttgggcctggaaaggcccttgtgaagcatgagcttggcctaaagaggccactgggtggcaggagctgggtgtgtggaagctgctgaaaggttgggagcttggcttggcgatgctctaga

SEQ ID NO: 105613 - DNA, 503 bp, Homo sapiens
aaccctccagacctctccttccttctctccctgttagggttggagggaaccagcgtggtcccaggaggggtggctggtggggtgcagaaaacgccctggttgcaaaggggcctcacgtgcccgacacaagggtcctggctgttagctgctactcatgagttcaaactaggaggaggctcacacgtgtcctttgcaaagtagactccttatctcccactccggctggtttcccaaatccatcctgataaagcagaaaaaccaagagccaaattctgcgggtgacctttctgacagctggaaggtcctccccatccccattccttgcgtgctctcctcttgtcctgccccctctgctttgtctccacttcctcatccttttccctctctggaccctgctcctgagtatctcccaccttcttcagacaacttctcctcatgaagtacagagtcccccacctccaggaaaaagagacaaagaccacgagaaggacctgagaaacgcc

SEQ ID NO: 105614 - DNA, 273 bp, Homo sapiens
atctctgctccccccttccccagcagatggttacctttgggctgttgctttcttgtcaccatctgagttctcagacgctggaaagccatgttctcggctctgtgaatgacaatgctgactggagtgctgcccctctgtaaagggctgggtgtggatggtcacaagcccctcacatgcctcagccaagaggaagtagtacaggggtcagcccagaggtccaggggaaaggagtggaaaccgatttccccaccaagggaggggcctgtacctcag

SEQ ID NO: 105615 - DNA, 467 bp, Homo sapiens
ccctctcccaggccctggcaacccccactccacctttttgtctaagagtttggctactccgagtcactcgtgtaagtggaatcaggcagtatttgtccttttgtgactggcttatttcacttcgcataacgtccaaggtttatccacgtttccacgtgggtcaggatttccttcattttatattttcaataggtatgcttttgtttatatgactgtaacagcagtattcacataattttacattctccttttaaaatatatgataaaaggtttccagtgttgttgacacgtagtctgcaaaattcatttctaagggctgcataacgatctgtcagatggatacaatatggtttacttaatcaccggtaggtgcccaagtcccttagagtatttcttgcatctatgatatttacgatatgccaagcttgtgtccttacatttaactaatttagtccttacaataactc

SEQ ID NO: 105616 - DNA, 131 bp, Homo sapiens
tataacatcaactgggaaggggataatagaatgcacttcaaatcttggatgaagatctactttccttagaatgtatataagggaagtggcatacataagattatttagctatcagaataaacatttttttt

SEQ ID NO: 105617 - DNA, 466 bp, Homo sapiens
gcaggaagctgggttcaactaagtagcttagtagagccatccggcttccaggaatgggatagtcactacagagatggagcaggactctgactcagcagtgggagagactggaagagaggcagtggctactgtgaaagaacacaccaaccacagagcagagacaaatcctttaggtagctgtcttttgaaattcactttgtattctacctctatgtaaatgtaaatgttaagtgcctccattataaataacttataaataatactaacgtaacacatccttgatatttacaaataacactgcctagaaatcttaaaaggaaaaccaaacatacatttaatacatctacaagaaatacctttttagaaaataaaatgtatatgtttcaaaatttgatgagcatttacgatgtggaataagcctacttttttcacagtctggcaaatgggagagtcctcatttacagat

SEQ ID NO: 105618 - DNA, 519 bp, Homo sapiens
agacattggattgaggagtttataatcaaatgtacagttaatactaagtttgtttgtacatagtaatttaggaaaatttaattacttagagctgccagaaaggaaaggaaaaaataacatccaccaaaggtaccattttcctctatcccatccttggcatgagaagaagttgagtttcctacctggcagtggatcagcaggttctgggtgaagccatggaagacagttaagtcactcttggctttctaaaaggaacagtgttcatcgtcctccagtgtgcatacctggtgcagattattttttaaagctgtgtatcactgaatgccattctacttgaatttatccctgtttgaatgtatctaagagtaatgatgctatcagaagcatcctaattctacttcttttcacttactatagcatttttcacagcagtacttccaatctttttctacaggaccttctcctcttacccttttaaaaacaccttacctcttacgtcgctggcttgaatgagctccc

SEQ ID NO: 105619 - DNA, 465 bp, Homo sapiens
agacacggagagatttatcttcatcaggttctgggctagaggggggtcactattcctgtgaccctagtctgcaccactctctcaggcatgctcaacaacctcagctcatggtcgcaaaaggaacacgtccccttctcttcaatctgatggtaagtttctgttcttttcggggactctctcctcagagttggagcagctttcatctctcctaatgggagaactttattctcagtcccaaaatcccttttgctgatgcagtgacgaggtgaaactaaggtggaccaatggtgcttgagtggggctggggtgagcacgaagtgatactgacaagagtgccgggtcacaacagacctgggcaggatgggcttctgcccgggctccataagacccaggcatctcagcagctgcctgattctctgtctgactctgacagcatccagaacttagaagtctaccctgtagcat

SEQ ID NO: 105620 - DNA, 387 bp, Homo sapiens
attcacacagtaactctacaaatacatcaaaatgtatagaagattagatactttagaagagggcacataggccaacagaacagaaaagagaactcttaaagtctcataccttcagccatctgatcttcaacaaagttgattcaaataagcagtggggaaaggattccctattcaattaatgatgctgggatagctggctaactgttgcaagaagtcagggaccctgaacggagggagtggctggagccgtggcagaggaacataaattgtgaagatttcatggacatttatcacttcccaaataatactcttataatttcttatgcctgtcttactttaatctcttaatcctattatcttcataagctgaggatgtatgtcacctca

SEQ ID NO: 105621 - DNA, 750 bp, Homo sapiens
agcactttaaaaaacattaatagactttatattttagagcagttttgggttttacagaaaaattgggcagaaagtacagggagtcctcgtatactccccctctgccccacttccttccacagttattataacttcttgcattggtggcccatacattacaatttgatacatcattactaactaaagcatatcgtttacttgagggttcatgcttcctgttatgcagttttaggtcttgagaagtgcataatgtcatggatcatgcagaatagttgcactgccctaaaactcccctgtgtgataaacactttttaaaatcaaaaaggcaatggaacattctgtatgacactgcaatggtagatatgtatatagagcaccaagactgagcctaaacagcagctccaggcaggaccccactcccttcagggcccaccctgcaccatcttcctcaaatgttttatacaaaaaaaaaaaaaaaatagtggtgcctaattggcattgcatcgattttcttaagagccaggactaacacaaagtgatttcaaagcttccattaggacaccatgaacactgggcccacggtggtggcatcaggcagaccttgctcccttctgcacagagcttgcagagaaagcccaggcaagtagggtggagggccttccctaagaggctggctctttcagaagttcaggtttggccgggcgcggtggctcacgcctgtaatcccagcactttgggaggccgaggcgg

SEQ ID NO: 105622 - DNA, 580 bp, Homo sapiens
caggttcaaagagcatgttgtctttgttttgtcaactgtaaagactaatatcaacttcctagaaaatagacaaaaatggatgaagtgatgatgggtttgacaggacaagtatatttcactttacctcagtgatgtatttaatttatcgtgcccatgagaaaaagcaaacctttcaagcacatgtcttacatttgaagccacatgcctgaagatgccttgggaagtggtcctgggcatttgaatcagaattggggaaaagattaggctctctagagatgggacacacatcaggatatgagaattagcagtgattcgtatgctgttgtgatggtgaccgtaagtccatttcccagtgttcccattgccatgtcacagaccctcatacttgtttgcccatgcacccttttttcttatcttttagtcacttaagctactagaacttagaaatattctagtcgacataatcatcttgatactttccaaacttccaaattctttgagacggttaaagcgatacccttaataaaatgcttttgcataggcaggtgatgttcaactttgatcagtctcataatcatgt

SEQ ID NO: 105623 - DNA, 377 bp, Homo sapiens
atgcatgtctttatttttcttcccattaaagaatcagaactgtagcctgcatcaggtagtgtatccatgggaaattttcttcaccagcccttggatagatcagggtaggaggggaatggggcttggagagtaagacaggattgaaaaagtatgtgtacaattaaattcacacagtgaagagtttctcaatcattagaaagcttgacggagaaaagtaacacaacctttggagtatgtgaaccactgttcccctgaccccacctcatagctcttgggaaagttgtgggtaatgtatgtccctgtgaaacatttttgctttaagaaatagaaacatttttcaccagaattaaagcttttcttatttaatgtccttcttt

SEQ ID NO: 105624 - DNA, 742 bp, Homo sapiens
ggcttccgtcctcaggagttcggaactatataaagttcagaaaacatgtctcgaagatatgactccaggaccactatattttctccagaaggtcgcttataccaagttgaatatgccatggaagctattggacatgcaggcacctgtttgggaattttagcaaatgatggtgttttgcttgcagcagagagacgcaacatccacaagcttcttgatgaagtctttttttctgaaaaaatttataaactcaatgaggacatggcttgcagtgtggcaggcataacttctgatgctaatgttctgactaatgaactaaggctcattgctcaaagtggaaattgcaacactaacaagagagaatggaaagacagtaatcagagttctcaaacaaaaagaagtggagcagttgatcaaaaaacacgaggaagaagaagccaaagctgagcgtgagaagaaagaaaaagaacagaaagaaaaggataaatagaatcagagattttattactcatttggggcaccatttcagtgtaaaagcagtcctactcttccacactaggaaggctttactttttttaactggtgcagtgggaaaataggacattacatactgaattgggtccttgtcatttctgtccaattgaatactttattgtaacgatgatggttacccttcatggacgtcttaatcttccacacacatcccctttttttggaataaaatttggaaaatggaaatgaagga

SEQ ID NO: 105625 - DNA, 460 bp, Homo sapiens
tagacaaagaatattcctttgtctagcagaagagggggggcctccttcagtggaaattgcaacactaacaagagagaatggaaagacagtaatcagagttctcaaacaaaaagaagtggagcagttgatcaaaaaacacgaggaagaagaagccaaagctgagcgtgagaagaaagaaaaagaacagaaagaaaaggataaatagaatcagagattttattactcatttggggcaccatttcagtgtaaaagcagtcctactcttccacactaggaaggctttactttttttaactggtgcagtgggaaaataggacattacatactgaattgggtccttgtcatttctgtccaattgaatactttattgtaacgatgatggttacccttcatggacgtcttaatcttccacacacatcccctttttttggaataaaatttggaaaatggaaatgaagga

SEQ ID NO: 105626 - DNA, 463 bp, Homo sapiens
taccctttacaatccccccctcccctcccaacacgattaatgcttcgggggactggaaattgcaacactaacaagagagaatggaaagacagtaatcagagttctcaaacaaaaagaagtggagcagttgatcaaaaaacacgaggaagaagaagccaaagctgagcgtgagaagaaagaaaaagaacagaaagaaaaggataaatagaatcagagattttattactcatttggggcaccatttcagtgtaaaagcagtcctactcttccacactaggaaggctttactttttttaactggtgcagtgggaaaataggacattacatactgaattgggtccttgtcatttctgtccaattgaatactttattgtaacgatgatggttacccttcatggacgtcttaatcttccacacacatcccctttttttggaataaaatttggaaaatggaaatgaagga

SEQ ID NO: 105627 - DNA, 794 bp, Homo sapiens
  misc_feature (765)..(765): n is a, c, g, or t
catcgaggcccgggcggttaactcggcaccgaggctggaactatataaagttcagaaaacatgtctcgaagatatgactccaggaccactatattttctccagaaggtcgcttataccaagttgaatatgccatggaagctattggacatgcaggcacctgtttgggaattttagcaaatgatggtgttttgcttgcagcagagagacgcaacatccacaagcttcttgatgaagtctttttttctgaaaaaatttataaactcaatgaggacatggcttgcagtgtggcaggcataacttctgatgctaatgttctgactaatgaactaaggctcattgctcaaaggtatttattacagtatcaggagccaataccttgtgagcagttggttacagcgctgtgtgatatcaaacaagcttatacacaatttggaggaaaacgtccctttggtgtttcattgctgtacattggctgggataagcactatggctttcagctctatcagagtgaccctagtggaaattacgggggatggaaggccacatgcattggaaataatagcgctgcagctgtgtcaatgttgaaacaagactataaagaaggagaaatgaccttgaagtcagcacttgctttagctatcaaagtactaaataagaccatggatgttagtaaactctctgctgaaaaagtggaattgcacactaccagagagatggaagccgtatcagagttctcaacaaaagatgggcgtgtcaaaaaccgngagagaagcaagtggggtggagaagaaaa

SEQ ID NO: 105628 - DNA, 825 bp, Homo sapiens
  misc_feature (57)..(57): n is a, c, g, or t
  misc_feature (796)..(796): n is a, c, g, or t
taggctagtacgagcccgggggttgattagggctccgggacatctcagtcttcgggntcttccatctggaactatataaagttcagaaaacatgtctcgaagatatgactccaggaccactatattttctccagaaggtcgcttataccaagttgaatatgccatggaagctattggacatgcaggcacctgtttgggaattttagcaaatgatggtgttttgcttgcagcagagagacgcaacatccacaagcttcttgatgaagtctttttttctgaaaaaatttataaactcaatgaggacatggcttgcagtgtggcaggcataacttctgatgctaatgttctgactaatgaactaaggctcattgctcaaaggtatttattacagtatcaggagccaataccttgtgagcagttggttacagcgctgtgtgatatcaaacaagcttatacacaatttggaggaaaacgtccctttggtgtttcattgctgtacattggctgggataagcactatggctttcagctctatcagagtgaccctagtggaaattacgggggatggaaggccacatgcattggaaataatagcgctgcagctgtgtcaatgttgaaacaagactataaagaaggagaaatgaccttgaagtcagcacttgctttagctatcaaagtactaaataagaccatggatgttagtaaactctctgctgaaaaagtggaattgcacactaccagagagatggaagccgtatcagagttctcaacaaaagatgggcgtgtcaaaaaccgngagagaagcaagtggggtggagaagaaaa

SEQ ID NO: 105629 - DNA, 823 bp, Homo sapiens
gcctactactactaaattcgcgggcgcgtcgacgtctttttttctgaaaaaatttataaactcaacgaggacatggcttgcagtgtggcaggcataacttctgatgctaatgttctgactaatgaactaaggctcattgctcaaaggtatttattacagtatcaggagccaataccttgtgagcagttggttacagcgctgtgtgatatcaaacaagcttatacacaatttggaggaaaacgtccctttggtgtttcattgctgtacattggctgggataagcactatggctttcagctctatcagagtgaccctagtggaaattacgggggatggaaggccacatgcattggaaataatagcgctcacagcatgtagtcaatgttcgacaacaaggacttataacacgaacggacgaacactgaccccttgcaagctcccagcacttggctcttacgcctattcagacagtaccttacacattaacgaacccatcggcattgtttcaagttaagacttcttccttggcttgcacacaaacacgtagggcacacatctgggcgagacgaacttcgaaaccaaacggaacggaacgcaaacttcggggcacacacacgagacaaagattaaagaattccgaagcacaggttctaccttccaagataccccaaaaagacagcacggcaacacgcgttgggcgacaacggcccacaggttatcgcggactttcccaacagaacacacaaaacccactgtgcgaaacgcgggcacacgggacacacgggcacaaagggtcggccaagaacaaggagccctctggaca

SEQ ID NO: 105630 - DNA, 494 bp, Homo sapiens
tagacaaagaatattcctttgtctagcagaagagggggggcctccttcagtggaaattgcaacactaacaagagagaatggaaagacagtaatcagagttctcaaacaaaaagaagtggagcagttgatcaaaaaacacgaggaagaagaagccaaagctgagcgtgagaagaaagaaaaagaacagaaagaaaaggataaatagaatcagagattttattactcatttggggcaccatttcagtgtaaaagcagtcctactcttccacactaggaaggctttactttttttaactggtgcagtgggaaaataggacattacatactgaattgggtccttgtcatttctgtccaattgaatactttattgtaacgatgatggttacccttcatggacgtcttaatcttccacacacatcccctttttttggaataaaatttggaaaatggaaatgaaggaaaaacagaaaaatggcctcgttggcctcagaggc

SEQ ID NO: 105631 - DNA, 1262 bp, Homo sapiens
ccccgccccaacccagcggttctgcgcatgcgcgggggccatattagcagcggttattcggtgagcggtggtggtttattcttccgtggagttaagggctccgtggacatctcaggtcttcagggtcttccatctggaactatataaagttcagaaaacatgtctcgaagatatgactccaggaccactatattttctccagaaggtcgcttataccaagttgaatatgccatggaagctattggacatgcaggcacctgtttgggaattttagcaaatgatggtgttttgcttgcagcagagagacgcaacatccacaagcttcttgatgaagtctttttttctgaaaaaatttataaactcaatgaggacatggcttgcagtgtggcaggcataacttctgatgctaatgttctgactaatgaactaaggctcattgctcaaaggtatttattacagtatcaggagccaataccttgtgagcagttggttacagcgctgtgtgatatcaaacaagcttatacacaatttggaggaaaacgtccctttggtgtttcattgctgtacattggctgggataagcactatggctttcagctctatcagagtgaccctagtggaaattacgggggatggaaggccacatgcattggaaataatagcgctgcagctgtgtcaatgttgaaacaagactataaagaaggagaaatgaccttgaagtcagcacttgctttagctatcaaagtactaaataagaccatggatgttagtaaactctctgctgaaaaagtggaaattgcaacactaacaagagagaatggaaagacagtaatcagagttctcaaacaaaaagaagtggagcagttgatcaaaaaacacgaggaagaagaagccaaagctgagcgtgagaagaaagaaaaagaacagaaagaaaaggataaatagaatcagagattttattactcatttggggcaccatttcagtgtaaaagcagtcctactcttccacactaggaaggctttactttttttaactggtgcagtgggaaaataggacattacatactgaattgggtccttgtcatttctgtccaattgaatactttattgtaacgatgatggttacccttcatggacgtcttaatcttccacacacatcccctttttttggaataaaatttggaaaatggaaatgaaggaataaattctctgtagcagtaattgttaaatatacaaaaactgacagggcgattactttttgc

SEQ ID NO: 105632 - DNA, 1302 bp, Homo sapiens
ccccgccccaacccagcggttctgcgcatgcgcgggggccatattagcagcggttattcggtgagcggtggtggtttattcttccgtggagttaagggctccgtggacatctcaggtcttcagggtcttccatctggaactatataaagttcagaaaacatgtctcgaagatatgactccaggaccactatattttctccagaaggtcgcttataccaagttgaatatgccatggaagctattggacatgcaggcacctgtttgggaattttagcaaatgatggtgttttgcttgcagcagagagacgcaacatccacaagcttcttgatgaagtctttttttctgaaaaaatttataaactcaatgaggacatggcttgcagtgtggcaggcataacttctgatgctaatgttctgactaatgaactaaggctcattgctcaaaggtatttattacagtatcaggagccaataccttgtgagcagttggttacagcgctgtgtgatatcaaacaagcttatacacaatttggaggaaaacgtccctttggtgtttcattgctgtacattggctgggataagcactatggctttcagctctatcagagtgaccctagtggaaattacgggggatggaaggccacatgcattggaaataatagcgctgcagctgtgtcaatgttgaaacaagactataaagaaggagaaatgaccttgaagtcagcacttgctttagctatcaaagtactaaataagaccatggatgttagtaaactctctgctgaaaaagtggaaattgcaacactaacaagagagaatggaaagacagtaatcagagttctcaaacaaaaagaagtggagcagttgatcaaaaaacacgaggaagaagaagccaaagctgagcgtgagaagaaagaaaaagaacagaaagaaaaggataaatagaatcagagattttattactcatttggggcaccatttcagtgtaaaagcagtcctactcttccacactaggaaggctttactttttttaactggtgcagtgggaaaataggacattacatactgaattgggtccttgtcatttctgtccaattgaatactttattgtaacgatgatggttacccttcatggacgtcttaatcttccacacacatcccctttttttggaataaaatttggaaaatggaaatgaaggaaaaaacaacacaaaaacaatatacaaacaaattcacaacccaggaaaaccggaacaaatcaaaataaaaaaaacaaaaaagggcctttttggcctaaggggg

SEQ ID NO: 105633 - DNA, 1575 bp, Homo sapiens
ccccgccccaacccagcggttctgcgcatgcgcgggggccatattagcagcggttattcggtgagcggtggtggtttattcttccgtggagttaagggctccgtggacatctcaggtcttcagggtcttccatctggaactatataaagttcagaaaacatgtctcgaagatatgactccaggaccactatattttctccagaaggtcgcttataccaagttgaatatgccatggaagctattggacatgcaggcacctgtttgggaattttagcaaatgatggtgttttgcttgcagcagagagacgcaacatccacaagcttcttgatgaagtctttttttctgaaaaaatttataaactcaatgaggacatggcttgcagtgtggcaggcataacttctgatgctaatgttctgactaatgaactaaggctcattgctcaaaggtatttattacagtatcaggagccaataccttgtgagcagttggttacagcgctgtgtgatatcaaacaagcttatacacaatttggaggaaaacgtccctttggtgtttcattgctgtacattggctgggataagcactatggctttcagctctatcagagtgaccctagtggaaattacgggggatggaaggccacatgcattggaaataatagcgctgcagctgtgtcaatgttgaaacaagactataaagaaggagaaatgaccttgaagtcagcacttgctttagctatcaaagtactaaataagaccatggatgttagtaaactctctgctgaaaaagtggaaattgcaacactaacaagagagaatggaaagacagtaatcagagttctcaaacaaaaagaagtggagcagttgatcaaaaaacacgaggaagaagaagccaaagctgagcgtgagaagaaagaaaaagaacagaaagaaaaggataaatagaatcagagattttattactcatttggggcaccatttcagtgtaaaagcagtcctactcttccacactaggaaggctttactttttttaactggtgcagtgggaaaataggacattacatactgaattgggtccttgtcatttctgtccaattgaatactttattgtaacgatgatggttacccttcatggacgtcttaatcttccacacacatcccctttttttggaataaaatttggaaaatggaaatgaaggaaaaaaaaaaaaaaaaaaaaaaaaaaaaaaaaaaaaaaaaaaaaaaaaaaaaaaaaaaaaaaaaaaaaaaaaaaaaaaaaaaaaaaaaaaaaaaaaaaaaaaaatttaagtgagaacaaaataaaaaaaaaaaaaaaaacttgggggggggccccttccacaatttccccttattagggggctgttaaaaaaaaaaagggcgcgtttttaaaaagtgtgcgttgggaaaaaccttgggttcccacacttaaggccctgtgaaaaaatccccttttgacgggtgggataaaagtaaagaggcccaatcggtgctttcaacaagaggggactctgtatggaaatgtgaatatgtagctaaatatttggaaaaatcccg

SEQ ID NO: 105634 - DNA, 1339 bp, Homo sapiens
  misc_feature (1203)..(1203): n is a, c, g, or t
  misc_feature (1206)..(1206): n is a, c, g, or t
ccccgccccaacccagcggttctgcgcatgcgcgggggccatattagcagcggttattcggtgagcggtggtggtttattcttccgtggagttaagggctccgtggacatctcaggtcttcagggtcttccatctggaactatataaagttcagaaaacatgtctcgaagatatgactccaggaccactatattttctccagaaggtcgcttataccaagttgaatatgccatggaagctattggacatgcaggcacctgtttgggaattttagcaaatgatggtgttttgcttgcagcagagagacgcaacatccacaagcttcttgatgaagtctttttttctgaaaaaatttataaactcaatgaggacatggcttgcagtgtggcaggcataacttctgatgctaatgttctgactaatgaactaaggctcattgctcaaaggtatttattacagtatcaggagccaataccttgtgagcagttggttacagcgctgtgtgatatcaaacaagcttatacacaatttggaggaaaacgtccctttggtgtttcattgctgtacattggctgggataagcactatggctttcagctctatcagagtgaccctagtggaaattacgggggatggaaggccacatgcattggaaataatagcgctgcagctgtgtcaatgttgaaacaagactataaagaaggagaaatgaccttgaagtcagcacttgctttagctatcaaagtactaaataagaccatggatgttagtaaactctctgctgaaaaagtggaaattgcaacactaacaagagagaatggaaagacagtaatcagagttctcaaacaaaaagaagtggagcagttgatcaaaaaacacgaggaagaagaagccaaagctgagcgtgagaagaaagaaaaagaacagaaagaaaaggataaatagaatcagagattttattactcatttggggcaccatttcagtgtaaaagcagtcctactcttccacactaggaaggctttactttttttaactggtgcagtgggaaaataggacattacatactgaattgggtccttgtcatttctgtccaattgaatactttattgtaacgatgatggttacccttcatggacgtcttaatcttccacacacatcccctttttttggaataaaatttggaaaatggaaatgaaggaaanaanaaaaaaatgagatactaaaaaatatttttattataaaaaatacctcttttatccataagggggatatatttttataagattccctcggggggggggggcccggccccaattggcccctttaagggatgtgttt

SEQ ID NO: 105635 - DNA, 1156 bp, Homo sapiens
  misc_feature (1156)..(1156): n is a, c, g, or t
ccccgccccaacccagcggttctgcgcatgcgcgggggccatattagcagcggttattcggtgagcggtggtggtttattcttccgtggagttaagggctccgtggacatctcaggtcttcagggtcttccatctggaactatataaagttcagaaaacatgtctcgaagatatgactccaggaccactatattttctccagaaggtcgcttataccaagttgaatatgccatggaagctattggacatgcaggcacctgtttgggaattttagcaaatgatggtgttttgcttgcagcagagagacgcaacatccacaagcttcttgatgaagtctttttttctgaaaaaatttataaactcaatgaggacatggcttgcagtgtggcaggcataacttctgatgctaatgttctgactaatgaactaaggctcattgctcaaaggtatttattacagtatcaggagccaataccttgtgagcagttggttacagcgctgtgtgatatcaaacaagcttatacacaatttggaggaaaacgtccctttggtgtttcattgctgtacattggctgggataagcactatggctttcagctctatcagagtgaccctagtggaaattacgggggatggaaggccacatgcattggaaataatagcgctgcagctgtgtcaatgttgaaacaagactataaagaaggagaaatgaccttgaagtcagcacttgctttagctatcaaagtactaaataagaccatggatgttagtaaactctctgctgaaaaagtggaaattgcaacactaacaagagagaatggaaagacagtaatcagagttctcaaacaaaaagaagtggagcagttgatcaaaaaacacgaggaagagcaagtgaaggtgagaagaagaaaagacgagaaaggtaattgatcaggattataatcatggggccatttcggttaagatctatctcaatagaggttatttttatggggggggaatgggctcctatgatggtctggcatctgtcaaggtattggagagtggtcctgggttactccaaatcttggtaatgaggggaaaaaacggttgggaaagaagggtttgctgaggtgcttgtaatatgaaaatttttttttgtcgtttttgtttttcn

SEQ ID NO: 105636 - DNA, 893 bp, Homo sapiens
  misc_feature (864)..(864): n is a, c, g, or t
ccccgccccaacccagcggttctgcgcatgcgcgggggccatattagcagcggttattcggtgagcggtggtggtttattcttccgtggagttaagggctccgtggacatctcaggtcttcagggtcttccatctggaactatataaagttcagaaaacatgtctcgaagatatgactccaggaccactatattttctccagaaggtcgcttataccaagttgaatatgccatggaagctattggacatgcaggcacctgtttgggaattttagcaaatgatggtgttttgcttgcagcagagagacgcaacatccacaagcttcttgatgaagtctttttttctgaaaaaatttataaactcaatgaggacatggcttgcagtgtggcaggcataacttctgatgctaatgttctgactaatgaactaaggctcattgctcaaaggtatttattacagtatcaggagccaataccttgtgagcagttggttacagcgctgtgtgatatcaaacaagcttatacacaatttggaggaaaacgtccctttggtgtttcattgctgtacattggctgggataagcactatggctttcagctctatcagagtgaccctagtggaaattacgggggatggaaggccacatgcattggaaataatagcgctgcagctgtgtcaatgttgaaacaagactataaagaaggagaaatgaccttgaagtcagcacttgctttagctatcaaagtactaaataagaccatggatgttagtaaactctctgctgaaaaagtggaattgcacactaccagagagatggaagccgtatcagagttctcaacaaaagatgggcgtgtcaaaaaccgngagagaagcaagtggggtggagaagaaaa

SEQ ID NO: 105637 - DNA, 1181 bp, Homo sapiens
gtatcaacgcagagtgcccattacggccgagcggttattcggtgagcggtggtggtttattcttccgtggagttaagggctccgtggacatctcaggtcttcagggtcttccatctggaactatataaagttcagaaaacatgtctcgaagatatgactccaggaccactatattttctccagaaggtcgcttataccaagttgaatatgccatggaagctattggacatgcaggcacctgtttgggaattttagcaaatgatggtgttttgcttgcagcagagagacgcaacatccacaagcttcttgatgaagtctttttttctgaaaaaatttataaactcaatgaggacatggcttgcagtgtggcaggcataacttctgatgctaatgttctgactaatgaactaaggctcattgctcaaaggtatttattacagtatcaggagccaataccttgtgagcagttggttacagcgctgtgtgatatcaaacaagcttatacacaatttggaggaaaacgtccctttggtgtttcattgctgtacattggctgggataagcactatggctttcagctctatcagagtgaccctagtggaaattacgggggatggaaggccacatgcattggaaataatagcgctgcagctgtgtcaatgttgaaacaagactataaagaaggagaaatgaccttgaagtcagcacttgctttagctatcaaagtactaaataagaccatggatgttagtaaactctctgctgaaaaagtggaaattgcaacactaacaagagagaatggaaagacagtaatcagagttctcaaacaaaaagaagtggagcagttgatcaaaaaacacgaggaagaagaagccaaagctgagcgtgagaagaaagaaaaagaacagaaagaaaaggataaatagaatcagagattttattactcatttggggcaccatttcagtgtaaaagcagtcctactcttccacactaggaaggctttactttttttaactggtgcagtgggaaaataggacattacatactgaattgggtccttgtcatttctgtccaattgaatactttattgtaacgatgatggttacccttcatggacgtcttaatcttccacacacatcccctttttttggaataaaatttggaaaatggaaatgaagga

SEQ ID NO: 105638 - DNA, 1076 bp, Homo sapiens
ccccgccccaacccagcggttctgcgcatgcgcgggggccatattagcagcggttattcggtgagcggtggtggtttattcttccgtggagttaagggctccgtggacatctcaggtcttcagggtcttccatctggaactatataaagttcagaaaacatgtctcgaagatatgactccaggaccactatattttctccagaaggtcgcttataccaagttgaatatgccatggaagctattggacatgcaggcacctgtttgggaattttagcaaatgatggtgttttgcttgcagcagagagacgcaacatccacaagcttcttgatgaagtctttttttctgaaaaaatttataaactcaatgaggacatggcttgcagtgtggcaggcataacttctgatgctaatgttctgactaatgaactaaggctcattgctcaaaggtatttattacagtatcaggagccaataccttgtgagcagttggttacagcgctgtgtgatatcaaacaagcttatacacaatttggaggaaaacgtccctttggtgtttcattgctgtacattggctgggataagcactatggctttcagctctatcagagtgaccctagtggaaattacgggggatggaaggccacatgcattggaaataatagcgcttggaaattgcaacactaacaagagagaatggaaagacagtaatcagagttctcaaacaaaaagaagtggagcagttgatcaaaaaacacgaggaagaagaagccaaagctgagcgtgagaagaaagaaaaagaacagaaagaaaaggataaatagaatcagagattttattactcatttggggcaccatttcagtgtaaaagcagtcctactcttccacactaggaaggctttactttttttaactggtgcagtgggaaaataggacattacatactgaattgggtccttgtcatttctgtccaattgaatactttattgtaacgatgatggttacccttcatggacgtcttaatcttccacacacatcccctttttttggaataaaatttggaaaatggaaatgaagga

SEQ ID NO: 105639 - DNA, 1112 bp, Homo sapiens
ccccgccccaacccagcggttctgcgcatgcgcgggggccatattagcgaactatataaagttcagaaaacatgtctcgaagatatgactccaggaccactatattttctccagaaggtcgcttataccaagttgaatatgccatggaagctattggacatgcaggcacctgtttgggaattttagcaaatgatggtgttttgcttgcagcagagagacgcaacatccacaagcttcttgatgaagtctttttttctgaaaaaatttataaactcaatgaggacatggcttgcagtgtggcaggcataacttctgatgctaatgttctgactaatgaactaaggctcattgctcaaaggtatttattacagtatcaggagccaataccttgtgagcagttggttacagcgctgtgtgatatcaaacaagcttatacacaatttggaggaaaacgtccctttggtgtttcattgctgtacattggctgggataagcactatggctttcagctctatcagagtgaccctagtggaaattacgggggatggaaggccacatgcattggaaataatagcgctgcagctgtgtcaatgttgaaacaagactataaagaaggagaaatgaccttgaagtcagcacttgctttagctatcaaagtactaaataagaccatggatgttagtaaactctctgctgaaaaagtggaaattgcaacactaacaagagagaatggaaagacagtaatcagagttctcaaacaaaaagaagtggagcagttgatcaaaaaacacgaggaagaagaagccaaagctgagcgtgagaagaaagaaaaagaacagaaagaaaaggataaatagaatcagagattttattactcatttggggcaccatttcagtgtaaaagcagtcctactcttccacactaggaaggctttactttttttaactggtgcagtgggaaaataggacattacatactgaattgggtccttgtcatttctgtccaattgaatactttattgtaacgatgatggttacccttcatggacgtcttaatcttccacacacatcccctttttttggaataaaatttggaaaatggaaatgaagga

SEQ ID NO: 105640 - DNA, 1476 bp, Homo sapiens
tgcctgtaccggtccgaggtggttatgaagcggttattcggtgagcggtggtggtttattcttccgtggagttaagggctccgtggacatctcaggtcttcagggtcttccatctggtgagcctttggccccttggggcccgcggaagcttggccgctttcccattgggcgggggtcgtgaacgtcaagacagtcggtcccggcctgcagttgccgccgaggagccgtgggcacgatgactctgcaccgcctcctctgtgacggaccgacagccgggaatggcccccgccggccgccgtcgggggcttcccagtgccaagcctggacgccggggcccgcgagggggcgggctgagggtgggggtctgtgggcaggaccgagagttggggtggcttccgtcctcaggagttcggaactatataaagttcagaaaacatgtctcgaagatatgactccaggaccactatattttctccagaaggtcgcttataccaagttgaatatgccatggaagctattggacatgcaggcacctgtttgggaattttagcaaatgatggtgttttgcttgcagcagagagacgcaacatccacaagcttcttgatgaagtctttttttctgaaaaaatttataaactcaatgaggacatggcttgcagtgtggcaggcataacttctgatgctaatgttctgactaatgaactaaggctcattgctcaaaggtatttattacagtatcaggagccaataccttgtgagcagttggttacagcgctgtgtgatatcaaacaagcttatacacaatttggaggaaaacgtccctttggtgtttcattgctgtacattggctgggataagcactatggctttcagctctatcagagtgaccctagtggaaattacgggggatggaaggccacatgcattggaaataatagcgctgcagctgtgtcaatgttgaaacaagactataaagaaggagaaatgaccttgaagtcagcacttgctttagctatcaaagtactaaataagaccatggatgttagtaaactctctgctgaaaaagtggaaattgcaacactaacaagagagaatggaaagacagtaatcagagttctcaaacaaaaagaagtggagcagttgatcaaaaaacacgaggaagaagaagccaaagctgagcgtgagaagaaagaaaaagaacagaaagaaaaggataaatagaatcagagattttattactcatttggggcaccatttcagtgtaaaagcagtcctactcttccacactaggaaggctttactttttttaactggtgcagtgggaaaataggacattacatactgaattgggtccttgtcatttctgtccaattgaatactttattgtaacgatgatggttacccttcatggacgtcttaatcttccacacacatcccctttttttggaataaaatttggaaaatggaaatgaagga

SEQ ID NO: 105641 - DNA, 1123 bp, Homo sapiens
ccccgccccaacccagcggttctgcgcatgcgcgggggccatattagcagcggttattcggtgagcggtggtggtttattcttccgtggagttaagggctccgtggacatctcaggtcttcagggtcttccatctggaactatataaagttcagaaaacatgtctcgaagatatgactccaggaccactatattttctccagaaggtcgcttataccaagttgaatatgccatggaagctattggacatgcaggcacctgtttgggaattttagcaaatgatggtgttttgcttgcagcagagagacgcaacatccacaagcttcttgatgaagtctttttttctgaaaaaatttataaactcaatgaggacatggcttgcagtgtggcaggcataacttctgatgctaatgttctgactaatgaactaaggctcattgctcaaaggtatttattacagtatcaggagccaataccttgtgagcagttggttacagcgctgtgtgatatcaaacaagcttatacacaatttggaggaaaacgtccctttggtgtttcattgctgtacattggctgggataagcactatggctttcagctctatcagagtgaccctagtggaaattacgggggatggaaggccacatgcattggaaataatagcgctcacagcatgtagtcaatgttcgacaacaaggacttataacacgaacggacgaacactgaccccttgcaagctcccagcacttggctcttacgcctattcagacagtaccttacacattaacgaacccatcggcattgtttcaagttaagacttcttccttggcttgcacacaaacacgtagggcacacatctgggcgagacgaacttcgaaaccaaacggaacggaacgcaaacttcggggcacacacacgagacaaagattaaagaattccgaagcacaggttctaccttccaagataccccaaaaagacagcacggcaacacgcgttgggcgacaacggcccacaggttatcgcggactttcccaacagaacacacaaaacccactgtgcgaaacgcgggcacacgggacacacgggcacaaagggtcggccaagaacaaggagccctctggaca

SEQ ID NO: 105642 - DNA, 2564 bp, Homo sapiens
ccccgccccaacccagcggttctgcgcatgcgcgggggccatattagcagcggttattcggtgagcggtggtggtttattcttccgtggagttaagggctccgtggacatctcaggtcttcagggtcttccatctggtgagcctttggccccttggggcccgcggaagcttggccgctttcccattgggcgggggtcgtgaacgtcaagacagtcggtcccggcctgcagttgccgccgaggagccgtgggcacgatgactctgcaccgcctcctctgtgacggaccgacagccgggaatggcccccgccggccgccgtcgggggcttcccagtgccaagcctggacgccggggcccgcgagggggcgggctgagggtgggggtctgtgggcaggaccgagagttggggtggcttccgtcctcaggagttcggtacgtgaaagttagctctcccggaggtgccggtgaactcaaaatcgtgctgtgcccggcgtcaggcgtggagacaacagaaagttgtgcttaaagctcgaatcagaaatccccggcgagtgtctctgtgtcctccctgcttctctgctctgtgccatccttactttgcaccattcctattgcaattacctcaaccagttcgctgccctcggtctctcaccagccagagtgatcatttaaaatgccaatcagttcctgtgggccttgggaatcattcagaggagccccattggctgagagataaaattctgtttttacctgggcacgcgggctctccaggatttgattccagcttacctttccagtcttgattccctatattccagtatttggaaatgtgggccttggactgaggctttaccaaataacgctgagcacctagtattgcctttgcacgaatggtactgatggtgcccaagataactgcctccacccccaagttcaggacccagatcactctctggagaaggcctcagcctcttgccttggctttcaaggctctgcgtgatttggatactcgcttagctcttatttatatatattttaaaagcatcagcagtttatctcatgcccactaaactatcctgcctccgtaccctttgttcatactttctgctctgtgtggaatgcccttctttcttcccctgttctttctcttagacccaagggttctcagccttatttctgcctctcccatctctgatttactttcattttctgtatcgatttctcaaaaaatactttcttgattctttcatcatcccttttcccaccctacccccggttcctctttccacattataatctatgactgcctctctcacctaactgccagtattagcttttcaggacaggaactggttttacacattttggtattccagcatctagcataatgcctgacacttagctgaataaagggagtaaataaaacagatttgtaaagtcagcaaatgctttttaatttgtgaatcttattttaatgatgatctgattttctttttacaggaactatataaagttcagaaaacatgtctcgaagatatgactccaggaccactatattttctccagaaggtcgcttataccaagttgaatatgccatggaagctattggacatgcaggcacctgtttgggaattttagcaaatgatggtgttttgcttgcagcagagagacgcaacatccacaagcttcttgatgaagtctttttttctgaaaaaatttataaactcaatgaggacatggcttgcagtgtggcaggcataacttctgatgctaatgttctgactaatgaactaaggctcattgctcaaaggtatttattacagtatcaggagccaataccttgtgagcagttggttacagcgctgtgtgatatcaaacaagcttatacacaatttggaggaaaacgtccctttggtgtttcattgctgtacattggctgggataagcactatggctttcagctctatcagagtgaccctagtggaaattacgggggatggaaggccacatgcattggaaataatagcgctgcagctgtgtcaatgttgaaacaagactataaagaaggagaaatgaccttgaagtcagcacttgctttagctatcaaagtactaaataagaccatggatgttagtaaactctctgctgaaaaagtggaaattgcaacactaacaagagagaatggaaagacagtaatcagagttctcaaacaaaaagaagtggagcagttgatcaaaaaacacgaggaagaagaagccaaagctgagcgtgagaagaaagaaaaagaacagaaagaaaaggataaatagaatcagagattttattactcatttggggcaccatttcagtgtaaaagcagtcctactcttccacactaggaaggctttactttttttaactggtgcagtgggaaaataggacattacatactgaattgggtccttgtcatttctgtccaattgaatactttattgtaacgatgatggttacccttcatggacgtcttaatcttccacacacatcccctttttttggaataaaatttggaaaatggaaatgaagga

SEQ ID NO: 105643 - DNA, 3074 bp, Homo sapiens
ccccgccccaacccagcggttctgcgcatgcgcgggggccatattagcagcggttattcggtgagcggtggtggtttattcttccgtggagttaagggctccgtggacatctcaggtcttcagggtcttccatctggtgagcctttggccccttggggcccgcggaagcttggccgctttcccattgggcgggggtcgtgaacgtcaagacagtcggtcccggcctgcagttgccgccgaggagccgtgggcacgatgactctgcaccgcctcctctgtgacggaccgacagccgggaatggcccccgccggccgccgtcgggggcttcccagtgccaagcctggacgccggggcccgcgagggggcgggctgagggtgggggtctgtgggcaggaccgagagttggggtggcttccgtcctcaggagttcggtacgtgaaagttagctctcccggaggtgccggtgaactcaaaatcgtgctgtgcccggcgtcaggcgtggagacaacagaaagttgtgcttaaagctcgaatcagaaatccccggcgagtgtctctgtgtcctccctgcttctctgctctgtgccatccttactttgcaccattcctattgcaattacctcaaccagttcgctgccctcggtctctcaccagccagagtgatcatttaaaatgccaatcagttcctgtgggccttgggaatcattcagaggagccccattggctgagagataaaattctgtttttacctgggcacgcgggctctccaggatttgattccagcttacctttccagtcttgattccctatattccagtatttggaaatgtgggccttggactgaggctttaccaaataacgctgagcacctagtattgcctttgcacgaatggtactgatggtgcccaagataactgcctccacccccaagttcaggacccagatcactctctggagaaggcctcagcctcttgccttggctttcaaggctctgcgtgatttggatactcgcttagctcttatttatatatattttaaaagcatcagcagtttatctcatgcccactaaactatcctgcctccgtaccctttgttcatactttctgctctgtgtggaatgcccttctttcttcccctgttctttctcttagacccaagggttctcagccttatttctgcctctcccatctctgatttactttcattttctgtatcgatttctcaaaaaatactttcttgattctttcatcatcccttttcccaccctacccccggttcctctttccacattataatctatgactgcctctctcacctaactgccagtattagcttttcaggacaggaactggttttacacattttggtattccagcatctagcataatgcctgacacttagctgaataaagggagtaaataaaacagatttgtaaagtcagcaaatgctttttaatttgtgaatcttattttaatgatgatctgattttctttttacaggaactatataaagttcagaaaacatggtgagttaatacacatgccaataaacggttgcctgataaacagtattgcttgtactcagtttacagacttgagtgggaaaattgaaatagaaggaaagcagtgagaaggtgcctttttttcttgtcagtttcctctcacctattgaactttgtataccaggataggttttgtaagatcatttgtaggcttgcaggagttggcctactttcagtgggtaggaatcactcatgtgtttttcctttgcagtctcgaagatatgactccaggaccactatattttctccagaaggtaaaatagaaattgtttaatctgcctcaagtttaaaaataaatgtgttagacttttagaaaaaaaaattacaaactttttttggtagttgcaaagttcatcctttttgtactttgaagcaattatcatcaccaggttgattataccatagaagagtgaaagtggaaatttgtttctagcttgcttcattgctgatttcttttgggccagtggtgcaggagcacagaggagagtcttggcttctcactgcttttgttttgtaggtcgcttataccaagttgaatatgccatggaagctattggacatgcaggcacctgtttgggaattttagcaaatgatggtgttttgcttgcagcagagagacgcaacatccacaagcttcttgatgaagtctttttttctgaaaaaatttataaactcaatgaggacatggcttgcagtgtggcaggcataacttctgatgctaatgttctgactaatgaactaaggctcattgctcaaaggtatttattacagtatcaggagccaataccttgtgagcagttggttacagcgctgtgtgatatcaaacaagcttatacacaatttggaggaaaacgtccctttggtgtttcattgctgtacattggctgggataagcactatggctttcagctctatcagagtgaccctagtggaaattacgggggatggaaggccacatgcattggaaataatagcgctgcagctgtgtcaatgttgaaacaagactataaagaaggagaaatgaccttgaagtcagcacttgctttagctatcaaagtactaaataagaccatggatgttagtaaactctctgctgaaaaagtggaaattgcaacactaacaagagagaatggaaagacagtaatcagagttctcaaacaaaaagaagtggagcagttgatcaaaaaacacgaggaagaagaagccaaagctgagcgtgagaagaaagaaaaagaacagaaagaaaaggataaatagaatcagagattttattactcatttggggcaccatttcagtgtaaaagcagtcctactcttccacactaggaaggctttactttttttaactggtgcagtgggaaaataggacattacatactgaattgggtccttgtcatttctgtccaattgaatactttattgtaacgatgatggttacccttcatggacgtcttaatcttccacacacatcccctttttttggaataaaatttggaaaatggaaatgaagga

SEQ ID NO: 105644 - DNA, 1591 bp, Homo sapiens
tgcctgtaccggtccgaggtggttatgaagcggttattcggtgagcggtggtggtttattcttccgtggagttaagggctccgtggacatctcaggtcttcagggtcttccatctggtgagcctttggccccttggggcccgcggaagcttggccgctttcccattgggcgggggtcgtgaacgtcaagacagtcggtcccggcctgcagttgccgccgaggagccgtgggcacgatgactctgcaccgcctcctctgtgacggaccgacagccgggaatggcccccgccggccgccgtcgggggcttcccagtgccaagcctggacgccggggcccgcgagggggcgggctgagggtgggggtctgtgggcaggaccgagagttggggtggcttccgtcctcaggagttcggtacgtgaaagttagctctcccggaggtgccggtgaactcaaaatcgtgctgtgcccggcgtcaggcgtggagacaacagaaagttgtgcttaaagctcgaatcagaaatccccggaactatataaagttcagaaaacatgtctcgaagatatgactccaggaccactatattttctccagaaggtcgcttataccaagttgaatatgccatggaagctattggacatgcaggcacctgtttgggaattttagcaaatgatggtgttttgcttgcagcagagagacgcaacatccacaagcttcttgatgaagtctttttttctgaaaaaatttataaactcaatgaggacatggcttgcagtgtggcaggcataacttctgatgctaatgttctgactaatgaactaaggctcattgctcaaaggtatttattacagtatcaggagccaataccttgtgagcagttggttacagcgctgtgtgatatcaaacaagcttatacacaatttggaggaaaacgtccctttggtgtttcattgctgtacattggctgggataagcactatggctttcagctctatcagagtgaccctagtggaaattacgggggatggaaggccacatgcattggaaataatagcgctgcagctgtgtcaatgttgaaacaagactataaagaaggagaaatgaccttgaagtcagcacttgctttagctatcaaagtactaaataagaccatggatgttagtaaactctctgctgaaaaagtggaaattgcaacactaacaagagagaatggaaagacagtaatcagagttctcaaacaaaaagaagtggagcagttgatcaaaaaacacgaggaagaagaagccaaagctgagcgtgagaagaaagaaaaagaacagaaagaaaaggataaatagaatcagagattttattactcatttggggcaccatttcagtgtaaaagcagtcctactcttccacactaggaaggctttactttttttaactggtgcagtgggaaaataggacattacatactgaattgggtccttgtcatttctgtccaattgaatactttattgtaacgatgatggttacccttcatggacgtcttaatcttccacacacatcccctttttttggaataaaatttggaaaatggaaatgaagga

SEQ ID NO: 105645 - DNA, 1690 bp, Homo sapiens
tgcctgtaccggtccgaggtggttatgaagcggttattcggtgagcggtggtggtttattcttccgtggagttaagggctccgtggacatctcaggtcttcagggtcttccatctggaactatataaagttcagaaaacatggtgagttaatacacatgccaataaacggttgcctgataaacagtattgcttgtactcagtttacagacttgagtgggaaaattgaaatagaaggaaagcagtgagaaggtgcctttttttcttgtcagtttcctctcacctattgaactttgtataccaggataggttttgtaagatcatttgtaggcttgcaggagttggcctactttcagtgggtaggaatcactcatgtgtttttcctttgcagtctcgaagatatgactccaggaccactatattttctccagaaggtaaaatagaaattgtttaatctgcctcaagtttaaaaataaatgtgttagacttttagaaaaaaaaattacaaactttttttggtagttgcaaagttcatcctttttgtactttgaagcaattatcatcaccaggttgattataccatagaagagtgaaagtggaaatttgtttctagcttgcttcattgctgatttcttttgggccagtggtgcaggagcacagaggagagtcttggcttctcactgcttttgttttgtaggtcgcttataccaagttgaatatgccatggaagctattggacatgcaggcacctgtttgggaattttagcaaatgatggtgttttgcttgcagcagagagacgcaacatccacaagcttcttgatgaagtctttttttctgaaaaaatttataaactcaatgaggacatggcttgcagtgtggcaggcataacttctgatgctaatgttctgactaatgaactaaggctcattgctcaaaggtatttattacagtatcaggagccaataccttgtgagcagttggttacagcgctgtgtgatatcaaacaagcttatacacaatttggaggaaaacgtccctttggtgtttcattgctgtacattggctgggataagcactatggctttcagctctatcagagtgaccctagtggaaattacgggggatggaaggccacatgcattggaaataatagcgctgcagctgtgtcaatgttgaaacaagactataaagaaggagaaatgaccttgaagtcagcacttgctttagctatcaaagtactaaataagaccatggatgttagtaaactctctgctgaaaaagtggaaattgcaacactaacaagagagaatggaaagacagtaatcagagttctcaaacaaaaagaagtggagcagttgatcaaaaaacacgaggaagaagaagccaaagctgagcgtgagaagaaagaaaaagaacagaaagaaaaggataaatagaatcagagattttattactcatttggggcaccatttcagtgtaaaagcagtcctactcttccacactaggaaggctttactttttttaactggtgcagtgggaaaataggacattacatactgaattgggtccttgtcatttctgtccaattgaatactttattgtaacgatgatggttacccttcatggacgtcttaatcttccacacacatcccctttttttggaataaaatttggaaaatggaaatgaagga

SEQ ID NO: 105646 - DNA, 1137 bp, Homo sapiens
tgcctgtaccggtccgaggtggttatgaagcggttattcggtgagcggtggtggtttattcttccgtggagttaagggctccgtggacatctcaggtcttcagggtcttccatctggaactatataaagttcagaaaacatggtcgcttataccaagttgaatatgccatggaagctattggacatgcaggcacctgtttgggaattttagcaaatgatggtgttttgcttgcagcagagagacgcaacatccacaagcttcttgatgaagtctttttttctgaaaaaatttataaactcaatgaggacatggcttgcagtgtggcaggcataacttctgatgctaatgttctgactaatgaactaaggctcattgctcaaaggtatttattacagtatcaggagccaataccttgtgagcagttggttacagcgctgtgtgatatcaaacaagcttatacacaatttggaggaaaacgtccctttggtgtttcattgctgtacattggctgggataagcactatggctttcagctctatcagagtgaccctagtggaaattacgggggatggaaggccacatgcattggaaataatagcgctgcagctgtgtcaatgttgaaacaagactataaagaaggagaaatgaccttgaagtcagcacttgctttagctatcaaagtactaaataagaccatggatgttagtaaactctctgctgaaaaagtggaaattgcaacactaacaagagagaatggaaagacagtaatcagagttctcaaacaaaaagaagtggagcagttgatcaaaaaacacgaggaagaagaagccaaagctgagcgtgagaagaaagaaaaagaacagaaagaaaaggataaatagaatcagagattttattactcatttggggcaccatttcagtgtaaaagcagtcctactcttccacactaggaaggctttactttttttaactggtgcagtgggaaaataggacattacatactgaattgggtccttgtcatttctgtccaattgaatactttattgtaacgatgatggttacccttcatggacgtcttaatcttccacacacatcccctttttttggaataaaatttggaaaatggaaatgaagga

SEQ ID NO: 105647 - DNA, 1107 bp, Homo sapiens
ccccgccccaacccagcggttctgcgcatgcgcgggggccatattagcagcggttattcggtgagcggtggtggtttattcttccgtggagttaagggctccgtggacatctcaggtcttcagggtcttccatctggaactatataaagttcagaaaacatgtctcgaagatatgactccaggaccactatattttctccagaagcagagagacgcaacatccacaagcttcttgatgaagtctttttttctgaaaaaatttataaactcaatgaggacatggcttgcagtgtggcaggcataacttctgatgctaatgttctgactaatgaactaaggctcattgctcaaaggtatttattacagtatcaggagccaataccttgtgagcagttggttacagcgctgtgtgatatcaaacaagcttatacacaatttggaggaaaacgtccctttggtgtttcattgctgtacattggctgggataagcactatggctttcagctctatcagagtgaccctagtggaaattacgggggatggaaggccacatgcattggaaataatagcgctgcagctgtgtcaatgttgaaacaagactataaagaaggagaaatgaccttgaagtcagcacttgctttagctatcaaagtactaaataagaccatggatgttagtaaactctctgctgaaaaagtggaaattgcaacactaacaagagagaatggaaagacagtaatcagagttctcaaacaaaaagaagtggagcagttgatcaaaaaacacgaggaagaagaagccaaagctgagcgtgagaagaaagaaaaagaacagaaagaaaaggataaatagaatcagagattttattactcatttggggcaccatttcagtgtaaaagcagtcctactcttccacactaggaaggctttactttttttaactggtgcagtgggaaaataggacattacatactgaattgggtccttgtcatttctgtccaattgaatactttattgtaacgatgatggttacccttcatggacgtcttaatcttccacacacatcccctttttttggaataaaatttggaaaatggaaatgaagga

SEQ ID NO: 105648 - DNA, 1037 bp, Homo sapiens
ccccgccccaacccagcggttctgcgcatgcgcgggggccatattagcagcggttattcggtgagcggtggtggtttattcttccgtggagttaagggctccgtggacatctcaggtcttcagggtcttccatctggaactatataaagttcagaaaacatgtctcgaagatatgactccaggaccactatattttctccagaagggacatggcttgcagtgtggcaggcataacttctgatgctaatgttctgactaatgaactaaggctcattgctcaaaggtatttattacagtatcaggagccaataccttgtgagcagttggttacagcgctgtgtgatatcaaacaagcttatacacaatttggaggaaaacgtccctttggtgtttcattgctgtacattggctgggataagcactatggctttcagctctatcagagtgaccctagtggaaattacgggggatggaaggccacatgcattggaaataatagcgctgcagctgtgtcaatgttgaaacaagactataaagaaggagaaatgaccttgaagtcagcacttgctttagctatcaaagtactaaataagaccatggatgttagtaaactctctgctgaaaaagtggaaattgcaacactaacaagagagaatggaaagacagtaatcagagttctcaaacaaaaagaagtggagcagttgatcaaaaaacacgaggaagaagaagccaaagctgagcgtgagaagaaagaaaaagaacagaaagaaaaggataaatagaatcagagattttattactcatttggggcaccatttcagtgtaaaagcagtcctactcttccacactaggaaggctttactttttttaactggtgcagtgggaaaataggacattacatactgaattgggtccttgtcatttctgtccaattgaatactttattgtaacgatgatggttacccttcatggacgtcttaatcttccacacacatcccctttttttggaataaaatttggaaaatggaaatgaagga

SEQ ID NO: 105649 - DNA, 1019 bp, Homo sapiens
  misc_feature (17)..(17): n is a, c, g, or t
cggacgcgtgggtcganccacgcgtccgatagcggttattcggtgagcggtggtggtttattcttccgtggagttaagggctccgtggacatctcaggtcttcagggtcttccatctggaactatataaagttcagaaaacatgtctcgaagatatgactccaggaccactatattttctccagaagggacatggcttgcagtgtggcaggcataacttctgatgctaatgttctgactaatgaactaaggctcattgctcaaaggtatttattacagtatcaggagccaataccttgtgagcagttggttacagcgctgtgtgatatcaaacaagcttatacacaatttggaggaaaacgtccctttggtgtttcattgctgtacattggctgggataagcactatggctttcagctctatcagagtgaccctagtggaaattacgggggatggaaggccacatgcattggaaataatagcgctgcagctgtgtcaatgttgaaacaagactataaagaaggagaaatgaccttgaagtcagcacttgctttagctatcaaagtactaaataagaccatggatgttagtaaactctctgctgaaaaagtggaaattgcaacactaacaagagagaatggaaagacagtaatcagagttctcaaacaaaaagaagtggagcagttgatcaaaaaacacgaggaagaagaagccaaagctgagcgtgagaagaaagaaaaagaacagaaagaaaaggataaatagaatcagagattttattactcatttggggcaccatttcagtgtaaaagcagtcctactcttccacactaggaaggctttactttttttaactggtgcagtgggaaaataggacattacatactgaattgggtccttgtcatttctgtccaattgaatactttattgtaacgatgatggttacccttcatggacgtcttaatcttccacacacatcccctttttttggaataaaatttggaaaatggaaatgaagga

SEQ ID NO: 105650 - DNA, 1122 bp, Homo sapiens
ccccgccccaacccagcggttctgcgcatgcgcgggggccatattagcagcggttattcggtgagcggtggtggtttattcttccgtggagttaagggctccgtggacatctcaggtcttcagggtcttccatctggaactatataaagttcagaaaacatgtctcgaagatatgactccaggaccactatattttctccagaaggtcgcttataccaagttgaatatgccatggaagctattggacatgcaggcacctgtttgggaattttagcaaatgatggtgttttgcttgcagcagagagacgcaacatccacaagcttcttgatgaagtctttttttctgaaaaaatttataaactcaatgagtatttattacagtatcaggagccaataccttgtgagcagttggttacagcgctgtgtgatatcaaacaagcttatacacaatttggaggaaaacgtccctttggtgtttcattgctgtacattggctgggataagcactatggctttcagctctatcagagtgaccctagtggaaattacgggggatggaaggccacatgcattggaaataatagcgctgcagctgtgtcaatgttgaaacaagactataaagaaggagaaatgaccttgaagtcagcacttgctttagctatcaaagtactaaataagaccatggatgttagtaaactctctgctgaaaaagtggaaattgcaacactaacaagagagaatggaaagacagtaatcagagttctcaaacaaaaagaagtggagcagttgatcaaaaaacacgaggaagaagaagccaaagctgagcgtgagaagaaagaaaaagaacagaaagaaaaggataaatagaatcagagattttattactcatttggggcaccatttcagtgtaaaagcagtcctactcttccacactaggaaggctttactttttttaactggtgcagtgggaaaataggacattacatactgaattgggtccttgtcatttctgtccaattgaatactttattgtaacgatgatggttacccttcatggacgtcttaatcttccacacacatcccctttttttggaataaaatttggaaaatggaaatgaagga

SEQ ID NO: 105651 - DNA, 887 bp, Homo sapiens
ccccgccccaacccagcggttctgcgcatgcgcgggggccatattagcagcggttattcggtgagcggtggtggtttattcttccgtggagttaagggctccgtggacatctcaggtcttcagggtcttccatctggaactatataaagttcagaaaacatgtctcgaagatatgactccaggaccactatattttctccagaaggtcgcttataccaagttgaatatgccatggaagctattggacatgcaggcacctgtttgggaattttagcaaatgatggtgttttgcttgcagcagagagacgcaacatccacaagcttcttgatgaagtctttttttctgaaaaaatttataaactcaatgaggacatggcttgcagtgtggcaggcataacttctgatgctaatgttctgactaatgaactaaggctcattgctcaaaggtatttattacagtatcaggagccaataccttgtgagcagttggttacagcgctgtgtgatatcaaacaagcttatacacaatttggaggaaaacgtccctttggtgtttcattgctgtacattggctgggataagcactatggctttcagctctatcagagtgaccctagtggaaattacgggggatggaggcaatgttggaatataggggtgggtgtgtcatgtgaacagatttaagaggaatgacttgagtcggctgtttgtttcaagtctatagactgtgttgtaacctcgtgagcagtggatggctacagaagaggagaggatcagtttaaaaaaggggggtcaacaggggaacgtggggaaaaacacaagggaaatttttggggggaaactccagagttggggggaaaagggggtgtgatgacctaaaaagtcta

SEQ ID NO: 105652 - DNA, 465 bp, Homo sapiens
  misc_feature (45)..(45): n is a, c, g, or t
  misc_feature (47)..(47): n is a, c, g, or t
tcgctttcctgaatcacgttgttctactattcgcgacaacaccgnanaggcttgttggaaattgcaacactaacaagagagaatggaaagacagtaatcagagttctcaaacaaaaagaagtggagcagttgatcaaaaaacacgaggaagaagaagccaaagctgagcgtgagaagaaagaaaaagaacagaaagaaaaggataaatagaatcagagattttattactcatttggggcaccatttcagtgtaaaagcagtcctactcttccacactaggaaggctttactttttttaactggtgcagtgggaaaataggacattacatactgaattgggtccttgtcatttctgtccaattgaatactttattgtaacgatgatggttacccttcatggacgtcttaatcttccacacacatcccctttttttggaataaaatttggaaaatggaaatgaagga

SEQ ID NO: 105653 - DNA, 995 bp, Homo sapiens
  misc_feature (859)..(859): n is a, c, g, or t
  misc_feature (862)..(862): n is a, c, g, or t
ccccgccccaacccagcggttctgcgcatgcgcgggggccatattagcagcggttattcggtgagcggtggtggtttattcttccgtggagttaagggctccgtggacatctcaggtcttcagggtcttccatctggaactatataaagttcagaaaacatgtctcgaagatatgactccaggaccactatattttctccagaaggtcgcttataccaagttgaatatgccatggaagctattggacatgcaggcacctgtttgggaattttagcaaatgatggtgttttgcttgcagcagagagacgcaacatccacaagcttcttgatgaagtctttttttctgaaaaaatttataaactcaatgaggacatggcttgcagtgtggcaggcataacttctgatgctaatgttctgactaatgaactaaggctcattgctcaaagtggaaattgcaacactaacaagagagaatggaaagacagtaatcagagttctcaaacaaaaagaagtggagcagttgatcaaaaaacacgaggaagaagaagccaaagctgagcgtgagaagaaagaaaaagaacagaaagaaaaggataaatagaatcagagattttattactcatttggggcaccatttcagtgtaaaagcagtcctactcttccacactaggaaggctttactttttttaactggtgcagtgggaaaataggacattacatactgaattgggtccttgtcatttctgtccaattgaatactttattgtaacgatgatggttacccttcatggacgtcttaatcttccacacacatcccctttttttggaataaaatttggaaaatggaaatgaaggaaanaanaaaaaaatgagatactaaaaaatatttttattataaaaaatacctcttttatccataagggggatatatttttataagattccctcggggggggggggcccggccccaattggcccctttaagggatgtgttt

SEQ ID NO: 105654 - DNA, 368 bp, Homo sapiens
cgactctagaggctccctcattagtggagcagttgatcaaaaaacacgaggaagaagaagccaaagctgagcgtgagaagaaagaaaaagaacagaaagaaaaggataaatagaatcagagattttattactcatttggggcaccatttcagtgtaaaagcagtcctactcttccacactaggaaggctttactttttttaactggtgcagtgggaaaataggacattacatactgaattgggtccttgtcatttctgtccaattgaatactttattgtaacgatgatggttacccttcatggacgtcttaatcttccacacacatcccctttttttggaataaaatttggaaaatggaaatgaagga

SEQ ID NO: 105655 - DNA, 1130 bp, Homo sapiens
  misc_feature (44)..(44): n is a, c, g, or t
agaaaacgctacgccatcaacaatcagaaaaaaccccccccccnctttgtggaaattgcaacactaacaagagagaatggaaagacagtaatcagagttctcaaacaaaaagaagtggagcagttgatcaaaaaacacgaggaagaagaagccaaagctgagcgtgagaagaaagaaaaagaacagaaagaaaaggataaatagaatcagagattttattactcatttggggcaccatttcagtgtaaaagcagtcctactcttccacactaggaaggctttactttttttaactggtgcagtgggaaaataggacattacatactgaattgggtccttgtcatttctgtccaattgaatactttattgtaacgatgatggttacccttcatggacgtcttaatcttccacacacatcccctttttttggaataaaatttggaaaatggaaatgaaggaaaaaaaaaaaaaaaaaaaaaaaaaaaaaaaaaaaaaaaaaaaaaaaaaaaaaaaaaaagataaatagaaatgaacaagacgataataataataaaagcatataataaaagtaaaaaccagataaataaagaaaagaagaacaaccaaaacaagcacaacataaattacccaagatgacaatgaccttttcgatcacctactaccaactcccgcccctcaagcctcaaagcaagcaccatctccctctatgttcggcgtccattatcactcaacatcaccagcgacaccaccatttctcgccgagtcagcgttcccgccagcacctccaccacccctccacacacctccaagcctgcaacgtccctctgatcaccatgatcacgcatccccacgtactacgtgatatacgggacgcgccagcacaacgggcccgtgcctacacacaaagaacactaagcctcggatgcagagaacgagaccctataacacgcaccagctaaaacgccgagacatcaacttccaccatactctgtccccaatcgagcagtagacacaacgtcttatcacctcgtgccgactcacactcaaaccatacgggcatcacgcgccgtcgctaccagcgactacacagagcgacagaagtagacacacaagacaccatctaggcatca

SEQ ID NO: 105656 - DNA, 1234 bp, Homo sapiens
ccccgccccaacccagcggttctgcgcatgcgcgggggccatattagcagcggttattcggtgagcggtggtggtttattcttccgtggagttaagggctccgtggacatctcaggtcttcagggtcttccatctggaactatataaagttcagaaaacatgtctcgaagatatgactccaggaccactatattttctccagaaggtcgcttataccaagttgaatatgccatggaagctattggacatgcaggcacctgtttgggaattttagcaaatgatggtgttttgcttgcagcagagagacgcaacatccacaagcttcttgatgaagtctttttttctgaaaaaatttataaactcaatgaggacatggcttgcagtgtggcaggcataacttctgatgctaatgttctgactaatgaactaaggctcattgctcaaaggtatttattacagtatcaggagccaataccttgtgagcagttggttacagcgctgtgtgatatcaaacaagcttatacacaatttggaggaaaacgtccctttggtgtttcattgctgtacattggctgggataagcactatggctttcagctctatcagagtgaccctagtggaaattacgggggatggaaggccacatgcattggaaataatagcgctgcagctgtgtcaatgttgaaacaagactataaagaaggagaaatgaccttgaagtcagcacttgctttagctatcaaagtactaaataagaccatggatgttagtaaactctctgctgaaaaagtggaaattgcaacactaacaagagagaatggaaagacagtaatcagagttctcaaacaaaaagaagtggagcagttgatcaaaaaacacgaggaagaagaagccaaagctgagcgtgagaagaaagaaaaagaacagaaagaaaaggataaatagaatcagagattttattactcatttggggcaccatttcagtgtaaaagcagtcctactcttccacactaggaaggctttactttttttaactggtgcagtgggaaaataggacattacatactgaattgggtccttgtcatttctgtccaattgaatactttattgtaacgatgatggttacccttcatggacgtcttaatcttccacacacatcccctttttttggaataaaatttggaaaatggaaatgaaggaaaaacagaaaaatggcctcgttggcctcagaggc

SEQ ID NO: 105657 - DNA, 1286 bp, Homo sapiens
ccccgccccaacccagcggttctgcgcatgcgcgggggccatattagcagcggttattcggtgagcggtggtggtttattcttccgtggagttaagggctccgtggacatctcaggtcttcagggtcttccatctggaactatataaagttcagaaaacatgtctcgaagatatgactccaggaccactatattttctccagaaggtcgcttataccaagttgaatatgccatggaagctattggacatgcaggcacctgtttgggaattttagcaaatgatggtgttttgcttgcagcagagagacgcaacatccacaagcttcttgatgaagtctttttttctgaaaaaatttataaactcaatgaggacatggcttgcagtgtggcaggcataacttctgatgctaatgttctgactaatgaactaaggctcattgctcaaaggtatttattacagtatcaggagccaataccttgtgagcagttggttacagcgctgtgtgatatcaaacaagcttatacacaatttggaggaaaacgtccctttggtgtttcattgctgtacattggctgggataagcactatggctttcagctctatcagagtgaccctagtggaaattacgggggatggaaggccacatgcattggaaataatagcgctgcagctgtgtcaatgttgaaacaagactataaagaaggagaaatgaccttgaagtcagcacttgctttagctatcaaagtactaaataagaccatggatgttagtaaactctctgctgaaaaagtggaaattgcaacactaacaagagagaatggaaagacagtaatcagagttctcaaacaaaaagaagtggagcagttgatcaaaaaacacgaggaagaagaagccaaagctgagcgtgagaagaaagaaaaagaacagaaagaaaaggataaatagaatcagagattttattactcatttggggcaccatttcagtgtaaaagcagtcctactcttccacactaggaaggctttactttttttaactggtgcagtgggaaaataggacattacatactgaattgggtccttgtcatttctgtccaattgaatactttattgtaacgatgatggttacccttcatggacgtcttaatcttccacacacatcccctttttttggaataaaatttggaaaatggaaatgaaggaaaaaaccaaacaaaaatactaacaaaaccgaccaactcgccggaaggaacaaaaaacagaaaaatggcctcgttggcctcagaggc

SEQ ID NO: 105658 - DNA, 1871 bp, Homo sapiens
ccccgccccaacccagcggttctgcgcatgcgcgggggccatattagcagcggttattcggtgagcggtggtggtttattcttccgtggagttaagggctccgtggacatctcaggtcttcagggtcttccatctggaactatataaagttcagaaaacatgtctcgaagatatgactccaggaccactatattttctccagaaggtcgcttataccaagttgaatatgccatggaagctattggacatgcaggcacctgtttgggaattttagcaaatgatggtgttttgcttgcagcagagagacgcaacatccacaagcttcttgatgaagtctttttttctgaaaaaatttataaactcaatgaggacatggcttgcagtgtggcaggcataacttctgatgctaatgttctgactaatgaactaaggctcattgctcaaaggtatttattacagtatcaggagccaataccttgtgagcagttggttacagcgctgtgtgatatcaaacaagcttatacacaatttggaggaaaacgtccctttggtgtttcattgctgtacattggctgggataagcactatggctttcagctctatcagagtgaccctagtggaaattacgggggatggaaggccacatgcattggaaataatagcgctgcagctgtgtcaatgttgaaacaagactataaagaaggagaaatgaccttgaagtcagcacttgctttagctatcaaagtactaaataagaccatggatgttagtaaactctctgctgaaaaagtggaaattgcaacactaacaagagagaatggaaagacagtaatcagagttctcaaacaaaaagaagtggagcagttgatcaaaaaacacgaggaagaagaagccaaagctgagcgtgagaagaaagaaaaagaacagaaagaaaaggataaatagaatcagagattttattactcatttggggcaccatttcagtgtaaaagcagtcctactcttccacactaggaaggctttactttttttaactggtgcagtgggaaaataggacattacatactgaattgggtccttgtcatttctgtccaattgaatactttattgtaacgatgatggttacccttcatggacgtcttaatcttccacacacatcccctttttttggaataaaatttggaaaatggaaatgaaggaaaaaaaaaaaaaaaaaaaaaaaaaaaaaaaaaaaaaaaaaaaaaaaaaaaaaaaaaaagataaatagaaatgaacaagacgataataataataaaagcatataataaaagtaaaaaccagataaataaagaaaagaagaacaaccaaaacaagcacaacataaattacccaagatgacaatgaccttttcgatcacctactaccaactcccgcccctcaagcctcaaagcaagcaccatctccctctatgttcggcgtccattatcactcaacatcaccagcgacaccaccatttctcgccgagtcagcgttcccgccagcacctccaccacccctccacacacctccaagcctgcaacgtccctctgatcaccatgatcacgcatccccacgtactacgtgatatacgggacgcgccagcacaacgggcccgtgcctacacacaaagaacactaagcctcggatgcagagaacgagaccctataacacgcaccagctaaaacgccgagacatcaacttccaccatactctgtccccaatcgagcagtagacacaacgtcttatcacctcgtgccgactcacactcaaaccatacgggcatcacgcgccgtcgctaccagcgactacacagagcgacagaagtagacacacaagacaccatctaggcatca

SEQ ID NO: 105659 - DNA, 1200 bp, Homo sapiens
ccccgccccaacccagcggttctgcgcatgcgcgggggccatattagcagcggttattcggtgagcggtggtggtttattcttccgtggagttaagggctccgtggacatctcaggtcttcagggtcttccatctggaactatataaagttcagaaaacatgtctcgaagatatgactccaggaccactatattttctccagaaggtcgcttataccaagttgaatatgccatggaagctattggacatgcaggcacctgtttgggaattttagcaaatgatggtgttttgcttgcagcagagagacgcaacatccacaagcttcttgatgaagtctttttttctgaaaaaatttataaactcaatgaggacatggcttgcagtgtggcaggcataacttctgatgctaatgttctgactaatgaactaaggctcattgctcaaaggtatttattacagtatcaggagccaataccttgtgagcagttggttacagcgctgtgtgatatcaaacaagcttatacacaatttggaggaaaacgtccctttggtgtttcattgctgtacattggctgggataagcactatggctttcagctctatcagagtgaccctagtggaaattacgggggatggaaggccacatgcattggaaataatagcgctgcagctgtgtcaatgttgaaacaagactataaagaaggagaaatgaccttgaagtcagcacttgctttagctatcaaagtactaaataagaccatggatgttagtaaactctctgctgaaaaagtggaaattgcaacactaacaagagagaatggaaagacagtaatcagagttctcaaacaaaaagaagtggagcagttgatcaaaaaacacgaggaagaagaagccaaagctgagcgtgagaagaaagaaaaagaacagaaagaaaaggataaatagaatcagagattttattactcatttggggcaccatttcagtgtaaaagcagtcctactcttccacactaggaaggctttactttttttaactggtgcagtgggaaaataggacattacatactgaattgggtccttgtcatttctgtccaattgaatactttattgtaacgatgatggttacccttcatggacgtcttaatcttccacacacatcccctttttttggaataaaatttggaaaatggaaatgaagga

SEQ ID NO: 105660 - DNA, 302 bp, Homo sapiens
tactttctcttttttcttgaaacagagcctaactctgtcacccagtctggagtggagcaatcctctaatctcagccccctgagtagctgggattacaggcatgcaccaccacacctggctaatttttaaaaatctttggtagagatgggatctcactatgttgcccgggctggtctcaaattcctaggctcaagtgatctcctgcctcagcctctcaaagtgctgggccttctgcttccctgggctttgccaggcctccctatgcattgtgatagccaaagtttgctttctacaaagtcacc

SEQ ID NO: 105661 - DNA, 467 bp, Homo sapiens
gagtcactattttgaagcaaactaagaatttctaaggagcttggagacttgcacatcttctgatattgggaggtcttaggttaaaagacttttttatttggattcattaattgagtgtaggtcattgttaatggaaaatcgttgaacacttaataaatacagctatgtttaaagttcttaaaaatttaaatacagattaggaagcccaaatttcagaggaactggtagaggatttgtgctttgtttttaatgttttaaacagccctgtggttatagtttagaaaggtcatagttttgacggtcctctattaaaagaaagtgatttttccatcagaatacagttgagtgccacagtgtatagagaagccatagctaatactttaaaatgttttacttttaaaatttcaaaacaaactgtaggttttaaaagttttctctctcacagttttaacccaatctgagaaata

SEQ ID NO: 105662 - DNA, 401 bp, Homo sapiens
gcgagcagctactactacggggggcgcggcccgtcgacagaagacacaaagatgtggttataccaacatttgaaattctgcccaaagaagcagaaaaaaggaagaaagaaaggaaggaacgaattgtgtaacgatagcctattgataataaattatagtacattgattcaatggaaccctataccaccacaaagaaaactgttagagatttatatttattaacataaaagattgtcagtgaaatattaaatgaaaaaagcaaataaccagacagtaaatgaatgtattcttctttccaaaaacagtgtatgtctatatacatgcactgtcatgcaaagaaaaggaaatatcacaaaatgtaaacactggttgtcgacgaggggcgggttataggagaagaa

SEQ ID NO: 105663 - DNA, 475 bp, Homo sapiens
aggggagccagaggcaggaagaggaagagcaggtagacagggtatgctcggcagtctgtaaaatccagtataaggctatataataacacattaagtcttctgtagttaaatctaattttcttagcttctataattaagcctaagttatcttcatttttgtagttagggccacagtcttgtcaaaattgtccagtatttatactgtggatcataaaacttaggctggaaaggcctataagatcatagagttcaaccctagcccatcccacatgcaggaccctgccctgggctccttctcaggctttcccagggaaagggcatttttgatgttgttggcagcatggccgtgtggcataactcttgaaattctggctcctttatttttccactctggtcctgggtgtttgcacaaggtcagcctactgccttgtgtacaggatcccttcagacattcgctggcagcaccaggcacttt

SEQ ID NO: 105664 - DNA, 351 bp, Homo sapiens
cattgtccaggctagaatgcagtggcacgatcttagctcaccacaacctgcgcctccctggctcaagcaatcttcccggcttagcctcccaagcagctgggactataggcacacaccaccatgcctggctaatttttgtatgttttgtagagacgggtttcgccatgttgaccaggctggtcttgaactcctgggctcaagtgatctgcccacatcactctcccaaagtgttgggattacaggcgtgagccaccatgcctggcctgaatcttaaatatacatattcatctagcaaataatatatgttaaaaaacagggtatggttgactaaggacgttggcccagatatac

SEQ ID NO: 105665 - DNA, 449 bp, Homo sapiens
taacaacagctgattttcactctacatcttaattgacctctctacagcatttgacaccattgtttccatgggtgccctaccccttcccaacttgcaccaacaaactccctcttttcttggcttatgtaatgctggctgccctggttttcttcctgcttttctgtgtttttgcttataaagcttattctcctctacccagccagtaaagggtagagttcctcaaaaatgccatcttaggctctttcttcttctcactctacactccttaacaggcagggctgagtggctcacacctgtaatctcagcattttgggaggccagggcaagaagaccacttgaggccaggagttcaagaccatcctgggcaacaaagtcagaccctgtttttacaaaaaataaatataaaacatccttgaaaatatattatcagaggaattgtagagtactga

SEQ ID NO: 105666 - DNA, 117 bp, Homo sapiens
gacatccccagtcaacacacacacacgtacgtgtaatgtaatgctgttgcattatcaaagccacacctctcccacagttataaagaacaggattacttaatggttaaaagcttgaca

SEQ ID NO: 105667 - DNA, 408 bp, Homo sapiens
ttatccctatgcggatccagaagggattttactgatgaagaaactaaagctcagagaagcaaagtgactttccaaaaggtcacacagccagtaagtgatggaaggataaatccaggcctgcccgatgttgcagcccaggtcctttccagtatgccatgttgggaagaagagacaaagagagagaaaagggtagagatggacggaagacggtagaggtggagatcagcacacacaaacacacatgaagacagagaaaacagggaggtaagggctccaagagacaggtaccccatgcttgaccagtggtcttcccccgtgacctcgccacttggaccagcctccatttccaaaacccagggaagggccaggcatggtggctcatacctgtaatctcaatactttgggagg

SEQ ID NO: 105668 - DNA, 296 bp, Homo sapiens
ggctggagataccaaaaatgaccaacagggtgaggacaagtgaccttccaacctaaggaatatgaggcaatgtacagggatgaatctggacagagcccaaatccctaccaccagggaacttgagccagtggcaccttctgcggcacttcaatttcctcctctgtaaaatgaggtgaagatgccaacctggtggggtgtctggtaggactgaaggagccctggcactgtgtttggcacacagcaggtgctcagtaagcataacatccaaagatgacctacagcatgtgtccagaccc

SEQ ID NO: 105669 - DNA, 275 bp, Homo sapiens
attccaactccagtgcagaattcccttgacacccccctcactattcacctggggctcagagacacctccttaactcatgcagtgcatatgatctgcatgcccattaggcatttacctattgtgaatctgctggtctggaaaagaatctgttcctgcttctgctgcctgattgtgtgatatgtagagggaaattactcttgataatttgaatctatttgtcatttccccttgtcaaattgtatgtgcgaaaagcctacagaatctaccattcattc

SEQ ID NO: 105670 - DNA, 405 bp, Homo sapiens
  misc_feature (310)..(310): n is a, c, g, or t
gtggtttataatcccacaggtccattctattataaactgcaggtggcaaatcaagtgactatgaactatgctgtgtgtatgtgtgtgtgtgtgtgtgtgtgtagattctattaagaaatgttctaggctgggtgcggtgactcacgcctgtaatcccagcactttgggaggctgaggcaggcggatcacgaggtcaggagatcgagaccatcctggctaacacagtgaaaccccatctctactaaaaatataaaaacttagccaggcgtggtggcaggcgcctgtaatcccagctactggggaggctgangcagaagaatggcgtgaactggggaggcagagcttgcagtgagaggagatggcgccactgtgccactgcactccacctgggcgacagagcgagac

SEQ ID NO: 105671 - DNA, 1520 bp, Homo sapiens
tactgaaaatgtggctttcataattgtcttagcttagaccattcatagcattattacccaccttgggagtgggaatggtaggaggaggataatgaactggggaagcttcctttagctccccagtaccaaaaccacactaaataagttttgatttcctgggcttccttgttttatgttgaaattggtggtgaggctcagtaatagtttcttaaatgttaaggctagaagttgtacaccacctagtggctgtgtacattaaaacaggaagcagaaaccggccaggaagagggagccggatctggatgtgtctattggagtgactgcagcactccatatagaacctgggcattgctctctttatttttaattgaagtaaaatttgtgatagcattttacaaattgaaaatagctgtgtcatttaaaaaattcccattaaatttgttcccagtacccctcatgtttccagtgatttccttctactctgtcagtgtgcggttaagccgtatagactcattttaatactaatgtcagccaaataaaattaataagttaaacttatttcccttatcattatatacatcctaaagccaatgtattttaaaattgcttgtaccattgcctgctctcctttgataaaaattgtagtttcacttagcatatgtttattgattatagtcacaaaatagaccttgggtgtattgcataaaacatgatcctagcatagaggaggagatggacatgtaaatacataattgcaacaggttataacatgtatgactcttacaatagacgtctctatagcagttaatgctggccggatgcggtggctcatgcctgtaatcccagcactttggaaggccaaggcaggcggatcacctgttggtagttcgagaccagcctggccaacatggtgaaaccccgtctttactaaaaatacaaaactagccaggcatggtggtgtgcacgtgtagtcccagctactccggaggctgaggcaggagaattgcttgaacctgggaggtggaggttgcagtgagccaagatcatgccaccacactccatcctgggtgacagagcaagactttgtctcaaacaaacaaacaaaaaaacaacaacaactctatagcagttagggagagaggatacaaaggaaggagtggttgatctgccaagggagatttagaagactatttggaggaatgatacctgagttctgtcctaaaagttgagaaattgttcacaaggttgacagaaagtgagctactccaggcagaaggaacagcttagacaaaagctcagtggtataaaacaacatggtatatttcaggaactacagctgattcagtgagatatatctgactagagaagtgggtaggggccagaaagtaggctttgtatgcagcacttctacttgggaggctgaggcaggagaattgcttgaacccgggaggtggaggttgcagtgagctgagatcgttccactgtactccagcctgggcgacagagtgagactctgtctc

SEQ ID NO: 105672 - DNA, 524 bp, Homo sapiens
tcccaactgccaaatgcaggcctgtagcggtaggagctgagaggagagaaagttccactttttcgactctaccagctgaaaatgcaggcgtcctcacctcctagaaatccaatcatgcttctgttcagtggggccagcctgtgatgtcccagcagctgcctagaacgcaggagtggctggcgcactcccatgtaactctgcatgtgcgccgaccgcctgacggtccttgccagccttgtagtctgtctagtgtcccccaggaacccccttcctcctgtccattcagctaggtctgcaccaataaaatgggcctaaggcgtcgcaggtggtcactagttctggactcgaagtgccttgggcgcagggatgacccaggcttcttgtatcccatcaccgtctaacagtgggcacatgggctcaccacacatgcgtttgcttaccgagccccctgcagggagtgattgcagtcttccctttccattgcctctcagaactcaactgtttctcattctttccgcccagca

SEQ ID NO: 105673 - DNA, 218 bp, Homo sapiens
gtatgaatatgctacagtctgttcactcaccaactgaatgacatttggatttttccaatgccttcctggtatctatttccctccattagtctatgggaagctttctagagaatcattgtgattctaaccaggtatatttggtattttttttgagggcaaaggtttttgggcagcgtcccccaagtcatcctgtataattgtgtactgagtggtccttt

SEQ ID NO: 105674 - DNA, 360 bp, Homo sapiens
agaatgtggggggcacaaaaatgtctgcccttgagctttcaattgaatagacataaatattcctatattaaaagttgtatagtaatataggagaacttggcatatgacttagtggcaaatgagtagtagggataactaatttgagagcttgaacatatgaatgaaaactgaaaaaggtagcacttcatttttacctatacatttctaagtatctgtcatgatatttgaaaatatttgtgtgcaagtatagaatattaccagtactctccatactgtcccatctctgttagtgcttcttgttctgtctcgtatctatgctgttttctcccacaaggttggagtctacttggaacagtttta

SEQ ID NO: 105675 - DNA, 134 bp, Homo sapiens
ctgaatcacagatgagaatgaatgtcactctcttggttccaataatgacctcccatatttaatatggttgaaaatttgggcagtaactaacctctgtttgttggtttatttgttttggagacacggtctcgctc

SEQ ID NO: 105676 - DNA, 399 bp, Homo sapiens
caagcctgatactttatgcttttcagcatattttcatttgaaccttgggagaaaattatgtgtatgtaagatagctattattccattccacagataagaggaaactgaggcatggaagacagccagaataattctagttgcctgacttgtttttttgtttttgttgttttgttttgttttgttttttttgagacagggtctcactctctcactccagcctaggcgacagagcaaaactcccgtctcaaaaacaaaaaacatttattccttttaggcaaggcatcatactcagtatcacgaggaagaataaagatgttggtaacaagttaggcagtggtagctagaaaaaaatctcccagttcttttcttatgtaaaggtgattagtgtttcttgctagt

SEQ ID NO: 105677 - DNA, 508 bp, Homo sapiens
taaatagctgagtctcaatcaatcacagcaaccaagctttaggcagccaacattgaacccatgttctaataaagcaaatgccaagctgtaaccaaaagagctgtctctttacctcgcttctgttttctgtccaaaaatgctgcttgaccacattgcaggtcagagttctctgaacttattctggttctgaaggctgtccgagttgtgaatcgttctttgctcaattaaactctgttaaatttaatgtgtctaaggcctttcctttttaccagtgagtactcaatactttctcaatgacttttgattaattttgattgttaaatagcacatttcaatgaaggtatctcctattcaaaattccctttgcagctatacacactaaaaataacttttaaagtactgtactggctgggcacagtggctcacgcctgaaatcccagcactctgggaggccgagatgggtggatcacttgaggtcaggagctcgagatcagtctggccaacatgg

SEQ ID NO: 105678 - DNA, 364 bp, Homo sapiens
  misc_feature (194)..(194): n is a, c, g, or t
  misc_feature (199)..(199): n is a, c, g, or t
  misc_feature (208)..(208): n is a, c, g, or t
  misc_feature (341)..(341): n is a, c, g, or t
ggcttgaagtttcgggaaaggccatccgctgggctgagactctgtctgactctggacaatgtttaatttttgatcatctattcataattaagaggaagacattgtaaagctgattggaagctccaaatgcagtggcaaagcttcttgaccctgccgccctagcagcccagcttgtccccgcgcccgtccccgcngcggngctccgacnccggcccccggtctacgacgacggccccgcggccgtgtatgtctgaggaggcaggcgacgagacacccgacgtggaccccgagctgttgaggtacttgctgggacggattcttgtcgggaagcgcggtacttncgagggggtgggcagccccgtcg

SEQ ID NO: 105679 - DNA, 317 bp, Homo sapiens
ctggcacagaaaatgtacttaataacttataatcctaattattaattattattatagattgctctcatttactgatccaaatcacatgctatgattttaagtgcctaatatcattagacaaataaatgacaactattaataggattattactatgcttgcagctgaaccaaagagacaggacaaaggactcaaagagcattcacctccacagtagattaaaaagagccacaaagtctttgctgctccccctatcaagagatggagtctattttcacctcctggtgaaaacagcatggccttggcactggcattgacc

SEQ ID NO: 105680 - DNA, 387 bp, Homo sapiens
aaggaagatgtcacctttatcaaggaaacaaaatttccaagcagcgatgatgtcaccatctattgagctcttgagctgtttacaaacatgcactcatttactccttaaagcaaggctgttgttttaatgactagatgtcattatctctattttacaaaaaaggcaatttcaggaagcttaagaaggttaagtttcccaccaaggaagagggaaatagattgaaaatgtcatgcaaaggattcagtccaagactttctgagtagacaacttgagtgccaaaatactggcactaccctttgttattttctgtccagcacacaattcttgggccacttctgtggaatcttggtagtagggacatttatgtaaagtagaggtgctcatttt

SEQ ID NO: 105681 - DNA, 373 bp, Homo sapiens
tgtcgtcaacaatgacctcagatgcacacaaaccctcagtcagtgcaagaatccaagtatccccagagggccagcaagtccagttcaaacaggagctgggaggaaacctggctggtgctcacctgcttgttggggtagggggctgttataaagtgaattatgtcccttgaaattcacaggttgaagtcctacccccaggacctcagaatgtggctgtgtttggagacagagccattaaagaggaaataaaggtaaatgagttccttggggtgggccctactcccataggtctgttgtcctcataagaagggattagggcacagactcacaaggagggatggccctatgaggaccggggaggagactgcatcta

SEQ ID NO: 105682 - DNA, 800 bp, Homo sapiens
aataaatccaaggtgacaaaaacagctgtaaagtttttagctgtcttttcaaaaacgaaagttgtatgctgtacagttgtggtcttggcattcctgtgctgcctatacacaagctatgaagagggagaaaagggggtaaaggtggttgtgctgttacaggttttgtatttaattctagctggcatgtgagggatttcattcatgtgccagagtgggaggtcctggagtggggttgccctgctgtctgaatcttcccaccagctactcctaacgagctctggtggtttaccctaatctagcggcactctttgctttcctgtagctcagtggcttcatctgttttcttgtcttggtcagtcaagggacagatctacgcttgtttagttggtattttggcttcaaactgatttttttttttcttttcagaagcctcagttaaagaatgacttaaatatacttcttccccattataggtgatacaggctcgttgaataaaatttggaaagtaaagttcaaaaatatcttggcatattacctttcatacttctatgcaggtatacacacaaattgaattagatcagagtgaatttttaggctatttgatattaacaaaacttttatagaaattctatgttgctttatactttcccccactaatggacaagacattgtttttccatatcctccccagcatacttcatgctaacataattcaaaatattagccaattttgtctgcaaaaactagcatcgttatttcacttggcatatttgcctatctttgaccaatagtcaaagggg

SEQ ID NO: 105683 - DNA, 288 bp, Homo sapiens
gcgagttgttcctgtgttccagtgaagcagaaggcagggcctgagcttgtgaggaaagatgagctaaagaactgcgtatgctccttagacaaagataatttgtcacatcaccaccattcatctcttagttcccagctcactgttccaacaagtctgttttgtagatttcttatatattaaaaaatgtctctagccgtccactgagcaatcagttcattcattcatccttttcctcccgaaatatttattgagcacttttaaaataccagtattacacctggttctcag

SEQ ID NO: 105684 - DNA, 784 bp, Homo sapiens
aaaagcatgtctagcaaaggcacggtagctcatgcctgtaattcctacactttgtgggggccaacgtgggggactgcatgagcctaggagctcgagaccagcctgggcaatatggtgagaccccgtatttaccccccagccccccaaaaaaatacgaaaattagttggggatgggcacatgcttatgggtcccagctactgagctgaggtggcaaggatcacttgagcccaggaggctgcagtgagctgagatcacatcactgcactccagccaggggacaaggctagatcccattaagaaaaaaaaaaaaaaaaaagcatgcctaaaaaaaatctcttttggattctataatcgggtaaggagtttatggcgggtggcaagtaaggggaccctttttaaggggtttgagggggtcaaggcagacttggacagacctgggcaagggacaaatggatgggacccgttggtacattgagatttgggcccctggaaattttagtggagactctggagtccccagaaaaaggacagaatctccctatttggattgggttatggaaccccaacatggtatacaggtggtcagaaaactcgcatctccgggaaacaggatctaggccttttcttgtaggtgagttatacttcagtaaaagaaatatacaacaaatttactgtagtcaaggagtttcctaaaaattaacttctcataagccagaggtaagtactgtaatcataagattataaacttccaatttagaggcatgaaggtacattttatataat

SEQ ID NO: 105685 - DNA, 82 bp, Homo sapiens
ggcctcctaggtatggagcaaggagcattttacaggatgggatgatgatgctgtgtgagcatgtgaaggaaagaactcactg

SEQ ID NO: 105686 - DNA, 271 bp, Homo sapiens
gccacctcagatccttaaggctgtgtcaggagccacgtggcctcctcgaacccaagcccatgtcccagttactggtaataaaacagccagaactcccatctgccacttgccaagccccaaatgtgcaatttacacaacaatccaggttatcacagccaccttaggataaagctcctgaaactccagaaattaagccaattttctgaggctacagagctaccatcagggagggctgaaagttgaacctaggacccaaaacccaagactctcc

SEQ ID NO: 105687 - DNA, 841 bp, Homo sapiens
acccctcgtggcggtcccgcccgtccccgcgcaggcgcgctcgggctgccgctggctcttcgcacgcggccatggccgactccgagctgcagctggttgagcagcggatccgcagcttccccgacttccccaccccaggcgtggtattcagggacatctcgcccgtcctgaaggaccccgcctccttccgcgccgccatcggcctcctggcgcgacacctgaaggcgacccacgggggccgcatcgactacatcgcaggcctagactcccgaggcttcctctttggcccctccctggcccaggagcttggactgggctgcgtgctcatccgaaagcgggggaagctgccaggccccactctgtgggcctcctattccctggagtacgggaaggctgagctggagattcagaaagacgccctggagccaggacagagggtggtcgtcgtggatgatctgctggccactggtggaaccatgaacgctgcctgtgagctgctgggccgcctgcaggctgaggtcctggagtgcgtgagcctggtggagctgacctcgcttaagggcagggagaagctggcacctgtacccttcttctctctcctgcagtatgagtgaccacagggcctcccagcccaacatctccagctggatcccagggaaatatcagccttgggcaactgcagtgaccaggggcaccggctgcccacagggaacacattcctttgctggggttcagcgcctctcctggggctggaagtgccaaagcctggggcaaagctgtgtttcagccacactgaacccaattacacacagcgggagaacgcagtaaacagctttcccac

SEQ ID NO: 105688 - DNA, 962 bp, Homo sapiens
  misc_feature (852)..(853): n is a, c, g, or t
  misc_feature (855)..(856): n is a, c, g, or t
  misc_feature (865)..(865): n is a, c, g, or t
  misc_feature (870)..(870): n is a, c, g, or t
acccctcgtggcggtcccgcccgtccccgcgcaggcgcgctcgggctgccgctggctcttcgcacgcggccatggccgactccgagctgcagctggttgagcagcggatccgcagcttccccgacttccccaccccaggcgtggtattcagggacatctcgcccgtcctgaaggaccccgcctccttccgcgccgccatcggcctcctggcgcgacacctgaaggcgacccacgggggccgcatcgactacatcgcaggcctagactcccgaggcttcctctttggcccctccctggcccaggagcttggactgggctgcgtgctcatccgaaagcgggggaagctgccaggccccactctgtgggcctcctattccctggagtacgggaaggctgagctggagattcagaaagacgccctggagccaggacagagggtggtcgtcgtggatgatctgctggccactggtggaaccatgaacgctgcctgtgagctgctgggccgcctgcaggctgaggtcctggagtgcgtgagcctggtggagctgacctcgcttaagggcagggagaagctggcacctgtacccttcttctctctcctgcagtatgagtgaccacagggcctcccagcccaacatctccagctggatcccagggaaatatcagccttgggcaactgcagtgaccaggggcaccggctgcccacagggaacacattcctttgctggggttcagcgcctctcctggggctggaagtgccaaagcctggggcaaagctgtgtttcagccacactgaacccaattacacacagcgggagaacgcagtaaacagctttcccaccaccaccaccnncnncaccacccncaccncccacaccacccctatctcttttttttctctaatccccctacacccacacccccacacacaccccacaacctttactaatccccacaccacc

SEQ ID NO: 105689 - DNA, 888 bp, Homo sapiens
taggctaggtagaggccgggtgtgaatcggccgaggctggctggctcttcgcacgcggccatggccgactccgagctgcagctggttgagcagcggatccgcagcttccccgacttccccaccccaggcgtggtattcagggacatctcgcccgtcctgaaggaccccgcctccttccgcgccgccatcggcctcctggcgcgacacctgaaggcgacccacgggggccgcatcgactacatcgcaggcctagactcccgaggcttcctctttggcccctccctggcccaggagcttggactgggctgcgtgctcatccgaaagcgggggaagctgccaggccccactctgtgggcctcctattccctggagtacgggaaggctgagctggagattcagaaagacgccctggagccaggacagagggtggtcgtcgtggatgatctgctggccactggtggaaccatgaacgctgcctgtgagctgctgggccgcctgcaggctgaggtcctggagtgcgtgagcctggtggagctgacctcgcttaagggcagggagaagctggcacctgtacccttcttctctctcctgcagtatgagtgaccacagggcctcccagcccaacatctccagctggatcccagggaaatatcagccttgggcaactgcagtgaccaggggcaccggctgcccacagggaacacattcctttgctggggttcagcgcctctcctggggctggaagtgccaaagcctggggcaaagctgtgtttcagccacactgaacccaattacacacagcgggagaacgcagtaaacagctttcccacaaaaacaacatcgtctccctacaacacacacactactcctcagacacaacacgagcgg

SEQ ID NO: 105690 - DNA, 597 bp, Homo sapiens
gcctattccctggagtacgggaggcccacagagtggggcctggcagcttcccccgctttcggatgagcacgcagcccagtccaagctcctgggccaggagctgccaggccccactctgtgggcctcctattccctggagtacgggaaggctgagctggagattcagaaagacgccctggagccaggacagagggtggtcgtcgtggatgatctgctggccactggtggaaccatgaacgctgcctgtgagctgctgggccgcctgcaggctgaggtcctggagtgcgtgagcctggtggagctgacctcgcttaagggcagggagaagctggcacctgtacccttcttctctctcctgcagtatgagtgaccacagggcctcccagcccaacatctccagctggatcccagggaaatatcagccttgggcaactgcagtgaccaggggcaccggctgcccacagggaacacattcctttgctggggttcagcgcctctcctggggctggaagtgccaaagcctggggcaaagctgtgtttcagccacactgaacccaattacacacagcgggagaacgcagtaaacagctttcccac

SEQ ID NO: 105691 - DNA, 610 bp, Homo sapiens
  misc_feature (16)..(16): n is a, c, g, or t
cccgggtggcggggcngtcaagcaggatcggtgggttgggggagggccaagggtggacatctcgcccgtcctgaaggaccccgcctccttccgcgccgccatcggcctcctggcgcgacacctgaaggcgacccacgggggccgcatcgactacatcgcaggcctagactcccgaggcttcctctttggcccctccctggcccaggagcttggactgggctgcgtgctcatccgaaagcgggggaagctgccaggccccactctgtgggcctcctattccctggagtacgggaaggctgagctggagattcagaaagacgccctggagccaggacagagggtggtcgtcgtggatgatctgctggccactggtgtatgagtgaccacagggcctcccagcccaacatctccagctggatcccagggaaatatcagccttgggcaactgcagtgaccaggggcaccggctgcccacagggaacacattcctttgctggggttcagcgcctctcctggggctggaagtgccaaagcctggggcaaagctgtgtttcagccacactgaacccaattacacacagcgggagaacgcagtaaacagctttcccac

SEQ ID NO: 105692 - DNA, 830 bp, Homo sapiens
taggctaggtagaggccgggtgtgaatcggccgaggctggctggctcttcgcacgcggccatggccgactccgagctgcagctggttgagcagcggatccgcagcttccccgacttccccaccccaggcgtggtattcagggacatctcgcccgtcctgaaggaccccgcctccttccgcgccgccatcggcctcctggcgcgacacctgaaggcgacccacgggggccgcatcgactacatcgcaggcctagactcccgaggcttcctctttggcccctccctggcccaggagcttggactgggctgcgtgctcatccgaaagcgggggaagctgccaggccccactctgtgggcctcctattccctggagtacgggaaggctgagctggagattcagaaagacgccctggagccaggacagagggtggtcgtcgtggatgatctgctggccactggtggaaccatgaacgctgcctgtgagctgctgggccgcctgcaggctgaggtcctggagtgcgtgagcctggtggagctgacctcgcttaagggcagggagaagctggcacctgtacccttcttctctctcctgcagtatgagtgaccacagggcctcccagcccaacatctccagctggatcccagggaaatatcagccttgggcaactgcagtgaccaggggcaccggctgcccacagggaacacattcctttgctggggttcagcgcctctcctggggctggaagtgccaaagcctggggcaaagctgtgtttcagccacactgaacccaattacacacagcgggagaacgcagtaaacagctttcccac

SEQ ID NO: 105693 - DNA, 831 bp, Homo sapiens
ggtcatgggttaccctgggccccccgggaattatgggatcgctggctcttcgcacgcggccatggccgactccgagctgcagctggttgagcagcggatccgcagcttccccgacttccccaccccaggcgtggtattcagggacatctcgcccgtcctgaaggaccccgcctccttccgcgccgccatcggcctcctggcgcgacacctgaaggcgacccacgggggccgcatcgactacatcgcaggcctagactcccgaggcttcctctttggcccctccctggcccaggagcttggactgggctgcgtgctcatccgaaagcgggggaagctgccaggccccactctgtgggcctcctattccctggagtacgggaaggctgagctggagattcagaaagacgccctggagccaggacagagggtggtcgtcgtggatgatctgctggccactggtggaaccatgaacgctgcctgtgagctgctgggccgcctgcaggctgaggtcctggagtgcgtgagcctggtggagctgacctcgcttaagggcagggagaagctggcacctgtacccttcttctctctcctgcagtatgagtgaccacagggcctcccagcccaacatctccagctggatcccagggaaatatcagccttgggcaactgcagtgaccaggggcaccggctgcccacagggaacacattcctttgctggggttcagcgcctctcctggggctggaagtgccaaagcctggggcaaagctgtgtttcagccacactgaacccaattacacacagcgggagaacgcagtaaacagctttcccac

SEQ ID NO: 105694 - DNA, 883 bp, Homo sapiens
acccctcgtggcggtcccgcccgtccccgcgcaggcgcgctcgggctgccgctggctcttcgcacgcggccatggccgactccgagctgcagctggttgagcagcggatccgcagcttccccgacttccccaccccaggcgtggtattcagggacatctcgcccgtcctgaaggaccccgcctccttccgcgccgccatcggcctcctggcgcgacacctgaaggcgacccacgggggccgcatcgactacatcgcaggcctagactcccgaggcttcctctttggcccctccctggcccaggagcttggactgggctgcgtgctcatccgaaagcgggggaagctgccaggccccactctgtgggcctcctattccctggagtacgggaaggctgagctggagattcagaaagacgccctggagccaggacagagggtggtcgtcgtggatgatctgctggccactggtggaaccatgaacgctgcctgtgagctgctgggccgcctgcaggctgaggtcctggagtgcgtgagcctggtggagctgacctcgcttaagggcagggagaagctggcacctgtacccttcttctctctcctgcagtatgagtgaccacagggcctcccagcccaacatctccagctggatcccagggaaatatcagccttgggcaactgcagtgaccaggggcaccggctgcccacagggaacacattcctttgctggggttcagcgcctctcctggggctggaagtgccaaagcctggggcaaagctgtgtttcagccacactgaacccaattacacacagcgggagaacgcagtaaacagctttcccacaagaacacacaaagaccacacacgcacacaccaacgcacggg

SEQ ID NO: 105695 - DNA, 994 bp, Homo sapiens
ggtcatgggttaccctgggccccccgggaattatgggatcgctggctcttcgcacgcggccatggccgactccgagctgcagctggttgagcagcggatccgcagcttccccgacttccccaccccaggcgtggtattcaggtgcacgcacaggccgccctcgtggcgccccgacctgcgggcctacggatgggagcgcgtggcccgcgacctccgggcgggcggggcgggaaccctcgtctttcgcccccggggccctgccctccttcggccccggcgtcaccaggcctgtccttgggtccagggacatctcgcccgtcctgaaggaccccgcctccttccgcgccgccatcggcctcctggcgcgacacctgaaggcgacccacgggggccgcatcgactacatcgcaggcctagactcccgaggcttcctctttggcccctccctggcccaggagcttggactgggctgcgtgctcatccgaaagcgggggaagctgccaggccccactctgtgggcctcctattccctggagtacgggaaggctgagctggagattcagaaagacgccctggagccaggacagagggtggtcgtcgtggatgatctgctggccactggtggaaccatgaacgctgcctgtgagctgctgggccgcctgcaggctgaggtcctggagtgcgtgagcctggtggagctgacctcgcttaagggcagggagaagctggcacctgtacccttcttctctctcctgcagtatgagtgaccacagggcctcccagcccaacatctccagctggatcccagggaaatatcagccttgggcaactgcagtgaccaggggcaccggctgcccacagggaacacattcctttgctggggttcagcgcctctcctggggctggaagtgccaaagcctggggcaaagctgtgtttcagccacactgaacccaattacacacagcgggagaacgcagtaaacagctttcccac

SEQ ID NO: 105696 - DNA, 850 bp, Homo sapiens
ggtcatgggttaccctgggccccccgggaattatgggatcgctggctcttcgcacgcggccatggccgactccgagctgcagctggttgagcagcggatccgcagcttccccgacttccccaccccaggcgtggtattcagggacatctcgcccgtcctgaaggaccccgcctccttccgcgccgccatcggcctcctggcgcgacacctgaaggcgacccacgggggccgcatcgactacatcgcaggcctagactcccgaggcttcctctttggcccctccctggcccaggagcttggactgggctgcgtgctcatccgaaagcgggggaagctgccaggccccactctgtgggcctcctattccctggagtacgggaaggctgagctggagattcagaaagacgccctggagccaggacagagggtggtcgtcgtggatgatctgctggccactggtgtatgagtgaccacagggcctcccagcccaacatctccagctggatcccagggaaatatcagccttgggcaactgcagtgaccaggggcaccggctgcccacagggaacacattcctttgctggggttcagcgcctctcctggggctggaagtgccaaagcctggggcaaagctgtgtttcagccacactgaacccaattacacacagcgggagaacgcagtaaacagctttcccaccaaaaaaaaaagaacaacgctgactgctaacaaaaacccgcggcggcattatctgggggggaaaaggtctcacgggcctccgcccaacgtgcgcggcccttttggaaagggaaacgggggcccccaagggcgctaacaagcgggcgatctcca

SEQ ID NO: 105697 - DNA, 898 bp, Homo sapiens
ggtcatgggttaccctgggccccccgggaattatgggatcgctggctcttcgcacgcggccatggccgactccgagctgcagctggttgagcagcggatccgcagcttccccgacttccccaccccaggcgtggtattcagggacatctcgcccgtcctgaaggaccccgcctccttccgcgccgccatcggcctcctggcgcgacacctgaaggcgacccacgggggccgcatcgactacatcgcaggcctagactcccgaggcttcctctttggcccctccctggcccaggagcttggactgggctgcgtgctcatccgaaagcgggggaagctgccaggccccactctgtgggcctcctattccctggagtacgggaaggctgagctggagattcagaaagacgccctggagccaggacagagggtggtcgtcgtggatgatctgctggccactggtggggctggcctggagcacctgctctctgcagcccaggccaactggggacctcaccctcccatccccaggaaccatgaacgctgcctgtgagctgctgggccgcctgcaggctgaggtcctggagtgcgtgagcctggtggagctgacctcgcttaagggcagggagaagctggcacctgtacccttcttctctctcctgcagtatgagtgaccacagggcctcccagcccaacatctccagctggatcccagggaaatatcagccttgggcaactgcagtgaccaggggcaccggctgcccacagggaacacattcctttgctggggttcagcgcctctcctggggctggaagtgccaaagcctggggcaaagctgtgtttcagccacactgaacccaattacacacagcgggagaacgcagtaaacagctttcccac

SEQ ID NO: 105698 - DNA, 860 bp, Homo sapiens
ggtcatgggttaccctgggccccccgggaattatgggatcgctggctcttcgcacgcggccatggccgactccgagctgcagctggttgagcagcggatccgcagcttccccgacttccccaccccaggcgtggtattcaggtgcacgcacaggccgccctcgtggcgccccgacctgcgggcctacggatgggagcgcgtggcccgcgacctccgggcgggcggggcgggaaccctcgtctttcgcccccggggccctgccctccttcggccccggcgtcaccaggcctgtccttgggtccagggacatctcgcccgtcctgaaggaccccgcctccttccgcgccgccatcggcctcctggcgcgacacctgaaggcgacccacgggggccgcatcgactacatcgcaggctgagctggagattcagaaagacgccctggagccaggacagagggtggtcgtcgtggatgatctgctggccactggtggaaccatgaacgctgcctgtgagctgctgggccgcctgcaggctgaggtcctggagtgcgtgagcctggtggagctgacctcgcttaagggcagggagaagctggcacctgtacccttcttctctctcctgcagtatgagtgaccacagggcctcccagcccaacatctccagctggatcccagggaaatatcagccttgggcaactgcagtgaccaggggcaccggctgcccacagggaacacattcctttgctggggttcagcgcctctcctggggctggaagtgccaaagcctggggcaaagctgtgtttcagccacactgaacccaattacacacagcgggagaacgcagtaaacagctttcccac

SEQ ID NO: 105699 - DNA, 1040 bp, Homo sapiens
ggtcatgggttaccctgggccccccgggaattatgggatcgctggctcttcgcacgcggccatggccgactccgagctgcagctggttgagcagcggatccgcagcttccccgacttccccaccccaggcgtggtattcagggacatctcgcccgtcctgaaggaccccgcctccttccgcgccgccatcggcctcctggcgcgacacctgaaggcgacccacgggggccgcatcgactacatcgcaggcctagactcccgaggcttcctctttggcccctccctggcccaggagcttggactgggctgcgtgctcatccgaaagcgggggaagctgccaggccccactctgtgggcctcctattccctggagtacgggaaggaaccatgaacgctgcctgtgagctgctgggccgcctgcaggctgaggtcctggagtgcgtgagcctggtggagctgacctcgcttaagggcagggagaagctggcacctgtacccttcttctctctcctgcagtatgagtgaccacagggcctcccagcccaacatctccagctggatcccagggaaatatcagccttgggcaactgcagtgaccaggggcaccggctgcccacagggaacacattcctttgctggggttcagcgcctctcctggggctggaagtgccaaagcctggggcaaagctgtgtttcagccacactgaacccaattacacacagcgggagaacgcagtaaacagctttcccactcaaaaaaaaaaacaacaaacaccaaaaaacaaaacaaaaacacaaaaacccgcgccactataggggcggaacaagagacaacaagcacacgggtccaagggcttccaacccgtcttcacagggacaaggggcccaaagaggggggacaaatcagacggacgaaaacaaacaaaacagcacacagagaacgcagggaacagcaaaagaaagagacaaaaagagacaaagagagaaaaacaacgacacaacacaccacgcacaatccacagaccagagcaaacaacaga

SEQ ID NO: 105700 - DNA, 834 bp, Homo sapiens
ggtcatgggttaccctgggccccccgggaattatgggatcgctggctcttcgcacgcggccatggccgactccgagctgcagctggttgagcagcggatccgcagcttccccgacttccccaccccaggcgtggtattcaggtgcacgcacaggccgccctcgtggcgccccgacctgcgggcctacggatgggagcgcgtggcccgcgacctccgggcgggcggggcgggaaccctcgtctttcgcccccggggccctgccctccttcggccccggcgtcaccaggcctgtccttgggtccagggacatctcgcccgtcctgaaggaccccgcctccttccgcgccgccatcggcctcctggcgcgacacctgaaggcgacccacgggggccgcatcgactacatcgcaggcgagtgcccagtggccgcatctagggcgcttccgcctctgcgcgcgccgagggcagcacgtgggctctgcgcgtctgcttgggggagggcctttggggtgcttcagggggcgccgggacgggcgccgtgcttgggtcgcccgggaagggttgtgagattgagcccccgaggccgccgcgctgtgcaggcgtccttcccgcaggttccgggtccccagcccaggacaggcgtgaccgagttgccgggtcagttggtctccctggagtgcccaagctgaatccacagggcccagctgccttgcttcttgttcctctctgcgagctggtattgagcgcctgccacgagccaggccttccctggtgaagatcacggaatgcccacccagggaagggaggcctggaggcctccgggagagcccaaga

SEQ ID NO: 105701 - DNA, 697 bp, Homo sapiens
ggtcatgggttaccctgggccccccgggaattatgggatcgctggctcttcgcacgcggccatggccgactccgagctgcagctggttgagcagcggatccgcagcttccccgacttccccaccccaggcgtggtattcagggacatctcgcccgtcctgaaggaccccgcctccttccgcgccgccatcggcctcctggcgcgacacctgaaggcgacccacgggggccgcatcgactacatcgcaggcctagactcccgaggcttcctctttggcccctccctggcccaggagcttggactgggctgcgtgctcatccgaaagcgggggaagctgccaggccccactctgtgggcctcctattccctggagtacgggaaggctgagctggagattcagaaagacgccctggagccaggacagagggtggtcgtcgtggatgatctgctggccactggtgtatgagtgaccacagggcctcccagcccaacatctccagctggatcccagggaaatatcagccttgggcaactgcagtgaccaggggcaccggctgcccacagggaacacattcctttgctggggttcagcgcctctcctggggctggaagtgccaaagcctggggcaaagctgtgtttcagccacactgaacccaattacacacagcgggagaacgcagtaaacagctttcccac

SEQ ID NO: 105702 - DNA, 1060 bp, Homo sapiens
ggtcatgggttaccctgggccccccgggaattatgggatcgctggctcttcgcacgcggccatggccgactccgagctgcagctggttgagcagcggatccgcagcttccccgacttccccaccccaggcgtggtattcagggacatctcgcccgtcctgaaggaccccgcctccttccgcgccgccatcggcctcctggcgcgacacctgaaggcgacccacgggggccgcatcgactacatcgcaggcctagactcccgaggcttcctctttggcccctccctggcccaggagcttggactgggctgcgtgctcatccgaaagcgggggaagctgccaggccccactctgtgggcctcctattccctggagtacgggaaggctgagctggagattcagaaagacgccctggagccaggacagagggtggtcgtcgtggatgatctgctggccactggtggtaagggtctccccgcagccaactgctgtggctccaagggcctggtgggagtgggacaggacctcgctgtgtgacatgggatgcagcttactgttgtccagagggtgcctggtggccaggccgacaccttcctctccccatgccttcccctccccaacccaggggctggcctggagcacctgctctctgcagcccaggccaactggggacctcaccctcccatccccaggaaccatgaacgctgcctgtgagctgctgggccgcctgcaggctgaggtcctggagtgcgtgagcctggtggagctgacctcgcttaagggcagggagaagctggcacctgtacccttcttctctctcctgcagtatgagtgaccacagggcctcccagcccaacatctccagctggatcccagggaaatatcagccttgggcaactgcagtgaccaggggcaccggctgcccacagggaacacattcctttgctggggttcagcgcctctcctggggctggaagtgccaaagcctggggcaaagctgtgtttcagccacactgaacccaattacacacagcgggagaacgcagtaaacagctttcccac

SEQ ID NO: 105703 - DNA, 1343 bp, Homo sapiens
cgccagctcttgctggagccacaacactgccagagctcccttctcacctcctgcaggaagccctccctgacctcctgccaggccggggcagggtttccctgagcgtcccccaaccatcacagctcaggccacctcgagagactccctttttagacagaagccctggtgcagagctgcctttgagagtaagctgaggcctgtcaggtttctaccagcccagttacagatgggctgctcagctcagagagaggggtggtgactcccctaggaacacacagctaagaagtggtcccttaaaagacagacccaggtctgcactctgacctggaagcagctccgggtaggtgatgggtaacattccttaaatggtgcatgtcactggcctttcagctgggagccaaccaggtaccccttgccaccggccaaccctggcccctggggattcccatgctgccgagtcactcctgtcacttaccctgacaggcctagactcccgaggcttcctctttggcccctccctggcccaggagcttggactgggctgcgtgctcatccgaaagcgggggaagctgccaggccccactctgtgggcctcctattccctggagtacgggaagaaggtaagagggctggggtggccagaggaagggcagggccaggccaccgtggccactctcccccagttctaaaaggccttcccaggcgtgtcaagtggagctgctgtggttacagtggccttgggagctcagagaggttgagacataggctgggctcacacagccaggtaacagcaaggtggggttggagtcagggtctagggtggcagctgccaagctgtgcaacaaagctgttttctgcgggaggctgaggaccacacaccacttcccactccaggctgagctggagattcagaaagacgccctggagccaggacagagggtggtcgtcgtggatgatctgctggccactggtggaaccatgaacgctgcctgtgagctgctgggccgcctgcaggctgaggtcctggagtgcgtgagcctggtggagctgacctcgcttaagggcagggagaagctggcacctgtacccttcttctctctcctgcagtatgagtgaccacagggcctcccagcccaacatctccagctggatcccagggaaatatcagccttgggcaactgcagtgaccaggggcaccggctgcccacagggaacacattcctttgctggggttcagcgcctctcctggggctggaagtgccaaagcctggggcaaagctgtgtttcagccacactgaacccaattacacacagcgggagaacgcagtaaacagctttcccac

SEQ ID NO: 105704 - DNA, 1572 bp, Homo sapiens
cgccagctcttgctggagccacaacactgccagagctcccttctcacctcctgcaggaagccctccctgacctcctgccaggccggggcagggtttccctgagcgtcccccaaccatcacagctcaggccacctcgagagactccctttttagacagaagccctggtgcagagctgcctttgagagtaagctgaggcctgtcaggtttctaccagcccagttacagatgggctgctcagctcagagagaggggtggtgactcccctaggaacacacagctaagaagtggtcccttaaaagacagacccaggtctgcactctgacctggaagcagctccgggtaggtgatgggtaacattccttaaatggtgcatgtcactggcctttcagctgggagccaaccaggtaccccttgccaccggccaaccctggcccctggggattcccatgctgccgagtcactcctgtcacttaccctgacaggcctagactcccgaggcttcctctttggcccctccctggcccaggagcttggactgggctgcgtgctcatccgaaagcgggggaagctgccaggccccactctgtgggcctcctattccctggagtacgggaagaaggtaagagggctggggtggccagaggaagggcagggccaggccaccgtggccactctcccccagttctaaaaggccttcccaggcgtgtcaagtggagctgctgtggttacagtggccttgggagctcagagaggttgagacataggctgggctcacacagccaggtaacagcaaggtggggttggagtcagggtctagggtggcagctgccaagctgtgcaacaaagctgttttctgcgggaggctgaggaccacacaccacttcccactccaggctgagctggagattcagaaagacgccctggagccaggacagagggtggtcgtcgtggatgatctgctggccactggtggtaagggtctccccgcagccaactgctgtggctccaagggcctggtgggagtgggacaggacctcgctgtgtgacatgggatgcagcttactgttgtccagagggtgcctggtggccaggccgacaccttcctctccccatgccttcccctccccaacccaggggctggcctggagcacctgctctctgcagcccaggccaactggggacctcaccctcccatccccaggaaccatgaacgctgcctgtgagctgctgggccgcctgcaggctgaggtcctggagtgcgtgagcctggtggagctgacctcgcttaagggcagggagaagctggcacctgtacccttcttctctctcctgcagtatgagtgaccacagggcctcccagcccaacatctccagctggatcccagggaaatatcagccttgggcaactgcagtgaccaggggcaccggctgcccacagggaacacattcctttgctggggttcagcgcctctcctggggctggaagtgccaaagcctggggcaaagctgtgtttcagccacactgaacccaattacacacagcgggagaacgcagtaaacagctttcccac

SEQ ID NO: 105705 - DNA, 696 bp, Homo sapiens
ggtcatgggttaccctgggccccccgggaattatgggatcgctggctcttcgcacgcggccatggccgactccgagctgcagctggttgagcagcggatccgcagcttccccgacttccccaccccaggcgtggtattcagggacatctcgcccgtcctgaaggaccccgcctccttccgcgccgccatcggcctcctggcgcgacacctgaaggcgacccacgggggccgcatcgactacatcgcaggcctagactcccgaggcttcctctttggcccctccctggcccaggagcttggactgggctgcgtgctcatccgaaagcgggggaagctgccaggccccactctgtgggcctcctattccctggagtacgggaagtgcgtgagcctggtggagctgacctcgcttaagggcagggagaagctggcacctgtacccttcttctctctcctgcagtatgagtgaccacagggcctcccagcccaacatctccagctggatcccagggaaatatcagccttgggcaactgcagtgaccaggggcaccggctgcccacagggaacacattcctttgctggggttcagcgcctctcctggggctggaagtgccaaagcctggggcaaagctgtgtttcagccacactgaacccaattacacacagcgggagaacgcagtaaacagctttcccac

SEQ ID NO: 105706 - DNA, 5783 bp, Homo sapiens
  misc_feature (1554)..(1554): n is a, c, g, or t
ttgacgtgtggaagcagttcttggggatgtgactactgccacggtgacaattctagaccaggaggcagcagggagcctcatattgccagcaccacccattgtggtcacacttgctgactatgaccatgtggaagaagttaccaaggaaggagtcaagaaatccccctccccaggctacccactggtctgtgtcaccccctgcgaccctcatttccccagatacgctgtcatgaaggagcgctgcagtgaggccggcatcaaccagacatctgtgcagttcagctgggaagtggctgcccccactgatggcaatggggcccggtctccctttgaaaccatcactgacaacacaccattcaccagtgtcaaccacatggtcctggacagcatttacttcagccggaggttccatgtgcgttgtgtggccaaggctgtggacaaggtgggccatgtggggacccccttaaggagcaacattgttaccattggaacagacagtgctatctgccacacaccagtggtggctgggacatccagaggcttccaggctcagtccttcatcgcaaccttgaaatacctggatgtcaaacataaggagcatccgaacagaatccacatttcggtgcagatcccacaccaggatggaatgctgccccttatctccaccatgccgttgcacaacttacattttctactgtctgagtccatctacagacaccagcacgtctgctccaatttagttaccacctatgacctgagaggcatctcagaggcagggttcctggatgatgtggtctatgatagcactgccctggggcctggctacgatcgccccttccagtttgaccccagcgtgcgagagccgaagaccatccagctctacaaacacctgaacctgaagagctgcgtgtggacctttgatgcttattatgacatgactgagctgattgacgtctgtgggggctctgtaaccgctgacttccaggtgagggactctgcccagtccttcttgacagtgcacgtgcctctatatgtgtcctacatctatgtgacagcccccaggggctgggcctccttggagcaccacaccgagatggagttttctttcttctatgacactgttctctggagaacaggaatccagacagacagcgtgctctctgcaaggcttcagataataagaatctacattcgagaggatggccgtcttgtcattgaattcaagacccatgccaaattcagaggacagtttgtgatggagcatcacactctcccagaagtgaaatctttcgtattgactccagaccacctaggaggaattgaatttgacttgcagctattatggagcgctcagacttttgattctccacatcaactctggagagccacaagctcttataacaggaaggactactcaggagagtacaccatctacctgatcccttgcacagtgcagcccacacagccatgggttgacccaggagagaagcctttggcctgcactgcacatgccccagaaagattcctgatacccattgcattccagcagaccanccgccctgtgccagttgtgtattcacttaacactgaatttcagctctgcaataatgagaaggtgttcctaatggatcccaatacatctgatatgtcactagcagaaatggattacaaaggagccttttcaaaaggtcaaatcctttatggccgagtactttggaatccagaacaaaatcttaattctgcttacaaactccagctggagaaagtctatctttgtacgggcaaggatggttatgtgcctttctttgatcccacggggacaatctacaatgaagggccccagtatggatgcattcagccaaacaaacacctaaaacacagattcctgctgttggaccgcaatcagccagaggtaactgataagtacttccatgatgtgccttttgaggctcactttgcctctgagttgcctgatttccatgtggtcagtaacatgccaggtgtggatggatttactctaaaagtagatgcactctataaggtggaagcaggacaccagtggtatctccaggtcatctacatcattggccctgacaccatctcagggccccgggtccagcgctctctcacagctccactcagacgcaaccgaagggacctggtagagcccgatggccagctgatccttgatgattccctcatctatgacaatgaaggagaccaagtcaagaatggcaccaatatgaagtccctgaatctggagatgcaagagttggcggtagctgcgtccctgtcacagactggggcgtccattggcagtgccctggctgcaatcatgcttctacttctggtgtttttggtggcttgttttatcaacaggaaatgccagaaacagaggaagaagaagcccgcagaggacattttggaagaatatcctctgaataccaaggtagaagtgcccaagaggcacccggaccgggtggagaagaacgtgaatagacactactgcactgtgcggaacgtcaacatcctgagtgagcctgaggcggcttacacgttcaaaggtgctaaagtcaaaagactgaatctagaagtcagagttcacaacaatttacaagatggaacagaagtttaatggaggagacctatgtgtatttttttctaaaatcatttttataaaatggggggaaatactggtatttttataatctcgcagataaaaaagggaaaactatagctttgagtggcagacagcacacatcacatgcatcaactcacaactgagctacctcattcagcaaagaaccactgagaaccccagagtattacagttatttccgtagatccctttaatagtgtcaacaactgtacacagctccttctgtaaggctggtcttagaaaacaagtactttagtatcaggacaggagttgaacaattaggttagcagatggagatgagaggactgggtagagtaccatggcagatctcagagagaagaagtaggtacgggcctttggttccctcccccagccccagctttctcctacagggcttttcctgagtccccagacagcagagtatgaactgctgacacccagattccattaaaaattctgctaatcgacacaacacatatatttgctcatgatttcacttgacagcgtatgctccttggcctctaattgtactttgcttttccagagccctttttacctggggatttcagtgtgcttaagtaaaatcctctgaaaaccacgggagcctctgcctcctcagccacagagaactccctcctacaaagggggagactgaaacccgagttaaggaggggcctggcaggcgtatcagagcacattagtgatgcccttcaccccagggaggtgtctgttcccaactagtttatgtggcactgagacatccatccctgaccaaggatgctgcgaaacaggatcaatgtactacggccttttaattcaacattgccataaatgctttaaagaaaacccaccacactttcctcctactccggtctttgcccgttcctgtaacagacaatcccatgtcctaggtatggttttttattctgttagtgcttcgggaaagtaagtgattcatttgaataaggcaaattaggagaaagcccaggttggggtgaaatcagacttaacagatacatgctggttctccttgctgtgtgtgacacagcagacagaggcactattcctggtgcagtatttcagggatttctctttgaggggttcttttctggtagctcaggcaattatttttaccatatcagcacatgacaaggccatgaacacatggctctaaaataatttagtgttcaagtatcagcttaactattttgtgtaggctacacacagcttgcttttgtttctcttctgtttctgccttattggcggaaacataagcgtgcatgccatgttgttttgaattggaggcacaatttcattattcgagagtaaaagacatgtcctcttctgatgcatggcacaccatagtcaccaagcaaataacagagccttcacattgtgtaatatttgtatgagaatgactcaagctctttgagaacattccaaactagtaacatttcgctactaaaagctagaaaggatgaactgtgaaaggttctaggcagctctgtgagactccaagctccttgaaagtaggacctttgtgagccacgcctttcattcttcaacagtgccttgcatgtaacaagcactccagaaatgtttgttgaatgaatgaatggtgtcatgggtgaatgatggggagtaaatttaggaaggggaagtgagagagtatggtggcaatatcacaagggaggagagaggaaaacaattatcttctctacttggattatgagataaccttttcttggaggaaagaaacaccgctttacaaaggcatgactctggcggtggtcctaaggaagcatgagcagaaaattcataaaaatgtatcatcagcaggagatgagactatgaattggcatccagaacaggagatttagagcaaaatctaatttagcattctgagatgagtgtcaggttttcaggagagaatgagttggggtgagcccagagtctgaaactcctgactggtcaggtgctacttaagaccagcttgggcaattcagggcagaactcctgtatcagcctcatggacacccagaattggtatctcatggctggagagctgatcagccaggcacagaatctccagaacaacctagagagtgaatgctaatttgtagagcgaacttccatttggcccattatttgtaactgtgtaactgctccaagtgccagaatgcttacacgttaaagcagcacctttccatttgcccacatattcttcttgcacaccccttccattactgctgaataggacattgcatgggaagagtacagaggtggcagaatgaagctagagtgggaaggactaaagactgagccccagagtgctcccagcaaccgccacgtacaaggtctgaaatgacaagggcaagagtgagataggaaactgtgtgtgaaaggaaagcccttgcagtatttctgcctccctttctttctgcctttcaccccactaaatgtacgttattgaatgccagtacttctctagtggatgcacacttgttaaatagtgttaagagatgtggagatgagatatacccctttgatgtagaattattcatttggtttgtttcatacttcattataggaatcaagtaatttgatgactaatgtggattatatttcagtcaaagctctgctttcaatttctctgatttgctcactaatgccttatgtgtgttttactaaccttttatatcttgccttcaagtgagaaggaacaaacaactctcagtggttactacttgcttttatatgctggctgtgaaggttaaaagaaagaatggtctgtaccattttttctgctttgctgcccttttattgtaccccaggcctcctagaggactcctgcagattctattgttgggtgggaaatagtgttggaatgtgtttgcacagtcttatgatattcagtctcagtctgctataggtatttgttattcttggatactacacacctgctcagactgagtaaacatttgtggtgctgtcaacctgatttcttgactctcaaatgatttttgtatttccaatatgaatttgtgtgttatgaatttctgatttctccaatagtatatgccactatataaatttgtattaataaatgacagtcttgttggtt

SEQ ID NO: 105707 - DNA, 456 bp, Homo sapiens
aattacttcctattgggtccctcccatgacacatggggattatgggaactgtaattcaagataagatttggtggggacacagccaaaccatatcaggcagccactgacttatggagagggcttcacagcacatactctctcaactcaacctaaagccaggagtgatgagtacttttctcctcccagtcactgccacctaccaatatagtggaaccatctttctaaatcttgcatttcttttttctgaaatcctaggaccgcaatcagccagaggtaactgataagtacttccatgatgtgccttttgaggctcactttgcctctgagttgcctgatttccatgtggtcagtaacatgccaggtgtggatggatttactctaaaagtagatgcactctataaggtgagtttggtgagaagaacagaagcttaagaccaagtctactttaaagcttga

SEQ ID NO: 105708 - DNA, 6050 bp, Homo sapiens
  misc_feature (1554)..(1554): n is a, c, g, or t
ttgacgtgtggaagcagttcttggggatgtgactactgccacggtgacaattctagaccaggaggcagcagggagcctcatattgccagcaccacccattgtggtcacacttgctgactatgaccatgtggaagaagttaccaaggaaggagtcaagaaatccccctccccaggctacccactggtctgtgtcaccccctgcgaccctcatttccccagatacgctgtcatgaaggagcgctgcagtgaggccggcatcaaccagacatctgtgcagttcagctgggaagtggctgcccccactgatggcaatggggcccggtctccctttgaaaccatcactgacaacacaccattcaccagtgtcaaccacatggtcctggacagcatttacttcagccggaggttccatgtgcgttgtgtggccaaggctgtggacaaggtgggccatgtggggacccccttaaggagcaacattgttaccattggaacagacagtgctatctgccacacaccagtggtggctgggacatccagaggcttccaggctcagtccttcatcgcaaccttgaaatacctggatgtcaaacataaggagcatccgaacagaatccacatttcggtgcagatcccacaccaggatggaatgctgccccttatctccaccatgccgttgcacaacttacattttctactgtctgagtccatctacagacaccagcacgtctgctccaatttagttaccacctatgacctgagaggcatctcagaggcagggttcctggatgatgtggtctatgatagcactgccctggggcctggctacgatcgccccttccagtttgaccccagcgtgcgagagccgaagaccatccagctctacaaacacctgaacctgaagagctgcgtgtggacctttgatgcttattatgacatgactgagctgattgacgtctgtgggggctctgtaaccgctgacttccaggtgagggactctgcccagtccttcttgacagtgcacgtgcctctatatgtgtcctacatctatgtgacagcccccaggggctgggcctccttggagcaccacaccgagatggagttttctttcttctatgacactgttctctggagaacaggaatccagacagacagcgtgctctctgcaaggcttcagataataagaatctacattcgagaggatggccgtcttgtcattgaattcaagacccatgccaaattcagaggacagtttgtgatggagcatcacactctcccagaagtgaaatctttcgtattgactccagaccacctaggaggaattgaatttgacttgcagctattatggagcgctcagacttttgattctccacatcaactctggagagccacaagctcttataacaggaaggactactcaggagagtacaccatctacctgatcccttgcacagtgcagcccacacagccatgggttgacccaggagagaagcctttggcctgcactgcacatgccccagaaagattcctgatacccattgcattccagcagaccanccgccctgtgccagttgtgtattcacttaacactgaatttcagctctgcaataatgagaaggtgttcctaatggatcccaatacatctgatatgtcactagcagaaatggattacaaaggagccttttcaaaaggtcaaatcctttatggccgagtactttggaatccagaacaaaatcttaattctgcttacaaactccagctggagaaagtctatctttgtacgggcaaggatggttatgtgcctttctttgatcccacggggacaatctacaatgaagggccccagtatggatgcattcagccaaacaaacacctaaaacacagattcctgctgttggaccgcaatcagccagaggtaactgataagtacttccatgatgtgccttttgaggctcactttgcctctgagttgcctgatttccatgtggtcagtaacatgccaggtgtggatggatttactctaaaagtagatgcactctataaggtggaagcaggacaccagtggtatctccaggtcatctacatcattggccctgacaccatctcagggccccgggtccagcgctctctcacagctccactcagacgcaaccgaagggacctggtagagcccgatggccagctgatccttgatgattccctcatctatgacaatgaaggagaccaagtcaagaatggcaccaatatgaagtccctgaatctggagatgcaagagttggcggtagctgcgtccctgtcacagactggggcgtccattggcagtgccctggctgcaatcatgcttctacttctggtgtttttggtggcttgttttatcaacaggaaatgccagaaacagaggaagaagaagcccgcagaggacattttggaagaatatcctctgaataccaaggtagaagtgcccaagaggcacccggaccgggtggagaagaacgtgaatagacactactgcactgtgcggaacgtcaacatcctgagtgagcctgaggcggcttacacgttcaaaggtgctaaagtcaaaagactgaatctagaagtcagagttcacaacaatttacaagatggaacagaagtttaatggaggagacctatgtgtatttttttctaaaatcatttttataaaatggggggaaatactggtatttttataatctcgcagataaaaaagggaaaactatagctttgagtggcagacagcacacatcacatgcatcaactcacaactgagctacctcattcagcaaagaaccactgagaaccccagagtattacagttatttccgtagatccctttaatagtgtcaacaactgtacacagctccttctgtaaggctggtcttagaaaacaagtactttagtatcaggacaggagttgaacaattaggttagcagatggagatgagaggactgggtagagtaccatggcagatctcagagagaagaagtaggtacgggcctttggttccctcccccagccccagctttctcctacagggcttttcctgagtccccagacagcagagtatgaactgctgacacccagattccattaaaaattctgctaatcgacacaacacatatatttgctcatgatttcacttgacagcgtatgctccttggcctctaattgtactttgcttttccagagccctttttacctggggatttcagtgtgcttaagtaaaatcctctgaaaaccacgggagcctctgcctcctcagccacagagaactccctcctacaaagggggagactgaaacccgagttaaggaggggcctggcaggcgtatcagagcacattagtgatgcccttcaccccagggaggtgtctgttcccaactagtttatgtggcactgagacatccatccctgaccaaggatgctgcgaaacaggatcaatgtactacggccttttaattcaacattgccataaatgctttaaagaaaacccaccacactttcctcctactccggtctttgcccgttcctgtaacagacaatcccatgtcctaggtatggttttttattctgttagtgcttcgggaaagtaagtgattcatttgaataaggcaaattaggagaaagcccaggttggggtgaaatcagacttaacagatacatgctggttctccttgctgtgtgtgacacagcagacagaggcactattcctggtgcagtatttcagggatttctctttgaggggttcttttctggtagctcaggcaattatttttaccatatcagcacatgacaaggccatgaacacatggctctaaaataatttagtgttcaagtatcagcttaactattttgtgtaggctacacacagcttgcttttgtttctcttctgtttctgccttattggcggaaacataagcgtgcatgccatgttgttttgaattggaggcacaatttcattattcgagagtaaaagacatgtcctcttctgatgcatggcacaccatagtcaccaagcaaataacagagccttcacattgtgtaatatttgtatgagaatgactcaagctctttgagaacattccaaactagtaacatttcgctactaaaagctagaaaggatgaactgtgaaaggttctaggcagctctgtgagactccaagctccttgaaagtaggacctttgtgagccacgcctttcattcttcaacagtgccttgcatgtaacaagcactccagaaatgtttgttgaatgaatgaatggtgtcatgggtgaatgatggggagtaaatttaggaaggggaagtgagagagtatggtggcaatatcacaagggaggagagaggaaaacaattatcttctctacttggattatgagataaccttttcttggaggaaagaaacaccgctttacaaaggcatgactctggcggtggtcctaaggaagcatgagcagaaaattcataaaaatgtatcatcagcaggagatgagactatgaattggcatccagaacaggagatttagagcaaaatctaatttagcattctgagatgagtgtcaggttttcaggagagaatgagttggggtgagcccagagtctgaaactcctgactggtcaggtgctacttaagaccagcttgggcaattcagggcagaactcctgtatcagcctcatggacacccagaattggtatctcatggctggagagctgatcagccaggcacagaatctccagaacaacctagagagtgaatgctaatttgtagagcgaacttccatttggcccattatttgtaactgtgtaactgctccaagtgccagaatgcttacacgttaaagcagcacctttccatttgcccacatattcttcttgcacaccccttccattactgctgaataggacattgcatgggaagagtacagaggtggcagaatgaagctagagtgggaaggactaaagactgagccccagagtgctcccagcaaccgccacgtacaaggtctgaaatgacaagggcaagagtgagataggaaactgtgtgtgaaaggaaagcccttgcagtatttctgcctccctttctttctgcctttcaccccactaaatgtacgttattgaatgccagtacttctctagtggatgcacacttgttaaatagtgttaagagatgtggagatgagatatacccctttgatgtagaattattcatttggtttgtttcatacttcattataggaatcaagtaatttgatgactaatgtggattatatttcagtcaaagctctgctttcaatttctctgatttgctcactaatgccttatgtgtgttttactaaccttttatatcttgccttcaagtgagaaggaacaaacaactctcagtggttactacttgcttttatatgctggctgtgaaggttaaaagaaagaatggtctgtaccattttttctgctttgctgcccttttattgtaccccaggcctcctagaggactcctgcagattctattgttgggtgggaaatagtgttggaatgtgtttgcacagtcttatgatattcagtctcagtctgctataggtatttgttattcttggatactacacacctgctcagactgagtaaacatttgtggtgctgtcaacctgatttcttgactctcaaatgatttttgtatttccaatatgaatttgtgtgttatgaatttctgatttctccaatagtatatgccactatataaatttgtattaataaatgacagtcttgttggttttttgtttgttttcctatgttctttttagattatatctcttatgaatatagacattgccattaagatgccaaaattcattctaaatttgaagcggtcttctggagaaaacccttctaatgagggtgaatctgagacactcattaactgtgttcagagtaagatgctgaataaattatatgtttccagattatcataggtcttctttggcaatcagttgaaattctgagacaaagaggaataattaaaatttccatgtgccatataat

SEQ ID NO: 105709 - DNA, 5333 bp, Homo sapiens
  misc_feature (1554)..(1554): n is a, c, g, or t
ttgacgtgtggaagcagttcttggggatgtgactactgccacggtgacaattctagaccaggaggcagcagggagcctcatattgccagcaccacccattgtggtcacacttgctgactatgaccatgtggaagaagttaccaaggaaggagtcaagaaatccccctccccaggctacccactggtctgtgtcaccccctgcgaccctcatttccccagatacgctgtcatgaaggagcgctgcagtgaggccggcatcaaccagacatctgtgcagttcagctgggaagtggctgcccccactgatggcaatggggcccggtctccctttgaaaccatcactgacaacacaccattcaccagtgtcaaccacatggtcctggacagcatttacttcagccggaggttccatgtgcgttgtgtggccaaggctgtggacaaggtgggccatgtggggacccccttaaggagcaacattgttaccattggaacagacagtgctatctgccacacaccagtggtggctgggacatccagaggcttccaggctcagtccttcatcgcaaccttgaaatacctggatgtcaaacataaggagcatccgaacagaatccacatttcggtgcagatcccacaccaggatggaatgctgccccttatctccaccatgccgttgcacaacttacattttctactgtctgagtccatctacagacaccagcacgtctgctccaatttagttaccacctatgacctgagaggcatctcagaggcagggttcctggatgatgtggtctatgatagcactgccctggggcctggctacgatcgccccttccagtttgaccccagcgtgcgagagccgaagaccatccagctctacaaacacctgaacctgaagagctgcgtgtggacctttgatgcttattatgacatgactgagctgattgacgtctgtgggggctctgtaaccgctgacttccaggtgagggactctgcccagtccttcttgacagtgcacgtgcctctatatgtgtcctacatctatgtgacagcccccaggggctgggcctccttggagcaccacaccgagatggagttttctttcttctatgacactgttctctggagaacaggaatccagacagacagcgtgctctctgcaaggcttcagataataagaatctacattcgagaggatggccgtcttgtcattgaattcaagacccatgccaaattcagaggacagtttgtgatggagcatcacactctcccagaagtgaaatctttcgtattgactccagaccacctaggaggaattgaatttgacttgcagctattatggagcgctcagacttttgattctccacatcaactctggagagccacaagctcttataacaggaaggactactcaggagagtacaccatctacctgatcccttgcacagtgcagcccacacagccatgggttgacccaggagagaagcctttggcctgcactgcacatgccccagaaagattcctgatacccattgcattccagcagaccanccgccctgtgccagttgtgtattcacttaacactgaatttcagctctgcaataatgagaaggtgttcctaatggatcccaatacatctgatatgtcactagcagaaatggattacaaaggagccttttcaaaaggtcaaatcctttatggccgagtactttggaatccagaacaaaatcttaattctgcttacaaactccagctggagaaagtctatctttgtacgggcaaggatggttatgtgcctttctttgatcccacggggacaatctacaatgaagggccccagtatggatgcattcagccaaacaaacacctaaaacacagattcctgctgttggaccgcaatcagccagaggtaactgataagtacttccatgatgtgccttttgaggctcactttgcctctgagttgcctgatttccatgtggtcagtaacatgccaggtgtggatggatttactctaaaagtagatgcactctataaggtggaagcaggacaccagtggtatctccaggtcatctacatcattggccctgacaccatctcagggccccgggtccagcgctctctcacagctccactcagacgcaaccgaagggacctggtagagcccgatggccagctgatccttgatgattccctcatctatgacaatgaaggagaccaagtcaagaatggcaccaatatgaagtccctgaatctggagatgcaagagttggcggtagctgcgtccctgtcacagactggggcgtccattggcagtgccctggctgcaatcatgcttctacttctggtgtttttggtggcttgttttatcaacaggaaatgccagaaacagaggaagaagaagcccgcagaggacattttggaagaatatcctctgaataccaaggtagaagtgcccaagaggcacccggaccgggtggagaagaacgtgaatagacactactgcactgtgcggaacgtcaacatcctgagtgagcctgaggcggcttacacgttcaaaggtgctaaagtcaaaagactgaatctagaagtcagagttcacaacaatttacaagatggaacagaagtttaatggaggagacctatgtgtatttttttctaaaatcatttttataaaatggggggaaatactggtatttttataatctcgcagataaaaaagggaaaactatagctttgagtggcagacagcacacatcacatgcatcaactcacaactgagctacctcattcagcaaagaaccactgagaaccccagagtattacagttatttccgtagatccctttaatagtgtcaacaactgtacacagctccttctgtaaggctggtcttagaaaacaagtactttagtatcaggacaggagttgaacaattaggttagcagatggagatgagaggactgggtagagtaccatggcagatctcagagagaagaagtaggtacgggcctttggttccctcccccagccccagctttctcctacagggcttttcctgagtccccagacagcagagtatgaactgctgacacccagattccattaaaaattctgctaatcgacacaacacatatatttgctcatgatttcacttgacagcgtatgctccttggcctctaattgtactttgcttttccagagccctttttacctggggatttcagtgtgcttaagtaaaatcctctgaaaaccacgggagcctctgcctcctcagccacagagaactccctcctacaaagggggagactgaaacccgagttaaggaggggcctggcaggcgtatcagagcacattagtgatgcccttcaccccagggaggtgtctgttcccaactagtttatgtggcactgagacatccatccctgaccaaggatgctgcgaaacaggatcaatgtactacggccttttaattcaacattgccataaatgctttaaagaaaacccaccacactttcctcctactccggtctttgcccgttcctgtaacagacaatcccatgtcctaggtatggttttttattctgttagtgcttcgggaaagtaagtgattcatttgaataaggcaaattaggagaaagcccaggttggggtgaaatcagacttaacagatacatgctggttctccttgctgtgtgtgacacagcagacagaggcactattcctggtgcagtatttcagggatttctctttgaggggttcttttctggtagctcaggcaattatttttaccatatcagcacatgacaaggccatgaacacatggctctaaaataatttagtgttcaagtatcagcttaactattttgtgtaggctacacacagcttgcttttgtttctcttctgtttctgccttattggcggaaacataagcgtgcatgccatgttgttttgaattggaggcacaatttcattattcgagagtaaaagacatgtcctcttctgatgcatggcacaccatagtcaccaagcaaataacagagccttcacattgtgtaatatttgtatgagaatgactcaagctctttgagaacattccaaactagtaacatttcgctactaaaagctagaaaggatgaactgtgaaaggttctaggcagctctgtgagactccaagctccttgaaagtaggacctttgtgagccacgcctttcattcttcaacagtgccttgcatgtaacaagcactccagaaatgtttgttgaatgaatgaatggtgtcatgggtgaatgatggggagtaaatttaggaaggggaagtgagagagtatggtggcaatatcacaagggaggagagaggaaaacaattatcttctctacttggattatgagataaccttttcttggaggaaagaaacaccgctttacaaaggcatgactctggcggtggtcctaaggaagcatgagcagaaaattcataaaaatgtatcatcagcaggagatgagactatgaattggcatccagaacaggagatttagagcaaaatctaatttagcattctgagatgagtgtcaggttttcaggagagaatgagttggggtgagcccagagtctgaaactcctgactggtcaggtgctacttaagaccagcttgggcaattcagggcagaactcctgtatcagcctcatggacacccagaattggtatctcatggctggagagctgatcagccaggcacagaatctccagaacaacctagagagtgaatgctaatttgtagagcgaacttccatttggcccattatttgtaactgtgtaactgctccaagtgccagaatgcttacacgttaaagcagcacctttccatttgcccacatattcttcttgcacaccccttccattactgctgaataggacattgcatgggaagagtacagaggtggcagaatgaagctagagtgggaaggactaaagactgagccccagagtgctcccagcaaccgccacgtacaaggtctgaaatgacaagggcaagagtgagataggaaactgtgtgtgaaaggaaagcccttgcagtatttctgcctccctttctttctgcctttcaccccactaaatgtacgttattgaatgccagtacttctctagtggatgcacacttgttaaatagtgttaagagatgtggagatgagatatacccctttgatgtagaattattcatttggtttgtttcatacttcattataggaatcaagtaatttgatgactaatgtggattatatttcagtcaaagctctgctttcatgtcccgctgctcagacggtaccggga

SEQ ID NO: 105710 - DNA, 5803 bp, Homo sapiens
  misc_feature (1554)..(1554): n is a, c, g, or t
  misc_feature (5801)..(5801): n is a, c, g, or t
ttgacgtgtggaagcagttcttggggatgtgactactgccacggtgacaattctagaccaggaggcagcagggagcctcatattgccagcaccacccattgtggtcacacttgctgactatgaccatgtggaagaagttaccaaggaaggagtcaagaaatccccctccccaggctacccactggtctgtgtcaccccctgcgaccctcatttccccagatacgctgtcatgaaggagcgctgcagtgaggccggcatcaaccagacatctgtgcagttcagctgggaagtggctgcccccactgatggcaatggggcccggtctccctttgaaaccatcactgacaacacaccattcaccagtgtcaaccacatggtcctggacagcatttacttcagccggaggttccatgtgcgttgtgtggccaaggctgtggacaaggtgggccatgtggggacccccttaaggagcaacattgttaccattggaacagacagtgctatctgccacacaccagtggtggctgggacatccagaggcttccaggctcagtccttcatcgcaaccttgaaatacctggatgtcaaacataaggagcatccgaacagaatccacatttcggtgcagatcccacaccaggatggaatgctgccccttatctccaccatgccgttgcacaacttacattttctactgtctgagtccatctacagacaccagcacgtctgctccaatttagttaccacctatgacctgagaggcatctcagaggcagggttcctggatgatgtggtctatgatagcactgccctggggcctggctacgatcgccccttccagtttgaccccagcgtgcgagagccgaagaccatccagctctacaaacacctgaacctgaagagctgcgtgtggacctttgatgcttattatgacatgactgagctgattgacgtctgtgggggctctgtaaccgctgacttccaggtgagggactctgcccagtccttcttgacagtgcacgtgcctctatatgtgtcctacatctatgtgacagcccccaggggctgggcctccttggagcaccacaccgagatggagttttctttcttctatgacactgttctctggagaacaggaatccagacagacagcgtgctctctgcaaggcttcagataataagaatctacattcgagaggatggccgtcttgtcattgaattcaagacccatgccaaattcagaggacagtttgtgatggagcatcacactctcccagaagtgaaatctttcgtattgactccagaccacctaggaggaattgaatttgacttgcagctattatggagcgctcagacttttgattctccacatcaactctggagagccacaagctcttataacaggaaggactactcaggagagtacaccatctacctgatcccttgcacagtgcagcccacacagccatgggttgacccaggagagaagcctttggcctgcactgcacatgccccagaaagattcctgatacccattgcattccagcagaccanccgccctgtgccagttgtgtattcacttaacactgaatttcagctctgcaataatgagaaggtgttcctaatggatcccaatacatctgatatgtcactagcagaaatggattacaaaggagccttttcaaaaggtcaaatcctttatggccgagtactttggaatccagaacaaaatcttaattctgcttacaaactccagctggagaaagtctatctttgtacgggcaaggatggttatgtgcctttctttgatcccacggggacaatctacaatgaagggccccagtatggatgcattcagccaaacaaacacctaaaacacagattcctgctgttggaccgcaatcagccagaggtaactgataagtacttccatgatgtgccttttgaggctcactttgcctctgagttgcctgatttccatgtggtcagtaacatgccaggtgtggatggatttactctaaaagtagatgcactctataaggtggaagcaggacaccagtggtatctccaggtcatctacatcattggccctgacaccatctcagggccccgggtccagcgctctctcacagctccactcagacgcaaccgaagggacctggtagagcccgatggccagctgatccttgatgattccctcatctatgacaatgaaggagaccaagtcaagaatggcaccaatatgaagtccctgaatctggagatgcaagagttggcggtagctgcgtccctgtcacagactggggcgtccattggcagtgccctggctgcaatcatgcttctacttctggtgtttttggtggcttgttttatcaacaggaaatgccagaaacagaggaagaagaagcccgcagaggacattttggaagaatatcctctgaataccaaggtagaagtgcccaagaggcacccggaccgggtggagaagaacgtgaatagacactactgcactgtgcggaacgtcaacatcctgagtgagcctgaggcggcttacacgttcaaaggtgctaaagtcaaaagactgaatctagaagtcagagttcacaacaatttacaagatggaacagaagtttaatggaggagacctatgtgtatttttttctaaaatcatttttataaaatggggggaaatactggtatttttataatctcgcagataaaaaagggaaaactatagctttgagtggcagacagcacacatcacatgcatcaactcacaactgagctacctcattcagcaaagaaccactgagaaccccagagtattacagttatttccgtagatccctttaatagtgtcaacaactgtacacagctccttctgtaaggctggtcttagaaaacaagtactttagtatcaggacaggagttgaacaattaggttagcagatggagatgagaggactgggtagagtaccatggcagatctcagagagaagaagtaggtacgggcctttggttccctcccccagccccagctttctcctacagggcttttcctgagtccccagacagcagagtatgaactgctgacacccagattccattaaaaattctgctaatcgacacaacacatatatttgctcatgatttcacttgacagcgtatgctccttggcctctaattgtactttgcttttccagagccctttttacctggggatttcagtgtgcttaagtaaaatcctctgaaaaccacgggagcctctgcctcctcagccacagagaactccctcctacaaagggggagactgaaacccgagttaaggaggggcctggcaggcgtatcagagcacattagtgatgcccttcaccccagggaggtgtctgttcccaactagtttatgtggcactgagacatccatccctgaccaaggatgctgcgaaacaggatcaatgtactacggccttttaattcaacattgccataaatgctttaaagaaaacccaccacactttcctcctactccggtctttgcccgttcctgtaacagacaatcccatgtcctaggtatggttttttattctgttagtgcttcgggaaagtaagtgattcatttgaataaggcaaattaggagaaagcccaggttggggtgaaatcagacttaacagatacatgctggttctccttgctgtgtgtgacacagcagacagaggcactattcctggtgcagtatttcagggatttctctttgaggggttcttttctggtagctcaggcaattatttttaccatatcagcacatgacaaggccatgaacacatggctctaaaataatttagtgttcaagtatcagcttaactattttgtgtaggctacacacagcttgcttttgtttctcttctgtttctgccttattggcggaaacataagcgtgcatgccatgttgttttgaattggaggcacaatttcattattcgagagtaaaagacatgtcctcttctgatgcatggcacaccatagtcaccaagcaaataacagagccttcacattgtgtaatatttgtatgagaatgactcaagctctttgagaacattccaaactagtaacatttcgctactaaaagctagaaaggatgaactgtgaaaggttctaggcagctctgtgagactccaagctccttgaaagtaggacctttgtgagccacgcctttcattcttcaacagtgccttgcatgtaacaagcactccagaaatgtttgttgaatgaatgaatggtgtcatgggtgaatgatggggagtaaatttaggaaggggaagtgagagagtatggtggcaatatcacaagggaggagagaggaaaacaattatcttctctacttggattatgagataaccttttcttggaggaaagaaacaccgctttacaaaggcatgactctggcggtggtcctaaggaagcatgagcagaaaattcataaaaatgtatcatcagcaggagatgagactatgaattggcatccagaacaggagatttagagcaaaatctaatttagcattctgagatgagtgtcaggttttcaggagagaatgagttggggtgagcccagagtctgaaactcctgactggtcaggtgctacttaagaccagcttgggcaattcagggcagaactcctgtatcagcctcatggacacccagaattggtatctcatggctggagagctgatcagccaggcacagaatctccagaacaacctagagagtgaatgctaatttgtagagcgaacttccatttggcccattatttgtaactgtgtaactgctccaagtgccagaatgcttacacgttaaagcagcacctttccatttgcccacatattcttcttgcacaccccttccattactgctgaataggacattgcatgggaagagtacagaggtggcagaatgaagctagagtgggaaggactaaagactgagccccagagtgctcccagcaaccgccacgtacaaggtctgaaatgacaagggcaagagtgagataggaaactgtgtgtgaaaggaaagcccttgcagtatttctgcctccctttctttctgcctttcaccccactaaatgtacgttattgaatgccagtacttctctagtggatgcacacttgttaaatagtgttaagagatgtggagatgagatatacccctttgatgtagaattattcatttggtttgtttcatacttcattataggaatcaagtaatttgatgactaatgtggattatatttcagtcaaagctctgctttcaatttctctgatttgctcactaatgccttatgtgtgttttactaaccttttatatcttgccttcaagtgagaaggaacaaacaactctcagtggttactacttgcttttatatgctggctgtgaaggttaaaagaaagaatggtctgtaccattttttctgctttgctgcccttttattgtaccccaggcctcctagaggactcctgcagattctattgttgggtgggaaatagtgttggaatgtgtttgcacagtcttatgatattcagtctcagtctgctataggtatttgttattcttggatactacacacctgctcagactgagtaaacatttgtggtgctgtcaacctgatttcttgactctcaaatgatttttgtatttccaatatgaatttgtgtgttatgaatttctgatttctccaatagtatatgccactatataaatttgtattaataaatgacagtcttgttggttaaaaaaaaaaaatgattnaa

SEQ ID NO: 105711 - DNA, 929 bp, Homo sapiens
ttgacgtgtggaagcagttcttggggatgtgactactgccacggtgacaattctagaccaggaggcagcagggagcctcatattgccagcaccacccattgtggtcacacttgctgactatgaccatgtggaagaagttaccaaggaaggagtcaagaaatccccctccccaggctacccactggtctgtgtcaccccctgcgaccctcatttccccagatacgctgtcatgaaggagcgctgcagtgaggccggcatcaaccagacatctgtgcagttcagctgggaagtggctgcccccactgatggcaatggggcccggtctccctttgaaaccatcactgacaacacaccattcaccagtgtcaaccacatggtcctggacagcatttacttcagccggaggttccatgtgcgttgtgtggccaaggctgtggacaaggtgggccatgtggggacccccttaaggagcaacattgttaccattggaacagacagtgctatctgccacacaccagtggtggctgggacatccagaggcttccaggctcagtccttcatcgcaaccttgaaatacctggatgtcaaacataaggagcatccgaacagaatccacatttcggtgcagatcccacaccaggatggaatgctgccccttatctccaccatgccgttgcacaacttacattttctactgtctgagtccatctacagacaccagcacgtctgctccaatttagttaccacctatgacctgagaggcatctcagaggcagggttcctggatgatgtggtctatgatagcactgccctggggcctggctacgatcgccccttccagtttgaccccagcgtgcttgatgcgttgttcccttctgatcgtggtgattaagaggtgaactcactgacaacgaccgggatcctctgag

SEQ ID NO: 105712 - DNA, 304 bp, Homo sapiens
ggaagtggaaaataggaaaaacaaaaggggatcatgcttccaaaaaaatgtactcccttttaaagaatttctgatgggcagaaagtctttgagaaaagagggcatgagatcaaatggaccctaactatgcagtgacaaattgtgcatttttcagtggaaggatgccattggggaagggggacaccgggaagtttgggttgtaactacttagctacagcatcaggactgaagtgtcatctggactagagaaccaagacaaatctctttgaacccagagtgaagttactttctccctgcctctcca

SEQ ID NO: 105713 - DNA, 271 bp, Homo sapiens
ataagtcaaggccataagctgacccagaaccccaaggatccccgagagggtcaaccatgattaaagaaacggaagaagcaactgctgcaggaagaactgaaaggactagcatggcaagccacgtgcagcgatgattcttcaacacccagagcctacggactcaagtctctctgaggttctctcatgatatgcttttgggaaaacgaagtattcagctatgggtacacttttatagaatgtgctacttcaaaaagccagaaacttttcttac

SEQ ID NO: 105714 - DNA, 496 bp, Homo sapiens
ctgcagtacaactaaatgttcaagggcaaaaactctgttttcttgtaaaatcaactctcttgtggaatcccttatcacttgttctgaattctgaagtgcccacactggggaaaatcccccaggccctacatggctccccatttacagtgtttgctgtgtgtgtcacagatggtgcacaaacacctcaaaatggccttgccaggaaggctctgaggctagaggttaagtagcttggccaatgcctgactgctaggaagtggcagaaactgaactcagatttttcaaaaaatcagtgattcgcaaatgctcctcctgatcatacaagagtcaactcagcagcatattaaaaatacacattttggccaggcacaatggctcacacctgtaatcgcagcactttgagaggccaatgcggcaggattgcttgagcccaggagttcgagaccagcctgggaaacatggatggctccgtctctacaaaaaattaaaaaaaaaa

SEQ ID NO: 105715 - DNA, 779 bp, Homo sapiens
tggagcgcagggctgctggagactaactgtgagctactaacacgggtggaagatagcttttgcaatactcggtttgcatgtgctgaaagtcatctgtcttctgagtcaacactcccgacctggtaaacaacctgctcagggctctggtgaacaagctgtagatcaagtctcgggttctcatgactcccttagccctctcacctccgcggagtaccccagagcccgacctcagctccatccctcaggacgcagccacggtccccagcttggcggccccacaggctctcacagtctgcctctacatcaacaagcaggccaatgcggggccctatctggagaggaagaaggtgcagcagctcccggagcattttgggcccgagcggccatcggcggtgctgcagcaggccgtccaagcctgcatcgactgcgcccaccagcagaagctggtcttctccctggtcaagcagggctatggtggtgagatggtgtcagtctcggcttcctttgatggcaaacagcacctgcggagcctgcctgtggtgaacagcatcggctatgtcctccgcttcctcgccaagctgtgccgaagcctcctgtgcgatgacctcttcagccaccagcccttccccaggggctgcagtgcctctgagaaagtccaggagaaagaggaagggaggatggaatcaggaggatgacagccttccttcctaaaagctgatgtccccatctgaaagctggttttcctcccagtcagctgggaggtttggaagtaatgaccc

SEQ ID NO: 105716 - DNA, 1088 bp, Homo sapiens
tggagcgcagggctgctggagactaactgtgagctactaacacgggtggaagatagcttttgcaatactcggtttgcatgtgctgaaagtcatctgtcttctgagtcaacactcccgacctggtaaacaacctgctcagggctctggtgaacaagctgtagcacctcttctgcctgtgagcgatttgtcacctcattctgtaagactggcaccagcagaaatgcagtctcaaaggatcccggggagaaagcgaggccgaccctcacttcactccacgcctatgaagatggcagttcataacctttattctgcttcagctggctctttaccagcagtgaagatcccaaagaaaagagggcggaaacccgggtacaagaaacctaaggcaacaacaaagacaaatgccctgccagagaacagcttggataggttgcgacaggcagagaacccccccattccactggagagagatcaagtctcgggttctcatgactcccttagccctctcacctccgcggagtaccccagagcccgacctcagctccatccctcaggacgcagccacggtccccagcttggcggccccacaggctctcacagtctgcctctacatcaacaagcaggccaatgcggggccctatctggagaggaagaaggtgcagcagctcccggagcattttgggcccgagcggccatcggcggtgctgcagcaggccgtccaagcctgcatcgactgcgcccaccagcagaagctggtcttctccctggtcaagcagggctatggtggtgagatggtgtcagtctcggcttcctttgatggcaaacagcacctgcggagcctgcctgtggtgaacagcatcggctatgtcctccgcttcctcgccaagctgtgccgaagcctcctgtgcgatgacctcttcagccaccagcccttccccaggggctgcagtgcctctgagaaagtccaggagaaagaggaagggaggatggaatcaggaggatgacagccttccttcctaaaagctgatgtccccatctgaaagctggttttcctcccagtcagctgggaggtttggaagtaatgaccc

SEQ ID NO: 105717 - DNA, 994 bp, Homo sapiens
tggagcgcagggctgctggagactaactgtgagctactaacacgggtggaagatagcttttgcaatactcggtttgcatgtgctgaaagtcatctgtcttctgagtcaacactcccgacctggtaaacaacctgctcagggctctggtgaacaagctgtagcacctcttctgcctgtgagcgatttgtcacctcattctgtaagactggcaccagcagaaatgcagtctcaaaggatcccggggagaaagcgaggccgaccctcacttcactccacgcctatgaagatggcagttcataacctttattctgcttcagctggctctttaccagcagtgaagatcccaaagaaaagagggcggaaacccgggtacaagatcaagtctcgggttctcatgactcccttagccctctcacctccgcggagtaccccagagcccgacctcagctccatccctcaggacgcagccacggtccccagcttggcggccccacaggctctcacagtctgcctctacatcaacaagcaggccaatgcggggccctatctggagaggaagaaggtgcagcagctcccggagcattttgggcccgagcggccatcggcggtgctgcagcaggccgtccaagcctgcatcgactgcgcccaccagcagaagctggtcttctccctggtcaagcagggctatggtggtgagatggtgtcagtctcggcttcctttgatggcaaacagcacctgcggagcctgcctgtggtgaacagcatcggctatgtcctccgcttcctcgccaagctgtgccgaagcctcctgtgcgatgacctcttcagccaccagcccttccccaggggctgcagtgcctctgagaaagtccaggagaaagaggaagggaggatggaatcaggaggatgacagccttccttcctaaaagctgatgtccccatctgaaagctggttttcctcccagtcagctgggaggtttggaagtaatgaccc

SEQ ID NO: 105718 - DNA, 275 bp, Homo sapiens
ccttcctgatgagggacagaggcagaaaaggcagaagctttccacacagtcctttgcctgactgtgacccaaactttctgtcctgaggcagaggtggaaagggcagttttttccccctgaaactcaagtctcttaaccggagggtaaagacagaaaacctccatcgtagaaagggaaggctggaaaggacaactcaagcaaactccaggccttcaaccaaagagtgggaaggtccagatttcaggaggattcaccacttactgcccatctgtttc

SEQ ID NO: 105719 - DNA, 323 bp, Homo sapiens
taggtcttcaggtccatgtgtttggtgacaggggagtgccctccaggtctggtgagaggtcccggccaagcagcagagatgtcagggggcactctggaagtgccatgataaagctgcctttatcatcgtggtttgaaaaagtagccacaaaatgcagagcccaggaagcacgttcagagacttcagacaatcataaactagttgcgccacagaaagatgaaaagtcatgttttcatttcaaaagggctggagacgtgtctgcggcatccaaaccttgactggctgtgcctgcctgggggcgtgcccatgggcagtgggtactg

SEQ ID NO: 105720 - DNA, 4681 bp, Homo sapiens
ctccttccataagggtctggtccttcatccctcccgcttcaccagaccccctcaccctgggagccgccacctccctttccccaagaccagatgtcgcgcggccggacacagccagcacggagagtcgatgccggcgtctgagctgcgcagtggggtcttcccgctgcccagcagcctacaggcgcggtgcactctgggggaacatggccgcttccggtctccctcccgggccggcgctggcctgactgcggccccggtccgtagcactccgccctccgcttctcccgccctgtagccgcgaagactgcttcagcctttccctgtgctgcccctgccgcgcgatggagacgagctcgagctgcgagagtcttggctcccagccggcggcggctcggccgcccagcgtggactccttgtccagtgcctccacttctcattcagagaattcagtgcatacaaaatcagcttctgttgtatcatcagattccatttcaacttctgccgacaacttttctcctgatttgagggtcctgagggagtctaacaagttagcagaaatggaagaaccacccttgcttccaggagaaaatattaaagacatggccaaagatgtaacttatatatgtccattcactggcgctgtacgaggaactctgactgtcacgaattataggttatatttcaaaagcatggaacgggatcccccatttgttttagatgcttcccttggtgtgataaatagagtagaaaaaattggtggtgcttctagtcgaggtgaaaattcttatggactagaaactgtgtgtaaggatattaggaatttacgatttgctcataaacctgaggggcggacaagaagatccatatttgagaatctaatgaaatatgcatttcctgtctctaataacctgcctctttttgcttttgaatacaaagaagtattccctgaaaatgggtggaagctatatgaccctcttttagagtatagaaggcagggaattccaaatgaaagctggagaataacaaagataaatgaacgatatgaactttgtgatacataccctgccctcctggttgtgccagcaaatattcctgatgaagaattaaagagagtggcatccttcagatcaagaggccgtatcccagttttatcatggattcatcctgaaagtcaagccacaatcactcggtgtagccagcccatggttggagtgagtggaaagcgaagcaaagaagatgaaaaataccttcaagctatcatggattccaatgcccagtctcacaaaatctttatatttgatgcccggccaagtgttaatgctgttgccaacaaggcaaagggtggaggttatgaaagtgaagatgcctatcaaaatgctgaactagttttcctggatatccacaatattcatgttatgagagaatcattacgaaaacttaaggagattgtgtaccccaacattgaggaaacccactggttgtctaacttggaatctactcattggctagaacatattaagcttattcttgcaggggctcttaggattgctgacaaggtagagtcagggaagacgtctgtggtagtgcattgcagtgatggttgggatcgcacagctcagctcacttcccttgccatgctcatgttggatggatactatcgaaccatccgaggatttgaagtccttgtggagaaagaatggctaagttttggacatcgatttcaactaagagttggccatggagataagaaccatgcagatgcagacagatcgcctgtttttcttcaatttattgactgtgtctggcagatgacaagacagtttcctaccgcatttgaattcaatgagtattttctcattaccattttggaccacctatacagctgcttattcggaacattcctctgtaatagtgaacaacagagaggaaaagagaatcttcctaaaaggactgtgtcactgtggtcttacataaacagccagctggaagacttcactaatcctctctatgggagctattccaatcatgtcctttatccagtagccagcatgcgccacctagagctctgggtgggatattacataaggtggaatccacggatgaaaccacaggaacctattcacaacagatacaaagaacttcttgctaaacgagcagagcttcagaaaaaagtagaggaactacagagagagatttctaaccgatcaacctcatcctcagagagagccagctctcctgcacagtgtgtcactcctgtccaaactgttgtataaaggactgtaagatcaggggcatcattgctatacactcttgattacactggcagctctatgagtagaaagtcttcggaatttagaacccatctatgagagaaagttcagtcactttatttattttaaatctctctaggatgagtttagaactgtagcagtgcaggtggcttaagtgaagtaactccatatgtaattacatgattatgatactaatcttttaagtatccaaagaatattaaaatacttcaatcctggattcacagtgggaacaagtttctattaaaaggcaaatgctgttacaaatttttggcatctggtaatattaaaaccattttagaaatacactctgtgctcactgtgcagaggaacatcagttttcaaaccaacactgaaattctgtggcatcacatatattgggccttgatgtcatgacagatcaaaatcatttgatatccctttctccattctaggtttttctttttttcagtaactgatttaccttgatcacttttcaacttccatattcttcatatagtaaaaggcaaagtgttgaagatactacggtgtggtagtagttgaaaattattgccgtcattatttacatacttaagacatattagcaagttgatccaaaatgggaggccttatagatgtgcttgggggaaaatgaaggggagaaagtagccatacaggagttcaaagaattccatgcccttcagattagcccaattaccagaaacatcatgaaagatattttaaaaactaattatttactacagtgtatttcacttgtcttgtgtgtctgaacacacagaagctaattagcaagtttttaagaagtatttaaaaatcttactaggattgacattttttctgaattctgtataaatagcttatagtgagaagtactgtgctcaaattttacatttttttcctttgcaaattctgtaatttcactcaacgattaagtctaccaaagaacacactgcatgtaaaagatgtattacaatctcaaagccagtaaaagaaatcttgcttcactgttcacctgctacaagtaagagtttggtgctggtagaaacatttgactctgatgtctattttattctacataagagccatatgtaatgtactgtaacaaaggagcttcttgtccccttggtcttttaattaaaagaaattccaactgacttttaaactttgttcttgtccaaagttgccatttcttttttttccccagaaatatttggaaattattggaggaatatgcaccccagatgaaaatgttcagtttgtacccatttttccttaaccaacacccaaatcaaacaattaaaatatacagtgtttttccactcactaattcactatacagagagtctgaaccttagcctccctcttggtcttgcagtgaggaaatttctattagtatatccaatttagcaaaattggtaccaaaatgatttctttggtaattgtgtgaaatataagctttttaacagggcatttaagtggctagcaaatcagtaattaaaaattaagctttctactccaagtatttcacaaatgcatctgccattttcctcatttaaaccttggttatcttggcctgataccacataaaagaatgtagaatggctgaagagatcaagaatttaaagcttctagtcttaacatacttgcatccacttcaaattcaaatcaaaagccagggaaatctaagtgcaaccctaccacttctctgctgagaaccttccagtggttcccctcaccttctgcagaagtctccaatatggagtacatgcacttgggcatttaatatataccactggtgtgtgtgggagggagggaggaggaatactagccctttttatatatttacacaagcaaaacttttaaatatttgaattgacagttacatgtttcataacttcgtatgtctattggttgtgcaggtgtaattttttccctttttgattagggttacaaaatttagagaccagtatgattaagttgaagctccttagcctccttcgacctagtctctgcatacctcaacttttacgtaccaatgctactctgctgttcacaattgcctcatgtaatctgcagattcctgcctccccactttggttcagtctgtcttgtgcacctggaacaactgttctcccttgtgactaattcctattttctagagtttaggcatcatctcttcctttgggaagttatctgattcacgactgccttctctgacatccccaccttcctctgtgcccccatagcactgtgtataccgctactaccactgcaattcacattatattggaatgaacaattcacatgtctaccacaagtctgtaaacataaccttatttgaaatgaattgcaataaagctctgttacaacgt

SEQ ID NO: 105721 - DNA, 3736 bp, Homo sapiens
ctccttccataagggtctggtccttcatccctcccgcttcaccagaccccctcaccctgggagccgccacctccctttccccaagaccagatgtcgcgcggccggacacagccagcacggagagtcgatgccggcgtctgagctgcgcagtggggtcttcccgctgcccagcagcctacaggcgcggtgcactctgggggaacatggccgcttccggtctccctcccgggccggcgctggcctgactgcggccccggtccgtagcactccgccctccgcttctcccgccctgtagccgcgaagactgcttcagcctttccctgtgctgcccctgccgcgcgatggagacgagctcgagctgcgagagtcttggctcccagccggcggcggctcggccgcccagcgtggactccttgtccagttaatgtgttaagagccattgacatttgaagatcatcagaagtgaagataaaacatctcaaaaattataattgcctccacttctcattcagagaattcagtgcatacaaaatcagcttctgttgtatcatcagattccatttcaacttctgccgacaacttttctcctgatttgaggcccatgcagtccagttcgggagctaagtcacttaaacactgtgtgatagttcctacacatctcattatagtttagggagtctcgctctatcccctaggctggagtgcattggcgccatctcggctcatttgcaacctctgtctcccgggttcaagcgattctcctgcctcagcttcccgaggagctgggattacaggtcctgagggagtctaacaagttagcagaaatggaagaaccacccttgcttccaggagaaaatattaaagacatggccaaagatgtaacttatatatgtccattcactggcgctgtacgaggaactctgactgtcacgaattataggttatatttcaaaagcatggaacgggatcccccatttgttttagatgcttcccttggtgtgataaatagagtagaaaaaattggtggtgcttctagtcgaggtgaaaattcttatggactagaaactgtgtgtaaggatattaggaatttacgatttgctcataaacctgaggggcggacaagaagatccatatttgagaatctaatgaaatatgcatttcctgtctctaataacctgcctctttttgcttttgaatacaaagaagtattccctgaaaatgggtggaagctatatgaccctcttttagagtatagaaggcagggaattccaaatgaaagctggagaataacaaagataaatgaacgatatgaactttgtgatacataccctgccctcctggttgtgccagcaaatattcctgatgaagaattaaagagagtggcatccttcagatcaagaggccgtatcccagttttatcatggattcatcctgaaagtcaagccacaatcactcggtgtagccagcccatggttggagtgagtggaaagcgaagcaaagaagatgaaaaataccttcaagctatcatggattccaatgcccagtctcacaaaatctttatatttgatgcccggccaagtgttaatgctgttgccaacaaggcaaagggtggaggttatgaaagtgaagatgcctatcaaaatgctgaactagttttcctggatatccacaatattcatgttatgagagaatcattacgaaaacttaaggagattgtgtaccccaacattgaggaaacccactggttgtctaacttggaatctactcattggctagaacatattaagcttattcttgcaggggctcttaggattgctgacaaggtagagtcagggaagacgtctgtggtagtgcattgcagtgatggttgggatcgcacagctcagctcacttcccttgccatgctcatgttggatggatactatcgaaccatccgaggatttgaagtccttgtggagaaagaatggctaagttttggacatcgatttcaactaagagttggccatggagataagaaccatgcagatgcagacagatcgcctgtttttcttcaatttattgactgtgtctggcagatgacaagacagtttcctaccgcatttgaattcaatgagtattttctcattaccattttggaccacctatacagctgcttattcggaacattcctctgtaatagtgaacaacagagaggaaaagagaatcttcctaaaaggactgtgtcactgtggtcttacataaacagccagctggaagacttcactaatcctctctatgggagctattccaatcatgtcctttatccagtagccagcatgcgccacctagagctctgggtgggatattacataaggtggaatccacggatgaaaccacaggaacctattcacaacagatacaaagaacttcttgctaaacgagcagagcttcagaaaaaagtagaggaactacagagagagatttctaaccgatcaacctcatcctcagagagagccagctctcctgcacagtgtgtcactcctgtccaaactgttgtataaaggactgtaagatcaggggcatcattgctatacactcttgattacactggcagctctatgagtagaaagtcttcggaatttagaacccatctatgagagaaagttcagtcactttatttattttaaatctctctaggatgagtttagaactgtagcagtgcaggtggcttaagtgaagtaactccatatgtaattacatgattatgatactaatcttttaagtatccaaagaatattaaaatacttcaatcctggattcacagtgggaacaagtttctattaaaaggcaaatgctgttacaaatttttggcatctggtaatattaaaaccattttagaaatacactctgtgctcactgtgcagaggaacatcagttttcaaaccaacactgaaattctgtggcatcacatatattgggccttgatgtcatgacagatcaaaatcatttgatatccctttctccattctaggtttttctttttttcagtaactgatttaccttgatcacttttcaacttccatattcttcatatagtaaaaggcaaagtgttgaagatactacggtgtggtagtagttgaaaattattgccgtcattatttacatacttaagacatattagcaagttgatccaaaatgggaggccttatagatgtgcttgggggaaaatgaaggggagaaagtagccatacaggagttcaaagaattccatgcccttcagattagcccaattaccagaaacatcatgaaagatattttaaaaactaattatttactacagtgtatttcacttgtcttgtgtgtctgaacacacagaagctaattagcaagtttttaagaagtatttaaaaatcttactaggattgacattttttctgaattctgtataaatagcttatagtgagaagtactgtgctcaaattttacatttttttcctttgcaaattctgtaatttcactcaacgattaagtctaccaaagaacacactgcatgtaaaagatgtattacaatctcaaagccagtaaaagaaatcttgcttcactgttcacctgctacaagtaagagtttggtgctggtagaaacatttgactctgatgtctattttattctacataagagccatatgtaatgtactgtaacaaaggagcttcttgtccccttggtcttttaattaaaagaaattccaactgactttta

SEQ ID NO: 105722 - DNA, 3663 bp, Homo sapiens
ctccttccataagggtctggtccttcatccctcccgcttcaccagaccccctcaccctgggagccgccacctccctttccccaagaccagatgtcgcgcggccggacacagccagcacggagagtcgatgccggcgtctgagctgcgcagtggggtcttcccgctgcccagcagcctacaggcgcggtgcactctgggggaacatggccgcttccggtctccctcccgggccggcgctggcctgactgcggccccggtccgtagcactccgccctccgcttctcccgccctgtagccgcgaagactgcttcagcctttccctgtgctgcccctgccgcgcgatggagacgagctcgagctgcgagagtcttggctcccagccggcggcggctcggccgcccagcgtggactccttgtccagttaatgtgttaagagccattgacatttgaagatcatcagaagtgaagataaaacatctcaaaaattataattgcctccacttctcattcagagaattcagtgcatacaaaatcagcttctgttgtatcatcagattccatttcaacttctgccgacaacttttctcctgatttgaggagggagtctcgctctatcccctaggctggagtgcattggcgccatctcggctcatttgcaacctctgtctcccgggttcaagcgattctcctgcctcagcttcccgaggagctgggattacaggtcctgagggagtctaacaagttagcagaaatggaagaaccacccttgcttccaggagaaaatattaaagacatggccaaagatgtaacttatatatgtccattcactggcgctgtacgaggaactctgactgtcacgaattataggttatatttcaaaagcatggaacgggatcccccatttgttttagatgcttcccttggtgtgataaatagagtagaaaaaattggtggtgcttctagtcgaggtgaaaattcttatggactagaaactgtgtgtaaggatattaggaatttacgatttgctcataaacctgaggggcggacaagaagatccatatttgagaatctaatgaaatatgcatttcctgtctctaataacctgcctctttttgcttttgaatacaaagaagtattccctgaaaatgggtggaagctatatgaccctcttttagagtatagaaggcagggaattccaaatgaaagctggagaataacaaagataaatgaacgatatgaactttgtgatacataccctgccctcctggttgtgccagcaaatattcctgatgaagaattaaagagagtggcatccttcagatcaagaggccgtatcccagttttatcatggattcatcctgaaagtcaagccacaatcactcggtgtagccagcccatggttggagtgagtggaaagcgaagcaaagaagatgaaaaataccttcaagctatcatggattccaatgcccagtctcacaaaatctttatatttgatgcccggccaagtgttaatgctgttgccaacaaggcaaagggtggaggttatgaaagtgaagatgcctatcaaaatgctgaactagttttcctggatatccacaatattcatgttatgagagaatcattacgaaaacttaaggagattgtgtaccccaacattgaggaaacccactggttgtctaacttggaatctactcattggctagaacatattaagcttattcttgcaggggctcttaggattgctgacaaggtagagtcagggaagacgtctgtggtagtgcattgcagtgatggttgggatcgcacagctcagctcacttcccttgccatgctcatgttggatggatactatcgaaccatccgaggatttgaagtccttgtggagaaagaatggctaagttttggacatcgatttcaactaagagttggccatggagataagaaccatgcagatgcagacagatcgcctgtttttcttcaatttattgactgtgtctggcagatgacaagacagtttcctaccgcatttgaattcaatgagtattttctcattaccattttggaccacctatacagctgcttattcggaacattcctctgtaatagtgaacaacagagaggaaaagagaatcttcctaaaaggactgtgtcactgtggtcttacataaacagccagctggaagacttcactaatcctctctatgggagctattccaatcatgtcctttatccagtagccagcatgcgccacctagagctctgggtgggatattacataaggtggaatccacggatgaaaccacaggaacctattcacaacagatacaaagaacttcttgctaaacgagcagagcttcagaaaaaagtagaggaactacagagagagatttctaaccgatcaacctcatcctcagagagagccagctctcctgcacagtgtgtcactcctgtccaaactgttgtataaaggactgtaagatcaggggcatcattgctatacactcttgattacactggcagctctatgagtagaaagtcttcggaatttagaacccatctatgagagaaagttcagtcactttatttattttaaatctctctaggatgagtttagaactgtagcagtgcaggtggcttaagtgaagtaactccatatgtaattacatgattatgatactaatcttttaagtatccaaagaatattaaaatacttcaatcctggattcacagtgggaacaagtttctattaaaaggcaaatgctgttacaaatttttggcatctggtaatattaaaaccattttagaaatacactctgtgctcactgtgcagaggaacatcagttttcaaaccaacactgaaattctgtggcatcacatatattgggccttgatgtcatgacagatcaaaatcatttgatatccctttctccattctaggtttttctttttttcagtaactgatttaccttgatcacttttcaacttccatattcttcatatagtaaaaggcaaagtgttgaagatactacggtgtggtagtagttgaaaattattgccgtcattatttacatacttaagacatattagcaagttgatccaaaatgggaggccttatagatgtgcttgggggaaaatgaaggggagaaagtagccatacaggagttcaaagaattccatgcccttcagattagcccaattaccagaaacatcatgaaagatattttaaaaactaattatttactacagtgtatttcacttgtcttgtgtgtctgaacacacagaagctaattagcaagtttttaagaagtatttaaaaatcttactaggattgacattttttctgaattctgtataaatagcttatagtgagaagtactgtgctcaaattttacatttttttcctttgcaaattctgtaatttcactcaacgattaagtctaccaaagaacacactgcatgtaaaagatgtattacaatctcaaagccagtaaaagaaatcttgcttcactgttcacctgctacaagtaagagtttggtgctggtagaaacatttgactctgatgtctattttattctacataagagccatatgtaatgtactgtaacaaaggagcttcttgtccccttggtcttttaattaaaagaaattccaactgactttta

SEQ ID NO: 105723 - DNA, 3540 bp, Homo sapiens
ctccttccataagggtctggtccttcatccctcccgcttcaccagaccccctcaccctgggagccgccacctccctttccccaagaccagatgtcgcgcggccggacacagccagcacggagagtcgatgccggcgtctgagctgcgcagtggggtcttcccgctgcccagcagcctacaggcgcggtgcactctgggggaacatggccgcttccggtctccctcccgggccggcgctggcctgactgcggccccggtccgtagcactccgccctccgcttctcccgccctgtagccgcgaagactgcttcagcctttccctgtgctgcccctgccgcgcgatggagacgagctcgagctgcgagagtcttggctcccagccggcggcggctcggccgcccagcgtggactccttgtccagttaatgtgttaagagccattgacatttgaagatcatcagaagtgaagataaaacatctcaaaaattataattgcctccacttctcattcagagaattcagtgcatacaaaatcagcttctgttgtatcatcagattccatttcaacttctgccgacaacttttctcctgatttgagggtcctgagggagtctaacaagttagcagaaatggaagaaccacccttgcttccaggagaaaatattaaagacatggccaaagatgtaacttatatatgtccattcactggcgctgtacgaggaactctgactgtcacgaattataggttatatttcaaaagcatggaacgggatcccccatttgttttagatgcttcccttggtgtgataaatagagtagaaaaaattggtggtgcttctagtcgaggtgaaaattcttatggactagaaactgtgtgtaaggatattaggaatttacgatttgctcataaacctgaggggcggacaagaagatccatatttgagaatctaatgaaatatgcatttcctgtctctaataacctgcctctttttgcttttgaatacaaagaagtattccctgaaaatgggtggaagctatatgaccctcttttagagtatagaaggcagggaattccaaatgaaagctggagaataacaaagataaatgaacgatatgaactttgtgatacataccctgccctcctggttgtgccagcaaatattcctgatgaagaattaaagagagtggcatccttcagatcaagaggccgtatcccagttttatcatggattcatcctgaaagtcaagccacaatcactcggtgtagccagcccatggttggagtgagtggaaagcgaagcaaagaagatgaaaaataccttcaagctatcatggattccaatgcccagtctcacaaaatctttatatttgatgcccggccaagtgttaatgctgttgccaacaaggcaaagggtggaggttatgaaagtgaagatgcctatcaaaatgctgaactagttttcctggatatccacaatattcatgttatgagagaatcattacgaaaacttaaggagattgtgtaccccaacattgaggaaacccactggttgtctaacttggaatctactcattggctagaacatattaagcttattcttgcaggggctcttaggattgctgacaaggtagagtcagggaagacgtctgtggtagtgcattgcagtgatggttgggatcgcacagctcagctcacttcccttgccatgctcatgttggatggatactatcgaaccatccgaggatttgaagtccttgtggagaaagaatggctaagttttggacatcgatttcaactaagagttggccatggagataagaaccatgcagatgcagacagatcgcctgtttttcttcaatttattgactgtgtctggcagatgacaagacagtttcctaccgcatttgaattcaatgagtattttctcattaccattttggaccacctatacagctgcttattcggaacattcctctgtaatagtgaacaacagagaggaaaagagaatcttcctaaaaggactgtgtcactgtggtcttacataaacagccagctggaagacttcactaatcctctctatgggagctattccaatcatgtcctttatccagtagccagcatgcgccacctagagctctgggtgggatattacataaggtggaatccacggatgaaaccacaggaacctattcacaacagatacaaagaacttcttgctaaacgagcagagcttcagaaaaaagtagaggaactacagagagagatttctaaccgatcaacctcatcctcagagagagccagctctcctgcacagtgtgtcactcctgtccaaactgttgtataaaggactgtaagatcaggggcatcattgctatacactcttgattacactggcagctctatgagtagaaagtcttcggaatttagaacccatctatgagagaaagttcagtcactttatttattttaaatctctctaggatgagtttagaactgtagcagtgcaggtggcttaagtgaagtaactccatatgtaattacatgattatgatactaatcttttaagtatccaaagaatattaaaatacttcaatcctggattcacagtgggaacaagtttctattaaaaggcaaatgctgttacaaatttttggcatctggtaatattaaaaccattttagaaatacactctgtgctcactgtgcagaggaacatcagttttcaaaccaacactgaaattctgtggcatcacatatattgggccttgatgtcatgacagatcaaaatcatttgatatccctttctccattctaggtttttctttttttcagtaactgatttaccttgatcacttttcaacttccatattcttcatatagtaaaaggcaaagtgttgaagatactacggtgtggtagtagttgaaaattattgccgtcattatttacatacttaagacatattagcaagttgatccaaaatgggaggccttatagatgtgcttgggggaaaatgaaggggagaaagtagccatacaggagttcaaagaattccatgcccttcagattagcccaattaccagaaacatcatgaaagatattttaaaaactaattatttactacagtgtatttcacttgtcttgtgtgtctgaacacacagaagctaattagcaagtttttaagaagtatttaaaaatcttactaggattgacattttttctgaattctgtataaatagcttatagtgagaagtactgtgctcaaattttacatttttttcctttgcaaattctgtaatttcactcaacgattaagtctaccaaagaacacactgcatgtaaaagatgtattacaatctcaaagccagtaaaagaaatcttgcttcactgttcacctgctacaagtaagagtttggtgctggtagaaacatttgactctgatgtctattttattctacataagagccatatgtaatgtactgtaacaaaggagcttcttgtccccttggtcttttaattaaaagaaattccaactgactttta

SEQ ID NO: 105724 - DNA, 3215 bp, Homo sapiens
agcggacgatcagaatatagaaggcatgctttaatgttcttgggcaaacatgctgtgtatgtgctcaggacattacttacaagaaaatcactttttaaaaagaaccttttctttttacggaatattgaagaaaaattgaattggcagcaagagtgaaacagtttaagtgcctccacttctcattcagagaattcagtgcatacaaaatcagcttctgttgtatcatcagattccatttcaacttctgccgacaacttttctcctgatttgagggtcctgagggagtctaacaagttagcagaaatggaagaaccacccttgcttccaggagaaaatattaaagacatggccaaagatgtaacttatatatgtccattcactggcgctgtacgaggaactctgactgtcacgaattataggttatatttcaaaagcatggaacgggatcccccatttgttttagatgcttcccttggtgtgataaatagagtagaaaaaattggtggtgcttctagtcgaggtgaaaattcttatggactagaaactgtgtgtaaggatattaggaatttacgatttgctcataaacctgaggggcggacaagaagatccatatttgagaatctaatgaaatatgcatttcctgtctctaataacctgcctctttttgcttttgaatacaaagaagtattccctgaaaatgggtggaagctatatgaccctcttttagagtatagaaggcagggaattccaaatgaaagctggagaataacaaagataaatgaacgatatgaactttgtgatacataccctgccctcctggttgtgccagcaaatattcctgatgaagaattaaagagagtggcatccttcagatcaagaggccgtatcccagttttatcatggattcatcctgaaagtcaagccacaatcactcggtgtagccagcccatggttggagtgagtggaaagcgaagcaaagaagatgaaaaataccttcaagctatcatggattccaatgcccagtctcacaaaatctttatatttgatgcccggccaagtgttaatgctgttgccaacaaggcaaagggtggaggttatgaaagtgaagatgcctatcaaaatgctgaactagttttcctggatatccacaatattcatgttatgagagaatcattacgaaaacttaaggagattgtgtaccccaacattgaggaaacccactggttgtctaacttggaatctactcattggctagaacatattaagcttattcttgcaggggctcttaggattgctgacaaggtagagtcagggaagacgtctgtggtagtgcattgcagtgatggttgggatcgcacagctcagctcacttcccttgccatgctcatgttggatggatactatcgaaccatccgaggatttgaagtccttgtggagaaagaatggctaagttttggacatcgatttcaactaagagttggccatggagataagaaccatgcagatgcagacagatcgcctgtttttcttcaatttattgactgtgtctggcagatgacaagacagtttcctaccgcatttgaattcaatgagtattttctcattaccattttggaccacctatacagctgcttattcggaacattcctctgtaatagtgaacaacagagaggaaaagagaatcttcctaaaaggactgtgtcactgtggtcttacataaacagccagctggaagacttcactaatcctctctatgggagctattccaatcatgtcctttatccagtagccagcatgcgccacctagagctctgggtgggatattacataaggtggaatccacggatgaaaccacaggaacctattcacaacagatacaaagaacttcttgctaaacgagcagagcttcagaaaaaagtagaggaactacagagagagatttctaaccgatcaacctcatcctcagagagagccagctctcctgcacagtgtgtcactcctgtccaaactgttgtataaaggactgtaagatcaggggcatcattgctatacactcttgattacactggcagctctatgagtagaaagtcttcggaatttagaacccatctatgagagaaagttcagtcactttatttattttaaatctctctaggatgagtttagaactgtagcagtgcaggtggcttaagtgaagtaactccatatgtaattacatgattatgatactaatcttttaagtatccaaagaatattaaaatacttcaatcctggattcacagtgggaacaagtttctattaaaaggcaaatgctgttacaaatttttggcatctggtaatattaaaaccattttagaaatacactctgtgctcactgtgcagaggaacatcagttttcaaaccaacactgaaattctgtggcatcacatatattgggccttgatgtcatgacagatcaaaatcatttgatatccctttctccattctaggtttttctttttttcagtaactgatttaccttgatcacttttcaacttccatattcttcatatagtaaaaggcaaagtgttgaagatactacggtgtggtagtagttgaaaattattgccgtcattatttacatacttaagacatattagcaagttgatccaaaatgggaggccttatagatgtgcttgggggaaaatgaaggggagaaagtagccatacaggagttcaaagaattccatgcccttcagattagcccaattaccagaaacatcatgaaagatattttaaaaactaattatttactacagtgtatttcacttgtcttgtgtgtctgaacacacagaagctaattagcaagtttttaagaagtatttaaaaatcttactaggattgacattttttctgaattctgtataaatagcttatagtgagaagtactgtgctcaaattttacatttttttcctttgcaaattctgtaatttcactcaacgattaagtctaccaaagaacacactgcatgtaaaagatgtattacaatctcaaagccagtaaaagaaatcttgcttcactgttcacctgctacaagtaagagtttggtgctggtagaaacatttgactctgatgtctattttattctacataagagccatatgtaatgtactgtaacaaaggagcttcttgtccccttggtcttttaattaaaagaaattccaactgactttta

SEQ ID NO: 105725 - DNA, 3613 bp, Homo sapiens
ctccttccataagggtctggtccttcatccctcccgcttcaccagaccccctcaccctgggagccgccacctccctttccccaagaccagatgtcgcgcggccggacacagccagcacggagagtcgatgccggcgtctgagctgcgcagtggggtcttcccgctgcccagcagcctacaggcgcggtgcactctgggggaacatggccgcttccggtctccctcccgggccggcgctggcctgactgcggccccggtccgtagcactccgccctccgcttctcccgccctgtagccgcgaagactgcttcagcctttccctgtgctgcccctgccgcgcgatggagacgagctcgagctgcgagagtcttggctcccagccggcggcggctcggccgcccagcgtggactccttgtccagttaatgtgttaagagccattgacatttgaagatcatcagaagtgaagataaaacatctcaaaaattataattgcctccacttctcattcagagaattcagtgcatacaaaatcagcttctgttgtatcatcagattccatttcaacttctgccgacaacttttctcctgatttgaggcccatgcagtccagttcgggagctaagtcacttaaacactgtgtgatagttcctacacatctcattatagtttgtcctgagggagtctaacaagttagcagaaatggaagaaccacccttgcttccaggagaaaatattaaagacatggccaaagatgtaacttatatatgtccattcactggcgctgtacgaggaactctgactgtcacgaattataggttatatttcaaaagcatggaacgggatcccccatttgttttagatgcttcccttggtgtgataaatagagtagaaaaaattggtggtgcttctagtcgaggtgaaaattcttatggactagaaactgtgtgtaaggatattaggaatttacgatttgctcataaacctgaggggcggacaagaagatccatatttgagaatctaatgaaatatgcatttcctgtctctaataacctgcctctttttgcttttgaatacaaagaagtattccctgaaaatgggtggaagctatatgaccctcttttagagtatagaaggcagggaattccaaatgaaagctggagaataacaaagataaatgaacgatatgaactttgtgatacataccctgccctcctggttgtgccagcaaatattcctgatgaagaattaaagagagtggcatccttcagatcaagaggccgtatcccagttttatcatggattcatcctgaaagtcaagccacaatcactcggtgtagccagcccatggttggagtgagtggaaagcgaagcaaagaagatgaaaaataccttcaagctatcatggattccaatgcccagtctcacaaaatctttatatttgatgcccggccaagtgttaatgctgttgccaacaaggcaaagggtggaggttatgaaagtgaagatgcctatcaaaatgctgaactagttttcctggatatccacaatattcatgttatgagagaatcattacgaaaacttaaggagattgtgtaccccaacattgaggaaacccactggttgtctaacttggaatctactcattggctagaacatattaagcttattcttgcaggggctcttaggattgctgacaaggtagagtcagggaagacgtctgtggtagtgcattgcagtgatggttgggatcgcacagctcagctcacttcccttgccatgctcatgttggatggatactatcgaaccatccgaggatttgaagtccttgtggagaaagaatggctaagttttggacatcgatttcaactaagagttggccatggagataagaaccatgcagatgcagacagatcgcctgtttttcttcaatttattgactgtgtctggcagatgacaagacagtttcctaccgcatttgaattcaatgagtattttctcattaccattttggaccacctatacagctgcttattcggaacattcctctgtaatagtgaacaacagagaggaaaagagaatcttcctaaaaggactgtgtcactgtggtcttacataaacagccagctggaagacttcactaatcctctctatgggagctattccaatcatgtcctttatccagtagccagcatgcgccacctagagctctgggtgggatattacataaggtggaatccacggatgaaaccacaggaacctattcacaacagatacaaagaacttcttgctaaacgagcagagcttcagaaaaaagtagaggaactacagagagagatttctaaccgatcaacctcatcctcagagagagccagctctcctgcacagtgtgtcactcctgtccaaactgttgtataaaggactgtaagatcaggggcatcattgctatacactcttgattacactggcagctctatgagtagaaagtcttcggaatttagaacccatctatgagagaaagttcagtcactttatttattttaaatctctctaggatgagtttagaactgtagcagtgcaggtggcttaagtgaagtaactccatatgtaattacatgattatgatactaatcttttaagtatccaaagaatattaaaatacttcaatcctggattcacagtgggaacaagtttctattaaaaggcaaatgctgttacaaatttttggcatctggtaatattaaaaccattttagaaatacactctgtgctcactgtgcagaggaacatcagttttcaaaccaacactgaaattctgtggcatcacatatattgggccttgatgtcatgacagatcaaaatcatttgatatccctttctccattctaggtttttctttttttcagtaactgatttaccttgatcacttttcaacttccatattcttcatatagtaaaaggcaaagtgttgaagatactacggtgtggtagtagttgaaaattattgccgtcattatttacatacttaagacatattagcaagttgatccaaaatgggaggccttatagatgtgcttgggggaaaatgaaggggagaaagtagccatacaggagttcaaagaattccatgcccttcagattagcccaattaccagaaacatcatgaaagatattttaaaaactaattatttactacagtgtatttcacttgtcttgtgtgtctgaacacacagaagctaattagcaagtttttaagaagtatttaaaaatcttactaggattgacattttttctgaattctgtataaatagcttatagtgagaagtactgtgctcaaattttacatttttttcctttgcaaattctgtaatttcactcaacgattaagtctaccaaagaacacactgcatgtaaaagatgtattacaatctcaaagccagtaaaagaaatcttgcttcactgttcacctgctacaagtaagagtttggtgctggtagaaacatttgactctgatgtctattttattctacataagagccatatgtaatgtactgtaacaaaggagcttcttgtccccttggtcttttaattaaaagaaattccaactgactttta

SEQ ID NO: 105726 - DNA, 3542 bp, Homo sapiens
ctccttccataagggtctggtccttcatccctcccgcttcaccagaccccctcaccctgggagccgccacctccctttccccaagaccagatgtcgcgcggccggacacagccagcacggagagtcgatgccggcgtctgagctgcgcagtggggtcttcccgctgcccagcagcctacaggcgcggtgcactctgggggaacatggccgcttccggtctccctcccgggccggcgctggcctgactgcggccccggtccgtagcactccgccctccgcttctcccgccctgtagccgcgaagactgcttcagcctttccctgtgctgcccctgccgcgcgatggagacgagctcgagctgcgagagtcttggctcccagccggcggcggctcggccgcccagcgtggactccttgtccagtgcctccacttctcattcagagaattcagtgcatacaaaatcagcttctgttgtatcatcagattccatttcaacttctgccgacaacttttctcctgatttgaggcccatgcagtccagttcgggagctaagtcacttaaacactgtgtgatagttcctacacatctcattatagtttgtcctgagggagtctaacaagttagcagaaatggaagaaccacccttgcttccaggagaaaatattaaagacatggccaaagatgtaacttatatatgtccattcactggcgctgtacgaggaactctgactgtcacgaattataggttatatttcaaaagcatggaacgggatcccccatttgttttagatgcttcccttggtgtgataaatagagtagaaaaaattggtggtgcttctagtcgaggtgaaaattcttatggactagaaactgtgtgtaaggatattaggaatttacgatttgctcataaacctgaggggcggacaagaagatccatatttgagaatctaatgaaatatgcatttcctgtctctaataacctgcctctttttgcttttgaatacaaagaagtattccctgaaaatgggtggaagctatatgaccctcttttagagtatagaaggcagggaattccaaatgaaagctggagaataacaaagataaatgaacgatatgaactttgtgatacataccctgccctcctggttgtgccagcaaatattcctgatgaagaattaaagagagtggcatccttcagatcaagaggccgtatcccagttttatcatggattcatcctgaaagtcaagccacaatcactcggtgtagccagcccatggttggagtgagtggaaagcgaagcaaagaagatgaaaaataccttcaagctatcatggattccaatgcccagtctcacaaaatctttatatttgatgcccggccaagtgttaatgctgttgccaacaaggcaaagggtggaggttatgaaagtgaagatgcctatcaaaatgctgaactagttttcctggatatccacaatattcatgttatgagagaatcattacgaaaacttaaggagattgtgtaccccaacattgaggaaacccactggttgtctaacttggaatctactcattggctagaacatattaagcttattcttgcaggggctcttaggattgctgacaaggtagagtcagggaagacgtctgtggtagtgcattgcagtgatggttgggatcgcacagctcagctcacttcccttgccatgctcatgttggatggatactatcgaaccatccgaggatttgaagtccttgtggagaaagaatggctaagttttggacatcgatttcaactaagagttggccatggagataagaaccatgcagatgcagacagatcgcctgtttttcttcaatttattgactgtgtctggcagatgacaagacagtttcctaccgcatttgaattcaatgagtattttctcattaccattttggaccacctatacagctgcttattcggaacattcctctgtaatagtgaacaacagagaggaaaagagaatcttcctaaaaggactgtgtcactgtggtcttacataaacagccagctggaagacttcactaatcctctctatgggagctattccaatcatgtcctttatccagtagccagcatgcgccacctagagctctgggtgggatattacataaggtggaatccacggatgaaaccacaggaacctattcacaacagatacaaagaacttcttgctaaacgagcagagcttcagaaaaaagtagaggaactacagagagagatttctaaccgatcaacctcatcctcagagagagccagctctcctgcacagtgtgtcactcctgtccaaactgttgtataaaggactgtaagatcaggggcatcattgctatacactcttgattacactggcagctctatgagtagaaagtcttcggaatttagaacccatctatgagagaaagttcagtcactttatttattttaaatctctctaggatgagtttagaactgtagcagtgcaggtggcttaagtgaagtaactccatatgtaattacatgattatgatactaatcttttaagtatccaaagaatattaaaatacttcaatcctggattcacagtgggaacaagtttctattaaaaggcaaatgctgttacaaatttttggcatctggtaatattaaaaccattttagaaatacactctgtgctcactgtgcagaggaacatcagttttcaaaccaacactgaaattctgtggcatcacatatattgggccttgatgtcatgacagatcaaaatcatttgatatccctttctccattctaggtttttctttttttcagtaactgatttaccttgatcacttttcaacttccatattcttcatatagtaaaaggcaaagtgttgaagatactacggtgtggtagtagttgaaaattattgccgtcattatttacatacttaagacatattagcaagttgatccaaaatgggaggccttatagatgtgcttgggggaaaatgaaggggagaaagtagccatacaggagttcaaagaattccatgcccttcagattagcccaattaccagaaacatcatgaaagatattttaaaaactaattatttactacagtgtatttcacttgtcttgtgtgtctgaacacacagaagctaattagcaagtttttaagaagtatttaaaaatcttactaggattgacattttttctgaattctgtataaatagcttatagtgagaagtactgtgctcaaattttacatttttttcctttgcaaattctgtaatttcactcaacgattaagtctaccaaagaacacactgcatgtaaaagatgtattacaatctcaaagccagtaaaagaaatcttgcttcactgttcacctgctacaagtaagagtttggtgctggtagaaacatttgactctgatgtctattttattctacataagagccatatgtaatgtactgtaacaaaggagcttcttgtccccttggtcttttaattaaaagaaattccaactgactttta

SEQ ID NO: 105727 - DNA, 3592 bp, Homo sapiens
ctccttccataagggtctggtccttcatccctcccgcttcaccagaccccctcaccctgggagccgccacctccctttccccaagaccagatgtcgcgcggccggacacagccagcacggagagtcgatgccggcgtctgagctgcgcagtggggtcttcccgctgcccagcagcctacaggcgcggtgcactctgggggaacatggccgcttccggtctccctcccgggccggcgctggcctgactgcggccccggtccgtagcactccgccctccgcttctcccgccctgtagccgcgaagactgcttcagcctttccctgtgctgcccctgccgcgcgatggagacgagctcgagctgcgagagtcttggctcccagccggcggcggctcggccgcccagcgtggactccttgtccagtgcctccacttctcattcagagaattcagtgcatacaaaatcagcttctgttgtatcatcagattccatttcaacttctgccgacaacttttctcctgatttgaggagggagtctcgctctatcccctaggctggagtgcattggcgccatctcggctcatttgcaacctctgtctcccgggttcaagcgattctcctgcctcagcttcccgaggagctgggattacaggtcctgagggagtctaacaagttagcagaaatggaagaaccacccttgcttccaggagaaaatattaaagacatggccaaagatgtaacttatatatgtccattcactggcgctgtacgaggaactctgactgtcacgaattataggttatatttcaaaagcatggaacgggatcccccatttgttttagatgcttcccttggtgtgataaatagagtagaaaaaattggtggtgcttctagtcgaggtgaaaattcttatggactagaaactgtgtgtaaggatattaggaatttacgatttgctcataaacctgaggggcggacaagaagatccatatttgagaatctaatgaaatatgcatttcctgtctctaataacctgcctctttttgcttttgaatacaaagaagtattccctgaaaatgggtggaagctatatgaccctcttttagagtatagaaggcagggaattccaaatgaaagctggagaataacaaagataaatgaacgatatgaactttgtgatacataccctgccctcctggttgtgccagcaaatattcctgatgaagaattaaagagagtggcatccttcagatcaagaggccgtatcccagttttatcatggattcatcctgaaagtcaagccacaatcactcggtgtagccagcccatggttggagtgagtggaaagcgaagcaaagaagatgaaaaataccttcaagctatcatggattccaatgcccagtctcacaaaatctttatatttgatgcccggccaagtgttaatgctgttgccaacaaggcaaagggtggaggttatgaaagtgaagatgcctatcaaaatgctgaactagttttcctggatatccacaatattcatgttatgagagaatcattacgaaaacttaaggagattgtgtaccccaacattgaggaaacccactggttgtctaacttggaatctactcattggctagaacatattaagcttattcttgcaggggctcttaggattgctgacaaggtagagtcagggaagacgtctgtggtagtgcattgcagtgatggttgggatcgcacagctcagctcacttcccttgccatgctcatgttggatggatactatcgaaccatccgaggatttgaagtccttgtggagaaagaatggctaagttttggacatcgatttcaactaagagttggccatggagataagaaccatgcagatgcagacagatcgcctgtttttcttcaatttattgactgtgtctggcagatgacaagacagtttcctaccgcatttgaattcaatgagtattttctcattaccattttggaccacctatacagctgcttattcggaacattcctctgtaatagtgaacaacagagaggaaaagagaatcttcctaaaaggactgtgtcactgtggtcttacataaacagccagctggaagacttcactaatcctctctatgggagctattccaatcatgtcctttatccagtagccagcatgcgccacctagagctctgggtgggatattacataaggtggaatccacggatgaaaccacaggaacctattcacaacagatacaaagaacttcttgctaaacgagcagagcttcagaaaaaagtagaggaactacagagagagatttctaaccgatcaacctcatcctcagagagagccagctctcctgcacagtgtgtcactcctgtccaaactgttgtataaaggactgtaagatcaggggcatcattgctatacactcttgattacactggcagctctatgagtagaaagtcttcggaatttagaacccatctatgagagaaagttcagtcactttatttattttaaatctctctaggatgagtttagaactgtagcagtgcaggtggcttaagtgaagtaactccatatgtaattacatgattatgatactaatcttttaagtatccaaagaatattaaaatacttcaatcctggattcacagtgggaacaagtttctattaaaaggcaaatgctgttacaaatttttggcatctggtaatattaaaaccattttagaaatacactctgtgctcactgtgcagaggaacatcagttttcaaaccaacactgaaattctgtggcatcacatatattgggccttgatgtcatgacagatcaaaatcatttgatatccctttctccattctaggtttttctttttttcagtaactgatttaccttgatcacttttcaacttccatattcttcatatagtaaaaggcaaagtgttgaagatactacggtgtggtagtagttgaaaattattgccgtcattatttacatacttaagacatattagcaagttgatccaaaatgggaggccttatagatgtgcttgggggaaaatgaaggggagaaagtagccatacaggagttcaaagaattccatgcccttcagattagcccaattaccagaaacatcatgaaagatattttaaaaactaattatttactacagtgtatttcacttgtcttgtgtgtctgaacacacagaagctaattagcaagtttttaagaagtatttaaaaatcttactaggattgacattttttctgaattctgtataaatagcttatagtgagaagtactgtgctcaaattttacatttttttcctttgcaaattctgtaatttcactcaacgattaagtctaccaaagaacacactgcatgtaaaagatgtattacaatctcaaagccagtaaaagaaatcttgcttcactgttcacctgctacaagtaagagtttggtgctggtagaaacatttgactctgatgtctattttattctacataagagccatatgtaatgtactgtaacaaaggagcttcttgtccccttggtcttttaattaaaagaaattccaactgactttta

SEQ ID NO: 105728 - DNA, 2645 bp, Homo sapiens
gcttttagaactgagcagttttactaatatattaagtggggtttacttagccctgtttcacagtatttttttcaggagataacatttcccaataatcaaatactttcctaaatcagtatctgactaaagaattagaccaagttttccacatcccagaattggcttgaaggaaaggtgatgatttttcttagcagcctcagatgtcctttcatggccaggctttggatccaattagaaagcagagctttactgagtactgtttttgagaattataaacagagaagtatgtaaaaggtgtgttaccattttttcctcattaaggttttatcatggattcatcctgaaagtcaagccacaatcactcggtgtagccagcccatggttggagtgagtggaaagcgaagcaaagaagatgaaaaataccttcaagctatcatggattccaatgcccagtctcacaaaatctttatatttgatgcccggccaagtgttaatgctgttgccaacaaggcaaagggtggaggttatgaaagtgaagatgcctatcaaaatgctgaactagttttcctggatatccacaatattcatgttatgagagaatcattacgaaaacttaaggagattgtgtaccccaacattgaggaaacccactggttgtctaacttggaatctactcattggctagaacatattaagcttattcttgcaggggctcttaggattgctgacaaggtagagtcagggaagacgtctgtggtagtgcattgcagtgatggttgggatcgcacagctcagctcacttcccttgccatgctcatgttggatggatactatcgaaccatccgaggatttgaagtccttgtggagaaagaatggctaagttttggacatcgatttcaactaagagttggccatggagataagaaccatgcagatgcagacagatcgcctgtttttcttcaatttattgactgtgtctggcagatgacaagacagtttcctaccgcatttgaattcaatgagtattttctcattaccattttggaccacctatacagctgcttattcggaacattcctctgtaatagtgaacaacagagaggaaaagagaatcttcctaaaaggactgtgtcactgtggtcttacataaacagccagctggaagacttcactaatcctctctatgggagctattccaatcatgtcctttatccagtagccagcatgcgccacctagagctctgggtgggatattacataaggtggaatccacggatgaaaccacaggaacctattcacaacagatacaaagaacttcttgctaaacgagcagagcttcagaaaaaagtagaggaactacagagagagatttctaaccgatcaacctcatcctcagagagagccagctctcctgcacagtgtgtcactcctgtccaaactgttgtataaaggactgtaagatcaggggcatcattgctatacactcttgattacactggcagctctatgagtagaaagtcttcggaatttagaacccatctatgagagaaagttcagtcactttatttattttaaatctctctaggatgagtttagaactgtagcagtgcaggtggcttaagtgaagtaactccatatgtaattacatgattatgatactaatcttttaagtatccaaagaatattaaaatacttcaatcctggattcacagtgggaacaagtttctattaaaaggcaaatgctgttacaaatttttggcatctggtaatattaaaaccattttagaaatacactctgtgctcactgtgcagaggaacatcagttttcaaaccaacactgaaattctgtggcatcacatatattgggccttgatgtcatgacagatcaaaatcatttgatatccctttctccattctaggtttttctttttttcagtaactgatttaccttgatcacttttcaacttccatattcttcatatagtaaaaggcaaagtgttgaagatactacggtgtggtagtagttgaaaattattgccgtcattatttacatacttaagacatattagcaagttgatccaaaatgggaggccttatagatgtgcttgggggaaaatgaaggggagaaagtagccatacaggagttcaaagaattccatgcccttcagattagcccaattaccagaaacatcatgaaagatattttaaaaactaattatttactacagtgtatttcacttgtcttgtgtgtctgaacacacagaagctaattagcaagtttttaagaagtatttaaaaatcttactaggattgacattttttctgaattctgtataaatagcttatagtgagaagtactgtgctcaaattttacatttttttcctttgcaaattctgtaatttcactcaacgattaagtctaccaaagaacacactgcatgtaaaagatgtattacaatctcaaagccagtaaaagaaatcttgcttcactgttcacctgctacaagtaagagtttggtgctggtagaaacatttgactctgatgtctattttattctacataagagccatatgtaatgtactgtaacaaaggagcttcttgtccccttggtcttttaattaaaagaaattccaactgactttta

SEQ ID NO: 105729 - DNA, 3022 bp, Homo sapiens
cgttacactcactccaagcatgggctggctacaccgagtgattgtggcttgattttcaggatgaatccatgataaaactgggatacggcctcttgatctgaaggatgccactctctttaattcttcaatttattgactgtgtctggcagatgacaagacagtttcctaccgcatttgaattcaatgagtattttctcattaccattttggaccacctatacagctgcttattcggaacattcctctgtaatagtgaacaacagagaggaaaagagaatcttcctaaaaggactgtgtcactgtggtcttacataaacagccagctggaagacttcactaatcctctctatgggagctattccaatcatgtcctttatccagtagccagcatgcgccacctagagctctgggtgggatattacataaggtggaatccacggatgaaaccacaggaacctattcacaacagatacaaagaacttcttgctaaacgagcagagcttcagaaaaaagtagaggaactacagagagagatttctaaccgatcaacctcatcctcagagagagccagctctcctgcacagtgtgtcactcctgtccaaactgttgtataaaggactgtaagatcaggggcatcattgctatacactcttgattacactggcagctctatgagtagaaagtcttcggaatttagaacccatctatgagagaaagttcagtcactttatttattttaaatctctctaggatgagtttagaactgtagcagtgcaggtggcttaagtgaagtaactccatatgtaattacatgattatgatactaatcttttaagtatccaaagaatattaaaatacttcaatcctggattcacagtgggaacaagtttctattaaaaggcaaatgctgttacaaatttttggcatctggtaatattaaaaccattttagaaatacactctgtgctcactgtgcagaggaacatcagttttcaaaccaacactgaaattctgtggcatcacatatattgggccttgatgtcatgacagatcaaaatcatttgatatccctttctccattctaggtttttctttttttcagtaactgatttaccttgatcacttttcaacttccatattcttcatatagtaaaaggcaaagtgttgaagatactacggtgtggtagtagttgaaaattattgccgtcattatttacatacttaagacatattagcaagttgatccaaaatgggaggccttatagatgtgcttgggggaaaatgaaggggagaaagtagccatacaggagttcaaagaattccatgcccttcagattagcccaattaccagaaacatcatgaaagatattttaaaaactaattatttactacagtgtatttcacttgtcttgtgtgtctgaacacacagaagctaattagcaagtttttaagaagtatttaaaaatcttactaggattgacattttttctgaattctgtataaatagcttatagtgagaagtactgtgctcaaattttacatttttttcctttgcaaattctgtaatttcactcaacgattaagtctaccaaagaacacactgcatgtaaaagatgtattacaatctcaaagccagtaaaagaaatcttgcttcactgttcacctgctacaagtaagagtttggtgctggtagaaacatttgactctgatgtctattttattctacataagagccatatgtaatgtactgtaacaaaggagcttcttgtccccttggtcttttaattaaaagaaattccaactgacttttaaactttgttcttgtccaaagttgccatttcttttttttccccagaaatatttggaaattattggaggaatatgcaccccagatgaaaatgttcagtttgtacccatttttccttaaccaacacccaaatcaaacaattaaaatatacagtgtttttccactcactaattcactatacagagagtctgaaccttagcctccctcttggtcttgcagtgaggaaatttctattagtatatccaatttagcaaaattggtaccaaaatgatttctttggtaattgtgtgaaatataagctttttaacagggcatttaagtggctagcaaatcagtaattaaaaattaagctttctactccaagtatttcacaaatgcatctgccattttcctcatttaaaccttggttatcttggcctgataccacataaaagaatgtagaatggctgaagagatcaagaatttaaagcttctagtcttaacatacttgcatccacttcaaattcaaatcaaaagccagggaaatctaagtgcaaccctaccacttctctgctgagaaccttccagtggttcccctcaccttctgcagaagtctccaatatggagtacatgcacttgggcatttaatatataccactggtgtgtgtgggagggagggaggaggaatactagccctttttatatatttacacaagcaaaacttttaaatatttgaattgacagttacatgtttcataacttcgtatgtctattggttgtgcaggtgtaattttttccctttttgattagggttacaaaatttagagaccagtatgattaagttgaagctccttagcctccttcgacctagtctctgcatacctcaacttttacgtaccaatgctactctgctgttcacaattgcctcatgtaatctgcagattcctgcctccccactttggttcagtctgtcttgtgcacctggaacaactgttctcccttgtgactaattcctattttctagagtttaggcatcatctcttcctttgggaagttatctgattcacgactgccttctctgacatccccaccttcctctgtgcccccatagcactgtgtataccgctactaccactgcaattcacattatattggaatgaacaattcacatgtctaccacaagtctgtaaacataaccttatttgaaatgaattgcaataaagctctgttacaacgt

SEQ ID NO: 105730 - DNA, 3857 bp, Homo sapiens
ctccttccataagggtctggtccttcatccctcccgcttcaccagaccccctcaccctgggagccgccacctccctttccccaagaccagatgtcgcgcggccggacacagccagcacggagagtcgatgccggcgtctgagctgcgcagtggggtcttcccgctgcccagcagcctacaggcgcggtgcactctgggggaacatggccgcttccggtctccctcccgggccggcgctggcctgactgcggccccggtccgtagcactccgccctccgcttctcccgccctgtagccgcgaagactgcttcagcctttccctgtgctgcccctgccgcgcgatggagacgagctcgagctgcgagagtcttggctcccagccggcggcggctcggccgcccagcgtggactccttgtccagttaatgtgttaagagccattgacatttgaagatcatcagaagtgaagataaaacatctcaaaaattataattgcctccacttctcattcagagaattcagtgcatacaaaatcagcttctgttgtatcatcagattccatttcaacttctgccgacaacttttctcctgatttgaggagggagtctcgctctatcccctaggctggagtgcattggcgccatctcggctcatttgcaacctctgtctcccgggttcaagcgattctcctgcctcagcttcccgaggagctgggattacaggtcctgagggagtctaacaagttagcagaaatggaagaaccacccttgcttccaggagaaaatattaaagacatggccaaagatgtaacttatatatgtccattcactggcgctgtacgaggaactctgactgtcacgaattataggttatatttcaaaagcatggaacgggatcccccatttgttttagatgcttcccttggtgtgataaatagagtagaaaaaattggtggtgcttctagtcgaggtgaaaattcttatggactagaaactgtgtgtaaggatattaggaatttacgatttgctcataaacctgaggggcggacaagaagatccatatttgagaatctaatgaaatatgcatttcctgtctctaataacctgcctctttttgcttttgaatacaaagaagtattccctgaaaatgggtggaagctatatgaccctcttttagagtatagaaggcagggaattccaaatgaaagctggagaataacaaagataaatgaacgatatgaactttgtgatacataccctgccctcctggttgtgccagcaaatattcctgatgaagaattaaagagagtggcatccttcagatcaagaggccgtatcccagttttatcatggattcatcctgaaagtcaagccacaatcactcggtgtagccagcccatggttggagtgagtggaaagcgaagcaaagaagatgaaaaataccttcaagctatcatggattccaatgcccagtctcacaaaatactcttgattacactggcagctctatgagtagaaagtcttcggaatttagaacccatctatgagagaaagttcagtcactttatttattttaaatctctctaggatgagtttagaactgtagcagtgcaggtggcttaagtgaagtaactccatatgtaattacatgattatgatactaatcttttaagtatccaaagaatattaaaatacttcaatcctggattcacagtgggaacaagtttctattaaaaggcaaatgctgttacaaatttttggcatctggtaatattaaaaccattttagaaatacactctgtgctcactgtgcagaggaacatcagttttcaaaccaacactgaaattctgtggcatcacatatattgggccttgatgtcatgacagatcaaaatcatttgatatccctttctccattctaggtttttctttttttcagtaactgatttaccttgatcacttttcaacttccatattcttcatatagtaaaaggcaaagtgttgaagatactacggtgtggtagtagttgaaaattattgccgtcattatttacatacttaagacatattagcaagttgatccaaaatgggaggccttatagatgtgcttgggggaaaatgaaggggagaaagtagccatacaggagttcaaagaattccatgcccttcagattagcccaattaccagaaacatcatgaaagatattttaaaaactaattatttactacagtgtatttcacttgtcttgtgtgtctgaacacacagaagctaattagcaagtttttaagaagtatttaaaaatcttactaggattgacattttttctgaattctgtataaatagcttatagtgagaagtactgtgctcaaattttacatttttttcctttgcaaattctgtaatttcactcaacgattaagtctaccaaagaacacactgcatgtaaaagatgtattacaatctcaaagccagtaaaagaaatcttgcttcactgttcacctgctacaagtaagagtttggtgctggtagaaacatttgactctgatgtctattttattctacataagagccatatgtaatgtactgtaacaaaggagcttcttgtccccttggtcttttaattaaaagaaattccaactgacttttaaactttgttcttgtccaaagttgccatttcttttttttccccagaaatatttggaaattattggaggaatatgcaccccagatgaaaatgttcagtttgtacccatttttccttaaccaacacccaaatcaaacaattaaaatatacagtgtttttccactcactaattcactatacagagagtctgaaccttagcctccctcttggtcttgcagtgaggaaatttctattagtatatccaatttagcaaaattggtaccaaaatgatttctttggtaattgtgtgaaatataagctttttaacagggcatttaagtggctagcaaatcagtaattaaaaattaagctttctactccaagtatttcacaaatgcatctgccattttcctcatttaaaccttggttatcttggcctgataccacataaaagaatgtagaatggctgaagagatcaagaatttaaagcttctagtcttaacatacttgcatccacttcaaattcaaatcaaaagccagggaaatctaagtgcaaccctaccacttctctgctgagaaccttccagtggttcccctcaccttctgcagaagtctccaatatggagtacatgcacttgggcatttaatatataccactggtgtgtgtgggagggagggaggaggaatactagccctttttatatatttacacaagcaaaacttttaaatatttgaattgacagttacatgtttcataacttcgtatgtctattggttgtgcaggtgtaattttttccctttttgattagggttacaaaatttagagaccagtatgattaagttgaagctccttagcctccttcgacctagtctctgcatacctcaacttttacgtaccaatgctactctgctgttcacaattgcctcatgtaatctgcagattcctgcctccccactttggttcagtctgtcttgtgcacctggaacaactgttctcccttgtgactaattcctattttctagagtttaggcatcatctcttcctttgggaagttatctgattcacgactgccttctctgacatccccaccttcctctgtgcccccatagcactgtgtataccgctactaccactgcaattcacattatattggaatgaacaattcacatgtctaccacaagtctgtaaacataaccttatttgaaatgaattgcaataaagctctgttacaacgt

SEQ ID NO: 105731 - DNA, 2504 bp, Homo sapiens
ctccttccataagggtctggtccttcatccctcccgcttcaccagaccccctcaccctgggagccgccacctccctttccccaagaccagatgtcgcgcggccggacacagccagcacggagagtcgatgccggcgtctgagctgcgcagtggggtcttcccgctgcccagcagcctacaggcgcggtgcactctgggggaacatggccgcttccggtctccctcccgggccggcgctggcctgactgcggccccggtccgtagcactccgccctccgcttctcccgccctgtagccgcgaagactgcttcagcctttccctgtgctgcccctgccgcgcgatggagacgagctcgagctgcgagagtcttggctcccagccggcggcggctcggccgcccagcgtggactccttgtccagttaatgtgttaagagccattgacatttgaagatcatcagaagtgaagataaaacatctcaaaaattataattgcctccacttctcattcagagaattcagtgcatacaaaatcagcttctgttgtatcatcagattccatttcaacttctgccgacaacttttctcctgatttgaggagggagtctcgctctatcccctaggctggagtgcattggcgccatctcggctcatttgcaacctctgtctcccgggttcaagcgattctcctgcctcagcttcccgaggagctgggattacaggtcctgagggagtctaacaagttagcagaaatggaagaaccacccttgcttccaggagaaaatattaaagacatggccaaagatgtaacttatatatgtccattcactggcgctgtacgaggaactctgactgtcacgaattataggttatatttcaaaagcatggaacgggatcccccatttgttttagatgcttcccttggtgtgataaatagagtagaaaaaattggtggtgcttctagtcgaggtgaaaattcttatggactagaaactgtgtgtaaggatattaggaatttacgatttgctcataaacctgaggggcggacaagaagatccatatttgagaatctaatgaaatatgcatttcctgtctctaataacctgcctctttttgcttttgaatacaaagaagtattccctgaaaatgggtggaagctatatgaccctcttttagagtatagaaggcagggaattccaaatgaaagctggagaataacaaagataaatgaacgatatgaactttgtgatacataccctgccctcctggttgtgccagcaaatattcctgatgaagaattaaagagagtggcatccttcagatcaagaggccgtatcccagttttatcatggattcatcctgaaagtcaagccacaatcactcggtgtagccagcccatggttggagtgagtggaaagcgaagcaaagaagatgaaaaataccttcaagctatcatggattccaatgcccagtctcacaaaatctttatatttgatgcccggccaagtgttaatgctgttgccaacaaggcaaagggtggaggttatgaaagtgaagatgcctatcaaaatgctgaactagttttcctggatatccacaatattcatgttatgagagaatcattacgaaaacttaaggagattgtgtaccccaacattgaggaaacccactggttgtctaacttggaatctactcattggctagaacatattaagcttattcttgcaggggctcttaggattgctgacaaggtagagtcagggaagacgtctgtggtagtgcattgcagtgatggttgggatcgcacagctcagctcacttcccttgccatgctcatgttggatggatactatcgaaccatccgaggatttgaagtccttgtggagaaagaatggctaagttttggacatcgatttcaactaagagttggccatggagataagaaccatgcagatgcagacagatcgcctgtttttcttcaatttattgactgtgtctggcagatgacaagacagtttcctaccgcatttgaattcaatgagtattttctcattaccattttggaccacctatacagctgcttattcggaacattcctctgtaatagtgaacaacagagaggaaaagagaatcttcctaaaaggactgtgtcactgtggtcttacataaacagccagctggaagacttcactaatcctctctatgggagctattccaatcatgtcctttatccagtagccagcatgcgccacctagagctctgggtgggatattacataaggtggaatccacggatgaaaccacaggtatgtgccttacaatatacaatgggagttttcattcatgcagtgcaactttgtctccgtaaaagcagctggaaagattatctgtgcatatttaaaactttactccttccttggcaacattctggaacctcttgccatcaaattcgggaagggcctgggctcacattatggaggtggatcctctagagcgagccatgag

SEQ ID NO: 105732 - DNA, 355 bp, Homo sapiens
atcagaatatagaaggcatgctttaatgttcttgggcaaacatgctgtgtatgtgctcaggacattacttacaagaaaatcactttttaaaaagaaccttttctttttacggaatattgaagaaaaattgaattggcagcaagagtgaaacagtttaaggcaagtggtttagatcttattgtaatgactatggtcagtagaaatgcagcctctcctaaatcttctagaggcatttgtttactaggatatatgaaaagatagatgacttgaagtttccaggttgttttcactttagagtatatactctaaagtgtatatactctttatatgtttgttcatctgcatctttaatttt

SEQ ID NO: 105733 - DNA, 846 bp, Homo sapiens
gcaaggttccagacatgtgagggatgtggctaaggttgacctggaaaaaggaatgctgggagcctgggaggtggaaggacactggaggagctggcggtggacagagcggggccgcccccatgcctccaagacccgctttcacgtctgcaaaatgagatggaaagccatgcctcccagggcttctggtggctggcaggtgacagagagggcaccgcgggcctccagttcttcccgagtcccccagggccttgcctgggcccatcagcagcagcaggccttccgcaaagacttgctgaattaacaaatgcctgagggagggagaggggaactcacactagttgtggtcatggtagatttctgtcctgaagaatggggaattacagcgttgctgggctccctgtgatggggcagcaggactgaggcctgcgcgagtgagtatagacgctgtggtctgtgtgcagcccacttgccttcagagctctgccacggcaggccccctttagctcctctgttgctttacaataaactcgctgggtgtggtggctcacgcctataatcctagcactttgggaggctgaggcaggtggatcacctgaggtcaggagtttgagaccagcctggccaacatggtgaaatcccgtctctactaaaaatacaaaagttagccgggcgtggtggcacctgcctctaatcccagctactcaggagactgaggcaggagaatcacttgaacccaggaggcagaggttgcagtgagcagagattgcaccactgcactccaaactgggtgacagagagagtctgtctcaaaacaaaacaaaaaattaaacattaaaaaaggcaggc

SEQ ID NO: 105734 - DNA, 249 bp, Homo sapiens
tctgtgggaagctttaagccactactgacacctataacacacacctggtagaaaatgctgtgcaggggtagacaaagaactacaagtgtccctgtacagaagagcatgaaaagtcttaagaacctgagcctggtcaggcatggtggctcatgcctgtaatcccaacactttgggagaccgaagtgggtagaccacttgagcccaggagttcaagaccagcctgagcaacatagtgatacctcatctctt

SEQ ID NO: 105735 - DNA, 326 bp, Homo sapiens
cacaccactgaattataatagtgtctttgggaataaatagctttgaggaccttagaagaaaaacagtactttgttgcagaaaatgatagctttgttataataggggagttatatatctctctctctttcagtccttgaaaaacctcctcacagtttctagtctagcataaaaacaaagcactatttaaaaatatgttcagtatacgcttctataagcctactaatttatgacctcatgctgtcttctgattaacaaagcaaaacaatgccaaggacttattacctctgtaaattccatgttttttgagatcctctttctgtaattt

SEQ ID NO: 105736 - DNA, 334 bp, Homo sapiens
tttagggagcttgctttttgagatggtactgacaggccagagaggagggcagaggggctgcaagctcccacatgggctgatgtgtgctcccaggagggagctgaaaccctggggccttgtgagccgccagcagaaaaatcggcttggaaggctgggcgtggtggttcacctgtgtaaccccagaaaaatcggctttgggaggccgaggcagtcggatcacttcaggtcgggaattcgagaccagcctggccaacatggtgaaaccccgtctctactaaaaatgcaaaaaaaaattagccaggcgtggtggctggtgcccgtaatccagctactc

SEQ ID NO: 105737 - DNA, 238 bp, Homo sapiens
tctttgcttggttcccatagcattgtgtgcatatcaaatctaacataatttaggtctgtttccctgccactaaattgtgagccctctgcaagtaaatactgaattacttatctctgaatcttgaatatatgctagaataattatttcatgacaaaagattttggaatgaatgatcaagaagaaaaaaggcaaaaaaacccactcagaaataataaagaatcattagtgatgcactaat

SEQ ID NO: 105738 - DNA, 333 bp, Homo sapiens
ctaccaggactgcttggcaaatactgaccgacagccatccaaacccctgcccgcgaagtgaagcttttttcctttttgaaaaaaagagtccaaacctaaaactatttccagttaacggaactgcaacatatgaggcagaggagaattattccaggaaaatggatttttcacttttaaatatacatcaatgcattttttgttttttgtttttgtttttgggttttttgtttttttttttggagagggagtctcacttttgtggcccagcttggggggcaatggtccaatttgggttaactgcaacctcggttaccgggactcgcttttggggac

SEQ ID NO: 105739 - DNA, 753 bp, Homo sapiens
ggcgctttgaaagggcattgggacagcatcacagaatgtcagtgtcccacatttgcgaggagtcccgggccccagttcttacactgcagtttgcatgaggatgggccaccgccacttccgcctggggttgtctggtgatgcccccaggagagacgcgcccactgaaaagccagcgtggtgtcctcttacacggtccttaacaaactctgggactctgggggtgcaggaaataccacaggaccgtcattactcccataccggctgagtcacaactgtattgcaggaggcttcttggaacgcctatgtaactttaatggaagtgaccaggtacagatcttctacagcaaggaaggaatcttagtgctagaattcagttgagcctttgagttggctcttcttataagtgagcaaacaagtaacaaggtttagggggcgcccatttttgtgttagcacgattgccctcgtgtttaatatttcccaagccctattatgataaggagttggacttaatgaagaaccatgttgtcaaacatcttatgcccatcttgaagttgtgaaggaggatgagcaccaagaaaaggaaataaataaaatccaatacgggccgggtgcggtagctcacgcctgtaatcttagcagtttgggaggccaaggcaggcagaactcttgagcccagaaattcaagaccagcctaggcagcatagtgagaccccgtctctacaaaaaatataattagctgggcgtggtggcaa

SEQ ID NO: 105740 - DNA, 406 bp, Homo sapiens
agaatgccattatacttattcactgaaaactattaaaaatgataataaaagttatgtggccagtttaacaacaacaattaagaatcagctttacaatataagtggtgactagttaaaaatattataatacgaggagtccatatctaaaagcaacaaaaatatttttggaaacttaaaaaaagaacatgaagaaaattttggaacccttaccagcctggccaacatgataaagccccgtctctactaaaaatacaaaaattagtcatgtgtggtggcaggggcctgtatcccagccacttgggaggctgagaaaggagaatcttgaacctgggaggcagaggctgcaatgagctgagattacaccaccacattccagcctgggcggcagagtaaaactcttgtctca

SEQ ID NO: 105741 - DNA, 326 bp, Homo sapiens
gtatttgaagcatttcttattaatgaaatgagaaaatgcattcttaaaacactagacagtactttcaataaatgggttatgtctatatctaaaaaaatcctgtttaataaaaaaattagtttgtggcatgatatgcttattgtgatattaacataaatctagaaatactgtagaatttccatgaattcgtgtacatgtgtatacaaacataaagaacttgaagaatctgaatctaatcttttatacctcagaaaagatgaataaaatgtaacattattttgttaataattattatattctgctaaagtcaagtctgttgtgccagg

SEQ ID NO: 105742 - DNA, 725 bp, Homo sapiens
tctactaaaaatacaaaattagccgggtgtggtggcacatgcctgtaatcccagctactcaggaggccggggcaggagaatcacttgaacctgagaggaggaggttgcagtaagccgagatcgtgcctctggactccagcctgggcaacagagcaagactctttctcaaaaataaataaataaataacgacaaaaaataaagacagtatctggcatattgtaggtgtccagtgaatatttgttgaatgaaaaaagaatgattaagacagtatattaagagggatcacttattgcaatttcctctgaccatgccagtgtagattctgtccctacttgtaattaattattcttacatctgtattcctatgcttctttgtgaatagtcatactgccatttgctactatatttatttaatcacaataatttatgcctatacttccctgcttgaaaaatgtttgcttgtgtctctacggaaatgttaagtaacattattcagcacatgcaacatgaaaggtgctggtctaagtgtgctctgtatgggttaactcttttcatgctgtcaacaattattaagatagatactaatgctatattatctagattctctatataggaatactggagcgtagagtgatttgtttgaatttgtacagctagtaagtggtcgagctttgattcaaaccctggcagtcagctgggtacttgcattcttaagcaacaggct

SEQ ID NO: 105743 - DNA, 242 bp, Homo sapiens
aacaaacccagagccagactttgtctcacacaataaaaagaatagccaatgtattaagaaattaagccttaggccaagcgcagtggcttacacctgtaatcccagcactttgagaggccaaggtgggtggatcacctgaggacaggagttcaagaccagcctgatgaagtcccgtctctactaaaaatacaaaaattagctgggtgtggtggtgggtgcctgtaatcccagctactcaggag

SEQ ID NO: 105744 - DNA, 773 bp, Homo sapiens
aaaatcacctcttcaatcagagtaccaattctgaaatttacccaggagctgacttcttaggaaagggctttctggaatcccggaatgaaaaggttgatgttcgtgagaataaacatgcaaggggaagagacaggagatcatattactgggtgactaacactaggtatgaaaattggtattgaagcattaatatcttaaactaaagtttaactgctttttttgctccccttgttttgttgaattgtttctatttagtttttttcccacctcatcgttcatctggccttttttctttttctttttttttcccaagagacagagttgcccaggctagaatgtaatggctaggtactgtcatagctcatggcagcgcccggttgctgggctccagcaatccccctgcctcagctactcgagtggctgggactacaggcatgtgccactgtgcctggccatcctgccatttataggagtcctttttcttttgtagaaatttcattgctattgactaacagggacaaacccattttttttcttttcttggagacagagtcttggtctgttgcccacgctggagtgcagtggcacgatcttgcctcactgcaatctccgcctcccaggttcaagcaattctcctgcctcagcctcccaagtagttggaactacaggcgtacaccgccatgcccggataattttttatattttagtagagatggggtttcaccatgttgcccaggctggtctggaactcctgaggtcaggcaatatgcccg

SEQ ID NO: 105745 - DNA, 237 bp, Homo sapiens
aacttccactcaagaacaacaatataatactcaatccccacaggatttactgcctcctgcaatgaggacgtgctaaacctctctccaaaaatgagactcacaaagccccatcggtcagtaacatcactctggataacggtggattctcttctcattcctcctctagctctagagatcacacccacacctcaatctactataatattcagatgaaaacataaatttgaccatcactag

SEQ ID NO: 105746 - DNA, 383 bp, Homo sapiens
cgtcccacgtacttcagcccctataaacatgcagaagccctccaatgatgcttgggaatagaaccatacagaggcatttcaataatgtaatcccactaagttatttaaatgccctgtcaactcccagcactccctgatgtcacctccctcaatcctccctcatgcactgtgacaacaccatggaagcctctccactcagccttcctgcagtcactttctcttgctcccttctccatcttaaatgttctaagaactctactctcagttttatatactccattctccctggatggcctcctccagtaccatagcttcagccatcagctatatttgggtaatgatcacatctccaacaccatctccatgtctccagcatcatctcc

SEQ ID NO: 105747 - DNA, 118 bp, Homo sapiens
gtcctatttgaaaactttatctccaaatagagtatttaaaactaatagttgcatttaggatctgctacaacttcctaagatttcttaaaacccacaaacctgctctgctggcttattt

SEQ ID NO: 105748 - DNA, 162 bp, Homo sapiens
ccacgttggcagaatggtcttgatctcctgacctcatgatccacccacctcggctcccaaagtgcagaaggaaggaactttttttttaaaaaaatgaaccttctgtgttcctgagttggataatttcaaacatatccacaagtagagcatgaaccagcagac

SEQ ID NO: 105749 - DNA, 880 bp, Homo sapiens
gaggtaaactgaggcagggaggggccctcccagagctggtaggtgaagattgtggcagggtggtgagtgggacccaatggtggaaggctgagtgcaggctggaggcagtgagcggtctgggtccccttcctgattcgagtttcattttggtaacgatgaaaggatgcctgtggtcctggccacctcccctgctctgcccctgggcccctgtgttctgggtgggccagccccctcccttccaggggcagcagctttgatcagagcctggagggggcggggcaggaggtaagggtttttgcacgctcacgtctgctgacactgacagctttgtcgcacggtggatcttgcttttccatttgggccagttaaccttgtgggggagaatgggggtggtgggacccttttcctcccagaaaaggtcagaggatgcagggggtgactggaaaatctgaagtgtctgctaggccaggtcaacgctgcctgtcccgcatgttaaagaattcaaaagattttttaaaatttgaaataaacattttagagtaggatacaaaatgcgcttgcatttctgggatcaaatactggacttcagaggcatctgtgccccggctggggcagaaggctgcaccttcctgctgctctgggactactgcccccaggtcccagctgcttatctgaaagatttcccgggtgctgctgggccttgtccaaggcctctgagcaggggaataatgcagcggacagggacgatcattccacggagtccctactgtgtgctgccctgggctacgagggggtaagacagaggacagtccctgccctgtgaagctgacacattctaagggagaggcagatgctaaagaattacacatatggctgggcc

SEQ ID NO: 105750 - DNA, 437 bp, Homo sapiens
gggtcacggacatgggctgtagcttgtaacatcgctcgtgctacagaaacaatggtcatgttttctgggactgcatcttaccttcttcactagctagggctctccctgggccaggcatccacctggatgagacatctttttaatccagtgtctcctagctcagtgccgtgaccacagccggtactgcatgaaagtttcagaatgaacgcaaacctctgttcaagagacttggaaccattttgttccaagattttccgaacgtgctttcaccacccagggtacgtgtgtcattgcagccctatgagcaggatgtggggggcaccttcatggatcaacagtgaacgtgcccccagtgctccatagatgatggagagcctggctgggaaagctcaagggacttgcccagggaggcagcgatgggccagtctctgttgcat

SEQ ID NO: 105751 - DNA, 792 bp, Homo sapiens
tgcctttctcctcccaccatgattgtgagaccttccccagccacgtggaacttctccagcctcccgagtagctgggattacaggtgcacgccaccaggcctggggaatttttctatattctgtagagacggggtttcgccacgttgcccaagctggtctggaaatcctgagctcaagcaatccgcccacctcggcctcccaaagtgctgggattacaggcgtgagccaccgcgcccggccgaattatttaagaagcgaatttcttagtctatgaaaatgacgttcaacggcaaatggcaaaatgaagttctgacttttccacctgtaaagtagattgatatgagcgggagtgagaagaccttgtcgctatcagtataagacaagagaactgagggcagccagttgtggccacagcaactctctgagtgaattgctgccacactgggcacagaagcgcacactctgaaatcgaatgtttggattcctttctacataattctactaaagagttattccacagcctaggggctgccttagagccccgtttgagacactctgggctcacagatcatgaagtcagtgcgcaaacgcgggcagaccctgaaccaggtgcccaacgcccagccctcacttccagagctcaggactctcgcaagagcgactccagccccggcctgccgctgtctacattcgcgctcttccttcctcgggaaacaaacggtggatcagatctccaaggctctgagtttcccagagtttggccgtgcgccagcgcagcgcagcccctcccag

SEQ ID NO: 105752 - DNA, 208 bp, Homo sapiens
agcaaggttgtactggaagaggccgagtctccatgcttgccacttcagagatccacgagccggcctgtcagagaaccctcgtctgctccaatgcagtccctcttcctcatcggggaatgtctggggaccgcatttgtatgcaggtgcacacacaggtggctcagagtgctgatgcaggggtgtgctgacgtgtacaagtcaaggatgg

SEQ ID NO: 105753 - DNA, 440 bp, Homo sapiens
aaaaattacttcaaaatatcagcagtaaaataatagacattgaaatgtaactcagtaacaattttagactgtatatttgaacagtagttcactcagaaagaagcacataggtagaaaaatgtgaaagattagttagttgagaaacatacagtttagagtccgggcatggaggctcacgcctgtaatcccagcactttgggaggccggggcgggtggatcacctgaggtcaggagtttgacaccagcctggccaaaatggtgaaaccctatctctactagaacttacaaaaattggctgggcgtggtggtgggtgcctgtagtcccagctactcaggaggctgaggcatgagaatcacttgaacccaggaggcagaagttgcagtgagccgagattgcaccactgcactccagcctgggcgacagagcaaggctctgttac

SEQ ID NO: 105754 - DNA, 260 bp, Homo sapiens
tgtagaaatgcccaaatctctgagaatacctcccatggtccctcagactccaatttggaatcactaaatctattccctggtgtgcagggcaggtgcaagaggaaaggtgggggtggggggcaaagaaggtgcagtgctaccaaaaagttaacaagaggaaaaagtcaaaagaccagacatcacaacagggaggtgagaggagaggggaccacggaaacaaggaagtgaaaagagctggaacctacgacagttaagaattt

SEQ ID NO: 105755 - DNA, 488 bp, Homo sapiens
gtgaggacagggctgctttgctctatcctccctgcaacttcagtgctgggcacaggactggctcttaatggatactgaatgaaccctgttatggactgaatgttcgcattctcccccacccccaaatgtatttgctgaagccctaatctccaatgtgatggtatcaggaggtggagccctcgaggggtaattagatttaggtgaggttgcgagggtggggccctcatgagtgcttttataagtagagaaagaagtaccagcgcttcctccctcatgcgaggatacggcaagaatgcatgtccataaggaagaaggcatgcaccagacatcaaatctgctggcgccttgatcttggtcttccagcctctagacctgtgagaaatgaatatctgttgttgaagcctcccagcctatgatggatttgttacagctggccaagctgacttagacaaatgagtgtgcctgatccatcccattgaatgtgacag

SEQ ID NO: 105756 - DNA, 768 bp, Homo sapiens
gccctcgcccattctaaaaagtcagcaccctcaggcccgcgggtaaccacctcctcctgagcacggtgaccaggtcaaaggctgtccctcgggcctcagtgttctcatctgtatgtcgagcactgcacagaatcagctcatgcgctgaggctttcactcctgtgatggaagagacagagaagggggtggcctctcctctccctggggacctgccattctcagcacaggcgcatggcaggcagcagcctcccttctgccagcagaggggcttaatgcaccctgctccatttgtaattcatgtgcggtgagctcactgggatgagtcagtttggatatatattcctccctgggtctgccccattttatggggtgttgcttaatcatttgcgttattccattgacatgaaatatttagcactcagagatcatttctggtcaggagaaatttgtgcatttttaacccaaaatagaaaccttcataaaagcatcataggtctccattcagtattgactataattgttcacatgcccacgctgaatgctaacttgggctcaccatcaacacccacgaggtgggtactattattatcactcacatttgaccagagggattgtttgattagggtgtagtagttgagagttcagacccaggagacagcctgcctgcttcaaatcctggcccaacccctggccctgtgtgaccttgggcaagtgactgcatctctctgtgctgttgttttcttattaataaaatggttgatataatga

SEQ ID NO: 105757 - DNA, 405 bp, Homo sapiens
ctgtatgacgctctaacagtgaagacatgccattctacatttgtgcaaactcacaggatgcacaacaccaagggtgagccctaatgtcaactcgggagtctgggagataatgtgtcaatgtaggttcatcgactttagcaaatgtaccaatctggtttgggatgtttatgatgatgggagataggggtggggcagggaatggccaagggttatatgggaaacctctatgctcaattctgctgtgaacataaaacggttctcaaataaaaagtttattaattttttaaaggatttttacacaactaagccttgataaacatttaccttctttcttcttcatcataattatttttccgcattattttgctattttccttctctccttctctctctctctttctttta

SEQ ID NO: 105758 - DNA, 461 bp, Homo sapiens
atgggacaattccagtcagtataaatcagctaagcatttagaaactattatcaggagcactagacagcactgcatgatcttctgcaaaccacaagtgatgtcaaagctgcaaggctgccgaactgccagggctgaagcaccaataatagatgctaaaattactgctgaagaagcatatttgattacaaagggcccctagagcagtaaagcacttggaagccttccctccgagttttacaagaaataagataagcagcatctccaactgtaatcacaaaatataataaaaaatgctccaggttctcatgagacatacaagtgtattttccttgaatgatttaaaaccattattttcctaacacacaacgagggacaaagttaccagtaaactgaggcaacctctagttggtaacacagacaactccatgaggagtttttgtttttgtttttcagtatgcttt

SEQ ID NO: 105759 - DNA, 165 bp, Homo sapiens
tgatgttagtgtcggcaaacctactgtgcttccagtcggataaaagcccagcacatacagtatacccagggaagccaaaacattggatacccctggactatactataatttttattgttattttagagcatattccttctgcttatatattaaaaagttacctgt

SEQ ID NO: 105760 - DNA, 218 bp, Homo sapiens
acaacactgtagatttcccactaattataaaatatgatgaagatgttggatggttggagagttaacttggccatggggcatgaatctatcataaataatctccagatgtcttgttcagctgtattttctgataaccaattatactgtaaaaaaaaaaaagagtggtataattaaatactggatatattgcctatcaaaataatattaatgatattggt

SEQ ID NO: 105761 - DNA, 298 bp, Homo sapiens
tggaggggtgtgggagagagacaaggagaggaggagaagaaaaacagacaccagggagagacagagatgggagagagatggagggtcacttgaggtacagggagctcggaccccccaactcttctggattccagggaaatggggatggaggtgccccaggcatgatccccagtccctggaatggctcagagctcactccccgcacctcccagttccacttcaatgtcccactgacaccttaaactcggctggtgtaaagcagagctcaccatcgcccccacacctccaactggctcct

SEQ ID NO: 105762 - DNA, 165 bp, Homo sapiens
cttggaatctccacctcccttccagcagaccatcaaaaggtcaggctcccccacccaacctggcaccccagattctgtcctttccatccatacccctaccatgactttagggtcatgactcgatttcactcttctgctgttttgcttccagggtgcccaatcctg

SEQ ID NO: 105763 - DNA, 676 bp, Homo sapiens
actaaacagagaggcatgggtttagaggaaggtggtgatgggaagatatagctgtcagatatctgggatttttttttctcttcctctctcagccagagaagcgtctccttttctctcccctcactccgaatcctgtaggatagacttgaaggtctattgaacctttactccaggattatccacaggctcacctgcccgcctaccggcaccttttctctacagctaggaaggcaggtctacttctattgctgagaagaagcaagatccagcagaaagaggagtctagcctggcccttttctattcctagctgaaaaacagctttcagtgggcaggtctctcactgtttcactgttacaaataaggctcagatctcaactgctgacacgcaacccaaacaggatgtgcagaccaattcacatggtttgagaccaccacatatttggagaacctgaggaattatgatgcaatccatttatttttctgtcctaaccatcacctttcatgcatgatattactaaacagtctctgaagtactagttcaacttgaatccctcccctggagaagaggtagtaaggggactctccttatggtcttgtctagatcaaccaaaccgattccagagtcactctggcatacagtagtagacgctccatacatatggatggcattatcag

SEQ ID NO: 105764 - DNA, 343 bp, Homo sapiens
tgagatggagtctcactgtgtgtccaggctggagtccagtggcacaatcttggctcactgcaaccaggagaactcaagaggttctcttgcctcagtctcctgagtagctgggactacaggtgcacgccaccacactcagctaatttttgtatttctagtacagatggggtttcaccatgttggctaggatggtctcaatctcttgaccttgtgatctgccggcgttggcctcccaaagtgctgggattacaggcatgagccaccgcgcccggcctaagctaattttgaaatgcagaaccgctttttgtggtttagtaaaattaactagcctttagttttaatt

SEQ ID NO: 105765 - DNA, 336 bp, Homo sapiens
aaatctcaatttgcatcctcatagagtatgtgtacacatgttttgaaaacactatagttggccgggcgcggtggctcacgcctgtaatcccagcactttgggaggccaaggcgggcggatcacaaggtcaggagatcgagaccatcctggctaacatggtgaaaccccatctctactaaatatacaaaaaattagccgggcgtggtggcgggcgcctgtagtcccagccatgggaggctgaggcaggagaatggcgtgaacctgggaggcggagcttgcagtgagccgagatcgcgccactgcactccagcctgggcgacagagtgagactcagtc

SEQ ID NO: 105766 - DNA, 377 bp, Homo sapiens
cgtggggctggccagctctgagggaaagggccctccttcctaattttcctgtcctctttcagctcctgaccagttgcagtcactctagtcaatgacatgaattttagcttttgtgggggactgtaagttgggcttgctattctggccctaatttttgttcacctctggtactgagaggtaaggtgggggtgggtgacattttcaaaggggctgtatccctaaatgagataagaccactcccttgtgggtggagacacccttagcccaaaggcttgagtagttgaagagctgtaaacagtggctaccaggtgccccaggtacccagacgatgagcaaagccccagcctgcggggggatacctcgtagagtcgaccagc

SEQ ID NO: 105767 - DNA, 966 bp, Homo sapiens
caggttcctttcgtaatacattgcgttctcacatacacttgtatctaattattctctgttttgtttcattgacttatcagtctactgttaacacctgtattgcattcttttaactattatgtcttgtacattttaatttattttattttattttttagagacggggtcttgctgtgttggccaggctggtctcaaactcctgacctcaagcaattctcccatctcagcctcccaaaatgctgggattacaggcataagccaccatgcctggcccctgtgcattttaatatgggtgacagcaggggtagggaaagcaatccccctcacccacaagacattagtctttttagtccttttttcggaattttcctggctgttctctttctttttatttatttatttatttttgagacaatctcactctgtcagccaggctagagtgcagtggcacaatctcagcttactgcaacctccgcctcctgggctcaagagatcctcctgcctcaggctcccgagtagctgggactataggcacgtaccaccacacctggctaatttttgtatttttagtacagatgggctttcaccacgttggccaggctggtctcaaactcctgagctcaagtgatctgcccccctcgcctcccaaagtgctgggattgcaggcgtgagccaccgtgcccagcttttctggctgttctcacgtttattcttctcattgagctttagattattttatcaattcctccaaaaggtcttattgagctataatccaatttgactgaatctatggattgatttacatagaaatgatgatttacatgtcagttcttagctttgaaagattttgtctgtacttattgtcatggttttatagtttttctatgtagacactatacatttcttaagttttctccccctgaacaattttgtttgtaattgttattgtgacagggctcttgcgtt

SEQ ID NO: 105768 - DNA, 163 bp, Homo sapiens
acactaggcagatcccatctcaagctcggggtcatcagcactaagtccacattcttgccttgagtccgtctgcttgttgctgtggtgatagacacagctgtgacagcaccgacatgcaatgtgtggaatttaatgtgagaaggctggtgaagcagccttgttg

SEQ ID NO: 105769 - DNA, 315 bp, Homo sapiens
agaaatactgtacaagatggtgactatatgtaataatatattgtaggctgggcgcggtggctcatgcctgtaatcccagcactttgggaggccaagtgctgggattacagggtgagccaccttgcctggccttcacttcacttatttttattttttttgagacagtgtattgctgtcgctcaggctcagtgcagtggtgcaatcatggatcactgtagcctggatctcccaggctcaacccacctcagcctccctaggagctaggactactaggattacaggtgtgcgcttaattttgtgtgcagctaattttgg

SEQ ID NO: 105770 - DNA, 333 bp, Homo sapiens
accagggagaataggccagggaggagagtgaaagaaatgcaggtctttggagtcctcccagactgggtagtggaagtccagctaggagctccagtgtgttgtccaaatccaggaagtaccattcccatagaataacacagtgtgcgtgatgctcagtagctgtactgactggtagtataagaaatcgataatactgcagtataatattataatacctgcccctagtagtaagaataactgttcttctccctgcttcacatatacctttaaaagtcctttgcagtgtcttcattttttttttttttttgcatgcctccactcttttgaagactt

SEQ ID NO: 105771 - DNA, 437 bp, Homo sapiens
aagggtcccctgggctttctttttgcctcattatcacagactgagtgccaaagaagcaggcatcccagaaatgccaatggtcatagaccaaaagattaaaaaaataaaaaaaataaataaaaagctccaagaaaaacctgttctctctaaccaaaagaccagaaaaggggcagcctagcaggacagaaactttagaaaataaccattctactgcagccaaacaccacgtaaaaaacctggggacccacctccacacatcagcaaaggccaagtggagagtctaaacttccgccacaccaggctgtagagagcacccaactcccctgccaaggtggcaacagagaacaaataggggaccaggactttcactcccaccaggaggtaacagagcctcctctacacagtgttattgggagctatgtggggaaccctgactt

SEQ ID NO: 105772 - DNA, 349 bp, Homo sapiens
cggccatgggggatggagccatcgactttggggtgaggcagggaaagggctcccagatggggtacctggattaggtccattcaagccgcgggtgaacgtgggcccgctccacccaagccgtggctgtgaggaggctggagagaggtgagggctcctgtcccctccctgcatggacacccttgggaagtggggcagctggggtcccagcctgggtctggaggggtcccacccacagcacaaataggctcgcaggccacccggacgccacgggctgcgtggaggagaactggagtgcatggaccctgctctcctccccggctgccaggagtgtccactgctttctaagtca

SEQ ID NO: 105773 - DNA, 254 bp, Homo sapiens
gcgtcatcgcgtcagccacgttttcagagcgtgcgttttccgcggggtgggagctgccgtctgaccataggtttcttgcggccctagattcttcggcgccttaaacctggggttccggaagctgtagcccccgtttcaaaatccgccggaagcgcctgacccccagaagtcgcgctctgccctgacctgccggagagcgggggccgcgcggagtttccgcgggacttcctgctgtggaggttaaagcacggttt

SEQ ID NO: 105774 - DNA, 299 bp, Homo sapiens
actcacgtcaaggaaatagctctccctttctaaaagagggtgatgcgggtttaagcaacaggtgagcagacactctgtcgcaggtaaggacgagtacctccaccttaaccaagacctgcccaaatgggcttcgggtggtgcccttcagccaatttctgtacaaagccttgtcataaatggctttggtgtagaggtagggaaacattttcttgttaccctcagcgtgtggaatgggagatggagaggcagaaatcaaatatgctgtctttagagctctttaagaacaggaaatgtgaaat

SEQ ID NO: 105775 - DNA, 500 bp, Homo sapiens
ttttaagcacaggcttaaaacctgagaagcactgtaaaaagtaacaaatatgtctgtgataatatttaataagcagatgttataaaaattaccataacattatataaaattatagtttactaaacaatgaaataacattaaattttgaaaaattaattcaaagtgaggtaaaagaaaaaatacacacattccctctcctctatcatttcagttatgtgcaaataaatctactaaccaactattaaaaagatcttggctcctttttctcagcctgcttaaaaatagtaacctgttttcagtaattcaggatagtggtcctggaaatggatgcctaatctgaatttaaaatttcaaaataatgtgcttttaaaaaagtaatagtaggctgggcgcggtgctcatgcctgtaatcccagcactttgggaggctgaggcgggcggatcacgaggtcaggagatcaaggtcatcctggctaacacggtgaaaccccgtctctact

SEQ ID NO: 105776 - DNA, 437 bp, Homo sapiens
tttatttctagttgatttaggctatcatttaaaaaataaaacaggaagatgtcaaaattgatggtatgatttttcttatatcaatttctgtatgagttaagagtttaggttacctaattttgagacattcttgcgttcctgggatgaaaccctagtagatcatgatatgtcattctttattccattattaaatttattagctgatatttgatttaggacgtgtgtgtgtgtgcgtgtgcgcctgtgtgtgtgtgtgtgtgtattcggacagctatataaaattatttttagagacagggtttcacactgctggccaggctggagtgcaatgacaagatattagttctctgcagcctcgaactcctgggctcaagctctcctcccacttcagcctcctgagtagctaggaccataggcacatgccagtgtgccagcta

SEQ ID NO: 105777 - DNA, 408 bp, Homo sapiens
tttatttctagttgatttaggctatcatttaaaaaataaaacaggaagatgtcaaaattgatggtatgatttttcttatatcaatttctgtatgagttaagagtttaggttacctaattttgagacattcttgcgttcctgggatgaaaccctagtagatcatgatatgtcattctttattccattattaaatttattagctgatatttgatttaggacgtgtgtgtgtgtgcgtgtgcgcctgtgtgtgtgtgtgtgtgtattcggacagctatataaaattatttttagagacagggtttcacactgctggccaggctggagtgcaatgacaagatattagttctctgcagcccaggagtttgaggccaacctgggcaacatagggagaaccccatctctacaagg

SEQ ID NO: 105778 - DNA, 328 bp, Homo sapiens
cttcttcacaattaattgtaagacatttcttcccttattgaagggaaatcatcgtgtttaaagagcatttatgttgagttaagaaggtgacatttctttgacgtttgtatgcacataaaggtaacttgtagagagatctaagaacacagggagtgcaaatttataaaaaaaaaaacctttcacatgaaaagctacttgatatgtatcaaatatactcttggacttcataaggttattcattttagaacttgggttttctttctttctttttaatctcttaagattactggctacagtattatcttgcccagattcataacattctgtt

SEQ ID NO: 105779 - DNA, 243 bp, Homo sapiens
ttttataatcatgtgaatgttgtgctataattttttctattaggtgtaaaagtatttctcttctcatcttaatggaaagggggaaaagacaaaaacagtcttttggaaaacaccttaagtcttagtatctgagctttgtcttgtgttctgaatttagctttaccacaaactagaagtgtaattatgggcaagttaacctttcctagtgtaccaaatggtaccatttccccgccaataaataag

SEQ ID NO: 105780 - DNA, 775 bp, Homo sapiens
  misc_feature (40)..(40): n is a, c, g, or t
gaggtcactctagagcgatccctagctggtcgcagtccangacttgcggtgggctctgaagtgctagaacaggtgctacataccctaagcaagtcggggagcctcgaagagctggtgctggacaacgccgggcttaagacggactttgtccagaagctggccggggtgtttggggagaacgggagctgtgtgctgcatgccctcactctgtcccacaaccccatcgaggacaagggttttctcagtctgagccagcagctcctctgcttcccctctggcctcaccaaactgtgcctggccaagactgccatttcccctcgagggctccaggcactcggccagaccttcggggcaaacccagcatttgccagctcccttcgatacctggacctgagcaagaatcctgggctcctcgccacggatgaggccaatgccctctacagtttcctggcccaacccaacgccctggtgcacctggacctgtcaggaactgactgcgtcatcgacttgcttctcggtgccctgctccacggctgctgctcccacctcacctacctcaacctggctcgcaacagctgctcccacaggaagggtcgagaggccccgccggccttcaagcagttcttcagcagcgcctacacactgagccacgtcaatctgtcggccacaaagctgcccctggaggccctcagggcgctgcttcagggcctctccctcaacagtcacctcagtgacctgcacctggatctcagcagctgcgaggtgagccctcagt

SEQ ID NO: 105781 - DNA, 229 bp, Homo sapiens
cccgctctctgcccgccgatcggtaacccaaccgtcctgggcctgcggtccccacgcggcttccttccctcttcccgcttggcggtggagtctggccccagaagagggagctgaaaagggcagggcctccttattccagccccgcgatgactcatgccccgtatccattcccgctcccctcatttttacgtccgcaaactccccccacactcctgccacagagtttctg

SEQ ID NO: 105782 - DNA, 780 bp, Homo sapiens
caattattatcgcttatataagcactcctataaattctgaaaaattttatacatgcaacaaaacattcctacatttgaagacattaagaaaaatcacaggtgactcatctgatcattctatatattaataaatattatgacatatatgtgaacacatcacaaatcatattggtgtaccaagaggcaatttatgcctctcttaagtatgtactgacataacctaatatactaaaatgggaaggggcttttagtcactgaaatatgcatcgtgtaacaaagatgaagaaaatacatggcttgtgcccatcataaaaaaagattcagactgaaggcttagctttggttttttcaattaaattgttaaactgtgcacagtgatttttttttagaacttgagacatttgtgatgttggctgtttaaatctttgttaccttcgctgtgaattgaaattgtacatatttagtaaatcatgcagacaaaacaaactttttagacaatatttttattggagagttttcttttcctgtatccatgttaaaaaaaaaaaagacctcctttcccaaaataaaaatgtcaatactaaatttaaagaagtataaaggaatgattgcttcctttagagcaaaatatttaaataaacatggagataattggcaacatgttctttttgggctagtaggctgtgtccaattttttgggtctgatgtttcagagggcctctgtttcagggttgaagatgatatattaatctcggaattaaacaaatgctattaaataac

SEQ ID NO: 105783 - DNA, 744 bp, Homo sapiens
atttcattttagattttctatttttgaaaactattattattttcacaggccagcaaggtggcttatgcctataatcccagcaacctgagaggcaaggcaggaggatcgtttcaggccaggagttcaagaccagcctgggcgatgtagcaagaccctgtctcaacaaaaaaaaaaacgttataaacttggccaggcatggtggcatgcagctgtagtcccagctactcaggaggctgaggcaggaggatcacttgagcccaggagtttgaggttgcagtgaaccatgatcataccattgtactccattctgggcaacaaagaaagaccctgtctcgaaagagaaaaagaggaggctgaggcacaagatttgcttgaacccgggaggcagaggttgcagtgagccgagatcatgtcactgcactccagcctgggtgacagagcgagactttgtctcaaaaaaaaaaaaaaaaaagtcaagggggccaggtgcagtggctcatgcctgtaatcccaacactttgggaggccaaggcaggaggatctcttgaggtcaagtgttcgagaccagcctggccaacatgatgaaacccgactctactaaaaaaatacaaaagttagccaggtgtcatggtgtgctcctgtagtcccagctactcgggaagctgaggcacgagaatcgcttgaaccccggaggtggaggctacagggagctgagatcacaccagtgcactccagcctgggcaa

SEQ ID NO: 105784 - DNA, 669 bp, Homo sapiens
cacctgaggtcaggagttcgagaccagcctggccaacatggtcaaatcccgtctcttctaaaaatacaaaaattagccggtgtgatgtacatgcctgtagtcccaggtactgcagtggctgagggaggagaatcgcttgaacctgaaaggcggaggttgcagtgagccaagatggcaccactgcactccagcctggcgacagggcaagattccatctcaaaaaaaaaagtgatttattttatttcttaatttttaaacatataatatgccttctaggtagttttgtgatttggaaaaccacaaaagaaaactgaaatgtttgatgccttccacaattttttagaaaaagaattctgcttcaaatagtgaaatacatttgtaagtgaatcagactctgggtagttttcattaatataaagtcagtttcctcccagctccactcacagatggtaggctcatatgaatctttctacaggcatcagatagtatgctagatgatggtgaaatggagatggaaaggctcatcccagctctcaagaactgactgtctattgaacaaagaggtaaacagatgattacagtatgtgaagataaatgcaccacggtgggtatgtgtattgggcaatgggaactcatagaagtgttaaatcaagtttagcctaaagctgc

SEQ ID NO: 105785 - DNA, 188 bp, Homo sapiens
tccgttgcctcaaagtttagaagtctgtcatttttcaaagatgtactacaattctgttttatgctggattttgctatggtttggtatttttatacgttgcacagtcctcctagagttaatatgaaatacgatgtcgagtgagttagtgtaatgctaagggccatgagctcttgacccagattgcctgg

SEQ ID NO: 105786 - DNA, 345 bp, Homo sapiens
cacatttatggacacttaatgttcctgcacacccataaataaggtgaagccgagtctgcatgtgtgcgaaagggcacagagctttgcacatacatggtgccagggtccatttcctggttttgtactatggttacgtaagatgtcaccactgggggaaactgtgaagatacatgtgatgttttttgctctgtgtgatttttgcaacttcctctgaatctgtaatgatttcaaaataaaggttgttttttttttttttttttttttttttttttttttttttttttttttttttttttttttttttttttttttgggtttttttttaagtgtttttttttttttttt

SEQ ID NO: 105787 - DNA, 208 bp, Homo sapiens
agctttcgcctacccactgtccacgagtcctggacttggtgtcacgggttccaagctgctgagactggcctctctgttgggtgagctgaggatctctgcgtccgttcgtgcttccccttctgtctccccaacccctgcgctcaccccgtaaccctcctgctgacacaccatgggagcacagtcaacatttgctgggtgaataagtcga

SEQ ID NO: 105788 - DNA, 680 bp, Homo sapiens
ctagcacccctgatgggccgtctctgcctcccccagttttgctccaccctaccctgctgtggcttgctattctgtcctcaggtcccctgaggtggaggcccagtttgtggagtcagcaatccttatctcctatacagagctgttgggctttttctttggtgagggggagggaagctccaaaggggagtgctcagggattgtgttggttactacgctgaacttggaccagcctggcccggaagttcccagaagtgtgggctgaagggggcctgcacggtcagctcaactccctttttgaaggtagctgggctactttacctaccagtttagtaggtaaagagagtttaggcctttaactttcccagagccacatagcaagttagttgcagaattggtacctattccagagactttgtagtcttctggagtcccagagctctgcctcctcagtgggcttttggccatctgagaaggaaggttcaattatagtttttggttcccggatacctgagggctggtactaagtctggatcttaatgggaaggggagaactgggcgcctcctatccctgtccagtgagagcatggctctgatttgggtaaactgtaaacaagaccagtgctgagagccacctccactctcagattaacaaaataaattaataagtagagcatccttcc

SEQ ID NO: 105789 - DNA, 216 bp, Homo sapiens
ttggatctagaaatggcttaagagtccaatggactttcatctactcacacgcagctctatctctggtcatgacctcatcagtacaagtcattttgcgaaatgatttgggaagttgattgtcttctccattaaaaaatacacatacacacacagatccatatctataatcttttatggtttaatagtgatgagtgttgctggtaactctcttgagca

SEQ ID NO: 105790 - DNA, 844 bp, Homo sapiens
  misc_feature (752)..(753): n is a, c, g, or t
  misc_feature (769)..(769): n is a, c, g, or t
  misc_feature (779)..(779): n is a, c, g, or t
  misc_feature (790)..(790): n is a, c, g, or t
tcaccctcgatggtgccctcgacctgtcctccctcagcaggcctgtggcatccagaccagttcgtggcccctaggaggggaaactgagtcccagccccagggtcctccctcggcttcactgggtgccccatggaggagacagccagggtgtgtcacctgacaggctcaccagaaccagcacagcagctgctgagttttggctcccggaccctggagcccctgctgccgaggctggggatggcggctccagaggtcattcctcccccggaagacacacgctggccttgggccaggggaccctcagcgacggggtcaccccaatgttctggaggctgcggttctgcttcctcctggggctgagctgagcaagctctagctctcgggccgagcgcaaggagggcaggagtgatgtctccaactgtgctgaggtctgccctgggtgcaagggccctgtgttttcagcgctgccgtgtggcccatggatgccccaggcccctggacagttgatgcctggggtccacactcctggacagggctctggacagttgatgcctggggtccacactcctggacagggctctggacagttgatgcctggggtccacactcctcgacagggctctggacagttgatgcctggggtccacactcctggacagggctctggacagttgatgcctggggttcacactcctggacaggcccctggacagttgatgcctggggtccacactcctggaccgggctctggnncagttgatgcctgggngcaactctgnaaggccccggnacgtgatccgggggtccagtcctggcaggccctggcaagtgtcctggggtccca

SEQ ID NO: 105791 - DNA, 356 bp, Homo sapiens
atccaaacttgtaaccactgtaaaacaaatcagaatttacgatagtggatattattaatagtgcagaatggatacccagatcttgcttcctttctagctaatgatgcaatgttggcctgaaatgcattacttatagccagggattttctcagcatcctgatgatatagcctcatttcgtgctaactctccacttctgcacatcttcccctaagtcctttactcatctttagaaagagctacttttggtgaaattttaaaaccaaggaatatcattctttatagaatcacacttctgtgttttccccttccccatttctgtctcgaaagcgacagactgctacataacctgtgaata

SEQ ID NO: 105792 - DNA, 357 bp, Homo sapiens
tgtgctgagtgtagggaagttaggaaggttcaagtcaagcagggctgtgtgggaacaaaatttagggttgaggacgagctgcaagactagaagattctggagacatgagcagccccacatgccaacacagctgtaggcagagtaaggctgggtactcagaaaggctataccagcagggtttgtcaaaaggttaagtaggaccagatagtcttagaaacccagatgaaaccttcttccaagggaaaattcttcagcggttatttatttatttccaggttgttttccacctttccaatggtgccaagttgcaacaaagtgaaaactagacctaaaaaaataattctcccattctaaact

SEQ ID NO: 105793 - DNA, 760 bp, Homo sapiens
atgaaacagtatcattttgggtgttacttataacacaaaagagagatgaaaaatctggaactgggatcacatggtcaaaggtgcagggttaatttcacagtacttgctgctaaattgtttctcccaaggactgcccctctgggggtttcccttttggaagggaacccatttcagcactccccactgcgctgagatctgtctgctctaaacaggcatcaaaaccagcaaccacagacagacgtggaagggatgttggccttagaaagccagcatgtggctgccatcctaacagcgactgaatctggggagaaccatcaaagcatgattttctaaaaccacaagtgacaatgttatagggacaggatatctacatgatctccaaatgcctcccctggatgacttattcagcacaaaggagaaagtgaagacacctggtagatgccaccctagtcaaatccccacagctcgcatcgccaggggacaaagcaagatcgcacacttcctggtgagatgcgtgccaaagactcgacatcacttcaataacacatcacctgaactcagttctgaggaaacagacaaacccaagctgaaggacattcgcaaaactactggcccttactcttcaaagacatcaatgttgtgaaagacaaagacaggaactgtttcaggtaagagattaaagaggcatgacagctaactgtaatgtcatactgggatgggaaacaatggccatgaggtcattactgggacaactggcaaa

SEQ ID NO: 105794 - DNA, 1303 bp, Homo sapiens
gcagcagtcttcaacatttggttgcaaatctccatccacatcaggaagctttccccaggcaaatacaaaccgccccgtggcctgcaggcctgcaggggaggcagcaaagggacctggcagttgcaacacagtaagtcaggaattcaagcgtgaacccatattgataagtgggccagaattatttaggggcctggcttgctgctctccatttcctgtatcgctaatttatcatttttccaaccttggtattttatattatttagagaaaatgctgggtcactctctttgcctaaggtgactcaaacagccaaacgaaacttccgttgcctcccagccctctgtatccacctggttttgttctttccctgtgagcatttgtggttatagcttcccatatgccacattcaccggccacctcctcgccgtggaaccctgccctctcccctcctgctgctgtagagttttcccaaagcagtgtccaggagagaatttgagagagtgaagaaattgccttgtagatgtggagggctgcaatctgtcttgatttctccaagcacttaactttctttgactgcactgagaattgctaatgatctcccatgagatttgcttacttttgtatactgtattttccagcattacagaaccttggttattgttttttagccatagaatcttctagtaaaaaatatctgccaccattttagatttaagcatttgcctatggggagacactgaatatgtggatgtgtgtattaatatttggggtggggacagggaagggaatgtggaaaacaaatgctggctgtgagcagtgctgagatggccaggccaggcggctgagtttgcttggaaattcaggacattctgactcctaagagttgcccccacccaccatcaaactgaaatcagcaccaatggtgtcagcactttacagcccatagccaactttctttatttttaacgtagcacaaaaatgtataatagcaaggaaaagacatttttaaattccggttatttttattgtctaaaatgaaagcaacagtgttttgataaagatgaaaaagaaaagctactaaattagtaaatcagtggttacgtgccctgcagaatttcttaacagatggtgctgagtgcacgagttacataactttctctctaattgaggttcacaaggcgtcttctaaattttgctttgtacaattaattcatttctgatgttaaccaaatagagtgtatatatcctactcccattactgcctctttcccccctactatggcttgtagattttcaaaagataga

SEQ ID NO: 105795 - DNA, 454 bp, Homo sapiens
gtttgttatggcttgagctgagctttcgcttgccatccaccactgctgtttgccaccgtcgcagacccatcactgacttccacccctctggatccagcagggtgtctgctgcactcctgatccagcgaggtgcccattgccactcccaatcaggctaaaggctcgccattgttcctgcatggctaagtgcccaggttcgtcctagttgagctgaacactagtcgctgggttccatggttctcttccatgacccacggcttctaatagagctataacactcaccacatggtcccagattccattccttggaatccgtgaggccaagaaccccaggtcagagaacaagaggcttgccgccatcttggaaatggcccacgatcttgggagctctaagaacaaggaccaccccgccccggtaacattttggtgaccacgaagggacatccaaagtggt

SEQ ID NO: 105796 - DNA, 340 bp, Homo sapiens
gttgggggcaggctgggcaaactggagtgagcaaggcctacttatattttaatactttaaagttatttttattaaactgtctgctgtccaaacataatacatgttgtaggccaaaatggccatgaagctaccagtttgcaaaccctgaactgtgaaatcttttagccacttccctatcttctctgttggagccatcattagtacttaaaaaagtacctttgagtcagggagttctattctactctgtgtttgtgagaaatacggccctgcccctctgggccacagtttcctcatatgtaaaatggggccactcatgtccacttcccaaccccagtgcctt

SEQ ID NO: 105797 - DNA, 249 bp, Homo sapiens
tgagctcctacccgttatcgcggtacgttggggaagctaccagtttgcaaaccctgaactgtgaaatcttttagccacttccctatcttctctgttggagccatcattagtacttaaaaaagtacctttgagtcagggagttctattctactctgtgtttgtgagaaatacggccctgcccctctgggccacagtttcctcatatgtaaaatggggccactcatgtccacttcccaaccccagtgcctt

SEQ ID NO: 105798 - DNA, 675 bp, Homo sapiens
ttttttttaaaagatggagtctcaatccgtcgtccaaaaaaaaaaaaaaaaagagtcaagggccctgacagctaggaaggaaggcccaagaatgactagagaggaacagatgaacaaaatccccaggagatttgtccaccaggcccagggcctgaactttctttttctcaaacacagatgcaattccaggacaaaaacaaaaaacacttaagctctttccttaaccaggtcttctaggacacattccaggaatacgcatcgtggtcccctacagaacttgactctaaccatcttggcctgtgctggcacaggggtgacaatgggaaggcacagtggacaccctcaggagcgtaggggacatgcaggaggggccaacagaaacagtcctttcaaaaccacgcaatgcaatggctgccttgtcctaagggctaatcccaggaaaaggagcaggcagtgctgcccagcaggttctggaaaaccagcagccactcgctgatggtggcaatgtactccaagtccaagaggcttcatttgctcatctggttcctctgacccaggaacacatggaatggcttccacccacctccccactttgctctgatcccttcactgccagccctactccccggaagaggaaagagaaaggcaccacactcaacgctctatcaagaaggc

SEQ ID NO: 105799 - DNA, 309 bp, Homo sapiens
gaatctcaaaaggttggcactgctattcctgtttttacagaagaaaccgaagtacagagacatggagtagtctgatcttagtcacacagcacctatcatatcactctgtcagaacatggcgcactaggaggcagacacacacgcacattcgctgtctgttccctgccttgtcagggcacccaataatggtggctctctgtccccagcatggggcccaagatgagtcctcctttagcgagcagtgtcaatctggcatctctcaagcacgactttagaaaatgacggacagtgctcacgatcgatgaattc

SEQ ID NO: 105800 - DNA, 1461 bp, Homo sapiens
gaatctcaaaaggttggcactgctattcctgtttttacagaagaaaccgaagtacagagacatggagtagtctgatcttagtcacacagcacctatcatatcactctgtcagaacatggcgcactaggaggcagacacacacgcacattcgctgtctgttccctgccttgtcagggcacccaataatggtggctctctgtccccagcatggggcccaagatgagtcctcctttagtcagaggtgtgattctatccccagtcaccagggcttctaccacaaatgaaggacggtgaccaccctcaatgtcactgctgaactgggaaaccaggaaaagctatatgccttgtgggaacagcacataaaaaacatttcagatggacaggactggatgcagtgagtccatcctctccctccaagagctgaatggaatggttcaacctcaatggacctgagacgactctcttcaatgggtgaggccacttcatcactgtgcttcaacccagaaggatgaagctcattgttctgttcaagagttggccgggcgccgtggctcacgcctgtaatcccggcactttgagaggtcaaggcgggaagatcacttgatgtcaggagttcaaggccagcctgggcaacatggtgaaaccccatctctacaaaaaatacaaaaattagctgggcgtggtggtgcacacctgtagtcccagctactcgggagggctgaggcgggagaatcgcctgaaccccagagatggaggttgcagtgagccgagatcgtgcccctgtactccagcctgggcgacaaagtgagaatccgtcgtccaaaaaaaaaaaaaaaaagagtcaagggccctgacagctaggaaggaaggcccaagaatgactagagaggaacagatgaacaaaatccccaggagatttgtccaccaggcccagggcctgaactttctttttctcaaacacagatgcaattccaggacaaaaacaaaaaacacttaagctctttccttaaccaggtcttctaggacacattccaggaatacgcatcgtggtcccctacagaacttgactctaaccatcttggcctgtgctggcacaggggtgacaatgggaaggcacagtggacaccctcaggagcgtaggggacatgcaggaggggccaacagaaacagtcctttcaaaaccacgcaatgcaatggctgccttgtcctaagggctaatcccaggaaaaggagcaggcagtgctgcccagcaggttctggaaaaccagcagccactcgctgatggtggcaatgtactccaagtccaagaggcttcatttgctcatctggttcctctgacccaggaacacatggaatggcttccacccacctccccactttgctctgatcccttcactgccagccctactccccggaagaggaaagagaaaggcaccacactcaacgctctatcaagaaggc

SEQ ID NO: 105801 - DNA, 291 bp, Homo sapiens
tgagtggcagaagccattacgtggacccagtcttgtttccactctgcctttgcatagactatgccctctgcctggaatgctttacttattcatctggtaaaaggctactcactagaaagctgcttgggccaacacttatctgaagcctctccttcctttctacaattcatgagttcttcccttccacttctctgtttggcggtgatcatgtgtatttccgttctgtctctcccatcaaggacaggacctctgtctccctagccttgtcttgaatctccagcactcagcacg

SEQ ID NO: 105802 - DNA, 313 bp, Homo sapiens
tccttattatccatcattaatttagctaactacaacaaaagtataaatctgagtttaatacactcaaacacaacaactcatccataaggtttgttccccactctcctggcaaaactctttctttgtcctggtccaatatgaactggtaactctcaaagctgctgttcaatagtcattttgggattgtcctttgtcattatcccaataatcctctttgtcctgtttaatcttttcctgagttggaactcattttctgaatctcacattgttcttccatttactatctcatttagtgaagtatatacatacatcc

SEQ ID NO: 105803 - DNA, 336 bp, Homo sapiens
tgtagagatgtggtcttgctgtgttgccctggctggcaaaacttcatactttttgaccaacacctcctgattcctactccccgatccccagcctgtggtaatcattattctactcacaatttctctgagttggacttttttagattccatatataagtgagactgtatagtatttttctttctgtacctggcttatttcacttagcataatgtcctccagatttatccatactgttacaaatggtaggattttatcatgttcatattttaggaatggttgattataaaatgtttttataggtttgtttgaaaaccttttctaattattttatcatt

SEQ ID NO: 105804 - DNA, 201 bp, Homo sapiens
ggtaatgctgtcatgtaataggataataactgtttcttaaagatggttcaagctcccaagttggtattctgcagacataactgttctttgctgtttagaaataggggagtaactccagagttcattcctttgtatatgtatagtgttgttcattgtataaccttatttatttacctgaattgtcattatgtgtggttttac

SEQ ID NO: 105805 - DNA, 236 bp, Homo sapiens
cttggatttgaatcccagctatatcacttaagagttatgtgaactctgacaagttatttaatctctctgagccttgatttcatggtagtgaataccttatagggttaatatgaatattaaatattattttatgtatacatatatagtacaaagtatatgagcgtttaataaacattaattattattaatactatctcttatttattcagtaagcatttcttgagcaccaccgtgct

SEQ ID NO: 105806 - DNA, 793 bp, Homo sapiens
ttcaacctggcatgtaagcgtttgtctcctggtttttaagttttcattttttgcatcttggatatttccaagaattaaaaaaatccccaacttttcctttcgtttcagtctcctcacctccaggccacatttccatcaagtcttgtgttttctgtatattcccacactgtatcgtaactacttttccagttttcacagaagcagcttttccattggttggggcctctgcaggaggcttccccaggaaattgggatttctacaacaaattcatactcatatggtggtctttctgtgtagagtgcactgtggattcattctttcattttactcatggatccatgctgttaaattcacctattttaaaaatctcaaccatttttctaagaactagctgggtgcagtggctcacacctgtaatcccaacactttgggaggcagaggcaggaggatcacttgaaaccaggagttcaagaccttagcctagtcaacatactaagaccccatctctaccaaaaaatgttttaaaaccaagcaaggcatggtggcacatgctttcagccccagctagttgggaggctgaggcaggaggatcacttgagcccaggagtttgaggctgcagtgagctatgaccgagccaccacactccagcctgggtaacagtgagagaccctgtctctgaaagaaaaaaacaaaaaacaaaaaactatgcttttccatgtgtgcttcccttccatcacaagcactgcagccagtttgttgtggttgttttttagccttttgctccttgtccc

SEQ ID NO: 105807 - DNA, 690 bp, Homo sapiens
tctattcccagatgacattttaaaatttcttttctctcccatctccactttttaaaataaaccttctttttaattaagtctagtgctatgtctctcatatttggtaaattagtgtgtgtaattaactcatgttaataggtagatcaaggaagaattcagagaggagttgagaaatcatcagtcttttaactgatgagtttgtcaagtgatagaaaaagttaattgccttgtaggcaaatagaattctgtgtgcaaaatgcgtggaagcatgacattgggagttattctgcaaaaaatagcatttgcatttttgataggaagaaacagatagcacagagatttgggcaaaatcaataaaatttgttaattgaatgcaagagaaggaaaaatcaggatgactcctaggtttctggttagagtgactagctgaaggatgccatcagttgtgaggaatgtccttcttgaatctgaactgtcattttaggtaaggcattagtaattgaatatgtttctggctttgcttaatcatatgcaagattggaaagagttaaaacacttttaatgttaatcatatctttaccactgatttgtaaaatttcatcaagccactttaatttctgtctaggtattagttctgggcattagagaaacatagataaatactccctaccattgaagttcttatatgtg

SEQ ID NO: 105808 - DNA, 417 bp, Homo sapiens
gctagaaagggcctgggaggcggggctggaccttcctgcaagtcgcagctccacccctcactaactgttggccctcagcaagccgcgagctcaccgcaccccagactctagacccgtgcagtgggaaggatgacaacacccacttcactgagcccaccgcggctcagagggtggcatgctcccgccccaacaaagcagggggctgcacctccaggggctgtccctctgggcaccccactcctgggtagcaacttgaaagaggaggtctcggctgggcgcagtggctcacgcctgtaatctcagcactttgggaggccgaggcaggcggatcacaaggtcaggagatcgagaccatcttggctagcacggtgaaaccctgtctctactaaaaaatacaaaaaattagctgggcgtggt

SEQ ID NO: 105809 - DNA, 299 bp, Homo sapiens
ccagtagtgttatggggtggaaggaatcagcatcgagagttgctacgttatctaaatcgtccagttttcaacaataataacaaaaaaaaactatgaggcatataaggaaacagaagactgagaccaataaacagaaaaacacgcaacagtggccaggcgctgtggctcatgcctgtaatcctaacactctgggaggccgatgcaggtggatcacctgaggtcaggagttcatgaccagcctgaccaatatggtgaaaccccatctctactaaaaatacaaaaattagccgggcgtggcg

SEQ ID NO: 105810 - DNA, 312 bp, Homo sapiens
tccttattgacttaaccttgtgtagggtcacttcttcaaccccttgcccaaagctactttgcttttcacctaaatttttatgtcatattcagcaacgacagagtttcataaattatattagttgtattaaactcattattaaaaatcattgtgaatgcccacatggatggattataagccaccaattaaatcttcaatggacacaaaaacctaaggatgttgggaaaataaaagtatatatacttggatgattaaaagagagattgatatggctggagaggtaaattagggtcaaatgcaagatggctatat

SEQ ID NO: 105811 - DNA, 392 bp, Homo sapiens
atgtttttctatgaagtcaccgcaaacactggattatcaaatattgaaccagagctcctgtggaaagtgtagggtaagattcccacaagcctctgatcacaactttctcatcaaccagttaatgtgtaactgttttgcatgtttctgtttaaagacacctacttaatagatattgttaattcattgacatttgtcaatcaaatcaaaattaagtttataatttacaaactcaaggccaaagcactgtaactgatacctgaacaaagcttatctaatacacatactttctcaggaaggtgcatcctagcttcctggcacttaggaacacactagagagcactttaccactacacgtggggaccattttaaacagcaaaatcacacacacgcac

SEQ ID NO: 105812 - DNA, 367 bp, Homo sapiens
tgctgatgaaactgtcagggcctttgatagtatagggaaccaagagttgtgagagcagtaatggctctatgtaaagagagcagaagtaaaagatgcagaaagggcagcagcaattacttgtagaggttgttaataaattgcctatgaacaagtcatttgttcttgaaatgtggtaataatgctttttataggccaagttttaaaagcttaagttgtttttaaatacttggtggccgggcatggtagctcatgcctgtaatcccagcactttgggagaccaaggtgggcagattgcttgagcccaggagtttgagaccagcctgggcaacacagggagaccctgtctctacaaaaaatacaaaaagta

SEQ ID NO: 105813 - DNA, 560 bp, Homo sapiens
ctctctcaagaaaagtgccaaggcactcttaattggaggaaacagctaaacagaagagcaaaattaaatagtaaatggaatttgttatacagatcaacaaatgattttatttgtatcattaattcaagaggctttgtttcttagcatcatcaccacgtagttcctaacccaatgaagttgcaagacatcattttcttaagccctgaaattgttttaactagtctctaaatgtgaaatctttggcatatttcacattaaatttgaacagaagtacagtctactacactcgtataagtcaatgtcctaagttcatatcaattgatatatttttatgaaaaacataacacatatagtgttagtaaagaatagactagagaaaatggtgcattaaataacttctattttatgttacaaaatatatgaaaaactgaaggtatgagagccaattgagtgttaccaatataatgtcagctccttttcctacatatgaaagaaaattccattatattggtaacactcaattggctttcatacgtaggaaaaggagctgacattaatat

SEQ ID NO: 105814 - DNA, 944 bp, Homo sapiens
tgtgactgaactgctgcaacctcatgataaaagttgaacaaacgaggagttgcttcttatggatgagcaaagaaagtggtttcttgagatggaatctactcctggtgaagatgctgtggacattgttgaaatgacaacaaaggatttagactattgcataaatttagttgataaagcaatggcagggtttgagaggattggctccaattttgaaagacattctgccgtgggtaaaatgctatcaaacattggatgctacagagaaatctttcatgaaaggaagagtcaattgatggcacagacttcattattgtcttgttttaagaaattgccacagtaactcagccttcatcaaccactaccttgatcagtcagcagccataatattgaatcaaaaccttccaccagcaaaaagatgactcactgaaggctcatatgattatcatttttgttagcaataaaatattttttcattaaggtacgtacattgttctttcagacataatgctattatatacttaatagactgcagtataatagtgtaaacataacttttatatgcactgggaaaccagaaaatatgtgtgccttgctttattgtgatattcgctttattgtggtggtctggaaccaacccttcagtatgtctgaggtctgcctgtgaaccatgctaggccaaacaaaaaaaaaaaaggagatctgggcttgaggaggggcaggcaagttttgggagggtgactaggaaaagtgataaacaaggattgttgagtaaaatttgttttgcagattgagcctctctattgagagttgttagggagtcctcaccctgctacagcaggatacatcttttacaactgggagctttgtttacaaggaaaacttgcaccctgtttttagagcatttcctgcatctgcttgttctcagtggtctttagctcaaaata

SEQ ID NO: 105815 - DNA, 204 bp, Homo sapiens
acaagtttaaagaaaatgtacttgggattaataatggctccctagagatcagtgtggatgcaaaactatgatatgagcagcacgtttgctgaaattattttatgtggtctgaataagaggtgagcaggaatgaagcttgccaattagggcagacaccattccatgcaaacttagctggagtgattgtccaaagtggggaggaat

SEQ ID NO: 105816 - DNA, 650 bp, Homo sapiens
gagaataaagatttttccatttggatgttctaatgggggttcccagtacaatctttccaaaatggagagaaaaagcaaggaaaagccaaagacagcaagagtttcccagagcacagagccaggaagaggccaaaatgagctggccccagctgccagcccacagggagggtgtccagaacaccttgtccaaaagctcagcccagataaatggtcaaccccgcgtgggatctgctcaccagctctgaaggcggcccttggctgtggacataatcttctttccatttcttacattacatcagcagaaccactagcaagtagaatagaaatcccaactctcttttttcatgcctccagcctccttcatcactagttccaccaacacccctacaccctgaagtggaagttctaatcacaggttcgacacgaggccaagcaaattagctcggtagtacagacccaaaagtcaggtcaggagaacagcaattgtgtcagctctgaacatgcacatgcgaaggattctttcaggggatgctccgccttctctgacggagagcatatgctattccagtcactgagctcttgctctgtgcctggcagtgttttgagtgtttctgttttacgttaattaacccgtgccatcctcatcacca

SEQ ID NO: 105817 - DNA, 286 bp, Homo sapiens
atccgcctgcctcagcttcccaaagtgctgggattacaggtgtgagccaccacgcccggccccagcccaggaagttttgtggggaattttcctgacatggaatgactctagactgccgccgctgccgacaacaataacaaagtagataaagcctactggtatggcactcaactctttatgccgttggtcctcactgcagtcctgacgtagctaccattgttatctgcattttgtagaaagggacactaagggccatagagtattaagggacttgcccctaggttat

SEQ ID NO: 105818 - DNA, 281 bp, Homo sapiens
cataagaggtgagaggagtgggagtctattttagaaagataagatgccaaaaagaataaagtagctagtatttgaccacttactacgtgtcagacgctgttgagtgtattatttgcattgtctcaaactgaggcttagaaaagttaagtaacttgcccaaaatcgtaaagctgataaatgacagaggcaagaattaaacccagatctgtgacagcaaattccattttctaagtcacttcagtaaattgcctttctttgaatggaatcaggagattactttt

SEQ ID NO: 105819 - DNA, 200 bp, Homo sapiens
gattctaaaggaatgtctcaggatgtcaaggaaaagaaggggctccctatctttaactagaacatatgaaatgatacagaaaaaatggaaaataataaaaaaagaacccttgagaattaaatcttatctgacaatatccaatcagaataccactcatcatctctaccagtcctctctatgacaatgtagcatggttgtga
